United States Patent Application Publication US 2007/0042381 A1 - sequence listing, part 37

SEQ ID NO: 1645144 - RNA, 23 nt, Human
guaaggaauaccugucccccuga

SEQ ID NO: 1645145 - RNA, 21 nt, Human
guaaggaauaccugucccccu

SEQ ID NO: 1645146 - RNA, 20 nt, Human
guaaggaauaccuguccccc

SEQ ID NO: 1645147 - RNA, 18 nt, Human
guaaggaauaccuguccc

SEQ ID NO: 1645148 - RNA, 23 nt, Human
guaaauuaacuuuuauaaacuuu

SEQ ID NO: 1645149 - RNA, 23 nt, Human
guaaaaccacagcaguugaaaag

SEQ ID NO: 1645150 - RNA, 18 nt, Human
guaaaaccacagcaguug

SEQ ID NO: 1645151 - RNA, 16 nt, Human
guaaaaccacagcagu

SEQ ID NO: 1645152 - RNA, 15 nt, Human
guaaaaccacagcag

SEQ ID NO: 1645153 - RNA, 14 nt, Human
guaaaaccacagca

SEQ ID NO: 1645154 - RNA, 20 nt, Human
guaaaaacaaagaaauuaug

SEQ ID NO: 1645155 - RNA, 18 nt, Human
guaaaaacaaagaaauua

SEQ ID NO: 1645156 - RNA, 14 nt, Human
guaaaaauaaaauu

SEQ ID NO: 1645157 - RNA, 13 nt, Human
guaaaaauaaaau

SEQ ID NO: 1645158 - RNA, 20 nt, Human
gguuuucacauuggaaacaa

SEQ ID NO: 1645159 - RNA, 12 nt, Human
gguuuucuguuc

SEQ ID NO: 1645160 - RNA, 13 nt, Human
gguuuucuguucu

SEQ ID NO: 1645161 - RNA, 15 nt, Human
gguuuucuguucuuu

SEQ ID NO: 1645162 - RNA, 23 nt, Human
gguuuugccauguuggccaggcu

SEQ ID NO: 1645163 - RNA, 21 nt, Human
gguucaagcgauucuucugcu

SEQ ID NO: 1645164 - RNA, 17 nt, Human
gguggccucccaacuca

SEQ ID NO: 1645165 - RNA, 13 nt, Human
gguggccucccaa

SEQ ID NO: 1645166 - RNA, 20 nt, Human
gguggcccgacagccuggca

SEQ ID NO: 1645167 - RNA, 19 nt, Human
gguggcccgacagccuggc

SEQ ID NO: 1645168 - RNA, 18 nt, Human
gguggcccgacagccugg

SEQ ID NO: 1645169 - RNA, 17 nt, Human
gguggcccgacagccug

SEQ ID NO: 1645170 - RNA, 16 nt, Human
gguggcccgacagccu

SEQ ID NO: 1645171 - RNA, 14 nt, Human
gguugaagcaccaa

SEQ ID NO: 1645172 - RNA, 18 nt, Human
gguucuuucuuccucugc

SEQ ID NO: 1645173 - RNA, 12 nt, Human
gguucagcuugu

SEQ ID NO: 1645174 - RNA, 23 nt, Human
gguucaagcgauucuucugcuuc

SEQ ID NO: 1645175 - RNA, 22 nt, Human
gguucaagcgauucuucugcuu

SEQ ID NO: 1645176 - RNA, 20 nt, Human
gguucacugcaaccuccgcc

SEQ ID NO: 1645177 - RNA, 13 nt, Human
gguuuaagcuguu

SEQ ID NO: 1645178 - RNA, 13 nt, Human
gguuggugggggc

SEQ ID NO: 1645179 - RNA, 18 nt, Human
gguuggcaaaaaggcagg

SEQ ID NO: 1645180 - RNA, 14 nt, Human
gguugggcuggugu

SEQ ID NO: 1645181 - RNA, 22 nt, Human
gguagacacacaugaaguccaa

SEQ ID NO: 1645182 - RNA, 15 nt, Human
gguagacacacauga

SEQ ID NO: 1645183 - RNA, 16 nt, Human
ggucagagccugcagu

SEQ ID NO: 1645184 - RNA, 15 nt, Human
ggucagagccugcag

SEQ ID NO: 1645185 - RNA, 14 nt, Human
ggucagagccugca

SEQ ID NO: 1645186 - RNA, 13 nt, Human
ggucagagccugc

SEQ ID NO: 1645187 - RNA, 12 nt, Human
ggucagagccug

SEQ ID NO: 1645188 - RNA, 22 nt, Human
ggucacucuggcagcucagaga

SEQ ID NO: 1645189 - RNA, 20 nt, Human
ggucacucuggcagcucaga

SEQ ID NO: 1645190 - RNA, 16 nt, Human
ggucacucuggcagcu

SEQ ID NO: 1645191 - RNA, 23 nt, Human
ggucccccuuccauggacuuugu

SEQ ID NO: 1645192 - RNA, 18 nt, Human
ggucccccuuccauggac

SEQ ID NO: 1645193 - RNA, 13 nt, Human
ggucccccuucca

SEQ ID NO: 1645194 - RNA, 14 nt, Human
ggucccacucaguc

SEQ ID NO: 1645195 - RNA, 12 nt, Human
ggucccacucag

SEQ ID NO: 1645196 - RNA, 22 nt, Human
ggucccacucaguccauagcag

SEQ ID NO: 1645197 - RNA, 22 nt, Human
ggucccaccccacacacgccag

SEQ ID NO: 1645198 - RNA, 22 nt, Human
gguacuucaaauccuugaagau

SEQ ID NO: 1645199 - RNA, 21 nt, Human
gguacuuguggacacagcucu

SEQ ID NO: 1645200 - RNA, 22 nt, Human
gguacuuguggacacagcucuu

SEQ ID NO: 1645201 - RNA, 15 nt, Human
ggguugggcuggugu

SEQ ID NO: 1645202 - RNA, 17 nt, Human
gguacccacugcucugg

SEQ ID NO: 1645203 - RNA, 20 nt, Human
ggguuucaccauguuggcca

SEQ ID NO: 1645204 - RNA, 22 nt, Human
ggguucuacccaggugcuagga

SEQ ID NO: 1645205 - RNA, 23 nt, Human
ggguucccuuuuuuggcugcuga

SEQ ID NO: 1645206 - RNA, 19 nt, Human
ggguuggccccugcccggc

SEQ ID NO: 1645207 - RNA, 14 nt, Human
ggguucuuucuucc

SEQ ID NO: 1645208 - RNA, 16 nt, Human
ggguucuuucuuccuc

SEQ ID NO: 1645209 - RNA, 19 nt, Human
gggugcugggccccugccu

SEQ ID NO: 1645210 - RNA, 22 nt, Human
ggguuccagcaauucuccugcc

SEQ ID NO: 1645211 - RNA, 19 nt, Human
ggugcuacaaaaacacagc

SEQ ID NO: 1645212 - RNA, 21 nt, Human
ggugcuacaaaaacacagcaa

SEQ ID NO: 1645213 - RNA, 22 nt, Human
ggugcuaucucccccagcccca

SEQ ID NO: 1645214 - RNA, 23 nt, Human
ggugcuaucucccccagccccau

SEQ ID NO: 1645215 - RNA, 13 nt, Human
gguggcagcugcg

SEQ ID NO: 1645216 - RNA, 12 nt, Human
gguggcagcugc

SEQ ID NO: 1645217 - RNA, 11 nt, Human
gguggcagcug

SEQ ID NO: 1645218 - RNA, 13 nt, Human
gguggcagcucac

SEQ ID NO: 1645219 - RNA, 23 nt, Human
gguggcagcugcgguccacccag

SEQ ID NO: 1645220 - RNA, 15 nt, Human
gguggcagcugcggu

SEQ ID NO: 1645221 - RNA, 16 nt, Human
gguggcagugggagcu

SEQ ID NO: 1645222 - RNA, 19 nt, Human
ggugcccugcuuucagaua

SEQ ID NO: 1645223 - RNA, 22 nt, Human
ggugauagguauaaguggugug

SEQ ID NO: 1645224 - RNA, 21 nt, Human
ggugaccucugccugaaguca

SEQ ID NO: 1645225 - RNA, 16 nt, Human
ggugaccucugccuga

SEQ ID NO: 1645226 - RNA, 14 nt, Human
ggugaccucugccu

SEQ ID NO: 1645227 - RNA, 21 nt, Human
ggugacagagugagacucugu

SEQ ID NO: 1645228 - RNA, 16 nt, Human
ggugaacuugguuccc

SEQ ID NO: 1645229 - RNA, 19 nt, Human
ggucugaggaauccagacc

SEQ ID NO: 1645230 - RNA, 18 nt, Human
ggugaagugaagacaaug

SEQ ID NO: 1645231 - RNA, 20 nt, Human
ggugaauggcuuuguauaga

SEQ ID NO: 1645232 - RNA, 17 nt, Human
ggugaauggcuuuguau

SEQ ID NO: 1645233 - RNA, 14 nt, Human
ggugaauggcuuug

SEQ ID NO: 1645234 - RNA, 16 nt, Human
ggucugacccacugcu

SEQ ID NO: 1645235 - RNA, 15 nt, Human
ggucugacccacugc

SEQ ID NO: 1645236 - RNA, 20 nt, Human
ggucucgaacuccugaccuu

SEQ ID NO: 1645237 - RNA, 19 nt, Human
ggucucgaacuccugaccu

SEQ ID NO: 1645238 - RNA, 16 nt, Human
ggucucacucugucgc

SEQ ID NO: 1645239 - RNA, 12 nt, Human
ggucucacucug

SEQ ID NO: 1645240 - RNA, 22 nt, Human
ggucucacuauguugcccaggc

SEQ ID NO: 1645241 - RNA, 23 nt, Human
gguccuagaaauuccccacccug

SEQ ID NO: 1645242 - RNA, 18 nt, Human
gguccgugcuaaggacuu

SEQ ID NO: 1645243 - RNA, 17 nt, Human
gguccgugcuaaggacu

SEQ ID NO: 1645244 - RNA, 22 nt, Human
ggucccugguggcagcucaccu

SEQ ID NO: 1645245 - RNA, 16 nt, Human
gguccgugcuaaggac

SEQ ID NO: 1645246 - RNA, 14 nt, Human
ggucccugguggca

SEQ ID NO: 1645247 - RNA, 18 nt, Human
ggucccuaauaaagcugu

SEQ ID NO: 1645248 - RNA, 17 nt, Human
ggucccuaauaaagcug

SEQ ID NO: 1645249 - RNA, 16 nt, Human
ggucccuaauaaagcu

SEQ ID NO: 1645250 - RNA, 13 nt, Human
ggucccuaauaaa

SEQ ID NO: 1645251 - RNA, 12 nt, Human
ggucccuaauaa

SEQ ID NO: 1645252 - RNA, 23 nt, Human
gggguucccuuuuuuggcugcug

SEQ ID NO: 1645253 - RNA, 22 nt, Human
gggguucuuucuuccucugcug

SEQ ID NO: 1645254 - RNA, 20 nt, Human
gggguucuuucuuccucugc

SEQ ID NO: 1645255 - RNA, 23 nt, Human
ggguagagcggagaaaggaaggg

SEQ ID NO: 1645256 - RNA, 23 nt, Human
ggguacuuguggacacagcucuu

SEQ ID NO: 1645257 - RNA, 22 nt, Human
ggguacuuguggacacagcucu

SEQ ID NO: 1645258 - RNA, 19 nt, Human
ggguacuuguggacacagc

SEQ ID NO: 1645259 - RNA, 15 nt, Human
ggguacccacugcuc

SEQ ID NO: 1645260 - RNA, 13 nt, Human
ggguacccacugc

SEQ ID NO: 1645261 - RNA, 18 nt, Human
ggguacccacugcucugg

SEQ ID NO: 1645262 - RNA, 17 nt, Human
ggggcugggcagaggaa

SEQ ID NO: 1645263 - RNA, 16 nt, Human
ggggcugggcagagga

SEQ ID NO: 1645264 - RNA, 13 nt, Human
ggggcugggacau

SEQ ID NO: 1645265 - RNA, 18 nt, Human
gggcuucaguggcagcug

SEQ ID NO: 1645266 - RNA, 17 nt, Human
gggcuucaguggcagcu

SEQ ID NO: 1645267 - RNA, 16 nt, Human
gggcuucaguggcagc

SEQ ID NO: 1645268 - RNA, 15 nt, Human
gggcuucaguggcag

SEQ ID NO: 1645269 - RNA, 20 nt, Human
gggcuucaguggcagcugcu

SEQ ID NO: 1645270 - RNA, 19 nt, Human
gggcuucaguggcagcugc

SEQ ID NO: 1645271 - RNA, 19 nt, Human
gggcuucauccuccucaga

SEQ ID NO: 1645272 - RNA, 20 nt, Human
gggcuuggggaccagagcug

SEQ ID NO: 1645273 - RNA, 20 nt, Human
gggcuucauccuccucagau

SEQ ID NO: 1645274 - RNA, 21 nt, Human
gggcuuggggaccagagcugc

SEQ ID NO: 1645275 - RNA, 22 nt, Human
gggcuuggggaccagagcugcc

SEQ ID NO: 1645276 - RNA, 13 nt, Human
ggggaguggccac

SEQ ID NO: 1645277 - RNA, 17 nt, Human
ggggaucacagccucug

SEQ ID NO: 1645278 - RNA, 21 nt, Human
ggcucccacaggcccuuccuc

SEQ ID NO: 1645279 - RNA, 20 nt, Human
ggcucccacaggcccuuccu

SEQ ID NO: 1645280 - RNA, 12 nt, Human
gggccuggcuca

SEQ ID NO: 1645281 - RNA, 12 nt, Human
gggccuggccug

SEQ ID NO: 1645282 - RNA, 22 nt, Human
gggccuggcagccgugccuuca

SEQ ID NO: 1645283 - RNA, 10 nt, Human
gggccuggca

SEQ ID NO: 1645284 - RNA, 16 nt, Human
gggccuggcucaggug

SEQ ID NO: 1645285 - RNA, 14 nt, Human
gggccuggcucagg

SEQ ID NO: 1645286 - RNA, 18 nt, Human
gggccuggucguuuucaa

SEQ ID NO: 1645287 - RNA, 23 nt, Human
gggcucccuucccaccucucuca

SEQ ID NO: 1645288 - RNA, 18 nt, Human
gggcucccuucccaccuc

SEQ ID NO: 1645289 - RNA, 17 nt, Human
gggcucccuucccaccu

SEQ ID NO: 1645290 - RNA, 14 nt, Human
gggcucccuuccca

SEQ ID NO: 1645291 - RNA, 13 nt, Human
gggcucccuuccc

SEQ ID NO: 1645292 - RNA, 16 nt, Human
gggcgcgguggcucac

SEQ ID NO: 1645293 - RNA, 14 nt, Human
gggcugcaccggcu

SEQ ID NO: 1645294 - RNA, 16 nt, Human
gggcugaggugggagg

SEQ ID NO: 1645295 - RNA, 17 nt, Human
gggcugcaccggcuggc

SEQ ID NO: 1645296 - RNA, 14 nt, Human
gggcuucaguggca

SEQ ID NO: 1645297 - RNA, 20 nt, Human
gggcucugccucccaucacc

SEQ ID NO: 1645298 - RNA, 17 nt, Human
gggcucugccucccauc

SEQ ID NO: 1645299 - RNA, 16 nt, Human
gggcucugccucccau

SEQ ID NO: 1645300 - RNA, 15 nt, Human
gggcucugccuccca

SEQ ID NO: 1645301 - RNA, 13 nt, Human
gggcucugccucc

SEQ ID NO: 1645302 - RNA, 22 nt, Human
guauuucuaugaaauauuaugu

SEQ ID NO: 1645303 - RNA, 17 nt, Human
guauuucuaugaaauau

SEQ ID NO: 1645304 - RNA, 19 nt, Human
guauuuauuuaguauuuau

SEQ ID NO: 1645305 - RNA, 14 nt, Human
guauuauaccuuuu

SEQ ID NO: 1645306 - RNA, 15 nt, Human
guauuauguguguuu

SEQ ID NO: 1645307 - RNA, 15 nt, Human
guauuacuucugcua

SEQ ID NO: 1645308 - RNA, 14 nt, Human
guauuacuucugcu

SEQ ID NO: 1645309 - RNA, 13 nt, Human
guauuacuucugc

SEQ ID NO: 1645310 - RNA, 22 nt, Human
guauuacaguggggaaugaaga

SEQ ID NO: 1645311 - RNA, 13 nt, Human
guagagugggagc

SEQ ID NO: 1645312 - RNA, 15 nt, Human
guagagugggagcug

SEQ ID NO: 1645313 - RNA, 20 nt, Human
guauuacaguggggaaugaa

SEQ ID NO: 1645314 - RNA, 18 nt, Human
guauuuuaaaagaaugau

SEQ ID NO: 1645315 - RNA, 19 nt, Human
gucaagagggucugaggaa

SEQ ID NO: 1645316 - RNA, 18 nt, Human
gucaagagggucugagga

SEQ ID NO: 1645317 - RNA, 17 nt, Human
guauuuuaaaagaauga

SEQ ID NO: 1645318 - RNA, 16 nt, Human
guauuuuaaaagaaug

SEQ ID NO: 1645319 - RNA, 18 nt, Human
gucaagugaaaaaggagg

SEQ ID NO: 1645320 - RNA, 16 nt, Human
gucaagugaaaaagga

SEQ ID NO: 1645321 - RNA, 19 nt, Human
gucaagugaaaaaggagga

SEQ ID NO: 1645322 - RNA, 21 nt, Human
gucaauaaaauccauacauuu

SEQ ID NO: 1645323 - RNA, 15 nt, Human
gucaauaaaauccau

SEQ ID NO: 1645324 - RNA, 15 nt, Human
gucaauuacaggaag

SEQ ID NO: 1645325 - RNA, 13 nt, Human
gucaauuacagga

SEQ ID NO: 1645326 - RNA, 16 nt, Human
gucaauuacaggaagu

SEQ ID NO: 1645327 - RNA, 14 nt, Human
gucaccucauggaa

SEQ ID NO: 1645328 - RNA, 20 nt, Human
gucaccugaagacucauucu

SEQ ID NO: 1645329 - RNA, 15 nt, Human
gucaccccggccacc

SEQ ID NO: 1645330 - RNA, 13 nt, Human
gucaccccggcca

SEQ ID NO: 1645331 - RNA, 20 nt, Human
gucccagccagcaguucaga

SEQ ID NO: 1645332 - RNA, 17 nt, Human
gucccagauacuugggg

SEQ ID NO: 1645333 - RNA, 15 nt, Human
gucccacucagucca

SEQ ID NO: 1645334 - RNA, 14 nt, Human
gucccacucagucc

SEQ ID NO: 1645335 - RNA, 16 nt, Human
guccacccaggagccc

SEQ ID NO: 1645336 - RNA, 15 nt, Human
guccacccaggagcc

SEQ ID NO: 1645337 - RNA, 14 nt, Human
guccacccaggagc

SEQ ID NO: 1645338 - RNA, 21 nt, Human
gucauauaagauucauauuua

SEQ ID NO: 1645339 - RNA, 16 nt, Human
gucaucucagcuggau

SEQ ID NO: 1645340 - RNA, 21 nt, Human
gucugaggaauccagacccgg

SEQ ID NO: 1645341 - RNA, 19 nt, Human
gucugauucccaagcucug

SEQ ID NO: 1645342 - RNA, 18 nt, Human
gucugauucccaagcucu

SEQ ID NO: 1645343 - RNA, 17 nt, Human
gucugauucccaagcuc

SEQ ID NO: 1645344 - RNA, 21 nt, Human
gucugauucccaagcucugcu

SEQ ID NO: 1645345 - RNA, 20 nt, Human
gucugauucccaagcucugc

SEQ ID NO: 1645346 - RNA, 19 nt, Human
gucugaggaauccagaccc

SEQ ID NO: 1645347 - RNA, 18 nt, Human
gucugaggaauccagacc

SEQ ID NO: 1645348 - RNA, 15 nt, Human
gucugacccacugcu

SEQ ID NO: 1645349 - RNA, 17 nt, Human
gucucuucuccacugga

SEQ ID NO: 1645350 - RNA, 14 nt, Human
gucugacccacugc

SEQ ID NO: 1645351 - RNA, 13 nt, Human
gucugacccacug

SEQ ID NO: 1645352 - RNA, 14 nt, Human
gucucuucuccacu

SEQ ID NO: 1645353 - RNA, 16 nt, Human
gucucuucuccacugg

SEQ ID NO: 1645354 - RNA, 15 nt, Human
gucucuucuccacug

SEQ ID NO: 1645355 - RNA, 23 nt, Human
gucuacacuaagagagaaugaga

SEQ ID NO: 1645356 - RNA, 15 nt, Human
gucuacacugugcug

SEQ ID NO: 1645357 - RNA, 17 nt, Human
gucuacacuaagagaga

SEQ ID NO: 1645358 - RNA, 17 nt, Human
guccuuaccagcagagc

SEQ ID NO: 1645359 - RNA, 16 nt, Human
guccuuaccagcagag

SEQ ID NO: 1645360 - RNA, 15 nt, Human
guccuuaccagcaga

SEQ ID NO: 1645361 - RNA, 18 nt, Human
guccuuaccagcagagca

SEQ ID NO: 1645362 - RNA, 19 nt, Human
gucucacuguugcccaggc

SEQ ID NO: 1645363 - RNA, 18 nt, Human
gucucacuguugcccagg

SEQ ID NO: 1645364 - RNA, 17 nt, Human
gucucacuguugcccag

SEQ ID NO: 1645365 - RNA, 16 nt, Human
gucucacuguugccca

SEQ ID NO: 1645366 - RNA, 23 nt, Human
gucucacuauguugcccaggcag

SEQ ID NO: 1645367 - RNA, 13 nt, Human
gucucacuguugc

SEQ ID NO: 1645368 - RNA, 21 nt, Human
gucucacuauguugcccaggc

SEQ ID NO: 1645369 - RNA, 20 nt, Human
gucucacuauguugcccagg

SEQ ID NO: 1645370 - RNA, 23 nt, Human
gucucacuguugcccaggcuggc

SEQ ID NO: 1645371 - RNA, 22 nt, Human
gucucacuguugcccaggcugg

SEQ ID NO: 1645372 - RNA, 21 nt, Human
gucucacuguugcccaggcug

SEQ ID NO: 1645373 - RNA, 20 nt, Human
gucucacuguugcccaggcu

SEQ ID NO: 1645374 - RNA, 11 nt, Human
gucucacucug

SEQ ID NO: 1645375 - RNA, 13 nt, Human
gucuaccugaggg

SEQ ID NO: 1645376 - RNA, 13 nt, Human
gucucagauuuua

SEQ ID NO: 1645377 - RNA, 12 nt, Human
gucccagugccg

SEQ ID NO: 1645378 - RNA, 17 nt, Human
gucccugguggcagcuc

SEQ ID NO: 1645379 - RNA, 16 nt, Human
gucccugguggcagcu

SEQ ID NO: 1645380 - RNA, 23 nt, Human
guccuacucugugucaggugggg

SEQ ID NO: 1645381 - RNA, 15 nt, Human
guccuacucuguguc

SEQ ID NO: 1645382 - RNA, 23 nt, Human
guccuagaaauuccccacccuga

SEQ ID NO: 1645383 - RNA, 20 nt, Human
guccuggggaaccugacccc

SEQ ID NO: 1645384 - RNA, 19 nt, Human
guccuggggaaccugaccc

SEQ ID NO: 1645385 - RNA, 18 nt, Human
guccugggagugagcugg

SEQ ID NO: 1645386 - RNA, 17 nt, Human
guccugggagugagcug

SEQ ID NO: 1645387 - RNA, 19 nt, Human
guccugggagugagcuggu

SEQ ID NO: 1645388 - RNA, 17 nt, Human
guccuggcaugggaaug

SEQ ID NO: 1645389 - RNA, 16 nt, Human
guccugggagugagcu

SEQ ID NO: 1645390 - RNA, 15 nt, Human
guccugggagugagc

SEQ ID NO: 1645391 - RNA, 23 nt, Human
guccucccaucucacacaugagc

SEQ ID NO: 1645392 - RNA, 14 nt, Human
guccucccaucuca

SEQ ID NO: 1645393 - RNA, 13 nt, Human
guccucccaucuc

SEQ ID NO: 1645394 - RNA, 12 nt, Human
guccucccaucu

SEQ ID NO: 1645395 - RNA, 19 nt, Human
gugaaaggaaagagggagg

SEQ ID NO: 1645396 - RNA, 13 nt, Human
gugaaaucauuca

SEQ ID NO: 1645397 - RNA, 20 nt, Human
gugaaauuauucauaauuau

SEQ ID NO: 1645398 - RNA, 18 nt, Human
gugaaauuauucauaauu

SEQ ID NO: 1645399 - RNA, 14 nt, Human
gugaaucagagcac

SEQ ID NO: 1645400 - RNA, 14 nt, Human
gugaauggcuuugu

SEQ ID NO: 1645401 - RNA, 13 nt, Human
gugaauggcuuug

SEQ ID NO: 1645402 - RNA, 19 nt, Human
gugaauggcuuuguauaga

SEQ ID NO: 1645403 - RNA, 18 nt, Human
gugaauggcuuuguauag

SEQ ID NO: 1645404 - RNA, 17 nt, Human
gugaauggcuuuguaua

SEQ ID NO: 1645405 - RNA, 16 nt, Human
gugaaaaugugugugu

SEQ ID NO: 1645406 - RNA, 23 nt, Human
gugaaaagaaaaaugagccuggc

SEQ ID NO: 1645407 - RNA, 14 nt, Human
gugaaaagaaaaau

SEQ ID NO: 1645408 - RNA, 20 nt, Human
gugaaacucguuaauuugua

SEQ ID NO: 1645409 - RNA, 12 nt, Human
gugaaacuggau

SEQ ID NO: 1645410 - RNA, 19 nt, Human
gugaaagaaaauaacaaua

SEQ ID NO: 1645411 - RNA, 16 nt, Human
gugagcagucaggaaa

SEQ ID NO: 1645412 - RNA, 17 nt, Human
gugagcaggcugugagu

SEQ ID NO: 1645413 - RNA, 17 nt, Human
gugacugaucucucgug

SEQ ID NO: 1645414 - RNA, 13 nt, Human
gugagccacugca

SEQ ID NO: 1645415 - RNA, 21 nt, Human
gugagccaccgugccuggcca

SEQ ID NO: 1645416 - RNA, 17 nt, Human
gugagccaccgugccug

SEQ ID NO: 1645417 - RNA, 15 nt, Human
gugagccaccacgcc

SEQ ID NO: 1645418 - RNA, 15 nt, Human
gugagccaccgugcc

SEQ ID NO: 1645419 - RNA, 16 nt, Human
gugagccaccacgccc

SEQ ID NO: 1645420 - RNA, 19 nt, Human
gugaggaagccgcuggggc

SEQ ID NO: 1645421 - RNA, 16 nt, Human
gugaggaagccgcugg

SEQ ID NO: 1645422 - RNA, 11 nt, Human
gugaggaagcc

SEQ ID NO: 1645423 - RNA, 14 nt, Human
gugagccacugcac

SEQ ID NO: 1645424 - RNA, 22 nt, Human
gugagccaccgugccuggccac

SEQ ID NO: 1645425 - RNA, 16 nt, Human
gugacaagcucacaga

SEQ ID NO: 1645426 - RNA, 16 nt, Human
gugacaacacuugugu

SEQ ID NO: 1645427 - RNA, 12 nt, Human
gugaccucugcc

SEQ ID NO: 1645428 - RNA, 16 nt, Human
gugaccucagcuuuga

SEQ ID NO: 1645429 - RNA, 16 nt, Human
gugacugaauuucuuu

SEQ ID NO: 1645430 - RNA, 18 nt, Human
gugacugaauuucuuuug

SEQ ID NO: 1645431 - RNA, 15 nt, Human
gugacugaauuucuu

SEQ ID NO: 1645432 - RNA, 18 nt, Human
gugcaaauugucacagga

SEQ ID NO: 1645433 - RNA, 22 nt, Human
gugcaaaguucccuacuuccug

SEQ ID NO: 1645434 - RNA, 19 nt, Human
gugcauaaguuaacuucca

SEQ ID NO: 1645435 - RNA, 22 nt, Human
gugccagguuuuuggucugacc

SEQ ID NO: 1645436 - RNA, 22 nt, Human
gugcaugcugucccuuacguga

SEQ ID NO: 1645437 - RNA, 20 nt, Human
gugccagguuuuuggucuga

SEQ ID NO: 1645438 - RNA, 18 nt, Human
gugcaucucagcccacau

SEQ ID NO: 1645439 - RNA, 18 nt, Human
gugcaugcagcaucuaag

SEQ ID NO: 1645440 - RNA, 13 nt, Human
gugcauaccacuu

SEQ ID NO: 1645441 - RNA, 14 nt, Human
gugcauaccacuuu

SEQ ID NO: 1645442 - RNA, 21 nt, Human
gugcauaccacuuuuguucuu

SEQ ID NO: 1645443 - RNA, 15 nt, Human
gugcaucucagccca

SEQ ID NO: 1645444 - RNA, 20 nt, Human
gugcccacaggaucagucug

SEQ ID NO: 1645445 - RNA, 20 nt, Human
gugauccacccaccucagcc

SEQ ID NO: 1645446 - RNA, 18 nt, Human
gugauccacccaccucag

SEQ ID NO: 1645447 - RNA, 15 nt, Human
gugauccacccaccu

SEQ ID NO: 1645448 - RNA, 13 nt, Human
gugaggccagaga

SEQ ID NO: 1645449 - RNA, 11 nt, Human
gugaggccaga

SEQ ID NO: 1645450 - RNA, 23 nt, Human
gugaggauuaaauaauguaaaua

SEQ ID NO: 1645451 - RNA, 18 nt, Human
gugauccucccaccucag

SEQ ID NO: 1645452 - RNA, 15 nt, Human
gugauccucccaccu

SEQ ID NO: 1645453 - RNA, 14 nt, Human
gugauccucccacc

SEQ ID NO: 1645454 - RNA, 22 nt, Human
gugauccacccaccucagccuc

SEQ ID NO: 1645455 - RNA, 14 nt, Human
gugauccacucgcc

SEQ ID NO: 1645456 - RNA, 22 nt, Human
gugauccucccaccucagccuc

SEQ ID NO: 1645457 - RNA, 20 nt, Human
gugauccucccaccucagcc

SEQ ID NO: 1645458 - RNA, 23 nt, Human
gugauccucccaccucagccucc

SEQ ID NO: 1645459 - RNA, 20 nt, Human
gugauucacagugugaaucu

SEQ ID NO: 1645460 - RNA, 23 nt, Human
gugauucuccugccucagccucc

SEQ ID NO: 1645461 - RNA, 22 nt, Human
gugauucuccugccucagccuc

SEQ ID NO: 1645462 - RNA, 20 nt, Human
gugauucuccugccucagcc

SEQ ID NO: 1645463 - RNA, 19 nt, Human
gugauucuccugccucagc

SEQ ID NO: 1645464 - RNA, 18 nt, Human
gugauucuccugccucag

SEQ ID NO: 1645465 - RNA, 17 nt, Human
gugauucuccugccuca

SEQ ID NO: 1645466 - RNA, 16 nt, Human
gugauucuccugccuc

SEQ ID NO: 1645467 - RNA, 14 nt, Human
gugauucuccugcc

SEQ ID NO: 1645468 - RNA, 20 nt, Human
gugauucucaugccucagcc

SEQ ID NO: 1645469 - RNA, 21 nt, Human
gugccuuggggacaagagcag

SEQ ID NO: 1645470 - RNA, 22 nt, Human
gugccgagaaggaagccuccca

SEQ ID NO: 1645471 - RNA, 16 nt, Human
gugcucuggacaggca

SEQ ID NO: 1645472 - RNA, 15 nt, Human
gugcucuggacaggc

SEQ ID NO: 1645473 - RNA, 20 nt, Human
gugcugaaugguuuucaaaa

SEQ ID NO: 1645474 - RNA, 19 nt, Human
gugcugaaugguuuucaaa

SEQ ID NO: 1645475 - RNA, 23 nt, Human
gugcugaaugguuuucaaaauaa

SEQ ID NO: 1645476 - RNA, 18 nt, Human
gugcucuggacaggcaug

SEQ ID NO: 1645477 - RNA, 17 nt, Human
gugcucuggacaggcau

SEQ ID NO: 1645478 - RNA, 19 nt, Human
gugcugagucugaaggcug

SEQ ID NO: 1645479 - RNA, 18 nt, Human
gugcugagucugaaggcu

SEQ ID NO: 1645480 - RNA, 17 nt, Human
gugcugagucugaaggc

SEQ ID NO: 1645481 - RNA, 16 nt, Human
gugcugagucugaagg

SEQ ID NO: 1645482 - RNA, 12 nt, Human
gugcugagucug

SEQ ID NO: 1645483 - RNA, 19 nt, Human
gugcugccauccagguuca

SEQ ID NO: 1645484 - RNA, 18 nt, Human
gugcugccauccagguuc

SEQ ID NO: 1645485 - RNA, 15 nt, Human
gugcugccauccagg

SEQ ID NO: 1645486 - RNA, 12 nt, Human
gugcugccacac

SEQ ID NO: 1645487 - RNA, 12 nt, Human
gugcugcauuua

SEQ ID NO: 1645488 - RNA, 19 nt, Human
gugcugcauuuaaaagaua

SEQ ID NO: 1645489 - RNA, 20 nt, Human
gugcugcauuuaaaagauac

SEQ ID NO: 1645490 - RNA, 18 nt, Human
guggaaaaauagccugcc

SEQ ID NO: 1645491 - RNA, 12 nt, Human
gugcugcccugc

SEQ ID NO: 1645492 - RNA, 11 nt, Human
gugcugcccug

SEQ ID NO: 1645493 - RNA, 22 nt, Human
gugcugccauccagguucagcu

SEQ ID NO: 1645494 - RNA, 21 nt, Human
gugcugccacacuucaggcuc

SEQ ID NO: 1645495 - RNA, 15 nt, Human
gugcuuggaggaagg

SEQ ID NO: 1645496 - RNA, 13 nt, Human
gugcuuggaggaa

SEQ ID NO: 1645497 - RNA, 12 nt, Human
gugcuuggagga

SEQ ID NO: 1645498 - RNA, 18 nt, Human
gugcuuauguaugaggua

SEQ ID NO: 1645499 - RNA, 17 nt, Human
guggaguucaucuugaa

SEQ ID NO: 1645500 - RNA, 18 nt, Human
guggaugccugguggcag

SEQ ID NO: 1645501 - RNA, 16 nt, Human
guggaugccugguggc

SEQ ID NO: 1645502 - RNA, 20 nt, Human
guggagaagcggcuggcagc

SEQ ID NO: 1645503 - RNA, 13 nt, Human
guggacuuuuauu

SEQ ID NO: 1645504 - RNA, 18 nt, Human
guggagaggcccggccuc

SEQ ID NO: 1645505 - RNA, 19 nt, Human
guggcagcugcuuuugucu

SEQ ID NO: 1645506 - RNA, 13 nt, Human
guggcagcugcuu

SEQ ID NO: 1645507 - RNA, 12 nt, Human
guggcagcugcu

SEQ ID NO: 1645508 - RNA, 23 nt, Human
guggcagcugcgguccacccagg

SEQ ID NO: 1645509 - RNA, 22 nt, Human
guggcagcugcgguccacccag

SEQ ID NO: 1645510 - RNA, 21 nt, Human
guggcagcugcgguccaccca

SEQ ID NO: 1645511 - RNA, 20 nt, Human
guggaugccugguggcagcu

SEQ ID NO: 1645512 - RNA, 17 nt, Human
guggcagugggagcugc

SEQ ID NO: 1645513 - RNA, 16 nt, Human
guggcagugggagcug

SEQ ID NO: 1645514 - RNA, 15 nt, Human
guggcagugggagcu

SEQ ID NO: 1645515 - RNA, 11 nt, Human
guggcagucug

SEQ ID NO: 1645516 - RNA, 21 nt, Human
guggcagugggagcugccugu

SEQ ID NO: 1645517 - RNA, 19 nt, Human
guggcagugggagcugccu

SEQ ID NO: 1645518 - RNA, 21 nt, Human
guggccacuccagaccccugg

SEQ ID NO: 1645519 - RNA, 19 nt, Human
uaugaccacacuccagcug

SEQ ID NO: 1645520 - RNA, 14 nt, Human
uaugaccacacucc

SEQ ID NO: 1645521 - RNA, 22 nt, Human
uaugacacaugcaaggucauuu

SEQ ID NO: 1645522 - RNA, 12 nt, Human
uaugacacaugc

SEQ ID NO: 1645523 - RNA, 23 nt, Human
uaugaauuacauuuguauaaaau

SEQ ID NO: 1645524 - RNA, 17 nt, Human
uaugaauuacauuugua

SEQ ID NO: 1645525 - RNA, 23 nt, Human
uaucugucauuugagcagggcuc

SEQ ID NO: 1645526 - RNA, 21 nt, Human
uaucugucauuugagcagggc

SEQ ID NO: 1645527 - RNA, 20 nt, Human
uaucugucauuugagcaggg

SEQ ID NO: 1645528 - RNA, 14 nt, Human
uaucuugaagacuu

SEQ ID NO: 1645529 - RNA, 18 nt, Human
uaugaauaaagacaccua

SEQ ID NO: 1645530 - RNA, 20 nt, Human
uaugaaguuuuuuuuauaca

SEQ ID NO: 1645531 - RNA, 14 nt, Human
uauccuucagccug

SEQ ID NO: 1645532 - RNA, 15 nt, Human
uauccuucagccuga

SEQ ID NO: 1645533 - RNA, 18 nt, Human
uaucguaaaauuaagaaa

SEQ ID NO: 1645534 - RNA, 15 nt, Human
uaucguaaaauuaag

SEQ ID NO: 1645535 - RNA, 19 nt, Human
uauauguuuuaagaggcag

SEQ ID NO: 1645536 - RNA, 16 nt, Human
uaucgucacugcuuaa

SEQ ID NO: 1645537 - RNA, 21 nt, Human
uaucuaauauguaacaagcca

SEQ ID NO: 1645538 - RNA, 17 nt, Human
uaucugaggaauucugu

SEQ ID NO: 1645539 - RNA, 22 nt, Human
uaucugaggaauucuguauaga

SEQ ID NO: 1645540 - RNA, 21 nt, Human
uaucugaggaauucuguauag

SEQ ID NO: 1645541 - RNA, 19 nt, Human
uaucugaggaauucuguau

SEQ ID NO: 1645542 - RNA, 18 nt, Human
uaucugaggaauucugua

SEQ ID NO: 1645543 - RNA, 16 nt, Human
uaugcuucuguuuuau

SEQ ID NO: 1645544 - RNA, 15 nt, Human
uaugcuucuguuuua

SEQ ID NO: 1645545 - RNA, 22 nt, Human
uaugcuuauacacuuacacuuu

SEQ ID NO: 1645546 - RNA, 13 nt, Human
uaugcaugaagua

SEQ ID NO: 1645547 - RNA, 18 nt, Human
uaugcaugaaguaauaug

SEQ ID NO: 1645548 - RNA, 20 nt, Human
uaugcauauuauuuuauguu

SEQ ID NO: 1645549 - RNA, 18 nt, Human
uaugcagagguccacaac

SEQ ID NO: 1645550 - RNA, 17 nt, Human
uauggacaaugacccag

SEQ ID NO: 1645551 - RNA, 19 nt, Human
uauggaacacucugagacu

SEQ ID NO: 1645552 - RNA, 18 nt, Human
uauggaacacucugagac

SEQ ID NO: 1645553 - RNA, 17 nt, Human
uauggaacacucugaga

SEQ ID NO: 1645554 - RNA, 16 nt, Human
uauggaacacucugag

SEQ ID NO: 1645555 - RNA, 13 nt, Human
uauggaacacucu

SEQ ID NO: 1645556 - RNA, 14 nt, Human
uaugcaaagcacug

SEQ ID NO: 1645557 - RNA, 13 nt, Human
uaugcaaagcacu

SEQ ID NO: 1645558 - RNA, 12 nt, Human
uaugcaaagcac

SEQ ID NO: 1645559 - RNA, 18 nt, Human
uaugauuuggaaaauaaa

SEQ ID NO: 1645560 - RNA, 17 nt, Human
uaugauuuggaaaauaa

SEQ ID NO: 1645561 - RNA, 15 nt, Human
uaugauuuggaaaau

SEQ ID NO: 1645562 - RNA, 15 nt, Human
uaugcaaagcacuga

SEQ ID NO: 1645563 - RNA, 18 nt, Human
uaugcaaucaaaucugcu

SEQ ID NO: 1645564 - RNA, 13 nt, Human
uaugcacacauuu

SEQ ID NO: 1645565 - RNA, 14 nt, Human
uaugcacacauuuu

SEQ ID NO: 1645566 - RNA, 16 nt, Human
uaugauucccagccag

SEQ ID NO: 1645567 - RNA, 21 nt, Human
uaugauucaaaugucuauaaa

SEQ ID NO: 1645568 - RNA, 16 nt, Human
uaugauucaaaugucu

SEQ ID NO: 1645569 - RNA, 16 nt, Human
uaugacuccagaauuu

SEQ ID NO: 1645570 - RNA, 23 nt, Human
uaugacuccagaauuucccaaag

SEQ ID NO: 1645571 - RNA, 17 nt, Human
uaugacuccagaauuuc

SEQ ID NO: 1645572 - RNA, 16 nt, Human
uaguauuucuaugaaa

SEQ ID NO: 1645573 - RNA, 19 nt, Human
uaguauuucuaugaaauau

SEQ ID NO: 1645574 - RNA, 18 nt, Human
uaguauuucuaugaaaua

SEQ ID NO: 1645575 - RNA, 15 nt, Human
uaguaugaggcauuu

SEQ ID NO: 1645576 - RNA, 18 nt, Human
uaggugcuacaaaaacac

SEQ ID NO: 1645577 - RNA, 23 nt, Human
uaggugacagagugagacucugu

SEQ ID NO: 1645578 - RNA, 21 nt, Human
uaggugauccacucgccuuca

SEQ ID NO: 1645579 - RNA, 13 nt, Human
uaguaucaaaaga

SEQ ID NO: 1645580 - RNA, 15 nt, Human
uagugcaaauuguca

SEQ ID NO: 1645581 - RNA, 14 nt, Human
uagugcaaauuguc

SEQ ID NO: 1645582 - RNA, 14 nt, Human
uagucaaauugugu

SEQ ID NO: 1645583 - RNA, 13 nt, Human
uagucaaauugug

SEQ ID NO: 1645584 - RNA, 20 nt, Human
uaguugcaacuuuguauaaa

SEQ ID NO: 1645585 - RNA, 13 nt, Human
uaguguucauaaa

SEQ ID NO: 1645586 - RNA, 18 nt, Human
uaggccaugggacaggga

SEQ ID NO: 1645587 - RNA, 18 nt, Human
uaggccuggccagaugca

SEQ ID NO: 1645588 - RNA, 17 nt, Human
uaggccguuccuucaaa

SEQ ID NO: 1645589 - RNA, 15 nt, Human
uaggccuggccagau

SEQ ID NO: 1645590 - RNA, 12 nt, Human
uaggaauugacc

SEQ ID NO: 1645591 - RNA, 16 nt, Human
uaggucagugcaaaua

SEQ ID NO: 1645592 - RNA, 15 nt, Human
uaggucucaauaccu

SEQ ID NO: 1645593 - RNA, 16 nt, Human
uagguaaauuacaguu

SEQ ID NO: 1645594 - RNA, 20 nt, Human
uagguauaaguggugugugu

SEQ ID NO: 1645595 - RNA, 21 nt, Human
uagggaaaaaccagcguguga

SEQ ID NO: 1645596 - RNA, 20 nt, Human
uagggaaaaaccagcgugug

SEQ ID NO: 1645597 - RNA, 19 nt, Human
uagggaaaaaccagcgugu

SEQ ID NO: 1645598 - RNA, 13 nt, Human
uauaugcuucugu

SEQ ID NO: 1645599 - RNA, 21 nt, Human
uauaugcucugcauguuacau

SEQ ID NO: 1645600 - RNA, 13 nt, Human
uauauaacaaugc

SEQ ID NO: 1645601 - RNA, 22 nt, Human
uauaucugaggaauucuguaua

SEQ ID NO: 1645602 - RNA, 21 nt, Human
uauaucugaggaauucuguau

SEQ ID NO: 1645603 - RNA, 20 nt, Human
uauaucugaggaauucugua

SEQ ID NO: 1645604 - RNA, 19 nt, Human
uauaucugaggaauucugu

SEQ ID NO: 1645605 - RNA, 18 nt, Human
uauaucugaggaauucug

SEQ ID NO: 1645606 - RNA, 20 nt, Human
uauaauucacauuguauuca

SEQ ID NO: 1645607 - RNA, 15 nt, Human
uauaauucacauugu

SEQ ID NO: 1645608 - RNA, 22 nt, Human
uauaauuaacauguuaaaccau

SEQ ID NO: 1645609 - RNA, 12 nt, Human
uauaauuaacau

SEQ ID NO: 1645610 - RNA, 14 nt, Human
uauaauuaacaugu

SEQ ID NO: 1645611 - RNA, 13 nt, Human
uauaauuaacaug

SEQ ID NO: 1645612 - RNA, 19 nt, Human
uauaauuaacauguuaaac

SEQ ID NO: 1645613 - RNA, 18 nt, Human
uauaauuaacauguuaaa

SEQ ID NO: 1645614 - RNA, 16 nt, Human
uauaauuaacauguua

SEQ ID NO: 1645615 - RNA, 15 nt, Human
uauaauuaacauguu

SEQ ID NO: 1645616 - RNA, 17 nt, Human
ucaaauaugcaaagcac

SEQ ID NO: 1645617 - RNA, 23 nt, Human
ucaaagagguuuuaaaaaaaucc

SEQ ID NO: 1645618 - RNA, 12 nt, Human
ucaaagagguuu

SEQ ID NO: 1645619 - RNA, 19 nt, Human
ucaaauaugcaaagcacug

SEQ ID NO: 1645620 - RNA, 18 nt, Human
ucaaauaugcaaagcacu

SEQ ID NO: 1645621 - RNA, 16 nt, Human
ucaaauccuugaagau

SEQ ID NO: 1645622 - RNA, 17 nt, Human
ucaaacauauauaacaa

SEQ ID NO: 1645623 - RNA, 22 nt, Human
ucaaacagucucaggaaaucaa

SEQ ID NO: 1645624 - RNA, 20 nt, Human
ucaaaccccgaccaccugcc

SEQ ID NO: 1645625 - RNA, 19 nt, Human
ucaaaccccgaccaccugc

SEQ ID NO: 1645626 - RNA, 23 nt, Human
ucaaaccccgaccaccugcccaa

SEQ ID NO: 1645627 - RNA, 22 nt, Human
ucaacuccaaacugacucuuaa

SEQ ID NO: 1645628 - RNA, 22 nt, Human
ucaacucccugccccccagccc

SEQ ID NO: 1645629 - RNA, 21 nt, Human
ucaacucccugccccccagcc

SEQ ID NO: 1645630 - RNA, 15 nt, Human
ucaacucccugcccc

SEQ ID NO: 1645631 - RNA, 14 nt, Human
ucaacucccugccc

SEQ ID NO: 1645632 - RNA, 20 nt, Human
ucaacucuccuccagaguca

SEQ ID NO: 1645633 - RNA, 18 nt, Human
ucaacugaccagccucca

SEQ ID NO: 1645634 - RNA, 24 nt, Human
ucaacugaccagccuccaugcugc

SEQ ID NO: 1645635 - RNA, 19 nt, Human
ucaaccccuucgcuccugu

SEQ ID NO: 1645636 - RNA, 18 nt, Human
ucaaccccuucgcuccug

SEQ ID NO: 1645637 - RNA, 15 nt, Human
ucaaccuccugggcu

SEQ ID NO: 1645638 - RNA, 20 nt, Human
ucaaccccuucgcuccugug

SEQ ID NO: 1645639 - RNA, 16 nt, Human
ucaaccuccugggcua

SEQ ID NO: 1645640 - RNA, 20 nt, Human
ucaagccaccaacauacucc

SEQ ID NO: 1645641 - RNA, 12 nt, Human
ucaagccaccaa

SEQ ID NO: 1645642 - RNA, 19 nt, Human
ucaagcgauucuucugcuu

SEQ ID NO: 1645643 - RNA, 18 nt, Human
ucaagcgauucuucugcu

SEQ ID NO: 1645644 - RNA, 21 nt, Human
ucaagcgauucuucugcuuca

SEQ ID NO: 1645645 - RNA, 16 nt, Human
ucaaggauccugagcc

SEQ ID NO: 1645646 - RNA, 15 nt, Human
ucaaggauccugagc

SEQ ID NO: 1645647 - RNA, 17 nt, Human
ucaaggauccugagcca

SEQ ID NO: 1645648 - RNA, 13 nt, Human
ucaauaaaaaauu

SEQ ID NO: 1645649 - RNA, 16 nt, Human
ucaauaaaaaauuaug

SEQ ID NO: 1645650 - RNA, 14 nt, Human
ucaauaaaaaauua

SEQ ID NO: 1645651 - RNA, 14 nt, Human
ucaaggauccugag

SEQ ID NO: 1645652 - RNA, 13 nt, Human
ucaaggauccuga

SEQ ID NO: 1645653 - RNA, 12 nt, Human
ucacauuuaaau

SEQ ID NO: 1645654 - RNA, 17 nt, Human
ucacauuggaaacaagu

SEQ ID NO: 1645655 - RNA, 18 nt, Human
ucacauugguguuguacu

SEQ ID NO: 1645656 - RNA, 22 nt, Human
ucacauuguauucagaguugau

SEQ ID NO: 1645657 - RNA, 18 nt, Human
ucaccaacgucugugcca

SEQ ID NO: 1645658 - RNA, 17 nt, Human
ucaccaacgucugugcc

SEQ ID NO: 1645659 - RNA, 14 nt, Human
ucacauuuauucug

SEQ ID NO: 1645660 - RNA, 18 nt, Human
ucacccgcuaagagggag

SEQ ID NO: 1645661 - RNA, 13 nt, Human
ucaccaagcccag

SEQ ID NO: 1645662 - RNA, 14 nt, Human
ucaccgaaaacgug

SEQ ID NO: 1645663 - RNA, 12 nt, Human
ucacccuuuucu

SEQ ID NO: 1645664 - RNA, 20 nt, Human
ucacccuggggcuaggaaau

SEQ ID NO: 1645665 - RNA, 19 nt, Human
ucacccgcuaagagggagg

SEQ ID NO: 1645666 - RNA, 21 nt, Human
ucaccgaaaacguggcugcuu

SEQ ID NO: 1645667 - RNA, 20 nt, Human
ucaccgaaaacguggcugcu

SEQ ID NO: 1645668 - RNA, 19 nt, Human
ucaccgaaaacguggcugc

SEQ ID NO: 1645669 - RNA, 15 nt, Human
ucaccgaaaacgugg

SEQ ID NO: 1645670 - RNA, 23 nt, Human
ucaccgaaaacguggcugcuuca

SEQ ID NO: 1645671 - RNA, 22 nt, Human
ucaccgaaaacguggcugcuuc

SEQ ID NO: 1645672 - RNA, 22 nt, Human
ucacaagacccaaaaggcagaa

SEQ ID NO: 1645673 - RNA, 14 nt, Human
ucaauaaaauccau

SEQ ID NO: 1645674 - RNA, 19 nt, Human
ucaauaaaaaauuaugaca

SEQ ID NO: 1645675 - RNA, 23 nt, Human
ucacacaugagcaucaggccagg

SEQ ID NO: 1645676 - RNA, 22 nt, Human
ucacacaugagcaucaggccag

SEQ ID NO: 1645677 - RNA, 15 nt, Human
ucacacacuuuggcu

SEQ ID NO: 1645678 - RNA, 18 nt, Human
ucacaggacucugccucc

SEQ ID NO: 1645679 - RNA, 17 nt, Human
ucacaggacucugccuc

SEQ ID NO: 1645680 - RNA, 14 nt, Human
ucacauuggaaaca

SEQ ID NO: 1645681 - RNA, 19 nt, Human
ucacaggagggagggggaa

SEQ ID NO: 1645682 - RNA, 23 nt, Human
ucacaggacucugccuccucuuc

SEQ ID NO: 1645683 - RNA, 19 nt, Human
ucacaggacucugccuccu

SEQ ID NO: 1645684 - RNA, 21 nt, Human
uauugauaugcuuauacacuu

SEQ ID NO: 1645685 - RNA, 20 nt, Human
uauugauaugcuuauacacu

SEQ ID NO: 1645686 - RNA, 23 nt, Human
uauugugcgcuaaacuuuucuga

SEQ ID NO: 1645687 - RNA, 22 nt, Human
uauugugcgcuaaacuuuucug

SEQ ID NO: 1645688 - RNA, 19 nt, Human
uauugugcgcuaaacuuuu

SEQ ID NO: 1645689 - RNA, 17 nt, Human
uauuguuuaaaaucauu

SEQ ID NO: 1645690 - RNA, 16 nt, Human
uauuguuuaaaaucau

SEQ ID NO: 1645691 - RNA, 15 nt, Human
uauuguuuaaaauca

SEQ ID NO: 1645692 - RNA, 15 nt, Human
uauugcccacgcugg

SEQ ID NO: 1645693 - RNA, 14 nt, Human
uauugcccacgcug

SEQ ID NO: 1645694 - RNA, 13 nt, Human
uauugcccacgcu

SEQ ID NO: 1645695 - RNA, 23 nt, Human
uauugcugauggugcaaugaccu

SEQ ID NO: 1645696 - RNA, 20 nt, Human
uauuguuuaaaaucauuucu

SEQ ID NO: 1645697 - RNA, 17 nt, Human
uauuuaugggauccugg

SEQ ID NO: 1645698 - RNA, 14 nt, Human
uauuuauuacugua

SEQ ID NO: 1645699 - RNA, 22 nt, Human
uauuuauuaaaugcccagcccc

SEQ ID NO: 1645700 - RNA, 13 nt, Human
uauuucuaugaaa

SEQ ID NO: 1645701 - RNA, 15 nt, Human
uauuucuaugaaaua

SEQ ID NO: 1645702 - RNA, 14 nt, Human
uauuucuaugaaau

SEQ ID NO: 1645703 - RNA, 16 nt, Human
uauuauguuaaaacug

SEQ ID NO: 1645704 - RNA, 22 nt, Human
uauuauguaaaucccauuauuc

SEQ ID NO: 1645705 - RNA, 20 nt, Human
uauuauggaggcaggaguuu

SEQ ID NO: 1645706 - RNA, 15 nt, Human
uauuauguaaauccc

SEQ ID NO: 1645707 - RNA, 12 nt, Human
uauuauguaaau

SEQ ID NO: 1645708 - RNA, 22 nt, Human
uauuaugaaacuuguguaaaua

SEQ ID NO: 1645709 - RNA, 21 nt, Human
uauuaugaaacuuguguaaau

SEQ ID NO: 1645710 - RNA, 20 nt, Human
uauuaugaaacuuguguaaa

SEQ ID NO: 1645711 - RNA, 12 nt, Human
uauuaugaaacu

SEQ ID NO: 1645712 - RNA, 17 nt, Human
uauuauauuuacaaaug

SEQ ID NO: 1645713 - RNA, 14 nt, Human
uauuauaccuuuuu

SEQ ID NO: 1645714 - RNA, 24 nt, Human
uauuaagaaagacuaucuaaaugu

SEQ ID NO: 1645715 - RNA, 16 nt, Human
uauuaagcauauauuu

SEQ ID NO: 1645716 - RNA, 14 nt, Human
uauuaaggaagaca

SEQ ID NO: 1645717 - RNA, 12 nt, Human
uauuauaccuuu

SEQ ID NO: 1645718 - RNA, 13 nt, Human
uauuauaccuuuu

SEQ ID NO: 1645719 - RNA, 17 nt, Human
uauguucuaagaaguga

SEQ ID NO: 1645720 - RNA, 22 nt, Human
uauguucuuaguggauguucug

SEQ ID NO: 1645721 - RNA, 21 nt, Human
uauguugcccaggcaggucuu

SEQ ID NO: 1645722 - RNA, 17 nt, Human
uauguugaagccuuugu

SEQ ID NO: 1645723 - RNA, 19 nt, Human
uauuaaaugcccagccccu

SEQ ID NO: 1645724 - RNA, 17 nt, Human
uauuaaaugcccagccc

SEQ ID NO: 1645725 - RNA, 15 nt, Human
uauuaaaugcccagc

SEQ ID NO: 1645726 - RNA, 16 nt, Human
uauuaagaaagacuau

SEQ ID NO: 1645727 - RNA, 19 nt, Human
uauguuagugcaaauuguc

SEQ ID NO: 1645728 - RNA, 12 nt, Human
uauguuaaaacu

SEQ ID NO: 1645729 - RNA, 19 nt, Human
uauggaggcuuugcauaga

SEQ ID NO: 1645730 - RNA, 13 nt, Human
uauguguguuuua

SEQ ID NO: 1645731 - RNA, 14 nt, Human
uauggaggcaggag

SEQ ID NO: 1645732 - RNA, 17 nt, Human
uccaaagaaauguaagg

SEQ ID NO: 1645733 - RNA, 14 nt, Human
uccaaagaaaugua

SEQ ID NO: 1645734 - RNA, 13 nt, Human
uccaaaguacacu

SEQ ID NO: 1645735 - RNA, 16 nt, Human
ucauuaggauggcuag

SEQ ID NO: 1645736 - RNA, 14 nt, Human
ucauggugcucaga

SEQ ID NO: 1645737 - RNA, 11 nt, Human
ucauagcagcu

SEQ ID NO: 1645738 - RNA, 12 nt, Human
ucauagcagcuu

SEQ ID NO: 1645739 - RNA, 20 nt, Human
ucaguguacauggaauaaca

SEQ ID NO: 1645740 - RNA, 16 nt, Human
ucagugccaaaaacaa

SEQ ID NO: 1645741 - RNA, 17 nt, Human
ucaucaaugaaugaaug

SEQ ID NO: 1645742 - RNA, 17 nt, Human
ucauccacugugccaug

SEQ ID NO: 1645743 - RNA, 14 nt, Human
ucauccacugugcc

SEQ ID NO: 1645744 - RNA, 18 nt, Human
ucauccacugugccaugu

SEQ ID NO: 1645745 - RNA, 16 nt, Human
ucaucuccccaucauu

SEQ ID NO: 1645746 - RNA, 17 nt, Human
ucaugcuguucaugaaa

SEQ ID NO: 1645747 - RNA, 22 nt, Human
ucauggaacgcguugaaauugu

SEQ ID NO: 1645748 - RNA, 21 nt, Human
ucauggaacgcguugaaauug

SEQ ID NO: 1645749 - RNA, 20 nt, Human
ucauggaacgcguugaaauu

SEQ ID NO: 1645750 - RNA, 24 nt, Human
ucagcuccagcucaccagccccag

SEQ ID NO: 1645751 - RNA, 23 nt, Human
ucagcuccagcucaccagcccca

SEQ ID NO: 1645752 - RNA, 23 nt, Human
ucaggaagcucagggccuggcuc

SEQ ID NO: 1645753 - RNA, 23 nt, Human
ucagcucugcaagaauugaagca

SEQ ID NO: 1645754 - RNA, 21 nt, Human
ucaggccugggggcugggcag

SEQ ID NO: 1645755 - RNA, 15 nt, Human
ucaggcucuucuccu

SEQ ID NO: 1645756 - RNA, 20 nt, Human
ucaggaucaaaccccgacca

SEQ ID NO: 1645757 - RNA, 15 nt, Human
ucaggagcccuggga

SEQ ID NO: 1645758 - RNA, 14 nt, Human
ucaggagcccuggg

SEQ ID NO: 1645759 - RNA, 12 nt, Human
ucaggagcccug

SEQ ID NO: 1645760 - RNA, 11 nt, Human
ucaggagcccu

SEQ ID NO: 1645761 - RNA, 19 nt, Human
ucagguggggcagcuugag

SEQ ID NO: 1645762 - RNA, 18 nt, Human
ucagguggggcagcuuga

SEQ ID NO: 1645763 - RNA, 23 nt, Human
ucaggugauccacccaccucagc

SEQ ID NO: 1645764 - RNA, 23 nt, Human
ucaggugccucaagagaaggcaa

SEQ ID NO: 1645765 - RNA, 16 nt, Human
ucaggugauccaccca

SEQ ID NO: 1645766 - RNA, 23 nt, Human
ucaggugagaagcagaggaagga

SEQ ID NO: 1645767 - RNA, 12 nt, Human
ucaggucccugc

SEQ ID NO: 1645768 - RNA, 21 nt, Human
ucaggcucuucuccuuucaca

SEQ ID NO: 1645769 - RNA, 16 nt, Human
ucaggcucuucuccuu

SEQ ID NO: 1645770 - RNA, 20 nt, Human
ucagguggggcagcuugagg

SEQ ID NO: 1645771 - RNA, 16 nt, Human
ucagucucccucccuu

SEQ ID NO: 1645772 - RNA, 23 nt, Human
ucagucugauucccaagcucugc

SEQ ID NO: 1645773 - RNA, 22 nt, Human
ucagucugauucccaagcucug

SEQ ID NO: 1645774 - RNA, 21 nt, Human
ucagucugauucccaagcucu

SEQ ID NO: 1645775 - RNA, 19 nt, Human
uccagguagagggugugua

SEQ ID NO: 1645776 - RNA, 22 nt, Human
uccaggggugggacacccugug

SEQ ID NO: 1645777 - RNA, 20 nt, Human
uccagguuuaagcuguuacu

SEQ ID NO: 1645778 - RNA, 17 nt, Human
uccaguuuuguuuggac

SEQ ID NO: 1645779 - RNA, 15 nt, Human
uccaguuuuguuugg

SEQ ID NO: 1645780 - RNA, 22 nt, Human
uccauaaucuggacuccucugu

SEQ ID NO: 1645781 - RNA, 20 nt, Human
uccaguuuuguuuggaccaa

SEQ ID NO: 1645782 - RNA, 15 nt, Human
uccauacauuugugu

SEQ ID NO: 1645783 - RNA, 21 nt, Human
uccauaaucuggacuccucug

SEQ ID NO: 1645784 - RNA, 15 nt, Human
uccauagagagcaag

SEQ ID NO: 1645785 - RNA, 14 nt, Human
uccauagagagcaa

SEQ ID NO: 1645786 - RNA, 14 nt, Human
uccaucaggccacu

SEQ ID NO: 1645787 - RNA, 20 nt, Human
uccaugggccauaugaaaag

SEQ ID NO: 1645788 - RNA, 13 nt, Human
uccauggacuuug

SEQ ID NO: 1645789 - RNA, 15 nt, Human
uccaugcugccucca

SEQ ID NO: 1645790 - RNA, 14 nt, Human
uccaugcugccucc

SEQ ID NO: 1645791 - RNA, 23 nt, Human
uccacuuggucugugagaugcua

SEQ ID NO: 1645792 - RNA, 21 nt, Human
uccacuuucuagccagaggag

SEQ ID NO: 1645793 - RNA, 20 nt, Human
uccacuuucuagccagagga

SEQ ID NO: 1645794 - RNA, 21 nt, Human
uccacuuggucugugagaugc

SEQ ID NO: 1645795 - RNA, 14 nt, Human
uccaaaguacacug

SEQ ID NO: 1645796 - RNA, 16 nt, Human
uccaaaguacacuguu

SEQ ID NO: 1645797 - RNA, 23 nt, Human
uccagaaagaaaacuuguauuau

SEQ ID NO: 1645798 - RNA, 15 nt, Human
uccaggagcagccac

SEQ ID NO: 1645799 - RNA, 14 nt, Human
uccaggagcagcca

SEQ ID NO: 1645800 - RNA, 13 nt, Human
uccaggagcagcc

SEQ ID NO: 1645801 - RNA, 12 nt, Human
uccaggagcagc

SEQ ID NO: 1645802 - RNA, 20 nt, Human
uccaggggugggacacccug

SEQ ID NO: 1645803 - RNA, 19 nt, Human
uccaggggugggacacccu

SEQ ID NO: 1645804 - RNA, 17 nt, Human
uccagcagauuauucac

SEQ ID NO: 1645805 - RNA, 22 nt, Human
uccagcaauucuccugccucag

SEQ ID NO: 1645806 - RNA, 16 nt, Human
uccagcagauuauuca

SEQ ID NO: 1645807 - RNA, 15 nt, Human
uccagcagauuauuc

SEQ ID NO: 1645808 - RNA, 14 nt, Human
uccagcagauuauu

SEQ ID NO: 1645809 - RNA, 14 nt, Human
uccccaggaggcca

SEQ ID NO: 1645810 - RNA, 17 nt, Human
uccccaggaggccagcc

SEQ ID NO: 1645811 - RNA, 17 nt, Human
ucccccagccccauccu

SEQ ID NO: 1645812 - RNA, 16 nt, Human
uccccaggaggccagc

SEQ ID NO: 1645813 - RNA, 15 nt, Human
uccccaggaggccag

SEQ ID NO: 1645814 - RNA, 21 nt, Human
ucccccagccccauccucugu

SEQ ID NO: 1645815 - RNA, 20 nt, Human
ucccccagccccauccucug

SEQ ID NO: 1645816 - RNA, 22 nt, Human
ucccccagccccauccucugua

SEQ ID NO: 1645817 - RNA, 22 nt, Human
uccccagcaagugagagcuggg

SEQ ID NO: 1645818 - RNA, 21 nt, Human
uccccagcaagugagagcugg

SEQ ID NO: 1645819 - RNA, 20 nt, Human
uccccagcaagugagagcug

SEQ ID NO: 1645820 - RNA, 23 nt, Human
uccccagauugcaacaggcuggg

SEQ ID NO: 1645821 - RNA, 22 nt, Human
uccccagauugcaacaggcugg

SEQ ID NO: 1645822 - RNA, 20 nt, Human
uccccagauugcaacaggcu

SEQ ID NO: 1645823 - RNA, 19 nt, Human
uccccagauugcaacaggc

SEQ ID NO: 1645824 - RNA, 18 nt, Human
uccccagauugcaacagg

SEQ ID NO: 1645825 - RNA, 13 nt, Human
uccccagauugca

SEQ ID NO: 1645826 - RNA, 19 nt, Human
ucccauuauucaaaguugc

SEQ ID NO: 1645827 - RNA, 18 nt, Human
ucccauuauucaaaguug

SEQ ID NO: 1645828 - RNA, 16 nt, Human
ucccauuauucaaagu

SEQ ID NO: 1645829 - RNA, 20 nt, Human
ucccaugagccucagcaucc

SEQ ID NO: 1645830 - RNA, 14 nt, Human
ucccauuauucaaa

SEQ ID NO: 1645831 - RNA, 13 nt, Human
ucccauuauucaa

SEQ ID NO: 1645832 - RNA, 18 nt, Human
ucccaccuuggcugcagg

SEQ ID NO: 1645833 - RNA, 20 nt, Human
ucccagcugugcucuggaca

SEQ ID NO: 1645834 - RNA, 17 nt, Human
ucccaccuuggcugcag

SEQ ID NO: 1645835 - RNA, 16 nt, Human
ucccaccuuggcugca

SEQ ID NO: 1645836 - RNA, 13 nt, Human
ucccaccuuggcu

SEQ ID NO: 1645837 - RNA, 22 nt, Human
ucccaccucucucacuccuuga

SEQ ID NO: 1645838 - RNA, 20 nt, Human
uccaugugggcuaguugggc

SEQ ID NO: 1645839 - RNA, 19 nt, Human
ucccaugagccucagcauc

SEQ ID NO: 1645840 - RNA, 18 nt, Human
ucccaugagccucagcau

SEQ ID NO: 1645841 - RNA, 15 nt, Human
ucccaucuuccaagg

SEQ ID NO: 1645842 - RNA, 16 nt, Human
ucccaggcgccccuuc

SEQ ID NO: 1645843 - RNA, 24 nt, Human
ucccaggcauuccccaggaggcca

SEQ ID NO: 1645844 - RNA, 22 nt, Human
ucccagcugugcucuggacagg

SEQ ID NO: 1645845 - RNA, 21 nt, Human
ucccagcugugcucuggacag

SEQ ID NO: 1645846 - RNA, 23 nt, Human
ucccagcugugcucuggacaggc

SEQ ID NO: 1645847 - RNA, 17 nt, Human
ucuacacuaagagagaa

SEQ ID NO: 1645848 - RNA, 16 nt, Human
ucuacagaggccaugg

SEQ ID NO: 1645849 - RNA, 15 nt, Human
ucuacagaggccaug

SEQ ID NO: 1645850 - RNA, 14 nt, Human
ucuaccuuccugca

SEQ ID NO: 1645851 - RNA, 14 nt, Human
ucuaucaccaagga

SEQ ID NO: 1645852 - RNA, 14 nt, Human
ucuaugacacaugc

SEQ ID NO: 1645853 - RNA, 18 nt, Human
ucuaugaaauauuauguu

SEQ ID NO: 1645854 - RNA, 17 nt, Human
ucuaugacacaugcaag

SEQ ID NO: 1645855 - RNA, 21 nt, Human
ucuaggaagacuuuggaaaga

SEQ ID NO: 1645856 - RNA, 19 nt, Human
ucuaggaagacuuuggaaa

SEQ ID NO: 1645857 - RNA, 16 nt, Human
ucuaggaagacuuugg

SEQ ID NO: 1645858 - RNA, 15 nt, Human
ucuaggaagacuuug

SEQ ID NO: 1645859 - RNA, 16 nt, Human
ucggagaagagcuguu

SEQ ID NO: 1645860 - RNA, 14 nt, Human
ucggagaagagcug

SEQ ID NO: 1645861 - RNA, 12 nt, Human
ucggagaagagc

SEQ ID NO: 1645862 - RNA, 13 nt, Human
ucgugacaacacu

SEQ ID NO: 1645863 - RNA, 18 nt, Human
ucuaaaggcuaccuuugu

SEQ ID NO: 1645864 - RNA, 17 nt, Human
ucuaaaggcuaccuuug

SEQ ID NO: 1645865 - RNA, 19 nt, Human
ucuaaaggcuaccuuugua

SEQ ID NO: 1645866 - RNA, 20 nt, Human
ucuaaaggcuaccuuuguau

SEQ ID NO: 1645867 - RNA, 16 nt, Human
ucguguccccuauccu

SEQ ID NO: 1645868 - RNA, 23 nt, Human
ucucaguccaugaagauguagag

SEQ ID NO: 1645869 - RNA, 13 nt, Human
ucuaugggacuca

SEQ ID NO: 1645870 - RNA, 12 nt, Human
ucuaugggacuc

SEQ ID NO: 1645871 - RNA, 19 nt, Human
ucuaugggacucaaugcac

SEQ ID NO: 1645872 - RNA, 23 nt, Human
ucuaugggacucaaugcacugac

SEQ ID NO: 1645873 - RNA, 18 nt, Human
ucucauacucaccucacc

SEQ ID NO: 1645874 - RNA, 16 nt, Human
ucucauacucaccuca

SEQ ID NO: 1645875 - RNA, 16 nt, Human
ucuccaccugccaggg

SEQ ID NO: 1645876 - RNA, 15 nt, Human
ucuccaccugccagg

SEQ ID NO: 1645877 - RNA, 14 nt, Human
ucuccaccugccag

SEQ ID NO: 1645878 - RNA, 19 nt, Human
ucuccaccugccagggaca

SEQ ID NO: 1645879 - RNA, 17 nt, Human
ucuccaccugccaggga

SEQ ID NO: 1645880 - RNA, 22 nt, Human
ucuccaccugccagggacagag

SEQ ID NO: 1645881 - RNA, 13 nt, Human
ucuccacuccaga

SEQ ID NO: 1645882 - RNA, 16 nt, Human
ucuccacccugcucuc

SEQ ID NO: 1645883 - RNA, 14 nt, Human
ucuccacccugcuc

SEQ ID NO: 1645884 - RNA, 17 nt, Human
ucuccacccugcucucc

SEQ ID NO: 1645885 - RNA, 13 nt, Human
ucuccacccugcu

SEQ ID NO: 1645886 - RNA, 19 nt, Human
ucucaugccucagccuccu

SEQ ID NO: 1645887 - RNA, 16 nt, Human
ucucaugccucagccu

SEQ ID NO: 1645888 - RNA, 13 nt, Human
ucucaugccucag

SEQ ID NO: 1645889 - RNA, 13 nt, Human
ucucccccagccc

SEQ ID NO: 1645890 - RNA, 12 nt, Human
ucucccccagcc

SEQ ID NO: 1645891 - RNA, 11 nt, Human
ucuccaggcug

SEQ ID NO: 1645892 - RNA, 23 nt, Human
ucucccucagucuggcccuuccu

SEQ ID NO: 1645893 - RNA, 18 nt, Human
ucucccucagucuggccc

SEQ ID NO: 1645894 - RNA, 14 nt, Human
ucucccucccuugg

SEQ ID NO: 1645895 - RNA, 15 nt, Human
ucuccagccccugga

SEQ ID NO: 1645896 - RNA, 14 nt, Human
ucuccagccccugg

SEQ ID NO: 1645897 - RNA, 13 nt, Human
ucuccagccccug

SEQ ID NO: 1645898 - RNA, 12 nt, Human
ucuccagccccu

SEQ ID NO: 1645899 - RNA, 14 nt, Human
ucuccacugccuuc

SEQ ID NO: 1645900 - RNA, 18 nt, Human
ucuccagccccuggaugc

SEQ ID NO: 1645901 - RNA, 16 nt, Human
ucuccagccccuggau

SEQ ID NO: 1645902 - RNA, 22 nt, Human
ucuccagccccuggaugcagcc

SEQ ID NO: 1645903 - RNA, 23 nt, Human
uccuagugaaagaggcagcuuga

SEQ ID NO: 1645904 - RNA, 14 nt, Human
uccuagugaaagag

SEQ ID NO: 1645905 - RNA, 23 nt, Human
uccuauauuguuuucaguguaca

SEQ ID NO: 1645906 - RNA, 12 nt, Human
uccuaguuccac

SEQ ID NO: 1645907 - RNA, 20 nt, Human
uccuaucaccugucuugccu

SEQ ID NO: 1645908 - RNA, 18 nt, Human
uccucauuagcauuuugc

SEQ ID NO: 1645909 - RNA, 17 nt, Human
uccuaucagaaguuucu

SEQ ID NO: 1645910 - RNA, 10 nt, Human
uccuccaggu

SEQ ID NO: 1645911 - RNA, 13 nt, Human
uccucccaccuca

SEQ ID NO: 1645912 - RNA, 12 nt, Human
uccucccaccuc

SEQ ID NO: 1645913 - RNA, 16 nt, Human
uccgcuuucuacccag

SEQ ID NO: 1645914 - RNA, 21 nt, Human
uccuaagcuauucaguaauaa

SEQ ID NO: 1645915 - RNA, 20 nt, Human
uccuaagcuauucaguaaua

SEQ ID NO: 1645916 - RNA, 20 nt, Human
uccgcuuucuacccagcgag

SEQ ID NO: 1645917 - RNA, 18 nt, Human
uccgcuuucuacccagcg

SEQ ID NO: 1645918 - RNA, 14 nt, Human
uccgccucuugggu

SEQ ID NO: 1645919 - RNA, 15 nt, Human
ucccccuuccaugga

SEQ ID NO: 1645920 - RNA, 16 nt, Human
ucccuuccucuuucca

SEQ ID NO: 1645921 - RNA, 15 nt, Human
ucccuuccucuuucc

SEQ ID NO: 1645922 - RNA, 18 nt, Human
uccugccccugagcccau

SEQ ID NO: 1645923 - RNA, 10 nt, Human
uccugcccug

SEQ ID NO: 1645924 - RNA, 17 nt, Human
uccugccccugagccca

SEQ ID NO: 1645925 - RNA, 20 nt, Human
uccugaggcuccacuugguc

SEQ ID NO: 1645926 - RNA, 19 nt, Human
uccugaggcuccacuuggu

SEQ ID NO: 1645927 - RNA, 21 nt, Human
uccugaggcuccacuuggucu

SEQ ID NO: 1645928 - RNA, 16 nt, Human
uccugcauuugugaaa

SEQ ID NO: 1645929 - RNA, 14 nt, Human
uccugccaggcaug

SEQ ID NO: 1645930 - RNA, 13 nt, Human
uccugccaggcau

SEQ ID NO: 1645931 - RNA, 16 nt, Human
uccugccaccacgccc

SEQ ID NO: 1645932 - RNA, 11 nt, Human
uccugccacca

SEQ ID NO: 1645933 - RNA, 17 nt, Human
uccuggcaauagucaaa

SEQ ID NO: 1645934 - RNA, 23 nt, Human
uccuggcacccggccccugcugg

SEQ ID NO: 1645935 - RNA, 16 nt, Human
uccuggcacugcuucc

SEQ ID NO: 1645936 - RNA, 13 nt, Human
uccuggcacugcu

SEQ ID NO: 1645937 - RNA, 12 nt, Human
uccuggccucaa

SEQ ID NO: 1645938 - RNA, 17 nt, Human
uccuggcacugcuucca

SEQ ID NO: 1645939 - RNA, 13 nt, Human
uccuguagcccua

SEQ ID NO: 1645940 - RNA, 11 nt, Human
uccuguagccc

SEQ ID NO: 1645941 - RNA, 17 nt, Human
uccugcccuuaccugcc

SEQ ID NO: 1645942 - RNA, 21 nt, Human
uccugcccugggaggcaguga

SEQ ID NO: 1645943 - RNA, 15 nt, Human
uccugcccugggagg

SEQ ID NO: 1645944 - RNA, 14 nt, Human
uccugcccugggag

SEQ ID NO: 1645945 - RNA, 12 nt, Human
uccugcccuggg

SEQ ID NO: 1645946 - RNA, 11 nt, Human
uccugcccugg

SEQ ID NO: 1645947 - RNA, 20 nt, Human
uccugcccuuaccugccagg

SEQ ID NO: 1645948 - RNA, 14 nt, Human
uccuggaguucugg

SEQ ID NO: 1645949 - RNA, 19 nt, Human
uccugccuaaggcugaacu

SEQ ID NO: 1645950 - RNA, 16 nt, Human
uccugccuaaggcuga

SEQ ID NO: 1645951 - RNA, 20 nt, Human
ugacaagcucacagaccuuu

SEQ ID NO: 1645952 - RNA, 15 nt, Human
ugacaagcucacaga

SEQ ID NO: 1645953 - RNA, 18 nt, Human
ugacaaggauugcuacug

SEQ ID NO: 1645954 - RNA, 12 nt, Human
ugacaagcucac

SEQ ID NO: 1645955 - RNA, 22 nt, Human
ugacagagugagacucugucuc

SEQ ID NO: 1645956 - RNA, 19 nt, Human
ugacagagugagacucugu

SEQ ID NO: 1645957 - RNA, 23 nt, Human
ugacauaaguauuuaauucaugu

SEQ ID NO: 1645958 - RNA, 17 nt, Human
ugacagagugagacucu

SEQ ID NO: 1645959 - RNA, 14 nt, Human
ugacagagugagac

SEQ ID NO: 1645960 - RNA, 23 nt, Human
ugacagaggcagccccauucugc

SEQ ID NO: 1645961 - RNA, 18 nt, Human
ugacagaggcagccccau

SEQ ID NO: 1645962 - RNA, 17 nt, Human
ugacagaggcagcccca

SEQ ID NO: 1645963 - RNA, 16 nt, Human
ugacagaggcagcccc

SEQ ID NO: 1645964 - RNA, 15 nt, Human
ugacagaggcagccc

SEQ ID NO: 1645965 - RNA, 14 nt, Human
ugacagaggcagcc

SEQ ID NO: 1645966 - RNA, 23 nt, Human
ugacagacacaggcccggcucca

SEQ ID NO: 1645967 - RNA, 20 nt, Human
ugacagacacaggcccggcu

SEQ ID NO: 1645968 - RNA, 16 nt, Human
ugacagacagcccucc

SEQ ID NO: 1645969 - RNA, 20 nt, Human
ugaccacugcagaagacagu

SEQ ID NO: 1645970 - RNA, 19 nt, Human
ugaccagcaccaucucucc

SEQ ID NO: 1645971 - RNA, 15 nt, Human
ugacaugucuuuucu

SEQ ID NO: 1645972 - RNA, 18 nt, Human
ugacaugggacauuugcu

SEQ ID NO: 1645973 - RNA, 13 nt, Human
ugacaugucuuuu

SEQ ID NO: 1645974 - RNA, 17 nt, Human
ugacaugggacauuugc

SEQ ID NO: 1645975 - RNA, 16 nt, Human
ugacaugggacauuug

SEQ ID NO: 1645976 - RNA, 16 nt, Human
ugacauagucuggcug

SEQ ID NO: 1645977 - RNA, 17 nt, Human
ugacauagucuggcugu

SEQ ID NO: 1645978 - RNA, 20 nt, Human
ugaccgugaggccagagaca

SEQ ID NO: 1645979 - RNA, 16 nt, Human
ugaccgugaggccaga

SEQ ID NO: 1645980 - RNA, 14 nt, Human
ugaccgugaggcca

SEQ ID NO: 1645981 - RNA, 13 nt, Human
ugaccgugaggcc

SEQ ID NO: 1645982 - RNA, 19 nt, Human
ugaccauucuccaccugcc

SEQ ID NO: 1645983 - RNA, 18 nt, Human
ugaccauucuccaccugc

SEQ ID NO: 1645984 - RNA, 17 nt, Human
ugaccauucuccaccug

SEQ ID NO: 1645985 - RNA, 16 nt, Human
ugaccauucuccaccu

SEQ ID NO: 1645986 - RNA, 20 nt, Human
ugaccagcaccaucucuccu

SEQ ID NO: 1645987 - RNA, 18 nt, Human
ugaauuacauuuguauaa

SEQ ID NO: 1645988 - RNA, 16 nt, Human
ugaauuacauuuguau

SEQ ID NO: 1645989 - RNA, 15 nt, Human
ugaauuacauuugua

SEQ ID NO: 1645990 - RNA, 17 nt, Human
ugaauuaugaaacuuuu

SEQ ID NO: 1645991 - RNA, 15 nt, Human
ugaauuaugaaacuu

SEQ ID NO: 1645992 - RNA, 13 nt, Human
ugaauuaugaaac

SEQ ID NO: 1645993 - RNA, 16 nt, Human
ugaauuauuuucucuc

SEQ ID NO: 1645994 - RNA, 23 nt, Human
ugaaugaugauccuaggcauuug

SEQ ID NO: 1645995 - RNA, 23 nt, Human
ugaaucauuuuaccuuugacaaa

SEQ ID NO: 1645996 - RNA, 22 nt, Human
ugaaucauuuuaccuuugacaa

SEQ ID NO: 1645997 - RNA, 15 nt, Human
ugaauaaagacaccu

SEQ ID NO: 1645998 - RNA, 14 nt, Human
ugaauaaagacacc

SEQ ID NO: 1645999 - RNA, 11 nt, Human
ugaaguccaag

SEQ ID NO: 1646000 - RNA, 23 nt, Human
ugaagucagaucugccuaaggac

SEQ ID NO: 1646001 - RNA, 17 nt, Human
ugaaggccccgcccagg

SEQ ID NO: 1646002 - RNA, 20 nt, Human
ugaagucagaucugccuaag

SEQ ID NO: 1646003 - RNA, 13 nt, Human
ugaaguccaagca

SEQ ID NO: 1646004 - RNA, 20 nt, Human
ugaaggacauugcggacagc

SEQ ID NO: 1646005 - RNA, 19 nt, Human
ugaaggacauugcggacag

SEQ ID NO: 1646006 - RNA, 22 nt, Human
ugaaggacauugcggacagcca

SEQ ID NO: 1646007 - RNA, 16 nt, Human
ugaaggccccgcccag

SEQ ID NO: 1646008 - RNA, 15 nt, Human
ugaaggccccgccca

SEQ ID NO: 1646009 - RNA, 16 nt, Human
ugaaggagagcccuuc

SEQ ID NO: 1646010 - RNA, 20 nt, Human
ugaaggagagcccuucauuu

SEQ ID NO: 1646011 - RNA, 17 nt, Human
ugaacuccuggccucaa

SEQ ID NO: 1646012 - RNA, 16 nt, Human
ugaacucugacaacag

SEQ ID NO: 1646013 - RNA, 14 nt, Human
ugaagauacugaaa

SEQ ID NO: 1646014 - RNA, 18 nt, Human
ugaagauacugaaauaaa

SEQ ID NO: 1646015 - RNA, 16 nt, Human
ugaagauacugaaaua

SEQ ID NO: 1646016 - RNA, 15 nt, Human
ugaagauacugaaau

SEQ ID NO: 1646017 - RNA, 20 nt, Human
ugaaggaauaaauugcuccu

SEQ ID NO: 1646018 - RNA, 18 nt, Human
ugaaagaggcagcuugaa

SEQ ID NO: 1646019 - RNA, 18 nt, Human
ugaaagcccugagcuuuc

SEQ ID NO: 1646020 - RNA, 18 nt, Human
ugaaagauggcugugccu

SEQ ID NO: 1646021 - RNA, 19 nt, Human
ugaaagauggcugugccuc

SEQ ID NO: 1646022 - RNA, 15 nt, Human
ugaaagguacuucaa

SEQ ID NO: 1646023 - RNA, 15 nt, Human
ugaaagggcccagag

SEQ ID NO: 1646024 - RNA, 16 nt, Human
ugaaagguacuucaaa

SEQ ID NO: 1646025 - RNA, 13 nt, Human
ugaaagggcccag

SEQ ID NO: 1646026 - RNA, 23 nt, Human
ugaaagggaguauuacaaaaaca

SEQ ID NO: 1646027 - RNA, 22 nt, Human
ugaaacaacaaauaggaauugu

SEQ ID NO: 1646028 - RNA, 14 nt, Human
ugaaacauuuuguc

SEQ ID NO: 1646029 - RNA, 20 nt, Human
ugaaaagcuccauuuuuagu

SEQ ID NO: 1646030 - RNA, 13 nt, Human
ugaaaauuuugau

SEQ ID NO: 1646031 - RNA, 19 nt, Human
ugaaaauuuugauguuuua

SEQ ID NO: 1646032 - RNA, 21 nt, Human
ugaaaauuuugauguuuuaag

SEQ ID NO: 1646033 - RNA, 16 nt, Human
ugaaauauugacuuuu

SEQ ID NO: 1646034 - RNA, 15 nt, Human
ugaaaucauucauuu

SEQ ID NO: 1646035 - RNA, 17 nt, Human
ugaaaucaguuacucuu

SEQ ID NO: 1646036 - RNA, 16 nt, Human
ugaaaucaguuacucu

SEQ ID NO: 1646037 - RNA, 12 nt, Human
ugaaauuauuca

SEQ ID NO: 1646038 - RNA, 16 nt, Human
ugaacuccuggccuca

SEQ ID NO: 1646039 - RNA, 20 nt, Human
ugaaccaccacacccagccc

SEQ ID NO: 1646040 - RNA, 17 nt, Human
ugaaccaccacacccag

SEQ ID NO: 1646041 - RNA, 23 nt, Human
ugaaccacaucuugcucugcuga

SEQ ID NO: 1646042 - RNA, 19 nt, Human
ugaaccacaucuugcucug

SEQ ID NO: 1646043 - RNA, 22 nt, Human
ugaaccaagaacuuuccaggaa

SEQ ID NO: 1646044 - RNA, 19 nt, Human
ugaacaguuguguuugaag

SEQ ID NO: 1646045 - RNA, 12 nt, Human
ucuuugccaagu

SEQ ID NO: 1646046 - RNA, 17 nt, Human
ucuuuggacacucacac

SEQ ID NO: 1646047 - RNA, 19 nt, Human
ucuuuccacagaagcucca

SEQ ID NO: 1646048 - RNA, 17 nt, Human
ucuuuccaaaguacacu

SEQ ID NO: 1646049 - RNA, 21 nt, Human
ucuuucagccaagaauucuua

SEQ ID NO: 1646050 - RNA, 20 nt, Human
ucuuucagccaagaauucuu

SEQ ID NO: 1646051 - RNA, 19 nt, Human
ucuuucagccaagaauucu

SEQ ID NO: 1646052 - RNA, 16 nt, Human
ucuuucagccaagaau

SEQ ID NO: 1646053 - RNA, 13 nt, Human
ucuuuccaaagua

SEQ ID NO: 1646054 - RNA, 14 nt, Human
ucuuuccaaaguac

SEQ ID NO: 1646055 - RNA, 23 nt, Human
ucuuucacccuuuucuguuugcu

SEQ ID NO: 1646056 - RNA, 21 nt, Human
ucuuguguguuuauugucaaa

SEQ ID NO: 1646057 - RNA, 16 nt, Human
ucuuguguguuuauug

SEQ ID NO: 1646058 - RNA, 15 nt, Human
ucuugcaugaggcua

SEQ ID NO: 1646059 - RNA, 17 nt, Human
ucuugccuuuuucauua

SEQ ID NO: 1646060 - RNA, 16 nt, Human
ucuugccuuuuucauu

SEQ ID NO: 1646061 - RNA, 19 nt, Human
ucuugccuuuuucauuauu

SEQ ID NO: 1646062 - RNA, 20 nt, Human
ucuccucugcugcuggcugg

SEQ ID NO: 1646063 - RNA, 16 nt, Human
ucucccuucauccuuc

SEQ ID NO: 1646064 - RNA, 16 nt, Human
ucuccucuugccacug

SEQ ID NO: 1646065 - RNA, 13 nt, Human
ucuccucuugcca

SEQ ID NO: 1646066 - RNA, 17 nt, Human
ucuccucuugccacugc

SEQ ID NO: 1646067 - RNA, 22 nt, Human
ucuccucuugccacugccucuu

SEQ ID NO: 1646068 - RNA, 19 nt, Human
ugagacucgcgacaaugca

SEQ ID NO: 1646069 - RNA, 21 nt, Human
ugaccucaggugauccaccca

SEQ ID NO: 1646070 - RNA, 20 nt, Human
ugaccucaggugauccaccc

SEQ ID NO: 1646071 - RNA, 22 nt, Human
ugaccucagcuuugauauuuca

SEQ ID NO: 1646072 - RNA, 17 nt, Human
ugagaaauuuauaaacu

SEQ ID NO: 1646073 - RNA, 16 nt, Human
ugagagugaacaaauu

SEQ ID NO: 1646074 - RNA, 23 nt, Human
ugagacucgcgacaaugcaaacc

SEQ ID NO: 1646075 - RNA, 22 nt, Human
ugagacucgcgacaaugcaaac

SEQ ID NO: 1646076 - RNA, 21 nt, Human
ugagacucgcgacaaugcaaa

SEQ ID NO: 1646077 - RNA, 20 nt, Human
ugagacucgcgacaaugcaa

SEQ ID NO: 1646078 - RNA, 15 nt, Human
ugagcagggcucagc

SEQ ID NO: 1646079 - RNA, 14 nt, Human
ugagcagggcucag

SEQ ID NO: 1646080 - RNA, 13 nt, Human
ugagcagggcuca

SEQ ID NO: 1646081 - RNA, 12 nt, Human
ugagcagggcuc

SEQ ID NO: 1646082 - RNA, 15 nt, Human
ugagaucagccuggg

SEQ ID NO: 1646083 - RNA, 14 nt, Human
ugagaucagccugg

SEQ ID NO: 1646084 - RNA, 15 nt, Human
ugagaucaaaacggu

SEQ ID NO: 1646085 - RNA, 17 nt, Human
ugagcagggcucagcgg

SEQ ID NO: 1646086 - RNA, 16 nt, Human
ugagcagggcucagcg

SEQ ID NO: 1646087 - RNA, 19 nt, Human
ugagcagggcucagcgggg

SEQ ID NO: 1646088 - RNA, 20 nt, Human
ugagcaucaggccaggcccu

SEQ ID NO: 1646089 - RNA, 19 nt, Human
ugagcaucaggccaggccc

SEQ ID NO: 1646090 - RNA, 18 nt, Human
ugagcaucaggccaggcc

SEQ ID NO: 1646091 - RNA, 21 nt, Human
ugagccucagcauccuggcac

SEQ ID NO: 1646092 - RNA, 18 nt, Human
ugagccucagcauccugg

SEQ ID NO: 1646093 - RNA, 22 nt, Human
ugagccucagcauccuggcacc

SEQ ID NO: 1646094 - RNA, 14 nt, Human
ugagccucagucuc

SEQ ID NO: 1646095 - RNA, 17 nt, Human
ugagccucagcauccug

SEQ ID NO: 1646096 - RNA, 21 nt, Human
ugagccgagaucacgccacug

SEQ ID NO: 1646097 - RNA, 19 nt, Human
ugagccgagaucacgccac

SEQ ID NO: 1646098 - RNA, 18 nt, Human
ugagcccuguccugccua

SEQ ID NO: 1646099 - RNA, 16 nt, Human
ugauaacuggaaacuu

SEQ ID NO: 1646100 - RNA, 21 nt, Human
ugaguugauagcacagacccu

SEQ ID NO: 1646101 - RNA, 23 nt, Human
ugaguuugggccccagaggcugg

SEQ ID NO: 1646102 - RNA, 22 nt, Human
ugaguuugggccccagaggcug

SEQ ID NO: 1646103 - RNA, 20 nt, Human
ugaguugauagcacagaccc

SEQ ID NO: 1646104 - RNA, 16 nt, Human
ugaguugauagcacag

SEQ ID NO: 1646105 - RNA, 14 nt, Human
ugagugagcaugcc

SEQ ID NO: 1646106 - RNA, 18 nt, Human
ugagucugaaggcugggu

SEQ ID NO: 1646107 - RNA, 17 nt, Human
ugagucugaaggcuggg

SEQ ID NO: 1646108 - RNA, 15 nt, Human
ugagucugaaggcug

SEQ ID NO: 1646109 - RNA, 13 nt, Human
ugagucugaaggc

SEQ ID NO: 1646110 - RNA, 19 nt, Human
ugaguccagaaguuugaga

SEQ ID NO: 1646111 - RNA, 21 nt, Human
ugaggugggaggaucucuuga

SEQ ID NO: 1646112 - RNA, 15 nt, Human
ugagucccaggcuga

SEQ ID NO: 1646113 - RNA, 19 nt, Human
ugagucgaggacagggagg

SEQ ID NO: 1646114 - RNA, 19 nt, Human
ugagucccaggcugagccu

SEQ ID NO: 1646115 - RNA, 20 nt, Human
ugaggcuccacuuggucugu

SEQ ID NO: 1646116 - RNA, 18 nt, Human
ugaggcuccacuuggucu

SEQ ID NO: 1646117 - RNA, 14 nt, Human
ugaggcucugcccu

SEQ ID NO: 1646118 - RNA, 13 nt, Human
ugaggcucugccc

SEQ ID NO: 1646119 - RNA, 17 nt, Human
ugagggaacagagaggu

SEQ ID NO: 1646120 - RNA, 15 nt, Human
ugaggcucugcccuu

SEQ ID NO: 1646121 - RNA, 13 nt, Human
ugaggugggagga

SEQ ID NO: 1646122 - RNA, 12 nt, Human
ugaggugggagg

SEQ ID NO: 1646123 - RNA, 12 nt, Human
ugaggcauuugu

SEQ ID NO: 1646124 - RNA, 23 nt, Human
ugaggcaucgcaauguaagacuc

SEQ ID NO: 1646125 - RNA, 19 nt, Human
ugaggcauuuguuugaacu

SEQ ID NO: 1646126 - RNA, 20 nt, Human
ugaggcauuuguuugaacug

SEQ ID NO: 1646127 - RNA, 17 nt, Human
ugaggcuaguguggugu

SEQ ID NO: 1646128 - RNA, 21 nt, Human
ugaggcauuuguuugaacuga

SEQ ID NO: 1646129 - RNA, 23 nt, Human
ugaggcuagugugguguuuccug

SEQ ID NO: 1646130 - RNA, 23 nt, Human
ugaggcauuuguuugaacugaua

SEQ ID NO: 1646131 - RNA, 13 nt, Human
ugagcugggauga

SEQ ID NO: 1646132 - RNA, 16 nt, Human
ugaggagcuugaaacc

SEQ ID NO: 1646133 - RNA, 16 nt, Human
ugauguguuaucucuu

SEQ ID NO: 1646134 - RNA, 19 nt, Human
ugaugucccaacuuguaaa

SEQ ID NO: 1646135 - RNA, 18 nt, Human
ugaugcuucuucagagac

SEQ ID NO: 1646136 - RNA, 17 nt, Human
ugaugcuucuucagaga

SEQ ID NO: 1646137 - RNA, 16 nt, Human
ugaugcuucuucagag

SEQ ID NO: 1646138 - RNA, 21 nt, Human
ugaugguuguacauauaagug

SEQ ID NO: 1646139 - RNA, 14 nt, Human
ugaugguuguacau

SEQ ID NO: 1646140 - RNA, 13 nt, Human
ugaugguuguaca

SEQ ID NO: 1646141 - RNA, 14 nt, Human
ugaugguuccccug

SEQ ID NO: 1646142 - RNA, 17 nt, Human
ugaucuuuaaaauacac

SEQ ID NO: 1646143 - RNA, 16 nt, Human
ugaucuuugcagacag

SEQ ID NO: 1646144 - RNA, 18 nt, Human
ugaucuuugcagacaggc

SEQ ID NO: 1646145 - RNA, 23 nt, Human
ugaugcuacaggauuugaaauug

SEQ ID NO: 1646146 - RNA, 23 nt, Human
ugaugcgggccagugcuccagcc

SEQ ID NO: 1646147 - RNA, 21 nt, Human
ugaugccugugaacugaacuc

SEQ ID NO: 1646148 - RNA, 20 nt, Human
ugaugcuacaggauuugaaa

SEQ ID NO: 1646149 - RNA, 11 nt, Human
ugaugccuggc

SEQ ID NO: 1646150 - RNA, 20 nt, Human
ugaugccugugaacugaacu

SEQ ID NO: 1646151 - RNA, 15 nt, Human
ugaugccugugaacu

SEQ ID NO: 1646152 - RNA, 14 nt, Human
ugaucuuuaaaaua

SEQ ID NO: 1646153 - RNA, 20 nt, Human
ugaucuucuuuauaauucua

SEQ ID NO: 1646154 - RNA, 15 nt, Human
ugaucugugggcaca

SEQ ID NO: 1646155 - RNA, 19 nt, Human
ugauccacccaccucagcc

SEQ ID NO: 1646156 - RNA, 18 nt, Human
ugauccacccaccucagc

SEQ ID NO: 1646157 - RNA, 17 nt, Human
ugauccacccaccucag

SEQ ID NO: 1646158 - RNA, 17 nt, Human
ugaucucucgugauuga

SEQ ID NO: 1646159 - RNA, 24 nt, Human
ugaucagcuuauugucuagugaaa

SEQ ID NO: 1646160 - RNA, 17 nt, Human
ugaucagcuuauugucu

SEQ ID NO: 1646161 - RNA, 14 nt, Human
ugauagcacagacc

SEQ ID NO: 1646162 - RNA, 13 nt, Human
ugauagcacagac

SEQ ID NO: 1646163 - RNA, 20 nt, Human
ugauaagaaccuuuugagug

SEQ ID NO: 1646164 - RNA, 15 nt, Human
ugauagaggaagccu

SEQ ID NO: 1646165 - RNA, 17 nt, Human
ugauccaagcugguccc

SEQ ID NO: 1646166 - RNA, 15 nt, Human
ugauccaagcugguc

SEQ ID NO: 1646167 - RNA, 14 nt, Human
ugauccaagcuggu

SEQ ID NO: 1646168 - RNA, 13 nt, Human
ugauccaagcugg

SEQ ID NO: 1646169 - RNA, 22 nt, Human
ugauuaugaauuacauuuguau

SEQ ID NO: 1646170 - RNA, 21 nt, Human
ugauuaugaauuacauuugua

SEQ ID NO: 1646171 - RNA, 20 nt, Human
ugauucaacagguuuuccug

SEQ ID NO: 1646172 - RNA, 16 nt, Human
ugauucagacagcugc

SEQ ID NO: 1646173 - RNA, 15 nt, Human
ugauucagacagcug

SEQ ID NO: 1646174 - RNA, 14 nt, Human
ugauucagacagcu

SEQ ID NO: 1646175 - RNA, 13 nt, Human
ugauucagacagc

SEQ ID NO: 1646176 - RNA, 12 nt, Human
ugauucacagug

SEQ ID NO: 1646177 - RNA, 22 nt, Human
ugauguuuagaaacacaacuau

SEQ ID NO: 1646178 - RNA, 20 nt, Human
ugauguucuuucacccuuuu

SEQ ID NO: 1646179 - RNA, 19 nt, Human
ugauuaugaauuacauuug

SEQ ID NO: 1646180 - RNA, 17 nt, Human
ugauuaugaauuacauu

SEQ ID NO: 1646181 - RNA, 13 nt, Human
ugauuauauguca

SEQ ID NO: 1646182 - RNA, 21 nt, Human
ugauucuccugccucagccuc

SEQ ID NO: 1646183 - RNA, 23 nt, Human
ugauucagacagcugccugggau

SEQ ID NO: 1646184 - RNA, 21 nt, Human
ugauucagacagcugccuggg

SEQ ID NO: 1646185 - RNA, 20 nt, Human
ugauucagacagcugccugg

SEQ ID NO: 1646186 - RNA, 19 nt, Human
ugauucagacagcugccug

SEQ ID NO: 1646187 - RNA, 18 nt, Human
ugauucagacagcugccu

SEQ ID NO: 1646188 - RNA, 21 nt, Human
ugauucuucagcaaaaauauu

SEQ ID NO: 1646189 - RNA, 21 nt, Human
ugauuggaggggggagguggg

SEQ ID NO: 1646190 - RNA, 13 nt, Human
ugauuggaggggg

SEQ ID NO: 1646191 - RNA, 20 nt, Human
ugauuggcaggaguuggaag

SEQ ID NO: 1646192 - RNA, 16 nt, Human
ugauugugucucuugg

SEQ ID NO: 1646193 - RNA, 17 nt, Human
ugcuguucaugaaagau

SEQ ID NO: 1646194 - RNA, 16 nt, Human
ugcuguucaugaaaga

SEQ ID NO: 1646195 - RNA, 18 nt, Human
ugcuguaacuuucugaaa

SEQ ID NO: 1646196 - RNA, 13 nt, Human
ugcugguuuuagu

SEQ ID NO: 1646197 - RNA, 20 nt, Human
ugcugggggggauuguaaaa

SEQ ID NO: 1646198 - RNA, 17 nt, Human
ugcugggcuugucugua

SEQ ID NO: 1646199 - RNA, 13 nt, Human
ugcuggguguggc

SEQ ID NO: 1646200 - RNA, 20 nt, Human
ugcugggguuaucugaaguc

SEQ ID NO: 1646201 - RNA, 17 nt, Human
ugcugggguuaucugaa

SEQ ID NO: 1646202 - RNA, 13 nt, Human
ugcugguguaugu

SEQ ID NO: 1646203 - RNA, 22 nt, Human
ugcugguguaugugugaaguga

SEQ ID NO: 1646204 - RNA, 12 nt, Human
ugcugcuugagg

SEQ ID NO: 1646205 - RNA, 19 nt, Human
ugcugcuugaggcaacuca

SEQ ID NO: 1646206 - RNA, 20 nt, Human
ugcugggauuacagguguga

SEQ ID NO: 1646207 - RNA, 14 nt, Human
ugcugggccccugc

SEQ ID NO: 1646208 - RNA, 24 nt, Human
ugcugggccccugccucucugcag

SEQ ID NO: 1646209 - RNA, 23 nt, Human
ugcugggccccugccucucugca

SEQ ID NO: 1646210 - RNA, 22 nt, Human
ugcugggccccugccucucugc

SEQ ID NO: 1646211 - RNA, 21 nt, Human
ugcugggccccugccucucug

SEQ ID NO: 1646212 - RNA, 19 nt, Human
ugcugggccccugccucuc

SEQ ID NO: 1646213 - RNA, 18 nt, Human
ugcugggccccugccucu

SEQ ID NO: 1646214 - RNA, 17 nt, Human
ugcugggccccugccuc

SEQ ID NO: 1646215 - RNA, 16 nt, Human
ugcugggccccugccu

SEQ ID NO: 1646216 - RNA, 17 nt, Human
ugcugcauuuaaaagau

SEQ ID NO: 1646217 - RNA, 18 nt, Human
ugcugcauuuaaaagaua

SEQ ID NO: 1646218 - RNA, 19 nt, Human
ugcugcauuuaaaagauac

SEQ ID NO: 1646219 - RNA, 23 nt, Human
ugcugcauuuaaaagauacaguu

SEQ ID NO: 1646220 - RNA, 17 nt, Human
ugcugccugcuuuuuau

SEQ ID NO: 1646221 - RNA, 15 nt, Human
ugcugccugcuuuuu

SEQ ID NO: 1646222 - RNA, 17 nt, Human
ugcuagaacucccuuuc

SEQ ID NO: 1646223 - RNA, 15 nt, Human
ugcuagaacucccuu

SEQ ID NO: 1646224 - RNA, 14 nt, Human
ugcuagaacucccu

SEQ ID NO: 1646225 - RNA, 13 nt, Human
ugcuagaacuccc

SEQ ID NO: 1646226 - RNA, 18 nt, Human
ugcuagaacucccuuuca

SEQ ID NO: 1646227 - RNA, 21 nt, Human
ugcuaggaacacuccuucaca

SEQ ID NO: 1646228 - RNA, 22 nt, Human
ugcuaggaacacuccuucacag

SEQ ID NO: 1646229 - RNA, 20 nt, Human
ugcucaggagcccugggagg

SEQ ID NO: 1646230 - RNA, 19 nt, Human
ugcucaggagcccugggag

SEQ ID NO: 1646231 - RNA, 18 nt, Human
ugcucaggagcccuggga

SEQ ID NO: 1646232 - RNA, 15 nt, Human
ugcucaggagcccug

SEQ ID NO: 1646233 - RNA, 17 nt, Human
ugcucacauaucuguca

SEQ ID NO: 1646234 - RNA, 23 nt, Human
ugcucuccgaccagacaccuuga

SEQ ID NO: 1646235 - RNA, 12 nt, Human
ugcucuccucuu

SEQ ID NO: 1646236 - RNA, 14 nt, Human
ugcucuccucuugc

SEQ ID NO: 1646237 - RNA, 22 nt, Human
ugcuacuguccuacccacccuc

SEQ ID NO: 1646238 - RNA, 21 nt, Human
ugcuacuguccuacccacccu

SEQ ID NO: 1646239 - RNA, 22 nt, Human
ugcuaagacucaguggggaggg

SEQ ID NO: 1646240 - RNA, 17 nt, Human
ugcggacagccacggcc

SEQ ID NO: 1646241 - RNA, 20 nt, Human
ugccuugcauaauggucaga

SEQ ID NO: 1646242 - RNA, 23 nt, Human
ugcgcaggcuggcccugcccugg

SEQ ID NO: 1646243 - RNA, 22 nt, Human
ugcgcaggcuggcccugcccug

SEQ ID NO: 1646244 - RNA, 21 nt, Human
ugcgcaggcuggcccugcccu

SEQ ID NO: 1646245 - RNA, 21 nt, Human
ugcgcuaaacuuuucugauag

SEQ ID NO: 1646246 - RNA, 20 nt, Human
ugcgcuaaacuuuucugaua

SEQ ID NO: 1646247 - RNA, 19 nt, Human
ugcgcuaaacuuuucugau

SEQ ID NO: 1646248 - RNA, 14 nt, Human
ugcaguucugaaga

SEQ ID NO: 1646249 - RNA, 12 nt, Human
ugcaguucugaa

SEQ ID NO: 1646250 - RNA, 16 nt, Human
ugcaguugccagucac

SEQ ID NO: 1646251 - RNA, 22 nt, Human
ugcaucaauuuuucuuauuuca

SEQ ID NO: 1646252 - RNA, 18 nt, Human
ugcauauuauuuuauguu

SEQ ID NO: 1646253 - RNA, 13 nt, Human
ugcagggaguccg

SEQ ID NO: 1646254 - RNA, 21 nt, Human
ugcaguggugcgaucuggguu

SEQ ID NO: 1646255 - RNA, 21 nt, Human
ugcaguuacacuaaaagguga

SEQ ID NO: 1646256 - RNA, 19 nt, Human
ugcaucagcugcugaaaca

SEQ ID NO: 1646257 - RNA, 13 nt, Human
ugcaucagcugcu

SEQ ID NO: 1646258 - RNA, 17 nt, Human
ugcaugguuuagaaagc

SEQ ID NO: 1646259 - RNA, 21 nt, Human
ugcauuuggugguuucagaaa

SEQ ID NO: 1646260 - RNA, 23 nt, Human
ugcauuuggugguuucagaaaug

SEQ ID NO: 1646261 - RNA, 16 nt, Human
ugccacuaaauugaca

SEQ ID NO: 1646262 - RNA, 22 nt, Human
ugccaggaagccagcaggcucu

SEQ ID NO: 1646263 - RNA, 20 nt, Human
ugccaggaagccagcaggcu

SEQ ID NO: 1646264 - RNA, 14 nt, Human
ugccaggcauggug

SEQ ID NO: 1646265 - RNA, 23 nt, Human
ugccucacccacccuuuuuuaaa

SEQ ID NO: 1646266 - RNA, 20 nt, Human
ugccucacccacccuuuuuu

SEQ ID NO: 1646267 - RNA, 16 nt, Human
ugccuccucuucaacu

SEQ ID NO: 1646268 - RNA, 14 nt, Human
ugccuccucuucaa

SEQ ID NO: 1646269 - RNA, 14 nt, Human
ugccucaagagaag

SEQ ID NO: 1646270 - RNA, 15 nt, Human
ugccucaagagaagg

SEQ ID NO: 1646271 - RNA, 23 nt, Human
ugccuaaauccauuuggaaaucu

SEQ ID NO: 1646272 - RNA, 22 nt, Human
ugccuaaauccauuuggaaauc

SEQ ID NO: 1646273 - RNA, 20 nt, Human
ugccuaaauccauuuggaaa

SEQ ID NO: 1646274 - RNA, 23 nt, Human
ugcccugugaguacuacaguccu

SEQ ID NO: 1646275 - RNA, 23 nt, Human
ugcccugguuuccugcccuggga

SEQ ID NO: 1646276 - RNA, 20 nt, Human
ugcccugguuuccugcccug

SEQ ID NO: 1646277 - RNA, 19 nt, Human
ugcccugguuuccugcccu

SEQ ID NO: 1646278 - RNA, 19 nt, Human
ugccuaaauccauuuggaa

SEQ ID NO: 1646279 - RNA, 15 nt, Human
ugccuaaauccauuu

SEQ ID NO: 1646280 - RNA, 13 nt, Human
ugccuaaauccau

SEQ ID NO: 1646281 - RNA, 18 nt, Human
ugcccugguuuccugccc

SEQ ID NO: 1646282 - RNA, 17 nt, Human
ugcccugguuuccugcc

SEQ ID NO: 1646283 - RNA, 17 nt, Human
ugcccuggugcugccac

SEQ ID NO: 1646284 - RNA, 16 nt, Human
ugcccuggugcugcca

SEQ ID NO: 1646285 - RNA, 14 nt, Human
ugcccuggugcugc

SEQ ID NO: 1646286 - RNA, 12 nt, Human
ugcccuggugcu

SEQ ID NO: 1646287 - RNA, 21 nt, Human
ugcccugcccaccuggccucu

SEQ ID NO: 1646288 - RNA, 13 nt, Human
ugcccugggaggc

SEQ ID NO: 1646289 - RNA, 18 nt, Human
ugcccugggaggcaguga

SEQ ID NO: 1646290 - RNA, 17 nt, Human
ugcccugggaggcagug

SEQ ID NO: 1646291 - RNA, 15 nt, Human
ugcccugggaggcag

SEQ ID NO: 1646292 - RNA, 20 nt, Human
ugcccugcccaccuggccuc

SEQ ID NO: 1646293 - RNA, 16 nt, Human
ugcccugcccaccugg

SEQ ID NO: 1646294 - RNA, 15 nt, Human
ugcccugcccaccug

SEQ ID NO: 1646295 - RNA, 16 nt, Human
ugccccuggcagcccc

SEQ ID NO: 1646296 - RNA, 20 nt, Human
ugccccuccucucugcccua

SEQ ID NO: 1646297 - RNA, 19 nt, Human
ugccccuccucucugcccu

SEQ ID NO: 1646298 - RNA, 18 nt, Human
ugccccuccucucugccc

SEQ ID NO: 1646299 - RNA, 17 nt, Human
ugccccuccucucugcc

SEQ ID NO: 1646300 - RNA, 16 nt, Human
ugccccucccuucaac

SEQ ID NO: 1646301 - RNA, 15 nt, Human
ugccccucccuucaa

SEQ ID NO: 1646302 - RNA, 14 nt, Human
ugcccggcugcgga

SEQ ID NO: 1646303 - RNA, 12 nt, Human
ugcccggcugcg

SEQ ID NO: 1646304 - RNA, 17 nt, Human
ugccccuggcagccccu

SEQ ID NO: 1646305 - RNA, 20 nt, Human
ugcccaggcuggcgugcagu

SEQ ID NO: 1646306 - RNA, 19 nt, Human
ugcccaggcuggcgugcag

SEQ ID NO: 1646307 - RNA, 18 nt, Human
ugcccaggcuggcgugca

SEQ ID NO: 1646308 - RNA, 21 nt, Human
ugguauguuuucaggcuagau

SEQ ID NO: 1646309 - RNA, 13 nt, Human
ugguauguuuuca

SEQ ID NO: 1646310 - RNA, 22 nt, Human
uggucacaggaaguagaggagg

SEQ ID NO: 1646311 - RNA, 18 nt, Human
uggucacaggacucugcc

SEQ ID NO: 1646312 - RNA, 16 nt, Human
uggucccagccagcag

SEQ ID NO: 1646313 - RNA, 19 nt, Human
uggucacaggacucugccu

SEQ ID NO: 1646314 - RNA, 20 nt, Human
uggucacaggacucugccuc

SEQ ID NO: 1646315 - RNA, 14 nt, Human
uggucccccuucca

SEQ ID NO: 1646316 - RNA, 19 nt, Human
ugguccuaaucuucugaac

SEQ ID NO: 1646317 - RNA, 17 nt, Human
ugguccuaaucuucuga

SEQ ID NO: 1646318 - RNA, 23 nt, Human
ugguccugcugcaguugccaguc

SEQ ID NO: 1646319 - RNA, 15 nt, Human
ugguccugcugcagu

SEQ ID NO: 1646320 - RNA, 13 nt, Human
ugguccugcugca

SEQ ID NO: 1646321 - RNA, 23 nt, Human
uggucccccuuccauggacuuug

SEQ ID NO: 1646322 - RNA, 18 nt, Human
uggucccccuuccaugga

SEQ ID NO: 1646323 - RNA, 16 nt, Human
uggucccccuuccaug

SEQ ID NO: 1646324 - RNA, 15 nt, Human
uggucccccuuccau

SEQ ID NO: 1646325 - RNA, 20 nt, Human
ugguccgugcuaaggacuug

SEQ ID NO: 1646326 - RNA, 19 nt, Human
ugguccgugcuaaggacuu

SEQ ID NO: 1646327 - RNA, 18 nt, Human
ugguccgugcuaaggacu

SEQ ID NO: 1646328 - RNA, 17 nt, Human
ugguccgugcuaaggac

SEQ ID NO: 1646329 - RNA, 22 nt, Human
uggugaccucugccugaaguca

SEQ ID NO: 1646330 - RNA, 17 nt, Human
uggugaccucugccuga

SEQ ID NO: 1646331 - RNA, 16 nt, Human
uggugaccucugccug

SEQ ID NO: 1646332 - RNA, 15 nt, Human
uggugaccucugccu

SEQ ID NO: 1646333 - RNA, 19 nt, Human
uggugacuuuccucuuugg

SEQ ID NO: 1646334 - RNA, 19 nt, Human
uggugacugauucuucagc

SEQ ID NO: 1646335 - RNA, 16 nt, Human
uggugacugauucuuc

SEQ ID NO: 1646336 - RNA, 15 nt, Human
uggugacugauucuu

SEQ ID NO: 1646337 - RNA, 21 nt, Human
uggugcaaugaccuuucaaua

SEQ ID NO: 1646338 - RNA, 15 nt, Human
uggugacuuuggaua

SEQ ID NO: 1646339 - RNA, 18 nt, Human
uggucuacacugugcuga

SEQ ID NO: 1646340 - RNA, 17 nt, Human
uggucuacacugugcug

SEQ ID NO: 1646341 - RNA, 16 nt, Human
uggucuacacugugcu

SEQ ID NO: 1646342 - RNA, 15 nt, Human
uggucuacacugugc

SEQ ID NO: 1646343 - RNA, 14 nt, Human
uggugaccucugcc

SEQ ID NO: 1646344 - RNA, 13 nt, Human
uggugaccucugc

SEQ ID NO: 1646345 - RNA, 19 nt, Human
uggucuacacugugcugag

SEQ ID NO: 1646346 - RNA, 14 nt, Human
uggucggaaaacau

SEQ ID NO: 1646347 - RNA, 17 nt, Human
uggucggaaaacaugcu

SEQ ID NO: 1646348 - RNA, 13 nt, Human
ugggcagcugccu

SEQ ID NO: 1646349 - RNA, 14 nt, Human
ugggcagcugccuc

SEQ ID NO: 1646350 - RNA, 15 nt, Human
ugggcagcugccucc

SEQ ID NO: 1646351 - RNA, 23 nt, Human
ugggcagagcagagaccaucccu

SEQ ID NO: 1646352 - RNA, 17 nt, Human
ugggcagcugccucccc

SEQ ID NO: 1646353 - RNA, 19 nt, Human
ugggcagcugccuccccuc

SEQ ID NO: 1646354 - RNA, 14 nt, Human
ugggccuggcuccc

SEQ ID NO: 1646355 - RNA, 11 nt, Human
ugggccuucag

SEQ ID NO: 1646356 - RNA, 23 nt, Human
ugggccccugccucucugcaggu

SEQ ID NO: 1646357 - RNA, 21 nt, Human
ugggccccugccucucugcag

SEQ ID NO: 1646358 - RNA, 20 nt, Human
uggcugggggccucagugcc

SEQ ID NO: 1646359 - RNA, 17 nt, Human
uggcugggggccucagu

SEQ ID NO: 1646360 - RNA, 16 nt, Human
uggcugggggccucag

SEQ ID NO: 1646361 - RNA, 16 nt, Human
ugggagugggcccaau

SEQ ID NO: 1646362 - RNA, 14 nt, Human
ugggagugggccca

SEQ ID NO: 1646363 - RNA, 19 nt, Human
ugggaucacauguggacuu

SEQ ID NO: 1646364 - RNA, 13 nt, Human
ugggauccuccag

SEQ ID NO: 1646365 - RNA, 12 nt, Human
ugggauccucca

SEQ ID NO: 1646366 - RNA, 14 nt, Human
ugggauccuccagg

SEQ ID NO: 1646367 - RNA, 22 nt, Human
ugggcagagcagagaccauccc

SEQ ID NO: 1646368 - RNA, 17 nt, Human
ugggauuacaggcguga

SEQ ID NO: 1646369 - RNA, 22 nt, Human
ugggauuacaagcgugagccac

SEQ ID NO: 1646370 - RNA, 18 nt, Human
uggguacuuguggacaca

SEQ ID NO: 1646371 - RNA, 17 nt, Human
uggguacuuguggacac

SEQ ID NO: 1646372 - RNA, 22 nt, Human
uggggguucuuucuuccucugc

SEQ ID NO: 1646373 - RNA, 20 nt, Human
uggggguucuuucuuccucu

SEQ ID NO: 1646374 - RNA, 19 nt, Human
uggggguucuuucuuccuc

SEQ ID NO: 1646375 - RNA, 15 nt, Human
uggggguucuuucuu

SEQ ID NO: 1646376 - RNA, 16 nt, Human
ugggggaguggccaca

SEQ ID NO: 1646377 - RNA, 13 nt, Human
uggggggggugcu

SEQ ID NO: 1646378 - RNA, 23 nt, Human
uggggaugagaaagguugaagca

SEQ ID NO: 1646379 - RNA, 15 nt, Human
uggggaugagaaagg

SEQ ID NO: 1646380 - RNA, 20 nt, Human
uggggccaguuggucccccu

SEQ ID NO: 1646381 - RNA, 21 nt, Human
uggggccaguuggucccccuu

SEQ ID NO: 1646382 - RNA, 22 nt, Human
uggggccaggcugggucgcccu

SEQ ID NO: 1646383 - RNA, 21 nt, Human
uggggccaggcugggucgccc

SEQ ID NO: 1646384 - RNA, 12 nt, Human
ugggccuucagg

SEQ ID NO: 1646385 - RNA, 15 nt, Human
ugggccuucagggag

SEQ ID NO: 1646386 - RNA, 15 nt, Human
uggcacuaguauuuc

SEQ ID NO: 1646387 - RNA, 20 nt, Human
uggcaauagucaaauugugu

SEQ ID NO: 1646388 - RNA, 16 nt, Human
uggcacuauaauguaa

SEQ ID NO: 1646389 - RNA, 15 nt, Human
uggcacuauaaugua

SEQ ID NO: 1646390 - RNA, 12 nt, Human
uggcaaaaaggc

SEQ ID NO: 1646391 - RNA, 16 nt, Human
uggcaaaaaggcagga

SEQ ID NO: 1646392 - RNA, 23 nt, Human
uggaggaaggaaacccagcucug

SEQ ID NO: 1646393 - RNA, 21 nt, Human
uggaggaaggaaacccagcuc

SEQ ID NO: 1646394 - RNA, 17 nt, Human
uggagacugucucaaga

SEQ ID NO: 1646395 - RNA, 14 nt, Human
uggagacugucuca

SEQ ID NO: 1646396 - RNA, 20 nt, Human
uggauaauaaggaaaaguuu

SEQ ID NO: 1646397 - RNA, 14 nt, Human
uggacuccucuguc

SEQ ID NO: 1646398 - RNA, 13 nt, Human
uggacuccucugu

SEQ ID NO: 1646399 - RNA, 21 nt, Human
uggagaagcucccugaaguaa

SEQ ID NO: 1646400 - RNA, 22 nt, Human
uggaccaaaaaccaguauugua

SEQ ID NO: 1646401 - RNA, 18 nt, Human
uggccagaugcaccagcc

SEQ ID NO: 1646402 - RNA, 17 nt, Human
uggccagaugcaccagc

SEQ ID NO: 1646403 - RNA, 19 nt, Human
uggcagaguugaagacaga

SEQ ID NO: 1646404 - RNA, 17 nt, Human
uggcagaguugaagaca

SEQ ID NO: 1646405 - RNA, 21 nt, Human
uggcagaguggauucuugaac

SEQ ID NO: 1646406 - RNA, 15 nt, Human
uggcagaguugaaga

SEQ ID NO: 1646407 - RNA, 12 nt, Human
uggcagaggagg

SEQ ID NO: 1646408 - RNA, 19 nt, Human
uggccagaugcaccagccc

SEQ ID NO: 1646409 - RNA, 20 nt, Human
uggccagaugcaccagcccu

SEQ ID NO: 1646410 - RNA, 17 nt, Human
uggccaggcugcucuug

SEQ ID NO: 1646411 - RNA, 16 nt, Human
uggccaggcugcucuu

SEQ ID NO: 1646412 - RNA, 13 nt, Human
uggccaggcuggu

SEQ ID NO: 1646413 - RNA, 15 nt, Human
uggccaggcuggucu

SEQ ID NO: 1646414 - RNA, 20 nt, Human
uggccaggcugcucuugaac

SEQ ID NO: 1646415 - RNA, 16 nt, Human
uggccccugcccggcu

SEQ ID NO: 1646416 - RNA, 15 nt, Human
uggccccugcccggc

SEQ ID NO: 1646417 - RNA, 20 nt, Human
uggccccugcccggcugcgg

SEQ ID NO: 1646418 - RNA, 23 nt, Human
uggcgcugccccuggcagccccu

SEQ ID NO: 1646419 - RNA, 16 nt, Human
uggcgcugccccuggc

SEQ ID NO: 1646420 - RNA, 23 nt, Human
uggcgcagcauauucaggaagcu

SEQ ID NO: 1646421 - RNA, 22 nt, Human
uggcgcagcauauucaggaagc

SEQ ID NO: 1646422 - RNA, 23 nt, Human
uggccucccaacucaccccagcc

SEQ ID NO: 1646423 - RNA, 16 nt, Human
uggcugcuucaaggau

SEQ ID NO: 1646424 - RNA, 15 nt, Human
uggcugcuucaagga

SEQ ID NO: 1646425 - RNA, 11 nt, Human
uggcugcuuca

SEQ ID NO: 1646426 - RNA, 16 nt, Human
uggcuccucccggugc

SEQ ID NO: 1646427 - RNA, 14 nt, Human
uggcuccucccggu

SEQ ID NO: 1646428 - RNA, 19 nt, Human
uggcuccucccggugccca

SEQ ID NO: 1646429 - RNA, 18 nt, Human
uggcuccucccggugccc

SEQ ID NO: 1646430 - RNA, 15 nt, Human
uggcgggguggggug

SEQ ID NO: 1646431 - RNA, 20 nt, Human
uggcucccacaggcccuucc

SEQ ID NO: 1646432 - RNA, 17 nt, Human
uggcucccacaggcccu

SEQ ID NO: 1646433 - RNA, 14 nt, Human
uggcucccacaggc

SEQ ID NO: 1646434 - RNA, 18 nt, Human
uuaacuuuuauaaacuuu

SEQ ID NO: 1646435 - RNA, 16 nt, Human
uuaacuuuuauaaacu

SEQ ID NO: 1646436 - RNA, 17 nt, Human
uuaacuuuuauaaacuu

SEQ ID NO: 1646437 - RNA, 15 nt, Human
uuaacuuuuauaaac

SEQ ID NO: 1646438 - RNA, 16 nt, Human
uuaacuucacauauug

SEQ ID NO: 1646439 - RNA, 17 nt, Human
uuaaccacuucagcuga

SEQ ID NO: 1646440 - RNA, 23 nt, Human
uuaaauguuuuuuuuuaaagacu

SEQ ID NO: 1646441 - RNA, 21 nt, Human
uuaaauguuuuuuuuuaaaga

SEQ ID NO: 1646442 - RNA, 14 nt, Human
uuaaagacuuuuau

SEQ ID NO: 1646443 - RNA, 22 nt, Human
uuaauauuaaagccauguuuau

SEQ ID NO: 1646444 - RNA, 21 nt, Human
uuaauauuaaagccauguuua

SEQ ID NO: 1646445 - RNA, 22 nt, Human
uuaauauugauaugcuuauaca

SEQ ID NO: 1646446 - RNA, 18 nt, Human
uuaauauugauaugcuua

SEQ ID NO: 1646447 - RNA, 17 nt, Human
uuaagcuguuacugucu

SEQ ID NO: 1646448 - RNA, 16 nt, Human
uuaagccuuuggaaac

SEQ ID NO: 1646449 - RNA, 15 nt, Human
uuaagccuuuggaaa

SEQ ID NO: 1646450 - RNA, 23 nt, Human
uuaagcauauauuuuuauauuua

SEQ ID NO: 1646451 - RNA, 19 nt, Human
uuaagcauauauuuuuaua

SEQ ID NO: 1646452 - RNA, 18 nt, Human
uuaagcauauauuuuuau

SEQ ID NO: 1646453 - RNA, 15 nt, Human
uuaagcauauauuuu

SEQ ID NO: 1646454 - RNA, 13 nt, Human
uuaagcauauauu

SEQ ID NO: 1646455 - RNA, 22 nt, Human
uuaaugucaauucuugccaaau

SEQ ID NO: 1646456 - RNA, 20 nt, Human
uuacaagcgugagccacugc

SEQ ID NO: 1646457 - RNA, 21 nt, Human
uuacaagcgugagccacugca

SEQ ID NO: 1646458 - RNA, 22 nt, Human
uuaaaagaauauuuuaacuucc

SEQ ID NO: 1646459 - RNA, 21 nt, Human
uuaaaagaauauuuuaacuuc

SEQ ID NO: 1646460 - RNA, 14 nt, Human
uuaaaagauacagu

SEQ ID NO: 1646461 - RNA, 17 nt, Human
uuaaaagauacaguuac

SEQ ID NO: 1646462 - RNA, 18 nt, Human
uguuuuuuuuuaaagacu

SEQ ID NO: 1646463 - RNA, 19 nt, Human
uguuuuuuuuuuccacuua

SEQ ID NO: 1646464 - RNA, 18 nt, Human
uguuuuuuuuuuccacuu

SEQ ID NO: 1646465 - RNA, 19 nt, Human
uguuuuaaggaugcuugua

SEQ ID NO: 1646466 - RNA, 22 nt, Human
uguuuuaagaggcagggucuca

SEQ ID NO: 1646467 - RNA, 18 nt, Human
uguuuuaaggaugcuugu

SEQ ID NO: 1646468 - RNA, 17 nt, Human
uguuuuguuuggagaca

SEQ ID NO: 1646469 - RNA, 18 nt, Human
uuaaaagaugaaaauauu

SEQ ID NO: 1646470 - RNA, 15 nt, Human
uuaaaagaugaaaau

SEQ ID NO: 1646471 - RNA, 13 nt, Human
uuaaaagaaugau

SEQ ID NO: 1646472 - RNA, 21 nt, Human
uuaaaauaccagccaguaaau

SEQ ID NO: 1646473 - RNA, 19 nt, Human
uguuucaaacauauauaac

SEQ ID NO: 1646474 - RNA, 16 nt, Human
uguuuagauaauacac

SEQ ID NO: 1646475 - RNA, 14 nt, Human
uggugcccugcuuu

SEQ ID NO: 1646476 - RNA, 22 nt, Human
uguuucaaacauauauaacaau

SEQ ID NO: 1646477 - RNA, 21 nt, Human
uguuucaaacauauauaacaa

SEQ ID NO: 1646478 - RNA, 20 nt, Human
uguuuagauaauacaccacu

SEQ ID NO: 1646479 - RNA, 15 nt, Human
uguuucaaacuuuac

SEQ ID NO: 1646480 - RNA, 13 nt, Human
uguuugugauuga

SEQ ID NO: 1646481 - RNA, 20 nt, Human
uguuuuaagaggcagggucu

SEQ ID NO: 1646482 - RNA, 21 nt, Human
uuagaugcaguucugaagaag

SEQ ID NO: 1646483 - RNA, 20 nt, Human
uuagaugcaguucugaagaa

SEQ ID NO: 1646484 - RNA, 22 nt, Human
uuagauaauacaccacuacauu

SEQ ID NO: 1646485 - RNA, 14 nt, Human
uuagaucuaguuca

SEQ ID NO: 1646486 - RNA, 13 nt, Human
uuagaucuaguuc

SEQ ID NO: 1646487 - RNA, 14 nt, Human
uuagaguugauacu

SEQ ID NO: 1646488 - RNA, 12 nt, Human
uuagagauuuuu

SEQ ID NO: 1646489 - RNA, 18 nt, Human
uuagagaguguugaaacg

SEQ ID NO: 1646490 - RNA, 13 nt, Human
uuagcuggaaaag

SEQ ID NO: 1646491 - RNA, 12 nt, Human
uuagcuggaaaa

SEQ ID NO: 1646492 - RNA, 12 nt, Human
uuagcugggaga

SEQ ID NO: 1646493 - RNA, 18 nt, Human
uuaggauguugaaaaagu

SEQ ID NO: 1646494 - RNA, 16 nt, Human
uuaguaugaggcauuu

SEQ ID NO: 1646495 - RNA, 18 nt, Human
uuaguaugaggcauuugu

SEQ ID NO: 1646496 - RNA, 14 nt, Human
uuaguguucauaaa

SEQ ID NO: 1646497 - RNA, 19 nt, Human
uuagaaacacaacuauauu

SEQ ID NO: 1646498 - RNA, 15 nt, Human
uuagacagucccugc

SEQ ID NO: 1646499 - RNA, 14 nt, Human
uuacuuuguguuca

SEQ ID NO: 1646500 - RNA, 18 nt, Human
uuacuuuaaaaggagcca

SEQ ID NO: 1646501 - RNA, 17 nt, Human
uuacuuuaaaaggagcc

SEQ ID NO: 1646502 - RNA, 18 nt, Human
uuagacagucccugccaa

SEQ ID NO: 1646503 - RNA, 17 nt, Human
uuagacagucccugcca

SEQ ID NO: 1646504 - RNA, 16 nt, Human
uuagacagucccugcc

SEQ ID NO: 1646505 - RNA, 17 nt, Human
uuagagaguguugaaac

SEQ ID NO: 1646506 - RNA, 16 nt, Human
uuagagaguguugaaa

SEQ ID NO: 1646507 - RNA, 14 nt, Human
uuagagaguguuga

SEQ ID NO: 1646508 - RNA, 17 nt, Human
uuacuaguuucccuugc

SEQ ID NO: 1646509 - RNA, 19 nt, Human
uuacuaucaugucaaacgu

SEQ ID NO: 1646510 - RNA, 21 nt, Human
uuacuaucaugucaaacguga

SEQ ID NO: 1646511 - RNA, 13 nt, Human
uuacuaaguuuuu

SEQ ID NO: 1646512 - RNA, 14 nt, Human
uuacuaaguuuuua

SEQ ID NO: 1646513 - RNA, 16 nt, Human
uuacuaauagacaauu

SEQ ID NO: 1646514 - RNA, 18 nt, Human
uuacuuagguguggggga

SEQ ID NO: 1646515 - RNA, 23 nt, Human
uuacuucuuauacauuugauaaa

SEQ ID NO: 1646516 - RNA, 12 nt, Human
uuacuucugcua

SEQ ID NO: 1646517 - RNA, 11 nt, Human
uuacuucugcu

SEQ ID NO: 1646518 - RNA, 21 nt, Human
uuacuuaaaccgccaaggcug

SEQ ID NO: 1646519 - RNA, 19 nt, Human
uuacuauggcccuggccua

SEQ ID NO: 1646520 - RNA, 19 nt, Human
uuacugucuuuuuucuaaa

SEQ ID NO: 1646521 - RNA, 17 nt, Human
uuacugucuuuuuucua

SEQ ID NO: 1646522 - RNA, 19 nt, Human
uuccagauccuggaaauca

SEQ ID NO: 1646523 - RNA, 21 nt, Human
uuccagagaguggcuccuccc

SEQ ID NO: 1646524 - RNA, 20 nt, Human
uuccagagaguggcuccucc

SEQ ID NO: 1646525 - RNA, 19 nt, Human
uuccagagaguggcuccuc

SEQ ID NO: 1646526 - RNA, 18 nt, Human
uuccagagaguggcuccu

SEQ ID NO: 1646527 - RNA, 17 nt, Human
uuccagagaguggcucc

SEQ ID NO: 1646528 - RNA, 15 nt, Human
uuccaaauucugcuu

SEQ ID NO: 1646529 - RNA, 17 nt, Human
uucaugcaaacuuuauu

SEQ ID NO: 1646530 - RNA, 16 nt, Human
uucauuuccugugucu

SEQ ID NO: 1646531 - RNA, 15 nt, Human
uucauuuccuguguc

SEQ ID NO: 1646532 - RNA, 15 nt, Human
uucaggaagcucagg

SEQ ID NO: 1646533 - RNA, 13 nt, Human
uucaggaagcuca

SEQ ID NO: 1646534 - RNA, 11 nt, Human
uucaggaagcu

SEQ ID NO: 1646535 - RNA, 21 nt, Human
uucaucuugaauuguaaggaa

SEQ ID NO: 1646536 - RNA, 17 nt, Human
uucaugaaagauucaau

SEQ ID NO: 1646537 - RNA, 15 nt, Human
uucaugaaagauuca

SEQ ID NO: 1646538 - RNA, 20 nt, Human
uuccccaggaggccagccuu

SEQ ID NO: 1646539 - RNA, 19 nt, Human
uuccccaggaggccagccu

SEQ ID NO: 1646540 - RNA, 18 nt, Human
uuccccaggaggccagcc

SEQ ID NO: 1646541 - RNA, 17 nt, Human
uuccccaggaggccagc

SEQ ID NO: 1646542 - RNA, 21 nt, Human
uuccccaggaggccagccuug

SEQ ID NO: 1646543 - RNA, 11 nt, Human
uuccccauggg

SEQ ID NO: 1646544 - RNA, 19 nt, Human
uuccccaugucucgacuca

SEQ ID NO: 1646545 - RNA, 20 nt, Human
uucccucccuuccucuuucc

SEQ ID NO: 1646546 - RNA, 17 nt, Human
uucccucccuuccucuu

SEQ ID NO: 1646547 - RNA, 11 nt, Human
uucccucccuu

SEQ ID NO: 1646548 - RNA, 16 nt, Human
uuccccaggaggccag

SEQ ID NO: 1646549 - RNA, 15 nt, Human
uuccccaggaggcca

SEQ ID NO: 1646550 - RNA, 16 nt, Human
uucccauuugcuccuu

SEQ ID NO: 1646551 - RNA, 14 nt, Human
uucccauucuugca

SEQ ID NO: 1646552 - RNA, 23 nt, Human
uuccagcaauucuccugccucag

SEQ ID NO: 1646553 - RNA, 22 nt, Human
uuccagcaauucuccugccuca

SEQ ID NO: 1646554 - RNA, 21 nt, Human
uuccagcaauucuccugccuc

SEQ ID NO: 1646555 - RNA, 20 nt, Human
uuccagcaauucuccugccu

SEQ ID NO: 1646556 - RNA, 20 nt, Human
uuccuuggacucauuuuaaa

SEQ ID NO: 1646557 - RNA, 20 nt, Human
uucgggaggucgaggcagga

SEQ ID NO: 1646558 - RNA, 17 nt, Human
uucuaaagcugccagcc

SEQ ID NO: 1646559 - RNA, 13 nt, Human
uucuaaagcugcc

SEQ ID NO: 1646560 - RNA, 20 nt, Human
uuccuugaguugauucagcu

SEQ ID NO: 1646561 - RNA, 14 nt, Human
uuccuggcacugcu

SEQ ID NO: 1646562 - RNA, 19 nt, Human
uuccugaugcuucuucaga

SEQ ID NO: 1646563 - RNA, 18 nt, Human
uuccugaugcuucuucag

SEQ ID NO: 1646564 - RNA, 15 nt, Human
uuccugaugcuucuu

SEQ ID NO: 1646565 - RNA, 23 nt, Human
uuccugaugcuucuucagagacu

SEQ ID NO: 1646566 - RNA, 18 nt, Human
uuccugcauuugugaaau

SEQ ID NO: 1646567 - RNA, 16 nt, Human
uuccugcauuugugaa

SEQ ID NO: 1646568 - RNA, 17 nt, Human
uuccugccaggcauggu

SEQ ID NO: 1646569 - RNA, 18 nt, Human
uucccuugaugaagaagu

SEQ ID NO: 1646570 - RNA, 20 nt, Human
uucccuuugacgccauccca

SEQ ID NO: 1646571 - RNA, 22 nt, Human
uucccuuugacgccaucccagc

SEQ ID NO: 1646572 - RNA, 21 nt, Human
uucccuuugacgccaucccag

SEQ ID NO: 1646573 - RNA, 13 nt, Human
uuccucauuagca

SEQ ID NO: 1646574 - RNA, 17 nt, Human
uucccuugaugaagaag

SEQ ID NO: 1646575 - RNA, 19 nt, Human
uucccccuccaaucccacc

SEQ ID NO: 1646576 - RNA, 15 nt, Human
uuauugcccacgcug

SEQ ID NO: 1646577 - RNA, 11 nt, Human
uuauucugcuc

SEQ ID NO: 1646578 - RNA, 17 nt, Human
uuauggcuauaggugcu

SEQ ID NO: 1646579 - RNA, 18 nt, Human
uuauuacuguaagaaaau

SEQ ID NO: 1646580 - RNA, 17 nt, Human
uuauuacuguaagaaaa

SEQ ID NO: 1646581 - RNA, 16 nt, Human
uuauuacuguaagaaa

SEQ ID NO: 1646582 - RNA, 14 nt, Human
uuauuacaguauaa

SEQ ID NO: 1646583 - RNA, 21 nt, Human
uuauggcacuaguauuucuau

SEQ ID NO: 1646584 - RNA, 16 nt, Human
uuauggaacacucuga

SEQ ID NO: 1646585 - RNA, 16 nt, Human
uuaugcaugaaguaau

SEQ ID NO: 1646586 - RNA, 22 nt, Human
uuaugcaugaaguaauaugcac

SEQ ID NO: 1646587 - RNA, 17 nt, Human
uuaucuagauacuguau

SEQ ID NO: 1646588 - RNA, 17 nt, Human
uuaucugaagucagauc

SEQ ID NO: 1646589 - RNA, 20 nt, Human
uuaucuugaauaauguaaga

SEQ ID NO: 1646590 - RNA, 14 nt, Human
uuaguuccuugagu

SEQ ID NO: 1646591 - RNA, 16 nt, Human
uuaguuccucauuagc

SEQ ID NO: 1646592 - RNA, 13 nt, Human
uuaguugcaacuu

SEQ ID NO: 1646593 - RNA, 16 nt, Human
uuaucuagauacugua

SEQ ID NO: 1646594 - RNA, 20 nt, Human
uuaguugcaacuuuguauaa

SEQ ID NO: 1646595 - RNA, 15 nt, Human
uuauugucuagugaa

SEQ ID NO: 1646596 - RNA, 18 nt, Human
uuauugucaaagugguga

SEQ ID NO: 1646597 - RNA, 17 nt, Human
uuauugucaaaguggug

SEQ ID NO: 1646598 - RNA, 16 nt, Human
uuauuuuaauaauguu

SEQ ID NO: 1646599 - RNA, 15 nt, Human
uuauuuuaauaaugu

SEQ ID NO: 1646600 - RNA, 22 nt, Human
uuauuggcuuuucugauccagu

SEQ ID NO: 1646601 - RNA, 18 nt, Human
uuauuggcuuuucugauc

SEQ ID NO: 1646602 - RNA, 16 nt, Human
uuauuggcuuuucuga

SEQ ID NO: 1646603 - RNA, 12 nt, Human
uuauuggcuuuu

SEQ ID NO: 1646604 - RNA, 17 nt, Human
uuauuuuaauaauguuu

SEQ ID NO: 1646605 - RNA, 20 nt, Human
uuauuuuauguugcauagaa

SEQ ID NO: 1646606 - RNA, 14 nt, Human
uuauuuuauuauga

SEQ ID NO: 1646607 - RNA, 13 nt, Human
uuauuuuauuaug

SEQ ID NO: 1646608 - RNA, 17 nt, Human
uucaaauccuugaagau

SEQ ID NO: 1646609 - RNA, 19 nt, Human
uucaacgcagcccugcuuu

SEQ ID NO: 1646610 - RNA, 16 nt, Human
uucaacgcagcccugc

SEQ ID NO: 1646611 - RNA, 20 nt, Human
uucaacgcagcccugcuuug

SEQ ID NO: 1646612 - RNA, 17 nt, Human
uucaacugaccagccuc

SEQ ID NO: 1646613 - RNA, 23 nt, Human
uucaaaguugccuaaauccauuu

SEQ ID NO: 1646614 - RNA, 17 nt, Human
uucaaaguugccuaaau

SEQ ID NO: 1646615 - RNA, 16 nt, Human
uucaaaguugccuaaa

SEQ ID NO: 1646616 - RNA, 15 nt, Human
uucaaaguugccuaa

SEQ ID NO: 1646617 - RNA, 11 nt, Human
uucaaaguugc

SEQ ID NO: 1646618 - RNA, 20 nt, Human
uucagacauagaauuaacac

SEQ ID NO: 1646619 - RNA, 16 nt, Human
uucagacauagaauua

SEQ ID NO: 1646620 - RNA, 21 nt, Human
uucagacagcugccugggauc

SEQ ID NO: 1646621 - RNA, 13 nt, Human
uucacucuccuug

SEQ ID NO: 1646622 - RNA, 20 nt, Human
uucagauaaucacaauacau

SEQ ID NO: 1646623 - RNA, 22 nt, Human
uucagaguugaugguuguacau

SEQ ID NO: 1646624 - RNA, 21 nt, Human
uucagaguugaugguuguaca

SEQ ID NO: 1646625 - RNA, 13 nt, Human
uucagagcugccc

SEQ ID NO: 1646626 - RNA, 14 nt, Human
uucagagcugcccu

SEQ ID NO: 1646627 - RNA, 21 nt, Human
uucacucuccauuuaauaauu

SEQ ID NO: 1646628 - RNA, 20 nt, Human
uucaauaggaaaaacugauu

SEQ ID NO: 1646629 - RNA, 18 nt, Human
uucaauaggaaaaacuga

SEQ ID NO: 1646630 - RNA, 15 nt, Human
uucaauaggaaaaac

SEQ ID NO: 1646631 - RNA, 13 nt, Human
uucaauaggaaaa

SEQ ID NO: 1646632 - RNA, 18 nt, Human
uucacggaagagccuugc

SEQ ID NO: 1646633 - RNA, 15 nt, Human
uucacgugguccuaa

SEQ ID NO: 1646634 - RNA, 17 nt, Human
uuugagaucagccuggg

SEQ ID NO: 1646635 - RNA, 16 nt, Human
uuugagaucagccugg

SEQ ID NO: 1646636 - RNA, 21 nt, Human
uuugaaauuguauuacaaauc

SEQ ID NO: 1646637 - RNA, 18 nt, Human
uuugaagcacagugauca

SEQ ID NO: 1646638 - RNA, 19 nt, Human
uuucuuguguguuuauugu

SEQ ID NO: 1646639 - RNA, 18 nt, Human
uuucuuaaccagaucauu

SEQ ID NO: 1646640 - RNA, 23 nt, Human
uuucugaucugaugcaagcaaga

SEQ ID NO: 1646641 - RNA, 18 nt, Human
uuugguaaggggaauuga

SEQ ID NO: 1646642 - RNA, 15 nt, Human
uuuguauucucuccu

SEQ ID NO: 1646643 - RNA, 16 nt, Human
uuuguaugcacuuugu

SEQ ID NO: 1646644 - RNA, 14 nt, Human
uuugcuugaaagaa

SEQ ID NO: 1646645 - RNA, 16 nt, Human
uuugcuugaaagaaaa

SEQ ID NO: 1646646 - RNA, 19 nt, Human
uuuggacccugaggcccag

SEQ ID NO: 1646647 - RNA, 15 nt, Human
uuuggacccugaggc

SEQ ID NO: 1646648 - RNA, 14 nt, Human
uuugauccaagcug

SEQ ID NO: 1646649 - RNA, 17 nt, Human
uuugauaugugaacagu

SEQ ID NO: 1646650 - RNA, 15 nt, Human
uuugauaugugaaca

SEQ ID NO: 1646651 - RNA, 14 nt, Human
uuugauaugugaac

SEQ ID NO: 1646652 - RNA, 17 nt, Human
uuucagccaagaauucu

SEQ ID NO: 1646653 - RNA, 17 nt, Human
uuuauggcacuaguauu

SEQ ID NO: 1646654 - RNA, 22 nt, Human
uuuaugauacuugaaaauuaac

SEQ ID NO: 1646655 - RNA, 20 nt, Human
uuuccuaaauauauuuuaag

SEQ ID NO: 1646656 - RNA, 19 nt, Human
uuucuaaaucuccaaaaua

SEQ ID NO: 1646657 - RNA, 22 nt, Human
uuucuaaaguaaaaacaaagaa

SEQ ID NO: 1646658 - RNA, 17 nt, Human
uuucuaaaguaaaaaca

SEQ ID NO: 1646659 - RNA, 19 nt, Human
uuuccuggcacugcuucca

SEQ ID NO: 1646660 - RNA, 23 nt, Human
uuuccuggcacugcuuccaguga

SEQ ID NO: 1646661 - RNA, 22 nt, Human
uuuccucuuagucgagccaagu

SEQ ID NO: 1646662 - RNA, 12 nt, Human
uuucucuaggaa

SEQ ID NO: 1646663 - RNA, 18 nt, Human
uuucuacccagcgagccc

SEQ ID NO: 1646664 - RNA, 15 nt, Human
uuucuacccagcgag

SEQ ID NO: 1646665 - RNA, 22 nt, Human
uuucuacccagcgagcccuggu

SEQ ID NO: 1646666 - RNA, 14 nt, Human
uuucugaaauaaca

SEQ ID NO: 1646667 - RNA, 19 nt, Human
uuucugaaauuuccuggga

SEQ ID NO: 1646668 - RNA, 12 nt, Human
uuucugaaauuu

SEQ ID NO: 1646669 - RNA, 13 nt, Human
uuucugauccagu

SEQ ID NO: 1646670 - RNA, 22 nt, Human
uuucugauccaguuuuguuugg

SEQ ID NO: 1646671 - RNA, 20 nt, Human
uuucugauccaguuuuguuu

SEQ ID NO: 1646672 - RNA, 16 nt, Human
uuucugauccaguuuu

SEQ ID NO: 1646673 - RNA, 15 nt, Human
uuucugauccaguuu

SEQ ID NO: 1646674 - RNA, 12 nt, Human
uuuauacauaaa

SEQ ID NO: 1646675 - RNA, 20 nt, Human
uuuauacauaaacaagacca

SEQ ID NO: 1646676 - RNA, 19 nt, Human
uuuagacccuauugcugcu

SEQ ID NO: 1646677 - RNA, 22 nt, Human
uuuagacccuauugcugcuuga

SEQ ID NO: 1646678 - RNA, 18 nt, Human
uuuaguugcaacuuugua

SEQ ID NO: 1646679 - RNA, 17 nt, Human
uuuaguugcaacuuugu

SEQ ID NO: 1646680 - RNA, 13 nt, Human
uuuacagagacag

SEQ ID NO: 1646681 - RNA, 14 nt, Human
uuuaauauuaaagc

SEQ ID NO: 1646682 - RNA, 21 nt, Human
uuuaauauuaaagccauguuu

SEQ ID NO: 1646683 - RNA, 20 nt, Human
uuuaauauuaaagccauguu

SEQ ID NO: 1646684 - RNA, 17 nt, Human
uuuaauauuaaagccau

SEQ ID NO: 1646685 - RNA, 15 nt, Human
uuuaauauuaaagcc

SEQ ID NO: 1646686 - RNA, 16 nt, Human
uuuacauggcuggagc

SEQ ID NO: 1646687 - RNA, 13 nt, Human
uuuacagcugccu

SEQ ID NO: 1646688 - RNA, 19 nt, Human
uuuaauaauguuucaaaca

SEQ ID NO: 1646689 - RNA, 14 nt, Human
uuuaauaauuauau

SEQ ID NO: 1646690 - RNA, 15 nt, Human
uuuaauaauguuuca

SEQ ID NO: 1646691 - RNA, 14 nt, Human
uuuaauaauguuuc

SEQ ID NO: 1646692 - RNA, 13 nt, Human
uuuaauaaaccau

SEQ ID NO: 1646693 - RNA, 22 nt, Human
uuuaauaaacacucuugaaaaa

SEQ ID NO: 1646694 - RNA, 14 nt, Human
uuuaacagaaaugu

SEQ ID NO: 1646695 - RNA, 15 nt, Human
uuuaacagaaaugua

SEQ ID NO: 1646696 - RNA, 14 nt, Human
uuuaaccucuaaau

SEQ ID NO: 1646697 - RNA, 15 nt, Human
uuuaauaaacacucu

SEQ ID NO: 1646698 - RNA, 14 nt, Human
uuuaauaaacacuc

SEQ ID NO: 1646699 - RNA, 17 nt, Human
uuguuuaaaaucauuuc

SEQ ID NO: 1646700 - RNA, 18 nt, Human
uuguuuaaaaucauuucu

SEQ ID NO: 1646701 - RNA, 15 nt, Human
uugucuuuggacccu

SEQ ID NO: 1646702 - RNA, 24 nt, Human
uugucuuuggacccugaggcccag

SEQ ID NO: 1646703 - RNA, 20 nt, Human
uugucuuuggacccugaggc

SEQ ID NO: 1646704 - RNA, 14 nt, Human
uuguuuguuuaguc

SEQ ID NO: 1646705 - RNA, 13 nt, Human
uuguuuguuuagu

SEQ ID NO: 1646706 - RNA, 20 nt, Human
uuguuuggggaugagaaagg

SEQ ID NO: 1646707 - RNA, 14 nt, Human
uuguuucuguacuu

SEQ ID NO: 1646708 - RNA, 12 nt, Human
uuguuucuguac

SEQ ID NO: 1646709 - RNA, 17 nt, Human
uuuaaaagaaugauuau

SEQ ID NO: 1646710 - RNA, 14 nt, Human
uuuaaaagaaugau

SEQ ID NO: 1646711 - RNA, 13 nt, Human
uuuaaaagauaca

SEQ ID NO: 1646712 - RNA, 16 nt, Human
uuuaaaaucauuucug

SEQ ID NO: 1646713 - RNA, 19 nt, Human
uuuaaaauacacacucaaa

SEQ ID NO: 1646714 - RNA, 12 nt, Human
uuuaaaaugucu

SEQ ID NO: 1646715 - RNA, 16 nt, Human
uuuaaaaugagaaauc

SEQ ID NO: 1646716 - RNA, 13 nt, Human
uuuaacagaaaug

SEQ ID NO: 1646717 - RNA, 15 nt, Human
uuguagcauccugga

SEQ ID NO: 1646718 - RNA, 22 nt, Human
uuguagaagucacauuccugaa

SEQ ID NO: 1646719 - RNA, 17 nt, Human
uuguagaagucacauuc

SEQ ID NO: 1646720 - RNA, 18 nt, Human
uuguacuuuagggaagua

SEQ ID NO: 1646721 - RNA, 16 nt, Human
uuguaccgcaauguga

SEQ ID NO: 1646722 - RNA, 20 nt, Human
uuguaaaauggugugaccac

SEQ ID NO: 1646723 - RNA, 14 nt, Human
uugucuaugggacu

SEQ ID NO: 1646724 - RNA, 22 nt, Human
uugucaaaguggugagaggcau

SEQ ID NO: 1646725 - RNA, 20 nt, Human
uuguaugauccuaaugaaug

SEQ ID NO: 1646726 - RNA, 22 nt, Human
uuguaugaaagauggcugugcc

SEQ ID NO: 1646727 - RNA, 20 nt, Human
uugucuaugggacucaaugc

SEQ ID NO: 1646728 - RNA, 18 nt, Human
uugucugaagucacugca

SEQ ID NO: 1646729 - RNA, 20 nt, Human
uugucugaagucacugcaca

SEQ ID NO: 1646730 - RNA, 17 nt, Human
uugucugaagucacugc

SEQ ID NO: 1646731 - RNA, 13 nt, Human
uuguaaaauggug

SEQ ID NO: 1646732 - RNA, 12 nt, Human
uuguaaaauggu

SEQ ID NO: 1646733 - RNA, 15 nt, Human
uuggucugugagaug

SEQ ID NO: 1646734 - RNA, 20 nt, Human
uuggucugacccacugcuuu

SEQ ID NO: 1646735 - RNA, 20 nt, Human
uugguaaggggaauugagga

SEQ ID NO: 1646736 - RNA, 23 nt, Human
uuggcuucacggaagagccuugc

SEQ ID NO: 1646737 - RNA, 18 nt, Human
uuggcauaacauaaaucu

SEQ ID NO: 1646738 - RNA, 23 nt, Human
uuggcauaacauaaaucugugaa

SEQ ID NO: 1646739 - RNA, 22 nt, Human
uuggcauaacauaaaucuguga

SEQ ID NO: 1646740 - RNA, 20 nt, Human
uuggcauaacauaaaucugu

SEQ ID NO: 1646741 - RNA, 19 nt, Human
uuggcauaacauaaaucug

SEQ ID NO: 1646742 - RNA, 18 nt, Human
uugcuaagcauuccaacu

SEQ ID NO: 1646743 - RNA, 16 nt, Human
uugcuaagcauuccaa

SEQ ID NO: 1646744 - RNA, 16 nt, Human
uugcugcuugaggcaa

SEQ ID NO: 1646745 - RNA, 14 nt, Human
uugcugcuugaggc

SEQ ID NO: 1646746 - RNA, 18 nt, Human
uugcugucccuuuuccuu

SEQ ID NO: 1646747 - RNA, 16 nt, Human
uugcugucccuuuucc

SEQ ID NO: 1646748 - RNA, 21 nt, Human
uugccauguuggccaggcugg

SEQ ID NO: 1646749 - RNA, 20 nt, Human
uugccauguuggccaggcug

SEQ ID NO: 1646750 - RNA, 17 nt, Human
uugccuuuuucauuauu

SEQ ID NO: 1646751 - RNA, 16 nt, Human
uugccuuuuucauuau

SEQ ID NO: 1646752 - RNA, 15 nt, Human
uugccuuuuucauua

SEQ ID NO: 1646753 - RNA, 14 nt, Human
uugccuuuuucauu

SEQ ID NO: 1646754 - RNA, 13 nt, Human
uugccuuuuucau

SEQ ID NO: 1646755 - RNA, 12 nt, Human
uugccuuuuuca

SEQ ID NO: 1646756 - RNA, 21 nt, Human
uuggacccugaggcccagagg

SEQ ID NO: 1646757 - RNA, 19 nt, Human
uuggacccugaggcccaga

SEQ ID NO: 1646758 - RNA, 18 nt, Human
uuggacccugaggcccag

SEQ ID NO: 1646759 - RNA, 15 nt, Human
uuggacccugaggcc

SEQ ID NO: 1646760 - RNA, 15 nt, Human
uuggauuguccccga

SEQ ID NO: 1646761 - RNA, 19 nt, Human
uuggaagcuccgcuuucua

SEQ ID NO: 1646762 - RNA, 18 nt, Human
uuggacaaaauggaauac

SEQ ID NO: 1646763 - RNA, 16 nt, Human
uugaaugaugccauga

SEQ ID NO: 1646764 - RNA, 12 nt, Human
uugaaugaugcc

SEQ ID NO: 1646765 - RNA, 17 nt, Human
uugaacuuugaccucug

SEQ ID NO: 1646766 - RNA, 18 nt, Human
uugaacuuugaccucugc

SEQ ID NO: 1646767 - RNA, 20 nt, Human
uugaacuuugaccucugcag

SEQ ID NO: 1646768 - RNA, 20 nt, Human
uugaaacggaugauuucuau

SEQ ID NO: 1646769 - RNA, 16 nt, Human
uugaagagguuuuaaa

SEQ ID NO: 1646770 - RNA, 20 nt, Human
uugaagcacagugaucaagu

SEQ ID NO: 1646771 - RNA, 21 nt, Human
uugaagagguuuuaaagcuuc

SEQ ID NO: 1646772 - RNA, 21 nt, Human
uugaaaaucuuauaauuuaaa

SEQ ID NO: 1646773 - RNA, 21 nt, Human
uucuuuccugaggcugggcuc

SEQ ID NO: 1646774 - RNA, 18 nt, Human
uucuuuccacagaagcuc

SEQ ID NO: 1646775 - RNA, 12 nt, Human
uucuuuaauuuu

SEQ ID NO: 1646776 - RNA, 18 nt, Human
uucuuuaauuuuggaauu

SEQ ID NO: 1646777 - RNA, 17 nt, Human
uucuuuaauuuuggaau

SEQ ID NO: 1646778 - RNA, 15 nt, Human
uugaacuuugaccuc

SEQ ID NO: 1646779 - RNA, 19 nt, Human
uugaaacggaugauuucua

SEQ ID NO: 1646780 - RNA, 16 nt, Human
uugaaacggaugauuu

SEQ ID NO: 1646781 - RNA, 18 nt, Human
uugaaaauuaacaugaau

SEQ ID NO: 1646782 - RNA, 24 nt, Human
uucuaaguaaaaccacagcaguug

SEQ ID NO: 1646783 - RNA, 20 nt, Human
uucuggcagaguugaagaca

SEQ ID NO: 1646784 - RNA, 16 nt, Human
uucuggcuaugcauuu

SEQ ID NO: 1646785 - RNA, 11 nt, Human
uucuguauaga

SEQ ID NO: 1646786 - RNA, 13 nt, Human
uucuguauagauu

SEQ ID NO: 1646787 - RNA, 14 nt, Human
uucuguauagauua

SEQ ID NO: 1646788 - RNA, 19 nt, Human
uucuuaggguuaugauuaa

SEQ ID NO: 1646789 - RNA, 17 nt, Human
uucuuagggaaggauac

SEQ ID NO: 1646790 - RNA, 13 nt, Human
uucuucagagacu

SEQ ID NO: 1646791 - RNA, 17 nt, Human
uucuuauguugcccagu

SEQ ID NO: 1646792 - RNA, 14 nt, Human
uucuuguguguuua

SEQ ID NO: 1646793 - RNA, 22 nt, Human
uugccaucccucccuccaccuc

SEQ ID NO: 1646794 - RNA, 23 nt, Human
uugccaucccucccuccaccucc

SEQ ID NO: 1646795 - RNA, 14 nt, Human
uugccaucccuccc

SEQ ID NO: 1646796 - RNA, 16 nt, Human
uugccaucccucccuc

SEQ ID NO: 1646797 - RNA, 17 nt, Human
uugccaucccucccucc

SEQ ID NO: 1646798 - RNA, 18 nt, Human
uugccaucccucccucca

SEQ ID NO: 1646799 - RNA, 19 nt, Human
uugccauguuggccaggcu

SEQ ID NO: 1646800 - RNA, 18 nt, Human
uugccauguuggccaggc

SEQ ID NO: 1646801 - RNA, 17 nt, Human
uugccauguuggccagg

SEQ ID NO: 1646802 - RNA, 16 nt, Human
uugccauguuggccag

SEQ ID NO: 1646803 - RNA, 13 nt, Human
uugccaucccucc

SEQ ID NO: 1646804 - RNA, 13 nt, Human
uugccagucaccc

SEQ ID NO: 1646805 - RNA, 16 nt, Human
uugcauaacguauaaa

SEQ ID NO: 1646806 - RNA, 17 nt, Human
uugauucauaaugacuu

SEQ ID NO: 1646807 - RNA, 13 nt, Human
uugauucauaaug

SEQ ID NO: 1646808 - RNA, 23 nt, Human
uugcagacaggcaagcaccuccu

SEQ ID NO: 1646809 - RNA, 20 nt, Human
uugauaugccuuuucccaac

SEQ ID NO: 1646810 - RNA, 16 nt, Human
uugauaugcuuauaca

SEQ ID NO: 1646811 - RNA, 16 nt, Human
uugauaugugaacagu

SEQ ID NO: 1646812 - RNA, 22 nt, Human
uugauauuuucaacgcagcccu

SEQ ID NO: 1646813 - RNA, 16 nt, Human
uugauucagcucugca

SEQ ID NO: 1646814 - RNA, 23 nt, Human
uugauucagacagcugccuggga

SEQ ID NO: 1646815 - RNA, 21 nt, Human
uugauucagacagcugccugg

SEQ ID NO: 1646816 - RNA, 17 nt, Human
uugauucagacagcugc

SEQ ID NO: 1646817 - RNA, 17 nt, Human
uugauccagaaagaaaa

SEQ ID NO: 1646818 - RNA, 19 nt, Human
uugagccuugaacuuugac

SEQ ID NO: 1646819 - RNA, 13 nt, Human
uugagcucagccc

SEQ ID NO: 1646820 - RNA, 14 nt, Human
uugaauuguaagga

SEQ ID NO: 1646821 - RNA, 14 nt, Human
uugagccuugaacu

SEQ ID NO: 1646822 - RNA, 15 nt, Human
uugagccuugaacuu

SEQ ID NO: 1646823 - RNA, 16 nt, Human
uugagccuugaacuuu

SEQ ID NO: 1646824 - RNA, 14 nt, Human
caccucucccuugg

SEQ ID NO: 1646825 - RNA, 23 nt, Human
gagccucagucucccucccuugg

SEQ ID NO: 1646826 - RNA, 19 nt, Human
uuggcauuccccacuugag

SEQ ID NO: 1646827 - RNA, 16 nt, Human
gacccccaucccaugg

SEQ ID NO: 1646828 - RNA, 18 nt, Human
gccccucagggucccugg

SEQ ID NO: 1646829 - RNA, 18 nt, Human
gcccugcugagucccagg

SEQ ID NO: 1646830 - RNA, 17 nt, Human
ggcccccaggugccagu

SEQ ID NO: 1646831 - RNA, 13 nt, Human
cugcauuggcuuu

SEQ ID NO: 1646832 - RNA, 14 nt, Human
cugcauuuaaaaga

SEQ ID NO: 1646833 - RNA, 16 nt, Human
cugccauauucuguug

SEQ ID NO: 1646834 - RNA, 16 nt, Human
cugccauccagguuca

SEQ ID NO: 1646835 - RNA, 18 nt, Human
cugccauccagguucagc

SEQ ID NO: 1646836 - RNA, 19 nt, Human
cugccauccagguucagcu

SEQ ID NO: 1646837 - RNA, 13 nt, Human
cugccccccagcc

SEQ ID NO: 1646838 - RNA, 22 nt, Human
cugccagucccccugccccagg

SEQ ID NO: 1646839 - RNA, 20 nt, Human
cugccagucccccugcccca

SEQ ID NO: 1646840 - RNA, 21 nt, Human
cugccagucccccugccccag

SEQ ID NO: 1646841 - RNA, 17 nt, Human
cugccagucccccugcc

SEQ ID NO: 1646842 - RNA, 18 nt, Human
cugcauuuaaaagauaca

SEQ ID NO: 1646843 - RNA, 17 nt, Human
cugcauuuaaaagauac

SEQ ID NO: 1646844 - RNA, 20 nt, Human
cugccagggacagagggggu

SEQ ID NO: 1646845 - RNA, 22 nt, Human
cugccagggacagagggggugg

SEQ ID NO: 1646846 - RNA, 23 nt, Human
cugccagggacagaggggguggc

SEQ ID NO: 1646847 - RNA, 14 nt, Human
cugccccucccuuc

SEQ ID NO: 1646848 - RNA, 17 nt, Human
cugccccucccuucaac

SEQ ID NO: 1646849 - RNA, 13 nt, Human
cugccccucccuu

SEQ ID NO: 1646850 - RNA, 17 nt, Human
cugccccuccucucugc

SEQ ID NO: 1646851 - RNA, 18 nt, Human
cugccccuccucucugcc

SEQ ID NO: 1646852 - RNA, 19 nt, Human
cugccccuccucucugccc

SEQ ID NO: 1646853 - RNA, 12 nt, Human
cugcccuuaccu

SEQ ID NO: 1646854 - RNA, 16 nt, Human
cugcccuuaccugcca

SEQ ID NO: 1646855 - RNA, 17 nt, Human
cugcccuuaccugccag

SEQ ID NO: 1646856 - RNA, 12 nt, Human
cugcagcuuugu

SEQ ID NO: 1646857 - RNA, 13 nt, Human
cugcaggcagcca

SEQ ID NO: 1646858 - RNA, 14 nt, Human
cugcaggcagccag

SEQ ID NO: 1646859 - RNA, 15 nt, Human
cugcaggcagccagg

SEQ ID NO: 1646860 - RNA, 16 nt, Human
cugcaggcagccaggc

SEQ ID NO: 1646861 - RNA, 17 nt, Human
cugcaggcagccaggcc

SEQ ID NO: 1646862 - RNA, 18 nt, Human
cugcaggcagccaggcca

SEQ ID NO: 1646863 - RNA, 19 nt, Human
cugcaggcagccaggccac

SEQ ID NO: 1646864 - RNA, 20 nt, Human
cugcaggcagccaggccaca

SEQ ID NO: 1646865 - RNA, 18 nt, Human
cugcacuccagccugggu

SEQ ID NO: 1646866 - RNA, 16 nt, Human
cugcacuccagccugg

SEQ ID NO: 1646867 - RNA, 17 nt, Human
cugcacuccagccuggg

SEQ ID NO: 1646868 - RNA, 24 nt, Human
cugcagccucaaccuccugggcua

SEQ ID NO: 1646869 - RNA, 19 nt, Human
cugcacuccagccugggug

SEQ ID NO: 1646870 - RNA, 23 nt, Human
cugcagccucaaccuccugggcu

SEQ ID NO: 1646871 - RNA, 14 nt, Human
cugcacggugaaug

SEQ ID NO: 1646872 - RNA, 15 nt, Human
cugcacggugaaugg

SEQ ID NO: 1646873 - RNA, 17 nt, Human
cugcacggugaauggcu

SEQ ID NO: 1646874 - RNA, 20 nt, Human
cugcacggugaauggcuuug

SEQ ID NO: 1646875 - RNA, 16 nt, Human
cugcacuauagccuag

SEQ ID NO: 1646876 - RNA, 17 nt, Human
cugcacuauagccuagg

SEQ ID NO: 1646877 - RNA, 18 nt, Human
cugcacuauagccuaggu

SEQ ID NO: 1646878 - RNA, 20 nt, Human
cugcacuauagccuagguga

SEQ ID NO: 1646879 - RNA, 13 nt, Human
cugcacuccagcc

SEQ ID NO: 1646880 - RNA, 22 nt, Human
cugcacuauagccuaggugaca

SEQ ID NO: 1646881 - RNA, 23 nt, Human
cugcacuauagccuaggugacag

SEQ ID NO: 1646882 - RNA, 17 nt, Human
cugcacuccagccugag

SEQ ID NO: 1646883 - RNA, 20 nt, Human
cugcacuccagccugagcga

SEQ ID NO: 1646884 - RNA, 15 nt, Human
cugcacuccagccug

SEQ ID NO: 1646885 - RNA, 16 nt, Human
cugcacuccagccuga

SEQ ID NO: 1646886 - RNA, 17 nt, Human
cugcaaccuucgccacc

SEQ ID NO: 1646887 - RNA, 19 nt, Human
cugcaaccuucgccaccug

SEQ ID NO: 1646888 - RNA, 20 nt, Human
cugcaaccuucgccaccugg

SEQ ID NO: 1646889 - RNA, 22 nt, Human
cugcaaccuucgccaccugggu

SEQ ID NO: 1646890 - RNA, 22 nt, Human
cugcaaccugauugugucucuu

SEQ ID NO: 1646891 - RNA, 18 nt, Human
cugcaacuuguaaaugug

SEQ ID NO: 1646892 - RNA, 19 nt, Human
cugcaacuuguaaaugugg

SEQ ID NO: 1646893 - RNA, 18 nt, Human
cugcaagaauugaagcag

SEQ ID NO: 1646894 - RNA, 20 nt, Human
cugcaaccuccgccucuugg

SEQ ID NO: 1646895 - RNA, 22 nt, Human
cugcaaccuccgccucuugggu

SEQ ID NO: 1646896 - RNA, 14 nt, Human
cugcaaccugauug

SEQ ID NO: 1646897 - RNA, 19 nt, Human
cugcaaccugauugugucu

SEQ ID NO: 1646898 - RNA, 21 nt, Human
cugcaaccugauugugucucu

SEQ ID NO: 1646899 - RNA, 23 nt, Human
cugcaccgggccacagagaaagu

SEQ ID NO: 1646900 - RNA, 12 nt, Human
cugcaagggagu

SEQ ID NO: 1646901 - RNA, 20 nt, Human
cugcaagaauugaagcagga

SEQ ID NO: 1646902 - RNA, 15 nt, Human
cucuuauaucuauau

SEQ ID NO: 1646903 - RNA, 18 nt, Human
cucuuauaucuauauuuu

SEQ ID NO: 1646904 - RNA, 14 nt, Human
cucuuaugggcugg

SEQ ID NO: 1646905 - RNA, 15 nt, Human
cucuuaugggcuggg

SEQ ID NO: 1646906 - RNA, 16 nt, Human
cugaugcuucuucaga

SEQ ID NO: 1646907 - RNA, 17 nt, Human
cugaugcuucuucagag

SEQ ID NO: 1646908 - RNA, 19 nt, Human
cugaugccaaguuguuuga

SEQ ID NO: 1646909 - RNA, 18 nt, Human
cugaugggcaacccccag

SEQ ID NO: 1646910 - RNA, 21 nt, Human
cugaugggcaacccccagccu

SEQ ID NO: 1646911 - RNA, 18 nt, Human
cugaugcuucuucagaga

SEQ ID NO: 1646912 - RNA, 19 nt, Human
cugaugcuucuucagagac

SEQ ID NO: 1646913 - RNA, 20 nt, Human
cugaugcuucuucagagacu

SEQ ID NO: 1646914 - RNA, 24 nt, Human
cugaugggcaacccccagccugcu

SEQ ID NO: 1646915 - RNA, 22 nt, Human
cugaugggcaacccccagccug

SEQ ID NO: 1646916 - RNA, 23 nt, Human
cugaugggcaacccccagccugc

SEQ ID NO: 1646917 - RNA, 18 nt, Human
cugcaaagcccagcuuga

SEQ ID NO: 1646918 - RNA, 21 nt, Human
cugcaaaggguaucaggugcu

SEQ ID NO: 1646919 - RNA, 22 nt, Human
cugcaaaggguaucaggugcug

SEQ ID NO: 1646920 - RNA, 15 nt, Human
cuggguguggcgcag

SEQ ID NO: 1646921 - RNA, 14 nt, Human
cuggguguggcgca

SEQ ID NO: 1646922 - RNA, 21 nt, Human
cuggguggcaccagcagccug

SEQ ID NO: 1646923 - RNA, 21 nt, Human
cuggugccucaccccuugcca

SEQ ID NO: 1646924 - RNA, 18 nt, Human
cuggguggcaccagcagc

SEQ ID NO: 1646925 - RNA, 20 nt, Human
cuggguggcaccagcagccu

SEQ ID NO: 1646926 - RNA, 13 nt, Human
cuggggagaaagu

SEQ ID NO: 1646927 - RNA, 14 nt, Human
cuggggagaaagua

SEQ ID NO: 1646928 - RNA, 20 nt, Human
cugggcagguuggugggggc

SEQ ID NO: 1646929 - RNA, 15 nt, Human
cugggcagcugccuc

SEQ ID NO: 1646930 - RNA, 14 nt, Human
cugggcagcugccu

SEQ ID NO: 1646931 - RNA, 20 nt, Human
cugggcagaggaaagcaaag

SEQ ID NO: 1646932 - RNA, 13 nt, Human
cugggcagcugcc

SEQ ID NO: 1646933 - RNA, 13 nt, Human
cugggcagaggaa

SEQ ID NO: 1646934 - RNA, 16 nt, Human
cugggcagaggaaagc

SEQ ID NO: 1646935 - RNA, 12 nt, Human
cugggcagagga

SEQ ID NO: 1646936 - RNA, 16 nt, Human
cugggagaaaugaaaa

SEQ ID NO: 1646937 - RNA, 17 nt, Human
cugggagaaaugaaaaa

SEQ ID NO: 1646938 - RNA, 22 nt, Human
cugggagaaccaaaaagaggcu

SEQ ID NO: 1646939 - RNA, 13 nt, Human
cugggacuacagg

SEQ ID NO: 1646940 - RNA, 15 nt, Human
cugggacuacaggca

SEQ ID NO: 1646941 - RNA, 16 nt, Human
cugggacuacaggcac

SEQ ID NO: 1646942 - RNA, 14 nt, Human
cugggacaugggaa

SEQ ID NO: 1646943 - RNA, 18 nt, Human
cugggacaugggaaaggg

SEQ ID NO: 1646944 - RNA, 22 nt, Human
cugggacaugggaaaggggaag

SEQ ID NO: 1646945 - RNA, 14 nt, Human
cuggcuaugcauuu

SEQ ID NO: 1646946 - RNA, 13 nt, Human
cuggcuaugcauu

SEQ ID NO: 1646947 - RNA, 16 nt, Human
cuggcuaugcauuuga

SEQ ID NO: 1646948 - RNA, 15 nt, Human
cuggcuaugcauuug

SEQ ID NO: 1646949 - RNA, 22 nt, Human
cuggcuaugcauuugaaaauuu

SEQ ID NO: 1646950 - RNA, 12 nt, Human
cuggcccuuccu

SEQ ID NO: 1646951 - RNA, 19 nt, Human
cugcugagucccaggcuga

SEQ ID NO: 1646952 - RNA, 23 nt, Human
cugcugagucccaggcugagccu

SEQ ID NO: 1646953 - RNA, 13 nt, Human
cugcugacagugu

SEQ ID NO: 1646954 - RNA, 15 nt, Human
cugcugacaguguug

SEQ ID NO: 1646955 - RNA, 13 nt, Human
cugcugaaggcuc

SEQ ID NO: 1646956 - RNA, 14 nt, Human
cugcugaaggcucg

SEQ ID NO: 1646957 - RNA, 15 nt, Human
cugcugaaggcucga

SEQ ID NO: 1646958 - RNA, 12 nt, Human
cugcugacagug

SEQ ID NO: 1646959 - RNA, 16 nt, Human
cugcucacauaucugu

SEQ ID NO: 1646960 - RNA, 19 nt, Human
cugcucacauaucugucau

SEQ ID NO: 1646961 - RNA, 20 nt, Human
cugcuuaacuucacauauug

SEQ ID NO: 1646962 - RNA, 19 nt, Human
cuggacugugugcucagga

SEQ ID NO: 1646963 - RNA, 22 nt, Human
cuggacugugugcucaggagcc

SEQ ID NO: 1646964 - RNA, 23 nt, Human
cuggacugugugcucaggagccc

SEQ ID NO: 1646965 - RNA, 16 nt, Human
cuggaguucugguucc

SEQ ID NO: 1646966 - RNA, 17 nt, Human
cuggaguucugguuccu

SEQ ID NO: 1646967 - RNA, 15 nt, Human
cuggaguucugguuc

SEQ ID NO: 1646968 - RNA, 15 nt, Human
cuggaugcagccuca

SEQ ID NO: 1646969 - RNA, 17 nt, Human
cuucaccuuugucccca

SEQ ID NO: 1646970 - RNA, 20 nt, Human
cuucaccuuuguccccaccg

SEQ ID NO: 1646971 - RNA, 14 nt, Human
cuucaccuuugucc

SEQ ID NO: 1646972 - RNA, 18 nt, Human
cuuauugcccacgcugga

SEQ ID NO: 1646973 - RNA, 16 nt, Human
cuucagagacuccugc

SEQ ID NO: 1646974 - RNA, 21 nt, Human
cuucagagacuccugcaggca

SEQ ID NO: 1646975 - RNA, 22 nt, Human
cuucagagacuccugcaggcag

SEQ ID NO: 1646976 - RNA, 11 nt, Human
cuucagacaua

SEQ ID NO: 1646977 - RNA, 18 nt, Human
cuucaguuaagccuuugg

SEQ ID NO: 1646978 - RNA, 13 nt, Human
cuucaucccucug

SEQ ID NO: 1646979 - RNA, 15 nt, Human
cuucauccuccucag

SEQ ID NO: 1646980 - RNA, 17 nt, Human
cuucaguuaagccuuug

SEQ ID NO: 1646981 - RNA, 18 nt, Human
cuucaguggcagcugcuu

SEQ ID NO: 1646982 - RNA, 23 nt, Human
cuucagagacuccugcaggcagc

SEQ ID NO: 1646983 - RNA, 24 nt, Human
cuucagagacuccugcaggcagcc

SEQ ID NO: 1646984 - RNA, 16 nt, Human
cuucauccuccucaga

SEQ ID NO: 1646985 - RNA, 22 nt, Human
cuucaucucccaaagugcuggg

SEQ ID NO: 1646986 - RNA, 23 nt, Human
cuucaugcugucuacacuaagag

SEQ ID NO: 1646987 - RNA, 15 nt, Human
cuuccaugucgccuc

SEQ ID NO: 1646988 - RNA, 16 nt, Human
cuuccaugucgccucu

SEQ ID NO: 1646989 - RNA, 16 nt, Human
cuuccauggacuuugu

SEQ ID NO: 1646990 - RNA, 17 nt, Human
cuuccauggacuuuguu

SEQ ID NO: 1646991 - RNA, 18 nt, Human
cuuccagugaggcucugc

SEQ ID NO: 1646992 - RNA, 17 nt, Human
cuuccagugaggcucug

SEQ ID NO: 1646993 - RNA, 19 nt, Human
cuuccagugaggcucugcc

SEQ ID NO: 1646994 - RNA, 20 nt, Human
cuuccagugaggcucugccc

SEQ ID NO: 1646995 - RNA, 17 nt, Human
cuuccaugucgccucug

SEQ ID NO: 1646996 - RNA, 18 nt, Human
cuuccaugucgccucugc

SEQ ID NO: 1646997 - RNA, 19 nt, Human
cuuccaugucgccucugca

SEQ ID NO: 1646998 - RNA, 20 nt, Human
cuuccaugucgccucugcau

SEQ ID NO: 1646999 - RNA, 18 nt, Human
cuuagcagggaaacagcu

SEQ ID NO: 1647000 - RNA, 21 nt, Human
cuuagcagggaaacagcuaau

SEQ ID NO: 1647001 - RNA, 12 nt, Human
cuuauugcccac

SEQ ID NO: 1647002 - RNA, 13 nt, Human
cuuauugcccacg

SEQ ID NO: 1647003 - RNA, 22 nt, Human
cuuaugggcuggguucuaccca

SEQ ID NO: 1647004 - RNA, 23 nt, Human
cuuaugggcuggguucuacccag

SEQ ID NO: 1647005 - RNA, 14 nt, Human
cuuaugggcugggu

SEQ ID NO: 1647006 - RNA, 21 nt, Human
cuuaugggcuggguucuaccc

SEQ ID NO: 1647007 - RNA, 18 nt, Human
cuuaaaauauuccugcau

SEQ ID NO: 1647008 - RNA, 20 nt, Human
cuuaaaauauuccugcauuu

SEQ ID NO: 1647009 - RNA, 16 nt, Human
cuguugggccaggagc

SEQ ID NO: 1647010 - RNA, 17 nt, Human
cuguugggccaggagcc

SEQ ID NO: 1647011 - RNA, 20 nt, Human
cuguugggccaggagccucc

SEQ ID NO: 1647012 - RNA, 14 nt, Human
cuuaaaguugaauu

SEQ ID NO: 1647013 - RNA, 11 nt, Human
cuuaaaguuga

SEQ ID NO: 1647014 - RNA, 13 nt, Human
cuuaaaguugaau

SEQ ID NO: 1647015 - RNA, 13 nt, Human
cuuacacaauggu

SEQ ID NO: 1647016 - RNA, 21 nt, Human
cuuaaagaguguggcaaaaua

SEQ ID NO: 1647017 - RNA, 15 nt, Human
cuuaaagaguguggc

SEQ ID NO: 1647018 - RNA, 19 nt, Human
cuuacccucauguucuuaa

SEQ ID NO: 1647019 - RNA, 18 nt, Human
cuuacccucauguucuua

SEQ ID NO: 1647020 - RNA, 17 nt, Human
cuuacccucauguucuu

SEQ ID NO: 1647021 - RNA, 13 nt, Human
cuuaccucggugc

SEQ ID NO: 1647022 - RNA, 19 nt, Human
cuuaccucggugccuuccu

SEQ ID NO: 1647023 - RNA, 21 nt, Human
cuuaccucggugccuuccucu

SEQ ID NO: 1647024 - RNA, 13 nt, Human
cuuaccugccagg

SEQ ID NO: 1647025 - RNA, 15 nt, Human
cuguugcugccucau

SEQ ID NO: 1647026 - RNA, 16 nt, Human
cuguugcugccucaug

SEQ ID NO: 1647027 - RNA, 17 nt, Human
cuguugcugccucaugc

SEQ ID NO: 1647028 - RNA, 20 nt, Human
cugugcugagucugaaggcu

SEQ ID NO: 1647029 - RNA, 22 nt, Human
cugugcugagucugaaggcugg

SEQ ID NO: 1647030 - RNA, 11 nt, Human
cugugcugccc

SEQ ID NO: 1647031 - RNA, 21 nt, Human
cugugucagguggggcagcuu

SEQ ID NO: 1647032 - RNA, 20 nt, Human
cugugucagcauagaaguaa

SEQ ID NO: 1647033 - RNA, 19 nt, Human
cugugucagguggggcagc

SEQ ID NO: 1647034 - RNA, 14 nt, Human
cugugucuugcaau

SEQ ID NO: 1647035 - RNA, 14 nt, Human
cugugucucccuuc

SEQ ID NO: 1647036 - RNA, 19 nt, Human
cugugucucccuucauccu

SEQ ID NO: 1647037 - RNA, 22 nt, Human
cugugacuucagcucuguuuua

SEQ ID NO: 1647038 - RNA, 17 nt, Human
cugugacuucagcucug

SEQ ID NO: 1647039 - RNA, 15 nt, Human
cuguucacucuacuu

SEQ ID NO: 1647040 - RNA, 20 nt, Human
cugugucuugcaauggcagc

SEQ ID NO: 1647041 - RNA, 16 nt, Human
cugugucuugcaaugg

SEQ ID NO: 1647042 - RNA, 19 nt, Human
cugugucuugcaauggcag

SEQ ID NO: 1647043 - RNA, 13 nt, Human
cuguucagcucca

SEQ ID NO: 1647044 - RNA, 14 nt, Human
cuguucagcuccag

SEQ ID NO: 1647045 - RNA, 14 nt, Human
cuuuaauuuuggaa

SEQ ID NO: 1647046 - RNA, 15 nt, Human
cuuuaauuuuggaau

SEQ ID NO: 1647047 - RNA, 13 nt, Human
cuuuaauuuugga

SEQ ID NO: 1647048 - RNA, 16 nt, Human
cuuuaauuuuggaauu

SEQ ID NO: 1647049 - RNA, 18 nt, Human
cuuuaauaucaucaguau

SEQ ID NO: 1647050 - RNA, 19 nt, Human
cuuuaauaucaucaguauu

SEQ ID NO: 1647051 - RNA, 21 nt, Human
cuuuaauaucaucaguauuga

SEQ ID NO: 1647052 - RNA, 23 nt, Human
cuuucaauaggaaaaacugauuu

SEQ ID NO: 1647053 - RNA, 20 nt, Human
cuuucaauaggaaaaacuga

SEQ ID NO: 1647054 - RNA, 21 nt, Human
cuuucaauaggaaaaacugau

SEQ ID NO: 1647055 - RNA, 22 nt, Human
cuuucaauaggaaaaacugauu

SEQ ID NO: 1647056 - RNA, 14 nt, Human
cuuuaaaugcugcu

SEQ ID NO: 1647057 - RNA, 15 nt, Human
cuuuaaaugcugcuu

SEQ ID NO: 1647058 - RNA, 16 nt, Human
cuuguggacacagcuc

SEQ ID NO: 1647059 - RNA, 14 nt, Human
cuuguggacacagc

SEQ ID NO: 1647060 - RNA, 15 nt, Human
cuuguggacacagcu

SEQ ID NO: 1647061 - RNA, 13 nt, Human
cuuguggacacag

SEQ ID NO: 1647062 - RNA, 13 nt, Human
cuuucagauacug

SEQ ID NO: 1647063 - RNA, 20 nt, Human
cuuucagauaacuguuauuu

SEQ ID NO: 1647064 - RNA, 16 nt, Human
cuuugagcuuaagaau

SEQ ID NO: 1647065 - RNA, 19 nt, Human
cuuugacgccaucccagcc

SEQ ID NO: 1647066 - RNA, 21 nt, Human
cuuugacgccaucccagcccc

SEQ ID NO: 1647067 - RNA, 22 nt, Human
cuuugacgccaucccagcccca

SEQ ID NO: 1647068 - RNA, 21 nt, Human
cuuugagugucuuaauuaaaa

SEQ ID NO: 1647069 - RNA, 17 nt, Human
cuuucuaaugugugaau

SEQ ID NO: 1647070 - RNA, 22 nt, Human
cuuucggggagaggcugaggac

SEQ ID NO: 1647071 - RNA, 20 nt, Human
cuuuggucuacacugugcug

SEQ ID NO: 1647072 - RNA, 16 nt, Human
cuuuggucuacacugu

SEQ ID NO: 1647073 - RNA, 15 nt, Human
cuuuuauaaacuuua

SEQ ID NO: 1647074 - RNA, 18 nt, Human
cuuuuauaaacuuuaccu

SEQ ID NO: 1647075 - RNA, 16 nt, Human
cuuuuauaaacuuuac

SEQ ID NO: 1647076 - RNA, 19 nt, Human
cuuuuauaaacuuuaccuu

SEQ ID NO: 1647077 - RNA, 19 nt, Human
cuuuuauuuagcaccaggg

SEQ ID NO: 1647078 - RNA, 15 nt, Human
cuuuucaaaacauuu

SEQ ID NO: 1647079 - RNA, 20 nt, Human
cuucuucagagacuccugca

SEQ ID NO: 1647080 - RNA, 21 nt, Human
cuucuucagagacuccugcag

SEQ ID NO: 1647081 - RNA, 15 nt, Human
cuucuguuuuauaau

SEQ ID NO: 1647082 - RNA, 20 nt, Human
cuucuguuuuauaauuuugu

SEQ ID NO: 1647083 - RNA, 22 nt, Human
cuucuucagagacuccugcagg

SEQ ID NO: 1647084 - RNA, 20 nt, Human
cuugaaugaugccaugagga

SEQ ID NO: 1647085 - RNA, 12 nt, Human
cuugcucugcug

SEQ ID NO: 1647086 - RNA, 23 nt, Human
cuugaaugaugccaugaggaaca

SEQ ID NO: 1647087 - RNA, 12 nt, Human
cuugacagggca

SEQ ID NO: 1647088 - RNA, 20 nt, Human
cuugccgucuaccugagggg

SEQ ID NO: 1647089 - RNA, 23 nt, Human
cuugccgucuaccugaggggccu

SEQ ID NO: 1647090 - RNA, 13 nt, Human
cuugcucugcuga

SEQ ID NO: 1647091 - RNA, 18 nt, Human
gaucugccuaaggacuuc

SEQ ID NO: 1647092 - RNA, 20 nt, Human
gaucugccuaaggacuucuu

SEQ ID NO: 1647093 - RNA, 21 nt, Human
gaucugccuaaggacuucuuu

SEQ ID NO: 1647094 - RNA, 23 nt, Human
gaucugccuaaggacuucuuuaa

SEQ ID NO: 1647095 - RNA, 14 nt, Human
gaugaucuuugcag

SEQ ID NO: 1647096 - RNA, 18 nt, Human
gauguagaggagaaacug

SEQ ID NO: 1647097 - RNA, 16 nt, Human
gaugagugagcaugcc

SEQ ID NO: 1647098 - RNA, 15 nt, Human
gaugaucuaggaaga

SEQ ID NO: 1647099 - RNA, 21 nt, Human
gaugaucuaggaagacuuugg

SEQ ID NO: 1647100 - RNA, 16 nt, Human
gaugaucuuuaaaaua

SEQ ID NO: 1647101 - RNA, 21 nt, Human
gauguauguugaagccuuugu

SEQ ID NO: 1647102 - RNA, 20 nt, Human
gauguauguugaagccuuug

SEQ ID NO: 1647103 - RNA, 20 nt, Human
gauuauaggcaccuaccacc

SEQ ID NO: 1647104 - RNA, 14 nt, Human
gauuauauuaugaa

SEQ ID NO: 1647105 - RNA, 22 nt, Human
gauuauucacugauuugacaua

SEQ ID NO: 1647106 - RNA, 12 nt, Human
gauuauuggaaa

SEQ ID NO: 1647107 - RNA, 20 nt, Human
gauuuuuuacagcugccugc

SEQ ID NO: 1647108 - RNA, 16 nt, Human
gauuuaccacuugugu

SEQ ID NO: 1647109 - RNA, 23 nt, Human
gauucuucagcaaaaauauuuua

SEQ ID NO: 1647110 - RNA, 17 nt, Human
gauucuuccucccuccc

SEQ ID NO: 1647111 - RNA, 18 nt, Human
gauucuuccucccucccu

SEQ ID NO: 1647112 - RNA, 12 nt, Human
gauucuucugcu

SEQ ID NO: 1647113 - RNA, 15 nt, Human
gauuuaccacuugug

SEQ ID NO: 1647114 - RNA, 18 nt, Human
gauucuccugccucagcc

SEQ ID NO: 1647115 - RNA, 15 nt, Human
gauucuccugccuca

SEQ ID NO: 1647116 - RNA, 17 nt, Human
gauucuccugccucagc

SEQ ID NO: 1647117 - RNA, 22 nt, Human
gcacaagcugcacccucaggca

SEQ ID NO: 1647118 - RNA, 14 nt, Human
gcacaccgggcacu

SEQ ID NO: 1647119 - RNA, 20 nt, Human
gcacagugcaucucagccca

SEQ ID NO: 1647120 - RNA, 21 nt, Human
gcacagugcaucucagcccac

SEQ ID NO: 1647121 - RNA, 19 nt, Human
gcacagugcaucucagccc

SEQ ID NO: 1647122 - RNA, 20 nt, Human
gcacaccgggcacucagaag

SEQ ID NO: 1647123 - RNA, 23 nt, Human
gcacaguuuucugagaaagacua

SEQ ID NO: 1647124 - RNA, 20 nt, Human
gcacaguuuucugagaaaga

SEQ ID NO: 1647125 - RNA, 22 nt, Human
gcacaguuuucugagaaagacu

SEQ ID NO: 1647126 - RNA, 22 nt, Human
gcaauagucaaauugugugaaa

SEQ ID NO: 1647127 - RNA, 18 nt, Human
gcaagucagaauagaaau

SEQ ID NO: 1647128 - RNA, 20 nt, Human
gcaaguauuagaauaccaca

SEQ ID NO: 1647129 - RNA, 18 nt, Human
gauuuuuuuguuguuugu

SEQ ID NO: 1647130 - RNA, 21 nt, Human
gauuuuuuuguuguuuguuua

SEQ ID NO: 1647131 - RNA, 22 nt, Human
gcacuccccugcuggguguggc

SEQ ID NO: 1647132 - RNA, 13 nt, Human
gcacucagaagac

SEQ ID NO: 1647133 - RNA, 16 nt, Human
gcacucagaagacacu

SEQ ID NO: 1647134 - RNA, 17 nt, Human
gcacucagaagacacug

SEQ ID NO: 1647135 - RNA, 17 nt, Human
gcacuccccugcugggu

SEQ ID NO: 1647136 - RNA, 22 nt, Human
gcaccuaccaccacgcccggcu

SEQ ID NO: 1647137 - RNA, 21 nt, Human
gcaccuaccaccacgcccggc

SEQ ID NO: 1647138 - RNA, 23 nt, Human
gcaccgggccacagagaaaguac

SEQ ID NO: 1647139 - RNA, 14 nt, Human
gcaccgggccacag

SEQ ID NO: 1647140 - RNA, 23 nt, Human
gcacaucagcacgauuucuguuu

SEQ ID NO: 1647141 - RNA, 22 nt, Human
gcacaucagcacgauuucuguu

SEQ ID NO: 1647142 - RNA, 12 nt, Human
gaggggccucuu

SEQ ID NO: 1647143 - RNA, 17 nt, Human
gaggcaucgcaauguaa

SEQ ID NO: 1647144 - RNA, 13 nt, Human
gaggccagagaca

SEQ ID NO: 1647145 - RNA, 14 nt, Human
gaggccagagacac

SEQ ID NO: 1647146 - RNA, 19 nt, Human
gaggccagagacacaagcc

SEQ ID NO: 1647147 - RNA, 22 nt, Human
gaggcuagugugguguuuccug

SEQ ID NO: 1647148 - RNA, 19 nt, Human
gaggcuccacuuggucugu

SEQ ID NO: 1647149 - RNA, 12 nt, Human
gaggcuccacuu

SEQ ID NO: 1647150 - RNA, 23 nt, Human
gaggcuccacuuggucugugaga

SEQ ID NO: 1647151 - RNA, 22 nt, Human
gaggccaaggugggaggauugc

SEQ ID NO: 1647152 - RNA, 15 nt, Human
gaggcagggucucac

SEQ ID NO: 1647153 - RNA, 18 nt, Human
gaggcagggucucacucu

SEQ ID NO: 1647154 - RNA, 14 nt, Human
gaggcagggucuca

SEQ ID NO: 1647155 - RNA, 20 nt, Human
gaggacgcucucuggccuuc

SEQ ID NO: 1647156 - RNA, 15 nt, Human
gaggacgcucucugg

SEQ ID NO: 1647157 - RNA, 21 nt, Human
gagcgcccacuagacccacug

SEQ ID NO: 1647158 - RNA, 13 nt, Human
gagccuugaacuu

SEQ ID NO: 1647159 - RNA, 23 nt, Human
gagccuuccaggggugggacacc

SEQ ID NO: 1647160 - RNA, 19 nt, Human
gagccuugaacuuugaccu

SEQ ID NO: 1647161 - RNA, 20 nt, Human
gagccuuccaggggugggac

SEQ ID NO: 1647162 - RNA, 18 nt, Human
gaguugauucagcucugc

SEQ ID NO: 1647163 - RNA, 22 nt, Human
gaguuguuacauuuuuaagugc

SEQ ID NO: 1647164 - RNA, 16 nt, Human
gaguuuaaauuguaau

SEQ ID NO: 1647165 - RNA, 17 nt, Human
gagucaccaagcccagu

SEQ ID NO: 1647166 - RNA, 16 nt, Human
gagucaccaagcccag

SEQ ID NO: 1647167 - RNA, 22 nt, Human
gagucagaaguuucugccgcag

SEQ ID NO: 1647168 - RNA, 12 nt, Human
gagucccaccuu

SEQ ID NO: 1647169 - RNA, 13 nt, Human
gagucccaccuug

SEQ ID NO: 1647170 - RNA, 18 nt, Human
gagugacagaggcagccc

SEQ ID NO: 1647171 - RNA, 21 nt, Human
gagugaguuggguguauugug

SEQ ID NO: 1647172 - RNA, 20 nt, Human
gagugacagaggcagcccca

SEQ ID NO: 1647173 - RNA, 15 nt, Human
gaguugauucagcuc

SEQ ID NO: 1647174 - RNA, 16 nt, Human
gaguugauucagcucu

SEQ ID NO: 1647175 - RNA, 17 nt, Human
gaguugauucagcucug

SEQ ID NO: 1647176 - RNA, 23 nt, Human
gaggugaccccagguuucuaugu

SEQ ID NO: 1647177 - RNA, 15 nt, Human
gaggucgaggcagga

SEQ ID NO: 1647178 - RNA, 22 nt, Human
gaaggggagauaaggguaucug

SEQ ID NO: 1647179 - RNA, 19 nt, Human
gaauauugcugauggugca

SEQ ID NO: 1647180 - RNA, 20 nt, Human
gaauauugcugauggugcaa

SEQ ID NO: 1647181 - RNA, 14 nt, Human
gaauauugcugaug

SEQ ID NO: 1647182 - RNA, 15 nt, Human
gaauauugcugaugg

SEQ ID NO: 1647183 - RNA, 20 nt, Human
gaauauuagugaccucagcu

SEQ ID NO: 1647184 - RNA, 20 nt, Human
gaaggcuggguucugauccu

SEQ ID NO: 1647185 - RNA, 22 nt, Human
gaaggcuggguucugauccuag

SEQ ID NO: 1647186 - RNA, 18 nt, Human
gaaggccccgcccaggcu

SEQ ID NO: 1647187 - RNA, 19 nt, Human
gaaggccccgcccaggcuu

SEQ ID NO: 1647188 - RNA, 21 nt, Human
gaaggcucgagcaugccugga

SEQ ID NO: 1647189 - RNA, 15 nt, Human
gaaggcuggguucug

SEQ ID NO: 1647190 - RNA, 19 nt, Human
gaaggcuggguucugaucc

SEQ ID NO: 1647191 - RNA, 22 nt, Human
gaagcuccgcuuucuacccagc

SEQ ID NO: 1647192 - RNA, 19 nt, Human
gaagcuccgcuuucuaccc

SEQ ID NO: 1647193 - RNA, 20 nt, Human
gaagcuaucguaaaauuaag

SEQ ID NO: 1647194 - RNA, 11 nt, Human
gaacuggcugc

SEQ ID NO: 1647195 - RNA, 12 nt, Human
gaacuggcugca

SEQ ID NO: 1647196 - RNA, 20 nt, Human
gaacucugacaacagacuuc

SEQ ID NO: 1647197 - RNA, 14 nt, Human
gaacugaaaucaua

SEQ ID NO: 1647198 - RNA, 15 nt, Human
gaagcacaugccucu

SEQ ID NO: 1647199 - RNA, 17 nt, Human
gaagcacaugccucucu

SEQ ID NO: 1647200 - RNA, 20 nt, Human
gaagcacaugccucucucag

SEQ ID NO: 1647201 - RNA, 20 nt, Human
gaagcaaugcuucaucccuu

SEQ ID NO: 1647202 - RNA, 23 nt, Human
gaagcaacccaaauguucaucaa

SEQ ID NO: 1647203 - RNA, 22 nt, Human
gaagacaaugacuuacuguaca

SEQ ID NO: 1647204 - RNA, 23 nt, Human
gaagacaaugugaaaagaaaaau

SEQ ID NO: 1647205 - RNA, 16 nt, Human
gaagacaaugacuuac

SEQ ID NO: 1647206 - RNA, 14 nt, Human
gaagcaaaauuuuu

SEQ ID NO: 1647207 - RNA, 21 nt, Human
gaagcacaugccucucucagg

SEQ ID NO: 1647208 - RNA, 15 nt, Human
gaagcagaggaagga

SEQ ID NO: 1647209 - RNA, 11 nt, Human
gaccugaggcc

SEQ ID NO: 1647210 - RNA, 13 nt, Human
gaccugaggcccu

SEQ ID NO: 1647211 - RNA, 14 nt, Human
gaccugaggcccuu

SEQ ID NO: 1647212 - RNA, 16 nt, Human
gacgccaucccagccc

SEQ ID NO: 1647213 - RNA, 14 nt, Human
gaccucugcagcaa

SEQ ID NO: 1647214 - RNA, 20 nt, Human
gaccaucccugaaggccccg

SEQ ID NO: 1647215 - RNA, 14 nt, Human
gaccaucccugaag

SEQ ID NO: 1647216 - RNA, 19 nt, Human
gacgccaucccagccccaa

SEQ ID NO: 1647217 - RNA, 17 nt, Human
gacgccaucccagcccc

SEQ ID NO: 1647218 - RNA, 18 nt, Human
gacgccaucccagcccca

SEQ ID NO: 1647219 - RNA, 16 nt, Human
gacgcuacccgggaag

SEQ ID NO: 1647220 - RNA, 18 nt, Human
gacgcuacccgggaaggg

SEQ ID NO: 1647221 - RNA, 19 nt, Human
gacgcuacccgggaagggg

SEQ ID NO: 1647222 - RNA, 15 nt, Human
gacgcucucuggccu

SEQ ID NO: 1647223 - RNA, 16 nt, Human
gacgcucucuggccuu

SEQ ID NO: 1647224 - RNA, 17 nt, Human
gacgcucucuggccuuc

SEQ ID NO: 1647225 - RNA, 17 nt, Human
gacuguggugacuuugg

SEQ ID NO: 1647226 - RNA, 13 nt, Human
gacuguggugacu

SEQ ID NO: 1647227 - RNA, 14 nt, Human
gacuguggugacuu

SEQ ID NO: 1647228 - RNA, 22 nt, Human
gacugugugcucaggagcccug

SEQ ID NO: 1647229 - RNA, 18 nt, Human
gacuguacuccucccagg

SEQ ID NO: 1647230 - RNA, 23 nt, Human
gacuguacuccucccaggcgccc

SEQ ID NO: 1647231 - RNA, 20 nt, Human
gacugaauuaugaaacuuuu

SEQ ID NO: 1647232 - RNA, 16 nt, Human
gacugaauuucuuuug

SEQ ID NO: 1647233 - RNA, 14 nt, Human
gacugaauuaugaa

SEQ ID NO: 1647234 - RNA, 14 nt, Human
gacugaauuucuuu

SEQ ID NO: 1647235 - RNA, 12 nt, Human
gacucugccucc

SEQ ID NO: 1647236 - RNA, 16 nt, Human
gacucugccuccucuu

SEQ ID NO: 1647237 - RNA, 15 nt, Human
gacucaccuccccca

SEQ ID NO: 1647238 - RNA, 22 nt, Human
gacucaccucccccaucucuuc

SEQ ID NO: 1647239 - RNA, 14 nt, Human
gacucuuaagaaga

SEQ ID NO: 1647240 - RNA, 15 nt, Human
gacucuuaagaagac

SEQ ID NO: 1647241 - RNA, 19 nt, Human
gacucugucucaaaaaaac

SEQ ID NO: 1647242 - RNA, 21 nt, Human
gacucuuaagaagacugcauu

SEQ ID NO: 1647243 - RNA, 19 nt, Human
gacauuguuggccaaagcc

SEQ ID NO: 1647244 - RNA, 16 nt, Human
gacauuugcucaugga

SEQ ID NO: 1647245 - RNA, 17 nt, Human
gacauuugcucauggaa

SEQ ID NO: 1647246 - RNA, 14 nt, Human
gacauugcggacag

SEQ ID NO: 1647247 - RNA, 15 nt, Human
gacauugcggacagc

SEQ ID NO: 1647248 - RNA, 17 nt, Human
gacauugcggacagcca

SEQ ID NO: 1647249 - RNA, 20 nt, Human
gacagcccgggcucugccuc

SEQ ID NO: 1647250 - RNA, 18 nt, Human
gacagcccgggcucugcc

SEQ ID NO: 1647251 - RNA, 19 nt, Human
gacagcccgggcucugccu

SEQ ID NO: 1647252 - RNA, 21 nt, Human
gacagugagacucugucucag

SEQ ID NO: 1647253 - RNA, 13 nt, Human
gaccauacuaauu

SEQ ID NO: 1647254 - RNA, 20 nt, Human
gaccagggauuuccaugaug

SEQ ID NO: 1647255 - RNA, 12 nt, Human
gaccaucccuga

SEQ ID NO: 1647256 - RNA, 13 nt, Human
gaccaucccugaa

SEQ ID NO: 1647257 - RNA, 18 nt, Human
gaccaucccugaaggccc

SEQ ID NO: 1647258 - RNA, 19 nt, Human
gaccaucccugaaggcccc

SEQ ID NO: 1647259 - RNA, 18 nt, Human
gaccagggauuuccauga

SEQ ID NO: 1647260 - RNA, 17 nt, Human
gacagcccgggcucugc

SEQ ID NO: 1647261 - RNA, 21 nt, Human
gacagaaagcagaacagugau

SEQ ID NO: 1647262 - RNA, 17 nt, Human
gacacagcucuucucca

SEQ ID NO: 1647263 - RNA, 22 nt, Human
gacacagcucuucuccaggcug

SEQ ID NO: 1647264 - RNA, 23 nt, Human
gacacagcucuucuccaggcugu

SEQ ID NO: 1647265 - RNA, 12 nt, Human
gacacaggcccg

SEQ ID NO: 1647266 - RNA, 14 nt, Human
gacacagcucuucu

SEQ ID NO: 1647267 - RNA, 16 nt, Human
gacacagcucuucucc

SEQ ID NO: 1647268 - RNA, 15 nt, Human
gacacacugaagaag

SEQ ID NO: 1647269 - RNA, 16 nt, Human
gacacacugaagaagc

SEQ ID NO: 1647270 - RNA, 17 nt, Human
ggcugcagggaguccga

SEQ ID NO: 1647271 - RNA, 21 nt, Human
ggcugaacacuccaauuaagg

SEQ ID NO: 1647272 - RNA, 22 nt, Human
ggcugcaugcgggcuuccuccu

SEQ ID NO: 1647273 - RNA, 20 nt, Human
ggcugcaugcgggcuuccuc

SEQ ID NO: 1647274 - RNA, 18 nt, Human
ggcucgagcaugccugga

SEQ ID NO: 1647275 - RNA, 23 nt, Human
ggcucuuccaggcugggagagcc

SEQ ID NO: 1647276 - RNA, 24 nt, Human
ggcucuuccaggcugggagagccu

SEQ ID NO: 1647277 - RNA, 13 nt, Human
ggcuccugccacc

SEQ ID NO: 1647278 - RNA, 12 nt, Human
ggcuccugccac

SEQ ID NO: 1647279 - RNA, 17 nt, Human
ggcuccucccggugccc

SEQ ID NO: 1647280 - RNA, 20 nt, Human
ggcucccuucccaccucucu

SEQ ID NO: 1647281 - RNA, 22 nt, Human
ggcucccuucccaccucucuca

SEQ ID NO: 1647282 - RNA, 17 nt, Human
ggcucccuucccaccuc

SEQ ID NO: 1647283 - RNA, 18 nt, Human
ggcucccuucccaccucu

SEQ ID NO: 1647284 - RNA, 16 nt, Human
ggcucccuucccaccu

SEQ ID NO: 1647285 - RNA, 21 nt, Human
ggcugccaucucaccuccugc

SEQ ID NO: 1647286 - RNA, 22 nt, Human
ggcugccaucucaccuccugcu

SEQ ID NO: 1647287 - RNA, 23 nt, Human
ggcugccaucucaccuccugcug

SEQ ID NO: 1647288 - RNA, 16 nt, Human
ggcuggcccugcccug

SEQ ID NO: 1647289 - RNA, 17 nt, Human
ggcuggcccugcccugg

SEQ ID NO: 1647290 - RNA, 14 nt, Human
ggcuggcgugcagu

SEQ ID NO: 1647291 - RNA, 16 nt, Human
ggcuggcgugcagugg

SEQ ID NO: 1647292 - RNA, 20 nt, Human
ggcuggcgugcaguggugcg

SEQ ID NO: 1647293 - RNA, 13 nt, Human
ggcuggcccugcc

SEQ ID NO: 1647294 - RNA, 14 nt, Human
ggcuggcccugccc

SEQ ID NO: 1647295 - RNA, 15 nt, Human
ggcuggcccugcccu

SEQ ID NO: 1647296 - RNA, 17 nt, Human
ggcuggccuggccccuc

SEQ ID NO: 1647297 - RNA, 22 nt, Human
ggcuggccuggccccucagggu

SEQ ID NO: 1647298 - RNA, 13 nt, Human
ggcugggagagcc

SEQ ID NO: 1647299 - RNA, 19 nt, Human
ggcuguaucccaugagccu

SEQ ID NO: 1647300 - RNA, 16 nt, Human
ggcuggugucaccuga

SEQ ID NO: 1647301 - RNA, 15 nt, Human
ggcuucaguggcagc

SEQ ID NO: 1647302 - RNA, 20 nt, Human
ggcuguaucccaugagccuc

SEQ ID NO: 1647303 - RNA, 22 nt, Human
ggcuguaucccaugagccucag

SEQ ID NO: 1647304 - RNA, 23 nt, Human
ggcuguaucccaugagccucagc

SEQ ID NO: 1647305 - RNA, 15 nt, Human
ggcugucaauuacag

SEQ ID NO: 1647306 - RNA, 16 nt, Human
ggcuucaguggcagcu

SEQ ID NO: 1647307 - RNA, 13 nt, Human
gggaaaaucagcc

SEQ ID NO: 1647308 - RNA, 23 nt, Human
gggaaaaucagccugcuccagcu

SEQ ID NO: 1647309 - RNA, 20 nt, Human
aaaaagcuccaaaugcagcu

SEQ ID NO: 1647310 - RNA, 13 nt, Human
aaaaaaacacaaa

SEQ ID NO: 1647311 - RNA, 14 nt, Human
gggaacagacugga

SEQ ID NO: 1647312 - RNA, 20 nt, Human
aaaaaucucaaauuucuaaa

SEQ ID NO: 1647313 - RNA, 19 nt, Human
aaaaaucucaaauuucuaa

SEQ ID NO: 1647314 - RNA, 22 nt, Human
gggaacagacuggaagcacagc

SEQ ID NO: 1647315 - RNA, 15 nt, Human
aaaaccaauguucuc

SEQ ID NO: 1647316 - RNA, 14 nt, Human
aaaacguggcugcu

SEQ ID NO: 1647317 - RNA, 16 nt, Human
aaaacguggcugcuuc

SEQ ID NO: 1647318 - RNA, 17 nt, Human
aaaacguggcugcuuca

SEQ ID NO: 1647319 - RNA, 18 nt, Human
aaaacguggcugcuucaa

SEQ ID NO: 1647320 - RNA, 19 nt, Human
aaaacugcucauaugaugu

SEQ ID NO: 1647321 - RNA, 20 nt, Human
aaaacugcugacuguuuucu

SEQ ID NO: 1647322 - RNA, 18 nt, Human
aaaacugauuuuuuuuuc

SEQ ID NO: 1647323 - RNA, 22 nt, Human
aaaacugauuuuuuuuuccuuc

SEQ ID NO: 1647324 - RNA, 19 nt, Human
aaaaccaagccguggcuuc

SEQ ID NO: 1647325 - RNA, 21 nt, Human
aaaacguggcugcuucaagga

SEQ ID NO: 1647326 - RNA, 13 nt, Human
gggagggccuggg

SEQ ID NO: 1647327 - RNA, 11 nt, Human
gggagggcucc

SEQ ID NO: 1647328 - RNA, 13 nt, Human
gggagggcuccag

SEQ ID NO: 1647329 - RNA, 19 nt, Human
gggaggccaaggugggagg

SEQ ID NO: 1647330 - RNA, 20 nt, Human
gggaggcagagguugcagug

SEQ ID NO: 1647331 - RNA, 14 nt, Human
aaaagcugggcagg

SEQ ID NO: 1647332 - RNA, 22 nt, Human
aaaagcuccauuuuuagugaaa

SEQ ID NO: 1647333 - RNA, 21 nt, Human
aaaacuuuaugcuaagugaaa

SEQ ID NO: 1647334 - RNA, 16 nt, Human
aaaagccuguuuaaga

SEQ ID NO: 1647335 - RNA, 18 nt, Human
aaaagccuguuuaagaga

SEQ ID NO: 1647336 - RNA, 15 nt, Human
gggauucuuaaaguu

SEQ ID NO: 1647337 - RNA, 20 nt, Human
gggauucuuaaaguugaauu

SEQ ID NO: 1647338 - RNA, 14 nt, Human
gggcagaggaaagc

SEQ ID NO: 1647339 - RNA, 15 nt, Human
gggauuuccaugaug

SEQ ID NO: 1647340 - RNA, 16 nt, Human
aaaagggacugagaaa

SEQ ID NO: 1647341 - RNA, 19 nt, Human
aaaagggacugagaaauuu

SEQ ID NO: 1647342 - RNA, 19 nt, Human
gggcagcugccuccccucc

SEQ ID NO: 1647343 - RNA, 14 nt, Human
gggcagcugccucc

SEQ ID NO: 1647344 - RNA, 13 nt, Human
gggcagcugccuc

SEQ ID NO: 1647345 - RNA, 23 nt, Human
gggcagcugccuccccuccucug

SEQ ID NO: 1647346 - RNA, 20 nt, Human
gggcagcugccuccccuccu

SEQ ID NO: 1647347 - RNA, 12 nt, Human
aaaauaaauuau

SEQ ID NO: 1647348 - RNA, 15 nt, Human
aaaauaccagccagu

SEQ ID NO: 1647349 - RNA, 14 nt, Human
aaaauaccagccag

SEQ ID NO: 1647350 - RNA, 21 nt, Human
aaaauaauuuuuauauuugaa

SEQ ID NO: 1647351 - RNA, 23 nt, Human
aaaauaauuuuuauauuugaaau

SEQ ID NO: 1647352 - RNA, 18 nt, Human
aaaauaguggugugauuu

SEQ ID NO: 1647353 - RNA, 12 nt, Human
aaaauagccugc

SEQ ID NO: 1647354 - RNA, 18 nt, Human
aaaauauauaucaaauau

SEQ ID NO: 1647355 - RNA, 16 nt, Human
aaagcuacuuauugua

SEQ ID NO: 1647356 - RNA, 17 nt, Human
aaagcuacuuauuguag

SEQ ID NO: 1647357 - RNA, 18 nt, Human
aaagcuaggccuggccag

SEQ ID NO: 1647358 - RNA, 21 nt, Human
aaagcagugcaugcugucccu

SEQ ID NO: 1647359 - RNA, 22 nt, Human
aaagcagugcaugcugucccuu

SEQ ID NO: 1647360 - RNA, 17 nt, Human
aaagcagugcaugcugu

SEQ ID NO: 1647361 - RNA, 11 nt, Human
aaaggaaagag

SEQ ID NO: 1647362 - RNA, 23 nt, Human
aaaggaagguucuggugugaacu

SEQ ID NO: 1647363 - RNA, 13 nt, Human
aaaggaauuuaaa

SEQ ID NO: 1647364 - RNA, 18 nt, Human
ggugcaaaguucccuacu

SEQ ID NO: 1647365 - RNA, 16 nt, Human
ggugcacaagcuccaa

SEQ ID NO: 1647366 - RNA, 22 nt, Human
ggugcacaagcuccaagcuccc

SEQ ID NO: 1647367 - RNA, 21 nt, Human
ggugauccacucgccuucauc

SEQ ID NO: 1647368 - RNA, 19 nt, Human
ggucuguucuuuccaaagu

SEQ ID NO: 1647369 - RNA, 17 nt, Human
ggucuguucuuuccaaa

SEQ ID NO: 1647370 - RNA, 21 nt, Human
ggucuugaacuccuggccuca

SEQ ID NO: 1647371 - RNA, 22 nt, Human
ggucuugaacuccuggccucaa

SEQ ID NO: 1647372 - RNA, 12 nt, Human
ggucuguucuuu

SEQ ID NO: 1647373 - RNA, 14 nt, Human
ggucugugagaugc

SEQ ID NO: 1647374 - RNA, 24 nt, Human
ggucugugagaugcuagaacuccc

SEQ ID NO: 1647375 - RNA, 17 nt, Human
aaacuuguguaaauaca

SEQ ID NO: 1647376 - RNA, 14 nt, Human
ggucccaccccaca

SEQ ID NO: 1647377 - RNA, 12 nt, Human
ggucccacccca

SEQ ID NO: 1647378 - RNA, 20 nt, Human
gguccacccaggagccccga

SEQ ID NO: 1647379 - RNA, 22 nt, Human
gguccacccaggagccccgagg

SEQ ID NO: 1647380 - RNA, 13 nt, Human
aaacuuuucugau

SEQ ID NO: 1647381 - RNA, 14 nt, Human
aaacuuuucugaua

SEQ ID NO: 1647382 - RNA, 14 nt, Human
aaacuuuaccuuuu

SEQ ID NO: 1647383 - RNA, 16 nt, Human
aaacuuuucugauaga

SEQ ID NO: 1647384 - RNA, 17 nt, Human
aaacuuuucugauagag

SEQ ID NO: 1647385 - RNA, 16 nt, Human
aaagaaugauuaugaa

SEQ ID NO: 1647386 - RNA, 18 nt, Human
gguauaaguggugugugu

SEQ ID NO: 1647387 - RNA, 23 nt, Human
gguauuggcuagagguucaaaga

SEQ ID NO: 1647388 - RNA, 19 nt, Human
aaagacuuuuccaacccuc

SEQ ID NO: 1647389 - RNA, 18 nt, Human
aaagagaacuuccagauc

SEQ ID NO: 1647390 - RNA, 17 nt, Human
aaagaauggaaggugga

SEQ ID NO: 1647391 - RNA, 22 nt, Human
aaagacuauucaaacagucuca

SEQ ID NO: 1647392 - RNA, 15 nt, Human
aaagacuguacaaag

SEQ ID NO: 1647393 - RNA, 14 nt, Human
aaagacuccaaaga

SEQ ID NO: 1647394 - RNA, 13 nt, Human
aaagacuccaaag

SEQ ID NO: 1647395 - RNA, 23 nt, Human
aaagacuauucaaacagucucag

SEQ ID NO: 1647396 - RNA, 15 nt, Human
aaagaugagugagca

SEQ ID NO: 1647397 - RNA, 13 nt, Human
aaagaggcuaugu

SEQ ID NO: 1647398 - RNA, 18 nt, Human
aaagaggcuaugugagca

SEQ ID NO: 1647399 - RNA, 20 nt, Human
aaagaggcagcuugaaacug

SEQ ID NO: 1647400 - RNA, 20 nt, Human
ggguaucaggugcugccauc

SEQ ID NO: 1647401 - RNA, 14 nt, Human
aaaccaagccgugg

SEQ ID NO: 1647402 - RNA, 16 nt, Human
aaaccaagccguggcu

SEQ ID NO: 1647403 - RNA, 18 nt, Human
aaacauugguucuuguau

SEQ ID NO: 1647404 - RNA, 20 nt, Human
aaacauugguucuuguauua

SEQ ID NO: 1647405 - RNA, 21 nt, Human
aaacauugguucuuguauuaa

SEQ ID NO: 1647406 - RNA, 17 nt, Human
aaacauugguucuugua

SEQ ID NO: 1647407 - RNA, 19 nt, Human
aaacauguuucuuuguaau

SEQ ID NO: 1647408 - RNA, 22 nt, Human
aaacauguuucuuuguaaugaa

SEQ ID NO: 1647409 - RNA, 23 nt, Human
aaacauguuucuuuguaaugaaa

SEQ ID NO: 1647410 - RNA, 22 nt, Human
gggucucacuauguugcccagg

SEQ ID NO: 1647411 - RNA, 12 nt, Human
gggucucacucu

SEQ ID NO: 1647412 - RNA, 23 nt, Human
gggucucacuauguugcccaggc

SEQ ID NO: 1647413 - RNA, 12 nt, Human
aaacugcccccu

SEQ ID NO: 1647414 - RNA, 11 nt, Human
aaacugccccc

SEQ ID NO: 1647415 - RNA, 13 nt, Human
aaacugcccccuc

SEQ ID NO: 1647416 - RNA, 17 nt, Human
aaacugcccccucugcc

SEQ ID NO: 1647417 - RNA, 19 nt, Human
aaacugcccccucugcccu

SEQ ID NO: 1647418 - RNA, 20 nt, Human
aaacugcccccucugcccug

SEQ ID NO: 1647419 - RNA, 21 nt, Human
aaacugcccccucugcccugc

SEQ ID NO: 1647420 - RNA, 16 nt, Human
aaacuggauuaaacuu

SEQ ID NO: 1647421 - RNA, 16 nt, Human
aaacuggguuccugca

SEQ ID NO: 1647422 - RNA, 15 nt, Human
aaacuggguuccugc

SEQ ID NO: 1647423 - RNA, 12 nt, Human
aaacgugaaaau

SEQ ID NO: 1647424 - RNA, 15 nt, Human
aaacgucuuaaauau

SEQ ID NO: 1647425 - RNA, 16 nt, Human
aaacguggcugcuuca

SEQ ID NO: 1647426 - RNA, 17 nt, Human
aaacguggcugcuucaa

SEQ ID NO: 1647427 - RNA, 20 nt, Human
aaacguggcugcuucaagga

SEQ ID NO: 1647428 - RNA, 16 nt, Human
aaacggaugauuucua

SEQ ID NO: 1647429 - RNA, 18 nt, Human
aaacggaugauuucuaug

SEQ ID NO: 1647430 - RNA, 23 nt, Human
aaacggccucacuaggcuucugg

SEQ ID NO: 1647431 - RNA, 21 nt, Human
aaaccacauuggagauguuua

SEQ ID NO: 1647432 - RNA, 16 nt, Human
aaaccacagcaguuga

SEQ ID NO: 1647433 - RNA, 15 nt, Human
aaaccacagcaguug

SEQ ID NO: 1647434 - RNA, 13 nt, Human
ggggccaggcugg

SEQ ID NO: 1647435 - RNA, 14 nt, Human
ggggccaggcuggg

SEQ ID NO: 1647436 - RNA, 16 nt, Human
ggggccaggcuggguc

SEQ ID NO: 1647437 - RNA, 17 nt, Human
ggggccaguuggucccc

SEQ ID NO: 1647438 - RNA, 19 nt, Human
ggggccaguuggucccccu

SEQ ID NO: 1647439 - RNA, 16 nt, Human
ggggcccugccuccuu

SEQ ID NO: 1647440 - RNA, 19 nt, Human
ggggcccugccuccuuugu

SEQ ID NO: 1647441 - RNA, 23 nt, Human
ggggcccugccuccuuugugagg

SEQ ID NO: 1647442 - RNA, 13 nt, Human
ggggaccucaggc

SEQ ID NO: 1647443 - RNA, 15 nt, Human
ggggaccucaggccu

SEQ ID NO: 1647444 - RNA, 16 nt, Human
ggggaccucaggccug

SEQ ID NO: 1647445 - RNA, 17 nt, Human
ggggaccucaggccugg

SEQ ID NO: 1647446 - RNA, 19 nt, Human
aaacaagucagucauucag

SEQ ID NO: 1647447 - RNA, 14 nt, Human
aaacacaacuauau

SEQ ID NO: 1647448 - RNA, 13 nt, Human
aaacauauauaac

SEQ ID NO: 1647449 - RNA, 16 nt, Human
aaacauauauaacaau

SEQ ID NO: 1647450 - RNA, 19 nt, Human
aaacauauauaacaaugcu

SEQ ID NO: 1647451 - RNA, 22 nt, Human
aaacaugcuacacacugcaugu

SEQ ID NO: 1647452 - RNA, 16 nt, Human
aaacaugcuacacacu

SEQ ID NO: 1647453 - RNA, 21 nt, Human
aaacauauauaacaaugcugu

SEQ ID NO: 1647454 - RNA, 22 nt, Human
aaaauggacuguggugacuuug

SEQ ID NO: 1647455 - RNA, 12 nt, Human
aaaauggaauac

SEQ ID NO: 1647456 - RNA, 21 nt, Human
aaaauggacguguuaugacuc

SEQ ID NO: 1647457 - RNA, 21 nt, Human
aaaauuggggauucuuaaagu

SEQ ID NO: 1647458 - RNA, 23 nt, Human
aaaauuggggauucuuaaaguug

SEQ ID NO: 1647459 - RNA, 21 nt, Human
aaaauguaggguuauaauaau

SEQ ID NO: 1647460 - RNA, 16 nt, Human
aaaauuuuuaaucuuu

SEQ ID NO: 1647461 - RNA, 19 nt, Human
aaaauuuuuaaucuuuaau

SEQ ID NO: 1647462 - RNA, 19 nt, Human
aaaauuuuuucucuaggaa

SEQ ID NO: 1647463 - RNA, 13 nt, Human
aaacaaagaaauu

SEQ ID NO: 1647464 - RNA, 18 nt, Human
aaacaagaccacguuucu

SEQ ID NO: 1647465 - RNA, 17 nt, Human
aaacaaggaugaauuaa

SEQ ID NO: 1647466 - RNA, 11 nt, Human
ggcaaaauaau

SEQ ID NO: 1647467 - RNA, 21 nt, Human
ggauuuugauccaagcugguc

SEQ ID NO: 1647468 - RNA, 23 nt, Human
ggauuaaacuuaaucuaaaugga

SEQ ID NO: 1647469 - RNA, 13 nt, Human
ggcaaaugacuuu

SEQ ID NO: 1647470 - RNA, 22 nt, Human
ggaugguucccuugaugaagaa

SEQ ID NO: 1647471 - RNA, 23 nt, Human
ggaugguucccuugaugaagaag

SEQ ID NO: 1647472 - RNA, 13 nt, Human
ggauguucuggga

SEQ ID NO: 1647473 - RNA, 12 nt, Human
ggaugagaaagg

SEQ ID NO: 1647474 - RNA, 22 nt, Human
ggaugagaaagguugaagcacc

SEQ ID NO: 1647475 - RNA, 21 nt, Human
ggaugaauuccaaauucugcu

SEQ ID NO: 1647476 - RNA, 22 nt, Human
ggcagccgugccuucagcucua

SEQ ID NO: 1647477 - RNA, 19 nt, Human
ggcagccgugccuucagcu

SEQ ID NO: 1647478 - RNA, 21 nt, Human
ggcagccgugccuucagcucu

SEQ ID NO: 1647479 - RNA, 18 nt, Human
ggcagccgugccuucagc

SEQ ID NO: 1647480 - RNA, 10 nt, Human
ggcagagcag

SEQ ID NO: 1647481 - RNA, 12 nt, Human
ggcagagcagag

SEQ ID NO: 1647482 - RNA, 15 nt, Human
ggcagccaggccaca

SEQ ID NO: 1647483 - RNA, 17 nt, Human
ggcagccaggccacaag

SEQ ID NO: 1647484 - RNA, 12 nt, Human
ggcagaaggaag

SEQ ID NO: 1647485 - RNA, 21 nt, Human
ggccaaggaugccccgucccc

SEQ ID NO: 1647486 - RNA, 13 nt, Human
ggccaagguggga

SEQ ID NO: 1647487 - RNA, 23 nt, Human
ggccagagggagugacagaggca

SEQ ID NO: 1647488 - RNA, 19 nt, Human
ggccagaugcaccagcccu

SEQ ID NO: 1647489 - RNA, 20 nt, Human
ggccagaugcaccagcccuu

SEQ ID NO: 1647490 - RNA, 13 nt, Human
ggccaaaggaagc

SEQ ID NO: 1647491 - RNA, 15 nt, Human
ggccaaagccaaagc

SEQ ID NO: 1647492 - RNA, 12 nt, Human
ggccaaaggaag

SEQ ID NO: 1647493 - RNA, 12 nt, Human
ggcauuguggga

SEQ ID NO: 1647494 - RNA, 19 nt, Human
ggccagguggccacuccag

SEQ ID NO: 1647495 - RNA, 16 nt, Human
ggcccgacagccuggc

SEQ ID NO: 1647496 - RNA, 17 nt, Human
ggcccgacagccuggca

SEQ ID NO: 1647497 - RNA, 23 nt, Human
ggcccuuccucuccacugccuuc

SEQ ID NO: 1647498 - RNA, 19 nt, Human
ggcccuuccucuccacugc

SEQ ID NO: 1647499 - RNA, 22 nt, Human
ggcccuuccucuccacugccuu

SEQ ID NO: 1647500 - RNA, 14 nt, Human
ggcccuuccuuuuc

SEQ ID NO: 1647501 - RNA, 13 nt, Human
ggccucccaacuc

SEQ ID NO: 1647502 - RNA, 14 nt, Human
ggccucccaacuca

SEQ ID NO: 1647503 - RNA, 18 nt, Human
ggagcccacuguacuugc

SEQ ID NO: 1647504 - RNA, 22 nt, Human
ggagcccacuguacuugcucuu

SEQ ID NO: 1647505 - RNA, 22 nt, Human
ggagcugccuguucagcuccag

SEQ ID NO: 1647506 - RNA, 16 nt, Human
ggagcugaguggggga

SEQ ID NO: 1647507 - RNA, 17 nt, Human
ggaggcucuggagccca

SEQ ID NO: 1647508 - RNA, 20 nt, Human
ggaggcucuggagcccacug

SEQ ID NO: 1647509 - RNA, 18 nt, Human
ggaggccaaggugggagg

SEQ ID NO: 1647510 - RNA, 20 nt, Human
ggaggccaaggugggaggau

SEQ ID NO: 1647511 - RNA, 13 nt, Human
ggaggccagccuu

SEQ ID NO: 1647512 - RNA, 21 nt, Human
ggaggaaaaccaagccguggc

SEQ ID NO: 1647513 - RNA, 22 nt, Human
ggaggaaaaccaagccguggcu

SEQ ID NO: 1647514 - RNA, 20 nt, Human
ggaggaaaaccaagccgugg

SEQ ID NO: 1647515 - RNA, 12 nt, Human
ggaggaagagaa

SEQ ID NO: 1647516 - RNA, 21 nt, Human
ggaggcaugugaugagaggaa

SEQ ID NO: 1647517 - RNA, 18 nt, Human
ggaggucgaggcaggagg

SEQ ID NO: 1647518 - RNA, 15 nt, Human
ggaggucgaggcagg

SEQ ID NO: 1647519 - RNA, 16 nt, Human
ggaggucgaggcagga

SEQ ID NO: 1647520 - RNA, 21 nt, Human
ggaggcucuggagcccacugu

SEQ ID NO: 1647521 - RNA, 15 nt, Human
ggaggcugagauggg

SEQ ID NO: 1647522 - RNA, 19 nt, Human
ggaggcugagaugggagaa

SEQ ID NO: 1647523 - RNA, 15 nt, Human
ggagcccacuguacu

SEQ ID NO: 1647524 - RNA, 13 nt, Human
ggagcagccacau

SEQ ID NO: 1647525 - RNA, 21 nt, Human
ggagcagccacauuccugaug

SEQ ID NO: 1647526 - RNA, 19 nt, Human
ggacccugaggcccagagg

SEQ ID NO: 1647527 - RNA, 20 nt, Human
ggacccggaggggccuggca

SEQ ID NO: 1647528 - RNA, 21 nt, Human
ggacccggaggggccuggcag

SEQ ID NO: 1647529 - RNA, 14 nt, Human
ggacccugaggccc

SEQ ID NO: 1647530 - RNA, 15 nt, Human
ggacccugaggccca

SEQ ID NO: 1647531 - RNA, 18 nt, Human
ggacccugaggcccagag

SEQ ID NO: 1647532 - RNA, 19 nt, Human
gcuuguacauaaugcgugc

SEQ ID NO: 1647533 - RNA, 17 nt, Human
ggacuuagcugggagaa

SEQ ID NO: 1647534 - RNA, 22 nt, Human
ggacugugugcucaggagcccu

SEQ ID NO: 1647535 - RNA, 23 nt, Human
ggacugugugcucaggagcccug

SEQ ID NO: 1647536 - RNA, 20 nt, Human
ggacuacaggugugagucac

SEQ ID NO: 1647537 - RNA, 12 nt, Human
ggaccucaggcc

SEQ ID NO: 1647538 - RNA, 16 nt, Human
ggacuaggguccuggg

SEQ ID NO: 1647539 - RNA, 22 nt, Human
ggacucaaugcacugacauugu

SEQ ID NO: 1647540 - RNA, 12 nt, Human
ggacuuguuaga

SEQ ID NO: 1647541 - RNA, 18 nt, Human
ggacuuuuauuuccagug

SEQ ID NO: 1647542 - RNA, 19 nt, Human
ggagaaaauggacguguua

SEQ ID NO: 1647543 - RNA, 15 nt, Human
ggacuuggaagcucc

SEQ ID NO: 1647544 - RNA, 17 nt, Human
ggacuuggaagcuccgc

SEQ ID NO: 1647545 - RNA, 16 nt, Human
ggagacugucucaaga

SEQ ID NO: 1647546 - RNA, 13 nt, Human
ggagaacuagaga

SEQ ID NO: 1647547 - RNA, 22 nt, Human
ggagaaccaaaaagaggcuaug

SEQ ID NO: 1647548 - RNA, 14 nt, Human
ggagagagacucca

SEQ ID NO: 1647549 - RNA, 13 nt, Human
ggagagccuucca

SEQ ID NO: 1647550 - RNA, 16 nt, Human
ggagagccuuccaggg

SEQ ID NO: 1647551 - RNA, 22 nt, Human
ggagagccuuccagggguggga

SEQ ID NO: 1647552 - RNA, 17 nt, Human
ggagagccuuccagggg

SEQ ID NO: 1647553 - RNA, 18 nt, Human
ggagagccuuccaggggu

SEQ ID NO: 1647554 - RNA, 15 nt, Human
ggagagcuagcagca

SEQ ID NO: 1647555 - RNA, 21 nt, Human
gccacugcacuauagccuagg

SEQ ID NO: 1647556 - RNA, 13 nt, Human
gccacccugggga

SEQ ID NO: 1647557 - RNA, 19 nt, Human
gccacccuggggagaaagu

SEQ ID NO: 1647558 - RNA, 23 nt, Human
gccacugcaccgggccacagaga

SEQ ID NO: 1647559 - RNA, 21 nt, Human
gccacuugaugacccccaacc

SEQ ID NO: 1647560 - RNA, 12 nt, Human
gccacugccucu

SEQ ID NO: 1647561 - RNA, 13 nt, Human
gccacugccucuu

SEQ ID NO: 1647562 - RNA, 16 nt, Human
gccacugccucuuccu

SEQ ID NO: 1647563 - RNA, 17 nt, Human
gccacugccucuuccuc

SEQ ID NO: 1647564 - RNA, 18 nt, Human
gccacugugaagagaacc

SEQ ID NO: 1647565 - RNA, 19 nt, Human
gccacugugaagagaacca

SEQ ID NO: 1647566 - RNA, 14 nt, Human
gccaccacgcccgg

SEQ ID NO: 1647567 - RNA, 13 nt, Human
gccaccacgcccg

SEQ ID NO: 1647568 - RNA, 22 nt, Human
gccaccaacauacucccaucug

SEQ ID NO: 1647569 - RNA, 19 nt, Human
gccaccaacauacucccau

SEQ ID NO: 1647570 - RNA, 20 nt, Human
gccaccaacauacucccauc

SEQ ID NO: 1647571 - RNA, 21 nt, Human
gccaccaacauacucccaucu

SEQ ID NO: 1647572 - RNA, 16 nt, Human
gccacauuccugaugc

SEQ ID NO: 1647573 - RNA, 20 nt, Human
gccacauuccugaugcuucu

SEQ ID NO: 1647574 - RNA, 18 nt, Human
gcacuuggagacuuguau

SEQ ID NO: 1647575 - RNA, 15 nt, Human
gccagaauuucaaac

SEQ ID NO: 1647576 - RNA, 22 nt, Human
gccagacaucaacagauaaaua

SEQ ID NO: 1647577 - RNA, 13 nt, Human
gccagcaggcucu

SEQ ID NO: 1647578 - RNA, 16 nt, Human
gccagcaggcucucag

SEQ ID NO: 1647579 - RNA, 17 nt, Human
gccagcaggcucucagg

SEQ ID NO: 1647580 - RNA, 18 nt, Human
gccagcaggcucucaggc

SEQ ID NO: 1647581 - RNA, 19 nt, Human
gccagcaggcucucaggcc

SEQ ID NO: 1647582 - RNA, 20 nt, Human
gccagcaggcucucaggcca

SEQ ID NO: 1647583 - RNA, 21 nt, Human
gccagcaggcucucaggccag

SEQ ID NO: 1647584 - RNA, 23 nt, Human
gccagcaggcucucaggccagcu

SEQ ID NO: 1647585 - RNA, 23 nt, Human
gccagcaguucagagcugcccuc

SEQ ID NO: 1647586 - RNA, 22 nt, Human
gccagcaguucagagcugcccu

SEQ ID NO: 1647587 - RNA, 12 nt, Human
gccaggccagag

SEQ ID NO: 1647588 - RNA, 23 nt, Human
gccaggccacaagacccuugugg

SEQ ID NO: 1647589 - RNA, 19 nt, Human
gccaggcccucugcccacu

SEQ ID NO: 1647590 - RNA, 20 nt, Human
gccaggcccucugcccacuc

SEQ ID NO: 1647591 - RNA, 21 nt, Human
gccaggcccucugcccacucc

SEQ ID NO: 1647592 - RNA, 16 nt, Human
gccaggcccucugccc

SEQ ID NO: 1647593 - RNA, 17 nt, Human
gccaggcccucugccca

SEQ ID NO: 1647594 - RNA, 13 nt, Human
gccaggccagagg

SEQ ID NO: 1647595 - RNA, 18 nt, Human
gcccaccuuggcucaagu

SEQ ID NO: 1647596 - RNA, 13 nt, Human
gcccacgccccca

SEQ ID NO: 1647597 - RNA, 14 nt, Human
gcccacgcccccac

SEQ ID NO: 1647598 - RNA, 15 nt, Human
gcccacgcccccacu

SEQ ID NO: 1647599 - RNA, 15 nt, Human
gcccacgcuggagug

SEQ ID NO: 1647600 - RNA, 16 nt, Human
gcccacgcuggagugc

SEQ ID NO: 1647601 - RNA, 17 nt, Human
gcccacgcuggagugca

SEQ ID NO: 1647602 - RNA, 17 nt, Human
gccauuccccgucucug

SEQ ID NO: 1647603 - RNA, 18 nt, Human
gccauuccccgucucugg

SEQ ID NO: 1647604 - RNA, 19 nt, Human
gccauguuggccaggcugg

SEQ ID NO: 1647605 - RNA, 20 nt, Human
gccauguuggccaggcuggu

SEQ ID NO: 1647606 - RNA, 22 nt, Human
gccauguuggccaggcuggucu

SEQ ID NO: 1647607 - RNA, 24 nt, Human
gccauguuggccaggcuggucuca

SEQ ID NO: 1647608 - RNA, 15 nt, Human
gccauguuggccagg

SEQ ID NO: 1647609 - RNA, 16 nt, Human
gccauguuggccaggc

SEQ ID NO: 1647610 - RNA, 17 nt, Human
gccauguuggccaggcu

SEQ ID NO: 1647611 - RNA, 18 nt, Human
gccauguuggccaggcug

SEQ ID NO: 1647612 - RNA, 14 nt, Human
gccauguuggccag

SEQ ID NO: 1647613 - RNA, 19 nt, Human
gccauauucuguuggccag

SEQ ID NO: 1647614 - RNA, 20 nt, Human
gccauauucuguuggccagu

SEQ ID NO: 1647615 - RNA, 16 nt, Human
gcccuuaccugccagg

SEQ ID NO: 1647616 - RNA, 20 nt, Human
gcccuuaccugccaggaagc

SEQ ID NO: 1647617 - RNA, 21 nt, Human
gcccuuaccugccaggaagcc

SEQ ID NO: 1647618 - RNA, 15 nt, Human
gccgccaugcuccug

SEQ ID NO: 1647619 - RNA, 16 nt, Human
gccgccaugcuccugg

SEQ ID NO: 1647620 - RNA, 16 nt, Human
gcccugcugaguccca

SEQ ID NO: 1647621 - RNA, 16 nt, Human
gcccugccuccuuugu

SEQ ID NO: 1647622 - RNA, 22 nt, Human
gcccugccuccuuugugaggaa

SEQ ID NO: 1647623 - RNA, 14 nt, Human
gcccuguuaaaaga

SEQ ID NO: 1647624 - RNA, 17 nt, Human
gcccuguuaaaagauga

SEQ ID NO: 1647625 - RNA, 21 nt, Human
gcccugcugagucccaggcug

SEQ ID NO: 1647626 - RNA, 22 nt, Human
gcccugcugagucccaggcuga

SEQ ID NO: 1647627 - RNA, 23 nt, Human
gcccugcugagucccaggcugag

SEQ ID NO: 1647628 - RNA, 13 nt, Human
gcccuguuaaaag

SEQ ID NO: 1647629 - RNA, 17 nt, Human
gcccacuagacccacug

SEQ ID NO: 1647630 - RNA, 23 nt, Human
gcccacuagacccacuggacuca

SEQ ID NO: 1647631 - RNA, 13 nt, Human
gcccacucccugc

SEQ ID NO: 1647632 - RNA, 19 nt, Human
gcccacucccugcaaccug

SEQ ID NO: 1647633 - RNA, 14 nt, Human
gcccacucccugca

SEQ ID NO: 1647634 - RNA, 15 nt, Human
gcccacucccugcaa

SEQ ID NO: 1647635 - RNA, 22 nt, Human
gcccuaaaguguauuuuuuuac

SEQ ID NO: 1647636 - RNA, 15 nt, Human
gccccugcccggcug

SEQ ID NO: 1647637 - RNA, 16 nt, Human
gccccuggaugcagcc

SEQ ID NO: 1647638 - RNA, 18 nt, Human
gccccuggaugcagccuc

SEQ ID NO: 1647639 - RNA, 22 nt, Human
gccccuggaugcagccucacag

SEQ ID NO: 1647640 - RNA, 14 nt, Human
gcccccucugcccu

SEQ ID NO: 1647641 - RNA, 13 nt, Human
gccccugcccggc

SEQ ID NO: 1647642 - RNA, 14 nt, Human
gccccugcccggcu

SEQ ID NO: 1647643 - RNA, 18 nt, Human
gccccaaaacucuccucu

SEQ ID NO: 1647644 - RNA, 19 nt, Human
gccccaaaacucuccucug

SEQ ID NO: 1647645 - RNA, 16 nt, Human
gcccccaggugccagu

SEQ ID NO: 1647646 - RNA, 22 nt, Human
gccucuuccucccucauuccac

SEQ ID NO: 1647647 - RNA, 12 nt, Human
gccucuuccucc

SEQ ID NO: 1647648 - RNA, 12 nt, Human
gccucuucucua

SEQ ID NO: 1647649 - RNA, 23 nt, Human
gccucuucucuacucuagggaaa

SEQ ID NO: 1647650 - RNA, 18 nt, Human
gccugcccaggccccugc

SEQ ID NO: 1647651 - RNA, 19 nt, Human
gccugcccaggccccugcc

SEQ ID NO: 1647652 - RNA, 20 nt, Human
gccugcccaggccccugcca

SEQ ID NO: 1647653 - RNA, 14 nt, Human
gccucugggacugg

SEQ ID NO: 1647654 - RNA, 12 nt, Human
gccucugggacu

SEQ ID NO: 1647655 - RNA, 13 nt, Human
gccuccugugugu

SEQ ID NO: 1647656 - RNA, 13 nt, Human
gccuccuccagcc

SEQ ID NO: 1647657 - RNA, 17 nt, Human
gccugccuguucccauu

SEQ ID NO: 1647658 - RNA, 16 nt, Human
gccugccucuucucua

SEQ ID NO: 1647659 - RNA, 21 nt, Human
gccugggaggucaaggcugca

SEQ ID NO: 1647660 - RNA, 22 nt, Human
gccugggaggucaaggcugcag

SEQ ID NO: 1647661 - RNA, 14 nt, Human
gccugggaucccuc

SEQ ID NO: 1647662 - RNA, 13 nt, Human
gccugugucuuua

SEQ ID NO: 1647663 - RNA, 22 nt, Human
gccugugucuuuaaaugcugcu

SEQ ID NO: 1647664 - RNA, 21 nt, Human
gccugggaucccucauccuca

SEQ ID NO: 1647665 - RNA, 18 nt, Human
gccugggaucccucaucc

SEQ ID NO: 1647666 - RNA, 20 nt, Human
gccuggccccucaggguccc

SEQ ID NO: 1647667 - RNA, 22 nt, Human
gccuggccccucagggucccug

SEQ ID NO: 1647668 - RNA, 10 nt, Human
gccuggccug

SEQ ID NO: 1647669 - RNA, 16 nt, Human
gccuggccccucaggg

SEQ ID NO: 1647670 - RNA, 17 nt, Human
gccuggccccucagggu

SEQ ID NO: 1647671 - RNA, 15 nt, Human
gccuggccccucagg

SEQ ID NO: 1647672 - RNA, 19 nt, Human
gcuugaaacccguggcgcu

SEQ ID NO: 1647673 - RNA, 19 nt, Human
gcuugggcuucauccuccu

SEQ ID NO: 1647674 - RNA, 16 nt, Human
gcuuguacauaaugcg

SEQ ID NO: 1647675 - RNA, 14 nt, Human
gcuuguacauaaug

SEQ ID NO: 1647676 - RNA, 15 nt, Human
gcuucccgcucagcc

SEQ ID NO: 1647677 - RNA, 16 nt, Human
gcuucccgcucagccc

SEQ ID NO: 1647678 - RNA, 17 nt, Human
gcuucccgcucagcccu

SEQ ID NO: 1647679 - RNA, 18 nt, Human
gcuucccgcucagcccuc

SEQ ID NO: 1647680 - RNA, 23 nt, Human
gcuucccgcucagcccucccugc

SEQ ID NO: 1647681 - RNA, 15 nt, Human
gcuggguucuaccca

SEQ ID NO: 1647682 - RNA, 15 nt, Human
gcuggguucugaucc

SEQ ID NO: 1647683 - RNA, 14 nt, Human
gcuggguuggaggg

SEQ ID NO: 1647684 - RNA, 21 nt, Human
gcuggguuggaggguguccca

SEQ ID NO: 1647685 - RNA, 20 nt, Human
gcuguaucccaugagccuca

SEQ ID NO: 1647686 - RNA, 23 nt, Human
gcuguaucccaugagccucagca

SEQ ID NO: 1647687 - RNA, 21 nt, Human
gcuguuggcugggggccucag

SEQ ID NO: 1647688 - RNA, 22 nt, Human
gcuguuggcugggggccucagu

SEQ ID NO: 1647689 - RNA, 19 nt, Human
gcugugcugcccugcccac

SEQ ID NO: 1647690 - RNA, 22 nt, Human
gcugugcugcccugcccaccug

SEQ ID NO: 1647691 - RNA, 21 nt, Human
gcugugcucuggacaggcaug

SEQ ID NO: 1647692 - RNA, 12 nt, Human
gcugugcugccc

SEQ ID NO: 1647693 - RNA, 13 nt, Human
gcugugcugcccu

SEQ ID NO: 1647694 - RNA, 14 nt, Human
gcugugcugcccug

SEQ ID NO: 1647695 - RNA, 22 nt, Human
gcuucaaggauccugagccaga

SEQ ID NO: 1647696 - RNA, 14 nt, Human
gcuuaacuucacau

SEQ ID NO: 1647697 - RNA, 20 nt, Human
gcuucacggaagagccuugc

SEQ ID NO: 1647698 - RNA, 19 nt, Human
gcugggucgcccuggacug

SEQ ID NO: 1647699 - RNA, 15 nt, Human
gcuggguguggcgca

SEQ ID NO: 1647700 - RNA, 17 nt, Human
gcugggucgcccuggac

SEQ ID NO: 1647701 - RNA, 18 nt, Human
gcugggucgcccuggacu

SEQ ID NO: 1647702 - RNA, 16 nt, Human
gcugggucgcccugga

SEQ ID NO: 1647703 - RNA, 14 nt, Human
gcugggcagguugg

SEQ ID NO: 1647704 - RNA, 16 nt, Human
gcugggcagaggaaag

SEQ ID NO: 1647705 - RNA, 17 nt, Human
gcugggcagaggaaagc

SEQ ID NO: 1647706 - RNA, 19 nt, Human
gcugggcagaggaaagcaa

SEQ ID NO: 1647707 - RNA, 16 nt, Human
gcugggcucccuuccc

SEQ ID NO: 1647708 - RNA, 17 nt, Human
gcugggcucccuuccca

SEQ ID NO: 1647709 - RNA, 20 nt, Human
gcugggcucccuucccaccu

SEQ ID NO: 1647710 - RNA, 14 nt, Human
gcuggagugcagug

SEQ ID NO: 1647711 - RNA, 15 nt, Human
gcuggagugcaguga

SEQ ID NO: 1647712 - RNA, 16 nt, Human
gcuggccuggccccuc

SEQ ID NO: 1647713 - RNA, 17 nt, Human
gcuggccuggccccuca

SEQ ID NO: 1647714 - RNA, 22 nt, Human
gcugggauuacaggcuccugcc

SEQ ID NO: 1647715 - RNA, 23 nt, Human
gcugggauuacaggcuccugcca

SEQ ID NO: 1647716 - RNA, 16 nt, Human
gcugggauuacaggug

SEQ ID NO: 1647717 - RNA, 18 nt, Human
gcuggccuggccccucag

SEQ ID NO: 1647718 - RNA, 19 nt, Human
gcuggccuggccccucagg

SEQ ID NO: 1647719 - RNA, 13 nt, Human
gcugggcagagga

SEQ ID NO: 1647720 - RNA, 14 nt, Human
gcugggcagaggaa

SEQ ID NO: 1647721 - RNA, 15 nt, Human
gcugggcagaggaaa

SEQ ID NO: 1647722 - RNA, 17 nt, Human
gcugggauuacaggugu

SEQ ID NO: 1647723 - RNA, 18 nt, Human
gcugggauuacaggugug

SEQ ID NO: 1647724 - RNA, 19 nt, Human
gcugggauuacagguguga

SEQ ID NO: 1647725 - RNA, 14 nt, Human
gcuggagcucugcc

SEQ ID NO: 1647726 - RNA, 12 nt, Human
gcuggagugcag

SEQ ID NO: 1647727 - RNA, 17 nt, Human
gcuggagcucugcccau

SEQ ID NO: 1647728 - RNA, 19 nt, Human
gcugccagccgagauagcc

SEQ ID NO: 1647729 - RNA, 21 nt, Human
gcugccagccgagauagccaa

SEQ ID NO: 1647730 - RNA, 21 nt, Human
gcugccauccagguucagcuu

SEQ ID NO: 1647731 - RNA, 23 nt, Human
gcugccaucucaccuccugcugg

SEQ ID NO: 1647732 - RNA, 22 nt, Human
gcugccaucucaccuccugcug

SEQ ID NO: 1647733 - RNA, 23 nt, Human
gcugccauccagguucagcuugu

SEQ ID NO: 1647734 - RNA, 18 nt, Human
gcugcaccggcuggccug

SEQ ID NO: 1647735 - RNA, 19 nt, Human
gcugcaccggcuggccugg

SEQ ID NO: 1647736 - RNA, 22 nt, Human
gcugcaccggcuggccuggccc

SEQ ID NO: 1647737 - RNA, 16 nt, Human
gcugcaccggcuggcc

SEQ ID NO: 1647738 - RNA, 17 nt, Human
gcugcaccggcuggccu

SEQ ID NO: 1647739 - RNA, 18 nt, Human
gcugagggugagugggug

SEQ ID NO: 1647740 - RNA, 13 nt, Human
gcugccugggauc

SEQ ID NO: 1647741 - RNA, 22 nt, Human
gcugccuccccuccucugcuug

SEQ ID NO: 1647742 - RNA, 21 nt, Human
gcugccuccccuccucugcuu

SEQ ID NO: 1647743 - RNA, 20 nt, Human
gcugccuccccuccucugcu

SEQ ID NO: 1647744 - RNA, 17 nt, Human
gcugccuccccuccucu

SEQ ID NO: 1647745 - RNA, 16 nt, Human
gcugccuccccuccuc

SEQ ID NO: 1647746 - RNA, 19 nt, Human
gcugccugggaucccucau

SEQ ID NO: 1647747 - RNA, 16 nt, Human
gcugccugggaucccu

SEQ ID NO: 1647748 - RNA, 18 nt, Human
gcugccugggaucccuca

SEQ ID NO: 1647749 - RNA, 22 nt, Human
gcuccugccaccacgcccggcu

SEQ ID NO: 1647750 - RNA, 18 nt, Human
gcuccccucggagaagag

SEQ ID NO: 1647751 - RNA, 15 nt, Human
gcuccccucggagaa

SEQ ID NO: 1647752 - RNA, 14 nt, Human
gcuccccagcccca

SEQ ID NO: 1647753 - RNA, 22 nt, Human
gcucccaggcauuccccaggag

SEQ ID NO: 1647754 - RNA, 23 nt, Human
gcucccaggcauuccccaggagg

SEQ ID NO: 1647755 - RNA, 20 nt, Human
gcucccaggcauuccccagg

SEQ ID NO: 1647756 - RNA, 21 nt, Human
gcucccaggcauuccccagga

SEQ ID NO: 1647757 - RNA, 20 nt, Human
gcucuacagcuaaucagcau

SEQ ID NO: 1647758 - RNA, 22 nt, Human
gcucuacagcuaaucagcauuc

SEQ ID NO: 1647759 - RNA, 13 nt, Human
gcucucaggccag

SEQ ID NO: 1647760 - RNA, 14 nt, Human
gcucucaggccagc

SEQ ID NO: 1647761 - RNA, 15 nt, Human
gcucucaggccagcu

SEQ ID NO: 1647762 - RNA, 16 nt, Human
gcucucaggccagcug

SEQ ID NO: 1647763 - RNA, 17 nt, Human
gcugacagacacaggcc

SEQ ID NO: 1647764 - RNA, 16 nt, Human
gcugacagacacaggc

SEQ ID NO: 1647765 - RNA, 14 nt, Human
gcugacagacacag

SEQ ID NO: 1647766 - RNA, 15 nt, Human
gcugacagacacagg

SEQ ID NO: 1647767 - RNA, 12 nt, Human
gcugaaggcucg

SEQ ID NO: 1647768 - RNA, 20 nt, Human
gcugaaggcucgagcaugcc

SEQ ID NO: 1647769 - RNA, 17 nt, Human
gcugaaugguuuucaaa

SEQ ID NO: 1647770 - RNA, 20 nt, Human
gcugaacacuccaauuaagg

SEQ ID NO: 1647771 - RNA, 21 nt, Human
gcugaacacuccaauuaagga

SEQ ID NO: 1647772 - RNA, 23 nt, Human
gcugaacacuccaauuaaggauu

SEQ ID NO: 1647773 - RNA, 15 nt, Human
gcucuuccaggcugg

SEQ ID NO: 1647774 - RNA, 16 nt, Human
gcucuuccaggcuggg

SEQ ID NO: 1647775 - RNA, 12 nt, Human
gcucuuccaggc

SEQ ID NO: 1647776 - RNA, 19 nt, Human
gcucugucgcccaggcugg

SEQ ID NO: 1647777 - RNA, 23 nt, Human
gcucugucgcccaggcuggagug

SEQ ID NO: 1647778 - RNA, 16 nt, Human
gcucuguccugggagu

SEQ ID NO: 1647779 - RNA, 15 nt, Human
gcucuguccugggag

SEQ ID NO: 1647780 - RNA, 20 nt, Human
gcucugagcaaauguggcuc

SEQ ID NO: 1647781 - RNA, 21 nt, Human
gcucugagcaaauguggcucc

SEQ ID NO: 1647782 - RNA, 23 nt, Human
gcucuggagcccacuguacuugc

SEQ ID NO: 1647783 - RNA, 14 nt, Human
gccuguucagcucc

SEQ ID NO: 1647784 - RNA, 20 nt, Human
gccuguucagcuccagcuca

SEQ ID NO: 1647785 - RNA, 14 nt, Human
gccugugucuuuaa

SEQ ID NO: 1647786 - RNA, 19 nt, Human
gccuguucagcuccagcuc

SEQ ID NO: 1647787 - RNA, 16 nt, Human
gcuauugucaccaggg

SEQ ID NO: 1647788 - RNA, 20 nt, Human
gcuauugucaccagggcugg

SEQ ID NO: 1647789 - RNA, 21 nt, Human
gcuauugucaccagggcugga

SEQ ID NO: 1647790 - RNA, 14 nt, Human
gcuaggccuggcca

SEQ ID NO: 1647791 - RNA, 15 nt, Human
gcuaggccuggccag

SEQ ID NO: 1647792 - RNA, 21 nt, Human
gcuaguaauuggaaaggcagc

SEQ ID NO: 1647793 - RNA, 16 nt, Human
gcuaguaucaaaagaa

SEQ ID NO: 1647794 - RNA, 19 nt, Human
gcuaggaacacuccuucac

SEQ ID NO: 1647795 - RNA, 21 nt, Human
gcuaggaacacuccuucacag

SEQ ID NO: 1647796 - RNA, 18 nt, Human
gcuaggaacacuccuuca

SEQ ID NO: 1647797 - RNA, 15 nt, Human
gcucaggagcccugg

SEQ ID NO: 1647798 - RNA, 18 nt, Human
gcucaggagcccugggag

SEQ ID NO: 1647799 - RNA, 21 nt, Human
gcucaggagcccugggaggcu

SEQ ID NO: 1647800 - RNA, 12 nt, Human
gcucagggccug

SEQ ID NO: 1647801 - RNA, 17 nt, Human
gcucagggccuggcuca

SEQ ID NO: 1647802 - RNA, 13 nt, Human
gcucagggccugg

SEQ ID NO: 1647803 - RNA, 16 nt, Human
gcucagggccuggcuc

SEQ ID NO: 1647804 - RNA, 14 nt, Human
gcucaggagcccug

SEQ ID NO: 1647805 - RNA, 22 nt, Human
gcucagagagggugggaguggg

SEQ ID NO: 1647806 - RNA, 18 nt, Human
gcucagagagggugggag

SEQ ID NO: 1647807 - RNA, 20 nt, Human
gcucagagagggugggagug

SEQ ID NO: 1647808 - RNA, 15 nt, Human
gcucagagagggugg

SEQ ID NO: 1647809 - RNA, 21 nt, Human
gcucagguggggucacucugg

SEQ ID NO: 1647810 - RNA, 22 nt, Human
gcucagguggggucacucuggc

SEQ ID NO: 1647811 - RNA, 13 nt, Human
cucugcagguccc

SEQ ID NO: 1647812 - RNA, 21 nt, Human
cucugcuccucuccccagcaa

SEQ ID NO: 1647813 - RNA, 17 nt, Human
cucugcacuccccugcu

SEQ ID NO: 1647814 - RNA, 18 nt, Human
cucugcacuccccugcug

SEQ ID NO: 1647815 - RNA, 21 nt, Human
cucugcugacagacacaggcc

SEQ ID NO: 1647816 - RNA, 22 nt, Human
cucugcugacagacacaggccc

SEQ ID NO: 1647817 - RNA, 23 nt, Human
cucugcugacagacacaggcccg

SEQ ID NO: 1647818 - RNA, 13 nt, Human
cucugcugcuggc

SEQ ID NO: 1647819 - RNA, 13 nt, Human
cucuguccuggga

SEQ ID NO: 1647820 - RNA, 16 nt, Human
cucuguacagagccca

SEQ ID NO: 1647821 - RNA, 16 nt, Human
cucugcugcuggcugg

SEQ ID NO: 1647822 - RNA, 14 nt, Human
cucugcugcuggcu

SEQ ID NO: 1647823 - RNA, 15 nt, Human
cucugcugcuggcug

SEQ ID NO: 1647824 - RNA, 14 nt, Human
cucuguacagagcc

SEQ ID NO: 1647825 - RNA, 15 nt, Human
cucuguacagagccc

SEQ ID NO: 1647826 - RNA, 13 nt, Human
cucuguacagagc

SEQ ID NO: 1647827 - RNA, 15 nt, Human
cucugcacuccccug

SEQ ID NO: 1647828 - RNA, 16 nt, Human
cucugcacuccccugc

SEQ ID NO: 1647829 - RNA, 20 nt, Human
cucugcacaagcugcacccu

SEQ ID NO: 1647830 - RNA, 21 nt, Human
cucugcacaagcugcacccuc

SEQ ID NO: 1647831 - RNA, 20 nt, Human
cuccuuucacaaccuucugu

SEQ ID NO: 1647832 - RNA, 17 nt, Human
cuccuuugugaggaagc

SEQ ID NO: 1647833 - RNA, 18 nt, Human
cuccuuugugaggaagcc

SEQ ID NO: 1647834 - RNA, 23 nt, Human
cuccuuugugaggaagccgcugg

SEQ ID NO: 1647835 - RNA, 17 nt, Human
cucgguguggagaagcg

SEQ ID NO: 1647836 - RNA, 23 nt, Human
cucgguguggagaagcggcuggc

SEQ ID NO: 1647837 - RNA, 16 nt, Human
cucgguguggagaagc

SEQ ID NO: 1647838 - RNA, 16 nt, Human
cucuccccaugauguu

SEQ ID NO: 1647839 - RNA, 15 nt, Human
cucuccccaugaugu

SEQ ID NO: 1647840 - RNA, 19 nt, Human
cucuauguucuaagaagug

SEQ ID NO: 1647841 - RNA, 13 nt, Human
cucuccuccagag

SEQ ID NO: 1647842 - RNA, 15 nt, Human
cucuccuccagaguc

SEQ ID NO: 1647843 - RNA, 14 nt, Human
cucucuggccuucg

SEQ ID NO: 1647844 - RNA, 16 nt, Human
cucucuggccuucggc

SEQ ID NO: 1647845 - RNA, 16 nt, Human
cucuccuccagaguca

SEQ ID NO: 1647846 - RNA, 13 nt, Human
cucucuggccuuc

SEQ ID NO: 1647847 - RNA, 14 nt, Human
cuccuuguguuacu

SEQ ID NO: 1647848 - RNA, 13 nt, Human
cuccuuucacaac

SEQ ID NO: 1647849 - RNA, 16 nt, Human
cuccuuucacaaccuu

SEQ ID NO: 1647850 - RNA, 17 nt, Human
cuccuuucacaaccuuc

SEQ ID NO: 1647851 - RNA, 15 nt, Human
cuccuuucaccacau

SEQ ID NO: 1647852 - RNA, 14 nt, Human
cuccuggggguucu

SEQ ID NO: 1647853 - RNA, 16 nt, Human
cuccuguaccucuuga

SEQ ID NO: 1647854 - RNA, 12 nt, Human
cuccucugucca

SEQ ID NO: 1647855 - RNA, 15 nt, Human
cuccucuguccaggc

SEQ ID NO: 1647856 - RNA, 15 nt, Human
cuccucugcugcugg

SEQ ID NO: 1647857 - RNA, 13 nt, Human
cuccucugcugcu

SEQ ID NO: 1647858 - RNA, 14 nt, Human
cuccucugcugcug

SEQ ID NO: 1647859 - RNA, 15 nt, Human
cuccucuugccacug

SEQ ID NO: 1647860 - RNA, 16 nt, Human
cuccucuugccacugc

SEQ ID NO: 1647861 - RNA, 12 nt, Human
cuccucuugcca

SEQ ID NO: 1647862 - RNA, 18 nt, Human
cuccucuugccacugccu

SEQ ID NO: 1647863 - RNA, 19 nt, Human
cuccuggcccacugcaucg

SEQ ID NO: 1647864 - RNA, 19 nt, Human
cuccuggccucaagugauu

SEQ ID NO: 1647865 - RNA, 18 nt, Human
cuccugggcuaagugauc

SEQ ID NO: 1647866 - RNA, 13 nt, Human
cuccuaccuggua

SEQ ID NO: 1647867 - RNA, 15 nt, Human
cucccacaggcccuu

SEQ ID NO: 1647868 - RNA, 14 nt, Human
cucccacaggcccu

SEQ ID NO: 1647869 - RNA, 16 nt, Human
cucccacaggcccuuc

SEQ ID NO: 1647870 - RNA, 20 nt, Human
cucccacaggcccuuccucu

SEQ ID NO: 1647871 - RNA, 21 nt, Human
cucccacaggcccuuccucuc

SEQ ID NO: 1647872 - RNA, 23 nt, Human
cuccaggugcacaagcuccaagc

SEQ ID NO: 1647873 - RNA, 23 nt, Human
cuccaggcuccuuuagcgcccag

SEQ ID NO: 1647874 - RNA, 20 nt, Human
cuccaggcuguaucccauga

SEQ ID NO: 1647875 - RNA, 22 nt, Human
cuccaggcuguaucccaugagc

SEQ ID NO: 1647876 - RNA, 20 nt, Human
cucccugaaguaagcaaaga

SEQ ID NO: 1647877 - RNA, 20 nt, Human
cucccucuuucccucccuuc

SEQ ID NO: 1647878 - RNA, 15 nt, Human
cucccaggcauuccc

SEQ ID NO: 1647879 - RNA, 19 nt, Human
cucccuccaccucccugca

SEQ ID NO: 1647880 - RNA, 22 nt, Human
cucccuccaccucccugcaaua

SEQ ID NO: 1647881 - RNA, 21 nt, Human
cucccuccaccucccugcaau

SEQ ID NO: 1647882 - RNA, 20 nt, Human
cucccuccaccucccugcaa

SEQ ID NO: 1647883 - RNA, 21 nt, Human
cucaggccaaacucaccugcc

SEQ ID NO: 1647884 - RNA, 19 nt, Human
cucaggccaaacucaccug

SEQ ID NO: 1647885 - RNA, 20 nt, Human
cucaggccaaacucaccugc

SEQ ID NO: 1647886 - RNA, 22 nt, Human
cucaggccugggggcugggcag

SEQ ID NO: 1647887 - RNA, 11 nt, Human
cucaggccugg

SEQ ID NO: 1647888 - RNA, 16 nt, Human
cucaggccagcugcuu

SEQ ID NO: 1647889 - RNA, 17 nt, Human
cucaggccagcugcuug

SEQ ID NO: 1647890 - RNA, 18 nt, Human
cucaggccagcugcuugg

SEQ ID NO: 1647891 - RNA, 20 nt, Human
cucaggccagcugcuugggc

SEQ ID NO: 1647892 - RNA, 13 nt, Human
cucaggccugggg

SEQ ID NO: 1647893 - RNA, 19 nt, Human
cucagccucccgaauagcu

SEQ ID NO: 1647894 - RNA, 21 nt, Human
cucagccucccgaauagcugg

SEQ ID NO: 1647895 - RNA, 22 nt, Human
cucagccucccgaauagcuggg

SEQ ID NO: 1647896 - RNA, 23 nt, Human
cucagaagacacugaugggcaac

SEQ ID NO: 1647897 - RNA, 19 nt, Human
cucagaaggcaaaugacuu

SEQ ID NO: 1647898 - RNA, 17 nt, Human
cucaccuuucccaucuu

SEQ ID NO: 1647899 - RNA, 13 nt, Human
cucagaagacacu

SEQ ID NO: 1647900 - RNA, 15 nt, Human
cucagaagacacuga

SEQ ID NO: 1647901 - RNA, 17 nt, Human
cucagaagacacugaug

SEQ ID NO: 1647902 - RNA, 20 nt, Human
cucagaagacacugaugggc

SEQ ID NO: 1647903 - RNA, 22 nt, Human
cucagaagacacugaugggcaa

SEQ ID NO: 1647904 - RNA, 22 nt, Human
cucagguugucugaagucacug

SEQ ID NO: 1647905 - RNA, 23 nt, Human
cucaggugucccugcacuugcag

SEQ ID NO: 1647906 - RNA, 22 nt, Human
cucagucuggcccuuccuuuuc

SEQ ID NO: 1647907 - RNA, 14 nt, Human
cucagguugucuga

SEQ ID NO: 1647908 - RNA, 15 nt, Human
cucaguccauagcag

SEQ ID NO: 1647909 - RNA, 17 nt, Human
cucaguccauagcagag

SEQ ID NO: 1647910 - RNA, 16 nt, Human
cucaguccaugaagau

SEQ ID NO: 1647911 - RNA, 23 nt, Human
cucaauuauuuugcauuuuuucu

SEQ ID NO: 1647912 - RNA, 17 nt, Human
cuauccuacuuccccuu

SEQ ID NO: 1647913 - RNA, 18 nt, Human
cuaucaugucaaacguga

SEQ ID NO: 1647914 - RNA, 14 nt, Human
cuaugugagaccau

SEQ ID NO: 1647915 - RNA, 13 nt, Human
cuaucucccccag

SEQ ID NO: 1647916 - RNA, 14 nt, Human
cuaucucccccagc

SEQ ID NO: 1647917 - RNA, 18 nt, Human
cuaucucauuuccaagca

SEQ ID NO: 1647918 - RNA, 18 nt, Human
cuauguugcccaggcagg

SEQ ID NO: 1647919 - RNA, 19 nt, Human
cuauguugcccaggcaggu

SEQ ID NO: 1647920 - RNA, 21 nt, Human
cuauguugcccaggcaggucu

SEQ ID NO: 1647921 - RNA, 22 nt, Human
cuauguugcccaggcaggucuu

SEQ ID NO: 1647922 - RNA, 17 nt, Human
cuaugugagcacaaagg

SEQ ID NO: 1647923 - RNA, 14 nt, Human
cuauguugcccagg

SEQ ID NO: 1647924 - RNA, 18 nt, Human
cuauguucuaagaaguga

SEQ ID NO: 1647925 - RNA, 21 nt, Human
ccuguucacucuacuuagcau

SEQ ID NO: 1647926 - RNA, 13 nt, Human
ccuguucagcucc

SEQ ID NO: 1647927 - RNA, 15 nt, Human
ccuucccaugcccug

SEQ ID NO: 1647928 - RNA, 12 nt, Human
ccuucccaccuc

SEQ ID NO: 1647929 - RNA, 14 nt, Human
ccuucccaccucuc

SEQ ID NO: 1647930 - RNA, 19 nt, Human
ccuucccaccucucucacu

SEQ ID NO: 1647931 - RNA, 22 nt, Human
ccuuauggaacacucugagacu

SEQ ID NO: 1647932 - RNA, 19 nt, Human
ccuuauggaacacucugag

SEQ ID NO: 1647933 - RNA, 20 nt, Human
ccuuauggaacacucugaga

SEQ ID NO: 1647934 - RNA, 14 nt, Human
ccuuauggaacacu

SEQ ID NO: 1647935 - RNA, 16 nt, Human
ccuuauggaacacucu

SEQ ID NO: 1647936 - RNA, 17 nt, Human
ccuuauggaacacucug

SEQ ID NO: 1647937 - RNA, 18 nt, Human
ccuuauggaacacucuga

SEQ ID NO: 1647938 - RNA, 13 nt, Human
ccuuaucaaagga

SEQ ID NO: 1647939 - RNA, 20 nt, Human
ccuuaggugauccacucgcc

SEQ ID NO: 1647940 - RNA, 14 nt, Human
ccuuaucaaaggac

SEQ ID NO: 1647941 - RNA, 18 nt, Human
ccuuaucaaaggacacca

SEQ ID NO: 1647942 - RNA, 12 nt, Human
ccuuauggaaca

SEQ ID NO: 1647943 - RNA, 16 nt, Human
ccuuagcaaauucugu

SEQ ID NO: 1647944 - RNA, 19 nt, Human
ccuuagcagggaaacagcu

SEQ ID NO: 1647945 - RNA, 20 nt, Human
ccuuagcagggaaacagcua

SEQ ID NO: 1647946 - RNA, 16 nt, Human
ccuguugggccaggag

SEQ ID NO: 1647947 - RNA, 17 nt, Human
ccuguugggccaggagc

SEQ ID NO: 1647948 - RNA, 18 nt, Human
ccuguugggccaggagcc

SEQ ID NO: 1647949 - RNA, 19 nt, Human
ccuguugggccaggagccu

SEQ ID NO: 1647950 - RNA, 20 nt, Human
ccuguugggccaggagccuc

SEQ ID NO: 1647951 - RNA, 12 nt, Human
ccuguucccauu

SEQ ID NO: 1647952 - RNA, 18 nt, Human
ccuguucccaugagauga

SEQ ID NO: 1647953 - RNA, 16 nt, Human
ccuguucugcuuuccu

SEQ ID NO: 1647954 - RNA, 12 nt, Human
ccuguucuggca

SEQ ID NO: 1647955 - RNA, 17 nt, Human
ccuguucuggcagaguu

SEQ ID NO: 1647956 - RNA, 23 nt, Human
ccuguucagcuccagcucaccag

SEQ ID NO: 1647957 - RNA, 20 nt, Human
ccuguucagcuccagcucac

SEQ ID NO: 1647958 - RNA, 21 nt, Human
ccuguucagcuccagcucacc

SEQ ID NO: 1647959 - RNA, 14 nt, Human
ccuguucagcucca

SEQ ID NO: 1647960 - RNA, 15 nt, Human
ccuguucagcuccag

SEQ ID NO: 1647961 - RNA, 16 nt, Human
ccuguucagcuccagc

SEQ ID NO: 1647962 - RNA, 19 nt, Human
ccuguucagcuccagcuca

SEQ ID NO: 1647963 - RNA, 14 nt, Human
ccuugcauaauggu

SEQ ID NO: 1647964 - RNA, 18 nt, Human
ccuuucaauaggaaaaac

SEQ ID NO: 1647965 - RNA, 17 nt, Human
ccuuucaauaggaaaaa

SEQ ID NO: 1647966 - RNA, 14 nt, Human
ccuuuauucuggca

SEQ ID NO: 1647967 - RNA, 15 nt, Human
ccuuucaauaggaaa

SEQ ID NO: 1647968 - RNA, 21 nt, Human
ccuuccuaauuccacagcugc

SEQ ID NO: 1647969 - RNA, 14 nt, Human
ccuuccucuccacu

SEQ ID NO: 1647970 - RNA, 15 nt, Human
ccuuccucuccacug

SEQ ID NO: 1647971 - RNA, 16 nt, Human
ccuuccucuccacugc

SEQ ID NO: 1647972 - RNA, 17 nt, Human
ccuuccucuccacugcc

SEQ ID NO: 1647973 - RNA, 20 nt, Human
ccuucucuccagccccugga

SEQ ID NO: 1647974 - RNA, 20 nt, Human
ccuuccucuccacugccuuc

SEQ ID NO: 1647975 - RNA, 21 nt, Human
ccuucucuccagccccuggau

SEQ ID NO: 1647976 - RNA, 23 nt, Human
ccuucucuccagccccuggaugc

SEQ ID NO: 1647977 - RNA, 14 nt, Human
ccuucucugaagga

SEQ ID NO: 1647978 - RNA, 16 nt, Human
ccuucucugaaggaca

SEQ ID NO: 1647979 - RNA, 19 nt, Human
ccuuccuaauuccacagcu

SEQ ID NO: 1647980 - RNA, 20 nt, Human
ccuuccuaauuccacagcug

SEQ ID NO: 1647981 - RNA, 18 nt, Human
ccuuccuaauuccacagc

SEQ ID NO: 1647982 - RNA, 19 nt, Human
ccuucccccuccaauccca

SEQ ID NO: 1647983 - RNA, 22 nt, Human
ccuucuguccuacucuguguca

SEQ ID NO: 1647984 - RNA, 20 nt, Human
ccuucuguccuacucugugu

SEQ ID NO: 1647985 - RNA, 21 nt, Human
ccuucuguccuacucuguguc

SEQ ID NO: 1647986 - RNA, 17 nt, Human
ccuucucuucacaguca

SEQ ID NO: 1647987 - RNA, 21 nt, Human
cguucauggaacgcguugaaa

SEQ ID NO: 1647988 - RNA, 11 nt, Human
cuaaagcugcc

SEQ ID NO: 1647989 - RNA, 16 nt, Human
cgugaggccagagaca

SEQ ID NO: 1647990 - RNA, 19 nt, Human
cgugaguccuggcauggga

SEQ ID NO: 1647991 - RNA, 18 nt, Human
cgugaguccuggcauggg

SEQ ID NO: 1647992 - RNA, 15 nt, Human
cguguuaugacucca

SEQ ID NO: 1647993 - RNA, 19 nt, Human
cguguuaugacuccagaau

SEQ ID NO: 1647994 - RNA, 23 nt, Human
cuaaaguaaaaacaaagaaauua

SEQ ID NO: 1647995 - RNA, 19 nt, Human
cuaaaguguauuuuuuuac

SEQ ID NO: 1647996 - RNA, 14 nt, Human
cuaacuugucuuug

SEQ ID NO: 1647997 - RNA, 22 nt, Human
cuaacuugucuuuggacccuga

SEQ ID NO: 1647998 - RNA, 16 nt, Human
cuaacuuuccuucauu

SEQ ID NO: 1647999 - RNA, 22 nt, Human
cgugagccacugcaccgggcca

SEQ ID NO: 1648000 - RNA, 14 nt, Human
cgugaggccagaga

SEQ ID NO: 1648001 - RNA, 14 nt, Human
cgugagccacugca

SEQ ID NO: 1648002 - RNA, 15 nt, Human
cgugagccacugcac

SEQ ID NO: 1648003 - RNA, 20 nt, Human
cgugagccacugcaccgggc

SEQ ID NO: 1648004 - RNA, 14 nt, Human
cgugacaacacuug

SEQ ID NO: 1648005 - RNA, 15 nt, Human
cgugacaacacuugu

SEQ ID NO: 1648006 - RNA, 14 nt, Human
cuaaguuuuuaugg

SEQ ID NO: 1648007 - RNA, 20 nt, Human
cuaauaaaauuuaaaagucu

SEQ ID NO: 1648008 - RNA, 19 nt, Human
cuacaaaaagcauaaaaau

SEQ ID NO: 1648009 - RNA, 20 nt, Human
cuacaaaaacacagcaaggg

SEQ ID NO: 1648010 - RNA, 20 nt, Human
cgguggcucacgccuguaau

SEQ ID NO: 1648011 - RNA, 22 nt, Human
cguacacauuuuauuuuauuau

SEQ ID NO: 1648012 - RNA, 16 nt, Human
cgggccuggagaacua

SEQ ID NO: 1648013 - RNA, 20 nt, Human
cgggccuggagaacuagaga

SEQ ID NO: 1648014 - RNA, 19 nt, Human
cgggcucagcaaaagaugc

SEQ ID NO: 1648015 - RNA, 16 nt, Human
cgggcugggagcucug

SEQ ID NO: 1648016 - RNA, 20 nt, Human
cgggcugggagcucugcaga

SEQ ID NO: 1648017 - RNA, 12 nt, Human
cgggcucugccu

SEQ ID NO: 1648018 - RNA, 13 nt, Human
cgggcucugccuc

SEQ ID NO: 1648019 - RNA, 18 nt, Human
cgggccagugcuccagcc

SEQ ID NO: 1648020 - RNA, 14 nt, Human
cgggccagugcucc

SEQ ID NO: 1648021 - RNA, 14 nt, Human
cggcucacugcagc

SEQ ID NO: 1648022 - RNA, 20 nt, Human
cggagacggagucccaccuu

SEQ ID NO: 1648023 - RNA, 17 nt, Human
cggagacggagucccac

SEQ ID NO: 1648024 - RNA, 21 nt, Human
cggagucccaccuuggcugca

SEQ ID NO: 1648025 - RNA, 22 nt, Human
cggagucccaccuuggcugcag

SEQ ID NO: 1648026 - RNA, 15 nt, Human
cggaggggccuggca

SEQ ID NO: 1648027 - RNA, 23 nt, Human
cggagucccaccuuggcugcagg

SEQ ID NO: 1648028 - RNA, 18 nt, Human
cggcuaauuuuuguauuu

SEQ ID NO: 1648029 - RNA, 20 nt, Human
cgcucugucgcccaggcugg

SEQ ID NO: 1648030 - RNA, 21 nt, Human
cgcucuuggcagguacucagc

SEQ ID NO: 1648031 - RNA, 19 nt, Human
cgcugauaagcguucaugg

SEQ ID NO: 1648032 - RNA, 19 nt, Human
cgcugccccuggcagcccc

SEQ ID NO: 1648033 - RNA, 20 nt, Human
cgcugccccuggcagccccu

SEQ ID NO: 1648034 - RNA, 17 nt, Human
cgcuggagugcagugag

SEQ ID NO: 1648035 - RNA, 18 nt, Human
cgcuggagugcagugagc

SEQ ID NO: 1648036 - RNA, 17 nt, Human
cgagucucuucuccacu

SEQ ID NO: 1648037 - RNA, 18 nt, Human
cgagucucuucuccacug

SEQ ID NO: 1648038 - RNA, 20 nt, Human
cgagucucuucuccacugga

SEQ ID NO: 1648039 - RNA, 21 nt, Human
cgagucucuucuccacuggau

SEQ ID NO: 1648040 - RNA, 22 nt, Human
cgcaggcuggcccugcccuggu

SEQ ID NO: 1648041 - RNA, 20 nt, Human
ccuuuucgcaggauucuucc

SEQ ID NO: 1648042 - RNA, 12 nt, Human
ccuuuucccaac

SEQ ID NO: 1648043 - RNA, 23 nt, Human
ccgaaggugaggagcuugaaacc

SEQ ID NO: 1648044 - RNA, 16 nt, Human
ccgaauagcugggacu

SEQ ID NO: 1648045 - RNA, 17 nt, Human
ccgaauagcugggacua

SEQ ID NO: 1648046 - RNA, 15 nt, Human
ccgaccaccugccca

SEQ ID NO: 1648047 - RNA, 18 nt, Human
ccgaccagacaccuugac

SEQ ID NO: 1648048 - RNA, 13 nt, Human
ccgaccagacacc

SEQ ID NO: 1648049 - RNA, 17 nt, Human
ccgaccagacaccuuga

SEQ ID NO: 1648050 - RNA, 19 nt, Human
ccgaaagggacuuggaagc

SEQ ID NO: 1648051 - RNA, 16 nt, Human
ccgaaaacguggcugc

SEQ ID NO: 1648052 - RNA, 17 nt, Human
ccgaaaacguggcugcu

SEQ ID NO: 1648053 - RNA, 15 nt, Human
cccuuccucuuucca

SEQ ID NO: 1648054 - RNA, 12 nt, Human
ccgcccaggcuu

SEQ ID NO: 1648055 - RNA, 16 nt, Human
ccgcagacaggaccag

SEQ ID NO: 1648056 - RNA, 17 nt, Human
ccgcagacaggaccagg

SEQ ID NO: 1648057 - RNA, 13 nt, Human
cccugucuaauga

SEQ ID NO: 1648058 - RNA, 23 nt, Human
cccugugauggggcccugccucc

SEQ ID NO: 1648059 - RNA, 21 nt, Human
cccugugauggggcccugccu

SEQ ID NO: 1648060 - RNA, 22 nt, Human
cccugugauggggcccugccuc

SEQ ID NO: 1648061 - RNA, 16 nt, Human
ccggccaccugcggug

SEQ ID NO: 1648062 - RNA, 15 nt, Human
ccggccccugcuggu

SEQ ID NO: 1648063 - RNA, 21 nt, Human
ccuagcauacguacacauuuu

SEQ ID NO: 1648064 - RNA, 20 nt, Human
ccuagccugugccucuggga

SEQ ID NO: 1648065 - RNA, 20 nt, Human
ccuaaugcgcaggcuggccc

SEQ ID NO: 1648066 - RNA, 19 nt, Human
ccuagcauacguacacauu

SEQ ID NO: 1648067 - RNA, 16 nt, Human
ccuaaggacuucuuua

SEQ ID NO: 1648068 - RNA, 17 nt, Human
ccuaaggacuucuuuaa

SEQ ID NO: 1648069 - RNA, 18 nt, Human
ccuaaggacuucuuuaau

SEQ ID NO: 1648070 - RNA, 23 nt, Human
ccuaaggacuucuuuaauuuugg

SEQ ID NO: 1648071 - RNA, 11 nt, Human
ccuaaggacuu

SEQ ID NO: 1648072 - RNA, 12 nt, Human
ccuaaggacuuc

SEQ ID NO: 1648073 - RNA, 14 nt, Human
ccuaaucuucugaa

SEQ ID NO: 1648074 - RNA, 15 nt, Human
ccggcuccaggcucc

SEQ ID NO: 1648075 - RNA, 14 nt, Human
ccgucuaccugagg

SEQ ID NO: 1648076 - RNA, 15 nt, Human
ccgucuaccugaggg

SEQ ID NO: 1648077 - RNA, 13 nt, Human
ccggcuccaggcu

SEQ ID NO: 1648078 - RNA, 14 nt, Human
ccggcuccaggcuc

SEQ ID NO: 1648079 - RNA, 17 nt, Human
ccgucuaccugaggggc

SEQ ID NO: 1648080 - RNA, 12 nt, Human
ccgugaggccag

SEQ ID NO: 1648081 - RNA, 13 nt, Human
ccgugaggccaga

SEQ ID NO: 1648082 - RNA, 14 nt, Human
ccgugaggccagag

SEQ ID NO: 1648083 - RNA, 16 nt, Human
ccgugaggccagagac

SEQ ID NO: 1648084 - RNA, 20 nt, Human
ccuaacgaaguauccuucag

SEQ ID NO: 1648085 - RNA, 12 nt, Human
cccugaaggccc

SEQ ID NO: 1648086 - RNA, 13 nt, Human
cccugaaggcccc

SEQ ID NO: 1648087 - RNA, 14 nt, Human
cccugaaggccccg

SEQ ID NO: 1648088 - RNA, 16 nt, Human
cccugaaggccccgcc

SEQ ID NO: 1648089 - RNA, 19 nt, Human
cccugaaggccccgcccag

SEQ ID NO: 1648090 - RNA, 14 nt, Human
cccugacaacacuc

SEQ ID NO: 1648091 - RNA, 20 nt, Human
cccugaaggccccgcccagg

SEQ ID NO: 1648092 - RNA, 22 nt, Human
cccugaaggccccgcccaggcu

SEQ ID NO: 1648093 - RNA, 16 nt, Human
cccugacaacacucau

SEQ ID NO: 1648094 - RNA, 22 nt, Human
cccugacaacacucauugaccu

SEQ ID NO: 1648095 - RNA, 20 nt, Human
cccugaauuuaaauagcuuu

SEQ ID NO: 1648096 - RNA, 11 nt, Human
cccuccuccug

SEQ ID NO: 1648097 - RNA, 16 nt, Human
cccuccuccuggacuc

SEQ ID NO: 1648098 - RNA, 18 nt, Human
cccuccuccuggacuccu

SEQ ID NO: 1648099 - RNA, 14 nt, Human
cccuccucucugcc

SEQ ID NO: 1648100 - RNA, 18 nt, Human
cccugaaagcccugagcu

SEQ ID NO: 1648101 - RNA, 13 nt, Human
cccucggagaaga

SEQ ID NO: 1648102 - RNA, 20 nt, Human
cccuggcucccacaggcccu

SEQ ID NO: 1648103 - RNA, 11 nt, Human
cccugcccugg

SEQ ID NO: 1648104 - RNA, 12 nt, Human
cccugcccuggu

SEQ ID NO: 1648105 - RNA, 22 nt, Human
cccugcccugguuuccugcccu

SEQ ID NO: 1648106 - RNA, 23 nt, Human
cccugcccugguuuccugcccug

SEQ ID NO: 1648107 - RNA, 11 nt, Human
cccugcccugu

SEQ ID NO: 1648108 - RNA, 13 nt, Human
cccuggaugcagc

SEQ ID NO: 1648109 - RNA, 17 nt, Human
cccuggaugcagccuca

SEQ ID NO: 1648110 - RNA, 21 nt, Human
cccuggaugcagccucacagu

SEQ ID NO: 1648111 - RNA, 19 nt, Human
cccuggauccaucaggcca

SEQ ID NO: 1648112 - RNA, 22 nt, Human
cccugcccaccuggccucugca

SEQ ID NO: 1648113 - RNA, 20 nt, Human
cccugccccccagcccuccu

SEQ ID NO: 1648114 - RNA, 15 nt, Human
cccugccccccagcc

SEQ ID NO: 1648115 - RNA, 14 nt, Human
cccugccccccagc

SEQ ID NO: 1648116 - RNA, 18 nt, Human
cccugccccucccuucaa

SEQ ID NO: 1648117 - RNA, 19 nt, Human
cccugccccucccuucaac

SEQ ID NO: 1648118 - RNA, 23 nt, Human
cccugccccucccuucaaccauu

SEQ ID NO: 1648119 - RNA, 17 nt, Human
cccugccccucccuuca

SEQ ID NO: 1648120 - RNA, 14 nt, Human
cccugcccggcugc

SEQ ID NO: 1648121 - RNA, 17 nt, Human
cccugcccggcugcgga

SEQ ID NO: 1648122 - RNA, 20 nt, Human
cccugcccaccuggccucug

SEQ ID NO: 1648123 - RNA, 16 nt, Human
cccugagcuuucugcu

SEQ ID NO: 1648124 - RNA, 14 nt, Human
cccugagcaggauu

SEQ ID NO: 1648125 - RNA, 20 nt, Human
ccugccucucugcagguccc

SEQ ID NO: 1648126 - RNA, 21 nt, Human
ccugccucucugcaggucccu

SEQ ID NO: 1648127 - RNA, 15 nt, Human
ccugccucuucucua

SEQ ID NO: 1648128 - RNA, 22 nt, Human
ccugcugcaguugccagucacc

SEQ ID NO: 1648129 - RNA, 11 nt, Human
ccugcugcagu

SEQ ID NO: 1648130 - RNA, 12 nt, Human
ccugcugcaguu

SEQ ID NO: 1648131 - RNA, 16 nt, Human
ccugcugcaguugcca

SEQ ID NO: 1648132 - RNA, 17 nt, Human
ccugccucucugcaggu

SEQ ID NO: 1648133 - RNA, 23 nt, Human
ccugccuccuuugugaggaagcc

SEQ ID NO: 1648134 - RNA, 21 nt, Human
ccugccuccuuugugaggaag

SEQ ID NO: 1648135 - RNA, 22 nt, Human
ccugccuccuuugugaggaagc

SEQ ID NO: 1648136 - RNA, 13 nt, Human
ccugccuccuuug

SEQ ID NO: 1648137 - RNA, 15 nt, Human
ccugccuccuuugug

SEQ ID NO: 1648138 - RNA, 19 nt, Human
ccugccuccuuugugagga

SEQ ID NO: 1648139 - RNA, 20 nt, Human
ccugccuccuuugugaggaa

SEQ ID NO: 1648140 - RNA, 16 nt, Human
ccucuuugagugaagc

SEQ ID NO: 1648141 - RNA, 19 nt, Human
ccucuuuggucuacacugu

SEQ ID NO: 1648142 - RNA, 19 nt, Human
ccucugccugucuccccca

SEQ ID NO: 1648143 - RNA, 15 nt, Human
ccucugccugucucc

SEQ ID NO: 1648144 - RNA, 21 nt, Human
ccucugccugaagucacacag

SEQ ID NO: 1648145 - RNA, 12 nt, Human
ccugcagagggc

SEQ ID NO: 1648146 - RNA, 16 nt, Human
ccugcaggcagccagg

SEQ ID NO: 1648147 - RNA, 17 nt, Human
ccugcaggcagccaggc

SEQ ID NO: 1648148 - RNA, 14 nt, Human
ccugcagagggcac

SEQ ID NO: 1648149 - RNA, 23 nt, Human
ccugcaggcagccaggccacaag

SEQ ID NO: 1648150 - RNA, 18 nt, Human
ccugcaggcagccaggcc

SEQ ID NO: 1648151 - RNA, 19 nt, Human
ccugcaggcagccaggcca

SEQ ID NO: 1648152 - RNA, 20 nt, Human
ccugcaggcagccaggccac

SEQ ID NO: 1648153 - RNA, 21 nt, Human
ccugcaggcagccaggccaca

SEQ ID NO: 1648154 - RNA, 17 nt, Human
ccugaggcugggcuccc

SEQ ID NO: 1648155 - RNA, 19 nt, Human
ccugaggcugggcucccuu

SEQ ID NO: 1648156 - RNA, 21 nt, Human
ccugaggcugggcucccuucc

SEQ ID NO: 1648157 - RNA, 12 nt, Human
ccugaggggccu

SEQ ID NO: 1648158 - RNA, 16 nt, Human
ccugaggggccucuua

SEQ ID NO: 1648159 - RNA, 11 nt, Human
ccucaggcagg

SEQ ID NO: 1648160 - RNA, 17 nt, Human
ccucccaacucacccca

SEQ ID NO: 1648161 - RNA, 20 nt, Human
ccucccaacucaccccagcc

SEQ ID NO: 1648162 - RNA, 21 nt, Human
ccucccaacucaccccagccc

SEQ ID NO: 1648163 - RNA, 23 nt, Human
ccucccaacucaccccagcccca

SEQ ID NO: 1648164 - RNA, 18 nt, Human
ccucagccuccugaguag

SEQ ID NO: 1648165 - RNA, 18 nt, Human
ccuccuuugugaggaagc

SEQ ID NO: 1648166 - RNA, 19 nt, Human
ccuccuuugugaggaagcc

SEQ ID NO: 1648167 - RNA, 20 nt, Human
ccuccuuugugaggaagccg

SEQ ID NO: 1648168 - RNA, 16 nt, Human
ccucgaacuggcugca

SEQ ID NO: 1648169 - RNA, 15 nt, Human
ccucgaacuggcugc

SEQ ID NO: 1648170 - RNA, 13 nt, Human
ccuccgccucccg

SEQ ID NO: 1648171 - RNA, 16 nt, Human
ccuccgccucccgggu

SEQ ID NO: 1648172 - RNA, 13 nt, Human
ccuccgccucuug

SEQ ID NO: 1648173 - RNA, 16 nt, Human
ccucucugcagguccc

SEQ ID NO: 1648174 - RNA, 17 nt, Human
ccucucugcaggucccu

SEQ ID NO: 1648175 - RNA, 18 nt, Human
ccucucugcaggucccua

SEQ ID NO: 1648176 - RNA, 19 nt, Human
ccucucugcaggucccuaa

SEQ ID NO: 1648177 - RNA, 20 nt, Human
ccucucugcaggucccuaau

SEQ ID NO: 1648178 - RNA, 12 nt, Human
ccucucucacuc

SEQ ID NO: 1648179 - RNA, 11 nt, Human
ccucugcccug

SEQ ID NO: 1648180 - RNA, 12 nt, Human
ccucugcccugc

SEQ ID NO: 1648181 - RNA, 13 nt, Human
ccucugcccugcg

SEQ ID NO: 1648182 - RNA, 14 nt, Human
ccucugcccugcgg

SEQ ID NO: 1648183 - RNA, 20 nt, Human
ccucugccucugacacacag

SEQ ID NO: 1648184 - RNA, 21 nt, Human
ccucugccucugacacacagc

SEQ ID NO: 1648185 - RNA, 23 nt, Human
ccucugccucugacacacagcuc

SEQ ID NO: 1648186 - RNA, 11 nt, Human
ccucugccuga

SEQ ID NO: 1648187 - RNA, 20 nt, Human
ccucugccugaagucacaca

SEQ ID NO: 1648188 - RNA, 20 nt, Human
ccucuccugggcagcugccu

SEQ ID NO: 1648189 - RNA, 19 nt, Human
ccucuccugggcagcugcc

SEQ ID NO: 1648190 - RNA, 18 nt, Human
ccucuccugggcagcugc

SEQ ID NO: 1648191 - RNA, 17 nt, Human
ccucuccugggcagcug

SEQ ID NO: 1648192 - RNA, 16 nt, Human
ccucuccugggcagcu

SEQ ID NO: 1648193 - RNA, 15 nt, Human
ccucuccugggcagc

SEQ ID NO: 1648194 - RNA, 22 nt, Human
ccucuccugggcagcugccucc

SEQ ID NO: 1648195 - RNA, 21 nt, Human
ccucuccugggcagcugccuc

SEQ ID NO: 1648196 - RNA, 18 nt, Human
cccacuguacuugcucuu

SEQ ID NO: 1648197 - RNA, 19 nt, Human
cccacuguacuugcucuug

SEQ ID NO: 1648198 - RNA, 23 nt, Human
cccacuguacuugcucuugaugc

SEQ ID NO: 1648199 - RNA, 15 nt, Human
cccaccgcagacagg

SEQ ID NO: 1648200 - RNA, 18 nt, Human
cccaccgcagacaggacc

SEQ ID NO: 1648201 - RNA, 16 nt, Human
cccaagccuggcaagg

SEQ ID NO: 1648202 - RNA, 23 nt, Human
cccaagccuacuuuugccauuga

SEQ ID NO: 1648203 - RNA, 20 nt, Human
cccaagaauagaugcugacu

SEQ ID NO: 1648204 - RNA, 21 nt, Human
cccaagaauagaugcugacug

SEQ ID NO: 1648205 - RNA, 17 nt, Human
cccaagcucugcuccuc

SEQ ID NO: 1648206 - RNA, 18 nt, Human
cccacccaagggccuggc

SEQ ID NO: 1648207 - RNA, 15 nt, Human
cccacccaagggccu

SEQ ID NO: 1648208 - RNA, 22 nt, Human
ccauuguggucacaggaaguag

SEQ ID NO: 1648209 - RNA, 23 nt, Human
cccaaccugcucuccucuugcca

SEQ ID NO: 1648210 - RNA, 21 nt, Human
cccaaccugcucuccucuugc

SEQ ID NO: 1648211 - RNA, 13 nt, Human
cccaaccugcucu

SEQ ID NO: 1648212 - RNA, 14 nt, Human
cccaaccugcucuc

SEQ ID NO: 1648213 - RNA, 13 nt, Human
ccauuuaaagcuu

SEQ ID NO: 1648214 - RNA, 14 nt, Human
ccaugucucgacuc

SEQ ID NO: 1648215 - RNA, 15 nt, Human
ccaugucucgacuca

SEQ ID NO: 1648216 - RNA, 20 nt, Human
ccaugucucugagcauuaga

SEQ ID NO: 1648217 - RNA, 13 nt, Human
ccaugagccucag

SEQ ID NO: 1648218 - RNA, 16 nt, Human
ccaugaggaacaaggc

SEQ ID NO: 1648219 - RNA, 17 nt, Human
ccaugaggaacaaggca

SEQ ID NO: 1648220 - RNA, 18 nt, Human
ccaugaggaacaaggcaa

SEQ ID NO: 1648221 - RNA, 19 nt, Human
ccaugggauaaaugccauc

SEQ ID NO: 1648222 - RNA, 18 nt, Human
ccaugggcacugugggua

SEQ ID NO: 1648223 - RNA, 22 nt, Human
cccagcuggggccaggcugggu

SEQ ID NO: 1648224 - RNA, 23 nt, Human
cccagcuggggccaggcuggguc

SEQ ID NO: 1648225 - RNA, 18 nt, Human
cccaggcuggcgugcagu

SEQ ID NO: 1648226 - RNA, 21 nt, Human
cccaggcuggcgugcaguggu

SEQ ID NO: 1648227 - RNA, 19 nt, Human
cccaggcuggcgugcagug

SEQ ID NO: 1648228 - RNA, 20 nt, Human
cccaggcuggcgugcagugg

SEQ ID NO: 1648229 - RNA, 14 nt, Human
cccauccucuguac

SEQ ID NO: 1648230 - RNA, 20 nt, Human
cccauccucuguacagagcc

SEQ ID NO: 1648231 - RNA, 15 nt, Human
cccauccucuguaca

SEQ ID NO: 1648232 - RNA, 19 nt, Human
cccauccucuguacagagc

SEQ ID NO: 1648233 - RNA, 19 nt, Human
cccagcccacuucugccau

SEQ ID NO: 1648234 - RNA, 21 nt, Human
cccagccccaaaacucuccuc

SEQ ID NO: 1648235 - RNA, 23 nt, Human
cccagccccaaaacucuccucug

SEQ ID NO: 1648236 - RNA, 12 nt, Human
ccccagccccaa

SEQ ID NO: 1648237 - RNA, 21 nt, Human
ccccauucugccugcccaggc

SEQ ID NO: 1648238 - RNA, 14 nt, Human
ccccagccccaucc

SEQ ID NO: 1648239 - RNA, 14 nt, Human
ccccagccccaaaa

SEQ ID NO: 1648240 - RNA, 18 nt, Human
ccccaaaacucuccucug

SEQ ID NO: 1648241 - RNA, 20 nt, Human
ccccaaaacucuccucugcu

SEQ ID NO: 1648242 - RNA, 21 nt, Human
ccccaaaacucuccucugcug

SEQ ID NO: 1648243 - RNA, 14 nt, Human
ccccggccaccugc

SEQ ID NO: 1648244 - RNA, 18 nt, Human
ccccggccaccugcggug

SEQ ID NO: 1648245 - RNA, 13 nt, Human
ccccggccaccug

SEQ ID NO: 1648246 - RNA, 14 nt, Human
ccccgcccaggcuu

SEQ ID NO: 1648247 - RNA, 12 nt, Human
ccccgcccaggc

SEQ ID NO: 1648248 - RNA, 14 nt, Human
cccccuuccaugga

SEQ ID NO: 1648249 - RNA, 15 nt, Human
ccccauuguggucac

SEQ ID NO: 1648250 - RNA, 22 nt, Human
ccagcagaaaugccuuacccuc

SEQ ID NO: 1648251 - RNA, 17 nt, Human
ccagcagaaaugccuua

SEQ ID NO: 1648252 - RNA, 16 nt, Human
ccagcagaaaugccuu

SEQ ID NO: 1648253 - RNA, 11 nt, Human
ccagcagccug

SEQ ID NO: 1648254 - RNA, 12 nt, Human
ccagcagccugg

SEQ ID NO: 1648255 - RNA, 14 nt, Human
ccagcagccuggac

SEQ ID NO: 1648256 - RNA, 13 nt, Human
ccagcagccugga

SEQ ID NO: 1648257 - RNA, 23 nt, Human
ccagccccauccucuguacagag

SEQ ID NO: 1648258 - RNA, 13 nt, Human
ccagccccuggau

SEQ ID NO: 1648259 - RNA, 14 nt, Human
ccagccccuggaug

SEQ ID NO: 1648260 - RNA, 15 nt, Human
ccagccccuggaugc

SEQ ID NO: 1648261 - RNA, 18 nt, Human
ccagccccuucugaccca

SEQ ID NO: 1648262 - RNA, 21 nt, Human
ccagcgagcccugguggcagu

SEQ ID NO: 1648263 - RNA, 18 nt, Human
ccagccccuggaugcagc

SEQ ID NO: 1648264 - RNA, 15 nt, Human
ccagccccuucugac

SEQ ID NO: 1648265 - RNA, 16 nt, Human
ccagccccuucugacc

SEQ ID NO: 1648266 - RNA, 17 nt, Human
ccagccccuucugaccc

SEQ ID NO: 1648267 - RNA, 20 nt, Human
ccaggaaaggcuccaggagc

SEQ ID NO: 1648268 - RNA, 17 nt, Human
ccaggaaaggcuccagg

SEQ ID NO: 1648269 - RNA, 18 nt, Human
ccaggaaaggcuccagga

SEQ ID NO: 1648270 - RNA, 19 nt, Human
ccaggaaaggcuccaggag

SEQ ID NO: 1648271 - RNA, 19 nt, Human
ccagucaccccggccaccu

SEQ ID NO: 1648272 - RNA, 17 nt, Human
ccagucaccccggccac

SEQ ID NO: 1648273 - RNA, 18 nt, Human
ccagucaccccggccacc

SEQ ID NO: 1648274 - RNA, 14 nt, Human
ccaguauuguacaa

SEQ ID NO: 1648275 - RNA, 16 nt, Human
ccagucaccccggcca

SEQ ID NO: 1648276 - RNA, 19 nt, Human
ccaguaucuugaagacuuu

SEQ ID NO: 1648277 - RNA, 22 nt, Human
ccaguaucuugaagacuuuucu

SEQ ID NO: 1648278 - RNA, 20 nt, Human
ccaggggugggacacccugu

SEQ ID NO: 1648279 - RNA, 21 nt, Human
ccaggggugggacacccugug

SEQ ID NO: 1648280 - RNA, 22 nt, Human
ccaggggugggacacccuguga

SEQ ID NO: 1648281 - RNA, 23 nt, Human
ccaggggugggacacccugugau

SEQ ID NO: 1648282 - RNA, 17 nt, Human
ccaggcugagccucagu

SEQ ID NO: 1648283 - RNA, 19 nt, Human
ccaggcugagccucagucu

SEQ ID NO: 1648284 - RNA, 22 nt, Human
ccaggcugagccucagucuccc

SEQ ID NO: 1648285 - RNA, 14 nt, Human
ccaggcugagccuc

SEQ ID NO: 1648286 - RNA, 16 nt, Human
ccaggcugagccucag

SEQ ID NO: 1648287 - RNA, 13 nt, Human
ccaggcugagccu

SEQ ID NO: 1648288 - RNA, 15 nt, Human
ccaggggccaugaau

SEQ ID NO: 1648289 - RNA, 13 nt, Human
ccagagagggugg

SEQ ID NO: 1648290 - RNA, 13 nt, Human
ccagaugcaccag

SEQ ID NO: 1648291 - RNA, 14 nt, Human
ccagaugcaccagc

SEQ ID NO: 1648292 - RNA, 16 nt, Human
ccagagacacaagccu

SEQ ID NO: 1648293 - RNA, 18 nt, Human
ccagagacacaagccuuc

SEQ ID NO: 1648294 - RNA, 18 nt, Human
ccacugcacuccagccug

SEQ ID NO: 1648295 - RNA, 19 nt, Human
ccacugcacuauagccuag

SEQ ID NO: 1648296 - RNA, 20 nt, Human
ccacugcacuauagccuagg

SEQ ID NO: 1648297 - RNA, 13 nt, Human
ccacugcaccggg

SEQ ID NO: 1648298 - RNA, 14 nt, Human
ccacugcaccgggc

SEQ ID NO: 1648299 - RNA, 17 nt, Human
ccacugcaccgggccac

SEQ ID NO: 1648300 - RNA, 19 nt, Human
ccacugcaccgggccacag

SEQ ID NO: 1648301 - RNA, 12 nt, Human
ccacuuggucug

SEQ ID NO: 1648302 - RNA, 22 nt, Human
ccacuuuuguucuugguuugua

SEQ ID NO: 1648303 - RNA, 21 nt, Human
ccacuuuuguucuugguuugu

SEQ ID NO: 1648304 - RNA, 15 nt, Human
ccacuuuuguucuug

SEQ ID NO: 1648305 - RNA, 14 nt, Human
ccacuuuuguucuu

SEQ ID NO: 1648306 - RNA, 17 nt, Human
ccagacccggcugcgug

SEQ ID NO: 1648307 - RNA, 13 nt, Human
ccagacgaugucu

SEQ ID NO: 1648308 - RNA, 20 nt, Human
ccagacgaugucuucauacc

SEQ ID NO: 1648309 - RNA, 20 nt, Human
ccacuuucuagccagaggag

SEQ ID NO: 1648310 - RNA, 13 nt, Human
ccacuuucuagcc

SEQ ID NO: 1648311 - RNA, 18 nt, Human
ccacuuucuagccagagg

SEQ ID NO: 1648312 - RNA, 19 nt, Human
ccacuuucuagccagagga

SEQ ID NO: 1648313 - RNA, 20 nt, Human
ccacuuggucugugagaugc

SEQ ID NO: 1648314 - RNA, 22 nt, Human
ccacuuggucugugagaugcua

SEQ ID NO: 1648315 - RNA, 15 nt, Human
ccacuuggucuguga

SEQ ID NO: 1648316 - RNA, 16 nt, Human
ccacuuggucugugag

SEQ ID NO: 1648317 - RNA, 17 nt, Human
ccacuuggucugugaga

SEQ ID NO: 1648318 - RNA, 19 nt, Human
ccacuuggucugugagaug

SEQ ID NO: 1648319 - RNA, 19 nt, Human
cagauuugaacucuucaau

SEQ ID NO: 1648320 - RNA, 17 nt, Human
cagcaccaucucuccuc

SEQ ID NO: 1648321 - RNA, 19 nt, Human
cagcaccaucucuccuccu

SEQ ID NO: 1648322 - RNA, 13 nt, Human
cagauuuaugcau

SEQ ID NO: 1648323 - RNA, 13 nt, Human
cagauuucacucu

SEQ ID NO: 1648324 - RNA, 20 nt, Human
cagauuucacucuccuuggu

SEQ ID NO: 1648325 - RNA, 19 nt, Human
cagauugcaacaggcuggg

SEQ ID NO: 1648326 - RNA, 20 nt, Human
cagauugcaacaggcugggc

SEQ ID NO: 1648327 - RNA, 18 nt, Human
cagauugcaacaggcugg

SEQ ID NO: 1648328 - RNA, 18 nt, Human
cagcacgggggccaagga

SEQ ID NO: 1648329 - RNA, 15 nt, Human
cagcacgauuucugu

SEQ ID NO: 1648330 - RNA, 14 nt, Human
cagcacgauuucug

SEQ ID NO: 1648331 - RNA, 14 nt, Human
cagccagacuggca

SEQ ID NO: 1648332 - RNA, 23 nt, Human
cagccagcaguucagagcugccc

SEQ ID NO: 1648333 - RNA, 20 nt, Human
cagccagacuggcacaguuu

SEQ ID NO: 1648334 - RNA, 15 nt, Human
cagccagacuggcac

SEQ ID NO: 1648335 - RNA, 18 nt, Human
cagccagacuggcacagu

SEQ ID NO: 1648336 - RNA, 14 nt, Human
cagauccccaagcc

SEQ ID NO: 1648337 - RNA, 14 nt, Human
cagauaugauucaa

SEQ ID NO: 1648338 - RNA, 18 nt, Human
cagauacuggauuguacu

SEQ ID NO: 1648339 - RNA, 19 nt, Human
cagauagauauaugcucug

SEQ ID NO: 1648340 - RNA, 14 nt, Human
cagauacuggauug

SEQ ID NO: 1648341 - RNA, 17 nt, Human
cagaggggguggccucc

SEQ ID NO: 1648342 - RNA, 19 nt, Human
cagauacuuggggggcuga

SEQ ID NO: 1648343 - RNA, 14 nt, Human
cagaggggguggcc

SEQ ID NO: 1648344 - RNA, 16 nt, Human
cagaggggguggccuc

SEQ ID NO: 1648345 - RNA, 12 nt, Human
cagagagggugg

SEQ ID NO: 1648346 - RNA, 13 nt, Human
cagagaggguggg

SEQ ID NO: 1648347 - RNA, 17 nt, Human
cagagaggguggugacc

SEQ ID NO: 1648348 - RNA, 20 nt, Human
cagagaggguggugaccucu

SEQ ID NO: 1648349 - RNA, 22 nt, Human
cagagaggguggugaccucugc

SEQ ID NO: 1648350 - RNA, 16 nt, Human
cagagcugccaccugc

SEQ ID NO: 1648351 - RNA, 13 nt, Human
cagagcugccacc

SEQ ID NO: 1648352 - RNA, 20 nt, Human
cagagagguuaaggugggua

SEQ ID NO: 1648353 - RNA, 23 nt, Human
cagagaggguggugaccucugcc

SEQ ID NO: 1648354 - RNA, 20 nt, Human
cagaggaaagcaaaggagau

SEQ ID NO: 1648355 - RNA, 13 nt, Human
cagaggggguggc

SEQ ID NO: 1648356 - RNA, 17 nt, Human
cagaggaaagcaaagga

SEQ ID NO: 1648357 - RNA, 19 nt, Human
cagaggaaagcaaaggaga

SEQ ID NO: 1648358 - RNA, 21 nt, Human
cagagcugcccucuccugggc

SEQ ID NO: 1648359 - RNA, 20 nt, Human
cagagcugcccucuccuggg

SEQ ID NO: 1648360 - RNA, 19 nt, Human
cagagcugcccucuccugg

SEQ ID NO: 1648361 - RNA, 18 nt, Human
cagagcugcccucuccug

SEQ ID NO: 1648362 - RNA, 23 nt, Human
cagagcugcccucuccugggcag

SEQ ID NO: 1648363 - RNA, 14 nt, Human
cagacagcccucca

SEQ ID NO: 1648364 - RNA, 13 nt, Human
cagacagcugccu

SEQ ID NO: 1648365 - RNA, 14 nt, Human
cagacagcugccug

SEQ ID NO: 1648366 - RNA, 17 nt, Human
cagacagaucuggaaug

SEQ ID NO: 1648367 - RNA, 13 nt, Human
cagacaggaccag

SEQ ID NO: 1648368 - RNA, 15 nt, Human
cagacaggaccaggg

SEQ ID NO: 1648369 - RNA, 16 nt, Human
cagacaggaccaggga

SEQ ID NO: 1648370 - RNA, 15 nt, Human
cagacagcugccugg

SEQ ID NO: 1648371 - RNA, 16 nt, Human
cagacagcugccuggg

SEQ ID NO: 1648372 - RNA, 17 nt, Human
cagacagcugccuggga

SEQ ID NO: 1648373 - RNA, 18 nt, Human
cagacagcugccugggau

SEQ ID NO: 1648374 - RNA, 17 nt, Human
cagacaggaccagggau

SEQ ID NO: 1648375 - RNA, 24 nt, Human
cagacaggaccagggauuuccaug

SEQ ID NO: 1648376 - RNA, 11 nt, Human
cagacaggcaa

SEQ ID NO: 1648377 - RNA, 13 nt, Human
cagacaggcaagc

SEQ ID NO: 1648378 - RNA, 18 nt, Human
cagacaggcaagcaccuc

SEQ ID NO: 1648379 - RNA, 20 nt, Human
cagacaggcaagcaccuccu

SEQ ID NO: 1648380 - RNA, 21 nt, Human
cagacaggcaagcaccuccug

SEQ ID NO: 1648381 - RNA, 23 nt, Human
cagacucuacagaggccaugggc

SEQ ID NO: 1648382 - RNA, 18 nt, Human
cagacucuacagaggcca

SEQ ID NO: 1648383 - RNA, 19 nt, Human
cagacucuacagaggccau

SEQ ID NO: 1648384 - RNA, 20 nt, Human
cagacucuacagaggccaug

SEQ ID NO: 1648385 - RNA, 21 nt, Human
cagacucuacagaggccaugg

SEQ ID NO: 1648386 - RNA, 17 nt, Human
cagacucuacagaggcc

SEQ ID NO: 1648387 - RNA, 22 nt, Human
cagacaggcaagcaccuccugc

SEQ ID NO: 1648388 - RNA, 23 nt, Human
cagacaggcaagcaccuccugcc

SEQ ID NO: 1648389 - RNA, 13 nt, Human
cagacuggaagca

SEQ ID NO: 1648390 - RNA, 14 nt, Human
cagacuggaagcac

SEQ ID NO: 1648391 - RNA, 16 nt, Human
cagacuggaagcacag

SEQ ID NO: 1648392 - RNA, 17 nt, Human
cagacuggaagcacagc

SEQ ID NO: 1648393 - RNA, 18 nt, Human
cagacuggaagcacagcu

SEQ ID NO: 1648394 - RNA, 22 nt, Human
cagacuggcacaguuuucugag

SEQ ID NO: 1648395 - RNA, 23 nt, Human
cagacuggcacaguuuucugaga

SEQ ID NO: 1648396 - RNA, 20 nt, Human
cagacuggaagcacagcuuc

SEQ ID NO: 1648397 - RNA, 21 nt, Human
cagacuggaagcacagcuuca

SEQ ID NO: 1648398 - RNA, 17 nt, Human
cagacuggcacaguuuu

SEQ ID NO: 1648399 - RNA, 18 nt, Human
cagacuggcacaguuuuc

SEQ ID NO: 1648400 - RNA, 21 nt, Human
cagcggaaagcccugugcucc

SEQ ID NO: 1648401 - RNA, 15 nt, Human
cagcuaacauggaag

SEQ ID NO: 1648402 - RNA, 17 nt, Human
cagccugcuccagcugu

SEQ ID NO: 1648403 - RNA, 19 nt, Human
cagccugcuccagcuguuc

SEQ ID NO: 1648404 - RNA, 16 nt, Human
cagccugcuccagcug

SEQ ID NO: 1648405 - RNA, 20 nt, Human
cagcuguaugauucccagcc

SEQ ID NO: 1648406 - RNA, 14 nt, Human
cagcuuauugucua

SEQ ID NO: 1648407 - RNA, 20 nt, Human
cagcuuauugucuagugaaa

SEQ ID NO: 1648408 - RNA, 19 nt, Human
caggaaaggcuccaggagc

SEQ ID NO: 1648409 - RNA, 20 nt, Human
caggaaaggcuccaggagca

SEQ ID NO: 1648410 - RNA, 16 nt, Human
caggaaaggcuccagg

SEQ ID NO: 1648411 - RNA, 17 nt, Human
caggaaaggcuccagga

SEQ ID NO: 1648412 - RNA, 16 nt, Human
caggaaagagaacuuc

SEQ ID NO: 1648413 - RNA, 20 nt, Human
caggaaagagaacuuccaga

SEQ ID NO: 1648414 - RNA, 21 nt, Human
cagcugacuuuucuguccgag

SEQ ID NO: 1648415 - RNA, 20 nt, Human
cagcugccuccccuccucug

SEQ ID NO: 1648416 - RNA, 19 nt, Human
cagcugccuccccuccucu

SEQ ID NO: 1648417 - RNA, 18 nt, Human
cagcugccuccccuccuc

SEQ ID NO: 1648418 - RNA, 17 nt, Human
cagcugccuccccuccu

SEQ ID NO: 1648419 - RNA, 16 nt, Human
cagcugccuccccucc

SEQ ID NO: 1648420 - RNA, 15 nt, Human
cagcugccuccccuc

SEQ ID NO: 1648421 - RNA, 14 nt, Human
cagcugccuccccu

SEQ ID NO: 1648422 - RNA, 9 nt, Human
cagcugccu

SEQ ID NO: 1648423 - RNA, 11 nt, Human
cagcugccucc

SEQ ID NO: 1648424 - RNA, 19 nt, Human
cagcugagggugagugggu

SEQ ID NO: 1648425 - RNA, 10 nt, Human
cagcugccuc

SEQ ID NO: 1648426 - RNA, 11 nt, Human
caggccaggcc

SEQ ID NO: 1648427 - RNA, 12 nt, Human
caggccaggccc

SEQ ID NO: 1648428 - RNA, 16 nt, Human
caggaccucaggugag

SEQ ID NO: 1648429 - RNA, 23 nt, Human
caggaccucaggugagaagcaga

SEQ ID NO: 1648430 - RNA, 15 nt, Human
caggcaaugcuggcu

SEQ ID NO: 1648431 - RNA, 16 nt, Human
caggcaaugcuggcug

SEQ ID NO: 1648432 - RNA, 17 nt, Human
caggcaaugcuggcugu

SEQ ID NO: 1648433 - RNA, 22 nt, Human
caggaggccagccuugaccauu

SEQ ID NO: 1648434 - RNA, 18 nt, Human
caggaggccagccuugac

SEQ ID NO: 1648435 - RNA, 19 nt, Human
caggaggccagccuugacc

SEQ ID NO: 1648436 - RNA, 19 nt, Human
caggaggaucacuugaguc

SEQ ID NO: 1648437 - RNA, 22 nt, Human
caggcugggagagccuuccagg

SEQ ID NO: 1648438 - RNA, 23 nt, Human
caggcugggagagccuuccaggg

SEQ ID NO: 1648439 - RNA, 17 nt, Human
caggggaaaaucagccu

SEQ ID NO: 1648440 - RNA, 14 nt, Human
caggggaaaagagg

SEQ ID NO: 1648441 - RNA, 16 nt, Human
caggggaaaagaggag

SEQ ID NO: 1648442 - RNA, 12 nt, Human
caggccuccuac

SEQ ID NO: 1648443 - RNA, 14 nt, Human
caggccuccuacag

SEQ ID NO: 1648444 - RNA, 21 nt, Human
caggcgugagccaccgugccu

SEQ ID NO: 1648445 - RNA, 21 nt, Human
caggcugggagagccuuccag

SEQ ID NO: 1648446 - RNA, 11 nt, Human
caggcuacugu

SEQ ID NO: 1648447 - RNA, 21 nt, Human
caugaauauuuaguguucaua

SEQ ID NO: 1648448 - RNA, 16 nt, Human
caugaauuugugaagg

SEQ ID NO: 1648449 - RNA, 13 nt, Human
caugacaaagacu

SEQ ID NO: 1648450 - RNA, 15 nt, Human
caugaugcgggccag

SEQ ID NO: 1648451 - RNA, 20 nt, Human
caugaugcgggccagugcuc

SEQ ID NO: 1648452 - RNA, 14 nt, Human
caugaugcgggcca

SEQ ID NO: 1648453 - RNA, 15 nt, Human
caugcaaggucauuu

SEQ ID NO: 1648454 - RNA, 12 nt, Human
caugcaagguca

SEQ ID NO: 1648455 - RNA, 15 nt, Human
cauggccagguggcc

SEQ ID NO: 1648456 - RNA, 20 nt, Human
caugcuccuggcccacugca

SEQ ID NO: 1648457 - RNA, 17 nt, Human
caugcuccuggcccacu

SEQ ID NO: 1648458 - RNA, 14 nt, Human
caugcuccuggccc

SEQ ID NO: 1648459 - RNA, 16 nt, Human
caugcuccuggcccac

SEQ ID NO: 1648460 - RNA, 22 nt, Human
cauggccucuucagaucucuaa

SEQ ID NO: 1648461 - RNA, 14 nt, Human
cauggccgugaacu

SEQ ID NO: 1648462 - RNA, 21 nt, Human
cauggccucuucagaucucua

SEQ ID NO: 1648463 - RNA, 20 nt, Human
caugggaaaugucaacaagu

SEQ ID NO: 1648464 - RNA, 18 nt, Human
caugggaaaggggaaguu

SEQ ID NO: 1648465 - RNA, 21 nt, Human
cauguuacauaagauaaaugu

SEQ ID NO: 1648466 - RNA, 16 nt, Human
cauguucuuaauucuu

SEQ ID NO: 1648467 - RNA, 13 nt, Human
cauguucuuaauu

SEQ ID NO: 1648468 - RNA, 15 nt, Human
cauguccaagaagcc

SEQ ID NO: 1648469 - RNA, 16 nt, Human
cauguccaagaagccc

SEQ ID NO: 1648470 - RNA, 16 nt, Human
cauguuacauaagaua

SEQ ID NO: 1648471 - RNA, 17 nt, Human
cauguuacauaagauaa

SEQ ID NO: 1648472 - RNA, 18 nt, Human
cauguucuuaauucuuag

SEQ ID NO: 1648473 - RNA, 18 nt, Human
cauguuggccaggcuggu

SEQ ID NO: 1648474 - RNA, 17 nt, Human
cauguuggccaggcugg

SEQ ID NO: 1648475 - RNA, 19 nt, Human
cauuauauuuauuacugua

SEQ ID NO: 1648476 - RNA, 19 nt, Human
cauguuggccaggcugguc

SEQ ID NO: 1648477 - RNA, 20 nt, Human
cauguuggccaggcugcucu

SEQ ID NO: 1648478 - RNA, 15 nt, Human
cauuauucaaaguug

SEQ ID NO: 1648479 - RNA, 16 nt, Human
cauuauucaaaguugc

SEQ ID NO: 1648480 - RNA, 20 nt, Human
cauucuccuuguguuacuaa

SEQ ID NO: 1648481 - RNA, 14 nt, Human
cauuauucaaaguu

SEQ ID NO: 1648482 - RNA, 17 nt, Human
cauucuccaccugccag

SEQ ID NO: 1648483 - RNA, 18 nt, Human
cauucuccaccugccagg

SEQ ID NO: 1648484 - RNA, 19 nt, Human
cauucuccaccugccaggg

SEQ ID NO: 1648485 - RNA, 21 nt, Human
cauucuccaccugccagggac

SEQ ID NO: 1648486 - RNA, 16 nt, Human
cauuggagauguuuag

SEQ ID NO: 1648487 - RNA, 18 nt, Human
cauuuaggugaggaagca

SEQ ID NO: 1648488 - RNA, 14 nt, Human
cauugguucuugua

SEQ ID NO: 1648489 - RNA, 15 nt, Human
cauugguucuuguau

SEQ ID NO: 1648490 - RNA, 17 nt, Human
cauugguguuguacuca

SEQ ID NO: 1648491 - RNA, 16 nt, Human
cauuuaggugaggaag

SEQ ID NO: 1648492 - RNA, 17 nt, Human
ccaaaaaaugcuugcuu

SEQ ID NO: 1648493 - RNA, 14 nt, Human
ccaaaaggcagaag

SEQ ID NO: 1648494 - RNA, 21 nt, Human
cauuuggugguuucagaaaug

SEQ ID NO: 1648495 - RNA, 23 nt, Human
cauuuuuuuuaagaaaaaggaug

SEQ ID NO: 1648496 - RNA, 17 nt, Human
cauuuguauaaaauaau

SEQ ID NO: 1648497 - RNA, 14 nt, Human
cauuuguauaaaau

SEQ ID NO: 1648498 - RNA, 16 nt, Human
cauuuguauaaaauaa

SEQ ID NO: 1648499 - RNA, 14 nt, Human
ccaaagugcuggga

SEQ ID NO: 1648500 - RNA, 22 nt, Human
ccaaaguacacuguuucaaacu

SEQ ID NO: 1648501 - RNA, 14 nt, Human
ccaacuauggccug

SEQ ID NO: 1648502 - RNA, 15 nt, Human
ccaacuauggccugu

SEQ ID NO: 1648503 - RNA, 16 nt, Human
ccaacuauggccugug

SEQ ID NO: 1648504 - RNA, 13 nt, Human
ccaacucacccca

SEQ ID NO: 1648505 - RNA, 15 nt, Human
ccaaaucagcugcua

SEQ ID NO: 1648506 - RNA, 23 nt, Human
ccaaaucagcugcuacuacuccu

SEQ ID NO: 1648507 - RNA, 16 nt, Human
ccaaaucauaguggcu

SEQ ID NO: 1648508 - RNA, 17 nt, Human
ccaagcucugcuccucu

SEQ ID NO: 1648509 - RNA, 16 nt, Human
ccaagcucugcuccuc

SEQ ID NO: 1648510 - RNA, 14 nt, Human
ccaagcucugcucc

SEQ ID NO: 1648511 - RNA, 15 nt, Human
ccaagcucugcuccu

SEQ ID NO: 1648512 - RNA, 21 nt, Human
ccaacucaccccagccccaaa

SEQ ID NO: 1648513 - RNA, 21 nt, Human
ccaacuccagaaagugacaag

SEQ ID NO: 1648514 - RNA, 21 nt, Human
ccaauggagacugucucaaga

SEQ ID NO: 1648515 - RNA, 23 nt, Human
ccaauggacuaacuugucuuugg

SEQ ID NO: 1648516 - RNA, 14 nt, Human
ccaaugggagcuca

SEQ ID NO: 1648517 - RNA, 22 nt, Human
caguucagagcugcccucuccu

SEQ ID NO: 1648518 - RNA, 21 nt, Human
caguucagagcugcccucucc

SEQ ID NO: 1648519 - RNA, 19 nt, Human
caguucagagcugcccucu

SEQ ID NO: 1648520 - RNA, 18 nt, Human
caguucagagcugcccuc

SEQ ID NO: 1648521 - RNA, 24 nt, Human
caguucagagcugcccucuccugg

SEQ ID NO: 1648522 - RNA, 23 nt, Human
caguucagagcugcccucuccug

SEQ ID NO: 1648523 - RNA, 17 nt, Human
caguucagagcugcccu

SEQ ID NO: 1648524 - RNA, 16 nt, Human
caguucagagcugccc

SEQ ID NO: 1648525 - RNA, 15 nt, Human
caguucagagcugcc

SEQ ID NO: 1648526 - RNA, 22 nt, Human
caguuauuauauuuacaaaugg

SEQ ID NO: 1648527 - RNA, 21 nt, Human
cagucugauucccaagcucug

SEQ ID NO: 1648528 - RNA, 22 nt, Human
cagucugauucccaagcucugc

SEQ ID NO: 1648529 - RNA, 20 nt, Human
caguuacucagaauucucua

SEQ ID NO: 1648530 - RNA, 21 nt, Human
cagugguaugaucacggcuca

SEQ ID NO: 1648531 - RNA, 19 nt, Human
caguggugcgaucuggguu

SEQ ID NO: 1648532 - RNA, 20 nt, Human
caguggugcgaucuggguuc

SEQ ID NO: 1648533 - RNA, 21 nt, Human
caguuauuauauuuacaaaug

SEQ ID NO: 1648534 - RNA, 17 nt, Human
caguuauuauauuuaca

SEQ ID NO: 1648535 - RNA, 13 nt, Human
caguuauggcuau

SEQ ID NO: 1648536 - RNA, 19 nt, Human
caguuauggcuauaggugc

SEQ ID NO: 1648537 - RNA, 20 nt, Human
caguuauggcuauaggugcu

SEQ ID NO: 1648538 - RNA, 20 nt, Human
cagugguaugaucacggcuc

SEQ ID NO: 1648539 - RNA, 16 nt, Human
cagugggagcugccug

SEQ ID NO: 1648540 - RNA, 17 nt, Human
cagugggagcugccugu

SEQ ID NO: 1648541 - RNA, 18 nt, Human
cagugggagcugccuguu

SEQ ID NO: 1648542 - RNA, 21 nt, Human
cagugcccacaggaucagucu

SEQ ID NO: 1648543 - RNA, 22 nt, Human
cagugcccacaggaucagucug

SEQ ID NO: 1648544 - RNA, 23 nt, Human
cagucugauucccaagcucugcu

SEQ ID NO: 1648545 - RNA, 22 nt, Human
cagugauuaccagggacugagg

SEQ ID NO: 1648546 - RNA, 15 nt, Human
caucuaaacugcccc

SEQ ID NO: 1648547 - RNA, 21 nt, Human
caucuaaacugcccccucugc

SEQ ID NO: 1648548 - RNA, 18 nt, Human
cauccugaggcuccacuu

SEQ ID NO: 1648549 - RNA, 19 nt, Human
cauccugaggcuccacuug

SEQ ID NO: 1648550 - RNA, 20 nt, Human
caucccaaacccuucagugc

SEQ ID NO: 1648551 - RNA, 11 nt, Human
caucccagccc

SEQ ID NO: 1648552 - RNA, 12 nt, Human
caucccagcccc

SEQ ID NO: 1648553 - RNA, 22 nt, Human
cauccucuguacagagcccacg

SEQ ID NO: 1648554 - RNA, 21 nt, Human
caucagcacgauuucuguuua

SEQ ID NO: 1648555 - RNA, 19 nt, Human
caucccaaacccuucagug

SEQ ID NO: 1648556 - RNA, 13 nt, Human
caucagcugcuga

SEQ ID NO: 1648557 - RNA, 23 nt, Human
caguuuguuaguaugaggcauuu

SEQ ID NO: 1648558 - RNA, 22 nt, Human
caguuguuagugugucuuagug

SEQ ID NO: 1648559 - RNA, 18 nt, Human
cauaauuauuauuuggcc

SEQ ID NO: 1648560 - RNA, 23 nt, Human
cauacaggaagguagaaauaucu

SEQ ID NO: 1648561 - RNA, 16 nt, Human
cauacaguuugcacuu

SEQ ID NO: 1648562 - RNA, 23 nt, Human
cauaaugcgugcauaccacuuuu

SEQ ID NO: 1648563 - RNA, 21 nt, Human
cauauuauuuuauguugcaua

SEQ ID NO: 1648564 - RNA, 16 nt, Human
cauagguuuaauaauu

SEQ ID NO: 1648565 - RNA, 16 nt, Human
cauaggugaucucauu

SEQ ID NO: 1648566 - RNA, 20 nt, Human
cauagcagcuuauucacaag

SEQ ID NO: 1648567 - RNA, 23 nt, Human
cauagcagagaaugaaagggccc

SEQ ID NO: 1648568 - RNA, 19 nt, Human
cauagcagcuuauucacaa

SEQ ID NO: 1648569 - RNA, 15 nt, Human
auuaauggaaauguu

SEQ ID NO: 1648570 - RNA, 17 nt, Human
auuacaggcuccugcca

SEQ ID NO: 1648571 - RNA, 19 nt, Human
auuacaggcuccugccacc

SEQ ID NO: 1648572 - RNA, 13 nt, Human
auuacagguguga

SEQ ID NO: 1648573 - RNA, 15 nt, Human
auuacaggcuccugc

SEQ ID NO: 1648574 - RNA, 16 nt, Human
auuacaggcuccugcc

SEQ ID NO: 1648575 - RNA, 21 nt, Human
auuaacaugaauauuuagugu

SEQ ID NO: 1648576 - RNA, 14 nt, Human
auucauauuuacuu

SEQ ID NO: 1648577 - RNA, 13 nt, Human
auuaugugccaga

SEQ ID NO: 1648578 - RNA, 21 nt, Human
auuaugugccagauuuaugca

SEQ ID NO: 1648579 - RNA, 23 nt, Human
auuaugugccagauuuaugcaua

SEQ ID NO: 1648580 - RNA, 15 nt, Human
auuauguaaauccca

SEQ ID NO: 1648581 - RNA, 17 nt, Human
auuauguaaaucccauu

SEQ ID NO: 1648582 - RNA, 22 nt, Human
auuauguaaaucccauuauuca

SEQ ID NO: 1648583 - RNA, 23 nt, Human
auuauguaaaucccauuauucaa

SEQ ID NO: 1648584 - RNA, 13 nt, Human
auuauguaaaucc

SEQ ID NO: 1648585 - RNA, 14 nt, Human
auuauguaaauccc

SEQ ID NO: 1648586 - RNA, 16 nt, Human
auuacaggugugaacc

SEQ ID NO: 1648587 - RNA, 23 nt, Human
auucucuaguuugauuaaauucu

SEQ ID NO: 1648588 - RNA, 12 nt, Human
auucucuuaucc

SEQ ID NO: 1648589 - RNA, 14 nt, Human
auucucuuauccaa

SEQ ID NO: 1648590 - RNA, 20 nt, Human
auucucuaguuugauuaaau

SEQ ID NO: 1648591 - RNA, 16 nt, Human
auucucuccuguaccu

SEQ ID NO: 1648592 - RNA, 15 nt, Human
auucucuuauccaac

SEQ ID NO: 1648593 - RNA, 22 nt, Human
auugaggacacugauauggguc

SEQ ID NO: 1648594 - RNA, 14 nt, Human
caaaccaucauuga

SEQ ID NO: 1648595 - RNA, 16 nt, Human
caaaccaucauugaaa

SEQ ID NO: 1648596 - RNA, 17 nt, Human
caaaccaucauugaaau

SEQ ID NO: 1648597 - RNA, 15 nt, Human
auuuuuuucugaauu

SEQ ID NO: 1648598 - RNA, 16 nt, Human
auuuuuuucugaaauu

SEQ ID NO: 1648599 - RNA, 17 nt, Human
auuuuuuucugaaauuu

SEQ ID NO: 1648600 - RNA, 16 nt, Human
auuuuuauuaaauuau

SEQ ID NO: 1648601 - RNA, 22 nt, Human
auuuuguuuuugucuuaaaaag

SEQ ID NO: 1648602 - RNA, 19 nt, Human
auuuuuauauuugaaauau

SEQ ID NO: 1648603 - RNA, 20 nt, Human
caaaagguuaauaaaguaau

SEQ ID NO: 1648604 - RNA, 13 nt, Human
caaaagcauguga

SEQ ID NO: 1648605 - RNA, 19 nt, Human
caaaagcaucuaugugaga

SEQ ID NO: 1648606 - RNA, 21 nt, Human
caaaagguauuuuaaucacca

SEQ ID NO: 1648607 - RNA, 20 nt, Human
auuuuuuuucuguuauauaa

SEQ ID NO: 1648608 - RNA, 18 nt, Human
auuuuuuuucuguuauau

SEQ ID NO: 1648609 - RNA, 19 nt, Human
auuuuuuuucuguuauaua

SEQ ID NO: 1648610 - RNA, 15 nt, Human
auuuuuuuucuguua

SEQ ID NO: 1648611 - RNA, 17 nt, Human
auuuuuuuucuguuaua

SEQ ID NO: 1648612 - RNA, 19 nt, Human
auuuguucuauagcuuuuc

SEQ ID NO: 1648613 - RNA, 14 nt, Human
auuuguguugaaga

SEQ ID NO: 1648614 - RNA, 15 nt, Human
auuuguguugaagag

SEQ ID NO: 1648615 - RNA, 18 nt, Human
auuuguguugaagagguu

SEQ ID NO: 1648616 - RNA, 22 nt, Human
auuuguguugaagagguuuuaa

SEQ ID NO: 1648617 - RNA, 14 nt, Human
auuuguuauaauga

SEQ ID NO: 1648618 - RNA, 13 nt, Human
auuuugaaaaacu

SEQ ID NO: 1648619 - RNA, 15 nt, Human
auuuugaaaaacugc

SEQ ID NO: 1648620 - RNA, 19 nt, Human
auuuucuauaauuuaaaua

SEQ ID NO: 1648621 - RNA, 18 nt, Human
auuuucuauaauuuaaau

SEQ ID NO: 1648622 - RNA, 17 nt, Human
auuuucuauaauuuaaa

SEQ ID NO: 1648623 - RNA, 21 nt, Human
auuucuguuuagauaauacac

SEQ ID NO: 1648624 - RNA, 19 nt, Human
auuucuguuuagauaauac

SEQ ID NO: 1648625 - RNA, 20 nt, Human
auuucuguuuagauaauaca

SEQ ID NO: 1648626 - RNA, 15 nt, Human
auuuaauaauuauau

SEQ ID NO: 1648627 - RNA, 18 nt, Human
auuuaauaauuauaugcu

SEQ ID NO: 1648628 - RNA, 22 nt, Human
auuuaauagguuuggacaaaau

SEQ ID NO: 1648629 - RNA, 13 nt, Human
auuuaauaauuau

SEQ ID NO: 1648630 - RNA, 12 nt, Human
auuucacucucc

SEQ ID NO: 1648631 - RNA, 14 nt, Human
auuucacucuccuu

SEQ ID NO: 1648632 - RNA, 13 nt, Human
caccugccaggga

SEQ ID NO: 1648633 - RNA, 18 nt, Human
caccugccccucaacucu

SEQ ID NO: 1648634 - RNA, 21 nt, Human
caccugccccucaacucuccu

SEQ ID NO: 1648635 - RNA, 11 nt, Human
caccugccagg

SEQ ID NO: 1648636 - RNA, 12 nt, Human
caccugccaggg

SEQ ID NO: 1648637 - RNA, 12 nt, Human
cacccugcucuc

SEQ ID NO: 1648638 - RNA, 12 nt, Human
cacccuccuuuc

SEQ ID NO: 1648639 - RNA, 16 nt, Human
caccugcggugcuauc

SEQ ID NO: 1648640 - RNA, 17 nt, Human
caccugcggugcuaucu

SEQ ID NO: 1648641 - RNA, 19 nt, Human
caccugcggugcuaucucc

SEQ ID NO: 1648642 - RNA, 20 nt, Human
caccugcggugcuaucuccc

SEQ ID NO: 1648643 - RNA, 21 nt, Human
cacgcuggagugcagugagcc

SEQ ID NO: 1648644 - RNA, 16 nt, Human
cacgcuggagugcagu

SEQ ID NO: 1648645 - RNA, 17 nt, Human
cacgcuggagugcagug

SEQ ID NO: 1648646 - RNA, 18 nt, Human
cacgcuggagugcaguga

SEQ ID NO: 1648647 - RNA, 20 nt, Human
cacgcuggagugcagugagc

SEQ ID NO: 1648648 - RNA, 15 nt, Human
cacgcuggagugcag

SEQ ID NO: 1648649 - RNA, 14 nt, Human
cacuccagaccccu

SEQ ID NO: 1648650 - RNA, 16 nt, Human
cacuccagaccccugg

SEQ ID NO: 1648651 - RNA, 22 nt, Human
cacuccaauuaaggauuuuaug

SEQ ID NO: 1648652 - RNA, 16 nt, Human
cacuagacccacugga

SEQ ID NO: 1648653 - RNA, 15 nt, Human
cacuacauucuguua

SEQ ID NO: 1648654 - RNA, 16 nt, Human
cacggaagagccuugc

SEQ ID NO: 1648655 - RNA, 22 nt, Human
cacggaagagccuugcggaagg

SEQ ID NO: 1648656 - RNA, 14 nt, Human
cacuacauucuguu

SEQ ID NO: 1648657 - RNA, 13 nt, Human
cacuacauucugu

SEQ ID NO: 1648658 - RNA, 23 nt, Human
cacugaagaagcaccaaucauga

SEQ ID NO: 1648659 - RNA, 17 nt, Human
cacuccagaccccuggc

SEQ ID NO: 1648660 - RNA, 21 nt, Human
cacuccagugagacagcucug

SEQ ID NO: 1648661 - RNA, 23 nt, Human
cacaucuugcucugcugacagac

SEQ ID NO: 1648662 - RNA, 16 nt, Human
cacaucuugcucugcu

SEQ ID NO: 1648663 - RNA, 17 nt, Human
cacauuuauucugcuca

SEQ ID NO: 1648664 - RNA, 18 nt, Human
cacauuuauucugcucac

SEQ ID NO: 1648665 - RNA, 17 nt, Human
caccagccccagugccc

SEQ ID NO: 1648666 - RNA, 21 nt, Human
caccagcccuuagcagggaaa

SEQ ID NO: 1648667 - RNA, 19 nt, Human
caccagcccuuagcaggga

SEQ ID NO: 1648668 - RNA, 18 nt, Human
caccagccccagugccca

SEQ ID NO: 1648669 - RNA, 21 nt, Human
caccagccccagugcccacag

SEQ ID NO: 1648670 - RNA, 22 nt, Human
caccagccccagugcccacagg

SEQ ID NO: 1648671 - RNA, 16 nt, Human
cacccagcccacuucu

SEQ ID NO: 1648672 - RNA, 12 nt, Human
cacccagcccac

SEQ ID NO: 1648673 - RNA, 13 nt, Human
cacaucuugcucu

SEQ ID NO: 1648674 - RNA, 14 nt, Human
cacaucuugcucug

SEQ ID NO: 1648675 - RNA, 15 nt, Human
cacaucuugcucugc

SEQ ID NO: 1648676 - RNA, 20 nt, Human
cacaucuugcucugcugaca

SEQ ID NO: 1648677 - RNA, 21 nt, Human
cacaucuugcucugcugacag

SEQ ID NO: 1648678 - RNA, 22 nt, Human
cacaucuugcucugcugacaga

SEQ ID NO: 1648679 - RNA, 23 nt, Human
cacaucagcuugcccuguuaaaa

SEQ ID NO: 1648680 - RNA, 13 nt, Human
cacaucagcuugc

SEQ ID NO: 1648681 - RNA, 20 nt, Human
caaguuauuuuuaauuuggu

SEQ ID NO: 1648682 - RNA, 22 nt, Human
caaguauuauaccuuuuuuaga

SEQ ID NO: 1648683 - RNA, 17 nt, Human
caaguauuauaccuuuu

SEQ ID NO: 1648684 - RNA, 13 nt, Human
caagcugcacccu

SEQ ID NO: 1648685 - RNA, 20 nt, Human
caaggauugcuacuguccua

SEQ ID NO: 1648686 - RNA, 14 nt, Human
caaggcaaggcugu

SEQ ID NO: 1648687 - RNA, 16 nt, Human
caaggcaaggcuguca

SEQ ID NO: 1648688 - RNA, 15 nt, Human
caagcucugcuccuc

SEQ ID NO: 1648689 - RNA, 16 nt, Human
caagcucugcuccucu

SEQ ID NO: 1648690 - RNA, 12 nt, Human
caagcucccagg

SEQ ID NO: 1648691 - RNA, 14 nt, Human
caagcucccaggca

SEQ ID NO: 1648692 - RNA, 15 nt, Human
caagcucccaggcau

SEQ ID NO: 1648693 - RNA, 17 nt, Human
caagcucccaggcauuc

SEQ ID NO: 1648694 - RNA, 21 nt, Human
caagcuccaucuccacuccag

SEQ ID NO: 1648695 - RNA, 17 nt, Human
caagcuccaucuccacu

SEQ ID NO: 1648696 - RNA, 19 nt, Human
caagcuccaagcucccagg

SEQ ID NO: 1648697 - RNA, 21 nt, Human
caagcuccaagcucccaggca

SEQ ID NO: 1648698 - RNA, 18 nt, Human
caagcuccaagcucccag

SEQ ID NO: 1648699 - RNA, 20 nt, Human
caauuuauuauggcacauca

SEQ ID NO: 1648700 - RNA, 12 nt, Human
caaugcuggcug

SEQ ID NO: 1648701 - RNA, 16 nt, Human
caauggcagccuuggc

SEQ ID NO: 1648702 - RNA, 13 nt, Human
caauggcagccuu

SEQ ID NO: 1648703 - RNA, 14 nt, Human
caauggcagccuug

SEQ ID NO: 1648704 - RNA, 15 nt, Human
caauggcagccuugg

SEQ ID NO: 1648705 - RNA, 14 nt, Human
caaucaaaucugcu

SEQ ID NO: 1648706 - RNA, 17 nt, Human
caaucagccuaguugau

SEQ ID NO: 1648707 - RNA, 18 nt, Human
caagcaccuagccucgcu

SEQ ID NO: 1648708 - RNA, 14 nt, Human
caagcaccuccugc

SEQ ID NO: 1648709 - RNA, 13 nt, Human
caagcaccuccug

SEQ ID NO: 1648710 - RNA, 16 nt, Human
caagaccacguuucua

SEQ ID NO: 1648711 - RNA, 14 nt, Human
caagaccacguuuc

SEQ ID NO: 1648712 - RNA, 15 nt, Human
caagcaaaugugaau

SEQ ID NO: 1648713 - RNA, 17 nt, Human
caagcaaaugugaauca

SEQ ID NO: 1648714 - RNA, 19 nt, Human
caagcaaaugugaaucauu

SEQ ID NO: 1648715 - RNA, 13 nt, Human
caagcaagaaaca

SEQ ID NO: 1648716 - RNA, 18 nt, Human
caagcaagaaacacuggg

SEQ ID NO: 1648717 - RNA, 14 nt, Human
caagcaaguauuag

SEQ ID NO: 1648718 - RNA, 14 nt, Human
caacccccagccug

SEQ ID NO: 1648719 - RNA, 17 nt, Human
caaccccuucgcuccug

SEQ ID NO: 1648720 - RNA, 14 nt, Human
caaccccuucgcuc

SEQ ID NO: 1648721 - RNA, 16 nt, Human
caaccccuucgcuccu

SEQ ID NO: 1648722 - RNA, 13 nt, Human
caacuauggccug

SEQ ID NO: 1648723 - RNA, 19 nt, Human
caacuauauuguuugcuaa

SEQ ID NO: 1648724 - RNA, 19 nt, Human
caacuaucucauuuccaag

SEQ ID NO: 1648725 - RNA, 18 nt, Human
caagaauagaugcugacu

SEQ ID NO: 1648726 - RNA, 18 nt, Human
caagaagcccaggaaagg

SEQ ID NO: 1648727 - RNA, 17 nt, Human
caagaaggaugauucaa

SEQ ID NO: 1648728 - RNA, 21 nt, Human
caacucccugccccccagccc

SEQ ID NO: 1648729 - RNA, 15 nt, Human
caagaagcccaggaa

SEQ ID NO: 1648730 - RNA, 19 nt, Human
caacucccugccccccagc

SEQ ID NO: 1648731 - RNA, 20 nt, Human
caacucccugccccccagcc

SEQ ID NO: 1648732 - RNA, 14 nt, Human
caacuauggccugu

SEQ ID NO: 1648733 - RNA, 12 nt, Human
caacuccagaaa

SEQ ID NO: 1648734 - RNA, 15 nt, Human
auguuuauuacagua

SEQ ID NO: 1648735 - RNA, 16 nt, Human
auguuuauuacaguau

SEQ ID NO: 1648736 - RNA, 18 nt, Human
auguuuauuacaguauaa

SEQ ID NO: 1648737 - RNA, 19 nt, Human
auguuuauuacaguauaau

SEQ ID NO: 1648738 - RNA, 22 nt, Human
auguuuauuacaguauaauuaa

SEQ ID NO: 1648739 - RNA, 23 nt, Human
auguuuauuacaguauaauuaac

SEQ ID NO: 1648740 - RNA, 15 nt, Human
auguuuuuuuuuaaa

SEQ ID NO: 1648741 - RNA, 23 nt, Human
auuaaaaaucucaaauuucuaaa

SEQ ID NO: 1648742 - RNA, 19 nt, Human
auuaaaacacaacaucuuu

SEQ ID NO: 1648743 - RNA, 19 nt, Human
uuuucugauccaguuuugu

SEQ ID NO: 1648744 - RNA, 21 nt, Human
uuuucuuaaccagaucauugu

SEQ ID NO: 1648745 - RNA, 14 nt, Human
uuuucuuaaauaau

SEQ ID NO: 1648746 - RNA, 23 nt, Human
uuuucuuaaauaauaaagaucau

SEQ ID NO: 1648747 - RNA, 13 nt, Human
uuuucuguucuuu

SEQ ID NO: 1648748 - RNA, 12 nt, Human
uuuucuguuaua

SEQ ID NO: 1648749 - RNA, 12 nt, Human
auguuuauuaca

SEQ ID NO: 1648750 - RNA, 17 nt, Human
auguuggccaggcuggu

SEQ ID NO: 1648751 - RNA, 19 nt, Human
uuuuauggcuuuugugcau

SEQ ID NO: 1648752 - RNA, 18 nt, Human
uuuuauggcuuuugugca

SEQ ID NO: 1648753 - RNA, 23 nt, Human
uuuuagaguugauacuacaguuu

SEQ ID NO: 1648754 - RNA, 15 nt, Human
uuuuaguagagacag

SEQ ID NO: 1648755 - RNA, 21 nt, Human
uuuuauggcuuuugugcauua

SEQ ID NO: 1648756 - RNA, 12 nt, Human
uuuuauuaaauu

SEQ ID NO: 1648757 - RNA, 17 nt, Human
uuuucucugauacagaa

SEQ ID NO: 1648758 - RNA, 16 nt, Human
uuuucuauaauuuaaa

SEQ ID NO: 1648759 - RNA, 14 nt, Human
uuuucaguguacau

SEQ ID NO: 1648760 - RNA, 20 nt, Human
uuuucaggcuagauguaugu

SEQ ID NO: 1648761 - RNA, 12 nt, Human
auguugaaagau

SEQ ID NO: 1648762 - RNA, 18 nt, Human
auguugaaagaucaaaag

SEQ ID NO: 1648763 - RNA, 13 nt, Human
auguugcccaggc

SEQ ID NO: 1648764 - RNA, 14 nt, Human
auguugcccaggca

SEQ ID NO: 1648765 - RNA, 15 nt, Human
auguugcccaggcag

SEQ ID NO: 1648766 - RNA, 16 nt, Human
auguugcccaggcagg

SEQ ID NO: 1648767 - RNA, 17 nt, Human
uuuuagaguugauacua

SEQ ID NO: 1648768 - RNA, 21 nt, Human
uuuuagacccuauugcugcuu

SEQ ID NO: 1648769 - RNA, 13 nt, Human
auguuggccaggc

SEQ ID NO: 1648770 - RNA, 20 nt, Human
auguuacauaagauaaaugu

SEQ ID NO: 1648771 - RNA, 20 nt, Human
auguuacagaaucuaacugg

SEQ ID NO: 1648772 - RNA, 19 nt, Human
auguuacauaagauaaaug

SEQ ID NO: 1648773 - RNA, 21 nt, Human
uuuuaaaaaacugcugacugu

SEQ ID NO: 1648774 - RNA, 18 nt, Human
uuuuaaaaaacugcugac

SEQ ID NO: 1648775 - RNA, 21 nt, Human
augugccagguuuuuggucug

SEQ ID NO: 1648776 - RNA, 20 nt, Human
augugcuaguaauuggaaag

SEQ ID NO: 1648777 - RNA, 21 nt, Human
augugcuaguaauuggaaagg

SEQ ID NO: 1648778 - RNA, 15 nt, Human
auguguguuuuaaaa

SEQ ID NO: 1648779 - RNA, 14 nt, Human
uuuguuucugaaag

SEQ ID NO: 1648780 - RNA, 16 nt, Human
uuuguuucugaaaggg

SEQ ID NO: 1648781 - RNA, 22 nt, Human
uuugugcauuaucuagauacug

SEQ ID NO: 1648782 - RNA, 19 nt, Human
uuugugcauuaucuagaua

SEQ ID NO: 1648783 - RNA, 22 nt, Human
uuugugauacaaugcugugccc

SEQ ID NO: 1648784 - RNA, 16 nt, Human
uuugugauacaaugcu

SEQ ID NO: 1648785 - RNA, 23 nt, Human
uuugucuuaaaaaguggaaaaau

SEQ ID NO: 1648786 - RNA, 13 nt, Human
uuugucuuaaaaa

SEQ ID NO: 1648787 - RNA, 14 nt, Human
uuugucuuaaaaag

SEQ ID NO: 1648788 - RNA, 18 nt, Human
augugauccuuuuggagu

SEQ ID NO: 1648789 - RNA, 15 nt, Human
augugaugagaggaa

SEQ ID NO: 1648790 - RNA, 16 nt, Human
uuuguaauuuuuuuau

SEQ ID NO: 1648791 - RNA, 14 nt, Human
uuuguacagacaac

SEQ ID NO: 1648792 - RNA, 17 nt, Human
uuuguaguguuggagaa

SEQ ID NO: 1648793 - RNA, 14 nt, Human
augugagacugguu

SEQ ID NO: 1648794 - RNA, 13 nt, Human
augugagaccauu

SEQ ID NO: 1648795 - RNA, 23 nt, Human
augucgucaaagcugaaauggac

SEQ ID NO: 1648796 - RNA, 16 nt, Human
auguccaagaagccca

SEQ ID NO: 1648797 - RNA, 17 nt, Human
auguccaagaagcccag

SEQ ID NO: 1648798 - RNA, 12 nt, Human
auguaucaauga

SEQ ID NO: 1648799 - RNA, 19 nt, Human
auguauauuuuauaucaau

SEQ ID NO: 1648800 - RNA, 13 nt, Human
uuuggggaagaac

SEQ ID NO: 1648801 - RNA, 21 nt, Human
uuugggguacccacugcucug

SEQ ID NO: 1648802 - RNA, 22 nt, Human
uuugggguacccacugcucugg

SEQ ID NO: 1648803 - RNA, 14 nt, Human
uuugggcugcccug

SEQ ID NO: 1648804 - RNA, 12 nt, Human
uuuggcugcuga

SEQ ID NO: 1648805 - RNA, 13 nt, Human
uuuggcugcugaa

SEQ ID NO: 1648806 - RNA, 18 nt, Human
uuugauucagacagcugc

SEQ ID NO: 1648807 - RNA, 22 nt, Human
uuuggauuggaugaauuccaaa

SEQ ID NO: 1648808 - RNA, 22 nt, Human
uuugcuggggccgaaagaacag

SEQ ID NO: 1648809 - RNA, 19 nt, Human
uuugcuggggccgaaagaa

SEQ ID NO: 1648810 - RNA, 19 nt, Human
uuugcuaagcauuccaacu

SEQ ID NO: 1648811 - RNA, 20 nt, Human
uuugcuggagcucugcccau

SEQ ID NO: 1648812 - RNA, 13 nt, Human
uuugagacagagu

SEQ ID NO: 1648813 - RNA, 16 nt, Human
uuugagaaauuaagua

SEQ ID NO: 1648814 - RNA, 15 nt, Human
uuugauucagacagc

SEQ ID NO: 1648815 - RNA, 15 nt, Human
uuugauccaagcugg

SEQ ID NO: 1648816 - RNA, 12 nt, Human
uuugaauuuugu

SEQ ID NO: 1648817 - RNA, 14 nt, Human
uuugaauuuugugu

SEQ ID NO: 1648818 - RNA, 23 nt, Human
uuucccucccuuccucuuuccau

SEQ ID NO: 1648819 - RNA, 18 nt, Human
uuugacaaagguaaauca

SEQ ID NO: 1648820 - RNA, 14 nt, Human
uuugacaaggggca

SEQ ID NO: 1648821 - RNA, 21 nt, Human
uuugaccucugcagcaauaaa

SEQ ID NO: 1648822 - RNA, 19 nt, Human
uuugaccucugcagcaaua

SEQ ID NO: 1648823 - RNA, 15 nt, Human
auucagccuggcuuc

SEQ ID NO: 1648824 - RNA, 22 nt, Human
auucaaacagucucaggaaauc

SEQ ID NO: 1648825 - RNA, 20 nt, Human
auuauaucugaggaauucug

SEQ ID NO: 1648826 - RNA, 21 nt, Human
auuauaucugaggaauucugu

SEQ ID NO: 1648827 - RNA, 22 nt, Human
auuauaucugaggaauucugua

SEQ ID NO: 1648828 - RNA, 16 nt, Human
auuauaugcuauuucu

SEQ ID NO: 1648829 - RNA, 18 nt, Human
auuauaucugaggaauuc

SEQ ID NO: 1648830 - RNA, 19 nt, Human
auuauaucugaggaauucu

SEQ ID NO: 1648831 - RNA, 19 nt, Human
auuauucaaaguugccuaa

SEQ ID NO: 1648832 - RNA, 22 nt, Human
auuauucaaaguugccuaaauc

SEQ ID NO: 1648833 - RNA, 18 nt, Human
auuauucaaaguugccua

SEQ ID NO: 1648834 - RNA, 24 nt, Human
auuauucaaaguugccuaaaucca

SEQ ID NO: 1648835 - RNA, 19 nt, Human
auuauucacugauuugaca

SEQ ID NO: 1648836 - RNA, 18 nt, Human
auuauaugcuauuucuau

SEQ ID NO: 1648837 - RNA, 17 nt, Human
auuauaugcuauuucua

SEQ ID NO: 1648838 - RNA, 19 nt, Human
auuauaugcuauuucuaua

SEQ ID NO: 1648839 - RNA, 20 nt, Human
auuauauggcuugaguuuaa

SEQ ID NO: 1648840 - RNA, 22 nt, Human
auuccccaggaggccagccuug

SEQ ID NO: 1648841 - RNA, 20 nt, Human
auuccccaggaggccagccu

SEQ ID NO: 1648842 - RNA, 18 nt, Human
auucccaagcucugcucc

SEQ ID NO: 1648843 - RNA, 19 nt, Human
auucccaagcucugcuccu

SEQ ID NO: 1648844 - RNA, 18 nt, Human
auuccagagaguggcucc

SEQ ID NO: 1648845 - RNA, 13 nt, Human
auuccacagcugc

SEQ ID NO: 1648846 - RNA, 12 nt, Human
auuccacagcug

SEQ ID NO: 1648847 - RNA, 17 nt, Human
auuccaagugauugaaa

SEQ ID NO: 1648848 - RNA, 12 nt, Human
auucacugauuu

SEQ ID NO: 1648849 - RNA, 17 nt, Human
auucacugauuugacau

SEQ ID NO: 1648850 - RNA, 14 nt, Human
auucagccuggcuu

SEQ ID NO: 1648851 - RNA, 13 nt, Human
auuagagaagaga

SEQ ID NO: 1648852 - RNA, 14 nt, Human
auuacuucugcuac

SEQ ID NO: 1648853 - RNA, 13 nt, Human
auuacuucugcua

SEQ ID NO: 1648854 - RNA, 15 nt, Human
auuacuguaagaaaa

SEQ ID NO: 1648855 - RNA, 16 nt, Human
auuacuguaagaaaau

SEQ ID NO: 1648856 - RNA, 20 nt, Human
uuuuuauauuuacuaaaaug

SEQ ID NO: 1648857 - RNA, 16 nt, Human
uuuuguuuuugucuua

SEQ ID NO: 1648858 - RNA, 15 nt, Human
uuuuguuuucauuau

SEQ ID NO: 1648859 - RNA, 15 nt, Human
uuuuggaauuuuccu

SEQ ID NO: 1648860 - RNA, 14 nt, Human
uuuugugaagcaaa

SEQ ID NO: 1648861 - RNA, 17 nt, Human
uuuuuauauuugaaaua

SEQ ID NO: 1648862 - RNA, 15 nt, Human
uuuuugaagcuguau

SEQ ID NO: 1648863 - RNA, 11 nt, Human
uuuuuguauuu

SEQ ID NO: 1648864 - RNA, 13 nt, Human
auuaaggaagaca

SEQ ID NO: 1648865 - RNA, 15 nt, Human
auuaaggauuuuaug

SEQ ID NO: 1648866 - RNA, 17 nt, Human
auuaaggauuuuaugcu

SEQ ID NO: 1648867 - RNA, 20 nt, Human
auuaaggauuuuaugcuuua

SEQ ID NO: 1648868 - RNA, 18 nt, Human
auuaaguacuauguauca

SEQ ID NO: 1648869 - RNA, 19 nt, Human
auuaaguacuauguaucaa

SEQ ID NO: 1648870 - RNA, 17 nt, Human
auuaaguaucugacauc

SEQ ID NO: 1648871 - RNA, 23 nt, Human
uuuuuggcauaacauaaaucugu

SEQ ID NO: 1648872 - RNA, 24 nt, Human
uuuuuggcauaacauaaaucugug

SEQ ID NO: 1648873 - RNA, 22 nt, Human
uuuuugggaaaagaaaagucaa

SEQ ID NO: 1648874 - RNA, 14 nt, Human
auuggaaacaaguc

SEQ ID NO: 1648875 - RNA, 13 nt, Human
auuggaaacaagu

SEQ ID NO: 1648876 - RNA, 16 nt, Human
auugcauuuccugaca

SEQ ID NO: 1648877 - RNA, 22 nt, Human
auuggcuagagguucaaagaua

SEQ ID NO: 1648878 - RNA, 20 nt, Human
auuggcuagagguucaaaga

SEQ ID NO: 1648879 - RNA, 19 nt, Human
auuggcuagagguucaaag

SEQ ID NO: 1648880 - RNA, 16 nt, Human
auuggagcucguggaa

SEQ ID NO: 1648881 - RNA, 17 nt, Human
auuggagcucgugggac

SEQ ID NO: 1648882 - RNA, 14 nt, Human
auuggggauucuua

SEQ ID NO: 1648883 - RNA, 23 nt, Human
auuggcuagagguucaaagauau

SEQ ID NO: 1648884 - RNA, 15 nt, Human
auuggggauucuuaa

SEQ ID NO: 1648885 - RNA, 16 nt, Human
auuggggauucuuaaa

SEQ ID NO: 1648886 - RNA, 20 nt, Human
auuggggauucuuaaaguug

SEQ ID NO: 1648887 - RNA, 21 nt, Human
auuggggauucuuaaaguuga

SEQ ID NO: 1648888 - RNA, 22 nt, Human
auuggggauucuuaaaguugaa

SEQ ID NO: 1648889 - RNA, 17 nt, Human
auugcaacaggcugggc

SEQ ID NO: 1648890 - RNA, 18 nt, Human
auugcaacaggcugggcu

SEQ ID NO: 1648891 - RNA, 19 nt, Human
auugcaacaggcugggcuu

SEQ ID NO: 1648892 - RNA, 12 nt, Human
auugcaccacug

SEQ ID NO: 1648893 - RNA, 15 nt, Human
auuuauaaacuuuuu

SEQ ID NO: 1648894 - RNA, 17 nt, Human
auuuaguguucauaaau

SEQ ID NO: 1648895 - RNA, 16 nt, Human
auuuaguguucauaaa

SEQ ID NO: 1648896 - RNA, 19 nt, Human
auuuacuucuuauacauuu

SEQ ID NO: 1648897 - RNA, 20 nt, Human
auuuacuucuuauacauuug

SEQ ID NO: 1648898 - RNA, 16 nt, Human
auuuaaauagcuuuuu

SEQ ID NO: 1648899 - RNA, 16 nt, Human
auuuacuaaaauggac

SEQ ID NO: 1648900 - RNA, 19 nt, Human
auuuacuaaaauggacugu

SEQ ID NO: 1648901 - RNA, 20 nt, Human
auuuacuaaaauggacugug

SEQ ID NO: 1648902 - RNA, 15 nt, Human
auuuaccacuugugu

SEQ ID NO: 1648903 - RNA, 22 nt, Human
auuuaccacuuguguuuugcaa

SEQ ID NO: 1648904 - RNA, 20 nt, Human
auuguagcauccuggaauau

SEQ ID NO: 1648905 - RNA, 17 nt, Human
auuguuuucaguguaca

SEQ ID NO: 1648906 - RNA, 15 nt, Human
auuguacuuugugcu

SEQ ID NO: 1648907 - RNA, 17 nt, Human
auuguagcauccuggaa

SEQ ID NO: 1648908 - RNA, 16 nt, Human
auuguaguccuguaau

SEQ ID NO: 1648909 - RNA, 14 nt, Human
auuuaaaaaaaauc

SEQ ID NO: 1648910 - RNA, 18 nt, Human
auuguuuucaguguacau

SEQ ID NO: 1648911 - RNA, 19 nt, Human
auuguuuucaguguacaug

SEQ ID NO: 1648912 - RNA, 17 nt, Human
auuuaaaaaaaaaccug

SEQ ID NO: 1648913 - RNA, 14 nt, Human
auuuauuggcuuuu

SEQ ID NO: 1648914 - RNA, 18 nt, Human
auuuauuggcuuuucuga

SEQ ID NO: 1648915 - RNA, 19 nt, Human
auuuauuacuguaagaaaa

SEQ ID NO: 1648916 - RNA, 20 nt, Human
auuuauuacuguaagaaaau

SEQ ID NO: 1648917 - RNA, 21 nt, Human
auuuccuaaauauauuuuaag

SEQ ID NO: 1648918 - RNA, 14 nt, Human
auuuccuaaauaua

SEQ ID NO: 1648919 - RNA, 17 nt, Human
auuuccguuaaaauacc

SEQ ID NO: 1648920 - RNA, 14 nt, Human
auuucccaaagcag

SEQ ID NO: 1648921 - RNA, 16 nt, Human
auuucccaaagcagug

SEQ ID NO: 1648922 - RNA, 20 nt, Human
auuuauuggcuuuucugauc

SEQ ID NO: 1648923 - RNA, 23 nt, Human
auuuauuggcuuuucugauccag

SEQ ID NO: 1648924 - RNA, 21 nt, Human
auuuauuuuaauaauguuuca

SEQ ID NO: 1648925 - RNA, 12 nt, Human
auuugguuuuca

SEQ ID NO: 1648926 - RNA, 14 nt, Human
auuugguuuucaca

SEQ ID NO: 1648927 - RNA, 21 nt, Human
auuuggugguuucagaaaugu

SEQ ID NO: 1648928 - RNA, 18 nt, Human
auuugauaugugaacagu

SEQ ID NO: 1648929 - RNA, 19 nt, Human
auuugauaugugaacaguu

SEQ ID NO: 1648930 - RNA, 22 nt, Human
auuugaggucuguucuuuccaa

SEQ ID NO: 1648931 - RNA, 21 nt, Human
auuugaggucuguucuuucca

SEQ ID NO: 1648932 - RNA, 16 nt, Human
auuucuuccacaagag

SEQ ID NO: 1648933 - RNA, 18 nt, Human
auuugaggucuguucuuu

SEQ ID NO: 1648934 - RNA, 17 nt, Human
auuugaggucuguucuu

SEQ ID NO: 1648935 - RNA, 15 nt, Human
auuugagcagggcuc

SEQ ID NO: 1648936 - RNA, 16 nt, Human
auuugagcagggcuca

SEQ ID NO: 1648937 - RNA, 15 nt, Human
auuugaauuuugugu

SEQ ID NO: 1648938 - RNA, 13 nt, Human
auuugaauuuugu

SEQ ID NO: 1648939 - RNA, 21 nt, Human
augccccgucccccucuggcu

SEQ ID NO: 1648940 - RNA, 18 nt, Human
augccccgucccccucug

SEQ ID NO: 1648941 - RNA, 15 nt, Human
augccccugaauuua

SEQ ID NO: 1648942 - RNA, 20 nt, Human
augccccugaauuuaaauag

SEQ ID NO: 1648943 - RNA, 17 nt, Human
augcccagccccuucug

SEQ ID NO: 1648944 - RNA, 21 nt, Human
augccaugaggaacaaggcaa

SEQ ID NO: 1648945 - RNA, 16 nt, Human
augcccagccccuucu

SEQ ID NO: 1648946 - RNA, 14 nt, Human
augccaucaauaaa

SEQ ID NO: 1648947 - RNA, 21 nt, Human
uuuaaugaaagacuguacaaa

SEQ ID NO: 1648948 - RNA, 23 nt, Human
uuuaaugaaagacuguacaaagu

SEQ ID NO: 1648949 - RNA, 13 nt, Human
augccucucucag

SEQ ID NO: 1648950 - RNA, 14 nt, Human
augccucucucagg

SEQ ID NO: 1648951 - RNA, 15 nt, Human
augccucucucaggc

SEQ ID NO: 1648952 - RNA, 20 nt, Human
augccuuuucccaacuccag

SEQ ID NO: 1648953 - RNA, 22 nt, Human
augccuuuucccaacuccagaa

SEQ ID NO: 1648954 - RNA, 14 nt, Human
augcgcaggcuggc

SEQ ID NO: 1648955 - RNA, 18 nt, Human
augcgcaggcuggcccug

SEQ ID NO: 1648956 - RNA, 20 nt, Human
augcgcaggcuggcccugcc

SEQ ID NO: 1648957 - RNA, 22 nt, Human
augcgcaggcuggcccugcccu

SEQ ID NO: 1648958 - RNA, 13 nt, Human
augcgcaggcugg

SEQ ID NO: 1648959 - RNA, 17 nt, Human
augccucucucaggcca

SEQ ID NO: 1648960 - RNA, 12 nt, Human
augcgugugugu

SEQ ID NO: 1648961 - RNA, 22 nt, Human
augcgugcauaccacuuuuguu

SEQ ID NO: 1648962 - RNA, 18 nt, Human
augcuacaggauuugaaa

SEQ ID NO: 1648963 - RNA, 16 nt, Human
augcgugugugugugu

SEQ ID NO: 1648964 - RNA, 22 nt, Human
uuuaccugaagucuuuguacag

SEQ ID NO: 1648965 - RNA, 18 nt, Human
uuuaccugaagucuuugu

SEQ ID NO: 1648966 - RNA, 16 nt, Human
uuuacugcagcuuugu

SEQ ID NO: 1648967 - RNA, 11 nt, Human
uuuacuuaaac

SEQ ID NO: 1648968 - RNA, 13 nt, Human
uuuacuucuuaua

SEQ ID NO: 1648969 - RNA, 14 nt, Human
uuuacuucuuauac

SEQ ID NO: 1648970 - RNA, 15 nt, Human
uuuacuucuuauaca

SEQ ID NO: 1648971 - RNA, 15 nt, Human
uuuagucuugucuca

SEQ ID NO: 1648972 - RNA, 17 nt, Human
uuuagggguagcauuug

SEQ ID NO: 1648973 - RNA, 17 nt, Human
uuuagucuugucucaga

SEQ ID NO: 1648974 - RNA, 23 nt, Human
uuuagucuugucucagauuuuau

SEQ ID NO: 1648975 - RNA, 21 nt, Human
uuuauaugcuucuguuuuaua

SEQ ID NO: 1648976 - RNA, 14 nt, Human
uuuaucagaauucu

SEQ ID NO: 1648977 - RNA, 14 nt, Human
augcuccuggccca

SEQ ID NO: 1648978 - RNA, 19 nt, Human
augcuccuggcccacugca

SEQ ID NO: 1648979 - RNA, 18 nt, Human
augcuggcuguuggcugg

SEQ ID NO: 1648980 - RNA, 23 nt, Human
augcuguauuuuaaaagaaugau

SEQ ID NO: 1648981 - RNA, 19 nt, Human
augcuggcuguuggcuggg

SEQ ID NO: 1648982 - RNA, 20 nt, Human
augcuggcuguuggcugggg

SEQ ID NO: 1648983 - RNA, 19 nt, Human
augcuguauuuuaaaagaa

SEQ ID NO: 1648984 - RNA, 22 nt, Human
augcuguauuuuaaaagaauga

SEQ ID NO: 1648985 - RNA, 14 nt, Human
auggaaggggcuga

SEQ ID NO: 1648986 - RNA, 17 nt, Human
auggaagacagcucuua

SEQ ID NO: 1648987 - RNA, 18 nt, Human
auggaagacagcucuuau

SEQ ID NO: 1648988 - RNA, 16 nt, Human
augcuucucacugcca

SEQ ID NO: 1648989 - RNA, 20 nt, Human
augcuucucacugccaugcc

SEQ ID NO: 1648990 - RNA, 21 nt, Human
augcuucuguuuuauaauuuu

SEQ ID NO: 1648991 - RNA, 21 nt, Human
uuucaugcuguucaugaaaga

SEQ ID NO: 1648992 - RNA, 19 nt, Human
uuucaugcuguucaugaaa

SEQ ID NO: 1648993 - RNA, 13 nt, Human
uuucagaaaugug

SEQ ID NO: 1648994 - RNA, 12 nt, Human
uuucagaaaugu

SEQ ID NO: 1648995 - RNA, 11 nt, Human
uuucagaaaug

SEQ ID NO: 1648996 - RNA, 16 nt, Human
uuucccuauuagagaa

SEQ ID NO: 1648997 - RNA, 21 nt, Human
uuucagaaagaaguggggaca

SEQ ID NO: 1648998 - RNA, 13 nt, Human
uuucacauuggaa

SEQ ID NO: 1648999 - RNA, 14 nt, Human
uuucacauuggaaa

SEQ ID NO: 1649000 - RNA, 19 nt, Human
uuucacauuggaaacaagu

SEQ ID NO: 1649001 - RNA, 12 nt, Human
uuucaaacuuua

SEQ ID NO: 1649002 - RNA, 19 nt, Human
uuucaaacauauauaacaa

SEQ ID NO: 1649003 - RNA, 15 nt, Human
uuucaaacuuuacua

SEQ ID NO: 1649004 - RNA, 14 nt, Human
uuuaagagacagcc

SEQ ID NO: 1649005 - RNA, 14 nt, Human
uuuaagaggcaggg

SEQ ID NO: 1649006 - RNA, 12 nt, Human
uuuaagagaaau

SEQ ID NO: 1649007 - RNA, 19 nt, Human
uuuaaggaugcuuguacau

SEQ ID NO: 1649008 - RNA, 21 nt, Human
uuuaagcuguuacugucuuca

SEQ ID NO: 1649009 - RNA, 22 nt, Human
uuuaaggaugcuuguacauaau

SEQ ID NO: 1649010 - RNA, 21 nt, Human
uuuaaggaugcuuguacauaa

SEQ ID NO: 1649011 - RNA, 20 nt, Human
uuuaaggaugcuuguacaua

SEQ ID NO: 1649012 - RNA, 17 nt, Human
uuuaaggguuuguggaa

SEQ ID NO: 1649013 - RNA, 20 nt, Human
uuuaaggguuuguggaaaau

SEQ ID NO: 1649014 - RNA, 22 nt, Human
uuuaaggguuuguggaaaauga

SEQ ID NO: 1649015 - RNA, 16 nt, Human
uuuaaugaaagacugu

SEQ ID NO: 1649016 - RNA, 23 nt, Human
uuuaaaaauacagauagauauau

SEQ ID NO: 1649017 - RNA, 21 nt, Human
uuuaaaaaauuaaucugggcc

SEQ ID NO: 1649018 - RNA, 14 nt, Human
uuuaaaugcugcuu

SEQ ID NO: 1649019 - RNA, 11 nt, Human
uuuaaaugcac

SEQ ID NO: 1649020 - RNA, 21 nt, Human
uuuaaauauaugcuaagucuu

SEQ ID NO: 1649021 - RNA, 23 nt, Human
augcacuuuguucuggcucuucc

SEQ ID NO: 1649022 - RNA, 17 nt, Human
augcagagguccacaac

SEQ ID NO: 1649023 - RNA, 18 nt, Human
augcagagguccacaaca

SEQ ID NO: 1649024 - RNA, 18 nt, Human
uuuaaaaaaauuccaagu

SEQ ID NO: 1649025 - RNA, 12 nt, Human
augcaaagcacu

SEQ ID NO: 1649026 - RNA, 13 nt, Human
augcaaagcacug

SEQ ID NO: 1649027 - RNA, 14 nt, Human
augcaaagcacuga

SEQ ID NO: 1649028 - RNA, 13 nt, Human
augauuucauuca

SEQ ID NO: 1649029 - RNA, 20 nt, Human
uuguucuugguuuguaaauu

SEQ ID NO: 1649030 - RNA, 19 nt, Human
uuguucuugguuuguaaau

SEQ ID NO: 1649031 - RNA, 17 nt, Human
uuguucuugguuuguaa

SEQ ID NO: 1649032 - RNA, 13 nt, Human
uugugaggaagcc

SEQ ID NO: 1649033 - RNA, 20 nt, Human
uugugauacaaugcugugcc

SEQ ID NO: 1649034 - RNA, 17 nt, Human
uugugaggaagccgcug

SEQ ID NO: 1649035 - RNA, 18 nt, Human
uugugaggaagccgcugg

SEQ ID NO: 1649036 - RNA, 15 nt, Human
uuguccccgacccuu

SEQ ID NO: 1649037 - RNA, 16 nt, Human
uuguccccgacccuug

SEQ ID NO: 1649038 - RNA, 18 nt, Human
uuguccccaccgcagaca

SEQ ID NO: 1649039 - RNA, 20 nt, Human
uuguccccaccgcagacagg

SEQ ID NO: 1649040 - RNA, 18 nt, Human
uugugaugucccaacuug

SEQ ID NO: 1649041 - RNA, 22 nt, Human
uugugaugucccaacuuguaaa

SEQ ID NO: 1649042 - RNA, 17 nt, Human
uugucacacacuuuggc

SEQ ID NO: 1649043 - RNA, 18 nt, Human
uugucacacacuuuggcu

SEQ ID NO: 1649044 - RNA, 21 nt, Human
uugucauauaagauucauauu

SEQ ID NO: 1649045 - RNA, 13 nt, Human
augaguccccugu

SEQ ID NO: 1649046 - RNA, 23 nt, Human
augaguccccuguuuguuucuga

SEQ ID NO: 1649047 - RNA, 20 nt, Human
uugucaauaaaauccauaca

SEQ ID NO: 1649048 - RNA, 22 nt, Human
augaggucagagccugcaguua

SEQ ID NO: 1649049 - RNA, 19 nt, Human
augaggucagagccugcag

SEQ ID NO: 1649050 - RNA, 20 nt, Human
augaggucagagccugcagu

SEQ ID NO: 1649051 - RNA, 21 nt, Human
augagguacaaccuguucugc

SEQ ID NO: 1649052 - RNA, 15 nt, Human
augaggucagagccu

SEQ ID NO: 1649053 - RNA, 16 nt, Human
augaggucagagccug

SEQ ID NO: 1649054 - RNA, 18 nt, Human
augaggucagagccugca

SEQ ID NO: 1649055 - RNA, 16 nt, Human
uuguagcauccuggaa

SEQ ID NO: 1649056 - RNA, 18 nt, Human
uuguagcauccuggaaua

SEQ ID NO: 1649057 - RNA, 17 nt, Human
augagguacugagagug

SEQ ID NO: 1649058 - RNA, 18 nt, Human
augagguacugagaguga

SEQ ID NO: 1649059 - RNA, 15 nt, Human
augagguacugagag

SEQ ID NO: 1649060 - RNA, 19 nt, Human
uugacaggauuauuggaaa

SEQ ID NO: 1649061 - RNA, 10 nt, Human
uugacagggc

SEQ ID NO: 1649062 - RNA, 12 nt, Human
uugacagggcac

SEQ ID NO: 1649063 - RNA, 19 nt, Human
uugacagggcacaccgggc

SEQ ID NO: 1649064 - RNA, 16 nt, Human
uugacaucaacugcau

SEQ ID NO: 1649065 - RNA, 13 nt, Human
uugacaugggaca

SEQ ID NO: 1649066 - RNA, 16 nt, Human
uugagcagggcucagc

SEQ ID NO: 1649067 - RNA, 12 nt, Human
uugagacagagu

SEQ ID NO: 1649068 - RNA, 12 nt, Human
uugagcagggcu

SEQ ID NO: 1649069 - RNA, 10 nt, Human
uugagacaga

SEQ ID NO: 1649070 - RNA, 11 nt, Human
uugagacagag

SEQ ID NO: 1649071 - RNA, 17 nt, Human
uugaccauucuccaccu

SEQ ID NO: 1649072 - RNA, 12 nt, Human
uugacuuuuuau

SEQ ID NO: 1649073 - RNA, 23 nt, Human
aucuaauauguaacaagccaccc

SEQ ID NO: 1649074 - RNA, 18 nt, Human
aucuagauacuguaucau

SEQ ID NO: 1649075 - RNA, 18 nt, Human
uugauagcacagacccug

SEQ ID NO: 1649076 - RNA, 17 nt, Human
uugauacuacaguuugu

SEQ ID NO: 1649077 - RNA, 21 nt, Human
uugagugcugucuccauguuu

SEQ ID NO: 1649078 - RNA, 19 nt, Human
aucuagauacuguaucaug

SEQ ID NO: 1649079 - RNA, 17 nt, Human
aucuaggaagacuuugg

SEQ ID NO: 1649080 - RNA, 18 nt, Human
aucuaggaagacuuugga

SEQ ID NO: 1649081 - RNA, 19 nt, Human
aucuaggaagacuuuggaa

SEQ ID NO: 1649082 - RNA, 14 nt, Human
aucucaaauuucua

SEQ ID NO: 1649083 - RNA, 23 nt, Human
aucucaaauaacuaaaagguaug

SEQ ID NO: 1649084 - RNA, 14 nt, Human
aucucaaauaacua

SEQ ID NO: 1649085 - RNA, 21 nt, Human
aucucaaauaacuaaaaggua

SEQ ID NO: 1649086 - RNA, 15 nt, Human
aucucaaaacugcac

SEQ ID NO: 1649087 - RNA, 19 nt, Human
aucucaaaacugcacuguc

SEQ ID NO: 1649088 - RNA, 20 nt, Human
aucucaaaacugcacuguca

SEQ ID NO: 1649089 - RNA, 14 nt, Human
uugcaugaggcuag

SEQ ID NO: 1649090 - RNA, 21 nt, Human
uugcaccacugcacuccagcc

SEQ ID NO: 1649091 - RNA, 14 nt, Human
uugcaauggcagcc

SEQ ID NO: 1649092 - RNA, 13 nt, Human
uugcccaggcagg

SEQ ID NO: 1649093 - RNA, 14 nt, Human
uugcccaggcaggu

SEQ ID NO: 1649094 - RNA, 16 nt, Human
uugcccaggcaggucu

SEQ ID NO: 1649095 - RNA, 18 nt, Human
uugcccaggcaggucuug

SEQ ID NO: 1649096 - RNA, 11 nt, Human
uugcccaggcu

SEQ ID NO: 1649097 - RNA, 12 nt, Human
uugcccaggcug

SEQ ID NO: 1649098 - RNA, 14 nt, Human
uugcccaggcuggc

SEQ ID NO: 1649099 - RNA, 23 nt, Human
uugcccaggcuggcgugcagugg

SEQ ID NO: 1649100 - RNA, 16 nt, Human
aucugaagucagaucu

SEQ ID NO: 1649101 - RNA, 17 nt, Human
aucugaagucagaucug

SEQ ID NO: 1649102 - RNA, 18 nt, Human
aucugaagucagaucugc

SEQ ID NO: 1649103 - RNA, 23 nt, Human
aucugaagucagaucugccuaag

SEQ ID NO: 1649104 - RNA, 16 nt, Human
aucucuuguuuaaauu

SEQ ID NO: 1649105 - RNA, 12 nt, Human
aucugaaaaugu

SEQ ID NO: 1649106 - RNA, 15 nt, Human
aucucaccuccugcu

SEQ ID NO: 1649107 - RNA, 16 nt, Human
aucucaccuccugcug

SEQ ID NO: 1649108 - RNA, 17 nt, Human
aucucaaauuucuaaau

SEQ ID NO: 1649109 - RNA, 16 nt, Human
aucucaaauuucuaaa

SEQ ID NO: 1649110 - RNA, 23 nt, Human
aucucacacaugagcaucaggcc

SEQ ID NO: 1649111 - RNA, 21 nt, Human
uugauuaaauucuugcaaagu

SEQ ID NO: 1649112 - RNA, 20 nt, Human
uugauuaaauucuugcaaag

SEQ ID NO: 1649113 - RNA, 16 nt, Human
uugauuaaauucuugc

SEQ ID NO: 1649114 - RNA, 15 nt, Human
uugauuaaauucuug

SEQ ID NO: 1649115 - RNA, 16 nt, Human
uugcaacuuuguauaa

SEQ ID NO: 1649116 - RNA, 17 nt, Human
uugcaacuuuguauaaa

SEQ ID NO: 1649117 - RNA, 18 nt, Human
uugcaacuuuguauaaaa

SEQ ID NO: 1649118 - RNA, 22 nt, Human
uugcaagccagauuuuccugaa

SEQ ID NO: 1649119 - RNA, 23 nt, Human
uugauguucuuucacccuuuucu

SEQ ID NO: 1649120 - RNA, 22 nt, Human
uuguaagcaugcacaaauucug

SEQ ID NO: 1649121 - RNA, 12 nt, Human
uuguaaugaaaa

SEQ ID NO: 1649122 - RNA, 13 nt, Human
uuguaaauuguca

SEQ ID NO: 1649123 - RNA, 20 nt, Human
uugguuuucacauuggaaac

SEQ ID NO: 1649124 - RNA, 14 nt, Human
uugguuuguaaauu

SEQ ID NO: 1649125 - RNA, 17 nt, Human
uuggugucgggcaugac

SEQ ID NO: 1649126 - RNA, 18 nt, Human
uuggugucgggcaugaca

SEQ ID NO: 1649127 - RNA, 19 nt, Human
uuggugucgggcaugacac

SEQ ID NO: 1649128 - RNA, 19 nt, Human
uuggugguuucagaaaugu

SEQ ID NO: 1649129 - RNA, 18 nt, Human
uuggugguuucagaaaug

SEQ ID NO: 1649130 - RNA, 16 nt, Human
augaaugucaguguga

SEQ ID NO: 1649131 - RNA, 18 nt, Human
augaaugucagugugacu

SEQ ID NO: 1649132 - RNA, 23 nt, Human
augaaccacaucuugcucugcug

SEQ ID NO: 1649133 - RNA, 22 nt, Human
augaaauacuguuugagguuuu

SEQ ID NO: 1649134 - RNA, 14 nt, Human
augaagcaaugcuu

SEQ ID NO: 1649135 - RNA, 15 nt, Human
augaagcaaugcuuc

SEQ ID NO: 1649136 - RNA, 17 nt, Human
augaaugaaacauuuug

SEQ ID NO: 1649137 - RNA, 12 nt, Human
aucugucauuug

SEQ ID NO: 1649138 - RNA, 17 nt, Human
aucugucauuugagcag

SEQ ID NO: 1649139 - RNA, 22 nt, Human
aucugucauuugagcagggcuc

SEQ ID NO: 1649140 - RNA, 17 nt, Human
aucuugcucugcugaca

SEQ ID NO: 1649141 - RNA, 15 nt, Human
aucuugcucugcuga

SEQ ID NO: 1649142 - RNA, 16 nt, Human
aucuugcucugcugac

SEQ ID NO: 1649143 - RNA, 15 nt, Human
aucuuauaauuuaaa

SEQ ID NO: 1649144 - RNA, 14 nt, Human
aucuugcucugcug

SEQ ID NO: 1649145 - RNA, 16 nt, Human
aucuuauaauuuaaaa

SEQ ID NO: 1649146 - RNA, 13 nt, Human
uugcuuuguaugc

SEQ ID NO: 1649147 - RNA, 15 nt, Human
uugcuuugugauuuu

SEQ ID NO: 1649148 - RNA, 14 nt, Human
uugcucuugaugcc

SEQ ID NO: 1649149 - RNA, 17 nt, Human
uugcucuugaugccugg

SEQ ID NO: 1649150 - RNA, 18 nt, Human
uugcucuugaugccuggc

SEQ ID NO: 1649151 - RNA, 12 nt, Human
aucuuuaaaaua

SEQ ID NO: 1649152 - RNA, 15 nt, Human
aucuuuaaaauacac

SEQ ID NO: 1649153 - RNA, 16 nt, Human
uugcuuuuaaaaucca

SEQ ID NO: 1649154 - RNA, 16 nt, Human
uugcuuuguaugcacu

SEQ ID NO: 1649155 - RNA, 20 nt, Human
uugcuuugugauuuuuguaa

SEQ ID NO: 1649156 - RNA, 12 nt, Human
uuggaaaauaaa

SEQ ID NO: 1649157 - RNA, 15 nt, Human
uuggaaaauaaauca

SEQ ID NO: 1649158 - RNA, 17 nt, Human
uuggaaaauaaauuauu

SEQ ID NO: 1649159 - RNA, 17 nt, Human
uuggagaagaacugaaa

SEQ ID NO: 1649160 - RNA, 22 nt, Human
uuggagaagaacugaaaucaua

SEQ ID NO: 1649161 - RNA, 15 nt, Human
uuggagaagaacuga

SEQ ID NO: 1649162 - RNA, 18 nt, Human
auauauucagccuggcuu

SEQ ID NO: 1649163 - RNA, 17 nt, Human
auaucuauauuuuacau

SEQ ID NO: 1649164 - RNA, 16 nt, Human
auaucuauauuuuaca

SEQ ID NO: 1649165 - RNA, 20 nt, Human
auaucuauauuuuacauaaa

SEQ ID NO: 1649166 - RNA, 22 nt, Human
auaucuauauuuuacauaaauu

SEQ ID NO: 1649167 - RNA, 21 nt, Human
uucaucauccuaagcuauuca

SEQ ID NO: 1649168 - RNA, 18 nt, Human
uucaucauccuaagcuau

SEQ ID NO: 1649169 - RNA, 16 nt, Human
uucauauuuacuucuu

SEQ ID NO: 1649170 - RNA, 21 nt, Human
uucauauuuacuucuuauaca

SEQ ID NO: 1649171 - RNA, 16 nt, Human
uucauaccuacaugua

SEQ ID NO: 1649172 - RNA, 19 nt, Human
uucauaccuacauguauuu

SEQ ID NO: 1649173 - RNA, 14 nt, Human
uucagccugccuuc

SEQ ID NO: 1649174 - RNA, 14 nt, Human
uucaguaauaacuc

SEQ ID NO: 1649175 - RNA, 13 nt, Human
auaugauucaaau

SEQ ID NO: 1649176 - RNA, 22 nt, Human
auaugauucaaaugucuauaaa

SEQ ID NO: 1649177 - RNA, 20 nt, Human
auaugauuuaaaucagccgu

SEQ ID NO: 1649178 - RNA, 12 nt, Human
auaugauucaaa

SEQ ID NO: 1649179 - RNA, 19 nt, Human
auaucugaggaauucugua

SEQ ID NO: 1649180 - RNA, 20 nt, Human
auaucugaggaauucuguau

SEQ ID NO: 1649181 - RNA, 21 nt, Human
auaucugaggaauucuguaua

SEQ ID NO: 1649182 - RNA, 22 nt, Human
auaucugaggaauucuguauag

SEQ ID NO: 1649183 - RNA, 23 nt, Human
auaucugaggaauucuguauaga

SEQ ID NO: 1649184 - RNA, 15 nt, Human
auaucugaggaauuc

SEQ ID NO: 1649185 - RNA, 16 nt, Human
auaucugaggaauucu

SEQ ID NO: 1649186 - RNA, 17 nt, Human
auaucugaggaauucug

SEQ ID NO: 1649187 - RNA, 18 nt, Human
auaucugaggaauucugu

SEQ ID NO: 1649188 - RNA, 22 nt, Human
auaucugaaaauguauguguaa

SEQ ID NO: 1649189 - RNA, 13 nt, Human
auaugugaacagu

SEQ ID NO: 1649190 - RNA, 14 nt, Human
auaugucaagccau

SEQ ID NO: 1649191 - RNA, 13 nt, Human
auaugcacacauu

SEQ ID NO: 1649192 - RNA, 23 nt, Human
auaugcaaagcacugacuucuaa

SEQ ID NO: 1649193 - RNA, 16 nt, Human
auaugcaaagcacuga

SEQ ID NO: 1649194 - RNA, 19 nt, Human
uucagccaagaauucuuaa

SEQ ID NO: 1649195 - RNA, 21 nt, Human
uucagcaaaaauauuuuauga

SEQ ID NO: 1649196 - RNA, 17 nt, Human
uucagaucucuaacuuc

SEQ ID NO: 1649197 - RNA, 13 nt, Human
uucacugcuggcu

SEQ ID NO: 1649198 - RNA, 15 nt, Human
uucacugcuggcugc

SEQ ID NO: 1649199 - RNA, 16 nt, Human
uucacugcuggcugcc

SEQ ID NO: 1649200 - RNA, 17 nt, Human
uucacugcuggcugccu

SEQ ID NO: 1649201 - RNA, 18 nt, Human
uucacugcuggcugccuu

SEQ ID NO: 1649202 - RNA, 19 nt, Human
uucacugcuggcugccuua

SEQ ID NO: 1649203 - RNA, 15 nt, Human
uucagaaagaagugg

SEQ ID NO: 1649204 - RNA, 17 nt, Human
auagucaaauuguguga

SEQ ID NO: 1649205 - RNA, 18 nt, Human
auagucaaauugugugaa

SEQ ID NO: 1649206 - RNA, 17 nt, Human
auauaaaugguuaaaag

SEQ ID NO: 1649207 - RNA, 17 nt, Human
auauauaacaaugcugu

SEQ ID NO: 1649208 - RNA, 18 nt, Human
auauauaacaaugcugua

SEQ ID NO: 1649209 - RNA, 19 nt, Human
auauauaacaaugcuguau

SEQ ID NO: 1649210 - RNA, 12 nt, Human
auauaacaaugc

SEQ ID NO: 1649211 - RNA, 15 nt, Human
auauaacaaugcugu

SEQ ID NO: 1649212 - RNA, 17 nt, Human
auauaacaaugcuguau

SEQ ID NO: 1649213 - RNA, 19 nt, Human
auauaagcuuguauuccuu

SEQ ID NO: 1649214 - RNA, 18 nt, Human
auagccugccucuucucu

SEQ ID NO: 1649215 - RNA, 13 nt, Human
auaagauaaaugu

SEQ ID NO: 1649216 - RNA, 17 nt, Human
auaagauaaaugugcug

SEQ ID NO: 1649217 - RNA, 17 nt, Human
auagcuacuaauuuuaa

SEQ ID NO: 1649218 - RNA, 14 nt, Human
auagcuacuaauuu

SEQ ID NO: 1649219 - RNA, 12 nt, Human
auagcugggacu

SEQ ID NO: 1649220 - RNA, 22 nt, Human
auagcucaggugucccugcacu

SEQ ID NO: 1649221 - RNA, 20 nt, Human
auagcucaggugucccugca

SEQ ID NO: 1649222 - RNA, 21 nt, Human
auagcucaggugucccugcac

SEQ ID NO: 1649223 - RNA, 18 nt, Human
auagcuagacuggugacu

SEQ ID NO: 1649224 - RNA, 19 nt, Human
auagcuagacuggugacug

SEQ ID NO: 1649225 - RNA, 23 nt, Human
auagcuagacuggugacugauuc

SEQ ID NO: 1649226 - RNA, 19 nt, Human
auagcucaggugucccugc

SEQ ID NO: 1649227 - RNA, 14 nt, Human
auagcuagacuggu

SEQ ID NO: 1649228 - RNA, 15 nt, Human
auagcuagacuggug

SEQ ID NO: 1649229 - RNA, 16 nt, Human
auagcuagacugguga

SEQ ID NO: 1649230 - RNA, 18 nt, Human
auagcuacuaauuuuaaa

SEQ ID NO: 1649231 - RNA, 17 nt, Human
uuauuuagcaccaggga

SEQ ID NO: 1649232 - RNA, 15 nt, Human
uuauuuaguauuuau

SEQ ID NO: 1649233 - RNA, 17 nt, Human
uuauuuauaaucacuuu

SEQ ID NO: 1649234 - RNA, 16 nt, Human
uuauuuaguuccuuga

SEQ ID NO: 1649235 - RNA, 18 nt, Human
uuauuuaaugaaagacug

SEQ ID NO: 1649236 - RNA, 22 nt, Human
uuauuuaaugaaagacuguaca

SEQ ID NO: 1649237 - RNA, 14 nt, Human
uuauuuaaauuuua

SEQ ID NO: 1649238 - RNA, 23 nt, Human
auagcuggucuuauuuguaaagc

SEQ ID NO: 1649239 - RNA, 22 nt, Human
auagcuggucuuauuuguaaag

SEQ ID NO: 1649240 - RNA, 17 nt, Human
auagcugggacuacagg

SEQ ID NO: 1649241 - RNA, 17 nt, Human
uuauuguuuaaaaucau

SEQ ID NO: 1649242 - RNA, 22 nt, Human
auaggcaccuaccaccacgccc

SEQ ID NO: 1649243 - RNA, 17 nt, Human
auaggcacaggaaacca

SEQ ID NO: 1649244 - RNA, 22 nt, Human
auaggaauugacccacaagaaa

SEQ ID NO: 1649245 - RNA, 22 nt, Human
uucaccauguuggccaggcugc

SEQ ID NO: 1649246 - RNA, 22 nt, Human
uucaccauguuggccaggcugg

SEQ ID NO: 1649247 - RNA, 19 nt, Human
auaggaacuuaaauaaugu

SEQ ID NO: 1649248 - RNA, 21 nt, Human
auaggaauugacccacaagaa

SEQ ID NO: 1649249 - RNA, 13 nt, Human
uucacaguucucu

SEQ ID NO: 1649250 - RNA, 14 nt, Human
uucacauuggaaac

SEQ ID NO: 1649251 - RNA, 22 nt, Human
uucaccacaugugcacaugcac

SEQ ID NO: 1649252 - RNA, 19 nt, Human
uucacauuguauucagagu

SEQ ID NO: 1649253 - RNA, 13 nt, Human
uucacauuggaaa

SEQ ID NO: 1649254 - RNA, 17 nt, Human
uucacauauugauuucc

SEQ ID NO: 1649255 - RNA, 20 nt, Human
uucaagugauucucaugccu

SEQ ID NO: 1649256 - RNA, 22 nt, Human
uucaagugauucucaugccuca

SEQ ID NO: 1649257 - RNA, 16 nt, Human
uucaaggauccugagc

SEQ ID NO: 1649258 - RNA, 18 nt, Human
uucaaggauccugagcca

SEQ ID NO: 1649259 - RNA, 19 nt, Human
uucaaggauccugagccag

SEQ ID NO: 1649260 - RNA, 21 nt, Human
uucaaggauccugagccagau

SEQ ID NO: 1649261 - RNA, 15 nt, Human
uucaaggauccugag

SEQ ID NO: 1649262 - RNA, 16 nt, Human
uucaaaauuguuacaa

SEQ ID NO: 1649263 - RNA, 15 nt, Human
uucaaacauauauaa

SEQ ID NO: 1649264 - RNA, 23 nt, Human
uucugccgcagcccugcagaggg

SEQ ID NO: 1649265 - RNA, 10 nt, Human
uucugggaca

SEQ ID NO: 1649266 - RNA, 11 nt, Human
uucugggacac

SEQ ID NO: 1649267 - RNA, 22 nt, Human
uucugggacacaguucaauucu

SEQ ID NO: 1649268 - RNA, 12 nt, Human
uucuggugugaa

SEQ ID NO: 1649269 - RNA, 14 nt, Human
uucuggugugaacu

SEQ ID NO: 1649270 - RNA, 20 nt, Human
aucauugaaaucuuuuugcu

SEQ ID NO: 1649271 - RNA, 19 nt, Human
aucauugaaaucuuuuugc

SEQ ID NO: 1649272 - RNA, 15 nt, Human
uucugaaagggacgc

SEQ ID NO: 1649273 - RNA, 14 nt, Human
uucugaagaagaug

SEQ ID NO: 1649274 - RNA, 23 nt, Human
uucugcaucagcugcugaaacaa

SEQ ID NO: 1649275 - RNA, 21 nt, Human
uucugaaauuuccugggagcu

SEQ ID NO: 1649276 - RNA, 12 nt, Human
uucugaagaaga

SEQ ID NO: 1649277 - RNA, 13 nt, Human
uucugaagaagau

SEQ ID NO: 1649278 - RNA, 17 nt, Human
aucccaggauguacaag

SEQ ID NO: 1649279 - RNA, 17 nt, Human
auccaggguggugguga

SEQ ID NO: 1649280 - RNA, 15 nt, Human
auccagguucagcuu

SEQ ID NO: 1649281 - RNA, 16 nt, Human
auccagguucagcuug

SEQ ID NO: 1649282 - RNA, 17 nt, Human
aucccauaugccugggc

SEQ ID NO: 1649283 - RNA, 16 nt, Human
aucccauaugccuggg

SEQ ID NO: 1649284 - RNA, 13 nt, Human
aucccucccucca

SEQ ID NO: 1649285 - RNA, 11 nt, Human
aucccucccuc

SEQ ID NO: 1649286 - RNA, 23 nt, Human
aucccucccuccaccucccugca

SEQ ID NO: 1649287 - RNA, 14 nt, Human
aucccucccuccac

SEQ ID NO: 1649288 - RNA, 20 nt, Human
uucucacagcuccaagaauu

SEQ ID NO: 1649289 - RNA, 19 nt, Human
uucucagaaucucaaauaa

SEQ ID NO: 1649290 - RNA, 22 nt, Human
uucucagaaucucaaauaacua

SEQ ID NO: 1649291 - RNA, 23 nt, Human
uucucagaaucucaaauaacuaa

SEQ ID NO: 1649292 - RNA, 13 nt, Human
uucuaggccuggg

SEQ ID NO: 1649293 - RNA, 23 nt, Human
uucuaggacugaauuaugaaacu

SEQ ID NO: 1649294 - RNA, 14 nt, Human
uucucaacuccaaa

SEQ ID NO: 1649295 - RNA, 18 nt, Human
uucucaacuccaaacuga

SEQ ID NO: 1649296 - RNA, 14 nt, Human
aucauucauuuucu

SEQ ID NO: 1649297 - RNA, 22 nt, Human
aucauuaaagccugaguuugcu

SEQ ID NO: 1649298 - RNA, 14 nt, Human
aucauugaaaucuu

SEQ ID NO: 1649299 - RNA, 15 nt, Human
aucauugaaaucuuu

SEQ ID NO: 1649300 - RNA, 23 nt, Human
aucauaguggcuuaaaacaacac

SEQ ID NO: 1649301 - RNA, 15 nt, Human
aucaucaguauugaa

SEQ ID NO: 1649302 - RNA, 19 nt, Human
aucaucaguauugaagcau

SEQ ID NO: 1649303 - RNA, 17 nt, Human
aucaucaguauugaagc

SEQ ID NO: 1649304 - RNA, 16 nt, Human
aucagcacgauuucug

SEQ ID NO: 1649305 - RNA, 15 nt, Human
aucagcacgauuucu

SEQ ID NO: 1649306 - RNA, 18 nt, Human
aucagcacgauuucuguu

SEQ ID NO: 1649307 - RNA, 17 nt, Human
aucagcacgauuucugu

SEQ ID NO: 1649308 - RNA, 15 nt, Human
aucaguauugaagca

SEQ ID NO: 1649309 - RNA, 22 nt, Human
aucaguauugaagcauuuuaua

SEQ ID NO: 1649310 - RNA, 18 nt, Human
auauuuucaugcuguuca

SEQ ID NO: 1649311 - RNA, 21 nt, Human
auauuuucaugcuguucauga

SEQ ID NO: 1649312 - RNA, 19 nt, Human
auauuuucaacgcagcccu

SEQ ID NO: 1649313 - RNA, 20 nt, Human
auauuuucaacgcagcccug

SEQ ID NO: 1649314 - RNA, 15 nt, Human
uuccuucagugccuu

SEQ ID NO: 1649315 - RNA, 11 nt, Human
uuccuucagug

SEQ ID NO: 1649316 - RNA, 14 nt, Human
uuccuucagugccu

SEQ ID NO: 1649317 - RNA, 16 nt, Human
uuccugggagcuuuug

SEQ ID NO: 1649318 - RNA, 15 nt, Human
uuccugggagcuuuu

SEQ ID NO: 1649319 - RNA, 11 nt, Human
uuccucuuucc

SEQ ID NO: 1649320 - RNA, 17 nt, Human
uuccuguucccaugaga

SEQ ID NO: 1649321 - RNA, 17 nt, Human
uuccuaauccucuagga

SEQ ID NO: 1649322 - RNA, 17 nt, Human
auauuuuaugauccagc

SEQ ID NO: 1649323 - RNA, 22 nt, Human
auauuuuaugauccagcagauu

SEQ ID NO: 1649324 - RNA, 12 nt, Human
auauuuuaugau

SEQ ID NO: 1649325 - RNA, 13 nt, Human
auauuuuaugauc

SEQ ID NO: 1649326 - RNA, 14 nt, Human
auauuuuaagacga

SEQ ID NO: 1649327 - RNA, 13 nt, Human
uuccuaauccucu

SEQ ID NO: 1649328 - RNA, 15 nt, Human
uuccuaauccucuag

SEQ ID NO: 1649329 - RNA, 21 nt, Human
uuccuuuuaaaacacuuccau

SEQ ID NO: 1649330 - RNA, 22 nt, Human
uuccuuuuaaaacacuuccaua

SEQ ID NO: 1649331 - RNA, 20 nt, Human
uuccuuuuaaaacacuucca

SEQ ID NO: 1649332 - RNA, 22 nt, Human
aucacggcucacugcagccuca

SEQ ID NO: 1649333 - RNA, 13 nt, Human
auauuuucauucu

SEQ ID NO: 1649334 - RNA, 18 nt, Human
aucaaguauuauaccuuu

SEQ ID NO: 1649335 - RNA, 14 nt, Human
aucaaguauuauac

SEQ ID NO: 1649336 - RNA, 13 nt, Human
aucaaguauuaua

SEQ ID NO: 1649337 - RNA, 21 nt, Human
aucaagaugugacauguuuua

SEQ ID NO: 1649338 - RNA, 14 nt, Human
auauuugaaauauu

SEQ ID NO: 1649339 - RNA, 19 nt, Human
auauuugaaauauugacuu

SEQ ID NO: 1649340 - RNA, 23 nt, Human
auauuugaaauauugacuuuuua

SEQ ID NO: 1649341 - RNA, 12 nt, Human
auauuuuaacuu

SEQ ID NO: 1649342 - RNA, 22 nt, Human
auauuuguaucacaaaucuuaa

SEQ ID NO: 1649343 - RNA, 20 nt, Human
auauuguuuucaguguacau

SEQ ID NO: 1649344 - RNA, 13 nt, Human
auauuugaaauau

SEQ ID NO: 1649345 - RNA, 17 nt, Human
auauugcugauggugca

SEQ ID NO: 1649346 - RNA, 21 nt, Human
auauugcugauggugcaauga

SEQ ID NO: 1649347 - RNA, 22 nt, Human
auauucucacagcuccaagaau

SEQ ID NO: 1649348 - RNA, 23 nt, Human
auauucucacagcuccaagaauu

SEQ ID NO: 1649349 - RNA, 16 nt, Human
auauucuguuggccag

SEQ ID NO: 1649350 - RNA, 15 nt, Human
auauugauccagaaa

SEQ ID NO: 1649351 - RNA, 22 nt, Human
auauugauccagaaagaaaacu

SEQ ID NO: 1649352 - RNA, 22 nt, Human
auauugauuuccguuaaaauac

SEQ ID NO: 1649353 - RNA, 21 nt, Human
auauugauuuccguuaaaaua

SEQ ID NO: 1649354 - RNA, 19 nt, Human
auauugauuuccguuaaaa

SEQ ID NO: 1649355 - RNA, 15 nt, Human
auauuaaagccaugu

SEQ ID NO: 1649356 - RNA, 18 nt, Human
auauuaaagccauguuua

SEQ ID NO: 1649357 - RNA, 23 nt, Human
auauuaaagccauguuuauuaca

SEQ ID NO: 1649358 - RNA, 24 nt, Human
auauuaagaaagacuaucuaaaug

SEQ ID NO: 1649359 - RNA, 22 nt, Human
auauuaaggaagacaaugugaa

SEQ ID NO: 1649360 - RNA, 20 nt, Human
auauguuuuaagaggcaggg

SEQ ID NO: 1649361 - RNA, 18 nt, Human
auauguuuuaagaggcag

SEQ ID NO: 1649362 - RNA, 15 nt, Human
agugaggcucugccc

SEQ ID NO: 1649363 - RNA, 14 nt, Human
agugaggcucugcc

SEQ ID NO: 1649364 - RNA, 16 nt, Human
agugaggcucugcccu

SEQ ID NO: 1649365 - RNA, 17 nt, Human
agugaggcucugcccuu

SEQ ID NO: 1649366 - RNA, 14 nt, Human
agugagggauuauc

SEQ ID NO: 1649367 - RNA, 21 nt, Human
agugaggcucugcccuugguu

SEQ ID NO: 1649368 - RNA, 19 nt, Human
agugaggcucugcccuugg

SEQ ID NO: 1649369 - RNA, 20 nt, Human
agugaggcucugcccuuggu

SEQ ID NO: 1649370 - RNA, 15 nt, Human
agugagucgaggaca

SEQ ID NO: 1649371 - RNA, 21 nt, Human
agugaguugauagcacagacc

SEQ ID NO: 1649372 - RNA, 21 nt, Human
ugugcccccauguaagcaccc

SEQ ID NO: 1649373 - RNA, 21 nt, Human
uguggaguucaucuugaauug

SEQ ID NO: 1649374 - RNA, 18 nt, Human
ugugcugggguuaucuga

SEQ ID NO: 1649375 - RNA, 17 nt, Human
uguggaguucaucuuga

SEQ ID NO: 1649376 - RNA, 20 nt, Human
ugugccagauuuaugcauau

SEQ ID NO: 1649377 - RNA, 20 nt, Human
ugugccagguuuuuggucug

SEQ ID NO: 1649378 - RNA, 12 nt, Human
ugugccaugugc

SEQ ID NO: 1649379 - RNA, 16 nt, Human
ugugccaugugccagg

SEQ ID NO: 1649380 - RNA, 18 nt, Human
ugugccagauuuaugcau

SEQ ID NO: 1649381 - RNA, 15 nt, Human
agugaaagaaaauaa

SEQ ID NO: 1649382 - RNA, 16 nt, Human
agugaacaaauuuaca

SEQ ID NO: 1649383 - RNA, 20 nt, Human
agugaacaaauuuacagaga

SEQ ID NO: 1649384 - RNA, 18 nt, Human
ugugaugagaggaaauca

SEQ ID NO: 1649385 - RNA, 19 nt, Human
ugugauggggcccugccuc

SEQ ID NO: 1649386 - RNA, 20 nt, Human
ugugauggggcccugccucc

SEQ ID NO: 1649387 - RNA, 15 nt, Human
agucucuucuccacu

SEQ ID NO: 1649388 - RNA, 16 nt, Human
agucucuucuccacug

SEQ ID NO: 1649389 - RNA, 18 nt, Human
agucucuucuccacugga

SEQ ID NO: 1649390 - RNA, 17 nt, Human
agucucuucuccacugg

SEQ ID NO: 1649391 - RNA, 14 nt, Human
agucuuuguacaga

SEQ ID NO: 1649392 - RNA, 13 nt, Human
agugaaacugcuu

SEQ ID NO: 1649393 - RNA, 21 nt, Human
agugaaacugcuuguuuccua

SEQ ID NO: 1649394 - RNA, 24 nt, Human
agugaaacugcuuguuuccuagca

SEQ ID NO: 1649395 - RNA, 13 nt, Human
agucucuucucca

SEQ ID NO: 1649396 - RNA, 14 nt, Human
agucucuucuccac

SEQ ID NO: 1649397 - RNA, 15 nt, Human
ugugacugaauuucu

SEQ ID NO: 1649398 - RNA, 16 nt, Human
ugugacugaauuucuu

SEQ ID NO: 1649399 - RNA, 15 nt, Human
ugugagaugcuagaa

SEQ ID NO: 1649400 - RNA, 19 nt, Human
ugugagaugcuagaacucc

SEQ ID NO: 1649401 - RNA, 22 nt, Human
ugugagaugcuagaacucccuu

SEQ ID NO: 1649402 - RNA, 22 nt, Human
agucucaggaaaucaaauaugc

SEQ ID NO: 1649403 - RNA, 14 nt, Human
ugugaacuugaaau

SEQ ID NO: 1649404 - RNA, 15 nt, Human
ugugaacuugaaauu

SEQ ID NO: 1649405 - RNA, 16 nt, Human
ugugaacuugaaauuu

SEQ ID NO: 1649406 - RNA, 12 nt, Human
ugugaacuugaa

SEQ ID NO: 1649407 - RNA, 20 nt, Human
ugugaacaguuguguuugaa

SEQ ID NO: 1649408 - RNA, 19 nt, Human
ugugaaccaccacacccag

SEQ ID NO: 1649409 - RNA, 20 nt, Human
ugugaaccaccacacccagc

SEQ ID NO: 1649410 - RNA, 21 nt, Human
ugugaaccaccacacccagcc

SEQ ID NO: 1649411 - RNA, 14 nt, Human
ugugaagagaacca

SEQ ID NO: 1649412 - RNA, 12 nt, Human
ugugaaauuauu

SEQ ID NO: 1649413 - RNA, 15 nt, Human
ugugaaaggaaagag

SEQ ID NO: 1649414 - RNA, 18 nt, Human
ugugaaaggaaagaggcu

SEQ ID NO: 1649415 - RNA, 21 nt, Human
ugugaaaggaaagagggaggu

SEQ ID NO: 1649416 - RNA, 14 nt, Human
uguuacaaauugua

SEQ ID NO: 1649417 - RNA, 17 nt, Human
aguggugcgaucugggu

SEQ ID NO: 1649418 - RNA, 23 nt, Human
aguggugguuuucuguucuuucu

SEQ ID NO: 1649419 - RNA, 21 nt, Human
aguggugguuuucuguucuuu

SEQ ID NO: 1649420 - RNA, 20 nt, Human
aguggugguuuucuguucuu

SEQ ID NO: 1649421 - RNA, 19 nt, Human
aguggugguuuucuguucu

SEQ ID NO: 1649422 - RNA, 18 nt, Human
aguggugguuuucuguuc

SEQ ID NO: 1649423 - RNA, 17 nt, Human
aguggugguuuucuguu

SEQ ID NO: 1649424 - RNA, 21 nt, Human
agugguggugaacagaacaaa

SEQ ID NO: 1649425 - RNA, 16 nt, Human
agugugguguuuccug

SEQ ID NO: 1649426 - RNA, 20 nt, Human
agugugccugaagucccaga

SEQ ID NO: 1649427 - RNA, 17 nt, Human
agugugguguuuccugg

SEQ ID NO: 1649428 - RNA, 19 nt, Human
agugugguguuuccuggca

SEQ ID NO: 1649429 - RNA, 20 nt, Human
agugugguguuuccuggcac

SEQ ID NO: 1649430 - RNA, 15 nt, Human
uguucugugauauaa

SEQ ID NO: 1649431 - RNA, 18 nt, Human
uguucugugauauaagug

SEQ ID NO: 1649432 - RNA, 13 nt, Human
uguugcccaggca

SEQ ID NO: 1649433 - RNA, 12 nt, Human
uguugcccaggc

SEQ ID NO: 1649434 - RNA, 15 nt, Human
uguugcccaggcagg

SEQ ID NO: 1649435 - RNA, 16 nt, Human
uguugcccaggcaggu

SEQ ID NO: 1649436 - RNA, 17 nt, Human
uguugcccaggcagguc

SEQ ID NO: 1649437 - RNA, 18 nt, Human
uguugcccaggcaggucu

SEQ ID NO: 1649438 - RNA, 16 nt, Human
uguucugggacacagu

SEQ ID NO: 1649439 - RNA, 14 nt, Human
uguuccuagugaaa

SEQ ID NO: 1649440 - RNA, 18 nt, Human
uguuccuagugaaagagg

SEQ ID NO: 1649441 - RNA, 20 nt, Human
uguuccacaaguuaaauaaa

SEQ ID NO: 1649442 - RNA, 14 nt, Human
uguuauauaaaugg

SEQ ID NO: 1649443 - RNA, 13 nt, Human
uguuauauaaaug

SEQ ID NO: 1649444 - RNA, 15 nt, Human
uguuauaaucuuuca

SEQ ID NO: 1649445 - RNA, 20 nt, Human
agugugucuuagugugugca

SEQ ID NO: 1649446 - RNA, 11 nt, Human
ugugugugugc

SEQ ID NO: 1649447 - RNA, 19 nt, Human
uguguguuuauugucaaag

SEQ ID NO: 1649448 - RNA, 23 nt, Human
uguguguuuauugucaaaguggu

SEQ ID NO: 1649449 - RNA, 20 nt, Human
ugugugaaagguacuucaaa

SEQ ID NO: 1649450 - RNA, 19 nt, Human
ugugucuuuaaaugcugcu

SEQ ID NO: 1649451 - RNA, 21 nt, Human
ugugucuugcaauggcagccu

SEQ ID NO: 1649452 - RNA, 21 nt, Human
ugugucucuugguccugcugc

SEQ ID NO: 1649453 - RNA, 22 nt, Human
ugugucucuugguccugcugca

SEQ ID NO: 1649454 - RNA, 17 nt, Human
ugugucucuugguccug

SEQ ID NO: 1649455 - RNA, 20 nt, Human
ugugucucuugguccugcug

SEQ ID NO: 1649456 - RNA, 13 nt, Human
uguguaaguagau

SEQ ID NO: 1649457 - RNA, 13 nt, Human
uguguugaagagg

SEQ ID NO: 1649458 - RNA, 13 nt, Human
agugcugcauuua

SEQ ID NO: 1649459 - RNA, 12 nt, Human
agugcugcauuu

SEQ ID NO: 1649460 - RNA, 19 nt, Human
agugaguuggguguauugu

SEQ ID NO: 1649461 - RNA, 20 nt, Human
agugaguuggguguauugug

SEQ ID NO: 1649462 - RNA, 22 nt, Human
agugaguugauagcacagaccc

SEQ ID NO: 1649463 - RNA, 23 nt, Human
agugaguugauagcacagacccu

SEQ ID NO: 1649464 - RNA, 19 nt, Human
agugcugcauuuaaaagau

SEQ ID NO: 1649465 - RNA, 20 nt, Human
agugcugggauuacaggugu

SEQ ID NO: 1649466 - RNA, 17 nt, Human
agugcugcauuuaaaag

SEQ ID NO: 1649467 - RNA, 16 nt, Human
agugcugcauuuaaaa

SEQ ID NO: 1649468 - RNA, 21 nt, Human
agugcugggauuacaggugug

SEQ ID NO: 1649469 - RNA, 18 nt, Human
uguguaagacaaaaagcu

SEQ ID NO: 1649470 - RNA, 20 nt, Human
ugugguguuuccuggcacug

SEQ ID NO: 1649471 - RNA, 14 nt, Human
ugugguguuuccug

SEQ ID NO: 1649472 - RNA, 16 nt, Human
ugugguguuuccuggc

SEQ ID NO: 1649473 - RNA, 16 nt, Human
uguggucccaccccac

SEQ ID NO: 1649474 - RNA, 13 nt, Human
uguggucccaccc

SEQ ID NO: 1649475 - RNA, 15 nt, Human
uguggucccacccca

SEQ ID NO: 1649476 - RNA, 21 nt, Human
uguggguuucuaaagcugcca

SEQ ID NO: 1649477 - RNA, 23 nt, Human
uguggguuucuaaagcugccagc

SEQ ID NO: 1649478 - RNA, 20 nt, Human
uguggucacaggaaguagag

SEQ ID NO: 1649479 - RNA, 14 nt, Human
uuaacaacagcugg

SEQ ID NO: 1649480 - RNA, 13 nt, Human
uuaaauaauguga

SEQ ID NO: 1649481 - RNA, 16 nt, Human
uuaaauaauaaagauc

SEQ ID NO: 1649482 - RNA, 13 nt, Human
aguuuauaaaaga

SEQ ID NO: 1649483 - RNA, 21 nt, Human
aguuuauaaaagacugucuua

SEQ ID NO: 1649484 - RNA, 22 nt, Human
uuaaaggaagguucugguguga

SEQ ID NO: 1649485 - RNA, 20 nt, Human
uuaaaggaagguucuggugu

SEQ ID NO: 1649486 - RNA, 15 nt, Human
aguuuaauauuaaag

SEQ ID NO: 1649487 - RNA, 16 nt, Human
aguuuaauauuaaagc

SEQ ID NO: 1649488 - RNA, 18 nt, Human
aguuuaauauuaaagcca

SEQ ID NO: 1649489 - RNA, 19 nt, Human
aguuuaauauuaaagccau

SEQ ID NO: 1649490 - RNA, 20 nt, Human
aguuuaauauuaaagccaug

SEQ ID NO: 1649491 - RNA, 17 nt, Human
aguuggguguauugugc

SEQ ID NO: 1649492 - RNA, 20 nt, Human
aguuggguguauugugcgcu

SEQ ID NO: 1649493 - RNA, 18 nt, Human
aguuggucccccuuccau

SEQ ID NO: 1649494 - RNA, 21 nt, Human
aguuguuugauucagacagcu

SEQ ID NO: 1649495 - RNA, 23 nt, Human
aguuguuugauucagacagcugc

SEQ ID NO: 1649496 - RNA, 16 nt, Human
aguuggcuaggacccc

SEQ ID NO: 1649497 - RNA, 16 nt, Human
aguuggguguauugug

SEQ ID NO: 1649498 - RNA, 21 nt, Human
aguuggguggaugccuggugg

SEQ ID NO: 1649499 - RNA, 13 nt, Human
aguuggcuucuaa

SEQ ID NO: 1649500 - RNA, 22 nt, Human
aguugccuaaauccauuuggaa

SEQ ID NO: 1649501 - RNA, 23 nt, Human
aguugccuaaauccauuuggaaa

SEQ ID NO: 1649502 - RNA, 22 nt, Human
aguugcauagguuuaauaauuu

SEQ ID NO: 1649503 - RNA, 14 nt, Human
aguucugguuccua

SEQ ID NO: 1649504 - RNA, 14 nt, Human
uguuuugcaagcca

SEQ ID NO: 1649505 - RNA, 21 nt, Human
aguucugcagauaaacaguag

SEQ ID NO: 1649506 - RNA, 16 nt, Human
aguucugcagauaaac

SEQ ID NO: 1649507 - RNA, 19 nt, Human
uguuuggaccaaaaaccag

SEQ ID NO: 1649508 - RNA, 13 nt, Human
uguuuggagacag

SEQ ID NO: 1649509 - RNA, 18 nt, Human
uguuuuaugacuucauua

SEQ ID NO: 1649510 - RNA, 21 nt, Human
uguuuuauuuaaccucuaaau

SEQ ID NO: 1649511 - RNA, 21 nt, Human
uguuuuauuuuaauucaguug

SEQ ID NO: 1649512 - RNA, 20 nt, Human
uguuuuccaugaguccccug

SEQ ID NO: 1649513 - RNA, 19 nt, Human
uguuuucauuaucucaaaa

SEQ ID NO: 1649514 - RNA, 23 nt, Human
uguuuagucuugucucagauuuu

SEQ ID NO: 1649515 - RNA, 22 nt, Human
uguuuagucuugucucagauuu

SEQ ID NO: 1649516 - RNA, 19 nt, Human
uguugccuugcauaauggu

SEQ ID NO: 1649517 - RNA, 19 nt, Human
uguugcccaggcaggucuu

SEQ ID NO: 1649518 - RNA, 18 nt, Human
uguuuauuacaguauaau

SEQ ID NO: 1649519 - RNA, 14 nt, Human
uguuuauuacagua

SEQ ID NO: 1649520 - RNA, 19 nt, Human
uguuuauugucaaaguggu

SEQ ID NO: 1649521 - RNA, 17 nt, Human
uguuugauucagacagc

SEQ ID NO: 1649522 - RNA, 22 nt, Human
uguuugauucagacagcugccu

SEQ ID NO: 1649523 - RNA, 22 nt, Human
uguuugagguuuuuaagccuua

SEQ ID NO: 1649524 - RNA, 14 nt, Human
uguuugagaaauua

SEQ ID NO: 1649525 - RNA, 18 nt, Human
uguuucuuuguaaugaaa

SEQ ID NO: 1649526 - RNA, 19 nt, Human
uguuucuuuguaaugaaaa

SEQ ID NO: 1649527 - RNA, 20 nt, Human
auaaaucugugaacuugaaa

SEQ ID NO: 1649528 - RNA, 21 nt, Human
auaaaucugugaacuugaaau

SEQ ID NO: 1649529 - RNA, 22 nt, Human
auaaaucugugaacuugaaauu

SEQ ID NO: 1649530 - RNA, 16 nt, Human
auaaauagcuagacug

SEQ ID NO: 1649531 - RNA, 18 nt, Human
auaaauagcuagacuggu

SEQ ID NO: 1649532 - RNA, 21 nt, Human
auaaauagcuagacuggugac

SEQ ID NO: 1649533 - RNA, 18 nt, Human
auaaacacucuugaaaaa

SEQ ID NO: 1649534 - RNA, 18 nt, Human
uuacaguauaauuaacau

SEQ ID NO: 1649535 - RNA, 19 nt, Human
uuacaguauaauuaacaug

SEQ ID NO: 1649536 - RNA, 20 nt, Human
uuacaguauaauuaacaugu

SEQ ID NO: 1649537 - RNA, 16 nt, Human
uuacaguauaauuaac

SEQ ID NO: 1649538 - RNA, 17 nt, Human
uuacaguauaauuaaca

SEQ ID NO: 1649539 - RNA, 13 nt, Human
uuacaguauaauu

SEQ ID NO: 1649540 - RNA, 13 nt, Human
uuacagcugccug

SEQ ID NO: 1649541 - RNA, 14 nt, Human
uuacagcugccugc

SEQ ID NO: 1649542 - RNA, 14 nt, Human
uuacaggaaguacu

SEQ ID NO: 1649543 - RNA, 22 nt, Human
auaaaugguuaaaagagguuuu

SEQ ID NO: 1649544 - RNA, 16 nt, Human
auaaaugguuaaaaga

SEQ ID NO: 1649545 - RNA, 13 nt, Human
uuagaaccuuucu

SEQ ID NO: 1649546 - RNA, 11 nt, Human
uuagacagagu

SEQ ID NO: 1649547 - RNA, 11 nt, Human
uuagaaauaua

SEQ ID NO: 1649548 - RNA, 12 nt, Human
uuagaaauauaa

SEQ ID NO: 1649549 - RNA, 14 nt, Human
uuagaaauauaauu

SEQ ID NO: 1649550 - RNA, 15 nt, Human
uuacuguaagaaaau

SEQ ID NO: 1649551 - RNA, 23 nt, Human
uuacucagaauucucuaguuuga

SEQ ID NO: 1649552 - RNA, 18 nt, Human
uuacucagaauucucuag

SEQ ID NO: 1649553 - RNA, 14 nt, Human
uuaccuuacagaag

SEQ ID NO: 1649554 - RNA, 12 nt, Human
uuaccugggaaa

SEQ ID NO: 1649555 - RNA, 16 nt, Human
auaaaauaauuuuuau

SEQ ID NO: 1649556 - RNA, 21 nt, Human
auaaaauaauuuuuauauuug

SEQ ID NO: 1649557 - RNA, 22 nt, Human
auaaaauaauuuuuauauuuga

SEQ ID NO: 1649558 - RNA, 18 nt, Human
auaaaauccauacauuug

SEQ ID NO: 1649559 - RNA, 19 nt, Human
auaaaauccauacauuugu

SEQ ID NO: 1649560 - RNA, 22 nt, Human
uuaagugcugcauuuaaaagau

SEQ ID NO: 1649561 - RNA, 14 nt, Human
uuaagugcugcauu

SEQ ID NO: 1649562 - RNA, 17 nt, Human
uuaaguacuauguauca

SEQ ID NO: 1649563 - RNA, 18 nt, Human
uuaaguaaugauaacugg

SEQ ID NO: 1649564 - RNA, 21 nt, Human
uuaagucuguuuuaugacuuc

SEQ ID NO: 1649565 - RNA, 17 nt, Human
uuaaguaucugacaucu

SEQ ID NO: 1649566 - RNA, 18 nt, Human
uuaagucuguuuuaugac

SEQ ID NO: 1649567 - RNA, 20 nt, Human
uuaagucuguuuuaugacuu

SEQ ID NO: 1649568 - RNA, 18 nt, Human
uuaaguaaggaauuuuau

SEQ ID NO: 1649569 - RNA, 15 nt, Human
uuaagaggcaggguc

SEQ ID NO: 1649570 - RNA, 16 nt, Human
uuaagaggcagggucu

SEQ ID NO: 1649571 - RNA, 13 nt, Human
uuaagaggcaggg

SEQ ID NO: 1649572 - RNA, 22 nt, Human
uuaagaagacugcauuauauuu

SEQ ID NO: 1649573 - RNA, 20 nt, Human
auaaaauuuuuaaucuuuaa

SEQ ID NO: 1649574 - RNA, 22 nt, Human
auaaacaagaccacguuucuaa

SEQ ID NO: 1649575 - RNA, 15 nt, Human
auaaacaagaccacg

SEQ ID NO: 1649576 - RNA, 23 nt, Human
auaaacaagaccacguuucuaaa

SEQ ID NO: 1649577 - RNA, 16 nt, Human
auaaaauuaaagcuga

SEQ ID NO: 1649578 - RNA, 19 nt, Human
uuaauuuuuuugagacaga

SEQ ID NO: 1649579 - RNA, 13 nt, Human
uuaauaaacacuc

SEQ ID NO: 1649580 - RNA, 17 nt, Human
uuaauaaacacucuuga

SEQ ID NO: 1649581 - RNA, 23 nt, Human
uuaaugaaagacuguacaaagua

SEQ ID NO: 1649582 - RNA, 20 nt, Human
uuaaugaaagacuguacaaa

SEQ ID NO: 1649583 - RNA, 15 nt, Human
uuaauucuuagcuca

SEQ ID NO: 1649584 - RNA, 17 nt, Human
agggcauggccaggugg

SEQ ID NO: 1649585 - RNA, 16 nt, Human
agggcacugguggccc

SEQ ID NO: 1649586 - RNA, 14 nt, Human
agggcacugguggc

SEQ ID NO: 1649587 - RNA, 17 nt, Human
agggagggcuccagaca

SEQ ID NO: 1649588 - RNA, 16 nt, Human
agggagggcuccagac

SEQ ID NO: 1649589 - RNA, 14 nt, Human
agggagggcuccag

SEQ ID NO: 1649590 - RNA, 15 nt, Human
agggagggcuccaga

SEQ ID NO: 1649591 - RNA, 19 nt, Human
agggcucagcggggacagc

SEQ ID NO: 1649592 - RNA, 20 nt, Human
agggcucagcggggacagcu

SEQ ID NO: 1649593 - RNA, 22 nt, Human
agggcucagcggggacagcucc

SEQ ID NO: 1649594 - RNA, 23 nt, Human
agggcucagcggggacagcuccu

SEQ ID NO: 1649595 - RNA, 12 nt, Human
ugggcagaagga

SEQ ID NO: 1649596 - RNA, 11 nt, Human
ugggcagagca

SEQ ID NO: 1649597 - RNA, 12 nt, Human
ugggcagagcag

SEQ ID NO: 1649598 - RNA, 18 nt, Human
ugggccaggagccuccug

SEQ ID NO: 1649599 - RNA, 13 nt, Human
ugggcagagcaga

SEQ ID NO: 1649600 - RNA, 20 nt, Human
ugggaggaucucuugagccu

SEQ ID NO: 1649601 - RNA, 21 nt, Human
ugggaggaucucuugagccug

SEQ ID NO: 1649602 - RNA, 22 nt, Human
ugggaggaucucuugagccugg

SEQ ID NO: 1649603 - RNA, 19 nt, Human
ugggaggccaaggugggag

SEQ ID NO: 1649604 - RNA, 20 nt, Human
ugggaggccaaggugggagg

SEQ ID NO: 1649605 - RNA, 18 nt, Human
ugggccccaguuguauuu

SEQ ID NO: 1649606 - RNA, 22 nt, Human
ugggccccaguuguauuuauuu

SEQ ID NO: 1649607 - RNA, 16 nt, Human
ugggcccccaaaugga

SEQ ID NO: 1649608 - RNA, 21 nt, Human
ugggcccccaaauggaaaugg

SEQ ID NO: 1649609 - RNA, 20 nt, Human
ugggccccugccucucugca

SEQ ID NO: 1649610 - RNA, 15 nt, Human
ugggccccugccucu

SEQ ID NO: 1649611 - RNA, 19 nt, Human
ugggccccugccucucugc

SEQ ID NO: 1649612 - RNA, 15 nt, Human
agggagggagggcuc

SEQ ID NO: 1649613 - RNA, 17 nt, Human
agggagggagggcucca

SEQ ID NO: 1649614 - RNA, 21 nt, Human
agggaauuucuucaacucccu

SEQ ID NO: 1649615 - RNA, 13 nt, Human
agggaaggggaca

SEQ ID NO: 1649616 - RNA, 22 nt, Human
agggaaggggacaaggacuagg

SEQ ID NO: 1649617 - RNA, 22 nt, Human
agggaaggauacaaaagcaugu

SEQ ID NO: 1649618 - RNA, 21 nt, Human
aggcccggcuccaggcuccuu

SEQ ID NO: 1649619 - RNA, 18 nt, Human
aggcccggcuccaggcuc

SEQ ID NO: 1649620 - RNA, 20 nt, Human
aggcccggcuccaggcuccu

SEQ ID NO: 1649621 - RNA, 19 nt, Human
ugggagagaagagaaugca

SEQ ID NO: 1649622 - RNA, 21 nt, Human
ugggagagaagagaaugcaca

SEQ ID NO: 1649623 - RNA, 18 nt, Human
ugggagacugcugaguca

SEQ ID NO: 1649624 - RNA, 16 nt, Human
ugggagagccuuccag

SEQ ID NO: 1649625 - RNA, 20 nt, Human
ugggacucaaugcacugaca

SEQ ID NO: 1649626 - RNA, 14 nt, Human
ugggacuacaggca

SEQ ID NO: 1649627 - RNA, 15 nt, Human
ugggacuacaggcac

SEQ ID NO: 1649628 - RNA, 16 nt, Human
ugggacuacaggcacc

SEQ ID NO: 1649629 - RNA, 23 nt, Human
agggaggacgcucucuggccuuc

SEQ ID NO: 1649630 - RNA, 21 nt, Human
agggaggacgcucucuggccu

SEQ ID NO: 1649631 - RNA, 22 nt, Human
agggaggacgcucucuggccuu

SEQ ID NO: 1649632 - RNA, 21 nt, Human
aggggaauaaacuguugaguc

SEQ ID NO: 1649633 - RNA, 13 nt, Human
aggggaauguuug

SEQ ID NO: 1649634 - RNA, 18 nt, Human
aggggaaaaucagccugc

SEQ ID NO: 1649635 - RNA, 22 nt, Human
aggggaaaaucagccugcucca

SEQ ID NO: 1649636 - RNA, 14 nt, Human
aggggaacagacug

SEQ ID NO: 1649637 - RNA, 13 nt, Human
aggggaaaagagg

SEQ ID NO: 1649638 - RNA, 17 nt, Human
ugggguacccacugcuc

SEQ ID NO: 1649639 - RNA, 18 nt, Human
ugggguacccacugcucu

SEQ ID NO: 1649640 - RNA, 19 nt, Human
ugggguacccacugcucug

SEQ ID NO: 1649641 - RNA, 20 nt, Human
ugggguacccacugcucugg

SEQ ID NO: 1649642 - RNA, 13 nt, Human
uggggucacucug

SEQ ID NO: 1649643 - RNA, 14 nt, Human
uggggucacucugg

SEQ ID NO: 1649644 - RNA, 16 nt, Human
uggggucacucuggca

SEQ ID NO: 1649645 - RNA, 22 nt, Human
uggggucacucuggcagcucag

SEQ ID NO: 1649646 - RNA, 16 nt, Human
uggggaccucaggccu

SEQ ID NO: 1649647 - RNA, 17 nt, Human
uggggaccucaggccug

SEQ ID NO: 1649648 - RNA, 12 nt, Human
agggcuccagac

SEQ ID NO: 1649649 - RNA, 15 nt, Human
agggcuccagacaca

SEQ ID NO: 1649650 - RNA, 14 nt, Human
uggggaccucaggc

SEQ ID NO: 1649651 - RNA, 15 nt, Human
uggggaccucaggcc

SEQ ID NO: 1649652 - RNA, 23 nt, Human
uggggcugcaccggcuggccugg

SEQ ID NO: 1649653 - RNA, 12 nt, Human
uggggcccugcc

SEQ ID NO: 1649654 - RNA, 15 nt, Human
uggggaggggcugug

SEQ ID NO: 1649655 - RNA, 16 nt, Human
ugggucgcccuggacu

SEQ ID NO: 1649656 - RNA, 18 nt, Human
ugggucgcccuggacugu

SEQ ID NO: 1649657 - RNA, 16 nt, Human
aggguggugaccucug

SEQ ID NO: 1649658 - RNA, 17 nt, Human
ugguagcuuuucccuuc

SEQ ID NO: 1649659 - RNA, 20 nt, Human
ugguagagugugccugaagu

SEQ ID NO: 1649660 - RNA, 17 nt, Human
uggguggcaccagcagc

SEQ ID NO: 1649661 - RNA, 20 nt, Human
uggguggcaccagcagccug

SEQ ID NO: 1649662 - RNA, 21 nt, Human
uggguggcaccagcagccugg

SEQ ID NO: 1649663 - RNA, 22 nt, Human
uggguggcaccagcagccugga

SEQ ID NO: 1649664 - RNA, 21 nt, Human
agggucucacucugucgccca

SEQ ID NO: 1649665 - RNA, 16 nt, Human
agggucucacucuguc

SEQ ID NO: 1649666 - RNA, 14 nt, Human
agggucucacucug

SEQ ID NO: 1649667 - RNA, 15 nt, Human
agggucucacucugu

SEQ ID NO: 1649668 - RNA, 15 nt, Human
aggguaaggcugugg

SEQ ID NO: 1649669 - RNA, 20 nt, Human
aggggguggccucccaacuc

SEQ ID NO: 1649670 - RNA, 18 nt, Human
aggggugggacacccugu

SEQ ID NO: 1649671 - RNA, 19 nt, Human
aggggaauguuugccucug

SEQ ID NO: 1649672 - RNA, 20 nt, Human
aggggaauguuugccucugc

SEQ ID NO: 1649673 - RNA, 21 nt, Human
aggggaauguuugccucugcc

SEQ ID NO: 1649674 - RNA, 16 nt, Human
aggggaauugaggaca

SEQ ID NO: 1649675 - RNA, 18 nt, Human
aggggagcaugggaagug

SEQ ID NO: 1649676 - RNA, 11 nt, Human
aguagagacag

SEQ ID NO: 1649677 - RNA, 17 nt, Human
uguaggcauaaagucag

SEQ ID NO: 1649678 - RNA, 20 nt, Human
uguaggcauaaagucagggg

SEQ ID NO: 1649679 - RNA, 21 nt, Human
aguagaagucuuagauguaua

SEQ ID NO: 1649680 - RNA, 19 nt, Human
aguagaagucuuagaugua

SEQ ID NO: 1649681 - RNA, 20 nt, Human
aguagaagucuuagauguau

SEQ ID NO: 1649682 - RNA, 22 nt, Human
uguacuugcucuugaugccugg

SEQ ID NO: 1649683 - RNA, 23 nt, Human
uguacuugcucuugaugccuggc

SEQ ID NO: 1649684 - RNA, 16 nt, Human
uguagagccagggucu

SEQ ID NO: 1649685 - RNA, 18 nt, Human
uguagagccagggucuca

SEQ ID NO: 1649686 - RNA, 14 nt, Human
uguagagcuucugg

SEQ ID NO: 1649687 - RNA, 16 nt, Human
uguagaggagaaacug

SEQ ID NO: 1649688 - RNA, 13 nt, Human
aguaaaauccaca

SEQ ID NO: 1649689 - RNA, 13 nt, Human
agguuuuucuuaa

SEQ ID NO: 1649690 - RNA, 18 nt, Human
aguaaugauaacuggaaa

SEQ ID NO: 1649691 - RNA, 20 nt, Human
aguaaugauaacuggaaacu

SEQ ID NO: 1649692 - RNA, 17 nt, Human
aguaauaugcacacauu

SEQ ID NO: 1649693 - RNA, 17 nt, Human
aguaaugauaacuggaa

SEQ ID NO: 1649694 - RNA, 15 nt, Human
aguaauaugcacaca

SEQ ID NO: 1649695 - RNA, 14 nt, Human
aguaauaugcacac

SEQ ID NO: 1649696 - RNA, 17 nt, Human
aguauuucuaugaaaua

SEQ ID NO: 1649697 - RNA, 16 nt, Human
aguauuucuaugaaau

SEQ ID NO: 1649698 - RNA, 18 nt, Human
aguauuucuaugaaauau

SEQ ID NO: 1649699 - RNA, 14 nt, Human
aguauugaagcauu

SEQ ID NO: 1649700 - RNA, 15 nt, Human
aguauugaagcauuu

SEQ ID NO: 1649701 - RNA, 18 nt, Human
aguauugaagcauuuuau

SEQ ID NO: 1649702 - RNA, 20 nt, Human
aguauugaagcauuuuauaa

SEQ ID NO: 1649703 - RNA, 21 nt, Human
aguauugaagcauuuuauaaa

SEQ ID NO: 1649704 - RNA, 19 nt, Human
agucaccccggccaccugc

SEQ ID NO: 1649705 - RNA, 15 nt, Human
agucacacagugagu

SEQ ID NO: 1649706 - RNA, 23 nt, Human
agucacacagugagucgaggaca

SEQ ID NO: 1649707 - RNA, 14 nt, Human
agucaccucaugga

SEQ ID NO: 1649708 - RNA, 15 nt, Human
agucaccucauggaa

SEQ ID NO: 1649709 - RNA, 17 nt, Human
agucaccucauggaauu

SEQ ID NO: 1649710 - RNA, 15 nt, Human
aguaugguggcuggg

SEQ ID NO: 1649711 - RNA, 16 nt, Human
aguaugguggcugggu

SEQ ID NO: 1649712 - RNA, 15 nt, Human
aguauuacuucugcu

SEQ ID NO: 1649713 - RNA, 17 nt, Human
aguaugguggcuggguu

SEQ ID NO: 1649714 - RNA, 18 nt, Human
aguauuacuucugcuaca

SEQ ID NO: 1649715 - RNA, 18 nt, Human
aguauuagaauaccacag

SEQ ID NO: 1649716 - RNA, 14 nt, Human
ugucaauuacagga

SEQ ID NO: 1649717 - RNA, 15 nt, Human
ugucaauuacaggaa

SEQ ID NO: 1649718 - RNA, 19 nt, Human
ugucaauuacaggaaguac

SEQ ID NO: 1649719 - RNA, 17 nt, Human
ugucaauuacaggaagu

SEQ ID NO: 1649720 - RNA, 14 nt, Human
uguaguguuggaga

SEQ ID NO: 1649721 - RNA, 15 nt, Human
uguaguguuggagaa

SEQ ID NO: 1649722 - RNA, 17 nt, Human
uguaucaaugaguaaca

SEQ ID NO: 1649723 - RNA, 15 nt, Human
uguaucacaaaucuu

SEQ ID NO: 1649724 - RNA, 18 nt, Human
uguaucacaaaucuuaac

SEQ ID NO: 1649725 - RNA, 20 nt, Human
uguauucucuccuguaccuc

SEQ ID NO: 1649726 - RNA, 19 nt, Human
uguauucucuccuguaccu

SEQ ID NO: 1649727 - RNA, 13 nt, Human
uguauuacaaauc

SEQ ID NO: 1649728 - RNA, 22 nt, Human
uguauuacaaauccaaugaaau

SEQ ID NO: 1649729 - RNA, 21 nt, Human
aggugagaagcagaggaagga

SEQ ID NO: 1649730 - RNA, 23 nt, Human
aggugagaagcagaggaaggaga

SEQ ID NO: 1649731 - RNA, 16 nt, Human
aggugagaagcagagg

SEQ ID NO: 1649732 - RNA, 22 nt, Human
aggugacagagugagacucugu

SEQ ID NO: 1649733 - RNA, 13 nt, Human
aggugaccccagg

SEQ ID NO: 1649734 - RNA, 18 nt, Human
aggucuugaacuccuggc

SEQ ID NO: 1649735 - RNA, 17 nt, Human
aggucuugaacuccugg

SEQ ID NO: 1649736 - RNA, 13 nt, Human
aggugacagagug

SEQ ID NO: 1649737 - RNA, 15 nt, Human
aggugacagagugag

SEQ ID NO: 1649738 - RNA, 19 nt, Human
agguccacaacacacagau

SEQ ID NO: 1649739 - RNA, 16 nt, Human
aggucuugaacuccug

SEQ ID NO: 1649740 - RNA, 15 nt, Human
uggucagauuugaac

SEQ ID NO: 1649741 - RNA, 16 nt, Human
uggucagauuugaacu

SEQ ID NO: 1649742 - RNA, 13 nt, Human
aggucagagccug

SEQ ID NO: 1649743 - RNA, 14 nt, Human
aggucagagccugc

SEQ ID NO: 1649744 - RNA, 15 nt, Human
aggucagagccugca

SEQ ID NO: 1649745 - RNA, 17 nt, Human
aggucagagccugcagu

SEQ ID NO: 1649746 - RNA, 18 nt, Human
aggucagagccugcaguu

SEQ ID NO: 1649747 - RNA, 13 nt, Human
uggugcugccaca

SEQ ID NO: 1649748 - RNA, 18 nt, Human
uggugcugccacacuuca

SEQ ID NO: 1649749 - RNA, 16 nt, Human
uggugcgaucuggguu

SEQ ID NO: 1649750 - RNA, 17 nt, Human
uggugcgaucuggguuc

SEQ ID NO: 1649751 - RNA, 16 nt, Human
uggugcccugcuuuca

SEQ ID NO: 1649752 - RNA, 19 nt, Human
uggugcccugcuuucagau

SEQ ID NO: 1649753 - RNA, 20 nt, Human
uggugcccugcuuucagaua

SEQ ID NO: 1649754 - RNA, 14 nt, Human
uggugcccugcuuu

SEQ ID NO: 1649755 - RNA, 21 nt, Human
ugguggagaggcccggccucu

SEQ ID NO: 1649756 - RNA, 14 nt, Human
ugguggcagcugcg

SEQ ID NO: 1649757 - RNA, 13 nt, Human
ugguggcagcugc

SEQ ID NO: 1649758 - RNA, 15 nt, Human
ugguggcagcugcgg

SEQ ID NO: 1649759 - RNA, 12 nt, Human
ugguggcagugg

SEQ ID NO: 1649760 - RNA, 18 nt, Human
ugguuaggcauuguggga

SEQ ID NO: 1649761 - RNA, 20 nt, Human
ugguuaggcauugugggaag

SEQ ID NO: 1649762 - RNA, 23 nt, Human
uggugugaccacugcagaagaca

SEQ ID NO: 1649763 - RNA, 14 nt, Human
uggugugaacuaaa

SEQ ID NO: 1649764 - RNA, 22 nt, Human
uggugugaacuaaacuuucaca

SEQ ID NO: 1649765 - RNA, 23 nt, Human
uggugugaacuaaacuuucacac

SEQ ID NO: 1649766 - RNA, 14 nt, Human
agguuuaagcuguu

SEQ ID NO: 1649767 - RNA, 17 nt, Human
agguucuggugugaacu

SEQ ID NO: 1649768 - RNA, 19 nt, Human
agguggggucacucuggca

SEQ ID NO: 1649769 - RNA, 17 nt, Human
aggugugaaccaccaca

SEQ ID NO: 1649770 - RNA, 15 nt, Human
aggugugcucugauc

SEQ ID NO: 1649771 - RNA, 20 nt, Human
aggugugcucugaucaucca

SEQ ID NO: 1649772 - RNA, 15 nt, Human
aggugggauccucca

SEQ ID NO: 1649773 - RNA, 18 nt, Human
aggugccucaagagaagg

SEQ ID NO: 1649774 - RNA, 16 nt, Human
aggugggauccuccag

SEQ ID NO: 1649775 - RNA, 17 nt, Human
aggugggauccuccagg

SEQ ID NO: 1649776 - RNA, 18 nt, Human
aggugggauccuccaggu

SEQ ID NO: 1649777 - RNA, 23 nt, Human
agguggggcagcuugaggguugg

SEQ ID NO: 1649778 - RNA, 14 nt, Human
aggugauccaccca

SEQ ID NO: 1649779 - RNA, 20 nt, Human
aggugauccacccaccucag

SEQ ID NO: 1649780 - RNA, 20 nt, Human
aggugcauauuuauaaaaau

SEQ ID NO: 1649781 - RNA, 21 nt, Human
aggugauccacccaccucagc

SEQ ID NO: 1649782 - RNA, 15 nt, Human
ugguuuguaaauuaa

SEQ ID NO: 1649783 - RNA, 14 nt, Human
ugguuuucaaaaua

SEQ ID NO: 1649784 - RNA, 15 nt, Human
ugguuuucaaaauaa

SEQ ID NO: 1649785 - RNA, 17 nt, Human
ugguuuucaaaauaaaa

SEQ ID NO: 1649786 - RNA, 14 nt, Human
ugguuuccugcccu

SEQ ID NO: 1649787 - RNA, 15 nt, Human
ugguuuccugcccug

SEQ ID NO: 1649788 - RNA, 20 nt, Human
ugguuuccugcccugggagg

SEQ ID NO: 1649789 - RNA, 12 nt, Human
ugguuuccugcc

SEQ ID NO: 1649790 - RNA, 13 nt, Human
ugguuuccugccc

SEQ ID NO: 1649791 - RNA, 14 nt, Human
ugguuauggagagg

SEQ ID NO: 1649792 - RNA, 19 nt, Human
uguaaauaaagaacuagca

SEQ ID NO: 1649793 - RNA, 15 nt, Human
uguaaauacaauuuu

SEQ ID NO: 1649794 - RNA, 15 nt, Human
uguaaauagcucagg

SEQ ID NO: 1649795 - RNA, 16 nt, Human
uguaaauagcucaggu

SEQ ID NO: 1649796 - RNA, 21 nt, Human
uguaaauacuguuuuuaacaa

SEQ ID NO: 1649797 - RNA, 23 nt, Human
aggaaaccaguuaggucucaaua

SEQ ID NO: 1649798 - RNA, 13 nt, Human
ugcuaucuccccc

SEQ ID NO: 1649799 - RNA, 14 nt, Human
ugcuaucuccccca

SEQ ID NO: 1649800 - RNA, 17 nt, Human
ugcuaucucccccagcc

SEQ ID NO: 1649801 - RNA, 16 nt, Human
aggaaaagcugcugac

SEQ ID NO: 1649802 - RNA, 22 nt, Human
ugcuauuucuauauuuucauuc

SEQ ID NO: 1649803 - RNA, 18 nt, Human
ugcuaucucccccagccc

SEQ ID NO: 1649804 - RNA, 15 nt, Human
ugcucuugaacuccu

SEQ ID NO: 1649805 - RNA, 20 nt, Human
ugcucuugaacuccugaccu

SEQ ID NO: 1649806 - RNA, 22 nt, Human
ugcucuugaacuccugaccuca

SEQ ID NO: 1649807 - RNA, 17 nt, Human
ugcucuugaugccuggc

SEQ ID NO: 1649808 - RNA, 16 nt, Human
ugcucugcugacagac

SEQ ID NO: 1649809 - RNA, 14 nt, Human
ugcucugcugacag

SEQ ID NO: 1649810 - RNA, 15 nt, Human
ugcucugcugacaga

SEQ ID NO: 1649811 - RNA, 21 nt, Human
ugcuccagcuguucagcuggu

SEQ ID NO: 1649812 - RNA, 19 nt, Human
ugcucugaucauccacugu

SEQ ID NO: 1649813 - RNA, 15 nt, Human
aggaaggcugagagg

SEQ ID NO: 1649814 - RNA, 15 nt, Human
aggaagcucagggcc

SEQ ID NO: 1649815 - RNA, 16 nt, Human
aggaagcucagggccu

SEQ ID NO: 1649816 - RNA, 18 nt, Human
aggaagcagcuuucccca

SEQ ID NO: 1649817 - RNA, 13 nt, Human
aggaagccagcag

SEQ ID NO: 1649818 - RNA, 13 nt, Human
aggaagcucaggg

SEQ ID NO: 1649819 - RNA, 14 nt, Human
aggaagcucagggc

SEQ ID NO: 1649820 - RNA, 23 nt, Human
aggaaaucaaauaugcaaagcac

SEQ ID NO: 1649821 - RNA, 21 nt, Human
aggaaaucaaauaugcaaagc

SEQ ID NO: 1649822 - RNA, 22 nt, Human
aggaaaucaaauaugcaaagca

SEQ ID NO: 1649823 - RNA, 20 nt, Human
aggaaaucaaauaugcaaag

SEQ ID NO: 1649824 - RNA, 13 nt, Human
agcuuaacagugu

SEQ ID NO: 1649825 - RNA, 16 nt, Human
ugcuaauuuugaaaaa

SEQ ID NO: 1649826 - RNA, 18 nt, Human
ugcuaauuuugaaaaacu

SEQ ID NO: 1649827 - RNA, 19 nt, Human
ugcuaauuuugaaaaacug

SEQ ID NO: 1649828 - RNA, 20 nt, Human
ugcuaauuuugaaaaacugc

SEQ ID NO: 1649829 - RNA, 14 nt, Human
ugcuacaaaaacac

SEQ ID NO: 1649830 - RNA, 15 nt, Human
ugcuacaaaaacaca

SEQ ID NO: 1649831 - RNA, 17 nt, Human
ugcgguccacccaggag

SEQ ID NO: 1649832 - RNA, 14 nt, Human
ugcgguccacccag

SEQ ID NO: 1649833 - RNA, 15 nt, Human
ugcgguccacccagg

SEQ ID NO: 1649834 - RNA, 17 nt, Human
ugccuuuucccaacucc

SEQ ID NO: 1649835 - RNA, 19 nt, Human
ugccuuuucccaacuccag

SEQ ID NO: 1649836 - RNA, 22 nt, Human
agcuuuccccaugucucgacuc

SEQ ID NO: 1649837 - RNA, 14 nt, Human
aggaaaagcugcug

SEQ ID NO: 1649838 - RNA, 16 nt, Human
agcuugcccuguuaaa

SEQ ID NO: 1649839 - RNA, 18 nt, Human
agcuugcccuguuaaaag

SEQ ID NO: 1649840 - RNA, 19 nt, Human
agcuugcccuguuaaaaga

SEQ ID NO: 1649841 - RNA, 20 nt, Human
agcuugaccgugaggccaga

SEQ ID NO: 1649842 - RNA, 22 nt, Human
agcuugaccgugaggccagaga

SEQ ID NO: 1649843 - RNA, 23 nt, Human
agcuugaccgugaggccagagac

SEQ ID NO: 1649844 - RNA, 20 nt, Human
agcuugcccuggugccucac

SEQ ID NO: 1649845 - RNA, 20 nt, Human
ugccugcuuuuuauggccug

SEQ ID NO: 1649846 - RNA, 21 nt, Human
ugccugcuuuuuauggccugu

SEQ ID NO: 1649847 - RNA, 22 nt, Human
ugccugcuuuuuauggccugug

SEQ ID NO: 1649848 - RNA, 24 nt, Human
ugccugcccaggccccugccaccc

SEQ ID NO: 1649849 - RNA, 12 nt, Human
ugccucugccug

SEQ ID NO: 1649850 - RNA, 22 nt, Human
ugccugcccaggccccugccac

SEQ ID NO: 1649851 - RNA, 23 nt, Human
ugccugcccaggccccugccacc

SEQ ID NO: 1649852 - RNA, 14 nt, Human
ugccucagccuccc

SEQ ID NO: 1649853 - RNA, 18 nt, Human
ugccucugccucugacac

SEQ ID NO: 1649854 - RNA, 20 nt, Human
ugccucugccucugacacac

SEQ ID NO: 1649855 - RNA, 17 nt, Human
ugccucugccucugaca

SEQ ID NO: 1649856 - RNA, 19 nt, Human
agcugccuguucagcucca

SEQ ID NO: 1649857 - RNA, 18 nt, Human
agcugccuguucagcucc

SEQ ID NO: 1649858 - RNA, 14 nt, Human
agcugccuguucag

SEQ ID NO: 1649859 - RNA, 16 nt, Human
agcugccuguucagcu

SEQ ID NO: 1649860 - RNA, 16 nt, Human
ugccuggauggggcug

SEQ ID NO: 1649861 - RNA, 17 nt, Human
ugccuggauggggcugc

SEQ ID NO: 1649862 - RNA, 20 nt, Human
ugccuggauggggcugcacc

SEQ ID NO: 1649863 - RNA, 21 nt, Human
ugccuggauggggcugcaccg

SEQ ID NO: 1649864 - RNA, 20 nt, Human
agcugcuugggcuucauccu

SEQ ID NO: 1649865 - RNA, 16 nt, Human
agcugcuugggcuuca

SEQ ID NO: 1649866 - RNA, 18 nt, Human
agcuggccgggagccuga

SEQ ID NO: 1649867 - RNA, 19 nt, Human
agcuggccgggagccugau

SEQ ID NO: 1649868 - RNA, 18 nt, Human
agcuguuacugucuucag

SEQ ID NO: 1649869 - RNA, 19 nt, Human
agcugugcucuggacaggc

SEQ ID NO: 1649870 - RNA, 17 nt, Human
agcugugcucuggacag

SEQ ID NO: 1649871 - RNA, 18 nt, Human
agcugugcucuggacagg

SEQ ID NO: 1649872 - RNA, 22 nt, Human
agcugggguggggaccucaggc

SEQ ID NO: 1649873 - RNA, 23 nt, Human
agcugggguggggaccucaggcc

SEQ ID NO: 1649874 - RNA, 20 nt, Human
agcugggacuacaggcaccc

SEQ ID NO: 1649875 - RNA, 23 nt, Human
agcugggacuacaggcacccacc

SEQ ID NO: 1649876 - RNA, 16 nt, Human
agcugggacuacaggu

SEQ ID NO: 1649877 - RNA, 20 nt, Human
agcugggguggggaccucag

SEQ ID NO: 1649878 - RNA, 21 nt, Human
ugccuuacccucauguucuua

SEQ ID NO: 1649879 - RNA, 16 nt, Human
ugccuuggggacaaga

SEQ ID NO: 1649880 - RNA, 20 nt, Human
ugccuuacccucauguucuu

SEQ ID NO: 1649881 - RNA, 16 nt, Human
ugccuguugggccagg

SEQ ID NO: 1649882 - RNA, 17 nt, Human
ugccuguugggccagga

SEQ ID NO: 1649883 - RNA, 14 nt, Human
ugccuguucccauu

SEQ ID NO: 1649884 - RNA, 19 nt, Human
agcuguuacugucuucagu

SEQ ID NO: 1649885 - RNA, 14 nt, Human
agcuguucacagcc

SEQ ID NO: 1649886 - RNA, 12 nt, Human
agcucuggucca

SEQ ID NO: 1649887 - RNA, 17 nt, Human
agcucugguccauagag

SEQ ID NO: 1649888 - RNA, 22 nt, Human
agcuccuucuguccuacucugu

SEQ ID NO: 1649889 - RNA, 16 nt, Human
agcuccuucuguccua

SEQ ID NO: 1649890 - RNA, 21 nt, Human
agcuccuucuguccuacucug

SEQ ID NO: 1649891 - RNA, 14 nt, Human
ugccaucaauaaaa

SEQ ID NO: 1649892 - RNA, 22 nt, Human
ugccaucaauaaaaaauuauga

SEQ ID NO: 1649893 - RNA, 13 nt, Human
agcuccaucucca

SEQ ID NO: 1649894 - RNA, 15 nt, Human
agcuccaucuccacu

SEQ ID NO: 1649895 - RNA, 16 nt, Human
agcuccaucuccacuc

SEQ ID NO: 1649896 - RNA, 13 nt, Human
agcucccaggcau

SEQ ID NO: 1649897 - RNA, 23 nt, Human
agcucccaggcauuccccaggag

SEQ ID NO: 1649898 - RNA, 15 nt, Human
agcuccuucuguccu

SEQ ID NO: 1649899 - RNA, 20 nt, Human
agcugccagccgagauagcc

SEQ ID NO: 1649900 - RNA, 16 nt, Human
agcucuguccugggag

SEQ ID NO: 1649901 - RNA, 21 nt, Human
agcucuguccugggagugagc

SEQ ID NO: 1649902 - RNA, 23 nt, Human
agcucuguccugggagugagcug

SEQ ID NO: 1649903 - RNA, 12 nt, Human
ugccgcagcccu

SEQ ID NO: 1649904 - RNA, 14 nt, Human
ugccgcagcccugc

SEQ ID NO: 1649905 - RNA, 12 nt, Human
ugccucagccuc

SEQ ID NO: 1649906 - RNA, 13 nt, Human
ugccucagccucc

SEQ ID NO: 1649907 - RNA, 18 nt, Human
ugcccuuaccugccagga

SEQ ID NO: 1649908 - RNA, 19 nt, Human
ugcccuuaccugccaggaa

SEQ ID NO: 1649909 - RNA, 16 nt, Human
agcugcccucuccugg

SEQ ID NO: 1649910 - RNA, 15 nt, Human
agcugcccucuccug

SEQ ID NO: 1649911 - RNA, 14 nt, Human
agcugcccucuccu

SEQ ID NO: 1649912 - RNA, 13 nt, Human
agcugcccucucc

SEQ ID NO: 1649913 - RNA, 20 nt, Human
ugcccuguuaaaagaugaaa

SEQ ID NO: 1649914 - RNA, 18 nt, Human
aggauugcuacuguccua

SEQ ID NO: 1649915 - RNA, 15 nt, Human
aggauugcuacuguc

SEQ ID NO: 1649916 - RNA, 17 nt, Human
aggauugcuacuguccu

SEQ ID NO: 1649917 - RNA, 14 nt, Human
uggagaaaauggac

SEQ ID NO: 1649918 - RNA, 17 nt, Human
aggcaaggcugucaauu

SEQ ID NO: 1649919 - RNA, 16 nt, Human
aggcaaggcugucaau

SEQ ID NO: 1649920 - RNA, 20 nt, Human
aggcaagcaccuccugccuc

SEQ ID NO: 1649921 - RNA, 18 nt, Human
aggcaagcaccuccugcc

SEQ ID NO: 1649922 - RNA, 19 nt, Human
aggcaagcaccuccugccu

SEQ ID NO: 1649923 - RNA, 17 nt, Human
uggagccaauggagacu

SEQ ID NO: 1649924 - RNA, 17 nt, Human
uggagcucguggaacag

SEQ ID NO: 1649925 - RNA, 21 nt, Human
uggagcucguggaacaguuac

SEQ ID NO: 1649926 - RNA, 21 nt, Human
uggagcucgugggacagucac

SEQ ID NO: 1649927 - RNA, 17 nt, Human
aggcaagcaccuccugc

SEQ ID NO: 1649928 - RNA, 15 nt, Human
aggcagcuugaaacu

SEQ ID NO: 1649929 - RNA, 15 nt, Human
aggcauaaagucagg

SEQ ID NO: 1649930 - RNA, 17 nt, Human
aggcaggugggauggau

SEQ ID NO: 1649931 - RNA, 12 nt, Human
aggcagggucuc

SEQ ID NO: 1649932 - RNA, 22 nt, Human
aggcaggucuugaacuccuggc

SEQ ID NO: 1649933 - RNA, 22 nt, Human
aggcauaaagucagggguuccc

SEQ ID NO: 1649934 - RNA, 18 nt, Human
aggcauugugggaagggg

SEQ ID NO: 1649935 - RNA, 20 nt, Human
aggcauuuaggccaugggac

SEQ ID NO: 1649936 - RNA, 18 nt, Human
uggcacccggccccugcu

SEQ ID NO: 1649937 - RNA, 19 nt, Human
uggcacccggccccugcug

SEQ ID NO: 1649938 - RNA, 20 nt, Human
uggcacccggccccugcugg

SEQ ID NO: 1649939 - RNA, 13 nt, Human
uggcagcucagag

SEQ ID NO: 1649940 - RNA, 23 nt, Human
uggcagcucaccucucccuugga

SEQ ID NO: 1649941 - RNA, 21 nt, Human
uggcagcucaccucucccuug

SEQ ID NO: 1649942 - RNA, 22 nt, Human
uggcagcucaccucucccuugg

SEQ ID NO: 1649943 - RNA, 13 nt, Human
aggccagccuuga

SEQ ID NO: 1649944 - RNA, 12 nt, Human
aggccagcugcu

SEQ ID NO: 1649945 - RNA, 15 nt, Human
aggccagccuugacc

SEQ ID NO: 1649946 - RNA, 13 nt, Human
aggcccagagggc

SEQ ID NO: 1649947 - RNA, 13 nt, Human
aggcccggccucu

SEQ ID NO: 1649948 - RNA, 14 nt, Human
aggcccggccucuc

SEQ ID NO: 1649949 - RNA, 15 nt, Human
aggcccggccucuca

SEQ ID NO: 1649950 - RNA, 13 nt, Human
aggcccggcucca

SEQ ID NO: 1649951 - RNA, 14 nt, Human
aggccccgcccagg

SEQ ID NO: 1649952 - RNA, 15 nt, Human
aggcccccaggugcc

SEQ ID NO: 1649953 - RNA, 23 nt, Human
uggcacaucagcacgauuucugu

SEQ ID NO: 1649954 - RNA, 21 nt, Human
uggaugccugguggcagcugc

SEQ ID NO: 1649955 - RNA, 23 nt, Human
uggaugccugguggcagcugcgg

SEQ ID NO: 1649956 - RNA, 13 nt, Human
uggauggaagggg

SEQ ID NO: 1649957 - RNA, 16 nt, Human
aggcauuugcugaaua

SEQ ID NO: 1649958 - RNA, 20 nt, Human
aggcauuugcugaauacaga

SEQ ID NO: 1649959 - RNA, 14 nt, Human
uggagugcagugag

SEQ ID NO: 1649960 - RNA, 14 nt, Human
uggaguugaaaauc

SEQ ID NO: 1649961 - RNA, 19 nt, Human
aggacuaggguccugggga

SEQ ID NO: 1649962 - RNA, 16 nt, Human
aggacuaggguccugg

SEQ ID NO: 1649963 - RNA, 18 nt, Human
aggacuaggguccugggg

SEQ ID NO: 1649964 - RNA, 15 nt, Human
aggacuaggguccug

SEQ ID NO: 1649965 - RNA, 13 nt, Human
aggaauucuguau

SEQ ID NO: 1649966 - RNA, 14 nt, Human
aggaauucuguaua

SEQ ID NO: 1649967 - RNA, 15 nt, Human
aggaauucuguauag

SEQ ID NO: 1649968 - RNA, 13 nt, Human
aggacgcucucug

SEQ ID NO: 1649969 - RNA, 14 nt, Human
aggacgcucucugg

SEQ ID NO: 1649970 - RNA, 16 nt, Human
aggacgcucucuggcc

SEQ ID NO: 1649971 - RNA, 17 nt, Human
aggacgcucucuggccu

SEQ ID NO: 1649972 - RNA, 19 nt, Human
aggacgcucucuggccuuc

SEQ ID NO: 1649973 - RNA, 20 nt, Human
aggacgcucucuggccuucg

SEQ ID NO: 1649974 - RNA, 12 nt, Human
aggacucugccu

SEQ ID NO: 1649975 - RNA, 13 nt, Human
aggacucugccuc

SEQ ID NO: 1649976 - RNA, 14 nt, Human
aggacucugccucc

SEQ ID NO: 1649977 - RNA, 16 nt, Human
aggacucugccuccuc

SEQ ID NO: 1649978 - RNA, 17 nt, Human
aggacucugccuccucu

SEQ ID NO: 1649979 - RNA, 18 nt, Human
aggacucugccuccucuu

SEQ ID NO: 1649980 - RNA, 19 nt, Human
aggacucugccuccucuuc

SEQ ID NO: 1649981 - RNA, 14 nt, Human
aggacuucuuuaau

SEQ ID NO: 1649982 - RNA, 16 nt, Human
aggacuucuuuaauuu

SEQ ID NO: 1649983 - RNA, 21 nt, Human
aggacuucuuuaauuuuggaa

SEQ ID NO: 1649984 - RNA, 22 nt, Human
aggacuucuuuaauuuuggaau

SEQ ID NO: 1649985 - RNA, 23 nt, Human
aggacuucuuuaauuuuggaauu

SEQ ID NO: 1649986 - RNA, 17 nt, Human
aggacuuuucuuugugg

SEQ ID NO: 1649987 - RNA, 19 nt, Human
aggacuuuucuuuguggcu

SEQ ID NO: 1649988 - RNA, 22 nt, Human
aggacuuuucuuuguggcuucc

SEQ ID NO: 1649989 - RNA, 23 nt, Human
aggacuuuucuuuguggcuuccu

SEQ ID NO: 1649990 - RNA, 18 nt, Human
aggagaaacuggaacucu

SEQ ID NO: 1649991 - RNA, 19 nt, Human
aggagaaacuggaacucuc

SEQ ID NO: 1649992 - RNA, 14 nt, Human
aggagcagccacau

SEQ ID NO: 1649993 - RNA, 17 nt, Human
aggagccccgaggccuu

SEQ ID NO: 1649994 - RNA, 16 nt, Human
aggagccuccugcccu

SEQ ID NO: 1649995 - RNA, 12 nt, Human
aggagcagccac

SEQ ID NO: 1649996 - RNA, 13 nt, Human
aggagcagccaca

SEQ ID NO: 1649997 - RNA, 13 nt, Human
aggaucagucuga

SEQ ID NO: 1649998 - RNA, 22 nt, Human
aggaugcacagaguuguuacau

SEQ ID NO: 1649999 - RNA, 22 nt, Human
aggaugaucuaggaagacuuug

SEQ ID NO: 1650000 - RNA, 23 nt, Human
aggaugaucuaggaagacuuugg

SEQ ID NO: 1650001 - RNA, 17 nt, Human
aggauucuuccucccuc

SEQ ID NO: 1650002 - RNA, 19 nt, Human
aggauucuuccucccuccc

SEQ ID NO: 1650003 - RNA, 17 nt, Human
ugcuuuuucucaaaaug

SEQ ID NO: 1650004 - RNA, 16 nt, Human
ugcuuuuuauggccug

SEQ ID NO: 1650005 - RNA, 21 nt, Human
uggaaauuuguuauaaugaau

SEQ ID NO: 1650006 - RNA, 23 nt, Human
uggaaauuuguuauaaugaauga

SEQ ID NO: 1650007 - RNA, 16 nt, Human
uggaagacagcucuua

SEQ ID NO: 1650008 - RNA, 14 nt, Human
ugcuuugggcugcc

SEQ ID NO: 1650009 - RNA, 15 nt, Human
ugcuuugggcugccc

SEQ ID NO: 1650010 - RNA, 17 nt, Human
aggagccuccugcccuu

SEQ ID NO: 1650011 - RNA, 15 nt, Human
ugcuugagcucagga

SEQ ID NO: 1650012 - RNA, 16 nt, Human
ugcuuugggcugcccu

SEQ ID NO: 1650013 - RNA, 17 nt, Human
ugcuuugggcugcccug

SEQ ID NO: 1650014 - RNA, 22 nt, Human
ugcuuugugauuuuuguaauuu

SEQ ID NO: 1650015 - RNA, 20 nt, Human
ugcuuuugucuaugggacuc

SEQ ID NO: 1650016 - RNA, 23 nt, Human
ugcuuuuuaauauugauaugcuu

SEQ ID NO: 1650017 - RNA, 18 nt, Human
ugcuuuuggucuguguga

SEQ ID NO: 1650018 - RNA, 17 nt, Human
ugcuuuuaaaaaaaaau

SEQ ID NO: 1650019 - RNA, 12 nt, Human
ugcagacaggca

SEQ ID NO: 1650020 - RNA, 13 nt, Human
ugcagacaggcaa

SEQ ID NO: 1650021 - RNA, 21 nt, Human
ugcagacaggcaagcaccucc

SEQ ID NO: 1650022 - RNA, 13 nt, Human
agccuccugcccu

SEQ ID NO: 1650023 - RNA, 14 nt, Human
agccuccugcccuu

SEQ ID NO: 1650024 - RNA, 18 nt, Human
agccuccugcccuuaccu

SEQ ID NO: 1650025 - RNA, 11 nt, Human
ugcaggucccu

SEQ ID NO: 1650026 - RNA, 22 nt, Human
ugcaggucccuaauaaagcugu

SEQ ID NO: 1650027 - RNA, 21 nt, Human
ugcagccucacaguccuuacc

SEQ ID NO: 1650028 - RNA, 18 nt, Human
ugcagccucacaguccuu

SEQ ID NO: 1650029 - RNA, 19 nt, Human
ugcaugcugucccuuacgu

SEQ ID NO: 1650030 - RNA, 21 nt, Human
ugcaugcugucccuuacguga

SEQ ID NO: 1650031 - RNA, 18 nt, Human
ugcaugcugucccuuacg

SEQ ID NO: 1650032 - RNA, 13 nt, Human
ugcaucucagccc

SEQ ID NO: 1650033 - RNA, 14 nt, Human
ugcaucucagccca

SEQ ID NO: 1650034 - RNA, 15 nt, Human
ugcaucucagcccac

SEQ ID NO: 1650035 - RNA, 20 nt, Human
ugcauaccacuuuuguucuu

SEQ ID NO: 1650036 - RNA, 18 nt, Human
ugcauaccacuuuuguuc

SEQ ID NO: 1650037 - RNA, 16 nt, Human
ugcauaccacuuuugu

SEQ ID NO: 1650038 - RNA, 17 nt, Human
ugcauagaauaaaauuu

SEQ ID NO: 1650039 - RNA, 20 nt, Human
ugcauagauucccugagcag

SEQ ID NO: 1650040 - RNA, 13 nt, Human
ugcauacucauua

SEQ ID NO: 1650041 - RNA, 21 nt, Human
ugcauaccacuuuuguucuug

SEQ ID NO: 1650042 - RNA, 19 nt, Human
ugcauacucauuaggaugg

SEQ ID NO: 1650043 - RNA, 17 nt, Human
agccugugccucuggga

SEQ ID NO: 1650044 - RNA, 18 nt, Human
agccugugccucugggac

SEQ ID NO: 1650045 - RNA, 19 nt, Human
agccugugccucugggacu

SEQ ID NO: 1650046 - RNA, 13 nt, Human
agccuugaacuuu

SEQ ID NO: 1650047 - RNA, 15 nt, Human
agccuguuuaagaga

SEQ ID NO: 1650048 - RNA, 22 nt, Human
agccuuagaagucacacaguau

SEQ ID NO: 1650049 - RNA, 20 nt, Human
agccuuagaagucacacagu

SEQ ID NO: 1650050 - RNA, 16 nt, Human
agccuugggaccccug

SEQ ID NO: 1650051 - RNA, 18 nt, Human
agccuugaccauucucca

SEQ ID NO: 1650052 - RNA, 19 nt, Human
agccuugaccauucuccac

SEQ ID NO: 1650053 - RNA, 21 nt, Human
agccuugaccauucuccaccu

SEQ ID NO: 1650054 - RNA, 19 nt, Human
agccuugcggaagguucua

SEQ ID NO: 1650055 - RNA, 18 nt, Human
ugccaaugggagcucaug

SEQ ID NO: 1650056 - RNA, 13 nt, Human
ugccaauggacua

SEQ ID NO: 1650057 - RNA, 14 nt, Human
ugccaaugggagcu

SEQ ID NO: 1650058 - RNA, 16 nt, Human
ugcauuuaaaagauac

SEQ ID NO: 1650059 - RNA, 17 nt, Human
ugccagccgagauagcc

SEQ ID NO: 1650060 - RNA, 22 nt, Human
ugccagccgagauagccaaggc

SEQ ID NO: 1650061 - RNA, 13 nt, Human
ugccauaauuacu

SEQ ID NO: 1650062 - RNA, 17 nt, Human
ugccaguuauggcuaua

SEQ ID NO: 1650063 - RNA, 17 nt, Human
agcccugggaggcucug

SEQ ID NO: 1650064 - RNA, 18 nt, Human
agcccugggaggcucugg

SEQ ID NO: 1650065 - RNA, 20 nt, Human
agcccugggaggcucuggag

SEQ ID NO: 1650066 - RNA, 21 nt, Human
ugcaccacugcacuccagccu

SEQ ID NO: 1650067 - RNA, 13 nt, Human
ugcaccagcccuu

SEQ ID NO: 1650068 - RNA, 22 nt, Human
ugcagaagacaguauggcagcu

SEQ ID NO: 1650069 - RNA, 16 nt, Human
ugcacuccagccuggg

SEQ ID NO: 1650070 - RNA, 15 nt, Human
ugcacuccagccugg

SEQ ID NO: 1650071 - RNA, 17 nt, Human
ugcacuccagccugagc

SEQ ID NO: 1650072 - RNA, 14 nt, Human
ugcaccggcuggcc

SEQ ID NO: 1650073 - RNA, 15 nt, Human
ugcaccggcuggccu

SEQ ID NO: 1650074 - RNA, 16 nt, Human
ugcaccggcuggccug

SEQ ID NO: 1650075 - RNA, 14 nt, Human
ugcacuccagccug

SEQ ID NO: 1650076 - RNA, 15 nt, Human
ugcacuccagccuga

SEQ ID NO: 1650077 - RNA, 16 nt, Human
agcccgggcucugccu

SEQ ID NO: 1650078 - RNA, 14 nt, Human
agcccugcagaggg

SEQ ID NO: 1650079 - RNA, 15 nt, Human
agcccugcagagggc

SEQ ID NO: 1650080 - RNA, 16 nt, Human
agcccugcagagggca

SEQ ID NO: 1650081 - RNA, 19 nt, Human
agcccugcagagggcacag

SEQ ID NO: 1650082 - RNA, 14 nt, Human
agccccuucugacc

SEQ ID NO: 1650083 - RNA, 15 nt, Human
agccccuucugaccc

SEQ ID NO: 1650084 - RNA, 16 nt, Human
agccccuucugaccca

SEQ ID NO: 1650085 - RNA, 19 nt, Human
agccccuucugacccaugc

SEQ ID NO: 1650086 - RNA, 13 nt, Human
agcccgggcucug

SEQ ID NO: 1650087 - RNA, 14 nt, Human
agcccgggcucugc

SEQ ID NO: 1650088 - RNA, 15 nt, Human
agcccgggcucugcc

SEQ ID NO: 1650089 - RNA, 14 nt, Human
agccccgaggccuu

SEQ ID NO: 1650090 - RNA, 14 nt, Human
agcccaggccuccu

SEQ ID NO: 1650091 - RNA, 19 nt, Human
agcccaggccuccuacagc

SEQ ID NO: 1650092 - RNA, 21 nt, Human
agcccaggccuccuacagcuu

SEQ ID NO: 1650093 - RNA, 18 nt, Human
agccccgugggguuccuc

SEQ ID NO: 1650094 - RNA, 15 nt, Human
ugcaaggucauuuuu

SEQ ID NO: 1650095 - RNA, 12 nt, Human
agcccaggccuc

SEQ ID NO: 1650096 - RNA, 21 nt, Human
ugcaauaaaauggguuuuacu

SEQ ID NO: 1650097 - RNA, 17 nt, Human
ugcaauaaaauggguuu

SEQ ID NO: 1650098 - RNA, 13 nt, Human
ugcaacaggcugg

SEQ ID NO: 1650099 - RNA, 15 nt, Human
ugcaagccagauuuu

SEQ ID NO: 1650100 - RNA, 21 nt, Human
ugcaagccagauuuuccugaa

SEQ ID NO: 1650101 - RNA, 23 nt, Human
ugauuugacauagucuggcugua

SEQ ID NO: 1650102 - RNA, 18 nt, Human
ugauuuccguuaaaauac

SEQ ID NO: 1650103 - RNA, 12 nt, Human
ugauuuggaaaa

SEQ ID NO: 1650104 - RNA, 12 nt, Human
ugcaaaccauca

SEQ ID NO: 1650105 - RNA, 13 nt, Human
ugcaaaccaucau

SEQ ID NO: 1650106 - RNA, 17 nt, Human
agccacggccaggccag

SEQ ID NO: 1650107 - RNA, 18 nt, Human
agccacggccaggccaga

SEQ ID NO: 1650108 - RNA, 13 nt, Human
ugauuucauucaa

SEQ ID NO: 1650109 - RNA, 23 nt, Human
ugcaaaguucccuacuuccugug

SEQ ID NO: 1650110 - RNA, 20 nt, Human
ugcaaaguaucccuacugua

SEQ ID NO: 1650111 - RNA, 14 nt, Human
ugcaaagcccagcu

SEQ ID NO: 1650112 - RNA, 15 nt, Human
ugcaaagcccagcuu

SEQ ID NO: 1650113 - RNA, 17 nt, Human
ugcaaagcccagcuuga

SEQ ID NO: 1650114 - RNA, 21 nt, Human
ugcaaaggguaucaggugcug

SEQ ID NO: 1650115 - RNA, 18 nt, Human
ugcaaaccaucauugaaa

SEQ ID NO: 1650116 - RNA, 20 nt, Human
ugcaaaccaucauugaaauc

SEQ ID NO: 1650117 - RNA, 18 nt, Human
ugcaaagcacugacuucu

SEQ ID NO: 1650118 - RNA, 20 nt, Human
ugcaaagcacugacuucuaa

SEQ ID NO: 1650119 - RNA, 22 nt, Human
ugcaaagcacugacuucuaagu

SEQ ID NO: 1650120 - RNA, 18 nt, Human
ugauccacucgccuucau

SEQ ID NO: 1650121 - RNA, 14 nt, Human
ugauccacucgccu

SEQ ID NO: 1650122 - RNA, 13 nt, Human
ugauccagaaaga

SEQ ID NO: 1650123 - RNA, 20 nt, Human
ugauccagcagauuauucac

SEQ ID NO: 1650124 - RNA, 19 nt, Human
ugauccagcagauuauuca

SEQ ID NO: 1650125 - RNA, 23 nt, Human
ugauccagaaagaaaacuuguau

SEQ ID NO: 1650126 - RNA, 18 nt, Human
ugauccucccaccucagc

SEQ ID NO: 1650127 - RNA, 13 nt, Human
ugaucuaggaaga

SEQ ID NO: 1650128 - RNA, 19 nt, Human
ugauccucccaccucagcc

SEQ ID NO: 1650129 - RNA, 20 nt, Human
ugauccucccaccucagccu

SEQ ID NO: 1650130 - RNA, 13 nt, Human
agccaccacgccc

SEQ ID NO: 1650131 - RNA, 21 nt, Human
ugauguuuuaaggaugcuugu

SEQ ID NO: 1650132 - RNA, 17 nt, Human
ugauguuuuccaugagu

SEQ ID NO: 1650133 - RNA, 23 nt, Human
ugauguuuuccaugaguccccug

SEQ ID NO: 1650134 - RNA, 19 nt, Human
ugauguuuuccaugagucc

SEQ ID NO: 1650135 - RNA, 19 nt, Human
ugauggguuaguggaugga

SEQ ID NO: 1650136 - RNA, 23 nt, Human
ugauggguuaguggauggaaggg

SEQ ID NO: 1650137 - RNA, 22 nt, Human
ugauggggcccugccuccuuug

SEQ ID NO: 1650138 - RNA, 16 nt, Human
ugauuaaauucuugca

SEQ ID NO: 1650139 - RNA, 13 nt, Human
ugauuaaauucuu

SEQ ID NO: 1650140 - RNA, 17 nt, Human
ugauuaaauucuugcaa

SEQ ID NO: 1650141 - RNA, 15 nt, Human
ugauuaaguaaugau

SEQ ID NO: 1650142 - RNA, 16 nt, Human
agccacggccaggcca

SEQ ID NO: 1650143 - RNA, 16 nt, Human
ugauuaaguaaugaua

SEQ ID NO: 1650144 - RNA, 22 nt, Human
ugaugaaaugaggucagagccu

SEQ ID NO: 1650145 - RNA, 14 nt, Human
ugaucuaggaagac

SEQ ID NO: 1650146 - RNA, 15 nt, Human
ugaucuaggaagacu

SEQ ID NO: 1650147 - RNA, 18 nt, Human
ugaugaaauguaaauacu

SEQ ID NO: 1650148 - RNA, 23 nt, Human
ugaugaaaugaggucagagccug

SEQ ID NO: 1650149 - RNA, 19 nt, Human
ugaugaucuuugcagacag

SEQ ID NO: 1650150 - RNA, 20 nt, Human
ugaugaucuuugcagacagg

SEQ ID NO: 1650151 - RNA, 21 nt, Human
ugaugaucuuugcagacaggc

SEQ ID NO: 1650152 - RNA, 22 nt, Human
ugaugggcaacccccagccugc

SEQ ID NO: 1650153 - RNA, 13 nt, Human
ugauggggcccug

SEQ ID NO: 1650154 - RNA, 13 nt, Human
agcauggcugcca

SEQ ID NO: 1650155 - RNA, 14 nt, Human
agcauccuggaaua

SEQ ID NO: 1650156 - RNA, 15 nt, Human
agcauccuggaauau

SEQ ID NO: 1650157 - RNA, 13 nt, Human
agcauccuggaau

SEQ ID NO: 1650158 - RNA, 23 nt, Human
agcaucaggccaggcccucugcc

SEQ ID NO: 1650159 - RNA, 22 nt, Human
agcaucaggccaggcccucugc

SEQ ID NO: 1650160 - RNA, 21 nt, Human
agcaucaggccaggcccucug

SEQ ID NO: 1650161 - RNA, 12 nt, Human
agcaucaggcca

SEQ ID NO: 1650162 - RNA, 18 nt, Human
ugauacaaugcugugccc

SEQ ID NO: 1650163 - RNA, 21 nt, Human
ugauacagaaaaguugaauuu

SEQ ID NO: 1650164 - RNA, 14 nt, Human
ugaucaccugcccu

SEQ ID NO: 1650165 - RNA, 18 nt, Human
ugaucacggcucacugca

SEQ ID NO: 1650166 - RNA, 15 nt, Human
ugaucacggcucacu

SEQ ID NO: 1650167 - RNA, 13 nt, Human
ugaucacggcuca

SEQ ID NO: 1650168 - RNA, 14 nt, Human
ugaucacggcucac

SEQ ID NO: 1650169 - RNA, 17 nt, Human
agcauauucaggaagcu

SEQ ID NO: 1650170 - RNA, 19 nt, Human
agcauauucaggaagcuca

SEQ ID NO: 1650171 - RNA, 21 nt, Human
agcauauucaggaagcucagg

SEQ ID NO: 1650172 - RNA, 17 nt, Human
agcauuuguguugaaga

SEQ ID NO: 1650173 - RNA, 18 nt, Human
agcauuuguguugaagag

SEQ ID NO: 1650174 - RNA, 13 nt, Human
agcauuuuauaaa

SEQ ID NO: 1650175 - RNA, 14 nt, Human
agcauuuuauaaau

SEQ ID NO: 1650176 - RNA, 15 nt, Human
agcauuuuauaaauc

SEQ ID NO: 1650177 - RNA, 20 nt, Human
agcauuuuauaaaucgcuuu

SEQ ID NO: 1650178 - RNA, 18 nt, Human
agccaaacauccuacaag

SEQ ID NO: 1650179 - RNA, 22 nt, Human
agcauuuugcuaaaugugaaug

SEQ ID NO: 1650180 - RNA, 15 nt, Human
agcauuuugcuaaau

SEQ ID NO: 1650181 - RNA, 17 nt, Human
agcauuagauuucucau

SEQ ID NO: 1650182 - RNA, 19 nt, Human
agcauggcugccaauggga

SEQ ID NO: 1650183 - RNA, 18 nt, Human
agcauucucacuccuacc

SEQ ID NO: 1650184 - RNA, 20 nt, Human
agcauucucacuccuaccug

SEQ ID NO: 1650185 - RNA, 22 nt, Human
agcauucucacuccuaccuggu

SEQ ID NO: 1650186 - RNA, 22 nt, Human
agcauuuagauguauagguuga

SEQ ID NO: 1650187 - RNA, 15 nt, Human
agcaggcugugaguu

SEQ ID NO: 1650188 - RNA, 13 nt, Human
agcagggaaacag

SEQ ID NO: 1650189 - RNA, 14 nt, Human
agcagggaaacagc

SEQ ID NO: 1650190 - RNA, 15 nt, Human
agcagggaaacagcu

SEQ ID NO: 1650191 - RNA, 21 nt, Human
agcaggcucucaggccagcug

SEQ ID NO: 1650192 - RNA, 22 nt, Human
agcaggcucucaggccagcugc

SEQ ID NO: 1650193 - RNA, 23 nt, Human
agcaggcucucaggccagcugcu

SEQ ID NO: 1650194 - RNA, 17 nt, Human
agcaggcucgggcuccc

SEQ ID NO: 1650195 - RNA, 13 nt, Human
agcaggcucucag

SEQ ID NO: 1650196 - RNA, 14 nt, Human
agcaggcucucagg

SEQ ID NO: 1650197 - RNA, 15 nt, Human
agcaggcucucaggc

SEQ ID NO: 1650198 - RNA, 16 nt, Human
agcaggcucucaggcc

SEQ ID NO: 1650199 - RNA, 17 nt, Human
agcaggcucucaggcca

SEQ ID NO: 1650200 - RNA, 18 nt, Human
agcaggcucucaggccag

SEQ ID NO: 1650201 - RNA, 19 nt, Human
agcaggcucucaggccagc

SEQ ID NO: 1650202 - RNA, 22 nt, Human
agcagggcucagcggggacagc

SEQ ID NO: 1650203 - RNA, 13 nt, Human
agcagggcucagc

SEQ ID NO: 1650204 - RNA, 14 nt, Human
agcagggcucagcg

SEQ ID NO: 1650205 - RNA, 15 nt, Human
agcagggcucagcgg

SEQ ID NO: 1650206 - RNA, 20 nt, Human
agcagggagggcuucugcca

SEQ ID NO: 1650207 - RNA, 19 nt, Human
agcagggcauggcugggaa

SEQ ID NO: 1650208 - RNA, 20 nt, Human
ugacccaugcugcccuguga

SEQ ID NO: 1650209 - RNA, 18 nt, Human
ugacccaugcugcccugu

SEQ ID NO: 1650210 - RNA, 19 nt, Human
ugacccaugcugcccugug

SEQ ID NO: 1650211 - RNA, 16 nt, Human
agcagcagggagggcu

SEQ ID NO: 1650212 - RNA, 13 nt, Human
agcaggacaugga

SEQ ID NO: 1650213 - RNA, 15 nt, Human
agcagccacauuccu

SEQ ID NO: 1650214 - RNA, 11 nt, Human
agcagccacau

SEQ ID NO: 1650215 - RNA, 14 nt, Human
agcaggcuacuguc

SEQ ID NO: 1650216 - RNA, 16 nt, Human
agcaggcuacugucag

SEQ ID NO: 1650217 - RNA, 17 nt, Human
agcaggcuacugucagc

SEQ ID NO: 1650218 - RNA, 19 nt, Human
agcaggcuacugucagcuc

SEQ ID NO: 1650219 - RNA, 20 nt, Human
agcaggcuacugucagcucc

SEQ ID NO: 1650220 - RNA, 17 nt, Human
agcagucaggaaagaga

SEQ ID NO: 1650221 - RNA, 18 nt, Human
agcagucaggaaagagaa

SEQ ID NO: 1650222 - RNA, 14 nt, Human
agcaguuugcuuug

SEQ ID NO: 1650223 - RNA, 19 nt, Human
agcauaaaaauuagccaag

SEQ ID NO: 1650224 - RNA, 19 nt, Human
agcagucaggaaagagaac

SEQ ID NO: 1650225 - RNA, 18 nt, Human
agcauauauuuuuauauu

SEQ ID NO: 1650226 - RNA, 20 nt, Human
agcauauauuuuuauauuua

SEQ ID NO: 1650227 - RNA, 22 nt, Human
agcauauauuuuuauauuuacu

SEQ ID NO: 1650228 - RNA, 19 nt, Human
ugaguacguugugcauuug

SEQ ID NO: 1650229 - RNA, 18 nt, Human
ugaguacguugugcauuu

SEQ ID NO: 1650230 - RNA, 17 nt, Human
ugaguacguugugcauu

SEQ ID NO: 1650231 - RNA, 16 nt, Human
ugaguacguugugcau

SEQ ID NO: 1650232 - RNA, 15 nt, Human
agcauauauuuuuau

SEQ ID NO: 1650233 - RNA, 19 nt, Human
agcauaccaacacgagcag

SEQ ID NO: 1650234 - RNA, 22 nt, Human
agcauaccaacacgagcaggcu

SEQ ID NO: 1650235 - RNA, 23 nt, Human
agcauaaaaauuagccaagugug

SEQ ID NO: 1650236 - RNA, 13 nt, Human
agcauaccaacac

SEQ ID NO: 1650237 - RNA, 18 nt, Human
ugagucaccaagcccagu

SEQ ID NO: 1650238 - RNA, 20 nt, Human
ugaguacguugugcauuugg

SEQ ID NO: 1650239 - RNA, 14 nt, Human
ugaguacuacaguc

SEQ ID NO: 1650240 - RNA, 13 nt, Human
ugaguccagaagu

SEQ ID NO: 1650241 - RNA, 16 nt, Human
ugagugccuuacacaa

SEQ ID NO: 1650242 - RNA, 17 nt, Human
ugagugcagcucuggag

SEQ ID NO: 1650243 - RNA, 13 nt, Human
ugagugccuuaca

SEQ ID NO: 1650244 - RNA, 14 nt, Human
ugagugccuuacac

SEQ ID NO: 1650245 - RNA, 21 nt, Human
ugagugggggaucacagccuc

SEQ ID NO: 1650246 - RNA, 23 nt, Human
ugagugggggaucacagccucug

SEQ ID NO: 1650247 - RNA, 15 nt, Human
ugauacaaugcugug

SEQ ID NO: 1650248 - RNA, 14 nt, Human
ugauacaaugcugu

SEQ ID NO: 1650249 - RNA, 12 nt, Human
agauacugaaau

SEQ ID NO: 1650250 - RNA, 13 nt, Human
agauacugaaaua

SEQ ID NO: 1650251 - RNA, 15 nt, Human
agauacugaaauaaa

SEQ ID NO: 1650252 - RNA, 17 nt, Human
agauaaagguucaugca

SEQ ID NO: 1650253 - RNA, 12 nt, Human
agauaaaugugc

SEQ ID NO: 1650254 - RNA, 14 nt, Human
agaucacgccacug

SEQ ID NO: 1650255 - RNA, 15 nt, Human
agaucacgccacugc

SEQ ID NO: 1650256 - RNA, 16 nt, Human
agaucacgccacugca

SEQ ID NO: 1650257 - RNA, 22 nt, Human
ugaauuuauuggcuuuucugau

SEQ ID NO: 1650258 - RNA, 23 nt, Human
ugaauuuauuggcuuuucugauc

SEQ ID NO: 1650259 - RNA, 16 nt, Human
ugaauuuuacauggcu

SEQ ID NO: 1650260 - RNA, 15 nt, Human
ugaauuucuuuugcc

SEQ ID NO: 1650261 - RNA, 21 nt, Human
ugaauuuauuggcuuuucuga

SEQ ID NO: 1650262 - RNA, 17 nt, Human
agaucacgccacugcac

SEQ ID NO: 1650263 - RNA, 18 nt, Human
agaucacgccacugcacu

SEQ ID NO: 1650264 - RNA, 19 nt, Human
ugaaugucagugugacuga

SEQ ID NO: 1650265 - RNA, 20 nt, Human
ugaaugguuuucaaaauaaa

SEQ ID NO: 1650266 - RNA, 20 nt, Human
agaguugaugguuguacaua

SEQ ID NO: 1650267 - RNA, 12 nt, Human
agaguuguuaca

SEQ ID NO: 1650268 - RNA, 16 nt, Human
agaguuguuacauuuu

SEQ ID NO: 1650269 - RNA, 16 nt, Human
agaguuuagcuggaaa

SEQ ID NO: 1650270 - RNA, 17 nt, Human
agaguuuagcuggaaaa

SEQ ID NO: 1650271 - RNA, 22 nt, Human
agaguugauacuacaguuuguu

SEQ ID NO: 1650272 - RNA, 20 nt, Human
agaguugauacuacaguuug

SEQ ID NO: 1650273 - RNA, 17 nt, Human
agaguugauacuacagu

SEQ ID NO: 1650274 - RNA, 14 nt, Human
agaugcaccagccc

SEQ ID NO: 1650275 - RNA, 15 nt, Human
agaugcaccagcccu

SEQ ID NO: 1650276 - RNA, 18 nt, Human
agaugcaguucugaagaa

SEQ ID NO: 1650277 - RNA, 19 nt, Human
agaugcaguucugaagaag

SEQ ID NO: 1650278 - RNA, 20 nt, Human
agaugcaguucugaagaaga

SEQ ID NO: 1650279 - RNA, 14 nt, Human
agaugcuagaacuc

SEQ ID NO: 1650280 - RNA, 15 nt, Human
agaugcuagaacucc

SEQ ID NO: 1650281 - RNA, 15 nt, Human
agaugcuucucacug

SEQ ID NO: 1650282 - RNA, 12 nt, Human
ugacccacugcu

SEQ ID NO: 1650283 - RNA, 13 nt, Human
ugacccacugcuu

SEQ ID NO: 1650284 - RNA, 17 nt, Human
ugacccacaagaaauga

SEQ ID NO: 1650285 - RNA, 20 nt, Human
ugacaggcaaugcuggcugu

SEQ ID NO: 1650286 - RNA, 21 nt, Human
ugacacacagcucuguccugg

SEQ ID NO: 1650287 - RNA, 11 nt, Human
ugacagggcac

SEQ ID NO: 1650288 - RNA, 16 nt, Human
ugacagggcacaccgg

SEQ ID NO: 1650289 - RNA, 21 nt, Human
ugacagggcacaccgggcacu

SEQ ID NO: 1650290 - RNA, 20 nt, Human
ugacagggcacaccgggcac

SEQ ID NO: 1650291 - RNA, 12 nt, Human
agaucauuguga

SEQ ID NO: 1650292 - RNA, 13 nt, Human
agaucagccuggg

SEQ ID NO: 1650293 - RNA, 15 nt, Human
agaucagccugggca

SEQ ID NO: 1650294 - RNA, 18 nt, Human
ugaccaaugauggucacc

SEQ ID NO: 1650295 - RNA, 20 nt, Human
ugacauuguuggccaaagcc

SEQ ID NO: 1650296 - RNA, 21 nt, Human
ugacauuguuggccaaagcca

SEQ ID NO: 1650297 - RNA, 19 nt, Human
agaggccaugggccuccug

SEQ ID NO: 1650298 - RNA, 21 nt, Human
agaggcagggucucacucugu

SEQ ID NO: 1650299 - RNA, 10 nt, Human
agaggcaggg

SEQ ID NO: 1650300 - RNA, 13 nt, Human
agaggcagggucu

SEQ ID NO: 1650301 - RNA, 13 nt, Human
agaggcagcccca

SEQ ID NO: 1650302 - RNA, 19 nt, Human
agaggcagccccauucugc

SEQ ID NO: 1650303 - RNA, 12 nt, Human
agagguuuuaaa

SEQ ID NO: 1650304 - RNA, 22 nt, Human
ugaagcacagugaucaaguuau

SEQ ID NO: 1650305 - RNA, 13 nt, Human
agaggcugaggac

SEQ ID NO: 1650306 - RNA, 19 nt, Human
agagguccacaacacacag

SEQ ID NO: 1650307 - RNA, 15 nt, Human
agagguugcagugag

SEQ ID NO: 1650308 - RNA, 15 nt, Human
agagcuuaacagugu

SEQ ID NO: 1650309 - RNA, 21 nt, Human
agagcuguucacagccagacu

SEQ ID NO: 1650310 - RNA, 22 nt, Human
ugaacuuugaccucugcagcaa

SEQ ID NO: 1650311 - RNA, 20 nt, Human
ugaacuuugaccucugcagc

SEQ ID NO: 1650312 - RNA, 19 nt, Human
ugaacuuugaccucugcag

SEQ ID NO: 1650313 - RNA, 22 nt, Human
agagcugcccucuccugggcag

SEQ ID NO: 1650314 - RNA, 21 nt, Human
ugaacuaggauuguaguccca

SEQ ID NO: 1650315 - RNA, 12 nt, Human
ugaacuccuggc

SEQ ID NO: 1650316 - RNA, 14 nt, Human
ugaacuccuggccu

SEQ ID NO: 1650317 - RNA, 15 nt, Human
ugaacuccuggccuc

SEQ ID NO: 1650318 - RNA, 15 nt, Human
ugaaauuuuuauuaa

SEQ ID NO: 1650319 - RNA, 19 nt, Human
ugaacaaauuuacagagac

SEQ ID NO: 1650320 - RNA, 20 nt, Human
ugaacaaauuuacagagaca

SEQ ID NO: 1650321 - RNA, 17 nt, Human
ugaaauuugaauuuugu

SEQ ID NO: 1650322 - RNA, 14 nt, Human
ugaaauuugaauuu

SEQ ID NO: 1650323 - RNA, 15 nt, Human
ugaaauuugaauuuu

SEQ ID NO: 1650324 - RNA, 16 nt, Human
ugaaauuugaauuuug

SEQ ID NO: 1650325 - RNA, 21 nt, Human
ugaaauuguaauuauaucuga

SEQ ID NO: 1650326 - RNA, 23 nt, Human
ugaaauuuccugggagcuuuugu

SEQ ID NO: 1650327 - RNA, 15 nt, Human
ugaaauuguauuaca

SEQ ID NO: 1650328 - RNA, 18 nt, Human
ugaaauauuauguuaaaa

SEQ ID NO: 1650329 - RNA, 18 nt, Human
agagcugccaccugccug

SEQ ID NO: 1650330 - RNA, 14 nt, Human
agagcugcccucuc

SEQ ID NO: 1650331 - RNA, 13 nt, Human
agagcugcccucu

SEQ ID NO: 1650332 - RNA, 15 nt, Human
agagcugcccucucc

SEQ ID NO: 1650333 - RNA, 17 nt, Human
ugaaauaagccagacau

SEQ ID NO: 1650334 - RNA, 18 nt, Human
ugaaauaagccagacauc

SEQ ID NO: 1650335 - RNA, 20 nt, Human
ugaaauaagccagacaucaa

SEQ ID NO: 1650336 - RNA, 23 nt, Human
ugaaauaagccagacaucaacag

SEQ ID NO: 1650337 - RNA, 11 nt, Human
agagccuugcg

SEQ ID NO: 1650338 - RNA, 21 nt, Human
agagccuugcggaagguucua

SEQ ID NO: 1650339 - RNA, 20 nt, Human
agagcagagaccaucccuga

SEQ ID NO: 1650340 - RNA, 17 nt, Human
agagcagagaccauccc

SEQ ID NO: 1650341 - RNA, 18 nt, Human
agagcagagaccaucccu

SEQ ID NO: 1650342 - RNA, 23 nt, Human
agagauuuuuuuguuguuuguuu

SEQ ID NO: 1650343 - RNA, 22 nt, Human
agagauuuuuuuguuguuuguu

SEQ ID NO: 1650344 - RNA, 17 nt, Human
ucuuuggacccugaggc

SEQ ID NO: 1650345 - RNA, 21 nt, Human
ucuuuggacccugaggcccag

SEQ ID NO: 1650346 - RNA, 21 nt, Human
agagcaccuuagacagucccu

SEQ ID NO: 1650347 - RNA, 12 nt, Human
agagcagagacc

SEQ ID NO: 1650348 - RNA, 15 nt, Human
agaccccuggcuuuu

SEQ ID NO: 1650349 - RNA, 21 nt, Human
agaccccuggcuuuucacugc

SEQ ID NO: 1650350 - RNA, 14 nt, Human
agacccggcugcgu

SEQ ID NO: 1650351 - RNA, 22 nt, Human
agaccugccccuccucucugcc

SEQ ID NO: 1650352 - RNA, 23 nt, Human
agaccugccccuccucucugccc

SEQ ID NO: 1650353 - RNA, 16 nt, Human
agaccugccccuccuc

SEQ ID NO: 1650354 - RNA, 23 nt, Human
agacuauucaaacagucucagga

SEQ ID NO: 1650355 - RNA, 21 nt, Human
agacucaguggggaggggcug

SEQ ID NO: 1650356 - RNA, 17 nt, Human
ucuugagccuugaacuu

SEQ ID NO: 1650357 - RNA, 15 nt, Human
agacucauucuucug

SEQ ID NO: 1650358 - RNA, 19 nt, Human
ucuugagccuugaacuuug

SEQ ID NO: 1650359 - RNA, 18 nt, Human
ucuugagccuugaacuuu

SEQ ID NO: 1650360 - RNA, 20 nt, Human
ucuugagccuugaacuuuga

SEQ ID NO: 1650361 - RNA, 23 nt, Human
ucuucuguacgucugacaggcaa

SEQ ID NO: 1650362 - RNA, 23 nt, Human
agacauacuaaccagcagaaaug

SEQ ID NO: 1650363 - RNA, 14 nt, Human
agacauagaauuaa

SEQ ID NO: 1650364 - RNA, 21 nt, Human
ucuucuguacgucugacaggc

SEQ ID NO: 1650365 - RNA, 22 nt, Human
ucuucuguacgucugacaggca

SEQ ID NO: 1650366 - RNA, 22 nt, Human
ucuucugcuucagccucccgag

SEQ ID NO: 1650367 - RNA, 16 nt, Human
ucuuauuucauuucuu

SEQ ID NO: 1650368 - RNA, 15 nt, Human
ucuuauuucauuucu

SEQ ID NO: 1650369 - RNA, 17 nt, Human
ucuuauuuaaugaaaga

SEQ ID NO: 1650370 - RNA, 14 nt, Human
ucuuuaauuuuaca

SEQ ID NO: 1650371 - RNA, 22 nt, Human
ucuuuaaugucacaggcagguc

SEQ ID NO: 1650372 - RNA, 16 nt, Human
ucuugguuuguaaauu

SEQ ID NO: 1650373 - RNA, 20 nt, Human
ucuuuaaugucacaggcagg

SEQ ID NO: 1650374 - RNA, 14 nt, Human
ucuugguuuguaaa

SEQ ID NO: 1650375 - RNA, 14 nt, Human
ucuuucuuccucug

SEQ ID NO: 1650376 - RNA, 19 nt, Human
ucuuucuggcuaugcauuu

SEQ ID NO: 1650377 - RNA, 18 nt, Human
ucuuucuggcuaugcauu

SEQ ID NO: 1650378 - RNA, 20 nt, Human
ucuuuauaauucuacuuuga

SEQ ID NO: 1650379 - RNA, 13 nt, Human
ucuuucugcuuug

SEQ ID NO: 1650380 - RNA, 15 nt, Human
ucuuucuuccucugc

SEQ ID NO: 1650381 - RNA, 16 nt, Human
ucuuucuuccucugcu

SEQ ID NO: 1650382 - RNA, 17 nt, Human
ucuuucuuccucugcug

SEQ ID NO: 1650383 - RNA, 15 nt, Human
agacucgcgacaaug

SEQ ID NO: 1650384 - RNA, 17 nt, Human
agacucgcgacaaugca

SEQ ID NO: 1650385 - RNA, 18 nt, Human
agacucgcgacaaugcaa

SEQ ID NO: 1650386 - RNA, 19 nt, Human
agacucgcgacaaugcaaa

SEQ ID NO: 1650387 - RNA, 14 nt, Human
agacugucucaaga

SEQ ID NO: 1650388 - RNA, 12 nt, Human
agacuggugacu

SEQ ID NO: 1650389 - RNA, 13 nt, Human
agacuggugacug

SEQ ID NO: 1650390 - RNA, 14 nt, Human
agacuggugacuga

SEQ ID NO: 1650391 - RNA, 20 nt, Human
agacucgcgacaaugcaaac

SEQ ID NO: 1650392 - RNA, 16 nt, Human
agacuggugacugauu

SEQ ID NO: 1650393 - RNA, 17 nt, Human
agacuggugacugauuc

SEQ ID NO: 1650394 - RNA, 19 nt, Human
agacuggugacugauucuu

SEQ ID NO: 1650395 - RNA, 15 nt, Human
agacuguacaaagua

SEQ ID NO: 1650396 - RNA, 16 nt, Human
agacuguacaaaguag

SEQ ID NO: 1650397 - RNA, 18 nt, Human
agacuuguaugaaagaug

SEQ ID NO: 1650398 - RNA, 19 nt, Human
agacuuuuuuuaaauagua

SEQ ID NO: 1650399 - RNA, 22 nt, Human
agagaaaaaauauuuuccugcc

SEQ ID NO: 1650400 - RNA, 15 nt, Human
agagacacaagccuu

SEQ ID NO: 1650401 - RNA, 24 nt, Human
agagacagaaagcagaacagugau

SEQ ID NO: 1650402 - RNA, 14 nt, Human
ucuguacuuuuugg

SEQ ID NO: 1650403 - RNA, 17 nt, Human
ucuguacuuuuuggcau

SEQ ID NO: 1650404 - RNA, 13 nt, Human
ucuguacuuuuug

SEQ ID NO: 1650405 - RNA, 22 nt, Human
ucugugaacuugaaauuugaau

SEQ ID NO: 1650406 - RNA, 19 nt, Human
ucugugaacuugaaauuug

SEQ ID NO: 1650407 - RNA, 17 nt, Human
ucuguucugcacacagc

SEQ ID NO: 1650408 - RNA, 18 nt, Human
ucuguucugcacacagca

SEQ ID NO: 1650409 - RNA, 19 nt, Human
ucuguucugcacacagcac

SEQ ID NO: 1650410 - RNA, 19 nt, Human
ucuguuuagauaauacacc

SEQ ID NO: 1650411 - RNA, 16 nt, Human
ucuguuuagauaauac

SEQ ID NO: 1650412 - RNA, 23 nt, Human
ucuguuuagauaauacaccacua

SEQ ID NO: 1650413 - RNA, 23 nt, Human
agaaccccaggguccuguagccc

SEQ ID NO: 1650414 - RNA, 21 nt, Human
agaauguguuuaaacuugguu

SEQ ID NO: 1650415 - RNA, 19 nt, Human
agaauuaguggcacuugcu

SEQ ID NO: 1650416 - RNA, 22 nt, Human
ucuggguuccuuccucugagcc

SEQ ID NO: 1650417 - RNA, 23 nt, Human
ucuggguuccuuccucugagccu

SEQ ID NO: 1650418 - RNA, 14 nt, Human
agaauucucuaguu

SEQ ID NO: 1650419 - RNA, 20 nt, Human
agaauuauaauuaguuccuc

SEQ ID NO: 1650420 - RNA, 20 nt, Human
agaauucucagaaucucaaa

SEQ ID NO: 1650421 - RNA, 19 nt, Human
ucuuacugucuuuuuucua

SEQ ID NO: 1650422 - RNA, 14 nt, Human
ucuuagauguauau

SEQ ID NO: 1650423 - RNA, 12 nt, Human
ucuuagauguau

SEQ ID NO: 1650424 - RNA, 23 nt, Human
ucuuagaugcaguucugaagaag

SEQ ID NO: 1650425 - RNA, 13 nt, Human
agacagucccugc

SEQ ID NO: 1650426 - RNA, 14 nt, Human
agacagucccugcc

SEQ ID NO: 1650427 - RNA, 15 nt, Human
agacagcugccuggg

SEQ ID NO: 1650428 - RNA, 16 nt, Human
agacagcugccuggga

SEQ ID NO: 1650429 - RNA, 12 nt, Human
agacagucccug

SEQ ID NO: 1650430 - RNA, 14 nt, Human
ucuuaauuaaaaga

SEQ ID NO: 1650431 - RNA, 12 nt, Human
agacagaaaaaa

SEQ ID NO: 1650432 - RNA, 13 nt, Human
agacagcugccug

SEQ ID NO: 1650433 - RNA, 14 nt, Human
agacagcugccugg

SEQ ID NO: 1650434 - RNA, 23 nt, Human
agacacaggcccggcuccaggcu

SEQ ID NO: 1650435 - RNA, 21 nt, Human
agacacauguccaagaagccc

SEQ ID NO: 1650436 - RNA, 22 nt, Human
agacacauguccaagaagccca

SEQ ID NO: 1650437 - RNA, 22 nt, Human
agacaccuugacagggcacacc

SEQ ID NO: 1650438 - RNA, 24 nt, Human
agacacauguccaagaagcccagg

SEQ ID NO: 1650439 - RNA, 19 nt, Human
agacacaggcccggcucca

SEQ ID NO: 1650440 - RNA, 20 nt, Human
agacacaggcccggcuccag

SEQ ID NO: 1650441 - RNA, 21 nt, Human
agacacaggcccggcuccagg

SEQ ID NO: 1650442 - RNA, 22 nt, Human
agacacaggcccggcuccaggc

SEQ ID NO: 1650443 - RNA, 16 nt, Human
agacacacugaagaag

SEQ ID NO: 1650444 - RNA, 17 nt, Human
agacacaggcccggcuc

SEQ ID NO: 1650445 - RNA, 17 nt, Human
agacacacugaagaagc

SEQ ID NO: 1650446 - RNA, 19 nt, Human
agaauucucuaguuugauu

SEQ ID NO: 1650447 - RNA, 18 nt, Human
agaauucucuaguuugau

SEQ ID NO: 1650448 - RNA, 17 nt, Human
agaauucucuuauccaa

SEQ ID NO: 1650449 - RNA, 14 nt, Human
agacacaagccuuc

SEQ ID NO: 1650450 - RNA, 13 nt, Human
agacacaagccuu

SEQ ID NO: 1650451 - RNA, 22 nt, Human
ucuccaaaauaaaacuuuuuaa

SEQ ID NO: 1650452 - RNA, 19 nt, Human
ucuccaaaauaaaacuuuu

SEQ ID NO: 1650453 - RNA, 17 nt, Human
ucuccaaaauaaaacuu

SEQ ID NO: 1650454 - RNA, 15 nt, Human
ucuccaagcaggaca

SEQ ID NO: 1650455 - RNA, 16 nt, Human
ucuccaggcuguaucc

SEQ ID NO: 1650456 - RNA, 19 nt, Human
ucucagggccuggucguuu

SEQ ID NO: 1650457 - RNA, 14 nt, Human
ucucagggccuggu

SEQ ID NO: 1650458 - RNA, 15 nt, Human
ucucagggccugguc

SEQ ID NO: 1650459 - RNA, 12 nt, Human
ucucagggccug

SEQ ID NO: 1650460 - RNA, 13 nt, Human
ucucagggccugg

SEQ ID NO: 1650461 - RNA, 12 nt, Human
ucucaggaaauc

SEQ ID NO: 1650462 - RNA, 16 nt, Human
ucuccauguuugaugu

SEQ ID NO: 1650463 - RNA, 14 nt, Human
acuuugaccucugc

SEQ ID NO: 1650464 - RNA, 17 nt, Human
acuuucuagccagagga

SEQ ID NO: 1650465 - RNA, 21 nt, Human
ucuccuccuuuucacaguucu

SEQ ID NO: 1650466 - RNA, 23 nt, Human
acuuguuagaucuaguucacucu

SEQ ID NO: 1650467 - RNA, 14 nt, Human
acuuguuagaucua

SEQ ID NO: 1650468 - RNA, 15 nt, Human
acuuguuagaucuag

SEQ ID NO: 1650469 - RNA, 16 nt, Human
acuuguguuuugcaag

SEQ ID NO: 1650470 - RNA, 21 nt, Human
ucucacagcuccaagaauuuc

SEQ ID NO: 1650471 - RNA, 11 nt, Human
ucucacuccuu

SEQ ID NO: 1650472 - RNA, 14 nt, Human
acuucaggcucuuc

SEQ ID NO: 1650473 - RNA, 16 nt, Human
acuucaggcucuucuc

SEQ ID NO: 1650474 - RNA, 11 nt, Human
acuucagcuga

SEQ ID NO: 1650475 - RNA, 16 nt, Human
acuucagcugacuuuu

SEQ ID NO: 1650476 - RNA, 15 nt, Human
acuuccugugacuuc

SEQ ID NO: 1650477 - RNA, 16 nt, Human
ucucacuauguugccc

SEQ ID NO: 1650478 - RNA, 13 nt, Human
ucucacuccuuga

SEQ ID NO: 1650479 - RNA, 16 nt, Human
ucucacucugucgccc

SEQ ID NO: 1650480 - RNA, 12 nt, Human
ucucacucuguc

SEQ ID NO: 1650481 - RNA, 14 nt, Human
acuucuccacccug

SEQ ID NO: 1650482 - RNA, 23 nt, Human
acuucuaaguaaaaccacagcag

SEQ ID NO: 1650483 - RNA, 14 nt, Human
acuugcucuugaug

SEQ ID NO: 1650484 - RNA, 16 nt, Human
acuuguggacacagcu

SEQ ID NO: 1650485 - RNA, 17 nt, Human
acuuguggacacagcuc

SEQ ID NO: 1650486 - RNA, 18 nt, Human
acuuguggacacagcucu

SEQ ID NO: 1650487 - RNA, 16 nt, Human
acuugucaauaaaauc

SEQ ID NO: 1650488 - RNA, 20 nt, Human
acuugaaauuugaauuuugu

SEQ ID NO: 1650489 - RNA, 19 nt, Human
acuugaaauuugaauuuug

SEQ ID NO: 1650490 - RNA, 18 nt, Human
acuucuccacccugcucu

SEQ ID NO: 1650491 - RNA, 15 nt, Human
acuucuccacccugc

SEQ ID NO: 1650492 - RNA, 16 nt, Human
acuucuccacccugcu

SEQ ID NO: 1650493 - RNA, 21 nt, Human
acuugaacccauauuuguaca

SEQ ID NO: 1650494 - RNA, 19 nt, Human
acuugaacccgggaggcag

SEQ ID NO: 1650495 - RNA, 20 nt, Human
acuugaacccgggaggcaga

SEQ ID NO: 1650496 - RNA, 19 nt, Human
acuugagcccagagugaac

SEQ ID NO: 1650497 - RNA, 21 nt, Human
acuugaacccgggaggcagag

SEQ ID NO: 1650498 - RNA, 17 nt, Human
ucucucacuuguuuuau

SEQ ID NO: 1650499 - RNA, 21 nt, Human
ucucucacuuguuuuauuuaa

SEQ ID NO: 1650500 - RNA, 13 nt, Human
ucucucacuccuu

SEQ ID NO: 1650501 - RNA, 15 nt, Human
ucucucacuccuuga

SEQ ID NO: 1650502 - RNA, 14 nt, Human
acuuucugaaauaa

SEQ ID NO: 1650503 - RNA, 18 nt, Human
acuuugaccucugcagca

SEQ ID NO: 1650504 - RNA, 16 nt, Human
acuuugaccucugcag

SEQ ID NO: 1650505 - RNA, 15 nt, Human
acuuugaccucugca

SEQ ID NO: 1650506 - RNA, 17 nt, Human
ucucuccagccccugga

SEQ ID NO: 1650507 - RNA, 18 nt, Human
ucucuccagccccuggau

SEQ ID NO: 1650508 - RNA, 19 nt, Human
ucucuccagccccuggaug

SEQ ID NO: 1650509 - RNA, 17 nt, Human
ucucuccuguaccucuu

SEQ ID NO: 1650510 - RNA, 16 nt, Human
ucucuccuguaccucu

SEQ ID NO: 1650511 - RNA, 14 nt, Human
ucucuccuguaccu

SEQ ID NO: 1650512 - RNA, 11 nt, Human
ucucugcccuc

SEQ ID NO: 1650513 - RNA, 15 nt, Human
ucucugcccuccaag

SEQ ID NO: 1650514 - RNA, 16 nt, Human
ucucugcccuccaaga

SEQ ID NO: 1650515 - RNA, 17 nt, Human
ucucugcccuccaagac

SEQ ID NO: 1650516 - RNA, 15 nt, Human
ucucuggaauuugaa

SEQ ID NO: 1650517 - RNA, 19 nt, Human
ucucuggaauuugaaacac

SEQ ID NO: 1650518 - RNA, 12 nt, Human
ucucuggccuuc

SEQ ID NO: 1650519 - RNA, 21 nt, Human
agaaaacuuguauuaugugug

SEQ ID NO: 1650520 - RNA, 18 nt, Human
agaaaaaggaugcacaga

SEQ ID NO: 1650521 - RNA, 19 nt, Human
agaaaacuuguauuaugug

SEQ ID NO: 1650522 - RNA, 17 nt, Human
agaaaaaggaugcacag

SEQ ID NO: 1650523 - RNA, 20 nt, Human
agaaacgaucagacagaucu

SEQ ID NO: 1650524 - RNA, 13 nt, Human
agaaaaagaaaaa

SEQ ID NO: 1650525 - RNA, 20 nt, Human
ucucuuuaaugucacaggca

SEQ ID NO: 1650526 - RNA, 21 nt, Human
ucucuuuaaugucacaggcag

SEQ ID NO: 1650527 - RNA, 21 nt, Human
ucucuggccuucggccuccau

SEQ ID NO: 1650528 - RNA, 22 nt, Human
ucucuggccuucggccuccauc

SEQ ID NO: 1650529 - RNA, 23 nt, Human
ucucuggccuucggccuccaucc

SEQ ID NO: 1650530 - RNA, 14 nt, Human
ucucuugauucaua

SEQ ID NO: 1650531 - RNA, 16 nt, Human
ucucuugauucauaau

SEQ ID NO: 1650532 - RNA, 18 nt, Human
ucucuugagccugggagg

SEQ ID NO: 1650533 - RNA, 15 nt, Human
ucugaagucagaucu

SEQ ID NO: 1650534 - RNA, 18 nt, Human
ucugaagucacugcacag

SEQ ID NO: 1650535 - RNA, 15 nt, Human
ucugaagucacugca

SEQ ID NO: 1650536 - RNA, 16 nt, Human
ucugaagucacugcac

SEQ ID NO: 1650537 - RNA, 19 nt, Human
ucugaagucagaucugccu

SEQ ID NO: 1650538 - RNA, 16 nt, Human
ucugaagugaaacugc

SEQ ID NO: 1650539 - RNA, 15 nt, Human
ucugacaacagacuu

SEQ ID NO: 1650540 - RNA, 16 nt, Human
ucugacaacagacuuc

SEQ ID NO: 1650541 - RNA, 12 nt, Human
ucugacacacag

SEQ ID NO: 1650542 - RNA, 18 nt, Human
agaaaugaaaaaauauau

SEQ ID NO: 1650543 - RNA, 23 nt, Human
agaaaugaaaaaauauauaucaa

SEQ ID NO: 1650544 - RNA, 14 nt, Human
agaaaugaaagcag

SEQ ID NO: 1650545 - RNA, 12 nt, Human
ucugaagaagau

SEQ ID NO: 1650546 - RNA, 14 nt, Human
agaaagaaaaucag

SEQ ID NO: 1650547 - RNA, 12 nt, Human
agaaaucuaaaa

SEQ ID NO: 1650548 - RNA, 15 nt, Human
agaaaucuaaaaaac

SEQ ID NO: 1650549 - RNA, 17 nt, Human
agaaaugaaaaaauaua

SEQ ID NO: 1650550 - RNA, 14 nt, Human
agaaauauaauuga

SEQ ID NO: 1650551 - RNA, 19 nt, Human
agaaauaucugaaaaugua

SEQ ID NO: 1650552 - RNA, 20 nt, Human
agaaauaucugaaaauguau

SEQ ID NO: 1650553 - RNA, 18 nt, Human
ucugcaggucccuaauaa

SEQ ID NO: 1650554 - RNA, 13 nt, Human
agaaauuaugugc

SEQ ID NO: 1650555 - RNA, 21 nt, Human
agaaauuaugugccagauuua

SEQ ID NO: 1650556 - RNA, 22 nt, Human
agaaauuaugugccagauuuau

SEQ ID NO: 1650557 - RNA, 16 nt, Human
agaaauuuauaaacuu

SEQ ID NO: 1650558 - RNA, 17 nt, Human
agaaauuuauaaacuuu

SEQ ID NO: 1650559 - RNA, 15 nt, Human
ucugcaggucccuaa

SEQ ID NO: 1650560 - RNA, 16 nt, Human
ucugcaggucccuaau

SEQ ID NO: 1650561 - RNA, 17 nt, Human
ucugcaggucccuaaua

SEQ ID NO: 1650562 - RNA, 20 nt, Human
ucugcacuccccugcugggu

SEQ ID NO: 1650563 - RNA, 22 nt, Human
ucugcacuccccugcugggugu

SEQ ID NO: 1650564 - RNA, 23 nt, Human
ucugaugcaagcaagaaacacug

SEQ ID NO: 1650565 - RNA, 13 nt, Human
ucugauacagaaa

SEQ ID NO: 1650566 - RNA, 18 nt, Human
ucugauucccaagcucug

SEQ ID NO: 1650567 - RNA, 18 nt, Human
ucugcacuccccugcugg

SEQ ID NO: 1650568 - RNA, 19 nt, Human
ucugcacuccccugcuggg

SEQ ID NO: 1650569 - RNA, 23 nt, Human
ucugagacucgcgacaaugcaaa

SEQ ID NO: 1650570 - RNA, 14 nt, Human
acuggccucugcug

SEQ ID NO: 1650571 - RNA, 16 nt, Human
acuggccucugcugau

SEQ ID NO: 1650572 - RNA, 15 nt, Human
uccuucagugccuua

SEQ ID NO: 1650573 - RNA, 16 nt, Human
uccuucagugccuuau

SEQ ID NO: 1650574 - RNA, 17 nt, Human
uccuucagugccuuaug

SEQ ID NO: 1650575 - RNA, 23 nt, Human
uccuuguguuacuaaguuuuuau

SEQ ID NO: 1650576 - RNA, 14 nt, Human
uccuuguguuacua

SEQ ID NO: 1650577 - RNA, 15 nt, Human
uccuuuagcgcccag

SEQ ID NO: 1650578 - RNA, 19 nt, Human
uccuuuagcgcccaguugg

SEQ ID NO: 1650579 - RNA, 22 nt, Human
uccuuuagcgcccaguugggug

SEQ ID NO: 1650580 - RNA, 23 nt, Human
uccuuuagcgcccaguugggugg

SEQ ID NO: 1650581 - RNA, 18 nt, Human
ucgagaaacagccugugu

SEQ ID NO: 1650582 - RNA, 18 nt, Human
ucgcuauugucaccaggg

SEQ ID NO: 1650583 - RNA, 16 nt, Human
ucgagcaugccuggau

SEQ ID NO: 1650584 - RNA, 18 nt, Human
ucgagcaugccuggaugg

SEQ ID NO: 1650585 - RNA, 19 nt, Human
ucgcgacaaugcaaaccau

SEQ ID NO: 1650586 - RNA, 13 nt, Human
ucgaggacaggga

SEQ ID NO: 1650587 - RNA, 16 nt, Human
ucgcgacaaugcaaac

SEQ ID NO: 1650588 - RNA, 14 nt, Human
acugcuggcugccu

SEQ ID NO: 1650589 - RNA, 15 nt, Human
acugcuggcugccuu

SEQ ID NO: 1650590 - RNA, 18 nt, Human
acugcuuaacuucacaua

SEQ ID NO: 1650591 - RNA, 13 nt, Human
acugccuucucaa

SEQ ID NO: 1650592 - RNA, 19 nt, Human
acugccuucucaacuccaa

SEQ ID NO: 1650593 - RNA, 20 nt, Human
acugccuucucaacuccaaa

SEQ ID NO: 1650594 - RNA, 17 nt, Human
acugcuuccagugaggc

SEQ ID NO: 1650595 - RNA, 20 nt, Human
acugcuuaacuucacauauu

SEQ ID NO: 1650596 - RNA, 14 nt, Human
acugcuuuuggucu

SEQ ID NO: 1650597 - RNA, 13 nt, Human
acugcuuguuucc

SEQ ID NO: 1650598 - RNA, 16 nt, Human
acugcuuguuuccuag

SEQ ID NO: 1650599 - RNA, 21 nt, Human
acuggcacaguuuucugagaa

SEQ ID NO: 1650600 - RNA, 19 nt, Human
acuggcacaguuuucugag

SEQ ID NO: 1650601 - RNA, 20 nt, Human
acuggcacaguuuucugaga

SEQ ID NO: 1650602 - RNA, 15 nt, Human
acuggauuaaacuua

SEQ ID NO: 1650603 - RNA, 13 nt, Human
acuggcacaguuu

SEQ ID NO: 1650604 - RNA, 17 nt, Human
acugcauccuccgccuc

SEQ ID NO: 1650605 - RNA, 20 nt, Human
acugcauccuccgccucccg

SEQ ID NO: 1650606 - RNA, 20 nt, Human
acugcaucaagaugugacau

SEQ ID NO: 1650607 - RNA, 22 nt, Human
acugcaucaagaugugacaugu

SEQ ID NO: 1650608 - RNA, 23 nt, Human
acugcauccuccgccucccgggu

SEQ ID NO: 1650609 - RNA, 16 nt, Human
acugcauguuugugau

SEQ ID NO: 1650610 - RNA, 15 nt, Human
acugcauguuuguga

SEQ ID NO: 1650611 - RNA, 16 nt, Human
acugcauaugaaagga

SEQ ID NO: 1650612 - RNA, 21 nt, Human
uccuagaaauuccccacccug

SEQ ID NO: 1650613 - RNA, 22 nt, Human
uccuagaaauuccccacccuga

SEQ ID NO: 1650614 - RNA, 14 nt, Human
acugccucuuccuc

SEQ ID NO: 1650615 - RNA, 15 nt, Human
acugccucuuccucc

SEQ ID NO: 1650616 - RNA, 16 nt, Human
acugccuauuuuaaua

SEQ ID NO: 1650617 - RNA, 21 nt, Human
acugccuauuuuaauaaacac

SEQ ID NO: 1650618 - RNA, 15 nt, Human
acugcauuauauuua

SEQ ID NO: 1650619 - RNA, 14 nt, Human
acugcauuauauuu

SEQ ID NO: 1650620 - RNA, 12 nt, Human
acugugugcuca

SEQ ID NO: 1650621 - RNA, 15 nt, Human
acugugugcucagga

SEQ ID NO: 1650622 - RNA, 19 nt, Human
acugugugcucaggagccc

SEQ ID NO: 1650623 - RNA, 20 nt, Human
acugugugcucaggagcccu

SEQ ID NO: 1650624 - RNA, 21 nt, Human
acugugugcucaggagcccug

SEQ ID NO: 1650625 - RNA, 18 nt, Human
acuguggugacuuuggau

SEQ ID NO: 1650626 - RNA, 20 nt, Human
acuguggugacuuuggauaa

SEQ ID NO: 1650627 - RNA, 21 nt, Human
acuguggugacuuuggauaau

SEQ ID NO: 1650628 - RNA, 12 nt, Human
acuguggugacu

SEQ ID NO: 1650629 - RNA, 14 nt, Human
acuguggugacuuu

SEQ ID NO: 1650630 - RNA, 15 nt, Human
acuguggugacuuug

SEQ ID NO: 1650631 - RNA, 18 nt, Human
acuguggguagacacaca

SEQ ID NO: 1650632 - RNA, 17 nt, Human
acugggagaaaugaaaa

SEQ ID NO: 1650633 - RNA, 21 nt, Human
acugucagcuccccucggaga

SEQ ID NO: 1650634 - RNA, 16 nt, Human
acugggagaaaugaaa

SEQ ID NO: 1650635 - RNA, 18 nt, Human
acugggacaggggagaac

SEQ ID NO: 1650636 - RNA, 18 nt, Human
acuguccuacccacccuc

SEQ ID NO: 1650637 - RNA, 23 nt, Human
acuguccuacccacccuccuuuc

SEQ ID NO: 1650638 - RNA, 17 nt, Human
acuguccuacccacccu

SEQ ID NO: 1650639 - RNA, 22 nt, Human
acugucagcuccccucggagaa

SEQ ID NO: 1650640 - RNA, 17 nt, Human
ucguuugaaucacagua

SEQ ID NO: 1650641 - RNA, 22 nt, Human
ucguuuucaaaauuguuacaaa

SEQ ID NO: 1650642 - RNA, 16 nt, Human
ucguaaaauuaagaaa

SEQ ID NO: 1650643 - RNA, 13 nt, Human
ucguaaaauuaag

SEQ ID NO: 1650644 - RNA, 18 nt, Human
ucggcucacugcauccuc

SEQ ID NO: 1650645 - RNA, 17 nt, Human
ucgggaggucgaggcag

SEQ ID NO: 1650646 - RNA, 19 nt, Human
ucgggaggucgaggcagga

SEQ ID NO: 1650647 - RNA, 21 nt, Human
ucgggaggucgaggcaggagg

SEQ ID NO: 1650648 - RNA, 11 nt, Human
ucgggcaugac

SEQ ID NO: 1650649 - RNA, 12 nt, Human
ucgggcaugaca

SEQ ID NO: 1650650 - RNA, 22 nt, Human
ucggguuuuauuguuuaaaauc

SEQ ID NO: 1650651 - RNA, 16 nt, Human
acuuaaauaaugugaa

SEQ ID NO: 1650652 - RNA, 18 nt, Human
acuuaaauaaugugaaac

SEQ ID NO: 1650653 - RNA, 17 nt, Human
acuuaaauaaugugaaa

SEQ ID NO: 1650654 - RNA, 17 nt, Human
acuuaagcauuuaggaa

SEQ ID NO: 1650655 - RNA, 12 nt, Human
acuguugcccag

SEQ ID NO: 1650656 - RNA, 13 nt, Human
acuguugcccagg

SEQ ID NO: 1650657 - RNA, 14 nt, Human
acuguugcccaggc

SEQ ID NO: 1650658 - RNA, 17 nt, Human
acuguugcccaggcugg

SEQ ID NO: 1650659 - RNA, 18 nt, Human
acuguugcccaggcuggc

SEQ ID NO: 1650660 - RNA, 16 nt, Human
acuuaaucuaaaugga

SEQ ID NO: 1650661 - RNA, 15 nt, Human
acuuaaucuaaaugg

SEQ ID NO: 1650662 - RNA, 13 nt, Human
acuuaaucuaaau

SEQ ID NO: 1650663 - RNA, 16 nt, Human
acuuagaaauugcauu

SEQ ID NO: 1650664 - RNA, 14 nt, Human
acuucagcucuguu

SEQ ID NO: 1650665 - RNA, 21 nt, Human
acuguucucugcccuccaaga

SEQ ID NO: 1650666 - RNA, 15 nt, Human
acuguucucugcccu

SEQ ID NO: 1650667 - RNA, 20 nt, Human
acuguucucugcccuccaag

SEQ ID NO: 1650668 - RNA, 14 nt, Human
acuguucucugccc

SEQ ID NO: 1650669 - RNA, 13 nt, Human
acuguuauuuaua

SEQ ID NO: 1650670 - RNA, 14 nt, Human
acuguuauuuauaa

SEQ ID NO: 1650671 - RNA, 22 nt, Human
ucuaccagccucccuauuuuuu

SEQ ID NO: 1650672 - RNA, 16 nt, Human
ucuaaagcugccagcc

SEQ ID NO: 1650673 - RNA, 15 nt, Human
ucuaaagcugccagc

SEQ ID NO: 1650674 - RNA, 13 nt, Human
ucuaaagcugcca

SEQ ID NO: 1650675 - RNA, 14 nt, Human
ucuaaagcugccag

SEQ ID NO: 1650676 - RNA, 20 nt, Human
ucuaaagccauuguaguccu

SEQ ID NO: 1650677 - RNA, 21 nt, Human
ucuaaguaaaaccacagcagu

SEQ ID NO: 1650678 - RNA, 22 nt, Human
ucuaaguaaaaccacagcaguu

SEQ ID NO: 1650679 - RNA, 23 nt, Human
ucuaaguaaaaccacagcaguug

SEQ ID NO: 1650680 - RNA, 16 nt, Human
ucuacauacuauggaa

SEQ ID NO: 1650681 - RNA, 15 nt, Human
acuacaggcacccac

SEQ ID NO: 1650682 - RNA, 14 nt, Human
acuacaguuuguua

SEQ ID NO: 1650683 - RNA, 13 nt, Human
acuacaguuuguu

SEQ ID NO: 1650684 - RNA, 11 nt, Human
acuacaggcac

SEQ ID NO: 1650685 - RNA, 12 nt, Human
acuaaccacgcu

SEQ ID NO: 1650686 - RNA, 14 nt, Human
acuacauucuguua

SEQ ID NO: 1650687 - RNA, 13 nt, Human
acuacauucuguu

SEQ ID NO: 1650688 - RNA, 12 nt, Human
acuacauucugu

SEQ ID NO: 1650689 - RNA, 11 nt, Human
acuacauucug

SEQ ID NO: 1650690 - RNA, 15 nt, Human
acuacaguuuguuag

SEQ ID NO: 1650691 - RNA, 12 nt, Human
ucccagccccaa

SEQ ID NO: 1650692 - RNA, 17 nt, Human
ucccagcugugcucugg

SEQ ID NO: 1650693 - RNA, 18 nt, Human
ucccagccagcaguucag

SEQ ID NO: 1650694 - RNA, 17 nt, Human
ucccagccagcaguuca

SEQ ID NO: 1650695 - RNA, 15 nt, Human
acuacauucuguuaa

SEQ ID NO: 1650696 - RNA, 17 nt, Human
uccccaugucucgacuc

SEQ ID NO: 1650697 - RNA, 12 nt, Human
uccccacccuga

SEQ ID NO: 1650698 - RNA, 22 nt, Human
uccccaccgcagacaggaccag

SEQ ID NO: 1650699 - RNA, 17 nt, Human
uccccaccgcagacagg

SEQ ID NO: 1650700 - RNA, 18 nt, Human
uccccaccgcagacagga

SEQ ID NO: 1650701 - RNA, 21 nt, Human
uccccaccgcagacaggacca

SEQ ID NO: 1650702 - RNA, 15 nt, Human
ucccaucacccgcua

SEQ ID NO: 1650703 - RNA, 22 nt, Human
ucccauaugccugggcagaagg

SEQ ID NO: 1650704 - RNA, 14 nt, Human
ucccagucauuuaa

SEQ ID NO: 1650705 - RNA, 22 nt, Human
ucccagucauuuaauaaaugug

SEQ ID NO: 1650706 - RNA, 17 nt, Human
acgugggcauucaaaug

SEQ ID NO: 1650707 - RNA, 20 nt, Human
acgugggcauucaaauguau

SEQ ID NO: 1650708 - RNA, 22 nt, Human
acguauaaaagccuguuuaaga

SEQ ID NO: 1650709 - RNA, 15 nt, Human
acgguuuuacugcag

SEQ ID NO: 1650710 - RNA, 17 nt, Human
acgguuuuacugcagcu

SEQ ID NO: 1650711 - RNA, 23 nt, Human
acguggcugcuucaaggauccug

SEQ ID NO: 1650712 - RNA, 16 nt, Human
ucccacaaaggagagc

SEQ ID NO: 1650713 - RNA, 15 nt, Human
ucccaccccacacac

SEQ ID NO: 1650714 - RNA, 20 nt, Human
ucccaccccacacacgccag

SEQ ID NO: 1650715 - RNA, 20 nt, Human
acgggaggguaaggcugugg

SEQ ID NO: 1650716 - RNA, 13 nt, Human
ucccaaagugcug

SEQ ID NO: 1650717 - RNA, 14 nt, Human
ucccaaagugcugg

SEQ ID NO: 1650718 - RNA, 21 nt, Human
ucccaaagcagugcaugcugu

SEQ ID NO: 1650719 - RNA, 17 nt, Human
ucccaaagcagugcaug

SEQ ID NO: 1650720 - RNA, 18 nt, Human
ucccaaagcagugcaugc

SEQ ID NO: 1650721 - RNA, 16 nt, Human
ucccaaagcagugcau

SEQ ID NO: 1650722 - RNA, 18 nt, Human
ucccaaacccuucagugc

SEQ ID NO: 1650723 - RNA, 18 nt, Human
uccauuuaauaauuauau

SEQ ID NO: 1650724 - RNA, 13 nt, Human
uccaugaagaugu

SEQ ID NO: 1650725 - RNA, 21 nt, Human
uccaugaagauguagaggaga

SEQ ID NO: 1650726 - RNA, 18 nt, Human
uccaucuaaacugccccc

SEQ ID NO: 1650727 - RNA, 16 nt, Human
uccaucuaaacugccc

SEQ ID NO: 1650728 - RNA, 22 nt, Human
acgccagauucuuuccugaggc

SEQ ID NO: 1650729 - RNA, 23 nt, Human
acgccagauucuuuccugaggcu

SEQ ID NO: 1650730 - RNA, 20 nt, Human
uccauccugaggcuccacuu

SEQ ID NO: 1650731 - RNA, 21 nt, Human
uccauccugaggcuccacuug

SEQ ID NO: 1650732 - RNA, 21 nt, Human
acuacuagggaaaugccuuug

SEQ ID NO: 1650733 - RNA, 17 nt, Human
acuacucccccaggugg

SEQ ID NO: 1650734 - RNA, 12 nt, Human
acucaccccagc

SEQ ID NO: 1650735 - RNA, 20 nt, Human
ucccgaauagcugggacuac

SEQ ID NO: 1650736 - RNA, 15 nt, Human
ucccgaguagcuggg

SEQ ID NO: 1650737 - RNA, 20 nt, Human
ucccgaguagcugagauuau

SEQ ID NO: 1650738 - RNA, 20 nt, Human
ucccgaguagcugggacuac

SEQ ID NO: 1650739 - RNA, 18 nt, Human
ucccgaguagcugggacu

SEQ ID NO: 1650740 - RNA, 16 nt, Human
ucccgaguagcuggga

SEQ ID NO: 1650741 - RNA, 17 nt, Human
ucccgaguagcugggac

SEQ ID NO: 1650742 - RNA, 16 nt, Human
uccccucggagaagag

SEQ ID NO: 1650743 - RNA, 17 nt, Human
uccccucggagaagagc

SEQ ID NO: 1650744 - RNA, 14 nt, Human
ucccucccuccacc

SEQ ID NO: 1650745 - RNA, 13 nt, Human
ucccucccuccac

SEQ ID NO: 1650746 - RNA, 13 nt, Human
ucccggcugcccu

SEQ ID NO: 1650747 - RNA, 14 nt, Human
ucccggcugcccuu

SEQ ID NO: 1650748 - RNA, 15 nt, Human
ucccggcugcccuuu

SEQ ID NO: 1650749 - RNA, 18 nt, Human
ucccggcugcccuuucug

SEQ ID NO: 1650750 - RNA, 22 nt, Human
ucccggcugcccuuucugggca

SEQ ID NO: 1650751 - RNA, 23 nt, Human
ucccuccaccucccugcaauaaa

SEQ ID NO: 1650752 - RNA, 21 nt, Human
ucccuccaccucccugcaaua

SEQ ID NO: 1650753 - RNA, 11 nt, Human
ucccugaaggc

SEQ ID NO: 1650754 - RNA, 15 nt, Human
ucccugaaggccccg

SEQ ID NO: 1650755 - RNA, 21 nt, Human
ucccucuuucccucccuuccu

SEQ ID NO: 1650756 - RNA, 17 nt, Human
ucccucccuccaccucc

SEQ ID NO: 1650757 - RNA, 18 nt, Human
ucccucuuucccucccuu

SEQ ID NO: 1650758 - RNA, 20 nt, Human
ucccucuuucccucccuucc

SEQ ID NO: 1650759 - RNA, 16 nt, Human
ucccucccuccaccuc

SEQ ID NO: 1650760 - RNA, 15 nt, Human
ucccucccuccaccu

SEQ ID NO: 1650761 - RNA, 14 nt, Human
ucccucuuucccuc

SEQ ID NO: 1650762 - RNA, 16 nt, Human
ucccugaaggccccgc

SEQ ID NO: 1650763 - RNA, 17 nt, Human
ucccugaaggccccgcc

SEQ ID NO: 1650764 - RNA, 11 nt, Human
ucccugagcag

SEQ ID NO: 1650765 - RNA, 14 nt, Human
acuccucuguccag

SEQ ID NO: 1650766 - RNA, 13 nt, Human
acuccucugucca

SEQ ID NO: 1650767 - RNA, 18 nt, Human
acuccugcaggcagccag

SEQ ID NO: 1650768 - RNA, 19 nt, Human
acuccugcaggcagccagg

SEQ ID NO: 1650769 - RNA, 17 nt, Human
acuccugcaggcagcca

SEQ ID NO: 1650770 - RNA, 13 nt, Human
acuccagaccccu

SEQ ID NO: 1650771 - RNA, 23 nt, Human
acuccagaauuucccaaagcagu

SEQ ID NO: 1650772 - RNA, 12 nt, Human
acuccagccugg

SEQ ID NO: 1650773 - RNA, 13 nt, Human
acuccagccuggg

SEQ ID NO: 1650774 - RNA, 15 nt, Human
acucauucuucugua

SEQ ID NO: 1650775 - RNA, 14 nt, Human
acucauugaccuga

SEQ ID NO: 1650776 - RNA, 15 nt, Human
acucauugaccugag

SEQ ID NO: 1650777 - RNA, 14 nt, Human
acuccaaagaaaug

SEQ ID NO: 1650778 - RNA, 15 nt, Human
acuccaaagaaaugu

SEQ ID NO: 1650779 - RNA, 18 nt, Human
acuccaaagaaauguaag

SEQ ID NO: 1650780 - RNA, 15 nt, Human
acuccagaauuuccc

SEQ ID NO: 1650781 - RNA, 17 nt, Human
acuccagaauuucccaa

SEQ ID NO: 1650782 - RNA, 21 nt, Human
acuccaaagaaauguaaggga

SEQ ID NO: 1650783 - RNA, 17 nt, Human
ucccuuacgugaguccu

SEQ ID NO: 1650784 - RNA, 21 nt, Human
acuccugcaggcagccaggcc

SEQ ID NO: 1650785 - RNA, 15 nt, Human
ucccugguggcagcu

SEQ ID NO: 1650786 - RNA, 12 nt, Human
ucccugucccag

SEQ ID NO: 1650787 - RNA, 19 nt, Human
uccuaaauauauuuuaaga

SEQ ID NO: 1650788 - RNA, 17 nt, Human
uccggucccugucccag

SEQ ID NO: 1650789 - RNA, 14 nt, Human
uccuacuuccccuu

SEQ ID NO: 1650790 - RNA, 16 nt, Human
uccuagaaauucccca

SEQ ID NO: 1650791 - RNA, 12 nt, Human
ucccuuuuccuu

SEQ ID NO: 1650792 - RNA, 23 nt, Human
uccaacccucaucaccaacgucu

SEQ ID NO: 1650793 - RNA, 16 nt, Human
uccaacccucaucacc

SEQ ID NO: 1650794 - RNA, 17 nt, Human
uccaacccucaucacca

SEQ ID NO: 1650795 - RNA, 14 nt, Human
uccaacccucauca

SEQ ID NO: 1650796 - RNA, 12 nt, Human
accugccaggaa

SEQ ID NO: 1650797 - RNA, 14 nt, Human
accugccaggaagc

SEQ ID NO: 1650798 - RNA, 15 nt, Human
accugccaggaagcc

SEQ ID NO: 1650799 - RNA, 12 nt, Human
uccaagaagccc

SEQ ID NO: 1650800 - RNA, 20 nt, Human
uccaagcuggucccacucag

SEQ ID NO: 1650801 - RNA, 18 nt, Human
uccaaucccaccaacccu

SEQ ID NO: 1650802 - RNA, 21 nt, Human
uccaagcuggucccacucagu

SEQ ID NO: 1650803 - RNA, 23 nt, Human
accuggccucugcacuccccugc

SEQ ID NO: 1650804 - RNA, 18 nt, Human
accuggccucugcacucc

SEQ ID NO: 1650805 - RNA, 20 nt, Human
accuggccucugcacucccc

SEQ ID NO: 1650806 - RNA, 21 nt, Human
accuggucacaggacucugcc

SEQ ID NO: 1650807 - RNA, 19 nt, Human
accuguuucugcagccacu

SEQ ID NO: 1650808 - RNA, 18 nt, Human
accuuagacagucccugc

SEQ ID NO: 1650809 - RNA, 19 nt, Human
accuuagacagucccugcc

SEQ ID NO: 1650810 - RNA, 20 nt, Human
accuuagacagucccugcca

SEQ ID NO: 1650811 - RNA, 18 nt, Human
uccacccaccucagccuc

SEQ ID NO: 1650812 - RNA, 19 nt, Human
uccacccaccucagccucc

SEQ ID NO: 1650813 - RNA, 12 nt, Human
uccacccaggag

SEQ ID NO: 1650814 - RNA, 14 nt, Human
uccacccaggagcc

SEQ ID NO: 1650815 - RNA, 15 nt, Human
uccacccaggagccc

SEQ ID NO: 1650816 - RNA, 17 nt, Human
uccacccaggagccccg

SEQ ID NO: 1650817 - RNA, 14 nt, Human
accuggccucugca

SEQ ID NO: 1650818 - RNA, 16 nt, Human
accuggccucugcacu

SEQ ID NO: 1650819 - RNA, 17 nt, Human
accuggccucugcacuc

SEQ ID NO: 1650820 - RNA, 19 nt, Human
uccagacccggcugcgugg

SEQ ID NO: 1650821 - RNA, 15 nt, Human
uccagacccggcugc

SEQ ID NO: 1650822 - RNA, 18 nt, Human
uccagacccggcugcgug

SEQ ID NO: 1650823 - RNA, 13 nt, Human
uccacugccuucg

SEQ ID NO: 1650824 - RNA, 15 nt, Human
uccacugccuucgau

SEQ ID NO: 1650825 - RNA, 22 nt, Human
uccacugccuucgauacaccgg

SEQ ID NO: 1650826 - RNA, 20 nt, Human
uccagaauuucccaaagcag

SEQ ID NO: 1650827 - RNA, 22 nt, Human
uccagaauuucccaaagcagug

SEQ ID NO: 1650828 - RNA, 13 nt, Human
uccagacacaugu

SEQ ID NO: 1650829 - RNA, 16 nt, Human
uccaccuucccaugcc

SEQ ID NO: 1650830 - RNA, 18 nt, Human
uccaccuucccaugcccu

SEQ ID NO: 1650831 - RNA, 19 nt, Human
uccaccuucccaugcccug

SEQ ID NO: 1650832 - RNA, 14 nt, Human
accuuuugagugcc

SEQ ID NO: 1650833 - RNA, 17 nt, Human
accuuuugagugccuua

SEQ ID NO: 1650834 - RNA, 20 nt, Human
accuuuugagugccuuacac

SEQ ID NO: 1650835 - RNA, 14 nt, Human
uccagccccuggau

SEQ ID NO: 1650836 - RNA, 13 nt, Human
uccagccccugga

SEQ ID NO: 1650837 - RNA, 16 nt, Human
uccagagaguggcucc

SEQ ID NO: 1650838 - RNA, 17 nt, Human
uccagagaguggcuccu

SEQ ID NO: 1650839 - RNA, 15 nt, Human
uccagagaguggcuc

SEQ ID NO: 1650840 - RNA, 12 nt, Human
uccagccccugg

SEQ ID NO: 1650841 - RNA, 21 nt, Human
uccaggcuguaucccaugagc

SEQ ID NO: 1650842 - RNA, 20 nt, Human
accuuuuuuauacauaaaca

SEQ ID NO: 1650843 - RNA, 19 nt, Human
accuuuuuuauacauaaac

SEQ ID NO: 1650844 - RNA, 22 nt, Human
accuuuuuuauacauaaacaag

SEQ ID NO: 1650845 - RNA, 21 nt, Human
accuuuuuuauacauaaacaa

SEQ ID NO: 1650846 - RNA, 14 nt, Human
acgagaaaacaaua

SEQ ID NO: 1650847 - RNA, 16 nt, Human
acgagcaggcuucuuc

SEQ ID NO: 1650848 - RNA, 19 nt, Human
acgccagauucuuuccuga

SEQ ID NO: 1650849 - RNA, 19 nt, Human
acgagcaggcuacugucag

SEQ ID NO: 1650850 - RNA, 20 nt, Human
acgagcaggcuacugucagc

SEQ ID NO: 1650851 - RNA, 14 nt, Human
accucuaaauucuu

SEQ ID NO: 1650852 - RNA, 14 nt, Human
accugaggcccuuc

SEQ ID NO: 1650853 - RNA, 22 nt, Human
accugaggcccuucucuccagc

SEQ ID NO: 1650854 - RNA, 15 nt, Human
accugaggcccuucu

SEQ ID NO: 1650855 - RNA, 16 nt, Human
accugaggcccuucuc

SEQ ID NO: 1650856 - RNA, 20 nt, Human
accugaggcccuucucucca

SEQ ID NO: 1650857 - RNA, 21 nt, Human
accugaggcccuucucuccag

SEQ ID NO: 1650858 - RNA, 15 nt, Human
accugauugugucuc

SEQ ID NO: 1650859 - RNA, 17 nt, Human
accugauugugucucuu

SEQ ID NO: 1650860 - RNA, 18 nt, Human
accugauugugucucuug

SEQ ID NO: 1650861 - RNA, 19 nt, Human
ucauugaccugaggcccuu

SEQ ID NO: 1650862 - RNA, 22 nt, Human
ucauugaaaucuuuuugcuuug

SEQ ID NO: 1650863 - RNA, 12 nt, Human
ucauugaccuga

SEQ ID NO: 1650864 - RNA, 14 nt, Human
ucauugaccugagg

SEQ ID NO: 1650865 - RNA, 15 nt, Human
ucauugaccugaggc

SEQ ID NO: 1650866 - RNA, 14 nt, Human
accuccugcugggc

SEQ ID NO: 1650867 - RNA, 16 nt, Human
accuccugcugggcag

SEQ ID NO: 1650868 - RNA, 13 nt, Human
accuccugggcua

SEQ ID NO: 1650869 - RNA, 13 nt, Human
accuccugcuggg

SEQ ID NO: 1650870 - RNA, 19 nt, Human
accucggugccuuccucuu

SEQ ID NO: 1650871 - RNA, 12 nt, Human
ucauucuucugu

SEQ ID NO: 1650872 - RNA, 12 nt, Human
ucauugaaaucu

SEQ ID NO: 1650873 - RNA, 13 nt, Human
ucauugaaaucuu

SEQ ID NO: 1650874 - RNA, 21 nt, Human
ucaugaauuaguuuuauaugc

SEQ ID NO: 1650875 - RNA, 14 nt, Human
ucauccuucuggaa

SEQ ID NO: 1650876 - RNA, 18 nt, Human
ucauccucauacccaccc

SEQ ID NO: 1650877 - RNA, 13 nt, Human
ucauccuccucag

SEQ ID NO: 1650878 - RNA, 19 nt, Human
ucauccuccucagaucuuc

SEQ ID NO: 1650879 - RNA, 18 nt, Human
ucaucuagguaaauuaca

SEQ ID NO: 1650880 - RNA, 14 nt, Human
ucaucuaggauuuu

SEQ ID NO: 1650881 - RNA, 22 nt, Human
ucauccuucuggaauaaggaga

SEQ ID NO: 1650882 - RNA, 16 nt, Human
ucaugaauuaguuuua

SEQ ID NO: 1650883 - RNA, 15 nt, Human
ucauccuaagcuauu

SEQ ID NO: 1650884 - RNA, 11 nt, Human
accuccugcug

SEQ ID NO: 1650885 - RNA, 12 nt, Human
accuccugcugg

SEQ ID NO: 1650886 - RNA, 23 nt, Human
accuccugccucgaacuggcugc

SEQ ID NO: 1650887 - RNA, 13 nt, Human
accuccugccucg

SEQ ID NO: 1650888 - RNA, 12 nt, Human
accuccugccuc

SEQ ID NO: 1650889 - RNA, 13 nt, Human
accucccugcaau

SEQ ID NO: 1650890 - RNA, 12 nt, Human
accucccugcaa

SEQ ID NO: 1650891 - RNA, 13 nt, Human
ucaggaagcucag

SEQ ID NO: 1650892 - RNA, 14 nt, Human
ucaggaagcucagg

SEQ ID NO: 1650893 - RNA, 15 nt, Human
ucaggaagcucaggg

SEQ ID NO: 1650894 - RNA, 16 nt, Human
ucaggaagcucagggc

SEQ ID NO: 1650895 - RNA, 22 nt, Human
ucaggaaaucaaauaugcaaag

SEQ ID NO: 1650896 - RNA, 23 nt, Human
ucaggaaaucaaauaugcaaagc

SEQ ID NO: 1650897 - RNA, 16 nt, Human
accuaccaccacgccc

SEQ ID NO: 1650898 - RNA, 20 nt, Human
accuaccaccacgcccggcu

SEQ ID NO: 1650899 - RNA, 21 nt, Human
accuagggugauauuaaccag

SEQ ID NO: 1650900 - RNA, 13 nt, Human
accuacauguauu

SEQ ID NO: 1650901 - RNA, 14 nt, Human
accuacauguauuu

SEQ ID NO: 1650902 - RNA, 15 nt, Human
accuacauguauuug

SEQ ID NO: 1650903 - RNA, 16 nt, Human
uauuucuauauuuuca

SEQ ID NO: 1650904 - RNA, 17 nt, Human
uauuucuauauuuucau

SEQ ID NO: 1650905 - RNA, 18 nt, Human
uauuucuauauuuucauu

SEQ ID NO: 1650906 - RNA, 15 nt, Human
acaguugaaaaacag

SEQ ID NO: 1650907 - RNA, 16 nt, Human
acaguugaaaaacagc

SEQ ID NO: 1650908 - RNA, 20 nt, Human
acaguugaaaaacagcugag

SEQ ID NO: 1650909 - RNA, 22 nt, Human
uauuucccucaccuuucccauc

SEQ ID NO: 1650910 - RNA, 23 nt, Human
uauuuccuauauuguuuucagug

SEQ ID NO: 1650911 - RNA, 21 nt, Human
uaugaaauauuauguuaaaac

SEQ ID NO: 1650912 - RNA, 13 nt, Human
uauuucauuucuu

SEQ ID NO: 1650913 - RNA, 17 nt, Human
acauacucccaucugug

SEQ ID NO: 1650914 - RNA, 14 nt, Human
acauacucugcuua

SEQ ID NO: 1650915 - RNA, 13 nt, Human
acauacucccauc

SEQ ID NO: 1650916 - RNA, 22 nt, Human
acauacuaaccagcagaaaugc

SEQ ID NO: 1650917 - RNA, 21 nt, Human
acauacuaaccagcagaaaug

SEQ ID NO: 1650918 - RNA, 13 nt, Human
acauacuaaccag

SEQ ID NO: 1650919 - RNA, 20 nt, Human
acaguuuguuaguaugaggc

SEQ ID NO: 1650920 - RNA, 16 nt, Human
acaguuuguuaguaug

SEQ ID NO: 1650921 - RNA, 15 nt, Human
acaguuuucugagaa

SEQ ID NO: 1650922 - RNA, 16 nt, Human
acaguuuucugagaaa

SEQ ID NO: 1650923 - RNA, 17 nt, Human
acaguuuucugagaaag

SEQ ID NO: 1650924 - RNA, 18 nt, Human
acaguuuucugagaaaga

SEQ ID NO: 1650925 - RNA, 19 nt, Human
acaguuuucugagaaagac

SEQ ID NO: 1650926 - RNA, 20 nt, Human
acaguuuucugagaaagacu

SEQ ID NO: 1650927 - RNA, 21 nt, Human
acaguuuucugagaaagacua

SEQ ID NO: 1650928 - RNA, 18 nt, Human
acaguuuugguugcuuua

SEQ ID NO: 1650929 - RNA, 19 nt, Human
acaguuuugguugcuuuaa

SEQ ID NO: 1650930 - RNA, 24 nt, Human
acaguuuugguugcuuuaauauca

SEQ ID NO: 1650931 - RNA, 22 nt, Human
acaugaaaacacauuuuucuua

SEQ ID NO: 1650932 - RNA, 22 nt, Human
acaucuugcucugcugacagac

SEQ ID NO: 1650933 - RNA, 19 nt, Human
acaugaaaacacauuuuuc

SEQ ID NO: 1650934 - RNA, 18 nt, Human
acaugaaaacacauuuuu

SEQ ID NO: 1650935 - RNA, 17 nt, Human
acaugaaaacacauuuu

SEQ ID NO: 1650936 - RNA, 21 nt, Human
acaucuugcucugcugacaga

SEQ ID NO: 1650937 - RNA, 18 nt, Human
acaucuugcucugcugac

SEQ ID NO: 1650938 - RNA, 19 nt, Human
acaucuugcucugcugaca

SEQ ID NO: 1650939 - RNA, 13 nt, Human
acaucuugcucug

SEQ ID NO: 1650940 - RNA, 14 nt, Human
acaucuugcucugc

SEQ ID NO: 1650941 - RNA, 16 nt, Human
acaucaacaucuuggu

SEQ ID NO: 1650942 - RNA, 18 nt, Human
acaucaacaucuugguca

SEQ ID NO: 1650943 - RNA, 13 nt, Human
acaucaacagaua

SEQ ID NO: 1650944 - RNA, 14 nt, Human
acauagucuggcug

SEQ ID NO: 1650945 - RNA, 15 nt, Human
acauagucuggcugu

SEQ ID NO: 1650946 - RNA, 16 nt, Human
acauagugaugguucc

SEQ ID NO: 1650947 - RNA, 21 nt, Human
acauagugaugguuccccugu

SEQ ID NO: 1650948 - RNA, 20 nt, Human
acauagucuggcuguaccca

SEQ ID NO: 1650949 - RNA, 19 nt, Human
acauauauaacaaugcugu

SEQ ID NO: 1650950 - RNA, 14 nt, Human
acauagaauuaaca

SEQ ID NO: 1650951 - RNA, 18 nt, Human
acauagaauuaacacaug

SEQ ID NO: 1650952 - RNA, 23 nt, Human
acauauugauuuccguuaaaaua

SEQ ID NO: 1650953 - RNA, 22 nt, Human
acauauugauuuccguuaaaau

SEQ ID NO: 1650954 - RNA, 18 nt, Human
acauauugauuuccguua

SEQ ID NO: 1650955 - RNA, 16 nt, Human
acauauugauuuccgu

SEQ ID NO: 1650956 - RNA, 14 nt, Human
acauauugauuucc

SEQ ID NO: 1650957 - RNA, 18 nt, Human
acauuagcaguuugcuuu

SEQ ID NO: 1650958 - RNA, 22 nt, Human
acauuagcaguuugcuuuguau

SEQ ID NO: 1650959 - RNA, 21 nt, Human
acauguccaagaagcccagga

SEQ ID NO: 1650960 - RNA, 17 nt, Human
ucaaauuucuaaaucuc

SEQ ID NO: 1650961 - RNA, 16 nt, Human
ucaacagguuuuccug

SEQ ID NO: 1650962 - RNA, 12 nt, Human
acauucuguuaa

SEQ ID NO: 1650963 - RNA, 16 nt, Human
ucaaauuucuaaaucu

SEQ ID NO: 1650964 - RNA, 15 nt, Human
ucaaauuucuaaauc

SEQ ID NO: 1650965 - RNA, 15 nt, Human
acauucuguuaauca

SEQ ID NO: 1650966 - RNA, 11 nt, Human
ucaaguauuau

SEQ ID NO: 1650967 - RNA, 15 nt, Human
ucaaguauuauaccu

SEQ ID NO: 1650968 - RNA, 21 nt, Human
ucaaguauuauaccuuuuuua

SEQ ID NO: 1650969 - RNA, 16 nt, Human
ucaaguauuauaccuu

SEQ ID NO: 1650970 - RNA, 23 nt, Human
ucaaguauuauaccuuuuuuaga

SEQ ID NO: 1650971 - RNA, 22 nt, Human
ucaagaugaugaugaucuuuaa

SEQ ID NO: 1650972 - RNA, 18 nt, Human
ucaaauaacuaaaaggua

SEQ ID NO: 1650973 - RNA, 20 nt, Human
ucaaauacgugggcauucaa

SEQ ID NO: 1650974 - RNA, 16 nt, Human
acaugaaguccaagca

SEQ ID NO: 1650975 - RNA, 20 nt, Human
acaugagcaucaggccaggc

SEQ ID NO: 1650976 - RNA, 19 nt, Human
acaugaucuucuuuauaau

SEQ ID NO: 1650977 - RNA, 15 nt, Human
acaugaucuucuuua

SEQ ID NO: 1650978 - RNA, 17 nt, Human
acaugaucuucuuuaua

SEQ ID NO: 1650979 - RNA, 17 nt, Human
acaugagcaucaggcca

SEQ ID NO: 1650980 - RNA, 18 nt, Human
acaugagcaucaggccag

SEQ ID NO: 1650981 - RNA, 19 nt, Human
acaugagcaucaggccagg

SEQ ID NO: 1650982 - RNA, 19 nt, Human
acaugauccugcaauucca

SEQ ID NO: 1650983 - RNA, 14 nt, Human
ucaaagcugaaaug

SEQ ID NO: 1650984 - RNA, 22 nt, Human
ucaaaguugccuaaauccauuu

SEQ ID NO: 1650985 - RNA, 19 nt, Human
ucaaaguugccuaaaucca

SEQ ID NO: 1650986 - RNA, 21 nt, Human
ucaaaguugccuaaauccauu

SEQ ID NO: 1650987 - RNA, 18 nt, Human
ucaaaagaaagaaaauca

SEQ ID NO: 1650988 - RNA, 16 nt, Human
uauuuuuauauuuacu

SEQ ID NO: 1650989 - RNA, 21 nt, Human
ucaaaauaugccccauucaac

SEQ ID NO: 1650990 - RNA, 23 nt, Human
ucaaaauaccaugccauuuaaag

SEQ ID NO: 1650991 - RNA, 21 nt, Human
ucaaaauaccaugccauuuaa

SEQ ID NO: 1650992 - RNA, 16 nt, Human
ucaaaauuguuacaaa

SEQ ID NO: 1650993 - RNA, 19 nt, Human
ucaaaauuguuacaaauug

SEQ ID NO: 1650994 - RNA, 18 nt, Human
ucaaaauaucaaguguug

SEQ ID NO: 1650995 - RNA, 23 nt, Human
accccagcuggggccaggcuggg

SEQ ID NO: 1650996 - RNA, 18 nt, Human
accccagacgaugucuuc

SEQ ID NO: 1650997 - RNA, 24 nt, Human
acccagcgagcccugguggcagug

SEQ ID NO: 1650998 - RNA, 19 nt, Human
acccagcgagcccuggugg

SEQ ID NO: 1650999 - RNA, 23 nt, Human
acccagcgagcccugguggcagu

SEQ ID NO: 1651000 - RNA, 23 nt, Human
ucagccguguaaccauggaccca

SEQ ID NO: 1651001 - RNA, 22 nt, Human
ucagccaagaauucuuaaauau

SEQ ID NO: 1651002 - RNA, 12 nt, Human
ucagagcugccc

SEQ ID NO: 1651003 - RNA, 12 nt, Human
acccccacccaa

SEQ ID NO: 1651004 - RNA, 16 nt, Human
accccuucgcuccugu

SEQ ID NO: 1651005 - RNA, 14 nt, Human
accccuucgcuccu

SEQ ID NO: 1651006 - RNA, 15 nt, Human
accccuucgcuccug

SEQ ID NO: 1651007 - RNA, 12 nt, Human
ucagcucaugga

SEQ ID NO: 1651008 - RNA, 20 nt, Human
ucagcuuguaaauagcucag

SEQ ID NO: 1651009 - RNA, 13 nt, Human
ucagcucacugca

SEQ ID NO: 1651010 - RNA, 16 nt, Human
ucagcucacugcaacc

SEQ ID NO: 1651011 - RNA, 14 nt, Human
ucagcggggacagc

SEQ ID NO: 1651012 - RNA, 13 nt, Human
ucaggaaagagaa

SEQ ID NO: 1651013 - RNA, 19 nt, Human
ucaggaaagagaacuucca

SEQ ID NO: 1651014 - RNA, 20 nt, Human
ucaggaaaucaaauaugcaa

SEQ ID NO: 1651015 - RNA, 21 nt, Human
ucaggaaaucaaauaugcaaa

SEQ ID NO: 1651016 - RNA, 23 nt, Human
ucagaaguuucugccgcagcccu

SEQ ID NO: 1651017 - RNA, 18 nt, Human
ucagaaucucaaauaacu

SEQ ID NO: 1651018 - RNA, 19 nt, Human
ucagaaucucaaauaacua

SEQ ID NO: 1651019 - RNA, 22 nt, Human
ucagagacuccugcaggcagcc

SEQ ID NO: 1651020 - RNA, 21 nt, Human
ucagagacuccugcaggcagc

SEQ ID NO: 1651021 - RNA, 17 nt, Human
ucagagacuccugcagg

SEQ ID NO: 1651022 - RNA, 20 nt, Human
ucagagacuccugcaggcag

SEQ ID NO: 1651023 - RNA, 16 nt, Human
ucagagagggugggag

SEQ ID NO: 1651024 - RNA, 21 nt, Human
ucagagagggugggagugggc

SEQ ID NO: 1651025 - RNA, 23 nt, Human
ucagagagggugggagugggccc

SEQ ID NO: 1651026 - RNA, 12 nt, Human
ucagagccugca

SEQ ID NO: 1651027 - RNA, 13 nt, Human
ucagagccugcag

SEQ ID NO: 1651028 - RNA, 14 nt, Human
ucagagccugcagu

SEQ ID NO: 1651029 - RNA, 15 nt, Human
ucagagccugcaguu

SEQ ID NO: 1651030 - RNA, 18 nt, Human
ucagagccugcaguuauu

SEQ ID NO: 1651031 - RNA, 14 nt, Human
ucagaagacacuga

SEQ ID NO: 1651032 - RNA, 19 nt, Human
ucagaaguuucucagcucc

SEQ ID NO: 1651033 - RNA, 19 nt, Human
ucagaaguuucugccgcag

SEQ ID NO: 1651034 - RNA, 22 nt, Human
ucagaaguuucugccgcagccc

SEQ ID NO: 1651035 - RNA, 18 nt, Human
ucagaaggcaaaugacuu

SEQ ID NO: 1651036 - RNA, 19 nt, Human
ucagaaggcaaaugacuuu

SEQ ID NO: 1651037 - RNA, 22 nt, Human
ucagaaggcaaaugacuuugga

SEQ ID NO: 1651038 - RNA, 19 nt, Human
accaugggauaaaugccau

SEQ ID NO: 1651039 - RNA, 22 nt, Human
accauggucggaaaacaugcua

SEQ ID NO: 1651040 - RNA, 15 nt, Human
ucacuccuaccuggu

SEQ ID NO: 1651041 - RNA, 21 nt, Human
ucacucuuauugcccacgcug

SEQ ID NO: 1651042 - RNA, 23 nt, Human
ucacucuuauugcccacgcugga

SEQ ID NO: 1651043 - RNA, 21 nt, Human
acccagauaaagguucaugca

SEQ ID NO: 1651044 - RNA, 13 nt, Human
acccacugcucug

SEQ ID NO: 1651045 - RNA, 14 nt, Human
acccacugcucugg

SEQ ID NO: 1651046 - RNA, 15 nt, Human
acccacugcucuggu

SEQ ID NO: 1651047 - RNA, 11 nt, Human
acccacugcuu

SEQ ID NO: 1651048 - RNA, 10 nt, Human
acccacugcu

SEQ ID NO: 1651049 - RNA, 11 nt, Human
acccacugcuc

SEQ ID NO: 1651050 - RNA, 23 nt, Human
accauuucuugagguaaaagcau

SEQ ID NO: 1651051 - RNA, 22 nt, Human
accacuuuuguucuugguuugu

SEQ ID NO: 1651052 - RNA, 12 nt, Human
accagagcccac

SEQ ID NO: 1651053 - RNA, 14 nt, Human
accagagcccaccu

SEQ ID NO: 1651054 - RNA, 16 nt, Human
accagagcccaccuug

SEQ ID NO: 1651055 - RNA, 14 nt, Human
accagacaccuuga

SEQ ID NO: 1651056 - RNA, 17 nt, Human
accagacaccuugacag

SEQ ID NO: 1651057 - RNA, 21 nt, Human
accacuuuuguucuugguuug

SEQ ID NO: 1651058 - RNA, 16 nt, Human
accacuuuuguucuug

SEQ ID NO: 1651059 - RNA, 15 nt, Human
accacuuuuguucuu

SEQ ID NO: 1651060 - RNA, 18 nt, Human
accacuuguguuuugcaa

SEQ ID NO: 1651061 - RNA, 17 nt, Human
ucaccccggccaccugc

SEQ ID NO: 1651062 - RNA, 18 nt, Human
ucaccccggccaccugcg

SEQ ID NO: 1651063 - RNA, 17 nt, Human
accacugcacuccagcc

SEQ ID NO: 1651064 - RNA, 20 nt, Human
accacugcacuccagccugg

SEQ ID NO: 1651065 - RNA, 15 nt, Human
accacugcucugaug

SEQ ID NO: 1651066 - RNA, 17 nt, Human
accacugcucugaugaa

SEQ ID NO: 1651067 - RNA, 23 nt, Human
accacugcucugaugaagaggag

SEQ ID NO: 1651068 - RNA, 21 nt, Human
accacugcacuccagccuggg

SEQ ID NO: 1651069 - RNA, 22 nt, Human
ucaccccggccaccugcggugc

SEQ ID NO: 1651070 - RNA, 13 nt, Human
accacugcagaag

SEQ ID NO: 1651071 - RNA, 13 nt, Human
ucaccugccccuc

SEQ ID NO: 1651072 - RNA, 16 nt, Human
ucaccugccccucaac

SEQ ID NO: 1651073 - RNA, 15 nt, Human
ucaccugccccucaa

SEQ ID NO: 1651074 - RNA, 15 nt, Human
ucaccucucccuugg

SEQ ID NO: 1651075 - RNA, 16 nt, Human
ucaccugaagacucau

SEQ ID NO: 1651076 - RNA, 14 nt, Human
accagccuccaugc

SEQ ID NO: 1651077 - RNA, 19 nt, Human
accagccuccaugcugccu

SEQ ID NO: 1651078 - RNA, 20 nt, Human
accagccuccaugcugccuc

SEQ ID NO: 1651079 - RNA, 21 nt, Human
accagccuccaugcugccucc

SEQ ID NO: 1651080 - RNA, 17 nt, Human
accagagcccaccuugg

SEQ ID NO: 1651081 - RNA, 14 nt, Human
accagggacugagg

SEQ ID NO: 1651082 - RNA, 18 nt, Human
ucacuauguugcccaggc

SEQ ID NO: 1651083 - RNA, 19 nt, Human
ucacuauguugcccaggca

SEQ ID NO: 1651084 - RNA, 20 nt, Human
ucacuauguugcccaggcag

SEQ ID NO: 1651085 - RNA, 14 nt, Human
accacacuccagcu

SEQ ID NO: 1651086 - RNA, 15 nt, Human
ucaauucuugccaaa

SEQ ID NO: 1651087 - RNA, 13 nt, Human
ucaauuuuaacaa

SEQ ID NO: 1651088 - RNA, 20 nt, Human
ucaauuuuucuuauuucauu

SEQ ID NO: 1651089 - RNA, 23 nt, Human
ucaauuuuucuuauuucauuucu

SEQ ID NO: 1651090 - RNA, 22 nt, Human
ucaaguccucuuuucugagagg

SEQ ID NO: 1651091 - RNA, 15 nt, Human
ucaagugaaaaagga

SEQ ID NO: 1651092 - RNA, 17 nt, Human
ucaagugauucucaugc

SEQ ID NO: 1651093 - RNA, 23 nt, Human
ucaagugaaaaaggaggaagaga

SEQ ID NO: 1651094 - RNA, 20 nt, Human
ucaagugauucucaugccuc

SEQ ID NO: 1651095 - RNA, 19 nt, Human
accaacauacucccaucug

SEQ ID NO: 1651096 - RNA, 21 nt, Human
accaacauacucccaucugug

SEQ ID NO: 1651097 - RNA, 22 nt, Human
accaacauacucccaucuguga

SEQ ID NO: 1651098 - RNA, 13 nt, Human
accaaucaugaau

SEQ ID NO: 1651099 - RNA, 15 nt, Human
accaauguucucucu

SEQ ID NO: 1651100 - RNA, 15 nt, Human
accaaucaugaauua

SEQ ID NO: 1651101 - RNA, 13 nt, Human
ucaccccagcccc

SEQ ID NO: 1651102 - RNA, 14 nt, Human
ucaccccagcccca

SEQ ID NO: 1651103 - RNA, 20 nt, Human
ucaccccagccccaaaacuc

SEQ ID NO: 1651104 - RNA, 15 nt, Human
ucaccccggccaccu

SEQ ID NO: 1651105 - RNA, 16 nt, Human
ucacaacaaccugguc

SEQ ID NO: 1651106 - RNA, 22 nt, Human
ucacacgucuggcuucacagau

SEQ ID NO: 1651107 - RNA, 21 nt, Human
ucacaacagauuauuaccuua

SEQ ID NO: 1651108 - RNA, 12 nt, Human
ucacauaucugu

SEQ ID NO: 1651109 - RNA, 15 nt, Human
ucacauaucugucau

SEQ ID NO: 1651110 - RNA, 15 nt, Human
ucacaguucucuccu

SEQ ID NO: 1651111 - RNA, 13 nt, Human
acacauguccaag

SEQ ID NO: 1651112 - RNA, 18 nt, Human
acacauguccaagaagcc

SEQ ID NO: 1651113 - RNA, 19 nt, Human
acacauguccaagaagccc

SEQ ID NO: 1651114 - RNA, 13 nt, Human
acacauuuuauuu

SEQ ID NO: 1651115 - RNA, 12 nt, Human
acacccagccca

SEQ ID NO: 1651116 - RNA, 13 nt, Human
acacccagcccac

SEQ ID NO: 1651117 - RNA, 21 nt, Human
acacauguccaagaagcccag

SEQ ID NO: 1651118 - RNA, 22 nt, Human
acacauguccaagaagcccagg

SEQ ID NO: 1651119 - RNA, 20 nt, Human
uauaaaaauaaaaaacacug

SEQ ID NO: 1651120 - RNA, 21 nt, Human
uauaaaaauaaaaaacacugg

SEQ ID NO: 1651121 - RNA, 18 nt, Human
uaguucagguaacaggca

SEQ ID NO: 1651122 - RNA, 18 nt, Human
acaccucugcacaagcug

SEQ ID NO: 1651123 - RNA, 21 nt, Human
acaccccagacgaugucuuca

SEQ ID NO: 1651124 - RNA, 14 nt, Human
acaccuugacaggg

SEQ ID NO: 1651125 - RNA, 15 nt, Human
acaccuugacagggc

SEQ ID NO: 1651126 - RNA, 16 nt, Human
acaccuugacagggca

SEQ ID NO: 1651127 - RNA, 19 nt, Human
acaccucugcacaagcugc

SEQ ID NO: 1651128 - RNA, 19 nt, Human
uauaacuauguugauaaaa

SEQ ID NO: 1651129 - RNA, 22 nt, Human
uauaaccaguguuguggauuua

SEQ ID NO: 1651130 - RNA, 20 nt, Human
acacuaaccacgcuggaccu

SEQ ID NO: 1651131 - RNA, 18 nt, Human
acacuaagagagaaugag

SEQ ID NO: 1651132 - RNA, 19 nt, Human
acacuaagagagaaugaga

SEQ ID NO: 1651133 - RNA, 16 nt, Human
acacuaaccacgcugg

SEQ ID NO: 1651134 - RNA, 17 nt, Human
acacuaaccacgcugga

SEQ ID NO: 1651135 - RNA, 19 nt, Human
acacuaaccacgcuggacc

SEQ ID NO: 1651136 - RNA, 17 nt, Human
acacuaagagagaauga

SEQ ID NO: 1651137 - RNA, 11 nt, Human
acacacagcuc

SEQ ID NO: 1651138 - RNA, 12 nt, Human
acacacagcucu

SEQ ID NO: 1651139 - RNA, 14 nt, Human
acacacacauacac

SEQ ID NO: 1651140 - RNA, 13 nt, Human
acacacugaagaa

SEQ ID NO: 1651141 - RNA, 14 nt, Human
acaaugcuguauuu

SEQ ID NO: 1651142 - RNA, 17 nt, Human
acaaugcuguauuuuaa

SEQ ID NO: 1651143 - RNA, 15 nt, Human
acaaugguuuucuug

SEQ ID NO: 1651144 - RNA, 18 nt, Human
acaaugcuguauuuuaaa

SEQ ID NO: 1651145 - RNA, 21 nt, Human
acaaugguuuucuuguguguu

SEQ ID NO: 1651146 - RNA, 14 nt, Human
acacaacuauauug

SEQ ID NO: 1651147 - RNA, 17 nt, Human
acacaacuauauuguuu

SEQ ID NO: 1651148 - RNA, 17 nt, Human
uagucuugucucagauu

SEQ ID NO: 1651149 - RNA, 22 nt, Human
uagucuugucucagauuuuauu

SEQ ID NO: 1651150 - RNA, 12 nt, Human
uaguguuggaga

SEQ ID NO: 1651151 - RNA, 16 nt, Human
uaguguuggagaagaa

SEQ ID NO: 1651152 - RNA, 17 nt, Human
uaguguuggagaagaac

SEQ ID NO: 1651153 - RNA, 14 nt, Human
uaguagagacaggg

SEQ ID NO: 1651154 - RNA, 13 nt, Human
uaguagagacagg

SEQ ID NO: 1651155 - RNA, 11 nt, Human
acacagugagu

SEQ ID NO: 1651156 - RNA, 14 nt, Human
acacacugaagaag

SEQ ID NO: 1651157 - RNA, 17 nt, Human
acacagugaccauacua

SEQ ID NO: 1651158 - RNA, 13 nt, Human
acacagugagucg

SEQ ID NO: 1651159 - RNA, 21 nt, Human
uagguuggcaaaaaggcagga

SEQ ID NO: 1651160 - RNA, 22 nt, Human
uagguuuggacaaaauggaaua

SEQ ID NO: 1651161 - RNA, 16 nt, Human
acagaguuguuacauu

SEQ ID NO: 1651162 - RNA, 20 nt, Human
acagaguuguuacauuuuua

SEQ ID NO: 1651163 - RNA, 19 nt, Human
acagaguuguuacauuuuu

SEQ ID NO: 1651164 - RNA, 18 nt, Human
acagaguuguuacauuuu

SEQ ID NO: 1651165 - RNA, 17 nt, Human
acagaguuguuacauuu

SEQ ID NO: 1651166 - RNA, 21 nt, Human
acagagcaagugagacccugu

SEQ ID NO: 1651167 - RNA, 14 nt, Human
acagagcccacgcc

SEQ ID NO: 1651168 - RNA, 14 nt, Human
uauccuacuucccc

SEQ ID NO: 1651169 - RNA, 17 nt, Human
uauccuacuuccccuuc

SEQ ID NO: 1651170 - RNA, 13 nt, Human
uaucucagggccu

SEQ ID NO: 1651171 - RNA, 15 nt, Human
uaucucagggccugg

SEQ ID NO: 1651172 - RNA, 16 nt, Human
uaucccggcugcccuu

SEQ ID NO: 1651173 - RNA, 20 nt, Human
uaucccuacuguaauuugug

SEQ ID NO: 1651174 - RNA, 19 nt, Human
uaucccuacuguaauuugu

SEQ ID NO: 1651175 - RNA, 15 nt, Human
uauauuuauuacugu

SEQ ID NO: 1651176 - RNA, 19 nt, Human
uauauuuauuacuguaaga

SEQ ID NO: 1651177 - RNA, 23 nt, Human
acagaugggugcuuggaggaagg

SEQ ID NO: 1651178 - RNA, 20 nt, Human
acagauacuccuccaagguu

SEQ ID NO: 1651179 - RNA, 20 nt, Human
acagauagauauaugcucug

SEQ ID NO: 1651180 - RNA, 22 nt, Human
acagaguuguuacauuuuuaag

SEQ ID NO: 1651181 - RNA, 21 nt, Human
acagaguuguuacauuuuuaa

SEQ ID NO: 1651182 - RNA, 16 nt, Human
acagcaaggagauuua

SEQ ID NO: 1651183 - RNA, 21 nt, Human
acagcccgggcucugccuccc

SEQ ID NO: 1651184 - RNA, 22 nt, Human
acagcccgggcucugccuccca

SEQ ID NO: 1651185 - RNA, 23 nt, Human
acagcccgggcucugccucccau

SEQ ID NO: 1651186 - RNA, 20 nt, Human
acagcccuucuuuccacaga

SEQ ID NO: 1651187 - RNA, 21 nt, Human
acagcccuucuuuccacagaa

SEQ ID NO: 1651188 - RNA, 20 nt, Human
uaugaaagauggcugugccu

SEQ ID NO: 1651189 - RNA, 22 nt, Human
uaugaaagauggcugugccucu

SEQ ID NO: 1651190 - RNA, 23 nt, Human
uaugaaagauggcugugccucug

SEQ ID NO: 1651191 - RNA, 20 nt, Human
acacuuguugauuaauggaa

SEQ ID NO: 1651192 - RNA, 23 nt, Human
acacuuguugauuaauggaaaug

SEQ ID NO: 1651193 - RNA, 15 nt, Human
acacuguuucaaacu

SEQ ID NO: 1651194 - RNA, 16 nt, Human
acacuguuucaaacuu

SEQ ID NO: 1651195 - RNA, 13 nt, Human
acacuuaaaaaug

SEQ ID NO: 1651196 - RNA, 15 nt, Human
acacuuaaaaauggu

SEQ ID NO: 1651197 - RNA, 19 nt, Human
acagacuggaagcacagcu

SEQ ID NO: 1651198 - RNA, 21 nt, Human
acagacuggaagcacagcuuc

SEQ ID NO: 1651199 - RNA, 22 nt, Human
acagacuggaagcacagcuuca

SEQ ID NO: 1651200 - RNA, 18 nt, Human
acagacacaggcccggcu

SEQ ID NO: 1651201 - RNA, 22 nt, Human
acagacacaggcccggcuccag

SEQ ID NO: 1651202 - RNA, 17 nt, Human
acagacacaggcccggc

SEQ ID NO: 1651203 - RNA, 19 nt, Human
acagaaagcagaacaguga

SEQ ID NO: 1651204 - RNA, 12 nt, Human
uauauuuacaaa

SEQ ID NO: 1651205 - RNA, 22 nt, Human
acacuguucucugcccuccaag

SEQ ID NO: 1651206 - RNA, 23 nt, Human
acacuguucucugcccuccaaga

SEQ ID NO: 1651207 - RNA, 16 nt, Human
acacuguucucugccc

SEQ ID NO: 1651208 - RNA, 17 nt, Human
acacuguucucugcccu

SEQ ID NO: 1651209 - RNA, 18 nt, Human
acacuguucucugcccuc

SEQ ID NO: 1651210 - RNA, 20 nt, Human
acacuguucucugcccucca

SEQ ID NO: 1651211 - RNA, 14 nt, Human
acacuguucucugc

SEQ ID NO: 1651212 - RNA, 15 nt, Human
acacuguucucugcc

SEQ ID NO: 1651213 - RNA, 12 nt, Human
acacugaagaag

SEQ ID NO: 1651214 - RNA, 14 nt, Human
acacugaagaagca

SEQ ID NO: 1651215 - RNA, 11 nt, Human
acacucugaga

SEQ ID NO: 1651216 - RNA, 13 nt, Human
acacucugagacu

SEQ ID NO: 1651217 - RNA, 14 nt, Human
acacuccagugaga

SEQ ID NO: 1651218 - RNA, 21 nt, Human
acacuccaauuaaggauuuua

SEQ ID NO: 1651219 - RNA, 18 nt, Human
acacuccaauuaaggauu

SEQ ID NO: 1651220 - RNA, 19 nt, Human
uacuuuuuggcauaacaua

SEQ ID NO: 1651221 - RNA, 20 nt, Human
uacuuuuuggcauaacauaa

SEQ ID NO: 1651222 - RNA, 14 nt, Human
uacuuuuuggcaua

SEQ ID NO: 1651223 - RNA, 16 nt, Human
uacuuugugcuggggu

SEQ ID NO: 1651224 - RNA, 22 nt, Human
uacuuugugcugggguuaucug

SEQ ID NO: 1651225 - RNA, 13 nt, Human
aauuugguuuuca

SEQ ID NO: 1651226 - RNA, 15 nt, Human
aauuugguuuucaca

SEQ ID NO: 1651227 - RNA, 21 nt, Human
aauuugguuuucacauuggaa

SEQ ID NO: 1651228 - RNA, 16 nt, Human
aauuuguuauaaugaa

SEQ ID NO: 1651229 - RNA, 16 nt, Human
aauuuuguuucuguac

SEQ ID NO: 1651230 - RNA, 22 nt, Human
aauuuuuaaucuuuaauuuuac

SEQ ID NO: 1651231 - RNA, 21 nt, Human
aauuuuucuuauuucauuucu

SEQ ID NO: 1651232 - RNA, 22 nt, Human
aauuuuuuuaucgucacugcuu

SEQ ID NO: 1651233 - RNA, 22 nt, Human
aauuuuuucucuaggaaauauu

SEQ ID NO: 1651234 - RNA, 20 nt, Human
acaaaguauuaagcauauau

SEQ ID NO: 1651235 - RNA, 14 nt, Human
acaaaacuuuucua

SEQ ID NO: 1651236 - RNA, 18 nt, Human
acaaagcccuuccauguc

SEQ ID NO: 1651237 - RNA, 21 nt, Human
acaaagcgugguggacaugca

SEQ ID NO: 1651238 - RNA, 22 nt, Human
uagauaggucagugcaaauacu

SEQ ID NO: 1651239 - RNA, 17 nt, Human
uagauaggccaugggca

SEQ ID NO: 1651240 - RNA, 14 nt, Human
uagaucuaguucac

SEQ ID NO: 1651241 - RNA, 21 nt, Human
uagaugcaguucugaagaaga

SEQ ID NO: 1651242 - RNA, 20 nt, Human
uagaugcaguucugaagaag

SEQ ID NO: 1651243 - RNA, 21 nt, Human
acaaauucugucucuggauua

SEQ ID NO: 1651244 - RNA, 15 nt, Human
acaacagcuggugcc

SEQ ID NO: 1651245 - RNA, 13 nt, Human
acaagacacagug

SEQ ID NO: 1651246 - RNA, 17 nt, Human
acaacaucuuuuucuac

SEQ ID NO: 1651247 - RNA, 17 nt, Human
acaaauuuacagagaca

SEQ ID NO: 1651248 - RNA, 17 nt, Human
acaagcgugagccacug

SEQ ID NO: 1651249 - RNA, 13 nt, Human
acaagcuccaagc

SEQ ID NO: 1651250 - RNA, 22 nt, Human
acaagcucacagaccuuugaac

SEQ ID NO: 1651251 - RNA, 18 nt, Human
acaagaccacguuucuaa

SEQ ID NO: 1651252 - RNA, 17 nt, Human
acaagaccacguuucua

SEQ ID NO: 1651253 - RNA, 14 nt, Human
acaagacacaguga

SEQ ID NO: 1651254 - RNA, 16 nt, Human
acaagaccacguuucu

SEQ ID NO: 1651255 - RNA, 18 nt, Human
acaagagcuuaacagugu

SEQ ID NO: 1651256 - RNA, 19 nt, Human
acaagagcuuaacagugug

SEQ ID NO: 1651257 - RNA, 22 nt, Human
acaagagcccaggccuccuaca

SEQ ID NO: 1651258 - RNA, 18 nt, Human
acaaucucggcucacugc

SEQ ID NO: 1651259 - RNA, 20 nt, Human
acaaucucggcucacugcau

SEQ ID NO: 1651260 - RNA, 18 nt, Human
acaagcgugagccacugc

SEQ ID NO: 1651261 - RNA, 22 nt, Human
acaagcuccaagcucccaggca

SEQ ID NO: 1651262 - RNA, 15 nt, Human
acaagcuccaagcuc

SEQ ID NO: 1651263 - RNA, 16 nt, Human
acaagcuccaagcucc

SEQ ID NO: 1651264 - RNA, 17 nt, Human
acaagcuccaagcuccc

SEQ ID NO: 1651265 - RNA, 19 nt, Human
acaagcuccaagcucccag

SEQ ID NO: 1651266 - RNA, 15 nt, Human
uagcuagacugguga

SEQ ID NO: 1651267 - RNA, 18 nt, Human
uagcuagacuggugacug

SEQ ID NO: 1651268 - RNA, 16 nt, Human
uagcucaggugucccu

SEQ ID NO: 1651269 - RNA, 16 nt, Human
uagcuacuaauuuuaa

SEQ ID NO: 1651270 - RNA, 19 nt, Human
uacugaaauaaacgucuua

SEQ ID NO: 1651271 - RNA, 22 nt, Human
uacugaaauaaacgucuuaaau

SEQ ID NO: 1651272 - RNA, 17 nt, Human
uacugagagugaacaaa

SEQ ID NO: 1651273 - RNA, 15 nt, Human
uacuguaauuuguga

SEQ ID NO: 1651274 - RNA, 17 nt, Human
uacuguaauuugugaua

SEQ ID NO: 1651275 - RNA, 16 nt, Human
uacuguaauuugugau

SEQ ID NO: 1651276 - RNA, 19 nt, Human
uacugagagugaacaaauu

SEQ ID NO: 1651277 - RNA, 19 nt, Human
uacuguacagacagaaaaa

SEQ ID NO: 1651278 - RNA, 23 nt, Human
uacuguacagacagaaaaaacug

SEQ ID NO: 1651279 - RNA, 18 nt, Human
uacuguacaugaaaacac

SEQ ID NO: 1651280 - RNA, 18 nt, Human
aauugaggacacugauau

SEQ ID NO: 1651281 - RNA, 18 nt, Human
uacuagggaaaugccuuu

SEQ ID NO: 1651282 - RNA, 22 nt, Human
uacucuacccucuuagaaaaac

SEQ ID NO: 1651283 - RNA, 18 nt, Human
uacuaaaaauacaaaaaa

SEQ ID NO: 1651284 - RNA, 16 nt, Human
uacgucugacaggcaa

SEQ ID NO: 1651285 - RNA, 13 nt, Human
uacgugaguccug

SEQ ID NO: 1651286 - RNA, 14 nt, Human
uacuaaaaauacaa

SEQ ID NO: 1651287 - RNA, 15 nt, Human
uacgucugacaggca

SEQ ID NO: 1651288 - RNA, 24 nt, Human
uacgcuccaucgcugucaucucag

SEQ ID NO: 1651289 - RNA, 13 nt, Human
aauugacccacaa

SEQ ID NO: 1651290 - RNA, 15 nt, Human
aauuugaaacacuuu

SEQ ID NO: 1651291 - RNA, 14 nt, Human
uacuuccccuuccu

SEQ ID NO: 1651292 - RNA, 15 nt, Human
uacuuccccuuccua

SEQ ID NO: 1651293 - RNA, 18 nt, Human
uacuuccccuuccuaauu

SEQ ID NO: 1651294 - RNA, 20 nt, Human
uacuuccccuuccuaauucc

SEQ ID NO: 1651295 - RNA, 23 nt, Human
uacuuccugugacuucagcucug

SEQ ID NO: 1651296 - RNA, 13 nt, Human
uacuucuccaccc

SEQ ID NO: 1651297 - RNA, 18 nt, Human
uacuucuccacccugcuc

SEQ ID NO: 1651298 - RNA, 23 nt, Human
uacuuugauauuuucaacgcagc

SEQ ID NO: 1651299 - RNA, 15 nt, Human
uacuugaaaauuaac

SEQ ID NO: 1651300 - RNA, 16 nt, Human
uacuucuuauacauuu

SEQ ID NO: 1651301 - RNA, 14 nt, Human
uacuucuuauacau

SEQ ID NO: 1651302 - RNA, 15 nt, Human
uacuucuuauacauu

SEQ ID NO: 1651303 - RNA, 20 nt, Human
uacuucuccacccugcucuc

SEQ ID NO: 1651304 - RNA, 15 nt, Human
uacuucugcuacaua

SEQ ID NO: 1651305 - RNA, 19 nt, Human
uacuucuuaggguuaugau

SEQ ID NO: 1651306 - RNA, 15 nt, Human
aauuggagcucgugg

SEQ ID NO: 1651307 - RNA, 13 nt, Human
aauuuaguauuuu

SEQ ID NO: 1651308 - RNA, 15 nt, Human
aauuuacauacucug

SEQ ID NO: 1651309 - RNA, 17 nt, Human
aauuuaccugaagucuu

SEQ ID NO: 1651310 - RNA, 17 nt, Human
aauuuacagagacagaa

SEQ ID NO: 1651311 - RNA, 18 nt, Human
aauuuacagagacagaaa

SEQ ID NO: 1651312 - RNA, 18 nt, Human
aauuucuaggacugaauu

SEQ ID NO: 1651313 - RNA, 22 nt, Human
aauuucuaggacugaauuauga

SEQ ID NO: 1651314 - RNA, 17 nt, Human
aauuucuaggacugaau

SEQ ID NO: 1651315 - RNA, 17 nt, Human
aauuuauuauggcacau

SEQ ID NO: 1651316 - RNA, 14 nt, Human
aauuuauuauggca

SEQ ID NO: 1651317 - RNA, 13 nt, Human
aauuuauuauggc

SEQ ID NO: 1651318 - RNA, 23 nt, Human
aauuucuaggacugaauuaugaa

SEQ ID NO: 1651319 - RNA, 19 nt, Human
aauuucucccagucauuua

SEQ ID NO: 1651320 - RNA, 22 nt, Human
aauuuauaaacuuuuuucuuac

SEQ ID NO: 1651321 - RNA, 22 nt, Human
uaaagguucaugcaaacuuuau

SEQ ID NO: 1651322 - RNA, 19 nt, Human
uaaaguaaaaacaaagaaa

SEQ ID NO: 1651323 - RNA, 21 nt, Human
uaaaguaaaaacaaagaaauu

SEQ ID NO: 1651324 - RNA, 22 nt, Human
uaaaguaaaaacaaagaaauua

SEQ ID NO: 1651325 - RNA, 20 nt, Human
aaguuuuuauggcuuuugug

SEQ ID NO: 1651326 - RNA, 16 nt, Human
aauaaaucauaaaacu

SEQ ID NO: 1651327 - RNA, 15 nt, Human
aauaaaacuuuuuaa

SEQ ID NO: 1651328 - RNA, 14 nt, Human
aauaaaacuuuuua

SEQ ID NO: 1651329 - RNA, 12 nt, Human
aauaaaacuuuu

SEQ ID NO: 1651330 - RNA, 18 nt, Human
aauaaaacuuuuuaaaau

SEQ ID NO: 1651331 - RNA, 16 nt, Human
aauaaauugcuccuug

SEQ ID NO: 1651332 - RNA, 20 nt, Human
aauaaauugcuccuugacau

SEQ ID NO: 1651333 - RNA, 21 nt, Human
aauaacaaugaaaguugauaa

SEQ ID NO: 1651334 - RNA, 15 nt, Human
aauaacgauaaaaga

SEQ ID NO: 1651335 - RNA, 20 nt, Human
aauaaccaaaugcaauguga

SEQ ID NO: 1651336 - RNA, 15 nt, Human
uaaaucugugaacuu

SEQ ID NO: 1651337 - RNA, 16 nt, Human
uaaaucugugaacuug

SEQ ID NO: 1651338 - RNA, 17 nt, Human
uaaaucugugaacuuga

SEQ ID NO: 1651339 - RNA, 18 nt, Human
uaaaucugugaacuugaa

SEQ ID NO: 1651340 - RNA, 19 nt, Human
uaaaucugugaacuugaaa

SEQ ID NO: 1651341 - RNA, 21 nt, Human
uaaaucugugaacuugaaauu

SEQ ID NO: 1651342 - RNA, 22 nt, Human
uaaaucugugaacuugaaauuu

SEQ ID NO: 1651343 - RNA, 18 nt, Human
uaaauagcuagacuggug

SEQ ID NO: 1651344 - RNA, 18 nt, Human
uaaaucuccaaaauaaaa

SEQ ID NO: 1651345 - RNA, 15 nt, Human
uaaaucuccaaaaua

SEQ ID NO: 1651346 - RNA, 14 nt, Human
uaaaucuccaaaau

SEQ ID NO: 1651347 - RNA, 23 nt, Human
uaaaugcaccuggaauauauaac

SEQ ID NO: 1651348 - RNA, 15 nt, Human
uaaauguugaaagau

SEQ ID NO: 1651349 - RNA, 20 nt, Human
uaaauguugaaagaucaaaa

SEQ ID NO: 1651350 - RNA, 24 nt, Human
uaaauguuuuuuuuuaaagacuuu

SEQ ID NO: 1651351 - RNA, 14 nt, Human
uaaauuaacuuuua

SEQ ID NO: 1651352 - RNA, 12 nt, Human
uaaauuaacuuu

SEQ ID NO: 1651353 - RNA, 16 nt, Human
uaaauuaacuuuuaua

SEQ ID NO: 1651354 - RNA, 15 nt, Human
uaaauuaacuuuuau

SEQ ID NO: 1651355 - RNA, 17 nt, Human
uaaauuaacuuuuauaa

SEQ ID NO: 1651356 - RNA, 18 nt, Human
uaaauuaacuuuuauaaa

SEQ ID NO: 1651357 - RNA, 19 nt, Human
uaaauaaugugaaacugga

SEQ ID NO: 1651358 - RNA, 17 nt, Human
uaaauaaauaaauagcu

SEQ ID NO: 1651359 - RNA, 14 nt, Human
uaaauaaauagcua

SEQ ID NO: 1651360 - RNA, 12 nt, Human
uaaauaaaguuu

SEQ ID NO: 1651361 - RNA, 21 nt, Human
uaaauaaaguuuguugaaaca

SEQ ID NO: 1651362 - RNA, 20 nt, Human
aauaauuuuuauauuugaaa

SEQ ID NO: 1651363 - RNA, 16 nt, Human
aauaauuuuuauauuu

SEQ ID NO: 1651364 - RNA, 17 nt, Human
aauaauuuuuauauuug

SEQ ID NO: 1651365 - RNA, 19 nt, Human
aauaauuuuuauauuugaa

SEQ ID NO: 1651366 - RNA, 17 nt, Human
uaagacauuuuuggaag

SEQ ID NO: 1651367 - RNA, 19 nt, Human
uaacuuuuauaaacuuuac

SEQ ID NO: 1651368 - RNA, 13 nt, Human
uaagaaugaaaua

SEQ ID NO: 1651369 - RNA, 15 nt, Human
uaagaaugaaauacu

SEQ ID NO: 1651370 - RNA, 21 nt, Human
uaagaaugaaauacuguuuga

SEQ ID NO: 1651371 - RNA, 18 nt, Human
uaacuuuuauaaacuuua

SEQ ID NO: 1651372 - RNA, 17 nt, Human
uaacuuuuauaaacuuu

SEQ ID NO: 1651373 - RNA, 15 nt, Human
uaacuuuuauaaacu

SEQ ID NO: 1651374 - RNA, 16 nt, Human
aauaucuccgucaacu

SEQ ID NO: 1651375 - RNA, 21 nt, Human
aauaucuccgucaacucauau

SEQ ID NO: 1651376 - RNA, 16 nt, Human
aauaucugaaaaugua

SEQ ID NO: 1651377 - RNA, 17 nt, Human
aauaucugaaaauguau

SEQ ID NO: 1651378 - RNA, 18 nt, Human
aauaucugaaaauguaug

SEQ ID NO: 1651379 - RNA, 19 nt, Human
aauaucugaaaauguaugu

SEQ ID NO: 1651380 - RNA, 20 nt, Human
aauaucugaaaauguaugug

SEQ ID NO: 1651381 - RNA, 19 nt, Human
aauaucuuuuuuuuaauaa

SEQ ID NO: 1651382 - RNA, 11 nt, Human
aauauugcuga

SEQ ID NO: 1651383 - RNA, 12 nt, Human
aauauugcugau

SEQ ID NO: 1651384 - RNA, 13 nt, Human
aauauugcugaug

SEQ ID NO: 1651385 - RNA, 15 nt, Human
aauauugcugauggu

SEQ ID NO: 1651386 - RNA, 18 nt, Human
aauauugcugauggugca

SEQ ID NO: 1651387 - RNA, 21 nt, Human
aauauugcugauggugcaaug

SEQ ID NO: 1651388 - RNA, 22 nt, Human
aauauugcugauggugcaauga

SEQ ID NO: 1651389 - RNA, 15 nt, Human
aauaugcaaagcacu

SEQ ID NO: 1651390 - RNA, 17 nt, Human
aauaugcaaagcacuga

SEQ ID NO: 1651391 - RNA, 18 nt, Human
aauauugauaugcuuaua

SEQ ID NO: 1651392 - RNA, 15 nt, Human
aauaugcacacauuu

SEQ ID NO: 1651393 - RNA, 24 nt, Human
aauaugcaaagcacugacuucuaa

SEQ ID NO: 1651394 - RNA, 17 nt, Human
aauauuuuaugauccag

SEQ ID NO: 1651395 - RNA, 18 nt, Human
aauauuuuaugauccagc

SEQ ID NO: 1651396 - RNA, 15 nt, Human
aauauuucagauaau

SEQ ID NO: 1651397 - RNA, 16 nt, Human
uaaccucuaaauucuu

SEQ ID NO: 1651398 - RNA, 15 nt, Human
uaacauggaaguacu

SEQ ID NO: 1651399 - RNA, 16 nt, Human
uaacauggaaguacua

SEQ ID NO: 1651400 - RNA, 15 nt, Human
uaacuaaaagguaug

SEQ ID NO: 1651401 - RNA, 16 nt, Human
uaacauaaaucuguga

SEQ ID NO: 1651402 - RNA, 17 nt, Human
uaacauaaaucugugaa

SEQ ID NO: 1651403 - RNA, 18 nt, Human
uaacauaaaucugugaac

SEQ ID NO: 1651404 - RNA, 20 nt, Human
uaacauaaaucugugaacuu

SEQ ID NO: 1651405 - RNA, 15 nt, Human
uaacauaaaucugug

SEQ ID NO: 1651406 - RNA, 14 nt, Human
uaacaugauuuggg

SEQ ID NO: 1651407 - RNA, 14 nt, Human
uaacauggaaguac

SEQ ID NO: 1651408 - RNA, 15 nt, Human
aauaucacuugucaa

SEQ ID NO: 1651409 - RNA, 18 nt, Human
aauaucaucaguauugaa

SEQ ID NO: 1651410 - RNA, 12 nt, Human
aauaucacuugu

SEQ ID NO: 1651411 - RNA, 24 nt, Human
aauagcuuuuuucucugauacaga

SEQ ID NO: 1651412 - RNA, 19 nt, Human
aauaggaaaaacugauuuu

SEQ ID NO: 1651413 - RNA, 17 nt, Human
aauaggaaaaacugauu

SEQ ID NO: 1651414 - RNA, 18 nt, Human
aauaggaaaaacugauuu

SEQ ID NO: 1651415 - RNA, 15 nt, Human
aauaggaaaaacuga

SEQ ID NO: 1651416 - RNA, 16 nt, Human
aauaggaaaaacugau

SEQ ID NO: 1651417 - RNA, 18 nt, Human
aauaggcguaacuaauuu

SEQ ID NO: 1651418 - RNA, 16 nt, Human
aauagaugcugacugu

SEQ ID NO: 1651419 - RNA, 20 nt, Human
aauagccugccucuucucua

SEQ ID NO: 1651420 - RNA, 13 nt, Human
aauagcugggacu

SEQ ID NO: 1651421 - RNA, 14 nt, Human
aauagcugggacua

SEQ ID NO: 1651422 - RNA, 18 nt, Human
aauagacccacaagaggc

SEQ ID NO: 1651423 - RNA, 23 nt, Human
aauagacaauuuauuauggcaca

SEQ ID NO: 1651424 - RNA, 18 nt, Human
aauagacaauuuauuaug

SEQ ID NO: 1651425 - RNA, 20 nt, Human
aauccucaguuuuugugaaa

SEQ ID NO: 1651426 - RNA, 15 nt, Human
aaucuaaauggaacc

SEQ ID NO: 1651427 - RNA, 13 nt, Human
aaucuaaauggaa

SEQ ID NO: 1651428 - RNA, 18 nt, Human
aaucuaaauggaaccacu

SEQ ID NO: 1651429 - RNA, 13 nt, Human
aauccuugaagau

SEQ ID NO: 1651430 - RNA, 12 nt, Human
aaucucaaauuu

SEQ ID NO: 1651431 - RNA, 15 nt, Human
aaucucaaauaacua

SEQ ID NO: 1651432 - RNA, 14 nt, Human
aaucucaaauuucu

SEQ ID NO: 1651433 - RNA, 15 nt, Human
aaucucaaauuucua

SEQ ID NO: 1651434 - RNA, 13 nt, Human
aaucugugaacuu

SEQ ID NO: 1651435 - RNA, 15 nt, Human
aaucugugaacuuga

SEQ ID NO: 1651436 - RNA, 17 nt, Human
aaucugugaacuugaaa

SEQ ID NO: 1651437 - RNA, 18 nt, Human
aaucugugaacuugaaau

SEQ ID NO: 1651438 - RNA, 19 nt, Human
aaucugugaacuugaaauu

SEQ ID NO: 1651439 - RNA, 16 nt, Human
aaucuuauaauuuaaa

SEQ ID NO: 1651440 - RNA, 14 nt, Human
aaucuuauaauuua

SEQ ID NO: 1651441 - RNA, 15 nt, Human
aaucaucaagucuuu

SEQ ID NO: 1651442 - RNA, 17 nt, Human
aaucauggugcucagag

SEQ ID NO: 1651443 - RNA, 19 nt, Human
aaucaugaauuaguuuuau

SEQ ID NO: 1651444 - RNA, 17 nt, Human
aaucaugaauuaguuuu

SEQ ID NO: 1651445 - RNA, 23 nt, Human
aaucaugaauuaguuuuauaugc

SEQ ID NO: 1651446 - RNA, 20 nt, Human
uaaguuuuuauggcuuuugu

SEQ ID NO: 1651447 - RNA, 18 nt, Human
uaaguuuuuuuuuaaaaa

SEQ ID NO: 1651448 - RNA, 14 nt, Human
aaucagacuaugaa

SEQ ID NO: 1651449 - RNA, 17 nt, Human
aaucagacuaugaaguu

SEQ ID NO: 1651450 - RNA, 12 nt, Human
aaucagcauucu

SEQ ID NO: 1651451 - RNA, 15 nt, Human
uaaguaucugacauc

SEQ ID NO: 1651452 - RNA, 16 nt, Human
uaaguaucugacaucu

SEQ ID NO: 1651453 - RNA, 14 nt, Human
uaaugaaagacugu

SEQ ID NO: 1651454 - RNA, 17 nt, Human
uaaugaaagacuguaca

SEQ ID NO: 1651455 - RNA, 18 nt, Human
uaaugaaagacuguacaa

SEQ ID NO: 1651456 - RNA, 19 nt, Human
uaaugaaagacuguacaaa

SEQ ID NO: 1651457 - RNA, 15 nt, Human
uaaugacuuaagcac

SEQ ID NO: 1651458 - RNA, 21 nt, Human
uaaugacuuaagcacacuuga

SEQ ID NO: 1651459 - RNA, 22 nt, Human
uaaugaaagacuguacaaagua

SEQ ID NO: 1651460 - RNA, 23 nt, Human
uaaugaaagacuguacaaaguag

SEQ ID NO: 1651461 - RNA, 13 nt, Human
aaucuucugaacu

SEQ ID NO: 1651462 - RNA, 20 nt, Human
aaucuucugaacuuggcgcu

SEQ ID NO: 1651463 - RNA, 19 nt, Human
uaauagguuuggacaaaau

SEQ ID NO: 1651464 - RNA, 14 nt, Human
uaauagguuuggac

SEQ ID NO: 1651465 - RNA, 21 nt, Human
uaaucaacugggcugaacacu

SEQ ID NO: 1651466 - RNA, 15 nt, Human
aaugaaaaccacauu

SEQ ID NO: 1651467 - RNA, 17 nt, Human
aaugacuuacuguacau

SEQ ID NO: 1651468 - RNA, 14 nt, Human
aaugacuuacugua

SEQ ID NO: 1651469 - RNA, 18 nt, Human
aaugacuuacuguacaug

SEQ ID NO: 1651470 - RNA, 15 nt, Human
aaugagccuggcaag

SEQ ID NO: 1651471 - RNA, 21 nt, Human
aaugagagacacacugaagaa

SEQ ID NO: 1651472 - RNA, 19 nt, Human
aaucuuuaaaaaaaaaauu

SEQ ID NO: 1651473 - RNA, 20 nt, Human
aaucuuuaaaaaaaaaauug

SEQ ID NO: 1651474 - RNA, 13 nt, Human
uaaugaggaaacu

SEQ ID NO: 1651475 - RNA, 16 nt, Human
uaaugauaacuggaaa

SEQ ID NO: 1651476 - RNA, 16 nt, Human
uacaguauaauuaaca

SEQ ID NO: 1651477 - RNA, 17 nt, Human
uacaguauaauuaacau

SEQ ID NO: 1651478 - RNA, 14 nt, Human
uacaguauaauuaa

SEQ ID NO: 1651479 - RNA, 17 nt, Human
uacaggcuccugccacc

SEQ ID NO: 1651480 - RNA, 14 nt, Human
uacaggcuccugcc

SEQ ID NO: 1651481 - RNA, 15 nt, Human
uacaggcuccugcca

SEQ ID NO: 1651482 - RNA, 22 nt, Human
uacaggcgugagccaccgugcc

SEQ ID NO: 1651483 - RNA, 18 nt, Human
uacagaggccaugggccu

SEQ ID NO: 1651484 - RNA, 14 nt, Human
uacaccauuaugug

SEQ ID NO: 1651485 - RNA, 19 nt, Human
uacacuaagagagaaugag

SEQ ID NO: 1651486 - RNA, 14 nt, Human
uacacuccagugag

SEQ ID NO: 1651487 - RNA, 18 nt, Human
uacaccacuacauucugu

SEQ ID NO: 1651488 - RNA, 17 nt, Human
uacaccacuacauucug

SEQ ID NO: 1651489 - RNA, 16 nt, Human
uacaccacuacauucu

SEQ ID NO: 1651490 - RNA, 15 nt, Human
uacaccacuacauuc

SEQ ID NO: 1651491 - RNA, 20 nt, Human
uacaccacuacauucuguua

SEQ ID NO: 1651492 - RNA, 19 nt, Human
uacaccacuacauucuguu

SEQ ID NO: 1651493 - RNA, 20 nt, Human
aauggacuguggugacuuug

SEQ ID NO: 1651494 - RNA, 21 nt, Human
aauggacguguuaugacucca

SEQ ID NO: 1651495 - RNA, 19 nt, Human
aauggacuuuuguacauag

SEQ ID NO: 1651496 - RNA, 14 nt, Human
aauguacugcauau

SEQ ID NO: 1651497 - RNA, 18 nt, Human
aauguacugcauaugaaa

SEQ ID NO: 1651498 - RNA, 12 nt, Human
aauguaugugua

SEQ ID NO: 1651499 - RNA, 14 nt, Human
aauguauguguaag

SEQ ID NO: 1651500 - RNA, 14 nt, Human
aauguggcuccugg

SEQ ID NO: 1651501 - RNA, 11 nt, Human
aaugugauaug

SEQ ID NO: 1651502 - RNA, 21 nt, Human
uacauaaugcgugcauaccac

SEQ ID NO: 1651503 - RNA, 20 nt, Human
uacauaaugcgugcauacca

SEQ ID NO: 1651504 - RNA, 19 nt, Human
uacauaaugcgugcauacc

SEQ ID NO: 1651505 - RNA, 18 nt, Human
uacaguauaauuaacaug

SEQ ID NO: 1651506 - RNA, 19 nt, Human
uacaguauaauuaacaugu

SEQ ID NO: 1651507 - RNA, 23 nt, Human
uacaguauaauuaacauguuaaa

SEQ ID NO: 1651508 - RNA, 17 nt, Human
uacauaaugcgugcaua

SEQ ID NO: 1651509 - RNA, 15 nt, Human
uacaguaucucaggg

SEQ ID NO: 1651510 - RNA, 19 nt, Human
uacauauaagugauugcug

SEQ ID NO: 1651511 - RNA, 22 nt, Human
uacauauaagugauugcugguu

SEQ ID NO: 1651512 - RNA, 12 nt, Human
aauguacugcau

SEQ ID NO: 1651513 - RNA, 13 nt, Human
uacaaaaacacag

SEQ ID NO: 1651514 - RNA, 14 nt, Human
uacaaaaacacagc

SEQ ID NO: 1651515 - RNA, 15 nt, Human
uacaaaagcauguga

SEQ ID NO: 1651516 - RNA, 20 nt, Human
uacaaaaagcauaaaaauua

SEQ ID NO: 1651517 - RNA, 15 nt, Human
uacaaaaacacagca

SEQ ID NO: 1651518 - RNA, 16 nt, Human
uacaaaaacacagcaa

SEQ ID NO: 1651519 - RNA, 14 nt, Human
uaauuccacagcug

SEQ ID NO: 1651520 - RNA, 17 nt, Human
uaauuccacagcugcuc

SEQ ID NO: 1651521 - RNA, 13 nt, Human
uaauuccacagcu

SEQ ID NO: 1651522 - RNA, 13 nt, Human
aaugcauaaaaug

SEQ ID NO: 1651523 - RNA, 14 nt, Human
uacaaggacagccc

SEQ ID NO: 1651524 - RNA, 16 nt, Human
aaugcauaaaauguua

SEQ ID NO: 1651525 - RNA, 14 nt, Human
aaugcccagccccu

SEQ ID NO: 1651526 - RNA, 15 nt, Human
aaugcccagccccuu

SEQ ID NO: 1651527 - RNA, 21 nt, Human
aaugccccugaauuuaaauag

SEQ ID NO: 1651528 - RNA, 13 nt, Human
aaugcugugcccu

SEQ ID NO: 1651529 - RNA, 21 nt, Human
aaugcugugcccuaaagugua

SEQ ID NO: 1651530 - RNA, 20 nt, Human
aaugcugugcccuaaagugu

SEQ ID NO: 1651531 - RNA, 20 nt, Human
aaugcccagccccuucugac

SEQ ID NO: 1651532 - RNA, 22 nt, Human
aaugcccagccccuucugaccc

SEQ ID NO: 1651533 - RNA, 23 nt, Human
aaugcccagccccuucugaccca

SEQ ID NO: 1651534 - RNA, 24 nt, Human
aaugcccagccccuucugacccau

SEQ ID NO: 1651535 - RNA, 16 nt, Human
aauggacguguuauga

SEQ ID NO: 1651536 - RNA, 15 nt, Human
gugcucaggagcccu

SEQ ID NO: 1651537 - RNA, 12 nt, Human
gugcuauguucu

SEQ ID NO: 1651538 - RNA, 22 nt, Human
gugcuaucucccccagccccau

SEQ ID NO: 1651539 - RNA, 21 nt, Human
gugcugggauuacaagcguga

SEQ ID NO: 1651540 - RNA, 22 nt, Human
gugcugggauuacaagcgugag

SEQ ID NO: 1651541 - RNA, 20 nt, Human
gugcugggauuacaggcgug

SEQ ID NO: 1651542 - RNA, 20 nt, Human
gugcugggauuacaggugug

SEQ ID NO: 1651543 - RNA, 23 nt, Human
guggacacagcucuucuccaggc

SEQ ID NO: 1651544 - RNA, 18 nt, Human
guggacacagcucuucuc

SEQ ID NO: 1651545 - RNA, 22 nt, Human
guggacacagcucuucuccagg

SEQ ID NO: 1651546 - RNA, 21 nt, Human
guggauggaaggggcugacag

SEQ ID NO: 1651547 - RNA, 21 nt, Human
guggaugccugguggcagcug

SEQ ID NO: 1651548 - RNA, 17 nt, Human
guggacauggcuguuca

SEQ ID NO: 1651549 - RNA, 19 nt, Human
guggauuuaacagaaaugu

SEQ ID NO: 1651550 - RNA, 18 nt, Human
guggauuuaacagaaaug

SEQ ID NO: 1651551 - RNA, 20 nt, Human
guggauuuaacagaaaugua

SEQ ID NO: 1651552 - RNA, 19 nt, Human
guggcaccagcagccugga

SEQ ID NO: 1651553 - RNA, 20 nt, Human
guggcagcucaccucucccu

SEQ ID NO: 1651554 - RNA, 14 nt, Human
guggcagcucaccu

SEQ ID NO: 1651555 - RNA, 16 nt, Human
guggcagcucaccucu

SEQ ID NO: 1651556 - RNA, 16 nt, Human
aagaaugauuaugaau

SEQ ID NO: 1651557 - RNA, 20 nt, Human
aagacaaaaagcuacuuauu

SEQ ID NO: 1651558 - RNA, 23 nt, Human
aagacaaaaagcuacuuauugua

SEQ ID NO: 1651559 - RNA, 19 nt, Human
aagaaugguccgugcuaag

SEQ ID NO: 1651560 - RNA, 22 nt, Human
aagaaugguccgugcuaaggac

SEQ ID NO: 1651561 - RNA, 16 nt, Human
aagaauugaagcagga

SEQ ID NO: 1651562 - RNA, 18 nt, Human
aagaaugauuaugaauua

SEQ ID NO: 1651563 - RNA, 12 nt, Human
aacuugggaacu

SEQ ID NO: 1651564 - RNA, 15 nt, Human
aacuuguauuaugug

SEQ ID NO: 1651565 - RNA, 16 nt, Human
aacuuguauuaugugu

SEQ ID NO: 1651566 - RNA, 22 nt, Human
aacuugucuuuggacccugagg

SEQ ID NO: 1651567 - RNA, 18 nt, Human
aacuugucuuuggacccu

SEQ ID NO: 1651568 - RNA, 13 nt, Human
aacuuuaccuuuu

SEQ ID NO: 1651569 - RNA, 13 nt, Human
gugccucugccug

SEQ ID NO: 1651570 - RNA, 12 nt, Human
gugccucuggga

SEQ ID NO: 1651571 - RNA, 13 nt, Human
gugccucugggac

SEQ ID NO: 1651572 - RNA, 15 nt, Human
gugccucugccuguc

SEQ ID NO: 1651573 - RNA, 14 nt, Human
gugccucugggacu

SEQ ID NO: 1651574 - RNA, 14 nt, Human
gugccuuauggaac

SEQ ID NO: 1651575 - RNA, 21 nt, Human
gugccuuauggaacacucuga

SEQ ID NO: 1651576 - RNA, 23 nt, Human
gugccuuauggaacacucugaga

SEQ ID NO: 1651577 - RNA, 15 nt, Human
gugccucaagagaag

SEQ ID NO: 1651578 - RNA, 21 nt, Human
gugaaccaccacacccagccc

SEQ ID NO: 1651579 - RNA, 18 nt, Human
gugcuaggaacacuccuu

SEQ ID NO: 1651580 - RNA, 22 nt, Human
gugcuaggaacacuccuucaca

SEQ ID NO: 1651581 - RNA, 21 nt, Human
gugcuaucucccccagcccca

SEQ ID NO: 1651582 - RNA, 18 nt, Human
gugcuaguaauuggaaag

SEQ ID NO: 1651583 - RNA, 16 nt, Human
aagaagugaaaaucua

SEQ ID NO: 1651584 - RNA, 22 nt, Human
aagaagugaaaaucuacacucc

SEQ ID NO: 1651585 - RNA, 18 nt, Human
aagaaaaaggaugcacag

SEQ ID NO: 1651586 - RNA, 17 nt, Human
aagaaaaaggaugcaca

SEQ ID NO: 1651587 - RNA, 15 nt, Human
aagaaaaaggaugca

SEQ ID NO: 1651588 - RNA, 13 nt, Human
aagaaauauaccu

SEQ ID NO: 1651589 - RNA, 20 nt, Human
aagaaagacuaucuaaaugu

SEQ ID NO: 1651590 - RNA, 22 nt, Human
aagaaagacuaucuaaauguug

SEQ ID NO: 1651591 - RNA, 13 nt, Human
aagaaagaaaauc

SEQ ID NO: 1651592 - RNA, 13 nt, Human
gugggagugggcc

SEQ ID NO: 1651593 - RNA, 14 nt, Human
gugggagugggccc

SEQ ID NO: 1651594 - RNA, 13 nt, Human
gugggauccucca

SEQ ID NO: 1651595 - RNA, 23 nt, Human
guggcgcagcauauucaggaagc

SEQ ID NO: 1651596 - RNA, 22 nt, Human
gugggacacccugugauggggc

SEQ ID NO: 1651597 - RNA, 21 nt, Human
gugggacagucaccucaugga

SEQ ID NO: 1651598 - RNA, 20 nt, Human
gugggggaucacagccucug

SEQ ID NO: 1651599 - RNA, 14 nt, Human
guggguacgggagg

SEQ ID NO: 1651600 - RNA, 14 nt, Human
guggugguuuucug

SEQ ID NO: 1651601 - RNA, 16 nt, Human
gugguuucagaaaugu

SEQ ID NO: 1651602 - RNA, 14 nt, Human
guggguagacacac

SEQ ID NO: 1651603 - RNA, 16 nt, Human
aagagcuuaacagugu

SEQ ID NO: 1651604 - RNA, 18 nt, Human
guggcccgacagccuggc

SEQ ID NO: 1651605 - RNA, 19 nt, Human
guggcccgacagccuggca

SEQ ID NO: 1651606 - RNA, 19 nt, Human
aagacugucuuaauuugca

SEQ ID NO: 1651607 - RNA, 22 nt, Human
aagacccuuguggucccacccc

SEQ ID NO: 1651608 - RNA, 18 nt, Human
aagacccuugugguccca

SEQ ID NO: 1651609 - RNA, 21 nt, Human
aagacccuuguggucccaccc

SEQ ID NO: 1651610 - RNA, 16 nt, Human
aagacuaucuaaaugu

SEQ ID NO: 1651611 - RNA, 17 nt, Human
aagacuaucuaaauguu

SEQ ID NO: 1651612 - RNA, 22 nt, Human
aagacugaguacguugugcauu

SEQ ID NO: 1651613 - RNA, 21 nt, Human
aagacugaguacguugugcau

SEQ ID NO: 1651614 - RNA, 17 nt, Human
aagacuguacaaaguag

SEQ ID NO: 1651615 - RNA, 17 nt, Human
aagacugaguacguugu

SEQ ID NO: 1651616 - RNA, 18 nt, Human
aagacuaucuaaauguug

SEQ ID NO: 1651617 - RNA, 13 nt, Human
aagacuauucaaa

SEQ ID NO: 1651618 - RNA, 14 nt, Human
aagagguuuuaaag

SEQ ID NO: 1651619 - RNA, 18 nt, Human
aagagguuuuaaagcuuc

SEQ ID NO: 1651620 - RNA, 18 nt, Human
aagagguuuuaaaaaaau

SEQ ID NO: 1651621 - RNA, 16 nt, Human
aagagguuuuucuuaa

SEQ ID NO: 1651622 - RNA, 17 nt, Human
gugguuuucuguucuuu

SEQ ID NO: 1651623 - RNA, 20 nt, Human
guggugguuuucuguucuuu

SEQ ID NO: 1651624 - RNA, 12 nt, Human
aagaugcagccg

SEQ ID NO: 1651625 - RNA, 12 nt, Human
aagcaaaggaga

SEQ ID NO: 1651626 - RNA, 13 nt, Human
aagcaaaggagau

SEQ ID NO: 1651627 - RNA, 22 nt, Human
aagcaaagacuuuccucuuagu

SEQ ID NO: 1651628 - RNA, 14 nt, Human
aagaugugacaugu

SEQ ID NO: 1651629 - RNA, 18 nt, Human
aagaugugacauguuuua

SEQ ID NO: 1651630 - RNA, 17 nt, Human
gugucuugcaauggcag

SEQ ID NO: 1651631 - RNA, 18 nt, Human
gugucuugcaauggcagc

SEQ ID NO: 1651632 - RNA, 17 nt, Human
gugugaaaaugugugug

SEQ ID NO: 1651633 - RNA, 18 nt, Human
gugucuuuuuucacuaca

SEQ ID NO: 1651634 - RNA, 17 nt, Human
gugugacuacuccccca

SEQ ID NO: 1651635 - RNA, 18 nt, Human
guguguaugcgugugugu

SEQ ID NO: 1651636 - RNA, 19 nt, Human
guguuguacucaauuuuaa

SEQ ID NO: 1651637 - RNA, 23 nt, Human
guguuuccuggcacugcuuccag

SEQ ID NO: 1651638 - RNA, 13 nt, Human
guuugccucugcc

SEQ ID NO: 1651639 - RNA, 16 nt, Human
guuugccucugccucu

SEQ ID NO: 1651640 - RNA, 20 nt, Human
guuucuguacuuuuuggcau

SEQ ID NO: 1651641 - RNA, 23 nt, Human
guuucuaaaggcuaccuuuguau

SEQ ID NO: 1651642 - RNA, 22 nt, Human
guuucuaaaggcuaccuuugua

SEQ ID NO: 1651643 - RNA, 22 nt, Human
guuugauucagacagcugccug

SEQ ID NO: 1651644 - RNA, 23 nt, Human
guuuuacaauaaaaucuugaaaa

SEQ ID NO: 1651645 - RNA, 20 nt, Human
guuugggccccagaggcugg

SEQ ID NO: 1651646 - RNA, 18 nt, Human
guuuggggaugagaaagg

SEQ ID NO: 1651647 - RNA, 15 nt, Human
guuuuacugcagcuu

SEQ ID NO: 1651648 - RNA, 20 nt, Human
guuuucuuaaccagaucauu

SEQ ID NO: 1651649 - RNA, 12 nt, Human
guuuucuguucu

SEQ ID NO: 1651650 - RNA, 11 nt, Human
guuuucuguuc

SEQ ID NO: 1651651 - RNA, 23 nt, Human
guuuucugagaaagacuauucaa

SEQ ID NO: 1651652 - RNA, 19 nt, Human
aagggccuggccugagcug

SEQ ID NO: 1651653 - RNA, 14 nt, Human
aagggccuggccug

SEQ ID NO: 1651654 - RNA, 17 nt, Human
aagggccuggccugagc

SEQ ID NO: 1651655 - RNA, 22 nt, Human
aaggggaauguuugccucugcc

SEQ ID NO: 1651656 - RNA, 23 nt, Human
aaggggaauguuugccucugccu

SEQ ID NO: 1651657 - RNA, 21 nt, Human
guuucaaacauauauaacaau

SEQ ID NO: 1651658 - RNA, 13 nt, Human
aaguaaaaacaaa

SEQ ID NO: 1651659 - RNA, 20 nt, Human
aaguaaaaacaaagaaauua

SEQ ID NO: 1651660 - RNA, 22 nt, Human
aaguaaaaacaaagaaauuaug

SEQ ID NO: 1651661 - RNA, 12 nt, Human
aaguaauaugca

SEQ ID NO: 1651662 - RNA, 19 nt, Human
guuucuaaaggcuaccuuu

SEQ ID NO: 1651663 - RNA, 16 nt, Human
aaguaauaugcacaca

SEQ ID NO: 1651664 - RNA, 15 nt, Human
aaguaauaugcacac

SEQ ID NO: 1651665 - RNA, 17 nt, Human
aaggguaucaggugcug

SEQ ID NO: 1651666 - RNA, 16 nt, Human
aaggguaucaggugcu

SEQ ID NO: 1651667 - RNA, 13 nt, Human
aagguacuucaaa

SEQ ID NO: 1651668 - RNA, 15 nt, Human
guugccuaaauccau

SEQ ID NO: 1651669 - RNA, 16 nt, Human
guugccuaaauccauu

SEQ ID NO: 1651670 - RNA, 14 nt, Human
guugccuaaaucca

SEQ ID NO: 1651671 - RNA, 21 nt, Human
guugcccaggcuggcgugcag

SEQ ID NO: 1651672 - RNA, 14 nt, Human
aaggcuccaggagc

SEQ ID NO: 1651673 - RNA, 17 nt, Human
guugcccaggcaggucu

SEQ ID NO: 1651674 - RNA, 18 nt, Human
guugcccaggcaggucuu

SEQ ID NO: 1651675 - RNA, 19 nt, Human
guugcccaggcaggucuug

SEQ ID NO: 1651676 - RNA, 18 nt, Human
aaggccaaaggaagcaca

SEQ ID NO: 1651677 - RNA, 19 nt, Human
aaggcuaccuuuguauucu

SEQ ID NO: 1651678 - RNA, 19 nt, Human
aaggaugccccgucccccu

SEQ ID NO: 1651679 - RNA, 19 nt, Human
aaggaugcuuguacauaau

SEQ ID NO: 1651680 - RNA, 17 nt, Human
aaggaugcuuguacaua

SEQ ID NO: 1651681 - RNA, 16 nt, Human
aaggaugcuuguacau

SEQ ID NO: 1651682 - RNA, 15 nt, Human
aaggaugcuuguaca

SEQ ID NO: 1651683 - RNA, 18 nt, Human
aaggaugcacagaguugu

SEQ ID NO: 1651684 - RNA, 22 nt, Human
aaggaugcacagaguuguuaca

SEQ ID NO: 1651685 - RNA, 20 nt, Human
aaggauccugagccagauuu

SEQ ID NO: 1651686 - RNA, 21 nt, Human
guugaugccugugaacugaac

SEQ ID NO: 1651687 - RNA, 23 nt, Human
guugaugaucuuugcagacaggc

SEQ ID NO: 1651688 - RNA, 14 nt, Human
aaggauccugagcc

SEQ ID NO: 1651689 - RNA, 15 nt, Human
aaggauccugagcca

SEQ ID NO: 1651690 - RNA, 17 nt, Human
aaggauccugagccaga

SEQ ID NO: 1651691 - RNA, 18 nt, Human
aaggaugaucuaggaaga

SEQ ID NO: 1651692 - RNA, 23 nt, Human
aaggaugaucuaggaagacuuug

SEQ ID NO: 1651693 - RNA, 20 nt, Human
guuuaagacauuuuuggaag

SEQ ID NO: 1651694 - RNA, 21 nt, Human
guuuaacaaaauguaugugag

SEQ ID NO: 1651695 - RNA, 10 nt, Human
guuuaaaauc

SEQ ID NO: 1651696 - RNA, 16 nt, Human
guuuaaaaucauuucu

SEQ ID NO: 1651697 - RNA, 17 nt, Human
guugccuaaauccauuu

SEQ ID NO: 1651698 - RNA, 13 nt, Human
guuggguggaugc

SEQ ID NO: 1651699 - RNA, 18 nt, Human
guuggucccccuuccaug

SEQ ID NO: 1651700 - RNA, 18 nt, Human
guuguaccgcaaugugac

SEQ ID NO: 1651701 - RNA, 17 nt, Human
aagcuaucguaaaauua

SEQ ID NO: 1651702 - RNA, 22 nt, Human
aagcuauucaguaauaacucua

SEQ ID NO: 1651703 - RNA, 21 nt, Human
aagcucuacugaggugcuaug

SEQ ID NO: 1651704 - RNA, 20 nt, Human
guucccuacuuccugugacu

SEQ ID NO: 1651705 - RNA, 16 nt, Human
guucccauuugcuccu

SEQ ID NO: 1651706 - RNA, 20 nt, Human
guucccauuugcuccuuucu

SEQ ID NO: 1651707 - RNA, 20 nt, Human
guuccauggccucuucagau

SEQ ID NO: 1651708 - RNA, 13 nt, Human
guugacaugggac

SEQ ID NO: 1651709 - RNA, 17 nt, Human
guucuuguauuaagaau

SEQ ID NO: 1651710 - RNA, 18 nt, Human
guucuuguauuaagaaug

SEQ ID NO: 1651711 - RNA, 21 nt, Human
guucuuguauuaagaaugaaa

SEQ ID NO: 1651712 - RNA, 17 nt, Human
guucuuaguuugcaguu

SEQ ID NO: 1651713 - RNA, 21 nt, Human
guucuugguuuguaaauuaac

SEQ ID NO: 1651714 - RNA, 22 nt, Human
guugaugaucuuugcagacagg

SEQ ID NO: 1651715 - RNA, 14 nt, Human
guugacaugggaca

SEQ ID NO: 1651716 - RNA, 18 nt, Human
guugacaugggacauuug

SEQ ID NO: 1651717 - RNA, 13 nt, Human
guucucuccuucu

SEQ ID NO: 1651718 - RNA, 15 nt, Human
guucuggugugaacu

SEQ ID NO: 1651719 - RNA, 18 nt, Human
guucuggugugaacuaaa

SEQ ID NO: 1651720 - RNA, 20 nt, Human
guucccuuugacgccauccc

SEQ ID NO: 1651721 - RNA, 21 nt, Human
guucccuuugacgccauccca

SEQ ID NO: 1651722 - RNA, 22 nt, Human
guucccuuugacgccaucccag

SEQ ID NO: 1651723 - RNA, 16 nt, Human
guucuacccaggugcu

SEQ ID NO: 1651724 - RNA, 12 nt, Human
guuagaucuagu

SEQ ID NO: 1651725 - RNA, 17 nt, Human
guuaguaugaggcauuu

SEQ ID NO: 1651726 - RNA, 20 nt, Human
guuaguaugaggcauuuguu

SEQ ID NO: 1651727 - RNA, 12 nt, Human
guuaagccuuug

SEQ ID NO: 1651728 - RNA, 13 nt, Human
guuaagccuuugg

SEQ ID NO: 1651729 - RNA, 16 nt, Human
guuaagccuuuggaaa

SEQ ID NO: 1651730 - RNA, 18 nt, Human
guguuuuaaaaugagaaa

SEQ ID NO: 1651731 - RNA, 18 nt, Human
guuaaugauagcuacugu

SEQ ID NO: 1651732 - RNA, 22 nt, Human
guuaaguugauggugaugaaau

SEQ ID NO: 1651733 - RNA, 15 nt, Human
guuaagucuguuuua

SEQ ID NO: 1651734 - RNA, 22 nt, Human
guuaagucuguuuuaugacuuc

SEQ ID NO: 1651735 - RNA, 13 nt, Human
guuaagucuguuu

SEQ ID NO: 1651736 - RNA, 18 nt, Human
guucagcuccagcucacc

SEQ ID NO: 1651737 - RNA, 16 nt, Human
guucagcuccagcuca

SEQ ID NO: 1651738 - RNA, 17 nt, Human
guucagcuccagcucac

SEQ ID NO: 1651739 - RNA, 20 nt, Human
guuauuuauaaucacuuuuu

SEQ ID NO: 1651740 - RNA, 14 nt, Human
guuauuuauaauca

SEQ ID NO: 1651741 - RNA, 17 nt, Human
guucaggguuggccccu

SEQ ID NO: 1651742 - RNA, 18 nt, Human
guucaggguuggccccug

SEQ ID NO: 1651743 - RNA, 19 nt, Human
guucaggguuggccccugc

SEQ ID NO: 1651744 - RNA, 17 nt, Human
aagcuaggccuggccag

SEQ ID NO: 1651745 - RNA, 18 nt, Human
aagcuaggccuggccaga

SEQ ID NO: 1651746 - RNA, 22 nt, Human
aagcuaggccuggccagaugca

SEQ ID NO: 1651747 - RNA, 21 nt, Human
aacagaaauguacagcaagga

SEQ ID NO: 1651748 - RNA, 11 nt, Human
aacagaaaugu

SEQ ID NO: 1651749 - RNA, 10 nt, Human
aacagaaaug

SEQ ID NO: 1651750 - RNA, 15 nt, Human
gucccaacuuguaaa

SEQ ID NO: 1651751 - RNA, 13 nt, Human
guccgagcuuuga

SEQ ID NO: 1651752 - RNA, 21 nt, Human
guccggucccugucccagugc

SEQ ID NO: 1651753 - RNA, 19 nt, Human
aacaguuguguuugaagca

SEQ ID NO: 1651754 - RNA, 19 nt, Human
aacagacuggaagcacagc

SEQ ID NO: 1651755 - RNA, 20 nt, Human
aacagacuggaagcacagcu

SEQ ID NO: 1651756 - RNA, 22 nt, Human
aacaggcugggcuucaguggca

SEQ ID NO: 1651757 - RNA, 13 nt, Human
aacaggcugggcu

SEQ ID NO: 1651758 - RNA, 23 nt, Human
aacaggcugggcuucaguggcag

SEQ ID NO: 1651759 - RNA, 22 nt, Human
aacaguagugauaguuguaccg

SEQ ID NO: 1651760 - RNA, 22 nt, Human
aacauuuguucuauagcuuuuc

SEQ ID NO: 1651761 - RNA, 14 nt, Human
aacauacucccauc

SEQ ID NO: 1651762 - RNA, 15 nt, Human
aacauacucccaucu

SEQ ID NO: 1651763 - RNA, 20 nt, Human
aacauuuguucuauagcuuu

SEQ ID NO: 1651764 - RNA, 18 nt, Human
aacauuugguaaggggaa

SEQ ID NO: 1651765 - RNA, 15 nt, Human
aacacuguucucugc

SEQ ID NO: 1651766 - RNA, 20 nt, Human
aacacuguucucugcccucc

SEQ ID NO: 1651767 - RNA, 14 nt, Human
aacacucugagacu

SEQ ID NO: 1651768 - RNA, 12 nt, Human
aacacucugaga

SEQ ID NO: 1651769 - RNA, 13 nt, Human
aacacucugagac

SEQ ID NO: 1651770 - RNA, 21 nt, Human
aacacucauugaccugaggcc

SEQ ID NO: 1651771 - RNA, 17 nt, Human
aacacuccaauuaagga

SEQ ID NO: 1651772 - RNA, 12 nt, Human
aacacuccuuca

SEQ ID NO: 1651773 - RNA, 11 nt, Human
aacacucugag

SEQ ID NO: 1651774 - RNA, 15 nt, Human
guccacaacacacag

SEQ ID NO: 1651775 - RNA, 21 nt, Human
guccaagcauuuagauguaua

SEQ ID NO: 1651776 - RNA, 11 nt, Human
aacacuuccau

SEQ ID NO: 1651777 - RNA, 21 nt, Human
gucauuugagcagggcucagc

SEQ ID NO: 1651778 - RNA, 21 nt, Human
aacacuguucucugcccucca

SEQ ID NO: 1651779 - RNA, 22 nt, Human
gucauuugagcagggcucagcg

SEQ ID NO: 1651780 - RNA, 24 nt, Human
guccaagcauaccaacacgagcag

SEQ ID NO: 1651781 - RNA, 23 nt, Human
aaauuuuuaaucuuuaauuuuac

SEQ ID NO: 1651782 - RNA, 21 nt, Human
gucacacaguauuacuucugc

SEQ ID NO: 1651783 - RNA, 16 nt, Human
gucacaggcaggucca

SEQ ID NO: 1651784 - RNA, 13 nt, Human
gucacaggcaggu

SEQ ID NO: 1651785 - RNA, 15 nt, Human
gucacaggcaggucc

SEQ ID NO: 1651786 - RNA, 20 nt, Human
aacaagaccacguuucuaaa

SEQ ID NO: 1651787 - RNA, 19 nt, Human
aacaagaccacguuucuaa

SEQ ID NO: 1651788 - RNA, 17 nt, Human
aacaagaccacguuucu

SEQ ID NO: 1651789 - RNA, 16 nt, Human
aacaagaccacguuuc

SEQ ID NO: 1651790 - RNA, 15 nt, Human
aacaaggcaaggcug

SEQ ID NO: 1651791 - RNA, 15 nt, Human
aacaaggaugaauua

SEQ ID NO: 1651792 - RNA, 21 nt, Human
aacaagccuccuuuuaaagua

SEQ ID NO: 1651793 - RNA, 23 nt, Human
aacaaggcaaggcugucaauuac

SEQ ID NO: 1651794 - RNA, 15 nt, Human
aacaagucagucauu

SEQ ID NO: 1651795 - RNA, 18 nt, Human
aacaagucagucauucag

SEQ ID NO: 1651796 - RNA, 22 nt, Human
aacguggcugcuucaaggaucc

SEQ ID NO: 1651797 - RNA, 16 nt, Human
aacguggcugcuucaa

SEQ ID NO: 1651798 - RNA, 19 nt, Human
aacguggcugcuucaagga

SEQ ID NO: 1651799 - RNA, 15 nt, Human
aaccugcucuccucu

SEQ ID NO: 1651800 - RNA, 11 nt, Human
aaccugcucuc

SEQ ID NO: 1651801 - RNA, 20 nt, Human
aaccugcucuccucuugcca

SEQ ID NO: 1651802 - RNA, 15 nt, Human
aacguggcugcuuca

SEQ ID NO: 1651803 - RNA, 13 nt, Human
aacuaaacuuuca

SEQ ID NO: 1651804 - RNA, 15 nt, Human
aacuaaacuuucaca

SEQ ID NO: 1651805 - RNA, 17 nt, Human
aacuaaacuuucacacc

SEQ ID NO: 1651806 - RNA, 14 nt, Human
aacuccagaaagug

SEQ ID NO: 1651807 - RNA, 13 nt, Human
aacucccugcccc

SEQ ID NO: 1651808 - RNA, 19 nt, Human
aacucccugccccccagcc

SEQ ID NO: 1651809 - RNA, 21 nt, Human
aacuccagaaagugacaagcu

SEQ ID NO: 1651810 - RNA, 15 nt, Human
gugaacacaucagcu

SEQ ID NO: 1651811 - RNA, 19 nt, Human
gugaaccaccacacccagc

SEQ ID NO: 1651812 - RNA, 18 nt, Human
aacucguuaauuuguagu

SEQ ID NO: 1651813 - RNA, 13 nt, Human
aacucccuuucaa

SEQ ID NO: 1651814 - RNA, 14 nt, Human
aacucccuuucaac

SEQ ID NO: 1651815 - RNA, 24 nt, Human
gucuuuucuugcaugaggcuagug

SEQ ID NO: 1651816 - RNA, 14 nt, Human
gucuuuucuugcau

SEQ ID NO: 1651817 - RNA, 19 nt, Human
gucuuuucuugcaugaggc

SEQ ID NO: 1651818 - RNA, 18 nt, Human
gucuuuggacccugaggc

SEQ ID NO: 1651819 - RNA, 17 nt, Human
gucuuuggacccugagg

SEQ ID NO: 1651820 - RNA, 14 nt, Human
gucuuuggacccug

SEQ ID NO: 1651821 - RNA, 15 nt, Human
gucuuuggacccuga

SEQ ID NO: 1651822 - RNA, 15 nt, Human
gucuuagauguauau

SEQ ID NO: 1651823 - RNA, 19 nt, Human
gucuuauauauuguagaua

SEQ ID NO: 1651824 - RNA, 15 nt, Human
gucuggcuucacaga

SEQ ID NO: 1651825 - RNA, 22 nt, Human
gucuuaauuaaaagaauauuuu

SEQ ID NO: 1651826 - RNA, 19 nt, Human
gucuuaauuaaaagaauau

SEQ ID NO: 1651827 - RNA, 21 nt, Human
gucuuaauuaaaagaauauuu

SEQ ID NO: 1651828 - RNA, 16 nt, Human
gucucccucccuuggg

SEQ ID NO: 1651829 - RNA, 15 nt, Human
aaccaugggauaaau

SEQ ID NO: 1651830 - RNA, 17 nt, Human
aaccaugggauaaaugc

SEQ ID NO: 1651831 - RNA, 18 nt, Human
aaccaugggauaaaugcc

SEQ ID NO: 1651832 - RNA, 20 nt, Human
aaccaugggauaaaugccau

SEQ ID NO: 1651833 - RNA, 23 nt, Human
aaccaucauugaaaucuuuuugc

SEQ ID NO: 1651834 - RNA, 21 nt, Human
aaccaucauugaaaucuuuuu

SEQ ID NO: 1651835 - RNA, 20 nt, Human
aaccacaucuugcucugcug

SEQ ID NO: 1651836 - RNA, 22 nt, Human
aaccacaucuugcucugcugac

SEQ ID NO: 1651837 - RNA, 19 nt, Human
aaccaucauugaaaucuuu

SEQ ID NO: 1651838 - RNA, 20 nt, Human
aaccaucauugaaaucuuuu

SEQ ID NO: 1651839 - RNA, 12 nt, Human
aaccacagcagu

SEQ ID NO: 1651840 - RNA, 17 nt, Human
aacccagcucuggucca

SEQ ID NO: 1651841 - RNA, 20 nt, Human
aacccauauuuguacaccaa

SEQ ID NO: 1651842 - RNA, 21 nt, Human
aaccaugggauaaaugccauc

SEQ ID NO: 1651843 - RNA, 13 nt, Human
aacccaaauguuc

SEQ ID NO: 1651844 - RNA, 13 nt, Human
aacccagcucugg

SEQ ID NO: 1651845 - RNA, 14 nt, Human
aacccagcucuggu

SEQ ID NO: 1651846 - RNA, 11 nt, Human
aacccagcucu

SEQ ID NO: 1651847 - RNA, 18 nt, Human
aacccaaauguucaucaa

SEQ ID NO: 1651848 - RNA, 17 nt, Human
aaccuccgccucuuggg

SEQ ID NO: 1651849 - RNA, 14 nt, Human
aaccuccugggcua

SEQ ID NO: 1651850 - RNA, 13 nt, Human
aacccccagccug

SEQ ID NO: 1651851 - RNA, 14 nt, Human
aacccccagccugc

SEQ ID NO: 1651852 - RNA, 15 nt, Human
aacccccagccugcu

SEQ ID NO: 1651853 - RNA, 20 nt, Human
aaccuagggugauauuaacc

SEQ ID NO: 1651854 - RNA, 15 nt, Human
aaauccauuuggaaa

SEQ ID NO: 1651855 - RNA, 16 nt, Human
aaauccauuuggaaau

SEQ ID NO: 1651856 - RNA, 14 nt, Human
aaauccauuuggaa

SEQ ID NO: 1651857 - RNA, 15 nt, Human
guaggaagacuuugg

SEQ ID NO: 1651858 - RNA, 18 nt, Human
guaggaagguuaauguuc

SEQ ID NO: 1651859 - RNA, 17 nt, Human
aaaggagagcuagcagc

SEQ ID NO: 1651860 - RNA, 14 nt, Human
aaaggaugcacaga

SEQ ID NO: 1651861 - RNA, 12 nt, Human
guagcugggacu

SEQ ID NO: 1651862 - RNA, 18 nt, Human
guagcugggacuacaggc

SEQ ID NO: 1651863 - RNA, 19 nt, Human
guagcugggacuacaggca

SEQ ID NO: 1651864 - RNA, 18 nt, Human
guagcugggauuacaggc

SEQ ID NO: 1651865 - RNA, 21 nt, Human
guagcugggacuacaggcacc

SEQ ID NO: 1651866 - RNA, 18 nt, Human
aaauccauuuggaaaucu

SEQ ID NO: 1651867 - RNA, 21 nt, Human
aaauccauuuggaaaucuuua

SEQ ID NO: 1651868 - RNA, 22 nt, Human
aaauccauuuggaaaucuuuaa

SEQ ID NO: 1651869 - RNA, 23 nt, Human
aaauccauuuggaaaucuuuaaa

SEQ ID NO: 1651870 - RNA, 13 nt, Human
aaaucccauuauu

SEQ ID NO: 1651871 - RNA, 15 nt, Human
aaaucccauuauuca

SEQ ID NO: 1651872 - RNA, 16 nt, Human
aaaucccauuauucaa

SEQ ID NO: 1651873 - RNA, 17 nt, Human
aaaucccauuauucaaa

SEQ ID NO: 1651874 - RNA, 19 nt, Human
aaaucccauuauucaaagu

SEQ ID NO: 1651875 - RNA, 20 nt, Human
aaaucccauuauucaaaguu

SEQ ID NO: 1651876 - RNA, 21 nt, Human
aaaucccauuauucaaaguug

SEQ ID NO: 1651877 - RNA, 22 nt, Human
aaaucccauuauucaaaguugc

SEQ ID NO: 1651878 - RNA, 15 nt, Human
aaaucccauuuaaaa

SEQ ID NO: 1651879 - RNA, 18 nt, Human
aaaucccuuaccucggug

SEQ ID NO: 1651880 - RNA, 13 nt, Human
aaaucgaugcagu

SEQ ID NO: 1651881 - RNA, 14 nt, Human
aaauccuugaagau

SEQ ID NO: 1651882 - RNA, 19 nt, Human
aaaucucaaauuucuaaau

SEQ ID NO: 1651883 - RNA, 17 nt, Human
aaaucucaaauuucuaa

SEQ ID NO: 1651884 - RNA, 16 nt, Human
aaaucucaaauuucua

SEQ ID NO: 1651885 - RNA, 15 nt, Human
aaaucucaaauuucu

SEQ ID NO: 1651886 - RNA, 11 nt, Human
aaaugaaaauu

SEQ ID NO: 1651887 - RNA, 17 nt, Human
aaaugaaaaucgugaca

SEQ ID NO: 1651888 - RNA, 19 nt, Human
aaaucuacacuccagugag

SEQ ID NO: 1651889 - RNA, 13 nt, Human
aaaucgcuuuuga

SEQ ID NO: 1651890 - RNA, 14 nt, Human
aaaucgcuuuugau

SEQ ID NO: 1651891 - RNA, 15 nt, Human
aaaucgcuuuugaua

SEQ ID NO: 1651892 - RNA, 13 nt, Human
aaaugagaaaucu

SEQ ID NO: 1651893 - RNA, 14 nt, Human
aaaugagaaaucua

SEQ ID NO: 1651894 - RNA, 16 nt, Human
aaaugagaaaucuaaa

SEQ ID NO: 1651895 - RNA, 13 nt, Human
aaaugagccuggc

SEQ ID NO: 1651896 - RNA, 19 nt, Human
aaaugagccuggcaagaau

SEQ ID NO: 1651897 - RNA, 16 nt, Human
aaaugagguacucucc

SEQ ID NO: 1651898 - RNA, 23 nt, Human
aaaugagguacucuccuggaaau

SEQ ID NO: 1651899 - RNA, 17 nt, Human
aaaugaggucagagccu

SEQ ID NO: 1651900 - RNA, 19 nt, Human
aaaugaggucagagccugc

SEQ ID NO: 1651901 - RNA, 11 nt, Human
aaaugagaaau

SEQ ID NO: 1651902 - RNA, 21 nt, Human
aaaugaaagcagggacuugaa

SEQ ID NO: 1651903 - RNA, 22 nt, Human
aaaugaaagcagggacuugaac

SEQ ID NO: 1651904 - RNA, 13 nt, Human
aaaugcauguugc

SEQ ID NO: 1651905 - RNA, 22 nt, Human
aaaugcaccuggaauauauaac

SEQ ID NO: 1651906 - RNA, 18 nt, Human
aaaugcaccuggaauaua

SEQ ID NO: 1651907 - RNA, 14 nt, Human
aaaugcaaugugaa

SEQ ID NO: 1651908 - RNA, 14 nt, Human
aaaugcaccuggaa

SEQ ID NO: 1651909 - RNA, 15 nt, Human
aaaugggcagagcag

SEQ ID NO: 1651910 - RNA, 18 nt, Human
aaaugggcagagcagaga

SEQ ID NO: 1651911 - RNA, 20 nt, Human
aaaugggcagagcagagacc

SEQ ID NO: 1651912 - RNA, 23 nt, Human
aaaugccuuacccucauguucuu

SEQ ID NO: 1651913 - RNA, 19 nt, Human
aaauggcuuccuggcaaua

SEQ ID NO: 1651914 - RNA, 14 nt, Human
aaaugcccagcccc

SEQ ID NO: 1651915 - RNA, 15 nt, Human
aaaugcccagccccu

SEQ ID NO: 1651916 - RNA, 18 nt, Human
aaaugcccagccccuucu

SEQ ID NO: 1651917 - RNA, 13 nt, Human
aaaugcccagcuu

SEQ ID NO: 1651918 - RNA, 13 nt, Human
aaaugcccagccc

SEQ ID NO: 1651919 - RNA, 14 nt, Human
aaaugcauuucuaa

SEQ ID NO: 1651920 - RNA, 16 nt, Human
guaugggacuggccuc

SEQ ID NO: 1651921 - RNA, 15 nt, Human
guaugggagagaaga

SEQ ID NO: 1651922 - RNA, 13 nt, Human
guaugguggcugg

SEQ ID NO: 1651923 - RNA, 13 nt, Human
guaugugugaagu

SEQ ID NO: 1651924 - RNA, 15 nt, Human
guauguggcaaaaug

SEQ ID NO: 1651925 - RNA, 17 nt, Human
guaugugugaagugagu

SEQ ID NO: 1651926 - RNA, 21 nt, Human
guaugugugaagugagugagu

SEQ ID NO: 1651927 - RNA, 15 nt, Human
guauucuuauuuaau

SEQ ID NO: 1651928 - RNA, 15 nt, Human
guaucccuacuguaa

SEQ ID NO: 1651929 - RNA, 14 nt, Human
guaugggagagaag

SEQ ID NO: 1651930 - RNA, 14 nt, Human
guaugauucccagc

SEQ ID NO: 1651931 - RNA, 18 nt, Human
guauaaaagccuguuuaa

SEQ ID NO: 1651932 - RNA, 21 nt, Human
guauaaaagccuguuuaagag

SEQ ID NO: 1651933 - RNA, 18 nt, Human
guauaaaagggacugaga

SEQ ID NO: 1651934 - RNA, 22 nt, Human
guauauugauccagaaagaaaa

SEQ ID NO: 1651935 - RNA, 17 nt, Human
guauaaaagccuguuua

SEQ ID NO: 1651936 - RNA, 16 nt, Human
aaaugggggugcauuu

SEQ ID NO: 1651937 - RNA, 15 nt, Human
aaaugggggugcauu

SEQ ID NO: 1651938 - RNA, 18 nt, Human
aaaugggggugcauuuga

SEQ ID NO: 1651939 - RNA, 17 nt, Human
aaaugggggugcauuug

SEQ ID NO: 1651940 - RNA, 19 nt, Human
aaaugggggugcauuugag

SEQ ID NO: 1651941 - RNA, 22 nt, Human
aaauguaagggaaacugccagc

SEQ ID NO: 1651942 - RNA, 19 nt, Human
gucaaaguggugagaggca

SEQ ID NO: 1651943 - RNA, 18 nt, Human
gucaaaguggugagaggc

SEQ ID NO: 1651944 - RNA, 21 nt, Human
guauuuuuuuacuaauagaca

SEQ ID NO: 1651945 - RNA, 17 nt, Human
guauuuuuuuacuaaua

SEQ ID NO: 1651946 - RNA, 19 nt, Human
gucaacucauauuuucaug

SEQ ID NO: 1651947 - RNA, 16 nt, Human
gucacacacuuuggcu

SEQ ID NO: 1651948 - RNA, 20 nt, Human
gucacacaguauuacuucug

SEQ ID NO: 1651949 - RNA, 16 nt, Human
gucaaauugugugaaa

SEQ ID NO: 1651950 - RNA, 20 nt, Human
aaauuuaguauuuuguuuca

SEQ ID NO: 1651951 - RNA, 18 nt, Human
aaauuucagcagcugcag

SEQ ID NO: 1651952 - RNA, 17 nt, Human
aaauuucagcagcugca

SEQ ID NO: 1651953 - RNA, 15 nt, Human
guauuuuuuuacuaa

SEQ ID NO: 1651954 - RNA, 14 nt, Human
guauuuuuuuacua

SEQ ID NO: 1651955 - RNA, 22 nt, Human
aaauuuccugggagcuuuugua

SEQ ID NO: 1651956 - RNA, 12 nt, Human
aaauuucuaaau

SEQ ID NO: 1651957 - RNA, 16 nt, Human
guauuuaauucauguu

SEQ ID NO: 1651958 - RNA, 20 nt, Human
guauuuaauagguuuggaca

SEQ ID NO: 1651959 - RNA, 22 nt, Human
guauuggcuagagguucaaaga

SEQ ID NO: 1651960 - RNA, 20 nt, Human
aaauguuaaguugaugguga

SEQ ID NO: 1651961 - RNA, 21 nt, Human
aaauuaacuuuuauaaacuuu

SEQ ID NO: 1651962 - RNA, 23 nt, Human
aaauuaacuuuuauaaacuuuac

SEQ ID NO: 1651963 - RNA, 22 nt, Human
aaauuaacuuuuauaaacuuua

SEQ ID NO: 1651964 - RNA, 14 nt, Human
aaauucaugcugcu

SEQ ID NO: 1651965 - RNA, 18 nt, Human
aaauucccuggccuuuca

SEQ ID NO: 1651966 - RNA, 15 nt, Human
aaauucccuggccuu

SEQ ID NO: 1651967 - RNA, 14 nt, Human
aaaaguuuaauauu

SEQ ID NO: 1651968 - RNA, 16 nt, Human
aaaaguuuaauauuaa

SEQ ID NO: 1651969 - RNA, 18 nt, Human
aaaaguugaauuuuacau

SEQ ID NO: 1651970 - RNA, 20 nt, Human
aaaaguuuaauauuaaagcc

SEQ ID NO: 1651971 - RNA, 18 nt, Human
aaaaguuuaauauuaaag

SEQ ID NO: 1651972 - RNA, 14 nt, Human
aaaauaaaacuuuu

SEQ ID NO: 1651973 - RNA, 16 nt, Human
aaaauaaaacuuuuua

SEQ ID NO: 1651974 - RNA, 13 nt, Human
aaaaucagccugc

SEQ ID NO: 1651975 - RNA, 17 nt, Human
aaaaucagccugcucca

SEQ ID NO: 1651976 - RNA, 21 nt, Human
aaaaucagccugcuccagcug

SEQ ID NO: 1651977 - RNA, 10 nt, Human
aaaaucauuu

SEQ ID NO: 1651978 - RNA, 11 nt, Human
aaaaucauuuc

SEQ ID NO: 1651979 - RNA, 12 nt, Human
aaaaucauuucu

SEQ ID NO: 1651980 - RNA, 11 nt, Human
aaaagaaaaag

SEQ ID NO: 1651981 - RNA, 19 nt, Human
aaaacacuguucucugccc

SEQ ID NO: 1651982 - RNA, 17 nt, Human
aaaacacauuuuucuua

SEQ ID NO: 1651983 - RNA, 16 nt, Human
aaaagaaaagucaagg

SEQ ID NO: 1651984 - RNA, 17 nt, Human
aaaagaaagaaaaucag

SEQ ID NO: 1651985 - RNA, 12 nt, Human
aaaagaauauuu

SEQ ID NO: 1651986 - RNA, 20 nt, Human
aaaagacaaggaaaaaauaa

SEQ ID NO: 1651987 - RNA, 13 nt, Human
aaaagaauauuuu

SEQ ID NO: 1651988 - RNA, 11 nt, Human
aaaagaaugau

SEQ ID NO: 1651989 - RNA, 13 nt, Human
aaaagacuccaaa

SEQ ID NO: 1651990 - RNA, 17 nt, Human
aaaagagguuuuucuua

SEQ ID NO: 1651991 - RNA, 21 nt, Human
aaaagagguuuuucuuaaaua

SEQ ID NO: 1651992 - RNA, 22 nt, Human
aaaagagguuuuucuuaaauaa

SEQ ID NO: 1651993 - RNA, 14 nt, Human
aaaagacugucuua

SEQ ID NO: 1651994 - RNA, 14 nt, Human
aaaccaguauugua

SEQ ID NO: 1651995 - RNA, 16 nt, Human
aaaccaguauuguaca

SEQ ID NO: 1651996 - RNA, 17 nt, Human
aaaccaguauuguacaa

SEQ ID NO: 1651997 - RNA, 18 nt, Human
aaaccaguauuguacaaa

SEQ ID NO: 1651998 - RNA, 22 nt, Human
aaaccaguauuguacaaaguau

SEQ ID NO: 1651999 - RNA, 22 nt, Human
aaaccgaacugauguaaguaaa

SEQ ID NO: 1652000 - RNA, 18 nt, Human
aaacccagcucuggucca

SEQ ID NO: 1652001 - RNA, 12 nt, Human
aaacccagcucu

SEQ ID NO: 1652002 - RNA, 16 nt, Human
aaacccagcucugguc

SEQ ID NO: 1652003 - RNA, 15 nt, Human
aaaccgccaaggcug

SEQ ID NO: 1652004 - RNA, 16 nt, Human
aaaccgccaaggcugg

SEQ ID NO: 1652005 - RNA, 12 nt, Human
aaacucuuaaaa

SEQ ID NO: 1652006 - RNA, 23 nt, Human
aaacucuuaaaacccaagugccu

SEQ ID NO: 1652007 - RNA, 23 nt, Human
aaacugauuuuuuuuuccuucag

SEQ ID NO: 1652008 - RNA, 15 nt, Human
aaacugcacugucaa

SEQ ID NO: 1652009 - RNA, 18 nt, Human
aaaaucucaaauuucuaa

SEQ ID NO: 1652010 - RNA, 16 nt, Human
aaaaucucaaauuucu

SEQ ID NO: 1652011 - RNA, 15 nt, Human
aaaaucucaaauuuc

SEQ ID NO: 1652012 - RNA, 21 nt, Human
aaaaucauuucugcaucagcu

SEQ ID NO: 1652013 - RNA, 15 nt, Human
aaagcauuguaaaug

SEQ ID NO: 1652014 - RNA, 17 nt, Human
aaagcauuguaaaugug

SEQ ID NO: 1652015 - RNA, 17 nt, Human
aaagccauguuuauuac

SEQ ID NO: 1652016 - RNA, 18 nt, Human
aaagccauguuuauuaca

SEQ ID NO: 1652017 - RNA, 23 nt, Human
aaagccauguuuauuacaguaua

SEQ ID NO: 1652018 - RNA, 14 nt, Human
aaagccauguuuau

SEQ ID NO: 1652019 - RNA, 16 nt, Human
aaagccauguuuauua

SEQ ID NO: 1652020 - RNA, 15 nt, Human
aaagaucauguaaaa

SEQ ID NO: 1652021 - RNA, 22 nt, Human
aacauggccuuugcuugaaaga

SEQ ID NO: 1652022 - RNA, 12 nt, Human
aacagccugugu

SEQ ID NO: 1652023 - RNA, 15 nt, Human
aacagccugugucuu

SEQ ID NO: 1652024 - RNA, 11 nt, Human
aacaggcagau

SEQ ID NO: 1652025 - RNA, 18 nt, Human
aaauucuugcaaaguauc

SEQ ID NO: 1652026 - RNA, 15 nt, Human
aaauucuugcaaagu

SEQ ID NO: 1652027 - RNA, 23 nt, Human
aaauucuucuccacuuucuagcc

SEQ ID NO: 1652028 - RNA, 18 nt, Human
aaccuuuguuugcaucug

SEQ ID NO: 1652029 - RNA, 16 nt, Human
aaccuuuugagugccu

SEQ ID NO: 1652030 - RNA, 23 nt, Human
aaccuuuugagugccuuacacaa

SEQ ID NO: 1652031 - RNA, 19 nt, Human
aacccucagagccaccccu

SEQ ID NO: 1652032 - RNA, 12 nt, Human
aacccucagagc

SEQ ID NO: 1652033 - RNA, 23 nt, Human
aacauggccuuugcuugaaagaa

SEQ ID NO: 1652034 - RNA, 22 nt, Human
aaauguugacaugggacauuug

SEQ ID NO: 1652035 - RNA, 17 nt, Human
aaauguucaucaaugaa

SEQ ID NO: 1652036 - RNA, 13 nt, Human
aaauguucaucaa

SEQ ID NO: 1652037 - RNA, 23 nt, Human
aaauguugacaugggacauuugc

SEQ ID NO: 1652038 - RNA, 20 nt, Human
aaaggaugcccaaagaugca

SEQ ID NO: 1652039 - RNA, 21 nt, Human
aaauauuuauuuuaauaaugu

SEQ ID NO: 1652040 - RNA, 21 nt, Human
aaauggacuguggugacuuug

SEQ ID NO: 1652041 - RNA, 20 nt, Human
aaauggacuguggugacuuu

SEQ ID NO: 1652042 - RNA, 23 nt, Human
aaauggacuguggugacuuugga

SEQ ID NO: 1652043 - RNA, 10 nt, Human
aaaugcugcu

SEQ ID NO: 1652044 - RNA, 23 nt, Human
aaaugcugcuuuuucucaaaaug

SEQ ID NO: 1652045 - RNA, 14 nt, Human
aaaugaaaaaauau

SEQ ID NO: 1652046 - RNA, 19 nt, Human
aaaugcuguaacuuucuga

SEQ ID NO: 1652047 - RNA, 19 nt, Human
aaaucuccaaaauaaaacu

SEQ ID NO: 1652048 - RNA, 13 nt, Human
aaaucuuuuugcu

SEQ ID NO: 1652049 - RNA, 14 nt, Human
aaaucuuuuugcuu

SEQ ID NO: 1652050 - RNA, 18 nt, Human
aaaucucaauauuucaga

SEQ ID NO: 1652051 - RNA, 10 nt, Human
aagccuuugu

SEQ ID NO: 1652052 - RNA, 13 nt, Human
aagcuacuuauug

SEQ ID NO: 1652053 - RNA, 16 nt, Human
aagcgugagccacugc

SEQ ID NO: 1652054 - RNA, 15 nt, Human
aagcgugagccacug

SEQ ID NO: 1652055 - RNA, 14 nt, Human
aagcggcuggcagc

SEQ ID NO: 1652056 - RNA, 18 nt, Human
aagccauaauuguucuua

SEQ ID NO: 1652057 - RNA, 19 nt, Human
aagauaauauuaaggaaga

SEQ ID NO: 1652058 - RNA, 21 nt, Human
aagauaauauuaaggaagaca

SEQ ID NO: 1652059 - RNA, 23 nt, Human
aagauacaguuacucagaauucu

SEQ ID NO: 1652060 - RNA, 17 nt, Human
aagauacaguuacucag

SEQ ID NO: 1652061 - RNA, 19 nt, Human
aaggcagggagggccuggg

SEQ ID NO: 1652062 - RNA, 22 nt, Human
aaggcagggagggccugggccc

SEQ ID NO: 1652063 - RNA, 16 nt, Human
aaggcaaggcugucaa

SEQ ID NO: 1652064 - RNA, 15 nt, Human
aaggcaaggcuguca

SEQ ID NO: 1652065 - RNA, 23 nt, Human
aaggacuuguuagaucuaguuca

SEQ ID NO: 1652066 - RNA, 13 nt, Human
aaggcaaggcugu

SEQ ID NO: 1652067 - RNA, 22 nt, Human
aagcuagacgagcaggcuucuu

SEQ ID NO: 1652068 - RNA, 15 nt, Human
aaggacuuguuagau

SEQ ID NO: 1652069 - RNA, 21 nt, Human
aaggacuuguuagaucuaguu

SEQ ID NO: 1652070 - RNA, 23 nt, Human
aaggacuucuuuaauuuuggaau

SEQ ID NO: 1652071 - RNA, 13 nt, Human
aagcugcacccuc

SEQ ID NO: 1652072 - RNA, 19 nt, Human
aagcugcacccucaggcag

SEQ ID NO: 1652073 - RNA, 12 nt, Human
aagaguguggca

SEQ ID NO: 1652074 - RNA, 14 nt, Human
aagaacuagcauaa

SEQ ID NO: 1652075 - RNA, 12 nt, Human
aacgcagcccug

SEQ ID NO: 1652076 - RNA, 16 nt, Human
aacgcagcccugcuuu

SEQ ID NO: 1652077 - RNA, 20 nt, Human
aacgcaggcccccaggugcc

SEQ ID NO: 1652078 - RNA, 11 nt, Human
aagaacugaaa

SEQ ID NO: 1652079 - RNA, 12 nt, Human
aagaacugaaau

SEQ ID NO: 1652080 - RNA, 13 nt, Human
aagaacugaaauc

SEQ ID NO: 1652081 - RNA, 15 nt, Human
aagaacugaaaucau

SEQ ID NO: 1652082 - RNA, 22 nt, Human
aagacaaugacuuacuguacau

SEQ ID NO: 1652083 - RNA, 19 nt, Human
aagacaaugugaaaagaaa

SEQ ID NO: 1652084 - RNA, 20 nt, Human
aagacaaugugaaaagaaaa

SEQ ID NO: 1652085 - RNA, 21 nt, Human
aagacaaggaaaaaauaacaa

SEQ ID NO: 1652086 - RNA, 20 nt, Human
aagaagacugcauuauauuu

SEQ ID NO: 1652087 - RNA, 15 nt, Human
aagaagacugcauua

SEQ ID NO: 1652088 - RNA, 23 nt, Human
aagacagauacuccuccaagguu

SEQ ID NO: 1652089 - RNA, 17 nt, Human
aagaccacguuucuaaa

SEQ ID NO: 1652090 - RNA, 15 nt, Human
aagaccacguuucua

SEQ ID NO: 1652091 - RNA, 21 nt, Human
aagacuuuuccaacccucauc

SEQ ID NO: 1652092 - RNA, 12 nt, Human
aagacuuuucuu

SEQ ID NO: 1652093 - RNA, 19 nt, Human
aagacuuuucuuucagcca

SEQ ID NO: 1652094 - RNA, 13 nt, Human
aagagaaaaaaua

SEQ ID NO: 1652095 - RNA, 19 nt, Human
aauaaacacucuugaaaaa

SEQ ID NO: 1652096 - RNA, 17 nt, Human
aaguuuaauauuaaagc

SEQ ID NO: 1652097 - RNA, 18 nt, Human
aaguuuaauauuaaagcc

SEQ ID NO: 1652098 - RNA, 15 nt, Human
aaguuuaauauuaaa

SEQ ID NO: 1652099 - RNA, 11 nt, Human
aauaaacacuc

SEQ ID NO: 1652100 - RNA, 16 nt, Human
aauaaacacucuugaa

SEQ ID NO: 1652101 - RNA, 23 nt, Human
aaguugaauuuauuggcuuuucu

SEQ ID NO: 1652102 - RNA, 24 nt, Human
aaguugaauuuauuggcuuuucug

SEQ ID NO: 1652103 - RNA, 22 nt, Human
aaguuguaggcauaaagucagg

SEQ ID NO: 1652104 - RNA, 21 nt, Human
aaguuguuugagaaauuaagu

SEQ ID NO: 1652105 - RNA, 22 nt, Human
aaguuguuugagaaauuaagua

SEQ ID NO: 1652106 - RNA, 22 nt, Human
aagugcugcauuuaaaagauac

SEQ ID NO: 1652107 - RNA, 14 nt, Human
aaguugaauuuauu

SEQ ID NO: 1652108 - RNA, 15 nt, Human
aaguugaauuuauug

SEQ ID NO: 1652109 - RNA, 17 nt, Human
aaguugaauuuauuggc

SEQ ID NO: 1652110 - RNA, 22 nt, Human
aagugcugggauuacaggugug

SEQ ID NO: 1652111 - RNA, 12 nt, Human
aagugcugggau

SEQ ID NO: 1652112 - RNA, 22 nt, Human
aauaaugugaaacuggauuaaa

SEQ ID NO: 1652113 - RNA, 17 nt, Human
aauaaugugaaacugga

SEQ ID NO: 1652114 - RNA, 14 nt, Human
aauaaagcagcguu

SEQ ID NO: 1652115 - RNA, 20 nt, Human
aauaaagaucauguaaaagu

SEQ ID NO: 1652116 - RNA, 14 nt, Human
aauaaagaucaugu

SEQ ID NO: 1652117 - RNA, 19 nt, Human
aauaaagaucauguaaaag

SEQ ID NO: 1652118 - RNA, 19 nt, Human
aauaauguuaacauggaca

SEQ ID NO: 1652119 - RNA, 16 nt, Human
aauauauaucaaauau

SEQ ID NO: 1652120 - RNA, 23 nt, Human
aauauguggaguucaucuugaau

SEQ ID NO: 1652121 - RNA, 13 nt, Human
aauauuaagaaag

SEQ ID NO: 1652122 - RNA, 23 nt, Human
aaucaccgaaaacguggcugcuu

SEQ ID NO: 1652123 - RNA, 22 nt, Human
aaucaaugcuauaacuauguug

SEQ ID NO: 1652124 - RNA, 21 nt, Human
aaucaccgaaaacguggcugc

SEQ ID NO: 1652125 - RNA, 14 nt, Human
aaugaagcaaugcu

SEQ ID NO: 1652126 - RNA, 20 nt, Human
aaugaagauacugaaauaaa

SEQ ID NO: 1652127 - RNA, 21 nt, Human
aaugaaagacuguacaaagua

SEQ ID NO: 1652128 - RNA, 18 nt, Human
aaugaaagacuguacaaa

SEQ ID NO: 1652129 - RNA, 20 nt, Human
aaugaaagacuguacaaagu

SEQ ID NO: 1652130 - RNA, 20 nt, Human
aaugauguauguugaagccu

SEQ ID NO: 1652131 - RNA, 20 nt, Human
aaugaugccaugaggaacaa

SEQ ID NO: 1652132 - RNA, 20 nt, Human
aaugaauacuuuauaaagga

SEQ ID NO: 1652133 - RNA, 16 nt, Human
aaucucaauauuucag

SEQ ID NO: 1652134 - RNA, 23 nt, Human
acagugaucaaguuauuuuuaau

SEQ ID NO: 1652135 - RNA, 18 nt, Human
acaggcaaugcuggcugu

SEQ ID NO: 1652136 - RNA, 23 nt, Human
acaggcacccaccaucaugucug

SEQ ID NO: 1652137 - RNA, 15 nt, Human
acagugcaucucagc

SEQ ID NO: 1652138 - RNA, 17 nt, Human
acagugcaucucagccc

SEQ ID NO: 1652139 - RNA, 18 nt, Human
acagugcaucucagccca

SEQ ID NO: 1652140 - RNA, 19 nt, Human
acagugauuaccagggacu

SEQ ID NO: 1652141 - RNA, 20 nt, Human
acagugauuaccagggacug

SEQ ID NO: 1652142 - RNA, 19 nt, Human
acagcucuucuccaggcug

SEQ ID NO: 1652143 - RNA, 20 nt, Human
acagcucuucuccaggcugu

SEQ ID NO: 1652144 - RNA, 15 nt, Human
acaggcaaugcuggc

SEQ ID NO: 1652145 - RNA, 16 nt, Human
acaggcaaugcuggcu

SEQ ID NO: 1652146 - RNA, 14 nt, Human
acaggcacccacca

SEQ ID NO: 1652147 - RNA, 17 nt, Human
acaggcaaugcuggcug

SEQ ID NO: 1652148 - RNA, 14 nt, Human
acaggauuauugga

SEQ ID NO: 1652149 - RNA, 24 nt, Human
acaggaugguucccuugaugaaga

SEQ ID NO: 1652150 - RNA, 22 nt, Human
acaggaugguucccuugaugaa

SEQ ID NO: 1652151 - RNA, 19 nt, Human
accagagcugccaccugcc

SEQ ID NO: 1652152 - RNA, 13 nt, Human
accagagcugcca

SEQ ID NO: 1652153 - RNA, 14 nt, Human
accagagcugccac

SEQ ID NO: 1652154 - RNA, 16 nt, Human
accagagcugccaccu

SEQ ID NO: 1652155 - RNA, 15 nt, Human
accaagccguggcuu

SEQ ID NO: 1652156 - RNA, 16 nt, Human
accaagccguggcuuc

SEQ ID NO: 1652157 - RNA, 17 nt, Human
accaagccguggcuucc

SEQ ID NO: 1652158 - RNA, 18 nt, Human
accaagccguggcuuccc

SEQ ID NO: 1652159 - RNA, 14 nt, Human
accaagccguggcu

SEQ ID NO: 1652160 - RNA, 21 nt, Human
accaacgucugugccauuuug

SEQ ID NO: 1652161 - RNA, 18 nt, Human
accacgcuggaccuugaa

SEQ ID NO: 1652162 - RNA, 14 nt, Human
accacgcuggaccu

SEQ ID NO: 1652163 - RNA, 16 nt, Human
accacgcuggaccuug

SEQ ID NO: 1652164 - RNA, 14 nt, Human
accacguuucuaaa

SEQ ID NO: 1652165 - RNA, 13 nt, Human
accacguuucuaa

SEQ ID NO: 1652166 - RNA, 15 nt, Human
acauuugcucaugga

SEQ ID NO: 1652167 - RNA, 16 nt, Human
acauuugcucauggaa

SEQ ID NO: 1652168 - RNA, 16 nt, Human
acauuuguauaaaaua

SEQ ID NO: 1652169 - RNA, 19 nt, Human
acauuuguauaaaauaauu

SEQ ID NO: 1652170 - RNA, 14 nt, Human
accaacgucugugc

SEQ ID NO: 1652171 - RNA, 17 nt, Human
accaacgucugugccau

SEQ ID NO: 1652172 - RNA, 21 nt, Human
acauuuguauaaaauaauuuu

SEQ ID NO: 1652173 - RNA, 16 nt, Human
acauguuaaaccaugg

SEQ ID NO: 1652174 - RNA, 21 nt, Human
acauguuaaaccaugggauaa

SEQ ID NO: 1652175 - RNA, 23 nt, Human
acauguuaaaccaugggauaaau

SEQ ID NO: 1652176 - RNA, 14 nt, Human
acauguuaaaccau

SEQ ID NO: 1652177 - RNA, 17 nt, Human
acauguguuggcagccu

SEQ ID NO: 1652178 - RNA, 19 nt, Human
acauguuuuucuucucccu

SEQ ID NO: 1652179 - RNA, 13 nt, Human
acaugcacgugug

SEQ ID NO: 1652180 - RNA, 16 nt, Human
acauacaauuccaaac

SEQ ID NO: 1652181 - RNA, 21 nt, Human
acauaaugcgugcauaccacu

SEQ ID NO: 1652182 - RNA, 20 nt, Human
acauacaggaagguagaaau

SEQ ID NO: 1652183 - RNA, 20 nt, Human
acauaaguauuuaauucaug

SEQ ID NO: 1652184 - RNA, 15 nt, Human
acauaagauaaaugu

SEQ ID NO: 1652185 - RNA, 16 nt, Human
acaaggcaaggcuguc

SEQ ID NO: 1652186 - RNA, 17 nt, Human
acaaggcaaggcuguca

SEQ ID NO: 1652187 - RNA, 19 nt, Human
acaaggcaaggcugucaau

SEQ ID NO: 1652188 - RNA, 20 nt, Human
acaaggcaaggcugucaauu

SEQ ID NO: 1652189 - RNA, 15 nt, Human
acaaguuaaauaaau

SEQ ID NO: 1652190 - RNA, 14 nt, Human
acacagcucuucuc

SEQ ID NO: 1652191 - RNA, 16 nt, Human
acacagcucuucucca

SEQ ID NO: 1652192 - RNA, 19 nt, Human
acacagcucuucuccaggc

SEQ ID NO: 1652193 - RNA, 18 nt, Human
acacagcucuucuccagg

SEQ ID NO: 1652194 - RNA, 18 nt, Human
acaccagagcccaccuug

SEQ ID NO: 1652195 - RNA, 23 nt, Human
acaccagagcccaccuuggcuca

SEQ ID NO: 1652196 - RNA, 15 nt, Human
acaccaauauucaua

SEQ ID NO: 1652197 - RNA, 12 nt, Human
aauuuccuggga

SEQ ID NO: 1652198 - RNA, 15 nt, Human
aauuuccugggagcu

SEQ ID NO: 1652199 - RNA, 17 nt, Human
aauuguaauuauaucug

SEQ ID NO: 1652200 - RNA, 15 nt, Human
aauuguaauuauauc

SEQ ID NO: 1652201 - RNA, 16 nt, Human
aauuguaauuauaucu

SEQ ID NO: 1652202 - RNA, 14 nt, Human
aauuguaauuauau

SEQ ID NO: 1652203 - RNA, 11 nt, Human
aauuguaauag

SEQ ID NO: 1652204 - RNA, 15 nt, Human
aauuucccaaagcag

SEQ ID NO: 1652205 - RNA, 17 nt, Human
aauuucccaaagcagug

SEQ ID NO: 1652206 - RNA, 22 nt, Human
aauucuagcuuugagcuuaaga

SEQ ID NO: 1652207 - RNA, 14 nt, Human
aauucuacuuugag

SEQ ID NO: 1652208 - RNA, 19 nt, Human
aauucucagaaucucaaau

SEQ ID NO: 1652209 - RNA, 17 nt, Human
aauucucuaguuugauu

SEQ ID NO: 1652210 - RNA, 15 nt, Human
aauucucuaguuuga

SEQ ID NO: 1652211 - RNA, 15 nt, Human
aauucucuuauccaa

SEQ ID NO: 1652212 - RNA, 15 nt, Human
aauucuccugccuca

SEQ ID NO: 1652213 - RNA, 16 nt, Human
aauucuccugccucag

SEQ ID NO: 1652214 - RNA, 14 nt, Human
aauucuccugccuc

SEQ ID NO: 1652215 - RNA, 21 nt, Human
aauucucauuugucacacacu

SEQ ID NO: 1652216 - RNA, 13 nt, Human
aauucuguauaga

SEQ ID NO: 1652217 - RNA, 14 nt, Human
aauucuguauagau

SEQ ID NO: 1652218 - RNA, 20 nt, Human
aauucuguauagauuagaga

SEQ ID NO: 1652219 - RNA, 12 nt, Human
aauucuguauag

SEQ ID NO: 1652220 - RNA, 15 nt, Human
aauuggggauucuua

SEQ ID NO: 1652221 - RNA, 22 nt, Human
aauuguaaggaaugauuaauua

SEQ ID NO: 1652222 - RNA, 14 nt, Human
aauucuguuuuucu

SEQ ID NO: 1652223 - RNA, 18 nt, Human
aauucuguuuuucuaggc

SEQ ID NO: 1652224 - RNA, 13 nt, Human
aauucuuaaauau

SEQ ID NO: 1652225 - RNA, 12 nt, Human
aauuaugaaacu

SEQ ID NO: 1652226 - RNA, 13 nt, Human
aauuaugaaacuu

SEQ ID NO: 1652227 - RNA, 15 nt, Human
aauuaugaaacuuuu

SEQ ID NO: 1652228 - RNA, 18 nt, Human
aauuaugaaacuuuugga

SEQ ID NO: 1652229 - RNA, 19 nt, Human
aauuaugaguuauuuuuau

SEQ ID NO: 1652230 - RNA, 19 nt, Human
aauuauacccccugcaaag

SEQ ID NO: 1652231 - RNA, 20 nt, Human
aauuauaucugaggaauucu

SEQ ID NO: 1652232 - RNA, 22 nt, Human
aauuauaucugaggaauucugu

SEQ ID NO: 1652233 - RNA, 23 nt, Human
aauuauaucugaggaauucugua

SEQ ID NO: 1652234 - RNA, 19 nt, Human
aauuauaugcuauuucuau

SEQ ID NO: 1652235 - RNA, 20 nt, Human
aauuauaugcuauuucuaua

SEQ ID NO: 1652236 - RNA, 21 nt, Human
aauuauaugcuauuucuauau

SEQ ID NO: 1652237 - RNA, 21 nt, Human
accgggcugggagcucugcag

SEQ ID NO: 1652238 - RNA, 23 nt, Human
accgggcugggagcucugcagag

SEQ ID NO: 1652239 - RNA, 18 nt, Human
accgugaggccagagaca

SEQ ID NO: 1652240 - RNA, 12 nt, Human
accucagccucc

SEQ ID NO: 1652241 - RNA, 11 nt, Human
accucagccuc

SEQ ID NO: 1652242 - RNA, 19 nt, Human
accgugccuggccacgccc

SEQ ID NO: 1652243 - RNA, 23 nt, Human
accgugaggccagagacacaagc

SEQ ID NO: 1652244 - RNA, 17 nt, Human
acccugugauggggccc

SEQ ID NO: 1652245 - RNA, 19 nt, Human
acccugugauggggcccug

SEQ ID NO: 1652246 - RNA, 20 nt, Human
acccugugauggggcccugc

SEQ ID NO: 1652247 - RNA, 21 nt, Human
acccugugauggggcccugcc

SEQ ID NO: 1652248 - RNA, 12 nt, Human
accgggcacuca

SEQ ID NO: 1652249 - RNA, 14 nt, Human
accgggcacucaga

SEQ ID NO: 1652250 - RNA, 16 nt, Human
accgggcacucagaag

SEQ ID NO: 1652251 - RNA, 11 nt, Human
accucaggccu

SEQ ID NO: 1652252 - RNA, 20 nt, Human
accucaggugauccacccac

SEQ ID NO: 1652253 - RNA, 21 nt, Human
accucaggugauccacccacc

SEQ ID NO: 1652254 - RNA, 11 nt, Human
acccucagagc

SEQ ID NO: 1652255 - RNA, 14 nt, Human
acccuauugcugcu

SEQ ID NO: 1652256 - RNA, 19 nt, Human
acccuauugcugcuugagg

SEQ ID NO: 1652257 - RNA, 13 nt, Human
acccuauugcugc

SEQ ID NO: 1652258 - RNA, 23 nt, Human
acccucaucaccaacgucugugc

SEQ ID NO: 1652259 - RNA, 18 nt, Human
acccuggcacccagggug

SEQ ID NO: 1652260 - RNA, 23 nt, Human
acccuggcacuauaauguaagcu

SEQ ID NO: 1652261 - RNA, 18 nt, Human
acccucagagccaccccu

SEQ ID NO: 1652262 - RNA, 13 nt, Human
acccucaggcagg

SEQ ID NO: 1652263 - RNA, 14 nt, Human
acccucaggcaggu

SEQ ID NO: 1652264 - RNA, 13 nt, Human
acccucaucacca

SEQ ID NO: 1652265 - RNA, 15 nt, Human
acccucaggcaggug

SEQ ID NO: 1652266 - RNA, 16 nt, Human
acccucaggcaggugg

SEQ ID NO: 1652267 - RNA, 16 nt, Human
acccuggggagaaagu

SEQ ID NO: 1652268 - RNA, 16 nt, Human
acccugugauggggcc

SEQ ID NO: 1652269 - RNA, 21 nt, Human
acccugucucuacuaaaaaua

SEQ ID NO: 1652270 - RNA, 21 nt, Human
accugccaggaagccagcagg

SEQ ID NO: 1652271 - RNA, 22 nt, Human
accugccaggaagccagcaggc

SEQ ID NO: 1652272 - RNA, 23 nt, Human
accugccaggaagccagcaggcu

SEQ ID NO: 1652273 - RNA, 12 nt, Human
accugccccuca

SEQ ID NO: 1652274 - RNA, 15 nt, Human
accugccccucaacu

SEQ ID NO: 1652275 - RNA, 20 nt, Human
accugccccucaacucuccu

SEQ ID NO: 1652276 - RNA, 12 nt, Human
accucugccuga

SEQ ID NO: 1652277 - RNA, 20 nt, Human
accucugccugaagucacac

SEQ ID NO: 1652278 - RNA, 23 nt, Human
accucugccugaagucacacagu

SEQ ID NO: 1652279 - RNA, 12 nt, Human
accuuggcucaa

SEQ ID NO: 1652280 - RNA, 20 nt, Human
acuaauguguaagacaaaaa

SEQ ID NO: 1652281 - RNA, 18 nt, Human
acuaauggggcggugaga

SEQ ID NO: 1652282 - RNA, 19 nt, Human
acgauuucuguuuagauaa

SEQ ID NO: 1652283 - RNA, 23 nt, Human
acgauuucuguuuagauaauaca

SEQ ID NO: 1652284 - RNA, 20 nt, Human
acgauuucuguuuagauaau

SEQ ID NO: 1652285 - RNA, 13 nt, Human
acgucuuaaauau

SEQ ID NO: 1652286 - RNA, 14 nt, Human
acgucuuaaauauu

SEQ ID NO: 1652287 - RNA, 13 nt, Human
acgucugugccau

SEQ ID NO: 1652288 - RNA, 19 nt, Human
acggaauaguuggcuagga

SEQ ID NO: 1652289 - RNA, 17 nt, Human
acggacacucaaaagcu

SEQ ID NO: 1652290 - RNA, 19 nt, Human
acggacacucaaaagcugg

SEQ ID NO: 1652291 - RNA, 12 nt, Human
acgcagcccugc

SEQ ID NO: 1652292 - RNA, 22 nt, Human
acgcagcccugcuuugggcugc

SEQ ID NO: 1652293 - RNA, 23 nt, Human
acgcagcccugcuuugggcugcc

SEQ ID NO: 1652294 - RNA, 22 nt, Human
acgcugugcugcccugcccacc

SEQ ID NO: 1652295 - RNA, 19 nt, Human
acgcugugcugcccugccc

SEQ ID NO: 1652296 - RNA, 19 nt, Human
acgcaggcccccaggugcc

SEQ ID NO: 1652297 - RNA, 19 nt, Human
acuucuuuaauuuuggaau

SEQ ID NO: 1652298 - RNA, 20 nt, Human
acuucuuuaauuuuggaauu

SEQ ID NO: 1652299 - RNA, 18 nt, Human
acuucuuuaauuuuggaa

SEQ ID NO: 1652300 - RNA, 17 nt, Human
acuucagcgguuuauau

SEQ ID NO: 1652301 - RNA, 21 nt, Human
acuucagacauagaauuaaca

SEQ ID NO: 1652302 - RNA, 12 nt, Human
acuugaaaauua

SEQ ID NO: 1652303 - RNA, 14 nt, Human
acuugaaaauuaac

SEQ ID NO: 1652304 - RNA, 16 nt, Human
acuugaaaauuaacau

SEQ ID NO: 1652305 - RNA, 23 nt, Human
acuuggggggcugaggugggagg

SEQ ID NO: 1652306 - RNA, 13 nt, Human
acuuggucuguga

SEQ ID NO: 1652307 - RNA, 19 nt, Human
acuguuucaaacuuuacua

SEQ ID NO: 1652308 - RNA, 18 nt, Human
acuguuucaaacuuuacu

SEQ ID NO: 1652309 - RNA, 15 nt, Human
acuguuucaaacuuu

SEQ ID NO: 1652310 - RNA, 20 nt, Human
acuuaaaauauuccugcauu

SEQ ID NO: 1652311 - RNA, 17 nt, Human
acuucaaauccuugaag

SEQ ID NO: 1652312 - RNA, 18 nt, Human
acuucaaauccuugaaga

SEQ ID NO: 1652313 - RNA, 22 nt, Human
acuuaaaaaugguuuaaauggu

SEQ ID NO: 1652314 - RNA, 16 nt, Human
acugucuuuuuucuaa

SEQ ID NO: 1652315 - RNA, 22 nt, Human
acugucuuuuuucuaaaguaaa

SEQ ID NO: 1652316 - RNA, 23 nt, Human
acugucuuuuuucuaaaguaaaa

SEQ ID NO: 1652317 - RNA, 16 nt, Human
acugugaagagaacca

SEQ ID NO: 1652318 - RNA, 17 nt, Human
acugugccaugugccag

SEQ ID NO: 1652319 - RNA, 18 nt, Human
acugugccaugugccagg

SEQ ID NO: 1652320 - RNA, 14 nt, Human
acugccaugccagc

SEQ ID NO: 1652321 - RNA, 19 nt, Human
acugcccaggccugccugu

SEQ ID NO: 1652322 - RNA, 18 nt, Human
acuggugacugauucuuc

SEQ ID NO: 1652323 - RNA, 19 nt, Human
acuggugacugauucuuca

SEQ ID NO: 1652324 - RNA, 20 nt, Human
acuggugacugauucuucag

SEQ ID NO: 1652325 - RNA, 12 nt, Human
acugguggcccg

SEQ ID NO: 1652326 - RNA, 17 nt, Human
acuguaaaauaauaacu

SEQ ID NO: 1652327 - RNA, 15 nt, Human
acugccuauuuuaau

SEQ ID NO: 1652328 - RNA, 12 nt, Human
acuggaacucuc

SEQ ID NO: 1652329 - RNA, 15 nt, Human
acucuacagaggcca

SEQ ID NO: 1652330 - RNA, 14 nt, Human
acucguuaauuugu

SEQ ID NO: 1652331 - RNA, 19 nt, Human
acucguuaauuuguagugu

SEQ ID NO: 1652332 - RNA, 15 nt, Human
acucccaagcuggac

SEQ ID NO: 1652333 - RNA, 22 nt, Human
acucccaucugugaaaggaaag

SEQ ID NO: 1652334 - RNA, 18 nt, Human
acucccugccccccagcc

SEQ ID NO: 1652335 - RNA, 14 nt, Human
acucccuuucaaca

SEQ ID NO: 1652336 - RNA, 22 nt, Human
acugauuugacauagucuggcu

SEQ ID NO: 1652337 - RNA, 16 nt, Human
acugauuuuuuuuucc

SEQ ID NO: 1652338 - RNA, 17 nt, Human
acugauuuuuuuuuccu

SEQ ID NO: 1652339 - RNA, 18 nt, Human
acugauuuuuuuuuccuu

SEQ ID NO: 1652340 - RNA, 19 nt, Human
acugauuuuuuuuuccuuc

SEQ ID NO: 1652341 - RNA, 20 nt, Human
acugauuuuuuuuuccuuca

SEQ ID NO: 1652342 - RNA, 14 nt, Human
acugauuacugccu

SEQ ID NO: 1652343 - RNA, 22 nt, Human
acugacauuguuggccaaagcc

SEQ ID NO: 1652344 - RNA, 19 nt, Human
acugauaugggucuugaua

SEQ ID NO: 1652345 - RNA, 13 nt, Human
acugaauuaugaa

SEQ ID NO: 1652346 - RNA, 14 nt, Human
acugaauuaugaaa

SEQ ID NO: 1652347 - RNA, 15 nt, Human
acugaauuaugaaac

SEQ ID NO: 1652348 - RNA, 20 nt, Human
acugaauuaugaaacuuuug

SEQ ID NO: 1652349 - RNA, 12 nt, Human
acugaauuucuu

SEQ ID NO: 1652350 - RNA, 13 nt, Human
acucuacccucuu

SEQ ID NO: 1652351 - RNA, 23 nt, Human
acugaauuucuuuugccguuauu

SEQ ID NO: 1652352 - RNA, 17 nt, Human
acugacauuguuggcca

SEQ ID NO: 1652353 - RNA, 18 nt, Human
acugacauuguuggccaa

SEQ ID NO: 1652354 - RNA, 17 nt, Human
agcuguaugauucccag

SEQ ID NO: 1652355 - RNA, 18 nt, Human
agcuguaugauucccagc

SEQ ID NO: 1652356 - RNA, 15 nt, Human
aggaacacuccuuca

SEQ ID NO: 1652357 - RNA, 20 nt, Human
aggaaaaccaagccguggcu

SEQ ID NO: 1652358 - RNA, 21 nt, Human
aggaaaaccaagccguggcuu

SEQ ID NO: 1652359 - RNA, 22 nt, Human
aggaaaaccaagccguggcuuc

SEQ ID NO: 1652360 - RNA, 23 nt, Human
aggaaaaccaagccguggcuucc

SEQ ID NO: 1652361 - RNA, 12 nt, Human
aggaacacuccu

SEQ ID NO: 1652362 - RNA, 14 nt, Human
aggaagguagaaau

SEQ ID NO: 1652363 - RNA, 11 nt, Human
aggaaguacug

SEQ ID NO: 1652364 - RNA, 15 nt, Human
aggaaguacuggaga

SEQ ID NO: 1652365 - RNA, 14 nt, Human
aggaagguucuggu

SEQ ID NO: 1652366 - RNA, 16 nt, Human
aggaagguucuggugu

SEQ ID NO: 1652367 - RNA, 21 nt, Human
aggaagguucuggugugaacu

SEQ ID NO: 1652368 - RNA, 21 nt, Human
agcuuuguuuguugucagcug

SEQ ID NO: 1652369 - RNA, 22 nt, Human
agcuuuguuuguugucagcuga

SEQ ID NO: 1652370 - RNA, 19 nt, Human
agcuuuuuucucugauaca

SEQ ID NO: 1652371 - RNA, 20 nt, Human
agcuuuuuucucugauacag

SEQ ID NO: 1652372 - RNA, 22 nt, Human
agcuuuuuucucugauacagaa

SEQ ID NO: 1652373 - RNA, 23 nt, Human
agcuuuuuucucugauacagaaa

SEQ ID NO: 1652374 - RNA, 19 nt, Human
aggaaaaccaagccguggc

SEQ ID NO: 1652375 - RNA, 18 nt, Human
aggaaaaaauaacaauga

SEQ ID NO: 1652376 - RNA, 22 nt, Human
agcucaccagccccagugccca

SEQ ID NO: 1652377 - RNA, 23 nt, Human
agcucaccagccccagugcccac

SEQ ID NO: 1652378 - RNA, 15 nt, Human
agcugacuuuucugu

SEQ ID NO: 1652379 - RNA, 21 nt, Human
agcugacuuuucuguccgagc

SEQ ID NO: 1652380 - RNA, 16 nt, Human
agcugguugagguuuc

SEQ ID NO: 1652381 - RNA, 20 nt, Human
agcuggguuggaaaacagua

SEQ ID NO: 1652382 - RNA, 16 nt, Human
agcuggguuggaaaac

SEQ ID NO: 1652383 - RNA, 16 nt, Human
agcuggucccacucag

SEQ ID NO: 1652384 - RNA, 15 nt, Human
agcuggucccacuca

SEQ ID NO: 1652385 - RNA, 14 nt, Human
agcugcugaaacaa

SEQ ID NO: 1652386 - RNA, 15 nt, Human
agcugcugaaacaac

SEQ ID NO: 1652387 - RNA, 16 nt, Human
agcugcugaaacaaca

SEQ ID NO: 1652388 - RNA, 20 nt, Human
agcugcugaaacaacaaaua

SEQ ID NO: 1652389 - RNA, 17 nt, Human
agccugcugccugcuuu

SEQ ID NO: 1652390 - RNA, 20 nt, Human
agccuggcacagggcagugg

SEQ ID NO: 1652391 - RNA, 17 nt, Human
agccuggcacagggcag

SEQ ID NO: 1652392 - RNA, 18 nt, Human
agccuggcacagggcagu

SEQ ID NO: 1652393 - RNA, 14 nt, Human
agccuggacccugu

SEQ ID NO: 1652394 - RNA, 18 nt, Human
agccugggcaaugugaua

SEQ ID NO: 1652395 - RNA, 19 nt, Human
agcuaacauggaaguacua

SEQ ID NO: 1652396 - RNA, 20 nt, Human
agcuaacauggaaguacuau

SEQ ID NO: 1652397 - RNA, 13 nt, Human
agcgacagugaga

SEQ ID NO: 1652398 - RNA, 15 nt, Human
agcgacagugagacu

SEQ ID NO: 1652399 - RNA, 17 nt, Human
agcgauucuucugcuuc

SEQ ID NO: 1652400 - RNA, 19 nt, Human
agcgauucuucugcuucag

SEQ ID NO: 1652401 - RNA, 15 nt, Human
agcgauucuucugcu

SEQ ID NO: 1652402 - RNA, 17 nt, Human
agcgacagugagacucu

SEQ ID NO: 1652403 - RNA, 13 nt, Human
agcuaaugggaca

SEQ ID NO: 1652404 - RNA, 14 nt, Human
agcuaaugggacac

SEQ ID NO: 1652405 - RNA, 15 nt, Human
agcuaaugggacacu

SEQ ID NO: 1652406 - RNA, 13 nt, Human
agcucaccagccc

SEQ ID NO: 1652407 - RNA, 14 nt, Human
agcucaccagcccc

SEQ ID NO: 1652408 - RNA, 15 nt, Human
agcucaccagcccca

SEQ ID NO: 1652409 - RNA, 21 nt, Human
agcucaccagccccagugccc

SEQ ID NO: 1652410 - RNA, 13 nt, Human
agcuacaaaugca

SEQ ID NO: 1652411 - RNA, 18 nt, Human
aggaguuucguuuucaaa

SEQ ID NO: 1652412 - RNA, 14 nt, Human
aggagugagcacua

SEQ ID NO: 1652413 - RNA, 15 nt, Human
aggaggucucuaaga

SEQ ID NO: 1652414 - RNA, 12 nt, Human
aggagugagcac

SEQ ID NO: 1652415 - RNA, 14 nt, Human
aggaggucucuaag

SEQ ID NO: 1652416 - RNA, 16 nt, Human
aggagagcccuucauu

SEQ ID NO: 1652417 - RNA, 19 nt, Human
aggaaguacuggagaaaau

SEQ ID NO: 1652418 - RNA, 13 nt, Human
aggaaguagagga

SEQ ID NO: 1652419 - RNA, 12 nt, Human
aggcauguucuc

SEQ ID NO: 1652420 - RNA, 23 nt, Human
aggcaugugaugagaggaaauca

SEQ ID NO: 1652421 - RNA, 24 nt, Human
aggcaugugaugagaggaaaucac

SEQ ID NO: 1652422 - RNA, 17 nt, Human
aggcaucgcaauguaag

SEQ ID NO: 1652423 - RNA, 18 nt, Human
aggcagccaggccacaag

SEQ ID NO: 1652424 - RNA, 21 nt, Human
aggcauuccccaggaggccag

SEQ ID NO: 1652425 - RNA, 20 nt, Human
aggcauguucucugaggaca

SEQ ID NO: 1652426 - RNA, 22 nt, Human
aggcauguucucugaggacacu

SEQ ID NO: 1652427 - RNA, 17 nt, Human
aggcauuccccaggagg

SEQ ID NO: 1652428 - RNA, 22 nt, Human
aggcauuccccaggaggccagc

SEQ ID NO: 1652429 - RNA, 23 nt, Human
aggcauuccccaggaggccagcc

SEQ ID NO: 1652430 - RNA, 23 nt, Human
aggccagcugcuugggcuucauc

SEQ ID NO: 1652431 - RNA, 14 nt, Human
aggccaugggccuc

SEQ ID NO: 1652432 - RNA, 16 nt, Human
aggccaugggccuccu

SEQ ID NO: 1652433 - RNA, 17 nt, Human
aggccaugggccuccug

SEQ ID NO: 1652434 - RNA, 17 nt, Human
aggcccucugcccacuc

SEQ ID NO: 1652435 - RNA, 13 nt, Human
aggccagcugcuu

SEQ ID NO: 1652436 - RNA, 14 nt, Human
aggccagcugcuug

SEQ ID NO: 1652437 - RNA, 16 nt, Human
aggccagcugcuuggg

SEQ ID NO: 1652438 - RNA, 16 nt, Human
aggccaggcccucugc

SEQ ID NO: 1652439 - RNA, 17 nt, Human
aggccaggcccucugcc

SEQ ID NO: 1652440 - RNA, 18 nt, Human
aggccaggcccucugccc

SEQ ID NO: 1652441 - RNA, 19 nt, Human
aggccaggcccucugccca

SEQ ID NO: 1652442 - RNA, 23 nt, Human
aggccaggcccucugcccacucc

SEQ ID NO: 1652443 - RNA, 14 nt, Human
aggcagccaggcca

SEQ ID NO: 1652444 - RNA, 15 nt, Human
aggcagccaggccac

SEQ ID NO: 1652445 - RNA, 16 nt, Human
aggcagccaggccaca

SEQ ID NO: 1652446 - RNA, 22 nt, Human
aggcagaacucaucuagguaaa

SEQ ID NO: 1652447 - RNA, 13 nt, Human
aggcagauacagg

SEQ ID NO: 1652448 - RNA, 20 nt, Human
aggcagagguugcagugagc

SEQ ID NO: 1652449 - RNA, 17 nt, Human
agggacugagaaauuua

SEQ ID NO: 1652450 - RNA, 15 nt, Human
agggacugagaaauu

SEQ ID NO: 1652451 - RNA, 13 nt, Human
agggacugagaaa

SEQ ID NO: 1652452 - RNA, 14 nt, Human
agggacugagaaau

SEQ ID NO: 1652453 - RNA, 18 nt, Human
agggccuggcucaggugg

SEQ ID NO: 1652454 - RNA, 13 nt, Human
agggccuggcuca

SEQ ID NO: 1652455 - RNA, 14 nt, Human
agggccuggcucag

SEQ ID NO: 1652456 - RNA, 21 nt, Human
aggcccucugcccacucccug

SEQ ID NO: 1652457 - RNA, 19 nt, Human
aggcccucugcccacuccc

SEQ ID NO: 1652458 - RNA, 20 nt, Human
aggcccucugcccacucccu

SEQ ID NO: 1652459 - RNA, 13 nt, Human
aggcucuucuccu

SEQ ID NO: 1652460 - RNA, 11 nt, Human
aggcugagccu

SEQ ID NO: 1652461 - RNA, 13 nt, Human
aggcugagccuca

SEQ ID NO: 1652462 - RNA, 11 nt, Human
aggcugaggac

SEQ ID NO: 1652463 - RNA, 13 nt, Human
aggcugaggacuu

SEQ ID NO: 1652464 - RNA, 22 nt, Human
aggcucuggagcccacuguacu

SEQ ID NO: 1652465 - RNA, 24 nt, Human
aggcuguaucccaugagccucagc

SEQ ID NO: 1652466 - RNA, 19 nt, Human
aggcugucaauuacaggaa

SEQ ID NO: 1652467 - RNA, 12 nt, Human
aggcugucaauu

SEQ ID NO: 1652468 - RNA, 17 nt, Human
aggcugcagugagccga

SEQ ID NO: 1652469 - RNA, 19 nt, Human
aggcugcagugagccgaga

SEQ ID NO: 1652470 - RNA, 23 nt, Human
aggcuguaucccaugagccucag

SEQ ID NO: 1652471 - RNA, 17 nt, Human
agggacaggauaagagg

SEQ ID NO: 1652472 - RNA, 15 nt, Human
agcaauucuccugcc

SEQ ID NO: 1652473 - RNA, 17 nt, Human
agcaauucuccugccuc

SEQ ID NO: 1652474 - RNA, 18 nt, Human
agcaauucuccugccuca

SEQ ID NO: 1652475 - RNA, 19 nt, Human
agcaauucuccugccucag

SEQ ID NO: 1652476 - RNA, 20 nt, Human
agcaauucuccugccucagc

SEQ ID NO: 1652477 - RNA, 21 nt, Human
agcacagacccugcccugugg

SEQ ID NO: 1652478 - RNA, 17 nt, Human
agcagugcaugcugucc

SEQ ID NO: 1652479 - RNA, 18 nt, Human
agcagugcaugcuguccc

SEQ ID NO: 1652480 - RNA, 20 nt, Human
agcagccuggacccugugga

SEQ ID NO: 1652481 - RNA, 19 nt, Human
agcagcguuucuaugacac

SEQ ID NO: 1652482 - RNA, 13 nt, Human
agcagugcaugcu

SEQ ID NO: 1652483 - RNA, 16 nt, Human
agcagugcaugcuguc

SEQ ID NO: 1652484 - RNA, 16 nt, Human
agcagccuggacccug

SEQ ID NO: 1652485 - RNA, 19 nt, Human
agcacugacuucuaaguaa

SEQ ID NO: 1652486 - RNA, 17 nt, Human
agcacugacuucuaagu

SEQ ID NO: 1652487 - RNA, 16 nt, Human
agcaucuaugugagac

SEQ ID NO: 1652488 - RNA, 17 nt, Human
agccaacuauggccugu

SEQ ID NO: 1652489 - RNA, 14 nt, Human
agccagauuucacu

SEQ ID NO: 1652490 - RNA, 17 nt, Human
agccagauuucacucuc

SEQ ID NO: 1652491 - RNA, 20 nt, Human
agccagauuucacucuccuu

SEQ ID NO: 1652492 - RNA, 22 nt, Human
agccagauuucacucuccuugg

SEQ ID NO: 1652493 - RNA, 23 nt, Human
agcccaccccucaacaccucugc

SEQ ID NO: 1652494 - RNA, 13 nt, Human
agcccaccuuggc

SEQ ID NO: 1652495 - RNA, 17 nt, Human
agcccacgcccccacug

SEQ ID NO: 1652496 - RNA, 18 nt, Human
agcccacgcccccacugg

SEQ ID NO: 1652497 - RNA, 19 nt, Human
agcccacgcccccacuggu

SEQ ID NO: 1652498 - RNA, 20 nt, Human
agcccacgcccccacuggug

SEQ ID NO: 1652499 - RNA, 22 nt, Human
agccagcaggcucucaggccag

SEQ ID NO: 1652500 - RNA, 21 nt, Human
agccagcaggcucucaggcca

SEQ ID NO: 1652501 - RNA, 23 nt, Human
agccagcaggcucucaggccagc

SEQ ID NO: 1652502 - RNA, 14 nt, Human
agccagcaguucag

SEQ ID NO: 1652503 - RNA, 14 nt, Human
agauaugauucaaa

SEQ ID NO: 1652504 - RNA, 15 nt, Human
agauaugauucaaau

SEQ ID NO: 1652505 - RNA, 16 nt, Human
agauaugauucaaaug

SEQ ID NO: 1652506 - RNA, 12 nt, Human
agaguggcuccu

SEQ ID NO: 1652507 - RNA, 13 nt, Human
agaguggcuccuc

SEQ ID NO: 1652508 - RNA, 14 nt, Human
agaguggcuccucc

SEQ ID NO: 1652509 - RNA, 15 nt, Human
agaguggcuccuccc

SEQ ID NO: 1652510 - RNA, 20 nt, Human
agagggucugaggaauccag

SEQ ID NO: 1652511 - RNA, 14 nt, Human
agaguugaagacag

SEQ ID NO: 1652512 - RNA, 15 nt, Human
agaguugaagacaga

SEQ ID NO: 1652513 - RNA, 13 nt, Human
agaguugaagaca

SEQ ID NO: 1652514 - RNA, 20 nt, Human
agauagccaaggccaaagga

SEQ ID NO: 1652515 - RNA, 20 nt, Human
agauagauaggucagugcaa

SEQ ID NO: 1652516 - RNA, 18 nt, Human
agaucucugcuuuggaaa

SEQ ID NO: 1652517 - RNA, 23 nt, Human
agaucucugcuuuggaaaucaca

SEQ ID NO: 1652518 - RNA, 13 nt, Human
agaucugccuaag

SEQ ID NO: 1652519 - RNA, 18 nt, Human
agaucugccuaaggacuu

SEQ ID NO: 1652520 - RNA, 17 nt, Human
agauggcugugccucug

SEQ ID NO: 1652521 - RNA, 18 nt, Human
agauggcugugccucugc

SEQ ID NO: 1652522 - RNA, 19 nt, Human
agauggcugugccucugcc

SEQ ID NO: 1652523 - RNA, 20 nt, Human
agauggcugugccucugccu

SEQ ID NO: 1652524 - RNA, 21 nt, Human
agauggcugugccucugccug

SEQ ID NO: 1652525 - RNA, 22 nt, Human
agauggcugugccucugccugu

SEQ ID NO: 1652526 - RNA, 18 nt, Human
agaugacaucugucuagg

SEQ ID NO: 1652527 - RNA, 22 nt, Human
agaugggugcuuggaggaagga

SEQ ID NO: 1652528 - RNA, 20 nt, Human
agaugggugcuuggaggaag

SEQ ID NO: 1652529 - RNA, 14 nt, Human
agauucuuuccuga

SEQ ID NO: 1652530 - RNA, 19 nt, Human
agcaaauucuguuuuucua

SEQ ID NO: 1652531 - RNA, 23 nt, Human
agcaaaauuuuuucucuaggaaa

SEQ ID NO: 1652532 - RNA, 17 nt, Human
agauugagauguguuca

SEQ ID NO: 1652533 - RNA, 16 nt, Human
agauugcaacaggcug

SEQ ID NO: 1652534 - RNA, 18 nt, Human
agauucuuuccugaggcu

SEQ ID NO: 1652535 - RNA, 15 nt, Human
agauucuuuccugag

SEQ ID NO: 1652536 - RNA, 16 nt, Human
agauucuuuccugagg

SEQ ID NO: 1652537 - RNA, 16 nt, Human
agauugcaccacugca

SEQ ID NO: 1652538 - RNA, 17 nt, Human
agauugcaacaggcugg

SEQ ID NO: 1652539 - RNA, 19 nt, Human
agauugcaacaggcugggc

SEQ ID NO: 1652540 - RNA, 18 nt, Human
agagcccacgcccccacu

SEQ ID NO: 1652541 - RNA, 11 nt, Human
agagagcaaga

SEQ ID NO: 1652542 - RNA, 19 nt, Human
agagagcaagacgcugugc

SEQ ID NO: 1652543 - RNA, 23 nt, Human
agagagcaagacgcugugcugcc

SEQ ID NO: 1652544 - RNA, 16 nt, Human
agacucuuuggacacu

SEQ ID NO: 1652545 - RNA, 20 nt, Human
agacgcugugcugcccugcc

SEQ ID NO: 1652546 - RNA, 16 nt, Human
agacgaugucuucaua

SEQ ID NO: 1652547 - RNA, 17 nt, Human
agacgcugugcugcccu

SEQ ID NO: 1652548 - RNA, 18 nt, Human
agacgcugugcugcccug

SEQ ID NO: 1652549 - RNA, 19 nt, Human
agacgcugugcugcccugc

SEQ ID NO: 1652550 - RNA, 15 nt, Human
agacuaucuaaaugu

SEQ ID NO: 1652551 - RNA, 13 nt, Human
agacagcccucca

SEQ ID NO: 1652552 - RNA, 14 nt, Human
agacaauuuauuau

SEQ ID NO: 1652553 - RNA, 22 nt, Human
agacagcccgggcucugccucc

SEQ ID NO: 1652554 - RNA, 23 nt, Human
agacagcccgggcucugccuccc

SEQ ID NO: 1652555 - RNA, 15 nt, Human
agaccacguuucuaa

SEQ ID NO: 1652556 - RNA, 14 nt, Human
agaccacguuucua

SEQ ID NO: 1652557 - RNA, 23 nt, Human
agaccaucccugaaggccccgcc

SEQ ID NO: 1652558 - RNA, 18 nt, Human
agacgaaacauuuguucu

SEQ ID NO: 1652559 - RNA, 17 nt, Human
agacccaaaaggcagaa

SEQ ID NO: 1652560 - RNA, 15 nt, Human
agaauuuugagcagg

SEQ ID NO: 1652561 - RNA, 20 nt, Human
agacaaugugaaaagaaaaa

SEQ ID NO: 1652562 - RNA, 19 nt, Human
agacaaggaaaaaauaaca

SEQ ID NO: 1652563 - RNA, 16 nt, Human
agaaugaaagggccca

SEQ ID NO: 1652564 - RNA, 17 nt, Human
agaaucucaaauaacua

SEQ ID NO: 1652565 - RNA, 21 nt, Human
agaaucuaacugguggacaug

SEQ ID NO: 1652566 - RNA, 22 nt, Human
agaaucuaacugguggacaugg

SEQ ID NO: 1652567 - RNA, 18 nt, Human
agaaugcucuuuacuuca

SEQ ID NO: 1652568 - RNA, 23 nt, Human
agaaugcacaaacagaggccgcc

SEQ ID NO: 1652569 - RNA, 17 nt, Human
agaagucuuagauguau

SEQ ID NO: 1652570 - RNA, 19 nt, Human
agaagucuuagauguauau

SEQ ID NO: 1652571 - RNA, 14 nt, Human
agaagucacacagu

SEQ ID NO: 1652572 - RNA, 17 nt, Human
agaaccaggcaacuugg

SEQ ID NO: 1652573 - RNA, 21 nt, Human
agaaccaaaaagaggcuaugu

SEQ ID NO: 1652574 - RNA, 20 nt, Human
agaaccaggcaacuugggaa

SEQ ID NO: 1652575 - RNA, 21 nt, Human
agaagacugcauuauauuuau

SEQ ID NO: 1652576 - RNA, 20 nt, Human
agaagagcuguucacagcca

SEQ ID NO: 1652577 - RNA, 15 nt, Human
agaagagaaugcaca

SEQ ID NO: 1652578 - RNA, 23 nt, Human
agaagagaaugcacaaacagagg

SEQ ID NO: 1652579 - RNA, 13 nt, Human
agaagagcuguuc

SEQ ID NO: 1652580 - RNA, 13 nt, Human
agaacaucccucc

SEQ ID NO: 1652581 - RNA, 17 nt, Human
agaacaucccuccuggg

SEQ ID NO: 1652582 - RNA, 17 nt, Human
agaaccaaaaagaggcu

SEQ ID NO: 1652583 - RNA, 18 nt, Human
agaaccaaaaagaggcua

SEQ ID NO: 1652584 - RNA, 22 nt, Human
agaacagugauuaccagggacu

SEQ ID NO: 1652585 - RNA, 14 nt, Human
auacaccgggccug

SEQ ID NO: 1652586 - RNA, 18 nt, Human
auacaccgggccuggaga

SEQ ID NO: 1652587 - RNA, 17 nt, Human
auacaccacuacauucu

SEQ ID NO: 1652588 - RNA, 12 nt, Human
auacuguuugag

SEQ ID NO: 1652589 - RNA, 16 nt, Human
auacuguuugagguuu

SEQ ID NO: 1652590 - RNA, 20 nt, Human
auacuguuugagguuuuuaa

SEQ ID NO: 1652591 - RNA, 21 nt, Human
auaaagaugagugagcaugcc

SEQ ID NO: 1652592 - RNA, 19 nt, Human
auaaagaucauguaaaagu

SEQ ID NO: 1652593 - RNA, 23 nt, Human
auacaaugcugugcccuaaagug

SEQ ID NO: 1652594 - RNA, 12 nt, Human
auaauguuaaca

SEQ ID NO: 1652595 - RNA, 14 nt, Human
auacaauuuuguuu

SEQ ID NO: 1652596 - RNA, 16 nt, Human
auacaauuuuguuucu

SEQ ID NO: 1652597 - RNA, 17 nt, Human
auacaauuuuguuucug

SEQ ID NO: 1652598 - RNA, 18 nt, Human
auacaauuuuguuucugu

SEQ ID NO: 1652599 - RNA, 15 nt, Human
auacaccacuacauu

SEQ ID NO: 1652600 - RNA, 15 nt, Human
auaaguggugugugu

SEQ ID NO: 1652601 - RNA, 12 nt, Human
agugcuccagcc

SEQ ID NO: 1652602 - RNA, 18 nt, Human
aguuccaccaucaagcca

SEQ ID NO: 1652603 - RNA, 21 nt, Human
aguuccaccaucaagccacca

SEQ ID NO: 1652604 - RNA, 14 nt, Human
aguucauacccugu

SEQ ID NO: 1652605 - RNA, 18 nt, Human
aguuacacuaaaagguga

SEQ ID NO: 1652606 - RNA, 17 nt, Human
aguugaaaaacagcuga

SEQ ID NO: 1652607 - RNA, 16 nt, Human
aguugaagacagagcu

SEQ ID NO: 1652608 - RNA, 17 nt, Human
aguugaagacagagcua

SEQ ID NO: 1652609 - RNA, 18 nt, Human
aguugaaaaacagcugag

SEQ ID NO: 1652610 - RNA, 14 nt, Human
aguugaaaagacuc

SEQ ID NO: 1652611 - RNA, 17 nt, Human
aguuguuagugugucuu

SEQ ID NO: 1652612 - RNA, 22 nt, Human
aguuguuagugugucuuagugu

SEQ ID NO: 1652613 - RNA, 14 nt, Human
aguuugauuaaauu

SEQ ID NO: 1652614 - RNA, 16 nt, Human
aguuugauuaaauucu

SEQ ID NO: 1652615 - RNA, 11 nt, Human
aguuugcaguu

SEQ ID NO: 1652616 - RNA, 15 nt, Human
auaaaagacagugaa

SEQ ID NO: 1652617 - RNA, 16 nt, Human
auaaaagacagugaaa

SEQ ID NO: 1652618 - RNA, 16 nt, Human
auaaaaaauuaugaca

SEQ ID NO: 1652619 - RNA, 22 nt, Human
aguauauugauccagaaagaaa

SEQ ID NO: 1652620 - RNA, 20 nt, Human
aguacuucuccacccugcuc

SEQ ID NO: 1652621 - RNA, 21 nt, Human
aguacuucuccacccugcucu

SEQ ID NO: 1652622 - RNA, 22 nt, Human
aguacuucuccacccugcucuc

SEQ ID NO: 1652623 - RNA, 15 nt, Human
aguacuggagaaaau

SEQ ID NO: 1652624 - RNA, 17 nt, Human
aguaacuuacuuaggug

SEQ ID NO: 1652625 - RNA, 20 nt, Human
aguaaaugggggugcauuug

SEQ ID NO: 1652626 - RNA, 19 nt, Human
aguaaaugggggugcauuu

SEQ ID NO: 1652627 - RNA, 21 nt, Human
aguaaaugggggugcauuuga

SEQ ID NO: 1652628 - RNA, 19 nt, Human
agucuggcuguacccagga

SEQ ID NO: 1652629 - RNA, 21 nt, Human
agucuggcuguacccaggaau

SEQ ID NO: 1652630 - RNA, 18 nt, Human
agucuggcccuuccuuuu

SEQ ID NO: 1652631 - RNA, 21 nt, Human
agucugauucccaagcucugc

SEQ ID NO: 1652632 - RNA, 22 nt, Human
agucugauucccaagcucugcu

SEQ ID NO: 1652633 - RNA, 19 nt, Human
aguccuuaccagcagagca

SEQ ID NO: 1652634 - RNA, 16 nt, Human
agucgaggacagggag

SEQ ID NO: 1652635 - RNA, 14 nt, Human
aguccucuuuucug

SEQ ID NO: 1652636 - RNA, 16 nt, Human
aguccuuaccagcaga

SEQ ID NO: 1652637 - RNA, 18 nt, Human
aguccuuaccagcagagc

SEQ ID NO: 1652638 - RNA, 13 nt, Human
agucauuuaauaa

SEQ ID NO: 1652639 - RNA, 19 nt, Human
agugccuuauggaacacuc

SEQ ID NO: 1652640 - RNA, 20 nt, Human
agugccuuauggaacacucu

SEQ ID NO: 1652641 - RNA, 21 nt, Human
agugccuuauggaacacucug

SEQ ID NO: 1652642 - RNA, 22 nt, Human
agugccuuauggaacacucuga

SEQ ID NO: 1652643 - RNA, 18 nt, Human
agugauucuccugccuca

SEQ ID NO: 1652644 - RNA, 19 nt, Human
agugauucuccugccucag

SEQ ID NO: 1652645 - RNA, 20 nt, Human
agugauucuccugccucagc

SEQ ID NO: 1652646 - RNA, 20 nt, Human
agugauccucccaccucagc

SEQ ID NO: 1652647 - RNA, 22 nt, Human
agugauccucccaccucagccu

SEQ ID NO: 1652648 - RNA, 13 nt, Human
agugauuaccagg

SEQ ID NO: 1652649 - RNA, 23 nt, Human
agugauccucccaccucagccuc

SEQ ID NO: 1652650 - RNA, 19 nt, Human
agugaugucacuagggcag

SEQ ID NO: 1652651 - RNA, 16 nt, Human
agugacagaggcagcc

SEQ ID NO: 1652652 - RNA, 19 nt, Human
agugacagaggcagcccca

SEQ ID NO: 1652653 - RNA, 14 nt, Human
agugacagaggcag

SEQ ID NO: 1652654 - RNA, 19 nt, Human
aucuaggauuuuaagggaa

SEQ ID NO: 1652655 - RNA, 11 nt, Human
aucuaggauuu

SEQ ID NO: 1652656 - RNA, 23 nt, Human
aucuaggaagacuuuggaaagag

SEQ ID NO: 1652657 - RNA, 13 nt, Human
augaccuuucaau

SEQ ID NO: 1652658 - RNA, 15 nt, Human
augaccuuucaauag

SEQ ID NO: 1652659 - RNA, 18 nt, Human
augaccuuucaauaggaa

SEQ ID NO: 1652660 - RNA, 21 nt, Human
augagccucagcauccuggca

SEQ ID NO: 1652661 - RNA, 11 nt, Human
augagccuggc

SEQ ID NO: 1652662 - RNA, 12 nt, Human
augagccuggca

SEQ ID NO: 1652663 - RNA, 15 nt, Human
augagcugugagaag

SEQ ID NO: 1652664 - RNA, 18 nt, Human
augaaacuuguguaaaua

SEQ ID NO: 1652665 - RNA, 16 nt, Human
augaaacuuuuggaag

SEQ ID NO: 1652666 - RNA, 12 nt, Human
augaaagacugu

SEQ ID NO: 1652667 - RNA, 23 nt, Human
augaagcauuuacuuuguguuca

SEQ ID NO: 1652668 - RNA, 17 nt, Human
augaauaaagacaccua

SEQ ID NO: 1652669 - RNA, 21 nt, Human
augaaguaauaugcacacauu

SEQ ID NO: 1652670 - RNA, 14 nt, Human
augaaguaauaugc

SEQ ID NO: 1652671 - RNA, 23 nt, Human
augaaguaauaugcacacauuuu

SEQ ID NO: 1652672 - RNA, 13 nt, Human
augaaguacucau

SEQ ID NO: 1652673 - RNA, 12 nt, Human
augccugguggc

SEQ ID NO: 1652674 - RNA, 13 nt, Human
augccugguggca

SEQ ID NO: 1652675 - RNA, 14 nt, Human
augccugguggcag

SEQ ID NO: 1652676 - RNA, 19 nt, Human
augccugguggcagcugcg

SEQ ID NO: 1652677 - RNA, 18 nt, Human
augccugguggcagcugc

SEQ ID NO: 1652678 - RNA, 21 nt, Human
augccugguggcagcugcggu

SEQ ID NO: 1652679 - RNA, 24 nt, Human
augcauauuauuuuauguugcaua

SEQ ID NO: 1652680 - RNA, 16 nt, Human
augcuuugaucccuuc

SEQ ID NO: 1652681 - RNA, 18 nt, Human
augcucugcauguuacau

SEQ ID NO: 1652682 - RNA, 19 nt, Human
augcucugcauguuacaua

SEQ ID NO: 1652683 - RNA, 14 nt, Human
augcuucuucagag

SEQ ID NO: 1652684 - RNA, 17 nt, Human
augcuucuucagagacu

SEQ ID NO: 1652685 - RNA, 20 nt, Human
augcuucuucagagacuccu

SEQ ID NO: 1652686 - RNA, 22 nt, Human
augcuucuucagagacuccugc

SEQ ID NO: 1652687 - RNA, 20 nt, Human
augggacauuugcucaugga

SEQ ID NO: 1652688 - RNA, 15 nt, Human
augggacagggagga

SEQ ID NO: 1652689 - RNA, 14 nt, Human
augggaaagcauug

SEQ ID NO: 1652690 - RNA, 20 nt, Human
augggaaagcauuguaaaug

SEQ ID NO: 1652691 - RNA, 15 nt, Human
auggcuuuguauaga

SEQ ID NO: 1652692 - RNA, 16 nt, Human
auggcuuuguauagaa

SEQ ID NO: 1652693 - RNA, 18 nt, Human
auggcuuuguauagaacc

SEQ ID NO: 1652694 - RNA, 23 nt, Human
auggcuuccuggcaauagucaaa

SEQ ID NO: 1652695 - RNA, 22 nt, Human
aucuaggaagacuuuggaaaga

SEQ ID NO: 1652696 - RNA, 14 nt, Human
aucgaccugccucg

SEQ ID NO: 1652697 - RNA, 12 nt, Human
auccuugaagau

SEQ ID NO: 1652698 - RNA, 18 nt, Human
auccagcagauuauucac

SEQ ID NO: 1652699 - RNA, 23 nt, Human
auccacuuuaucuugaauaaugu

SEQ ID NO: 1652700 - RNA, 21 nt, Human
auccacugugccaugugccag

SEQ ID NO: 1652701 - RNA, 19 nt, Human
aucauggagguuugaagau

SEQ ID NO: 1652702 - RNA, 15 nt, Human
aucauccuaagcuau

SEQ ID NO: 1652703 - RNA, 20 nt, Human
aucaugacaaagacugagua

SEQ ID NO: 1652704 - RNA, 21 nt, Human
aucaugaauuaguuuuauaug

SEQ ID NO: 1652705 - RNA, 15 nt, Human
auagcacagacccug

SEQ ID NO: 1652706 - RNA, 14 nt, Human
auagcacagacccu

SEQ ID NO: 1652707 - RNA, 14 nt, Human
auauuuuuuucuga

SEQ ID NO: 1652708 - RNA, 16 nt, Human
auauuuuuuucugaaa

SEQ ID NO: 1652709 - RNA, 18 nt, Human
auauuuuuuucugaaauu

SEQ ID NO: 1652710 - RNA, 18 nt, Human
auauuuuuuucuuuucuu

SEQ ID NO: 1652711 - RNA, 19 nt, Human
auauuuuuuucugaaauuu

SEQ ID NO: 1652712 - RNA, 14 nt, Human
aucaaaagaaagaa

SEQ ID NO: 1652713 - RNA, 24 nt, Human
aucaaaagguuaauaaaguaauua

SEQ ID NO: 1652714 - RNA, 20 nt, Human
aucaaaagguuaauaaagua

SEQ ID NO: 1652715 - RNA, 19 nt, Human
aucaaagagguuuuaaaaa

SEQ ID NO: 1652716 - RNA, 12 nt, Human
aucaaaggacac

SEQ ID NO: 1652717 - RNA, 22 nt, Human
caagugaaaaaggaggaagaga

SEQ ID NO: 1652718 - RNA, 23 nt, Human
caagugaaaaaggaggaagagaa

SEQ ID NO: 1652719 - RNA, 14 nt, Human
caagugagacccug

SEQ ID NO: 1652720 - RNA, 21 nt, Human
caagugauucuccugccucag

SEQ ID NO: 1652721 - RNA, 20 nt, Human
caagugauucuccugccuca

SEQ ID NO: 1652722 - RNA, 15 nt, Human
caagugagacccugu

SEQ ID NO: 1652723 - RNA, 19 nt, Human
caagugagacccugucuca

SEQ ID NO: 1652724 - RNA, 19 nt, Human
caagugauucuccugccuc

SEQ ID NO: 1652725 - RNA, 18 nt, Human
caagugauucuccugccu

SEQ ID NO: 1652726 - RNA, 23 nt, Human
caaggggaauguuugccucugcc

SEQ ID NO: 1652727 - RNA, 13 nt, Human
caaggucauuuuu

SEQ ID NO: 1652728 - RNA, 13 nt, Human
caagggccuggcc

SEQ ID NO: 1652729 - RNA, 14 nt, Human
caagggccuggccu

SEQ ID NO: 1652730 - RNA, 15 nt, Human
caagggccuggccug

SEQ ID NO: 1652731 - RNA, 21 nt, Human
caaggggaauguuugccucug

SEQ ID NO: 1652732 - RNA, 16 nt, Human
caagggccuggccuga

SEQ ID NO: 1652733 - RNA, 18 nt, Human
caagagggcacugguggc

SEQ ID NO: 1652734 - RNA, 19 nt, Human
caagagggcacugguggcc

SEQ ID NO: 1652735 - RNA, 20 nt, Human
caagagggcacugguggccc

SEQ ID NO: 1652736 - RNA, 12 nt, Human
caagagggucug

SEQ ID NO: 1652737 - RNA, 16 nt, Human
caagagggucugagga

SEQ ID NO: 1652738 - RNA, 17 nt, Human
caagagggucugaggaa

SEQ ID NO: 1652739 - RNA, 23 nt, Human
caagacgcugugcugcccugccc

SEQ ID NO: 1652740 - RNA, 21 nt, Human
caagacgcugugcugcccugc

SEQ ID NO: 1652741 - RNA, 22 nt, Human
caagacgcugugcugcccugcc

SEQ ID NO: 1652742 - RNA, 20 nt, Human
caagacgcugugcugcccug

SEQ ID NO: 1652743 - RNA, 13 nt, Human
caagaccuucucc

SEQ ID NO: 1652744 - RNA, 15 nt, Human
caagaaaugaaagca

SEQ ID NO: 1652745 - RNA, 13 nt, Human
caagaaaugaaag

SEQ ID NO: 1652746 - RNA, 16 nt, Human
caaggacuaggguccu

SEQ ID NO: 1652747 - RNA, 18 nt, Human
caaggacuaggguccugg

SEQ ID NO: 1652748 - RNA, 19 nt, Human
caaggacuaggguccuggg

SEQ ID NO: 1652749 - RNA, 20 nt, Human
caaggacuaggguccugggg

SEQ ID NO: 1652750 - RNA, 21 nt, Human
caaggacuaggguccugggga

SEQ ID NO: 1652751 - RNA, 14 nt, Human
caaggauccugagc

SEQ ID NO: 1652752 - RNA, 15 nt, Human
caaggauccugagcc

SEQ ID NO: 1652753 - RNA, 16 nt, Human
caaggauccugagcca

SEQ ID NO: 1652754 - RNA, 17 nt, Human
caaggauccugagccag

SEQ ID NO: 1652755 - RNA, 21 nt, Human
caaggcugggggaagaagcuc

SEQ ID NO: 1652756 - RNA, 13 nt, Human
caaggcugucaau

SEQ ID NO: 1652757 - RNA, 14 nt, Human
caaggcugucaauu

SEQ ID NO: 1652758 - RNA, 21 nt, Human
caaggcugucaauuacaggaa

SEQ ID NO: 1652759 - RNA, 16 nt, Human
caagcauuuagaugua

SEQ ID NO: 1652760 - RNA, 19 nt, Human
caagcauuuagauguauag

SEQ ID NO: 1652761 - RNA, 21 nt, Human
caagcauaccaacacgagcag

SEQ ID NO: 1652762 - RNA, 16 nt, Human
caagcauaccaacacg

SEQ ID NO: 1652763 - RNA, 17 nt, Human
caaccugauugugucuc

SEQ ID NO: 1652764 - RNA, 19 nt, Human
caaccugauugugucucuu

SEQ ID NO: 1652765 - RNA, 21 nt, Human
caaccugauugugucucuugg

SEQ ID NO: 1652766 - RNA, 16 nt, Human
caacugcauuggcuuu

SEQ ID NO: 1652767 - RNA, 17 nt, Human
caacugcaucaagaugu

SEQ ID NO: 1652768 - RNA, 20 nt, Human
caacugcaucaagaugugac

SEQ ID NO: 1652769 - RNA, 23 nt, Human
caacugcaucaagaugugacaug

SEQ ID NO: 1652770 - RNA, 16 nt, Human
caacauacucccaucu

SEQ ID NO: 1652771 - RNA, 14 nt, Human
caacauacucccau

SEQ ID NO: 1652772 - RNA, 15 nt, Human
caacauacucccauc

SEQ ID NO: 1652773 - RNA, 17 nt, Human
caacaggcugggcuuca

SEQ ID NO: 1652774 - RNA, 17 nt, Human
caaauuuacagagacag

SEQ ID NO: 1652775 - RNA, 14 nt, Human
caacaggcugggcu

SEQ ID NO: 1652776 - RNA, 23 nt, Human
caaauuuacagagacagaaagca

SEQ ID NO: 1652777 - RNA, 18 nt, Human
caaaguugccuaaaucca

SEQ ID NO: 1652778 - RNA, 20 nt, Human
caacaggcugggcuucagug

SEQ ID NO: 1652779 - RNA, 17 nt, Human
caaauuguaagcaugca

SEQ ID NO: 1652780 - RNA, 15 nt, Human
caaaguugccuaaau

SEQ ID NO: 1652781 - RNA, 17 nt, Human
caaaguugccuaaaucc

SEQ ID NO: 1652782 - RNA, 14 nt, Human
caaaguugccuaaa

SEQ ID NO: 1652783 - RNA, 22 nt, Human
caaaguucccuacuuccuguga

SEQ ID NO: 1652784 - RNA, 19 nt, Human
caaaguggugagaggcauc

SEQ ID NO: 1652785 - RNA, 20 nt, Human
caaaggguaucaggugcugc

SEQ ID NO: 1652786 - RNA, 21 nt, Human
caaaggguaucaggugcugcc

SEQ ID NO: 1652787 - RNA, 23 nt, Human
caaaggguaucaggugcugccau

SEQ ID NO: 1652788 - RNA, 16 nt, Human
caaaguggugagaggc

SEQ ID NO: 1652789 - RNA, 17 nt, Human
caaaguggugagaggca

SEQ ID NO: 1652790 - RNA, 20 nt, Human
caaaggagauuggaaggaac

SEQ ID NO: 1652791 - RNA, 18 nt, Human
caaagcccuuccaugucg

SEQ ID NO: 1652792 - RNA, 14 nt, Human
caaaggagauugga

SEQ ID NO: 1652793 - RNA, 17 nt, Human
auuuuaacaacagcugg

SEQ ID NO: 1652794 - RNA, 18 nt, Human
auuuuaauaauguuucaa

SEQ ID NO: 1652795 - RNA, 19 nt, Human
auuuuaauaauguuucaaa

SEQ ID NO: 1652796 - RNA, 13 nt, Human
caaagcccagcuu

SEQ ID NO: 1652797 - RNA, 14 nt, Human
caaagagguuuuaa

SEQ ID NO: 1652798 - RNA, 21 nt, Human
caaagagguuuuaaaaaaauc

SEQ ID NO: 1652799 - RNA, 13 nt, Human
caaagaaauuaug

SEQ ID NO: 1652800 - RNA, 15 nt, Human
caaagaaauuaugug

SEQ ID NO: 1652801 - RNA, 12 nt, Human
caaagaaauuau

SEQ ID NO: 1652802 - RNA, 14 nt, Human
caaagaaauguaag

SEQ ID NO: 1652803 - RNA, 18 nt, Human
caaucucggcucacugca

SEQ ID NO: 1652804 - RNA, 21 nt, Human
caaugaccuuucaauaggaaa

SEQ ID NO: 1652805 - RNA, 13 nt, Human
caaugauggucac

SEQ ID NO: 1652806 - RNA, 15 nt, Human
caaugaccuuucaau

SEQ ID NO: 1652807 - RNA, 16 nt, Human
caaugaccuuucaaua

SEQ ID NO: 1652808 - RNA, 14 nt, Human
caaugaccuuucaa

SEQ ID NO: 1652809 - RNA, 14 nt, Human
caaugauggucacc

SEQ ID NO: 1652810 - RNA, 14 nt, Human
caaugcaaaccauc

SEQ ID NO: 1652811 - RNA, 21 nt, Human
caaugcaaaccaucauugaaa

SEQ ID NO: 1652812 - RNA, 22 nt, Human
caaugcaaaccaucauugaaau

SEQ ID NO: 1652813 - RNA, 23 nt, Human
caaugcaaaccaucauugaaauc

SEQ ID NO: 1652814 - RNA, 14 nt, Human
caaugcacugacau

SEQ ID NO: 1652815 - RNA, 13 nt, Human
caaugcacuuugu

SEQ ID NO: 1652816 - RNA, 14 nt, Human
cacacccagcccac

SEQ ID NO: 1652817 - RNA, 20 nt, Human
cacacccagcccacuucugc

SEQ ID NO: 1652818 - RNA, 16 nt, Human
cacacagcucuguccu

SEQ ID NO: 1652819 - RNA, 21 nt, Human
cacaccagagcccaccuuggc

SEQ ID NO: 1652820 - RNA, 22 nt, Human
cacaccagagcccaccuuggcu

SEQ ID NO: 1652821 - RNA, 22 nt, Human
cacacagauuugagcucagccc

SEQ ID NO: 1652822 - RNA, 13 nt, Human
cacacagcucugu

SEQ ID NO: 1652823 - RNA, 14 nt, Human
cacacagcucuguc

SEQ ID NO: 1652824 - RNA, 15 nt, Human
cacacagcucugucc

SEQ ID NO: 1652825 - RNA, 20 nt, Human
cacaaucucggcucacugca

SEQ ID NO: 1652826 - RNA, 22 nt, Human
cacaaucucggcucacugcauc

SEQ ID NO: 1652827 - RNA, 23 nt, Human
cacaaucucggcucacugcaucc

SEQ ID NO: 1652828 - RNA, 24 nt, Human
cacaaucucggcucacugcauccu

SEQ ID NO: 1652829 - RNA, 15 nt, Human
cacacaccagagccc

SEQ ID NO: 1652830 - RNA, 16 nt, Human
cacacaccagagccca

SEQ ID NO: 1652831 - RNA, 20 nt, Human
cacacaccagagcccaccuu

SEQ ID NO: 1652832 - RNA, 18 nt, Human
cacacagauuugagcuca

SEQ ID NO: 1652833 - RNA, 20 nt, Human
cacacagauuugagcucagc

SEQ ID NO: 1652834 - RNA, 14 nt, Human
cacacacuuuggcu

SEQ ID NO: 1652835 - RNA, 12 nt, Human
cacacacuuuug

SEQ ID NO: 1652836 - RNA, 14 nt, Human
caaugcacuuuguu

SEQ ID NO: 1652837 - RNA, 18 nt, Human
caaugguuuucuugugug

SEQ ID NO: 1652838 - RNA, 14 nt, Human
caauuuuguuucug

SEQ ID NO: 1652839 - RNA, 16 nt, Human
caauuuuguuucugua

SEQ ID NO: 1652840 - RNA, 17 nt, Human
caauuuuguuucuguac

SEQ ID NO: 1652841 - RNA, 13 nt, Human
caauuuuguuucu

SEQ ID NO: 1652842 - RNA, 17 nt, Human
cacaaacgggcucagca

SEQ ID NO: 1652843 - RNA, 13 nt, Human
cacaagaaaugaa

SEQ ID NO: 1652844 - RNA, 15 nt, Human
cacaagaaaugaaag

SEQ ID NO: 1652845 - RNA, 17 nt, Human
cacaaagguagcuuuuc

SEQ ID NO: 1652846 - RNA, 19 nt, Human
cacaaucucggcucacugc

SEQ ID NO: 1652847 - RNA, 23 nt, Human
cacaagaaaugaaagcagggacu

SEQ ID NO: 1652848 - RNA, 23 nt, Human
cacaagacccaaaaggcagaagc

SEQ ID NO: 1652849 - RNA, 13 nt, Human
cacccaagggccu

SEQ ID NO: 1652850 - RNA, 13 nt, Human
caccaucaagcca

SEQ ID NO: 1652851 - RNA, 14 nt, Human
caccaucaagccac

SEQ ID NO: 1652852 - RNA, 15 nt, Human
caccaucaagccacc

SEQ ID NO: 1652853 - RNA, 18 nt, Human
caccauaggucaccuuua

SEQ ID NO: 1652854 - RNA, 21 nt, Human
caccauauuaccacagacaua

SEQ ID NO: 1652855 - RNA, 19 nt, Human
caccauguuggccaggcug

SEQ ID NO: 1652856 - RNA, 20 nt, Human
caccauguuggccaggcugc

SEQ ID NO: 1652857 - RNA, 20 nt, Human
caccauguuggccaggcugg

SEQ ID NO: 1652858 - RNA, 16 nt, Human
caccaucaagccacca

SEQ ID NO: 1652859 - RNA, 17 nt, Human
caccaucaagccaccaa

SEQ ID NO: 1652860 - RNA, 19 nt, Human
caccaucaagccaccaaca

SEQ ID NO: 1652861 - RNA, 24 nt, Human
caccaucaagccaccaacauacuc

SEQ ID NO: 1652862 - RNA, 15 nt, Human
caccaucaugucugg

SEQ ID NO: 1652863 - RNA, 17 nt, Human
caccaucaugucuggcu

SEQ ID NO: 1652864 - RNA, 18 nt, Human
caccaucaugucuggcua

SEQ ID NO: 1652865 - RNA, 13 nt, Human
caccaagcccagu

SEQ ID NO: 1652866 - RNA, 12 nt, Human
caccaagcccag

SEQ ID NO: 1652867 - RNA, 23 nt, Human
cacauguccaagaagcccaggaa

SEQ ID NO: 1652868 - RNA, 17 nt, Human
caccaacgucugugcca

SEQ ID NO: 1652869 - RNA, 18 nt, Human
cacauguccaagaagccc

SEQ ID NO: 1652870 - RNA, 19 nt, Human
cacauguccaagaagccca

SEQ ID NO: 1652871 - RNA, 21 nt, Human
cacauguccaagaagcccagg

SEQ ID NO: 1652872 - RNA, 22 nt, Human
cacauguccaagaagcccagga

SEQ ID NO: 1652873 - RNA, 14 nt, Human
caccacgcccggcu

SEQ ID NO: 1652874 - RNA, 15 nt, Human
caccacgcccggcua

SEQ ID NO: 1652875 - RNA, 19 nt, Human
caccacacccagcccacuu

SEQ ID NO: 1652876 - RNA, 17 nt, Human
caccagagcccaccuug

SEQ ID NO: 1652877 - RNA, 18 nt, Human
caccagagcccaccuugg

SEQ ID NO: 1652878 - RNA, 20 nt, Human
caccagagcccaccuuggcu

SEQ ID NO: 1652879 - RNA, 22 nt, Human
caccagagcccaccuuggcuca

SEQ ID NO: 1652880 - RNA, 15 nt, Human
caccagagcccaccu

SEQ ID NO: 1652881 - RNA, 22 nt, Human
cacacggacacucaaaagcugg

SEQ ID NO: 1652882 - RNA, 14 nt, Human
cacaggcccggcuc

SEQ ID NO: 1652883 - RNA, 23 nt, Human
cacaguccuuaccagcagagcac

SEQ ID NO: 1652884 - RNA, 15 nt, Human
cacaggacucugccu

SEQ ID NO: 1652885 - RNA, 16 nt, Human
cacaggacucugccuc

SEQ ID NO: 1652886 - RNA, 21 nt, Human
cacagcucuucuccaggcugu

SEQ ID NO: 1652887 - RNA, 19 nt, Human
cacagcucuucuccaggcu

SEQ ID NO: 1652888 - RNA, 20 nt, Human
cacagcucuucuccaggcug

SEQ ID NO: 1652889 - RNA, 19 nt, Human
cacaugcaaggucauuuuu

SEQ ID NO: 1652890 - RNA, 17 nt, Human
cacaugcaaggucauuu

SEQ ID NO: 1652891 - RNA, 20 nt, Human
cacaugcaaggucauuuuuu

SEQ ID NO: 1652892 - RNA, 18 nt, Human
cacaugcacgugugugca

SEQ ID NO: 1652893 - RNA, 16 nt, Human
cacauguccaagaagc

SEQ ID NO: 1652894 - RNA, 17 nt, Human
cacauguccaagaagcc

SEQ ID NO: 1652895 - RNA, 20 nt, Human
cacaugccucucucaggcca

SEQ ID NO: 1652896 - RNA, 21 nt, Human
cacaugccucucucaggccaa

SEQ ID NO: 1652897 - RNA, 13 nt, Human
cacaugagcauca

SEQ ID NO: 1652898 - RNA, 17 nt, Human
cacaugagcaucaggcc

SEQ ID NO: 1652899 - RNA, 20 nt, Human
cacaguuuugguugcuuuaa

SEQ ID NO: 1652900 - RNA, 23 nt, Human
cacaguuuugguugcuuuaauau

SEQ ID NO: 1652901 - RNA, 18 nt, Human
cacaugagcaucaggcca

SEQ ID NO: 1652902 - RNA, 19 nt, Human
cacaugagcaucaggccag

SEQ ID NO: 1652903 - RNA, 20 nt, Human
cacaugagcaucaggccagg

SEQ ID NO: 1652904 - RNA, 21 nt, Human
cacaugagcaucaggccaggc

SEQ ID NO: 1652905 - RNA, 16 nt, Human
cacaugaaguccaagc

SEQ ID NO: 1652906 - RNA, 19 nt, Human
cacaguuuugguugcuuua

SEQ ID NO: 1652907 - RNA, 17 nt, Human
cacaugaaguccaagca

SEQ ID NO: 1652908 - RNA, 20 nt, Human
cacaugaaguccaagcauuu

SEQ ID NO: 1652909 - RNA, 21 nt, Human
cacaguuuucugagaaagacu

SEQ ID NO: 1652910 - RNA, 22 nt, Human
cacaguuuucugagaaagacua

SEQ ID NO: 1652911 - RNA, 13 nt, Human
uuuuuucuuacug

SEQ ID NO: 1652912 - RNA, 13 nt, Human
uuuugaaaaacug

SEQ ID NO: 1652913 - RNA, 12 nt, Human
uuuuuuacuaau

SEQ ID NO: 1652914 - RNA, 14 nt, Human
uuuuucuguuauau

SEQ ID NO: 1652915 - RNA, 23 nt, Human
uuuuucuuaaauaauaaagauca

SEQ ID NO: 1652916 - RNA, 20 nt, Human
uuuuuuauacaggaugauga

SEQ ID NO: 1652917 - RNA, 12 nt, Human
uuuuuucugaaa

SEQ ID NO: 1652918 - RNA, 17 nt, Human
uuuuuuccuucagugcc

SEQ ID NO: 1652919 - RNA, 22 nt, Human
uuucuuacugucuuuuuucuaa

SEQ ID NO: 1652920 - RNA, 15 nt, Human
uuugagcagggcuca

SEQ ID NO: 1652921 - RNA, 13 nt, Human
uuugagugccuua

SEQ ID NO: 1652922 - RNA, 20 nt, Human
uuugagguuuuuaagccuua

SEQ ID NO: 1652923 - RNA, 14 nt, Human
uuugagcucagccc

SEQ ID NO: 1652924 - RNA, 22 nt, Human
uuugaggucuguucuuuccaaa

SEQ ID NO: 1652925 - RNA, 17 nt, Human
uuugaggucuguucuuu

SEQ ID NO: 1652926 - RNA, 19 nt, Human
uuugcauaacguauaaaag

SEQ ID NO: 1652927 - RNA, 23 nt, Human
uuugcauaacguauaaaagccug

SEQ ID NO: 1652928 - RNA, 14 nt, Human
uuugcagacaggca

SEQ ID NO: 1652929 - RNA, 15 nt, Human
uuugccagugggaac

SEQ ID NO: 1652930 - RNA, 16 nt, Human
uuugccagugggaacu

SEQ ID NO: 1652931 - RNA, 21 nt, Human
uuugcauagauucccugagca

SEQ ID NO: 1652932 - RNA, 22 nt, Human
uuugcauaggugaucucauuua

SEQ ID NO: 1652933 - RNA, 16 nt, Human
uuuggaaaucuuuaaa

SEQ ID NO: 1652934 - RNA, 22 nt, Human
uuugccauguuggccaggcugg

SEQ ID NO: 1652935 - RNA, 18 nt, Human
uuugccauguuggccagg

SEQ ID NO: 1652936 - RNA, 17 nt, Human
uuuguaaauuaacuuuu

SEQ ID NO: 1652937 - RNA, 16 nt, Human
uuuguaaauuaacuuu

SEQ ID NO: 1652938 - RNA, 15 nt, Human
uuuguaaauuaacuu

SEQ ID NO: 1652939 - RNA, 22 nt, Human
uuugguuaagucuguuuuauga

SEQ ID NO: 1652940 - RNA, 18 nt, Human
uuugguuaagucuguuuu

SEQ ID NO: 1652941 - RNA, 19 nt, Human
uuugguuaagucuguuuua

SEQ ID NO: 1652942 - RNA, 20 nt, Human
uuugguuaagucuguuuuau

SEQ ID NO: 1652943 - RNA, 11 nt, Human
uuuguauagaa

SEQ ID NO: 1652944 - RNA, 22 nt, Human
uuuguaaauuaacuuuuauaaa

SEQ ID NO: 1652945 - RNA, 21 nt, Human
uuuguauaaaauaauuuuuau

SEQ ID NO: 1652946 - RNA, 12 nt, Human
uuuguguuagag

SEQ ID NO: 1652947 - RNA, 13 nt, Human
uuuguccccaccg

SEQ ID NO: 1652948 - RNA, 21 nt, Human
uuuguccccaccgcagacagg

SEQ ID NO: 1652949 - RNA, 12 nt, Human
uuuguuguuugu

SEQ ID NO: 1652950 - RNA, 14 nt, Human
uuuguuguuuguuu

SEQ ID NO: 1652951 - RNA, 19 nt, Human
uuuguuguuuguuuagucu

SEQ ID NO: 1652952 - RNA, 15 nt, Human
uuuuaaaaugagaaa

SEQ ID NO: 1652953 - RNA, 22 nt, Human
uuuuaaaaugagaaaucuaaaa

SEQ ID NO: 1652954 - RNA, 16 nt, Human
uuuuacagcugccugc

SEQ ID NO: 1652955 - RNA, 22 nt, Human
uuuuacauaaauuuaguauuuu

SEQ ID NO: 1652956 - RNA, 17 nt, Human
uuuuaauuugguuuuca

SEQ ID NO: 1652957 - RNA, 21 nt, Human
uuuuaauuugguuuucacauu

SEQ ID NO: 1652958 - RNA, 14 nt, Human
uuuuacuguacaga

SEQ ID NO: 1652959 - RNA, 15 nt, Human
uuuuauaugcuucug

SEQ ID NO: 1652960 - RNA, 20 nt, Human
uuuuauaugcuucuguuuua

SEQ ID NO: 1652961 - RNA, 20 nt, Human
uuuuauaucaauuuaaaaaa

SEQ ID NO: 1652962 - RNA, 16 nt, Human
uuuuaugauacuugaa

SEQ ID NO: 1652963 - RNA, 20 nt, Human
uuuuaugauacuugaaaauu

SEQ ID NO: 1652964 - RNA, 18 nt, Human
uuuuaucgucacugcuua

SEQ ID NO: 1652965 - RNA, 19 nt, Human
uuuuaucgucacugcuuaa

SEQ ID NO: 1652966 - RNA, 10 nt, Human
uuuuauauuu

SEQ ID NO: 1652967 - RNA, 17 nt, Human
uuuucaacgcagcccug

SEQ ID NO: 1652968 - RNA, 21 nt, Human
uuuucaacgcagcccugcuuu

SEQ ID NO: 1652969 - RNA, 22 nt, Human
uuuucaacgcagcccugcuuug

SEQ ID NO: 1652970 - RNA, 15 nt, Human
uuuuaugauccagca

SEQ ID NO: 1652971 - RNA, 13 nt, Human
uuuuaugauccag

SEQ ID NO: 1652972 - RNA, 15 nt, Human
uuuucacaguucucu

SEQ ID NO: 1652973 - RNA, 19 nt, Human
uuuucacugcuggcugccu

SEQ ID NO: 1652974 - RNA, 20 nt, Human
uuuucacugcuggcugccuu

SEQ ID NO: 1652975 - RNA, 15 nt, Human
uuuuccuucagugcc

SEQ ID NO: 1652976 - RNA, 17 nt, Human
uuuucuugcaugaggcu

SEQ ID NO: 1652977 - RNA, 14 nt, Human
uuuucuucucccuc

SEQ ID NO: 1652978 - RNA, 13 nt, Human
uuuuccugaaaac

SEQ ID NO: 1652979 - RNA, 18 nt, Human
uuuuccaugaguccccug

SEQ ID NO: 1652980 - RNA, 19 nt, Human
uuuuccaugaguccccugu

SEQ ID NO: 1652981 - RNA, 16 nt, Human
uuucuaggacugaauu

SEQ ID NO: 1652982 - RNA, 15 nt, Human
uuucuaaugugugaa

SEQ ID NO: 1652983 - RNA, 15 nt, Human
uuucuagccagagga

SEQ ID NO: 1652984 - RNA, 14 nt, Human
uuucucuuucguua

SEQ ID NO: 1652985 - RNA, 22 nt, Human
uuucugagaaagacuauucaaa

SEQ ID NO: 1652986 - RNA, 18 nt, Human
uuucuaaaggcuaccuuu

SEQ ID NO: 1652987 - RNA, 14 nt, Human
uuucuaaaggcuac

SEQ ID NO: 1652988 - RNA, 14 nt, Human
uuucuaaagcugcc

SEQ ID NO: 1652989 - RNA, 17 nt, Human
uuucuaaagcugccagc

SEQ ID NO: 1652990 - RNA, 23 nt, Human
uuuccugacagaaggacucaggu

SEQ ID NO: 1652991 - RNA, 21 nt, Human
uuuccucuuuggucuacacug

SEQ ID NO: 1652992 - RNA, 22 nt, Human
uuuccucaaaacuucagacaua

SEQ ID NO: 1652993 - RNA, 18 nt, Human
uuuccuagcacacacuuu

SEQ ID NO: 1652994 - RNA, 21 nt, Human
uuuccuagcacacacuuuugg

SEQ ID NO: 1652995 - RNA, 13 nt, Human
uuuauuuccagug

SEQ ID NO: 1652996 - RNA, 20 nt, Human
uuucaauaggaaaaacugau

SEQ ID NO: 1652997 - RNA, 22 nt, Human
uuucaauaggaaaaacugauuu

SEQ ID NO: 1652998 - RNA, 15 nt, Human
uuucagauaaucaca

SEQ ID NO: 1652999 - RNA, 15 nt, Human
uuucagcagcugcag

SEQ ID NO: 1653000 - RNA, 21 nt, Human
uuucagauaaucacaauacau

SEQ ID NO: 1653001 - RNA, 18 nt, Human
uuucagauaacuguuauu

SEQ ID NO: 1653002 - RNA, 15 nt, Human
uuucagccaagaauu

SEQ ID NO: 1653003 - RNA, 16 nt, Human
uuucagccaagaauuc

SEQ ID NO: 1653004 - RNA, 22 nt, Human
uuucauugcugggcuugucugu

SEQ ID NO: 1653005 - RNA, 13 nt, Human
uuuccaggaaggc

SEQ ID NO: 1653006 - RNA, 15 nt, Human
uuuccaaaguacacu

SEQ ID NO: 1653007 - RNA, 12 nt, Human
uuuccaaaguac

SEQ ID NO: 1653008 - RNA, 13 nt, Human
uuuaugauccagc

SEQ ID NO: 1653009 - RNA, 21 nt, Human
uuuaucgucacugcuuaacuu

SEQ ID NO: 1653010 - RNA, 16 nt, Human
uuuauaaacuuuaccu

SEQ ID NO: 1653011 - RNA, 16 nt, Human
uuuaucgucacugcuu

SEQ ID NO: 1653012 - RNA, 14 nt, Human
uuuauaaacuuuac

SEQ ID NO: 1653013 - RNA, 14 nt, Human
uuuaugcauauuau

SEQ ID NO: 1653014 - RNA, 17 nt, Human
uuuauuggcuuuucuga

SEQ ID NO: 1653015 - RNA, 21 nt, Human
uuuauuggcuuuucugaucca

SEQ ID NO: 1653016 - RNA, 14 nt, Human
uuuauugucaaagu

SEQ ID NO: 1653017 - RNA, 16 nt, Human
uuuauugucaaagugg

SEQ ID NO: 1653018 - RNA, 22 nt, Human
uuuauuguuuaaaaucauuucu

SEQ ID NO: 1653019 - RNA, 17 nt, Human
uuuacauggcuggagcu

SEQ ID NO: 1653020 - RNA, 15 nt, Human
uuguauuuauuuagu

SEQ ID NO: 1653021 - RNA, 20 nt, Human
uuguauuuuacuaauaaaau

SEQ ID NO: 1653022 - RNA, 20 nt, Human
uuuagaaacacaacuauauu

SEQ ID NO: 1653023 - RNA, 12 nt, Human
uuuagaaacaca

SEQ ID NO: 1653024 - RNA, 15 nt, Human
uuuacuuuguguuca

SEQ ID NO: 1653025 - RNA, 22 nt, Human
uuuacauggcuggagcuagaau

SEQ ID NO: 1653026 - RNA, 14 nt, Human
uucucaugccucag

SEQ ID NO: 1653027 - RNA, 21 nt, Human
uucucaugccucagccuccug

SEQ ID NO: 1653028 - RNA, 11 nt, Human
uucucaugccu

SEQ ID NO: 1653029 - RNA, 12 nt, Human
uucucaugccuc

SEQ ID NO: 1653030 - RNA, 14 nt, Human
uucuauuguuucuu

SEQ ID NO: 1653031 - RNA, 17 nt, Human
uucuaugcugaguuugu

SEQ ID NO: 1653032 - RNA, 11 nt, Human
uucuauauuuu

SEQ ID NO: 1653033 - RNA, 14 nt, Human
uucuauauuuucau

SEQ ID NO: 1653034 - RNA, 14 nt, Human
uucuauauguuuaa

SEQ ID NO: 1653035 - RNA, 15 nt, Human
uucuauauuuucauu

SEQ ID NO: 1653036 - RNA, 16 nt, Human
uucuauauuuucauuc

SEQ ID NO: 1653037 - RNA, 18 nt, Human
uucuauauuuucauucuc

SEQ ID NO: 1653038 - RNA, 21 nt, Human
uucuauauuuucauucuccua

SEQ ID NO: 1653039 - RNA, 17 nt, Human
uucuaugacacaugcaa

SEQ ID NO: 1653040 - RNA, 16 nt, Human
uucuaugacacaugca

SEQ ID NO: 1653041 - RNA, 14 nt, Human
uucucugauacaga

SEQ ID NO: 1653042 - RNA, 15 nt, Human
uucucugauacagaa

SEQ ID NO: 1653043 - RNA, 16 nt, Human
uucucugauacagaaa

SEQ ID NO: 1653044 - RNA, 17 nt, Human
uucucugauacagaaaa

SEQ ID NO: 1653045 - RNA, 21 nt, Human
uucugacccaugcugcccugu

SEQ ID NO: 1653046 - RNA, 18 nt, Human
uucugacccaugcugccc

SEQ ID NO: 1653047 - RNA, 20 nt, Human
uucugacccaugcugcccug

SEQ ID NO: 1653048 - RNA, 16 nt, Human
uucuccacccugcucu

SEQ ID NO: 1653049 - RNA, 11 nt, Human
uucuccaggcu

SEQ ID NO: 1653050 - RNA, 16 nt, Human
uucuccaagcaggaca

SEQ ID NO: 1653051 - RNA, 13 nt, Human
uucuccacccugc

SEQ ID NO: 1653052 - RNA, 18 nt, Human
uucucuccagccccugga

SEQ ID NO: 1653053 - RNA, 23 nt, Human
uucucuccucuccccaugauguu

SEQ ID NO: 1653054 - RNA, 19 nt, Human
uucccuuugacgccauccc

SEQ ID NO: 1653055 - RNA, 17 nt, Human
uuccuagcacacacuuu

SEQ ID NO: 1653056 - RNA, 22 nt, Human
uuccccacuugagaauuacccu

SEQ ID NO: 1653057 - RNA, 22 nt, Human
uuccucccucccucuuucccuc

SEQ ID NO: 1653058 - RNA, 12 nt, Human
uuccucccuccc

SEQ ID NO: 1653059 - RNA, 19 nt, Human
uuccucccucccucuuucc

SEQ ID NO: 1653060 - RNA, 21 nt, Human
uuccucccucccucuuucccu

SEQ ID NO: 1653061 - RNA, 23 nt, Human
uuccucauaguaugguggcuggg

SEQ ID NO: 1653062 - RNA, 20 nt, Human
uuccuagguauaauucacau

SEQ ID NO: 1653063 - RNA, 19 nt, Human
uuccuagcacacacuuuug

SEQ ID NO: 1653064 - RNA, 12 nt, Human
uuccuagugaaa

SEQ ID NO: 1653065 - RNA, 16 nt, Human
uucuaaaggcuaccuu

SEQ ID NO: 1653066 - RNA, 18 nt, Human
uucuaaaggcuaccuuug

SEQ ID NO: 1653067 - RNA, 17 nt, Human
uucuaaaggcuaccuuu

SEQ ID NO: 1653068 - RNA, 19 nt, Human
uucuaaaggcuaccuuugu

SEQ ID NO: 1653069 - RNA, 22 nt, Human
uucggccuccauccugaggcuc

SEQ ID NO: 1653070 - RNA, 18 nt, Human
uucggccuccauccugag

SEQ ID NO: 1653071 - RNA, 19 nt, Human
uucggccuccauccugagg

SEQ ID NO: 1653072 - RNA, 13 nt, Human
uuccugcccuggg

SEQ ID NO: 1653073 - RNA, 16 nt, Human
uuccugcccugggagg

SEQ ID NO: 1653074 - RNA, 22 nt, Human
uuccugcccugggaggcaguga

SEQ ID NO: 1653075 - RNA, 11 nt, Human
uuccugcccug

SEQ ID NO: 1653076 - RNA, 16 nt, Human
uuccuucagugccuua

SEQ ID NO: 1653077 - RNA, 19 nt, Human
uuccuucagugccuuaugg

SEQ ID NO: 1653078 - RNA, 23 nt, Human
uuccuucagugccuuauggaaca

SEQ ID NO: 1653079 - RNA, 19 nt, Human
uuccuucauucaacccacc

SEQ ID NO: 1653080 - RNA, 13 nt, Human
uuccuuccucuga

SEQ ID NO: 1653081 - RNA, 17 nt, Human
uuccuuccucugagccu

SEQ ID NO: 1653082 - RNA, 19 nt, Human
uucaaugccccugaauuua

SEQ ID NO: 1653083 - RNA, 18 nt, Human
uucaauucucauuuguca

SEQ ID NO: 1653084 - RNA, 14 nt, Human
uucaacgcagcccu

SEQ ID NO: 1653085 - RNA, 15 nt, Human
uucaacgcagcccug

SEQ ID NO: 1653086 - RNA, 16 nt, Human
uucaaucccaggaugu

SEQ ID NO: 1653087 - RNA, 17 nt, Human
uucaaccauuccccaug

SEQ ID NO: 1653088 - RNA, 20 nt, Human
uucaaccauuccccauggga

SEQ ID NO: 1653089 - RNA, 13 nt, Human
uucaacgcagccc

SEQ ID NO: 1653090 - RNA, 21 nt, Human
uucaacagguuuuccugaaga

SEQ ID NO: 1653091 - RNA, 16 nt, Human
uuacuaaaauggacug

SEQ ID NO: 1653092 - RNA, 17 nt, Human
uuacuaaaauggacugu

SEQ ID NO: 1653093 - RNA, 18 nt, Human
uuacuaaaauggacugug

SEQ ID NO: 1653094 - RNA, 15 nt, Human
uuacuaaaauggacu

SEQ ID NO: 1653095 - RNA, 13 nt, Human
uuacgugaguccu

SEQ ID NO: 1653096 - RNA, 14 nt, Human
uuacgugaguccug

SEQ ID NO: 1653097 - RNA, 23 nt, Human
uucaaauuguaagcaugcacaaa

SEQ ID NO: 1653098 - RNA, 15 nt, Human
uucaaagcaaauguc

SEQ ID NO: 1653099 - RNA, 13 nt, Human
uucaaagauauuu

SEQ ID NO: 1653100 - RNA, 23 nt, Human
uucagcuccagcucaccagcccc

SEQ ID NO: 1653101 - RNA, 17 nt, Human
uucagcucugcaagaau

SEQ ID NO: 1653102 - RNA, 24 nt, Human
uucagcucugcaagaauugaagca

SEQ ID NO: 1653103 - RNA, 21 nt, Human
uucagcugguugagguuucaa

SEQ ID NO: 1653104 - RNA, 16 nt, Human
uucaggaagcucaggg

SEQ ID NO: 1653105 - RNA, 18 nt, Human
uucagcugcauacaguuu

SEQ ID NO: 1653106 - RNA, 17 nt, Human
uucagcugacuuuucug

SEQ ID NO: 1653107 - RNA, 15 nt, Human
uucaggcucuucucc

SEQ ID NO: 1653108 - RNA, 20 nt, Human
uucaggaagcucagggccug

SEQ ID NO: 1653109 - RNA, 17 nt, Human
uucaggaagcucagggc

SEQ ID NO: 1653110 - RNA, 19 nt, Human
uucaggaagcucagggccu

SEQ ID NO: 1653111 - RNA, 14 nt, Human
uucacucuccuugg

SEQ ID NO: 1653112 - RNA, 11 nt, Human
uucacugauuu

SEQ ID NO: 1653113 - RNA, 15 nt, Human
uucagagacuccugc

SEQ ID NO: 1653114 - RNA, 23 nt, Human
uucagagcugcccucuccugggc

SEQ ID NO: 1653115 - RNA, 22 nt, Human
uucagagcugcccucuccuggg

SEQ ID NO: 1653116 - RNA, 21 nt, Human
uucagagcugcccucuccugg

SEQ ID NO: 1653117 - RNA, 15 nt, Human
uucaucuaggauuuu

SEQ ID NO: 1653118 - RNA, 13 nt, Human
uucauaaugacuu

SEQ ID NO: 1653119 - RNA, 23 nt, Human
uucauaaugacuuaagcacacuu

SEQ ID NO: 1653120 - RNA, 16 nt, Human
uucaggcucuucuccu

SEQ ID NO: 1653121 - RNA, 19 nt, Human
uucagugccuuauggaaca

SEQ ID NO: 1653122 - RNA, 21 nt, Human
uucagugccuuauggaacacu

SEQ ID NO: 1653123 - RNA, 13 nt, Human
uucaguggcagcu

SEQ ID NO: 1653124 - RNA, 19 nt, Human
uucauuuaggugaggaagc

SEQ ID NO: 1653125 - RNA, 20 nt, Human
uucaucuuccaacucaaacu

SEQ ID NO: 1653126 - RNA, 11 nt, Human
uucaucuugaa

SEQ ID NO: 1653127 - RNA, 18 nt, Human
uucaugaaagauucaaug

SEQ ID NO: 1653128 - RNA, 12 nt, Human
uucaucuugaau

SEQ ID NO: 1653129 - RNA, 17 nt, Human
uucaucuugaauuguaa

SEQ ID NO: 1653130 - RNA, 20 nt, Human
uuccaugucgccucugcauu

SEQ ID NO: 1653131 - RNA, 21 nt, Human
uuccaugucgccucugcauuc

SEQ ID NO: 1653132 - RNA, 14 nt, Human
uuccccaagacauu

SEQ ID NO: 1653133 - RNA, 17 nt, Human
uuccaugucgccucugc

SEQ ID NO: 1653134 - RNA, 18 nt, Human
uuccaugucgccucugca

SEQ ID NO: 1653135 - RNA, 19 nt, Human
uuccaugucgccucugcau

SEQ ID NO: 1653136 - RNA, 17 nt, Human
uuccaugaguccccugu

SEQ ID NO: 1653137 - RNA, 21 nt, Human
uuccacuuagaaauugcauuu

SEQ ID NO: 1653138 - RNA, 19 nt, Human
uuccacuuauaggaauuga

SEQ ID NO: 1653139 - RNA, 12 nt, Human
uugcugccucau

SEQ ID NO: 1653140 - RNA, 15 nt, Human
uugcugccucaugcu

SEQ ID NO: 1653141 - RNA, 11 nt, Human
uugcugccuca

SEQ ID NO: 1653142 - RNA, 20 nt, Human
uugcugauggugcaaugacc

SEQ ID NO: 1653143 - RNA, 22 nt, Human
uugcugauggugcaaugaccuu

SEQ ID NO: 1653144 - RNA, 16 nt, Human
uugccucugccucuga

SEQ ID NO: 1653145 - RNA, 18 nt, Human
uugccucugccucugaca

SEQ ID NO: 1653146 - RNA, 11 nt, Human
uugccucugcc

SEQ ID NO: 1653147 - RNA, 14 nt, Human
uugccucugccucu

SEQ ID NO: 1653148 - RNA, 18 nt, Human
uugccacugccucuuccu

SEQ ID NO: 1653149 - RNA, 18 nt, Human
uugccagucaccccggcc

SEQ ID NO: 1653150 - RNA, 23 nt, Human
uugcccacgcuggagugcaguga

SEQ ID NO: 1653151 - RNA, 11 nt, Human
uugcccaggca

SEQ ID NO: 1653152 - RNA, 12 nt, Human
uuggaaaucuuu

SEQ ID NO: 1653153 - RNA, 15 nt, Human
uuggaaaucuuuaaa

SEQ ID NO: 1653154 - RNA, 20 nt, Human
uugcuggggccgaaagaaca

SEQ ID NO: 1653155 - RNA, 21 nt, Human
uuggaccaaaaaccaguauug

SEQ ID NO: 1653156 - RNA, 11 nt, Human
uuggaaggaac

SEQ ID NO: 1653157 - RNA, 19 nt, Human
uuggaaggaacguccccug

SEQ ID NO: 1653158 - RNA, 14 nt, Human
uuggauuguccccg

SEQ ID NO: 1653159 - RNA, 17 nt, Human
uuggcaaaaaggcagga

SEQ ID NO: 1653160 - RNA, 13 nt, Human
uuggcauucccca

SEQ ID NO: 1653161 - RNA, 14 nt, Human
uuggccaggcuggu

SEQ ID NO: 1653162 - RNA, 24 nt, Human
uuggccaaagccaaagcuaggccu

SEQ ID NO: 1653163 - RNA, 18 nt, Human
uuggcugggggccucagu

SEQ ID NO: 1653164 - RNA, 21 nt, Human
uuggcugggggccucagugcc

SEQ ID NO: 1653165 - RNA, 22 nt, Human
uuggcugggggccucagugcca

SEQ ID NO: 1653166 - RNA, 12 nt, Human
uugguaaaccuu

SEQ ID NO: 1653167 - RNA, 14 nt, Human
uugguaaaccuuuu

SEQ ID NO: 1653168 - RNA, 16 nt, Human
uuggguggaugccugg

SEQ ID NO: 1653169 - RNA, 19 nt, Human
uuggcuuuucugauccagu

SEQ ID NO: 1653170 - RNA, 22 nt, Human
uuggcuuuucugauccaguuuu

SEQ ID NO: 1653171 - RNA, 15 nt, Human
uuggcuuuucugauc

SEQ ID NO: 1653172 - RNA, 22 nt, Human
uuggcuuuggguugcaggaccu

SEQ ID NO: 1653173 - RNA, 16 nt, Human
uugggaggccauuugu

SEQ ID NO: 1653174 - RNA, 12 nt, Human
uugggaggcuga

SEQ ID NO: 1653175 - RNA, 22 nt, Human
uuggucccccuuccauggacuu

SEQ ID NO: 1653176 - RNA, 16 nt, Human
uuggucccccuuccau

SEQ ID NO: 1653177 - RNA, 12 nt, Human
uugguccugcug

SEQ ID NO: 1653178 - RNA, 13 nt, Human
uugguccugcugc

SEQ ID NO: 1653179 - RNA, 16 nt, Human
uuguaaaggaauuuaa

SEQ ID NO: 1653180 - RNA, 12 nt, Human
uuguacagacaa

SEQ ID NO: 1653181 - RNA, 13 nt, Human
uuguacagacaac

SEQ ID NO: 1653182 - RNA, 11 nt, Human
uuguaaaugug

SEQ ID NO: 1653183 - RNA, 14 nt, Human
uuguaaaugugcuu

SEQ ID NO: 1653184 - RNA, 18 nt, Human
uuguaaaugugcuuuuaa

SEQ ID NO: 1653185 - RNA, 14 nt, Human
uuguauucagaguu

SEQ ID NO: 1653186 - RNA, 21 nt, Human
uuguauucucuccuguaccuc

SEQ ID NO: 1653187 - RNA, 14 nt, Human
uuguacauaaugcg

SEQ ID NO: 1653188 - RNA, 14 nt, Human
uuguagagccaggg

SEQ ID NO: 1653189 - RNA, 15 nt, Human
uuguagagccagggu

SEQ ID NO: 1653190 - RNA, 19 nt, Human
uuguaucacaaaucuuaac

SEQ ID NO: 1653191 - RNA, 14 nt, Human
uugacgccauccca

SEQ ID NO: 1653192 - RNA, 15 nt, Human
uugacgccaucccag

SEQ ID NO: 1653193 - RNA, 22 nt, Human
uugacgccaucccagccccaau

SEQ ID NO: 1653194 - RNA, 22 nt, Human
uugaccugaggcccuucucucc

SEQ ID NO: 1653195 - RNA, 12 nt, Human
uugaccugaggc

SEQ ID NO: 1653196 - RNA, 19 nt, Human
uugaccugaggcccuucuc

SEQ ID NO: 1653197 - RNA, 20 nt, Human
uugaccgugaggccagagac

SEQ ID NO: 1653198 - RNA, 21 nt, Human
uugaccgugaggccagagaca

SEQ ID NO: 1653199 - RNA, 15 nt, Human
uugaccucaggugau

SEQ ID NO: 1653200 - RNA, 21 nt, Human
uugaccucaggugauccaccc

SEQ ID NO: 1653201 - RNA, 19 nt, Human
uugauagcacagacccugc

SEQ ID NO: 1653202 - RNA, 20 nt, Human
uugauagcacagacccugcc

SEQ ID NO: 1653203 - RNA, 14 nt, Human
uugaggacacugau

SEQ ID NO: 1653204 - RNA, 15 nt, Human
uugaggacacugaua

SEQ ID NO: 1653205 - RNA, 18 nt, Human
uugauuuccguuaaaaua

SEQ ID NO: 1653206 - RNA, 14 nt, Human
uugcaacaggcugg

SEQ ID NO: 1653207 - RNA, 17 nt, Human
uugcaacaggcugggcu

SEQ ID NO: 1653208 - RNA, 21 nt, Human
uugauagcacagacccugccc

SEQ ID NO: 1653209 - RNA, 23 nt, Human
uugauagcacagacccugcccug

SEQ ID NO: 1653210 - RNA, 12 nt, Human
uugaugaagaag

SEQ ID NO: 1653211 - RNA, 16 nt, Human
uugcagacaggcaagc

SEQ ID NO: 1653212 - RNA, 22 nt, Human
uugcagacaggcaagcaccucc

SEQ ID NO: 1653213 - RNA, 14 nt, Human
uugcauagaauaaa

SEQ ID NO: 1653214 - RNA, 14 nt, Human
uugccacugccucu

SEQ ID NO: 1653215 - RNA, 15 nt, Human
uugccacugccucuu

SEQ ID NO: 1653216 - RNA, 18 nt, Human
uugcauagauucccugag

SEQ ID NO: 1653217 - RNA, 19 nt, Human
uucuguccuacucuguguc

SEQ ID NO: 1653218 - RNA, 17 nt, Human
uucuguccuacucugug

SEQ ID NO: 1653219 - RNA, 12 nt, Human
uucuguggcuca

SEQ ID NO: 1653220 - RNA, 16 nt, Human
uucuguggcucacaga

SEQ ID NO: 1653221 - RNA, 23 nt, Human
uucuguggguuucuaaagcugcc

SEQ ID NO: 1653222 - RNA, 17 nt, Human
uucuguccgagcuuuga

SEQ ID NO: 1653223 - RNA, 21 nt, Human
uucuguccgagcuuugaaaau

SEQ ID NO: 1653224 - RNA, 14 nt, Human
uucugagcauuuaa

SEQ ID NO: 1653225 - RNA, 15 nt, Human
uucugagaaagacua

SEQ ID NO: 1653226 - RNA, 16 nt, Human
uucuugguuuguaaau

SEQ ID NO: 1653227 - RNA, 13 nt, Human
uucuugguuugua

SEQ ID NO: 1653228 - RNA, 18 nt, Human
uucuugguuuguaaauua

SEQ ID NO: 1653229 - RNA, 17 nt, Human
uucuugguuuguaaauu

SEQ ID NO: 1653230 - RNA, 23 nt, Human
uucuugguuuguaaauuaacuuu

SEQ ID NO: 1653231 - RNA, 11 nt, Human
uucuguucuuu

SEQ ID NO: 1653232 - RNA, 19 nt, Human
uucuuauuuaaugaaagac

SEQ ID NO: 1653233 - RNA, 23 nt, Human
uucuuauuuaaugaaagacugua

SEQ ID NO: 1653234 - RNA, 14 nt, Human
uucuucaacucccu

SEQ ID NO: 1653235 - RNA, 15 nt, Human
uucuuauuucauuuc

SEQ ID NO: 1653236 - RNA, 18 nt, Human
uucuuuauaauucuacuu

SEQ ID NO: 1653237 - RNA, 12 nt, Human
uucuuguauuaa

SEQ ID NO: 1653238 - RNA, 13 nt, Human
uucuuguauuaag

SEQ ID NO: 1653239 - RNA, 18 nt, Human
uucuuguauuaagaauga

SEQ ID NO: 1653240 - RNA, 19 nt, Human
uugaaaacacuguucucug

SEQ ID NO: 1653241 - RNA, 21 nt, Human
uugaaaacacuguucucugcc

SEQ ID NO: 1653242 - RNA, 22 nt, Human
uugaaacggaugauuucuaugc

SEQ ID NO: 1653243 - RNA, 21 nt, Human
uugaaacggaugauuucuaug

SEQ ID NO: 1653244 - RNA, 22 nt, Human
uugaaaacacuguucucugccc

SEQ ID NO: 1653245 - RNA, 23 nt, Human
uugaaacugagaugugaacacau

SEQ ID NO: 1653246 - RNA, 18 nt, Human
uugaaaagacuccaaaga

SEQ ID NO: 1653247 - RNA, 22 nt, Human
uugaaaagacuccaaagaaaug

SEQ ID NO: 1653248 - RNA, 23 nt, Human
uugaaaagacuccaaagaaaugu

SEQ ID NO: 1653249 - RNA, 19 nt, Human
uugaacucuucaaucucuu

SEQ ID NO: 1653250 - RNA, 16 nt, Human
uugaacugauaaagau

SEQ ID NO: 1653251 - RNA, 22 nt, Human
uugaacuuugaccucugcagca

SEQ ID NO: 1653252 - RNA, 19 nt, Human
uugaagacuuuucuuucag

SEQ ID NO: 1653253 - RNA, 17 nt, Human
uugaagacagagcuaca

SEQ ID NO: 1653254 - RNA, 22 nt, Human
ugugcacaugcacgugugugca

SEQ ID NO: 1653255 - RNA, 14 nt, Human
ugugccucugccug

SEQ ID NO: 1653256 - RNA, 13 nt, Human
ugugccucuggga

SEQ ID NO: 1653257 - RNA, 15 nt, Human
ugugccucugggacu

SEQ ID NO: 1653258 - RNA, 16 nt, Human
ugugccucugggacug

SEQ ID NO: 1653259 - RNA, 22 nt, Human
ugugcuuauguaugagguacaa

SEQ ID NO: 1653260 - RNA, 14 nt, Human
ugugcgcuaaacuu

SEQ ID NO: 1653261 - RNA, 15 nt, Human
ugugccucugccugu

SEQ ID NO: 1653262 - RNA, 17 nt, Human
ugugccucugggacugg

SEQ ID NO: 1653263 - RNA, 19 nt, Human
ugugcgcuaaacuuuucug

SEQ ID NO: 1653264 - RNA, 22 nt, Human
ugugcgcuaaacuuuucugaua

SEQ ID NO: 1653265 - RNA, 23 nt, Human
ugugcgcuaaacuuuucugauag

SEQ ID NO: 1653266 - RNA, 20 nt, Human
ugugcgugcauguguguuca

SEQ ID NO: 1653267 - RNA, 15 nt, Human
uguggacacagcucu

SEQ ID NO: 1653268 - RNA, 16 nt, Human
uguggacacagcucuu

SEQ ID NO: 1653269 - RNA, 21 nt, Human
uguggcuccuggggguucuuu

SEQ ID NO: 1653270 - RNA, 12 nt, Human
uguggagaagcg

SEQ ID NO: 1653271 - RNA, 21 nt, Human
uguggagaagcggcuggcagc

SEQ ID NO: 1653272 - RNA, 17 nt, Human
uguggaaaaugaaaauu

SEQ ID NO: 1653273 - RNA, 14 nt, Human
uguggacacagcuc

SEQ ID NO: 1653274 - RNA, 12 nt, Human
ugugggaagggg

SEQ ID NO: 1653275 - RNA, 13 nt, Human
ugugauauaagug

SEQ ID NO: 1653276 - RNA, 21 nt, Human
ugugauacaaugcugugcccu

SEQ ID NO: 1653277 - RNA, 15 nt, Human
ugugagucaccaagc

SEQ ID NO: 1653278 - RNA, 18 nt, Human
ugugaguacuacaguccu

SEQ ID NO: 1653279 - RNA, 19 nt, Human
ugugaguacuacaguccuc

SEQ ID NO: 1653280 - RNA, 20 nt, Human
ugugaguacuacaguccucc

SEQ ID NO: 1653281 - RNA, 23 nt, Human
ugugaguacuacaguccucccau

SEQ ID NO: 1653282 - RNA, 16 nt, Human
ugugaaucauuuuacc

SEQ ID NO: 1653283 - RNA, 21 nt, Human
ugugacaaggauugcuacugu

SEQ ID NO: 1653284 - RNA, 15 nt, Human
ugugacauguuuuau

SEQ ID NO: 1653285 - RNA, 22 nt, Human
ugugaccacugcagaagacagu

SEQ ID NO: 1653286 - RNA, 16 nt, Human
ugucucaggucccugc

SEQ ID NO: 1653287 - RNA, 17 nt, Human
ugucucaggucccugca

SEQ ID NO: 1653288 - RNA, 20 nt, Human
ugucucaagagggcacuggu

SEQ ID NO: 1653289 - RNA, 21 nt, Human
ugucucaagagggcacuggug

SEQ ID NO: 1653290 - RNA, 23 nt, Human
ugucucaagagggcacugguggc

SEQ ID NO: 1653291 - RNA, 13 nt, Human
uguccccaccgca

SEQ ID NO: 1653292 - RNA, 21 nt, Human
ugucucaguccaugaagaugu

SEQ ID NO: 1653293 - RNA, 22 nt, Human
ugucucaguccaugaagaugua

SEQ ID NO: 1653294 - RNA, 14 nt, Human
ugucuuuuuucuaa

SEQ ID NO: 1653295 - RNA, 19 nt, Human
ugucuuuggacccugaggc

SEQ ID NO: 1653296 - RNA, 22 nt, Human
ugucuuuggacccugaggccca

SEQ ID NO: 1653297 - RNA, 18 nt, Human
ugucuuuggacccugagg

SEQ ID NO: 1653298 - RNA, 13 nt, Human
ugugaaacauguu

SEQ ID NO: 1653299 - RNA, 13 nt, Human
ugugaaaggaaag

SEQ ID NO: 1653300 - RNA, 14 nt, Human
ugugaaaggaaaga

SEQ ID NO: 1653301 - RNA, 17 nt, Human
uguacgucugacaggca

SEQ ID NO: 1653302 - RNA, 16 nt, Human
uguacgucugacaggc

SEQ ID NO: 1653303 - RNA, 12 nt, Human
uguacuccuccc

SEQ ID NO: 1653304 - RNA, 13 nt, Human
uguacuccuccca

SEQ ID NO: 1653305 - RNA, 13 nt, Human
uguacucaauuuu

SEQ ID NO: 1653306 - RNA, 19 nt, Human
uguacugcauaugaaagga

SEQ ID NO: 1653307 - RNA, 17 nt, Human
uguagauaauacaguuc

SEQ ID NO: 1653308 - RNA, 14 nt, Human
uguaccucuugagc

SEQ ID NO: 1653309 - RNA, 22 nt, Human
uguaccucuugagccuugaacu

SEQ ID NO: 1653310 - RNA, 23 nt, Human
uguaccucuugagccuugaacuu

SEQ ID NO: 1653311 - RNA, 15 nt, Human
uguaccgcaauguga

SEQ ID NO: 1653312 - RNA, 15 nt, Human
uguaaucacagcuac

SEQ ID NO: 1653313 - RNA, 17 nt, Human
uguaaauuaacuuuuau

SEQ ID NO: 1653314 - RNA, 16 nt, Human
uguaaauuaacuuuua

SEQ ID NO: 1653315 - RNA, 15 nt, Human
uguaaauuaacuuuu

SEQ ID NO: 1653316 - RNA, 14 nt, Human
uguaaauuaacuuu

SEQ ID NO: 1653317 - RNA, 13 nt, Human
uguaaauuaacuu

SEQ ID NO: 1653318 - RNA, 23 nt, Human
ugucccaaaaagaaaggagggga

SEQ ID NO: 1653319 - RNA, 12 nt, Human
ugucagugugac

SEQ ID NO: 1653320 - RNA, 20 nt, Human
ugucagugugacugaucucu

SEQ ID NO: 1653321 - RNA, 14 nt, Human
uguauuuguuugca

SEQ ID NO: 1653322 - RNA, 14 nt, Human
uguaugcacuuugu

SEQ ID NO: 1653323 - RNA, 16 nt, Human
uguaugauucccagcc

SEQ ID NO: 1653324 - RNA, 16 nt, Human
uguauagaaccucuuu

SEQ ID NO: 1653325 - RNA, 19 nt, Human
uguaucccaugagccucag

SEQ ID NO: 1653326 - RNA, 23 nt, Human
uguaucccaugagccucagcauc

SEQ ID NO: 1653327 - RNA, 22 nt, Human
uguguuuaggaacuacugagga

SEQ ID NO: 1653328 - RNA, 13 nt, Human
uguguuuauuguc

SEQ ID NO: 1653329 - RNA, 17 nt, Human
ugugugaagugagugag

SEQ ID NO: 1653330 - RNA, 19 nt, Human
ugugucagcauagaaguaa

SEQ ID NO: 1653331 - RNA, 18 nt, Human
uguuaaaccaugggauaa

SEQ ID NO: 1653332 - RNA, 20 nt, Human
uguuaaaccaugggauaaau

SEQ ID NO: 1653333 - RNA, 21 nt, Human
uguuaaaccaugggauaaaug

SEQ ID NO: 1653334 - RNA, 23 nt, Human
uguuaaaccaugggauaaaugcc

SEQ ID NO: 1653335 - RNA, 13 nt, Human
uguuacauuuuua

SEQ ID NO: 1653336 - RNA, 22 nt, Human
uguuacauuuuuaagugcugca

SEQ ID NO: 1653337 - RNA, 15 nt, Human
uguuacugucuucag

SEQ ID NO: 1653338 - RNA, 16 nt, Human
uguuacugucuucagu

SEQ ID NO: 1653339 - RNA, 16 nt, Human
uguuagaucuaguuca

SEQ ID NO: 1653340 - RNA, 12 nt, Human
uguuauaaucuu

SEQ ID NO: 1653341 - RNA, 15 nt, Human
uguucagcuccagcu

SEQ ID NO: 1653342 - RNA, 16 nt, Human
uguucagcuccagcuc

SEQ ID NO: 1653343 - RNA, 18 nt, Human
uguucagcuccagcucac

SEQ ID NO: 1653344 - RNA, 11 nt, Human
uguucagcugg

SEQ ID NO: 1653345 - RNA, 14 nt, Human
uguucagcuccagc

SEQ ID NO: 1653346 - RNA, 16 nt, Human
uguucacagccagacu

SEQ ID NO: 1653347 - RNA, 13 nt, Human
uguucauaaauaa

SEQ ID NO: 1653348 - RNA, 20 nt, Human
uguucaugaaagauucaaug

SEQ ID NO: 1653349 - RNA, 12 nt, Human
uguucuauagcu

SEQ ID NO: 1653350 - RNA, 16 nt, Human
uguucucugaggacac

SEQ ID NO: 1653351 - RNA, 18 nt, Human
uguucucugaggacacua

SEQ ID NO: 1653352 - RNA, 12 nt, Human
uguucucugccc

SEQ ID NO: 1653353 - RNA, 18 nt, Human
uguucugacccugcuuca

SEQ ID NO: 1653354 - RNA, 17 nt, Human
uguucugcacacagcac

SEQ ID NO: 1653355 - RNA, 14 nt, Human
uguucuuucuggcu

SEQ ID NO: 1653356 - RNA, 19 nt, Human
uguucucugcccuccaaga

SEQ ID NO: 1653357 - RNA, 15 nt, Human
uguucugacccugcu

SEQ ID NO: 1653358 - RNA, 20 nt, Human
uguugaaacggaugauuucu

SEQ ID NO: 1653359 - RNA, 22 nt, Human
uguucuuucuggcuaugcauuu

SEQ ID NO: 1653360 - RNA, 20 nt, Human
uguucuuucuggcuaugcau

SEQ ID NO: 1653361 - RNA, 21 nt, Human
uguugaaacggaugauuucua

SEQ ID NO: 1653362 - RNA, 22 nt, Human
uguugaaacggaugauuucuau

SEQ ID NO: 1653363 - RNA, 23 nt, Human
uguugaaacggaugauuucuaug

SEQ ID NO: 1653364 - RNA, 11 nt, Human
uguugaaagau

SEQ ID NO: 1653365 - RNA, 13 nt, Human
uguugcugccuca

SEQ ID NO: 1653366 - RNA, 19 nt, Human
uguugaagagguuuuaaag

SEQ ID NO: 1653367 - RNA, 11 nt, Human
uguuggccagg

SEQ ID NO: 1653368 - RNA, 14 nt, Human
uguugcugccucau

SEQ ID NO: 1653369 - RNA, 21 nt, Human
uguuggagaagaacugaaauc

SEQ ID NO: 1653370 - RNA, 13 nt, Human
uguuggccaggcu

SEQ ID NO: 1653371 - RNA, 18 nt, Human
uguuggccaggcugcucu

SEQ ID NO: 1653372 - RNA, 14 nt, Human
uguuggccaggcug

SEQ ID NO: 1653373 - RNA, 14 nt, Human
uguuguuuguuuag

SEQ ID NO: 1653374 - RNA, 17 nt, Human
uguuuacagauccccaa

SEQ ID NO: 1653375 - RNA, 14 nt, Human
uguuuaaaaucauu

SEQ ID NO: 1653376 - RNA, 13 nt, Human
uguuuaaaaucau

SEQ ID NO: 1653377 - RNA, 23 nt, Human
uuacaauaaaaucuugaaaaugc

SEQ ID NO: 1653378 - RNA, 20 nt, Human
uuacagagacagaaagcaga

SEQ ID NO: 1653379 - RNA, 22 nt, Human
uuacauggcuggagcuagaauu

SEQ ID NO: 1653380 - RNA, 23 nt, Human
uuacauggcuggagcuagaauuu

SEQ ID NO: 1653381 - RNA, 14 nt, Human
uuacauuuccuaaa

SEQ ID NO: 1653382 - RNA, 14 nt, Human
uuacauuuguauaa

SEQ ID NO: 1653383 - RNA, 15 nt, Human
uuacauuuguauaaa

SEQ ID NO: 1653384 - RNA, 16 nt, Human
uuacggaacucaaaua

SEQ ID NO: 1653385 - RNA, 20 nt, Human
uuacgguuuuccagguuuaa

SEQ ID NO: 1653386 - RNA, 22 nt, Human
uuaccuuuuuuauacauaaaca

SEQ ID NO: 1653387 - RNA, 20 nt, Human
uuaccuuuuuuauacauaaa

SEQ ID NO: 1653388 - RNA, 19 nt, Human
uuaccuuuuuuauacauaa

SEQ ID NO: 1653389 - RNA, 23 nt, Human
uuacauuuuuaagugcugcauuu

SEQ ID NO: 1653390 - RNA, 22 nt, Human
uuacauuuuuaagugcugcauu

SEQ ID NO: 1653391 - RNA, 21 nt, Human
uuacauuuuuaagugcugcau

SEQ ID NO: 1653392 - RNA, 20 nt, Human
uuacauuuuuaagugcugca

SEQ ID NO: 1653393 - RNA, 14 nt, Human
uuaccagcagagca

SEQ ID NO: 1653394 - RNA, 21 nt, Human
uuaccacuuguguuuugcaag

SEQ ID NO: 1653395 - RNA, 21 nt, Human
uuaauagguuuggacaaaaug

SEQ ID NO: 1653396 - RNA, 18 nt, Human
uuaauaucaucaguauug

SEQ ID NO: 1653397 - RNA, 18 nt, Human
uuaaugucacaggcaggu

SEQ ID NO: 1653398 - RNA, 14 nt, Human
uuaauggaaauguu

SEQ ID NO: 1653399 - RNA, 17 nt, Human
uuaaugucacaggcagg

SEQ ID NO: 1653400 - RNA, 22 nt, Human
uuaaugucaauucuugccaaau

SEQ ID NO: 1653401 - RNA, 21 nt, Human
uuaaggaagacaaugugaaaa

SEQ ID NO: 1653402 - RNA, 20 nt, Human
uuaaggaugcuuguacauaa

SEQ ID NO: 1653403 - RNA, 19 nt, Human
uuaaggaugcuuguacaua

SEQ ID NO: 1653404 - RNA, 18 nt, Human
uuaaggaugcuuguacau

SEQ ID NO: 1653405 - RNA, 17 nt, Human
uuaaggaugcuuguaca

SEQ ID NO: 1653406 - RNA, 22 nt, Human
uuaaggaugcuuguacauaaug

SEQ ID NO: 1653407 - RNA, 13 nt, Human
uuaaggauuuuau

SEQ ID NO: 1653408 - RNA, 15 nt, Human
uuaaggauuuuaugc

SEQ ID NO: 1653409 - RNA, 18 nt, Human
uuaaggauuuuaugcuuu

SEQ ID NO: 1653410 - RNA, 20 nt, Human
uuaaggauuuuaugcuuuaa

SEQ ID NO: 1653411 - RNA, 16 nt, Human
uuaauaauguuucaaa

SEQ ID NO: 1653412 - RNA, 20 nt, Human
uuaauaauuauaugcuauuu

SEQ ID NO: 1653413 - RNA, 23 nt, Human
uuaauaauuauaugcuauuucua

SEQ ID NO: 1653414 - RNA, 16 nt, Human
uuaauagguuuggaca

SEQ ID NO: 1653415 - RNA, 18 nt, Human
uuaauaauuauaugcuau

SEQ ID NO: 1653416 - RNA, 18 nt, Human
uuaauaauguuucaaaca

SEQ ID NO: 1653417 - RNA, 18 nt, Human
uuaaauaguaaaaauaaa

SEQ ID NO: 1653418 - RNA, 15 nt, Human
uuaaagcuuccauug

SEQ ID NO: 1653419 - RNA, 20 nt, Human
uuaaagcuuccauuguuguc

SEQ ID NO: 1653420 - RNA, 19 nt, Human
uuaaauagcuuuuuucucu

SEQ ID NO: 1653421 - RNA, 18 nt, Human
uuaaaugcaccuggaaua

SEQ ID NO: 1653422 - RNA, 17 nt, Human
uuaaaugcaccuggaau

SEQ ID NO: 1653423 - RNA, 16 nt, Human
uuaaaugcaccuggaa

SEQ ID NO: 1653424 - RNA, 12 nt, Human
uuaacauguuaa

SEQ ID NO: 1653425 - RNA, 18 nt, Human
uuaacauguuaaaccaug

SEQ ID NO: 1653426 - RNA, 19 nt, Human
uuaacauguuaaaccaugg

SEQ ID NO: 1653427 - RNA, 12 nt, Human
uuaaaugcugcu

SEQ ID NO: 1653428 - RNA, 13 nt, Human
uuaaaugcccagc

SEQ ID NO: 1653429 - RNA, 18 nt, Human
uuaaaugcccagccccuu

SEQ ID NO: 1653430 - RNA, 18 nt, Human
uuaaacuuaaucuaaaug

SEQ ID NO: 1653431 - RNA, 16 nt, Human
uuaaacuuaaucuaaa

SEQ ID NO: 1653432 - RNA, 19 nt, Human
uuaaaagaaugauuaugaa

SEQ ID NO: 1653433 - RNA, 22 nt, Human
uuaaacuuaaucuaaauggaac

SEQ ID NO: 1653434 - RNA, 20 nt, Human
uuaaacuuaaucuaaaugga

SEQ ID NO: 1653435 - RNA, 20 nt, Human
uuaaagcuuauuaaaacuca

SEQ ID NO: 1653436 - RNA, 23 nt, Human
uguuuuaaaaugagaaaucuaaa

SEQ ID NO: 1653437 - RNA, 13 nt, Human
uguuuuugucuua

SEQ ID NO: 1653438 - RNA, 23 nt, Human
uguuuccuggcacugcuuccagu

SEQ ID NO: 1653439 - RNA, 20 nt, Human
uguuuccuggcacugcuucc

SEQ ID NO: 1653440 - RNA, 21 nt, Human
uguuuccuggcacugcuucca

SEQ ID NO: 1653441 - RNA, 22 nt, Human
uguuuccuggcacugcuuccag

SEQ ID NO: 1653442 - RNA, 12 nt, Human
uguuuguuuagu

SEQ ID NO: 1653443 - RNA, 17 nt, Human
uguuuguugucagcuga

SEQ ID NO: 1653444 - RNA, 18 nt, Human
uguuuuaaaaugagaaau

SEQ ID NO: 1653445 - RNA, 21 nt, Human
uguuuguuuagucuugucuca

SEQ ID NO: 1653446 - RNA, 16 nt, Human
ugggacagggcauggc

SEQ ID NO: 1653447 - RNA, 16 nt, Human
ugggacaugggaaagg

SEQ ID NO: 1653448 - RNA, 19 nt, Human
ugggacauuugcucaugga

SEQ ID NO: 1653449 - RNA, 20 nt, Human
ugggacauuugcucauggaa

SEQ ID NO: 1653450 - RNA, 23 nt, Human
ugggagcugccuguucagcucca

SEQ ID NO: 1653451 - RNA, 14 nt, Human
uggcuuuguauaga

SEQ ID NO: 1653452 - RNA, 22 nt, Human
uggcuuuguauagaaccucuuu

SEQ ID NO: 1653453 - RNA, 15 nt, Human
uggcuguacccagga

SEQ ID NO: 1653454 - RNA, 15 nt, Human
uggcugggggccuca

SEQ ID NO: 1653455 - RNA, 14 nt, Human
uggcugggggccuc

SEQ ID NO: 1653456 - RNA, 22 nt, Human
uggcugguuagagguucccuuu

SEQ ID NO: 1653457 - RNA, 14 nt, Human
uggcuuuucacugc

SEQ ID NO: 1653458 - RNA, 15 nt, Human
uggcuuuucacugcu

SEQ ID NO: 1653459 - RNA, 22 nt, Human
ugggaaugaaugucagugugac

SEQ ID NO: 1653460 - RNA, 18 nt, Human
ugggacagucaccucaug

SEQ ID NO: 1653461 - RNA, 20 nt, Human
ugggacagucaccucaugga

SEQ ID NO: 1653462 - RNA, 21 nt, Human
ugggacagucaccucauggaa

SEQ ID NO: 1653463 - RNA, 19 nt, Human
uggcucuuccaggcuggga

SEQ ID NO: 1653464 - RNA, 16 nt, Human
uggcucuuccaggcug

SEQ ID NO: 1653465 - RNA, 12 nt, Human
uggcugggggcc

SEQ ID NO: 1653466 - RNA, 13 nt, Human
uggcucuuccagg

SEQ ID NO: 1653467 - RNA, 15 nt, Human
uggcucuuccaggcu

SEQ ID NO: 1653468 - RNA, 14 nt, Human
uggcuaaauucaug

SEQ ID NO: 1653469 - RNA, 22 nt, Human
uggcucagguggggucacucug

SEQ ID NO: 1653470 - RNA, 20 nt, Human
uggcucagguggggucacuc

SEQ ID NO: 1653471 - RNA, 15 nt, Human
uggcgcugccccugg

SEQ ID NO: 1653472 - RNA, 14 nt, Human
uggcgcugccccug

SEQ ID NO: 1653473 - RNA, 22 nt, Human
uggcgugcaguggugcgaucug

SEQ ID NO: 1653474 - RNA, 20 nt, Human
uggccuucggccuccauccu

SEQ ID NO: 1653475 - RNA, 20 nt, Human
uggccuuucauauuuuagcu

SEQ ID NO: 1653476 - RNA, 15 nt, Human
uggccagaugcacca

SEQ ID NO: 1653477 - RNA, 17 nt, Human
uggccuucggccuccau

SEQ ID NO: 1653478 - RNA, 18 nt, Human
uggccuucggccuccauc

SEQ ID NO: 1653479 - RNA, 14 nt, Human
ugggccuccugugu

SEQ ID NO: 1653480 - RNA, 18 nt, Human
ugggccuucagggaguga

SEQ ID NO: 1653481 - RNA, 16 nt, Human
ugggccuccugugugu

SEQ ID NO: 1653482 - RNA, 22 nt, Human
ugggccuccugugugugcgccu

SEQ ID NO: 1653483 - RNA, 16 nt, Human
ugggagcuuuuguaga

SEQ ID NO: 1653484 - RNA, 24 nt, Human
ugggagcugccuguucagcuccag

SEQ ID NO: 1653485 - RNA, 17 nt, Human
ugggcgugagaccugcc

SEQ ID NO: 1653486 - RNA, 18 nt, Human
ugggcgugagaccugccc

SEQ ID NO: 1653487 - RNA, 19 nt, Human
ugggcgugagaccugcccc

SEQ ID NO: 1653488 - RNA, 18 nt, Human
ugggcuucaguggcagcu

SEQ ID NO: 1653489 - RNA, 19 nt, Human
ugggcuucaguggcagcug

SEQ ID NO: 1653490 - RNA, 19 nt, Human
ugggcuuggggaccagagc

SEQ ID NO: 1653491 - RNA, 20 nt, Human
ugggcuucaguggcagcugc

SEQ ID NO: 1653492 - RNA, 16 nt, Human
uggggcagcuugaggg

SEQ ID NO: 1653493 - RNA, 21 nt, Human
ugggcuuggggaccagagcug

SEQ ID NO: 1653494 - RNA, 22 nt, Human
ugggcuuggggaccagagcugc

SEQ ID NO: 1653495 - RNA, 21 nt, Human
ugggugucaagagggucugag

SEQ ID NO: 1653496 - RNA, 23 nt, Human
ugggugucaagagggucugagga

SEQ ID NO: 1653497 - RNA, 14 nt, Human
uggguguggcgcag

SEQ ID NO: 1653498 - RNA, 23 nt, Human
uggguucaagcgauucuucugcu

SEQ ID NO: 1653499 - RNA, 16 nt, Human
uggguucacugcaacc

SEQ ID NO: 1653500 - RNA, 21 nt, Human
uggguuccuuccucugagccu

SEQ ID NO: 1653501 - RNA, 22 nt, Human
uggguuccuuccucugagccuu

SEQ ID NO: 1653502 - RNA, 21 nt, Human
uggguuccagcaauucuccug

SEQ ID NO: 1653503 - RNA, 17 nt, Human
uggguuggaaaacagua

SEQ ID NO: 1653504 - RNA, 19 nt, Human
ugggguggggggggugcug

SEQ ID NO: 1653505 - RNA, 17 nt, Human
ugggguggggaccucag

SEQ ID NO: 1653506 - RNA, 21 nt, Human
ugggguggggggggugcuggg

SEQ ID NO: 1653507 - RNA, 22 nt, Human
ugggguggggggggugcugggc

SEQ ID NO: 1653508 - RNA, 17 nt, Human
uggguagacacacauga

SEQ ID NO: 1653509 - RNA, 16 nt, Human
uggguagacacacaug

SEQ ID NO: 1653510 - RNA, 16 nt, Human
uggaauacucuuauau

SEQ ID NO: 1653511 - RNA, 21 nt, Human
uggaagugugugaucuguggg

SEQ ID NO: 1653512 - RNA, 14 nt, Human
uggaagacagcucu

SEQ ID NO: 1653513 - RNA, 15 nt, Human
uggaagacagcucuu

SEQ ID NO: 1653514 - RNA, 15 nt, Human
uggaaaauaaauuau

SEQ ID NO: 1653515 - RNA, 16 nt, Human
uggaaaauaaauuauu

SEQ ID NO: 1653516 - RNA, 11 nt, Human
uggaaaauaaa

SEQ ID NO: 1653517 - RNA, 15 nt, Human
uggaaaauaaaucaa

SEQ ID NO: 1653518 - RNA, 17 nt, Human
uggaaaaauagccugcc

SEQ ID NO: 1653519 - RNA, 11 nt, Human
uggaagacagc

SEQ ID NO: 1653520 - RNA, 12 nt, Human
uggaagacagcu

SEQ ID NO: 1653521 - RNA, 14 nt, Human
uggaacucucgagc

SEQ ID NO: 1653522 - RNA, 18 nt, Human
ugcuuguuaacugagugc

SEQ ID NO: 1653523 - RNA, 14 nt, Human
ugcuuguuuccuag

SEQ ID NO: 1653524 - RNA, 12 nt, Human
ugcuuuaaacau

SEQ ID NO: 1653525 - RNA, 16 nt, Human
ugcuuucagauacugg

SEQ ID NO: 1653526 - RNA, 17 nt, Human
ugcuuucagauacugga

SEQ ID NO: 1653527 - RNA, 20 nt, Human
ugcuuucagauacuggauug

SEQ ID NO: 1653528 - RNA, 21 nt, Human
ugcuuucagauacuggauugu

SEQ ID NO: 1653529 - RNA, 12 nt, Human
ugcuuucagaua

SEQ ID NO: 1653530 - RNA, 21 nt, Human
ugcuuccagugaggcucugcc

SEQ ID NO: 1653531 - RNA, 19 nt, Human
ugcuuccagugaggcucug

SEQ ID NO: 1653532 - RNA, 20 nt, Human
ugcuuccagugaggcucugc

SEQ ID NO: 1653533 - RNA, 13 nt, Human
ugcugccucaugc

SEQ ID NO: 1653534 - RNA, 14 nt, Human
ugcugccuccagaa

SEQ ID NO: 1653535 - RNA, 18 nt, Human
ugcuuccagugaggcucu

SEQ ID NO: 1653536 - RNA, 12 nt, Human
ugcuucucacug

SEQ ID NO: 1653537 - RNA, 16 nt, Human
ugcuucuucagagacu

SEQ ID NO: 1653538 - RNA, 14 nt, Human
ugcuucuguuuuau

SEQ ID NO: 1653539 - RNA, 14 nt, Human
uggcagugggagcu

SEQ ID NO: 1653540 - RNA, 15 nt, Human
uggcagugggagcug

SEQ ID NO: 1653541 - RNA, 16 nt, Human
uggcagugggagcugc

SEQ ID NO: 1653542 - RNA, 19 nt, Human
uggcagugggagcugccug

SEQ ID NO: 1653543 - RNA, 15 nt, Human
uggcauaacauaaau

SEQ ID NO: 1653544 - RNA, 17 nt, Human
uggcauaacauaaaucu

SEQ ID NO: 1653545 - RNA, 22 nt, Human
uggccacuccagaccccuggcu

SEQ ID NO: 1653546 - RNA, 20 nt, Human
uggcagugggagcugccugu

SEQ ID NO: 1653547 - RNA, 23 nt, Human
uggcagcugcgguccacccagga

SEQ ID NO: 1653548 - RNA, 21 nt, Human
uggcagcugcgguccacccag

SEQ ID NO: 1653549 - RNA, 22 nt, Human
uggcagcugcgguccacccagg

SEQ ID NO: 1653550 - RNA, 14 nt, Human
uggcacugcuucca

SEQ ID NO: 1653551 - RNA, 16 nt, Human
uggcacugcuuccagu

SEQ ID NO: 1653552 - RNA, 18 nt, Human
uggcacugcuuccaguga

SEQ ID NO: 1653553 - RNA, 14 nt, Human
uggaugccuggugg

SEQ ID NO: 1653554 - RNA, 15 nt, Human
uggaugccugguggc

SEQ ID NO: 1653555 - RNA, 20 nt, Human
uggagaggcccggccucuca

SEQ ID NO: 1653556 - RNA, 13 nt, Human
uggagauguuuag

SEQ ID NO: 1653557 - RNA, 12 nt, Human
uggacaggcaug

SEQ ID NO: 1653558 - RNA, 16 nt, Human
uggacaggcauguucu

SEQ ID NO: 1653559 - RNA, 17 nt, Human
uggacaggcauguucuc

SEQ ID NO: 1653560 - RNA, 22 nt, Human
uggaggcaugugaugagaggaa

SEQ ID NO: 1653561 - RNA, 17 nt, Human
ugcacagcuaacaugga

SEQ ID NO: 1653562 - RNA, 23 nt, Human
ugcacagaguuguuacauuuuua

SEQ ID NO: 1653563 - RNA, 22 nt, Human
ugcacagaguuguuacauuuuu

SEQ ID NO: 1653564 - RNA, 21 nt, Human
ugcacagaguuguuacauuuu

SEQ ID NO: 1653565 - RNA, 22 nt, Human
ugaagucuuuguacagacaaca

SEQ ID NO: 1653566 - RNA, 12 nt, Human
ugaagugaaacu

SEQ ID NO: 1653567 - RNA, 16 nt, Human
ugaaggcuggguucug

SEQ ID NO: 1653568 - RNA, 19 nt, Human
ugaagucucugaagugaaa

SEQ ID NO: 1653569 - RNA, 17 nt, Human
ugaagucuuuguacaga

SEQ ID NO: 1653570 - RNA, 20 nt, Human
ugaagucuuuguacagacaa

SEQ ID NO: 1653571 - RNA, 19 nt, Human
ugcacagugcaucucagcc

SEQ ID NO: 1653572 - RNA, 20 nt, Human
ugcacagugcaucucagccc

SEQ ID NO: 1653573 - RNA, 18 nt, Human
ugcacagugcaucucagc

SEQ ID NO: 1653574 - RNA, 23 nt, Human
ugcacagcuaacauggaaguacu

SEQ ID NO: 1653575 - RNA, 18 nt, Human
ugcacagcuaacauggaa

SEQ ID NO: 1653576 - RNA, 20 nt, Human
ugcacagcuaacauggaagu

SEQ ID NO: 1653577 - RNA, 15 nt, Human
ugcacaucaaaauau

SEQ ID NO: 1653578 - RNA, 13 nt, Human
ugcagcuuuaaaa

SEQ ID NO: 1653579 - RNA, 16 nt, Human
ugcagcaauaaagcag

SEQ ID NO: 1653580 - RNA, 15 nt, Human
ugcagcaauaaagca

SEQ ID NO: 1653581 - RNA, 14 nt, Human
ugcagcaauaaagc

SEQ ID NO: 1653582 - RNA, 18 nt, Human
ugcaggaccucaggugag

SEQ ID NO: 1653583 - RNA, 15 nt, Human
ugcaggaccucaggu

SEQ ID NO: 1653584 - RNA, 16 nt, Human
ugcaggaccucaggug

SEQ ID NO: 1653585 - RNA, 22 nt, Human
ugcagcuuuaaaaaauuaaucu

SEQ ID NO: 1653586 - RNA, 14 nt, Human
ugcaggaccucagg

SEQ ID NO: 1653587 - RNA, 21 nt, Human
ugcacuugcagacucuacaga

SEQ ID NO: 1653588 - RNA, 22 nt, Human
ugcacggugaauggcuuuguau

SEQ ID NO: 1653589 - RNA, 23 nt, Human
ugcacggugaauggcuuuguaua

SEQ ID NO: 1653590 - RNA, 19 nt, Human
ugcacguacacacacauac

SEQ ID NO: 1653591 - RNA, 16 nt, Human
ugcacguacacacaca

SEQ ID NO: 1653592 - RNA, 15 nt, Human
ugcacuuuguucugg

SEQ ID NO: 1653593 - RNA, 18 nt, Human
ugcacuuuguucuggcuc

SEQ ID NO: 1653594 - RNA, 19 nt, Human
ugcacuuuguucuggcucu

SEQ ID NO: 1653595 - RNA, 20 nt, Human
ugcacuuuguucuggcucuu

SEQ ID NO: 1653596 - RNA, 16 nt, Human
ugcagauaaacaguag

SEQ ID NO: 1653597 - RNA, 17 nt, Human
ugcagauaaacaguagu

SEQ ID NO: 1653598 - RNA, 19 nt, Human
ugcauguuacauaagauaa

SEQ ID NO: 1653599 - RNA, 15 nt, Human
ugcauuauauuuauu

SEQ ID NO: 1653600 - RNA, 20 nt, Human
ugcauuauauuuauuacugu

SEQ ID NO: 1653601 - RNA, 21 nt, Human
ugcauuauauuuauuacugua

SEQ ID NO: 1653602 - RNA, 18 nt, Human
ugcauccuccgccucccg

SEQ ID NO: 1653603 - RNA, 21 nt, Human
ugcauccuccgccucccgggu

SEQ ID NO: 1653604 - RNA, 17 nt, Human
ugcaucguuucaucuuc

SEQ ID NO: 1653605 - RNA, 15 nt, Human
ugcaucguuucaucu

SEQ ID NO: 1653606 - RNA, 16 nt, Human
ugcaggcagccaggcc

SEQ ID NO: 1653607 - RNA, 17 nt, Human
ugcaggcagccaggcca

SEQ ID NO: 1653608 - RNA, 18 nt, Human
ugcaggcagccaggccac

SEQ ID NO: 1653609 - RNA, 19 nt, Human
ugcaggcagccaggccaca

SEQ ID NO: 1653610 - RNA, 22 nt, Human
ugcaucagcugcugaaacaaca

SEQ ID NO: 1653611 - RNA, 20 nt, Human
ugccaucucaccuccugcug

SEQ ID NO: 1653612 - RNA, 21 nt, Human
ugccaucucaccuccugcugg

SEQ ID NO: 1653613 - RNA, 22 nt, Human
ugccaucucaccuccugcuggg

SEQ ID NO: 1653614 - RNA, 23 nt, Human
ugccaucucaccuccugcugggc

SEQ ID NO: 1653615 - RNA, 15 nt, Human
ugcccaccuggccuc

SEQ ID NO: 1653616 - RNA, 17 nt, Human
ugcccaccuggccucug

SEQ ID NO: 1653617 - RNA, 18 nt, Human
ugcccaccuggccucugc

SEQ ID NO: 1653618 - RNA, 19 nt, Human
ugcccaccuggccucugca

SEQ ID NO: 1653619 - RNA, 10 nt, Human
ugcccagccc

SEQ ID NO: 1653620 - RNA, 11 nt, Human
ugccagggaca

SEQ ID NO: 1653621 - RNA, 22 nt, Human
ugccagggacagaggggguggc

SEQ ID NO: 1653622 - RNA, 14 nt, Human
ugccagucaccccg

SEQ ID NO: 1653623 - RNA, 22 nt, Human
ugccaucccucccuccaccucc

SEQ ID NO: 1653624 - RNA, 21 nt, Human
ugccaucccucccuccaccuc

SEQ ID NO: 1653625 - RNA, 20 nt, Human
ugccaucccucccuccaccu

SEQ ID NO: 1653626 - RNA, 19 nt, Human
ugccaucccucccuccacc

SEQ ID NO: 1653627 - RNA, 15 nt, Human
ugccaucccucccuc

SEQ ID NO: 1653628 - RNA, 13 nt, Human
ugccuucagcucu

SEQ ID NO: 1653629 - RNA, 17 nt, Human
ugccuucagcucuacag

SEQ ID NO: 1653630 - RNA, 18 nt, Human
ugccuucagcucuacagc

SEQ ID NO: 1653631 - RNA, 15 nt, Human
ugccuggcggggugg

SEQ ID NO: 1653632 - RNA, 18 nt, Human
ugccuuauggaacacucu

SEQ ID NO: 1653633 - RNA, 20 nt, Human
ugccuuauggaacacucuga

SEQ ID NO: 1653634 - RNA, 21 nt, Human
ugccuuauggaacacucugag

SEQ ID NO: 1653635 - RNA, 22 nt, Human
ugccuuauggaacacucugaga

SEQ ID NO: 1653636 - RNA, 13 nt, Human
ugcgcaggcuggc

SEQ ID NO: 1653637 - RNA, 16 nt, Human
ugcgcaggcuggcccu

SEQ ID NO: 1653638 - RNA, 17 nt, Human
ugcgcaggcuggcccug

SEQ ID NO: 1653639 - RNA, 19 nt, Human
ugcgcaggcuggcccugcc

SEQ ID NO: 1653640 - RNA, 13 nt, Human
ugcgccuacagga

SEQ ID NO: 1653641 - RNA, 23 nt, Human
ugcggugcuaucucccccagccc

SEQ ID NO: 1653642 - RNA, 22 nt, Human
ugccuucucaacuccaaacuga

SEQ ID NO: 1653643 - RNA, 17 nt, Human
ugccuucucaacuccaa

SEQ ID NO: 1653644 - RNA, 22 nt, Human
ugccugaagucacacagugagu

SEQ ID NO: 1653645 - RNA, 18 nt, Human
ugccugaagucacacagu

SEQ ID NO: 1653646 - RNA, 16 nt, Human
ugccuccuuugugagg

SEQ ID NO: 1653647 - RNA, 17 nt, Human
ugccuccuuugugagga

SEQ ID NO: 1653648 - RNA, 18 nt, Human
ugccuccuuugugaggaa

SEQ ID NO: 1653649 - RNA, 23 nt, Human
ugccuaaggacuucuuuaauuuu

SEQ ID NO: 1653650 - RNA, 19 nt, Human
ugccuaaggcugaacuugu

SEQ ID NO: 1653651 - RNA, 11 nt, Human
ugcccagcccc

SEQ ID NO: 1653652 - RNA, 12 nt, Human
ugcccagccccu

SEQ ID NO: 1653653 - RNA, 23 nt, Human
ugcccaggcuggcgugcaguggu

SEQ ID NO: 1653654 - RNA, 22 nt, Human
ugccuccccuccucugcuugcc

SEQ ID NO: 1653655 - RNA, 19 nt, Human
ugccuccccuccucugcuu

SEQ ID NO: 1653656 - RNA, 23 nt, Human
ugccuccccuccucugcuugcca

SEQ ID NO: 1653657 - RNA, 18 nt, Human
ugccuccccuccucugcu

SEQ ID NO: 1653658 - RNA, 20 nt, Human
ugcugauggugcaaugaccu

SEQ ID NO: 1653659 - RNA, 23 nt, Human
ugcugauggugcaaugaccuuuc

SEQ ID NO: 1653660 - RNA, 15 nt, Human
ugcugcaguugccag

SEQ ID NO: 1653661 - RNA, 16 nt, Human
ugcugcaguugccagu

SEQ ID NO: 1653662 - RNA, 15 nt, Human
ugcugaguuugugcu

SEQ ID NO: 1653663 - RNA, 17 nt, Human
ugcugaguuugugcugg

SEQ ID NO: 1653664 - RNA, 15 nt, Human
ugcugacagacacag

SEQ ID NO: 1653665 - RNA, 16 nt, Human
ugcugacagacacagg

SEQ ID NO: 1653666 - RNA, 19 nt, Human
ugcugacagacacaggccc

SEQ ID NO: 1653667 - RNA, 19 nt, Human
ugcuccuggcccacugcau

SEQ ID NO: 1653668 - RNA, 17 nt, Human
ugcugaaugguuuucaa

SEQ ID NO: 1653669 - RNA, 18 nt, Human
ugcugaaugguuuucaaa

SEQ ID NO: 1653670 - RNA, 22 nt, Human
ugcugaaugguuuucaaaauaa

SEQ ID NO: 1653671 - RNA, 18 nt, Human
ugcugaauacagaggcaa

SEQ ID NO: 1653672 - RNA, 23 nt, Human
ugcugaauacagaggcaacugca

SEQ ID NO: 1653673 - RNA, 17 nt, Human
ugcugaaacaacaaaua

SEQ ID NO: 1653674 - RNA, 15 nt, Human
ugcgugcauaccacu

SEQ ID NO: 1653675 - RNA, 19 nt, Human
ugcuagaacucccuuucaa

SEQ ID NO: 1653676 - RNA, 16 nt, Human
ugcuaggaacacuccu

SEQ ID NO: 1653677 - RNA, 17 nt, Human
ugcuaggaacacuccuu

SEQ ID NO: 1653678 - RNA, 19 nt, Human
ugcuaggaacacuccuuca

SEQ ID NO: 1653679 - RNA, 20 nt, Human
ugcuagaacucccuuucaac

SEQ ID NO: 1653680 - RNA, 21 nt, Human
ugcuagaacucccuuucaaca

SEQ ID NO: 1653681 - RNA, 19 nt, Human
ugcuccucuccccagcaag

SEQ ID NO: 1653682 - RNA, 11 nt, Human
ugcucauggaa

SEQ ID NO: 1653683 - RNA, 14 nt, Human
ugcucaggagcccu

SEQ ID NO: 1653684 - RNA, 20 nt, Human
ugcuaggaacacuccuucac

SEQ ID NO: 1653685 - RNA, 19 nt, Human
ucuugucucagauuuuauu

SEQ ID NO: 1653686 - RNA, 18 nt, Human
ucuuuaaaaaaaaaauug

SEQ ID NO: 1653687 - RNA, 21 nt, Human
ucuuguuuuuuuuuuccacuu

SEQ ID NO: 1653688 - RNA, 18 nt, Human
ucuuguuuuuuuuuucca

SEQ ID NO: 1653689 - RNA, 19 nt, Human
ucuuuaaaaaaaaaauugg

SEQ ID NO: 1653690 - RNA, 15 nt, Human
ucuugccuuuuucau

SEQ ID NO: 1653691 - RNA, 11 nt, Human
ucuugcucugc

SEQ ID NO: 1653692 - RNA, 12 nt, Human
ucuugcucugcu

SEQ ID NO: 1653693 - RNA, 13 nt, Human
ucuugcucugcug

SEQ ID NO: 1653694 - RNA, 22 nt, Human
ucuuguauuaagaaugaaauac

SEQ ID NO: 1653695 - RNA, 21 nt, Human
ucuugaauuguaaggaaugau

SEQ ID NO: 1653696 - RNA, 16 nt, Human
ucuucuccacuggaug

SEQ ID NO: 1653697 - RNA, 21 nt, Human
ucuucucagaaggcaaaugac

SEQ ID NO: 1653698 - RNA, 12 nt, Human
ucuucuccaggc

SEQ ID NO: 1653699 - RNA, 13 nt, Human
ucuucuccaggcu

SEQ ID NO: 1653700 - RNA, 14 nt, Human
ucuucuccaggcug

SEQ ID NO: 1653701 - RNA, 15 nt, Human
ucuucuccaggcugu

SEQ ID NO: 1653702 - RNA, 16 nt, Human
ucuugaacuccuggcc

SEQ ID NO: 1653703 - RNA, 17 nt, Human
ucuugaacuccuggccu

SEQ ID NO: 1653704 - RNA, 18 nt, Human
ucuugaacuccuggccuc

SEQ ID NO: 1653705 - RNA, 14 nt, Human
ucuuagugugugca

SEQ ID NO: 1653706 - RNA, 16 nt, Human
ucuuaguggauguucu

SEQ ID NO: 1653707 - RNA, 15 nt, Human
ucuuauacauuugau

SEQ ID NO: 1653708 - RNA, 16 nt, Human
ucuuaaaauguuucaa

SEQ ID NO: 1653709 - RNA, 13 nt, Human
ucuuaugggcugg

SEQ ID NO: 1653710 - RNA, 15 nt, Human
ucuucaguaagccgu

SEQ ID NO: 1653711 - RNA, 14 nt, Human
ucuuccaggcuggg

SEQ ID NO: 1653712 - RNA, 21 nt, Human
ucuuccacaagagcccaggcc

SEQ ID NO: 1653713 - RNA, 16 nt, Human
ucuucaguaagccgug

SEQ ID NO: 1653714 - RNA, 13 nt, Human
ucuucuccacugg

SEQ ID NO: 1653715 - RNA, 23 nt, Human
ucuucucagaaggcaaaugacuu

SEQ ID NO: 1653716 - RNA, 19 nt, Human
ucuucuccacuuucuagcc

SEQ ID NO: 1653717 - RNA, 21 nt, Human
ucuucuccacuuucuagccag

SEQ ID NO: 1653718 - RNA, 17 nt, Human
ucuggcucuuccaggcu

SEQ ID NO: 1653719 - RNA, 15 nt, Human
ucuggcucuuccagg

SEQ ID NO: 1653720 - RNA, 16 nt, Human
ucuggcucuuccaggc

SEQ ID NO: 1653721 - RNA, 13 nt, Human
ucugggacacagu

SEQ ID NO: 1653722 - RNA, 12 nt, Human
ucugggacacag

SEQ ID NO: 1653723 - RNA, 23 nt, Human
ucuguacagagcccacgccccca

SEQ ID NO: 1653724 - RNA, 23 nt, Human
ucuggagcccacuguacuugcuc

SEQ ID NO: 1653725 - RNA, 17 nt, Human
ucuggcuaugcauuuga

SEQ ID NO: 1653726 - RNA, 14 nt, Human
ucuggcuaugcauu

SEQ ID NO: 1653727 - RNA, 18 nt, Human
ucuggagguacgaaaaga

SEQ ID NO: 1653728 - RNA, 22 nt, Human
ucuguggguuucuaaagcugcc

SEQ ID NO: 1653729 - RNA, 19 nt, Human
ucuguccgagcuuugaaaa

SEQ ID NO: 1653730 - RNA, 17 nt, Human
ucuguacgucugacagg

SEQ ID NO: 1653731 - RNA, 18 nt, Human
ucuguacgucugacaggc

SEQ ID NO: 1653732 - RNA, 23 nt, Human
ucuguggguuucuaaagcugcca

SEQ ID NO: 1653733 - RNA, 18 nt, Human
ucuuaaaaaguggaaaaa

SEQ ID NO: 1653734 - RNA, 17 nt, Human
ucuguuuuaugacuuca

SEQ ID NO: 1653735 - RNA, 22 nt, Human
ucuguuuuauaauuuugugaag

SEQ ID NO: 1653736 - RNA, 13 nt, Human
ucuguuuuaugac

SEQ ID NO: 1653737 - RNA, 15 nt, Human
ucuguuuuaugacuu

SEQ ID NO: 1653738 - RNA, 16 nt, Human
ucuguuuuaugacuuc

SEQ ID NO: 1653739 - RNA, 15 nt, Human
ucuguuauauaaaug

SEQ ID NO: 1653740 - RNA, 18 nt, Human
ucuguuauauaaaugguu

SEQ ID NO: 1653741 - RNA, 19 nt, Human
ucuuuugccguuauuaaaa

SEQ ID NO: 1653742 - RNA, 17 nt, Human
ucuuuugccguuauuaa

SEQ ID NO: 1653743 - RNA, 21 nt, Human
ucuuuucucccuuuuaauccu

SEQ ID NO: 1653744 - RNA, 17 nt, Human
ucuuucacauuuaaaua

SEQ ID NO: 1653745 - RNA, 16 nt, Human
ucuuuuugcuuugcuu

SEQ ID NO: 1653746 - RNA, 15 nt, Human
ugaaaagaaaaauga

SEQ ID NO: 1653747 - RNA, 19 nt, Human
ugaaaacuuuaugcuaagu

SEQ ID NO: 1653748 - RNA, 15 nt, Human
ugaaaagacuccaaa

SEQ ID NO: 1653749 - RNA, 16 nt, Human
ugaaaagacuccaaag

SEQ ID NO: 1653750 - RNA, 17 nt, Human
ugaaaagacuccaaaga

SEQ ID NO: 1653751 - RNA, 19 nt, Human
ugaaaagacuccaaagaaa

SEQ ID NO: 1653752 - RNA, 23 nt, Human
ugaaaugaggucagagccugcag

SEQ ID NO: 1653753 - RNA, 21 nt, Human
ugaaaugaggucagagccugc

SEQ ID NO: 1653754 - RNA, 22 nt, Human
ugaaaugaggucagagccugca

SEQ ID NO: 1653755 - RNA, 19 nt, Human
ugaaaugaggucagagccu

SEQ ID NO: 1653756 - RNA, 20 nt, Human
ugaaaugaggucagagccug

SEQ ID NO: 1653757 - RNA, 17 nt, Human
ugaaaucuuuuugcuuu

SEQ ID NO: 1653758 - RNA, 16 nt, Human
ugaaagggcccagaga

SEQ ID NO: 1653759 - RNA, 17 nt, Human
ugaaagggcccagagag

SEQ ID NO: 1653760 - RNA, 18 nt, Human
ugaaagggcccagagagg

SEQ ID NO: 1653761 - RNA, 13 nt, Human
ugaaagauucaau

SEQ ID NO: 1653762 - RNA, 12 nt, Human
ugaaaggaaaga

SEQ ID NO: 1653763 - RNA, 17 nt, Human
ugaaaggaaagaggcuc

SEQ ID NO: 1653764 - RNA, 18 nt, Human
ugaaagcagggacuugaa

SEQ ID NO: 1653765 - RNA, 19 nt, Human
ugaaagcagggacuugaac

SEQ ID NO: 1653766 - RNA, 23 nt, Human
ugaaagcagggacuugaacccau

SEQ ID NO: 1653767 - RNA, 22 nt, Human
ugaaagauggcugugccucugc

SEQ ID NO: 1653768 - RNA, 23 nt, Human
ugaaagauggcugugccucugcc

SEQ ID NO: 1653769 - RNA, 21 nt, Human
ugaaagauggcugugccucug

SEQ ID NO: 1653770 - RNA, 18 nt, Human
ugaaacccugucucuacu

SEQ ID NO: 1653771 - RNA, 22 nt, Human
ugaaaagacuccaaagaaaugu

SEQ ID NO: 1653772 - RNA, 17 nt, Human
ugaacugaacucugaca

SEQ ID NO: 1653773 - RNA, 19 nt, Human
ugaacugaacucugacaac

SEQ ID NO: 1653774 - RNA, 13 nt, Human
ugaacugauaaag

SEQ ID NO: 1653775 - RNA, 15 nt, Human
ugaacugauaaagau

SEQ ID NO: 1653776 - RNA, 14 nt, Human
ugaacugaacucug

SEQ ID NO: 1653777 - RNA, 18 nt, Human
ugaacucuucaaucucuu

SEQ ID NO: 1653778 - RNA, 20 nt, Human
ugaaccacaucuugcucugc

SEQ ID NO: 1653779 - RNA, 21 nt, Human
ugaaccacaucuugcucugcu

SEQ ID NO: 1653780 - RNA, 22 nt, Human
ugaaccacaucuugcucugcug

SEQ ID NO: 1653781 - RNA, 15 nt, Human
ugaacucuucaaucu

SEQ ID NO: 1653782 - RNA, 19 nt, Human
ugaaauggacuuuuguaca

SEQ ID NO: 1653783 - RNA, 14 nt, Human
ugaacacaucagcu

SEQ ID NO: 1653784 - RNA, 18 nt, Human
ugaacacuccaauuaagg

SEQ ID NO: 1653785 - RNA, 19 nt, Human
ugaacacuccaauuaagga

SEQ ID NO: 1653786 - RNA, 22 nt, Human
ugaacacuccaauuaaggauuu

SEQ ID NO: 1653787 - RNA, 23 nt, Human
ugaacacuccaauuaaggauuuu

SEQ ID NO: 1653788 - RNA, 17 nt, Human
ugaagauguagaggaga

SEQ ID NO: 1653789 - RNA, 20 nt, Human
ugaaggcucgagcaugccug

SEQ ID NO: 1653790 - RNA, 21 nt, Human
ugaaggcucgagcaugccugg

SEQ ID NO: 1653791 - RNA, 21 nt, Human
ugaaguccaagcauuuagaug

SEQ ID NO: 1653792 - RNA, 22 nt, Human
ugaaguccaagcauuuagaugu

SEQ ID NO: 1653793 - RNA, 17 nt, Human
ugaagacuuuucuuuca

SEQ ID NO: 1653794 - RNA, 22 nt, Human
ugaagacuuuucuuucagccaa

SEQ ID NO: 1653795 - RNA, 14 nt, Human
ugaagacuuuucuu

SEQ ID NO: 1653796 - RNA, 23 nt, Human
ugaacuggguacuuguggacaca

SEQ ID NO: 1653797 - RNA, 19 nt, Human
ugaacuggguacuugugga

SEQ ID NO: 1653798 - RNA, 14 nt, Human
ugaacuuggcgcug

SEQ ID NO: 1653799 - RNA, 12 nt, Human
ugaacuugguuc

SEQ ID NO: 1653800 - RNA, 14 nt, Human
ugaagacagagcua

SEQ ID NO: 1653801 - RNA, 16 nt, Human
ugaagacagagcuaca

SEQ ID NO: 1653802 - RNA, 22 nt, Human
ugaacuuguaaaggaauuuaaa

SEQ ID NO: 1653803 - RNA, 22 nt, Human
ucucccccagccccauccucug

SEQ ID NO: 1653804 - RNA, 18 nt, Human
ucucccccagccccaucc

SEQ ID NO: 1653805 - RNA, 20 nt, Human
ucucccccagccccauccuc

SEQ ID NO: 1653806 - RNA, 14 nt, Human
ucucccccagcccc

SEQ ID NO: 1653807 - RNA, 15 nt, Human
ucucccccagcccca

SEQ ID NO: 1653808 - RNA, 17 nt, Human
ucucccccagccccauc

SEQ ID NO: 1653809 - RNA, 15 nt, Human
ucucaggucccugca

SEQ ID NO: 1653810 - RNA, 21 nt, Human
ucucagugucaaugcagcccc

SEQ ID NO: 1653811 - RNA, 22 nt, Human
ucuccugccucagccucccaaa

SEQ ID NO: 1653812 - RNA, 18 nt, Human
ucuccugggcagcugccu

SEQ ID NO: 1653813 - RNA, 17 nt, Human
ucuccugggcagcugcc

SEQ ID NO: 1653814 - RNA, 16 nt, Human
ucuccugggcagcugc

SEQ ID NO: 1653815 - RNA, 15 nt, Human
ucuccugggcagcug

SEQ ID NO: 1653816 - RNA, 14 nt, Human
ucuccugggcagcu

SEQ ID NO: 1653817 - RNA, 13 nt, Human
ucuccugggcagc

SEQ ID NO: 1653818 - RNA, 15 nt, Human
ucucucgugaguaua

SEQ ID NO: 1653819 - RNA, 14 nt, Human
ucucugaggacacu

SEQ ID NO: 1653820 - RNA, 13 nt, Human
ucucugaggacac

SEQ ID NO: 1653821 - RNA, 19 nt, Human
ucucuaguuugauuaaauu

SEQ ID NO: 1653822 - RNA, 18 nt, Human
ucucuaguuugauuaaau

SEQ ID NO: 1653823 - RNA, 13 nt, Human
ucucuaggaaaua

SEQ ID NO: 1653824 - RNA, 19 nt, Human
ucucuaggaaauauuuauu

SEQ ID NO: 1653825 - RNA, 13 nt, Human
ucuccuguaccuc

SEQ ID NO: 1653826 - RNA, 15 nt, Human
ucucuacaaaaagca

SEQ ID NO: 1653827 - RNA, 21 nt, Human
ucuccugggcagcugccuccc

SEQ ID NO: 1653828 - RNA, 20 nt, Human
ucuccugggcagcugccucc

SEQ ID NO: 1653829 - RNA, 19 nt, Human
ucuccugggcagcugccuc

SEQ ID NO: 1653830 - RNA, 14 nt, Human
ucugacccaugcug

SEQ ID NO: 1653831 - RNA, 21 nt, Human
ucugaacuuggcgcugccccu

SEQ ID NO: 1653832 - RNA, 20 nt, Human
ucugaacuuggcgcugcccc

SEQ ID NO: 1653833 - RNA, 16 nt, Human
ucugacaucucugcaa

SEQ ID NO: 1653834 - RNA, 20 nt, Human
ucugagcauuagauuucuca

SEQ ID NO: 1653835 - RNA, 19 nt, Human
ucugacccaugcugcccug

SEQ ID NO: 1653836 - RNA, 15 nt, Human
ucugacccaugcugc

SEQ ID NO: 1653837 - RNA, 16 nt, Human
ucugacccaugcugcc

SEQ ID NO: 1653838 - RNA, 17 nt, Human
ucugacccaugcugccc

SEQ ID NO: 1653839 - RNA, 18 nt, Human
ucugacccaugcugcccu

SEQ ID NO: 1653840 - RNA, 23 nt, Human
ucugauucccaagcucugcuccu

SEQ ID NO: 1653841 - RNA, 19 nt, Human
ucugcacaagcugcacccu

SEQ ID NO: 1653842 - RNA, 14 nt, Human
ucugcacaagcugc

SEQ ID NO: 1653843 - RNA, 20 nt, Human
ucugaggaauucuguauaga

SEQ ID NO: 1653844 - RNA, 20 nt, Human
ucugaggacacuaaccacgc

SEQ ID NO: 1653845 - RNA, 23 nt, Human
ucugaggacacuaaccacgcugg

SEQ ID NO: 1653846 - RNA, 22 nt, Human
ucugagcauuagauuucucauu

SEQ ID NO: 1653847 - RNA, 16 nt, Human
ucugaggaauccagac

SEQ ID NO: 1653848 - RNA, 17 nt, Human
ucugaggaauccagacc

SEQ ID NO: 1653849 - RNA, 14 nt, Human
ucugaaauuuccug

SEQ ID NO: 1653850 - RNA, 23 nt, Human
ucugaaaauguauguguaaguau

SEQ ID NO: 1653851 - RNA, 13 nt, Human
ucugaaagggacg

SEQ ID NO: 1653852 - RNA, 15 nt, Human
ucucuuuucaaaaca

SEQ ID NO: 1653853 - RNA, 16 nt, Human
ucucuuuucaaaacau

SEQ ID NO: 1653854 - RNA, 16 nt, Human
ucugaaaauguaugug

SEQ ID NO: 1653855 - RNA, 13 nt, Human
ucucuucuccacu

SEQ ID NO: 1653856 - RNA, 14 nt, Human
ucucuucuccacug

SEQ ID NO: 1653857 - RNA, 15 nt, Human
ucucuucuccacugg

SEQ ID NO: 1653858 - RNA, 16 nt, Human
ucucuucuccacugga

SEQ ID NO: 1653859 - RNA, 11 nt, Human
ucucuucucca

SEQ ID NO: 1653860 - RNA, 11 nt, Human
ucucugcaggu

SEQ ID NO: 1653861 - RNA, 19 nt, Human
ucucugcaaucuucucaga

SEQ ID NO: 1653862 - RNA, 18 nt, Human
ucucuucacagucacauu

SEQ ID NO: 1653863 - RNA, 17 nt, Human
ucgcaauguaagacucg

SEQ ID NO: 1653864 - RNA, 19 nt, Human
ucgcccaggcuggagugca

SEQ ID NO: 1653865 - RNA, 12 nt, Human
ucgcccaggcug

SEQ ID NO: 1653866 - RNA, 14 nt, Human
ucgcccaggcugga

SEQ ID NO: 1653867 - RNA, 14 nt, Human
uccuuuuggaguca

SEQ ID NO: 1653868 - RNA, 23 nt, Human
uccuuuuggagucagacagaugu

SEQ ID NO: 1653869 - RNA, 15 nt, Human
ucgaguuacagacaa

SEQ ID NO: 1653870 - RNA, 17 nt, Human
ucgaguuacagacaaag

SEQ ID NO: 1653871 - RNA, 15 nt, Human
uccugguguggaaga

SEQ ID NO: 1653872 - RNA, 10 nt, Human
ucccucccuu

SEQ ID NO: 1653873 - RNA, 22 nt, Human
uccuggcaugggaaugaauguc

SEQ ID NO: 1653874 - RNA, 17 nt, Human
uccuggcccacugcauc

SEQ ID NO: 1653875 - RNA, 16 nt, Human
uccuucaaagcaaaug

SEQ ID NO: 1653876 - RNA, 14 nt, Human
uccuuaccagcaga

SEQ ID NO: 1653877 - RNA, 15 nt, Human
uccuugcaucaauuu

SEQ ID NO: 1653878 - RNA, 12 nt, Human
uccuucuguccu

SEQ ID NO: 1653879 - RNA, 19 nt, Human
uccuucuguccuacucugu

SEQ ID NO: 1653880 - RNA, 17 nt, Human
ucucagaaucucaaaua

SEQ ID NO: 1653881 - RNA, 21 nt, Human
ucucagaaucucaaauaacua

SEQ ID NO: 1653882 - RNA, 19 nt, Human
ucucagaaggcaaaugacu

SEQ ID NO: 1653883 - RNA, 20 nt, Human
ucucagaaggcaaaugacuu

SEQ ID NO: 1653884 - RNA, 21 nt, Human
ucucagaaggcaaaugacuuu

SEQ ID NO: 1653885 - RNA, 22 nt, Human
ucucagaaggcaaaugacuuug

SEQ ID NO: 1653886 - RNA, 18 nt, Human
ucucacuguugcccaggc

SEQ ID NO: 1653887 - RNA, 19 nt, Human
ucucacuguugcccaggcu

SEQ ID NO: 1653888 - RNA, 20 nt, Human
ucucacuguugcccaggcug

SEQ ID NO: 1653889 - RNA, 21 nt, Human
ucucacuguugcccaggcugg

SEQ ID NO: 1653890 - RNA, 18 nt, Human
ucucacucugucgcccag

SEQ ID NO: 1653891 - RNA, 22 nt, Human
ucucacucugucgcccagucug

SEQ ID NO: 1653892 - RNA, 17 nt, Human
ucucacucugucgccca

SEQ ID NO: 1653893 - RNA, 22 nt, Human
ucucaaacucuugaccucaggu

SEQ ID NO: 1653894 - RNA, 13 nt, Human
ucucaaacucuug

SEQ ID NO: 1653895 - RNA, 21 nt, Human
ucucaaacucuugaccucagg

SEQ ID NO: 1653896 - RNA, 17 nt, Human
ucucaaccaccuuucag

SEQ ID NO: 1653897 - RNA, 22 nt, Human
ucuacugaggugcuauguucuu

SEQ ID NO: 1653898 - RNA, 22 nt, Human
ucuagggaaaaaccagcgugug

SEQ ID NO: 1653899 - RNA, 21 nt, Human
ucuacacugugcugagucuga

SEQ ID NO: 1653900 - RNA, 15 nt, Human
ucuacacugugcuga

SEQ ID NO: 1653901 - RNA, 18 nt, Human
ucuacugaggugcuaugu

SEQ ID NO: 1653902 - RNA, 19 nt, Human
ucuacugaggugcuauguu

SEQ ID NO: 1653903 - RNA, 12 nt, Human
ucuacacugugc

SEQ ID NO: 1653904 - RNA, 14 nt, Human
ucuacacugugcug

SEQ ID NO: 1653905 - RNA, 17 nt, Human
ucuacacuccagugaga

SEQ ID NO: 1653906 - RNA, 16 nt, Human
ucuaacuucaccauau

SEQ ID NO: 1653907 - RNA, 15 nt, Human
ucuaacuucaccaua

SEQ ID NO: 1653908 - RNA, 22 nt, Human
ucuaacuucaccauauuaccac

SEQ ID NO: 1653909 - RNA, 21 nt, Human
ucuacacuaagagagaaugag

SEQ ID NO: 1653910 - RNA, 16 nt, Human
ucuaaauucuuucauu

SEQ ID NO: 1653911 - RNA, 16 nt, Human
ucaagcgauucuucug

SEQ ID NO: 1653912 - RNA, 17 nt, Human
ucaagcgauucuucugc

SEQ ID NO: 1653913 - RNA, 18 nt, Human
ucaaggauccugagccag

SEQ ID NO: 1653914 - RNA, 19 nt, Human
ucaaggauccugagccaga

SEQ ID NO: 1653915 - RNA, 23 nt, Human
ucaaggauccugagccagauuuc

SEQ ID NO: 1653916 - RNA, 20 nt, Human
ucaaggauccugagccagau

SEQ ID NO: 1653917 - RNA, 22 nt, Human
ucaagugauucuccugccucag

SEQ ID NO: 1653918 - RNA, 16 nt, Human
ucaaacuuuacuaugg

SEQ ID NO: 1653919 - RNA, 22 nt, Human
ucaaacucuugaccucagguga

SEQ ID NO: 1653920 - RNA, 13 nt, Human
ucaaacuuuacua

SEQ ID NO: 1653921 - RNA, 15 nt, Human
ucaaacuuuacuaug

SEQ ID NO: 1653922 - RNA, 13 nt, Human
ucaaccuccuggg

SEQ ID NO: 1653923 - RNA, 14 nt, Human
ucaaccuccugggc

SEQ ID NO: 1653924 - RNA, 19 nt, Human
ucaacuccaaacugacucu

SEQ ID NO: 1653925 - RNA, 19 nt, Human
ucaauuacaggaaguacug

SEQ ID NO: 1653926 - RNA, 20 nt, Human
ucaauuacaggaaguacugg

SEQ ID NO: 1653927 - RNA, 21 nt, Human
ucacacaguauuacuucugcu

SEQ ID NO: 1653928 - RNA, 22 nt, Human
ucacacaguauuacuucugcua

SEQ ID NO: 1653929 - RNA, 13 nt, Human
ucacacagugagu

SEQ ID NO: 1653930 - RNA, 21 nt, Human
ucacacaugagcaucaggcca

SEQ ID NO: 1653931 - RNA, 22 nt, Human
ucacacagugagucgaggacag

SEQ ID NO: 1653932 - RNA, 23 nt, Human
ucacacagugagucgaggacagg

SEQ ID NO: 1653933 - RNA, 11 nt, Human
ucacaggcagg

SEQ ID NO: 1653934 - RNA, 23 nt, Human
ucacaggacagcccuucuuucca

SEQ ID NO: 1653935 - RNA, 19 nt, Human
ucacaggaaguagaggagg

SEQ ID NO: 1653936 - RNA, 13 nt, Human
ucaauaggaaaaa

SEQ ID NO: 1653937 - RNA, 17 nt, Human
ucaauaggaaaaacuga

SEQ ID NO: 1653938 - RNA, 14 nt, Human
ucaauaggaaaaac

SEQ ID NO: 1653939 - RNA, 14 nt, Human
ucaaugcacugaca

SEQ ID NO: 1653940 - RNA, 13 nt, Human
ucaauuacaggaa

SEQ ID NO: 1653941 - RNA, 18 nt, Human
ucaauuacaggaaguacu

SEQ ID NO: 1653942 - RNA, 18 nt, Human
ucaaugcacugacauugu

SEQ ID NO: 1653943 - RNA, 17 nt, Human
ucaaugcuauaacuaug

SEQ ID NO: 1653944 - RNA, 13 nt, Human
ucaaugcagcccc

SEQ ID NO: 1653945 - RNA, 21 nt, Human
uauuuucaacgcagcccugcu

SEQ ID NO: 1653946 - RNA, 15 nt, Human
uauuuuauguugcau

SEQ ID NO: 1653947 - RNA, 16 nt, Human
uauuuuauguugcaua

SEQ ID NO: 1653948 - RNA, 12 nt, Human
uauuuuaugauc

SEQ ID NO: 1653949 - RNA, 22 nt, Human
uauuuuuuucugaauuauuuuc

SEQ ID NO: 1653950 - RNA, 16 nt, Human
uauuuuuuucugaaau

SEQ ID NO: 1653951 - RNA, 17 nt, Human
uauuuuuuucugaaauu

SEQ ID NO: 1653952 - RNA, 15 nt, Human
uauuuuuuuacuaau

SEQ ID NO: 1653953 - RNA, 15 nt, Human
ucaaacgugaaaaug

SEQ ID NO: 1653954 - RNA, 16 nt, Human
ucaaacgugaaaaugc

SEQ ID NO: 1653955 - RNA, 14 nt, Human
ucaaacucuuaaaa

SEQ ID NO: 1653956 - RNA, 22 nt, Human
ucaaaacgguuuuacugcagcu

SEQ ID NO: 1653957 - RNA, 23 nt, Human
ucaaacggccucacuaggcuucu

SEQ ID NO: 1653958 - RNA, 13 nt, Human
ucaaaacugcacu

SEQ ID NO: 1653959 - RNA, 17 nt, Human
uaucugaagucagaucu

SEQ ID NO: 1653960 - RNA, 18 nt, Human
uaucugaagucagaucug

SEQ ID NO: 1653961 - RNA, 15 nt, Human
uaucugaggaauucu

SEQ ID NO: 1653962 - RNA, 18 nt, Human
uaucugacaucucugcaa

SEQ ID NO: 1653963 - RNA, 16 nt, Human
uaucugaggaauucug

SEQ ID NO: 1653964 - RNA, 23 nt, Human
uauuuauuaaaugcccagccccu

SEQ ID NO: 1653965 - RNA, 14 nt, Human
uaucugaaaaugua

SEQ ID NO: 1653966 - RNA, 15 nt, Human
uaucugaaaauguau

SEQ ID NO: 1653967 - RNA, 20 nt, Human
uaucugaaaauguaugugua

SEQ ID NO: 1653968 - RNA, 13 nt, Human
uauuuauuacugu

SEQ ID NO: 1653969 - RNA, 22 nt, Human
uauuucuaugaaauauuauguu

SEQ ID NO: 1653970 - RNA, 21 nt, Human
uauuucuaugaaauauuaugu

SEQ ID NO: 1653971 - RNA, 16 nt, Human
ucacgccacugcacua

SEQ ID NO: 1653972 - RNA, 13 nt, Human
ucacgccacugca

SEQ ID NO: 1653973 - RNA, 14 nt, Human
ucacgccacugcac

SEQ ID NO: 1653974 - RNA, 19 nt, Human
ucacgccuguaauccuagc

SEQ ID NO: 1653975 - RNA, 20 nt, Human
ucacgccuguaauccuagca

SEQ ID NO: 1653976 - RNA, 14 nt, Human
ucaccuuugucccc

SEQ ID NO: 1653977 - RNA, 15 nt, Human
ucaccuuugucccca

SEQ ID NO: 1653978 - RNA, 17 nt, Human
ucaccuuuguccccacc

SEQ ID NO: 1653979 - RNA, 18 nt, Human
ucaccuuuguccccaccg

SEQ ID NO: 1653980 - RNA, 22 nt, Human
ucaccuuuguccccaccgcaga

SEQ ID NO: 1653981 - RNA, 12 nt, Human
ucacaggcaggu

SEQ ID NO: 1653982 - RNA, 15 nt, Human
ucacaggcaggucca

SEQ ID NO: 1653983 - RNA, 13 nt, Human
ucaccuuuauucu

SEQ ID NO: 1653984 - RNA, 14 nt, Human
ucaccuuucccauc

SEQ ID NO: 1653985 - RNA, 12 nt, Human
ucaccuuugucc

SEQ ID NO: 1653986 - RNA, 13 nt, Human
ucacggcucacug

SEQ ID NO: 1653987 - RNA, 15 nt, Human
ucacggcucacugca

SEQ ID NO: 1653988 - RNA, 20 nt, Human
ucacggcucacugcagccuc

SEQ ID NO: 1653989 - RNA, 14 nt, Human
ucacggaagagccu

SEQ ID NO: 1653990 - RNA, 16 nt, Human
ucacggaagagccuug

SEQ ID NO: 1653991 - RNA, 17 nt, Human
ucacggaagagccuugc

SEQ ID NO: 1653992 - RNA, 18 nt, Human
ucacuccuaccugguaau

SEQ ID NO: 1653993 - RNA, 13 nt, Human
ucacuccuugaaa

SEQ ID NO: 1653994 - RNA, 23 nt, Human
ucacucuccuuggugucgggcau

SEQ ID NO: 1653995 - RNA, 12 nt, Human
ucacucuggcag

SEQ ID NO: 1653996 - RNA, 13 nt, Human
ucacucuggcagc

SEQ ID NO: 1653997 - RNA, 19 nt, Human
ucacucuacuuagcauguc

SEQ ID NO: 1653998 - RNA, 20 nt, Human
ucacucuacuuagcaugucc

SEQ ID NO: 1653999 - RNA, 18 nt, Human
ucacucuccauuuaauaa

SEQ ID NO: 1654000 - RNA, 12 nt, Human
ucacucuccuug

SEQ ID NO: 1654001 - RNA, 14 nt, Human
ucacucuccuuggu

SEQ ID NO: 1654002 - RNA, 14 nt, Human
ucacucuggcagcu

SEQ ID NO: 1654003 - RNA, 15 nt, Human
ucacucuggcagcuc

SEQ ID NO: 1654004 - RNA, 16 nt, Human
ucacucuggcagcuca

SEQ ID NO: 1654005 - RNA, 17 nt, Human
ucacucuggcagcucag

SEQ ID NO: 1654006 - RNA, 18 nt, Human
ucacucuggcagcucaga

SEQ ID NO: 1654007 - RNA, 19 nt, Human
ucacucuggcagcucagag

SEQ ID NO: 1654008 - RNA, 20 nt, Human
ucacucuggcagcucagaga

SEQ ID NO: 1654009 - RNA, 22 nt, Human
ucacucuggcagcucagagagg

SEQ ID NO: 1654010 - RNA, 21 nt, Human
ucagaggggaauaaacuguug

SEQ ID NO: 1654011 - RNA, 22 nt, Human
ucagaguugaugguuguacaua

SEQ ID NO: 1654012 - RNA, 15 nt, Human
ucagauaacuguuau

SEQ ID NO: 1654013 - RNA, 13 nt, Human
ucagauaacuguu

SEQ ID NO: 1654014 - RNA, 19 nt, Human
ucagcacgauuucuguuua

SEQ ID NO: 1654015 - RNA, 22 nt, Human
ucagauaacuguuauuuauaau

SEQ ID NO: 1654016 - RNA, 22 nt, Human
ucagacauagaauuaacacaug

SEQ ID NO: 1654017 - RNA, 15 nt, Human
ucagacagcugccug

SEQ ID NO: 1654018 - RNA, 16 nt, Human
ucagacagcugccugg

SEQ ID NO: 1654019 - RNA, 17 nt, Human
ucagacagcugccuggg

SEQ ID NO: 1654020 - RNA, 18 nt, Human
ucagacagcugccuggga

SEQ ID NO: 1654021 - RNA, 19 nt, Human
ucagacagcugccugggau

SEQ ID NO: 1654022 - RNA, 20 nt, Human
ucagacagcugccugggauc

SEQ ID NO: 1654023 - RNA, 19 nt, Human
ucagacauagaauuaacac

SEQ ID NO: 1654024 - RNA, 22 nt, Human
ucacucugucgcccagucugga

SEQ ID NO: 1654025 - RNA, 19 nt, Human
ucacucugucgcccagucu

SEQ ID NO: 1654026 - RNA, 12 nt, Human
ucacucugucgc

SEQ ID NO: 1654027 - RNA, 16 nt, Human
ucacucugucgcccag

SEQ ID NO: 1654028 - RNA, 20 nt, Human
ucacugcuuaacuucacaua

SEQ ID NO: 1654029 - RNA, 18 nt, Human
ucacugcuuaacuucaca

SEQ ID NO: 1654030 - RNA, 17 nt, Human
ucacugcuuaacuucac

SEQ ID NO: 1654031 - RNA, 15 nt, Human
ucacugcuuaacuuc

SEQ ID NO: 1654032 - RNA, 17 nt, Human
ucacuugucaauaaaau

SEQ ID NO: 1654033 - RNA, 12 nt, Human
ucacuuuuauuu

SEQ ID NO: 1654034 - RNA, 22 nt, Human
ucacuuuuauuuagcaccaggg

SEQ ID NO: 1654035 - RNA, 13 nt, Human
ucacuuuuuucca

SEQ ID NO: 1654036 - RNA, 15 nt, Human
ucacuuuuuuccaca

SEQ ID NO: 1654037 - RNA, 16 nt, Human
ucacuuuuuuccacau

SEQ ID NO: 1654038 - RNA, 13 nt, Human
ucccuaauaaagc

SEQ ID NO: 1654039 - RNA, 14 nt, Human
ucccuaauaaagcu

SEQ ID NO: 1654040 - RNA, 15 nt, Human
ucccuacuguaauuu

SEQ ID NO: 1654041 - RNA, 17 nt, Human
ucccucccucuuucccu

SEQ ID NO: 1654042 - RNA, 15 nt, Human
ucccuacuuccugug

SEQ ID NO: 1654043 - RNA, 16 nt, Human
ucccuacuuccuguga

SEQ ID NO: 1654044 - RNA, 15 nt, Human
ucccucccucuuucc

SEQ ID NO: 1654045 - RNA, 11 nt, Human
ucccuaauaaa

SEQ ID NO: 1654046 - RNA, 12 nt, Human
ucccuaauaaag

SEQ ID NO: 1654047 - RNA, 21 nt, Human
uccccuuccuaauuccacagc

SEQ ID NO: 1654048 - RNA, 22 nt, Human
uccccuuccuaauuccacagcu

SEQ ID NO: 1654049 - RNA, 18 nt, Human
uccccuguuuguuucuga

SEQ ID NO: 1654050 - RNA, 24 nt, Human
uccccugcuggguguggcgcagca

SEQ ID NO: 1654051 - RNA, 19 nt, Human
uccccuguagagugggagc

SEQ ID NO: 1654052 - RNA, 15 nt, Human
uccccuguucacucu

SEQ ID NO: 1654053 - RNA, 22 nt, Human
uccccuguagagugggagcuga

SEQ ID NO: 1654054 - RNA, 23 nt, Human
uccccuguccccgcacugggcuu

SEQ ID NO: 1654055 - RNA, 14 nt, Human
uccccugcugggug

SEQ ID NO: 1654056 - RNA, 15 nt, Human
uccccugcugggugu

SEQ ID NO: 1654057 - RNA, 20 nt, Human
uccccugcuggguguggcgc

SEQ ID NO: 1654058 - RNA, 21 nt, Human
uccccugcuggguguggcgca

SEQ ID NO: 1654059 - RNA, 17 nt, Human
ucccccaucucuucugg

SEQ ID NO: 1654060 - RNA, 13 nt, Human
ucccccugcccca

SEQ ID NO: 1654061 - RNA, 13 nt, Human
ucccccucuggcu

SEQ ID NO: 1654062 - RNA, 13 nt, Human
uccccaggaggcc

SEQ ID NO: 1654063 - RNA, 20 nt, Human
uccccgcacugggcuugggg

SEQ ID NO: 1654064 - RNA, 21 nt, Human
ucccccuuccauggacuuugu

SEQ ID NO: 1654065 - RNA, 22 nt, Human
ucccaaggcucugagcaaaugu

SEQ ID NO: 1654066 - RNA, 13 nt, Human
ucccaccucagcc

SEQ ID NO: 1654067 - RNA, 14 nt, Human
ucccaccucagccu

SEQ ID NO: 1654068 - RNA, 15 nt, Human
ucccaccucagccuc

SEQ ID NO: 1654069 - RNA, 20 nt, Human
ucccaggcauuccccaggag

SEQ ID NO: 1654070 - RNA, 21 nt, Human
ucccaggcauuccccaggagg

SEQ ID NO: 1654071 - RNA, 20 nt, Human
ucccaggcgccccuuccccc

SEQ ID NO: 1654072 - RNA, 18 nt, Human
ucccaggcgccccuuccc

SEQ ID NO: 1654073 - RNA, 21 nt, Human
ucccaggcgccccuucccccu

SEQ ID NO: 1654074 - RNA, 15 nt, Human
ucccaggcugagccu

SEQ ID NO: 1654075 - RNA, 23 nt, Human
ucccaggcauuccccaggaggcc

SEQ ID NO: 1654076 - RNA, 22 nt, Human
ucccaggcauuccccaggaggc

SEQ ID NO: 1654077 - RNA, 21 nt, Human
ucccaucugugaaaggaaaga

SEQ ID NO: 1654078 - RNA, 16 nt, Human
ucccaggcugagccuc

SEQ ID NO: 1654079 - RNA, 18 nt, Human
ucccaggcugagccucag

SEQ ID NO: 1654080 - RNA, 20 nt, Human
ucccaucucacacaugagca

SEQ ID NO: 1654081 - RNA, 23 nt, Human
ucccaucucacacaugagcauca

SEQ ID NO: 1654082 - RNA, 14 nt, Human
uccauggacuuugu

SEQ ID NO: 1654083 - RNA, 15 nt, Human
uccauggacuuuguu

SEQ ID NO: 1654084 - RNA, 16 nt, Human
uccauccaggccauuc

SEQ ID NO: 1654085 - RNA, 23 nt, Human
uccagcucaccagccccagugcc

SEQ ID NO: 1654086 - RNA, 18 nt, Human
ucccaaggcucugagcaa

SEQ ID NO: 1654087 - RNA, 17 nt, Human
ucccaagcucugcuccu

SEQ ID NO: 1654088 - RNA, 12 nt, Human
ucccaagcucug

SEQ ID NO: 1654089 - RNA, 13 nt, Human
ucccaagcucugc

SEQ ID NO: 1654090 - RNA, 14 nt, Human
ucccaagcucugcu

SEQ ID NO: 1654091 - RNA, 15 nt, Human
ucccaagcucugcuc

SEQ ID NO: 1654092 - RNA, 16 nt, Human
ucccaacucaccccag

SEQ ID NO: 1654093 - RNA, 14 nt, Human
ucccaacucacccc

SEQ ID NO: 1654094 - RNA, 15 nt, Human
ucccaacucacccca

SEQ ID NO: 1654095 - RNA, 13 nt, Human
ucccaacucaccc

SEQ ID NO: 1654096 - RNA, 16 nt, Human
ucccaaauuucauacc

SEQ ID NO: 1654097 - RNA, 22 nt, Human
ucauucagauaugauucaaaug

SEQ ID NO: 1654098 - RNA, 14 nt, Human
ucauuucuuugagu

SEQ ID NO: 1654099 - RNA, 16 nt, Human
ucauuucugcaucagc

SEQ ID NO: 1654100 - RNA, 22 nt, Human
ucauuucugcaucagcugcuga

SEQ ID NO: 1654101 - RNA, 19 nt, Human
uccaaacuaccuuccaguu

SEQ ID NO: 1654102 - RNA, 17 nt, Human
uccaaaauaaaacuuuu

SEQ ID NO: 1654103 - RNA, 16 nt, Human
uccaaaauaaaacuuu

SEQ ID NO: 1654104 - RNA, 23 nt, Human
uccaaacugacucuuaagaagac

SEQ ID NO: 1654105 - RNA, 12 nt, Human
uccaaagaaaug

SEQ ID NO: 1654106 - RNA, 14 nt, Human
uccaagaauuucua

SEQ ID NO: 1654107 - RNA, 22 nt, Human
uccaagaagcccaggaaaggcu

SEQ ID NO: 1654108 - RNA, 20 nt, Human
uccaagaagcccaggaaagg

SEQ ID NO: 1654109 - RNA, 19 nt, Human
uccaagaccuucuccuuca

SEQ ID NO: 1654110 - RNA, 13 nt, Human
uccaagcaaaugu

SEQ ID NO: 1654111 - RNA, 17 nt, Human
uccaagcauuuagaugu

SEQ ID NO: 1654112 - RNA, 23 nt, Human
uccaagcauaccaacacgagcag

SEQ ID NO: 1654113 - RNA, 20 nt, Human
uccagcagauuauucacuga

SEQ ID NO: 1654114 - RNA, 22 nt, Human
uccagcagauuauucacugauu

SEQ ID NO: 1654115 - RNA, 23 nt, Human
uccagccaaagccuccuccagcc

SEQ ID NO: 1654116 - RNA, 16 nt, Human
uccagauccuggaaau

SEQ ID NO: 1654117 - RNA, 17 nt, Human
uccagauccuggaaauc

SEQ ID NO: 1654118 - RNA, 14 nt, Human
uccagauccuggaa

SEQ ID NO: 1654119 - RNA, 14 nt, Human
uccacuuggucugu

SEQ ID NO: 1654120 - RNA, 13 nt, Human
uccaccugccagg

SEQ ID NO: 1654121 - RNA, 12 nt, Human
uccacuuggucu

SEQ ID NO: 1654122 - RNA, 13 nt, Human
uccacuuggucug

SEQ ID NO: 1654123 - RNA, 14 nt, Human
uccaccuacaugag

SEQ ID NO: 1654124 - RNA, 12 nt, Human
uccaccucccug

SEQ ID NO: 1654125 - RNA, 12 nt, Human
uccaccugccag

SEQ ID NO: 1654126 - RNA, 23 nt, Human
uccaccucccugcaauaaaaugg

SEQ ID NO: 1654127 - RNA, 15 nt, Human
uccacaagagcccag

SEQ ID NO: 1654128 - RNA, 14 nt, Human
uccacaagagccca

SEQ ID NO: 1654129 - RNA, 14 nt, Human
uccacaacacacag

SEQ ID NO: 1654130 - RNA, 20 nt, Human
uccaagcauuuagauguaua

SEQ ID NO: 1654131 - RNA, 21 nt, Human
ucauacccacccccacccaag

SEQ ID NO: 1654132 - RNA, 20 nt, Human
ucauacccacccccacccaa

SEQ ID NO: 1654133 - RNA, 14 nt, Human
ucauacccaccccc

SEQ ID NO: 1654134 - RNA, 15 nt, Human
ucauacccaccccca

SEQ ID NO: 1654135 - RNA, 16 nt, Human
ucauuaggugugacug

SEQ ID NO: 1654136 - RNA, 16 nt, Human
ucauuauuuuauuaug

SEQ ID NO: 1654137 - RNA, 18 nt, Human
ucauuauuuuauuaugaa

SEQ ID NO: 1654138 - RNA, 19 nt, Human
ucauuauuuuauuaugaaa

SEQ ID NO: 1654139 - RNA, 22 nt, Human
ucauuauuuuauuaugaaacuu

SEQ ID NO: 1654140 - RNA, 14 nt, Human
ucauuauuuuauua

SEQ ID NO: 1654141 - RNA, 15 nt, Human
ucauuauuuuauuau

SEQ ID NO: 1654142 - RNA, 13 nt, Human
ucauuauuuuauu

SEQ ID NO: 1654143 - RNA, 22 nt, Human
ucauuaggugugacugaauuuc

SEQ ID NO: 1654144 - RNA, 21 nt, Human
ucauuaggugugacugaauuu

SEQ ID NO: 1654145 - RNA, 18 nt, Human
ucauuaggugugacugaa

SEQ ID NO: 1654146 - RNA, 24 nt, Human
ucagucugauucccaagcucugcu

SEQ ID NO: 1654147 - RNA, 15 nt, Human
ucagucuggcccuuc

SEQ ID NO: 1654148 - RNA, 23 nt, Human
ucagugguuggcaauuguuucaa

SEQ ID NO: 1654149 - RNA, 11 nt, Human
ucaguguacau

SEQ ID NO: 1654150 - RNA, 13 nt, Human
ucagugugacuga

SEQ ID NO: 1654151 - RNA, 17 nt, Human
ucagugugacugaucuc

SEQ ID NO: 1654152 - RNA, 13 nt, Human
ucauacccacccc

SEQ ID NO: 1654153 - RNA, 15 nt, Human
ucauaauuauuauuu

SEQ ID NO: 1654154 - RNA, 17 nt, Human
ucaguuguuaguguguc

SEQ ID NO: 1654155 - RNA, 15 nt, Human
ucaguuacucuucag

SEQ ID NO: 1654156 - RNA, 11 nt, Human
uaaaaaacacu

SEQ ID NO: 1654157 - RNA, 12 nt, Human
uaaaaaacacug

SEQ ID NO: 1654158 - RNA, 20 nt, Human
uaaaaaacugcugacuguuu

SEQ ID NO: 1654159 - RNA, 23 nt, Human
uaaaaaacugcugacuguuuucu

SEQ ID NO: 1654160 - RNA, 16 nt, Human
uaaaaaagaaacauuu

SEQ ID NO: 1654161 - RNA, 23 nt, Human
guuuuuauggcuuuugugcauua

SEQ ID NO: 1654162 - RNA, 22 nt, Human
guuuuuauggcuuuugugcauu

SEQ ID NO: 1654163 - RNA, 19 nt, Human
guuuuuauggcuuuugugc

SEQ ID NO: 1654164 - RNA, 12 nt, Human
guuuucucuuga

SEQ ID NO: 1654165 - RNA, 19 nt, Human
guuuucucuugagagggug

SEQ ID NO: 1654166 - RNA, 12 nt, Human
guuuguuuaguc

SEQ ID NO: 1654167 - RNA, 16 nt, Human
guuuguugugaggauu

SEQ ID NO: 1654168 - RNA, 17 nt, Human
guuuucaguguacaugg

SEQ ID NO: 1654169 - RNA, 16 nt, Human
guuuucaguguacaug

SEQ ID NO: 1654170 - RNA, 18 nt, Human
guuuucaggcuagaugua

SEQ ID NO: 1654171 - RNA, 20 nt, Human
guuuuccagguuuaagcugu

SEQ ID NO: 1654172 - RNA, 16 nt, Human
guuuucauuaucucaa

SEQ ID NO: 1654173 - RNA, 14 nt, Human
guuucuuuguaaug

SEQ ID NO: 1654174 - RNA, 17 nt, Human
guuucuuuguaaugaaa

SEQ ID NO: 1654175 - RNA, 16 nt, Human
guuugaaccaagaacu

SEQ ID NO: 1654176 - RNA, 20 nt, Human
guuucuaaagcugccagccg

SEQ ID NO: 1654177 - RNA, 16 nt, Human
guuucuaaagcugcca

SEQ ID NO: 1654178 - RNA, 14 nt, Human
guuucuaaagcugc

SEQ ID NO: 1654179 - RNA, 15 nt, Human
guuucuaaagcugcc

SEQ ID NO: 1654180 - RNA, 22 nt, Human
guuugauuaaauucuugcaaag

SEQ ID NO: 1654181 - RNA, 19 nt, Human
guuugauuaaauucuugca

SEQ ID NO: 1654182 - RNA, 17 nt, Human
guuugauuaaauucuug

SEQ ID NO: 1654183 - RNA, 16 nt, Human
guuugagguuuuuaag

SEQ ID NO: 1654184 - RNA, 19 nt, Human
guuugagguuuuuaagccu

SEQ ID NO: 1654185 - RNA, 18 nt, Human
guuuguuccccaagacau

SEQ ID NO: 1654186 - RNA, 19 nt, Human
guuuguggaaaaugaaaau

SEQ ID NO: 1654187 - RNA, 23 nt, Human
guuugugcugguguaugugugaa

SEQ ID NO: 1654188 - RNA, 20 nt, Human
guuuguaaauuaacuuuuau

SEQ ID NO: 1654189 - RNA, 19 nt, Human
guuuguaaauuaacuuuua

SEQ ID NO: 1654190 - RNA, 17 nt, Human
guuuguaaauuaacuuu

SEQ ID NO: 1654191 - RNA, 22 nt, Human
guuuccugcccugggaggcagu

SEQ ID NO: 1654192 - RNA, 16 nt, Human
guuuccuuauauuaug

SEQ ID NO: 1654193 - RNA, 21 nt, Human
guuuccuggcacugcuuccag

SEQ ID NO: 1654194 - RNA, 22 nt, Human
guuuccuggcacugcuuccagu

SEQ ID NO: 1654195 - RNA, 13 nt, Human
guuuccugcccug

SEQ ID NO: 1654196 - RNA, 17 nt, Human
guuuccugcccugggag

SEQ ID NO: 1654197 - RNA, 16 nt, Human
guuuccuggcacugcu

SEQ ID NO: 1654198 - RNA, 20 nt, Human
guuuccuggcacugcuucca

SEQ ID NO: 1654199 - RNA, 18 nt, Human
guuucagaaauguguuau

SEQ ID NO: 1654200 - RNA, 14 nt, Human
guuucagaaaugug

SEQ ID NO: 1654201 - RNA, 21 nt, Human
gguuggccccugcccggcugc

SEQ ID NO: 1654202 - RNA, 13 nt, Human
guuuagaaagcuu

SEQ ID NO: 1654203 - RNA, 17 nt, Human
guuuagaaagcuugccc

SEQ ID NO: 1654204 - RNA, 14 nt, Human
guuuagucuugucu

SEQ ID NO: 1654205 - RNA, 18 nt, Human
guuuagucuugucucaga

SEQ ID NO: 1654206 - RNA, 16 nt, Human
guuuaguaaucauauu

SEQ ID NO: 1654207 - RNA, 13 nt, Human
uaaaaugagaaau

SEQ ID NO: 1654208 - RNA, 15 nt, Human
uaaaaugagaaaucu

SEQ ID NO: 1654209 - RNA, 16 nt, Human
uaaaaugagaaaucua

SEQ ID NO: 1654210 - RNA, 19 nt, Human
uaaaauccauacauuugug

SEQ ID NO: 1654211 - RNA, 18 nt, Human
uaaaauccauacauuugu

SEQ ID NO: 1654212 - RNA, 17 nt, Human
uaaaagggacugagaaa

SEQ ID NO: 1654213 - RNA, 19 nt, Human
uaaaagggacugagaaauu

SEQ ID NO: 1654214 - RNA, 20 nt, Human
uaaaagggacugagaaauuu

SEQ ID NO: 1654215 - RNA, 21 nt, Human
uaaaagggacugagaaauuua

SEQ ID NO: 1654216 - RNA, 15 nt, Human
uaaaaaugguuuaaa

SEQ ID NO: 1654217 - RNA, 14 nt, Human
uaaaagaugaaaau

SEQ ID NO: 1654218 - RNA, 20 nt, Human
uaaacugcccccucugcccu

SEQ ID NO: 1654219 - RNA, 21 nt, Human
uaaacugcccccucugcccug

SEQ ID NO: 1654220 - RNA, 22 nt, Human
uaaacugcccccucugcccugc

SEQ ID NO: 1654221 - RNA, 23 nt, Human
uaaacugcccccucugcccugcg

SEQ ID NO: 1654222 - RNA, 19 nt, Human
uaaacuuaaucuaaaugga

SEQ ID NO: 1654223 - RNA, 18 nt, Human
uaaacuuaaucuaaaugg

SEQ ID NO: 1654224 - RNA, 14 nt, Human
uaaacuuaaucuaa

SEQ ID NO: 1654225 - RNA, 16 nt, Human
uaaacuuuaccuuuuu

SEQ ID NO: 1654226 - RNA, 22 nt, Human
uaaacuuuaccuuuuuuauaca

SEQ ID NO: 1654227 - RNA, 12 nt, Human
uaaacuuucaca

SEQ ID NO: 1654228 - RNA, 13 nt, Human
uaaacuuucacac

SEQ ID NO: 1654229 - RNA, 21 nt, Human
uaaacacucuugaaaaaugca

SEQ ID NO: 1654230 - RNA, 19 nt, Human
uaaacaagaccacguuucu

SEQ ID NO: 1654231 - RNA, 23 nt, Human
uaaacaagaccacguuucuaaag

SEQ ID NO: 1654232 - RNA, 18 nt, Human
uaaacaagaccacguuuc

SEQ ID NO: 1654233 - RNA, 17 nt, Human
uaaaauggguuuuacug

SEQ ID NO: 1654234 - RNA, 13 nt, Human
uaaacuuuucuga

SEQ ID NO: 1654235 - RNA, 14 nt, Human
uaaacuuuucugau

SEQ ID NO: 1654236 - RNA, 15 nt, Human
uaaacuuuucugaua

SEQ ID NO: 1654237 - RNA, 20 nt, Human
uaaacuuuuuucuuacuguc

SEQ ID NO: 1654238 - RNA, 13 nt, Human
uaaaguugaauuu

SEQ ID NO: 1654239 - RNA, 14 nt, Human
uaaaguugaauuua

SEQ ID NO: 1654240 - RNA, 15 nt, Human
uaaaguugaauuuau

SEQ ID NO: 1654241 - RNA, 17 nt, Human
uaaaguugaauuuauug

SEQ ID NO: 1654242 - RNA, 19 nt, Human
uaaaguugaauuuauuggc

SEQ ID NO: 1654243 - RNA, 21 nt, Human
uaaaguugaauuuauuggcuu

SEQ ID NO: 1654244 - RNA, 23 nt, Human
uaaaguugaauuuauuggcuuuu

SEQ ID NO: 1654245 - RNA, 21 nt, Human
uaaaguguauuuuuuuacuaa

SEQ ID NO: 1654246 - RNA, 23 nt, Human
uaaaguguauuuuuuuacuaaua

SEQ ID NO: 1654247 - RNA, 22 nt, Human
uaaaguguauuuuuuuacuaau

SEQ ID NO: 1654248 - RNA, 14 nt, Human
uaaaguuuguugaa

SEQ ID NO: 1654249 - RNA, 13 nt, Human
uaaaguuucuguu

SEQ ID NO: 1654250 - RNA, 17 nt, Human
uaaauaaaaauaauccu

SEQ ID NO: 1654251 - RNA, 15 nt, Human
uaaauccauuuggaa

SEQ ID NO: 1654252 - RNA, 16 nt, Human
uaaauccauuuggaaa

SEQ ID NO: 1654253 - RNA, 14 nt, Human
uaaauccauuugga

SEQ ID NO: 1654254 - RNA, 19 nt, Human
uaaaucaaguuggcuucua

SEQ ID NO: 1654255 - RNA, 20 nt, Human
uaaaucagacuaugaaguuu

SEQ ID NO: 1654256 - RNA, 19 nt, Human
uaaaucagccguguaacca

SEQ ID NO: 1654257 - RNA, 16 nt, Human
uaaauauauuuuaaga

SEQ ID NO: 1654258 - RNA, 22 nt, Human
uaaauauauuuuaagacgaaac

SEQ ID NO: 1654259 - RNA, 18 nt, Human
uaaauauaugcuaagucu

SEQ ID NO: 1654260 - RNA, 18 nt, Human
uaaauccauuuggaaauc

SEQ ID NO: 1654261 - RNA, 19 nt, Human
uaaauccauuuggaaaucu

SEQ ID NO: 1654262 - RNA, 22 nt, Human
uaaauccauuuggaaaucuuua

SEQ ID NO: 1654263 - RNA, 23 nt, Human
uaaauccauuuggaaaucuuuaa

SEQ ID NO: 1654264 - RNA, 16 nt, Human
uaaaucccauuauuca

SEQ ID NO: 1654265 - RNA, 17 nt, Human
uaaaucccauuauucaa

SEQ ID NO: 1654266 - RNA, 19 nt, Human
uaaaucccauuauucaaag

SEQ ID NO: 1654267 - RNA, 15 nt, Human
uaaauugcuccuuga

SEQ ID NO: 1654268 - RNA, 14 nt, Human
uaaauuuaguauuu

SEQ ID NO: 1654269 - RNA, 13 nt, Human
uaacagaaaugua

SEQ ID NO: 1654270 - RNA, 15 nt, Human
uaacagaaauguaca

SEQ ID NO: 1654271 - RNA, 14 nt, Human
uaacagaaauguac

SEQ ID NO: 1654272 - RNA, 19 nt, Human
uaaccagcagaaaugccuu

SEQ ID NO: 1654273 - RNA, 16 nt, Human
uaaccagcagaaaugc

SEQ ID NO: 1654274 - RNA, 14 nt, Human
uaaccagcagaaau

SEQ ID NO: 1654275 - RNA, 18 nt, Human
uaacauguuaaaccaugg

SEQ ID NO: 1654276 - RNA, 17 nt, Human
uaacauguuaaaccaug

SEQ ID NO: 1654277 - RNA, 19 nt, Human
uaacaggcagauacaggaa

SEQ ID NO: 1654278 - RNA, 16 nt, Human
uaacugagugccuuuu

SEQ ID NO: 1654279 - RNA, 17 nt, Human
uaacugagugccuuuug

SEQ ID NO: 1654280 - RNA, 20 nt, Human
uaacuuuuauaaacuuuacc

SEQ ID NO: 1654281 - RNA, 21 nt, Human
uaagcauauauuuuuauauuu

SEQ ID NO: 1654282 - RNA, 22 nt, Human
uaagcauauauuuuuauauuua

SEQ ID NO: 1654283 - RNA, 19 nt, Human
uaagcauauauuuuuauau

SEQ ID NO: 1654284 - RNA, 23 nt, Human
uaagcauauauuuuuauauuuac

SEQ ID NO: 1654285 - RNA, 15 nt, Human
uaagcaugcacaaau

SEQ ID NO: 1654286 - RNA, 16 nt, Human
uaagcauuccaacuau

SEQ ID NO: 1654287 - RNA, 18 nt, Human
uaagcauuccaacuaucu

SEQ ID NO: 1654288 - RNA, 20 nt, Human
uaagcauuccaacuaucuca

SEQ ID NO: 1654289 - RNA, 13 nt, Human
uaagccagacauc

SEQ ID NO: 1654290 - RNA, 15 nt, Human
uaaggcaaucauggu

SEQ ID NO: 1654291 - RNA, 16 nt, Human
uaaggauguucuagca

SEQ ID NO: 1654292 - RNA, 23 nt, Human
uaaggaugcuuguacauaaugcg

SEQ ID NO: 1654293 - RNA, 22 nt, Human
uaaggaugcuuguacauaaugc

SEQ ID NO: 1654294 - RNA, 21 nt, Human
uaaggaugcuuguacauaaug

SEQ ID NO: 1654295 - RNA, 20 nt, Human
uaaggaugcuuguacauaau

SEQ ID NO: 1654296 - RNA, 14 nt, Human
uaagccuuuggaaa

SEQ ID NO: 1654297 - RNA, 17 nt, Human
uaagccuuuggaaacag

SEQ ID NO: 1654298 - RNA, 21 nt, Human
uaagccuuuggaaacagcucg

SEQ ID NO: 1654299 - RNA, 19 nt, Human
uaaggaugcuuguacauaa

SEQ ID NO: 1654300 - RNA, 20 nt, Human
uaagccagacaucaacagau

SEQ ID NO: 1654301 - RNA, 21 nt, Human
uaagccagacaucaacagaua

SEQ ID NO: 1654302 - RNA, 16 nt, Human
uaagauaaaugugcug

SEQ ID NO: 1654303 - RNA, 17 nt, Human
uaagauaaaugugcuga

SEQ ID NO: 1654304 - RNA, 14 nt, Human
uaagauaaaugugc

SEQ ID NO: 1654305 - RNA, 12 nt, Human
uaagagggaggg

SEQ ID NO: 1654306 - RNA, 22 nt, Human
uaagagggagggagggcuccag

SEQ ID NO: 1654307 - RNA, 23 nt, Human
uaagagggagggagggcuccaga

SEQ ID NO: 1654308 - RNA, 23 nt, Human
uaagagggauuagggagagaaga

SEQ ID NO: 1654309 - RNA, 17 nt, Human
uaagagagucuauuuac

SEQ ID NO: 1654310 - RNA, 22 nt, Human
uaagaggcagggucucacucug

SEQ ID NO: 1654311 - RNA, 22 nt, Human
uaagaaccuuuugagugccuua

SEQ ID NO: 1654312 - RNA, 22 nt, Human
uaacuuuuauaaacuuuaccuu

SEQ ID NO: 1654313 - RNA, 21 nt, Human
uaacuuuuauaaacuuuaccu

SEQ ID NO: 1654314 - RNA, 12 nt, Human
uaaucuaaaugg

SEQ ID NO: 1654315 - RNA, 11 nt, Human
uaaucuaaaug

SEQ ID NO: 1654316 - RNA, 17 nt, Human
uaaugaugucguuugaa

SEQ ID NO: 1654317 - RNA, 23 nt, Human
uaaugaugucguuugaaucacag

SEQ ID NO: 1654318 - RNA, 19 nt, Human
uaaugccacuaaauugaca

SEQ ID NO: 1654319 - RNA, 12 nt, Human
uaauauuaaagc

SEQ ID NO: 1654320 - RNA, 13 nt, Human
uaauauuaaagcc

SEQ ID NO: 1654321 - RNA, 14 nt, Human
uaauauuaaagcca

SEQ ID NO: 1654322 - RNA, 15 nt, Human
uaauauuaaagccau

SEQ ID NO: 1654323 - RNA, 23 nt, Human
uaauccucucaaccaccuuucag

SEQ ID NO: 1654324 - RNA, 13 nt, Human
uaaucgaccugcc

SEQ ID NO: 1654325 - RNA, 14 nt, Human
uaaucgaccugccu

SEQ ID NO: 1654326 - RNA, 16 nt, Human
uaaucgaccugccucg

SEQ ID NO: 1654327 - RNA, 16 nt, Human
uaaucguguccccuau

SEQ ID NO: 1654328 - RNA, 14 nt, Human
uaauacaccacuac

SEQ ID NO: 1654329 - RNA, 21 nt, Human
uaauaguucagguaacaggca

SEQ ID NO: 1654330 - RNA, 15 nt, Human
uaauaauuauaugcu

SEQ ID NO: 1654331 - RNA, 16 nt, Human
uaauaauuauaugcua

SEQ ID NO: 1654332 - RNA, 19 nt, Human
uaauaauuauaugcuauuu

SEQ ID NO: 1654333 - RNA, 20 nt, Human
uaauaauuauaugcuauuuc

SEQ ID NO: 1654334 - RNA, 22 nt, Human
uaauaauuauaugcuauuucua

SEQ ID NO: 1654335 - RNA, 23 nt, Human
uaauaauuauaugcuauuucuau

SEQ ID NO: 1654336 - RNA, 15 nt, Human
uaauaauguuucaaa

SEQ ID NO: 1654337 - RNA, 20 nt, Human
uaagugguacuaacuuuccu

SEQ ID NO: 1654338 - RNA, 11 nt, Human
uaauaaagcug

SEQ ID NO: 1654339 - RNA, 16 nt, Human
uaauaaagaucaugua

SEQ ID NO: 1654340 - RNA, 17 nt, Human
uaauaaagaucauguaa

SEQ ID NO: 1654341 - RNA, 20 nt, Human
uaauaaggaaaaguuuaaua

SEQ ID NO: 1654342 - RNA, 22 nt, Human
uaauaaccaaaugcaaugugaa

SEQ ID NO: 1654343 - RNA, 22 nt, Human
uaauuggaaaggcagcucuaaa

SEQ ID NO: 1654344 - RNA, 15 nt, Human
uaauuugguuuucac

SEQ ID NO: 1654345 - RNA, 17 nt, Human
uaauuugguuuucacau

SEQ ID NO: 1654346 - RNA, 18 nt, Human
uaauuugguuuucacauu

SEQ ID NO: 1654347 - RNA, 20 nt, Human
uaauuuguaguguuggagaa

SEQ ID NO: 1654348 - RNA, 18 nt, Human
uaauuugugauacaaugc

SEQ ID NO: 1654349 - RNA, 15 nt, Human
uaauuugugauacaa

SEQ ID NO: 1654350 - RNA, 14 nt, Human
uaauuugugauaca

SEQ ID NO: 1654351 - RNA, 23 nt, Human
uaauuuguaguguuggagaagaa

SEQ ID NO: 1654352 - RNA, 22 nt, Human
uaauuugugauacaaugcugug

SEQ ID NO: 1654353 - RNA, 19 nt, Human
uaauuugugauacaaugcu

SEQ ID NO: 1654354 - RNA, 18 nt, Human
uaauucuuagcucauucu

SEQ ID NO: 1654355 - RNA, 22 nt, Human
uaauugacaggauuauuggaaa

SEQ ID NO: 1654356 - RNA, 20 nt, Human
uaauugacaggauuauugga

SEQ ID NO: 1654357 - RNA, 19 nt, Human
uaaugcgcaggcuggcccu

SEQ ID NO: 1654358 - RNA, 22 nt, Human
uaaugcgcaggcuggcccugcc

SEQ ID NO: 1654359 - RNA, 14 nt, Human
uaaugcgugcauac

SEQ ID NO: 1654360 - RNA, 23 nt, Human
uaaugcgcaggcuggcccugccc

SEQ ID NO: 1654361 - RNA, 14 nt, Human
uaauguuucaaaca

SEQ ID NO: 1654362 - RNA, 15 nt, Human
uaauguuucaaacau

SEQ ID NO: 1654363 - RNA, 12 nt, Human
uaauuaacaugu

SEQ ID NO: 1654364 - RNA, 14 nt, Human
uaauuaacauguua

SEQ ID NO: 1654365 - RNA, 15 nt, Human
uaauuaacauguuaa

SEQ ID NO: 1654366 - RNA, 17 nt, Human
uaauuaacauguuaaac

SEQ ID NO: 1654367 - RNA, 18 nt, Human
uaauuaacauguuaaacc

SEQ ID NO: 1654368 - RNA, 19 nt, Human
uaauuaacauguuaaacca

SEQ ID NO: 1654369 - RNA, 20 nt, Human
uaauuaacauguuaaaccau

SEQ ID NO: 1654370 - RNA, 17 nt, Human
uaauuaaaacacaacau

SEQ ID NO: 1654371 - RNA, 20 nt, Human
uaauuaaaagaauauuuuaa

SEQ ID NO: 1654372 - RNA, 17 nt, Human
uacacaaugguuuucuu

SEQ ID NO: 1654373 - RNA, 21 nt, Human
uacacaaugguuuucuugugu

SEQ ID NO: 1654374 - RNA, 23 nt, Human
uacacaaugguuuucuugugugu

SEQ ID NO: 1654375 - RNA, 21 nt, Human
uacacacacacgcgugcacac

SEQ ID NO: 1654376 - RNA, 15 nt, Human
uacacacacauacac

SEQ ID NO: 1654377 - RNA, 14 nt, Human
uacacuguuucaaa

SEQ ID NO: 1654378 - RNA, 16 nt, Human
uacacugugcugaguc

SEQ ID NO: 1654379 - RNA, 22 nt, Human
uacacacugcauguuugugauu

SEQ ID NO: 1654380 - RNA, 19 nt, Human
uacaauuuuguuucuguac

SEQ ID NO: 1654381 - RNA, 21 nt, Human
uacaauuuuguuucuguacuu

SEQ ID NO: 1654382 - RNA, 19 nt, Human
uacaagagcuuaacagugu

SEQ ID NO: 1654383 - RNA, 18 nt, Human
uacaauuuuguuucugua

SEQ ID NO: 1654384 - RNA, 15 nt, Human
uacaagacacaguga

SEQ ID NO: 1654385 - RNA, 13 nt, Human
uaauuuugaaaaa

SEQ ID NO: 1654386 - RNA, 17 nt, Human
uaauuuugaaaaacugc

SEQ ID NO: 1654387 - RNA, 12 nt, Human
uaauuuuggaau

SEQ ID NO: 1654388 - RNA, 13 nt, Human
uaauuuuggaauu

SEQ ID NO: 1654389 - RNA, 15 nt, Human
uacaggcauagaguu

SEQ ID NO: 1654390 - RNA, 19 nt, Human
uacaggaaaagcugcugac

SEQ ID NO: 1654391 - RNA, 16 nt, Human
uacaggcacccaccau

SEQ ID NO: 1654392 - RNA, 23 nt, Human
uacagcuugaccgugaggccaga

SEQ ID NO: 1654393 - RNA, 17 nt, Human
uacaggaaaagcugcug

SEQ ID NO: 1654394 - RNA, 18 nt, Human
uacaggaaaagcugcuga

SEQ ID NO: 1654395 - RNA, 22 nt, Human
uacagcuugaccgugaggccag

SEQ ID NO: 1654396 - RNA, 18 nt, Human
uacagaaaaguugaauuu

SEQ ID NO: 1654397 - RNA, 22 nt, Human
uacagaaaaguugaauuuuaca

SEQ ID NO: 1654398 - RNA, 13 nt, Human
uacacuuuaugca

SEQ ID NO: 1654399 - RNA, 19 nt, Human
uacacuguuucaaacuuua

SEQ ID NO: 1654400 - RNA, 18 nt, Human
uacacuguuucaaacuuu

SEQ ID NO: 1654401 - RNA, 17 nt, Human
uacacuguuucaaacuu

SEQ ID NO: 1654402 - RNA, 24 nt, Human
uacagcaaggagauuuacaacugg

SEQ ID NO: 1654403 - RNA, 13 nt, Human
uacagaauuuuau

SEQ ID NO: 1654404 - RNA, 18 nt, Human
uacagaaucuaacuggug

SEQ ID NO: 1654405 - RNA, 15 nt, Human
uacccaaauuaagag

SEQ ID NO: 1654406 - RNA, 12 nt, Human
uacccaccccca

SEQ ID NO: 1654407 - RNA, 15 nt, Human
uacccacccccaccc

SEQ ID NO: 1654408 - RNA, 23 nt, Human
uacccacccccacccaagggccu

SEQ ID NO: 1654409 - RNA, 17 nt, Human
uacccacccccacccaa

SEQ ID NO: 1654410 - RNA, 19 nt, Human
uacccacccccacccaagg

SEQ ID NO: 1654411 - RNA, 11 nt, Human
uacccacugcu

SEQ ID NO: 1654412 - RNA, 12 nt, Human
uacccacugcuc

SEQ ID NO: 1654413 - RNA, 13 nt, Human
uacccacugcucu

SEQ ID NO: 1654414 - RNA, 14 nt, Human
uacccacugcucug

SEQ ID NO: 1654415 - RNA, 15 nt, Human
uacccacugcucugg

SEQ ID NO: 1654416 - RNA, 18 nt, Human
uacccagcgagcccuggu

SEQ ID NO: 1654417 - RNA, 22 nt, Human
uacccaggugcuaggaacacuc

SEQ ID NO: 1654418 - RNA, 13 nt, Human
uaccacagacaua

SEQ ID NO: 1654419 - RNA, 23 nt, Human
uaccauuuugggguacccacugc

SEQ ID NO: 1654420 - RNA, 15 nt, Human
uaccaccacgcccgg

SEQ ID NO: 1654421 - RNA, 23 nt, Human
uaccacaggaaccacaagacugc

SEQ ID NO: 1654422 - RNA, 18 nt, Human
uacaguuccuagguauaa

SEQ ID NO: 1654423 - RNA, 18 nt, Human
uacauaagauaaaugugc

SEQ ID NO: 1654424 - RNA, 19 nt, Human
uacauaagauaaaugugcu

SEQ ID NO: 1654425 - RNA, 23 nt, Human
uacaguuacucagaauucucuag

SEQ ID NO: 1654426 - RNA, 19 nt, Human
uacaguuacucagaauucu

SEQ ID NO: 1654427 - RNA, 22 nt, Human
uacauaagauaaaugugcugaa

SEQ ID NO: 1654428 - RNA, 16 nt, Human
uaccaacacgagcagg

SEQ ID NO: 1654429 - RNA, 21 nt, Human
uacaugagguacugagaguga

SEQ ID NO: 1654430 - RNA, 22 nt, Human
uacaugagguacugagagugaa

SEQ ID NO: 1654431 - RNA, 17 nt, Human
uacauuuguauaaaaua

SEQ ID NO: 1654432 - RNA, 11 nt, Human
uacauuugugu

SEQ ID NO: 1654433 - RNA, 16 nt, Human
uacauuuguauaaaau

SEQ ID NO: 1654434 - RNA, 17 nt, Human
uacugcauaugaaagga

SEQ ID NO: 1654435 - RNA, 21 nt, Human
uacuguaucaugacaaagacu

SEQ ID NO: 1654436 - RNA, 19 nt, Human
uacuuguggacacagcucu

SEQ ID NO: 1654437 - RNA, 15 nt, Human
uacuuguggacacag

SEQ ID NO: 1654438 - RNA, 18 nt, Human
uacuuguggacacagcuc

SEQ ID NO: 1654439 - RNA, 21 nt, Human
uacuugcucuugaugccuggc

SEQ ID NO: 1654440 - RNA, 15 nt, Human
uagaaauauaauuga

SEQ ID NO: 1654441 - RNA, 20 nt, Human
uagaaauaucugaaaaugua

SEQ ID NO: 1654442 - RNA, 21 nt, Human
uagaaauaucugaaaauguau

SEQ ID NO: 1654443 - RNA, 23 nt, Human
uagaaauaucugaaaauguaugu

SEQ ID NO: 1654444 - RNA, 22 nt, Human
uacucagaauucucuaguuuga

SEQ ID NO: 1654445 - RNA, 16 nt, Human
uacucagaauucucua

SEQ ID NO: 1654446 - RNA, 14 nt, Human
uacucaccucaccc

SEQ ID NO: 1654447 - RNA, 13 nt, Human
uacuacuccugua

SEQ ID NO: 1654448 - RNA, 12 nt, Human
uacucaccucac

SEQ ID NO: 1654449 - RNA, 20 nt, Human
uacuacaguccucccaucuc

SEQ ID NO: 1654450 - RNA, 20 nt, Human
uacuacaguuuguuaguaug

SEQ ID NO: 1654451 - RNA, 14 nt, Human
uacucccaucugug

SEQ ID NO: 1654452 - RNA, 16 nt, Human
uacucccaucugugaa

SEQ ID NO: 1654453 - RNA, 17 nt, Human
uacucccaucugugaaa

SEQ ID NO: 1654454 - RNA, 15 nt, Human
uacugaggugcuaug

SEQ ID NO: 1654455 - RNA, 23 nt, Human
uacugauguuccuagugaaagag

SEQ ID NO: 1654456 - RNA, 19 nt, Human
uaccuuugacaaagguaaa

SEQ ID NO: 1654457 - RNA, 20 nt, Human
uaccuuuguauucucuccug

SEQ ID NO: 1654458 - RNA, 20 nt, Human
uaccuuuuuuauacauaaac

SEQ ID NO: 1654459 - RNA, 19 nt, Human
uaccuuuuuuauacauaaa

SEQ ID NO: 1654460 - RNA, 18 nt, Human
uaccuuuuuuauacauaa

SEQ ID NO: 1654461 - RNA, 22 nt, Human
uacccaucccauaugccugggc

SEQ ID NO: 1654462 - RNA, 17 nt, Human
uacuaauagacaauuua

SEQ ID NO: 1654463 - RNA, 15 nt, Human
uacuaauagacaauu

SEQ ID NO: 1654464 - RNA, 13 nt, Human
uacuaacuuuccu

SEQ ID NO: 1654465 - RNA, 12 nt, Human
uacuacaguccu

SEQ ID NO: 1654466 - RNA, 17 nt, Human
uacuacaguccucccau

SEQ ID NO: 1654467 - RNA, 18 nt, Human
uacuaaccagcagaaaug

SEQ ID NO: 1654468 - RNA, 19 nt, Human
uacuaaccagcagaaaugc

SEQ ID NO: 1654469 - RNA, 22 nt, Human
uaccuuuuuuauacauaaacaa

SEQ ID NO: 1654470 - RNA, 23 nt, Human
uaccuuuguucccaaauuucaua

SEQ ID NO: 1654471 - RNA, 18 nt, Human
uagauaauacaccacuac

SEQ ID NO: 1654472 - RNA, 12 nt, Human
uagauguauaua

SEQ ID NO: 1654473 - RNA, 16 nt, Human
uagauguauguacuuc

SEQ ID NO: 1654474 - RNA, 20 nt, Human
uagauguauguacuucaugc

SEQ ID NO: 1654475 - RNA, 16 nt, Human
uagcacuuugggaggc

SEQ ID NO: 1654476 - RNA, 19 nt, Human
uagcagagaaugaaagggc

SEQ ID NO: 1654477 - RNA, 23 nt, Human
uagcagagaaugaaagggcccag

SEQ ID NO: 1654478 - RNA, 20 nt, Human
uagcagggcauggcugggaa

SEQ ID NO: 1654479 - RNA, 13 nt, Human
uagacuggugacu

SEQ ID NO: 1654480 - RNA, 14 nt, Human
uagacuggugacug

SEQ ID NO: 1654481 - RNA, 17 nt, Human
uagacuggugacugauu

SEQ ID NO: 1654482 - RNA, 18 nt, Human
uagacuggugacugauuc

SEQ ID NO: 1654483 - RNA, 12 nt, Human
uagaaccaggca

SEQ ID NO: 1654484 - RNA, 23 nt, Human
uagaaccaggcaacuugggaacu

SEQ ID NO: 1654485 - RNA, 15 nt, Human
uagagaguguugaaa

SEQ ID NO: 1654486 - RNA, 14 nt, Human
uagagaguguugaa

SEQ ID NO: 1654487 - RNA, 16 nt, Human
uagagagagaccacuu

SEQ ID NO: 1654488 - RNA, 21 nt, Human
uagagguucaaagauauuuug

SEQ ID NO: 1654489 - RNA, 16 nt, Human
uagagguucaaagaua

SEQ ID NO: 1654490 - RNA, 19 nt, Human
uagagguucaaagauauuu

SEQ ID NO: 1654491 - RNA, 17 nt, Human
uagaguuuagcuggaaa

SEQ ID NO: 1654492 - RNA, 18 nt, Human
uagaguuuagcuggaaaa

SEQ ID NO: 1654493 - RNA, 13 nt, Human
uagccccauaauu

SEQ ID NO: 1654494 - RNA, 18 nt, Human
uagcccucacccuggggc

SEQ ID NO: 1654495 - RNA, 14 nt, Human
uagcccaaaaccaa

SEQ ID NO: 1654496 - RNA, 11 nt, Human
uagcugggacu

SEQ ID NO: 1654497 - RNA, 22 nt, Human
uagcugggagaaagagagagcu

SEQ ID NO: 1654498 - RNA, 18 nt, Human
uagcugggacuacaggug

SEQ ID NO: 1654499 - RNA, 12 nt, Human
uagcugggacua

SEQ ID NO: 1654500 - RNA, 20 nt, Human
uagcugggacuacaggcacc

SEQ ID NO: 1654501 - RNA, 21 nt, Human
uagcucuaggagggcuggcaa

SEQ ID NO: 1654502 - RNA, 22 nt, Human
uagcucauucuccuuguguuac

SEQ ID NO: 1654503 - RNA, 17 nt, Human
uagccugccucuucucu

SEQ ID NO: 1654504 - RNA, 13 nt, Human
uaggaacacuccu

SEQ ID NO: 1654505 - RNA, 14 nt, Human
uaggaacacuccuu

SEQ ID NO: 1654506 - RNA, 21 nt, Human
uaggaacuuaaauaaugugaa

SEQ ID NO: 1654507 - RNA, 17 nt, Human
uaggaacacuccuucac

SEQ ID NO: 1654508 - RNA, 13 nt, Human
uaggaagacuuug

SEQ ID NO: 1654509 - RNA, 14 nt, Human
uaggaagacuuugg

SEQ ID NO: 1654510 - RNA, 15 nt, Human
uaggaagacuuugga

SEQ ID NO: 1654511 - RNA, 16 nt, Human
uaggaagacuuuggaa

SEQ ID NO: 1654512 - RNA, 17 nt, Human
uaggaagacuuuggaaa

SEQ ID NO: 1654513 - RNA, 15 nt, Human
uaggaagguuaaugu

SEQ ID NO: 1654514 - RNA, 14 nt, Human
uaggaauuguguuu

SEQ ID NO: 1654515 - RNA, 16 nt, Human
uaggaauuguguuuau

SEQ ID NO: 1654516 - RNA, 23 nt, Human
uaggaauugacccacaagaaaug

SEQ ID NO: 1654517 - RNA, 20 nt, Human
uaggaauugacccacaagaa

SEQ ID NO: 1654518 - RNA, 14 nt, Human
uaggccuggccaga

SEQ ID NO: 1654519 - RNA, 13 nt, Human
uaggccuggccag

SEQ ID NO: 1654520 - RNA, 13 nt, Human
uaggccaugggac

SEQ ID NO: 1654521 - RNA, 16 nt, Human
uaggccaugggacagg

SEQ ID NO: 1654522 - RNA, 16 nt, Human
uauaugcuauuucuau

SEQ ID NO: 1654523 - RNA, 18 nt, Human
uauaugcuauuucuauau

SEQ ID NO: 1654524 - RNA, 20 nt, Human
uauaugcucugcauguuaca

SEQ ID NO: 1654525 - RNA, 13 nt, Human
uauauuuuaagac

SEQ ID NO: 1654526 - RNA, 14 nt, Human
uauauuuuaagacg

SEQ ID NO: 1654527 - RNA, 18 nt, Human
uauauuuuuauauuuacu

SEQ ID NO: 1654528 - RNA, 13 nt, Human
uauauuugaaaua

SEQ ID NO: 1654529 - RNA, 14 nt, Human
uauauuugaaauau

SEQ ID NO: 1654530 - RNA, 20 nt, Human
uauauuuauuacuguaagaa

SEQ ID NO: 1654531 - RNA, 23 nt, Human
uauauuuauuacuguaagaaaau

SEQ ID NO: 1654532 - RNA, 15 nt, Human
uaucuaaauguugaa

SEQ ID NO: 1654533 - RNA, 19 nt, Human
uaucgucacugcuuaacuu

SEQ ID NO: 1654534 - RNA, 21 nt, Human
uaucaugucaaacgugaaaau

SEQ ID NO: 1654535 - RNA, 17 nt, Human
uaucaugugaaaucauu

SEQ ID NO: 1654536 - RNA, 22 nt, Human
uaucaugugaaaucauucauuu

SEQ ID NO: 1654537 - RNA, 16 nt, Human
uaucaugacaaagacu

SEQ ID NO: 1654538 - RNA, 16 nt, Human
uaucaugucaaacgug

SEQ ID NO: 1654539 - RNA, 17 nt, Human
uaucaugacaaagacug

SEQ ID NO: 1654540 - RNA, 22 nt, Human
uaucaucaguauugaagcauuu

SEQ ID NO: 1654541 - RNA, 17 nt, Human
uaucaggugcugccauc

SEQ ID NO: 1654542 - RNA, 19 nt, Human
uauauuuuuauauuuacua

SEQ ID NO: 1654543 - RNA, 19 nt, Human
uauauuuuuuguuaaauga

SEQ ID NO: 1654544 - RNA, 14 nt, Human
uagugaugguuccc

SEQ ID NO: 1654545 - RNA, 18 nt, Human
uagugaugguuccccugu

SEQ ID NO: 1654546 - RNA, 18 nt, Human
uagucaaauugugugaaa

SEQ ID NO: 1654547 - RNA, 18 nt, Human
uaguggauggaaggggcu

SEQ ID NO: 1654548 - RNA, 15 nt, Human
uaguggauggaaggg

SEQ ID NO: 1654549 - RNA, 15 nt, Human
uaguggauguucuga

SEQ ID NO: 1654550 - RNA, 13 nt, Human
uaguuucuccaag

SEQ ID NO: 1654551 - RNA, 23 nt, Human
uaguuugauuaaauucuugcaaa

SEQ ID NO: 1654552 - RNA, 12 nt, Human
uaguuugcaguu

SEQ ID NO: 1654553 - RNA, 21 nt, Human
uaguuguaccgcaaugugacu

SEQ ID NO: 1654554 - RNA, 14 nt, Human
uaguuuauaaaaga

SEQ ID NO: 1654555 - RNA, 15 nt, Human
uaguuuuauaugcuu

SEQ ID NO: 1654556 - RNA, 20 nt, Human
uauaaugaaugaaacauuuu

SEQ ID NO: 1654557 - RNA, 18 nt, Human
uauaaugaaugaaacauu

SEQ ID NO: 1654558 - RNA, 18 nt, Human
uauaacaaugcuguauuu

SEQ ID NO: 1654559 - RNA, 18 nt, Human
uauaaaucgcuuuugaua

SEQ ID NO: 1654560 - RNA, 19 nt, Human
uauaaaucgcuuuugauaa

SEQ ID NO: 1654561 - RNA, 20 nt, Human
uauaaaucgcuuuugauaau

SEQ ID NO: 1654562 - RNA, 14 nt, Human
uauaauguaagcuc

SEQ ID NO: 1654563 - RNA, 19 nt, Human
uauaauguaagcucuacug

SEQ ID NO: 1654564 - RNA, 20 nt, Human
uauaauguaagcucuacuga

SEQ ID NO: 1654565 - RNA, 17 nt, Human
uauaauucuacuuugag

SEQ ID NO: 1654566 - RNA, 20 nt, Human
uauacucuuauagacaacau

SEQ ID NO: 1654567 - RNA, 17 nt, Human
uauacccccugcaaagc

SEQ ID NO: 1654568 - RNA, 13 nt, Human
ggaagagccuugc

SEQ ID NO: 1654569 - RNA, 17 nt, Human
ggaagcacagcuucauu

SEQ ID NO: 1654570 - RNA, 13 nt, Human
ggaagcacaugcc

SEQ ID NO: 1654571 - RNA, 14 nt, Human
ggaagcacaugccu

SEQ ID NO: 1654572 - RNA, 15 nt, Human
ggaagcacaugccuc

SEQ ID NO: 1654573 - RNA, 17 nt, Human
ggaagcacaugccucuc

SEQ ID NO: 1654574 - RNA, 13 nt, Human
ggaagccagcagg

SEQ ID NO: 1654575 - RNA, 14 nt, Human
ggaagccagcaggc

SEQ ID NO: 1654576 - RNA, 22 nt, Human
ggaagccaaaccucugugagca

SEQ ID NO: 1654577 - RNA, 15 nt, Human
ggaagccagcaggcu

SEQ ID NO: 1654578 - RNA, 16 nt, Human
ggaagccagcaggcuc

SEQ ID NO: 1654579 - RNA, 17 nt, Human
ggaagccagcaggcucu

SEQ ID NO: 1654580 - RNA, 18 nt, Human
ggaagccagcaggcucuc

SEQ ID NO: 1654581 - RNA, 13 nt, Human
ggaagcagcuuuc

SEQ ID NO: 1654582 - RNA, 23 nt, Human
ggaagcacaugccucucucaggc

SEQ ID NO: 1654583 - RNA, 21 nt, Human
ggaagcacaugccucucucag

SEQ ID NO: 1654584 - RNA, 22 nt, Human
ggaagcacaugccucucucagg

SEQ ID NO: 1654585 - RNA, 15 nt, Human
ggaaaaucagccugc

SEQ ID NO: 1654586 - RNA, 19 nt, Human
ggaaaaguuuaauauuaaa

SEQ ID NO: 1654587 - RNA, 14 nt, Human
ggaaaauaaauuau

SEQ ID NO: 1654588 - RNA, 12 nt, Human
ggaaauauuuau

SEQ ID NO: 1654589 - RNA, 13 nt, Human
ggaaauauuuauu

SEQ ID NO: 1654590 - RNA, 15 nt, Human
ggaaauauuuauuuu

SEQ ID NO: 1654591 - RNA, 17 nt, Human
ggaaauauuuauuuuaa

SEQ ID NO: 1654592 - RNA, 18 nt, Human
ggaaauauuuauuuuaau

SEQ ID NO: 1654593 - RNA, 23 nt, Human
ggaacuagacucccaagcuggac

SEQ ID NO: 1654594 - RNA, 21 nt, Human
ggaacgcguugaaauuguaau

SEQ ID NO: 1654595 - RNA, 17 nt, Human
ggaacgcguugaaauug

SEQ ID NO: 1654596 - RNA, 19 nt, Human
ggaacagacuggaagcaca

SEQ ID NO: 1654597 - RNA, 20 nt, Human
ggaacagacuggaagcacag

SEQ ID NO: 1654598 - RNA, 16 nt, Human
ggaaaucaaauaugca

SEQ ID NO: 1654599 - RNA, 14 nt, Human
gcuuugggcugccc

SEQ ID NO: 1654600 - RNA, 20 nt, Human
gcuuuaauaucaucaguauu

SEQ ID NO: 1654601 - RNA, 22 nt, Human
gcuuuaauaucaucaguauuga

SEQ ID NO: 1654602 - RNA, 23 nt, Human
gcuuuaauaucaucaguauugaa

SEQ ID NO: 1654603 - RNA, 13 nt, Human
ggaaaaauagccu

SEQ ID NO: 1654604 - RNA, 14 nt, Human
ggaaaaacugauuu

SEQ ID NO: 1654605 - RNA, 22 nt, Human
ggaaaaccaagccguggcuucc

SEQ ID NO: 1654606 - RNA, 15 nt, Human
ggaaaaauagccugc

SEQ ID NO: 1654607 - RNA, 18 nt, Human
gcuuugggcugcccuggu

SEQ ID NO: 1654608 - RNA, 15 nt, Human
gcuuugggcugcccu

SEQ ID NO: 1654609 - RNA, 16 nt, Human
gcuuugggcugcccug

SEQ ID NO: 1654610 - RNA, 17 nt, Human
gcuuuuaaaaaaaaaua

SEQ ID NO: 1654611 - RNA, 14 nt, Human
gcuuuuacuuaaac

SEQ ID NO: 1654612 - RNA, 20 nt, Human
ggaaaaaauaacaaugaaag

SEQ ID NO: 1654613 - RNA, 17 nt, Human
gcuucucacugccaugc

SEQ ID NO: 1654614 - RNA, 21 nt, Human
gcuuccagugaggcucugccc

SEQ ID NO: 1654615 - RNA, 19 nt, Human
gcuuccagugaggcucugc

SEQ ID NO: 1654616 - RNA, 20 nt, Human
gcuuccagugaggcucugcc

SEQ ID NO: 1654617 - RNA, 13 nt, Human
gcuguucagcugg

SEQ ID NO: 1654618 - RNA, 23 nt, Human
gcuguucacagccagacuggcac

SEQ ID NO: 1654619 - RNA, 15 nt, Human
gcuguucacagccag

SEQ ID NO: 1654620 - RNA, 16 nt, Human
gcuguucacagccaga

SEQ ID NO: 1654621 - RNA, 16 nt, Human
gcuucuguugcugccu

SEQ ID NO: 1654622 - RNA, 22 nt, Human
gcuugcagagaugaggccgcca

SEQ ID NO: 1654623 - RNA, 16 nt, Human
gcuugccaucccuccc

SEQ ID NO: 1654624 - RNA, 14 nt, Human
gcuuggaggaagga

SEQ ID NO: 1654625 - RNA, 15 nt, Human
gcuuggaggaaggaa

SEQ ID NO: 1654626 - RNA, 13 nt, Human
gcuuggaggaagg

SEQ ID NO: 1654627 - RNA, 18 nt, Human
gcuugcccuguuaaaaga

SEQ ID NO: 1654628 - RNA, 21 nt, Human
gcuugccaucccucccuccac

SEQ ID NO: 1654629 - RNA, 18 nt, Human
gcuugccaucccucccuc

SEQ ID NO: 1654630 - RNA, 17 nt, Human
gcuugcccuggugccuc

SEQ ID NO: 1654631 - RNA, 19 nt, Human
gcuugcccuggugccucac

SEQ ID NO: 1654632 - RNA, 16 nt, Human
gcuggggccaggcugg

SEQ ID NO: 1654633 - RNA, 19 nt, Human
gcuggggccaggcuggguc

SEQ ID NO: 1654634 - RNA, 18 nt, Human
gcugggcuucaguggcag

SEQ ID NO: 1654635 - RNA, 19 nt, Human
gcugggcuucaguggcagc

SEQ ID NO: 1654636 - RNA, 12 nt, Human
gcuggggccagu

SEQ ID NO: 1654637 - RNA, 23 nt, Human
gcugggggaagaagcucucuccu

SEQ ID NO: 1654638 - RNA, 13 nt, Human
gcugggggccuca

SEQ ID NO: 1654639 - RNA, 15 nt, Human
gcuggucccacucag

SEQ ID NO: 1654640 - RNA, 19 nt, Human
gcuggucccacucagucca

SEQ ID NO: 1654641 - RNA, 19 nt, Human
gcugggggccucagugcca

SEQ ID NO: 1654642 - RNA, 20 nt, Human
gcugggggccucagugccac

SEQ ID NO: 1654643 - RNA, 16 nt, Human
gcugggagcucugcag

SEQ ID NO: 1654644 - RNA, 15 nt, Human
gcugggagcucugca

SEQ ID NO: 1654645 - RNA, 17 nt, Human
gcugggauuacaggcgu

SEQ ID NO: 1654646 - RNA, 18 nt, Human
gcugggauuacaggcgug

SEQ ID NO: 1654647 - RNA, 19 nt, Human
gcugggauuacaggcuccu

SEQ ID NO: 1654648 - RNA, 20 nt, Human
gcugggauuacaggcuccug

SEQ ID NO: 1654649 - RNA, 21 nt, Human
gcugggauuacaggcuccugc

SEQ ID NO: 1654650 - RNA, 17 nt, Human
gcugggcuucaguggca

SEQ ID NO: 1654651 - RNA, 19 nt, Human
gcugggagagccuuccagg

SEQ ID NO: 1654652 - RNA, 22 nt, Human
gcugggagagccuuccaggggu

SEQ ID NO: 1654653 - RNA, 12 nt, Human
gcugggagagcc

SEQ ID NO: 1654654 - RNA, 13 nt, Human
gcugggagagccu

SEQ ID NO: 1654655 - RNA, 17 nt, Human
gcugggagagccuucca

SEQ ID NO: 1654656 - RNA, 18 nt, Human
gcugggagagccuuccag

SEQ ID NO: 1654657 - RNA, 19 nt, Human
gcugucccuuacgugaguc

SEQ ID NO: 1654658 - RNA, 22 nt, Human
gcugucccuuacgugaguccug

SEQ ID NO: 1654659 - RNA, 21 nt, Human
gcugucccuuacgugaguccu

SEQ ID NO: 1654660 - RNA, 17 nt, Human
gcugucaauuacaggaa

SEQ ID NO: 1654661 - RNA, 19 nt, Human
gcugucaauuacaggaagu

SEQ ID NO: 1654662 - RNA, 22 nt, Human
gcugucaauuacaggaaguacu

SEQ ID NO: 1654663 - RNA, 23 nt, Human
gcugucaauuacaggaaguacug

SEQ ID NO: 1654664 - RNA, 24 nt, Human
gcuggugcccugcuuucagauacu

SEQ ID NO: 1654665 - RNA, 22 nt, Human
gcuggugcccugcuuucagaua

SEQ ID NO: 1654666 - RNA, 20 nt, Human
gcuggucccacucaguccau

SEQ ID NO: 1654667 - RNA, 18 nt, Human
gcuggugucaccugaaga

SEQ ID NO: 1654668 - RNA, 21 nt, Human
gcugguuagagguucccuuug

SEQ ID NO: 1654669 - RNA, 15 nt, Human
gcugguucaggguug

SEQ ID NO: 1654670 - RNA, 16 nt, Human
gcugucaauuacagga

SEQ ID NO: 1654671 - RNA, 22 nt, Human
gcugguucaggguuggccccug

SEQ ID NO: 1654672 - RNA, 22 nt, Human
gcuguauuuuaaaagaaugauu

SEQ ID NO: 1654673 - RNA, 12 nt, Human
gcuggcccugcc

SEQ ID NO: 1654674 - RNA, 13 nt, Human
gcuggcccugccc

SEQ ID NO: 1654675 - RNA, 17 nt, Human
gcuggccgggagccuga

SEQ ID NO: 1654676 - RNA, 20 nt, Human
gcugggacaugggaaagggg

SEQ ID NO: 1654677 - RNA, 19 nt, Human
gcugggacuacagguguga

SEQ ID NO: 1654678 - RNA, 13 nt, Human
gcugggacuacag

SEQ ID NO: 1654679 - RNA, 18 nt, Human
gcugggacuacaggcacc

SEQ ID NO: 1654680 - RNA, 19 nt, Human
gcugggacuacaggcaccc

SEQ ID NO: 1654681 - RNA, 20 nt, Human
gcugggacuacaggcaccca

SEQ ID NO: 1654682 - RNA, 18 nt, Human
gcuggaccuugaacuggg

SEQ ID NO: 1654683 - RNA, 17 nt, Human
gcugcuugggcuucauc

SEQ ID NO: 1654684 - RNA, 22 nt, Human
gcugcuugggcuucauccuccu

SEQ ID NO: 1654685 - RNA, 21 nt, Human
gcuggaccuugaacuggguac

SEQ ID NO: 1654686 - RNA, 22 nt, Human
gcuggaccuugaacuggguacu

SEQ ID NO: 1654687 - RNA, 13 nt, Human
gcugcuucaagga

SEQ ID NO: 1654688 - RNA, 19 nt, Human
gcugcgguccacccaggag

SEQ ID NO: 1654689 - RNA, 17 nt, Human
gcugcgguccacccagg

SEQ ID NO: 1654690 - RNA, 18 nt, Human
gcugcgguccacccagga

SEQ ID NO: 1654691 - RNA, 23 nt, Human
gcugcuucaaggauccugagcca

SEQ ID NO: 1654692 - RNA, 21 nt, Human
gcugcuucaaggauccugagc

SEQ ID NO: 1654693 - RNA, 22 nt, Human
gcugcuucaaggauccugagcc

SEQ ID NO: 1654694 - RNA, 16 nt, Human
gcugcuugggcuucau

SEQ ID NO: 1654695 - RNA, 17 nt, Human
gcugcccuuucugggca

SEQ ID NO: 1654696 - RNA, 23 nt, Human
gcugcccuggugcugccacacuu

SEQ ID NO: 1654697 - RNA, 12 nt, Human
gcugcccuguga

SEQ ID NO: 1654698 - RNA, 14 nt, Human
gcugcccugugagu

SEQ ID NO: 1654699 - RNA, 20 nt, Human
gcugcccuggugcugccaca

SEQ ID NO: 1654700 - RNA, 22 nt, Human
gcugcccuggugcugccacacu

SEQ ID NO: 1654701 - RNA, 11 nt, Human
gcugcccugug

SEQ ID NO: 1654702 - RNA, 18 nt, Human
gcugcccuggugcugcca

SEQ ID NO: 1654703 - RNA, 19 nt, Human
gcugcccuggugcugccac

SEQ ID NO: 1654704 - RNA, 22 nt, Human
gcuagcagcagggagggcuucu

SEQ ID NO: 1654705 - RNA, 18 nt, Human
gcuagauguauguacuuc

SEQ ID NO: 1654706 - RNA, 14 nt, Human
ggccaggccagagg

SEQ ID NO: 1654707 - RNA, 16 nt, Human
ggccaggccagaggga

SEQ ID NO: 1654708 - RNA, 18 nt, Human
ggccaggcugggucgccc

SEQ ID NO: 1654709 - RNA, 22 nt, Human
ggccaggcugggucgcccugga

SEQ ID NO: 1654710 - RNA, 11 nt, Human
ggccaggcugg

SEQ ID NO: 1654711 - RNA, 16 nt, Human
ggccaggagccuccug

SEQ ID NO: 1654712 - RNA, 16 nt, Human
ggccacugugaagaga

SEQ ID NO: 1654713 - RNA, 14 nt, Human
ggccaggagccucc

SEQ ID NO: 1654714 - RNA, 11 nt, Human
ggccacuguga

SEQ ID NO: 1654715 - RNA, 17 nt, Human
ggcagguuggugggggc

SEQ ID NO: 1654716 - RNA, 15 nt, Human
ggcagguuggugggg

SEQ ID NO: 1654717 - RNA, 23 nt, Human
ggcauguucucugaggacacuaa

SEQ ID NO: 1654718 - RNA, 16 nt, Human
ggccaccugcggugcu

SEQ ID NO: 1654719 - RNA, 22 nt, Human
ggccaccugcggugcuaucucc

SEQ ID NO: 1654720 - RNA, 16 nt, Human
ggcauuccccaggagg

SEQ ID NO: 1654721 - RNA, 15 nt, Human
ggcauuccccaggag

SEQ ID NO: 1654722 - RNA, 16 nt, Human
ggccacaagacccuug

SEQ ID NO: 1654723 - RNA, 17 nt, Human
ggccacaagacccuugu

SEQ ID NO: 1654724 - RNA, 16 nt, Human
ggccccucaggguccc

SEQ ID NO: 1654725 - RNA, 19 nt, Human
ggccccucagggucccugg

SEQ ID NO: 1654726 - RNA, 20 nt, Human
ggccccucagggucccuggu

SEQ ID NO: 1654727 - RNA, 21 nt, Human
ggccccucagggucccuggug

SEQ ID NO: 1654728 - RNA, 17 nt, Human
ggccccugccacccugg

SEQ ID NO: 1654729 - RNA, 18 nt, Human
ggccccugccacccuggg

SEQ ID NO: 1654730 - RNA, 13 nt, Human
ggccccugcccgg

SEQ ID NO: 1654731 - RNA, 13 nt, Human
ggccccugccacc

SEQ ID NO: 1654732 - RNA, 16 nt, Human
ggccccugccacccug

SEQ ID NO: 1654733 - RNA, 12 nt, Human
ggccccugccac

SEQ ID NO: 1654734 - RNA, 12 nt, Human
ggccaggcuggu

SEQ ID NO: 1654735 - RNA, 13 nt, Human
ggccaugggccuc

SEQ ID NO: 1654736 - RNA, 22 nt, Human
ggccaugggacagggaggacgc

SEQ ID NO: 1654737 - RNA, 21 nt, Human
ggaucagucugauucccaagc

SEQ ID NO: 1654738 - RNA, 19 nt, Human
ggcaacccccagccugcua

SEQ ID NO: 1654739 - RNA, 18 nt, Human
ggcaacugcauuggcuuu

SEQ ID NO: 1654740 - RNA, 18 nt, Human
ggcaacuugggaacuaga

SEQ ID NO: 1654741 - RNA, 23 nt, Human
ggcaacuugggaacuagacuccc

SEQ ID NO: 1654742 - RNA, 15 nt, Human
ggcaaggcugucaau

SEQ ID NO: 1654743 - RNA, 19 nt, Human
ggcaacugcauuggcuuug

SEQ ID NO: 1654744 - RNA, 16 nt, Human
ggcaaggcugucaauu

SEQ ID NO: 1654745 - RNA, 17 nt, Human
ggcacccggccccugcu

SEQ ID NO: 1654746 - RNA, 15 nt, Human
ggcacccggccccug

SEQ ID NO: 1654747 - RNA, 16 nt, Human
ggcacccggccccugc

SEQ ID NO: 1654748 - RNA, 22 nt, Human
ggcagagcagagaccaucccug

SEQ ID NO: 1654749 - RNA, 20 nt, Human
ggcagagcagagaccauccc

SEQ ID NO: 1654750 - RNA, 15 nt, Human
ggcagagcagagacc

SEQ ID NO: 1654751 - RNA, 16 nt, Human
ggcagagcagagacca

SEQ ID NO: 1654752 - RNA, 17 nt, Human
ggcagaggaaagcaaag

SEQ ID NO: 1654753 - RNA, 23 nt, Human
ggcagaguugaagacagagcuac

SEQ ID NO: 1654754 - RNA, 23 nt, Human
ggcagauacaggaaaagcugcug

SEQ ID NO: 1654755 - RNA, 14 nt, Human
ggcaggaaggcuga

SEQ ID NO: 1654756 - RNA, 13 nt, Human
ggcagguccaggg

SEQ ID NO: 1654757 - RNA, 23 nt, Human
ggcaggucuugaacuccuggccu

SEQ ID NO: 1654758 - RNA, 13 nt, Human
ggcagcucagaga

SEQ ID NO: 1654759 - RNA, 22 nt, Human
ggcagcucaccucucccuugga

SEQ ID NO: 1654760 - RNA, 18 nt, Human
ggcagcucaccucucccu

SEQ ID NO: 1654761 - RNA, 21 nt, Human
ggcagcucaccucucccuugg

SEQ ID NO: 1654762 - RNA, 21 nt, Human
ggcagcuugaggguugggcug

SEQ ID NO: 1654763 - RNA, 21 nt, Human
ggcagcugcgguccacccagg

SEQ ID NO: 1654764 - RNA, 22 nt, Human
ggcagcugccuccccuccucug

SEQ ID NO: 1654765 - RNA, 19 nt, Human
ggcagcugcgguccaccca

SEQ ID NO: 1654766 - RNA, 21 nt, Human
ggcagcugccuccccuccucu

SEQ ID NO: 1654767 - RNA, 18 nt, Human
ggcagcugccuccccucc

SEQ ID NO: 1654768 - RNA, 12 nt, Human
ggagcccuggga

SEQ ID NO: 1654769 - RNA, 13 nt, Human
ggagcccugggag

SEQ ID NO: 1654770 - RNA, 20 nt, Human
ggagcaaaaucgaugcagug

SEQ ID NO: 1654771 - RNA, 20 nt, Human
ggagauuuacaacuggggga

SEQ ID NO: 1654772 - RNA, 15 nt, Human
ggagaggggcacagg

SEQ ID NO: 1654773 - RNA, 21 nt, Human
ggagaccccuuggggagcagg

SEQ ID NO: 1654774 - RNA, 21 nt, Human
ggacugccagucccccugccc

SEQ ID NO: 1654775 - RNA, 17 nt, Human
ggagagcuagcagcagg

SEQ ID NO: 1654776 - RNA, 21 nt, Human
ggagagcuagcagcagggagg

SEQ ID NO: 1654777 - RNA, 11 nt, Human
ggacucugccu

SEQ ID NO: 1654778 - RNA, 15 nt, Human
ggacuccucugucca

SEQ ID NO: 1654779 - RNA, 14 nt, Human
ggacuccucugucc

SEQ ID NO: 1654780 - RNA, 12 nt, Human
ggacuccucugu

SEQ ID NO: 1654781 - RNA, 20 nt, Human
ggaagccagcaggcucucag

SEQ ID NO: 1654782 - RNA, 11 nt, Human
ggagugacaga

SEQ ID NO: 1654783 - RNA, 16 nt, Human
ggagugacagaggcag

SEQ ID NO: 1654784 - RNA, 20 nt, Human
ggagucccaccuuggcugca

SEQ ID NO: 1654785 - RNA, 21 nt, Human
ggagucccaccuuggcugcag

SEQ ID NO: 1654786 - RNA, 17 nt, Human
ggagggcuccagacaca

SEQ ID NO: 1654787 - RNA, 14 nt, Human
ggagggcuccagac

SEQ ID NO: 1654788 - RNA, 15 nt, Human
ggagggcuccagaca

SEQ ID NO: 1654789 - RNA, 16 nt, Human
ggaucacagccucuga

SEQ ID NO: 1654790 - RNA, 23 nt, Human
ggagugaguugauagcacagacc

SEQ ID NO: 1654791 - RNA, 17 nt, Human
ggagugacagaggcagc

SEQ ID NO: 1654792 - RNA, 18 nt, Human
ggagugacagaggcagcc

SEQ ID NO: 1654793 - RNA, 19 nt, Human
ggagugacagaggcagccc

SEQ ID NO: 1654794 - RNA, 21 nt, Human
ggagugacagaggcagcccca

SEQ ID NO: 1654795 - RNA, 12 nt, Human
ggagugagcugg

SEQ ID NO: 1654796 - RNA, 14 nt, Human
ggagugagcugguu

SEQ ID NO: 1654797 - RNA, 21 nt, Human
ggagugaguugauagcacaga

SEQ ID NO: 1654798 - RNA, 12 nt, Human
ggagggcuccag

SEQ ID NO: 1654799 - RNA, 13 nt, Human
ggagggcuccaga

SEQ ID NO: 1654800 - RNA, 12 nt, Human
ggagggagggcu

SEQ ID NO: 1654801 - RNA, 15 nt, Human
ggaggauguucuggg

SEQ ID NO: 1654802 - RNA, 23 nt, Human
ggaggaucacuugaguccagaag

SEQ ID NO: 1654803 - RNA, 17 nt, Human
ggaggaucucuugagcc

SEQ ID NO: 1654804 - RNA, 21 nt, Human
ggaggaucucuugagccuggg

SEQ ID NO: 1654805 - RNA, 20 nt, Human
ggaggacgcucucuggccuu

SEQ ID NO: 1654806 - RNA, 21 nt, Human
ggaggacgcucucuggccuuc

SEQ ID NO: 1654807 - RNA, 19 nt, Human
ggaggacgcucucuggccu

SEQ ID NO: 1654808 - RNA, 14 nt, Human
gggccccagaggcu

SEQ ID NO: 1654809 - RNA, 13 nt, Human
gggccccugccuc

SEQ ID NO: 1654810 - RNA, 15 nt, Human
gggccccugccucuc

SEQ ID NO: 1654811 - RNA, 17 nt, Human
gggccccugccucucug

SEQ ID NO: 1654812 - RNA, 18 nt, Human
gggccccugccucucugc

SEQ ID NO: 1654813 - RNA, 19 nt, Human
gggccccugccucucugca

SEQ ID NO: 1654814 - RNA, 21 nt, Human
gggccccugccucucugcagg

SEQ ID NO: 1654815 - RNA, 22 nt, Human
gggccccugccucucugcaggu

SEQ ID NO: 1654816 - RNA, 13 nt, Human
gggcccugccucc

SEQ ID NO: 1654817 - RNA, 13 nt, Human
gggccuggccuga

SEQ ID NO: 1654818 - RNA, 19 nt, Human
gggccuggccugagcuggg

SEQ ID NO: 1654819 - RNA, 14 nt, Human
gggccuggccugag

SEQ ID NO: 1654820 - RNA, 18 nt, Human
gggccuggccugagcugg

SEQ ID NO: 1654821 - RNA, 17 nt, Human
gggccuggcucaggugg

SEQ ID NO: 1654822 - RNA, 13 nt, Human
gggccuggcuccc

SEQ ID NO: 1654823 - RNA, 15 nt, Human
gggcauggccaggug

SEQ ID NO: 1654824 - RNA, 17 nt, Human
gggcauggccagguggc

SEQ ID NO: 1654825 - RNA, 20 nt, Human
gggcauggccagguggccac

SEQ ID NO: 1654826 - RNA, 12 nt, Human
gggcaugacacg

SEQ ID NO: 1654827 - RNA, 23 nt, Human
gggccacagagaaaguacuucuc

SEQ ID NO: 1654828 - RNA, 16 nt, Human
gggccacagagaaagu

SEQ ID NO: 1654829 - RNA, 17 nt, Human
gggcccagagagggugg

SEQ ID NO: 1654830 - RNA, 23 nt, Human
gggauccuggaguucugguuccu

SEQ ID NO: 1654831 - RNA, 18 nt, Human
gggcaacccuggugacca

SEQ ID NO: 1654832 - RNA, 15 nt, Human
gggauccuccaggug

SEQ ID NO: 1654833 - RNA, 16 nt, Human
gggauccuccaggugc

SEQ ID NO: 1654834 - RNA, 21 nt, Human
gggauaugauuuaaaucagcc

SEQ ID NO: 1654835 - RNA, 13 nt, Human
gggauagagagag

SEQ ID NO: 1654836 - RNA, 13 nt, Human
gggacugagaaau

SEQ ID NO: 1654837 - RNA, 17 nt, Human
gggaggugggauccucc

SEQ ID NO: 1654838 - RNA, 16 nt, Human
gggaggugaccccagg

SEQ ID NO: 1654839 - RNA, 18 nt, Human
gggagugacagaggcagc

SEQ ID NO: 1654840 - RNA, 11 nt, Human
gggagugagcu

SEQ ID NO: 1654841 - RNA, 14 nt, Human
gggagugagcuggu

SEQ ID NO: 1654842 - RNA, 17 nt, Human
gggcagguugguggggg

SEQ ID NO: 1654843 - RNA, 11 nt, Human
gggcagagcag

SEQ ID NO: 1654844 - RNA, 12 nt, Human
gggcagagcaga

SEQ ID NO: 1654845 - RNA, 13 nt, Human
gggcacugguggc

SEQ ID NO: 1654846 - RNA, 16 nt, Human
gggcacugguggcccg

SEQ ID NO: 1654847 - RNA, 20 nt, Human
gggcacucagaagacacuga

SEQ ID NO: 1654848 - RNA, 14 nt, Human
gggcagaaggaaga

SEQ ID NO: 1654849 - RNA, 18 nt, Human
gggcagaaggaagacuuc

SEQ ID NO: 1654850 - RNA, 14 nt, Human
gggcaccggggccu

SEQ ID NO: 1654851 - RNA, 16 nt, Human
gggcacucagaagaca

SEQ ID NO: 1654852 - RNA, 19 nt, Human
gggcacucagaagacacug

SEQ ID NO: 1654853 - RNA, 13 nt, Human
gggcacagggucu

SEQ ID NO: 1654854 - RNA, 16 nt, Human
gggcacagggucucua

SEQ ID NO: 1654855 - RNA, 23 nt, Human
gggcacaccgggcacucagaaga

SEQ ID NO: 1654856 - RNA, 18 nt, Human
gggcacagaaaauggaag

SEQ ID NO: 1654857 - RNA, 20 nt, Human
gggcacagaaaauggaagac

SEQ ID NO: 1654858 - RNA, 21 nt, Human
gggcacagaaaauggaagaca

SEQ ID NO: 1654859 - RNA, 11 nt, Human
ggcugcuucaa

SEQ ID NO: 1654860 - RNA, 12 nt, Human
ggcugcuucaag

SEQ ID NO: 1654861 - RNA, 14 nt, Human
ggcugcuucaagga

SEQ ID NO: 1654862 - RNA, 22 nt, Human
ggcugcuucaaggauccugagc

SEQ ID NO: 1654863 - RNA, 12 nt, Human
ggcugcagggag

SEQ ID NO: 1654864 - RNA, 13 nt, Human
ggcugcagggagu

SEQ ID NO: 1654865 - RNA, 14 nt, Human
ggcugcugaaggcu

SEQ ID NO: 1654866 - RNA, 18 nt, Human
ggcugcugaaggcucgag

SEQ ID NO: 1654867 - RNA, 15 nt, Human
ggcugcugaaggcuc

SEQ ID NO: 1654868 - RNA, 17 nt, Human
ggcugcugaaggcucga

SEQ ID NO: 1654869 - RNA, 15 nt, Human
ggcugggcagaggaa

SEQ ID NO: 1654870 - RNA, 19 nt, Human
ggcugggcagaggaaagca

SEQ ID NO: 1654871 - RNA, 13 nt, Human
ggcugggcagagg

SEQ ID NO: 1654872 - RNA, 14 nt, Human
ggcugggcagagga

SEQ ID NO: 1654873 - RNA, 20 nt, Human
ggcugggagagccuuccagg

SEQ ID NO: 1654874 - RNA, 23 nt, Human
ggcugggagagccuuccaggggu

SEQ ID NO: 1654875 - RNA, 19 nt, Human
ggcugggagagccuuccag

SEQ ID NO: 1654876 - RNA, 23 nt, Human
ggcugcuucaaggauccugagcc

SEQ ID NO: 1654877 - RNA, 24 nt, Human
ggcugcaaaggguaucaggugcug

SEQ ID NO: 1654878 - RNA, 17 nt, Human
ggcugcaccggcuggcc

SEQ ID NO: 1654879 - RNA, 18 nt, Human
ggcugcaccggcuggccu

SEQ ID NO: 1654880 - RNA, 19 nt, Human
ggcugcaccggcuggccug

SEQ ID NO: 1654881 - RNA, 18 nt, Human
ggcugcaaaggguaucag

SEQ ID NO: 1654882 - RNA, 22 nt, Human
ggcugaugccaaguuguuugag

SEQ ID NO: 1654883 - RNA, 22 nt, Human
ggcugcaaaggguaucaggugc

SEQ ID NO: 1654884 - RNA, 23 nt, Human
ggcugcaaaggguaucaggugcu

SEQ ID NO: 1654885 - RNA, 21 nt, Human
ggcugaugccaaguuguuuga

SEQ ID NO: 1654886 - RNA, 13 nt, Human
ggcucuggagccc

SEQ ID NO: 1654887 - RNA, 14 nt, Human
ggcucuggagccca

SEQ ID NO: 1654888 - RNA, 20 nt, Human
ggccccugcccggcugcgga

SEQ ID NO: 1654889 - RNA, 16 nt, Human
ggccccugcccggcug

SEQ ID NO: 1654890 - RNA, 17 nt, Human
ggccccugcccggcugc

SEQ ID NO: 1654891 - RNA, 13 nt, Human
ggcugagguggga

SEQ ID NO: 1654892 - RNA, 15 nt, Human
ggcugaggugggagg

SEQ ID NO: 1654893 - RNA, 13 nt, Human
gggaaugaagaua

SEQ ID NO: 1654894 - RNA, 17 nt, Human
gggaagggggcugggac

SEQ ID NO: 1654895 - RNA, 14 nt, Human
gggaagggggcugg

SEQ ID NO: 1654896 - RNA, 16 nt, Human
gggaagggggcuggga

SEQ ID NO: 1654897 - RNA, 22 nt, Human
gggaaggcagggagggccuggg

SEQ ID NO: 1654898 - RNA, 23 nt, Human
gggaaggauacaaaagcauguga

SEQ ID NO: 1654899 - RNA, 21 nt, Human
gggaaggauacaaaagcaugu

SEQ ID NO: 1654900 - RNA, 17 nt, Human
ggcuuuucugauccagu

SEQ ID NO: 1654901 - RNA, 14 nt, Human
ggcuuuugugcauu

SEQ ID NO: 1654902 - RNA, 23 nt, Human
gggacaaggacuaggguccuggg

SEQ ID NO: 1654903 - RNA, 17 nt, Human
gggaauuucuucaacuc

SEQ ID NO: 1654904 - RNA, 14 nt, Human
gggaccccugagcu

SEQ ID NO: 1654905 - RNA, 17 nt, Human
gggacuacaggcaccca

SEQ ID NO: 1654906 - RNA, 16 nt, Human
gggacucaaugcacug

SEQ ID NO: 1654907 - RNA, 12 nt, Human
gggaccucaggc

SEQ ID NO: 1654908 - RNA, 13 nt, Human
gggaccucaggcc

SEQ ID NO: 1654909 - RNA, 15 nt, Human
gggaccucaggccug

SEQ ID NO: 1654910 - RNA, 18 nt, Human
ggcugggcuucaguggca

SEQ ID NO: 1654911 - RNA, 13 nt, Human
ggcugggcuucag

SEQ ID NO: 1654912 - RNA, 17 nt, Human
ggcugggcuucaguggc

SEQ ID NO: 1654913 - RNA, 17 nt, Human
ggcugggcucccuuccc

SEQ ID NO: 1654914 - RNA, 18 nt, Human
ggcugggcucccuuccca

SEQ ID NO: 1654915 - RNA, 12 nt, Human
ggcugggcuuca

SEQ ID NO: 1654916 - RNA, 21 nt, Human
ggcuuagucacugagacagcc

SEQ ID NO: 1654917 - RNA, 14 nt, Human
ggcuuuucacugcu

SEQ ID NO: 1654918 - RNA, 15 nt, Human
ggcuuuucacugcug

SEQ ID NO: 1654919 - RNA, 17 nt, Human
ggcuuuucacugcuggc

SEQ ID NO: 1654920 - RNA, 12 nt, Human
ggcuuuucugau

SEQ ID NO: 1654921 - RNA, 19 nt, Human
ggcuuuucacugcuggcug

SEQ ID NO: 1654922 - RNA, 22 nt, Human
ggcuuuucacugcuggcugccu

SEQ ID NO: 1654923 - RNA, 13 nt, Human
ggcuuuucugauc

SEQ ID NO: 1654924 - RNA, 16 nt, Human
ggcuuuucugauccag

SEQ ID NO: 1654925 - RNA, 10 nt, Human
ggcuuuugug

SEQ ID NO: 1654926 - RNA, 21 nt, Human
ggcuuggggaccagagcugcc

SEQ ID NO: 1654927 - RNA, 22 nt, Human
ggcuugaguuuaaauuguaaua

SEQ ID NO: 1654928 - RNA, 18 nt, Human
gguagcauuuguguugaa

SEQ ID NO: 1654929 - RNA, 23 nt, Human
gguagaaauaucugaaaauguau

SEQ ID NO: 1654930 - RNA, 22 nt, Human
gguagaagcccuucuaccuucc

SEQ ID NO: 1654931 - RNA, 11 nt, Human
gguacccacug

SEQ ID NO: 1654932 - RNA, 16 nt, Human
gguacccacugcucug

SEQ ID NO: 1654933 - RNA, 13 nt, Human
gguacccacugcu

SEQ ID NO: 1654934 - RNA, 20 nt, Human
gguacuuguggacacagcuc

SEQ ID NO: 1654935 - RNA, 22 nt, Human
gguagaaauaucugaaaaugua

SEQ ID NO: 1654936 - RNA, 16 nt, Human
gguacuuguggacaca

SEQ ID NO: 1654937 - RNA, 17 nt, Human
gguacuuguggacacag

SEQ ID NO: 1654938 - RNA, 15 nt, Human
ggucccaccccacac

SEQ ID NO: 1654939 - RNA, 16 nt, Human
ggucccaccccacaca

SEQ ID NO: 1654940 - RNA, 11 nt, Human
ggucagagccu

SEQ ID NO: 1654941 - RNA, 16 nt, Human
ggucacaggacucugc

SEQ ID NO: 1654942 - RNA, 18 nt, Human
ggucacaggacucugccu

SEQ ID NO: 1654943 - RNA, 12 nt, Human
ggucacucuggc

SEQ ID NO: 1654944 - RNA, 17 nt, Human
gggugcugggccccugc

SEQ ID NO: 1654945 - RNA, 18 nt, Human
gggugcugggccccugcc

SEQ ID NO: 1654946 - RNA, 22 nt, Human
ggguucaagcgauucuucugcu

SEQ ID NO: 1654947 - RNA, 23 nt, Human
ggguucaagcgauucuucugcuu

SEQ ID NO: 1654948 - RNA, 16 nt, Human
ggguuggccccugccc

SEQ ID NO: 1654949 - RNA, 19 nt, Human
ggguucuuucuuccucugc

SEQ ID NO: 1654950 - RNA, 17 nt, Human
ggguucuuucuuccucu

SEQ ID NO: 1654951 - RNA, 17 nt, Human
ggguucuacccaggugc

SEQ ID NO: 1654952 - RNA, 19 nt, Human
ggguuccuuccucugagcc

SEQ ID NO: 1654953 - RNA, 11 nt, Human
ggguuccugca

SEQ ID NO: 1654954 - RNA, 20 nt, Human
ggguuccuuccucugagccu

SEQ ID NO: 1654955 - RNA, 21 nt, Human
ggguuccuuccucugagccuu

SEQ ID NO: 1654956 - RNA, 12 nt, Human
ggguucuaccca

SEQ ID NO: 1654957 - RNA, 17 nt, Human
gggugaagugaagacaa

SEQ ID NO: 1654958 - RNA, 19 nt, Human
gggugacagagcaagugag

SEQ ID NO: 1654959 - RNA, 17 nt, Human
ggggcugaggugggagg

SEQ ID NO: 1654960 - RNA, 16 nt, Human
ggggcaacccugguga

SEQ ID NO: 1654961 - RNA, 11 nt, Human
gggccugggcc

SEQ ID NO: 1654962 - RNA, 16 nt, Human
ggggaaaaucagccug

SEQ ID NO: 1654963 - RNA, 17 nt, Human
ggggaaaaucagccugc

SEQ ID NO: 1654964 - RNA, 19 nt, Human
ggggaaaaucagccugcuc

SEQ ID NO: 1654965 - RNA, 11 nt, Human
ggggauucuua

SEQ ID NO: 1654966 - RNA, 15 nt, Human
ggggauucuuaaagu

SEQ ID NO: 1654967 - RNA, 18 nt, Human
ggggaggggcugugggcg

SEQ ID NO: 1654968 - RNA, 21 nt, Human
ggggaaaaucagccugcucca

SEQ ID NO: 1654969 - RNA, 24 nt, Human
ggggaaaaucagccugcuccagcu

SEQ ID NO: 1654970 - RNA, 17 nt, Human
ggguaagugagagaggg

SEQ ID NO: 1654971 - RNA, 14 nt, Human
gggucucacucugu

SEQ ID NO: 1654972 - RNA, 12 nt, Human
gggucugaggaa

SEQ ID NO: 1654973 - RNA, 21 nt, Human
gggucugaggaauccagaccc

SEQ ID NO: 1654974 - RNA, 22 nt, Human
gggggaggugggauccuccagg

SEQ ID NO: 1654975 - RNA, 23 nt, Human
ggggcugcaccggcuggccuggc

SEQ ID NO: 1654976 - RNA, 19 nt, Human
ggggcugaggugggaggau

SEQ ID NO: 1654977 - RNA, 12 nt, Human
ggggcugcaccg

SEQ ID NO: 1654978 - RNA, 21 nt, Human
ggggcugcaccggcuggccug

SEQ ID NO: 1654979 - RNA, 22 nt, Human
ggggcugcaccggcuggccugg

SEQ ID NO: 1654980 - RNA, 20 nt, Human
gggguggggggggugcuggg

SEQ ID NO: 1654981 - RNA, 17 nt, Human
gggguggggaccucagg

SEQ ID NO: 1654982 - RNA, 18 nt, Human
ggggugcugggccccugc

SEQ ID NO: 1654983 - RNA, 12 nt, Human
gggguggccucc

SEQ ID NO: 1654984 - RNA, 17 nt, Human
gggggaucacagccucu

SEQ ID NO: 1654985 - RNA, 17 nt, Human
gguuaggcauuguggga

SEQ ID NO: 1654986 - RNA, 21 nt, Human
gguuaguggauggaaggggcu

SEQ ID NO: 1654987 - RNA, 22 nt, Human
gguuaguggauggaaggggcug

SEQ ID NO: 1654988 - RNA, 20 nt, Human
gguuaucugaagucagaucu

SEQ ID NO: 1654989 - RNA, 13 nt, Human
gguuauggagagg

SEQ ID NO: 1654990 - RNA, 21 nt, Human
gguuacccaguuagcucucaa

SEQ ID NO: 1654991 - RNA, 13 nt, Human
gguuaagucuguu

SEQ ID NO: 1654992 - RNA, 16 nt, Human
gguuaagucuguuuua

SEQ ID NO: 1654993 - RNA, 23 nt, Human
gguuaagucuguuuuaugacuuc

SEQ ID NO: 1654994 - RNA, 14 nt, Human
gguucuuucuuccu

SEQ ID NO: 1654995 - RNA, 16 nt, Human
gguucuuucuuccucu

SEQ ID NO: 1654996 - RNA, 22 nt, Human
gguucuuguauuaagaaugaaa

SEQ ID NO: 1654997 - RNA, 14 nt, Human
gguucuuguauuaa

SEQ ID NO: 1654998 - RNA, 13 nt, Human
gguugagguuuca

SEQ ID NO: 1654999 - RNA, 13 nt, Human
gguucaaagauau

SEQ ID NO: 1655000 - RNA, 21 nt, Human
gguucaaagauauuuugcuuu

SEQ ID NO: 1655001 - RNA, 16 nt, Human
gguggugaccucugcc

SEQ ID NO: 1655002 - RNA, 14 nt, Human
gguggugaccucug

SEQ ID NO: 1655003 - RNA, 15 nt, Human
gguggugaccucugc

SEQ ID NO: 1655004 - RNA, 12 nt, Human
gguggcuggguu

SEQ ID NO: 1655005 - RNA, 16 nt, Human
gguguaugugugaagu

SEQ ID NO: 1655006 - RNA, 17 nt, Human
ggugucaagagggucug

SEQ ID NO: 1655007 - RNA, 19 nt, Human
ggugucaagagggucugag

SEQ ID NO: 1655008 - RNA, 19 nt, Human
ggugucaccugaagacuca

SEQ ID NO: 1655009 - RNA, 18 nt, Human
ggugguuucagaaaugug

SEQ ID NO: 1655010 - RNA, 17 nt, Human
ggugguuucagaaaugu

SEQ ID NO: 1655011 - RNA, 21 nt, Human
ggugguuauggagaggguguc

SEQ ID NO: 1655012 - RNA, 18 nt, Human
ggugguuuucuguucuuu

SEQ ID NO: 1655013 - RNA, 15 nt, Human
ggugguuuucuguuc

SEQ ID NO: 1655014 - RNA, 17 nt, Human
ggucccaccccacacac

SEQ ID NO: 1655015 - RNA, 21 nt, Human
ggucucacuauguugcccagg

SEQ ID NO: 1655016 - RNA, 22 nt, Human
ggucucacucugucgcccaguc

SEQ ID NO: 1655017 - RNA, 23 nt, Human
ggucucacucugucgcccagucu

SEQ ID NO: 1655018 - RNA, 14 nt, Human
ggugacuuuggaua

SEQ ID NO: 1655019 - RNA, 18 nt, Human
ggugacuuuggauaauaa

SEQ ID NO: 1655020 - RNA, 19 nt, Human
ggugacuuuggauaauaag

SEQ ID NO: 1655021 - RNA, 20 nt, Human
ggugacuuuggauaauaagg

SEQ ID NO: 1655022 - RNA, 21 nt, Human
ggugacuuuggauaauaagga

SEQ ID NO: 1655023 - RNA, 22 nt, Human
ggugaccagcaccaucucuccu

SEQ ID NO: 1655024 - RNA, 14 nt, Human
ggucugacccacug

SEQ ID NO: 1655025 - RNA, 15 nt, Human
ggugcugccauccag

SEQ ID NO: 1655026 - RNA, 21 nt, Human
ggugcuaucucccccagcccc

SEQ ID NO: 1655027 - RNA, 21 nt, Human
ggugcugccauccagguucag

SEQ ID NO: 1655028 - RNA, 19 nt, Human
gguggcagugggagcugcc

SEQ ID NO: 1655029 - RNA, 22 nt, Human
gguggcagugggagcugccugu

SEQ ID NO: 1655030 - RNA, 23 nt, Human
gguggccucccaacucaccccag

SEQ ID NO: 1655031 - RNA, 20 nt, Human
gguggccacuccagaccccu

SEQ ID NO: 1655032 - RNA, 21 nt, Human
gguggccacuccagaccccug

SEQ ID NO: 1655033 - RNA, 22 nt, Human
gguggccacuccagaccccugg

SEQ ID NO: 1655034 - RNA, 23 nt, Human
gguggccacuccagaccccuggc

SEQ ID NO: 1655035 - RNA, 22 nt, Human
gguggccucccaacucacccca

SEQ ID NO: 1655036 - RNA, 15 nt, Human
ggugagaagcagagg

SEQ ID NO: 1655037 - RNA, 16 nt, Human
ggugagaggggaacag

SEQ ID NO: 1655038 - RNA, 16 nt, Human
ggugcuaucuccccca

SEQ ID NO: 1655039 - RNA, 17 nt, Human
ggugcuaucucccccag

SEQ ID NO: 1655040 - RNA, 19 nt, Human
ggugcuaucucccccagcc

SEQ ID NO: 1655041 - RNA, 20 nt, Human
ggugcuaucucccccagccc

SEQ ID NO: 1655042 - RNA, 15 nt, Human
ggugcgaucuggguu

SEQ ID NO: 1655043 - RNA, 23 nt, Human
ggugcuacaaaaacacagcaagg

SEQ ID NO: 1655044 - RNA, 22 nt, Human
gcccaucugggggccucuucug

SEQ ID NO: 1655045 - RNA, 16 nt, Human
gccccagugcccacag

SEQ ID NO: 1655046 - RNA, 17 nt, Human
gccccagugcccacagg

SEQ ID NO: 1655047 - RNA, 21 nt, Human
gccccagugcccacaggauca

SEQ ID NO: 1655048 - RNA, 23 nt, Human
gccccauccucuguacagagccc

SEQ ID NO: 1655049 - RNA, 17 nt, Human
gccccauucugccugcc

SEQ ID NO: 1655050 - RNA, 18 nt, Human
gccccauucugccugccc

SEQ ID NO: 1655051 - RNA, 20 nt, Human
gccccauucugccugcccag

SEQ ID NO: 1655052 - RNA, 21 nt, Human
gccccauucugccugcccagg

SEQ ID NO: 1655053 - RNA, 15 nt, Human
gcccaguugggugga

SEQ ID NO: 1655054 - RNA, 22 nt, Human
gcccagucuggaaugcaguggu

SEQ ID NO: 1655055 - RNA, 16 nt, Human
gcccaggcuggcgugc

SEQ ID NO: 1655056 - RNA, 14 nt, Human
gcccaggcuggcgu

SEQ ID NO: 1655057 - RNA, 15 nt, Human
gcccaggcuggcgug

SEQ ID NO: 1655058 - RNA, 17 nt, Human
gcccaggccugccuguu

SEQ ID NO: 1655059 - RNA, 11 nt, Human
gcccaggcugg

SEQ ID NO: 1655060 - RNA, 12 nt, Human
gcccaggaaagg

SEQ ID NO: 1655061 - RNA, 15 nt, Human
gcccaggaaaggcuc

SEQ ID NO: 1655062 - RNA, 16 nt, Human
gcccaggaaaggcucc

SEQ ID NO: 1655063 - RNA, 18 nt, Human
gcccaggccuccuacagc

SEQ ID NO: 1655064 - RNA, 14 nt, Human
gccccgcccaggcu

SEQ ID NO: 1655065 - RNA, 22 nt, Human
gccccauucugccugcccaggc

SEQ ID NO: 1655066 - RNA, 23 nt, Human
gccccauucugccugcccaggcc

SEQ ID NO: 1655067 - RNA, 23 nt, Human
gccccgaggccuucucugaagga

SEQ ID NO: 1655068 - RNA, 17 nt, Human
gccccgucccccucugg

SEQ ID NO: 1655069 - RNA, 21 nt, Human
gccccgucccccucuggcucc

SEQ ID NO: 1655070 - RNA, 17 nt, Human
gccccgugggguuccuc

SEQ ID NO: 1655071 - RNA, 23 nt, Human
gccccucaacucuccuccagagu

SEQ ID NO: 1655072 - RNA, 19 nt, Human
gccccucagggucccuggu

SEQ ID NO: 1655073 - RNA, 21 nt, Human
gccccucagggucccuggugg

SEQ ID NO: 1655074 - RNA, 17 nt, Human
gccccuucccccuccaa

SEQ ID NO: 1655075 - RNA, 13 nt, Human
gccccugcacaaa

SEQ ID NO: 1655076 - RNA, 23 nt, Human
gccccuggcagccccuguucugg

SEQ ID NO: 1655077 - RNA, 19 nt, Human
gccccugcacuccagccug

SEQ ID NO: 1655078 - RNA, 19 nt, Human
gccccuucugacccaugcu

SEQ ID NO: 1655079 - RNA, 20 nt, Human
gccccuucugacccaugcug

SEQ ID NO: 1655080 - RNA, 13 nt, Human
gcccggcuccagg

SEQ ID NO: 1655081 - RNA, 14 nt, Human
gcccggcuccaggc

SEQ ID NO: 1655082 - RNA, 15 nt, Human
gcccggcuccaggcu

SEQ ID NO: 1655083 - RNA, 12 nt, Human
gcccgggcucug

SEQ ID NO: 1655084 - RNA, 13 nt, Human
gcccgggcucugc

SEQ ID NO: 1655085 - RNA, 14 nt, Human
gcccgggcucugcc

SEQ ID NO: 1655086 - RNA, 15 nt, Human
gcccgggcucugccu

SEQ ID NO: 1655087 - RNA, 18 nt, Human
gcccgggcucugccuccc

SEQ ID NO: 1655088 - RNA, 15 nt, Human
gcccucccugccccu

SEQ ID NO: 1655089 - RNA, 21 nt, Human
gcccgggcucugccucccauc

SEQ ID NO: 1655090 - RNA, 19 nt, Human
gcccgggcucugccuccca

SEQ ID NO: 1655091 - RNA, 20 nt, Human
gcccgggcucugccucccau

SEQ ID NO: 1655092 - RNA, 16 nt, Human
gcccucuccugggcag

SEQ ID NO: 1655093 - RNA, 15 nt, Human
gcccucuccugggca

SEQ ID NO: 1655094 - RNA, 22 nt, Human
gcccucugcccacucccugcaa

SEQ ID NO: 1655095 - RNA, 21 nt, Human
gcccucuccugggcagcugcc

SEQ ID NO: 1655096 - RNA, 19 nt, Human
gcccucuccugggcagcug

SEQ ID NO: 1655097 - RNA, 18 nt, Human
gcccucuccugggcagcu

SEQ ID NO: 1655098 - RNA, 19 nt, Human
gcccacaggaucagucuga

SEQ ID NO: 1655099 - RNA, 13 nt, Human
gcccacaggauca

SEQ ID NO: 1655100 - RNA, 18 nt, Human
gcccacaggaucagucug

SEQ ID NO: 1655101 - RNA, 15 nt, Human
gcccaccccucaaca

SEQ ID NO: 1655102 - RNA, 16 nt, Human
gccauuuguguuuaua

SEQ ID NO: 1655103 - RNA, 16 nt, Human
gcccaaagaugcagcc

SEQ ID NO: 1655104 - RNA, 16 nt, Human
gcccacagcuguauga

SEQ ID NO: 1655105 - RNA, 20 nt, Human
gccauuucuuccacaagagc

SEQ ID NO: 1655106 - RNA, 22 nt, Human
gccauuucuuccacaagagccc

SEQ ID NO: 1655107 - RNA, 17 nt, Human
gccauuucuuccacaag

SEQ ID NO: 1655108 - RNA, 22 nt, Human
gccaugggacagggaggacgcu

SEQ ID NO: 1655109 - RNA, 22 nt, Human
gccauuuaaagcuuauuaaaac

SEQ ID NO: 1655110 - RNA, 16 nt, Human
gccaucccucccucca

SEQ ID NO: 1655111 - RNA, 15 nt, Human
gccaucccucccucc

SEQ ID NO: 1655112 - RNA, 14 nt, Human
gccaugggacaggg

SEQ ID NO: 1655113 - RNA, 19 nt, Human
gccaugggacagggaggac

SEQ ID NO: 1655114 - RNA, 20 nt, Human
gccaggaagccagcaggcuc

SEQ ID NO: 1655115 - RNA, 19 nt, Human
gccaggaagccagcaggcu

SEQ ID NO: 1655116 - RNA, 11 nt, Human
gccaggaagcc

SEQ ID NO: 1655117 - RNA, 17 nt, Human
gccaggaagccagcagg

SEQ ID NO: 1655118 - RNA, 18 nt, Human
gccaggaagccagcaggc

SEQ ID NO: 1655119 - RNA, 23 nt, Human
gccaggggaaaaucagccugcuc

SEQ ID NO: 1655120 - RNA, 17 nt, Human
gccaggggaaaaucagc

SEQ ID NO: 1655121 - RNA, 21 nt, Human
gccaggggaaaaucagccugc

SEQ ID NO: 1655122 - RNA, 22 nt, Human
gccaggggaaaaucagccugcu

SEQ ID NO: 1655123 - RNA, 18 nt, Human
gccagguggccacuccag

SEQ ID NO: 1655124 - RNA, 19 nt, Human
gccauccagguucagcuug

SEQ ID NO: 1655125 - RNA, 20 nt, Human
gccauccagguucagcuugu

SEQ ID NO: 1655126 - RNA, 13 nt, Human
gccaucccagccc

SEQ ID NO: 1655127 - RNA, 14 nt, Human
gccaucccagcccc

SEQ ID NO: 1655128 - RNA, 15 nt, Human
gccaucccagcccca

SEQ ID NO: 1655129 - RNA, 16 nt, Human
gccaucccagccccaa

SEQ ID NO: 1655130 - RNA, 17 nt, Human
gccaucccagccccaau

SEQ ID NO: 1655131 - RNA, 14 nt, Human
gccaucccucccuc

SEQ ID NO: 1655132 - RNA, 13 nt, Human
gccaucccucccu

SEQ ID NO: 1655133 - RNA, 11 nt, Human
gccaucccucc

SEQ ID NO: 1655134 - RNA, 17 nt, Human
gccagauucuuuccuga

SEQ ID NO: 1655135 - RNA, 19 nt, Human
gccagauucuuuccugagg

SEQ ID NO: 1655136 - RNA, 19 nt, Human
gccagagggagugacagag

SEQ ID NO: 1655137 - RNA, 20 nt, Human
gccagagggagugacagagg

SEQ ID NO: 1655138 - RNA, 16 nt, Human
gccagauucuuuccug

SEQ ID NO: 1655139 - RNA, 21 nt, Human
gccagccgagauagccaaggc

SEQ ID NO: 1655140 - RNA, 20 nt, Human
gccagccgagauagccaagg

SEQ ID NO: 1655141 - RNA, 12 nt, Human
gccagccuugac

SEQ ID NO: 1655142 - RNA, 14 nt, Human
gccagccuugacca

SEQ ID NO: 1655143 - RNA, 20 nt, Human
gccagccuugaccauucucc

SEQ ID NO: 1655144 - RNA, 21 nt, Human
gccagccuugaccauucucca

SEQ ID NO: 1655145 - RNA, 22 nt, Human
gccagccuugaccauucuccac

SEQ ID NO: 1655146 - RNA, 14 nt, Human
gccagcugcuuggg

SEQ ID NO: 1655147 - RNA, 16 nt, Human
gccagcugcuugggcu

SEQ ID NO: 1655148 - RNA, 15 nt, Human
gccagcugcuugggc

SEQ ID NO: 1655149 - RNA, 12 nt, Human
gccagagacaca

SEQ ID NO: 1655150 - RNA, 15 nt, Human
gccagagacacaagc

SEQ ID NO: 1655151 - RNA, 18 nt, Human
gccagagggagugacaga

SEQ ID NO: 1655152 - RNA, 16 nt, Human
gccacuccagaccccu

SEQ ID NO: 1655153 - RNA, 18 nt, Human
gccacuccagaccccugg

SEQ ID NO: 1655154 - RNA, 19 nt, Human
gccacuccagaccccuggc

SEQ ID NO: 1655155 - RNA, 19 nt, Human
gccacugcaccgggccaca

SEQ ID NO: 1655156 - RNA, 17 nt, Human
gccacugcaccgggcca

SEQ ID NO: 1655157 - RNA, 18 nt, Human
gccacugcaccgggccac

SEQ ID NO: 1655158 - RNA, 14 nt, Human
gccacggccaggcc

SEQ ID NO: 1655159 - RNA, 15 nt, Human
gccacggccaggcca

SEQ ID NO: 1655160 - RNA, 21 nt, Human
gccacuauuguuagucucuug

SEQ ID NO: 1655161 - RNA, 17 nt, Human
gccacggccaggccaga

SEQ ID NO: 1655162 - RNA, 16 nt, Human
gccacggccaggccag

SEQ ID NO: 1655163 - RNA, 22 nt, Human
gccacguucuuacuaguuuccc

SEQ ID NO: 1655164 - RNA, 14 nt, Human
gcgugagccacugc

SEQ ID NO: 1655165 - RNA, 16 nt, Human
gcgugagaccugcccc

SEQ ID NO: 1655166 - RNA, 16 nt, Human
gcgugagccacugcac

SEQ ID NO: 1655167 - RNA, 15 nt, Human
gcgugagccacugca

SEQ ID NO: 1655168 - RNA, 17 nt, Human
gcuaacauggaaguacu

SEQ ID NO: 1655169 - RNA, 18 nt, Human
gcuaacauggaaguacua

SEQ ID NO: 1655170 - RNA, 13 nt, Human
gcuagacugguga

SEQ ID NO: 1655171 - RNA, 15 nt, Human
gcuagacuggugacu

SEQ ID NO: 1655172 - RNA, 16 nt, Human
gcuagacuggugacug

SEQ ID NO: 1655173 - RNA, 19 nt, Human
gcuagacuggugacugauu

SEQ ID NO: 1655174 - RNA, 20 nt, Human
gcuagacuggugacugauuc

SEQ ID NO: 1655175 - RNA, 22 nt, Human
gcuagacuggugacugauucuu

SEQ ID NO: 1655176 - RNA, 21 nt, Human
gcuagacgagcaggcuucuuc

SEQ ID NO: 1655177 - RNA, 22 nt, Human
gcuagacgagcaggcuucuucc

SEQ ID NO: 1655178 - RNA, 20 nt, Human
gcgccuacaggagugagcac

SEQ ID NO: 1655179 - RNA, 21 nt, Human
gcgccuacaggagugagcacu

SEQ ID NO: 1655180 - RNA, 14 nt, Human
gcgcugccccuggc

SEQ ID NO: 1655181 - RNA, 17 nt, Human
gcgcugccccuggcagc

SEQ ID NO: 1655182 - RNA, 19 nt, Human
gcggaaugaaccacaucuu

SEQ ID NO: 1655183 - RNA, 19 nt, Human
gcggacagccacggccagg

SEQ ID NO: 1655184 - RNA, 23 nt, Human
gcggacagccacggccaggccag

SEQ ID NO: 1655185 - RNA, 19 nt, Human
gcggggacagcuccuucug

SEQ ID NO: 1655186 - RNA, 23 nt, Human
gcggggacagcuccuucuguccu

SEQ ID NO: 1655187 - RNA, 23 nt, Human
gcgguccacccaggagccccgag

SEQ ID NO: 1655188 - RNA, 12 nt, Human
gccuuuuucauu

SEQ ID NO: 1655189 - RNA, 16 nt, Human
gccuuuuucauuauuu

SEQ ID NO: 1655190 - RNA, 20 nt, Human
gccuuuuucauuauuuuauu

SEQ ID NO: 1655191 - RNA, 22 nt, Human
gccuuuuucauuauuuuauuau

SEQ ID NO: 1655192 - RNA, 23 nt, Human
gccuuuuucauuauuuuauuaug

SEQ ID NO: 1655193 - RNA, 18 nt, Human
gccuuggggcugaugcag

SEQ ID NO: 1655194 - RNA, 19 nt, Human
gccuucggccuccauccug

SEQ ID NO: 1655195 - RNA, 16 nt, Human
gccuucagcucuacag

SEQ ID NO: 1655196 - RNA, 13 nt, Human
gccuucagcucua

SEQ ID NO: 1655197 - RNA, 18 nt, Human
gccuucggccuccauccu

SEQ ID NO: 1655198 - RNA, 16 nt, Human
gccuuagaaccuuucu

SEQ ID NO: 1655199 - RNA, 20 nt, Human
gccuuagaagucacacagua

SEQ ID NO: 1655200 - RNA, 17 nt, Human
gccuuagaaccuuucuu

SEQ ID NO: 1655201 - RNA, 23 nt, Human
gccuuauggaacacucugagacu

SEQ ID NO: 1655202 - RNA, 21 nt, Human
gccuuauggaacacucugaga

SEQ ID NO: 1655203 - RNA, 22 nt, Human
gccuuauggaacacucugagac

SEQ ID NO: 1655204 - RNA, 15 nt, Human
gccugguggcagcug

SEQ ID NO: 1655205 - RNA, 16 nt, Human
gccugguggcagcugc

SEQ ID NO: 1655206 - RNA, 17 nt, Human
gccugguggcagcugcg

SEQ ID NO: 1655207 - RNA, 18 nt, Human
gccuguaaucacagcuac

SEQ ID NO: 1655208 - RNA, 15 nt, Human
gccucugcauucagg

SEQ ID NO: 1655209 - RNA, 12 nt, Human
gccucugcauuc

SEQ ID NO: 1655210 - RNA, 21 nt, Human
gccucugcacuccccugcugg

SEQ ID NO: 1655211 - RNA, 15 nt, Human
gccugaagucacaca

SEQ ID NO: 1655212 - RNA, 15 nt, Human
gccucugacacacag

SEQ ID NO: 1655213 - RNA, 16 nt, Human
gccucugacacacagc

SEQ ID NO: 1655214 - RNA, 16 nt, Human
gccucugcacuccccu

SEQ ID NO: 1655215 - RNA, 17 nt, Human
gccucugcacuccccug

SEQ ID NO: 1655216 - RNA, 18 nt, Human
gccucugcacuccccugc

SEQ ID NO: 1655217 - RNA, 19 nt, Human
gccucugcacuccccugcu

SEQ ID NO: 1655218 - RNA, 20 nt, Human
gccucugcacuccccugcug

SEQ ID NO: 1655219 - RNA, 14 nt, Human
gccuggacccugug

SEQ ID NO: 1655220 - RNA, 11 nt, Human
gccugcccagg

SEQ ID NO: 1655221 - RNA, 12 nt, Human
gccugcccaggc

SEQ ID NO: 1655222 - RNA, 10 nt, Human
gccucucugc

SEQ ID NO: 1655223 - RNA, 14 nt, Human
gccucucugcaggu

SEQ ID NO: 1655224 - RNA, 16 nt, Human
gccucucugcaggucc

SEQ ID NO: 1655225 - RNA, 17 nt, Human
gccucucugcagguccc

SEQ ID NO: 1655226 - RNA, 18 nt, Human
gccucucugcaggucccu

SEQ ID NO: 1655227 - RNA, 15 nt, Human
gccucucccaucacu

SEQ ID NO: 1655228 - RNA, 12 nt, Human
gccucagccucc

SEQ ID NO: 1655229 - RNA, 14 nt, Human
gccucagccuccca

SEQ ID NO: 1655230 - RNA, 22 nt, Human
gccucagccucccaaagugcug

SEQ ID NO: 1655231 - RNA, 18 nt, Human
gccucccgaauagcuggg

SEQ ID NO: 1655232 - RNA, 19 nt, Human
gccucccgaauagcuggga

SEQ ID NO: 1655233 - RNA, 14 nt, Human
gccuccccuccucu

SEQ ID NO: 1655234 - RNA, 13 nt, Human
gccuccccuccuc

SEQ ID NO: 1655235 - RNA, 12 nt, Human
gccuccccuccu

SEQ ID NO: 1655236 - RNA, 11 nt, Human
gccuccccucc

SEQ ID NO: 1655237 - RNA, 21 nt, Human
gccucccgaguagcugggacu

SEQ ID NO: 1655238 - RNA, 23 nt, Human
gccucccgaguagcugggacuac

SEQ ID NO: 1655239 - RNA, 20 nt, Human
gccucccgaauagcugggac

SEQ ID NO: 1655240 - RNA, 21 nt, Human
gccucccgaauagcugggacu

SEQ ID NO: 1655241 - RNA, 16 nt, Human
gccuccccuccucugc

SEQ ID NO: 1655242 - RNA, 14 nt, Human
gccuaaggacuucu

SEQ ID NO: 1655243 - RNA, 15 nt, Human
gccuaaggacuucuu

SEQ ID NO: 1655244 - RNA, 18 nt, Human
gccuaaggacuucuuuaa

SEQ ID NO: 1655245 - RNA, 14 nt, Human
gccuaaggcugaac

SEQ ID NO: 1655246 - RNA, 12 nt, Human
gccuaaggacuu

SEQ ID NO: 1655247 - RNA, 13 nt, Human
gccuaaggacuuc

SEQ ID NO: 1655248 - RNA, 17 nt, Human
gccuauuuuaauaaaca

SEQ ID NO: 1655249 - RNA, 22 nt, Human
gccucaagugauucuccugccu

SEQ ID NO: 1655250 - RNA, 24 nt, Human
gccucaagugauucuccugccuca

SEQ ID NO: 1655251 - RNA, 18 nt, Human
gccucagcauccuggcac

SEQ ID NO: 1655252 - RNA, 21 nt, Human
gccucagcauccuggcacccg

SEQ ID NO: 1655253 - RNA, 11 nt, Human
gccguggcuuc

SEQ ID NO: 1655254 - RNA, 12 nt, Human
gccguggcuucc

SEQ ID NO: 1655255 - RNA, 13 nt, Human
gccguggcuuccc

SEQ ID NO: 1655256 - RNA, 15 nt, Human
gccguggcuucccgc

SEQ ID NO: 1655257 - RNA, 11 nt, Human
gccuaaaucca

SEQ ID NO: 1655258 - RNA, 18 nt, Human
gccgucuaccugaggggc

SEQ ID NO: 1655259 - RNA, 20 nt, Human
gccgucuaccugaggggccu

SEQ ID NO: 1655260 - RNA, 22 nt, Human
gccgucuaccugaggggccucu

SEQ ID NO: 1655261 - RNA, 23 nt, Human
gccgucuaccugaggggccucuu

SEQ ID NO: 1655262 - RNA, 17 nt, Human
gccgagauagccaaggc

SEQ ID NO: 1655263 - RNA, 19 nt, Human
gccgagauagccaaggcca

SEQ ID NO: 1655264 - RNA, 15 nt, Human
gccgcagcccugcag

SEQ ID NO: 1655265 - RNA, 16 nt, Human
gccgcagcccugcaga

SEQ ID NO: 1655266 - RNA, 17 nt, Human
gccgcagcccugcagag

SEQ ID NO: 1655267 - RNA, 19 nt, Human
gccgcagcccugcagaggg

SEQ ID NO: 1655268 - RNA, 16 nt, Human
gccgagauagccaagg

SEQ ID NO: 1655269 - RNA, 22 nt, Human
gcccuuccucuccacugccuuc

SEQ ID NO: 1655270 - RNA, 13 nt, Human
gcccuucucucca

SEQ ID NO: 1655271 - RNA, 19 nt, Human
gcccuucuuuccacagaag

SEQ ID NO: 1655272 - RNA, 16 nt, Human
gcauuuuacuguacag

SEQ ID NO: 1655273 - RNA, 17 nt, Human
gcauuuuacuguacaga

SEQ ID NO: 1655274 - RNA, 13 nt, Human
gcauuuuauaaau

SEQ ID NO: 1655275 - RNA, 23 nt, Human
gcauuugcugaauacagaggcaa

SEQ ID NO: 1655276 - RNA, 21 nt, Human
gcauuuggugguuucagaaau

SEQ ID NO: 1655277 - RNA, 18 nt, Human
gcauucucacuccuaccu

SEQ ID NO: 1655278 - RNA, 13 nt, Human
gcauucucacucc

SEQ ID NO: 1655279 - RNA, 15 nt, Human
gcauucucacuccua

SEQ ID NO: 1655280 - RNA, 12 nt, Human
gcauuccccagg

SEQ ID NO: 1655281 - RNA, 12 nt, Human
gcauuccccacu

SEQ ID NO: 1655282 - RNA, 21 nt, Human
gccaaacucaccugccccuca

SEQ ID NO: 1655283 - RNA, 19 nt, Human
gccaaacucaccugccccu

SEQ ID NO: 1655284 - RNA, 14 nt, Human
gccaaaggaagcac

SEQ ID NO: 1655285 - RNA, 16 nt, Human
gccaaaggaagcacau

SEQ ID NO: 1655286 - RNA, 20 nt, Human
gccaaaggaagcacaugccu

SEQ ID NO: 1655287 - RNA, 22 nt, Human
gcauuuugcuaaaugugaauga

SEQ ID NO: 1655288 - RNA, 20 nt, Human
gcauuagauuucucauuugc

SEQ ID NO: 1655289 - RNA, 17 nt, Human
gcauguuugugauugac

SEQ ID NO: 1655290 - RNA, 15 nt, Human
gcaugcugucccuua

SEQ ID NO: 1655291 - RNA, 15 nt, Human
gcaugaauuugugaa

SEQ ID NO: 1655292 - RNA, 12 nt, Human
gcaucacaguuu

SEQ ID NO: 1655293 - RNA, 16 nt, Human
gcaucaggccaggccc

SEQ ID NO: 1655294 - RNA, 17 nt, Human
gcaucaggccaggcccu

SEQ ID NO: 1655295 - RNA, 15 nt, Human
gcaucaggccaggcc

SEQ ID NO: 1655296 - RNA, 17 nt, Human
gcaugccuggauggggc

SEQ ID NO: 1655297 - RNA, 22 nt, Human
gcaugccuggauggggcugcac

SEQ ID NO: 1655298 - RNA, 17 nt, Human
gcaugaauuugugaagg

SEQ ID NO: 1655299 - RNA, 20 nt, Human
gcaugacacgaauauugcug

SEQ ID NO: 1655300 - RNA, 12 nt, Human
gcaggucccuaa

SEQ ID NO: 1655301 - RNA, 13 nt, Human
gcaggucccuaau

SEQ ID NO: 1655302 - RNA, 10 nt, Human
gcaggucccu

SEQ ID NO: 1655303 - RNA, 11 nt, Human
gcaggucccua

SEQ ID NO: 1655304 - RNA, 23 nt, Human
gcagugcuuccaaggauggacca

SEQ ID NO: 1655305 - RNA, 16 nt, Human
gcagugggagcugccu

SEQ ID NO: 1655306 - RNA, 18 nt, Human
gcagggagggccugggcc

SEQ ID NO: 1655307 - RNA, 22 nt, Human
gcagggagggccugggccccag

SEQ ID NO: 1655308 - RNA, 16 nt, Human
gcagggagggcuucug

SEQ ID NO: 1655309 - RNA, 14 nt, Human
gcagggcucagcgg

SEQ ID NO: 1655310 - RNA, 12 nt, Human
gcagggcucagc

SEQ ID NO: 1655311 - RNA, 20 nt, Human
gcaggauucuuccucccucc

SEQ ID NO: 1655312 - RNA, 14 nt, Human
gcagggagggccug

SEQ ID NO: 1655313 - RNA, 17 nt, Human
gcagggagggccugggc

SEQ ID NO: 1655314 - RNA, 15 nt, Human
gcaggcuacugucag

SEQ ID NO: 1655315 - RNA, 19 nt, Human
gcauauuuauaaaaauaaa

SEQ ID NO: 1655316 - RNA, 21 nt, Human
gcaucaagaugugacauguuu

SEQ ID NO: 1655317 - RNA, 17 nt, Human
gcauauucaggaagcuc

SEQ ID NO: 1655318 - RNA, 18 nt, Human
gcauauucaggaagcuca

SEQ ID NO: 1655319 - RNA, 20 nt, Human
gcauauucaggaagcucagg

SEQ ID NO: 1655320 - RNA, 14 nt, Human
gcauauauuuuuau

SEQ ID NO: 1655321 - RNA, 15 nt, Human
gcauauauuuuuaua

SEQ ID NO: 1655322 - RNA, 11 nt, Human
gcauauauuuu

SEQ ID NO: 1655323 - RNA, 16 nt, Human
gcauauauuuuuauau

SEQ ID NO: 1655324 - RNA, 20 nt, Human
gcauauauuuuuauauuuac

SEQ ID NO: 1655325 - RNA, 18 nt, Human
gcauauuauuuuauguug

SEQ ID NO: 1655326 - RNA, 23 nt, Human
gcauauuauuuuauguugcauag

SEQ ID NO: 1655327 - RNA, 15 nt, Human
gcauauucaggaagc

SEQ ID NO: 1655328 - RNA, 17 nt, Human
gcagugggagcugccug

SEQ ID NO: 1655329 - RNA, 18 nt, Human
gcagugggagcugccugu

SEQ ID NO: 1655330 - RNA, 18 nt, Human
gcauagauucccugagca

SEQ ID NO: 1655331 - RNA, 13 nt, Human
gcaguucugaaga

SEQ ID NO: 1655332 - RNA, 14 nt, Human
gcaguucugaagaa

SEQ ID NO: 1655333 - RNA, 21 nt, Human
gcauaggugaucucauuuaau

SEQ ID NO: 1655334 - RNA, 17 nt, Human
gcacugaggaccagcca

SEQ ID NO: 1655335 - RNA, 19 nt, Human
gcacuaaggugugcucuga

SEQ ID NO: 1655336 - RNA, 18 nt, Human
gcacuaaggugugcucug

SEQ ID NO: 1655337 - RNA, 17 nt, Human
gcacuaaggugugcucu

SEQ ID NO: 1655338 - RNA, 18 nt, Human
gcacccggccccugcugg

SEQ ID NO: 1655339 - RNA, 22 nt, Human
gcacugggcuuggggaccagag

SEQ ID NO: 1655340 - RNA, 23 nt, Human
gcacugggcuuggggaccagagc

SEQ ID NO: 1655341 - RNA, 15 nt, Human
gcacugucaagauga

SEQ ID NO: 1655342 - RNA, 12 nt, Human
gcagaaggaaga

SEQ ID NO: 1655343 - RNA, 13 nt, Human
gcagaaggaagac

SEQ ID NO: 1655344 - RNA, 14 nt, Human
gcagaaggaagacu

SEQ ID NO: 1655345 - RNA, 14 nt, Human
gcagaagacaguau

SEQ ID NO: 1655346 - RNA, 14 nt, Human
gcacccggccccug

SEQ ID NO: 1655347 - RNA, 15 nt, Human
gcacccggccccugc

SEQ ID NO: 1655348 - RNA, 17 nt, Human
gcacccggccccugcug

SEQ ID NO: 1655349 - RNA, 14 nt, Human
gcaccuccugccuc

SEQ ID NO: 1655350 - RNA, 15 nt, Human
gcaccuccugccucg

SEQ ID NO: 1655351 - RNA, 19 nt, Human
gcaccacugcacuccagcc

SEQ ID NO: 1655352 - RNA, 20 nt, Human
gcaccacugcacuccagccu

SEQ ID NO: 1655353 - RNA, 21 nt, Human
gcacagcuucauuuccugugu

SEQ ID NO: 1655354 - RNA, 16 nt, Human
gcacagcuucauuucc

SEQ ID NO: 1655355 - RNA, 19 nt, Human
gcacagcuaacauggaagu

SEQ ID NO: 1655356 - RNA, 13 nt, Human
gcaaugaccuuuc

SEQ ID NO: 1655357 - RNA, 14 nt, Human
gcaaugaccuuuca

SEQ ID NO: 1655358 - RNA, 15 nt, Human
gcaaugaccuuucaa

SEQ ID NO: 1655359 - RNA, 20 nt, Human
gcacagccucuuagaugcag

SEQ ID NO: 1655360 - RNA, 15 nt, Human
gcagccgugccuuca

SEQ ID NO: 1655361 - RNA, 17 nt, Human
gcagccgugccuucagc

SEQ ID NO: 1655362 - RNA, 14 nt, Human
gcagccgugccuuc

SEQ ID NO: 1655363 - RNA, 19 nt, Human
gcagccucaaccuccuggg

SEQ ID NO: 1655364 - RNA, 20 nt, Human
gcagccucaaccuccugggc

SEQ ID NO: 1655365 - RNA, 14 nt, Human
gcagccuggacccu

SEQ ID NO: 1655366 - RNA, 21 nt, Human
gcagccucaaccuccugggcu

SEQ ID NO: 1655367 - RNA, 22 nt, Human
gcagccucaaccuccugggcua

SEQ ID NO: 1655368 - RNA, 18 nt, Human
gcagccgugccuucagcu

SEQ ID NO: 1655369 - RNA, 20 nt, Human
gcaggaguuucguuuucaaa

SEQ ID NO: 1655370 - RNA, 21 nt, Human
gcaggaguuucguuuucaaaa

SEQ ID NO: 1655371 - RNA, 20 nt, Human
gcaggaggaucacuugaguc

SEQ ID NO: 1655372 - RNA, 18 nt, Human
gcagaaggaagacuucau

SEQ ID NO: 1655373 - RNA, 19 nt, Human
gcagagaaugaaagggccc

SEQ ID NO: 1655374 - RNA, 20 nt, Human
gcagagaaugaaagggccca

SEQ ID NO: 1655375 - RNA, 21 nt, Human
gcagagaaugaaagggcccag

SEQ ID NO: 1655376 - RNA, 22 nt, Human
gcagagaaugaaagggcccaga

SEQ ID NO: 1655377 - RNA, 23 nt, Human
gcagagaaugaaagggcccagag

SEQ ID NO: 1655378 - RNA, 21 nt, Human
gcagagaauucucuuauccaa

SEQ ID NO: 1655379 - RNA, 15 nt, Human
gcagaguugaagaca

SEQ ID NO: 1655380 - RNA, 14 nt, Human
gcagagaccauccc

SEQ ID NO: 1655381 - RNA, 15 nt, Human
gcagagaccaucccu

SEQ ID NO: 1655382 - RNA, 17 nt, Human
gcagagaccaucccuga

SEQ ID NO: 1655383 - RNA, 19 nt, Human
gcagagaccaucccugaag

SEQ ID NO: 1655384 - RNA, 12 nt, Human
gcagcaauaaag

SEQ ID NO: 1655385 - RNA, 20 nt, Human
gcagaguugaagacagagcu

SEQ ID NO: 1655386 - RNA, 19 nt, Human
gcagaguugaagacagagc

SEQ ID NO: 1655387 - RNA, 16 nt, Human
gcagaguugaagacag

SEQ ID NO: 1655388 - RNA, 17 nt, Human
gcagaguugaagacaga

SEQ ID NO: 1655389 - RNA, 16 nt, Human
gauugggaauccgccc

SEQ ID NO: 1655390 - RNA, 12 nt, Human
gauuuaaaucag

SEQ ID NO: 1655391 - RNA, 21 nt, Human
gauuucuguuuagauaauaca

SEQ ID NO: 1655392 - RNA, 22 nt, Human
gauuucuguuuagauaauacac

SEQ ID NO: 1655393 - RNA, 17 nt, Human
gauugcaacaggcuggg

SEQ ID NO: 1655394 - RNA, 18 nt, Human
gauugcaacaggcugggc

SEQ ID NO: 1655395 - RNA, 18 nt, Human
gauugcuugagcucagga

SEQ ID NO: 1655396 - RNA, 16 nt, Human
gauucccaagcucugc

SEQ ID NO: 1655397 - RNA, 17 nt, Human
gauucccaagcucugcu

SEQ ID NO: 1655398 - RNA, 19 nt, Human
gauucuuuccugaggcugg

SEQ ID NO: 1655399 - RNA, 18 nt, Human
gauucccaagcucugcuc

SEQ ID NO: 1655400 - RNA, 20 nt, Human
gauucuuuccugaggcuggg

SEQ ID NO: 1655401 - RNA, 22 nt, Human
gauucuuuccugaggcugggcu

SEQ ID NO: 1655402 - RNA, 16 nt, Human
gauugcaacaggcugg

SEQ ID NO: 1655403 - RNA, 15 nt, Human
gauucccaagcucug

SEQ ID NO: 1655404 - RNA, 13 nt, Human
gauuacaagcgug

SEQ ID NO: 1655405 - RNA, 21 nt, Human
gauuacaagcgugagccacug

SEQ ID NO: 1655406 - RNA, 13 nt, Human
gauucagacagcu

SEQ ID NO: 1655407 - RNA, 14 nt, Human
gauucagacagcug

SEQ ID NO: 1655408 - RNA, 17 nt, Human
gauucagacagcugccu

SEQ ID NO: 1655409 - RNA, 18 nt, Human
gauucagacagcugccug

SEQ ID NO: 1655410 - RNA, 14 nt, Human
gauguucugggaca

SEQ ID NO: 1655411 - RNA, 22 nt, Human
gauuaaguaaugauaacuggaa

SEQ ID NO: 1655412 - RNA, 21 nt, Human
gauguuuuaaggaugcuugua

SEQ ID NO: 1655413 - RNA, 14 nt, Human
gauuaaguaaugau

SEQ ID NO: 1655414 - RNA, 22 nt, Human
gaugcgggccagugcuccagcc

SEQ ID NO: 1655415 - RNA, 18 nt, Human
gauguucuagcauggcug

SEQ ID NO: 1655416 - RNA, 20 nt, Human
gaugccugugaacugaacuc

SEQ ID NO: 1655417 - RNA, 17 nt, Human
gaugccugguggcagcu

SEQ ID NO: 1655418 - RNA, 20 nt, Human
gaugcgggccagugcuccag

SEQ ID NO: 1655419 - RNA, 16 nt, Human
gaugcuagaacucccu

SEQ ID NO: 1655420 - RNA, 18 nt, Human
gcaaacuuuauuuugugu

SEQ ID NO: 1655421 - RNA, 16 nt, Human
gcaaaccaucauugaa

SEQ ID NO: 1655422 - RNA, 17 nt, Human
gcaaaccaucauugaaa

SEQ ID NO: 1655423 - RNA, 19 nt, Human
gcaaaccaucauugaaauc

SEQ ID NO: 1655424 - RNA, 20 nt, Human
gcaaaccaucauugaaaucu

SEQ ID NO: 1655425 - RNA, 21 nt, Human
gcaaaccaucauugaaaucuu

SEQ ID NO: 1655426 - RNA, 23 nt, Human
gcaaaguucccuacuuccuguga

SEQ ID NO: 1655427 - RNA, 20 nt, Human
gcaaacuuuauuuuguguuu

SEQ ID NO: 1655428 - RNA, 12 nt, Human
gcaaaugugaau

SEQ ID NO: 1655429 - RNA, 23 nt, Human
gcaaaugugaaucauuuuaccuu

SEQ ID NO: 1655430 - RNA, 13 nt, Human
gcaaaugacuuug

SEQ ID NO: 1655431 - RNA, 12 nt, Human
gcaaaugacuuu

SEQ ID NO: 1655432 - RNA, 18 nt, Human
gcaacugcauuggcuuug

SEQ ID NO: 1655433 - RNA, 17 nt, Human
gcaauccugcaagaaca

SEQ ID NO: 1655434 - RNA, 17 nt, Human
gcaaugaagucucugaa

SEQ ID NO: 1655435 - RNA, 19 nt, Human
gcaaugaagucucugaagu

SEQ ID NO: 1655436 - RNA, 21 nt, Human
gcaagggaauuucuucaacuc

SEQ ID NO: 1655437 - RNA, 14 nt, Human
gcaaggcugucaau

SEQ ID NO: 1655438 - RNA, 18 nt, Human
gcaaggcugucaauuaca

SEQ ID NO: 1655439 - RNA, 18 nt, Human
gcaagcaagaaacacugg

SEQ ID NO: 1655440 - RNA, 15 nt, Human
gcaagcaccuccugc

SEQ ID NO: 1655441 - RNA, 16 nt, Human
gcaagcaccuccugcc

SEQ ID NO: 1655442 - RNA, 18 nt, Human
gcaagcaccuccugccuc

SEQ ID NO: 1655443 - RNA, 20 nt, Human
gcaagcaccuccugccucga

SEQ ID NO: 1655444 - RNA, 22 nt, Human
gcaacuuuguauaaaagggacu

SEQ ID NO: 1655445 - RNA, 12 nt, Human
gcaagauguggg

SEQ ID NO: 1655446 - RNA, 16 nt, Human
gcaagaugugggcagu

SEQ ID NO: 1655447 - RNA, 23 nt, Human
gauccuaaugaaugcauaaaaug

SEQ ID NO: 1655448 - RNA, 18 nt, Human
gauccuaggcauuugcug

SEQ ID NO: 1655449 - RNA, 14 nt, Human
gauccuccaggugc

SEQ ID NO: 1655450 - RNA, 16 nt, Human
gauccucccaccucag

SEQ ID NO: 1655451 - RNA, 17 nt, Human
gauccucccaccucagc

SEQ ID NO: 1655452 - RNA, 18 nt, Human
gauccucccaccucagcc

SEQ ID NO: 1655453 - RNA, 13 nt, Human
gaucauccacugu

SEQ ID NO: 1655454 - RNA, 16 nt, Human
gaucauccacugugcc

SEQ ID NO: 1655455 - RNA, 13 nt, Human
gaucuaggaagac

SEQ ID NO: 1655456 - RNA, 14 nt, Human
gaucuaggaagacu

SEQ ID NO: 1655457 - RNA, 18 nt, Human
gaucuaggaagacuuugg

SEQ ID NO: 1655458 - RNA, 17 nt, Human
gaucuaguucacucucc

SEQ ID NO: 1655459 - RNA, 20 nt, Human
gaucuaggaagacuuuggaa

SEQ ID NO: 1655460 - RNA, 16 nt, Human
gauccucccaggcuuc

SEQ ID NO: 1655461 - RNA, 13 nt, Human
gauccugagccag

SEQ ID NO: 1655462 - RNA, 12 nt, Human
gauccugagcca

SEQ ID NO: 1655463 - RNA, 14 nt, Human
gauccuggaaauca

SEQ ID NO: 1655464 - RNA, 16 nt, Human
gaugagaggaaaucac

SEQ ID NO: 1655465 - RNA, 14 nt, Human
gaugcagugcuucc

SEQ ID NO: 1655466 - RNA, 15 nt, Human
gaugccugguggcag

SEQ ID NO: 1655467 - RNA, 16 nt, Human
gaugccugguggcagc

SEQ ID NO: 1655468 - RNA, 18 nt, Human
gaugaccuugaaugaugc

SEQ ID NO: 1655469 - RNA, 20 nt, Human
gaugaccuugaaugaugcca

SEQ ID NO: 1655470 - RNA, 14 nt, Human
gaugagaggaaauc

SEQ ID NO: 1655471 - RNA, 15 nt, Human
gaugcaccagcccuu

SEQ ID NO: 1655472 - RNA, 23 nt, Human
gaugcaccagcccuuagcaggga

SEQ ID NO: 1655473 - RNA, 22 nt, Human
gaucuucuguggguuucuaaag

SEQ ID NO: 1655474 - RNA, 19 nt, Human
gaucuucuuuauaauucua

SEQ ID NO: 1655475 - RNA, 15 nt, Human
gaugaaaugagguca

SEQ ID NO: 1655476 - RNA, 21 nt, Human
gaugaaaugaggucagagccu

SEQ ID NO: 1655477 - RNA, 16 nt, Human
gaugaaauguaaauac

SEQ ID NO: 1655478 - RNA, 13 nt, Human
gaucuuuaaaaua

SEQ ID NO: 1655479 - RNA, 16 nt, Human
gaucacauguggacuu

SEQ ID NO: 1655480 - RNA, 23 nt, Human
gaucacggcucacugcagccuca

SEQ ID NO: 1655481 - RNA, 23 nt, Human
gaucagcuuauugucuagugaaa

SEQ ID NO: 1655482 - RNA, 18 nt, Human
gauauaugcucugcaugu

SEQ ID NO: 1655483 - RNA, 20 nt, Human
gauagugucccacggugccu

SEQ ID NO: 1655484 - RNA, 18 nt, Human
gauaauucuagcuuugag

SEQ ID NO: 1655485 - RNA, 17 nt, Human
gauaauuauugguaauu

SEQ ID NO: 1655486 - RNA, 21 nt, Human
gauaaucaacugggcugaaca

SEQ ID NO: 1655487 - RNA, 17 nt, Human
gauaaucaacugggcug

SEQ ID NO: 1655488 - RNA, 16 nt, Human
gauacaaaagcaugug

SEQ ID NO: 1655489 - RNA, 17 nt, Human
gauacaaaagcauguga

SEQ ID NO: 1655490 - RNA, 17 nt, Human
gauaggucagugcaaau

SEQ ID NO: 1655491 - RNA, 20 nt, Human
gauaauaaggaaaaguuuaa

SEQ ID NO: 1655492 - RNA, 21 nt, Human
gauaauaaggaaaaguuuaau

SEQ ID NO: 1655493 - RNA, 24 nt, Human
gauaauacaccacuacauucuguu

SEQ ID NO: 1655494 - RNA, 23 nt, Human
gauaauacaccacuacauucugu

SEQ ID NO: 1655495 - RNA, 12 nt, Human
gauaauacacca

SEQ ID NO: 1655496 - RNA, 22 nt, Human
gauaauaaggaaaaguuuaaua

SEQ ID NO: 1655497 - RNA, 13 nt, Human
gaguucugguucc

SEQ ID NO: 1655498 - RNA, 13 nt, Human
gauaaacaguagu

SEQ ID NO: 1655499 - RNA, 12 nt, Human
gaguguugaaac

SEQ ID NO: 1655500 - RNA, 15 nt, Human
gacuucauuaauaau

SEQ ID NO: 1655501 - RNA, 13 nt, Human
gaaugcuuuagga

SEQ ID NO: 1655502 - RNA, 14 nt, Human
gaaugcauaaaaug

SEQ ID NO: 1655503 - RNA, 17 nt, Human
gaaugaagauacugaaa

SEQ ID NO: 1655504 - RNA, 18 nt, Human
gaaugaagauacugaaau

SEQ ID NO: 1655505 - RNA, 21 nt, Human
gaaugaagauacugaaauaaa

SEQ ID NO: 1655506 - RNA, 19 nt, Human
gaaugaagauacugaaaua

SEQ ID NO: 1655507 - RNA, 22 nt, Human
gaaugaaccacaucuugcucug

SEQ ID NO: 1655508 - RNA, 23 nt, Human
gaaugaaccacaucuugcucugc

SEQ ID NO: 1655509 - RNA, 20 nt, Human
gaaugguccgugcuaaggac

SEQ ID NO: 1655510 - RNA, 22 nt, Human
gaaugguccgugcuaaggacuu

SEQ ID NO: 1655511 - RNA, 23 nt, Human
gaaugguccgugcuaaggacuug

SEQ ID NO: 1655512 - RNA, 22 nt, Human
gaaugguuuucaaaauaaaaau

SEQ ID NO: 1655513 - RNA, 14 nt, Human
gaaugucaguguga

SEQ ID NO: 1655514 - RNA, 15 nt, Human
gaauuguguuuauaa

SEQ ID NO: 1655515 - RNA, 23 nt, Human
gaauuguguuuauaauuuuaaau

SEQ ID NO: 1655516 - RNA, 22 nt, Human
gaauuuaaauagcuuuuuucuc

SEQ ID NO: 1655517 - RNA, 22 nt, Human
gaauuguaaggaaugauuaauu

SEQ ID NO: 1655518 - RNA, 14 nt, Human
gaauuuauuggcuu

SEQ ID NO: 1655519 - RNA, 16 nt, Human
gaauuuauuggcuuuu

SEQ ID NO: 1655520 - RNA, 20 nt, Human
gaauuuauuggcuuuucuga

SEQ ID NO: 1655521 - RNA, 21 nt, Human
gaauuuauuggcuuuucugau

SEQ ID NO: 1655522 - RNA, 22 nt, Human
gaauuuauuggcuuuucugauc

SEQ ID NO: 1655523 - RNA, 15 nt, Human
gaauuucccaaagca

SEQ ID NO: 1655524 - RNA, 20 nt, Human
gaaugucagugugacugauc

SEQ ID NO: 1655525 - RNA, 21 nt, Human
gaaugucagugugacugaucu

SEQ ID NO: 1655526 - RNA, 17 nt, Human
gaauucucuaguuugau

SEQ ID NO: 1655527 - RNA, 17 nt, Human
gaauucucagaaucuca

SEQ ID NO: 1655528 - RNA, 14 nt, Human
gaauugaaaaacca

SEQ ID NO: 1655529 - RNA, 14 nt, Human
gaauugaagcagga

SEQ ID NO: 1655530 - RNA, 19 nt, Human
gaauucucuaguuugauua

SEQ ID NO: 1655531 - RNA, 11 nt, Human
gaauucuguau

SEQ ID NO: 1655532 - RNA, 15 nt, Human
gaaguacuggagaaa

SEQ ID NO: 1655533 - RNA, 18 nt, Human
gaaguacuauaauuuacc

SEQ ID NO: 1655534 - RNA, 22 nt, Human
gaaguaauaugcacacauuuuu

SEQ ID NO: 1655535 - RNA, 16 nt, Human
gaagggggcugggaca

SEQ ID NO: 1655536 - RNA, 19 nt, Human
gaagggggcugggacaugg

SEQ ID NO: 1655537 - RNA, 18 nt, Human
gaagucuuagauguauau

SEQ ID NO: 1655538 - RNA, 21 nt, Human
gaaguuucugccgcagcccug

SEQ ID NO: 1655539 - RNA, 15 nt, Human
gaagucuuagaugua

SEQ ID NO: 1655540 - RNA, 20 nt, Human
gaaguuucugccgcagcccu

SEQ ID NO: 1655541 - RNA, 12 nt, Human
gaaguccaagca

SEQ ID NO: 1655542 - RNA, 22 nt, Human
gaaguccaagcauuuagaugua

SEQ ID NO: 1655543 - RNA, 16 nt, Human
gaagucucugaaguga

SEQ ID NO: 1655544 - RNA, 21 nt, Human
gaagucucugaagugaaacug

SEQ ID NO: 1655545 - RNA, 16 nt, Human
gaaguauccuucagcc

SEQ ID NO: 1655546 - RNA, 14 nt, Human
gaaguauccuucag

SEQ ID NO: 1655547 - RNA, 20 nt, Human
gaaguuugagaucagccugg

SEQ ID NO: 1655548 - RNA, 18 nt, Human
gaauaacauguaauuaag

SEQ ID NO: 1655549 - RNA, 19 nt, Human
gaauaacauguaauuaagu

SEQ ID NO: 1655550 - RNA, 17 nt, Human
gaauaauacaguaucuc

SEQ ID NO: 1655551 - RNA, 21 nt, Human
gaauacagaggcaacugcauu

SEQ ID NO: 1655552 - RNA, 20 nt, Human
gaauacucuuauaucuauau

SEQ ID NO: 1655553 - RNA, 22 nt, Human
gaauagcugggacuacaggugu

SEQ ID NO: 1655554 - RNA, 23 nt, Human
gaauagcugggacuacaggugug

SEQ ID NO: 1655555 - RNA, 15 nt, Human
gaauaccuguccccc

SEQ ID NO: 1655556 - RNA, 13 nt, Human
gaauaccuguccc

SEQ ID NO: 1655557 - RNA, 16 nt, Human
gaauauuuuaacuucc

SEQ ID NO: 1655558 - RNA, 15 nt, Human
gaacauaaaauacaa

SEQ ID NO: 1655559 - RNA, 15 nt, Human
gaacacucugagacu

SEQ ID NO: 1655560 - RNA, 16 nt, Human
gaacagugauuaccag

SEQ ID NO: 1655561 - RNA, 20 nt, Human
gaacagugauuaccagggac

SEQ ID NO: 1655562 - RNA, 23 nt, Human
gaaaauaaaucaaugcuauaacu

SEQ ID NO: 1655563 - RNA, 16 nt, Human
gaaauuguauuacaaa

SEQ ID NO: 1655564 - RNA, 13 nt, Human
gaacacucugaga

SEQ ID NO: 1655565 - RNA, 14 nt, Human
gaacacucugagac

SEQ ID NO: 1655566 - RNA, 16 nt, Human
gaaauuuauaaacuuu

SEQ ID NO: 1655567 - RNA, 17 nt, Human
gaaauuuauaaacuuuu

SEQ ID NO: 1655568 - RNA, 18 nt, Human
gaaauuguauuacaaauc

SEQ ID NO: 1655569 - RNA, 14 nt, Human
gaacaucccuccug

SEQ ID NO: 1655570 - RNA, 18 nt, Human
gaaccuuuugagugccuu

SEQ ID NO: 1655571 - RNA, 19 nt, Human
gaaccuuuugagugccuua

SEQ ID NO: 1655572 - RNA, 21 nt, Human
gaaccuuuugagugccuuaca

SEQ ID NO: 1655573 - RNA, 15 nt, Human
gaacgcguugaaauu

SEQ ID NO: 1655574 - RNA, 12 nt, Human
gaacuaaacuuu

SEQ ID NO: 1655575 - RNA, 14 nt, Human
gaacuaaacuuuca

SEQ ID NO: 1655576 - RNA, 16 nt, Human
gaacuaaacuuucaca

SEQ ID NO: 1655577 - RNA, 18 nt, Human
gaacuaaacuuucacacc

SEQ ID NO: 1655578 - RNA, 22 nt, Human
gaaccuuuugagugccuuacac

SEQ ID NO: 1655579 - RNA, 14 nt, Human
gaacuacugaggau

SEQ ID NO: 1655580 - RNA, 17 nt, Human
gaacuaaacuuucacac

SEQ ID NO: 1655581 - RNA, 19 nt, Human
gaagagaaugcacaaacag

SEQ ID NO: 1655582 - RNA, 20 nt, Human
gaagacuuuucuuucagcca

SEQ ID NO: 1655583 - RNA, 14 nt, Human
gaagacuuuggaaa

SEQ ID NO: 1655584 - RNA, 17 nt, Human
gaagacuuuggaaagag

SEQ ID NO: 1655585 - RNA, 22 nt, Human
gaacucaucuagguaaauuaca

SEQ ID NO: 1655586 - RNA, 20 nt, Human
gaacucaucuagguaaauua

SEQ ID NO: 1655587 - RNA, 21 nt, Human
gaacucaucuagguaaauuac

SEQ ID NO: 1655588 - RNA, 23 nt, Human
gaacuuugaccucugcagcaaua

SEQ ID NO: 1655589 - RNA, 11 nt, Human
gaagacuuugg

SEQ ID NO: 1655590 - RNA, 13 nt, Human
gaagacuuuggaa

SEQ ID NO: 1655591 - RNA, 12 nt, Human
gaagaacugaaa

SEQ ID NO: 1655592 - RNA, 19 nt, Human
gaagacugcauuauauuua

SEQ ID NO: 1655593 - RNA, 20 nt, Human
gaagccagcaggcucucagg

SEQ ID NO: 1655594 - RNA, 21 nt, Human
gaagccagcaggcucucaggc

SEQ ID NO: 1655595 - RNA, 22 nt, Human
gaagccagcaggcucucaggcc

SEQ ID NO: 1655596 - RNA, 13 nt, Human
gaagcccaggaaa

SEQ ID NO: 1655597 - RNA, 15 nt, Human
gaagcccaggaaagg

SEQ ID NO: 1655598 - RNA, 16 nt, Human
gaagcccaggaaaggc

SEQ ID NO: 1655599 - RNA, 19 nt, Human
gaagcccaggaaaggcucc

SEQ ID NO: 1655600 - RNA, 23 nt, Human
gaagcccuucuaccuuccugcaa

SEQ ID NO: 1655601 - RNA, 17 nt, Human
gaagcauuuacuuugug

SEQ ID NO: 1655602 - RNA, 18 nt, Human
gaagcauuuacuuugugu

SEQ ID NO: 1655603 - RNA, 20 nt, Human
gaagagguuuuaaagcuucc

SEQ ID NO: 1655604 - RNA, 20 nt, Human
gaagauaauauuaaggaaga

SEQ ID NO: 1655605 - RNA, 15 nt, Human
gaagauacugaaaua

SEQ ID NO: 1655606 - RNA, 18 nt, Human
gaagauguagaggagaaa

SEQ ID NO: 1655607 - RNA, 16 nt, Human
gacuaacuugucuuug

SEQ ID NO: 1655608 - RNA, 23 nt, Human
gacuaacuugucuuuggacccug

SEQ ID NO: 1655609 - RNA, 11 nt, Human
gacguguuaug

SEQ ID NO: 1655610 - RNA, 14 nt, Human
gacguguuaugacu

SEQ ID NO: 1655611 - RNA, 15 nt, Human
gacguguuaugacuc

SEQ ID NO: 1655612 - RNA, 11 nt, Human
gaccuuucaau

SEQ ID NO: 1655613 - RNA, 19 nt, Human
gaccuuucaauaggaaaaa

SEQ ID NO: 1655614 - RNA, 20 nt, Human
gaccuuucaauaggaaaaac

SEQ ID NO: 1655615 - RNA, 22 nt, Human
gacgcugugcugcccugcccac

SEQ ID NO: 1655616 - RNA, 13 nt, Human
gacggagucccac

SEQ ID NO: 1655617 - RNA, 14 nt, Human
gacggagucccacc

SEQ ID NO: 1655618 - RNA, 19 nt, Human
gacccuugccgucuaccug

SEQ ID NO: 1655619 - RNA, 20 nt, Human
gacccuugccgucuaccuga

SEQ ID NO: 1655620 - RNA, 23 nt, Human
gacccuugccgucuaccugaggg

SEQ ID NO: 1655621 - RNA, 15 nt, Human
gacccuugugguccc

SEQ ID NO: 1655622 - RNA, 14 nt, Human
gaccuucuccuuca

SEQ ID NO: 1655623 - RNA, 15 nt, Human
gaccuucuccuucac

SEQ ID NO: 1655624 - RNA, 16 nt, Human
gaccuucuccuucacc

SEQ ID NO: 1655625 - RNA, 20 nt, Human
gaccuucuccuucaccuuug

SEQ ID NO: 1655626 - RNA, 21 nt, Human
gaccuucuccuucaccuuugu

SEQ ID NO: 1655627 - RNA, 14 nt, Human
gaccuugaacuggg

SEQ ID NO: 1655628 - RNA, 15 nt, Human
gacuuagcugggaga

SEQ ID NO: 1655629 - RNA, 14 nt, Human
gacuucagcucugu

SEQ ID NO: 1655630 - RNA, 12 nt, Human
gacuucaucccu

SEQ ID NO: 1655631 - RNA, 20 nt, Human
gacuucaucccucuggggcu

SEQ ID NO: 1655632 - RNA, 23 nt, Human
gacuuacuguacaugaaaacaca

SEQ ID NO: 1655633 - RNA, 18 nt, Human
gacuuacuguacaugaaa

SEQ ID NO: 1655634 - RNA, 12 nt, Human
gacuuacuguac

SEQ ID NO: 1655635 - RNA, 16 nt, Human
gacuuacuguacauga

SEQ ID NO: 1655636 - RNA, 15 nt, Human
gacuuacuguacaug

SEQ ID NO: 1655637 - RNA, 23 nt, Human
gacuggccaagguuuggggaaga

SEQ ID NO: 1655638 - RNA, 14 nt, Human
gacuggcacaguuu

SEQ ID NO: 1655639 - RNA, 18 nt, Human
gacuggcacaguuuucug

SEQ ID NO: 1655640 - RNA, 22 nt, Human
gacuggcacaguuuucugagaa

SEQ ID NO: 1655641 - RNA, 11 nt, Human
gacugagaaau

SEQ ID NO: 1655642 - RNA, 21 nt, Human
gacucuacagaggccaugggc

SEQ ID NO: 1655643 - RNA, 15 nt, Human
gacucuacagaggcc

SEQ ID NO: 1655644 - RNA, 18 nt, Human
gacuacaggcacccacca

SEQ ID NO: 1655645 - RNA, 13 nt, Human
gacuacaggcacc

SEQ ID NO: 1655646 - RNA, 15 nt, Human
gacuacaggcaccca

SEQ ID NO: 1655647 - RNA, 18 nt, Human
gacuccugcaggcagcca

SEQ ID NO: 1655648 - RNA, 19 nt, Human
gacuccugcaggcagccag

SEQ ID NO: 1655649 - RNA, 20 nt, Human
gacuccugcaggcagccagg

SEQ ID NO: 1655650 - RNA, 21 nt, Human
gacuccugcaggcagccaggc

SEQ ID NO: 1655651 - RNA, 13 nt, Human
gacugauucuuca

SEQ ID NO: 1655652 - RNA, 16 nt, Human
gacugauucuucagca

SEQ ID NO: 1655653 - RNA, 24 nt, Human
gacugcauuauauuuauuacugua

SEQ ID NO: 1655654 - RNA, 20 nt, Human
gacugccagucccccugccc

SEQ ID NO: 1655655 - RNA, 13 nt, Human
gacugagaaauuu

SEQ ID NO: 1655656 - RNA, 18 nt, Human
gacugaguacguugugca

SEQ ID NO: 1655657 - RNA, 16 nt, Human
gacugaggggagggga

SEQ ID NO: 1655658 - RNA, 11 nt, Human
gacccugaggc

SEQ ID NO: 1655659 - RNA, 12 nt, Human
gacccugaggcc

SEQ ID NO: 1655660 - RNA, 16 nt, Human
gacccugaggcccaga

SEQ ID NO: 1655661 - RNA, 18 nt, Human
gacccugaggcccagagg

SEQ ID NO: 1655662 - RNA, 20 nt, Human
gacccugcccugugggcccc

SEQ ID NO: 1655663 - RNA, 22 nt, Human
gacccugcccugugggccccca

SEQ ID NO: 1655664 - RNA, 13 nt, Human
gacccaugcugcc

SEQ ID NO: 1655665 - RNA, 18 nt, Human
gacccaugcugcccugug

SEQ ID NO: 1655666 - RNA, 19 nt, Human
gacccaugcugcccuguga

SEQ ID NO: 1655667 - RNA, 20 nt, Human
gacccaugcugcccugugag

SEQ ID NO: 1655668 - RNA, 19 nt, Human
gacccacuggacucaccuc

SEQ ID NO: 1655669 - RNA, 20 nt, Human
gacccaaaaggcagaagcaa

SEQ ID NO: 1655670 - RNA, 18 nt, Human
gacccaaaaggcagaagc

SEQ ID NO: 1655671 - RNA, 19 nt, Human
gacccaaaaggcagaagca

SEQ ID NO: 1655672 - RNA, 14 nt, Human
gaccacacuccagc

SEQ ID NO: 1655673 - RNA, 16 nt, Human
gaccacacuccagcug

SEQ ID NO: 1655674 - RNA, 22 nt, Human
gaccacacuccagcugggauca

SEQ ID NO: 1655675 - RNA, 18 nt, Human
gaccacaaaacuuuucua

SEQ ID NO: 1655676 - RNA, 21 nt, Human
gaccagagcugccaccugccu

SEQ ID NO: 1655677 - RNA, 23 nt, Human
gaccagacaccuugacagggcac

SEQ ID NO: 1655678 - RNA, 24 nt, Human
gaccagacaccuugacagggcaca

SEQ ID NO: 1655679 - RNA, 20 nt, Human
gaccagcaccaucucuccuc

SEQ ID NO: 1655680 - RNA, 21 nt, Human
gaccagcaccaucucuccucc

SEQ ID NO: 1655681 - RNA, 22 nt, Human
gaccagacaccuugacagggca

SEQ ID NO: 1655682 - RNA, 16 nt, Human
gaccacugcagaagac

SEQ ID NO: 1655683 - RNA, 18 nt, Human
gaccacugcagaagacag

SEQ ID NO: 1655684 - RNA, 16 nt, Human
gacacuagaagauuuu

SEQ ID NO: 1655685 - RNA, 17 nt, Human
gacagacacaggcccgg

SEQ ID NO: 1655686 - RNA, 20 nt, Human
gacagacacaggcccggcuc

SEQ ID NO: 1655687 - RNA, 22 nt, Human
gacagacacaggcccggcucca

SEQ ID NO: 1655688 - RNA, 22 nt, Human
gacacgaauauugcugauggug

SEQ ID NO: 1655689 - RNA, 22 nt, Human
gaauuucccaaagcagugcaug

SEQ ID NO: 1655690 - RNA, 16 nt, Human
gaauuucccaaagcag

SEQ ID NO: 1655691 - RNA, 18 nt, Human
gaauuucccaaagcagug

SEQ ID NO: 1655692 - RNA, 16 nt, Human
gacagacagcccucca

SEQ ID NO: 1655693 - RNA, 12 nt, Human
gacagaggcagc

SEQ ID NO: 1655694 - RNA, 20 nt, Human
gacagagcuacacaggggaa

SEQ ID NO: 1655695 - RNA, 23 nt, Human
gacagaggcagccccauucugcc

SEQ ID NO: 1655696 - RNA, 13 nt, Human
gacagagggggug

SEQ ID NO: 1655697 - RNA, 19 nt, Human
gacagagugagacucuguc

SEQ ID NO: 1655698 - RNA, 21 nt, Human
gacagagucucacuguugccc

SEQ ID NO: 1655699 - RNA, 16 nt, Human
gacagagugagacucu

SEQ ID NO: 1655700 - RNA, 24 nt, Human
gacaggcaaugcuggcuguuggcu

SEQ ID NO: 1655701 - RNA, 23 nt, Human
gacaggcaaugcuggcuguuggc

SEQ ID NO: 1655702 - RNA, 21 nt, Human
gacaggcauguucucugagga

SEQ ID NO: 1655703 - RNA, 20 nt, Human
gacaggcaagcaccuccugc

SEQ ID NO: 1655704 - RNA, 21 nt, Human
gacaggcaagcaccuccugcc

SEQ ID NO: 1655705 - RNA, 19 nt, Human
gacaggcaaugcuggcugu

SEQ ID NO: 1655706 - RNA, 13 nt, Human
gacaggcaagcac

SEQ ID NO: 1655707 - RNA, 17 nt, Human
gacaggcaagcaccucc

SEQ ID NO: 1655708 - RNA, 18 nt, Human
gacaggcaagcaccuccu

SEQ ID NO: 1655709 - RNA, 23 nt, Human
gacaggaugguucccuugaugaa

SEQ ID NO: 1655710 - RNA, 15 nt, Human
gacagggcauggcca

SEQ ID NO: 1655711 - RNA, 20 nt, Human
gacagggcauggccaggugg

SEQ ID NO: 1655712 - RNA, 22 nt, Human
gacagggcauggccagguggcc

SEQ ID NO: 1655713 - RNA, 14 nt, Human
gacagggcauggcc

SEQ ID NO: 1655714 - RNA, 22 nt, Human
gacaggcauguucucugaggac

SEQ ID NO: 1655715 - RNA, 23 nt, Human
gacaucaacugcaucaagaugug

SEQ ID NO: 1655716 - RNA, 16 nt, Human
gacaucaacugcauca

SEQ ID NO: 1655717 - RNA, 21 nt, Human
cuugaguugauucagcucugc

SEQ ID NO: 1655718 - RNA, 20 nt, Human
cuugaguugauucagcucug

SEQ ID NO: 1655719 - RNA, 18 nt, Human
cuugaguugauucagcuc

SEQ ID NO: 1655720 - RNA, 19 nt, Human
cuugaguugauucagcucu

SEQ ID NO: 1655721 - RNA, 15 nt, Human
cuugcaauggcagcc

SEQ ID NO: 1655722 - RNA, 16 nt, Human
cuugcaauggcagccu

SEQ ID NO: 1655723 - RNA, 17 nt, Human
cuugcaauggcagccuu

SEQ ID NO: 1655724 - RNA, 18 nt, Human
cuugcaauggcagccuug

SEQ ID NO: 1655725 - RNA, 21 nt, Human
cuugcagacucuacagaggcc

SEQ ID NO: 1655726 - RNA, 17 nt, Human
cuucuggcacuuggaga

SEQ ID NO: 1655727 - RNA, 16 nt, Human
cuugagccugggaggu

SEQ ID NO: 1655728 - RNA, 15 nt, Human
cuugaggguugggcu

SEQ ID NO: 1655729 - RNA, 17 nt, Human
cuugaggguugggcugg

SEQ ID NO: 1655730 - RNA, 12 nt, Human
cuugagccuggg

SEQ ID NO: 1655731 - RNA, 15 nt, Human
cuugagccugggagg

SEQ ID NO: 1655732 - RNA, 20 nt, Human
cuuggaagcuccgcuuucua

SEQ ID NO: 1655733 - RNA, 20 nt, Human
cuugcuugauuguauggugg

SEQ ID NO: 1655734 - RNA, 17 nt, Human
cuugcucuugaugccug

SEQ ID NO: 1655735 - RNA, 18 nt, Human
cuugcucuugaugccugg

SEQ ID NO: 1655736 - RNA, 19 nt, Human
cuugcucuugaugccuggc

SEQ ID NO: 1655737 - RNA, 22 nt, Human
cuugcucugcugacagacacag

SEQ ID NO: 1655738 - RNA, 22 nt, Human
cuugcccuguuaaaagaugaaa

SEQ ID NO: 1655739 - RNA, 17 nt, Human
cuugcaugaggcuagug

SEQ ID NO: 1655740 - RNA, 13 nt, Human
cuugcaugaggcu

SEQ ID NO: 1655741 - RNA, 14 nt, Human
cuugcaugaggcua

SEQ ID NO: 1655742 - RNA, 13 nt, Human
cuugccacugccu

SEQ ID NO: 1655743 - RNA, 14 nt, Human
cuugccaucccucc

SEQ ID NO: 1655744 - RNA, 17 nt, Human
cuugccaucccucccuc

SEQ ID NO: 1655745 - RNA, 19 nt, Human
cuugccaucccucccucca

SEQ ID NO: 1655746 - RNA, 16 nt, Human
cuugccaucccucccu

SEQ ID NO: 1655747 - RNA, 15 nt, Human
cuugccaucccuccc

SEQ ID NO: 1655748 - RNA, 14 nt, Human
cuugcccuguuaaa

SEQ ID NO: 1655749 - RNA, 18 nt, Human
cuugcccuggugccucac

SEQ ID NO: 1655750 - RNA, 22 nt, Human
cuuuaaaaaauuaaucugggcc

SEQ ID NO: 1655751 - RNA, 21 nt, Human
cuuuaaaaagcuccaaaugca

SEQ ID NO: 1655752 - RNA, 17 nt, Human
cuuuaccuuuuuuauac

SEQ ID NO: 1655753 - RNA, 20 nt, Human
cuuuaccuuuuuuauacaua

SEQ ID NO: 1655754 - RNA, 19 nt, Human
cuuuaccuuuuuuauacau

SEQ ID NO: 1655755 - RNA, 13 nt, Human
cuuguuagaucua

SEQ ID NO: 1655756 - RNA, 16 nt, Human
cuuguuagaucuaguu

SEQ ID NO: 1655757 - RNA, 16 nt, Human
cuuguuaagauaguua

SEQ ID NO: 1655758 - RNA, 16 nt, Human
cuuguggucccacccc

SEQ ID NO: 1655759 - RNA, 19 nt, Human
cuuguggucccaccccaca

SEQ ID NO: 1655760 - RNA, 15 nt, Human
cuuguggucccaccc

SEQ ID NO: 1655761 - RNA, 15 nt, Human
cuugguuuguaaauu

SEQ ID NO: 1655762 - RNA, 14 nt, Human
cuugguuuguaaau

SEQ ID NO: 1655763 - RNA, 20 nt, Human
cuugguuuguaaauuaacuu

SEQ ID NO: 1655764 - RNA, 16 nt, Human
cuuggggcugaugcag

SEQ ID NO: 1655765 - RNA, 18 nt, Human
cuuggggcugaugcaguu

SEQ ID NO: 1655766 - RNA, 20 nt, Human
cuugggccacugugaagaga

SEQ ID NO: 1655767 - RNA, 22 nt, Human
cuuggagccaauggagacuguc

SEQ ID NO: 1655768 - RNA, 16 nt, Human
cuuggacucauuuuaa

SEQ ID NO: 1655769 - RNA, 16 nt, Human
cuuucuuccucugcug

SEQ ID NO: 1655770 - RNA, 19 nt, Human
cuuucuuuuuuuuuuuuga

SEQ ID NO: 1655771 - RNA, 17 nt, Human
cuuugacaaagguaaau

SEQ ID NO: 1655772 - RNA, 13 nt, Human
cuuucugaaauaa

SEQ ID NO: 1655773 - RNA, 16 nt, Human
cuuuccucuuuggucu

SEQ ID NO: 1655774 - RNA, 19 nt, Human
cuuuccucaaaacuucaga

SEQ ID NO: 1655775 - RNA, 17 nt, Human
cuuugggccuggcuccc

SEQ ID NO: 1655776 - RNA, 23 nt, Human
cuuugugaggaagccgcuggggc

SEQ ID NO: 1655777 - RNA, 23 nt, Human
cuuugggaggccaaggugggagg

SEQ ID NO: 1655778 - RNA, 16 nt, Human
cuuuguucuggcucuu

SEQ ID NO: 1655779 - RNA, 21 nt, Human
cuuuguucuggcucuuccagg

SEQ ID NO: 1655780 - RNA, 13 nt, Human
cuuuguggcuucc

SEQ ID NO: 1655781 - RNA, 12 nt, Human
cuuugugauuuu

SEQ ID NO: 1655782 - RNA, 19 nt, Human
cuuugacaaagguaaauca

SEQ ID NO: 1655783 - RNA, 13 nt, Human
cuuugaccucugc

SEQ ID NO: 1655784 - RNA, 14 nt, Human
cuuugcuugaaaga

SEQ ID NO: 1655785 - RNA, 16 nt, Human
cuuuggauaauaagga

SEQ ID NO: 1655786 - RNA, 14 nt, Human
cuuuggauaauaag

SEQ ID NO: 1655787 - RNA, 23 nt, Human
cuuuggaaagacuuuuccaaccc

SEQ ID NO: 1655788 - RNA, 12 nt, Human
cuuuggaaagac

SEQ ID NO: 1655789 - RNA, 12 nt, Human
cuuuuucauuau

SEQ ID NO: 1655790 - RNA, 13 nt, Human
cuuuuucauuauu

SEQ ID NO: 1655791 - RNA, 14 nt, Human
cuuuuucauuauuu

SEQ ID NO: 1655792 - RNA, 21 nt, Human
cuuuuucauuauuuuauuaug

SEQ ID NO: 1655793 - RNA, 15 nt, Human
cuuuuuuaaauaaau

SEQ ID NO: 1655794 - RNA, 22 nt, Human
cuuuuguucuugguuuguaaau

SEQ ID NO: 1655795 - RNA, 14 nt, Human
cuuuucugauccag

SEQ ID NO: 1655796 - RNA, 15 nt, Human
cuuuucugauccagu

SEQ ID NO: 1655797 - RNA, 11 nt, Human
cuuuucugauc

SEQ ID NO: 1655798 - RNA, 17 nt, Human
cuuuguuuuacugucuu

SEQ ID NO: 1655799 - RNA, 21 nt, Human
cuuuguuuguugucagcugaa

SEQ ID NO: 1655800 - RNA, 16 nt, Human
cuuuucugauccaguu

SEQ ID NO: 1655801 - RNA, 18 nt, Human
cuuuucugauccaguuuu

SEQ ID NO: 1655802 - RNA, 15 nt, Human
cuuuucuguuugcua

SEQ ID NO: 1655803 - RNA, 16 nt, Human
cuuuuuuagaguugau

SEQ ID NO: 1655804 - RNA, 18 nt, Human
gaaaacaugcuacacacu

SEQ ID NO: 1655805 - RNA, 16 nt, Human
gaaaacaugcuacaca

SEQ ID NO: 1655806 - RNA, 20 nt, Human
gaaaacacuguucucugccc

SEQ ID NO: 1655807 - RNA, 21 nt, Human
gaaaacacuguucucugcccu

SEQ ID NO: 1655808 - RNA, 19 nt, Human
gaaaacacuguucucugcc

SEQ ID NO: 1655809 - RNA, 14 nt, Human
gaaaacaaggauga

SEQ ID NO: 1655810 - RNA, 22 nt, Human
gaaaacacuguucucugcccuc

SEQ ID NO: 1655811 - RNA, 19 nt, Human
gaaaacaugcuacacacug

SEQ ID NO: 1655812 - RNA, 14 nt, Human
gaaaacguggcugc

SEQ ID NO: 1655813 - RNA, 22 nt, Human
gaaaagucaaggguaggguggg

SEQ ID NO: 1655814 - RNA, 19 nt, Human
gaaaauaacaauaaaagac

SEQ ID NO: 1655815 - RNA, 14 nt, Human
gaaaaguauguuag

SEQ ID NO: 1655816 - RNA, 20 nt, Human
gaaaaguauguuagugcaaa

SEQ ID NO: 1655817 - RNA, 17 nt, Human
cuucuccaggcuguauc

SEQ ID NO: 1655818 - RNA, 16 nt, Human
cuucuccacccugcuc

SEQ ID NO: 1655819 - RNA, 14 nt, Human
cuucuccacccugc

SEQ ID NO: 1655820 - RNA, 15 nt, Human
cuucuccacccugcu

SEQ ID NO: 1655821 - RNA, 20 nt, Human
cuucuccuuucacaaccuuc

SEQ ID NO: 1655822 - RNA, 22 nt, Human
cuucuccuuucacaaccuucug

SEQ ID NO: 1655823 - RNA, 14 nt, Human
cuucuccuuucaca

SEQ ID NO: 1655824 - RNA, 17 nt, Human
cuucuccuuucacaacc

SEQ ID NO: 1655825 - RNA, 22 nt, Human
cuucuccuucaccuuugucccc

SEQ ID NO: 1655826 - RNA, 18 nt, Human
cuucugcuucagccuccc

SEQ ID NO: 1655827 - RNA, 16 nt, Human
cuucugcuucagccuc

SEQ ID NO: 1655828 - RNA, 17 nt, Human
cuucugcuucagccucc

SEQ ID NO: 1655829 - RNA, 21 nt, Human
cuucugccauauucuguuggc

SEQ ID NO: 1655830 - RNA, 20 nt, Human
cuucugccauuucugagauc

SEQ ID NO: 1655831 - RNA, 15 nt, Human
cuucugccauauucu

SEQ ID NO: 1655832 - RNA, 17 nt, Human
cuucugccauauucugu

SEQ ID NO: 1655833 - RNA, 13 nt, Human
cuucgcuccugug

SEQ ID NO: 1655834 - RNA, 14 nt, Human
cuucgcuccugugu

SEQ ID NO: 1655835 - RNA, 15 nt, Human
cuucgcuccuguguc

SEQ ID NO: 1655836 - RNA, 20 nt, Human
cuuccuuggacucauuuuaa

SEQ ID NO: 1655837 - RNA, 19 nt, Human
cuuccuuggacucauuuua

SEQ ID NO: 1655838 - RNA, 20 nt, Human
cuucgggaggucgaggcagg

SEQ ID NO: 1655839 - RNA, 21 nt, Human
cuucgggaggucgaggcagga

SEQ ID NO: 1655840 - RNA, 18 nt, Human
cuucggccuccauccuga

SEQ ID NO: 1655841 - RNA, 19 nt, Human
cuucggccuccauccugag

SEQ ID NO: 1655842 - RNA, 16 nt, Human
cuucgcuccugugucu

SEQ ID NO: 1655843 - RNA, 17 nt, Human
cuucggccuccauccug

SEQ ID NO: 1655844 - RNA, 13 nt, Human
cuucauuuggaga

SEQ ID NO: 1655845 - RNA, 14 nt, Human
cuucauuuggagau

SEQ ID NO: 1655846 - RNA, 23 nt, Human
cuuccacaagagcccaggccucc

SEQ ID NO: 1655847 - RNA, 22 nt, Human
cuuccacaagagcccaggccuc

SEQ ID NO: 1655848 - RNA, 18 nt, Human
cuucauuuccugugucuu

SEQ ID NO: 1655849 - RNA, 13 nt, Human
cuucagugccuua

SEQ ID NO: 1655850 - RNA, 14 nt, Human
cuucagugccuuau

SEQ ID NO: 1655851 - RNA, 11 nt, Human
cuucagugccu

SEQ ID NO: 1655852 - RNA, 12 nt, Human
cuucagugccuu

SEQ ID NO: 1655853 - RNA, 15 nt, Human
cuucaggcucuucuc

SEQ ID NO: 1655854 - RNA, 16 nt, Human
cuucaggcucuucucc

SEQ ID NO: 1655855 - RNA, 17 nt, Human
cuucaggcucuucuccu

SEQ ID NO: 1655856 - RNA, 18 nt, Human
cuucaggcucuucuccuu

SEQ ID NO: 1655857 - RNA, 14 nt, Human
cuucaggcucuucu

SEQ ID NO: 1655858 - RNA, 11 nt, Human
cuucagcugac

SEQ ID NO: 1655859 - RNA, 18 nt, Human
cuucagcgguuuauauaa

SEQ ID NO: 1655860 - RNA, 15 nt, Human
cuucccgcucagccc

SEQ ID NO: 1655861 - RNA, 16 nt, Human
cuucccgcucagcccu

SEQ ID NO: 1655862 - RNA, 17 nt, Human
cuucccgcucagcccuc

SEQ ID NO: 1655863 - RNA, 18 nt, Human
cuucccgcucagcccucc

SEQ ID NO: 1655864 - RNA, 15 nt, Human
cuuccagugaggcuc

SEQ ID NO: 1655865 - RNA, 14 nt, Human
cuuccagugaggcu

SEQ ID NO: 1655866 - RNA, 22 nt, Human
cuuccaggggugggacacccug

SEQ ID NO: 1655867 - RNA, 24 nt, Human
cuuccaggggugggacacccugug

SEQ ID NO: 1655868 - RNA, 19 nt, Human
cuuccagauccuggaaauc

SEQ ID NO: 1655869 - RNA, 15 nt, Human
cuuagaaccuuucuu

SEQ ID NO: 1655870 - RNA, 17 nt, Human
cuuagaaauugcauuuc

SEQ ID NO: 1655871 - RNA, 15 nt, Human
cuuagaagucacaca

SEQ ID NO: 1655872 - RNA, 14 nt, Human
cuuagacagucccu

SEQ ID NO: 1655873 - RNA, 15 nt, Human
cuuagacagucccug

SEQ ID NO: 1655874 - RNA, 16 nt, Human
cuuagacagucccugc

SEQ ID NO: 1655875 - RNA, 19 nt, Human
cuuagacagucccugccaa

SEQ ID NO: 1655876 - RNA, 17 nt, Human
cuuagacagucccugcc

SEQ ID NO: 1655877 - RNA, 18 nt, Human
cuuagacagucccugcca

SEQ ID NO: 1655878 - RNA, 19 nt, Human
cuuagaugcaguucugaag

SEQ ID NO: 1655879 - RNA, 20 nt, Human
cuuagaugcaguucugaaga

SEQ ID NO: 1655880 - RNA, 16 nt, Human
cuuacuguacaugaaa

SEQ ID NO: 1655881 - RNA, 15 nt, Human
cuuacgugaguccug

SEQ ID NO: 1655882 - RNA, 19 nt, Human
cuuacuaguuucccuugca

SEQ ID NO: 1655883 - RNA, 15 nt, Human
cuuauacauuugaua

SEQ ID NO: 1655884 - RNA, 14 nt, Human
cuuauaauuuaaaa

SEQ ID NO: 1655885 - RNA, 13 nt, Human
cuuauaauuuaaa

SEQ ID NO: 1655886 - RNA, 17 nt, Human
cuuagguuggcaaaaag

SEQ ID NO: 1655887 - RNA, 20 nt, Human
cuuaggugauccacucgccu

SEQ ID NO: 1655888 - RNA, 21 nt, Human
cuuaggguuaugauuaaguaa

SEQ ID NO: 1655889 - RNA, 14 nt, Human
cuuaucaaaggaca

SEQ ID NO: 1655890 - RNA, 16 nt, Human
cuuaucaaaggacacc

SEQ ID NO: 1655891 - RNA, 15 nt, Human
cuuauuuaaugaaag

SEQ ID NO: 1655892 - RNA, 21 nt, Human
cuuaagaagacugcauuauau

SEQ ID NO: 1655893 - RNA, 16 nt, Human
cuuaaguuuauacucu

SEQ ID NO: 1655894 - RNA, 16 nt, Human
cuuaaucuaaauggaa

SEQ ID NO: 1655895 - RNA, 14 nt, Human
cuuaaucuaaaugg

SEQ ID NO: 1655896 - RNA, 18 nt, Human
cuuaaugccacuaaauug

SEQ ID NO: 1655897 - RNA, 22 nt, Human
cuuaacuucacauauugauuuc

SEQ ID NO: 1655898 - RNA, 17 nt, Human
cuuaacuucacauauug

SEQ ID NO: 1655899 - RNA, 16 nt, Human
cuuaacuucacauauu

SEQ ID NO: 1655900 - RNA, 15 nt, Human
cuuaacuucacauau

SEQ ID NO: 1655901 - RNA, 14 nt, Human
cuuaacuucacaua

SEQ ID NO: 1655902 - RNA, 12 nt, Human
cuuaacuucaca

SEQ ID NO: 1655903 - RNA, 17 nt, Human
cugguugaugccuguga

SEQ ID NO: 1655904 - RNA, 12 nt, Human
cuguuuagauaa

SEQ ID NO: 1655905 - RNA, 18 nt, Human
cuguuuguuucugaaagg

SEQ ID NO: 1655906 - RNA, 21 nt, Human
cuguuuuauuuuaauucaguu

SEQ ID NO: 1655907 - RNA, 12 nt, Human
cuguuuuaugac

SEQ ID NO: 1655908 - RNA, 13 nt, Human
cuguuuuaugacu

SEQ ID NO: 1655909 - RNA, 14 nt, Human
cuguuuuaugacuu

SEQ ID NO: 1655910 - RNA, 15 nt, Human
cuguuuuaugacuuc

SEQ ID NO: 1655911 - RNA, 14 nt, Human
cuguuuucucuuga

SEQ ID NO: 1655912 - RNA, 21 nt, Human
cuguuuguuucugaaagggac

SEQ ID NO: 1655913 - RNA, 23 nt, Human
cuguuuguuucugaaagggacgc

SEQ ID NO: 1655914 - RNA, 19 nt, Human
cuguuuuauaauuuuguga

SEQ ID NO: 1655915 - RNA, 17 nt, Human
cuguuuucucuugagag

SEQ ID NO: 1655916 - RNA, 16 nt, Human
cuguuuuaugacuuca

SEQ ID NO: 1655917 - RNA, 14 nt, Human
cugaauuuaaauag

SEQ ID NO: 1655918 - RNA, 18 nt, Human
cugaauuuaaauagcuuu

SEQ ID NO: 1655919 - RNA, 23 nt, Human
cugaauuuaaauagcuuuuuucu

SEQ ID NO: 1655920 - RNA, 19 nt, Human
cugacagacacaggcccgg

SEQ ID NO: 1655921 - RNA, 11 nt, Human
cugacaggcaa

SEQ ID NO: 1655922 - RNA, 17 nt, Human
cugacagacagcccucc

SEQ ID NO: 1655923 - RNA, 19 nt, Human
cugacagacagcccuccau

SEQ ID NO: 1655924 - RNA, 21 nt, Human
cugacagacacaggcccggcu

SEQ ID NO: 1655925 - RNA, 17 nt, Human
cugacauuguuggccaa

SEQ ID NO: 1655926 - RNA, 21 nt, Human
cugacaggcaaugcuggcugu

SEQ ID NO: 1655927 - RNA, 20 nt, Human
cugacaggcaaugcuggcug

SEQ ID NO: 1655928 - RNA, 16 nt, Human
cugacaggcaaugcug

SEQ ID NO: 1655929 - RNA, 17 nt, Human
cugacaggcaaugcugg

SEQ ID NO: 1655930 - RNA, 18 nt, Human
cugacaggcaaugcuggc

SEQ ID NO: 1655931 - RNA, 19 nt, Human
cugacaggcaaugcuggcu

SEQ ID NO: 1655932 - RNA, 21 nt, Human
cugacauuguuggccaaagcc

SEQ ID NO: 1655933 - RNA, 11 nt, Human
cugacccacug

SEQ ID NO: 1655934 - RNA, 21 nt, Human
cugaaccuggguaacuaggga

SEQ ID NO: 1655935 - RNA, 18 nt, Human
cucuuugggccuggcucc

SEQ ID NO: 1655936 - RNA, 19 nt, Human
cucuuuggucuacacugug

SEQ ID NO: 1655937 - RNA, 21 nt, Human
cucuuuggucuacacugugcu

SEQ ID NO: 1655938 - RNA, 21 nt, Human
cugaagacucauucuucugua

SEQ ID NO: 1655939 - RNA, 15 nt, Human
cugaacuuggcgcug

SEQ ID NO: 1655940 - RNA, 16 nt, Human
cugaacuuggcgcugc

SEQ ID NO: 1655941 - RNA, 21 nt, Human
cugaacuuggcgcugccccug

SEQ ID NO: 1655942 - RNA, 14 nt, Human
cugaagucacacag

SEQ ID NO: 1655943 - RNA, 16 nt, Human
cugaagucacacagug

SEQ ID NO: 1655944 - RNA, 15 nt, Human
cugaagucacacagu

SEQ ID NO: 1655945 - RNA, 14 nt, Human
cugaagucagaucu

SEQ ID NO: 1655946 - RNA, 22 nt, Human
cugaagucacugcacagugcau

SEQ ID NO: 1655947 - RNA, 17 nt, Human
cugaagucacugcacag

SEQ ID NO: 1655948 - RNA, 16 nt, Human
cugaagucacugcaca

SEQ ID NO: 1655949 - RNA, 15 nt, Human
cugaagucagaucug

SEQ ID NO: 1655950 - RNA, 16 nt, Human
cugaagucagaucugc

SEQ ID NO: 1655951 - RNA, 24 nt, Human
cugaagucuuuguacagacaacaa

SEQ ID NO: 1655952 - RNA, 21 nt, Human
cugaagucagaucugccuaag

SEQ ID NO: 1655953 - RNA, 13 nt, Human
cugaagugaaacu

SEQ ID NO: 1655954 - RNA, 17 nt, Human
cugaagugaaacugcuu

SEQ ID NO: 1655955 - RNA, 19 nt, Human
cugaagugaaacugcuugu

SEQ ID NO: 1655956 - RNA, 16 nt, Human
cugaauacagaggcaa

SEQ ID NO: 1655957 - RNA, 18 nt, Human
cucuugguccugcugcag

SEQ ID NO: 1655958 - RNA, 19 nt, Human
cucuugguccugcugcagu

SEQ ID NO: 1655959 - RNA, 13 nt, Human
cucuugagccugg

SEQ ID NO: 1655960 - RNA, 18 nt, Human
cucuugaacuccugaccu

SEQ ID NO: 1655961 - RNA, 18 nt, Human
cucuucuggguuccuucc

SEQ ID NO: 1655962 - RNA, 16 nt, Human
cucuugaccucaggug

SEQ ID NO: 1655963 - RNA, 13 nt, Human
cucuugaccucag

SEQ ID NO: 1655964 - RNA, 15 nt, Human
cucuugaccucaggu

SEQ ID NO: 1655965 - RNA, 17 nt, Human
cucuuuccaucuacccu

SEQ ID NO: 1655966 - RNA, 13 nt, Human
cucuuucccuccc

SEQ ID NO: 1655967 - RNA, 15 nt, Human
cucuuuggacacuca

SEQ ID NO: 1655968 - RNA, 18 nt, Human
cucuuuggacacucacac

SEQ ID NO: 1655969 - RNA, 13 nt, Human
cucuucuccuuuc

SEQ ID NO: 1655970 - RNA, 15 nt, Human
cucuucuccuuucac

SEQ ID NO: 1655971 - RNA, 16 nt, Human
cucuucuccuuucaca

SEQ ID NO: 1655972 - RNA, 23 nt, Human
cucuuccaggcugggagagccuu

SEQ ID NO: 1655973 - RNA, 22 nt, Human
cucuuccaggcugggagagccu

SEQ ID NO: 1655974 - RNA, 21 nt, Human
cucuuccaggcugggagagcc

SEQ ID NO: 1655975 - RNA, 15 nt, Human
cucuucuccacugga

SEQ ID NO: 1655976 - RNA, 17 nt, Human
cucuucuccacuggaug

SEQ ID NO: 1655977 - RNA, 14 nt, Human
cucuucuccacugg

SEQ ID NO: 1655978 - RNA, 19 nt, Human
cucuucuccacuggaugga

SEQ ID NO: 1655979 - RNA, 12 nt, Human
cucuucuccagg

SEQ ID NO: 1655980 - RNA, 15 nt, Human
cucuggagcccacug

SEQ ID NO: 1655981 - RNA, 19 nt, Human
cucuggagcccacuguacu

SEQ ID NO: 1655982 - RNA, 17 nt, Human
cucuggcagcucagaga

SEQ ID NO: 1655983 - RNA, 18 nt, Human
cucuggcagcucagagag

SEQ ID NO: 1655984 - RNA, 20 nt, Human
cucuguucugcacacagcac

SEQ ID NO: 1655985 - RNA, 21 nt, Human
cucuguucugcacacagcacg

SEQ ID NO: 1655986 - RNA, 19 nt, Human
cucuguucugcacacagca

SEQ ID NO: 1655987 - RNA, 20 nt, Human
cucuggcagcucagagaggg

SEQ ID NO: 1655988 - RNA, 19 nt, Human
cucuggcagcucagagagg

SEQ ID NO: 1655989 - RNA, 13 nt, Human
cucuuaaaaccca

SEQ ID NO: 1655990 - RNA, 24 nt, Human
cucuuaaaacccaagugccuuagc

SEQ ID NO: 1655991 - RNA, 19 nt, Human
cucuucaguuaagccuuug

SEQ ID NO: 1655992 - RNA, 20 nt, Human
cucuucaguuaagccuuugg

SEQ ID NO: 1655993 - RNA, 23 nt, Human
cucuucaguuaagccuuuggaaa

SEQ ID NO: 1655994 - RNA, 13 nt, Human
cucuuaagaagac

SEQ ID NO: 1655995 - RNA, 16 nt, Human
cucuccacugccuucg

SEQ ID NO: 1655996 - RNA, 23 nt, Human
cucucaggccagcugcuugggcu

SEQ ID NO: 1655997 - RNA, 13 nt, Human
cucuccauuuaau

SEQ ID NO: 1655998 - RNA, 12 nt, Human
cucuccagcccc

SEQ ID NO: 1655999 - RNA, 13 nt, Human
cucuccagccccu

SEQ ID NO: 1656000 - RNA, 13 nt, Human
cucucccaucacu

SEQ ID NO: 1656001 - RNA, 20 nt, Human
cucucccaucacuucccuac

SEQ ID NO: 1656002 - RNA, 14 nt, Human
cucucccaucacuu

SEQ ID NO: 1656003 - RNA, 18 nt, Human
cucucccaucacuucccu

SEQ ID NO: 1656004 - RNA, 12 nt, Human
cucucugcaggu

SEQ ID NO: 1656005 - RNA, 13 nt, Human
cucucugcagguc

SEQ ID NO: 1656006 - RNA, 14 nt, Human
cucucugcaggucc

SEQ ID NO: 1656007 - RNA, 16 nt, Human
cucucugcaggucccu

SEQ ID NO: 1656008 - RNA, 17 nt, Human
cucucugcaggucccua

SEQ ID NO: 1656009 - RNA, 19 nt, Human
cucucugcaggucccuaau

SEQ ID NO: 1656010 - RNA, 22 nt, Human
cucucugcaggucccuaauaaa

SEQ ID NO: 1656011 - RNA, 15 nt, Human
cucucucacuccuug

SEQ ID NO: 1656012 - RNA, 16 nt, Human
cucucucacuccuuga

SEQ ID NO: 1656013 - RNA, 12 nt, Human
cucucucaggcc

SEQ ID NO: 1656014 - RNA, 13 nt, Human
cucucucaggcca

SEQ ID NO: 1656015 - RNA, 18 nt, Human
cucuccuguaccucuuga

SEQ ID NO: 1656016 - RNA, 17 nt, Human
cucuccuguaccucuug

SEQ ID NO: 1656017 - RNA, 22 nt, Human
cucuccuguaccucuugagccu

SEQ ID NO: 1656018 - RNA, 13 nt, Human
cucuccccagcaa

SEQ ID NO: 1656019 - RNA, 15 nt, Human
cucuccuguaccucu

SEQ ID NO: 1656020 - RNA, 14 nt, Human
cucuccuguaccuc

SEQ ID NO: 1656021 - RNA, 13 nt, Human
cucuccuguaccu

SEQ ID NO: 1656022 - RNA, 21 nt, Human
cucuccugggcagcugccucc

SEQ ID NO: 1656023 - RNA, 12 nt, Human
cucuggagccca

SEQ ID NO: 1656024 - RNA, 14 nt, Human
cucuggacaggcau

SEQ ID NO: 1656025 - RNA, 15 nt, Human
cucugcuuuggaaau

SEQ ID NO: 1656026 - RNA, 14 nt, Human
cucuggaauuugaa

SEQ ID NO: 1656027 - RNA, 15 nt, Human
cucugccuccucuuc

SEQ ID NO: 1656028 - RNA, 16 nt, Human
cucugccuccucuuca

SEQ ID NO: 1656029 - RNA, 14 nt, Human
cucugccucugaca

SEQ ID NO: 1656030 - RNA, 16 nt, Human
cucugccucugacaca

SEQ ID NO: 1656031 - RNA, 23 nt, Human
cucugcccuaaugcgcaggcugg

SEQ ID NO: 1656032 - RNA, 11 nt, Human
cucugcccugc

SEQ ID NO: 1656033 - RNA, 14 nt, Human
cucugccuccucuu

SEQ ID NO: 1656034 - RNA, 12 nt, Human
cucugcccugcg

SEQ ID NO: 1656035 - RNA, 12 nt, Human
cucugcccuugg

SEQ ID NO: 1656036 - RNA, 14 nt, Human
cucugcccuccaag

SEQ ID NO: 1656037 - RNA, 15 nt, Human
cucugcccuccaaga

SEQ ID NO: 1656038 - RNA, 16 nt, Human
cucugcccuccaagac

SEQ ID NO: 1656039 - RNA, 23 nt, Human
cucugcccuccaagaccuucucc

SEQ ID NO: 1656040 - RNA, 15 nt, Human
cucugagccuuggga

SEQ ID NO: 1656041 - RNA, 16 nt, Human
cucugagcaaaugugg

SEQ ID NO: 1656042 - RNA, 12 nt, Human
cucucugcccua

SEQ ID NO: 1656043 - RNA, 13 nt, Human
cucucugcccuaa

SEQ ID NO: 1656044 - RNA, 21 nt, Human
cucucugcccuaaugcgcagg

SEQ ID NO: 1656045 - RNA, 20 nt, Human
cucugagacucgcgacaaug

SEQ ID NO: 1656046 - RNA, 17 nt, Human
cucugaugaagaggagu

SEQ ID NO: 1656047 - RNA, 22 nt, Human
cucugcaagaauugaagcagga

SEQ ID NO: 1656048 - RNA, 10 nt, Human
cucugcacaa

SEQ ID NO: 1656049 - RNA, 17 nt, Human
cucugcaaucuucucag

SEQ ID NO: 1656050 - RNA, 18 nt, Human
cucugcaaucuucucaga

SEQ ID NO: 1656051 - RNA, 23 nt, Human
cucugcaggucccuaauaaagcu

SEQ ID NO: 1656052 - RNA, 23 nt, Human
cucugcauacucauuaggauggc

SEQ ID NO: 1656053 - RNA, 14 nt, Human
cuccugugugugcg

SEQ ID NO: 1656054 - RNA, 14 nt, Human
cuccuucaccuuug

SEQ ID NO: 1656055 - RNA, 16 nt, Human
cuccuucaccuuuguc

SEQ ID NO: 1656056 - RNA, 19 nt, Human
cuccuucaccuuugucccc

SEQ ID NO: 1656057 - RNA, 21 nt, Human
cuccuucaccuuuguccccac

SEQ ID NO: 1656058 - RNA, 16 nt, Human
cuccugcaggcagcca

SEQ ID NO: 1656059 - RNA, 22 nt, Human
cuccugcaggcagccaggccac

SEQ ID NO: 1656060 - RNA, 15 nt, Human
cuccugcaggcagcc

SEQ ID NO: 1656061 - RNA, 21 nt, Human
cuccugcaggcagccaggcca

SEQ ID NO: 1656062 - RNA, 11 nt, Human
cuccugccacc

SEQ ID NO: 1656063 - RNA, 15 nt, Human
cuccugugucuugca

SEQ ID NO: 1656064 - RNA, 23 nt, Human
cuccugugucuugcaauggcagc

SEQ ID NO: 1656065 - RNA, 11 nt, Human
cuccugugugu

SEQ ID NO: 1656066 - RNA, 11 nt, Human
cuccuucuucc

SEQ ID NO: 1656067 - RNA, 21 nt, Human
cuccuugaaaacacuguucuc

SEQ ID NO: 1656068 - RNA, 14 nt, Human
cuccuucuguccua

SEQ ID NO: 1656069 - RNA, 15 nt, Human
cuccuucuguccuac

SEQ ID NO: 1656070 - RNA, 20 nt, Human
cuccuucuguccuacucugu

SEQ ID NO: 1656071 - RNA, 19 nt, Human
cucgcuauugucaccaggg

SEQ ID NO: 1656072 - RNA, 15 nt, Human
cucgcgacaaugcaa

SEQ ID NO: 1656073 - RNA, 16 nt, Human
cucgaguuacagacaa

SEQ ID NO: 1656074 - RNA, 20 nt, Human
cucgaguuacagacaaagcg

SEQ ID NO: 1656075 - RNA, 23 nt, Human
cucggccucccaaagugcuggga

SEQ ID NO: 1656076 - RNA, 22 nt, Human
cucggccucccaaagugcuggg

SEQ ID NO: 1656077 - RNA, 13 nt, Human
cucuaaauucuuu

SEQ ID NO: 1656078 - RNA, 17 nt, Human
cucuaaauucuuucauu

SEQ ID NO: 1656079 - RNA, 22 nt, Human
cucgcuauugucaccagggcug

SEQ ID NO: 1656080 - RNA, 21 nt, Human
cucgcuauugucaccagggcu

SEQ ID NO: 1656081 - RNA, 18 nt, Human
cucggacuuagcugggag

SEQ ID NO: 1656082 - RNA, 19 nt, Human
cucggacuuagcugggaga

SEQ ID NO: 1656083 - RNA, 12 nt, Human
cucggagaagag

SEQ ID NO: 1656084 - RNA, 13 nt, Human
cucggagaagagc

SEQ ID NO: 1656085 - RNA, 20 nt, Human
cucggagaagagcuguucac

SEQ ID NO: 1656086 - RNA, 14 nt, Human
cuccugaccucagg

SEQ ID NO: 1656087 - RNA, 14 nt, Human
cuccugaccuuagg

SEQ ID NO: 1656088 - RNA, 17 nt, Human
cuccugaguagcuggga

SEQ ID NO: 1656089 - RNA, 22 nt, Human
cuccugaguagcugggauuaca

SEQ ID NO: 1656090 - RNA, 13 nt, Human
cuccugcaggcag

SEQ ID NO: 1656091 - RNA, 14 nt, Human
cuccugcaggcagc

SEQ ID NO: 1656092 - RNA, 19 nt, Human
cuccucuugccacugccuc

SEQ ID NO: 1656093 - RNA, 14 nt, Human
cuccucagaucuuc

SEQ ID NO: 1656094 - RNA, 18 nt, Human
cuccuaucaccugucuug

SEQ ID NO: 1656095 - RNA, 22 nt, Human
cuccuaucagaaguuucucagc

SEQ ID NO: 1656096 - RNA, 12 nt, Human
cuccucagaucu

SEQ ID NO: 1656097 - RNA, 14 nt, Human
cucccaucacccgc

SEQ ID NO: 1656098 - RNA, 14 nt, Human
cucccaucucacac

SEQ ID NO: 1656099 - RNA, 21 nt, Human
cucccaucucacacaugagca

SEQ ID NO: 1656100 - RNA, 15 nt, Human
cucccaucucacaca

SEQ ID NO: 1656101 - RNA, 18 nt, Human
cucccaucucacacauga

SEQ ID NO: 1656102 - RNA, 12 nt, Human
cucccuucaacc

SEQ ID NO: 1656103 - RNA, 18 nt, Human
cucccuucaaccauuccc

SEQ ID NO: 1656104 - RNA, 19 nt, Human
cucccuucaaccauucccc

SEQ ID NO: 1656105 - RNA, 20 nt, Human
cucccuucaaccauucccca

SEQ ID NO: 1656106 - RNA, 10 nt, Human
cucccuuccu

SEQ ID NO: 1656107 - RNA, 23 nt, Human
cucccuucccaccucucucacuc

SEQ ID NO: 1656108 - RNA, 17 nt, Human
cucccuuucuucccuac

SEQ ID NO: 1656109 - RNA, 17 nt, Human
cucccuuggauuguccc

SEQ ID NO: 1656110 - RNA, 20 nt, Human
cucccuuggauuguccccga

SEQ ID NO: 1656111 - RNA, 13 nt, Human
cucccuuucaaca

SEQ ID NO: 1656112 - RNA, 14 nt, Human
cucccuuccucuuu

SEQ ID NO: 1656113 - RNA, 13 nt, Human
cucccuuccucuu

SEQ ID NO: 1656114 - RNA, 16 nt, Human
cucccuucucuucaca

SEQ ID NO: 1656115 - RNA, 15 nt, Human
cuccagaccccuggc

SEQ ID NO: 1656116 - RNA, 17 nt, Human
cuccagaccccuggcuu

SEQ ID NO: 1656117 - RNA, 18 nt, Human
cuccagaccccuggcuuu

SEQ ID NO: 1656118 - RNA, 19 nt, Human
cuccagaccccuggcuuuu

SEQ ID NO: 1656119 - RNA, 20 nt, Human
cuccagaccccuggcuuuuc

SEQ ID NO: 1656120 - RNA, 21 nt, Human
cuccagaccccuggcuuuuca

SEQ ID NO: 1656121 - RNA, 11 nt, Human
cuccacugccu

SEQ ID NO: 1656122 - RNA, 19 nt, Human
cuccagcucaccagcccca

SEQ ID NO: 1656123 - RNA, 20 nt, Human
cuccagcucaccagccccag

SEQ ID NO: 1656124 - RNA, 11 nt, Human
cuccacccugc

SEQ ID NO: 1656125 - RNA, 12 nt, Human
cuccacccugcu

SEQ ID NO: 1656126 - RNA, 17 nt, Human
cuccaccucccugcaau

SEQ ID NO: 1656127 - RNA, 16 nt, Human
cuccaccucccugcaa

SEQ ID NO: 1656128 - RNA, 15 nt, Human
cuccaccucccugca

SEQ ID NO: 1656129 - RNA, 14 nt, Human
cuccaccucccugc

SEQ ID NO: 1656130 - RNA, 18 nt, Human
cuccaccugccagggaca

SEQ ID NO: 1656131 - RNA, 21 nt, Human
cuccaccugccagggacagag

SEQ ID NO: 1656132 - RNA, 17 nt, Human
cuccaccugccagggac

SEQ ID NO: 1656133 - RNA, 23 nt, Human
cuccaccucccugcaauaaaaug

SEQ ID NO: 1656134 - RNA, 13 nt, Human
cuccagcuguuca

SEQ ID NO: 1656135 - RNA, 18 nt, Human
cuccagcuguucagcugg

SEQ ID NO: 1656136 - RNA, 19 nt, Human
cuccagcuguucagcuggu

SEQ ID NO: 1656137 - RNA, 18 nt, Human
cuccaucuaaacugcccc

SEQ ID NO: 1656138 - RNA, 13 nt, Human
cuccaucuccacu

SEQ ID NO: 1656139 - RNA, 20 nt, Human
cuccaucgcugucaucucag

SEQ ID NO: 1656140 - RNA, 17 nt, Human
cuccaucuaaacugccc

SEQ ID NO: 1656141 - RNA, 23 nt, Human
cuccauccugaggcuccacuugg

SEQ ID NO: 1656142 - RNA, 11 nt, Human
cuccaggcucc

SEQ ID NO: 1656143 - RNA, 15 nt, Human
cuccaggcuccuuua

SEQ ID NO: 1656144 - RNA, 21 nt, Human
cuccauccugaggcuccacuu

SEQ ID NO: 1656145 - RNA, 14 nt, Human
cuccaucuccacuc

SEQ ID NO: 1656146 - RNA, 21 nt, Human
cucccaaggggcccaaauucu

SEQ ID NO: 1656147 - RNA, 22 nt, Human
cucccaaggggcccaaauucuu

SEQ ID NO: 1656148 - RNA, 17 nt, Human
cucccaggcauucccca

SEQ ID NO: 1656149 - RNA, 19 nt, Human
cucccaggcauuccccagg

SEQ ID NO: 1656150 - RNA, 20 nt, Human
cucccaggcauuccccagga

SEQ ID NO: 1656151 - RNA, 21 nt, Human
cucccaggcauuccccaggag

SEQ ID NO: 1656152 - RNA, 22 nt, Human
cucccaggcauuccccaggagg

SEQ ID NO: 1656153 - RNA, 14 nt, Human
cucccaggcgcccc

SEQ ID NO: 1656154 - RNA, 17 nt, Human
cucccagucauuuaaua

SEQ ID NO: 1656155 - RNA, 16 nt, Human
cucauugaccugaggc

SEQ ID NO: 1656156 - RNA, 23 nt, Human
cucauucuucuguacgucugaca

SEQ ID NO: 1656157 - RNA, 13 nt, Human
cucauugaccuga

SEQ ID NO: 1656158 - RNA, 15 nt, Human
cucauugaccugagg

SEQ ID NO: 1656159 - RNA, 21 nt, Human
cucauuccaccuucccaugcc

SEQ ID NO: 1656160 - RNA, 18 nt, Human
cucauuccaccuucccau

SEQ ID NO: 1656161 - RNA, 13 nt, Human
cucauucuucugu

SEQ ID NO: 1656162 - RNA, 14 nt, Human
cucauucuucugua

SEQ ID NO: 1656163 - RNA, 14 nt, Human
cucauauuuucaug

SEQ ID NO: 1656164 - RNA, 21 nt, Human
cucaucuagguaaauuacagu

SEQ ID NO: 1656165 - RNA, 17 nt, Human
cucaucuccccaucauu

SEQ ID NO: 1656166 - RNA, 21 nt, Human
cucauuagcauuuugcuaaau

SEQ ID NO: 1656167 - RNA, 17 nt, Human
cucauuaggauggcuag

SEQ ID NO: 1656168 - RNA, 18 nt, Human
cucauuaggauggcuagu

SEQ ID NO: 1656169 - RNA, 23 nt, Human
cuaaaagguaugcaaucaaaucu

SEQ ID NO: 1656170 - RNA, 12 nt, Human
cucagggucccu

SEQ ID NO: 1656171 - RNA, 17 nt, Human
cucaggucccugcaggg

SEQ ID NO: 1656172 - RNA, 18 nt, Human
cucaggucccugcagggc

SEQ ID NO: 1656173 - RNA, 14 nt, Human
cucagggucccugg

SEQ ID NO: 1656174 - RNA, 22 nt, Human
cucagguggggucacucuggca

SEQ ID NO: 1656175 - RNA, 23 nt, Human
cucagguggggucacucuggcag

SEQ ID NO: 1656176 - RNA, 15 nt, Human
cucaggugucccugc

SEQ ID NO: 1656177 - RNA, 16 nt, Human
cucaggugucccugca

SEQ ID NO: 1656178 - RNA, 17 nt, Human
cucaggugucccugcac

SEQ ID NO: 1656179 - RNA, 18 nt, Human
cucaggugucccugcacu

SEQ ID NO: 1656180 - RNA, 19 nt, Human
cucaggugucccugcacuu

SEQ ID NO: 1656181 - RNA, 14 nt, Human
cucaggugagaagc

SEQ ID NO: 1656182 - RNA, 20 nt, Human
cucauaguaugguggcuggg

SEQ ID NO: 1656183 - RNA, 18 nt, Human
cucauaguaugguggcug

SEQ ID NO: 1656184 - RNA, 19 nt, Human
cucauaguaugguggcugg

SEQ ID NO: 1656185 - RNA, 15 nt, Human
cucauacccaccccc

SEQ ID NO: 1656186 - RNA, 23 nt, Human
cuggauuauucaaaaugauguau

SEQ ID NO: 1656187 - RNA, 17 nt, Human
cuggauuauauuaugaa

SEQ ID NO: 1656188 - RNA, 23 nt, Human
cuggauuaaacuuaaucuaaaug

SEQ ID NO: 1656189 - RNA, 13 nt, Human
cuggauuaaacuu

SEQ ID NO: 1656190 - RNA, 16 nt, Human
cuggauggggcugcac

SEQ ID NO: 1656191 - RNA, 21 nt, Human
cuggauggaggaaaaccaagc

SEQ ID NO: 1656192 - RNA, 15 nt, Human
cuggauggggcugca

SEQ ID NO: 1656193 - RNA, 19 nt, Human
cuggauuguacuuugugcu

SEQ ID NO: 1656194 - RNA, 20 nt, Human
cuggauuguacuuugugcug

SEQ ID NO: 1656195 - RNA, 17 nt, Human
cuggcacagggcagugg

SEQ ID NO: 1656196 - RNA, 18 nt, Human
cuggcacaguuuucugag

SEQ ID NO: 1656197 - RNA, 19 nt, Human
cuggcacaguuuucugaga

SEQ ID NO: 1656198 - RNA, 13 nt, Human
cuggcacugcuuc

SEQ ID NO: 1656199 - RNA, 14 nt, Human
cuggcacugcuucc

SEQ ID NO: 1656200 - RNA, 23 nt, Human
cuggcacuauaauguaagcucua

SEQ ID NO: 1656201 - RNA, 22 nt, Human
cuggccucaagugauucuccug

SEQ ID NO: 1656202 - RNA, 23 nt, Human
cuggccuagcauacguacacauu

SEQ ID NO: 1656203 - RNA, 12 nt, Human
cuggcccacugc

SEQ ID NO: 1656204 - RNA, 13 nt, Human
cuggcccacugca

SEQ ID NO: 1656205 - RNA, 17 nt, Human
cuggccuagcauacgua

SEQ ID NO: 1656206 - RNA, 22 nt, Human
cuggccagaugcaccagcccuu

SEQ ID NO: 1656207 - RNA, 21 nt, Human
cuggccagaugcaccagcccu

SEQ ID NO: 1656208 - RNA, 17 nt, Human
cuggccagaugcaccag

SEQ ID NO: 1656209 - RNA, 18 nt, Human
cuggccagaugcaccagc

SEQ ID NO: 1656210 - RNA, 19 nt, Human
cuggccagaugcaccagcc

SEQ ID NO: 1656211 - RNA, 20 nt, Human
cuggccagaugcaccagccc

SEQ ID NO: 1656212 - RNA, 15 nt, Human
cuggcacugcuucca

SEQ ID NO: 1656213 - RNA, 16 nt, Human
cuggcacugcuuccag

SEQ ID NO: 1656214 - RNA, 17 nt, Human
cuggcacugcuuccagu

SEQ ID NO: 1656215 - RNA, 18 nt, Human
cuggcacugcuuccagug

SEQ ID NO: 1656216 - RNA, 16 nt, Human
cuggccagaugcacca

SEQ ID NO: 1656217 - RNA, 16 nt, Human
cuggccaacgggguga

SEQ ID NO: 1656218 - RNA, 16 nt, Human
cuggacucaccucccc

SEQ ID NO: 1656219 - RNA, 13 nt, Human
cuggagcccacug

SEQ ID NO: 1656220 - RNA, 15 nt, Human
cuggagcccacugua

SEQ ID NO: 1656221 - RNA, 16 nt, Human
cuggagcccacuguac

SEQ ID NO: 1656222 - RNA, 17 nt, Human
cuggagcccacuguacu

SEQ ID NO: 1656223 - RNA, 20 nt, Human
cuggagcccacuguacuugc

SEQ ID NO: 1656224 - RNA, 21 nt, Human
cuggagcccacuguacuugcu

SEQ ID NO: 1656225 - RNA, 16 nt, Human
cuggagcuagaauuug

SEQ ID NO: 1656226 - RNA, 17 nt, Human
cuggagcuagaauuuga

SEQ ID NO: 1656227 - RNA, 22 nt, Human
cuggagcuagaauuugauaugu

SEQ ID NO: 1656228 - RNA, 15 nt, Human
cuggaaugcaguggu

SEQ ID NO: 1656229 - RNA, 15 nt, Human
cuggaagcacagcuu

SEQ ID NO: 1656230 - RNA, 18 nt, Human
cuggaagcacagcuucau

SEQ ID NO: 1656231 - RNA, 21 nt, Human
cuggaagugcuaauuuugaaa

SEQ ID NO: 1656232 - RNA, 23 nt, Human
cuggaauaauccuaaacauauga

SEQ ID NO: 1656233 - RNA, 21 nt, Human
cugcuuugggcugcccuggug

SEQ ID NO: 1656234 - RNA, 22 nt, Human
cugcuuugggcugcccuggugc

SEQ ID NO: 1656235 - RNA, 23 nt, Human
cugcuuugggcugcccuggugcu

SEQ ID NO: 1656236 - RNA, 19 nt, Human
cugcuuugggcugcccugg

SEQ ID NO: 1656237 - RNA, 20 nt, Human
cugcuuugggcugcccuggu

SEQ ID NO: 1656238 - RNA, 18 nt, Human
cugcuuugggcugcccug

SEQ ID NO: 1656239 - RNA, 12 nt, Human
cugcucugauga

SEQ ID NO: 1656240 - RNA, 18 nt, Human
cugcuuucagauacugga

SEQ ID NO: 1656241 - RNA, 21 nt, Human
cugcuuucagauacuggauug

SEQ ID NO: 1656242 - RNA, 18 nt, Human
cugcugaaacaacaaaua

SEQ ID NO: 1656243 - RNA, 13 nt, Human
cugcugaaacaac

SEQ ID NO: 1656244 - RNA, 17 nt, Human
cuggcuuuucacugcug

SEQ ID NO: 1656245 - RNA, 19 nt, Human
cuggcuuuucacugcuggc

SEQ ID NO: 1656246 - RNA, 20 nt, Human
cuggcuuuucacugcuggcu

SEQ ID NO: 1656247 - RNA, 22 nt, Human
cuggcuuuucacugcuggcugc

SEQ ID NO: 1656248 - RNA, 19 nt, Human
cugggaacaccauagguca

SEQ ID NO: 1656249 - RNA, 15 nt, Human
cuggcuuuucacugc

SEQ ID NO: 1656250 - RNA, 16 nt, Human
cuggcuuuucacugcu

SEQ ID NO: 1656251 - RNA, 14 nt, Human
cuggcuucacagau

SEQ ID NO: 1656252 - RNA, 20 nt, Human
cuggcuguuggcugggggcc

SEQ ID NO: 1656253 - RNA, 21 nt, Human
cuggcuggguggcaccagcag

SEQ ID NO: 1656254 - RNA, 22 nt, Human
cuggcuggguggcaccagcagc

SEQ ID NO: 1656255 - RNA, 19 nt, Human
cuggcuguuggcugggggc

SEQ ID NO: 1656256 - RNA, 14 nt, Human
cuggcugccuuaga

SEQ ID NO: 1656257 - RNA, 19 nt, Human
cuggcugccuuagaaccuu

SEQ ID NO: 1656258 - RNA, 20 nt, Human
cuggcucuuccaggcuggga

SEQ ID NO: 1656259 - RNA, 18 nt, Human
cuggcucuuccaggcugg

SEQ ID NO: 1656260 - RNA, 19 nt, Human
cuggcucuuccaggcuggg

SEQ ID NO: 1656261 - RNA, 13 nt, Human
cuggccugagcug

SEQ ID NO: 1656262 - RNA, 17 nt, Human
cuggcucuuccaggcug

SEQ ID NO: 1656263 - RNA, 15 nt, Human
cuggccugagcuggg

SEQ ID NO: 1656264 - RNA, 12 nt, Human
cugggccccugc

SEQ ID NO: 1656265 - RNA, 16 nt, Human
cugggccccugccucu

SEQ ID NO: 1656266 - RNA, 17 nt, Human
cugggccccugccucuc

SEQ ID NO: 1656267 - RNA, 10 nt, Human
cugggccccu

SEQ ID NO: 1656268 - RNA, 20 nt, Human
cugggcaaugugauaaaacc

SEQ ID NO: 1656269 - RNA, 19 nt, Human
cugggauuacaggcuccug

SEQ ID NO: 1656270 - RNA, 20 nt, Human
cugggauuacaggcuccugc

SEQ ID NO: 1656271 - RNA, 21 nt, Human
cugggauuacaggcgugagcc

SEQ ID NO: 1656272 - RNA, 21 nt, Human
cugggauuacaggcuccugcc

SEQ ID NO: 1656273 - RNA, 22 nt, Human
cugggauuacaggcuccugcca

SEQ ID NO: 1656274 - RNA, 23 nt, Human
cugggauuacaggcuccugccac

SEQ ID NO: 1656275 - RNA, 20 nt, Human
cugggaucacauguggacuu

SEQ ID NO: 1656276 - RNA, 16 nt, Human
cugggagugagcuggu

SEQ ID NO: 1656277 - RNA, 13 nt, Human
cugggagugagcu

SEQ ID NO: 1656278 - RNA, 16 nt, Human
cugggaggcagugaug

SEQ ID NO: 1656279 - RNA, 15 nt, Human
cugggaggcucugga

SEQ ID NO: 1656280 - RNA, 16 nt, Human
cugggaggcucuggag

SEQ ID NO: 1656281 - RNA, 18 nt, Human
cugggaggucaaggcugc

SEQ ID NO: 1656282 - RNA, 13 nt, Human
cugggagcucugc

SEQ ID NO: 1656283 - RNA, 14 nt, Human
cugggagcucugca

SEQ ID NO: 1656284 - RNA, 15 nt, Human
cugggagcucugcag

SEQ ID NO: 1656285 - RNA, 16 nt, Human
cugggagcuuuuguag

SEQ ID NO: 1656286 - RNA, 22 nt, Human
cugggaacccaaguccaagcau

SEQ ID NO: 1656287 - RNA, 21 nt, Human
cuggguacuuguggacacagc

SEQ ID NO: 1656288 - RNA, 23 nt, Human
cuggguacuuguggacacagcuc

SEQ ID NO: 1656289 - RNA, 21 nt, Human
cugggguggggaccucaggcc

SEQ ID NO: 1656290 - RNA, 22 nt, Human
cugggguggggaccucaggccu

SEQ ID NO: 1656291 - RNA, 23 nt, Human
cugggguggggaccucaggccug

SEQ ID NO: 1656292 - RNA, 20 nt, Human
cuggguacuuguggacacag

SEQ ID NO: 1656293 - RNA, 17 nt, Human
cugggguggggaccuca

SEQ ID NO: 1656294 - RNA, 18 nt, Human
cugggguggggaccucag

SEQ ID NO: 1656295 - RNA, 19 nt, Human
cugggguggggaccucagg

SEQ ID NO: 1656296 - RNA, 13 nt, Human
cugggggccucag

SEQ ID NO: 1656297 - RNA, 17 nt, Human
cugggggccucagugcc

SEQ ID NO: 1656298 - RNA, 18 nt, Human
cugggggccucagugcca

SEQ ID NO: 1656299 - RNA, 19 nt, Human
cugggccccugccucucug

SEQ ID NO: 1656300 - RNA, 18 nt, Human
cugggcuucaguggcagc

SEQ ID NO: 1656301 - RNA, 19 nt, Human
cugggcuucaguggcagcu

SEQ ID NO: 1656302 - RNA, 20 nt, Human
cugggcuucaguggcagcug

SEQ ID NO: 1656303 - RNA, 21 nt, Human
cugggcuucaguggcagcugc

SEQ ID NO: 1656304 - RNA, 22 nt, Human
cugggcuucaguggcagcugcu

SEQ ID NO: 1656305 - RNA, 23 nt, Human
cugggcuucaguggcagcugcuu

SEQ ID NO: 1656306 - RNA, 13 nt, Human
cugggcuugggga

SEQ ID NO: 1656307 - RNA, 17 nt, Human
cugggcuuggggaccag

SEQ ID NO: 1656308 - RNA, 20 nt, Human
cugggcuuggggaccagagc

SEQ ID NO: 1656309 - RNA, 21 nt, Human
cugggcuuggggaccagagcu

SEQ ID NO: 1656310 - RNA, 19 nt, Human
cugggcucccuucccaccu

SEQ ID NO: 1656311 - RNA, 23 nt, Human
cugguggcagugggagcugccug

SEQ ID NO: 1656312 - RNA, 20 nt, Human
cugguggcccgacagccugg

SEQ ID NO: 1656313 - RNA, 13 nt, Human
cuggguuggaaaa

SEQ ID NO: 1656314 - RNA, 18 nt, Human
cuggguuggaaaacagua

SEQ ID NO: 1656315 - RNA, 13 nt, Human
cuggguuggaggg

SEQ ID NO: 1656316 - RNA, 15 nt, Human
cugguccauagagag

SEQ ID NO: 1656317 - RNA, 17 nt, Human
cugguccauagagagca

SEQ ID NO: 1656318 - RNA, 19 nt, Human
cuggguucuacccaggugc

SEQ ID NO: 1656319 - RNA, 18 nt, Human
cugguccauagagagcaa

SEQ ID NO: 1656320 - RNA, 21 nt, Human
cugguccauagagagcaagac

SEQ ID NO: 1656321 - RNA, 15 nt, Human
cuggucccacucagu

SEQ ID NO: 1656322 - RNA, 18 nt, Human
cuggucccacucagucca

SEQ ID NO: 1656323 - RNA, 21 nt, Human
cuggucccagccagcaguuca

SEQ ID NO: 1656324 - RNA, 13 nt, Human
cugcccugcccac

SEQ ID NO: 1656325 - RNA, 14 nt, Human
cugcccugcccacc

SEQ ID NO: 1656326 - RNA, 15 nt, Human
cugcccugcccaccu

SEQ ID NO: 1656327 - RNA, 16 nt, Human
cugcccugcccaccug

SEQ ID NO: 1656328 - RNA, 11 nt, Human
cugcccggcug

SEQ ID NO: 1656329 - RNA, 15 nt, Human
cugcccggcugcgga

SEQ ID NO: 1656330 - RNA, 19 nt, Human
cugcccaggccugccuguu

SEQ ID NO: 1656331 - RNA, 18 nt, Human
cugcccaggccugccugu

SEQ ID NO: 1656332 - RNA, 14 nt, Human
cugccccuggcagc

SEQ ID NO: 1656333 - RNA, 15 nt, Human
cugccccuggcagcc

SEQ ID NO: 1656334 - RNA, 16 nt, Human
cugccccuggcagccc

SEQ ID NO: 1656335 - RNA, 17 nt, Human
cugccccuggcagcccc

SEQ ID NO: 1656336 - RNA, 19 nt, Human
cugcccaaccugcucuccu

SEQ ID NO: 1656337 - RNA, 13 nt, Human
cugcccaggcccc

SEQ ID NO: 1656338 - RNA, 17 nt, Human
cugcccaaccugcucuc

SEQ ID NO: 1656339 - RNA, 16 nt, Human
cugccauuucugagau

SEQ ID NO: 1656340 - RNA, 17 nt, Human
cugccaugccagcuuau

SEQ ID NO: 1656341 - RNA, 19 nt, Human
cugccaugccagcuuaucu

SEQ ID NO: 1656342 - RNA, 19 nt, Human
cugccagccgagauagcca

SEQ ID NO: 1656343 - RNA, 15 nt, Human
cugccaggaagccag

SEQ ID NO: 1656344 - RNA, 16 nt, Human
cugccaggaagccagc

SEQ ID NO: 1656345 - RNA, 18 nt, Human
cugccaggaagccagcag

SEQ ID NO: 1656346 - RNA, 19 nt, Human
cugccaggaagccagcagg

SEQ ID NO: 1656347 - RNA, 13 nt, Human
cugccacacuuca

SEQ ID NO: 1656348 - RNA, 17 nt, Human
cugccacacuucaggcu

SEQ ID NO: 1656349 - RNA, 22 nt, Human
cugccacacuucaggcucuucu

SEQ ID NO: 1656350 - RNA, 19 nt, Human
cugccaccacgcccggcua

SEQ ID NO: 1656351 - RNA, 15 nt, Human
cugccacccugggga

SEQ ID NO: 1656352 - RNA, 16 nt, Human
cugccacccuggggag

SEQ ID NO: 1656353 - RNA, 20 nt, Human
cugccacccuggggagaaag

SEQ ID NO: 1656354 - RNA, 20 nt, Human
cugcggaaugaaccacaucu

SEQ ID NO: 1656355 - RNA, 15 nt, Human
cugcgguccacccag

SEQ ID NO: 1656356 - RNA, 21 nt, Human
cugcggaaugaaccacaucuu

SEQ ID NO: 1656357 - RNA, 17 nt, Human
cugcgguccacccagga

SEQ ID NO: 1656358 - RNA, 16 nt, Human
cugcgguccacccagg

SEQ ID NO: 1656359 - RNA, 14 nt, Human
cugcuccagcuguu

SEQ ID NO: 1656360 - RNA, 15 nt, Human
cugcuccagcuguuc

SEQ ID NO: 1656361 - RNA, 16 nt, Human
cugcuccucuccccag

SEQ ID NO: 1656362 - RNA, 17 nt, Human
cugcuccucuccccagc

SEQ ID NO: 1656363 - RNA, 18 nt, Human
cugcuccucuccccagca

SEQ ID NO: 1656364 - RNA, 12 nt, Human
cugccucucugc

SEQ ID NO: 1656365 - RNA, 13 nt, Human
cugccucucugca

SEQ ID NO: 1656366 - RNA, 14 nt, Human
cugccucucugcag

SEQ ID NO: 1656367 - RNA, 12 nt, Human
cugccucuuccu

SEQ ID NO: 1656368 - RNA, 13 nt, Human
cugccucuucucu

SEQ ID NO: 1656369 - RNA, 14 nt, Human
cugccucuucucua

SEQ ID NO: 1656370 - RNA, 13 nt, Human
cugccugcccagg

SEQ ID NO: 1656371 - RNA, 14 nt, Human
cugccugcccaggc

SEQ ID NO: 1656372 - RNA, 15 nt, Human
cugccugcccaggcc

SEQ ID NO: 1656373 - RNA, 14 nt, Human
cugccucagccucc

SEQ ID NO: 1656374 - RNA, 13 nt, Human
cugccucagccuc

SEQ ID NO: 1656375 - RNA, 15 nt, Human
cugcccugggaggca

SEQ ID NO: 1656376 - RNA, 22 nt, Human
cugcccugggaggcagugaugg

SEQ ID NO: 1656377 - RNA, 12 nt, Human
cugcccugggag

SEQ ID NO: 1656378 - RNA, 13 nt, Human
cugcccugggagg

SEQ ID NO: 1656379 - RNA, 11 nt, Human
cugcccuggga

SEQ ID NO: 1656380 - RNA, 22 nt, Human
cugccuaaggacuucuuuaauu

SEQ ID NO: 1656381 - RNA, 20 nt, Human
cugccuaaggacuucuuuaa

SEQ ID NO: 1656382 - RNA, 21 nt, Human
cugccuaaggacuucuuuaau

SEQ ID NO: 1656383 - RNA, 15 nt, Human
cugccuaagugcagc

SEQ ID NO: 1656384 - RNA, 12 nt, Human
cugacccacugc

SEQ ID NO: 1656385 - RNA, 15 nt, Human
cugagugccuuuugg

SEQ ID NO: 1656386 - RNA, 16 nt, Human
cugagugccuuuuggu

SEQ ID NO: 1656387 - RNA, 22 nt, Human
cugagugggggaucacagccuc

SEQ ID NO: 1656388 - RNA, 13 nt, Human
cugauaaagauga

SEQ ID NO: 1656389 - RNA, 14 nt, Human
cugagugccuuuug

SEQ ID NO: 1656390 - RNA, 17 nt, Human
cugagucugaaggcugg

SEQ ID NO: 1656391 - RNA, 13 nt, Human
cugagucugaagg

SEQ ID NO: 1656392 - RNA, 14 nt, Human
cugagucugaaggc

SEQ ID NO: 1656393 - RNA, 15 nt, Human
cugagucugaaggcu

SEQ ID NO: 1656394 - RNA, 16 nt, Human
cugagucugaaggcug

SEQ ID NO: 1656395 - RNA, 20 nt, Human
cugauccaguuuuguuugga

SEQ ID NO: 1656396 - RNA, 20 nt, Human
cugauagaggaagccugauu

SEQ ID NO: 1656397 - RNA, 21 nt, Human
cugauaaagaugagugagcau

SEQ ID NO: 1656398 - RNA, 14 nt, Human
cugaucucucguga

SEQ ID NO: 1656399 - RNA, 22 nt, Human
cugauucccaagcucugcuccu

SEQ ID NO: 1656400 - RNA, 19 nt, Human
cugauucccaagcucugcu

SEQ ID NO: 1656401 - RNA, 20 nt, Human
cugauucccaagcucugcuc

SEQ ID NO: 1656402 - RNA, 15 nt, Human
cugauucccaagcuc

SEQ ID NO: 1656403 - RNA, 17 nt, Human
cugauucccaagcucug

SEQ ID NO: 1656404 - RNA, 18 nt, Human
cugauucccaagcucugc

SEQ ID NO: 1656405 - RNA, 13 nt, Human
cugauguuccuag

SEQ ID NO: 1656406 - RNA, 18 nt, Human
cugauguuccuagugaaa

SEQ ID NO: 1656407 - RNA, 20 nt, Human
cugauguuccuagugaaaga

SEQ ID NO: 1656408 - RNA, 21 nt, Human
cugauguuccuagugaaagag

SEQ ID NO: 1656409 - RNA, 15 nt, Human
cugcagggacugcca

SEQ ID NO: 1656410 - RNA, 17 nt, Human
cugcagggacugccagu

SEQ ID NO: 1656411 - RNA, 16 nt, Human
cugcagggccaagcac

SEQ ID NO: 1656412 - RNA, 22 nt, Human
cugcagggaguccgaaagggac

SEQ ID NO: 1656413 - RNA, 22 nt, Human
cugcagccucaaccuccugggc

SEQ ID NO: 1656414 - RNA, 19 nt, Human
cugcagccucaaccuccug

SEQ ID NO: 1656415 - RNA, 20 nt, Human
cugcagccucaaccuccugg

SEQ ID NO: 1656416 - RNA, 11 nt, Human
cugcagccuca

SEQ ID NO: 1656417 - RNA, 14 nt, Human
cugcacuugcagac

SEQ ID NO: 1656418 - RNA, 16 nt, Human
cugcacuugcagacuc

SEQ ID NO: 1656419 - RNA, 17 nt, Human
cugcacuugcagacucu

SEQ ID NO: 1656420 - RNA, 17 nt, Human
cugcaccggcuggccug

SEQ ID NO: 1656421 - RNA, 18 nt, Human
cugcaccggcuggccugg

SEQ ID NO: 1656422 - RNA, 19 nt, Human
cugcaccggcuggccuggc

SEQ ID NO: 1656423 - RNA, 20 nt, Human
cugcaccggcuggccuggcc

SEQ ID NO: 1656424 - RNA, 20 nt, Human
cugcagagcaggaaacauga

SEQ ID NO: 1656425 - RNA, 23 nt, Human
cugcagaagacaguauggcagcu

SEQ ID NO: 1656426 - RNA, 13 nt, Human
cugcagaagacag

SEQ ID NO: 1656427 - RNA, 21 nt, Human
cugcacagugcaucucagccc

SEQ ID NO: 1656428 - RNA, 22 nt, Human
cugcacagugcaucucagccca

SEQ ID NO: 1656429 - RNA, 17 nt, Human
cugcacccucaggcagg

SEQ ID NO: 1656430 - RNA, 18 nt, Human
cugcacccucaggcaggu

SEQ ID NO: 1656431 - RNA, 18 nt, Human
cugcacagugcaucucag

SEQ ID NO: 1656432 - RNA, 18 nt, Human
cugcacaagcugcacccu

SEQ ID NO: 1656433 - RNA, 13 nt, Human
cugcacaagcugc

SEQ ID NO: 1656434 - RNA, 14 nt, Human
cugcacaagcugca

SEQ ID NO: 1656435 - RNA, 15 nt, Human
cugcacaagcugcac

SEQ ID NO: 1656436 - RNA, 16 nt, Human
cugcacaagcugcacc

SEQ ID NO: 1656437 - RNA, 15 nt, Human
cugauucuucagcaa

SEQ ID NO: 1656438 - RNA, 18 nt, Human
cugcacaaagcccuucca

SEQ ID NO: 1656439 - RNA, 20 nt, Human
cugcacaaagcccuuccaug

SEQ ID NO: 1656440 - RNA, 21 nt, Human
cugcacaaagcccuuccaugu

SEQ ID NO: 1656441 - RNA, 13 nt, Human
cugcacaaagccc

SEQ ID NO: 1656442 - RNA, 22 nt, Human
cugcaaucuucucagaaggcaa

SEQ ID NO: 1656443 - RNA, 18 nt, Human
cugcaaugaagucucuga

SEQ ID NO: 1656444 - RNA, 21 nt, Human
cugcaaugaagucucugaagu

SEQ ID NO: 1656445 - RNA, 12 nt, Human
ccuaccugguaa

SEQ ID NO: 1656446 - RNA, 14 nt, Human
ccuaauuccacagc

SEQ ID NO: 1656447 - RNA, 15 nt, Human
ccuaauuccacagcu

SEQ ID NO: 1656448 - RNA, 16 nt, Human
ccuaauuccacagcug

SEQ ID NO: 1656449 - RNA, 17 nt, Human
ccuaauuccacagcugc

SEQ ID NO: 1656450 - RNA, 12 nt, Human
ccuaaagagaua

SEQ ID NO: 1656451 - RNA, 14 nt, Human
ccuaaaguguauuu

SEQ ID NO: 1656452 - RNA, 15 nt, Human
ccguggcuucccgcu

SEQ ID NO: 1656453 - RNA, 21 nt, Human
ccguggcuucccgcucagccc

SEQ ID NO: 1656454 - RNA, 23 nt, Human
ccguggcuucccgcucagcccuc

SEQ ID NO: 1656455 - RNA, 13 nt, Human
ccgugcuaaggac

SEQ ID NO: 1656456 - RNA, 16 nt, Human
ccgugccuucagcucu

SEQ ID NO: 1656457 - RNA, 17 nt, Human
ccgugccuucagcucua

SEQ ID NO: 1656458 - RNA, 14 nt, Human
ccgugccuucagcu

SEQ ID NO: 1656459 - RNA, 15 nt, Human
ccgugccuucagcuc

SEQ ID NO: 1656460 - RNA, 19 nt, Human
ccgggccuggagaacuaga

SEQ ID NO: 1656461 - RNA, 20 nt, Human
ccgggcacucagaagacacu

SEQ ID NO: 1656462 - RNA, 12 nt, Human
ccggcugcccuu

SEQ ID NO: 1656463 - RNA, 12 nt, Human
ccggcuggccug

SEQ ID NO: 1656464 - RNA, 13 nt, Human
ccggcuggccugg

SEQ ID NO: 1656465 - RNA, 15 nt, Human
ccggcuggccuggcc

SEQ ID NO: 1656466 - RNA, 15 nt, Human
ccgggcacucagaag

SEQ ID NO: 1656467 - RNA, 11 nt, Human
ccggaagccaa

SEQ ID NO: 1656468 - RNA, 22 nt, Human
ccggaagccaaaccucugugag

SEQ ID NO: 1656469 - RNA, 17 nt, Human
ccuaucagaaguuucuc

SEQ ID NO: 1656470 - RNA, 17 nt, Human
ccucacaguccuuacca

SEQ ID NO: 1656471 - RNA, 15 nt, Human
ccucaccccacugug

SEQ ID NO: 1656472 - RNA, 21 nt, Human
ccucacccacccuuuuuuaaa

SEQ ID NO: 1656473 - RNA, 12 nt, Human
ccucaccccacu

SEQ ID NO: 1656474 - RNA, 20 nt, Human
ccucacaguccuuaccagca

SEQ ID NO: 1656475 - RNA, 22 nt, Human
ccucacaguccuuaccagcaga

SEQ ID NO: 1656476 - RNA, 17 nt, Human
ccucaccuuucccaucu

SEQ ID NO: 1656477 - RNA, 17 nt, Human
ccccucagggucccugg

SEQ ID NO: 1656478 - RNA, 18 nt, Human
ccccucagggucccuggu

SEQ ID NO: 1656479 - RNA, 20 nt, Human
ccccucagggucccuggugg

SEQ ID NO: 1656480 - RNA, 21 nt, Human
cccugguuuccugcccuggga

SEQ ID NO: 1656481 - RNA, 21 nt, Human
cccugguggcagugggagcug

SEQ ID NO: 1656482 - RNA, 16 nt, Human
cccugguggcaguggg

SEQ ID NO: 1656483 - RNA, 19 nt, Human
cccugguggcagugggagc

SEQ ID NO: 1656484 - RNA, 22 nt, Human
cccugguuuccugcccugggag

SEQ ID NO: 1656485 - RNA, 23 nt, Human
cccugguuuccugcccugggagg

SEQ ID NO: 1656486 - RNA, 21 nt, Human
cccuguagagugggagcugag

SEQ ID NO: 1656487 - RNA, 16 nt, Human
cccugugggcccccaa

SEQ ID NO: 1656488 - RNA, 18 nt, Human
cccugugggcccccaaau

SEQ ID NO: 1656489 - RNA, 15 nt, Human
cccuguuuguuucug

SEQ ID NO: 1656490 - RNA, 16 nt, Human
cccuguuuguuucuga

SEQ ID NO: 1656491 - RNA, 16 nt, Human
cccccaucucuucugg

SEQ ID NO: 1656492 - RNA, 12 nt, Human
cccccagcccca

SEQ ID NO: 1656493 - RNA, 16 nt, Human
ccccgucccccucugg

SEQ ID NO: 1656494 - RNA, 20 nt, Human
ccccgucccccucuggcucc

SEQ ID NO: 1656495 - RNA, 21 nt, Human
ccccgucucugguuccucccc

SEQ ID NO: 1656496 - RNA, 13 nt, Human
cccccucugcccu

SEQ ID NO: 1656497 - RNA, 14 nt, Human
cccccucugcccug

SEQ ID NO: 1656498 - RNA, 16 nt, Human
cccccucugcccugcg

SEQ ID NO: 1656499 - RNA, 21 nt, Human
cccccgcugucagccauuccu

SEQ ID NO: 1656500 - RNA, 12 nt, Human
ccccacugguga

SEQ ID NO: 1656501 - RNA, 13 nt, Human
ccccacuggugac

SEQ ID NO: 1656502 - RNA, 14 nt, Human
ccccacuggugaca

SEQ ID NO: 1656503 - RNA, 13 nt, Human
ccccaggaggcca

SEQ ID NO: 1656504 - RNA, 14 nt, Human
ccccaggaggccag

SEQ ID NO: 1656505 - RNA, 15 nt, Human
ccccaggaggccagc

SEQ ID NO: 1656506 - RNA, 21 nt, Human
ccccaggaggccagccuugac

SEQ ID NO: 1656507 - RNA, 22 nt, Human
ccccaggaggccagccuugacc

SEQ ID NO: 1656508 - RNA, 23 nt, Human
cccccaaccaaguggcucccaca

SEQ ID NO: 1656509 - RNA, 19 nt, Human
cccuuuuuuggcugcugaa

SEQ ID NO: 1656510 - RNA, 17 nt, Human
ccgagaaggaagccucc

SEQ ID NO: 1656511 - RNA, 19 nt, Human
ccgagauagccaaggccaa

SEQ ID NO: 1656512 - RNA, 22 nt, Human
ccgagauagccaaggccaaagg

SEQ ID NO: 1656513 - RNA, 17 nt, Human
cccuuuuuuggcugcug

SEQ ID NO: 1656514 - RNA, 18 nt, Human
cccuuuuuuggcugcuga

SEQ ID NO: 1656515 - RNA, 11 nt, Human
cccuuuuccuu

SEQ ID NO: 1656516 - RNA, 13 nt, Human
cccuuuucuguuu

SEQ ID NO: 1656517 - RNA, 22 nt, Human
ccgagucucuucuccacuggau

SEQ ID NO: 1656518 - RNA, 18 nt, Human
ccgagaucacgccacugc

SEQ ID NO: 1656519 - RNA, 20 nt, Human
cccuuguggucccaccccac

SEQ ID NO: 1656520 - RNA, 18 nt, Human
cccuuguggucccacccc

SEQ ID NO: 1656521 - RNA, 18 nt, Human
cccuuggggagcaggcuc

SEQ ID NO: 1656522 - RNA, 14 nt, Human
cccuugugguccca

SEQ ID NO: 1656523 - RNA, 16 nt, Human
cccuuguggucccacc

SEQ ID NO: 1656524 - RNA, 22 nt, Human
cccuuucugggcaccggggccu

SEQ ID NO: 1656525 - RNA, 20 nt, Human
cccuuugacgccaucccagc

SEQ ID NO: 1656526 - RNA, 22 nt, Human
cccuugccgucuaccugagggg

SEQ ID NO: 1656527 - RNA, 17 nt, Human
cccuugccgucuaccug

SEQ ID NO: 1656528 - RNA, 18 nt, Human
cccuugccgucuaccuga

SEQ ID NO: 1656529 - RNA, 13 nt, Human
cccuuccucucca

SEQ ID NO: 1656530 - RNA, 17 nt, Human
cccuuaccacugcucug

SEQ ID NO: 1656531 - RNA, 21 nt, Human
cccuuaccacugcucugauga

SEQ ID NO: 1656532 - RNA, 19 nt, Human
cccuuaccucggugccuuc

SEQ ID NO: 1656533 - RNA, 16 nt, Human
cccuuccucuccacug

SEQ ID NO: 1656534 - RNA, 17 nt, Human
cccuuccucuccacugc

SEQ ID NO: 1656535 - RNA, 21 nt, Human
cccuuccucuccacugccuuc

SEQ ID NO: 1656536 - RNA, 20 nt, Human
cccuuccucuccacugccuu

SEQ ID NO: 1656537 - RNA, 16 nt, Human
cccuugaugaagaagu

SEQ ID NO: 1656538 - RNA, 22 nt, Human
ccucugcacuccccugcugggu

SEQ ID NO: 1656539 - RNA, 14 nt, Human
ccucugcacucccc

SEQ ID NO: 1656540 - RNA, 15 nt, Human
ccucugcacuccccu

SEQ ID NO: 1656541 - RNA, 20 nt, Human
ccucugcacuccccugcugg

SEQ ID NO: 1656542 - RNA, 21 nt, Human
ccucugcacuccccugcuggg

SEQ ID NO: 1656543 - RNA, 20 nt, Human
ccucugcacaagcugcaccc

SEQ ID NO: 1656544 - RNA, 17 nt, Human
ccucugcacaagcugca

SEQ ID NO: 1656545 - RNA, 19 nt, Human
ccucugcacaagcugcacc

SEQ ID NO: 1656546 - RNA, 17 nt, Human
ccucugacacacagcuc

SEQ ID NO: 1656547 - RNA, 18 nt, Human
ccucugacacacagcucu

SEQ ID NO: 1656548 - RNA, 11 nt, Human
ccucugcacaa

SEQ ID NO: 1656549 - RNA, 15 nt, Human
ccucugcacaagcug

SEQ ID NO: 1656550 - RNA, 16 nt, Human
ccucuggcuccagcug

SEQ ID NO: 1656551 - RNA, 17 nt, Human
ccucuggcuccagcugg

SEQ ID NO: 1656552 - RNA, 12 nt, Human
ccucugggacug

SEQ ID NO: 1656553 - RNA, 21 nt, Human
ccucugcuugccaucccuccc

SEQ ID NO: 1656554 - RNA, 20 nt, Human
ccucugcuugccaucccucc

SEQ ID NO: 1656555 - RNA, 18 nt, Human
ccuccuuaucaaaggaca

SEQ ID NO: 1656556 - RNA, 20 nt, Human
ccuccuuaucaaaggacacc

SEQ ID NO: 1656557 - RNA, 23 nt, Human
ccuccugugugugcgccuacagg

SEQ ID NO: 1656558 - RNA, 12 nt, Human
ccucuccacugc

SEQ ID NO: 1656559 - RNA, 13 nt, Human
ccucuccacugcc

SEQ ID NO: 1656560 - RNA, 14 nt, Human
ccucuccacugccu

SEQ ID NO: 1656561 - RNA, 16 nt, Human
ccucuccacugccuuc

SEQ ID NO: 1656562 - RNA, 19 nt, Human
ccucuccacugccuucgau

SEQ ID NO: 1656563 - RNA, 12 nt, Human
ccucucccauca

SEQ ID NO: 1656564 - RNA, 23 nt, Human
ccucugaaaaccaauguucucuc

SEQ ID NO: 1656565 - RNA, 16 nt, Human
ccucugacacacagcu

SEQ ID NO: 1656566 - RNA, 13 nt, Human
ccucuccugggca

SEQ ID NO: 1656567 - RNA, 12 nt, Human
ccucuccugggc

SEQ ID NO: 1656568 - RNA, 11 nt, Human
ccucuccuggg

SEQ ID NO: 1656569 - RNA, 13 nt, Human
ccucucugcccua

SEQ ID NO: 1656570 - RNA, 14 nt, Human
ccucuccugggcag

SEQ ID NO: 1656571 - RNA, 13 nt, Human
ccuccuggacucc

SEQ ID NO: 1656572 - RNA, 17 nt, Human
ccuccugggaaugaagc

SEQ ID NO: 1656573 - RNA, 13 nt, Human
ccuccugggcuaa

SEQ ID NO: 1656574 - RNA, 13 nt, Human
ccuccugugugug

SEQ ID NO: 1656575 - RNA, 15 nt, Human
ccuccugugugugcg

SEQ ID NO: 1656576 - RNA, 22 nt, Human
ccuccugugugugcgccuacag

SEQ ID NO: 1656577 - RNA, 14 nt, Human
ccuccuccuggacu

SEQ ID NO: 1656578 - RNA, 13 nt, Human
ccuccugccucga

SEQ ID NO: 1656579 - RNA, 11 nt, Human
ccuccucugcu

SEQ ID NO: 1656580 - RNA, 16 nt, Human
ccucccggugcccaag

SEQ ID NO: 1656581 - RNA, 13 nt, Human
ccucccucccucu

SEQ ID NO: 1656582 - RNA, 15 nt, Human
ccucccucccucuuu

SEQ ID NO: 1656583 - RNA, 13 nt, Human
ccucccggugccc

SEQ ID NO: 1656584 - RNA, 18 nt, Human
ccuccccuccucugcuug

SEQ ID NO: 1656585 - RNA, 17 nt, Human
ccuccccuccucugcuu

SEQ ID NO: 1656586 - RNA, 13 nt, Human
ccucccugccccu

SEQ ID NO: 1656587 - RNA, 16 nt, Human
ccucccucccucuuuc

SEQ ID NO: 1656588 - RNA, 16 nt, Human
ccucccugcaauaaaa

SEQ ID NO: 1656589 - RNA, 12 nt, Human
ccucccugcaau

SEQ ID NO: 1656590 - RNA, 11 nt, Human
ccucaggccug

SEQ ID NO: 1656591 - RNA, 14 nt, Human
ccucaggccugggg

SEQ ID NO: 1656592 - RNA, 21 nt, Human
ccucaggccugggggcugggc

SEQ ID NO: 1656593 - RNA, 23 nt, Human
ccucaggccugggggcugggcag

SEQ ID NO: 1656594 - RNA, 14 nt, Human
ccucagggucccug

SEQ ID NO: 1656595 - RNA, 16 nt, Human
ccucagcauccuggca

SEQ ID NO: 1656596 - RNA, 17 nt, Human
ccucagcauccuggcac

SEQ ID NO: 1656597 - RNA, 22 nt, Human
ccucacuaucccggcugcccuu

SEQ ID NO: 1656598 - RNA, 21 nt, Human
ccucacuaggcuucugguuga

SEQ ID NO: 1656599 - RNA, 21 nt, Human
ccucacuaucccggcugcccu

SEQ ID NO: 1656600 - RNA, 20 nt, Human
ccucagaaaacaaggaugaa

SEQ ID NO: 1656601 - RNA, 22 nt, Human
ccucaggugauccacccaccuc

SEQ ID NO: 1656602 - RNA, 17 nt, Human
ccucaggugauccaccc

SEQ ID NO: 1656603 - RNA, 19 nt, Human
ccucaggugauccacccac

SEQ ID NO: 1656604 - RNA, 22 nt, Human
ccucagguaaucgaccugccuc

SEQ ID NO: 1656605 - RNA, 23 nt, Human
ccucagguaaucgaccugccucg

SEQ ID NO: 1656606 - RNA, 16 nt, Human
ccucaggugagaagca

SEQ ID NO: 1656607 - RNA, 21 nt, Human
ccucagguaaucgaccugccu

SEQ ID NO: 1656608 - RNA, 15 nt, Human
ccucagggucccugg

SEQ ID NO: 1656609 - RNA, 15 nt, Human
ccucagucuggcccu

SEQ ID NO: 1656610 - RNA, 19 nt, Human
ccucagucuggcccuuccu

SEQ ID NO: 1656611 - RNA, 14 nt, Human
ccucagucucccuc

SEQ ID NO: 1656612 - RNA, 15 nt, Human
ccuccccuccucugc

SEQ ID NO: 1656613 - RNA, 23 nt, Human
ccugacaacacucauugaccuga

SEQ ID NO: 1656614 - RNA, 12 nt, Human
ccugaggcccag

SEQ ID NO: 1656615 - RNA, 13 nt, Human
ccugaggcccaga

SEQ ID NO: 1656616 - RNA, 14 nt, Human
ccugaggcccagag

SEQ ID NO: 1656617 - RNA, 12 nt, Human
ccugacaacacu

SEQ ID NO: 1656618 - RNA, 14 nt, Human
ccugacaacacuca

SEQ ID NO: 1656619 - RNA, 15 nt, Human
ccugacaacacucau

SEQ ID NO: 1656620 - RNA, 16 nt, Human
ccugacaacacucauu

SEQ ID NO: 1656621 - RNA, 23 nt, Human
ccugaggcccuucucuccagccc

SEQ ID NO: 1656622 - RNA, 21 nt, Human
ccugaggcccuucucuccagc

SEQ ID NO: 1656623 - RNA, 22 nt, Human
ccugaggcccuucucuccagcc

SEQ ID NO: 1656624 - RNA, 16 nt, Human
ccugaggcccuucucu

SEQ ID NO: 1656625 - RNA, 17 nt, Human
ccugaggcccuucucuc

SEQ ID NO: 1656626 - RNA, 19 nt, Human
ccugaggcccuucucucca

SEQ ID NO: 1656627 - RNA, 20 nt, Human
ccugaggcccuucucuccag

SEQ ID NO: 1656628 - RNA, 17 nt, Human
ccugaugcuucuucaga

SEQ ID NO: 1656629 - RNA, 18 nt, Human
ccugaugcuucuucagag

SEQ ID NO: 1656630 - RNA, 12 nt, Human
ccugauuaaaga

SEQ ID NO: 1656631 - RNA, 13 nt, Human
ccugauuaaagaa

SEQ ID NO: 1656632 - RNA, 23 nt, Human
ccugauugugucucuugguccug

SEQ ID NO: 1656633 - RNA, 14 nt, Human
ccugaugcuucuuc

SEQ ID NO: 1656634 - RNA, 18 nt, Human
ccugaggcuccacuuggu

SEQ ID NO: 1656635 - RNA, 20 nt, Human
ccugaggcuccacuuggucu

SEQ ID NO: 1656636 - RNA, 17 nt, Human
ccucuguccaggcacug

SEQ ID NO: 1656637 - RNA, 14 nt, Human
ccucuguacagagc

SEQ ID NO: 1656638 - RNA, 15 nt, Human
ccucuguacagagcc

SEQ ID NO: 1656639 - RNA, 16 nt, Human
ccucuguacagagccc

SEQ ID NO: 1656640 - RNA, 17 nt, Human
ccucuguacagagccca

SEQ ID NO: 1656641 - RNA, 18 nt, Human
ccucuguacagagcccac

SEQ ID NO: 1656642 - RNA, 23 nt, Human
ccucuguacagagcccacgcccc

SEQ ID NO: 1656643 - RNA, 21 nt, Human
ccucuguucugcacacagcac

SEQ ID NO: 1656644 - RNA, 14 nt, Human
ccucuuagaaaaac

SEQ ID NO: 1656645 - RNA, 15 nt, Human
ccucuuaugggcugg

SEQ ID NO: 1656646 - RNA, 16 nt, Human
ccucuuaugggcuggg

SEQ ID NO: 1656647 - RNA, 14 nt, Human
ccucuuaugggcug

SEQ ID NO: 1656648 - RNA, 23 nt, Human
ccucuuagaugcaguucugaaga

SEQ ID NO: 1656649 - RNA, 14 nt, Human
ccugaaggccccgc

SEQ ID NO: 1656650 - RNA, 19 nt, Human
ccugaagucacacagugag

SEQ ID NO: 1656651 - RNA, 13 nt, Human
ccugaaggccccg

SEQ ID NO: 1656652 - RNA, 15 nt, Human
ccugaagucacacag

SEQ ID NO: 1656653 - RNA, 16 nt, Human
ccugaagucacacagu

SEQ ID NO: 1656654 - RNA, 17 nt, Human
ccugaagucacacagug

SEQ ID NO: 1656655 - RNA, 20 nt, Human
ccugaacaggauauucucac

SEQ ID NO: 1656656 - RNA, 22 nt, Human
ccugaagcuaucguaaaauuaa

SEQ ID NO: 1656657 - RNA, 23 nt, Human
ccugaagcuaucguaaaauuaag

SEQ ID NO: 1656658 - RNA, 21 nt, Human
ccugaagacucauucuucugu

SEQ ID NO: 1656659 - RNA, 20 nt, Human
ccugaagcuaucguaaaauu

SEQ ID NO: 1656660 - RNA, 17 nt, Human
ccucuuaugggcugggu

SEQ ID NO: 1656661 - RNA, 15 nt, Human
ccucuuccucccuca

SEQ ID NO: 1656662 - RNA, 16 nt, Human
ccucuuccucccucau

SEQ ID NO: 1656663 - RNA, 19 nt, Human
ccucuuccucccucauucc

SEQ ID NO: 1656664 - RNA, 22 nt, Human
ccucuuuggucuacacugugcu

SEQ ID NO: 1656665 - RNA, 18 nt, Human
ccugaaagaggaaugaag

SEQ ID NO: 1656666 - RNA, 23 nt, Human
ccugaaagaggaaugaaguacuc

SEQ ID NO: 1656667 - RNA, 21 nt, Human
ccuggcagccgugccuucagc

SEQ ID NO: 1656668 - RNA, 15 nt, Human
ccugcuuucagauac

SEQ ID NO: 1656669 - RNA, 16 nt, Human
ccugcuuucagauacu

SEQ ID NO: 1656670 - RNA, 21 nt, Human
ccugcuuucagauacuggauu

SEQ ID NO: 1656671 - RNA, 17 nt, Human
ccugcuuugggcugccc

SEQ ID NO: 1656672 - RNA, 18 nt, Human
ccugcuuugggcugcccu

SEQ ID NO: 1656673 - RNA, 19 nt, Human
ccugcuuugggcugcccug

SEQ ID NO: 1656674 - RNA, 20 nt, Human
ccugcuuuuuauggccugug

SEQ ID NO: 1656675 - RNA, 13 nt, Human
ccugcugguucag

SEQ ID NO: 1656676 - RNA, 19 nt, Human
ccugcugguucaggguugg

SEQ ID NO: 1656677 - RNA, 18 nt, Human
ccugcaacaccuuguuuc

SEQ ID NO: 1656678 - RNA, 19 nt, Human
ccugcaacaccuuguuucc

SEQ ID NO: 1656679 - RNA, 16 nt, Human
ccugcaaccugauugu

SEQ ID NO: 1656680 - RNA, 23 nt, Human
ccugcgucucauacucaccucac

SEQ ID NO: 1656681 - RNA, 17 nt, Human
ccugcuaauuccccaga

SEQ ID NO: 1656682 - RNA, 12 nt, Human
ccugcuccagcu

SEQ ID NO: 1656683 - RNA, 13 nt, Human
ccugcuccagcug

SEQ ID NO: 1656684 - RNA, 14 nt, Human
ccugcuccagcugu

SEQ ID NO: 1656685 - RNA, 22 nt, Human
ccugcuccagcuguucagcugg

SEQ ID NO: 1656686 - RNA, 14 nt, Human
ccuggacuccugca

SEQ ID NO: 1656687 - RNA, 17 nt, Human
ccuggacugugugcuca

SEQ ID NO: 1656688 - RNA, 20 nt, Human
ccuggacugugugcucagga

SEQ ID NO: 1656689 - RNA, 13 nt, Human
ccuggacccugug

SEQ ID NO: 1656690 - RNA, 14 nt, Human
ccuggacccugugg

SEQ ID NO: 1656691 - RNA, 20 nt, Human
ccuggcacugcuuccaguga

SEQ ID NO: 1656692 - RNA, 17 nt, Human
ccuggcacugcuuccag

SEQ ID NO: 1656693 - RNA, 16 nt, Human
ccuggcagccccuguu

SEQ ID NO: 1656694 - RNA, 21 nt, Human
ccuggcacugcuuccagugag

SEQ ID NO: 1656695 - RNA, 12 nt, Human
ccuggcagccgu

SEQ ID NO: 1656696 - RNA, 18 nt, Human
ccuggcagccgugccuuc

SEQ ID NO: 1656697 - RNA, 19 nt, Human
ccuggcagccgugccuuca

SEQ ID NO: 1656698 - RNA, 16 nt, Human
ccuggcaugggaauga

SEQ ID NO: 1656699 - RNA, 17 nt, Human
ccuggcaugggaaugaa

SEQ ID NO: 1656700 - RNA, 12 nt, Human
ccuggcggggug

SEQ ID NO: 1656701 - RNA, 14 nt, Human
ccuggccuuucaua

SEQ ID NO: 1656702 - RNA, 14 nt, Human
ccuggccccucagg

SEQ ID NO: 1656703 - RNA, 16 nt, Human
ccuggccccucagggu

SEQ ID NO: 1656704 - RNA, 15 nt, Human
ccuggccuuucauau

SEQ ID NO: 1656705 - RNA, 18 nt, Human
ccuggcaugggaaugaau

SEQ ID NO: 1656706 - RNA, 23 nt, Human
ccuggcaugggaaugaaugucag

SEQ ID NO: 1656707 - RNA, 13 nt, Human
ccugggaggcagu

SEQ ID NO: 1656708 - RNA, 13 nt, Human
ccugggaggcucu

SEQ ID NO: 1656709 - RNA, 21 nt, Human
ccugggaggcucuggagccca

SEQ ID NO: 1656710 - RNA, 20 nt, Human
ccugggaggucaaggcugca

SEQ ID NO: 1656711 - RNA, 16 nt, Human
ccugggaucccucauc

SEQ ID NO: 1656712 - RNA, 20 nt, Human
ccugggaucccucauccuca

SEQ ID NO: 1656713 - RNA, 12 nt, Human
ccugggcagaag

SEQ ID NO: 1656714 - RNA, 14 nt, Human
ccugggcagaagga

SEQ ID NO: 1656715 - RNA, 15 nt, Human
ccugggcagaaggaa

SEQ ID NO: 1656716 - RNA, 18 nt, Human
ccugggcagcugccuccc

SEQ ID NO: 1656717 - RNA, 17 nt, Human
ccugggcagcugccucc

SEQ ID NO: 1656718 - RNA, 16 nt, Human
ccugggcagcugccuc

SEQ ID NO: 1656719 - RNA, 15 nt, Human
ccugggcagcugccu

SEQ ID NO: 1656720 - RNA, 22 nt, Human
ccugugagcuaggaauuguguu

SEQ ID NO: 1656721 - RNA, 20 nt, Human
ccugugaguacuacaguccu

SEQ ID NO: 1656722 - RNA, 17 nt, Human
ccugucccccugacaac

SEQ ID NO: 1656723 - RNA, 18 nt, Human
ccuguccccgcacugggc

SEQ ID NO: 1656724 - RNA, 19 nt, Human
ccugugccucugggacugg

SEQ ID NO: 1656725 - RNA, 15 nt, Human
ccugugccucuggga

SEQ ID NO: 1656726 - RNA, 17 nt, Human
ccugugccucugggacu

SEQ ID NO: 1656727 - RNA, 22 nt, Human
ccugugauggggcccugccucc

SEQ ID NO: 1656728 - RNA, 20 nt, Human
ccugugauggggcccugccu

SEQ ID NO: 1656729 - RNA, 21 nt, Human
ccugugauggggcccugccuc

SEQ ID NO: 1656730 - RNA, 17 nt, Human
ccugugauggggcccug

SEQ ID NO: 1656731 - RNA, 18 nt, Human
ccugugauggggcccugc

SEQ ID NO: 1656732 - RNA, 19 nt, Human
ccugugauggggcccugcc

SEQ ID NO: 1656733 - RNA, 22 nt, Human
ccugggcagcugccuccccucc

SEQ ID NO: 1656734 - RNA, 21 nt, Human
ccuguagagugggagcugagu

SEQ ID NO: 1656735 - RNA, 23 nt, Human
ccuguagagugggagcugagugg

SEQ ID NO: 1656736 - RNA, 14 nt, Human
ccugguggcagcuc

SEQ ID NO: 1656737 - RNA, 16 nt, Human
ccugguggcagcucac

SEQ ID NO: 1656738 - RNA, 17 nt, Human
ccugguggcagcucacc

SEQ ID NO: 1656739 - RNA, 18 nt, Human
ccugguggcagcucaccu

SEQ ID NO: 1656740 - RNA, 20 nt, Human
ccuguaauccuagcacuuug

SEQ ID NO: 1656741 - RNA, 12 nt, Human
ccugguggcagc

SEQ ID NO: 1656742 - RNA, 13 nt, Human
ccugguggcagcu

SEQ ID NO: 1656743 - RNA, 18 nt, Human
ccuggugcugccacacuu

SEQ ID NO: 1656744 - RNA, 21 nt, Human
ccuggugcugccacacuucag

SEQ ID NO: 1656745 - RNA, 15 nt, Human
ccuggugcugccaca

SEQ ID NO: 1656746 - RNA, 20 nt, Human
ccugggcagcugccuccccu

SEQ ID NO: 1656747 - RNA, 20 nt, Human
ccuucagugccuuauggaac

SEQ ID NO: 1656748 - RNA, 15 nt, Human
ccuucagugccuuau

SEQ ID NO: 1656749 - RNA, 10 nt, Human
ccuucagugc

SEQ ID NO: 1656750 - RNA, 13 nt, Human
ccuucagugccuu

SEQ ID NO: 1656751 - RNA, 14 nt, Human
ccuucagugccuua

SEQ ID NO: 1656752 - RNA, 15 nt, Human
ccuuccagggguggg

SEQ ID NO: 1656753 - RNA, 16 nt, Human
ccuuccagggguggga

SEQ ID NO: 1656754 - RNA, 19 nt, Human
ccuuccaugucgccucugc

SEQ ID NO: 1656755 - RNA, 20 nt, Human
ccuuccaugucgccucugca

SEQ ID NO: 1656756 - RNA, 21 nt, Human
ccuuccaugucgccucugcau

SEQ ID NO: 1656757 - RNA, 23 nt, Human
ccuuccaugucgccucugcauuc

SEQ ID NO: 1656758 - RNA, 18 nt, Human
ccuuccaggggugggaca

SEQ ID NO: 1656759 - RNA, 22 nt, Human
ccuuccaggggugggacacccu

SEQ ID NO: 1656760 - RNA, 20 nt, Human
ccuucgauacaccgggccug

SEQ ID NO: 1656761 - RNA, 22 nt, Human
ccuucgauacaccgggccugga

SEQ ID NO: 1656762 - RNA, 23 nt, Human
ccuucgauacaccgggccuggag

SEQ ID NO: 1656763 - RNA, 13 nt, Human
ccuucgccaccug

SEQ ID NO: 1656764 - RNA, 14 nt, Human
ccuuccucuuucca

SEQ ID NO: 1656765 - RNA, 14 nt, Human
ccuuaccagcagag

SEQ ID NO: 1656766 - RNA, 17 nt, Human
ccuuaccagcagagcac

SEQ ID NO: 1656767 - RNA, 15 nt, Human
ccuuaccagcagagc

SEQ ID NO: 1656768 - RNA, 16 nt, Human
ccuuaccagcagagca

SEQ ID NO: 1656769 - RNA, 20 nt, Human
ccuuaccucggugccuuccu

SEQ ID NO: 1656770 - RNA, 14 nt, Human
ccuuaccugccagg

SEQ ID NO: 1656771 - RNA, 15 nt, Human
ccuucaaagcaaaug

SEQ ID NO: 1656772 - RNA, 19 nt, Human
ccuucaaagcaaaugucuu

SEQ ID NO: 1656773 - RNA, 14 nt, Human
ccuucaaccauucc

SEQ ID NO: 1656774 - RNA, 21 nt, Human
ccuuagacagucccugccaau

SEQ ID NO: 1656775 - RNA, 18 nt, Human
ccuuagacagucccugcc

SEQ ID NO: 1656776 - RNA, 19 nt, Human
ccuuagacagucccugcca

SEQ ID NO: 1656777 - RNA, 14 nt, Human
ccuuagaaccuuuc

SEQ ID NO: 1656778 - RNA, 15 nt, Human
ccuuagaaccuuucu

SEQ ID NO: 1656779 - RNA, 16 nt, Human
ccuuagaaccuuucuu

SEQ ID NO: 1656780 - RNA, 18 nt, Human
ccuuagaaccuuucuuac

SEQ ID NO: 1656781 - RNA, 16 nt, Human
ccuuagacagucccug

SEQ ID NO: 1656782 - RNA, 17 nt, Human
ccuuagacagucccugc

SEQ ID NO: 1656783 - RNA, 19 nt, Human
ccuucagugccuuauggaa

SEQ ID NO: 1656784 - RNA, 11 nt, Human
ccuuuggcuuc

SEQ ID NO: 1656785 - RNA, 13 nt, Human
ccuugacagggca

SEQ ID NO: 1656786 - RNA, 14 nt, Human
ccuugacagggcac

SEQ ID NO: 1656787 - RNA, 15 nt, Human
ccuugacagggcaca

SEQ ID NO: 1656788 - RNA, 17 nt, Human
ccuugacagggcacacc

SEQ ID NO: 1656789 - RNA, 19 nt, Human
ccuugaccauucuccaccu

SEQ ID NO: 1656790 - RNA, 20 nt, Human
ccuugaccauucuccaccug

SEQ ID NO: 1656791 - RNA, 22 nt, Human
ccuugaccauucuccaccugcc

SEQ ID NO: 1656792 - RNA, 21 nt, Human
ccuugaccauucuccaccugc

SEQ ID NO: 1656793 - RNA, 22 nt, Human
ccuugaguugauucagcucugc

SEQ ID NO: 1656794 - RNA, 23 nt, Human
ccuugaguugauucagcucugca

SEQ ID NO: 1656795 - RNA, 14 nt, Human
ccuucuuuuucuuc

SEQ ID NO: 1656796 - RNA, 16 nt, Human
ccuucuuuuucuucuu

SEQ ID NO: 1656797 - RNA, 15 nt, Human
ccuugaaaacacugu

SEQ ID NO: 1656798 - RNA, 13 nt, Human
ccuucgcuccugu

SEQ ID NO: 1656799 - RNA, 14 nt, Human
ccuucgcuccugug

SEQ ID NO: 1656800 - RNA, 15 nt, Human
ccuucgcuccugugu

SEQ ID NO: 1656801 - RNA, 18 nt, Human
ccuucgcuccugugucuu

SEQ ID NO: 1656802 - RNA, 19 nt, Human
ccuugaaaacacuguucuc

SEQ ID NO: 1656803 - RNA, 21 nt, Human
ccuugaaaacacuguucucug

SEQ ID NO: 1656804 - RNA, 22 nt, Human
ccuugaaaacacuguucucugc

SEQ ID NO: 1656805 - RNA, 14 nt, Human
ccuugaacugggua

SEQ ID NO: 1656806 - RNA, 17 nt, Human
ccuugaacuuugaccuc

SEQ ID NO: 1656807 - RNA, 16 nt, Human
ccuugaacuggguacu

SEQ ID NO: 1656808 - RNA, 17 nt, Human
ccuugaaugaugccaug

SEQ ID NO: 1656809 - RNA, 19 nt, Human
ccuugaacuuugaccucug

SEQ ID NO: 1656810 - RNA, 20 nt, Human
ccuugaaaacuuuaugcuaa

SEQ ID NO: 1656811 - RNA, 22 nt, Human
cguuccuucaaagcaaaugucu

SEQ ID NO: 1656812 - RNA, 13 nt, Human
cguugaaauugua

SEQ ID NO: 1656813 - RNA, 18 nt, Human
cguugaaauuguaauuau

SEQ ID NO: 1656814 - RNA, 21 nt, Human
cguuucuaaaggcuaccuuug

SEQ ID NO: 1656815 - RNA, 19 nt, Human
cguuucuaaaggcuaccuu

SEQ ID NO: 1656816 - RNA, 20 nt, Human
cguuucuaugacacaugcaa

SEQ ID NO: 1656817 - RNA, 13 nt, Human
cgugccuucagcu

SEQ ID NO: 1656818 - RNA, 15 nt, Human
cgugccuucagcucu

SEQ ID NO: 1656819 - RNA, 16 nt, Human
cgugccuucagcucua

SEQ ID NO: 1656820 - RNA, 18 nt, Human
cgugccuucagcucuaca

SEQ ID NO: 1656821 - RNA, 12 nt, Human
cgugccuggcca

SEQ ID NO: 1656822 - RNA, 16 nt, Human
cgugccuggccacgcc

SEQ ID NO: 1656823 - RNA, 23 nt, Human
cguucauggaacgcguugaaauu

SEQ ID NO: 1656824 - RNA, 22 nt, Human
cguucauggaacgcguugaaau

SEQ ID NO: 1656825 - RNA, 17 nt, Human
cguggcugcuucaagga

SEQ ID NO: 1656826 - RNA, 12 nt, Human
cguggcugcuuc

SEQ ID NO: 1656827 - RNA, 14 nt, Human
cguggcugcuucaa

SEQ ID NO: 1656828 - RNA, 15 nt, Human
cguggcugcuucaag

SEQ ID NO: 1656829 - RNA, 14 nt, Human
cgucccccucuggc

SEQ ID NO: 1656830 - RNA, 21 nt, Human
cgucccccucuggcuccagcu

SEQ ID NO: 1656831 - RNA, 22 nt, Human
cguauaugucucaggucccugc

SEQ ID NO: 1656832 - RNA, 19 nt, Human
cguauguggcaaaauguua

SEQ ID NO: 1656833 - RNA, 16 nt, Human
cgucaacucauauuuu

SEQ ID NO: 1656834 - RNA, 20 nt, Human
cgucaacucauauuuucaug

SEQ ID NO: 1656835 - RNA, 16 nt, Human
cguauaaaagccuguu

SEQ ID NO: 1656836 - RNA, 17 nt, Human
cguauaaaagccuguuu

SEQ ID NO: 1656837 - RNA, 21 nt, Human
cguauaaaagccuguuuaaga

SEQ ID NO: 1656838 - RNA, 22 nt, Human
cguauaaaagccuguuuaagag

SEQ ID NO: 1656839 - RNA, 23 nt, Human
cggugcuaucucccccagcccca

SEQ ID NO: 1656840 - RNA, 12 nt, Human
cgugacaacacu

SEQ ID NO: 1656841 - RNA, 20 nt, Human
cgugcacacaccagagccca

SEQ ID NO: 1656842 - RNA, 21 nt, Human
cgugcacacaccagagcccac

SEQ ID NO: 1656843 - RNA, 18 nt, Human
cgugcauaccacuuuugu

SEQ ID NO: 1656844 - RNA, 14 nt, Human
cgugcauaccacuu

SEQ ID NO: 1656845 - RNA, 22 nt, Human
cgugcacacaccagagcccacc

SEQ ID NO: 1656846 - RNA, 19 nt, Human
cgugcauaccacuuuuguu

SEQ ID NO: 1656847 - RNA, 23 nt, Human
cgugcauaccacuuuuguucuug

SEQ ID NO: 1656848 - RNA, 22 nt, Human
cgucccccucuggcuccagcug

SEQ ID NO: 1656849 - RNA, 11 nt, Human
cguccccuguc

SEQ ID NO: 1656850 - RNA, 14 nt, Human
cguccccugucccc

SEQ ID NO: 1656851 - RNA, 13 nt, Human
cgucugacaggca

SEQ ID NO: 1656852 - RNA, 14 nt, Human
cgucugacaggcaa

SEQ ID NO: 1656853 - RNA, 14 nt, Human
cgucuaccugaggg

SEQ ID NO: 1656854 - RNA, 13 nt, Human
cgcguugaaauug

SEQ ID NO: 1656855 - RNA, 20 nt, Human
cgcgugcacacaccagagcc

SEQ ID NO: 1656856 - RNA, 16 nt, Human
cgcgugcacacaccag

SEQ ID NO: 1656857 - RNA, 19 nt, Human
cgcgugcacacaccagagc

SEQ ID NO: 1656858 - RNA, 22 nt, Human
cgcguugaaauuguaauuauau

SEQ ID NO: 1656859 - RNA, 21 nt, Human
cgcuaagagggagggagggcu

SEQ ID NO: 1656860 - RNA, 17 nt, Human
cgcguugaaauuguaau

SEQ ID NO: 1656861 - RNA, 21 nt, Human
cgcguugaaauuguaauuaua

SEQ ID NO: 1656862 - RNA, 14 nt, Human
cgcuaagagggagg

SEQ ID NO: 1656863 - RNA, 15 nt, Human
cgcuaagagggaggg

SEQ ID NO: 1656864 - RNA, 16 nt, Human
cgcuaagagggaggga

SEQ ID NO: 1656865 - RNA, 13 nt, Human
cgcagacaggacc

SEQ ID NO: 1656866 - RNA, 14 nt, Human
cgcagacaggacca

SEQ ID NO: 1656867 - RNA, 19 nt, Human
cgcccaggcuggagugcaa

SEQ ID NO: 1656868 - RNA, 20 nt, Human
cgcccaggcuggagugcaau

SEQ ID NO: 1656869 - RNA, 12 nt, Human
cgcccaggcugg

SEQ ID NO: 1656870 - RNA, 15 nt, Human
cgcccccacugguga

SEQ ID NO: 1656871 - RNA, 16 nt, Human
cgcgacaaugcaaacc

SEQ ID NO: 1656872 - RNA, 17 nt, Human
cgcgacaaugcaaacca

SEQ ID NO: 1656873 - RNA, 12 nt, Human
ccuuggcugcag

SEQ ID NO: 1656874 - RNA, 13 nt, Human
ccuuggcugcagg

SEQ ID NO: 1656875 - RNA, 14 nt, Human
ccuuggcugcaggg

SEQ ID NO: 1656876 - RNA, 20 nt, Human
ccuuguggucccaccccaca

SEQ ID NO: 1656877 - RNA, 16 nt, Human
ccuuguggucccaccc

SEQ ID NO: 1656878 - RNA, 19 nt, Human
ccuuguggucccaccccac

SEQ ID NO: 1656879 - RNA, 13 nt, Human
ccuuuaagagaaa

SEQ ID NO: 1656880 - RNA, 16 nt, Human
ccuuucucuuucguua

SEQ ID NO: 1656881 - RNA, 14 nt, Human
ccuuuaagagaaau

SEQ ID NO: 1656882 - RNA, 14 nt, Human
ccuuugacaaaggu

SEQ ID NO: 1656883 - RNA, 16 nt, Human
ccuuugcuugaaagaa

SEQ ID NO: 1656884 - RNA, 20 nt, Human
ccuuuguauucucuccugua

SEQ ID NO: 1656885 - RNA, 18 nt, Human
ccuuuguauucucuccug

SEQ ID NO: 1656886 - RNA, 15 nt, Human
ccuuuguauucucuc

SEQ ID NO: 1656887 - RNA, 14 nt, Human
cgaggacagggagg

SEQ ID NO: 1656888 - RNA, 13 nt, Human
cgaggacagggag

SEQ ID NO: 1656889 - RNA, 12 nt, Human
cgaggacaggga

SEQ ID NO: 1656890 - RNA, 18 nt, Human
cgaggccuucucugaagg

SEQ ID NO: 1656891 - RNA, 19 nt, Human
cgaggccuucucugaagga

SEQ ID NO: 1656892 - RNA, 19 nt, Human
cgaucuggguucacugcaa

SEQ ID NO: 1656893 - RNA, 21 nt, Human
cgauucuucugcuucagccuc

SEQ ID NO: 1656894 - RNA, 13 nt, Human
cgauucuucugcu

SEQ ID NO: 1656895 - RNA, 19 nt, Human
cgauucuucugcuucagcc

SEQ ID NO: 1656896 - RNA, 12 nt, Human
cgauuucuguuu

SEQ ID NO: 1656897 - RNA, 11 nt, Human
cgcaaugugac

SEQ ID NO: 1656898 - RNA, 20 nt, Human
cggaaugaaccacaucuugc

SEQ ID NO: 1656899 - RNA, 15 nt, Human
cggacagccacggcc

SEQ ID NO: 1656900 - RNA, 16 nt, Human
cggacagccacggcca

SEQ ID NO: 1656901 - RNA, 18 nt, Human
cggacagccacggccagg

SEQ ID NO: 1656902 - RNA, 17 nt, Human
cggaaagcccugugcuc

SEQ ID NO: 1656903 - RNA, 17 nt, Human
cgcuauugucaccaggg

SEQ ID NO: 1656904 - RNA, 13 nt, Human
cgcuccugugucu

SEQ ID NO: 1656905 - RNA, 13 nt, Human
cggaugauuucua

SEQ ID NO: 1656906 - RNA, 14 nt, Human
cggaugauuucuau

SEQ ID NO: 1656907 - RNA, 20 nt, Human
cggacagccacggccaggcc

SEQ ID NO: 1656908 - RNA, 21 nt, Human
cgggaggauguucugggacac

SEQ ID NO: 1656909 - RNA, 22 nt, Human
cgggagccugaucaccugcccu

SEQ ID NO: 1656910 - RNA, 21 nt, Human
cgggagccugaucaccugccc

SEQ ID NO: 1656911 - RNA, 20 nt, Human
cgggaggauguucugggaca

SEQ ID NO: 1656912 - RNA, 16 nt, Human
cgggaggucgaggcag

SEQ ID NO: 1656913 - RNA, 17 nt, Human
cgggaggucgaggcagg

SEQ ID NO: 1656914 - RNA, 15 nt, Human
cgggcaugacacgaa

SEQ ID NO: 1656915 - RNA, 12 nt, Human
cgggcaugacac

SEQ ID NO: 1656916 - RNA, 15 nt, Human
cggccuuuggcuuca

SEQ ID NO: 1656917 - RNA, 15 nt, Human
cggcuggccuggccc

SEQ ID NO: 1656918 - RNA, 16 nt, Human
cggcuggccuggcccc

SEQ ID NO: 1656919 - RNA, 18 nt, Human
cggcuggccuggccccuc

SEQ ID NO: 1656920 - RNA, 19 nt, Human
cggcuggccuggccccuca

SEQ ID NO: 1656921 - RNA, 16 nt, Human
cggccuccauccugag

SEQ ID NO: 1656922 - RNA, 17 nt, Human
cggccuccauccugagg

SEQ ID NO: 1656923 - RNA, 17 nt, Human
cccaugcugcccuguga

SEQ ID NO: 1656924 - RNA, 18 nt, Human
cccaugcugcccugugag

SEQ ID NO: 1656925 - RNA, 15 nt, Human
cccaugcugcccugu

SEQ ID NO: 1656926 - RNA, 16 nt, Human
cccaugcugcccugug

SEQ ID NO: 1656927 - RNA, 15 nt, Human
cccagugcccacagg

SEQ ID NO: 1656928 - RNA, 20 nt, Human
cccagugcccacaggaucag

SEQ ID NO: 1656929 - RNA, 18 nt, Human
cccagugccgagaaggaa

SEQ ID NO: 1656930 - RNA, 13 nt, Human
cccauucugccug

SEQ ID NO: 1656931 - RNA, 22 nt, Human
ccccaaauggaaaugggcagag

SEQ ID NO: 1656932 - RNA, 13 nt, Human
ccccaagccuggc

SEQ ID NO: 1656933 - RNA, 14 nt, Human
ccccaagccuggca

SEQ ID NO: 1656934 - RNA, 14 nt, Human
ccccacccaagggc

SEQ ID NO: 1656935 - RNA, 20 nt, Human
ccccacccaagggccuggcc

SEQ ID NO: 1656936 - RNA, 21 nt, Human
ccccacccaagggccuggccu

SEQ ID NO: 1656937 - RNA, 17 nt, Human
ccccaggaggccagccu

SEQ ID NO: 1656938 - RNA, 22 nt, Human
ccccucagggucccugguggca

SEQ ID NO: 1656939 - RNA, 18 nt, Human
cccaagggccuggccuga

SEQ ID NO: 1656940 - RNA, 19 nt, Human
cccaagggccuggccugag

SEQ ID NO: 1656941 - RNA, 23 nt, Human
cccaagggccuggccugagcugg

SEQ ID NO: 1656942 - RNA, 20 nt, Human
cccagagggccugcaaggga

SEQ ID NO: 1656943 - RNA, 20 nt, Human
cccagauugcaacaggcugg

SEQ ID NO: 1656944 - RNA, 21 nt, Human
cccagauugcaacaggcuggg

SEQ ID NO: 1656945 - RNA, 22 nt, Human
cccagauugcaacaggcugggc

SEQ ID NO: 1656946 - RNA, 16 nt, Human
cccagcaagugagagc

SEQ ID NO: 1656947 - RNA, 18 nt, Human
cccagcaagugagagcug

SEQ ID NO: 1656948 - RNA, 18 nt, Human
cccagccccuucugaccc

SEQ ID NO: 1656949 - RNA, 12 nt, Human
cccagccugcua

SEQ ID NO: 1656950 - RNA, 19 nt, Human
cccagcaagugagagcugg

SEQ ID NO: 1656951 - RNA, 20 nt, Human
cccagcaagugagagcuggg

SEQ ID NO: 1656952 - RNA, 21 nt, Human
cccagcaagugagagcugggu

SEQ ID NO: 1656953 - RNA, 22 nt, Human
cccagcaagugagagcugggug

SEQ ID NO: 1656954 - RNA, 23 nt, Human
cccagcaagugagagcugggugu

SEQ ID NO: 1656955 - RNA, 23 nt, Human
cccagauugcaacaggcugggcu

SEQ ID NO: 1656956 - RNA, 11 nt, Human
cccagccccuu

SEQ ID NO: 1656957 - RNA, 19 nt, Human
cccagcgagcccugguggc

SEQ ID NO: 1656958 - RNA, 23 nt, Human
cccagcgagcccugguggcagug

SEQ ID NO: 1656959 - RNA, 17 nt, Human
cccagcgagcccuggug

SEQ ID NO: 1656960 - RNA, 18 nt, Human
cccagcgagcccuggugg

SEQ ID NO: 1656961 - RNA, 22 nt, Human
cccaggcauuccccaggaggcc

SEQ ID NO: 1656962 - RNA, 23 nt, Human
cccaggcauuccccaggaggcca

SEQ ID NO: 1656963 - RNA, 17 nt, Human
cccaggcaggucuugaa

SEQ ID NO: 1656964 - RNA, 20 nt, Human
cccaggcauuccccaggagg

SEQ ID NO: 1656965 - RNA, 21 nt, Human
cccaggcauuccccaggaggc

SEQ ID NO: 1656966 - RNA, 11 nt, Human
cccaggccccu

SEQ ID NO: 1656967 - RNA, 16 nt, Human
cccaggccccugccac

SEQ ID NO: 1656968 - RNA, 18 nt, Human
cccaggccccugccaccc

SEQ ID NO: 1656969 - RNA, 21 nt, Human
cccaggccccugccacccugg

SEQ ID NO: 1656970 - RNA, 22 nt, Human
cccaggccccugccacccuggg

SEQ ID NO: 1656971 - RNA, 11 nt, Human
cccaggcaggu

SEQ ID NO: 1656972 - RNA, 13 nt, Human
cccaggcaggucu

SEQ ID NO: 1656973 - RNA, 21 nt, Human
cccaggagccccgaggccuuc

SEQ ID NO: 1656974 - RNA, 13 nt, Human
cccaggaggccag

SEQ ID NO: 1656975 - RNA, 22 nt, Human
cccaggaggccagccuugacca

SEQ ID NO: 1656976 - RNA, 15 nt, Human
cccaggccugccugu

SEQ ID NO: 1656977 - RNA, 16 nt, Human
cccaggccugccuguu

SEQ ID NO: 1656978 - RNA, 18 nt, Human
cccaggcgccccuucccc

SEQ ID NO: 1656979 - RNA, 14 nt, Human
cccaggcugagccu

SEQ ID NO: 1656980 - RNA, 15 nt, Human
cccaggcugagccuc

SEQ ID NO: 1656981 - RNA, 17 nt, Human
cccaggccuccuacagc

SEQ ID NO: 1656982 - RNA, 18 nt, Human
cccaggccuccuacagcu

SEQ ID NO: 1656983 - RNA, 13 nt, Human
cccagugcccaca

SEQ ID NO: 1656984 - RNA, 20 nt, Human
cccagucuggaaugcagugg

SEQ ID NO: 1656985 - RNA, 23 nt, Human
cccaggugcuaggaacacuccuu

SEQ ID NO: 1656986 - RNA, 22 nt, Human
cccaggugcuaggaacacuccu

SEQ ID NO: 1656987 - RNA, 13 nt, Human
cccaggugccagu

SEQ ID NO: 1656988 - RNA, 21 nt, Human
cccacaaaggagagcuagcag

SEQ ID NO: 1656989 - RNA, 13 nt, Human
ccauggacuuugu

SEQ ID NO: 1656990 - RNA, 14 nt, Human
ccauggacuuuguu

SEQ ID NO: 1656991 - RNA, 15 nt, Human
ccauucuccaccugc

SEQ ID NO: 1656992 - RNA, 16 nt, Human
ccauucuccaccugcc

SEQ ID NO: 1656993 - RNA, 21 nt, Human
ccauucugccugcccaggccc

SEQ ID NO: 1656994 - RNA, 19 nt, Human
ccauucugccugcccaggc

SEQ ID NO: 1656995 - RNA, 20 nt, Human
ccauucugccugcccaggcc

SEQ ID NO: 1656996 - RNA, 17 nt, Human
ccauucuccaccugcca

SEQ ID NO: 1656997 - RNA, 18 nt, Human
ccauucuccaccugccag

SEQ ID NO: 1656998 - RNA, 17 nt, Human
ccauucugccugcccag

SEQ ID NO: 1656999 - RNA, 18 nt, Human
ccauucugccugcccagg

SEQ ID NO: 1657000 - RNA, 16 nt, Human
cccaaagcagugcaug

SEQ ID NO: 1657001 - RNA, 12 nt, Human
cccaaagaugca

SEQ ID NO: 1657002 - RNA, 15 nt, Human
cccaaagaugcagcc

SEQ ID NO: 1657003 - RNA, 22 nt, Human
ccauuuugggguacccacugcu

SEQ ID NO: 1657004 - RNA, 23 nt, Human
ccauuuuggauucuuauggacaa

SEQ ID NO: 1657005 - RNA, 20 nt, Human
ccauuuugggguacccacug

SEQ ID NO: 1657006 - RNA, 18 nt, Human
cccaaaaggcagaagcaa

SEQ ID NO: 1657007 - RNA, 13 nt, Human
cccaaaaggcaga

SEQ ID NO: 1657008 - RNA, 20 nt, Human
ccauccucuguacagagccc

SEQ ID NO: 1657009 - RNA, 22 nt, Human
ccaucauugaaaucuuuuugcu

SEQ ID NO: 1657010 - RNA, 12 nt, Human
ccauccucugua

SEQ ID NO: 1657011 - RNA, 19 nt, Human
ccauccucuguacagagcc

SEQ ID NO: 1657012 - RNA, 12 nt, Human
ccauacuaauua

SEQ ID NO: 1657013 - RNA, 13 nt, Human
ccauacuaauuau

SEQ ID NO: 1657014 - RNA, 23 nt, Human
ccauacuaauuauacccccugca

SEQ ID NO: 1657015 - RNA, 20 nt, Human
ccagugaggcucugcccuug

SEQ ID NO: 1657016 - RNA, 18 nt, Human
ccagugaggcucugcccu

SEQ ID NO: 1657017 - RNA, 19 nt, Human
ccagugaggcucugcccuu

SEQ ID NO: 1657018 - RNA, 13 nt, Human
ccaucaccagaca

SEQ ID NO: 1657019 - RNA, 19 nt, Human
ccaucaauaaaaaauuaug

SEQ ID NO: 1657020 - RNA, 20 nt, Human
ccaucaauaaaaaauuauga

SEQ ID NO: 1657021 - RNA, 18 nt, Human
ccaucaaggguacacugc

SEQ ID NO: 1657022 - RNA, 15 nt, Human
ccaugcugcccugug

SEQ ID NO: 1657023 - RNA, 14 nt, Human
ccaugcugcccugu

SEQ ID NO: 1657024 - RNA, 13 nt, Human
ccaugcuccuggc

SEQ ID NO: 1657025 - RNA, 11 nt, Human
ccaugcugccc

SEQ ID NO: 1657026 - RNA, 13 nt, Human
ccaugcugcccug

SEQ ID NO: 1657027 - RNA, 19 nt, Human
ccaugauuaaccacuucag

SEQ ID NO: 1657028 - RNA, 21 nt, Human
ccaugauuaaccacuucagcu

SEQ ID NO: 1657029 - RNA, 18 nt, Human
ccaugauguuuuccauga

SEQ ID NO: 1657030 - RNA, 16 nt, Human
ccaugauguuuagaaa

SEQ ID NO: 1657031 - RNA, 14 nt, Human
ccaugaagauguag

SEQ ID NO: 1657032 - RNA, 17 nt, Human
ccagcuggggccaggcu

SEQ ID NO: 1657033 - RNA, 18 nt, Human
ccagcuggggccaggcug

SEQ ID NO: 1657034 - RNA, 19 nt, Human
ccagcuggggccaggcugg

SEQ ID NO: 1657035 - RNA, 20 nt, Human
ccagcuggggccaggcuggg

SEQ ID NO: 1657036 - RNA, 21 nt, Human
ccagcuggggccaggcugggu

SEQ ID NO: 1657037 - RNA, 22 nt, Human
ccagcuggggccaggcuggguc

SEQ ID NO: 1657038 - RNA, 23 nt, Human
ccagcuggggccaggcugggucg

SEQ ID NO: 1657039 - RNA, 20 nt, Human
ccaggaauggagccugcacg

SEQ ID NO: 1657040 - RNA, 22 nt, Human
ccaggaagccagcaggcucuca

SEQ ID NO: 1657041 - RNA, 14 nt, Human
ccagcucuggucca

SEQ ID NO: 1657042 - RNA, 17 nt, Human
ccagcucugguccauag

SEQ ID NO: 1657043 - RNA, 21 nt, Human
ccagcucugguccauagagag

SEQ ID NO: 1657044 - RNA, 22 nt, Human
ccagcucugguccauagagagc

SEQ ID NO: 1657045 - RNA, 20 nt, Human
ccagcugcuugggcuucauc

SEQ ID NO: 1657046 - RNA, 23 nt, Human
ccagcugcuugggcuucauccuc

SEQ ID NO: 1657047 - RNA, 13 nt, Human
ccagcugcuuggg

SEQ ID NO: 1657048 - RNA, 22 nt, Human
ccagagcccaccuuggcucaag

SEQ ID NO: 1657049 - RNA, 16 nt, Human
ccagagcccaccuugg

SEQ ID NO: 1657050 - RNA, 19 nt, Human
ccagccuugaccauucucc

SEQ ID NO: 1657051 - RNA, 20 nt, Human
ccagccuugaccauucucca

SEQ ID NO: 1657052 - RNA, 11 nt, Human
ccagcucuggu

SEQ ID NO: 1657053 - RNA, 12 nt, Human
ccagcucugguc

SEQ ID NO: 1657054 - RNA, 13 nt, Human
ccagcucuggucc

SEQ ID NO: 1657055 - RNA, 22 nt, Human
ccagccuugaccauucuccacc

SEQ ID NO: 1657056 - RNA, 14 nt, Human
ccagcgagcccugg

SEQ ID NO: 1657057 - RNA, 15 nt, Human
ccagcgagcccuggu

SEQ ID NO: 1657058 - RNA, 16 nt, Human
ccagcgagcccuggug

SEQ ID NO: 1657059 - RNA, 13 nt, Human
ccaggcauggugg

SEQ ID NO: 1657060 - RNA, 17 nt, Human
ccaggcauuccccagga

SEQ ID NO: 1657061 - RNA, 14 nt, Human
ccaggcauucccca

SEQ ID NO: 1657062 - RNA, 21 nt, Human
ccaggccacaagacccuugug

SEQ ID NO: 1657063 - RNA, 24 nt, Human
ccaggcauuccccaggaggccagc

SEQ ID NO: 1657064 - RNA, 23 nt, Human
ccaggcauuccccaggaggccag

SEQ ID NO: 1657065 - RNA, 22 nt, Human
ccaggcauuccccaggaggcca

SEQ ID NO: 1657066 - RNA, 14 nt, Human
ccaggaggccagcc

SEQ ID NO: 1657067 - RNA, 13 nt, Human
ccaggaggccagc

SEQ ID NO: 1657068 - RNA, 12 nt, Human
ccaggaggccag

SEQ ID NO: 1657069 - RNA, 13 nt, Human
ccaggagccuccu

SEQ ID NO: 1657070 - RNA, 14 nt, Human
ccaggagccuccug

SEQ ID NO: 1657071 - RNA, 18 nt, Human
ccaggagccuccugcccu

SEQ ID NO: 1657072 - RNA, 16 nt, Human
ccaggagccccgaggc

SEQ ID NO: 1657073 - RNA, 19 nt, Human
ccaggagccuccugcccuu

SEQ ID NO: 1657074 - RNA, 15 nt, Human
ccaggagccccgagg

SEQ ID NO: 1657075 - RNA, 16 nt, Human
ccaggagcagccacau

SEQ ID NO: 1657076 - RNA, 19 nt, Human
ccaggcuuuuuuaucaugu

SEQ ID NO: 1657077 - RNA, 12 nt, Human
ccagggaagggg

SEQ ID NO: 1657078 - RNA, 20 nt, Human
ccaggcuguaucccaugagc

SEQ ID NO: 1657079 - RNA, 21 nt, Human
ccaggcuggucucgaacuccu

SEQ ID NO: 1657080 - RNA, 19 nt, Human
ccaggcuggucucaaacuc

SEQ ID NO: 1657081 - RNA, 13 nt, Human
ccaggccccugcc

SEQ ID NO: 1657082 - RNA, 19 nt, Human
ccaggugcuaggaacacuc

SEQ ID NO: 1657083 - RNA, 17 nt, Human
ccaggugccaguuaugg

SEQ ID NO: 1657084 - RNA, 15 nt, Human
ccagguucagcuugu

SEQ ID NO: 1657085 - RNA, 21 nt, Human
ccaggugcuaggaacacuccu

SEQ ID NO: 1657086 - RNA, 14 nt, Human
ccagguucagcuug

SEQ ID NO: 1657087 - RNA, 13 nt, Human
ccaguaucuugaa

SEQ ID NO: 1657088 - RNA, 20 nt, Human
ccagugaaaucaguuacucu

SEQ ID NO: 1657089 - RNA, 14 nt, Human
ccacgguguucugu

SEQ ID NO: 1657090 - RNA, 23 nt, Human
ccacggccaggccagagggagug

SEQ ID NO: 1657091 - RNA, 18 nt, Human
ccacgcuggagugcagug

SEQ ID NO: 1657092 - RNA, 19 nt, Human
ccacgcuggagugcaguga

SEQ ID NO: 1657093 - RNA, 16 nt, Human
ccacggccaggccaga

SEQ ID NO: 1657094 - RNA, 18 nt, Human
ccacggccaggccagagg

SEQ ID NO: 1657095 - RNA, 16 nt, Human
ccacgcuggagugcag

SEQ ID NO: 1657096 - RNA, 15 nt, Human
ccacccccacccaag

SEQ ID NO: 1657097 - RNA, 15 nt, Human
ccaccccacacacgc

SEQ ID NO: 1657098 - RNA, 14 nt, Human
ccacuacauucugu

SEQ ID NO: 1657099 - RNA, 15 nt, Human
ccacuacauucuguu

SEQ ID NO: 1657100 - RNA, 11 nt, Human
ccacuacauuc

SEQ ID NO: 1657101 - RNA, 15 nt, Human
ccacuagacccacug

SEQ ID NO: 1657102 - RNA, 17 nt, Human
ccacuagacccacugga

SEQ ID NO: 1657103 - RNA, 17 nt, Human
ccacuacauucuguuaa

SEQ ID NO: 1657104 - RNA, 16 nt, Human
ccacuacauucuguua

SEQ ID NO: 1657105 - RNA, 21 nt, Human
ccacuccagaccccuggcuuu

SEQ ID NO: 1657106 - RNA, 22 nt, Human
ccacuccagaccccuggcuuuu

SEQ ID NO: 1657107 - RNA, 18 nt, Human
ccacucaguccauagcag

SEQ ID NO: 1657108 - RNA, 20 nt, Human
ccacuccagaccccuggcuu

SEQ ID NO: 1657109 - RNA, 15 nt, Human
ccagaccccuggcuu

SEQ ID NO: 1657110 - RNA, 16 nt, Human
ccagaccccuggcuuu

SEQ ID NO: 1657111 - RNA, 17 nt, Human
ccagaccccuggcuuuu

SEQ ID NO: 1657112 - RNA, 18 nt, Human
ccagaccccuggcuuuuc

SEQ ID NO: 1657113 - RNA, 14 nt, Human
ccagaccccuggcu

SEQ ID NO: 1657114 - RNA, 21 nt, Human
ccagaauuucccaaagcagug

SEQ ID NO: 1657115 - RNA, 21 nt, Human
ccagacaccuugacagggcac

SEQ ID NO: 1657116 - RNA, 16 nt, Human
ccagaaugcuuuagga

SEQ ID NO: 1657117 - RNA, 23 nt, Human
ccagaauggucuuucuaaugugu

SEQ ID NO: 1657118 - RNA, 13 nt, Human
ccagaauuucaaa

SEQ ID NO: 1657119 - RNA, 12 nt, Human
ccagaauuuccc

SEQ ID NO: 1657120 - RNA, 19 nt, Human
ccagaauuucccaaagcag

SEQ ID NO: 1657121 - RNA, 23 nt, Human
ccagaaguuugagaucagccugg

SEQ ID NO: 1657122 - RNA, 22 nt, Human
ccagaaguuugagaucagccug

SEQ ID NO: 1657123 - RNA, 18 nt, Human
ccagaauuucccaaagca

SEQ ID NO: 1657124 - RNA, 21 nt, Human
ccacuuagaaauugcauuucc

SEQ ID NO: 1657125 - RNA, 13 nt, Human
ccacuucagcuga

SEQ ID NO: 1657126 - RNA, 14 nt, Human
ccacuucagcugac

SEQ ID NO: 1657127 - RNA, 19 nt, Human
ccacuuagaaauugcauuu

SEQ ID NO: 1657128 - RNA, 13 nt, Human
ccacugcagaaga

SEQ ID NO: 1657129 - RNA, 18 nt, Human
ccacugcagaagacagua

SEQ ID NO: 1657130 - RNA, 23 nt, Human
ccacccaggagccccgaggccuu

SEQ ID NO: 1657131 - RNA, 17 nt, Human
ccacccccacccaaggg

SEQ ID NO: 1657132 - RNA, 16 nt, Human
ccaauauucauagcag

SEQ ID NO: 1657133 - RNA, 20 nt, Human
ccacaucuugcucugcugac

SEQ ID NO: 1657134 - RNA, 19 nt, Human
ccacaucuugcucugcuga

SEQ ID NO: 1657135 - RNA, 18 nt, Human
ccacaucuugcucugcug

SEQ ID NO: 1657136 - RNA, 17 nt, Human
ccacaucuugcucugcu

SEQ ID NO: 1657137 - RNA, 16 nt, Human
ccacaugugcacaugc

SEQ ID NO: 1657138 - RNA, 16 nt, Human
ccacauuccugaugcu

SEQ ID NO: 1657139 - RNA, 15 nt, Human
ccaccaacccucaga

SEQ ID NO: 1657140 - RNA, 21 nt, Human
ccaccaacauacucccaucug

SEQ ID NO: 1657141 - RNA, 20 nt, Human
ccacacccagcccacuucug

SEQ ID NO: 1657142 - RNA, 15 nt, Human
ccacacccagcccac

SEQ ID NO: 1657143 - RNA, 21 nt, Human
ccacacccagcccacuucugc

SEQ ID NO: 1657144 - RNA, 22 nt, Human
ccacacccagcccacuucugcc

SEQ ID NO: 1657145 - RNA, 17 nt, Human
ccacaggcccuuccucu

SEQ ID NO: 1657146 - RNA, 18 nt, Human
ccacaggcccuuccucuc

SEQ ID NO: 1657147 - RNA, 19 nt, Human
ccacaggcccuuccucucc

SEQ ID NO: 1657148 - RNA, 22 nt, Human
ccacaggcccuuccucuccacu

SEQ ID NO: 1657149 - RNA, 23 nt, Human
ccacaggcccuuccucuccacug

SEQ ID NO: 1657150 - RNA, 15 nt, Human
ccacaggcccuuccu

SEQ ID NO: 1657151 - RNA, 16 nt, Human
ccacaggcccuuccuc

SEQ ID NO: 1657152 - RNA, 16 nt, Human
ccacaggaucagucug

SEQ ID NO: 1657153 - RNA, 12 nt, Human
ccacacuccagc

SEQ ID NO: 1657154 - RNA, 20 nt, Human
ccacaggaaccacaagacug

SEQ ID NO: 1657155 - RNA, 23 nt, Human
cauuguauucagaguugaugguu

SEQ ID NO: 1657156 - RNA, 13 nt, Human
cauugugggaagg

SEQ ID NO: 1657157 - RNA, 17 nt, Human
cauuguuggccaaagcc

SEQ ID NO: 1657158 - RNA, 18 nt, Human
cauuguuggccaaagcca

SEQ ID NO: 1657159 - RNA, 15 nt, Human
cauuguagagcuucu

SEQ ID NO: 1657160 - RNA, 16 nt, Human
cauuguagagcuucug

SEQ ID NO: 1657161 - RNA, 17 nt, Human
cauuguagagcuucugg

SEQ ID NO: 1657162 - RNA, 19 nt, Human
cauuguagagcuucuggca

SEQ ID NO: 1657163 - RNA, 21 nt, Human
cauuguagagcuucuggcacu

SEQ ID NO: 1657164 - RNA, 14 nt, Human
cacccaagggccug

SEQ ID NO: 1657165 - RNA, 15 nt, Human
cacccaagggccugg

SEQ ID NO: 1657166 - RNA, 12 nt, Human
cauuuccugugu

SEQ ID NO: 1657167 - RNA, 13 nt, Human
cauuuccuguguc

SEQ ID NO: 1657168 - RNA, 16 nt, Human
cauuuaaaagauacag

SEQ ID NO: 1657169 - RNA, 15 nt, Human
cauuuaaaagauaca

SEQ ID NO: 1657170 - RNA, 12 nt, Human
cauuuaaaagau

SEQ ID NO: 1657171 - RNA, 15 nt, Human
cauuuaauaauuaua

SEQ ID NO: 1657172 - RNA, 16 nt, Human
cauuuaauaauuauau

SEQ ID NO: 1657173 - RNA, 17 nt, Human
cauuuaauaauuauaug

SEQ ID NO: 1657174 - RNA, 19 nt, Human
cauuuaauaauuauaugcu

SEQ ID NO: 1657175 - RNA, 12 nt, Human
cauuuaauaauu

SEQ ID NO: 1657176 - RNA, 14 nt, Human
cauuuaauaauuau

SEQ ID NO: 1657177 - RNA, 21 nt, Human
cauuuaaaagauacaguuacu

SEQ ID NO: 1657178 - RNA, 13 nt, Human
cauuuccugacag

SEQ ID NO: 1657179 - RNA, 20 nt, Human
cauuuccugacagaaggacu

SEQ ID NO: 1657180 - RNA, 23 nt, Human
cauuuaauaauuauaugcuauuu

SEQ ID NO: 1657181 - RNA, 17 nt, Human
cauuuaggccaugggac

SEQ ID NO: 1657182 - RNA, 19 nt, Human
cauuuuagggguagcauuu

SEQ ID NO: 1657183 - RNA, 11 nt, Human
cauuuuauaaa

SEQ ID NO: 1657184 - RNA, 13 nt, Human
cauuuuauaaauc

SEQ ID NO: 1657185 - RNA, 17 nt, Human
cauuuuauaaaucgcuu

SEQ ID NO: 1657186 - RNA, 18 nt, Human
cauuuuauaaaucgcuuu

SEQ ID NO: 1657187 - RNA, 21 nt, Human
cauuuuauaaaucgcuuuuga

SEQ ID NO: 1657188 - RNA, 23 nt, Human
cauuuuauaaaucgcuuuugaua

SEQ ID NO: 1657189 - RNA, 19 nt, Human
ccaaacauccuacaagaca

SEQ ID NO: 1657190 - RNA, 20 nt, Human
ccaaacauccuacaagacac

SEQ ID NO: 1657191 - RNA, 17 nt, Human
ccaaacucaccugcccc

SEQ ID NO: 1657192 - RNA, 23 nt, Human
cauuuuucuuagggaaggauaca

SEQ ID NO: 1657193 - RNA, 20 nt, Human
cauuugaaaauuuugauguu

SEQ ID NO: 1657194 - RNA, 22 nt, Human
cauuugaaaauuuugauguuuu

SEQ ID NO: 1657195 - RNA, 20 nt, Human
cauuugagcagggcucagcg

SEQ ID NO: 1657196 - RNA, 17 nt, Human
cauuugagcagggcuca

SEQ ID NO: 1657197 - RNA, 18 nt, Human
cauuugagcagggcucag

SEQ ID NO: 1657198 - RNA, 22 nt, Human
cauuuguuugaacugauaaaga

SEQ ID NO: 1657199 - RNA, 20 nt, Human
cauuuguuugaacugauaaa

SEQ ID NO: 1657200 - RNA, 13 nt, Human
cauuugcugaaua

SEQ ID NO: 1657201 - RNA, 17 nt, Human
cauuuguuugaacugau

SEQ ID NO: 1657202 - RNA, 13 nt, Human
cauuugcuccuuu

SEQ ID NO: 1657203 - RNA, 14 nt, Human
cauuugcuccuuuc

SEQ ID NO: 1657204 - RNA, 13 nt, Human
cauuugcucaugg

SEQ ID NO: 1657205 - RNA, 18 nt, Human
cauuugcucauggaauug

SEQ ID NO: 1657206 - RNA, 14 nt, Human
ccaagcaaguauua

SEQ ID NO: 1657207 - RNA, 22 nt, Human
ccaauaguuguugauuggcagg

SEQ ID NO: 1657208 - RNA, 20 nt, Human
ccaagucaagugaaaaagga

SEQ ID NO: 1657209 - RNA, 18 nt, Human
ccaaggugggaggauugc

SEQ ID NO: 1657210 - RNA, 13 nt, Human
ccaaggugggagg

SEQ ID NO: 1657211 - RNA, 23 nt, Human
ccaagguuuggggaagaacgaag

SEQ ID NO: 1657212 - RNA, 22 nt, Human
ccaaggggaauguuugccucug

SEQ ID NO: 1657213 - RNA, 19 nt, Human
ccaagggccuggccugagc

SEQ ID NO: 1657214 - RNA, 16 nt, Human
ccaagggccuggccug

SEQ ID NO: 1657215 - RNA, 18 nt, Human
ccaagggccuggccugag

SEQ ID NO: 1657216 - RNA, 15 nt, Human
ccaagggccuggccu

SEQ ID NO: 1657217 - RNA, 18 nt, Human
ccaaggccaaaggaagca

SEQ ID NO: 1657218 - RNA, 21 nt, Human
ccaaggccaaaggaagcacau

SEQ ID NO: 1657219 - RNA, 15 nt, Human
ccaagccuggcaagg

SEQ ID NO: 1657220 - RNA, 13 nt, Human
ccaagccguggcu

SEQ ID NO: 1657221 - RNA, 22 nt, Human
ccaagccuacuuuugccauuga

SEQ ID NO: 1657222 - RNA, 14 nt, Human
ccaagcucccaggc

SEQ ID NO: 1657223 - RNA, 15 nt, Human
ccaagcucccaggca

SEQ ID NO: 1657224 - RNA, 16 nt, Human
ccaagcucccaggcau

SEQ ID NO: 1657225 - RNA, 22 nt, Human
ccaagcucccaggcauucccca

SEQ ID NO: 1657226 - RNA, 17 nt, Human
ccaaggccaaaggaagc

SEQ ID NO: 1657227 - RNA, 17 nt, Human
ccaagcauuuagaugua

SEQ ID NO: 1657228 - RNA, 22 nt, Human
ccaagcauaccaacacgagcag

SEQ ID NO: 1657229 - RNA, 14 nt, Human
ccaacccucagagc

SEQ ID NO: 1657230 - RNA, 15 nt, Human
ccaacccucagagcc

SEQ ID NO: 1657231 - RNA, 15 nt, Human
ccaagaagcccagga

SEQ ID NO: 1657232 - RNA, 12 nt, Human
ccaacccucauc

SEQ ID NO: 1657233 - RNA, 20 nt, Human
ccaagaauagaugcugacug

SEQ ID NO: 1657234 - RNA, 19 nt, Human
ccaagaauagaugcugacu

SEQ ID NO: 1657235 - RNA, 19 nt, Human
ccaagaagcccaggaaagg

SEQ ID NO: 1657236 - RNA, 20 nt, Human
ccaagaagcccaggaaaggc

SEQ ID NO: 1657237 - RNA, 23 nt, Human
ccaagcagagguugggaggccau

SEQ ID NO: 1657238 - RNA, 20 nt, Human
ccaaacucaccugccccuca

SEQ ID NO: 1657239 - RNA, 17 nt, Human
ccaaagccuccuccagc

SEQ ID NO: 1657240 - RNA, 22 nt, Human
ccaaagccuccuccagccgcca

SEQ ID NO: 1657241 - RNA, 23 nt, Human
ccaaagcagugcaugcugucccu

SEQ ID NO: 1657242 - RNA, 19 nt, Human
ccaaagccaaagcuaggcc

SEQ ID NO: 1657243 - RNA, 22 nt, Human
ccaaacugacucuuaagaagac

SEQ ID NO: 1657244 - RNA, 19 nt, Human
ccaaagcagugcaugcugu

SEQ ID NO: 1657245 - RNA, 21 nt, Human
ccaaagcuaggccuggccaga

SEQ ID NO: 1657246 - RNA, 16 nt, Human
ccaaagcuaggccugg

SEQ ID NO: 1657247 - RNA, 17 nt, Human
ccaaagcuaggccuggc

SEQ ID NO: 1657248 - RNA, 15 nt, Human
ccaaagcuaggccug

SEQ ID NO: 1657249 - RNA, 15 nt, Human
ccaaaggaagcacau

SEQ ID NO: 1657250 - RNA, 23 nt, Human
ccaaaggaagcacaugccucucu

SEQ ID NO: 1657251 - RNA, 20 nt, Human
ccaaccaaguggcucccaca

SEQ ID NO: 1657252 - RNA, 13 nt, Human
ccaacaucaacau

SEQ ID NO: 1657253 - RNA, 21 nt, Human
ccaacauacucccaucuguga

SEQ ID NO: 1657254 - RNA, 22 nt, Human
ccaacauacucccaucugugaa

SEQ ID NO: 1657255 - RNA, 17 nt, Human
ccaacauacucccaucu

SEQ ID NO: 1657256 - RNA, 18 nt, Human
ccaacauacucccaucug

SEQ ID NO: 1657257 - RNA, 19 nt, Human
ccaacauacucccaucugu

SEQ ID NO: 1657258 - RNA, 20 nt, Human
ccaacauacucccaucugug

SEQ ID NO: 1657259 - RNA, 16 nt, Human
ccaacauacucccauc

SEQ ID NO: 1657260 - RNA, 18 nt, Human
ccaaaguacacuguuuca

SEQ ID NO: 1657261 - RNA, 15 nt, Human
ccaaaguacacuguu

SEQ ID NO: 1657262 - RNA, 20 nt, Human
ccaaaguacacuguuucaaa

SEQ ID NO: 1657263 - RNA, 23 nt, Human
ccaaauuucauaccuaucaucuu

SEQ ID NO: 1657264 - RNA, 20 nt, Human
cugagacucgcgacaaugca

SEQ ID NO: 1657265 - RNA, 17 nt, Human
cugagacucgcgacaau

SEQ ID NO: 1657266 - RNA, 19 nt, Human
cugagacucgcgacaaugc

SEQ ID NO: 1657267 - RNA, 17 nt, Human
cugcccuggugcugcca

SEQ ID NO: 1657268 - RNA, 16 nt, Human
cugcccuggugcugcc

SEQ ID NO: 1657269 - RNA, 18 nt, Human
cugcccuggugcugccac

SEQ ID NO: 1657270 - RNA, 19 nt, Human
cugcccuggugcugccaca

SEQ ID NO: 1657271 - RNA, 16 nt, Human
cugcccccucugcccu

SEQ ID NO: 1657272 - RNA, 17 nt, Human
cugcccccucugcccug

SEQ ID NO: 1657273 - RNA, 18 nt, Human
cugcccccucugcccugc

SEQ ID NO: 1657274 - RNA, 19 nt, Human
cugcccccucugcccugcg

SEQ ID NO: 1657275 - RNA, 14 nt, Human
cugccccucaacuc

SEQ ID NO: 1657276 - RNA, 22 nt, Human
cugccccucaacucuccuccag

SEQ ID NO: 1657277 - RNA, 20 nt, Human
cugcccuggugcugccacac

SEQ ID NO: 1657278 - RNA, 21 nt, Human
cugcccuggugcugccacacu

SEQ ID NO: 1657279 - RNA, 22 nt, Human
cugcccugguuuccugcccugg

SEQ ID NO: 1657280 - RNA, 23 nt, Human
cugcccugguuuccugcccuggg

SEQ ID NO: 1657281 - RNA, 12 nt, Human
cugcccugugag

SEQ ID NO: 1657282 - RNA, 13 nt, Human
cugcccugugagu

SEQ ID NO: 1657283 - RNA, 15 nt, Human
cugcccugugggccc

SEQ ID NO: 1657284 - RNA, 16 nt, Human
cugcccugugggcccc

SEQ ID NO: 1657285 - RNA, 18 nt, Human
cugcccugugggccccca

SEQ ID NO: 1657286 - RNA, 14 nt, Human
cugcccccucugcc

SEQ ID NO: 1657287 - RNA, 15 nt, Human
cugcccccucugccc

SEQ ID NO: 1657288 - RNA, 19 nt, Human
cugccccagggcucccggc

SEQ ID NO: 1657289 - RNA, 12 nt, Human
cugccauccagg

SEQ ID NO: 1657290 - RNA, 11 nt, Human
cugccagggac

SEQ ID NO: 1657291 - RNA, 12 nt, Human
cugccagggaca

SEQ ID NO: 1657292 - RNA, 15 nt, Human
cugccagggacagag

SEQ ID NO: 1657293 - RNA, 20 nt, Human
cugccauauucuguuggcca

SEQ ID NO: 1657294 - RNA, 21 nt, Human
cugccauauucuguuggccag

SEQ ID NO: 1657295 - RNA, 22 nt, Human
cugccauauucuguuggccagu

SEQ ID NO: 1657296 - RNA, 23 nt, Human
cugccauauucuguuggccagug

SEQ ID NO: 1657297 - RNA, 14 nt, Human
cugcauuugugaaa

SEQ ID NO: 1657298 - RNA, 15 nt, Human
cugcauuugugaaau

SEQ ID NO: 1657299 - RNA, 17 nt, Human
cugcauuugugaaauga

SEQ ID NO: 1657300 - RNA, 22 nt, Human
cugcauuugugaaaugauggug

SEQ ID NO: 1657301 - RNA, 15 nt, Human
cugccaaugggagcu

SEQ ID NO: 1657302 - RNA, 17 nt, Human
cugccaaugggagcuca

SEQ ID NO: 1657303 - RNA, 20 nt, Human
cugcauucaggaucaaaccc

SEQ ID NO: 1657304 - RNA, 13 nt, Human
cugcauuugugaa

SEQ ID NO: 1657305 - RNA, 22 nt, Human
cugcauuuaaaagauacaguua

SEQ ID NO: 1657306 - RNA, 20 nt, Human
cugcauuuaaaagauacagu

SEQ ID NO: 1657307 - RNA, 15 nt, Human
cugcauguuugugau

SEQ ID NO: 1657308 - RNA, 13 nt, Human
cugcauguuacau

SEQ ID NO: 1657309 - RNA, 17 nt, Human
cugcuuuuuauggccug

SEQ ID NO: 1657310 - RNA, 22 nt, Human
cugcuuuuuaaagaaugcucuu

SEQ ID NO: 1657311 - RNA, 14 nt, Human
cugcuucagccucc

SEQ ID NO: 1657312 - RNA, 16 nt, Human
cugcuucagccucccg

SEQ ID NO: 1657313 - RNA, 17 nt, Human
cugcuuaacuucacaua

SEQ ID NO: 1657314 - RNA, 15 nt, Human
cugcuuaacuucaca

SEQ ID NO: 1657315 - RNA, 13 nt, Human
cugcuucagccuc

SEQ ID NO: 1657316 - RNA, 13 nt, Human
cugcuuaacuuca

SEQ ID NO: 1657317 - RNA, 13 nt, Human
cuggacugugugc

SEQ ID NO: 1657318 - RNA, 17 nt, Human
cuggaacacuaaugagg

SEQ ID NO: 1657319 - RNA, 18 nt, Human
cugcuuuuuauggccugu

SEQ ID NO: 1657320 - RNA, 23 nt, Human
cugcuucagccucccgaguagcu

SEQ ID NO: 1657321 - RNA, 16 nt, Human
cuggaaauauuaagaa

SEQ ID NO: 1657322 - RNA, 21 nt, Human
cuggaaaucaggguuaguauu

SEQ ID NO: 1657323 - RNA, 15 nt, Human
cugcugacagacaca

SEQ ID NO: 1657324 - RNA, 18 nt, Human
cugcugacagacacaggc

SEQ ID NO: 1657325 - RNA, 19 nt, Human
cugcugacagacacaggcc

SEQ ID NO: 1657326 - RNA, 20 nt, Human
cugcugacagacacaggccc

SEQ ID NO: 1657327 - RNA, 21 nt, Human
cugcugacagacacaggcccg

SEQ ID NO: 1657328 - RNA, 23 nt, Human
cugcugacagacacaggcccggc

SEQ ID NO: 1657329 - RNA, 11 nt, Human
cugcugacagu

SEQ ID NO: 1657330 - RNA, 15 nt, Human
cugcuacagagcaga

SEQ ID NO: 1657331 - RNA, 16 nt, Human
cugcuaauuccccaga

SEQ ID NO: 1657332 - RNA, 16 nt, Human
cugccuguugggccag

SEQ ID NO: 1657333 - RNA, 14 nt, Human
cugccuguugggcc

SEQ ID NO: 1657334 - RNA, 18 nt, Human
cugccuguugggccagga

SEQ ID NO: 1657335 - RNA, 19 nt, Human
cugccuguugggccaggag

SEQ ID NO: 1657336 - RNA, 14 nt, Human
cugccuguucagcu

SEQ ID NO: 1657337 - RNA, 15 nt, Human
cugccuguucagcuc

SEQ ID NO: 1657338 - RNA, 23 nt, Human
cugccugggaucccucauccuca

SEQ ID NO: 1657339 - RNA, 15 nt, Human
cugccucgaacuggc

SEQ ID NO: 1657340 - RNA, 17 nt, Human
cugccucgaacuggcug

SEQ ID NO: 1657341 - RNA, 18 nt, Human
cugccucgaacuggcugc

SEQ ID NO: 1657342 - RNA, 19 nt, Human
cugccucgaacuggcugca

SEQ ID NO: 1657343 - RNA, 19 nt, Human
cugcccugugggcccccaa

SEQ ID NO: 1657344 - RNA, 19 nt, Human
cugugcuccauggcugcca

SEQ ID NO: 1657345 - RNA, 14 nt, Human
cugugcucuggaca

SEQ ID NO: 1657346 - RNA, 15 nt, Human
cugugcucuggacag

SEQ ID NO: 1657347 - RNA, 16 nt, Human
cugugagaugcuagaa

SEQ ID NO: 1657348 - RNA, 21 nt, Human
cugugagaugcuagaacuccc

SEQ ID NO: 1657349 - RNA, 15 nt, Human
cugugaagagaacca

SEQ ID NO: 1657350 - RNA, 18 nt, Human
cugugaacuugaaauuug

SEQ ID NO: 1657351 - RNA, 19 nt, Human
cugucgagaaacagccugu

SEQ ID NO: 1657352 - RNA, 16 nt, Human
cugucgcccaggcugg

SEQ ID NO: 1657353 - RNA, 13 nt, Human
cugucgcccaguc

SEQ ID NO: 1657354 - RNA, 15 nt, Human
cugucgcccagucug

SEQ ID NO: 1657355 - RNA, 22 nt, Human
cuguacuugcucuugaugccug

SEQ ID NO: 1657356 - RNA, 23 nt, Human
cuguacuugcucuugaugccugg

SEQ ID NO: 1657357 - RNA, 14 nt, Human
cuguacuuuuuggc

SEQ ID NO: 1657358 - RNA, 15 nt, Human
cuguacuuuuuggca

SEQ ID NO: 1657359 - RNA, 21 nt, Human
cuguaggaagguuaauguuca

SEQ ID NO: 1657360 - RNA, 12 nt, Human
cuguccugccua

SEQ ID NO: 1657361 - RNA, 20 nt, Human
cugucauuugagcagggcuc

SEQ ID NO: 1657362 - RNA, 17 nt, Human
cugucauuugagcaggg

SEQ ID NO: 1657363 - RNA, 18 nt, Human
cugucauuugagcagggc

SEQ ID NO: 1657364 - RNA, 23 nt, Human
cugucagcuccccucggagaaga

SEQ ID NO: 1657365 - RNA, 16 nt, Human
cugucauuugagcagg

SEQ ID NO: 1657366 - RNA, 18 nt, Human
cugucagccauuccuguu

SEQ ID NO: 1657367 - RNA, 21 nt, Human
cugucagcuccccucggagaa

SEQ ID NO: 1657368 - RNA, 22 nt, Human
cugguuuccugcccugggaggc

SEQ ID NO: 1657369 - RNA, 18 nt, Human
cugguuuccugcccuggg

SEQ ID NO: 1657370 - RNA, 21 nt, Human
cugguuuccugcccugggagg

SEQ ID NO: 1657371 - RNA, 23 nt, Human
cuggguuccuuccucugagccuu

SEQ ID NO: 1657372 - RNA, 14 nt, Human
cuggguucuaccca

SEQ ID NO: 1657373 - RNA, 15 nt, Human
cuggugacuuuccuc

SEQ ID NO: 1657374 - RNA, 20 nt, Human
cuggugacuuuccucuuugg

SEQ ID NO: 1657375 - RNA, 21 nt, Human
cuggugacuuuccucuuuggu

SEQ ID NO: 1657376 - RNA, 18 nt, Human
cuggguuccuuccucuga

SEQ ID NO: 1657377 - RNA, 22 nt, Human
cuggguuccuuccucugagccu

SEQ ID NO: 1657378 - RNA, 13 nt, Human
cuggguuccugca

SEQ ID NO: 1657379 - RNA, 22 nt, Human
cuggguuccagcaauucuccug

SEQ ID NO: 1657380 - RNA, 15 nt, Human
cuggguucacugcaa

SEQ ID NO: 1657381 - RNA, 14 nt, Human
cuggguucacugca

SEQ ID NO: 1657382 - RNA, 23 nt, Human
cuggguggcaccagcagccugga

SEQ ID NO: 1657383 - RNA, 22 nt, Human
cuggguggcaccagcagccugg

SEQ ID NO: 1657384 - RNA, 16 nt, Human
cuggguguggcgcagc

SEQ ID NO: 1657385 - RNA, 17 nt, Human
cuggguguggcgcagca

SEQ ID NO: 1657386 - RNA, 23 nt, Human
cuggugacuuuccucuuuggucu

SEQ ID NO: 1657387 - RNA, 18 nt, Human
cuggggccaggcuggguc

SEQ ID NO: 1657388 - RNA, 16 nt, Human
cuggggccgaaagaac

SEQ ID NO: 1657389 - RNA, 18 nt, Human
cugggcagaaggaagacu

SEQ ID NO: 1657390 - RNA, 19 nt, Human
cugggcagcugccuccccu

SEQ ID NO: 1657391 - RNA, 16 nt, Human
cugggcagcugccucc

SEQ ID NO: 1657392 - RNA, 15 nt, Human
cuggggaaccugacc

SEQ ID NO: 1657393 - RNA, 16 nt, Human
cuggggaaccugaccc

SEQ ID NO: 1657394 - RNA, 17 nt, Human
cuggggaaccugacccc

SEQ ID NO: 1657395 - RNA, 21 nt, Human
cugggcagcugccuccccucc

SEQ ID NO: 1657396 - RNA, 20 nt, Human
cugggcagcugccuccccuc

SEQ ID NO: 1657397 - RNA, 22 nt, Human
cugggcagcugccuccccuccu

SEQ ID NO: 1657398 - RNA, 17 nt, Human
cugggcagaaggaagac

SEQ ID NO: 1657399 - RNA, 16 nt, Human
cuggacugugugcuca

SEQ ID NO: 1657400 - RNA, 12 nt, Human
cuggcagcucag

SEQ ID NO: 1657401 - RNA, 13 nt, Human
cuggcagcucaga

SEQ ID NO: 1657402 - RNA, 14 nt, Human
cuggcagcucagag

SEQ ID NO: 1657403 - RNA, 13 nt, Human
cuggccccucagg

SEQ ID NO: 1657404 - RNA, 15 nt, Human
cuggcagcucagaga

SEQ ID NO: 1657405 - RNA, 17 nt, Human
cuggccccucagggucc

SEQ ID NO: 1657406 - RNA, 18 nt, Human
cuggccccucaggguccc

SEQ ID NO: 1657407 - RNA, 20 nt, Human
cuggccccucagggucccug

SEQ ID NO: 1657408 - RNA, 21 nt, Human
cuggccccucagggucccugg

SEQ ID NO: 1657409 - RNA, 15 nt, Human
cuggcucccacaggc

SEQ ID NO: 1657410 - RNA, 13 nt, Human
cuggcuccagcug

SEQ ID NO: 1657411 - RNA, 14 nt, Human
cuggcuccagcugg

SEQ ID NO: 1657412 - RNA, 18 nt, Human
cuggcuccagcuggccgg

SEQ ID NO: 1657413 - RNA, 20 nt, Human
cuggcuccagcuggccggga

SEQ ID NO: 1657414 - RNA, 12 nt, Human
cugggacacagu

SEQ ID NO: 1657415 - RNA, 13 nt, Human
cugggacacaguu

SEQ ID NO: 1657416 - RNA, 10 nt, Human
cugggacagg

SEQ ID NO: 1657417 - RNA, 20 nt, Human
cuucagagacuccugcaggc

SEQ ID NO: 1657418 - RNA, 18 nt, Human
cuucagagacuccugcag

SEQ ID NO: 1657419 - RNA, 19 nt, Human
cuucagagacuccugcagg

SEQ ID NO: 1657420 - RNA, 17 nt, Human
cuucagagacuccugca

SEQ ID NO: 1657421 - RNA, 15 nt, Human
cuucacuguaaaaua

SEQ ID NO: 1657422 - RNA, 22 nt, Human
cuuccagugaggcucugcccuu

SEQ ID NO: 1657423 - RNA, 23 nt, Human
cuuccagugaggcucugcccuug

SEQ ID NO: 1657424 - RNA, 21 nt, Human
cuuccagugaggcucugcccu

SEQ ID NO: 1657425 - RNA, 20 nt, Human
cuucauaccuacauguauuu

SEQ ID NO: 1657426 - RNA, 11 nt, Human
cuuccauaauc

SEQ ID NO: 1657427 - RNA, 21 nt, Human
cuuccauaaucuggacuccuc

SEQ ID NO: 1657428 - RNA, 11 nt, Human
cuucccaccuc

SEQ ID NO: 1657429 - RNA, 21 nt, Human
cuucccaccucucucacuccu

SEQ ID NO: 1657430 - RNA, 23 nt, Human
cuucccaccucucucacuccuug

SEQ ID NO: 1657431 - RNA, 12 nt, Human
cugugcugaguc

SEQ ID NO: 1657432 - RNA, 14 nt, Human
cugugcugagucug

SEQ ID NO: 1657433 - RNA, 19 nt, Human
cugugcugagucugaaggc

SEQ ID NO: 1657434 - RNA, 23 nt, Human
cuuauuguagcauccuggaauau

SEQ ID NO: 1657435 - RNA, 21 nt, Human
cuucaccuuuguccccaccgc

SEQ ID NO: 1657436 - RNA, 20 nt, Human
cuuauuguagcauccuggaa

SEQ ID NO: 1657437 - RNA, 22 nt, Human
cuucaccuuuguccccaccgca

SEQ ID NO: 1657438 - RNA, 15 nt, Human
cuucacggaagagcc

SEQ ID NO: 1657439 - RNA, 19 nt, Human
cuucacggaagagccuugc

SEQ ID NO: 1657440 - RNA, 17 nt, Human
cuuauggaacacucuga

SEQ ID NO: 1657441 - RNA, 19 nt, Human
cuuauggaacacucugaga

SEQ ID NO: 1657442 - RNA, 20 nt, Human
cuuauggaacacucugagac

SEQ ID NO: 1657443 - RNA, 21 nt, Human
cuuauggaacacucugagacu

SEQ ID NO: 1657444 - RNA, 13 nt, Human
cuuauggaacacu

SEQ ID NO: 1657445 - RNA, 16 nt, Human
cuuauggaacacucug

SEQ ID NO: 1657446 - RNA, 19 nt, Human
cuugaauuguaaggaauga

SEQ ID NO: 1657447 - RNA, 14 nt, Human
cuugacagggcaca

SEQ ID NO: 1657448 - RNA, 15 nt, Human
cuugacagggcacac

SEQ ID NO: 1657449 - RNA, 13 nt, Human
cuugacagggcac

SEQ ID NO: 1657450 - RNA, 20 nt, Human
cuugacagggcacaccgggc

SEQ ID NO: 1657451 - RNA, 12 nt, Human
cuugaugaagaa

SEQ ID NO: 1657452 - RNA, 20 nt, Human
cuugccuuuuucauuauuuu

SEQ ID NO: 1657453 - RNA, 22 nt, Human
cuugccuuuuucauuauuuuau

SEQ ID NO: 1657454 - RNA, 23 nt, Human
cuugccuuuuucauuauuuuauu

SEQ ID NO: 1657455 - RNA, 14 nt, Human
cuugccuuuuucau

SEQ ID NO: 1657456 - RNA, 15 nt, Human
cuugccuuuuucauu

SEQ ID NO: 1657457 - RNA, 13 nt, Human
cuugaugccuggc

SEQ ID NO: 1657458 - RNA, 12 nt, Human
cuugaugccugg

SEQ ID NO: 1657459 - RNA, 13 nt, Human
cuugaugaagaag

SEQ ID NO: 1657460 - RNA, 12 nt, Human
cuuggcgcugcc

SEQ ID NO: 1657461 - RNA, 14 nt, Human
cuuggcgcugcccc

SEQ ID NO: 1657462 - RNA, 17 nt, Human
cuuggcgcugccccugg

SEQ ID NO: 1657463 - RNA, 20 nt, Human
cuuggcgcugccccuggcag

SEQ ID NO: 1657464 - RNA, 17 nt, Human
cuucuagaaccaggcaa

SEQ ID NO: 1657465 - RNA, 13 nt, Human
cuucuagaaccag

SEQ ID NO: 1657466 - RNA, 17 nt, Human
cuuccugcaacaccuug

SEQ ID NO: 1657467 - RNA, 22 nt, Human
cuucuaaguaaaaccacagcag

SEQ ID NO: 1657468 - RNA, 23 nt, Human
cuucuaaguaaaaccacagcagu

SEQ ID NO: 1657469 - RNA, 17 nt, Human
cuucuguugcugccuca

SEQ ID NO: 1657470 - RNA, 18 nt, Human
cuucuguugcugccucau

SEQ ID NO: 1657471 - RNA, 19 nt, Human
cuucuguugcugccucaug

SEQ ID NO: 1657472 - RNA, 20 nt, Human
cuucuguugcugccucaugc

SEQ ID NO: 1657473 - RNA, 23 nt, Human
cuucuucagagacuccugcaggc

SEQ ID NO: 1657474 - RNA, 21 nt, Human
cuucuguugcugccucaugcu

SEQ ID NO: 1657475 - RNA, 20 nt, Human
cuucugacccaugcugcccu

SEQ ID NO: 1657476 - RNA, 21 nt, Human
cuucugacccaugcugcccug

SEQ ID NO: 1657477 - RNA, 22 nt, Human
cuucugacccaugcugcccugu

SEQ ID NO: 1657478 - RNA, 23 nt, Human
cuucugacccaugcugcccugug

SEQ ID NO: 1657479 - RNA, 13 nt, Human
gaaacuuuuggaa

SEQ ID NO: 1657480 - RNA, 15 nt, Human
gaaacuuuuggaagg

SEQ ID NO: 1657481 - RNA, 21 nt, Human
gaaagaaaauaccaaggaaca

SEQ ID NO: 1657482 - RNA, 20 nt, Human
gaaagacuaucuaaauguug

SEQ ID NO: 1657483 - RNA, 14 nt, Human
gaaagacuauucaa

SEQ ID NO: 1657484 - RNA, 15 nt, Human
gaaagacuauucaaa

SEQ ID NO: 1657485 - RNA, 22 nt, Human
gaaaggcuccaggagcagccac

SEQ ID NO: 1657486 - RNA, 21 nt, Human
gaaaggcuccaggagcagcca

SEQ ID NO: 1657487 - RNA, 17 nt, Human
gaaagacuauucaaaca

SEQ ID NO: 1657488 - RNA, 18 nt, Human
gaaauauuuauuuuaaua

SEQ ID NO: 1657489 - RNA, 22 nt, Human
gaaauauuuauuuuaauaaugu

SEQ ID NO: 1657490 - RNA, 18 nt, Human
gaaaucaaauaugcaaag

SEQ ID NO: 1657491 - RNA, 21 nt, Human
gaaaucaaauaugcaaagcac

SEQ ID NO: 1657492 - RNA, 19 nt, Human
gaaaucaaauaugcaaagc

SEQ ID NO: 1657493 - RNA, 20 nt, Human
gaaaucaaauaugcaaagca

SEQ ID NO: 1657494 - RNA, 22 nt, Human
gaaagggacuuggaagcuccgc

SEQ ID NO: 1657495 - RNA, 20 nt, Human
gaaagggacgcuacccggga

SEQ ID NO: 1657496 - RNA, 19 nt, Human
gaaagggacuuggaagcuc

SEQ ID NO: 1657497 - RNA, 17 nt, Human
gaaauauuuauuuuaau

SEQ ID NO: 1657498 - RNA, 15 nt, Human
gaaaauguaugugua

SEQ ID NO: 1657499 - RNA, 19 nt, Human
gaaaauggacguguuauga

SEQ ID NO: 1657500 - RNA, 23 nt, Human
gaaaauggacguguuaugacucc

SEQ ID NO: 1657501 - RNA, 18 nt, Human
gaaaagaaaaaugagccu

SEQ ID NO: 1657502 - RNA, 23 nt, Human
gaaaaugcuguauuagucacaga

SEQ ID NO: 1657503 - RNA, 21 nt, Human
gaaaauggaagacagcucuua

SEQ ID NO: 1657504 - RNA, 14 nt, Human
gaaaaacugauuuu

SEQ ID NO: 1657505 - RNA, 14 nt, Human
gaaaauuuuaaaaa

SEQ ID NO: 1657506 - RNA, 12 nt, Human
gaaaauuugaau

SEQ ID NO: 1657507 - RNA, 21 nt, Human
cuuuuuuuuuuuugagacaga

SEQ ID NO: 1657508 - RNA, 20 nt, Human
cuuuuuuuuuuuugagacag

SEQ ID NO: 1657509 - RNA, 13 nt, Human
cuuuugugcauua

SEQ ID NO: 1657510 - RNA, 12 nt, Human
cuuuugugcauu

SEQ ID NO: 1657511 - RNA, 23 nt, Human
cuuuuuuggcugcugaaggcucg

SEQ ID NO: 1657512 - RNA, 15 nt, Human
cuuuuggcauuuuac

SEQ ID NO: 1657513 - RNA, 16 nt, Human
cuuuugguuaagucug

SEQ ID NO: 1657514 - RNA, 20 nt, Human
cuuuugguuaagucuguuuu

SEQ ID NO: 1657515 - RNA, 19 nt, Human
cuuuuguagaagucacauu

SEQ ID NO: 1657516 - RNA, 18 nt, Human
cuuuugucuaugggacuc

SEQ ID NO: 1657517 - RNA, 13 nt, Human
cuuuuggagucag

SEQ ID NO: 1657518 - RNA, 18 nt, Human
cuuuuggaagguauuuaa

SEQ ID NO: 1657519 - RNA, 16 nt, Human
cuuuugccguuauuaa

SEQ ID NO: 1657520 - RNA, 23 nt, Human
cuuuugcccacacuugggagcaa

SEQ ID NO: 1657521 - RNA, 13 nt, Human
cuuuugccauuga

SEQ ID NO: 1657522 - RNA, 14 nt, Human
cuuucacaaccuuc

SEQ ID NO: 1657523 - RNA, 16 nt, Human
cuuucacaaccuucug

SEQ ID NO: 1657524 - RNA, 23 nt, Human
cuuucagccaagaauucuuaaau

SEQ ID NO: 1657525 - RNA, 20 nt, Human
cuuucagccaagaauucuua

SEQ ID NO: 1657526 - RNA, 22 nt, Human
cuuuccugaggcugggcucccu

SEQ ID NO: 1657527 - RNA, 14 nt, Human
cuuugggcugcccu

SEQ ID NO: 1657528 - RNA, 15 nt, Human
cuuugggcugcccug

SEQ ID NO: 1657529 - RNA, 19 nt, Human
cuuugggcugcccuggugc

SEQ ID NO: 1657530 - RNA, 20 nt, Human
cuuugggcugcccuggugcu

SEQ ID NO: 1657531 - RNA, 21 nt, Human
cuuugggcugcccuggugcug

SEQ ID NO: 1657532 - RNA, 15 nt, Human
cuuuguaaauuguca

SEQ ID NO: 1657533 - RNA, 13 nt, Human
cuuuguaaugaaa

SEQ ID NO: 1657534 - RNA, 15 nt, Human
cuuucuagccagagg

SEQ ID NO: 1657535 - RNA, 22 nt, Human
cuuugauauuuucaacgcagcc

SEQ ID NO: 1657536 - RNA, 16 nt, Human
cuuucuagccagagga

SEQ ID NO: 1657537 - RNA, 11 nt, Human
cuuuguauaga

SEQ ID NO: 1657538 - RNA, 20 nt, Human
cuuuguauagaaccucuuug

SEQ ID NO: 1657539 - RNA, 14 nt, Human
cuuuuauaaacuuu

SEQ ID NO: 1657540 - RNA, 13 nt, Human
cuuuuauaaacuu

SEQ ID NO: 1657541 - RNA, 14 nt, Human
cuuuuaugugaaac

SEQ ID NO: 1657542 - RNA, 18 nt, Human
cuuuuaugugaaacaugu

SEQ ID NO: 1657543 - RNA, 15 nt, Human
gacuaggguccuggg

SEQ ID NO: 1657544 - RNA, 16 nt, Human
gacuaggguccugggg

SEQ ID NO: 1657545 - RNA, 18 nt, Human
gacuaggguccuggggaa

SEQ ID NO: 1657546 - RNA, 22 nt, Human
gacuaucuaaauguugaaagau

SEQ ID NO: 1657547 - RNA, 12 nt, Human
gacucugucuca

SEQ ID NO: 1657548 - RNA, 17 nt, Human
gacucuuaagaagacug

SEQ ID NO: 1657549 - RNA, 18 nt, Human
gacucuuaagaagacugc

SEQ ID NO: 1657550 - RNA, 16 nt, Human
gacucuuaagaagacu

SEQ ID NO: 1657551 - RNA, 15 nt, Human
gagaaucacuugaac

SEQ ID NO: 1657552 - RNA, 14 nt, Human
gagaaucacuugaa

SEQ ID NO: 1657553 - RNA, 21 nt, Human
gagacccugucucaaaaaaag

SEQ ID NO: 1657554 - RNA, 11 nt, Human
gagaccugccc

SEQ ID NO: 1657555 - RNA, 12 nt, Human
gagaccugcccc

SEQ ID NO: 1657556 - RNA, 13 nt, Human
gagaccugccccu

SEQ ID NO: 1657557 - RNA, 22 nt, Human
gagaaggacccggaggggccug

SEQ ID NO: 1657558 - RNA, 23 nt, Human
gagaaggacccggaggggccugg

SEQ ID NO: 1657559 - RNA, 20 nt, Human
gagaaggacccggaggggcc

SEQ ID NO: 1657560 - RNA, 12 nt, Human
gagaaggaagcc

SEQ ID NO: 1657561 - RNA, 16 nt, Human
gagaagcggcuggcag

SEQ ID NO: 1657562 - RNA, 13 nt, Human
gagaagcggcugg

SEQ ID NO: 1657563 - RNA, 15 nt, Human
gagaagcggcuggca

SEQ ID NO: 1657564 - RNA, 11 nt, Human
gacuuuccucu

SEQ ID NO: 1657565 - RNA, 15 nt, Human
gacuggugacugauu

SEQ ID NO: 1657566 - RNA, 18 nt, Human
gacuggugacugauucuu

SEQ ID NO: 1657567 - RNA, 12 nt, Human
gacuggugacug

SEQ ID NO: 1657568 - RNA, 23 nt, Human
gacuuuucuuucagccaagaauu

SEQ ID NO: 1657569 - RNA, 21 nt, Human
gacuuuucuuuguggcuuccu

SEQ ID NO: 1657570 - RNA, 13 nt, Human
gagcaucaggcca

SEQ ID NO: 1657571 - RNA, 22 nt, Human
gagcaugccuggauggggcugc

SEQ ID NO: 1657572 - RNA, 12 nt, Human
gagcaucaggcc

SEQ ID NO: 1657573 - RNA, 21 nt, Human
gagcagggcucagcggggaca

SEQ ID NO: 1657574 - RNA, 14 nt, Human
gagcagggcucagc

SEQ ID NO: 1657575 - RNA, 18 nt, Human
gagcugggugucaagagg

SEQ ID NO: 1657576 - RNA, 22 nt, Human
gagccuugaacuuugaccucug

SEQ ID NO: 1657577 - RNA, 13 nt, Human
gagccccgaggcc

SEQ ID NO: 1657578 - RNA, 14 nt, Human
gagccuuccagggg

SEQ ID NO: 1657579 - RNA, 15 nt, Human
gagccuuccaggggu

SEQ ID NO: 1657580 - RNA, 16 nt, Human
gagccuuccaggggug

SEQ ID NO: 1657581 - RNA, 17 nt, Human
gagccuuccaggggugg

SEQ ID NO: 1657582 - RNA, 21 nt, Human
gagcugccuguucagcuccag

SEQ ID NO: 1657583 - RNA, 22 nt, Human
gagcugccuguucagcuccagc

SEQ ID NO: 1657584 - RNA, 18 nt, Human
gagcggagaaaggaaggg

SEQ ID NO: 1657585 - RNA, 21 nt, Human
gagcggagaaaggaagggcug

SEQ ID NO: 1657586 - RNA, 21 nt, Human
gagaugaugccaugggcccuc

SEQ ID NO: 1657587 - RNA, 22 nt, Human
gagaggcauccaguaucuugaa

SEQ ID NO: 1657588 - RNA, 14 nt, Human
gagaggcauccagu

SEQ ID NO: 1657589 - RNA, 17 nt, Human
gagacuccugcaggcag

SEQ ID NO: 1657590 - RNA, 18 nt, Human
gagacuccugcaggcagc

SEQ ID NO: 1657591 - RNA, 15 nt, Human
gagacuccugcaggc

SEQ ID NO: 1657592 - RNA, 16 nt, Human
gagacuccugcaggca

SEQ ID NO: 1657593 - RNA, 14 nt, Human
gagauguagccccu

SEQ ID NO: 1657594 - RNA, 21 nt, Human
gagauugcaccacugcacucc

SEQ ID NO: 1657595 - RNA, 18 nt, Human
gagauugcaccacugcac

SEQ ID NO: 1657596 - RNA, 13 nt, Human
gagauuuacaacu

SEQ ID NO: 1657597 - RNA, 13 nt, Human
gacacugaugggc

SEQ ID NO: 1657598 - RNA, 15 nt, Human
gacacugaugggcaa

SEQ ID NO: 1657599 - RNA, 16 nt, Human
gacacuuaaaaauggu

SEQ ID NO: 1657600 - RNA, 12 nt, Human
gacagacacagg

SEQ ID NO: 1657601 - RNA, 21 nt, Human
gacagcccgggcucugccucc

SEQ ID NO: 1657602 - RNA, 22 nt, Human
gacagcccgggcucugccuccc

SEQ ID NO: 1657603 - RNA, 23 nt, Human
gacagcccgggcucugccuccca

SEQ ID NO: 1657604 - RNA, 20 nt, Human
gacaggguuuugccauguug

SEQ ID NO: 1657605 - RNA, 22 nt, Human
gacaggguuuugccauguuggc

SEQ ID NO: 1657606 - RNA, 13 nt, Human
gacagcccuccau

SEQ ID NO: 1657607 - RNA, 13 nt, Human
gacagccuggcac

SEQ ID NO: 1657608 - RNA, 19 nt, Human
gacagccuggcacagggca

SEQ ID NO: 1657609 - RNA, 11 nt, Human
gacagcuccuu

SEQ ID NO: 1657610 - RNA, 14 nt, Human
gacagugaaagaaa

SEQ ID NO: 1657611 - RNA, 17 nt, Human
gacagucaccucaugga

SEQ ID NO: 1657612 - RNA, 15 nt, Human
gacaaaauggaauac

SEQ ID NO: 1657613 - RNA, 14 nt, Human
gacacacagcucug

SEQ ID NO: 1657614 - RNA, 15 nt, Human
gacacacagcucugu

SEQ ID NO: 1657615 - RNA, 17 nt, Human
gacacacagcucugucc

SEQ ID NO: 1657616 - RNA, 18 nt, Human
gacacacagcucuguccu

SEQ ID NO: 1657617 - RNA, 19 nt, Human
gacacacagcucuguccug

SEQ ID NO: 1657618 - RNA, 16 nt, Human
gaauuuuguguuagag

SEQ ID NO: 1657619 - RNA, 22 nt, Human
gaauuuuguguuagagauuuuu

SEQ ID NO: 1657620 - RNA, 13 nt, Human
gaauuuuguguua

SEQ ID NO: 1657621 - RNA, 21 nt, Human
gaauuuugugcccccauguaa

SEQ ID NO: 1657622 - RNA, 23 nt, Human
gaauuuuggcugugucucccuuc

SEQ ID NO: 1657623 - RNA, 20 nt, Human
gaauuuugugcccccaugua

SEQ ID NO: 1657624 - RNA, 21 nt, Human
gaauuuuauuuuuugggaaaa

SEQ ID NO: 1657625 - RNA, 19 nt, Human
gaauuuuggcugugucucc

SEQ ID NO: 1657626 - RNA, 12 nt, Human
gaauuaugaaac

SEQ ID NO: 1657627 - RNA, 11 nt, Human
gaauuaguuuu

SEQ ID NO: 1657628 - RNA, 13 nt, Human
gacacacugaaga

SEQ ID NO: 1657629 - RNA, 21 nt, Human
gacacacagcucuguccuggg

SEQ ID NO: 1657630 - RNA, 12 nt, Human
gacacacaugaa

SEQ ID NO: 1657631 - RNA, 14 nt, Human
gacacacugaagaa

SEQ ID NO: 1657632 - RNA, 11 nt, Human
gaaugaauguc

SEQ ID NO: 1657633 - RNA, 14 nt, Human
gaaugaaugucagu

SEQ ID NO: 1657634 - RNA, 18 nt, Human
gaaugaaugucaguguga

SEQ ID NO: 1657635 - RNA, 22 nt, Human
gaaugaaugucagugugacuga

SEQ ID NO: 1657636 - RNA, 22 nt, Human
gaaugagagacacacugaagaa

SEQ ID NO: 1657637 - RNA, 23 nt, Human
gaaugagagacacacugaagaag

SEQ ID NO: 1657638 - RNA, 20 nt, Human
gaaugagagacacacugaag

SEQ ID NO: 1657639 - RNA, 15 nt, Human
gaaguggggacagag

SEQ ID NO: 1657640 - RNA, 12 nt, Human
gaaguggaaugg

SEQ ID NO: 1657641 - RNA, 19 nt, Human
gaagucuuuguacagacaa

SEQ ID NO: 1657642 - RNA, 20 nt, Human
gaagucuuuguacagacaac

SEQ ID NO: 1657643 - RNA, 18 nt, Human
gaagucuuuguacagaca

SEQ ID NO: 1657644 - RNA, 14 nt, Human
gaagugaaacugcu

SEQ ID NO: 1657645 - RNA, 19 nt, Human
gaaggcucgagcaugccug

SEQ ID NO: 1657646 - RNA, 16 nt, Human
gaaggcucgagcaugc

SEQ ID NO: 1657647 - RNA, 17 nt, Human
gaaggcucgagcaugcc

SEQ ID NO: 1657648 - RNA, 13 nt, Human
gaaauccagggug

SEQ ID NO: 1657649 - RNA, 18 nt, Human
gaaauccagggugguggu

SEQ ID NO: 1657650 - RNA, 23 nt, Human
gaagcucagggccuggcucaggu

SEQ ID NO: 1657651 - RNA, 20 nt, Human
gaagcucagggccuggcuca

SEQ ID NO: 1657652 - RNA, 21 nt, Human
gaagcucagggccuggcucag

SEQ ID NO: 1657653 - RNA, 16 nt, Human
gaagcucagggccugg

SEQ ID NO: 1657654 - RNA, 17 nt, Human
gaagcucagggccuggc

SEQ ID NO: 1657655 - RNA, 18 nt, Human
gaagcucagggccuggcu

SEQ ID NO: 1657656 - RNA, 19 nt, Human
gaagcucagggccuggcuc

SEQ ID NO: 1657657 - RNA, 14 nt, Human
gaagcucagggccu

SEQ ID NO: 1657658 - RNA, 15 nt, Human
gaagcucagggccug

SEQ ID NO: 1657659 - RNA, 19 nt, Human
gcagagcagagaccauccc

SEQ ID NO: 1657660 - RNA, 20 nt, Human
gcagagcagagaccaucccu

SEQ ID NO: 1657661 - RNA, 24 nt, Human
gcagagcaccuuagacagucccug

SEQ ID NO: 1657662 - RNA, 12 nt, Human
gcagagcagaga

SEQ ID NO: 1657663 - RNA, 14 nt, Human
gcagagcagagacc

SEQ ID NO: 1657664 - RNA, 15 nt, Human
gcagagcagagacca

SEQ ID NO: 1657665 - RNA, 19 nt, Human
gcagagcaccuuagacagu

SEQ ID NO: 1657666 - RNA, 22 nt, Human
gcagagcaccuuagacaguccc

SEQ ID NO: 1657667 - RNA, 23 nt, Human
gcagagcaccuuagacagucccu

SEQ ID NO: 1657668 - RNA, 12 nt, Human
gcacugacauug

SEQ ID NO: 1657669 - RNA, 21 nt, Human
gcaccggcuggccuggccccu

SEQ ID NO: 1657670 - RNA, 23 nt, Human
gcaccggcuggccuggccccuca

SEQ ID NO: 1657671 - RNA, 19 nt, Human
gcaccggcuggccuggccc

SEQ ID NO: 1657672 - RNA, 14 nt, Human
gcacaugccucucu

SEQ ID NO: 1657673 - RNA, 17 nt, Human
gcacaugccucucucag

SEQ ID NO: 1657674 - RNA, 18 nt, Human
gcacaugccucucucagg

SEQ ID NO: 1657675 - RNA, 19 nt, Human
gcacaugccucucucaggc

SEQ ID NO: 1657676 - RNA, 20 nt, Human
gcacaugccucucucaggcc

SEQ ID NO: 1657677 - RNA, 21 nt, Human
gcacaugccucucucaggcca

SEQ ID NO: 1657678 - RNA, 22 nt, Human
gcacaugccucucucaggccaa

SEQ ID NO: 1657679 - RNA, 21 nt, Human
gcacaucagcacgauuucugu

SEQ ID NO: 1657680 - RNA, 20 nt, Human
gcacaucagcacgauuucug

SEQ ID NO: 1657681 - RNA, 19 nt, Human
gcacaucagcacgauuucu

SEQ ID NO: 1657682 - RNA, 13 nt, Human
gcacaugccucuc

SEQ ID NO: 1657683 - RNA, 22 nt, Human
gcacaaucucggcucacugcau

SEQ ID NO: 1657684 - RNA, 21 nt, Human
gcacaaucucggcucacugca

SEQ ID NO: 1657685 - RNA, 18 nt, Human
gcacaguuuucugagaaa

SEQ ID NO: 1657686 - RNA, 14 nt, Human
gcacaguuuucuga

SEQ ID NO: 1657687 - RNA, 17 nt, Human
gcacaguuuucugagaa

SEQ ID NO: 1657688 - RNA, 15 nt, Human
gcaagugagagcugg

SEQ ID NO: 1657689 - RNA, 23 nt, Human
gcaauaaggggagaguaacccug

SEQ ID NO: 1657690 - RNA, 22 nt, Human
gcacaagcuccaagcucccagg

SEQ ID NO: 1657691 - RNA, 23 nt, Human
gcacaagcuccaagcucccaggc

SEQ ID NO: 1657692 - RNA, 14 nt, Human
gcacaagcugcacc

SEQ ID NO: 1657693 - RNA, 13 nt, Human
gcaagugagagcu

SEQ ID NO: 1657694 - RNA, 10 nt, Human
gcagggaggg

SEQ ID NO: 1657695 - RNA, 13 nt, Human
gcagggagggccu

SEQ ID NO: 1657696 - RNA, 13 nt, Human
gcagggaaacagc

SEQ ID NO: 1657697 - RNA, 19 nt, Human
gcagggacuugaacccaua

SEQ ID NO: 1657698 - RNA, 19 nt, Human
gcaggcuggcccugcccug

SEQ ID NO: 1657699 - RNA, 20 nt, Human
gcaggcuggcccugcccugg

SEQ ID NO: 1657700 - RNA, 21 nt, Human
gcaggcuggcccugcccuggu

SEQ ID NO: 1657701 - RNA, 15 nt, Human
gcaggcuggcccugc

SEQ ID NO: 1657702 - RNA, 16 nt, Human
gcaggcuggcccugcc

SEQ ID NO: 1657703 - RNA, 17 nt, Human
gcaggcuggcccugccc

SEQ ID NO: 1657704 - RNA, 18 nt, Human
gcaggcuggcccugcccu

SEQ ID NO: 1657705 - RNA, 14 nt, Human
gcaggcuggcccug

SEQ ID NO: 1657706 - RNA, 23 nt, Human
gcaggcucucaggccagcugcuu

SEQ ID NO: 1657707 - RNA, 17 nt, Human
gcagcugcgguccaccc

SEQ ID NO: 1657708 - RNA, 19 nt, Human
gcagcugcgguccacccag

SEQ ID NO: 1657709 - RNA, 20 nt, Human
gcaggcucucaggccagcug

SEQ ID NO: 1657710 - RNA, 22 nt, Human
gcaggcucucaggccagcugcu

SEQ ID NO: 1657711 - RNA, 22 nt, Human
gcagcugccuccccuccucugc

SEQ ID NO: 1657712 - RNA, 18 nt, Human
gcagcugccuccccuccu

SEQ ID NO: 1657713 - RNA, 17 nt, Human
gcagcugccuccccucc

SEQ ID NO: 1657714 - RNA, 16 nt, Human
gcagcugccuccccuc

SEQ ID NO: 1657715 - RNA, 15 nt, Human
gcagcugccuccccu

SEQ ID NO: 1657716 - RNA, 13 nt, Human
gcagcugccuccc

SEQ ID NO: 1657717 - RNA, 12 nt, Human
gcagcugccucc

SEQ ID NO: 1657718 - RNA, 11 nt, Human
gcagcugccuc

SEQ ID NO: 1657719 - RNA, 21 nt, Human
gcauaacauaaaucugugaac

SEQ ID NO: 1657720 - RNA, 23 nt, Human
gcauaacauaaaucugugaacuu

SEQ ID NO: 1657721 - RNA, 22 nt, Human
gcauaacguauaaaagccuguu

SEQ ID NO: 1657722 - RNA, 20 nt, Human
gcauaccacuuuuguucuug

SEQ ID NO: 1657723 - RNA, 17 nt, Human
gcauaccacuuuuguuc

SEQ ID NO: 1657724 - RNA, 14 nt, Human
gcauacguacacau

SEQ ID NO: 1657725 - RNA, 16 nt, Human
gcagccacauuccuga

SEQ ID NO: 1657726 - RNA, 14 nt, Human
gcagccacuauugu

SEQ ID NO: 1657727 - RNA, 12 nt, Human
gcagccaggcca

SEQ ID NO: 1657728 - RNA, 16 nt, Human
gcagccaggccacaag

SEQ ID NO: 1657729 - RNA, 13 nt, Human
gcagccaggccac

SEQ ID NO: 1657730 - RNA, 14 nt, Human
gcagccaggccaca

SEQ ID NO: 1657731 - RNA, 11 nt, Human
gauacuacagu

SEQ ID NO: 1657732 - RNA, 16 nt, Human
gauacuacaguuuguu

SEQ ID NO: 1657733 - RNA, 13 nt, Human
gauacccauccca

SEQ ID NO: 1657734 - RNA, 14 nt, Human
gauacccaucccau

SEQ ID NO: 1657735 - RNA, 16 nt, Human
gauacuugaaaauuaa

SEQ ID NO: 1657736 - RNA, 17 nt, Human
gauacuugaaaauuaac

SEQ ID NO: 1657737 - RNA, 13 nt, Human
gauaugugaacag

SEQ ID NO: 1657738 - RNA, 14 nt, Human
gauaugugaacagu

SEQ ID NO: 1657739 - RNA, 20 nt, Human
gauauguaccuaacgaagua

SEQ ID NO: 1657740 - RNA, 16 nt, Human
gagucccaccuuggcu

SEQ ID NO: 1657741 - RNA, 20 nt, Human
gagucccaccuuggcugcag

SEQ ID NO: 1657742 - RNA, 15 nt, Human
gagucaccaagccca

SEQ ID NO: 1657743 - RNA, 13 nt, Human
gagucaccaagcc

SEQ ID NO: 1657744 - RNA, 14 nt, Human
gagucaccaagccc

SEQ ID NO: 1657745 - RNA, 11 nt, Human
gagugcaguga

SEQ ID NO: 1657746 - RNA, 12 nt, Human
gagugcagugag

SEQ ID NO: 1657747 - RNA, 21 nt, Human
gagucccaccuuggcugcagg

SEQ ID NO: 1657748 - RNA, 12 nt, Human
gagugagcuggu

SEQ ID NO: 1657749 - RNA, 12 nt, Human
gaggugggaucc

SEQ ID NO: 1657750 - RNA, 11 nt, Human
gaggugggagg

SEQ ID NO: 1657751 - RNA, 14 nt, Human
gaggucuguucuuu

SEQ ID NO: 1657752 - RNA, 13 nt, Human
gaggucuguucuu

SEQ ID NO: 1657753 - RNA, 20 nt, Human
gaguuugggguaugggagag

SEQ ID NO: 1657754 - RNA, 13 nt, Human
gagugcagugagc

SEQ ID NO: 1657755 - RNA, 20 nt, Human
gaguuguuacauuuuuaagu

SEQ ID NO: 1657756 - RNA, 16 nt, Human
gaguuguuacauuuuu

SEQ ID NO: 1657757 - RNA, 16 nt, Human
gaguuuagcuggaaaa

SEQ ID NO: 1657758 - RNA, 20 nt, Human
gauuacaggugugaaccacc

SEQ ID NO: 1657759 - RNA, 20 nt, Human
gauuacaggugugagccacc

SEQ ID NO: 1657760 - RNA, 14 nt, Human
gaugugaacacauc

SEQ ID NO: 1657761 - RNA, 16 nt, Human
gaugugaacacaucag

SEQ ID NO: 1657762 - RNA, 14 nt, Human
gauuagaauucugu

SEQ ID NO: 1657763 - RNA, 15 nt, Human
gauuagaauucugua

SEQ ID NO: 1657764 - RNA, 23 nt, Human
gauuagaauucuguauagauuag

SEQ ID NO: 1657765 - RNA, 18 nt, Human
gauuacugccuauuuuaa

SEQ ID NO: 1657766 - RNA, 14 nt, Human
gauuaccagggacu

SEQ ID NO: 1657767 - RNA, 13 nt, Human
gauuauucacuga

SEQ ID NO: 1657768 - RNA, 15 nt, Human
gauuauucacugauu

SEQ ID NO: 1657769 - RNA, 16 nt, Human
gauuauucacugauuu

SEQ ID NO: 1657770 - RNA, 21 nt, Human
gauuauucacugauuugacau

SEQ ID NO: 1657771 - RNA, 14 nt, Human
gauuagagaguguu

SEQ ID NO: 1657772 - RNA, 18 nt, Human
gauuagagaguguugaaa

SEQ ID NO: 1657773 - RNA, 17 nt, Human
gauuagggagagaagau

SEQ ID NO: 1657774 - RNA, 17 nt, Human
gauauuuuuuucuuuuc

SEQ ID NO: 1657775 - RNA, 15 nt, Human
gauauuuuuuucuuu

SEQ ID NO: 1657776 - RNA, 16 nt, Human
gauauuuugcuuugug

SEQ ID NO: 1657777 - RNA, 11 nt, Human
gauccaguuuu

SEQ ID NO: 1657778 - RNA, 17 nt, Human
gauccaguuuuguuugg

SEQ ID NO: 1657779 - RNA, 22 nt, Human
gauccaguuuuguuuggaccaa

SEQ ID NO: 1657780 - RNA, 15 nt, Human
gaucucuaacuucac

SEQ ID NO: 1657781 - RNA, 18 nt, Human
gaucucuugagccuggga

SEQ ID NO: 1657782 - RNA, 17 nt, Human
gaucucuugagccuggg

SEQ ID NO: 1657783 - RNA, 12 nt, Human
gaucucuugagc

SEQ ID NO: 1657784 - RNA, 16 nt, Human
gaucucuugagccugg

SEQ ID NO: 1657785 - RNA, 21 nt, Human
gaugaugaaaugaggucagag

SEQ ID NO: 1657786 - RNA, 20 nt, Human
gaugaucuuugcagacaggc

SEQ ID NO: 1657787 - RNA, 21 nt, Human
gaugaucuuugcagacaggca

SEQ ID NO: 1657788 - RNA, 14 nt, Human
gguagcuuuucccu

SEQ ID NO: 1657789 - RNA, 16 nt, Human
gguccacaacacacag

SEQ ID NO: 1657790 - RNA, 22 nt, Human
gguaugaucacggcucacugca

SEQ ID NO: 1657791 - RNA, 14 nt, Human
gguaugcaaucaaa

SEQ ID NO: 1657792 - RNA, 19 nt, Human
gguccacccaggagccccg

SEQ ID NO: 1657793 - RNA, 17 nt, Human
gguccacccaggagccc

SEQ ID NO: 1657794 - RNA, 12 nt, Human
gguccacccagg

SEQ ID NO: 1657795 - RNA, 13 nt, Human
gguccacccagga

SEQ ID NO: 1657796 - RNA, 15 nt, Human
gguccacccaggagc

SEQ ID NO: 1657797 - RNA, 16 nt, Human
gguccacccaggagcc

SEQ ID NO: 1657798 - RNA, 18 nt, Human
aaagaaguggggacagag

SEQ ID NO: 1657799 - RNA, 12 nt, Human
aaacuuuacuau

SEQ ID NO: 1657800 - RNA, 18 nt, Human
aaacuuuacuauggcccu

SEQ ID NO: 1657801 - RNA, 22 nt, Human
aaacuuuaccuuuuuuauacau

SEQ ID NO: 1657802 - RNA, 17 nt, Human
aaacuuuaccuuuuuua

SEQ ID NO: 1657803 - RNA, 15 nt, Human
gguccauagagagca

SEQ ID NO: 1657804 - RNA, 13 nt, Human
aaagacaccuacu

SEQ ID NO: 1657805 - RNA, 19 nt, Human
aaagacaccuacugagugg

SEQ ID NO: 1657806 - RNA, 17 nt, Human
aaagacuaucuaaaugu

SEQ ID NO: 1657807 - RNA, 14 nt, Human
aaagacuauucaaa

SEQ ID NO: 1657808 - RNA, 18 nt, Human
ggguggggggggugcugg

SEQ ID NO: 1657809 - RNA, 12 nt, Human
ggguggugaccu

SEQ ID NO: 1657810 - RNA, 17 nt, Human
ggguguggcgcagcaua

SEQ ID NO: 1657811 - RNA, 19 nt, Human
ggguggcaccagcagccug

SEQ ID NO: 1657812 - RNA, 20 nt, Human
ggguggggaccucaggccug

SEQ ID NO: 1657813 - RNA, 11 nt, Human
ggggccuggca

SEQ ID NO: 1657814 - RNA, 12 nt, Human
ggggccuggcag

SEQ ID NO: 1657815 - RNA, 13 nt, Human
ggguggaugccug

SEQ ID NO: 1657816 - RNA, 17 nt, Human
ggguggaugccuggugg

SEQ ID NO: 1657817 - RNA, 15 nt, Human
ggguggcaccagcag

SEQ ID NO: 1657818 - RNA, 14 nt, Human
gguaaucgaccugc

SEQ ID NO: 1657819 - RNA, 17 nt, Human
gguaaucgaccugccuc

SEQ ID NO: 1657820 - RNA, 18 nt, Human
gguaaucgaccugccucg

SEQ ID NO: 1657821 - RNA, 24 nt, Human
gguacaaccuguucugcuuuccuc

SEQ ID NO: 1657822 - RNA, 23 nt, Human
gguacaaccuguucugcuuuccu

SEQ ID NO: 1657823 - RNA, 18 nt, Human
gguaacuagggaagauaa

SEQ ID NO: 1657824 - RNA, 14 nt, Human
gguaacaggcagau

SEQ ID NO: 1657825 - RNA, 20 nt, Human
gguaacaggcagauacagga

SEQ ID NO: 1657826 - RNA, 17 nt, Human
ggguuucuaaagcugcc

SEQ ID NO: 1657827 - RNA, 20 nt, Human
ggguuuuauuguuuaaaauc

SEQ ID NO: 1657828 - RNA, 18 nt, Human
ggugcaaugaccuuucaa

SEQ ID NO: 1657829 - RNA, 19 nt, Human
ggugcaaugaccuuucaau

SEQ ID NO: 1657830 - RNA, 20 nt, Human
ggugcaaugaccuuucaaua

SEQ ID NO: 1657831 - RNA, 20 nt, Human
ggugcugggccccugccucu

SEQ ID NO: 1657832 - RNA, 15 nt, Human
ggugccaguuauggc

SEQ ID NO: 1657833 - RNA, 14 nt, Human
gguggaugccuggu

SEQ ID NO: 1657834 - RNA, 21 nt, Human
gguggaugccugguggcagcu

SEQ ID NO: 1657835 - RNA, 22 nt, Human
aaagcagcguuucuaugacaca

SEQ ID NO: 1657836 - RNA, 18 nt, Human
aaagcagcguuucuauga

SEQ ID NO: 1657837 - RNA, 16 nt, Human
aaagcagcguuucuau

SEQ ID NO: 1657838 - RNA, 17 nt, Human
aaagcaggcagaacuca

SEQ ID NO: 1657839 - RNA, 19 nt, Human
aaagcaggcagaacucauc

SEQ ID NO: 1657840 - RNA, 17 nt, Human
aaagcagggacuugaac

SEQ ID NO: 1657841 - RNA, 14 nt, Human
ggucggaaaacaug

SEQ ID NO: 1657842 - RNA, 17 nt, Human
ggucuacacugugcuga

SEQ ID NO: 1657843 - RNA, 13 nt, Human
ggucggaaaacau

SEQ ID NO: 1657844 - RNA, 13 nt, Human
aaagcaaaugucu

SEQ ID NO: 1657845 - RNA, 21 nt, Human
gguccugcugcaguugccagu

SEQ ID NO: 1657846 - RNA, 23 nt, Human
gguccugcugcaguugccaguca

SEQ ID NO: 1657847 - RNA, 15 nt, Human
aaagacuauucaaac

SEQ ID NO: 1657848 - RNA, 13 nt, Human
aaagcaaaggaga

SEQ ID NO: 1657849 - RNA, 12 nt, Human
gguguggaagag

SEQ ID NO: 1657850 - RNA, 21 nt, Human
ggugugcggccuuuggcuuca

SEQ ID NO: 1657851 - RNA, 13 nt, Human
ggugugcucugau

SEQ ID NO: 1657852 - RNA, 22 nt, Human
gguucaggguuggccccugccc

SEQ ID NO: 1657853 - RNA, 18 nt, Human
gguucaggguuggccccu

SEQ ID NO: 1657854 - RNA, 21 nt, Human
gguucaggguuggccccugcc

SEQ ID NO: 1657855 - RNA, 23 nt, Human
gguuccagcaauucuccugccuc

SEQ ID NO: 1657856 - RNA, 15 nt, Human
gguuccccuguucac

SEQ ID NO: 1657857 - RNA, 24 nt, Human
gguuccagcaauucuccugccuca

SEQ ID NO: 1657858 - RNA, 16 nt, Human
gguuccuccccuccuc

SEQ ID NO: 1657859 - RNA, 22 nt, Human
gguucccuuugacgccauccca

SEQ ID NO: 1657860 - RNA, 21 nt, Human
gguucccuuugacgccauccc

SEQ ID NO: 1657861 - RNA, 13 nt, Human
gguuucagaaaug

SEQ ID NO: 1657862 - RNA, 12 nt, Human
gguuucagaaau

SEQ ID NO: 1657863 - RNA, 15 nt, Human
gguuucagaaaugug

SEQ ID NO: 1657864 - RNA, 14 nt, Human
gguuucagaaaugu

SEQ ID NO: 1657865 - RNA, 19 nt, Human
gguuccuuccucugagccu

SEQ ID NO: 1657866 - RNA, 20 nt, Human
gguuccuuccucugagccuu

SEQ ID NO: 1657867 - RNA, 16 nt, Human
gguuuagaaagcuugc

SEQ ID NO: 1657868 - RNA, 18 nt, Human
gguucuggugugaacuaa

SEQ ID NO: 1657869 - RNA, 16 nt, Human
aaagccuguuuaagag

SEQ ID NO: 1657870 - RNA, 18 nt, Human
aaagccuguuuaagagac

SEQ ID NO: 1657871 - RNA, 20 nt, Human
ggugggaggauugcuugagc

SEQ ID NO: 1657872 - RNA, 14 nt, Human
ggugggauccucca

SEQ ID NO: 1657873 - RNA, 15 nt, Human
ggugggauccuccag

SEQ ID NO: 1657874 - RNA, 19 nt, Human
ggugggauccuccaggugc

SEQ ID NO: 1657875 - RNA, 13 nt, Human
gguggggcagcuu

SEQ ID NO: 1657876 - RNA, 17 nt, Human
gguggggcagcuugagg

SEQ ID NO: 1657877 - RNA, 17 nt, Human
gguggggggggugcugg

SEQ ID NO: 1657878 - RNA, 15 nt, Human
gguggggucacucug

SEQ ID NO: 1657879 - RNA, 23 nt, Human
gguggggucacucuggcagcuca

SEQ ID NO: 1657880 - RNA, 13 nt, Human
ggugucgggcaug

SEQ ID NO: 1657881 - RNA, 16 nt, Human
ggugucgggcaugaca

SEQ ID NO: 1657882 - RNA, 18 nt, Human
ggugugagucaccaagcc

SEQ ID NO: 1657883 - RNA, 16 nt, Human
ggugugacugaauuuc

SEQ ID NO: 1657884 - RNA, 16 nt, Human
ggugugaccacugcag

SEQ ID NO: 1657885 - RNA, 20 nt, Human
aaaguuuaauauuaaagcca

SEQ ID NO: 1657886 - RNA, 21 nt, Human
aaaguuuaauauuaaagccau

SEQ ID NO: 1657887 - RNA, 22 nt, Human
aaaguuuaauauuaaagccaug

SEQ ID NO: 1657888 - RNA, 16 nt, Human
aaaguuuaauauuaaa

SEQ ID NO: 1657889 - RNA, 19 nt, Human
aaaguuuaauauuaaagcc

SEQ ID NO: 1657890 - RNA, 13 nt, Human
aaaguugaauuua

SEQ ID NO: 1657891 - RNA, 23 nt, Human
aaaguucccuacuuccugugacu

SEQ ID NO: 1657892 - RNA, 16 nt, Human
aaaguugaauuuauug

SEQ ID NO: 1657893 - RNA, 22 nt, Human
aaaguugaauuuauuggcuuuu

SEQ ID NO: 1657894 - RNA, 16 nt, Human
aaaguugaauuuuaca

SEQ ID NO: 1657895 - RNA, 16 nt, Human
aaaguuuguugaaaca

SEQ ID NO: 1657896 - RNA, 21 nt, Human
aaaguuucucuuuucaaaaca

SEQ ID NO: 1657897 - RNA, 23 nt, Human
aaaguuucucuuuucaaaacauu

SEQ ID NO: 1657898 - RNA, 20 nt, Human
gguuuggacaaaauggaaua

SEQ ID NO: 1657899 - RNA, 21 nt, Human
aaaguucccuacuuccuguga

SEQ ID NO: 1657900 - RNA, 12 nt, Human
aaauaaugugaa

SEQ ID NO: 1657901 - RNA, 13 nt, Human
aaauaaugugaaa

SEQ ID NO: 1657902 - RNA, 15 nt, Human
aaauaauuuuuauau

SEQ ID NO: 1657903 - RNA, 18 nt, Human
aaauaauuuuuauauuug

SEQ ID NO: 1657904 - RNA, 20 nt, Human
aaauaauuuuuauauuugaa

SEQ ID NO: 1657905 - RNA, 14 nt, Human
aaauaaugugaaac

SEQ ID NO: 1657906 - RNA, 23 nt, Human
gggcuacaccuuagccugcccuc

SEQ ID NO: 1657907 - RNA, 15 nt, Human
gggcgggaggauguu

SEQ ID NO: 1657908 - RNA, 22 nt, Human
gggccucggacuuagcugggag

SEQ ID NO: 1657909 - RNA, 15 nt, Human
gggccuccugugugu

SEQ ID NO: 1657910 - RNA, 13 nt, Human
gggccuccugugu

SEQ ID NO: 1657911 - RNA, 20 nt, Human
gggccucuuaugggcugggu

SEQ ID NO: 1657912 - RNA, 14 nt, Human
gggccaguuggucc

SEQ ID NO: 1657913 - RNA, 18 nt, Human
gggccaguuggucccccu

SEQ ID NO: 1657914 - RNA, 22 nt, Human
gggccaguuggucccccuucca

SEQ ID NO: 1657915 - RNA, 23 nt, Human
gggccaguuggucccccuuccau

SEQ ID NO: 1657916 - RNA, 18 nt, Human
gggccagugcuccagcca

SEQ ID NO: 1657917 - RNA, 14 nt, Human
gggccagugcucca

SEQ ID NO: 1657918 - RNA, 14 nt, Human
gggccaggcugggu

SEQ ID NO: 1657919 - RNA, 15 nt, Human
gggccaggcuggguc

SEQ ID NO: 1657920 - RNA, 21 nt, Human
gggccaggcugggucgcccug

SEQ ID NO: 1657921 - RNA, 12 nt, Human
gggccaggagcc

SEQ ID NO: 1657922 - RNA, 21 nt, Human
aaaaugcuguauuagucacag

SEQ ID NO: 1657923 - RNA, 13 nt, Human
gggccaggcuggg

SEQ ID NO: 1657924 - RNA, 11 nt, Human
gggccaggagc

SEQ ID NO: 1657925 - RNA, 14 nt, Human
aaaaugagccuggc

SEQ ID NO: 1657926 - RNA, 21 nt, Human
aaaaugagccuggcaagaaug

SEQ ID NO: 1657927 - RNA, 19 nt, Human
aaaaguauguuagugcaaa

SEQ ID NO: 1657928 - RNA, 22 nt, Human
aaacauccuacaagacacagug

SEQ ID NO: 1657929 - RNA, 18 nt, Human
aaacauccuacaagacac

SEQ ID NO: 1657930 - RNA, 12 nt, Human
ggggacagcucc

SEQ ID NO: 1657931 - RNA, 14 nt, Human
ggggacagcuccuu

SEQ ID NO: 1657932 - RNA, 20 nt, Human
ggggacagcuccuucugucc

SEQ ID NO: 1657933 - RNA, 20 nt, Human
aaacaagaccacguuucuaa

SEQ ID NO: 1657934 - RNA, 16 nt, Human
aaacacauuuuucuua

SEQ ID NO: 1657935 - RNA, 20 nt, Human
aaacaagcacuaaacaaaga

SEQ ID NO: 1657936 - RNA, 20 nt, Human
aaacagucucaggaaaucaa

SEQ ID NO: 1657937 - RNA, 13 nt, Human
gggcugcccuggu

SEQ ID NO: 1657938 - RNA, 14 nt, Human
gggcugcccuggug

SEQ ID NO: 1657939 - RNA, 15 nt, Human
gggcugcccuggugc

SEQ ID NO: 1657940 - RNA, 21 nt, Human
gggcugcccuggugcugccac

SEQ ID NO: 1657941 - RNA, 16 nt, Human
gggcugggagcucugc

SEQ ID NO: 1657942 - RNA, 18 nt, Human
gggcugggagcucugcag

SEQ ID NO: 1657943 - RNA, 12 nt, Human
gggcugggcaga

SEQ ID NO: 1657944 - RNA, 20 nt, Human
gggcuggguucuacccaggu

SEQ ID NO: 1657945 - RNA, 10 nt, Human
gggcucagca

SEQ ID NO: 1657946 - RNA, 22 nt, Human
gggcugcaccggcuggccuggc

SEQ ID NO: 1657947 - RNA, 18 nt, Human
gggcucagcaaaagaugc

SEQ ID NO: 1657948 - RNA, 21 nt, Human
gggcugcaugcgggcuuccuc

SEQ ID NO: 1657949 - RNA, 18 nt, Human
gggcugcaugcgggcuuc

SEQ ID NO: 1657950 - RNA, 12 nt, Human
aaaaugugugug

SEQ ID NO: 1657951 - RNA, 22 nt, Human
aaaauuuuuucucuaggaaaua

SEQ ID NO: 1657952 - RNA, 22 nt, Human
gggcuggguucuacccaggugc

SEQ ID NO: 1657953 - RNA, 15 nt, Human
aaaaugugauaugua

SEQ ID NO: 1657954 - RNA, 22 nt, Human
gggaggcucuggagcccacugu

SEQ ID NO: 1657955 - RNA, 14 nt, Human
gggagggcuccaga

SEQ ID NO: 1657956 - RNA, 15 nt, Human
gggagggcuccagac

SEQ ID NO: 1657957 - RNA, 17 nt, Human
gggagggcuccagacac

SEQ ID NO: 1657958 - RNA, 18 nt, Human
gggagggcuccagacaca

SEQ ID NO: 1657959 - RNA, 17 nt, Human
gggaggucgaggcagga

SEQ ID NO: 1657960 - RNA, 18 nt, Human
gggaggucgaggcaggag

SEQ ID NO: 1657961 - RNA, 19 nt, Human
gggaggucgaggcaggagg

SEQ ID NO: 1657962 - RNA, 19 nt, Human
aaaagguaugcaaucaaau

SEQ ID NO: 1657963 - RNA, 12 nt, Human
gggcagcugccu

SEQ ID NO: 1657964 - RNA, 23 nt, Human
gggcagagcagagaccaucccug

SEQ ID NO: 1657965 - RNA, 17 nt, Human
gggcagagcagagacca

SEQ ID NO: 1657966 - RNA, 22 nt, Human
gggcagagcagagaccaucccu

SEQ ID NO: 1657967 - RNA, 16 nt, Human
gggcaacccccagccu

SEQ ID NO: 1657968 - RNA, 18 nt, Human
gggcaacccccagccugc

SEQ ID NO: 1657969 - RNA, 20 nt, Human
gggcaacccccagccugcua

SEQ ID NO: 1657970 - RNA, 16 nt, Human
gggcagagcagagacc

SEQ ID NO: 1657971 - RNA, 14 nt, Human
gggauuacaggcgu

SEQ ID NO: 1657972 - RNA, 13 nt, Human
gggauuacaggcu

SEQ ID NO: 1657973 - RNA, 16 nt, Human
gggauuacaggcuccu

SEQ ID NO: 1657974 - RNA, 21 nt, Human
gggauuacaggcuccugccac

SEQ ID NO: 1657975 - RNA, 12 nt, Human
gggauuacaggu

SEQ ID NO: 1657976 - RNA, 15 nt, Human
gggauuacaggugug

SEQ ID NO: 1657977 - RNA, 16 nt, Human
gggauuguaaaauggu

SEQ ID NO: 1657978 - RNA, 17 nt, Human
gggauuguaaaauggug

SEQ ID NO: 1657979 - RNA, 15 nt, Human
aaaacccagauaaag

SEQ ID NO: 1657980 - RNA, 14 nt, Human
aaaaccacagcagu

SEQ ID NO: 1657981 - RNA, 13 nt, Human
aaaaccacagcag

SEQ ID NO: 1657982 - RNA, 22 nt, Human
aaaacugcugacuguuuucucu

SEQ ID NO: 1657983 - RNA, 13 nt, Human
aaaacucauuuuu

SEQ ID NO: 1657984 - RNA, 23 nt, Human
aaaacugcugacuguuuucucuu

SEQ ID NO: 1657985 - RNA, 13 nt, Human
aaaagaugcuucu

SEQ ID NO: 1657986 - RNA, 17 nt, Human
aaaagaugaaaauauuu

SEQ ID NO: 1657987 - RNA, 15 nt, Human
aaaacaugcuacaca

SEQ ID NO: 1657988 - RNA, 12 nt, Human
aaaaccacagca

SEQ ID NO: 1657989 - RNA, 21 nt, Human
aaaaccaauguucucucuucu

SEQ ID NO: 1657990 - RNA, 17 nt, Human
aaaaaucucaaauuucu

SEQ ID NO: 1657991 - RNA, 14 nt, Human
aaaaaucucaaauu

SEQ ID NO: 1657992 - RNA, 22 nt, Human
aaaaauggaacauaaaauacaa

SEQ ID NO: 1657993 - RNA, 21 nt, Human
gggacagcuccuucuguccua

SEQ ID NO: 1657994 - RNA, 20 nt, Human
gggacauuugcucauggaau

SEQ ID NO: 1657995 - RNA, 21 nt, Human
gggacauuugcucauggaauu

SEQ ID NO: 1657996 - RNA, 14 nt, Human
aaaaauauuuuaug

SEQ ID NO: 1657997 - RNA, 21 nt, Human
aaaaauaugaccacacuccag

SEQ ID NO: 1657998 - RNA, 23 nt, Human
aaaaauaugaccacacuccagcu

SEQ ID NO: 1657999 - RNA, 16 nt, Human
gggaaggauacaaaag

SEQ ID NO: 1658000 - RNA, 13 nt, Human
gggaaggauacaa

SEQ ID NO: 1658001 - RNA, 13 nt, Human
gggacagaggggg

SEQ ID NO: 1658002 - RNA, 22 nt, Human
gggacagaggggguggccuccc

SEQ ID NO: 1658003 - RNA, 23 nt, Human
gggacagaggggguggccuccca

SEQ ID NO: 1658004 - RNA, 15 nt, Human
ggccuucucugaagg

SEQ ID NO: 1658005 - RNA, 16 nt, Human
ggccuucucugaagga

SEQ ID NO: 1658006 - RNA, 13 nt, Human
ggccuuuggcuuc

SEQ ID NO: 1658007 - RNA, 14 nt, Human
ggccuuuggcuuca

SEQ ID NO: 1658008 - RNA, 21 nt, Human
ggccuggccagaugcaccagc

SEQ ID NO: 1658009 - RNA, 20 nt, Human
ggccuguggaucaaauccag

SEQ ID NO: 1658010 - RNA, 21 nt, Human
ggccugugucuaguuguuuga

SEQ ID NO: 1658011 - RNA, 12 nt, Human
ggccuucucuga

SEQ ID NO: 1658012 - RNA, 23 nt, Human
ggccuucggccuccauccugagg

SEQ ID NO: 1658013 - RNA, 15 nt, Human
ggccugagcugggau

SEQ ID NO: 1658014 - RNA, 13 nt, Human
ggccuccauccug

SEQ ID NO: 1658015 - RNA, 16 nt, Human
ggcucacugcauccuc

SEQ ID NO: 1658016 - RNA, 19 nt, Human
ggcucacugcauccuccgc

SEQ ID NO: 1658017 - RNA, 17 nt, Human
ggcucacugcagccuca

SEQ ID NO: 1658018 - RNA, 16 nt, Human
ggcucacugcagccuc

SEQ ID NO: 1658019 - RNA, 19 nt, Human
ggcgugcaguggugcgauc

SEQ ID NO: 1658020 - RNA, 23 nt, Human
ggcucagcaaaagaugcuucuca

SEQ ID NO: 1658021 - RNA, 21 nt, Human
ggcucagcggggacagcuccu

SEQ ID NO: 1658022 - RNA, 22 nt, Human
ggcucagcggggacagcuccuu

SEQ ID NO: 1658023 - RNA, 23 nt, Human
ggcucagcggggacagcuccuuc

SEQ ID NO: 1658024 - RNA, 16 nt, Human
ggccaggcuggucuca

SEQ ID NO: 1658025 - RNA, 18 nt, Human
ggccaggcuggucucaaa

SEQ ID NO: 1658026 - RNA, 14 nt, Human
ggccaggcuggucu

SEQ ID NO: 1658027 - RNA, 21 nt, Human
ggccaaacucaccugccccuc

SEQ ID NO: 1658028 - RNA, 17 nt, Human
ggccaaacucaccugcc

SEQ ID NO: 1658029 - RNA, 16 nt, Human
ggccagugugacaagg

SEQ ID NO: 1658030 - RNA, 13 nt, Human
ggccagugcucca

SEQ ID NO: 1658031 - RNA, 15 nt, Human
ggccagugcuccagc

SEQ ID NO: 1658032 - RNA, 15 nt, Human
ggcaccagcagccug

SEQ ID NO: 1658033 - RNA, 16 nt, Human
ggcaccagcagccugg

SEQ ID NO: 1658034 - RNA, 24 nt, Human
ggcacugcuuccagugaggcucug

SEQ ID NO: 1658035 - RNA, 17 nt, Human
ggcagugggagcugccu

SEQ ID NO: 1658036 - RNA, 18 nt, Human
ggcauccaguaucuugaa

SEQ ID NO: 1658037 - RNA, 18 nt, Human
ggcagugggagcugccug

SEQ ID NO: 1658038 - RNA, 19 nt, Human
ggcagugggagcugccugu

SEQ ID NO: 1658039 - RNA, 18 nt, Human
ggcauuuuacuguacaga

SEQ ID NO: 1658040 - RNA, 15 nt, Human
ggcccgacagccugg

SEQ ID NO: 1658041 - RNA, 13 nt, Human
ggcccuuccucuc

SEQ ID NO: 1658042 - RNA, 15 nt, Human
ggcccuuccucucca

SEQ ID NO: 1658043 - RNA, 18 nt, Human
ggcccuuccucuccacug

SEQ ID NO: 1658044 - RNA, 16 nt, Human
ggcccuucucuccagc

SEQ ID NO: 1658045 - RNA, 17 nt, Human
ggcccuucucuccagcc

SEQ ID NO: 1658046 - RNA, 17 nt, Human
ggcccuuccucuccacu

SEQ ID NO: 1658047 - RNA, 19 nt, Human
ggcccuucucuccagcccc

SEQ ID NO: 1658048 - RNA, 18 nt, Human
ggcccuucucuccagccc

SEQ ID NO: 1658049 - RNA, 12 nt, Human
ggauaaaugcca

SEQ ID NO: 1658050 - RNA, 22 nt, Human
ggauaauaaggaaaaguuuaau

SEQ ID NO: 1658051 - RNA, 21 nt, Human
ggaguuggaagugugugaucu

SEQ ID NO: 1658052 - RNA, 15 nt, Human
ggaguucugguuccu

SEQ ID NO: 1658053 - RNA, 14 nt, Human
ggaguggccacaga

SEQ ID NO: 1658054 - RNA, 21 nt, Human
ggauguacaaggacagccccu

SEQ ID NO: 1658055 - RNA, 16 nt, Human
ggauggggcugcaccg

SEQ ID NO: 1658056 - RNA, 18 nt, Human
ggauggauuuccagccaa

SEQ ID NO: 1658057 - RNA, 12 nt, Human
ggauggcaagau

SEQ ID NO: 1658058 - RNA, 15 nt, Human
ggauccuccaggugc

SEQ ID NO: 1658059 - RNA, 14 nt, Human
ggauccuccaggug

SEQ ID NO: 1658060 - RNA, 13 nt, Human
ggauccugagcca

SEQ ID NO: 1658061 - RNA, 14 nt, Human
ggauccugagccag

SEQ ID NO: 1658062 - RNA, 16 nt, Human
ggcacagggcaguggg

SEQ ID NO: 1658063 - RNA, 22 nt, Human
ggcacaaucucggcucacugca

SEQ ID NO: 1658064 - RNA, 24 nt, Human
ggcacagaaaauggaagacagcuc

SEQ ID NO: 1658065 - RNA, 15 nt, Human
ggauguucugggaca

SEQ ID NO: 1658066 - RNA, 16 nt, Human
ggauguucugggacac

SEQ ID NO: 1658067 - RNA, 22 nt, Human
ggauguugaaaaaguucugcag

SEQ ID NO: 1658068 - RNA, 12 nt, Human
ggaggccagccu

SEQ ID NO: 1658069 - RNA, 20 nt, Human
ggaggccagcacggugguga

SEQ ID NO: 1658070 - RNA, 11 nt, Human
ggaggccagcc

SEQ ID NO: 1658071 - RNA, 20 nt, Human
ggaggaaggaaacccagcuc

SEQ ID NO: 1658072 - RNA, 23 nt, Human
ggaggaaggaaacccagcucugg

SEQ ID NO: 1658073 - RNA, 19 nt, Human
ggaggaaggaaacccagcu

SEQ ID NO: 1658074 - RNA, 16 nt, Human
ggagccaauggagacu

SEQ ID NO: 1658075 - RNA, 16 nt, Human
ggagccccgaggccuu

SEQ ID NO: 1658076 - RNA, 22 nt, Human
ggagccccgaggccuucucuga

SEQ ID NO: 1658077 - RNA, 12 nt, Human
ggagcugccugu

SEQ ID NO: 1658078 - RNA, 21 nt, Human
ggagcugccuguucagcucca

SEQ ID NO: 1658079 - RNA, 16 nt, Human
ggaggggggagguggg

SEQ ID NO: 1658080 - RNA, 14 nt, Human
ggaggucgaggcag

SEQ ID NO: 1658081 - RNA, 14 nt, Human
ggaggugaccccag

SEQ ID NO: 1658082 - RNA, 20 nt, Human
ggaggucaaggcugcaguga

SEQ ID NO: 1658083 - RNA, 16 nt, Human
ggagcaucagugcccu

SEQ ID NO: 1658084 - RNA, 18 nt, Human
gcucucaaguuaucaggg

SEQ ID NO: 1658085 - RNA, 19 nt, Human
gcucuacugaggugcuaug

SEQ ID NO: 1658086 - RNA, 16 nt, Human
gcuccucuccccagca

SEQ ID NO: 1658087 - RNA, 19 nt, Human
gcuccucuccccagcaagu

SEQ ID NO: 1658088 - RNA, 17 nt, Human
gcucucaggccagcugc

SEQ ID NO: 1658089 - RNA, 18 nt, Human
gcucucaggccagcugcu

SEQ ID NO: 1658090 - RNA, 19 nt, Human
gcucucaggccagcugcuu

SEQ ID NO: 1658091 - RNA, 20 nt, Human
gcucucaggccagcugcuug

SEQ ID NO: 1658092 - RNA, 19 nt, Human
gcuccucccggugcccaag

SEQ ID NO: 1658093 - RNA, 15 nt, Human
gcuccucuccccagc

SEQ ID NO: 1658094 - RNA, 17 nt, Human
gcuccagcucaccagcc

SEQ ID NO: 1658095 - RNA, 13 nt, Human
gcuccagcucacc

SEQ ID NO: 1658096 - RNA, 14 nt, Human
gcuccagcucacca

SEQ ID NO: 1658097 - RNA, 18 nt, Human
gcuccagacacaugucca

SEQ ID NO: 1658098 - RNA, 21 nt, Human
gcuccagacacauguccaaga

SEQ ID NO: 1658099 - RNA, 23 nt, Human
gcuccagacacauguccaagaag

SEQ ID NO: 1658100 - RNA, 9 nt, Human
gcuccagac

SEQ ID NO: 1658101 - RNA, 20 nt, Human
gcuccacuuggucugugaga

SEQ ID NO: 1658102 - RNA, 20 nt, Human
gcucugaucauccacugugc

SEQ ID NO: 1658103 - RNA, 15 nt, Human
gcucuggagcccacu

SEQ ID NO: 1658104 - RNA, 16 nt, Human
gcucuggagcccacug

SEQ ID NO: 1658105 - RNA, 21 nt, Human
gcucugcccauccugccccug

SEQ ID NO: 1658106 - RNA, 21 nt, Human
gcucugaucauccacugugcc

SEQ ID NO: 1658107 - RNA, 22 nt, Human
gcucugaucauccacugugcca

SEQ ID NO: 1658108 - RNA, 23 nt, Human
gcucugaucauccacugugccau

SEQ ID NO: 1658109 - RNA, 15 nt, Human
gcucugcccauccug

SEQ ID NO: 1658110 - RNA, 20 nt, Human
gcugaacuuguuuucuggga

SEQ ID NO: 1658111 - RNA, 23 nt, Human
gcugaaggcucgagcaugccugg

SEQ ID NO: 1658112 - RNA, 17 nt, Human
gcugaauacagaggcaa

SEQ ID NO: 1658113 - RNA, 22 nt, Human
gcugaauacagaggcaacugca

SEQ ID NO: 1658114 - RNA, 12 nt, Human
gcugagccucag

SEQ ID NO: 1658115 - RNA, 16 nt, Human
gcugagccucagucuc

SEQ ID NO: 1658116 - RNA, 13 nt, Human
gcugacagacaca

SEQ ID NO: 1658117 - RNA, 17 nt, Human
gcucuggagcccacugu

SEQ ID NO: 1658118 - RNA, 14 nt, Human
gcucuguccuggga

SEQ ID NO: 1658119 - RNA, 16 nt, Human
gcugaaacaacaaaua

SEQ ID NO: 1658120 - RNA, 17 nt, Human
gcugccccuggcagccc

SEQ ID NO: 1658121 - RNA, 17 nt, Human
gcugccauccagguuca

SEQ ID NO: 1658122 - RNA, 13 nt, Human
gcugccccuggca

SEQ ID NO: 1658123 - RNA, 15 nt, Human
gcugccccuggcagc

SEQ ID NO: 1658124 - RNA, 16 nt, Human
gcugccccuggcagcc

SEQ ID NO: 1658125 - RNA, 12 nt, Human
gcugcugacagu

SEQ ID NO: 1658126 - RNA, 12 nt, Human
gcugccauccag

SEQ ID NO: 1658127 - RNA, 13 nt, Human
gcugccauccagg

SEQ ID NO: 1658128 - RNA, 16 nt, Human
gcugcacccucaggca

SEQ ID NO: 1658129 - RNA, 13 nt, Human
gcugcacccucag

SEQ ID NO: 1658130 - RNA, 15 nt, Human
gcugcacccucaggc

SEQ ID NO: 1658131 - RNA, 13 nt, Human
gcuguuggcuggg

SEQ ID NO: 1658132 - RNA, 14 nt, Human
gcuguuggcugggg

SEQ ID NO: 1658133 - RNA, 12 nt, Human
gcugugccucug

SEQ ID NO: 1658134 - RNA, 16 nt, Human
gcuucaaauuguaagc

SEQ ID NO: 1658135 - RNA, 18 nt, Human
gcuucaaggauccugagc

SEQ ID NO: 1658136 - RNA, 14 nt, Human
gcuucaaggauccu

SEQ ID NO: 1658137 - RNA, 14 nt, Human
gcuucaguggcagc

SEQ ID NO: 1658138 - RNA, 15 nt, Human
gcuucaguggcagcu

SEQ ID NO: 1658139 - RNA, 23 nt, Human
gcugguucaggguuggccccugc

SEQ ID NO: 1658140 - RNA, 19 nt, Human
gcuguauuagucacagaga

SEQ ID NO: 1658141 - RNA, 12 nt, Human
gcuguauuuuaa

SEQ ID NO: 1658142 - RNA, 13 nt, Human
gcuguauuuuaaa

SEQ ID NO: 1658143 - RNA, 16 nt, Human
gcuuuccucuuccuga

SEQ ID NO: 1658144 - RNA, 22 nt, Human
gcuuuccccaugucucgacuca

SEQ ID NO: 1658145 - RNA, 21 nt, Human
gcuuuccccaugucucgacuc

SEQ ID NO: 1658146 - RNA, 18 nt, Human
gcuuguaaauagcucagg

SEQ ID NO: 1658147 - RNA, 19 nt, Human
gcuuguaaauagcucaggu

SEQ ID NO: 1658148 - RNA, 23 nt, Human
gcuugaccgugaggccagagaca

SEQ ID NO: 1658149 - RNA, 18 nt, Human
gcuugaccuuuaagagaa

SEQ ID NO: 1658150 - RNA, 16 nt, Human
gcuugaccgugaggcc

SEQ ID NO: 1658151 - RNA, 22 nt, Human
gcuugaccuuuaagagaaauga

SEQ ID NO: 1658152 - RNA, 17 nt, Human
gcuuguaaauagcucag

SEQ ID NO: 1658153 - RNA, 15 nt, Human
gcuucuucagagacu

SEQ ID NO: 1658154 - RNA, 12 nt, Human
gcuucuucagag

SEQ ID NO: 1658155 - RNA, 23 nt, Human
gcuuccagugaggcucugcccuu

SEQ ID NO: 1658156 - RNA, 19 nt, Human
gcuuccuggcaauagucaa

SEQ ID NO: 1658157 - RNA, 22 nt, Human
gcuuccagugaggcucugcccu

SEQ ID NO: 1658158 - RNA, 14 nt, Human
gcuuugaucccuuc

SEQ ID NO: 1658159 - RNA, 17 nt, Human
gcuuugaucccuucuua

SEQ ID NO: 1658160 - RNA, 22 nt, Human
gcuuuuuucucugauacagaaa

SEQ ID NO: 1658161 - RNA, 18 nt, Human
ggaaaauuuuaaaaauac

SEQ ID NO: 1658162 - RNA, 16 nt, Human
ggaaacccagcucugg

SEQ ID NO: 1658163 - RNA, 15 nt, Human
gcuuuuuuaucaugu

SEQ ID NO: 1658164 - RNA, 18 nt, Human
gcuuuuuuaucaugugaa

SEQ ID NO: 1658165 - RNA, 20 nt, Human
gcuuuuuuaucaugugaaau

SEQ ID NO: 1658166 - RNA, 12 nt, Human
gcuuuugugcau

SEQ ID NO: 1658167 - RNA, 12 nt, Human
gcuuuucugauc

SEQ ID NO: 1658168 - RNA, 15 nt, Human
gcuuuucugauccag

SEQ ID NO: 1658169 - RNA, 16 nt, Human
gcuuuucugauccagu

SEQ ID NO: 1658170 - RNA, 15 nt, Human
gcuuuuggucugugu

SEQ ID NO: 1658171 - RNA, 18 nt, Human
gcuuuugucuaugggacu

SEQ ID NO: 1658172 - RNA, 11 nt, Human
gcuuuucugau

SEQ ID NO: 1658173 - RNA, 14 nt, Human
ggaagacaauguga

SEQ ID NO: 1658174 - RNA, 16 nt, Human
ggaagacaaugugaaa

SEQ ID NO: 1658175 - RNA, 17 nt, Human
ggaacaccauaggucac

SEQ ID NO: 1658176 - RNA, 13 nt, Human
ggaacaccuccuc

SEQ ID NO: 1658177 - RNA, 23 nt, Human
ggaacaaggcaaggcugucaauu

SEQ ID NO: 1658178 - RNA, 15 nt, Human
ggaacacuccuucac

SEQ ID NO: 1658179 - RNA, 19 nt, Human
ggaacacuccuucacagau

SEQ ID NO: 1658180 - RNA, 21 nt, Human
ggaaacuaggugcauauuuau

SEQ ID NO: 1658181 - RNA, 14 nt, Human
ggaaaugggcagag

SEQ ID NO: 1658182 - RNA, 16 nt, Human
ggaaaugggcagagca

SEQ ID NO: 1658183 - RNA, 17 nt, Human
ggaaaugggcagagcag

SEQ ID NO: 1658184 - RNA, 18 nt, Human
ggaaaugggcagagcaga

SEQ ID NO: 1658185 - RNA, 22 nt, Human
ggaaaugggcagagcagagacc

SEQ ID NO: 1658186 - RNA, 17 nt, Human
ggaaaugucaacaagua

SEQ ID NO: 1658187 - RNA, 15 nt, Human
ggaacaaggcaaggc

SEQ ID NO: 1658188 - RNA, 17 nt, Human
ggaacaaggcaaggcug

SEQ ID NO: 1658189 - RNA, 21 nt, Human
ggaacaaggcaaggcugucaa

SEQ ID NO: 1658190 - RNA, 22 nt, Human
ggaagacaaugugaaaagaaaa

SEQ ID NO: 1658191 - RNA, 17 nt, Human
ggaagacuucaucccuc

SEQ ID NO: 1658192 - RNA, 20 nt, Human
ggaagacuucaucccucugg

SEQ ID NO: 1658193 - RNA, 12 nt, Human
ggaagacuuugg

SEQ ID NO: 1658194 - RNA, 17 nt, Human
gccuccaagcuccaucu

SEQ ID NO: 1658195 - RNA, 11 nt, Human
gccuccaugcu

SEQ ID NO: 1658196 - RNA, 19 nt, Human
gccuccuuugugaggaagc

SEQ ID NO: 1658197 - RNA, 20 nt, Human
gccuccuuugugaggaagcc

SEQ ID NO: 1658198 - RNA, 21 nt, Human
gccuccuuugugaggaagccg

SEQ ID NO: 1658199 - RNA, 16 nt, Human
gccuccauccugaggc

SEQ ID NO: 1658200 - RNA, 20 nt, Human
gccuccauccugaggcucca

SEQ ID NO: 1658201 - RNA, 13 nt, Human
gccucggacuuag

SEQ ID NO: 1658202 - RNA, 17 nt, Human
gccugcuaauuccccag

SEQ ID NO: 1658203 - RNA, 23 nt, Human
gccugcuaauuccccagauugca

SEQ ID NO: 1658204 - RNA, 13 nt, Human
gccugcuccagcu

SEQ ID NO: 1658205 - RNA, 18 nt, Human
gcuaauuuugaaaaacug

SEQ ID NO: 1658206 - RNA, 16 nt, Human
gcuaauuuuucauuuu

SEQ ID NO: 1658207 - RNA, 23 nt, Human
gcguugaaauuguaauuauaucu

SEQ ID NO: 1658208 - RNA, 24 nt, Human
gcguugaaauuguaauuauaucug

SEQ ID NO: 1658209 - RNA, 17 nt, Human
gcguuucuaugacacau

SEQ ID NO: 1658210 - RNA, 17 nt, Human
gcuacaaaaacacagca

SEQ ID NO: 1658211 - RNA, 18 nt, Human
gcuacaaaaacacagcaa

SEQ ID NO: 1658212 - RNA, 19 nt, Human
gcuacaaaaacacagcaag

SEQ ID NO: 1658213 - RNA, 19 nt, Human
gcuacuguccuacccaccc

SEQ ID NO: 1658214 - RNA, 20 nt, Human
gcuacuguccuacccacccu

SEQ ID NO: 1658215 - RNA, 18 nt, Human
gcuacuguaaggcaauca

SEQ ID NO: 1658216 - RNA, 19 nt, Human
gcuacuguaaggcaaucau

SEQ ID NO: 1658217 - RNA, 15 nt, Human
gcuacugucagcucc

SEQ ID NO: 1658218 - RNA, 17 nt, Human
gcuacuugggaggcuga

SEQ ID NO: 1658219 - RNA, 19 nt, Human
gcgugcacacaccagagcc

SEQ ID NO: 1658220 - RNA, 18 nt, Human
gcgugcacacaccagagc

SEQ ID NO: 1658221 - RNA, 14 nt, Human
gcgugcacacacca

SEQ ID NO: 1658222 - RNA, 20 nt, Human
gcgugguggacaugcacagc

SEQ ID NO: 1658223 - RNA, 16 nt, Human
gcggccuuuggcuuca

SEQ ID NO: 1658224 - RNA, 13 nt, Human
gcgauucuucugc

SEQ ID NO: 1658225 - RNA, 17 nt, Human
gcgauucuucugcuuca

SEQ ID NO: 1658226 - RNA, 14 nt, Human
gcgauucuucugcu

SEQ ID NO: 1658227 - RNA, 15 nt, Human
gccccugccucucug

SEQ ID NO: 1658228 - RNA, 16 nt, Human
gccccugccucucugc

SEQ ID NO: 1658229 - RNA, 17 nt, Human
gccccugccucucugca

SEQ ID NO: 1658230 - RNA, 18 nt, Human
gccccugccucucugcag

SEQ ID NO: 1658231 - RNA, 22 nt, Human
gccccugcugguucaggguugg

SEQ ID NO: 1658232 - RNA, 17 nt, Human
gcccucacccuggggcu

SEQ ID NO: 1658233 - RNA, 16 nt, Human
gcccucacccuggggc

SEQ ID NO: 1658234 - RNA, 15 nt, Human
gccccuggaugcagc

SEQ ID NO: 1658235 - RNA, 17 nt, Human
gcccaggccccugccac

SEQ ID NO: 1658236 - RNA, 18 nt, Human
gcccaggccccugccacc

SEQ ID NO: 1658237 - RNA, 13 nt, Human
gcccaggcagguc

SEQ ID NO: 1658238 - RNA, 14 nt, Human
gcccaggcaggucu

SEQ ID NO: 1658239 - RNA, 16 nt, Human
gcccaggcaggucuug

SEQ ID NO: 1658240 - RNA, 15 nt, Human
gcccaggccccugcc

SEQ ID NO: 1658241 - RNA, 13 nt, Human
gcccaggccccug

SEQ ID NO: 1658242 - RNA, 24 nt, Human
gccaucaauaaaaaauuaugacau

SEQ ID NO: 1658243 - RNA, 14 nt, Human
gccaugugccaggu

SEQ ID NO: 1658244 - RNA, 22 nt, Human
gccaugugcuaguaauuggaaa

SEQ ID NO: 1658245 - RNA, 13 nt, Human
gccaggccacaag

SEQ ID NO: 1658246 - RNA, 18 nt, Human
gccaggccacaagacccu

SEQ ID NO: 1658247 - RNA, 21 nt, Human
gccaggccacaagacccuugu

SEQ ID NO: 1658248 - RNA, 15 nt, Human
gccaggccagaggga

SEQ ID NO: 1658249 - RNA, 22 nt, Human
gccaggccagagggagugacag

SEQ ID NO: 1658250 - RNA, 13 nt, Human
gccaggcccucug

SEQ ID NO: 1658251 - RNA, 14 nt, Human
gccaggcccucugc

SEQ ID NO: 1658252 - RNA, 15 nt, Human
gccaggcccucugcc

SEQ ID NO: 1658253 - RNA, 21 nt, Human
gccagcaguucagagcugccc

SEQ ID NO: 1658254 - RNA, 20 nt, Human
gccagcaguucagagcugcc

SEQ ID NO: 1658255 - RNA, 19 nt, Human
gccagcaguucagagcugc

SEQ ID NO: 1658256 - RNA, 14 nt, Human
gccagcaguucaga

SEQ ID NO: 1658257 - RNA, 13 nt, Human
gccagcaguucag

SEQ ID NO: 1658258 - RNA, 22 nt, Human
gccaguuggucccccuuccaug

SEQ ID NO: 1658259 - RNA, 23 nt, Human
gccaguuggucccccuuccaugg

SEQ ID NO: 1658260 - RNA, 16 nt, Human
gccaguuggucccccu

SEQ ID NO: 1658261 - RNA, 18 nt, Human
gccaguuggucccccuuc

SEQ ID NO: 1658262 - RNA, 20 nt, Human
gccaguuggucccccuucca

SEQ ID NO: 1658263 - RNA, 21 nt, Human
gccaguuggucccccuuccau

SEQ ID NO: 1658264 - RNA, 16 nt, Human
gccauaugaaaaggcu

SEQ ID NO: 1658265 - RNA, 15 nt, Human
gccagugcuccagcc

SEQ ID NO: 1658266 - RNA, 13 nt, Human
gccagugugacaa

SEQ ID NO: 1658267 - RNA, 13 nt, Human
gccaguugguccc

SEQ ID NO: 1658268 - RNA, 22 nt, Human
gccaguuauggcuauaggugcu

SEQ ID NO: 1658269 - RNA, 14 nt, Human
cugacagaaggacu

SEQ ID NO: 1658270 - RNA, 12 nt, Human
cugacagacaca

SEQ ID NO: 1658271 - RNA, 14 nt, Human
cugacagacacagg

SEQ ID NO: 1658272 - RNA, 15 nt, Human
cugacagacacaggc

SEQ ID NO: 1658273 - RNA, 18 nt, Human
cugacccaugcugcccug

SEQ ID NO: 1658274 - RNA, 17 nt, Human
cugacccaugcugcccu

SEQ ID NO: 1658275 - RNA, 19 nt, Human
cugacccaugcugcccugu

SEQ ID NO: 1658276 - RNA, 20 nt, Human
cugacccaugcugcccugug

SEQ ID NO: 1658277 - RNA, 22 nt, Human
cugaaggaauaaauugcuccuu

SEQ ID NO: 1658278 - RNA, 16 nt, Human
cugaaaauguaugugu

SEQ ID NO: 1658279 - RNA, 19 nt, Human
cugaaggacauugcggaca

SEQ ID NO: 1658280 - RNA, 20 nt, Human
cugaaggacauugcggacag

SEQ ID NO: 1658281 - RNA, 21 nt, Human
cugaaggacauugcggacagc

SEQ ID NO: 1658282 - RNA, 13 nt, Human
cugaaggccccgc

SEQ ID NO: 1658283 - RNA, 14 nt, Human
cugaaggccccgcc

SEQ ID NO: 1658284 - RNA, 17 nt, Human
cugaaggccccgcccag

SEQ ID NO: 1658285 - RNA, 18 nt, Human
cugaaggccccgcccagg

SEQ ID NO: 1658286 - RNA, 17 nt, Human
cucuugccacugccucu

SEQ ID NO: 1658287 - RNA, 18 nt, Human
cucuugccacugccucuu

SEQ ID NO: 1658288 - RNA, 19 nt, Human
cucuugccacugccucuuc

SEQ ID NO: 1658289 - RNA, 20 nt, Human
cucuugccacugccucuucc

SEQ ID NO: 1658290 - RNA, 16 nt, Human
cucuugccacugccuc

SEQ ID NO: 1658291 - RNA, 20 nt, Human
cucuuagaugcaguucugaa

SEQ ID NO: 1658292 - RNA, 21 nt, Human
cucuuagaugcaguucugaag

SEQ ID NO: 1658293 - RNA, 14 nt, Human
cucugcacuccccu

SEQ ID NO: 1658294 - RNA, 19 nt, Human
cucugcagcaauaaagcag

SEQ ID NO: 1658295 - RNA, 18 nt, Human
cucugcagcaauaaagca

SEQ ID NO: 1658296 - RNA, 23 nt, Human
cucugcagcaauaaagcagcguu

SEQ ID NO: 1658297 - RNA, 14 nt, Human
cucugguuccuccc

SEQ ID NO: 1658298 - RNA, 19 nt, Human
cucugguccauagagagca

SEQ ID NO: 1658299 - RNA, 16 nt, Human
cucugguccauagaga

SEQ ID NO: 1658300 - RNA, 18 nt, Human
cucugguccauagagagc

SEQ ID NO: 1658301 - RNA, 17 nt, Human
cucugcugacagacaca

SEQ ID NO: 1658302 - RNA, 18 nt, Human
cucugcugacagacacag

SEQ ID NO: 1658303 - RNA, 19 nt, Human
cucugcugacagacacagg

SEQ ID NO: 1658304 - RNA, 20 nt, Human
cucugcugacagacacaggc

SEQ ID NO: 1658305 - RNA, 17 nt, Human
cucuguacagagcccac

SEQ ID NO: 1658306 - RNA, 21 nt, Human
cucuguacagagcccacgccc

SEQ ID NO: 1658307 - RNA, 15 nt, Human
cucuuagaugcaguu

SEQ ID NO: 1658308 - RNA, 20 nt, Human
cucgggauuaguacacacuu

SEQ ID NO: 1658309 - RNA, 21 nt, Human
cucucacuuguuuuauuuaac

SEQ ID NO: 1658310 - RNA, 15 nt, Human
cucucacuccuugaa

SEQ ID NO: 1658311 - RNA, 19 nt, Human
cucucagauuguaccauug

SEQ ID NO: 1658312 - RNA, 12 nt, Human
cucucacuccuu

SEQ ID NO: 1658313 - RNA, 14 nt, Human
cucucacuccuuga

SEQ ID NO: 1658314 - RNA, 20 nt, Human
cucucaaccaccuuucagau

SEQ ID NO: 1658315 - RNA, 15 nt, Human
cucugaaggacauug

SEQ ID NO: 1658316 - RNA, 12 nt, Human
cucucuggccuu

SEQ ID NO: 1658317 - RNA, 12 nt, Human
cucuccuccaga

SEQ ID NO: 1658318 - RNA, 11 nt, Human
cucucuggccu

SEQ ID NO: 1658319 - RNA, 16 nt, Human
cuccaaagucucugga

SEQ ID NO: 1658320 - RNA, 18 nt, Human
cucaugccucagccuccu

SEQ ID NO: 1658321 - RNA, 20 nt, Human
cucaugccucagccuccuga

SEQ ID NO: 1658322 - RNA, 19 nt, Human
cucauguucuuaauucuua

SEQ ID NO: 1658323 - RNA, 18 nt, Human
cucauguucuuaauucuu

SEQ ID NO: 1658324 - RNA, 14 nt, Human
cucauguucuuaau

SEQ ID NO: 1658325 - RNA, 12 nt, Human
cucauguucuua

SEQ ID NO: 1658326 - RNA, 20 nt, Human
cucagucuggcccuuccuuu

SEQ ID NO: 1658327 - RNA, 13 nt, Human
cucagugccacua

SEQ ID NO: 1658328 - RNA, 17 nt, Human
cucagucuggcccuucc

SEQ ID NO: 1658329 - RNA, 18 nt, Human
cucagucuggcccuuccu

SEQ ID NO: 1658330 - RNA, 22 nt, Human
cucagccucccaaagugcuggg

SEQ ID NO: 1658331 - RNA, 13 nt, Human
cucagccucccga

SEQ ID NO: 1658332 - RNA, 23 nt, Human
cucagccucccgaauagcuggga

SEQ ID NO: 1658333 - RNA, 17 nt, Human
cuaucccggcugcccuu

SEQ ID NO: 1658334 - RNA, 21 nt, Human
cucagccucccaaagugcugg

SEQ ID NO: 1658335 - RNA, 14 nt, Human
cucagccucccaaa

SEQ ID NO: 1658336 - RNA, 16 nt, Human
cucagccucccaaagu

SEQ ID NO: 1658337 - RNA, 15 nt, Human
cuaucccggcugccc

SEQ ID NO: 1658338 - RNA, 16 nt, Human
cuaucccggcugcccu

SEQ ID NO: 1658339 - RNA, 13 nt, Human
cucagccucccaa

SEQ ID NO: 1658340 - RNA, 12 nt, Human
cucagccuccug

SEQ ID NO: 1658341 - RNA, 13 nt, Human
cucagccuccuga

SEQ ID NO: 1658342 - RNA, 13 nt, Human
cucaggccagcug

SEQ ID NO: 1658343 - RNA, 14 nt, Human
cucagcgaaugaau

SEQ ID NO: 1658344 - RNA, 13 nt, Human
cucagcggggaca

SEQ ID NO: 1658345 - RNA, 14 nt, Human
cucaggccagcugc

SEQ ID NO: 1658346 - RNA, 15 nt, Human
cucaggccagcugcu

SEQ ID NO: 1658347 - RNA, 21 nt, Human
cucaggccagcugcuugggcu

SEQ ID NO: 1658348 - RNA, 22 nt, Human
cucaggccagcugcuugggcuu

SEQ ID NO: 1658349 - RNA, 14 nt, Human
cucaggccuggggg

SEQ ID NO: 1658350 - RNA, 20 nt, Human
cucaggccugggggcugggc

SEQ ID NO: 1658351 - RNA, 21 nt, Human
cucaggccugggggcugggca

SEQ ID NO: 1658352 - RNA, 11 nt, Human
cuccaggugca

SEQ ID NO: 1658353 - RNA, 14 nt, Human
cuccagaccccugg

SEQ ID NO: 1658354 - RNA, 16 nt, Human
cuccaagaccuucucc

SEQ ID NO: 1658355 - RNA, 17 nt, Human
cuccaagaccuucuccu

SEQ ID NO: 1658356 - RNA, 18 nt, Human
cuccaagaccuucuccuu

SEQ ID NO: 1658357 - RNA, 21 nt, Human
cuccaagaccuucuccuucac

SEQ ID NO: 1658358 - RNA, 22 nt, Human
cuccacuuucuagccagaggag

SEQ ID NO: 1658359 - RNA, 15 nt, Human
cuccagaauuuccca

SEQ ID NO: 1658360 - RNA, 18 nt, Human
cuccagaauuucccaaag

SEQ ID NO: 1658361 - RNA, 21 nt, Human
cuccagaauuucccaaagcag

SEQ ID NO: 1658362 - RNA, 17 nt, Human
cuccagacacaugucca

SEQ ID NO: 1658363 - RNA, 19 nt, Human
cuccagacacauguccaag

SEQ ID NO: 1658364 - RNA, 19 nt, Human
cuccgcuuucuacccagcg

SEQ ID NO: 1658365 - RNA, 14 nt, Human
cucccugcaauaaa

SEQ ID NO: 1658366 - RNA, 16 nt, Human
cucccugcaauaaaau

SEQ ID NO: 1658367 - RNA, 12 nt, Human
cucccaccucag

SEQ ID NO: 1658368 - RNA, 13 nt, Human
cucccaccucagc

SEQ ID NO: 1658369 - RNA, 21 nt, Human
cuccagugagacagcucugca

SEQ ID NO: 1658370 - RNA, 16 nt, Human
cgaccugccucggccu

SEQ ID NO: 1658371 - RNA, 14 nt, Human
cgccuacaggagug

SEQ ID NO: 1658372 - RNA, 21 nt, Human
cgcaggcuggcccugcccugg

SEQ ID NO: 1658373 - RNA, 23 nt, Human
cgccaaggcugggggaagaagcu

SEQ ID NO: 1658374 - RNA, 13 nt, Human
cgccaaggcuggg

SEQ ID NO: 1658375 - RNA, 16 nt, Human
cgccaaggcuggggga

SEQ ID NO: 1658376 - RNA, 14 nt, Human
cgcaggcuggcccu

SEQ ID NO: 1658377 - RNA, 15 nt, Human
cgcaggcuggcccug

SEQ ID NO: 1658378 - RNA, 17 nt, Human
cgcaggcuggcccugcc

SEQ ID NO: 1658379 - RNA, 18 nt, Human
cgcaggcuggcccugccc

SEQ ID NO: 1658380 - RNA, 19 nt, Human
cgcaggcuggcccugcccu

SEQ ID NO: 1658381 - RNA, 20 nt, Human
cgcaggcuggcccugcccug

SEQ ID NO: 1658382 - RNA, 12 nt, Human
cgccaaggcugg

SEQ ID NO: 1658383 - RNA, 17 nt, Human
cgaguuacagacaaagc

SEQ ID NO: 1658384 - RNA, 18 nt, Human
cgaguuacagacaaagcg

SEQ ID NO: 1658385 - RNA, 14 nt, Human
cgaguagcugggac

SEQ ID NO: 1658386 - RNA, 15 nt, Human
cgaguagcugggacu

SEQ ID NO: 1658387 - RNA, 16 nt, Human
cgaguagcugggacua

SEQ ID NO: 1658388 - RNA, 16 nt, Human
cggaggggccuggcag

SEQ ID NO: 1658389 - RNA, 18 nt, Human
cggaggggccuggcagcc

SEQ ID NO: 1658390 - RNA, 14 nt, Human
cggagucccaccuu

SEQ ID NO: 1658391 - RNA, 21 nt, Human
cggcucacugcauccuccgcc

SEQ ID NO: 1658392 - RNA, 19 nt, Human
cggcucacugcagccucaa

SEQ ID NO: 1658393 - RNA, 17 nt, Human
cggcucacugcauccuc

SEQ ID NO: 1658394 - RNA, 18 nt, Human
cggcucacugcagccuca

SEQ ID NO: 1658395 - RNA, 22 nt, Human
ccuucuggaauaaggagaauga

SEQ ID NO: 1658396 - RNA, 23 nt, Human
ccuucugacccaugcugcccugu

SEQ ID NO: 1658397 - RNA, 21 nt, Human
ccuucugacccaugcugcccu

SEQ ID NO: 1658398 - RNA, 22 nt, Human
ccuucugacccaugcugcccug

SEQ ID NO: 1658399 - RNA, 20 nt, Human
ccuggccugagcugggauga

SEQ ID NO: 1658400 - RNA, 14 nt, Human
ccuggccugagcug

SEQ ID NO: 1658401 - RNA, 15 nt, Human
ccuggccugagcugg

SEQ ID NO: 1658402 - RNA, 12 nt, Human
ccuucugaccca

SEQ ID NO: 1658403 - RNA, 16 nt, Human
ccuucugacccaugcu

SEQ ID NO: 1658404 - RNA, 17 nt, Human
ccuucugacccaugcug

SEQ ID NO: 1658405 - RNA, 20 nt, Human
ccuucugacccaugcugccc

SEQ ID NO: 1658406 - RNA, 20 nt, Human
ccuugccgucuaccugaggg

SEQ ID NO: 1658407 - RNA, 14 nt, Human
ccuuuagcgcccag

SEQ ID NO: 1658408 - RNA, 20 nt, Human
ccuuuagcgcccaguugggu

SEQ ID NO: 1658409 - RNA, 17 nt, Human
ccuuuuucauuauuuua

SEQ ID NO: 1658410 - RNA, 12 nt, Human
ccuuuuuuauac

SEQ ID NO: 1658411 - RNA, 19 nt, Human
ccuuuuuuauacauaaaca

SEQ ID NO: 1658412 - RNA, 12 nt, Human
cgaccaccugcc

SEQ ID NO: 1658413 - RNA, 14 nt, Human
cgaccaccugccca

SEQ ID NO: 1658414 - RNA, 23 nt, Human
cgaccagacaccuugacagggca

SEQ ID NO: 1658415 - RNA, 18 nt, Human
ccuuuuuuauacauaaac

SEQ ID NO: 1658416 - RNA, 17 nt, Human
ccuuuuuuauacauaaa

SEQ ID NO: 1658417 - RNA, 15 nt, Human
cgacagugagacucu

SEQ ID NO: 1658418 - RNA, 16 nt, Human
cgacagugagacucug

SEQ ID NO: 1658419 - RNA, 19 nt, Human
cuagggaaaaaccagcgug

SEQ ID NO: 1658420 - RNA, 21 nt, Human
cuagggaaaaaccagcgugug

SEQ ID NO: 1658421 - RNA, 18 nt, Human
cuaguuccaccaucaagc

SEQ ID NO: 1658422 - RNA, 20 nt, Human
cuaguuccaccaucaagcca

SEQ ID NO: 1658423 - RNA, 22 nt, Human
cuaguuccaccaucaagccacc

SEQ ID NO: 1658424 - RNA, 23 nt, Human
cuaguugaucagcuuauugucua

SEQ ID NO: 1658425 - RNA, 15 nt, Human
cuaccugaggggccu

SEQ ID NO: 1658426 - RNA, 11 nt, Human
cuaccugaggg

SEQ ID NO: 1658427 - RNA, 14 nt, Human
cuaccugaggggcc

SEQ ID NO: 1658428 - RNA, 19 nt, Human
cuagaaauuccccacccug

SEQ ID NO: 1658429 - RNA, 23 nt, Human
cuagcagcagggagggcuucugc

SEQ ID NO: 1658430 - RNA, 17 nt, Human
cuagcauggcugccaau

SEQ ID NO: 1658431 - RNA, 22 nt, Human
cuagcagcagggagggcuucug

SEQ ID NO: 1658432 - RNA, 16 nt, Human
cuagaacucccuuuca

SEQ ID NO: 1658433 - RNA, 17 nt, Human
cuagaacucccuuucaa

SEQ ID NO: 1658434 - RNA, 18 nt, Human
cuagaacucccuuucaac

SEQ ID NO: 1658435 - RNA, 19 nt, Human
cuagaacucccuuucaaca

SEQ ID NO: 1658436 - RNA, 23 nt, Human
cuaaacugcccccucugcccugc

SEQ ID NO: 1658437 - RNA, 15 nt, Human
cuaaacuuuucugau

SEQ ID NO: 1658438 - RNA, 14 nt, Human
cuaaacuuucacac

SEQ ID NO: 1658439 - RNA, 13 nt, Human
cuaaacuuuucug

SEQ ID NO: 1658440 - RNA, 13 nt, Human
cuaaacuuucaca

SEQ ID NO: 1658441 - RNA, 22 nt, Human
cuaaacugcccccucugcccug

SEQ ID NO: 1658442 - RNA, 13 nt, Human
cgugagaccugcc

SEQ ID NO: 1658443 - RNA, 14 nt, Human
cgugagaccugccc

SEQ ID NO: 1658444 - RNA, 16 nt, Human
cgugagaccugccccu

SEQ ID NO: 1658445 - RNA, 23 nt, Human
cgugagccaccgugccuggccac

SEQ ID NO: 1658446 - RNA, 16 nt, Human
cuaacuucaccauauu

SEQ ID NO: 1658447 - RNA, 15 nt, Human
cuaacuucaccauau

SEQ ID NO: 1658448 - RNA, 20 nt, Human
cuaacgaaguauccuucagc

SEQ ID NO: 1658449 - RNA, 20 nt, Human
cuaagugaaauaagccagac

SEQ ID NO: 1658450 - RNA, 23 nt, Human
cuaagugaaauaagccagacauc

SEQ ID NO: 1658451 - RNA, 18 nt, Human
cuaagugaggaugaaaaa

SEQ ID NO: 1658452 - RNA, 20 nt, Human
cuaagugauccucccaccuc

SEQ ID NO: 1658453 - RNA, 22 nt, Human
cuaagugauccucccaccucag

SEQ ID NO: 1658454 - RNA, 15 nt, Human
cuacaagacacagug

SEQ ID NO: 1658455 - RNA, 15 nt, Human
cuacaguccucccau

SEQ ID NO: 1658456 - RNA, 16 nt, Human
cuacaguccucccauc

SEQ ID NO: 1658457 - RNA, 17 nt, Human
cuacaguccucccaucu

SEQ ID NO: 1658458 - RNA, 18 nt, Human
cuacaguccucccaucuc

SEQ ID NO: 1658459 - RNA, 13 nt, Human
cuacaguugaaaa

SEQ ID NO: 1658460 - RNA, 19 nt, Human
cuacaguugaaaaacagcu

SEQ ID NO: 1658461 - RNA, 18 nt, Human
cuacaugagguacugaga

SEQ ID NO: 1658462 - RNA, 15 nt, Human
cuacaugagguacug

SEQ ID NO: 1658463 - RNA, 18 nt, Human
cuacauacaauuccaaac

SEQ ID NO: 1658464 - RNA, 15 nt, Human
cccucacccuggggc

SEQ ID NO: 1658465 - RNA, 12 nt, Human
cccugcccugug

SEQ ID NO: 1658466 - RNA, 13 nt, Human
cccugcccugugg

SEQ ID NO: 1658467 - RNA, 20 nt, Human
cccuauuuuuuuucuguuau

SEQ ID NO: 1658468 - RNA, 21 nt, Human
cccuauuuuuuuucuguuaua

SEQ ID NO: 1658469 - RNA, 21 nt, Human
cccugcccugugggcccccaa

SEQ ID NO: 1658470 - RNA, 12 nt, Human
cccuggcagccc

SEQ ID NO: 1658471 - RNA, 13 nt, Human
cccuggcagcccc

SEQ ID NO: 1658472 - RNA, 14 nt, Human
cccugcccuguggg

SEQ ID NO: 1658473 - RNA, 15 nt, Human
cccugcccugugggc

SEQ ID NO: 1658474 - RNA, 16 nt, Human
cccugcccugugggcc

SEQ ID NO: 1658475 - RNA, 20 nt, Human
cccugcccugugggccccca

SEQ ID NO: 1658476 - RNA, 13 nt, Human
cccuggcuuuuca

SEQ ID NO: 1658477 - RNA, 17 nt, Human
cccuggcuuuucacugc

SEQ ID NO: 1658478 - RNA, 17 nt, Human
cccuggcucccacaggc

SEQ ID NO: 1658479 - RNA, 19 nt, Human
cccuggcucccacaggccc

SEQ ID NO: 1658480 - RNA, 14 nt, Human
cccuggcagccccu

SEQ ID NO: 1658481 - RNA, 16 nt, Human
cccuggcagccccugu

SEQ ID NO: 1658482 - RNA, 17 nt, Human
cccuggccuuucauauu

SEQ ID NO: 1658483 - RNA, 21 nt, Human
cccuucugacccaugcugccc

SEQ ID NO: 1658484 - RNA, 22 nt, Human
cccuucugacccaugcugcccu

SEQ ID NO: 1658485 - RNA, 23 nt, Human
cccuucugacccaugcugcccug

SEQ ID NO: 1658486 - RNA, 16 nt, Human
cccuucuaccuuccug

SEQ ID NO: 1658487 - RNA, 16 nt, Human
cccuucgcuccugugu

SEQ ID NO: 1658488 - RNA, 18 nt, Human
cccuucgcuccugugucu

SEQ ID NO: 1658489 - RNA, 16 nt, Human
ccgccaugcuccuggc

SEQ ID NO: 1658490 - RNA, 20 nt, Human
ccgcccaggcuuagucacug

SEQ ID NO: 1658491 - RNA, 16 nt, Human
ccgacccuugccgucu

SEQ ID NO: 1658492 - RNA, 17 nt, Human
ccgccaaggcuggggga

SEQ ID NO: 1658493 - RNA, 20 nt, Human
ccgaauagcugggacuacag

SEQ ID NO: 1658494 - RNA, 17 nt, Human
cccuucuuuccacagaa

SEQ ID NO: 1658495 - RNA, 23 nt, Human
ccuaggcauuugcugaauacaga

SEQ ID NO: 1658496 - RNA, 17 nt, Human
ccuagcacuuugggagg

SEQ ID NO: 1658497 - RNA, 17 nt, Human
ccuagcacacacuuuug

SEQ ID NO: 1658498 - RNA, 18 nt, Human
ccgucucugguuccuccc

SEQ ID NO: 1658499 - RNA, 14 nt, Human
ccuaauaaagcugu

SEQ ID NO: 1658500 - RNA, 23 nt, Human
ccuaauaaagcuguguggcaguc

SEQ ID NO: 1658501 - RNA, 12 nt, Human
ccggcuccaggc

SEQ ID NO: 1658502 - RNA, 22 nt, Human
ccggcuaugggggcacugagga

SEQ ID NO: 1658503 - RNA, 23 nt, Human
ccggcuaugggggcacugaggac

SEQ ID NO: 1658504 - RNA, 17 nt, Human
ccggcuaugggggcacu

SEQ ID NO: 1658505 - RNA, 19 nt, Human
ccggcuaauuuuuguauuu

SEQ ID NO: 1658506 - RNA, 16 nt, Human
ccguagguuauuuuca

SEQ ID NO: 1658507 - RNA, 15 nt, Human
ccuauuuuaauaaac

SEQ ID NO: 1658508 - RNA, 15 nt, Human
ccucaacucuccucc

SEQ ID NO: 1658509 - RNA, 15 nt, Human
ccucaagagaaggca

SEQ ID NO: 1658510 - RNA, 11 nt, Human
ccucagccucc

SEQ ID NO: 1658511 - RNA, 22 nt, Human
ccucagccucccaaagugcugg

SEQ ID NO: 1658512 - RNA, 14 nt, Human
ccucccaggcgccc

SEQ ID NO: 1658513 - RNA, 20 nt, Human
ccucccaggcgccccuuccc

SEQ ID NO: 1658514 - RNA, 22 nt, Human
ccuccaaucccaccaacccuca

SEQ ID NO: 1658515 - RNA, 22 nt, Human
ccucccaaggggcccaaauucu

SEQ ID NO: 1658516 - RNA, 19 nt, Human
ccucauguucuuaauucuu

SEQ ID NO: 1658517 - RNA, 21 nt, Human
ccuccaagcuccaucuccacu

SEQ ID NO: 1658518 - RNA, 22 nt, Human
ccuccaagcuccaucuccacuc

SEQ ID NO: 1658519 - RNA, 18 nt, Human
ccucauuagcauuuugcu

SEQ ID NO: 1658520 - RNA, 23 nt, Human
ccucagccucccaaagugcuggg

SEQ ID NO: 1658521 - RNA, 22 nt, Human
ccucagccucccgaauagcugg

SEQ ID NO: 1658522 - RNA, 13 nt, Human
ccucagccuccug

SEQ ID NO: 1658523 - RNA, 15 nt, Human
ccucauguccacugg

SEQ ID NO: 1658524 - RNA, 13 nt, Human
ccucauguucuua

SEQ ID NO: 1658525 - RNA, 20 nt, Human
ccucauguccacugguucuu

SEQ ID NO: 1658526 - RNA, 12 nt, Human
ccugcugggugu

SEQ ID NO: 1658527 - RNA, 21 nt, Human
ccugcuggguguggcgcagca

SEQ ID NO: 1658528 - RNA, 14 nt, Human
ccugcugggugugg

SEQ ID NO: 1658529 - RNA, 20 nt, Human
ccugcuggguguggcgcagc

SEQ ID NO: 1658530 - RNA, 14 nt, Human
ccugcccaggcccc

SEQ ID NO: 1658531 - RNA, 15 nt, Human
ccugcccaggccccu

SEQ ID NO: 1658532 - RNA, 16 nt, Human
ccugcccaggccccug

SEQ ID NO: 1658533 - RNA, 18 nt, Human
ccugcccaggccccugcc

SEQ ID NO: 1658534 - RNA, 15 nt, Human
ccuggaguucugguu

SEQ ID NO: 1658535 - RNA, 16 nt, Human
ccuggaguucugguuc

SEQ ID NO: 1658536 - RNA, 17 nt, Human
ccuggaguucugguucc

SEQ ID NO: 1658537 - RNA, 19 nt, Human
ccuggaugcagccucacag

SEQ ID NO: 1658538 - RNA, 14 nt, Human
ccuggaugcagccu

SEQ ID NO: 1658539 - RNA, 17 nt, Human
ccuggaugcagccucac

SEQ ID NO: 1658540 - RNA, 21 nt, Human
ccuggauccaucaggccacuu

SEQ ID NO: 1658541 - RNA, 13 nt, Human
ccuggaugcagcc

SEQ ID NO: 1658542 - RNA, 16 nt, Human
ccuggcacagggcagu

SEQ ID NO: 1658543 - RNA, 17 nt, Human
ccuggcacagggcagug

SEQ ID NO: 1658544 - RNA, 18 nt, Human
ccuggcacagggcagugg

SEQ ID NO: 1658545 - RNA, 18 nt, Human
ccuggcacccggccccug

SEQ ID NO: 1658546 - RNA, 12 nt, Human
ccuggccucugc

SEQ ID NO: 1658547 - RNA, 16 nt, Human
ccuggccucugcacuc

SEQ ID NO: 1658548 - RNA, 13 nt, Human
ccuggccugagcu

SEQ ID NO: 1658549 - RNA, 14 nt, Human
ccuggccucugcac

SEQ ID NO: 1658550 - RNA, 15 nt, Human
ccuggccucugcacu

SEQ ID NO: 1658551 - RNA, 14 nt, Human
ccucuugccacugc

SEQ ID NO: 1658552 - RNA, 13 nt, Human
ccucuuggguuca

SEQ ID NO: 1658553 - RNA, 19 nt, Human
ccucuugagccuugaacuu

SEQ ID NO: 1658554 - RNA, 13 nt, Human
ccucuugagccuu

SEQ ID NO: 1658555 - RNA, 22 nt, Human
ccugcacuugcagacucuacag

SEQ ID NO: 1658556 - RNA, 13 nt, Human
ccucucugcaggu

SEQ ID NO: 1658557 - RNA, 15 nt, Human
ccucucugcaggucc

SEQ ID NO: 1658558 - RNA, 14 nt, Human
ccucucucaggcca

SEQ ID NO: 1658559 - RNA, 13 nt, Human
ccucucucacucc

SEQ ID NO: 1658560 - RNA, 14 nt, Human
ccucucucacuccu

SEQ ID NO: 1658561 - RNA, 15 nt, Human
ccucucucacuccuu

SEQ ID NO: 1658562 - RNA, 17 nt, Human
ccucucucacuccuuga

SEQ ID NO: 1658563 - RNA, 12 nt, Human
ccucucucaggc

SEQ ID NO: 1658564 - RNA, 12 nt, Human
ccucucugcccu

SEQ ID NO: 1658565 - RNA, 23 nt, Human
ccucucugcaggucccuaauaaa

SEQ ID NO: 1658566 - RNA, 21 nt, Human
ccucucugcaggucccuaaua

SEQ ID NO: 1658567 - RNA, 22 nt, Human
ccucucugcaggucccuaauaa

SEQ ID NO: 1658568 - RNA, 12 nt, Human
ccucugccuguc

SEQ ID NO: 1658569 - RNA, 22 nt, Human
ccucugccugaagucacacagu

SEQ ID NO: 1658570 - RNA, 15 nt, Human
ccucugcugauccuc

SEQ ID NO: 1658571 - RNA, 18 nt, Human
ccucugcugauccuccca

SEQ ID NO: 1658572 - RNA, 13 nt, Human
ccucugcugcugg

SEQ ID NO: 1658573 - RNA, 14 nt, Human
ccucugcugcuggc

SEQ ID NO: 1658574 - RNA, 15 nt, Human
ccucugcugcuggcu

SEQ ID NO: 1658575 - RNA, 16 nt, Human
ccucugcugcuggcug

SEQ ID NO: 1658576 - RNA, 17 nt, Human
ccucugcugcuggcugg

SEQ ID NO: 1658577 - RNA, 18 nt, Human
ccucugcugcuggcuggu

SEQ ID NO: 1658578 - RNA, 13 nt, Human
ccucugcuugcca

SEQ ID NO: 1658579 - RNA, 17 nt, Human
ccucugcuugccauccc

SEQ ID NO: 1658580 - RNA, 18 nt, Human
cccacccugaaagcccug

SEQ ID NO: 1658581 - RNA, 17 nt, Human
cccacccccacccaagg

SEQ ID NO: 1658582 - RNA, 15 nt, Human
cccacccccacccaa

SEQ ID NO: 1658583 - RNA, 20 nt, Human
cccacccaagggccuggccu

SEQ ID NO: 1658584 - RNA, 21 nt, Human
cccacccaagggccuggccug

SEQ ID NO: 1658585 - RNA, 22 nt, Human
cccacccaagggccuggccuga

SEQ ID NO: 1658586 - RNA, 22 nt, Human
cccacugcuuuuggucugugug

SEQ ID NO: 1658587 - RNA, 19 nt, Human
cccacugcuuuuggucugu

SEQ ID NO: 1658588 - RNA, 12 nt, Human
cccacugcucug

SEQ ID NO: 1658589 - RNA, 13 nt, Human
cccacugcucugg

SEQ ID NO: 1658590 - RNA, 18 nt, Human
cccacuagacccacugga

SEQ ID NO: 1658591 - RNA, 12 nt, Human
cccacucccugc

SEQ ID NO: 1658592 - RNA, 13 nt, Human
cccauccucugua

SEQ ID NO: 1658593 - RNA, 15 nt, Human
cccagcuugaaaccu

SEQ ID NO: 1658594 - RNA, 15 nt, Human
cccaggaaaggcucc

SEQ ID NO: 1658595 - RNA, 13 nt, Human
cccaggcuggcgu

SEQ ID NO: 1658596 - RNA, 17 nt, Human
cccaggcuggcgugcag

SEQ ID NO: 1658597 - RNA, 20 nt, Human
cccauauuuguacaccaaua

SEQ ID NO: 1658598 - RNA, 24 nt, Human
cccagccagcaguucagagcugcc

SEQ ID NO: 1658599 - RNA, 16 nt, Human
cccagccagcaguuca

SEQ ID NO: 1658600 - RNA, 23 nt, Human
cccagcucugguccauagagagc

SEQ ID NO: 1658601 - RNA, 20 nt, Human
cccagccagcaguucagagc

SEQ ID NO: 1658602 - RNA, 17 nt, Human
cccagccagcaguucag

SEQ ID NO: 1658603 - RNA, 23 nt, Human
ccccgaggccuucucugaaggac

SEQ ID NO: 1658604 - RNA, 23 nt, Human
ccccgacccuugccgucuaccug

SEQ ID NO: 1658605 - RNA, 22 nt, Human
cccccaaauggaaaugggcaga

SEQ ID NO: 1658606 - RNA, 13 nt, Human
ccccagaggcugg

SEQ ID NO: 1658607 - RNA, 22 nt, Human
ccccagcaagugagagcugggu

SEQ ID NO: 1658608 - RNA, 23 nt, Human
ccccaaaacucuccucugcugcu

SEQ ID NO: 1658609 - RNA, 22 nt, Human
cccauuguggucacaggaagua

SEQ ID NO: 1658610 - RNA, 22 nt, Human
ccccaaaacucuccucugcugc

SEQ ID NO: 1658611 - RNA, 23 nt, Human
cccauuguggucacaggaaguag

SEQ ID NO: 1658612 - RNA, 19 nt, Human
ccccucuggcuccagcugg

SEQ ID NO: 1658613 - RNA, 14 nt, Human
cccgaauagcuggg

SEQ ID NO: 1658614 - RNA, 13 nt, Human
cccggccaccugc

SEQ ID NO: 1658615 - RNA, 14 nt, Human
cccggccaccugcg

SEQ ID NO: 1658616 - RNA, 12 nt, Human
cccggcuccagg

SEQ ID NO: 1658617 - RNA, 13 nt, Human
cccggcuccaggc

SEQ ID NO: 1658618 - RNA, 14 nt, Human
cccggcuccaggcu

SEQ ID NO: 1658619 - RNA, 15 nt, Human
cccggcuccaggcuc

SEQ ID NO: 1658620 - RNA, 16 nt, Human
cccggcuccaggcucc

SEQ ID NO: 1658621 - RNA, 17 nt, Human
cccggccaccugcggug

SEQ ID NO: 1658622 - RNA, 17 nt, Human
cccuauugguaaagaau

SEQ ID NO: 1658623 - RNA, 18 nt, Human
cccuauuagagaagagau

SEQ ID NO: 1658624 - RNA, 23 nt, Human
cccgggaggcagagguugcagug

SEQ ID NO: 1658625 - RNA, 16 nt, Human
ccaggcacugcugccc

SEQ ID NO: 1658626 - RNA, 18 nt, Human
ccaggcacugcugcccag

SEQ ID NO: 1658627 - RNA, 20 nt, Human
ccaggcuccuuuagcgccca

SEQ ID NO: 1658628 - RNA, 21 nt, Human
ccaggcuccuuuagcgcccag

SEQ ID NO: 1658629 - RNA, 19 nt, Human
ccaggcuggcgugcagugg

SEQ ID NO: 1658630 - RNA, 17 nt, Human
ccaggcuggcgugcagu

SEQ ID NO: 1658631 - RNA, 18 nt, Human
ccaggcuggcgugcagug

SEQ ID NO: 1658632 - RNA, 19 nt, Human
ccaggggaaaaucagccug

SEQ ID NO: 1658633 - RNA, 20 nt, Human
ccaggggaaaaucagccugc

SEQ ID NO: 1658634 - RNA, 13 nt, Human
ccaggggugggac

SEQ ID NO: 1658635 - RNA, 19 nt, Human
ccaggggugggacacccug

SEQ ID NO: 1658636 - RNA, 14 nt, Human
ccaggggugggaca

SEQ ID NO: 1658637 - RNA, 17 nt, Human
ccaggggugggacaccc

SEQ ID NO: 1658638 - RNA, 17 nt, Human
ccaguuggguggaugcc

SEQ ID NO: 1658639 - RNA, 19 nt, Human
ccaguuggguggaugccug

SEQ ID NO: 1658640 - RNA, 20 nt, Human
ccaguuggguggaugccugg

SEQ ID NO: 1658641 - RNA, 23 nt, Human
ccaguuggguggaugccuggugg

SEQ ID NO: 1658642 - RNA, 23 nt, Human
ccaguuggucccccuuccaugga

SEQ ID NO: 1658643 - RNA, 14 nt, Human
ccaucccagcccca

SEQ ID NO: 1658644 - RNA, 15 nt, Human
ccaucccagccccaa

SEQ ID NO: 1658645 - RNA, 14 nt, Human
ccaucccugaaggc

SEQ ID NO: 1658646 - RNA, 15 nt, Human
ccaucccugaaggcc

SEQ ID NO: 1658647 - RNA, 17 nt, Human
ccaucccugaaggcccc

SEQ ID NO: 1658648 - RNA, 20 nt, Human
ccaucccugaaggccccgcc

SEQ ID NO: 1658649 - RNA, 21 nt, Human
ccaugagccucagcauccugg

SEQ ID NO: 1658650 - RNA, 23 nt, Human
ccaugagccucagcauccuggca

SEQ ID NO: 1658651 - RNA, 20 nt, Human
ccauggucggaaaacaugcu

SEQ ID NO: 1658652 - RNA, 16 nt, Human
ccaggaaaggcuccag

SEQ ID NO: 1658653 - RNA, 14 nt, Human
ccaggaaaggcucc

SEQ ID NO: 1658654 - RNA, 15 nt, Human
ccaggaaaggcucca

SEQ ID NO: 1658655 - RNA, 12 nt, Human
ccaggaagccag

SEQ ID NO: 1658656 - RNA, 14 nt, Human
ccaggaagccagca

SEQ ID NO: 1658657 - RNA, 13 nt, Human
ccaggaagccagc

SEQ ID NO: 1658658 - RNA, 11 nt, Human
ccagccccugg

SEQ ID NO: 1658659 - RNA, 12 nt, Human
ccagccccugga

SEQ ID NO: 1658660 - RNA, 17 nt, Human
ccagcuguucagcuggu

SEQ ID NO: 1658661 - RNA, 16 nt, Human
ccagcuuaucucaggg

SEQ ID NO: 1658662 - RNA, 19 nt, Human
ccagcuuaaaggggcuaga

SEQ ID NO: 1658663 - RNA, 15 nt, Human
ccagcucaccagccc

SEQ ID NO: 1658664 - RNA, 16 nt, Human
ccagcucaccagcccc

SEQ ID NO: 1658665 - RNA, 22 nt, Human
ccagcucaccagccccagugcc

SEQ ID NO: 1658666 - RNA, 16 nt, Human
ccagcuguucagcugg

SEQ ID NO: 1658667 - RNA, 21 nt, Human
ccagcagauuauucacugauu

SEQ ID NO: 1658668 - RNA, 22 nt, Human
ccagcagauuauucacugauuu

SEQ ID NO: 1658669 - RNA, 13 nt, Human
ccagcaggcucuc

SEQ ID NO: 1658670 - RNA, 15 nt, Human
ccagcaggcucucag

SEQ ID NO: 1658671 - RNA, 23 nt, Human
ccagaugcaccagcccuuagcag

SEQ ID NO: 1658672 - RNA, 18 nt, Human
ccagaugcaccagcccuu

SEQ ID NO: 1658673 - RNA, 17 nt, Human
ccagaugcaccagcccu

SEQ ID NO: 1658674 - RNA, 15 nt, Human
ccagaugcaccagcc

SEQ ID NO: 1658675 - RNA, 20 nt, Human
ccagagggccugcaagggag

SEQ ID NO: 1658676 - RNA, 16 nt, Human
ccaccuuggcucaagu

SEQ ID NO: 1658677 - RNA, 17 nt, Human
ccagagggccugcaagg

SEQ ID NO: 1658678 - RNA, 18 nt, Human
ccagagggccugcaaggg

SEQ ID NO: 1658679 - RNA, 19 nt, Human
ccagagggccugcaaggga

SEQ ID NO: 1658680 - RNA, 15 nt, Human
ccagauccuggaaau

SEQ ID NO: 1658681 - RNA, 15 nt, Human
caggguuggccccug

SEQ ID NO: 1658682 - RNA, 16 nt, Human
caggguuggccccugc

SEQ ID NO: 1658683 - RNA, 21 nt, Human
cagggucucuaccauccccug

SEQ ID NO: 1658684 - RNA, 23 nt, Human
cagggucucacucugucgcccag

SEQ ID NO: 1658685 - RNA, 23 nt, Human
cagguuuuuggucugacccacug

SEQ ID NO: 1658686 - RNA, 13 nt, Human
caggugcugccau

SEQ ID NO: 1658687 - RNA, 14 nt, Human
caggugcugccauc

SEQ ID NO: 1658688 - RNA, 17 nt, Human
caggguuggccccugcc

SEQ ID NO: 1658689 - RNA, 21 nt, Human
caggguuggccccugcccggc

SEQ ID NO: 1658690 - RNA, 18 nt, Human
caguaaaugggggugcau

SEQ ID NO: 1658691 - RNA, 20 nt, Human
caguaaaugggggugcauuu

SEQ ID NO: 1658692 - RNA, 19 nt, Human
caguaaaugggggugcauu

SEQ ID NO: 1658693 - RNA, 12 nt, Human
caguauugaagc

SEQ ID NO: 1658694 - RNA, 14 nt, Human
caguauugaagcau

SEQ ID NO: 1658695 - RNA, 15 nt, Human
caguauugaagcauu

SEQ ID NO: 1658696 - RNA, 22 nt, Human
caguauuguacaaaguauuaag

SEQ ID NO: 1658697 - RNA, 16 nt, Human
caguauugaagcauuu

SEQ ID NO: 1658698 - RNA, 17 nt, Human
caguauugaagcauuuu

SEQ ID NO: 1658699 - RNA, 20 nt, Human
caguauugaagcauuuuaua

SEQ ID NO: 1658700 - RNA, 21 nt, Human
caguauugaagcauuuuauaa

SEQ ID NO: 1658701 - RNA, 16 nt, Human
cagucaccccggccac

SEQ ID NO: 1658702 - RNA, 17 nt, Human
cagucaccccggccacc

SEQ ID NO: 1658703 - RNA, 20 nt, Human
caggccugggggcugggcag

SEQ ID NO: 1658704 - RNA, 22 nt, Human
caggccugggggcugggcagag

SEQ ID NO: 1658705 - RNA, 23 nt, Human
caggccugggggcugggcagagg

SEQ ID NO: 1658706 - RNA, 17 nt, Human
caggcuggcgugcagug

SEQ ID NO: 1658707 - RNA, 18 nt, Human
caggcuggcgugcagugg

SEQ ID NO: 1658708 - RNA, 19 nt, Human
caggcuggcgugcaguggu

SEQ ID NO: 1658709 - RNA, 16 nt, Human
caggcugggagagccu

SEQ ID NO: 1658710 - RNA, 18 nt, Human
caggcugggagagccuuc

SEQ ID NO: 1658711 - RNA, 19 nt, Human
caggcugggagagccuucc

SEQ ID NO: 1658712 - RNA, 20 nt, Human
caggcugggagagccuucca

SEQ ID NO: 1658713 - RNA, 18 nt, Human
cagggagggccugggccc

SEQ ID NO: 1658714 - RNA, 16 nt, Human
cagggagggcuucugc

SEQ ID NO: 1658715 - RNA, 20 nt, Human
cagggcucagcggggacagc

SEQ ID NO: 1658716 - RNA, 12 nt, Human
cagggcucagcg

SEQ ID NO: 1658717 - RNA, 15 nt, Human
cagggcucagcgggg

SEQ ID NO: 1658718 - RNA, 14 nt, Human
caggcugggcuuca

SEQ ID NO: 1658719 - RNA, 15 nt, Human
caggcugggcuucag

SEQ ID NO: 1658720 - RNA, 22 nt, Human
cagggaggacgcucucuggccu

SEQ ID NO: 1658721 - RNA, 16 nt, Human
caggcacugcugccca

SEQ ID NO: 1658722 - RNA, 17 nt, Human
caggcacugcugcccag

SEQ ID NO: 1658723 - RNA, 21 nt, Human
caggcaaugcuggcuguuggc

SEQ ID NO: 1658724 - RNA, 14 nt, Human
caggaggccagccu

SEQ ID NO: 1658725 - RNA, 12 nt, Human
caggaggccagc

SEQ ID NO: 1658726 - RNA, 13 nt, Human
caggaggccagcc

SEQ ID NO: 1658727 - RNA, 19 nt, Human
caggcaaugcuggcuguug

SEQ ID NO: 1658728 - RNA, 20 nt, Human
caggcaaugcuggcuguugg

SEQ ID NO: 1658729 - RNA, 23 nt, Human
caggcacugcugcccagccucca

SEQ ID NO: 1658730 - RNA, 13 nt, Human
caggccagcugcu

SEQ ID NO: 1658731 - RNA, 15 nt, Human
caggccagcugcuug

SEQ ID NO: 1658732 - RNA, 13 nt, Human
caggccaggcccu

SEQ ID NO: 1658733 - RNA, 14 nt, Human
caggccaggcccuc

SEQ ID NO: 1658734 - RNA, 15 nt, Human
caggccaggcccucu

SEQ ID NO: 1658735 - RNA, 16 nt, Human
caggccaggcccucug

SEQ ID NO: 1658736 - RNA, 13 nt, Human
caggaccagggau

SEQ ID NO: 1658737 - RNA, 21 nt, Human
caggaccagggauuuccauga

SEQ ID NO: 1658738 - RNA, 13 nt, Human
caggaccucaggu

SEQ ID NO: 1658739 - RNA, 23 nt, Human
caggacagcccuucuuuccacag

SEQ ID NO: 1658740 - RNA, 24 nt, Human
caggacagcccuucuuuccacaga

SEQ ID NO: 1658741 - RNA, 23 nt, Human
caggaaaggcuccaggagcagcc

SEQ ID NO: 1658742 - RNA, 21 nt, Human
caggaaaggcuccaggagcag

SEQ ID NO: 1658743 - RNA, 22 nt, Human
caggaaaggcuccaggagcagc

SEQ ID NO: 1658744 - RNA, 19 nt, Human
caggaaaagcugcugacag

SEQ ID NO: 1658745 - RNA, 20 nt, Human
caggaaaagcugcugacagu

SEQ ID NO: 1658746 - RNA, 15 nt, Human
cagcuguucagcugg

SEQ ID NO: 1658747 - RNA, 16 nt, Human
cagcuguucagcuggu

SEQ ID NO: 1658748 - RNA, 19 nt, Human
cagcuguucagcugguuga

SEQ ID NO: 1658749 - RNA, 16 nt, Human
cagcuuauucacaaga

SEQ ID NO: 1658750 - RNA, 17 nt, Human
cagcuuauucacaagac

SEQ ID NO: 1658751 - RNA, 22 nt, Human
caggaaaucaaauaugcaaagc

SEQ ID NO: 1658752 - RNA, 21 nt, Human
caggaaaucaaauaugcaaag

SEQ ID NO: 1658753 - RNA, 19 nt, Human
caggaaaucaaauaugcaa

SEQ ID NO: 1658754 - RNA, 17 nt, Human
cagagcuacacagggga

SEQ ID NO: 1658755 - RNA, 22 nt, Human
cagagcuacacaggggaaaaga

SEQ ID NO: 1658756 - RNA, 16 nt, Human
cagagagggugggagu

SEQ ID NO: 1658757 - RNA, 23 nt, Human
cagagagggugggagugggccca

SEQ ID NO: 1658758 - RNA, 14 nt, Human
cagagccugcaguu

SEQ ID NO: 1658759 - RNA, 20 nt, Human
cagagagggugggagugggc

SEQ ID NO: 1658760 - RNA, 22 nt, Human
cagagagggugggagugggccc

SEQ ID NO: 1658761 - RNA, 23 nt, Human
cagagacuccugcaggcagccag

SEQ ID NO: 1658762 - RNA, 21 nt, Human
cagagacuccugcaggcagcc

SEQ ID NO: 1658763 - RNA, 22 nt, Human
cagagacuccugcaggcagcca

SEQ ID NO: 1658764 - RNA, 20 nt, Human
cagagacuccugcaggcagc

SEQ ID NO: 1658765 - RNA, 22 nt, Human
cagaucauugugaaauuauuca

SEQ ID NO: 1658766 - RNA, 13 nt, Human
cagauacuggauu

SEQ ID NO: 1658767 - RNA, 16 nt, Human
cagaucauugugaaau

SEQ ID NO: 1658768 - RNA, 23 nt, Human
cagauacaggaaaagcugcugac

SEQ ID NO: 1658769 - RNA, 16 nt, Human
cagagguugcagugag

SEQ ID NO: 1658770 - RNA, 16 nt, Human
cagauuugagcucagc

SEQ ID NO: 1658771 - RNA, 13 nt, Human
cagauuugagcuc

SEQ ID NO: 1658772 - RNA, 14 nt, Human
cagauuugagcuca

SEQ ID NO: 1658773 - RNA, 15 nt, Human
cagauuucacucucc

SEQ ID NO: 1658774 - RNA, 16 nt, Human
cagauuucacucuccu

SEQ ID NO: 1658775 - RNA, 18 nt, Human
cagauuucacucuccuug

SEQ ID NO: 1658776 - RNA, 19 nt, Human
cagauuucacucuccuugg

SEQ ID NO: 1658777 - RNA, 21 nt, Human
cagauugcaacaggcugggcu

SEQ ID NO: 1658778 - RNA, 16 nt, Human
cagcauauucaggaag

SEQ ID NO: 1658779 - RNA, 17 nt, Human
cagcauauucaggaagc

SEQ ID NO: 1658780 - RNA, 18 nt, Human
cagcauauucaggaagcu

SEQ ID NO: 1658781 - RNA, 22 nt, Human
cagcaguucagagcugcccucu

SEQ ID NO: 1658782 - RNA, 21 nt, Human
cagcaguucagagcugcccuc

SEQ ID NO: 1658783 - RNA, 18 nt, Human
cagcaguucagagcugcc

SEQ ID NO: 1658784 - RNA, 20 nt, Human
cagcaguucagagcugcccu

SEQ ID NO: 1658785 - RNA, 19 nt, Human
cagcaguucagagcugccc

SEQ ID NO: 1658786 - RNA, 23 nt, Human
cagccccauucugccugcccagg

SEQ ID NO: 1658787 - RNA, 24 nt, Human
cagccccauucugccugcccaggc

SEQ ID NO: 1658788 - RNA, 19 nt, Human
cagccccauucugccugcc

SEQ ID NO: 1658789 - RNA, 20 nt, Human
cagccccauucugccugccc

SEQ ID NO: 1658790 - RNA, 22 nt, Human
cagccccauucugccugcccag

SEQ ID NO: 1658791 - RNA, 13 nt, Human
cagccccugcaca

SEQ ID NO: 1658792 - RNA, 19 nt, Human
cagccccgugggguuccuc

SEQ ID NO: 1658793 - RNA, 14 nt, Human
cagcguuucuauga

SEQ ID NO: 1658794 - RNA, 16 nt, Human
cagcguuucuaugaca

SEQ ID NO: 1658795 - RNA, 19 nt, Human
cagcguuucuaugacacau

SEQ ID NO: 1658796 - RNA, 14 nt, Human
cagcggggacagcu

SEQ ID NO: 1658797 - RNA, 13 nt, Human
cagcccuuagcag

SEQ ID NO: 1658798 - RNA, 15 nt, Human
cagcccuuagcaggg

SEQ ID NO: 1658799 - RNA, 23 nt, Human
cagccgccaugcuccuggcccac

SEQ ID NO: 1658800 - RNA, 17 nt, Human
cagccucugaaaaccaa

SEQ ID NO: 1658801 - RNA, 23 nt, Human
cagccugagcgacagugagacuc

SEQ ID NO: 1658802 - RNA, 12 nt, Human
caucgcaaugua

SEQ ID NO: 1658803 - RNA, 18 nt, Human
caucugugaaaggaaaga

SEQ ID NO: 1658804 - RNA, 19 nt, Human
caucugugaaaggaaagag

SEQ ID NO: 1658805 - RNA, 21 nt, Human
caucuuagguuggcaaaaagg

SEQ ID NO: 1658806 - RNA, 22 nt, Human
caucuuagguuggcaaaaaggc

SEQ ID NO: 1658807 - RNA, 17 nt, Human
caucccagccccaauga

SEQ ID NO: 1658808 - RNA, 16 nt, Human
caucccagccccaaug

SEQ ID NO: 1658809 - RNA, 13 nt, Human
caucccagcccca

SEQ ID NO: 1658810 - RNA, 14 nt, Human
caucccagccccaa

SEQ ID NO: 1658811 - RNA, 14 nt, Human
caucaggccaggcc

SEQ ID NO: 1658812 - RNA, 21 nt, Human
caucaggccaggcccucugcc

SEQ ID NO: 1658813 - RNA, 22 nt, Human
caucaggccaggcccucugccc

SEQ ID NO: 1658814 - RNA, 23 nt, Human
caucaggccaggcccucugccca

SEQ ID NO: 1658815 - RNA, 18 nt, Human
caucagcacgauuucugu

SEQ ID NO: 1658816 - RNA, 17 nt, Human
caucagcacgauuucug

SEQ ID NO: 1658817 - RNA, 13 nt, Human
caucaggccaggc

SEQ ID NO: 1658818 - RNA, 20 nt, Human
caucagcuugcccuguuaaa

SEQ ID NO: 1658819 - RNA, 19 nt, Human
caucagcacgauuucuguu

SEQ ID NO: 1658820 - RNA, 15 nt, Human
caucagcugcugaaa

SEQ ID NO: 1658821 - RNA, 17 nt, Human
caucagcugcugaaaca

SEQ ID NO: 1658822 - RNA, 18 nt, Human
caucagcugcugaaacaa

SEQ ID NO: 1658823 - RNA, 22 nt, Human
caugcaaggucauuuuuuuuaa

SEQ ID NO: 1658824 - RNA, 18 nt, Human
caugcaaggucauuuuuu

SEQ ID NO: 1658825 - RNA, 17 nt, Human
caugcaaggucauuuuu

SEQ ID NO: 1658826 - RNA, 12 nt, Human
caugcugccucc

SEQ ID NO: 1658827 - RNA, 14 nt, Human
caugcugccuccag

SEQ ID NO: 1658828 - RNA, 22 nt, Human
cauggccuuugcuugaaagaaa

SEQ ID NO: 1658829 - RNA, 19 nt, Human
cauggccuuugcuugaaag

SEQ ID NO: 1658830 - RNA, 16 nt, Human
caugcugcccugugag

SEQ ID NO: 1658831 - RNA, 18 nt, Human
caugcugcccugugagua

SEQ ID NO: 1658832 - RNA, 17 nt, Human
caugacacgaauauugc

SEQ ID NO: 1658833 - RNA, 18 nt, Human
caugacacgaauauugcu

SEQ ID NO: 1658834 - RNA, 14 nt, Human
caugaauuugugaa

SEQ ID NO: 1658835 - RNA, 14 nt, Human
caugacacgaauau

SEQ ID NO: 1658836 - RNA, 16 nt, Human
caugaauuaguuuuau

SEQ ID NO: 1658837 - RNA, 18 nt, Human
cagucaccccggccaccu

SEQ ID NO: 1658838 - RNA, 14 nt, Human
caguuugcuuugua

SEQ ID NO: 1658839 - RNA, 21 nt, Human
caguuugcuuuguaugcacuu

SEQ ID NO: 1658840 - RNA, 12 nt, Human
caguuugcuuug

SEQ ID NO: 1658841 - RNA, 23 nt, Human
cauaaucuggacuccucugucca

SEQ ID NO: 1658842 - RNA, 17 nt, Human
cauaaugcgugcauacc

SEQ ID NO: 1658843 - RNA, 14 nt, Human
cauaaugcgugcau

SEQ ID NO: 1658844 - RNA, 21 nt, Human
cauaaucuggacuccucuguc

SEQ ID NO: 1658845 - RNA, 22 nt, Human
cauaaucuggacuccucugucc

SEQ ID NO: 1658846 - RNA, 20 nt, Human
cauaaucuggacuccucugu

SEQ ID NO: 1658847 - RNA, 21 nt, Human
caguuuguuaguaugaggcau

SEQ ID NO: 1658848 - RNA, 22 nt, Human
cauauuaccacagacauacuaa

SEQ ID NO: 1658849 - RNA, 21 nt, Human
cauauuaccacagacauacua

SEQ ID NO: 1658850 - RNA, 20 nt, Human
cauauuaccacagacauacu

SEQ ID NO: 1658851 - RNA, 17 nt, Human
cauauuaccacagacau

SEQ ID NO: 1658852 - RNA, 15 nt, Human
cauagcccucacccu

SEQ ID NO: 1658853 - RNA, 19 nt, Human
cauagcccucacccugggg

SEQ ID NO: 1658854 - RNA, 12 nt, Human
cauagcccucac

SEQ ID NO: 1658855 - RNA, 21 nt, Human
cauaaugcgugcauaccacuu

SEQ ID NO: 1658856 - RNA, 15 nt, Human
cauacaauuccaaac

SEQ ID NO: 1658857 - RNA, 17 nt, Human
cauagauucccugagca

SEQ ID NO: 1658858 - RNA, 18 nt, Human
cauagauucccugagcag

SEQ ID NO: 1658859 - RNA, 23 nt, Human
ccaccgggcugggagcucugcag

SEQ ID NO: 1658860 - RNA, 19 nt, Human
ccaccgcagacaggaccag

SEQ ID NO: 1658861 - RNA, 18 nt, Human
ccaccgcagacaggacca

SEQ ID NO: 1658862 - RNA, 14 nt, Human
ccaccuuggcucaa

SEQ ID NO: 1658863 - RNA, 15 nt, Human
ccaccuuggcucaag

SEQ ID NO: 1658864 - RNA, 13 nt, Human
ccacccugcucuc

SEQ ID NO: 1658865 - RNA, 18 nt, Human
ccaccaucaccagacagg

SEQ ID NO: 1658866 - RNA, 20 nt, Human
ccaccaucaagccaccaaca

SEQ ID NO: 1658867 - RNA, 14 nt, Human
ccaccgcagacagg

SEQ ID NO: 1658868 - RNA, 17 nt, Human
ccaccgcagacaggacc

SEQ ID NO: 1658869 - RNA, 22 nt, Human
ccacacuucaggcucuucuccu

SEQ ID NO: 1658870 - RNA, 23 nt, Human
ccacagaaaagaaaguucaugcu

SEQ ID NO: 1658871 - RNA, 16 nt, Human
ccaccaucaagccacc

SEQ ID NO: 1658872 - RNA, 17 nt, Human
ccaccaucaagccacca

SEQ ID NO: 1658873 - RNA, 11 nt, Human
ccaacuuguaa

SEQ ID NO: 1658874 - RNA, 22 nt, Human
ccaaagugcugggauuacaggu

SEQ ID NO: 1658875 - RNA, 12 nt, Human
ccaaaugcagcu

SEQ ID NO: 1658876 - RNA, 15 nt, Human
ccaaaugcaauguga

SEQ ID NO: 1658877 - RNA, 12 nt, Human
ccaaauuaagag

SEQ ID NO: 1658878 - RNA, 19 nt, Human
ccaaagugcugggauuaca

SEQ ID NO: 1658879 - RNA, 22 nt, Human
ccaaagugcugggauuacaggc

SEQ ID NO: 1658880 - RNA, 23 nt, Human
ccaaugcacuuuguucuggcucu

SEQ ID NO: 1658881 - RNA, 20 nt, Human
ccaaugcacuuuguucuggc

SEQ ID NO: 1658882 - RNA, 22 nt, Human
ccaaugcacuuuguucuggcuc

SEQ ID NO: 1658883 - RNA, 20 nt, Human
ccaauguucucucuucucca

SEQ ID NO: 1658884 - RNA, 13 nt, Human
ccaauuaaggauu

SEQ ID NO: 1658885 - RNA, 18 nt, Human
ccaauuaaggauuuuaug

SEQ ID NO: 1658886 - RNA, 22 nt, Human
ccaauuaaggauuuuaugcuuu

SEQ ID NO: 1658887 - RNA, 21 nt, Human
cauucuccuaucaccugucuu

SEQ ID NO: 1658888 - RNA, 16 nt, Human
cauucuccuuguguua

SEQ ID NO: 1658889 - RNA, 17 nt, Human
cauucucacuccuaccu

SEQ ID NO: 1658890 - RNA, 16 nt, Human
cauucucacuccuacc

SEQ ID NO: 1658891 - RNA, 13 nt, Human
cauuaugaugugu

SEQ ID NO: 1658892 - RNA, 18 nt, Human
cauuaucuagauacugua

SEQ ID NO: 1658893 - RNA, 22 nt, Human
cauggcuggagcuagaauuuga

SEQ ID NO: 1658894 - RNA, 22 nt, Human
cauggcugccaaugggagcuca

SEQ ID NO: 1658895 - RNA, 15 nt, Human
cauguucucugagga

SEQ ID NO: 1658896 - RNA, 17 nt, Human
cauuaucuagauacugu

SEQ ID NO: 1658897 - RNA, 16 nt, Human
cauuaucuagauacug

SEQ ID NO: 1658898 - RNA, 12 nt, Human
cauuaucuagau

SEQ ID NO: 1658899 - RNA, 15 nt, Human
cauuaggauggcuag

SEQ ID NO: 1658900 - RNA, 18 nt, Human
cauugcugggcuugucug

SEQ ID NO: 1658901 - RNA, 14 nt, Human
cauugcggacagcc

SEQ ID NO: 1658902 - RNA, 15 nt, Human
cauugcggacagcca

SEQ ID NO: 1658903 - RNA, 17 nt, Human
cauugcggacagccacg

SEQ ID NO: 1658904 - RNA, 21 nt, Human
cauugcggacagccacggcca

SEQ ID NO: 1658905 - RNA, 18 nt, Human
cauuucauuugugccaga

SEQ ID NO: 1658906 - RNA, 16 nt, Human
cauuuauucugcucac

SEQ ID NO: 1658907 - RNA, 18 nt, Human
cauuuuugaauacaggca

SEQ ID NO: 1658908 - RNA, 20 nt, Human
cauuuuugaauacaggcaua

SEQ ID NO: 1658909 - RNA, 23 nt, Human
cauuuggugguuucagaaaugug

SEQ ID NO: 1658910 - RNA, 22 nt, Human
cauuuggugguuucagaaaugu

SEQ ID NO: 1658911 - RNA, 12 nt, Human
cauuuccaagca

SEQ ID NO: 1658912 - RNA, 16 nt, Human
ccaaaaaccaguauug

SEQ ID NO: 1658913 - RNA, 19 nt, Human
ccaaaaaccaguauuguac

SEQ ID NO: 1658914 - RNA, 20 nt, Human
ccaaaaaccaguauuguaca

SEQ ID NO: 1658915 - RNA, 17 nt, Human
ccaaaacucuccucugc

SEQ ID NO: 1658916 - RNA, 21 nt, Human
cacagacauacuaaccagcag

SEQ ID NO: 1658917 - RNA, 19 nt, Human
cacagacauacuaaccagc

SEQ ID NO: 1658918 - RNA, 11 nt, Human
cacagccucug

SEQ ID NO: 1658919 - RNA, 13 nt, Human
cacagacccugcc

SEQ ID NO: 1658920 - RNA, 23 nt, Human
cacagaaaauggaagacagcucu

SEQ ID NO: 1658921 - RNA, 19 nt, Human
cacagaaaauucuucucca

SEQ ID NO: 1658922 - RNA, 21 nt, Human
cacacaugagcaucaggccag

SEQ ID NO: 1658923 - RNA, 22 nt, Human
cacacaugagcaucaggccagg

SEQ ID NO: 1658924 - RNA, 18 nt, Human
cacagaaaauggaagaca

SEQ ID NO: 1658925 - RNA, 19 nt, Human
cacagaaaauggaagacag

SEQ ID NO: 1658926 - RNA, 20 nt, Human
cacagaaaauggaagacagc

SEQ ID NO: 1658927 - RNA, 22 nt, Human
cacagaaaauggaagacagcuc

SEQ ID NO: 1658928 - RNA, 18 nt, Human
cacacagugagucgagga

SEQ ID NO: 1658929 - RNA, 20 nt, Human
cacacaguauuacuucugcu

SEQ ID NO: 1658930 - RNA, 23 nt, Human
cacacaguauuacuucugcuaca

SEQ ID NO: 1658931 - RNA, 15 nt, Human
cacacauacacacac

SEQ ID NO: 1658932 - RNA, 21 nt, Human
cacacagugagucgaggacag

SEQ ID NO: 1658933 - RNA, 23 nt, Human
cacacagugagucgaggacaggg

SEQ ID NO: 1658934 - RNA, 17 nt, Human
cacacaugaaguccaag

SEQ ID NO: 1658935 - RNA, 20 nt, Human
cacacaugagcaucaggcca

SEQ ID NO: 1658936 - RNA, 22 nt, Human
cacacaugaaguccaagcauuu

SEQ ID NO: 1658937 - RNA, 20 nt, Human
cacaguauuacuucugcuac

SEQ ID NO: 1658938 - RNA, 21 nt, Human
cacaguauuacuucugcuaca

SEQ ID NO: 1658939 - RNA, 19 nt, Human
cacaggggaaaagaggagu

SEQ ID NO: 1658940 - RNA, 17 nt, Human
cacaggggaaaagagga

SEQ ID NO: 1658941 - RNA, 18 nt, Human
cacaggggaaaagaggag

SEQ ID NO: 1658942 - RNA, 23 nt, Human
cacaggcccuuccucuccacugc

SEQ ID NO: 1658943 - RNA, 17 nt, Human
cacagccucuuagaugc

SEQ ID NO: 1658944 - RNA, 21 nt, Human
cacagccucuuagaugcaguu

SEQ ID NO: 1658945 - RNA, 17 nt, Human
cacacagcucuguccug

SEQ ID NO: 1658946 - RNA, 20 nt, Human
cacacagcucuguccuggga

SEQ ID NO: 1658947 - RNA, 15 nt, Human
caaugcuguauuuua

SEQ ID NO: 1658948 - RNA, 20 nt, Human
caauggagacugucucaaga

SEQ ID NO: 1658949 - RNA, 16 nt, Human
caaugcuguauuuuaa

SEQ ID NO: 1658950 - RNA, 17 nt, Human
caaugcuguauuuuaaa

SEQ ID NO: 1658951 - RNA, 11 nt, Human
caauggcagcc

SEQ ID NO: 1658952 - RNA, 12 nt, Human
caauggcagccu

SEQ ID NO: 1658953 - RNA, 15 nt, Human
caauucuugccaaau

SEQ ID NO: 1658954 - RNA, 17 nt, Human
cacaagagcccaggccu

SEQ ID NO: 1658955 - RNA, 17 nt, Human
cacaagcuccaagcucc

SEQ ID NO: 1658956 - RNA, 23 nt, Human
cacaagcuccaagcucccaggca

SEQ ID NO: 1658957 - RNA, 17 nt, Human
cacaagcugcacccuca

SEQ ID NO: 1658958 - RNA, 23 nt, Human
cacaagcugcacccucaggcagg

SEQ ID NO: 1658959 - RNA, 16 nt, Human
cacaagagcccaggcc

SEQ ID NO: 1658960 - RNA, 13 nt, Human
cacaagcuccaag

SEQ ID NO: 1658961 - RNA, 14 nt, Human
cacaagcuccaagc

SEQ ID NO: 1658962 - RNA, 15 nt, Human
cacaagcuccaagcu

SEQ ID NO: 1658963 - RNA, 13 nt, Human
caauuuauuaugg

SEQ ID NO: 1658964 - RNA, 14 nt, Human
cacaagagcccagg

SEQ ID NO: 1658965 - RNA, 18 nt, Human
cacaagacugcacaucaa

SEQ ID NO: 1658966 - RNA, 19 nt, Human
caauaaagcagcguuucua

SEQ ID NO: 1658967 - RNA, 19 nt, Human
caagcucuaucaccaagga

SEQ ID NO: 1658968 - RNA, 13 nt, Human
caagcucugcucc

SEQ ID NO: 1658969 - RNA, 17 nt, Human
caagcuccaagcuccca

SEQ ID NO: 1658970 - RNA, 12 nt, Human
caagcuccaagc

SEQ ID NO: 1658971 - RNA, 20 nt, Human
caagcugcacccucaggcag

SEQ ID NO: 1658972 - RNA, 14 nt, Human
caagcucugcuccu

SEQ ID NO: 1658973 - RNA, 14 nt, Human
caagcugcacccuc

SEQ ID NO: 1658974 - RNA, 18 nt, Human
caagcugcacccucaggc

SEQ ID NO: 1658975 - RNA, 16 nt, Human
caaguaugaauaaaga

SEQ ID NO: 1658976 - RNA, 17 nt, Human
caaggccaaaggaagca

SEQ ID NO: 1658977 - RNA, 18 nt, Human
caaggccaaaggaagcac

SEQ ID NO: 1658978 - RNA, 15 nt, Human
caaggccaaaggaag

SEQ ID NO: 1658979 - RNA, 16 nt, Human
caaggccaaaggaagc

SEQ ID NO: 1658980 - RNA, 19 nt, Human
caaguaugaauaaagacac

SEQ ID NO: 1658981 - RNA, 21 nt, Human
caaguaugaauaaagacaccu

SEQ ID NO: 1658982 - RNA, 13 nt, Human
caagucaagugaa

SEQ ID NO: 1658983 - RNA, 17 nt, Human
caagucaagugaaaaag

SEQ ID NO: 1658984 - RNA, 14 nt, Human
caaguccaagcaua

SEQ ID NO: 1658985 - RNA, 14 nt, Human
caccugccccucaa

SEQ ID NO: 1658986 - RNA, 15 nt, Human
caccugccccucaac

SEQ ID NO: 1658987 - RNA, 16 nt, Human
caccugccccucaacu

SEQ ID NO: 1658988 - RNA, 17 nt, Human
cacccuggggagaaagu

SEQ ID NO: 1658989 - RNA, 14 nt, Human
caccucagccuccc

SEQ ID NO: 1658990 - RNA, 13 nt, Human
caccucagccucc

SEQ ID NO: 1658991 - RNA, 17 nt, Human
cacccugaaagcccuga

SEQ ID NO: 1658992 - RNA, 15 nt, Human
cacccuggggagaaa

SEQ ID NO: 1658993 - RNA, 16 nt, Human
cacccuggggagaaag

SEQ ID NO: 1658994 - RNA, 14 nt, Human
cacccucaggcagg

SEQ ID NO: 1658995 - RNA, 17 nt, Human
caccugccuguugggcc

SEQ ID NO: 1658996 - RNA, 19 nt, Human
caccugccuguugggccag

SEQ ID NO: 1658997 - RNA, 24 nt, Human
caccugccuguugggccaggagcc

SEQ ID NO: 1658998 - RNA, 14 nt, Human
caccuuggcugcag

SEQ ID NO: 1658999 - RNA, 15 nt, Human
caccuuggcucaagu

SEQ ID NO: 1659000 - RNA, 13 nt, Human
caccuuggcugca

SEQ ID NO: 1659001 - RNA, 12 nt, Human
caccccagcccc

SEQ ID NO: 1659002 - RNA, 11 nt, Human
caccccagccc

SEQ ID NO: 1659003 - RNA, 18 nt, Human
cacugggagaaaugaaaa

SEQ ID NO: 1659004 - RNA, 18 nt, Human
cacugcauccuccgccuc

SEQ ID NO: 1659005 - RNA, 14 nt, Human
cacugcauccuccg

SEQ ID NO: 1659006 - RNA, 16 nt, Human
cacugcauccuccgcc

SEQ ID NO: 1659007 - RNA, 16 nt, Human
cacugcauguuuguga

SEQ ID NO: 1659008 - RNA, 13 nt, Human
cacugcagccuca

SEQ ID NO: 1659009 - RNA, 15 nt, Human
cacugcacuccagcc

SEQ ID NO: 1659010 - RNA, 16 nt, Human
cacugcacuccagccu

SEQ ID NO: 1659011 - RNA, 18 nt, Human
cacugcacuccagccugg

SEQ ID NO: 1659012 - RNA, 19 nt, Human
cacugcacuccagccuggg

SEQ ID NO: 1659013 - RNA, 20 nt, Human
cacugcacuccagccugggu

SEQ ID NO: 1659014 - RNA, 12 nt, Human
cacugcagccuc

SEQ ID NO: 1659015 - RNA, 21 nt, Human
cacugcagaagacaguauggc

SEQ ID NO: 1659016 - RNA, 19 nt, Human
cacugcacuauagccuagg

SEQ ID NO: 1659017 - RNA, 22 nt, Human
cacuuguguuuugcaagccaga

SEQ ID NO: 1659018 - RNA, 23 nt, Human
cacuuaggaacguaaucgugucc

SEQ ID NO: 1659019 - RNA, 24 nt, Human
cacuuagaaauugcauuuccugac

SEQ ID NO: 1659020 - RNA, 16 nt, Human
cacuugucaauaaaau

SEQ ID NO: 1659021 - RNA, 19 nt, Human
cacuuguguuuugcaagcc

SEQ ID NO: 1659022 - RNA, 16 nt, Human
cacuuacacuuuaugc

SEQ ID NO: 1659023 - RNA, 18 nt, Human
cacuuacacuuuaugcac

SEQ ID NO: 1659024 - RNA, 23 nt, Human
cacugguggcccgacagccuggc

SEQ ID NO: 1659025 - RNA, 22 nt, Human
cacugguucuucuuggucucag

SEQ ID NO: 1659026 - RNA, 16 nt, Human
cacuccagccugggug

SEQ ID NO: 1659027 - RNA, 17 nt, Human
cacuccaauuaaggauu

SEQ ID NO: 1659028 - RNA, 18 nt, Human
cacuccaauuaaggauuu

SEQ ID NO: 1659029 - RNA, 21 nt, Human
cacuccaauuaaggauuuuau

SEQ ID NO: 1659030 - RNA, 11 nt, Human
cacuccagcug

SEQ ID NO: 1659031 - RNA, 12 nt, Human
cacuccagcugg

SEQ ID NO: 1659032 - RNA, 15 nt, Human
cacuccagcugggau

SEQ ID NO: 1659033 - RNA, 16 nt, Human
cacuccagugagacag

SEQ ID NO: 1659034 - RNA, 13 nt, Human
cacuccaauuaag

SEQ ID NO: 1659035 - RNA, 15 nt, Human
cacuccaauuaagga

SEQ ID NO: 1659036 - RNA, 14 nt, Human
cacuaggcuucugg

SEQ ID NO: 1659037 - RNA, 20 nt, Human
cacuagggcagggacaggau

SEQ ID NO: 1659038 - RNA, 21 nt, Human
cacuagggcagggacaggaua

SEQ ID NO: 1659039 - RNA, 12 nt, Human
cacuccccugcu

SEQ ID NO: 1659040 - RNA, 13 nt, Human
cacuccccugcug

SEQ ID NO: 1659041 - RNA, 14 nt, Human
cacuccccugcugg

SEQ ID NO: 1659042 - RNA, 15 nt, Human
cacuccccugcuggg

SEQ ID NO: 1659043 - RNA, 16 nt, Human
auuugccaauaauaau

SEQ ID NO: 1659044 - RNA, 15 nt, Human
auuugccaauaauaa

SEQ ID NO: 1659045 - RNA, 23 nt, Human
auuuguuugaacugauaaagaug

SEQ ID NO: 1659046 - RNA, 22 nt, Human
auuuguuugaacugauaaagau

SEQ ID NO: 1659047 - RNA, 14 nt, Human
auuuuaugauccag

SEQ ID NO: 1659048 - RNA, 15 nt, Human
auuuuaugauccagc

SEQ ID NO: 1659049 - RNA, 16 nt, Human
auuuuaugauccagca

SEQ ID NO: 1659050 - RNA, 19 nt, Human
auuuuauagcuacuaauuu

SEQ ID NO: 1659051 - RNA, 12 nt, Human
auuuguuugcau

SEQ ID NO: 1659052 - RNA, 14 nt, Human
auuugugccagaau

SEQ ID NO: 1659053 - RNA, 13 nt, Human
auuuggaaaucuu

SEQ ID NO: 1659054 - RNA, 20 nt, Human
auuugugauacaaugcugug

SEQ ID NO: 1659055 - RNA, 11 nt, Human
auuuggaaauc

SEQ ID NO: 1659056 - RNA, 12 nt, Human
auuuggaaaucu

SEQ ID NO: 1659057 - RNA, 17 nt, Human
auuugugauacaaugcu

SEQ ID NO: 1659058 - RNA, 13 nt, Human
auuuggaaaauaa

SEQ ID NO: 1659059 - RNA, 12 nt, Human
auuuggaaaaua

SEQ ID NO: 1659060 - RNA, 13 nt, Human
auuugcuccuuuc

SEQ ID NO: 1659061 - RNA, 14 nt, Human
auuugcucauggaa

SEQ ID NO: 1659062 - RNA, 17 nt, Human
auuugcucauggaauug

SEQ ID NO: 1659063 - RNA, 12 nt, Human
auuuuaugcuuu

SEQ ID NO: 1659064 - RNA, 17 nt, Human
auuuuaugcuuuaaaca

SEQ ID NO: 1659065 - RNA, 20 nt, Human
caaagauauuuugcuuugug

SEQ ID NO: 1659066 - RNA, 21 nt, Human
caaaccaucauugaaaucuuu

SEQ ID NO: 1659067 - RNA, 19 nt, Human
caaaccaucauugaaaucu

SEQ ID NO: 1659068 - RNA, 15 nt, Human
caaacagucucagga

SEQ ID NO: 1659069 - RNA, 18 nt, Human
caaaagaugcuucucacu

SEQ ID NO: 1659070 - RNA, 15 nt, Human
caaaaggcagaagca

SEQ ID NO: 1659071 - RNA, 16 nt, Human
caaaagaugcuucuca

SEQ ID NO: 1659072 - RNA, 20 nt, Human
caaaaaaaaaaaaaaauuag

SEQ ID NO: 1659073 - RNA, 14 nt, Human
caacacuaacauga

SEQ ID NO: 1659074 - RNA, 22 nt, Human
caacacucacauuuauucugcu

SEQ ID NO: 1659075 - RNA, 20 nt, Human
caacaccucugcacaagcug

SEQ ID NO: 1659076 - RNA, 23 nt, Human
caacacgagcaggcuacugucag

SEQ ID NO: 1659077 - RNA, 21 nt, Human
caaauggaaaugggcagagca

SEQ ID NO: 1659078 - RNA, 22 nt, Human
caaauggaaaugggcagagcag

SEQ ID NO: 1659079 - RNA, 20 nt, Human
caaauggaaaugggcagagc

SEQ ID NO: 1659080 - RNA, 15 nt, Human
caaauccuugaagau

SEQ ID NO: 1659081 - RNA, 21 nt, Human
caaagucucuggaauuugaaa

SEQ ID NO: 1659082 - RNA, 14 nt, Human
caaaguagaagucu

SEQ ID NO: 1659083 - RNA, 21 nt, Human
caaaguagaagucuuagaugu

SEQ ID NO: 1659084 - RNA, 13 nt, Human
caaagugcuggga

SEQ ID NO: 1659085 - RNA, 22 nt, Human
caaaguacacuguuucaaacuu

SEQ ID NO: 1659086 - RNA, 15 nt, Human
caaagcagugcaugc

SEQ ID NO: 1659087 - RNA, 17 nt, Human
caaagcagugcaugcug

SEQ ID NO: 1659088 - RNA, 23 nt, Human
caaagauauuuugcuuugugauu

SEQ ID NO: 1659089 - RNA, 22 nt, Human
caaagauauuuugcuuugugau

SEQ ID NO: 1659090 - RNA, 20 nt, Human
caaagcacugacuucuaagu

SEQ ID NO: 1659091 - RNA, 22 nt, Human
caaagcacugacuucuaaguaa

SEQ ID NO: 1659092 - RNA, 23 nt, Human
auuagauuucucauuugccaaua

SEQ ID NO: 1659093 - RNA, 17 nt, Human
auuagcaguuugcuuug

SEQ ID NO: 1659094 - RNA, 12 nt, Human
auuacaguauaa

SEQ ID NO: 1659095 - RNA, 14 nt, Human
auuacaguauaauu

SEQ ID NO: 1659096 - RNA, 15 nt, Human
auuacaguauaauua

SEQ ID NO: 1659097 - RNA, 16 nt, Human
auuacaguauaauuaa

SEQ ID NO: 1659098 - RNA, 19 nt, Human
auuacaguggggaaugaag

SEQ ID NO: 1659099 - RNA, 17 nt, Human
auuacaggaaguacugg

SEQ ID NO: 1659100 - RNA, 22 nt, Human
auuacaagcgugagccacugca

SEQ ID NO: 1659101 - RNA, 23 nt, Human
auguuugggagacugcugaguca

SEQ ID NO: 1659102 - RNA, 18 nt, Human
auguuugccucugccucu

SEQ ID NO: 1659103 - RNA, 16 nt, Human
auucaaauguauuaca

SEQ ID NO: 1659104 - RNA, 18 nt, Human
auucaaugccccugaauu

SEQ ID NO: 1659105 - RNA, 20 nt, Human
auucaaugccccugaauuua

SEQ ID NO: 1659106 - RNA, 19 nt, Human
auucacaagacccaaaagg

SEQ ID NO: 1659107 - RNA, 18 nt, Human
auucaaaguugccuaaau

SEQ ID NO: 1659108 - RNA, 20 nt, Human
auucaaaguugccuaaaucc

SEQ ID NO: 1659109 - RNA, 21 nt, Human
auucaaaguugccuaaaucca

SEQ ID NO: 1659110 - RNA, 22 nt, Human
auucaaaguugccuaaauccau

SEQ ID NO: 1659111 - RNA, 17 nt, Human
auucaaaguugccuaaa

SEQ ID NO: 1659112 - RNA, 23 nt, Human
auuaugcaugaaguaauaugcac

SEQ ID NO: 1659113 - RNA, 18 nt, Human
auuaugaauuacauuugu

SEQ ID NO: 1659114 - RNA, 14 nt, Human
auuaugaaacuugu

SEQ ID NO: 1659115 - RNA, 15 nt, Human
auuaugaaacuugug

SEQ ID NO: 1659116 - RNA, 21 nt, Human
auuaggugugacugaauuucu

SEQ ID NO: 1659117 - RNA, 18 nt, Human
auuaugaaacuuguguaa

SEQ ID NO: 1659118 - RNA, 20 nt, Human
auuaugaaacuuguguaaau

SEQ ID NO: 1659119 - RNA, 21 nt, Human
auuaugaaacuuguguaaaua

SEQ ID NO: 1659120 - RNA, 18 nt, Human
auuaugaaacuuuuggaa

SEQ ID NO: 1659121 - RNA, 14 nt, Human
auuaugaauuacau

SEQ ID NO: 1659122 - RNA, 17 nt, Human
auuaugaauuacauuug

SEQ ID NO: 1659123 - RNA, 18 nt, Human
auuaggugugacugaauu

SEQ ID NO: 1659124 - RNA, 16 nt, Human
auuaggugugacugaa

SEQ ID NO: 1659125 - RNA, 16 nt, Human
auuagggagagaagau

SEQ ID NO: 1659126 - RNA, 14 nt, Human
auucauaaugacuu

SEQ ID NO: 1659127 - RNA, 15 nt, Human
auucauaaugacuua

SEQ ID NO: 1659128 - RNA, 21 nt, Human
auucauaauuauuauuuggcc

SEQ ID NO: 1659129 - RNA, 19 nt, Human
auucauaaugacuuaagca

SEQ ID NO: 1659130 - RNA, 19 nt, Human
auucauagcagcuuauuca

SEQ ID NO: 1659131 - RNA, 22 nt, Human
auucauagcagcuuauucacaa

SEQ ID NO: 1659132 - RNA, 12 nt, Human
auugcuccuuga

SEQ ID NO: 1659133 - RNA, 15 nt, Human
auugcugauggugca

SEQ ID NO: 1659134 - RNA, 16 nt, Human
auugcugauggugcaa

SEQ ID NO: 1659135 - RNA, 18 nt, Human
auugcugauggugcaaug

SEQ ID NO: 1659136 - RNA, 19 nt, Human
auugcugauggugcaauga

SEQ ID NO: 1659137 - RNA, 23 nt, Human
auugcugauggugcaaugaccuu

SEQ ID NO: 1659138 - RNA, 12 nt, Human
auugcugcuuga

SEQ ID NO: 1659139 - RNA, 14 nt, Human
auugcuugagcuca

SEQ ID NO: 1659140 - RNA, 16 nt, Human
auuguuagucucuuga

SEQ ID NO: 1659141 - RNA, 14 nt, Human
auuguaauuauauc

SEQ ID NO: 1659142 - RNA, 21 nt, Human
auugugucucuugguccugcu

SEQ ID NO: 1659143 - RNA, 23 nt, Human
auugugucucuugguccugcugc

SEQ ID NO: 1659144 - RNA, 18 nt, Human
auugcuugagcucaggag

SEQ ID NO: 1659145 - RNA, 14 nt, Human
auuguaaaauggug

SEQ ID NO: 1659146 - RNA, 13 nt, Human
auuguaauuauau

SEQ ID NO: 1659147 - RNA, 20 nt, Human
auugcuacuguccuacccac

SEQ ID NO: 1659148 - RNA, 22 nt, Human
auugcuacuguccuacccaccc

SEQ ID NO: 1659149 - RNA, 17 nt, Human
auugauaugcuuauaca

SEQ ID NO: 1659150 - RNA, 15 nt, Human
auugcuacuguccua

SEQ ID NO: 1659151 - RNA, 21 nt, Human
auugauaagaaccuuuugagu

SEQ ID NO: 1659152 - RNA, 13 nt, Human
auucuuuccugag

SEQ ID NO: 1659153 - RNA, 11 nt, Human
auucuucugcu

SEQ ID NO: 1659154 - RNA, 12 nt, Human
auucuucugcuu

SEQ ID NO: 1659155 - RNA, 11 nt, Human
auucuuuccug

SEQ ID NO: 1659156 - RNA, 14 nt, Human
auucuucugcuuca

SEQ ID NO: 1659157 - RNA, 13 nt, Human
uuguacaaaguau

SEQ ID NO: 1659158 - RNA, 14 nt, Human
uuguacaaaguauu

SEQ ID NO: 1659159 - RNA, 13 nt, Human
uugguugcuuuaa

SEQ ID NO: 1659160 - RNA, 16 nt, Human
uugguugcuuuaauau

SEQ ID NO: 1659161 - RNA, 15 nt, Human
uuguacaaaguauua

SEQ ID NO: 1659162 - RNA, 17 nt, Human
uuguacaaaguauuaag

SEQ ID NO: 1659163 - RNA, 20 nt, Human
uuguacaaaguauuaagcau

SEQ ID NO: 1659164 - RNA, 21 nt, Human
uuguacaaaguauuaagcaua

SEQ ID NO: 1659165 - RNA, 22 nt, Human
uuguacaaaguauuaagcauau

SEQ ID NO: 1659166 - RNA, 16 nt, Human
uuguauaaaauaauuu

SEQ ID NO: 1659167 - RNA, 15 nt, Human
uuguauaaaauaauu

SEQ ID NO: 1659168 - RNA, 17 nt, Human
uuguauaaaauaauuuu

SEQ ID NO: 1659169 - RNA, 23 nt, Human
uuguaguguuggagaagaacuga

SEQ ID NO: 1659170 - RNA, 22 nt, Human
augacacaugcaaggucauuuu

SEQ ID NO: 1659171 - RNA, 14 nt, Human
augacacaugcaag

SEQ ID NO: 1659172 - RNA, 16 nt, Human
uuguaucacaaaucuu

SEQ ID NO: 1659173 - RNA, 14 nt, Human
augacuuacuguac

SEQ ID NO: 1659174 - RNA, 22 nt, Human
augacuuaagcacacuugacau

SEQ ID NO: 1659175 - RNA, 18 nt, Human
augacacgaauauugcug

SEQ ID NO: 1659176 - RNA, 17 nt, Human
augacuuacuguacaug

SEQ ID NO: 1659177 - RNA, 16 nt, Human
augacuuacuguacau

SEQ ID NO: 1659178 - RNA, 16 nt, Human
augacuucauuaauaa

SEQ ID NO: 1659179 - RNA, 11 nt, Human
augacuuugga

SEQ ID NO: 1659180 - RNA, 12 nt, Human
augacuuuggac

SEQ ID NO: 1659181 - RNA, 23 nt, Human
augagaaaucuaaaaaacgaaaa

SEQ ID NO: 1659182 - RNA, 15 nt, Human
augagaaaucuaaaa

SEQ ID NO: 1659183 - RNA, 18 nt, Human
augagaaaucuaaaaaac

SEQ ID NO: 1659184 - RNA, 21 nt, Human
augagaaagguugaagcacca

SEQ ID NO: 1659185 - RNA, 22 nt, Human
augagaaagguugaagcaccaa

SEQ ID NO: 1659186 - RNA, 13 nt, Human
augagagacacac

SEQ ID NO: 1659187 - RNA, 14 nt, Human
augagagacacacu

SEQ ID NO: 1659188 - RNA, 17 nt, Human
augagagacacacugaa

SEQ ID NO: 1659189 - RNA, 19 nt, Human
augagagacacacugaaga

SEQ ID NO: 1659190 - RNA, 20 nt, Human
augaaugucagugugacuga

SEQ ID NO: 1659191 - RNA, 16 nt, Human
augaagauacugaaau

SEQ ID NO: 1659192 - RNA, 17 nt, Human
augaagauacugaaaua

SEQ ID NO: 1659193 - RNA, 18 nt, Human
augaagauguagaggaga

SEQ ID NO: 1659194 - RNA, 13 nt, Human
augaaugaauggc

SEQ ID NO: 1659195 - RNA, 15 nt, Human
augaagauacugaaa

SEQ ID NO: 1659196 - RNA, 13 nt, Human
augaaauauuaug

SEQ ID NO: 1659197 - RNA, 17 nt, Human
augaaauauuauguuaa

SEQ ID NO: 1659198 - RNA, 15 nt, Human
augaaagggcccaga

SEQ ID NO: 1659199 - RNA, 18 nt, Human
augaaauauuauguuaaa

SEQ ID NO: 1659200 - RNA, 15 nt, Human
uuggggauucuuaaa

SEQ ID NO: 1659201 - RNA, 22 nt, Human
uuggggggcugaggugggagga

SEQ ID NO: 1659202 - RNA, 18 nt, Human
uugggccccagaggcugg

SEQ ID NO: 1659203 - RNA, 13 nt, Human
uuggggauucuua

SEQ ID NO: 1659204 - RNA, 14 nt, Human
uuggggauauuuuu

SEQ ID NO: 1659205 - RNA, 15 nt, Human
augaauuaaguuuuu

SEQ ID NO: 1659206 - RNA, 18 nt, Human
uuggcuagagguucaaag

SEQ ID NO: 1659207 - RNA, 23 nt, Human
uuggcgcugccccuggcagcccc

SEQ ID NO: 1659208 - RNA, 15 nt, Human
uuggauaauaaggaa

SEQ ID NO: 1659209 - RNA, 19 nt, Human
uuggauaauaaggaaaagu

SEQ ID NO: 1659210 - RNA, 21 nt, Human
uuggauaauaaggaaaaguuu

SEQ ID NO: 1659211 - RNA, 16 nt, Human
aucuuuaauuuuacau

SEQ ID NO: 1659212 - RNA, 21 nt, Human
aucuuuaauuuuacauuuccu

SEQ ID NO: 1659213 - RNA, 22 nt, Human
aucuuuaauuuuacauuuccua

SEQ ID NO: 1659214 - RNA, 13 nt, Human
uuggcugcaggga

SEQ ID NO: 1659215 - RNA, 13 nt, Human
aucuuuuuauuca

SEQ ID NO: 1659216 - RNA, 13 nt, Human
aucuuuuucuaac

SEQ ID NO: 1659217 - RNA, 12 nt, Human
augaaagauuca

SEQ ID NO: 1659218 - RNA, 15 nt, Human
augaaagcagggacu

SEQ ID NO: 1659219 - RNA, 18 nt, Human
aucuugaauuguaaggaa

SEQ ID NO: 1659220 - RNA, 19 nt, Human
aucuugcucugcugacaga

SEQ ID NO: 1659221 - RNA, 13 nt, Human
aucugugaacuug

SEQ ID NO: 1659222 - RNA, 17 nt, Human
aucugugaacuugaaau

SEQ ID NO: 1659223 - RNA, 18 nt, Human
aucugugaacuugaaauu

SEQ ID NO: 1659224 - RNA, 19 nt, Human
aucugugaacuugaaauuu

SEQ ID NO: 1659225 - RNA, 14 nt, Human
aucugccuaaggac

SEQ ID NO: 1659226 - RNA, 15 nt, Human
aucugccuaaggacu

SEQ ID NO: 1659227 - RNA, 16 nt, Human
aucugccuaaggacuu

SEQ ID NO: 1659228 - RNA, 17 nt, Human
aucugccuaaggacuuc

SEQ ID NO: 1659229 - RNA, 13 nt, Human
aucugccuaagga

SEQ ID NO: 1659230 - RNA, 18 nt, Human
aucugccuaaggacuucu

SEQ ID NO: 1659231 - RNA, 19 nt, Human
aucugccuaaggacuucuu

SEQ ID NO: 1659232 - RNA, 20 nt, Human
aucugccuaaggacuucuuu

SEQ ID NO: 1659233 - RNA, 19 nt, Human
aucuggguucacugcaacc

SEQ ID NO: 1659234 - RNA, 15 nt, Human
aucugaggaauucug

SEQ ID NO: 1659235 - RNA, 16 nt, Human
aucugaggaauucugu

SEQ ID NO: 1659236 - RNA, 17 nt, Human
aucugaggaauucugua

SEQ ID NO: 1659237 - RNA, 18 nt, Human
aucugaggaauucuguau

SEQ ID NO: 1659238 - RNA, 20 nt, Human
aucugaggaauucuguauag

SEQ ID NO: 1659239 - RNA, 21 nt, Human
aucugaggaauucuguauaga

SEQ ID NO: 1659240 - RNA, 18 nt, Human
aucugaugcaagcaagaa

SEQ ID NO: 1659241 - RNA, 13 nt, Human
uugccuaaaucca

SEQ ID NO: 1659242 - RNA, 14 nt, Human
uugccuaaauccau

SEQ ID NO: 1659243 - RNA, 15 nt, Human
uugccuaaauccauu

SEQ ID NO: 1659244 - RNA, 22 nt, Human
uugccuaaauccauuuggaaau

SEQ ID NO: 1659245 - RNA, 14 nt, Human
uugccguuauuaaa

SEQ ID NO: 1659246 - RNA, 19 nt, Human
uugccgucuaccugagggg

SEQ ID NO: 1659247 - RNA, 15 nt, Human
uugccgucuaccuga

SEQ ID NO: 1659248 - RNA, 18 nt, Human
uugccgucuaccugaggg

SEQ ID NO: 1659249 - RNA, 13 nt, Human
uugccgucuaccu

SEQ ID NO: 1659250 - RNA, 13 nt, Human
uugcccuguuaaa

SEQ ID NO: 1659251 - RNA, 14 nt, Human
uugcaucugaaaau

SEQ ID NO: 1659252 - RNA, 14 nt, Human
uugcaccacugcac

SEQ ID NO: 1659253 - RNA, 12 nt, Human
uugcaugaggcu

SEQ ID NO: 1659254 - RNA, 15 nt, Human
uugauucagacagcu

SEQ ID NO: 1659255 - RNA, 16 nt, Human
uugauucagacagcug

SEQ ID NO: 1659256 - RNA, 19 nt, Human
aucucuucuggguuccuuc

SEQ ID NO: 1659257 - RNA, 12 nt, Human
uugaugccuggc

SEQ ID NO: 1659258 - RNA, 15 nt, Human
uugaugggauuuggu

SEQ ID NO: 1659259 - RNA, 18 nt, Human
uugauggugguauguuuu

SEQ ID NO: 1659260 - RNA, 23 nt, Human
uugauggugaugaaauguaaaua

SEQ ID NO: 1659261 - RNA, 19 nt, Human
uugauggugguauguuuuc

SEQ ID NO: 1659262 - RNA, 14 nt, Human
uugauucagacagc

SEQ ID NO: 1659263 - RNA, 11 nt, Human
aucucagccca

SEQ ID NO: 1659264 - RNA, 20 nt, Human
aucucaccuccugcugggca

SEQ ID NO: 1659265 - RNA, 21 nt, Human
aucucaccuccugcugggcag

SEQ ID NO: 1659266 - RNA, 14 nt, Human
aucucagggccugg

SEQ ID NO: 1659267 - RNA, 15 nt, Human
auccuaguuccacca

SEQ ID NO: 1659268 - RNA, 19 nt, Human
auccuaguuccaccaucaa

SEQ ID NO: 1659269 - RNA, 17 nt, Human
aucucaccuccugcugg

SEQ ID NO: 1659270 - RNA, 16 nt, Human
aucucacacaugagca

SEQ ID NO: 1659271 - RNA, 15 nt, Human
aucucacacaugagc

SEQ ID NO: 1659272 - RNA, 13 nt, Human
aucucaauauuuc

SEQ ID NO: 1659273 - RNA, 16 nt, Human
aucuccccaucauugg

SEQ ID NO: 1659274 - RNA, 14 nt, Human
aucucccccagccc

SEQ ID NO: 1659275 - RNA, 12 nt, Human
aucucccccagc

SEQ ID NO: 1659276 - RNA, 13 nt, Human
aucucccccagcc

SEQ ID NO: 1659277 - RNA, 13 nt, Human
aucuccaaaauaa

SEQ ID NO: 1659278 - RNA, 15 nt, Human
aucuccacuccagau

SEQ ID NO: 1659279 - RNA, 23 nt, Human
aucucauuuccaagcaaguauua

SEQ ID NO: 1659280 - RNA, 21 nt, Human
aucucauuuccaagcaaguau

SEQ ID NO: 1659281 - RNA, 14 nt, Human
uuuagucuugucuc

SEQ ID NO: 1659282 - RNA, 16 nt, Human
uuuaguaucuuuuuau

SEQ ID NO: 1659283 - RNA, 22 nt, Human
uuuagcuggaaaaguauguuag

SEQ ID NO: 1659284 - RNA, 20 nt, Human
uuuagcuggaaaaguauguu

SEQ ID NO: 1659285 - RNA, 22 nt, Human
uuuauuacaguauaauuaacau

SEQ ID NO: 1659286 - RNA, 24 nt, Human
uuuauggcuuuugugcauuaucua

SEQ ID NO: 1659287 - RNA, 13 nt, Human
uuuauauaagcuu

SEQ ID NO: 1659288 - RNA, 20 nt, Human
uuuauggcuuuugugcauua

SEQ ID NO: 1659289 - RNA, 11 nt, Human
auggaacacuc

SEQ ID NO: 1659290 - RNA, 14 nt, Human
auggaacacucuga

SEQ ID NO: 1659291 - RNA, 15 nt, Human
auggaacacucugag

SEQ ID NO: 1659292 - RNA, 16 nt, Human
auggaacacucugaga

SEQ ID NO: 1659293 - RNA, 15 nt, Human
auggaagacagcucu

SEQ ID NO: 1659294 - RNA, 19 nt, Human
augcugucccuuacgugag

SEQ ID NO: 1659295 - RNA, 23 nt, Human
augcugucccuuacgugaguccu

SEQ ID NO: 1659296 - RNA, 22 nt, Human
augcugucuacacuaagagaga

SEQ ID NO: 1659297 - RNA, 15 nt, Human
augcucugcauguua

SEQ ID NO: 1659298 - RNA, 21 nt, Human
augcuggcauagagcagcacu

SEQ ID NO: 1659299 - RNA, 22 nt, Human
augcuguaacuuucugaaauaa

SEQ ID NO: 1659300 - RNA, 16 nt, Human
uuuauuacuguaagaa

SEQ ID NO: 1659301 - RNA, 16 nt, Human
augcuagaacucccuu

SEQ ID NO: 1659302 - RNA, 19 nt, Human
augcuagaacucccuuuca

SEQ ID NO: 1659303 - RNA, 23 nt, Human
uuuauuacaguauaauuaacaug

SEQ ID NO: 1659304 - RNA, 15 nt, Human
augcuagaacucccu

SEQ ID NO: 1659305 - RNA, 19 nt, Human
auggcaaggacugcaggga

SEQ ID NO: 1659306 - RNA, 22 nt, Human
auggcacaaucucggcucacug

SEQ ID NO: 1659307 - RNA, 23 nt, Human
auggcacaucagcacgauuucug

SEQ ID NO: 1659308 - RNA, 17 nt, Human
auggcacaucagcacga

SEQ ID NO: 1659309 - RNA, 19 nt, Human
auggacuaacuugucuuug

SEQ ID NO: 1659310 - RNA, 19 nt, Human
auggacguguuaugacucc

SEQ ID NO: 1659311 - RNA, 20 nt, Human
auggacguguuaugacucca

SEQ ID NO: 1659312 - RNA, 18 nt, Human
auggauuuccagccaaag

SEQ ID NO: 1659313 - RNA, 23 nt, Human
auggacguguuaugacuccagaa

SEQ ID NO: 1659314 - RNA, 22 nt, Human
auggccagguggccacuccaga

SEQ ID NO: 1659315 - RNA, 16 nt, Human
auggccagguggccac

SEQ ID NO: 1659316 - RNA, 21 nt, Human
auggccgggcgcgguggcuca

SEQ ID NO: 1659317 - RNA, 20 nt, Human
auggccuuugcuugaaagaa

SEQ ID NO: 1659318 - RNA, 20 nt, Human
auggcuaguaucaaaagaaa

SEQ ID NO: 1659319 - RNA, 19 nt, Human
auggacaugaucuucuuua

SEQ ID NO: 1659320 - RNA, 14 nt, Human
auggacaugaucuu

SEQ ID NO: 1659321 - RNA, 20 nt, Human
uuucacugcuggcugccuua

SEQ ID NO: 1659322 - RNA, 22 nt, Human
uuucacugcuggcugccuuaga

SEQ ID NO: 1659323 - RNA, 17 nt, Human
uuucacugcuggcugcc

SEQ ID NO: 1659324 - RNA, 18 nt, Human
uuucacugcuggcugccu

SEQ ID NO: 1659325 - RNA, 14 nt, Human
uuucacugcuggcu

SEQ ID NO: 1659326 - RNA, 16 nt, Human
auggaauacucuuaua

SEQ ID NO: 1659327 - RNA, 16 nt, Human
auggaagacagcucuu

SEQ ID NO: 1659328 - RNA, 17 nt, Human
auggaauacucuuauau

SEQ ID NO: 1659329 - RNA, 13 nt, Human
uuucauauuuuag

SEQ ID NO: 1659330 - RNA, 21 nt, Human
uuucauauuuuagcuacuaua

SEQ ID NO: 1659331 - RNA, 18 nt, Human
augcaguucugaagaaga

SEQ ID NO: 1659332 - RNA, 19 nt, Human
augcaguucugaagaagau

SEQ ID NO: 1659333 - RNA, 14 nt, Human
augccaaguuguuu

SEQ ID NO: 1659334 - RNA, 16 nt, Human
augccaaguuguuuga

SEQ ID NO: 1659335 - RNA, 11 nt, Human
augcccagccc

SEQ ID NO: 1659336 - RNA, 15 nt, Human
augccacuaaauuga

SEQ ID NO: 1659337 - RNA, 17 nt, Human
augccacuaaauugaca

SEQ ID NO: 1659338 - RNA, 23 nt, Human
augccaaguuguuugagaaauua

SEQ ID NO: 1659339 - RNA, 17 nt, Human
augcagccucacagucc

SEQ ID NO: 1659340 - RNA, 14 nt, Human
augcagccucacag

SEQ ID NO: 1659341 - RNA, 15 nt, Human
augcagccucacagu

SEQ ID NO: 1659342 - RNA, 14 nt, Human
uuuaauuuuggaau

SEQ ID NO: 1659343 - RNA, 15 nt, Human
uuuaauuuuggaauu

SEQ ID NO: 1659344 - RNA, 17 nt, Human
uuuaauuuuggaauuuu

SEQ ID NO: 1659345 - RNA, 19 nt, Human
uuuaauuuuuuugagacag

SEQ ID NO: 1659346 - RNA, 13 nt, Human
augcagccucaca

SEQ ID NO: 1659347 - RNA, 15 nt, Human
augcaguucugaaga

SEQ ID NO: 1659348 - RNA, 17 nt, Human
augcaguucugaagaag

SEQ ID NO: 1659349 - RNA, 12 nt, Human
uuuaauuuuaca

SEQ ID NO: 1659350 - RNA, 16 nt, Human
uuuaagugcugcauuu

SEQ ID NO: 1659351 - RNA, 15 nt, Human
uuuaagugcugcauu

SEQ ID NO: 1659352 - RNA, 19 nt, Human
uuuaagugcugcauuuaaa

SEQ ID NO: 1659353 - RNA, 17 nt, Human
uuuaagugcugcauuua

SEQ ID NO: 1659354 - RNA, 16 nt, Human
augcacuuuguucugg

SEQ ID NO: 1659355 - RNA, 15 nt, Human
augcacuuuguucug

SEQ ID NO: 1659356 - RNA, 13 nt, Human
uuguuuucagugu

SEQ ID NO: 1659357 - RNA, 16 nt, Human
uuguuuucaguguaca

SEQ ID NO: 1659358 - RNA, 14 nt, Human
uuuaaauguuuuuu

SEQ ID NO: 1659359 - RNA, 15 nt, Human
uuguuuuacugucuu

SEQ ID NO: 1659360 - RNA, 14 nt, Human
uuguuuucauuauc

SEQ ID NO: 1659361 - RNA, 15 nt, Human
augcaaagcacugac

SEQ ID NO: 1659362 - RNA, 12 nt, Human
augauuucuaug

SEQ ID NO: 1659363 - RNA, 13 nt, Human
augauuucuaugc

SEQ ID NO: 1659364 - RNA, 16 nt, Human
augauuucuaugcuga

SEQ ID NO: 1659365 - RNA, 19 nt, Human
augauuucagcucacugca

SEQ ID NO: 1659366 - RNA, 13 nt, Human
augcaccagcccu

SEQ ID NO: 1659367 - RNA, 14 nt, Human
augcaccagcccuu

SEQ ID NO: 1659368 - RNA, 12 nt, Human
augcacuuuguu

SEQ ID NO: 1659369 - RNA, 21 nt, Human
augauucaaaugucuauaaac

SEQ ID NO: 1659370 - RNA, 21 nt, Human
augauucaacagguuuuccug

SEQ ID NO: 1659371 - RNA, 17 nt, Human
augauuucagcucacug

SEQ ID NO: 1659372 - RNA, 12 nt, Human
augauucccagc

SEQ ID NO: 1659373 - RNA, 15 nt, Human
uuguugucugcaacu

SEQ ID NO: 1659374 - RNA, 19 nt, Human
augauuaaccacuucagcu

SEQ ID NO: 1659375 - RNA, 20 nt, Human
augauuaaccacuucagcug

SEQ ID NO: 1659376 - RNA, 21 nt, Human
augauuaaccacuucagcuga

SEQ ID NO: 1659377 - RNA, 22 nt, Human
augauuaugaauuacauuugua

SEQ ID NO: 1659378 - RNA, 18 nt, Human
uugugauacaaugcugug

SEQ ID NO: 1659379 - RNA, 19 nt, Human
uugugauacaaugcugugc

SEQ ID NO: 1659380 - RNA, 21 nt, Human
uugugaggaagccgcuggggc

SEQ ID NO: 1659381 - RNA, 20 nt, Human
augagagacacacugaagaa

SEQ ID NO: 1659382 - RNA, 21 nt, Human
augagagacacacugaagaag

SEQ ID NO: 1659383 - RNA, 23 nt, Human
augagagacacacugaagaagca

SEQ ID NO: 1659384 - RNA, 13 nt, Human
uugugguuaaucu

SEQ ID NO: 1659385 - RNA, 19 nt, Human
uuguguaaauacaauuuug

SEQ ID NO: 1659386 - RNA, 23 nt, Human
uugugugaaagguacuucaaauc

SEQ ID NO: 1659387 - RNA, 20 nt, Human
uuguucuggcucuuccaggc

SEQ ID NO: 1659388 - RNA, 22 nt, Human
uuguucuggcucuuccaggcug

SEQ ID NO: 1659389 - RNA, 17 nt, Human
uuguguguuuauuguca

SEQ ID NO: 1659390 - RNA, 19 nt, Human
uuguucuggcucuuccagg

SEQ ID NO: 1659391 - RNA, 15 nt, Human
auauuuuacauaaau

SEQ ID NO: 1659392 - RNA, 16 nt, Human
auauuuuacauaaauu

SEQ ID NO: 1659393 - RNA, 20 nt, Human
auauuuuacauaaauuuagu

SEQ ID NO: 1659394 - RNA, 14 nt, Human
uuccccuguucacu

SEQ ID NO: 1659395 - RNA, 17 nt, Human
uuccccuguucacucua

SEQ ID NO: 1659396 - RNA, 22 nt, Human
uuccccuuccuaauuccacagc

SEQ ID NO: 1659397 - RNA, 14 nt, Human
uucccuacuuccug

SEQ ID NO: 1659398 - RNA, 16 nt, Human
uucccuacuuccugug

SEQ ID NO: 1659399 - RNA, 17 nt, Human
uucccuacuuccuguga

SEQ ID NO: 1659400 - RNA, 15 nt, Human
uucccuauuagagaa

SEQ ID NO: 1659401 - RNA, 18 nt, Human
uucccuuuuuuggcugcu

SEQ ID NO: 1659402 - RNA, 19 nt, Human
uucccuuuuuuggcugcug

SEQ ID NO: 1659403 - RNA, 20 nt, Human
uucccuuuuuuggcugcuga

SEQ ID NO: 1659404 - RNA, 13 nt, Human
uuccucuccacug

SEQ ID NO: 1659405 - RNA, 14 nt, Human
uuccucuccacugc

SEQ ID NO: 1659406 - RNA, 15 nt, Human
uuccucuccacugcc

SEQ ID NO: 1659407 - RNA, 16 nt, Human
uuccucuccacugccu

SEQ ID NO: 1659408 - RNA, 12 nt, Human
uuccucuccacu

SEQ ID NO: 1659409 - RNA, 20 nt, Human
uuccuucaaagcaaaugucu

SEQ ID NO: 1659410 - RNA, 17 nt, Human
auauuuucauucuccua

SEQ ID NO: 1659411 - RNA, 22 nt, Human
aucaaguuggcuucuaaucaaa

SEQ ID NO: 1659412 - RNA, 23 nt, Human
aucaaguuggcuucuaaucaaag

SEQ ID NO: 1659413 - RNA, 14 nt, Human
aucaaguuauuuuu

SEQ ID NO: 1659414 - RNA, 22 nt, Human
aucaaccccuucgcuccugugu

SEQ ID NO: 1659415 - RNA, 19 nt, Human
aucaaccccuucgcuccug

SEQ ID NO: 1659416 - RNA, 20 nt, Human
aucaaccccuucgcuccugu

SEQ ID NO: 1659417 - RNA, 16 nt, Human
auauuuuuauauuuac

SEQ ID NO: 1659418 - RNA, 20 nt, Human
aucaaauaugcaaagcacug

SEQ ID NO: 1659419 - RNA, 19 nt, Human
aucagacuaugaaguuuuu

SEQ ID NO: 1659420 - RNA, 13 nt, Human
aucagacagaucu

SEQ ID NO: 1659421 - RNA, 13 nt, Human
aucaggccaggcc

SEQ ID NO: 1659422 - RNA, 14 nt, Human
aucaggccaggccc

SEQ ID NO: 1659423 - RNA, 13 nt, Human
uucucagcuccca

SEQ ID NO: 1659424 - RNA, 13 nt, Human
uucucagaaucuc

SEQ ID NO: 1659425 - RNA, 14 nt, Human
aucacuuuuuucca

SEQ ID NO: 1659426 - RNA, 21 nt, Human
uucuaaguaaaaccacagcag

SEQ ID NO: 1659427 - RNA, 21 nt, Human
uucucacugccaugccagcuu

SEQ ID NO: 1659428 - RNA, 18 nt, Human
uucucagaaggcaaauga

SEQ ID NO: 1659429 - RNA, 19 nt, Human
uucucagaaggcaaaugac

SEQ ID NO: 1659430 - RNA, 21 nt, Human
uucucagaaggcaaaugacuu

SEQ ID NO: 1659431 - RNA, 22 nt, Human
uucucagaaggcaaaugacuuu

SEQ ID NO: 1659432 - RNA, 14 nt, Human
uucuauaauuuaaa

SEQ ID NO: 1659433 - RNA, 13 nt, Human
uucuauaauuuaa

SEQ ID NO: 1659434 - RNA, 21 nt, Human
uucgcaggauucuuccucccu

SEQ ID NO: 1659435 - RNA, 20 nt, Human
uucgauacaccgggccugga

SEQ ID NO: 1659436 - RNA, 15 nt, Human
aucaauaaaaaauua

SEQ ID NO: 1659437 - RNA, 17 nt, Human
aucaauaaaaaauuaug

SEQ ID NO: 1659438 - RNA, 18 nt, Human
aucaauaaaaaauuauga

SEQ ID NO: 1659439 - RNA, 13 nt, Human
uucuaagaaguga

SEQ ID NO: 1659440 - RNA, 17 nt, Human
uucuaaguaaaaccaca

SEQ ID NO: 1659441 - RNA, 19 nt, Human
uucuaaguaaaaccacagc

SEQ ID NO: 1659442 - RNA, 20 nt, Human
uucuaaguaaaaccacagca

SEQ ID NO: 1659443 - RNA, 15 nt, Human
uucuaaaguaaaaac

SEQ ID NO: 1659444 - RNA, 13 nt, Human
uucgcuccugugu

SEQ ID NO: 1659445 - RNA, 19 nt, Human
uucuaaaucuccaaaauaa

SEQ ID NO: 1659446 - RNA, 13 nt, Human
uucuguacuuuuu

SEQ ID NO: 1659447 - RNA, 22 nt, Human
uucugguugaugccugugaacu

SEQ ID NO: 1659448 - RNA, 18 nt, Human
uucuguacuuuuuggcau

SEQ ID NO: 1659449 - RNA, 19 nt, Human
uucuguacuuuuuggcaua

SEQ ID NO: 1659450 - RNA, 20 nt, Human
uucuggcuaugcauuugaaa

SEQ ID NO: 1659451 - RNA, 18 nt, Human
uucuggcuaugcauuuga

SEQ ID NO: 1659452 - RNA, 14 nt, Human
uucugccgcagccc

SEQ ID NO: 1659453 - RNA, 15 nt, Human
uucugccgcagcccu

SEQ ID NO: 1659454 - RNA, 16 nt, Human
uucugccgcagcccug

SEQ ID NO: 1659455 - RNA, 15 nt, Human
uucuggcucuuccag

SEQ ID NO: 1659456 - RNA, 20 nt, Human
uucuggugugaacuaaacuu

SEQ ID NO: 1659457 - RNA, 21 nt, Human
uucuggugugaacuaaacuuu

SEQ ID NO: 1659458 - RNA, 20 nt, Human
auccaguuuuguuuggacca

SEQ ID NO: 1659459 - RNA, 21 nt, Human
auccaguuuuguuuggaccaa

SEQ ID NO: 1659460 - RNA, 18 nt, Human
auccaguuuuguuuggac

SEQ ID NO: 1659461 - RNA, 17 nt, Human
auccauuuggaaaucuu

SEQ ID NO: 1659462 - RNA, 19 nt, Human
auccauuuggaaaucuuua

SEQ ID NO: 1659463 - RNA, 13 nt, Human
auccauuuggaaa

SEQ ID NO: 1659464 - RNA, 15 nt, Human
aucccaccaacccuc

SEQ ID NO: 1659465 - RNA, 20 nt, Human
auccauuuggaaaucuuuaa

SEQ ID NO: 1659466 - RNA, 14 nt, Human
auccauacauuugu

SEQ ID NO: 1659467 - RNA, 16 nt, Human
uucucuuuucaaaaca

SEQ ID NO: 1659468 - RNA, 17 nt, Human
uucucuacucuagggaa

SEQ ID NO: 1659469 - RNA, 19 nt, Human
uucugcagccacuauuguu

SEQ ID NO: 1659470 - RNA, 13 nt, Human
uucugccgcagcc

SEQ ID NO: 1659471 - RNA, 15 nt, Human
uucugcacacagcac

SEQ ID NO: 1659472 - RNA, 16 nt, Human
uucugacccaugcugc

SEQ ID NO: 1659473 - RNA, 14 nt, Human
uucugacccaugcu

SEQ ID NO: 1659474 - RNA, 21 nt, Human
aucauugaaaucuuuuugcuu

SEQ ID NO: 1659475 - RNA, 21 nt, Human
aucaggccaggcccucugccc

SEQ ID NO: 1659476 - RNA, 22 nt, Human
aucaggccaggcccucugccca

SEQ ID NO: 1659477 - RNA, 23 nt, Human
aucaggccaggcccucugcccac

SEQ ID NO: 1659478 - RNA, 12 nt, Human
uucuccugccuc

SEQ ID NO: 1659479 - RNA, 13 nt, Human
uucuccugccuca

SEQ ID NO: 1659480 - RNA, 14 nt, Human
uucuccugccucag

SEQ ID NO: 1659481 - RNA, 20 nt, Human
aucauuucugcaucagcugc

SEQ ID NO: 1659482 - RNA, 13 nt, Human
uucuugcaaagua

SEQ ID NO: 1659483 - RNA, 12 nt, Human
uucuugcaaagu

SEQ ID NO: 1659484 - RNA, 13 nt, Human
uucuuucuuccuc

SEQ ID NO: 1659485 - RNA, 15 nt, Human
uucuuucuuccucug

SEQ ID NO: 1659486 - RNA, 22 nt, Human
uucuuucuggcuaugcauuuga

SEQ ID NO: 1659487 - RNA, 11 nt, Human
uucuuccucug

SEQ ID NO: 1659488 - RNA, 12 nt, Human
uucuuccucugc

SEQ ID NO: 1659489 - RNA, 13 nt, Human
uucuuccucugcu

SEQ ID NO: 1659490 - RNA, 23 nt, Human
uucuuccucccucccucuuuccc

SEQ ID NO: 1659491 - RNA, 13 nt, Human
uucuuaauucuua

SEQ ID NO: 1659492 - RNA, 15 nt, Human
uucuguugcugccuc

SEQ ID NO: 1659493 - RNA, 16 nt, Human
uucuguugcugccuca

SEQ ID NO: 1659494 - RNA, 18 nt, Human
uucuguucuuucuggcua

SEQ ID NO: 1659495 - RNA, 17 nt, Human
uucuguugcugccucau

SEQ ID NO: 1659496 - RNA, 21 nt, Human
uucuguuggccagugugacaa

SEQ ID NO: 1659497 - RNA, 20 nt, Human
uucuguuuuucuaggccugg

SEQ ID NO: 1659498 - RNA, 16 nt, Human
uugaaaguuuacagga

SEQ ID NO: 1659499 - RNA, 21 nt, Human
uugaaauuuuuauuaaauuau

SEQ ID NO: 1659500 - RNA, 11 nt, Human
uugaaaucuuu

SEQ ID NO: 1659501 - RNA, 20 nt, Human
uugaaauauaggaacuuaaa

SEQ ID NO: 1659502 - RNA, 19 nt, Human
uugaaauauugacuuuuua

SEQ ID NO: 1659503 - RNA, 18 nt, Human
uugaacccgggaggcaga

SEQ ID NO: 1659504 - RNA, 12 nt, Human
auccuaaugaau

SEQ ID NO: 1659505 - RNA, 13 nt, Human
auccuaaugaaug

SEQ ID NO: 1659506 - RNA, 14 nt, Human
auccuacaagacac

SEQ ID NO: 1659507 - RNA, 19 nt, Human
auccuaaugaaugcauaaa

SEQ ID NO: 1659508 - RNA, 21 nt, Human
auccuaggcauuugcugaaua

SEQ ID NO: 1659509 - RNA, 13 nt, Human
auccuaguuccac

SEQ ID NO: 1659510 - RNA, 22 nt, Human
auagcuuuucccuuuuuuuaag

SEQ ID NO: 1659511 - RNA, 15 nt, Human
auagcuuuuuucucu

SEQ ID NO: 1659512 - RNA, 12 nt, Human
auaggaaaaacu

SEQ ID NO: 1659513 - RNA, 14 nt, Human
auaggaaaaacuga

SEQ ID NO: 1659514 - RNA, 16 nt, Human
auaggaaaaacugauu

SEQ ID NO: 1659515 - RNA, 17 nt, Human
auaggaaaaacugauuu

SEQ ID NO: 1659516 - RNA, 17 nt, Human
auaggcguaacuaauuu

SEQ ID NO: 1659517 - RNA, 20 nt, Human
uucacagaugggugcuugga

SEQ ID NO: 1659518 - RNA, 15 nt, Human
uucacaguucucucc

SEQ ID NO: 1659519 - RNA, 20 nt, Human
uucacaguucucuccuucuu

SEQ ID NO: 1659520 - RNA, 17 nt, Human
uucaagugauucucaug

SEQ ID NO: 1659521 - RNA, 23 nt, Human
uucacaagacccaaaaggcagaa

SEQ ID NO: 1659522 - RNA, 21 nt, Human
uucaagcgauucuucugcuuc

SEQ ID NO: 1659523 - RNA, 21 nt, Human
uucaaaauuguuacaaauugu

SEQ ID NO: 1659524 - RNA, 17 nt, Human
uucaaaauaaaaaugag

SEQ ID NO: 1659525 - RNA, 14 nt, Human
uucaaacauauaua

SEQ ID NO: 1659526 - RNA, 18 nt, Human
uucaaacagucucaggaa

SEQ ID NO: 1659527 - RNA, 13 nt, Human
uuauuuuuuucug

SEQ ID NO: 1659528 - RNA, 17 nt, Human
uuauuuuuuucugaauu

SEQ ID NO: 1659529 - RNA, 18 nt, Human
uuauuuuuagacagaguc

SEQ ID NO: 1659530 - RNA, 17 nt, Human
uuauuuuuagacagagu

SEQ ID NO: 1659531 - RNA, 15 nt, Human
uucacuuacagcacc

SEQ ID NO: 1659532 - RNA, 21 nt, Human
auauauauuuuuuucugaaau

SEQ ID NO: 1659533 - RNA, 12 nt, Human
auauauaaccag

SEQ ID NO: 1659534 - RNA, 13 nt, Human
auauauaaccagu

SEQ ID NO: 1659535 - RNA, 14 nt, Human
auauauaacaaugc

SEQ ID NO: 1659536 - RNA, 22 nt, Human
auaguuaagcgugcauaaguua

SEQ ID NO: 1659537 - RNA, 22 nt, Human
auaguuggcuaggaccccucca

SEQ ID NO: 1659538 - RNA, 20 nt, Human
auaguuguaccgcaauguga

SEQ ID NO: 1659539 - RNA, 15 nt, Human
auaguggugugauuu

SEQ ID NO: 1659540 - RNA, 17 nt, Human
auaguggcuuaaaacaa

SEQ ID NO: 1659541 - RNA, 21 nt, Human
auagugaggcaucgcaaugua

SEQ ID NO: 1659542 - RNA, 13 nt, Human
auagucuggcugu

SEQ ID NO: 1659543 - RNA, 15 nt, Human
auauguggaguucau

SEQ ID NO: 1659544 - RNA, 16 nt, Human
auauguggaguucauc

SEQ ID NO: 1659545 - RNA, 18 nt, Human
uucauuuaggugaggaag

SEQ ID NO: 1659546 - RNA, 15 nt, Human
uuccaaggguacuaa

SEQ ID NO: 1659547 - RNA, 17 nt, Human
uuccaaggguacuaagg

SEQ ID NO: 1659548 - RNA, 17 nt, Human
uuccaggggugggacac

SEQ ID NO: 1659549 - RNA, 22 nt, Human
uuccacaagagcccaggccucc

SEQ ID NO: 1659550 - RNA, 19 nt, Human
uuccaccaucaagccacca

SEQ ID NO: 1659551 - RNA, 23 nt, Human
uucccaaagcagugcaugcuguc

SEQ ID NO: 1659552 - RNA, 19 nt, Human
uuccauaaucuggacuccu

SEQ ID NO: 1659553 - RNA, 22 nt, Human
uuccauaaucuggacuccucug

SEQ ID NO: 1659554 - RNA, 23 nt, Human
uuccauaaucuggacuccucugu

SEQ ID NO: 1659555 - RNA, 13 nt, Human
uuccaggcuggga

SEQ ID NO: 1659556 - RNA, 21 nt, Human
uuccaggggugggacacccug

SEQ ID NO: 1659557 - RNA, 17 nt, Human
uuccagugaggcucugc

SEQ ID NO: 1659558 - RNA, 19 nt, Human
uuccagugaggcucugccc

SEQ ID NO: 1659559 - RNA, 20 nt, Human
uuccagugaggcucugcccu

SEQ ID NO: 1659560 - RNA, 21 nt, Human
uuccagugaggcucugcccuu

SEQ ID NO: 1659561 - RNA, 22 nt, Human
uuccagugaggcucugcccuug

SEQ ID NO: 1659562 - RNA, 12 nt, Human
uucccaccucuc

SEQ ID NO: 1659563 - RNA, 22 nt, Human
uucccaccucucucacuccuug

SEQ ID NO: 1659564 - RNA, 18 nt, Human
uucccaagcucugcuccu

SEQ ID NO: 1659565 - RNA, 13 nt, Human
uucccaagcucug

SEQ ID NO: 1659566 - RNA, 14 nt, Human
uucccaagcucugc

SEQ ID NO: 1659567 - RNA, 15 nt, Human
uucccaagcucugcu

SEQ ID NO: 1659568 - RNA, 16 nt, Human
uucccaagcucugcuc

SEQ ID NO: 1659569 - RNA, 18 nt, Human
uucccaacuccagaaagu

SEQ ID NO: 1659570 - RNA, 12 nt, Human
uucccaaauuuc

SEQ ID NO: 1659571 - RNA, 21 nt, Human
uucaucccucuggggcuguuc

SEQ ID NO: 1659572 - RNA, 17 nt, Human
uucaucccucuggggcu

SEQ ID NO: 1659573 - RNA, 12 nt, Human
auauauuuuaag

SEQ ID NO: 1659574 - RNA, 13 nt, Human
auauauuuuaaga

SEQ ID NO: 1659575 - RNA, 14 nt, Human
auauaugugaugau

SEQ ID NO: 1659576 - RNA, 13 nt, Human
uucagaaaugugu

SEQ ID NO: 1659577 - RNA, 11 nt, Human
uucagaaaugu

SEQ ID NO: 1659578 - RNA, 12 nt, Human
uucagugccuua

SEQ ID NO: 1659579 - RNA, 13 nt, Human
uucagugccuuau

SEQ ID NO: 1659580 - RNA, 19 nt, Human
uucauaauuauuauuuggc

SEQ ID NO: 1659581 - RNA, 18 nt, Human
uucagugccuuauggaac

SEQ ID NO: 1659582 - RNA, 17 nt, Human
auauguaacaagccacc

SEQ ID NO: 1659583 - RNA, 16 nt, Human
auauguaacaagccac

SEQ ID NO: 1659584 - RNA, 22 nt, Human
auaugcacacauuuuuuaaaug

SEQ ID NO: 1659585 - RNA, 16 nt, Human
auaugcacacauuuuu

SEQ ID NO: 1659586 - RNA, 15 nt, Human
auaugcacacauuuu

SEQ ID NO: 1659587 - RNA, 14 nt, Human
auaugcacacauuu

SEQ ID NO: 1659588 - RNA, 16 nt, Human
auaucugaaaauguau

SEQ ID NO: 1659589 - RNA, 17 nt, Human
auaucugaaaauguaug

SEQ ID NO: 1659590 - RNA, 20 nt, Human
auaucugaaaauguaugugu

SEQ ID NO: 1659591 - RNA, 19 nt, Human
auaucuccgucaacucaua

SEQ ID NO: 1659592 - RNA, 20 nt, Human
auaucuccgucaacucauau

SEQ ID NO: 1659593 - RNA, 21 nt, Human
auaucuccgucaacucauauu

SEQ ID NO: 1659594 - RNA, 14 nt, Human
auauauuuuaagac

SEQ ID NO: 1659595 - RNA, 15 nt, Human
auauauuuuaagacg

SEQ ID NO: 1659596 - RNA, 23 nt, Human
auuucuuuugccguuauuaaaaa

SEQ ID NO: 1659597 - RNA, 21 nt, Human
auuuuauguugcauagaauaa

SEQ ID NO: 1659598 - RNA, 14 nt, Human
auuuuauguugcau

SEQ ID NO: 1659599 - RNA, 18 nt, Human
auuuuauguugcauagaa

SEQ ID NO: 1659600 - RNA, 21 nt, Human
auuuuacuuuaaaaggagcca

SEQ ID NO: 1659601 - RNA, 13 nt, Human
auuuuauuaugaa

SEQ ID NO: 1659602 - RNA, 14 nt, Human
auuuuauuaugaaa

SEQ ID NO: 1659603 - RNA, 11 nt, Human
auuuuauuaug

SEQ ID NO: 1659604 - RNA, 12 nt, Human
auuuuauuauga

SEQ ID NO: 1659605 - RNA, 18 nt, Human
auuuuauuaugaaacuug

SEQ ID NO: 1659606 - RNA, 21 nt, Human
auuuuauuaugaaacuugugu

SEQ ID NO: 1659607 - RNA, 13 nt, Human
auuuuauuaugca

SEQ ID NO: 1659608 - RNA, 14 nt, Human
auuuuauuauguaa

SEQ ID NO: 1659609 - RNA, 15 nt, Human
auuuuauuauguaaa

SEQ ID NO: 1659610 - RNA, 15 nt, Human
auuuuauuaugcaug

SEQ ID NO: 1659611 - RNA, 14 nt, Human
auuuuauuaugcau

SEQ ID NO: 1659612 - RNA, 13 nt, Human
auuuuauuaugua

SEQ ID NO: 1659613 - RNA, 17 nt, Human
auuuuauuaugcaugaa

SEQ ID NO: 1659614 - RNA, 22 nt, Human
auuuuacuguacagacagaaaa

SEQ ID NO: 1659615 - RNA, 20 nt, Human
auuuuacuguacagacagaa

SEQ ID NO: 1659616 - RNA, 13 nt, Human
auuuuacauaaau

SEQ ID NO: 1659617 - RNA, 19 nt, Human
auuuguaguguuggagaag

SEQ ID NO: 1659618 - RNA, 15 nt, Human
auuuguaucacaaau

SEQ ID NO: 1659619 - RNA, 14 nt, Human
auuuuaauaauguu

SEQ ID NO: 1659620 - RNA, 15 nt, Human
auuuuaauaauguuu

SEQ ID NO: 1659621 - RNA, 16 nt, Human
auuuuaauaauguuuc

SEQ ID NO: 1659622 - RNA, 23 nt, Human
auuuccugggagcuuuuguagaa

SEQ ID NO: 1659623 - RNA, 22 nt, Human
auuuccugggagcuuuuguaga

SEQ ID NO: 1659624 - RNA, 16 nt, Human
auuuauuauggcacau

SEQ ID NO: 1659625 - RNA, 14 nt, Human
auuuccugugucuu

SEQ ID NO: 1659626 - RNA, 13 nt, Human
auuucuaaaucuc

SEQ ID NO: 1659627 - RNA, 12 nt, Human
auuucuaaaucu

SEQ ID NO: 1659628 - RNA, 21 nt, Human
auuucuaaaucuccaaaauaa

SEQ ID NO: 1659629 - RNA, 15 nt, Human
auuuacuaaaaugga

SEQ ID NO: 1659630 - RNA, 13 nt, Human
auuuauuauggca

SEQ ID NO: 1659631 - RNA, 22 nt, Human
auuuauuaaaugcccagccccu

SEQ ID NO: 1659632 - RNA, 20 nt, Human
auuuauuaaaugcccagccc

SEQ ID NO: 1659633 - RNA, 22 nt, Human
auuuauuacuguaagaaaauau

SEQ ID NO: 1659634 - RNA, 20 nt, Human
auuuggaaaucuuuaaaaaa

SEQ ID NO: 1659635 - RNA, 17 nt, Human
auuuggaaaucuuuaaa

SEQ ID NO: 1659636 - RNA, 17 nt, Human
auuugagcagggcucag

SEQ ID NO: 1659637 - RNA, 23 nt, Human
auuugaggucuguucuuuccaaa

SEQ ID NO: 1659638 - RNA, 15 nt, Human
auuugaggucuguuc

SEQ ID NO: 1659639 - RNA, 20 nt, Human
auuucuuuugccguuauuaa

SEQ ID NO: 1659640 - RNA, 21 nt, Human
auuugguuuucacauuggaaa

SEQ ID NO: 1659641 - RNA, 22 nt, Human
auuugguuuucacauuggaaac

SEQ ID NO: 1659642 - RNA, 15 nt, Human
auuugguuuucacau

SEQ ID NO: 1659643 - RNA, 17 nt, Human
auuugguuuucacauug

SEQ ID NO: 1659644 - RNA, 20 nt, Human
auuuggugguuucagaaaug

SEQ ID NO: 1659645 - RNA, 18 nt, Human
auuuggugguuucagaaa

SEQ ID NO: 1659646 - RNA, 18 nt, Human
auuuguaguguuggagaa

SEQ ID NO: 1659647 - RNA, 17 nt, Human
auuuggugguuucagaa

SEQ ID NO: 1659648 - RNA, 23 nt, Human
auuugguaaggggaauugaggac

SEQ ID NO: 1659649 - RNA, 14 nt, Human
auugcuacuguccu

SEQ ID NO: 1659650 - RNA, 17 nt, Human
auugaccugaggcccuu

SEQ ID NO: 1659651 - RNA, 13 nt, Human
auugaccugaggc

SEQ ID NO: 1659652 - RNA, 15 nt, Human
auugcaacaggcugg

SEQ ID NO: 1659653 - RNA, 18 nt, Human
auugacaggauuauugga

SEQ ID NO: 1659654 - RNA, 21 nt, Human
auugacccacaagaaaugaaa

SEQ ID NO: 1659655 - RNA, 16 nt, Human
auugcaacaggcuggg

SEQ ID NO: 1659656 - RNA, 21 nt, Human
auugcaacaggcugggcuuca

SEQ ID NO: 1659657 - RNA, 16 nt, Human
auugcggacagccacg

SEQ ID NO: 1659658 - RNA, 18 nt, Human
auugcggacagccacggc

SEQ ID NO: 1659659 - RNA, 19 nt, Human
auugcggacagccacggcc

SEQ ID NO: 1659660 - RNA, 17 nt, Human
auugcccacgcuggagu

SEQ ID NO: 1659661 - RNA, 21 nt, Human
auugcccacgcuggagugcag

SEQ ID NO: 1659662 - RNA, 17 nt, Human
auugcauuuccugacag

SEQ ID NO: 1659663 - RNA, 23 nt, Human
auugccauuucuuccacaagagc

SEQ ID NO: 1659664 - RNA, 18 nt, Human
auucuccaccugccaggg

SEQ ID NO: 1659665 - RNA, 19 nt, Human
auucucacagcuccaagaa

SEQ ID NO: 1659666 - RNA, 21 nt, Human
auucucacagcuccaagaauu

SEQ ID NO: 1659667 - RNA, 22 nt, Human
auucucacagcuccaagaauuu

SEQ ID NO: 1659668 - RNA, 14 nt, Human
auucucagaaucuc

SEQ ID NO: 1659669 - RNA, 13 nt, Human
auucuacuuugag

SEQ ID NO: 1659670 - RNA, 16 nt, Human
auucuacuuugagugc

SEQ ID NO: 1659671 - RNA, 18 nt, Human
auucucagaaucucaaau

SEQ ID NO: 1659672 - RNA, 20 nt, Human
auucucagaaucucaaauaa

SEQ ID NO: 1659673 - RNA, 13 nt, Human
auucuccaccugc

SEQ ID NO: 1659674 - RNA, 16 nt, Human
auucuccaccugccag

SEQ ID NO: 1659675 - RNA, 17 nt, Human
auucuccaccugccagg

SEQ ID NO: 1659676 - RNA, 20 nt, Human
auugacacuuaaaaaugguu

SEQ ID NO: 1659677 - RNA, 16 nt, Human
auuuaaccucuaaauu

SEQ ID NO: 1659678 - RNA, 18 nt, Human
auuuaaccucuaaauucu

SEQ ID NO: 1659679 - RNA, 19 nt, Human
auuuaauuuuuuugagaca

SEQ ID NO: 1659680 - RNA, 23 nt, Human
auuuaauuuuuuugagacagagu

SEQ ID NO: 1659681 - RNA, 22 nt, Human
auuuacaacugggggaggguga

SEQ ID NO: 1659682 - RNA, 16 nt, Human
auuuacaaaugggaaa

SEQ ID NO: 1659683 - RNA, 16 nt, Human
auuuaacagaaaugua

SEQ ID NO: 1659684 - RNA, 15 nt, Human
auuuaacagaaaugu

SEQ ID NO: 1659685 - RNA, 19 nt, Human
auuuaacagaaauguacag

SEQ ID NO: 1659686 - RNA, 17 nt, Human
auuuaacagaaauguac

SEQ ID NO: 1659687 - RNA, 20 nt, Human
auuuaacagaaauguacagc

SEQ ID NO: 1659688 - RNA, 19 nt, Human
auuuaaagcuuauuaaaac

SEQ ID NO: 1659689 - RNA, 13 nt, Human
auuuaaaagauac

SEQ ID NO: 1659690 - RNA, 23 nt, Human
auugugcgcuaaacuuuucugau

SEQ ID NO: 1659691 - RNA, 15 nt, Human
auuguauuacaaauc

SEQ ID NO: 1659692 - RNA, 14 nt, Human
auuguauuacaaau

SEQ ID NO: 1659693 - RNA, 15 nt, Human
auugugaaauuauuc

SEQ ID NO: 1659694 - RNA, 13 nt, Human
auugugccccugc

SEQ ID NO: 1659695 - RNA, 23 nt, Human
auuggcuuuggguugcaggaccu

SEQ ID NO: 1659696 - RNA, 19 nt, Human
auuccccaggaggccagcc

SEQ ID NO: 1659697 - RNA, 20 nt, Human
auuccccagauugcaacagg

SEQ ID NO: 1659698 - RNA, 16 nt, Human
auuccccaggaggcca

SEQ ID NO: 1659699 - RNA, 20 nt, Human
auuccacuuauaggaauuga

SEQ ID NO: 1659700 - RNA, 21 nt, Human
auucaguuguuagugugucuu

SEQ ID NO: 1659701 - RNA, 23 nt, Human
auucaggaagcucagggccuggc

SEQ ID NO: 1659702 - RNA, 16 nt, Human
auucaguuguuagugu

SEQ ID NO: 1659703 - RNA, 14 nt, Human
auucagcucugcaa

SEQ ID NO: 1659704 - RNA, 18 nt, Human
auucagcucugcaagaau

SEQ ID NO: 1659705 - RNA, 21 nt, Human
auucaggaagcucagggccug

SEQ ID NO: 1659706 - RNA, 22 nt, Human
auucaggaagcucagggccugg

SEQ ID NO: 1659707 - RNA, 16 nt, Human
auucaaaaugauguau

SEQ ID NO: 1659708 - RNA, 21 nt, Human
auuauuuuauuaugaaacuug

SEQ ID NO: 1659709 - RNA, 22 nt, Human
auuauuuuauuaugaaacuugu

SEQ ID NO: 1659710 - RNA, 14 nt, Human
auucagcucaugga

SEQ ID NO: 1659711 - RNA, 14 nt, Human
auucaaacagucuc

SEQ ID NO: 1659712 - RNA, 15 nt, Human
auucaaacagucuca

SEQ ID NO: 1659713 - RNA, 15 nt, Human
auuagagaguguuga

SEQ ID NO: 1659714 - RNA, 16 nt, Human
auuagagaguguugaa

SEQ ID NO: 1659715 - RNA, 17 nt, Human
auuagagaguguugaaa

SEQ ID NO: 1659716 - RNA, 18 nt, Human
auuagagaguguugaaac

SEQ ID NO: 1659717 - RNA, 19 nt, Human
auuagagaguguugaaacg

SEQ ID NO: 1659718 - RNA, 16 nt, Human
auuauauuuacaaaug

SEQ ID NO: 1659719 - RNA, 18 nt, Human
auuaucucaaaacugcac

SEQ ID NO: 1659720 - RNA, 23 nt, Human
auuaucucaaaacugcacuguca

SEQ ID NO: 1659721 - RNA, 17 nt, Human
auuauauuuacaaaugg

SEQ ID NO: 1659722 - RNA, 16 nt, Human
auuauuuuauguugca

SEQ ID NO: 1659723 - RNA, 15 nt, Human
auuauuuuauuauga

SEQ ID NO: 1659724 - RNA, 18 nt, Human
auuauuuuauguugcaua

SEQ ID NO: 1659725 - RNA, 23 nt, Human
auuauuuauuaaaugcccagccc

SEQ ID NO: 1659726 - RNA, 20 nt, Human
auuauuaccuuacagaaguu

SEQ ID NO: 1659727 - RNA, 13 nt, Human
auuacauuuguau

SEQ ID NO: 1659728 - RNA, 19 nt, Human
auuaccacagacauacuaa

SEQ ID NO: 1659729 - RNA, 15 nt, Human
auuacauuuguauaa

SEQ ID NO: 1659730 - RNA, 16 nt, Human
auuacauuuguauaaa

SEQ ID NO: 1659731 - RNA, 22 nt, Human
auuaccugaauuuuggcugugu

SEQ ID NO: 1659732 - RNA, 12 nt, Human
auuaccagggac

SEQ ID NO: 1659733 - RNA, 20 nt, Human
auuaagagagucuauuuacg

SEQ ID NO: 1659734 - RNA, 22 nt, Human
uuuuuguuccacaaguuaaaua

SEQ ID NO: 1659735 - RNA, 23 nt, Human
uuuuuuaaaaaagaaacauuugg

SEQ ID NO: 1659736 - RNA, 13 nt, Human
auuaaguaaugau

SEQ ID NO: 1659737 - RNA, 15 nt, Human
auuaaguaaugauaa

SEQ ID NO: 1659738 - RNA, 13 nt, Human
uuuuauuauguaa

SEQ ID NO: 1659739 - RNA, 14 nt, Human
uuuuauuauguaaa

SEQ ID NO: 1659740 - RNA, 21 nt, Human
uuuuauucagcucauggacuu

SEQ ID NO: 1659741 - RNA, 15 nt, Human
uuuucauuauuuuau

SEQ ID NO: 1659742 - RNA, 21 nt, Human
uuuucauuauuuuauuaugaa

SEQ ID NO: 1659743 - RNA, 22 nt, Human
uuuucauucuccuaucaccugu

SEQ ID NO: 1659744 - RNA, 19 nt, Human
uuuuccagguuuaagcugu

SEQ ID NO: 1659745 - RNA, 19 nt, Human
uuuuaugugaaacauguuu

SEQ ID NO: 1659746 - RNA, 12 nt, Human
uuuuauuaugua

SEQ ID NO: 1659747 - RNA, 22 nt, Human
uuuuauguugcauagaauaaaa

SEQ ID NO: 1659748 - RNA, 18 nt, Human
uuuuaugugaaacauguu

SEQ ID NO: 1659749 - RNA, 22 nt, Human
uuuuauggcacuaguauuucua

SEQ ID NO: 1659750 - RNA, 19 nt, Human
uuuuauggcacuaguauuu

SEQ ID NO: 1659751 - RNA, 23 nt, Human
uuuuauggaggcuuugcauagau

SEQ ID NO: 1659752 - RNA, 17 nt, Human
uuuuauaaacuuuaccu

SEQ ID NO: 1659753 - RNA, 14 nt, Human
uuuuauaaacuuua

SEQ ID NO: 1659754 - RNA, 19 nt, Human
uuuuauaaacuuuaccuuu

SEQ ID NO: 1659755 - RNA, 14 nt, Human
uuuuauaauuuugu

SEQ ID NO: 1659756 - RNA, 18 nt, Human
uuuuaugcuuuaaacauu

SEQ ID NO: 1659757 - RNA, 12 nt, Human
uuuuauaaaucg

SEQ ID NO: 1659758 - RNA, 20 nt, Human
uuuuauaaaucgcuuuugau

SEQ ID NO: 1659759 - RNA, 15 nt, Human
auguugcauagaaua

SEQ ID NO: 1659760 - RNA, 14 nt, Human
auguuggccaggcu

SEQ ID NO: 1659761 - RNA, 16 nt, Human
auguuggccaggcugc

SEQ ID NO: 1659762 - RNA, 16 nt, Human
auguuggccaggcugg

SEQ ID NO: 1659763 - RNA, 19 nt, Human
uuuuaguugcaacuuugua

SEQ ID NO: 1659764 - RNA, 13 nt, Human
uuuuauaaacuuu

SEQ ID NO: 1659765 - RNA, 12 nt, Human
uuuuauaaacuu

SEQ ID NO: 1659766 - RNA, 21 nt, Human
uuuuaagugcugcauuuaaaa

SEQ ID NO: 1659767 - RNA, 17 nt, Human
uuuuaagugcugcauuu

SEQ ID NO: 1659768 - RNA, 16 nt, Human
uuuuaagugcugcauu

SEQ ID NO: 1659769 - RNA, 16 nt, Human
auguugaagccuuugu

SEQ ID NO: 1659770 - RNA, 15 nt, Human
auguugaagccuuug

SEQ ID NO: 1659771 - RNA, 15 nt, Human
auguugacaugggac

SEQ ID NO: 1659772 - RNA, 21 nt, Human
auguucaucauccuaagcuau

SEQ ID NO: 1659773 - RNA, 19 nt, Human
auguucaucaaugaaugaa

SEQ ID NO: 1659774 - RNA, 23 nt, Human
auuaacuuuuauaaacuuuaccu

SEQ ID NO: 1659775 - RNA, 13 nt, Human
auuaagaaagacu

SEQ ID NO: 1659776 - RNA, 14 nt, Human
auuaagaaagacua

SEQ ID NO: 1659777 - RNA, 16 nt, Human
auuaagaaugaaauac

SEQ ID NO: 1659778 - RNA, 20 nt, Human
auuaagaaugaaauacuguu

SEQ ID NO: 1659779 - RNA, 21 nt, Human
auuaagaaugaaauacuguuu

SEQ ID NO: 1659780 - RNA, 22 nt, Human
auuaagaaugaaauacuguuug

SEQ ID NO: 1659781 - RNA, 12 nt, Human
auuaacuuuuau

SEQ ID NO: 1659782 - RNA, 20 nt, Human
auuaacuuuuauaaacuuua

SEQ ID NO: 1659783 - RNA, 19 nt, Human
auuaacuuuuauaaacuuu

SEQ ID NO: 1659784 - RNA, 17 nt, Human
auuaacuuuuauaaacu

SEQ ID NO: 1659785 - RNA, 16 nt, Human
auuaacuuuuauaaac

SEQ ID NO: 1659786 - RNA, 12 nt, Human
auuaaagccaug

SEQ ID NO: 1659787 - RNA, 16 nt, Human
auuaaagccauguuua

SEQ ID NO: 1659788 - RNA, 17 nt, Human
auuaaagccauguuuau

SEQ ID NO: 1659789 - RNA, 21 nt, Human
auuaaagccauguuuauuaca

SEQ ID NO: 1659790 - RNA, 21 nt, Human
auuaaacuuaaucuaaaugga

SEQ ID NO: 1659791 - RNA, 19 nt, Human
auuaaacuuaaucuaaaug

SEQ ID NO: 1659792 - RNA, 16 nt, Human
auuaaacuuaaucuaa

SEQ ID NO: 1659793 - RNA, 17 nt, Human
auuaaacuuaaucuaaa

SEQ ID NO: 1659794 - RNA, 18 nt, Human
auuaaccacuucagcuga

SEQ ID NO: 1659795 - RNA, 20 nt, Human
auuaaccacuucagcugacu

SEQ ID NO: 1659796 - RNA, 13 nt, Human
auuaacauguuaa

SEQ ID NO: 1659797 - RNA, 14 nt, Human
auuaacauguuaaa

SEQ ID NO: 1659798 - RNA, 15 nt, Human
auuaacauguuaaac

SEQ ID NO: 1659799 - RNA, 17 nt, Human
auuaacauguuaaacca

SEQ ID NO: 1659800 - RNA, 19 nt, Human
auuaacauguuaaaccaug

SEQ ID NO: 1659801 - RNA, 17 nt, Human
auuaaccacuucagcug

SEQ ID NO: 1659802 - RNA, 16 nt, Human
auuaaaagaauauuuu

SEQ ID NO: 1659803 - RNA, 17 nt, Human
auguuuuucuucucccu

SEQ ID NO: 1659804 - RNA, 18 nt, Human
auguuuuucuucucccuc

SEQ ID NO: 1659805 - RNA, 18 nt, Human
auguuucaaacauauaua

SEQ ID NO: 1659806 - RNA, 14 nt, Human
auguuuuccaugag

SEQ ID NO: 1659807 - RNA, 21 nt, Human
auguuucaaacauauauaaca

SEQ ID NO: 1659808 - RNA, 15 nt, Human
auguaucaaugagua

SEQ ID NO: 1659809 - RNA, 22 nt, Human
uuugggggaaaauuuagaaaua

SEQ ID NO: 1659810 - RNA, 15 nt, Human
auguaucugagcagg

SEQ ID NO: 1659811 - RNA, 12 nt, Human
auguauguguaa

SEQ ID NO: 1659812 - RNA, 15 nt, Human
auguauguguaagua

SEQ ID NO: 1659813 - RNA, 21 nt, Human
augucagugugacugaucucu

SEQ ID NO: 1659814 - RNA, 15 nt, Human
augucagugugacug

SEQ ID NO: 1659815 - RNA, 16 nt, Human
augucagugugacuga

SEQ ID NO: 1659816 - RNA, 19 nt, Human
auguccaagaagcccagga

SEQ ID NO: 1659817 - RNA, 18 nt, Human
auguccaagaagcccagg

SEQ ID NO: 1659818 - RNA, 23 nt, Human
auguccaagaagcccaggaaagg

SEQ ID NO: 1659819 - RNA, 22 nt, Human
augucuauaaaccgaacugaug

SEQ ID NO: 1659820 - RNA, 24 nt, Human
augucccuaccgagucucuucucc

SEQ ID NO: 1659821 - RNA, 20 nt, Human
augucccaacuuguaaaaau

SEQ ID NO: 1659822 - RNA, 16 nt, Human
auguccacugguucuu

SEQ ID NO: 1659823 - RNA, 11 nt, Human
uuugcucaugg

SEQ ID NO: 1659824 - RNA, 12 nt, Human
uuugcucaugga

SEQ ID NO: 1659825 - RNA, 15 nt, Human
auggcuauaggugcu

SEQ ID NO: 1659826 - RNA, 14 nt, Human
uuuggggauauuuu

SEQ ID NO: 1659827 - RNA, 22 nt, Human
uuugggaggccaaggugggagg

SEQ ID NO: 1659828 - RNA, 13 nt, Human
uuugcucauggaa

SEQ ID NO: 1659829 - RNA, 16 nt, Human
uuuuaaaacacuucca

SEQ ID NO: 1659830 - RNA, 22 nt, Human
uuuuaaaacacuuccauaaucu

SEQ ID NO: 1659831 - RNA, 14 nt, Human
uuuuaaaagaauga

SEQ ID NO: 1659832 - RNA, 15 nt, Human
uuuuaaaagaaugau

SEQ ID NO: 1659833 - RNA, 18 nt, Human
uuuguuugaacugauaaa

SEQ ID NO: 1659834 - RNA, 13 nt, Human
uuuuaaaaaagaa

SEQ ID NO: 1659835 - RNA, 20 nt, Human
uuuuaaggguuuguggaaaa

SEQ ID NO: 1659836 - RNA, 23 nt, Human
uuuuaaggguuuguggaaaauga

SEQ ID NO: 1659837 - RNA, 16 nt, Human
uuuuaaguaaggaauu

SEQ ID NO: 1659838 - RNA, 15 nt, Human
uuuuaagugcugcau

SEQ ID NO: 1659839 - RNA, 16 nt, Human
uuuuaagaggcagggu

SEQ ID NO: 1659840 - RNA, 15 nt, Human
uuuuaagaggcaggg

SEQ ID NO: 1659841 - RNA, 13 nt, Human
uuuguaaauuguc

SEQ ID NO: 1659842 - RNA, 13 nt, Human
uuuguagagccag

SEQ ID NO: 1659843 - RNA, 14 nt, Human
uuuguuugaacuga

SEQ ID NO: 1659844 - RNA, 13 nt, Human
uuuguuugaacug

SEQ ID NO: 1659845 - RNA, 18 nt, Human
uuuguuucuguacuuuuu

SEQ ID NO: 1659846 - RNA, 12 nt, Human
uuuguuugaacu

SEQ ID NO: 1659847 - RNA, 12 nt, Human
uuuguuucugua

SEQ ID NO: 1659848 - RNA, 13 nt, Human
uuuguuucuguac

SEQ ID NO: 1659849 - RNA, 15 nt, Human
uuugugauacaaugc

SEQ ID NO: 1659850 - RNA, 18 nt, Human
uuugugaggaagccgcug

SEQ ID NO: 1659851 - RNA, 19 nt, Human
uuugugaggaagccgcugg

SEQ ID NO: 1659852 - RNA, 15 nt, Human
uuugucuacaccauu

SEQ ID NO: 1659853 - RNA, 16 nt, Human
uuugugagcaggcugu

SEQ ID NO: 1659854 - RNA, 17 nt, Human
uuuguagaagucacauu

SEQ ID NO: 1659855 - RNA, 12 nt, Human
auaauacaccac

SEQ ID NO: 1659856 - RNA, 23 nt, Human
auaauaaauucccuggccuuuca

SEQ ID NO: 1659857 - RNA, 20 nt, Human
auaauacaccacuacauucu

SEQ ID NO: 1659858 - RNA, 18 nt, Human
auaauacaccacuacauu

SEQ ID NO: 1659859 - RNA, 19 nt, Human
auaauacuugcuuuggaaa

SEQ ID NO: 1659860 - RNA, 21 nt, Human
auaauacaccacuacauucug

SEQ ID NO: 1659861 - RNA, 14 nt, Human
uuagacagucccug

SEQ ID NO: 1659862 - RNA, 20 nt, Human
auaaugcgugcauaccacuu

SEQ ID NO: 1659863 - RNA, 15 nt, Human
auaaugcgugcauac

SEQ ID NO: 1659864 - RNA, 15 nt, Human
auaaugaaugaaaca

SEQ ID NO: 1659865 - RNA, 22 nt, Human
auaauugacaggauuauuggaa

SEQ ID NO: 1659866 - RNA, 18 nt, Human
auaaucuggacuccucug

SEQ ID NO: 1659867 - RNA, 19 nt, Human
auaaucuggacuccucugu

SEQ ID NO: 1659868 - RNA, 20 nt, Human
auaaucuggacuccucuguc

SEQ ID NO: 1659869 - RNA, 22 nt, Human
auaaucuggacuccucugucca

SEQ ID NO: 1659870 - RNA, 18 nt, Human
auaauccuaaacauauga

SEQ ID NO: 1659871 - RNA, 14 nt, Human
uuagcggagacgga

SEQ ID NO: 1659872 - RNA, 18 nt, Human
uuagccaagugugguaga

SEQ ID NO: 1659873 - RNA, 18 nt, Human
auaauuuaccugaagucu

SEQ ID NO: 1659874 - RNA, 12 nt, Human
uuagcaccaggg

SEQ ID NO: 1659875 - RNA, 18 nt, Human
uuagcaaauucuguuuuu

SEQ ID NO: 1659876 - RNA, 15 nt, Human
uuaguuucuccaagc

SEQ ID NO: 1659877 - RNA, 22 nt, Human
uuaguuugcaguuacacuaaaa

SEQ ID NO: 1659878 - RNA, 16 nt, Human
uuaggugugacugaau

SEQ ID NO: 1659879 - RNA, 16 nt, Human
uuaggugaggaagcaa

SEQ ID NO: 1659880 - RNA, 21 nt, Human
uuaggugugacugaauuucuu

SEQ ID NO: 1659881 - RNA, 20 nt, Human
uuagggaaggauacaaaagc

SEQ ID NO: 1659882 - RNA, 14 nt, Human
uuagggagagaaga

SEQ ID NO: 1659883 - RNA, 23 nt, Human
uuacucuucaguuaagccuuugg

SEQ ID NO: 1659884 - RNA, 17 nt, Human
uuagaaauugcauuucc

SEQ ID NO: 1659885 - RNA, 13 nt, Human
uuagacagagucu

SEQ ID NO: 1659886 - RNA, 20 nt, Human
uuagacagagucucacuguu

SEQ ID NO: 1659887 - RNA, 13 nt, Human
uuagacagucccu

SEQ ID NO: 1659888 - RNA, 13 nt, Human
uuaccuuugacaa

SEQ ID NO: 1659889 - RNA, 20 nt, Human
uuaccuuugacaaagguaaa

SEQ ID NO: 1659890 - RNA, 19 nt, Human
uuacccucauguucuuaau

SEQ ID NO: 1659891 - RNA, 16 nt, Human
uuacaggcuccugcca

SEQ ID NO: 1659892 - RNA, 18 nt, Human
uuacaggcuccugccacc

SEQ ID NO: 1659893 - RNA, 24 nt, Human
uuacaggcgugagccaccgugccu

SEQ ID NO: 1659894 - RNA, 11 nt, Human
auaaauuauuu

SEQ ID NO: 1659895 - RNA, 14 nt, Human
auaaaucgcuuuug

SEQ ID NO: 1659896 - RNA, 21 nt, Human
auaaauucccuggccuuucau

SEQ ID NO: 1659897 - RNA, 22 nt, Human
auaaauucccuggccuuucaua

SEQ ID NO: 1659898 - RNA, 14 nt, Human
auaacguauaaaag

SEQ ID NO: 1659899 - RNA, 22 nt, Human
auaacgauaaaagacagugaaa

SEQ ID NO: 1659900 - RNA, 16 nt, Human
auaacuaaaagguaug

SEQ ID NO: 1659901 - RNA, 18 nt, Human
auaacuguuauuuauaau

SEQ ID NO: 1659902 - RNA, 20 nt, Human
auaacuguuauuuauaauca

SEQ ID NO: 1659903 - RNA, 22 nt, Human
auaacuguuauuuauaaucacu

SEQ ID NO: 1659904 - RNA, 15 nt, Human
auaaagguucaugca

SEQ ID NO: 1659905 - RNA, 17 nt, Human
auaaagguucaugcaaa

SEQ ID NO: 1659906 - RNA, 13 nt, Human
auaaauaaaaaua

SEQ ID NO: 1659907 - RNA, 22 nt, Human
auaaauagcuagacuggugacu

SEQ ID NO: 1659908 - RNA, 14 nt, Human
auaaauaaaaauaa

SEQ ID NO: 1659909 - RNA, 15 nt, Human
auaaauaguuuauga

SEQ ID NO: 1659910 - RNA, 13 nt, Human
auaaaagccuguu

SEQ ID NO: 1659911 - RNA, 18 nt, Human
auaaaagccuguuuaaga

SEQ ID NO: 1659912 - RNA, 12 nt, Human
auaaaauaauuu

SEQ ID NO: 1659913 - RNA, 21 nt, Human
uuaagaaaaaggaugcacaga

SEQ ID NO: 1659914 - RNA, 20 nt, Human
uuaagaaaaaggaugcacag

SEQ ID NO: 1659915 - RNA, 15 nt, Human
auaaaauaauuuuua

SEQ ID NO: 1659916 - RNA, 23 nt, Human
aguuuuuauggcuuuugugcauu

SEQ ID NO: 1659917 - RNA, 15 nt, Human
aguuuugguugcuuu

SEQ ID NO: 1659918 - RNA, 21 nt, Human
aguuuugguugcuuuaauauc

SEQ ID NO: 1659919 - RNA, 22 nt, Human
aguuuugguugcuuuaauauca

SEQ ID NO: 1659920 - RNA, 19 nt, Human
aguuuucugagaaagacua

SEQ ID NO: 1659921 - RNA, 23 nt, Human
aguuuucugagaaagacuauuca

SEQ ID NO: 1659922 - RNA, 22 nt, Human
uuaaucugguuuauuuuuguuc

SEQ ID NO: 1659923 - RNA, 18 nt, Human
uuaaugaaagacuguaca

SEQ ID NO: 1659924 - RNA, 19 nt, Human
uuaaugaaagacuguacaa

SEQ ID NO: 1659925 - RNA, 22 nt, Human
uuaauauuuauaggucacuuug

SEQ ID NO: 1659926 - RNA, 13 nt, Human
uuaaucauuaggu

SEQ ID NO: 1659927 - RNA, 21 nt, Human
uuaaucugggccagaauuuca

SEQ ID NO: 1659928 - RNA, 23 nt, Human
uuaaucauuaggugugacugaau

SEQ ID NO: 1659929 - RNA, 22 nt, Human
uuaaucauuaggugugacugaa

SEQ ID NO: 1659930 - RNA, 9 nt, Human
uuaaggugg

SEQ ID NO: 1659931 - RNA, 22 nt, Human
uuaagaaagacuaucuaaaugu

SEQ ID NO: 1659932 - RNA, 20 nt, Human
uuaagaagacugcauuauau

SEQ ID NO: 1659933 - RNA, 19 nt, Human
uuaagugcugcauuuaaaa

SEQ ID NO: 1659934 - RNA, 16 nt, Human
uuaagugcugcauuua

SEQ ID NO: 1659935 - RNA, 15 nt, Human
uuaagugcugcauuu

SEQ ID NO: 1659936 - RNA, 14 nt, Human
uuaagucuguuuua

SEQ ID NO: 1659937 - RNA, 15 nt, Human
uuaagucuguuuuau

SEQ ID NO: 1659938 - RNA, 17 nt, Human
uuaagucuguuuuauga

SEQ ID NO: 1659939 - RNA, 20 nt, Human
uuaacagaaauguacagcaa

SEQ ID NO: 1659940 - RNA, 19 nt, Human
uuaacagaaauguacagca

SEQ ID NO: 1659941 - RNA, 18 nt, Human
uuaaauaaugugaaacug

SEQ ID NO: 1659942 - RNA, 16 nt, Human
uuaaauaaugugaaac

SEQ ID NO: 1659943 - RNA, 19 nt, Human
uuaaauaaugugaaacugg

SEQ ID NO: 1659944 - RNA, 17 nt, Human
uuaaaaaucucaaauuu

SEQ ID NO: 1659945 - RNA, 16 nt, Human
uuaaaaaucucaaauu

SEQ ID NO: 1659946 - RNA, 15 nt, Human
uuaaaaaucucaaau

SEQ ID NO: 1659947 - RNA, 14 nt, Human
uuaaaaaucucaaa

SEQ ID NO: 1659948 - RNA, 15 nt, Human
uuaaauaaugugaaa

SEQ ID NO: 1659949 - RNA, 18 nt, Human
uuaaacauugguucuugu

SEQ ID NO: 1659950 - RNA, 17 nt, Human
aguuggguggaugccug

SEQ ID NO: 1659951 - RNA, 19 nt, Human
aguugggcuuccucauagu

SEQ ID NO: 1659952 - RNA, 13 nt, Human
aguugggcuuccu

SEQ ID NO: 1659953 - RNA, 11 nt, Human
aguugccuaaa

SEQ ID NO: 1659954 - RNA, 15 nt, Human
aguugccuaaaucca

SEQ ID NO: 1659955 - RNA, 16 nt, Human
aguugccuaaauccau

SEQ ID NO: 1659956 - RNA, 17 nt, Human
aguugccuaaauccauu

SEQ ID NO: 1659957 - RNA, 19 nt, Human
aguugccuaaauccauuug

SEQ ID NO: 1659958 - RNA, 23 nt, Human
aguugccagucaccccggccacc

SEQ ID NO: 1659959 - RNA, 13 nt, Human
uguuucaaacaua

SEQ ID NO: 1659960 - RNA, 13 nt, Human
uuaaaaaaaaucc

SEQ ID NO: 1659961 - RNA, 17 nt, Human
aguuggucccccuucca

SEQ ID NO: 1659962 - RNA, 11 nt, Human
aguuggucccc

SEQ ID NO: 1659963 - RNA, 13 nt, Human
aguuggucccccu

SEQ ID NO: 1659964 - RNA, 14 nt, Human
aguuuaaauuguaa

SEQ ID NO: 1659965 - RNA, 18 nt, Human
uguucuagcauggcugcc

SEQ ID NO: 1659966 - RNA, 18 nt, Human
uguucuuaguuugcaguu

SEQ ID NO: 1659967 - RNA, 18 nt, Human
uguuauuuauaaucacuu

SEQ ID NO: 1659968 - RNA, 21 nt, Human
uguuauuuauaaucacuuuuu

SEQ ID NO: 1659969 - RNA, 21 nt, Human
aguguucauaaauaaaguuug

SEQ ID NO: 1659970 - RNA, 20 nt, Human
uguucuugguuuguaaauua

SEQ ID NO: 1659971 - RNA, 22 nt, Human
uguucuugguuuguaaauuaac

SEQ ID NO: 1659972 - RNA, 19 nt, Human
uguucuuucacccuuuucu

SEQ ID NO: 1659973 - RNA, 13 nt, Human
uguugcccaggcu

SEQ ID NO: 1659974 - RNA, 15 nt, Human
uguugcccaggcugg

SEQ ID NO: 1659975 - RNA, 21 nt, Human
aguuacucuucaguuaagccu

SEQ ID NO: 1659976 - RNA, 23 nt, Human
aguguuggagaagaacugaaauc

SEQ ID NO: 1659977 - RNA, 17 nt, Human
aguguuggagaagaacu

SEQ ID NO: 1659978 - RNA, 18 nt, Human
aguguuggagaagaacug

SEQ ID NO: 1659979 - RNA, 21 nt, Human
aguguugaaacggaugauuuc

SEQ ID NO: 1659980 - RNA, 14 nt, Human
aguguuggagaaga

SEQ ID NO: 1659981 - RNA, 16 nt, Human
aguguuggagaagaac

SEQ ID NO: 1659982 - RNA, 16 nt, Human
aguucaauucucauuu

SEQ ID NO: 1659983 - RNA, 15 nt, Human
aguucccuacuuccu

SEQ ID NO: 1659984 - RNA, 23 nt, Human
aguuccucauuagcauuuugcua

SEQ ID NO: 1659985 - RNA, 22 nt, Human
aguucacucuccauuuaauaau

SEQ ID NO: 1659986 - RNA, 24 nt, Human
aguucacucuccauuuaauaauua

SEQ ID NO: 1659987 - RNA, 12 nt, Human
aguucucuccuu

SEQ ID NO: 1659988 - RNA, 19 nt, Human
aguucggugagcuacaaau

SEQ ID NO: 1659989 - RNA, 20 nt, Human
aguucggugagcuacaaaug

SEQ ID NO: 1659990 - RNA, 13 nt, Human
uguuuagucuugu

SEQ ID NO: 1659991 - RNA, 17 nt, Human
uguuuagucuugucuca

SEQ ID NO: 1659992 - RNA, 18 nt, Human
uguuuagucuugucucag

SEQ ID NO: 1659993 - RNA, 19 nt, Human
uguuuagucuugucucaga

SEQ ID NO: 1659994 - RNA, 20 nt, Human
uguuuagucuugucucagau

SEQ ID NO: 1659995 - RNA, 13 nt, Human
uguuuaguaauca

SEQ ID NO: 1659996 - RNA, 14 nt, Human
uguuuaguaaucau

SEQ ID NO: 1659997 - RNA, 17 nt, Human
uguuuaguaaucauauu

SEQ ID NO: 1659998 - RNA, 14 nt, Human
uguuuauugucaaa

SEQ ID NO: 1659999 - RNA, 17 nt, Human
uguuuauugucaaagug

SEQ ID NO: 1660000 - RNA, 13 nt, Human
uguugucugcaac

SEQ ID NO: 1660001 - RNA, 16 nt, Human
uguugucugcaacucu

SEQ ID NO: 1660002 - RNA, 16 nt, Human
ugugcucuggacaggc

SEQ ID NO: 1660003 - RNA, 18 nt, Human
ugugcucuggacaggcau

SEQ ID NO: 1660004 - RNA, 19 nt, Human
ugugcucuggacaggcaug

SEQ ID NO: 1660005 - RNA, 13 nt, Human
ugugcugcccugc

SEQ ID NO: 1660006 - RNA, 14 nt, Human
ugugcugcccugcc

SEQ ID NO: 1660007 - RNA, 15 nt, Human
ugugcugcccugccc

SEQ ID NO: 1660008 - RNA, 23 nt, Human
uguggcaaaauguuacagaaucu

SEQ ID NO: 1660009 - RNA, 21 nt, Human
agucucacuguugcccaggcu

SEQ ID NO: 1660010 - RNA, 20 nt, Human
agucucacuguugcccaggc

SEQ ID NO: 1660011 - RNA, 18 nt, Human
agucucacuguugcccag

SEQ ID NO: 1660012 - RNA, 19 nt, Human
agucucacuguugcccagg

SEQ ID NO: 1660013 - RNA, 21 nt, Human
ugugcccuaaaguguauuuuu

SEQ ID NO: 1660014 - RNA, 20 nt, Human
ugugcccuaaaguguauuuu

SEQ ID NO: 1660015 - RNA, 12 nt, Human
ugugccucugcc

SEQ ID NO: 1660016 - RNA, 13 nt, Human
ugugccucugccu

SEQ ID NO: 1660017 - RNA, 22 nt, Human
ugugcucugaucauccacugug

SEQ ID NO: 1660018 - RNA, 23 nt, Human
ugugcucugaucauccacugugc

SEQ ID NO: 1660019 - RNA, 15 nt, Human
ugugcucuggacagg

SEQ ID NO: 1660020 - RNA, 16 nt, Human
agugcaucucagccca

SEQ ID NO: 1660021 - RNA, 17 nt, Human
agugcaucucagcccac

SEQ ID NO: 1660022 - RNA, 15 nt, Human
agugcaucucagccc

SEQ ID NO: 1660023 - RNA, 14 nt, Human
agugcaucucagcc

SEQ ID NO: 1660024 - RNA, 14 nt, Human
agugcacuaaugug

SEQ ID NO: 1660025 - RNA, 16 nt, Human
agugccaaaaacaaca

SEQ ID NO: 1660026 - RNA, 14 nt, Human
agugcaugcugucc

SEQ ID NO: 1660027 - RNA, 14 nt, Human
agugcccacaggau

SEQ ID NO: 1660028 - RNA, 16 nt, Human
agugagucgaggacag

SEQ ID NO: 1660029 - RNA, 22 nt, Human
agugauucuccugccucagccu

SEQ ID NO: 1660030 - RNA, 24 nt, Human
agugauucuccugccucagccucc

SEQ ID NO: 1660031 - RNA, 22 nt, Human
agugcaaauugucacaggacag

SEQ ID NO: 1660032 - RNA, 18 nt, Human
agugcaaauugucacagg

SEQ ID NO: 1660033 - RNA, 21 nt, Human
agugcaaauugucacaggaca

SEQ ID NO: 1660034 - RNA, 16 nt, Human
uguggugacuuuggau

SEQ ID NO: 1660035 - RNA, 17 nt, Human
uguggugacuuuggaua

SEQ ID NO: 1660036 - RNA, 12 nt, Human
ugugguuucauu

SEQ ID NO: 1660037 - RNA, 16 nt, Human
agugcuuccaaggaug

SEQ ID NO: 1660038 - RNA, 20 nt, Human
agugcugggauuacaagcgu

SEQ ID NO: 1660039 - RNA, 22 nt, Human
agugcugcauuuaaaagauaca

SEQ ID NO: 1660040 - RNA, 20 nt, Human
agugcugggauuacaggcgu

SEQ ID NO: 1660041 - RNA, 19 nt, Human
agugcugggauuacaggug

SEQ ID NO: 1660042 - RNA, 20 nt, Human
agugcugcauuuaaaagaua

SEQ ID NO: 1660043 - RNA, 17 nt, Human
agugccuuacacaaugg

SEQ ID NO: 1660044 - RNA, 15 nt, Human
agugccuuacacaau

SEQ ID NO: 1660045 - RNA, 21 nt, Human
agugccuguaaucacagcuac

SEQ ID NO: 1660046 - RNA, 14 nt, Human
uguguuaugaagca

SEQ ID NO: 1660047 - RNA, 20 nt, Human
ugugucagguggggcagcuu

SEQ ID NO: 1660048 - RNA, 17 nt, Human
ugugucagguggggcag

SEQ ID NO: 1660049 - RNA, 19 nt, Human
ugugucagguggggcagcu

SEQ ID NO: 1660050 - RNA, 13 nt, Human
ugugucucuuggu

SEQ ID NO: 1660051 - RNA, 16 nt, Human
ugugucucuugguccu

SEQ ID NO: 1660052 - RNA, 11 nt, Human
aguggaaaaau

SEQ ID NO: 1660053 - RNA, 18 nt, Human
aguggaaaaauagccugc

SEQ ID NO: 1660054 - RNA, 19 nt, Human
aguggaaaaauagccugcc

SEQ ID NO: 1660055 - RNA, 19 nt, Human
uguuaaugauagcuacugu

SEQ ID NO: 1660056 - RNA, 21 nt, Human
uguuaacauggacaugaucuu

SEQ ID NO: 1660057 - RNA, 22 nt, Human
aguccaggcuuuuuuaucaugu

SEQ ID NO: 1660058 - RNA, 19 nt, Human
agucagggguucccuuuuu

SEQ ID NO: 1660059 - RNA, 12 nt, Human
agucccugccaa

SEQ ID NO: 1660060 - RNA, 16 nt, Human
agucucacuguugccc

SEQ ID NO: 1660061 - RNA, 17 nt, Human
agucucacuguugccca

SEQ ID NO: 1660062 - RNA, 23 nt, Human
aguccgaaagggacuuggaagcu

SEQ ID NO: 1660063 - RNA, 13 nt, Human
uguccgagcuuug

SEQ ID NO: 1660064 - RNA, 14 nt, Human
uguccgagcuuuga

SEQ ID NO: 1660065 - RNA, 15 nt, Human
ugucgcccaggcugg

SEQ ID NO: 1660066 - RNA, 16 nt, Human
ugucgcccaggcugga

SEQ ID NO: 1660067 - RNA, 16 nt, Human
uguccuacccacccuc

SEQ ID NO: 1660068 - RNA, 13 nt, Human
ugucgccucugca

SEQ ID NO: 1660069 - RNA, 12 nt, Human
ugucgggcauga

SEQ ID NO: 1660070 - RNA, 14 nt, Human
ugucgcccagucug

SEQ ID NO: 1660071 - RNA, 15 nt, Human
ugucgcccagucugg

SEQ ID NO: 1660072 - RNA, 14 nt, Human
ugucgggcaugaca

SEQ ID NO: 1660073 - RNA, 15 nt, Human
ugucgggcaugacac

SEQ ID NO: 1660074 - RNA, 16 nt, Human
agucagacagaugugg

SEQ ID NO: 1660075 - RNA, 16 nt, Human
agucaggaaagagaac

SEQ ID NO: 1660076 - RNA, 15 nt, Human
agucaggaaagagaa

SEQ ID NO: 1660077 - RNA, 17 nt, Human
aguaggaagacuuugga

SEQ ID NO: 1660078 - RNA, 18 nt, Human
aguaggaagacuuuggaa

SEQ ID NO: 1660079 - RNA, 19 nt, Human
aguaggaagacuuuggaaa

SEQ ID NO: 1660080 - RNA, 22 nt, Human
aguaggaagacuuuggaaagac

SEQ ID NO: 1660081 - RNA, 16 nt, Human
aguaggaagacuuugg

SEQ ID NO: 1660082 - RNA, 20 nt, Human
ugucaaucagccuaguugau

SEQ ID NO: 1660083 - RNA, 14 nt, Human
uguauuuuuuuacu

SEQ ID NO: 1660084 - RNA, 16 nt, Human
uguauuuuuuuacuaa

SEQ ID NO: 1660085 - RNA, 19 nt, Human
ugucaagagggucugagga

SEQ ID NO: 1660086 - RNA, 15 nt, Human
ugucaagccauaauu

SEQ ID NO: 1660087 - RNA, 21 nt, Human
ugucaauaaaauccauacauu

SEQ ID NO: 1660088 - RNA, 19 nt, Human
agucacugagacagcccgg

SEQ ID NO: 1660089 - RNA, 13 nt, Human
agucacugcacag

SEQ ID NO: 1660090 - RNA, 16 nt, Human
ugucagcugaaccugg

SEQ ID NO: 1660091 - RNA, 19 nt, Human
ugucagcugaaccugggua

SEQ ID NO: 1660092 - RNA, 16 nt, Human
ugucagguggggcagc

SEQ ID NO: 1660093 - RNA, 23 nt, Human
ugucauuugcuggagcucugccc

SEQ ID NO: 1660094 - RNA, 19 nt, Human
agucacauuccugaacagg

SEQ ID NO: 1660095 - RNA, 18 nt, Human
agucacauuccugaacag

SEQ ID NO: 1660096 - RNA, 20 nt, Human
agucacauuccugaacagga

SEQ ID NO: 1660097 - RNA, 13 nt, Human
agucaccaagccc

SEQ ID NO: 1660098 - RNA, 14 nt, Human
agucaccaagccca

SEQ ID NO: 1660099 - RNA, 22 nt, Human
aguauuucuaugaaauauuaug

SEQ ID NO: 1660100 - RNA, 13 nt, Human
aguauuucuauga

SEQ ID NO: 1660101 - RNA, 15 nt, Human
aguauuucuaugaaa

SEQ ID NO: 1660102 - RNA, 13 nt, Human
uguaaaucccauu

SEQ ID NO: 1660103 - RNA, 16 nt, Human
uguaaaucccauuauu

SEQ ID NO: 1660104 - RNA, 18 nt, Human
uguaaaucccauuauuca

SEQ ID NO: 1660105 - RNA, 10 nt, Human
aggucccuaa

SEQ ID NO: 1660106 - RNA, 23 nt, Human
aggucuugaacuccuggccucaa

SEQ ID NO: 1660107 - RNA, 19 nt, Human
uguaaaucccauuauucaa

SEQ ID NO: 1660108 - RNA, 20 nt, Human
uguaaaucccauuauucaaa

SEQ ID NO: 1660109 - RNA, 22 nt, Human
uguaaaucccauuauucaaagu

SEQ ID NO: 1660110 - RNA, 15 nt, Human
aggugcacaagcucc

SEQ ID NO: 1660111 - RNA, 16 nt, Human
aggugcacaagcucca

SEQ ID NO: 1660112 - RNA, 17 nt, Human
aggugcacaagcuccaa

SEQ ID NO: 1660113 - RNA, 18 nt, Human
aggugcacaagcuccaag

SEQ ID NO: 1660114 - RNA, 20 nt, Human
aggugcacaagcuccaagcu

SEQ ID NO: 1660115 - RNA, 20 nt, Human
aggugggauccuccaggugc

SEQ ID NO: 1660116 - RNA, 17 nt, Human
agguggccacuccagac

SEQ ID NO: 1660117 - RNA, 14 nt, Human
agguggccacucca

SEQ ID NO: 1660118 - RNA, 21 nt, Human
aggugcacaagcuccaagcuc

SEQ ID NO: 1660119 - RNA, 14 nt, Human
uguaauuauaucug

SEQ ID NO: 1660120 - RNA, 15 nt, Human
uguaauuauaucuga

SEQ ID NO: 1660121 - RNA, 13 nt, Human
uguaauuauaucu

SEQ ID NO: 1660122 - RNA, 15 nt, Human
uguaaguaaacgguc

SEQ ID NO: 1660123 - RNA, 17 nt, Human
uguaacuuucugaaaua

SEQ ID NO: 1660124 - RNA, 14 nt, Human
agguuggugggggc

SEQ ID NO: 1660125 - RNA, 17 nt, Human
uguaagaaaauaucacu

SEQ ID NO: 1660126 - RNA, 17 nt, Human
aggugguuauggagagg

SEQ ID NO: 1660127 - RNA, 14 nt, Human
agguugcagugagc

SEQ ID NO: 1660128 - RNA, 23 nt, Human
aguaaggaauuuuauuuuuuucu

SEQ ID NO: 1660129 - RNA, 20 nt, Human
aguaauaugcacacauuuuu

SEQ ID NO: 1660130 - RNA, 19 nt, Human
aguaauaugcacacauuuu

SEQ ID NO: 1660131 - RNA, 18 nt, Human
aguaauaugcacacauuu

SEQ ID NO: 1660132 - RNA, 11 nt, Human
agguuuuccug

SEQ ID NO: 1660133 - RNA, 15 nt, Human
aguaaaaauaaaauu

SEQ ID NO: 1660134 - RNA, 12 nt, Human
aguaaaaauaaa

SEQ ID NO: 1660135 - RNA, 14 nt, Human
agguuuuuaagccu

SEQ ID NO: 1660136 - RNA, 15 nt, Human
aguaaaaccacagca

SEQ ID NO: 1660137 - RNA, 14 nt, Human
uguaauuugugaua

SEQ ID NO: 1660138 - RNA, 12 nt, Human
uguacuuuuugg

SEQ ID NO: 1660139 - RNA, 15 nt, Human
uguacuuuuuggcau

SEQ ID NO: 1660140 - RNA, 16 nt, Human
uguacuuuuuggcaua

SEQ ID NO: 1660141 - RNA, 13 nt, Human
uguagagugggag

SEQ ID NO: 1660142 - RNA, 14 nt, Human
uguagagugggagc

SEQ ID NO: 1660143 - RNA, 17 nt, Human
uguacuuuuuggcauaa

SEQ ID NO: 1660144 - RNA, 18 nt, Human
uguagaggagaaacugga

SEQ ID NO: 1660145 - RNA, 15 nt, Human
aguaauccaagcaaa

SEQ ID NO: 1660146 - RNA, 21 nt, Human
aguaauccaagcaaaugugaa

SEQ ID NO: 1660147 - RNA, 19 nt, Human
aguacuuuuggcauuuuac

SEQ ID NO: 1660148 - RNA, 14 nt, Human
aguacacuguuuca

SEQ ID NO: 1660149 - RNA, 20 nt, Human
aguacacuguuucaaacuuu

SEQ ID NO: 1660150 - RNA, 16 nt, Human
aguacacuguuucaaa

SEQ ID NO: 1660151 - RNA, 20 nt, Human
uguaggaagguuaauguuca

SEQ ID NO: 1660152 - RNA, 19 nt, Human
aguagauaggccaugggca

SEQ ID NO: 1660153 - RNA, 17 nt, Human
aguagaagucuuagaug

SEQ ID NO: 1660154 - RNA, 12 nt, Human
aguagagacagg

SEQ ID NO: 1660155 - RNA, 14 nt, Human
uggggaaugaagau

SEQ ID NO: 1660156 - RNA, 15 nt, Human
uggggaaugaagaua

SEQ ID NO: 1660157 - RNA, 23 nt, Human
ugggcuggguucuacccaggugc

SEQ ID NO: 1660158 - RNA, 18 nt, Human
ugggcuggguucuaccca

SEQ ID NO: 1660159 - RNA, 19 nt, Human
ugggcuggguucuacccag

SEQ ID NO: 1660160 - RNA, 13 nt, Human
uggggaccucagg

SEQ ID NO: 1660161 - RNA, 17 nt, Human
uggggaccagagcugcc

SEQ ID NO: 1660162 - RNA, 18 nt, Human
uggggaccagagcugcca

SEQ ID NO: 1660163 - RNA, 17 nt, Human
uggggacagagcagaac

SEQ ID NO: 1660164 - RNA, 14 nt, Human
uggggaccagagcu

SEQ ID NO: 1660165 - RNA, 15 nt, Human
uggggaccagagcug

SEQ ID NO: 1660166 - RNA, 17 nt, Human
ugggcugcccuggugcu

SEQ ID NO: 1660167 - RNA, 19 nt, Human
ugggcugcccuggugcugc

SEQ ID NO: 1660168 - RNA, 20 nt, Human
ugggcugcccuggugcugcc

SEQ ID NO: 1660169 - RNA, 21 nt, Human
ugggcugcccuggugcugcca

SEQ ID NO: 1660170 - RNA, 20 nt, Human
ugggcucccuucccaccucu

SEQ ID NO: 1660171 - RNA, 21 nt, Human
ugggcucccuucccaccucuc

SEQ ID NO: 1660172 - RNA, 17 nt, Human
ugggcugaacacuccaa

SEQ ID NO: 1660173 - RNA, 19 nt, Human
ugggcugaacacuccaauu

SEQ ID NO: 1660174 - RNA, 23 nt, Human
agggcuucugccauuucugagau

SEQ ID NO: 1660175 - RNA, 18 nt, Human
ugggcucccuucccaccu

SEQ ID NO: 1660176 - RNA, 19 nt, Human
ugggcucccuucccaccuc

SEQ ID NO: 1660177 - RNA, 14 nt, Human
uggggcccugccuc

SEQ ID NO: 1660178 - RNA, 12 nt, Human
uggggagaaagu

SEQ ID NO: 1660179 - RNA, 23 nt, Human
uggggaccucaggccugggggcu

SEQ ID NO: 1660180 - RNA, 15 nt, Human
uggggcccugccucc

SEQ ID NO: 1660181 - RNA, 16 nt, Human
uggggcccugccuccu

SEQ ID NO: 1660182 - RNA, 23 nt, Human
uggggcuaggaaauccagggugg

SEQ ID NO: 1660183 - RNA, 18 nt, Human
uggggcggugagagggga

SEQ ID NO: 1660184 - RNA, 15 nt, Human
ugggguacccacugc

SEQ ID NO: 1660185 - RNA, 16 nt, Human
ugggguacccacugcu

SEQ ID NO: 1660186 - RNA, 17 nt, Human
uggggucacucuggcag

SEQ ID NO: 1660187 - RNA, 18 nt, Human
uggggucacucuggcagc

SEQ ID NO: 1660188 - RNA, 15 nt, Human
ugggguaugggagag

SEQ ID NO: 1660189 - RNA, 14 nt, Human
ugggguacccacug

SEQ ID NO: 1660190 - RNA, 22 nt, Human
uggggcugcaccggcuggccug

SEQ ID NO: 1660191 - RNA, 20 nt, Human
uggggcugcaccggcuggcc

SEQ ID NO: 1660192 - RNA, 17 nt, Human
ugggccagaauuucaaa

SEQ ID NO: 1660193 - RNA, 17 nt, Human
ugggcaacccccagccu

SEQ ID NO: 1660194 - RNA, 20 nt, Human
ugggcaacccccagccugcu

SEQ ID NO: 1660195 - RNA, 21 nt, Human
ugggcaacccccagccugcua

SEQ ID NO: 1660196 - RNA, 18 nt, Human
ugggccagaauuucaaac

SEQ ID NO: 1660197 - RNA, 13 nt, Human
ugggccaggagcc

SEQ ID NO: 1660198 - RNA, 20 nt, Human
ugggcccaaugcacuuuguu

SEQ ID NO: 1660199 - RNA, 14 nt, Human
ugggccaggagccu

SEQ ID NO: 1660200 - RNA, 16 nt, Human
ugggccaggagccucc

SEQ ID NO: 1660201 - RNA, 18 nt, Human
ugggaggucaaggcugca

SEQ ID NO: 1660202 - RNA, 19 nt, Human
ugggaggucaaggcugcag

SEQ ID NO: 1660203 - RNA, 20 nt, Human
ugggaggucaaggcugcagu

SEQ ID NO: 1660204 - RNA, 23 nt, Human
ugggaggucaaggcugcagugag

SEQ ID NO: 1660205 - RNA, 16 nt, Human
ugggcaacccccagcc

SEQ ID NO: 1660206 - RNA, 14 nt, Human
ugggaguacaaaag

SEQ ID NO: 1660207 - RNA, 17 nt, Human
agggaggugaccccagg

SEQ ID NO: 1660208 - RNA, 17 nt, Human
agggagugacagaggca

SEQ ID NO: 1660209 - RNA, 18 nt, Human
agggagugacagaggcag

SEQ ID NO: 1660210 - RNA, 19 nt, Human
agggagugacagaggcagc

SEQ ID NO: 1660211 - RNA, 15 nt, Human
agggagggcuucugc

SEQ ID NO: 1660212 - RNA, 23 nt, Human
agggcccagagaggguggugacc

SEQ ID NO: 1660213 - RNA, 17 nt, Human
agggcagggacaggaua

SEQ ID NO: 1660214 - RNA, 20 nt, Human
uggggucacucuggcagcuc

SEQ ID NO: 1660215 - RNA, 19 nt, Human
uggggucacucuggcagcu

SEQ ID NO: 1660216 - RNA, 18 nt, Human
aggggccuggcagccgug

SEQ ID NO: 1660217 - RNA, 23 nt, Human
aggggccuggcagccgugccuuc

SEQ ID NO: 1660218 - RNA, 23 nt, Human
aggggagcaaaaucgaugcagug

SEQ ID NO: 1660219 - RNA, 20 nt, Human
aggggugggacacccuguga

SEQ ID NO: 1660220 - RNA, 22 nt, Human
aggggugggacacccugugaug

SEQ ID NO: 1660221 - RNA, 15 nt, Human
aggggguggccuccc

SEQ ID NO: 1660222 - RNA, 17 nt, Human
aggggguggccucccaa

SEQ ID NO: 1660223 - RNA, 18 nt, Human
aggggguggccucccaac

SEQ ID NO: 1660224 - RNA, 24 nt, Human
agggguucccuuuuuuggcugcug

SEQ ID NO: 1660225 - RNA, 21 nt, Human
agggucucacuauguugccca

SEQ ID NO: 1660226 - RNA, 22 nt, Human
agggucucacuauguugcccag

SEQ ID NO: 1660227 - RNA, 23 nt, Human
agggucucacuauguugcccagg

SEQ ID NO: 1660228 - RNA, 22 nt, Human
agggucucacucugucgcccag

SEQ ID NO: 1660229 - RNA, 21 nt, Human
ugggucgcccuggacugugug

SEQ ID NO: 1660230 - RNA, 15 nt, Human
agggugggagugggc

SEQ ID NO: 1660231 - RNA, 22 nt, Human
ugggugcuuggaggaaggaaac

SEQ ID NO: 1660232 - RNA, 15 nt, Human
ugggugcuuggagga

SEQ ID NO: 1660233 - RNA, 19 nt, Human
ugggugcuuggaggaagga

SEQ ID NO: 1660234 - RNA, 22 nt, Human
uggucacaggacucugccuccu

SEQ ID NO: 1660235 - RNA, 23 nt, Human
uggucacaggacucugccuccuc

SEQ ID NO: 1660236 - RNA, 21 nt, Human
ugguagcuuuucccuucuuuu

SEQ ID NO: 1660237 - RNA, 20 nt, Human
ugguagcuuuucccuucuuu

SEQ ID NO: 1660238 - RNA, 16 nt, Human
ugguacuaacuuuccu

SEQ ID NO: 1660239 - RNA, 20 nt, Human
ugguaaggggaauugaggac

SEQ ID NO: 1660240 - RNA, 17 nt, Human
uggucucaaacucuuga

SEQ ID NO: 1660241 - RNA, 23 nt, Human
uggucucaaacucuugaccucag

SEQ ID NO: 1660242 - RNA, 19 nt, Human
uggucuaucuuugagcgcc

SEQ ID NO: 1660243 - RNA, 16 nt, Human
uggucucaaacucuug

SEQ ID NO: 1660244 - RNA, 16 nt, Human
uggucccaccccacac

SEQ ID NO: 1660245 - RNA, 13 nt, Human
uggucccacucag

SEQ ID NO: 1660246 - RNA, 14 nt, Human
uggucccaccccac

SEQ ID NO: 1660247 - RNA, 15 nt, Human
uggucccaccccaca

SEQ ID NO: 1660248 - RNA, 18 nt, Human
uggucaccaaaucagcug

SEQ ID NO: 1660249 - RNA, 22 nt, Human
uggucagauuugaacucuucaa

SEQ ID NO: 1660250 - RNA, 20 nt, Human
uggucaccaaaucagcugcu

SEQ ID NO: 1660251 - RNA, 15 nt, Human
uggucucgaacuccu

SEQ ID NO: 1660252 - RNA, 16 nt, Human
uggucugacccacugc

SEQ ID NO: 1660253 - RNA, 17 nt, Human
uggucugacccacugcu

SEQ ID NO: 1660254 - RNA, 18 nt, Human
uggucugacccacugcuu

SEQ ID NO: 1660255 - RNA, 22 nt, Human
aggguguccggucccuguccca

SEQ ID NO: 1660256 - RNA, 13 nt, Human
aggguuauaauaa

SEQ ID NO: 1660257 - RNA, 17 nt, Human
aggguuaugauuaagua

SEQ ID NO: 1660258 - RNA, 19 nt, Human
agguauaaguggugugugu

SEQ ID NO: 1660259 - RNA, 20 nt, Human
agguauaaguggugugugua

SEQ ID NO: 1660260 - RNA, 23 nt, Human
agguauaauucacauuguauuca

SEQ ID NO: 1660261 - RNA, 21 nt, Human
agguaugcaaucaaaucugcu

SEQ ID NO: 1660262 - RNA, 23 nt, Human
agguagaaauaucugaaaaugua

SEQ ID NO: 1660263 - RNA, 13 nt, Human
aggguugggcugg

SEQ ID NO: 1660264 - RNA, 18 nt, Human
aggguuggccccugcccg

SEQ ID NO: 1660265 - RNA, 23 nt, Human
aggguuggccccugcccggcugc

SEQ ID NO: 1660266 - RNA, 17 nt, Human
agguagaaauaucugaa

SEQ ID NO: 1660267 - RNA, 19 nt, Human
agguagaaauaucugaaaa

SEQ ID NO: 1660268 - RNA, 23 nt, Human
agguacuucaaauccuugaagau

SEQ ID NO: 1660269 - RNA, 19 nt, Human
aggucaccuuuauucuggc

SEQ ID NO: 1660270 - RNA, 18 nt, Human
aggucaccuuuauucugg

SEQ ID NO: 1660271 - RNA, 20 nt, Human
aggucauuuuuuuuaagaaa

SEQ ID NO: 1660272 - RNA, 17 nt, Human
aggucauuuuuuuuaag

SEQ ID NO: 1660273 - RNA, 12 nt, Human
aggucagagccu

SEQ ID NO: 1660274 - RNA, 23 nt, Human
uggaaggggacacgugacagccg

SEQ ID NO: 1660275 - RNA, 13 nt, Human
uggaagguauuua

SEQ ID NO: 1660276 - RNA, 17 nt, Human
uggaagguauuuaauag

SEQ ID NO: 1660277 - RNA, 18 nt, Human
uggaaguacuauaauuua

SEQ ID NO: 1660278 - RNA, 14 nt, Human
uggaaaucuuuaaa

SEQ ID NO: 1660279 - RNA, 15 nt, Human
uggaaaucuuuaaaa

SEQ ID NO: 1660280 - RNA, 17 nt, Human
uggaaaugggcagagca

SEQ ID NO: 1660281 - RNA, 18 nt, Human
uggaaaugggcagagcag

SEQ ID NO: 1660282 - RNA, 16 nt, Human
uggaagcacagcuuca

SEQ ID NO: 1660283 - RNA, 13 nt, Human
aggauccugagcc

SEQ ID NO: 1660284 - RNA, 14 nt, Human
aggauccugagcca

SEQ ID NO: 1660285 - RNA, 16 nt, Human
ugcuuugugauuuuug

SEQ ID NO: 1660286 - RNA, 14 nt, Human
ugcuuugugauuuu

SEQ ID NO: 1660287 - RNA, 12 nt, Human
ugcuuugugauu

SEQ ID NO: 1660288 - RNA, 22 nt, Human
ugcuuguacauaaugcgugcau

SEQ ID NO: 1660289 - RNA, 16 nt, Human
ugcuuguacauaaugc

SEQ ID NO: 1660290 - RNA, 14 nt, Human
ugcuuguacauaau

SEQ ID NO: 1660291 - RNA, 17 nt, Human
ugcuuugugauuuuugu

SEQ ID NO: 1660292 - RNA, 14 nt, Human
ugcuuuuggucugu

SEQ ID NO: 1660293 - RNA, 17 nt, Human
ugcuuuuggucugugug

SEQ ID NO: 1660294 - RNA, 13 nt, Human
ugcuuguacauaa

SEQ ID NO: 1660295 - RNA, 12 nt, Human
ugcuuguacaua

SEQ ID NO: 1660296 - RNA, 14 nt, Human
ugcuuggaggaagg

SEQ ID NO: 1660297 - RNA, 15 nt, Human
ugcuuggaggaagga

SEQ ID NO: 1660298 - RNA, 16 nt, Human
ugcuuggaggaaggaa

SEQ ID NO: 1660299 - RNA, 21 nt, Human
ugcuugaggcaacucaucuua

SEQ ID NO: 1660300 - RNA, 23 nt, Human
aggacagcccuucuuuccacaga

SEQ ID NO: 1660301 - RNA, 17 nt, Human
uggacuguggugacuuu

SEQ ID NO: 1660302 - RNA, 19 nt, Human
uggacuguggugacuuugg

SEQ ID NO: 1660303 - RNA, 21 nt, Human
uggacuguggugacuuuggau

SEQ ID NO: 1660304 - RNA, 22 nt, Human
uggacuguggugacuuuggaua

SEQ ID NO: 1660305 - RNA, 15 nt, Human
uggacuguggugacu

SEQ ID NO: 1660306 - RNA, 16 nt, Human
uggacuguggugacuu

SEQ ID NO: 1660307 - RNA, 20 nt, Human
uggaccuugaacuggguacu

SEQ ID NO: 1660308 - RNA, 23 nt, Human
uggacacagcucuucuccaggcu

SEQ ID NO: 1660309 - RNA, 16 nt, Human
uggacccugaggccca

SEQ ID NO: 1660310 - RNA, 18 nt, Human
uggacccugaggcccaga

SEQ ID NO: 1660311 - RNA, 19 nt, Human
uggacccugaggcccagag

SEQ ID NO: 1660312 - RNA, 20 nt, Human
uggacccugaggcccagagg

SEQ ID NO: 1660313 - RNA, 21 nt, Human
uggacccugaggcccagaggg

SEQ ID NO: 1660314 - RNA, 23 nt, Human
uggacccuguggaugauaaaaca

SEQ ID NO: 1660315 - RNA, 22 nt, Human
uggacacagcucuucuccaggc

SEQ ID NO: 1660316 - RNA, 13 nt, Human
uggacacagcucu

SEQ ID NO: 1660317 - RNA, 14 nt, Human
uggacacagcucuu

SEQ ID NO: 1660318 - RNA, 19 nt, Human
aggaucucuugagccuggg

SEQ ID NO: 1660319 - RNA, 17 nt, Human
aggaucucuugagccug

SEQ ID NO: 1660320 - RNA, 18 nt, Human
aggaucucuugagccugg

SEQ ID NO: 1660321 - RNA, 14 nt, Human
aggcaaaugacuuu

SEQ ID NO: 1660322 - RNA, 15 nt, Human
aggcaaaugacuuug

SEQ ID NO: 1660323 - RNA, 18 nt, Human
aggcaaaugacuuuggac

SEQ ID NO: 1660324 - RNA, 20 nt, Human
aggcaccuaccaccacgccc

SEQ ID NO: 1660325 - RNA, 14 nt, Human
aggcaaugcuggcu

SEQ ID NO: 1660326 - RNA, 20 nt, Human
aggcacccaccaucaugucu

SEQ ID NO: 1660327 - RNA, 21 nt, Human
aggcacccaccaucaugucug

SEQ ID NO: 1660328 - RNA, 22 nt, Human
aggcacccaccaucaugucugg

SEQ ID NO: 1660329 - RNA, 13 nt, Human
aggcaaucauggu

SEQ ID NO: 1660330 - RNA, 14 nt, Human
uggagcucguggaa

SEQ ID NO: 1660331 - RNA, 13 nt, Human
uggagaagcggcu

SEQ ID NO: 1660332 - RNA, 22 nt, Human
uggagaagcggcuggcagccca

SEQ ID NO: 1660333 - RNA, 14 nt, Human
uggagaagaacuga

SEQ ID NO: 1660334 - RNA, 15 nt, Human
uggacugugugcuca

SEQ ID NO: 1660335 - RNA, 14 nt, Human
uggagaacuagaga

SEQ ID NO: 1660336 - RNA, 13 nt, Human
uggagaagaacug

SEQ ID NO: 1660337 - RNA, 17 nt, Human
uggauuauauuaugaag

SEQ ID NO: 1660338 - RNA, 21 nt, Human
uggauuguccccgacccuugc

SEQ ID NO: 1660339 - RNA, 13 nt, Human
uggauuguccccg

SEQ ID NO: 1660340 - RNA, 15 nt, Human
uggauggaaggggcu

SEQ ID NO: 1660341 - RNA, 14 nt, Human
uggaguauauguca

SEQ ID NO: 1660342 - RNA, 16 nt, Human
aggcagccccauucug

SEQ ID NO: 1660343 - RNA, 17 nt, Human
aggcagccccauucugc

SEQ ID NO: 1660344 - RNA, 16 nt, Human
aggccaaaggaagcac

SEQ ID NO: 1660345 - RNA, 18 nt, Human
aggccaaaggaagcacau

SEQ ID NO: 1660346 - RNA, 19 nt, Human
aggccaaaggaagcacaug

SEQ ID NO: 1660347 - RNA, 20 nt, Human
aggccaaaggaagcacaugc

SEQ ID NO: 1660348 - RNA, 16 nt, Human
aggccaaggugggagg

SEQ ID NO: 1660349 - RNA, 20 nt, Human
uggagguacgaaaagagggg

SEQ ID NO: 1660350 - RNA, 16 nt, Human
aggccccgcccaggcu

SEQ ID NO: 1660351 - RNA, 20 nt, Human
aggccagagggagugacaga

SEQ ID NO: 1660352 - RNA, 21 nt, Human
aggcccagagggccugcaagg

SEQ ID NO: 1660353 - RNA, 17 nt, Human
uggcagccuuggcaaac

SEQ ID NO: 1660354 - RNA, 15 nt, Human
uggcagcucaccucu

SEQ ID NO: 1660355 - RNA, 19 nt, Human
uggcagcucaccucucccu

SEQ ID NO: 1660356 - RNA, 17 nt, Human
aggccacaagacccuug

SEQ ID NO: 1660357 - RNA, 18 nt, Human
aggccacaagacccuugu

SEQ ID NO: 1660358 - RNA, 19 nt, Human
aggccacaagacccuugug

SEQ ID NO: 1660359 - RNA, 14 nt, Human
aggccagagggagu

SEQ ID NO: 1660360 - RNA, 18 nt, Human
uggcacagggcaguggga

SEQ ID NO: 1660361 - RNA, 18 nt, Human
uggcacaguuuucugaga

SEQ ID NO: 1660362 - RNA, 19 nt, Human
uggcacaguuuucugagaa

SEQ ID NO: 1660363 - RNA, 20 nt, Human
uggcacaguuuucugagaaa

SEQ ID NO: 1660364 - RNA, 13 nt, Human
uggccucuucaga

SEQ ID NO: 1660365 - RNA, 14 nt, Human
uggcccugcccugg

SEQ ID NO: 1660366 - RNA, 13 nt, Human
uggcccacgcacu

SEQ ID NO: 1660367 - RNA, 18 nt, Human
uggccugagcugggauga

SEQ ID NO: 1660368 - RNA, 18 nt, Human
uggccuggccccucaggg

SEQ ID NO: 1660369 - RNA, 21 nt, Human
uggccuggccccucagggucc

SEQ ID NO: 1660370 - RNA, 20 nt, Human
aggccugggggcugggcaga

SEQ ID NO: 1660371 - RNA, 12 nt, Human
aggccuggggac

SEQ ID NO: 1660372 - RNA, 18 nt, Human
aggccugggggcugggca

SEQ ID NO: 1660373 - RNA, 14 nt, Human
uggccuucggccuc

SEQ ID NO: 1660374 - RNA, 11 nt, Human
uggccaggugg

SEQ ID NO: 1660375 - RNA, 15 nt, Human
uggccagguggccac

SEQ ID NO: 1660376 - RNA, 21 nt, Human
uggccaaagccaaagcuaggc

SEQ ID NO: 1660377 - RNA, 23 nt, Human
uggccaaagccaaagcuaggccu

SEQ ID NO: 1660378 - RNA, 16 nt, Human
uggccagguggccacu

SEQ ID NO: 1660379 - RNA, 17 nt, Human
uggccagguggccacuc

SEQ ID NO: 1660380 - RNA, 19 nt, Human
uggccagguggccacucca

SEQ ID NO: 1660381 - RNA, 23 nt, Human
uggccagugugacaaggauugcu

SEQ ID NO: 1660382 - RNA, 12 nt, Human
aggccccugcca

SEQ ID NO: 1660383 - RNA, 17 nt, Human
aggccccgcccaggcuu

SEQ ID NO: 1660384 - RNA, 21 nt, Human
uggcauaacauaaaucuguga

SEQ ID NO: 1660385 - RNA, 22 nt, Human
uggcauaacauaaaucugugaa

SEQ ID NO: 1660386 - RNA, 15 nt, Human
uggcauagagcagca

SEQ ID NO: 1660387 - RNA, 21 nt, Human
uggcauagagcagcacuaaau

SEQ ID NO: 1660388 - RNA, 14 nt, Human
agcuguguggcagu

SEQ ID NO: 1660389 - RNA, 16 nt, Human
agcuguguggcagucu

SEQ ID NO: 1660390 - RNA, 21 nt, Human
agcugugcucuggacaggcau

SEQ ID NO: 1660391 - RNA, 23 nt, Human
agcugugcucuggacaggcaugu

SEQ ID NO: 1660392 - RNA, 20 nt, Human
agcugugcucuggacaggca

SEQ ID NO: 1660393 - RNA, 15 nt, Human
agcugggacuacagg

SEQ ID NO: 1660394 - RNA, 20 nt, Human
ugccuguugggccaggagcc

SEQ ID NO: 1660395 - RNA, 21 nt, Human
ugccuguucagcuccagcuca

SEQ ID NO: 1660396 - RNA, 19 nt, Human
ugccuguugggccaggagc

SEQ ID NO: 1660397 - RNA, 15 nt, Human
ugccuuauggaacac

SEQ ID NO: 1660398 - RNA, 16 nt, Human
ugccuuauggaacacu

SEQ ID NO: 1660399 - RNA, 13 nt, Human
agcuguucagcug

SEQ ID NO: 1660400 - RNA, 14 nt, Human
agcuguucagcugg

SEQ ID NO: 1660401 - RNA, 18 nt, Human
ugccuguucagcuccagc

SEQ ID NO: 1660402 - RNA, 20 nt, Human
ugccuguucagcuccagcuc

SEQ ID NO: 1660403 - RNA, 14 nt, Human
agcuguuacugucu

SEQ ID NO: 1660404 - RNA, 16 nt, Human
agcuguucacagccag

SEQ ID NO: 1660405 - RNA, 19 nt, Human
agcuguucacagccagacu

SEQ ID NO: 1660406 - RNA, 15 nt, Human
ugccugcccuauucu

SEQ ID NO: 1660407 - RNA, 14 nt, Human
ugccugcccaggcc

SEQ ID NO: 1660408 - RNA, 15 nt, Human
ugccugcccaggccc

SEQ ID NO: 1660409 - RNA, 16 nt, Human
ugccugcccaggcccc

SEQ ID NO: 1660410 - RNA, 12 nt, Human
ugcccaggcagg

SEQ ID NO: 1660411 - RNA, 13 nt, Human
ugcccaggcaggu

SEQ ID NO: 1660412 - RNA, 14 nt, Human
ugcccaggcagguc

SEQ ID NO: 1660413 - RNA, 13 nt, Human
ugccucugccucu

SEQ ID NO: 1660414 - RNA, 14 nt, Human
ugccucugccucug

SEQ ID NO: 1660415 - RNA, 15 nt, Human
ugccucugccucuga

SEQ ID NO: 1660416 - RNA, 22 nt, Human
agcuggaucuccauucucucag

SEQ ID NO: 1660417 - RNA, 21 nt, Human
agcugcuuuugucuaugggac

SEQ ID NO: 1660418 - RNA, 22 nt, Human
agcugcuuuugucuaugggacu

SEQ ID NO: 1660419 - RNA, 21 nt, Human
agcugcuugggcuucauccuc

SEQ ID NO: 1660420 - RNA, 21 nt, Human
agcugccuguucagcuccagc

SEQ ID NO: 1660421 - RNA, 22 nt, Human
agcugccuguucagcuccagcu

SEQ ID NO: 1660422 - RNA, 14 nt, Human
ugccuggauggggc

SEQ ID NO: 1660423 - RNA, 15 nt, Human
ugccuggauggggcu

SEQ ID NO: 1660424 - RNA, 22 nt, Human
agcugcccucuccugggcagcu

SEQ ID NO: 1660425 - RNA, 15 nt, Human
agcugccuccccucc

SEQ ID NO: 1660426 - RNA, 20 nt, Human
agcugccuguucagcuccag

SEQ ID NO: 1660427 - RNA, 17 nt, Human
agcugccuccccuccuc

SEQ ID NO: 1660428 - RNA, 16 nt, Human
agcugccuccccuccu

SEQ ID NO: 1660429 - RNA, 22 nt, Human
ugcggacagccacggccaggcc

SEQ ID NO: 1660430 - RNA, 23 nt, Human
ugcggacagccacggccaggcca

SEQ ID NO: 1660431 - RNA, 17 nt, Human
ugcgggucacaggaggg

SEQ ID NO: 1660432 - RNA, 14 nt, Human
ugcgggucacagga

SEQ ID NO: 1660433 - RNA, 16 nt, Human
ugcgggucacaggagg

SEQ ID NO: 1660434 - RNA, 18 nt, Human
ugcgguccacccaggagc

SEQ ID NO: 1660435 - RNA, 12 nt, Human
ugcuaaggacuu

SEQ ID NO: 1660436 - RNA, 21 nt, Human
ugcggugcuaucucccccagc

SEQ ID NO: 1660437 - RNA, 17 nt, Human
ugcggugcuaucucccc

SEQ ID NO: 1660438 - RNA, 20 nt, Human
ugcgggcuuccuccuggugu

SEQ ID NO: 1660439 - RNA, 17 nt, Human
ugcggccuuuggcuuca

SEQ ID NO: 1660440 - RNA, 19 nt, Human
ugcggccuuuggcuucacg

SEQ ID NO: 1660441 - RNA, 11 nt, Human
ugcuacacacu

SEQ ID NO: 1660442 - RNA, 20 nt, Human
ugcuacaaaaacacagcaag

SEQ ID NO: 1660443 - RNA, 13 nt, Human
ugcuaaggacuug

SEQ ID NO: 1660444 - RNA, 18 nt, Human
ugcuaaggacuuguuaga

SEQ ID NO: 1660445 - RNA, 22 nt, Human
ugcuaaggacuuguuagaucua

SEQ ID NO: 1660446 - RNA, 16 nt, Human
ugcuacaaaaacacag

SEQ ID NO: 1660447 - RNA, 17 nt, Human
ugcuacaaaaacacagc

SEQ ID NO: 1660448 - RNA, 18 nt, Human
ugcuacaaaaacacagca

SEQ ID NO: 1660449 - RNA, 19 nt, Human
ugcuacaaaaacacagcaa

SEQ ID NO: 1660450 - RNA, 14 nt, Human
agcuugaggguugg

SEQ ID NO: 1660451 - RNA, 18 nt, Human
agcuugaggguugggcug

SEQ ID NO: 1660452 - RNA, 22 nt, Human
agcuugaggguugggcuggugu

SEQ ID NO: 1660453 - RNA, 18 nt, Human
agcuuguaaauagcucag

SEQ ID NO: 1660454 - RNA, 19 nt, Human
agcuugaccgugaggccag

SEQ ID NO: 1660455 - RNA, 17 nt, Human
agcuugaaacugagaug

SEQ ID NO: 1660456 - RNA, 23 nt, Human
aggaauggagccugcacggugaa

SEQ ID NO: 1660457 - RNA, 13 nt, Human
ugcugcccugccc

SEQ ID NO: 1660458 - RNA, 16 nt, Human
ugcugcccugcccacc

SEQ ID NO: 1660459 - RNA, 17 nt, Human
ugcugcccugcccaccu

SEQ ID NO: 1660460 - RNA, 18 nt, Human
ugcugcccugcccaccug

SEQ ID NO: 1660461 - RNA, 12 nt, Human
ugcugcccugug

SEQ ID NO: 1660462 - RNA, 11 nt, Human
ugcugcccugu

SEQ ID NO: 1660463 - RNA, 19 nt, Human
ugcugcccugcccaccugg

SEQ ID NO: 1660464 - RNA, 21 nt, Human
ugcugcccugcccaccuggcc

SEQ ID NO: 1660465 - RNA, 13 nt, Human
ugcuggcugccuu

SEQ ID NO: 1660466 - RNA, 19 nt, Human
ugcugggauuacaagcgug

SEQ ID NO: 1660467 - RNA, 19 nt, Human
ugcuggcuguuggcugggg

SEQ ID NO: 1660468 - RNA, 21 nt, Human
ugcuggcuguuggcugggggc

SEQ ID NO: 1660469 - RNA, 21 nt, Human
ugcugggauuacaagcgugag

SEQ ID NO: 1660470 - RNA, 17 nt, Human
ugcugggauuacaggug

SEQ ID NO: 1660471 - RNA, 21 nt, Human
ugcuguauuuuaaaagaauga

SEQ ID NO: 1660472 - RNA, 22 nt, Human
ugcuguauuuuaaaagaaugau

SEQ ID NO: 1660473 - RNA, 13 nt, Human
ugcuguauuuuaa

SEQ ID NO: 1660474 - RNA, 16 nt, Human
ugcuuccagugaggcu

SEQ ID NO: 1660475 - RNA, 18 nt, Human
aggacacuaaccacgcug

SEQ ID NO: 1660476 - RNA, 17 nt, Human
aggacagccccuccucc

SEQ ID NO: 1660477 - RNA, 19 nt, Human
aggacacuaaccacgcugg

SEQ ID NO: 1660478 - RNA, 17 nt, Human
aggacacugauaugggu

SEQ ID NO: 1660479 - RNA, 12 nt, Human
ugcuucaaggau

SEQ ID NO: 1660480 - RNA, 20 nt, Human
ugcuucaaggauccugagcc

SEQ ID NO: 1660481 - RNA, 21 nt, Human
ugcuucaaggauccugagcca

SEQ ID NO: 1660482 - RNA, 23 nt, Human
ugcuucaaggauccugagccaga

SEQ ID NO: 1660483 - RNA, 13 nt, Human
ugcugugcaaaug

SEQ ID NO: 1660484 - RNA, 17 nt, Human
ugcugucccuuuuccuu

SEQ ID NO: 1660485 - RNA, 19 nt, Human
ugcugucccuuacgugagu

SEQ ID NO: 1660486 - RNA, 15 nt, Human
ugcugucccuuuucc

SEQ ID NO: 1660487 - RNA, 17 nt, Human
ugcugucccuuacguga

SEQ ID NO: 1660488 - RNA, 23 nt, Human
ugcuguauuuuaaaagaaugauu

SEQ ID NO: 1660489 - RNA, 18 nt, Human
aggaagccgcuggggcca

SEQ ID NO: 1660490 - RNA, 19 nt, Human
aggaagccgcuggggccag

SEQ ID NO: 1660491 - RNA, 20 nt, Human
aggaagccgcuggggccagu

SEQ ID NO: 1660492 - RNA, 15 nt, Human
aggaaauccagggug

SEQ ID NO: 1660493 - RNA, 22 nt, Human
aggaagcacaugccucucucag

SEQ ID NO: 1660494 - RNA, 21 nt, Human
aggaagccagcaggcucucag

SEQ ID NO: 1660495 - RNA, 22 nt, Human
aggaagccagcaggcucucagg

SEQ ID NO: 1660496 - RNA, 23 nt, Human
aggaagccagcaggcucucaggc

SEQ ID NO: 1660497 - RNA, 17 nt, Human
aggaagccugauuaaag

SEQ ID NO: 1660498 - RNA, 18 nt, Human
aggaagccugauuaaaga

SEQ ID NO: 1660499 - RNA, 21 nt, Human
aggaagccugauuaaagaaug

SEQ ID NO: 1660500 - RNA, 12 nt, Human
aggaagcucagg

SEQ ID NO: 1660501 - RNA, 23 nt, Human
aggaaggaaacccagcucugguc

SEQ ID NO: 1660502 - RNA, 20 nt, Human
aggaaggaaacccagcucug

SEQ ID NO: 1660503 - RNA, 22 nt, Human
aggaaggaaacccagcucuggu

SEQ ID NO: 1660504 - RNA, 14 nt, Human
aggaaauccagggu

SEQ ID NO: 1660505 - RNA, 11 nt, Human
aggaagcacau

SEQ ID NO: 1660506 - RNA, 16 nt, Human
aggaagcacaugccuc

SEQ ID NO: 1660507 - RNA, 17 nt, Human
aggaagcacaugccucu

SEQ ID NO: 1660508 - RNA, 15 nt, Human
aggaaaucaccgaaa

SEQ ID NO: 1660509 - RNA, 19 nt, Human
aggaaaucaccgaaaacgu

SEQ ID NO: 1660510 - RNA, 13 nt, Human
aggaaauauuuau

SEQ ID NO: 1660511 - RNA, 21 nt, Human
ugcugacuguacuccucccag

SEQ ID NO: 1660512 - RNA, 22 nt, Human
ugcugacuguacuccucccagg

SEQ ID NO: 1660513 - RNA, 16 nt, Human
ugcugacuguuuucuc

SEQ ID NO: 1660514 - RNA, 13 nt, Human
aggaaaggcucca

SEQ ID NO: 1660515 - RNA, 14 nt, Human
aggaaaggcuccag

SEQ ID NO: 1660516 - RNA, 15 nt, Human
aggaaaggcuccagg

SEQ ID NO: 1660517 - RNA, 16 nt, Human
aggaaaggcuccagga

SEQ ID NO: 1660518 - RNA, 12 nt, Human
aggaaauauuua

SEQ ID NO: 1660519 - RNA, 16 nt, Human
ugcugacuguacuccu

SEQ ID NO: 1660520 - RNA, 19 nt, Human
ugcugacuguacuccuccc

SEQ ID NO: 1660521 - RNA, 17 nt, Human
ugcucuggacaggcaug

SEQ ID NO: 1660522 - RNA, 15 nt, Human
ugcucuggacaggca

SEQ ID NO: 1660523 - RNA, 16 nt, Human
ugcucuggacaggcau

SEQ ID NO: 1660524 - RNA, 14 nt, Human
ugcucuggacaggc

SEQ ID NO: 1660525 - RNA, 14 nt, Human
ugcucauggaauug

SEQ ID NO: 1660526 - RNA, 20 nt, Human
ugcuaucucccccagcccca

SEQ ID NO: 1660527 - RNA, 19 nt, Human
ugcuaucucccccagcccc

SEQ ID NO: 1660528 - RNA, 20 nt, Human
ugcacacauuuuuuaaaugc

SEQ ID NO: 1660529 - RNA, 10 nt, Human
ugcacacauu

SEQ ID NO: 1660530 - RNA, 14 nt, Human
ugcacgugugugca

SEQ ID NO: 1660531 - RNA, 15 nt, Human
ugcacgugugugcac

SEQ ID NO: 1660532 - RNA, 16 nt, Human
ugcacccucaggcagg

SEQ ID NO: 1660533 - RNA, 17 nt, Human
ugcacccucaggcaggu

SEQ ID NO: 1660534 - RNA, 22 nt, Human
agcccugcuuugggcugcccug

SEQ ID NO: 1660535 - RNA, 23 nt, Human
agcccugcuuugggcugcccugg

SEQ ID NO: 1660536 - RNA, 21 nt, Human
agcccugcuuugggcugcccu

SEQ ID NO: 1660537 - RNA, 20 nt, Human
agccccuucugacccaugcu

SEQ ID NO: 1660538 - RNA, 24 nt, Human
agccccuucugacccaugcugccc

SEQ ID NO: 1660539 - RNA, 15 nt, Human
ugcacaagcugcacc

SEQ ID NO: 1660540 - RNA, 22 nt, Human
agcccugguggcagugggagcu

SEQ ID NO: 1660541 - RNA, 23 nt, Human
agcccugguggcagugggagcug

SEQ ID NO: 1660542 - RNA, 12 nt, Human
ugcacacagcac

SEQ ID NO: 1660543 - RNA, 24 nt, Human
ugcacacagcacgggggccaagga

SEQ ID NO: 1660544 - RNA, 18 nt, Human
ugcacaagcugcacccuc

SEQ ID NO: 1660545 - RNA, 21 nt, Human
ugcacaagcugcacccucagg

SEQ ID NO: 1660546 - RNA, 22 nt, Human
agccccuggaugcagccucaca

SEQ ID NO: 1660547 - RNA, 19 nt, Human
agccccuggaugcagccuc

SEQ ID NO: 1660548 - RNA, 17 nt, Human
agccccuggaugcagcc

SEQ ID NO: 1660549 - RNA, 18 nt, Human
agccccuggaugcagccu

SEQ ID NO: 1660550 - RNA, 24 nt, Human
agccccaaaacucuccucugcugc

SEQ ID NO: 1660551 - RNA, 17 nt, Human
agccccgaggccuucuc

SEQ ID NO: 1660552 - RNA, 22 nt, Human
agccccgaggccuucucugaag

SEQ ID NO: 1660553 - RNA, 16 nt, Human
agccccgaggccuucu

SEQ ID NO: 1660554 - RNA, 15 nt, Human
ugauucuccugccuc

SEQ ID NO: 1660555 - RNA, 19 nt, Human
ugauucuccugccucagcc

SEQ ID NO: 1660556 - RNA, 20 nt, Human
ugauucuccugccucagccu

SEQ ID NO: 1660557 - RNA, 21 nt, Human
agccccaaaacucuccucugc

SEQ ID NO: 1660558 - RNA, 22 nt, Human
agccccaaaacucuccucugcu

SEQ ID NO: 1660559 - RNA, 20 nt, Human
agccccaaaacucuccucug

SEQ ID NO: 1660560 - RNA, 18 nt, Human
agcccauggcacucuaug

SEQ ID NO: 1660561 - RNA, 23 nt, Human
agcccuucuaccuuccugcaaca

SEQ ID NO: 1660562 - RNA, 23 nt, Human
ugcacuauagccuaggugacaga

SEQ ID NO: 1660563 - RNA, 22 nt, Human
agccguggcuucccgcucagcc

SEQ ID NO: 1660564 - RNA, 23 nt, Human
agccguggcuucccgcucagccc

SEQ ID NO: 1660565 - RNA, 19 nt, Human
agccguuuguuccccaaga

SEQ ID NO: 1660566 - RNA, 14 nt, Human
agccguggcuuccc

SEQ ID NO: 1660567 - RNA, 21 nt, Human
agccguggcuucccgcucagc

SEQ ID NO: 1660568 - RNA, 20 nt, Human
agccgagauagccaaggcca

SEQ ID NO: 1660569 - RNA, 13 nt, Human
agccguggcuucc

SEQ ID NO: 1660570 - RNA, 17 nt, Human
agcccuucuuuccacag

SEQ ID NO: 1660571 - RNA, 17 nt, Human
agccucagcauccuggc

SEQ ID NO: 1660572 - RNA, 19 nt, Human
agccucagcauccuggcac

SEQ ID NO: 1660573 - RNA, 20 nt, Human
agccucagcauccuggcacc

SEQ ID NO: 1660574 - RNA, 21 nt, Human
agccucagcauccuggcaccc

SEQ ID NO: 1660575 - RNA, 16 nt, Human
agccucccaaagugcu

SEQ ID NO: 1660576 - RNA, 18 nt, Human
agccuccaugcugccucc

SEQ ID NO: 1660577 - RNA, 20 nt, Human
agccuccaugcugccuccag

SEQ ID NO: 1660578 - RNA, 20 nt, Human
agccucauguccacugguuc

SEQ ID NO: 1660579 - RNA, 22 nt, Human
agccucagcauccuggcacccg

SEQ ID NO: 1660580 - RNA, 23 nt, Human
agccucagcauccuggcacccgg

SEQ ID NO: 1660581 - RNA, 15 nt, Human
agccucauguccacu

SEQ ID NO: 1660582 - RNA, 18 nt, Human
ugcaguacuuuaccuccu

SEQ ID NO: 1660583 - RNA, 12 nt, Human
ugcaggucccua

SEQ ID NO: 1660584 - RNA, 14 nt, Human
ugcaggucccuaau

SEQ ID NO: 1660585 - RNA, 15 nt, Human
ugcaggucccuaaua

SEQ ID NO: 1660586 - RNA, 16 nt, Human
ugcaggucccuaauaa

SEQ ID NO: 1660587 - RNA, 23 nt, Human
ugcauaacguauaaaagccuguu

SEQ ID NO: 1660588 - RNA, 22 nt, Human
ugcauaacguauaaaagccugu

SEQ ID NO: 1660589 - RNA, 14 nt, Human
ugcauaaguuaacu

SEQ ID NO: 1660590 - RNA, 17 nt, Human
ugcauaaguuaacuucc

SEQ ID NO: 1660591 - RNA, 17 nt, Human
ugcagccucacaguccu

SEQ ID NO: 1660592 - RNA, 16 nt, Human
ugcagccucacagucc

SEQ ID NO: 1660593 - RNA, 13 nt, Human
ugcagccucacag

SEQ ID NO: 1660594 - RNA, 15 nt, Human
ugcagccucacaguc

SEQ ID NO: 1660595 - RNA, 17 nt, Human
agccucccaaagugcug

SEQ ID NO: 1660596 - RNA, 22 nt, Human
agccugaaagaggaaugaagua

SEQ ID NO: 1660597 - RNA, 18 nt, Human
agcuaggaauuguguuua

SEQ ID NO: 1660598 - RNA, 12 nt, Human
agcuaggccugg

SEQ ID NO: 1660599 - RNA, 16 nt, Human
agcuaggccuggccag

SEQ ID NO: 1660600 - RNA, 14 nt, Human
agcuaggccuggcc

SEQ ID NO: 1660601 - RNA, 15 nt, Human
agcuaggccuggcca

SEQ ID NO: 1660602 - RNA, 18 nt, Human
agcucaggugucccugca

SEQ ID NO: 1660603 - RNA, 22 nt, Human
agcucaggugucccugcacuug

SEQ ID NO: 1660604 - RNA, 20 nt, Human
agcucaggugucccugcacu

SEQ ID NO: 1660605 - RNA, 21 nt, Human
agcucaggugucccugcacuu

SEQ ID NO: 1660606 - RNA, 21 nt, Human
ugcccagccccuucugaccca

SEQ ID NO: 1660607 - RNA, 20 nt, Human
ugcccagccccuucugaccc

SEQ ID NO: 1660608 - RNA, 20 nt, Human
ugcccacaggaucagucuga

SEQ ID NO: 1660609 - RNA, 19 nt, Human
ugcccacaggaucagucug

SEQ ID NO: 1660610 - RNA, 22 nt, Human
ugcccaagaauagaugcugacu

SEQ ID NO: 1660611 - RNA, 23 nt, Human
ugcccaagaauagaugcugacug

SEQ ID NO: 1660612 - RNA, 21 nt, Human
ugcccaagaauagaugcugac

SEQ ID NO: 1660613 - RNA, 21 nt, Human
agcucauucuccuuguguuac

SEQ ID NO: 1660614 - RNA, 20 nt, Human
agcucauucuccuuguguua

SEQ ID NO: 1660615 - RNA, 22 nt, Human
ugccacacuucaggcucuucuc

SEQ ID NO: 1660616 - RNA, 23 nt, Human
ugccacacuucaggcucuucucc

SEQ ID NO: 1660617 - RNA, 19 nt, Human
agcgugagccacugcaccg

SEQ ID NO: 1660618 - RNA, 22 nt, Human
agcgugagccacugcaccgggc

SEQ ID NO: 1660619 - RNA, 15 nt, Human
agcgugcauaaguua

SEQ ID NO: 1660620 - RNA, 19 nt, Human
agcuacuaauuuuaaaaug

SEQ ID NO: 1660621 - RNA, 14 nt, Human
agcuagacugguga

SEQ ID NO: 1660622 - RNA, 16 nt, Human
agcuagacuggugacu

SEQ ID NO: 1660623 - RNA, 17 nt, Human
agcuagacuggugacug

SEQ ID NO: 1660624 - RNA, 21 nt, Human
agcuagacuggugacugauuc

SEQ ID NO: 1660625 - RNA, 13 nt, Human
agcuagacuggug

SEQ ID NO: 1660626 - RNA, 18 nt, Human
agcuagacgagcaggcuu

SEQ ID NO: 1660627 - RNA, 13 nt, Human
agcuagaauuuga

SEQ ID NO: 1660628 - RNA, 16 nt, Human
agcuagaauuugauau

SEQ ID NO: 1660629 - RNA, 17 nt, Human
agcuacuugggaggcug

SEQ ID NO: 1660630 - RNA, 18 nt, Human
agcuacuugggaggcuga

SEQ ID NO: 1660631 - RNA, 22 nt, Human
agccugggugacagagcaagug

SEQ ID NO: 1660632 - RNA, 19 nt, Human
agccugcuccagcuguuca

SEQ ID NO: 1660633 - RNA, 22 nt, Human
agccugcuccagcuguucagcu

SEQ ID NO: 1660634 - RNA, 14 nt, Human
ugcauaccacuuuu

SEQ ID NO: 1660635 - RNA, 15 nt, Human
agccugcuccagcug

SEQ ID NO: 1660636 - RNA, 16 nt, Human
agccugcuccagcugu

SEQ ID NO: 1660637 - RNA, 17 nt, Human
agccugcuccagcuguu

SEQ ID NO: 1660638 - RNA, 12 nt, Human
ugcauaccacuu

SEQ ID NO: 1660639 - RNA, 16 nt, Human
agccugugucuuuaaa

SEQ ID NO: 1660640 - RNA, 23 nt, Human
agccugugucuuuaaaugcugcu

SEQ ID NO: 1660641 - RNA, 13 nt, Human
agccuguuuaaga

SEQ ID NO: 1660642 - RNA, 21 nt, Human
agccugugccucugggacugg

SEQ ID NO: 1660643 - RNA, 13 nt, Human
ugccacacuucag

SEQ ID NO: 1660644 - RNA, 14 nt, Human
ugccacacuucagg

SEQ ID NO: 1660645 - RNA, 15 nt, Human
ugccacacuucaggc

SEQ ID NO: 1660646 - RNA, 16 nt, Human
ugccacacuucaggcu

SEQ ID NO: 1660647 - RNA, 21 nt, Human
ugccaauaauaauaccucccu

SEQ ID NO: 1660648 - RNA, 22 nt, Human
ugccaauaauaauaccucccuu

SEQ ID NO: 1660649 - RNA, 15 nt, Human
ugccaaguuguuuga

SEQ ID NO: 1660650 - RNA, 19 nt, Human
ugccaaguuguuugagaaa

SEQ ID NO: 1660651 - RNA, 20 nt, Human
ugccaaguuguuugagaaau

SEQ ID NO: 1660652 - RNA, 22 nt, Human
ugcauuaucuagauacuguauc

SEQ ID NO: 1660653 - RNA, 21 nt, Human
ugcauuaucuagauacuguau

SEQ ID NO: 1660654 - RNA, 16 nt, Human
agcggagaaaggaagg

SEQ ID NO: 1660655 - RNA, 20 nt, Human
ugcauuaucuagauacugua

SEQ ID NO: 1660656 - RNA, 20 nt, Human
agcggagaaaggaagggcug

SEQ ID NO: 1660657 - RNA, 18 nt, Human
agcggagacggaguccca

SEQ ID NO: 1660658 - RNA, 11 nt, Human
agccuuccagg

SEQ ID NO: 1660659 - RNA, 14 nt, Human
agccuuccaggggu

SEQ ID NO: 1660660 - RNA, 16 nt, Human
agccuuccaggggugg

SEQ ID NO: 1660661 - RNA, 17 nt, Human
agccuuccagggguggg

SEQ ID NO: 1660662 - RNA, 20 nt, Human
agccuuggggcugaugcagu

SEQ ID NO: 1660663 - RNA, 19 nt, Human
ugauucccaagcucugcuc

SEQ ID NO: 1660664 - RNA, 21 nt, Human
ugauucccaagcucugcuccu

SEQ ID NO: 1660665 - RNA, 15 nt, Human
ugauucccaagcucu

SEQ ID NO: 1660666 - RNA, 16 nt, Human
ugauucccaagcucug

SEQ ID NO: 1660667 - RNA, 18 nt, Human
ugauucccaagcucugcu

SEQ ID NO: 1660668 - RNA, 15 nt, Human
ugauucauaaugacu

SEQ ID NO: 1660669 - RNA, 13 nt, Human
ugauucagcucug

SEQ ID NO: 1660670 - RNA, 14 nt, Human
ugauucagcucugc

SEQ ID NO: 1660671 - RNA, 24 nt, Human
agcccaggaaaggcuccaggagca

SEQ ID NO: 1660672 - RNA, 22 nt, Human
agcccaggaaaggcuccaggag

SEQ ID NO: 1660673 - RNA, 23 nt, Human
agcccaggaaaggcuccaggagc

SEQ ID NO: 1660674 - RNA, 17 nt, Human
agccauguuuauuacag

SEQ ID NO: 1660675 - RNA, 16 nt, Human
agccauguuuauuaca

SEQ ID NO: 1660676 - RNA, 13 nt, Human
agccauguuuauu

SEQ ID NO: 1660677 - RNA, 14 nt, Human
agccauguuuauua

SEQ ID NO: 1660678 - RNA, 19 nt, Human
agcccaggaaaggcuccag

SEQ ID NO: 1660679 - RNA, 20 nt, Human
agcccaggaaaggcuccagg

SEQ ID NO: 1660680 - RNA, 21 nt, Human
agcccaggaaaggcuccagga

SEQ ID NO: 1660681 - RNA, 23 nt, Human
agccaguaaaugggggugcauuu

SEQ ID NO: 1660682 - RNA, 12 nt, Human
agccagggucuc

SEQ ID NO: 1660683 - RNA, 21 nt, Human
agccaggccacaagacccuug

SEQ ID NO: 1660684 - RNA, 22 nt, Human
agccaggccacaagacccuugu

SEQ ID NO: 1660685 - RNA, 12 nt, Human
agccaggccaca

SEQ ID NO: 1660686 - RNA, 14 nt, Human
agccaggccacaag

SEQ ID NO: 1660687 - RNA, 19 nt, Human
agccagacuggcacaguuu

SEQ ID NO: 1660688 - RNA, 14 nt, Human
agccagacuggcac

SEQ ID NO: 1660689 - RNA, 18 nt, Human
ugauguuuuaaggaugcu

SEQ ID NO: 1660690 - RNA, 17 nt, Human
ugauguuuuaaggaugc

SEQ ID NO: 1660691 - RNA, 15 nt, Human
ugauggugguauguu

SEQ ID NO: 1660692 - RNA, 14 nt, Human
ugaugauccuaggc

SEQ ID NO: 1660693 - RNA, 20 nt, Human
ugaugauccuaggcauuugc

SEQ ID NO: 1660694 - RNA, 14 nt, Human
ugaugaucuuuaaa

SEQ ID NO: 1660695 - RNA, 17 nt, Human
ugauggugcaaugaccu

SEQ ID NO: 1660696 - RNA, 23 nt, Human
ugauggugcaaugaccuuucaau

SEQ ID NO: 1660697 - RNA, 16 nt, Human
ugauggugcaaugacc

SEQ ID NO: 1660698 - RNA, 17 nt, Human
ugaugaucuuuaaaaua

SEQ ID NO: 1660699 - RNA, 13 nt, Human
agccacugcaccg

SEQ ID NO: 1660700 - RNA, 16 nt, Human
agccacugcaccgggc

SEQ ID NO: 1660701 - RNA, 21 nt, Human
agccacugcaccgggccacag

SEQ ID NO: 1660702 - RNA, 22 nt, Human
agccacugcaccgggccacaga

SEQ ID NO: 1660703 - RNA, 12 nt, Human
ugauuaaaccaa

SEQ ID NO: 1660704 - RNA, 15 nt, Human
ugauuaauuaaaaca

SEQ ID NO: 1660705 - RNA, 16 nt, Human
ugauuaccagggacug

SEQ ID NO: 1660706 - RNA, 14 nt, Human
ugauuaccagggac

SEQ ID NO: 1660707 - RNA, 18 nt, Human
agccaccgugccuggcca

SEQ ID NO: 1660708 - RNA, 14 nt, Human
agccacggccaggc

SEQ ID NO: 1660709 - RNA, 19 nt, Human
agccaccaacauacuccca

SEQ ID NO: 1660710 - RNA, 20 nt, Human
agccaccaacauacucccau

SEQ ID NO: 1660711 - RNA, 23 nt, Human
agccaccaacauacucccaucug

SEQ ID NO: 1660712 - RNA, 14 nt, Human
agccacauuccuga

SEQ ID NO: 1660713 - RNA, 18 nt, Human
agccacauuccugaugcu

SEQ ID NO: 1660714 - RNA, 22 nt, Human
ugauccaguuuuguuuggacca

SEQ ID NO: 1660715 - RNA, 18 nt, Human
ugauccuuuuggagucag

SEQ ID NO: 1660716 - RNA, 22 nt, Human
ugauccagcagauuauucacug

SEQ ID NO: 1660717 - RNA, 21 nt, Human
ugauccagcagauuauucacu

SEQ ID NO: 1660718 - RNA, 15 nt, Human
agccacggccaggcc

SEQ ID NO: 1660719 - RNA, 13 nt, Human
ugaugaagaggag

SEQ ID NO: 1660720 - RNA, 14 nt, Human
ugaugaagaggagu

SEQ ID NO: 1660721 - RNA, 17 nt, Human
ugaugaagaaguugaua

SEQ ID NO: 1660722 - RNA, 21 nt, Human
agcauacguacacauuuuauu

SEQ ID NO: 1660723 - RNA, 20 nt, Human
agcauacguacacauuuuau

SEQ ID NO: 1660724 - RNA, 19 nt, Human
agcauacguacacauuuua

SEQ ID NO: 1660725 - RNA, 18 nt, Human
agcauacguacacauuuu

SEQ ID NO: 1660726 - RNA, 17 nt, Human
agcauacguacacauuu

SEQ ID NO: 1660727 - RNA, 16 nt, Human
agcauacguacacauu

SEQ ID NO: 1660728 - RNA, 12 nt, Human
ugagaauuaccc

SEQ ID NO: 1660729 - RNA, 21 nt, Human
agcauaauacuugcuuuggaa

SEQ ID NO: 1660730 - RNA, 15 nt, Human
agcauacguacacau

SEQ ID NO: 1660731 - RNA, 23 nt, Human
agcauaaauguugacaugggaca

SEQ ID NO: 1660732 - RNA, 17 nt, Human
ugaguacuacaguccuc

SEQ ID NO: 1660733 - RNA, 21 nt, Human
ugaguacuacaguccucccau

SEQ ID NO: 1660734 - RNA, 22 nt, Human
ugaguacuacaguccucccauc

SEQ ID NO: 1660735 - RNA, 23 nt, Human
ugaguacuacaguccucccaucu

SEQ ID NO: 1660736 - RNA, 13 nt, Human
ugaguagcuggga

SEQ ID NO: 1660737 - RNA, 16 nt, Human
agcauauucaggaagc

SEQ ID NO: 1660738 - RNA, 15 nt, Human
ugagguuuuuaagcc

SEQ ID NO: 1660739 - RNA, 14 nt, Human
agcauauucaggaa

SEQ ID NO: 1660740 - RNA, 15 nt, Human
ugaguacuacagucc

SEQ ID NO: 1660741 - RNA, 22 nt, Human
ugaguaacugauuuguaacaag

SEQ ID NO: 1660742 - RNA, 14 nt, Human
ugagucaccaagcc

SEQ ID NO: 1660743 - RNA, 16 nt, Human
ugagucaccaagccca

SEQ ID NO: 1660744 - RNA, 17 nt, Human
ugagucaccaagcccag

SEQ ID NO: 1660745 - RNA, 17 nt, Human
ugagugccuuacacaau

SEQ ID NO: 1660746 - RNA, 20 nt, Human
ugagugccuuacacaauggu

SEQ ID NO: 1660747 - RNA, 21 nt, Human
ugagugggugaauaauacagu

SEQ ID NO: 1660748 - RNA, 18 nt, Human
ugagugucuuaauuaaaa

SEQ ID NO: 1660749 - RNA, 18 nt, Human
ugaguucauacccuguua

SEQ ID NO: 1660750 - RNA, 17 nt, Human
ugaguucauacccuguu

SEQ ID NO: 1660751 - RNA, 20 nt, Human
ugauaagaaccuuuugagug

SEQ ID NO: 1660752 - RNA, 14 nt, Human
ugauaaucaacugg

SEQ ID NO: 1660753 - RNA, 18 nt, Human
ugauaaucaacugggcug

SEQ ID NO: 1660754 - RNA, 24 nt, Human
ugauaaucaacugggcugaacacu

SEQ ID NO: 1660755 - RNA, 12 nt, Human
ugauacagaaaa

SEQ ID NO: 1660756 - RNA, 21 nt, Human
ugauacaaugcugugcccuaa

SEQ ID NO: 1660757 - RNA, 20 nt, Human
ugauacaaugcugugcccua

SEQ ID NO: 1660758 - RNA, 17 nt, Human
ugauacuacaguuuguu

SEQ ID NO: 1660759 - RNA, 14 nt, Human
ugauacuacaguuu

SEQ ID NO: 1660760 - RNA, 19 nt, Human
ugauauuuucaacgcagcc

SEQ ID NO: 1660761 - RNA, 21 nt, Human
ugauauuuucaacgcagcccu

SEQ ID NO: 1660762 - RNA, 22 nt, Human
ugauauuuucaacgcagcccug

SEQ ID NO: 1660763 - RNA, 23 nt, Human
ugauauuuucaacgcagcccugc

SEQ ID NO: 1660764 - RNA, 15 nt, Human
ugauaugugaacagu

SEQ ID NO: 1660765 - RNA, 16 nt, Human
ugauaugugaacaguu

SEQ ID NO: 1660766 - RNA, 12 nt, Human
ugauaugggucu

SEQ ID NO: 1660767 - RNA, 19 nt, Human
ugaucacggcucacugcag

SEQ ID NO: 1660768 - RNA, 22 nt, Human
agcauauucaggaagcucaggg

SEQ ID NO: 1660769 - RNA, 20 nt, Human
ugaucacggcucacugcagc

SEQ ID NO: 1660770 - RNA, 21 nt, Human
ugaucacggcucacugcagcc

SEQ ID NO: 1660771 - RNA, 13 nt, Human
agcaucaggccag

SEQ ID NO: 1660772 - RNA, 17 nt, Human
agcaucacaguuuuggu

SEQ ID NO: 1660773 - RNA, 15 nt, Human
agcaucacaguuuug

SEQ ID NO: 1660774 - RNA, 20 nt, Human
agcaucacaugaacuuguaa

SEQ ID NO: 1660775 - RNA, 17 nt, Human
agcauuguaaaugugcu

SEQ ID NO: 1660776 - RNA, 18 nt, Human
agcauuguaaaugugcuu

SEQ ID NO: 1660777 - RNA, 12 nt, Human
agcauggcugcc

SEQ ID NO: 1660778 - RNA, 20 nt, Human
agcaugucgucaaagcugaa

SEQ ID NO: 1660779 - RNA, 17 nt, Human
agcaugucgucaaagcu

SEQ ID NO: 1660780 - RNA, 14 nt, Human
agcaucaggccagg

SEQ ID NO: 1660781 - RNA, 16 nt, Human
agcaucaggccaggcc

SEQ ID NO: 1660782 - RNA, 17 nt, Human
agcaucaggccaggccc

SEQ ID NO: 1660783 - RNA, 18 nt, Human
agcaucaggccaggcccu

SEQ ID NO: 1660784 - RNA, 19 nt, Human
agcaucaggccaggcccuc

SEQ ID NO: 1660785 - RNA, 20 nt, Human
agcaucaggccaggcccucu

SEQ ID NO: 1660786 - RNA, 23 nt, Human
agcaagacgcugugcugcccugc

SEQ ID NO: 1660787 - RNA, 17 nt, Human
agcaagacgcugugcug

SEQ ID NO: 1660788 - RNA, 20 nt, Human
agcaagacgcugugcugccc

SEQ ID NO: 1660789 - RNA, 21 nt, Human
agcaagacgcugugcugcccu

SEQ ID NO: 1660790 - RNA, 22 nt, Human
agcaagacgcugugcugcccug

SEQ ID NO: 1660791 - RNA, 20 nt, Human
ugagaagcagaggaaggaga

SEQ ID NO: 1660792 - RNA, 16 nt, Human
ugagaaggguguugua

SEQ ID NO: 1660793 - RNA, 13 nt, Human
agcaagacgcugu

SEQ ID NO: 1660794 - RNA, 16 nt, Human
agcaagacgcugugcu

SEQ ID NO: 1660795 - RNA, 18 nt, Human
agauuuuuuuguuguuug

SEQ ID NO: 1660796 - RNA, 19 nt, Human
agauuuuuuuguuguuugu

SEQ ID NO: 1660797 - RNA, 23 nt, Human
agauuuuuuuguuguuuguuuag

SEQ ID NO: 1660798 - RNA, 15 nt, Human
agauuuuuuuguugu

SEQ ID NO: 1660799 - RNA, 16 nt, Human
agauuuuuuuguuguu

SEQ ID NO: 1660800 - RNA, 23 nt, Human
agcaacgcaggcccccaggugcc

SEQ ID NO: 1660801 - RNA, 14 nt, Human
agauuuuauuaugu

SEQ ID NO: 1660802 - RNA, 15 nt, Human
agauuuuauuaugua

SEQ ID NO: 1660803 - RNA, 16 nt, Human
agauuuuauuauguaa

SEQ ID NO: 1660804 - RNA, 17 nt, Human
agauuuuauuauguaaa

SEQ ID NO: 1660805 - RNA, 18 nt, Human
agauuuuauuauguaaau

SEQ ID NO: 1660806 - RNA, 17 nt, Human
agauuugaacucuucaa

SEQ ID NO: 1660807 - RNA, 20 nt, Human
agauuucucauuugccaaua

SEQ ID NO: 1660808 - RNA, 19 nt, Human
agauuuuauuauguaaauc

SEQ ID NO: 1660809 - RNA, 20 nt, Human
agauuuuauuauguaaaucc

SEQ ID NO: 1660810 - RNA, 21 nt, Human
agauuuugaaauuuuuauuaa

SEQ ID NO: 1660811 - RNA, 12 nt, Human
agauuuugaaug

SEQ ID NO: 1660812 - RNA, 13 nt, Human
agauuggaaggaa

SEQ ID NO: 1660813 - RNA, 19 nt, Human
agauuccagagaguggcuc

SEQ ID NO: 1660814 - RNA, 15 nt, Human
agauucccugagcag

SEQ ID NO: 1660815 - RNA, 19 nt, Human
ugacuuacuguacaugaaa

SEQ ID NO: 1660816 - RNA, 15 nt, Human
ugacuucuaaguaaa

SEQ ID NO: 1660817 - RNA, 22 nt, Human
ugacuucuaaguaaaaccacag

SEQ ID NO: 1660818 - RNA, 23 nt, Human
ugacuucuaaguaaaaccacagc

SEQ ID NO: 1660819 - RNA, 18 nt, Human
agauuccagagaguggcu

SEQ ID NO: 1660820 - RNA, 22 nt, Human
agauucauauuuacuucuuaua

SEQ ID NO: 1660821 - RNA, 24 nt, Human
ugacuucuaaguaaaaccacagca

SEQ ID NO: 1660822 - RNA, 16 nt, Human
ugacuuacuguacaug

SEQ ID NO: 1660823 - RNA, 15 nt, Human
ugacuuacuguacau

SEQ ID NO: 1660824 - RNA, 13 nt, Human
ugacuuacuguac

SEQ ID NO: 1660825 - RNA, 18 nt, Human
ugaccugaggcccuucuc

SEQ ID NO: 1660826 - RNA, 19 nt, Human
ugaccugaggcccuucucu

SEQ ID NO: 1660827 - RNA, 20 nt, Human
agaugcugacuguacuccuc

SEQ ID NO: 1660828 - RNA, 23 nt, Human
agaugcugacuguacuccuccca

SEQ ID NO: 1660829 - RNA, 16 nt, Human
agaugccgcauuugga

SEQ ID NO: 1660830 - RNA, 16 nt, Human
agaugcaguucugaag

SEQ ID NO: 1660831 - RNA, 17 nt, Human
agaugcaguucugaaga

SEQ ID NO: 1660832 - RNA, 17 nt, Human
ugacacuuaaaaauggu

SEQ ID NO: 1660833 - RNA, 16 nt, Human
ugacacuuaaaaaugg

SEQ ID NO: 1660834 - RNA, 17 nt, Human
ugacccaugcugcccug

SEQ ID NO: 1660835 - RNA, 16 nt, Human
ugacccaugcugcccu

SEQ ID NO: 1660836 - RNA, 21 nt, Human
ugacccaugcugcccugugag

SEQ ID NO: 1660837 - RNA, 14 nt, Human
ugacccaugcugcc

SEQ ID NO: 1660838 - RNA, 15 nt, Human
ugacccaugcugccc

SEQ ID NO: 1660839 - RNA, 19 nt, Human
ugacacacagcucuguccu

SEQ ID NO: 1660840 - RNA, 20 nt, Human
ugacacacagcucuguccug

SEQ ID NO: 1660841 - RNA, 19 nt, Human
ugacaaagacugaguacgu

SEQ ID NO: 1660842 - RNA, 16 nt, Human
ugacacacagcucugu

SEQ ID NO: 1660843 - RNA, 18 nt, Human
ugacacacagcucugucc

SEQ ID NO: 1660844 - RNA, 20 nt, Human
ugacacaugcaaggucauuu

SEQ ID NO: 1660845 - RNA, 12 nt, Human
ugacacaugcaa

SEQ ID NO: 1660846 - RNA, 17 nt, Human
ugaauuuuguguuagag

SEQ ID NO: 1660847 - RNA, 21 nt, Human
ugaauuuuguguuagagauuu

SEQ ID NO: 1660848 - RNA, 23 nt, Human
ugaauuugugaagguggaaauaa

SEQ ID NO: 1660849 - RNA, 13 nt, Human
ugaauuugugaag

SEQ ID NO: 1660850 - RNA, 21 nt, Human
ugaauuugugaagguggaaau

SEQ ID NO: 1660851 - RNA, 23 nt, Human
ugaauuucuuuugccguuauuaa

SEQ ID NO: 1660852 - RNA, 16 nt, Human
agauacuguaucauga

SEQ ID NO: 1660853 - RNA, 15 nt, Human
agauacuguaucaug

SEQ ID NO: 1660854 - RNA, 18 nt, Human
agaucaaaagguuaauaa

SEQ ID NO: 1660855 - RNA, 21 nt, Human
agauauuuugcuuugugauuu

SEQ ID NO: 1660856 - RNA, 20 nt, Human
agauauuuugcuuugugauu

SEQ ID NO: 1660857 - RNA, 22 nt, Human
agauacaguuacucagaauucu

SEQ ID NO: 1660858 - RNA, 17 nt, Human
agauacuggauuguacu

SEQ ID NO: 1660859 - RNA, 14 nt, Human
agauacuggauugu

SEQ ID NO: 1660860 - RNA, 11 nt, Human
agauacuguau

SEQ ID NO: 1660861 - RNA, 13 nt, Human
agauacaguuacu

SEQ ID NO: 1660862 - RNA, 20 nt, Human
agauacaggaaaagcugcug

SEQ ID NO: 1660863 - RNA, 18 nt, Human
agauaauauuaaggaaga

SEQ ID NO: 1660864 - RNA, 22 nt, Human
agauaauauuaaggaagacaau

SEQ ID NO: 1660865 - RNA, 17 nt, Human
agauaaggguaucuggu

SEQ ID NO: 1660866 - RNA, 16 nt, Human
agauaacuguuauuua

SEQ ID NO: 1660867 - RNA, 19 nt, Human
agauaacuguuauuuauaa

SEQ ID NO: 1660868 - RNA, 20 nt, Human
agauaacuguuauuuauaau

SEQ ID NO: 1660869 - RNA, 20 nt, Human
agaguuguuacauuuuuaag

SEQ ID NO: 1660870 - RNA, 19 nt, Human
agaguuguuacauuuuuaa

SEQ ID NO: 1660871 - RNA, 21 nt, Human
agaguuguuacauuuuuaagu

SEQ ID NO: 1660872 - RNA, 17 nt, Human
agaguuguuacauuuuu

SEQ ID NO: 1660873 - RNA, 22 nt, Human
agagucagaaguuucugccgca

SEQ ID NO: 1660874 - RNA, 15 nt, Human
agagucacuggaaca

SEQ ID NO: 1660875 - RNA, 15 nt, Human
ugaagucacugcaca

SEQ ID NO: 1660876 - RNA, 16 nt, Human
ugaagucacugcacag

SEQ ID NO: 1660877 - RNA, 21 nt, Human
ugaagucacugcacagugcau

SEQ ID NO: 1660878 - RNA, 16 nt, Human
ugaauaaagacaccua

SEQ ID NO: 1660879 - RNA, 22 nt, Human
ugaaggguaauuauauaguuac

SEQ ID NO: 1660880 - RNA, 14 nt, Human
ugaagucacugcac

SEQ ID NO: 1660881 - RNA, 14 nt, Human
ugaagucacacagu

SEQ ID NO: 1660882 - RNA, 15 nt, Human
ugaauacuuuauaaa

SEQ ID NO: 1660883 - RNA, 12 nt, Human
ugaauggcuuug

SEQ ID NO: 1660884 - RNA, 15 nt, Human
ugaauggcuuuguau

SEQ ID NO: 1660885 - RNA, 18 nt, Human
ugaauauuuaguguucau

SEQ ID NO: 1660886 - RNA, 11 nt, Human
ugaauggcuuu

SEQ ID NO: 1660887 - RNA, 17 nt, Human
ugaauggcuuuguauag

SEQ ID NO: 1660888 - RNA, 18 nt, Human
ugaauggcuuuguauaga

SEQ ID NO: 1660889 - RNA, 19 nt, Human
ugaauggcuuuguauagaa

SEQ ID NO: 1660890 - RNA, 22 nt, Human
ugaauggcuuuguauagaaccu

SEQ ID NO: 1660891 - RNA, 20 nt, Human
agagggagggagggcuccag

SEQ ID NO: 1660892 - RNA, 16 nt, Human
agagggagggagggcu

SEQ ID NO: 1660893 - RNA, 12 nt, Human
ugaagccuuugu

SEQ ID NO: 1660894 - RNA, 15 nt, Human
ugaagcauuuuauaa

SEQ ID NO: 1660895 - RNA, 16 nt, Human
ugaagcauuuuauaaa

SEQ ID NO: 1660896 - RNA, 17 nt, Human
ugaagcauuuuauaaau

SEQ ID NO: 1660897 - RNA, 18 nt, Human
ugaagcauuuuauaaauc

SEQ ID NO: 1660898 - RNA, 22 nt, Human
ugaagcauuuuauaaaucgcuu

SEQ ID NO: 1660899 - RNA, 20 nt, Human
ugaagcuaucguaaaauuaa

SEQ ID NO: 1660900 - RNA, 15 nt, Human
agagguuaagguggg

SEQ ID NO: 1660901 - RNA, 16 nt, Human
agagguggggagcaga

SEQ ID NO: 1660902 - RNA, 17 nt, Human
ugaaacggaugauuucu

SEQ ID NO: 1660903 - RNA, 18 nt, Human
ugaaacggaugauuucua

SEQ ID NO: 1660904 - RNA, 19 nt, Human
ugaaacggaugauuucuau

SEQ ID NO: 1660905 - RNA, 20 nt, Human
ugaaacggaugauuucuaug

SEQ ID NO: 1660906 - RNA, 17 nt, Human
ugaaacuuguguaaaua

SEQ ID NO: 1660907 - RNA, 23 nt, Human
ugaaacuuguguaaauacaauuu

SEQ ID NO: 1660908 - RNA, 19 nt, Human
ugaaacucguuaauuugua

SEQ ID NO: 1660909 - RNA, 22 nt, Human
ugaaacugagaugugaacacau

SEQ ID NO: 1660910 - RNA, 15 nt, Human
ugaaacggaugauuu

SEQ ID NO: 1660911 - RNA, 16 nt, Human
ugaaacgcaaccacca

SEQ ID NO: 1660912 - RNA, 17 nt, Human
ugaaaauguauguguaa

SEQ ID NO: 1660913 - RNA, 19 nt, Human
ugaaaaucgugacaacacu

SEQ ID NO: 1660914 - RNA, 20 nt, Human
ugaaaaucuuauaauuuaaa

SEQ ID NO: 1660915 - RNA, 20 nt, Human
ugaaaaaggaggaagagaaa

SEQ ID NO: 1660916 - RNA, 22 nt, Human
ugaaaaaggaggaagagaaaaa

SEQ ID NO: 1660917 - RNA, 22 nt, Human
ugaaaaaguucugcagauaaac

SEQ ID NO: 1660918 - RNA, 16 nt, Human
ugaaaaucgugacaac

SEQ ID NO: 1660919 - RNA, 22 nt, Human
ucuuuggucuacacugugcuga

SEQ ID NO: 1660920 - RNA, 20 nt, Human
ucuuucuggcuaugcauuug

SEQ ID NO: 1660921 - RNA, 21 nt, Human
ucuuucuggcuaugcauuuga

SEQ ID NO: 1660922 - RNA, 23 nt, Human
ugaaaaaauauauaucaaauaua

SEQ ID NO: 1660923 - RNA, 16 nt, Human
ugaaaaaggaggaaga

SEQ ID NO: 1660924 - RNA, 14 nt, Human
agagcugccaccug

SEQ ID NO: 1660925 - RNA, 20 nt, Human
agagcuagcagcagggaggg

SEQ ID NO: 1660926 - RNA, 13 nt, Human
agagccuuccagg

SEQ ID NO: 1660927 - RNA, 15 nt, Human
agagccuuccagggg

SEQ ID NO: 1660928 - RNA, 17 nt, Human
agagccuuccaggggug

SEQ ID NO: 1660929 - RNA, 22 nt, Human
agagccuuccaggggugggaca

SEQ ID NO: 1660930 - RNA, 22 nt, Human
agagcaccuuagacagucccug

SEQ ID NO: 1660931 - RNA, 23 nt, Human
agagcaccuuagacagucccugc

SEQ ID NO: 1660932 - RNA, 12 nt, Human
ugaaacuuuugg

SEQ ID NO: 1660933 - RNA, 13 nt, Human
ugaaagacuguac

SEQ ID NO: 1660934 - RNA, 15 nt, Human
ugaaagacuguacaa

SEQ ID NO: 1660935 - RNA, 16 nt, Human
agagacuccagcuggg

SEQ ID NO: 1660936 - RNA, 11 nt, Human
agagacuccug

SEQ ID NO: 1660937 - RNA, 17 nt, Human
agagacuccugcaggca

SEQ ID NO: 1660938 - RNA, 18 nt, Human
agagacuccugcaggcag

SEQ ID NO: 1660939 - RNA, 19 nt, Human
agagacuccugcaggcagc

SEQ ID NO: 1660940 - RNA, 20 nt, Human
agagacuccugcaggcagcc

SEQ ID NO: 1660941 - RNA, 21 nt, Human
agagacuccugcaggcagcca

SEQ ID NO: 1660942 - RNA, 22 nt, Human
agagacuccugcaggcagccag

SEQ ID NO: 1660943 - RNA, 19 nt, Human
agagcaagacgcugugcug

SEQ ID NO: 1660944 - RNA, 23 nt, Human
agagcaagacgcugugcugcccu

SEQ ID NO: 1660945 - RNA, 22 nt, Human
agagaucaaccccuucgcuccu

SEQ ID NO: 1660946 - RNA, 23 nt, Human
agagacuccugcaggcagccagg

SEQ ID NO: 1660947 - RNA, 11 nt, Human
ucuuccucugc

SEQ ID NO: 1660948 - RNA, 12 nt, Human
ucuuccucugcu

SEQ ID NO: 1660949 - RNA, 14 nt, Human
ucuuccucugcuga

SEQ ID NO: 1660950 - RNA, 15 nt, Human
ucuuccucccucccu

SEQ ID NO: 1660951 - RNA, 14 nt, Human
ucuuccucccuccc

SEQ ID NO: 1660952 - RNA, 19 nt, Human
ucuucccuacaguugaaaa

SEQ ID NO: 1660953 - RNA, 22 nt, Human
ucuucccuacaguugaaaaaca

SEQ ID NO: 1660954 - RNA, 21 nt, Human
ucuuccaggcugggagagccu

SEQ ID NO: 1660955 - RNA, 20 nt, Human
ucuucagagacuccugcagg

SEQ ID NO: 1660956 - RNA, 15 nt, Human
ucuuccaggcuggga

SEQ ID NO: 1660957 - RNA, 17 nt, Human
ucuuccaggcugggaga

SEQ ID NO: 1660958 - RNA, 20 nt, Human
ucuuccaggcugggagagcc

SEQ ID NO: 1660959 - RNA, 16 nt, Human
ucuucaacugaccagc

SEQ ID NO: 1660960 - RNA, 19 nt, Human
ucuucaacugaccagccuc

SEQ ID NO: 1660961 - RNA, 15 nt, Human
ucuucaacucccugc

SEQ ID NO: 1660962 - RNA, 14 nt, Human
agaaucacuugaac

SEQ ID NO: 1660963 - RNA, 17 nt, Human
ucuucagagacuccugc

SEQ ID NO: 1660964 - RNA, 18 nt, Human
ucuucagagacuccugca

SEQ ID NO: 1660965 - RNA, 12 nt, Human
ucuucagagacu

SEQ ID NO: 1660966 - RNA, 15 nt, Human
ucuucacaacagauu

SEQ ID NO: 1660967 - RNA, 21 nt, Human
ucuucugaacuuggcgcugcc

SEQ ID NO: 1660968 - RNA, 12 nt, Human
ucuucugcuuca

SEQ ID NO: 1660969 - RNA, 19 nt, Human
ucuucugcuucagccuccc

SEQ ID NO: 1660970 - RNA, 20 nt, Human
ucuucuguggguuucuaaag

SEQ ID NO: 1660971 - RNA, 18 nt, Human
ucuucuggguuccuuccu

SEQ ID NO: 1660972 - RNA, 15 nt, Human
ucuucuguacgucug

SEQ ID NO: 1660973 - RNA, 20 nt, Human
ucuucuguacgucugacagg

SEQ ID NO: 1660974 - RNA, 19 nt, Human
agacauacuaaccagcaga

SEQ ID NO: 1660975 - RNA, 21 nt, Human
agacauagaauuaacacauga

SEQ ID NO: 1660976 - RNA, 17 nt, Human
agacaucaacagauaaa

SEQ ID NO: 1660977 - RNA, 18 nt, Human
agacaucaacagauaaau

SEQ ID NO: 1660978 - RNA, 21 nt, Human
ucuugaugccuggcggggugg

SEQ ID NO: 1660979 - RNA, 13 nt, Human
ucuugauucauaa

SEQ ID NO: 1660980 - RNA, 15 nt, Human
ucuugauuaaaaguu

SEQ ID NO: 1660981 - RNA, 16 nt, Human
ucuugagccuugaacu

SEQ ID NO: 1660982 - RNA, 13 nt, Human
ucuugagccuggg

SEQ ID NO: 1660983 - RNA, 16 nt, Human
ucuugagccugggagg

SEQ ID NO: 1660984 - RNA, 14 nt, Human
agaccccuggcuuu

SEQ ID NO: 1660985 - RNA, 11 nt, Human
agaccuucucc

SEQ ID NO: 1660986 - RNA, 15 nt, Human
agaccuucuccuuca

SEQ ID NO: 1660987 - RNA, 18 nt, Human
agaccuucuccuucaccu

SEQ ID NO: 1660988 - RNA, 21 nt, Human
agaccuucuccuucaccuuug

SEQ ID NO: 1660989 - RNA, 23 nt, Human
agaccuucuccuucaccuuuguc

SEQ ID NO: 1660990 - RNA, 16 nt, Human
agacuauucaaacagu

SEQ ID NO: 1660991 - RNA, 15 nt, Human
agacuauucaaacag

SEQ ID NO: 1660992 - RNA, 12 nt, Human
agacuauucaaa

SEQ ID NO: 1660993 - RNA, 14 nt, Human
agacuauucaaaca

SEQ ID NO: 1660994 - RNA, 17 nt, Human
ucuuggucagauuugaa

SEQ ID NO: 1660995 - RNA, 14 nt, Human
ucuugguccugcug

SEQ ID NO: 1660996 - RNA, 19 nt, Human
ucuugcaauggcagccuug

SEQ ID NO: 1660997 - RNA, 18 nt, Human
ucuugcaauggcagccuu

SEQ ID NO: 1660998 - RNA, 22 nt, Human
ucuugcaauggcagccuuggca

SEQ ID NO: 1660999 - RNA, 23 nt, Human
ucuugcaauggcagccuuggcaa

SEQ ID NO: 1661000 - RNA, 18 nt, Human
ucuuucuaaugugugaau

SEQ ID NO: 1661001 - RNA, 19 nt, Human
ucuuucuaaugugugaauc

SEQ ID NO: 1661002 - RNA, 17 nt, Human
ucuuuccugaggcuggg

SEQ ID NO: 1661003 - RNA, 15 nt, Human
ucuugguccugcugc

SEQ ID NO: 1661004 - RNA, 17 nt, Human
ucuugguccugcugcag

SEQ ID NO: 1661005 - RNA, 16 nt, Human
ucuuuaaaugcugcuu

SEQ ID NO: 1661006 - RNA, 19 nt, Human
ucuugguccugcugcaguu

SEQ ID NO: 1661007 - RNA, 16 nt, Human
agaagcagaggaagga

SEQ ID NO: 1661008 - RNA, 19 nt, Human
agaagcaccaaucaugaau

SEQ ID NO: 1661009 - RNA, 22 nt, Human
ucugcccugcgggucacaggag

SEQ ID NO: 1661010 - RNA, 12 nt, Human
ucugcccuuggu

SEQ ID NO: 1661011 - RNA, 23 nt, Human
ucugcccuugguuaggcauugug

SEQ ID NO: 1661012 - RNA, 21 nt, Human
agaagccccacccugccucac

SEQ ID NO: 1661013 - RNA, 23 nt, Human
agaagcccaggaaaggcuccagg

SEQ ID NO: 1661014 - RNA, 20 nt, Human
ucugcccauccugccccuga

SEQ ID NO: 1661015 - RNA, 23 nt, Human
ucugcccacucccugcaaccuga

SEQ ID NO: 1661016 - RNA, 21 nt, Human
ucugcaggucccuaauaaagc

SEQ ID NO: 1661017 - RNA, 19 nt, Human
ucugcaggucccuaauaaa

SEQ ID NO: 1661018 - RNA, 22 nt, Human
ucugcaggucccuaauaaagcu

SEQ ID NO: 1661019 - RNA, 23 nt, Human
ucugcaggucccuaauaaagcug

SEQ ID NO: 1661020 - RNA, 18 nt, Human
ucugaagugaaacugcuu

SEQ ID NO: 1661021 - RNA, 22 nt, Human
ucugaagugaaacugcuuguuu

SEQ ID NO: 1661022 - RNA, 12 nt, Human
agaaauuaugug

SEQ ID NO: 1661023 - RNA, 13 nt, Human
agaaauuaaguau

SEQ ID NO: 1661024 - RNA, 17 nt, Human
agaaauuaaguaucuga

SEQ ID NO: 1661025 - RNA, 19 nt, Human
agaaccuuuugagugccuu

SEQ ID NO: 1661026 - RNA, 23 nt, Human
agaaccuuuugagugccuuacac

SEQ ID NO: 1661027 - RNA, 17 nt, Human
agaacucccuuucaaca

SEQ ID NO: 1661028 - RNA, 16 nt, Human
agaacucccuuucaac

SEQ ID NO: 1661029 - RNA, 12 nt, Human
ucugccugucuc

SEQ ID NO: 1661030 - RNA, 14 nt, Human
ucugccugucuccc

SEQ ID NO: 1661031 - RNA, 22 nt, Human
ucugcuuugggguuuaucagaa

SEQ ID NO: 1661032 - RNA, 23 nt, Human
ucugcuuuuuaaagaaugcucuu

SEQ ID NO: 1661033 - RNA, 17 nt, Human
ucuggcagcucagagag

SEQ ID NO: 1661034 - RNA, 20 nt, Human
ucuggcagaguugaagacag

SEQ ID NO: 1661035 - RNA, 23 nt, Human
ucuggcagaguugaagacagagc

SEQ ID NO: 1661036 - RNA, 18 nt, Human
ucuggcagcucagagagg

SEQ ID NO: 1661037 - RNA, 21 nt, Human
ucuggcagcucagagagggug

SEQ ID NO: 1661038 - RNA, 10 nt, Human
ucuggccuuc

SEQ ID NO: 1661039 - RNA, 22 nt, Human
agaaguuugagaucagccuggg

SEQ ID NO: 1661040 - RNA, 13 nt, Human
agaaguugauaug

SEQ ID NO: 1661041 - RNA, 23 nt, Human
agaagcucccugaaguaagcaaa

SEQ ID NO: 1661042 - RNA, 20 nt, Human
ucucgcuauugucaccaggg

SEQ ID NO: 1661043 - RNA, 17 nt, Human
ucucgaacuccugaccu

SEQ ID NO: 1661044 - RNA, 15 nt, Human
ucucggcucacugca

SEQ ID NO: 1661045 - RNA, 22 nt, Human
ucucucacuuguuuuauuuaac

SEQ ID NO: 1661046 - RNA, 12 nt, Human
ucucucaggcca

SEQ ID NO: 1661047 - RNA, 21 nt, Human
ucucucaggccaaacucaccu

SEQ ID NO: 1661048 - RNA, 22 nt, Human
acuuugugcugggguuaucuga

SEQ ID NO: 1661049 - RNA, 16 nt, Human
acuuuguguucaccuu

SEQ ID NO: 1661050 - RNA, 18 nt, Human
acuuuguguucaccuugu

SEQ ID NO: 1661051 - RNA, 20 nt, Human
ucuccuuaaagaguguggca

SEQ ID NO: 1661052 - RNA, 21 nt, Human
ucuccuuggugucgggcauga

SEQ ID NO: 1661053 - RNA, 23 nt, Human
ucuccuuggugucgggcaugaca

SEQ ID NO: 1661054 - RNA, 13 nt, Human
acuuuagggaagu

SEQ ID NO: 1661055 - RNA, 16 nt, Human
acuuguuuucugggaa

SEQ ID NO: 1661056 - RNA, 22 nt, Human
acuuguuuuauuuaaccucuaa

SEQ ID NO: 1661057 - RNA, 15 nt, Human
acuuguggacacagc

SEQ ID NO: 1661058 - RNA, 16 nt, Human
acuuuaaaaggagcca

SEQ ID NO: 1661059 - RNA, 18 nt, Human
acuugucuuuggacccug

SEQ ID NO: 1661060 - RNA, 14 nt, Human
acuuguggacacag

SEQ ID NO: 1661061 - RNA, 12 nt, Human
acuuuggaaaga

SEQ ID NO: 1661062 - RNA, 13 nt, Human
acuuuggaaagag

SEQ ID NO: 1661063 - RNA, 14 nt, Human
acuuuggaaagagu

SEQ ID NO: 1661064 - RNA, 19 nt, Human
acuuuguauaaaagggacu

SEQ ID NO: 1661065 - RNA, 23 nt, Human
acuuuggaaagaguaggaagacu

SEQ ID NO: 1661066 - RNA, 16 nt, Human
agaaaugaaaaaauau

SEQ ID NO: 1661067 - RNA, 13 nt, Human
agaaaugaaaaaa

SEQ ID NO: 1661068 - RNA, 12 nt, Human
agaaaugaaaaa

SEQ ID NO: 1661069 - RNA, 20 nt, Human
ucugaaggguaauuauauag

SEQ ID NO: 1661070 - RNA, 18 nt, Human
ucugaaggcuggguucug

SEQ ID NO: 1661071 - RNA, 15 nt, Human
agaaaugccuuaccc

SEQ ID NO: 1661072 - RNA, 20 nt, Human
agaaagcagaacagugauua

SEQ ID NO: 1661073 - RNA, 17 nt, Human
agaaagcagaacaguga

SEQ ID NO: 1661074 - RNA, 18 nt, Human
agaaagcagaacagugau

SEQ ID NO: 1661075 - RNA, 20 nt, Human
agaaagacuaucuaaauguu

SEQ ID NO: 1661076 - RNA, 22 nt, Human
agaaagacuaucuaaauguuga

SEQ ID NO: 1661077 - RNA, 16 nt, Human
agaaagacuauucaaa

SEQ ID NO: 1661078 - RNA, 19 nt, Human
ucucugcaggucccuaaua

SEQ ID NO: 1661079 - RNA, 20 nt, Human
ucucugcaggucccuaauaa

SEQ ID NO: 1661080 - RNA, 21 nt, Human
ucucugcaggucccuaauaaa

SEQ ID NO: 1661081 - RNA, 22 nt, Human
ucucugcaggucccuaauaaag

SEQ ID NO: 1661082 - RNA, 16 nt, Human
ucucuugguccugcug

SEQ ID NO: 1661083 - RNA, 17 nt, Human
ucucuugguccugcugc

SEQ ID NO: 1661084 - RNA, 18 nt, Human
ucucuugguccugcugca

SEQ ID NO: 1661085 - RNA, 18 nt, Human
agaaaaaugagccuggca

SEQ ID NO: 1661086 - RNA, 19 nt, Human
agaaaaaauauuuucccua

SEQ ID NO: 1661087 - RNA, 17 nt, Human
agaaaaaauauuuuccu

SEQ ID NO: 1661088 - RNA, 23 nt, Human
agaaaaaauauuuuccugccagg

SEQ ID NO: 1661089 - RNA, 16 nt, Human
agaaaacaaggaugaa

SEQ ID NO: 1661090 - RNA, 16 nt, Human
agaaacacaacuauau

SEQ ID NO: 1661091 - RNA, 23 nt, Human
agaaacuuaagguuaccuuuguu

SEQ ID NO: 1661092 - RNA, 15 nt, Human
agaaacauuugguaa

SEQ ID NO: 1661093 - RNA, 18 nt, Human
acuguacagacagaaaaa

SEQ ID NO: 1661094 - RNA, 16 nt, Human
acuguacaugaaaaca

SEQ ID NO: 1661095 - RNA, 19 nt, Human
acuguacaugaaaacacau

SEQ ID NO: 1661096 - RNA, 17 nt, Human
acuggguacuuguggac

SEQ ID NO: 1661097 - RNA, 18 nt, Human
acuggguacuuguggaca

SEQ ID NO: 1661098 - RNA, 16 nt, Human
acuguacaaaguagaa

SEQ ID NO: 1661099 - RNA, 22 nt, Human
acuguacaaaguagaagucuua

SEQ ID NO: 1661100 - RNA, 23 nt, Human
acuguacuugcucuugaugccug

SEQ ID NO: 1661101 - RNA, 14 nt, Human
acuguaucaugaca

SEQ ID NO: 1661102 - RNA, 20 nt, Human
acuguacuccucccaggcgc

SEQ ID NO: 1661103 - RNA, 15 nt, Human
acuguacuugcucuu

SEQ ID NO: 1661104 - RNA, 21 nt, Human
acuguacaugaaaacacauuu

SEQ ID NO: 1661105 - RNA, 20 nt, Human
acuguacaugaaaacacauu

SEQ ID NO: 1661106 - RNA, 20 nt, Human
acuguaucaugacaaagacu

SEQ ID NO: 1661107 - RNA, 16 nt, Human
acuguaucaugacaaa

SEQ ID NO: 1661108 - RNA, 23 nt, Human
acugucagcuccccucggagaag

SEQ ID NO: 1661109 - RNA, 22 nt, Human
acugggcuuggggaccagagcu

SEQ ID NO: 1661110 - RNA, 21 nt, Human
acugggcuuggggaccagagc

SEQ ID NO: 1661111 - RNA, 21 nt, Human
acugggcugaacacuccaauu

SEQ ID NO: 1661112 - RNA, 15 nt, Human
acuggguacuugugg

SEQ ID NO: 1661113 - RNA, 23 nt, Human
ucgcugugucagcauagaaguaa

SEQ ID NO: 1661114 - RNA, 16 nt, Human
acugggcugaacacuc

SEQ ID NO: 1661115 - RNA, 18 nt, Human
ucgcccuggacugugugc

SEQ ID NO: 1661116 - RNA, 22 nt, Human
acugaagaagcaccaaucauga

SEQ ID NO: 1661117 - RNA, 19 nt, Human
ucggggagaggcugaggac

SEQ ID NO: 1661118 - RNA, 23 nt, Human
ucgucacugcuuaacuucacaua

SEQ ID NO: 1661119 - RNA, 17 nt, Human
acuguuaauaguucagg

SEQ ID NO: 1661120 - RNA, 21 nt, Human
acuguuaauaguucagguaac

SEQ ID NO: 1661121 - RNA, 13 nt, Human
acuguggguagac

SEQ ID NO: 1661122 - RNA, 21 nt, Human
ucuacccucuuagaaaaacca

SEQ ID NO: 1661123 - RNA, 17 nt, Human
ucuaccaaaaaucucaa

SEQ ID NO: 1661124 - RNA, 13 nt, Human
ucuaaacugcccc

SEQ ID NO: 1661125 - RNA, 16 nt, Human
ucuaaacugcccccuc

SEQ ID NO: 1661126 - RNA, 22 nt, Human
ucuaaacugcccccucugcccu

SEQ ID NO: 1661127 - RNA, 23 nt, Human
ucuaaacugcccccucugcccug

SEQ ID NO: 1661128 - RNA, 17 nt, Human
ucuaaagcugccagccg

SEQ ID NO: 1661129 - RNA, 16 nt, Human
ucuaaaggcuaccuuu

SEQ ID NO: 1661130 - RNA, 13 nt, Human
ucuaaaggcuacc

SEQ ID NO: 1661131 - RNA, 13 nt, Human
acuuguauuaugu

SEQ ID NO: 1661132 - RNA, 14 nt, Human
acuuguauuaugug

SEQ ID NO: 1661133 - RNA, 14 nt, Human
acuuguaugaaaga

SEQ ID NO: 1661134 - RNA, 15 nt, Human
acuuguauuaugugu

SEQ ID NO: 1661135 - RNA, 14 nt, Human
acuugucuuuggac

SEQ ID NO: 1661136 - RNA, 14 nt, Human
acuuggaagcuccg

SEQ ID NO: 1661137 - RNA, 19 nt, Human
acuugagaauuacccuuuu

SEQ ID NO: 1661138 - RNA, 17 nt, Human
acuugaaaauuaacaug

SEQ ID NO: 1661139 - RNA, 18 nt, Human
acuugaaaauuaacauga

SEQ ID NO: 1661140 - RNA, 16 nt, Human
acuugaaauuugaauu

SEQ ID NO: 1661141 - RNA, 23 nt, Human
acuugaacccgggaggcagaggu

SEQ ID NO: 1661142 - RNA, 16 nt, Human
ucuauuguuucuuuca

SEQ ID NO: 1661143 - RNA, 16 nt, Human
ucucaaaaaaagaaaa

SEQ ID NO: 1661144 - RNA, 13 nt, Human
ucucacuccuacc

SEQ ID NO: 1661145 - RNA, 17 nt, Human
ucucaaaacugcacugu

SEQ ID NO: 1661146 - RNA, 22 nt, Human
acuucgggaggucgaggcagga

SEQ ID NO: 1661147 - RNA, 13 nt, Human
acuucuaaguaaa

SEQ ID NO: 1661148 - RNA, 18 nt, Human
acuucuaaguaaaaccac

SEQ ID NO: 1661149 - RNA, 19 nt, Human
acuucuaaguaaaaccaca

SEQ ID NO: 1661150 - RNA, 21 nt, Human
acuucuaaguaaaaccacagc

SEQ ID NO: 1661151 - RNA, 17 nt, Human
acuucgggaggucgagg

SEQ ID NO: 1661152 - RNA, 20 nt, Human
acuucgggaggucgaggcag

SEQ ID NO: 1661153 - RNA, 16 nt, Human
ucucacuccuaccugg

SEQ ID NO: 1661154 - RNA, 17 nt, Human
ucucacuccuaccuggu

SEQ ID NO: 1661155 - RNA, 18 nt, Human
ucucacuccuaccuggua

SEQ ID NO: 1661156 - RNA, 12 nt, Human
ucuaccugaggg

SEQ ID NO: 1661157 - RNA, 19 nt, Human
ucuaccugaggggccucuu

SEQ ID NO: 1661158 - RNA, 15 nt, Human
acuuacuguacauga

SEQ ID NO: 1661159 - RNA, 20 nt, Human
acuuagagguggggagcaga

SEQ ID NO: 1661160 - RNA, 14 nt, Human
acuuacuguacaug

SEQ ID NO: 1661161 - RNA, 13 nt, Human
acuuacuguacau

SEQ ID NO: 1661162 - RNA, 16 nt, Human
acuuacuguacaugaa

SEQ ID NO: 1661163 - RNA, 17 nt, Human
acuucaggcucuucucc

SEQ ID NO: 1661164 - RNA, 18 nt, Human
acuucaggcucuucuccu

SEQ ID NO: 1661165 - RNA, 20 nt, Human
acuucaggcucuucuccuuu

SEQ ID NO: 1661166 - RNA, 17 nt, Human
acuucauuaauaauaaa

SEQ ID NO: 1661167 - RNA, 18 nt, Human
acuuccaauuuacauacu

SEQ ID NO: 1661168 - RNA, 17 nt, Human
acuuccacugccauccu

SEQ ID NO: 1661169 - RNA, 17 nt, Human
acuuccauaaucuggac

SEQ ID NO: 1661170 - RNA, 20 nt, Human
acuuccagauccuggaaauc

SEQ ID NO: 1661171 - RNA, 12 nt, Human
ucuaguucacuc

SEQ ID NO: 1661172 - RNA, 16 nt, Human
ucuaguucacucucca

SEQ ID NO: 1661173 - RNA, 19 nt, Human
ucuaguucacucuccauuu

SEQ ID NO: 1661174 - RNA, 23 nt, Human
ucuaguuugauuaaauucuugca

SEQ ID NO: 1661175 - RNA, 13 nt, Human
ucuauaauuuaaa

SEQ ID NO: 1661176 - RNA, 24 nt, Human
ucuagauacuguaucaugacaaag

SEQ ID NO: 1661177 - RNA, 21 nt, Human
accgaacugauguaaguaaac

SEQ ID NO: 1661178 - RNA, 22 nt, Human
ucagguggggucacucuggcag

SEQ ID NO: 1661179 - RNA, 21 nt, Human
accgaaaacguggcugcuuca

SEQ ID NO: 1661180 - RNA, 22 nt, Human
accgaaaacguggcugcuucaa

SEQ ID NO: 1661181 - RNA, 23 nt, Human
ucagguggggucacucuggcagc

SEQ ID NO: 1661182 - RNA, 15 nt, Human
ucaggugucccugca

SEQ ID NO: 1661183 - RNA, 17 nt, Human
ucaggugucccugcacu

SEQ ID NO: 1661184 - RNA, 18 nt, Human
ucaggugucccugcacuu

SEQ ID NO: 1661185 - RNA, 20 nt, Human
acccuugccgucuaccugag

SEQ ID NO: 1661186 - RNA, 20 nt, Human
accgaaaacguggcugcuuc

SEQ ID NO: 1661187 - RNA, 15 nt, Human
acccuugugguccca

SEQ ID NO: 1661188 - RNA, 13 nt, Human
ucaguaauaacuc

SEQ ID NO: 1661189 - RNA, 13 nt, Human
ucaguaagccgug

SEQ ID NO: 1661190 - RNA, 22 nt, Human
ucagguugucugaagucacugc

SEQ ID NO: 1661191 - RNA, 22 nt, Human
ucaggugucccugcacuugcag

SEQ ID NO: 1661192 - RNA, 24 nt, Human
ucauaaagcaggcagaacucaucu

SEQ ID NO: 1661193 - RNA, 18 nt, Human
ucauaaauaaaguuuguu

SEQ ID NO: 1661194 - RNA, 19 nt, Human
ucaguuguuagugugucuu

SEQ ID NO: 1661195 - RNA, 15 nt, Human
ucagugcuucgcaga

SEQ ID NO: 1661196 - RNA, 19 nt, Human
ucaguauugaagcauuuua

SEQ ID NO: 1661197 - RNA, 22 nt, Human
ucaguauugaagcauuuuauaa

SEQ ID NO: 1661198 - RNA, 14 nt, Human
ucaguggcagcugc

SEQ ID NO: 1661199 - RNA, 15 nt, Human
ucaguggcagcugcu

SEQ ID NO: 1661200 - RNA, 16 nt, Human
ucaguggcagcugcuu

SEQ ID NO: 1661201 - RNA, 19 nt, Human
ucagugccuuauggaacac

SEQ ID NO: 1661202 - RNA, 20 nt, Human
ucagugccuuauggaacacu

SEQ ID NO: 1661203 - RNA, 22 nt, Human
ucagugccuuauggaacacucu

SEQ ID NO: 1661204 - RNA, 23 nt, Human
ucagugccuuauggaacacucug

SEQ ID NO: 1661205 - RNA, 14 nt, Human
ucaguauugaagca

SEQ ID NO: 1661206 - RNA, 15 nt, Human
ucaguauugaagcau

SEQ ID NO: 1661207 - RNA, 16 nt, Human
ucaguauugaagcauu

SEQ ID NO: 1661208 - RNA, 17 nt, Human
ucaguauugaagcauuu

SEQ ID NO: 1661209 - RNA, 18 nt, Human
ucaguauugaagcauuuu

SEQ ID NO: 1661210 - RNA, 21 nt, Human
ucagguaaucgaccugccucg

SEQ ID NO: 1661211 - RNA, 19 nt, Human
acccgcuaagagggaggga

SEQ ID NO: 1661212 - RNA, 19 nt, Human
ucagguaaucgaccugccu

SEQ ID NO: 1661213 - RNA, 20 nt, Human
ucagguaaucgaccugccuc

SEQ ID NO: 1661214 - RNA, 18 nt, Human
ucagguaaucgaccugcc

SEQ ID NO: 1661215 - RNA, 23 nt, Human
ucaggguuggccccugcccggcu

SEQ ID NO: 1661216 - RNA, 18 nt, Human
ucaggguuggccccugcc

SEQ ID NO: 1661217 - RNA, 19 nt, Human
ucaggguuggccccugccc

SEQ ID NO: 1661218 - RNA, 20 nt, Human
ucaggccaggcccucugccc

SEQ ID NO: 1661219 - RNA, 19 nt, Human
ucaggccaggcccucugcc

SEQ ID NO: 1661220 - RNA, 17 nt, Human
ucaggccaggcccucug

SEQ ID NO: 1661221 - RNA, 18 nt, Human
ucaggccaggcccucugc

SEQ ID NO: 1661222 - RNA, 12 nt, Human
ucaggggugugc

SEQ ID NO: 1661223 - RNA, 19 nt, Human
ucaggggugugcggccuuu

SEQ ID NO: 1661224 - RNA, 23 nt, Human
ucaggggugugcggccuuuggcu

SEQ ID NO: 1661225 - RNA, 13 nt, Human
ucaggccacuuga

SEQ ID NO: 1661226 - RNA, 13 nt, Human
ucaggccagcugc

SEQ ID NO: 1661227 - RNA, 14 nt, Human
ucaggccagcugcu

SEQ ID NO: 1661228 - RNA, 13 nt, Human
ucaggccaggccc

SEQ ID NO: 1661229 - RNA, 14 nt, Human
ucaggccaggcccu

SEQ ID NO: 1661230 - RNA, 15 nt, Human
ucaggccaggcccuc

SEQ ID NO: 1661231 - RNA, 16 nt, Human
ucaggccaggcccucu

SEQ ID NO: 1661232 - RNA, 12 nt, Human
acccccagccug

SEQ ID NO: 1661233 - RNA, 14 nt, Human
acccccagccugcu

SEQ ID NO: 1661234 - RNA, 13 nt, Human
acccccagccugc

SEQ ID NO: 1661235 - RNA, 17 nt, Human
ucaggcaggugggaugg

SEQ ID NO: 1661236 - RNA, 18 nt, Human
ucaggcaggugggaugga

SEQ ID NO: 1661237 - RNA, 23 nt, Human
acccugaggcccagagggccugc

SEQ ID NO: 1661238 - RNA, 11 nt, Human
acccugaggcc

SEQ ID NO: 1661239 - RNA, 13 nt, Human
acccugaggccca

SEQ ID NO: 1661240 - RNA, 19 nt, Human
acccugaggcccagagggc

SEQ ID NO: 1661241 - RNA, 21 nt, Human
acccugaggcccagagggccu

SEQ ID NO: 1661242 - RNA, 17 nt, Human
acccucauguucuuaau

SEQ ID NO: 1661243 - RNA, 15 nt, Human
acccucauguucuua

SEQ ID NO: 1661244 - RNA, 14 nt, Human
acccucauguucuu

SEQ ID NO: 1661245 - RNA, 22 nt, Human
acccgggaagggggcugggaca

SEQ ID NO: 1661246 - RNA, 15 nt, Human
acccggaggggccug

SEQ ID NO: 1661247 - RNA, 19 nt, Human
acccgggaagggggcuggg

SEQ ID NO: 1661248 - RNA, 20 nt, Human
acccgggaagggggcuggga

SEQ ID NO: 1661249 - RNA, 21 nt, Human
acccuccuuucaccacaugug

SEQ ID NO: 1661250 - RNA, 15 nt, Human
acccgggaggcagag

SEQ ID NO: 1661251 - RNA, 23 nt, Human
ucacugagacagcccgggcucug

SEQ ID NO: 1661252 - RNA, 19 nt, Human
ucacauuccugaacaggau

SEQ ID NO: 1661253 - RNA, 22 nt, Human
ucaccagccccagugcccacag

SEQ ID NO: 1661254 - RNA, 21 nt, Human
ucacuauguugcccaggcagg

SEQ ID NO: 1661255 - RNA, 21 nt, Human
ucacugcaaccuucgccaccu

SEQ ID NO: 1661256 - RNA, 18 nt, Human
ucacugcaaccuccgccu

SEQ ID NO: 1661257 - RNA, 15 nt, Human
ucacugcacagugca

SEQ ID NO: 1661258 - RNA, 14 nt, Human
ucacuguugcccag

SEQ ID NO: 1661259 - RNA, 15 nt, Human
ucacuguugcccagg

SEQ ID NO: 1661260 - RNA, 16 nt, Human
ucacuguugcccaggc

SEQ ID NO: 1661261 - RNA, 17 nt, Human
accaugggauaaaugcc

SEQ ID NO: 1661262 - RNA, 18 nt, Human
accaugggauaaaugcca

SEQ ID NO: 1661263 - RNA, 18 nt, Human
accauguuggccaggcug

SEQ ID NO: 1661264 - RNA, 19 nt, Human
accauucuccaccugccag

SEQ ID NO: 1661265 - RNA, 20 nt, Human
accauucuccaccugccagg

SEQ ID NO: 1661266 - RNA, 21 nt, Human
accauucuccaccugccaggg

SEQ ID NO: 1661267 - RNA, 22 nt, Human
accauuuugcugucccuuuucc

SEQ ID NO: 1661268 - RNA, 23 nt, Human
accauuuugcugucccuuuuccu

SEQ ID NO: 1661269 - RNA, 21 nt, Human
accauuuugggguacccacug

SEQ ID NO: 1661270 - RNA, 21 nt, Human
acccacuggacucaccucccc

SEQ ID NO: 1661271 - RNA, 14 nt, Human
acccacuggacuca

SEQ ID NO: 1661272 - RNA, 17 nt, Human
acccacuggacucaccu

SEQ ID NO: 1661273 - RNA, 20 nt, Human
acccacugcuuuuggucugu

SEQ ID NO: 1661274 - RNA, 22 nt, Human
accauuuugggguacccacugc

SEQ ID NO: 1661275 - RNA, 16 nt, Human
acccaaauguucauca

SEQ ID NO: 1661276 - RNA, 20 nt, Human
acccaaauguucaucaauga

SEQ ID NO: 1661277 - RNA, 13 nt, Human
acccaggagcccc

SEQ ID NO: 1661278 - RNA, 15 nt, Human
acccaggagccccga

SEQ ID NO: 1661279 - RNA, 13 nt, Human
acccagcgagccc

SEQ ID NO: 1661280 - RNA, 16 nt, Human
acccagcgagcccugg

SEQ ID NO: 1661281 - RNA, 17 nt, Human
acccagcgagcccuggu

SEQ ID NO: 1661282 - RNA, 13 nt, Human
accccagguuucu

SEQ ID NO: 1661283 - RNA, 11 nt, Human
acccaggugcu

SEQ ID NO: 1661284 - RNA, 23 nt, Human
acccaggugcuaggaacacuccu

SEQ ID NO: 1661285 - RNA, 19 nt, Human
accccagcuggggccaggc

SEQ ID NO: 1661286 - RNA, 22 nt, Human
accccagcuggggccaggcugg

SEQ ID NO: 1661287 - RNA, 16 nt, Human
ucagaauagaaauuag

SEQ ID NO: 1661288 - RNA, 15 nt, Human
acccagcccacuucu

SEQ ID NO: 1661289 - RNA, 16 nt, Human
ucagaauucucuaguu

SEQ ID NO: 1661290 - RNA, 20 nt, Human
ucagaauucucagaaucuca

SEQ ID NO: 1661291 - RNA, 10 nt, Human
ucagaauucu

SEQ ID NO: 1661292 - RNA, 12 nt, Human
ucagaauucuca

SEQ ID NO: 1661293 - RNA, 16 nt, Human
ucagagacuccugcag

SEQ ID NO: 1661294 - RNA, 23 nt, Human
ucagagacuccugcaggcagcca

SEQ ID NO: 1661295 - RNA, 21 nt, Human
ucagagccaccccuaaagaga

SEQ ID NO: 1661296 - RNA, 14 nt, Human
ucagagcugcccuc

SEQ ID NO: 1661297 - RNA, 13 nt, Human
ucagagcugcccu

SEQ ID NO: 1661298 - RNA, 15 nt, Human
ucagaucugccuaag

SEQ ID NO: 1661299 - RNA, 18 nt, Human
ucagaucugccuaaggac

SEQ ID NO: 1661300 - RNA, 20 nt, Human
ucagaucugccuaaggacuu

SEQ ID NO: 1661301 - RNA, 21 nt, Human
ucagaucugccuaaggacuuc

SEQ ID NO: 1661302 - RNA, 21 nt, Human
ucagaugcugugcaaauguua

SEQ ID NO: 1661303 - RNA, 13 nt, Human
ucagaucugccua

SEQ ID NO: 1661304 - RNA, 16 nt, Human
ucagaucucuaacuuc

SEQ ID NO: 1661305 - RNA, 16 nt, Human
ucagagcugcccucuc

SEQ ID NO: 1661306 - RNA, 15 nt, Human
ucagagcugcccucu

SEQ ID NO: 1661307 - RNA, 17 nt, Human
ucagagcugcccucucc

SEQ ID NO: 1661308 - RNA, 18 nt, Human
ucagagcugcccucuccu

SEQ ID NO: 1661309 - RNA, 16 nt, Human
ucacagaccuuugaac

SEQ ID NO: 1661310 - RNA, 12 nt, Human
ucaauuuaaaaa

SEQ ID NO: 1661311 - RNA, 21 nt, Human
ucacagaacccuuggagccaa

SEQ ID NO: 1661312 - RNA, 13 nt, Human
ucaauuuaaaaaa

SEQ ID NO: 1661313 - RNA, 15 nt, Human
ucacagaugggugcu

SEQ ID NO: 1661314 - RNA, 14 nt, Human
ucacagaugggugc

SEQ ID NO: 1661315 - RNA, 19 nt, Human
ucacagcuccaagaauuuc

SEQ ID NO: 1661316 - RNA, 17 nt, Human
ucacagccagacuggca

SEQ ID NO: 1661317 - RNA, 23 nt, Human
ucacagccagacuggcacaguuu

SEQ ID NO: 1661318 - RNA, 13 nt, Human
ucacauuccugaa

SEQ ID NO: 1661319 - RNA, 17 nt, Human
ucacauuccugaacagg

SEQ ID NO: 1661320 - RNA, 20 nt, Human
ucacauuccugaacaggaua

SEQ ID NO: 1661321 - RNA, 17 nt, Human
ucaccagccccagugcc

SEQ ID NO: 1661322 - RNA, 20 nt, Human
ucacauauugauuuccguua

SEQ ID NO: 1661323 - RNA, 18 nt, Human
ucacauauugauuuccgu

SEQ ID NO: 1661324 - RNA, 16 nt, Human
ucacauauugauuucc

SEQ ID NO: 1661325 - RNA, 14 nt, Human
ucacaggaaguaga

SEQ ID NO: 1661326 - RNA, 17 nt, Human
accacacagaggcugcc

SEQ ID NO: 1661327 - RNA, 15 nt, Human
accacacccagccca

SEQ ID NO: 1661328 - RNA, 16 nt, Human
accacacccagcccac

SEQ ID NO: 1661329 - RNA, 20 nt, Human
accacacccagcccacuucu

SEQ ID NO: 1661330 - RNA, 21 nt, Human
accacacccagcccacuucug

SEQ ID NO: 1661331 - RNA, 23 nt, Human
accacacccagcccacuucugcc

SEQ ID NO: 1661332 - RNA, 15 nt, Human
accaacccucagagc

SEQ ID NO: 1661333 - RNA, 16 nt, Human
accacaagacugcaca

SEQ ID NO: 1661334 - RNA, 20 nt, Human
accaaccacugcgaccacaa

SEQ ID NO: 1661335 - RNA, 17 nt, Human
accaacauacucccauc

SEQ ID NO: 1661336 - RNA, 16 nt, Human
accaacauacucccau

SEQ ID NO: 1661337 - RNA, 14 nt, Human
accaacacgagcag

SEQ ID NO: 1661338 - RNA, 19 nt, Human
accaacacgagcaggcuac

SEQ ID NO: 1661339 - RNA, 16 nt, Human
accaaaucagcugcua

SEQ ID NO: 1661340 - RNA, 19 nt, Human
accaaaucagcugcuacua

SEQ ID NO: 1661341 - RNA, 12 nt, Human
accaaaaaccag

SEQ ID NO: 1661342 - RNA, 13 nt, Human
accaaaaaccagu

SEQ ID NO: 1661343 - RNA, 23 nt, Human
accaaaaaucucaauauuucaga

SEQ ID NO: 1661344 - RNA, 20 nt, Human
ucaagagggcacugguggcc

SEQ ID NO: 1661345 - RNA, 21 nt, Human
ucaagagggcacugguggccc

SEQ ID NO: 1661346 - RNA, 17 nt, Human
ucaagagggucugagga

SEQ ID NO: 1661347 - RNA, 21 nt, Human
ucaagugauucucaugccuca

SEQ ID NO: 1661348 - RNA, 22 nt, Human
ucaagugauucucaugccucag

SEQ ID NO: 1661349 - RNA, 16 nt, Human
ucaagugauucuccug

SEQ ID NO: 1661350 - RNA, 17 nt, Human
ucaagugauucuccugc

SEQ ID NO: 1661351 - RNA, 18 nt, Human
ucaauaggaaaaacugau

SEQ ID NO: 1661352 - RNA, 19 nt, Human
ucaauaggaaaaacugauu

SEQ ID NO: 1661353 - RNA, 22 nt, Human
ucaauaggaaaaacugauuuuu

SEQ ID NO: 1661354 - RNA, 23 nt, Human
ucaauauuucagauaaucacaau

SEQ ID NO: 1661355 - RNA, 19 nt, Human
acauuuuuaagugcugcau

SEQ ID NO: 1661356 - RNA, 18 nt, Human
acauuuuuaagugcugca

SEQ ID NO: 1661357 - RNA, 15 nt, Human
acauuuuuaagugcu

SEQ ID NO: 1661358 - RNA, 23 nt, Human
acauuuuucuuagggaaggauac

SEQ ID NO: 1661359 - RNA, 13 nt, Human
acauuuuucuuag

SEQ ID NO: 1661360 - RNA, 16 nt, Human
acauuggaaacaaguc

SEQ ID NO: 1661361 - RNA, 21 nt, Human
acauugcggacagccacggcc

SEQ ID NO: 1661362 - RNA, 22 nt, Human
acauugcggacagccacggcca

SEQ ID NO: 1661363 - RNA, 14 nt, Human
acauugguguugua

SEQ ID NO: 1661364 - RNA, 16 nt, Human
acauugguguuguacu

SEQ ID NO: 1661365 - RNA, 22 nt, Human
acauugguguuguacucaauuu

SEQ ID NO: 1661366 - RNA, 23 nt, Human
acauugguguuguacucaauuuu

SEQ ID NO: 1661367 - RNA, 14 nt, Human
acauugguucuugu

SEQ ID NO: 1661368 - RNA, 16 nt, Human
acauugguucuuguau

SEQ ID NO: 1661369 - RNA, 18 nt, Human
acauugguucuuguauua

SEQ ID NO: 1661370 - RNA, 21 nt, Human
acauugguucuuguauuaaga

SEQ ID NO: 1661371 - RNA, 22 nt, Human
acauugguucuuguauuaagaa

SEQ ID NO: 1661372 - RNA, 23 nt, Human
acauugguucuuguauuaagaau

SEQ ID NO: 1661373 - RNA, 21 nt, Human
acaugucuuuucuugcaugag

SEQ ID NO: 1661374 - RNA, 16 nt, Human
acauguauuuguuugc

SEQ ID NO: 1661375 - RNA, 12 nt, Human
acauguauuugu

SEQ ID NO: 1661376 - RNA, 22 nt, Human
acauggcuggagcuagaauuug

SEQ ID NO: 1661377 - RNA, 14 nt, Human
acauggccuuugcu

SEQ ID NO: 1661378 - RNA, 15 nt, Human
acauggaguauaugu

SEQ ID NO: 1661379 - RNA, 19 nt, Human
acauggaguauaugucaag

SEQ ID NO: 1661380 - RNA, 23 nt, Human
acaugagcaucaggccaggcccu

SEQ ID NO: 1661381 - RNA, 20 nt, Human
acauggaauaacauguaauu

SEQ ID NO: 1661382 - RNA, 18 nt, Human
acauggaauaacauguaa

SEQ ID NO: 1661383 - RNA, 16 nt, Human
acaugagguacugaga

SEQ ID NO: 1661384 - RNA, 15 nt, Human
ucaaaguugccuaaa

SEQ ID NO: 1661385 - RNA, 18 nt, Human
ucaaaguugccuaaaucc

SEQ ID NO: 1661386 - RNA, 21 nt, Human
ucaaauacgugggcauucaaa

SEQ ID NO: 1661387 - RNA, 22 nt, Human
ucaaauacgugggcauucaaau

SEQ ID NO: 1661388 - RNA, 13 nt, Human
ucaaauauauuca

SEQ ID NO: 1661389 - RNA, 23 nt, Human
ucaaauacgugggcauucaaaug

SEQ ID NO: 1661390 - RNA, 23 nt, Human
acaugaaaacacauuuuucuuag

SEQ ID NO: 1661391 - RNA, 13 nt, Human
acaugagcaucag

SEQ ID NO: 1661392 - RNA, 15 nt, Human
ucaaagcaaaugucu

SEQ ID NO: 1661393 - RNA, 23 nt, Human
ucaaagcaaaugucuuccuggau

SEQ ID NO: 1661394 - RNA, 22 nt, Human
ucaaagauauuuugcuuuguga

SEQ ID NO: 1661395 - RNA, 20 nt, Human
ucaaagauauuuugcuuugu

SEQ ID NO: 1661396 - RNA, 13 nt, Human
ucaaagauauuuu

SEQ ID NO: 1661397 - RNA, 13 nt, Human
ucaaacagucuca

SEQ ID NO: 1661398 - RNA, 20 nt, Human
ucaaacagucucaggaaauc

SEQ ID NO: 1661399 - RNA, 21 nt, Human
ucaaacagucucaggaaauca

SEQ ID NO: 1661400 - RNA, 16 nt, Human
ucaaaagcugggcagg

SEQ ID NO: 1661401 - RNA, 15 nt, Human
uauuuugcuuuguga

SEQ ID NO: 1661402 - RNA, 13 nt, Human
uauuuugcuuugu

SEQ ID NO: 1661403 - RNA, 20 nt, Human
uauuuugcuuugugauuuuu

SEQ ID NO: 1661404 - RNA, 14 nt, Human
uauuuuaauaaaca

SEQ ID NO: 1661405 - RNA, 17 nt, Human
uauuuuaauaaacacuc

SEQ ID NO: 1661406 - RNA, 19 nt, Human
uauuuuaauaauguuucaa

SEQ ID NO: 1661407 - RNA, 13 nt, Human
uauuuuacauaaa

SEQ ID NO: 1661408 - RNA, 22 nt, Human
uauuuuaauaauguuucaaaca

SEQ ID NO: 1661409 - RNA, 17 nt, Human
uauuuuuguagagccag

SEQ ID NO: 1661410 - RNA, 17 nt, Human
uauuuuguguuuaggaa

SEQ ID NO: 1661411 - RNA, 20 nt, Human
uauuuuguguuuaggaacua

SEQ ID NO: 1661412 - RNA, 16 nt, Human
acaugaaaacacauuu

SEQ ID NO: 1661413 - RNA, 15 nt, Human
acaugaaaacacauu

SEQ ID NO: 1661414 - RNA, 14 nt, Human
uauuuuaagacgaa

SEQ ID NO: 1661415 - RNA, 22 nt, Human
uauuuuaagacgaaacauuugu

SEQ ID NO: 1661416 - RNA, 14 nt, Human
uauuuuaaaagaau

SEQ ID NO: 1661417 - RNA, 15 nt, Human
uauuuguuugcauag

SEQ ID NO: 1661418 - RNA, 18 nt, Human
uauuuuaaaagaaugauu

SEQ ID NO: 1661419 - RNA, 19 nt, Human
acaucuuggucagauuuga

SEQ ID NO: 1661420 - RNA, 17 nt, Human
acaucuugcucugcuga

SEQ ID NO: 1661421 - RNA, 14 nt, Human
uaugugccagauuu

SEQ ID NO: 1661422 - RNA, 19 nt, Human
uaugugccagauuuaugca

SEQ ID NO: 1661423 - RNA, 15 nt, Human
acaucuugcucugcu

SEQ ID NO: 1661424 - RNA, 16 nt, Human
acaucuugcucugcug

SEQ ID NO: 1661425 - RNA, 22 nt, Human
uccccacuugagaauuacccuu

SEQ ID NO: 1661426 - RNA, 14 nt, Human
acguacacauuuua

SEQ ID NO: 1661427 - RNA, 13 nt, Human
acguacacauuuu

SEQ ID NO: 1661428 - RNA, 12 nt, Human
acguacacauuu

SEQ ID NO: 1661429 - RNA, 13 nt, Human
acguacacacaca

SEQ ID NO: 1661430 - RNA, 14 nt, Human
acuacuagggaaau

SEQ ID NO: 1661431 - RNA, 18 nt, Human
acuacggaauaguuggcu

SEQ ID NO: 1661432 - RNA, 20 nt, Human
acuagaguuuagcuggaaaa

SEQ ID NO: 1661433 - RNA, 13 nt, Human
acuauguugauaa

SEQ ID NO: 1661434 - RNA, 12 nt, Human
acuauguaucaa

SEQ ID NO: 1661435 - RNA, 13 nt, Human
acuauucaaacag

SEQ ID NO: 1661436 - RNA, 14 nt, Human
acuauucaaacagu

SEQ ID NO: 1661437 - RNA, 16 nt, Human
acuauucaaacagucu

SEQ ID NO: 1661438 - RNA, 18 nt, Human
acuauucaaacagucuca

SEQ ID NO: 1661439 - RNA, 12 nt, Human
acuauaauguaa

SEQ ID NO: 1661440 - RNA, 13 nt, Human
acuauaauguaag

SEQ ID NO: 1661441 - RNA, 14 nt, Human
acuauaauguaagc

SEQ ID NO: 1661442 - RNA, 16 nt, Human
acuaugauuuggaaaa

SEQ ID NO: 1661443 - RNA, 15 nt, Human
acuaugauuuggaaa

SEQ ID NO: 1661444 - RNA, 21 nt, Human
acuauaauguaagcucuacug

SEQ ID NO: 1661445 - RNA, 21 nt, Human
acucacauuuauucugcucac

SEQ ID NO: 1661446 - RNA, 19 nt, Human
acucacauuuauucugcuc

SEQ ID NO: 1661447 - RNA, 20 nt, Human
acucacauuuauucugcuca

SEQ ID NO: 1661448 - RNA, 14 nt, Human
acucaaugcacuga

SEQ ID NO: 1661449 - RNA, 24 nt, Human
uccccuccucugcuugccaucccu

SEQ ID NO: 1661450 - RNA, 14 nt, Human
uccccuccucugcu

SEQ ID NO: 1661451 - RNA, 18 nt, Human
uccccuccucugcuugcc

SEQ ID NO: 1661452 - RNA, 15 nt, Human
uccccuccucugcuu

SEQ ID NO: 1661453 - RNA, 19 nt, Human
acucaccucccccaucucu

SEQ ID NO: 1661454 - RNA, 20 nt, Human
acucaccucccccaucucuu

SEQ ID NO: 1661455 - RNA, 17 nt, Human
acucaccccagccccaa

SEQ ID NO: 1661456 - RNA, 23 nt, Human
ucccugaaggccccgcccaggcu

SEQ ID NO: 1661457 - RNA, 18 nt, Human
ucccugaaggccccgccc

SEQ ID NO: 1661458 - RNA, 21 nt, Human
ucccugaaggccccgcccagg

SEQ ID NO: 1661459 - RNA, 22 nt, Human
ucccugaaggccccgcccaggc

SEQ ID NO: 1661460 - RNA, 11 nt, Human
ucccucuuucc

SEQ ID NO: 1661461 - RNA, 13 nt, Human
ucccucuuucccu

SEQ ID NO: 1661462 - RNA, 19 nt, Human
ucccuccaccucccugcaa

SEQ ID NO: 1661463 - RNA, 18 nt, Human
ucccucagucuggcccuu

SEQ ID NO: 1661464 - RNA, 20 nt, Human
ucccucagucuggcccuucc

SEQ ID NO: 1661465 - RNA, 17 nt, Human
ucccuccaccucccugc

SEQ ID NO: 1661466 - RNA, 15 nt, Human
ucccuccaccucccu

SEQ ID NO: 1661467 - RNA, 14 nt, Human
ucccuccaccuccc

SEQ ID NO: 1661468 - RNA, 23 nt, Human
acucaucuagguaaauuacaguu

SEQ ID NO: 1661469 - RNA, 12 nt, Human
acucaucuuagg

SEQ ID NO: 1661470 - RNA, 16 nt, Human
acucauugaccugagg

SEQ ID NO: 1661471 - RNA, 17 nt, Human
acucauugaccugaggc

SEQ ID NO: 1661472 - RNA, 18 nt, Human
acucauugaccugaggcc

SEQ ID NO: 1661473 - RNA, 22 nt, Human
acucauugaccugaggcccuuc

SEQ ID NO: 1661474 - RNA, 21 nt, Human
acuccaaacugacucuuaaga

SEQ ID NO: 1661475 - RNA, 21 nt, Human
acucaccugccccucaacucu

SEQ ID NO: 1661476 - RNA, 14 nt, Human
acucaccugccccu

SEQ ID NO: 1661477 - RNA, 19 nt, Human
acucaccugccccucaacu

SEQ ID NO: 1661478 - RNA, 14 nt, Human
acucagaagacacu

SEQ ID NO: 1661479 - RNA, 15 nt, Human
acucagaagacacug

SEQ ID NO: 1661480 - RNA, 16 nt, Human
acucagaagacacuga

SEQ ID NO: 1661481 - RNA, 17 nt, Human
acucagaagacacugau

SEQ ID NO: 1661482 - RNA, 18 nt, Human
acucagaagacacugaug

SEQ ID NO: 1661483 - RNA, 22 nt, Human
acucagaauucucuaguuugau

SEQ ID NO: 1661484 - RNA, 21 nt, Human
acucagaauucucuaguuuga

SEQ ID NO: 1661485 - RNA, 14 nt, Human
acucagaauucucu

SEQ ID NO: 1661486 - RNA, 17 nt, Human
acucugacaacagacuu

SEQ ID NO: 1661487 - RNA, 18 nt, Human
acucugacaacagacuuc

SEQ ID NO: 1661488 - RNA, 20 nt, Human
acucugacaacagacuucug

SEQ ID NO: 1661489 - RNA, 22 nt, Human
acucugacaacagacuucugaa

SEQ ID NO: 1661490 - RNA, 23 nt, Human
acucugacaacagacuucugaaa

SEQ ID NO: 1661491 - RNA, 14 nt, Human
acucguauaugucu

SEQ ID NO: 1661492 - RNA, 17 nt, Human
acucgcgacaaugcaaa

SEQ ID NO: 1661493 - RNA, 15 nt, Human
acucgcgacaaugca

SEQ ID NO: 1661494 - RNA, 16 nt, Human
acucgcgacaaugcaa

SEQ ID NO: 1661495 - RNA, 20 nt, Human
acucuucaguuaagccuuug

SEQ ID NO: 1661496 - RNA, 21 nt, Human
acucuucaguuaagccuuugg

SEQ ID NO: 1661497 - RNA, 13 nt, Human
acucuugaaaaau

SEQ ID NO: 1661498 - RNA, 21 nt, Human
acucuuauugcccacgcugga

SEQ ID NO: 1661499 - RNA, 19 nt, Human
acucuggcagcucagagag

SEQ ID NO: 1661500 - RNA, 20 nt, Human
acucuggcagcucagagagg

SEQ ID NO: 1661501 - RNA, 16 nt, Human
acucuggcagcucaga

SEQ ID NO: 1661502 - RNA, 17 nt, Human
acucuggcagcucagag

SEQ ID NO: 1661503 - RNA, 16 nt, Human
acucgaguuacagaca

SEQ ID NO: 1661504 - RNA, 12 nt, Human
uccuacucugug

SEQ ID NO: 1661505 - RNA, 21 nt, Human
uccuagccugugccucuggga

SEQ ID NO: 1661506 - RNA, 23 nt, Human
uccgugcuaaggacuuguuagau

SEQ ID NO: 1661507 - RNA, 13 nt, Human
uccguuaaaauac

SEQ ID NO: 1661508 - RNA, 15 nt, Human
uccguuaaaauacca

SEQ ID NO: 1661509 - RNA, 17 nt, Human
uccgugcuaaggacuug

SEQ ID NO: 1661510 - RNA, 18 nt, Human
uccgugcuaaggacuugu

SEQ ID NO: 1661511 - RNA, 14 nt, Human
acuccagaaaguga

SEQ ID NO: 1661512 - RNA, 18 nt, Human
acuccagaaagugacaag

SEQ ID NO: 1661513 - RNA, 14 nt, Human
acucuugaaaaaug

SEQ ID NO: 1661514 - RNA, 19 nt, Human
acucuugaaaaaugcaugu

SEQ ID NO: 1661515 - RNA, 21 nt, Human
acucuugaaaaaugcauguug

SEQ ID NO: 1661516 - RNA, 14 nt, Human
uccucccaccucag

SEQ ID NO: 1661517 - RNA, 15 nt, Human
uccucccaccucagc

SEQ ID NO: 1661518 - RNA, 16 nt, Human
uccucccaccucagcc

SEQ ID NO: 1661519 - RNA, 18 nt, Human
uccucccaccucagccuc

SEQ ID NO: 1661520 - RNA, 20 nt, Human
uccucccaccucagccuccc

SEQ ID NO: 1661521 - RNA, 21 nt, Human
uccucccaccucagccucccg

SEQ ID NO: 1661522 - RNA, 19 nt, Human
acucuucuugauuaaaagu

SEQ ID NO: 1661523 - RNA, 20 nt, Human
acucuucuugauuaaaaguu

SEQ ID NO: 1661524 - RNA, 13 nt, Human
uccucugagccuu

SEQ ID NO: 1661525 - RNA, 17 nt, Human
uccucugagccuuggga

SEQ ID NO: 1661526 - RNA, 12 nt, Human
uccucugagccu

SEQ ID NO: 1661527 - RNA, 12 nt, Human
uccucucugccc

SEQ ID NO: 1661528 - RNA, 13 nt, Human
uccucucugcccu

SEQ ID NO: 1661529 - RNA, 14 nt, Human
uccucucugcccua

SEQ ID NO: 1661530 - RNA, 15 nt, Human
uccucucugcccuaa

SEQ ID NO: 1661531 - RNA, 17 nt, Human
uccucuccacugccuuc

SEQ ID NO: 1661532 - RNA, 18 nt, Human
uccucuccacugccuucg

SEQ ID NO: 1661533 - RNA, 17 nt, Human
uccucuccccaugaugu

SEQ ID NO: 1661534 - RNA, 14 nt, Human
uccucugaggcuga

SEQ ID NO: 1661535 - RNA, 19 nt, Human
uccucuugccacugccucu

SEQ ID NO: 1661536 - RNA, 12 nt, Human
uccucugcugcu

SEQ ID NO: 1661537 - RNA, 21 nt, Human
uccugaaaacccuugccaugu

SEQ ID NO: 1661538 - RNA, 22 nt, Human
uccugaaaacccuugccaugug

SEQ ID NO: 1661539 - RNA, 15 nt, Human
uccugaagaauugaa

SEQ ID NO: 1661540 - RNA, 15 nt, Human
ucccacaggcccuuc

SEQ ID NO: 1661541 - RNA, 17 nt, Human
ucccacaggcccuuccu

SEQ ID NO: 1661542 - RNA, 21 nt, Human
ucccacaggcccuuccucucc

SEQ ID NO: 1661543 - RNA, 22 nt, Human
ucccacaggcccuuccucucca

SEQ ID NO: 1661544 - RNA, 14 nt, Human
ucccacaaaggaga

SEQ ID NO: 1661545 - RNA, 21 nt, Human
ucccaaagugcugggauuaca

SEQ ID NO: 1661546 - RNA, 17 nt, Human
uccauuuaauaauuaua

SEQ ID NO: 1661547 - RNA, 12 nt, Human
uccauuuggaaa

SEQ ID NO: 1661548 - RNA, 19 nt, Human
uccauuuggaaaucuuuaa

SEQ ID NO: 1661549 - RNA, 20 nt, Human
uccauuuggaaaucuuuaaa

SEQ ID NO: 1661550 - RNA, 20 nt, Human
ucccaaagugcugggauuac

SEQ ID NO: 1661551 - RNA, 16 nt, Human
ucccaaagugcuggga

SEQ ID NO: 1661552 - RNA, 15 nt, Human
ucccaaagugcuggg

SEQ ID NO: 1661553 - RNA, 19 nt, Human
ucccaccaacccucagagc

SEQ ID NO: 1661554 - RNA, 11 nt, Human
ucccaccccac

SEQ ID NO: 1661555 - RNA, 14 nt, Human
ucccaccccacaca

SEQ ID NO: 1661556 - RNA, 15 nt, Human
acggcucacugcagc

SEQ ID NO: 1661557 - RNA, 14 nt, Human
acggcucacugcag

SEQ ID NO: 1661558 - RNA, 20 nt, Human
uccagugaggcucugcccuu

SEQ ID NO: 1661559 - RNA, 18 nt, Human
uccagugaggcucugccc

SEQ ID NO: 1661560 - RNA, 19 nt, Human
uccagugaggcucugcccu

SEQ ID NO: 1661561 - RNA, 14 nt, Human
uccagugagacagc

SEQ ID NO: 1661562 - RNA, 12 nt, Human
uccauuuaauaa

SEQ ID NO: 1661563 - RNA, 15 nt, Human
uccaugaguccccug

SEQ ID NO: 1661564 - RNA, 16 nt, Human
uccaugaguccccugu

SEQ ID NO: 1661565 - RNA, 17 nt, Human
uccaugaguccccuguu

SEQ ID NO: 1661566 - RNA, 20 nt, Human
uccaucucuuguuuaaauuc

SEQ ID NO: 1661567 - RNA, 11 nt, Human
uccauccugag

SEQ ID NO: 1661568 - RNA, 22 nt, Human
uccaugaagauguagaggagaa

SEQ ID NO: 1661569 - RNA, 16 nt, Human
acggccaggccagagg

SEQ ID NO: 1661570 - RNA, 15 nt, Human
acggaugauuucuau

SEQ ID NO: 1661571 - RNA, 21 nt, Human
acggagucccaccuuggcugc

SEQ ID NO: 1661572 - RNA, 19 nt, Human
acggagucccaccuuggcu

SEQ ID NO: 1661573 - RNA, 17 nt, Human
acgcucucuggccuucg

SEQ ID NO: 1661574 - RNA, 14 nt, Human
acgcccccacuggu

SEQ ID NO: 1661575 - RNA, 23 nt, Human
acgcgugcacacaccagagccca

SEQ ID NO: 1661576 - RNA, 13 nt, Human
acgcguugaaauu

SEQ ID NO: 1661577 - RNA, 14 nt, Human
acgcguugaaauug

SEQ ID NO: 1661578 - RNA, 18 nt, Human
acgcguugaaauuguaau

SEQ ID NO: 1661579 - RNA, 20 nt, Human
acgcguugaaauuguaauua

SEQ ID NO: 1661580 - RNA, 13 nt, Human
acgcuacccggga

SEQ ID NO: 1661581 - RNA, 17 nt, Human
acgcuacccgggaaggg

SEQ ID NO: 1661582 - RNA, 18 nt, Human
acgcuacccgggaagggg

SEQ ID NO: 1661583 - RNA, 15 nt, Human
acgcucucuggccuu

SEQ ID NO: 1661584 - RNA, 16 nt, Human
acgcucucuggccuuc

SEQ ID NO: 1661585 - RNA, 23 nt, Human
acgccaggggaaaaucagccugc

SEQ ID NO: 1661586 - RNA, 11 nt, Human
acgccauccca

SEQ ID NO: 1661587 - RNA, 14 nt, Human
acgccaucccagcc

SEQ ID NO: 1661588 - RNA, 15 nt, Human
acgccaucccagccc

SEQ ID NO: 1661589 - RNA, 16 nt, Human
acgccaucccagcccc

SEQ ID NO: 1661590 - RNA, 17 nt, Human
acgccaucccagcccca

SEQ ID NO: 1661591 - RNA, 18 nt, Human
acgccaucccagccccaa

SEQ ID NO: 1661592 - RNA, 15 nt, Human
acgacugcccggcag

SEQ ID NO: 1661593 - RNA, 18 nt, Human
acgccaggggaaaaucag

SEQ ID NO: 1661594 - RNA, 18 nt, Human
uccaggcugggagagccu

SEQ ID NO: 1661595 - RNA, 14 nt, Human
uccaggcugggaga

SEQ ID NO: 1661596 - RNA, 17 nt, Human
uccaggcugggagagcc

SEQ ID NO: 1661597 - RNA, 14 nt, Human
acgaauauugcuga

SEQ ID NO: 1661598 - RNA, 17 nt, Human
accugccucggccuccc

SEQ ID NO: 1661599 - RNA, 18 nt, Human
accugccaggaagccagc

SEQ ID NO: 1661600 - RNA, 19 nt, Human
accugccaggaagccagca

SEQ ID NO: 1661601 - RNA, 16 nt, Human
accugccaggaagcca

SEQ ID NO: 1661602 - RNA, 17 nt, Human
accugccaggaagccag

SEQ ID NO: 1661603 - RNA, 14 nt, Human
accugauugugucu

SEQ ID NO: 1661604 - RNA, 16 nt, Human
accugaggggccucuu

SEQ ID NO: 1661605 - RNA, 14 nt, Human
accugaggggccuc

SEQ ID NO: 1661606 - RNA, 19 nt, Human
accugaauuuuggcugugu

SEQ ID NO: 1661607 - RNA, 18 nt, Human
accugaagacucauucuu

SEQ ID NO: 1661608 - RNA, 13 nt, Human
ucauaaugacuua

SEQ ID NO: 1661609 - RNA, 12 nt, Human
ucauaaugacuu

SEQ ID NO: 1661610 - RNA, 16 nt, Human
ucauaauaaguugcau

SEQ ID NO: 1661611 - RNA, 17 nt, Human
accugaccccugacccc

SEQ ID NO: 1661612 - RNA, 22 nt, Human
accugaagcuaucguaaaauua

SEQ ID NO: 1661613 - RNA, 23 nt, Human
accugaggcccuucucuccagcc

SEQ ID NO: 1661614 - RNA, 12 nt, Human
accugagcccca

SEQ ID NO: 1661615 - RNA, 17 nt, Human
accugagccccaaaagg

SEQ ID NO: 1661616 - RNA, 18 nt, Human
accugcggugcuaucucc

SEQ ID NO: 1661617 - RNA, 16 nt, Human
accugcggugcuaucu

SEQ ID NO: 1661618 - RNA, 21 nt, Human
accugcgucucauacucaccu

SEQ ID NO: 1661619 - RNA, 23 nt, Human
accugccuguugggccaggagcc

SEQ ID NO: 1661620 - RNA, 12 nt, Human
accugcucuccu

SEQ ID NO: 1661621 - RNA, 20 nt, Human
accuggaauauauaaccagu

SEQ ID NO: 1661622 - RNA, 16 nt, Human
ucauuugucacacacu

SEQ ID NO: 1661623 - RNA, 14 nt, Human
ucauuugucacaca

SEQ ID NO: 1661624 - RNA, 19 nt, Human
ucauuuuuaguagagacag

SEQ ID NO: 1661625 - RNA, 14 nt, Human
ucauuuuugaauac

SEQ ID NO: 1661626 - RNA, 18 nt, Human
ucauuuuuuuuaagaaaa

SEQ ID NO: 1661627 - RNA, 15 nt, Human
accuucgccaccugg

SEQ ID NO: 1661628 - RNA, 17 nt, Human
accuucgccaccugggu

SEQ ID NO: 1661629 - RNA, 17 nt, Human
accuucccaugcccugg

SEQ ID NO: 1661630 - RNA, 21 nt, Human
accuggguaacuagggaagau

SEQ ID NO: 1661631 - RNA, 22 nt, Human
accuucuccuucaccuuugucc

SEQ ID NO: 1661632 - RNA, 13 nt, Human
accuuugucccca

SEQ ID NO: 1661633 - RNA, 17 nt, Human
accuuuuuuauacauaa

SEQ ID NO: 1661634 - RNA, 16 nt, Human
accuuuuuuauacaua

SEQ ID NO: 1661635 - RNA, 18 nt, Human
accuuuuuuauacauaaa

SEQ ID NO: 1661636 - RNA, 14 nt, Human
accuuuguccccac

SEQ ID NO: 1661637 - RNA, 15 nt, Human
accuuuguccccacc

SEQ ID NO: 1661638 - RNA, 16 nt, Human
accuuuguccccaccg

SEQ ID NO: 1661639 - RNA, 14 nt, Human
accuuuuuuauaca

SEQ ID NO: 1661640 - RNA, 12 nt, Human
uccacccaccuc

SEQ ID NO: 1661641 - RNA, 13 nt, Human
uccacccaccuca

SEQ ID NO: 1661642 - RNA, 17 nt, Human
uccacccaccucagccu

SEQ ID NO: 1661643 - RNA, 20 nt, Human
uccacccaggagccccgagg

SEQ ID NO: 1661644 - RNA, 12 nt, Human
accuggccucug

SEQ ID NO: 1661645 - RNA, 13 nt, Human
accuggccucugc

SEQ ID NO: 1661646 - RNA, 18 nt, Human
uccaaggguacuaaggaa

SEQ ID NO: 1661647 - RNA, 16 nt, Human
uccaauuaaggauuuu

SEQ ID NO: 1661648 - RNA, 17 nt, Human
uccaauuaaggauuuua

SEQ ID NO: 1661649 - RNA, 15 nt, Human
uccaauuaaggauuu

SEQ ID NO: 1661650 - RNA, 19 nt, Human
uccaaaugcagcuuuaaaa

SEQ ID NO: 1661651 - RNA, 15 nt, Human
uagaaacacaacuau

SEQ ID NO: 1661652 - RNA, 17 nt, Human
uagaacucccuuucaac

SEQ ID NO: 1661653 - RNA, 18 nt, Human
uagaacucccuuucaaca

SEQ ID NO: 1661654 - RNA, 16 nt, Human
uagaacucccuuucaa

SEQ ID NO: 1661655 - RNA, 12 nt, Human
aauuccacagcu

SEQ ID NO: 1661656 - RNA, 13 nt, Human
aauuccacagcug

SEQ ID NO: 1661657 - RNA, 14 nt, Human
aauuccacagcugc

SEQ ID NO: 1661658 - RNA, 22 nt, Human
uagaauuugauaugugaacagu

SEQ ID NO: 1661659 - RNA, 20 nt, Human
uagaauuugauaugugaaca

SEQ ID NO: 1661660 - RNA, 19 nt, Human
uagaauuugauaugugaac

SEQ ID NO: 1661661 - RNA, 16 nt, Human
uagacagucccugcca

SEQ ID NO: 1661662 - RNA, 10 nt, Human
uagacagagu

SEQ ID NO: 1661663 - RNA, 18 nt, Human
uagacaauuuauuauggc

SEQ ID NO: 1661664 - RNA, 13 nt, Human
uagacacacauga

SEQ ID NO: 1661665 - RNA, 21 nt, Human
uagacagagucucacuguugc

SEQ ID NO: 1661666 - RNA, 17 nt, Human
uagacagucccugccaa

SEQ ID NO: 1661667 - RNA, 21 nt, Human
uagacagucccugccaaugga

SEQ ID NO: 1661668 - RNA, 18 nt, Human
aauuugugauacaaugcu

SEQ ID NO: 1661669 - RNA, 17 nt, Human
aauuugugauacaaugc

SEQ ID NO: 1661670 - RNA, 20 nt, Human
aauuugugauacaaugcugu

SEQ ID NO: 1661671 - RNA, 14 nt, Human
aauuugugauacaa

SEQ ID NO: 1661672 - RNA, 18 nt, Human
aauuugggggaaaauuua

SEQ ID NO: 1661673 - RNA, 15 nt, Human
acaaaguauuaagca

SEQ ID NO: 1661674 - RNA, 16 nt, Human
acaaaguauuaagcau

SEQ ID NO: 1661675 - RNA, 13 nt, Human
acaaaguauuaag

SEQ ID NO: 1661676 - RNA, 18 nt, Human
acaaaguauuaagcauau

SEQ ID NO: 1661677 - RNA, 22 nt, Human
uagagcggagaaaggaagggcu

SEQ ID NO: 1661678 - RNA, 14 nt, Human
uagagccagggucu

SEQ ID NO: 1661679 - RNA, 12 nt, Human
aauuuuacauuu

SEQ ID NO: 1661680 - RNA, 20 nt, Human
aauuuuacauggcuggagcu

SEQ ID NO: 1661681 - RNA, 13 nt, Human
acaaaaacacagc

SEQ ID NO: 1661682 - RNA, 16 nt, Human
acaaaaagcuacuuau

SEQ ID NO: 1661683 - RNA, 16 nt, Human
acaaaaacacagcaag

SEQ ID NO: 1661684 - RNA, 14 nt, Human
acaaaaacacagca

SEQ ID NO: 1661685 - RNA, 15 nt, Human
acaaaaacacagcaa

SEQ ID NO: 1661686 - RNA, 15 nt, Human
uagcacagacccugc

SEQ ID NO: 1661687 - RNA, 18 nt, Human
uagcacacacuuuugguu

SEQ ID NO: 1661688 - RNA, 20 nt, Human
uagcacagacccugcccugu

SEQ ID NO: 1661689 - RNA, 21 nt, Human
uagcacagacccugcccugug

SEQ ID NO: 1661690 - RNA, 14 nt, Human
uagcacagacccug

SEQ ID NO: 1661691 - RNA, 14 nt, Human
uagaggguguguaa

SEQ ID NO: 1661692 - RNA, 14 nt, Human
uagccaaggccaaa

SEQ ID NO: 1661693 - RNA, 13 nt, Human
uagccaaggccaa

SEQ ID NO: 1661694 - RNA, 12 nt, Human
uagccaaggcca

SEQ ID NO: 1661695 - RNA, 22 nt, Human
uagcacagacccugcccugugg

SEQ ID NO: 1661696 - RNA, 24 nt, Human
uagcacagacccugcccugugggc

SEQ ID NO: 1661697 - RNA, 12 nt, Human
uaguaaucauau

SEQ ID NO: 1661698 - RNA, 13 nt, Human
uaguagagacggg

SEQ ID NO: 1661699 - RNA, 14 nt, Human
uagucacugagaca

SEQ ID NO: 1661700 - RNA, 15 nt, Human
uaguagagacagggu

SEQ ID NO: 1661701 - RNA, 22 nt, Human
uaguagagacaggguuuugcca

SEQ ID NO: 1661702 - RNA, 13 nt, Human
uaguaaaaauaaa

SEQ ID NO: 1661703 - RNA, 16 nt, Human
uaguaaaaauaaaauu

SEQ ID NO: 1661704 - RNA, 16 nt, Human
acacaguauuacuucu

SEQ ID NO: 1661705 - RNA, 23 nt, Human
acacacagauuugagcucagccc

SEQ ID NO: 1661706 - RNA, 16 nt, Human
acacaggcccggcucc

SEQ ID NO: 1661707 - RNA, 17 nt, Human
acacaggcccggcucca

SEQ ID NO: 1661708 - RNA, 18 nt, Human
acacaggcccggcuccag

SEQ ID NO: 1661709 - RNA, 23 nt, Human
acacaggcccggcuccaggcucc

SEQ ID NO: 1661710 - RNA, 24 nt, Human
acacaggcccggcuccaggcuccu

SEQ ID NO: 1661711 - RNA, 19 nt, Human
acacaggcccggcuccagg

SEQ ID NO: 1661712 - RNA, 20 nt, Human
acacaggcccggcuccaggc

SEQ ID NO: 1661713 - RNA, 21 nt, Human
acacaggcccggcuccaggcu

SEQ ID NO: 1661714 - RNA, 22 nt, Human
acacaggcccggcuccaggcuc

SEQ ID NO: 1661715 - RNA, 22 nt, Human
acaaugacuuacuguacaugaa

SEQ ID NO: 1661716 - RNA, 20 nt, Human
acaaugacuuacuguacaug

SEQ ID NO: 1661717 - RNA, 11 nt, Human
acaaugcaaac

SEQ ID NO: 1661718 - RNA, 16 nt, Human
acaaugcaaaccauca

SEQ ID NO: 1661719 - RNA, 17 nt, Human
acaaugcaaaccaucau

SEQ ID NO: 1661720 - RNA, 18 nt, Human
acaaugcaaaccaucauu

SEQ ID NO: 1661721 - RNA, 13 nt, Human
uaggguccugggg

SEQ ID NO: 1661722 - RNA, 19 nt, Human
uaggguaagugagagaggg

SEQ ID NO: 1661723 - RNA, 17 nt, Human
uaggguuauaauaaugu

SEQ ID NO: 1661724 - RNA, 15 nt, Human
uagggugggccuuca

SEQ ID NO: 1661725 - RNA, 15 nt, Human
uaggguuauaauaau

SEQ ID NO: 1661726 - RNA, 23 nt, Human
acaaugcaaaccaucauugaaau

SEQ ID NO: 1661727 - RNA, 19 nt, Human
acaaugcaaaccaucauug

SEQ ID NO: 1661728 - RNA, 21 nt, Human
acaaugcaaaccaucauugaa

SEQ ID NO: 1661729 - RNA, 13 nt, Human
acacaacuauauu

SEQ ID NO: 1661730 - RNA, 13 nt, Human
uagcuuuucccuu

SEQ ID NO: 1661731 - RNA, 13 nt, Human
uagcuuuuuucuc

SEQ ID NO: 1661732 - RNA, 23 nt, Human
uagcuuuuuucucugauacagaa

SEQ ID NO: 1661733 - RNA, 13 nt, Human
uaggaaaaacuga

SEQ ID NO: 1661734 - RNA, 14 nt, Human
uaggaaaaacugau

SEQ ID NO: 1661735 - RNA, 17 nt, Human
uagcgcccaguugggug

SEQ ID NO: 1661736 - RNA, 21 nt, Human
uagccuuagaagucacacagu

SEQ ID NO: 1661737 - RNA, 14 nt, Human
uagcgcccaguugg

SEQ ID NO: 1661738 - RNA, 20 nt, Human
uagccuuagaagucacacag

SEQ ID NO: 1661739 - RNA, 19 nt, Human
uagggauggggcugugggg

SEQ ID NO: 1661740 - RNA, 21 nt, Human
uagggaaggauacaaaagcau

SEQ ID NO: 1661741 - RNA, 13 nt, Human
uagggaagauaau

SEQ ID NO: 1661742 - RNA, 16 nt, Human
uaggaaaaacugauuu

SEQ ID NO: 1661743 - RNA, 17 nt, Human
uaggaaaaacugauuuu

SEQ ID NO: 1661744 - RNA, 13 nt, Human
uaggauguugaaa

SEQ ID NO: 1661745 - RNA, 22 nt, Human
uauggcccuggccuagcauacg

SEQ ID NO: 1661746 - RNA, 21 nt, Human
uauggcccuggccuagcauac

SEQ ID NO: 1661747 - RNA, 20 nt, Human
uauggcccuggccuagcaua

SEQ ID NO: 1661748 - RNA, 16 nt, Human
uaugggacucaaugca

SEQ ID NO: 1661749 - RNA, 23 nt, Human
uaugggacucaaugcacugacau

SEQ ID NO: 1661750 - RNA, 10 nt, Human
uaugggagag

SEQ ID NO: 1661751 - RNA, 17 nt, Human
uaugauacuugaaaauu

SEQ ID NO: 1661752 - RNA, 14 nt, Human
uaugaucacggcuc

SEQ ID NO: 1661753 - RNA, 22 nt, Human
uaugcaugaaguaauaugcaca

SEQ ID NO: 1661754 - RNA, 14 nt, Human
uaugcuauuucuau

SEQ ID NO: 1661755 - RNA, 15 nt, Human
uaugcuauuucuaua

SEQ ID NO: 1661756 - RNA, 16 nt, Human
uaugcuauuucuauau

SEQ ID NO: 1661757 - RNA, 18 nt, Human
uaugcuauuucuauauuu

SEQ ID NO: 1661758 - RNA, 22 nt, Human
uaugcuauuucuauauuuucau

SEQ ID NO: 1661759 - RNA, 23 nt, Human
uaugcuauuucuauauuuucauu

SEQ ID NO: 1661760 - RNA, 14 nt, Human
uaugcucugcaugu

SEQ ID NO: 1661761 - RNA, 15 nt, Human
uaugccccauucaac

SEQ ID NO: 1661762 - RNA, 22 nt, Human
acagauuugagcucagcccugg

SEQ ID NO: 1661763 - RNA, 15 nt, Human
uaucuauauuuuaca

SEQ ID NO: 1661764 - RNA, 19 nt, Human
acagcacgggggccaagga

SEQ ID NO: 1661765 - RNA, 17 nt, Human
acagcagccccugcaca

SEQ ID NO: 1661766 - RNA, 14 nt, Human
acagccccuccucc

SEQ ID NO: 1661767 - RNA, 16 nt, Human
acagccccuccuccau

SEQ ID NO: 1661768 - RNA, 15 nt, Human
acagcccgggcucug

SEQ ID NO: 1661769 - RNA, 23 nt, Human
acagcccuccaucuaaacugccc

SEQ ID NO: 1661770 - RNA, 16 nt, Human
acagcccgggcucugc

SEQ ID NO: 1661771 - RNA, 20 nt, Human
uaugaagcuuuuaugugaaa

SEQ ID NO: 1661772 - RNA, 22 nt, Human
uaugaagcuuuuaugugaaaca

SEQ ID NO: 1661773 - RNA, 23 nt, Human
uaugaagcuuuuaugugaaacau

SEQ ID NO: 1661774 - RNA, 23 nt, Human
uaugaggcauuuguuugaacuga

SEQ ID NO: 1661775 - RNA, 21 nt, Human
uaugaggcauuuguuugaacu

SEQ ID NO: 1661776 - RNA, 15 nt, Human
uaugaggcauuuguu

SEQ ID NO: 1661777 - RNA, 14 nt, Human
uaugaggcauuugu

SEQ ID NO: 1661778 - RNA, 14 nt, Human
uaugaaacuugugu

SEQ ID NO: 1661779 - RNA, 19 nt, Human
uaugaaacuuguguaaaua

SEQ ID NO: 1661780 - RNA, 21 nt, Human
uaugaaacuuguguaaauaca

SEQ ID NO: 1661781 - RNA, 19 nt, Human
acagcccuucuuuccacag

SEQ ID NO: 1661782 - RNA, 22 nt, Human
acagcuugaccgugaggccaga

SEQ ID NO: 1661783 - RNA, 23 nt, Human
acagcuugaccgugaggccagag

SEQ ID NO: 1661784 - RNA, 19 nt, Human
acaggaaaagcugcugaca

SEQ ID NO: 1661785 - RNA, 20 nt, Human
acaggaaaagcugcugacag

SEQ ID NO: 1661786 - RNA, 21 nt, Human
acaggaaaagcugcugacagu

SEQ ID NO: 1661787 - RNA, 17 nt, Human
acagcuugaccgugagg

SEQ ID NO: 1661788 - RNA, 20 nt, Human
acagcuugaccgugaggcca

SEQ ID NO: 1661789 - RNA, 21 nt, Human
acagcuugaccgugaggccag

SEQ ID NO: 1661790 - RNA, 17 nt, Human
acagcuucauuuccugu

SEQ ID NO: 1661791 - RNA, 19 nt, Human
acagcuucauuuccugugu

SEQ ID NO: 1661792 - RNA, 21 nt, Human
acagcuucauuuccugugucu

SEQ ID NO: 1661793 - RNA, 15 nt, Human
acagcuaaugggaca

SEQ ID NO: 1661794 - RNA, 16 nt, Human
acagcuaaugggacac

SEQ ID NO: 1661795 - RNA, 17 nt, Human
acagcuaaugggacacu

SEQ ID NO: 1661796 - RNA, 19 nt, Human
acagcuaaugggacacuaa

SEQ ID NO: 1661797 - RNA, 14 nt, Human
acagcuguaugauu

SEQ ID NO: 1661798 - RNA, 19 nt, Human
acagcuguaugauucccag

SEQ ID NO: 1661799 - RNA, 20 nt, Human
acagcuguaugauucccagc

SEQ ID NO: 1661800 - RNA, 23 nt, Human
acagcuguaugauucccagccag

SEQ ID NO: 1661801 - RNA, 13 nt, Human
acaggcccuuccu

SEQ ID NO: 1661802 - RNA, 15 nt, Human
acaggcccuuccucu

SEQ ID NO: 1661803 - RNA, 22 nt, Human
acaggcccuuccucuccacugc

SEQ ID NO: 1661804 - RNA, 18 nt, Human
acaggcccggcuccaggc

SEQ ID NO: 1661805 - RNA, 20 nt, Human
acaggcccggcuccaggcuc

SEQ ID NO: 1661806 - RNA, 21 nt, Human
acaggcccggcuccaggcucc

SEQ ID NO: 1661807 - RNA, 22 nt, Human
acaggcccggcuccaggcuccu

SEQ ID NO: 1661808 - RNA, 13 nt, Human
acaggcaggucca

SEQ ID NO: 1661809 - RNA, 16 nt, Human
acaggcccggcuccag

SEQ ID NO: 1661810 - RNA, 17 nt, Human
acaggcccggcuccagg

SEQ ID NO: 1661811 - RNA, 16 nt, Human
acaggacucugccucc

SEQ ID NO: 1661812 - RNA, 15 nt, Human
acaggacucugccuc

SEQ ID NO: 1661813 - RNA, 15 nt, Human
acaggcagauacagg

SEQ ID NO: 1661814 - RNA, 20 nt, Human
acaggaaaauuuuaaaaaua

SEQ ID NO: 1661815 - RNA, 22 nt, Human
acaggaaccacaagacugcaca

SEQ ID NO: 1661816 - RNA, 17 nt, Human
uagucacugagacagcc

SEQ ID NO: 1661817 - RNA, 20 nt, Human
uagucacugagacagcccgg

SEQ ID NO: 1661818 - RNA, 15 nt, Human
acacuaaugaggaaa

SEQ ID NO: 1661819 - RNA, 22 nt, Human
acacuaaugaggaaacugcacu

SEQ ID NO: 1661820 - RNA, 21 nt, Human
acacucaaaagcugggcaggu

SEQ ID NO: 1661821 - RNA, 13 nt, Human
acacucaaaucaa

SEQ ID NO: 1661822 - RNA, 19 nt, Human
uauaagugauugcugguuu

SEQ ID NO: 1661823 - RNA, 18 nt, Human
acacucaaaucaagaaac

SEQ ID NO: 1661824 - RNA, 17 nt, Human
acacucaaaucaagaaa

SEQ ID NO: 1661825 - RNA, 18 nt, Human
uauaauuuaccugaaguc

SEQ ID NO: 1661826 - RNA, 21 nt, Human
uauaauuuaccugaagucuuu

SEQ ID NO: 1661827 - RNA, 22 nt, Human
uauacacuuacacuuuaugcac

SEQ ID NO: 1661828 - RNA, 18 nt, Human
uauagauuagaauucugu

SEQ ID NO: 1661829 - RNA, 19 nt, Human
uauagauuagaauucugua

SEQ ID NO: 1661830 - RNA, 18 nt, Human
uauagccuaggugacaga

SEQ ID NO: 1661831 - RNA, 15 nt, Human
uauaggcaccuacca

SEQ ID NO: 1661832 - RNA, 16 nt, Human
uauaggugcuacaaaa

SEQ ID NO: 1661833 - RNA, 23 nt, Human
uauaggaacuuaaauaaugugaa

SEQ ID NO: 1661834 - RNA, 12 nt, Human
uauaggaauuga

SEQ ID NO: 1661835 - RNA, 21 nt, Human
uauaucuauauuuuacauaaa

SEQ ID NO: 1661836 - RNA, 16 nt, Human
acacucauugaccuga

SEQ ID NO: 1661837 - RNA, 19 nt, Human
uauauauuuuuuucugaaa

SEQ ID NO: 1661838 - RNA, 13 nt, Human
acagaaauguaca

SEQ ID NO: 1661839 - RNA, 19 nt, Human
acagacauacuaaccagca

SEQ ID NO: 1661840 - RNA, 18 nt, Human
acagacauacuaaccagc

SEQ ID NO: 1661841 - RNA, 13 nt, Human
acacuuuugguua

SEQ ID NO: 1661842 - RNA, 22 nt, Human
acacuuuugguuaagucuguuu

SEQ ID NO: 1661843 - RNA, 15 nt, Human
acacuucaggcucuu

SEQ ID NO: 1661844 - RNA, 19 nt, Human
acacuucaggcucuucucc

SEQ ID NO: 1661845 - RNA, 22 nt, Human
acacuucaggcucuucuccuuu

SEQ ID NO: 1661846 - RNA, 14 nt, Human
acacuuccauaauc

SEQ ID NO: 1661847 - RNA, 18 nt, Human
acacuuacacuuuaugca

SEQ ID NO: 1661848 - RNA, 21 nt, Human
acacuuacacuuuaugcacaa

SEQ ID NO: 1661849 - RNA, 18 nt, Human
acacuguuucaaacuuua

SEQ ID NO: 1661850 - RNA, 17 nt, Human
acacuguuucaaacuuu

SEQ ID NO: 1661851 - RNA, 17 nt, Human
acacucauugaccugag

SEQ ID NO: 1661852 - RNA, 19 nt, Human
acacucauugaccugaggc

SEQ ID NO: 1661853 - RNA, 23 nt, Human
acacuguuucaaacuuuacuaug

SEQ ID NO: 1661854 - RNA, 20 nt, Human
acacuguuucaaacuuuacu

SEQ ID NO: 1661855 - RNA, 16 nt, Human
acacuuacacuuuaug

SEQ ID NO: 1661856 - RNA, 15 nt, Human
uaucccggcugcccu

SEQ ID NO: 1661857 - RNA, 19 nt, Human
uauccaacaucaacaucuu

SEQ ID NO: 1661858 - RNA, 17 nt, Human
uaucagaauucucagaa

SEQ ID NO: 1661859 - RNA, 22 nt, Human
uaucacccagaagaaaauagug

SEQ ID NO: 1661860 - RNA, 19 nt, Human
uaucacccagaagaaaaua

SEQ ID NO: 1661861 - RNA, 14 nt, Human
uaucacaaaucuua

SEQ ID NO: 1661862 - RNA, 16 nt, Human
uaucacaaaucuuaac

SEQ ID NO: 1661863 - RNA, 20 nt, Human
uaucacaaaucuuaacuuga

SEQ ID NO: 1661864 - RNA, 14 nt, Human
acagaccuuugaac

SEQ ID NO: 1661865 - RNA, 21 nt, Human
aaugugcugaaugguuuucaa

SEQ ID NO: 1661866 - RNA, 23 nt, Human
uacagagcccacgcccccacugg

SEQ ID NO: 1661867 - RNA, 13 nt, Human
aauguucaucaau

SEQ ID NO: 1661868 - RNA, 15 nt, Human
aauguuacagaaucu

SEQ ID NO: 1661869 - RNA, 16 nt, Human
aauuaacuuuuauaaa

SEQ ID NO: 1661870 - RNA, 15 nt, Human
aauuaacuuuuauaa

SEQ ID NO: 1661871 - RNA, 16 nt, Human
aauuaaguacuaugua

SEQ ID NO: 1661872 - RNA, 17 nt, Human
aauuaaguacuauguau

SEQ ID NO: 1661873 - RNA, 13 nt, Human
aauuaacuuuuau

SEQ ID NO: 1661874 - RNA, 12 nt, Human
aauuaacuuuua

SEQ ID NO: 1661875 - RNA, 21 nt, Human
aauguucucucuucuccaccu

SEQ ID NO: 1661876 - RNA, 16 nt, Human
aauguucaucaaugaa

SEQ ID NO: 1661877 - RNA, 20 nt, Human
aauguucaucaaugaaugaa

SEQ ID NO: 1661878 - RNA, 13 nt, Human
uacauuuccuaaa

SEQ ID NO: 1661879 - RNA, 12 nt, Human
uacauucuguua

SEQ ID NO: 1661880 - RNA, 13 nt, Human
aauuaaguaucug

SEQ ID NO: 1661881 - RNA, 14 nt, Human
aauuaaguaucuga

SEQ ID NO: 1661882 - RNA, 18 nt, Human
uaccagccaguaaauggg

SEQ ID NO: 1661883 - RNA, 22 nt, Human
uaccagcagagcaccuuagaca

SEQ ID NO: 1661884 - RNA, 13 nt, Human
uaccagcagagca

SEQ ID NO: 1661885 - RNA, 14 nt, Human
uaccagcagagcac

SEQ ID NO: 1661886 - RNA, 12 nt, Human
uaccagcagagc

SEQ ID NO: 1661887 - RNA, 15 nt, Human
uacccccugcaaagc

SEQ ID NO: 1661888 - RNA, 19 nt, Human
uacccccugcaaagcccag

SEQ ID NO: 1661889 - RNA, 23 nt, Human
uacccccugcaaagcccagcuug

SEQ ID NO: 1661890 - RNA, 16 nt, Human
uaccaugccauuuaaa

SEQ ID NO: 1661891 - RNA, 19 nt, Human
uaccagggacugaggggag

SEQ ID NO: 1661892 - RNA, 23 nt, Human
uacccgggaagggggcugggaca

SEQ ID NO: 1661893 - RNA, 23 nt, Human
uaccucuugagccuugaacuuug

SEQ ID NO: 1661894 - RNA, 22 nt, Human
uaccucuugagccuugaacuuu

SEQ ID NO: 1661895 - RNA, 15 nt, Human
uacccucauguucuu

SEQ ID NO: 1661896 - RNA, 23 nt, Human
uaccugaagcuaucguaaaauua

SEQ ID NO: 1661897 - RNA, 13 nt, Human
uaccugaagucuu

SEQ ID NO: 1661898 - RNA, 14 nt, Human
uaccugaagucuuu

SEQ ID NO: 1661899 - RNA, 16 nt, Human
uaccugaagucuuugu

SEQ ID NO: 1661900 - RNA, 13 nt, Human
uaccugaggggcc

SEQ ID NO: 1661901 - RNA, 15 nt, Human
uaccugaggggccuc

SEQ ID NO: 1661902 - RNA, 16 nt, Human
uaccugccaggaagcc

SEQ ID NO: 1661903 - RNA, 16 nt, Human
uaccugaggggccucu

SEQ ID NO: 1661904 - RNA, 17 nt, Human
aauuacaggaaguacug

SEQ ID NO: 1661905 - RNA, 19 nt, Human
aauuacaggaaguacugga

SEQ ID NO: 1661906 - RNA, 20 nt, Human
aauuacaggaaguacuggag

SEQ ID NO: 1661907 - RNA, 13 nt, Human
aauuacauuugua

SEQ ID NO: 1661908 - RNA, 14 nt, Human
aauuacauuuguau

SEQ ID NO: 1661909 - RNA, 21 nt, Human
aauuauuuauuaaaugcccag

SEQ ID NO: 1661910 - RNA, 12 nt, Human
aauuauugguaa

SEQ ID NO: 1661911 - RNA, 22 nt, Human
aauuaugugccagauuuaugca

SEQ ID NO: 1661912 - RNA, 17 nt, Human
aauucaguuguuagugu

SEQ ID NO: 1661913 - RNA, 22 nt, Human
aauucaguuguuagugugucuu

SEQ ID NO: 1661914 - RNA, 11 nt, Human
aauucaguugu

SEQ ID NO: 1661915 - RNA, 22 nt, Human
aauuauuuauuaaaugcccagc

SEQ ID NO: 1661916 - RNA, 15 nt, Human
uacaccgggccugga

SEQ ID NO: 1661917 - RNA, 17 nt, Human
uacaccgggccuggaga

SEQ ID NO: 1661918 - RNA, 13 nt, Human
uacagacaaagcg

SEQ ID NO: 1661919 - RNA, 14 nt, Human
uacagacaaagcgu

SEQ ID NO: 1661920 - RNA, 15 nt, Human
uacagacaaagcgug

SEQ ID NO: 1661921 - RNA, 23 nt, Human
uacagagcagacaguuaagagaa

SEQ ID NO: 1661922 - RNA, 19 nt, Human
uacagagcccacgccccca

SEQ ID NO: 1661923 - RNA, 22 nt, Human
uacagagcccacgcccccacug

SEQ ID NO: 1661924 - RNA, 19 nt, Human
uacagacaaagcguggugg

SEQ ID NO: 1661925 - RNA, 17 nt, Human
uacagagacagaaagca

SEQ ID NO: 1661926 - RNA, 18 nt, Human
aauggaagacagcucuua

SEQ ID NO: 1661927 - RNA, 16 nt, Human
aauggaagacagcucu

SEQ ID NO: 1661928 - RNA, 14 nt, Human
aaugguuuucaaaa

SEQ ID NO: 1661929 - RNA, 16 nt, Human
aaugguuuucaaaaua

SEQ ID NO: 1661930 - RNA, 16 nt, Human
aaugguuuucuugugu

SEQ ID NO: 1661931 - RNA, 12 nt, Human
aauguaaauaaa

SEQ ID NO: 1661932 - RNA, 20 nt, Human
aauguaagggaaacugccag

SEQ ID NO: 1661933 - RNA, 13 nt, Human
aauggaagacagc

SEQ ID NO: 1661934 - RNA, 22 nt, Human
aaugcuguauuuuaaaagaaug

SEQ ID NO: 1661935 - RNA, 21 nt, Human
aaugcuggcuguuggcugggg

SEQ ID NO: 1661936 - RNA, 22 nt, Human
aaugcuggcuguuggcuggggg

SEQ ID NO: 1661937 - RNA, 20 nt, Human
aaugcuguauuuuaaaagaa

SEQ ID NO: 1661938 - RNA, 21 nt, Human
aaugcuguauuuuaaaagaau

SEQ ID NO: 1661939 - RNA, 16 nt, Human
uacaaugcugugcccu

SEQ ID NO: 1661940 - RNA, 14 nt, Human
uacaaugcugugcc

SEQ ID NO: 1661941 - RNA, 13 nt, Human
uacaaugcugugc

SEQ ID NO: 1661942 - RNA, 15 nt, Human
uaauuuuuguauuuu

SEQ ID NO: 1661943 - RNA, 18 nt, Human
uaauuuuuuugagacaga

SEQ ID NO: 1661944 - RNA, 22 nt, Human
uaauuuuuuuuuuccuuuuaaa

SEQ ID NO: 1661945 - RNA, 21 nt, Human
uacaaaaaaaaaaaaaaauua

SEQ ID NO: 1661946 - RNA, 24 nt, Human
aaugauuucagcucacugcaaccu

SEQ ID NO: 1661947 - RNA, 16 nt, Human
aaugaggucagagccu

SEQ ID NO: 1661948 - RNA, 18 nt, Human
aaugaggucagagccugc

SEQ ID NO: 1661949 - RNA, 14 nt, Human
aaugagccuggcaa

SEQ ID NO: 1661950 - RNA, 12 nt, Human
aaugagccuggc

SEQ ID NO: 1661951 - RNA, 13 nt, Human
aaugagccuggca

SEQ ID NO: 1661952 - RNA, 11 nt, Human
aaugagccugg

SEQ ID NO: 1661953 - RNA, 12 nt, Human
aaugagaaaucu

SEQ ID NO: 1661954 - RNA, 22 nt, Human
aaugagaaaucuaaaaaacgaa

SEQ ID NO: 1661955 - RNA, 22 nt, Human
aaugagagacacacugaagaag

SEQ ID NO: 1661956 - RNA, 21 nt, Human
aaugaccuuucaauaggaaaa

SEQ ID NO: 1661957 - RNA, 14 nt, Human
uaauuauaugcuau

SEQ ID NO: 1661958 - RNA, 18 nt, Human
uaauuauaugcuauuucu

SEQ ID NO: 1661959 - RNA, 19 nt, Human
uaauuauaugcuauuucua

SEQ ID NO: 1661960 - RNA, 20 nt, Human
uaauuauaugcuauuucuau

SEQ ID NO: 1661961 - RNA, 19 nt, Human
uaauuauaucugaggaauu

SEQ ID NO: 1661962 - RNA, 21 nt, Human
uaauuauaucugaggaauucu

SEQ ID NO: 1661963 - RNA, 22 nt, Human
uaauuauaucugaggaauucug

SEQ ID NO: 1661964 - RNA, 23 nt, Human
uaauuauaucugaggaauucugu

SEQ ID NO: 1661965 - RNA, 13 nt, Human
aaugcaccuggaa

SEQ ID NO: 1661966 - RNA, 14 nt, Human
aaugcaaaccauca

SEQ ID NO: 1661967 - RNA, 12 nt, Human
aaugcaaaccau

SEQ ID NO: 1661968 - RNA, 11 nt, Human
aaugcaaacca

SEQ ID NO: 1661969 - RNA, 13 nt, Human
aaugauuuuuaaa

SEQ ID NO: 1661970 - RNA, 16 nt, Human
aaugauuucauucaau

SEQ ID NO: 1661971 - RNA, 22 nt, Human
uaauuccguagguuauuuucag

SEQ ID NO: 1661972 - RNA, 19 nt, Human
uaauuuuuauauuugaaau

SEQ ID NO: 1661973 - RNA, 21 nt, Human
uaauuuuuauauuugaaauau

SEQ ID NO: 1661974 - RNA, 18 nt, Human
uaauuuuuauauuugaaa

SEQ ID NO: 1661975 - RNA, 15 nt, Human
aauauuuauagguca

SEQ ID NO: 1661976 - RNA, 15 nt, Human
aauauuuauuuuaau

SEQ ID NO: 1661977 - RNA, 19 nt, Human
aaucagccugcuccagcug

SEQ ID NO: 1661978 - RNA, 13 nt, Human
aaucagccugcuc

SEQ ID NO: 1661979 - RNA, 18 nt, Human
aaucagccugcuccagcu

SEQ ID NO: 1661980 - RNA, 18 nt, Human
aaucagcauucucacucc

SEQ ID NO: 1661981 - RNA, 19 nt, Human
aaucagcauucucacuccu

SEQ ID NO: 1661982 - RNA, 11 nt, Human
aaucagccugc

SEQ ID NO: 1661983 - RNA, 16 nt, Human
aaucagccuaguugau

SEQ ID NO: 1661984 - RNA, 14 nt, Human
uaaggacuucuuua

SEQ ID NO: 1661985 - RNA, 15 nt, Human
uaaggacuucuuuaa

SEQ ID NO: 1661986 - RNA, 16 nt, Human
uaaggacuucuuuaau

SEQ ID NO: 1661987 - RNA, 22 nt, Human
uaaggacuucuuuaauuuugga

SEQ ID NO: 1661988 - RNA, 22 nt, Human
uaaggaauuuuauuuuuuucug

SEQ ID NO: 1661989 - RNA, 17 nt, Human
uaaggaauaccuguccc

SEQ ID NO: 1661990 - RNA, 18 nt, Human
uaaggaauaccugucccc

SEQ ID NO: 1661991 - RNA, 17 nt, Human
uaaggaaaaguuuaaua

SEQ ID NO: 1661992 - RNA, 19 nt, Human
uaaggaaaaguuuaauauu

SEQ ID NO: 1661993 - RNA, 21 nt, Human
uaaggaaaaguuuaauauuaa

SEQ ID NO: 1661994 - RNA, 12 nt, Human
uaaggaaacugg

SEQ ID NO: 1661995 - RNA, 14 nt, Human
uaaggaaacugggu

SEQ ID NO: 1661996 - RNA, 13 nt, Human
uaaggaagacaau

SEQ ID NO: 1661997 - RNA, 9 nt, Human
uaaggaaua

SEQ ID NO: 1661998 - RNA, 19 nt, Human
uaaggaaacuggguuccug

SEQ ID NO: 1661999 - RNA, 13 nt, Human
uaagcauauauuu

SEQ ID NO: 1662000 - RNA, 16 nt, Human
uaagcauauauuuuua

SEQ ID NO: 1662001 - RNA, 21 nt, Human
uaagcuauucaguaauaacuc

SEQ ID NO: 1662002 - RNA, 15 nt, Human
uaagcaaaaugugau

SEQ ID NO: 1662003 - RNA, 21 nt, Human
uaagcaaaaugugauauguac

SEQ ID NO: 1662004 - RNA, 14 nt, Human
uaagauucauauuu

SEQ ID NO: 1662005 - RNA, 14 nt, Human
uaagcaaaauguga

SEQ ID NO: 1662006 - RNA, 17 nt, Human
uaaguguguguuuuuca

SEQ ID NO: 1662007 - RNA, 13 nt, Human
uaaggacuuguua

SEQ ID NO: 1662008 - RNA, 15 nt, Human
uaaggacuuguuaga

SEQ ID NO: 1662009 - RNA, 16 nt, Human
uaaggacuuguuagau

SEQ ID NO: 1662010 - RNA, 19 nt, Human
uaaggacuuguuagaucua

SEQ ID NO: 1662011 - RNA, 18 nt, Human
uaagguuaccuuuguucc

SEQ ID NO: 1662012 - RNA, 18 nt, Human
uaaggaugcuuguacaua

SEQ ID NO: 1662013 - RNA, 13 nt, Human
uaaguaaaaccac

SEQ ID NO: 1662014 - RNA, 15 nt, Human
uaaguaaaaccacag

SEQ ID NO: 1662015 - RNA, 16 nt, Human
uaaguaaaaccacagc

SEQ ID NO: 1662016 - RNA, 17 nt, Human
uaaguaaaaccacagca

SEQ ID NO: 1662017 - RNA, 18 nt, Human
uaaguaaaaccacagcag

SEQ ID NO: 1662018 - RNA, 19 nt, Human
uaaguaaaaccacagcagu

SEQ ID NO: 1662019 - RNA, 20 nt, Human
uaaguaaugauaacuggaaa

SEQ ID NO: 1662020 - RNA, 13 nt, Human
aaucucaaauaac

SEQ ID NO: 1662021 - RNA, 18 nt, Human
aaucugggccagaauuuc

SEQ ID NO: 1662022 - RNA, 12 nt, Human
aaucuaaaugga

SEQ ID NO: 1662023 - RNA, 21 nt, Human
aauccucucaaccaccuuuca

SEQ ID NO: 1662024 - RNA, 21 nt, Human
aaucccauuauucaaaguugc

SEQ ID NO: 1662025 - RNA, 12 nt, Human
aaucccaggaug

SEQ ID NO: 1662026 - RNA, 14 nt, Human
aaucccauuauuca

SEQ ID NO: 1662027 - RNA, 16 nt, Human
aaucccauuauucaaa

SEQ ID NO: 1662028 - RNA, 17 nt, Human
aaucccauuuaaaaaaa

SEQ ID NO: 1662029 - RNA, 13 nt, Human
uaaaugugguaaa

SEQ ID NO: 1662030 - RNA, 20 nt, Human
uaaauuaacuuuuauaaacu

SEQ ID NO: 1662031 - RNA, 19 nt, Human
uaaauuaacuuuuauaaac

SEQ ID NO: 1662032 - RNA, 18 nt, Human
uaaaugaaaaucgugaca

SEQ ID NO: 1662033 - RNA, 21 nt, Human
aaguguauuuuuuuacuaaua

SEQ ID NO: 1662034 - RNA, 18 nt, Human
aaguguauuuuuuuacua

SEQ ID NO: 1662035 - RNA, 22 nt, Human
uaaauuaacuuuuauaaacuuu

SEQ ID NO: 1662036 - RNA, 21 nt, Human
uaaauuaacuuuuauaaacuu

SEQ ID NO: 1662037 - RNA, 13 nt, Human
aauacagaggcaa

SEQ ID NO: 1662038 - RNA, 13 nt, Human
uaacaaugcugua

SEQ ID NO: 1662039 - RNA, 12 nt, Human
aauaccaaggaa

SEQ ID NO: 1662040 - RNA, 23 nt, Human
aauaccacaggaaccacaagacu

SEQ ID NO: 1662041 - RNA, 17 nt, Human
aauaccagccaguaaau

SEQ ID NO: 1662042 - RNA, 19 nt, Human
aauaccagccaguaaaugg

SEQ ID NO: 1662043 - RNA, 18 nt, Human
aauaccaugccauuuaaa

SEQ ID NO: 1662044 - RNA, 23 nt, Human
aauacaucccuuaccugggaaag

SEQ ID NO: 1662045 - RNA, 21 nt, Human
aauaccugucccccugacaac

SEQ ID NO: 1662046 - RNA, 19 nt, Human
aauaccugucccccugaca

SEQ ID NO: 1662047 - RNA, 15 nt, Human
aauaccugucccccu

SEQ ID NO: 1662048 - RNA, 18 nt, Human
aauaccugucccccugac

SEQ ID NO: 1662049 - RNA, 13 nt, Human
uaacguauaaaag

SEQ ID NO: 1662050 - RNA, 17 nt, Human
uaacguauaaaagccug

SEQ ID NO: 1662051 - RNA, 14 nt, Human
uaacuaaaagguau

SEQ ID NO: 1662052 - RNA, 13 nt, Human
uaacuucacauau

SEQ ID NO: 1662053 - RNA, 13 nt, Human
uaagacaaauaug

SEQ ID NO: 1662054 - RNA, 23 nt, Human
uaagacaaaaagcuacuuauugu

SEQ ID NO: 1662055 - RNA, 13 nt, Human
uaagaagugaaaa

SEQ ID NO: 1662056 - RNA, 16 nt, Human
uaacuugucuuuggac

SEQ ID NO: 1662057 - RNA, 20 nt, Human
uaacuugucuuuggacccug

SEQ ID NO: 1662058 - RNA, 21 nt, Human
uaacuuccuuggacucauuuu

SEQ ID NO: 1662059 - RNA, 19 nt, Human
uaacaugaauauuuagugu

SEQ ID NO: 1662060 - RNA, 12 nt, Human
uaacauguuaaa

SEQ ID NO: 1662061 - RNA, 15 nt, Human
uaacauguuaaacca

SEQ ID NO: 1662062 - RNA, 16 nt, Human
uaacauguuaaaccau

SEQ ID NO: 1662063 - RNA, 20 nt, Human
uaacaugaauauuuaguguu

SEQ ID NO: 1662064 - RNA, 21 nt, Human
uaacaugaauauuuaguguuc

SEQ ID NO: 1662065 - RNA, 14 nt, Human
uaacaugaauauuu

SEQ ID NO: 1662066 - RNA, 19 nt, Human
uaacauguaauuaaguacu

SEQ ID NO: 1662067 - RNA, 21 nt, Human
aauauauucagccuggcuuca

SEQ ID NO: 1662068 - RNA, 21 nt, Human
aauaguucagguaacaggcag

SEQ ID NO: 1662069 - RNA, 21 nt, Human
aauauauuuuaagacgaaaca

SEQ ID NO: 1662070 - RNA, 14 nt, Human
aauagcuagacugg

SEQ ID NO: 1662071 - RNA, 20 nt, Human
aauagcuagacuggugacug

SEQ ID NO: 1662072 - RNA, 21 nt, Human
aauagcuagacuggugacuga

SEQ ID NO: 1662073 - RNA, 19 nt, Human
aauagucaaauugugugaa

SEQ ID NO: 1662074 - RNA, 19 nt, Human
aagcccugagcuuucugcu

SEQ ID NO: 1662075 - RNA, 21 nt, Human
aagcccugugcuccauggcug

SEQ ID NO: 1662076 - RNA, 15 nt, Human
aagcccuuccauguc

SEQ ID NO: 1662077 - RNA, 20 nt, Human
aagcccuuccaugucgccuc

SEQ ID NO: 1662078 - RNA, 23 nt, Human
aagcccuuccaugucgccucugc

SEQ ID NO: 1662079 - RNA, 20 nt, Human
aagccgcuggggccaguugg

SEQ ID NO: 1662080 - RNA, 22 nt, Human
aagccaaagcuaggccuggcca

SEQ ID NO: 1662081 - RNA, 17 nt, Human
aagccaaaccucuguga

SEQ ID NO: 1662082 - RNA, 14 nt, Human
aagcccaggaaagg

SEQ ID NO: 1662083 - RNA, 17 nt, Human
aagcccaggaaaggcuc

SEQ ID NO: 1662084 - RNA, 19 nt, Human
aagcccaggaaaggcucca

SEQ ID NO: 1662085 - RNA, 22 nt, Human
aagcccaggaaaggcuccagga

SEQ ID NO: 1662086 - RNA, 14 nt, Human
aagcagugcaugcu

SEQ ID NO: 1662087 - RNA, 15 nt, Human
aagcagugcaugcug

SEQ ID NO: 1662088 - RNA, 20 nt, Human
aagcagugcaugcugucccu

SEQ ID NO: 1662089 - RNA, 12 nt, Human
aagcagugcaug

SEQ ID NO: 1662090 - RNA, 21 nt, Human
gugugugcgccuacaggagug

SEQ ID NO: 1662091 - RNA, 16 nt, Human
aagcauuuagauguau

SEQ ID NO: 1662092 - RNA, 18 nt, Human
aagcauuguaaaugugcu

SEQ ID NO: 1662093 - RNA, 16 nt, Human
aagcauuuacuuugug

SEQ ID NO: 1662094 - RNA, 13 nt, Human
aagcauuguaaau

SEQ ID NO: 1662095 - RNA, 14 nt, Human
aagcauuuaggaau

SEQ ID NO: 1662096 - RNA, 20 nt, Human
aagcucagggccuggcucag

SEQ ID NO: 1662097 - RNA, 18 nt, Human
aagcucagggccuggcuc

SEQ ID NO: 1662098 - RNA, 19 nt, Human
aagcucagggccuggcuca

SEQ ID NO: 1662099 - RNA, 17 nt, Human
aagcuccaagcucccag

SEQ ID NO: 1662100 - RNA, 18 nt, Human
aagcuccaagcucccagg

SEQ ID NO: 1662101 - RNA, 13 nt, Human
aagcuccagguag

SEQ ID NO: 1662102 - RNA, 14 nt, Human
aagcuccagguaga

SEQ ID NO: 1662103 - RNA, 12 nt, Human
aagcucagggcc

SEQ ID NO: 1662104 - RNA, 13 nt, Human
aagcucagggccu

SEQ ID NO: 1662105 - RNA, 16 nt, Human
aagcucagggccuggc

SEQ ID NO: 1662106 - RNA, 17 nt, Human
aagcucagggccuggcu

SEQ ID NO: 1662107 - RNA, 20 nt, Human
aagcucacagaccuuugaac

SEQ ID NO: 1662108 - RNA, 13 nt, Human
guucagccugccu

SEQ ID NO: 1662109 - RNA, 15 nt, Human
guucagcuccagcuc

SEQ ID NO: 1662110 - RNA, 13 nt, Human
guucagcuccagc

SEQ ID NO: 1662111 - RNA, 12 nt, Human
aagcuaggccug

SEQ ID NO: 1662112 - RNA, 16 nt, Human
aagcuaggccuggcca

SEQ ID NO: 1662113 - RNA, 20 nt, Human
aagccugaguuugcuuucaa

SEQ ID NO: 1662114 - RNA, 19 nt, Human
guuaggcauugugggaagg

SEQ ID NO: 1662115 - RNA, 20 nt, Human
guuaggcauugugggaaggg

SEQ ID NO: 1662116 - RNA, 18 nt, Human
guuaagagaaaugagcuu

SEQ ID NO: 1662117 - RNA, 11 nt, Human
guuaagagaaa

SEQ ID NO: 1662118 - RNA, 12 nt, Human
guuaagagaaau

SEQ ID NO: 1662119 - RNA, 18 nt, Human
guucaagcgauucuucug

SEQ ID NO: 1662120 - RNA, 22 nt, Human
guucaaagauauuuugcuuugu

SEQ ID NO: 1662121 - RNA, 21 nt, Human
guucaaagauauuuugcuuug

SEQ ID NO: 1662122 - RNA, 20 nt, Human
guucaaagauauuuugcuuu

SEQ ID NO: 1662123 - RNA, 23 nt, Human
guuauuuuuauuuauuuaaauuu

SEQ ID NO: 1662124 - RNA, 12 nt, Human
aagaguaggaag

SEQ ID NO: 1662125 - RNA, 22 nt, Human
aagagggucugaggaauccaga

SEQ ID NO: 1662126 - RNA, 23 nt, Human
aagagggagggagggcuccagac

SEQ ID NO: 1662127 - RNA, 17 nt, Human
guggggucacucuggca

SEQ ID NO: 1662128 - RNA, 20 nt, Human
guggggucacucuggcagcu

SEQ ID NO: 1662129 - RNA, 21 nt, Human
guggggucacucuggcagcuc

SEQ ID NO: 1662130 - RNA, 22 nt, Human
guggggucacucuggcagcuca

SEQ ID NO: 1662131 - RNA, 20 nt, Human
aagauggcugugccucugcc

SEQ ID NO: 1662132 - RNA, 21 nt, Human
aagauggcugugccucugccu

SEQ ID NO: 1662133 - RNA, 23 nt, Human
aagauggcugugccucugccugu

SEQ ID NO: 1662134 - RNA, 19 nt, Human
aagaugcuucucacugcca

SEQ ID NO: 1662135 - RNA, 18 nt, Human
aagauggcugugccucug

SEQ ID NO: 1662136 - RNA, 17 nt, Human
aagaugcuucucacugc

SEQ ID NO: 1662137 - RNA, 16 nt, Human
aagaugcuucucacug

SEQ ID NO: 1662138 - RNA, 13 nt, Human
aagaguaggaaga

SEQ ID NO: 1662139 - RNA, 14 nt, Human
aagaguaggaagac

SEQ ID NO: 1662140 - RNA, 13 nt, Human
aagaugaaaauau

SEQ ID NO: 1662141 - RNA, 14 nt, Human
aagaugaaaauauu

SEQ ID NO: 1662142 - RNA, 20 nt, Human
gugugugaaaaugugugugu

SEQ ID NO: 1662143 - RNA, 16 nt, Human
gugugguagagugugc

SEQ ID NO: 1662144 - RNA, 22 nt, Human
gugugacaaggauugcuacugu

SEQ ID NO: 1662145 - RNA, 21 nt, Human
gugugaccacugcagaagaca

SEQ ID NO: 1662146 - RNA, 16 nt, Human
gugucagcauagaagu

SEQ ID NO: 1662147 - RNA, 23 nt, Human
guguauuuuuuuacuaauagaca

SEQ ID NO: 1662148 - RNA, 17 nt, Human
guguauuuuuuuacuaa

SEQ ID NO: 1662149 - RNA, 20 nt, Human
gugucaagagggucugagga

SEQ ID NO: 1662150 - RNA, 13 nt, Human
aagauguagagga

SEQ ID NO: 1662151 - RNA, 19 nt, Human
aagauguagaggagaaacu

SEQ ID NO: 1662152 - RNA, 13 nt, Human
gugggacacccug

SEQ ID NO: 1662153 - RNA, 14 nt, Human
gugggagcugccug

SEQ ID NO: 1662154 - RNA, 15 nt, Human
gugggacacccugug

SEQ ID NO: 1662155 - RNA, 22 nt, Human
guggcgcagcauauucaggaag

SEQ ID NO: 1662156 - RNA, 15 nt, Human
guggggucacucugg

SEQ ID NO: 1662157 - RNA, 15 nt, Human
gugggagcugccugu

SEQ ID NO: 1662158 - RNA, 18 nt, Human
gugggagcugccuguuca

SEQ ID NO: 1662159 - RNA, 17 nt, Human
gugggaagggcuacacc

SEQ ID NO: 1662160 - RNA, 23 nt, Human
gugggaggaucucuugagccugg

SEQ ID NO: 1662161 - RNA, 21 nt, Human
guggccucccaacucacccca

SEQ ID NO: 1662162 - RNA, 22 nt, Human
guggccucccaacucaccccag

SEQ ID NO: 1662163 - RNA, 23 nt, Human
aagaggaaugaaguacucauaca

SEQ ID NO: 1662164 - RNA, 16 nt, Human
aagacuuuggaaagac

SEQ ID NO: 1662165 - RNA, 20 nt, Human
aagacgcugugcugcccugc

SEQ ID NO: 1662166 - RNA, 23 nt, Human
aagacugaguacguugugcauuu

SEQ ID NO: 1662167 - RNA, 16 nt, Human
aagacugcacaucaaa

SEQ ID NO: 1662168 - RNA, 17 nt, Human
aagacugcauuauauuu

SEQ ID NO: 1662169 - RNA, 15 nt, Human
aagaccuucuccuuc

SEQ ID NO: 1662170 - RNA, 18 nt, Human
aagaccuucuccuucacc

SEQ ID NO: 1662171 - RNA, 19 nt, Human
aagaccuucuccuucaccu

SEQ ID NO: 1662172 - RNA, 11 nt, Human
gugccuuaugg

SEQ ID NO: 1662173 - RNA, 15 nt, Human
aagacgcugugcugc

SEQ ID NO: 1662174 - RNA, 17 nt, Human
aagacgcugugcugccc

SEQ ID NO: 1662175 - RNA, 18 nt, Human
aagacgcugugcugcccu

SEQ ID NO: 1662176 - RNA, 19 nt, Human
aagacgcugugcugcccug

SEQ ID NO: 1662177 - RNA, 13 nt, Human
aagacgcugugcu

SEQ ID NO: 1662178 - RNA, 21 nt, Human
uaaaaauaaaaaacacuggga

SEQ ID NO: 1662179 - RNA, 17 nt, Human
uaaaaaucucaaauuuc

SEQ ID NO: 1662180 - RNA, 16 nt, Human
uaaaaaucucaaauuu

SEQ ID NO: 1662181 - RNA, 15 nt, Human
uaaaaaucucaaauu

SEQ ID NO: 1662182 - RNA, 18 nt, Human
uaaaaauaaaaaacacug

SEQ ID NO: 1662183 - RNA, 19 nt, Human
uaaaaauaaaaaacacugg

SEQ ID NO: 1662184 - RNA, 15 nt, Human
uaaaaaguggaaaaa

SEQ ID NO: 1662185 - RNA, 15 nt, Human
guuuuucuucucccu

SEQ ID NO: 1662186 - RNA, 21 nt, Human
guuuuucuuaaauaauaaaga

SEQ ID NO: 1662187 - RNA, 21 nt, Human
uaaaaaucucaaauuucuaaa

SEQ ID NO: 1662188 - RNA, 20 nt, Human
uaaaaaucucaaauuucuaa

SEQ ID NO: 1662189 - RNA, 19 nt, Human
uaaaaaucucaaauuucua

SEQ ID NO: 1662190 - RNA, 20 nt, Human
uaaaacuugauguguuaucu

SEQ ID NO: 1662191 - RNA, 22 nt, Human
uaaaacuugauguguuaucucu

SEQ ID NO: 1662192 - RNA, 12 nt, Human
uaaaagaaugau

SEQ ID NO: 1662193 - RNA, 23 nt, Human
uaaaagaauauuuuaacuuccuu

SEQ ID NO: 1662194 - RNA, 13 nt, Human
uaaaauauuccug

SEQ ID NO: 1662195 - RNA, 22 nt, Human
uaaaauauuccugcauuuguga

SEQ ID NO: 1662196 - RNA, 20 nt, Human
aagugauucucaugccucag

SEQ ID NO: 1662197 - RNA, 16 nt, Human
aagugaggaugaaaaa

SEQ ID NO: 1662198 - RNA, 21 nt, Human
aagugauucucaugccucagc

SEQ ID NO: 1662199 - RNA, 20 nt, Human
aagugauucuccugccucag

SEQ ID NO: 1662200 - RNA, 19 nt, Human
aagugauucuccugccuca

SEQ ID NO: 1662201 - RNA, 15 nt, Human
aagugauucuccugc

SEQ ID NO: 1662202 - RNA, 16 nt, Human
aagugauucuccugcc

SEQ ID NO: 1662203 - RNA, 17 nt, Human
aagugauucuccugccu

SEQ ID NO: 1662204 - RNA, 18 nt, Human
aagugauucuccugccuc

SEQ ID NO: 1662205 - RNA, 20 nt, Human
uaaaagacagugaaagaaaa

SEQ ID NO: 1662206 - RNA, 22 nt, Human
uaaaagacugucuuaauuugca

SEQ ID NO: 1662207 - RNA, 22 nt, Human
uaaaauaccagccaguaaaugg

SEQ ID NO: 1662208 - RNA, 20 nt, Human
uaaaauaauuuuuauauuug

SEQ ID NO: 1662209 - RNA, 15 nt, Human
aaguauuaagcauau

SEQ ID NO: 1662210 - RNA, 20 nt, Human
aaguacacuguuucaaacuu

SEQ ID NO: 1662211 - RNA, 19 nt, Human
aaguacacuguuucaaacu

SEQ ID NO: 1662212 - RNA, 23 nt, Human
aaguacacuguuucaaacuuuac

SEQ ID NO: 1662213 - RNA, 18 nt, Human
aaguauuaagcauauauu

SEQ ID NO: 1662214 - RNA, 16 nt, Human
aaguauuaagcauaua

SEQ ID NO: 1662215 - RNA, 17 nt, Human
aaguauuaagcauauau

SEQ ID NO: 1662216 - RNA, 13 nt, Human
aaguauuagaaua

SEQ ID NO: 1662217 - RNA, 14 nt, Human
guuucugccgcagc

SEQ ID NO: 1662218 - RNA, 18 nt, Human
guuucugccgcagcccug

SEQ ID NO: 1662219 - RNA, 15 nt, Human
guuucugccgcagcc

SEQ ID NO: 1662220 - RNA, 16 nt, Human
guuuugccauguuggc

SEQ ID NO: 1662221 - RNA, 20 nt, Human
guuuugccauguuggccagg

SEQ ID NO: 1662222 - RNA, 21 nt, Human
guuuugccauguuggccaggc

SEQ ID NO: 1662223 - RNA, 22 nt, Human
guuuugccauguuggccaggcu

SEQ ID NO: 1662224 - RNA, 18 nt, Human
aaguacacuguuucaaac

SEQ ID NO: 1662225 - RNA, 13 nt, Human
aaguacacuguuu

SEQ ID NO: 1662226 - RNA, 14 nt, Human
aaguaaugauaacu

SEQ ID NO: 1662227 - RNA, 19 nt, Human
aaguaaugauaacuggaaa

SEQ ID NO: 1662228 - RNA, 15 nt, Human
guuuuucauaaagca

SEQ ID NO: 1662229 - RNA, 15 nt, Human
aagugagagcugggu

SEQ ID NO: 1662230 - RNA, 12 nt, Human
aagugagagagg

SEQ ID NO: 1662231 - RNA, 14 nt, Human
aagugagagcuggg

SEQ ID NO: 1662232 - RNA, 20 nt, Human
guuuuucuuaaauaauaaag

SEQ ID NO: 1662233 - RNA, 19 nt, Human
aagugaagacaaugacuua

SEQ ID NO: 1662234 - RNA, 17 nt, Human
aagugaagacaaugacu

SEQ ID NO: 1662235 - RNA, 21 nt, Human
aagugaaaaaggaggaagaga

SEQ ID NO: 1662236 - RNA, 21 nt, Human
aagucaugcguuuaaucacau

SEQ ID NO: 1662237 - RNA, 16 nt, Human
aagucuuucacauuua

SEQ ID NO: 1662238 - RNA, 14 nt, Human
aagcuccaucucca

SEQ ID NO: 1662239 - RNA, 20 nt, Human
aagcuccaucuccacuccag

SEQ ID NO: 1662240 - RNA, 15 nt, Human
aaggaaagagggagg

SEQ ID NO: 1662241 - RNA, 21 nt, Human
aaggaauaaauugcuccuuga

SEQ ID NO: 1662242 - RNA, 17 nt, Human
aaggaauaccugucccc

SEQ ID NO: 1662243 - RNA, 16 nt, Human
aaggaagcacaugccu

SEQ ID NO: 1662244 - RNA, 14 nt, Human
aaggaagacuucau

SEQ ID NO: 1662245 - RNA, 15 nt, Human
aaggaagacuucauc

SEQ ID NO: 1662246 - RNA, 13 nt, Human
aaggaagcacaug

SEQ ID NO: 1662247 - RNA, 20 nt, Human
aaggaggggauagagagaga

SEQ ID NO: 1662248 - RNA, 18 nt, Human
aaggaggaagagaaaaaa

SEQ ID NO: 1662249 - RNA, 11 nt, Human
aaggagagcua

SEQ ID NO: 1662250 - RNA, 18 nt, Human
aaggaauaccuguccccc

SEQ ID NO: 1662251 - RNA, 14 nt, Human
aaggagauuuacaa

SEQ ID NO: 1662252 - RNA, 17 nt, Human
aaggagauuuacaacug

SEQ ID NO: 1662253 - RNA, 11 nt, Human
aaggauaaagu

SEQ ID NO: 1662254 - RNA, 21 nt, Human
aaggauacaaaagcaugugag

SEQ ID NO: 1662255 - RNA, 13 nt, Human
aaggauacaaaag

SEQ ID NO: 1662256 - RNA, 16 nt, Human
aaggccaaaggaagca

SEQ ID NO: 1662257 - RNA, 22 nt, Human
guugccuaaauccauuuggaaa

SEQ ID NO: 1662258 - RNA, 23 nt, Human
guugcccaggcaggucuugaacu

SEQ ID NO: 1662259 - RNA, 12 nt, Human
guugcccaggcu

SEQ ID NO: 1662260 - RNA, 13 nt, Human
guugcccaggcug

SEQ ID NO: 1662261 - RNA, 13 nt, Human
guuuauugucaaa

SEQ ID NO: 1662262 - RNA, 20 nt, Human
guuuaauauuaaagccaugu

SEQ ID NO: 1662263 - RNA, 15 nt, Human
guugggcugguguca

SEQ ID NO: 1662264 - RNA, 13 nt, Human
guugggcuggugu

SEQ ID NO: 1662265 - RNA, 15 nt, Human
guugggccaggagcc

SEQ ID NO: 1662266 - RNA, 17 nt, Human
guugggccaggagccuc

SEQ ID NO: 1662267 - RNA, 22 nt, Human
aaggcucgagcaugccuggaug

SEQ ID NO: 1662268 - RNA, 19 nt, Human
aaggcucgagcaugccugg

SEQ ID NO: 1662269 - RNA, 20 nt, Human
aaggcucgagcaugccugga

SEQ ID NO: 1662270 - RNA, 19 nt, Human
aaggcuccaggagcagcca

SEQ ID NO: 1662271 - RNA, 22 nt, Human
aaggcuccaggagcagccacau

SEQ ID NO: 1662272 - RNA, 16 nt, Human
aaggcucgagcaugcc

SEQ ID NO: 1662273 - RNA, 18 nt, Human
aaggcucgagcaugccug

SEQ ID NO: 1662274 - RNA, 13 nt, Human
guuucaaacuuua

SEQ ID NO: 1662275 - RNA, 16 nt, Human
guuucaaacuuuacua

SEQ ID NO: 1662276 - RNA, 14 nt, Human
guuucaaacuuuac

SEQ ID NO: 1662277 - RNA, 16 nt, Human
aaggcuccaggagcag

SEQ ID NO: 1662278 - RNA, 18 nt, Human
aaggcuccaggagcagcc

SEQ ID NO: 1662279 - RNA, 15 nt, Human
aaggcuccaggagca

SEQ ID NO: 1662280 - RNA, 17 nt, Human
guuucaaacuuuacuau

SEQ ID NO: 1662281 - RNA, 13 nt, Human
aaguaagcaaaga

SEQ ID NO: 1662282 - RNA, 16 nt, Human
aaguaaggaauuuuau

SEQ ID NO: 1662283 - RNA, 18 nt, Human
aagguauuuaauagguuu

SEQ ID NO: 1662284 - RNA, 12 nt, Human
aaggucauuuuu

SEQ ID NO: 1662285 - RNA, 19 nt, Human
guuucuauguguagggcgg

SEQ ID NO: 1662286 - RNA, 18 nt, Human
guuucugaaagggacgcu

SEQ ID NO: 1662287 - RNA, 23 nt, Human
aaggcucugagcaaauguggcuc

SEQ ID NO: 1662288 - RNA, 22 nt, Human
aaggggcccaaauucuuucagu

SEQ ID NO: 1662289 - RNA, 20 nt, Human
aagguagaaauaucugaaaa

SEQ ID NO: 1662290 - RNA, 14 nt, Human
aagguacuucaaau

SEQ ID NO: 1662291 - RNA, 19 nt, Human
aagggugaugggaaagcau

SEQ ID NO: 1662292 - RNA, 19 nt, Human
guaucccaugagccucagc

SEQ ID NO: 1662293 - RNA, 22 nt, Human
guaucaggugcugccauccagg

SEQ ID NO: 1662294 - RNA, 15 nt, Human
guaugcgugugugug

SEQ ID NO: 1662295 - RNA, 21 nt, Human
guaucccaugagccucagcau

SEQ ID NO: 1662296 - RNA, 15 nt, Human
guaugguggcugggu

SEQ ID NO: 1662297 - RNA, 16 nt, Human
guaugguggcuggguu

SEQ ID NO: 1662298 - RNA, 14 nt, Human
guaugguggcuggg

SEQ ID NO: 1662299 - RNA, 10 nt, Human
guauaauuaa

SEQ ID NO: 1662300 - RNA, 15 nt, Human
guauaaguggugugu

SEQ ID NO: 1662301 - RNA, 15 nt, Human
guauaaaauaauuuu

SEQ ID NO: 1662302 - RNA, 21 nt, Human
guauaaaauaauuuuuauauu

SEQ ID NO: 1662303 - RNA, 16 nt, Human
guaucaggugcugcca

SEQ ID NO: 1662304 - RNA, 18 nt, Human
guaucaggugcugccauc

SEQ ID NO: 1662305 - RNA, 16 nt, Human
guauauuuuauaucaa

SEQ ID NO: 1662306 - RNA, 19 nt, Human
guauaaaagggacugagaa

SEQ ID NO: 1662307 - RNA, 20 nt, Human
guaguguuggagaagaacug

SEQ ID NO: 1662308 - RNA, 16 nt, Human
aaauguaagggaaacu

SEQ ID NO: 1662309 - RNA, 17 nt, Human
guaguguuggagaagaa

SEQ ID NO: 1662310 - RNA, 22 nt, Human
guaacaggaaaauuuuaaaaau

SEQ ID NO: 1662311 - RNA, 12 nt, Human
guaacaggcaga

SEQ ID NO: 1662312 - RNA, 14 nt, Human
aaauggguuuuacu

SEQ ID NO: 1662313 - RNA, 15 nt, Human
aaauggguuuuacug

SEQ ID NO: 1662314 - RNA, 13 nt, Human
aaaugguuaaaag

SEQ ID NO: 1662315 - RNA, 19 nt, Human
aaaugguuaaaagagguuu

SEQ ID NO: 1662316 - RNA, 11 nt, Human
aaaugguuaaa

SEQ ID NO: 1662317 - RNA, 12 nt, Human
aaaugugugugu

SEQ ID NO: 1662318 - RNA, 14 nt, Human
aaauuaagaaagga

SEQ ID NO: 1662319 - RNA, 19 nt, Human
aaaugucuaguuguaacac

SEQ ID NO: 1662320 - RNA, 24 nt, Human
aaaugucuaguuguaacaccauga

SEQ ID NO: 1662321 - RNA, 15 nt, Human
aaauguauuacagug

SEQ ID NO: 1662322 - RNA, 13 nt, Human
aaauguaugugag

SEQ ID NO: 1662323 - RNA, 18 nt, Human
guauguacuucaugcugu

SEQ ID NO: 1662324 - RNA, 16 nt, Human
aaauucugucucugga

SEQ ID NO: 1662325 - RNA, 19 nt, Human
aaauuguaagcaugcacaa

SEQ ID NO: 1662326 - RNA, 18 nt, Human
aaauucugucucuggauu

SEQ ID NO: 1662327 - RNA, 14 nt, Human
aaauuguaauuaua

SEQ ID NO: 1662328 - RNA, 20 nt, Human
aaauuguaagcaugcacaaa

SEQ ID NO: 1662329 - RNA, 15 nt, Human
aaauuguaauuauau

SEQ ID NO: 1662330 - RNA, 15 nt, Human
gucaaacgugaaaau

SEQ ID NO: 1662331 - RNA, 17 nt, Human
gucaaacgugaaaaugc

SEQ ID NO: 1662332 - RNA, 14 nt, Human
gucaaacgugaaaa

SEQ ID NO: 1662333 - RNA, 21 nt, Human
gucaacaaguaugaauaaaga

SEQ ID NO: 1662334 - RNA, 17 nt, Human
gucaacacuaacaugau

SEQ ID NO: 1662335 - RNA, 22 nt, Human
guauuuuguuuuugucuuaaaa

SEQ ID NO: 1662336 - RNA, 13 nt, Human
guccauagagagc

SEQ ID NO: 1662337 - RNA, 14 nt, Human
guccauagagagca

SEQ ID NO: 1662338 - RNA, 21 nt, Human
gucccaccccacacacgccag

SEQ ID NO: 1662339 - RNA, 14 nt, Human
gucccaccuuggcu

SEQ ID NO: 1662340 - RNA, 15 nt, Human
gucccaccuuggcug

SEQ ID NO: 1662341 - RNA, 16 nt, Human
gucccaccuuggcugc

SEQ ID NO: 1662342 - RNA, 13 nt, Human
guccaagaagccc

SEQ ID NO: 1662343 - RNA, 15 nt, Human
guccaagaagcccag

SEQ ID NO: 1662344 - RNA, 16 nt, Human
guccaagaagcccagg

SEQ ID NO: 1662345 - RNA, 20 nt, Human
guccaagaagcccaggaaag

SEQ ID NO: 1662346 - RNA, 17 nt, Human
guccaagaagcccagga

SEQ ID NO: 1662347 - RNA, 18 nt, Human
guccaagaagcccaggaa

SEQ ID NO: 1662348 - RNA, 17 nt, Human
aacacaacuauauuguu

SEQ ID NO: 1662349 - RNA, 15 nt, Human
aacacagcaagggug

SEQ ID NO: 1662350 - RNA, 21 nt, Human
gucauuuuuuuuaagaaaaag

SEQ ID NO: 1662351 - RNA, 19 nt, Human
gucauuuuuuuuaagaaaa

SEQ ID NO: 1662352 - RNA, 15 nt, Human
aacagaaauguacag

SEQ ID NO: 1662353 - RNA, 14 nt, Human
aacagaaauguaca

SEQ ID NO: 1662354 - RNA, 13 nt, Human
aacagaaauguac

SEQ ID NO: 1662355 - RNA, 12 nt, Human
aacagaaaugua

SEQ ID NO: 1662356 - RNA, 16 nt, Human
guccuacccacccucc

SEQ ID NO: 1662357 - RNA, 12 nt, Human
guccuacucugu

SEQ ID NO: 1662358 - RNA, 14 nt, Human
gucccccuuccaug

SEQ ID NO: 1662359 - RNA, 16 nt, Human
gucccccuuccaugga

SEQ ID NO: 1662360 - RNA, 18 nt, Human
gucccccuuccauggacu

SEQ ID NO: 1662361 - RNA, 15 nt, Human
aacagugauuaccag

SEQ ID NO: 1662362 - RNA, 22 nt, Human
aacagugauuaccagggacuga

SEQ ID NO: 1662363 - RNA, 13 nt, Human
guccuacucugug

SEQ ID NO: 1662364 - RNA, 16 nt, Human
aacagauaaauaguuu

SEQ ID NO: 1662365 - RNA, 18 nt, Human
aaauuuguuauaaugaau

SEQ ID NO: 1662366 - RNA, 13 nt, Human
gucagaauagaaa

SEQ ID NO: 1662367 - RNA, 17 nt, Human
gucagaauagaaauuag

SEQ ID NO: 1662368 - RNA, 22 nt, Human
gucacacaguauuacuucugcu

SEQ ID NO: 1662369 - RNA, 17 nt, Human
aacaaugcuguauuuua

SEQ ID NO: 1662370 - RNA, 22 nt, Human
aacaaugcuguauuuuaaaaga

SEQ ID NO: 1662371 - RNA, 15 nt, Human
aacacaacuauauug

SEQ ID NO: 1662372 - RNA, 16 nt, Human
aacacaacuauauugu

SEQ ID NO: 1662373 - RNA, 18 nt, Human
aacaaggcaaggcuguca

SEQ ID NO: 1662374 - RNA, 21 nt, Human
aacaaggcaaggcugucaauu

SEQ ID NO: 1662375 - RNA, 12 nt, Human
aacaauaaaaga

SEQ ID NO: 1662376 - RNA, 14 nt, Human
aacaaugcuguauu

SEQ ID NO: 1662377 - RNA, 15 nt, Human
aacaaugcuguauuu

SEQ ID NO: 1662378 - RNA, 23 nt, Human
aaauuuugauguuuuaaggaugc

SEQ ID NO: 1662379 - RNA, 18 nt, Human
aaauuuugauguuuuaag

SEQ ID NO: 1662380 - RNA, 20 nt, Human
aaauuuuuucucuaggaaau

SEQ ID NO: 1662381 - RNA, 16 nt, Human
aacaaggcaaggcugu

SEQ ID NO: 1662382 - RNA, 14 nt, Human
gucuggcccuuccu

SEQ ID NO: 1662383 - RNA, 20 nt, Human
aaccugagccccaaaaggua

SEQ ID NO: 1662384 - RNA, 16 nt, Human
gucuuuuuucacuaca

SEQ ID NO: 1662385 - RNA, 15 nt, Human
gucuuuaaaugcugc

SEQ ID NO: 1662386 - RNA, 17 nt, Human
gucuuuaaaugcugcuu

SEQ ID NO: 1662387 - RNA, 16 nt, Human
gucuuucacauuuaaa

SEQ ID NO: 1662388 - RNA, 17 nt, Human
aacucuccucugcugcu

SEQ ID NO: 1662389 - RNA, 16 nt, Human
aacucuccucugcugc

SEQ ID NO: 1662390 - RNA, 15 nt, Human
aacucuccuccagag

SEQ ID NO: 1662391 - RNA, 18 nt, Human
aacucuccuccagaguca

SEQ ID NO: 1662392 - RNA, 22 nt, Human
gugaaccaccacacccagccca

SEQ ID NO: 1662393 - RNA, 23 nt, Human
gugaaccaccacacccagcccac

SEQ ID NO: 1662394 - RNA, 22 nt, Human
aacucaucuagguaaauuacag

SEQ ID NO: 1662395 - RNA, 16 nt, Human
aacuaugauuuggaaa

SEQ ID NO: 1662396 - RNA, 21 nt, Human
aacuaugauuuggaaaauaaa

SEQ ID NO: 1662397 - RNA, 23 nt, Human
aacuagacucccaagcuggacua

SEQ ID NO: 1662398 - RNA, 20 nt, Human
aacuagacucccaagcugga

SEQ ID NO: 1662399 - RNA, 21 nt, Human
aacuagaguuuagcuggaaaa

SEQ ID NO: 1662400 - RNA, 12 nt, Human
aaccugugucuc

SEQ ID NO: 1662401 - RNA, 18 nt, Human
aaccuugaaaacuuuaug

SEQ ID NO: 1662402 - RNA, 13 nt, Human
gucucgaacuccu

SEQ ID NO: 1662403 - RNA, 18 nt, Human
gucucgaacuccugaccu

SEQ ID NO: 1662404 - RNA, 19 nt, Human
gucucgaacuccugaccuu

SEQ ID NO: 1662405 - RNA, 16 nt, Human
aaccaagccguggcuu

SEQ ID NO: 1662406 - RNA, 18 nt, Human
aaccaagccguggcuucc

SEQ ID NO: 1662407 - RNA, 19 nt, Human
aaccaccacacccagccca

SEQ ID NO: 1662408 - RNA, 20 nt, Human
aaccacauuggagauguuua

SEQ ID NO: 1662409 - RNA, 15 nt, Human
aaccaagucaaguga

SEQ ID NO: 1662410 - RNA, 17 nt, Human
aaccaucauugaaaucu

SEQ ID NO: 1662411 - RNA, 18 nt, Human
aaccaucauugaaaucuu

SEQ ID NO: 1662412 - RNA, 12 nt, Human
aaccaucauuga

SEQ ID NO: 1662413 - RNA, 21 nt, Human
aaccaccacacccagcccacu

SEQ ID NO: 1662414 - RNA, 13 nt, Human
aacccaauaguug

SEQ ID NO: 1662415 - RNA, 18 nt, Human
aacccaaguccaagcaua

SEQ ID NO: 1662416 - RNA, 23 nt, Human
aaccauuuugcugucccuuuucc

SEQ ID NO: 1662417 - RNA, 23 nt, Human
aacccaaauguucaucaaugaau

SEQ ID NO: 1662418 - RNA, 14 nt, Human
aacccagauaaagg

SEQ ID NO: 1662419 - RNA, 10 nt, Human
aacccagcuc

SEQ ID NO: 1662420 - RNA, 16 nt, Human
aacccgggaggcagag

SEQ ID NO: 1662421 - RNA, 16 nt, Human
aaccucuuugucuaca

SEQ ID NO: 1662422 - RNA, 12 nt, Human
aaccucuaaauu

SEQ ID NO: 1662423 - RNA, 24 nt, Human
aaccucuaaauucuuucauuuuag

SEQ ID NO: 1662424 - RNA, 11 nt, Human
aaccugacccc

SEQ ID NO: 1662425 - RNA, 18 nt, Human
aaccugagccccaaaagg

SEQ ID NO: 1662426 - RNA, 22 nt, Human
aacugggggagggugaagugaa

SEQ ID NO: 1662427 - RNA, 21 nt, Human
aacugggggagggugaaguga

SEQ ID NO: 1662428 - RNA, 16 nt, Human
aacuggguacuugugg

SEQ ID NO: 1662429 - RNA, 21 nt, Human
aacuggguacuuguggacaca

SEQ ID NO: 1662430 - RNA, 17 nt, Human
aacugggacaggggaga

SEQ ID NO: 1662431 - RNA, 14 nt, Human
aacugggcugaaca

SEQ ID NO: 1662432 - RNA, 16 nt, Human
aacugggcugaacacu

SEQ ID NO: 1662433 - RNA, 11 nt, Human
aacuggcugca

SEQ ID NO: 1662434 - RNA, 16 nt, Human
aacuggauuaaacuua

SEQ ID NO: 1662435 - RNA, 15 nt, Human
aacuggauuaaacuu

SEQ ID NO: 1662436 - RNA, 19 nt, Human
aacuggacugguucaaaug

SEQ ID NO: 1662437 - RNA, 23 nt, Human
aacugcugacuguuuucucuuga

SEQ ID NO: 1662438 - RNA, 20 nt, Human
aacugcugacuguuuucucu

SEQ ID NO: 1662439 - RNA, 21 nt, Human
aacugcugacuguuuucucuu

SEQ ID NO: 1662440 - RNA, 17 nt, Human
aacugcuuguuuccuag

SEQ ID NO: 1662441 - RNA, 15 nt, Human
aacugcugacuguuu

SEQ ID NO: 1662442 - RNA, 19 nt, Human
aacugcacugucaagauga

SEQ ID NO: 1662443 - RNA, 15 nt, Human
gugagcaauccugca

SEQ ID NO: 1662444 - RNA, 17 nt, Human
gugaggccagagacaca

SEQ ID NO: 1662445 - RNA, 22 nt, Human
gugaggccagagacacaagccu

SEQ ID NO: 1662446 - RNA, 14 nt, Human
gugaacuugaaauu

SEQ ID NO: 1662447 - RNA, 15 nt, Human
gugaacuugaaauuu

SEQ ID NO: 1662448 - RNA, 17 nt, Human
gugaacuugggccacug

SEQ ID NO: 1662449 - RNA, 19 nt, Human
gugaacuugggccacugug

SEQ ID NO: 1662450 - RNA, 21 nt, Human
gugagaugcuagaacucccuu

SEQ ID NO: 1662451 - RNA, 22 nt, Human
aacucugacaacagacuucuga

SEQ ID NO: 1662452 - RNA, 23 nt, Human
aacucugacaacagacuucugaa

SEQ ID NO: 1662453 - RNA, 20 nt, Human
aacucugacaacagacuucu

SEQ ID NO: 1662454 - RNA, 22 nt, Human
gugagucgaggacagggaggug

SEQ ID NO: 1662455 - RNA, 21 nt, Human
aacucuucaaucucuugcacu

SEQ ID NO: 1662456 - RNA, 12 nt, Human
aacugaaaucau

SEQ ID NO: 1662457 - RNA, 13 nt, Human
aacugaaaucaua

SEQ ID NO: 1662458 - RNA, 22 nt, Human
gugaugguuccccuguucacuc

SEQ ID NO: 1662459 - RNA, 14 nt, Human
gugaugguuccccu

SEQ ID NO: 1662460 - RNA, 16 nt, Human
gugaugguuccccugu

SEQ ID NO: 1662461 - RNA, 19 nt, Human
gugauggggcccugccucc

SEQ ID NO: 1662462 - RNA, 21 nt, Human
gugcacacaccagagcccacc

SEQ ID NO: 1662463 - RNA, 22 nt, Human
gugcaugcugucccuuacguga

SEQ ID NO: 1662464 - RNA, 12 nt, Human
gugccucugccu

SEQ ID NO: 1662465 - RNA, 19 nt, Human
gugcauuaucuagauacug

SEQ ID NO: 1662466 - RNA, 15 nt, Human
gugcauuaucuagau

SEQ ID NO: 1662467 - RNA, 19 nt, Human
gugcauguguguucaugca

SEQ ID NO: 1662468 - RNA, 23 nt, Human
gugcauuaucuagauacuguauc

SEQ ID NO: 1662469 - RNA, 14 nt, Human
gugaugagaggaaa

SEQ ID NO: 1662470 - RNA, 16 nt, Human
gugaugagaggaaauc

SEQ ID NO: 1662471 - RNA, 14 nt, Human
gugauggggcccug

SEQ ID NO: 1662472 - RNA, 16 nt, Human
gugauggggcccugcc

SEQ ID NO: 1662473 - RNA, 17 nt, Human
gugauggggcccugccu

SEQ ID NO: 1662474 - RNA, 18 nt, Human
gugauggggcccugccuc

SEQ ID NO: 1662475 - RNA, 22 nt, Human
gugaugcgcaugucacggaggg

SEQ ID NO: 1662476 - RNA, 17 nt, Human
gugaugggaaagcauug

SEQ ID NO: 1662477 - RNA, 13 nt, Human
aacuuccaauuua

SEQ ID NO: 1662478 - RNA, 18 nt, Human
aacuuccagauccuggaa

SEQ ID NO: 1662479 - RNA, 22 nt, Human
aacugguggacauggcuguuca

SEQ ID NO: 1662480 - RNA, 15 nt, Human
aacuggguuccugca

SEQ ID NO: 1662481 - RNA, 14 nt, Human
aacuggguuccugc

SEQ ID NO: 1662482 - RNA, 17 nt, Human
acuagggaagauaauau

SEQ ID NO: 1662483 - RNA, 16 nt, Human
acuauuguuagucucu

SEQ ID NO: 1662484 - RNA, 19 nt, Human
acuaguauuucuaugaaau

SEQ ID NO: 1662485 - RNA, 18 nt, Human
acuaguauuucuaugaaa

SEQ ID NO: 1662486 - RNA, 11 nt, Human
accugugucuc

SEQ ID NO: 1662487 - RNA, 23 nt, Human
acgucugacaggcaaugcuggcu

SEQ ID NO: 1662488 - RNA, 12 nt, Human
acgucugugcca

SEQ ID NO: 1662489 - RNA, 15 nt, Human
acuaauagacaauuu

SEQ ID NO: 1662490 - RNA, 11 nt, Human
acguggcugcu

SEQ ID NO: 1662491 - RNA, 19 nt, Human
acgcuggagugcagugagc

SEQ ID NO: 1662492 - RNA, 15 nt, Human
acggaagagccuugc

SEQ ID NO: 1662493 - RNA, 16 nt, Human
acggaagagccuugcg

SEQ ID NO: 1662494 - RNA, 15 nt, Human
acggaauaguuggcu

SEQ ID NO: 1662495 - RNA, 19 nt, Human
acggacgaaccuugaaaac

SEQ ID NO: 1662496 - RNA, 14 nt, Human
accggcuggccugg

SEQ ID NO: 1662497 - RNA, 15 nt, Human
accggcuggccuggc

SEQ ID NO: 1662498 - RNA, 17 nt, Human
accggcuggccuggccc

SEQ ID NO: 1662499 - RNA, 18 nt, Human
accggcuggccuggcccc

SEQ ID NO: 1662500 - RNA, 20 nt, Human
accgggcacucagaagacac

SEQ ID NO: 1662501 - RNA, 19 nt, Human
accggcuggccuggccccu

SEQ ID NO: 1662502 - RNA, 20 nt, Human
accgggccacagagaaagua

SEQ ID NO: 1662503 - RNA, 15 nt, Human
accgggccacagaga

SEQ ID NO: 1662504 - RNA, 19 nt, Human
accgggccacagagaaagu

SEQ ID NO: 1662505 - RNA, 14 nt, Human
accgugaggccaga

SEQ ID NO: 1662506 - RNA, 17 nt, Human
acccuguuaccauuuug

SEQ ID NO: 1662507 - RNA, 16 nt, Human
acccaugcugcccugu

SEQ ID NO: 1662508 - RNA, 14 nt, Human
acccaugcugcccu

SEQ ID NO: 1662509 - RNA, 15 nt, Human
acccaugcugcccug

SEQ ID NO: 1662510 - RNA, 22 nt, Human
acccugugauggggcccugccu

SEQ ID NO: 1662511 - RNA, 16 nt, Human
accccacacacgccag

SEQ ID NO: 1662512 - RNA, 23 nt, Human
accucagguaaucgaccugccuc

SEQ ID NO: 1662513 - RNA, 18 nt, Human
accucaggugagaagcag

SEQ ID NO: 1662514 - RNA, 22 nt, Human
accucagguaaucgaccugccu

SEQ ID NO: 1662515 - RNA, 14 nt, Human
accucaggccuggg

SEQ ID NO: 1662516 - RNA, 22 nt, Human
accucaggccugggggcugggc

SEQ ID NO: 1662517 - RNA, 16 nt, Human
accgugaggccagaga

SEQ ID NO: 1662518 - RNA, 17 nt, Human
accgugaggccagagac

SEQ ID NO: 1662519 - RNA, 12 nt, Human
accucaggccug

SEQ ID NO: 1662520 - RNA, 13 nt, Human
accucaggccugg

SEQ ID NO: 1662521 - RNA, 21 nt, Human
accucuugagccuugaacuuu

SEQ ID NO: 1662522 - RNA, 20 nt, Human
accucuugagccuugaacuu

SEQ ID NO: 1662523 - RNA, 19 nt, Human
accucuugagccuugaacu

SEQ ID NO: 1662524 - RNA, 17 nt, Human
accucuugagccuugaa

SEQ ID NO: 1662525 - RNA, 17 nt, Human
accucugccucagaaaa

SEQ ID NO: 1662526 - RNA, 18 nt, Human
accucugccucagaaaac

SEQ ID NO: 1662527 - RNA, 13 nt, Human
accugcccaaccu

SEQ ID NO: 1662528 - RNA, 23 nt, Human
accugccccuccucucugcccua

SEQ ID NO: 1662529 - RNA, 19 nt, Human
accugucuugccuuuuuca

SEQ ID NO: 1662530 - RNA, 21 nt, Human
accugucuugccuuuuucauu

SEQ ID NO: 1662531 - RNA, 22 nt, Human
accugucuugccuuuuucauua

SEQ ID NO: 1662532 - RNA, 15 nt, Human
accugccagggacag

SEQ ID NO: 1662533 - RNA, 16 nt, Human
accugccagggacaga

SEQ ID NO: 1662534 - RNA, 18 nt, Human
accugccagggacagagg

SEQ ID NO: 1662535 - RNA, 12 nt, Human
accugccaggga

SEQ ID NO: 1662536 - RNA, 13 nt, Human
accugccagggac

SEQ ID NO: 1662537 - RNA, 11 nt, Human
accugccaggg

SEQ ID NO: 1662538 - RNA, 20 nt, Human
accucugccucagaaaacaa

SEQ ID NO: 1662539 - RNA, 17 nt, Human
acuucuuauacauuuga

SEQ ID NO: 1662540 - RNA, 18 nt, Human
acuucuuauacauuugau

SEQ ID NO: 1662541 - RNA, 20 nt, Human
acuucaaauccuugaagauu

SEQ ID NO: 1662542 - RNA, 18 nt, Human
acuucagcgguuuauaua

SEQ ID NO: 1662543 - RNA, 13 nt, Human
acuucagcucugu

SEQ ID NO: 1662544 - RNA, 20 nt, Human
acuucugccauauucuguug

SEQ ID NO: 1662545 - RNA, 19 nt, Human
acuucagcgguuuauauaa

SEQ ID NO: 1662546 - RNA, 22 nt, Human
acuuaaaauauuccugcauuug

SEQ ID NO: 1662547 - RNA, 15 nt, Human
acuuaaauaauguga

SEQ ID NO: 1662548 - RNA, 19 nt, Human
acuucaaauccuugaagau

SEQ ID NO: 1662549 - RNA, 14 nt, Human
acuuaaauaaugug

SEQ ID NO: 1662550 - RNA, 21 nt, Human
acuuaaaaaugguuuaaaugg

SEQ ID NO: 1662551 - RNA, 13 nt, Human
acuuaaaaauggu

SEQ ID NO: 1662552 - RNA, 14 nt, Human
acuuaaaaaugguu

SEQ ID NO: 1662553 - RNA, 22 nt, Human
acuuucaggccacauggcuaaa

SEQ ID NO: 1662554 - RNA, 15 nt, Human
acuuuauuuuguguu

SEQ ID NO: 1662555 - RNA, 12 nt, Human
acuuuaugcuaa

SEQ ID NO: 1662556 - RNA, 17 nt, Human
acuuuaugcuaagugaa

SEQ ID NO: 1662557 - RNA, 22 nt, Human
acuugggaggcugagaugggag

SEQ ID NO: 1662558 - RNA, 19 nt, Human
acugccagucccccugccc

SEQ ID NO: 1662559 - RNA, 18 nt, Human
acugccagucccccugcc

SEQ ID NO: 1662560 - RNA, 15 nt, Human
acugcccggcagggu

SEQ ID NO: 1662561 - RNA, 16 nt, Human
acugcuuuuggucugu

SEQ ID NO: 1662562 - RNA, 20 nt, Human
acugcuuuuggucuguguga

SEQ ID NO: 1662563 - RNA, 22 nt, Human
acugcccggcaggguccuagaa

SEQ ID NO: 1662564 - RNA, 15 nt, Human
acugcuuuuggucug

SEQ ID NO: 1662565 - RNA, 15 nt, Human
acugauucuucagca

SEQ ID NO: 1662566 - RNA, 22 nt, Human
acugauucuucagcaaaaauau

SEQ ID NO: 1662567 - RNA, 12 nt, Human
acugauucuuca

SEQ ID NO: 1662568 - RNA, 13 nt, Human
acugauucuucag

SEQ ID NO: 1662569 - RNA, 23 nt, Human
acugaugggcaacccccagccug

SEQ ID NO: 1662570 - RNA, 23 nt, Human
acugauuuuuuuuuccuucagug

SEQ ID NO: 1662571 - RNA, 21 nt, Human
acugauuuuuuuuuccuucag

SEQ ID NO: 1662572 - RNA, 22 nt, Human
acugauuuuuuuuuccuucagu

SEQ ID NO: 1662573 - RNA, 15 nt, Human
acugaccagccucca

SEQ ID NO: 1662574 - RNA, 20 nt, Human
acugaccagccuccaugcug

SEQ ID NO: 1662575 - RNA, 13 nt, Human
acugaccagccuc

SEQ ID NO: 1662576 - RNA, 23 nt, Human
acugacauuguuggccaaagcca

SEQ ID NO: 1662577 - RNA, 23 nt, Human
acugaccagccuccaugcugccu

SEQ ID NO: 1662578 - RNA, 13 nt, Human
acugaucucucgu

SEQ ID NO: 1662579 - RNA, 22 nt, Human
acugauggcuaauguacugcau

SEQ ID NO: 1662580 - RNA, 12 nt, Human
acugaugggcaa

SEQ ID NO: 1662581 - RNA, 22 nt, Human
acugaugggcaacccccagccu

SEQ ID NO: 1662582 - RNA, 14 nt, Human
acucuuaagaagac

SEQ ID NO: 1662583 - RNA, 15 nt, Human
acucuuaagaagacu

SEQ ID NO: 1662584 - RNA, 20 nt, Human
acucuuaagaagacugcauu

SEQ ID NO: 1662585 - RNA, 21 nt, Human
acucuacuuagcaugucccua

SEQ ID NO: 1662586 - RNA, 20 nt, Human
acucuacuuagcaugucccu

SEQ ID NO: 1662587 - RNA, 19 nt, Human
acucugucucaaaaaaaca

SEQ ID NO: 1662588 - RNA, 21 nt, Human
acucugugucagguggggcag

SEQ ID NO: 1662589 - RNA, 19 nt, Human
acucugugucagguggggc

SEQ ID NO: 1662590 - RNA, 15 nt, Human
acucugucucagucc

SEQ ID NO: 1662591 - RNA, 17 nt, Human
acucugucucaguccau

SEQ ID NO: 1662592 - RNA, 12 nt, Human
aauuguaaggaa

SEQ ID NO: 1662593 - RNA, 16 nt, Human
aauuguaaggaaugau

SEQ ID NO: 1662594 - RNA, 17 nt, Human
aauuggggauucuuaaa

SEQ ID NO: 1662595 - RNA, 20 nt, Human
aauuggggauucuuaaaguu

SEQ ID NO: 1662596 - RNA, 21 nt, Human
aaugguccgugcuaaggacuu

SEQ ID NO: 1662597 - RNA, 16 nt, Human
aauuggggauucuuaa

SEQ ID NO: 1662598 - RNA, 16 nt, Human
aaugucacaggcaggu

SEQ ID NO: 1662599 - RNA, 19 nt, Human
aaugucacaggcaggucca

SEQ ID NO: 1662600 - RNA, 17 nt, Human
aauuuauuggcuuuucu

SEQ ID NO: 1662601 - RNA, 19 nt, Human
aauuuauuggcuuuucuga

SEQ ID NO: 1662602 - RNA, 20 nt, Human
aauuuauuggcuuuucugau

SEQ ID NO: 1662603 - RNA, 21 nt, Human
aauuuauuggcuuuucugauc

SEQ ID NO: 1662604 - RNA, 23 nt, Human
aauuuauuggcuuuucugaucca

SEQ ID NO: 1662605 - RNA, 20 nt, Human
aauuuauuuaugggauccug

SEQ ID NO: 1662606 - RNA, 18 nt, Human
aauuuccugggagcuuuu

SEQ ID NO: 1662607 - RNA, 21 nt, Human
aauuuccugggagcuuuugua

SEQ ID NO: 1662608 - RNA, 22 nt, Human
aauuucauaccuaucaucuuaa

SEQ ID NO: 1662609 - RNA, 17 nt, Human
aauuuccugggagcuuu

SEQ ID NO: 1662610 - RNA, 12 nt, Human
acaaagaaauua

SEQ ID NO: 1662611 - RNA, 14 nt, Human
acaaagaaauuaug

SEQ ID NO: 1662612 - RNA, 16 nt, Human
acaaagaaauuaugug

SEQ ID NO: 1662613 - RNA, 13 nt, Human
acaaaauggaaua

SEQ ID NO: 1662614 - RNA, 14 nt, Human
acaaaauggaauac

SEQ ID NO: 1662615 - RNA, 13 nt, Human
acaaaaugaaacg

SEQ ID NO: 1662616 - RNA, 22 nt, Human
acaaaaugaaacgcaaccacca

SEQ ID NO: 1662617 - RNA, 18 nt, Human
acaaccuucuguggcuca

SEQ ID NO: 1662618 - RNA, 21 nt, Human
acaaggaugaauuaaguuuuu

SEQ ID NO: 1662619 - RNA, 22 nt, Human
acaagaaaugaaagcagggacu

SEQ ID NO: 1662620 - RNA, 15 nt, Human
acaagaaaugaaagc

SEQ ID NO: 1662621 - RNA, 16 nt, Human
acaagaaaugaaagca

SEQ ID NO: 1662622 - RNA, 18 nt, Human
aauuuucaucuaggauuu

SEQ ID NO: 1662623 - RNA, 12 nt, Human
aauuuuggaauu

SEQ ID NO: 1662624 - RNA, 11 nt, Human
aauuuuggaau

SEQ ID NO: 1662625 - RNA, 14 nt, Human
aauuuugauguuuu

SEQ ID NO: 1662626 - RNA, 17 nt, Human
aauuuugugaagcaaaa

SEQ ID NO: 1662627 - RNA, 16 nt, Human
aauuuugugcccccau

SEQ ID NO: 1662628 - RNA, 18 nt, Human
aauuuugugaagcaaaau

SEQ ID NO: 1662629 - RNA, 19 nt, Human
acacaaaaguuucucuuuu

SEQ ID NO: 1662630 - RNA, 14 nt, Human
acacauuuuuuaaa

SEQ ID NO: 1662631 - RNA, 22 nt, Human
acacagcucuucuccaggcugu

SEQ ID NO: 1662632 - RNA, 20 nt, Human
acacagcucuucuccaggcu

SEQ ID NO: 1662633 - RNA, 21 nt, Human
acacagcucuucuccaggcug

SEQ ID NO: 1662634 - RNA, 20 nt, Human
acaccacuacauucuguuaa

SEQ ID NO: 1662635 - RNA, 17 nt, Human
acaccacuacauucugu

SEQ ID NO: 1662636 - RNA, 14 nt, Human
acacgaauauugcu

SEQ ID NO: 1662637 - RNA, 15 nt, Human
acaccacuacauucu

SEQ ID NO: 1662638 - RNA, 19 nt, Human
acacauuuuuuaaaugcac

SEQ ID NO: 1662639 - RNA, 18 nt, Human
acacauuuuuuaaaugca

SEQ ID NO: 1662640 - RNA, 16 nt, Human
acacauuuuuuaaaug

SEQ ID NO: 1662641 - RNA, 21 nt, Human
acaccacuacauucuguuaau

SEQ ID NO: 1662642 - RNA, 15 nt, Human
acacgaauauugcug

SEQ ID NO: 1662643 - RNA, 21 nt, Human
acacgaauauugcugauggug

SEQ ID NO: 1662644 - RNA, 13 nt, Human
acaauuuauuaug

SEQ ID NO: 1662645 - RNA, 20 nt, Human
acaauuuuguuucuguacuu

SEQ ID NO: 1662646 - RNA, 14 nt, Human
acaauuuauuaugg

SEQ ID NO: 1662647 - RNA, 20 nt, Human
acaaggaugaucuaggaaga

SEQ ID NO: 1662648 - RNA, 16 nt, Human
acaaggauugcuacug

SEQ ID NO: 1662649 - RNA, 20 nt, Human
acacugggagaaaugaaaaa

SEQ ID NO: 1662650 - RNA, 22 nt, Human
acacugugcugagucugaaggc

SEQ ID NO: 1662651 - RNA, 17 nt, Human
acacugugcugagucug

SEQ ID NO: 1662652 - RNA, 13 nt, Human
acagaggcagccc

SEQ ID NO: 1662653 - RNA, 14 nt, Human
acagaggcagcccc

SEQ ID NO: 1662654 - RNA, 17 nt, Human
acagaggccaugggccu

SEQ ID NO: 1662655 - RNA, 21 nt, Human
acagaggccaugggccuccug

SEQ ID NO: 1662656 - RNA, 23 nt, Human
acagaggccaugggccuccugug

SEQ ID NO: 1662657 - RNA, 14 nt, Human
acagacaaagcgug

SEQ ID NO: 1662658 - RNA, 16 nt, Human
acagaagcuccaggua

SEQ ID NO: 1662659 - RNA, 17 nt, Human
acccacccccacccaag

SEQ ID NO: 1662660 - RNA, 15 nt, Human
acccacccccaccca

SEQ ID NO: 1662661 - RNA, 13 nt, Human
acccaugcugccc

SEQ ID NO: 1662662 - RNA, 15 nt, Human
acccacccuccuuuc

SEQ ID NO: 1662663 - RNA, 13 nt, Human
accauacuaauua

SEQ ID NO: 1662664 - RNA, 16 nt, Human
accauacuaauuauac

SEQ ID NO: 1662665 - RNA, 21 nt, Human
accauacuaauuauacccccu

SEQ ID NO: 1662666 - RNA, 17 nt, Human
accauaggucaccuuua

SEQ ID NO: 1662667 - RNA, 14 nt, Human
accaucaagccacc

SEQ ID NO: 1662668 - RNA, 15 nt, Human
accaucauugaaauc

SEQ ID NO: 1662669 - RNA, 15 nt, Human
accaucaagccacca

SEQ ID NO: 1662670 - RNA, 16 nt, Human
accaucccugaaggcc

SEQ ID NO: 1662671 - RNA, 23 nt, Human
accaucauugaaaucuuuuugcu

SEQ ID NO: 1662672 - RNA, 16 nt, Human
acauuuccuaaauaua

SEQ ID NO: 1662673 - RNA, 17 nt, Human
acauuuccuaaauauau

SEQ ID NO: 1662674 - RNA, 14 nt, Human
acauuuauucugcu

SEQ ID NO: 1662675 - RNA, 23 nt, Human
acaugucuuuucuugcaugaggc

SEQ ID NO: 1662676 - RNA, 19 nt, Human
acaugccucucucaggcca

SEQ ID NO: 1662677 - RNA, 20 nt, Human
acaugccucucucaggccaa

SEQ ID NO: 1662678 - RNA, 14 nt, Human
accagcagaaaugc

SEQ ID NO: 1662679 - RNA, 12 nt, Human
accagcagagca

SEQ ID NO: 1662680 - RNA, 13 nt, Human
accagcagagcac

SEQ ID NO: 1662681 - RNA, 13 nt, Human
accagcagccugg

SEQ ID NO: 1662682 - RNA, 16 nt, Human
accagccccagugccc

SEQ ID NO: 1662683 - RNA, 17 nt, Human
accagccccagugccca

SEQ ID NO: 1662684 - RNA, 18 nt, Human
accagccccagugcccac

SEQ ID NO: 1662685 - RNA, 19 nt, Human
accagccccagugcccaca

SEQ ID NO: 1662686 - RNA, 20 nt, Human
accagccccagugcccacag

SEQ ID NO: 1662687 - RNA, 19 nt, Human
accaaggcugauuaaacca

SEQ ID NO: 1662688 - RNA, 12 nt, Human
accaccugccca

SEQ ID NO: 1662689 - RNA, 14 nt, Human
accaccuuucagau

SEQ ID NO: 1662690 - RNA, 20 nt, Human
accaaggcugauuaaaccaa

SEQ ID NO: 1662691 - RNA, 12 nt, Human
acagcugccugc

SEQ ID NO: 1662692 - RNA, 16 nt, Human
acagcugccugcagua

SEQ ID NO: 1662693 - RNA, 13 nt, Human
acagcugccuggg

SEQ ID NO: 1662694 - RNA, 20 nt, Human
acaggcaagcaccuccugcc

SEQ ID NO: 1662695 - RNA, 23 nt, Human
acaggcaagcaccuccugccucg

SEQ ID NO: 1662696 - RNA, 16 nt, Human
acagcucuguccuggg

SEQ ID NO: 1662697 - RNA, 17 nt, Human
acagcucuguccuggga

SEQ ID NO: 1662698 - RNA, 17 nt, Human
acagaggggguggccuc

SEQ ID NO: 1662699 - RNA, 18 nt, Human
acagaggggguggccucc

SEQ ID NO: 1662700 - RNA, 19 nt, Human
acagaggggguggccuccc

SEQ ID NO: 1662701 - RNA, 21 nt, Human
acagaggggguggccucccaa

SEQ ID NO: 1662702 - RNA, 16 nt, Human
acagcuccuucugucc

SEQ ID NO: 1662703 - RNA, 18 nt, Human
acagcuccuucuguccua

SEQ ID NO: 1662704 - RNA, 23 nt, Human
acagcuccuucuguccuacucug

SEQ ID NO: 1662705 - RNA, 14 nt, Human
acagcucuguccug

SEQ ID NO: 1662706 - RNA, 22 nt, Human
acagugagucgaggacagggag

SEQ ID NO: 1662707 - RNA, 19 nt, Human
acaggugugaaccaccaca

SEQ ID NO: 1662708 - RNA, 22 nt, Human
acaggugugagucaccaagccc

SEQ ID NO: 1662709 - RNA, 23 nt, Human
acaggugugagucaccaagccca

SEQ ID NO: 1662710 - RNA, 14 nt, Human
acaggcaaugcugg

SEQ ID NO: 1662711 - RNA, 13 nt, Human
acagugcaucuca

SEQ ID NO: 1662712 - RNA, 15 nt, Human
acaguggggaaugaa

SEQ ID NO: 1662713 - RNA, 19 nt, Human
acaguggggaaugaagaua

SEQ ID NO: 1662714 - RNA, 23 nt, Human
acagugagucgaggacagggagg

SEQ ID NO: 1662715 - RNA, 21 nt, Human
acagugauuaccagggacuga

SEQ ID NO: 1662716 - RNA, 15 nt, Human
acauccuacaagaca

SEQ ID NO: 1662717 - RNA, 16 nt, Human
acaugcaaggucauuu

SEQ ID NO: 1662718 - RNA, 20 nt, Human
acaucccuuaccugggaaag

SEQ ID NO: 1662719 - RNA, 17 nt, Human
acaugcaaggucauuuu

SEQ ID NO: 1662720 - RNA, 18 nt, Human
acaugcaaggucauuuuu

SEQ ID NO: 1662721 - RNA, 15 nt, Human
acaugccucucucag

SEQ ID NO: 1662722 - RNA, 16 nt, Human
acaugccucucucagg

SEQ ID NO: 1662723 - RNA, 17 nt, Human
acaugccucucucaggc

SEQ ID NO: 1662724 - RNA, 18 nt, Human
acaugccucucucaggcc

SEQ ID NO: 1662725 - RNA, 16 nt, Human
acauaagauaaaugug

SEQ ID NO: 1662726 - RNA, 20 nt, Human
acauaauucaggaagcagcu

SEQ ID NO: 1662727 - RNA, 12 nt, Human
aaguagaggagg

SEQ ID NO: 1662728 - RNA, 18 nt, Human
aagguucuggugugaacu

SEQ ID NO: 1662729 - RNA, 15 nt, Human
aagggacugagaaau

SEQ ID NO: 1662730 - RNA, 17 nt, Human
aagggacugagaaauuu

SEQ ID NO: 1662731 - RNA, 20 nt, Human
aagggacuuggaagcuccgc

SEQ ID NO: 1662732 - RNA, 14 nt, Human
aagggauggcaaga

SEQ ID NO: 1662733 - RNA, 17 nt, Human
aagggauggcaagaugu

SEQ ID NO: 1662734 - RNA, 16 nt, Human
aagcugcugacagugu

SEQ ID NO: 1662735 - RNA, 23 nt, Human
aaggaaugauuaauuaaaacaca

SEQ ID NO: 1662736 - RNA, 21 nt, Human
aagcgugagccacugcaccgg

SEQ ID NO: 1662737 - RNA, 17 nt, Human
aagcgugagccacugca

SEQ ID NO: 1662738 - RNA, 20 nt, Human
aagcgugagccacugcaccg

SEQ ID NO: 1662739 - RNA, 11 nt, Human
aagcugccagc

SEQ ID NO: 1662740 - RNA, 12 nt, Human
aagcugccagcc

SEQ ID NO: 1662741 - RNA, 14 nt, Human
aagcugcugacagu

SEQ ID NO: 1662742 - RNA, 22 nt, Human
aagcugccagccgagauagcca

SEQ ID NO: 1662743 - RNA, 22 nt, Human
aaggacccggaggggccuggca

SEQ ID NO: 1662744 - RNA, 12 nt, Human
aaggaauuuuau

SEQ ID NO: 1662745 - RNA, 15 nt, Human
aaggacuaggguccu

SEQ ID NO: 1662746 - RNA, 13 nt, Human
aaggacuaggguc

SEQ ID NO: 1662747 - RNA, 13 nt, Human
aaggacacuagaa

SEQ ID NO: 1662748 - RNA, 14 nt, Human
aaggcaaaugacuu

SEQ ID NO: 1662749 - RNA, 15 nt, Human
aaggcaaaugacuuu

SEQ ID NO: 1662750 - RNA, 16 nt, Human
aaggcaaaugacuuug

SEQ ID NO: 1662751 - RNA, 15 nt, Human
aagcgauucuucugc

SEQ ID NO: 1662752 - RNA, 14 nt, Human
aagcgauucuucug

SEQ ID NO: 1662753 - RNA, 16 nt, Human
aagcgauucuucugcu

SEQ ID NO: 1662754 - RNA, 17 nt, Human
aagcgauucuucugcuu

SEQ ID NO: 1662755 - RNA, 15 nt, Human
aagccagcaggcucu

SEQ ID NO: 1662756 - RNA, 19 nt, Human
aagccagcaggcucucagg

SEQ ID NO: 1662757 - RNA, 18 nt, Human
aagccagcaggcucucag

SEQ ID NO: 1662758 - RNA, 21 nt, Human
aagccaccaacauacucccau

SEQ ID NO: 1662759 - RNA, 19 nt, Human
aagccagauuuuccugaaa

SEQ ID NO: 1662760 - RNA, 15 nt, Human
aagacuuuuaugaua

SEQ ID NO: 1662761 - RNA, 17 nt, Human
aagacuuuuccaacccu

SEQ ID NO: 1662762 - RNA, 15 nt, Human
aagagaacuuccaga

SEQ ID NO: 1662763 - RNA, 23 nt, Human
aagacagugaaagaaaauaacaa

SEQ ID NO: 1662764 - RNA, 16 nt, Human
aagacuuuggaaagag

SEQ ID NO: 1662765 - RNA, 20 nt, Human
aagauucaaugccccugaau

SEQ ID NO: 1662766 - RNA, 21 nt, Human
aagauucaaugccccugaauu

SEQ ID NO: 1662767 - RNA, 20 nt, Human
aagauucauauuuacuucuu

SEQ ID NO: 1662768 - RNA, 14 nt, Human
aagauacugaaaua

SEQ ID NO: 1662769 - RNA, 16 nt, Human
aagauacugaaauaaa

SEQ ID NO: 1662770 - RNA, 20 nt, Human
aagauacugaaauaaacguc

SEQ ID NO: 1662771 - RNA, 17 nt, Human
aagauucaaucccagga

SEQ ID NO: 1662772 - RNA, 14 nt, Human
aagauagcagggca

SEQ ID NO: 1662773 - RNA, 19 nt, Human
aagccaccaacauacuccc

SEQ ID NO: 1662774 - RNA, 15 nt, Human
aagcagggacuugaa

SEQ ID NO: 1662775 - RNA, 19 nt, Human
aagauuuugaaauuuuuau

SEQ ID NO: 1662776 - RNA, 20 nt, Human
aaugguccgugcuaaggacu

SEQ ID NO: 1662777 - RNA, 17 nt, Human
aaugggggugcauuuga

SEQ ID NO: 1662778 - RNA, 15 nt, Human
aaugggggugcauuu

SEQ ID NO: 1662779 - RNA, 23 nt, Human
aaugcucuuuacuucauggacuu

SEQ ID NO: 1662780 - RNA, 13 nt, Human
aaugggacacuaa

SEQ ID NO: 1662781 - RNA, 14 nt, Human
aaugggagcucaug

SEQ ID NO: 1662782 - RNA, 17 nt, Human
aaugcgcaggcuggccc

SEQ ID NO: 1662783 - RNA, 18 nt, Human
aaugcgcaggcuggcccu

SEQ ID NO: 1662784 - RNA, 19 nt, Human
aaugcgcaggcuggcccug

SEQ ID NO: 1662785 - RNA, 20 nt, Human
aaugcgcaggcuggcccugc

SEQ ID NO: 1662786 - RNA, 15 nt, Human
aaugcgcaggcuggc

SEQ ID NO: 1662787 - RNA, 14 nt, Human
aaugcgcaggcugg

SEQ ID NO: 1662788 - RNA, 21 nt, Human
aaugcgcaggcuggcccugcc

SEQ ID NO: 1662789 - RNA, 23 nt, Human
aaugcgugcauaccacuuuuguu

SEQ ID NO: 1662790 - RNA, 21 nt, Human
aaugcgugcauaccacuuuug

SEQ ID NO: 1662791 - RNA, 15 nt, Human
aaucuggacuccucu

SEQ ID NO: 1662792 - RNA, 16 nt, Human
aaucuggacuccucug

SEQ ID NO: 1662793 - RNA, 17 nt, Human
aaucuggacuccucugu

SEQ ID NO: 1662794 - RNA, 18 nt, Human
aaucuggacuccucuguc

SEQ ID NO: 1662795 - RNA, 20 nt, Human
aaucuggacuccucugucca

SEQ ID NO: 1662796 - RNA, 18 nt, Human
aaucucggcucacugcau

SEQ ID NO: 1662797 - RNA, 23 nt, Human
aaucucgcucugucgcccaggcu

SEQ ID NO: 1662798 - RNA, 16 nt, Human
aauccauacauuugug

SEQ ID NO: 1662799 - RNA, 17 nt, Human
aauccagacccggcugc

SEQ ID NO: 1662800 - RNA, 17 nt, Human
aauccauacauuugugu

SEQ ID NO: 1662801 - RNA, 23 nt, Human
aaugauguauguugaagccuuug

SEQ ID NO: 1662802 - RNA, 15 nt, Human
aaugauagcuacugu

SEQ ID NO: 1662803 - RNA, 16 nt, Human
aaugauuaauuaaaac

SEQ ID NO: 1662804 - RNA, 12 nt, Human
aaugauuaauua

SEQ ID NO: 1662805 - RNA, 13 nt, Human
aaugauuaauuaa

SEQ ID NO: 1662806 - RNA, 14 nt, Human
aaugauaacuggaa

SEQ ID NO: 1662807 - RNA, 15 nt, Human
aaugauaacuggaaa

SEQ ID NO: 1662808 - RNA, 16 nt, Human
aaugauaacuggaaac

SEQ ID NO: 1662809 - RNA, 22 nt, Human
aaucauuucugcaucagcugcu

SEQ ID NO: 1662810 - RNA, 22 nt, Human
aauauuaaagccauguuuauua

SEQ ID NO: 1662811 - RNA, 22 nt, Human
aaucaaauaugcaaagcacuga

SEQ ID NO: 1662812 - RNA, 15 nt, Human
aaucaaauaugcaaa

SEQ ID NO: 1662813 - RNA, 16 nt, Human
aaucaaauaugcaaag

SEQ ID NO: 1662814 - RNA, 19 nt, Human
aauacgugggcauucaaau

SEQ ID NO: 1662815 - RNA, 20 nt, Human
aauacgugggcauucaaaug

SEQ ID NO: 1662816 - RNA, 12 nt, Human
aauacuguuuga

SEQ ID NO: 1662817 - RNA, 13 nt, Human
aauauuaaagcca

SEQ ID NO: 1662818 - RNA, 14 nt, Human
aauauuaaagccau

SEQ ID NO: 1662819 - RNA, 15 nt, Human
aauauuaaagccaug

SEQ ID NO: 1662820 - RNA, 16 nt, Human
aauauuaaagccaugu

SEQ ID NO: 1662821 - RNA, 18 nt, Human
aauauuaaagccauguuu

SEQ ID NO: 1662822 - RNA, 19 nt, Human
aauauuaaagccauguuua

SEQ ID NO: 1662823 - RNA, 20 nt, Human
aauauuaaagccauguuuau

SEQ ID NO: 1662824 - RNA, 16 nt, Human
aauauaggaacuuaaa

SEQ ID NO: 1662825 - RNA, 14 nt, Human
aauaauguuucaaa

SEQ ID NO: 1662826 - RNA, 19 nt, Human
aauaauguuucaaacauau

SEQ ID NO: 1662827 - RNA, 12 nt, Human
aauaauguuuca

SEQ ID NO: 1662828 - RNA, 13 nt, Human
aagugcugcauuu

SEQ ID NO: 1662829 - RNA, 14 nt, Human
aagugcugcauuua

SEQ ID NO: 1662830 - RNA, 15 nt, Human
aaguggggacagagc

SEQ ID NO: 1662831 - RNA, 22 nt, Human
aaguugauaugccuuuucccaa

SEQ ID NO: 1662832 - RNA, 11 nt, Human
aauaaagcugu

SEQ ID NO: 1662833 - RNA, 19 nt, Human
aauaaagcuguguggcagu

SEQ ID NO: 1662834 - RNA, 15 nt, Human
aauaaacgucuuaaa

SEQ ID NO: 1662835 - RNA, 21 nt, Human
aauaauaaagaucauguaaaa

SEQ ID NO: 1662836 - RNA, 13 nt, Human
aauaauaaagauc

SEQ ID NO: 1662837 - RNA, 18 nt, Human
aaguugauggugaugaaa

SEQ ID NO: 1662838 - RNA, 12 nt, Human
aauaaaauuuuu

SEQ ID NO: 1662839 - RNA, 10 nt, Human
aauaaaccau

SEQ ID NO: 1662840 - RNA, 14 nt, Human
aaauggacguguua

SEQ ID NO: 1662841 - RNA, 17 nt, Human
aaauggaauacucuuau

SEQ ID NO: 1662842 - RNA, 15 nt, Human
aaauggacguguuau

SEQ ID NO: 1662843 - RNA, 17 nt, Human
aaauggacguguuauga

SEQ ID NO: 1662844 - RNA, 22 nt, Human
aaaucuccaaaauaaaacuuuu

SEQ ID NO: 1662845 - RNA, 20 nt, Human
aaaucugugaacuugaaauu

SEQ ID NO: 1662846 - RNA, 19 nt, Human
aaaucugugaacuugaaau

SEQ ID NO: 1662847 - RNA, 21 nt, Human
aaaucugugaacuugaaauuu

SEQ ID NO: 1662848 - RNA, 18 nt, Human
aaaucugcuuuuuaaaga

SEQ ID NO: 1662849 - RNA, 14 nt, Human
aaaucuuaacuuga

SEQ ID NO: 1662850 - RNA, 18 nt, Human
aaauguuuuuuuuuaaag

SEQ ID NO: 1662851 - RNA, 21 nt, Human
aaauguuuuuuuuuaaagacu

SEQ ID NO: 1662852 - RNA, 20 nt, Human
aaauguucaucaaugaauga

SEQ ID NO: 1662853 - RNA, 22 nt, Human
aacaaaccuguuucugcagcca

SEQ ID NO: 1662854 - RNA, 21 nt, Human
aacacauacaggaagguagaa

SEQ ID NO: 1662855 - RNA, 17 nt, Human
aacacuaacaugauuug

SEQ ID NO: 1662856 - RNA, 19 nt, Human
aacaccucugcacaagcug

SEQ ID NO: 1662857 - RNA, 12 nt, Human
aacacaucagcu

SEQ ID NO: 1662858 - RNA, 22 nt, Human
aaauguuuuuuuuuaaagacuu

SEQ ID NO: 1662859 - RNA, 12 nt, Human
aaauuaacuuuu

SEQ ID NO: 1662860 - RNA, 19 nt, Human
aaauuaacuuuuauaaacu

SEQ ID NO: 1662861 - RNA, 14 nt, Human
aaauuaacuuuuau

SEQ ID NO: 1662862 - RNA, 13 nt, Human
aaauuaacuuuua

SEQ ID NO: 1662863 - RNA, 23 nt, Human
aaauuggggauucuuaaaguuga

SEQ ID NO: 1662864 - RNA, 18 nt, Human
aaauuggggauucuuaaa

SEQ ID NO: 1662865 - RNA, 19 nt, Human
aaauuggggauucuuaaag

SEQ ID NO: 1662866 - RNA, 20 nt, Human
aaauuggggauucuuaaagu

SEQ ID NO: 1662867 - RNA, 22 nt, Human
aaauuggggauucuuaaaguug

SEQ ID NO: 1662868 - RNA, 18 nt, Human
aaauugaugggauuuggu

SEQ ID NO: 1662869 - RNA, 15 nt, Human
aacauccuacaagac

SEQ ID NO: 1662870 - RNA, 22 nt, Human
aacauccuacaagacacaguga

SEQ ID NO: 1662871 - RNA, 16 nt, Human
aacagcuaaugggaca

SEQ ID NO: 1662872 - RNA, 15 nt, Human
aacauggaaguacua

SEQ ID NO: 1662873 - RNA, 22 nt, Human
aacaugcuacacacugcauguu

SEQ ID NO: 1662874 - RNA, 13 nt, Human
aacccuucagugc

SEQ ID NO: 1662875 - RNA, 11 nt, Human
aaccaguauug

SEQ ID NO: 1662876 - RNA, 13 nt, Human
aaccaguauugua

SEQ ID NO: 1662877 - RNA, 14 nt, Human
aaccaguauuguac

SEQ ID NO: 1662878 - RNA, 19 nt, Human
aaccaguguuguggauuua

SEQ ID NO: 1662879 - RNA, 13 nt, Human
aacgcguugaaau

SEQ ID NO: 1662880 - RNA, 14 nt, Human
aacgcguugaaauu

SEQ ID NO: 1662881 - RNA, 15 nt, Human
aacgcguugaaauug

SEQ ID NO: 1662882 - RNA, 17 nt, Human
aacgcguugaaauugua

SEQ ID NO: 1662883 - RNA, 15 nt, Human
aacguauaaaagccu

SEQ ID NO: 1662884 - RNA, 13 nt, Human
aacgucugugcca

SEQ ID NO: 1662885 - RNA, 17 nt, Human
aacucaaacucuuaaaa

SEQ ID NO: 1662886 - RNA, 16 nt, Human
aacucaccccagcccc

SEQ ID NO: 1662887 - RNA, 17 nt, Human
aacucaccccagcccca

SEQ ID NO: 1662888 - RNA, 18 nt, Human
aacucaccccagccccaa

SEQ ID NO: 1662889 - RNA, 15 nt, Human
aacucauauuuucau

SEQ ID NO: 1662890 - RNA, 16 nt, Human
aacucauauuuucaug

SEQ ID NO: 1662891 - RNA, 18 nt, Human
aacucauauuuucaugcu

SEQ ID NO: 1662892 - RNA, 23 nt, Human
aacugagaugugaacacaucagc

SEQ ID NO: 1662893 - RNA, 15 nt, Human
aacuguuauuuauaa

SEQ ID NO: 1662894 - RNA, 16 nt, Human
aacuguuauuuauaau

SEQ ID NO: 1662895 - RNA, 17 nt, Human
aacuguuauuuauaauc

SEQ ID NO: 1662896 - RNA, 20 nt, Human
aacuguuauuuauaaucacu

SEQ ID NO: 1662897 - RNA, 22 nt, Human
aacuguuauuuauaaucacuuu

SEQ ID NO: 1662898 - RNA, 21 nt, Human
aaaauccacuuuaucuugaau

SEQ ID NO: 1662899 - RNA, 23 nt, Human
aaaaguuuaauauuaaagccaug

SEQ ID NO: 1662900 - RNA, 21 nt, Human
aaaaguuuaauauuaaagcca

SEQ ID NO: 1662901 - RNA, 22 nt, Human
aaaaguuuaauauuaaagccau

SEQ ID NO: 1662902 - RNA, 15 nt, Human
aaaauaaaaaacacu

SEQ ID NO: 1662903 - RNA, 19 nt, Human
aaaauuaggauuucaugau

SEQ ID NO: 1662904 - RNA, 15 nt, Human
aaaauuagccaagug

SEQ ID NO: 1662905 - RNA, 13 nt, Human
aaaauuaagaaag

SEQ ID NO: 1662906 - RNA, 20 nt, Human
aaaauuaagaaaggauaaag

SEQ ID NO: 1662907 - RNA, 23 nt, Human
aaaauuaaucugggccagaauuu

SEQ ID NO: 1662908 - RNA, 22 nt, Human
aaaaucccuuaccucggugccu

SEQ ID NO: 1662909 - RNA, 22 nt, Human
aaaauuaacaugaauauuuagu

SEQ ID NO: 1662910 - RNA, 12 nt, Human
aaaauuaagaaa

SEQ ID NO: 1662911 - RNA, 19 nt, Human
aaaauccauacauuugugu

SEQ ID NO: 1662912 - RNA, 17 nt, Human
aaacagcuaaugggaca

SEQ ID NO: 1662913 - RNA, 15 nt, Human
aaacagccugugucu

SEQ ID NO: 1662914 - RNA, 15 nt, Human
aaagauacaguuacu

SEQ ID NO: 1662915 - RNA, 11 nt, Human
aaagagguuuu

SEQ ID NO: 1662916 - RNA, 22 nt, Human
aaacugauuuuuuuuuccuuca

SEQ ID NO: 1662917 - RNA, 20 nt, Human
aaacugauuuuuuuuuccuu

SEQ ID NO: 1662918 - RNA, 13 nt, Human
aaacugauuuuuu

SEQ ID NO: 1662919 - RNA, 19 nt, Human
aaacugauuuuuuuuuccu

SEQ ID NO: 1662920 - RNA, 13 nt, Human
aaagaaacauuug

SEQ ID NO: 1662921 - RNA, 17 nt, Human
aaaccccaucucuacaa

SEQ ID NO: 1662922 - RNA, 21 nt, Human
aaacccugucucuacuaaaaa

SEQ ID NO: 1662923 - RNA, 14 nt, Human
aaacccuucagugc

SEQ ID NO: 1662924 - RNA, 19 nt, Human
aaacccuugccaugugcua

SEQ ID NO: 1662925 - RNA, 17 nt, Human
aaacucuugaccucagg

SEQ ID NO: 1662926 - RNA, 19 nt, Human
aaaggcagaagcaacccaa

SEQ ID NO: 1662927 - RNA, 21 nt, Human
aaaggcuccaggagcagccac

SEQ ID NO: 1662928 - RNA, 22 nt, Human
aaaggcuccaggagcagccaca

SEQ ID NO: 1662929 - RNA, 14 nt, Human
aaaggcuccaggag

SEQ ID NO: 1662930 - RNA, 14 nt, Human
aaaggcuaccuuug

SEQ ID NO: 1662931 - RNA, 17 nt, Human
aaaggcuaccuuuguau

SEQ ID NO: 1662932 - RNA, 15 nt, Human
aaagccaaagcuagg

SEQ ID NO: 1662933 - RNA, 19 nt, Human
aaagcauuguaaaugugcu

SEQ ID NO: 1662934 - RNA, 20 nt, Human
aaagcauuguaaaugugcuu

SEQ ID NO: 1662935 - RNA, 17 nt, Human
aaauaaacgucuuaaau

SEQ ID NO: 1662936 - RNA, 11 nt, Human
aaauaaauuau

SEQ ID NO: 1662937 - RNA, 15 nt, Human
aaauaaacgucuuaa

SEQ ID NO: 1662938 - RNA, 16 nt, Human
aaauaaacgucuuaaa

SEQ ID NO: 1662939 - RNA, 22 nt, Human
aggguuuugccauguuggccag

SEQ ID NO: 1662940 - RNA, 23 nt, Human
aggguuuugccauguuggccagg

SEQ ID NO: 1662941 - RNA, 13 nt, Human
agguacucuccug

SEQ ID NO: 1662942 - RNA, 14 nt, Human
agguacucuccugg

SEQ ID NO: 1662943 - RNA, 23 nt, Human
aggucccuaauaaagcugugugg

SEQ ID NO: 1662944 - RNA, 16 nt, Human
agguaacaggcagaua

SEQ ID NO: 1662945 - RNA, 13 nt, Human
agguaacaggcag

SEQ ID NO: 1662946 - RNA, 14 nt, Human
agguaacaggcaga

SEQ ID NO: 1662947 - RNA, 20 nt, Human
agggucucacuauguugccc

SEQ ID NO: 1662948 - RNA, 14 nt, Human
agggccuggccuga

SEQ ID NO: 1662949 - RNA, 22 nt, Human
aggggcccaaauucuuucagug

SEQ ID NO: 1662950 - RNA, 12 nt, Human
agggucccuggu

SEQ ID NO: 1662951 - RNA, 14 nt, Human
agggucccuggugg

SEQ ID NO: 1662952 - RNA, 13 nt, Human
aggggccuggcag

SEQ ID NO: 1662953 - RNA, 15 nt, Human
aggggccuggcagcc

SEQ ID NO: 1662954 - RNA, 12 nt, Human
aggggccuggca

SEQ ID NO: 1662955 - RNA, 21 nt, Human
aggguaucuggugacuuuccu

SEQ ID NO: 1662956 - RNA, 13 nt, Human
aggguauuccaga

SEQ ID NO: 1662957 - RNA, 16 nt, Human
agggucccugguggca

SEQ ID NO: 1662958 - RNA, 17 nt, Human
agggucccugguggcag

SEQ ID NO: 1662959 - RNA, 20 nt, Human
agggucccugguggcagcuc

SEQ ID NO: 1662960 - RNA, 22 nt, Human
agggucccugguggcagcucac

SEQ ID NO: 1662961 - RNA, 15 nt, Human
agggccugcaaggga

SEQ ID NO: 1662962 - RNA, 12 nt, Human
agggccuggccu

SEQ ID NO: 1662963 - RNA, 13 nt, Human
agggccuggccug

SEQ ID NO: 1662964 - RNA, 14 nt, Human
agggccugcaaggg

SEQ ID NO: 1662965 - RNA, 20 nt, Human
agggauuagggagagaagau

SEQ ID NO: 1662966 - RNA, 15 nt, Human
agggauuagggagag

SEQ ID NO: 1662967 - RNA, 14 nt, Human
aggagaggggcaca

SEQ ID NO: 1662968 - RNA, 17 nt, Human
aggcaugugaugagagg

SEQ ID NO: 1662969 - RNA, 15 nt, Human
aggcaugguggccca

SEQ ID NO: 1662970 - RNA, 19 nt, Human
aggcaugugaugagaggaa

SEQ ID NO: 1662971 - RNA, 20 nt, Human
aggcaugugaugagaggaaa

SEQ ID NO: 1662972 - RNA, 21 nt, Human
aggcaugugaugagaggaaau

SEQ ID NO: 1662973 - RNA, 17 nt, Human
aggcauguucucugagg

SEQ ID NO: 1662974 - RNA, 18 nt, Human
aggcauguucucugagga

SEQ ID NO: 1662975 - RNA, 19 nt, Human
aggcauguucucugaggac

SEQ ID NO: 1662976 - RNA, 18 nt, Human
aggcauuccccaggaggc

SEQ ID NO: 1662977 - RNA, 19 nt, Human
aggcauuccccaggaggcc

SEQ ID NO: 1662978 - RNA, 20 nt, Human
aggcauuccccaggaggcca

SEQ ID NO: 1662979 - RNA, 13 nt, Human
aggccaggcccuc

SEQ ID NO: 1662980 - RNA, 14 nt, Human
aggccaggcccucu

SEQ ID NO: 1662981 - RNA, 15 nt, Human
aggccaggcccucug

SEQ ID NO: 1662982 - RNA, 22 nt, Human
aggcccuuccucuccacugccu

SEQ ID NO: 1662983 - RNA, 12 nt, Human
aggcccuucucu

SEQ ID NO: 1662984 - RNA, 15 nt, Human
aggcccuucucucca

SEQ ID NO: 1662985 - RNA, 19 nt, Human
aggcccuucucuccagccc

SEQ ID NO: 1662986 - RNA, 22 nt, Human
aggcccucugcccacucccugc

SEQ ID NO: 1662987 - RNA, 23 nt, Human
aggcccucugcccacucccugca

SEQ ID NO: 1662988 - RNA, 21 nt, Human
aggccaugggcacugugggua

SEQ ID NO: 1662989 - RNA, 23 nt, Human
aggccaugggcacuguggguaga

SEQ ID NO: 1662990 - RNA, 14 nt, Human
aggcuaccuuugua

SEQ ID NO: 1662991 - RNA, 13 nt, Human
aggcuaccuuugu

SEQ ID NO: 1662992 - RNA, 15 nt, Human
aggcuaccuuuguau

SEQ ID NO: 1662993 - RNA, 18 nt, Human
aggcuggguucugauccu

SEQ ID NO: 1662994 - RNA, 23 nt, Human
aggcuggucucgaacuccugacc

SEQ ID NO: 1662995 - RNA, 20 nt, Human
aggcuguaucccaugagccu

SEQ ID NO: 1662996 - RNA, 21 nt, Human
aggcuguaucccaugagccuc

SEQ ID NO: 1662997 - RNA, 22 nt, Human
aggcuguaucccaugagccuca

SEQ ID NO: 1662998 - RNA, 17 nt, Human
aggcuuagucacugaga

SEQ ID NO: 1662999 - RNA, 18 nt, Human
aggcuuagucacugagac

SEQ ID NO: 1663000 - RNA, 21 nt, Human
aggcuuagucacugagacagc

SEQ ID NO: 1663001 - RNA, 15 nt, Human
agggacccuccacca

SEQ ID NO: 1663002 - RNA, 23 nt, Human
agggacugccagucccccugccc

SEQ ID NO: 1663003 - RNA, 15 nt, Human
agggacugaggggag

SEQ ID NO: 1663004 - RNA, 18 nt, Human
aggacccggaggggccug

SEQ ID NO: 1663005 - RNA, 20 nt, Human
aggacccggaggggccuggc

SEQ ID NO: 1663006 - RNA, 21 nt, Human
aggacccggaggggccuggca

SEQ ID NO: 1663007 - RNA, 22 nt, Human
aggacccggaggggccuggcag

SEQ ID NO: 1663008 - RNA, 15 nt, Human
agcuuuuaugugaaa

SEQ ID NO: 1663009 - RNA, 21 nt, Human
agcuuuuaugugaaacauguu

SEQ ID NO: 1663010 - RNA, 12 nt, Human
aggaacaaggca

SEQ ID NO: 1663011 - RNA, 13 nt, Human
aggaacaaggcaa

SEQ ID NO: 1663012 - RNA, 16 nt, Human
aggaacaaggcaaggc

SEQ ID NO: 1663013 - RNA, 17 nt, Human
aggaacaaggcaaggcu

SEQ ID NO: 1663014 - RNA, 19 nt, Human
aggaacaaggcaaggcugu

SEQ ID NO: 1663015 - RNA, 21 nt, Human
aggaacuuaaauaaugugaaa

SEQ ID NO: 1663016 - RNA, 20 nt, Human
aggaacaaggcaaggcuguc

SEQ ID NO: 1663017 - RNA, 23 nt, Human
aggaacaaggcaaggcugucaau

SEQ ID NO: 1663018 - RNA, 19 nt, Human
aggaauaaauugcuccuug

SEQ ID NO: 1663019 - RNA, 20 nt, Human
aggaauaaauugcuccuuga

SEQ ID NO: 1663020 - RNA, 13 nt, Human
aggaaguggaaug

SEQ ID NO: 1663021 - RNA, 22 nt, Human
aggaauaccugucccccugaca

SEQ ID NO: 1663022 - RNA, 15 nt, Human
aggaauaccuguccc

SEQ ID NO: 1663023 - RNA, 18 nt, Human
aggaauaccugucccccu

SEQ ID NO: 1663024 - RNA, 22 nt, Human
aggaaggcugagaggagagaga

SEQ ID NO: 1663025 - RNA, 23 nt, Human
aggaacuuaaauaaugugaaacu

SEQ ID NO: 1663026 - RNA, 16 nt, Human
agcuuuuaaacccuau

SEQ ID NO: 1663027 - RNA, 23 nt, Human
agcuuuguuuguugucagcugaa

SEQ ID NO: 1663028 - RNA, 19 nt, Human
agcuucauuuccugugucu

SEQ ID NO: 1663029 - RNA, 18 nt, Human
agcuucauuuccuguguc

SEQ ID NO: 1663030 - RNA, 18 nt, Human
agcuucacuguaaaauaa

SEQ ID NO: 1663031 - RNA, 22 nt, Human
agcugguuuuuagcggagacgg

SEQ ID NO: 1663032 - RNA, 18 nt, Human
agcuggucccacucaguc

SEQ ID NO: 1663033 - RNA, 19 nt, Human
agcuggucccacucagucc

SEQ ID NO: 1663034 - RNA, 13 nt, Human
agcugcugacagu

SEQ ID NO: 1663035 - RNA, 14 nt, Human
agcugcugacagug

SEQ ID NO: 1663036 - RNA, 17 nt, Human
agcuggucccacucagu

SEQ ID NO: 1663037 - RNA, 21 nt, Human
agcugcgguccacccaggagc

SEQ ID NO: 1663038 - RNA, 12 nt, Human
agcugcugacag

SEQ ID NO: 1663039 - RNA, 19 nt, Human
agcugcgguccacccagga

SEQ ID NO: 1663040 - RNA, 20 nt, Human
agcugcgguccacccaggag

SEQ ID NO: 1663041 - RNA, 13 nt, Human
agcugcgguccac

SEQ ID NO: 1663042 - RNA, 16 nt, Human
agcugcgguccaccca

SEQ ID NO: 1663043 - RNA, 17 nt, Human
agcugcgguccacccag

SEQ ID NO: 1663044 - RNA, 18 nt, Human
agcugcgguccacccagg

SEQ ID NO: 1663045 - RNA, 15 nt, Human
agcugaaccugggua

SEQ ID NO: 1663046 - RNA, 20 nt, Human
agcuccccucggagaagagc

SEQ ID NO: 1663047 - RNA, 17 nt, Human
agcuccccucggagaag

SEQ ID NO: 1663048 - RNA, 19 nt, Human
agcuccccucggagaagag

SEQ ID NO: 1663049 - RNA, 15 nt, Human
agcccucccugcccc

SEQ ID NO: 1663050 - RNA, 16 nt, Human
agcccucccugccccu

SEQ ID NO: 1663051 - RNA, 17 nt, Human
agcccucccugccccuc

SEQ ID NO: 1663052 - RNA, 19 nt, Human
agcccucccugccccuccc

SEQ ID NO: 1663053 - RNA, 22 nt, Human
agcccucccugccccucccuuc

SEQ ID NO: 1663054 - RNA, 23 nt, Human
agcccucccugccccucccuuca

SEQ ID NO: 1663055 - RNA, 17 nt, Human
agccuggcuucaaauug

SEQ ID NO: 1663056 - RNA, 18 nt, Human
agccuggcuucaaauugu

SEQ ID NO: 1663057 - RNA, 12 nt, Human
agccugggaggu

SEQ ID NO: 1663058 - RNA, 20 nt, Human
agccugggaggucaaggcug

SEQ ID NO: 1663059 - RNA, 15 nt, Human
agccuuuggaaacag

SEQ ID NO: 1663060 - RNA, 13 nt, Human
agcgagcccuggu

SEQ ID NO: 1663061 - RNA, 19 nt, Human
agcgagcccugguggcagu

SEQ ID NO: 1663062 - RNA, 12 nt, Human
agcucagagagg

SEQ ID NO: 1663063 - RNA, 18 nt, Human
agcucagagaggguggga

SEQ ID NO: 1663064 - RNA, 14 nt, Human
agcucagagagggu

SEQ ID NO: 1663065 - RNA, 12 nt, Human
agcucaccucuc

SEQ ID NO: 1663066 - RNA, 19 nt, Human
agcucaccagccccagugc

SEQ ID NO: 1663067 - RNA, 20 nt, Human
agcucaccagccccagugcc

SEQ ID NO: 1663068 - RNA, 15 nt, Human
agcucaccucucccu

SEQ ID NO: 1663069 - RNA, 18 nt, Human
agcucaccucucccuugg

SEQ ID NO: 1663070 - RNA, 19 nt, Human
agcucaccucucccuugga

SEQ ID NO: 1663071 - RNA, 21 nt, Human
agcuaaucagcauucucacuc

SEQ ID NO: 1663072 - RNA, 16 nt, Human
agcuaaucagcauucu

SEQ ID NO: 1663073 - RNA, 16 nt, Human
agcucaccagccccag

SEQ ID NO: 1663074 - RNA, 12 nt, Human
agcuacaaaugc

SEQ ID NO: 1663075 - RNA, 21 nt, Human
agaggacuuuucuuuguggcu

SEQ ID NO: 1663076 - RNA, 22 nt, Human
agaggacuuuucuuuguggcuu

SEQ ID NO: 1663077 - RNA, 23 nt, Human
agaggagggagcaucagugcccu

SEQ ID NO: 1663078 - RNA, 23 nt, Human
agaggacuuuucuuuguggcuuc

SEQ ID NO: 1663079 - RNA, 13 nt, Human
agagggccugcaa

SEQ ID NO: 1663080 - RNA, 16 nt, Human
agagggccugcaaggg

SEQ ID NO: 1663081 - RNA, 17 nt, Human
agaggggguggccuccc

SEQ ID NO: 1663082 - RNA, 19 nt, Human
agaggggguggccucccaa

SEQ ID NO: 1663083 - RNA, 13 nt, Human
agaggaaugaagu

SEQ ID NO: 1663084 - RNA, 13 nt, Human
agagcccaccuug

SEQ ID NO: 1663085 - RNA, 13 nt, Human
agagccagggucu

SEQ ID NO: 1663086 - RNA, 16 nt, Human
agacuggaagcacagc

SEQ ID NO: 1663087 - RNA, 16 nt, Human
agagagaccacuuuuc

SEQ ID NO: 1663088 - RNA, 16 nt, Human
agacgcugugcugccc

SEQ ID NO: 1663089 - RNA, 18 nt, Human
agacucugucucaaaaaa

SEQ ID NO: 1663090 - RNA, 23 nt, Human
agacugaguacguugugcauuug

SEQ ID NO: 1663091 - RNA, 22 nt, Human
agacugaguacguugugcauuu

SEQ ID NO: 1663092 - RNA, 20 nt, Human
agacugaguacguugugcau

SEQ ID NO: 1663093 - RNA, 18 nt, Human
agacucugucucagucca

SEQ ID NO: 1663094 - RNA, 18 nt, Human
agaagucacauuccugaa

SEQ ID NO: 1663095 - RNA, 20 nt, Human
agaagucacauuccugaaca

SEQ ID NO: 1663096 - RNA, 21 nt, Human
agaagucacauuccugaacag

SEQ ID NO: 1663097 - RNA, 18 nt, Human
agaagguuucagaaagaa

SEQ ID NO: 1663098 - RNA, 14 nt, Human
agaaguaacuuacu

SEQ ID NO: 1663099 - RNA, 13 nt, Human
agaagauagcagg

SEQ ID NO: 1663100 - RNA, 13 nt, Human
agaagacacugau

SEQ ID NO: 1663101 - RNA, 21 nt, Human
agaagacacugaugggcaacc

SEQ ID NO: 1663102 - RNA, 21 nt, Human
acuuuccucuuagucgagcca

SEQ ID NO: 1663103 - RNA, 21 nt, Human
acuuuccucuuuggucuacac

SEQ ID NO: 1663104 - RNA, 18 nt, Human
agaagacugcauuauauu

SEQ ID NO: 1663105 - RNA, 21 nt, Human
agaagagauugugguuucauu

SEQ ID NO: 1663106 - RNA, 22 nt, Human
agaagagcuguucacagccaga

SEQ ID NO: 1663107 - RNA, 21 nt, Human
agaagagcuguucacagccag

SEQ ID NO: 1663108 - RNA, 18 nt, Human
agaaugaaagggcccaga

SEQ ID NO: 1663109 - RNA, 16 nt, Human
agaaugaaauacuguu

SEQ ID NO: 1663110 - RNA, 19 nt, Human
agaaugaaauacuguuuga

SEQ ID NO: 1663111 - RNA, 20 nt, Human
agaaugaaauacuguuugag

SEQ ID NO: 1663112 - RNA, 22 nt, Human
agaagucacauuccugaacagg

SEQ ID NO: 1663113 - RNA, 21 nt, Human
agaagugaaaaucuacacucc

SEQ ID NO: 1663114 - RNA, 17 nt, Human
agaaugagagacacacu

SEQ ID NO: 1663115 - RNA, 22 nt, Human
agaaugagagacacacugaaga

SEQ ID NO: 1663116 - RNA, 19 nt, Human
agaaugcacaaacagaggc

SEQ ID NO: 1663117 - RNA, 22 nt, Human
agaaugcacaaacagaggccgc

SEQ ID NO: 1663118 - RNA, 17 nt, Human
agaaugauuaugaauua

SEQ ID NO: 1663119 - RNA, 20 nt, Human
agacaaugacuuacuguaca

SEQ ID NO: 1663120 - RNA, 23 nt, Human
agacaaugacuuacuguacauga

SEQ ID NO: 1663121 - RNA, 15 nt, Human
agacagagcuacaca

SEQ ID NO: 1663122 - RNA, 22 nt, Human
agacaaugacuuacuguacaug

SEQ ID NO: 1663123 - RNA, 21 nt, Human
agacaaugacuuacuguacau

SEQ ID NO: 1663124 - RNA, 11 nt, Human
agacagagucu

SEQ ID NO: 1663125 - RNA, 19 nt, Human
agacagagucucacuguug

SEQ ID NO: 1663126 - RNA, 20 nt, Human
agacagagucucacuguugc

SEQ ID NO: 1663127 - RNA, 22 nt, Human
agacagccaacuauggccugug

SEQ ID NO: 1663128 - RNA, 20 nt, Human
agacagaucuggaaugugaa

SEQ ID NO: 1663129 - RNA, 23 nt, Human
agacagagucucacuguugccca

SEQ ID NO: 1663130 - RNA, 21 nt, Human
agacagagucucacuguugcc

SEQ ID NO: 1663131 - RNA, 19 nt, Human
agacccaaaaggcagaagc

SEQ ID NO: 1663132 - RNA, 17 nt, Human
agacgaugucuucauac

SEQ ID NO: 1663133 - RNA, 19 nt, Human
agacgaugucuucauaccu

SEQ ID NO: 1663134 - RNA, 14 nt, Human
agccagcaggcucu

SEQ ID NO: 1663135 - RNA, 17 nt, Human
agccagaggagagagga

SEQ ID NO: 1663136 - RNA, 18 nt, Human
agccagaggagagaggac

SEQ ID NO: 1663137 - RNA, 20 nt, Human
agccaaggccaaaggaagca

SEQ ID NO: 1663138 - RNA, 13 nt, Human
agccagaggagag

SEQ ID NO: 1663139 - RNA, 15 nt, Human
agccagaggagagag

SEQ ID NO: 1663140 - RNA, 18 nt, Human
agcauccuggcacccggc

SEQ ID NO: 1663141 - RNA, 16 nt, Human
agccaaaccucuguga

SEQ ID NO: 1663142 - RNA, 14 nt, Human
agcauccuggcacc

SEQ ID NO: 1663143 - RNA, 17 nt, Human
agcauccuggcacccgg

SEQ ID NO: 1663144 - RNA, 16 nt, Human
agccaaagcuaggccu

SEQ ID NO: 1663145 - RNA, 18 nt, Human
agccaaagcuaggccugg

SEQ ID NO: 1663146 - RNA, 15 nt, Human
agcccaccccucaac

SEQ ID NO: 1663147 - RNA, 16 nt, Human
agcccaccuuggcuca

SEQ ID NO: 1663148 - RNA, 14 nt, Human
agcccaccuuggcu

SEQ ID NO: 1663149 - RNA, 16 nt, Human
agccagcaggcucuca

SEQ ID NO: 1663150 - RNA, 17 nt, Human
agccagcaggcucucag

SEQ ID NO: 1663151 - RNA, 23 nt, Human
agcccacgcccccacuggugaca

SEQ ID NO: 1663152 - RNA, 14 nt, Human
agcccacgccccca

SEQ ID NO: 1663153 - RNA, 15 nt, Human
agcccacgcccccac

SEQ ID NO: 1663154 - RNA, 13 nt, Human
agcauccuggcac

SEQ ID NO: 1663155 - RNA, 17 nt, Human
agccccauucugccugc

SEQ ID NO: 1663156 - RNA, 18 nt, Human
agccccauucugccugcc

SEQ ID NO: 1663157 - RNA, 19 nt, Human
agccccauucugccugccc

SEQ ID NO: 1663158 - RNA, 15 nt, Human
agccccauccucugu

SEQ ID NO: 1663159 - RNA, 17 nt, Human
agccccauccucuguac

SEQ ID NO: 1663160 - RNA, 23 nt, Human
agccccauccucuguacagagcc

SEQ ID NO: 1663161 - RNA, 12 nt, Human
agcccucccugc

SEQ ID NO: 1663162 - RNA, 13 nt, Human
agcccucccugcc

SEQ ID NO: 1663163 - RNA, 23 nt, Human
agcccuccaucuaaacugccccc

SEQ ID NO: 1663164 - RNA, 21 nt, Human
agcccuccaucuaaacugccc

SEQ ID NO: 1663165 - RNA, 20 nt, Human
agccccauucugccugccca

SEQ ID NO: 1663166 - RNA, 17 nt, Human
agcccgggcucugccuc

SEQ ID NO: 1663167 - RNA, 18 nt, Human
agcccgggcucugccucc

SEQ ID NO: 1663168 - RNA, 20 nt, Human
agcccgggcucugccuccca

SEQ ID NO: 1663169 - RNA, 21 nt, Human
agcccgggcucugccucccau

SEQ ID NO: 1663170 - RNA, 14 nt, Human
agcacagacccugc

SEQ ID NO: 1663171 - RNA, 15 nt, Human
agcacagacccugcc

SEQ ID NO: 1663172 - RNA, 14 nt, Human
agcacacacuuuug

SEQ ID NO: 1663173 - RNA, 20 nt, Human
agcacacacuuuugguuaag

SEQ ID NO: 1663174 - RNA, 12 nt, Human
agcacagacccu

SEQ ID NO: 1663175 - RNA, 21 nt, Human
agcacgauuucuguuuagaua

SEQ ID NO: 1663176 - RNA, 19 nt, Human
agcacgauuucuguuuaga

SEQ ID NO: 1663177 - RNA, 17 nt, Human
agcacgauuucuguuua

SEQ ID NO: 1663178 - RNA, 16 nt, Human
agcacagacccugccc

SEQ ID NO: 1663179 - RNA, 18 nt, Human
agcacgguggugaggcag

SEQ ID NO: 1663180 - RNA, 19 nt, Human
agauucuuuccugaggcug

SEQ ID NO: 1663181 - RNA, 21 nt, Human
agauucuuuccugaggcuggg

SEQ ID NO: 1663182 - RNA, 23 nt, Human
agauugcaacaggcugggcuuca

SEQ ID NO: 1663183 - RNA, 20 nt, Human
agauugcaacaggcugggcu

SEQ ID NO: 1663184 - RNA, 21 nt, Human
agauugcaacaggcugggcuu

SEQ ID NO: 1663185 - RNA, 18 nt, Human
agcaaaagaugcuucuca

SEQ ID NO: 1663186 - RNA, 24 nt, Human
agcaaaauuuuuucucuaggaaau

SEQ ID NO: 1663187 - RNA, 17 nt, Human
agcaaaugucuuccugg

SEQ ID NO: 1663188 - RNA, 20 nt, Human
agcaaaugucuuccuggauu

SEQ ID NO: 1663189 - RNA, 16 nt, Human
agcaaauguggcuccu

SEQ ID NO: 1663190 - RNA, 20 nt, Human
agcaaaggagauuggaagga

SEQ ID NO: 1663191 - RNA, 19 nt, Human
agaucugccuaaggacuuc

SEQ ID NO: 1663192 - RNA, 16 nt, Human
agaucuggaaugugaa

SEQ ID NO: 1663193 - RNA, 23 nt, Human
agaggggguggccucccaacuca

SEQ ID NO: 1663194 - RNA, 21 nt, Human
agauguagccccucuccugga

SEQ ID NO: 1663195 - RNA, 16 nt, Human
agauguagaggagaaa

SEQ ID NO: 1663196 - RNA, 19 nt, Human
agauguagaggagaaacug

SEQ ID NO: 1663197 - RNA, 14 nt, Human
agaugagugagcau

SEQ ID NO: 1663198 - RNA, 19 nt, Human
agaugaugaugaucuuuaa

SEQ ID NO: 1663199 - RNA, 18 nt, Human
aguucagguaacaggcag

SEQ ID NO: 1663200 - RNA, 13 nt, Human
aguucaucuugaa

SEQ ID NO: 1663201 - RNA, 15 nt, Human
aguucaucuugaauu

SEQ ID NO: 1663202 - RNA, 19 nt, Human
aguucaucuugaauuguaa

SEQ ID NO: 1663203 - RNA, 20 nt, Human
aguucagagcugcccucucc

SEQ ID NO: 1663204 - RNA, 22 nt, Human
aguucagagcugcccucuccug

SEQ ID NO: 1663205 - RNA, 21 nt, Human
aguucagagcugcccucuccu

SEQ ID NO: 1663206 - RNA, 23 nt, Human
aguucagagcugcccucuccugg

SEQ ID NO: 1663207 - RNA, 14 nt, Human
aguugauagcacag

SEQ ID NO: 1663208 - RNA, 16 nt, Human
aguugauacuacaguu

SEQ ID NO: 1663209 - RNA, 21 nt, Human
aguugaaaagacuccaaagaa

SEQ ID NO: 1663210 - RNA, 22 nt, Human
aguucaucuugaauuguaagga

SEQ ID NO: 1663211 - RNA, 18 nt, Human
aguugaaaagacuccaaa

SEQ ID NO: 1663212 - RNA, 19 nt, Human
aguugaaaagacuccaaag

SEQ ID NO: 1663213 - RNA, 20 nt, Human
aguugaaaagacuccaaaga

SEQ ID NO: 1663214 - RNA, 18 nt, Human
agugcuaauuuugaaaaa

SEQ ID NO: 1663215 - RNA, 20 nt, Human
agugcuaauuuugaaaaacu

SEQ ID NO: 1663216 - RNA, 15 nt, Human
agugcuaauuuugaa

SEQ ID NO: 1663217 - RNA, 16 nt, Human
agugccuuauggaaca

SEQ ID NO: 1663218 - RNA, 18 nt, Human
agugccuuauggaacacu

SEQ ID NO: 1663219 - RNA, 10 nt, Human
agugccuuau

SEQ ID NO: 1663220 - RNA, 13 nt, Human
agugccuuaugga

SEQ ID NO: 1663221 - RNA, 14 nt, Human
agugccuuauggaa

SEQ ID NO: 1663222 - RNA, 15 nt, Human
agugccuuauggaac

SEQ ID NO: 1663223 - RNA, 20 nt, Human
agugauggguuaguggaugg

SEQ ID NO: 1663224 - RNA, 21 nt, Human
agugauucucaugccucagcc

SEQ ID NO: 1663225 - RNA, 14 nt, Human
agugauucuccugc

SEQ ID NO: 1663226 - RNA, 15 nt, Human
agugauucuccugcc

SEQ ID NO: 1663227 - RNA, 17 nt, Human
agugauucuccugccuc

SEQ ID NO: 1663228 - RNA, 18 nt, Human
agugccuuacacaauggu

SEQ ID NO: 1663229 - RNA, 14 nt, Human
agugauccucccac

SEQ ID NO: 1663230 - RNA, 15 nt, Human
agugauccucccacc

SEQ ID NO: 1663231 - RNA, 18 nt, Human
agugauccucccaccuca

SEQ ID NO: 1663232 - RNA, 19 nt, Human
agugauccucccaccucag

SEQ ID NO: 1663233 - RNA, 24 nt, Human
agugauccucccaccucagccucc

SEQ ID NO: 1663234 - RNA, 19 nt, Human
agugggacagggcauggcc

SEQ ID NO: 1663235 - RNA, 21 nt, Human
agugggacagggcauggccag

SEQ ID NO: 1663236 - RNA, 22 nt, Human
agugggcccaaugcacuuuguu

SEQ ID NO: 1663237 - RNA, 19 nt, Human
agugucaaugcagccccca

SEQ ID NO: 1663238 - RNA, 20 nt, Human
aguaagccgugauuuucauu

SEQ ID NO: 1663239 - RNA, 14 nt, Human
aguacuauaauuua

SEQ ID NO: 1663240 - RNA, 19 nt, Human
aguacuacaguccucccau

SEQ ID NO: 1663241 - RNA, 22 nt, Human
aguacuacaguccucccaucuc

SEQ ID NO: 1663242 - RNA, 18 nt, Human
aguacguugugcauuugg

SEQ ID NO: 1663243 - RNA, 17 nt, Human
aguacguugugcauuug

SEQ ID NO: 1663244 - RNA, 16 nt, Human
aguacguugugcauuu

SEQ ID NO: 1663245 - RNA, 17 nt, Human
aguacuucuccacccug

SEQ ID NO: 1663246 - RNA, 19 nt, Human
aguacuucuccacccugcu

SEQ ID NO: 1663247 - RNA, 12 nt, Human
aguacuucuuuu

SEQ ID NO: 1663248 - RNA, 12 nt, Human
aguacuauguau

SEQ ID NO: 1663249 - RNA, 14 nt, Human
aguacuauguauca

SEQ ID NO: 1663250 - RNA, 13 nt, Human
aguacucauacau

SEQ ID NO: 1663251 - RNA, 14 nt, Human
aguacguugugcau

SEQ ID NO: 1663252 - RNA, 15 nt, Human
aguacguugugcauu

SEQ ID NO: 1663253 - RNA, 16 nt, Human
aggucuguucuuucca

SEQ ID NO: 1663254 - RNA, 15 nt, Human
aggucuguucuuucc

SEQ ID NO: 1663255 - RNA, 13 nt, Human
aggucuguucuuu

SEQ ID NO: 1663256 - RNA, 18 nt, Human
aguaaaugggggugcauu

SEQ ID NO: 1663257 - RNA, 23 nt, Human
agucacacaguauuacuucugcu

SEQ ID NO: 1663258 - RNA, 22 nt, Human
agucacacaguauuacuucugc

SEQ ID NO: 1663259 - RNA, 21 nt, Human
aguaugaggcauuuguuugaa

SEQ ID NO: 1663260 - RNA, 20 nt, Human
aguaugaggcauuuguuuga

SEQ ID NO: 1663261 - RNA, 15 nt, Human
aguaucucagggccu

SEQ ID NO: 1663262 - RNA, 14 nt, Human
aguauuuuguuuca

SEQ ID NO: 1663263 - RNA, 23 nt, Human
aguaugaggcauuuguuugaacu

SEQ ID NO: 1663264 - RNA, 17 nt, Human
aguauuuuguuucagug

SEQ ID NO: 1663265 - RNA, 19 nt, Human
agucaugcguuuaaucaca

SEQ ID NO: 1663266 - RNA, 22 nt, Human
aguccucuuuucugagaggacu

SEQ ID NO: 1663267 - RNA, 20 nt, Human
aguccuuaccagcagagcac

SEQ ID NO: 1663268 - RNA, 19 nt, Human
aguccucuuuucugagagg

SEQ ID NO: 1663269 - RNA, 11 nt, Human
aguccaagcau

SEQ ID NO: 1663270 - RNA, 18 nt, Human
agugaccucagcuuugau

SEQ ID NO: 1663271 - RNA, 17 nt, Human
agugaccucagcuuuga

SEQ ID NO: 1663272 - RNA, 13 nt, Human
agucuguuuuaug

SEQ ID NO: 1663273 - RNA, 12 nt, Human
agucuguuuuau

SEQ ID NO: 1663274 - RNA, 12 nt, Human
auaacauguaau

SEQ ID NO: 1663275 - RNA, 13 nt, Human
auaacauguaauu

SEQ ID NO: 1663276 - RNA, 18 nt, Human
auaacauguaauuaagua

SEQ ID NO: 1663277 - RNA, 20 nt, Human
auaacauguaauuaaguacu

SEQ ID NO: 1663278 - RNA, 14 nt, Human
auaacaaugaaagu

SEQ ID NO: 1663279 - RNA, 15 nt, Human
auaacaaugcuguau

SEQ ID NO: 1663280 - RNA, 17 nt, Human
auaacaaugcuguauuu

SEQ ID NO: 1663281 - RNA, 19 nt, Human
auaacaaugcuguauuuua

SEQ ID NO: 1663282 - RNA, 20 nt, Human
auaacaaugcuguauuuuaa

SEQ ID NO: 1663283 - RNA, 21 nt, Human
auaacaaugcuguauuuuaaa

SEQ ID NO: 1663284 - RNA, 22 nt, Human
aguuguuacauuuuuaagugcu

SEQ ID NO: 1663285 - RNA, 20 nt, Human
aguuguuacauuuuuaagug

SEQ ID NO: 1663286 - RNA, 19 nt, Human
aguuguuacauuuuuaagu

SEQ ID NO: 1663287 - RNA, 22 nt, Human
aguuugauuaaauucuugcaaa

SEQ ID NO: 1663288 - RNA, 20 nt, Human
aguuugauuaaauucuugca

SEQ ID NO: 1663289 - RNA, 18 nt, Human
aguuugauuaaauucuug

SEQ ID NO: 1663290 - RNA, 17 nt, Human
aguuugauuaaauucuu

SEQ ID NO: 1663291 - RNA, 20 nt, Human
aguuugagaucagccugggc

SEQ ID NO: 1663292 - RNA, 18 nt, Human
aguuugagaucagccugg

SEQ ID NO: 1663293 - RNA, 19 nt, Human
aguuugagaucagccuggg

SEQ ID NO: 1663294 - RNA, 23 nt, Human
aguuugauuaaauucuugcaaag

SEQ ID NO: 1663295 - RNA, 13 nt, Human
auaauggucagag

SEQ ID NO: 1663296 - RNA, 18 nt, Human
auaaggguaucuggugac

SEQ ID NO: 1663297 - RNA, 15 nt, Human
auaauguaaauaaag

SEQ ID NO: 1663298 - RNA, 14 nt, Human
auaauguaagcucu

SEQ ID NO: 1663299 - RNA, 13 nt, Human
auaauguuucaaa

SEQ ID NO: 1663300 - RNA, 21 nt, Human
auaagccagacaucaacagau

SEQ ID NO: 1663301 - RNA, 22 nt, Human
auaagccagacaucaacagaua

SEQ ID NO: 1663302 - RNA, 21 nt, Human
auacccccugcaaagcccagc

SEQ ID NO: 1663303 - RNA, 14 nt, Human
auaccugucccccu

SEQ ID NO: 1663304 - RNA, 15 nt, Human
auaccugucccccug

SEQ ID NO: 1663305 - RNA, 16 nt, Human
auaccugucccccuga

SEQ ID NO: 1663306 - RNA, 20 nt, Human
auacccccugcaaagcccag

SEQ ID NO: 1663307 - RNA, 17 nt, Human
auaccugucccccugac

SEQ ID NO: 1663308 - RNA, 17 nt, Human
auacaaugcugugcccu

SEQ ID NO: 1663309 - RNA, 14 nt, Human
auacaaugcugugc

SEQ ID NO: 1663310 - RNA, 13 nt, Human
auacacuuacacu

SEQ ID NO: 1663311 - RNA, 22 nt, Human
auacacuuacacuuuaugcaca

SEQ ID NO: 1663312 - RNA, 18 nt, Human
auaauguuucaaacauau

SEQ ID NO: 1663313 - RNA, 13 nt, Human
auacccaccccca

SEQ ID NO: 1663314 - RNA, 14 nt, Human
auacccacccccac

SEQ ID NO: 1663315 - RNA, 16 nt, Human
auacccacccccaccc

SEQ ID NO: 1663316 - RNA, 17 nt, Human
auacccccugcaaagcc

SEQ ID NO: 1663317 - RNA, 19 nt, Human
auacccccugcaaagccca

SEQ ID NO: 1663318 - RNA, 17 nt, Human
auacccacccccaccca

SEQ ID NO: 1663319 - RNA, 13 nt, Human
auacagaaaaguu

SEQ ID NO: 1663320 - RNA, 13 nt, Human
auaguaaaaauaa

SEQ ID NO: 1663321 - RNA, 14 nt, Human
auaguaaaaauaaa

SEQ ID NO: 1663322 - RNA, 24 nt, Human
auagguuuggacaaaauggaauac

SEQ ID NO: 1663323 - RNA, 15 nt, Human
auagccuaggugaca

SEQ ID NO: 1663324 - RNA, 17 nt, Human
auagccuaggugacaga

SEQ ID NO: 1663325 - RNA, 17 nt, Human
auagcacagacccugcc

SEQ ID NO: 1663326 - RNA, 18 nt, Human
auagcacagacccugccc

SEQ ID NO: 1663327 - RNA, 18 nt, Human
auagcagcuuauucacaa

SEQ ID NO: 1663328 - RNA, 15 nt, Human
auagcagcuuauuca

SEQ ID NO: 1663329 - RNA, 20 nt, Human
auauauuuuuauauuuacua

SEQ ID NO: 1663330 - RNA, 18 nt, Human
auauauuuuuauauuuac

SEQ ID NO: 1663331 - RNA, 19 nt, Human
auauauuuuuauauuuacu

SEQ ID NO: 1663332 - RNA, 18 nt, Human
auauauuuuuuucugaaa

SEQ ID NO: 1663333 - RNA, 19 nt, Human
auauucaggaagcucaggg

SEQ ID NO: 1663334 - RNA, 15 nt, Human
auauuauuuuauguu

SEQ ID NO: 1663335 - RNA, 22 nt, Human
auauuauuuuauguugcauaga

SEQ ID NO: 1663336 - RNA, 14 nt, Human
auauuauguuaaaa

SEQ ID NO: 1663337 - RNA, 16 nt, Human
auauuauguuaaaacu

SEQ ID NO: 1663338 - RNA, 16 nt, Human
auaugcucugcauguu

SEQ ID NO: 1663339 - RNA, 17 nt, Human
auaugcucugcauguua

SEQ ID NO: 1663340 - RNA, 13 nt, Human
auaucaucaguau

SEQ ID NO: 1663341 - RNA, 17 nt, Human
auaucaucaguauugaa

SEQ ID NO: 1663342 - RNA, 20 nt, Human
auaugcucugcauguuacau

SEQ ID NO: 1663343 - RNA, 13 nt, Human
auauuauguuaaa

SEQ ID NO: 1663344 - RNA, 17 nt, Human
auccucauacccacccc

SEQ ID NO: 1663345 - RNA, 13 nt, Human
auccacucgccuu

SEQ ID NO: 1663346 - RNA, 19 nt, Human
auccagacccggcugcgug

SEQ ID NO: 1663347 - RNA, 14 nt, Human
aucccauuauucaa

SEQ ID NO: 1663348 - RNA, 15 nt, Human
aucccauuauucaaa

SEQ ID NO: 1663349 - RNA, 20 nt, Human
aucccauuauucaaaguugc

SEQ ID NO: 1663350 - RNA, 18 nt, Human
auccccaagccuggcaag

SEQ ID NO: 1663351 - RNA, 19 nt, Human
aucccaugagccucagcau

SEQ ID NO: 1663352 - RNA, 15 nt, Human
aucccggcugcccuu

SEQ ID NO: 1663353 - RNA, 19 nt, Human
auccucaguuuuugugaaa

SEQ ID NO: 1663354 - RNA, 14 nt, Human
aucaaauauauuca

SEQ ID NO: 1663355 - RNA, 20 nt, Human
aucaaagagguuuuaaaaaa

SEQ ID NO: 1663356 - RNA, 23 nt, Human
aucaaagagguuuuaaaaaaauc

SEQ ID NO: 1663357 - RNA, 23 nt, Human
aucacccgcuaagagggagggag

SEQ ID NO: 1663358 - RNA, 13 nt, Human
aucaccagacagg

SEQ ID NO: 1663359 - RNA, 15 nt, Human
aucacaguuuugguu

SEQ ID NO: 1663360 - RNA, 22 nt, Human
aucacaguuuugguugcuuuaa

SEQ ID NO: 1663361 - RNA, 21 nt, Human
aucacaguuuugguugcuuua

SEQ ID NO: 1663362 - RNA, 13 nt, Human
aucacagccucug

SEQ ID NO: 1663363 - RNA, 22 nt, Human
aucaaauauauucagccuggcu

SEQ ID NO: 1663364 - RNA, 14 nt, Human
aucaaauaugcaaa

SEQ ID NO: 1663365 - RNA, 13 nt, Human
aucagcuuauugu

SEQ ID NO: 1663366 - RNA, 22 nt, Human
aucagcuugcccuguuaaaaga

SEQ ID NO: 1663367 - RNA, 14 nt, Human
aucaugugaaauca

SEQ ID NO: 1663368 - RNA, 12 nt, Human
aucaugugaaau

SEQ ID NO: 1663369 - RNA, 14 nt, Human
aucaugucuggcua

SEQ ID NO: 1663370 - RNA, 17 nt, Human
aucaugaauuaguuuua

SEQ ID NO: 1663371 - RNA, 15 nt, Human
augaaaacacauuuu

SEQ ID NO: 1663372 - RNA, 14 nt, Human
augaaaacacauuu

SEQ ID NO: 1663373 - RNA, 16 nt, Human
augaaaacacauuuuu

SEQ ID NO: 1663374 - RNA, 22 nt, Human
augaggcauuuguuugaacuga

SEQ ID NO: 1663375 - RNA, 21 nt, Human
augaggcauuuguuugaacug

SEQ ID NO: 1663376 - RNA, 14 nt, Human
augaggcauuuguu

SEQ ID NO: 1663377 - RNA, 13 nt, Human
augaggcauuugu

SEQ ID NO: 1663378 - RNA, 18 nt, Human
augaccacacuccagcug

SEQ ID NO: 1663379 - RNA, 15 nt, Human
augaccacacuccag

SEQ ID NO: 1663380 - RNA, 20 nt, Human
augaaguccaagcauuuaga

SEQ ID NO: 1663381 - RNA, 23 nt, Human
augaaguccaagcauuuagaugu

SEQ ID NO: 1663382 - RNA, 14 nt, Human
augaagucucugaa

SEQ ID NO: 1663383 - RNA, 21 nt, Human
augaaguacucauacauguua

SEQ ID NO: 1663384 - RNA, 16 nt, Human
aucucugcuuuggaaa

SEQ ID NO: 1663385 - RNA, 18 nt, Human
aucucugcaaucuucuca

SEQ ID NO: 1663386 - RNA, 21 nt, Human
aucucugcaaucuucucagaa

SEQ ID NO: 1663387 - RNA, 18 nt, Human
aucugggggccucuucug

SEQ ID NO: 1663388 - RNA, 17 nt, Human
aucuggguucacugcaa

SEQ ID NO: 1663389 - RNA, 20 nt, Human
aucuccgucaacucauauuu

SEQ ID NO: 1663390 - RNA, 15 nt, Human
auggcugugccucug

SEQ ID NO: 1663391 - RNA, 16 nt, Human
auggcugugccucugc

SEQ ID NO: 1663392 - RNA, 17 nt, Human
auggcugugccucugcc

SEQ ID NO: 1663393 - RNA, 18 nt, Human
auggcugugccucugccu

SEQ ID NO: 1663394 - RNA, 18 nt, Human
auggcuggagcuagaauu

SEQ ID NO: 1663395 - RNA, 18 nt, Human
auggauaggcacaggaaa

SEQ ID NO: 1663396 - RNA, 17 nt, Human
auggauaggcacaggaa

SEQ ID NO: 1663397 - RNA, 21 nt, Human
augcuuuaggauguacaguua

SEQ ID NO: 1663398 - RNA, 18 nt, Human
augcuuuaggauguacag

SEQ ID NO: 1663399 - RNA, 13 nt, Human
augcuuuaaacau

SEQ ID NO: 1663400 - RNA, 15 nt, Human
augcuuguacauaau

SEQ ID NO: 1663401 - RNA, 16 nt, Human
augcuuguacauaaug

SEQ ID NO: 1663402 - RNA, 19 nt, Human
auggcuuuguauagaaccu

SEQ ID NO: 1663403 - RNA, 18 nt, Human
auggcuuuugugcauuau

SEQ ID NO: 1663404 - RNA, 17 nt, Human
auggcuuuugugcauua

SEQ ID NO: 1663405 - RNA, 16 nt, Human
auggcuuuugugcauu

SEQ ID NO: 1663406 - RNA, 20 nt, Human
augcugacuguacuccuccc

SEQ ID NO: 1663407 - RNA, 21 nt, Human
augcugacuguacuccuccca

SEQ ID NO: 1663408 - RNA, 19 nt, Human
augcugacuguacuccucc

SEQ ID NO: 1663409 - RNA, 20 nt, Human
augcugaguuugugcuggug

SEQ ID NO: 1663410 - RNA, 12 nt, Human
augcugccucca

SEQ ID NO: 1663411 - RNA, 15 nt, Human
augcugccuccagaa

SEQ ID NO: 1663412 - RNA, 16 nt, Human
augcugcccugugagu

SEQ ID NO: 1663413 - RNA, 13 nt, Human
augcugcccugug

SEQ ID NO: 1663414 - RNA, 14 nt, Human
augcugcccuguga

SEQ ID NO: 1663415 - RNA, 15 nt, Human
augcugcccugugag

SEQ ID NO: 1663416 - RNA, 19 nt, Human
augccuggauggggcugca

SEQ ID NO: 1663417 - RNA, 20 nt, Human
augccuggauggggcugcac

SEQ ID NO: 1663418 - RNA, 23 nt, Human
augcacagaguuguuacauuuuu

SEQ ID NO: 1663419 - RNA, 22 nt, Human
augcacagaguuguuacauuuu

SEQ ID NO: 1663420 - RNA, 21 nt, Human
augcacagaguuguuacauuu

SEQ ID NO: 1663421 - RNA, 19 nt, Human
augcacagaguuguuacau

SEQ ID NO: 1663422 - RNA, 15 nt, Human
augcacacauuuuuu

SEQ ID NO: 1663423 - RNA, 14 nt, Human
augcacacauuuuu

SEQ ID NO: 1663424 - RNA, 13 nt, Human
augcacacauuuu

SEQ ID NO: 1663425 - RNA, 23 nt, Human
augcacaaauucugucucuggau

SEQ ID NO: 1663426 - RNA, 15 nt, Human
augcacaaauucugu

SEQ ID NO: 1663427 - RNA, 22 nt, Human
augcacaaauucugucucugga

SEQ ID NO: 1663428 - RNA, 18 nt, Human
augcacaaacagaggccg

SEQ ID NO: 1663429 - RNA, 23 nt, Human
augaugaaaugaggucagagccu

SEQ ID NO: 1663430 - RNA, 18 nt, Human
augaugaaaugaggucag

SEQ ID NO: 1663431 - RNA, 15 nt, Human
augaugauccuaggc

SEQ ID NO: 1663432 - RNA, 18 nt, Human
augaugaucuuuaaaaua

SEQ ID NO: 1663433 - RNA, 21 nt, Human
augaugaucuuuaaaauacac

SEQ ID NO: 1663434 - RNA, 18 nt, Human
augaucuuugcagacagg

SEQ ID NO: 1663435 - RNA, 19 nt, Human
augaucuuugcagacaggc

SEQ ID NO: 1663436 - RNA, 21 nt, Human
augaucuuugcagacaggcaa

SEQ ID NO: 1663437 - RNA, 17 nt, Human
augaucuuugcagacag

SEQ ID NO: 1663438 - RNA, 16 nt, Human
augaucuuuaaaauac

SEQ ID NO: 1663439 - RNA, 21 nt, Human
augggugcuuggaggaaggaa

SEQ ID NO: 1663440 - RNA, 23 nt, Human
augggugcuuggaggaaggaaac

SEQ ID NO: 1663441 - RNA, 14 nt, Human
augugaaacauguu

SEQ ID NO: 1663442 - RNA, 14 nt, Human
augucacaggcagg

SEQ ID NO: 1663443 - RNA, 19 nt, Human
augucacaggcagguccag

SEQ ID NO: 1663444 - RNA, 17 nt, Human
augugaaaucauucauu

SEQ ID NO: 1663445 - RNA, 18 nt, Human
augugaaaucauucauuu

SEQ ID NO: 1663446 - RNA, 15 nt, Human
augugaacacaucag

SEQ ID NO: 1663447 - RNA, 15 nt, Human
augguccgugcuaag

SEQ ID NO: 1663448 - RNA, 18 nt, Human
augguccgugcuaaggac

SEQ ID NO: 1663449 - RNA, 19 nt, Human
augguccgugcuaaggacu

SEQ ID NO: 1663450 - RNA, 13 nt, Human
augucacaggcag

SEQ ID NO: 1663451 - RNA, 21 nt, Human
augucaaucagccuaguugau

SEQ ID NO: 1663452 - RNA, 14 nt, Human
auguucuuaauucu

SEQ ID NO: 1663453 - RNA, 15 nt, Human
auguuugccucugcc

SEQ ID NO: 1663454 - RNA, 17 nt, Human
auguuugccucugccuc

SEQ ID NO: 1663455 - RNA, 14 nt, Human
auguuugccucugc

SEQ ID NO: 1663456 - RNA, 15 nt, Human
auguucugggacaca

SEQ ID NO: 1663457 - RNA, 17 nt, Human
auguucucugaggacac

SEQ ID NO: 1663458 - RNA, 14 nt, Human
auguucugggacac

SEQ ID NO: 1663459 - RNA, 17 nt, Human
auguucucucuucucca

SEQ ID NO: 1663460 - RNA, 13 nt, Human
auguucucugagg

SEQ ID NO: 1663461 - RNA, 17 nt, Human
auguuccuagugaaaga

SEQ ID NO: 1663462 - RNA, 13 nt, Human
auguguaaguauu

SEQ ID NO: 1663463 - RNA, 15 nt, Human
auguuccuagugaaa

SEQ ID NO: 1663464 - RNA, 16 nt, Human
auguuccuagugaaag

SEQ ID NO: 1663465 - RNA, 19 nt, Human
auguguaagacaaaaagcu

SEQ ID NO: 1663466 - RNA, 17 nt, Human
auguguaagacaaaaag

SEQ ID NO: 1663467 - RNA, 16 nt, Human
cacaggcccuuccucu

SEQ ID NO: 1663468 - RNA, 17 nt, Human
cacaggcccuuccucuc

SEQ ID NO: 1663469 - RNA, 18 nt, Human
cacaggcccuuccucucc

SEQ ID NO: 1663470 - RNA, 19 nt, Human
cacaggcccuuccucucca

SEQ ID NO: 1663471 - RNA, 13 nt, Human
cacaggaaaccag

SEQ ID NO: 1663472 - RNA, 22 nt, Human
cacagcugcucaauaaaguaca

SEQ ID NO: 1663473 - RNA, 12 nt, Human
cacagcugcuca

SEQ ID NO: 1663474 - RNA, 21 nt, Human
cacaggcccuuccucuccacu

SEQ ID NO: 1663475 - RNA, 22 nt, Human
cacaggcccuuccucuccacug

SEQ ID NO: 1663476 - RNA, 18 nt, Human
cacagugcaucucagccc

SEQ ID NO: 1663477 - RNA, 19 nt, Human
cacagugcaucucagccca

SEQ ID NO: 1663478 - RNA, 17 nt, Human
cacaguucaauucucau

SEQ ID NO: 1663479 - RNA, 17 nt, Human
cacacacgcgugcacac

SEQ ID NO: 1663480 - RNA, 20 nt, Human
cacaagaaaugaaagcaggg

SEQ ID NO: 1663481 - RNA, 21 nt, Human
cacaagaaaugaaagcaggga

SEQ ID NO: 1663482 - RNA, 13 nt, Human
cacaaaggagagc

SEQ ID NO: 1663483 - RNA, 18 nt, Human
cacaagaaaugaaagcag

SEQ ID NO: 1663484 - RNA, 22 nt, Human
caaugugaaaagaaaaaugagc

SEQ ID NO: 1663485 - RNA, 22 nt, Human
caaugugacuuaaugccacuaa

SEQ ID NO: 1663486 - RNA, 21 nt, Human
caauaucuuuuuuuuaauaaa

SEQ ID NO: 1663487 - RNA, 18 nt, Human
caauuacaggaaguacug

SEQ ID NO: 1663488 - RNA, 13 nt, Human
cacaaacagaggc

SEQ ID NO: 1663489 - RNA, 18 nt, Human
cacaaagcccuuccaugu

SEQ ID NO: 1663490 - RNA, 15 nt, Human
cacaaacagaggccg

SEQ ID NO: 1663491 - RNA, 14 nt, Human
cacaaacagaggcc

SEQ ID NO: 1663492 - RNA, 22 nt, Human
caauuuuucuuauuucauuucu

SEQ ID NO: 1663493 - RNA, 17 nt, Human
cacagccagacuggcac

SEQ ID NO: 1663494 - RNA, 18 nt, Human
cacagccagacuggcaca

SEQ ID NO: 1663495 - RNA, 21 nt, Human
cacagcaguugaaaagacucc

SEQ ID NO: 1663496 - RNA, 16 nt, Human
cacagauuugagcuca

SEQ ID NO: 1663497 - RNA, 17 nt, Human
cacagauuugagcucag

SEQ ID NO: 1663498 - RNA, 18 nt, Human
cacagauuugagcucagc

SEQ ID NO: 1663499 - RNA, 22 nt, Human
cacagauuugagcucagcccug

SEQ ID NO: 1663500 - RNA, 19 nt, Human
cacagcaguugaaaagacu

SEQ ID NO: 1663501 - RNA, 22 nt, Human
cacagaguuguuacauuuuuaa

SEQ ID NO: 1663502 - RNA, 13 nt, Human
cacagaggcugcc

SEQ ID NO: 1663503 - RNA, 19 nt, Human
cacagagaaaguacuucuc

SEQ ID NO: 1663504 - RNA, 20 nt, Human
cacagagaaaguacuucucc

SEQ ID NO: 1663505 - RNA, 21 nt, Human
cacagagaaaguacuucucca

SEQ ID NO: 1663506 - RNA, 14 nt, Human
cacacuccagcugg

SEQ ID NO: 1663507 - RNA, 13 nt, Human
cacacugaagaag

SEQ ID NO: 1663508 - RNA, 14 nt, Human
cacacugaagaagc

SEQ ID NO: 1663509 - RNA, 18 nt, Human
caauaggaaaaacugauu

SEQ ID NO: 1663510 - RNA, 22 nt, Human
caagcugcacccucaggcaggu

SEQ ID NO: 1663511 - RNA, 21 nt, Human
caagcuggucccacucagucc

SEQ ID NO: 1663512 - RNA, 15 nt, Human
caagcgauucuucug

SEQ ID NO: 1663513 - RNA, 17 nt, Human
caagcgauucuucugcu

SEQ ID NO: 1663514 - RNA, 18 nt, Human
caagcgauucuucugcuu

SEQ ID NO: 1663515 - RNA, 21 nt, Human
caagcugcacccucaggcagg

SEQ ID NO: 1663516 - RNA, 16 nt, Human
caaggagauuuacaac

SEQ ID NO: 1663517 - RNA, 18 nt, Human
caaggauccugagccaga

SEQ ID NO: 1663518 - RNA, 19 nt, Human
caaggauccugagccagau

SEQ ID NO: 1663519 - RNA, 14 nt, Human
caaggagccaaaca

SEQ ID NO: 1663520 - RNA, 22 nt, Human
caaggauccugagccagauuuc

SEQ ID NO: 1663521 - RNA, 20 nt, Human
caaggauccugagccagauu

SEQ ID NO: 1663522 - RNA, 17 nt, Human
caaggcugcagugagcc

SEQ ID NO: 1663523 - RNA, 22 nt, Human
caaggcugcagugagccgagau

SEQ ID NO: 1663524 - RNA, 20 nt, Human
caaggaaaaaauaacaauga

SEQ ID NO: 1663525 - RNA, 22 nt, Human
caagcuggucccacucagucca

SEQ ID NO: 1663526 - RNA, 23 nt, Human
caagcuggucccacucaguccau

SEQ ID NO: 1663527 - RNA, 18 nt, Human
caaggaaaaaauaacaau

SEQ ID NO: 1663528 - RNA, 23 nt, Human
caagggugaugggaaagcauugu

SEQ ID NO: 1663529 - RNA, 18 nt, Human
caaggcugggggaagaag

SEQ ID NO: 1663530 - RNA, 21 nt, Human
caagggugaugggaaagcauu

SEQ ID NO: 1663531 - RNA, 15 nt, Human
caauaggaaaaacug

SEQ ID NO: 1663532 - RNA, 16 nt, Human
caauaggaaaaacuga

SEQ ID NO: 1663533 - RNA, 17 nt, Human
caauaggaaaaacugau

SEQ ID NO: 1663534 - RNA, 17 nt, Human
caauagucaaauugugu

SEQ ID NO: 1663535 - RNA, 19 nt, Human
caauagucaaauuguguga

SEQ ID NO: 1663536 - RNA, 18 nt, Human
caauaauaauaccucccu

SEQ ID NO: 1663537 - RNA, 13 nt, Human
caacaggcugggc

SEQ ID NO: 1663538 - RNA, 13 nt, Human
caaacagaggccg

SEQ ID NO: 1663539 - RNA, 15 nt, Human
caaacagaggccgcc

SEQ ID NO: 1663540 - RNA, 21 nt, Human
caaaaugagcccuguccugcc

SEQ ID NO: 1663541 - RNA, 11 nt, Human
caaaaugaaac

SEQ ID NO: 1663542 - RNA, 22 nt, Human
caaaaugaaacgcaaccaccac

SEQ ID NO: 1663543 - RNA, 17 nt, Human
caaacucuugaccucag

SEQ ID NO: 1663544 - RNA, 19 nt, Human
caaacucuugaccucaggu

SEQ ID NO: 1663545 - RNA, 20 nt, Human
caaacucuugaccucaggug

SEQ ID NO: 1663546 - RNA, 17 nt, Human
caaacugacucuuaaga

SEQ ID NO: 1663547 - RNA, 21 nt, Human
caaacugacucuuaagaagac

SEQ ID NO: 1663548 - RNA, 21 nt, Human
caaacucuugaccucagguga

SEQ ID NO: 1663549 - RNA, 16 nt, Human
caaacugacucuuaag

SEQ ID NO: 1663550 - RNA, 18 nt, Human
auuuuauuuuauuaugca

SEQ ID NO: 1663551 - RNA, 15 nt, Human
caaaacgguuuuacu

SEQ ID NO: 1663552 - RNA, 21 nt, Human
caaaacgguuuuacugcagcu

SEQ ID NO: 1663553 - RNA, 15 nt, Human
caaaacucuccucug

SEQ ID NO: 1663554 - RNA, 16 nt, Human
caaaacucuccucugc

SEQ ID NO: 1663555 - RNA, 14 nt, Human
caaaaguuucucuu

SEQ ID NO: 1663556 - RNA, 19 nt, Human
caaaacucuccucugcugc

SEQ ID NO: 1663557 - RNA, 14 nt, Human
caaaacugcacugu

SEQ ID NO: 1663558 - RNA, 17 nt, Human
caaaacugcacugucaa

SEQ ID NO: 1663559 - RNA, 18 nt, Human
caaaacugcacugucaag

SEQ ID NO: 1663560 - RNA, 21 nt, Human
caaaaucgaugcagugcuucc

SEQ ID NO: 1663561 - RNA, 20 nt, Human
caaaauaaaacuuuuuaaaa

SEQ ID NO: 1663562 - RNA, 16 nt, Human
caaaauaaaacuuuuu

SEQ ID NO: 1663563 - RNA, 23 nt, Human
caagggaauuucuucaacucccu

SEQ ID NO: 1663564 - RNA, 21 nt, Human
caagaccuucuccuucaccuu

SEQ ID NO: 1663565 - RNA, 23 nt, Human
caagaccuucuccuucaccuuug

SEQ ID NO: 1663566 - RNA, 13 nt, Human
caagacgcugugc

SEQ ID NO: 1663567 - RNA, 15 nt, Human
caagacgcugugcug

SEQ ID NO: 1663568 - RNA, 17 nt, Human
caagagcuuaacagugu

SEQ ID NO: 1663569 - RNA, 13 nt, Human
caagagcccaggc

SEQ ID NO: 1663570 - RNA, 12 nt, Human
caacuugggaac

SEQ ID NO: 1663571 - RNA, 16 nt, Human
caacuuguaaaugugg

SEQ ID NO: 1663572 - RNA, 14 nt, Human
caagaagcccagga

SEQ ID NO: 1663573 - RNA, 13 nt, Human
caagaagcccagg

SEQ ID NO: 1663574 - RNA, 17 nt, Human
caagaaaugaaagcagg

SEQ ID NO: 1663575 - RNA, 19 nt, Human
caagaaaugaaagcaggga

SEQ ID NO: 1663576 - RNA, 21 nt, Human
caaccugcucuccucuugcca

SEQ ID NO: 1663577 - RNA, 23 nt, Human
caaccugcucuccucuugccacu

SEQ ID NO: 1663578 - RNA, 18 nt, Human
caaccugcucuccucuug

SEQ ID NO: 1663579 - RNA, 20 nt, Human
caacauacucccaucuguga

SEQ ID NO: 1663580 - RNA, 17 nt, Human
caaccuucuguggcuca

SEQ ID NO: 1663581 - RNA, 19 nt, Human
caaccuucuguggcucaca

SEQ ID NO: 1663582 - RNA, 20 nt, Human
caaccuucuguggcucacag

SEQ ID NO: 1663583 - RNA, 16 nt, Human
caaccuggucacagga

SEQ ID NO: 1663584 - RNA, 16 nt, Human
caaccuucuguggcuc

SEQ ID NO: 1663585 - RNA, 23 nt, Human
caacagcuggugcccugcuuuca

SEQ ID NO: 1663586 - RNA, 12 nt, Human
caacaggcuggg

SEQ ID NO: 1663587 - RNA, 17 nt, Human
caacauacucccaucug

SEQ ID NO: 1663588 - RNA, 19 nt, Human
caacauacucccaucugug

SEQ ID NO: 1663589 - RNA, 22 nt, Human
caaauuucuaaaucuccaaaau

SEQ ID NO: 1663590 - RNA, 15 nt, Human
caaauuucuaaaucu

SEQ ID NO: 1663591 - RNA, 14 nt, Human
caaauaugcaaagc

SEQ ID NO: 1663592 - RNA, 13 nt, Human
caaauaugcaaag

SEQ ID NO: 1663593 - RNA, 23 nt, Human
caaauauauucagccuggcuuca

SEQ ID NO: 1663594 - RNA, 12 nt, Human
caaauaugcaaa

SEQ ID NO: 1663595 - RNA, 23 nt, Human
caaauggaaaugggcagagcaga

SEQ ID NO: 1663596 - RNA, 20 nt, Human
caaauguucaucaaugaaug

SEQ ID NO: 1663597 - RNA, 18 nt, Human
caaauguucaucaaugaa

SEQ ID NO: 1663598 - RNA, 14 nt, Human
caaauguucaucaa

SEQ ID NO: 1663599 - RNA, 18 nt, Human
caaagugcugggauuaca

SEQ ID NO: 1663600 - RNA, 23 nt, Human
caaagugcugggauuacaagcgu

SEQ ID NO: 1663601 - RNA, 20 nt, Human
caaaguucccuacuuccugu

SEQ ID NO: 1663602 - RNA, 21 nt, Human
caaaguucccuacuuccugug

SEQ ID NO: 1663603 - RNA, 19 nt, Human
caaagugcugggauuacaa

SEQ ID NO: 1663604 - RNA, 13 nt, Human
uuaacuuuuauaa

SEQ ID NO: 1663605 - RNA, 12 nt, Human
uuaacuuuuaua

SEQ ID NO: 1663606 - RNA, 17 nt, Human
uuaaaugcccagccccu

SEQ ID NO: 1663607 - RNA, 12 nt, Human
uuaagaguaaaa

SEQ ID NO: 1663608 - RNA, 14 nt, Human
uuaacuuuuauaaa

SEQ ID NO: 1663609 - RNA, 13 nt, Human
uuaauauuaaagc

SEQ ID NO: 1663610 - RNA, 14 nt, Human
uuaauauuaaagcc

SEQ ID NO: 1663611 - RNA, 16 nt, Human
uuaauauuaaagccau

SEQ ID NO: 1663612 - RNA, 17 nt, Human
uuaauauuaaagccaug

SEQ ID NO: 1663613 - RNA, 11 nt, Human
uuaauauuaaa

SEQ ID NO: 1663614 - RNA, 14 nt, Human
uuaauaauaaauuc

SEQ ID NO: 1663615 - RNA, 23 nt, Human
uuaauaauaaauucccuggccuu

SEQ ID NO: 1663616 - RNA, 12 nt, Human
uuacagaagccc

SEQ ID NO: 1663617 - RNA, 13 nt, Human
uuacacuuuaugc

SEQ ID NO: 1663618 - RNA, 20 nt, Human
uuacacuuuaugcacaaaau

SEQ ID NO: 1663619 - RNA, 17 nt, Human
uuacauuuuuaagugcu

SEQ ID NO: 1663620 - RNA, 12 nt, Human
uuacauuuuuaa

SEQ ID NO: 1663621 - RNA, 20 nt, Human
uuacauuuguauaaaauaau

SEQ ID NO: 1663622 - RNA, 19 nt, Human
uuacagaaucuaacuggug

SEQ ID NO: 1663623 - RNA, 18 nt, Human
uuaauauuaaagccaugu

SEQ ID NO: 1663624 - RNA, 19 nt, Human
uuaauauuaaagccauguu

SEQ ID NO: 1663625 - RNA, 20 nt, Human
uuaauauuaaagccauguuu

SEQ ID NO: 1663626 - RNA, 22 nt, Human
uuaauuaaaacacaacaucuuu

SEQ ID NO: 1663627 - RNA, 11 nt, Human
uuaaaugcacc

SEQ ID NO: 1663628 - RNA, 14 nt, Human
uuaaaugcccagcc

SEQ ID NO: 1663629 - RNA, 15 nt, Human
uuaaaugcccagccc

SEQ ID NO: 1663630 - RNA, 16 nt, Human
uuaaaugcccagcccc

SEQ ID NO: 1663631 - RNA, 12 nt, Human
uuaaagccaugu

SEQ ID NO: 1663632 - RNA, 14 nt, Human
uuaaagccauguuu

SEQ ID NO: 1663633 - RNA, 18 nt, Human
uuaaagccauguuuauua

SEQ ID NO: 1663634 - RNA, 20 nt, Human
uuaaagccauguuuauuaca

SEQ ID NO: 1663635 - RNA, 14 nt, Human
uuaaaacccaagug

SEQ ID NO: 1663636 - RNA, 18 nt, Human
uuaaaauacacacucaaa

SEQ ID NO: 1663637 - RNA, 23 nt, Human
uguuuuaaggaugcuuguacaua

SEQ ID NO: 1663638 - RNA, 22 nt, Human
uguuuuaaggaugcuuguacau

SEQ ID NO: 1663639 - RNA, 17 nt, Human
uguuuuaagaggcaggg

SEQ ID NO: 1663640 - RNA, 15 nt, Human
uuaaaaaaaaaauug

SEQ ID NO: 1663641 - RNA, 22 nt, Human
uuaaaaaaaaaccugagcccca

SEQ ID NO: 1663642 - RNA, 11 nt, Human
uguuucuguac

SEQ ID NO: 1663643 - RNA, 22 nt, Human
uguuucuguacuuuuuggcaua

SEQ ID NO: 1663644 - RNA, 23 nt, Human
uguuucuguacuuuuuggcauaa

SEQ ID NO: 1663645 - RNA, 16 nt, Human
uguuuguugucagcug

SEQ ID NO: 1663646 - RNA, 16 nt, Human
uguuuuaagaggcagg

SEQ ID NO: 1663647 - RNA, 15 nt, Human
uguuuccuggcacug

SEQ ID NO: 1663648 - RNA, 23 nt, Human
uguuuccuagcacacacuuuugg

SEQ ID NO: 1663649 - RNA, 13 nt, Human
uguucaugaaaga

SEQ ID NO: 1663650 - RNA, 14 nt, Human
uguucaugaaagau

SEQ ID NO: 1663651 - RNA, 19 nt, Human
uguucaucauccuaagcua

SEQ ID NO: 1663652 - RNA, 15 nt, Human
uguucucucuucucc

SEQ ID NO: 1663653 - RNA, 16 nt, Human
uguucucucuucucca

SEQ ID NO: 1663654 - RNA, 13 nt, Human
uguucucugcccu

SEQ ID NO: 1663655 - RNA, 14 nt, Human
uguucucugcccuc

SEQ ID NO: 1663656 - RNA, 15 nt, Human
uguucucugcccucc

SEQ ID NO: 1663657 - RNA, 16 nt, Human
uguucucugcccucca

SEQ ID NO: 1663658 - RNA, 13 nt, Human
uguucucugagga

SEQ ID NO: 1663659 - RNA, 12 nt, Human
uguucuggcucu

SEQ ID NO: 1663660 - RNA, 13 nt, Human
uguucuggcucuu

SEQ ID NO: 1663661 - RNA, 16 nt, Human
uguucuggcucuucca

SEQ ID NO: 1663662 - RNA, 23 nt, Human
uguucuuucuggcuaugcauuug

SEQ ID NO: 1663663 - RNA, 15 nt, Human
uguucugcuuuccuc

SEQ ID NO: 1663664 - RNA, 12 nt, Human
uguucugggaca

SEQ ID NO: 1663665 - RNA, 21 nt, Human
uguucuggcucuuccaggcug

SEQ ID NO: 1663666 - RNA, 17 nt, Human
uguucuggcucuuccag

SEQ ID NO: 1663667 - RNA, 20 nt, Human
uguucuggcucuuccaggcu

SEQ ID NO: 1663668 - RNA, 15 nt, Human
uguugaagccuuugu

SEQ ID NO: 1663669 - RNA, 20 nt, Human
uguugacaugggacauuugc

SEQ ID NO: 1663670 - RNA, 12 nt, Human
uguuuaagagac

SEQ ID NO: 1663671 - RNA, 17 nt, Human
uguuggcugggggccuc

SEQ ID NO: 1663672 - RNA, 19 nt, Human
uguuggcugggggccucag

SEQ ID NO: 1663673 - RNA, 17 nt, Human
uguuuaaaaucauuucu

SEQ ID NO: 1663674 - RNA, 18 nt, Human
uguuuaaaaucauuucug

SEQ ID NO: 1663675 - RNA, 14 nt, Human
uguuggagaagaac

SEQ ID NO: 1663676 - RNA, 16 nt, Human
uguuggagaagaacug

SEQ ID NO: 1663677 - RNA, 17 nt, Human
uguuggagaagaacuga

SEQ ID NO: 1663678 - RNA, 14 nt, Human
uguuggcagccucu

SEQ ID NO: 1663679 - RNA, 15 nt, Human
uguuggccaaagcca

SEQ ID NO: 1663680 - RNA, 15 nt, Human
uguuggccaggcugg

SEQ ID NO: 1663681 - RNA, 16 nt, Human
uguuggccaggcuggu

SEQ ID NO: 1663682 - RNA, 19 nt, Human
uguuggagaagaacugaaa

SEQ ID NO: 1663683 - RNA, 20 nt, Human
uguuggagaagaacugaaau

SEQ ID NO: 1663684 - RNA, 15 nt, Human
ugugugcuuauguau

SEQ ID NO: 1663685 - RNA, 19 nt, Human
ugugugcacguacacacac

SEQ ID NO: 1663686 - RNA, 18 nt, Human
uguguaugcgugugugug

SEQ ID NO: 1663687 - RNA, 21 nt, Human
ugugugaaagguacuucaaau

SEQ ID NO: 1663688 - RNA, 22 nt, Human
ugugugaaagguacuucaaauc

SEQ ID NO: 1663689 - RNA, 17 nt, Human
ugugugugaaaaugugu

SEQ ID NO: 1663690 - RNA, 20 nt, Human
ugugugugcuuauguaugag

SEQ ID NO: 1663691 - RNA, 19 nt, Human
ugugugugcuuauguauga

SEQ ID NO: 1663692 - RNA, 16 nt, Human
uguguuuauugucaaa

SEQ ID NO: 1663693 - RNA, 15 nt, Human
uguguuuuucauaaa

SEQ ID NO: 1663694 - RNA, 18 nt, Human
uguguuuuucauaaagca

SEQ ID NO: 1663695 - RNA, 13 nt, Human
uguguuugaagca

SEQ ID NO: 1663696 - RNA, 13 nt, Human
uguguuuugcaag

SEQ ID NO: 1663697 - RNA, 19 nt, Human
uguguuuugcaagccagau

SEQ ID NO: 1663698 - RNA, 17 nt, Human
uguuagccccauaauuu

SEQ ID NO: 1663699 - RNA, 14 nt, Human
uguuacuaaguuuu

SEQ ID NO: 1663700 - RNA, 16 nt, Human
uguuaaaccaugggau

SEQ ID NO: 1663701 - RNA, 21 nt, Human
uguuaaaagaugaaaauauuu

SEQ ID NO: 1663702 - RNA, 20 nt, Human
uguuaguaugaggcauuugu

SEQ ID NO: 1663703 - RNA, 19 nt, Human
uguuaguaugaggcauuug

SEQ ID NO: 1663704 - RNA, 17 nt, Human
uguuaguaugaggcauu

SEQ ID NO: 1663705 - RNA, 14 nt, Human
uguuagugcaaauu

SEQ ID NO: 1663706 - RNA, 20 nt, Human
uguucagcuccagcucacca

SEQ ID NO: 1663707 - RNA, 21 nt, Human
uguucagcuccagcucaccag

SEQ ID NO: 1663708 - RNA, 22 nt, Human
uguucagcuccagcucaccagc

SEQ ID NO: 1663709 - RNA, 17 nt, Human
uguucauaaauaaaguu

SEQ ID NO: 1663710 - RNA, 18 nt, Human
uguggacacagcucuucu

SEQ ID NO: 1663711 - RNA, 13 nt, Human
uguggacacagcu

SEQ ID NO: 1663712 - RNA, 19 nt, Human
uguggacacagcucuucuc

SEQ ID NO: 1663713 - RNA, 10 nt, Human
uguggcucac

SEQ ID NO: 1663714 - RNA, 23 nt, Human
uguggcgcagcauauucaggaag

SEQ ID NO: 1663715 - RNA, 20 nt, Human
ugugggcgugagaccugccc

SEQ ID NO: 1663716 - RNA, 21 nt, Human
ugugggcgugagaccugcccc

SEQ ID NO: 1663717 - RNA, 22 nt, Human
ugugggcgugagaccugccccu

SEQ ID NO: 1663718 - RNA, 22 nt, Human
ugugggcuaguugggcuuccuc

SEQ ID NO: 1663719 - RNA, 16 nt, Human
uguguagggcgggagg

SEQ ID NO: 1663720 - RNA, 12 nt, Human
uguguagggcgg

SEQ ID NO: 1663721 - RNA, 23 nt, Human
ugugcauuuggugguuucagaaa

SEQ ID NO: 1663722 - RNA, 23 nt, Human
ugugcauuaucuagauacuguau

SEQ ID NO: 1663723 - RNA, 21 nt, Human
ugugcauuaucuagauacugu

SEQ ID NO: 1663724 - RNA, 20 nt, Human
ugugcauuaucuagauacug

SEQ ID NO: 1663725 - RNA, 16 nt, Human
ugugcacaugcacgug

SEQ ID NO: 1663726 - RNA, 14 nt, Human
ugugcacguacaca

SEQ ID NO: 1663727 - RNA, 19 nt, Human
ugugcauuaucuagauacu

SEQ ID NO: 1663728 - RNA, 16 nt, Human
ugugcauuaucuagau

SEQ ID NO: 1663729 - RNA, 14 nt, Human
ugugcauuaucuag

SEQ ID NO: 1663730 - RNA, 14 nt, Human
ugugcuuguuaacu

SEQ ID NO: 1663731 - RNA, 20 nt, Human
ugugcucaggagcccuggga

SEQ ID NO: 1663732 - RNA, 17 nt, Human
ugugcucaggagcccug

SEQ ID NO: 1663733 - RNA, 15 nt, Human
ugugcucaggagccc

SEQ ID NO: 1663734 - RNA, 16 nt, Human
ugugcucaggagcccu

SEQ ID NO: 1663735 - RNA, 14 nt, Human
ugugcgccuacagg

SEQ ID NO: 1663736 - RNA, 19 nt, Human
ugugcgccuacaggaguga

SEQ ID NO: 1663737 - RNA, 19 nt, Human
ugugcuaguaauuggaaag

SEQ ID NO: 1663738 - RNA, 17 nt, Human
ugugaaaaugugugugu

SEQ ID NO: 1663739 - RNA, 16 nt, Human
ugugaaaaugugugug

SEQ ID NO: 1663740 - RNA, 16 nt, Human
ugucuuuuuucacuac

SEQ ID NO: 1663741 - RNA, 23 nt, Human
ugugaaaagaaaaaugagccugg

SEQ ID NO: 1663742 - RNA, 23 nt, Human
ugucuuuucuugcaugaggcuag

SEQ ID NO: 1663743 - RNA, 17 nt, Human
ugucuuuggacccugag

SEQ ID NO: 1663744 - RNA, 14 nt, Human
ugucuuuggacccu

SEQ ID NO: 1663745 - RNA, 16 nt, Human
ugucuuuggacccuga

SEQ ID NO: 1663746 - RNA, 21 nt, Human
ugucuuuucuugcaugaggcu

SEQ ID NO: 1663747 - RNA, 19 nt, Human
ugucugaagucacugcaca

SEQ ID NO: 1663748 - RNA, 20 nt, Human
ugucugaagucacugcacag

SEQ ID NO: 1663749 - RNA, 17 nt, Human
ugucugaagucacugca

SEQ ID NO: 1663750 - RNA, 18 nt, Human
ugucugaagucacugcac

SEQ ID NO: 1663751 - RNA, 16 nt, Human
ugucugaagucacugc

SEQ ID NO: 1663752 - RNA, 16 nt, Human
ugugauauaagugugu

SEQ ID NO: 1663753 - RNA, 17 nt, Human
ugugagucaccaagccc

SEQ ID NO: 1663754 - RNA, 19 nt, Human
ugugagucaccaagcccag

SEQ ID NO: 1663755 - RNA, 21 nt, Human
ugugagucaccaagcccaguu

SEQ ID NO: 1663756 - RNA, 13 nt, Human
ugugaggaagccg

SEQ ID NO: 1663757 - RNA, 18 nt, Human
ugugaggaagccgcuggg

SEQ ID NO: 1663758 - RNA, 20 nt, Human
ugugaggaagccgcuggggc

SEQ ID NO: 1663759 - RNA, 13 nt, Human
ugucaccugaaga

SEQ ID NO: 1663760 - RNA, 16 nt, Human
ugucccaacuuguaaa

SEQ ID NO: 1663761 - RNA, 19 nt, Human
ugucauuugagcagggcuc

SEQ ID NO: 1663762 - RNA, 16 nt, Human
ugucauuugagcaggg

SEQ ID NO: 1663763 - RNA, 12 nt, Human
uguccuacucug

SEQ ID NO: 1663764 - RNA, 17 nt, Human
uguccuacucuguguca

SEQ ID NO: 1663765 - RNA, 16 nt, Human
uguccccgacccuugc

SEQ ID NO: 1663766 - RNA, 17 nt, Human
uguccccgacccuugcc

SEQ ID NO: 1663767 - RNA, 20 nt, Human
uguccuacccacccuccuuu

SEQ ID NO: 1663768 - RNA, 18 nt, Human
uguccccaccgcagacag

SEQ ID NO: 1663769 - RNA, 19 nt, Human
uguccccaccgcagacagg

SEQ ID NO: 1663770 - RNA, 22 nt, Human
uguccccaccgcagacaggacc

SEQ ID NO: 1663771 - RNA, 20 nt, Human
uguauuuauuuaguauuuau

SEQ ID NO: 1663772 - RNA, 13 nt, Human
ugucacaggcagg

SEQ ID NO: 1663773 - RNA, 12 nt, Human
ugucacaggcag

SEQ ID NO: 1663774 - RNA, 17 nt, Human
ugucacacacuuuggcu

SEQ ID NO: 1663775 - RNA, 22 nt, Human
uguauaaaagggacugagaaau

SEQ ID NO: 1663776 - RNA, 15 nt, Human
uguaugauucccagc

SEQ ID NO: 1663777 - RNA, 21 nt, Human
uguauugugcgcuaaacuuuu

SEQ ID NO: 1663778 - RNA, 22 nt, Human
uguauucucuccuguaccucuu

SEQ ID NO: 1663779 - RNA, 14 nt, Human
uguaaucacagcua

SEQ ID NO: 1663780 - RNA, 17 nt, Human
uggucacaggaaguaga

SEQ ID NO: 1663781 - RNA, 16 nt, Human
uguacaaggacagccc

SEQ ID NO: 1663782 - RNA, 20 nt, Human
uguacaaggacagccccucc

SEQ ID NO: 1663783 - RNA, 23 nt, Human
uguacaaggacagccccuccucc

SEQ ID NO: 1663784 - RNA, 17 nt, Human
uguaauuaaguacuaug

SEQ ID NO: 1663785 - RNA, 16 nt, Human
uguacagagcccacgc

SEQ ID NO: 1663786 - RNA, 17 nt, Human
uguacagagcccacgcc

SEQ ID NO: 1663787 - RNA, 18 nt, Human
uguacagagcccacgccc

SEQ ID NO: 1663788 - RNA, 21 nt, Human
uguacagagcccacgccccca

SEQ ID NO: 1663789 - RNA, 16 nt, Human
uguaccgcaaugugac

SEQ ID NO: 1663790 - RNA, 18 nt, Human
uguagccccucuccugga

SEQ ID NO: 1663791 - RNA, 22 nt, Human
uguaguguuggagaagaacuga

SEQ ID NO: 1663792 - RNA, 14 nt, Human
uguagcauccugga

SEQ ID NO: 1663793 - RNA, 16 nt, Human
uguagcauccuggaau

SEQ ID NO: 1663794 - RNA, 17 nt, Human
uguagcauccuggaaua

SEQ ID NO: 1663795 - RNA, 18 nt, Human
uguagcauccuggaauau

SEQ ID NO: 1663796 - RNA, 15 nt, Human
uguacgucugacagg

SEQ ID NO: 1663797 - RNA, 10 nt, Human
ugccaggcau

SEQ ID NO: 1663798 - RNA, 18 nt, Human
ugccagguuuuuggucug

SEQ ID NO: 1663799 - RNA, 19 nt, Human
ugccagguuuuuggucuga

SEQ ID NO: 1663800 - RNA, 22 nt, Human
ugccagguuuuuggucugaccc

SEQ ID NO: 1663801 - RNA, 20 nt, Human
ugccacccuggggagaaagu

SEQ ID NO: 1663802 - RNA, 22 nt, Human
ugccacuacggaauaguuggcu

SEQ ID NO: 1663803 - RNA, 19 nt, Human
ugccacccuggggagaaag

SEQ ID NO: 1663804 - RNA, 20 nt, Human
ugccacuaaauugacacuua

SEQ ID NO: 1663805 - RNA, 20 nt, Human
ugcauauuuauaaaaauaaa

SEQ ID NO: 1663806 - RNA, 21 nt, Human
ugcauauuuauaaaaauaaaa

SEQ ID NO: 1663807 - RNA, 18 nt, Human
ugccaaauauaaauaaaa

SEQ ID NO: 1663808 - RNA, 17 nt, Human
ugccaaauauaaauaaa

SEQ ID NO: 1663809 - RNA, 19 nt, Human
ugcaucaagaugugacaug

SEQ ID NO: 1663810 - RNA, 14 nt, Human
ugcaucaagaugug

SEQ ID NO: 1663811 - RNA, 22 nt, Human
ugccaaauauaaauaaaaauaa

SEQ ID NO: 1663812 - RNA, 19 nt, Human
ugccaaauauaaauaaaaa

SEQ ID NO: 1663813 - RNA, 13 nt, Human
ugccccucccuuc

SEQ ID NO: 1663814 - RNA, 17 nt, Human
ugccccuggcagccccu

SEQ ID NO: 1663815 - RNA, 15 nt, Human
ugccccagggcuccc

SEQ ID NO: 1663816 - RNA, 23 nt, Human
ugccccucaacucuccuccagag

SEQ ID NO: 1663817 - RNA, 14 nt, Human
ugcccacucccugc

SEQ ID NO: 1663818 - RNA, 15 nt, Human
ugcccacucccugca

SEQ ID NO: 1663819 - RNA, 16 nt, Human
ugcccacucccugcaa

SEQ ID NO: 1663820 - RNA, 11 nt, Human
ugcccaggcug

SEQ ID NO: 1663821 - RNA, 21 nt, Human
ugcccacucccugcaaccuga

SEQ ID NO: 1663822 - RNA, 13 nt, Human
ugcccaggcuggc

SEQ ID NO: 1663823 - RNA, 13 nt, Human
ugcccaccuggcc

SEQ ID NO: 1663824 - RNA, 14 nt, Human
ugcccaccuggccu

SEQ ID NO: 1663825 - RNA, 24 nt, Human
ugccagguuuuuggucugacccac

SEQ ID NO: 1663826 - RNA, 21 nt, Human
ugccauccagguucagcuugu

SEQ ID NO: 1663827 - RNA, 12 nt, Human
ugccaucccucc

SEQ ID NO: 1663828 - RNA, 11 nt, Human
ugccaucccuc

SEQ ID NO: 1663829 - RNA, 14 nt, Human
ugccaucccucccu

SEQ ID NO: 1663830 - RNA, 14 nt, Human
ugcacggugaaugg

SEQ ID NO: 1663831 - RNA, 18 nt, Human
ugcacggugaauggcuuu

SEQ ID NO: 1663832 - RNA, 19 nt, Human
ugcacggugaauggcuuug

SEQ ID NO: 1663833 - RNA, 20 nt, Human
ugaguccccuguuuguuucu

SEQ ID NO: 1663834 - RNA, 17 nt, Human
ugcaccgggccacagag

SEQ ID NO: 1663835 - RNA, 22 nt, Human
ugcaccgggccacagagaaagu

SEQ ID NO: 1663836 - RNA, 19 nt, Human
ugaguccccuguuuguuuc

SEQ ID NO: 1663837 - RNA, 23 nt, Human
ugcaccggcuggccuggccccuc

SEQ ID NO: 1663838 - RNA, 14 nt, Human
ugcaccgggccaca

SEQ ID NO: 1663839 - RNA, 15 nt, Human
ugcaccgggccacag

SEQ ID NO: 1663840 - RNA, 21 nt, Human
ugcagagcaggaaacaugacu

SEQ ID NO: 1663841 - RNA, 23 nt, Human
ugcagcaauaaagcagcguuucu

SEQ ID NO: 1663842 - RNA, 20 nt, Human
ugcagcaauaaagcagcguu

SEQ ID NO: 1663843 - RNA, 12 nt, Human
ugcacuuuguuc

SEQ ID NO: 1663844 - RNA, 14 nt, Human
ugcacuuuguucug

SEQ ID NO: 1663845 - RNA, 15 nt, Human
ugcaggcagccaggc

SEQ ID NO: 1663846 - RNA, 13 nt, Human
ugcaggcagccag

SEQ ID NO: 1663847 - RNA, 14 nt, Human
ugcaggcagccagg

SEQ ID NO: 1663848 - RNA, 16 nt, Human
ugcagugcuuccaagg

SEQ ID NO: 1663849 - RNA, 22 nt, Human
ugcagugguaugaucacggcuc

SEQ ID NO: 1663850 - RNA, 20 nt, Human
ugcaguggugcgaucugggu

SEQ ID NO: 1663851 - RNA, 15 nt, Human
ugcaguucugaagaa

SEQ ID NO: 1663852 - RNA, 16 nt, Human
ugcaguucugaagaag

SEQ ID NO: 1663853 - RNA, 17 nt, Human
ugcaguucugaagaaga

SEQ ID NO: 1663854 - RNA, 18 nt, Human
ugcaguucugaagaagau

SEQ ID NO: 1663855 - RNA, 15 nt, Human
ugcaguugccaguca

SEQ ID NO: 1663856 - RNA, 13 nt, Human
ugcaguugccagu

SEQ ID NO: 1663857 - RNA, 14 nt, Human
ugcaguugccaguc

SEQ ID NO: 1663858 - RNA, 19 nt, Human
ugcaguucugaagaagaug

SEQ ID NO: 1663859 - RNA, 22 nt, Human
ugcaguucugaagaagauggua

SEQ ID NO: 1663860 - RNA, 13 nt, Human
ugcugcuggcugg

SEQ ID NO: 1663861 - RNA, 23 nt, Human
ugcugcaguugccagucaccccg

SEQ ID NO: 1663862 - RNA, 18 nt, Human
ugcugcaguugccaguca

SEQ ID NO: 1663863 - RNA, 14 nt, Human
ugcugcauuuaaaa

SEQ ID NO: 1663864 - RNA, 18 nt, Human
ugcugauggugcaaugac

SEQ ID NO: 1663865 - RNA, 13 nt, Human
ugcugauggugca

SEQ ID NO: 1663866 - RNA, 15 nt, Human
ugcugauggugcaau

SEQ ID NO: 1663867 - RNA, 17 nt, Human
ugcugauggugcaauga

SEQ ID NO: 1663868 - RNA, 23 nt, Human
ugcugaaggaauaaauugcuccu

SEQ ID NO: 1663869 - RNA, 12 nt, Human
ugcugaaggcuc

SEQ ID NO: 1663870 - RNA, 13 nt, Human
ugcugaaggcucg

SEQ ID NO: 1663871 - RNA, 21 nt, Human
ugcugaaggcucgagcaugcc

SEQ ID NO: 1663872 - RNA, 22 nt, Human
ugcugacagacacaggcccggc

SEQ ID NO: 1663873 - RNA, 23 nt, Human
ugcugacagacacaggcccggcu

SEQ ID NO: 1663874 - RNA, 16 nt, Human
ugcucuccucuugcca

SEQ ID NO: 1663875 - RNA, 18 nt, Human
ugcucuccucuugccacu

SEQ ID NO: 1663876 - RNA, 21 nt, Human
ugcucuccucuugccacugcc

SEQ ID NO: 1663877 - RNA, 22 nt, Human
ugcucuccucuugccacugccu

SEQ ID NO: 1663878 - RNA, 18 nt, Human
ugcuccuuucuuguuuua

SEQ ID NO: 1663879 - RNA, 17 nt, Human
ugcuccucuccccagca

SEQ ID NO: 1663880 - RNA, 18 nt, Human
ugcuccucuccccagcaa

SEQ ID NO: 1663881 - RNA, 14 nt, Human
ugcuccucucccca

SEQ ID NO: 1663882 - RNA, 17 nt, Human
ugcucagagcaguguuu

SEQ ID NO: 1663883 - RNA, 15 nt, Human
ugcucacauaucugu

SEQ ID NO: 1663884 - RNA, 16 nt, Human
ugcucacauaucuguc

SEQ ID NO: 1663885 - RNA, 15 nt, Human
ugcuaagcauuccaa

SEQ ID NO: 1663886 - RNA, 19 nt, Human
ugcuaagcauuccaacuau

SEQ ID NO: 1663887 - RNA, 9 nt, Human
ugccucucu

SEQ ID NO: 1663888 - RNA, 17 nt, Human
ugccugaagucacacag

SEQ ID NO: 1663889 - RNA, 18 nt, Human
ugccccuggcagccccug

SEQ ID NO: 1663890 - RNA, 20 nt, Human
ugccucgaacuggcugcaaa

SEQ ID NO: 1663891 - RNA, 18 nt, Human
ugccucgaacuggcugca

SEQ ID NO: 1663892 - RNA, 19 nt, Human
ugccucgaacuggcugcaa

SEQ ID NO: 1663893 - RNA, 21 nt, Human
ugccugggaucccucauccuc

SEQ ID NO: 1663894 - RNA, 18 nt, Human
ugccugggcagaaggaag

SEQ ID NO: 1663895 - RNA, 14 nt, Human
ugccugugaacuga

SEQ ID NO: 1663896 - RNA, 14 nt, Human
ugccugguggcagc

SEQ ID NO: 1663897 - RNA, 15 nt, Human
ugccugguggcagcu

SEQ ID NO: 1663898 - RNA, 16 nt, Human
ugccugguggcagcug

SEQ ID NO: 1663899 - RNA, 18 nt, Human
ugccuguaaucacagcua

SEQ ID NO: 1663900 - RNA, 14 nt, Human
ugcgccuacaggag

SEQ ID NO: 1663901 - RNA, 16 nt, Human
ugcgccuacaggagug

SEQ ID NO: 1663902 - RNA, 22 nt, Human
ugcgccuacaggagugagcacu

SEQ ID NO: 1663903 - RNA, 15 nt, Human
ugcuaaaugugaaug

SEQ ID NO: 1663904 - RNA, 14 nt, Human
ugcgaucuggguuc

SEQ ID NO: 1663905 - RNA, 15 nt, Human
ugcgaucuggguuca

SEQ ID NO: 1663906 - RNA, 19 nt, Human
ugcgaucuggguucacugc

SEQ ID NO: 1663907 - RNA, 20 nt, Human
ugcgaucuggguucacugca

SEQ ID NO: 1663908 - RNA, 21 nt, Human
ugcgaucuggguucacugcaa

SEQ ID NO: 1663909 - RNA, 17 nt, Human
ugccugugaacugaacu

SEQ ID NO: 1663910 - RNA, 18 nt, Human
ugccugugaacugaacuc

SEQ ID NO: 1663911 - RNA, 21 nt, Human
ugccugugaacugaacucuga

SEQ ID NO: 1663912 - RNA, 15 nt, Human
ugccuucucaacucc

SEQ ID NO: 1663913 - RNA, 14 nt, Human
uggguuaguggaug

SEQ ID NO: 1663914 - RNA, 22 nt, Human
uggguucuacccaggugcuagg

SEQ ID NO: 1663915 - RNA, 15 nt, Human
uggguucuacccagg

SEQ ID NO: 1663916 - RNA, 16 nt, Human
uggguucuacccaggu

SEQ ID NO: 1663917 - RNA, 19 nt, Human
ugggguuuaucagaauucu

SEQ ID NO: 1663918 - RNA, 16 nt, Human
uggguaacuagggaag

SEQ ID NO: 1663919 - RNA, 23 nt, Human
ugguauuggcuagagguucaaag

SEQ ID NO: 1663920 - RNA, 18 nt, Human
ugguaugaucacggcuca

SEQ ID NO: 1663921 - RNA, 21 nt, Human
uggguuucuaaagcugccagc

SEQ ID NO: 1663922 - RNA, 17 nt, Human
uggguuucuaaagcugc

SEQ ID NO: 1663923 - RNA, 18 nt, Human
uggguuucuaaagcugcc

SEQ ID NO: 1663924 - RNA, 16 nt, Human
ugggcagaggaaagca

SEQ ID NO: 1663925 - RNA, 20 nt, Human
ugggcgugagaccugccccu

SEQ ID NO: 1663926 - RNA, 22 nt, Human
ugggcuaagugauccucccacc

SEQ ID NO: 1663927 - RNA, 16 nt, Human
ugggcuaguugggcuu

SEQ ID NO: 1663928 - RNA, 17 nt, Human
ugggcuggugucaccug

SEQ ID NO: 1663929 - RNA, 15 nt, Human
ugggcuucaguggca

SEQ ID NO: 1663930 - RNA, 17 nt, Human
ugggcuucaguggcagc

SEQ ID NO: 1663931 - RNA, 12 nt, Human
uggggauucuua

SEQ ID NO: 1663932 - RNA, 13 nt, Human
uggggauucuuaa

SEQ ID NO: 1663933 - RNA, 16 nt, Human
uggggauucuuaaagu

SEQ ID NO: 1663934 - RNA, 18 nt, Human
uggggauucuuaaaguug

SEQ ID NO: 1663935 - RNA, 20 nt, Human
uggggauucuuaaaguugaa

SEQ ID NO: 1663936 - RNA, 20 nt, Human
ugggggaucacagccucuga

SEQ ID NO: 1663937 - RNA, 21 nt, Human
ugggggaucacagccucugaa

SEQ ID NO: 1663938 - RNA, 15 nt, Human
ugggggugcauuuga

SEQ ID NO: 1663939 - RNA, 12 nt, Human
ugggggugcauu

SEQ ID NO: 1663940 - RNA, 19 nt, Human
ugggggcugggcagaggaa

SEQ ID NO: 1663941 - RNA, 17 nt, Human
ugggggcugggcagagg

SEQ ID NO: 1663942 - RNA, 18 nt, Human
ugggggcugggcagagga

SEQ ID NO: 1663943 - RNA, 15 nt, Human
ugggagugagcuggu

SEQ ID NO: 1663944 - RNA, 15 nt, Human
ugggauccuccaggu

SEQ ID NO: 1663945 - RNA, 17 nt, Human
ugggagcugccuguuca

SEQ ID NO: 1663946 - RNA, 21 nt, Human
ugggagcugccuguucagcuc

SEQ ID NO: 1663947 - RNA, 22 nt, Human
ugggagcugccuguucagcucc

SEQ ID NO: 1663948 - RNA, 17 nt, Human
ugggauuacagguguga

SEQ ID NO: 1663949 - RNA, 15 nt, Human
ugggcagaggaaagc

SEQ ID NO: 1663950 - RNA, 18 nt, Human
ugggauccuccaggugca

SEQ ID NO: 1663951 - RNA, 13 nt, Human
ugggauccuggag

SEQ ID NO: 1663952 - RNA, 18 nt, Human
ugggauuacaggcuccug

SEQ ID NO: 1663953 - RNA, 16 nt, Human
ugggauuacaggugug

SEQ ID NO: 1663954 - RNA, 12 nt, Human
ugggacacccug

SEQ ID NO: 1663955 - RNA, 15 nt, Human
uggcuuuugugcauu

SEQ ID NO: 1663956 - RNA, 13 nt, Human
ugggacacccugu

SEQ ID NO: 1663957 - RNA, 13 nt, Human
ugggagcaaaaga

SEQ ID NO: 1663958 - RNA, 12 nt, Human
ugggagcugccu

SEQ ID NO: 1663959 - RNA, 13 nt, Human
ugggagcugccug

SEQ ID NO: 1663960 - RNA, 14 nt, Human
ugggagcugccugu

SEQ ID NO: 1663961 - RNA, 21 nt, Human
uggcugggggccucagugcca

SEQ ID NO: 1663962 - RNA, 21 nt, Human
uggcugcuucaaggauccuga

SEQ ID NO: 1663963 - RNA, 16 nt, Human
uggcuuccuggcaaua

SEQ ID NO: 1663964 - RNA, 14 nt, Human
uggcuuuucugauc

SEQ ID NO: 1663965 - RNA, 17 nt, Human
uggcuuuucugauccag

SEQ ID NO: 1663966 - RNA, 18 nt, Human
uggcuuuucugauccagu

SEQ ID NO: 1663967 - RNA, 19 nt, Human
uggcuuuucugauccaguu

SEQ ID NO: 1663968 - RNA, 14 nt, Human
uggcuuuugugcau

SEQ ID NO: 1663969 - RNA, 21 nt, Human
uggcuugaguuuaaauuguaa

SEQ ID NO: 1663970 - RNA, 13 nt, Human
uggcagugggagc

SEQ ID NO: 1663971 - RNA, 19 nt, Human
uggcaggaguuggaagugu

SEQ ID NO: 1663972 - RNA, 13 nt, Human
uggcagcugcuuu

SEQ ID NO: 1663973 - RNA, 21 nt, Human
uggcacccggccccugcuggu

SEQ ID NO: 1663974 - RNA, 17 nt, Human
uggccacuccagacccc

SEQ ID NO: 1663975 - RNA, 20 nt, Human
uggccacuccagaccccugg

SEQ ID NO: 1663976 - RNA, 21 nt, Human
uggccagaugcaccagcccuu

SEQ ID NO: 1663977 - RNA, 24 nt, Human
uggauuuaacagaaauguacagca

SEQ ID NO: 1663978 - RNA, 20 nt, Human
uggauuuaacagaaauguac

SEQ ID NO: 1663979 - RNA, 15 nt, Human
uggacuccucugucc

SEQ ID NO: 1663980 - RNA, 15 nt, Human
uggacuccugcacac

SEQ ID NO: 1663981 - RNA, 20 nt, Human
uggaggaaggaaacccagcu

SEQ ID NO: 1663982 - RNA, 12 nt, Human
uggaggaaggaa

SEQ ID NO: 1663983 - RNA, 18 nt, Human
uggaggaaggaaacccag

SEQ ID NO: 1663984 - RNA, 11 nt, Human
uggagggaagc

SEQ ID NO: 1663985 - RNA, 20 nt, Human
uggaaaaauagccugccucu

SEQ ID NO: 1663986 - RNA, 13 nt, Human
ugcuuuaauauca

SEQ ID NO: 1663987 - RNA, 15 nt, Human
ugcuuuaauaucauc

SEQ ID NO: 1663988 - RNA, 18 nt, Human
ugcuuuaauaucaucagu

SEQ ID NO: 1663989 - RNA, 20 nt, Human
ugcuuuaauaucaucaguau

SEQ ID NO: 1663990 - RNA, 17 nt, Human
uggaaacagcucgacuu

SEQ ID NO: 1663991 - RNA, 17 nt, Human
uggaaacaagucaguca

SEQ ID NO: 1663992 - RNA, 21 nt, Human
uggaaagacuuuuccaacccu

SEQ ID NO: 1663993 - RNA, 22 nt, Human
uggaaacagcucgacuuuaaaa

SEQ ID NO: 1663994 - RNA, 23 nt, Human
uggaaacuucagcgguuuauaua

SEQ ID NO: 1663995 - RNA, 14 nt, Human
uggaaagaguacuc

SEQ ID NO: 1663996 - RNA, 20 nt, Human
uggaaagaguaggaagacuu

SEQ ID NO: 1663997 - RNA, 20 nt, Human
uggaacauaaaauacaaugu

SEQ ID NO: 1663998 - RNA, 21 nt, Human
uggaacauaaaauacaauguu

SEQ ID NO: 1663999 - RNA, 19 nt, Human
uggaacgcguugaaauugu

SEQ ID NO: 1664000 - RNA, 18 nt, Human
uggaacgcguugaaauug

SEQ ID NO: 1664001 - RNA, 14 nt, Human
uggaauaacaugua

SEQ ID NO: 1664002 - RNA, 15 nt, Human
uggaauaacauguaa

SEQ ID NO: 1664003 - RNA, 19 nt, Human
uggaauaacauguaauuaa

SEQ ID NO: 1664004 - RNA, 16 nt, Human
uggaauaucuccguca

SEQ ID NO: 1664005 - RNA, 16 nt, Human
uggaauauauaaccag

SEQ ID NO: 1664006 - RNA, 15 nt, Human
uggaauauauaacca

SEQ ID NO: 1664007 - RNA, 17 nt, Human
uggaauaaggagaauga

SEQ ID NO: 1664008 - RNA, 22 nt, Human
uggaauaauccuaaacauauga

SEQ ID NO: 1664009 - RNA, 18 nt, Human
uggacucaccucccccau

SEQ ID NO: 1664010 - RNA, 20 nt, Human
uggacucaccucccccaucu

SEQ ID NO: 1664011 - RNA, 13 nt, Human
uggacaugcacag

SEQ ID NO: 1664012 - RNA, 19 nt, Human
uggacaugcacagcuaaca

SEQ ID NO: 1664013 - RNA, 19 nt, Human
ucccuaccgagucucuucu

SEQ ID NO: 1664014 - RNA, 21 nt, Human
ucccuaccgagucucuucucc

SEQ ID NO: 1664015 - RNA, 22 nt, Human
ucccuaccgagucucuucucca

SEQ ID NO: 1664016 - RNA, 23 nt, Human
ucccuaccgagucucuucuccac

SEQ ID NO: 1664017 - RNA, 12 nt, Human
ucccaugcccug

SEQ ID NO: 1664018 - RNA, 17 nt, Human
ucccaugagccucagca

SEQ ID NO: 1664019 - RNA, 22 nt, Human
ucccaugagccucagcauccug

SEQ ID NO: 1664020 - RNA, 13 nt, Human
ucccucccuuggg

SEQ ID NO: 1664021 - RNA, 14 nt, Human
ucccucccuugggg

SEQ ID NO: 1664022 - RNA, 17 nt, Human
ucccuacuuccugugac

SEQ ID NO: 1664023 - RNA, 18 nt, Human
ucccucccuuccucuuuc

SEQ ID NO: 1664024 - RNA, 14 nt, Human
ucccugccaaugga

SEQ ID NO: 1664025 - RNA, 16 nt, Human
ucccugccaauggacu

SEQ ID NO: 1664026 - RNA, 20 nt, Human
ucccugcacuugcagacucu

SEQ ID NO: 1664027 - RNA, 17 nt, Human
ucccucuggggcuguuc

SEQ ID NO: 1664028 - RNA, 13 nt, Human
ucccucuggggcu

SEQ ID NO: 1664029 - RNA, 22 nt, Human
uccgaaagggacuuggaagcuc

SEQ ID NO: 1664030 - RNA, 17 nt, Human
ucccuucuuuuucuucu

SEQ ID NO: 1664031 - RNA, 21 nt, Human
uccgaaagggacuuggaagcu

SEQ ID NO: 1664032 - RNA, 21 nt, Human
uccgcuuucuacccagcgagc

SEQ ID NO: 1664033 - RNA, 18 nt, Human
ucccugccccucccuuca

SEQ ID NO: 1664034 - RNA, 19 nt, Human
ucccugccccucccuucaa

SEQ ID NO: 1664035 - RNA, 24 nt, Human
ucccuggccuuucauauuuuagcu

SEQ ID NO: 1664036 - RNA, 16 nt, Human
ucccuggccuuucaua

SEQ ID NO: 1664037 - RNA, 16 nt, Human
ucccugccccccagcc

SEQ ID NO: 1664038 - RNA, 14 nt, Human
ucccugccccuccc

SEQ ID NO: 1664039 - RNA, 16 nt, Human
ucccuucccaccucuc

SEQ ID NO: 1664040 - RNA, 17 nt, Human
ucccuucccaccucucu

SEQ ID NO: 1664041 - RNA, 21 nt, Human
ucccuucccacuggaggcaug

SEQ ID NO: 1664042 - RNA, 21 nt, Human
uccucuaggaggucucuaaga

SEQ ID NO: 1664043 - RNA, 13 nt, Human
uccuccuggacuc

SEQ ID NO: 1664044 - RNA, 21 nt, Human
uccuccuuuucacaguucucu

SEQ ID NO: 1664045 - RNA, 17 nt, Human
uccucugcuugccaucc

SEQ ID NO: 1664046 - RNA, 16 nt, Human
uccucugcuugccauc

SEQ ID NO: 1664047 - RNA, 15 nt, Human
uccucugcuugccau

SEQ ID NO: 1664048 - RNA, 14 nt, Human
uccucugcuugcca

SEQ ID NO: 1664049 - RNA, 18 nt, Human
uccucucaaccaccuuuc

SEQ ID NO: 1664050 - RNA, 20 nt, Human
uccucucaaccaccuuucag

SEQ ID NO: 1664051 - RNA, 21 nt, Human
uccucucaaccaccuuucaga

SEQ ID NO: 1664052 - RNA, 15 nt, Human
uccucuguacagagc

SEQ ID NO: 1664053 - RNA, 13 nt, Human
uccucuguacaga

SEQ ID NO: 1664054 - RNA, 15 nt, Human
uccucuggccugugu

SEQ ID NO: 1664055 - RNA, 19 nt, Human
uccucugcuugccaucccu

SEQ ID NO: 1664056 - RNA, 17 nt, Human
uccucuguccaggcacu

SEQ ID NO: 1664057 - RNA, 17 nt, Human
uccugagccagauuuca

SEQ ID NO: 1664058 - RNA, 23 nt, Human
uccucuguacagagcccacgccc

SEQ ID NO: 1664059 - RNA, 18 nt, Human
uccugagccagauuucac

SEQ ID NO: 1664060 - RNA, 19 nt, Human
uccugagccagauuucacu

SEQ ID NO: 1664061 - RNA, 22 nt, Human
uccucuguccaggcacugcugc

SEQ ID NO: 1664062 - RNA, 21 nt, Human
uccugagccagauuucacucu

SEQ ID NO: 1664063 - RNA, 15 nt, Human
uccugaggcuccacu

SEQ ID NO: 1664064 - RNA, 15 nt, Human
uccugaggcugggcu

SEQ ID NO: 1664065 - RNA, 16 nt, Human
uccugaggcugggcuc

SEQ ID NO: 1664066 - RNA, 17 nt, Human
uccugaggcugggcucc

SEQ ID NO: 1664067 - RNA, 19 nt, Human
uccugaggcugggcucccu

SEQ ID NO: 1664068 - RNA, 12 nt, Human
uccugaggcugg

SEQ ID NO: 1664069 - RNA, 16 nt, Human
uccugaggcuccacuu

SEQ ID NO: 1664070 - RNA, 17 nt, Human
uccugaggcuccacuug

SEQ ID NO: 1664071 - RNA, 22 nt, Human
uccuaguuccaccaucaagcca

SEQ ID NO: 1664072 - RNA, 21 nt, Human
uccuaguuccaccaucaagcc

SEQ ID NO: 1664073 - RNA, 16 nt, Human
uccuaagcuauucagu

SEQ ID NO: 1664074 - RNA, 18 nt, Human
uccuaagcuauucaguaa

SEQ ID NO: 1664075 - RNA, 14 nt, Human
uccuaguuccacca

SEQ ID NO: 1664076 - RNA, 17 nt, Human
uccuaguuccaccauca

SEQ ID NO: 1664077 - RNA, 12 nt, Human
uccuccucagau

SEQ ID NO: 1664078 - RNA, 14 nt, Human
uccuccaggugcac

SEQ ID NO: 1664079 - RNA, 18 nt, Human
uccuccaggugcacaagc

SEQ ID NO: 1664080 - RNA, 20 nt, Human
uccuccaggugcacaagcuc

SEQ ID NO: 1664081 - RNA, 22 nt, Human
uccuccaggugcacaagcucca

SEQ ID NO: 1664082 - RNA, 12 nt, Human
uccuccaggugc

SEQ ID NO: 1664083 - RNA, 13 nt, Human
uccuccaggugca

SEQ ID NO: 1664084 - RNA, 20 nt, Human
uccucaaaacuucagacaua

SEQ ID NO: 1664085 - RNA, 17 nt, Human
ucgcaggauucuuccuc

SEQ ID NO: 1664086 - RNA, 21 nt, Human
ucgcaggauucuuccucccuc

SEQ ID NO: 1664087 - RNA, 23 nt, Human
ucgcaggauucuuccucccuccc

SEQ ID NO: 1664088 - RNA, 22 nt, Human
uccuuuucgcaggauucuuccu

SEQ ID NO: 1664089 - RNA, 14 nt, Human
ucgcccagucugga

SEQ ID NO: 1664090 - RNA, 19 nt, Human
ucgcccagucuggaaugca

SEQ ID NO: 1664091 - RNA, 23 nt, Human
ucgcccagucuggaaugcagugg

SEQ ID NO: 1664092 - RNA, 18 nt, Human
ucggaaaacaugcuacac

SEQ ID NO: 1664093 - RNA, 15 nt, Human
ucggaaaacaugcua

SEQ ID NO: 1664094 - RNA, 15 nt, Human
ucggccuccauccug

SEQ ID NO: 1664095 - RNA, 16 nt, Human
ucggccuccauccuga

SEQ ID NO: 1664096 - RNA, 17 nt, Human
ucggccuccauccugag

SEQ ID NO: 1664097 - RNA, 15 nt, Human
ucgcuuuugauaauc

SEQ ID NO: 1664098 - RNA, 14 nt, Human
uccuuaucaaagga

SEQ ID NO: 1664099 - RNA, 15 nt, Human
uccuuaucaaaggac

SEQ ID NO: 1664100 - RNA, 17 nt, Human
uccuuaucaaaggacac

SEQ ID NO: 1664101 - RNA, 22 nt, Human
uccuugaaaacacuguucucug

SEQ ID NO: 1664102 - RNA, 23 nt, Human
uccuugaaaacacuguucucugc

SEQ ID NO: 1664103 - RNA, 21 nt, Human
uccuuaccagcagagcaccuu

SEQ ID NO: 1664104 - RNA, 22 nt, Human
uccuuggugucgggcaugacac

SEQ ID NO: 1664105 - RNA, 17 nt, Human
uccuuugugaggaagcc

SEQ ID NO: 1664106 - RNA, 18 nt, Human
uccuuugugaggaagccg

SEQ ID NO: 1664107 - RNA, 22 nt, Human
uccuuugugaggaagccgcugg

SEQ ID NO: 1664108 - RNA, 18 nt, Human
uccuuggugucgggcaug

SEQ ID NO: 1664109 - RNA, 21 nt, Human
uccuuggugucgggcaugaca

SEQ ID NO: 1664110 - RNA, 17 nt, Human
uccuugcaucaauuuuu

SEQ ID NO: 1664111 - RNA, 13 nt, Human
ucuauauuuucau

SEQ ID NO: 1664112 - RNA, 14 nt, Human
ucuauauuuucauu

SEQ ID NO: 1664113 - RNA, 13 nt, Human
ucuauauuuuaca

SEQ ID NO: 1664114 - RNA, 15 nt, Human
ucuagguaaauuaca

SEQ ID NO: 1664115 - RNA, 12 nt, Human
ucuagggaaaaa

SEQ ID NO: 1664116 - RNA, 19 nt, Human
ucuagggaaaaaccagcgu

SEQ ID NO: 1664117 - RNA, 18 nt, Human
ucuacucuagggaaaaac

SEQ ID NO: 1664118 - RNA, 20 nt, Human
ucuacucgaguuacagacaa

SEQ ID NO: 1664119 - RNA, 21 nt, Human
ucuacucgaguuacagacaaa

SEQ ID NO: 1664120 - RNA, 12 nt, Human
ucuacuaaaaau

SEQ ID NO: 1664121 - RNA, 14 nt, Human
ucuacuauuuaugu

SEQ ID NO: 1664122 - RNA, 15 nt, Human
ucuacuaaaaauaca

SEQ ID NO: 1664123 - RNA, 19 nt, Human
ucuacuaaaaauacaaaaa

SEQ ID NO: 1664124 - RNA, 18 nt, Human
ucucaaauuucuaaaucu

SEQ ID NO: 1664125 - RNA, 16 nt, Human
ucucacacaugagcau

SEQ ID NO: 1664126 - RNA, 23 nt, Human
ucucacacaugagcaucaggcca

SEQ ID NO: 1664127 - RNA, 20 nt, Human
ucucacugccaugccagcuu

SEQ ID NO: 1664128 - RNA, 21 nt, Human
ucucacacaugagcaucaggc

SEQ ID NO: 1664129 - RNA, 23 nt, Human
ucucacucugucgcccagucugg

SEQ ID NO: 1664130 - RNA, 15 nt, Human
ucuauauuuucauuc

SEQ ID NO: 1664131 - RNA, 16 nt, Human
ucuauauuuucauucu

SEQ ID NO: 1664132 - RNA, 19 nt, Human
ucuauauuuucauucuccu

SEQ ID NO: 1664133 - RNA, 18 nt, Human
ucuauauguuuaaaagua

SEQ ID NO: 1664134 - RNA, 16 nt, Human
ucucaaauuucuaaau

SEQ ID NO: 1664135 - RNA, 14 nt, Human
ucucaaauuucuaa

SEQ ID NO: 1664136 - RNA, 22 nt, Human
ucuaucuuugagcgcccacuag

SEQ ID NO: 1664137 - RNA, 13 nt, Human
ucucaaauuucua

SEQ ID NO: 1664138 - RNA, 17 nt, Human
ucucacuguugcccagg

SEQ ID NO: 1664139 - RNA, 14 nt, Human
ucucacuguugccc

SEQ ID NO: 1664140 - RNA, 15 nt, Human
ucucacuguugccca

SEQ ID NO: 1664141 - RNA, 16 nt, Human
ucucagauuuuauuau

SEQ ID NO: 1664142 - RNA, 17 nt, Human
ucucagauuuuauuaug

SEQ ID NO: 1664143 - RNA, 18 nt, Human
ucucagauuuuauuaugu

SEQ ID NO: 1664144 - RNA, 19 nt, Human
ucucagauuuuauuaugua

SEQ ID NO: 1664145 - RNA, 14 nt, Human
ucucagauuuuauu

SEQ ID NO: 1664146 - RNA, 15 nt, Human
ucucagauuuuauua

SEQ ID NO: 1664147 - RNA, 13 nt, Human
ucucagauuuuau

SEQ ID NO: 1664148 - RNA, 15 nt, Human
uccaagcaaauguga

SEQ ID NO: 1664149 - RNA, 17 nt, Human
uccaagcaaaugugaau

SEQ ID NO: 1664150 - RNA, 14 nt, Human
uccaagcaggacau

SEQ ID NO: 1664151 - RNA, 22 nt, Human
uccaagcaggacauggacaagg

SEQ ID NO: 1664152 - RNA, 19 nt, Human
uccaagaagcccaggaaag

SEQ ID NO: 1664153 - RNA, 20 nt, Human
uccaagaccuucuccuucac

SEQ ID NO: 1664154 - RNA, 14 nt, Human
uccaagaagcccag

SEQ ID NO: 1664155 - RNA, 15 nt, Human
uccaagaagcccagg

SEQ ID NO: 1664156 - RNA, 16 nt, Human
uccaagaagcccagga

SEQ ID NO: 1664157 - RNA, 21 nt, Human
uccacaagagcccaggccucc

SEQ ID NO: 1664158 - RNA, 20 nt, Human
uccacaagagcccaggccuc

SEQ ID NO: 1664159 - RNA, 22 nt, Human
uccagagaguggcuccucccgg

SEQ ID NO: 1664160 - RNA, 19 nt, Human
uccagagaguggcuccucc

SEQ ID NO: 1664161 - RNA, 19 nt, Human
uccacuuucuagccagagg

SEQ ID NO: 1664162 - RNA, 17 nt, Human
uccacuuuaucuugaau

SEQ ID NO: 1664163 - RNA, 14 nt, Human
uccacuuucuagcc

SEQ ID NO: 1664164 - RNA, 21 nt, Human
uccacuuagaaauugcauuuc

SEQ ID NO: 1664165 - RNA, 23 nt, Human
uccacuuagaaauugcauuuccu

SEQ ID NO: 1664166 - RNA, 15 nt, Human
uccacuuuaucuuga

SEQ ID NO: 1664167 - RNA, 22 nt, Human
uccacugugccaugugccaggu

SEQ ID NO: 1664168 - RNA, 21 nt, Human
uccacccugcucuccgaccag

SEQ ID NO: 1664169 - RNA, 14 nt, Human
uccacccugcucuc

SEQ ID NO: 1664170 - RNA, 15 nt, Human
uccagcuggccggga

SEQ ID NO: 1664171 - RNA, 21 nt, Human
uccagcuggccgggagccuga

SEQ ID NO: 1664172 - RNA, 22 nt, Human
uccagcuggccgggagccugau

SEQ ID NO: 1664173 - RNA, 19 nt, Human
uccagcuggguuggaaaac

SEQ ID NO: 1664174 - RNA, 22 nt, Human
uccagauuuuuuacagcugccu

SEQ ID NO: 1664175 - RNA, 19 nt, Human
uccagcaauucuccugccu

SEQ ID NO: 1664176 - RNA, 20 nt, Human
uccagcaauucuccugccuc

SEQ ID NO: 1664177 - RNA, 21 nt, Human
uccagcaauucuccugccuca

SEQ ID NO: 1664178 - RNA, 18 nt, Human
uccagcaauucuccugcc

SEQ ID NO: 1664179 - RNA, 17 nt, Human
ucccaggcauuccccag

SEQ ID NO: 1664180 - RNA, 18 nt, Human
ucccaggcauuccccagg

SEQ ID NO: 1664181 - RNA, 16 nt, Human
ucccaggauguacaag

SEQ ID NO: 1664182 - RNA, 19 nt, Human
ucccaggcugagccucagu

SEQ ID NO: 1664183 - RNA, 19 nt, Human
ucccaggcauuccccagga

SEQ ID NO: 1664184 - RNA, 15 nt, Human
ucccaugagccucag

SEQ ID NO: 1664185 - RNA, 16 nt, Human
ucccaugagccucagc

SEQ ID NO: 1664186 - RNA, 14 nt, Human
ucccaccucucuca

SEQ ID NO: 1664187 - RNA, 17 nt, Human
ucccaccucucucacuc

SEQ ID NO: 1664188 - RNA, 18 nt, Human
ucccaccucucucacucc

SEQ ID NO: 1664189 - RNA, 16 nt, Human
ucccaccucagccucc

SEQ ID NO: 1664190 - RNA, 18 nt, Human
ucccaccucagccucccg

SEQ ID NO: 1664191 - RNA, 20 nt, Human
ucccaccucucucacuccuu

SEQ ID NO: 1664192 - RNA, 19 nt, Human
ucccaccuuggcugcaggg

SEQ ID NO: 1664193 - RNA, 21 nt, Human
ucccaccuuggcugcagggag

SEQ ID NO: 1664194 - RNA, 14 nt, Human
ucccacucagucca

SEQ ID NO: 1664195 - RNA, 17 nt, Human
uccaugucgccucugca

SEQ ID NO: 1664196 - RNA, 18 nt, Human
uccaugucgccucugcau

SEQ ID NO: 1664197 - RNA, 19 nt, Human
uccaugucgccucugcauu

SEQ ID NO: 1664198 - RNA, 16 nt, Human
uccaugucgccucugc

SEQ ID NO: 1664199 - RNA, 17 nt, Human
ucccaacucaccccagc

SEQ ID NO: 1664200 - RNA, 18 nt, Human
ucccaacucaccccagcc

SEQ ID NO: 1664201 - RNA, 14 nt, Human
ucccaacuuguaaa

SEQ ID NO: 1664202 - RNA, 19 nt, Human
ucccaacucaccccagccc

SEQ ID NO: 1664203 - RNA, 21 nt, Human
ucccaacucaccccagcccca

SEQ ID NO: 1664204 - RNA, 20 nt, Human
uccauagagagcaagacgcu

SEQ ID NO: 1664205 - RNA, 23 nt, Human
uccauaaucuggacuccucuguc

SEQ ID NO: 1664206 - RNA, 17 nt, Human
uccauagagagcaagac

SEQ ID NO: 1664207 - RNA, 12 nt, Human
uccauacauuug

SEQ ID NO: 1664208 - RNA, 14 nt, Human
ucaucauccuaagc

SEQ ID NO: 1664209 - RNA, 20 nt, Human
ucaucaguauugaagcauuu

SEQ ID NO: 1664210 - RNA, 21 nt, Human
ucaucaguauugaagcauuuu

SEQ ID NO: 1664211 - RNA, 23 nt, Human
ucaucaguauugaagcauuuuau

SEQ ID NO: 1664212 - RNA, 24 nt, Human
ucauggacuucugccagcauaaua

SEQ ID NO: 1664213 - RNA, 15 nt, Human
ucaugaaagauucaa

SEQ ID NO: 1664214 - RNA, 21 nt, Human
ucauggaauuggagcucgugg

SEQ ID NO: 1664215 - RNA, 13 nt, Human
ucaugaaagauuc

SEQ ID NO: 1664216 - RNA, 19 nt, Human
ucauggaauuggagcucgu

SEQ ID NO: 1664217 - RNA, 14 nt, Human
ucagguggggcagc

SEQ ID NO: 1664218 - RNA, 18 nt, Human
ucaggugcugccauccag

SEQ ID NO: 1664219 - RNA, 20 nt, Human
ucaggugcugccauccaggu

SEQ ID NO: 1664220 - RNA, 15 nt, Human
ucagguggggcagcu

SEQ ID NO: 1664221 - RNA, 16 nt, Human
ucagguggggcagcuu

SEQ ID NO: 1664222 - RNA, 21 nt, Human
ucagguggggcagcuugaggg

SEQ ID NO: 1664223 - RNA, 17 nt, Human
ucagguggggcagcuug

SEQ ID NO: 1664224 - RNA, 21 nt, Human
ucagguggggucacucuggca

SEQ ID NO: 1664225 - RNA, 17 nt, Human
ucagguggggucacucu

SEQ ID NO: 1664226 - RNA, 20 nt, Human
ucagguggggucacucuggc

SEQ ID NO: 1664227 - RNA, 18 nt, Human
ucaguccccgugaaggag

SEQ ID NO: 1664228 - RNA, 15 nt, Human
ucaguccauagcaga

SEQ ID NO: 1664229 - RNA, 18 nt, Human
ucaguccaugaagaugua

SEQ ID NO: 1664230 - RNA, 16 nt, Human
ucaguuaagccuuugg

SEQ ID NO: 1664231 - RNA, 17 nt, Human
ucaguuaagccuuugga

SEQ ID NO: 1664232 - RNA, 17 nt, Human
ucagucugauucccaag

SEQ ID NO: 1664233 - RNA, 19 nt, Human
ucagucugauucccaagcu

SEQ ID NO: 1664234 - RNA, 18 nt, Human
ucagugugacugaucucu

SEQ ID NO: 1664235 - RNA, 14 nt, Human
ucagauacuggauu

SEQ ID NO: 1664236 - RNA, 15 nt, Human
ucagauacuggauug

SEQ ID NO: 1664237 - RNA, 16 nt, Human
ucagauacuggauugu

SEQ ID NO: 1664238 - RNA, 19 nt, Human
ucagauacuggauuguacu

SEQ ID NO: 1664239 - RNA, 20 nt, Human
ucagauacuggauuguacuu

SEQ ID NO: 1664240 - RNA, 17 nt, Human
ucagauaugauucaaau

SEQ ID NO: 1664241 - RNA, 16 nt, Human
ucagauaugauucaaa

SEQ ID NO: 1664242 - RNA, 18 nt, Human
ucagauaugauucaaaug

SEQ ID NO: 1664243 - RNA, 15 nt, Human
ucagaucucuaacuu

SEQ ID NO: 1664244 - RNA, 18 nt, Human
ucagcacgauuucuguuu

SEQ ID NO: 1664245 - RNA, 17 nt, Human
ucagcacgauuucuguu

SEQ ID NO: 1664246 - RNA, 16 nt, Human
ucagcacgauuucugu

SEQ ID NO: 1664247 - RNA, 15 nt, Human
ucagcacgauuucug

SEQ ID NO: 1664248 - RNA, 12 nt, Human
ucagccucccaa

SEQ ID NO: 1664249 - RNA, 13 nt, Human
ucagccucccaaa

SEQ ID NO: 1664250 - RNA, 15 nt, Human
ucagcauccuggcac

SEQ ID NO: 1664251 - RNA, 16 nt, Human
ucagcauccuggcacc

SEQ ID NO: 1664252 - RNA, 17 nt, Human
ucagcauccuggcaccc

SEQ ID NO: 1664253 - RNA, 18 nt, Human
ucagcauccuggcacccg

SEQ ID NO: 1664254 - RNA, 22 nt, Human
ucagccucccaaagugcuggga

SEQ ID NO: 1664255 - RNA, 12 nt, Human
ucagccucccga

SEQ ID NO: 1664256 - RNA, 20 nt, Human
ucagccucccgaauagcugg

SEQ ID NO: 1664257 - RNA, 16 nt, Human
ucagccugcuccagcu

SEQ ID NO: 1664258 - RNA, 18 nt, Human
ucagcuccagcucaccag

SEQ ID NO: 1664259 - RNA, 21 nt, Human
ucagcuccagcucaccagccc

SEQ ID NO: 1664260 - RNA, 22 nt, Human
ucagcuccagcucaccagcccc

SEQ ID NO: 1664261 - RNA, 22 nt, Human
ucagcuccccucggagaagagc

SEQ ID NO: 1664262 - RNA, 21 nt, Human
ucagcuccccucggagaagag

SEQ ID NO: 1664263 - RNA, 15 nt, Human
ucagcugcuacuacu

SEQ ID NO: 1664264 - RNA, 16 nt, Human
ucagcugcugaaacaa

SEQ ID NO: 1664265 - RNA, 22 nt, Human
ucuggacuccucuguccaggca

SEQ ID NO: 1664266 - RNA, 15 nt, Human
ucuggacuccucugu

SEQ ID NO: 1664267 - RNA, 16 nt, Human
ucuggacuccucuguc

SEQ ID NO: 1664268 - RNA, 18 nt, Human
ucuggacuccucugucca

SEQ ID NO: 1664269 - RNA, 14 nt, Human
ucuggaauuugaaa

SEQ ID NO: 1664270 - RNA, 14 nt, Human
ucuggaaugugaag

SEQ ID NO: 1664271 - RNA, 17 nt, Human
ucugcugcuggcugguu

SEQ ID NO: 1664272 - RNA, 14 nt, Human
ucugcugcuggcug

SEQ ID NO: 1664273 - RNA, 15 nt, Human
ucugcugcuggcugg

SEQ ID NO: 1664274 - RNA, 13 nt, Human
ucugcugaaggaa

SEQ ID NO: 1664275 - RNA, 17 nt, Human
ucugcugacagacacag

SEQ ID NO: 1664276 - RNA, 11 nt, Human
ucugcugcugg

SEQ ID NO: 1664277 - RNA, 13 nt, Human
ucugcugcuggcu

SEQ ID NO: 1664278 - RNA, 13 nt, Human
ucugccugcccag

SEQ ID NO: 1664279 - RNA, 17 nt, Human
ucugccugcccaggccc

SEQ ID NO: 1664280 - RNA, 18 nt, Human
ucugccugcccaggcccc

SEQ ID NO: 1664281 - RNA, 20 nt, Human
ucugccugcccaggccccug

SEQ ID NO: 1664282 - RNA, 12 nt, Human
ucuggagcccac

SEQ ID NO: 1664283 - RNA, 16 nt, Human
ucuggagcccacugua

SEQ ID NO: 1664284 - RNA, 22 nt, Human
ucuggagcccacuguacuugcu

SEQ ID NO: 1664285 - RNA, 16 nt, Human
ucuggugacuuuccuc

SEQ ID NO: 1664286 - RNA, 14 nt, Human
ucuguacagagccc

SEQ ID NO: 1664287 - RNA, 15 nt, Human
ucuguacagagccca

SEQ ID NO: 1664288 - RNA, 12 nt, Human
ucuguccuggga

SEQ ID NO: 1664289 - RNA, 17 nt, Human
ucugucgcccagucugg

SEQ ID NO: 1664290 - RNA, 13 nt, Human
ucugucuaggaau

SEQ ID NO: 1664291 - RNA, 21 nt, Human
ucuguccugggagugagcugg

SEQ ID NO: 1664292 - RNA, 14 nt, Human
ucugucucagucca

SEQ ID NO: 1664293 - RNA, 12 nt, Human
ucugcccacucc

SEQ ID NO: 1664294 - RNA, 22 nt, Human
ucugccauauucuguuggccag

SEQ ID NO: 1664295 - RNA, 23 nt, Human
ucugccauauucuguuggccagu

SEQ ID NO: 1664296 - RNA, 23 nt, Human
ucugccuaaggacuucuuuaauu

SEQ ID NO: 1664297 - RNA, 12 nt, Human
ucugccucccau

SEQ ID NO: 1664298 - RNA, 13 nt, Human
ucugccucccauc

SEQ ID NO: 1664299 - RNA, 15 nt, Human
ucugccucccaucac

SEQ ID NO: 1664300 - RNA, 20 nt, Human
ucugccuaaggacuucuuua

SEQ ID NO: 1664301 - RNA, 21 nt, Human
ucugccuaaggacuucuuuaa

SEQ ID NO: 1664302 - RNA, 16 nt, Human
ucugcccacucccugc

SEQ ID NO: 1664303 - RNA, 13 nt, Human
ucugcccacuccc

SEQ ID NO: 1664304 - RNA, 14 nt, Human
ucugcccacucccu

SEQ ID NO: 1664305 - RNA, 15 nt, Human
ucugccuccucuuca

SEQ ID NO: 1664306 - RNA, 15 nt, Human
ucugccucugacaca

SEQ ID NO: 1664307 - RNA, 18 nt, Human
ucugccucugacacacag

SEQ ID NO: 1664308 - RNA, 16 nt, Human
ucugccucccaucacc

SEQ ID NO: 1664309 - RNA, 17 nt, Human
ucugccucccaucaccc

SEQ ID NO: 1664310 - RNA, 20 nt, Human
ucugccucccaucacccgcu

SEQ ID NO: 1664311 - RNA, 21 nt, Human
ucugccucccaucacccgcua

SEQ ID NO: 1664312 - RNA, 23 nt, Human
ucugccucugacacacagcucug

SEQ ID NO: 1664313 - RNA, 21 nt, Human
ucugccucugacacacagcuc

SEQ ID NO: 1664314 - RNA, 22 nt, Human
ucugccucugacacacagcucu

SEQ ID NO: 1664315 - RNA, 19 nt, Human
ucugccugaagucacacag

SEQ ID NO: 1664316 - RNA, 20 nt, Human
ucugccugaagucacacagu

SEQ ID NO: 1664317 - RNA, 13 nt, Human
ucugcacuccccu

SEQ ID NO: 1664318 - RNA, 14 nt, Human
ucugcaaucuucuc

SEQ ID NO: 1664319 - RNA, 17 nt, Human
ucugcaaucuucucaga

SEQ ID NO: 1664320 - RNA, 23 nt, Human
ucugaggaauccagacccggcug

SEQ ID NO: 1664321 - RNA, 22 nt, Human
ucugaggaauccagacccggcu

SEQ ID NO: 1664322 - RNA, 18 nt, Human
ucugaggaauccagaccc

SEQ ID NO: 1664323 - RNA, 21 nt, Human
ucugaggaauccagacccggc

SEQ ID NO: 1664324 - RNA, 18 nt, Human
ucugagaggacuuuucuu

SEQ ID NO: 1664325 - RNA, 24 nt, Human
ucugagaucaaaacgguuuuacug

SEQ ID NO: 1664326 - RNA, 20 nt, Human
ucugacccaugcugcccugu

SEQ ID NO: 1664327 - RNA, 22 nt, Human
ucugacccaugcugcccuguga

SEQ ID NO: 1664328 - RNA, 23 nt, Human
ucugacccaugcugcccugugag

SEQ ID NO: 1664329 - RNA, 14 nt, Human
ucuuugcagacagg

SEQ ID NO: 1664330 - RNA, 17 nt, Human
ucuuugcagacaggcaa

SEQ ID NO: 1664331 - RNA, 23 nt, Human
ucuuugagugaagcugggagaac

SEQ ID NO: 1664332 - RNA, 13 nt, Human
ucuuugcagacag

SEQ ID NO: 1664333 - RNA, 16 nt, Human
ucuuuggacccugagg

SEQ ID NO: 1664334 - RNA, 14 nt, Human
ucuuuggacccuga

SEQ ID NO: 1664335 - RNA, 15 nt, Human
ucuuuggacccugag

SEQ ID NO: 1664336 - RNA, 13 nt, Human
ucuuuggacccug

SEQ ID NO: 1664337 - RNA, 17 nt, Human
ucuugucucagauuuua

SEQ ID NO: 1664338 - RNA, 14 nt, Human
ucuugucucagauu

SEQ ID NO: 1664339 - RNA, 15 nt, Human
ucuugucucagauuu

SEQ ID NO: 1664340 - RNA, 12 nt, Human
ucuugucucaga

SEQ ID NO: 1664341 - RNA, 23 nt, Human
ucuuuccaaaguacacuguuuca

SEQ ID NO: 1664342 - RNA, 13 nt, Human
ucuuguguguuua

SEQ ID NO: 1664343 - RNA, 13 nt, Human
ucuuucccucccu

SEQ ID NO: 1664344 - RNA, 23 nt, Human
ucuuucccucccuuccucuuucc

SEQ ID NO: 1664345 - RNA, 12 nt, Human
ucuuucccuccc

SEQ ID NO: 1664346 - RNA, 17 nt, Human
ucuuuccacagaagcuc

SEQ ID NO: 1664347 - RNA, 21 nt, Human
ugaaaacacauuuuucuuagg

SEQ ID NO: 1664348 - RNA, 17 nt, Human
ugaaaacacuguucucu

SEQ ID NO: 1664349 - RNA, 20 nt, Human
ugaaaacacuguucucugcc

SEQ ID NO: 1664350 - RNA, 21 nt, Human
ugaaaacacuguucucugccc

SEQ ID NO: 1664351 - RNA, 22 nt, Human
ugaaaacacuguucucugcccu

SEQ ID NO: 1664352 - RNA, 23 nt, Human
ugaaaacacuguucucugcccuc

SEQ ID NO: 1664353 - RNA, 18 nt, Human
ugaaaaccacauuggaga

SEQ ID NO: 1664354 - RNA, 19 nt, Human
ugaaaagaaaaaugagccu

SEQ ID NO: 1664355 - RNA, 20 nt, Human
ugaaaagaaaaaugagccug

SEQ ID NO: 1664356 - RNA, 22 nt, Human
ugaaaagaaaaaugagccuggc

SEQ ID NO: 1664357 - RNA, 20 nt, Human
ugaaaauuaggauuucauga

SEQ ID NO: 1664358 - RNA, 14 nt, Human
ugaaaauucagugg

SEQ ID NO: 1664359 - RNA, 12 nt, Human
ugaaaauuuuga

SEQ ID NO: 1664360 - RNA, 15 nt, Human
ugaaacacuuugcau

SEQ ID NO: 1664361 - RNA, 22 nt, Human
ucuucaguuaagccuuuggaaa

SEQ ID NO: 1664362 - RNA, 19 nt, Human
ucuucaguuaagccuuugg

SEQ ID NO: 1664363 - RNA, 20 nt, Human
ucuucaguuaagccuuugga

SEQ ID NO: 1664364 - RNA, 15 nt, Human
ucuucagaucucuaa

SEQ ID NO: 1664365 - RNA, 14 nt, Human
ucuucagaucucua

SEQ ID NO: 1664366 - RNA, 21 nt, Human
ucuucagagacuccugcaggc

SEQ ID NO: 1664367 - RNA, 14 nt, Human
ucuuauacauuuga

SEQ ID NO: 1664368 - RNA, 22 nt, Human
ucuuauccaacaucaacaucuu

SEQ ID NO: 1664369 - RNA, 22 nt, Human
ucugugucagguggggcagcuu

SEQ ID NO: 1664370 - RNA, 17 nt, Human
ucugugucagguggggc

SEQ ID NO: 1664371 - RNA, 20 nt, Human
ucugugucagguggggcagc

SEQ ID NO: 1664372 - RNA, 15 nt, Human
ucuuagauguauaua

SEQ ID NO: 1664373 - RNA, 22 nt, Human
ucuuaggguuaugauuaaguaa

SEQ ID NO: 1664374 - RNA, 20 nt, Human
ucuuagguuggcaaaaaggc

SEQ ID NO: 1664375 - RNA, 23 nt, Human
ucuuagguuggcaaaaaggcagg

SEQ ID NO: 1664376 - RNA, 14 nt, Human
ucuuauaauuuaaa

SEQ ID NO: 1664377 - RNA, 13 nt, Human
ucuuauaauuuaa

SEQ ID NO: 1664378 - RNA, 13 nt, Human
ucuugaagacuuu

SEQ ID NO: 1664379 - RNA, 22 nt, Human
ucuugaagacuuuucuuucagc

SEQ ID NO: 1664380 - RNA, 21 nt, Human
ucuugaaauauaggaacuuaa

SEQ ID NO: 1664381 - RNA, 20 nt, Human
ucuugaaauauaggaacuua

SEQ ID NO: 1664382 - RNA, 16 nt, Human
ucuucuuggucucagu

SEQ ID NO: 1664383 - RNA, 15 nt, Human
ucuugcucugcugac

SEQ ID NO: 1664384 - RNA, 23 nt, Human
ucuugcucugcugacagacacag

SEQ ID NO: 1664385 - RNA, 14 nt, Human
ucuuguauuaagaa

SEQ ID NO: 1664386 - RNA, 15 nt, Human
ucuuguauuaagaau

SEQ ID NO: 1664387 - RNA, 16 nt, Human
ucuugccacugccucu

SEQ ID NO: 1664388 - RNA, 17 nt, Human
ucuugccacugccucuu

SEQ ID NO: 1664389 - RNA, 14 nt, Human
ucuugcucugcuga

SEQ ID NO: 1664390 - RNA, 19 nt, Human
ucuugccaaauauaaauaa

SEQ ID NO: 1664391 - RNA, 23 nt, Human
ucuugcauggcaaggacugcagg

SEQ ID NO: 1664392 - RNA, 16 nt, Human
ugaggcucugcccuug

SEQ ID NO: 1664393 - RNA, 18 nt, Human
ugaggcucugcccuuggu

SEQ ID NO: 1664394 - RNA, 20 nt, Human
ugaggcguauguggcaaaau

SEQ ID NO: 1664395 - RNA, 15 nt, Human
ugaggcugggcuccc

SEQ ID NO: 1664396 - RNA, 16 nt, Human
ugaggcugggcucccu

SEQ ID NO: 1664397 - RNA, 20 nt, Human
ugagucccaggcugagccuc

SEQ ID NO: 1664398 - RNA, 21 nt, Human
ugagucccaggcugagccuca

SEQ ID NO: 1664399 - RNA, 21 nt, Human
ugaggcugggcucccuuccca

SEQ ID NO: 1664400 - RNA, 18 nt, Human
ugaggucagagccugcag

SEQ ID NO: 1664401 - RNA, 19 nt, Human
ugaggucagagccugcagu

SEQ ID NO: 1664402 - RNA, 23 nt, Human
ugagcuuaagaauuuugagcagg

SEQ ID NO: 1664403 - RNA, 13 nt, Human
ugaggaucagagu

SEQ ID NO: 1664404 - RNA, 17 nt, Human
ugaggaucagaguaauc

SEQ ID NO: 1664405 - RNA, 19 nt, Human
ugaggaucagaguaaucca

SEQ ID NO: 1664406 - RNA, 22 nt, Human
ugaggaugaaaaaauaacacug

SEQ ID NO: 1664407 - RNA, 23 nt, Human
ugagccgagaucacgccacugca

SEQ ID NO: 1664408 - RNA, 20 nt, Human
ugagcagggcucagcgggga

SEQ ID NO: 1664409 - RNA, 22 nt, Human
ugagcagggcucagcggggaca

SEQ ID NO: 1664410 - RNA, 23 nt, Human
ugagcagggcucagcggggacag

SEQ ID NO: 1664411 - RNA, 22 nt, Human
ugagccgagaucacgccacugc

SEQ ID NO: 1664412 - RNA, 20 nt, Human
ugagcucagcccuggugggc

SEQ ID NO: 1664413 - RNA, 11 nt, Human
ugagcucagcc

SEQ ID NO: 1664414 - RNA, 12 nt, Human
ugagcucagccc

SEQ ID NO: 1664415 - RNA, 11 nt, Human
ugagcucagga

SEQ ID NO: 1664416 - RNA, 19 nt, Human
ugagcucaggaguuugaga

SEQ ID NO: 1664417 - RNA, 12 nt, Human
ugacuuuggaua

SEQ ID NO: 1664418 - RNA, 13 nt, Human
ugacuuuggauaa

SEQ ID NO: 1664419 - RNA, 14 nt, Human
ugacuuuggauaau

SEQ ID NO: 1664420 - RNA, 15 nt, Human
ugacuuuggauaaua

SEQ ID NO: 1664421 - RNA, 16 nt, Human
ugacuuuggauaauaa

SEQ ID NO: 1664422 - RNA, 20 nt, Human
ugacuuuggauaauaaggaa

SEQ ID NO: 1664423 - RNA, 22 nt, Human
ugacuuuggauaauaaggaaaa

SEQ ID NO: 1664424 - RNA, 16 nt, Human
ugacuuuccucuuugg

SEQ ID NO: 1664425 - RNA, 21 nt, Human
ugacucuuucuauuguuucuu

SEQ ID NO: 1664426 - RNA, 14 nt, Human
ugaccauucuccac

SEQ ID NO: 1664427 - RNA, 13 nt, Human
ugaccauucucca

SEQ ID NO: 1664428 - RNA, 14 nt, Human
ugacucuuaagaag

SEQ ID NO: 1664429 - RNA, 15 nt, Human
ugacucuuaagaaga

SEQ ID NO: 1664430 - RNA, 16 nt, Human
ugacucuuaagaagac

SEQ ID NO: 1664431 - RNA, 13 nt, Human
ugacucuuaagaa

SEQ ID NO: 1664432 - RNA, 22 nt, Human
ugacuuuucuguccgagcuuug

SEQ ID NO: 1664433 - RNA, 15 nt, Human
ugagaaauaaaguuu

SEQ ID NO: 1664434 - RNA, 15 nt, Human
ugagaaagacuauuc

SEQ ID NO: 1664435 - RNA, 13 nt, Human
ugagaccugcccc

SEQ ID NO: 1664436 - RNA, 14 nt, Human
ugagaccugccccu

SEQ ID NO: 1664437 - RNA, 15 nt, Human
ugagaccugccccuc

SEQ ID NO: 1664438 - RNA, 22 nt, Human
ugagaccugccccuccucucug

SEQ ID NO: 1664439 - RNA, 12 nt, Human
ugagaccugccc

SEQ ID NO: 1664440 - RNA, 14 nt, Human
ugagaccaaccugg

SEQ ID NO: 1664441 - RNA, 19 nt, Human
ugagaggggaacagacugg

SEQ ID NO: 1664442 - RNA, 18 nt, Human
ugagaggggaacagacug

SEQ ID NO: 1664443 - RNA, 14 nt, Human
ugagaggggaacag

SEQ ID NO: 1664444 - RNA, 20 nt, Human
ugagcaggauuuuaaucuuu

SEQ ID NO: 1664445 - RNA, 15 nt, Human
ugagcaggauuuuaa

SEQ ID NO: 1664446 - RNA, 19 nt, Human
ugacauguguuggcagccu

SEQ ID NO: 1664447 - RNA, 21 nt, Human
ugaccagccuccaugcugccu

SEQ ID NO: 1664448 - RNA, 22 nt, Human
ugaccagccuccaugcugccuc

SEQ ID NO: 1664449 - RNA, 23 nt, Human
ugaccagccuccaugcugccucc

SEQ ID NO: 1664450 - RNA, 16 nt, Human
ugaccacugcagaaga

SEQ ID NO: 1664451 - RNA, 17 nt, Human
ugaccacugcagaagac

SEQ ID NO: 1664452 - RNA, 13 nt, Human
ugacauguuuuau

SEQ ID NO: 1664453 - RNA, 18 nt, Human
ugaccacugcagaagaca

SEQ ID NO: 1664454 - RNA, 15 nt, Human
ugacauauuuuugcu

SEQ ID NO: 1664455 - RNA, 13 nt, Human
ugacagaggcagc

SEQ ID NO: 1664456 - RNA, 13 nt, Human
ugacaucucugca

SEQ ID NO: 1664457 - RNA, 14 nt, Human
ugacaucucugcaa

SEQ ID NO: 1664458 - RNA, 23 nt, Human
ugacaucucugcaaucuucucag

SEQ ID NO: 1664459 - RNA, 22 nt, Human
ugacagagcaagugagacccug

SEQ ID NO: 1664460 - RNA, 23 nt, Human
ugacaucaacugcaucaagaugu

SEQ ID NO: 1664461 - RNA, 17 nt, Human
ugacagacacaggcccg

SEQ ID NO: 1664462 - RNA, 18 nt, Human
ugacagacacaggcccgg

SEQ ID NO: 1664463 - RNA, 20 nt, Human
ugacaaagguaaaucagacu

SEQ ID NO: 1664464 - RNA, 16 nt, Human
ugaauuuaaauagcuu

SEQ ID NO: 1664465 - RNA, 13 nt, Human
ugacaacacucau

SEQ ID NO: 1664466 - RNA, 18 nt, Human
ugacaacagacuucugaa

SEQ ID NO: 1664467 - RNA, 19 nt, Human
ugacaacagacuucugaaa

SEQ ID NO: 1664468 - RNA, 15 nt, Human
ugacaacagacuucu

SEQ ID NO: 1664469 - RNA, 23 nt, Human
ugacaacacucauugaccugagg

SEQ ID NO: 1664470 - RNA, 14 nt, Human
ugaauuaaguuuuu

SEQ ID NO: 1664471 - RNA, 13 nt, Human
ugaauuacauuug

SEQ ID NO: 1664472 - RNA, 21 nt, Human
ugaauuguaaggaaugauuaa

SEQ ID NO: 1664473 - RNA, 13 nt, Human
ugaauuguaagga

SEQ ID NO: 1664474 - RNA, 14 nt, Human
ugaauuacauuugu

SEQ ID NO: 1664475 - RNA, 14 nt, Human
ugacacacagcucu

SEQ ID NO: 1664476 - RNA, 15 nt, Human
ugacacacagcucug

SEQ ID NO: 1664477 - RNA, 14 nt, Human
ugacagacacaggc

SEQ ID NO: 1664478 - RNA, 16 nt, Human
ugacagacacaggccc

SEQ ID NO: 1664479 - RNA, 13 nt, Human
ugacagacacagg

SEQ ID NO: 1664480 - RNA, 23 nt, Human
ugacaaggauugcuacuguccua

SEQ ID NO: 1664481 - RNA, 20 nt, Human
ugaaggcuggguucugaucc

SEQ ID NO: 1664482 - RNA, 21 nt, Human
ugaaggcuggguucugauccu

SEQ ID NO: 1664483 - RNA, 14 nt, Human
ugaaugcauaaaau

SEQ ID NO: 1664484 - RNA, 15 nt, Human
ugaaugaauggcuaa

SEQ ID NO: 1664485 - RNA, 20 nt, Human
ugaaugaauggcuaagcaaa

SEQ ID NO: 1664486 - RNA, 16 nt, Human
ugaaucuuggugucua

SEQ ID NO: 1664487 - RNA, 16 nt, Human
ugaaacacuuugcaua

SEQ ID NO: 1664488 - RNA, 13 nt, Human
ugaaacauguuuc

SEQ ID NO: 1664489 - RNA, 13 nt, Human
ugaacuugaaauu

SEQ ID NO: 1664490 - RNA, 14 nt, Human
ugaacuugaaauuu

SEQ ID NO: 1664491 - RNA, 18 nt, Human
ugaacuugaaauuugaau

SEQ ID NO: 1664492 - RNA, 19 nt, Human
ugaagacucauucuucugu

SEQ ID NO: 1664493 - RNA, 20 nt, Human
ugaagacucauucuucugua

SEQ ID NO: 1664494 - RNA, 20 nt, Human
ugaagagguuuuaaagcuuc

SEQ ID NO: 1664495 - RNA, 21 nt, Human
ugaagagguuuuaaagcuucc

SEQ ID NO: 1664496 - RNA, 19 nt, Human
ugaagagguuuuaaagcuu

SEQ ID NO: 1664497 - RNA, 19 nt, Human
ugaaggccccgcccaggcu

SEQ ID NO: 1664498 - RNA, 20 nt, Human
ugaaggccccgcccaggcuu

SEQ ID NO: 1664499 - RNA, 21 nt, Human
ugaagcuuuuaugugaaacau

SEQ ID NO: 1664500 - RNA, 16 nt, Human
ugaagcuuuuauguga

SEQ ID NO: 1664501 - RNA, 18 nt, Human
ugaaggccccgcccaggc

SEQ ID NO: 1664502 - RNA, 12 nt, Human
uacaauuuuguu

SEQ ID NO: 1664503 - RNA, 15 nt, Human
uacaauuuuguuucu

SEQ ID NO: 1664504 - RNA, 16 nt, Human
uacaauuuuguuucug

SEQ ID NO: 1664505 - RNA, 17 nt, Human
uacaauuuuguuucugu

SEQ ID NO: 1664506 - RNA, 11 nt, Human
uacacacacac

SEQ ID NO: 1664507 - RNA, 21 nt, Human
uacacugugcugagucugaag

SEQ ID NO: 1664508 - RNA, 17 nt, Human
uacacacugcauguuug

SEQ ID NO: 1664509 - RNA, 15 nt, Human
uacacacugcauguu

SEQ ID NO: 1664510 - RNA, 17 nt, Human
uacacacucaaaucaag

SEQ ID NO: 1664511 - RNA, 16 nt, Human
uacacacucaaaucaa

SEQ ID NO: 1664512 - RNA, 15 nt, Human
uacaaaguauuaagc

SEQ ID NO: 1664513 - RNA, 16 nt, Human
uacaaaguauuaagca

SEQ ID NO: 1664514 - RNA, 18 nt, Human
uacaaaguauuaagcaua

SEQ ID NO: 1664515 - RNA, 19 nt, Human
uacaaaguauuaagcauau

SEQ ID NO: 1664516 - RNA, 13 nt, Human
uacaaaguauuaa

SEQ ID NO: 1664517 - RNA, 14 nt, Human
uacaaaguauuaag

SEQ ID NO: 1664518 - RNA, 12 nt, Human
uacaaaguauua

SEQ ID NO: 1664519 - RNA, 14 nt, Human
uacaaaguagaagu

SEQ ID NO: 1664520 - RNA, 18 nt, Human
uacaaaguagaagucuua

SEQ ID NO: 1664521 - RNA, 18 nt, Human
uaauuuugugaagcaaaa

SEQ ID NO: 1664522 - RNA, 12 nt, Human
uaauuuuuauau

SEQ ID NO: 1664523 - RNA, 16 nt, Human
uaauuuuuauauuuga

SEQ ID NO: 1664524 - RNA, 17 nt, Human
uaauuuuuauauuugaa

SEQ ID NO: 1664525 - RNA, 13 nt, Human
uaauuuugugaag

SEQ ID NO: 1664526 - RNA, 21 nt, Human
uacauggcuggagcuagaauu

SEQ ID NO: 1664527 - RNA, 14 nt, Human
uacauuuuuaagug

SEQ ID NO: 1664528 - RNA, 22 nt, Human
uacauuuuuaagugcugcauuu

SEQ ID NO: 1664529 - RNA, 19 nt, Human
uacauuuuuaagugcugca

SEQ ID NO: 1664530 - RNA, 14 nt, Human
uacauggaauaaca

SEQ ID NO: 1664531 - RNA, 18 nt, Human
uacauggaauaacaugua

SEQ ID NO: 1664532 - RNA, 19 nt, Human
uacauggaauaacauguaa

SEQ ID NO: 1664533 - RNA, 22 nt, Human
uacauggaauaacauguaauua

SEQ ID NO: 1664534 - RNA, 16 nt, Human
uacauaaacaaguccu

SEQ ID NO: 1664535 - RNA, 21 nt, Human
uacaguuuguuaguaugaggc

SEQ ID NO: 1664536 - RNA, 19 nt, Human
uacaguuuguuaguaugag

SEQ ID NO: 1664537 - RNA, 23 nt, Human
uacaugaaaacacauuuuucuua

SEQ ID NO: 1664538 - RNA, 19 nt, Human
uacaugaaaacacauuuuu

SEQ ID NO: 1664539 - RNA, 18 nt, Human
uacaugaaaacacauuuu

SEQ ID NO: 1664540 - RNA, 17 nt, Human
uacaugaaaacacauuu

SEQ ID NO: 1664541 - RNA, 16 nt, Human
uacaugaaaacacauu

SEQ ID NO: 1664542 - RNA, 16 nt, Human
uacauaagauaaaugu

SEQ ID NO: 1664543 - RNA, 17 nt, Human
uacauaagauaaaugug

SEQ ID NO: 1664544 - RNA, 16 nt, Human
uacagcuaaucagcau

SEQ ID NO: 1664545 - RNA, 18 nt, Human
uacagcuaaucagcauuc

SEQ ID NO: 1664546 - RNA, 22 nt, Human
uacacuguuucaaacuuuacua

SEQ ID NO: 1664547 - RNA, 16 nt, Human
uacacuuacacuuuau

SEQ ID NO: 1664548 - RNA, 20 nt, Human
uacacuguuucaaacuuuac

SEQ ID NO: 1664549 - RNA, 22 nt, Human
uacacugugcugagucugaagg

SEQ ID NO: 1664550 - RNA, 23 nt, Human
uacacugugcugagucugaaggc

SEQ ID NO: 1664551 - RNA, 20 nt, Human
uacagcuugaccgugaggcc

SEQ ID NO: 1664552 - RNA, 18 nt, Human
uacaggaagguagaaaua

SEQ ID NO: 1664553 - RNA, 13 nt, Human
uacaggaaguacu

SEQ ID NO: 1664554 - RNA, 14 nt, Human
uacagcugccugca

SEQ ID NO: 1664555 - RNA, 13 nt, Human
uacagcugccugc

SEQ ID NO: 1664556 - RNA, 18 nt, Human
uacaguuuguuaguauga

SEQ ID NO: 1664557 - RNA, 20 nt, Human
uacaguugaaaaacagcuga

SEQ ID NO: 1664558 - RNA, 21 nt, Human
uacagcuugaccgugaggcca

SEQ ID NO: 1664559 - RNA, 17 nt, Human
uacaguugaaaaacagc

SEQ ID NO: 1664560 - RNA, 19 nt, Human
uacaguugaaaaacagcug

SEQ ID NO: 1664561 - RNA, 14 nt, Human
uacaggaaguacug

SEQ ID NO: 1664562 - RNA, 15 nt, Human
uacaggaaguacugg

SEQ ID NO: 1664563 - RNA, 22 nt, Human
uacaggaaguacuggagaaaau

SEQ ID NO: 1664564 - RNA, 15 nt, Human
uacaggagugagcac

SEQ ID NO: 1664565 - RNA, 23 nt, Human
uacaguucggugagcuacaaaug

SEQ ID NO: 1664566 - RNA, 20 nt, Human
uacaggaugaugacuaugga

SEQ ID NO: 1664567 - RNA, 14 nt, Human
uacaggauuugaaa

SEQ ID NO: 1664568 - RNA, 19 nt, Human
uacugcccaggccugccug

SEQ ID NO: 1664569 - RNA, 20 nt, Human
uacugcccaggccugccugu

SEQ ID NO: 1664570 - RNA, 21 nt, Human
uacugcccaggccugccuguu

SEQ ID NO: 1664571 - RNA, 22 nt, Human
uacugcccaggccugccuguuc

SEQ ID NO: 1664572 - RNA, 14 nt, Human
uacugccuauuuua

SEQ ID NO: 1664573 - RNA, 21 nt, Human
uacugccuauuuuaauaaaca

SEQ ID NO: 1664574 - RNA, 16 nt, Human
uacucuacccucuuag

SEQ ID NO: 1664575 - RNA, 15 nt, Human
uacuccccuccuuga

SEQ ID NO: 1664576 - RNA, 12 nt, Human
uacucccaucug

SEQ ID NO: 1664577 - RNA, 12 nt, Human
uacuccucccag

SEQ ID NO: 1664578 - RNA, 22 nt, Human
uacucgaguuacagacaaagcg

SEQ ID NO: 1664579 - RNA, 18 nt, Human
uacucgaguuacagacaa

SEQ ID NO: 1664580 - RNA, 14 nt, Human
uacuacaguuuguu

SEQ ID NO: 1664581 - RNA, 13 nt, Human
uacuacaguuugu

SEQ ID NO: 1664582 - RNA, 22 nt, Human
uacuacaguccucccaucucac

SEQ ID NO: 1664583 - RNA, 21 nt, Human
uacugucuucaguaagccgug

SEQ ID NO: 1664584 - RNA, 16 nt, Human
uacuguccuacccacc

SEQ ID NO: 1664585 - RNA, 23 nt, Human
uacugucagcuccccucggagaa

SEQ ID NO: 1664586 - RNA, 13 nt, Human
uacuugcucuuga

SEQ ID NO: 1664587 - RNA, 14 nt, Human
uacuugcucuugau

SEQ ID NO: 1664588 - RNA, 18 nt, Human
uacuugcucuugaugccu

SEQ ID NO: 1664589 - RNA, 19 nt, Human
uacuugcucuugaugccug

SEQ ID NO: 1664590 - RNA, 20 nt, Human
uacuugcucuugaugccugg

SEQ ID NO: 1664591 - RNA, 13 nt, Human
uacuuguggacac

SEQ ID NO: 1664592 - RNA, 18 nt, Human
uaccucggugccuuccuc

SEQ ID NO: 1664593 - RNA, 21 nt, Human
uaccucuugagccuugaacuu

SEQ ID NO: 1664594 - RNA, 22 nt, Human
uaccuuuuuuagaguugauacu

SEQ ID NO: 1664595 - RNA, 19 nt, Human
uaccuuuuuuagaguugau

SEQ ID NO: 1664596 - RNA, 13 nt, Human
uaccuuuuuuaga

SEQ ID NO: 1664597 - RNA, 17 nt, Human
uaccuuuuuuauacaua

SEQ ID NO: 1664598 - RNA, 16 nt, Human
uaccuuuuuuauacau

SEQ ID NO: 1664599 - RNA, 13 nt, Human
uaccuuuuuuaua

SEQ ID NO: 1664600 - RNA, 17 nt, Human
uacuaaaauggacugug

SEQ ID NO: 1664601 - RNA, 15 nt, Human
uacuaaaauggacug

SEQ ID NO: 1664602 - RNA, 18 nt, Human
uacgaaaagaggggaaga

SEQ ID NO: 1664603 - RNA, 21 nt, Human
uacgaaaagaggggaagagac

SEQ ID NO: 1664604 - RNA, 14 nt, Human
uacuaaggaaucuu

SEQ ID NO: 1664605 - RNA, 21 nt, Human
uacuaauagacaauuuauuau

SEQ ID NO: 1664606 - RNA, 22 nt, Human
uacuaauaaaauuuaaaagucu

SEQ ID NO: 1664607 - RNA, 20 nt, Human
uacuaauagacaauuuauua

SEQ ID NO: 1664608 - RNA, 23 nt, Human
uacuaaaauggacuguggugacu

SEQ ID NO: 1664609 - RNA, 17 nt, Human
uacuaaccagcagaaau

SEQ ID NO: 1664610 - RNA, 15 nt, Human
uaccuacauacaauu

SEQ ID NO: 1664611 - RNA, 13 nt, Human
uaccuacauguau

SEQ ID NO: 1664612 - RNA, 23 nt, Human
uaccuacauguauuuguuugcau

SEQ ID NO: 1664613 - RNA, 16 nt, Human
uaccuaucaucuuaag

SEQ ID NO: 1664614 - RNA, 18 nt, Human
uaccgagucucuucucca

SEQ ID NO: 1664615 - RNA, 21 nt, Human
uaccgagucucuucuccacug

SEQ ID NO: 1664616 - RNA, 17 nt, Human
uaccgagucucuucucc

SEQ ID NO: 1664617 - RNA, 16 nt, Human
uacccagcgagcccug

SEQ ID NO: 1664618 - RNA, 22 nt, Human
uaccgagucucuucuccacugg

SEQ ID NO: 1664619 - RNA, 22 nt, Human
uaccuaacgaaguauccuucag

SEQ ID NO: 1664620 - RNA, 23 nt, Human
uacauuuuuaagugcugcauuua

SEQ ID NO: 1664621 - RNA, 22 nt, Human
uaccaaaaaucucaauauuuca

SEQ ID NO: 1664622 - RNA, 21 nt, Human
uagacuggugacugauucuuc

SEQ ID NO: 1664623 - RNA, 23 nt, Human
uagacuggugacugauucuucag

SEQ ID NO: 1664624 - RNA, 20 nt, Human
uagacuggugacugauucuu

SEQ ID NO: 1664625 - RNA, 11 nt, Human
uagaauucugu

SEQ ID NO: 1664626 - RNA, 13 nt, Human
uagaauucuguau

SEQ ID NO: 1664627 - RNA, 14 nt, Human
uagaauucuguaua

SEQ ID NO: 1664628 - RNA, 15 nt, Human
uagaauucuguauag

SEQ ID NO: 1664629 - RNA, 16 nt, Human
uagaauucuguauaga

SEQ ID NO: 1664630 - RNA, 21 nt, Human
uagaauucuguauagauuaga

SEQ ID NO: 1664631 - RNA, 20 nt, Human
uagacccacuggacucaccu

SEQ ID NO: 1664632 - RNA, 13 nt, Human
uagagaaggaccc

SEQ ID NO: 1664633 - RNA, 22 nt, Human
uagagaaggacccggaggggcc

SEQ ID NO: 1664634 - RNA, 11 nt, Human
uagagacaggg

SEQ ID NO: 1664635 - RNA, 15 nt, Human
uagagguucaaagau

SEQ ID NO: 1664636 - RNA, 14 nt, Human
uagagguucaaaga

SEQ ID NO: 1664637 - RNA, 12 nt, Human
uagagugggagc

SEQ ID NO: 1664638 - RNA, 17 nt, Human
uagaguugauacuacag

SEQ ID NO: 1664639 - RNA, 14 nt, Human
uagaguugauacua

SEQ ID NO: 1664640 - RNA, 13 nt, Human
uagagugucuuaa

SEQ ID NO: 1664641 - RNA, 14 nt, Human
uacuuguggacaca

SEQ ID NO: 1664642 - RNA, 23 nt, Human
uagaauaccacaggaaccacaag

SEQ ID NO: 1664643 - RNA, 15 nt, Human
uagaauuaacacaug

SEQ ID NO: 1664644 - RNA, 16 nt, Human
uagaauuaacacauga

SEQ ID NO: 1664645 - RNA, 23 nt, Human
uagaauuaguggcacuugcuuuu

SEQ ID NO: 1664646 - RNA, 18 nt, Human
uagaauuaacacaugauc

SEQ ID NO: 1664647 - RNA, 13 nt, Human
uagcauccuggaa

SEQ ID NO: 1664648 - RNA, 15 nt, Human
uagcauccuggaaua

SEQ ID NO: 1664649 - RNA, 16 nt, Human
uagcauccuggaauau

SEQ ID NO: 1664650 - RNA, 18 nt, Human
uagcauccuggaauaucu

SEQ ID NO: 1664651 - RNA, 19 nt, Human
uagcauacguacacauuuu

SEQ ID NO: 1664652 - RNA, 18 nt, Human
uagcauacguacacauuu

SEQ ID NO: 1664653 - RNA, 17 nt, Human
uagcauacguacacauu

SEQ ID NO: 1664654 - RNA, 16 nt, Human
uagcauacguacacau

SEQ ID NO: 1664655 - RNA, 11 nt, Human
uagcagggaaa

SEQ ID NO: 1664656 - RNA, 20 nt, Human
uagauuagagaguguugaaa

SEQ ID NO: 1664657 - RNA, 16 nt, Human
uagauuagaauucugu

SEQ ID NO: 1664658 - RNA, 17 nt, Human
uagauuagaauucugua

SEQ ID NO: 1664659 - RNA, 19 nt, Human
uagauuagaauucuguaua

SEQ ID NO: 1664660 - RNA, 20 nt, Human
uagauuagaauucuguauag

SEQ ID NO: 1664661 - RNA, 14 nt, Human
uagauuagaauucu

SEQ ID NO: 1664662 - RNA, 15 nt, Human
uagauuagaauucug

SEQ ID NO: 1664663 - RNA, 16 nt, Human
uagauacuguaucaug

SEQ ID NO: 1664664 - RNA, 14 nt, Human
uagauaggccaugg

SEQ ID NO: 1664665 - RNA, 18 nt, Human
uagccugugccucuggga

SEQ ID NO: 1664666 - RNA, 20 nt, Human
uagccugugccucugggacu

SEQ ID NO: 1664667 - RNA, 12 nt, Human
uagcucauucuc

SEQ ID NO: 1664668 - RNA, 20 nt, Human
uagcucaggugucccugcac

SEQ ID NO: 1664669 - RNA, 21 nt, Human
uagcucaggugucccugcacu

SEQ ID NO: 1664670 - RNA, 15 nt, Human
uagcugggacuacag

SEQ ID NO: 1664671 - RNA, 17 nt, Human
uagcugggacuacaggc

SEQ ID NO: 1664672 - RNA, 19 nt, Human
uagcugggacuacaggcac

SEQ ID NO: 1664673 - RNA, 16 nt, Human
uagccccucuccugga

SEQ ID NO: 1664674 - RNA, 16 nt, Human
uagccuaggugacaga

SEQ ID NO: 1664675 - RNA, 18 nt, Human
uauaaaccgaacugaugu

SEQ ID NO: 1664676 - RNA, 11 nt, Human
uauaaacuuua

SEQ ID NO: 1664677 - RNA, 14 nt, Human
uauaaacuuuaccu

SEQ ID NO: 1664678 - RNA, 13 nt, Human
uauaaacuuuacc

SEQ ID NO: 1664679 - RNA, 18 nt, Human
uauaaacuuuaccuuuuu

SEQ ID NO: 1664680 - RNA, 17 nt, Human
uauaaacuuuaccuuuu

SEQ ID NO: 1664681 - RNA, 16 nt, Human
uauaaacuuuaccuuu

SEQ ID NO: 1664682 - RNA, 15 nt, Human
uauaaacuuuaccuu

SEQ ID NO: 1664683 - RNA, 15 nt, Human
uaguuugauuaaauu

SEQ ID NO: 1664684 - RNA, 21 nt, Human
uaguuugauuaaauucuugca

SEQ ID NO: 1664685 - RNA, 16 nt, Human
uaguuugauuaaauuc

SEQ ID NO: 1664686 - RNA, 20 nt, Human
uaguuguuugauucagacag

SEQ ID NO: 1664687 - RNA, 21 nt, Human
uaguuguuugauucagacagc

SEQ ID NO: 1664688 - RNA, 22 nt, Human
uaguuguuugauucagacagcu

SEQ ID NO: 1664689 - RNA, 20 nt, Human
uaguggcuuaaaacaacacu

SEQ ID NO: 1664690 - RNA, 16 nt, Human
uaguaugguggcuggg

SEQ ID NO: 1664691 - RNA, 17 nt, Human
uaguauuguccaggucu

SEQ ID NO: 1664692 - RNA, 22 nt, Human
uagcuggucuuauuuguaaagc

SEQ ID NO: 1664693 - RNA, 11 nt, Human
uagggaaaaac

SEQ ID NO: 1664694 - RNA, 11 nt, Human
uaggugacaga

SEQ ID NO: 1664695 - RNA, 16 nt, Human
uaggugacagagugag

SEQ ID NO: 1664696 - RNA, 23 nt, Human
uaggugcuacaaaaacacagcaa

SEQ ID NO: 1664697 - RNA, 20 nt, Human
uaggugcuacaaaaacacag

SEQ ID NO: 1664698 - RNA, 22 nt, Human
uaggugcuacaaaaacacagca

SEQ ID NO: 1664699 - RNA, 18 nt, Human
uaguaugaggcauuuguu

SEQ ID NO: 1664700 - RNA, 17 nt, Human
uaguaugaggcauuugu

SEQ ID NO: 1664701 - RNA, 23 nt, Human
uaggugugacugaauuucuuuug

SEQ ID NO: 1664702 - RNA, 21 nt, Human
uaggugugacugaauuucuuu

SEQ ID NO: 1664703 - RNA, 19 nt, Human
uaggugugacugaauuucu

SEQ ID NO: 1664704 - RNA, 13 nt, Human
uagguguggggga

SEQ ID NO: 1664705 - RNA, 17 nt, Human
uaggugugggggaagca

SEQ ID NO: 1664706 - RNA, 16 nt, Human
uauauuuucauucucc

SEQ ID NO: 1664707 - RNA, 16 nt, Human
uauauuuuuuucugaa

SEQ ID NO: 1664708 - RNA, 19 nt, Human
uauauuuuuuucugaaauu

SEQ ID NO: 1664709 - RNA, 20 nt, Human
uauauuuuuuucugaaauuu

SEQ ID NO: 1664710 - RNA, 21 nt, Human
uauauuuuuuguuaaaugauu

SEQ ID NO: 1664711 - RNA, 20 nt, Human
uauauuugaaauauugacuu

SEQ ID NO: 1664712 - RNA, 14 nt, Human
uauaugcuucuguu

SEQ ID NO: 1664713 - RNA, 16 nt, Human
uauaugcuucuguuuu

SEQ ID NO: 1664714 - RNA, 20 nt, Human
uaucaggugcugccauccag

SEQ ID NO: 1664715 - RNA, 19 nt, Human
uaucaggugcugccaucca

SEQ ID NO: 1664716 - RNA, 14 nt, Human
uaucaaaagaaaga

SEQ ID NO: 1664717 - RNA, 14 nt, Human
uaucaucaguauug

SEQ ID NO: 1664718 - RNA, 15 nt, Human
uaucaucaguauuga

SEQ ID NO: 1664719 - RNA, 16 nt, Human
uaucaucaguauugaa

SEQ ID NO: 1664720 - RNA, 20 nt, Human
uauagaaccucuuugucuac

SEQ ID NO: 1664721 - RNA, 21 nt, Human
uauagaaccucuuugucuaca

SEQ ID NO: 1664722 - RNA, 17 nt, Human
uauauaacaaugcugua

SEQ ID NO: 1664723 - RNA, 19 nt, Human
uauauaacaaugcuguauu

SEQ ID NO: 1664724 - RNA, 23 nt, Human
uauaucugaggaauucuguauag

SEQ ID NO: 1664725 - RNA, 17 nt, Human
uaaucuggacuccucug

SEQ ID NO: 1664726 - RNA, 18 nt, Human
uaaucuggacuccucugu

SEQ ID NO: 1664727 - RNA, 15 nt, Human
uaaucuggacuccuc

SEQ ID NO: 1664728 - RNA, 19 nt, Human
uaaucuggacuccucuguc

SEQ ID NO: 1664729 - RNA, 20 nt, Human
uaaucuggacuccucugucc

SEQ ID NO: 1664730 - RNA, 21 nt, Human
uaaucuggacuccucugucca

SEQ ID NO: 1664731 - RNA, 22 nt, Human
uaaucuggacuccucuguccag

SEQ ID NO: 1664732 - RNA, 18 nt, Human
uaaucugggccagaauuu

SEQ ID NO: 1664733 - RNA, 23 nt, Human
uaaucugggccagaauuucaaac

SEQ ID NO: 1664734 - RNA, 13 nt, Human
uaaucuaaaugga

SEQ ID NO: 1664735 - RNA, 20 nt, Human
uaauccucuaggaggucucu

SEQ ID NO: 1664736 - RNA, 17 nt, Human
uaauauuaaagccaugu

SEQ ID NO: 1664737 - RNA, 20 nt, Human
uaauauuaaagccauguuua

SEQ ID NO: 1664738 - RNA, 21 nt, Human
uaauauuaaagccauguuuau

SEQ ID NO: 1664739 - RNA, 20 nt, Human
uaauauuaaggaagacaaug

SEQ ID NO: 1664740 - RNA, 18 nt, Human
uaauaugcacacauuuuu

SEQ ID NO: 1664741 - RNA, 17 nt, Human
uaauaugcacacauuuu

SEQ ID NO: 1664742 - RNA, 16 nt, Human
uaauaugcacacauuu

SEQ ID NO: 1664743 - RNA, 15 nt, Human
uaauaugcacacauu

SEQ ID NO: 1664744 - RNA, 16 nt, Human
uaauauuaaagccaug

SEQ ID NO: 1664745 - RNA, 19 nt, Human
uaauaugcacacauuuuuu

SEQ ID NO: 1664746 - RNA, 14 nt, Human
uaauaauguuucaa

SEQ ID NO: 1664747 - RNA, 23 nt, Human
uaauaucaucaguauugaagcau

SEQ ID NO: 1664748 - RNA, 15 nt, Human
uaauggggcggugag

SEQ ID NO: 1664749 - RNA, 23 nt, Human
uaaugcgugcauaccacuuuugu

SEQ ID NO: 1664750 - RNA, 22 nt, Human
uaaugcgugcauaccacuuuug

SEQ ID NO: 1664751 - RNA, 19 nt, Human
uaaugcgugcauaccacuu

SEQ ID NO: 1664752 - RNA, 17 nt, Human
uaaugauaacuggaaac

SEQ ID NO: 1664753 - RNA, 22 nt, Human
uaaugauaacuggaaacuucag

SEQ ID NO: 1664754 - RNA, 15 nt, Human
uaaugcgugcauacc

SEQ ID NO: 1664755 - RNA, 23 nt, Human
uaaugauaacuggaaacuucagc

SEQ ID NO: 1664756 - RNA, 21 nt, Human
uaauuaacauguuaaaccaug

SEQ ID NO: 1664757 - RNA, 14 nt, Human
uaauuaaguacuau

SEQ ID NO: 1664758 - RNA, 17 nt, Human
uaauuaaguacuaugua

SEQ ID NO: 1664759 - RNA, 20 nt, Human
uaauuaaguacuauguauca

SEQ ID NO: 1664760 - RNA, 22 nt, Human
uaauguuucaaacauauauaac

SEQ ID NO: 1664761 - RNA, 14 nt, Human
uaaggcaaucaugg

SEQ ID NO: 1664762 - RNA, 20 nt, Human
uaaggauuuuaugcuuuaaa

SEQ ID NO: 1664763 - RNA, 22 nt, Human
uaaggauuuuaugcuuuaaaca

SEQ ID NO: 1664764 - RNA, 14 nt, Human
uaagcuauucagua

SEQ ID NO: 1664765 - RNA, 12 nt, Human
uaaggauuuuau

SEQ ID NO: 1664766 - RNA, 13 nt, Human
uaaggauuuuaug

SEQ ID NO: 1664767 - RNA, 17 nt, Human
uaaggauuuuaugcuuu

SEQ ID NO: 1664768 - RNA, 19 nt, Human
uaaggauuuuaugcuuuaa

SEQ ID NO: 1664769 - RNA, 12 nt, Human
uaagaggcaggg

SEQ ID NO: 1664770 - RNA, 15 nt, Human
uaagaggcagggucu

SEQ ID NO: 1664771 - RNA, 17 nt, Human
uaaggguaucuggugac

SEQ ID NO: 1664772 - RNA, 15 nt, Human
uaaggugugcucuga

SEQ ID NO: 1664773 - RNA, 20 nt, Human
uaagguggguacgggagggu

SEQ ID NO: 1664774 - RNA, 22 nt, Human
uaagugauugcugguuuuaguu

SEQ ID NO: 1664775 - RNA, 12 nt, Human
uaagugagagag

SEQ ID NO: 1664776 - RNA, 23 nt, Human
uaagugaggaugaaaaaauaaca

SEQ ID NO: 1664777 - RNA, 14 nt, Human
uaagugcugcauuu

SEQ ID NO: 1664778 - RNA, 13 nt, Human
uaagugaaauaag

SEQ ID NO: 1664779 - RNA, 13 nt, Human
uaagucuguuuua

SEQ ID NO: 1664780 - RNA, 16 nt, Human
uaagucuguuuuauga

SEQ ID NO: 1664781 - RNA, 19 nt, Human
uaagucuguuuuaugacuu

SEQ ID NO: 1664782 - RNA, 20 nt, Human
uaagucuguuuuaugacuuc

SEQ ID NO: 1664783 - RNA, 21 nt, Human
uaagucuguuuuaugacuuca

SEQ ID NO: 1664784 - RNA, 22 nt, Human
uaagugcugcauuuaaaagaua

SEQ ID NO: 1664785 - RNA, 18 nt, Human
uaagugcugcauuuaaaa

SEQ ID NO: 1664786 - RNA, 16 nt, Human
uaagugcugcauuuaa

SEQ ID NO: 1664787 - RNA, 15 nt, Human
uaagugcugcauuua

SEQ ID NO: 1664788 - RNA, 15 nt, Human
uaaguggugugugua

SEQ ID NO: 1664789 - RNA, 16 nt, Human
uaagugguguguguau

SEQ ID NO: 1664790 - RNA, 12 nt, Human
uaauaaagcugu

SEQ ID NO: 1664791 - RNA, 16 nt, Human
uaauaaggaaaaguuu

SEQ ID NO: 1664792 - RNA, 18 nt, Human
uaauaaggaaaaguuuaa

SEQ ID NO: 1664793 - RNA, 16 nt, Human
uaacuauguugauaaa

SEQ ID NO: 1664794 - RNA, 12 nt, Human
uaacagaaaugu

SEQ ID NO: 1664795 - RNA, 11 nt, Human
uaacagaaaug

SEQ ID NO: 1664796 - RNA, 13 nt, Human
uaaccagaucauu

SEQ ID NO: 1664797 - RNA, 16 nt, Human
uaaccacuucagcuga

SEQ ID NO: 1664798 - RNA, 23 nt, Human
uaaccaguguuguggauuuaaca

SEQ ID NO: 1664799 - RNA, 17 nt, Human
uaaccaggggccaugaa

SEQ ID NO: 1664800 - RNA, 14 nt, Human
uaagagagaaugag

SEQ ID NO: 1664801 - RNA, 23 nt, Human
uaagagagaaugagagacacacu

SEQ ID NO: 1664802 - RNA, 19 nt, Human
uaagaaccuuuugagugcc

SEQ ID NO: 1664803 - RNA, 13 nt, Human
uaagagagaauga

SEQ ID NO: 1664804 - RNA, 24 nt, Human
uaagaaagacuaucuaaauguuga

SEQ ID NO: 1664805 - RNA, 21 nt, Human
uaagaaaauaucacuugucaa

SEQ ID NO: 1664806 - RNA, 18 nt, Human
uaagaaaaaggaugcaca

SEQ ID NO: 1664807 - RNA, 16 nt, Human
uaagaaaaaggaugca

SEQ ID NO: 1664808 - RNA, 23 nt, Human
uaagaaaaaggaugcacagaguu

SEQ ID NO: 1664809 - RNA, 19 nt, Human
uaagaaaaaggaugcacag

SEQ ID NO: 1664810 - RNA, 15 nt, Human
uaacuggaaacuuca

SEQ ID NO: 1664811 - RNA, 21 nt, Human
uaacuguuauuuauaaucacu

SEQ ID NO: 1664812 - RNA, 16 nt, Human
uaacuguuauuuauaa

SEQ ID NO: 1664813 - RNA, 17 nt, Human
uaacuguuauuuauaau

SEQ ID NO: 1664814 - RNA, 16 nt, Human
uaaaguugguaaaccu

SEQ ID NO: 1664815 - RNA, 17 nt, Human
uaaaguugguaaaccuu

SEQ ID NO: 1664816 - RNA, 16 nt, Human
uaaaugccaucaauaa

SEQ ID NO: 1664817 - RNA, 23 nt, Human
uaaaugccaucaauaaaaaauua

SEQ ID NO: 1664818 - RNA, 13 nt, Human
uaaaugcccagcc

SEQ ID NO: 1664819 - RNA, 17 nt, Human
uaaaugcugcuuuuucu

SEQ ID NO: 1664820 - RNA, 11 nt, Human
uaaaugcugcu

SEQ ID NO: 1664821 - RNA, 16 nt, Human
uaaauggaaccacucu

SEQ ID NO: 1664822 - RNA, 14 nt, Human
uaaaugcccagccc

SEQ ID NO: 1664823 - RNA, 15 nt, Human
uaaaugcccagcccc

SEQ ID NO: 1664824 - RNA, 16 nt, Human
uaaaugcccagccccu

SEQ ID NO: 1664825 - RNA, 17 nt, Human
uaaaugcccagccccuu

SEQ ID NO: 1664826 - RNA, 20 nt, Human
uaaaugucuaguuguaacac

SEQ ID NO: 1664827 - RNA, 22 nt, Human
uaaaugucucuuuaaugucaca

SEQ ID NO: 1664828 - RNA, 19 nt, Human
uaaaugggggugcauuuga

SEQ ID NO: 1664829 - RNA, 18 nt, Human
uaaaugggggugcauuug

SEQ ID NO: 1664830 - RNA, 14 nt, Human
uaaaugguuaaaag

SEQ ID NO: 1664831 - RNA, 17 nt, Human
uaaaugggggugcauuu

SEQ ID NO: 1664832 - RNA, 14 nt, Human
uaaaugggggugca

SEQ ID NO: 1664833 - RNA, 20 nt, Human
uaaauggcuuccuggcaaua

SEQ ID NO: 1664834 - RNA, 16 nt, Human
uaaauucuugcaaagu

SEQ ID NO: 1664835 - RNA, 22 nt, Human
uaaauucuugcaaaguaucccu

SEQ ID NO: 1664836 - RNA, 18 nt, Human
uaaauucuugcaaaguau

SEQ ID NO: 1664837 - RNA, 17 nt, Human
uaaauucuugcaaagua

SEQ ID NO: 1664838 - RNA, 16 nt, Human
uaaaugugccuucauu

SEQ ID NO: 1664839 - RNA, 11 nt, Human
uaaauuauuuu

SEQ ID NO: 1664840 - RNA, 16 nt, Human
uaaaugugcuuuuaaa

SEQ ID NO: 1664841 - RNA, 18 nt, Human
uaacaccaugauuaacca

SEQ ID NO: 1664842 - RNA, 13 nt, Human
uaaauucuuucau

SEQ ID NO: 1664843 - RNA, 20 nt, Human
uaaauugacacuuaaaaaug

SEQ ID NO: 1664844 - RNA, 22 nt, Human
uaaauuuaguauuuuguuucag

SEQ ID NO: 1664845 - RNA, 23 nt, Human
uaaauugacacuuaaaaaugguu

SEQ ID NO: 1664846 - RNA, 15 nt, Human
uaaacacucuugaaa

SEQ ID NO: 1664847 - RNA, 17 nt, Human
uaaacacucuugaaaaa

SEQ ID NO: 1664848 - RNA, 18 nt, Human
uaaacacucuugaaaaau

SEQ ID NO: 1664849 - RNA, 16 nt, Human
uaaaaucuugaaaaug

SEQ ID NO: 1664850 - RNA, 20 nt, Human
uaaacaagaccacguuucua

SEQ ID NO: 1664851 - RNA, 22 nt, Human
uaaacaagaccacguuucuaaa

SEQ ID NO: 1664852 - RNA, 21 nt, Human
uaaacaagaccacguuucuaa

SEQ ID NO: 1664853 - RNA, 13 nt, Human
uaaacuuaaucua

SEQ ID NO: 1664854 - RNA, 22 nt, Human
uaaacuugguuuuuaaaaaacu

SEQ ID NO: 1664855 - RNA, 19 nt, Human
uaaacauugguucuuguau

SEQ ID NO: 1664856 - RNA, 21 nt, Human
uaaacauugguucuuguauua

SEQ ID NO: 1664857 - RNA, 11 nt, Human
uaaagccaugu

SEQ ID NO: 1664858 - RNA, 13 nt, Human
uaaagccauguuu

SEQ ID NO: 1664859 - RNA, 15 nt, Human
uaaagccauguuuau

SEQ ID NO: 1664860 - RNA, 20 nt, Human
uaaagccauguuuauuacag

SEQ ID NO: 1664861 - RNA, 18 nt, Human
uaaagcaggcagaacuca

SEQ ID NO: 1664862 - RNA, 19 nt, Human
uaaagcagcguuucuauga

SEQ ID NO: 1664863 - RNA, 17 nt, Human
uaaagcagcguuucuau

SEQ ID NO: 1664864 - RNA, 16 nt, Human
uaaagcagcguuucua

SEQ ID NO: 1664865 - RNA, 12 nt, Human
uaaagaaaacug

SEQ ID NO: 1664866 - RNA, 14 nt, Human
uaaagcugaaaacu

SEQ ID NO: 1664867 - RNA, 20 nt, Human
uaaagccugaguuugcuuuc

SEQ ID NO: 1664868 - RNA, 15 nt, Human
uaaaggcuaccuuug

SEQ ID NO: 1664869 - RNA, 14 nt, Human
uaaaggaauuuaaa

SEQ ID NO: 1664870 - RNA, 17 nt, Human
uaaaggcuaccuuugua

SEQ ID NO: 1664871 - RNA, 14 nt, Human
uaaaguguuugaaa

SEQ ID NO: 1664872 - RNA, 12 nt, Human
uaaaaggagcca

SEQ ID NO: 1664873 - RNA, 21 nt, Human
uaaaagguaugcaaucaaauc

SEQ ID NO: 1664874 - RNA, 15 nt, Human
uaaaauccauacauu

SEQ ID NO: 1664875 - RNA, 17 nt, Human
uaaaauccauacauuug

SEQ ID NO: 1664876 - RNA, 18 nt, Human
uaaaaucauuucugcauc

SEQ ID NO: 1664877 - RNA, 22 nt, Human
uaaaaucauuucugcaucagcu

SEQ ID NO: 1664878 - RNA, 19 nt, Human
uaaaaggugaccaaugaug

SEQ ID NO: 1664879 - RNA, 12 nt, Human
uaaaaggugacc

SEQ ID NO: 1664880 - RNA, 10 nt, Human
uaaaaucauu

SEQ ID NO: 1664881 - RNA, 13 nt, Human
uaaaaucauuucu

SEQ ID NO: 1664882 - RNA, 21 nt, Human
uaaaagauacaguuacucaga

SEQ ID NO: 1664883 - RNA, 14 nt, Human
uaaaagauacaguu

SEQ ID NO: 1664884 - RNA, 19 nt, Human
uaaaagagguuuuucuuaa

SEQ ID NO: 1664885 - RNA, 21 nt, Human
uaaaagagguuuuucuuaaau

SEQ ID NO: 1664886 - RNA, 20 nt, Human
uaaaagauacaguuacucag

SEQ ID NO: 1664887 - RNA, 17 nt, Human
uaaaagauacaguuacu

SEQ ID NO: 1664888 - RNA, 13 nt, Human
uaaaaccacagca

SEQ ID NO: 1664889 - RNA, 18 nt, Human
uaaaagagguuuuucuua

SEQ ID NO: 1664890 - RNA, 19 nt, Human
uaaaacacuuccauaaucu

SEQ ID NO: 1664891 - RNA, 17 nt, Human
uaaaacacaacaucuuu

SEQ ID NO: 1664892 - RNA, 22 nt, Human
uaaaacacaacaucuuuuucua

SEQ ID NO: 1664893 - RNA, 23 nt, Human
uaaaacacaacaucuuuuucuac

SEQ ID NO: 1664894 - RNA, 15 nt, Human
uaaaacaacacucac

SEQ ID NO: 1664895 - RNA, 22 nt, Human
uaaaacaagcacuaaacaaaga

SEQ ID NO: 1664896 - RNA, 19 nt, Human
uaaaaaugguuuaaauggu

SEQ ID NO: 1664897 - RNA, 18 nt, Human
uaaaaaugguuuaaaugg

SEQ ID NO: 1664898 - RNA, 21 nt, Human
guuuuuaaggguuuguggaaa

SEQ ID NO: 1664899 - RNA, 21 nt, Human
uaaaaacaaagaaauuaugug

SEQ ID NO: 1664900 - RNA, 17 nt, Human
uaaaaacaaagaaauua

SEQ ID NO: 1664901 - RNA, 17 nt, Human
guuuuaaaaugagaaau

SEQ ID NO: 1664902 - RNA, 20 nt, Human
guuuucaaaauuguuacaaa

SEQ ID NO: 1664903 - RNA, 17 nt, Human
guuuucaaaauaaaaau

SEQ ID NO: 1664904 - RNA, 11 nt, Human
guuuucacucu

SEQ ID NO: 1664905 - RNA, 12 nt, Human
guuuucacucuu

SEQ ID NO: 1664906 - RNA, 15 nt, Human
guuuuaaaaugagaa

SEQ ID NO: 1664907 - RNA, 16 nt, Human
guuuuaaaaugagaaa

SEQ ID NO: 1664908 - RNA, 20 nt, Human
guuuguuucugaaagggacg

SEQ ID NO: 1664909 - RNA, 13 nt, Human
guuuuccugaaga

SEQ ID NO: 1664910 - RNA, 19 nt, Human
guuuuccaugaguccccug

SEQ ID NO: 1664911 - RNA, 20 nt, Human
guuuuccaugaguccccugu

SEQ ID NO: 1664912 - RNA, 16 nt, Human
guuuugguugcuuuaa

SEQ ID NO: 1664913 - RNA, 18 nt, Human
guuucuuuguaaugaaaa

SEQ ID NO: 1664914 - RNA, 19 nt, Human
guuucuuuguaaugaaaac

SEQ ID NO: 1664915 - RNA, 17 nt, Human
guuugagaucagccugg

SEQ ID NO: 1664916 - RNA, 23 nt, Human
guuugauuaaauucuugcaaagu

SEQ ID NO: 1664917 - RNA, 18 nt, Human
guuugagaucagccuggg

SEQ ID NO: 1664918 - RNA, 16 nt, Human
guuugauucagacagc

SEQ ID NO: 1664919 - RNA, 20 nt, Human
guuugauucagacagcugcc

SEQ ID NO: 1664920 - RNA, 21 nt, Human
guuugauucagacagcugccu

SEQ ID NO: 1664921 - RNA, 18 nt, Human
guuuguuucugaaaggga

SEQ ID NO: 1664922 - RNA, 15 nt, Human
guuuagauaauacac

SEQ ID NO: 1664923 - RNA, 14 nt, Human
guuuagauaauaca

SEQ ID NO: 1664924 - RNA, 18 nt, Human
guuguuugagaaauuaag

SEQ ID NO: 1664925 - RNA, 15 nt, Human
guuguuacauuuuua

SEQ ID NO: 1664926 - RNA, 14 nt, Human
guuguuacauuuuu

SEQ ID NO: 1664927 - RNA, 20 nt, Human
guuguuugauucagacagcu

SEQ ID NO: 1664928 - RNA, 20 nt, Human
guuuagcuggaaaaguaugu

SEQ ID NO: 1664929 - RNA, 21 nt, Human
guuuagcuggaaaaguauguu

SEQ ID NO: 1664930 - RNA, 19 nt, Human
guuuaggaacuacugagga

SEQ ID NO: 1664931 - RNA, 20 nt, Human
guuuaggauguugaaaaagu

SEQ ID NO: 1664932 - RNA, 20 nt, Human
guuuauauaagcuuguauuc

SEQ ID NO: 1664933 - RNA, 12 nt, Human
guugucagcuga

SEQ ID NO: 1664934 - RNA, 23 nt, Human
guuggcugggggccucagugcca

SEQ ID NO: 1664935 - RNA, 19 nt, Human
guuggcugggggccucagu

SEQ ID NO: 1664936 - RNA, 12 nt, Human
guuggcuggggg

SEQ ID NO: 1664937 - RNA, 20 nt, Human
guuggccccugcccggcugc

SEQ ID NO: 1664938 - RNA, 13 nt, Human
guuggccccugcc

SEQ ID NO: 1664939 - RNA, 14 nt, Human
guuggccccugccc

SEQ ID NO: 1664940 - RNA, 22 nt, Human
guuguggauuuaacagaaaugu

SEQ ID NO: 1664941 - RNA, 14 nt, Human
guugugguuaaucu

SEQ ID NO: 1664942 - RNA, 19 nt, Human
guugucugaagucacugca

SEQ ID NO: 1664943 - RNA, 22 nt, Human
guugucugaagucacugcacag

SEQ ID NO: 1664944 - RNA, 19 nt, Human
guugucugcaacucugaag

SEQ ID NO: 1664945 - RNA, 18 nt, Human
guuccuuccucugagccu

SEQ ID NO: 1664946 - RNA, 19 nt, Human
guuccuuccucugagccuu

SEQ ID NO: 1664947 - RNA, 17 nt, Human
guuccuuccucugagcc

SEQ ID NO: 1664948 - RNA, 15 nt, Human
guucugcacacagca

SEQ ID NO: 1664949 - RNA, 16 nt, Human
guucugcacacagcac

SEQ ID NO: 1664950 - RNA, 19 nt, Human
guucugauccuaguuccac

SEQ ID NO: 1664951 - RNA, 12 nt, Human
guucugaagaag

SEQ ID NO: 1664952 - RNA, 13 nt, Human
guucugaagaaga

SEQ ID NO: 1664953 - RNA, 14 nt, Human
guucugaagaagau

SEQ ID NO: 1664954 - RNA, 15 nt, Human
guucugaagaagaug

SEQ ID NO: 1664955 - RNA, 23 nt, Human
guucuggcagaguugaagacaga

SEQ ID NO: 1664956 - RNA, 12 nt, Human
guucuggcucuu

SEQ ID NO: 1664957 - RNA, 16 nt, Human
guucuggcucuuccag

SEQ ID NO: 1664958 - RNA, 20 nt, Human
guucuggcucuuccaggcug

SEQ ID NO: 1664959 - RNA, 11 nt, Human
guucugggaca

SEQ ID NO: 1664960 - RNA, 12 nt, Human
guucugggacac

SEQ ID NO: 1664961 - RNA, 14 nt, Human
guucugggacacag

SEQ ID NO: 1664962 - RNA, 15 nt, Human
guucugggacacagu

SEQ ID NO: 1664963 - RNA, 16 nt, Human
guucugggacacaguu

SEQ ID NO: 1664964 - RNA, 23 nt, Human
guucugggacacaguucaauucu

SEQ ID NO: 1664965 - RNA, 18 nt, Human
guucuuucacccuuuucu

SEQ ID NO: 1664966 - RNA, 16 nt, Human
guucuuucuuccucug

SEQ ID NO: 1664967 - RNA, 17 nt, Human
guucuuucuuccucugc

SEQ ID NO: 1664968 - RNA, 18 nt, Human
guucuuucuuccucugcu

SEQ ID NO: 1664969 - RNA, 19 nt, Human
guucuuucuuccucugcug

SEQ ID NO: 1664970 - RNA, 14 nt, Human
guucuuucuuccuc

SEQ ID NO: 1664971 - RNA, 15 nt, Human
guucuuucuuccucu

SEQ ID NO: 1664972 - RNA, 20 nt, Human
guucuuuccaaaguacacug

SEQ ID NO: 1664973 - RNA, 18 nt, Human
guucuuuccaaaguacac

SEQ ID NO: 1664974 - RNA, 14 nt, Human
guucuuuccaaagu

SEQ ID NO: 1664975 - RNA, 13 nt, Human
guucuuuccaaag

SEQ ID NO: 1664976 - RNA, 17 nt, Human
guugaaaaacagcugag

SEQ ID NO: 1664977 - RNA, 23 nt, Human
guugaaaagacuccaaagaaaug

SEQ ID NO: 1664978 - RNA, 17 nt, Human
guugaaaagacuccaaa

SEQ ID NO: 1664979 - RNA, 22 nt, Human
guugaaaagacuccaaagaaau

SEQ ID NO: 1664980 - RNA, 12 nt, Human
guugcccaggca

SEQ ID NO: 1664981 - RNA, 15 nt, Human
guugcccaggcaggu

SEQ ID NO: 1664982 - RNA, 14 nt, Human
guugcccaggcagg

SEQ ID NO: 1664983 - RNA, 13 nt, Human
guugccagucacc

SEQ ID NO: 1664984 - RNA, 14 nt, Human
guugccagucaccc

SEQ ID NO: 1664985 - RNA, 16 nt, Human
guugccagucaccccg

SEQ ID NO: 1664986 - RNA, 17 nt, Human
guugccagucaccccgg

SEQ ID NO: 1664987 - RNA, 18 nt, Human
guugccagucaccccggc

SEQ ID NO: 1664988 - RNA, 23 nt, Human
guugccagucaccccggccaccu

SEQ ID NO: 1664989 - RNA, 14 nt, Human
guuggccaggcugc

SEQ ID NO: 1664990 - RNA, 13 nt, Human
guuggccaggcug

SEQ ID NO: 1664991 - RNA, 15 nt, Human
guuggccaggcuggu

SEQ ID NO: 1664992 - RNA, 14 nt, Human
guuggccaggcugg

SEQ ID NO: 1664993 - RNA, 19 nt, Human
guuggccaggcugcucuug

SEQ ID NO: 1664994 - RNA, 18 nt, Human
guuggccaggcuggucuc

SEQ ID NO: 1664995 - RNA, 17 nt, Human
guuggccaggcuggucu

SEQ ID NO: 1664996 - RNA, 19 nt, Human
guuggccaggcuggucuca

SEQ ID NO: 1664997 - RNA, 14 nt, Human
guuggccaguguga

SEQ ID NO: 1664998 - RNA, 23 nt, Human
guuggccaaagccaaagcuaggc

SEQ ID NO: 1664999 - RNA, 14 nt, Human
guuggcaaaaaggc

SEQ ID NO: 1665000 - RNA, 18 nt, Human
guuggcaaaaaggcagga

SEQ ID NO: 1665001 - RNA, 16 nt, Human
guugcaacuuuguaua

SEQ ID NO: 1665002 - RNA, 14 nt, Human
guugcaacuuugua

SEQ ID NO: 1665003 - RNA, 15 nt, Human
guugcaggaccucag

SEQ ID NO: 1665004 - RNA, 21 nt, Human
guugaaacggaugauuucuau

SEQ ID NO: 1665005 - RNA, 22 nt, Human
guugaaacggaugauuucuaug

SEQ ID NO: 1665006 - RNA, 16 nt, Human
guugaaauuguaauua

SEQ ID NO: 1665007 - RNA, 20 nt, Human
guugaaauuguaauuauauc

SEQ ID NO: 1665008 - RNA, 15 nt, Human
guugaaauuguaauu

SEQ ID NO: 1665009 - RNA, 18 nt, Human
guugaagagguuuuaaag

SEQ ID NO: 1665010 - RNA, 16 nt, Human
guugaagacagagcua

SEQ ID NO: 1665011 - RNA, 14 nt, Human
guugaauuuauugg

SEQ ID NO: 1665012 - RNA, 13 nt, Human
guugaagccuuug

SEQ ID NO: 1665013 - RNA, 14 nt, Human
guugaagccuuugu

SEQ ID NO: 1665014 - RNA, 21 nt, Human
guugaauuuauuggcuuuucu

SEQ ID NO: 1665015 - RNA, 22 nt, Human
guugaauuuauuggcuuuucug

SEQ ID NO: 1665016 - RNA, 20 nt, Human
guugauggugguauguuuuc

SEQ ID NO: 1665017 - RNA, 21 nt, Human
guugauggugguauguuuuca

SEQ ID NO: 1665018 - RNA, 23 nt, Human
guuccagcaauucuccugccuca

SEQ ID NO: 1665019 - RNA, 20 nt, Human
guuccagcaauucuccugcc

SEQ ID NO: 1665020 - RNA, 21 nt, Human
guuccagcaauucuccugccu

SEQ ID NO: 1665021 - RNA, 17 nt, Human
guuccaccaucaagcca

SEQ ID NO: 1665022 - RNA, 20 nt, Human
guuccaccaucaagccacca

SEQ ID NO: 1665023 - RNA, 23 nt, Human
guuccuccccuccuccuggacuc

SEQ ID NO: 1665024 - RNA, 15 nt, Human
guuccugcaaugaag

SEQ ID NO: 1665025 - RNA, 22 nt, Human
guuccucauuagcauuuugcua

SEQ ID NO: 1665026 - RNA, 14 nt, Human
guuccuaauccucu

SEQ ID NO: 1665027 - RNA, 22 nt, Human
guucauggaacgcguugaaauu

SEQ ID NO: 1665028 - RNA, 23 nt, Human
guucauggaacgcguugaaauug

SEQ ID NO: 1665029 - RNA, 12 nt, Human
guucaugaaaga

SEQ ID NO: 1665030 - RNA, 18 nt, Human
guucaucuugaauuguaa

SEQ ID NO: 1665031 - RNA, 12 nt, Human
guucaucuugaa

SEQ ID NO: 1665032 - RNA, 13 nt, Human
guucaucuugaau

SEQ ID NO: 1665033 - RNA, 17 nt, Human
guucaucauccuaagcu

SEQ ID NO: 1665034 - RNA, 16 nt, Human
guucaucaaugaauga

SEQ ID NO: 1665035 - RNA, 24 nt, Human
guucacucuacuuagcaugucccu

SEQ ID NO: 1665036 - RNA, 19 nt, Human
guucacucuccauuuaaua

SEQ ID NO: 1665037 - RNA, 19 nt, Human
guucacugcaaccuccgcc

SEQ ID NO: 1665038 - RNA, 19 nt, Human
guucagagcugcccucucc

SEQ ID NO: 1665039 - RNA, 17 nt, Human
guucagagcugcccucu

SEQ ID NO: 1665040 - RNA, 16 nt, Human
guucagagcugcccuc

SEQ ID NO: 1665041 - RNA, 15 nt, Human
guucagagcugcccu

SEQ ID NO: 1665042 - RNA, 22 nt, Human
guucagagcugcccucuccugg

SEQ ID NO: 1665043 - RNA, 20 nt, Human
guucagagcugcccucuccu

SEQ ID NO: 1665044 - RNA, 23 nt, Human
guucagagcugcccucuccuggg

SEQ ID NO: 1665045 - RNA, 14 nt, Human
guucagagcugccc

SEQ ID NO: 1665046 - RNA, 13 nt, Human
guucagagcugcc

SEQ ID NO: 1665047 - RNA, 22 nt, Human
guuacuaaguuuuuauggcuuu

SEQ ID NO: 1665048 - RNA, 15 nt, Human
guuacucagaauucu

SEQ ID NO: 1665049 - RNA, 22 nt, Human
guuaguuucuccaagcaggaca

SEQ ID NO: 1665050 - RNA, 16 nt, Human
guuaguuucuccaagc

SEQ ID NO: 1665051 - RNA, 19 nt, Human
guuaguuucuccaagcagg

SEQ ID NO: 1665052 - RNA, 15 nt, Human
guuacagacaaagcg

SEQ ID NO: 1665053 - RNA, 17 nt, Human
guuacagacaaagcgug

SEQ ID NO: 1665054 - RNA, 18 nt, Human
guuacauaagauaaaugu

SEQ ID NO: 1665055 - RNA, 19 nt, Human
guuacauaagauaaaugug

SEQ ID NO: 1665056 - RNA, 16 nt, Human
guuacccaaauuaaga

SEQ ID NO: 1665057 - RNA, 23 nt, Human
guuaccauuuugggguacccacu

SEQ ID NO: 1665058 - RNA, 21 nt, Human
guuacauuuuuaagugcugca

SEQ ID NO: 1665059 - RNA, 23 nt, Human
guuaccucugccucagaaaacaa

SEQ ID NO: 1665060 - RNA, 19 nt, Human
guuaucugaagucagaucu

SEQ ID NO: 1665061 - RNA, 21 nt, Human
guuaugacuccagaauuuccc

SEQ ID NO: 1665062 - RNA, 10 nt, Human
guuauauaaa

SEQ ID NO: 1665063 - RNA, 12 nt, Human
guuauauaaaug

SEQ ID NO: 1665064 - RNA, 13 nt, Human
guuauauaaaugg

SEQ ID NO: 1665065 - RNA, 19 nt, Human
guuauuaaaaaucucaaau

SEQ ID NO: 1665066 - RNA, 19 nt, Human
guuauguaauaaccaaaug

SEQ ID NO: 1665067 - RNA, 19 nt, Human
guucaagcgauucuucugc

SEQ ID NO: 1665068 - RNA, 17 nt, Human
guuauuauauuuacaaa

SEQ ID NO: 1665069 - RNA, 23 nt, Human
guucaauucucauuugucacaca

SEQ ID NO: 1665070 - RNA, 16 nt, Human
guucaauucucauuug

SEQ ID NO: 1665071 - RNA, 20 nt, Human
guucaagcgauucuucugcu

SEQ ID NO: 1665072 - RNA, 23 nt, Human
guucaagugauucucaugccuca

SEQ ID NO: 1665073 - RNA, 16 nt, Human
gugugcucaggagccc

SEQ ID NO: 1665074 - RNA, 17 nt, Human
gugugcucaggagcccu

SEQ ID NO: 1665075 - RNA, 18 nt, Human
gugugcucaggagcccug

SEQ ID NO: 1665076 - RNA, 19 nt, Human
gugugcucaggagcccugg

SEQ ID NO: 1665077 - RNA, 12 nt, Human
gugugcucugau

SEQ ID NO: 1665078 - RNA, 15 nt, Human
gugugcucugaucau

SEQ ID NO: 1665079 - RNA, 22 nt, Human
gugugcucugaucauccacugu

SEQ ID NO: 1665080 - RNA, 15 nt, Human
guguguuucugaucu

SEQ ID NO: 1665081 - RNA, 12 nt, Human
guguguuuuaaa

SEQ ID NO: 1665082 - RNA, 21 nt, Human
guguggagaagcggcuggcag

SEQ ID NO: 1665083 - RNA, 13 nt, Human
guguggagaagcg

SEQ ID NO: 1665084 - RNA, 22 nt, Human
gugucucuugguccugcugcag

SEQ ID NO: 1665085 - RNA, 18 nt, Human
gugucucuugguccugcu

SEQ ID NO: 1665086 - RNA, 19 nt, Human
gugucucuugguccugcug

SEQ ID NO: 1665087 - RNA, 20 nt, Human
gugucucuugguccugcugc

SEQ ID NO: 1665088 - RNA, 21 nt, Human
gugucucuugguccugcugca

SEQ ID NO: 1665089 - RNA, 17 nt, Human
gugucucccuucauccu

SEQ ID NO: 1665090 - RNA, 14 nt, Human
gugucucuuggucc

SEQ ID NO: 1665091 - RNA, 15 nt, Human
gugucgggcaugaca

SEQ ID NO: 1665092 - RNA, 23 nt, Human
gugucccugcacuugcagacucu

SEQ ID NO: 1665093 - RNA, 14 nt, Human
guguccggucccug

SEQ ID NO: 1665094 - RNA, 13 nt, Human
guguucugugaua

SEQ ID NO: 1665095 - RNA, 18 nt, Human
guguuuuucauaaagcag

SEQ ID NO: 1665096 - RNA, 13 nt, Human
guguguuuuaaaa

SEQ ID NO: 1665097 - RNA, 16 nt, Human
guguguuuuaaaauga

SEQ ID NO: 1665098 - RNA, 19 nt, Human
guguguuuuaaaaugagaa

SEQ ID NO: 1665099 - RNA, 14 nt, Human
guguguuuuucaua

SEQ ID NO: 1665100 - RNA, 18 nt, Human
guguuaugacuccagaau

SEQ ID NO: 1665101 - RNA, 12 nt, Human
guguuacuaagu

SEQ ID NO: 1665102 - RNA, 14 nt, Human
guguuacuaaguuu

SEQ ID NO: 1665103 - RNA, 13 nt, Human
guuacagaagccc

SEQ ID NO: 1665104 - RNA, 13 nt, Human
guuacagacaaag

SEQ ID NO: 1665105 - RNA, 18 nt, Human
guuaacugagugccuuuu

SEQ ID NO: 1665106 - RNA, 15 nt, Human
guuacacuaaaaggu

SEQ ID NO: 1665107 - RNA, 16 nt, Human
guuacacuaaaaggug

SEQ ID NO: 1665108 - RNA, 21 nt, Human
guuaaaccaugggauaaaugc

SEQ ID NO: 1665109 - RNA, 18 nt, Human
guuaaaccaugggauaaa

SEQ ID NO: 1665110 - RNA, 20 nt, Human
guuaaaagagguuuuucuua

SEQ ID NO: 1665111 - RNA, 21 nt, Human
guuaaaagagguuuuucuuaa

SEQ ID NO: 1665112 - RNA, 22 nt, Human
guuaaaauaccagccaguaaau

SEQ ID NO: 1665113 - RNA, 20 nt, Human
guuaaaagaugaaaauauuu

SEQ ID NO: 1665114 - RNA, 14 nt, Human
guuaaaagaugaaa

SEQ ID NO: 1665115 - RNA, 16 nt, Human
guuaaaagaugaaaau

SEQ ID NO: 1665116 - RNA, 14 nt, Human
guuaaaagagguuu

SEQ ID NO: 1665117 - RNA, 15 nt, Human
gugggcauucaaaug

SEQ ID NO: 1665118 - RNA, 17 nt, Human
gugggcccaaugcacuu

SEQ ID NO: 1665119 - RNA, 18 nt, Human
gugggcgugagaccugcc

SEQ ID NO: 1665120 - RNA, 21 nt, Human
gugggcgugagaccugccccu

SEQ ID NO: 1665121 - RNA, 22 nt, Human
gugggcgugagaccugccccuc

SEQ ID NO: 1665122 - RNA, 19 nt, Human
gugggccuucagggaguga

SEQ ID NO: 1665123 - RNA, 15 nt, Human
gugggcuaguugggc

SEQ ID NO: 1665124 - RNA, 13 nt, Human
guggggaggggcu

SEQ ID NO: 1665125 - RNA, 15 nt, Human
guggggaccucaggc

SEQ ID NO: 1665126 - RNA, 18 nt, Human
guggggaccucaggccug

SEQ ID NO: 1665127 - RNA, 23 nt, Human
guggguuucuaaagcugccagcc

SEQ ID NO: 1665128 - RNA, 13 nt, Human
guggggcagcuug

SEQ ID NO: 1665129 - RNA, 17 nt, Human
guggggcagcuugaggg

SEQ ID NO: 1665130 - RNA, 19 nt, Human
guggcuggguuggagggug

SEQ ID NO: 1665131 - RNA, 23 nt, Human
guggcugcuucaaggauccugag

SEQ ID NO: 1665132 - RNA, 15 nt, Human
guggcugcuucaagg

SEQ ID NO: 1665133 - RNA, 16 nt, Human
guggcugcuucaagga

SEQ ID NO: 1665134 - RNA, 19 nt, Human
guggcugcuucaaggaucc

SEQ ID NO: 1665135 - RNA, 22 nt, Human
guggcugcuucaaggauccuga

SEQ ID NO: 1665136 - RNA, 18 nt, Human
guggcuucccgcucagcc

SEQ ID NO: 1665137 - RNA, 19 nt, Human
guggcuucccgcucagccc

SEQ ID NO: 1665138 - RNA, 20 nt, Human
guggcuucccgcucagcccu

SEQ ID NO: 1665139 - RNA, 22 nt, Human
guggcuuaaaacaacacucaca

SEQ ID NO: 1665140 - RNA, 13 nt, Human
guggcuccucccg

SEQ ID NO: 1665141 - RNA, 20 nt, Human
guggcuccucccggugccca

SEQ ID NO: 1665142 - RNA, 12 nt, Human
guggcugcuuca

SEQ ID NO: 1665143 - RNA, 14 nt, Human
guggcugcuucaag

SEQ ID NO: 1665144 - RNA, 13 nt, Human
gugcuaauuuuga

SEQ ID NO: 1665145 - RNA, 15 nt, Human
gugcuaauuuugaaa

SEQ ID NO: 1665146 - RNA, 15 nt, Human
gugcuacaaaaacac

SEQ ID NO: 1665147 - RNA, 20 nt, Human
gugcuacaaaaacacagcaa

SEQ ID NO: 1665148 - RNA, 14 nt, Human
guggcucacgccug

SEQ ID NO: 1665149 - RNA, 21 nt, Human
gugcuacaaaaacacagcaag

SEQ ID NO: 1665150 - RNA, 14 nt, Human
guggucccacccca

SEQ ID NO: 1665151 - RNA, 15 nt, Human
guggucccaccccac

SEQ ID NO: 1665152 - RNA, 16 nt, Human
guggucccaccccaca

SEQ ID NO: 1665153 - RNA, 17 nt, Human
guggucccaccccacac

SEQ ID NO: 1665154 - RNA, 18 nt, Human
gugguccuaaucuucuga

SEQ ID NO: 1665155 - RNA, 19 nt, Human
gugguaugaucacggcuca

SEQ ID NO: 1665156 - RNA, 17 nt, Human
gugguagagugugccug

SEQ ID NO: 1665157 - RNA, 13 nt, Human
guggugacuuugg

SEQ ID NO: 1665158 - RNA, 15 nt, Human
guggugacuuuggau

SEQ ID NO: 1665159 - RNA, 21 nt, Human
guggugagaggcauccaguau

SEQ ID NO: 1665160 - RNA, 14 nt, Human
guggugaccucugc

SEQ ID NO: 1665161 - RNA, 17 nt, Human
guggugaccucugccug

SEQ ID NO: 1665162 - RNA, 17 nt, Human
guguaagacaaaaagcu

SEQ ID NO: 1665163 - RNA, 19 nt, Human
guggugcgaucuggguuca

SEQ ID NO: 1665164 - RNA, 16 nt, Human
guggugacuuuggaua

SEQ ID NO: 1665165 - RNA, 21 nt, Human
guguaaguauucuuauuuaau

SEQ ID NO: 1665166 - RNA, 21 nt, Human
guguaaguagauaggccaugg

SEQ ID NO: 1665167 - RNA, 13 nt, Human
gugucccugcacu

SEQ ID NO: 1665168 - RNA, 16 nt, Human
gugucccugcacuugc

SEQ ID NO: 1665169 - RNA, 18 nt, Human
gugucccugcacuugcag

SEQ ID NO: 1665170 - RNA, 17 nt, Human
guguacauggaauaaca

SEQ ID NO: 1665171 - RNA, 22 nt, Human
guguacauggaauaacauguaa

SEQ ID NO: 1665172 - RNA, 23 nt, Human
gugcccaagaauagaugcugacu

SEQ ID NO: 1665173 - RNA, 20 nt, Human
gugcccaagaauagaugcug

SEQ ID NO: 1665174 - RNA, 14 nt, Human
gugccaugugccag

SEQ ID NO: 1665175 - RNA, 16 nt, Human
gugccaugugccaggu

SEQ ID NO: 1665176 - RNA, 15 nt, Human
gugccuucagcucua

SEQ ID NO: 1665177 - RNA, 21 nt, Human
gugcgaucuggguucacugca

SEQ ID NO: 1665178 - RNA, 13 nt, Human
gugcuaaggacuu

SEQ ID NO: 1665179 - RNA, 14 nt, Human
gugcuaaggacuug

SEQ ID NO: 1665180 - RNA, 20 nt, Human
gugcuaaggacuuguuagau

SEQ ID NO: 1665181 - RNA, 12 nt, Human
gugcuaaggacu

SEQ ID NO: 1665182 - RNA, 21 nt, Human
gugcgcuaaacuuuucugaua

SEQ ID NO: 1665183 - RNA, 17 nt, Human
gugcgcuaaacuuuucu

SEQ ID NO: 1665184 - RNA, 14 nt, Human
gugcgccuacagga

SEQ ID NO: 1665185 - RNA, 14 nt, Human
gugcggccuuuggc

SEQ ID NO: 1665186 - RNA, 22 nt, Human
gugcacuaauguguaagacaaa

SEQ ID NO: 1665187 - RNA, 23 nt, Human
gugauccacccaccucagccucc

SEQ ID NO: 1665188 - RNA, 24 nt, Human
gugauccacccaccucagccuccc

SEQ ID NO: 1665189 - RNA, 18 nt, Human
gugauuuuuguaauuuuu

SEQ ID NO: 1665190 - RNA, 13 nt, Human
gugauuuuuguaa

SEQ ID NO: 1665191 - RNA, 12 nt, Human
gugauuuucauu

SEQ ID NO: 1665192 - RNA, 20 nt, Human
gugcaguggugcgaucuggg

SEQ ID NO: 1665193 - RNA, 23 nt, Human
gugcaguggugcgaucuggguuc

SEQ ID NO: 1665194 - RNA, 13 nt, Human
gugcaucucagcc

SEQ ID NO: 1665195 - RNA, 14 nt, Human
gugcaucucagccc

SEQ ID NO: 1665196 - RNA, 22 nt, Human
gugcauaccacuuuuguucuug

SEQ ID NO: 1665197 - RNA, 17 nt, Human
gugauacaaugcugugc

SEQ ID NO: 1665198 - RNA, 15 nt, Human
gugauacaaugcugu

SEQ ID NO: 1665199 - RNA, 17 nt, Human
gugaguugauagcacag

SEQ ID NO: 1665200 - RNA, 19 nt, Human
gugauauaaguguguguuu

SEQ ID NO: 1665201 - RNA, 15 nt, Human
gugagccacugcacc

SEQ ID NO: 1665202 - RNA, 20 nt, Human
gugagccacugcaccgggcc

SEQ ID NO: 1665203 - RNA, 18 nt, Human
gugaggagcuugaaaccc

SEQ ID NO: 1665204 - RNA, 17 nt, Human
gugaggaugaaaaaaua

SEQ ID NO: 1665205 - RNA, 19 nt, Human
gugagccgagaucacgcca

SEQ ID NO: 1665206 - RNA, 14 nt, Human
gugagcuacaaaug

SEQ ID NO: 1665207 - RNA, 12 nt, Human
gugacagaggca

SEQ ID NO: 1665208 - RNA, 13 nt, Human
gugacagaggcag

SEQ ID NO: 1665209 - RNA, 14 nt, Human
gugacagaggcagc

SEQ ID NO: 1665210 - RNA, 15 nt, Human
gugacagaggcagcc

SEQ ID NO: 1665211 - RNA, 13 nt, Human
gugaccucugccu

SEQ ID NO: 1665212 - RNA, 14 nt, Human
gugaccucugccug

SEQ ID NO: 1665213 - RNA, 15 nt, Human
gugaccucugccuga

SEQ ID NO: 1665214 - RNA, 21 nt, Human
gugaacaaauuuacagagaca

SEQ ID NO: 1665215 - RNA, 13 nt, Human
gugaacacaucag

SEQ ID NO: 1665216 - RNA, 21 nt, Human
gugaaugaugauccuaggcau

SEQ ID NO: 1665217 - RNA, 20 nt, Human
gugacaaggauugcuacugu

SEQ ID NO: 1665218 - RNA, 21 nt, Human
gucuugaacuccuggccucaa

SEQ ID NO: 1665219 - RNA, 18 nt, Human
gucuugaacuccuggccu

SEQ ID NO: 1665220 - RNA, 20 nt, Human
gucuugaacuccuggccuca

SEQ ID NO: 1665221 - RNA, 16 nt, Human
gucuugcaauggcagc

SEQ ID NO: 1665222 - RNA, 17 nt, Human
gucuugcaauggcagcc

SEQ ID NO: 1665223 - RNA, 18 nt, Human
gucuugcaauggcagccu

SEQ ID NO: 1665224 - RNA, 19 nt, Human
gucuugcaauggcagccuu

SEQ ID NO: 1665225 - RNA, 21 nt, Human
gucuuaaaaaguggaaaaaua

SEQ ID NO: 1665226 - RNA, 16 nt, Human
gucuugaacuccuggc

SEQ ID NO: 1665227 - RNA, 17 nt, Human
gucuugaacuccuggcc

SEQ ID NO: 1665228 - RNA, 15 nt, Human
gucuugucucagauu

SEQ ID NO: 1665229 - RNA, 20 nt, Human
gucuugucucagauuuuauu

SEQ ID NO: 1665230 - RNA, 22 nt, Human
gucuugucucagauuuuauuau

SEQ ID NO: 1665231 - RNA, 15 nt, Human
gucuugccuuuuuca

SEQ ID NO: 1665232 - RNA, 16 nt, Human
gucuugccuuuuucau

SEQ ID NO: 1665233 - RNA, 17 nt, Human
gucuugccuuuuucauu

SEQ ID NO: 1665234 - RNA, 18 nt, Human
gucuugccuuuuucauua

SEQ ID NO: 1665235 - RNA, 20 nt, Human
gucuugccuuuuucauuauu

SEQ ID NO: 1665236 - RNA, 23 nt, Human
gucuugcaauggcagccuuggca

SEQ ID NO: 1665237 - RNA, 20 nt, Human
gucuugcaauggcagccuug

SEQ ID NO: 1665238 - RNA, 21 nt, Human
gucuugcaauggcagccuugg

SEQ ID NO: 1665239 - RNA, 17 nt, Human
gucuguucuuuccaaag

SEQ ID NO: 1665240 - RNA, 14 nt, Human
gucuguucuuucca

SEQ ID NO: 1665241 - RNA, 13 nt, Human
gucuguuuuauga

SEQ ID NO: 1665242 - RNA, 15 nt, Human
gucuguuuuaugacu

SEQ ID NO: 1665243 - RNA, 18 nt, Human
gucugugccauuuuguau

SEQ ID NO: 1665244 - RNA, 22 nt, Human
gucugugagaugcuagaacucc

SEQ ID NO: 1665245 - RNA, 23 nt, Human
gucugugagaugcuagaacuccc

SEQ ID NO: 1665246 - RNA, 15 nt, Human
gucugugagaugcua

SEQ ID NO: 1665247 - RNA, 16 nt, Human
gucugugagaugcuag

SEQ ID NO: 1665248 - RNA, 17 nt, Human
gucugugagaugcuaga

SEQ ID NO: 1665249 - RNA, 21 nt, Human
gucugugagaugcuagaacuc

SEQ ID NO: 1665250 - RNA, 17 nt, Human
gucucagauuuuauuau

SEQ ID NO: 1665251 - RNA, 21 nt, Human
gucucagauuuuauuauguaa

SEQ ID NO: 1665252 - RNA, 15 nt, Human
gucucagauuuuauu

SEQ ID NO: 1665253 - RNA, 16 nt, Human
gucucagauuuuauua

SEQ ID NO: 1665254 - RNA, 14 nt, Human
gucucagauuuuau

SEQ ID NO: 1665255 - RNA, 22 nt, Human
gucucacucugucgcccagucu

SEQ ID NO: 1665256 - RNA, 15 nt, Human
gucucacucugucgc

SEQ ID NO: 1665257 - RNA, 16 nt, Human
gucucacucugucgcc

SEQ ID NO: 1665258 - RNA, 18 nt, Human
gucucacucugucgccca

SEQ ID NO: 1665259 - RNA, 19 nt, Human
gucucacucugucgcccag

SEQ ID NO: 1665260 - RNA, 13 nt, Human
gucucugagcauu

SEQ ID NO: 1665261 - RNA, 15 nt, Human
gucucugaagugaaa

SEQ ID NO: 1665262 - RNA, 21 nt, Human
gucucugaagugaaacugcuu

SEQ ID NO: 1665263 - RNA, 17 nt, Human
gucucuggaauuugaaa

SEQ ID NO: 1665264 - RNA, 16 nt, Human
gucucugguuccuccc

SEQ ID NO: 1665265 - RNA, 17 nt, Human
gucucugguuccucccc

SEQ ID NO: 1665266 - RNA, 18 nt, Human
gucucuucuccacuggau

SEQ ID NO: 1665267 - RNA, 21 nt, Human
gucucuggauuauauuaugaa

SEQ ID NO: 1665268 - RNA, 13 nt, Human
gucugacuguuuc

SEQ ID NO: 1665269 - RNA, 13 nt, Human
gucucuugguccu

SEQ ID NO: 1665270 - RNA, 15 nt, Human
gucccugccaaugga

SEQ ID NO: 1665271 - RNA, 11 nt, Human
gucccugccaa

SEQ ID NO: 1665272 - RNA, 14 nt, Human
gucccugccaaugg

SEQ ID NO: 1665273 - RNA, 21 nt, Human
guccuuaccagcagagcaccu

SEQ ID NO: 1665274 - RNA, 19 nt, Human
guccuuaccagcagagcac

SEQ ID NO: 1665275 - RNA, 21 nt, Human
gucggaaaacaugcuacacac

SEQ ID NO: 1665276 - RNA, 16 nt, Human
gucgggcaugacacga

SEQ ID NO: 1665277 - RNA, 23 nt, Human
gucggguuuuauuguuuaaaauc

SEQ ID NO: 1665278 - RNA, 18 nt, Human
gucgucaaagcugaaaug

SEQ ID NO: 1665279 - RNA, 18 nt, Human
gucucacuauguugccca

SEQ ID NO: 1665280 - RNA, 19 nt, Human
gucucacuauguugcccag

SEQ ID NO: 1665281 - RNA, 21 nt, Human
gucccuaccgagucucuucuc

SEQ ID NO: 1665282 - RNA, 22 nt, Human
gucccuaccgagucucuucucc

SEQ ID NO: 1665283 - RNA, 23 nt, Human
gucccuaccgagucucuucucca

SEQ ID NO: 1665284 - RNA, 18 nt, Human
gucccuaauaaagcugug

SEQ ID NO: 1665285 - RNA, 20 nt, Human
gucccuaauaaagcugugug

SEQ ID NO: 1665286 - RNA, 16 nt, Human
gucccugcacuugcag

SEQ ID NO: 1665287 - RNA, 19 nt, Human
gucccugcacuugcagacu

SEQ ID NO: 1665288 - RNA, 21 nt, Human
gucccugcacuugcagacucu

SEQ ID NO: 1665289 - RNA, 16 nt, Human
gucccuaauaaagcug

SEQ ID NO: 1665290 - RNA, 17 nt, Human
gucccuaauaaagcugu

SEQ ID NO: 1665291 - RNA, 17 nt, Human
guccccaccgcagacag

SEQ ID NO: 1665292 - RNA, 18 nt, Human
gucccaggcugagccuca

SEQ ID NO: 1665293 - RNA, 19 nt, Human
gucccaggcugagccucag

SEQ ID NO: 1665294 - RNA, 21 nt, Human
gucccaggcugagccucaguc

SEQ ID NO: 1665295 - RNA, 15 nt, Human
gucccaggcugagcc

SEQ ID NO: 1665296 - RNA, 16 nt, Human
gucccaggcugagccu

SEQ ID NO: 1665297 - RNA, 17 nt, Human
gucccaggcugagccuc

SEQ ID NO: 1665298 - RNA, 23 nt, Human
gucccaccuuggcugcagggagu

SEQ ID NO: 1665299 - RNA, 13 nt, Human
guccacccaggag

SEQ ID NO: 1665300 - RNA, 12 nt, Human
guccacccagga

SEQ ID NO: 1665301 - RNA, 23 nt, Human
guccacccaggagccccgaggcc

SEQ ID NO: 1665302 - RNA, 21 nt, Human
gucccaccuuggcugcaggga

SEQ ID NO: 1665303 - RNA, 21 nt, Human
gucauucagauaugauucaaa

SEQ ID NO: 1665304 - RNA, 21 nt, Human
gucagcuccccucggagaaga

SEQ ID NO: 1665305 - RNA, 22 nt, Human
gucagcuccccucggagaagag

SEQ ID NO: 1665306 - RNA, 23 nt, Human
gucagcuccccucggagaagagc

SEQ ID NO: 1665307 - RNA, 22 nt, Human
gucaccccggccaccugcggug

SEQ ID NO: 1665308 - RNA, 17 nt, Human
gucaccccggccaccug

SEQ ID NO: 1665309 - RNA, 18 nt, Human
gucaccccggccaccugc

SEQ ID NO: 1665310 - RNA, 22 nt, Human
gucacucuggcagcucagagag

SEQ ID NO: 1665311 - RNA, 17 nt, Human
gucacucuggcagcuca

SEQ ID NO: 1665312 - RNA, 19 nt, Human
gucacucuggcagcucaga

SEQ ID NO: 1665313 - RNA, 12 nt, Human
gucacucuggca

SEQ ID NO: 1665314 - RNA, 13 nt, Human
gucacucuggcag

SEQ ID NO: 1665315 - RNA, 14 nt, Human
gucacucuggcagc

SEQ ID NO: 1665316 - RNA, 16 nt, Human
gucacucuggcagcuc

SEQ ID NO: 1665317 - RNA, 15 nt, Human
gucagagccugcagu

SEQ ID NO: 1665318 - RNA, 16 nt, Human
gucagagccugcaguu

SEQ ID NO: 1665319 - RNA, 14 nt, Human
gucagagccugcag

SEQ ID NO: 1665320 - RNA, 16 nt, Human
gucagaucugccuaag

SEQ ID NO: 1665321 - RNA, 18 nt, Human
gucagaucugccuaagga

SEQ ID NO: 1665322 - RNA, 19 nt, Human
gucagaucugccuaaggac

SEQ ID NO: 1665323 - RNA, 20 nt, Human
gucagaucugccuaaggacu

SEQ ID NO: 1665324 - RNA, 21 nt, Human
gucagaucugccuaaggacuu

SEQ ID NO: 1665325 - RNA, 22 nt, Human
gucagaugcugugcaaauguua

SEQ ID NO: 1665326 - RNA, 19 nt, Human
gucagcuccccucggagaa

SEQ ID NO: 1665327 - RNA, 14 nt, Human
guauuuuacuaaua

SEQ ID NO: 1665328 - RNA, 16 nt, Human
guauuaagcauauauu

SEQ ID NO: 1665329 - RNA, 17 nt, Human
guauuaagcauauauuu

SEQ ID NO: 1665330 - RNA, 15 nt, Human
guauuaagcauauau

SEQ ID NO: 1665331 - RNA, 16 nt, Human
guauuaagaaugaaau

SEQ ID NO: 1665332 - RNA, 18 nt, Human
guauuaagcauauauuuu

SEQ ID NO: 1665333 - RNA, 21 nt, Human
guauuaagcauauauuuuuau

SEQ ID NO: 1665334 - RNA, 20 nt, Human
guauuuuaaaagaaugauua

SEQ ID NO: 1665335 - RNA, 13 nt, Human
guauuuuaaucac

SEQ ID NO: 1665336 - RNA, 19 nt, Human
guauuuuguuuuugucuua

SEQ ID NO: 1665337 - RNA, 23 nt, Human
gucaauaaaauccauacauuugu

SEQ ID NO: 1665338 - RNA, 15 nt, Human
gucaagugaaaaagg

SEQ ID NO: 1665339 - RNA, 22 nt, Human
gucaauaaaauccauacauuug

SEQ ID NO: 1665340 - RNA, 15 nt, Human
gucaaugcagccccc

SEQ ID NO: 1665341 - RNA, 19 nt, Human
guauagaaccucuuugucu

SEQ ID NO: 1665342 - RNA, 14 nt, Human
guauagauuagaau

SEQ ID NO: 1665343 - RNA, 13 nt, Human
guauaugucucag

SEQ ID NO: 1665344 - RNA, 15 nt, Human
guauaugucucaggu

SEQ ID NO: 1665345 - RNA, 21 nt, Human
guauaugucucaggucccugc

SEQ ID NO: 1665346 - RNA, 16 nt, Human
guauauguugggugca

SEQ ID NO: 1665347 - RNA, 22 nt, Human
guauaugucaagccauaauugu

SEQ ID NO: 1665348 - RNA, 17 nt, Human
guauguugaagccuuug

SEQ ID NO: 1665349 - RNA, 20 nt, Human
guaugaggcauuuguuugaa

SEQ ID NO: 1665350 - RNA, 17 nt, Human
guaugaggcauuuguuu

SEQ ID NO: 1665351 - RNA, 20 nt, Human
guaugaucacggcucacugc

SEQ ID NO: 1665352 - RNA, 22 nt, Human
guaugaucacggcucacugcag

SEQ ID NO: 1665353 - RNA, 21 nt, Human
guaugaucacggcucacugca

SEQ ID NO: 1665354 - RNA, 17 nt, Human
guauguuagugcaaauu

SEQ ID NO: 1665355 - RNA, 22 nt, Human
guaugaaagauggcugugccuc

SEQ ID NO: 1665356 - RNA, 23 nt, Human
guaugaaagauggcugugccucu

SEQ ID NO: 1665357 - RNA, 12 nt, Human
guaucugagcag

SEQ ID NO: 1665358 - RNA, 12 nt, Human
guaucuggugac

SEQ ID NO: 1665359 - RNA, 19 nt, Human
guaucuggugacuuuccuc

SEQ ID NO: 1665360 - RNA, 15 nt, Human
guaugaggcauuugu

SEQ ID NO: 1665361 - RNA, 13 nt, Human
guaugaggcauuu

SEQ ID NO: 1665362 - RNA, 18 nt, Human
guaugaauaaagacaccu

SEQ ID NO: 1665363 - RNA, 19 nt, Human
guaugaauaaagacaccua

SEQ ID NO: 1665364 - RNA, 14 nt, Human
guagucaggugccu

SEQ ID NO: 1665365 - RNA, 14 nt, Human
guagggugggccuu

SEQ ID NO: 1665366 - RNA, 17 nt, Human
guagggugggccuucag

SEQ ID NO: 1665367 - RNA, 22 nt, Human
guagggugggccuucagggagu

SEQ ID NO: 1665368 - RNA, 16 nt, Human
guaggguuauaauaau

SEQ ID NO: 1665369 - RNA, 15 nt, Human
guauaauuaacaugu

SEQ ID NO: 1665370 - RNA, 17 nt, Human
guauaauuaacauguua

SEQ ID NO: 1665371 - RNA, 19 nt, Human
guauaauuaacauguuaaa

SEQ ID NO: 1665372 - RNA, 22 nt, Human
guauaauuaacauguuaaacca

SEQ ID NO: 1665373 - RNA, 23 nt, Human
guauaauuaacauguuaaaccau

SEQ ID NO: 1665374 - RNA, 17 nt, Human
guauaauucacauugua

SEQ ID NO: 1665375 - RNA, 14 nt, Human
guaguguuggagaa

SEQ ID NO: 1665376 - RNA, 15 nt, Human
guaguguuggagaag

SEQ ID NO: 1665377 - RNA, 13 nt, Human
guauaauuaacau

SEQ ID NO: 1665378 - RNA, 14 nt, Human
guauaauuaacaug

SEQ ID NO: 1665379 - RNA, 21 nt, Human
guagcauuuguguugaagagg

SEQ ID NO: 1665380 - RNA, 23 nt, Human
guagggcgggaggauguucuggg

SEQ ID NO: 1665381 - RNA, 21 nt, Human
guagggcgggaggauguucug

SEQ ID NO: 1665382 - RNA, 22 nt, Human
guagggcgggaggauguucugg

SEQ ID NO: 1665383 - RNA, 16 nt, Human
guagggcgggaggaug

SEQ ID NO: 1665384 - RNA, 15 nt, Human
guagagugugccuga

SEQ ID NO: 1665385 - RNA, 18 nt, Human
gcuauaggugcuacaaaa

SEQ ID NO: 1665386 - RNA, 16 nt, Human
guagcauccuggaaua

SEQ ID NO: 1665387 - RNA, 15 nt, Human
uuugcaucugaaaau

SEQ ID NO: 1665388 - RNA, 22 nt, Human
uuuggaauuuuccuccuuucuc

SEQ ID NO: 1665389 - RNA, 14 nt, Human
uuuggaauuuugug

SEQ ID NO: 1665390 - RNA, 16 nt, Human
uuugcuuugugauuuu

SEQ ID NO: 1665391 - RNA, 15 nt, Human
uuugcuuugugauuu

SEQ ID NO: 1665392 - RNA, 20 nt, Human
uuuggagucagacagaugug

SEQ ID NO: 1665393 - RNA, 16 nt, Human
uuuggauaauaaggaa

SEQ ID NO: 1665394 - RNA, 19 nt, Human
uuuggacaaaauggaauac

SEQ ID NO: 1665395 - RNA, 21 nt, Human
uuuggaauuuugugcccccau

SEQ ID NO: 1665396 - RNA, 19 nt, Human
uuugguuuucacauuggaa

SEQ ID NO: 1665397 - RNA, 19 nt, Human
uuuggugguuucagaaaug

SEQ ID NO: 1665398 - RNA, 13 nt, Human
uuuguauaaaaua

SEQ ID NO: 1665399 - RNA, 14 nt, Human
uuuguauaaaauaa

SEQ ID NO: 1665400 - RNA, 16 nt, Human
uuuguauaaaauaauu

SEQ ID NO: 1665401 - RNA, 21 nt, Human
uuuguucuggcucuuccaggc

SEQ ID NO: 1665402 - RNA, 18 nt, Human
uuuuaaagacuuuuauga

SEQ ID NO: 1665403 - RNA, 17 nt, Human
uuuuaaagaaugcucuu

SEQ ID NO: 1665404 - RNA, 21 nt, Human
uuuuaaaagaaugauuaugaa

SEQ ID NO: 1665405 - RNA, 21 nt, Human
uuuuaaaugcaccuggaauau

SEQ ID NO: 1665406 - RNA, 12 nt, Human
uuuuaaaugcac

SEQ ID NO: 1665407 - RNA, 11 nt, Human
uuuuaaaugca

SEQ ID NO: 1665408 - RNA, 20 nt, Human
uuuuaauaauguuucaaaca

SEQ ID NO: 1665409 - RNA, 17 nt, Human
uuaccacagacauacua

SEQ ID NO: 1665410 - RNA, 14 nt, Human
uuaccacagacaua

SEQ ID NO: 1665411 - RNA, 12 nt, Human
uuuccugcccug

SEQ ID NO: 1665412 - RNA, 13 nt, Human
uuuccugcccugg

SEQ ID NO: 1665413 - RNA, 16 nt, Human
uuuccugaggcugggc

SEQ ID NO: 1665414 - RNA, 23 nt, Human
uuucuacucgaguuacagacaaa

SEQ ID NO: 1665415 - RNA, 12 nt, Human
uuucuaaaguaa

SEQ ID NO: 1665416 - RNA, 14 nt, Human
uuucuaaaguaaaa

SEQ ID NO: 1665417 - RNA, 21 nt, Human
uuucuaaaggcuaccuuugua

SEQ ID NO: 1665418 - RNA, 20 nt, Human
uuucuaaaggcuaccuuugu

SEQ ID NO: 1665419 - RNA, 15 nt, Human
uuucucugauacaga

SEQ ID NO: 1665420 - RNA, 16 nt, Human
uuucucugauacagaa

SEQ ID NO: 1665421 - RNA, 17 nt, Human
uuucucugauacagaaa

SEQ ID NO: 1665422 - RNA, 18 nt, Human
uuucucugauacagaaaa

SEQ ID NO: 1665423 - RNA, 21 nt, Human
uuucugaaauuuccugggagc

SEQ ID NO: 1665424 - RNA, 19 nt, Human
uuucugaaauuuccuggga

SEQ ID NO: 1665425 - RNA, 20 nt, Human
uuucuguucuuucuggcuau

SEQ ID NO: 1665426 - RNA, 15 nt, Human
uuucugagaaagacu

SEQ ID NO: 1665427 - RNA, 13 nt, Human
uuucugagaaaga

SEQ ID NO: 1665428 - RNA, 11 nt, Human
uuucuuccucu

SEQ ID NO: 1665429 - RNA, 13 nt, Human
uuucuuccucugc

SEQ ID NO: 1665430 - RNA, 13 nt, Human
uuucuucucccuc

SEQ ID NO: 1665431 - RNA, 14 nt, Human
uuucuuccucugcu

SEQ ID NO: 1665432 - RNA, 16 nt, Human
uuucuuccucugcuga

SEQ ID NO: 1665433 - RNA, 12 nt, Human
uuucuucucccu

SEQ ID NO: 1665434 - RNA, 23 nt, Human
uuucuuagggaaggauacaaaag

SEQ ID NO: 1665435 - RNA, 18 nt, Human
uuucuuagggaaggauac

SEQ ID NO: 1665436 - RNA, 17 nt, Human
uuucuuauuucauuucu

SEQ ID NO: 1665437 - RNA, 19 nt, Human
uuugaacugauaaagauga

SEQ ID NO: 1665438 - RNA, 17 nt, Human
uuugaacugauaaagau

SEQ ID NO: 1665439 - RNA, 15 nt, Human
uuugaacugauaaag

SEQ ID NO: 1665440 - RNA, 14 nt, Human
uuugaacucuucaa

SEQ ID NO: 1665441 - RNA, 22 nt, Human
uuugaagaugccgcauuuggau

SEQ ID NO: 1665442 - RNA, 18 nt, Human
uuugaaucaucaagucuu

SEQ ID NO: 1665443 - RNA, 11 nt, Human
uuuuuccuuca

SEQ ID NO: 1665444 - RNA, 11 nt, Human
uuuuuaaaugc

SEQ ID NO: 1665445 - RNA, 18 nt, Human
uuuuuaagccuuaaagga

SEQ ID NO: 1665446 - RNA, 11 nt, Human
uuuuuccuuuu

SEQ ID NO: 1665447 - RNA, 19 nt, Human
uuuuuccuucagugccuua

SEQ ID NO: 1665448 - RNA, 23 nt, Human
uuuuucucugauacagaaaaguu

SEQ ID NO: 1665449 - RNA, 19 nt, Human
uuuuucucuaggaaauauu

SEQ ID NO: 1665450 - RNA, 18 nt, Human
uuuucuaaaguaaaaaca

SEQ ID NO: 1665451 - RNA, 14 nt, Human
uuuuccugaaaacc

SEQ ID NO: 1665452 - RNA, 14 nt, Human
uuuuggcugcugaa

SEQ ID NO: 1665453 - RNA, 15 nt, Human
uuuuggucuguguga

SEQ ID NO: 1665454 - RNA, 18 nt, Human
uuuuggucuggagggaag

SEQ ID NO: 1665455 - RNA, 21 nt, Human
uuuuggcauaacauaaaucug

SEQ ID NO: 1665456 - RNA, 20 nt, Human
uuuugacaaggggcaguggu

SEQ ID NO: 1665457 - RNA, 12 nt, Human
uuuuuaaagacu

SEQ ID NO: 1665458 - RNA, 13 nt, Human
uuuuuaaagacuu

SEQ ID NO: 1665459 - RNA, 18 nt, Human
uuuuuaaagacuuuuaug

SEQ ID NO: 1665460 - RNA, 16 nt, Human
uuuugucauauaagau

SEQ ID NO: 1665461 - RNA, 18 nt, Human
uuuuuaaaaaagaaacau

SEQ ID NO: 1665462 - RNA, 19 nt, Human
uuuuguagagccagggucu

SEQ ID NO: 1665463 - RNA, 16 nt, Human
uuuugguugcuuuaau

SEQ ID NO: 1665464 - RNA, 15 nt, Human
uuuugguugcuuuaa

SEQ ID NO: 1665465 - RNA, 12 nt, Human
gcccgacagccu

SEQ ID NO: 1665466 - RNA, 14 nt, Human
gcccgacagccugg

SEQ ID NO: 1665467 - RNA, 15 nt, Human
gcccgacagccuggc

SEQ ID NO: 1665468 - RNA, 17 nt, Human
gccccuguucuggcaga

SEQ ID NO: 1665469 - RNA, 16 nt, Human
gccccucagggucccu

SEQ ID NO: 1665470 - RNA, 18 nt, Human
gccccucagggucccugg

SEQ ID NO: 1665471 - RNA, 15 nt, Human
gccccgaggccuucu

SEQ ID NO: 1665472 - RNA, 14 nt, Human
gccccucagggucc

SEQ ID NO: 1665473 - RNA, 18 nt, Human
gccccgaggccuucucug

SEQ ID NO: 1665474 - RNA, 22 nt, Human
gccccgaggccuucucugaagg

SEQ ID NO: 1665475 - RNA, 19 nt, Human
gcccuccaagaccuucucc

SEQ ID NO: 1665476 - RNA, 21 nt, Human
gcccuccaagaccuucuccuu

SEQ ID NO: 1665477 - RNA, 20 nt, Human
gcccuccaucuaaacugccc

SEQ ID NO: 1665478 - RNA, 21 nt, Human
gcccuccaucuaaacugcccc

SEQ ID NO: 1665479 - RNA, 22 nt, Human
gcccuccaagaccuucuccuuc

SEQ ID NO: 1665480 - RNA, 23 nt, Human
gcccuccaagaccuucuccuuca

SEQ ID NO: 1665481 - RNA, 21 nt, Human
gcccucccugccccucccuuc

SEQ ID NO: 1665482 - RNA, 13 nt, Human
gcccucugcccac

SEQ ID NO: 1665483 - RNA, 16 nt, Human
gcccucugcccacucc

SEQ ID NO: 1665484 - RNA, 18 nt, Human
gcccucugcccacucccu

SEQ ID NO: 1665485 - RNA, 19 nt, Human
gcccucugcccacucccug

SEQ ID NO: 1665486 - RNA, 14 nt, Human
gcccugagcuuucu

SEQ ID NO: 1665487 - RNA, 16 nt, Human
gcccugcagagggcac

SEQ ID NO: 1665488 - RNA, 15 nt, Human
gcccugcagagggca

SEQ ID NO: 1665489 - RNA, 13 nt, Human
gcccugcagaggg

SEQ ID NO: 1665490 - RNA, 14 nt, Human
gcccugcagagggc

SEQ ID NO: 1665491 - RNA, 15 nt, Human
gccccauucugccug

SEQ ID NO: 1665492 - RNA, 14 nt, Human
gccccauucugccu

SEQ ID NO: 1665493 - RNA, 13 nt, Human
gccccauccucug

SEQ ID NO: 1665494 - RNA, 14 nt, Human
gccccauccucugu

SEQ ID NO: 1665495 - RNA, 22 nt, Human
gccccauccucuguacagagcc

SEQ ID NO: 1665496 - RNA, 15 nt, Human
gccccagugcccaca

SEQ ID NO: 1665497 - RNA, 13 nt, Human
gccccagugccca

SEQ ID NO: 1665498 - RNA, 14 nt, Human
gccccagugcccac

SEQ ID NO: 1665499 - RNA, 19 nt, Human
gccccaguuguauuuauuu

SEQ ID NO: 1665500 - RNA, 21 nt, Human
gccccauaauuuuuuuuuucc

SEQ ID NO: 1665501 - RNA, 18 nt, Human
gccccaucccaaacccuu

SEQ ID NO: 1665502 - RNA, 12 nt, Human
gccccagugccc

SEQ ID NO: 1665503 - RNA, 20 nt, Human
gcccaggcuggagugcaaug

SEQ ID NO: 1665504 - RNA, 13 nt, Human
gcccaggccuccu

SEQ ID NO: 1665505 - RNA, 21 nt, Human
gcccagagaggguggugaccu

SEQ ID NO: 1665506 - RNA, 23 nt, Human
gcccaggccccugccacccuggg

SEQ ID NO: 1665507 - RNA, 12 nt, Human
gcccaggcuggc

SEQ ID NO: 1665508 - RNA, 19 nt, Human
gccaggagccuccugcccu

SEQ ID NO: 1665509 - RNA, 20 nt, Human
gccaggagccuccugcccuu

SEQ ID NO: 1665510 - RNA, 14 nt, Human
gccaggagccuccu

SEQ ID NO: 1665511 - RNA, 16 nt, Human
gccaggagccuccugc

SEQ ID NO: 1665512 - RNA, 15 nt, Human
gccaggaagccagca

SEQ ID NO: 1665513 - RNA, 17 nt, Human
gccagcugcuugggcuu

SEQ ID NO: 1665514 - RNA, 18 nt, Human
gccagcugcuugggcuuc

SEQ ID NO: 1665515 - RNA, 20 nt, Human
gccagcugcuugggcuucau

SEQ ID NO: 1665516 - RNA, 12 nt, Human
gccaggaagcca

SEQ ID NO: 1665517 - RNA, 13 nt, Human
gccaggaagccag

SEQ ID NO: 1665518 - RNA, 14 nt, Human
gccaggaagccagc

SEQ ID NO: 1665519 - RNA, 14 nt, Human
gccagaugcaccag

SEQ ID NO: 1665520 - RNA, 17 nt, Human
gccagagggagugacag

SEQ ID NO: 1665521 - RNA, 22 nt, Human
gccagccgagauagccaaggcc

SEQ ID NO: 1665522 - RNA, 15 nt, Human
gccagaugcaccagc

SEQ ID NO: 1665523 - RNA, 20 nt, Human
gccagauucuuuccugaggc

SEQ ID NO: 1665524 - RNA, 24 nt, Human
gccagauucuuuccugaggcuggg

SEQ ID NO: 1665525 - RNA, 13 nt, Human
gccagauuucacu

SEQ ID NO: 1665526 - RNA, 20 nt, Human
gccaaggccaaaggaagcac

SEQ ID NO: 1665527 - RNA, 21 nt, Human
gccacuccagaccccuggcuu

SEQ ID NO: 1665528 - RNA, 20 nt, Human
gccacuccagaccccuggcu

SEQ ID NO: 1665529 - RNA, 24 nt, Human
gccaaggccaaaggaagcacaugc

SEQ ID NO: 1665530 - RNA, 22 nt, Human
gccacuccagaccccuggcuuu

SEQ ID NO: 1665531 - RNA, 20 nt, Human
gccacugcaccgggccacag

SEQ ID NO: 1665532 - RNA, 21 nt, Human
gccacugcaccgggccacaga

SEQ ID NO: 1665533 - RNA, 22 nt, Human
gccagagacacaagccuucggc

SEQ ID NO: 1665534 - RNA, 22 nt, Human
gccacugcaccgggccacagag

SEQ ID NO: 1665535 - RNA, 21 nt, Human
gccagagacacaagccuucgg

SEQ ID NO: 1665536 - RNA, 20 nt, Human
gcccacauagugaugguucc

SEQ ID NO: 1665537 - RNA, 21 nt, Human
gcccaagaauagaugcugacu

SEQ ID NO: 1665538 - RNA, 22 nt, Human
gcccaagaauagaugcugacug

SEQ ID NO: 1665539 - RNA, 24 nt, Human
gcccaaccugcucuccucuugcca

SEQ ID NO: 1665540 - RNA, 24 nt, Human
gccaugcuccuggcccacugcauc

SEQ ID NO: 1665541 - RNA, 19 nt, Human
gccaugggcacugugggua

SEQ ID NO: 1665542 - RNA, 15 nt, Human
gccaugggccuccug

SEQ ID NO: 1665543 - RNA, 16 nt, Human
gccaugggccuccugu

SEQ ID NO: 1665544 - RNA, 15 nt, Human
gcccaccuggccucu

SEQ ID NO: 1665545 - RNA, 16 nt, Human
gcccaccuggccucug

SEQ ID NO: 1665546 - RNA, 17 nt, Human
gcccaccuggccucugc

SEQ ID NO: 1665547 - RNA, 20 nt, Human
gcccaccuggccucugcacu

SEQ ID NO: 1665548 - RNA, 21 nt, Human
gcccaccuggccucugcacuc

SEQ ID NO: 1665549 - RNA, 24 nt, Human
gcccaccuggccucugcacucccc

SEQ ID NO: 1665550 - RNA, 14 nt, Human
gcccacuucugcca

SEQ ID NO: 1665551 - RNA, 13 nt, Human
gcccaccuuggcu

SEQ ID NO: 1665552 - RNA, 15 nt, Human
gcccaccuuggcuca

SEQ ID NO: 1665553 - RNA, 16 nt, Human
gcccaccuuggcucaa

SEQ ID NO: 1665554 - RNA, 17 nt, Human
gcccaccuuggcucaag

SEQ ID NO: 1665555 - RNA, 17 nt, Human
gccaggcugggucgccc

SEQ ID NO: 1665556 - RNA, 23 nt, Human
gccaggcugggucgcccuggacu

SEQ ID NO: 1665557 - RNA, 13 nt, Human
gccaggcuggucu

SEQ ID NO: 1665558 - RNA, 15 nt, Human
gccaggcuggucuca

SEQ ID NO: 1665559 - RNA, 23 nt, Human
gccaguaaaugggggugcauuug

SEQ ID NO: 1665560 - RNA, 14 nt, Human
gccaugcuccuggc

SEQ ID NO: 1665561 - RNA, 14 nt, Human
gccauccagguuca

SEQ ID NO: 1665562 - RNA, 23 nt, Human
gccaucccucccuccaccucccu

SEQ ID NO: 1665563 - RNA, 18 nt, Human
gccaucccucccuccacc

SEQ ID NO: 1665564 - RNA, 15 nt, Human
gccgucuaccugagg

SEQ ID NO: 1665565 - RNA, 16 nt, Human
gccgucuaccugaggg

SEQ ID NO: 1665566 - RNA, 17 nt, Human
gccgucuaccugagggg

SEQ ID NO: 1665567 - RNA, 14 nt, Human
gccgugccuucagc

SEQ ID NO: 1665568 - RNA, 15 nt, Human
gccgugccuucagcu

SEQ ID NO: 1665569 - RNA, 17 nt, Human
gccgugccuucagcucu

SEQ ID NO: 1665570 - RNA, 19 nt, Human
gccgugccuucagcucuac

SEQ ID NO: 1665571 - RNA, 19 nt, Human
gccguggcuucccgcucag

SEQ ID NO: 1665572 - RNA, 21 nt, Human
gccguggcuucccgcucagcc

SEQ ID NO: 1665573 - RNA, 22 nt, Human
gccguggcuucccgcucagccc

SEQ ID NO: 1665574 - RNA, 20 nt, Human
gccguguaaccauggaccca

SEQ ID NO: 1665575 - RNA, 22 nt, Human
gccuaugugcaugcagcaucua

SEQ ID NO: 1665576 - RNA, 18 nt, Human
gccucaaccuccugggcu

SEQ ID NO: 1665577 - RNA, 19 nt, Human
gccucaaccuccugggcua

SEQ ID NO: 1665578 - RNA, 13 nt, Human
gccucacaguccu

SEQ ID NO: 1665579 - RNA, 17 nt, Human
gccucacaguccuuacc

SEQ ID NO: 1665580 - RNA, 22 nt, Human
gccuaaauccauuuggaaaucu

SEQ ID NO: 1665581 - RNA, 23 nt, Human
gccuaaauccauuuggaaaucuu

SEQ ID NO: 1665582 - RNA, 12 nt, Human
gccuaaauccau

SEQ ID NO: 1665583 - RNA, 13 nt, Human
gccuaaauccauu

SEQ ID NO: 1665584 - RNA, 19 nt, Human
gccuaaauccauuuggaaa

SEQ ID NO: 1665585 - RNA, 21 nt, Human
gccuaaauccauuuggaaauc

SEQ ID NO: 1665586 - RNA, 14 nt, Human
gcccugcuuucaga

SEQ ID NO: 1665587 - RNA, 16 nt, Human
gcccugcuuucagaua

SEQ ID NO: 1665588 - RNA, 16 nt, Human
gcccugcuuugggcug

SEQ ID NO: 1665589 - RNA, 18 nt, Human
gcccugcuuugggcugcc

SEQ ID NO: 1665590 - RNA, 14 nt, Human
gcccuucucuccag

SEQ ID NO: 1665591 - RNA, 16 nt, Human
gcccuucucuccagcc

SEQ ID NO: 1665592 - RNA, 17 nt, Human
gcccuucucuccagccc

SEQ ID NO: 1665593 - RNA, 18 nt, Human
gcccuucucuccagcccc

SEQ ID NO: 1665594 - RNA, 22 nt, Human
gccgagaucacgccacugcacu

SEQ ID NO: 1665595 - RNA, 20 nt, Human
gccgagaucacgccacugca

SEQ ID NO: 1665596 - RNA, 21 nt, Human
gccgagaucacgccacugcac

SEQ ID NO: 1665597 - RNA, 11 nt, Human
gccgcagcccu

SEQ ID NO: 1665598 - RNA, 12 nt, Human
gccgcagcccug

SEQ ID NO: 1665599 - RNA, 13 nt, Human
gccgcagcccugc

SEQ ID NO: 1665600 - RNA, 21 nt, Human
gccgggcgcgguggcucacgc

SEQ ID NO: 1665601 - RNA, 20 nt, Human
gccgggcgugguggugagug

SEQ ID NO: 1665602 - RNA, 13 nt, Human
gccucucucaggc

SEQ ID NO: 1665603 - RNA, 14 nt, Human
gccucucucaggcc

SEQ ID NO: 1665604 - RNA, 16 nt, Human
gccucucucaggccaa

SEQ ID NO: 1665605 - RNA, 17 nt, Human
gccucugacacacagcu

SEQ ID NO: 1665606 - RNA, 18 nt, Human
gccucugacacacagcuc

SEQ ID NO: 1665607 - RNA, 14 nt, Human
gccucugcacuccc

SEQ ID NO: 1665608 - RNA, 19 nt, Human
gccucugacacacagcucu

SEQ ID NO: 1665609 - RNA, 20 nt, Human
gccucugacacacagcucug

SEQ ID NO: 1665610 - RNA, 21 nt, Human
gccucugacacacagcucugu

SEQ ID NO: 1665611 - RNA, 18 nt, Human
gccucugccucugacaca

SEQ ID NO: 1665612 - RNA, 15 nt, Human
gccucugcacucccc

SEQ ID NO: 1665613 - RNA, 12 nt, Human
gccucugccucu

SEQ ID NO: 1665614 - RNA, 13 nt, Human
gccucugccucug

SEQ ID NO: 1665615 - RNA, 13 nt, Human
gccugcaagggag

SEQ ID NO: 1665616 - RNA, 15 nt, Human
gccugcaagggagug

SEQ ID NO: 1665617 - RNA, 21 nt, Human
gccucacaguccuuaccagca

SEQ ID NO: 1665618 - RNA, 18 nt, Human
gccucacaguccuuacca

SEQ ID NO: 1665619 - RNA, 15 nt, Human
gccucagcauccugg

SEQ ID NO: 1665620 - RNA, 16 nt, Human
gccucagcauccuggc

SEQ ID NO: 1665621 - RNA, 17 nt, Human
gccucagcauccuggca

SEQ ID NO: 1665622 - RNA, 18 nt, Human
gccucccaaagugcuggg

SEQ ID NO: 1665623 - RNA, 19 nt, Human
gccucccaaagugcuggga

SEQ ID NO: 1665624 - RNA, 13 nt, Human
gccucccaacuca

SEQ ID NO: 1665625 - RNA, 14 nt, Human
gccucccaucaccc

SEQ ID NO: 1665626 - RNA, 16 nt, Human
gccucccaucacccgc

SEQ ID NO: 1665627 - RNA, 16 nt, Human
gccucccaacucaccc

SEQ ID NO: 1665628 - RNA, 17 nt, Human
gccucccaacucacccc

SEQ ID NO: 1665629 - RNA, 18 nt, Human
gccucccaacucacccca

SEQ ID NO: 1665630 - RNA, 19 nt, Human
gccucccaacucaccccag

SEQ ID NO: 1665631 - RNA, 20 nt, Human
gccucccgaguagcugggac

SEQ ID NO: 1665632 - RNA, 18 nt, Human
gccucccgaguagcuggg

SEQ ID NO: 1665633 - RNA, 19 nt, Human
gccucccgaguagcuggga

SEQ ID NO: 1665634 - RNA, 23 nt, Human
gccuccccuccucugcuugccau

SEQ ID NO: 1665635 - RNA, 22 nt, Human
gccuccccuccucugcuugcca

SEQ ID NO: 1665636 - RNA, 20 nt, Human
gccuccccuccucugcuugc

SEQ ID NO: 1665637 - RNA, 17 nt, Human
gccucccaucacccgcu

SEQ ID NO: 1665638 - RNA, 19 nt, Human
gccuccccuccucugcuug

SEQ ID NO: 1665639 - RNA, 17 nt, Human
gccuccccuccucugcu

SEQ ID NO: 1665640 - RNA, 21 nt, Human
gcuaagagggagggagggcuc

SEQ ID NO: 1665641 - RNA, 20 nt, Human
gcuaagagggagggagggcu

SEQ ID NO: 1665642 - RNA, 20 nt, Human
gcuacacacugcauguuugu

SEQ ID NO: 1665643 - RNA, 13 nt, Human
gcuacacacugca

SEQ ID NO: 1665644 - RNA, 22 nt, Human
gcuacacaggggaaaagaggag

SEQ ID NO: 1665645 - RNA, 14 nt, Human
gcuacacaggggaa

SEQ ID NO: 1665646 - RNA, 13 nt, Human
gcuaaacuuuucu

SEQ ID NO: 1665647 - RNA, 15 nt, Human
gcuaaacuuuucuga

SEQ ID NO: 1665648 - RNA, 17 nt, Human
gcuaaacuuuucugaua

SEQ ID NO: 1665649 - RNA, 13 nt, Human
gcuaagagggagg

SEQ ID NO: 1665650 - RNA, 20 nt, Human
gcuaccuuuguauucucucc

SEQ ID NO: 1665651 - RNA, 16 nt, Human
gcuaccuuuguauucu

SEQ ID NO: 1665652 - RNA, 19 nt, Human
gcuagaacucccuuucaac

SEQ ID NO: 1665653 - RNA, 19 nt, Human
gcuaggaaauccagggugg

SEQ ID NO: 1665654 - RNA, 15 nt, Human
gcuaggaacacuccu

SEQ ID NO: 1665655 - RNA, 22 nt, Human
gcuaggaaauccaggguggugg

SEQ ID NO: 1665656 - RNA, 16 nt, Human
gcuaggaacacuccuu

SEQ ID NO: 1665657 - RNA, 13 nt, Human
gcuauaggugcua

SEQ ID NO: 1665658 - RNA, 13 nt, Human
gcgggucacagga

SEQ ID NO: 1665659 - RNA, 15 nt, Human
gcgggucacaggagg

SEQ ID NO: 1665660 - RNA, 16 nt, Human
gcggacagccacggcc

SEQ ID NO: 1665661 - RNA, 15 nt, Human
gcggacagccacggc

SEQ ID NO: 1665662 - RNA, 19 nt, Human
gcgggucacaggagggagg

SEQ ID NO: 1665663 - RNA, 20 nt, Human
gcgggucacaggagggaggg

SEQ ID NO: 1665664 - RNA, 19 nt, Human
gcgucucauacucaccuca

SEQ ID NO: 1665665 - RNA, 11 nt, Human
gcggacagcca

SEQ ID NO: 1665666 - RNA, 13 nt, Human
gcggacagccacg

SEQ ID NO: 1665667 - RNA, 18 nt, Human
gcgccuacaggagugagc

SEQ ID NO: 1665668 - RNA, 15 nt, Human
gcgccuacaggagug

SEQ ID NO: 1665669 - RNA, 22 nt, Human
gcgacagugagacucugucuca

SEQ ID NO: 1665670 - RNA, 12 nt, Human
gcgacagugaga

SEQ ID NO: 1665671 - RNA, 22 nt, Human
gccuuuggaaacagcucgacuu

SEQ ID NO: 1665672 - RNA, 13 nt, Human
gccuuuggcuuca

SEQ ID NO: 1665673 - RNA, 23 nt, Human
gcgacaaugcaaaccaucauuga

SEQ ID NO: 1665674 - RNA, 23 nt, Human
gccuucgauacaccgggccugga

SEQ ID NO: 1665675 - RNA, 18 nt, Human
gccuucgauacaccgggc

SEQ ID NO: 1665676 - RNA, 22 nt, Human
gccuucgauacaccgggccugg

SEQ ID NO: 1665677 - RNA, 15 nt, Human
gccuuccaggggugg

SEQ ID NO: 1665678 - RNA, 16 nt, Human
gccuuccagggguggg

SEQ ID NO: 1665679 - RNA, 21 nt, Human
gccuuccaggggugggacacc

SEQ ID NO: 1665680 - RNA, 13 nt, Human
gccuucagggagu

SEQ ID NO: 1665681 - RNA, 21 nt, Human
gccuucagggagugagggauu

SEQ ID NO: 1665682 - RNA, 13 nt, Human
gccuucaucuccc

SEQ ID NO: 1665683 - RNA, 12 nt, Human
gccuuccagggg

SEQ ID NO: 1665684 - RNA, 16 nt, Human
gccuuauggaacacuc

SEQ ID NO: 1665685 - RNA, 18 nt, Human
gccuuauggaacacucug

SEQ ID NO: 1665686 - RNA, 19 nt, Human
gccuuauggaacacucuga

SEQ ID NO: 1665687 - RNA, 20 nt, Human
gccuuauggaacacucugag

SEQ ID NO: 1665688 - RNA, 12 nt, Human
gccuguuuaaga

SEQ ID NO: 1665689 - RNA, 13 nt, Human
gccuguuuaagag

SEQ ID NO: 1665690 - RNA, 18 nt, Human
gccuuacccucauguucu

SEQ ID NO: 1665691 - RNA, 21 nt, Human
gccuuacacaaugguuuucuu

SEQ ID NO: 1665692 - RNA, 20 nt, Human
gccuuacacaaugguuuucu

SEQ ID NO: 1665693 - RNA, 19 nt, Human
gccuuacccucauguucuu

SEQ ID NO: 1665694 - RNA, 19 nt, Human
gccuuagaagucacacagu

SEQ ID NO: 1665695 - RNA, 17 nt, Human
gccuuagaagucacaca

SEQ ID NO: 1665696 - RNA, 18 nt, Human
gccuuagaagucacacag

SEQ ID NO: 1665697 - RNA, 10 nt, Human
gccuuaugga

SEQ ID NO: 1665698 - RNA, 14 nt, Human
gccuuauggaacac

SEQ ID NO: 1665699 - RNA, 13 nt, Human
gccugguggcagc

SEQ ID NO: 1665700 - RNA, 14 nt, Human
gccugguggcagcu

SEQ ID NO: 1665701 - RNA, 18 nt, Human
gccugguggcagcugcgg

SEQ ID NO: 1665702 - RNA, 19 nt, Human
gccugguggcagcugcggu

SEQ ID NO: 1665703 - RNA, 21 nt, Human
gccugguggcagcugcggucc

SEQ ID NO: 1665704 - RNA, 22 nt, Human
gccugggggcugggcagaggaa

SEQ ID NO: 1665705 - RNA, 19 nt, Human
gauuccagagaguggcucc

SEQ ID NO: 1665706 - RNA, 20 nt, Human
gauuccagagaguggcuccu

SEQ ID NO: 1665707 - RNA, 22 nt, Human
gauuccagagaguggcuccucc

SEQ ID NO: 1665708 - RNA, 17 nt, Human
gauucauauuuacuucu

SEQ ID NO: 1665709 - RNA, 18 nt, Human
gauucauauuuacuucuu

SEQ ID NO: 1665710 - RNA, 19 nt, Human
gauucauauuuacuucuua

SEQ ID NO: 1665711 - RNA, 19 nt, Human
gauucagacagcugccugg

SEQ ID NO: 1665712 - RNA, 13 nt, Human
gauucagcucugc

SEQ ID NO: 1665713 - RNA, 15 nt, Human
gauucagcucugcaa

SEQ ID NO: 1665714 - RNA, 23 nt, Human
gauggggcugcaccggcuggccu

SEQ ID NO: 1665715 - RNA, 21 nt, Human
gauucccaagcucugcuccuc

SEQ ID NO: 1665716 - RNA, 19 nt, Human
gauucccaagcucugcucc

SEQ ID NO: 1665717 - RNA, 20 nt, Human
gauucccaagcucugcuccu

SEQ ID NO: 1665718 - RNA, 12 nt, Human
gauucuuuccug

SEQ ID NO: 1665719 - RNA, 21 nt, Human
gauugcaacaggcugggcuuc

SEQ ID NO: 1665720 - RNA, 16 nt, Human
gauugcaccacugcac

SEQ ID NO: 1665721 - RNA, 23 nt, Human
gauugcaccacugcacuccagcc

SEQ ID NO: 1665722 - RNA, 16 nt, Human
gauucuuuccugaggc

SEQ ID NO: 1665723 - RNA, 17 nt, Human
gauucuuuccugaggcu

SEQ ID NO: 1665724 - RNA, 18 nt, Human
gauucuuuccugaggcug

SEQ ID NO: 1665725 - RNA, 20 nt, Human
gauugcaacaggcugggcuu

SEQ ID NO: 1665726 - RNA, 18 nt, Human
gauuuccguuaaaauacc

SEQ ID NO: 1665727 - RNA, 15 nt, Human
gauuuccguuaaaau

SEQ ID NO: 1665728 - RNA, 22 nt, Human
gauuuggucaacacuaacauga

SEQ ID NO: 1665729 - RNA, 19 nt, Human
gauuucuguuuagauaaua

SEQ ID NO: 1665730 - RNA, 11 nt, Human
gauuucuguuu

SEQ ID NO: 1665731 - RNA, 13 nt, Human
gauuuuauuaugu

SEQ ID NO: 1665732 - RNA, 15 nt, Human
gauuuuauuauguaa

SEQ ID NO: 1665733 - RNA, 18 nt, Human
gauuuuauuauguaaauc

SEQ ID NO: 1665734 - RNA, 19 nt, Human
gauuuuauuauguaaaucc

SEQ ID NO: 1665735 - RNA, 20 nt, Human
gauuuuauuauguaaauccc

SEQ ID NO: 1665736 - RNA, 23 nt, Human
gauuuuauuauguaaaucccauu

SEQ ID NO: 1665737 - RNA, 19 nt, Human
gauuuguuaaugauagcua

SEQ ID NO: 1665738 - RNA, 14 nt, Human
gauuuuaugcuuua

SEQ ID NO: 1665739 - RNA, 19 nt, Human
gauuuuaugcuuuaaacau

SEQ ID NO: 1665740 - RNA, 15 nt, Human
gauuuuccugaaaac

SEQ ID NO: 1665741 - RNA, 14 nt, Human
gcaaggucauuuuu

SEQ ID NO: 1665742 - RNA, 15 nt, Human
gcaaucaaaucugcu

SEQ ID NO: 1665743 - RNA, 17 nt, Human
gcaaucaaaucugcuuu

SEQ ID NO: 1665744 - RNA, 17 nt, Human
gcaaugaccuuucaaua

SEQ ID NO: 1665745 - RNA, 20 nt, Human
gcaaugaccuuucaauagga

SEQ ID NO: 1665746 - RNA, 22 nt, Human
gcaaugaccuuucaauaggaaa

SEQ ID NO: 1665747 - RNA, 23 nt, Human
gcaaugaccuuucaauaggaaaa

SEQ ID NO: 1665748 - RNA, 13 nt, Human
gcaaugcuggcug

SEQ ID NO: 1665749 - RNA, 14 nt, Human
gcaaugcuggcugu

SEQ ID NO: 1665750 - RNA, 22 nt, Human
gcaaugcuggcuguuggcuggg

SEQ ID NO: 1665751 - RNA, 23 nt, Human
gcaaugcuggcuguuggcugggg

SEQ ID NO: 1665752 - RNA, 11 nt, Human
gcaaggcuguc

SEQ ID NO: 1665753 - RNA, 13 nt, Human
gcaaggcugucaa

SEQ ID NO: 1665754 - RNA, 14 nt, Human
gcaagggugauggg

SEQ ID NO: 1665755 - RNA, 18 nt, Human
gcaaggagauuuacaacu

SEQ ID NO: 1665756 - RNA, 10 nt, Human
gcaagccaga

SEQ ID NO: 1665757 - RNA, 17 nt, Human
gcaagaauugaagcagg

SEQ ID NO: 1665758 - RNA, 23 nt, Human
gcaagacgcugugcugcccugcc

SEQ ID NO: 1665759 - RNA, 14 nt, Human
gcaagacgcugugc

SEQ ID NO: 1665760 - RNA, 20 nt, Human
gcaagacgcugugcugcccu

SEQ ID NO: 1665761 - RNA, 21 nt, Human
gcaagacgcugugcugcccug

SEQ ID NO: 1665762 - RNA, 22 nt, Human
gcaagacgcugugcugcccugc

SEQ ID NO: 1665763 - RNA, 16 nt, Human
gcaaaguaucccuacu

SEQ ID NO: 1665764 - RNA, 21 nt, Human
gcaaagcccagcuugaaaccu

SEQ ID NO: 1665765 - RNA, 13 nt, Human
gcaaagcccagcu

SEQ ID NO: 1665766 - RNA, 23 nt, Human
gcaaagcacugacuucuaaguaa

SEQ ID NO: 1665767 - RNA, 14 nt, Human
gaucauugugaaau

SEQ ID NO: 1665768 - RNA, 20 nt, Human
gaucauugugaaauuauuca

SEQ ID NO: 1665769 - RNA, 20 nt, Human
gauccccaagccuggcaagg

SEQ ID NO: 1665770 - RNA, 17 nt, Human
gaucauccacugugcca

SEQ ID NO: 1665771 - RNA, 19 nt, Human
gaucauccacugugccaug

SEQ ID NO: 1665772 - RNA, 21 nt, Human
gaucauccacugugccaugug

SEQ ID NO: 1665773 - RNA, 12 nt, Human
gaucacggcuca

SEQ ID NO: 1665774 - RNA, 22 nt, Human
gaucagucugauucccaagcuc

SEQ ID NO: 1665775 - RNA, 12 nt, Human
gaucagccuggg

SEQ ID NO: 1665776 - RNA, 15 nt, Human
gaucagccugggcaa

SEQ ID NO: 1665777 - RNA, 21 nt, Human
gaucaaguuauuuuuaauuug

SEQ ID NO: 1665778 - RNA, 18 nt, Human
gaucacgccacugcacua

SEQ ID NO: 1665779 - RNA, 22 nt, Human
gauaauacaccacuacauucug

SEQ ID NO: 1665780 - RNA, 21 nt, Human
gauaauacaccacuacauucu

SEQ ID NO: 1665781 - RNA, 18 nt, Human
gauaauacaccacuacau

SEQ ID NO: 1665782 - RNA, 14 nt, Human
gauaauacaccacu

SEQ ID NO: 1665783 - RNA, 19 nt, Human
gauacaccgggccuggaga

SEQ ID NO: 1665784 - RNA, 11 nt, Human
gauacagaaaa

SEQ ID NO: 1665785 - RNA, 23 nt, Human
gauagauaggucagugcaaauac

SEQ ID NO: 1665786 - RNA, 18 nt, Human
gauacaggaaaagcugcu

SEQ ID NO: 1665787 - RNA, 19 nt, Human
gauacaggaaaagcugcug

SEQ ID NO: 1665788 - RNA, 21 nt, Human
gauagcacagacccugcccug

SEQ ID NO: 1665789 - RNA, 22 nt, Human
gauagcacagacccugcccugu

SEQ ID NO: 1665790 - RNA, 13 nt, Human
gauagcagggcau

SEQ ID NO: 1665791 - RNA, 19 nt, Human
gauaaaguugguaaaccuu

SEQ ID NO: 1665792 - RNA, 13 nt, Human
gaggaaggaaacc

SEQ ID NO: 1665793 - RNA, 19 nt, Human
gaggaaggaaacccagcuc

SEQ ID NO: 1665794 - RNA, 20 nt, Human
gaggaaggaaacccagcucu

SEQ ID NO: 1665795 - RNA, 21 nt, Human
gaggaaggaaacccagcucug

SEQ ID NO: 1665796 - RNA, 22 nt, Human
gauaaauaguuuaugauuccac

SEQ ID NO: 1665797 - RNA, 15 nt, Human
gaucccucauccuca

SEQ ID NO: 1665798 - RNA, 16 nt, Human
gaucccucauccucau

SEQ ID NO: 1665799 - RNA, 21 nt, Human
gauccugagccagauuucacu

SEQ ID NO: 1665800 - RNA, 22 nt, Human
gauccugagccagauuucacuc

SEQ ID NO: 1665801 - RNA, 13 nt, Human
gauccuggaaauc

SEQ ID NO: 1665802 - RNA, 18 nt, Human
gaucuuugcagacaggca

SEQ ID NO: 1665803 - RNA, 14 nt, Human
gaugaaaauauuug

SEQ ID NO: 1665804 - RNA, 22 nt, Human
gauggauuuccagccaaagccu

SEQ ID NO: 1665805 - RNA, 20 nt, Human
gaugccugguggcagcugcg

SEQ ID NO: 1665806 - RNA, 18 nt, Human
gaugccugguggcagcug

SEQ ID NO: 1665807 - RNA, 19 nt, Human
gaugccugguggcagcugc

SEQ ID NO: 1665808 - RNA, 20 nt, Human
gauggcugugccucugccug

SEQ ID NO: 1665809 - RNA, 13 nt, Human
gauggggcccugc

SEQ ID NO: 1665810 - RNA, 14 nt, Human
gauggggcccugcc

SEQ ID NO: 1665811 - RNA, 22 nt, Human
gauggggcccugccuccuuugu

SEQ ID NO: 1665812 - RNA, 13 nt, Human
gauggcugugccu

SEQ ID NO: 1665813 - RNA, 17 nt, Human
gauggcugugccucugc

SEQ ID NO: 1665814 - RNA, 18 nt, Human
gauggcugugccucugcc

SEQ ID NO: 1665815 - RNA, 19 nt, Human
gauggcugugccucugccu

SEQ ID NO: 1665816 - RNA, 21 nt, Human
gauggcuaguaucaaaagaaa

SEQ ID NO: 1665817 - RNA, 19 nt, Human
gaugcagccucacaguccu

SEQ ID NO: 1665818 - RNA, 14 nt, Human
gaugcagccucaca

SEQ ID NO: 1665819 - RNA, 12 nt, Human
gaugcagccuca

SEQ ID NO: 1665820 - RNA, 20 nt, Human
gaugccaaguuguuugagaa

SEQ ID NO: 1665821 - RNA, 14 nt, Human
gaugcaccagcccu

SEQ ID NO: 1665822 - RNA, 13 nt, Human
gaugcaccagccc

SEQ ID NO: 1665823 - RNA, 22 nt, Human
gaugcacagaguuguuacauuu

SEQ ID NO: 1665824 - RNA, 21 nt, Human
gaugcacagaguuguuacauu

SEQ ID NO: 1665825 - RNA, 18 nt, Human
gcacggugaauggcuuug

SEQ ID NO: 1665826 - RNA, 12 nt, Human
gcacgauuucug

SEQ ID NO: 1665827 - RNA, 19 nt, Human
gcaccuuagacagucccug

SEQ ID NO: 1665828 - RNA, 18 nt, Human
gcaccuuagacagucccu

SEQ ID NO: 1665829 - RNA, 21 nt, Human
gcaccuggaauauauaaccag

SEQ ID NO: 1665830 - RNA, 18 nt, Human
gcaccuggaauauauaac

SEQ ID NO: 1665831 - RNA, 15 nt, Human
gcacccucaggcagg

SEQ ID NO: 1665832 - RNA, 22 nt, Human
gcaccuggaauauauaaccagu

SEQ ID NO: 1665833 - RNA, 14 nt, Human
gcaccuuagacagu

SEQ ID NO: 1665834 - RNA, 17 nt, Human
gcaccuuagacaguccc

SEQ ID NO: 1665835 - RNA, 16 nt, Human
gcaccagcagccugga

SEQ ID NO: 1665836 - RNA, 22 nt, Human
gcacccaccaucaugucuggcu

SEQ ID NO: 1665837 - RNA, 19 nt, Human
gcacccggccccugcuggu

SEQ ID NO: 1665838 - RNA, 15 nt, Human
gcaccagcagccugg

SEQ ID NO: 1665839 - RNA, 21 nt, Human
gcaccacugcacuccagccug

SEQ ID NO: 1665840 - RNA, 22 nt, Human
gcaccacugcacuccagccugg

SEQ ID NO: 1665841 - RNA, 12 nt, Human
gcaauggcagcc

SEQ ID NO: 1665842 - RNA, 13 nt, Human
gcaauggcagccu

SEQ ID NO: 1665843 - RNA, 14 nt, Human
gcaauggcagccuu

SEQ ID NO: 1665844 - RNA, 23 nt, Human
gcagacaggcaagcaccuccugc

SEQ ID NO: 1665845 - RNA, 18 nt, Human
gcagacaggaccagggau

SEQ ID NO: 1665846 - RNA, 19 nt, Human
gcagacaggcaagcaccuc

SEQ ID NO: 1665847 - RNA, 12 nt, Human
gcagacaggacc

SEQ ID NO: 1665848 - RNA, 13 nt, Human
gcagacaggacca

SEQ ID NO: 1665849 - RNA, 15 nt, Human
gcagacaggaccagg

SEQ ID NO: 1665850 - RNA, 16 nt, Human
gcacugcuuccaguga

SEQ ID NO: 1665851 - RNA, 18 nt, Human
gcacugcuuccagugagg

SEQ ID NO: 1665852 - RNA, 22 nt, Human
gcacugguggcccgacagccug

SEQ ID NO: 1665853 - RNA, 23 nt, Human
gcacugguggcccgacagccugg

SEQ ID NO: 1665854 - RNA, 24 nt, Human
gcacugguggcccgacagccuggc

SEQ ID NO: 1665855 - RNA, 12 nt, Human
gcacugcugccc

SEQ ID NO: 1665856 - RNA, 22 nt, Human
gcacugcuuccagugaggcucu

SEQ ID NO: 1665857 - RNA, 20 nt, Human
gcacugcuuccagugaggcu

SEQ ID NO: 1665858 - RNA, 18 nt, Human
gcacgguggugaggcagu

SEQ ID NO: 1665859 - RNA, 13 nt, Human
gcagcccugcuuu

SEQ ID NO: 1665860 - RNA, 14 nt, Human
gcagcccugcagag

SEQ ID NO: 1665861 - RNA, 15 nt, Human
gcagcccugcagagg

SEQ ID NO: 1665862 - RNA, 16 nt, Human
gcagcccugcagaggg

SEQ ID NO: 1665863 - RNA, 17 nt, Human
gcagcccugcagagggc

SEQ ID NO: 1665864 - RNA, 15 nt, Human
gcagcucaccucucc

SEQ ID NO: 1665865 - RNA, 15 nt, Human
gcagccuuggcaaac

SEQ ID NO: 1665866 - RNA, 14 nt, Human
gcagcucaccucuc

SEQ ID NO: 1665867 - RNA, 20 nt, Human
gcaggaaggcugagaggaga

SEQ ID NO: 1665868 - RNA, 23 nt, Human
gcaggaggaucacuugaguccag

SEQ ID NO: 1665869 - RNA, 12 nt, Human
gcaggcagccag

SEQ ID NO: 1665870 - RNA, 13 nt, Human
gcaggcagccagg

SEQ ID NO: 1665871 - RNA, 14 nt, Human
gcaggcagccaggc

SEQ ID NO: 1665872 - RNA, 18 nt, Human
gcagauuauucacugauu

SEQ ID NO: 1665873 - RNA, 22 nt, Human
gcagauacaggaaaagcugcug

SEQ ID NO: 1665874 - RNA, 17 nt, Human
gcagacaguuaagagaa

SEQ ID NO: 1665875 - RNA, 21 nt, Human
gcagaguugaagacagagcua

SEQ ID NO: 1665876 - RNA, 18 nt, Human
gcagauaaacaguaguga

SEQ ID NO: 1665877 - RNA, 17 nt, Human
gcagccccauucugccu

SEQ ID NO: 1665878 - RNA, 23 nt, Human
gcagcaauaaagcagcguuucua

SEQ ID NO: 1665879 - RNA, 16 nt, Human
gcagcaauaaagcagc

SEQ ID NO: 1665880 - RNA, 18 nt, Human
gcagccccauucugccug

SEQ ID NO: 1665881 - RNA, 19 nt, Human
gcagccccauucugccugc

SEQ ID NO: 1665882 - RNA, 21 nt, Human
gcagccccauucugccugccc

SEQ ID NO: 1665883 - RNA, 24 nt, Human
gcagccccauucugccugcccagg

SEQ ID NO: 1665884 - RNA, 13 nt, Human
gcagcccugcaga

SEQ ID NO: 1665885 - RNA, 20 nt, Human
gcagccccuguucuggcaga

SEQ ID NO: 1665886 - RNA, 21 nt, Human
gcagccccuguucuggcagag

SEQ ID NO: 1665887 - RNA, 20 nt, Human
gcagccccgugggguuccuc

SEQ ID NO: 1665888 - RNA, 19 nt, Human
gcauucaaauguauuacag

SEQ ID NO: 1665889 - RNA, 19 nt, Human
gcauuaucuagauacugua

SEQ ID NO: 1665890 - RNA, 17 nt, Human
gcauuaucuagauacug

SEQ ID NO: 1665891 - RNA, 16 nt, Human
gcauuuguguugaaga

SEQ ID NO: 1665892 - RNA, 16 nt, Human
gcauuuguuugaacug

SEQ ID NO: 1665893 - RNA, 14 nt, Human
gcauuugcugaaua

SEQ ID NO: 1665894 - RNA, 17 nt, Human
gcauuugcugaauacag

SEQ ID NO: 1665895 - RNA, 13 nt, Human
gcauuugcugaau

SEQ ID NO: 1665896 - RNA, 18 nt, Human
gcauuuguuugaacugau

SEQ ID NO: 1665897 - RNA, 14 nt, Human
gccaaacucaccug

SEQ ID NO: 1665898 - RNA, 16 nt, Human
gccaaacucaccugcc

SEQ ID NO: 1665899 - RNA, 13 nt, Human
gccaaagccaaag

SEQ ID NO: 1665900 - RNA, 20 nt, Human
gccaaagccaaagcuaggcc

SEQ ID NO: 1665901 - RNA, 16 nt, Human
gccaaagccuccucca

SEQ ID NO: 1665902 - RNA, 19 nt, Human
gccaaagccuccuccagcc

SEQ ID NO: 1665903 - RNA, 16 nt, Human
gccaaagcuaggccug

SEQ ID NO: 1665904 - RNA, 22 nt, Human
gccaaagcuaggccuggccaga

SEQ ID NO: 1665905 - RNA, 12 nt, Human
gccaaaggaagc

SEQ ID NO: 1665906 - RNA, 18 nt, Human
gcaugaaguaauaugcac

SEQ ID NO: 1665907 - RNA, 16 nt, Human
gcaucugaaaauugau

SEQ ID NO: 1665908 - RNA, 12 nt, Human
gcaucagcugcu

SEQ ID NO: 1665909 - RNA, 18 nt, Human
gcaugcgggcuuccuccu

SEQ ID NO: 1665910 - RNA, 20 nt, Human
gcauggcaaggacugcaggg

SEQ ID NO: 1665911 - RNA, 15 nt, Human
gcauguucucugagg

SEQ ID NO: 1665912 - RNA, 21 nt, Human
gcauguucucugaggacacua

SEQ ID NO: 1665913 - RNA, 22 nt, Human
gcauguucucugaggacacuaa

SEQ ID NO: 1665914 - RNA, 13 nt, Human
gcauuauauuuau

SEQ ID NO: 1665915 - RNA, 15 nt, Human
gcagugcaugcuguc

SEQ ID NO: 1665916 - RNA, 16 nt, Human
gcagugcaugcugucc

SEQ ID NO: 1665917 - RNA, 22 nt, Human
gcagguccaggguuugaguuca

SEQ ID NO: 1665918 - RNA, 19 nt, Human
gcaggucuugaacuccugg

SEQ ID NO: 1665919 - RNA, 20 nt, Human
gcaggucuugaacuccuggc

SEQ ID NO: 1665920 - RNA, 22 nt, Human
gcagggcucagcggggacagcu

SEQ ID NO: 1665921 - RNA, 17 nt, Human
gcagggucucacucugu

SEQ ID NO: 1665922 - RNA, 18 nt, Human
gcagggucucacucuguc

SEQ ID NO: 1665923 - RNA, 15 nt, Human
gcaggcagccaggcc

SEQ ID NO: 1665924 - RNA, 16 nt, Human
gcaggcagccaggcca

SEQ ID NO: 1665925 - RNA, 19 nt, Human
gcagggcucagcggggaca

SEQ ID NO: 1665926 - RNA, 21 nt, Human
gcagggcucagcggggacagc

SEQ ID NO: 1665927 - RNA, 23 nt, Human
gcaguggugguuuucuguucuuu

SEQ ID NO: 1665928 - RNA, 13 nt, Human
gcagugggagcug

SEQ ID NO: 1665929 - RNA, 14 nt, Human
gcagugggagcugc

SEQ ID NO: 1665930 - RNA, 15 nt, Human
gcagugggagcugcc

SEQ ID NO: 1665931 - RNA, 13 nt, Human
gcauagaaguaaa

SEQ ID NO: 1665932 - RNA, 17 nt, Human
gcaguucugaagaagau

SEQ ID NO: 1665933 - RNA, 18 nt, Human
gcaguucagagcugcccu

SEQ ID NO: 1665934 - RNA, 17 nt, Human
gcaguucagagcugccc

SEQ ID NO: 1665935 - RNA, 15 nt, Human
gcaguucugaagaag

SEQ ID NO: 1665936 - RNA, 17 nt, Human
gcaguuauuaacacuaa

SEQ ID NO: 1665937 - RNA, 16 nt, Human
gcaguucagagcugcc

SEQ ID NO: 1665938 - RNA, 17 nt, Human
gcauagguuuaauaauu

SEQ ID NO: 1665939 - RNA, 15 nt, Human
gcaguugaaaagacu

SEQ ID NO: 1665940 - RNA, 17 nt, Human
gacaccuacugaguggc

SEQ ID NO: 1665941 - RNA, 22 nt, Human
gacacccugugauggggcccug

SEQ ID NO: 1665942 - RNA, 23 nt, Human
gacacccugugauggggcccugc

SEQ ID NO: 1665943 - RNA, 12 nt, Human
gacacccuguga

SEQ ID NO: 1665944 - RNA, 13 nt, Human
gacacccugugau

SEQ ID NO: 1665945 - RNA, 17 nt, Human
gacacagugaccauacu

SEQ ID NO: 1665946 - RNA, 18 nt, Human
gacacaggcccggcucca

SEQ ID NO: 1665947 - RNA, 15 nt, Human
gacacgaauauugcu

SEQ ID NO: 1665948 - RNA, 18 nt, Human
gacaccuugacagggcac

SEQ ID NO: 1665949 - RNA, 20 nt, Human
gacaccuugacagggcacac

SEQ ID NO: 1665950 - RNA, 15 nt, Human
gacaccuugacaggg

SEQ ID NO: 1665951 - RNA, 17 nt, Human
gacaccuugacagggca

SEQ ID NO: 1665952 - RNA, 19 nt, Human
gacacgaauauugcugaug

SEQ ID NO: 1665953 - RNA, 17 nt, Human
gacacgaauauugcuga

SEQ ID NO: 1665954 - RNA, 18 nt, Human
gacacgaauauugcugau

SEQ ID NO: 1665955 - RNA, 15 nt, Human
gacacuaaccacgcu

SEQ ID NO: 1665956 - RNA, 16 nt, Human
gacacuaaccacgcug

SEQ ID NO: 1665957 - RNA, 17 nt, Human
gacacuaaccacgcugg

SEQ ID NO: 1665958 - RNA, 18 nt, Human
gacacuaaccacgcugga

SEQ ID NO: 1665959 - RNA, 12 nt, Human
gacaauuuauua

SEQ ID NO: 1665960 - RNA, 16 nt, Human
gacaaugcaaaccauc

SEQ ID NO: 1665961 - RNA, 18 nt, Human
gacaaugcaaaccaucau

SEQ ID NO: 1665962 - RNA, 21 nt, Human
gacaaugacuuacuguacaug

SEQ ID NO: 1665963 - RNA, 12 nt, Human
gacaaugcaaac

SEQ ID NO: 1665964 - RNA, 20 nt, Human
gacaaugacuuacuguacau

SEQ ID NO: 1665965 - RNA, 17 nt, Human
gacaaugacuuacugua

SEQ ID NO: 1665966 - RNA, 19 nt, Human
gacaauuuauuauggcaca

SEQ ID NO: 1665967 - RNA, 13 nt, Human
gacaauuuauuau

SEQ ID NO: 1665968 - RNA, 13 nt, Human
gacacacagcucu

SEQ ID NO: 1665969 - RNA, 15 nt, Human
gacacaggcccggcu

SEQ ID NO: 1665970 - RNA, 17 nt, Human
gacacaggcccggcucc

SEQ ID NO: 1665971 - RNA, 16 nt, Human
gacaaugacccagugg

SEQ ID NO: 1665972 - RNA, 14 nt, Human
gaagucuuuguaca

SEQ ID NO: 1665973 - RNA, 16 nt, Human
gaagucuuuguacaga

SEQ ID NO: 1665974 - RNA, 22 nt, Human
gacaaggauugcuacuguccua

SEQ ID NO: 1665975 - RNA, 15 nt, Human
gacaagcucacagac

SEQ ID NO: 1665976 - RNA, 14 nt, Human
gacaggcaaugcug

SEQ ID NO: 1665977 - RNA, 16 nt, Human
gacaggcaaugcuggc

SEQ ID NO: 1665978 - RNA, 17 nt, Human
gacaggcaaugcuggcu

SEQ ID NO: 1665979 - RNA, 18 nt, Human
gacaggcaaugcuggcug

SEQ ID NO: 1665980 - RNA, 18 nt, Human
gacaggcauguucucuga

SEQ ID NO: 1665981 - RNA, 19 nt, Human
gacaggcauguucucugag

SEQ ID NO: 1665982 - RNA, 14 nt, Human
gacagcugccuggg

SEQ ID NO: 1665983 - RNA, 15 nt, Human
gacagcugccuggga

SEQ ID NO: 1665984 - RNA, 19 nt, Human
gacagccaacuauggccug

SEQ ID NO: 1665985 - RNA, 22 nt, Human
gacagccaacuauggccugugg

SEQ ID NO: 1665986 - RNA, 13 nt, Human
gacagccacggcc

SEQ ID NO: 1665987 - RNA, 12 nt, Human
gacagcugccug

SEQ ID NO: 1665988 - RNA, 13 nt, Human
gacagcugccugg

SEQ ID NO: 1665989 - RNA, 14 nt, Human
gacagacacaggcc

SEQ ID NO: 1665990 - RNA, 20 nt, Human
gacacuaaccacgcuggacc

SEQ ID NO: 1665991 - RNA, 21 nt, Human
gacacuaaccacgcuggaccu

SEQ ID NO: 1665992 - RNA, 19 nt, Human
gacagaucucugcuuugga

SEQ ID NO: 1665993 - RNA, 21 nt, Human
gacagaucucugcuuuggaaa

SEQ ID NO: 1665994 - RNA, 23 nt, Human
gacagaucucugcuuuggaaauc

SEQ ID NO: 1665995 - RNA, 15 nt, Human
gacagacacaggccc

SEQ ID NO: 1665996 - RNA, 16 nt, Human
gacagacacaggcccg

SEQ ID NO: 1665997 - RNA, 20 nt, Human
gacaggcauguucucugagg

SEQ ID NO: 1665998 - RNA, 16 nt, Human
gacauacuaaccagca

SEQ ID NO: 1665999 - RNA, 15 nt, Human
gacauacuaaccagc

SEQ ID NO: 1666000 - RNA, 16 nt, Human
gacauagucuggcugu

SEQ ID NO: 1666001 - RNA, 23 nt, Human
gacauacuaaccagcagaaaugc

SEQ ID NO: 1666002 - RNA, 14 nt, Human
gacaucaacagaua

SEQ ID NO: 1666003 - RNA, 13 nt, Human
gaccaaaaaccag

SEQ ID NO: 1666004 - RNA, 19 nt, Human
gaccaaaaaccaguauugu

SEQ ID NO: 1666005 - RNA, 20 nt, Human
gaccaaaaaccaguauugua

SEQ ID NO: 1666006 - RNA, 21 nt, Human
gacaugucuuuucuugcauga

SEQ ID NO: 1666007 - RNA, 17 nt, Human
gacaugucuuuucuugc

SEQ ID NO: 1666008 - RNA, 17 nt, Human
gacaugggacauuugcu

SEQ ID NO: 1666009 - RNA, 22 nt, Human
gacaugggacauuugcucaugg

SEQ ID NO: 1666010 - RNA, 14 nt, Human
gacauggcuguuca

SEQ ID NO: 1666011 - RNA, 17 nt, Human
gacgggguuucaccaug

SEQ ID NO: 1666012 - RNA, 23 nt, Human
gacggagucccaccuuggcugca

SEQ ID NO: 1666013 - RNA, 21 nt, Human
gacggagucccaccuuggcug

SEQ ID NO: 1666014 - RNA, 18 nt, Human
gacggagucccaccuugg

SEQ ID NO: 1666015 - RNA, 17 nt, Human
gacguguuaugacucca

SEQ ID NO: 1666016 - RNA, 20 nt, Human
gacguguuaugacuccagaa

SEQ ID NO: 1666017 - RNA, 19 nt, Human
gaccugccucggccuccca

SEQ ID NO: 1666018 - RNA, 23 nt, Human
gaccuugaacuggguacuugugg

SEQ ID NO: 1666019 - RNA, 22 nt, Human
gaccuuuaagagaaaugagcug

SEQ ID NO: 1666020 - RNA, 21 nt, Human
gaccuuucaauaggaaaaacu

SEQ ID NO: 1666021 - RNA, 12 nt, Human
gacuacaggcac

SEQ ID NO: 1666022 - RNA, 17 nt, Human
gacuacucccccaggug

SEQ ID NO: 1666023 - RNA, 22 nt, Human
gacguguuaugacuccagaauu

SEQ ID NO: 1666024 - RNA, 15 nt, Human
gacucaguggggagg

SEQ ID NO: 1666025 - RNA, 15 nt, Human
gacucagguugucug

SEQ ID NO: 1666026 - RNA, 14 nt, Human
gacuccugcaggca

SEQ ID NO: 1666027 - RNA, 15 nt, Human
gacuccugcaggcag

SEQ ID NO: 1666028 - RNA, 16 nt, Human
gacuccugcaggcagc

SEQ ID NO: 1666029 - RNA, 19 nt, Human
gacccugaggcccagaggg

SEQ ID NO: 1666030 - RNA, 20 nt, Human
gacccugaggcccagagggc

SEQ ID NO: 1666031 - RNA, 21 nt, Human
gacccugaggcccagagggcc

SEQ ID NO: 1666032 - RNA, 13 nt, Human
gacccugcccugu

SEQ ID NO: 1666033 - RNA, 15 nt, Human
gacccugcccugugg

SEQ ID NO: 1666034 - RNA, 16 nt, Human
gacccugcccuguggg

SEQ ID NO: 1666035 - RNA, 23 nt, Human
gacccugucucaaaaaaagaaaa

SEQ ID NO: 1666036 - RNA, 22 nt, Human
gaccccucauagcccucacccu

SEQ ID NO: 1666037 - RNA, 23 nt, Human
gaccccucauagcccucacccug

SEQ ID NO: 1666038 - RNA, 13 nt, Human
gaccccuccaugu

SEQ ID NO: 1666039 - RNA, 11 nt, Human
gacccacugcu

SEQ ID NO: 1666040 - RNA, 12 nt, Human
gacccacugcuu

SEQ ID NO: 1666041 - RNA, 14 nt, Human
gacccaugcugccc

SEQ ID NO: 1666042 - RNA, 15 nt, Human
gacccaugcugcccu

SEQ ID NO: 1666043 - RNA, 16 nt, Human
gacccaugcugcccug

SEQ ID NO: 1666044 - RNA, 17 nt, Human
gacccaugcugcccugu

SEQ ID NO: 1666045 - RNA, 14 nt, Human
gaccgugaggccag

SEQ ID NO: 1666046 - RNA, 15 nt, Human
gaccgugaggccaga

SEQ ID NO: 1666047 - RNA, 17 nt, Human
gacccugcccugugggc

SEQ ID NO: 1666048 - RNA, 18 nt, Human
gaccugaggcccuucucu

SEQ ID NO: 1666049 - RNA, 21 nt, Human
gaccugaggcccuucucucca

SEQ ID NO: 1666050 - RNA, 11 nt, Human
gaccucaggcc

SEQ ID NO: 1666051 - RNA, 12 nt, Human
gaccucaggccu

SEQ ID NO: 1666052 - RNA, 13 nt, Human
gaccucaggccug

SEQ ID NO: 1666053 - RNA, 15 nt, Human
gaccugaggcccuuc

SEQ ID NO: 1666054 - RNA, 21 nt, Human
gaccugccccuccucucugcc

SEQ ID NO: 1666055 - RNA, 15 nt, Human
gaccugccucggccu

SEQ ID NO: 1666056 - RNA, 23 nt, Human
gaccugauuucugagcauuuaau

SEQ ID NO: 1666057 - RNA, 22 nt, Human
gagaaugcacaaacagaggccg

SEQ ID NO: 1666058 - RNA, 20 nt, Human
gagaaugcacaaacagaggc

SEQ ID NO: 1666059 - RNA, 21 nt, Human
gagaaugcacaaacagaggcc

SEQ ID NO: 1666060 - RNA, 13 nt, Human
gagaagaacugaa

SEQ ID NO: 1666061 - RNA, 14 nt, Human
gagaagaacugaaa

SEQ ID NO: 1666062 - RNA, 16 nt, Human
gagaagaacugaaauc

SEQ ID NO: 1666063 - RNA, 15 nt, Human
gagaagagcuguuca

SEQ ID NO: 1666064 - RNA, 22 nt, Human
gagaagagcuguucacagccag

SEQ ID NO: 1666065 - RNA, 16 nt, Human
gagacagccaacuaug

SEQ ID NO: 1666066 - RNA, 12 nt, Human
gagacagcccgg

SEQ ID NO: 1666067 - RNA, 19 nt, Human
gagacagaguuuucacucu

SEQ ID NO: 1666068 - RNA, 15 nt, Human
gagacacaagccuuc

SEQ ID NO: 1666069 - RNA, 17 nt, Human
gagacacaagccuucgg

SEQ ID NO: 1666070 - RNA, 18 nt, Human
gagacacacugaagaagc

SEQ ID NO: 1666071 - RNA, 12 nt, Human
gacuuguuagau

SEQ ID NO: 1666072 - RNA, 19 nt, Human
gacuugugacgguguaccu

SEQ ID NO: 1666073 - RNA, 21 nt, Human
gagaaaauggacguguuauga

SEQ ID NO: 1666074 - RNA, 14 nt, Human
gacuuggaagcucc

SEQ ID NO: 1666075 - RNA, 15 nt, Human
gacuuggaagcuccg

SEQ ID NO: 1666076 - RNA, 16 nt, Human
gacuuggaagcuccgc

SEQ ID NO: 1666077 - RNA, 19 nt, Human
gacucgcgacaaugcaaac

SEQ ID NO: 1666078 - RNA, 17 nt, Human
gacuccugcaggcagcc

SEQ ID NO: 1666079 - RNA, 18 nt, Human
gacucgcgacaaugcaaa

SEQ ID NO: 1666080 - RNA, 12 nt, Human
gagaaaugaaaa

SEQ ID NO: 1666081 - RNA, 14 nt, Human
gagaaauuuauaaa

SEQ ID NO: 1666082 - RNA, 23 nt, Human
gagaaaguacuucuccacccugc

SEQ ID NO: 1666083 - RNA, 16 nt, Human
gagaaacagccugugu

SEQ ID NO: 1666084 - RNA, 13 nt, Human
gagaaagacuauu

SEQ ID NO: 1666085 - RNA, 15 nt, Human
gagaaagacuauuca

SEQ ID NO: 1666086 - RNA, 17 nt, Human
gagaaagacuauucaaa

SEQ ID NO: 1666087 - RNA, 18 nt, Human
gagaaagacuauucaaac

SEQ ID NO: 1666088 - RNA, 17 nt, Human
gagagaagagaaugcac

SEQ ID NO: 1666089 - RNA, 19 nt, Human
gagagacacacugaagaag

SEQ ID NO: 1666090 - RNA, 21 nt, Human
gagagggugggagugggccca

SEQ ID NO: 1666091 - RNA, 13 nt, Human
gagaggggaacag

SEQ ID NO: 1666092 - RNA, 18 nt, Human
gagaggggaacagacugg

SEQ ID NO: 1666093 - RNA, 13 nt, Human
gagagccuuccag

SEQ ID NO: 1666094 - RNA, 14 nt, Human
gagagccuuccagg

SEQ ID NO: 1666095 - RNA, 17 nt, Human
gagauacagaauuuuau

SEQ ID NO: 1666096 - RNA, 19 nt, Human
gagagugaacaaauuuaca

SEQ ID NO: 1666097 - RNA, 15 nt, Human
gagagugaacaaauu

SEQ ID NO: 1666098 - RNA, 12 nt, Human
gagaccaucccu

SEQ ID NO: 1666099 - RNA, 16 nt, Human
gagacucgcgacaaug

SEQ ID NO: 1666100 - RNA, 18 nt, Human
gagacucgcgacaaugca

SEQ ID NO: 1666101 - RNA, 23 nt, Human
gagacugucucaagagggcacug

SEQ ID NO: 1666102 - RNA, 13 nt, Human
gagacuuguauga

SEQ ID NO: 1666103 - RNA, 22 nt, Human
gagacugucucaagagggcacu

SEQ ID NO: 1666104 - RNA, 14 nt, Human
gagacucugucuca

SEQ ID NO: 1666105 - RNA, 14 nt, Human
gagacagcccgggc

SEQ ID NO: 1666106 - RNA, 17 nt, Human
gagacagcccgggcucu

SEQ ID NO: 1666107 - RNA, 18 nt, Human
gagacagcccgggcucug

SEQ ID NO: 1666108 - RNA, 19 nt, Human
gagacagcccgggcucugc

SEQ ID NO: 1666109 - RNA, 20 nt, Human
gagacagcccgggcucugcc

SEQ ID NO: 1666110 - RNA, 21 nt, Human
gagacagcccgggcucugccu

SEQ ID NO: 1666111 - RNA, 22 nt, Human
gagacagcccgggcucugccuc

SEQ ID NO: 1666112 - RNA, 23 nt, Human
gagacagcccgggcucugccucc

SEQ ID NO: 1666113 - RNA, 15 nt, Human
gagacagcucugcau

SEQ ID NO: 1666114 - RNA, 18 nt, Human
gagacagcucugcauacu

SEQ ID NO: 1666115 - RNA, 24 nt, Human
gagacagcccgggcucugccuccc

SEQ ID NO: 1666116 - RNA, 13 nt, Human
gagacagcucugc

SEQ ID NO: 1666117 - RNA, 20 nt, Human
gagccagauuucacucuccu

SEQ ID NO: 1666118 - RNA, 13 nt, Human
gagcccaccuugg

SEQ ID NO: 1666119 - RNA, 15 nt, Human
gagcccaccuuggcu

SEQ ID NO: 1666120 - RNA, 17 nt, Human
gagcccaccuuggcuca

SEQ ID NO: 1666121 - RNA, 18 nt, Human
gagccacugcaccgggcc

SEQ ID NO: 1666122 - RNA, 19 nt, Human
gagccacugcaccgggcca

SEQ ID NO: 1666123 - RNA, 20 nt, Human
gagccacugcaccgggccac

SEQ ID NO: 1666124 - RNA, 15 nt, Human
gagccagauuucacu

SEQ ID NO: 1666125 - RNA, 18 nt, Human
gagccagauuucacucuc

SEQ ID NO: 1666126 - RNA, 19 nt, Human
gagccagauuucacucucc

SEQ ID NO: 1666127 - RNA, 21 nt, Human
gagcagccacauuccugaugc

SEQ ID NO: 1666128 - RNA, 22 nt, Human
gagcagccacauuccugaugcu

SEQ ID NO: 1666129 - RNA, 23 nt, Human
gagcagagaccaucccugaaggc

SEQ ID NO: 1666130 - RNA, 19 nt, Human
gagcagagaccaucccuga

SEQ ID NO: 1666131 - RNA, 21 nt, Human
gagcagagaccaucccugaag

SEQ ID NO: 1666132 - RNA, 20 nt, Human
gagauagccaaggccaaagg

SEQ ID NO: 1666133 - RNA, 21 nt, Human
gagauagccaaggccaaagga

SEQ ID NO: 1666134 - RNA, 17 nt, Human
gagcagagaccaucccu

SEQ ID NO: 1666135 - RNA, 18 nt, Human
gagcagagaccaucccug

SEQ ID NO: 1666136 - RNA, 16 nt, Human
gagcagagaccauccc

SEQ ID NO: 1666137 - RNA, 12 nt, Human
gagccugcaguu

SEQ ID NO: 1666138 - RNA, 13 nt, Human
gagccuccugccc

SEQ ID NO: 1666139 - RNA, 13 nt, Human
gagccucagcauc

SEQ ID NO: 1666140 - RNA, 19 nt, Human
gagccucagucucccuccc

SEQ ID NO: 1666141 - RNA, 17 nt, Human
gagccucagcauccugg

SEQ ID NO: 1666142 - RNA, 14 nt, Human
gagccucagcaucc

SEQ ID NO: 1666143 - RNA, 15 nt, Human
gagccucagcauccu

SEQ ID NO: 1666144 - RNA, 21 nt, Human
gagccgagaucacgccacugc

SEQ ID NO: 1666145 - RNA, 22 nt, Human
gagccgagaucacgccacugca

SEQ ID NO: 1666146 - RNA, 18 nt, Human
gagcccacuguacuugcu

SEQ ID NO: 1666147 - RNA, 21 nt, Human
gagcccacuguacuugcucuu

SEQ ID NO: 1666148 - RNA, 11 nt, Human
gagcccacgcc

SEQ ID NO: 1666149 - RNA, 18 nt, Human
gagcccacgcccccacug

SEQ ID NO: 1666150 - RNA, 19 nt, Human
gagccgagaucacgccacu

SEQ ID NO: 1666151 - RNA, 20 nt, Human
gagccgagaucacgccacug

SEQ ID NO: 1666152 - RNA, 15 nt, Human
gagccugcaguuauu

SEQ ID NO: 1666153 - RNA, 15 nt, Human
gagcuagcagcaggg

SEQ ID NO: 1666154 - RNA, 17 nt, Human
gagcuagcagcagggag

SEQ ID NO: 1666155 - RNA, 15 nt, Human
gagcugaguggggga

SEQ ID NO: 1666156 - RNA, 16 nt, Human
gagcucgugggacagu

SEQ ID NO: 1666157 - RNA, 17 nt, Human
gaggaagagaaaaaaua

SEQ ID NO: 1666158 - RNA, 13 nt, Human
gaggaagccgcug

SEQ ID NO: 1666159 - RNA, 18 nt, Human
gaggaagccugauuaaag

SEQ ID NO: 1666160 - RNA, 19 nt, Human
gaggaagccugauuaaaga

SEQ ID NO: 1666161 - RNA, 18 nt, Human
gaggaagccgcuggggcc

SEQ ID NO: 1666162 - RNA, 14 nt, Human
gaggaagccgcugg

SEQ ID NO: 1666163 - RNA, 17 nt, Human
gaggaagccgcuggggc

SEQ ID NO: 1666164 - RNA, 14 nt, Human
gaggaacaaggcaa

SEQ ID NO: 1666165 - RNA, 16 nt, Human
gaggaacaaggcaagg

SEQ ID NO: 1666166 - RNA, 20 nt, Human
gaggaaaaccaagccguggc

SEQ ID NO: 1666167 - RNA, 21 nt, Human
gaggaaaaccaagccguggcu

SEQ ID NO: 1666168 - RNA, 23 nt, Human
gaggaaaaccaagccguggcuuc

SEQ ID NO: 1666169 - RNA, 14 nt, Human
gagcuuuuguagaa

SEQ ID NO: 1666170 - RNA, 16 nt, Human
gaggaaagcaaaggag

SEQ ID NO: 1666171 - RNA, 17 nt, Human
gaggaaagcaaaggaga

SEQ ID NO: 1666172 - RNA, 20 nt, Human
gagcuuugaaaauucagugg

SEQ ID NO: 1666173 - RNA, 22 nt, Human
gagcuuucugcuaucaaagagg

SEQ ID NO: 1666174 - RNA, 23 nt, Human
gagcugcccucuccugggcagcu

SEQ ID NO: 1666175 - RNA, 21 nt, Human
gagcugcccucuccugggcag

SEQ ID NO: 1666176 - RNA, 19 nt, Human
gagcugcccucuccugggc

SEQ ID NO: 1666177 - RNA, 18 nt, Human
gagcugcccucuccuggg

SEQ ID NO: 1666178 - RNA, 11 nt, Human
gaaaugagcug

SEQ ID NO: 1666179 - RNA, 18 nt, Human
gaaaugaggucagagccu

SEQ ID NO: 1666180 - RNA, 16 nt, Human
gaaaugggcagagcag

SEQ ID NO: 1666181 - RNA, 15 nt, Human
gaaaugggcagagca

SEQ ID NO: 1666182 - RNA, 17 nt, Human
gaaauguacagcaagga

SEQ ID NO: 1666183 - RNA, 17 nt, Human
gaaaugggcagagcaga

SEQ ID NO: 1666184 - RNA, 19 nt, Human
gaaaugggcagagcagaga

SEQ ID NO: 1666185 - RNA, 14 nt, Human
gaaauaaacgucuu

SEQ ID NO: 1666186 - RNA, 16 nt, Human
gaaauaaacgucuuaa

SEQ ID NO: 1666187 - RNA, 17 nt, Human
gaaauaaacgucuuaaa

SEQ ID NO: 1666188 - RNA, 18 nt, Human
gaaauaaacgucuuaaau

SEQ ID NO: 1666189 - RNA, 21 nt, Human
gaaauaaacgucuuaaauauu

SEQ ID NO: 1666190 - RNA, 15 nt, Human
gaaauauuuauuuua

SEQ ID NO: 1666191 - RNA, 16 nt, Human
gaaauauuuauuuuaa

SEQ ID NO: 1666192 - RNA, 18 nt, Human
gaaauaucugaaaaugua

SEQ ID NO: 1666193 - RNA, 19 nt, Human
gaaauaucugaaaauguau

SEQ ID NO: 1666194 - RNA, 20 nt, Human
gaaauaucugaaaauguaug

SEQ ID NO: 1666195 - RNA, 13 nt, Human
gaaauauuuauuu

SEQ ID NO: 1666196 - RNA, 16 nt, Human
gaaauuugaauuuugu

SEQ ID NO: 1666197 - RNA, 24 nt, Human
gaaauuugaauuuuguguuagaga

SEQ ID NO: 1666198 - RNA, 13 nt, Human
gaaauuugaauuu

SEQ ID NO: 1666199 - RNA, 21 nt, Human
gaaauuuccugggagcuuuug

SEQ ID NO: 1666200 - RNA, 15 nt, Human
gaacacuccuucaca

SEQ ID NO: 1666201 - RNA, 16 nt, Human
gaacacuccuucacag

SEQ ID NO: 1666202 - RNA, 17 nt, Human
gaacacuccuucacaga

SEQ ID NO: 1666203 - RNA, 20 nt, Human
gaacagacuggaagcacagc

SEQ ID NO: 1666204 - RNA, 23 nt, Human
gaaauuaguacuccccuccuuga

SEQ ID NO: 1666205 - RNA, 22 nt, Human
gaacaguuguguuugaagcaca

SEQ ID NO: 1666206 - RNA, 20 nt, Human
gaacaguuguguuugaagca

SEQ ID NO: 1666207 - RNA, 24 nt, Human
gaacaguuaccucugccucagaaa

SEQ ID NO: 1666208 - RNA, 17 nt, Human
gaacaggauauucucac

SEQ ID NO: 1666209 - RNA, 22 nt, Human
gaacagacuggaagcacagcuu

SEQ ID NO: 1666210 - RNA, 16 nt, Human
gaaaaaugagccuggc

SEQ ID NO: 1666211 - RNA, 16 nt, Human
gaaacggaugauuucu

SEQ ID NO: 1666212 - RNA, 20 nt, Human
gaaacuaggugcauauuuau

SEQ ID NO: 1666213 - RNA, 13 nt, Human
gaaacugccagca

SEQ ID NO: 1666214 - RNA, 15 nt, Human
gaaacugccagcaac

SEQ ID NO: 1666215 - RNA, 17 nt, Human
gaaagacuguacaaagu

SEQ ID NO: 1666216 - RNA, 19 nt, Human
gaaagacuauucaaacagu

SEQ ID NO: 1666217 - RNA, 22 nt, Human
gaaagacuauucaaacagucuc

SEQ ID NO: 1666218 - RNA, 23 nt, Human
gaaagacuauucaaacagucuca

SEQ ID NO: 1666219 - RNA, 22 nt, Human
gaaagauggcugugccucugcc

SEQ ID NO: 1666220 - RNA, 16 nt, Human
gaaagaucaaaagguu

SEQ ID NO: 1666221 - RNA, 23 nt, Human
gaaagauggcugugccucugccu

SEQ ID NO: 1666222 - RNA, 13 nt, Human
gaaagcagaacag

SEQ ID NO: 1666223 - RNA, 14 nt, Human
gaaagcagaacagu

SEQ ID NO: 1666224 - RNA, 11 nt, Human
gaaaggaaaga

SEQ ID NO: 1666225 - RNA, 16 nt, Human
gaaaggaaagaggcuc

SEQ ID NO: 1666226 - RNA, 14 nt, Human
gaaaguuuacagga

SEQ ID NO: 1666227 - RNA, 16 nt, Human
gaaaguuuacaggaaa

SEQ ID NO: 1666228 - RNA, 13 nt, Human
gaaaguucaugcu

SEQ ID NO: 1666229 - RNA, 19 nt, Human
gaaggaagacuucaucccu

SEQ ID NO: 1666230 - RNA, 21 nt, Human
gaaggaaacccagcucugguc

SEQ ID NO: 1666231 - RNA, 22 nt, Human
gaaggaaacccagcucuggucc

SEQ ID NO: 1666232 - RNA, 15 nt, Human
gaaggaacguccccu

SEQ ID NO: 1666233 - RNA, 22 nt, Human
gaaggacccggaggggccuggc

SEQ ID NO: 1666234 - RNA, 23 nt, Human
gaaggacccggaggggccuggca

SEQ ID NO: 1666235 - RNA, 22 nt, Human
gaaggaauaaauugcuccuuga

SEQ ID NO: 1666236 - RNA, 19 nt, Human
gaaggacauugcggacagc

SEQ ID NO: 1666237 - RNA, 20 nt, Human
gaaggacauugcggacagcc

SEQ ID NO: 1666238 - RNA, 21 nt, Human
gaaggacauugcggacagcca

SEQ ID NO: 1666239 - RNA, 19 nt, Human
gaaggaaacccagcucugg

SEQ ID NO: 1666240 - RNA, 20 nt, Human
gaaggaaacccagcucuggu

SEQ ID NO: 1666241 - RNA, 14 nt, Human
gaagccgcuggggc

SEQ ID NO: 1666242 - RNA, 18 nt, Human
gaagccaaaccucuguga

SEQ ID NO: 1666243 - RNA, 15 nt, Human
gaagcauuuuauaaa

SEQ ID NO: 1666244 - RNA, 17 nt, Human
gaagcauuuuauaaauc

SEQ ID NO: 1666245 - RNA, 13 nt, Human
gaagcauuuuaua

SEQ ID NO: 1666246 - RNA, 18 nt, Human
gaagccgcuggggccagu

SEQ ID NO: 1666247 - RNA, 20 nt, Human
gaagccgcuggggccaguug

SEQ ID NO: 1666248 - RNA, 21 nt, Human
gaagccgcuggggccaguugg

SEQ ID NO: 1666249 - RNA, 20 nt, Human
gaaggcagggagggccuggg

SEQ ID NO: 1666250 - RNA, 22 nt, Human
gaaggcagggagggccugggcc

SEQ ID NO: 1666251 - RNA, 23 nt, Human
gaaggcagggagggccugggccc

SEQ ID NO: 1666252 - RNA, 18 nt, Human
gaaggcagggagggccug

SEQ ID NO: 1666253 - RNA, 13 nt, Human
gaagggggcuggg

SEQ ID NO: 1666254 - RNA, 15 nt, Human
gaagggggcugggac

SEQ ID NO: 1666255 - RNA, 21 nt, Human
gaaguaauaugcacacauuuu

SEQ ID NO: 1666256 - RNA, 13 nt, Human
gaagucacacagu

SEQ ID NO: 1666257 - RNA, 20 nt, Human
gaaguaauaugcacacauuu

SEQ ID NO: 1666258 - RNA, 19 nt, Human
gaaguaauaugcacacauu

SEQ ID NO: 1666259 - RNA, 21 nt, Human
gaaggugaggagcuugaaacc

SEQ ID NO: 1666260 - RNA, 22 nt, Human
gaagucagaucugccuaaggac

SEQ ID NO: 1666261 - RNA, 23 nt, Human
gaagucagaucugccuaaggacu

SEQ ID NO: 1666262 - RNA, 14 nt, Human
gaagucagaucugc

SEQ ID NO: 1666263 - RNA, 15 nt, Human
gaagucacugcacag

SEQ ID NO: 1666264 - RNA, 21 nt, Human
gaagucacauuccugaacagg

SEQ ID NO: 1666265 - RNA, 16 nt, Human
gaagucacauuccuga

SEQ ID NO: 1666266 - RNA, 20 nt, Human
gaagucacauuccugaacag

SEQ ID NO: 1666267 - RNA, 23 nt, Human
gaaguccaagcauuuagauguau

SEQ ID NO: 1666268 - RNA, 12 nt, Human
gaacuugaaauu

SEQ ID NO: 1666269 - RNA, 13 nt, Human
gaacuugaaauuu

SEQ ID NO: 1666270 - RNA, 15 nt, Human
gaacuugaaauuuga

SEQ ID NO: 1666271 - RNA, 22 nt, Human
gaacuugaaauuugaauuuugu

SEQ ID NO: 1666272 - RNA, 17 nt, Human
gaacuuaaauaauguga

SEQ ID NO: 1666273 - RNA, 14 nt, Human
gaacuuaaauaaug

SEQ ID NO: 1666274 - RNA, 20 nt, Human
gaaccacaucuugcucugcu

SEQ ID NO: 1666275 - RNA, 18 nt, Human
gaaccacaucuugcucug

SEQ ID NO: 1666276 - RNA, 14 nt, Human
gaaccacaagacug

SEQ ID NO: 1666277 - RNA, 15 nt, Human
gaaccacaagacugc

SEQ ID NO: 1666278 - RNA, 16 nt, Human
gaacuccuaaaucaag

SEQ ID NO: 1666279 - RNA, 13 nt, Human
gaacuccugaccu

SEQ ID NO: 1666280 - RNA, 15 nt, Human
gaacuccuaaaucaa

SEQ ID NO: 1666281 - RNA, 16 nt, Human
gaacucccuuucaaca

SEQ ID NO: 1666282 - RNA, 22 nt, Human
gaacuuugaccucugcagcaau

SEQ ID NO: 1666283 - RNA, 16 nt, Human
gaacuuugaccucugc

SEQ ID NO: 1666284 - RNA, 17 nt, Human
gaacuuuccaggaaggc

SEQ ID NO: 1666285 - RNA, 12 nt, Human
gaacuugguucc

SEQ ID NO: 1666286 - RNA, 15 nt, Human
gaacuuguuuucugg

SEQ ID NO: 1666287 - RNA, 18 nt, Human
gaacuuggcgcugccccu

SEQ ID NO: 1666288 - RNA, 17 nt, Human
gaacuugggccacugug

SEQ ID NO: 1666289 - RNA, 22 nt, Human
gaacuuguaaaggaauuuaaaa

SEQ ID NO: 1666290 - RNA, 17 nt, Human
gaagauugagauguguu

SEQ ID NO: 1666291 - RNA, 22 nt, Human
gaagauugagauguguucacaa

SEQ ID NO: 1666292 - RNA, 23 nt, Human
gaagauuuugaaauuuuuauuaa

SEQ ID NO: 1666293 - RNA, 17 nt, Human
gaagauguagaggagaa

SEQ ID NO: 1666294 - RNA, 15 nt, Human
gaagacuucaucccu

SEQ ID NO: 1666295 - RNA, 16 nt, Human
gaagacuucaucccuc

SEQ ID NO: 1666296 - RNA, 12 nt, Human
gaagagccuugc

SEQ ID NO: 1666297 - RNA, 17 nt, Human
gaagacuucaucccucu

SEQ ID NO: 1666298 - RNA, 19 nt, Human
gaagacuucaucccucugg

SEQ ID NO: 1666299 - RNA, 13 nt, Human
gaagagcuguuca

SEQ ID NO: 1666300 - RNA, 15 nt, Human
gaagagcuguucaca

SEQ ID NO: 1666301 - RNA, 20 nt, Human
gaagagcuguucacagccag

SEQ ID NO: 1666302 - RNA, 23 nt, Human
gaagagcuguucacagccagacu

SEQ ID NO: 1666303 - RNA, 21 nt, Human
cuuguaugaaagauggcugug

SEQ ID NO: 1666304 - RNA, 13 nt, Human
cuuguauuaugug

SEQ ID NO: 1666305 - RNA, 14 nt, Human
cuuguauuaagaau

SEQ ID NO: 1666306 - RNA, 18 nt, Human
cuuguauuauguguguuu

SEQ ID NO: 1666307 - RNA, 15 nt, Human
cuuguauuaagaaug

SEQ ID NO: 1666308 - RNA, 17 nt, Human
cuuguggacacagcucu

SEQ ID NO: 1666309 - RNA, 18 nt, Human
cuuguggacacagcucuu

SEQ ID NO: 1666310 - RNA, 14 nt, Human
cuuggcugcaggga

SEQ ID NO: 1666311 - RNA, 17 nt, Human
cuuggggaccagagcug

SEQ ID NO: 1666312 - RNA, 18 nt, Human
cuuggggaccagagcugc

SEQ ID NO: 1666313 - RNA, 19 nt, Human
cuuggggaccagagcugcc

SEQ ID NO: 1666314 - RNA, 15 nt, Human
cuuggggccuaugca

SEQ ID NO: 1666315 - RNA, 18 nt, Human
cuuguaaaaauuaaaagu

SEQ ID NO: 1666316 - RNA, 18 nt, Human
cuuguaaaggaauuuaaa

SEQ ID NO: 1666317 - RNA, 23 nt, Human
cuuggcucaaguccucuuuucug

SEQ ID NO: 1666318 - RNA, 13 nt, Human
cuuggauuguccc

SEQ ID NO: 1666319 - RNA, 14 nt, Human
cuuggauugucccc

SEQ ID NO: 1666320 - RNA, 12 nt, Human
cuuggcugcagg

SEQ ID NO: 1666321 - RNA, 13 nt, Human
cuuggcugcaggg

SEQ ID NO: 1666322 - RNA, 15 nt, Human
cuugcuuuuaaaauc

SEQ ID NO: 1666323 - RNA, 13 nt, Human
cuugcuugcuuuu

SEQ ID NO: 1666324 - RNA, 17 nt, Human
cuugccaaauauaaaua

SEQ ID NO: 1666325 - RNA, 17 nt, Human
cuucuuuuuuugugaug

SEQ ID NO: 1666326 - RNA, 19 nt, Human
cuugaaauauaggaacuua

SEQ ID NO: 1666327 - RNA, 13 nt, Human
cuucuuuccacag

SEQ ID NO: 1666328 - RNA, 19 nt, Human
cuucuuuccacagaagcuc

SEQ ID NO: 1666329 - RNA, 19 nt, Human
cuugaacuccuggccucaa

SEQ ID NO: 1666330 - RNA, 16 nt, Human
cuugaacuggguacuu

SEQ ID NO: 1666331 - RNA, 15 nt, Human
cuugaacuuugaccu

SEQ ID NO: 1666332 - RNA, 18 nt, Human
cuugaacuggguacuugu

SEQ ID NO: 1666333 - RNA, 20 nt, Human
cuugaacuggguacuugugg

SEQ ID NO: 1666334 - RNA, 14 nt, Human
cuugaacuccuggc

SEQ ID NO: 1666335 - RNA, 15 nt, Human
cuugaacuccuggcc

SEQ ID NO: 1666336 - RNA, 17 nt, Human
cuugaacuccuggccuc

SEQ ID NO: 1666337 - RNA, 18 nt, Human
cuugaacuccuggccuca

SEQ ID NO: 1666338 - RNA, 14 nt, Human
cuugaacccgggag

SEQ ID NO: 1666339 - RNA, 19 nt, Human
cuugaaauuugaauuuugu

SEQ ID NO: 1666340 - RNA, 20 nt, Human
cuugaaauuugaauuuugug

SEQ ID NO: 1666341 - RNA, 19 nt, Human
cuugaacccgggaggcaga

SEQ ID NO: 1666342 - RNA, 20 nt, Human
cuugaacccgggaggcagag

SEQ ID NO: 1666343 - RNA, 13 nt, Human
cuugagcucagga

SEQ ID NO: 1666344 - RNA, 22 nt, Human
cuugagccuugaacuuugaccu

SEQ ID NO: 1666345 - RNA, 20 nt, Human
cuugagccuugaacuuugac

SEQ ID NO: 1666346 - RNA, 19 nt, Human
cuugagccuugaacuuuga

SEQ ID NO: 1666347 - RNA, 17 nt, Human
cuugaccauucuccacc

SEQ ID NO: 1666348 - RNA, 20 nt, Human
cuugaccauucuccaccugc

SEQ ID NO: 1666349 - RNA, 14 nt, Human
cuugagagggugga

SEQ ID NO: 1666350 - RNA, 21 nt, Human
cuugaccauucuccaccugcc

SEQ ID NO: 1666351 - RNA, 22 nt, Human
cuugcaaaguaucccuacugua

SEQ ID NO: 1666352 - RNA, 14 nt, Human
cuugcaauggcagc

SEQ ID NO: 1666353 - RNA, 20 nt, Human
cuugcagacucuacagaggc

SEQ ID NO: 1666354 - RNA, 18 nt, Human
cuugcagacucuacagag

SEQ ID NO: 1666355 - RNA, 21 nt, Human
cuugcaugguuuagaaagcuu

SEQ ID NO: 1666356 - RNA, 21 nt, Human
cuugcaugaggcuaguguggu

SEQ ID NO: 1666357 - RNA, 23 nt, Human
cuugcaucaauuuuucuuauuuc

SEQ ID NO: 1666358 - RNA, 17 nt, Human
cuuuccugaggcugggc

SEQ ID NO: 1666359 - RNA, 16 nt, Human
cuuuccugaggcuggg

SEQ ID NO: 1666360 - RNA, 20 nt, Human
cuuuccugaggcugggcucc

SEQ ID NO: 1666361 - RNA, 21 nt, Human
cuuuccugaggcugggcuccc

SEQ ID NO: 1666362 - RNA, 16 nt, Human
cuuugcagacaggcaa

SEQ ID NO: 1666363 - RNA, 19 nt, Human
cuuuggaaagaguaggaag

SEQ ID NO: 1666364 - RNA, 23 nt, Human
cuuuggaaagaguaggaagacuu

SEQ ID NO: 1666365 - RNA, 14 nt, Human
cuuugcagacaggc

SEQ ID NO: 1666366 - RNA, 15 nt, Human
cuuugcagacaggca

SEQ ID NO: 1666367 - RNA, 19 nt, Human
cuuuauuuuguguuuagga

SEQ ID NO: 1666368 - RNA, 20 nt, Human
cuuguguguuuauugucaaa

SEQ ID NO: 1666369 - RNA, 21 nt, Human
cuuguggacacagcucuucuc

SEQ ID NO: 1666370 - RNA, 22 nt, Human
cuuuccaaaguacacuguuuca

SEQ ID NO: 1666371 - RNA, 16 nt, Human
cuuuccaaaugcccag

SEQ ID NO: 1666372 - RNA, 16 nt, Human
cuuuccaaaguacacu

SEQ ID NO: 1666373 - RNA, 14 nt, Human
cuuuccaggaaggc

SEQ ID NO: 1666374 - RNA, 15 nt, Human
cuuuccccaugucuc

SEQ ID NO: 1666375 - RNA, 20 nt, Human
cuuuccccaugucucgacuc

SEQ ID NO: 1666376 - RNA, 21 nt, Human
cuuuccccaugucucgacuca

SEQ ID NO: 1666377 - RNA, 15 nt, Human
cuuuccaggaaggcu

SEQ ID NO: 1666378 - RNA, 21 nt, Human
cuuuccgguguuuaagacauu

SEQ ID NO: 1666379 - RNA, 11 nt, Human
gaaaaagaaaa

SEQ ID NO: 1666380 - RNA, 16 nt, Human
gaaaaagaaaaaauau

SEQ ID NO: 1666381 - RNA, 19 nt, Human
cuuuuuuaucaugugaaau

SEQ ID NO: 1666382 - RNA, 18 nt, Human
cuuuuuuauacauaaaca

SEQ ID NO: 1666383 - RNA, 15 nt, Human
cuuuuuuauacauaa

SEQ ID NO: 1666384 - RNA, 17 nt, Human
cuuuuuuauacauaaac

SEQ ID NO: 1666385 - RNA, 16 nt, Human
cuuuuuuauacauaaa

SEQ ID NO: 1666386 - RNA, 22 nt, Human
cuuuuuaauauugauaugcuua

SEQ ID NO: 1666387 - RNA, 13 nt, Human
cuuuucuuuucuu

SEQ ID NO: 1666388 - RNA, 23 nt, Human
cuuuugauaaucaacugggcuga

SEQ ID NO: 1666389 - RNA, 17 nt, Human
cuuuucuuucagccaag

SEQ ID NO: 1666390 - RNA, 12 nt, Human
cuuuucacugcu

SEQ ID NO: 1666391 - RNA, 22 nt, Human
cuuuucauuuaggugaggaagc

SEQ ID NO: 1666392 - RNA, 13 nt, Human
cuuuuccaacccu

SEQ ID NO: 1666393 - RNA, 23 nt, Human
cuuuuccaacccucaucaccaac

SEQ ID NO: 1666394 - RNA, 16 nt, Human
cuuuucacugcuggcu

SEQ ID NO: 1666395 - RNA, 14 nt, Human
cuuuucccuucuuu

SEQ ID NO: 1666396 - RNA, 20 nt, Human
cuuuucgcaggauucuuccu

SEQ ID NO: 1666397 - RNA, 21 nt, Human
cuuuucgcaggauucuuccuc

SEQ ID NO: 1666398 - RNA, 15 nt, Human
cuuuuaauccuggcu

SEQ ID NO: 1666399 - RNA, 18 nt, Human
cuuuuaaaacacuuccau

SEQ ID NO: 1666400 - RNA, 19 nt, Human
cugcaggucccuaauaaag

SEQ ID NO: 1666401 - RNA, 20 nt, Human
cugcaggucccuaauaaagc

SEQ ID NO: 1666402 - RNA, 21 nt, Human
cugcaggucccuaauaaagcu

SEQ ID NO: 1666403 - RNA, 22 nt, Human
cugcaggucccuaauaaagcug

SEQ ID NO: 1666404 - RNA, 23 nt, Human
cugcaggucccuaauaaagcugu

SEQ ID NO: 1666405 - RNA, 17 nt, Human
cugcaguugccagucac

SEQ ID NO: 1666406 - RNA, 13 nt, Human
cugcaguugccag

SEQ ID NO: 1666407 - RNA, 16 nt, Human
cugcaguugccaguca

SEQ ID NO: 1666408 - RNA, 11 nt, Human
cugcagguccc

SEQ ID NO: 1666409 - RNA, 12 nt, Human
cugcaggucccu

SEQ ID NO: 1666410 - RNA, 13 nt, Human
cugcaggucccua

SEQ ID NO: 1666411 - RNA, 14 nt, Human
cugcaggucccuaa

SEQ ID NO: 1666412 - RNA, 15 nt, Human
cugcaggucccuaau

SEQ ID NO: 1666413 - RNA, 16 nt, Human
cugcaggucccuaaua

SEQ ID NO: 1666414 - RNA, 17 nt, Human
cugcaggucccuaauaa

SEQ ID NO: 1666415 - RNA, 18 nt, Human
cugcaggucccuaauaaa

SEQ ID NO: 1666416 - RNA, 17 nt, Human
cugcagcaauaaagcag

SEQ ID NO: 1666417 - RNA, 14 nt, Human
cugcaccggcuggc

SEQ ID NO: 1666418 - RNA, 22 nt, Human
cugaggcccuucucuccagccc

SEQ ID NO: 1666419 - RNA, 23 nt, Human
cugaggcccuucucuccagcccc

SEQ ID NO: 1666420 - RNA, 15 nt, Human
cugcaccggcuggcc

SEQ ID NO: 1666421 - RNA, 16 nt, Human
cugcaccggcuggccu

SEQ ID NO: 1666422 - RNA, 14 nt, Human
cugcaccgggccac

SEQ ID NO: 1666423 - RNA, 15 nt, Human
cugcaccgggccaca

SEQ ID NO: 1666424 - RNA, 20 nt, Human
cugcacuccagccuggguga

SEQ ID NO: 1666425 - RNA, 18 nt, Human
cugcaccgggccacagag

SEQ ID NO: 1666426 - RNA, 20 nt, Human
cugcaccgggccacagagaa

SEQ ID NO: 1666427 - RNA, 14 nt, Human
cugcacuccccugc

SEQ ID NO: 1666428 - RNA, 13 nt, Human
cugcacuccccug

SEQ ID NO: 1666429 - RNA, 19 nt, Human
cugcacuccccugcugggu

SEQ ID NO: 1666430 - RNA, 20 nt, Human
cugcacuccccugcugggug

SEQ ID NO: 1666431 - RNA, 10 nt, Human
cugcagaggg

SEQ ID NO: 1666432 - RNA, 16 nt, Human
cugcagcaauaaagca

SEQ ID NO: 1666433 - RNA, 15 nt, Human
cugcagcaauaaagc

SEQ ID NO: 1666434 - RNA, 13 nt, Human
cugcagagggcac

SEQ ID NO: 1666435 - RNA, 21 nt, Human
cugcacuccccugcugggugu

SEQ ID NO: 1666436 - RNA, 12 nt, Human
cugcacugucaa

SEQ ID NO: 1666437 - RNA, 20 nt, Human
cugcccuaaugcgcaggcug

SEQ ID NO: 1666438 - RNA, 21 nt, Human
cugcccuaaugcgcaggcugg

SEQ ID NO: 1666439 - RNA, 22 nt, Human
cugcccuaaugcgcaggcuggc

SEQ ID NO: 1666440 - RNA, 19 nt, Human
cugccccuggcagccccug

SEQ ID NO: 1666441 - RNA, 18 nt, Human
cugccccuggcagccccu

SEQ ID NO: 1666442 - RNA, 13 nt, Human
cugcccggcaggg

SEQ ID NO: 1666443 - RNA, 20 nt, Human
cugcccggcaggguccuaga

SEQ ID NO: 1666444 - RNA, 15 nt, Human
cugccauuucugaga

SEQ ID NO: 1666445 - RNA, 12 nt, Human
cugcccaccugg

SEQ ID NO: 1666446 - RNA, 14 nt, Human
cugcccaggccccu

SEQ ID NO: 1666447 - RNA, 15 nt, Human
cugcccaggccccug

SEQ ID NO: 1666448 - RNA, 17 nt, Human
cugcccaggccugccug

SEQ ID NO: 1666449 - RNA, 16 nt, Human
cugcccaggccccugc

SEQ ID NO: 1666450 - RNA, 18 nt, Human
cugcccaggccccugcca

SEQ ID NO: 1666451 - RNA, 19 nt, Human
cugcccaggccccugccac

SEQ ID NO: 1666452 - RNA, 20 nt, Human
cugcccaggccccugccacc

SEQ ID NO: 1666453 - RNA, 20 nt, Human
cugccaucucaccuccugcu

SEQ ID NO: 1666454 - RNA, 22 nt, Human
cugccaggaagccagcaggcuc

SEQ ID NO: 1666455 - RNA, 21 nt, Human
cugccauccagguucagcuug

SEQ ID NO: 1666456 - RNA, 15 nt, Human
cugccauccucccaa

SEQ ID NO: 1666457 - RNA, 13 nt, Human
cugccaggaagcc

SEQ ID NO: 1666458 - RNA, 14 nt, Human
cugccaggaagcca

SEQ ID NO: 1666459 - RNA, 20 nt, Human
cugccaggaagccagcaggc

SEQ ID NO: 1666460 - RNA, 21 nt, Human
cugccaggaagccagcaggcu

SEQ ID NO: 1666461 - RNA, 15 nt, Human
cugccagcaacgcag

SEQ ID NO: 1666462 - RNA, 21 nt, Human
cugccacccuggggagaaagu

SEQ ID NO: 1666463 - RNA, 12 nt, Human
cugccacccugg

SEQ ID NO: 1666464 - RNA, 14 nt, Human
cugccacccugggg

SEQ ID NO: 1666465 - RNA, 15 nt, Human
cugcauaugaaagga

SEQ ID NO: 1666466 - RNA, 20 nt, Human
cugcaucaagaugugacaug

SEQ ID NO: 1666467 - RNA, 20 nt, Human
cugcaucagcugcugaaaca

SEQ ID NO: 1666468 - RNA, 14 nt, Human
cugcugccugcuuu

SEQ ID NO: 1666469 - RNA, 23 nt, Human
cugcugccugcuuuuuauggccu

SEQ ID NO: 1666470 - RNA, 15 nt, Human
cugcugcaguugcca

SEQ ID NO: 1666471 - RNA, 14 nt, Human
cugcugcaguugcc

SEQ ID NO: 1666472 - RNA, 10 nt, Human
cugcugcagu

SEQ ID NO: 1666473 - RNA, 13 nt, Human
cugcugcaguugc

SEQ ID NO: 1666474 - RNA, 16 nt, Human
cugcucuugaacuccu

SEQ ID NO: 1666475 - RNA, 18 nt, Human
cugcucuugaacuccuga

SEQ ID NO: 1666476 - RNA, 19 nt, Human
cugcucuugaacuccugac

SEQ ID NO: 1666477 - RNA, 12 nt, Human
cugcucugguua

SEQ ID NO: 1666478 - RNA, 20 nt, Human
cugcucugaugaagaggagu

SEQ ID NO: 1666479 - RNA, 20 nt, Human
cugcggugcuaucuccccca

SEQ ID NO: 1666480 - RNA, 21 nt, Human
cugcggugcuaucucccccag

SEQ ID NO: 1666481 - RNA, 22 nt, Human
cugcggugcuaucucccccagc

SEQ ID NO: 1666482 - RNA, 23 nt, Human
cugcggugcuaucucccccagcc

SEQ ID NO: 1666483 - RNA, 23 nt, Human
cugcuccucuccccagcaaguga

SEQ ID NO: 1666484 - RNA, 19 nt, Human
cugcuccucuccccagcaa

SEQ ID NO: 1666485 - RNA, 20 nt, Human
cugcuccucuccccagcaag

SEQ ID NO: 1666486 - RNA, 15 nt, Human
cugcucuccgaccag

SEQ ID NO: 1666487 - RNA, 19 nt, Human
cugcucuccgaccagacac

SEQ ID NO: 1666488 - RNA, 22 nt, Human
cugccugcuuuuuauggccugu

SEQ ID NO: 1666489 - RNA, 15 nt, Human
cugcgggucacagga

SEQ ID NO: 1666490 - RNA, 21 nt, Human
cugcgggucacaggagggagg

SEQ ID NO: 1666491 - RNA, 22 nt, Human
cugcgggucacaggagggaggg

SEQ ID NO: 1666492 - RNA, 23 nt, Human
cugcgggucacaggagggagggg

SEQ ID NO: 1666493 - RNA, 23 nt, Human
cugcgguccacccaggagccccg

SEQ ID NO: 1666494 - RNA, 18 nt, Human
cugcggugcuaucucccc

SEQ ID NO: 1666495 - RNA, 19 nt, Human
cugcggugcuaucuccccc

SEQ ID NO: 1666496 - RNA, 20 nt, Human
cugccugcaguacuuuaccu

SEQ ID NO: 1666497 - RNA, 21 nt, Human
cugccugcaguacuuuaccuc

SEQ ID NO: 1666498 - RNA, 23 nt, Human
cugccugaagucacacagugagu

SEQ ID NO: 1666499 - RNA, 19 nt, Human
cugccugaagucacacagu

SEQ ID NO: 1666500 - RNA, 18 nt, Human
cugccugaagucacacag

SEQ ID NO: 1666501 - RNA, 16 nt, Human
cugccugaagucacac

SEQ ID NO: 1666502 - RNA, 21 nt, Human
cugcccugcccaccuggccuc

SEQ ID NO: 1666503 - RNA, 15 nt, Human
cugcccucuccuggg

SEQ ID NO: 1666504 - RNA, 20 nt, Human
cugcccugcccaccuggccu

SEQ ID NO: 1666505 - RNA, 17 nt, Human
cugcccugcccaccugg

SEQ ID NO: 1666506 - RNA, 14 nt, Human
cugcccucuccugg

SEQ ID NO: 1666507 - RNA, 13 nt, Human
cugcccucuccug

SEQ ID NO: 1666508 - RNA, 12 nt, Human
cugcccucuccu

SEQ ID NO: 1666509 - RNA, 13 nt, Human
cugcuugaggcaa

SEQ ID NO: 1666510 - RNA, 20 nt, Human
cugcuugaggcaacucaucu

SEQ ID NO: 1666511 - RNA, 21 nt, Human
cugcuugaggcaacucaucuu

SEQ ID NO: 1666512 - RNA, 12 nt, Human
cugcugcuggcu

SEQ ID NO: 1666513 - RNA, 13 nt, Human
cugcugcuggcug

SEQ ID NO: 1666514 - RNA, 14 nt, Human
cugcuggcugccuu

SEQ ID NO: 1666515 - RNA, 15 nt, Human
cugcuggcugccuua

SEQ ID NO: 1666516 - RNA, 13 nt, Human
cugcuggcugccu

SEQ ID NO: 1666517 - RNA, 14 nt, Human
cugcugcuggcugg

SEQ ID NO: 1666518 - RNA, 14 nt, Human
cugcuggguguggc

SEQ ID NO: 1666519 - RNA, 15 nt, Human
cugcuggguguggcg

SEQ ID NO: 1666520 - RNA, 17 nt, Human
cugcuggguguggcgca

SEQ ID NO: 1666521 - RNA, 19 nt, Human
cugcuuuugucuaugggac

SEQ ID NO: 1666522 - RNA, 17 nt, Human
cugcuuuuggucugugu

SEQ ID NO: 1666523 - RNA, 12 nt, Human
cugcuuucagau

SEQ ID NO: 1666524 - RNA, 15 nt, Human
cugcuuucagauacu

SEQ ID NO: 1666525 - RNA, 16 nt, Human
cugcuuucagauacug

SEQ ID NO: 1666526 - RNA, 14 nt, Human
cugcuuguuuccua

SEQ ID NO: 1666527 - RNA, 13 nt, Human
cugcuuguuuccu

SEQ ID NO: 1666528 - RNA, 16 nt, Human
cugcuuugggcugccc

SEQ ID NO: 1666529 - RNA, 13 nt, Human
cugcuuuggaaau

SEQ ID NO: 1666530 - RNA, 17 nt, Human
cugcuuugggcugcccu

SEQ ID NO: 1666531 - RNA, 15 nt, Human
cugcuuuuggucugu

SEQ ID NO: 1666532 - RNA, 19 nt, Human
cugcuugggcuucauccuc

SEQ ID NO: 1666533 - RNA, 19 nt, Human
cugcuugugaaaggaaaga

SEQ ID NO: 1666534 - RNA, 13 nt, Human
cugcuugggcuuc

SEQ ID NO: 1666535 - RNA, 15 nt, Human
cugcuugggcuucau

SEQ ID NO: 1666536 - RNA, 17 nt, Human
cugcuugggcuucaucc

SEQ ID NO: 1666537 - RNA, 18 nt, Human
cugcuugggcuucauccu

SEQ ID NO: 1666538 - RNA, 22 nt, Human
cugcuugaggcaacucaucuua

SEQ ID NO: 1666539 - RNA, 15 nt, Human
cugcuugccaucccu

SEQ ID NO: 1666540 - RNA, 16 nt, Human
cugcuugccaucccuc

SEQ ID NO: 1666541 - RNA, 20 nt, Human
cugcuugcuugcuuuuuaau

SEQ ID NO: 1666542 - RNA, 22 nt, Human
cugcuugccaucccucccucca

SEQ ID NO: 1666543 - RNA, 20 nt, Human
cugcuugccaucccucccuc

SEQ ID NO: 1666544 - RNA, 19 nt, Human
cugcuugccaucccucccu

SEQ ID NO: 1666545 - RNA, 18 nt, Human
cugcuugccaucccuccc

SEQ ID NO: 1666546 - RNA, 14 nt, Human
cugggaggcaguga

SEQ ID NO: 1666547 - RNA, 18 nt, Human
cugggaggcucuggagcc

SEQ ID NO: 1666548 - RNA, 20 nt, Human
cugggaggcucuggagccca

SEQ ID NO: 1666549 - RNA, 21 nt, Human
cugggaggcucuggagcccac

SEQ ID NO: 1666550 - RNA, 17 nt, Human
cugggaggcucuggagc

SEQ ID NO: 1666551 - RNA, 22 nt, Human
cugggaggcucuggagcccacu

SEQ ID NO: 1666552 - RNA, 19 nt, Human
cugggaggucaaggcugca

SEQ ID NO: 1666553 - RNA, 21 nt, Human
cugggaggucaaggcugcagu

SEQ ID NO: 1666554 - RNA, 15 nt, Human
cugggccccaguugu

SEQ ID NO: 1666555 - RNA, 19 nt, Human
cugggccccaguuguauuu

SEQ ID NO: 1666556 - RNA, 12 nt, Human
cugggagugagc

SEQ ID NO: 1666557 - RNA, 20 nt, Human
cugggaucccucauccucau

SEQ ID NO: 1666558 - RNA, 18 nt, Human
cugggaugauuggagggg

SEQ ID NO: 1666559 - RNA, 16 nt, Human
cugggauuacaggugu

SEQ ID NO: 1666560 - RNA, 18 nt, Human
cugggauuacagguguga

SEQ ID NO: 1666561 - RNA, 20 nt, Human
cugggauuacaggugugaac

SEQ ID NO: 1666562 - RNA, 17 nt, Human
cugggauuacaggugug

SEQ ID NO: 1666563 - RNA, 13 nt, Human
cuggcugucgaga

SEQ ID NO: 1666564 - RNA, 16 nt, Human
cuggcuguuggcuggg

SEQ ID NO: 1666565 - RNA, 17 nt, Human
cuggcuguuggcugggg

SEQ ID NO: 1666566 - RNA, 20 nt, Human
cuggcugguuagagguuccc

SEQ ID NO: 1666567 - RNA, 14 nt, Human
cuggccuuucauau

SEQ ID NO: 1666568 - RNA, 23 nt, Human
cuggcuuuucacugcuggcugcc

SEQ ID NO: 1666569 - RNA, 18 nt, Human
cuggcuguuggcuggggg

SEQ ID NO: 1666570 - RNA, 17 nt, Human
cugggagagccuuccag

SEQ ID NO: 1666571 - RNA, 18 nt, Human
cugggagagccuuccagg

SEQ ID NO: 1666572 - RNA, 21 nt, Human
cugggagagccuuccaggggu

SEQ ID NO: 1666573 - RNA, 19 nt, Human
cugggagagccuuccaggg

SEQ ID NO: 1666574 - RNA, 20 nt, Human
cugggagagccuuccagggg

SEQ ID NO: 1666575 - RNA, 20 nt, Human
cuggaagugcuaauuuugaa

SEQ ID NO: 1666576 - RNA, 18 nt, Human
cuggaauauauaaccagu

SEQ ID NO: 1666577 - RNA, 14 nt, Human
cuggcaagaaugug

SEQ ID NO: 1666578 - RNA, 14 nt, Human
cuggaaugcagugg

SEQ ID NO: 1666579 - RNA, 15 nt, Human
cuggcacagggcagu

SEQ ID NO: 1666580 - RNA, 16 nt, Human
cuggcacagggcagug

SEQ ID NO: 1666581 - RNA, 16 nt, Human
cuggcacccggccccu

SEQ ID NO: 1666582 - RNA, 17 nt, Human
cuggcacccggccccug

SEQ ID NO: 1666583 - RNA, 18 nt, Human
cuggcacccggccccugc

SEQ ID NO: 1666584 - RNA, 19 nt, Human
cuggcacccggccccugcu

SEQ ID NO: 1666585 - RNA, 24 nt, Human
cuggcaugggaaugaaugucagug

SEQ ID NO: 1666586 - RNA, 15 nt, Human
cuggcacuauaaugu

SEQ ID NO: 1666587 - RNA, 16 nt, Human
cuggcacuauaaugua

SEQ ID NO: 1666588 - RNA, 22 nt, Human
cuggcacuauaauguaagcucu

SEQ ID NO: 1666589 - RNA, 16 nt, Human
cuggcaugggaaugaa

SEQ ID NO: 1666590 - RNA, 18 nt, Human
cuggcaugggaaugaaug

SEQ ID NO: 1666591 - RNA, 19 nt, Human
cuggcaugggaaugaaugu

SEQ ID NO: 1666592 - RNA, 22 nt, Human
cuggcaugggaaugaaugucag

SEQ ID NO: 1666593 - RNA, 12 nt, Human
cuggccucugca

SEQ ID NO: 1666594 - RNA, 23 nt, Human
cuggccucaagugauucuccugc

SEQ ID NO: 1666595 - RNA, 14 nt, Human
cuggccuggccccu

SEQ ID NO: 1666596 - RNA, 18 nt, Human
cuggccugagcugggaug

SEQ ID NO: 1666597 - RNA, 13 nt, Human
cuggccucugcac

SEQ ID NO: 1666598 - RNA, 14 nt, Human
cuggccucugcacu

SEQ ID NO: 1666599 - RNA, 16 nt, Human
cuggccucugcacucc

SEQ ID NO: 1666600 - RNA, 16 nt, Human
cuggccugagcuggga

SEQ ID NO: 1666601 - RNA, 16 nt, Human
cuggccuucggccucc

SEQ ID NO: 1666602 - RNA, 17 nt, Human
cuggccuucggccucca

SEQ ID NO: 1666603 - RNA, 18 nt, Human
cuggccuucggccuccau

SEQ ID NO: 1666604 - RNA, 21 nt, Human
cuggccuucggccuccauccu

SEQ ID NO: 1666605 - RNA, 16 nt, Human
cuggccuggccccuca

SEQ ID NO: 1666606 - RNA, 17 nt, Human
cuggccuggccccucag

SEQ ID NO: 1666607 - RNA, 19 nt, Human
cuggccuggccccucaggg

SEQ ID NO: 1666608 - RNA, 15 nt, Human
cuggccuucggccuc

SEQ ID NO: 1666609 - RNA, 18 nt, Human
cuguaaggcaaucauggu

SEQ ID NO: 1666610 - RNA, 16 nt, Human
cugguuccauggccuc

SEQ ID NO: 1666611 - RNA, 23 nt, Human
cugguuaauauuuauaggucacu

SEQ ID NO: 1666612 - RNA, 20 nt, Human
cugguucaggguuggccccu

SEQ ID NO: 1666613 - RNA, 16 nt, Human
cuggucucgaacuccu

SEQ ID NO: 1666614 - RNA, 21 nt, Human
cuggucucgaacuccugaccu

SEQ ID NO: 1666615 - RNA, 12 nt, Human
cugguggcagcu

SEQ ID NO: 1666616 - RNA, 16 nt, Human
cugguggcagcucacc

SEQ ID NO: 1666617 - RNA, 13 nt, Human
cugguggcagcuc

SEQ ID NO: 1666618 - RNA, 14 nt, Human
cugguggcagcuca

SEQ ID NO: 1666619 - RNA, 17 nt, Human
cuguaauuugugauaca

SEQ ID NO: 1666620 - RNA, 18 nt, Human
cuguaauuugugauacaa

SEQ ID NO: 1666621 - RNA, 22 nt, Human
cuguaauuugugauacaaugcu

SEQ ID NO: 1666622 - RNA, 21 nt, Human
cuguaauuugugauacaaugc

SEQ ID NO: 1666623 - RNA, 23 nt, Human
cuguacagagcccacgcccccac

SEQ ID NO: 1666624 - RNA, 23 nt, Human
cuguacaugaaaacacauuuuuc

SEQ ID NO: 1666625 - RNA, 22 nt, Human
cuguacaugaaaacacauuuuu

SEQ ID NO: 1666626 - RNA, 21 nt, Human
cuguaccucuugagccuugaa

SEQ ID NO: 1666627 - RNA, 17 nt, Human
cugggucgcccuggacu

SEQ ID NO: 1666628 - RNA, 18 nt, Human
cugggucgcccuggacug

SEQ ID NO: 1666629 - RNA, 22 nt, Human
cugggucgcccuggacugugug

SEQ ID NO: 1666630 - RNA, 15 nt, Human
cuggguuggagggug

SEQ ID NO: 1666631 - RNA, 20 nt, Human
cugggcucccuucccaccuc

SEQ ID NO: 1666632 - RNA, 21 nt, Human
cugggcucccuucccaccucu

SEQ ID NO: 1666633 - RNA, 22 nt, Human
cugggcucccuucccaccucuc

SEQ ID NO: 1666634 - RNA, 19 nt, Human
cuggguacuuguggacaca

SEQ ID NO: 1666635 - RNA, 18 nt, Human
cuggguacuuguggacac

SEQ ID NO: 1666636 - RNA, 16 nt, Human
cuggguacuuguggac

SEQ ID NO: 1666637 - RNA, 20 nt, Human
cuggucacaggacucugccu

SEQ ID NO: 1666638 - RNA, 21 nt, Human
cuggucacaggacucugccuc

SEQ ID NO: 1666639 - RNA, 22 nt, Human
cuggucacaggacucugccucc

SEQ ID NO: 1666640 - RNA, 23 nt, Human
cuggucacaggacucugccuccu

SEQ ID NO: 1666641 - RNA, 23 nt, Human
cuggucucaaacucuugaccuca

SEQ ID NO: 1666642 - RNA, 14 nt, Human
cuggucccacucag

SEQ ID NO: 1666643 - RNA, 13 nt, Human
cuggucccacuca

SEQ ID NO: 1666644 - RNA, 15 nt, Human
cuguauagauuagag

SEQ ID NO: 1666645 - RNA, 20 nt, Human
cuguauagauuagaauucug

SEQ ID NO: 1666646 - RNA, 16 nt, Human
cuguauagauuagaga

SEQ ID NO: 1666647 - RNA, 22 nt, Human
cuguaccucuugagccuugaac

SEQ ID NO: 1666648 - RNA, 15 nt, Human
cuguaucccaugagc

SEQ ID NO: 1666649 - RNA, 19 nt, Human
cuguaucccaugagccuca

SEQ ID NO: 1666650 - RNA, 18 nt, Human
cuguaucccaugagccuc

SEQ ID NO: 1666651 - RNA, 15 nt, Human
cuguaugauucccag

SEQ ID NO: 1666652 - RNA, 20 nt, Human
cuguccaggcacugcugccc

SEQ ID NO: 1666653 - RNA, 21 nt, Human
cuguccaggcacugcugccca

SEQ ID NO: 1666654 - RNA, 22 nt, Human
cuguccaggcacugcugcccag

SEQ ID NO: 1666655 - RNA, 23 nt, Human
cuguccaggcacugcugcccagc

SEQ ID NO: 1666656 - RNA, 18 nt, Human
cuguccaggcacugcugc

SEQ ID NO: 1666657 - RNA, 19 nt, Human
cuguccaggcacugcugcc

SEQ ID NO: 1666658 - RNA, 22 nt, Human
cugucccagugccgagaaggaa

SEQ ID NO: 1666659 - RNA, 13 nt, Human
cuguauuuuaaaa

SEQ ID NO: 1666660 - RNA, 16 nt, Human
cuguauuuuaaaagaa

SEQ ID NO: 1666661 - RNA, 13 nt, Human
cugucccccugac

SEQ ID NO: 1666662 - RNA, 14 nt, Human
cugucccccugaca

SEQ ID NO: 1666663 - RNA, 16 nt, Human
cuguccuacucugugu

SEQ ID NO: 1666664 - RNA, 17 nt, Human
cuguccuacucuguguc

SEQ ID NO: 1666665 - RNA, 18 nt, Human
cuguccuacucuguguca

SEQ ID NO: 1666666 - RNA, 20 nt, Human
cuguccuacucugugucagg

SEQ ID NO: 1666667 - RNA, 18 nt, Human
cugucucaagagggcacu

SEQ ID NO: 1666668 - RNA, 19 nt, Human
cugucucaagagggcacug

SEQ ID NO: 1666669 - RNA, 20 nt, Human
cugucucaagagggcacugg

SEQ ID NO: 1666670 - RNA, 21 nt, Human
cugucucaagagggcacuggu

SEQ ID NO: 1666671 - RNA, 14 nt, Human
cuguccgagcuuug

SEQ ID NO: 1666672 - RNA, 21 nt, Human
cuguccuacucugugucaggu

SEQ ID NO: 1666673 - RNA, 22 nt, Human
cugucucaaaaaaagaaaaaga

SEQ ID NO: 1666674 - RNA, 18 nt, Human
cugucucuacuaaaaaua

SEQ ID NO: 1666675 - RNA, 18 nt, Human
cucuuuaaugucacaggc

SEQ ID NO: 1666676 - RNA, 13 nt, Human
cucuugguccugc

SEQ ID NO: 1666677 - RNA, 15 nt, Human
cucuugguccugcug

SEQ ID NO: 1666678 - RNA, 16 nt, Human
cucuugguccugcugc

SEQ ID NO: 1666679 - RNA, 17 nt, Human
cucuugguccugcugca

SEQ ID NO: 1666680 - RNA, 17 nt, Human
cucuuucccucccuucc

SEQ ID NO: 1666681 - RNA, 20 nt, Human
cucuuuaaugucacaggcag

SEQ ID NO: 1666682 - RNA, 21 nt, Human
cucuuuaaugucacaggcagg

SEQ ID NO: 1666683 - RNA, 22 nt, Human
cucuuuaaugucacaggcaggu

SEQ ID NO: 1666684 - RNA, 23 nt, Human
cucuuuaaugucacaggcagguc

SEQ ID NO: 1666685 - RNA, 21 nt, Human
cucuuggguucaagcgauucu

SEQ ID NO: 1666686 - RNA, 15 nt, Human
cucuugaacuccuga

SEQ ID NO: 1666687 - RNA, 19 nt, Human
cucuuggguucaagcgauu

SEQ ID NO: 1666688 - RNA, 22 nt, Human
cucuugaaauauaggaacuuaa

SEQ ID NO: 1666689 - RNA, 22 nt, Human
cucuucuuuaaagggauggcaa

SEQ ID NO: 1666690 - RNA, 22 nt, Human
cugaaauagacccacaagaggc

SEQ ID NO: 1666691 - RNA, 21 nt, Human
cugaaauaaacgucuuaaaua

SEQ ID NO: 1666692 - RNA, 23 nt, Human
cugaaagcccugagcuuucugcu

SEQ ID NO: 1666693 - RNA, 16 nt, Human
cugaaagcccugagcu

SEQ ID NO: 1666694 - RNA, 17 nt, Human
cugaaagcccugagcuu

SEQ ID NO: 1666695 - RNA, 18 nt, Human
cugaaagcccugagcuuu

SEQ ID NO: 1666696 - RNA, 19 nt, Human
cugaaagcccugagcuuuc

SEQ ID NO: 1666697 - RNA, 17 nt, Human
cucuuucuauuguuucu

SEQ ID NO: 1666698 - RNA, 15 nt, Human
cugaaagcccugagc

SEQ ID NO: 1666699 - RNA, 13 nt, Human
cugaaauuuccug

SEQ ID NO: 1666700 - RNA, 23 nt, Human
cugaaauuuccugggagcuuuug

SEQ ID NO: 1666701 - RNA, 16 nt, Human
cugaaauuuccuggga

SEQ ID NO: 1666702 - RNA, 18 nt, Human
cugaacacuccaauuaag

SEQ ID NO: 1666703 - RNA, 23 nt, Human
cugaacacuccaauuaaggauuu

SEQ ID NO: 1666704 - RNA, 16 nt, Human
cugaacucugacaaca

SEQ ID NO: 1666705 - RNA, 17 nt, Human
cugaacucugacaacag

SEQ ID NO: 1666706 - RNA, 19 nt, Human
cugaagaauugaaaaacca

SEQ ID NO: 1666707 - RNA, 23 nt, Human
cugaagaagcaccaaucaugaau

SEQ ID NO: 1666708 - RNA, 22 nt, Human
cucuggcuccagcuggccggga

SEQ ID NO: 1666709 - RNA, 22 nt, Human
cucugugagcaucacaguuuug

SEQ ID NO: 1666710 - RNA, 18 nt, Human
cucugugagcaucacagu

SEQ ID NO: 1666711 - RNA, 21 nt, Human
cucugugagcaucacaguuuu

SEQ ID NO: 1666712 - RNA, 19 nt, Human
cucugugucagguggggca

SEQ ID NO: 1666713 - RNA, 15 nt, Human
cucugugucaggugg

SEQ ID NO: 1666714 - RNA, 13 nt, Human
cucuuagaaaaac

SEQ ID NO: 1666715 - RNA, 15 nt, Human
cucuuagaaaaacca

SEQ ID NO: 1666716 - RNA, 13 nt, Human
cucuuccaggcug

SEQ ID NO: 1666717 - RNA, 14 nt, Human
cucuuccaggcugg

SEQ ID NO: 1666718 - RNA, 15 nt, Human
cucuuccaggcuggg

SEQ ID NO: 1666719 - RNA, 16 nt, Human
cucuggacaggcaugu

SEQ ID NO: 1666720 - RNA, 22 nt, Human
cucuggacaggcauguucucug

SEQ ID NO: 1666721 - RNA, 12 nt, Human
cucuggcagcuc

SEQ ID NO: 1666722 - RNA, 14 nt, Human
cucuggcagcucag

SEQ ID NO: 1666723 - RNA, 15 nt, Human
cucuggcagcucaga

SEQ ID NO: 1666724 - RNA, 16 nt, Human
cucuggcagcucagag

SEQ ID NO: 1666725 - RNA, 12 nt, Human
cucuggccuucg

SEQ ID NO: 1666726 - RNA, 15 nt, Human
cucuggcuccagcug

SEQ ID NO: 1666727 - RNA, 16 nt, Human
cucuggcuccagcugg

SEQ ID NO: 1666728 - RNA, 19 nt, Human
cucuggccuucggccucca

SEQ ID NO: 1666729 - RNA, 13 nt, Human
cucucuccucccu

SEQ ID NO: 1666730 - RNA, 21 nt, Human
cucugccugaagucacacagu

SEQ ID NO: 1666731 - RNA, 22 nt, Human
cucugccugaagucacacagug

SEQ ID NO: 1666732 - RNA, 15 nt, Human
cucuggacaggcaug

SEQ ID NO: 1666733 - RNA, 20 nt, Human
cucugcuugccaucccuccc

SEQ ID NO: 1666734 - RNA, 17 nt, Human
cucugcuugccaucccu

SEQ ID NO: 1666735 - RNA, 14 nt, Human
cucugcuugccauc

SEQ ID NO: 1666736 - RNA, 12 nt, Human
cucugcuugcca

SEQ ID NO: 1666737 - RNA, 17 nt, Human
cugaggaucagaguaau

SEQ ID NO: 1666738 - RNA, 19 nt, Human
cugaggaucagaguaaucc

SEQ ID NO: 1666739 - RNA, 12 nt, Human
cugaggcccaga

SEQ ID NO: 1666740 - RNA, 13 nt, Human
cugaggcccagag

SEQ ID NO: 1666741 - RNA, 14 nt, Human
cugaggcccagagg

SEQ ID NO: 1666742 - RNA, 15 nt, Human
cugaggcccagaggg

SEQ ID NO: 1666743 - RNA, 16 nt, Human
cugaggcccagagggc

SEQ ID NO: 1666744 - RNA, 17 nt, Human
cugaggcccagagggcc

SEQ ID NO: 1666745 - RNA, 18 nt, Human
cugaggcccagagggccu

SEQ ID NO: 1666746 - RNA, 19 nt, Human
cugaggcccagagggccug

SEQ ID NO: 1666747 - RNA, 21 nt, Human
cugaggcccagagggccugca

SEQ ID NO: 1666748 - RNA, 23 nt, Human
cugaggcccagagggccugcaag

SEQ ID NO: 1666749 - RNA, 14 nt, Human
cugaggcccuucuc

SEQ ID NO: 1666750 - RNA, 15 nt, Human
cugaggcccuucucu

SEQ ID NO: 1666751 - RNA, 18 nt, Human
cugaggcccuucucucca

SEQ ID NO: 1666752 - RNA, 19 nt, Human
cugaggcccuucucuccag

SEQ ID NO: 1666753 - RNA, 20 nt, Human
cugaggcccuucucuccagc

SEQ ID NO: 1666754 - RNA, 16 nt, Human
cugagccucagucucc

SEQ ID NO: 1666755 - RNA, 21 nt, Human
cugagccucagucucccuccc

SEQ ID NO: 1666756 - RNA, 16 nt, Human
cugagacagcccgggc

SEQ ID NO: 1666757 - RNA, 17 nt, Human
cugagacagcccgggcu

SEQ ID NO: 1666758 - RNA, 18 nt, Human
cugagacagcccgggcuc

SEQ ID NO: 1666759 - RNA, 17 nt, Human
cugagccagauuucacu

SEQ ID NO: 1666760 - RNA, 18 nt, Human
cugagccagauuucacuc

SEQ ID NO: 1666761 - RNA, 19 nt, Human
cugagccagauuucacucu

SEQ ID NO: 1666762 - RNA, 20 nt, Human
cugagccagauuucacucuc

SEQ ID NO: 1666763 - RNA, 21 nt, Human
cugagccagauuucacucucc

SEQ ID NO: 1666764 - RNA, 22 nt, Human
cugagccucagucucccucccu

SEQ ID NO: 1666765 - RNA, 16 nt, Human
cugagcgacagugaga

SEQ ID NO: 1666766 - RNA, 20 nt, Human
cugagcgacagugagacucu

SEQ ID NO: 1666767 - RNA, 16 nt, Human
cugacccaugcugccc

SEQ ID NO: 1666768 - RNA, 14 nt, Human
cugacccaugcugc

SEQ ID NO: 1666769 - RNA, 15 nt, Human
cugacccaugcugcc

SEQ ID NO: 1666770 - RNA, 13 nt, Human
cugacccaugcug

SEQ ID NO: 1666771 - RNA, 13 nt, Human
cugacccacugcu

SEQ ID NO: 1666772 - RNA, 14 nt, Human
cugacccacugcuu

SEQ ID NO: 1666773 - RNA, 22 nt, Human
cugacauuguuggccaaagcca

SEQ ID NO: 1666774 - RNA, 19 nt, Human
cugaagacucauucuucug

SEQ ID NO: 1666775 - RNA, 14 nt, Human
cugacaucucugca

SEQ ID NO: 1666776 - RNA, 15 nt, Human
cugacaucucugcaa

SEQ ID NO: 1666777 - RNA, 16 nt, Human
cugacaucucugcaau

SEQ ID NO: 1666778 - RNA, 14 nt, Human
cugagacagcccgg

SEQ ID NO: 1666779 - RNA, 15 nt, Human
cugagacagcccggg

SEQ ID NO: 1666780 - RNA, 11 nt, Human
cugagaaauuu

SEQ ID NO: 1666781 - RNA, 14 nt, Human
cugagaaauuuaua

SEQ ID NO: 1666782 - RNA, 22 nt, Human
cugagaaagacuauucaaacag

SEQ ID NO: 1666783 - RNA, 23 nt, Human
cugagaaagacuauucaaacagu

SEQ ID NO: 1666784 - RNA, 16 nt, Human
cugacuucuaaguaaa

SEQ ID NO: 1666785 - RNA, 18 nt, Human
cugacuguuuucucuuga

SEQ ID NO: 1666786 - RNA, 13 nt, Human
cugacuucuaagu

SEQ ID NO: 1666787 - RNA, 15 nt, Human
cugacuucuaaguaa

SEQ ID NO: 1666788 - RNA, 16 nt, Human
cugacuguuuucucuu

SEQ ID NO: 1666789 - RNA, 17 nt, Human
cugacucuuaagaagac

SEQ ID NO: 1666790 - RNA, 16 nt, Human
cuccugccucagccuc

SEQ ID NO: 1666791 - RNA, 15 nt, Human
cuccugccucagccu

SEQ ID NO: 1666792 - RNA, 16 nt, Human
cuccugugugugcgcc

SEQ ID NO: 1666793 - RNA, 19 nt, Human
cuccugugugugcgccuac

SEQ ID NO: 1666794 - RNA, 11 nt, Human
cuccugcaggc

SEQ ID NO: 1666795 - RNA, 12 nt, Human
cuccugcaggca

SEQ ID NO: 1666796 - RNA, 17 nt, Human
cuccugcaggcagccag

SEQ ID NO: 1666797 - RNA, 18 nt, Human
cuccugcaggcagccagg

SEQ ID NO: 1666798 - RNA, 20 nt, Human
cuccugcaggcagccaggcc

SEQ ID NO: 1666799 - RNA, 13 nt, Human
cuccugccucagc

SEQ ID NO: 1666800 - RNA, 14 nt, Human
cuccugccucagcc

SEQ ID NO: 1666801 - RNA, 11 nt, Human
cuccugcccuu

SEQ ID NO: 1666802 - RNA, 15 nt, Human
cuccucccggugccc

SEQ ID NO: 1666803 - RNA, 17 nt, Human
cuccucccggugcccaa

SEQ ID NO: 1666804 - RNA, 14 nt, Human
cuccucccggugcc

SEQ ID NO: 1666805 - RNA, 22 nt, Human
cuccucuccccagcaagugaga

SEQ ID NO: 1666806 - RNA, 15 nt, Human
cuccgccucccgggu

SEQ ID NO: 1666807 - RNA, 19 nt, Human
cucccuuuuaauccuggcu

SEQ ID NO: 1666808 - RNA, 20 nt, Human
cucccuuuuaauccuggcug

SEQ ID NO: 1666809 - RNA, 15 nt, Human
cuccgaccagacacc

SEQ ID NO: 1666810 - RNA, 13 nt, Human
cucccucauucca

SEQ ID NO: 1666811 - RNA, 19 nt, Human
cucccuauuuuuuuucugu

SEQ ID NO: 1666812 - RNA, 20 nt, Human
cucccuauuuuuuuucuguu

SEQ ID NO: 1666813 - RNA, 21 nt, Human
cucccuauuuuuuuucuguua

SEQ ID NO: 1666814 - RNA, 17 nt, Human
cucccuccaccucccug

SEQ ID NO: 1666815 - RNA, 15 nt, Human
cucccuccaccuccc

SEQ ID NO: 1666816 - RNA, 20 nt, Human
cucccggcuaugggggcacu

SEQ ID NO: 1666817 - RNA, 17 nt, Human
cucccuauuuuuuuucu

SEQ ID NO: 1666818 - RNA, 19 nt, Human
cucccgaauagcugggacu

SEQ ID NO: 1666819 - RNA, 18 nt, Human
cucccgaguagcugggac

SEQ ID NO: 1666820 - RNA, 13 nt, Human
cuccccugcuggg

SEQ ID NO: 1666821 - RNA, 14 nt, Human
cuccccugcugggu

SEQ ID NO: 1666822 - RNA, 17 nt, Human
cucccgaauagcuggga

SEQ ID NO: 1666823 - RNA, 16 nt, Human
cucccgaauagcuggg

SEQ ID NO: 1666824 - RNA, 18 nt, Human
cucccgaauagcugggac

SEQ ID NO: 1666825 - RNA, 16 nt, Human
cucccgaguagcuggg

SEQ ID NO: 1666826 - RNA, 17 nt, Human
cucccgaguagcuggga

SEQ ID NO: 1666827 - RNA, 12 nt, Human
cuccccagcaag

SEQ ID NO: 1666828 - RNA, 20 nt, Human
cuccccagcaagugagagcu

SEQ ID NO: 1666829 - RNA, 21 nt, Human
cuccccagcaagugagagcug

SEQ ID NO: 1666830 - RNA, 12 nt, Human
cuccccugcugg

SEQ ID NO: 1666831 - RNA, 22 nt, Human
cucccaacucaccccagcccca

SEQ ID NO: 1666832 - RNA, 22 nt, Human
cucccaaagugcugggauuaca

SEQ ID NO: 1666833 - RNA, 18 nt, Human
cucccaaagugcugggau

SEQ ID NO: 1666834 - RNA, 14 nt, Human
cuccaugugggcua

SEQ ID NO: 1666835 - RNA, 17 nt, Human
cucccaacucaccccag

SEQ ID NO: 1666836 - RNA, 11 nt, Human
cucccaucugu

SEQ ID NO: 1666837 - RNA, 14 nt, Human
cucccaucugugaa

SEQ ID NO: 1666838 - RNA, 15 nt, Human
cucccaucugugaaa

SEQ ID NO: 1666839 - RNA, 18 nt, Human
cucccaucugugaaagga

SEQ ID NO: 1666840 - RNA, 23 nt, Human
cucccaucugugaaaggaaagag

SEQ ID NO: 1666841 - RNA, 16 nt, Human
cuccaucuccacucca

SEQ ID NO: 1666842 - RNA, 13 nt, Human
cuccaugcugccu

SEQ ID NO: 1666843 - RNA, 13 nt, Human
cuccaugucucug

SEQ ID NO: 1666844 - RNA, 22 nt, Human
cuccaugucucugagcauuaga

SEQ ID NO: 1666845 - RNA, 17 nt, Human
cucccaaagugcuggga

SEQ ID NO: 1666846 - RNA, 13 nt, Human
cuccaugugggcu

SEQ ID NO: 1666847 - RNA, 18 nt, Human
cucacuauguugcccagg

SEQ ID NO: 1666848 - RNA, 11 nt, Human
cuccauccuga

SEQ ID NO: 1666849 - RNA, 16 nt, Human
cuccauccugaggcuc

SEQ ID NO: 1666850 - RNA, 18 nt, Human
cuccauccugaggcucca

SEQ ID NO: 1666851 - RNA, 20 nt, Human
cuccauccugaggcuccacu

SEQ ID NO: 1666852 - RNA, 13 nt, Human
cucuacaaaaagc

SEQ ID NO: 1666853 - RNA, 13 nt, Human
cucuacagaggcc

SEQ ID NO: 1666854 - RNA, 21 nt, Human
cucuacagcuaaucagcauuc

SEQ ID NO: 1666855 - RNA, 19 nt, Human
cucuacagaggccaugggc

SEQ ID NO: 1666856 - RNA, 14 nt, Human
cucuacagaggcca

SEQ ID NO: 1666857 - RNA, 16 nt, Human
cucuacagaggccaug

SEQ ID NO: 1666858 - RNA, 14 nt, Human
cucggcucacugca

SEQ ID NO: 1666859 - RNA, 17 nt, Human
cucggcucacugcaucc

SEQ ID NO: 1666860 - RNA, 18 nt, Human
cucggcucacugcauccu

SEQ ID NO: 1666861 - RNA, 13 nt, Human
cuccuucaccuuu

SEQ ID NO: 1666862 - RNA, 19 nt, Human
cuccuucacagaugggugc

SEQ ID NO: 1666863 - RNA, 20 nt, Human
cuccugugugugcgccuaca

SEQ ID NO: 1666864 - RNA, 16 nt, Human
cuccuucacagauggg

SEQ ID NO: 1666865 - RNA, 17 nt, Human
cuccuucacagaugggu

SEQ ID NO: 1666866 - RNA, 17 nt, Human
cucuacuuagcaugucc

SEQ ID NO: 1666867 - RNA, 19 nt, Human
cucuacuuagcaugucccu

SEQ ID NO: 1666868 - RNA, 20 nt, Human
cucuacuuagcaugucccua

SEQ ID NO: 1666869 - RNA, 16 nt, Human
cucuacuuagcauguc

SEQ ID NO: 1666870 - RNA, 20 nt, Human
cucuaccauccccuguagag

SEQ ID NO: 1666871 - RNA, 13 nt, Human
cucuacccuggca

SEQ ID NO: 1666872 - RNA, 15 nt, Human
cucuaggaaauauuu

SEQ ID NO: 1666873 - RNA, 23 nt, Human
cucuagggaaaaaccagcgugug

SEQ ID NO: 1666874 - RNA, 17 nt, Human
cucuaggaaauauuuau

SEQ ID NO: 1666875 - RNA, 22 nt, Human
cucucaggccagcugcuugggc

SEQ ID NO: 1666876 - RNA, 17 nt, Human
cucucaggccagcugcu

SEQ ID NO: 1666877 - RNA, 18 nt, Human
cucucaggccagcugcuu

SEQ ID NO: 1666878 - RNA, 19 nt, Human
cucucaggccagcugcuug

SEQ ID NO: 1666879 - RNA, 21 nt, Human
cucucaggccagcugcuuggg

SEQ ID NO: 1666880 - RNA, 11 nt, Human
cucuccacugc

SEQ ID NO: 1666881 - RNA, 12 nt, Human
cucuccacugcc

SEQ ID NO: 1666882 - RNA, 14 nt, Human
cucuccacugccuu

SEQ ID NO: 1666883 - RNA, 14 nt, Human
cucuccagccccug

SEQ ID NO: 1666884 - RNA, 15 nt, Human
cucuccagccccugg

SEQ ID NO: 1666885 - RNA, 16 nt, Human
cucuccagccccugga

SEQ ID NO: 1666886 - RNA, 17 nt, Human
cucuccagccccuggau

SEQ ID NO: 1666887 - RNA, 18 nt, Human
cucuccagccccuggaug

SEQ ID NO: 1666888 - RNA, 12 nt, Human
cucucaggccaa

SEQ ID NO: 1666889 - RNA, 20 nt, Human
cucucaggccaaacucaccu

SEQ ID NO: 1666890 - RNA, 21 nt, Human
cucucaggccaaacucaccug

SEQ ID NO: 1666891 - RNA, 22 nt, Human
cucucaggccaaacucaccugc

SEQ ID NO: 1666892 - RNA, 23 nt, Human
cucucaggccaaacucaccugcc

SEQ ID NO: 1666893 - RNA, 13 nt, Human
cucucaggccagc

SEQ ID NO: 1666894 - RNA, 15 nt, Human
cucucaggccagcug

SEQ ID NO: 1666895 - RNA, 15 nt, Human
cucuaguuugauuaa

SEQ ID NO: 1666896 - RNA, 20 nt, Human
cucuaguuugauuaaauucu

SEQ ID NO: 1666897 - RNA, 19 nt, Human
cucuaguuugauuaaauuc

SEQ ID NO: 1666898 - RNA, 21 nt, Human
cucuaguuugauuaaauucuu

SEQ ID NO: 1666899 - RNA, 14 nt, Human
cucucucacuccuu

SEQ ID NO: 1666900 - RNA, 12 nt, Human
cucucucacucc

SEQ ID NO: 1666901 - RNA, 19 nt, Human
cucuccugggcagcugccu

SEQ ID NO: 1666902 - RNA, 18 nt, Human
cucuccugggcagcugcc

SEQ ID NO: 1666903 - RNA, 16 nt, Human
cucuccugggcagcug

SEQ ID NO: 1666904 - RNA, 15 nt, Human
cucuccugggcagcu

SEQ ID NO: 1666905 - RNA, 12 nt, Human
cucuccugggca

SEQ ID NO: 1666906 - RNA, 20 nt, Human
cucuccugggcagcugccuc

SEQ ID NO: 1666907 - RNA, 15 nt, Human
cucuccacugccuuc

SEQ ID NO: 1666908 - RNA, 19 nt, Human
cucuccagccccuggaugc

SEQ ID NO: 1666909 - RNA, 14 nt, Human
cucuccccagcaag

SEQ ID NO: 1666910 - RNA, 22 nt, Human
cucuccccagcaagugagagcu

SEQ ID NO: 1666911 - RNA, 12 nt, Human
cucuccucugcu

SEQ ID NO: 1666912 - RNA, 24 nt, Human
cucuccccagcaagugagagcugg

SEQ ID NO: 1666913 - RNA, 13 nt, Human
cucuccucugcug

SEQ ID NO: 1666914 - RNA, 14 nt, Human
cucuccucugcugc

SEQ ID NO: 1666915 - RNA, 15 nt, Human
cucuccucugcugcu

SEQ ID NO: 1666916 - RNA, 18 nt, Human
cucuccucugcugcuggc

SEQ ID NO: 1666917 - RNA, 14 nt, Human
cucuccucuugcca

SEQ ID NO: 1666918 - RNA, 15 nt, Human
cucuccucuugccac

SEQ ID NO: 1666919 - RNA, 16 nt, Human
cucuccucuugccacu

SEQ ID NO: 1666920 - RNA, 17 nt, Human
cucuccucuugccacug

SEQ ID NO: 1666921 - RNA, 19 nt, Human
cucuccucuugccacugcc

SEQ ID NO: 1666922 - RNA, 22 nt, Human
cucuccucuugccacugccucu

SEQ ID NO: 1666923 - RNA, 13 nt, Human
cgccccuuccccc

SEQ ID NO: 1666924 - RNA, 16 nt, Human
cgcccuggacugugug

SEQ ID NO: 1666925 - RNA, 12 nt, Human
cgcccagucugg

SEQ ID NO: 1666926 - RNA, 22 nt, Human
cgcccaggcuuagucacugaga

SEQ ID NO: 1666927 - RNA, 22 nt, Human
cgccagauucuuuccugaggcu

SEQ ID NO: 1666928 - RNA, 17 nt, Human
ccucugcccacucccug

SEQ ID NO: 1666929 - RNA, 19 nt, Human
ccucugcccacucccugca

SEQ ID NO: 1666930 - RNA, 20 nt, Human
ccucugcccacucccugcaa

SEQ ID NO: 1666931 - RNA, 23 nt, Human
cgccaggggaaaaucagccugcu

SEQ ID NO: 1666932 - RNA, 14 nt, Human
cgccaucccagccc

SEQ ID NO: 1666933 - RNA, 16 nt, Human
cgccaucccagcccca

SEQ ID NO: 1666934 - RNA, 17 nt, Human
cgccaucccagccccaa

SEQ ID NO: 1666935 - RNA, 22 nt, Human
cgcuaagagggagggagggcuc

SEQ ID NO: 1666936 - RNA, 16 nt, Human
cgcuacccgggaaggg

SEQ ID NO: 1666937 - RNA, 16 nt, Human
cgcucagcccucccug

SEQ ID NO: 1666938 - RNA, 21 nt, Human
cgcucagcccucccugccccu

SEQ ID NO: 1666939 - RNA, 12 nt, Human
cgcucagcccuc

SEQ ID NO: 1666940 - RNA, 17 nt, Human
cgcuacccgggaagggg

SEQ ID NO: 1666941 - RNA, 14 nt, Human
cgcucucuggccuu

SEQ ID NO: 1666942 - RNA, 15 nt, Human
cgcucucuggccuuc

SEQ ID NO: 1666943 - RNA, 18 nt, Human
cgcugugcugcccugccc

SEQ ID NO: 1666944 - RNA, 20 nt, Human
cggaaaacaugcuacacacu

SEQ ID NO: 1666945 - RNA, 15 nt, Human
cggaaaacaugcuac

SEQ ID NO: 1666946 - RNA, 15 nt, Human
cgcugugcugcccug

SEQ ID NO: 1666947 - RNA, 16 nt, Human
cgcugugcugcccugc

SEQ ID NO: 1666948 - RNA, 17 nt, Human
cgcugugcugcccugcc

SEQ ID NO: 1666949 - RNA, 22 nt, Human
cgcugucagccauuccuguucc

SEQ ID NO: 1666950 - RNA, 18 nt, Human
cgcucucuggccuucggc

SEQ ID NO: 1666951 - RNA, 13 nt, Human
cggaagagccuug

SEQ ID NO: 1666952 - RNA, 14 nt, Human
cggaauaguuggcu

SEQ ID NO: 1666953 - RNA, 11 nt, Human
cggccaccugc

SEQ ID NO: 1666954 - RNA, 15 nt, Human
cggccaccugcggug

SEQ ID NO: 1666955 - RNA, 16 nt, Human
cggccaccugcggugc

SEQ ID NO: 1666956 - RNA, 17 nt, Human
cggccaccugcggugcu

SEQ ID NO: 1666957 - RNA, 13 nt, Human
cggccccugcugg

SEQ ID NO: 1666958 - RNA, 18 nt, Human
cggccccugcugguucag

SEQ ID NO: 1666959 - RNA, 19 nt, Human
cggccccugcugguucagg

SEQ ID NO: 1666960 - RNA, 24 nt, Human
cggccaggccagagggagugacag

SEQ ID NO: 1666961 - RNA, 11 nt, Human
cggcugcccuu

SEQ ID NO: 1666962 - RNA, 12 nt, Human
cggcugcccuuu

SEQ ID NO: 1666963 - RNA, 12 nt, Human
cggccuccaucc

SEQ ID NO: 1666964 - RNA, 14 nt, Human
cggccuccauccug

SEQ ID NO: 1666965 - RNA, 23 nt, Human
cggggacagcuccuucuguccua

SEQ ID NO: 1666966 - RNA, 15 nt, Human
cgggggcagagaggg

SEQ ID NO: 1666967 - RNA, 23 nt, Human
cggcuggccuggccccucagggu

SEQ ID NO: 1666968 - RNA, 22 nt, Human
cggcuggccuggccccucaggg

SEQ ID NO: 1666969 - RNA, 17 nt, Human
cgggauuaguacacacu

SEQ ID NO: 1666970 - RNA, 18 nt, Human
cgggaggucgaggcagga

SEQ ID NO: 1666971 - RNA, 20 nt, Human
cgggaggucgaggcaggagg

SEQ ID NO: 1666972 - RNA, 22 nt, Human
cggggacagcuccuucuguccu

SEQ ID NO: 1666973 - RNA, 14 nt, Human
cgggcacucagaag

SEQ ID NO: 1666974 - RNA, 22 nt, Human
cgggcacucagaagacacugau

SEQ ID NO: 1666975 - RNA, 19 nt, Human
cgggucacaggagggaggg

SEQ ID NO: 1666976 - RNA, 11 nt, Human
cgggucacagg

SEQ ID NO: 1666977 - RNA, 14 nt, Human
cgguccacccagga

SEQ ID NO: 1666978 - RNA, 15 nt, Human
cgguccacccaggag

SEQ ID NO: 1666979 - RNA, 16 nt, Human
cgguccacccaggagc

SEQ ID NO: 1666980 - RNA, 20 nt, Human
cgguccacccaggagccccg

SEQ ID NO: 1666981 - RNA, 21 nt, Human
cggguuuuauuguuuaaaauc

SEQ ID NO: 1666982 - RNA, 18 nt, Human
cggugaauggcuuuguau

SEQ ID NO: 1666983 - RNA, 20 nt, Human
cggugaauggcuuuguauag

SEQ ID NO: 1666984 - RNA, 22 nt, Human
cggugaauggcuuuguauagaa

SEQ ID NO: 1666985 - RNA, 20 nt, Human
cggugagaggggaacagacu

SEQ ID NO: 1666986 - RNA, 21 nt, Human
cggugagaggggaacagacug

SEQ ID NO: 1666987 - RNA, 17 nt, Human
cggugagcuacaaaugc

SEQ ID NO: 1666988 - RNA, 13 nt, Human
cggugaauggcuu

SEQ ID NO: 1666989 - RNA, 14 nt, Human
cggugaauggcuuu

SEQ ID NO: 1666990 - RNA, 15 nt, Human
cggugaauggcuuug

SEQ ID NO: 1666991 - RNA, 16 nt, Human
cggugaauggcuuugu

SEQ ID NO: 1666992 - RNA, 22 nt, Human
cggucggguuuuauuguuuaaa

SEQ ID NO: 1666993 - RNA, 16 nt, Human
cgucucauacucaccu

SEQ ID NO: 1666994 - RNA, 16 nt, Human
cgucuaccugaggggc

SEQ ID NO: 1666995 - RNA, 18 nt, Human
cggugcuaucucccccag

SEQ ID NO: 1666996 - RNA, 20 nt, Human
cggugcuaucucccccagcc

SEQ ID NO: 1666997 - RNA, 21 nt, Human
cggugcuaucucccccagccc

SEQ ID NO: 1666998 - RNA, 22 nt, Human
cggugcuaucucccccagcccc

SEQ ID NO: 1666999 - RNA, 16 nt, Human
cgugcacacaccagag

SEQ ID NO: 1667000 - RNA, 20 nt, Human
cgucugacaggcaaugcugg

SEQ ID NO: 1667001 - RNA, 21 nt, Human
cgucugacaggcaaugcuggc

SEQ ID NO: 1667002 - RNA, 22 nt, Human
cgucugacaggcaaugcuggcu

SEQ ID NO: 1667003 - RNA, 21 nt, Human
cgugcaguggugcgaucuggg

SEQ ID NO: 1667004 - RNA, 22 nt, Human
cgugcaguggugcgaucugggu

SEQ ID NO: 1667005 - RNA, 18 nt, Human
cgugcacacaccagagcc

SEQ ID NO: 1667006 - RNA, 19 nt, Human
cgugcacacaccagagccc

SEQ ID NO: 1667007 - RNA, 23 nt, Human
cguugaaauuguaauuauaucug

SEQ ID NO: 1667008 - RNA, 20 nt, Human
cguggcuucccgcucagccc

SEQ ID NO: 1667009 - RNA, 21 nt, Human
cguggcuucccgcucagcccu

SEQ ID NO: 1667010 - RNA, 18 nt, Human
cguggcuucccgcucagc

SEQ ID NO: 1667011 - RNA, 19 nt, Human
cguggcuucccgcucagcc

SEQ ID NO: 1667012 - RNA, 16 nt, Human
cgugcuaaggacuugu

SEQ ID NO: 1667013 - RNA, 12 nt, Human
cgugcuaaggac

SEQ ID NO: 1667014 - RNA, 13 nt, Human
cgugcuaaggacu

SEQ ID NO: 1667015 - RNA, 14 nt, Human
cgugcuaaggacuu

SEQ ID NO: 1667016 - RNA, 15 nt, Human
cgugcuaaggacuug

SEQ ID NO: 1667017 - RNA, 17 nt, Human
cuaaauccauuuggaaa

SEQ ID NO: 1667018 - RNA, 19 nt, Human
cuaaauccauuuggaaauc

SEQ ID NO: 1667019 - RNA, 20 nt, Human
cuaaauccauuuggaaaucu

SEQ ID NO: 1667020 - RNA, 16 nt, Human
cuaaauccauuuggaa

SEQ ID NO: 1667021 - RNA, 18 nt, Human
cuaaauauauuuuaagac

SEQ ID NO: 1667022 - RNA, 20 nt, Human
cuaaauauauuuuaagacga

SEQ ID NO: 1667023 - RNA, 20 nt, Human
cuaaaucuccaaaauaaaac

SEQ ID NO: 1667024 - RNA, 15 nt, Human
cuaaauggaaccacu

SEQ ID NO: 1667025 - RNA, 17 nt, Human
cuaaauggaaccacucu

SEQ ID NO: 1667026 - RNA, 16 nt, Human
cuaaauggaaccacuc

SEQ ID NO: 1667027 - RNA, 18 nt, Human
cuaaauggaaccacucua

SEQ ID NO: 1667028 - RNA, 16 nt, Human
cuaaauguugaaagau

SEQ ID NO: 1667029 - RNA, 23 nt, Human
cuaaauugacacuuaaaaauggu

SEQ ID NO: 1667030 - RNA, 15 nt, Human
cuaacaugauuuggg

SEQ ID NO: 1667031 - RNA, 15 nt, Human
cuaacauggaaguac

SEQ ID NO: 1667032 - RNA, 17 nt, Human
cuaacauggaaguacua

SEQ ID NO: 1667033 - RNA, 18 nt, Human
cuauuuuaauaaacacuc

SEQ ID NO: 1667034 - RNA, 22 nt, Human
cuauuuuaauaaacacucuuga

SEQ ID NO: 1667035 - RNA, 14 nt, Human
cuaugcauuugaaa

SEQ ID NO: 1667036 - RNA, 19 nt, Human
cucaagagggcacuggugg

SEQ ID NO: 1667037 - RNA, 21 nt, Human
cucaagagggcacugguggcc

SEQ ID NO: 1667038 - RNA, 17 nt, Human
cucaagagggcacuggu

SEQ ID NO: 1667039 - RNA, 13 nt, Human
cucaaauuucuaa

SEQ ID NO: 1667040 - RNA, 20 nt, Human
cucaacucuccuccagaguc

SEQ ID NO: 1667041 - RNA, 21 nt, Human
cucaacucuccuccagaguca

SEQ ID NO: 1667042 - RNA, 18 nt, Human
cucaagugauucuccugc

SEQ ID NO: 1667043 - RNA, 19 nt, Human
cucaagugauucuccugcc

SEQ ID NO: 1667044 - RNA, 20 nt, Human
cucaagugauucuccugccu

SEQ ID NO: 1667045 - RNA, 21 nt, Human
cucaagugauucuccugccuc

SEQ ID NO: 1667046 - RNA, 20 nt, Human
cucaccagccccagugccca

SEQ ID NO: 1667047 - RNA, 21 nt, Human
cucaccagccccagugcccac

SEQ ID NO: 1667048 - RNA, 19 nt, Human
cucaccagccccagugccc

SEQ ID NO: 1667049 - RNA, 13 nt, Human
cucacauuuauau

SEQ ID NO: 1667050 - RNA, 14 nt, Human
cucaccccagcccc

SEQ ID NO: 1667051 - RNA, 12 nt, Human
cucaccccagcc

SEQ ID NO: 1667052 - RNA, 13 nt, Human
cucaccccagccc

SEQ ID NO: 1667053 - RNA, 20 nt, Human
cucacuaucccggcugcccu

SEQ ID NO: 1667054 - RNA, 21 nt, Human
cucacuaucccggcugcccuu

SEQ ID NO: 1667055 - RNA, 20 nt, Human
cucacuaggcuucugguuga

SEQ ID NO: 1667056 - RNA, 16 nt, Human
cucacuauguugccca

SEQ ID NO: 1667057 - RNA, 17 nt, Human
cucacuauguugcccag

SEQ ID NO: 1667058 - RNA, 13 nt, Human
cucacuaggcuuc

SEQ ID NO: 1667059 - RNA, 16 nt, Human
cucacuaggcuucugg

SEQ ID NO: 1667060 - RNA, 17 nt, Human
cucaccccuugccauaa

SEQ ID NO: 1667061 - RNA, 21 nt, Human
cuaugcauuugaaaauuuuga

SEQ ID NO: 1667062 - RNA, 12 nt, Human
cuaugcauuuga

SEQ ID NO: 1667063 - RNA, 11 nt, Human
cuaugcauuug

SEQ ID NO: 1667064 - RNA, 14 nt, Human
cuaguuccaccauc

SEQ ID NO: 1667065 - RNA, 12 nt, Human
cuaguucacucu

SEQ ID NO: 1667066 - RNA, 18 nt, Human
cuauauaugugaugaucu

SEQ ID NO: 1667067 - RNA, 23 nt, Human
cuauauaugugaugaucuaccag

SEQ ID NO: 1667068 - RNA, 22 nt, Human
cuauauuguuuucaguguacau

SEQ ID NO: 1667069 - RNA, 19 nt, Human
cuauauuguuugcuaagca

SEQ ID NO: 1667070 - RNA, 23 nt, Human
cuauauuguuuucaguguacaug

SEQ ID NO: 1667071 - RNA, 20 nt, Human
cuauauuuuuuguuaaauga

SEQ ID NO: 1667072 - RNA, 20 nt, Human
cuaucaaguauuauaccuuu

SEQ ID NO: 1667073 - RNA, 22 nt, Human
cuauauuuuuuguuaaaugauu

SEQ ID NO: 1667074 - RNA, 13 nt, Human
cuaugaaauauua

SEQ ID NO: 1667075 - RNA, 18 nt, Human
cuaugaaauauuauguua

SEQ ID NO: 1667076 - RNA, 14 nt, Human
cuaugacacaugca

SEQ ID NO: 1667077 - RNA, 22 nt, Human
cuaggacugaauuaugaaacuu

SEQ ID NO: 1667078 - RNA, 22 nt, Human
cuaggaccccuccaugugggcu

SEQ ID NO: 1667079 - RNA, 17 nt, Human
cuaggaggucucuaaga

SEQ ID NO: 1667080 - RNA, 16 nt, Human
cuaggaaauccagggu

SEQ ID NO: 1667081 - RNA, 17 nt, Human
cuaggaaauccagggug

SEQ ID NO: 1667082 - RNA, 21 nt, Human
cuaggaagacuuuggaaagag

SEQ ID NO: 1667083 - RNA, 13 nt, Human
cuaggaacacucc

SEQ ID NO: 1667084 - RNA, 15 nt, Human
cuaggaacacuccuu

SEQ ID NO: 1667085 - RNA, 12 nt, Human
cuagcagcaggg

SEQ ID NO: 1667086 - RNA, 19 nt, Human
cuagugugguguuuccugg

SEQ ID NO: 1667087 - RNA, 23 nt, Human
cuagugugguguuuccuggcacu

SEQ ID NO: 1667088 - RNA, 21 nt, Human
cuagugugguguuuccuggca

SEQ ID NO: 1667089 - RNA, 22 nt, Human
cuagugugguguuuccuggcac

SEQ ID NO: 1667090 - RNA, 21 nt, Human
cuaggcauuugcugaauacag

SEQ ID NO: 1667091 - RNA, 22 nt, Human
cuaguauuucuaugaaauauua

SEQ ID NO: 1667092 - RNA, 19 nt, Human
cuaguauuucuaugaaaua

SEQ ID NO: 1667093 - RNA, 20 nt, Human
cuaguauuucuaugaaauau

SEQ ID NO: 1667094 - RNA, 15 nt, Human
cuaguaucaaaagaa

SEQ ID NO: 1667095 - RNA, 17 nt, Human
cuaguaucaaaagaaag

SEQ ID NO: 1667096 - RNA, 23 nt, Human
cuaguaucaaaagaaagaaaauc

SEQ ID NO: 1667097 - RNA, 21 nt, Human
cuacuguaauuugugauacaa

SEQ ID NO: 1667098 - RNA, 17 nt, Human
cuagcacuuugggaggc

SEQ ID NO: 1667099 - RNA, 17 nt, Human
cuagagugaacuugggc

SEQ ID NO: 1667100 - RNA, 21 nt, Human
cuagagugaacuugggccacu

SEQ ID NO: 1667101 - RNA, 15 nt, Human
cuagagguucaaaga

SEQ ID NO: 1667102 - RNA, 18 nt, Human
cuagacucccaagcugga

SEQ ID NO: 1667103 - RNA, 20 nt, Human
cuagacgagcaggcuucuuc

SEQ ID NO: 1667104 - RNA, 21 nt, Human
cuagacgagcaggcuucuucc

SEQ ID NO: 1667105 - RNA, 21 nt, Human
cuacuguaaggcaaucauggu

SEQ ID NO: 1667106 - RNA, 16 nt, Human
cuacuguaauuuguga

SEQ ID NO: 1667107 - RNA, 17 nt, Human
cuacuguaauuugugau

SEQ ID NO: 1667108 - RNA, 14 nt, Human
cuacugaggugcua

SEQ ID NO: 1667109 - RNA, 16 nt, Human
cuacucugugucaggu

SEQ ID NO: 1667110 - RNA, 21 nt, Human
cuacucugugucagguggggc

SEQ ID NO: 1667111 - RNA, 14 nt, Human
cuacccgggaaggg

SEQ ID NO: 1667112 - RNA, 15 nt, Human
cuacccgggaagggg

SEQ ID NO: 1667113 - RNA, 20 nt, Human
cuacccgggaagggggcugg

SEQ ID NO: 1667114 - RNA, 21 nt, Human
cuacccgggaagggggcuggg

SEQ ID NO: 1667115 - RNA, 20 nt, Human
cuacuuccugugacuucagc

SEQ ID NO: 1667116 - RNA, 14 nt, Human
cuacuuccccuucc

SEQ ID NO: 1667117 - RNA, 15 nt, Human
cuacuuccccuuccu

SEQ ID NO: 1667118 - RNA, 20 nt, Human
cuacuuccccuuccuaauuc

SEQ ID NO: 1667119 - RNA, 22 nt, Human
cuacuuauuguagcauccugga

SEQ ID NO: 1667120 - RNA, 15 nt, Human
cuacuugggaggcug

SEQ ID NO: 1667121 - RNA, 18 nt, Human
cuacuugggaggcugaga

SEQ ID NO: 1667122 - RNA, 19 nt, Human
cuacuugggaggcugagau

SEQ ID NO: 1667123 - RNA, 14 nt, Human
cuaaggcugaacuu

SEQ ID NO: 1667124 - RNA, 15 nt, Human
cuaaggugugcucug

SEQ ID NO: 1667125 - RNA, 16 nt, Human
cuaaggacuuguuaga

SEQ ID NO: 1667126 - RNA, 17 nt, Human
cuaaggacuuguuagau

SEQ ID NO: 1667127 - RNA, 11 nt, Human
cuaaggacuug

SEQ ID NO: 1667128 - RNA, 19 nt, Human
cuaagcuauucaguaauaa

SEQ ID NO: 1667129 - RNA, 21 nt, Human
cuaagcuauucaguaauaacu

SEQ ID NO: 1667130 - RNA, 15 nt, Human
cuaagcaaaauguga

SEQ ID NO: 1667131 - RNA, 18 nt, Human
cuaagcaaaaugugauau

SEQ ID NO: 1667132 - RNA, 16 nt, Human
cuaaccagcagaaaug

SEQ ID NO: 1667133 - RNA, 17 nt, Human
cuaaccacgcuggaccu

SEQ ID NO: 1667134 - RNA, 17 nt, Human
cuaaccagcagaaaugc

SEQ ID NO: 1667135 - RNA, 14 nt, Human
cuaagcaaaaugug

SEQ ID NO: 1667136 - RNA, 17 nt, Human
cuacagaggccaugggc

SEQ ID NO: 1667137 - RNA, 18 nt, Human
cuaccauccccuguagag

SEQ ID NO: 1667138 - RNA, 17 nt, Human
cuacccacccuccuuuc

SEQ ID NO: 1667139 - RNA, 22 nt, Human
cuacccacccuccuuucaccac

SEQ ID NO: 1667140 - RNA, 12 nt, Human
cuacccaggugc

SEQ ID NO: 1667141 - RNA, 20 nt, Human
cuacccagcgagcccuggug

SEQ ID NO: 1667142 - RNA, 19 nt, Human
cuacccagcgagcccuggu

SEQ ID NO: 1667143 - RNA, 15 nt, Human
cuacagaggccaugg

SEQ ID NO: 1667144 - RNA, 15 nt, Human
cuacacacugcaugu

SEQ ID NO: 1667145 - RNA, 13 nt, Human
cuacacacugcau

SEQ ID NO: 1667146 - RNA, 21 nt, Human
cuacacacugcauguuuguga

SEQ ID NO: 1667147 - RNA, 16 nt, Human
cuacacuccagugaga

SEQ ID NO: 1667148 - RNA, 17 nt, Human
cuacacuccagugagac

SEQ ID NO: 1667149 - RNA, 17 nt, Human
cuaaucagcauucucac

SEQ ID NO: 1667150 - RNA, 19 nt, Human
cuaaucagcauucucacuc

SEQ ID NO: 1667151 - RNA, 16 nt, Human
cuaauccucuuuuucu

SEQ ID NO: 1667152 - RNA, 13 nt, Human
cuaauaaagcugu

SEQ ID NO: 1667153 - RNA, 12 nt, Human
cuaauaaagcug

SEQ ID NO: 1667154 - RNA, 21 nt, Human
cuaauaaaauuuaaaagucuu

SEQ ID NO: 1667155 - RNA, 16 nt, Human
cuaaggugugcucuga

SEQ ID NO: 1667156 - RNA, 19 nt, Human
cuaaugaaugcauaaaaug

SEQ ID NO: 1667157 - RNA, 22 nt, Human
cuaaugaaugcauaaaauguua

SEQ ID NO: 1667158 - RNA, 16 nt, Human
cuaauguacugcauau

SEQ ID NO: 1667159 - RNA, 14 nt, Human
cuaauguacugcau

SEQ ID NO: 1667160 - RNA, 16 nt, Human
ccuccucucugcccua

SEQ ID NO: 1667161 - RNA, 13 nt, Human
ccuccucucugcc

SEQ ID NO: 1667162 - RNA, 15 nt, Human
ccuccucucugcccu

SEQ ID NO: 1667163 - RNA, 21 nt, Human
ccuccuccagccgccaugcuc

SEQ ID NO: 1667164 - RNA, 20 nt, Human
ccucuccccagcaagugaga

SEQ ID NO: 1667165 - RNA, 13 nt, Human
ccucucccuugga

SEQ ID NO: 1667166 - RNA, 22 nt, Human
ccucucccuuggauuguccccg

SEQ ID NO: 1667167 - RNA, 15 nt, Human
ccucuccccagcaag

SEQ ID NO: 1667168 - RNA, 21 nt, Human
ccucugacacacagcucuguc

SEQ ID NO: 1667169 - RNA, 13 nt, Human
ccucugacacaca

SEQ ID NO: 1667170 - RNA, 15 nt, Human
ccucugacacacagc

SEQ ID NO: 1667171 - RNA, 14 nt, Human
ccucugacacacag

SEQ ID NO: 1667172 - RNA, 19 nt, Human
ccucugacacacagcucug

SEQ ID NO: 1667173 - RNA, 20 nt, Human
ccucugacacacagcucugu

SEQ ID NO: 1667174 - RNA, 19 nt, Human
ccucugcagcaauaaagca

SEQ ID NO: 1667175 - RNA, 19 nt, Human
ccucugcacuccccugcug

SEQ ID NO: 1667176 - RNA, 13 nt, Human
ccucugcccacuc

SEQ ID NO: 1667177 - RNA, 16 nt, Human
ccucugcccacucccu

SEQ ID NO: 1667178 - RNA, 18 nt, Human
ccucugcagcaauaaagc

SEQ ID NO: 1667179 - RNA, 14 nt, Human
ccucugcagcaaua

SEQ ID NO: 1667180 - RNA, 23 nt, Human
ccucugcacuccccugcugggug

SEQ ID NO: 1667181 - RNA, 18 nt, Human
ccucugcacuccccugcu

SEQ ID NO: 1667182 - RNA, 13 nt, Human
ccucugaggcuga

SEQ ID NO: 1667183 - RNA, 11 nt, Human
ccucugagccu

SEQ ID NO: 1667184 - RNA, 12 nt, Human
ccucugagccuu

SEQ ID NO: 1667185 - RNA, 16 nt, Human
ccucugcacuccccug

SEQ ID NO: 1667186 - RNA, 17 nt, Human
ccucugcacuccccugc

SEQ ID NO: 1667187 - RNA, 21 nt, Human
ccucccgaauagcugggacua

SEQ ID NO: 1667188 - RNA, 12 nt, Human
ccucauacccac

SEQ ID NO: 1667189 - RNA, 17 nt, Human
ccucaggugagaagcag

SEQ ID NO: 1667190 - RNA, 18 nt, Human
ccucaggugagaagcaga

SEQ ID NO: 1667191 - RNA, 20 nt, Human
ccucaggugagaagcagagg

SEQ ID NO: 1667192 - RNA, 17 nt, Human
ccuccaggugcacaagc

SEQ ID NO: 1667193 - RNA, 11 nt, Human
ccuccaggugc

SEQ ID NO: 1667194 - RNA, 12 nt, Human
ccuccaggugca

SEQ ID NO: 1667195 - RNA, 12 nt, Human
ccuccauguggg

SEQ ID NO: 1667196 - RNA, 15 nt, Human
ccuccaugugggcua

SEQ ID NO: 1667197 - RNA, 17 nt, Human
ccucccaaagugcuggg

SEQ ID NO: 1667198 - RNA, 14 nt, Human
ccucccaacucacc

SEQ ID NO: 1667199 - RNA, 19 nt, Human
ccuccaugcugccuccaga

SEQ ID NO: 1667200 - RNA, 14 nt, Human
ccuccauccugagg

SEQ ID NO: 1667201 - RNA, 16 nt, Human
ccuccaugcugccucc

SEQ ID NO: 1667202 - RNA, 12 nt, Human
ccuccauccuga

SEQ ID NO: 1667203 - RNA, 13 nt, Human
ccuccauccugag

SEQ ID NO: 1667204 - RNA, 19 nt, Human
ccucccgaguagcugggac

SEQ ID NO: 1667205 - RNA, 17 nt, Human
ccucccgaguagcuggg

SEQ ID NO: 1667206 - RNA, 18 nt, Human
ccucccgaguagcuggga

SEQ ID NO: 1667207 - RNA, 19 nt, Human
ccucccgaauagcugggac

SEQ ID NO: 1667208 - RNA, 20 nt, Human
ccucccgaauagcugggacu

SEQ ID NO: 1667209 - RNA, 13 nt, Human
ccucccucuuucc

SEQ ID NO: 1667210 - RNA, 11 nt, Human
ccuccucagau

SEQ ID NO: 1667211 - RNA, 12 nt, Human
ccuccuccagcc

SEQ ID NO: 1667212 - RNA, 15 nt, Human
ccucccaacucaccc

SEQ ID NO: 1667213 - RNA, 18 nt, Human
ccucccgaauagcuggga

SEQ ID NO: 1667214 - RNA, 14 nt, Human
ccuccccuccucug

SEQ ID NO: 1667215 - RNA, 13 nt, Human
ccuccccuccucu

SEQ ID NO: 1667216 - RNA, 15 nt, Human
ccuccccuccuccug

SEQ ID NO: 1667217 - RNA, 12 nt, Human
ccuccccuccuc

SEQ ID NO: 1667218 - RNA, 16 nt, Human
ccucagagccaccccu

SEQ ID NO: 1667219 - RNA, 14 nt, Human
ccucacccuggggc

SEQ ID NO: 1667220 - RNA, 14 nt, Human
ccucagcauccugg

SEQ ID NO: 1667221 - RNA, 16 nt, Human
ccucagaucuucugug

SEQ ID NO: 1667222 - RNA, 16 nt, Human
ccucagggucccuggu

SEQ ID NO: 1667223 - RNA, 17 nt, Human
ccucagggucccuggug

SEQ ID NO: 1667224 - RNA, 20 nt, Human
ccucagggucccugguggca

SEQ ID NO: 1667225 - RNA, 22 nt, Human
ccucagggucccugguggcagc

SEQ ID NO: 1667226 - RNA, 17 nt, Human
ccuauuagagaagagau

SEQ ID NO: 1667227 - RNA, 16 nt, Human
ccuauuagagaagaga

SEQ ID NO: 1667228 - RNA, 24 nt, Human
ccucacaguccuuaccagcagagc

SEQ ID NO: 1667229 - RNA, 23 nt, Human
ccucacaguccuuaccagcagag

SEQ ID NO: 1667230 - RNA, 18 nt, Human
ccuaggugacagagugag

SEQ ID NO: 1667231 - RNA, 15 nt, Human
ccuaggugacagagu

SEQ ID NO: 1667232 - RNA, 22 nt, Human
ccucaggugagaagcagaggaa

SEQ ID NO: 1667233 - RNA, 14 nt, Human
cccuguucacucua

SEQ ID NO: 1667234 - RNA, 22 nt, Human
cccuguucacucuacuuagcau

SEQ ID NO: 1667235 - RNA, 13 nt, Human
cccuguucacucu

SEQ ID NO: 1667236 - RNA, 13 nt, Human
cccuuccuaauuc

SEQ ID NO: 1667237 - RNA, 14 nt, Human
cccuuccuaauucc

SEQ ID NO: 1667238 - RNA, 19 nt, Human
cccuuccuaauuccacagc

SEQ ID NO: 1667239 - RNA, 20 nt, Human
cccuuccuaauuccacagcu

SEQ ID NO: 1667240 - RNA, 11 nt, Human
cccuucauuug

SEQ ID NO: 1667241 - RNA, 12 nt, Human
cccuucccaccu

SEQ ID NO: 1667242 - RNA, 13 nt, Human
cccuucccaccuc

SEQ ID NO: 1667243 - RNA, 22 nt, Human
cccuuguggucccaccccacac

SEQ ID NO: 1667244 - RNA, 22 nt, Human
cccuugguuaggcauuguggga

SEQ ID NO: 1667245 - RNA, 23 nt, Human
cccuugguuaggcauugugggaa

SEQ ID NO: 1667246 - RNA, 21 nt, Human
cccuuccuaauuccacagcug

SEQ ID NO: 1667247 - RNA, 11 nt, Human
cccuucuuuuu

SEQ ID NO: 1667248 - RNA, 19 nt, Human
cccuucuuuuucuucuuuu

SEQ ID NO: 1667249 - RNA, 17 nt, Human
cccuuggauuguccccg

SEQ ID NO: 1667250 - RNA, 17 nt, Human
ccggaggggccuggcag

SEQ ID NO: 1667251 - RNA, 21 nt, Human
ccggaggggccuggcagccgu

SEQ ID NO: 1667252 - RNA, 17 nt, Human
ccgggaagggggcuggg

SEQ ID NO: 1667253 - RNA, 16 nt, Human
ccgggagccugaucac

SEQ ID NO: 1667254 - RNA, 23 nt, Human
ccgggagccugaucaccugcccu

SEQ ID NO: 1667255 - RNA, 22 nt, Human
ccgggaggcagagguugcagug

SEQ ID NO: 1667256 - RNA, 12 nt, Human
ccguuauuaaaa

SEQ ID NO: 1667257 - RNA, 22 nt, Human
ccuagguauaauucacauugua

SEQ ID NO: 1667258 - RNA, 13 nt, Human
ccuaggugacaga

SEQ ID NO: 1667259 - RNA, 16 nt, Human
ccuacuuccccuuccu

SEQ ID NO: 1667260 - RNA, 13 nt, Human
ccuacuuccccuu

SEQ ID NO: 1667261 - RNA, 21 nt, Human
ccuagaaauuccccacccuga

SEQ ID NO: 1667262 - RNA, 19 nt, Human
ccuacuguaauuugugaua

SEQ ID NO: 1667263 - RNA, 18 nt, Human
ccuacccacccuccuuuc

SEQ ID NO: 1667264 - RNA, 18 nt, Human
ccuacaggagugagcacu

SEQ ID NO: 1667265 - RNA, 13 nt, Human
ccuacccacccuc

SEQ ID NO: 1667266 - RNA, 22 nt, Human
ccuacauguauuuguuugcaua

SEQ ID NO: 1667267 - RNA, 20 nt, Human
ccuaaauccauuuggaaauc

SEQ ID NO: 1667268 - RNA, 21 nt, Human
ccuaaauccauuuggaaaucu

SEQ ID NO: 1667269 - RNA, 22 nt, Human
ccuacaguugaaaaacagcuga

SEQ ID NO: 1667270 - RNA, 19 nt, Human
ccuacagcuugaccgugag

SEQ ID NO: 1667271 - RNA, 16 nt, Human
ccuaaaauucagugga

SEQ ID NO: 1667272 - RNA, 19 nt, Human
ccuaaauccauuuggaaau

SEQ ID NO: 1667273 - RNA, 13 nt, Human
ccuaaacauauga

SEQ ID NO: 1667274 - RNA, 14 nt, Human
cccugguggcagcu

SEQ ID NO: 1667275 - RNA, 21 nt, Human
cccugccucucugcagguccc

SEQ ID NO: 1667276 - RNA, 22 nt, Human
cccugccucucugcaggucccu

SEQ ID NO: 1667277 - RNA, 13 nt, Human
cccugcugguuca

SEQ ID NO: 1667278 - RNA, 23 nt, Human
cccugcuuugggcugcccuggug

SEQ ID NO: 1667279 - RNA, 19 nt, Human
cccugcugguucaggguug

SEQ ID NO: 1667280 - RNA, 20 nt, Human
cccugcugguucaggguugg

SEQ ID NO: 1667281 - RNA, 16 nt, Human
cccugggaggcucugg

SEQ ID NO: 1667282 - RNA, 17 nt, Human
cccugggaggcucugga

SEQ ID NO: 1667283 - RNA, 18 nt, Human
cccugggaggcucuggag

SEQ ID NO: 1667284 - RNA, 17 nt, Human
cccuggugcugccacac

SEQ ID NO: 1667285 - RNA, 21 nt, Human
cccuggugcugccacacuuca

SEQ ID NO: 1667286 - RNA, 22 nt, Human
cccugguggcagugggagcugc

SEQ ID NO: 1667287 - RNA, 11 nt, Human
cccugccucuc

SEQ ID NO: 1667288 - RNA, 18 nt, Human
cccugccucucugcaggu

SEQ ID NO: 1667289 - RNA, 16 nt, Human
cccugccuccuuugug

SEQ ID NO: 1667290 - RNA, 23 nt, Human
cccugccuccuuugugaggaagc

SEQ ID NO: 1667291 - RNA, 13 nt, Human
cccugcccaccug

SEQ ID NO: 1667292 - RNA, 17 nt, Human
cccugccacccugggga

SEQ ID NO: 1667293 - RNA, 18 nt, Human
cccugccacccuggggag

SEQ ID NO: 1667294 - RNA, 12 nt, Human
cccugccacccu

SEQ ID NO: 1667295 - RNA, 14 nt, Human
cccugccacccugg

SEQ ID NO: 1667296 - RNA, 15 nt, Human
cccugccacccuggg

SEQ ID NO: 1667297 - RNA, 12 nt, Human
cccugcagaggg

SEQ ID NO: 1667298 - RNA, 20 nt, Human
cccugcagagggcacagaaa

SEQ ID NO: 1667299 - RNA, 18 nt, Human
cccugcagagggcacaga

SEQ ID NO: 1667300 - RNA, 22 nt, Human
cccugcaaccugauugugucuc

SEQ ID NO: 1667301 - RNA, 16 nt, Human
cccugcaaccugauug

SEQ ID NO: 1667302 - RNA, 15 nt, Human
cccugcaauaaaaug

SEQ ID NO: 1667303 - RNA, 14 nt, Human
cccugcaauaaaau

SEQ ID NO: 1667304 - RNA, 12 nt, Human
cccuaauaaagc

SEQ ID NO: 1667305 - RNA, 13 nt, Human
cccuaauaaagcu

SEQ ID NO: 1667306 - RNA, 14 nt, Human
cccuaauaaagcug

SEQ ID NO: 1667307 - RNA, 15 nt, Human
cccuaauaaagcugu

SEQ ID NO: 1667308 - RNA, 18 nt, Human
cccuaauaaagcugugug

SEQ ID NO: 1667309 - RNA, 15 nt, Human
cccucagggucccug

SEQ ID NO: 1667310 - RNA, 16 nt, Human
cccucagggucccugg

SEQ ID NO: 1667311 - RNA, 17 nt, Human
cccucagggucccuggu

SEQ ID NO: 1667312 - RNA, 18 nt, Human
cccucagggucccuggug

SEQ ID NO: 1667313 - RNA, 19 nt, Human
cccucagggucccuggugg

SEQ ID NO: 1667314 - RNA, 22 nt, Human
cccuaaaguguauuuuuuuacu

SEQ ID NO: 1667315 - RNA, 17 nt, Human
cccuaaaguguauuuuu

SEQ ID NO: 1667316 - RNA, 17 nt, Human
cccggaggggccuggca

SEQ ID NO: 1667317 - RNA, 18 nt, Human
cccggaggggccuggcag

SEQ ID NO: 1667318 - RNA, 16 nt, Human
cccggcaggguccuag

SEQ ID NO: 1667319 - RNA, 22 nt, Human
cccucauccucauacccacccc

SEQ ID NO: 1667320 - RNA, 22 nt, Human
cccucauuccaccuucccaugc

SEQ ID NO: 1667321 - RNA, 21 nt, Human
cccuccaagaccuucuccuuc

SEQ ID NO: 1667322 - RNA, 13 nt, Human
cccucauagcccu

SEQ ID NO: 1667323 - RNA, 15 nt, Human
cccucauagcccuca

SEQ ID NO: 1667324 - RNA, 21 nt, Human
cccucagggucccugguggca

SEQ ID NO: 1667325 - RNA, 20 nt, Human
cccucagucuggcccuuccu

SEQ ID NO: 1667326 - RNA, 19 nt, Human
cccucauagcccucacccu

SEQ ID NO: 1667327 - RNA, 22 nt, Human
cccucaucaccaacgucugugc

SEQ ID NO: 1667328 - RNA, 17 nt, Human
cccucauccucauaccc

SEQ ID NO: 1667329 - RNA, 20 nt, Human
cccucauccucauacccacc

SEQ ID NO: 1667330 - RNA, 19 nt, Human
cccuccaucuaaacugccc

SEQ ID NO: 1667331 - RNA, 17 nt, Human
cccuccaugugggcuag

SEQ ID NO: 1667332 - RNA, 14 nt, Human
cccucccuucaacc

SEQ ID NO: 1667333 - RNA, 12 nt, Human
cccucccuccac

SEQ ID NO: 1667334 - RNA, 13 nt, Human
cccucccuccacc

SEQ ID NO: 1667335 - RNA, 13 nt, Human
cccucccucuuuc

SEQ ID NO: 1667336 - RNA, 20 nt, Human
cccucccuccaccucccugc

SEQ ID NO: 1667337 - RNA, 23 nt, Human
cccgcucagcccucccugccccu

SEQ ID NO: 1667338 - RNA, 23 nt, Human
cccggaagccaaaccucugugag

SEQ ID NO: 1667339 - RNA, 19 nt, Human
cccgcucagcccucccugc

SEQ ID NO: 1667340 - RNA, 22 nt, Human
cccgcuaagagggagggagggc

SEQ ID NO: 1667341 - RNA, 21 nt, Human
cccgaggccuucucugaagga

SEQ ID NO: 1667342 - RNA, 20 nt, Human
cccgaggccuucucugaagg

SEQ ID NO: 1667343 - RNA, 15 nt, Human
cccgaggccuucucu

SEQ ID NO: 1667344 - RNA, 20 nt, Human
ccccuuccuaauuccacagc

SEQ ID NO: 1667345 - RNA, 21 nt, Human
ccccuuccuaauuccacagcu

SEQ ID NO: 1667346 - RNA, 22 nt, Human
ccccuuccuaauuccacagcug

SEQ ID NO: 1667347 - RNA, 12 nt, Human
ccccuucccccu

SEQ ID NO: 1667348 - RNA, 20 nt, Human
ccccuguucuggcagaguug

SEQ ID NO: 1667349 - RNA, 14 nt, Human
ccccuuaccacugc

SEQ ID NO: 1667350 - RNA, 23 nt, Human
ccccuggcuuuucacugcuggcu

SEQ ID NO: 1667351 - RNA, 22 nt, Human
ccccuguccccgcacugggcuu

SEQ ID NO: 1667352 - RNA, 21 nt, Human
ccccagcuggggccaggcugg

SEQ ID NO: 1667353 - RNA, 22 nt, Human
ccccagcuggggccaggcuggg

SEQ ID NO: 1667354 - RNA, 13 nt, Human
ccccagccugcua

SEQ ID NO: 1667355 - RNA, 16 nt, Human
ccccagccccauccca

SEQ ID NO: 1667356 - RNA, 19 nt, Human
ccccagcccuccuuaucaa

SEQ ID NO: 1667357 - RNA, 15 nt, Human
ccccagccccauccu

SEQ ID NO: 1667358 - RNA, 12 nt, Human
ccccaggaggcc

SEQ ID NO: 1667359 - RNA, 15 nt, Human
ccccuggcagccccu

SEQ ID NO: 1667360 - RNA, 12 nt, Human
ccccuggcagcc

SEQ ID NO: 1667361 - RNA, 14 nt, Human
ccccuggcagcccc

SEQ ID NO: 1667362 - RNA, 22 nt, Human
ccccaggugguuauggagaggg

SEQ ID NO: 1667363 - RNA, 14 nt, Human
ccccaggugccagu

SEQ ID NO: 1667364 - RNA, 13 nt, Human
cccagguuucuau

SEQ ID NO: 1667365 - RNA, 19 nt, Human
cccagggugggaagggcua

SEQ ID NO: 1667366 - RNA, 17 nt, Human
cccaggcauuccccagg

SEQ ID NO: 1667367 - RNA, 18 nt, Human
cccaggcauuccccagga

SEQ ID NO: 1667368 - RNA, 15 nt, Human
cccaggaggccagcc

SEQ ID NO: 1667369 - RNA, 16 nt, Human
cccaggaggccagccu

SEQ ID NO: 1667370 - RNA, 23 nt, Human
cccaggcaggucuugaacuccug

SEQ ID NO: 1667371 - RNA, 15 nt, Human
cccaggcauucccca

SEQ ID NO: 1667372 - RNA, 15 nt, Human
cccagugccgagaag

SEQ ID NO: 1667373 - RNA, 21 nt, Human
cccagugcccacaggaucagu

SEQ ID NO: 1667374 - RNA, 10 nt, Human
cccagucugg

SEQ ID NO: 1667375 - RNA, 18 nt, Human
cccagucuggaaugcagu

SEQ ID NO: 1667376 - RNA, 19 nt, Human
cccagucuggaaugcagug

SEQ ID NO: 1667377 - RNA, 17 nt, Human
cccagugccgagaagga

SEQ ID NO: 1667378 - RNA, 20 nt, Human
cccagugguuccuaauccuc

SEQ ID NO: 1667379 - RNA, 14 nt, Human
cccaguuagcucuc

SEQ ID NO: 1667380 - RNA, 18 nt, Human
cccaucucacacaugagc

SEQ ID NO: 1667381 - RNA, 13 nt, Human
cccaucucacaca

SEQ ID NO: 1667382 - RNA, 20 nt, Human
cccaucugugaaaggaaaga

SEQ ID NO: 1667383 - RNA, 14 nt, Human
cccaugcugcccug

SEQ ID NO: 1667384 - RNA, 12 nt, Human
cccaugcugccc

SEQ ID NO: 1667385 - RNA, 13 nt, Human
cccaugcugcccu

SEQ ID NO: 1667386 - RNA, 15 nt, Human
cccaugagccucagc

SEQ ID NO: 1667387 - RNA, 16 nt, Human
cccaugagccucagca

SEQ ID NO: 1667388 - RNA, 20 nt, Human
cccaugagccucagcauccu

SEQ ID NO: 1667389 - RNA, 12 nt, Human
cccauuauucaa

SEQ ID NO: 1667390 - RNA, 16 nt, Human
cccaugucucgacuca

SEQ ID NO: 1667391 - RNA, 17 nt, Human
cccaugucucgacucau

SEQ ID NO: 1667392 - RNA, 21 nt, Human
ccccaaauggaaaugggcaga

SEQ ID NO: 1667393 - RNA, 22 nt, Human
cccaugagccucagcauccugg

SEQ ID NO: 1667394 - RNA, 18 nt, Human
cccaggaggccagccuug

SEQ ID NO: 1667395 - RNA, 16 nt, Human
cccagaggcuggguga

SEQ ID NO: 1667396 - RNA, 13 nt, Human
cccagccccaaug

SEQ ID NO: 1667397 - RNA, 17 nt, Human
cccagccccaaugaaca

SEQ ID NO: 1667398 - RNA, 11 nt, Human
cccagccccau

SEQ ID NO: 1667399 - RNA, 12 nt, Human
cccagccccauc

SEQ ID NO: 1667400 - RNA, 18 nt, Human
cccagccuccaagcucca

SEQ ID NO: 1667401 - RNA, 20 nt, Human
cccagccuccaagcuccauc

SEQ ID NO: 1667402 - RNA, 23 nt, Human
cccagcccuccuuaucaaaggac

SEQ ID NO: 1667403 - RNA, 18 nt, Human
cccagccccauccucugu

SEQ ID NO: 1667404 - RNA, 19 nt, Human
cccagccccauccucugua

SEQ ID NO: 1667405 - RNA, 13 nt, Human
cccagccccaucc

SEQ ID NO: 1667406 - RNA, 14 nt, Human
cccagccccauccc

SEQ ID NO: 1667407 - RNA, 14 nt, Human
cccagccccauccu

SEQ ID NO: 1667408 - RNA, 15 nt, Human
cccagccccauccuc

SEQ ID NO: 1667409 - RNA, 13 nt, Human
cccaggagccccg

SEQ ID NO: 1667410 - RNA, 14 nt, Human
cccaggagccccga

SEQ ID NO: 1667411 - RNA, 18 nt, Human
cccaggagccccgaggcc

SEQ ID NO: 1667412 - RNA, 14 nt, Human
cccaggaggccagc

SEQ ID NO: 1667413 - RNA, 15 nt, Human
cccagcgagcccugg

SEQ ID NO: 1667414 - RNA, 14 nt, Human
cccagcgagcccug

SEQ ID NO: 1667415 - RNA, 13 nt, Human
cccagcucugguc

SEQ ID NO: 1667416 - RNA, 14 nt, Human
cccagcucuggucc

SEQ ID NO: 1667417 - RNA, 12 nt, Human
cccagcucuggu

SEQ ID NO: 1667418 - RNA, 15 nt, Human
cccagcucuggucca

SEQ ID NO: 1667419 - RNA, 16 nt, Human
cccagcucugguccau

SEQ ID NO: 1667420 - RNA, 18 nt, Human
cccagcucugguccauag

SEQ ID NO: 1667421 - RNA, 16 nt, Human
ccauguuggccaggcu

SEQ ID NO: 1667422 - RNA, 15 nt, Human
ccauguuggccaggc

SEQ ID NO: 1667423 - RNA, 19 nt, Human
ccauguuggccaggcuggu

SEQ ID NO: 1667424 - RNA, 21 nt, Human
ccauguuggccaggcuggucu

SEQ ID NO: 1667425 - RNA, 12 nt, Human
cccaccuggccu

SEQ ID NO: 1667426 - RNA, 15 nt, Human
cccaccuggccucug

SEQ ID NO: 1667427 - RNA, 16 nt, Human
cccaccuggccucugc

SEQ ID NO: 1667428 - RNA, 17 nt, Human
cccaccuuggcugcagg

SEQ ID NO: 1667429 - RNA, 19 nt, Human
cccaccuuggcugcaggga

SEQ ID NO: 1667430 - RNA, 20 nt, Human
cccaccuuggcugcagggag

SEQ ID NO: 1667431 - RNA, 15 nt, Human
cccacgcccccacug

SEQ ID NO: 1667432 - RNA, 13 nt, Human
cccacgcccccac

SEQ ID NO: 1667433 - RNA, 14 nt, Human
cccacgcccccacu

SEQ ID NO: 1667434 - RNA, 17 nt, Human
cccagacgaugucuuca

SEQ ID NO: 1667435 - RNA, 15 nt, Human
cccagacgaugucuu

SEQ ID NO: 1667436 - RNA, 14 nt, Human
ccaugcugccucca

SEQ ID NO: 1667437 - RNA, 16 nt, Human
ccaugcugcccuguga

SEQ ID NO: 1667438 - RNA, 17 nt, Human
ccaugcugcccugugag

SEQ ID NO: 1667439 - RNA, 15 nt, Human
ccaugcuccuggccc

SEQ ID NO: 1667440 - RNA, 18 nt, Human
ccaugcuccuggcccacu

SEQ ID NO: 1667441 - RNA, 13 nt, Human
ccauguuggccag

SEQ ID NO: 1667442 - RNA, 14 nt, Human
ccauguuggccagg

SEQ ID NO: 1667443 - RNA, 13 nt, Human
ccaugugccaggu

SEQ ID NO: 1667444 - RNA, 23 nt, Human
ccauggcacucuauguucuaaga

SEQ ID NO: 1667445 - RNA, 20 nt, Human
ccaggaagccagcaggcucu

SEQ ID NO: 1667446 - RNA, 22 nt, Human
ccagcugugcucuggacaggca

SEQ ID NO: 1667447 - RNA, 23 nt, Human
ccagcugugcucuggacaggcau

SEQ ID NO: 1667448 - RNA, 15 nt, Human
ccaggaagccagcag

SEQ ID NO: 1667449 - RNA, 17 nt, Human
ccaggaagccagcaggc

SEQ ID NO: 1667450 - RNA, 19 nt, Human
ccaggaagccagcaggcuc

SEQ ID NO: 1667451 - RNA, 12 nt, Human
ccaggagcagcc

SEQ ID NO: 1667452 - RNA, 13 nt, Human
ccaggagcagcca

SEQ ID NO: 1667453 - RNA, 15 nt, Human
ccaggagcagccaca

SEQ ID NO: 1667454 - RNA, 14 nt, Human
ccaggagcagccac

SEQ ID NO: 1667455 - RNA, 14 nt, Human
ccaggccagaggga

SEQ ID NO: 1667456 - RNA, 21 nt, Human
ccaggccagagggagugacag

SEQ ID NO: 1667457 - RNA, 21 nt, Human
ccaggccccugccacccuggg

SEQ ID NO: 1667458 - RNA, 23 nt, Human
ccaggccccugccacccugggga

SEQ ID NO: 1667459 - RNA, 17 nt, Human
ccaggcccucugcccac

SEQ ID NO: 1667460 - RNA, 18 nt, Human
ccaggcccucugcccacu

SEQ ID NO: 1667461 - RNA, 19 nt, Human
ccaggcccucugcccacuc

SEQ ID NO: 1667462 - RNA, 20 nt, Human
ccaggcccucugcccacucc

SEQ ID NO: 1667463 - RNA, 13 nt, Human
ccaggccuccuac

SEQ ID NO: 1667464 - RNA, 18 nt, Human
ccaggccuccuacagcuu

SEQ ID NO: 1667465 - RNA, 19 nt, Human
ccaggccuccuacagcuug

SEQ ID NO: 1667466 - RNA, 14 nt, Human
ccagcuggccggga

SEQ ID NO: 1667467 - RNA, 20 nt, Human
ccagcuggccgggagccuga

SEQ ID NO: 1667468 - RNA, 12 nt, Human
ccagcuggccgg

SEQ ID NO: 1667469 - RNA, 16 nt, Human
ccagcugcuugggcuu

SEQ ID NO: 1667470 - RNA, 18 nt, Human
ccagcugcuugggcuuca

SEQ ID NO: 1667471 - RNA, 15 nt, Human
ccagcugcuugggcu

SEQ ID NO: 1667472 - RNA, 16 nt, Human
ccagcuggguuggaaa

SEQ ID NO: 1667473 - RNA, 17 nt, Human
ccagcuggguuggaaaa

SEQ ID NO: 1667474 - RNA, 18 nt, Human
ccagcugugcucuggaca

SEQ ID NO: 1667475 - RNA, 20 nt, Human
ccagcugugcucuggacagg

SEQ ID NO: 1667476 - RNA, 21 nt, Human
ccagcugugcucuggacaggc

SEQ ID NO: 1667477 - RNA, 12 nt, Human
ccaggccugccu

SEQ ID NO: 1667478 - RNA, 23 nt, Human
ccagggacagaggggguggccuc

SEQ ID NO: 1667479 - RNA, 12 nt, Human
ccaucaagccac

SEQ ID NO: 1667480 - RNA, 12 nt, Human
ccaucacccgcu

SEQ ID NO: 1667481 - RNA, 23 nt, Human
ccauagagagcaagacgcugugc

SEQ ID NO: 1667482 - RNA, 15 nt, Human
ccauauucuguuggc

SEQ ID NO: 1667483 - RNA, 18 nt, Human
ccauauucuguuggccag

SEQ ID NO: 1667484 - RNA, 19 nt, Human
ccauauucuguuggccagu

SEQ ID NO: 1667485 - RNA, 19 nt, Human
ccaucucaccuccugcugg

SEQ ID NO: 1667486 - RNA, 21 nt, Human
ccaucucaccuccugcugggc

SEQ ID NO: 1667487 - RNA, 18 nt, Human
ccaucucaccuccugcug

SEQ ID NO: 1667488 - RNA, 16 nt, Human
ccaucgcugucaucuc

SEQ ID NO: 1667489 - RNA, 23 nt, Human
ccaucucaccuccugcugggcag

SEQ ID NO: 1667490 - RNA, 14 nt, Human
ccaucaugucuggc

SEQ ID NO: 1667491 - RNA, 16 nt, Human
ccaucaugucuggcua

SEQ ID NO: 1667492 - RNA, 16 nt, Human
ccauccugaggcucca

SEQ ID NO: 1667493 - RNA, 21 nt, Human
ccauccucuguacagagccca

SEQ ID NO: 1667494 - RNA, 15 nt, Human
ccauccugaggcucc

SEQ ID NO: 1667495 - RNA, 17 nt, Human
cauuauuuuauuaugaa

SEQ ID NO: 1667496 - RNA, 13 nt, Human
cauugaccugagg

SEQ ID NO: 1667497 - RNA, 22 nt, Human
cauugaccugaggcccuucucu

SEQ ID NO: 1667498 - RNA, 12 nt, Human
cauuauuuuauu

SEQ ID NO: 1667499 - RNA, 14 nt, Human
cauuauuuuauuau

SEQ ID NO: 1667500 - RNA, 16 nt, Human
cauuauuuuauuauga

SEQ ID NO: 1667501 - RNA, 19 nt, Human
cauugaaaucuuuuugcuu

SEQ ID NO: 1667502 - RNA, 15 nt, Human
cauuuccuaaauaua

SEQ ID NO: 1667503 - RNA, 21 nt, Human
cauuucuuccacaagagccca

SEQ ID NO: 1667504 - RNA, 23 nt, Human
cauuucugcaucagcugcugaaa

SEQ ID NO: 1667505 - RNA, 17 nt, Human
cauuuacuuuguguuca

SEQ ID NO: 1667506 - RNA, 21 nt, Human
cauuuacuuuguguucaccuu

SEQ ID NO: 1667507 - RNA, 19 nt, Human
cauuuaaagcuuauuaaaa

SEQ ID NO: 1667508 - RNA, 19 nt, Human
cauuugaggucuguucuuu

SEQ ID NO: 1667509 - RNA, 18 nt, Human
cauuugaggucuguucuu

SEQ ID NO: 1667510 - RNA, 17 nt, Human
cauuugaggucuguucu

SEQ ID NO: 1667511 - RNA, 16 nt, Human
cauuugagcagggcuc

SEQ ID NO: 1667512 - RNA, 14 nt, Human
cauuugagcagggc

SEQ ID NO: 1667513 - RNA, 23 nt, Human
cauuucuuccacaagagcccagg

SEQ ID NO: 1667514 - RNA, 23 nt, Human
cauuuugggguacccacugcucu

SEQ ID NO: 1667515 - RNA, 19 nt, Human
cauuuuuaguagagacagg

SEQ ID NO: 1667516 - RNA, 20 nt, Human
cauuuuuaagugcugcauuu

SEQ ID NO: 1667517 - RNA, 15 nt, Human
cauuuuuaagugcug

SEQ ID NO: 1667518 - RNA, 20 nt, Human
cauuuugggguacccacugc

SEQ ID NO: 1667519 - RNA, 21 nt, Human
cauuuugggguacccacugcu

SEQ ID NO: 1667520 - RNA, 22 nt, Human
cauuuugggguacccacugcuc

SEQ ID NO: 1667521 - RNA, 18 nt, Human
cauuuugcuaaaugugaa

SEQ ID NO: 1667522 - RNA, 21 nt, Human
cauuuugcuaaaugugaauga

SEQ ID NO: 1667523 - RNA, 24 nt, Human
cauuuugcuaaaugugaaugauga

SEQ ID NO: 1667524 - RNA, 19 nt, Human
cauuuuauuuuauuaugca

SEQ ID NO: 1667525 - RNA, 21 nt, Human
cauuuuauuuuauuaugcaug

SEQ ID NO: 1667526 - RNA, 22 nt, Human
cauuuuauuuuauuaugcauga

SEQ ID NO: 1667527 - RNA, 15 nt, Human
cauuugcucauggaa

SEQ ID NO: 1667528 - RNA, 14 nt, Human
cauuugcucaugga

SEQ ID NO: 1667529 - RNA, 22 nt, Human
cauuugaggucuguucuuucca

SEQ ID NO: 1667530 - RNA, 16 nt, Human
cauuugcucauggaau

SEQ ID NO: 1667531 - RNA, 20 nt, Human
cauuuuuaguagagacaggg

SEQ ID NO: 1667532 - RNA, 21 nt, Human
ccaaaauaaaacuuuuuaaaa

SEQ ID NO: 1667533 - RNA, 18 nt, Human
ccaaaauaaaacuuuuua

SEQ ID NO: 1667534 - RNA, 17 nt, Human
ccaaaccucugugagca

SEQ ID NO: 1667535 - RNA, 17 nt, Human
ccaaagaaauguaaggg

SEQ ID NO: 1667536 - RNA, 13 nt, Human
ccaaagaugcagc

SEQ ID NO: 1667537 - RNA, 14 nt, Human
ccaaagaugcagcc

SEQ ID NO: 1667538 - RNA, 15 nt, Human
ccaagaccuucuccu

SEQ ID NO: 1667539 - RNA, 18 nt, Human
ccaacccuggcacccagg

SEQ ID NO: 1667540 - RNA, 13 nt, Human
ccaacccucauca

SEQ ID NO: 1667541 - RNA, 15 nt, Human
ccaacccucaucacc

SEQ ID NO: 1667542 - RNA, 16 nt, Human
ccaacaucaacaucuu

SEQ ID NO: 1667543 - RNA, 14 nt, Human
ccaacauacuccca

SEQ ID NO: 1667544 - RNA, 21 nt, Human
ccaacacgagcaggcuacugu

SEQ ID NO: 1667545 - RNA, 15 nt, Human
ccaaauucuuucagu

SEQ ID NO: 1667546 - RNA, 22 nt, Human
ccaaauucuuucaguggcuacc

SEQ ID NO: 1667547 - RNA, 14 nt, Human
ccaacacgagcagg

SEQ ID NO: 1667548 - RNA, 20 nt, Human
ccacaagagcccaggccucc

SEQ ID NO: 1667549 - RNA, 21 nt, Human
ccacaagagcccaggccuccu

SEQ ID NO: 1667550 - RNA, 16 nt, Human
ccacaagagcccaggc

SEQ ID NO: 1667551 - RNA, 17 nt, Human
ccacaagagcccaggcc

SEQ ID NO: 1667552 - RNA, 18 nt, Human
ccacaagagcccaggccu

SEQ ID NO: 1667553 - RNA, 19 nt, Human
ccacaagagcccaggccuc

SEQ ID NO: 1667554 - RNA, 15 nt, Human
ccacaaguuaaauaa

SEQ ID NO: 1667555 - RNA, 20 nt, Human
ccacaaguuaaauaaaucau

SEQ ID NO: 1667556 - RNA, 15 nt, Human
ccaagccguggcuuc

SEQ ID NO: 1667557 - RNA, 16 nt, Human
ccaagccguggcuucc

SEQ ID NO: 1667558 - RNA, 17 nt, Human
ccaagccguggcuuccc

SEQ ID NO: 1667559 - RNA, 21 nt, Human
ccaagccguggcuucccgcuc

SEQ ID NO: 1667560 - RNA, 14 nt, Human
ccaagcaggacaug

SEQ ID NO: 1667561 - RNA, 14 nt, Human
ccaagccguggcuu

SEQ ID NO: 1667562 - RNA, 23 nt, Human
ccaagccguggcuucccgcucag

SEQ ID NO: 1667563 - RNA, 12 nt, Human
ccaagcucccag

SEQ ID NO: 1667564 - RNA, 13 nt, Human
ccaagcucccagg

SEQ ID NO: 1667565 - RNA, 14 nt, Human
ccaagcuccaucuc

SEQ ID NO: 1667566 - RNA, 18 nt, Human
ccaaggcuagaaccaccu

SEQ ID NO: 1667567 - RNA, 13 nt, Human
ccacaacacacag

SEQ ID NO: 1667568 - RNA, 18 nt, Human
ccacaaaggagagcuagc

SEQ ID NO: 1667569 - RNA, 16 nt, Human
ccacaagacccuugug

SEQ ID NO: 1667570 - RNA, 13 nt, Human
ccacaagagccca

SEQ ID NO: 1667571 - RNA, 16 nt, Human
ccacaagaaaugaaag

SEQ ID NO: 1667572 - RNA, 22 nt, Human
ccacaagaaaugaaagcaggga

SEQ ID NO: 1667573 - RNA, 14 nt, Human
ccaaggcuggggga

SEQ ID NO: 1667574 - RNA, 16 nt, Human
ccaaggcucugagcaa

SEQ ID NO: 1667575 - RNA, 19 nt, Human
ccaaggcugauuaaaccaa

SEQ ID NO: 1667576 - RNA, 13 nt, Human
ccaaguggcuccc

SEQ ID NO: 1667577 - RNA, 16 nt, Human
ccaaguggcucccaca

SEQ ID NO: 1667578 - RNA, 20 nt, Human
ccaauauucauagcagcuua

SEQ ID NO: 1667579 - RNA, 15 nt, Human
caugugaaaucauuc

SEQ ID NO: 1667580 - RNA, 16 nt, Human
caugugaaaucauuca

SEQ ID NO: 1667581 - RNA, 17 nt, Human
caugugaaaucauucau

SEQ ID NO: 1667582 - RNA, 14 nt, Human
caugucuuuucuug

SEQ ID NO: 1667583 - RNA, 19 nt, Human
caugucuuuucuugcauga

SEQ ID NO: 1667584 - RNA, 21 nt, Human
caugucuuuucuugcaugagg

SEQ ID NO: 1667585 - RNA, 23 nt, Human
caugucuuuucuugcaugaggcu

SEQ ID NO: 1667586 - RNA, 18 nt, Human
caugucgccucugcauuc

SEQ ID NO: 1667587 - RNA, 20 nt, Human
caugucgccucugcauucag

SEQ ID NO: 1667588 - RNA, 14 nt, Human
caugucgccucugc

SEQ ID NO: 1667589 - RNA, 15 nt, Human
caugucgccucugca

SEQ ID NO: 1667590 - RNA, 18 nt, Human
cauguaauuaaguacuau

SEQ ID NO: 1667591 - RNA, 21 nt, Human
cauguaauuaaguacuaugua

SEQ ID NO: 1667592 - RNA, 16 nt, Human
cauggucggaaaacau

SEQ ID NO: 1667593 - RNA, 12 nt, Human
cauguuuauuac

SEQ ID NO: 1667594 - RNA, 13 nt, Human
cauguuuauuaca

SEQ ID NO: 1667595 - RNA, 18 nt, Human
cauguuuauuacaguaua

SEQ ID NO: 1667596 - RNA, 19 nt, Human
cauguuuauuacaguauaa

SEQ ID NO: 1667597 - RNA, 20 nt, Human
cauguuuauuacaguauaau

SEQ ID NO: 1667598 - RNA, 22 nt, Human
cauguuuauuacaguauaauua

SEQ ID NO: 1667599 - RNA, 21 nt, Human
cauguuucuuuguaaugaaaa

SEQ ID NO: 1667600 - RNA, 22 nt, Human
cauguuucuuuguaaugaaaac

SEQ ID NO: 1667601 - RNA, 23 nt, Human
cauguuugauguaucugagcagg

SEQ ID NO: 1667602 - RNA, 15 nt, Human
caugugcacaugcac

SEQ ID NO: 1667603 - RNA, 21 nt, Human
caugugccagguuuuuggucu

SEQ ID NO: 1667604 - RNA, 22 nt, Human
caugugccagguuuuuggucug

SEQ ID NO: 1667605 - RNA, 17 nt, Human
cauuagcaguuugcuuu

SEQ ID NO: 1667606 - RNA, 18 nt, Human
cauuagcaguuugcuuug

SEQ ID NO: 1667607 - RNA, 11 nt, Human
cauuauuuuau

SEQ ID NO: 1667608 - RNA, 21 nt, Human
cauuaaagccugaguuugcuu

SEQ ID NO: 1667609 - RNA, 15 nt, Human
cauguuuuguuuacg

SEQ ID NO: 1667610 - RNA, 18 nt, Human
cauguuuuucuucucccu

SEQ ID NO: 1667611 - RNA, 19 nt, Human
caugccagcuuaucucagg

SEQ ID NO: 1667612 - RNA, 20 nt, Human
caugccagcuuaucucaggg

SEQ ID NO: 1667613 - RNA, 13 nt, Human
caugccccugaac

SEQ ID NO: 1667614 - RNA, 14 nt, Human
caugccucucucag

SEQ ID NO: 1667615 - RNA, 15 nt, Human
caugccucucucagg

SEQ ID NO: 1667616 - RNA, 16 nt, Human
caugccucucucaggc

SEQ ID NO: 1667617 - RNA, 17 nt, Human
caugccucucucaggcc

SEQ ID NO: 1667618 - RNA, 18 nt, Human
caugccucucucaggcca

SEQ ID NO: 1667619 - RNA, 19 nt, Human
caugccucucucaggccaa

SEQ ID NO: 1667620 - RNA, 13 nt, Human
caugccuggaugg

SEQ ID NO: 1667621 - RNA, 16 nt, Human
cauggaauaacaugua

SEQ ID NO: 1667622 - RNA, 18 nt, Human
cauggacaugaucuucuu

SEQ ID NO: 1667623 - RNA, 18 nt, Human
cauggaacgcguugaaau

SEQ ID NO: 1667624 - RNA, 19 nt, Human
cauggaacgcguugaaauu

SEQ ID NO: 1667625 - RNA, 20 nt, Human
cauggaacgcguugaaauug

SEQ ID NO: 1667626 - RNA, 23 nt, Human
cauggaacgcguugaaauuguaa

SEQ ID NO: 1667627 - RNA, 20 nt, Human
cauggaaguacuauaauuua

SEQ ID NO: 1667628 - RNA, 22 nt, Human
cauggaaguacuauaauuuacc

SEQ ID NO: 1667629 - RNA, 18 nt, Human
caugccuggauggggcug

SEQ ID NO: 1667630 - RNA, 21 nt, Human
caugccuggauggggcugcac

SEQ ID NO: 1667631 - RNA, 23 nt, Human
caugccuggauggggcugcaccg

SEQ ID NO: 1667632 - RNA, 20 nt, Human
caugcuguucaugaaagauu

SEQ ID NO: 1667633 - RNA, 22 nt, Human
caugcugucccuuacgugaguc

SEQ ID NO: 1667634 - RNA, 23 nt, Human
caugcugucuacacuaagagaga

SEQ ID NO: 1667635 - RNA, 16 nt, Human
cauggaguauauguca

SEQ ID NO: 1667636 - RNA, 18 nt, Human
caugggaaugaaugucag

SEQ ID NO: 1667637 - RNA, 11 nt, Human
cauggacuuug

SEQ ID NO: 1667638 - RNA, 13 nt, Human
cauggacuuuguu

SEQ ID NO: 1667639 - RNA, 17 nt, Human
cauggagguuugaagau

SEQ ID NO: 1667640 - RNA, 16 nt, Human
caugggccuccugugu

SEQ ID NO: 1667641 - RNA, 17 nt, Human
caugggccuccugugug

SEQ ID NO: 1667642 - RNA, 15 nt, Human
caugggccuccugug

SEQ ID NO: 1667643 - RNA, 22 nt, Human
caugggaaugaaugucagugug

SEQ ID NO: 1667644 - RNA, 17 nt, Human
caugggacagggaggac

SEQ ID NO: 1667645 - RNA, 22 nt, Human
caguguuguggauuuaacagaa

SEQ ID NO: 1667646 - RNA, 20 nt, Human
caguguuguggauuuaacag

SEQ ID NO: 1667647 - RNA, 19 nt, Human
caguguuguggauuuaaca

SEQ ID NO: 1667648 - RNA, 20 nt, Human
caguuaagccuuuggaaaca

SEQ ID NO: 1667649 - RNA, 14 nt, Human
caguuaagccuuug

SEQ ID NO: 1667650 - RNA, 15 nt, Human
caguuaagccuuugg

SEQ ID NO: 1667651 - RNA, 17 nt, Human
caguuaagccuuuggaa

SEQ ID NO: 1667652 - RNA, 13 nt, Human
caguuaagagaaa

SEQ ID NO: 1667653 - RNA, 14 nt, Human
caguuaagagaaau

SEQ ID NO: 1667654 - RNA, 14 nt, Human
caguuacucagaau

SEQ ID NO: 1667655 - RNA, 21 nt, Human
caguuaccucugccucagaaa

SEQ ID NO: 1667656 - RNA, 12 nt, Human
caguugaaaaac

SEQ ID NO: 1667657 - RNA, 18 nt, Human
caguugaaaaacagcuga

SEQ ID NO: 1667658 - RNA, 19 nt, Human
caguugaaaaacagcugag

SEQ ID NO: 1667659 - RNA, 15 nt, Human
caguucugaagaaga

SEQ ID NO: 1667660 - RNA, 16 nt, Human
caguucugaagaagau

SEQ ID NO: 1667661 - RNA, 22 nt, Human
caguucugaagaagaugguacc

SEQ ID NO: 1667662 - RNA, 13 nt, Human
caguucugaagaa

SEQ ID NO: 1667663 - RNA, 14 nt, Human
caguucugaagaag

SEQ ID NO: 1667664 - RNA, 22 nt, Human
caguucucuccuucuucccccc

SEQ ID NO: 1667665 - RNA, 12 nt, Human
caguucugaaga

SEQ ID NO: 1667666 - RNA, 13 nt, Human
caguucucuccuu

SEQ ID NO: 1667667 - RNA, 14 nt, Human
caguucucuccuuc

SEQ ID NO: 1667668 - RNA, 15 nt, Human
caguucucuccuucu

SEQ ID NO: 1667669 - RNA, 22 nt, Human
caguucggugagcuacaaaugc

SEQ ID NO: 1667670 - RNA, 12 nt, Human
caguggcagcug

SEQ ID NO: 1667671 - RNA, 13 nt, Human
caguggcagcugc

SEQ ID NO: 1667672 - RNA, 14 nt, Human
caguggcagcugcu

SEQ ID NO: 1667673 - RNA, 15 nt, Human
caguggcagcugcuu

SEQ ID NO: 1667674 - RNA, 16 nt, Human
caguggcagcugcuuu

SEQ ID NO: 1667675 - RNA, 11 nt, Human
cagugggaacu

SEQ ID NO: 1667676 - RNA, 16 nt, Human
cagugggacagggcau

SEQ ID NO: 1667677 - RNA, 22 nt, Human
cagugguuccuaauccucuagg

SEQ ID NO: 1667678 - RNA, 16 nt, Human
caguguacauggaaua

SEQ ID NO: 1667679 - RNA, 20 nt, Human
caguguacauggaauaacau

SEQ ID NO: 1667680 - RNA, 23 nt, Human
caguguacauggaauaacaugua

SEQ ID NO: 1667681 - RNA, 14 nt, Human
cagugucaaugcag

SEQ ID NO: 1667682 - RNA, 14 nt, Human
cagugugacaagga

SEQ ID NO: 1667683 - RNA, 12 nt, Human
cagugugacuga

SEQ ID NO: 1667684 - RNA, 20 nt, Human
cauacuaauuauacccccug

SEQ ID NO: 1667685 - RNA, 21 nt, Human
cauacuaaccagcagaaaugc

SEQ ID NO: 1667686 - RNA, 14 nt, Human
cauacuaaccagca

SEQ ID NO: 1667687 - RNA, 18 nt, Human
cauacguacacauuuuau

SEQ ID NO: 1667688 - RNA, 17 nt, Human
cauacguacacauuuua

SEQ ID NO: 1667689 - RNA, 16 nt, Human
cauacguacacauuuu

SEQ ID NO: 1667690 - RNA, 15 nt, Human
cauacguacacauuu

SEQ ID NO: 1667691 - RNA, 13 nt, Human
cauacguacacau

SEQ ID NO: 1667692 - RNA, 14 nt, Human
cauacccaccccca

SEQ ID NO: 1667693 - RNA, 17 nt, Human
cauacccacccccaccc

SEQ ID NO: 1667694 - RNA, 18 nt, Human
cauacccacccccaccca

SEQ ID NO: 1667695 - RNA, 21 nt, Human
cauacccacccccacccaagg

SEQ ID NO: 1667696 - RNA, 15 nt, Human
cauaccuacauguau

SEQ ID NO: 1667697 - RNA, 23 nt, Human
caguugaaaagacuccaaagaaa

SEQ ID NO: 1667698 - RNA, 20 nt, Human
caguugagaaaauuugaaug

SEQ ID NO: 1667699 - RNA, 21 nt, Human
caguugaaaagacuccaaaga

SEQ ID NO: 1667700 - RNA, 22 nt, Human
caguugaaaagacuccaaagaa

SEQ ID NO: 1667701 - RNA, 18 nt, Human
caguugaaaagacuccaa

SEQ ID NO: 1667702 - RNA, 14 nt, Human
caguugaaaagacu

SEQ ID NO: 1667703 - RNA, 16 nt, Human
caguuggguggaugcc

SEQ ID NO: 1667704 - RNA, 23 nt, Human
caguugccagucaccccggccac

SEQ ID NO: 1667705 - RNA, 18 nt, Human
caguuggguggaugccug

SEQ ID NO: 1667706 - RNA, 19 nt, Human
caguuggguggaugccugg

SEQ ID NO: 1667707 - RNA, 18 nt, Human
caguuggucccccuucca

SEQ ID NO: 1667708 - RNA, 19 nt, Human
caguuggucccccuuccau

SEQ ID NO: 1667709 - RNA, 20 nt, Human
caguuggucccccuuccaug

SEQ ID NO: 1667710 - RNA, 21 nt, Human
caguuggucccccuuccaugg

SEQ ID NO: 1667711 - RNA, 22 nt, Human
caguuggucccccuuccaugga

SEQ ID NO: 1667712 - RNA, 17 nt, Human
caguuguuagugugucu

SEQ ID NO: 1667713 - RNA, 14 nt, Human
caguuuucugagaa

SEQ ID NO: 1667714 - RNA, 15 nt, Human
caguuuucugagaaa

SEQ ID NO: 1667715 - RNA, 21 nt, Human
caguuuuguuuggaccaaaaa

SEQ ID NO: 1667716 - RNA, 18 nt, Human
caguuuugguugcuuuaa

SEQ ID NO: 1667717 - RNA, 19 nt, Human
caguuuugguugcuuuaau

SEQ ID NO: 1667718 - RNA, 18 nt, Human
caguuguuagugugucuu

SEQ ID NO: 1667719 - RNA, 17 nt, Human
caguuuugguugcuuua

SEQ ID NO: 1667720 - RNA, 19 nt, Human
caguuuucugagaaagacu

SEQ ID NO: 1667721 - RNA, 20 nt, Human
caguuuucugagaaagacua

SEQ ID NO: 1667722 - RNA, 16 nt, Human
cauaaaucugugaacu

SEQ ID NO: 1667723 - RNA, 18 nt, Human
cauaaaucugugaacuug

SEQ ID NO: 1667724 - RNA, 22 nt, Human
cauaaaucugugaacuugaaau

SEQ ID NO: 1667725 - RNA, 23 nt, Human
cauaaaucugugaacuugaaauu

SEQ ID NO: 1667726 - RNA, 14 nt, Human
cauaaaucugugaa

SEQ ID NO: 1667727 - RNA, 12 nt, Human
cauaacauaaau

SEQ ID NO: 1667728 - RNA, 19 nt, Human
cauaacauaaaucugugaa

SEQ ID NO: 1667729 - RNA, 19 nt, Human
cauaaauuuaguauuuugu

SEQ ID NO: 1667730 - RNA, 20 nt, Human
cauaaauuuaguauuuuguu

SEQ ID NO: 1667731 - RNA, 21 nt, Human
cauaacauaaaucugugaacu

SEQ ID NO: 1667732 - RNA, 16 nt, Human
cauaaccuagccuuag

SEQ ID NO: 1667733 - RNA, 14 nt, Human
cauaaagcaggcag

SEQ ID NO: 1667734 - RNA, 16 nt, Human
cauaaagcaggcagaa

SEQ ID NO: 1667735 - RNA, 21 nt, Human
cauaaacaagaccacguuucu

SEQ ID NO: 1667736 - RNA, 20 nt, Human
cauaaacaagaccacguuuc

SEQ ID NO: 1667737 - RNA, 22 nt, Human
cauaaacaagaccacguuucua

SEQ ID NO: 1667738 - RNA, 21 nt, Human
cauaaaaauuagccaagugug

SEQ ID NO: 1667739 - RNA, 14 nt, Human
cauaagauaaaugu

SEQ ID NO: 1667740 - RNA, 17 nt, Human
cauaaggaaacuggguu

SEQ ID NO: 1667741 - RNA, 19 nt, Human
cauaccacuuuuguucuug

SEQ ID NO: 1667742 - RNA, 11 nt, Human
cauacccaccc

SEQ ID NO: 1667743 - RNA, 12 nt, Human
cauacccacccc

SEQ ID NO: 1667744 - RNA, 18 nt, Human
cauaccacuuuuguucuu

SEQ ID NO: 1667745 - RNA, 15 nt, Human
cauaccacuuuuguu

SEQ ID NO: 1667746 - RNA, 14 nt, Human
cauaccacuuuugu

SEQ ID NO: 1667747 - RNA, 13 nt, Human
cauaccacuuuug

SEQ ID NO: 1667748 - RNA, 15 nt, Human
cauaauacuugcuuu

SEQ ID NO: 1667749 - RNA, 17 nt, Human
cauaccaacacgagcag

SEQ ID NO: 1667750 - RNA, 19 nt, Human
cauaaucuggacuccucug

SEQ ID NO: 1667751 - RNA, 16 nt, Human
caucucuuguuuaaau

SEQ ID NO: 1667752 - RNA, 22 nt, Human
caucuuccaaggguacuaagga

SEQ ID NO: 1667753 - RNA, 14 nt, Human
caucuccacuccag

SEQ ID NO: 1667754 - RNA, 22 nt, Human
caucucuucuggguuccuuccu

SEQ ID NO: 1667755 - RNA, 13 nt, Human
caucuugcucugc

SEQ ID NO: 1667756 - RNA, 15 nt, Human
caucuugcucugcug

SEQ ID NO: 1667757 - RNA, 14 nt, Human
caucuugcucugcu

SEQ ID NO: 1667758 - RNA, 20 nt, Human
caucuugcucugcugacaga

SEQ ID NO: 1667759 - RNA, 16 nt, Human
cauccuacaagacaca

SEQ ID NO: 1667760 - RNA, 15 nt, Human
cauccucauacccac

SEQ ID NO: 1667761 - RNA, 16 nt, Human
cauccucauacccacc

SEQ ID NO: 1667762 - RNA, 13 nt, Human
cauccucccaagg

SEQ ID NO: 1667763 - RNA, 17 nt, Human
cauccucauacccaccc

SEQ ID NO: 1667764 - RNA, 18 nt, Human
cauccucauacccacccc

SEQ ID NO: 1667765 - RNA, 21 nt, Human
cauccucauacccacccccac

SEQ ID NO: 1667766 - RNA, 22 nt, Human
cauccucauacccacccccacc

SEQ ID NO: 1667767 - RNA, 20 nt, Human
cauccuccgccucccggguu

SEQ ID NO: 1667768 - RNA, 11 nt, Human
cauccuccuca

SEQ ID NO: 1667769 - RNA, 12 nt, Human
cauccuccucag

SEQ ID NO: 1667770 - RNA, 15 nt, Human
cauccuccucagauc

SEQ ID NO: 1667771 - RNA, 16 nt, Human
cauccuccucagaucu

SEQ ID NO: 1667772 - RNA, 18 nt, Human
cauccuccucagaucuuc

SEQ ID NO: 1667773 - RNA, 19 nt, Human
cauccuccucagaucuucu

SEQ ID NO: 1667774 - RNA, 21 nt, Human
cauccucuguacagagcccac

SEQ ID NO: 1667775 - RNA, 19 nt, Human
cauccucuguacagagccc

SEQ ID NO: 1667776 - RNA, 15 nt, Human
cauccucuguacaga

SEQ ID NO: 1667777 - RNA, 18 nt, Human
cauccucuguacagagcc

SEQ ID NO: 1667778 - RNA, 12 nt, Human
caucuaggauuu

SEQ ID NO: 1667779 - RNA, 15 nt, Human
caucuacccuccgau

SEQ ID NO: 1667780 - RNA, 17 nt, Human
caucuagguaaauuaca

SEQ ID NO: 1667781 - RNA, 18 nt, Human
caucuagguaaauuacag

SEQ ID NO: 1667782 - RNA, 14 nt, Human
caucuagugagcag

SEQ ID NO: 1667783 - RNA, 13 nt, Human
caucucagcccac

SEQ ID NO: 1667784 - RNA, 16 nt, Human
caucucaccuccugcu

SEQ ID NO: 1667785 - RNA, 17 nt, Human
caucucaccuccugcug

SEQ ID NO: 1667786 - RNA, 18 nt, Human
caucucaccuccugcugg

SEQ ID NO: 1667787 - RNA, 20 nt, Human
caucucacacaugagcauca

SEQ ID NO: 1667788 - RNA, 16 nt, Human
caucucacacaugagc

SEQ ID NO: 1667789 - RNA, 17 nt, Human
caucucacacaugagca

SEQ ID NO: 1667790 - RNA, 22 nt, Human
caucuagugagcagucaggaaa

SEQ ID NO: 1667791 - RNA, 21 nt, Human
cauccuaacuccaugucucug

SEQ ID NO: 1667792 - RNA, 14 nt, Human
cauccuaacuccau

SEQ ID NO: 1667793 - RNA, 22 nt, Human
caucccugaaggccccgcccag

SEQ ID NO: 1667794 - RNA, 17 nt, Human
caucccugaaggccccg

SEQ ID NO: 1667795 - RNA, 18 nt, Human
caucccugaaggccccgc

SEQ ID NO: 1667796 - RNA, 19 nt, Human
caucccugaaggccccgcc

SEQ ID NO: 1667797 - RNA, 21 nt, Human
caucccugaaggccccgccca

SEQ ID NO: 1667798 - RNA, 17 nt, Human
cauccuacaagacacag

SEQ ID NO: 1667799 - RNA, 13 nt, Human
caucauugaaauc

SEQ ID NO: 1667800 - RNA, 15 nt, Human
caucaccaacgucug

SEQ ID NO: 1667801 - RNA, 13 nt, Human
caucacaguuuug

SEQ ID NO: 1667802 - RNA, 21 nt, Human
caucacaguuuugguugcuuu

SEQ ID NO: 1667803 - RNA, 22 nt, Human
caucacaguuuugguugcuuua

SEQ ID NO: 1667804 - RNA, 14 nt, Human
caucauugaaaucu

SEQ ID NO: 1667805 - RNA, 15 nt, Human
caucauugaaaucuu

SEQ ID NO: 1667806 - RNA, 20 nt, Human
caucauugaaaucuuuuugc

SEQ ID NO: 1667807 - RNA, 21 nt, Human
caucauugaaaucuuuuugcu

SEQ ID NO: 1667808 - RNA, 15 nt, Human
cauccagguucagcu

SEQ ID NO: 1667809 - RNA, 17 nt, Human
cauccagguucagcuug

SEQ ID NO: 1667810 - RNA, 13 nt, Human
caucccucccucc

SEQ ID NO: 1667811 - RNA, 12 nt, Human
caucccucccuc

SEQ ID NO: 1667812 - RNA, 11 nt, Human
caucccugaag

SEQ ID NO: 1667813 - RNA, 13 nt, Human
caucccugaaggc

SEQ ID NO: 1667814 - RNA, 19 nt, Human
caucccucuggggcuguuc

SEQ ID NO: 1667815 - RNA, 14 nt, Human
caucccucccucca

SEQ ID NO: 1667816 - RNA, 15 nt, Human
cauaugauguacaug

SEQ ID NO: 1667817 - RNA, 17 nt, Human
cauaugauguacaugua

SEQ ID NO: 1667818 - RNA, 21 nt, Human
cauaugauguacauguacuga

SEQ ID NO: 1667819 - RNA, 23 nt, Human
cauauauauguuuuaagaggcag

SEQ ID NO: 1667820 - RNA, 22 nt, Human
cauauauauguuuuaagaggca

SEQ ID NO: 1667821 - RNA, 22 nt, Human
cauaguggcuuaaaacaacacu

SEQ ID NO: 1667822 - RNA, 20 nt, Human
cauaguaugguggcuggguu

SEQ ID NO: 1667823 - RNA, 22 nt, Human
cauagugaugguuccccuguuc

SEQ ID NO: 1667824 - RNA, 18 nt, Human
cauaguaugguggcuggg

SEQ ID NO: 1667825 - RNA, 19 nt, Human
cauaguaugguggcugggu

SEQ ID NO: 1667826 - RNA, 14 nt, Human
cauagagcagcacu

SEQ ID NO: 1667827 - RNA, 11 nt, Human
cauacucugcu

SEQ ID NO: 1667828 - RNA, 16 nt, Human
cauacucccaucugug

SEQ ID NO: 1667829 - RNA, 15 nt, Human
cauacucccaucugu

SEQ ID NO: 1667830 - RNA, 18 nt, Human
cauacucccaucugugaa

SEQ ID NO: 1667831 - RNA, 20 nt, Human
cauacucccaucugugaaag

SEQ ID NO: 1667832 - RNA, 14 nt, Human
cauagaauaaaauu

SEQ ID NO: 1667833 - RNA, 20 nt, Human
cauagaauaaaauuuuuaau

SEQ ID NO: 1667834 - RNA, 23 nt, Human
cauagagagcaagacgcugugcu

SEQ ID NO: 1667835 - RNA, 19 nt, Human
cauagagagcaagacgcug

SEQ ID NO: 1667836 - RNA, 21 nt, Human
cauagagagcaagacgcugug

SEQ ID NO: 1667837 - RNA, 17 nt, Human
cauauuuauaaaaauaa

SEQ ID NO: 1667838 - RNA, 13 nt, Human
cauauuuuagcua

SEQ ID NO: 1667839 - RNA, 12 nt, Human
cauauuuauaaa

SEQ ID NO: 1667840 - RNA, 20 nt, Human
cauauuuacuucuuauacau

SEQ ID NO: 1667841 - RNA, 16 nt, Human
cauauuuacuucuuau

SEQ ID NO: 1667842 - RNA, 17 nt, Human
cauauuuacuucuuaua

SEQ ID NO: 1667843 - RNA, 13 nt, Human
cauaugccugggc

SEQ ID NO: 1667844 - RNA, 14 nt, Human
cauauuuacuucuu

SEQ ID NO: 1667845 - RNA, 14 nt, Human
caucaagaugugac

SEQ ID NO: 1667846 - RNA, 22 nt, Human
caucaagucuuucacauuuaaa

SEQ ID NO: 1667847 - RNA, 18 nt, Human
caucaaugaaugaaugaa

SEQ ID NO: 1667848 - RNA, 12 nt, Human
cauauuuucaug

SEQ ID NO: 1667849 - RNA, 17 nt, Human
cugaucucucgugauug

SEQ ID NO: 1667850 - RNA, 18 nt, Human
cugaucucucgugauuga

SEQ ID NO: 1667851 - RNA, 19 nt, Human
cugacccugcuucaaauau

SEQ ID NO: 1667852 - RNA, 23 nt, Human
cugacccugcuucaaauauuucc

SEQ ID NO: 1667853 - RNA, 12 nt, Human
cugagcugggau

SEQ ID NO: 1667854 - RNA, 22 nt, Human
cugagcugggaugauuggaggg

SEQ ID NO: 1667855 - RNA, 22 nt, Human
cugagcuugcagagaugaggcc

SEQ ID NO: 1667856 - RNA, 14 nt, Human
cugaggaauccaga

SEQ ID NO: 1667857 - RNA, 13 nt, Human
cugaggugggagg

SEQ ID NO: 1667858 - RNA, 22 nt, Human
cugaggugggaggaucucuuga

SEQ ID NO: 1667859 - RNA, 14 nt, Human
cugaggggccucuu

SEQ ID NO: 1667860 - RNA, 18 nt, Human
cugaggaauucuguauag

SEQ ID NO: 1667861 - RNA, 19 nt, Human
cugaggaauucuguauaga

SEQ ID NO: 1667862 - RNA, 15 nt, Human
cugaggaauucugua

SEQ ID NO: 1667863 - RNA, 16 nt, Human
cugaggaauucuguau

SEQ ID NO: 1667864 - RNA, 23 nt, Human
cugaggaauccagacccggcugc

SEQ ID NO: 1667865 - RNA, 14 nt, Human
cugaaaauguaugu

SEQ ID NO: 1667866 - RNA, 13 nt, Human
cugacacacagcu

SEQ ID NO: 1667867 - RNA, 15 nt, Human
cugacacacagcucu

SEQ ID NO: 1667868 - RNA, 16 nt, Human
cugacacacagcucug

SEQ ID NO: 1667869 - RNA, 17 nt, Human
cugacacacagcucugu

SEQ ID NO: 1667870 - RNA, 18 nt, Human
cugacacacagcucuguc

SEQ ID NO: 1667871 - RNA, 19 nt, Human
cugacacacagcucugucc

SEQ ID NO: 1667872 - RNA, 20 nt, Human
cugacacacagcucuguccu

SEQ ID NO: 1667873 - RNA, 21 nt, Human
cugacacacagcucuguccug

SEQ ID NO: 1667874 - RNA, 22 nt, Human
cugacacacagcucuguccugg

SEQ ID NO: 1667875 - RNA, 23 nt, Human
cugacacacagcucuguccuggg

SEQ ID NO: 1667876 - RNA, 20 nt, Human
cugaccccucauagcccuca

SEQ ID NO: 1667877 - RNA, 21 nt, Human
cugaccccucauagcccucac

SEQ ID NO: 1667878 - RNA, 17 nt, Human
cugaccccucauagccc

SEQ ID NO: 1667879 - RNA, 17 nt, Human
cucugcacaagcugcac

SEQ ID NO: 1667880 - RNA, 18 nt, Human
cucugcacaagcugcacc

SEQ ID NO: 1667881 - RNA, 19 nt, Human
cucugcacaagcugcaccc

SEQ ID NO: 1667882 - RNA, 22 nt, Human
cucuugauucauaaugacuuaa

SEQ ID NO: 1667883 - RNA, 15 nt, Human
cucuugagccuggga

SEQ ID NO: 1667884 - RNA, 16 nt, Human
cucuugagccugggag

SEQ ID NO: 1667885 - RNA, 14 nt, Human
cucuugagccuggg

SEQ ID NO: 1667886 - RNA, 24 nt, Human
cucuugauucauaaugacuuaagc

SEQ ID NO: 1667887 - RNA, 22 nt, Human
cucuugccacugccucuuccuc

SEQ ID NO: 1667888 - RNA, 13 nt, Human
cugaaagaggaau

SEQ ID NO: 1667889 - RNA, 17 nt, Human
cugaaagaggaaugaag

SEQ ID NO: 1667890 - RNA, 13 nt, Human
cuccuuucucuuu

SEQ ID NO: 1667891 - RNA, 22 nt, Human
cuccuuuagcgcccaguugggu

SEQ ID NO: 1667892 - RNA, 22 nt, Human
cuccuagccugugccucuggga

SEQ ID NO: 1667893 - RNA, 16 nt, Human
cuccuuuagcgcccag

SEQ ID NO: 1667894 - RNA, 17 nt, Human
cuccuuuagcgcccagu

SEQ ID NO: 1667895 - RNA, 13 nt, Human
cucgaacuccuga

SEQ ID NO: 1667896 - RNA, 24 nt, Human
cuccuuuucacaguucucuccuuc

SEQ ID NO: 1667897 - RNA, 16 nt, Human
cucgaacuccugaccu

SEQ ID NO: 1667898 - RNA, 17 nt, Human
cucgaacuccugaccuu

SEQ ID NO: 1667899 - RNA, 20 nt, Human
cucguauaugucucaggucc

SEQ ID NO: 1667900 - RNA, 18 nt, Human
cucguauaugucucaggu

SEQ ID NO: 1667901 - RNA, 11 nt, Human
cucggugccuu

SEQ ID NO: 1667902 - RNA, 16 nt, Human
cucugcacaagcugca

SEQ ID NO: 1667903 - RNA, 13 nt, Human
cucucccuuggau

SEQ ID NO: 1667904 - RNA, 21 nt, Human
cucuccgaccagacaccuuga

SEQ ID NO: 1667905 - RNA, 16 nt, Human
cucuccgaccagacac

SEQ ID NO: 1667906 - RNA, 13 nt, Human
cucuccuccuuuu

SEQ ID NO: 1667907 - RNA, 20 nt, Human
cucuccuccuuuucacaguu

SEQ ID NO: 1667908 - RNA, 19 nt, Human
cucucuggccuucggccuc

SEQ ID NO: 1667909 - RNA, 22 nt, Human
cucucuggccuucggccuccau

SEQ ID NO: 1667910 - RNA, 10 nt, Human
cucuccucug

SEQ ID NO: 1667911 - RNA, 17 nt, Human
cucucuggccuucggcc

SEQ ID NO: 1667912 - RNA, 14 nt, Human
cucccaccucagcc

SEQ ID NO: 1667913 - RNA, 16 nt, Human
cucccaccucagccuc

SEQ ID NO: 1667914 - RNA, 17 nt, Human
cucccaccucagccucc

SEQ ID NO: 1667915 - RNA, 18 nt, Human
cuccaggugcacaagcuc

SEQ ID NO: 1667916 - RNA, 19 nt, Human
cuccaggugcacaagcucc

SEQ ID NO: 1667917 - RNA, 20 nt, Human
cuccaggugcacaagcucca

SEQ ID NO: 1667918 - RNA, 22 nt, Human
cuccaggugcacaagcuccaag

SEQ ID NO: 1667919 - RNA, 23 nt, Human
cuccaggcuguaucccaugagcc

SEQ ID NO: 1667920 - RNA, 16 nt, Human
cuccagacacaugucc

SEQ ID NO: 1667921 - RNA, 22 nt, Human
cuccagaauuucccaaagcagu

SEQ ID NO: 1667922 - RNA, 11 nt, Human
cuccagacaca

SEQ ID NO: 1667923 - RNA, 16 nt, Human
cucagaaucucaaaua

SEQ ID NO: 1667924 - RNA, 17 nt, Human
cucagaaucucaaauaa

SEQ ID NO: 1667925 - RNA, 14 nt, Human
cuccgucaacucau

SEQ ID NO: 1667926 - RNA, 23 nt, Human
cuccgcuuucuacccagcgagcc

SEQ ID NO: 1667927 - RNA, 22 nt, Human
cuccgcuuucuacccagcgagc

SEQ ID NO: 1667928 - RNA, 21 nt, Human
cuccgcuuucuacccagcgag

SEQ ID NO: 1667929 - RNA, 20 nt, Human
cuccgcuuucuacccagcga

SEQ ID NO: 1667930 - RNA, 19 nt, Human
cucccucuuucccucccuu

SEQ ID NO: 1667931 - RNA, 15 nt, Human
cucccucuuucccuc

SEQ ID NO: 1667932 - RNA, 16 nt, Human
cucccucccucuuucc

SEQ ID NO: 1667933 - RNA, 19 nt, Human
cuccccaugauguuuagaa

SEQ ID NO: 1667934 - RNA, 18 nt, Human
cgauacaccgggccugga

SEQ ID NO: 1667935 - RNA, 20 nt, Human
cgauacaccgggccuggaga

SEQ ID NO: 1667936 - RNA, 21 nt, Human
cgauacaccgggccuggagaa

SEQ ID NO: 1667937 - RNA, 19 nt, Human
cgaguagcugagauuauag

SEQ ID NO: 1667938 - RNA, 13 nt, Human
cgaguagcuggga

SEQ ID NO: 1667939 - RNA, 17 nt, Human
cgcuggggccaguuggu

SEQ ID NO: 1667940 - RNA, 20 nt, Human
cgcuggggccaguugguccc

SEQ ID NO: 1667941 - RNA, 16 nt, Human
cgccuuaaggauguuc

SEQ ID NO: 1667942 - RNA, 18 nt, Human
cgcugccccuggcagccc

SEQ ID NO: 1667943 - RNA, 19 nt, Human
cgcuggaccuugaacuggg

SEQ ID NO: 1667944 - RNA, 23 nt, Human
cgcuggaccuugaacuggguacu

SEQ ID NO: 1667945 - RNA, 16 nt, Human
cgcugccccuggcagc

SEQ ID NO: 1667946 - RNA, 17 nt, Human
cgcugccccuggcagcc

SEQ ID NO: 1667947 - RNA, 13 nt, Human
cgcugccccuggc

SEQ ID NO: 1667948 - RNA, 16 nt, Human
cguacacauuuuauuu

SEQ ID NO: 1667949 - RNA, 13 nt, Human
cguacacauuuua

SEQ ID NO: 1667950 - RNA, 13 nt, Human
cgguguggagaag

SEQ ID NO: 1667951 - RNA, 15 nt, Human
cgguuuauauaagcu

SEQ ID NO: 1667952 - RNA, 15 nt, Human
cggagacggaguccc

SEQ ID NO: 1667953 - RNA, 23 nt, Human
cggagaagagcuguucacagcca

SEQ ID NO: 1667954 - RNA, 24 nt, Human
cggagaagagcuguucacagccag

SEQ ID NO: 1667955 - RNA, 15 nt, Human
cgguggugaggcagu

SEQ ID NO: 1667956 - RNA, 15 nt, Human
cuaaagcugccagcc

SEQ ID NO: 1667957 - RNA, 16 nt, Human
cuaaaggcuaccuuug

SEQ ID NO: 1667958 - RNA, 15 nt, Human
cuaaaggcuaccuuu

SEQ ID NO: 1667959 - RNA, 21 nt, Human
cuaaagaagguuucagaaaga

SEQ ID NO: 1667960 - RNA, 14 nt, Human
cuaaagcugccagc

SEQ ID NO: 1667961 - RNA, 19 nt, Human
cuaaaggcuaccuuuguau

SEQ ID NO: 1667962 - RNA, 17 nt, Human
cuaaaggcuaccuuugu

SEQ ID NO: 1667963 - RNA, 22 nt, Human
cuaaaguguauuuuuuuacuaa

SEQ ID NO: 1667964 - RNA, 14 nt, Human
cguuaccaggcagg

SEQ ID NO: 1667965 - RNA, 16 nt, Human
cuaaacuuuucugaua

SEQ ID NO: 1667966 - RNA, 13 nt, Human
cguuaaaauacca

SEQ ID NO: 1667967 - RNA, 22 nt, Human
cguguccccuauccuacuuccc

SEQ ID NO: 1667968 - RNA, 14 nt, Human
cuaacuggacuggu

SEQ ID NO: 1667969 - RNA, 20 nt, Human
cuacuagggaaaugccuuug

SEQ ID NO: 1667970 - RNA, 14 nt, Human
cuacuauauaugug

SEQ ID NO: 1667971 - RNA, 18 nt, Human
cuaccuuccaguuccuca

SEQ ID NO: 1667972 - RNA, 16 nt, Human
cuaccugaggggccuc

SEQ ID NO: 1667973 - RNA, 19 nt, Human
cuaccugaggggccucuua

SEQ ID NO: 1667974 - RNA, 23 nt, Human
cuaccugaggggccucuuauggg

SEQ ID NO: 1667975 - RNA, 14 nt, Human
cuagggaagauaau

SEQ ID NO: 1667976 - RNA, 13 nt, Human
cuaggguccuggg

SEQ ID NO: 1667977 - RNA, 14 nt, Human
cuaggguccugggg

SEQ ID NO: 1667978 - RNA, 15 nt, Human
cuaggguccugggga

SEQ ID NO: 1667979 - RNA, 19 nt, Human
cuaguuugauuaaauucuu

SEQ ID NO: 1667980 - RNA, 17 nt, Human
cuaguuugauuaaauuc

SEQ ID NO: 1667981 - RNA, 21 nt, Human
cuaguuugauuaaauucuugc

SEQ ID NO: 1667982 - RNA, 20 nt, Human
cuaguuugauuaaauucuug

SEQ ID NO: 1667983 - RNA, 12 nt, Human
cuaggccugggg

SEQ ID NO: 1667984 - RNA, 13 nt, Human
cuaggccugggga

SEQ ID NO: 1667985 - RNA, 14 nt, Human
cuaggccuggccag

SEQ ID NO: 1667986 - RNA, 15 nt, Human
cuaggccuggccaga

SEQ ID NO: 1667987 - RNA, 18 nt, Human
cuaggccuggccagaugc

SEQ ID NO: 1667988 - RNA, 19 nt, Human
cuaggccuggccagaugca

SEQ ID NO: 1667989 - RNA, 19 nt, Human
cuagccagaggagagagga

SEQ ID NO: 1667990 - RNA, 17 nt, Human
cuagccagaggagagag

SEQ ID NO: 1667991 - RNA, 13 nt, Human
cuaggccuggcca

SEQ ID NO: 1667992 - RNA, 21 nt, Human
cuagacccacuggacucaccu

SEQ ID NO: 1667993 - RNA, 20 nt, Human
cuagcauacguacacauuuu

SEQ ID NO: 1667994 - RNA, 19 nt, Human
cuagcauacguacacauuu

SEQ ID NO: 1667995 - RNA, 18 nt, Human
cuagcauacguacacauu

SEQ ID NO: 1667996 - RNA, 16 nt, Human
cuagcauacguacaca

SEQ ID NO: 1667997 - RNA, 14 nt, Human
cucacaaaggaugc

SEQ ID NO: 1667998 - RNA, 12 nt, Human
cucaaauaacua

SEQ ID NO: 1667999 - RNA, 14 nt, Human
cucacacaugagca

SEQ ID NO: 1668000 - RNA, 21 nt, Human
cucacacaugagcaucaggcc

SEQ ID NO: 1668001 - RNA, 18 nt, Human
cucaaaaaaagaaaaaga

SEQ ID NO: 1668002 - RNA, 16 nt, Human
cuauguugcccaggca

SEQ ID NO: 1668003 - RNA, 17 nt, Human
cuauguugcccaggcag

SEQ ID NO: 1668004 - RNA, 17 nt, Human
cucaaaacugcacuguc

SEQ ID NO: 1668005 - RNA, 13 nt, Human
cucaaaacugcac

SEQ ID NO: 1668006 - RNA, 19 nt, Human
cuauguaucaaugaguaac

SEQ ID NO: 1668007 - RNA, 20 nt, Human
cuaucucccccagccccauc

SEQ ID NO: 1668008 - RNA, 22 nt, Human
cuauguguagggcgggaggaug

SEQ ID NO: 1668009 - RNA, 15 nt, Human
cuauguugcccaggc

SEQ ID NO: 1668010 - RNA, 23 nt, Human
cuaugucauuugcuggagcucug

SEQ ID NO: 1668011 - RNA, 14 nt, Human
cucacccuggggcu

SEQ ID NO: 1668012 - RNA, 14 nt, Human
cucaccuccugcug

SEQ ID NO: 1668013 - RNA, 13 nt, Human
cucaccugccccu

SEQ ID NO: 1668014 - RNA, 18 nt, Human
cucaccugccccucaacu

SEQ ID NO: 1668015 - RNA, 14 nt, Human
cucaccugccccuc

SEQ ID NO: 1668016 - RNA, 16 nt, Human
cucaccugccccucaa

SEQ ID NO: 1668017 - RNA, 13 nt, Human
cucaccuccugcu

SEQ ID NO: 1668018 - RNA, 16 nt, Human
cucaccucccccaucu

SEQ ID NO: 1668019 - RNA, 13 nt, Human
cucaccucucccu

SEQ ID NO: 1668020 - RNA, 14 nt, Human
cucaccucucccuu

SEQ ID NO: 1668021 - RNA, 15 nt, Human
cucaccucucccuug

SEQ ID NO: 1668022 - RNA, 16 nt, Human
cucaccucucccuugg

SEQ ID NO: 1668023 - RNA, 17 nt, Human
cucaccucucccuugga

SEQ ID NO: 1668024 - RNA, 18 nt, Human
cucacuuguuuuauuuaa

SEQ ID NO: 1668025 - RNA, 19 nt, Human
cucagaaaacaaggaugaa

SEQ ID NO: 1668026 - RNA, 23 nt, Human
cucagaaaacaaggaugaauuaa

SEQ ID NO: 1668027 - RNA, 20 nt, Human
cucagaaggcaaaugacuuu

SEQ ID NO: 1668028 - RNA, 18 nt, Human
ccagucccccugccccag

SEQ ID NO: 1668029 - RNA, 21 nt, Human
ccaggcugcucuugaacuccu

SEQ ID NO: 1668030 - RNA, 23 nt, Human
ccaggcaggucuugaacuccugg

SEQ ID NO: 1668031 - RNA, 12 nt, Human
ccaggcaggucu

SEQ ID NO: 1668032 - RNA, 14 nt, Human
ccaggcaggucuug

SEQ ID NO: 1668033 - RNA, 21 nt, Human
ccaggggaaaaucagccugcu

SEQ ID NO: 1668034 - RNA, 12 nt, Human
ccaggcuggcgu

SEQ ID NO: 1668035 - RNA, 16 nt, Human
ccaggcuggcgugcag

SEQ ID NO: 1668036 - RNA, 23 nt, Human
ccagccccuucugacccaugcug

SEQ ID NO: 1668037 - RNA, 24 nt, Human
ccagccccuucugacccaugcugc

SEQ ID NO: 1668038 - RNA, 12 nt, Human
ccagcagaaaug

SEQ ID NO: 1668039 - RNA, 18 nt, Human
ccagccccauccucugua

SEQ ID NO: 1668040 - RNA, 15 nt, Human
ccagccccauccucu

SEQ ID NO: 1668041 - RNA, 17 nt, Human
ccagccccauccucugu

SEQ ID NO: 1668042 - RNA, 12 nt, Human
ccagcagagcac

SEQ ID NO: 1668043 - RNA, 13 nt, Human
ccagcagagcacc

SEQ ID NO: 1668044 - RNA, 14 nt, Human
ccagcagagcaccu

SEQ ID NO: 1668045 - RNA, 17 nt, Human
ccagccccagugcccac

SEQ ID NO: 1668046 - RNA, 21 nt, Human
ccauuucauuugugccagaau

SEQ ID NO: 1668047 - RNA, 22 nt, Human
ccauuucauuugugccagaaug

SEQ ID NO: 1668048 - RNA, 15 nt, Human
cccaacucaccccag

SEQ ID NO: 1668049 - RNA, 16 nt, Human
cccaacucaccccagc

SEQ ID NO: 1668050 - RNA, 12 nt, Human
cccacccccacc

SEQ ID NO: 1668051 - RNA, 13 nt, Human
cccacucccugca

SEQ ID NO: 1668052 - RNA, 23 nt, Human
cccacugcuuuuggucuguguga

SEQ ID NO: 1668053 - RNA, 13 nt, Human
cccaagcucugcu

SEQ ID NO: 1668054 - RNA, 14 nt, Human
cccaagcucugcuc

SEQ ID NO: 1668055 - RNA, 12 nt, Human
cccaagcucugc

SEQ ID NO: 1668056 - RNA, 15 nt, Human
cccaagcucugcucc

SEQ ID NO: 1668057 - RNA, 17 nt, Human
cccaacucaccccagcc

SEQ ID NO: 1668058 - RNA, 20 nt, Human
cccaacucaccccagcccca

SEQ ID NO: 1668059 - RNA, 20 nt, Human
cccaacuaauuuuuguauuu

SEQ ID NO: 1668060 - RNA, 13 nt, Human
cccaacuccagaa

SEQ ID NO: 1668061 - RNA, 13 nt, Human
ccaguuggucccc

SEQ ID NO: 1668062 - RNA, 18 nt, Human
ccaguuggucccccuucc

SEQ ID NO: 1668063 - RNA, 20 nt, Human
ccaguuggucccccuuccau

SEQ ID NO: 1668064 - RNA, 14 nt, Human
ccauaaucuggacu

SEQ ID NO: 1668065 - RNA, 21 nt, Human
ccauaaucuggacuccucugu

SEQ ID NO: 1668066 - RNA, 18 nt, Human
ccauccagguucagcuug

SEQ ID NO: 1668067 - RNA, 19 nt, Human
ccauccagguucagcuugu

SEQ ID NO: 1668068 - RNA, 20 nt, Human
ccaucccaaacccuucagug

SEQ ID NO: 1668069 - RNA, 19 nt, Human
ccaucccauaugccugggc

SEQ ID NO: 1668070 - RNA, 20 nt, Human
ccaucccauaugccugggca

SEQ ID NO: 1668071 - RNA, 21 nt, Human
ccaucccauaugccugggcag

SEQ ID NO: 1668072 - RNA, 13 nt, Human
ccaucccucccuc

SEQ ID NO: 1668073 - RNA, 15 nt, Human
ccaugucgccucugc

SEQ ID NO: 1668074 - RNA, 16 nt, Human
ccaugucgccucugca

SEQ ID NO: 1668075 - RNA, 17 nt, Human
ccaugucgccucugcau

SEQ ID NO: 1668076 - RNA, 19 nt, Human
ccaugucgccucugcauuc

SEQ ID NO: 1668077 - RNA, 12 nt, Human
ccaugucgccuc

SEQ ID NO: 1668078 - RNA, 18 nt, Human
ccaugaguccccuguuug

SEQ ID NO: 1668079 - RNA, 23 nt, Human
ccaugaggaacaaggcaaggcug

SEQ ID NO: 1668080 - RNA, 20 nt, Human
ccaugaggaacaaggcaagg

SEQ ID NO: 1668081 - RNA, 15 nt, Human
ccaucccucccucca

SEQ ID NO: 1668082 - RNA, 14 nt, Human
ccaucccucccucc

SEQ ID NO: 1668083 - RNA, 20 nt, Human
cccagcuggggccaggcugg

SEQ ID NO: 1668084 - RNA, 16 nt, Human
cccaggaaaggcucca

SEQ ID NO: 1668085 - RNA, 16 nt, Human
cccacuggacucaccu

SEQ ID NO: 1668086 - RNA, 13 nt, Human
cccaggcuggagu

SEQ ID NO: 1668087 - RNA, 18 nt, Human
cccaggcugagccucagu

SEQ ID NO: 1668088 - RNA, 22 nt, Human
cccaggcuuagucacugagaca

SEQ ID NO: 1668089 - RNA, 16 nt, Human
cccaggcugagccuca

SEQ ID NO: 1668090 - RNA, 17 nt, Human
cccaggcugagccucag

SEQ ID NO: 1668091 - RNA, 17 nt, Human
cccaggaaaggcuccag

SEQ ID NO: 1668092 - RNA, 18 nt, Human
cccaggaaaggcuccagg

SEQ ID NO: 1668093 - RNA, 21 nt, Human
cccauccucuguacagagccc

SEQ ID NO: 1668094 - RNA, 22 nt, Human
cccauccucuguacagagccca

SEQ ID NO: 1668095 - RNA, 17 nt, Human
ccccagaggcuggguga

SEQ ID NO: 1668096 - RNA, 15 nt, Human
ccccagauugcaaca

SEQ ID NO: 1668097 - RNA, 20 nt, Human
ccccagauugcaacaggcug

SEQ ID NO: 1668098 - RNA, 10 nt, Human
ccccagcccc

SEQ ID NO: 1668099 - RNA, 15 nt, Human
cccauuugcuccuuu

SEQ ID NO: 1668100 - RNA, 20 nt, Human
cccauucugccugcccaggc

SEQ ID NO: 1668101 - RNA, 19 nt, Human
cccauucugccugcccagg

SEQ ID NO: 1668102 - RNA, 14 nt, Human
cccauucugccugc

SEQ ID NO: 1668103 - RNA, 15 nt, Human
cccauucugccugcc

SEQ ID NO: 1668104 - RNA, 14 nt, Human
ccccgcacugggcu

SEQ ID NO: 1668105 - RNA, 16 nt, Human
cccuccucucugcccu

SEQ ID NO: 1668106 - RNA, 15 nt, Human
cccuccucucugccc

SEQ ID NO: 1668107 - RNA, 22 nt, Human
cccuccucugcuugccaucccu

SEQ ID NO: 1668108 - RNA, 13 nt, Human
cccuccucugcuu

SEQ ID NO: 1668109 - RNA, 16 nt, Human
cccucaacucuccucc

SEQ ID NO: 1668110 - RNA, 16 nt, Human
cccucacccuggggcu

SEQ ID NO: 1668111 - RNA, 20 nt, Human
cccucaacucuccuccagag

SEQ ID NO: 1668112 - RNA, 22 nt, Human
cccgggaagggggcugggacau

SEQ ID NO: 1668113 - RNA, 16 nt, Human
cccucaacaccucugc

SEQ ID NO: 1668114 - RNA, 18 nt, Human
cccgggaagggggcuggg

SEQ ID NO: 1668115 - RNA, 21 nt, Human
cccgggaagggggcugggaca

SEQ ID NO: 1668116 - RNA, 13 nt, Human
ccccuucugaccc

SEQ ID NO: 1668117 - RNA, 14 nt, Human
ccccuucugaccca

SEQ ID NO: 1668118 - RNA, 16 nt, Human
ccccuucugacccaug

SEQ ID NO: 1668119 - RNA, 16 nt, Human
cccgaauagcugggac

SEQ ID NO: 1668120 - RNA, 17 nt, Human
cccgaauagcugggacu

SEQ ID NO: 1668121 - RNA, 18 nt, Human
cccgaauagcugggacua

SEQ ID NO: 1668122 - RNA, 22 nt, Human
cccgaauagcugggacuacagg

SEQ ID NO: 1668123 - RNA, 20 nt, Human
cccggcuaauuuuuguauuu

SEQ ID NO: 1668124 - RNA, 11 nt, Human
cccggcuccag

SEQ ID NO: 1668125 - RNA, 15 nt, Human
cccgggaagggggcu

SEQ ID NO: 1668126 - RNA, 15 nt, Human
cccggccccugcugg

SEQ ID NO: 1668127 - RNA, 16 nt, Human
cccggccccugcuggu

SEQ ID NO: 1668128 - RNA, 15 nt, Human
ccccucugcccugcg

SEQ ID NO: 1668129 - RNA, 20 nt, Human
ccccucugcccugcggguca

SEQ ID NO: 1668130 - RNA, 23 nt, Human
ccccucugcccugcgggucacag

SEQ ID NO: 1668131 - RNA, 14 nt, Human
ccccugccacccug

SEQ ID NO: 1668132 - RNA, 16 nt, Human
ccccugccacccuggg

SEQ ID NO: 1668133 - RNA, 16 nt, Human
ccccucuggcuccagc

SEQ ID NO: 1668134 - RNA, 18 nt, Human
ccccucuggcuccagcug

SEQ ID NO: 1668135 - RNA, 13 nt, Human
ccccugaauuuaa

SEQ ID NO: 1668136 - RNA, 15 nt, Human
ccccugacaacacuc

SEQ ID NO: 1668137 - RNA, 18 nt, Human
ccccugcaaagcccagcu

SEQ ID NO: 1668138 - RNA, 20 nt, Human
ccccugcaaagcccagcuug

SEQ ID NO: 1668139 - RNA, 17 nt, Human
ccccugaauuuaaauag

SEQ ID NO: 1668140 - RNA, 21 nt, Human
ccccugcaaagcccagcuuga

SEQ ID NO: 1668141 - RNA, 13 nt, Human
ccccugcacucca

SEQ ID NO: 1668142 - RNA, 21 nt, Human
ccuaaugcgcaggcuggcccu

SEQ ID NO: 1668143 - RNA, 13 nt, Human
ccuaauuccacag

SEQ ID NO: 1668144 - RNA, 12 nt, Human
ccuaauaaagcu

SEQ ID NO: 1668145 - RNA, 13 nt, Human
ccuaauaaagcug

SEQ ID NO: 1668146 - RNA, 22 nt, Human
ccuagccuuagaagucacacag

SEQ ID NO: 1668147 - RNA, 23 nt, Human
ccuagccugugccucugggacug

SEQ ID NO: 1668148 - RNA, 19 nt, Human
ccuagccuuagaagucaca

SEQ ID NO: 1668149 - RNA, 14 nt, Human
ccgucccccucugg

SEQ ID NO: 1668150 - RNA, 17 nt, Human
ccggccaccugcggugc

SEQ ID NO: 1668151 - RNA, 18 nt, Human
ccggcaggguccuagaaa

SEQ ID NO: 1668152 - RNA, 18 nt, Human
ccggccaccugcggugcu

SEQ ID NO: 1668153 - RNA, 14 nt, Human
ccgcagcccugcag

SEQ ID NO: 1668154 - RNA, 18 nt, Human
ccgcagcccugcagaggg

SEQ ID NO: 1668155 - RNA, 23 nt, Human
ccgcagcccugcagagggcacag

SEQ ID NO: 1668156 - RNA, 15 nt, Human
cccugugggccccca

SEQ ID NO: 1668157 - RNA, 14 nt, Human
cccuccuuucacca

SEQ ID NO: 1668158 - RNA, 21 nt, Human
cccugugaguacuacaguccu

SEQ ID NO: 1668159 - RNA, 23 nt, Human
cccugugaguacuacaguccucc

SEQ ID NO: 1668160 - RNA, 15 nt, Human
cccugugauggggcc

SEQ ID NO: 1668161 - RNA, 14 nt, Human
cccuucucuccagc

SEQ ID NO: 1668162 - RNA, 19 nt, Human
cccuucucuccagccccug

SEQ ID NO: 1668163 - RNA, 21 nt, Human
cccuuuuuuggcugcugaagg

SEQ ID NO: 1668164 - RNA, 22 nt, Human
cccuuuuuuggcugcugaaggc

SEQ ID NO: 1668165 - RNA, 23 nt, Human
cccuuuuuuggcugcugaaggcu

SEQ ID NO: 1668166 - RNA, 15 nt, Human
ccgacagccuggcac

SEQ ID NO: 1668167 - RNA, 22 nt, Human
ccgacagccuggcacagggcag

SEQ ID NO: 1668168 - RNA, 13 nt, Human
ccgacagccuggc

SEQ ID NO: 1668169 - RNA, 14 nt, Human
ccgacagccuggca

SEQ ID NO: 1668170 - RNA, 12 nt, Human
ccgacagccugg

SEQ ID NO: 1668171 - RNA, 16 nt, Human
ccucaacaccucugca

SEQ ID NO: 1668172 - RNA, 19 nt, Human
ccucaacucuccuccagag

SEQ ID NO: 1668173 - RNA, 15 nt, Human
ccucaaccuccuggg

SEQ ID NO: 1668174 - RNA, 21 nt, Human
ccucaacucuccuccagaguc

SEQ ID NO: 1668175 - RNA, 23 nt, Human
ccucaacucuccuccagagucag

SEQ ID NO: 1668176 - RNA, 23 nt, Human
ccucaagugauucuccugccuca

SEQ ID NO: 1668177 - RNA, 16 nt, Human
ccucaaccuccugggc

SEQ ID NO: 1668178 - RNA, 20 nt, Human
ccucaagugauucuccugcc

SEQ ID NO: 1668179 - RNA, 21 nt, Human
ccucauuccaccuucccaugc

SEQ ID NO: 1668180 - RNA, 10 nt, Human
ccucaggccu

SEQ ID NO: 1668181 - RNA, 12 nt, Human
ccucaggcaggu

SEQ ID NO: 1668182 - RNA, 18 nt, Human
ccucaggcaggugggaug

SEQ ID NO: 1668183 - RNA, 17 nt, Human
ccucccaucacccgcua

SEQ ID NO: 1668184 - RNA, 20 nt, Human
ccuccaagaccuucuccuuc

SEQ ID NO: 1668185 - RNA, 12 nt, Human
ccucccaucacc

SEQ ID NO: 1668186 - RNA, 16 nt, Human
ccuccaagaccuucuc

SEQ ID NO: 1668187 - RNA, 17 nt, Human
ccuccaagaccuucucc

SEQ ID NO: 1668188 - RNA, 19 nt, Human
ccuccaagaccuucuccuu

SEQ ID NO: 1668189 - RNA, 19 nt, Human
ccuccuaucagaaguuucu

SEQ ID NO: 1668190 - RNA, 23 nt, Human
ccuccuuugugaggaagccgcug

SEQ ID NO: 1668191 - RNA, 18 nt, Human
ccuccuuuucacaguucu

SEQ ID NO: 1668192 - RNA, 19 nt, Human
ccucggacuuagcugggag

SEQ ID NO: 1668193 - RNA, 20 nt, Human
ccucggacuuagcugggaga

SEQ ID NO: 1668194 - RNA, 12 nt, Human
ccucggagaaga

SEQ ID NO: 1668195 - RNA, 14 nt, Human
ccucggagaagagc

SEQ ID NO: 1668196 - RNA, 14 nt, Human
ccuccgccucuugg

SEQ ID NO: 1668197 - RNA, 20 nt, Human
ccucccuuggggccuaugca

SEQ ID NO: 1668198 - RNA, 16 nt, Human
ccucccuucucuucac

SEQ ID NO: 1668199 - RNA, 17 nt, Human
ccugccucagccucccg

SEQ ID NO: 1668200 - RNA, 13 nt, Human
ccugccucucugc

SEQ ID NO: 1668201 - RNA, 18 nt, Human
ccugcugagucccaggcu

SEQ ID NO: 1668202 - RNA, 19 nt, Human
ccugcugagucccaggcug

SEQ ID NO: 1668203 - RNA, 20 nt, Human
ccugcugagucccaggcuga

SEQ ID NO: 1668204 - RNA, 14 nt, Human
ccugccucucugca

SEQ ID NO: 1668205 - RNA, 15 nt, Human
ccugccucucugcag

SEQ ID NO: 1668206 - RNA, 16 nt, Human
ccugccucagccuccc

SEQ ID NO: 1668207 - RNA, 15 nt, Human
ccugccucagccucc

SEQ ID NO: 1668208 - RNA, 21 nt, Human
ccugcccaggccccugccacc

SEQ ID NO: 1668209 - RNA, 22 nt, Human
ccugcccaggccccugccaccc

SEQ ID NO: 1668210 - RNA, 18 nt, Human
ccugcccaccuggccucu

SEQ ID NO: 1668211 - RNA, 19 nt, Human
ccugcccaccuggccucug

SEQ ID NO: 1668212 - RNA, 19 nt, Human
ccugcccaggccccugcca

SEQ ID NO: 1668213 - RNA, 15 nt, Human
ccugcccaccuggcc

SEQ ID NO: 1668214 - RNA, 17 nt, Human
ccugcccaccuggccuc

SEQ ID NO: 1668215 - RNA, 23 nt, Human
ccucuugccacugccucuuccuc

SEQ ID NO: 1668216 - RNA, 22 nt, Human
ccucuugccacugccucuuccu

SEQ ID NO: 1668217 - RNA, 15 nt, Human
ccucuuugagugaag

SEQ ID NO: 1668218 - RNA, 19 nt, Human
ccucuuucccucccuuccu

SEQ ID NO: 1668219 - RNA, 18 nt, Human
ccugaccccucauagccc

SEQ ID NO: 1668220 - RNA, 15 nt, Human
ccugcaggcagccag

SEQ ID NO: 1668221 - RNA, 14 nt, Human
ccugcaggcagcca

SEQ ID NO: 1668222 - RNA, 12 nt, Human
ccugcaggcagc

SEQ ID NO: 1668223 - RNA, 13 nt, Human
ccugcaggcagcc

SEQ ID NO: 1668224 - RNA, 20 nt, Human
ccugguggcagugggagcug

SEQ ID NO: 1668225 - RNA, 18 nt, Human
ccugguggcagugggagc

SEQ ID NO: 1668226 - RNA, 19 nt, Human
ccugguggcagugggagcu

SEQ ID NO: 1668227 - RNA, 18 nt, Human
ccugguuuccugcccugg

SEQ ID NO: 1668228 - RNA, 19 nt, Human
ccugguuuccugcccuggg

SEQ ID NO: 1668229 - RNA, 20 nt, Human
ccugguuuccugcccuggga

SEQ ID NO: 1668230 - RNA, 21 nt, Human
ccugguuuccugcccugggag

SEQ ID NO: 1668231 - RNA, 13 nt, Human
ccugguguggaag

SEQ ID NO: 1668232 - RNA, 18 nt, Human
ccuggggaaccugacccc

SEQ ID NO: 1668233 - RNA, 15 nt, Human
ccuggggagaaagua

SEQ ID NO: 1668234 - RNA, 20 nt, Human
ccuggccccucagggucccu

SEQ ID NO: 1668235 - RNA, 21 nt, Human
ccuggccccucagggucccug

SEQ ID NO: 1668236 - RNA, 18 nt, Human
ccuggccccucagggucc

SEQ ID NO: 1668237 - RNA, 17 nt, Human
ccuggauggggcugcac

SEQ ID NO: 1668238 - RNA, 18 nt, Human
ccuggauggggcugcacc

SEQ ID NO: 1668239 - RNA, 15 nt, Human
ccuggauggggcugc

SEQ ID NO: 1668240 - RNA, 22 nt, Human
ccugguuuccugcccugggagg

SEQ ID NO: 1668241 - RNA, 17 nt, Human
ccugucucuacuaaaaa

SEQ ID NO: 1668242 - RNA, 21 nt, Human
cacauuuuauuuuauuaugca

SEQ ID NO: 1668243 - RNA, 20 nt, Human
cacauuuuauuuuauuaugc

SEQ ID NO: 1668244 - RNA, 19 nt, Human
cacauuuuauuuuauuaug

SEQ ID NO: 1668245 - RNA, 17 nt, Human
cacauuuuauuuuauua

SEQ ID NO: 1668246 - RNA, 17 nt, Human
caccaacauacucccau

SEQ ID NO: 1668247 - RNA, 16 nt, Human
caccaacgucugugcc

SEQ ID NO: 1668248 - RNA, 13 nt, Human
caccaacccucag

SEQ ID NO: 1668249 - RNA, 14 nt, Human
caccaacgucugug

SEQ ID NO: 1668250 - RNA, 18 nt, Human
caccagggaaggggacaa

SEQ ID NO: 1668251 - RNA, 21 nt, Human
caccagggaaggggacaagga

SEQ ID NO: 1668252 - RNA, 13 nt, Human
caccagggaaggg

SEQ ID NO: 1668253 - RNA, 17 nt, Human
cacccaccucagccucc

SEQ ID NO: 1668254 - RNA, 13 nt, Human
caccagccccagu

SEQ ID NO: 1668255 - RNA, 16 nt, Human
caccagccccagugcc

SEQ ID NO: 1668256 - RNA, 18 nt, Human
cacccaccucagccuccc

SEQ ID NO: 1668257 - RNA, 16 nt, Human
cacccaggagccccga

SEQ ID NO: 1668258 - RNA, 23 nt, Human
cacagaaaagaaaguucaugcuu

SEQ ID NO: 1668259 - RNA, 13 nt, Human
cacagaacccuug

SEQ ID NO: 1668260 - RNA, 11 nt, Human
cacacauuuuu

SEQ ID NO: 1668261 - RNA, 10 nt, Human
cacacauuuu

SEQ ID NO: 1668262 - RNA, 20 nt, Human
cacacauuuuuuaaaugcac

SEQ ID NO: 1668263 - RNA, 19 nt, Human
cacacauuuuuuaaaugca

SEQ ID NO: 1668264 - RNA, 16 nt, Human
cacacauuuuuuaaau

SEQ ID NO: 1668265 - RNA, 12 nt, Human
cacacauuuuuu

SEQ ID NO: 1668266 - RNA, 18 nt, Human
cacagcucuucuccaggc

SEQ ID NO: 1668267 - RNA, 17 nt, Human
cacagcucuucuccagg

SEQ ID NO: 1668268 - RNA, 14 nt, Human
cacagcucuucucc

SEQ ID NO: 1668269 - RNA, 15 nt, Human
cacagcucuucucca

SEQ ID NO: 1668270 - RNA, 15 nt, Human
cacagcucuguccug

SEQ ID NO: 1668271 - RNA, 16 nt, Human
cacagcucuguccugg

SEQ ID NO: 1668272 - RNA, 18 nt, Human
cacagcucuguccuggga

SEQ ID NO: 1668273 - RNA, 19 nt, Human
cacagcucuguccugggag

SEQ ID NO: 1668274 - RNA, 18 nt, Human
cacagacccugcccugug

SEQ ID NO: 1668275 - RNA, 11 nt, Human
cacagcucugu

SEQ ID NO: 1668276 - RNA, 14 nt, Human
cacagcucuguccu

SEQ ID NO: 1668277 - RNA, 14 nt, Human
cacagacccugccc

SEQ ID NO: 1668278 - RNA, 16 nt, Human
cacagacccugcccug

SEQ ID NO: 1668279 - RNA, 17 nt, Human
cacagacccugcccugu

SEQ ID NO: 1668280 - RNA, 15 nt, Human
caaugggagcucaug

SEQ ID NO: 1668281 - RNA, 18 nt, Human
cacaagagcccaggccuc

SEQ ID NO: 1668282 - RNA, 19 nt, Human
cacaagagcccaggccucc

SEQ ID NO: 1668283 - RNA, 20 nt, Human
cacaagagcccaggccuccu

SEQ ID NO: 1668284 - RNA, 18 nt, Human
cacaagcuccaagcuccc

SEQ ID NO: 1668285 - RNA, 19 nt, Human
cacaagcuccaagcuccca

SEQ ID NO: 1668286 - RNA, 16 nt, Human
caaucccaccaacccu

SEQ ID NO: 1668287 - RNA, 17 nt, Human
caaucccaccaacccuc

SEQ ID NO: 1668288 - RNA, 22 nt, Human
caaucccaccaacccucagagc

SEQ ID NO: 1668289 - RNA, 23 nt, Human
caaucccaccaacccucagagcc

SEQ ID NO: 1668290 - RNA, 13 nt, Human
caaugcuggcugu

SEQ ID NO: 1668291 - RNA, 20 nt, Human
caaugcuggcuguuggcugg

SEQ ID NO: 1668292 - RNA, 21 nt, Human
caaugcuggcuguuggcuggg

SEQ ID NO: 1668293 - RNA, 20 nt, Human
cacaagcuccaagcucccag

SEQ ID NO: 1668294 - RNA, 21 nt, Human
cacaagcuccaagcucccagg

SEQ ID NO: 1668295 - RNA, 20 nt, Human
caauaaaaucuugaaaaugc

SEQ ID NO: 1668296 - RNA, 15 nt, Human
caauaaaauggguuu

SEQ ID NO: 1668297 - RNA, 17 nt, Human
caaggcaaggcugucaa

SEQ ID NO: 1668298 - RNA, 18 nt, Human
caaggcaaggcugucaau

SEQ ID NO: 1668299 - RNA, 21 nt, Human
caaggccaaaggaagcacaug

SEQ ID NO: 1668300 - RNA, 19 nt, Human
caaggccaaaggaagcaca

SEQ ID NO: 1668301 - RNA, 20 nt, Human
caaggccaaaggaagcacau

SEQ ID NO: 1668302 - RNA, 15 nt, Human
caaggcucugagcaa

SEQ ID NO: 1668303 - RNA, 21 nt, Human
caagucagucauucagauaug

SEQ ID NO: 1668304 - RNA, 20 nt, Human
caauaaaauccauacauuug

SEQ ID NO: 1668305 - RNA, 23 nt, Human
caauaaaauccauacauuugugu

SEQ ID NO: 1668306 - RNA, 13 nt, Human
caaguuguuugag

SEQ ID NO: 1668307 - RNA, 17 nt, Human
caaguuguuugagaaau

SEQ ID NO: 1668308 - RNA, 21 nt, Human
caaguuguuugagaaauuaag

SEQ ID NO: 1668309 - RNA, 23 nt, Human
caaguuguuugagaaauuaagua

SEQ ID NO: 1668310 - RNA, 12 nt, Human
caccuacugagu

SEQ ID NO: 1668311 - RNA, 12 nt, Human
caccucagccuc

SEQ ID NO: 1668312 - RNA, 14 nt, Human
caccuuugaagaag

SEQ ID NO: 1668313 - RNA, 14 nt, Human
caccuuucccaucu

SEQ ID NO: 1668314 - RNA, 21 nt, Human
caccuuucagauaacuguuau

SEQ ID NO: 1668315 - RNA, 22 nt, Human
caccuuucagauaacuguuauu

SEQ ID NO: 1668316 - RNA, 18 nt, Human
caccugcccaaccugcuc

SEQ ID NO: 1668317 - RNA, 19 nt, Human
caccugcccaaccugcucu

SEQ ID NO: 1668318 - RNA, 13 nt, Human
caccugcccaacc

SEQ ID NO: 1668319 - RNA, 23 nt, Human
caccuuuauucuggcagaggagg

SEQ ID NO: 1668320 - RNA, 18 nt, Human
caccuuggcugcagggag

SEQ ID NO: 1668321 - RNA, 15 nt, Human
caccuuggcugcagg

SEQ ID NO: 1668322 - RNA, 16 nt, Human
caccuuggcugcaggg

SEQ ID NO: 1668323 - RNA, 20 nt, Human
cacucuuauugcccacgcug

SEQ ID NO: 1668324 - RNA, 21 nt, Human
cacucuuauugcccacgcugg

SEQ ID NO: 1668325 - RNA, 22 nt, Human
cacucuuauugcccacgcugga

SEQ ID NO: 1668326 - RNA, 15 nt, Human
cacggcucacugcag

SEQ ID NO: 1668327 - RNA, 14 nt, Human
cacggcucacugca

SEQ ID NO: 1668328 - RNA, 12 nt, Human
cacggccaggcc

SEQ ID NO: 1668329 - RNA, 13 nt, Human
cacggccaggcca

SEQ ID NO: 1668330 - RNA, 13 nt, Human
cacuccagccugg

SEQ ID NO: 1668331 - RNA, 14 nt, Human
cacuccagccuggg

SEQ ID NO: 1668332 - RNA, 23 nt, Human
cacuccagccugagcgacaguga

SEQ ID NO: 1668333 - RNA, 17 nt, Human
cacuacauucuguuaau

SEQ ID NO: 1668334 - RNA, 16 nt, Human
cacuacauucuguuaa

SEQ ID NO: 1668335 - RNA, 21 nt, Human
cacuacauuauaaaugucucu

SEQ ID NO: 1668336 - RNA, 21 nt, Human
cacuacauucuguuaaucauu

SEQ ID NO: 1668337 - RNA, 13 nt, Human
cacuccagccuga

SEQ ID NO: 1668338 - RNA, 12 nt, Human
cacuccagccug

SEQ ID NO: 1668339 - RNA, 17 nt, Human
cagaaauguguuaucac

SEQ ID NO: 1668340 - RNA, 16 nt, Human
cagaaauguacagcaa

SEQ ID NO: 1668341 - RNA, 11 nt, Human
cagaacaguga

SEQ ID NO: 1668342 - RNA, 12 nt, Human
cagaacagugau

SEQ ID NO: 1668343 - RNA, 17 nt, Human
cagaacagugauuacca

SEQ ID NO: 1668344 - RNA, 14 nt, Human
cagaaguuucugcc

SEQ ID NO: 1668345 - RNA, 16 nt, Human
cagaaguuucugccgc

SEQ ID NO: 1668346 - RNA, 15 nt, Human
cagaaguuucucagc

SEQ ID NO: 1668347 - RNA, 19 nt, Human
cagaaguuucucagcuccc

SEQ ID NO: 1668348 - RNA, 18 nt, Human
cagaacagugauuaccag

SEQ ID NO: 1668349 - RNA, 13 nt, Human
cacuuucuagcca

SEQ ID NO: 1668350 - RNA, 18 nt, Human
cacuuucuagccagagga

SEQ ID NO: 1668351 - RNA, 16 nt, Human
cacuuucuagccagag

SEQ ID NO: 1668352 - RNA, 17 nt, Human
cacuuucuagccagagg

SEQ ID NO: 1668353 - RNA, 19 nt, Human
cacuuguugauuaauggaa

SEQ ID NO: 1668354 - RNA, 18 nt, Human
cacuuguguuaugaagca

SEQ ID NO: 1668355 - RNA, 17 nt, Human
cacuuguguuuugcaag

SEQ ID NO: 1668356 - RNA, 17 nt, Human
cacugccaugccagcuu

SEQ ID NO: 1668357 - RNA, 20 nt, Human
cacugcagccucaaccuccu

SEQ ID NO: 1668358 - RNA, 21 nt, Human
cacugcagccucaaccuccug

SEQ ID NO: 1668359 - RNA, 22 nt, Human
cacugcagccucaaccuccugg

SEQ ID NO: 1668360 - RNA, 23 nt, Human
cacugcagccucaaccuccuggg

SEQ ID NO: 1668361 - RNA, 19 nt, Human
cacugcagccucaaccucc

SEQ ID NO: 1668362 - RNA, 14 nt, Human
cacugcagccucaa

SEQ ID NO: 1668363 - RNA, 19 nt, Human
cacugggagaaaugaaaaa

SEQ ID NO: 1668364 - RNA, 13 nt, Human
cacugggcuucua

SEQ ID NO: 1668365 - RNA, 20 nt, Human
cacugggcuuggggaccaga

SEQ ID NO: 1668366 - RNA, 18 nt, Human
cacuguugcccaggcugg

SEQ ID NO: 1668367 - RNA, 19 nt, Human
cacuguugcccaggcuggc

SEQ ID NO: 1668368 - RNA, 23 nt, Human
cacuguugcccaggcuggcgugc

SEQ ID NO: 1668369 - RNA, 15 nt, Human
cacuuaaaaaugguu

SEQ ID NO: 1668370 - RNA, 18 nt, Human
auuuuuuuguuguuuguu

SEQ ID NO: 1668371 - RNA, 23 nt, Human
auuuuuuuuuccuucagugccuu

SEQ ID NO: 1668372 - RNA, 20 nt, Human
auuuuuuuuuccuucagugc

SEQ ID NO: 1668373 - RNA, 22 nt, Human
auuuuuuuuuccuucagugccu

SEQ ID NO: 1668374 - RNA, 13 nt, Human
auuuuuuuguugu

SEQ ID NO: 1668375 - RNA, 18 nt, Human
auuuuuuuuuccuucagu

SEQ ID NO: 1668376 - RNA, 16 nt, Human
auuuuuuugagacaga

SEQ ID NO: 1668377 - RNA, 15 nt, Human
auuuuuauauuuacu

SEQ ID NO: 1668378 - RNA, 16 nt, Human
auuuuuauauuuacua

SEQ ID NO: 1668379 - RNA, 15 nt, Human
auuuuuauauuugaa

SEQ ID NO: 1668380 - RNA, 16 nt, Human
auuuuuauauuugaaa

SEQ ID NO: 1668381 - RNA, 21 nt, Human
caaaaggauaaugaauacuuu

SEQ ID NO: 1668382 - RNA, 17 nt, Human
caaacauauauaacaau

SEQ ID NO: 1668383 - RNA, 16 nt, Human
caaacagucucaggaa

SEQ ID NO: 1668384 - RNA, 17 nt, Human
caaacagucucaggaaa

SEQ ID NO: 1668385 - RNA, 18 nt, Human
caaaccccgaccaccugc

SEQ ID NO: 1668386 - RNA, 21 nt, Human
caaaccccgaccaccugccca

SEQ ID NO: 1668387 - RNA, 14 nt, Human
caaacccuucagug

SEQ ID NO: 1668388 - RNA, 14 nt, Human
auuuuuagacagag

SEQ ID NO: 1668389 - RNA, 19 nt, Human
auuuuuaagugcugcauuu

SEQ ID NO: 1668390 - RNA, 18 nt, Human
auuuuuaagugcugcauu

SEQ ID NO: 1668391 - RNA, 16 nt, Human
auuuuuaagugcugca

SEQ ID NO: 1668392 - RNA, 19 nt, Human
auuuuagggguagcauuug

SEQ ID NO: 1668393 - RNA, 21 nt, Human
auuuuauaucaauuuaaaaaa

SEQ ID NO: 1668394 - RNA, 18 nt, Human
auuuuagcuacuauauau

SEQ ID NO: 1668395 - RNA, 18 nt, Human
auuuuaugcuuuaaacau

SEQ ID NO: 1668396 - RNA, 19 nt, Human
auuuuaugcuuuaaacauu

SEQ ID NO: 1668397 - RNA, 21 nt, Human
caacacacagauuugagcuca

SEQ ID NO: 1668398 - RNA, 22 nt, Human
caacacacagauuugagcucag

SEQ ID NO: 1668399 - RNA, 23 nt, Human
caaaugcuguaacuuucugaaau

SEQ ID NO: 1668400 - RNA, 21 nt, Human
caaaucuuaacuugaaggagu

SEQ ID NO: 1668401 - RNA, 14 nt, Human
caaagguaaaucag

SEQ ID NO: 1668402 - RNA, 22 nt, Human
caaagguaaaucagacuaugaa

SEQ ID NO: 1668403 - RNA, 22 nt, Human
caaaguagaagucuuagaugua

SEQ ID NO: 1668404 - RNA, 21 nt, Human
caaaguaucccuacuguaauu

SEQ ID NO: 1668405 - RNA, 19 nt, Human
caaaguaucccuacuguaa

SEQ ID NO: 1668406 - RNA, 16 nt, Human
caaagauauuuugcuu

SEQ ID NO: 1668407 - RNA, 14 nt, Human
caaagauauuuugc

SEQ ID NO: 1668408 - RNA, 18 nt, Human
caaagcagugcaugcugu

SEQ ID NO: 1668409 - RNA, 21 nt, Human
caaagcagugcaugcuguccc

SEQ ID NO: 1668410 - RNA, 18 nt, Human
caaagauauuuugcuuug

SEQ ID NO: 1668411 - RNA, 22 nt, Human
caaagcagugcaugcugucccu

SEQ ID NO: 1668412 - RNA, 18 nt, Human
caacuaauuuuuguauuu

SEQ ID NO: 1668413 - RNA, 17 nt, Human
caacucauauuuucaug

SEQ ID NO: 1668414 - RNA, 18 nt, Human
caacucaccccagcccca

SEQ ID NO: 1668415 - RNA, 22 nt, Human
caagaauugaagcaggacuaaa

SEQ ID NO: 1668416 - RNA, 14 nt, Human
caacucuccuccag

SEQ ID NO: 1668417 - RNA, 18 nt, Human
caagaccacguuucuaaa

SEQ ID NO: 1668418 - RNA, 17 nt, Human
caagaccacguuucuaa

SEQ ID NO: 1668419 - RNA, 20 nt, Human
caagaauuucuaggacugaa

SEQ ID NO: 1668420 - RNA, 19 nt, Human
caagacccaaaaggcagaa

SEQ ID NO: 1668421 - RNA, 18 nt, Human
auuccugcauuugugaaa

SEQ ID NO: 1668422 - RNA, 15 nt, Human
auuccugcauuugug

SEQ ID NO: 1668423 - RNA, 18 nt, Human
auucucuaguuugauuaa

SEQ ID NO: 1668424 - RNA, 17 nt, Human
auucucuaguuugauua

SEQ ID NO: 1668425 - RNA, 22 nt, Human
auucuccuuguguuacuaaguu

SEQ ID NO: 1668426 - RNA, 21 nt, Human
auucuccuuguguuacuaagu

SEQ ID NO: 1668427 - RNA, 19 nt, Human
auucuccuuguguuacuaa

SEQ ID NO: 1668428 - RNA, 18 nt, Human
auucuccuuguguuacua

SEQ ID NO: 1668429 - RNA, 19 nt, Human
auucucuaguuugauuaaa

SEQ ID NO: 1668430 - RNA, 19 nt, Human
auucuucugcuucagccuc

SEQ ID NO: 1668431 - RNA, 20 nt, Human
auucuucugcuucagccucc

SEQ ID NO: 1668432 - RNA, 22 nt, Human
auucuucuguacgucugacagg

SEQ ID NO: 1668433 - RNA, 14 nt, Human
auucuugcaaagua

SEQ ID NO: 1668434 - RNA, 16 nt, Human
auucuugcaaaguauc

SEQ ID NO: 1668435 - RNA, 15 nt, Human
auucuugcaaaguau

SEQ ID NO: 1668436 - RNA, 12 nt, Human
auuauguaaauc

SEQ ID NO: 1668437 - RNA, 18 nt, Human
auucaaauguauuacagu

SEQ ID NO: 1668438 - RNA, 16 nt, Human
auucaaaugucuauaa

SEQ ID NO: 1668439 - RNA, 18 nt, Human
auucaacagguuuuccug

SEQ ID NO: 1668440 - RNA, 14 nt, Human
auuaggauuucaug

SEQ ID NO: 1668441 - RNA, 16 nt, Human
auuaggauuucaugau

SEQ ID NO: 1668442 - RNA, 11 nt, Human
auuaaauuaug

SEQ ID NO: 1668443 - RNA, 17 nt, Human
auuaaaugcccagcccc

SEQ ID NO: 1668444 - RNA, 19 nt, Human
auuaaaugcccagccccuu

SEQ ID NO: 1668445 - RNA, 20 nt, Human
auuaguacuccccuccuuga

SEQ ID NO: 1668446 - RNA, 19 nt, Human
auuaugaauuacauuugua

SEQ ID NO: 1668447 - RNA, 20 nt, Human
auuaugaauuacauuuguau

SEQ ID NO: 1668448 - RNA, 22 nt, Human
auuaugaauuacauuuguauaa

SEQ ID NO: 1668449 - RNA, 16 nt, Human
auuuaugcauauuauu

SEQ ID NO: 1668450 - RNA, 22 nt, Human
auuuaugcauauuauuuuaugu

SEQ ID NO: 1668451 - RNA, 15 nt, Human
auuuauaaucacuuu

SEQ ID NO: 1668452 - RNA, 16 nt, Human
auuuaaugaaagacug

SEQ ID NO: 1668453 - RNA, 20 nt, Human
auuuaaugaaagacuguaca

SEQ ID NO: 1668454 - RNA, 21 nt, Human
auuuaaugaaagacuguacaa

SEQ ID NO: 1668455 - RNA, 13 nt, Human
auuuauaaucacu

SEQ ID NO: 1668456 - RNA, 22 nt, Human
auuuauaaucacuuuuuuccac

SEQ ID NO: 1668457 - RNA, 16 nt, Human
auuuaauaaaugugcc

SEQ ID NO: 1668458 - RNA, 19 nt, Human
auuucuauauuuucauucu

SEQ ID NO: 1668459 - RNA, 19 nt, Human
auuucuaugcugaguuugu

SEQ ID NO: 1668460 - RNA, 21 nt, Human
auuucuaugcugaguuugugc

SEQ ID NO: 1668461 - RNA, 22 nt, Human
auuucuaugcugaguuugugcu

SEQ ID NO: 1668462 - RNA, 20 nt, Human
auuucauaccuaucaucuua

SEQ ID NO: 1668463 - RNA, 17 nt, Human
auuucuauauuuucauu

SEQ ID NO: 1668464 - RNA, 18 nt, Human
auuucuauauuuucauuc

SEQ ID NO: 1668465 - RNA, 14 nt, Human
auuucuaugaaaua

SEQ ID NO: 1668466 - RNA, 15 nt, Human
auuucuauauuuuca

SEQ ID NO: 1668467 - RNA, 16 nt, Human
auuucuauauuuucau

SEQ ID NO: 1668468 - RNA, 15 nt, Human
auuguuuaaaaucau

SEQ ID NO: 1668469 - RNA, 16 nt, Human
auuguugucugcaacu

SEQ ID NO: 1668470 - RNA, 16 nt, Human
auuguaauuauaucug

SEQ ID NO: 1668471 - RNA, 17 nt, Human
auuguaauuauaucuga

SEQ ID NO: 1668472 - RNA, 15 nt, Human
auuguaauuauaucu

SEQ ID NO: 1668473 - RNA, 18 nt, Human
auuguaagcaugcacaaa

SEQ ID NO: 1668474 - RNA, 21 nt, Human
auuguaauuauaucugaggaa

SEQ ID NO: 1668475 - RNA, 16 nt, Human
auuguacaaaguauua

SEQ ID NO: 1668476 - RNA, 17 nt, Human
auuguacaaaguauuaa

SEQ ID NO: 1668477 - RNA, 19 nt, Human
auuguacaaaguauuaagc

SEQ ID NO: 1668478 - RNA, 16 nt, Human
cagcuccaagaauuuc

SEQ ID NO: 1668479 - RNA, 19 nt, Human
cagcuccaagaauuucuag

SEQ ID NO: 1668480 - RNA, 13 nt, Human
cagcuccagcuca

SEQ ID NO: 1668481 - RNA, 14 nt, Human
cagcuccagcucac

SEQ ID NO: 1668482 - RNA, 15 nt, Human
cagcuccagcucacc

SEQ ID NO: 1668483 - RNA, 21 nt, Human
cagcucccaaggcucugagca

SEQ ID NO: 1668484 - RNA, 22 nt, Human
cagcuccagcucaccagcccca

SEQ ID NO: 1668485 - RNA, 16 nt, Human
cagcuccagcucacca

SEQ ID NO: 1668486 - RNA, 17 nt, Human
cagcuccagcucaccag

SEQ ID NO: 1668487 - RNA, 18 nt, Human
cagcuccagcucaccagc

SEQ ID NO: 1668488 - RNA, 20 nt, Human
cagcuccagcucaccagccc

SEQ ID NO: 1668489 - RNA, 22 nt, Human
cagcugccuccccuccucugcu

SEQ ID NO: 1668490 - RNA, 21 nt, Human
cagcugccuccccuccucugc

SEQ ID NO: 1668491 - RNA, 24 nt, Human
cagcugccuccccuccucugcuug

SEQ ID NO: 1668492 - RNA, 23 nt, Human
cagcugccuccccuccucugcuu

SEQ ID NO: 1668493 - RNA, 16 nt, Human
cagcuccccucggaga

SEQ ID NO: 1668494 - RNA, 17 nt, Human
cagcuccccucggagaa

SEQ ID NO: 1668495 - RNA, 18 nt, Human
cagcuccccucggagaag

SEQ ID NO: 1668496 - RNA, 20 nt, Human
cagcuccccucggagaagag

SEQ ID NO: 1668497 - RNA, 19 nt, Human
cagcugugcucuggacagg

SEQ ID NO: 1668498 - RNA, 18 nt, Human
cagcugugcucuggacag

SEQ ID NO: 1668499 - RNA, 15 nt, Human
cagcuucauuuccug

SEQ ID NO: 1668500 - RNA, 18 nt, Human
cagcuucauuuccugugu

SEQ ID NO: 1668501 - RNA, 19 nt, Human
cagcuucauuuccuguguc

SEQ ID NO: 1668502 - RNA, 14 nt, Human
caggaaaggcucca

SEQ ID NO: 1668503 - RNA, 15 nt, Human
caggaaaggcuccag

SEQ ID NO: 1668504 - RNA, 23 nt, Human
caggaaaucaaauaugcaaagca

SEQ ID NO: 1668505 - RNA, 12 nt, Human
cagccccuggau

SEQ ID NO: 1668506 - RNA, 13 nt, Human
cagccccuggaug

SEQ ID NO: 1668507 - RNA, 14 nt, Human
cagccccuggaugc

SEQ ID NO: 1668508 - RNA, 22 nt, Human
cagccccuggaugcagccucac

SEQ ID NO: 1668509 - RNA, 16 nt, Human
cagcccuuagcaggga

SEQ ID NO: 1668510 - RNA, 21 nt, Human
cagcccuuagcagggaaacag

SEQ ID NO: 1668511 - RNA, 17 nt, Human
cagccccuggaugcagc

SEQ ID NO: 1668512 - RNA, 18 nt, Human
cagccccuggaugcagcc

SEQ ID NO: 1668513 - RNA, 19 nt, Human
cagccccuggaugcagccu

SEQ ID NO: 1668514 - RNA, 21 nt, Human
cagccccuggaugcagccuca

SEQ ID NO: 1668515 - RNA, 21 nt, Human
cagccgagauagccaaggcca

SEQ ID NO: 1668516 - RNA, 15 nt, Human
cagcccuucuuucca

SEQ ID NO: 1668517 - RNA, 19 nt, Human
cagcccuucuuuccacaga

SEQ ID NO: 1668518 - RNA, 20 nt, Human
cagcccuucuuuccacagaa

SEQ ID NO: 1668519 - RNA, 15 nt, Human
cagcggggacagcuc

SEQ ID NO: 1668520 - RNA, 16 nt, Human
cagcggggacagcucc

SEQ ID NO: 1668521 - RNA, 17 nt, Human
cagcggggacagcuccu

SEQ ID NO: 1668522 - RNA, 18 nt, Human
cagccugagcgacaguga

SEQ ID NO: 1668523 - RNA, 19 nt, Human
cagccugagcgacagugag

SEQ ID NO: 1668524 - RNA, 22 nt, Human
cagccugagcgacagugagacu

SEQ ID NO: 1668525 - RNA, 22 nt, Human
cagcacagccucuuagaugcag

SEQ ID NO: 1668526 - RNA, 22 nt, Human
cagccaggccacaagacccuug

SEQ ID NO: 1668527 - RNA, 12 nt, Human
cagccaggccac

SEQ ID NO: 1668528 - RNA, 13 nt, Human
cagccaggccaca

SEQ ID NO: 1668529 - RNA, 14 nt, Human
cagccagcaguuca

SEQ ID NO: 1668530 - RNA, 21 nt, Human
cagccagcaguucagagcugc

SEQ ID NO: 1668531 - RNA, 15 nt, Human
cagccagcaguucag

SEQ ID NO: 1668532 - RNA, 22 nt, Human
cagccagcaguucagagcugcc

SEQ ID NO: 1668533 - RNA, 19 nt, Human
cagcauauucaggaagcuc

SEQ ID NO: 1668534 - RNA, 22 nt, Human
cagcauauucaggaagcucagg

SEQ ID NO: 1668535 - RNA, 23 nt, Human
cagcauauucaggaagcucaggg

SEQ ID NO: 1668536 - RNA, 22 nt, Human
cagcaguugaaaagacuccaaa

SEQ ID NO: 1668537 - RNA, 17 nt, Human
cagcaguugaaaagacu

SEQ ID NO: 1668538 - RNA, 20 nt, Human
cagcaguugaaaagacucca

SEQ ID NO: 1668539 - RNA, 21 nt, Human
cagcaguugaaaagacuccaa

SEQ ID NO: 1668540 - RNA, 15 nt, Human
cagauaugauucaaa

SEQ ID NO: 1668541 - RNA, 16 nt, Human
cagauaugauucaaau

SEQ ID NO: 1668542 - RNA, 17 nt, Human
cagauaugauucaaaug

SEQ ID NO: 1668543 - RNA, 19 nt, Human
cagauaugauucaaauguc

SEQ ID NO: 1668544 - RNA, 20 nt, Human
cagagucagaaguuucugcc

SEQ ID NO: 1668545 - RNA, 18 nt, Human
cagaggggguggccuccc

SEQ ID NO: 1668546 - RNA, 19 nt, Human
cagaggggguggccuccca

SEQ ID NO: 1668547 - RNA, 20 nt, Human
cagaggggguggccucccaa

SEQ ID NO: 1668548 - RNA, 22 nt, Human
cagagggccugcaagggaguga

SEQ ID NO: 1668549 - RNA, 19 nt, Human
cagaaguuucugccgcagc

SEQ ID NO: 1668550 - RNA, 20 nt, Human
cagaaguuugagaucagccu

SEQ ID NO: 1668551 - RNA, 22 nt, Human
cagaaguuugagaucagccugg

SEQ ID NO: 1668552 - RNA, 23 nt, Human
cagaaguuugagaucagccuggg

SEQ ID NO: 1668553 - RNA, 18 nt, Human
cagagcugccaccugccu

SEQ ID NO: 1668554 - RNA, 15 nt, Human
cagagcugcccucuc

SEQ ID NO: 1668555 - RNA, 13 nt, Human
cagagcugcccuc

SEQ ID NO: 1668556 - RNA, 17 nt, Human
cagagcugcccucuccu

SEQ ID NO: 1668557 - RNA, 23 nt, Human
caggccagagggagugacagagg

SEQ ID NO: 1668558 - RNA, 19 nt, Human
caggccagagggagugaca

SEQ ID NO: 1668559 - RNA, 21 nt, Human
caggccagagggagugacaga

SEQ ID NO: 1668560 - RNA, 15 nt, Human
caggaggccagccuu

SEQ ID NO: 1668561 - RNA, 16 nt, Human
caggaggccagccuug

SEQ ID NO: 1668562 - RNA, 18 nt, Human
caggcacccaccaucaug

SEQ ID NO: 1668563 - RNA, 22 nt, Human
caggcacccaccaucaugucug

SEQ ID NO: 1668564 - RNA, 23 nt, Human
caggcacccaccaucaugucugg

SEQ ID NO: 1668565 - RNA, 23 nt, Human
caggagggagggggaaggcaggg

SEQ ID NO: 1668566 - RNA, 17 nt, Human
caggaggccagccuuga

SEQ ID NO: 1668567 - RNA, 15 nt, Human
caggagggaggggga

SEQ ID NO: 1668568 - RNA, 17 nt, Human
cagggagggccugggcc

SEQ ID NO: 1668569 - RNA, 22 nt, Human
cagggaguccgaaagggacuug

SEQ ID NO: 1668570 - RNA, 14 nt, Human
cagggagggccugg

SEQ ID NO: 1668571 - RNA, 16 nt, Human
cagggagggccugggc

SEQ ID NO: 1668572 - RNA, 18 nt, Human
cagggaggugaccccagg

SEQ ID NO: 1668573 - RNA, 20 nt, Human
caggccugccuguucccauu

SEQ ID NO: 1668574 - RNA, 15 nt, Human
caggcgccccuuccc

SEQ ID NO: 1668575 - RNA, 18 nt, Human
caggcuggcccugcccug

SEQ ID NO: 1668576 - RNA, 19 nt, Human
caggcuggcccugcccugg

SEQ ID NO: 1668577 - RNA, 17 nt, Human
caggcgccccuuccccc

SEQ ID NO: 1668578 - RNA, 20 nt, Human
caggcuggcccugcccuggu

SEQ ID NO: 1668579 - RNA, 15 nt, Human
caggcuggcgugcag

SEQ ID NO: 1668580 - RNA, 16 nt, Human
caggcugggcuucagu

SEQ ID NO: 1668581 - RNA, 12 nt, Human
cagggagggccu

SEQ ID NO: 1668582 - RNA, 13 nt, Human
cagggagggccug

SEQ ID NO: 1668583 - RNA, 19 nt, Human
cagggaggacgcucucugg

SEQ ID NO: 1668584 - RNA, 17 nt, Human
caggcugggcuucagug

SEQ ID NO: 1668585 - RNA, 19 nt, Human
caggcugggcuucaguggc

SEQ ID NO: 1668586 - RNA, 17 nt, Human
cagggaggacgcucucu

SEQ ID NO: 1668587 - RNA, 18 nt, Human
cagggaggacgcucucug

SEQ ID NO: 1668588 - RNA, 22 nt, Human
cagugcacuaauguguaagaca

SEQ ID NO: 1668589 - RNA, 19 nt, Human
cagucugauucccaagcuc

SEQ ID NO: 1668590 - RNA, 20 nt, Human
cagucugauucccaagcucu

SEQ ID NO: 1668591 - RNA, 19 nt, Human
cagugcaugcugucccuua

SEQ ID NO: 1668592 - RNA, 22 nt, Human
cagugcaugcugucccuuacgu

SEQ ID NO: 1668593 - RNA, 23 nt, Human
cagugcaugcugucccuuacgug

SEQ ID NO: 1668594 - RNA, 11 nt, Human
cagugggagcu

SEQ ID NO: 1668595 - RNA, 19 nt, Human
cagugggacagggcauggc

SEQ ID NO: 1668596 - RNA, 12 nt, Human
cagugcccacag

SEQ ID NO: 1668597 - RNA, 15 nt, Human
cagugccaaaaacaa

SEQ ID NO: 1668598 - RNA, 14 nt, Human
cagucucccucccu

SEQ ID NO: 1668599 - RNA, 15 nt, Human
cagucucaggaaauc

SEQ ID NO: 1668600 - RNA, 14 nt, Human
caggugcgaaagga

SEQ ID NO: 1668601 - RNA, 18 nt, Human
caggugcuaggaacacuc

SEQ ID NO: 1668602 - RNA, 20 nt, Human
caggugcuaggaacacuccu

SEQ ID NO: 1668603 - RNA, 14 nt, Human
cagguugguggggg

SEQ ID NO: 1668604 - RNA, 20 nt, Human
caggugauccacccaccuca

SEQ ID NO: 1668605 - RNA, 14 nt, Human
caggguuggccccu

SEQ ID NO: 1668606 - RNA, 12 nt, Human
caggguuggccc

SEQ ID NO: 1668607 - RNA, 16 nt, Human
caggugauccacccac

SEQ ID NO: 1668608 - RNA, 17 nt, Human
caggugauccacccacc

SEQ ID NO: 1668609 - RNA, 22 nt, Human
cagggucucacucugucgccca

SEQ ID NO: 1668610 - RNA, 21 nt, Human
cagggucucacucugucgccc

SEQ ID NO: 1668611 - RNA, 18 nt, Human
cagggucucacucugucg

SEQ ID NO: 1668612 - RNA, 16 nt, Human
caguauuguacaaagu

SEQ ID NO: 1668613 - RNA, 17 nt, Human
caguauuguacaaagua

SEQ ID NO: 1668614 - RNA, 18 nt, Human
caguauuguacaaaguau

SEQ ID NO: 1668615 - RNA, 19 nt, Human
caguauuguacaaaguauu

SEQ ID NO: 1668616 - RNA, 12 nt, Human
caguauuguaca

SEQ ID NO: 1668617 - RNA, 13 nt, Human
caguauuguacaa

SEQ ID NO: 1668618 - RNA, 18 nt, Human
cagguuuaagcuguuacu

SEQ ID NO: 1668619 - RNA, 21 nt, Human
cagguuggugggggccucggu

SEQ ID NO: 1668620 - RNA, 16 nt, Human
cagguuuaagcuguua

SEQ ID NO: 1668621 - RNA, 21 nt, Human
caguauuguacaaaguauuaa

SEQ ID NO: 1668622 - RNA, 20 nt, Human
cagucaccccggccaccugc

SEQ ID NO: 1668623 - RNA, 19 nt, Human
cagucaccccggccaccug

SEQ ID NO: 1668624 - RNA, 22 nt, Human
cagucaccccggccaccugcgg

SEQ ID NO: 1668625 - RNA, 15 nt, Human
cagucaccucaugga

SEQ ID NO: 1668626 - RNA, 14 nt, Human
cauggccagguggc

SEQ ID NO: 1668627 - RNA, 13 nt, Human
cauggccaggugg

SEQ ID NO: 1668628 - RNA, 14 nt, Human
caugcugcccugug

SEQ ID NO: 1668629 - RNA, 15 nt, Human
caugcugcccuguga

SEQ ID NO: 1668630 - RNA, 21 nt, Human
caugacacgaauauugcugau

SEQ ID NO: 1668631 - RNA, 23 nt, Human
caugacacgaauauugcugaugg

SEQ ID NO: 1668632 - RNA, 23 nt, Human
caugaaguaauaugcacacauuu

SEQ ID NO: 1668633 - RNA, 22 nt, Human
caugaaguaauaugcacacauu

SEQ ID NO: 1668634 - RNA, 19 nt, Human
caugaaguaauaugcacac

SEQ ID NO: 1668635 - RNA, 15 nt, Human
caugaaguaauaugc

SEQ ID NO: 1668636 - RNA, 12 nt, Human
caugcacaaauu

SEQ ID NO: 1668637 - RNA, 24 nt, Human
caugauuaaccacuucagcugacu

SEQ ID NO: 1668638 - RNA, 22 nt, Human
caugauuaaccacuucagcuga

SEQ ID NO: 1668639 - RNA, 23 nt, Human
caugauuaaccacuucagcugac

SEQ ID NO: 1668640 - RNA, 13 nt, Human
caugcuccuggcc

SEQ ID NO: 1668641 - RNA, 12 nt, Human
caugcugcccug

SEQ ID NO: 1668642 - RNA, 13 nt, Human
caugcugcccugu

SEQ ID NO: 1668643 - RNA, 16 nt, Human
caugcacgugugugca

SEQ ID NO: 1668644 - RNA, 14 nt, Human
cauucucacuccua

SEQ ID NO: 1668645 - RNA, 13 nt, Human
cauucucacuccu

SEQ ID NO: 1668646 - RNA, 18 nt, Human
cauucuagguuugcaaga

SEQ ID NO: 1668647 - RNA, 12 nt, Human
cauuccuguucc

SEQ ID NO: 1668648 - RNA, 18 nt, Human
cauguccaagaagcccag

SEQ ID NO: 1668649 - RNA, 19 nt, Human
cauguccaagaagcccagg

SEQ ID NO: 1668650 - RNA, 20 nt, Human
cauguccaagaagcccagga

SEQ ID NO: 1668651 - RNA, 12 nt, Human
cauguuggccag

SEQ ID NO: 1668652 - RNA, 13 nt, Human
cauguuggccagg

SEQ ID NO: 1668653 - RNA, 22 nt, Human
cauuaggugugacugaauuucu

SEQ ID NO: 1668654 - RNA, 23 nt, Human
cauuaucuagauacuguaucaug

SEQ ID NO: 1668655 - RNA, 12 nt, Human
cauuaucucaaa

SEQ ID NO: 1668656 - RNA, 13 nt, Human
cauuaucucaaaa

SEQ ID NO: 1668657 - RNA, 21 nt, Human
cauccccuguagagugggagc

SEQ ID NO: 1668658 - RNA, 14 nt, Human
cauccccuguagag

SEQ ID NO: 1668659 - RNA, 19 nt, Human
caucccauaugccugggca

SEQ ID NO: 1668660 - RNA, 20 nt, Human
caucaggccaggcccucugc

SEQ ID NO: 1668661 - RNA, 16 nt, Human
caucaggccaggcccu

SEQ ID NO: 1668662 - RNA, 19 nt, Human
caucaggccaggcccucug

SEQ ID NO: 1668663 - RNA, 15 nt, Human
caucaggccaggccc

SEQ ID NO: 1668664 - RNA, 22 nt, Human
cauaugccugggcagaaggaag

SEQ ID NO: 1668665 - RNA, 15 nt, Human
cauaugccugggcag

SEQ ID NO: 1668666 - RNA, 20 nt, Human
cauaugccugggcagaagga

SEQ ID NO: 1668667 - RNA, 22 nt, Human
cauauucaggaagcucagggcc

SEQ ID NO: 1668668 - RNA, 20 nt, Human
cauauucaggaagcucaggg

SEQ ID NO: 1668669 - RNA, 14 nt, Human
cauauucaggaagc

SEQ ID NO: 1668670 - RNA, 15 nt, Human
cauauucaggaagcu

SEQ ID NO: 1668671 - RNA, 19 nt, Human
cauagcagagaaugaaagg

SEQ ID NO: 1668672 - RNA, 22 nt, Human
cauagcagagaaugaaagggcc

SEQ ID NO: 1668673 - RNA, 15 nt, Human
cagugggagcugccu

SEQ ID NO: 1668674 - RNA, 19 nt, Human
ccaccgggcugggagcucu

SEQ ID NO: 1668675 - RNA, 18 nt, Human
ccaccaucaugucuggcu

SEQ ID NO: 1668676 - RNA, 19 nt, Human
ccaccaucaugucuggcua

SEQ ID NO: 1668677 - RNA, 22 nt, Human
ccaccgggcugggagcucugca

SEQ ID NO: 1668678 - RNA, 12 nt, Human
ccaccuuggcug

SEQ ID NO: 1668679 - RNA, 14 nt, Human
ccaccuuggcugca

SEQ ID NO: 1668680 - RNA, 15 nt, Human
ccaccuuggcugcag

SEQ ID NO: 1668681 - RNA, 16 nt, Human
ccaccuuggcugcagg

SEQ ID NO: 1668682 - RNA, 13 nt, Human
ccacgcuggagug

SEQ ID NO: 1668683 - RNA, 18 nt, Human
ccacgcuggaccuugaac

SEQ ID NO: 1668684 - RNA, 18 nt, Human
ccaccuuggcugcaggga

SEQ ID NO: 1668685 - RNA, 19 nt, Human
ccaccuuggcugcagggag

SEQ ID NO: 1668686 - RNA, 13 nt, Human
ccacgcccccacu

SEQ ID NO: 1668687 - RNA, 16 nt, Human
ccacacuucaggcucu

SEQ ID NO: 1668688 - RNA, 20 nt, Human
ccacacuucaggcucuucuc

SEQ ID NO: 1668689 - RNA, 21 nt, Human
ccacacuucaggcucuucucc

SEQ ID NO: 1668690 - RNA, 16 nt, Human
ccacagaagcuccagg

SEQ ID NO: 1668691 - RNA, 15 nt, Human
ccaccacgcccggcu

SEQ ID NO: 1668692 - RNA, 18 nt, Human
ccaccagucugacuguuu

SEQ ID NO: 1668693 - RNA, 22 nt, Human
ccacagagaaaguacuucucca

SEQ ID NO: 1668694 - RNA, 18 nt, Human
ccacagaagcuccaggua

SEQ ID NO: 1668695 - RNA, 15 nt, Human
ccaaggccaaaggaa

SEQ ID NO: 1668696 - RNA, 18 nt, Human
ccaaggaugccccguccc

SEQ ID NO: 1668697 - RNA, 20 nt, Human
ccaagcuggucccacucagu

SEQ ID NO: 1668698 - RNA, 14 nt, Human
ccaagaagcccagg

SEQ ID NO: 1668699 - RNA, 12 nt, Human
ccaagcuggucc

SEQ ID NO: 1668700 - RNA, 19 nt, Human
ccaagcuggucccacucag

SEQ ID NO: 1668701 - RNA, 22 nt, Human
ccaaauggaaaugggcagagca

SEQ ID NO: 1668702 - RNA, 13 nt, Human
ccaacgucugugc

SEQ ID NO: 1668703 - RNA, 15 nt, Human
ccaacgucugugcca

SEQ ID NO: 1668704 - RNA, 16 nt, Human
ccaacgucugugccau

SEQ ID NO: 1668705 - RNA, 13 nt, Human
ccaagaagcccag

SEQ ID NO: 1668706 - RNA, 13 nt, Human
ccaaaugcagcuu

SEQ ID NO: 1668707 - RNA, 15 nt, Human
ccaaaugcagcuuua

SEQ ID NO: 1668708 - RNA, 18 nt, Human
ccaaaugcagcuuuaaaa

SEQ ID NO: 1668709 - RNA, 16 nt, Human
ccaaggccaaaggaag

SEQ ID NO: 1668710 - RNA, 16 nt, Human
cauuuuuuaaaugcac

SEQ ID NO: 1668711 - RNA, 15 nt, Human
cauuuuuuaaaugca

SEQ ID NO: 1668712 - RNA, 19 nt, Human
cauuuuuuaaaugcaccug

SEQ ID NO: 1668713 - RNA, 14 nt, Human
cauuuauucugcuc

SEQ ID NO: 1668714 - RNA, 15 nt, Human
cauuuauucugcuca

SEQ ID NO: 1668715 - RNA, 14 nt, Human
cauuugugaaauga

SEQ ID NO: 1668716 - RNA, 16 nt, Human
cauuugugaaaugaug

SEQ ID NO: 1668717 - RNA, 17 nt, Human
cauuugucacacacuuu

SEQ ID NO: 1668718 - RNA, 15 nt, Human
cauuuggauuggaug

SEQ ID NO: 1668719 - RNA, 18 nt, Human
cauugguucuuguauuaa

SEQ ID NO: 1668720 - RNA, 22 nt, Human
cauugguucuuguauuaagaau

SEQ ID NO: 1668721 - RNA, 21 nt, Human
cugugcugcccugcccaccug

SEQ ID NO: 1668722 - RNA, 17 nt, Human
cugugucagcauagaag

SEQ ID NO: 1668723 - RNA, 19 nt, Human
cugugucagcauagaagua

SEQ ID NO: 1668724 - RNA, 15 nt, Human
cugugcugcccugcc

SEQ ID NO: 1668725 - RNA, 17 nt, Human
cugugcugcccugccca

SEQ ID NO: 1668726 - RNA, 18 nt, Human
cugugcugcccugcccac

SEQ ID NO: 1668727 - RNA, 19 nt, Human
cugugcugcccugcccacc

SEQ ID NO: 1668728 - RNA, 13 nt, Human
cuguuauaaucuu

SEQ ID NO: 1668729 - RNA, 19 nt, Human
cuguuauaaucuuucacag

SEQ ID NO: 1668730 - RNA, 12 nt, Human
cugugcugcccu

SEQ ID NO: 1668731 - RNA, 13 nt, Human
cugugcugcccug

SEQ ID NO: 1668732 - RNA, 14 nt, Human
cugugcugcccugc

SEQ ID NO: 1668733 - RNA, 20 nt, Human
cugucaauuacaggaaguac

SEQ ID NO: 1668734 - RNA, 23 nt, Human
cugucaauuacaggaaguacugg

SEQ ID NO: 1668735 - RNA, 16 nt, Human
cugucgcccagucugg

SEQ ID NO: 1668736 - RNA, 13 nt, Human
cuguagaguggga

SEQ ID NO: 1668737 - RNA, 13 nt, Human
cugguuuccugcc

SEQ ID NO: 1668738 - RNA, 14 nt, Human
cugguuuccugccc

SEQ ID NO: 1668739 - RNA, 16 nt, Human
cugguuuccugcccug

SEQ ID NO: 1668740 - RNA, 22 nt, Human
cuggugacaugucuuuucuugc

SEQ ID NO: 1668741 - RNA, 16 nt, Human
cuuaccagcagagcac

SEQ ID NO: 1668742 - RNA, 22 nt, Human
cuuagcucauucuccuuguguu

SEQ ID NO: 1668743 - RNA, 13 nt, Human
cuuagcugggaga

SEQ ID NO: 1668744 - RNA, 23 nt, Human
cuuagcucauucuccuuguguua

SEQ ID NO: 1668745 - RNA, 19 nt, Human
cuuagggaaggauacaaaa

SEQ ID NO: 1668746 - RNA, 21 nt, Human
cuuagggaaggauacaaaagc

SEQ ID NO: 1668747 - RNA, 22 nt, Human
cuuaaaguugaauuuauuggcu

SEQ ID NO: 1668748 - RNA, 13 nt, Human
cuuaaauaauaaa

SEQ ID NO: 1668749 - RNA, 13 nt, Human
cuuaaauaaugug

SEQ ID NO: 1668750 - RNA, 22 nt, Human
cuuaaauaauaaagaucaugua

SEQ ID NO: 1668751 - RNA, 15 nt, Human
cuuaaaguugaauuu

SEQ ID NO: 1668752 - RNA, 18 nt, Human
cuuaaaguugaauuuauu

SEQ ID NO: 1668753 - RNA, 14 nt, Human
cuuaaaacaacacu

SEQ ID NO: 1668754 - RNA, 21 nt, Human
cuuacauuagcaguuugcuuu

SEQ ID NO: 1668755 - RNA, 22 nt, Human
cuuacauuagcaguuugcuuug

SEQ ID NO: 1668756 - RNA, 15 nt, Human
cuuaccagcagagca

SEQ ID NO: 1668757 - RNA, 12 nt, Human
cuguuuaagaga

SEQ ID NO: 1668758 - RNA, 14 nt, Human
cuguuuaagagaca

SEQ ID NO: 1668759 - RNA, 14 nt, Human
cuguuggcuggggg

SEQ ID NO: 1668760 - RNA, 19 nt, Human
cuguuggcugggggccuca

SEQ ID NO: 1668761 - RNA, 22 nt, Human
cuguuggcugggggccucagug

SEQ ID NO: 1668762 - RNA, 12 nt, Human
cuguucacagcc

SEQ ID NO: 1668763 - RNA, 14 nt, Human
cuguuauuuauaau

SEQ ID NO: 1668764 - RNA, 20 nt, Human
cuguuauuuauaaucacuuu

SEQ ID NO: 1668765 - RNA, 23 nt, Human
cugccuguugggccaggagccuc

SEQ ID NO: 1668766 - RNA, 21 nt, Human
cugccuguugggccaggagcc

SEQ ID NO: 1668767 - RNA, 22 nt, Human
cugccuguugggccaggagccu

SEQ ID NO: 1668768 - RNA, 17 nt, Human
cugcuaucaaagagguu

SEQ ID NO: 1668769 - RNA, 18 nt, Human
cugcugacuguuuucucu

SEQ ID NO: 1668770 - RNA, 21 nt, Human
cugcugacuguuuucucuuga

SEQ ID NO: 1668771 - RNA, 13 nt, Human
cugccuccucuuc

SEQ ID NO: 1668772 - RNA, 14 nt, Human
cugccuccucuuca

SEQ ID NO: 1668773 - RNA, 15 nt, Human
cugccuccucuucaa

SEQ ID NO: 1668774 - RNA, 24 nt, Human
cugccuccucuucaacugaccagc

SEQ ID NO: 1668775 - RNA, 23 nt, Human
cugccucucccaucacuucccua

SEQ ID NO: 1668776 - RNA, 15 nt, Human
cugccucucccauca

SEQ ID NO: 1668777 - RNA, 22 nt, Human
cugccucucccaucacuucccu

SEQ ID NO: 1668778 - RNA, 17 nt, Human
cugccuguucagcucca

SEQ ID NO: 1668779 - RNA, 18 nt, Human
cugccuguucagcuccag

SEQ ID NO: 1668780 - RNA, 20 nt, Human
cugccuguugggccaggagc

SEQ ID NO: 1668781 - RNA, 19 nt, Human
cugccuguucagcuccagc

SEQ ID NO: 1668782 - RNA, 20 nt, Human
cugaucugaugcaagcaaga

SEQ ID NO: 1668783 - RNA, 19 nt, Human
cugcuucaaauauuucccu

SEQ ID NO: 1668784 - RNA, 12 nt, Human
cugcuucaagga

SEQ ID NO: 1668785 - RNA, 13 nt, Human
cugcuucaaggau

SEQ ID NO: 1668786 - RNA, 21 nt, Human
cugcuucaaggauccugagcc

SEQ ID NO: 1668787 - RNA, 22 nt, Human
cugcuucaaggauccugagcca

SEQ ID NO: 1668788 - RNA, 23 nt, Human
cugcuucaaggauccugagccag

SEQ ID NO: 1668789 - RNA, 20 nt, Human
cugcuuuugucuaugggacu

SEQ ID NO: 1668790 - RNA, 14 nt, Human
cugcuucaaauauu

SEQ ID NO: 1668791 - RNA, 14 nt, Human
cuggagaaaaugga

SEQ ID NO: 1668792 - RNA, 14 nt, Human
cuggaagcacagcu

SEQ ID NO: 1668793 - RNA, 21 nt, Human
cugcuuuugucuaugggacuc

SEQ ID NO: 1668794 - RNA, 19 nt, Human
cugcuuuuuaaagaaugcu

SEQ ID NO: 1668795 - RNA, 15 nt, Human
cuggggccaggcugg

SEQ ID NO: 1668796 - RNA, 18 nt, Human
cuggguucacugcaaccu

SEQ ID NO: 1668797 - RNA, 20 nt, Human
cuggguucacugcaaccucc

SEQ ID NO: 1668798 - RNA, 12 nt, Human
cugggccagaau

SEQ ID NO: 1668799 - RNA, 14 nt, Human
cugggccagaauuu

SEQ ID NO: 1668800 - RNA, 12 nt, Human
cugggcagaagg

SEQ ID NO: 1668801 - RNA, 15 nt, Human
cugggcagaaggaag

SEQ ID NO: 1668802 - RNA, 16 nt, Human
cugggcagaaggaaga

SEQ ID NO: 1668803 - RNA, 20 nt, Human
cugggcaccggggccucgga

SEQ ID NO: 1668804 - RNA, 14 nt, Human
cuggcagaggaggg

SEQ ID NO: 1668805 - RNA, 19 nt, Human
cuggcagaguugaagacag

SEQ ID NO: 1668806 - RNA, 11 nt, Human
cuggcagccca

SEQ ID NO: 1668807 - RNA, 12 nt, Human
cuggcagccccu

SEQ ID NO: 1668808 - RNA, 21 nt, Human
cuggcagccgugccuucagcu

SEQ ID NO: 1668809 - RNA, 22 nt, Human
cuggcagccgugccuucagcuc

SEQ ID NO: 1668810 - RNA, 20 nt, Human
cuggcagccgugccuucagc

SEQ ID NO: 1668811 - RNA, 13 nt, Human
cuggcagccccug

SEQ ID NO: 1668812 - RNA, 17 nt, Human
cuggcagaguugaagac

SEQ ID NO: 1668813 - RNA, 18 nt, Human
cuggcagaguugaagaca

SEQ ID NO: 1668814 - RNA, 15 nt, Human
cuggcccugcccugg

SEQ ID NO: 1668815 - RNA, 16 nt, Human
cuggccgggagccuga

SEQ ID NO: 1668816 - RNA, 14 nt, Human
cuggccuagcauac

SEQ ID NO: 1668817 - RNA, 11 nt, Human
cuggcccugcc

SEQ ID NO: 1668818 - RNA, 13 nt, Human
cuggcccugcccu

SEQ ID NO: 1668819 - RNA, 14 nt, Human
cuggcccugcccug

SEQ ID NO: 1668820 - RNA, 22 nt, Human
cuggccccucagggucccuggu

SEQ ID NO: 1668821 - RNA, 11 nt, Human
cugggacacag

SEQ ID NO: 1668822 - RNA, 17 nt, Human
gaacacauaauucagga

SEQ ID NO: 1668823 - RNA, 20 nt, Human
gaacacauaauucaggaagc

SEQ ID NO: 1668824 - RNA, 18 nt, Human
gaacacuccaauuaagga

SEQ ID NO: 1668825 - RNA, 20 nt, Human
gaacacuccaauuaaggauu

SEQ ID NO: 1668826 - RNA, 15 nt, Human
gaaagggcccagaga

SEQ ID NO: 1668827 - RNA, 16 nt, Human
gaaagggcccagagag

SEQ ID NO: 1668828 - RNA, 12 nt, Human
gaaaucuuuaaa

SEQ ID NO: 1668829 - RNA, 15 nt, Human
gaaaucuuuaaaaaa

SEQ ID NO: 1668830 - RNA, 11 nt, Human
gaaaugaaaaa

SEQ ID NO: 1668831 - RNA, 17 nt, Human
gaaaugaaagcagggac

SEQ ID NO: 1668832 - RNA, 13 nt, Human
gaaagggcccaga

SEQ ID NO: 1668833 - RNA, 16 nt, Human
gaaaggcuccaggagc

SEQ ID NO: 1668834 - RNA, 13 nt, Human
gaaaggcuccagg

SEQ ID NO: 1668835 - RNA, 14 nt, Human
gaaaggcuccagga

SEQ ID NO: 1668836 - RNA, 15 nt, Human
gaaaggcuccaggag

SEQ ID NO: 1668837 - RNA, 17 nt, Human
gaaacuggauuaaacuu

SEQ ID NO: 1668838 - RNA, 13 nt, Human
gaaacuggauuaa

SEQ ID NO: 1668839 - RNA, 21 nt, Human
gaaacugcuuguuuccuagca

SEQ ID NO: 1668840 - RNA, 18 nt, Human
gaaagaaaaucaggcugg

SEQ ID NO: 1668841 - RNA, 17 nt, Human
gaaacuggguuccugca

SEQ ID NO: 1668842 - RNA, 19 nt, Human
gaaaacuuguauuaugugu

SEQ ID NO: 1668843 - RNA, 22 nt, Human
gaaaacuuguauuauguguguu

SEQ ID NO: 1668844 - RNA, 15 nt, Human
gaaaaaaggaagugg

SEQ ID NO: 1668845 - RNA, 23 nt, Human
gaaaagaaaaaugagccuggcaa

SEQ ID NO: 1668846 - RNA, 21 nt, Human
gaaaacuuuaugcuaagugaa

SEQ ID NO: 1668847 - RNA, 14 nt, Human
gaaaagacuccaaa

SEQ ID NO: 1668848 - RNA, 18 nt, Human
gaaaagacuccaaagaaa

SEQ ID NO: 1668849 - RNA, 16 nt, Human
gaaaagacuccaaaga

SEQ ID NO: 1668850 - RNA, 17 nt, Human
gaaaagacuccaaagaa

SEQ ID NO: 1668851 - RNA, 12 nt, Human
gaaaaugugugu

SEQ ID NO: 1668852 - RNA, 15 nt, Human
gaaaaugugugugug

SEQ ID NO: 1668853 - RNA, 21 nt, Human
gaaacaagucagucauucaga

SEQ ID NO: 1668854 - RNA, 17 nt, Human
gaagcacagugaucaag

SEQ ID NO: 1668855 - RNA, 14 nt, Human
gaagcacaugccuc

SEQ ID NO: 1668856 - RNA, 22 nt, Human
gaagcacaugccucucucaggc

SEQ ID NO: 1668857 - RNA, 13 nt, Human
gaagcacagcuuc

SEQ ID NO: 1668858 - RNA, 14 nt, Human
gaagcacagcuuca

SEQ ID NO: 1668859 - RNA, 16 nt, Human
gaagacucauucuucu

SEQ ID NO: 1668860 - RNA, 17 nt, Human
gaagacucauucuucug

SEQ ID NO: 1668861 - RNA, 18 nt, Human
gaagacucauucuucugu

SEQ ID NO: 1668862 - RNA, 16 nt, Human
gaagcaccauaacuuu

SEQ ID NO: 1668863 - RNA, 21 nt, Human
gaagacacugaugggcaaccc

SEQ ID NO: 1668864 - RNA, 16 nt, Human
gaagacacugaugggc

SEQ ID NO: 1668865 - RNA, 13 nt, Human
gaagacagagcua

SEQ ID NO: 1668866 - RNA, 15 nt, Human
gaagacagagcuaca

SEQ ID NO: 1668867 - RNA, 12 nt, Human
gaagacagcucu

SEQ ID NO: 1668868 - RNA, 13 nt, Human
gaagacagcucuu

SEQ ID NO: 1668869 - RNA, 14 nt, Human
gaagacagcucuua

SEQ ID NO: 1668870 - RNA, 15 nt, Human
gaagacagcucuuau

SEQ ID NO: 1668871 - RNA, 17 nt, Human
gaacugauguaaguaaa

SEQ ID NO: 1668872 - RNA, 13 nt, Human
gaacugaaaucau

SEQ ID NO: 1668873 - RNA, 15 nt, Human
gaacuccuggccuca

SEQ ID NO: 1668874 - RNA, 14 nt, Human
gaacuccuggccuc

SEQ ID NO: 1668875 - RNA, 14 nt, Human
gaacuccugaccuc

SEQ ID NO: 1668876 - RNA, 13 nt, Human
gaacuccuggccu

SEQ ID NO: 1668877 - RNA, 17 nt, Human
gaacccgggaggcagag

SEQ ID NO: 1668878 - RNA, 19 nt, Human
gaacccgggaggcagaggu

SEQ ID NO: 1668879 - RNA, 16 nt, Human
gaacccaaguccaagc

SEQ ID NO: 1668880 - RNA, 17 nt, Human
gaacccaaguccaagca

SEQ ID NO: 1668881 - RNA, 22 nt, Human
gaaccauggucggaaaacaugc

SEQ ID NO: 1668882 - RNA, 23 nt, Human
gaaccaccacacccagcccacuu

SEQ ID NO: 1668883 - RNA, 18 nt, Human
gaaccaccacacccagcc

SEQ ID NO: 1668884 - RNA, 20 nt, Human
gaaccaccacacccagccca

SEQ ID NO: 1668885 - RNA, 21 nt, Human
gaaccaccacacccagcccac

SEQ ID NO: 1668886 - RNA, 22 nt, Human
gaaccaccacacccagcccacu

SEQ ID NO: 1668887 - RNA, 14 nt, Human
cuugucucagauuu

SEQ ID NO: 1668888 - RNA, 17 nt, Human
cuugucucagauuuuau

SEQ ID NO: 1668889 - RNA, 13 nt, Human
cuugucucagauu

SEQ ID NO: 1668890 - RNA, 19 nt, Human
cuuggugucgggcaugaca

SEQ ID NO: 1668891 - RNA, 20 nt, Human
cuuggugucgggcaugacac

SEQ ID NO: 1668892 - RNA, 18 nt, Human
cuugucucagauuuuauu

SEQ ID NO: 1668893 - RNA, 19 nt, Human
cuugucuuuggacccugag

SEQ ID NO: 1668894 - RNA, 18 nt, Human
cuugucuuuggacccuga

SEQ ID NO: 1668895 - RNA, 13 nt, Human
cuugucuuuggac

SEQ ID NO: 1668896 - RNA, 15 nt, Human
cuugucuuuggaccc

SEQ ID NO: 1668897 - RNA, 22 nt, Human
cuugguagaagcccuucuaccu

SEQ ID NO: 1668898 - RNA, 19 nt, Human
cuuggucugugagaugcua

SEQ ID NO: 1668899 - RNA, 14 nt, Human
cuugguccugcugc

SEQ ID NO: 1668900 - RNA, 16 nt, Human
cuuggucugugagaug

SEQ ID NO: 1668901 - RNA, 23 nt, Human
cuuuaaugucacaggcaggucca

SEQ ID NO: 1668902 - RNA, 14 nt, Human
cuuucagauacugg

SEQ ID NO: 1668903 - RNA, 20 nt, Human
cuuucacccuuuucuguuug

SEQ ID NO: 1668904 - RNA, 14 nt, Human
cuuucacccuuuuc

SEQ ID NO: 1668905 - RNA, 15 nt, Human
cuuucacccuuuucu

SEQ ID NO: 1668906 - RNA, 15 nt, Human
cuuucagauacugga

SEQ ID NO: 1668907 - RNA, 17 nt, Human
cuuucagauacuggauu

SEQ ID NO: 1668908 - RNA, 22 nt, Human
cuuucagauacuggauuguacu

SEQ ID NO: 1668909 - RNA, 18 nt, Human
cuuugacgccaucccagc

SEQ ID NO: 1668910 - RNA, 16 nt, Human
cuuugacgccauccca

SEQ ID NO: 1668911 - RNA, 17 nt, Human
cuuugacgccaucccag

SEQ ID NO: 1668912 - RNA, 17 nt, Human
cuuucuacccagcgagc

SEQ ID NO: 1668913 - RNA, 15 nt, Human
cuuucuacccagcga

SEQ ID NO: 1668914 - RNA, 16 nt, Human
cuuucuacccagcgag

SEQ ID NO: 1668915 - RNA, 14 nt, Human
cuuuguaaugaaaa

SEQ ID NO: 1668916 - RNA, 15 nt, Human
cuuuguaaugaaaac

SEQ ID NO: 1668917 - RNA, 16 nt, Human
cuuuguaaugaaaacc

SEQ ID NO: 1668918 - RNA, 12 nt, Human
cuuuguaugcac

SEQ ID NO: 1668919 - RNA, 17 nt, Human
cuuuguauucucuccug

SEQ ID NO: 1668920 - RNA, 22 nt, Human
cuuuguauucucuccuguaccu

SEQ ID NO: 1668921 - RNA, 21 nt, Human
cuuuuauaaacuuuaccuuuu

SEQ ID NO: 1668922 - RNA, 20 nt, Human
cuuuuauaaacuuuaccuuu

SEQ ID NO: 1668923 - RNA, 15 nt, Human
cuucugacccaugcu

SEQ ID NO: 1668924 - RNA, 13 nt, Human
cuucuucagagac

SEQ ID NO: 1668925 - RNA, 14 nt, Human
cuucuucagagacu

SEQ ID NO: 1668926 - RNA, 18 nt, Human
cuucuucagagacuccug

SEQ ID NO: 1668927 - RNA, 20 nt, Human
cuucucacauuuauauuuuu

SEQ ID NO: 1668928 - RNA, 13 nt, Human
cuucucacauuua

SEQ ID NO: 1668929 - RNA, 13 nt, Human
cuucuaaguaaaa

SEQ ID NO: 1668930 - RNA, 17 nt, Human
cuucuaaguaaaaccac

SEQ ID NO: 1668931 - RNA, 21 nt, Human
cuucuaaguaaaaccacagca

SEQ ID NO: 1668932 - RNA, 13 nt, Human
cuuccucuccacu

SEQ ID NO: 1668933 - RNA, 14 nt, Human
cuuccucuccacug

SEQ ID NO: 1668934 - RNA, 15 nt, Human
cuuccucuccacugc

SEQ ID NO: 1668935 - RNA, 14 nt, Human
cuuccucugagccu

SEQ ID NO: 1668936 - RNA, 15 nt, Human
cuuccucugagccuu

SEQ ID NO: 1668937 - RNA, 16 nt, Human
cuuccucugaggcuga

SEQ ID NO: 1668938 - RNA, 21 nt, Human
cuuccucuuuccaucuacccu

SEQ ID NO: 1668939 - RNA, 22 nt, Human
cuuccucugaggcugaaauuca

SEQ ID NO: 1668940 - RNA, 22 nt, Human
cuuccucuuuccaucuacccuc

SEQ ID NO: 1668941 - RNA, 13 nt, Human
cuuccuccuggug

SEQ ID NO: 1668942 - RNA, 18 nt, Human
cuugaauuguaaggaaug

SEQ ID NO: 1668943 - RNA, 16 nt, Human
cuugacaucaacugca

SEQ ID NO: 1668944 - RNA, 22 nt, Human
cuugauauccucuuugagugaa

SEQ ID NO: 1668945 - RNA, 17 nt, Human
cuugauauccucuuuga

SEQ ID NO: 1668946 - RNA, 18 nt, Human
cuugauguguuaucucuu

SEQ ID NO: 1668947 - RNA, 13 nt, Human
cuugauuaaaagu

SEQ ID NO: 1668948 - RNA, 12 nt, Human
cuugauucauaa

SEQ ID NO: 1668949 - RNA, 12 nt, Human
cuugcaaaguau

SEQ ID NO: 1668950 - RNA, 23 nt, Human
cuuggauuguccccgacccuugc

SEQ ID NO: 1668951 - RNA, 24 nt, Human
cuuggauuguccccgacccuugcc

SEQ ID NO: 1668952 - RNA, 14 nt, Human
gccaacuauggccu

SEQ ID NO: 1668953 - RNA, 15 nt, Human
gccaacuauggccug

SEQ ID NO: 1668954 - RNA, 19 nt, Human
gccaacuauggccugugga

SEQ ID NO: 1668955 - RNA, 14 nt, Human
gccaagaauucuua

SEQ ID NO: 1668956 - RNA, 18 nt, Human
gccaagaauucuuaaaua

SEQ ID NO: 1668957 - RNA, 15 nt, Human
gcauuuaaaagauac

SEQ ID NO: 1668958 - RNA, 12 nt, Human
gcauuuaaaaga

SEQ ID NO: 1668959 - RNA, 16 nt, Human
gcauuugaaaauuuug

SEQ ID NO: 1668960 - RNA, 14 nt, Human
gcauuugaaaauuu

SEQ ID NO: 1668961 - RNA, 19 nt, Human
gcaugggaaugaaugucag

SEQ ID NO: 1668962 - RNA, 16 nt, Human
gcaugggaaugaaugu

SEQ ID NO: 1668963 - RNA, 23 nt, Human
gcaugucccuaccgagucucuuc

SEQ ID NO: 1668964 - RNA, 17 nt, Human
gcaugugaugagaggaa

SEQ ID NO: 1668965 - RNA, 18 nt, Human
gcaugugaugagaggaaa

SEQ ID NO: 1668966 - RNA, 16 nt, Human
gcauuguaaaugugcu

SEQ ID NO: 1668967 - RNA, 17 nt, Human
gcauccuggcacccggc

SEQ ID NO: 1668968 - RNA, 21 nt, Human
gcauccuggcacccggccccu

SEQ ID NO: 1668969 - RNA, 13 nt, Human
gcaucgcaaugua

SEQ ID NO: 1668970 - RNA, 22 nt, Human
gcauccuggcacccggccccug

SEQ ID NO: 1668971 - RNA, 23 nt, Human
gcauccuggcacccggccccugc

SEQ ID NO: 1668972 - RNA, 14 nt, Human
gcauggccaggugg

SEQ ID NO: 1668973 - RNA, 17 nt, Human
gcauggccagguggcca

SEQ ID NO: 1668974 - RNA, 13 nt, Human
gcauggccaggug

SEQ ID NO: 1668975 - RNA, 22 nt, Human
gccaagcaccuagccucgcucu

SEQ ID NO: 1668976 - RNA, 19 nt, Human
gccaaggccaaaggaagca

SEQ ID NO: 1668977 - RNA, 17 nt, Human
gccaaggccaaaggaag

SEQ ID NO: 1668978 - RNA, 11 nt, Human
gccaaggccaa

SEQ ID NO: 1668979 - RNA, 18 nt, Human
gcaggcucucaggccagc

SEQ ID NO: 1668980 - RNA, 17 nt, Human
gcaggcucucaggccag

SEQ ID NO: 1668981 - RNA, 13 nt, Human
gcaggcuggcccu

SEQ ID NO: 1668982 - RNA, 22 nt, Human
gcagggaaacagcuaaugggac

SEQ ID NO: 1668983 - RNA, 19 nt, Human
gcagcuugaggguugggcu

SEQ ID NO: 1668984 - RNA, 21 nt, Human
gcagcuugaggguugggcugg

SEQ ID NO: 1668985 - RNA, 22 nt, Human
gcaggcucgggcuccccagccc

SEQ ID NO: 1668986 - RNA, 12 nt, Human
gcaggcucucag

SEQ ID NO: 1668987 - RNA, 13 nt, Human
gcaggcucucagg

SEQ ID NO: 1668988 - RNA, 14 nt, Human
gcaggcucucaggc

SEQ ID NO: 1668989 - RNA, 15 nt, Human
gcaggcucucaggcc

SEQ ID NO: 1668990 - RNA, 16 nt, Human
gcaggcucucaggcca

SEQ ID NO: 1668991 - RNA, 22 nt, Human
gcagcugcgguccacccaggag

SEQ ID NO: 1668992 - RNA, 23 nt, Human
gcagcugcgguccacccaggagc

SEQ ID NO: 1668993 - RNA, 13 nt, Human
gcagcugcuuuug

SEQ ID NO: 1668994 - RNA, 20 nt, Human
gcagcugcuuuugucuaugg

SEQ ID NO: 1668995 - RNA, 16 nt, Human
gcagcuugaggguugg

SEQ ID NO: 1668996 - RNA, 15 nt, Human
gcagcuuauucacaa

SEQ ID NO: 1668997 - RNA, 16 nt, Human
gcacuuuguucuggcu

SEQ ID NO: 1668998 - RNA, 22 nt, Human
gcaguugaaaagacuccaaaga

SEQ ID NO: 1668999 - RNA, 21 nt, Human
gcaguugagaaaauuugaaug

SEQ ID NO: 1669000 - RNA, 13 nt, Human
gcauaacauaaau

SEQ ID NO: 1669001 - RNA, 15 nt, Human
gcauaacauaaaucu

SEQ ID NO: 1669002 - RNA, 15 nt, Human
gcauaaaaauuagcc

SEQ ID NO: 1669003 - RNA, 14 nt, Human
gcaguugccaguca

SEQ ID NO: 1669004 - RNA, 23 nt, Human
gcaguugccagucaccccggcca

SEQ ID NO: 1669005 - RNA, 16 nt, Human
gcauaccacuuuuguu

SEQ ID NO: 1669006 - RNA, 15 nt, Human
gcauaccacuuuugu

SEQ ID NO: 1669007 - RNA, 14 nt, Human
gaugaugacuaugg

SEQ ID NO: 1669008 - RNA, 23 nt, Human
gaugcuucucacugccaugccag

SEQ ID NO: 1669009 - RNA, 23 nt, Human
gauggaggaaaaccaagccgugg

SEQ ID NO: 1669010 - RNA, 16 nt, Human
gaugcuuguacauaau

SEQ ID NO: 1669011 - RNA, 14 nt, Human
gaugcuuguacaua

SEQ ID NO: 1669012 - RNA, 18 nt, Human
gaugucccaacuuguaaa

SEQ ID NO: 1669013 - RNA, 17 nt, Human
gaugucccaacuuguaa

SEQ ID NO: 1669014 - RNA, 17 nt, Human
gauguagaggagaaacu

SEQ ID NO: 1669015 - RNA, 20 nt, Human
gaucuggguucacugcaacc

SEQ ID NO: 1669016 - RNA, 22 nt, Human
gaguugauagcacagacccugc

SEQ ID NO: 1669017 - RNA, 18 nt, Human
gaucuggguucacugcaa

SEQ ID NO: 1669018 - RNA, 17 nt, Human
gcaaaaauauuuuauga

SEQ ID NO: 1669019 - RNA, 22 nt, Human
gcaaaaauauuuuaugauccag

SEQ ID NO: 1669020 - RNA, 23 nt, Human
gcaaaaauauuuuaugauccagc

SEQ ID NO: 1669021 - RNA, 16 nt, Human
gcaaaaauauuuuaug

SEQ ID NO: 1669022 - RNA, 22 nt, Human
gauuuuuuuuuccuucagugcc

SEQ ID NO: 1669023 - RNA, 23 nt, Human
gauuuuuuuuuccuucagugccu

SEQ ID NO: 1669024 - RNA, 13 nt, Human
gauuucacucucc

SEQ ID NO: 1669025 - RNA, 16 nt, Human
gauuucacucuccuug

SEQ ID NO: 1669026 - RNA, 15 nt, Human
gauuucagcucacug

SEQ ID NO: 1669027 - RNA, 17 nt, Human
gauuucagcucacugca

SEQ ID NO: 1669028 - RNA, 20 nt, Human
gauuucagcucacugcaacc

SEQ ID NO: 1669029 - RNA, 17 nt, Human
gauuucacucuccuugg

SEQ ID NO: 1669030 - RNA, 18 nt, Human
gauuucacucuccuuggu

SEQ ID NO: 1669031 - RNA, 21 nt, Human
gauucuuaaaguugaauuuau

SEQ ID NO: 1669032 - RNA, 21 nt, Human
gauucuucugcuucagccucc

SEQ ID NO: 1669033 - RNA, 16 nt, Human
gauucuuaaaguugaa

SEQ ID NO: 1669034 - RNA, 17 nt, Human
gauucuuaaaguugaau

SEQ ID NO: 1669035 - RNA, 23 nt, Human
gauucuuauggacaaugacccag

SEQ ID NO: 1669036 - RNA, 23 nt, Human
gauuuaacagaaauguacagcaa

SEQ ID NO: 1669037 - RNA, 20 nt, Human
gauuuaacagaaauguacag

SEQ ID NO: 1669038 - RNA, 20 nt, Human
gauucuccugccucagccuc

SEQ ID NO: 1669039 - RNA, 21 nt, Human
gauucuccugccucagccucc

SEQ ID NO: 1669040 - RNA, 15 nt, Human
gauucuuaaaguuga

SEQ ID NO: 1669041 - RNA, 19 nt, Human
gauucuccugccucagccu

SEQ ID NO: 1669042 - RNA, 14 nt, Human
gaugucuucauacc

SEQ ID NO: 1669043 - RNA, 18 nt, Human
gaugucuucauaccuaca

SEQ ID NO: 1669044 - RNA, 15 nt, Human
gcaaaagaugcuucu

SEQ ID NO: 1669045 - RNA, 18 nt, Human
gcaacccccagccugcua

SEQ ID NO: 1669046 - RNA, 16 nt, Human
gcaaaagaugcuucuc

SEQ ID NO: 1669047 - RNA, 22 nt, Human
gcaacccuggugaccagcacca

SEQ ID NO: 1669048 - RNA, 18 nt, Human
gcaaccuccgccucuugg

SEQ ID NO: 1669049 - RNA, 19 nt, Human
gcaaccuccgccucuuggg

SEQ ID NO: 1669050 - RNA, 12 nt, Human
gcacacaccaga

SEQ ID NO: 1669051 - RNA, 14 nt, Human
gcacacaccagagc

SEQ ID NO: 1669052 - RNA, 15 nt, Human
gcacacaccagagcc

SEQ ID NO: 1669053 - RNA, 16 nt, Human
gcacacaccagagccc

SEQ ID NO: 1669054 - RNA, 17 nt, Human
gcacacaccagagccca

SEQ ID NO: 1669055 - RNA, 18 nt, Human
gcacacaccagagcccac

SEQ ID NO: 1669056 - RNA, 19 nt, Human
gcacacaccagagcccacc

SEQ ID NO: 1669057 - RNA, 21 nt, Human
gcaauaaagcagcguuucuau

SEQ ID NO: 1669058 - RNA, 18 nt, Human
gcaauagucaaauugugu

SEQ ID NO: 1669059 - RNA, 11 nt, Human
gcaauaaagca

SEQ ID NO: 1669060 - RNA, 16 nt, Human
gcaauaaaauggguuu

SEQ ID NO: 1669061 - RNA, 17 nt, Human
gcacuccagccugggug

SEQ ID NO: 1669062 - RNA, 12 nt, Human
gcacuccccugc

SEQ ID NO: 1669063 - RNA, 22 nt, Human
gcacuauagccuaggugacaga

SEQ ID NO: 1669064 - RNA, 11 nt, Human
gcacacagcac

SEQ ID NO: 1669065 - RNA, 23 nt, Human
gcacacagcacgggggccaagga

SEQ ID NO: 1669066 - RNA, 20 nt, Human
gcacacaccagagcccaccu

SEQ ID NO: 1669067 - RNA, 11 nt, Human
gcacacauuuu

SEQ ID NO: 1669068 - RNA, 12 nt, Human
gcacacauuuuu

SEQ ID NO: 1669069 - RNA, 14 nt, Human
gcacacauuuuuua

SEQ ID NO: 1669070 - RNA, 17 nt, Human
gcaccuaccaccacgcc

SEQ ID NO: 1669071 - RNA, 18 nt, Human
gcaccuaccaccacgccc

SEQ ID NO: 1669072 - RNA, 18 nt, Human
gcaccggcuggccuggcc

SEQ ID NO: 1669073 - RNA, 17 nt, Human
gcaccggcuggccuggc

SEQ ID NO: 1669074 - RNA, 15 nt, Human
gcaccggcuggccug

SEQ ID NO: 1669075 - RNA, 16 nt, Human
gcaccggcuggccugg

SEQ ID NO: 1669076 - RNA, 12 nt, Human
gcaccuccugcc

SEQ ID NO: 1669077 - RNA, 20 nt, Human
gagcugccuguucagcucca

SEQ ID NO: 1669078 - RNA, 21 nt, Human
gagcugugagaaggguguugu

SEQ ID NO: 1669079 - RNA, 17 nt, Human
gagcggagaaaggaagg

SEQ ID NO: 1669080 - RNA, 15 nt, Human
gagcugccuguucag

SEQ ID NO: 1669081 - RNA, 16 nt, Human
gagcugccuguucagc

SEQ ID NO: 1669082 - RNA, 19 nt, Human
gagcugccuguucagcucc

SEQ ID NO: 1669083 - RNA, 17 nt, Human
gagcuguucacagccag

SEQ ID NO: 1669084 - RNA, 12 nt, Human
gagccuuccagg

SEQ ID NO: 1669085 - RNA, 13 nt, Human
gagccuuccaggg

SEQ ID NO: 1669086 - RNA, 13 nt, Human
gagcgacagugag

SEQ ID NO: 1669087 - RNA, 15 nt, Human
gagcgacagugagac

SEQ ID NO: 1669088 - RNA, 20 nt, Human
gagcaucaggccaggcccuc

SEQ ID NO: 1669089 - RNA, 22 nt, Human
gagcaucaggccaggcccucug

SEQ ID NO: 1669090 - RNA, 12 nt, Human
gaggggaacaga

SEQ ID NO: 1669091 - RNA, 12 nt, Human
gagggcuccaga

SEQ ID NO: 1669092 - RNA, 13 nt, Human
gagggcuccagac

SEQ ID NO: 1669093 - RNA, 14 nt, Human
gagggcuccagaca

SEQ ID NO: 1669094 - RNA, 15 nt, Human
gagggcuccagacac

SEQ ID NO: 1669095 - RNA, 14 nt, Human
gaggcugccucucc

SEQ ID NO: 1669096 - RNA, 14 nt, Human
gaggcucuggagcc

SEQ ID NO: 1669097 - RNA, 19 nt, Human
gaggcucuggagcccacug

SEQ ID NO: 1669098 - RNA, 15 nt, Human
gaggcucugcccuug

SEQ ID NO: 1669099 - RNA, 17 nt, Human
gaggcucugcccuuggu

SEQ ID NO: 1669100 - RNA, 12 nt, Human
gaggcucugccc

SEQ ID NO: 1669101 - RNA, 13 nt, Human
gaggcucugcccu

SEQ ID NO: 1669102 - RNA, 14 nt, Human
gaggcucugcccuu

SEQ ID NO: 1669103 - RNA, 20 nt, Human
gaggccagagacacaagccu

SEQ ID NO: 1669104 - RNA, 18 nt, Human
gagucagaaguuucugcc

SEQ ID NO: 1669105 - RNA, 14 nt, Human
gagugagacucugu

SEQ ID NO: 1669106 - RNA, 18 nt, Human
gagugagacucugucuca

SEQ ID NO: 1669107 - RNA, 24 nt, Human
gagugagcacuaaggugugcucug

SEQ ID NO: 1669108 - RNA, 18 nt, Human
gagugcagugagccgaga

SEQ ID NO: 1669109 - RNA, 22 nt, Human
gaguugauacuacaguuuguua

SEQ ID NO: 1669110 - RNA, 21 nt, Human
gaguugauagcacagacccug

SEQ ID NO: 1669111 - RNA, 19 nt, Human
gaguugauacuacaguuug

SEQ ID NO: 1669112 - RNA, 18 nt, Human
gagugccuuacacaaugg

SEQ ID NO: 1669113 - RNA, 17 nt, Human
gaggugggauccuccag

SEQ ID NO: 1669114 - RNA, 14 nt, Human
gagucacuggaaca

SEQ ID NO: 1669115 - RNA, 21 nt, Human
gagucacuggaacacuaauga

SEQ ID NO: 1669116 - RNA, 15 nt, Human
gaggugggauccucc

SEQ ID NO: 1669117 - RNA, 16 nt, Human
gaggugggauccucca

SEQ ID NO: 1669118 - RNA, 13 nt, Human
gaggugggauccu

SEQ ID NO: 1669119 - RNA, 17 nt, Human
gacaggguuucaccaug

SEQ ID NO: 1669120 - RNA, 20 nt, Human
gacaguauggcagcuuuccu

SEQ ID NO: 1669121 - RNA, 16 nt, Human
gaccaucccugaaggc

SEQ ID NO: 1669122 - RNA, 17 nt, Human
gaccaucccugaaggcc

SEQ ID NO: 1669123 - RNA, 16 nt, Human
gaccauucuccaccug

SEQ ID NO: 1669124 - RNA, 13 nt, Human
gaccccuggcuuu

SEQ ID NO: 1669125 - RNA, 17 nt, Human
gaccauucuccaccugc

SEQ ID NO: 1669126 - RNA, 16 nt, Human
gacccuauugcugcuu

SEQ ID NO: 1669127 - RNA, 21 nt, Human
gaccccuggcuuuucacugcu

SEQ ID NO: 1669128 - RNA, 22 nt, Human
gaccccuggcuuuucacugcug

SEQ ID NO: 1669129 - RNA, 12 nt, Human
gacccggcugcg

SEQ ID NO: 1669130 - RNA, 13 nt, Human
gacccggcugcgu

SEQ ID NO: 1669131 - RNA, 15 nt, Human
gaccaucccugaagg

SEQ ID NO: 1669132 - RNA, 16 nt, Human
gacagcuccuucuguc

SEQ ID NO: 1669133 - RNA, 11 nt, Human
gacagccuggc

SEQ ID NO: 1669134 - RNA, 12 nt, Human
gacagccuggca

SEQ ID NO: 1669135 - RNA, 13 nt, Human
gacagcuccuucu

SEQ ID NO: 1669136 - RNA, 14 nt, Human
gacagcuccuucug

SEQ ID NO: 1669137 - RNA, 15 nt, Human
gacagcuccuucugu

SEQ ID NO: 1669138 - RNA, 21 nt, Human
gacagcccuucuuuccacaga

SEQ ID NO: 1669139 - RNA, 20 nt, Human
gacagaaagcagaacaguga

SEQ ID NO: 1669140 - RNA, 14 nt, Human
gacagaaagcagaa

SEQ ID NO: 1669141 - RNA, 22 nt, Human
gacuauucaaacagucucagga

SEQ ID NO: 1669142 - RNA, 15 nt, Human
gacuauucaaacagu

SEQ ID NO: 1669143 - RNA, 16 nt, Human
gacuauucaaacaguc

SEQ ID NO: 1669144 - RNA, 12 nt, Human
gacgcugugcug

SEQ ID NO: 1669145 - RNA, 13 nt, Human
gacgcugugcugc

SEQ ID NO: 1669146 - RNA, 15 nt, Human
gacgcugugcugccc

SEQ ID NO: 1669147 - RNA, 22 nt, Human
gacugucucaagagggcacugg

SEQ ID NO: 1669148 - RNA, 23 nt, Human
gacugucucaagagggcacuggu

SEQ ID NO: 1669149 - RNA, 21 nt, Human
gacugucucaagagggcacug

SEQ ID NO: 1669150 - RNA, 14 nt, Human
gacugugugcucag

SEQ ID NO: 1669151 - RNA, 16 nt, Human
gacugugugcucagga

SEQ ID NO: 1669152 - RNA, 17 nt, Human
gacugugugcucaggag

SEQ ID NO: 1669153 - RNA, 20 nt, Human
gacugugugcucaggagccc

SEQ ID NO: 1669154 - RNA, 14 nt, Human
gacucaaugcacug

SEQ ID NO: 1669155 - RNA, 17 nt, Human
gacucaaugcacugaca

SEQ ID NO: 1669156 - RNA, 16 nt, Human
gacuguacuccuccca

SEQ ID NO: 1669157 - RNA, 17 nt, Human
gacuguacuccucccag

SEQ ID NO: 1669158 - RNA, 22 nt, Human
gacuguacaaaguagaagucuu

SEQ ID NO: 1669159 - RNA, 16 nt, Human
gacuguuuucucuuga

SEQ ID NO: 1669160 - RNA, 18 nt, Human
gacuguuuucucuugaga

SEQ ID NO: 1669161 - RNA, 14 nt, Human
gacuuuggaaagac

SEQ ID NO: 1669162 - RNA, 14 nt, Human
gacuuuggaaagag

SEQ ID NO: 1669163 - RNA, 19 nt, Human
gacuuuggauaauaaggaa

SEQ ID NO: 1669164 - RNA, 22 nt, Human
gacuuuguuaguuucuccaagc

SEQ ID NO: 1669165 - RNA, 21 nt, Human
gacuuuucuguccgagcuuug

SEQ ID NO: 1669166 - RNA, 23 nt, Human
gacuuuucuguccgagcuuugaa

SEQ ID NO: 1669167 - RNA, 17 nt, Human
gagaagcggcuggcagc

SEQ ID NO: 1669168 - RNA, 15 nt, Human
aaauccacuuuaucu

SEQ ID NO: 1669169 - RNA, 19 nt, Human
aaaucauuucugcaucagc

SEQ ID NO: 1669170 - RNA, 21 nt, Human
aaaucauuucugcaucagcug

SEQ ID NO: 1669171 - RNA, 22 nt, Human
aaaucauuucugcaucagcugc

SEQ ID NO: 1669172 - RNA, 23 nt, Human
aaaucauuucugcaucagcugcu

SEQ ID NO: 1669173 - RNA, 19 nt, Human
aaaucagccguguaaccau

SEQ ID NO: 1669174 - RNA, 12 nt, Human
aaaucagccugc

SEQ ID NO: 1669175 - RNA, 16 nt, Human
aaaucagcugcuacua

SEQ ID NO: 1669176 - RNA, 18 nt, Human
aaaucagccugcuccagc

SEQ ID NO: 1669177 - RNA, 12 nt, Human
aaaucauuucug

SEQ ID NO: 1669178 - RNA, 17 nt, Human
aaauauuauguuaaaac

SEQ ID NO: 1669179 - RNA, 14 nt, Human
aaaucagacuauga

SEQ ID NO: 1669180 - RNA, 21 nt, Human
aaaucagacuaugaaguuuuu

SEQ ID NO: 1669181 - RNA, 15 nt, Human
aaauauuccugcauu

SEQ ID NO: 1669182 - RNA, 20 nt, Human
guacaugaaaacacauuuuu

SEQ ID NO: 1669183 - RNA, 19 nt, Human
guacaugaaaacacauuuu

SEQ ID NO: 1669184 - RNA, 18 nt, Human
guacaugaaaacacauuu

SEQ ID NO: 1669185 - RNA, 17 nt, Human
guacaugaaaacacauu

SEQ ID NO: 1669186 - RNA, 19 nt, Human
guacauggaauaacaugua

SEQ ID NO: 1669187 - RNA, 16 nt, Human
guacaugaaaacacau

SEQ ID NO: 1669188 - RNA, 15 nt, Human
guacaugaaaacaca

SEQ ID NO: 1669189 - RNA, 14 nt, Human
guacaugaaaacac

SEQ ID NO: 1669190 - RNA, 15 nt, Human
aaauccauacauuug

SEQ ID NO: 1669191 - RNA, 18 nt, Human
aaauccauacauuugugu

SEQ ID NO: 1669192 - RNA, 12 nt, Human
guacccacugcu

SEQ ID NO: 1669193 - RNA, 20 nt, Human
guaccaagacuacuagggaa

SEQ ID NO: 1669194 - RNA, 23 nt, Human
guaccaagacuacuagggaaaug

SEQ ID NO: 1669195 - RNA, 11 nt, Human
guagagacagg

SEQ ID NO: 1669196 - RNA, 12 nt, Human
guagagacaggg

SEQ ID NO: 1669197 - RNA, 15 nt, Human
guagagccagggucu

SEQ ID NO: 1669198 - RNA, 18 nt, Human
guagagccagggucucac

SEQ ID NO: 1669199 - RNA, 13 nt, Human
guagagacagggu

SEQ ID NO: 1669200 - RNA, 10 nt, Human
guagagccag

SEQ ID NO: 1669201 - RNA, 11 nt, Human
guagagccagg

SEQ ID NO: 1669202 - RNA, 21 nt, Human
guagaagucuuagauguauau

SEQ ID NO: 1669203 - RNA, 18 nt, Human
guagaagcccuucuaccu

SEQ ID NO: 1669204 - RNA, 20 nt, Human
guagaaauaucugaaaaugu

SEQ ID NO: 1669205 - RNA, 21 nt, Human
guagaaauaucugaaaaugua

SEQ ID NO: 1669206 - RNA, 23 nt, Human
guagaaauaucugaaaauguaug

SEQ ID NO: 1669207 - RNA, 14 nt, Human
guacuccucccagg

SEQ ID NO: 1669208 - RNA, 15 nt, Human
guacuauguaucaau

SEQ ID NO: 1669209 - RNA, 17 nt, Human
guacuauguaucaauga

SEQ ID NO: 1669210 - RNA, 13 nt, Human
guacuauguauca

SEQ ID NO: 1669211 - RNA, 13 nt, Human
guacccacugcuc

SEQ ID NO: 1669212 - RNA, 14 nt, Human
guacccacugcucu

SEQ ID NO: 1669213 - RNA, 18 nt, Human
guacuacaguccucccau

SEQ ID NO: 1669214 - RNA, 19 nt, Human
guacuacaguccucccauc

SEQ ID NO: 1669215 - RNA, 16 nt, Human
guacuggagaaaaugg

SEQ ID NO: 1669216 - RNA, 21 nt, Human
guacuucaaauccuugaagau

SEQ ID NO: 1669217 - RNA, 22 nt, Human
guacuucaaauccuugaagauu

SEQ ID NO: 1669218 - RNA, 15 nt, Human
guacuucaugcuguc

SEQ ID NO: 1669219 - RNA, 23 nt, Human
aaaguacuucuccacccugcucu

SEQ ID NO: 1669220 - RNA, 20 nt, Human
aaaguacuucuccacccugc

SEQ ID NO: 1669221 - RNA, 21 nt, Human
aaaguacuucuccacccugcu

SEQ ID NO: 1669222 - RNA, 18 nt, Human
aaaguaucccuacuguaa

SEQ ID NO: 1669223 - RNA, 18 nt, Human
aaaguauguuagugcaaa

SEQ ID NO: 1669224 - RNA, 19 nt, Human
aaaguacuucuccacccug

SEQ ID NO: 1669225 - RNA, 20 nt, Human
aaaguacacuguuucaaacu

SEQ ID NO: 1669226 - RNA, 20 nt, Human
aaagguauuuuaaucaccaa

SEQ ID NO: 1669227 - RNA, 13 nt, Human
aaaguauuaagca

SEQ ID NO: 1669228 - RNA, 18 nt, Human
aaaguauuaagcauauau

SEQ ID NO: 1669229 - RNA, 19 nt, Human
aaaguauuaagcauauauu

SEQ ID NO: 1669230 - RNA, 20 nt, Human
aaaguauuaagcauauauuu

SEQ ID NO: 1669231 - RNA, 13 nt, Human
aaaguugccuaaa

SEQ ID NO: 1669232 - RNA, 14 nt, Human
aaaguugccuaaau

SEQ ID NO: 1669233 - RNA, 12 nt, Human
aaaguugaauuu

SEQ ID NO: 1669234 - RNA, 23 nt, Human
aaaguucugcagauaaacaguag

SEQ ID NO: 1669235 - RNA, 12 nt, Human
aaaguuuaauau

SEQ ID NO: 1669236 - RNA, 14 nt, Human
aaaguuuaauauua

SEQ ID NO: 1669237 - RNA, 16 nt, Human
aaaguugccuaaaucc

SEQ ID NO: 1669238 - RNA, 17 nt, Human
aaaguugccuaaaucca

SEQ ID NO: 1669239 - RNA, 16 nt, Human
aaaguugguaaaccuu

SEQ ID NO: 1669240 - RNA, 23 nt, Human
aaaguugccuaaauccauuugga

SEQ ID NO: 1669241 - RNA, 17 nt, Human
aaaguugguaaaccuuu

SEQ ID NO: 1669242 - RNA, 22 nt, Human
aaauacgugggcauucaaaugu

SEQ ID NO: 1669243 - RNA, 18 nt, Human
aaauaccagccaguaaau

SEQ ID NO: 1669244 - RNA, 17 nt, Human
aaauacagauagauaua

SEQ ID NO: 1669245 - RNA, 19 nt, Human
aaauacacacucaaaucaa

SEQ ID NO: 1669246 - RNA, 13 nt, Human
aaauacaauuuug

SEQ ID NO: 1669247 - RNA, 22 nt, Human
aaauaauuuuuauauuugaaau

SEQ ID NO: 1669248 - RNA, 23 nt, Human
aaauaauuuuuauauuugaaaua

SEQ ID NO: 1669249 - RNA, 14 nt, Human
aaauacaauuuugu

SEQ ID NO: 1669250 - RNA, 17 nt, Human
aaauacaauuuuguuuc

SEQ ID NO: 1669251 - RNA, 18 nt, Human
aaauacaauuuuguuucu

SEQ ID NO: 1669252 - RNA, 20 nt, Human
aaauacaauuuuguuucugu

SEQ ID NO: 1669253 - RNA, 21 nt, Human
aaauacaauuuuguuucugua

SEQ ID NO: 1669254 - RNA, 22 nt, Human
aaauacaauuuuguuucuguac

SEQ ID NO: 1669255 - RNA, 15 nt, Human
aaauacacacucaaa

SEQ ID NO: 1669256 - RNA, 21 nt, Human
guaauuuuuuuaucgucacug

SEQ ID NO: 1669257 - RNA, 20 nt, Human
guaauuuuaugagcugugag

SEQ ID NO: 1669258 - RNA, 23 nt, Human
guacacugccuucucaacuccaa

SEQ ID NO: 1669259 - RNA, 21 nt, Human
aaauaauuuuuauauuugaaa

SEQ ID NO: 1669260 - RNA, 21 nt, Human
guaauccaagcaaaugugaau

SEQ ID NO: 1669261 - RNA, 18 nt, Human
guaauaugcacacauuuu

SEQ ID NO: 1669262 - RNA, 17 nt, Human
guaauaugcacacauuu

SEQ ID NO: 1669263 - RNA, 16 nt, Human
guaauaugcacacauu

SEQ ID NO: 1669264 - RNA, 14 nt, Human
guaauaugcacaca

SEQ ID NO: 1669265 - RNA, 20 nt, Human
guaauaggcguaacuaauuu

SEQ ID NO: 1669266 - RNA, 19 nt, Human
gggggugcugggccccugc

SEQ ID NO: 1669267 - RNA, 13 nt, Human
gggucgcccugga

SEQ ID NO: 1669268 - RNA, 15 nt, Human
gggucgcccuggacu

SEQ ID NO: 1669269 - RNA, 18 nt, Human
aaaccuuuguuugcaucu

SEQ ID NO: 1669270 - RNA, 18 nt, Human
aaaccuuuuauauuuagu

SEQ ID NO: 1669271 - RNA, 15 nt, Human
aaacgggcucagcaa

SEQ ID NO: 1669272 - RNA, 15 nt, Human
aaaccucugugagca

SEQ ID NO: 1669273 - RNA, 15 nt, Human
aaacauuaugaugug

SEQ ID NO: 1669274 - RNA, 23 nt, Human
aaaccaagucaagugaaaaagga

SEQ ID NO: 1669275 - RNA, 12 nt, Human
aaaccacagcag

SEQ ID NO: 1669276 - RNA, 19 nt, Human
aaacuuaaucuaaauggaa

SEQ ID NO: 1669277 - RNA, 18 nt, Human
aaacuuaaucuaaaugga

SEQ ID NO: 1669278 - RNA, 17 nt, Human
aaacuuaaucuaaaugg

SEQ ID NO: 1669279 - RNA, 16 nt, Human
aaacuuaaucuaaaug

SEQ ID NO: 1669280 - RNA, 19 nt, Human
aaacuguuaauaguucagg

SEQ ID NO: 1669281 - RNA, 22 nt, Human
aaacugcccccucugcccugcg

SEQ ID NO: 1669282 - RNA, 13 nt, Human
aaacucuccucug

SEQ ID NO: 1669283 - RNA, 13 nt, Human
aaacugcuuguuu

SEQ ID NO: 1669284 - RNA, 14 nt, Human
aaacugcuuguuuc

SEQ ID NO: 1669285 - RNA, 17 nt, Human
aaacugcuuguuuccua

SEQ ID NO: 1669286 - RNA, 19 nt, Human
aaacugcuuguuuccuagc

SEQ ID NO: 1669287 - RNA, 22 nt, Human
aaacugcuuguuuccuagcaca

SEQ ID NO: 1669288 - RNA, 22 nt, Human
aaacuaggugcauauuuauaaa

SEQ ID NO: 1669289 - RNA, 13 nt, Human
aaacgucuuaaau

SEQ ID NO: 1669290 - RNA, 18 nt, Human
aaacuaggugcauauuua

SEQ ID NO: 1669291 - RNA, 14 nt, Human
aaacgucuuaaaua

SEQ ID NO: 1669292 - RNA, 15 nt, Human
aaacucguuaauuug

SEQ ID NO: 1669293 - RNA, 15 nt, Human
aaaauuuuuaaucuu

SEQ ID NO: 1669294 - RNA, 20 nt, Human
aaaauuuugauguuuuaagg

SEQ ID NO: 1669295 - RNA, 19 nt, Human
aaaauuuagaaauauaauu

SEQ ID NO: 1669296 - RNA, 13 nt, Human
gggaugagaaagg

SEQ ID NO: 1669297 - RNA, 19 nt, Human
aaacacaaacgggcucagc

SEQ ID NO: 1669298 - RNA, 11 nt, Human
aaacacagcaa

SEQ ID NO: 1669299 - RNA, 12 nt, Human
aaacacauuuuu

SEQ ID NO: 1669300 - RNA, 11 nt, Human
aaacacauuuu

SEQ ID NO: 1669301 - RNA, 12 nt, Human
aaacacagcaag

SEQ ID NO: 1669302 - RNA, 14 nt, Human
aaacacagcaaggg

SEQ ID NO: 1669303 - RNA, 15 nt, Human
ggggccucagugcca

SEQ ID NO: 1669304 - RNA, 12 nt, Human
gggggccucagu

SEQ ID NO: 1669305 - RNA, 15 nt, Human
gggggccucagugcc

SEQ ID NO: 1669306 - RNA, 17 nt, Human
gggggccucagugccac

SEQ ID NO: 1669307 - RNA, 18 nt, Human
gggggccucagugccacu

SEQ ID NO: 1669308 - RNA, 11 nt, Human
ggggagaaagu

SEQ ID NO: 1669309 - RNA, 13 nt, Human
ggggaaggcaggg

SEQ ID NO: 1669310 - RNA, 18 nt, Human
ggggaauguuugccucug

SEQ ID NO: 1669311 - RNA, 22 nt, Human
ggggaauguuugccucugccuc

SEQ ID NO: 1669312 - RNA, 16 nt, Human
ggggaccagagcugcc

SEQ ID NO: 1669313 - RNA, 19 nt, Human
ggggaauugaggacacuga

SEQ ID NO: 1669314 - RNA, 17 nt, Human
aaacauggccuuugcuu

SEQ ID NO: 1669315 - RNA, 14 nt, Human
aaacaguagugaua

SEQ ID NO: 1669316 - RNA, 16 nt, Human
aaacauggccuuugcu

SEQ ID NO: 1669317 - RNA, 15 nt, Human
aaacagucucaggaa

SEQ ID NO: 1669318 - RNA, 21 nt, Human
aaagauggcugugccucugcc

SEQ ID NO: 1669319 - RNA, 22 nt, Human
aaagauggcugugccucugccu

SEQ ID NO: 1669320 - RNA, 23 nt, Human
aaagauggcugugccucugccug

SEQ ID NO: 1669321 - RNA, 11 nt, Human
gguccugcugc

SEQ ID NO: 1669322 - RNA, 12 nt, Human
gguccugcugca

SEQ ID NO: 1669323 - RNA, 14 nt, Human
gguccugcugcagu

SEQ ID NO: 1669324 - RNA, 14 nt, Human
aaagacuguacaaa

SEQ ID NO: 1669325 - RNA, 23 nt, Human
aaagacugaguacguugugcauu

SEQ ID NO: 1669326 - RNA, 13 nt, Human
aaagacuguacaa

SEQ ID NO: 1669327 - RNA, 19 nt, Human
aaagaugcuucucacugcc

SEQ ID NO: 1669328 - RNA, 17 nt, Human
aaagaugcuucucacug

SEQ ID NO: 1669329 - RNA, 14 nt, Human
aaagaugcuucuca

SEQ ID NO: 1669330 - RNA, 15 nt, Human
aaagaggaaugaagu

SEQ ID NO: 1669331 - RNA, 15 nt, Human
aaagaggcagcuuga

SEQ ID NO: 1669332 - RNA, 15 nt, Human
aaacuuguguaaaua

SEQ ID NO: 1669333 - RNA, 16 nt, Human
aaacuuguauuaugug

SEQ ID NO: 1669334 - RNA, 14 nt, Human
ggguggccucccaa

SEQ ID NO: 1669335 - RNA, 15 nt, Human
ggguggggggggugc

SEQ ID NO: 1669336 - RNA, 19 nt, Human
aaacuucagacauagaauu

SEQ ID NO: 1669337 - RNA, 23 nt, Human
aaacuucagcgguuuauauaagc

SEQ ID NO: 1669338 - RNA, 11 nt, Human
aaacuuuucug

SEQ ID NO: 1669339 - RNA, 12 nt, Human
aaacuuuucuga

SEQ ID NO: 1669340 - RNA, 13 nt, Human
aaagacagugaaa

SEQ ID NO: 1669341 - RNA, 21 nt, Human
aaagacuauucaaacagucuc

SEQ ID NO: 1669342 - RNA, 15 nt, Human
aaagacuccaaagaa

SEQ ID NO: 1669343 - RNA, 21 nt, Human
aaagacuccaaagaaauguaa

SEQ ID NO: 1669344 - RNA, 18 nt, Human
aaagacuauucaaacagu

SEQ ID NO: 1669345 - RNA, 19 nt, Human
aaagacuauucaaacaguc

SEQ ID NO: 1669346 - RNA, 17 nt, Human
aaagacuauucaaacag

SEQ ID NO: 1669347 - RNA, 12 nt, Human
aaagcugaaaac

SEQ ID NO: 1669348 - RNA, 13 nt, Human
aaagcugcugaca

SEQ ID NO: 1669349 - RNA, 15 nt, Human
aaagcuuguuaagau

SEQ ID NO: 1669350 - RNA, 15 nt, Human
aaagcugaaaacugc

SEQ ID NO: 1669351 - RNA, 15 nt, Human
aaagcucacuuuacu

SEQ ID NO: 1669352 - RNA, 17 nt, Human
aaagcacugacuucuaa

SEQ ID NO: 1669353 - RNA, 21 nt, Human
aaagcacugacuucuaaguaa

SEQ ID NO: 1669354 - RNA, 17 nt, Human
aaaggagauuggaagga

SEQ ID NO: 1669355 - RNA, 21 nt, Human
aaaggagagcuagcagcaggg

SEQ ID NO: 1669356 - RNA, 20 nt, Human
aaaggaagguucugguguga

SEQ ID NO: 1669357 - RNA, 22 nt, Human
aaaggaaagagggagguaagga

SEQ ID NO: 1669358 - RNA, 22 nt, Human
aaagggacuuggaagcuccgcu

SEQ ID NO: 1669359 - RNA, 20 nt, Human
aaagggauggcaagaugugg

SEQ ID NO: 1669360 - RNA, 14 nt, Human
aaagguaaaucaga

SEQ ID NO: 1669361 - RNA, 14 nt, Human
aaagguacuucaaa

SEQ ID NO: 1669362 - RNA, 19 nt, Human
ggugcugggccccugccuc

SEQ ID NO: 1669363 - RNA, 13 nt, Human
gguggaugccugg

SEQ ID NO: 1669364 - RNA, 11 nt, Human
ggugcugggcc

SEQ ID NO: 1669365 - RNA, 13 nt, Human
ggugcugggcccc

SEQ ID NO: 1669366 - RNA, 15 nt, Human
ggugcugggccccug

SEQ ID NO: 1669367 - RNA, 16 nt, Human
ggugcugggccccugc

SEQ ID NO: 1669368 - RNA, 21 nt, Human
ggugcauauuuauaaaaauaa

SEQ ID NO: 1669369 - RNA, 21 nt, Human
ggugcauuugaggucuguucu

SEQ ID NO: 1669370 - RNA, 18 nt, Human
ggugauccacccaccuca

SEQ ID NO: 1669371 - RNA, 23 nt, Human
ggugauccacccaccucagccuc

SEQ ID NO: 1669372 - RNA, 24 nt, Human
ggugauccacccaccucagccucc

SEQ ID NO: 1669373 - RNA, 12 nt, Human
ggugcaaugacc

SEQ ID NO: 1669374 - RNA, 13 nt, Human
ggugcaaugaccu

SEQ ID NO: 1669375 - RNA, 16 nt, Human
ggugcaaugaccuuuc

SEQ ID NO: 1669376 - RNA, 14 nt, Human
ggucgcccuggacu

SEQ ID NO: 1669377 - RNA, 13 nt, Human
ggucgaggcagga

SEQ ID NO: 1669378 - RNA, 13 nt, Human
ggugaacagaaca

SEQ ID NO: 1669379 - RNA, 20 nt, Human
ggucgcccuggacugugugc

SEQ ID NO: 1669380 - RNA, 13 nt, Human
gggaagagacuug

SEQ ID NO: 1669381 - RNA, 13 nt, Human
gggacagagcaga

SEQ ID NO: 1669382 - RNA, 12 nt, Human
gggacagcuccu

SEQ ID NO: 1669383 - RNA, 13 nt, Human
gggacagcuccuu

SEQ ID NO: 1669384 - RNA, 15 nt, Human
gggacagcuccuucu

SEQ ID NO: 1669385 - RNA, 16 nt, Human
gggacagcuccuucug

SEQ ID NO: 1669386 - RNA, 20 nt, Human
gggacagucaccucauggaa

SEQ ID NO: 1669387 - RNA, 21 nt, Human
gggacagucaccucauggaau

SEQ ID NO: 1669388 - RNA, 22 nt, Human
gggacagucaccucauggaauu

SEQ ID NO: 1669389 - RNA, 22 nt, Human
ggcuucccgcucagcccucccu

SEQ ID NO: 1669390 - RNA, 21 nt, Human
ggcuuccuccugguguggaag

SEQ ID NO: 1669391 - RNA, 18 nt, Human
gggaagaagcucucuccu

SEQ ID NO: 1669392 - RNA, 13 nt, Human
gggaaccugaccc

SEQ ID NO: 1669393 - RNA, 20 nt, Human
gggaacccaaguccaagcau

SEQ ID NO: 1669394 - RNA, 15 nt, Human
ggcuguacccaggaa

SEQ ID NO: 1669395 - RNA, 18 nt, Human
ggcuguaucccaugagcc

SEQ ID NO: 1669396 - RNA, 18 nt, Human
ggcuucaguggcagcugc

SEQ ID NO: 1669397 - RNA, 17 nt, Human
ggcuucaguggcagcug

SEQ ID NO: 1669398 - RNA, 19 nt, Human
ggcuucaguggcagcugcu

SEQ ID NO: 1669399 - RNA, 20 nt, Human
ggcuucaguggcagcugcuu

SEQ ID NO: 1669400 - RNA, 14 nt, Human
ggcuucccgcucag

SEQ ID NO: 1669401 - RNA, 22 nt, Human
ggcuucauccuccucagaucuu

SEQ ID NO: 1669402 - RNA, 18 nt, Human
ggcuucauccuccucaga

SEQ ID NO: 1669403 - RNA, 15 nt, Human
ggcuucccgcucagc

SEQ ID NO: 1669404 - RNA, 16 nt, Human
ggcuucccgcucagcc

SEQ ID NO: 1669405 - RNA, 17 nt, Human
ggcuucccgcucagccc

SEQ ID NO: 1669406 - RNA, 18 nt, Human
ggcuucccgcucagcccu

SEQ ID NO: 1669407 - RNA, 19 nt, Human
ggcuucccgcucagcccuc

SEQ ID NO: 1669408 - RNA, 21 nt, Human
ggcuucccgcucagcccuccc

SEQ ID NO: 1669409 - RNA, 16 nt, Human
ggcuuccucauaguau

SEQ ID NO: 1669410 - RNA, 14 nt, Human
ggcugggucgcccu

SEQ ID NO: 1669411 - RNA, 17 nt, Human
ggcugggucgcccugga

SEQ ID NO: 1669412 - RNA, 20 nt, Human
ggcugggucgcccuggacug

SEQ ID NO: 1669413 - RNA, 19 nt, Human
ggcuggguggcaccagcag

SEQ ID NO: 1669414 - RNA, 19 nt, Human
ggcuggguucuacccaggu

SEQ ID NO: 1669415 - RNA, 21 nt, Human
ggcuggguucuacccaggugc

SEQ ID NO: 1669416 - RNA, 15 nt, Human
ggcugggggccucag

SEQ ID NO: 1669417 - RNA, 16 nt, Human
ggcugggggccucagu

SEQ ID NO: 1669418 - RNA, 17 nt, Human
ggcugggggccucagug

SEQ ID NO: 1669419 - RNA, 19 nt, Human
ggcugggggccucagugcc

SEQ ID NO: 1669420 - RNA, 14 nt, Human
aaaaauaacaauga

SEQ ID NO: 1669421 - RNA, 21 nt, Human
gggagaaccaaaaagaggcua

SEQ ID NO: 1669422 - RNA, 15 nt, Human
gggacuuggaagcuc

SEQ ID NO: 1669423 - RNA, 17 nt, Human
gggacuuggaagcuccg

SEQ ID NO: 1669424 - RNA, 18 nt, Human
gggacuuggaagcuccgc

SEQ ID NO: 1669425 - RNA, 23 nt, Human
gggacuuggaagcuccgcuuucu

SEQ ID NO: 1669426 - RNA, 15 nt, Human
gggaggucgaggcag

SEQ ID NO: 1669427 - RNA, 18 nt, Human
gggaggucaaggcugcag

SEQ ID NO: 1669428 - RNA, 15 nt, Human
gggagggagggcucc

SEQ ID NO: 1669429 - RNA, 16 nt, Human
gggagggagggcucca

SEQ ID NO: 1669430 - RNA, 23 nt, Human
gggagcaggcucgggcuccccag

SEQ ID NO: 1669431 - RNA, 15 nt, Human
gggagagccuuccag

SEQ ID NO: 1669432 - RNA, 19 nt, Human
gggagagccuuccaggggu

SEQ ID NO: 1669433 - RNA, 14 nt, Human
aaaacaugcuacac

SEQ ID NO: 1669434 - RNA, 13 nt, Human
aaaacaugcuaca

SEQ ID NO: 1669435 - RNA, 17 nt, Human
aaaaccaguauuguaca

SEQ ID NO: 1669436 - RNA, 12 nt, Human
aaaacccaagug

SEQ ID NO: 1669437 - RNA, 14 nt, Human
gggaccagagcugc

SEQ ID NO: 1669438 - RNA, 20 nt, Human
gggaccagagcugccaccug

SEQ ID NO: 1669439 - RNA, 19 nt, Human
gggacauuugcucauggaa

SEQ ID NO: 1669440 - RNA, 17 nt, Human
aaaaaugguuuaaaugg

SEQ ID NO: 1669441 - RNA, 18 nt, Human
aaaacucuccucugcugc

SEQ ID NO: 1669442 - RNA, 22 nt, Human
aaaacuugauguguuaucucuu

SEQ ID NO: 1669443 - RNA, 15 nt, Human
aaaacuucagacaua

SEQ ID NO: 1669444 - RNA, 19 nt, Human
ggcucagcggggacagcuc

SEQ ID NO: 1669445 - RNA, 20 nt, Human
ggcucagcggggacagcucc

SEQ ID NO: 1669446 - RNA, 19 nt, Human
ggcucagguggggucacuc

SEQ ID NO: 1669447 - RNA, 20 nt, Human
ggcucagguggggucacucu

SEQ ID NO: 1669448 - RNA, 19 nt, Human
ggcucagcaaaagaugcuu

SEQ ID NO: 1669449 - RNA, 18 nt, Human
ggcucagcggggacagcu

SEQ ID NO: 1669450 - RNA, 14 nt, Human
ggcuccacuugguc

SEQ ID NO: 1669451 - RNA, 22 nt, Human
ggcugcccuggugcugccacac

SEQ ID NO: 1669452 - RNA, 16 nt, Human
ggcugccuuagaaccu

SEQ ID NO: 1669453 - RNA, 22 nt, Human
ggcugcggaaugaaccacaucu

SEQ ID NO: 1669454 - RNA, 14 nt, Human
ggcugcccuggugc

SEQ ID NO: 1669455 - RNA, 15 nt, Human
ggcugcccuggugcu

SEQ ID NO: 1669456 - RNA, 16 nt, Human
ggcugcccuggugcug

SEQ ID NO: 1669457 - RNA, 19 nt, Human
ggcugcccuggugcugcca

SEQ ID NO: 1669458 - RNA, 13 nt, Human
ggcugcccuggug

SEQ ID NO: 1669459 - RNA, 21 nt, Human
ggcugccaaugggagcucaug

SEQ ID NO: 1669460 - RNA, 14 nt, Human
ggcucuucuccuuu

SEQ ID NO: 1669461 - RNA, 15 nt, Human
ggcucuucuccuuuc

SEQ ID NO: 1669462 - RNA, 23 nt, Human
ggcucuucuccuuucacaaccuu

SEQ ID NO: 1669463 - RNA, 22 nt, Human
ggcugacagacagcccuccauc

SEQ ID NO: 1669464 - RNA, 16 nt, Human
ggcucuucuccuuuca

SEQ ID NO: 1669465 - RNA, 19 nt, Human
ggcugccaaugggagcuca

SEQ ID NO: 1669466 - RNA, 20 nt, Human
ggcugccaaugggagcucau

SEQ ID NO: 1669467 - RNA, 12 nt, Human
ggcucuucuccu

SEQ ID NO: 1669468 - RNA, 13 nt, Human
ggcucuucuccuu

SEQ ID NO: 1669469 - RNA, 14 nt, Human
ggcucuuccaggcu

SEQ ID NO: 1669470 - RNA, 12 nt, Human
ggcucuuccagg

SEQ ID NO: 1669471 - RNA, 14 nt, Human
ggcucucaggccag

SEQ ID NO: 1669472 - RNA, 13 nt, Human
ggcucucaggcca

SEQ ID NO: 1669473 - RNA, 11 nt, Human
ggcucucaggc

SEQ ID NO: 1669474 - RNA, 13 nt, Human
ggcugcugaaggc

SEQ ID NO: 1669475 - RNA, 14 nt, Human
ggcugggagagccu

SEQ ID NO: 1669476 - RNA, 15 nt, Human
ggcugggagagccuu

SEQ ID NO: 1669477 - RNA, 16 nt, Human
ggcugggagagccuuc

SEQ ID NO: 1669478 - RNA, 18 nt, Human
ggcugggagagccuucca

SEQ ID NO: 1669479 - RNA, 16 nt, Human
ggcauaacauaaaucu

SEQ ID NO: 1669480 - RNA, 17 nt, Human
ggcauaacauaaaucug

SEQ ID NO: 1669481 - RNA, 20 nt, Human
ggccagugugacaaggauug

SEQ ID NO: 1669482 - RNA, 14 nt, Human
ggccaguugguccc

SEQ ID NO: 1669483 - RNA, 17 nt, Human
ggccaguuggucccccu

SEQ ID NO: 1669484 - RNA, 15 nt, Human
ggcccggcuccaggc

SEQ ID NO: 1669485 - RNA, 20 nt, Human
ggcccuucucuccagccccu

SEQ ID NO: 1669486 - RNA, 21 nt, Human
ggcccuucucuccagccccug

SEQ ID NO: 1669487 - RNA, 13 nt, Human
ggccccugcuggu

SEQ ID NO: 1669488 - RNA, 14 nt, Human
ggccccugcugguu

SEQ ID NO: 1669489 - RNA, 13 nt, Human
ggcccggcuccag

SEQ ID NO: 1669490 - RNA, 23 nt, Human
ggccccugcugguucaggguugg

SEQ ID NO: 1669491 - RNA, 19 nt, Human
ggccucacuaggcuucugg

SEQ ID NO: 1669492 - RNA, 22 nt, Human
ggcccuucucuccagccccugg

SEQ ID NO: 1669493 - RNA, 23 nt, Human
ggcccuucucuccagccccugga

SEQ ID NO: 1669494 - RNA, 14 nt, Human
ggccuccauccuga

SEQ ID NO: 1669495 - RNA, 15 nt, Human
ggccuccauccugag

SEQ ID NO: 1669496 - RNA, 16 nt, Human
ggccuccauccugagg

SEQ ID NO: 1669497 - RNA, 15 nt, Human
ggcacugguggcccg

SEQ ID NO: 1669498 - RNA, 11 nt, Human
ggcagccccug

SEQ ID NO: 1669499 - RNA, 20 nt, Human
ggcacagaaaauggaagaca

SEQ ID NO: 1669500 - RNA, 21 nt, Human
ggcacagaaaauggaagacag

SEQ ID NO: 1669501 - RNA, 19 nt, Human
ggcacagaaaauggaagac

SEQ ID NO: 1669502 - RNA, 13 nt, Human
ggcacaucagcac

SEQ ID NO: 1669503 - RNA, 23 nt, Human
ggcacucagaagacacugauggg

SEQ ID NO: 1669504 - RNA, 23 nt, Human
ggcacagaaaauggaagacagcu

SEQ ID NO: 1669505 - RNA, 21 nt, Human
ggcacaguuuucugagaaaga

SEQ ID NO: 1669506 - RNA, 22 nt, Human
ggagacugcugagucaacccaa

SEQ ID NO: 1669507 - RNA, 16 nt, Human
ggagagaagagaaugc

SEQ ID NO: 1669508 - RNA, 22 nt, Human
ggcagccccuguucuggcagag

SEQ ID NO: 1669509 - RNA, 21 nt, Human
ggcaguggugguuuucuguuc

SEQ ID NO: 1669510 - RNA, 20 nt, Human
ggcaguggugguuuucuguu

SEQ ID NO: 1669511 - RNA, 16 nt, Human
gcuaaucagcauucuc

SEQ ID NO: 1669512 - RNA, 17 nt, Human
gcuaaucagcauucuca

SEQ ID NO: 1669513 - RNA, 22 nt, Human
gcuaaucagcauucucacuccu

SEQ ID NO: 1669514 - RNA, 14 nt, Human
gcuaaucagcauuc

SEQ ID NO: 1669515 - RNA, 23 nt, Human
gcuaagugauccucccaccucag

SEQ ID NO: 1669516 - RNA, 15 nt, Human
gcuaaugggacacua

SEQ ID NO: 1669517 - RNA, 13 nt, Human
gcuaaugggacac

SEQ ID NO: 1669518 - RNA, 18 nt, Human
gcguuucuaugacacaug

SEQ ID NO: 1669519 - RNA, 23 nt, Human
gcgugcacacaccagagcccacc

SEQ ID NO: 1669520 - RNA, 21 nt, Human
gcgggaggauguucugggaca

SEQ ID NO: 1669521 - RNA, 22 nt, Human
gcgggaggauguucugggacac

SEQ ID NO: 1669522 - RNA, 20 nt, Human
gcgugcacacaccagagccc

SEQ ID NO: 1669523 - RNA, 20 nt, Human
gcgggaggauguucugggac

SEQ ID NO: 1669524 - RNA, 16 nt, Human
gcuagaacucccuuuc

SEQ ID NO: 1669525 - RNA, 18 nt, Human
gcuagaacucccuuucaa

SEQ ID NO: 1669526 - RNA, 12 nt, Human
gcuagaacuccc

SEQ ID NO: 1669527 - RNA, 13 nt, Human
gcuagaacucccu

SEQ ID NO: 1669528 - RNA, 14 nt, Human
gcuagaacucccuu

SEQ ID NO: 1669529 - RNA, 15 nt, Human
gcuagaacucccuuu

SEQ ID NO: 1669530 - RNA, 16 nt, Human
gcucacugcauccucc

SEQ ID NO: 1669531 - RNA, 17 nt, Human
gcucacugcagccucaa

SEQ ID NO: 1669532 - RNA, 15 nt, Human
gcucacugcagccuc

SEQ ID NO: 1669533 - RNA, 16 nt, Human
gcucacugcagccuca

SEQ ID NO: 1669534 - RNA, 11 nt, Human
gcucacugcag

SEQ ID NO: 1669535 - RNA, 12 nt, Human
gcucacugcagc

SEQ ID NO: 1669536 - RNA, 13 nt, Human
gcucacugcagcc

SEQ ID NO: 1669537 - RNA, 14 nt, Human
gcucacugcagccu

SEQ ID NO: 1669538 - RNA, 20 nt, Human
gcuauucaguaauaacucua

SEQ ID NO: 1669539 - RNA, 14 nt, Human
gcucagagagggug

SEQ ID NO: 1669540 - RNA, 20 nt, Human
gcucacugcauccuccgccu

SEQ ID NO: 1669541 - RNA, 13 nt, Human
gcucagagagggu

SEQ ID NO: 1669542 - RNA, 23 nt, Human
gcucagguggggucacucuggca

SEQ ID NO: 1669543 - RNA, 14 nt, Human
gcucaggugucccu

SEQ ID NO: 1669544 - RNA, 16 nt, Human
gcucaggugucccugc

SEQ ID NO: 1669545 - RNA, 17 nt, Human
gcucaggugucccugca

SEQ ID NO: 1669546 - RNA, 13 nt, Human
gcuaugcauuuga

SEQ ID NO: 1669547 - RNA, 19 nt, Human
gcuauucaguaauaacucu

SEQ ID NO: 1669548 - RNA, 12 nt, Human
gcuaugcauuug

SEQ ID NO: 1669549 - RNA, 21 nt, Human
gcuagugugguguuuccuggc

SEQ ID NO: 1669550 - RNA, 22 nt, Human
gcuagugugguguuuccuggca

SEQ ID NO: 1669551 - RNA, 17 nt, Human
gcuaggccuggccagau

SEQ ID NO: 1669552 - RNA, 23 nt, Human
gcuaggccuggccagaugcacca

SEQ ID NO: 1669553 - RNA, 16 nt, Human
gcuaggccuggccaga

SEQ ID NO: 1669554 - RNA, 22 nt, Human
gcucccacaggcccuuccucuc

SEQ ID NO: 1669555 - RNA, 17 nt, Human
gcucccaggcauucccc

SEQ ID NO: 1669556 - RNA, 16 nt, Human
gcucccacaggcccuu

SEQ ID NO: 1669557 - RNA, 17 nt, Human
gcucccacaggcccuuc

SEQ ID NO: 1669558 - RNA, 20 nt, Human
gcucccacaggcccuuccuc

SEQ ID NO: 1669559 - RNA, 21 nt, Human
gcucccacaggcccuuccucu

SEQ ID NO: 1669560 - RNA, 20 nt, Human
gcuccagcucaccagcccca

SEQ ID NO: 1669561 - RNA, 21 nt, Human
gcuccagcucaccagccccag

SEQ ID NO: 1669562 - RNA, 18 nt, Human
gcuccagcucaccagccc

SEQ ID NO: 1669563 - RNA, 18 nt, Human
gcuccacuuggucuguga

SEQ ID NO: 1669564 - RNA, 19 nt, Human
gcuccacuuggucugugag

SEQ ID NO: 1669565 - RNA, 21 nt, Human
gcuccugccaccacgcccggc

SEQ ID NO: 1669566 - RNA, 14 nt, Human
gcuccuggcccacu

SEQ ID NO: 1669567 - RNA, 15 nt, Human
gcuccuggcccacug

SEQ ID NO: 1669568 - RNA, 20 nt, Human
gcuccuggcccacugcaucg

SEQ ID NO: 1669569 - RNA, 18 nt, Human
gcuccuggcccacugcau

SEQ ID NO: 1669570 - RNA, 19 nt, Human
gcuccuggcccacugcauc

SEQ ID NO: 1669571 - RNA, 12 nt, Human
gcuccugccacc

SEQ ID NO: 1669572 - RNA, 18 nt, Human
gcuccugccaccacgccc

SEQ ID NO: 1669573 - RNA, 21 nt, Human
gcuccccucggagaagagcug

SEQ ID NO: 1669574 - RNA, 15 nt, Human
gcuccacuuggucug

SEQ ID NO: 1669575 - RNA, 23 nt, Human
gcucugcaagaauugaagcagga

SEQ ID NO: 1669576 - RNA, 17 nt, Human
gcucugaucauccacug

SEQ ID NO: 1669577 - RNA, 11 nt, Human
gcucugcccuu

SEQ ID NO: 1669578 - RNA, 22 nt, Human
gcgaucuggguucacugcaacc

SEQ ID NO: 1669579 - RNA, 20 nt, Human
gcgcagcauauucaggaagc

SEQ ID NO: 1669580 - RNA, 17 nt, Human
gcgagcccugguggcag

SEQ ID NO: 1669581 - RNA, 15 nt, Human
gcgagcccugguggc

SEQ ID NO: 1669582 - RNA, 17 nt, Human
gccuugaccauucucca

SEQ ID NO: 1669583 - RNA, 19 nt, Human
gccuugaccauucuccacc

SEQ ID NO: 1669584 - RNA, 20 nt, Human
gccuugaccauucuccaccu

SEQ ID NO: 1669585 - RNA, 21 nt, Human
gccuugaccauucuccaccug

SEQ ID NO: 1669586 - RNA, 21 nt, Human
gccuucggccuccauccugag

SEQ ID NO: 1669587 - RNA, 23 nt, Human
gccuucggccuccauccugaggc

SEQ ID NO: 1669588 - RNA, 21 nt, Human
gccuguugggccaggagccuc

SEQ ID NO: 1669589 - RNA, 20 nt, Human
gccuucggccuccauccuga

SEQ ID NO: 1669590 - RNA, 18 nt, Human
gccugugccucugggacu

SEQ ID NO: 1669591 - RNA, 13 nt, Human
gccuggcucaggu

SEQ ID NO: 1669592 - RNA, 16 nt, Human
gccugugccucuggga

SEQ ID NO: 1669593 - RNA, 17 nt, Human
gccugugccucugggac

SEQ ID NO: 1669594 - RNA, 19 nt, Human
gccuguucccauucuugca

SEQ ID NO: 1669595 - RNA, 23 nt, Human
gccuguucccauucuugcauggc

SEQ ID NO: 1669596 - RNA, 14 nt, Human
gccuguugggccag

SEQ ID NO: 1669597 - RNA, 15 nt, Human
gccuguugggccagg

SEQ ID NO: 1669598 - RNA, 16 nt, Human
gccuguugggccagga

SEQ ID NO: 1669599 - RNA, 18 nt, Human
gccuguugggccaggagc

SEQ ID NO: 1669600 - RNA, 20 nt, Human
gccuguugggccaggagccu

SEQ ID NO: 1669601 - RNA, 20 nt, Human
gccuggccugagcugggaug

SEQ ID NO: 1669602 - RNA, 14 nt, Human
gccuggccugagcu

SEQ ID NO: 1669603 - RNA, 18 nt, Human
gccuggccugagcuggga

SEQ ID NO: 1669604 - RNA, 13 nt, Human
gccuggccugagc

SEQ ID NO: 1669605 - RNA, 14 nt, Human
gccucuuggguuca

SEQ ID NO: 1669606 - RNA, 21 nt, Human
gccucuuaugggcuggguucu

SEQ ID NO: 1669607 - RNA, 13 nt, Human
gccugcccaggcc

SEQ ID NO: 1669608 - RNA, 14 nt, Human
gccugcccaggccc

SEQ ID NO: 1669609 - RNA, 20 nt, Human
gccucgaacuggcugcaaag

SEQ ID NO: 1669610 - RNA, 22 nt, Human
gccucgaacuggcugcaaaggg

SEQ ID NO: 1669611 - RNA, 17 nt, Human
gccucuuaugggcuggg

SEQ ID NO: 1669612 - RNA, 18 nt, Human
gccucuuaugggcugggu

SEQ ID NO: 1669613 - RNA, 16 nt, Human
gccucuuaugggcugg

SEQ ID NO: 1669614 - RNA, 15 nt, Human
gccucuuagaugcag

SEQ ID NO: 1669615 - RNA, 17 nt, Human
gccucgaacuggcugca

SEQ ID NO: 1669616 - RNA, 19 nt, Human
gccuccugugugugcgccu

SEQ ID NO: 1669617 - RNA, 23 nt, Human
gccuccugugugugcgccuacag

SEQ ID NO: 1669618 - RNA, 16 nt, Human
gccucccaaagugcug

SEQ ID NO: 1669619 - RNA, 17 nt, Human
gccucccaaagugcugg

SEQ ID NO: 1669620 - RNA, 12 nt, Human
gccuccauccug

SEQ ID NO: 1669621 - RNA, 22 nt, Human
gccugcccaggccccugccacc

SEQ ID NO: 1669622 - RNA, 15 nt, Human
gccugcccaggcccc

SEQ ID NO: 1669623 - RNA, 17 nt, Human
gccugcccaggccccug

SEQ ID NO: 1669624 - RNA, 22 nt, Human
gcccuuagcagggaaacagcua

SEQ ID NO: 1669625 - RNA, 20 nt, Human
gccgcagcccugcagagggc

SEQ ID NO: 1669626 - RNA, 22 nt, Human
gcccuguccugccuaaggcuga

SEQ ID NO: 1669627 - RNA, 20 nt, Human
gcccuuagcagggaaacagc

SEQ ID NO: 1669628 - RNA, 18 nt, Human
gcccugcccugguuuccu

SEQ ID NO: 1669629 - RNA, 14 nt, Human
gcccugccuccuuu

SEQ ID NO: 1669630 - RNA, 12 nt, Human
gcccugccuccu

SEQ ID NO: 1669631 - RNA, 13 nt, Human
gcccugccuccuu

SEQ ID NO: 1669632 - RNA, 11 nt, Human
gcccugcccug

SEQ ID NO: 1669633 - RNA, 12 nt, Human
gcccugcccugg

SEQ ID NO: 1669634 - RNA, 16 nt, Human
gcccugcccugguuuc

SEQ ID NO: 1669635 - RNA, 11 nt, Human
gcccugccucc

SEQ ID NO: 1669636 - RNA, 17 nt, Human
gcccugcccaccuggcc

SEQ ID NO: 1669637 - RNA, 20 nt, Human
gcccugcccaccuggccucu

SEQ ID NO: 1669638 - RNA, 21 nt, Human
gcccugcccaccuggccucug

SEQ ID NO: 1669639 - RNA, 22 nt, Human
gcccugcccaccuggccucugc

SEQ ID NO: 1669640 - RNA, 18 nt, Human
gcccugcagagggcacag

SEQ ID NO: 1669641 - RNA, 23 nt, Human
gccuagcauacguacacauuuua

SEQ ID NO: 1669642 - RNA, 22 nt, Human
gccuagcauacguacacauuuu

SEQ ID NO: 1669643 - RNA, 21 nt, Human
gccuagcauacguacacauuu

SEQ ID NO: 1669644 - RNA, 20 nt, Human
gccuagcauacguacacauu

SEQ ID NO: 1669645 - RNA, 13 nt, Human
gccuaggugacag

SEQ ID NO: 1669646 - RNA, 14 nt, Human
gccuaggugacaga

SEQ ID NO: 1669647 - RNA, 15 nt, Human
gccuaggugacagag

SEQ ID NO: 1669648 - RNA, 20 nt, Human
gccuaggugacagagugaga

SEQ ID NO: 1669649 - RNA, 20 nt, Human
gccccugccucucugcaggu

SEQ ID NO: 1669650 - RNA, 23 nt, Human
gccccugccucucugcagguccc

SEQ ID NO: 1669651 - RNA, 23 nt, Human
gcccgggcucugccucccaucac

SEQ ID NO: 1669652 - RNA, 16 nt, Human
gcccuaaugcgcaggc

SEQ ID NO: 1669653 - RNA, 17 nt, Human
gcccuaaugcgcaggcu

SEQ ID NO: 1669654 - RNA, 19 nt, Human
gcccuaaugcgcaggcugg

SEQ ID NO: 1669655 - RNA, 20 nt, Human
gcccuaaugcgcaggcuggc

SEQ ID NO: 1669656 - RNA, 23 nt, Human
gcccuaaugcgcaggcuggcccu

SEQ ID NO: 1669657 - RNA, 15 nt, Human
gcccucacccugggg

SEQ ID NO: 1669658 - RNA, 17 nt, Human
gccccugccacccuggg

SEQ ID NO: 1669659 - RNA, 16 nt, Human
gccccugccacccugg

SEQ ID NO: 1669660 - RNA, 12 nt, Human
gcccccacuggu

SEQ ID NO: 1669661 - RNA, 12 nt, Human
ggacccugaggc

SEQ ID NO: 1669662 - RNA, 13 nt, Human
ggacccugaggcc

SEQ ID NO: 1669663 - RNA, 13 nt, Human
ggaccucaggccu

SEQ ID NO: 1669664 - RNA, 20 nt, Human
ggaccucaggccugggggcu

SEQ ID NO: 1669665 - RNA, 14 nt, Human
ggaccucaggccug

SEQ ID NO: 1669666 - RNA, 15 nt, Human
ggaccucaggccugg

SEQ ID NO: 1669667 - RNA, 20 nt, Human
ggacguguuaugacuccaga

SEQ ID NO: 1669668 - RNA, 11 nt, Human
ggacccugagg

SEQ ID NO: 1669669 - RNA, 12 nt, Human
ggacccccugaa

SEQ ID NO: 1669670 - RNA, 22 nt, Human
ggacuucuuuaauuuuggaauu

SEQ ID NO: 1669671 - RNA, 21 nt, Human
ggacuucuuuaauuuuggaau

SEQ ID NO: 1669672 - RNA, 18 nt, Human
ggacuucuuuaauuuugg

SEQ ID NO: 1669673 - RNA, 15 nt, Human
ggacuuguuagaucu

SEQ ID NO: 1669674 - RNA, 14 nt, Human
ggacuuggaagcuc

SEQ ID NO: 1669675 - RNA, 18 nt, Human
ggagaaaugaaaaaauau

SEQ ID NO: 1669676 - RNA, 9 nt, Human
ggacuuugu

SEQ ID NO: 1669677 - RNA, 16 nt, Human
ggagaaaggaagggcu

SEQ ID NO: 1669678 - RNA, 13 nt, Human
ggagaaacuggaa

SEQ ID NO: 1669679 - RNA, 15 nt, Human
ggacucaaugcacug

SEQ ID NO: 1669680 - RNA, 24 nt, Human
ggacuaacuugucuuuggacccug

SEQ ID NO: 1669681 - RNA, 14 nt, Human
ggacuacaggugug

SEQ ID NO: 1669682 - RNA, 20 nt, Human
ggacuaacuugucuuuggac

SEQ ID NO: 1669683 - RNA, 16 nt, Human
ggacucaaugcacuga

SEQ ID NO: 1669684 - RNA, 18 nt, Human
ggacucaaugcacugaca

SEQ ID NO: 1669685 - RNA, 22 nt, Human
ggacucauuuuaaaaaauggaa

SEQ ID NO: 1669686 - RNA, 23 nt, Human
ggacaggcauguucucugaggac

SEQ ID NO: 1669687 - RNA, 18 nt, Human
ggaaugaagcaaugcuuc

SEQ ID NO: 1669688 - RNA, 19 nt, Human
ggaaugaagauacugaaau

SEQ ID NO: 1669689 - RNA, 13 nt, Human
ggacaagagcagg

SEQ ID NO: 1669690 - RNA, 22 nt, Human
ggacaaggaugaucuaggaaga

SEQ ID NO: 1669691 - RNA, 23 nt, Human
ggacaaggaugaucuaggaagac

SEQ ID NO: 1669692 - RNA, 16 nt, Human
ggaauccagacccggc

SEQ ID NO: 1669693 - RNA, 18 nt, Human
ggaauaacauguaauuaa

SEQ ID NO: 1669694 - RNA, 19 nt, Human
ggacaaggacuaggguccu

SEQ ID NO: 1669695 - RNA, 21 nt, Human
ggacacagcucuucuccaggc

SEQ ID NO: 1669696 - RNA, 15 nt, Human
ggacacagcucuucu

SEQ ID NO: 1669697 - RNA, 18 nt, Human
ggacacagcucuucucca

SEQ ID NO: 1669698 - RNA, 17 nt, Human
ggacacuaaccacgcug

SEQ ID NO: 1669699 - RNA, 22 nt, Human
ggacacuaaccacgcuggaccu

SEQ ID NO: 1669700 - RNA, 19 nt, Human
ggacagcuccuucuguccu

SEQ ID NO: 1669701 - RNA, 20 nt, Human
ggacagcuccuucuguccua

SEQ ID NO: 1669702 - RNA, 19 nt, Human
ggaaggaaacccagcucug

SEQ ID NO: 1669703 - RNA, 20 nt, Human
ggaaggaaacccagcucugg

SEQ ID NO: 1669704 - RNA, 16 nt, Human
ggaaggaaacccagcu

SEQ ID NO: 1669705 - RNA, 11 nt, Human
ggaagcuccgc

SEQ ID NO: 1669706 - RNA, 15 nt, Human
ggaagcucagggccu

SEQ ID NO: 1669707 - RNA, 23 nt, Human
ggaagcucagggccuggcucagg

SEQ ID NO: 1669708 - RNA, 15 nt, Human
ggaagccgcuggggc

SEQ ID NO: 1669709 - RNA, 13 nt, Human
ggaagacuuugga

SEQ ID NO: 1669710 - RNA, 17 nt, Human
ggaagacuuuggaaaga

SEQ ID NO: 1669711 - RNA, 13 nt, Human
ggaagacagcucu

SEQ ID NO: 1669712 - RNA, 14 nt, Human
ggaagacagcucuu

SEQ ID NO: 1669713 - RNA, 15 nt, Human
ggaagagaaaaaaua

SEQ ID NO: 1669714 - RNA, 18 nt, Human
ggaagacuuuggaaagag

SEQ ID NO: 1669715 - RNA, 13 nt, Human
ggaagagaaaaaa

SEQ ID NO: 1669716 - RNA, 17 nt, Human
ggaacagacuggaagca

SEQ ID NO: 1669717 - RNA, 15 nt, Human
ggaacacucugagac

SEQ ID NO: 1669718 - RNA, 16 nt, Human
ggaacacucugagacu

SEQ ID NO: 1669719 - RNA, 12 nt, Human
ggaacacucuga

SEQ ID NO: 1669720 - RNA, 14 nt, Human
ggaacacucugaga

SEQ ID NO: 1669721 - RNA, 13 nt, Human
gcucugcccuugg

SEQ ID NO: 1669722 - RNA, 15 nt, Human
gcucugguccauaga

SEQ ID NO: 1669723 - RNA, 16 nt, Human
gcucugguccauagag

SEQ ID NO: 1669724 - RNA, 23 nt, Human
gcucugguccauagagagcaaga

SEQ ID NO: 1669725 - RNA, 13 nt, Human
gcugcugaaggcu

SEQ ID NO: 1669726 - RNA, 14 nt, Human
gcugcugaaggcuc

SEQ ID NO: 1669727 - RNA, 15 nt, Human
gcugcugaaggcucg

SEQ ID NO: 1669728 - RNA, 18 nt, Human
gcugcugaaggcucgagc

SEQ ID NO: 1669729 - RNA, 13 nt, Human
gcugcuggcuggu

SEQ ID NO: 1669730 - RNA, 18 nt, Human
gcuggagugcagugagcc

SEQ ID NO: 1669731 - RNA, 17 nt, Human
gcuggagugcagugagc

SEQ ID NO: 1669732 - RNA, 22 nt, Human
gcuggagugcagugagccgaga

SEQ ID NO: 1669733 - RNA, 20 nt, Human
gcuggccuggccccucaggg

SEQ ID NO: 1669734 - RNA, 21 nt, Human
gcugggccccugccucucugc

SEQ ID NO: 1669735 - RNA, 22 nt, Human
gcugggccccugccucucugca

SEQ ID NO: 1669736 - RNA, 23 nt, Human
gcugggccccugccucucugcag

SEQ ID NO: 1669737 - RNA, 12 nt, Human
gcugggucgccc

SEQ ID NO: 1669738 - RNA, 22 nt, Human
gcugggguuaucugaagucaga

SEQ ID NO: 1669739 - RNA, 23 nt, Human
gcugggguuaucugaagucagau

SEQ ID NO: 1669740 - RNA, 14 nt, Human
gcugggguuaucug

SEQ ID NO: 1669741 - RNA, 12 nt, Human
gcugggcucccu

SEQ ID NO: 1669742 - RNA, 15 nt, Human
gcuggcuguuggcug

SEQ ID NO: 1669743 - RNA, 16 nt, Human
gcuggcuguuggcugg

SEQ ID NO: 1669744 - RNA, 17 nt, Human
gcuggcuguuggcuggg

SEQ ID NO: 1669745 - RNA, 21 nt, Human
gcuggguggcaccagcagccu

SEQ ID NO: 1669746 - RNA, 22 nt, Human
gcuggguggcaccagcagccug

SEQ ID NO: 1669747 - RNA, 23 nt, Human
gcuggguggcaccagcagccugg

SEQ ID NO: 1669748 - RNA, 19 nt, Human
gcuucacggaagagccuug

SEQ ID NO: 1669749 - RNA, 18 nt, Human
gcuucacggaagagccuu

SEQ ID NO: 1669750 - RNA, 12 nt, Human
gcuucagccucc

SEQ ID NO: 1669751 - RNA, 19 nt, Human
gcuucaaggauccugagcc

SEQ ID NO: 1669752 - RNA, 20 nt, Human
gcuucaaggauccugagcca

SEQ ID NO: 1669753 - RNA, 21 nt, Human
gcuucaaggauccugagccag

SEQ ID NO: 1669754 - RNA, 17 nt, Human
gcuucacggaagagccu

SEQ ID NO: 1669755 - RNA, 15 nt, Human
gcuucacggaagagc

SEQ ID NO: 1669756 - RNA, 12 nt, Human
gcuuguacauaa

SEQ ID NO: 1669757 - RNA, 14 nt, Human
gcuugagcucagga

SEQ ID NO: 1669758 - RNA, 20 nt, Human
gcuuguaaauagcucaggug

SEQ ID NO: 1669759 - RNA, 22 nt, Human
gcuuccucauaguaugguggcu

SEQ ID NO: 1669760 - RNA, 22 nt, Human
auuuguaguguuggagaagaac

SEQ ID NO: 1669761 - RNA, 14 nt, Human
auuuguauaaaaua

SEQ ID NO: 1669762 - RNA, 15 nt, Human
auuuguauaaaauaa

SEQ ID NO: 1669763 - RNA, 23 nt, Human
auuuuaaaagaaugauuaugaau

SEQ ID NO: 1669764 - RNA, 18 nt, Human
auuugugaagguggaaau

SEQ ID NO: 1669765 - RNA, 21 nt, Human
auuugugaagguggaaauaaa

SEQ ID NO: 1669766 - RNA, 23 nt, Human
auuugugaaaugauggugaaagu

SEQ ID NO: 1669767 - RNA, 23 nt, Human
auuugugaagguggaaauaaacu

SEQ ID NO: 1669768 - RNA, 22 nt, Human
auuuuaaaaauacagauagaua

SEQ ID NO: 1669769 - RNA, 16 nt, Human
auuuuaaaagaaugau

SEQ ID NO: 1669770 - RNA, 17 nt, Human
auuucuaggacugaauu

SEQ ID NO: 1669771 - RNA, 18 nt, Human
auuucuaggacugaauua

SEQ ID NO: 1669772 - RNA, 20 nt, Human
auuucuaggacugaauuaug

SEQ ID NO: 1669773 - RNA, 23 nt, Human
auuucuaggacugaauuaugaaa

SEQ ID NO: 1669774 - RNA, 20 nt, Human
auuucuuccacaagagccca

SEQ ID NO: 1669775 - RNA, 23 nt, Human
auuucuuccacaagagcccaggc

SEQ ID NO: 1669776 - RNA, 16 nt, Human
auuugacauagucugg

SEQ ID NO: 1669777 - RNA, 17 nt, Human
auuugacauagucuggc

SEQ ID NO: 1669778 - RNA, 21 nt, Human
auuugacauagucuggcugua

SEQ ID NO: 1669779 - RNA, 18 nt, Human
auuugaaacacuuugcau

SEQ ID NO: 1669780 - RNA, 16 nt, Human
auuugaaaauuuugau

SEQ ID NO: 1669781 - RNA, 20 nt, Human
auuucuugagguaaaagcau

SEQ ID NO: 1669782 - RNA, 19 nt, Human
auuucccaaagcagugcau

SEQ ID NO: 1669783 - RNA, 12 nt, Human
auuuauuuaaau

SEQ ID NO: 1669784 - RNA, 14 nt, Human
auuuauuuaaauuu

SEQ ID NO: 1669785 - RNA, 14 nt, Human
auuuauuuuaauaa

SEQ ID NO: 1669786 - RNA, 21 nt, Human
auuguuuggggaugagaaagg

SEQ ID NO: 1669787 - RNA, 17 nt, Human
auuuaaaagauacaguu

SEQ ID NO: 1669788 - RNA, 16 nt, Human
auuuaaaagauacagu

SEQ ID NO: 1669789 - RNA, 14 nt, Human
auuuaaaagauaca

SEQ ID NO: 1669790 - RNA, 14 nt, Human
auugugggaagggg

SEQ ID NO: 1669791 - RNA, 13 nt, Human
auugugggaaggg

SEQ ID NO: 1669792 - RNA, 13 nt, Human
auugucuagugaa

SEQ ID NO: 1669793 - RNA, 23 nt, Human
auugucaaaguggugagaggcau

SEQ ID NO: 1669794 - RNA, 16 nt, Human
auugucaaagugguga

SEQ ID NO: 1669795 - RNA, 13 nt, Human
auuggcuuuucug

SEQ ID NO: 1669796 - RNA, 15 nt, Human
auuggcuuuucugau

SEQ ID NO: 1669797 - RNA, 16 nt, Human
auuggcuuuucugauc

SEQ ID NO: 1669798 - RNA, 19 nt, Human
auuggcuuuucugauccag

SEQ ID NO: 1669799 - RNA, 20 nt, Human
auuggcuuuucugauccagu

SEQ ID NO: 1669800 - RNA, 18 nt, Human
auugguaaagaauggaag

SEQ ID NO: 1669801 - RNA, 15 nt, Human
auugguucuuguauu

SEQ ID NO: 1669802 - RNA, 16 nt, Human
auugguucuuguauua

SEQ ID NO: 1669803 - RNA, 19 nt, Human
auuggacaguaaaauccac

SEQ ID NO: 1669804 - RNA, 19 nt, Human
auuggagcucgugggacag

SEQ ID NO: 1669805 - RNA, 13 nt, Human
auugacuuuuuau

SEQ ID NO: 1669806 - RNA, 18 nt, Human
auugacuuuuuauggcac

SEQ ID NO: 1669807 - RNA, 21 nt, Human
auugauuuccguuaaaauacc

SEQ ID NO: 1669808 - RNA, 18 nt, Human
auuuugccagugggaacu

SEQ ID NO: 1669809 - RNA, 21 nt, Human
auuuugcugucccuuuuccuu

SEQ ID NO: 1669810 - RNA, 20 nt, Human
auuuugcuaaaugugaauga

SEQ ID NO: 1669811 - RNA, 19 nt, Human
auuuugauccaagcugguc

SEQ ID NO: 1669812 - RNA, 17 nt, Human
auuuugauguuuuaagg

SEQ ID NO: 1669813 - RNA, 15 nt, Human
auuuugauguuuuaa

SEQ ID NO: 1669814 - RNA, 15 nt, Human
auuuuaauaaacacu

SEQ ID NO: 1669815 - RNA, 16 nt, Human
auuuuaauaaacacuc

SEQ ID NO: 1669816 - RNA, 17 nt, Human
auuuuaauaaacacucu

SEQ ID NO: 1669817 - RNA, 12 nt, Human
auuuuaauaaug

SEQ ID NO: 1669818 - RNA, 15 nt, Human
auuuucuauaauuua

SEQ ID NO: 1669819 - RNA, 14 nt, Human
auuuucuauaauuu

SEQ ID NO: 1669820 - RNA, 16 nt, Human
auuuuccugccaggca

SEQ ID NO: 1669821 - RNA, 19 nt, Human
auuuucccuauuagagaag

SEQ ID NO: 1669822 - RNA, 14 nt, Human
auuuuccugaaaac

SEQ ID NO: 1669823 - RNA, 20 nt, Human
auuuugcuuugugauuuuug

SEQ ID NO: 1669824 - RNA, 18 nt, Human
auuuugcuuugugauuuu

SEQ ID NO: 1669825 - RNA, 12 nt, Human
auuuugcuuugu

SEQ ID NO: 1669826 - RNA, 12 nt, Human
auuuuggaauuu

SEQ ID NO: 1669827 - RNA, 20 nt, Human
auuuuggaaaauaaauuauu

SEQ ID NO: 1669828 - RNA, 14 nt, Human
auuuuggaaaauaa

SEQ ID NO: 1669829 - RNA, 19 nt, Human
auuuuggaaaauaaauuau

SEQ ID NO: 1669830 - RNA, 19 nt, Human
auuuugugcccccauguaa

SEQ ID NO: 1669831 - RNA, 23 nt, Human
auuuugucauauaagauucauau

SEQ ID NO: 1669832 - RNA, 11 nt, Human
auuuuguuucu

SEQ ID NO: 1669833 - RNA, 16 nt, Human
auuuuguuucagugca

SEQ ID NO: 1669834 - RNA, 17 nt, Human
auuuuguguuuaggaac

SEQ ID NO: 1669835 - RNA, 14 nt, Human
auuuuguuucugua

SEQ ID NO: 1669836 - RNA, 15 nt, Human
auuuuguuucuguac

SEQ ID NO: 1669837 - RNA, 21 nt, Human
auuuuguuuuugucuuaaaaa

SEQ ID NO: 1669838 - RNA, 21 nt, Human
auuuuucuuagggaaggauac

SEQ ID NO: 1669839 - RNA, 22 nt, Human
auuuuucuuagggaaggauaca

SEQ ID NO: 1669840 - RNA, 15 nt, Human
auuuuucuuauuuca

SEQ ID NO: 1669841 - RNA, 19 nt, Human
auuuuucuuauuucauuuc

SEQ ID NO: 1669842 - RNA, 20 nt, Human
auuuuucuuauuucauuucu

SEQ ID NO: 1669843 - RNA, 19 nt, Human
auuuuuuacagcugccugc

SEQ ID NO: 1669844 - RNA, 20 nt, Human
auuuuuucucuaggaaauau

SEQ ID NO: 1669845 - RNA, 23 nt, Human
auuuuuucucuaggaaauauuua

SEQ ID NO: 1669846 - RNA, 18 nt, Human
auuuuuuguuaaaugauu

SEQ ID NO: 1669847 - RNA, 18 nt, Human
auuuuuuaaauugaauuc

SEQ ID NO: 1669848 - RNA, 14 nt, Human
auuuuuuaaaugca

SEQ ID NO: 1669849 - RNA, 13 nt, Human
auuuuuuaaaugc

SEQ ID NO: 1669850 - RNA, 21 nt, Human
auuuuuguuuucauuaucuca

SEQ ID NO: 1669851 - RNA, 22 nt, Human
auuuuugugauuuugugauuga

SEQ ID NO: 1669852 - RNA, 12 nt, Human
auuuuuguaauu

SEQ ID NO: 1669853 - RNA, 19 nt, Human
auuuuuguagagccagggu

SEQ ID NO: 1669854 - RNA, 13 nt, Human
auucuuccucccu

SEQ ID NO: 1669855 - RNA, 21 nt, Human
auucuuaaaguugaauuuauu

SEQ ID NO: 1669856 - RNA, 15 nt, Human
auucuguauagauua

SEQ ID NO: 1669857 - RNA, 19 nt, Human
auucuuaaaguugaauuua

SEQ ID NO: 1669858 - RNA, 20 nt, Human
auucuuaaaguugaauuuau

SEQ ID NO: 1669859 - RNA, 14 nt, Human
auucuuaaauaugu

SEQ ID NO: 1669860 - RNA, 15 nt, Human
auugaaaaaccauuu

SEQ ID NO: 1669861 - RNA, 20 nt, Human
auugaaaucuuuuugcuuug

SEQ ID NO: 1669862 - RNA, 17 nt, Human
auugaaaucuuuuugcu

SEQ ID NO: 1669863 - RNA, 18 nt, Human
auugaaaucuuuuugcuu

SEQ ID NO: 1669864 - RNA, 15 nt, Human
auugacacuuaaaaa

SEQ ID NO: 1669865 - RNA, 17 nt, Human
auugacacuuaaaaaug

SEQ ID NO: 1669866 - RNA, 22 nt, Human
auugaagcauuuuauaaaucgc

SEQ ID NO: 1669867 - RNA, 11 nt, Human
auugacuucuu

SEQ ID NO: 1669868 - RNA, 19 nt, Human
auugacacuuaaaaauggu

SEQ ID NO: 1669869 - RNA, 11 nt, Human
auucuguauag

SEQ ID NO: 1669870 - RNA, 12 nt, Human
auucuguauaga

SEQ ID NO: 1669871 - RNA, 13 nt, Human
auucuguauagau

SEQ ID NO: 1669872 - RNA, 14 nt, Human
auucuguuggccag

SEQ ID NO: 1669873 - RNA, 19 nt, Human
auucuguuggccaguguga

SEQ ID NO: 1669874 - RNA, 21 nt, Human
auucuguuggccagugugaca

SEQ ID NO: 1669875 - RNA, 18 nt, Human
auucugcucacauaucug

SEQ ID NO: 1669876 - RNA, 20 nt, Human
auucugccugcccaggcccc

SEQ ID NO: 1669877 - RNA, 21 nt, Human
auucugccugcccaggccccu

SEQ ID NO: 1669878 - RNA, 19 nt, Human
auucugcucacauaucugu

SEQ ID NO: 1669879 - RNA, 20 nt, Human
auucugcucacauaucuguc

SEQ ID NO: 1669880 - RNA, 21 nt, Human
auucugcucacauaucuguca

SEQ ID NO: 1669881 - RNA, 22 nt, Human
auucugcucacauaucugucau

SEQ ID NO: 1669882 - RNA, 11 nt, Human
auucugccugc

SEQ ID NO: 1669883 - RNA, 13 nt, Human
auucugccugccc

SEQ ID NO: 1669884 - RNA, 14 nt, Human
auucugccugccca

SEQ ID NO: 1669885 - RNA, 15 nt, Human
auucugccugcccag

SEQ ID NO: 1669886 - RNA, 16 nt, Human
auucugccugcccagg

SEQ ID NO: 1669887 - RNA, 17 nt, Human
auucugccugcccaggc

SEQ ID NO: 1669888 - RNA, 18 nt, Human
auucugccugcccaggcc

SEQ ID NO: 1669889 - RNA, 19 nt, Human
auucugccugcccaggccc

SEQ ID NO: 1669890 - RNA, 22 nt, Human
auucucaugccucagccuccug

SEQ ID NO: 1669891 - RNA, 17 nt, Human
auucucauuugucacac

SEQ ID NO: 1669892 - RNA, 15 nt, Human
auucuagcuuugagc

SEQ ID NO: 1669893 - RNA, 19 nt, Human
auucagacagcugccuggg

SEQ ID NO: 1669894 - RNA, 11 nt, Human
uuuguggaaaa

SEQ ID NO: 1669895 - RNA, 19 nt, Human
auuauacccccugcaaagc

SEQ ID NO: 1669896 - RNA, 14 nt, Human
auuauauuaugaag

SEQ ID NO: 1669897 - RNA, 15 nt, Human
auuauauuuacaaau

SEQ ID NO: 1669898 - RNA, 15 nt, Human
auuauuauuuggccc

SEQ ID NO: 1669899 - RNA, 15 nt, Human
auuauauuuauuacu

SEQ ID NO: 1669900 - RNA, 18 nt, Human
auuauauuuauuacugua

SEQ ID NO: 1669901 - RNA, 18 nt, Human
auuaucuagauacuguau

SEQ ID NO: 1669902 - RNA, 14 nt, Human
auuaucuagauacu

SEQ ID NO: 1669903 - RNA, 21 nt, Human
auuauguuaaaacugggacag

SEQ ID NO: 1669904 - RNA, 17 nt, Human
auuauucaaaguugccu

SEQ ID NO: 1669905 - RNA, 14 nt, Human
auuauucaaaguug

SEQ ID NO: 1669906 - RNA, 15 nt, Human
auuauucaaaguugc

SEQ ID NO: 1669907 - RNA, 13 nt, Human
auuauucaaaguu

SEQ ID NO: 1669908 - RNA, 19 nt, Human
auucaaacagucucaggaa

SEQ ID NO: 1669909 - RNA, 20 nt, Human
auucaaacagucucaggaaa

SEQ ID NO: 1669910 - RNA, 16 nt, Human
auucaaacagucucag

SEQ ID NO: 1669911 - RNA, 18 nt, Human
auucaaacagucucagga

SEQ ID NO: 1669912 - RNA, 21 nt, Human
auuccagagaguggcuccucc

SEQ ID NO: 1669913 - RNA, 19 nt, Human
auuccagagaguggcuccu

SEQ ID NO: 1669914 - RNA, 13 nt, Human
auucaggaagcuc

SEQ ID NO: 1669915 - RNA, 23 nt, Human
auuccccgucucugguuccuccc

SEQ ID NO: 1669916 - RNA, 22 nt, Human
auuccccacccugaaagcccug

SEQ ID NO: 1669917 - RNA, 18 nt, Human
auucagacagcugccugg

SEQ ID NO: 1669918 - RNA, 22 nt, Human
auucaggaagcagcuuucccca

SEQ ID NO: 1669919 - RNA, 12 nt, Human
auucaggaagcu

SEQ ID NO: 1669920 - RNA, 14 nt, Human
auucagacagcugc

SEQ ID NO: 1669921 - RNA, 15 nt, Human
auucagacagcugcc

SEQ ID NO: 1669922 - RNA, 16 nt, Human
auucagacagcugccu

SEQ ID NO: 1669923 - RNA, 17 nt, Human
auucagacagcugccug

SEQ ID NO: 1669924 - RNA, 12 nt, Human
auucagacagcu

SEQ ID NO: 1669925 - RNA, 13 nt, Human
auucagacagcug

SEQ ID NO: 1669926 - RNA, 11 nt, Human
auucagacagc

SEQ ID NO: 1669927 - RNA, 13 nt, Human
auucacauuguau

SEQ ID NO: 1669928 - RNA, 20 nt, Human
auucacauuguauucagagu

SEQ ID NO: 1669929 - RNA, 18 nt, Human
augggccuccugugugug

SEQ ID NO: 1669930 - RNA, 20 nt, Human
augggcuggguucuacccag

SEQ ID NO: 1669931 - RNA, 15 nt, Human
uuugaaauauugacu

SEQ ID NO: 1669932 - RNA, 15 nt, Human
augggggugcauuug

SEQ ID NO: 1669933 - RNA, 17 nt, Human
augggggcacugaggac

SEQ ID NO: 1669934 - RNA, 14 nt, Human
augggggugcauuu

SEQ ID NO: 1669935 - RNA, 24 nt, Human
auggggcugcaccggcuggccugg

SEQ ID NO: 1669936 - RNA, 20 nt, Human
uuucuguacuuuuuggcaua

SEQ ID NO: 1669937 - RNA, 19 nt, Human
uuucuguacuuuuuggcau

SEQ ID NO: 1669938 - RNA, 23 nt, Human
uuucugggcaccggggccucgga

SEQ ID NO: 1669939 - RNA, 21 nt, Human
uuucugcagccacuauuguua

SEQ ID NO: 1669940 - RNA, 19 nt, Human
uuucuguuauauaaauggu

SEQ ID NO: 1669941 - RNA, 19 nt, Human
uuucuggcuaugcauuuga

SEQ ID NO: 1669942 - RNA, 18 nt, Human
uuucuggcuaugcauuug

SEQ ID NO: 1669943 - RNA, 16 nt, Human
uuucuggcuaugcauu

SEQ ID NO: 1669944 - RNA, 15 nt, Human
uuucuggcuaugcau

SEQ ID NO: 1669945 - RNA, 19 nt, Human
uuucugcagccacuauugu

SEQ ID NO: 1669946 - RNA, 15 nt, Human
augggauaaaugcca

SEQ ID NO: 1669947 - RNA, 16 nt, Human
augggauaaaugccau

SEQ ID NO: 1669948 - RNA, 20 nt, Human
augggauaaaugccaucaau

SEQ ID NO: 1669949 - RNA, 15 nt, Human
augggauccuggagu

SEQ ID NO: 1669950 - RNA, 18 nt, Human
augggcaacccccagccu

SEQ ID NO: 1669951 - RNA, 17 nt, Human
uuucucccagucauuua

SEQ ID NO: 1669952 - RNA, 18 nt, Human
uuucucccagucauuuaa

SEQ ID NO: 1669953 - RNA, 19 nt, Human
auggugcaaugaccuuuca

SEQ ID NO: 1669954 - RNA, 16 nt, Human
auggugcaaugaccuu

SEQ ID NO: 1669955 - RNA, 17 nt, Human
auggugcaaugaccuuu

SEQ ID NO: 1669956 - RNA, 16 nt, Human
auggugaugaaaugua

SEQ ID NO: 1669957 - RNA, 17 nt, Human
auggugaugaaauguaa

SEQ ID NO: 1669958 - RNA, 14 nt, Human
auggugaugaaaug

SEQ ID NO: 1669959 - RNA, 15 nt, Human
augggugcuuggagg

SEQ ID NO: 1669960 - RNA, 20 nt, Human
auggugagggauacccaucc

SEQ ID NO: 1669961 - RNA, 20 nt, Human
augggugcuuggaggaagga

SEQ ID NO: 1669962 - RNA, 12 nt, Human
auggugcaauga

SEQ ID NO: 1669963 - RNA, 13 nt, Human
auggugcaaugac

SEQ ID NO: 1669964 - RNA, 15 nt, Human
auggugcaaugaccu

SEQ ID NO: 1669965 - RNA, 12 nt, Human
augguggcuggg

SEQ ID NO: 1669966 - RNA, 13 nt, Human
augguggcugggu

SEQ ID NO: 1669967 - RNA, 15 nt, Human
augguggcuggguug

SEQ ID NO: 1669968 - RNA, 17 nt, Human
augguggcuggguugga

SEQ ID NO: 1669969 - RNA, 14 nt, Human
auguaaaucccauu

SEQ ID NO: 1669970 - RNA, 20 nt, Human
auguaaaucccauuauucaa

SEQ ID NO: 1669971 - RNA, 22 nt, Human
auguaaaucccauuauucaaag

SEQ ID NO: 1669972 - RNA, 23 nt, Human
auguaaaucccauuauucaaagu

SEQ ID NO: 1669973 - RNA, 16 nt, Human
augguuuucaaaauaa

SEQ ID NO: 1669974 - RNA, 14 nt, Human
augguuuucuugug

SEQ ID NO: 1669975 - RNA, 14 nt, Human
augguuuucaaaau

SEQ ID NO: 1669976 - RNA, 15 nt, Human
augguuuucaaaaua

SEQ ID NO: 1669977 - RNA, 13 nt, Human
augguuguacaua

SEQ ID NO: 1669978 - RNA, 16 nt, Human
augguuuaacaaaaug

SEQ ID NO: 1669979 - RNA, 19 nt, Human
augguuccccuguucacuc

SEQ ID NO: 1669980 - RNA, 20 nt, Human
augguuccccuguucacucu

SEQ ID NO: 1669981 - RNA, 21 nt, Human
augguucccuugaugaagaag

SEQ ID NO: 1669982 - RNA, 18 nt, Human
auguaugagguacaaccu

SEQ ID NO: 1669983 - RNA, 21 nt, Human
uuuggcauaacauaaaucugu

SEQ ID NO: 1669984 - RNA, 20 nt, Human
uuuggcauaacauaaaucug

SEQ ID NO: 1669985 - RNA, 22 nt, Human
auguauuacaguggggaaugaa

SEQ ID NO: 1669986 - RNA, 16 nt, Human
auguauguguaaguau

SEQ ID NO: 1669987 - RNA, 17 nt, Human
augucucaggucccugc

SEQ ID NO: 1669988 - RNA, 22 nt, Human
augucucaggucccugcagggc

SEQ ID NO: 1669989 - RNA, 15 nt, Human
augucgccucugcau

SEQ ID NO: 1669990 - RNA, 13 nt, Human
augucgccucugc

SEQ ID NO: 1669991 - RNA, 14 nt, Human
augucgccucugca

SEQ ID NO: 1669992 - RNA, 17 nt, Human
augucucugagcauuag

SEQ ID NO: 1669993 - RNA, 12 nt, Human
augucaguguga

SEQ ID NO: 1669994 - RNA, 13 nt, Human
augucagugugac

SEQ ID NO: 1669995 - RNA, 17 nt, Human
auguccacugguucuuc

SEQ ID NO: 1669996 - RNA, 23 nt, Human
augucucuuuaaugucacaggca

SEQ ID NO: 1669997 - RNA, 16 nt, Human
augugaugagaggaaa

SEQ ID NO: 1669998 - RNA, 17 nt, Human
augugaugagaggaaau

SEQ ID NO: 1669999 - RNA, 19 nt, Human
augugaugagaggaaauca

SEQ ID NO: 1670000 - RNA, 23 nt, Human
augugcacaugcacgugugugca

SEQ ID NO: 1670001 - RNA, 13 nt, Human
uuuguaaugaaaa

SEQ ID NO: 1670002 - RNA, 14 nt, Human
uuuguaaugaaaac

SEQ ID NO: 1670003 - RNA, 12 nt, Human
uuuguauaaaag

SEQ ID NO: 1670004 - RNA, 19 nt, Human
uuuguaguguuggagaaga

SEQ ID NO: 1670005 - RNA, 21 nt, Human
uuuguaguguuggagaagaac

SEQ ID NO: 1670006 - RNA, 19 nt, Human
uuugugcugguguaugugu

SEQ ID NO: 1670007 - RNA, 20 nt, Human
uuugugaagguggaaauaaa

SEQ ID NO: 1670008 - RNA, 22 nt, Human
uuugugaaaugauggugaaagu

SEQ ID NO: 1670009 - RNA, 17 nt, Human
uuugugaagcaaaauuu

SEQ ID NO: 1670010 - RNA, 20 nt, Human
uuugacgccaucccagcccc

SEQ ID NO: 1670011 - RNA, 13 nt, Human
uuugacgccaucc

SEQ ID NO: 1670012 - RNA, 14 nt, Human
uuugacgccauccc

SEQ ID NO: 1670013 - RNA, 16 nt, Human
uuugacgccaucccag

SEQ ID NO: 1670014 - RNA, 19 nt, Human
uuugacgccaucccagccc

SEQ ID NO: 1670015 - RNA, 23 nt, Human
uuugauuaaauucuugcaaagua

SEQ ID NO: 1670016 - RNA, 21 nt, Human
uuugauucagacagcugccug

SEQ ID NO: 1670017 - RNA, 21 nt, Human
uuugauuaaauucuugcaaag

SEQ ID NO: 1670018 - RNA, 18 nt, Human
uuugauuaaauucuugca

SEQ ID NO: 1670019 - RNA, 13 nt, Human
uuugauuaaauuc

SEQ ID NO: 1670020 - RNA, 22 nt, Human
uuugauguucuuucacccuuuu

SEQ ID NO: 1670021 - RNA, 13 nt, Human
uuugccucugccu

SEQ ID NO: 1670022 - RNA, 22 nt, Human
uuugauucagacagcugccugg

SEQ ID NO: 1670023 - RNA, 15 nt, Human
uuugccguuauuaaa

SEQ ID NO: 1670024 - RNA, 14 nt, Human
uuugcaagccagau

SEQ ID NO: 1670025 - RNA, 16 nt, Human
auguacuucaugcugu

SEQ ID NO: 1670026 - RNA, 17 nt, Human
auguagaggagaaacug

SEQ ID NO: 1670027 - RNA, 19 nt, Human
auguagaggagaaacugga

SEQ ID NO: 1670028 - RNA, 12 nt, Human
auguagaggaga

SEQ ID NO: 1670029 - RNA, 13 nt, Human
auguagaggagaa

SEQ ID NO: 1670030 - RNA, 19 nt, Human
auguagccccucuccugga

SEQ ID NO: 1670031 - RNA, 12 nt, Human
uuugaccucugc

SEQ ID NO: 1670032 - RNA, 18 nt, Human
uuugaccucugcagcaau

SEQ ID NO: 1670033 - RNA, 17 nt, Human
augcagcaucuaaguaa

SEQ ID NO: 1670034 - RNA, 18 nt, Human
augcagccucacaguccu

SEQ ID NO: 1670035 - RNA, 12 nt, Human
uuuaauucaguu

SEQ ID NO: 1670036 - RNA, 21 nt, Human
uuuaaauaaauaaauagcuag

SEQ ID NO: 1670037 - RNA, 18 nt, Human
uuuaaauauaugcuaagu

SEQ ID NO: 1670038 - RNA, 14 nt, Human
augcccuggaucca

SEQ ID NO: 1670039 - RNA, 16 nt, Human
augccucagccuccug

SEQ ID NO: 1670040 - RNA, 12 nt, Human
augcccagcccc

SEQ ID NO: 1670041 - RNA, 13 nt, Human
augcccagccccu

SEQ ID NO: 1670042 - RNA, 14 nt, Human
augcccagccccuu

SEQ ID NO: 1670043 - RNA, 15 nt, Human
augcccagccccuuc

SEQ ID NO: 1670044 - RNA, 20 nt, Human
augcgugcauaccacuuuug

SEQ ID NO: 1670045 - RNA, 21 nt, Human
augcgggccagugcuccagcc

SEQ ID NO: 1670046 - RNA, 13 nt, Human
augcagugcuucc

SEQ ID NO: 1670047 - RNA, 23 nt, Human
augcagugguaugaucacggcuc

SEQ ID NO: 1670048 - RNA, 13 nt, Human
augcaguucugaa

SEQ ID NO: 1670049 - RNA, 17 nt, Human
augccauuuaaagcuua

SEQ ID NO: 1670050 - RNA, 21 nt, Human
augccauuuaaagcuuauuaa

SEQ ID NO: 1670051 - RNA, 17 nt, Human
augcacuuuguucuggc

SEQ ID NO: 1670052 - RNA, 19 nt, Human
augcacuuuguucuggcuc

SEQ ID NO: 1670053 - RNA, 20 nt, Human
augcacuuuguucuggcucu

SEQ ID NO: 1670054 - RNA, 13 nt, Human
augcaccuggaau

SEQ ID NO: 1670055 - RNA, 22 nt, Human
augcaccagcccuuagcaggga

SEQ ID NO: 1670056 - RNA, 13 nt, Human
uuuaaagaaugcu

SEQ ID NO: 1670057 - RNA, 21 nt, Human
augcacuuuguucuggcucuu

SEQ ID NO: 1670058 - RNA, 10 nt, Human
augauccagc

SEQ ID NO: 1670059 - RNA, 19 nt, Human
augauccagcagauuauuc

SEQ ID NO: 1670060 - RNA, 20 nt, Human
augauccagcagauuauuca

SEQ ID NO: 1670061 - RNA, 17 nt, Human
augauacuugaaaauua

SEQ ID NO: 1670062 - RNA, 21 nt, Human
augauacuugaaaauuaacau

SEQ ID NO: 1670063 - RNA, 22 nt, Human
augauccagcagauuauucacu

SEQ ID NO: 1670064 - RNA, 17 nt, Human
augaucuaggaagacuu

SEQ ID NO: 1670065 - RNA, 20 nt, Human
augaucuaggaagacuuugg

SEQ ID NO: 1670066 - RNA, 14 nt, Human
augauuaaguaaug

SEQ ID NO: 1670067 - RNA, 18 nt, Human
augauuaaguaaugauaa

SEQ ID NO: 1670068 - RNA, 20 nt, Human
uuguguuacuaaguuuuuau

SEQ ID NO: 1670069 - RNA, 15 nt, Human
uuguguuacuaaguu

SEQ ID NO: 1670070 - RNA, 13 nt, Human
uuguguuacuaag

SEQ ID NO: 1670071 - RNA, 13 nt, Human
uuguguucaccuu

SEQ ID NO: 1670072 - RNA, 21 nt, Human
uuguuccacaaguuaaauaaa

SEQ ID NO: 1670073 - RNA, 15 nt, Human
augauaacuggaaac

SEQ ID NO: 1670074 - RNA, 14 nt, Human
augggauaaaugcc

SEQ ID NO: 1670075 - RNA, 19 nt, Human
augggagagaagagaaugc

SEQ ID NO: 1670076 - RNA, 15 nt, Human
augggagagaagaga

SEQ ID NO: 1670077 - RNA, 18 nt, Human
auggcuaauguacugcau

SEQ ID NO: 1670078 - RNA, 19 nt, Human
auggcuaagcaaaauguga

SEQ ID NO: 1670079 - RNA, 18 nt, Human
auggagacugucucaaga

SEQ ID NO: 1670080 - RNA, 14 nt, Human
auggcacuaguauu

SEQ ID NO: 1670081 - RNA, 16 nt, Human
auggcacuaguauuuc

SEQ ID NO: 1670082 - RNA, 16 nt, Human
auggacuguggugacu

SEQ ID NO: 1670083 - RNA, 17 nt, Human
auggacuguggugacuu

SEQ ID NO: 1670084 - RNA, 22 nt, Human
auggacuguggugacuuuggau

SEQ ID NO: 1670085 - RNA, 11 nt, Human
auggacuuugu

SEQ ID NO: 1670086 - RNA, 12 nt, Human
auggacuuuguu

SEQ ID NO: 1670087 - RNA, 19 nt, Human
uuucauuauuuuauuauga

SEQ ID NO: 1670088 - RNA, 20 nt, Human
uuucauuauuuuauuaugaa

SEQ ID NO: 1670089 - RNA, 17 nt, Human
uuuccaugaguccccug

SEQ ID NO: 1670090 - RNA, 18 nt, Human
uuuccaugaguccccugu

SEQ ID NO: 1670091 - RNA, 13 nt, Human
uuucauuauuuua

SEQ ID NO: 1670092 - RNA, 15 nt, Human
uuucauuauuuuauu

SEQ ID NO: 1670093 - RNA, 13 nt, Human
augcugcuuuuuc

SEQ ID NO: 1670094 - RNA, 17 nt, Human
augcuguucaugaaaga

SEQ ID NO: 1670095 - RNA, 22 nt, Human
augcugugcccuaaaguguauu

SEQ ID NO: 1670096 - RNA, 23 nt, Human
augcuguucaugaaagauucaau

SEQ ID NO: 1670097 - RNA, 19 nt, Human
augcuguucaugaaagauu

SEQ ID NO: 1670098 - RNA, 15 nt, Human
auggaacgcguugaa

SEQ ID NO: 1670099 - RNA, 16 nt, Human
auggaacgcguugaaa

SEQ ID NO: 1670100 - RNA, 17 nt, Human
auggaacgcguugaaau

SEQ ID NO: 1670101 - RNA, 13 nt, Human
augcuucucacug

SEQ ID NO: 1670102 - RNA, 18 nt, Human
auggaacgcguugaaauu

SEQ ID NO: 1670103 - RNA, 19 nt, Human
auggaacgcguugaaauug

SEQ ID NO: 1670104 - RNA, 20 nt, Human
uuuauuuuguguuuaggaac

SEQ ID NO: 1670105 - RNA, 23 nt, Human
auggaacgcguugaaauuguaau

SEQ ID NO: 1670106 - RNA, 16 nt, Human
uuuauuuuguguuuag

SEQ ID NO: 1670107 - RNA, 22 nt, Human
uuucaaaauuguuacaaauugu

SEQ ID NO: 1670108 - RNA, 16 nt, Human
uuucaaacauauauaa

SEQ ID NO: 1670109 - RNA, 22 nt, Human
uuucaaacuuuacuauggcccu

SEQ ID NO: 1670110 - RNA, 16 nt, Human
uuucaaacuuuacuau

SEQ ID NO: 1670111 - RNA, 17 nt, Human
uuucaaacauauauaac

SEQ ID NO: 1670112 - RNA, 14 nt, Human
uuuauuacaguaua

SEQ ID NO: 1670113 - RNA, 18 nt, Human
uuuauuacaguauaauua

SEQ ID NO: 1670114 - RNA, 20 nt, Human
augcuagaacucccuuucaa

SEQ ID NO: 1670115 - RNA, 21 nt, Human
augcuagaacucccuuucaac

SEQ ID NO: 1670116 - RNA, 22 nt, Human
augcuagaacucccuuucaaca

SEQ ID NO: 1670117 - RNA, 21 nt, Human
augcuauuucuauauuuucau

SEQ ID NO: 1670118 - RNA, 22 nt, Human
augcuauuucuauauuuucauu

SEQ ID NO: 1670119 - RNA, 23 nt, Human
augcuauuucuauauuuucauuc

SEQ ID NO: 1670120 - RNA, 13 nt, Human
augcuauuucuau

SEQ ID NO: 1670121 - RNA, 14 nt, Human
augcuauuucuaua

SEQ ID NO: 1670122 - RNA, 15 nt, Human
augcuauuucuauau

SEQ ID NO: 1670123 - RNA, 20 nt, Human
augcuauuucuauauuuuca

SEQ ID NO: 1670124 - RNA, 11 nt, Human
augcuauuucu

SEQ ID NO: 1670125 - RNA, 16 nt, Human
uuuauauuuacuaaaa

SEQ ID NO: 1670126 - RNA, 13 nt, Human
uuuauauuuacua

SEQ ID NO: 1670127 - RNA, 16 nt, Human
augcuaagacucagug

SEQ ID NO: 1670128 - RNA, 13 nt, Human
augcuaagugaaa

SEQ ID NO: 1670129 - RNA, 17 nt, Human
uuuaucaugugaaauca

SEQ ID NO: 1670130 - RNA, 18 nt, Human
uuuaucaugugaaaucau

SEQ ID NO: 1670131 - RNA, 20 nt, Human
aucauuuuaccuuugacaaa

SEQ ID NO: 1670132 - RNA, 18 nt, Human
auccaagcuggucccacu

SEQ ID NO: 1670133 - RNA, 21 nt, Human
auccaagcuggucccacucag

SEQ ID NO: 1670134 - RNA, 13 nt, Human
auccacccaccuc

SEQ ID NO: 1670135 - RNA, 15 nt, Human
auccacccaccucag

SEQ ID NO: 1670136 - RNA, 16 nt, Human
auccacccaccucagc

SEQ ID NO: 1670137 - RNA, 16 nt, Human
auccaguaucuugaag

SEQ ID NO: 1670138 - RNA, 21 nt, Human
auccauuuggaaaucuuuaaa

SEQ ID NO: 1670139 - RNA, 13 nt, Human
auccaucaggcca

SEQ ID NO: 1670140 - RNA, 17 nt, Human
auccaguuuuguuugga

SEQ ID NO: 1670141 - RNA, 21 nt, Human
auccaguaucuugaagacuuu

SEQ ID NO: 1670142 - RNA, 18 nt, Human
aucccauaugccugggca

SEQ ID NO: 1670143 - RNA, 19 nt, Human
aucccaaacccuucagugc

SEQ ID NO: 1670144 - RNA, 20 nt, Human
aucccaaacccuucagugcc

SEQ ID NO: 1670145 - RNA, 23 nt, Human
uucugaacuuggcgcugccccug

SEQ ID NO: 1670146 - RNA, 15 nt, Human
uucugccauauucug

SEQ ID NO: 1670147 - RNA, 19 nt, Human
uucugaacuuggcgcugcc

SEQ ID NO: 1670148 - RNA, 22 nt, Human
uucugaacuuggcgcugccccu

SEQ ID NO: 1670149 - RNA, 21 nt, Human
uucugccugcccaggccccug

SEQ ID NO: 1670150 - RNA, 17 nt, Human
uucugccugcccaggcc

SEQ ID NO: 1670151 - RNA, 18 nt, Human
uucugccugcccaggccc

SEQ ID NO: 1670152 - RNA, 16 nt, Human
uucuggcucuuccagg

SEQ ID NO: 1670153 - RNA, 17 nt, Human
uucuggcucuuccaggc

SEQ ID NO: 1670154 - RNA, 14 nt, Human
aucaggugcugcca

SEQ ID NO: 1670155 - RNA, 21 nt, Human
uucuccuuguguuacuaaguu

SEQ ID NO: 1670156 - RNA, 20 nt, Human
uucucuaguuugauuaaauu

SEQ ID NO: 1670157 - RNA, 17 nt, Human
uucucuaguuugauuaa

SEQ ID NO: 1670158 - RNA, 15 nt, Human
uucucuaguuugauu

SEQ ID NO: 1670159 - RNA, 17 nt, Human
uucuccuuucacaaccu

SEQ ID NO: 1670160 - RNA, 12 nt, Human
uucucuaggaaa

SEQ ID NO: 1670161 - RNA, 14 nt, Human
uucuuuuuuuguga

SEQ ID NO: 1670162 - RNA, 15 nt, Human
uucuuuguaaugaaa

SEQ ID NO: 1670163 - RNA, 16 nt, Human
uucuuuguaaugaaaa

SEQ ID NO: 1670164 - RNA, 20 nt, Human
uucuucugcuucagccuccc

SEQ ID NO: 1670165 - RNA, 14 nt, Human
uucuucucccucag

SEQ ID NO: 1670166 - RNA, 13 nt, Human
uucuucugcuuca

SEQ ID NO: 1670167 - RNA, 15 nt, Human
uucuucugcuucagc

SEQ ID NO: 1670168 - RNA, 13 nt, Human
uucuucucccuca

SEQ ID NO: 1670169 - RNA, 24 nt, Human
aucccauaugccugggcagaagga

SEQ ID NO: 1670170 - RNA, 13 nt, Human
aucccaugagccu

SEQ ID NO: 1670171 - RNA, 14 nt, Human
aucccucauccuca

SEQ ID NO: 1670172 - RNA, 21 nt, Human
aucccucauccucauacccac

SEQ ID NO: 1670173 - RNA, 23 nt, Human
aucccucauccucauacccaccc

SEQ ID NO: 1670174 - RNA, 16 nt, Human
auccuccucagaucuu

SEQ ID NO: 1670175 - RNA, 16 nt, Human
auccuaggcauuugcu

SEQ ID NO: 1670176 - RNA, 18 nt, Human
auccuacaagacacagug

SEQ ID NO: 1670177 - RNA, 19 nt, Human
auccuacaagacacaguga

SEQ ID NO: 1670178 - RNA, 21 nt, Human
auccuaagcuauucaguaaua

SEQ ID NO: 1670179 - RNA, 12 nt, Human
auccuaagcuau

SEQ ID NO: 1670180 - RNA, 13 nt, Human
uugaaauuguaau

SEQ ID NO: 1670181 - RNA, 14 nt, Human
uugaaauuguaauu

SEQ ID NO: 1670182 - RNA, 15 nt, Human
uugaaauuguaauua

SEQ ID NO: 1670183 - RNA, 17 nt, Human
uugaaauuguaauuaua

SEQ ID NO: 1670184 - RNA, 17 nt, Human
uugaaauuguauuacaa

SEQ ID NO: 1670185 - RNA, 19 nt, Human
uugaacccgggaggcagag

SEQ ID NO: 1670186 - RNA, 14 nt, Human
uuccucugagccuu

SEQ ID NO: 1670187 - RNA, 17 nt, Human
uuccucugagccuuggg

SEQ ID NO: 1670188 - RNA, 21 nt, Human
uuccucugaggcugaaauuca

SEQ ID NO: 1670189 - RNA, 16 nt, Human
uuccuaauuccacagc

SEQ ID NO: 1670190 - RNA, 17 nt, Human
uuccuaauuccacagcu

SEQ ID NO: 1670191 - RNA, 18 nt, Human
uuccuaauuccacagcug

SEQ ID NO: 1670192 - RNA, 20 nt, Human
uuccuaaauauauuuuaaga

SEQ ID NO: 1670193 - RNA, 14 nt, Human
uuccugaacaggau

SEQ ID NO: 1670194 - RNA, 14 nt, Human
uuccugaaccgaug

SEQ ID NO: 1670195 - RNA, 15 nt, Human
uuccugaacaggaua

SEQ ID NO: 1670196 - RNA, 18 nt, Human
uuccugaagaauugaaaa

SEQ ID NO: 1670197 - RNA, 13 nt, Human
uuccucuuuccau

SEQ ID NO: 1670198 - RNA, 17 nt, Human
uuccucuuuccaucuac

SEQ ID NO: 1670199 - RNA, 22 nt, Human
uuccucuuuccaucuacccucc

SEQ ID NO: 1670200 - RNA, 16 nt, Human
uucccgcucagcccuc

SEQ ID NO: 1670201 - RNA, 18 nt, Human
uucccgcucagcccuccc

SEQ ID NO: 1670202 - RNA, 21 nt, Human
uucccgcucagcccucccugc

SEQ ID NO: 1670203 - RNA, 22 nt, Human
uucccgcucagcccucccugcc

SEQ ID NO: 1670204 - RNA, 20 nt, Human
uucccucaccuuucccaucu

SEQ ID NO: 1670205 - RNA, 16 nt, Human
uuccguuaaaauacca

SEQ ID NO: 1670206 - RNA, 14 nt, Human
uuccguuaaaauac

SEQ ID NO: 1670207 - RNA, 19 nt, Human
uuccguagguuauuuucag

SEQ ID NO: 1670208 - RNA, 23 nt, Human
aucaccugucuugccuuuuucau

SEQ ID NO: 1670209 - RNA, 14 nt, Human
aucaaugaguaaca

SEQ ID NO: 1670210 - RNA, 18 nt, Human
aucacggcucacugcagc

SEQ ID NO: 1670211 - RNA, 19 nt, Human
aucacggcucacugcagcc

SEQ ID NO: 1670212 - RNA, 13 nt, Human
aucacgccacugc

SEQ ID NO: 1670213 - RNA, 14 nt, Human
aucacgccacugca

SEQ ID NO: 1670214 - RNA, 15 nt, Human
aucacggcucacugc

SEQ ID NO: 1670215 - RNA, 14 nt, Human
aucaacagauaaau

SEQ ID NO: 1670216 - RNA, 20 nt, Human
auauuuuuuguuaaaugauu

SEQ ID NO: 1670217 - RNA, 18 nt, Human
auauuuuuuguuaaauga

SEQ ID NO: 1670218 - RNA, 11 nt, Human
uuccugugucu

SEQ ID NO: 1670219 - RNA, 13 nt, Human
aucagcacgauuu

SEQ ID NO: 1670220 - RNA, 15 nt, Human
aucaggccaggcccu

SEQ ID NO: 1670221 - RNA, 16 nt, Human
aucaggccaggcccuc

SEQ ID NO: 1670222 - RNA, 18 nt, Human
aucaggccaggcccucug

SEQ ID NO: 1670223 - RNA, 12 nt, Human
aucagaauucuc

SEQ ID NO: 1670224 - RNA, 20 nt, Human
aucaggccaggcccucugcc

SEQ ID NO: 1670225 - RNA, 17 nt, Human
aucaggguuaguauugu

SEQ ID NO: 1670226 - RNA, 18 nt, Human
uucucacuccuaccuggu

SEQ ID NO: 1670227 - RNA, 16 nt, Human
uucucacuccuaccug

SEQ ID NO: 1670228 - RNA, 13 nt, Human
uucuaggacugaa

SEQ ID NO: 1670229 - RNA, 14 nt, Human
uucuaggacugaau

SEQ ID NO: 1670230 - RNA, 16 nt, Human
uucuaggacugaauua

SEQ ID NO: 1670231 - RNA, 18 nt, Human
aucagaaguuucucagcu

SEQ ID NO: 1670232 - RNA, 11 nt, Human
aucagaauucu

SEQ ID NO: 1670233 - RNA, 22 nt, Human
aucacuugucaauaaaauccau

SEQ ID NO: 1670234 - RNA, 13 nt, Human
uucuaaaguaaaa

SEQ ID NO: 1670235 - RNA, 21 nt, Human
uucuaaaucuccaaaauaaaa

SEQ ID NO: 1670236 - RNA, 21 nt, Human
uucuaaaggcuaccuuuguau

SEQ ID NO: 1670237 - RNA, 20 nt, Human
uucuaaaggcuaccuuugua

SEQ ID NO: 1670238 - RNA, 15 nt, Human
uucggccuccauccu

SEQ ID NO: 1670239 - RNA, 15 nt, Human
uucgcuccugugucu

SEQ ID NO: 1670240 - RNA, 19 nt, Human
uucgcuccugugucuugca

SEQ ID NO: 1670241 - RNA, 14 nt, Human
uucggccuccaucc

SEQ ID NO: 1670242 - RNA, 15 nt, Human
uucuaaguaaaacca

SEQ ID NO: 1670243 - RNA, 16 nt, Human
uucuaaguaaaaccac

SEQ ID NO: 1670244 - RNA, 23 nt, Human
uucuaagaagugaaaaucuacac

SEQ ID NO: 1670245 - RNA, 16 nt, Human
uucuagcauggcugcc

SEQ ID NO: 1670246 - RNA, 15 nt, Human
aucucuugagccugg

SEQ ID NO: 1670247 - RNA, 18 nt, Human
aucucuugagccugggag

SEQ ID NO: 1670248 - RNA, 14 nt, Human
aucugaaaauguau

SEQ ID NO: 1670249 - RNA, 16 nt, Human
aucugaaaauguaugu

SEQ ID NO: 1670250 - RNA, 19 nt, Human
aucugaaaauguaugugua

SEQ ID NO: 1670251 - RNA, 20 nt, Human
aucugaaaauguauguguaa

SEQ ID NO: 1670252 - RNA, 22 nt, Human
aucugaaaauguauguguaagu

SEQ ID NO: 1670253 - RNA, 15 nt, Human
aucucccccagcccc

SEQ ID NO: 1670254 - RNA, 21 nt, Human
aucucuucuggguuccuuccu

SEQ ID NO: 1670255 - RNA, 21 nt, Human
aucucccccagccccauccuc

SEQ ID NO: 1670256 - RNA, 16 nt, Human
aucucccccagcccca

SEQ ID NO: 1670257 - RNA, 17 nt, Human
aucucccccagccccau

SEQ ID NO: 1670258 - RNA, 16 nt, Human
aucucagggccugguc

SEQ ID NO: 1670259 - RNA, 21 nt, Human
aucuccaaaauaaaacuuuuu

SEQ ID NO: 1670260 - RNA, 20 nt, Human
aucuccaaaauaaaacuuuu

SEQ ID NO: 1670261 - RNA, 17 nt, Human
aucuccaaaauaaaacu

SEQ ID NO: 1670262 - RNA, 14 nt, Human
aucuccaaaauaaa

SEQ ID NO: 1670263 - RNA, 14 nt, Human
aucucauuuccaag

SEQ ID NO: 1670264 - RNA, 23 nt, Human
aucugaaaauguauguguaagua

SEQ ID NO: 1670265 - RNA, 15 nt, Human
aucugacaucucugc

SEQ ID NO: 1670266 - RNA, 16 nt, Human
aucugacaucucugca

SEQ ID NO: 1670267 - RNA, 20 nt, Human
aucugacaucucugcaaucu

SEQ ID NO: 1670268 - RNA, 23 nt, Human
uugauguuuuaaggaugcuugua

SEQ ID NO: 1670269 - RNA, 13 nt, Human
uugauuaaauucu

SEQ ID NO: 1670270 - RNA, 14 nt, Human
uugauuaaauucuu

SEQ ID NO: 1670271 - RNA, 16 nt, Human
uugcaauggcagccuu

SEQ ID NO: 1670272 - RNA, 17 nt, Human
uugcaauggcagccuug

SEQ ID NO: 1670273 - RNA, 19 nt, Human
uugcaauggcagccuuggc

SEQ ID NO: 1670274 - RNA, 15 nt, Human
uugcaccacugcacu

SEQ ID NO: 1670275 - RNA, 16 nt, Human
uugcaccacugcacuc

SEQ ID NO: 1670276 - RNA, 18 nt, Human
uugcaccacugcacucca

SEQ ID NO: 1670277 - RNA, 13 nt, Human
uugcaucaauuuu

SEQ ID NO: 1670278 - RNA, 16 nt, Human
auccucuguacagagc

SEQ ID NO: 1670279 - RNA, 17 nt, Human
auccucuguacagagcc

SEQ ID NO: 1670280 - RNA, 20 nt, Human
auccucucaaccaccuuuca

SEQ ID NO: 1670281 - RNA, 19 nt, Human
aucuaaauggaaccacucu

SEQ ID NO: 1670282 - RNA, 18 nt, Human
aucuaaauggaaccacuc

SEQ ID NO: 1670283 - RNA, 17 nt, Human
aucuaaauggaaccacu

SEQ ID NO: 1670284 - RNA, 13 nt, Human
aucuaaauggaac

SEQ ID NO: 1670285 - RNA, 13 nt, Human
uugaagccuuugu

SEQ ID NO: 1670286 - RNA, 17 nt, Human
uugaagggaaauuucag

SEQ ID NO: 1670287 - RNA, 13 nt, Human
uugaaucacagua

SEQ ID NO: 1670288 - RNA, 20 nt, Human
uugaguugauucagcucugc

SEQ ID NO: 1670289 - RNA, 20 nt, Human
uugagugaagcugggagaac

SEQ ID NO: 1670290 - RNA, 11 nt, Human
uugagugccuu

SEQ ID NO: 1670291 - RNA, 15 nt, Human
uugauacuacaguuu

SEQ ID NO: 1670292 - RNA, 18 nt, Human
aucuaauauguaacaagc

SEQ ID NO: 1670293 - RNA, 20 nt, Human
aucuaauauguaacaagcca

SEQ ID NO: 1670294 - RNA, 18 nt, Human
aucuacacuccagugaga

SEQ ID NO: 1670295 - RNA, 19 nt, Human
aucuacacuccagugagac

SEQ ID NO: 1670296 - RNA, 16 nt, Human
uugagauguguucaca

SEQ ID NO: 1670297 - RNA, 16 nt, Human
uugagaucagccuggg

SEQ ID NO: 1670298 - RNA, 18 nt, Human
aucuuugcagacaggcaa

SEQ ID NO: 1670299 - RNA, 22 nt, Human
aucuuuucauuuaggugaggaa

SEQ ID NO: 1670300 - RNA, 17 nt, Human
aucuuugcagacaggca

SEQ ID NO: 1670301 - RNA, 18 nt, Human
augaaagggcccagagag

SEQ ID NO: 1670302 - RNA, 16 nt, Human
uuggagggugucccaa

SEQ ID NO: 1670303 - RNA, 18 nt, Human
uuggccccugcccggcug

SEQ ID NO: 1670304 - RNA, 14 nt, Human
uugcuugaaagaaa

SEQ ID NO: 1670305 - RNA, 11 nt, Human
uuggagacaga

SEQ ID NO: 1670306 - RNA, 15 nt, Human
augaauuacauuugu

SEQ ID NO: 1670307 - RNA, 21 nt, Human
augaauauuuaguguucauaa

SEQ ID NO: 1670308 - RNA, 23 nt, Human
augaauggcuaagcaaaauguga

SEQ ID NO: 1670309 - RNA, 18 nt, Human
uuggggaccagagcugcc

SEQ ID NO: 1670310 - RNA, 16 nt, Human
augaauuacauuugua

SEQ ID NO: 1670311 - RNA, 17 nt, Human
augaauuacauuuguau

SEQ ID NO: 1670312 - RNA, 11 nt, Human
augaagaggag

SEQ ID NO: 1670313 - RNA, 16 nt, Human
augaauauuuaguguu

SEQ ID NO: 1670314 - RNA, 18 nt, Human
augaacuuguaaaggaau

SEQ ID NO: 1670315 - RNA, 19 nt, Human
augaaagggcccagagagg

SEQ ID NO: 1670316 - RNA, 11 nt, Human
aucugccuaag

SEQ ID NO: 1670317 - RNA, 21 nt, Human
aucugccuaaggacuucuuua

SEQ ID NO: 1670318 - RNA, 22 nt, Human
aucugccuaaggacuucuuuaa

SEQ ID NO: 1670319 - RNA, 23 nt, Human
aucugccuaaggacuucuuuaau

SEQ ID NO: 1670320 - RNA, 10 nt, Human
aucuggugac

SEQ ID NO: 1670321 - RNA, 16 nt, Human
aucuggugacuuuccu

SEQ ID NO: 1670322 - RNA, 17 nt, Human
aucuggugacuuuccuc

SEQ ID NO: 1670323 - RNA, 17 nt, Human
aucugugaaaggaaaga

SEQ ID NO: 1670324 - RNA, 12 nt, Human
uugcuccuugac

SEQ ID NO: 1670325 - RNA, 23 nt, Human
aucugugaaaggaaagagggagg

SEQ ID NO: 1670326 - RNA, 18 nt, Human
aucugugaaaggaaagag

SEQ ID NO: 1670327 - RNA, 14 nt, Human
aucuuauaauuuaa

SEQ ID NO: 1670328 - RNA, 13 nt, Human
aucuugcucugcu

SEQ ID NO: 1670329 - RNA, 20 nt, Human
aucuuggucagauuugaacu

SEQ ID NO: 1670330 - RNA, 23 nt, Human
uuacuguacagacagaaaaaacu

SEQ ID NO: 1670331 - RNA, 12 nt, Human
uuacuguacaug

SEQ ID NO: 1670332 - RNA, 23 nt, Human
uuacuguacaugaaaacacauuu

SEQ ID NO: 1670333 - RNA, 22 nt, Human
uuacuguacaugaaaacacauu

SEQ ID NO: 1670334 - RNA, 14 nt, Human
uuacuguacaugaa

SEQ ID NO: 1670335 - RNA, 13 nt, Human
uuacuguacauga

SEQ ID NO: 1670336 - RNA, 15 nt, Human
uuacugcagcuuugu

SEQ ID NO: 1670337 - RNA, 16 nt, Human
uuagaagucacacagu

SEQ ID NO: 1670338 - RNA, 14 nt, Human
uuagaauucuguau

SEQ ID NO: 1670339 - RNA, 15 nt, Human
uuagaauucuguaua

SEQ ID NO: 1670340 - RNA, 17 nt, Human
uuagaauucuguauaga

SEQ ID NO: 1670341 - RNA, 14 nt, Human
auaagauucauauu

SEQ ID NO: 1670342 - RNA, 13 nt, Human
auaaauugcuccu

SEQ ID NO: 1670343 - RNA, 16 nt, Human
auaaauugcuccuuga

SEQ ID NO: 1670344 - RNA, 15 nt, Human
auaaaucugugaacu

SEQ ID NO: 1670345 - RNA, 16 nt, Human
auaaaucugugaacuu

SEQ ID NO: 1670346 - RNA, 19 nt, Human
auaaaucugugaacuugaa

SEQ ID NO: 1670347 - RNA, 17 nt, Human
auaaaugccaucaauaa

SEQ ID NO: 1670348 - RNA, 18 nt, Human
auaaaugccaucaauaaa

SEQ ID NO: 1670349 - RNA, 16 nt, Human
auaaaucgcuuuugau

SEQ ID NO: 1670350 - RNA, 19 nt, Human
auaaaucgcuuuugauaau

SEQ ID NO: 1670351 - RNA, 21 nt, Human
auaaaucgcuuuugauaauca

SEQ ID NO: 1670352 - RNA, 17 nt, Human
uuacaguggggaaugaa

SEQ ID NO: 1670353 - RNA, 19 nt, Human
uuaccagcagagcaccuua

SEQ ID NO: 1670354 - RNA, 20 nt, Human
uuacauaagauaaaugugcu

SEQ ID NO: 1670355 - RNA, 14 nt, Human
uuacaggugugaac

SEQ ID NO: 1670356 - RNA, 15 nt, Human
auaacuauguugaua

SEQ ID NO: 1670357 - RNA, 18 nt, Human
auaaauugcuccuugaca

SEQ ID NO: 1670358 - RNA, 21 nt, Human
uuauaaaaauaaaaaacacug

SEQ ID NO: 1670359 - RNA, 22 nt, Human
uuauaaaaauaaaaaacacugg

SEQ ID NO: 1670360 - RNA, 13 nt, Human
uuauaaacuuuac

SEQ ID NO: 1670361 - RNA, 19 nt, Human
uuaguacuccccuccuuga

SEQ ID NO: 1670362 - RNA, 13 nt, Human
uuaguagagacag

SEQ ID NO: 1670363 - RNA, 15 nt, Human
uuauaaaaauaaaaa

SEQ ID NO: 1670364 - RNA, 17 nt, Human
uuaguagagacaggguu

SEQ ID NO: 1670365 - RNA, 14 nt, Human
uuaguagagacagg

SEQ ID NO: 1670366 - RNA, 14 nt, Human
uuaguaaucauauu

SEQ ID NO: 1670367 - RNA, 13 nt, Human
uuaguaaucauau

SEQ ID NO: 1670368 - RNA, 18 nt, Human
uuagguuggcaaaaaggc

SEQ ID NO: 1670369 - RNA, 19 nt, Human
uuaggugugggggaagcac

SEQ ID NO: 1670370 - RNA, 15 nt, Human
uuaggugaggaagca

SEQ ID NO: 1670371 - RNA, 14 nt, Human
uuaggguuaugauu

SEQ ID NO: 1670372 - RNA, 16 nt, Human
uuaggguuaugauuaa

SEQ ID NO: 1670373 - RNA, 15 nt, Human
uuagggagagaagau

SEQ ID NO: 1670374 - RNA, 21 nt, Human
auaagauucauauuuacuucu

SEQ ID NO: 1670375 - RNA, 22 nt, Human
auaagccaaaaaaugcuugcuu

SEQ ID NO: 1670376 - RNA, 14 nt, Human
auaagccagacauc

SEQ ID NO: 1670377 - RNA, 23 nt, Human
auaauucacauuguauucagagu

SEQ ID NO: 1670378 - RNA, 14 nt, Human
auaaucuuucacag

SEQ ID NO: 1670379 - RNA, 20 nt, Human
auaauucaggaagcagcuuu

SEQ ID NO: 1670380 - RNA, 12 nt, Human
auaauuuuaaau

SEQ ID NO: 1670381 - RNA, 13 nt, Human
auaauuuuaaaug

SEQ ID NO: 1670382 - RNA, 14 nt, Human
auaauuuuaaaugu

SEQ ID NO: 1670383 - RNA, 13 nt, Human
uuaaucuuuaauu

SEQ ID NO: 1670384 - RNA, 17 nt, Human
uuaaucuuuaauuuuac

SEQ ID NO: 1670385 - RNA, 14 nt, Human
uuaauuuuggaauu

SEQ ID NO: 1670386 - RNA, 15 nt, Human
uuaauuuuggaauuu

SEQ ID NO: 1670387 - RNA, 13 nt, Human
uuaauuuuggaau

SEQ ID NO: 1670388 - RNA, 16 nt, Human
uuaauuugguuuucac

SEQ ID NO: 1670389 - RNA, 22 nt, Human
uuaagacgaaacauuuguucua

SEQ ID NO: 1670390 - RNA, 22 nt, Human
uuaagagagucuauuuacggaa

SEQ ID NO: 1670391 - RNA, 15 nt, Human
uuaaucuaaauggaa

SEQ ID NO: 1670392 - RNA, 19 nt, Human
auaaaagccuguuuaagag

SEQ ID NO: 1670393 - RNA, 20 nt, Human
auaaaagccuguuuaagaga

SEQ ID NO: 1670394 - RNA, 22 nt, Human
auaaaagggacugagaaauuua

SEQ ID NO: 1670395 - RNA, 22 nt, Human
uuaacuuuuauaaacuuuaccu

SEQ ID NO: 1670396 - RNA, 23 nt, Human
uuaacuuuuauaaacuuuaccuu

SEQ ID NO: 1670397 - RNA, 23 nt, Human
uuaagacauuuuuggaaggggac

SEQ ID NO: 1670398 - RNA, 18 nt, Human
uuaagacauuuuuggaag

SEQ ID NO: 1670399 - RNA, 19 nt, Human
uuaagacgaaacauuuguu

SEQ ID NO: 1670400 - RNA, 19 nt, Human
uuaagaaaaaggaugcaca

SEQ ID NO: 1670401 - RNA, 14 nt, Human
uuaagaaugaaaua

SEQ ID NO: 1670402 - RNA, 20 nt, Human
uuaagaaugaaauacuguuu

SEQ ID NO: 1670403 - RNA, 22 nt, Human
uuaagaaugaaauacuguuuga

SEQ ID NO: 1670404 - RNA, 18 nt, Human
aguuuuguuuggaccaaa

SEQ ID NO: 1670405 - RNA, 15 nt, Human
aguuuuuuuuauaca

SEQ ID NO: 1670406 - RNA, 14 nt, Human
aguuuuguuuggac

SEQ ID NO: 1670407 - RNA, 16 nt, Human
aguuuuguuuggacca

SEQ ID NO: 1670408 - RNA, 12 nt, Human
aguuuuguuugg

SEQ ID NO: 1670409 - RNA, 16 nt, Human
aguuuuauaugcuucu

SEQ ID NO: 1670410 - RNA, 17 nt, Human
uuaaaccaugggauaaa

SEQ ID NO: 1670411 - RNA, 22 nt, Human
uuaaacauugguucuuguauua

SEQ ID NO: 1670412 - RNA, 20 nt, Human
uuaaacauugguucuuguau

SEQ ID NO: 1670413 - RNA, 12 nt, Human
uuaaaaugagaa

SEQ ID NO: 1670414 - RNA, 19 nt, Human
uuaaaaugagaaaucuaaa

SEQ ID NO: 1670415 - RNA, 20 nt, Human
uuaaaaaucucaaauuucua

SEQ ID NO: 1670416 - RNA, 19 nt, Human
uuaaaaaucucaaauuucu

SEQ ID NO: 1670417 - RNA, 16 nt, Human
uuaaaaaauggaacau

SEQ ID NO: 1670418 - RNA, 20 nt, Human
uuaaaaaugguuuaaauggu

SEQ ID NO: 1670419 - RNA, 22 nt, Human
uuaaaaucauuucugcaucagc

SEQ ID NO: 1670420 - RNA, 19 nt, Human
uuaaaaaagaaacauuugg

SEQ ID NO: 1670421 - RNA, 16 nt, Human
aguuuagcuggaaaag

SEQ ID NO: 1670422 - RNA, 15 nt, Human
aguuuagcuggaaaa

SEQ ID NO: 1670423 - RNA, 20 nt, Human
aguuuaaauuguaauaggcg

SEQ ID NO: 1670424 - RNA, 17 nt, Human
aguuuaaauuguaauag

SEQ ID NO: 1670425 - RNA, 15 nt, Human
aguuuguugaaacac

SEQ ID NO: 1670426 - RNA, 19 nt, Human
aguuucugccgcagcccug

SEQ ID NO: 1670427 - RNA, 22 nt, Human
aguuuguuaguaugaggcauuu

SEQ ID NO: 1670428 - RNA, 15 nt, Human
aguuucugccgcagc

SEQ ID NO: 1670429 - RNA, 13 nt, Human
aguuucucagcuc

SEQ ID NO: 1670430 - RNA, 15 nt, Human
aguuucucagcuccc

SEQ ID NO: 1670431 - RNA, 14 nt, Human
aguuucucuuuuca

SEQ ID NO: 1670432 - RNA, 16 nt, Human
uuaacagaaauguaca

SEQ ID NO: 1670433 - RNA, 14 nt, Human
uuaacagaaaugua

SEQ ID NO: 1670434 - RNA, 13 nt, Human
uuaacagaaaugu

SEQ ID NO: 1670435 - RNA, 12 nt, Human
uuaacagaaaug

SEQ ID NO: 1670436 - RNA, 13 nt, Human
uuaaaguugaauu

SEQ ID NO: 1670437 - RNA, 16 nt, Human
uuaaaguugaauuuau

SEQ ID NO: 1670438 - RNA, 17 nt, Human
uuaaaguugaauuuauu

SEQ ID NO: 1670439 - RNA, 22 nt, Human
uuaaaguugaauuuauuggcuu

SEQ ID NO: 1670440 - RNA, 21 nt, Human
uuaaaccaugggauaaaugcc

SEQ ID NO: 1670441 - RNA, 22 nt, Human
uuaaaccaugggauaaaugcca

SEQ ID NO: 1670442 - RNA, 23 nt, Human
uuaaaccaugggauaaaugccau

SEQ ID NO: 1670443 - RNA, 15 nt, Human
uuaugugaaacaugu

SEQ ID NO: 1670444 - RNA, 22 nt, Human
uuaugugccagauuuaugcaua

SEQ ID NO: 1670445 - RNA, 16 nt, Human
uuaugugcgcugauaa

SEQ ID NO: 1670446 - RNA, 13 nt, Human
uuaugugaaacau

SEQ ID NO: 1670447 - RNA, 11 nt, Human
uuauguaaauc

SEQ ID NO: 1670448 - RNA, 12 nt, Human
uuauguaaaucc

SEQ ID NO: 1670449 - RNA, 13 nt, Human
uuauguaaauccc

SEQ ID NO: 1670450 - RNA, 19 nt, Human
uuauguaaaucccauuauu

SEQ ID NO: 1670451 - RNA, 21 nt, Human
uuauguaaaucccauuauuca

SEQ ID NO: 1670452 - RNA, 22 nt, Human
uuauguaaaucccauuauucaa

SEQ ID NO: 1670453 - RNA, 23 nt, Human
uuauguaaaucccauuauucaaa

SEQ ID NO: 1670454 - RNA, 22 nt, Human
uuaugggcuggguucuacccag

SEQ ID NO: 1670455 - RNA, 22 nt, Human
uuaugauccagcagauuauuca

SEQ ID NO: 1670456 - RNA, 23 nt, Human
uuaugauccagcagauuauucac

SEQ ID NO: 1670457 - RNA, 19 nt, Human
uuaugauuaaguaaugaua

SEQ ID NO: 1670458 - RNA, 13 nt, Human
uuaugggcugggu

SEQ ID NO: 1670459 - RNA, 19 nt, Human
uuauggcuuuugugcauua

SEQ ID NO: 1670460 - RNA, 22 nt, Human
uuaugauuaaguaaugauaacu

SEQ ID NO: 1670461 - RNA, 16 nt, Human
uuaugaaacuugugua

SEQ ID NO: 1670462 - RNA, 18 nt, Human
uuaugaaacuuguguaaa

SEQ ID NO: 1670463 - RNA, 13 nt, Human
uuaugaaacuugu

SEQ ID NO: 1670464 - RNA, 19 nt, Human
uuaugaaacuuguguaaau

SEQ ID NO: 1670465 - RNA, 14 nt, Human
uuaugaaacuuuug

SEQ ID NO: 1670466 - RNA, 17 nt, Human
uuaugaaacuuuuggaa

SEQ ID NO: 1670467 - RNA, 18 nt, Human
uuaugaaacuuuuggaag

SEQ ID NO: 1670468 - RNA, 20 nt, Human
uuaugaagcuuuuaugugaa

SEQ ID NO: 1670469 - RNA, 19 nt, Human
uuaugaaacuuuuggaagg

SEQ ID NO: 1670470 - RNA, 21 nt, Human
uuaucacccagaagaaaauag

SEQ ID NO: 1670471 - RNA, 19 nt, Human
uuaucacccagaagaaaau

SEQ ID NO: 1670472 - RNA, 18 nt, Human
uuaucacccagaagaaaa

SEQ ID NO: 1670473 - RNA, 17 nt, Human
uuaucacccagaagaaa

SEQ ID NO: 1670474 - RNA, 13 nt, Human
uuaugauccagca

SEQ ID NO: 1670475 - RNA, 18 nt, Human
uuaugauccagcagauua

SEQ ID NO: 1670476 - RNA, 20 nt, Human
uuaugauacuugaaaauuaa

SEQ ID NO: 1670477 - RNA, 19 nt, Human
uuaugacuucauuaauaau

SEQ ID NO: 1670478 - RNA, 22 nt, Human
uuaugacuucauuaauaauaaa

SEQ ID NO: 1670479 - RNA, 14 nt, Human
uuaugagcugugag

SEQ ID NO: 1670480 - RNA, 21 nt, Human
uuaugagcugugagaagggug

SEQ ID NO: 1670481 - RNA, 14 nt, Human
uuaugaauuacauu

SEQ ID NO: 1670482 - RNA, 16 nt, Human
uuaugaauuacauuug

SEQ ID NO: 1670483 - RNA, 17 nt, Human
uuaugaauuacauuugu

SEQ ID NO: 1670484 - RNA, 11 nt, Human
uuaugacucca

SEQ ID NO: 1670485 - RNA, 21 nt, Human
uuaugaauuacauuuguauaa

SEQ ID NO: 1670486 - RNA, 21 nt, Human
auacaggaugaugacuaugga

SEQ ID NO: 1670487 - RNA, 18 nt, Human
auacaguuacucagaauu

SEQ ID NO: 1670488 - RNA, 23 nt, Human
auacagauagauauaugcucugc

SEQ ID NO: 1670489 - RNA, 23 nt, Human
auacaggaaaagcugcugacagu

SEQ ID NO: 1670490 - RNA, 20 nt, Human
auacaguuacucagaauucu

SEQ ID NO: 1670491 - RNA, 22 nt, Human
uuauaaacuuuuuucuuacugu

SEQ ID NO: 1670492 - RNA, 12 nt, Human
uuauaaacuuuu

SEQ ID NO: 1670493 - RNA, 16 nt, Human
uuauaaacuuuuuucu

SEQ ID NO: 1670494 - RNA, 18 nt, Human
uuauaaacuuuaccuuuu

SEQ ID NO: 1670495 - RNA, 17 nt, Human
uuauaaacuuuaccuuu

SEQ ID NO: 1670496 - RNA, 16 nt, Human
auacagaggcaacugc

SEQ ID NO: 1670497 - RNA, 17 nt, Human
auacagaggcaacugca

SEQ ID NO: 1670498 - RNA, 19 nt, Human
uuauauuugaaauauugac

SEQ ID NO: 1670499 - RNA, 20 nt, Human
auacuaaccagcagaaaugc

SEQ ID NO: 1670500 - RNA, 19 nt, Human
auacuaaccagcagaaaug

SEQ ID NO: 1670501 - RNA, 13 nt, Human
auacuaaccagca

SEQ ID NO: 1670502 - RNA, 17 nt, Human
auacuauggaauuucuc

SEQ ID NO: 1670503 - RNA, 14 nt, Human
auaccuuuuuuaga

SEQ ID NO: 1670504 - RNA, 17 nt, Human
auaccagccaguaaaug

SEQ ID NO: 1670505 - RNA, 18 nt, Human
auaccacuuuuguucuug

SEQ ID NO: 1670506 - RNA, 17 nt, Human
auaccacuuuuguucuu

SEQ ID NO: 1670507 - RNA, 18 nt, Human
auacgugggcauucaaau

SEQ ID NO: 1670508 - RNA, 19 nt, Human
auacgugggcauucaaaug

SEQ ID NO: 1670509 - RNA, 16 nt, Human
auacguacacauuuua

SEQ ID NO: 1670510 - RNA, 15 nt, Human
auacguacacauuuu

SEQ ID NO: 1670511 - RNA, 14 nt, Human
auacguacacauuu

SEQ ID NO: 1670512 - RNA, 13 nt, Human
auacguacacauu

SEQ ID NO: 1670513 - RNA, 15 nt, Human
auacuggauuguacu

SEQ ID NO: 1670514 - RNA, 18 nt, Human
auacucuuauagacaaca

SEQ ID NO: 1670515 - RNA, 14 nt, Human
auacucuuauaucu

SEQ ID NO: 1670516 - RNA, 18 nt, Human
auacucuuauaucuauau

SEQ ID NO: 1670517 - RNA, 16 nt, Human
auacucugcuuagaau

SEQ ID NO: 1670518 - RNA, 17 nt, Human
auacuccuccaagguua

SEQ ID NO: 1670519 - RNA, 14 nt, Human
auacucccaucugu

SEQ ID NO: 1670520 - RNA, 11 nt, Human
auacucccauc

SEQ ID NO: 1670521 - RNA, 16 nt, Human
auacucauuaggaugg

SEQ ID NO: 1670522 - RNA, 20 nt, Human
uuauucacuuuuauuuagca

SEQ ID NO: 1670523 - RNA, 14 nt, Human
uuauucacugauuu

SEQ ID NO: 1670524 - RNA, 12 nt, Human
uuauucauaauu

SEQ ID NO: 1670525 - RNA, 13 nt, Human
uuauucaaaguug

SEQ ID NO: 1670526 - RNA, 15 nt, Human
uuauucaaaguugcc

SEQ ID NO: 1670527 - RNA, 19 nt, Human
uuauucaaaguugccuaaa

SEQ ID NO: 1670528 - RNA, 16 nt, Human
uuauuauguaaauccc

SEQ ID NO: 1670529 - RNA, 22 nt, Human
uuauuauguaaaucccauuauu

SEQ ID NO: 1670530 - RNA, 13 nt, Human
uuauuauguaaau

SEQ ID NO: 1670531 - RNA, 14 nt, Human
uuauuauguaaauc

SEQ ID NO: 1670532 - RNA, 13 nt, Human
uuauuaugcauga

SEQ ID NO: 1670533 - RNA, 14 nt, Human
uuauuauauuuaca

SEQ ID NO: 1670534 - RNA, 19 nt, Human
uuauguuaaaacugggaca

SEQ ID NO: 1670535 - RNA, 17 nt, Human
uuauuaugaaacuugug

SEQ ID NO: 1670536 - RNA, 20 nt, Human
uuauuaugaaacuuguguaa

SEQ ID NO: 1670537 - RNA, 21 nt, Human
uuauuaugaaacuuguguaaa

SEQ ID NO: 1670538 - RNA, 22 nt, Human
uuauuaugaaacuuguguaaau

SEQ ID NO: 1670539 - RNA, 23 nt, Human
uuauuaugaaacuuguguaaaua

SEQ ID NO: 1670540 - RNA, 12 nt, Human
uuauuaugcaug

SEQ ID NO: 1670541 - RNA, 11 nt, Human
uuauuaugaaa

SEQ ID NO: 1670542 - RNA, 15 nt, Human
uuauuauauuuacaa

SEQ ID NO: 1670543 - RNA, 14 nt, Human
auagaaccucuuug

SEQ ID NO: 1670544 - RNA, 20 nt, Human
auagaaccucuuugucuaca

SEQ ID NO: 1670545 - RNA, 13 nt, Human
auagaaguaaaaa

SEQ ID NO: 1670546 - RNA, 23 nt, Human
auagacaauuuauuauggcacau

SEQ ID NO: 1670547 - RNA, 22 nt, Human
auagacaauuuauuauggcaca

SEQ ID NO: 1670548 - RNA, 16 nt, Human
auagacaauuuauuau

SEQ ID NO: 1670549 - RNA, 14 nt, Human
auagaauaaaauuu

SEQ ID NO: 1670550 - RNA, 19 nt, Human
auagaauaaaauuuuuaau

SEQ ID NO: 1670551 - RNA, 22 nt, Human
auagaauaaaauuuuuaaucuu

SEQ ID NO: 1670552 - RNA, 17 nt, Human
auagaauuaacacauga

SEQ ID NO: 1670553 - RNA, 22 nt, Human
auagauuagagaguguugaaac

SEQ ID NO: 1670554 - RNA, 13 nt, Human
auagauuagaauu

SEQ ID NO: 1670555 - RNA, 15 nt, Human
auagauuagaauucu

SEQ ID NO: 1670556 - RNA, 16 nt, Human
auagauuagaauucug

SEQ ID NO: 1670557 - RNA, 21 nt, Human
auagauuagagaguguugaaa

SEQ ID NO: 1670558 - RNA, 18 nt, Human
auagacccacaagaggca

SEQ ID NO: 1670559 - RNA, 14 nt, Human
auagagagagacca

SEQ ID NO: 1670560 - RNA, 21 nt, Human
auagaggaagccugauuaaag

SEQ ID NO: 1670561 - RNA, 22 nt, Human
auagaggaagccugauuaaaga

SEQ ID NO: 1670562 - RNA, 18 nt, Human
auagauaggucagugcaa

SEQ ID NO: 1670563 - RNA, 21 nt, Human
ugugcucaggagcccugggag

SEQ ID NO: 1670564 - RNA, 12 nt, Human
ugugcucugauc

SEQ ID NO: 1670565 - RNA, 18 nt, Human
ugugcugagucugaaggc

SEQ ID NO: 1670566 - RNA, 19 nt, Human
ugugcugagucugaaggcu

SEQ ID NO: 1670567 - RNA, 12 nt, Human
ugugcugcccug

SEQ ID NO: 1670568 - RNA, 21 nt, Human
uguggaucaaauccagccugc

SEQ ID NO: 1670569 - RNA, 14 nt, Human
uguggaugauaaaa

SEQ ID NO: 1670570 - RNA, 22 nt, Human
uguggauuuaacagaaauguac

SEQ ID NO: 1670571 - RNA, 23 nt, Human
agugagcugguuuuuagcggaga

SEQ ID NO: 1670572 - RNA, 20 nt, Human
uguggauuuaacagaaaugu

SEQ ID NO: 1670573 - RNA, 19 nt, Human
uguggauuuaacagaaaug

SEQ ID NO: 1670574 - RNA, 19 nt, Human
ugugcugggguuaucugaa

SEQ ID NO: 1670575 - RNA, 20 nt, Human
ugugcugguguaugugugaa

SEQ ID NO: 1670576 - RNA, 18 nt, Human
ugugcugcccugcccacc

SEQ ID NO: 1670577 - RNA, 19 nt, Human
ugugcugcccugcccaccu

SEQ ID NO: 1670578 - RNA, 20 nt, Human
ugugcugcccugcccaccug

SEQ ID NO: 1670579 - RNA, 21 nt, Human
ugugcugcccugcccaccugg

SEQ ID NO: 1670580 - RNA, 14 nt, Human
agugccaaaaacaa

SEQ ID NO: 1670581 - RNA, 16 nt, Human
agugcaugcugucccu

SEQ ID NO: 1670582 - RNA, 17 nt, Human
agugcacuaauguguaa

SEQ ID NO: 1670583 - RNA, 21 nt, Human
agugcacuaauguguaagaca

SEQ ID NO: 1670584 - RNA, 17 nt, Human
agugcagugagccgaga

SEQ ID NO: 1670585 - RNA, 16 nt, Human
agugaggaugaaaaaa

SEQ ID NO: 1670586 - RNA, 21 nt, Human
agugaguuggguguauugugc

SEQ ID NO: 1670587 - RNA, 13 nt, Human
agugaggcucugc

SEQ ID NO: 1670588 - RNA, 12 nt, Human
agugaggcucug

SEQ ID NO: 1670589 - RNA, 14 nt, Human
agugcaaauuguca

SEQ ID NO: 1670590 - RNA, 12 nt, Human
agucugaaggcu

SEQ ID NO: 1670591 - RNA, 13 nt, Human
agucuuagaugua

SEQ ID NO: 1670592 - RNA, 17 nt, Human
agucuugucucagauuu

SEQ ID NO: 1670593 - RNA, 19 nt, Human
agucuugucucagauuuua

SEQ ID NO: 1670594 - RNA, 16 nt, Human
agucuugucucagauu

SEQ ID NO: 1670595 - RNA, 23 nt, Human
agucuuagauguauauauuuccu

SEQ ID NO: 1670596 - RNA, 14 nt, Human
agucuuagauguau

SEQ ID NO: 1670597 - RNA, 16 nt, Human
agucuuagauguauau

SEQ ID NO: 1670598 - RNA, 19 nt, Human
agucucuucuccacuggau

SEQ ID NO: 1670599 - RNA, 21 nt, Human
agucucuucuccacuggaugg

SEQ ID NO: 1670600 - RNA, 16 nt, Human
agucucuugauucaua

SEQ ID NO: 1670601 - RNA, 17 nt, Human
agucucuugauucauaa

SEQ ID NO: 1670602 - RNA, 18 nt, Human
ugugacuucagcucuguu

SEQ ID NO: 1670603 - RNA, 19 nt, Human
ugugacuucagcucuguuu

SEQ ID NO: 1670604 - RNA, 16 nt, Human
ugugacugaucucucg

SEQ ID NO: 1670605 - RNA, 11 nt, Human
ugugaggaagc

SEQ ID NO: 1670606 - RNA, 12 nt, Human
ugugaggaagcc

SEQ ID NO: 1670607 - RNA, 14 nt, Human
agugagcacuaagg

SEQ ID NO: 1670608 - RNA, 22 nt, Human
agugagcacuaaggugugcucu

SEQ ID NO: 1670609 - RNA, 22 nt, Human
ugugaugaugaaaugaggucag

SEQ ID NO: 1670610 - RNA, 19 nt, Human
ugugaugagaggaaaucac

SEQ ID NO: 1670611 - RNA, 12 nt, Human
agugagcugguu

SEQ ID NO: 1670612 - RNA, 18 nt, Human
agucuuucacauuuaaau

SEQ ID NO: 1670613 - RNA, 21 nt, Human
agugaacaaauuuacagagac

SEQ ID NO: 1670614 - RNA, 20 nt, Human
agucuugucucagauuuuau

SEQ ID NO: 1670615 - RNA, 21 nt, Human
agucuugucucagauuuuauu

SEQ ID NO: 1670616 - RNA, 16 nt, Human
agucuuucacauuuaa

SEQ ID NO: 1670617 - RNA, 20 nt, Human
agugaacuugggccacugug

SEQ ID NO: 1670618 - RNA, 21 nt, Human
agugacugauggcuaauguac

SEQ ID NO: 1670619 - RNA, 16 nt, Human
agugaacuugggccac

SEQ ID NO: 1670620 - RNA, 22 nt, Human
agugaacaaauuuacagagaca

SEQ ID NO: 1670621 - RNA, 23 nt, Human
agugaacaaauuuacagagacag

SEQ ID NO: 1670622 - RNA, 13 nt, Human
uguuaugacucca

SEQ ID NO: 1670623 - RNA, 17 nt, Human
uguuaugacuccagaau

SEQ ID NO: 1670624 - RNA, 22 nt, Human
agugugguguuuccuggcacug

SEQ ID NO: 1670625 - RNA, 19 nt, Human
uguuccacaaguuaaauaa

SEQ ID NO: 1670626 - RNA, 15 nt, Human
aguguggcaaaauaa

SEQ ID NO: 1670627 - RNA, 21 nt, Human
agugugccugaagucccagau

SEQ ID NO: 1670628 - RNA, 20 nt, Human
agugugacugaucucucgug

SEQ ID NO: 1670629 - RNA, 18 nt, Human
aguguguguuuuucauaa

SEQ ID NO: 1670630 - RNA, 19 nt, Human
aguguguguuuuucauaaa

SEQ ID NO: 1670631 - RNA, 16 nt, Human
aguguuguggauuuaa

SEQ ID NO: 1670632 - RNA, 23 nt, Human
aguuacuaucaugucaaacguga

SEQ ID NO: 1670633 - RNA, 13 nt, Human
aguuacucagaau

SEQ ID NO: 1670634 - RNA, 20 nt, Human
aguguuguggauuuaacaga

SEQ ID NO: 1670635 - RNA, 19 nt, Human
aguguuguggauuuaacag

SEQ ID NO: 1670636 - RNA, 15 nt, Human
uguugcauagaauaa

SEQ ID NO: 1670637 - RNA, 15 nt, Human
uguucuaagaaguga

SEQ ID NO: 1670638 - RNA, 23 nt, Human
uguugcccaggcuggcgugcagu

SEQ ID NO: 1670639 - RNA, 20 nt, Human
uguugcccaggcuggcgugc

SEQ ID NO: 1670640 - RNA, 22 nt, Human
uguugcccacagcuguaugauu

SEQ ID NO: 1670641 - RNA, 20 nt, Human
ugugucuugcaauggcagcc

SEQ ID NO: 1670642 - RNA, 11 nt, Human
uguguguuuau

SEQ ID NO: 1670643 - RNA, 16 nt, Human
agugcccuccaggaua

SEQ ID NO: 1670644 - RNA, 17 nt, Human
aguggauggaaggggcu

SEQ ID NO: 1670645 - RNA, 15 nt, Human
aguggggacagagca

SEQ ID NO: 1670646 - RNA, 14 nt, Human
aguggggaggggcu

SEQ ID NO: 1670647 - RNA, 16 nt, Human
aguggggaaugaagau

SEQ ID NO: 1670648 - RNA, 11 nt, Human
aguggcagcug

SEQ ID NO: 1670649 - RNA, 22 nt, Human
uguuaaguugauggugaugaaa

SEQ ID NO: 1670650 - RNA, 17 nt, Human
uguuacaaauuguagaa

SEQ ID NO: 1670651 - RNA, 18 nt, Human
uguuacaaauuguagaag

SEQ ID NO: 1670652 - RNA, 19 nt, Human
uguuacauaagauaaaugu

SEQ ID NO: 1670653 - RNA, 22 nt, Human
uguguuaucacccagaagaaaa

SEQ ID NO: 1670654 - RNA, 16 nt, Human
uguguuagagauuuuu

SEQ ID NO: 1670655 - RNA, 23 nt, Human
uguguuaucacccagaagaaaau

SEQ ID NO: 1670656 - RNA, 16 nt, Human
uguuaacugagugccu

SEQ ID NO: 1670657 - RNA, 22 nt, Human
uguuaacugagugccuuuuggu

SEQ ID NO: 1670658 - RNA, 17 nt, Human
agucaccccggccaccu

SEQ ID NO: 1670659 - RNA, 15 nt, Human
agucaccaagcccag

SEQ ID NO: 1670660 - RNA, 19 nt, Human
aguauucuuauuuaaugaa

SEQ ID NO: 1670661 - RNA, 13 nt, Human
aguauaauuaaca

SEQ ID NO: 1670662 - RNA, 14 nt, Human
aguauaauuaacau

SEQ ID NO: 1670663 - RNA, 16 nt, Human
aguauaauuaacaugu

SEQ ID NO: 1670664 - RNA, 23 nt, Human
aguauaauuaacauguuaaacca

SEQ ID NO: 1670665 - RNA, 12 nt, Human
aguauuaagcau

SEQ ID NO: 1670666 - RNA, 14 nt, Human
aguauuaagcauau

SEQ ID NO: 1670667 - RNA, 14 nt, Human
uguccaagaagccc

SEQ ID NO: 1670668 - RNA, 15 nt, Human
uguccaagaagccca

SEQ ID NO: 1670669 - RNA, 17 nt, Human
ugucagguggggcagcu

SEQ ID NO: 1670670 - RNA, 18 nt, Human
ugucagguggggcagcuu

SEQ ID NO: 1670671 - RNA, 20 nt, Human
ugucagguggggcagcuuga

SEQ ID NO: 1670672 - RNA, 20 nt, Human
ugucauuugagcagggcuca

SEQ ID NO: 1670673 - RNA, 21 nt, Human
ugucauuugagcagggcucag

SEQ ID NO: 1670674 - RNA, 22 nt, Human
ugucauuugagcagggcucagc

SEQ ID NO: 1670675 - RNA, 16 nt, Human
uguccaagaagcccag

SEQ ID NO: 1670676 - RNA, 17 nt, Human
uguccaagaagcccagg

SEQ ID NO: 1670677 - RNA, 18 nt, Human
uguccaagaagcccagga

SEQ ID NO: 1670678 - RNA, 22 nt, Human
uguccaagaagcccaggaaagg

SEQ ID NO: 1670679 - RNA, 20 nt, Human
ugucccugcacuugcagacu

SEQ ID NO: 1670680 - RNA, 22 nt, Human
ugucccugcacuugcagacucu

SEQ ID NO: 1670681 - RNA, 23 nt, Human
ugucccugcacuugcagacucua

SEQ ID NO: 1670682 - RNA, 17 nt, Human
agucccaggcugagccu

SEQ ID NO: 1670683 - RNA, 18 nt, Human
agucccaggcugagccuc

SEQ ID NO: 1670684 - RNA, 19 nt, Human
agucccaggcugagccuca

SEQ ID NO: 1670685 - RNA, 18 nt, Human
agucccaccuuggcugca

SEQ ID NO: 1670686 - RNA, 19 nt, Human
agucccaccuuggcugcag

SEQ ID NO: 1670687 - RNA, 20 nt, Human
agucccaccuuggcugcagg

SEQ ID NO: 1670688 - RNA, 15 nt, Human
agucccaccuuggcu

SEQ ID NO: 1670689 - RNA, 16 nt, Human
agucccaccuuggcug

SEQ ID NO: 1670690 - RNA, 14 nt, Human
ugucgccucugcau

SEQ ID NO: 1670691 - RNA, 19 nt, Human
ugucccuuacgugaguccu

SEQ ID NO: 1670692 - RNA, 23 nt, Human
ugucccuuacgugaguccuggca

SEQ ID NO: 1670693 - RNA, 22 nt, Human
agucagaaguuucugccgcagc

SEQ ID NO: 1670694 - RNA, 14 nt, Human
agucaggaaagaga

SEQ ID NO: 1670695 - RNA, 16 nt, Human
agucccccugccccag

SEQ ID NO: 1670696 - RNA, 14 nt, Human
aguccucccaucuc

SEQ ID NO: 1670697 - RNA, 16 nt, Human
aguccucccaucucac

SEQ ID NO: 1670698 - RNA, 15 nt, Human
agucuauuuacggaa

SEQ ID NO: 1670699 - RNA, 20 nt, Human
agucuauuuacggaacucaa

SEQ ID NO: 1670700 - RNA, 23 nt, Human
agucucacuguugcccaggcugg

SEQ ID NO: 1670701 - RNA, 13 nt, Human
agucucaggaaau

SEQ ID NO: 1670702 - RNA, 16 nt, Human
agucucaggaaaucaa

SEQ ID NO: 1670703 - RNA, 12 nt, Human
aggugugcucug

SEQ ID NO: 1670704 - RNA, 14 nt, Human
agguugaagcacca

SEQ ID NO: 1670705 - RNA, 16 nt, Human
aggugucccugcacuu

SEQ ID NO: 1670706 - RNA, 20 nt, Human
aggugucccugcacuugcag

SEQ ID NO: 1670707 - RNA, 21 nt, Human
aggugugagucaccaagccca

SEQ ID NO: 1670708 - RNA, 22 nt, Human
aggugugagucaccaagcccag

SEQ ID NO: 1670709 - RNA, 13 nt, Human
ugggcugcccugg

SEQ ID NO: 1670710 - RNA, 14 nt, Human
ugggcugcccuggu

SEQ ID NO: 1670711 - RNA, 15 nt, Human
ugggcugcccuggug

SEQ ID NO: 1670712 - RNA, 16 nt, Human
ugggcugcccuggugc

SEQ ID NO: 1670713 - RNA, 12 nt, Human
aggugggaggau

SEQ ID NO: 1670714 - RNA, 16 nt, Human
aggugcuacaaaaaca

SEQ ID NO: 1670715 - RNA, 14 nt, Human
uguacauauaagug

SEQ ID NO: 1670716 - RNA, 14 nt, Human
uguacaugaaaaca

SEQ ID NO: 1670717 - RNA, 16 nt, Human
uguacaugaaaacaca

SEQ ID NO: 1670718 - RNA, 20 nt, Human
uguacauaaugcgugcauac

SEQ ID NO: 1670719 - RNA, 19 nt, Human
uguacauaaugcgugcaua

SEQ ID NO: 1670720 - RNA, 20 nt, Human
uguaauuuuuuuaucgucac

SEQ ID NO: 1670721 - RNA, 20 nt, Human
agguuggcaaaaaggcagga

SEQ ID NO: 1670722 - RNA, 13 nt, Human
uguaagggaaacu

SEQ ID NO: 1670723 - RNA, 18 nt, Human
uguaagggaaacugccag

SEQ ID NO: 1670724 - RNA, 23 nt, Human
uguaauuaaguacuauguaucaa

SEQ ID NO: 1670725 - RNA, 19 nt, Human
uguaauuaaguacuaugua

SEQ ID NO: 1670726 - RNA, 21 nt, Human
uguaauuaaguacuauguauc

SEQ ID NO: 1670727 - RNA, 18 nt, Human
uguaauuaaguacuaugu

SEQ ID NO: 1670728 - RNA, 19 nt, Human
uguaagggaaacugccagc

SEQ ID NO: 1670729 - RNA, 21 nt, Human
aguacacuguuucaaacuuua

SEQ ID NO: 1670730 - RNA, 23 nt, Human
aguacacuguuucaaacuuuacu

SEQ ID NO: 1670731 - RNA, 13 nt, Human
aguaaugauaacu

SEQ ID NO: 1670732 - RNA, 12 nt, Human
aguaauuggaaa

SEQ ID NO: 1670733 - RNA, 13 nt, Human
aguaauuggaaag

SEQ ID NO: 1670734 - RNA, 16 nt, Human
aguaaaaacaaagaaa

SEQ ID NO: 1670735 - RNA, 23 nt, Human
aguaaaaacaaagaaauuaugug

SEQ ID NO: 1670736 - RNA, 21 nt, Human
uguacauggaauaacauguaa

SEQ ID NO: 1670737 - RNA, 16 nt, Human
aguaaaaccacagcag

SEQ ID NO: 1670738 - RNA, 17 nt, Human
aguaaaaccacagcagu

SEQ ID NO: 1670739 - RNA, 19 nt, Human
aguaaaaccacagcaguug

SEQ ID NO: 1670740 - RNA, 20 nt, Human
aguaaaaccacagcaguuga

SEQ ID NO: 1670741 - RNA, 17 nt, Human
uguaguguuggagaaga

SEQ ID NO: 1670742 - RNA, 18 nt, Human
uguaguguuggagaagaa

SEQ ID NO: 1670743 - RNA, 18 nt, Human
uguauauauuuccuauau

SEQ ID NO: 1670744 - RNA, 22 nt, Human
uguauauauuuccuauauuguu

SEQ ID NO: 1670745 - RNA, 16 nt, Human
uguaggguuauaauaa

SEQ ID NO: 1670746 - RNA, 17 nt, Human
uguaggguuauaauaau

SEQ ID NO: 1670747 - RNA, 16 nt, Human
uguaguguuggagaag

SEQ ID NO: 1670748 - RNA, 21 nt, Human
uggaggaaaaccaagccgugg

SEQ ID NO: 1670749 - RNA, 23 nt, Human
uggaggaaaaccaagccguggcu

SEQ ID NO: 1670750 - RNA, 15 nt, Human
aggcaaugcuggcug

SEQ ID NO: 1670751 - RNA, 16 nt, Human
aggcaaugcuggcugu

SEQ ID NO: 1670752 - RNA, 23 nt, Human
uggagccugcacggugaauggcu

SEQ ID NO: 1670753 - RNA, 22 nt, Human
uggacuuuguuaguuucuccaa

SEQ ID NO: 1670754 - RNA, 11 nt, Human
uggacuuuguu

SEQ ID NO: 1670755 - RNA, 19 nt, Human
uggagcccacuguacuugc

SEQ ID NO: 1670756 - RNA, 23 nt, Human
uggagcccacuguacuugcucuu

SEQ ID NO: 1670757 - RNA, 16 nt, Human
uggagcccacuguacu

SEQ ID NO: 1670758 - RNA, 24 nt, Human
uggacuuuguuaguuucuccaagc

SEQ ID NO: 1670759 - RNA, 16 nt, Human
uggagaagaacugaaa

SEQ ID NO: 1670760 - RNA, 21 nt, Human
aggcaggucuugaacuccugg

SEQ ID NO: 1670761 - RNA, 22 nt, Human
aggcaguugagaaaauuugaau

SEQ ID NO: 1670762 - RNA, 22 nt, Human
aggcagggucucacucugucgc

SEQ ID NO: 1670763 - RNA, 14 nt, Human
aggcagguccaggg

SEQ ID NO: 1670764 - RNA, 19 nt, Human
aggcagggucucacucugu

SEQ ID NO: 1670765 - RNA, 18 nt, Human
aggcagggucucacucug

SEQ ID NO: 1670766 - RNA, 20 nt, Human
aggcagggucucacucuguc

SEQ ID NO: 1670767 - RNA, 21 nt, Human
aggcagggucucacucugucg

SEQ ID NO: 1670768 - RNA, 16 nt, Human
aggcagggagggccug

SEQ ID NO: 1670769 - RNA, 20 nt, Human
aggcaggaguuucguuuuca

SEQ ID NO: 1670770 - RNA, 12 nt, Human
aggcaggauggc

SEQ ID NO: 1670771 - RNA, 15 nt, Human
aggcacccaccauca

SEQ ID NO: 1670772 - RNA, 19 nt, Human
aggcagccccauucugccu

SEQ ID NO: 1670773 - RNA, 20 nt, Human
aggcagccccauucugccug

SEQ ID NO: 1670774 - RNA, 21 nt, Human
aggcagccccauucugccugc

SEQ ID NO: 1670775 - RNA, 22 nt, Human
aggcagccccauucugccugcc

SEQ ID NO: 1670776 - RNA, 20 nt, Human
aggcagcucuaaaugucaau

SEQ ID NO: 1670777 - RNA, 17 nt, Human
uggacaaaauggaauac

SEQ ID NO: 1670778 - RNA, 14 nt, Human
uggacaaaauggaa

SEQ ID NO: 1670779 - RNA, 15 nt, Human
uggacaccggaaaca

SEQ ID NO: 1670780 - RNA, 17 nt, Human
uggaauuuuccuccuuu

SEQ ID NO: 1670781 - RNA, 21 nt, Human
uggaauuuuccuccuuucucu

SEQ ID NO: 1670782 - RNA, 14 nt, Human
uggaauuugaaaca

SEQ ID NO: 1670783 - RNA, 16 nt, Human
aggcaacuugggaacu

SEQ ID NO: 1670784 - RNA, 16 nt, Human
aggauuuuaugcuuua

SEQ ID NO: 1670785 - RNA, 17 nt, Human
aggauuuuaugcuuuaa

SEQ ID NO: 1670786 - RNA, 14 nt, Human
aggcaagcaccucc

SEQ ID NO: 1670787 - RNA, 18 nt, Human
aggaugcuuguacauaau

SEQ ID NO: 1670788 - RNA, 22 nt, Human
aggauugcuacuguccuaccca

SEQ ID NO: 1670789 - RNA, 11 nt, Human
aggauuuuaug

SEQ ID NO: 1670790 - RNA, 14 nt, Human
aggauuuuaugcuu

SEQ ID NO: 1670791 - RNA, 15 nt, Human
aggauuuuaugcuuu

SEQ ID NO: 1670792 - RNA, 12 nt, Human
aggaucagucug

SEQ ID NO: 1670793 - RNA, 21 nt, Human
aggauccugagccagauuuca

SEQ ID NO: 1670794 - RNA, 16 nt, Human
aggaugcuuguacaua

SEQ ID NO: 1670795 - RNA, 15 nt, Human
aggaugcuuguacau

SEQ ID NO: 1670796 - RNA, 12 nt, Human
aggaucucuuga

SEQ ID NO: 1670797 - RNA, 14 nt, Human
uggaagugcuaauu

SEQ ID NO: 1670798 - RNA, 15 nt, Human
aggaggccagccuug

SEQ ID NO: 1670799 - RNA, 19 nt, Human
aggaguuucguuuucaaaa

SEQ ID NO: 1670800 - RNA, 21 nt, Human
aggaguuugagaccaaccugg

SEQ ID NO: 1670801 - RNA, 20 nt, Human
uggaaguacuauaauuuacc

SEQ ID NO: 1670802 - RNA, 13 nt, Human
uggaagcuccgcu

SEQ ID NO: 1670803 - RNA, 14 nt, Human
uggaacacucugag

SEQ ID NO: 1670804 - RNA, 12 nt, Human
uggaacacucug

SEQ ID NO: 1670805 - RNA, 10 nt, Human
ugcugcccug

SEQ ID NO: 1670806 - RNA, 12 nt, Human
ugcugcccugcc

SEQ ID NO: 1670807 - RNA, 13 nt, Human
aggccuggccaga

SEQ ID NO: 1670808 - RNA, 12 nt, Human
aggccuggccag

SEQ ID NO: 1670809 - RNA, 17 nt, Human
aggcccggcuccaggcu

SEQ ID NO: 1670810 - RNA, 14 nt, Human
aggcccggcuccag

SEQ ID NO: 1670811 - RNA, 15 nt, Human
aggcccggcuccagg

SEQ ID NO: 1670812 - RNA, 16 nt, Human
aggcccggcuccaggc

SEQ ID NO: 1670813 - RNA, 19 nt, Human
aggcccagagggccugcaa

SEQ ID NO: 1670814 - RNA, 20 nt, Human
aggcccagagggccugcaag

SEQ ID NO: 1670815 - RNA, 13 nt, Human
aggccccugccac

SEQ ID NO: 1670816 - RNA, 15 nt, Human
aggccccugccaccc

SEQ ID NO: 1670817 - RNA, 17 nt, Human
aggccccugccacccug

SEQ ID NO: 1670818 - RNA, 18 nt, Human
aggccccugccacccugg

SEQ ID NO: 1670819 - RNA, 21 nt, Human
aggccccugccacccugggga

SEQ ID NO: 1670820 - RNA, 17 nt, Human
uggcagccgugccuuca

SEQ ID NO: 1670821 - RNA, 18 nt, Human
uggcaccagcagccugga

SEQ ID NO: 1670822 - RNA, 16 nt, Human
uggcaccagcagccug

SEQ ID NO: 1670823 - RNA, 17 nt, Human
uggcaccagcagccugg

SEQ ID NO: 1670824 - RNA, 16 nt, Human
uggcacagggcagugg

SEQ ID NO: 1670825 - RNA, 15 nt, Human
uggcacagggcagug

SEQ ID NO: 1670826 - RNA, 20 nt, Human
aggccauuccccgucucugg

SEQ ID NO: 1670827 - RNA, 15 nt, Human
aggcccagagggccu

SEQ ID NO: 1670828 - RNA, 16 nt, Human
aggcccagagggccug

SEQ ID NO: 1670829 - RNA, 22 nt, Human
uggcagccgugccuucagcucu

SEQ ID NO: 1670830 - RNA, 23 nt, Human
aggccagagacacaagccuucgg

SEQ ID NO: 1670831 - RNA, 18 nt, Human
aggccaugggccuccugu

SEQ ID NO: 1670832 - RNA, 18 nt, Human
uggcagccgugccuucag

SEQ ID NO: 1670833 - RNA, 19 nt, Human
uggcagccgugccuucagc

SEQ ID NO: 1670834 - RNA, 20 nt, Human
uggcagccgugccuucagcu

SEQ ID NO: 1670835 - RNA, 21 nt, Human
uggcagccgugccuucagcuc

SEQ ID NO: 1670836 - RNA, 14 nt, Human
uggcagcucagaga

SEQ ID NO: 1670837 - RNA, 15 nt, Human
uggcagcucagagag

SEQ ID NO: 1670838 - RNA, 16 nt, Human
uggcagcucagagagg

SEQ ID NO: 1670839 - RNA, 18 nt, Human
uggcagcucagagagggu

SEQ ID NO: 1670840 - RNA, 13 nt, Human
aggccagagacac

SEQ ID NO: 1670841 - RNA, 18 nt, Human
aggccagagacacaagcc

SEQ ID NO: 1670842 - RNA, 13 nt, Human
uggcccugcccug

SEQ ID NO: 1670843 - RNA, 21 nt, Human
uggccucugcugauccuccca

SEQ ID NO: 1670844 - RNA, 20 nt, Human
uggccucugcacuccccugc

SEQ ID NO: 1670845 - RNA, 19 nt, Human
uggccucugcacuccccug

SEQ ID NO: 1670846 - RNA, 12 nt, Human
uggcccugcccu

SEQ ID NO: 1670847 - RNA, 19 nt, Human
uggcccacgcacuucggga

SEQ ID NO: 1670848 - RNA, 13 nt, Human
uggcccacugcau

SEQ ID NO: 1670849 - RNA, 14 nt, Human
uggcccacugcauc

SEQ ID NO: 1670850 - RNA, 14 nt, Human
aggcgccccuuccc

SEQ ID NO: 1670851 - RNA, 17 nt, Human
aggccuucucugaagga

SEQ ID NO: 1670852 - RNA, 18 nt, Human
aggccuucucugaaggac

SEQ ID NO: 1670853 - RNA, 13 nt, Human
aggcuccaggagc

SEQ ID NO: 1670854 - RNA, 14 nt, Human
aggcuccaggagca

SEQ ID NO: 1670855 - RNA, 16 nt, Human
aggcuccaggagcagc

SEQ ID NO: 1670856 - RNA, 11 nt, Human
aggcuccacuu

SEQ ID NO: 1670857 - RNA, 17 nt, Human
aggcuccacuuggucug

SEQ ID NO: 1670858 - RNA, 21 nt, Human
aggcuccacuuggucugugag

SEQ ID NO: 1670859 - RNA, 22 nt, Human
aggcuccacuuggucugugaga

SEQ ID NO: 1670860 - RNA, 22 nt, Human
uggcugugccucugccugucuc

SEQ ID NO: 1670861 - RNA, 18 nt, Human
uggcugugccucugccug

SEQ ID NO: 1670862 - RNA, 19 nt, Human
uggcugugccucugccugu

SEQ ID NO: 1670863 - RNA, 16 nt, Human
uggcuguuggcugggg

SEQ ID NO: 1670864 - RNA, 18 nt, Human
uggcuguuggcugggggc

SEQ ID NO: 1670865 - RNA, 23 nt, Human
uggcuguuggcugggggccucag

SEQ ID NO: 1670866 - RNA, 14 nt, Human
uggcuucacggaag

SEQ ID NO: 1670867 - RNA, 14 nt, Human
uggcugugccucug

SEQ ID NO: 1670868 - RNA, 15 nt, Human
uggcugugccucugc

SEQ ID NO: 1670869 - RNA, 16 nt, Human
uggcugugccucugcc

SEQ ID NO: 1670870 - RNA, 17 nt, Human
uggcugugccucugccu

SEQ ID NO: 1670871 - RNA, 23 nt, Human
uggcugcaaaggguaucaggugc

SEQ ID NO: 1670872 - RNA, 16 nt, Human
uggcuuuugugcauua

SEQ ID NO: 1670873 - RNA, 22 nt, Human
uggcuucacggaagagccuugc

SEQ ID NO: 1670874 - RNA, 17 nt, Human
uggcuucacggaagagc

SEQ ID NO: 1670875 - RNA, 20 nt, Human
uggcuucacggaagagccuu

SEQ ID NO: 1670876 - RNA, 21 nt, Human
uggcuuuugugcauuaucuag

SEQ ID NO: 1670877 - RNA, 18 nt, Human
ugggaaacaaaaggauaa

SEQ ID NO: 1670878 - RNA, 14 nt, Human
ugggaaagcauugu

SEQ ID NO: 1670879 - RNA, 16 nt, Human
ugggaaagcauuguaa

SEQ ID NO: 1670880 - RNA, 20 nt, Human
ugggaacaccauaggucacc

SEQ ID NO: 1670881 - RNA, 21 nt, Human
ugggaaagcauuguaaaugug

SEQ ID NO: 1670882 - RNA, 17 nt, Human
ugggaaagcauuguaaa

SEQ ID NO: 1670883 - RNA, 18 nt, Human
ugggaaagcauuguaaau

SEQ ID NO: 1670884 - RNA, 13 nt, Human
uggcucacgccug

SEQ ID NO: 1670885 - RNA, 23 nt, Human
uggcuauaggugcuacaaaaaca

SEQ ID NO: 1670886 - RNA, 17 nt, Human
aggcuccaggagcagcc

SEQ ID NO: 1670887 - RNA, 18 nt, Human
aggcuccaggagcagcca

SEQ ID NO: 1670888 - RNA, 19 nt, Human
aggcuccaggagcagccac

SEQ ID NO: 1670889 - RNA, 23 nt, Human
aggcuccaggagcagccacauuc

SEQ ID NO: 1670890 - RNA, 13 nt, Human
aggcuccugccac

SEQ ID NO: 1670891 - RNA, 18 nt, Human
uggcuaagcaaaauguga

SEQ ID NO: 1670892 - RNA, 17 nt, Human
uggcuaauguacugcau

SEQ ID NO: 1670893 - RNA, 19 nt, Human
uggcuaauguacugcauau

SEQ ID NO: 1670894 - RNA, 15 nt, Human
uggcuauaggugcua

SEQ ID NO: 1670895 - RNA, 19 nt, Human
uggcuauaggugcuacaaa

SEQ ID NO: 1670896 - RNA, 20 nt, Human
aggcugggucgcccuggacu

SEQ ID NO: 1670897 - RNA, 21 nt, Human
aggcugggucgcccuggacug

SEQ ID NO: 1670898 - RNA, 14 nt, Human
aggcuggguucuga

SEQ ID NO: 1670899 - RNA, 17 nt, Human
aggcuggguucugaucc

SEQ ID NO: 1670900 - RNA, 15 nt, Human
aggcugggucgcccu

SEQ ID NO: 1670901 - RNA, 18 nt, Human
aggcugggucgcccugga

SEQ ID NO: 1670902 - RNA, 10 nt, Human
aggcuggguc

SEQ ID NO: 1670903 - RNA, 22 nt, Human
aggcugggggaagaagcucucu

SEQ ID NO: 1670904 - RNA, 18 nt, Human
aggcugggcuucaguggc

SEQ ID NO: 1670905 - RNA, 19 nt, Human
aggcugggcuucaguggca

SEQ ID NO: 1670906 - RNA, 20 nt, Human
aggcugggcuucaguggcag

SEQ ID NO: 1670907 - RNA, 21 nt, Human
aggcugggcuucaguggcagc

SEQ ID NO: 1670908 - RNA, 22 nt, Human
aggcugggcuucaguggcagcu

SEQ ID NO: 1670909 - RNA, 23 nt, Human
aggcugggcuucaguggcagcug

SEQ ID NO: 1670910 - RNA, 17 nt, Human
aggcugggggaagaagc

SEQ ID NO: 1670911 - RNA, 13 nt, Human
aggcugggcuccc

SEQ ID NO: 1670912 - RNA, 14 nt, Human
aggcugggcucccu

SEQ ID NO: 1670913 - RNA, 18 nt, Human
aggcugggcucccuuccc

SEQ ID NO: 1670914 - RNA, 14 nt, Human
aggcugggcuucag

SEQ ID NO: 1670915 - RNA, 21 nt, Human
aggcugggcucccuucccacc

SEQ ID NO: 1670916 - RNA, 23 nt, Human
aggcugggcucccuucccaccuc

SEQ ID NO: 1670917 - RNA, 22 nt, Human
aggcugggagagccuuccaggg

SEQ ID NO: 1670918 - RNA, 20 nt, Human
aggcugggagagccuuccag

SEQ ID NO: 1670919 - RNA, 21 nt, Human
aggcugggagagccuuccagg

SEQ ID NO: 1670920 - RNA, 19 nt, Human
aggcugggagagccuucca

SEQ ID NO: 1670921 - RNA, 16 nt, Human
aggcugggagagccuu

SEQ ID NO: 1670922 - RNA, 20 nt, Human
ugggaacccaaguccaagca

SEQ ID NO: 1670923 - RNA, 23 nt, Human
aggcuucugguugaugccuguga

SEQ ID NO: 1670924 - RNA, 23 nt, Human
aggcuuagucacugagacagccc

SEQ ID NO: 1670925 - RNA, 22 nt, Human
aggcuuagucacugagacagcc

SEQ ID NO: 1670926 - RNA, 15 nt, Human
aggcuuuuuuaucau

SEQ ID NO: 1670927 - RNA, 18 nt, Human
aggcuuuuuuaucaugug

SEQ ID NO: 1670928 - RNA, 21 nt, Human
aggcuuuuuuaucaugugaaa

SEQ ID NO: 1670929 - RNA, 14 nt, Human
agggaaacugccag

SEQ ID NO: 1670930 - RNA, 15 nt, Human
agggaaacugccagc

SEQ ID NO: 1670931 - RNA, 16 nt, Human
agggaaacugccagca

SEQ ID NO: 1670932 - RNA, 19 nt, Human
agggaaacugccagcaacg

SEQ ID NO: 1670933 - RNA, 21 nt, Human
agggaaacugccagcaacgca

SEQ ID NO: 1670934 - RNA, 23 nt, Human
agggaaacugccagcaacgcagg

SEQ ID NO: 1670935 - RNA, 13 nt, Human
agggagggccugg

SEQ ID NO: 1670936 - RNA, 15 nt, Human
agggagggccugggc

SEQ ID NO: 1670937 - RNA, 12 nt, Human
agggagggcucc

SEQ ID NO: 1670938 - RNA, 13 nt, Human
agggagggcucca

SEQ ID NO: 1670939 - RNA, 19 nt, Human
agggagggcuccagacaca

SEQ ID NO: 1670940 - RNA, 22 nt, Human
agggagggcuccagacacaugu

SEQ ID NO: 1670941 - RNA, 20 nt, Human
agggaguccgaaagggacuu

SEQ ID NO: 1670942 - RNA, 23 nt, Human
agggaguccgaaagggacuugga

SEQ ID NO: 1670943 - RNA, 20 nt, Human
agggagugaguugauagcac

SEQ ID NO: 1670944 - RNA, 20 nt, Human
agggagugacagaggcagcc

SEQ ID NO: 1670945 - RNA, 12 nt, Human
agggcccagaga

SEQ ID NO: 1670946 - RNA, 13 nt, Human
agggcccagagag

SEQ ID NO: 1670947 - RNA, 17 nt, Human
agggcacugguggcccg

SEQ ID NO: 1670948 - RNA, 16 nt, Human
agggauacccauccca

SEQ ID NO: 1670949 - RNA, 20 nt, Human
agggcuccagacacaugucc

SEQ ID NO: 1670950 - RNA, 14 nt, Human
agggcccagagagg

SEQ ID NO: 1670951 - RNA, 18 nt, Human
agggcccagagagggugg

SEQ ID NO: 1670952 - RNA, 14 nt, Human
ugggcucccuuccc

SEQ ID NO: 1670953 - RNA, 15 nt, Human
ugggcucccuuccca

SEQ ID NO: 1670954 - RNA, 22 nt, Human
agggcuguuauaaucuuucaca

SEQ ID NO: 1670955 - RNA, 14 nt, Human
ugggcauucaaaug

SEQ ID NO: 1670956 - RNA, 13 nt, Human
ugggcauucaaau

SEQ ID NO: 1670957 - RNA, 23 nt, Human
ugggcagaaggaagacuucaucc

SEQ ID NO: 1670958 - RNA, 16 nt, Human
ugggcagaaggaagac

SEQ ID NO: 1670959 - RNA, 20 nt, Human
ugggcagaaggaagacuuca

SEQ ID NO: 1670960 - RNA, 13 nt, Human
ugggcagaaggaa

SEQ ID NO: 1670961 - RNA, 17 nt, Human
ugggaggucaaggcugc

SEQ ID NO: 1670962 - RNA, 16 nt, Human
ugggauuuggucaaca

SEQ ID NO: 1670963 - RNA, 16 nt, Human
ugggagaaaugaaaaa

SEQ ID NO: 1670964 - RNA, 21 nt, Human
ugggagaaccaaaaagaggcu

SEQ ID NO: 1670965 - RNA, 22 nt, Human
ugggagaaccaaaaagaggcua

SEQ ID NO: 1670966 - RNA, 22 nt, Human
ugggaggauugcuugagcucag

SEQ ID NO: 1670967 - RNA, 18 nt, Human
ugggaggauugcuugagc

SEQ ID NO: 1670968 - RNA, 21 nt, Human
ugggaggauugcuugagcuca

SEQ ID NO: 1670969 - RNA, 14 nt, Human
ugggaggcucugga

SEQ ID NO: 1670970 - RNA, 17 nt, Human
ugggaggcucuggagcc

SEQ ID NO: 1670971 - RNA, 23 nt, Human
ugggaggcucuggagcccacugu

SEQ ID NO: 1670972 - RNA, 19 nt, Human
ugggaggcugagaugggag

SEQ ID NO: 1670973 - RNA, 18 nt, Human
agggagcaucagugcccu

SEQ ID NO: 1670974 - RNA, 18 nt, Human
ugggacuacaggcaccca

SEQ ID NO: 1670975 - RNA, 14 nt, Human
ugggacuggccucu

SEQ ID NO: 1670976 - RNA, 16 nt, Human
ugggacuggccucugc

SEQ ID NO: 1670977 - RNA, 15 nt, Human
ugggagaaaugaaaa

SEQ ID NO: 1670978 - RNA, 13 nt, Human
ugggacuggccuc

SEQ ID NO: 1670979 - RNA, 18 nt, Human
ugggacucaaugcacuga

SEQ ID NO: 1670980 - RNA, 16 nt, Human
ugggacuacaggugug

SEQ ID NO: 1670981 - RNA, 20 nt, Human
agggacuuggaagcuccgcu

SEQ ID NO: 1670982 - RNA, 13 nt, Human
agggagagaagau

SEQ ID NO: 1670983 - RNA, 14 nt, Human
agggagagaagaua

SEQ ID NO: 1670984 - RNA, 13 nt, Human
agggaaauuucag

SEQ ID NO: 1670985 - RNA, 18 nt, Human
agggacuuggaagcuccg

SEQ ID NO: 1670986 - RNA, 19 nt, Human
agggacuuggaagcuccgc

SEQ ID NO: 1670987 - RNA, 15 nt, Human
agggacuuggaagcu

SEQ ID NO: 1670988 - RNA, 23 nt, Human
agggacuucugucuucacaacag

SEQ ID NO: 1670989 - RNA, 18 nt, Human
ugcucugaugaagaggag

SEQ ID NO: 1670990 - RNA, 19 nt, Human
ugcucugaugaagaggagu

SEQ ID NO: 1670991 - RNA, 22 nt, Human
ugcucugaucauccacugugcc

SEQ ID NO: 1670992 - RNA, 17 nt, Human
ugcugacuguuuucucu

SEQ ID NO: 1670993 - RNA, 15 nt, Human
ugcucugcauguuac

SEQ ID NO: 1670994 - RNA, 18 nt, Human
ugcucugcauguuacaua

SEQ ID NO: 1670995 - RNA, 21 nt, Human
ugcugacuguuuucucuugag

SEQ ID NO: 1670996 - RNA, 24 nt, Human
ugcugacuguuuucucuugagagg

SEQ ID NO: 1670997 - RNA, 15 nt, Human
ugcugagucccaggc

SEQ ID NO: 1670998 - RNA, 18 nt, Human
ugcugagucccaggcuga

SEQ ID NO: 1670999 - RNA, 22 nt, Human
ugcugagucccaggcugagccu

SEQ ID NO: 1671000 - RNA, 18 nt, Human
aggaaaggcuccaggagc

SEQ ID NO: 1671001 - RNA, 20 nt, Human
aggaaaggcuccaggagcag

SEQ ID NO: 1671002 - RNA, 22 nt, Human
aggaaaggcuccaggagcagcc

SEQ ID NO: 1671003 - RNA, 23 nt, Human
aggaaaggcuccaggagcagcca

SEQ ID NO: 1671004 - RNA, 14 nt, Human
aggaaauauuuauu

SEQ ID NO: 1671005 - RNA, 18 nt, Human
aggaaauauuuauuuuaa

SEQ ID NO: 1671006 - RNA, 22 nt, Human
aggaauuuuauuuuuuucugaa

SEQ ID NO: 1671007 - RNA, 15 nt, Human
ugcugccacacuuca

SEQ ID NO: 1671008 - RNA, 16 nt, Human
ugcugccacacuucag

SEQ ID NO: 1671009 - RNA, 19 nt, Human
ugcugccacacuucaggcu

SEQ ID NO: 1671010 - RNA, 22 nt, Human
ugcugccacacuucaggcucuu

SEQ ID NO: 1671011 - RNA, 11 nt, Human
ugcugccaucc

SEQ ID NO: 1671012 - RNA, 14 nt, Human
ugcugcccagccuc

SEQ ID NO: 1671013 - RNA, 16 nt, Human
ugcugcccagccucca

SEQ ID NO: 1671014 - RNA, 21 nt, Human
ugcugccauccagguucagcu

SEQ ID NO: 1671015 - RNA, 22 nt, Human
ugcugccauccagguucagcuu

SEQ ID NO: 1671016 - RNA, 12 nt, Human
ugcugccaucca

SEQ ID NO: 1671017 - RNA, 13 nt, Human
ugcugccauccag

SEQ ID NO: 1671018 - RNA, 14 nt, Human
ugcugccauccagg

SEQ ID NO: 1671019 - RNA, 15 nt, Human
ugcugccauccaggu

SEQ ID NO: 1671020 - RNA, 17 nt, Human
aggaagcucagggccug

SEQ ID NO: 1671021 - RNA, 18 nt, Human
aggaagcucagggccugg

SEQ ID NO: 1671022 - RNA, 22 nt, Human
aggaagcucagggccuggcuca

SEQ ID NO: 1671023 - RNA, 14 nt, Human
aggaagagaaaaaa

SEQ ID NO: 1671024 - RNA, 15 nt, Human
aggaagacuuuggaa

SEQ ID NO: 1671025 - RNA, 19 nt, Human
aggaaaucaaauaugcaaa

SEQ ID NO: 1671026 - RNA, 23 nt, Human
aggaauccagacccggcugcgug

SEQ ID NO: 1671027 - RNA, 17 nt, Human
aggaauucuguauagau

SEQ ID NO: 1671028 - RNA, 22 nt, Human
aggaauucuguauagauuagaa

SEQ ID NO: 1671029 - RNA, 16 nt, Human
aggaauucuguauaga

SEQ ID NO: 1671030 - RNA, 19 nt, Human
aggaauugacccacaagaa

SEQ ID NO: 1671031 - RNA, 23 nt, Human
aggaauucuguauagauuagaau

SEQ ID NO: 1671032 - RNA, 20 nt, Human
agcuuaaaggggcuagagug

SEQ ID NO: 1671033 - RNA, 12 nt, Human
agcuuaucucag

SEQ ID NO: 1671034 - RNA, 14 nt, Human
agcuuaucucaggg

SEQ ID NO: 1671035 - RNA, 15 nt, Human
agcuuaucucagggg

SEQ ID NO: 1671036 - RNA, 20 nt, Human
ugcggacagccacggccagg

SEQ ID NO: 1671037 - RNA, 21 nt, Human
ugcggacagccacggccaggc

SEQ ID NO: 1671038 - RNA, 19 nt, Human
agcuuguaaauagcucagg

SEQ ID NO: 1671039 - RNA, 20 nt, Human
agcuuguaaauagcucaggu

SEQ ID NO: 1671040 - RNA, 21 nt, Human
agcuuguaaauagcucaggug

SEQ ID NO: 1671041 - RNA, 21 nt, Human
agcuuauugucuagugaaacu

SEQ ID NO: 1671042 - RNA, 15 nt, Human
agcuuauuaaaacuc

SEQ ID NO: 1671043 - RNA, 20 nt, Human
agcuuauuaaaacucauuuu

SEQ ID NO: 1671044 - RNA, 23 nt, Human
aggaaaaguuuaauauuaaagcc

SEQ ID NO: 1671045 - RNA, 24 nt, Human
aggaaaaguuuaauauuaaagcca

SEQ ID NO: 1671046 - RNA, 21 nt, Human
aggaaaaguuuaauauuaaag

SEQ ID NO: 1671047 - RNA, 12 nt, Human
agcuuugaaaau

SEQ ID NO: 1671048 - RNA, 16 nt, Human
agcuuugaaaauucag

SEQ ID NO: 1671049 - RNA, 18 nt, Human
agcuuugaaaauucagug

SEQ ID NO: 1671050 - RNA, 19 nt, Human
agcuuugaaaauucagugg

SEQ ID NO: 1671051 - RNA, 21 nt, Human
aggaaacccagcucuggucca

SEQ ID NO: 1671052 - RNA, 18 nt, Human
aggaaacccagcucuggu

SEQ ID NO: 1671053 - RNA, 20 nt, Human
aggaaacccagcucuggucc

SEQ ID NO: 1671054 - RNA, 15 nt, Human
aggaaacccagcucu

SEQ ID NO: 1671055 - RNA, 16 nt, Human
aggaaacccagcucug

SEQ ID NO: 1671056 - RNA, 17 nt, Human
aggaaacccagcucugg

SEQ ID NO: 1671057 - RNA, 12 nt, Human
aggaaagaggcu

SEQ ID NO: 1671058 - RNA, 13 nt, Human
aggaaagaggcuc

SEQ ID NO: 1671059 - RNA, 13 nt, Human
aggaaagagaacu

SEQ ID NO: 1671060 - RNA, 19 nt, Human
aggaaagagaacuuccaga

SEQ ID NO: 1671061 - RNA, 19 nt, Human
aggaaacuggguuccugca

SEQ ID NO: 1671062 - RNA, 21 nt, Human
ugcuauaacuauguugauaaa

SEQ ID NO: 1671063 - RNA, 16 nt, Human
ugcuaguaauuggaaa

SEQ ID NO: 1671064 - RNA, 16 nt, Human
aggaaagaggcucugg

SEQ ID NO: 1671065 - RNA, 17 nt, Human
aggaaagcaaaggagau

SEQ ID NO: 1671066 - RNA, 19 nt, Human
aggaaagcaaaggagauug

SEQ ID NO: 1671067 - RNA, 14 nt, Human
ugcuaguaauugga

SEQ ID NO: 1671068 - RNA, 19 nt, Human
ugccucucugcaggucccu

SEQ ID NO: 1671069 - RNA, 20 nt, Human
ugccucucugcaggucccua

SEQ ID NO: 1671070 - RNA, 20 nt, Human
ugccucugacacacagcucu

SEQ ID NO: 1671071 - RNA, 21 nt, Human
ugccucugacacacagcucug

SEQ ID NO: 1671072 - RNA, 16 nt, Human
ugccucucugcagguc

SEQ ID NO: 1671073 - RNA, 18 nt, Human
ugccucucugcagguccc

SEQ ID NO: 1671074 - RNA, 16 nt, Human
ugccucucucaggcca

SEQ ID NO: 1671075 - RNA, 15 nt, Human
ugccucucucaggcc

SEQ ID NO: 1671076 - RNA, 13 nt, Human
ugccucccaucac

SEQ ID NO: 1671077 - RNA, 14 nt, Human
ugccucccaucacc

SEQ ID NO: 1671078 - RNA, 19 nt, Human
ugccucccaucacccgcua

SEQ ID NO: 1671079 - RNA, 13 nt, Human
ugccucucucagg

SEQ ID NO: 1671080 - RNA, 14 nt, Human
ugccucucucaggc

SEQ ID NO: 1671081 - RNA, 15 nt, Human
ugcccuuucugggca

SEQ ID NO: 1671082 - RNA, 18 nt, Human
agcugcauacaguuugca

SEQ ID NO: 1671083 - RNA, 14 nt, Human
agcugccagccgag

SEQ ID NO: 1671084 - RNA, 13 nt, Human
agcugccaccugc

SEQ ID NO: 1671085 - RNA, 22 nt, Human
agcucuaucaccaaggagccaa

SEQ ID NO: 1671086 - RNA, 17 nt, Human
agcucuaucaccaagga

SEQ ID NO: 1671087 - RNA, 22 nt, Human
ugcccuccaagaccuucuccuu

SEQ ID NO: 1671088 - RNA, 19 nt, Human
ugcccuccaagaccuucuc

SEQ ID NO: 1671089 - RNA, 20 nt, Human
ugcccuccaagaccuucucc

SEQ ID NO: 1671090 - RNA, 16 nt, Human
agcucucuccucccuu

SEQ ID NO: 1671091 - RNA, 22 nt, Human
agcucugcuccucuccccagca

SEQ ID NO: 1671092 - RNA, 20 nt, Human
agcucugguccauagagagc

SEQ ID NO: 1671093 - RNA, 12 nt, Human
agcucugcuccu

SEQ ID NO: 1671094 - RNA, 13 nt, Human
agcugcacccuca

SEQ ID NO: 1671095 - RNA, 17 nt, Human
agcugcacccucaggca

SEQ ID NO: 1671096 - RNA, 18 nt, Human
agcugcacccucaggcag

SEQ ID NO: 1671097 - RNA, 19 nt, Human
agcugcacccucaggcagg

SEQ ID NO: 1671098 - RNA, 20 nt, Human
agcugcacccucaggcaggu

SEQ ID NO: 1671099 - RNA, 22 nt, Human
agcugcacccucaggcaggugg

SEQ ID NO: 1671100 - RNA, 18 nt, Human
agcucuucuccaggcugu

SEQ ID NO: 1671101 - RNA, 12 nt, Human
agcucuguccug

SEQ ID NO: 1671102 - RNA, 14 nt, Human
agcucuguccuggg

SEQ ID NO: 1671103 - RNA, 20 nt, Human
agcuggggccaggcuggguc

SEQ ID NO: 1671104 - RNA, 21 nt, Human
ugccuuagaaccuuucuuaca

SEQ ID NO: 1671105 - RNA, 14 nt, Human
ugccuuagaaccuu

SEQ ID NO: 1671106 - RNA, 17 nt, Human
ugccuuagaaccuuucu

SEQ ID NO: 1671107 - RNA, 15 nt, Human
ugccuguucagcucc

SEQ ID NO: 1671108 - RNA, 16 nt, Human
ugccuguucagcucca

SEQ ID NO: 1671109 - RNA, 17 nt, Human
ugccuguucagcuccag

SEQ ID NO: 1671110 - RNA, 13 nt, Human
ugccuuuuucauu

SEQ ID NO: 1671111 - RNA, 14 nt, Human
ugccuuuuucauua

SEQ ID NO: 1671112 - RNA, 15 nt, Human
ugccuuuuucauuau

SEQ ID NO: 1671113 - RNA, 16 nt, Human
ugccuuuuucauuauu

SEQ ID NO: 1671114 - RNA, 17 nt, Human
ugccuuuuucauuauuu

SEQ ID NO: 1671115 - RNA, 21 nt, Human
ugccuuuuucauuauuuuauu

SEQ ID NO: 1671116 - RNA, 13 nt, Human
ugcgaaaggauga

SEQ ID NO: 1671117 - RNA, 19 nt, Human
ugcgaaaggaugaaaguga

SEQ ID NO: 1671118 - RNA, 18 nt, Human
ugcggacagccacggcca

SEQ ID NO: 1671119 - RNA, 17 nt, Human
agcuggggccaggcugg

SEQ ID NO: 1671120 - RNA, 22 nt, Human
agcugggauuacaggcuccugc

SEQ ID NO: 1671121 - RNA, 23 nt, Human
agcugggauuacaggcuccugcc

SEQ ID NO: 1671122 - RNA, 14 nt, Human
agcugggcagguug

SEQ ID NO: 1671123 - RNA, 17 nt, Human
agcugggacuacaggug

SEQ ID NO: 1671124 - RNA, 19 nt, Human
agcugggacuacaggugug

SEQ ID NO: 1671125 - RNA, 22 nt, Human
agcugggaucacauguggacuu

SEQ ID NO: 1671126 - RNA, 18 nt, Human
agcugggauuacaggcuc

SEQ ID NO: 1671127 - RNA, 21 nt, Human
agcugggauuacaggcuccug

SEQ ID NO: 1671128 - RNA, 23 nt, Human
agcugggaugauuggagggggga

SEQ ID NO: 1671129 - RNA, 22 nt, Human
agcugccuccccuccucugcuu

SEQ ID NO: 1671130 - RNA, 21 nt, Human
agcugccuccccuccucugcu

SEQ ID NO: 1671131 - RNA, 23 nt, Human
agcugccuccccuccucugcuug

SEQ ID NO: 1671132 - RNA, 21 nt, Human
ugccucucugcaggucccuaa

SEQ ID NO: 1671133 - RNA, 22 nt, Human
ugccucugacacacagcucugu

SEQ ID NO: 1671134 - RNA, 20 nt, Human
agcugccuccccuccucugc

SEQ ID NO: 1671135 - RNA, 19 nt, Human
agcugccuccccuccucug

SEQ ID NO: 1671136 - RNA, 18 nt, Human
agcugccuccccuccucu

SEQ ID NO: 1671137 - RNA, 21 nt, Human
agcugccugggaucccucauc

SEQ ID NO: 1671138 - RNA, 13 nt, Human
agcugccugggau

SEQ ID NO: 1671139 - RNA, 19 nt, Human
agcugccugggaucccuca

SEQ ID NO: 1671140 - RNA, 10 nt, Human
agcugccugu

SEQ ID NO: 1671141 - RNA, 13 nt, Human
agcuggaaaagua

SEQ ID NO: 1671142 - RNA, 18 nt, Human
ugcauuugaggucuguuc

SEQ ID NO: 1671143 - RNA, 14 nt, Human
ugcauuuccugaca

SEQ ID NO: 1671144 - RNA, 13 nt, Human
ugcauuuccugac

SEQ ID NO: 1671145 - RNA, 23 nt, Human
ugcauuugaaaauuuugauguuu

SEQ ID NO: 1671146 - RNA, 19 nt, Human
ugcauuugaaaauuuugau

SEQ ID NO: 1671147 - RNA, 20 nt, Human
agcgcccacuagacccacug

SEQ ID NO: 1671148 - RNA, 14 nt, Human
agccugcuccagcu

SEQ ID NO: 1671149 - RNA, 14 nt, Human
agcgcccaguuggg

SEQ ID NO: 1671150 - RNA, 22 nt, Human
agcgcccaguuggguggaugcc

SEQ ID NO: 1671151 - RNA, 23 nt, Human
ugccacugccucuuccucccuca

SEQ ID NO: 1671152 - RNA, 12 nt, Human
ugccacacuuca

SEQ ID NO: 1671153 - RNA, 15 nt, Human
ugccagucaccccgg

SEQ ID NO: 1671154 - RNA, 16 nt, Human
ugccagucaccccggc

SEQ ID NO: 1671155 - RNA, 18 nt, Human
ugccagucaccccggcca

SEQ ID NO: 1671156 - RNA, 20 nt, Human
ugccagucaccccggccacc

SEQ ID NO: 1671157 - RNA, 19 nt, Human
ugccagucccccugcccca

SEQ ID NO: 1671158 - RNA, 20 nt, Human
ugccagucccccugccccag

SEQ ID NO: 1671159 - RNA, 17 nt, Human
ugccagucccccugccc

SEQ ID NO: 1671160 - RNA, 22 nt, Human
ugccagucaccccggccaccug

SEQ ID NO: 1671161 - RNA, 23 nt, Human
ugccagucaccccggccaccugc

SEQ ID NO: 1671162 - RNA, 15 nt, Human
ugccauauucuguug

SEQ ID NO: 1671163 - RNA, 16 nt, Human
ugccauauucuguugg

SEQ ID NO: 1671164 - RNA, 17 nt, Human
ugccauauucuguuggc

SEQ ID NO: 1671165 - RNA, 15 nt, Human
agcgugagccacugc

SEQ ID NO: 1671166 - RNA, 16 nt, Human
agcggggacagcuccu

SEQ ID NO: 1671167 - RNA, 17 nt, Human
agcggggacagcuccuu

SEQ ID NO: 1671168 - RNA, 15 nt, Human
agcggggacagcucc

SEQ ID NO: 1671169 - RNA, 20 nt, Human
ugccauauucuguuggccag

SEQ ID NO: 1671170 - RNA, 21 nt, Human
ugccauauucuguuggccagu

SEQ ID NO: 1671171 - RNA, 20 nt, Human
agcgugguggacaugcacag

SEQ ID NO: 1671172 - RNA, 16 nt, Human
agcgugagccacugca

SEQ ID NO: 1671173 - RNA, 17 nt, Human
agcgugagccacugcac

SEQ ID NO: 1671174 - RNA, 23 nt, Human
agcgugguggacaugcacagcua

SEQ ID NO: 1671175 - RNA, 16 nt, Human
ugccccgucccccucu

SEQ ID NO: 1671176 - RNA, 18 nt, Human
ugccccgucccccucugg

SEQ ID NO: 1671177 - RNA, 19 nt, Human
ugccccucaacucuccucc

SEQ ID NO: 1671178 - RNA, 12 nt, Human
ugccccccagcc

SEQ ID NO: 1671179 - RNA, 15 nt, Human
ugcccaggccugccu

SEQ ID NO: 1671180 - RNA, 17 nt, Human
ugcccaggccugccugu

SEQ ID NO: 1671181 - RNA, 12 nt, Human
ugcccaggcccc

SEQ ID NO: 1671182 - RNA, 16 nt, Human
ugcccacaggaucagu

SEQ ID NO: 1671183 - RNA, 14 nt, Human
ugcccaggccccug

SEQ ID NO: 1671184 - RNA, 20 nt, Human
ugcccaggccccugccaccc

SEQ ID NO: 1671185 - RNA, 22 nt, Human
ugcccaggccccugccacccug

SEQ ID NO: 1671186 - RNA, 14 nt, Human
ugcccacaggauca

SEQ ID NO: 1671187 - RNA, 15 nt, Human
ugcccaggcaggucu

SEQ ID NO: 1671188 - RNA, 16 nt, Human
ugcccaggcaggucuu

SEQ ID NO: 1671189 - RNA, 17 nt, Human
ugcccaggcaggucuug

SEQ ID NO: 1671190 - RNA, 20 nt, Human
ugcccaggcaggucuugaac

SEQ ID NO: 1671191 - RNA, 11 nt, Human
ugcccaggccc

SEQ ID NO: 1671192 - RNA, 23 nt, Human
ugcccaaccugcucuccucuugc

SEQ ID NO: 1671193 - RNA, 24 nt, Human
ugcccaaccugcucuccucuugcc

SEQ ID NO: 1671194 - RNA, 18 nt, Human
ugcccaaccugcucuccu

SEQ ID NO: 1671195 - RNA, 22 nt, Human
ugcccaaccugcucuccucuug

SEQ ID NO: 1671196 - RNA, 18 nt, Human
agcucagggccuggcuca

SEQ ID NO: 1671197 - RNA, 20 nt, Human
ugccauguuggccaggcugg

SEQ ID NO: 1671198 - RNA, 21 nt, Human
ugccauguuggccaggcuggu

SEQ ID NO: 1671199 - RNA, 15 nt, Human
agcucagggccuggc

SEQ ID NO: 1671200 - RNA, 16 nt, Human
agcucagggccuggcu

SEQ ID NO: 1671201 - RNA, 17 nt, Human
agcucagggccuggcuc

SEQ ID NO: 1671202 - RNA, 17 nt, Human
ugccauguuggccaggc

SEQ ID NO: 1671203 - RNA, 18 nt, Human
ugccauguuggccaggcu

SEQ ID NO: 1671204 - RNA, 19 nt, Human
ugccauguuggccaggcug

SEQ ID NO: 1671205 - RNA, 19 nt, Human
agcuauggugucauaggcu

SEQ ID NO: 1671206 - RNA, 14 nt, Human
ugcacaagcugcac

SEQ ID NO: 1671207 - RNA, 15 nt, Human
ugcacacaccagagc

SEQ ID NO: 1671208 - RNA, 15 nt, Human
ugcacaagcuccaag

SEQ ID NO: 1671209 - RNA, 16 nt, Human
ugcacaagcuccaagc

SEQ ID NO: 1671210 - RNA, 18 nt, Human
ugcacaagcuccaagcuc

SEQ ID NO: 1671211 - RNA, 20 nt, Human
ugcacaagcuccaagcuccc

SEQ ID NO: 1671212 - RNA, 22 nt, Human
ugcacaagcuccaagcucccag

SEQ ID NO: 1671213 - RNA, 23 nt, Human
ugcacaagcuccaagcucccagg

SEQ ID NO: 1671214 - RNA, 14 nt, Human
ugcaccacugcacu

SEQ ID NO: 1671215 - RNA, 15 nt, Human
ugcaccacugcacuc

SEQ ID NO: 1671216 - RNA, 22 nt, Human
ugcacuauagccuaggugacag

SEQ ID NO: 1671217 - RNA, 12 nt, Human
ugcacuccccug

SEQ ID NO: 1671218 - RNA, 13 nt, Human
ugcacuccccugc

SEQ ID NO: 1671219 - RNA, 19 nt, Human
ugcagacucuacagaggcc

SEQ ID NO: 1671220 - RNA, 20 nt, Human
ugcagacucuacagaggcca

SEQ ID NO: 1671221 - RNA, 15 nt, Human
ugcacuccccugcug

SEQ ID NO: 1671222 - RNA, 19 nt, Human
agcccuuccaugucgccuc

SEQ ID NO: 1671223 - RNA, 22 nt, Human
agcccuuccaugucgccucugc

SEQ ID NO: 1671224 - RNA, 23 nt, Human
agcccuuccaugucgccucugca

SEQ ID NO: 1671225 - RNA, 13 nt, Human
agcccuucauuug

SEQ ID NO: 1671226 - RNA, 14 nt, Human
agcccuucauuugg

SEQ ID NO: 1671227 - RNA, 22 nt, Human
ugcagacucuacagaggccaug

SEQ ID NO: 1671228 - RNA, 15 nt, Human
agccuaggugacaga

SEQ ID NO: 1671229 - RNA, 17 nt, Human
agccuaggugacagagu

SEQ ID NO: 1671230 - RNA, 15 nt, Human
agccucaaccuccug

SEQ ID NO: 1671231 - RNA, 23 nt, Human
agccguuuguuccccaagacauu

SEQ ID NO: 1671232 - RNA, 18 nt, Human
agcccuucuuuccacaga

SEQ ID NO: 1671233 - RNA, 19 nt, Human
agcccuucuuuccacagaa

SEQ ID NO: 1671234 - RNA, 20 nt, Human
ugcagccucaaccuccuggg

SEQ ID NO: 1671235 - RNA, 18 nt, Human
ugcagccucaaccuccug

SEQ ID NO: 1671236 - RNA, 19 nt, Human
ugcagccucaaccuccugg

SEQ ID NO: 1671237 - RNA, 19 nt, Human
agccugagcgacagugaga

SEQ ID NO: 1671238 - RNA, 17 nt, Human
agccucaaccuccuggg

SEQ ID NO: 1671239 - RNA, 18 nt, Human
agccucaaccuccugggc

SEQ ID NO: 1671240 - RNA, 13 nt, Human
agccucagcaucc

SEQ ID NO: 1671241 - RNA, 14 nt, Human
agccucagcauccu

SEQ ID NO: 1671242 - RNA, 16 nt, Human
agccucagcauccugg

SEQ ID NO: 1671243 - RNA, 15 nt, Human
agccucagcauccug

SEQ ID NO: 1671244 - RNA, 19 nt, Human
agccucaaccuccugggcu

SEQ ID NO: 1671245 - RNA, 18 nt, Human
agccugagcgacagugag

SEQ ID NO: 1671246 - RNA, 18 nt, Human
ugcaggucccuaauaaag

SEQ ID NO: 1671247 - RNA, 19 nt, Human
ugcaggucccuaauaaagc

SEQ ID NO: 1671248 - RNA, 20 nt, Human
ugcaggucccuaauaaagcu

SEQ ID NO: 1671249 - RNA, 21 nt, Human
ugcaggucccuaauaaagcug

SEQ ID NO: 1671250 - RNA, 17 nt, Human
ugcaggucccuaauaaa

SEQ ID NO: 1671251 - RNA, 14 nt, Human
ugcagugagccgag

SEQ ID NO: 1671252 - RNA, 15 nt, Human
ugcauaauggucaga

SEQ ID NO: 1671253 - RNA, 11 nt, Human
ugcauaaaaug

SEQ ID NO: 1671254 - RNA, 19 nt, Human
ugcagugagccgagauugu

SEQ ID NO: 1671255 - RNA, 20 nt, Human
ugcaugaaguaauaugcaca

SEQ ID NO: 1671256 - RNA, 22 nt, Human
ugcaugaaguaauaugcacaca

SEQ ID NO: 1671257 - RNA, 21 nt, Human
ugcaugaggcuaguguggugu

SEQ ID NO: 1671258 - RNA, 13 nt, Human
ugcaugcuguccc

SEQ ID NO: 1671259 - RNA, 14 nt, Human
ugcaugcugucccu

SEQ ID NO: 1671260 - RNA, 15 nt, Human
ugcaugcugucccuu

SEQ ID NO: 1671261 - RNA, 22 nt, Human
ugcauaccacuuuuguucuugg

SEQ ID NO: 1671262 - RNA, 12 nt, Human
agccugcccucc

SEQ ID NO: 1671263 - RNA, 16 nt, Human
agccugccucuucucu

SEQ ID NO: 1671264 - RNA, 19 nt, Human
agccugccucuucucuacu

SEQ ID NO: 1671265 - RNA, 23 nt, Human
agccugcaguuauuaacacuaac

SEQ ID NO: 1671266 - RNA, 18 nt, Human
agccugcacggugaaugg

SEQ ID NO: 1671267 - RNA, 16 nt, Human
agccugcacggugaau

SEQ ID NO: 1671268 - RNA, 18 nt, Human
agccugaucaccugcccu

SEQ ID NO: 1671269 - RNA, 16 nt, Human
ugcaugcugucccuua

SEQ ID NO: 1671270 - RNA, 14 nt, Human
agccugauuaaaga

SEQ ID NO: 1671271 - RNA, 19 nt, Human
agccugaucaccugcccug

SEQ ID NO: 1671272 - RNA, 16 nt, Human
ucuggcagcucagaga

SEQ ID NO: 1671273 - RNA, 15 nt, Human
agaagcggcuggcag

SEQ ID NO: 1671274 - RNA, 16 nt, Human
agaagcggcuggcagc

SEQ ID NO: 1671275 - RNA, 14 nt, Human
agaagcuccaggua

SEQ ID NO: 1671276 - RNA, 12 nt, Human
ucuggauuauau

SEQ ID NO: 1671277 - RNA, 18 nt, Human
ucuggauuauauuaugaa

SEQ ID NO: 1671278 - RNA, 14 nt, Human
ucuggcagcucaga

SEQ ID NO: 1671279 - RNA, 15 nt, Human
ucuggcagcucagag

SEQ ID NO: 1671280 - RNA, 14 nt, Human
ucugcuugccaucc

SEQ ID NO: 1671281 - RNA, 12 nt, Human
ucugcuugccau

SEQ ID NO: 1671282 - RNA, 14 nt, Human
ucugccuaaggacu

SEQ ID NO: 1671283 - RNA, 15 nt, Human
ucugccuaaggacuu

SEQ ID NO: 1671284 - RNA, 16 nt, Human
ucugccuaaggacuuc

SEQ ID NO: 1671285 - RNA, 13 nt, Human
ucugccuaaggac

SEQ ID NO: 1671286 - RNA, 14 nt, Human
ucugcccuccaaga

SEQ ID NO: 1671287 - RNA, 18 nt, Human
ucugcccuccaagaccuu

SEQ ID NO: 1671288 - RNA, 21 nt, Human
agaagaacugaaaucauacuu

SEQ ID NO: 1671289 - RNA, 17 nt, Human
ucugcucacauaucugu

SEQ ID NO: 1671290 - RNA, 16 nt, Human
ucugcucacauaucug

SEQ ID NO: 1671291 - RNA, 11 nt, Human
ucugcuugcca

SEQ ID NO: 1671292 - RNA, 16 nt, Human
ucugauacagaaaagu

SEQ ID NO: 1671293 - RNA, 17 nt, Human
ucugauacagaaaaguu

SEQ ID NO: 1671294 - RNA, 19 nt, Human
ucugauucccaagcucugc

SEQ ID NO: 1671295 - RNA, 20 nt, Human
ucugauucccaagcucugcu

SEQ ID NO: 1671296 - RNA, 21 nt, Human
ucugauucccaagcucugcuc

SEQ ID NO: 1671297 - RNA, 23 nt, Human
ucugagaaagacuauucaaacag

SEQ ID NO: 1671298 - RNA, 21 nt, Human
ucugagaaagacuauucaaac

SEQ ID NO: 1671299 - RNA, 22 nt, Human
ucugagaaagacuauucaaaca

SEQ ID NO: 1671300 - RNA, 21 nt, Human
ucugacuguuuccaucaaggg

SEQ ID NO: 1671301 - RNA, 14 nt, Human
ucugagaaagacua

SEQ ID NO: 1671302 - RNA, 15 nt, Human
ucugagaaagacuau

SEQ ID NO: 1671303 - RNA, 19 nt, Human
ucugagaaagacuauucaa

SEQ ID NO: 1671304 - RNA, 20 nt, Human
ucugagaaagacuauucaaa

SEQ ID NO: 1671305 - RNA, 19 nt, Human
ucugacccugcuucaaaua

SEQ ID NO: 1671306 - RNA, 19 nt, Human
agaaagacuauucaaacag

SEQ ID NO: 1671307 - RNA, 18 nt, Human
agaaagacuauucaaaca

SEQ ID NO: 1671308 - RNA, 20 nt, Human
agaaagacuauucaaacagu

SEQ ID NO: 1671309 - RNA, 23 nt, Human
agaaagacuauucaaacagucuc

SEQ ID NO: 1671310 - RNA, 16 nt, Human
agaaauguacagcaag

SEQ ID NO: 1671311 - RNA, 17 nt, Human
agaaauguacagcaagg

SEQ ID NO: 1671312 - RNA, 11 nt, Human
agaaauguguu

SEQ ID NO: 1671313 - RNA, 12 nt, Human
ucugcagagcag

SEQ ID NO: 1671314 - RNA, 22 nt, Human
agaaccucuuugucuacaccau

SEQ ID NO: 1671315 - RNA, 14 nt, Human
agaacucccuuuca

SEQ ID NO: 1671316 - RNA, 15 nt, Human
agaacucccuuucaa

SEQ ID NO: 1671317 - RNA, 22 nt, Human
acuuuuuauggcacuaguauuu

SEQ ID NO: 1671318 - RNA, 14 nt, Human
acuuuuggcauuuu

SEQ ID NO: 1671319 - RNA, 16 nt, Human
acuuuugguuaagucu

SEQ ID NO: 1671320 - RNA, 20 nt, Human
acuuuugguuaagucuguuu

SEQ ID NO: 1671321 - RNA, 22 nt, Human
acuuuugguuaagucuguuuua

SEQ ID NO: 1671322 - RNA, 14 nt, Human
acuuuuggaaggua

SEQ ID NO: 1671323 - RNA, 22 nt, Human
acuuuuuuuuuuuaagaguaaa

SEQ ID NO: 1671324 - RNA, 13 nt, Human
acuuuuuuccaca

SEQ ID NO: 1671325 - RNA, 23 nt, Human
acuuuggaaagacuuuuccaacc

SEQ ID NO: 1671326 - RNA, 17 nt, Human
acuuuggaaagacuuuu

SEQ ID NO: 1671327 - RNA, 13 nt, Human
acuuuggaaagac

SEQ ID NO: 1671328 - RNA, 14 nt, Human
acuuuggaaagacu

SEQ ID NO: 1671329 - RNA, 23 nt, Human
acuuugaccucugcagcaauaaa

SEQ ID NO: 1671330 - RNA, 19 nt, Human
acuuugaccucugcagcaa

SEQ ID NO: 1671331 - RNA, 23 nt, Human
acuuuaccuuuuuuauacauaaa

SEQ ID NO: 1671332 - RNA, 22 nt, Human
acuuuaccuuuuuuauacauaa

SEQ ID NO: 1671333 - RNA, 19 nt, Human
acuuuaccuuuuuuauaca

SEQ ID NO: 1671334 - RNA, 18 nt, Human
acuuuaccuuuuuuauac

SEQ ID NO: 1671335 - RNA, 19 nt, Human
acuuguugauuaauggaaa

SEQ ID NO: 1671336 - RNA, 21 nt, Human
acuuguugauuaauggaaaug

SEQ ID NO: 1671337 - RNA, 21 nt, Human
acuuguguaaauacaauuuug

SEQ ID NO: 1671338 - RNA, 22 nt, Human
acuuguguaaauacaauuuugu

SEQ ID NO: 1671339 - RNA, 23 nt, Human
acuuguguaaauacaauuuuguu

SEQ ID NO: 1671340 - RNA, 15 nt, Human
ucuccucugcugcug

SEQ ID NO: 1671341 - RNA, 13 nt, Human
ucuccucugcugc

SEQ ID NO: 1671342 - RNA, 14 nt, Human
ucuccucugcugcu

SEQ ID NO: 1671343 - RNA, 12 nt, Human
ucuccucugcug

SEQ ID NO: 1671344 - RNA, 19 nt, Human
ucucccuuggauugucccc

SEQ ID NO: 1671345 - RNA, 21 nt, Human
ucucccuuggauuguccccga

SEQ ID NO: 1671346 - RNA, 12 nt, Human
ucuccauuuaau

SEQ ID NO: 1671347 - RNA, 16 nt, Human
ucuccauuuaauaauu

SEQ ID NO: 1671348 - RNA, 19 nt, Human
ucuccauuuaauaauuaua

SEQ ID NO: 1671349 - RNA, 18 nt, Human
ucucccaaagugcuggga

SEQ ID NO: 1671350 - RNA, 11 nt, Human
ucucccuugga

SEQ ID NO: 1671351 - RNA, 18 nt, Human
ucucccuuggauuguccc

SEQ ID NO: 1671352 - RNA, 15 nt, Human
ucucccagucauuua

SEQ ID NO: 1671353 - RNA, 13 nt, Human
agaaacuggaacu

SEQ ID NO: 1671354 - RNA, 15 nt, Human
agaaacuggaacucu

SEQ ID NO: 1671355 - RNA, 22 nt, Human
ucucuuuaaugucacaggcagg

SEQ ID NO: 1671356 - RNA, 17 nt, Human
ucucuugagccugggag

SEQ ID NO: 1671357 - RNA, 15 nt, Human
ucucuugagccuggg

SEQ ID NO: 1671358 - RNA, 13 nt, Human
ucucuugagccug

SEQ ID NO: 1671359 - RNA, 14 nt, Human
ucucuugagccugg

SEQ ID NO: 1671360 - RNA, 19 nt, Human
agaaaaauaugaccacacu

SEQ ID NO: 1671361 - RNA, 17 nt, Human
agaaaaaugagccuggc

SEQ ID NO: 1671362 - RNA, 19 nt, Human
agaaaacaaggaugaauua

SEQ ID NO: 1671363 - RNA, 22 nt, Human
ucucuccuguaccucuugagcc

SEQ ID NO: 1671364 - RNA, 20 nt, Human
ucucuccuguaccucuugag

SEQ ID NO: 1671365 - RNA, 16 nt, Human
ucucuccagccccugg

SEQ ID NO: 1671366 - RNA, 15 nt, Human
ucucuccagccccug

SEQ ID NO: 1671367 - RNA, 13 nt, Human
ucucuccagcccc

SEQ ID NO: 1671368 - RNA, 14 nt, Human
ucucuccagccccu

SEQ ID NO: 1671369 - RNA, 20 nt, Human
ucuccuucaccuuugucccc

SEQ ID NO: 1671370 - RNA, 18 nt, Human
ucucuucuggguuccuuc

SEQ ID NO: 1671371 - RNA, 19 nt, Human
ucucuucuggguuccuucc

SEQ ID NO: 1671372 - RNA, 20 nt, Human
ucucuucuggguuccuuccu

SEQ ID NO: 1671373 - RNA, 21 nt, Human
ucucuucuggguuccuuccuc

SEQ ID NO: 1671374 - RNA, 12 nt, Human
ucucuucuuuaa

SEQ ID NO: 1671375 - RNA, 14 nt, Human
ucucuugagagggu

SEQ ID NO: 1671376 - RNA, 13 nt, Human
ucucuucuuuaaa

SEQ ID NO: 1671377 - RNA, 11 nt, Human
ucucugcccua

SEQ ID NO: 1671378 - RNA, 22 nt, Human
ucucugcccuaaugcgcaggcu

SEQ ID NO: 1671379 - RNA, 13 nt, Human
ucucuggccuucg

SEQ ID NO: 1671380 - RNA, 16 nt, Human
ucucuggccuucggcc

SEQ ID NO: 1671381 - RNA, 17 nt, Human
ucucuggccuucggccu

SEQ ID NO: 1671382 - RNA, 19 nt, Human
agacccuuguggucccacc

SEQ ID NO: 1671383 - RNA, 20 nt, Human
agacccuuguggucccaccc

SEQ ID NO: 1671384 - RNA, 22 nt, Human
agacccuuguggucccacccca

SEQ ID NO: 1671385 - RNA, 23 nt, Human
agacccuuguggucccaccccac

SEQ ID NO: 1671386 - RNA, 13 nt, Human
agacccuuguggu

SEQ ID NO: 1671387 - RNA, 15 nt, Human
agacccuuguggucc

SEQ ID NO: 1671388 - RNA, 16 nt, Human
agacccugcccugugg

SEQ ID NO: 1671389 - RNA, 19 nt, Human
agacccugcccugugggcc

SEQ ID NO: 1671390 - RNA, 21 nt, Human
agacccugcccugugggcccc

SEQ ID NO: 1671391 - RNA, 23 nt, Human
agacccugcccugugggccccca

SEQ ID NO: 1671392 - RNA, 12 nt, Human
agacccugcccu

SEQ ID NO: 1671393 - RNA, 13 nt, Human
agacccugcccug

SEQ ID NO: 1671394 - RNA, 14 nt, Human
agacccugcccugu

SEQ ID NO: 1671395 - RNA, 17 nt, Human
ucuugcaauggcagccu

SEQ ID NO: 1671396 - RNA, 13 nt, Human
ucuugcaauggca

SEQ ID NO: 1671397 - RNA, 16 nt, Human
ucuugcaauggcagcc

SEQ ID NO: 1671398 - RNA, 14 nt, Human
ucuugaugccuggc

SEQ ID NO: 1671399 - RNA, 20 nt, Human
ucuugaugccuggcggggug

SEQ ID NO: 1671400 - RNA, 16 nt, Human
agacuccaaagaaaug

SEQ ID NO: 1671401 - RNA, 19 nt, Human
agacuccaaagaaauguaa

SEQ ID NO: 1671402 - RNA, 13 nt, Human
agaccugccccuc

SEQ ID NO: 1671403 - RNA, 12 nt, Human
agaccugccccu

SEQ ID NO: 1671404 - RNA, 19 nt, Human
agacuaucuaaauguugaa

SEQ ID NO: 1671405 - RNA, 17 nt, Human
agacuaucuaaauguug

SEQ ID NO: 1671406 - RNA, 18 nt, Human
agacuaucuaaauguuga

SEQ ID NO: 1671407 - RNA, 17 nt, Human
agacucauucuucugua

SEQ ID NO: 1671408 - RNA, 21 nt, Human
agacuauucaaacagucucag

SEQ ID NO: 1671409 - RNA, 18 nt, Human
agacuauucaaacagucu

SEQ ID NO: 1671410 - RNA, 20 nt, Human
agacuauucaaacagucuca

SEQ ID NO: 1671411 - RNA, 18 nt, Human
agacucauucuucuguac

SEQ ID NO: 1671412 - RNA, 12 nt, Human
agacuccaaaga

SEQ ID NO: 1671413 - RNA, 13 nt, Human
agacuccaaagaa

SEQ ID NO: 1671414 - RNA, 14 nt, Human
agacuccaaagaaa

SEQ ID NO: 1671415 - RNA, 19 nt, Human
agacucuacagaggccaug

SEQ ID NO: 1671416 - RNA, 21 nt, Human
agacucgcgacaaugcaaacc

SEQ ID NO: 1671417 - RNA, 17 nt, Human
agacucuacagaggcca

SEQ ID NO: 1671418 - RNA, 18 nt, Human
agacuccugcaggcagcc

SEQ ID NO: 1671419 - RNA, 19 nt, Human
agacuccugcaggcagcca

SEQ ID NO: 1671420 - RNA, 20 nt, Human
agacuccugcaggcagccag

SEQ ID NO: 1671421 - RNA, 23 nt, Human
agacuccugcaggcagccaggcc

SEQ ID NO: 1671422 - RNA, 13 nt, Human
ucuuuccugaggc

SEQ ID NO: 1671423 - RNA, 14 nt, Human
ucuuuccugaggcu

SEQ ID NO: 1671424 - RNA, 15 nt, Human
ucuuuccugaggcug

SEQ ID NO: 1671425 - RNA, 16 nt, Human
ucuuuccugaggcugg

SEQ ID NO: 1671426 - RNA, 14 nt, Human
agacuccugcaggc

SEQ ID NO: 1671427 - RNA, 15 nt, Human
agacuccugcaggca

SEQ ID NO: 1671428 - RNA, 16 nt, Human
agacuccugcaggcag

SEQ ID NO: 1671429 - RNA, 17 nt, Human
agacuccugcaggcagc

SEQ ID NO: 1671430 - RNA, 14 nt, Human
ucuuuaauuuugga

SEQ ID NO: 1671431 - RNA, 15 nt, Human
ucuuuaauuuuggaa

SEQ ID NO: 1671432 - RNA, 16 nt, Human
ucuuuaauuuuggaau

SEQ ID NO: 1671433 - RNA, 17 nt, Human
ucuuuaauuuuggaauu

SEQ ID NO: 1671434 - RNA, 18 nt, Human
ucuuuaauuuuggaauuu

SEQ ID NO: 1671435 - RNA, 15 nt, Human
ucuuuacuucaugga

SEQ ID NO: 1671436 - RNA, 17 nt, Human
ucuuuaaaauacacacu

SEQ ID NO: 1671437 - RNA, 13 nt, Human
ucuuuaauuuugg

SEQ ID NO: 1671438 - RNA, 21 nt, Human
ucuuuaaagggauggcaagau

SEQ ID NO: 1671439 - RNA, 18 nt, Human
agagaccaucccugaagg

SEQ ID NO: 1671440 - RNA, 15 nt, Human
agagaccaucccuga

SEQ ID NO: 1671441 - RNA, 13 nt, Human
agagaccaucccu

SEQ ID NO: 1671442 - RNA, 14 nt, Human
agagaccaucccug

SEQ ID NO: 1671443 - RNA, 18 nt, Human
agagacacacugaagaag

SEQ ID NO: 1671444 - RNA, 20 nt, Human
agagacacacugaagaagca

SEQ ID NO: 1671445 - RNA, 12 nt, Human
agacuuuggaaa

SEQ ID NO: 1671446 - RNA, 14 nt, Human
agacuuuggaaaga

SEQ ID NO: 1671447 - RNA, 18 nt, Human
agagaaugaaagggccca

SEQ ID NO: 1671448 - RNA, 17 nt, Human
agagacacacugaagaa

SEQ ID NO: 1671449 - RNA, 15 nt, Human
agacuuuggaaagac

SEQ ID NO: 1671450 - RNA, 15 nt, Human
agagaaugagagaca

SEQ ID NO: 1671451 - RNA, 14 nt, Human
agacuucaucccuc

SEQ ID NO: 1671452 - RNA, 17 nt, Human
agacuucaucccucugg

SEQ ID NO: 1671453 - RNA, 18 nt, Human
agacuggcacaguuuucu

SEQ ID NO: 1671454 - RNA, 14 nt, Human
agacuggcacaguu

SEQ ID NO: 1671455 - RNA, 15 nt, Human
agacuggcacaguuu

SEQ ID NO: 1671456 - RNA, 18 nt, Human
agacagaaucucgcucug

SEQ ID NO: 1671457 - RNA, 22 nt, Human
agacagaaucucgcucugucgc

SEQ ID NO: 1671458 - RNA, 17 nt, Human
agaauuugauaugugaa

SEQ ID NO: 1671459 - RNA, 18 nt, Human
agaauuugauaugugaac

SEQ ID NO: 1671460 - RNA, 19 nt, Human
agaauuugauaugugaaca

SEQ ID NO: 1671461 - RNA, 20 nt, Human
agaauuugauaugugaacag

SEQ ID NO: 1671462 - RNA, 19 nt, Human
agacagucccugccaaugg

SEQ ID NO: 1671463 - RNA, 15 nt, Human
agacagucccugcca

SEQ ID NO: 1671464 - RNA, 16 nt, Human
agacagucccugccaa

SEQ ID NO: 1671465 - RNA, 17 nt, Human
agacagucccugccaau

SEQ ID NO: 1671466 - RNA, 21 nt, Human
agacaggguuuugccauguug

SEQ ID NO: 1671467 - RNA, 15 nt, Human
agacaggaccaggga

SEQ ID NO: 1671468 - RNA, 16 nt, Human
agacaggaccagggau

SEQ ID NO: 1671469 - RNA, 23 nt, Human
agacaggcaagcaccuccugccu

SEQ ID NO: 1671470 - RNA, 22 nt, Human
ucuuccaggcugggagagccuu

SEQ ID NO: 1671471 - RNA, 17 nt, Human
ucuucaaaaugagcccu

SEQ ID NO: 1671472 - RNA, 16 nt, Human
ucuucaaaauaucaag

SEQ ID NO: 1671473 - RNA, 14 nt, Human
ucuuauugcccacg

SEQ ID NO: 1671474 - RNA, 18 nt, Human
ucuuaugggcuggguucu

SEQ ID NO: 1671475 - RNA, 18 nt, Human
ucuuauugcccacgcugg

SEQ ID NO: 1671476 - RNA, 22 nt, Human
ucuuauugcccacgcuggagug

SEQ ID NO: 1671477 - RNA, 15 nt, Human
ucuuaugggcugggu

SEQ ID NO: 1671478 - RNA, 16 nt, Human
ucuuaugggcuggguu

SEQ ID NO: 1671479 - RNA, 14 nt, Human
ucuuaugggcuggg

SEQ ID NO: 1671480 - RNA, 22 nt, Human
ucuuagaugcaguucugaagaa

SEQ ID NO: 1671481 - RNA, 18 nt, Human
ucuuaauuaaaagaauau

SEQ ID NO: 1671482 - RNA, 21 nt, Human
ucuuaauuaaaagaauauuuu

SEQ ID NO: 1671483 - RNA, 16 nt, Human
ucuggguuccuuccuc

SEQ ID NO: 1671484 - RNA, 18 nt, Human
ucugguccauagagagca

SEQ ID NO: 1671485 - RNA, 11 nt, Human
ucuggggcugu

SEQ ID NO: 1671486 - RNA, 14 nt, Human
ucuggguucacugc

SEQ ID NO: 1671487 - RNA, 16 nt, Human
ucuggguucacugcaa

SEQ ID NO: 1671488 - RNA, 16 nt, Human
ucuguauagauuagag

SEQ ID NO: 1671489 - RNA, 15 nt, Human
ucugucauuugagca

SEQ ID NO: 1671490 - RNA, 20 nt, Human
ucugucauuugagcagggcu

SEQ ID NO: 1671491 - RNA, 23 nt, Human
ucugucauuugagcagggcucag

SEQ ID NO: 1671492 - RNA, 17 nt, Human
ucuguauagauuagaau

SEQ ID NO: 1671493 - RNA, 18 nt, Human
ucuguuggccagugugac

SEQ ID NO: 1671494 - RNA, 19 nt, Human
ucuguuggccagugugaca

SEQ ID NO: 1671495 - RNA, 20 nt, Human
ucuguuggccagugugacaa

SEQ ID NO: 1671496 - RNA, 22 nt, Human
ucugugaaaggaaagagggagg

SEQ ID NO: 1671497 - RNA, 24 nt, Human
ucuguccaggcacugcugcccagc

SEQ ID NO: 1671498 - RNA, 15 nt, Human
ucugugaaaggaaag

SEQ ID NO: 1671499 - RNA, 21 nt, Human
ucugugaaaggaaagagggag

SEQ ID NO: 1671500 - RNA, 13 nt, Human
agaauuucuagga

SEQ ID NO: 1671501 - RNA, 21 nt, Human
agaauuucuaggacugaauua

SEQ ID NO: 1671502 - RNA, 23 nt, Human
agaauuucccaaagcagugcaug

SEQ ID NO: 1671503 - RNA, 17 nt, Human
agaauuucccaaagcag

SEQ ID NO: 1671504 - RNA, 18 nt, Human
agaauuucccaaagcagu

SEQ ID NO: 1671505 - RNA, 20 nt, Human
ucuguuuuauaauuuuguga

SEQ ID NO: 1671506 - RNA, 18 nt, Human
ucuguuuuauaauuuugu

SEQ ID NO: 1671507 - RNA, 21 nt, Human
agaggcgcaugaauuugugaa

SEQ ID NO: 1671508 - RNA, 17 nt, Human
agaggcuaugugagcac

SEQ ID NO: 1671509 - RNA, 21 nt, Human
agagggagggagggcuccaga

SEQ ID NO: 1671510 - RNA, 15 nt, Human
agagggagguaagga

SEQ ID NO: 1671511 - RNA, 22 nt, Human
agagggagggagggcuccagac

SEQ ID NO: 1671512 - RNA, 18 nt, Human
ugaagauguagaggagaa

SEQ ID NO: 1671513 - RNA, 14 nt, Human
ugaagcauuuuaua

SEQ ID NO: 1671514 - RNA, 19 nt, Human
agagcuucuguugcugccu

SEQ ID NO: 1671515 - RNA, 20 nt, Human
agagcuucuguugcugccuc

SEQ ID NO: 1671516 - RNA, 21 nt, Human
agagcuucuguugcugccuca

SEQ ID NO: 1671517 - RNA, 22 nt, Human
agagcuucuguugcugccucau

SEQ ID NO: 1671518 - RNA, 15 nt, Human
agagcuucuggcacu

SEQ ID NO: 1671519 - RNA, 21 nt, Human
ugaagacaaugacuuacugua

SEQ ID NO: 1671520 - RNA, 19 nt, Human
agagcugggugucaagagg

SEQ ID NO: 1671521 - RNA, 12 nt, Human
agaggaaagcaa

SEQ ID NO: 1671522 - RNA, 16 nt, Human
agaggaaagcaaagga

SEQ ID NO: 1671523 - RNA, 18 nt, Human
agaggaaagcaaaggaga

SEQ ID NO: 1671524 - RNA, 19 nt, Human
agaggaaagcaaaggagau

SEQ ID NO: 1671525 - RNA, 11 nt, Human
agaggaaauca

SEQ ID NO: 1671526 - RNA, 12 nt, Human
agaggaaaucac

SEQ ID NO: 1671527 - RNA, 21 nt, Human
agaggaaaucaccgaaaacgu

SEQ ID NO: 1671528 - RNA, 18 nt, Human
agaggcaacugcauuggc

SEQ ID NO: 1671529 - RNA, 13 nt, Human
ucuuuguaaugaa

SEQ ID NO: 1671530 - RNA, 15 nt, Human
ucuuuguaaugaaaa

SEQ ID NO: 1671531 - RNA, 11 nt, Human
ugaacuuugac

SEQ ID NO: 1671532 - RNA, 12 nt, Human
ucuuuguaauga

SEQ ID NO: 1671533 - RNA, 14 nt, Human
ucuuuggucuacac

SEQ ID NO: 1671534 - RNA, 21 nt, Human
ucuuuggucuacacugugcug

SEQ ID NO: 1671535 - RNA, 17 nt, Human
ugaagacaaugacuuac

SEQ ID NO: 1671536 - RNA, 13 nt, Human
ugaagacaaugac

SEQ ID NO: 1671537 - RNA, 11 nt, Human
ugaagacaaug

SEQ ID NO: 1671538 - RNA, 22 nt, Human
ugaagaagcaccaaucaugaau

SEQ ID NO: 1671539 - RNA, 17 nt, Human
ugaacuuugaccucugc

SEQ ID NO: 1671540 - RNA, 16 nt, Human
ugaacuuugaccucug

SEQ ID NO: 1671541 - RNA, 14 nt, Human
ugaagaagauggua

SEQ ID NO: 1671542 - RNA, 20 nt, Human
ugaagaagcaccaaucauga

SEQ ID NO: 1671543 - RNA, 15 nt, Human
ugaaugcauaaaaug

SEQ ID NO: 1671544 - RNA, 16 nt, Human
ugaaugcauaaaaugu

SEQ ID NO: 1671545 - RNA, 18 nt, Human
ugaagguggaaauaaacu

SEQ ID NO: 1671546 - RNA, 14 nt, Human
ugaaugucagugug

SEQ ID NO: 1671547 - RNA, 15 nt, Human
ugaaugucaguguga

SEQ ID NO: 1671548 - RNA, 18 nt, Human
ugaaugucagugugacug

SEQ ID NO: 1671549 - RNA, 20 nt, Human
agagucucacuguugcccag

SEQ ID NO: 1671550 - RNA, 22 nt, Human
agagucucacuguugcccaggc

SEQ ID NO: 1671551 - RNA, 14 nt, Human
agagugaacaaauu

SEQ ID NO: 1671552 - RNA, 15 nt, Human
agagugagacucugu

SEQ ID NO: 1671553 - RNA, 16 nt, Human
agagugagacucuguc

SEQ ID NO: 1671554 - RNA, 18 nt, Human
agagucuauuuacggaac

SEQ ID NO: 1671555 - RNA, 22 nt, Human
agagugaacaaauuuacagaga

SEQ ID NO: 1671556 - RNA, 21 nt, Human
agaucaaccccuucgcuccug

SEQ ID NO: 1671557 - RNA, 14 nt, Human
agaucaaccccuuc

SEQ ID NO: 1671558 - RNA, 19 nt, Human
agaucaaccccuucgcucc

SEQ ID NO: 1671559 - RNA, 22 nt, Human
agauauuuugcuuugugauuuu

SEQ ID NO: 1671560 - RNA, 19 nt, Human
agauacaggaaaagcugcu

SEQ ID NO: 1671561 - RNA, 19 nt, Human
agagugagacucugucuca

SEQ ID NO: 1671562 - RNA, 19 nt, Human
agauaaggguaucugguga

SEQ ID NO: 1671563 - RNA, 18 nt, Human
agauaauucuagcuuuga

SEQ ID NO: 1671564 - RNA, 18 nt, Human
agauaauacaccacuaca

SEQ ID NO: 1671565 - RNA, 12 nt, Human
ugaauuuauugg

SEQ ID NO: 1671566 - RNA, 15 nt, Human
ugaauuuauuggcuu

SEQ ID NO: 1671567 - RNA, 16 nt, Human
ugaauuuauuggcuuu

SEQ ID NO: 1671568 - RNA, 17 nt, Human
ugaauuuauuggcuuuu

SEQ ID NO: 1671569 - RNA, 18 nt, Human
ugacauuguagagcuucu

SEQ ID NO: 1671570 - RNA, 22 nt, Human
ugacauuguagagcuucuggca

SEQ ID NO: 1671571 - RNA, 12 nt, Human
ugaccacacucc

SEQ ID NO: 1671572 - RNA, 17 nt, Human
ugaccacacuccagcug

SEQ ID NO: 1671573 - RNA, 19 nt, Human
ugaccacacuccagcuggg

SEQ ID NO: 1671574 - RNA, 20 nt, Human
ugaccacacuccagcuggga

SEQ ID NO: 1671575 - RNA, 21 nt, Human
agaucauugugaaauuauuca

SEQ ID NO: 1671576 - RNA, 15 nt, Human
agauguguucacaau

SEQ ID NO: 1671577 - RNA, 18 nt, Human
agauguguucacaaugga

SEQ ID NO: 1671578 - RNA, 12 nt, Human
ugacccaugcug

SEQ ID NO: 1671579 - RNA, 17 nt, Human
ugaccccucauagcccu

SEQ ID NO: 1671580 - RNA, 22 nt, Human
ugacccccaaccaaguggcucc

SEQ ID NO: 1671581 - RNA, 19 nt, Human
ugaccccucauagcccuca

SEQ ID NO: 1671582 - RNA, 20 nt, Human
ugaccccucauagcccucac

SEQ ID NO: 1671583 - RNA, 13 nt, Human
ugaccucugccug

SEQ ID NO: 1671584 - RNA, 23 nt, Human
ugaccccucauagcccucacccu

SEQ ID NO: 1671585 - RNA, 14 nt, Human
ugaccucugccuga

SEQ ID NO: 1671586 - RNA, 12 nt, Human
ugaccugaggcc

SEQ ID NO: 1671587 - RNA, 18 nt, Human
agaugcuucucacugcca

SEQ ID NO: 1671588 - RNA, 16 nt, Human
agaugcuucucacugc

SEQ ID NO: 1671589 - RNA, 23 nt, Human
agaugcuagaacucccuuucaac

SEQ ID NO: 1671590 - RNA, 20 nt, Human
agauuauaggcaccuaccac

SEQ ID NO: 1671591 - RNA, 23 nt, Human
agauuauauauauuuuuuucuga

SEQ ID NO: 1671592 - RNA, 16 nt, Human
agauuauucacugauu

SEQ ID NO: 1671593 - RNA, 16 nt, Human
agauucaaucccagga

SEQ ID NO: 1671594 - RNA, 21 nt, Human
agauucaaugccccugaauuu

SEQ ID NO: 1671595 - RNA, 22 nt, Human
agauucaaugccccugaauuua

SEQ ID NO: 1671596 - RNA, 22 nt, Human
ugacuucauuaauaauaaauuc

SEQ ID NO: 1671597 - RNA, 17 nt, Human
ugaccugaggcccuucu

SEQ ID NO: 1671598 - RNA, 14 nt, Human
ugaccugaggcccu

SEQ ID NO: 1671599 - RNA, 15 nt, Human
ugaccugaggcccuu

SEQ ID NO: 1671600 - RNA, 17 nt, Human
ugacuccagaauuuccc

SEQ ID NO: 1671601 - RNA, 19 nt, Human
ugacuccagaauuucccaa

SEQ ID NO: 1671602 - RNA, 20 nt, Human
ugacuccagaauuucccaaa

SEQ ID NO: 1671603 - RNA, 23 nt, Human
ugacuccagaauuucccaaagca

SEQ ID NO: 1671604 - RNA, 15 nt, Human
ugacuguuuccauca

SEQ ID NO: 1671605 - RNA, 13 nt, Human
agauuucacucuc

SEQ ID NO: 1671606 - RNA, 14 nt, Human
agauuucacucucc

SEQ ID NO: 1671607 - RNA, 17 nt, Human
agauuucacucuccuug

SEQ ID NO: 1671608 - RNA, 14 nt, Human
agauuuaugcauau

SEQ ID NO: 1671609 - RNA, 16 nt, Human
agauuuaccacuugug

SEQ ID NO: 1671610 - RNA, 16 nt, Human
agauugugccccugca

SEQ ID NO: 1671611 - RNA, 21 nt, Human
agauugugccccugcacucca

SEQ ID NO: 1671612 - RNA, 15 nt, Human
agcaaaaauauuuua

SEQ ID NO: 1671613 - RNA, 17 nt, Human
agcaaaaauauuuuaug

SEQ ID NO: 1671614 - RNA, 18 nt, Human
agcaaaaauauuuuauga

SEQ ID NO: 1671615 - RNA, 19 nt, Human
agcaaaaauauuuuaugau

SEQ ID NO: 1671616 - RNA, 23 nt, Human
agcaaaaauauuuuaugauccag

SEQ ID NO: 1671617 - RNA, 21 nt, Human
agauuuuauuauguaaauccc

SEQ ID NO: 1671618 - RNA, 22 nt, Human
agauuuuauuauguaaauccca

SEQ ID NO: 1671619 - RNA, 14 nt, Human
agauuuuccugaaa

SEQ ID NO: 1671620 - RNA, 21 nt, Human
agcacagcagccccugcacaa

SEQ ID NO: 1671621 - RNA, 22 nt, Human
agcaagugagagcuggguguca

SEQ ID NO: 1671622 - RNA, 14 nt, Human
agcaagugagagcu

SEQ ID NO: 1671623 - RNA, 17 nt, Human
ugagccagauuucacuc

SEQ ID NO: 1671624 - RNA, 22 nt, Human
ugagccagauuucacucuccuu

SEQ ID NO: 1671625 - RNA, 20 nt, Human
agcaagugagacccugucuc

SEQ ID NO: 1671626 - RNA, 13 nt, Human
agcaagugagagc

SEQ ID NO: 1671627 - RNA, 15 nt, Human
agcacagugaucaag

SEQ ID NO: 1671628 - RNA, 16 nt, Human
agcacagcuucauuuc

SEQ ID NO: 1671629 - RNA, 22 nt, Human
agcacagccucuuagaugcagu

SEQ ID NO: 1671630 - RNA, 13 nt, Human
agcacaugccucu

SEQ ID NO: 1671631 - RNA, 14 nt, Human
agcacaugccucuc

SEQ ID NO: 1671632 - RNA, 16 nt, Human
agcacaugccucucuc

SEQ ID NO: 1671633 - RNA, 16 nt, Human
agcaccaaucaugaau

SEQ ID NO: 1671634 - RNA, 21 nt, Human
ugagcaucaggccaggcccuc

SEQ ID NO: 1671635 - RNA, 15 nt, Human
ugagccaccacgccc

SEQ ID NO: 1671636 - RNA, 14 nt, Human
ugagccaccgugcc

SEQ ID NO: 1671637 - RNA, 22 nt, Human
ugagcaucaggccaggcccucu

SEQ ID NO: 1671638 - RNA, 24 nt, Human
ugagcaucaggccaggcccucugc

SEQ ID NO: 1671639 - RNA, 18 nt, Human
ugagccaccgugccuggc

SEQ ID NO: 1671640 - RNA, 19 nt, Human
ugagccaccgugccuggcc

SEQ ID NO: 1671641 - RNA, 20 nt, Human
ugagccaccgugccuggcca

SEQ ID NO: 1671642 - RNA, 21 nt, Human
ugagccaccgugccuggccac

SEQ ID NO: 1671643 - RNA, 21 nt, Human
ugagccacugcaccgggccac

SEQ ID NO: 1671644 - RNA, 18 nt, Human
ugagccacugcaccgggc

SEQ ID NO: 1671645 - RNA, 23 nt, Human
ugagccacugcaccgggccacag

SEQ ID NO: 1671646 - RNA, 13 nt, Human
ugagccagauuuc

SEQ ID NO: 1671647 - RNA, 14 nt, Human
ugagccagauuuca

SEQ ID NO: 1671648 - RNA, 16 nt, Human
ugagccagauuucacu

SEQ ID NO: 1671649 - RNA, 20 nt, Human
ugagcacuaaggugugcucu

SEQ ID NO: 1671650 - RNA, 21 nt, Human
ugagcacuaaggugugcucug

SEQ ID NO: 1671651 - RNA, 22 nt, Human
ugagcacuaaggugugcucuga

SEQ ID NO: 1671652 - RNA, 23 nt, Human
ugagcacuaaggugugcucugau

SEQ ID NO: 1671653 - RNA, 16 nt, Human
ugagcaaauguggcuc

SEQ ID NO: 1671654 - RNA, 18 nt, Human
ugagcaaauguggcuccu

SEQ ID NO: 1671655 - RNA, 19 nt, Human
ugagcaaauguggcuccug

SEQ ID NO: 1671656 - RNA, 15 nt, Human
ugagcaauccugcaa

SEQ ID NO: 1671657 - RNA, 14 nt, Human
agcaacgcaggccc

SEQ ID NO: 1671658 - RNA, 10 nt, Human
agcaccaggg

SEQ ID NO: 1671659 - RNA, 12 nt, Human
agcaccagggaa

SEQ ID NO: 1671660 - RNA, 13 nt, Human
agcaccagggaag

SEQ ID NO: 1671661 - RNA, 19 nt, Human
agcaccuuagacagucccu

SEQ ID NO: 1671662 - RNA, 20 nt, Human
agcaccuuagacagucccug

SEQ ID NO: 1671663 - RNA, 21 nt, Human
agcaccuuagacagucccugc

SEQ ID NO: 1671664 - RNA, 22 nt, Human
agcaccuuagacagucccugcc

SEQ ID NO: 1671665 - RNA, 23 nt, Human
agcaccuuagacagucccugcca

SEQ ID NO: 1671666 - RNA, 13 nt, Human
agcacgauuucug

SEQ ID NO: 1671667 - RNA, 15 nt, Human
agcacgauuucuguu

SEQ ID NO: 1671668 - RNA, 14 nt, Human
agcacgauuucugu

SEQ ID NO: 1671669 - RNA, 16 nt, Human
agcacgauuucuguuu

SEQ ID NO: 1671670 - RNA, 22 nt, Human
agcacuuugggaggccaaggug

SEQ ID NO: 1671671 - RNA, 23 nt, Human
agcacuuugggaggccaaggugg

SEQ ID NO: 1671672 - RNA, 13 nt, Human
agcagaaaugccu

SEQ ID NO: 1671673 - RNA, 12 nt, Human
agcagaaaugcc

SEQ ID NO: 1671674 - RNA, 19 nt, Human
agcagaaaugccuuacccu

SEQ ID NO: 1671675 - RNA, 14 nt, Human
agcagaacagugau

SEQ ID NO: 1671676 - RNA, 21 nt, Human
agcagagaaugaaagggccca

SEQ ID NO: 1671677 - RNA, 22 nt, Human
agcagagaaugaaagggcccag

SEQ ID NO: 1671678 - RNA, 23 nt, Human
agcagagaaugaaagggcccaga

SEQ ID NO: 1671679 - RNA, 14 nt, Human
agcagagaauucuc

SEQ ID NO: 1671680 - RNA, 21 nt, Human
agcagagaauucucuuaucca

SEQ ID NO: 1671681 - RNA, 15 nt, Human
agcagagaccauccc

SEQ ID NO: 1671682 - RNA, 16 nt, Human
agcagagaccaucccu

SEQ ID NO: 1671683 - RNA, 17 nt, Human
agcagagaccaucccug

SEQ ID NO: 1671684 - RNA, 10 nt, Human
ugagccuggc

SEQ ID NO: 1671685 - RNA, 11 nt, Human
ugagccuggca

SEQ ID NO: 1671686 - RNA, 16 nt, Human
ugagccuggcaagaau

SEQ ID NO: 1671687 - RNA, 14 nt, Human
ugagccugggaggu

SEQ ID NO: 1671688 - RNA, 19 nt, Human
ugagccugggaggucaagg

SEQ ID NO: 1671689 - RNA, 22 nt, Human
ugagccugggaggucaaggcug

SEQ ID NO: 1671690 - RNA, 14 nt, Human
ugagccuugaacuu

SEQ ID NO: 1671691 - RNA, 19 nt, Human
ugagccuugaacuuugacc

SEQ ID NO: 1671692 - RNA, 18 nt, Human
ugagccuugaacuuugac

SEQ ID NO: 1671693 - RNA, 17 nt, Human
ugagccuugaacuuuga

SEQ ID NO: 1671694 - RNA, 15 nt, Human
ugagccuugaacuuu

SEQ ID NO: 1671695 - RNA, 13 nt, Human
ugagcgacaguga

SEQ ID NO: 1671696 - RNA, 14 nt, Human
ugagcgacagugag

SEQ ID NO: 1671697 - RNA, 16 nt, Human
ugagcgacagugagac

SEQ ID NO: 1671698 - RNA, 20 nt, Human
ugagcgacagugagacucug

SEQ ID NO: 1671699 - RNA, 15 nt, Human
ugaggaagcaaaagc

SEQ ID NO: 1671700 - RNA, 22 nt, Human
ugaggaagcaaaagcaucuaug

SEQ ID NO: 1671701 - RNA, 14 nt, Human
ugaggaagccgcug

SEQ ID NO: 1671702 - RNA, 17 nt, Human
ugaggaagccgcugggg

SEQ ID NO: 1671703 - RNA, 18 nt, Human
ugaggaagccgcuggggc

SEQ ID NO: 1671704 - RNA, 19 nt, Human
ugaggaagccgcuggggcc

SEQ ID NO: 1671705 - RNA, 21 nt, Human
ugaggaagccgcuggggccag

SEQ ID NO: 1671706 - RNA, 14 nt, Human
ugagcuaggaauug

SEQ ID NO: 1671707 - RNA, 16 nt, Human
ugagcuacaaaugcau

SEQ ID NO: 1671708 - RNA, 14 nt, Human
ugagcuacaaaugc

SEQ ID NO: 1671709 - RNA, 13 nt, Human
ugagcuacaaaug

SEQ ID NO: 1671710 - RNA, 20 nt, Human
ugaggccagagacacaagcc

SEQ ID NO: 1671711 - RNA, 14 nt, Human
ugaggccagagaca

SEQ ID NO: 1671712 - RNA, 16 nt, Human
ugaggccagagacaca

SEQ ID NO: 1671713 - RNA, 12 nt, Human
ugaggcccagag

SEQ ID NO: 1671714 - RNA, 13 nt, Human
ugaggcccagagg

SEQ ID NO: 1671715 - RNA, 23 nt, Human
ugaggcccagagggccugcaagg

SEQ ID NO: 1671716 - RNA, 21 nt, Human
ugaggcccagagggccugcaa

SEQ ID NO: 1671717 - RNA, 22 nt, Human
ugaggcccagagggccugcaag

SEQ ID NO: 1671718 - RNA, 15 nt, Human
ugaggcccagagggc

SEQ ID NO: 1671719 - RNA, 17 nt, Human
ugaggcccagagggccu

SEQ ID NO: 1671720 - RNA, 18 nt, Human
ugaggcccagagggccug

SEQ ID NO: 1671721 - RNA, 20 nt, Human
ugaggcccagagggccugca

SEQ ID NO: 1671722 - RNA, 18 nt, Human
ugaggaauucuguauaga

SEQ ID NO: 1671723 - RNA, 19 nt, Human
ugaggaauucuguauagau

SEQ ID NO: 1671724 - RNA, 14 nt, Human
ugaggaauucugua

SEQ ID NO: 1671725 - RNA, 15 nt, Human
ugaggaauucuguau

SEQ ID NO: 1671726 - RNA, 16 nt, Human
ugaggaauucuguaua

SEQ ID NO: 1671727 - RNA, 21 nt, Human
ugaggaauccagacccggcug

SEQ ID NO: 1671728 - RNA, 22 nt, Human
ugaggaauccagacccggcugc

SEQ ID NO: 1671729 - RNA, 12 nt, Human
ugaggccagaga

SEQ ID NO: 1671730 - RNA, 21 nt, Human
ugaggacacuaaccacgcugg

SEQ ID NO: 1671731 - RNA, 15 nt, Human
ugaggacacugauau

SEQ ID NO: 1671732 - RNA, 15 nt, Human
ugagggauuaucuuu

SEQ ID NO: 1671733 - RNA, 19 nt, Human
ugagggauacccaucccau

SEQ ID NO: 1671734 - RNA, 16 nt, Human
ugaggcccuucucucc

SEQ ID NO: 1671735 - RNA, 18 nt, Human
ugaggcccuucucuccag

SEQ ID NO: 1671736 - RNA, 19 nt, Human
ugaggcccuucucuccagc

SEQ ID NO: 1671737 - RNA, 20 nt, Human
ugaggcccuucucuccagcc

SEQ ID NO: 1671738 - RNA, 22 nt, Human
ugaggcccuucucuccagcccc

SEQ ID NO: 1671739 - RNA, 23 nt, Human
ugaggcccuucucuccagccccu

SEQ ID NO: 1671740 - RNA, 24 nt, Human
ugaggcccuucucuccagccccug

SEQ ID NO: 1671741 - RNA, 12 nt, Human
ugaggggccucu

SEQ ID NO: 1671742 - RNA, 13 nt, Human
ugaggggccucuu

SEQ ID NO: 1671743 - RNA, 19 nt, Human
ugagguacaaccuguucug

SEQ ID NO: 1671744 - RNA, 20 nt, Human
agcagagaccaucccugaag

SEQ ID NO: 1671745 - RNA, 20 nt, Human
agcagagcaccuuagacagu

SEQ ID NO: 1671746 - RNA, 17 nt, Human
ugaggucagagccugca

SEQ ID NO: 1671747 - RNA, 18 nt, Human
agcagagaccaucccuga

SEQ ID NO: 1671748 - RNA, 19 nt, Human
agcagagaccaucccugaa

SEQ ID NO: 1671749 - RNA, 20 nt, Human
ugaggguugggcugguguca

SEQ ID NO: 1671750 - RNA, 17 nt, Human
ugagguacugagaguga

SEQ ID NO: 1671751 - RNA, 14 nt, Human
ugaggucagagccu

SEQ ID NO: 1671752 - RNA, 16 nt, Human
ugaggucagagccugc

SEQ ID NO: 1671753 - RNA, 13 nt, Human
ugaggucagagcc

SEQ ID NO: 1671754 - RNA, 22 nt, Human
ugagguacugagagugaacaaa

SEQ ID NO: 1671755 - RNA, 17 nt, Human
agcagaggaaggagagg

SEQ ID NO: 1671756 - RNA, 19 nt, Human
agcagauuauucacugauu

SEQ ID NO: 1671757 - RNA, 20 nt, Human
agcagauuauucacugauuu

SEQ ID NO: 1671758 - RNA, 19 nt, Human
agcagauggagaccccuug

SEQ ID NO: 1671759 - RNA, 15 nt, Human
agcagauuauucacu

SEQ ID NO: 1671760 - RNA, 16 nt, Human
agcagauuauucacug

SEQ ID NO: 1671761 - RNA, 14 nt, Human
agcagauuauucac

SEQ ID NO: 1671762 - RNA, 18 nt, Human
ucagcggggacagcuccu

SEQ ID NO: 1671763 - RNA, 15 nt, Human
ucagcggggacagcu

SEQ ID NO: 1671764 - RNA, 16 nt, Human
ucagcggggacagcuc

SEQ ID NO: 1671765 - RNA, 17 nt, Human
ucagcggggacagcucc

SEQ ID NO: 1671766 - RNA, 20 nt, Human
ucaggccaaacucaccugcc

SEQ ID NO: 1671767 - RNA, 23 nt, Human
ucaggccaaacucaccugccccu

SEQ ID NO: 1671768 - RNA, 12 nt, Human
ucaggaagcuca

SEQ ID NO: 1671769 - RNA, 17 nt, Human
ucaggaagcucagggcc

SEQ ID NO: 1671770 - RNA, 19 nt, Human
ucaggaagcucagggccug

SEQ ID NO: 1671771 - RNA, 20 nt, Human
ucaggaagcucagggccugg

SEQ ID NO: 1671772 - RNA, 15 nt, Human
ucaggccagcugcuu

SEQ ID NO: 1671773 - RNA, 20 nt, Human
ucaggccagcugcuugggcu

SEQ ID NO: 1671774 - RNA, 11 nt, Human
ucaggccaggc

SEQ ID NO: 1671775 - RNA, 12 nt, Human
ucaggccaggcc

SEQ ID NO: 1671776 - RNA, 13 nt, Human
ucagggucccugg

SEQ ID NO: 1671777 - RNA, 14 nt, Human
ucagggucccuggu

SEQ ID NO: 1671778 - RNA, 18 nt, Human
ucagggucccugguggca

SEQ ID NO: 1671779 - RNA, 13 nt, Human
ucagguaacaggc

SEQ ID NO: 1671780 - RNA, 15 nt, Human
ucagguaacaggcag

SEQ ID NO: 1671781 - RNA, 16 nt, Human
ucagguaacaggcaga

SEQ ID NO: 1671782 - RNA, 19 nt, Human
accccuucgcuccuguguc

SEQ ID NO: 1671783 - RNA, 20 nt, Human
accccuucgcuccugugucu

SEQ ID NO: 1671784 - RNA, 16 nt, Human
acccuuguggucccac

SEQ ID NO: 1671785 - RNA, 17 nt, Human
acccuuguggucccacc

SEQ ID NO: 1671786 - RNA, 19 nt, Human
acccuuguggucccacccc

SEQ ID NO: 1671787 - RNA, 20 nt, Human
acccuuguggucccacccca

SEQ ID NO: 1671788 - RNA, 14 nt, Human
acccugcccugugg

SEQ ID NO: 1671789 - RNA, 13 nt, Human
acccugcccugug

SEQ ID NO: 1671790 - RNA, 11 nt, Human
acccugcccug

SEQ ID NO: 1671791 - RNA, 12 nt, Human
acccugcccugu

SEQ ID NO: 1671792 - RNA, 14 nt, Human
acccucuuagaaaa

SEQ ID NO: 1671793 - RNA, 16 nt, Human
ucagauuuuauuaugu

SEQ ID NO: 1671794 - RNA, 19 nt, Human
ucagauuuuauuauguaaa

SEQ ID NO: 1671795 - RNA, 20 nt, Human
ucagauuuuauuauguaaau

SEQ ID NO: 1671796 - RNA, 22 nt, Human
ucagauuuuauuauguaaaucc

SEQ ID NO: 1671797 - RNA, 18 nt, Human
ucagcccucccugccccu

SEQ ID NO: 1671798 - RNA, 19 nt, Human
ucagcccucccugccccuc

SEQ ID NO: 1671799 - RNA, 13 nt, Human
acccagcucuggu

SEQ ID NO: 1671800 - RNA, 15 nt, Human
acccagcucuggucc

SEQ ID NO: 1671801 - RNA, 14 nt, Human
ucagauuuuauuau

SEQ ID NO: 1671802 - RNA, 15 nt, Human
ucagauuuuauuaug

SEQ ID NO: 1671803 - RNA, 13 nt, Human
ucagauuuuauua

SEQ ID NO: 1671804 - RNA, 13 nt, Human
ucagaucuucugu

SEQ ID NO: 1671805 - RNA, 13 nt, Human
ucagaagacacug

SEQ ID NO: 1671806 - RNA, 15 nt, Human
accccuggcuuuuca

SEQ ID NO: 1671807 - RNA, 17 nt, Human
accccuggcuuuucacu

SEQ ID NO: 1671808 - RNA, 19 nt, Human
ucagccuggcuucaaauug

SEQ ID NO: 1671809 - RNA, 10 nt, Human
ucagccuggg

SEQ ID NO: 1671810 - RNA, 12 nt, Human
ucagccugggca

SEQ ID NO: 1671811 - RNA, 12 nt, Human
accccuggcuuu

SEQ ID NO: 1671812 - RNA, 15 nt, Human
acccccagccugcua

SEQ ID NO: 1671813 - RNA, 19 nt, Human
ucacuguugcccaggcugg

SEQ ID NO: 1671814 - RNA, 17 nt, Human
ucacuguugcccaggcu

SEQ ID NO: 1671815 - RNA, 18 nt, Human
ucacuguugcccaggcug

SEQ ID NO: 1671816 - RNA, 21 nt, Human
accaguguuguggauuuaaca

SEQ ID NO: 1671817 - RNA, 13 nt, Human
ucacugagacagc

SEQ ID NO: 1671818 - RNA, 14 nt, Human
ucacugagacagcc

SEQ ID NO: 1671819 - RNA, 15 nt, Human
ucacugagacagccc

SEQ ID NO: 1671820 - RNA, 20 nt, Human
ucacugcacagugcaucuca

SEQ ID NO: 1671821 - RNA, 22 nt, Human
ucacugcacagugcaucucagc

SEQ ID NO: 1671822 - RNA, 24 nt, Human
ucacugcacagugcaucucagccc

SEQ ID NO: 1671823 - RNA, 13 nt, Human
ucacugcagccuc

SEQ ID NO: 1671824 - RNA, 12 nt, Human
ucacugcagccu

SEQ ID NO: 1671825 - RNA, 16 nt, Human
acccagcccacuucug

SEQ ID NO: 1671826 - RNA, 17 nt, Human
acccagcccacuucugc

SEQ ID NO: 1671827 - RNA, 18 nt, Human
acccagcccacuucugcc

SEQ ID NO: 1671828 - RNA, 19 nt, Human
acccacuugcuuuuaaaau

SEQ ID NO: 1671829 - RNA, 16 nt, Human
acccagaagaaaauag

SEQ ID NO: 1671830 - RNA, 21 nt, Human
acccaaauguucaucaaugaa

SEQ ID NO: 1671831 - RNA, 18 nt, Human
acccaaaaggcagaagca

SEQ ID NO: 1671832 - RNA, 15 nt, Human
accauuccccauggg

SEQ ID NO: 1671833 - RNA, 12 nt, Human
accauuccccau

SEQ ID NO: 1671834 - RNA, 23 nt, Human
accaugauuaaccacuucagcug

SEQ ID NO: 1671835 - RNA, 22 nt, Human
accaugauuaaccacuucagcu

SEQ ID NO: 1671836 - RNA, 18 nt, Human
accauucuccaccugcca

SEQ ID NO: 1671837 - RNA, 13 nt, Human
accauucuccacc

SEQ ID NO: 1671838 - RNA, 16 nt, Human
accauucuccaccugc

SEQ ID NO: 1671839 - RNA, 23 nt, Human
accauuuugggguacccacugcu

SEQ ID NO: 1671840 - RNA, 13 nt, Human
acccaaaaggcag

SEQ ID NO: 1671841 - RNA, 15 nt, Human
acccaaaaggcagaa

SEQ ID NO: 1671842 - RNA, 19 nt, Human
accaggcaacuugggaacu

SEQ ID NO: 1671843 - RNA, 13 nt, Human
ucaccucccccau

SEQ ID NO: 1671844 - RNA, 15 nt, Human
ucaccucccccaucu

SEQ ID NO: 1671845 - RNA, 12 nt, Human
ucaccuccugcu

SEQ ID NO: 1671846 - RNA, 13 nt, Human
ucaccuccugcug

SEQ ID NO: 1671847 - RNA, 14 nt, Human
ucaccuccugcugg

SEQ ID NO: 1671848 - RNA, 15 nt, Human
ucaccuccugcuggg

SEQ ID NO: 1671849 - RNA, 17 nt, Human
ucaccuccugcugggca

SEQ ID NO: 1671850 - RNA, 19 nt, Human
ucaccugaagacucauucu

SEQ ID NO: 1671851 - RNA, 23 nt, Human
ucaccugaagacucauucuucug

SEQ ID NO: 1671852 - RNA, 12 nt, Human
accagagcugcc

SEQ ID NO: 1671853 - RNA, 19 nt, Human
accagagcccaccuuggcu

SEQ ID NO: 1671854 - RNA, 22 nt, Human
accagagcccaccuuggcucaa

SEQ ID NO: 1671855 - RNA, 11 nt, Human
accagacaggu

SEQ ID NO: 1671856 - RNA, 22 nt, Human
accagacaccuugacagggcac

SEQ ID NO: 1671857 - RNA, 23 nt, Human
accagacaccuugacagggcaca

SEQ ID NO: 1671858 - RNA, 12 nt, Human
accacuuuuguu

SEQ ID NO: 1671859 - RNA, 19 nt, Human
accacuuguguuuugcaag

SEQ ID NO: 1671860 - RNA, 23 nt, Human
accacuuguguuuugcaagccag

SEQ ID NO: 1671861 - RNA, 20 nt, Human
accacucuaucaaguauuau

SEQ ID NO: 1671862 - RNA, 16 nt, Human
accacaucuugcucug

SEQ ID NO: 1671863 - RNA, 20 nt, Human
accacaucuugcucugcuga

SEQ ID NO: 1671864 - RNA, 21 nt, Human
accacaucuugcucugcugac

SEQ ID NO: 1671865 - RNA, 24 nt, Human
accacaucuugcucugcugacaga

SEQ ID NO: 1671866 - RNA, 15 nt, Human
accacuucagcugac

SEQ ID NO: 1671867 - RNA, 13 nt, Human
accacuucagcug

SEQ ID NO: 1671868 - RNA, 14 nt, Human
accacuucagcuga

SEQ ID NO: 1671869 - RNA, 14 nt, Human
accacugcagaaga

SEQ ID NO: 1671870 - RNA, 19 nt, Human
accacugcagaagacagua

SEQ ID NO: 1671871 - RNA, 22 nt, Human
accacagacauacuaaccagca

SEQ ID NO: 1671872 - RNA, 21 nt, Human
accacagacauacuaaccagc

SEQ ID NO: 1671873 - RNA, 14 nt, Human
accacaucuugcuc

SEQ ID NO: 1671874 - RNA, 11 nt, Human
accacagcagu

SEQ ID NO: 1671875 - RNA, 12 nt, Human
uauuucauuucu

SEQ ID NO: 1671876 - RNA, 12 nt, Human
accuucuccuuc

SEQ ID NO: 1671877 - RNA, 16 nt, Human
accuugacagggcaca

SEQ ID NO: 1671878 - RNA, 15 nt, Human
accuugacagggcac

SEQ ID NO: 1671879 - RNA, 15 nt, Human
accuugaaugaugcc

SEQ ID NO: 1671880 - RNA, 14 nt, Human
accuugacagggca

SEQ ID NO: 1671881 - RNA, 13 nt, Human
accuucuguggcu

SEQ ID NO: 1671882 - RNA, 15 nt, Human
accuucuguggcuca

SEQ ID NO: 1671883 - RNA, 16 nt, Human
accuucuguggcucac

SEQ ID NO: 1671884 - RNA, 12 nt, Human
accuucuguggc

SEQ ID NO: 1671885 - RNA, 14 nt, Human
accuucuccuucac

SEQ ID NO: 1671886 - RNA, 13 nt, Human
accuucuccuuca

SEQ ID NO: 1671887 - RNA, 14 nt, Human
accuuagccugccc

SEQ ID NO: 1671888 - RNA, 17 nt, Human
accuuagacagucccug

SEQ ID NO: 1671889 - RNA, 22 nt, Human
accuggucacaggacucugccu

SEQ ID NO: 1671890 - RNA, 23 nt, Human
accuggucacaggacucugccuc

SEQ ID NO: 1671891 - RNA, 15 nt, Human
uccaccaucaagcca

SEQ ID NO: 1671892 - RNA, 18 nt, Human
uccaccaucaagccacca

SEQ ID NO: 1671893 - RNA, 22 nt, Human
uccagaaguuugagaucagccu

SEQ ID NO: 1671894 - RNA, 19 nt, Human
accuuuguauucucuccug

SEQ ID NO: 1671895 - RNA, 15 nt, Human
accuuuguauucucu

SEQ ID NO: 1671896 - RNA, 23 nt, Human
accuuuguauucucuccuguacc

SEQ ID NO: 1671897 - RNA, 15 nt, Human
uccagaccccuggcu

SEQ ID NO: 1671898 - RNA, 16 nt, Human
uccagaccccuggcuu

SEQ ID NO: 1671899 - RNA, 17 nt, Human
uccagaccccuggcuuu

SEQ ID NO: 1671900 - RNA, 18 nt, Human
uccagaccccuggcuuuu

SEQ ID NO: 1671901 - RNA, 14 nt, Human
uccagacccggcug

SEQ ID NO: 1671902 - RNA, 15 nt, Human
uccagccccuggaug

SEQ ID NO: 1671903 - RNA, 16 nt, Human
uccagccccuggaugc

SEQ ID NO: 1671904 - RNA, 17 nt, Human
uccagccccuggaugca

SEQ ID NO: 1671905 - RNA, 19 nt, Human
uccagccccuggaugcagc

SEQ ID NO: 1671906 - RNA, 21 nt, Human
uccagccccuggaugcagccu

SEQ ID NO: 1671907 - RNA, 21 nt, Human
uccagccugagcgacagugag

SEQ ID NO: 1671908 - RNA, 23 nt, Human
uccagaccccuggcuuuucacug

SEQ ID NO: 1671909 - RNA, 22 nt, Human
uccagccccuggaugcagccuc

SEQ ID NO: 1671910 - RNA, 20 nt, Human
uccagccugagcgacaguga

SEQ ID NO: 1671911 - RNA, 15 nt, Human
accugaagucuuugu

SEQ ID NO: 1671912 - RNA, 22 nt, Human
accugaagucuuuguacagaca

SEQ ID NO: 1671913 - RNA, 18 nt, Human
accugcucuccucuugcc

SEQ ID NO: 1671914 - RNA, 17 nt, Human
accugcucuccucuugc

SEQ ID NO: 1671915 - RNA, 23 nt, Human
accugcggugcuaucucccccag

SEQ ID NO: 1671916 - RNA, 19 nt, Human
accugcggugcuaucuccc

SEQ ID NO: 1671917 - RNA, 22 nt, Human
accugcggugcuaucuccccca

SEQ ID NO: 1671918 - RNA, 19 nt, Human
accugcucuccucuugcca

SEQ ID NO: 1671919 - RNA, 19 nt, Human
ucauuugagcagggcucag

SEQ ID NO: 1671920 - RNA, 17 nt, Human
accuggaauauauaacc

SEQ ID NO: 1671921 - RNA, 14 nt, Human
accuggaauauaua

SEQ ID NO: 1671922 - RNA, 23 nt, Human
uccaaagucucuggaauuugaaa

SEQ ID NO: 1671923 - RNA, 17 nt, Human
ucauuuuuuuuaagaaa

SEQ ID NO: 1671924 - RNA, 13 nt, Human
ucauuuuuuuuaa

SEQ ID NO: 1671925 - RNA, 20 nt, Human
ucauuuuagggguagcauuu

SEQ ID NO: 1671926 - RNA, 18 nt, Human
ucauuugugccagaaugc

SEQ ID NO: 1671927 - RNA, 21 nt, Human
ucauuugagcagggcucagcg

SEQ ID NO: 1671928 - RNA, 16 nt, Human
uccaagcuggucccac

SEQ ID NO: 1671929 - RNA, 11 nt, Human
uccaagcuggu

SEQ ID NO: 1671930 - RNA, 22 nt, Human
uccacauaaggaaacuggguuc

SEQ ID NO: 1671931 - RNA, 18 nt, Human
uccacauaaggaaacugg

SEQ ID NO: 1671932 - RNA, 14 nt, Human
uccaaaugcagcuu

SEQ ID NO: 1671933 - RNA, 15 nt, Human
uccaaaugcagcuuu

SEQ ID NO: 1671934 - RNA, 18 nt, Human
uccaagcuccaucuccac

SEQ ID NO: 1671935 - RNA, 16 nt, Human
uccaagcucccaggca

SEQ ID NO: 1671936 - RNA, 14 nt, Human
uccaagcucccagg

SEQ ID NO: 1671937 - RNA, 15 nt, Human
uccaagcucccaggc

SEQ ID NO: 1671938 - RNA, 12 nt, Human
uccaagcuccca

SEQ ID NO: 1671939 - RNA, 13 nt, Human
uccaagcucccag

SEQ ID NO: 1671940 - RNA, 21 nt, Human
uccaacuaucucauuuccaag

SEQ ID NO: 1671941 - RNA, 21 nt, Human
accucuaaauucuuucauuuu

SEQ ID NO: 1671942 - RNA, 13 nt, Human
accucucccuugg

SEQ ID NO: 1671943 - RNA, 14 nt, Human
accucucccuugga

SEQ ID NO: 1671944 - RNA, 15 nt, Human
accucucccuuggau

SEQ ID NO: 1671945 - RNA, 12 nt, Human
accucugcacaa

SEQ ID NO: 1671946 - RNA, 23 nt, Human
accucucccuuggauuguccccg

SEQ ID NO: 1671947 - RNA, 14 nt, Human
accucucucacucc

SEQ ID NO: 1671948 - RNA, 19 nt, Human
accucucucacuccuugaa

SEQ ID NO: 1671949 - RNA, 18 nt, Human
accucuaaauucuuucau

SEQ ID NO: 1671950 - RNA, 17 nt, Human
accucggugccuuccuc

SEQ ID NO: 1671951 - RNA, 21 nt, Human
ucauucuccuuguguuacuaa

SEQ ID NO: 1671952 - RNA, 22 nt, Human
ucauugaccugaggcccuucuc

SEQ ID NO: 1671953 - RNA, 14 nt, Human
ucaugugaaaucau

SEQ ID NO: 1671954 - RNA, 13 nt, Human
ucaugucuggcua

SEQ ID NO: 1671955 - RNA, 17 nt, Human
ucauguucuuaauucuu

SEQ ID NO: 1671956 - RNA, 11 nt, Human
ucauguucuua

SEQ ID NO: 1671957 - RNA, 19 nt, Human
ucaugacaaagacugagua

SEQ ID NO: 1671958 - RNA, 19 nt, Human
ucauccacugugccaugug

SEQ ID NO: 1671959 - RNA, 21 nt, Human
ucauccacugugccaugugcc

SEQ ID NO: 1671960 - RNA, 23 nt, Human
ucauccacugugccaugugccag

SEQ ID NO: 1671961 - RNA, 22 nt, Human
ucaugaauuaguuuuauaugcu

SEQ ID NO: 1671962 - RNA, 13 nt, Human
accuagccuuaga

SEQ ID NO: 1671963 - RNA, 20 nt, Human
accuccgccucuuggguuca

SEQ ID NO: 1671964 - RNA, 17 nt, Human
accgccaaggcuggggg

SEQ ID NO: 1671965 - RNA, 20 nt, Human
accgagucucuucuccacug

SEQ ID NO: 1671966 - RNA, 21 nt, Human
accgagucucuucuccacugg

SEQ ID NO: 1671967 - RNA, 24 nt, Human
accgagucucuucuccacuggaug

SEQ ID NO: 1671968 - RNA, 20 nt, Human
accgcagacaggaccaggga

SEQ ID NO: 1671969 - RNA, 20 nt, Human
ucauauuuacuucuuauaca

SEQ ID NO: 1671970 - RNA, 21 nt, Human
ucauauuuacuucuuauacau

SEQ ID NO: 1671971 - RNA, 22 nt, Human
ucauauuuacuucuuauacauu

SEQ ID NO: 1671972 - RNA, 18 nt, Human
accgagucucuucuccac

SEQ ID NO: 1671973 - RNA, 10 nt, Human
acccuuuucu

SEQ ID NO: 1671974 - RNA, 19 nt, Human
uccuguucccaugagauga

SEQ ID NO: 1671975 - RNA, 18 nt, Human
uccugugugugcgccuac

SEQ ID NO: 1671976 - RNA, 13 nt, Human
uccugugugugcg

SEQ ID NO: 1671977 - RNA, 14 nt, Human
uccugugugugcgc

SEQ ID NO: 1671978 - RNA, 23 nt, Human
uccugugucuugcaauggcagcc

SEQ ID NO: 1671979 - RNA, 24 nt, Human
uccugugucuugcaauggcagccu

SEQ ID NO: 1671980 - RNA, 17 nt, Human
acugcagggacugccag

SEQ ID NO: 1671981 - RNA, 18 nt, Human
acugcagggacugccagu

SEQ ID NO: 1671982 - RNA, 16 nt, Human
acugcagggacugcca

SEQ ID NO: 1671983 - RNA, 23 nt, Human
acugcagccucaaccuccugggc

SEQ ID NO: 1671984 - RNA, 23 nt, Human
uccuuaaagaguguggcaaaaua

SEQ ID NO: 1671985 - RNA, 18 nt, Human
uccuuaaagaguguggca

SEQ ID NO: 1671986 - RNA, 17 nt, Human
uccuuaaagaguguggc

SEQ ID NO: 1671987 - RNA, 19 nt, Human
acugcagccucaaccuccu

SEQ ID NO: 1671988 - RNA, 21 nt, Human
acugcagccucaaccuccugg

SEQ ID NO: 1671989 - RNA, 22 nt, Human
acugcagccucaaccuccuggg

SEQ ID NO: 1671990 - RNA, 18 nt, Human
uccugugacuucagcucu

SEQ ID NO: 1671991 - RNA, 21 nt, Human
uccuggggguucuuucuuccu

SEQ ID NO: 1671992 - RNA, 22 nt, Human
uccuggggguucuuucuuccuc

SEQ ID NO: 1671993 - RNA, 23 nt, Human
uccuggggguucuuucuuccucu

SEQ ID NO: 1671994 - RNA, 18 nt, Human
uccuggggaaccugaccc

SEQ ID NO: 1671995 - RNA, 19 nt, Human
uccuggggaaccugacccc

SEQ ID NO: 1671996 - RNA, 23 nt, Human
uccugggcagcugccuccccucc

SEQ ID NO: 1671997 - RNA, 22 nt, Human
uccugggcagcugccuccccuc

SEQ ID NO: 1671998 - RNA, 19 nt, Human
uccugggcagcugccuccc

SEQ ID NO: 1671999 - RNA, 18 nt, Human
uccugggcagcugccucc

SEQ ID NO: 1672000 - RNA, 13 nt, Human
uccugcugcaguu

SEQ ID NO: 1672001 - RNA, 17 nt, Human
uccugggcagcugccuc

SEQ ID NO: 1672002 - RNA, 16 nt, Human
uccugggcagcugccu

SEQ ID NO: 1672003 - RNA, 21 nt, Human
uccugcugcaguugccaguca

SEQ ID NO: 1672004 - RNA, 15 nt, Human
uccugggcagcugcc

SEQ ID NO: 1672005 - RNA, 22 nt, Human
uccugcaggcagccaggccaca

SEQ ID NO: 1672006 - RNA, 19 nt, Human
uccugccucagccucccaa

SEQ ID NO: 1672007 - RNA, 16 nt, Human
uccugcaggcagccag

SEQ ID NO: 1672008 - RNA, 17 nt, Human
uccugcaggcagccagg

SEQ ID NO: 1672009 - RNA, 19 nt, Human
uccugcaggcagccaggcc

SEQ ID NO: 1672010 - RNA, 20 nt, Human
uccugcaggcagccaggcca

SEQ ID NO: 1672011 - RNA, 21 nt, Human
uccugccucgaacuggcugca

SEQ ID NO: 1672012 - RNA, 20 nt, Human
uccugccucgaacuggcugc

SEQ ID NO: 1672013 - RNA, 20 nt, Human
uccugaguagcugggauuac

SEQ ID NO: 1672014 - RNA, 16 nt, Human
acugcacagugcaucu

SEQ ID NO: 1672015 - RNA, 18 nt, Human
acugcacagugcaucuca

SEQ ID NO: 1672016 - RNA, 22 nt, Human
acugcacagugcaucucagccc

SEQ ID NO: 1672017 - RNA, 21 nt, Human
uccugcaaugaagucucugaa

SEQ ID NO: 1672018 - RNA, 15 nt, Human
uccugcaaugaaguc

SEQ ID NO: 1672019 - RNA, 18 nt, Human
uccugcaaugaagucucu

SEQ ID NO: 1672020 - RNA, 20 nt, Human
uccugcaaugaagucucuga

SEQ ID NO: 1672021 - RNA, 20 nt, Human
acugcaaccuucgccaccug

SEQ ID NO: 1672022 - RNA, 23 nt, Human
acugcaaccuucgccaccugggu

SEQ ID NO: 1672023 - RNA, 16 nt, Human
acugcaaccuccgccu

SEQ ID NO: 1672024 - RNA, 22 nt, Human
acugcaaccuccgccucuuggg

SEQ ID NO: 1672025 - RNA, 13 nt, Human
acugcaaccuccg

SEQ ID NO: 1672026 - RNA, 14 nt, Human
acugcaaccuccgc

SEQ ID NO: 1672027 - RNA, 16 nt, Human
acugagugccuuuugg

SEQ ID NO: 1672028 - RNA, 23 nt, Human
acugaguacguugugcauuuggu

SEQ ID NO: 1672029 - RNA, 22 nt, Human
acugaguacguugugcauuugg

SEQ ID NO: 1672030 - RNA, 21 nt, Human
acugaguacguugugcauuug

SEQ ID NO: 1672031 - RNA, 19 nt, Human
acugaguacguugugcauu

SEQ ID NO: 1672032 - RNA, 18 nt, Human
acugaguacguugugcau

SEQ ID NO: 1672033 - RNA, 15 nt, Human
uccucuccccagcaa

SEQ ID NO: 1672034 - RNA, 15 nt, Human
acugaggaccagcca

SEQ ID NO: 1672035 - RNA, 14 nt, Human
acugaggaucagag

SEQ ID NO: 1672036 - RNA, 17 nt, Human
acugaggggaggggagc

SEQ ID NO: 1672037 - RNA, 22 nt, Human
acugaggggaggggagcauggg

SEQ ID NO: 1672038 - RNA, 16 nt, Human
uccuuccucugagccu

SEQ ID NO: 1672039 - RNA, 17 nt, Human
uccuuccucugagccuu

SEQ ID NO: 1672040 - RNA, 16 nt, Human
uccuuccucugaggcu

SEQ ID NO: 1672041 - RNA, 14 nt, Human
uccuucagugccuu

SEQ ID NO: 1672042 - RNA, 22 nt, Human
uccuucagugccuuauggaaca

SEQ ID NO: 1672043 - RNA, 13 nt, Human
uccuucagugccu

SEQ ID NO: 1672044 - RNA, 20 nt, Human
uccuucagugccuuauggaa

SEQ ID NO: 1672045 - RNA, 12 nt, Human
uccuucagugcc

SEQ ID NO: 1672046 - RNA, 11 nt, Human
uccuucagugc

SEQ ID NO: 1672047 - RNA, 13 nt, Human
uccuucagccuga

SEQ ID NO: 1672048 - RNA, 22 nt, Human
acuggcugcaaaggguaucagg

SEQ ID NO: 1672049 - RNA, 23 nt, Human
acuggccucugcugauccuccca

SEQ ID NO: 1672050 - RNA, 22 nt, Human
acuggcacaguuuucugagaaa

SEQ ID NO: 1672051 - RNA, 13 nt, Human
acugcuggcugcc

SEQ ID NO: 1672052 - RNA, 16 nt, Human
acuggauuguacuuug

SEQ ID NO: 1672053 - RNA, 13 nt, Human
acuggauuguacu

SEQ ID NO: 1672054 - RNA, 21 nt, Human
acugcuugugaaaggaaagag

SEQ ID NO: 1672055 - RNA, 22 nt, Human
acuggauuaaacuuaaucuaaa

SEQ ID NO: 1672056 - RNA, 12 nt, Human
acugcuggcugc

SEQ ID NO: 1672057 - RNA, 16 nt, Human
acugcugcccagccuc

SEQ ID NO: 1672058 - RNA, 18 nt, Human
acugcugcccagccucca

SEQ ID NO: 1672059 - RNA, 21 nt, Human
acugcugcccagccuccaagc

SEQ ID NO: 1672060 - RNA, 18 nt, Human
acugcuuccagugaggcu

SEQ ID NO: 1672061 - RNA, 21 nt, Human
acugcuuccagugaggcucug

SEQ ID NO: 1672062 - RNA, 22 nt, Human
acugcuuccagugaggcucugc

SEQ ID NO: 1672063 - RNA, 23 nt, Human
acugcuuccagugaggcucugcc

SEQ ID NO: 1672064 - RNA, 12 nt, Human
acugcucugaug

SEQ ID NO: 1672065 - RNA, 22 nt, Human
acugccuucucaacuccaaacu

SEQ ID NO: 1672066 - RNA, 16 nt, Human
acuguaaggcaaucau

SEQ ID NO: 1672067 - RNA, 20 nt, Human
acuggguacuuguggacaca

SEQ ID NO: 1672068 - RNA, 23 nt, Human
acuggguacuuguggacacagcu

SEQ ID NO: 1672069 - RNA, 19 nt, Human
acuggguacuuguggacac

SEQ ID NO: 1672070 - RNA, 12 nt, Human
ucgcuccugugu

SEQ ID NO: 1672071 - RNA, 13 nt, Human
ucgcuccuguguc

SEQ ID NO: 1672072 - RNA, 14 nt, Human
ucgcuccugugucu

SEQ ID NO: 1672073 - RNA, 19 nt, Human
acuguaauuugugauacaa

SEQ ID NO: 1672074 - RNA, 13 nt, Human
acuguacaaagua

SEQ ID NO: 1672075 - RNA, 20 nt, Human
acuguacagacagaaaaaac

SEQ ID NO: 1672076 - RNA, 14 nt, Human
acuguacaaaguag

SEQ ID NO: 1672077 - RNA, 15 nt, Human
acuguacaaaguaga

SEQ ID NO: 1672078 - RNA, 13 nt, Human
acuguacuccucc

SEQ ID NO: 1672079 - RNA, 14 nt, Human
acuguacuccuccc

SEQ ID NO: 1672080 - RNA, 15 nt, Human
acuguacuccuccca

SEQ ID NO: 1672081 - RNA, 14 nt, Human
acuguacaugaaaa

SEQ ID NO: 1672082 - RNA, 13 nt, Human
acuguacaugaaa

SEQ ID NO: 1672083 - RNA, 23 nt, Human
acuguacaugaaaacacauuuuu

SEQ ID NO: 1672084 - RNA, 13 nt, Human
ucgaccugccucg

SEQ ID NO: 1672085 - RNA, 14 nt, Human
ucgagcaugccugg

SEQ ID NO: 1672086 - RNA, 15 nt, Human
ucgagcaugccugga

SEQ ID NO: 1672087 - RNA, 14 nt, Human
ucgaggacagggag

SEQ ID NO: 1672088 - RNA, 17 nt, Human
ucgaggacagggaggug

SEQ ID NO: 1672089 - RNA, 14 nt, Human
ucgcgacaaugcaa

SEQ ID NO: 1672090 - RNA, 13 nt, Human
ucgcgacaaugca

SEQ ID NO: 1672091 - RNA, 16 nt, Human
uccuuucacaaccuuc

SEQ ID NO: 1672092 - RNA, 18 nt, Human
uccuuucacaaccuucug

SEQ ID NO: 1672093 - RNA, 19 nt, Human
uccuuucacaaccuucugu

SEQ ID NO: 1672094 - RNA, 20 nt, Human
uccuuucacaaccuucugug

SEQ ID NO: 1672095 - RNA, 15 nt, Human
uccuuucaccacaug

SEQ ID NO: 1672096 - RNA, 14 nt, Human
ucgaacuggcugca

SEQ ID NO: 1672097 - RNA, 15 nt, Human
ucgaacuggcugcaa

SEQ ID NO: 1672098 - RNA, 23 nt, Human
acucuuauaucuauauuuuacau

SEQ ID NO: 1672099 - RNA, 13 nt, Human
acucugacaacag

SEQ ID NO: 1672100 - RNA, 21 nt, Human
acucuccucugcugcuggcug

SEQ ID NO: 1672101 - RNA, 18 nt, Human
acucuccucugcugcugg

SEQ ID NO: 1672102 - RNA, 19 nt, Human
acucuccucugcugcuggc

SEQ ID NO: 1672103 - RNA, 18 nt, Human
acucgcgacaaugcaaac

SEQ ID NO: 1672104 - RNA, 19 nt, Human
uccuaggcauuugcugaau

SEQ ID NO: 1672105 - RNA, 20 nt, Human
acucgcgacaaugcaaacca

SEQ ID NO: 1672106 - RNA, 23 nt, Human
acucgcgacaaugcaaaccauca

SEQ ID NO: 1672107 - RNA, 22 nt, Human
acucuccauuuaauaauuauau

SEQ ID NO: 1672108 - RNA, 17 nt, Human
acucuccucugcugcug

SEQ ID NO: 1672109 - RNA, 20 nt, Human
uccucagaucuucugugggu

SEQ ID NO: 1672110 - RNA, 16 nt, Human
acucuuauugcccacg

SEQ ID NO: 1672111 - RNA, 19 nt, Human
acucuuauugcccacgcug

SEQ ID NO: 1672112 - RNA, 22 nt, Human
uccuccccuccuccuggacucc

SEQ ID NO: 1672113 - RNA, 18 nt, Human
uccuccccuccuccugga

SEQ ID NO: 1672114 - RNA, 20 nt, Human
uccuccccuccuccuggacu

SEQ ID NO: 1672115 - RNA, 16 nt, Human
uccuccccuccuccug

SEQ ID NO: 1672116 - RNA, 22 nt, Human
uccucauacccacccccaccca

SEQ ID NO: 1672117 - RNA, 14 nt, Human
uccucauacccacc

SEQ ID NO: 1672118 - RNA, 18 nt, Human
uccucauacccaccccca

SEQ ID NO: 1672119 - RNA, 12 nt, Human
uccucuccacug

SEQ ID NO: 1672120 - RNA, 13 nt, Human
uccucuccacugc

SEQ ID NO: 1672121 - RNA, 14 nt, Human
uccucuccacugcc

SEQ ID NO: 1672122 - RNA, 15 nt, Human
uccucuccacugccu

SEQ ID NO: 1672123 - RNA, 16 nt, Human
uccucuccacugccuu

SEQ ID NO: 1672124 - RNA, 12 nt, Human
uccucuccccag

SEQ ID NO: 1672125 - RNA, 17 nt, Human
uccucccucccucuuuc

SEQ ID NO: 1672126 - RNA, 15 nt, Human
uccucccucccucuu

SEQ ID NO: 1672127 - RNA, 19 nt, Human
uccucccucccucuuuccc

SEQ ID NO: 1672128 - RNA, 23 nt, Human
acuccugcacacgcuccuuccuc

SEQ ID NO: 1672129 - RNA, 12 nt, Human
acuccugcaggc

SEQ ID NO: 1672130 - RNA, 22 nt, Human
ucccuuuccaaaugcccagcuu

SEQ ID NO: 1672131 - RNA, 11 nt, Human
ucccuucaacc

SEQ ID NO: 1672132 - RNA, 21 nt, Human
ucccuucaaccauuccccaug

SEQ ID NO: 1672133 - RNA, 22 nt, Human
ucccuucaaccauuccccaugg

SEQ ID NO: 1672134 - RNA, 18 nt, Human
ucccuuacgugaguccug

SEQ ID NO: 1672135 - RNA, 22 nt, Human
ucccuuacgugaguccuggcau

SEQ ID NO: 1672136 - RNA, 20 nt, Human
uccuagcacuuugggaggcc

SEQ ID NO: 1672137 - RNA, 14 nt, Human
uccuaggcauuugc

SEQ ID NO: 1672138 - RNA, 17 nt, Human
uccuagcacacacuuuu

SEQ ID NO: 1672139 - RNA, 18 nt, Human
uccuagcacacacuuuug

SEQ ID NO: 1672140 - RNA, 19 nt, Human
uccuagcacacacuuuugg

SEQ ID NO: 1672141 - RNA, 14 nt, Human
uccgugcuaaggac

SEQ ID NO: 1672142 - RNA, 15 nt, Human
uccgugcuaaggacu

SEQ ID NO: 1672143 - RNA, 16 nt, Human
uccgugcuaaggacuu

SEQ ID NO: 1672144 - RNA, 19 nt, Human
ucccuuuuaauccuggcug

SEQ ID NO: 1672145 - RNA, 18 nt, Human
ucccuuuuaauccuggcu

SEQ ID NO: 1672146 - RNA, 22 nt, Human
ucccuuugacgccaucccagcc

SEQ ID NO: 1672147 - RNA, 23 nt, Human
ucccuuugacgccaucccagccc

SEQ ID NO: 1672148 - RNA, 21 nt, Human
acucaucuagguaaauuacag

SEQ ID NO: 1672149 - RNA, 23 nt, Human
ucccucauuccaccuucccaugc

SEQ ID NO: 1672150 - RNA, 16 nt, Human
acucaucuagguaaau

SEQ ID NO: 1672151 - RNA, 18 nt, Human
acucaucuagguaaauua

SEQ ID NO: 1672152 - RNA, 22 nt, Human
ucccucauccucauacccaccc

SEQ ID NO: 1672153 - RNA, 21 nt, Human
ucccucagucuggcccuuccu

SEQ ID NO: 1672154 - RNA, 14 nt, Human
acuccuaccuggua

SEQ ID NO: 1672155 - RNA, 20 nt, Human
acuccagcuggguuggaaaa

SEQ ID NO: 1672156 - RNA, 20 nt, Human
acucauuuuaaaaaauggaa

SEQ ID NO: 1672157 - RNA, 17 nt, Human
acuccaauuaaggauuu

SEQ ID NO: 1672158 - RNA, 21 nt, Human
acuccaauuaaggauuuuaug

SEQ ID NO: 1672159 - RNA, 16 nt, Human
acuaaccagcagaaau

SEQ ID NO: 1672160 - RNA, 13 nt, Human
acuaaccacgcug

SEQ ID NO: 1672161 - RNA, 23 nt, Human
acuacaggugugagucaccaagc

SEQ ID NO: 1672162 - RNA, 17 nt, Human
acuaaccagcagaaaug

SEQ ID NO: 1672163 - RNA, 15 nt, Human
acuacaguccuccca

SEQ ID NO: 1672164 - RNA, 13 nt, Human
uccagccugggug

SEQ ID NO: 1672165 - RNA, 24 nt, Human
uccagccugggugacagagcaagu

SEQ ID NO: 1672166 - RNA, 15 nt, Human
uccagcucaccagcc

SEQ ID NO: 1672167 - RNA, 14 nt, Human
uccagcucaccagc

SEQ ID NO: 1672168 - RNA, 12 nt, Human
acguuucuaaag

SEQ ID NO: 1672169 - RNA, 14 nt, Human
acguuucuaaaggc

SEQ ID NO: 1672170 - RNA, 15 nt, Human
acguuucuaaaggcu

SEQ ID NO: 1672171 - RNA, 13 nt, Human
acuaaaaauacaa

SEQ ID NO: 1672172 - RNA, 15 nt, Human
uccccaagccuggca

SEQ ID NO: 1672173 - RNA, 15 nt, Human
ucccauaugccuggg

SEQ ID NO: 1672174 - RNA, 16 nt, Human
ucccauaugccugggc

SEQ ID NO: 1672175 - RNA, 13 nt, Human
ucccaucucacac

SEQ ID NO: 1672176 - RNA, 14 nt, Human
ucccaucucacaca

SEQ ID NO: 1672177 - RNA, 19 nt, Human
ucccaucucacacaugagc

SEQ ID NO: 1672178 - RNA, 17 nt, Human
acuacaguccucccauc

SEQ ID NO: 1672179 - RNA, 16 nt, Human
acuacaguccucccau

SEQ ID NO: 1672180 - RNA, 19 nt, Human
ucccagugccgagaaggaa

SEQ ID NO: 1672181 - RNA, 22 nt, Human
ucccagugccgagaaggaagcc

SEQ ID NO: 1672182 - RNA, 24 nt, Human
uccccaccgcagacaggaccaggg

SEQ ID NO: 1672183 - RNA, 23 nt, Human
acuauaauuuaccugaagucuuu

SEQ ID NO: 1672184 - RNA, 17 nt, Human
acuauagccuaggugac

SEQ ID NO: 1672185 - RNA, 18 nt, Human
acuauagccuaggugaca

SEQ ID NO: 1672186 - RNA, 13 nt, Human
acuauauauguga

SEQ ID NO: 1672187 - RNA, 19 nt, Human
acuauguugcccaggcagg

SEQ ID NO: 1672188 - RNA, 20 nt, Human
acuauguugcccaggcaggu

SEQ ID NO: 1672189 - RNA, 23 nt, Human
acuauguugcccaggcaggucuu

SEQ ID NO: 1672190 - RNA, 22 nt, Human
acuaucaugucaaacgugaaaa

SEQ ID NO: 1672191 - RNA, 16 nt, Human
acuaucccggcugccc

SEQ ID NO: 1672192 - RNA, 17 nt, Human
acuaucccggcugcccu

SEQ ID NO: 1672193 - RNA, 18 nt, Human
acuaucccggcugcccuu

SEQ ID NO: 1672194 - RNA, 22 nt, Human
acuaugaaguuuuuuuuauaca

SEQ ID NO: 1672195 - RNA, 18 nt, Human
acuauguugcccaggcag

SEQ ID NO: 1672196 - RNA, 18 nt, Human
ucccuauuagagaagaga

SEQ ID NO: 1672197 - RNA, 21 nt, Human
ucccuauuuuuuuucuguuau

SEQ ID NO: 1672198 - RNA, 22 nt, Human
ucccuauuuuuuuucuguuaua

SEQ ID NO: 1672199 - RNA, 13 nt, Human
ucccgcucagccc

SEQ ID NO: 1672200 - RNA, 14 nt, Human
ucccgcucagcccu

SEQ ID NO: 1672201 - RNA, 15 nt, Human
ucccgcucagcccuc

SEQ ID NO: 1672202 - RNA, 16 nt, Human
ucccgcucagcccucc

SEQ ID NO: 1672203 - RNA, 20 nt, Human
ucccgcucagcccucccugc

SEQ ID NO: 1672204 - RNA, 18 nt, Human
ucccgaauagcugggacu

SEQ ID NO: 1672205 - RNA, 15 nt, Human
ucccgaauagcuggg

SEQ ID NO: 1672206 - RNA, 16 nt, Human
ucccgaauagcuggga

SEQ ID NO: 1672207 - RNA, 12 nt, Human
uccccuccucug

SEQ ID NO: 1672208 - RNA, 15 nt, Human
acagcuccaagaauu

SEQ ID NO: 1672209 - RNA, 20 nt, Human
acagcuaaucagcauucuca

SEQ ID NO: 1672210 - RNA, 22 nt, Human
acagcuaaucagcauucucacu

SEQ ID NO: 1672211 - RNA, 17 nt, Human
acagcuaacauggaagu

SEQ ID NO: 1672212 - RNA, 14 nt, Human
acagccugugucuu

SEQ ID NO: 1672213 - RNA, 18 nt, Human
acagccugugucuuuaaa

SEQ ID NO: 1672214 - RNA, 23 nt, Human
acagccugugucuuuaaaugcug

SEQ ID NO: 1672215 - RNA, 14 nt, Human
acagcuaacaugga

SEQ ID NO: 1672216 - RNA, 15 nt, Human
acagcuaacauggaa

SEQ ID NO: 1672217 - RNA, 14 nt, Human
acagccuggcacag

SEQ ID NO: 1672218 - RNA, 15 nt, Human
acagccuggcacagg

SEQ ID NO: 1672219 - RNA, 16 nt, Human
uauggcuuuugugcau

SEQ ID NO: 1672220 - RNA, 17 nt, Human
uauggcuauaggugcua

SEQ ID NO: 1672221 - RNA, 20 nt, Human
uaugauccagcagauuauuc

SEQ ID NO: 1672222 - RNA, 21 nt, Human
uaugauccagcagauuauuca

SEQ ID NO: 1672223 - RNA, 22 nt, Human
uaugauccagcagauuauucac

SEQ ID NO: 1672224 - RNA, 18 nt, Human
uaugcucugcauguuaca

SEQ ID NO: 1672225 - RNA, 19 nt, Human
uaugcucugcauguuacau

SEQ ID NO: 1672226 - RNA, 15 nt, Human
uaugcugaguuugug

SEQ ID NO: 1672227 - RNA, 22 nt, Human
uauggccugugagcuaggaauu

SEQ ID NO: 1672228 - RNA, 14 nt, Human
uauggccuguggau

SEQ ID NO: 1672229 - RNA, 16 nt, Human
uauggcuauaggugcu

SEQ ID NO: 1672230 - RNA, 18 nt, Human
acagcagccccugcacaa

SEQ ID NO: 1672231 - RNA, 20 nt, Human
acagaguuuucacucuuauu

SEQ ID NO: 1672232 - RNA, 15 nt, Human
acagaguuguuacau

SEQ ID NO: 1672233 - RNA, 18 nt, Human
acagaguuuucacucuua

SEQ ID NO: 1672234 - RNA, 11 nt, Human
uaugauccagc

SEQ ID NO: 1672235 - RNA, 19 nt, Human
uaugauccagcagauuauu

SEQ ID NO: 1672236 - RNA, 10 nt, Human
uaugauccag

SEQ ID NO: 1672237 - RNA, 21 nt, Human
uaugaucacggcucacugcag

SEQ ID NO: 1672238 - RNA, 23 nt, Human
uaugaucacggcucacugcagcc

SEQ ID NO: 1672239 - RNA, 13 nt, Human
uaugaggcauuug

SEQ ID NO: 1672240 - RNA, 15 nt, Human
uaucuugaauaaugu

SEQ ID NO: 1672241 - RNA, 15 nt, Human
uaucuugaagacuuu

SEQ ID NO: 1672242 - RNA, 16 nt, Human
uauauugauccagaaa

SEQ ID NO: 1672243 - RNA, 17 nt, Human
acagacuggaagcacag

SEQ ID NO: 1672244 - RNA, 14 nt, Human
acagacuggaagca

SEQ ID NO: 1672245 - RNA, 18 nt, Human
acagacccugcccugugg

SEQ ID NO: 1672246 - RNA, 20 nt, Human
acagacccugcccugugggc

SEQ ID NO: 1672247 - RNA, 13 nt, Human
acagacagcccuc

SEQ ID NO: 1672248 - RNA, 15 nt, Human
acagacagcccucca

SEQ ID NO: 1672249 - RNA, 17 nt, Human
acagacccugcccugug

SEQ ID NO: 1672250 - RNA, 16 nt, Human
acagacccugcccugu

SEQ ID NO: 1672251 - RNA, 11 nt, Human
acacuccuuca

SEQ ID NO: 1672252 - RNA, 13 nt, Human
acacuccuucaca

SEQ ID NO: 1672253 - RNA, 23 nt, Human
acagacacaggcccggcuccagg

SEQ ID NO: 1672254 - RNA, 20 nt, Human
uaucaccugucuugccuuuu

SEQ ID NO: 1672255 - RNA, 18 nt, Human
uaucacccagaagaaaau

SEQ ID NO: 1672256 - RNA, 14 nt, Human
uauauuuacaaaug

SEQ ID NO: 1672257 - RNA, 19 nt, Human
uauauuuacuaaaauggac

SEQ ID NO: 1672258 - RNA, 21 nt, Human
uaucaaguauuauaccuuuuu

SEQ ID NO: 1672259 - RNA, 15 nt, Human
uauauuuacaaaugg

SEQ ID NO: 1672260 - RNA, 13 nt, Human
acagacuucugaa

SEQ ID NO: 1672261 - RNA, 14 nt, Human
acagacuucugaaa

SEQ ID NO: 1672262 - RNA, 21 nt, Human
acagagugagacucugucuca

SEQ ID NO: 1672263 - RNA, 18 nt, Human
acagagcuacacagggga

SEQ ID NO: 1672264 - RNA, 16 nt, Human
acagagcuacacaggg

SEQ ID NO: 1672265 - RNA, 20 nt, Human
acagagcccacgcccccacu

SEQ ID NO: 1672266 - RNA, 16 nt, Human
uaucuagauacuguau

SEQ ID NO: 1672267 - RNA, 15 nt, Human
uaucuagauacugua

SEQ ID NO: 1672268 - RNA, 10 nt, Human
uaucagaauu

SEQ ID NO: 1672269 - RNA, 18 nt, Human
uaucucccccagccccau

SEQ ID NO: 1672270 - RNA, 17 nt, Human
uaucucccccagcccca

SEQ ID NO: 1672271 - RNA, 19 nt, Human
uaucuagauacuguaucau

SEQ ID NO: 1672272 - RNA, 13 nt, Human
uagugaugguucc

SEQ ID NO: 1672273 - RNA, 20 nt, Human
uaguuccucauuagcauuuu

SEQ ID NO: 1672274 - RNA, 16 nt, Human
uaguuuuauaugcuuc

SEQ ID NO: 1672275 - RNA, 21 nt, Human
uagucaggugccucaagagaa

SEQ ID NO: 1672276 - RNA, 19 nt, Human
acaagcugcacccucaggc

SEQ ID NO: 1672277 - RNA, 21 nt, Human
acaagcugcacccucaggcag

SEQ ID NO: 1672278 - RNA, 22 nt, Human
acaagcugcacccucaggcagg

SEQ ID NO: 1672279 - RNA, 23 nt, Human
acaagcugcacccucaggcaggu

SEQ ID NO: 1672280 - RNA, 22 nt, Human
uagugagcagucaggaaagaga

SEQ ID NO: 1672281 - RNA, 19 nt, Human
acacccugugauggggccc

SEQ ID NO: 1672282 - RNA, 11 nt, Human
acacccuguga

SEQ ID NO: 1672283 - RNA, 12 nt, Human
acacccugugau

SEQ ID NO: 1672284 - RNA, 18 nt, Human
acacccugugauggggcc

SEQ ID NO: 1672285 - RNA, 19 nt, Human
acacccagcccacuucugc

SEQ ID NO: 1672286 - RNA, 20 nt, Human
acacccagcccacuucugcc

SEQ ID NO: 1672287 - RNA, 21 nt, Human
acacccagcccacuucugcca

SEQ ID NO: 1672288 - RNA, 21 nt, Human
acacaugcaaggucauuuuuu

SEQ ID NO: 1672289 - RNA, 12 nt, Human
uauaaaagccug

SEQ ID NO: 1672290 - RNA, 14 nt, Human
uauaaaagccuguu

SEQ ID NO: 1672291 - RNA, 17 nt, Human
uauaaaagccuguuuaa

SEQ ID NO: 1672292 - RNA, 21 nt, Human
uauaaaauaauuuuuauauuu

SEQ ID NO: 1672293 - RNA, 22 nt, Human
uauaaaauaauuuuuauauuug

SEQ ID NO: 1672294 - RNA, 20 nt, Human
acacaugcaaggucauuuuu

SEQ ID NO: 1672295 - RNA, 19 nt, Human
acacaugcaaggucauuuu

SEQ ID NO: 1672296 - RNA, 18 nt, Human
uauaaaagacugucuuaa

SEQ ID NO: 1672297 - RNA, 22 nt, Human
acacaucagcuugcccuguuaa

SEQ ID NO: 1672298 - RNA, 23 nt, Human
uauaaaauaauuuuuauauuuga

SEQ ID NO: 1672299 - RNA, 20 nt, Human
uauaaccaguguuguggauu

SEQ ID NO: 1672300 - RNA, 14 nt, Human
uauaauuuugugaa

SEQ ID NO: 1672301 - RNA, 19 nt, Human
uauagauuagagaguguug

SEQ ID NO: 1672302 - RNA, 22 nt, Human
uauagauuagagaguguugaaa

SEQ ID NO: 1672303 - RNA, 20 nt, Human
uauagauuagaauucuguau

SEQ ID NO: 1672304 - RNA, 14 nt, Human
uauacauuugauaa

SEQ ID NO: 1672305 - RNA, 14 nt, Human
uauacauaaacaag

SEQ ID NO: 1672306 - RNA, 13 nt, Human
uauacauaaacaa

SEQ ID NO: 1672307 - RNA, 21 nt, Human
uauacacuuacacuuuaugca

SEQ ID NO: 1672308 - RNA, 19 nt, Human
uauaauuuugugaagcaaa

SEQ ID NO: 1672309 - RNA, 23 nt, Human
uauaggugcuacaaaaacacagc

SEQ ID NO: 1672310 - RNA, 21 nt, Human
uauaggugcuacaaaaacaca

SEQ ID NO: 1672311 - RNA, 20 nt, Human
uauaggugcuacaaaaacac

SEQ ID NO: 1672312 - RNA, 20 nt, Human
uauagccuaggugacagagu

SEQ ID NO: 1672313 - RNA, 13 nt, Human
uauaggaauugac

SEQ ID NO: 1672314 - RNA, 14 nt, Human
uauaggaauugacc

SEQ ID NO: 1672315 - RNA, 19 nt, Human
uauaggaauugacccacaa

SEQ ID NO: 1672316 - RNA, 13 nt, Human
uauauaucaaaua

SEQ ID NO: 1672317 - RNA, 21 nt, Human
uauauauuuuuuucugaaauu

SEQ ID NO: 1672318 - RNA, 22 nt, Human
uauauauuuuuuucugaaauuu

SEQ ID NO: 1672319 - RNA, 20 nt, Human
uauauauuuuuuucugaaau

SEQ ID NO: 1672320 - RNA, 23 nt, Human
uauauauuuuuuucugaaauuuc

SEQ ID NO: 1672321 - RNA, 21 nt, Human
acacucauugaccugaggccc

SEQ ID NO: 1672322 - RNA, 23 nt, Human
acacucauugaccugaggcccuu

SEQ ID NO: 1672323 - RNA, 15 nt, Human
acacuccaauuaagg

SEQ ID NO: 1672324 - RNA, 16 nt, Human
acacuccaauuaagga

SEQ ID NO: 1672325 - RNA, 17 nt, Human
acacuccaauuaaggau

SEQ ID NO: 1672326 - RNA, 15 nt, Human
uauuggcuuuucuga

SEQ ID NO: 1672327 - RNA, 16 nt, Human
uauuggcuuuucugau

SEQ ID NO: 1672328 - RNA, 17 nt, Human
uauuggcuuuucugauc

SEQ ID NO: 1672329 - RNA, 18 nt, Human
uauuggcuuuucugaucc

SEQ ID NO: 1672330 - RNA, 14 nt, Human
uauuggcuuuucug

SEQ ID NO: 1672331 - RNA, 21 nt, Human
uauuggcuuuucugauccagu

SEQ ID NO: 1672332 - RNA, 22 nt, Human
uauuggcuuuucugauccaguu

SEQ ID NO: 1672333 - RNA, 12 nt, Human
uauugaagcauu

SEQ ID NO: 1672334 - RNA, 13 nt, Human
uauugaagcauuu

SEQ ID NO: 1672335 - RNA, 15 nt, Human
uauugaagcauuuua

SEQ ID NO: 1672336 - RNA, 16 nt, Human
uauugaagcauuuuau

SEQ ID NO: 1672337 - RNA, 17 nt, Human
uauugaagcauuuuaua

SEQ ID NO: 1672338 - RNA, 19 nt, Human
uauugaagcauuuuauaaa

SEQ ID NO: 1672339 - RNA, 17 nt, Human
acaguucucuccuucuu

SEQ ID NO: 1672340 - RNA, 24 nt, Human
uauucucuccuguaccucuugagc

SEQ ID NO: 1672341 - RNA, 20 nt, Human
uauucucuccuguaccucuu

SEQ ID NO: 1672342 - RNA, 15 nt, Human
uauucuuauuuaaug

SEQ ID NO: 1672343 - RNA, 16 nt, Human
uauucuguuggccagu

SEQ ID NO: 1672344 - RNA, 20 nt, Human
acaguucaauucucauuugu

SEQ ID NO: 1672345 - RNA, 20 nt, Human
acaguuacucagaauucucu

SEQ ID NO: 1672346 - RNA, 13 nt, Human
acaguuacucaga

SEQ ID NO: 1672347 - RNA, 22 nt, Human
acaguucggugagcuacaaaug

SEQ ID NO: 1672348 - RNA, 19 nt, Human
acaguucggugagcuacaa

SEQ ID NO: 1672349 - RNA, 16 nt, Human
acaguucucuccuucu

SEQ ID NO: 1672350 - RNA, 23 nt, Human
acaguucggugagcuacaaaugc

SEQ ID NO: 1672351 - RNA, 15 nt, Human
uauuguacaaaguau

SEQ ID NO: 1672352 - RNA, 16 nt, Human
uauuguacaaaguauu

SEQ ID NO: 1672353 - RNA, 21 nt, Human
uauuguacaaaguauuaagca

SEQ ID NO: 1672354 - RNA, 22 nt, Human
uauuguacaaaguauuaagcau

SEQ ID NO: 1672355 - RNA, 23 nt, Human
uauuguacaaaguauuaagcaua

SEQ ID NO: 1672356 - RNA, 17 nt, Human
uauuguagcauccugga

SEQ ID NO: 1672357 - RNA, 18 nt, Human
uauuguagcauccuggaa

SEQ ID NO: 1672358 - RNA, 20 nt, Human
uauuguagcauccuggaaua

SEQ ID NO: 1672359 - RNA, 21 nt, Human
uauuguagcauccuggaauau

SEQ ID NO: 1672360 - RNA, 13 nt, Human
uauugucaaagug

SEQ ID NO: 1672361 - RNA, 17 nt, Human
uauugucaaagugguga

SEQ ID NO: 1672362 - RNA, 14 nt, Human
uauuuaauagguuu

SEQ ID NO: 1672363 - RNA, 15 nt, Human
uauuuaaugaaagac

SEQ ID NO: 1672364 - RNA, 21 nt, Human
uauuuaaugaaagacuguaca

SEQ ID NO: 1672365 - RNA, 17 nt, Human
uauuuaaccucuaaauu

SEQ ID NO: 1672366 - RNA, 18 nt, Human
uauuuaaccucuaaauuc

SEQ ID NO: 1672367 - RNA, 17 nt, Human
uauugucuagugaaacu

SEQ ID NO: 1672368 - RNA, 19 nt, Human
uauuuaguguucauaaaua

SEQ ID NO: 1672369 - RNA, 13 nt, Human
uauuuauuuaaau

SEQ ID NO: 1672370 - RNA, 14 nt, Human
uauuuauuuaguau

SEQ ID NO: 1672371 - RNA, 14 nt, Human
uauuuauuuaaauu

SEQ ID NO: 1672372 - RNA, 14 nt, Human
uauuuauuuuaaua

SEQ ID NO: 1672373 - RNA, 16 nt, Human
uauuuauuuuaauaau

SEQ ID NO: 1672374 - RNA, 18 nt, Human
uauuuauuuuaauaaugu

SEQ ID NO: 1672375 - RNA, 18 nt, Human
uauuuacuaaaauggacu

SEQ ID NO: 1672376 - RNA, 20 nt, Human
uauuuagcaccagggaaggg

SEQ ID NO: 1672377 - RNA, 18 nt, Human
uauuuacuucuuauacau

SEQ ID NO: 1672378 - RNA, 14 nt, Human
uauuuaauucaugu

SEQ ID NO: 1672379 - RNA, 23 nt, Human
uauuuaauuuuuuugagacagag

SEQ ID NO: 1672380 - RNA, 15 nt, Human
acaguuaagagaaau

SEQ ID NO: 1672381 - RNA, 21 nt, Human
acaguuaccucugccucagaa

SEQ ID NO: 1672382 - RNA, 14 nt, Human
acagugagacucug

SEQ ID NO: 1672383 - RNA, 18 nt, Human
acagugagacucugucuc

SEQ ID NO: 1672384 - RNA, 20 nt, Human
acagugaaagaaaauaacaa

SEQ ID NO: 1672385 - RNA, 17 nt, Human
acagucucaggaaauca

SEQ ID NO: 1672386 - RNA, 21 nt, Human
acaguccuuaccagcagagca

SEQ ID NO: 1672387 - RNA, 22 nt, Human
acaguccuuaccagcagagcac

SEQ ID NO: 1672388 - RNA, 13 nt, Human
acagucucaggaa

SEQ ID NO: 1672389 - RNA, 14 nt, Human
acagucucaggaaa

SEQ ID NO: 1672390 - RNA, 15 nt, Human
acagucucaggaaau

SEQ ID NO: 1672391 - RNA, 16 nt, Human
acagucucaggaaauc

SEQ ID NO: 1672392 - RNA, 17 nt, Human
acaguccucccaucuca

SEQ ID NO: 1672393 - RNA, 18 nt, Human
acaguccuuaccagcaga

SEQ ID NO: 1672394 - RNA, 20 nt, Human
acaguccuuaccagcagagc

SEQ ID NO: 1672395 - RNA, 15 nt, Human
acagucccugccaau

SEQ ID NO: 1672396 - RNA, 13 nt, Human
acaguccucccau

SEQ ID NO: 1672397 - RNA, 14 nt, Human
acaguccucccauc

SEQ ID NO: 1672398 - RNA, 15 nt, Human
acaguccucccaucu

SEQ ID NO: 1672399 - RNA, 13 nt, Human
acagucccugcca

SEQ ID NO: 1672400 - RNA, 15 nt, Human
acaguauuacuucug

SEQ ID NO: 1672401 - RNA, 16 nt, Human
acaguauuacuucugc

SEQ ID NO: 1672402 - RNA, 17 nt, Human
acaguauuacuucugcu

SEQ ID NO: 1672403 - RNA, 19 nt, Human
acaguauuacuucugcuac

SEQ ID NO: 1672404 - RNA, 21 nt, Human
acaggcugggcuucaguggca

SEQ ID NO: 1672405 - RNA, 14 nt, Human
acaggcugggcuuc

SEQ ID NO: 1672406 - RNA, 17 nt, Human
acaggcugggcuucagu

SEQ ID NO: 1672407 - RNA, 22 nt, Human
acagguuuuccugaagaauuga

SEQ ID NO: 1672408 - RNA, 22 nt, Human
acagggcacaccgggcacucag

SEQ ID NO: 1672409 - RNA, 21 nt, Human
acaguauaauuaacauguuaa

SEQ ID NO: 1672410 - RNA, 23 nt, Human
acaguauaauuaacauguuaaac

SEQ ID NO: 1672411 - RNA, 21 nt, Human
acaguauggcagcuuuccuca

SEQ ID NO: 1672412 - RNA, 17 nt, Human
acagcuggugcccugcu

SEQ ID NO: 1672413 - RNA, 20 nt, Human
acagcuggugcccugcuuuc

SEQ ID NO: 1672414 - RNA, 22 nt, Human
uauuaaaaaucucaaauuucua

SEQ ID NO: 1672415 - RNA, 20 nt, Human
uauuaaaaaucucaaauuuc

SEQ ID NO: 1672416 - RNA, 18 nt, Human
uauuaaaaaucucaaauu

SEQ ID NO: 1672417 - RNA, 16 nt, Human
uauuaaaaaucucaaa

SEQ ID NO: 1672418 - RNA, 17 nt, Human
uauguuuuaagaggcag

SEQ ID NO: 1672419 - RNA, 19 nt, Human
uauguuuuaagaggcaggg

SEQ ID NO: 1672420 - RNA, 21 nt, Human
uauguuuucaggcuagaugua

SEQ ID NO: 1672421 - RNA, 17 nt, Human
uauuaaagccauguuua

SEQ ID NO: 1672422 - RNA, 18 nt, Human
uauuaaagccauguuuau

SEQ ID NO: 1672423 - RNA, 20 nt, Human
uauuaaagccauguuuauua

SEQ ID NO: 1672424 - RNA, 16 nt, Human
uauuacaguauaauua

SEQ ID NO: 1672425 - RNA, 18 nt, Human
uauuacaguauaauuaac

SEQ ID NO: 1672426 - RNA, 20 nt, Human
uauuacaguauaauuaacau

SEQ ID NO: 1672427 - RNA, 21 nt, Human
uauuacaguauaauuaacaug

SEQ ID NO: 1672428 - RNA, 23 nt, Human
uauuacaguggggaaugaagaua

SEQ ID NO: 1672429 - RNA, 13 nt, Human
uauuaaagccaug

SEQ ID NO: 1672430 - RNA, 14 nt, Human
uauuaaagccaugu

SEQ ID NO: 1672431 - RNA, 12 nt, Human
uauuaaagccau

SEQ ID NO: 1672432 - RNA, 23 nt, Human
uauuaaaaaucucaaauuucuaa

SEQ ID NO: 1672433 - RNA, 12 nt, Human
uauuaaaacuca

SEQ ID NO: 1672434 - RNA, 16 nt, Human
uauuaccacagacaua

SEQ ID NO: 1672435 - RNA, 15 nt, Human
uauuagaauaccaca

SEQ ID NO: 1672436 - RNA, 12 nt, Human
uauuagagaaga

SEQ ID NO: 1672437 - RNA, 18 nt, Human
uauucaaaguugccuaaa

SEQ ID NO: 1672438 - RNA, 21 nt, Human
uauucaaaguugccuaaaucc

SEQ ID NO: 1672439 - RNA, 22 nt, Human
uauucaaaguugccuaaaucca

SEQ ID NO: 1672440 - RNA, 23 nt, Human
uauucaaaguugccuaaauccau

SEQ ID NO: 1672441 - RNA, 13 nt, Human
uauucacugauuu

SEQ ID NO: 1672442 - RNA, 19 nt, Human
uauucacugauuugacaua

SEQ ID NO: 1672443 - RNA, 22 nt, Human
uauucacugauuugacauaguc

SEQ ID NO: 1672444 - RNA, 15 nt, Human
uauucagcucaugga

SEQ ID NO: 1672445 - RNA, 23 nt, Human
uauucauagcagcuuauucacaa

SEQ ID NO: 1672446 - RNA, 18 nt, Human
uauucaggaagcucaggg

SEQ ID NO: 1672447 - RNA, 22 nt, Human
uauucaggaagcucagggccug

SEQ ID NO: 1672448 - RNA, 13 nt, Human
aauuuaaaagucu

SEQ ID NO: 1672449 - RNA, 15 nt, Human
aauuuaaauagcuuu

SEQ ID NO: 1672450 - RNA, 16 nt, Human
aauuuaaauagcuuuu

SEQ ID NO: 1672451 - RNA, 19 nt, Human
aauuuacauacucugcuua

SEQ ID NO: 1672452 - RNA, 20 nt, Human
aauuguguuuauaauuuuaa

SEQ ID NO: 1672453 - RNA, 22 nt, Human
aauuguuuggggaugagaaagg

SEQ ID NO: 1672454 - RNA, 23 nt, Human
aauugugugaaagguacuucaaa

SEQ ID NO: 1672455 - RNA, 12 nt, Human
aauugcuccuug

SEQ ID NO: 1672456 - RNA, 13 nt, Human
uacuguaagaaaa

SEQ ID NO: 1672457 - RNA, 20 nt, Human
aauuugaaacacuuugcaua

SEQ ID NO: 1672458 - RNA, 13 nt, Human
aauuugaauuuug

SEQ ID NO: 1672459 - RNA, 16 nt, Human
aauuugaauuuugugu

SEQ ID NO: 1672460 - RNA, 18 nt, Human
aauuugaauuuuguguua

SEQ ID NO: 1672461 - RNA, 15 nt, Human
aauuugauaugugaa

SEQ ID NO: 1672462 - RNA, 16 nt, Human
aauuugauaugugaac

SEQ ID NO: 1672463 - RNA, 18 nt, Human
aauuugauaugugaacag

SEQ ID NO: 1672464 - RNA, 19 nt, Human
aauuugauaugugaacagu

SEQ ID NO: 1672465 - RNA, 14 nt, Human
uacuucaaauccuu

SEQ ID NO: 1672466 - RNA, 19 nt, Human
uacuucaaauccuugaaga

SEQ ID NO: 1672467 - RNA, 17 nt, Human
aauuuagaaauauaauu

SEQ ID NO: 1672468 - RNA, 15 nt, Human
aauuuaccugaaguc

SEQ ID NO: 1672469 - RNA, 21 nt, Human
aauuucuaaaucuccaaaaua

SEQ ID NO: 1672470 - RNA, 13 nt, Human
aauuucuaaaucu

SEQ ID NO: 1672471 - RNA, 20 nt, Human
aauuucucccagucauuuaa

SEQ ID NO: 1672472 - RNA, 12 nt, Human
uacucaauuuua

SEQ ID NO: 1672473 - RNA, 13 nt, Human
uacucaauuuuaa

SEQ ID NO: 1672474 - RNA, 14 nt, Human
uacucaauuuuaac

SEQ ID NO: 1672475 - RNA, 18 nt, Human
uacucuuauagacaacau

SEQ ID NO: 1672476 - RNA, 20 nt, Human
uacucuuauaucuauauuuu

SEQ ID NO: 1672477 - RNA, 22 nt, Human
uacucuucaguuaagccuuugg

SEQ ID NO: 1672478 - RNA, 22 nt, Human
uacucuuauaucuauauuuuac

SEQ ID NO: 1672479 - RNA, 16 nt, Human
uacuauaauuuaccug

SEQ ID NO: 1672480 - RNA, 16 nt, Human
uacuauguaucaauga

SEQ ID NO: 1672481 - RNA, 14 nt, Human
uacguugugcauuu

SEQ ID NO: 1672482 - RNA, 13 nt, Human
uacguugugcauu

SEQ ID NO: 1672483 - RNA, 14 nt, Human
uacguuaccaggca

SEQ ID NO: 1672484 - RNA, 14 nt, Human
uacgucugacaggc

SEQ ID NO: 1672485 - RNA, 14 nt, Human
aauucuuucauuuu

SEQ ID NO: 1672486 - RNA, 15 nt, Human
uacguacacauuuua

SEQ ID NO: 1672487 - RNA, 16 nt, Human
aauugacccacaagaa

SEQ ID NO: 1672488 - RNA, 19 nt, Human
aauugacccacaagaaaug

SEQ ID NO: 1672489 - RNA, 20 nt, Human
aauucuugcaaaguaucccu

SEQ ID NO: 1672490 - RNA, 14 nt, Human
aauucuugcaaagu

SEQ ID NO: 1672491 - RNA, 21 nt, Human
aauucuugccaaauauaaaua

SEQ ID NO: 1672492 - RNA, 22 nt, Human
aauucuucuccacuuucuagcc

SEQ ID NO: 1672493 - RNA, 19 nt, Human
uagcauuuguguugaagag

SEQ ID NO: 1672494 - RNA, 15 nt, Human
acaacaaccugguca

SEQ ID NO: 1672495 - RNA, 18 nt, Human
acaaauucugucucugga

SEQ ID NO: 1672496 - RNA, 15 nt, Human
acaacaacaaaauga

SEQ ID NO: 1672497 - RNA, 12 nt, Human
acaacacucaca

SEQ ID NO: 1672498 - RNA, 12 nt, Human
acaagccacccc

SEQ ID NO: 1672499 - RNA, 13 nt, Human
acaagcugcaccc

SEQ ID NO: 1672500 - RNA, 20 nt, Human
acaagcgugagccacugcac

SEQ ID NO: 1672501 - RNA, 21 nt, Human
acaagcgugagccacugcacc

SEQ ID NO: 1672502 - RNA, 17 nt, Human
acaagagcccaggccuc

SEQ ID NO: 1672503 - RNA, 18 nt, Human
acaagagcccaggccucc

SEQ ID NO: 1672504 - RNA, 18 nt, Human
acaagcacuaaacaaaga

SEQ ID NO: 1672505 - RNA, 22 nt, Human
uagauuuuagacccuauugcug

SEQ ID NO: 1672506 - RNA, 16 nt, Human
uagcacagacccugcc

SEQ ID NO: 1672507 - RNA, 17 nt, Human
uagcacagacccugccc

SEQ ID NO: 1672508 - RNA, 18 nt, Human
uagcacagacccugcccu

SEQ ID NO: 1672509 - RNA, 19 nt, Human
uagcacagacccugcccug

SEQ ID NO: 1672510 - RNA, 13 nt, Human
uagcaccagggaa

SEQ ID NO: 1672511 - RNA, 14 nt, Human
uagcaccagggaag

SEQ ID NO: 1672512 - RNA, 16 nt, Human
uagcaccagggaaggg

SEQ ID NO: 1672513 - RNA, 21 nt, Human
uagcaugucgucaaagcugaa

SEQ ID NO: 1672514 - RNA, 15 nt, Human
uagagcuucuggcac

SEQ ID NO: 1672515 - RNA, 16 nt, Human
acaaaaagcauaaaaa

SEQ ID NO: 1672516 - RNA, 17 nt, Human
uagaugcaguucugaag

SEQ ID NO: 1672517 - RNA, 19 nt, Human
uagaugcaguucugaagaa

SEQ ID NO: 1672518 - RNA, 16 nt, Human
uagaugcaguucugaa

SEQ ID NO: 1672519 - RNA, 21 nt, Human
uagaggaagccugauuaaaga

SEQ ID NO: 1672520 - RNA, 19 nt, Human
uagaggagaaacuggaacu

SEQ ID NO: 1672521 - RNA, 23 nt, Human
uagaagucacauuccugaacagg

SEQ ID NO: 1672522 - RNA, 16 nt, Human
uagaagucacacagua

SEQ ID NO: 1672523 - RNA, 16 nt, Human
uagaagucuuagaugu

SEQ ID NO: 1672524 - RNA, 17 nt, Human
uagaagucuuagaugua

SEQ ID NO: 1672525 - RNA, 20 nt, Human
uagaagucuuagauguauau

SEQ ID NO: 1672526 - RNA, 18 nt, Human
uagaagucuuagauguau

SEQ ID NO: 1672527 - RNA, 19 nt, Human
uagaagucuuagauguaua

SEQ ID NO: 1672528 - RNA, 16 nt, Human
uagacaauuuauuaug

SEQ ID NO: 1672529 - RNA, 15 nt, Human
uagaagucacacagu

SEQ ID NO: 1672530 - RNA, 21 nt, Human
uacuucaaauccuugaagauu

SEQ ID NO: 1672531 - RNA, 16 nt, Human
uacuucaugcugucua

SEQ ID NO: 1672532 - RNA, 14 nt, Human
uagaaccucuuugu

SEQ ID NO: 1672533 - RNA, 15 nt, Human
uagaacucccuuuca

SEQ ID NO: 1672534 - RNA, 12 nt, Human
uagacagucccu

SEQ ID NO: 1672535 - RNA, 14 nt, Human
uagacagucccugc

SEQ ID NO: 1672536 - RNA, 17 nt, Human
aauuuuuauuaaauuau

SEQ ID NO: 1672537 - RNA, 18 nt, Human
aauuuuuauuaaauuaug

SEQ ID NO: 1672538 - RNA, 19 nt, Human
aauuuuuauauuugaaaua

SEQ ID NO: 1672539 - RNA, 14 nt, Human
aauuuuuguauuuu

SEQ ID NO: 1672540 - RNA, 19 nt, Human
aauuuuuucucuaggaaau

SEQ ID NO: 1672541 - RNA, 13 nt, Human
acaaaaacauggc

SEQ ID NO: 1672542 - RNA, 17 nt, Human
aauuuuuuugagacaga

SEQ ID NO: 1672543 - RNA, 21 nt, Human
uaauuauaugcuauuucuaua

SEQ ID NO: 1672544 - RNA, 13 nt, Human
uaauuauaucuga

SEQ ID NO: 1672545 - RNA, 17 nt, Human
uaauuauaucugaggaa

SEQ ID NO: 1672546 - RNA, 20 nt, Human
uaauuauacccccugcaaag

SEQ ID NO: 1672547 - RNA, 23 nt, Human
uaauuaguuccucauuagcauuu

SEQ ID NO: 1672548 - RNA, 19 nt, Human
aaugcacuuuguucuggcu

SEQ ID NO: 1672549 - RNA, 20 nt, Human
aaugcacuuuguucuggcuc

SEQ ID NO: 1672550 - RNA, 19 nt, Human
aaugcacaaacagaggccg

SEQ ID NO: 1672551 - RNA, 20 nt, Human
aaugcacaaacagaggccgc

SEQ ID NO: 1672552 - RNA, 13 nt, Human
aaugcacuuuguu

SEQ ID NO: 1672553 - RNA, 16 nt, Human
aaugcacuuuguucug

SEQ ID NO: 1672554 - RNA, 22 nt, Human
aaugcaaaccaucauugaaauc

SEQ ID NO: 1672555 - RNA, 23 nt, Human
aaugcaaaccaucauugaaaucu

SEQ ID NO: 1672556 - RNA, 18 nt, Human
aaugcacaaacagaggcc

SEQ ID NO: 1672557 - RNA, 20 nt, Human
aaugaaugucagugugacug

SEQ ID NO: 1672558 - RNA, 21 nt, Human
aaugaaugucagugugacuga

SEQ ID NO: 1672559 - RNA, 13 nt, Human
aaugaccuuucaa

SEQ ID NO: 1672560 - RNA, 14 nt, Human
aaugaccuuucaau

SEQ ID NO: 1672561 - RNA, 15 nt, Human
aaugaccuuucaaua

SEQ ID NO: 1672562 - RNA, 16 nt, Human
aaugcaaaccaucauu

SEQ ID NO: 1672563 - RNA, 13 nt, Human
uaauucauguugc

SEQ ID NO: 1672564 - RNA, 17 nt, Human
uaauuuaccugaagucu

SEQ ID NO: 1672565 - RNA, 18 nt, Human
uaauuuaccugaagucuu

SEQ ID NO: 1672566 - RNA, 21 nt, Human
uaauuuuuguauuuuuaguag

SEQ ID NO: 1672567 - RNA, 20 nt, Human
uacaauaaaaucuugaaaau

SEQ ID NO: 1672568 - RNA, 21 nt, Human
uacaagcgugagccacugcac

SEQ ID NO: 1672569 - RNA, 16 nt, Human
uacaagcgugagccac

SEQ ID NO: 1672570 - RNA, 18 nt, Human
uacaagcgugagccacug

SEQ ID NO: 1672571 - RNA, 19 nt, Human
uacaagcgugagccacugc

SEQ ID NO: 1672572 - RNA, 20 nt, Human
uacaagcgugagccacugca

SEQ ID NO: 1672573 - RNA, 15 nt, Human
uacaaaaagcauaaa

SEQ ID NO: 1672574 - RNA, 16 nt, Human
uacaaaaacauggccu

SEQ ID NO: 1672575 - RNA, 17 nt, Human
uacaaaaacacagcaag

SEQ ID NO: 1672576 - RNA, 18 nt, Human
uacaaaaacacagcaagg

SEQ ID NO: 1672577 - RNA, 13 nt, Human
uaauaccucccuu

SEQ ID NO: 1672578 - RNA, 18 nt, Human
uaauacuugcuuuggaaa

SEQ ID NO: 1672579 - RNA, 23 nt, Human
uaauacaccacuacauucuguua

SEQ ID NO: 1672580 - RNA, 22 nt, Human
uaauacaccacuacauucuguu

SEQ ID NO: 1672581 - RNA, 20 nt, Human
aauacaguaucucagggccu

SEQ ID NO: 1672582 - RNA, 19 nt, Human
uaacaaugcuguauuuuaa

SEQ ID NO: 1672583 - RNA, 21 nt, Human
uaauauugauaugcuuauaca

SEQ ID NO: 1672584 - RNA, 22 nt, Human
uaauccaagcaaaugugaauca

SEQ ID NO: 1672585 - RNA, 17 nt, Human
uaaucuuuaauuuuaca

SEQ ID NO: 1672586 - RNA, 13 nt, Human
uaaucuuucacag

SEQ ID NO: 1672587 - RNA, 13 nt, Human
aaucuugaaaaug

SEQ ID NO: 1672588 - RNA, 23 nt, Human
aaucuucugaacuuggcgcugcc

SEQ ID NO: 1672589 - RNA, 15 nt, Human
aaugaaugucagugu

SEQ ID NO: 1672590 - RNA, 14 nt, Human
aaugaaugucagug

SEQ ID NO: 1672591 - RNA, 14 nt, Human
aaugaaugaaacau

SEQ ID NO: 1672592 - RNA, 15 nt, Human
aaugaaugaaugaau

SEQ ID NO: 1672593 - RNA, 15 nt, Human
uaauguaagacaaau

SEQ ID NO: 1672594 - RNA, 16 nt, Human
uaauguaagcucuacu

SEQ ID NO: 1672595 - RNA, 17 nt, Human
uaauguaagcucuacug

SEQ ID NO: 1672596 - RNA, 23 nt, Human
uaaugugaaacuggauuaaacuu

SEQ ID NO: 1672597 - RNA, 22 nt, Human
uaaugugaaacuggauuaaacu

SEQ ID NO: 1672598 - RNA, 20 nt, Human
uaaugugaaacuggauuaaa

SEQ ID NO: 1672599 - RNA, 12 nt, Human
uaaugugaaacu

SEQ ID NO: 1672600 - RNA, 16 nt, Human
uaaugucacaggcagg

SEQ ID NO: 1672601 - RNA, 17 nt, Human
uaaugucacaggcaggu

SEQ ID NO: 1672602 - RNA, 15 nt, Human
uaaugucacaggcag

SEQ ID NO: 1672603 - RNA, 23 nt, Human
aauguacagcaaggagauuuaca

SEQ ID NO: 1672604 - RNA, 21 nt, Human
aauguacagcaaggagauuua

SEQ ID NO: 1672605 - RNA, 22 nt, Human
uacagcaaggagauuuacaacu

SEQ ID NO: 1672606 - RNA, 13 nt, Human
aauguaagacaaa

SEQ ID NO: 1672607 - RNA, 13 nt, Human
aauguaagcucua

SEQ ID NO: 1672608 - RNA, 15 nt, Human
aauguaagcucuacu

SEQ ID NO: 1672609 - RNA, 17 nt, Human
aaugguuuucuugugug

SEQ ID NO: 1672610 - RNA, 18 nt, Human
aaugguuuucuugugugu

SEQ ID NO: 1672611 - RNA, 22 nt, Human
aaugguuuucuuguguguuuau

SEQ ID NO: 1672612 - RNA, 16 nt, Human
aaugguuuaaaugguc

SEQ ID NO: 1672613 - RNA, 22 nt, Human
aaugugaaacuggauuaaacuu

SEQ ID NO: 1672614 - RNA, 14 nt, Human
aaugucacaggcag

SEQ ID NO: 1672615 - RNA, 13 nt, Human
aaugucacaggca

SEQ ID NO: 1672616 - RNA, 18 nt, Human
uacaguaucucagggccu

SEQ ID NO: 1672617 - RNA, 12 nt, Human
uacaguccuccc

SEQ ID NO: 1672618 - RNA, 15 nt, Human
uacaguccucccauc

SEQ ID NO: 1672619 - RNA, 17 nt, Human
uacaguccucccaucuc

SEQ ID NO: 1672620 - RNA, 18 nt, Human
uacaguccucccaucuca

SEQ ID NO: 1672621 - RNA, 15 nt, Human
uacauaaugcgugca

SEQ ID NO: 1672622 - RNA, 20 nt, Human
uacaguggggaaugaagaua

SEQ ID NO: 1672623 - RNA, 20 nt, Human
uacccgggaagggggcuggg

SEQ ID NO: 1672624 - RNA, 16 nt, Human
uacccucauguucuua

SEQ ID NO: 1672625 - RNA, 20 nt, Human
uacccuggcacuauaaugua

SEQ ID NO: 1672626 - RNA, 22 nt, Human
uacccuggcacuauaauguaag

SEQ ID NO: 1672627 - RNA, 17 nt, Human
uaccacuuuuguucuug

SEQ ID NO: 1672628 - RNA, 17 nt, Human
uaccauccccuguagag

SEQ ID NO: 1672629 - RNA, 13 nt, Human
aauuaacauguua

SEQ ID NO: 1672630 - RNA, 14 nt, Human
aauuaacauguuaa

SEQ ID NO: 1672631 - RNA, 19 nt, Human
aauuaacaugaauauuuag

SEQ ID NO: 1672632 - RNA, 20 nt, Human
aauuaagaaaggauaaaguu

SEQ ID NO: 1672633 - RNA, 22 nt, Human
aauuaacuuuuauaaacuuuac

SEQ ID NO: 1672634 - RNA, 20 nt, Human
aauuaacuuuuauaaacuuu

SEQ ID NO: 1672635 - RNA, 18 nt, Human
aauuaacuuuuauaaacu

SEQ ID NO: 1672636 - RNA, 15 nt, Human
aaugucacaggcagg

SEQ ID NO: 1672637 - RNA, 18 nt, Human
aauguugacaugggacau

SEQ ID NO: 1672638 - RNA, 17 nt, Human
uacauguacugauuacu

SEQ ID NO: 1672639 - RNA, 23 nt, Human
uacauggcuggagcuagaauuug

SEQ ID NO: 1672640 - RNA, 18 nt, Human
aauuaacauguuaaacca

SEQ ID NO: 1672641 - RNA, 16 nt, Human
aauuaaggauuuuaug

SEQ ID NO: 1672642 - RNA, 20 nt, Human
aauuaaggauuuuaugcuuu

SEQ ID NO: 1672643 - RNA, 22 nt, Human
aauuaaggauuuuaugcuuuaa

SEQ ID NO: 1672644 - RNA, 13 nt, Human
aauuaaguacuau

SEQ ID NO: 1672645 - RNA, 19 nt, Human
uacauuagcaguuugcuuu

SEQ ID NO: 1672646 - RNA, 20 nt, Human
uacauuagcaguuugcuuug

SEQ ID NO: 1672647 - RNA, 15 nt, Human
aaggcuaccuuugua

SEQ ID NO: 1672648 - RNA, 14 nt, Human
guugcccaggcugg

SEQ ID NO: 1672649 - RNA, 13 nt, Human
aaggcuaccuuug

SEQ ID NO: 1672650 - RNA, 19 nt, Human
aaggccccgcccaggcuua

SEQ ID NO: 1672651 - RNA, 14 nt, Human
aaggccccgcccag

SEQ ID NO: 1672652 - RNA, 16 nt, Human
aaggccccgcccaggc

SEQ ID NO: 1672653 - RNA, 24 nt, Human
aaggaugcacagaguuguuacauu

SEQ ID NO: 1672654 - RNA, 14 nt, Human
aaggaugcccaaag

SEQ ID NO: 1672655 - RNA, 19 nt, Human
aaggaugcccaaagaugca

SEQ ID NO: 1672656 - RNA, 12 nt, Human
guugcugccuca

SEQ ID NO: 1672657 - RNA, 15 nt, Human
guugcccaggcuggc

SEQ ID NO: 1672658 - RNA, 16 nt, Human
guugcccaggcuggcg

SEQ ID NO: 1672659 - RNA, 17 nt, Human
guugcccaggcuggcgu

SEQ ID NO: 1672660 - RNA, 17 nt, Human
guugggcuggugucacc

SEQ ID NO: 1672661 - RNA, 20 nt, Human
aaggaggaagagaaaaaaua

SEQ ID NO: 1672662 - RNA, 21 nt, Human
aaggauaaaguugguaaaccu

SEQ ID NO: 1672663 - RNA, 23 nt, Human
aaggauaaaguugguaaaccuuu

SEQ ID NO: 1672664 - RNA, 13 nt, Human
aaggauaaugaau

SEQ ID NO: 1672665 - RNA, 11 nt, Human
aaggauccuga

SEQ ID NO: 1672666 - RNA, 12 nt, Human
aaggauccugag

SEQ ID NO: 1672667 - RNA, 13 nt, Human
aaggauccugagc

SEQ ID NO: 1672668 - RNA, 22 nt, Human
aaggauccugagccagauuuca

SEQ ID NO: 1672669 - RNA, 22 nt, Human
aaggagcaagucagaauagaaa

SEQ ID NO: 1672670 - RNA, 18 nt, Human
aaggagauuuacaacugg

SEQ ID NO: 1672671 - RNA, 16 nt, Human
aaggaagguucuggug

SEQ ID NO: 1672672 - RNA, 16 nt, Human
aaggaaacccagcucu

SEQ ID NO: 1672673 - RNA, 15 nt, Human
aaggaaacccagcuc

SEQ ID NO: 1672674 - RNA, 16 nt, Human
guucucugaggacacu

SEQ ID NO: 1672675 - RNA, 11 nt, Human
guucucugccc

SEQ ID NO: 1672676 - RNA, 13 nt, Human
guucucugcccuc

SEQ ID NO: 1672677 - RNA, 12 nt, Human
guucucugcccu

SEQ ID NO: 1672678 - RNA, 18 nt, Human
guuccccuguucacucua

SEQ ID NO: 1672679 - RNA, 13 nt, Human
guugaauuuuaca

SEQ ID NO: 1672680 - RNA, 23 nt, Human
guugauagcacagacccugcccu

SEQ ID NO: 1672681 - RNA, 17 nt, Human
aagcucugcuccucucc

SEQ ID NO: 1672682 - RNA, 13 nt, Human
aagcucugcuccu

SEQ ID NO: 1672683 - RNA, 18 nt, Human
aagcuguuacugucuuca

SEQ ID NO: 1672684 - RNA, 16 nt, Human
aagcuuuuaugugaaa

SEQ ID NO: 1672685 - RNA, 15 nt, Human
guuccccuguucacu

SEQ ID NO: 1672686 - RNA, 17 nt, Human
guuccccuguucacucu

SEQ ID NO: 1672687 - RNA, 19 nt, Human
aaggaaaaaauaacaauga

SEQ ID NO: 1672688 - RNA, 16 nt, Human
aaggaaaaaauaacaa

SEQ ID NO: 1672689 - RNA, 23 nt, Human
aagcucccaggcauuccccagga

SEQ ID NO: 1672690 - RNA, 12 nt, Human
aagcucccaggc

SEQ ID NO: 1672691 - RNA, 22 nt, Human
aagcucccaggcauuccccagg

SEQ ID NO: 1672692 - RNA, 22 nt, Human
guguuuaagacauuuuuggaag

SEQ ID NO: 1672693 - RNA, 11 nt, Human
aagcucccagg

SEQ ID NO: 1672694 - RNA, 13 nt, Human
guguuuauuguca

SEQ ID NO: 1672695 - RNA, 18 nt, Human
guuuuucuaggccugggg

SEQ ID NO: 1672696 - RNA, 18 nt, Human
aagucuuagauguauaua

SEQ ID NO: 1672697 - RNA, 19 nt, Human
aagucuuagauguauauau

SEQ ID NO: 1672698 - RNA, 22 nt, Human
aagucuuauauauuguagauaa

SEQ ID NO: 1672699 - RNA, 16 nt, Human
guuuuugucuuaaaaa

SEQ ID NO: 1672700 - RNA, 15 nt, Human
guuuuuuuuuaaaga

SEQ ID NO: 1672701 - RNA, 23 nt, Human
guuuuuuuuuaaaaaagaaacau

SEQ ID NO: 1672702 - RNA, 14 nt, Human
aagucacugcacag

SEQ ID NO: 1672703 - RNA, 12 nt, Human
aagucacugcac

SEQ ID NO: 1672704 - RNA, 20 nt, Human
aagucacauuccugaacagg

SEQ ID NO: 1672705 - RNA, 13 nt, Human
aagucacacagug

SEQ ID NO: 1672706 - RNA, 19 nt, Human
aagucaaggguaggguggg

SEQ ID NO: 1672707 - RNA, 24 nt, Human
aagucacacaguauuacuucugcu

SEQ ID NO: 1672708 - RNA, 21 nt, Human
aagucaagugaaaaaggagga

SEQ ID NO: 1672709 - RNA, 18 nt, Human
aaguauucuuauuuaaug

SEQ ID NO: 1672710 - RNA, 19 nt, Human
aaguauucuuauuuaauga

SEQ ID NO: 1672711 - RNA, 16 nt, Human
aaguacuauguaucaa

SEQ ID NO: 1672712 - RNA, 15 nt, Human
aaguacuggagaaaa

SEQ ID NO: 1672713 - RNA, 21 nt, Human
aaguacuucuccacccugcuc

SEQ ID NO: 1672714 - RNA, 16 nt, Human
guuuucugagaaagac

SEQ ID NO: 1672715 - RNA, 17 nt, Human
guuuucugagaaagacu

SEQ ID NO: 1672716 - RNA, 22 nt, Human
guuuucugagaaagacuauuca

SEQ ID NO: 1672717 - RNA, 22 nt, Human
aaguacuucuccacccugcucu

SEQ ID NO: 1672718 - RNA, 23 nt, Human
aaguacuucuccacccugcucuc

SEQ ID NO: 1672719 - RNA, 23 nt, Human
aaguauguuagugcaaauuguca

SEQ ID NO: 1672720 - RNA, 21 nt, Human
aaguauguuagugcaaauugu

SEQ ID NO: 1672721 - RNA, 13 nt, Human
aaguauuaagcau

SEQ ID NO: 1672722 - RNA, 14 nt, Human
aaguauuaagcaua

SEQ ID NO: 1672723 - RNA, 15 nt, Human
guuucuguacuuuuu

SEQ ID NO: 1672724 - RNA, 14 nt, Human
guuugcauagguga

SEQ ID NO: 1672725 - RNA, 19 nt, Human
guuugcaucugaaaauuga

SEQ ID NO: 1672726 - RNA, 17 nt, Human
guuugccucugccucug

SEQ ID NO: 1672727 - RNA, 13 nt, Human
guuugcuaaguga

SEQ ID NO: 1672728 - RNA, 10 nt, Human
guuucuguac

SEQ ID NO: 1672729 - RNA, 22 nt, Human
guuucugccgcagcccugcaga

SEQ ID NO: 1672730 - RNA, 14 nt, Human
guuucucagcuccc

SEQ ID NO: 1672731 - RNA, 22 nt, Human
guuucuaugacacaugcaaggu

SEQ ID NO: 1672732 - RNA, 14 nt, Human
guuuuaagaggcag

SEQ ID NO: 1672733 - RNA, 18 nt, Human
guuuuaaggaugcuugua

SEQ ID NO: 1672734 - RNA, 16 nt, Human
guuuuaagaggcaggg

SEQ ID NO: 1672735 - RNA, 16 nt, Human
guuuuacugcagcuuu

SEQ ID NO: 1672736 - RNA, 18 nt, Human
guuuuacugcagcuuugu

SEQ ID NO: 1672737 - RNA, 15 nt, Human
guuuuauaauuuugu

SEQ ID NO: 1672738 - RNA, 22 nt, Human
guuuuauaauuuugugaagcaa

SEQ ID NO: 1672739 - RNA, 15 nt, Human
guuuucugagaaaga

SEQ ID NO: 1672740 - RNA, 19 nt, Human
aaggcugagaggagagaga

SEQ ID NO: 1672741 - RNA, 15 nt, Human
aagggcccagagagg

SEQ ID NO: 1672742 - RNA, 13 nt, Human
aagggcccagaga

SEQ ID NO: 1672743 - RNA, 23 nt, Human
aaggcugaugccaaguuguuuga

SEQ ID NO: 1672744 - RNA, 17 nt, Human
aaggggcaguggugguu

SEQ ID NO: 1672745 - RNA, 14 nt, Human
aaggggcaguggug

SEQ ID NO: 1672746 - RNA, 19 nt, Human
aaggguaucaggugcugcc

SEQ ID NO: 1672747 - RNA, 16 nt, Human
aaggguaucuggugac

SEQ ID NO: 1672748 - RNA, 14 nt, Human
aaggcugggggaag

SEQ ID NO: 1672749 - RNA, 13 nt, Human
aagggccuggccu

SEQ ID NO: 1672750 - RNA, 14 nt, Human
aaguaaaaccacag

SEQ ID NO: 1672751 - RNA, 15 nt, Human
aaguaaaaccacagc

SEQ ID NO: 1672752 - RNA, 16 nt, Human
aaguaaaaccacagca

SEQ ID NO: 1672753 - RNA, 21 nt, Human
aagggugaugggaaagcauug

SEQ ID NO: 1672754 - RNA, 17 nt, Human
aaguaaaaccacagcag

SEQ ID NO: 1672755 - RNA, 18 nt, Human
aaguaaaaccacagcagu

SEQ ID NO: 1672756 - RNA, 16 nt, Human
uaaaauuaaagcugaa

SEQ ID NO: 1672757 - RNA, 18 nt, Human
uaaaauuaaagcugaaaa

SEQ ID NO: 1672758 - RNA, 19 nt, Human
uaaaauuaaagcugaaaac

SEQ ID NO: 1672759 - RNA, 17 nt, Human
uaaaauuuuuaaucuuu

SEQ ID NO: 1672760 - RNA, 19 nt, Human
uaaaccaaggcuagaacca

SEQ ID NO: 1672761 - RNA, 19 nt, Human
uaaaauuuuuaaucuuuaa

SEQ ID NO: 1672762 - RNA, 17 nt, Human
guuuuuuuuuaaagacu

SEQ ID NO: 1672763 - RNA, 12 nt, Human
aaguuaaauaaa

SEQ ID NO: 1672764 - RNA, 14 nt, Human
aaguuaaauaaauc

SEQ ID NO: 1672765 - RNA, 19 nt, Human
aaguuuaauauuaaagcca

SEQ ID NO: 1672766 - RNA, 20 nt, Human
aaguuuaauauuaaagccau

SEQ ID NO: 1672767 - RNA, 21 nt, Human
aaguuuaauauuaaagccaug

SEQ ID NO: 1672768 - RNA, 17 nt, Human
aaguucugcagauaaac

SEQ ID NO: 1672769 - RNA, 17 nt, Human
aaguucaugcuuuguuc

SEQ ID NO: 1672770 - RNA, 14 nt, Human
uaaagaagguuuca

SEQ ID NO: 1672771 - RNA, 15 nt, Human
uaaagacaccuacug

SEQ ID NO: 1672772 - RNA, 16 nt, Human
uaaagacuuuuaugau

SEQ ID NO: 1672773 - RNA, 18 nt, Human
uaaagaguuaguuugagu

SEQ ID NO: 1672774 - RNA, 14 nt, Human
uaaagaguguggca

SEQ ID NO: 1672775 - RNA, 19 nt, Human
uaaaggcuaccuuuguauu

SEQ ID NO: 1672776 - RNA, 21 nt, Human
uaaaggcuaccuuuguauucu

SEQ ID NO: 1672777 - RNA, 12 nt, Human
uaaacugccccc

SEQ ID NO: 1672778 - RNA, 13 nt, Human
uaaacgucuuaaa

SEQ ID NO: 1672779 - RNA, 17 nt, Human
uaaacgucuuaaauauu

SEQ ID NO: 1672780 - RNA, 18 nt, Human
uaaaccaugggauaaaug

SEQ ID NO: 1672781 - RNA, 20 nt, Human
uaaaccaugggauaaaugcc

SEQ ID NO: 1672782 - RNA, 21 nt, Human
uaaaccaugggauaaaugcca

SEQ ID NO: 1672783 - RNA, 22 nt, Human
uaaaccaugggauaaaugccau

SEQ ID NO: 1672784 - RNA, 16 nt, Human
uaaaccgccaaggcug

SEQ ID NO: 1672785 - RNA, 18 nt, Human
uaaaccgccaaggcuggg

SEQ ID NO: 1672786 - RNA, 20 nt, Human
uaaauguuuuuuuuuaaaga

SEQ ID NO: 1672787 - RNA, 23 nt, Human
uaaauguuuuuuuuuaaagacuu

SEQ ID NO: 1672788 - RNA, 21 nt, Human
uaaaucuccaaaauaaaacuu

SEQ ID NO: 1672789 - RNA, 20 nt, Human
uaaaucuccaaaauaaaacu

SEQ ID NO: 1672790 - RNA, 22 nt, Human
uaaaucuccaaaauaaaacuuu

SEQ ID NO: 1672791 - RNA, 17 nt, Human
uaaaugauuucauucaa

SEQ ID NO: 1672792 - RNA, 15 nt, Human
uaaauguugacaugg

SEQ ID NO: 1672793 - RNA, 16 nt, Human
uaacaacuaugauuug

SEQ ID NO: 1672794 - RNA, 21 nt, Human
uaacaacuaugauuuggaaaa

SEQ ID NO: 1672795 - RNA, 22 nt, Human
uaacaacuaugauuuggaaaau

SEQ ID NO: 1672796 - RNA, 13 nt, Human
uaacaagccaccc

SEQ ID NO: 1672797 - RNA, 15 nt, Human
uaacaaugcuguauu

SEQ ID NO: 1672798 - RNA, 17 nt, Human
uaacaaugcuguauuuu

SEQ ID NO: 1672799 - RNA, 16 nt, Human
uaacaacagcuggugc

SEQ ID NO: 1672800 - RNA, 21 nt, Human
aauacaccacuacauucuguu

SEQ ID NO: 1672801 - RNA, 20 nt, Human
aauacaccacuacauucugu

SEQ ID NO: 1672802 - RNA, 18 nt, Human
aauacaccacuacauucu

SEQ ID NO: 1672803 - RNA, 16 nt, Human
aauacaccacuacauu

SEQ ID NO: 1672804 - RNA, 15 nt, Human
aauacaauuuuguuu

SEQ ID NO: 1672805 - RNA, 17 nt, Human
aauacaauuuuguuucu

SEQ ID NO: 1672806 - RNA, 18 nt, Human
aauacaauuuuguuucug

SEQ ID NO: 1672807 - RNA, 20 nt, Human
aauacaauuuuguuucugua

SEQ ID NO: 1672808 - RNA, 12 nt, Human
aauacaauuuug

SEQ ID NO: 1672809 - RNA, 13 nt, Human
aauacaauuuugu

SEQ ID NO: 1672810 - RNA, 15 nt, Human
aauacaccacuacau

SEQ ID NO: 1672811 - RNA, 22 nt, Human
aauacaauuuuguuucuguacu

SEQ ID NO: 1672812 - RNA, 23 nt, Human
aauacaauuuuguuucuguacuu

SEQ ID NO: 1672813 - RNA, 14 nt, Human
aauacacacucaaa

SEQ ID NO: 1672814 - RNA, 13 nt, Human
uaaauacaauuuu

SEQ ID NO: 1672815 - RNA, 15 nt, Human
uaaauacaauuuugu

SEQ ID NO: 1672816 - RNA, 22 nt, Human
uaaauacaauuuuguuucugua

SEQ ID NO: 1672817 - RNA, 23 nt, Human
uaaauacaauuuuguuucuguac

SEQ ID NO: 1672818 - RNA, 19 nt, Human
uaaauagcuagacugguga

SEQ ID NO: 1672819 - RNA, 19 nt, Human
uaaauaguaaaaauaaaau

SEQ ID NO: 1672820 - RNA, 20 nt, Human
uaaauaguaaaaauaaaauu

SEQ ID NO: 1672821 - RNA, 23 nt, Human
uaaauagcuagacuggugacuga

SEQ ID NO: 1672822 - RNA, 12 nt, Human
uaaauagcuuuu

SEQ ID NO: 1672823 - RNA, 19 nt, Human
uaaaucuccaaaauaaaac

SEQ ID NO: 1672824 - RNA, 18 nt, Human
uaaaucgcuuuugauaau

SEQ ID NO: 1672825 - RNA, 19 nt, Human
uaaaucgcuuuugauaauc

SEQ ID NO: 1672826 - RNA, 23 nt, Human
uaaaucccauuauucaaaguugc

SEQ ID NO: 1672827 - RNA, 14 nt, Human
aauaauuauaugcu

SEQ ID NO: 1672828 - RNA, 15 nt, Human
aauaauuauaugcua

SEQ ID NO: 1672829 - RNA, 20 nt, Human
aauaauuauaugcuauuucu

SEQ ID NO: 1672830 - RNA, 21 nt, Human
aauaauuauaugcuauuucua

SEQ ID NO: 1672831 - RNA, 22 nt, Human
aauaauuauaugcuauuucuau

SEQ ID NO: 1672832 - RNA, 23 nt, Human
aauaauuauaugcuauuucuaua

SEQ ID NO: 1672833 - RNA, 16 nt, Human
aauaaggaaaaguuua

SEQ ID NO: 1672834 - RNA, 19 nt, Human
aauaaggaaaaguuuaaua

SEQ ID NO: 1672835 - RNA, 22 nt, Human
aauaaggaaaaguuuaauauua

SEQ ID NO: 1672836 - RNA, 13 nt, Human
aauaaggaaaagu

SEQ ID NO: 1672837 - RNA, 15 nt, Human
aauaaggaaaaguuu

SEQ ID NO: 1672838 - RNA, 15 nt, Human
aauaacuaaaaggua

SEQ ID NO: 1672839 - RNA, 12 nt, Human
aauaacauguaa

SEQ ID NO: 1672840 - RNA, 19 nt, Human
aauaacauguaauuaagua

SEQ ID NO: 1672841 - RNA, 22 nt, Human
aauaacauguaauuaaguacua

SEQ ID NO: 1672842 - RNA, 15 nt, Human
aauaacaauaaaaga

SEQ ID NO: 1672843 - RNA, 21 nt, Human
aauaaauagcuagacugguga

SEQ ID NO: 1672844 - RNA, 12 nt, Human
aauaaauuauuu

SEQ ID NO: 1672845 - RNA, 12 nt, Human
aauaaaugugcc

SEQ ID NO: 1672846 - RNA, 21 nt, Human
aauaaaugugccuucauuuuu

SEQ ID NO: 1672847 - RNA, 13 nt, Human
uaaagucaggggu

SEQ ID NO: 1672848 - RNA, 15 nt, Human
aauaaaaaauuauga

SEQ ID NO: 1672849 - RNA, 16 nt, Human
aauaaaaaauuaugac

SEQ ID NO: 1672850 - RNA, 14 nt, Human
aauaaaaaauuaug

SEQ ID NO: 1672851 - RNA, 20 nt, Human
uaaaguguauuuuuuuacua

SEQ ID NO: 1672852 - RNA, 19 nt, Human
uaaaguguauuuuuuuacu

SEQ ID NO: 1672853 - RNA, 15 nt, Human
uaaaguguauuuuuu

SEQ ID NO: 1672854 - RNA, 14 nt, Human
uaaaguguauuuuu

SEQ ID NO: 1672855 - RNA, 16 nt, Human
aauaaaguacaagagc

SEQ ID NO: 1672856 - RNA, 14 nt, Human
aauaaaguaauuau

SEQ ID NO: 1672857 - RNA, 16 nt, Human
aauaaaaucuugaaaa

SEQ ID NO: 1672858 - RNA, 22 nt, Human
aauaaaauccauacauuugugu

SEQ ID NO: 1672859 - RNA, 12 nt, Human
aauaaaaauaau

SEQ ID NO: 1672860 - RNA, 14 nt, Human
guggacacagcucu

SEQ ID NO: 1672861 - RNA, 15 nt, Human
guggacacagcucuu

SEQ ID NO: 1672862 - RNA, 17 nt, Human
guggacacagcucuucu

SEQ ID NO: 1672863 - RNA, 24 nt, Human
guggacacagcucuucuccaggcu

SEQ ID NO: 1672864 - RNA, 16 nt, Human
gugcugggccccugcc

SEQ ID NO: 1672865 - RNA, 19 nt, Human
gugcugguguaugugugaa

SEQ ID NO: 1672866 - RNA, 22 nt, Human
gugcugggguuaucugaaguca

SEQ ID NO: 1672867 - RNA, 19 nt, Human
gugcugggccccugccucu

SEQ ID NO: 1672868 - RNA, 23 nt, Human
aagaagguuucagaaagaagugg

SEQ ID NO: 1672869 - RNA, 18 nt, Human
gugcugcccugcccaccu

SEQ ID NO: 1672870 - RNA, 21 nt, Human
gugcugcccugcccaccuggc

SEQ ID NO: 1672871 - RNA, 19 nt, Human
gugcugcccugcccaccug

SEQ ID NO: 1672872 - RNA, 20 nt, Human
gugcugcccugcccaccugg

SEQ ID NO: 1672873 - RNA, 18 nt, Human
guggcaccagcagccugg

SEQ ID NO: 1672874 - RNA, 13 nt, Human
guggcaccagcag

SEQ ID NO: 1672875 - RNA, 14 nt, Human
guggcaccagcagc

SEQ ID NO: 1672876 - RNA, 22 nt, Human
guggcagcucaccucucccuug

SEQ ID NO: 1672877 - RNA, 14 nt, Human
guggcagcugcggu

SEQ ID NO: 1672878 - RNA, 23 nt, Human
guggauuuaacagaaauguacag

SEQ ID NO: 1672879 - RNA, 21 nt, Human
guggauuuaacagaaauguac

SEQ ID NO: 1672880 - RNA, 24 nt, Human
aagaauuucuaggacugaauuaug

SEQ ID NO: 1672881 - RNA, 16 nt, Human
aagacaaaaagcuacu

SEQ ID NO: 1672882 - RNA, 13 nt, Human
aagacccaaaagg

SEQ ID NO: 1672883 - RNA, 19 nt, Human
guggcagcugcgguccacc

SEQ ID NO: 1672884 - RNA, 17 nt, Human
guggcagcugcggucca

SEQ ID NO: 1672885 - RNA, 13 nt, Human
aagaauauuuuaa

SEQ ID NO: 1672886 - RNA, 20 nt, Human
gugcacuaauguguaagaca

SEQ ID NO: 1672887 - RNA, 22 nt, Human
gugcauuugaggucuguucuuu

SEQ ID NO: 1672888 - RNA, 21 nt, Human
gugcauuugaggucuguucuu

SEQ ID NO: 1672889 - RNA, 15 nt, Human
gugcauuuggugguu

SEQ ID NO: 1672890 - RNA, 14 nt, Human
gugccaagcagagg

SEQ ID NO: 1672891 - RNA, 12 nt, Human
gugcacacacca

SEQ ID NO: 1672892 - RNA, 14 nt, Human
gugcacacaccaga

SEQ ID NO: 1672893 - RNA, 18 nt, Human
gugcacguacacacacau

SEQ ID NO: 1672894 - RNA, 17 nt, Human
gugcacacaccagagcc

SEQ ID NO: 1672895 - RNA, 14 nt, Human
aacuuggcgcugcc

SEQ ID NO: 1672896 - RNA, 15 nt, Human
aacuuguaaaugugg

SEQ ID NO: 1672897 - RNA, 17 nt, Human
aacuuggcgcugccccu

SEQ ID NO: 1672898 - RNA, 23 nt, Human
aacuugguucccauuugcuccuu

SEQ ID NO: 1672899 - RNA, 16 nt, Human
gugccuggccacgccc

SEQ ID NO: 1672900 - RNA, 15 nt, Human
gugccucugggacug

SEQ ID NO: 1672901 - RNA, 14 nt, Human
aacuuguguaaaua

SEQ ID NO: 1672902 - RNA, 15 nt, Human
aacuuguguaaauac

SEQ ID NO: 1672903 - RNA, 20 nt, Human
aacuuguguaaauacaauuu

SEQ ID NO: 1672904 - RNA, 13 nt, Human
aacuuguuuucug

SEQ ID NO: 1672905 - RNA, 20 nt, Human
aagaaaaaggaugcacagag

SEQ ID NO: 1672906 - RNA, 19 nt, Human
aagaaaaaggaugcacaga

SEQ ID NO: 1672907 - RNA, 22 nt, Human
aagaaaaaggaugcacagaguu

SEQ ID NO: 1672908 - RNA, 16 nt, Human
aagaaaauaccaagga

SEQ ID NO: 1672909 - RNA, 13 nt, Human
aagaaaauaucac

SEQ ID NO: 1672910 - RNA, 15 nt, Human
aagaagcucucuccu

SEQ ID NO: 1672911 - RNA, 14 nt, Human
aagaagcucucucc

SEQ ID NO: 1672912 - RNA, 16 nt, Human
aagaagcccaggaaag

SEQ ID NO: 1672913 - RNA, 17 nt, Human
aagaagcccaggaaagg

SEQ ID NO: 1672914 - RNA, 22 nt, Human
aagaagcaccaaucaugaauua

SEQ ID NO: 1672915 - RNA, 18 nt, Human
guggggggggugcugggc

SEQ ID NO: 1672916 - RNA, 15 nt, Human
gugguguuuccuggc

SEQ ID NO: 1672917 - RNA, 16 nt, Human
gugguguuuccuggca

SEQ ID NO: 1672918 - RNA, 12 nt, Human
gugggagcugag

SEQ ID NO: 1672919 - RNA, 15 nt, Human
gugggauccuccagg

SEQ ID NO: 1672920 - RNA, 18 nt, Human
gugggauccuccaggugc

SEQ ID NO: 1672921 - RNA, 21 nt, Human
guggcuucccgcucagcccuc

SEQ ID NO: 1672922 - RNA, 15 nt, Human
guggccucccaacuc

SEQ ID NO: 1672923 - RNA, 17 nt, Human
guggcccgacagccugg

SEQ ID NO: 1672924 - RNA, 13 nt, Human
guggccucccaac

SEQ ID NO: 1672925 - RNA, 14 nt, Human
guggccucccaacu

SEQ ID NO: 1672926 - RNA, 16 nt, Human
aagagcccaggccucc

SEQ ID NO: 1672927 - RNA, 12 nt, Human
aagagcccaggc

SEQ ID NO: 1672928 - RNA, 14 nt, Human
aagagcccaggccu

SEQ ID NO: 1672929 - RNA, 16 nt, Human
aagacuguacaaagua

SEQ ID NO: 1672930 - RNA, 16 nt, Human
aagagauugugguuuc

SEQ ID NO: 1672931 - RNA, 19 nt, Human
aagagauugugguuucauu

SEQ ID NO: 1672932 - RNA, 18 nt, Human
aagagcuguucacagcca

SEQ ID NO: 1672933 - RNA, 16 nt, Human
guggcccgacagccug

SEQ ID NO: 1672934 - RNA, 19 nt, Human
aagagcuguucacagccag

SEQ ID NO: 1672935 - RNA, 17 nt, Human
aagacucauucuucugu

SEQ ID NO: 1672936 - RNA, 14 nt, Human
aagacuccaaagaa

SEQ ID NO: 1672937 - RNA, 16 nt, Human
aagacuccaaagaaau

SEQ ID NO: 1672938 - RNA, 17 nt, Human
aagacuccaaagaaaug

SEQ ID NO: 1672939 - RNA, 23 nt, Human
aagaccccuuaccacugcucuga

SEQ ID NO: 1672940 - RNA, 12 nt, Human
aagaccagucca

SEQ ID NO: 1672941 - RNA, 21 nt, Human
aagacgcugugcugcccugcc

SEQ ID NO: 1672942 - RNA, 22 nt, Human
aagacgcugugcugcccugccc

SEQ ID NO: 1672943 - RNA, 23 nt, Human
aagacgcugugcugcccugccca

SEQ ID NO: 1672944 - RNA, 14 nt, Human
aagacuauucaaac

SEQ ID NO: 1672945 - RNA, 22 nt, Human
aagauauuuugcuuugugauuu

SEQ ID NO: 1672946 - RNA, 20 nt, Human
aagaguaggaagacuuugga

SEQ ID NO: 1672947 - RNA, 20 nt, Human
aagauauuuugcuuugugau

SEQ ID NO: 1672948 - RNA, 17 nt, Human
aagauauuuugcuuugu

SEQ ID NO: 1672949 - RNA, 16 nt, Human
aagaguaggaagacuu

SEQ ID NO: 1672950 - RNA, 18 nt, Human
aagaguaggaagacuuug

SEQ ID NO: 1672951 - RNA, 19 nt, Human
aagaguaggaagacuuugg

SEQ ID NO: 1672952 - RNA, 15 nt, Human
aagauauuuugcuuu

SEQ ID NO: 1672953 - RNA, 19 nt, Human
gugguguuuccuggcacug

SEQ ID NO: 1672954 - RNA, 18 nt, Human
gugguuauggagagggug

SEQ ID NO: 1672955 - RNA, 22 nt, Human
aagauguagaggagaaacugga

SEQ ID NO: 1672956 - RNA, 12 nt, Human
aagcaaaugucu

SEQ ID NO: 1672957 - RNA, 13 nt, Human
aagcaaaugugaa

SEQ ID NO: 1672958 - RNA, 14 nt, Human
aagcaaaugugaau

SEQ ID NO: 1672959 - RNA, 20 nt, Human
aagcaaaugugaaucauuuu

SEQ ID NO: 1672960 - RNA, 19 nt, Human
aagcaaaauuuuuucucua

SEQ ID NO: 1672961 - RNA, 21 nt, Human
guguugaaacggaugauuucu

SEQ ID NO: 1672962 - RNA, 23 nt, Human
guguugaaacggaugauuucuau

SEQ ID NO: 1672963 - RNA, 13 nt, Human
guguuuaagacau

SEQ ID NO: 1672964 - RNA, 14 nt, Human
guguuuaagacauu

SEQ ID NO: 1672965 - RNA, 19 nt, Human
guguguguaugcgugugug

SEQ ID NO: 1672966 - RNA, 19 nt, Human
gugugguguuuccuggcac

SEQ ID NO: 1672967 - RNA, 20 nt, Human
gugugagucaccaagcccag

SEQ ID NO: 1672968 - RNA, 15 nt, Human
gugugguguuuccug

SEQ ID NO: 1672969 - RNA, 13 nt, Human
gugugagucacca

SEQ ID NO: 1672970 - RNA, 18 nt, Human
gugugagucaccaagccc

SEQ ID NO: 1672971 - RNA, 21 nt, Human
gugucuugcaauggcagccuu

SEQ ID NO: 1672972 - RNA, 18 nt, Human
gugucuuuaaaugcugcu

SEQ ID NO: 1672973 - RNA, 19 nt, Human
gugucuuuaaaugcugcuu

SEQ ID NO: 1672974 - RNA, 19 nt, Human
gugucuugcaauggcagcc

SEQ ID NO: 1672975 - RNA, 20 nt, Human
gugucccaaaaagaaaggag

SEQ ID NO: 1672976 - RNA, 16 nt, Human
aagcaaguauuagaau

SEQ ID NO: 1672977 - RNA, 18 nt, Human
gucgcccuggacugugug

SEQ ID NO: 1672978 - RNA, 20 nt, Human
gucuaccugaggggccucuu

SEQ ID NO: 1672979 - RNA, 14 nt, Human
gucgcccuggacug

SEQ ID NO: 1672980 - RNA, 23 nt, Human
gucgcccagucuggaaugcagug

SEQ ID NO: 1672981 - RNA, 15 nt, Human
gucgcccaggcugga

SEQ ID NO: 1672982 - RNA, 20 nt, Human
gucgcccaggcuggagugca

SEQ ID NO: 1672983 - RNA, 14 nt, Human
gucgcccaggcugg

SEQ ID NO: 1672984 - RNA, 13 nt, Human
gucgcccagucug

SEQ ID NO: 1672985 - RNA, 14 nt, Human
gucgcccagucugg

SEQ ID NO: 1672986 - RNA, 14 nt, Human
gucgaggacaggga

SEQ ID NO: 1672987 - RNA, 17 nt, Human
guccugcugcaguugcc

SEQ ID NO: 1672988 - RNA, 13 nt, Human
guccugcugcagu

SEQ ID NO: 1672989 - RNA, 16 nt, Human
guccugcugcaguugc

SEQ ID NO: 1672990 - RNA, 18 nt, Human
aaccaaaugcaaugugaa

SEQ ID NO: 1672991 - RNA, 13 nt, Human
aaccacaucuugc

SEQ ID NO: 1672992 - RNA, 18 nt, Human
aaccacaucuugcucugc

SEQ ID NO: 1672993 - RNA, 13 nt, Human
gucuccauguuug

SEQ ID NO: 1672994 - RNA, 16 nt, Human
aacauuuugucauaua

SEQ ID NO: 1672995 - RNA, 20 nt, Human
gucucaagagggcacuggug

SEQ ID NO: 1672996 - RNA, 22 nt, Human
gucucaagagggcacugguggc

SEQ ID NO: 1672997 - RNA, 15 nt, Human
gucucaagagggcac

SEQ ID NO: 1672998 - RNA, 17 nt, Human
gucucaagagggcacug

SEQ ID NO: 1672999 - RNA, 22 nt, Human
gucucaaacucuugaccucagg

SEQ ID NO: 1673000 - RNA, 14 nt, Human
gucuaugggacuca

SEQ ID NO: 1673001 - RNA, 15 nt, Human
gucuaugggacucaa

SEQ ID NO: 1673002 - RNA, 15 nt, Human
gucucaggucccugc

SEQ ID NO: 1673003 - RNA, 16 nt, Human
gucucaggucccugca

SEQ ID NO: 1673004 - RNA, 23 nt, Human
gucucaguccaugaagauguaga

SEQ ID NO: 1673005 - RNA, 22 nt, Human
guagcucuaggagggcuggcaa

SEQ ID NO: 1673006 - RNA, 12 nt, Human
gucccccucugg

SEQ ID NO: 1673007 - RNA, 14 nt, Human
gucccccucuggcu

SEQ ID NO: 1673008 - RNA, 19 nt, Human
gucccaccuuggcugcagg

SEQ ID NO: 1673009 - RNA, 20 nt, Human
gucccaccuuggcugcaggg

SEQ ID NO: 1673010 - RNA, 17 nt, Human
gucccaccuuggcugca

SEQ ID NO: 1673011 - RNA, 18 nt, Human
gucccaccuuggcugcag

SEQ ID NO: 1673012 - RNA, 22 nt, Human
guccgaaagggacuuggaagcu

SEQ ID NO: 1673013 - RNA, 13 nt, Human
gucccuuuuccuu

SEQ ID NO: 1673014 - RNA, 21 nt, Human
guccgaaagggacuuggaagc

SEQ ID NO: 1673015 - RNA, 18 nt, Human
gucccccugacaacacuc

SEQ ID NO: 1673016 - RNA, 13 nt, Human
gucccccugacaa

SEQ ID NO: 1673017 - RNA, 15 nt, Human
guccccgcacugggc

SEQ ID NO: 1673018 - RNA, 16 nt, Human
guccccgcacugggcu

SEQ ID NO: 1673019 - RNA, 23 nt, Human
guccccuguuuguuucugaaagg

SEQ ID NO: 1673020 - RNA, 19 nt, Human
aacagucucaggaaaucaa

SEQ ID NO: 1673021 - RNA, 19 nt, Human
aacagguuuuccugaagaa

SEQ ID NO: 1673022 - RNA, 17 nt, Human
aacagucucaggaaauc

SEQ ID NO: 1673023 - RNA, 13 nt, Human
guccuacccaccc

SEQ ID NO: 1673024 - RNA, 15 nt, Human
guccuacccacccuc

SEQ ID NO: 1673025 - RNA, 19 nt, Human
aacagauuauuaccuuaca

SEQ ID NO: 1673026 - RNA, 23 nt, Human
aacauguuaaaccaugggauaaa

SEQ ID NO: 1673027 - RNA, 22 nt, Human
aacauguuuuucuucucccuca

SEQ ID NO: 1673028 - RNA, 14 nt, Human
aacaucaacaucuu

SEQ ID NO: 1673029 - RNA, 16 nt, Human
aacauauauaacaaug

SEQ ID NO: 1673030 - RNA, 15 nt, Human
aacauaaaucuguga

SEQ ID NO: 1673031 - RNA, 12 nt, Human
aacauaaaucug

SEQ ID NO: 1673032 - RNA, 14 nt, Human
aacauaaaucugug

SEQ ID NO: 1673033 - RNA, 18 nt, Human
aacauacucccaucugug

SEQ ID NO: 1673034 - RNA, 16 nt, Human
aacauacucccaucug

SEQ ID NO: 1673035 - RNA, 20 nt, Human
aacauacucccaucugugaa

SEQ ID NO: 1673036 - RNA, 23 nt, Human
aacguggcugcuucaaggauccu

SEQ ID NO: 1673037 - RNA, 13 nt, Human
aaccuguucugcu

SEQ ID NO: 1673038 - RNA, 17 nt, Human
aaccuguucugcuuucc

SEQ ID NO: 1673039 - RNA, 19 nt, Human
aaccugauugugucucuug

SEQ ID NO: 1673040 - RNA, 18 nt, Human
aaccugauugugucucuu

SEQ ID NO: 1673041 - RNA, 15 nt, Human
gucuuuguacagaca

SEQ ID NO: 1673042 - RNA, 16 nt, Human
gucuuuguacagacaa

SEQ ID NO: 1673043 - RNA, 16 nt, Human
gucuucaguaagccgu

SEQ ID NO: 1673044 - RNA, 23 nt, Human
gucuucauaccuacauguauuug

SEQ ID NO: 1673045 - RNA, 18 nt, Human
gucucuuuaaugucacag

SEQ ID NO: 1673046 - RNA, 19 nt, Human
gucucuuuaaugucacagg

SEQ ID NO: 1673047 - RNA, 20 nt, Human
gucucuuuaaugucacaggc

SEQ ID NO: 1673048 - RNA, 16 nt, Human
gucugaagucacugca

SEQ ID NO: 1673049 - RNA, 19 nt, Human
gucugaaggcuggguucug

SEQ ID NO: 1673050 - RNA, 22 nt, Human
gucucuuuaaugucacaggcag

SEQ ID NO: 1673051 - RNA, 23 nt, Human
gucucuuuaaugucacaggcagg

SEQ ID NO: 1673052 - RNA, 17 nt, Human
gucucuugguccugcug

SEQ ID NO: 1673053 - RNA, 20 nt, Human
gucucuugguccugcugcag

SEQ ID NO: 1673054 - RNA, 18 nt, Human
gucucuugguccugcugc

SEQ ID NO: 1673055 - RNA, 19 nt, Human
gucucuugguccugcugca

SEQ ID NO: 1673056 - RNA, 17 nt, Human
gucugaagucacugcac

SEQ ID NO: 1673057 - RNA, 19 nt, Human
gucugaagucacugcacag

SEQ ID NO: 1673058 - RNA, 21 nt, Human
gucugacaggcaaugcuggcu

SEQ ID NO: 1673059 - RNA, 22 nt, Human
gucugacaggcaaugcuggcug

SEQ ID NO: 1673060 - RNA, 23 nt, Human
gucugacaggcaaugcuggcugu

SEQ ID NO: 1673061 - RNA, 12 nt, Human
gugagagcuggg

SEQ ID NO: 1673062 - RNA, 12 nt, Human
gugaccccaggu

SEQ ID NO: 1673063 - RNA, 21 nt, Human
gugagcacuaaggugugcucu

SEQ ID NO: 1673064 - RNA, 15 nt, Human
gugagcaggcuguga

SEQ ID NO: 1673065 - RNA, 17 nt, Human
gugaguacuacaguccu

SEQ ID NO: 1673066 - RNA, 13 nt, Human
gugagagcugggu

SEQ ID NO: 1673067 - RNA, 16 nt, Human
gugagaggggaacaga

SEQ ID NO: 1673068 - RNA, 20 nt, Human
gugaguccuggcaugggaau

SEQ ID NO: 1673069 - RNA, 15 nt, Human
gugagucgaggacag

SEQ ID NO: 1673070 - RNA, 17 nt, Human
gugaguccuggcauggg

SEQ ID NO: 1673071 - RNA, 19 nt, Human
gugaguacuacaguccucc

SEQ ID NO: 1673072 - RNA, 21 nt, Human
gugaguacuacaguccuccca

SEQ ID NO: 1673073 - RNA, 14 nt, Human
aacugaacucugac

SEQ ID NO: 1673074 - RNA, 20 nt, Human
aacugaaaucauacuucuua

SEQ ID NO: 1673075 - RNA, 17 nt, Human
gugaccaaugaugguca

SEQ ID NO: 1673076 - RNA, 18 nt, Human
gugaccauguuuuguuua

SEQ ID NO: 1673077 - RNA, 18 nt, Human
gugaccagcaccaucucu

SEQ ID NO: 1673078 - RNA, 21 nt, Human
gugaccagcaccaucucuccu

SEQ ID NO: 1673079 - RNA, 23 nt, Human
gugacagaggcagccccauucug

SEQ ID NO: 1673080 - RNA, 14 nt, Human
gugacaugucuuuu

SEQ ID NO: 1673081 - RNA, 16 nt, Human
gugacagaggcagccc

SEQ ID NO: 1673082 - RNA, 18 nt, Human
gugacagaggcagcccca

SEQ ID NO: 1673083 - RNA, 19 nt, Human
gugacagaggcagccccau

SEQ ID NO: 1673084 - RNA, 23 nt, Human
gugaagacaaugacuuacuguac

SEQ ID NO: 1673085 - RNA, 13 nt, Human
aacuauauuguuu

SEQ ID NO: 1673086 - RNA, 20 nt, Human
aacuaucucauuuccaagca

SEQ ID NO: 1673087 - RNA, 23 nt, Human
aacuaucucauuuccaagcaagu

SEQ ID NO: 1673088 - RNA, 14 nt, Human
gugaagugaagaca

SEQ ID NO: 1673089 - RNA, 21 nt, Human
agugucuuaauuaaaagaaua

SEQ ID NO: 1673090 - RNA, 17 nt, Human
agugucuuaauuaaaag

SEQ ID NO: 1673091 - RNA, 18 nt, Human
agugucuuaauuaaaaga

SEQ ID NO: 1673092 - RNA, 13 nt, Human
aguggcuccuccc

SEQ ID NO: 1673093 - RNA, 17 nt, Human
aguggcuccucccggug

SEQ ID NO: 1673094 - RNA, 21 nt, Human
aguggcuccucccggugccca

SEQ ID NO: 1673095 - RNA, 23 nt, Human
aguggcuuaaaacaacacucaca

SEQ ID NO: 1673096 - RNA, 16 nt, Human
agugggagcugccugu

SEQ ID NO: 1673097 - RNA, 15 nt, Human
agugggagcugccug

SEQ ID NO: 1673098 - RNA, 14 nt, Human
agugggagcugccu

SEQ ID NO: 1673099 - RNA, 18 nt, Human
aguguauuuuuuuacuaa

SEQ ID NO: 1673100 - RNA, 17 nt, Human
aguguauuuuuuuacua

SEQ ID NO: 1673101 - RNA, 15 nt, Human
agugucuuaauuaaa

SEQ ID NO: 1673102 - RNA, 20 nt, Human
aguuguuugauucagacagc

SEQ ID NO: 1673103 - RNA, 16 nt, Human
aguuguguuugaagca

SEQ ID NO: 1673104 - RNA, 14 nt, Human
aguugaagacagag

SEQ ID NO: 1673105 - RNA, 23 nt, Human
aguugaaaaucuuauaauuuaaa

SEQ ID NO: 1673106 - RNA, 22 nt, Human
aguugaaaagacuccaaagaaa

SEQ ID NO: 1673107 - RNA, 14 nt, Human
aguuacagacaaag

SEQ ID NO: 1673108 - RNA, 16 nt, Human
aguuacagacaaagcg

SEQ ID NO: 1673109 - RNA, 14 nt, Human
aguuaagccuuugg

SEQ ID NO: 1673110 - RNA, 13 nt, Human
aguuaagccuuug

SEQ ID NO: 1673111 - RNA, 12 nt, Human
aguuaaauaaau

SEQ ID NO: 1673112 - RNA, 20 nt, Human
aguucagguaacaggcagau

SEQ ID NO: 1673113 - RNA, 17 nt, Human
aguuacagacaaagcgu

SEQ ID NO: 1673114 - RNA, 19 nt, Human
aguucagguaacaggcaga

SEQ ID NO: 1673115 - RNA, 22 nt, Human
aguugaaaaucuuauaauuuaa

SEQ ID NO: 1673116 - RNA, 18 nt, Human
agugaccauacuaauuau

SEQ ID NO: 1673117 - RNA, 16 nt, Human
agugaagacaaugacu

SEQ ID NO: 1673118 - RNA, 14 nt, Human
agugaagacaauga

SEQ ID NO: 1673119 - RNA, 20 nt, Human
agucugauucccaagcucug

SEQ ID NO: 1673120 - RNA, 16 nt, Human
agucugauucccaagc

SEQ ID NO: 1673121 - RNA, 18 nt, Human
agucugauucccaagcuc

SEQ ID NO: 1673122 - RNA, 17 nt, Human
agucuggaaugcagugg

SEQ ID NO: 1673123 - RNA, 18 nt, Human
agucuggaaugcaguggu

SEQ ID NO: 1673124 - RNA, 22 nt, Human
aguccuggcaugggaaugaaug

SEQ ID NO: 1673125 - RNA, 20 nt, Human
aguccuggcaugggaaugaa

SEQ ID NO: 1673126 - RNA, 21 nt, Human
aguccuggcaugggaaugaau

SEQ ID NO: 1673127 - RNA, 17 nt, Human
agucugaaggcuggguu

SEQ ID NO: 1673128 - RNA, 16 nt, Human
agucugaaggcugggu

SEQ ID NO: 1673129 - RNA, 13 nt, Human
agucugaaggcug

SEQ ID NO: 1673130 - RNA, 15 nt, Human
agucugaaggcuggg

SEQ ID NO: 1673131 - RNA, 12 nt, Human
aguccuguaaug

SEQ ID NO: 1673132 - RNA, 17 nt, Human
aguaugggacuggccuc

SEQ ID NO: 1673133 - RNA, 20 nt, Human
aguaugggacuggccucugc

SEQ ID NO: 1673134 - RNA, 14 nt, Human
aguaugguggcugg

SEQ ID NO: 1673135 - RNA, 23 nt, Human
agucaaauugugugaaagguacu

SEQ ID NO: 1673136 - RNA, 19 nt, Human
agucaaauugugugaaagg

SEQ ID NO: 1673137 - RNA, 11 nt, Human
aguaucuugaa

SEQ ID NO: 1673138 - RNA, 12 nt, Human
aguaucuugaag

SEQ ID NO: 1673139 - RNA, 15 nt, Human
aguaucuugaagacu

SEQ ID NO: 1673140 - RNA, 17 nt, Human
aguaugaggcauuuguu

SEQ ID NO: 1673141 - RNA, 16 nt, Human
aguaugaggcauuugu

SEQ ID NO: 1673142 - RNA, 15 nt, Human
aguaugaggcauuug

SEQ ID NO: 1673143 - RNA, 16 nt, Human
aguaugaauaaagaca

SEQ ID NO: 1673144 - RNA, 16 nt, Human
aguaucuuuuuauuca

SEQ ID NO: 1673145 - RNA, 17 nt, Human
auaacauaaaucuguga

SEQ ID NO: 1673146 - RNA, 18 nt, Human
auaacauaaaucugugaa

SEQ ID NO: 1673147 - RNA, 19 nt, Human
auaacauaaaucugugaac

SEQ ID NO: 1673148 - RNA, 14 nt, Human
auaacauaaaucug

SEQ ID NO: 1673149 - RNA, 15 nt, Human
auaacauaaaucugu

SEQ ID NO: 1673150 - RNA, 18 nt, Human
auaaaggauuaaugucaa

SEQ ID NO: 1673151 - RNA, 15 nt, Human
auaaagcaggcagaa

SEQ ID NO: 1673152 - RNA, 18 nt, Human
auaaagcuguguggcagu

SEQ ID NO: 1673153 - RNA, 12 nt, Human
auaaagacaccu

SEQ ID NO: 1673154 - RNA, 13 nt, Human
auaaagcagcguu

SEQ ID NO: 1673155 - RNA, 20 nt, Human
auaaagcagcguuucuauga

SEQ ID NO: 1673156 - RNA, 19 nt, Human
auaaagcagcguuucuaug

SEQ ID NO: 1673157 - RNA, 18 nt, Human
auaaagcagcguuucuau

SEQ ID NO: 1673158 - RNA, 14 nt, Human
auaaagcagcguuu

SEQ ID NO: 1673159 - RNA, 11 nt, Human
auaaaacuuuu

SEQ ID NO: 1673160 - RNA, 15 nt, Human
auaaaacuuuuuaaa

SEQ ID NO: 1673161 - RNA, 20 nt, Human
auaaacuuuuuucuuacugu

SEQ ID NO: 1673162 - RNA, 24 nt, Human
auaaacuuuaccuuuuuuauacau

SEQ ID NO: 1673163 - RNA, 21 nt, Human
auaaacuuuaccuuuuuuaua

SEQ ID NO: 1673164 - RNA, 17 nt, Human
auaaaacuuuuuaaaau

SEQ ID NO: 1673165 - RNA, 12 nt, Human
auacccaccccc

SEQ ID NO: 1673166 - RNA, 21 nt, Human
auaccuacauguauuuguuug

SEQ ID NO: 1673167 - RNA, 11 nt, Human
auacccacccc

SEQ ID NO: 1673168 - RNA, 18 nt, Human
auaccugucccccugaca

SEQ ID NO: 1673169 - RNA, 16 nt, Human
auaaggaaaaguuuaa

SEQ ID NO: 1673170 - RNA, 15 nt, Human
auaaggaaaaguuua

SEQ ID NO: 1673171 - RNA, 21 nt, Human
auaaugcgugcauaccacuuu

SEQ ID NO: 1673172 - RNA, 20 nt, Human
auacaccacuacauucuguu

SEQ ID NO: 1673173 - RNA, 19 nt, Human
auacaccacuacauucugu

SEQ ID NO: 1673174 - RNA, 21 nt, Human
auacaccacuacauucuguua

SEQ ID NO: 1673175 - RNA, 17 nt, Human
auacacacucaaaucaa

SEQ ID NO: 1673176 - RNA, 18 nt, Human
auacacacucaaaucaag

SEQ ID NO: 1673177 - RNA, 20 nt, Human
auacacacucaaaucaagaa

SEQ ID NO: 1673178 - RNA, 18 nt, Human
auacaccacuacauucug

SEQ ID NO: 1673179 - RNA, 15 nt, Human
auaauguaagcucua

SEQ ID NO: 1673180 - RNA, 23 nt, Human
auaauguuucaaacauauauaac

SEQ ID NO: 1673181 - RNA, 15 nt, Human
auaauuaacauguua

SEQ ID NO: 1673182 - RNA, 17 nt, Human
auaauuaacauguuaaa

SEQ ID NO: 1673183 - RNA, 16 nt, Human
auaucaaauauauuca

SEQ ID NO: 1673184 - RNA, 19 nt, Human
auauauuuuuuucugaaau

SEQ ID NO: 1673185 - RNA, 15 nt, Human
auaucaauuuaaaaa

SEQ ID NO: 1673186 - RNA, 22 nt, Human
auaucaucaguauugaagcauu

SEQ ID NO: 1673187 - RNA, 16 nt, Human
auaugcuauuucuaua

SEQ ID NO: 1673188 - RNA, 18 nt, Human
auaugcuauuucuauauu

SEQ ID NO: 1673189 - RNA, 19 nt, Human
auaugcuauuucuauauuu

SEQ ID NO: 1673190 - RNA, 21 nt, Human
auaugcuauuucuauauuuuc

SEQ ID NO: 1673191 - RNA, 15 nt, Human
auaugcuauuucuau

SEQ ID NO: 1673192 - RNA, 22 nt, Human
auauuaccacagacauacuaac

SEQ ID NO: 1673193 - RNA, 22 nt, Human
auaugcuauuucuauauuuuca

SEQ ID NO: 1673194 - RNA, 23 nt, Human
auaugcuauuucuauauuuucau

SEQ ID NO: 1673195 - RNA, 20 nt, Human
auaugcuucuguuuuauaau

SEQ ID NO: 1673196 - RNA, 22 nt, Human
auaugcuucuguuuuauaauuu

SEQ ID NO: 1673197 - RNA, 14 nt, Human
auauuauuuuaugu

SEQ ID NO: 1673198 - RNA, 18 nt, Human
auauuuacuaaaauggac

SEQ ID NO: 1673199 - RNA, 20 nt, Human
auauuuacuaaaauggacug

SEQ ID NO: 1673200 - RNA, 19 nt, Human
auauuuacuucuuauacau

SEQ ID NO: 1673201 - RNA, 13 nt, Human
auauuuauuuuaa

SEQ ID NO: 1673202 - RNA, 23 nt, Human
auauuaugaagcuuuuaugugaa

SEQ ID NO: 1673203 - RNA, 15 nt, Human
auagccaaggccaaa

SEQ ID NO: 1673204 - RNA, 21 nt, Human
auagccaaggccaaaggaagc

SEQ ID NO: 1673205 - RNA, 21 nt, Human
auagguauaaguggugugugu

SEQ ID NO: 1673206 - RNA, 14 nt, Human
auaggugcuacaaa

SEQ ID NO: 1673207 - RNA, 23 nt, Human
auaggugcuacaaaaacacagca

SEQ ID NO: 1673208 - RNA, 15 nt, Human
auaggugcuacaaaa

SEQ ID NO: 1673209 - RNA, 21 nt, Human
auaggugcuacaaaaacacag

SEQ ID NO: 1673210 - RNA, 14 nt, Human
auagguuuggacaa

SEQ ID NO: 1673211 - RNA, 18 nt, Human
auagguuuggacaaaaug

SEQ ID NO: 1673212 - RNA, 15 nt, Human
auagguuuaauaauu

SEQ ID NO: 1673213 - RNA, 17 nt, Human
auaguaugguggcuggg

SEQ ID NO: 1673214 - RNA, 18 nt, Human
auaguaugguggcugggu

SEQ ID NO: 1673215 - RNA, 14 nt, Human
auagucaaauugug

SEQ ID NO: 1673216 - RNA, 23 nt, Human
augaaguuuuuuuuauacaggau

SEQ ID NO: 1673217 - RNA, 21 nt, Human
augaccuuucaauaggaaaaa

SEQ ID NO: 1673218 - RNA, 22 nt, Human
augaccuuucaauaggaaaaac

SEQ ID NO: 1673219 - RNA, 23 nt, Human
augaccuuucaauaggaaaaacu

SEQ ID NO: 1673220 - RNA, 19 nt, Human
augaaguuuuuuuuauaca

SEQ ID NO: 1673221 - RNA, 22 nt, Human
augaagcuuuuaugugaaacau

SEQ ID NO: 1673222 - RNA, 13 nt, Human
augaaagacugua

SEQ ID NO: 1673223 - RNA, 16 nt, Human
augaaagacuguacaa

SEQ ID NO: 1673224 - RNA, 17 nt, Human
augaaagacuguacaaa

SEQ ID NO: 1673225 - RNA, 19 nt, Human
augaaagacuguacaaagu

SEQ ID NO: 1673226 - RNA, 14 nt, Human
aucuauauuuuaca

SEQ ID NO: 1673227 - RNA, 17 nt, Human
aucuauauuuuacauaa

SEQ ID NO: 1673228 - RNA, 21 nt, Human
aucuauauuuuacauaaauuu

SEQ ID NO: 1673229 - RNA, 14 nt, Human
aucucggcucacug

SEQ ID NO: 1673230 - RNA, 15 nt, Human
aucucggcucacugc

SEQ ID NO: 1673231 - RNA, 16 nt, Human
aucucggcucacugca

SEQ ID NO: 1673232 - RNA, 17 nt, Human
aucucugcuuuggaaau

SEQ ID NO: 1673233 - RNA, 15 nt, Human
aucuggacuccucug

SEQ ID NO: 1673234 - RNA, 16 nt, Human
aucuggacuccucugu

SEQ ID NO: 1673235 - RNA, 17 nt, Human
aucuggacuccucuguc

SEQ ID NO: 1673236 - RNA, 18 nt, Human
aucuggacuccucugucc

SEQ ID NO: 1673237 - RNA, 19 nt, Human
aucuggacuccucugucca

SEQ ID NO: 1673238 - RNA, 22 nt, Human
aucuggacuccucuguccaggc

SEQ ID NO: 1673239 - RNA, 22 nt, Human
aucugcuuuuuaaagaaugcuc

SEQ ID NO: 1673240 - RNA, 18 nt, Human
aucuugaauaauguaaga

SEQ ID NO: 1673241 - RNA, 17 nt, Human
aucuugaauuguaagga

SEQ ID NO: 1673242 - RNA, 18 nt, Human
aucuugaagacuuuucuu

SEQ ID NO: 1673243 - RNA, 14 nt, Human
aucuucuuuauaau

SEQ ID NO: 1673244 - RNA, 16 nt, Human
auccagaaagaaaacu

SEQ ID NO: 1673245 - RNA, 18 nt, Human
auccagaaagaaaacuug

SEQ ID NO: 1673246 - RNA, 15 nt, Human
auccagacccggcug

SEQ ID NO: 1673247 - RNA, 14 nt, Human
aucccauuuaaaaa

SEQ ID NO: 1673248 - RNA, 13 nt, Human
auccccaagccug

SEQ ID NO: 1673249 - RNA, 15 nt, Human
aucccauuuaaaaaa

SEQ ID NO: 1673250 - RNA, 16 nt, Human
auccccaagccuggca

SEQ ID NO: 1673251 - RNA, 15 nt, Human
auccccuguagagug

SEQ ID NO: 1673252 - RNA, 11 nt, Human
auccuccaggu

SEQ ID NO: 1673253 - RNA, 23 nt, Human
auccuccaggugcacaagcucca

SEQ ID NO: 1673254 - RNA, 13 nt, Human
auccuccaggugc

SEQ ID NO: 1673255 - RNA, 15 nt, Human
auccucccaccucag

SEQ ID NO: 1673256 - RNA, 12 nt, Human
auccucccaggc

SEQ ID NO: 1673257 - RNA, 20 nt, Human
auccucccaccucagccucc

SEQ ID NO: 1673258 - RNA, 18 nt, Human
auccucccaccucagccu

SEQ ID NO: 1673259 - RNA, 19 nt, Human
auccucccaccucagccuc

SEQ ID NO: 1673260 - RNA, 21 nt, Human
aucacagccucugaaaaccaa

SEQ ID NO: 1673261 - RNA, 15 nt, Human
aucacauguggacuu

SEQ ID NO: 1673262 - RNA, 18 nt, Human
aucaccaacgucugugcc

SEQ ID NO: 1673263 - RNA, 19 nt, Human
aucaccaacgucugugcca

SEQ ID NO: 1673264 - RNA, 20 nt, Human
aucaccaacgucugugccau

SEQ ID NO: 1673265 - RNA, 17 nt, Human
auauuuauuuuaauaau

SEQ ID NO: 1673266 - RNA, 14 nt, Human
auauuuauuuuaau

SEQ ID NO: 1673267 - RNA, 15 nt, Human
auauuuauuuuaaua

SEQ ID NO: 1673268 - RNA, 23 nt, Human
aucagcacgauuucuguuuagau

SEQ ID NO: 1673269 - RNA, 20 nt, Human
aucagcacgauuucuguuua

SEQ ID NO: 1673270 - RNA, 19 nt, Human
aucagcacgauuucuguuu

SEQ ID NO: 1673271 - RNA, 14 nt, Human
aucaccgaaaacgu

SEQ ID NO: 1673272 - RNA, 19 nt, Human
aucaccgaaaacguggcug

SEQ ID NO: 1673273 - RNA, 21 nt, Human
aucaccgaaaacguggcugcu

SEQ ID NO: 1673274 - RNA, 20 nt, Human
aucagccugcuccagcuguu

SEQ ID NO: 1673275 - RNA, 19 nt, Human
aucagccugcuccagcugu

SEQ ID NO: 1673276 - RNA, 17 nt, Human
aucagccugcuccagcu

SEQ ID NO: 1673277 - RNA, 18 nt, Human
aucagccugcuccagcug

SEQ ID NO: 1673278 - RNA, 21 nt, Human
aucagcugcugaaacaacaaa

SEQ ID NO: 1673279 - RNA, 16 nt, Human
aucaugugaaaucauu

SEQ ID NO: 1673280 - RNA, 15 nt, Human
aucaugugaaaucau

SEQ ID NO: 1673281 - RNA, 22 nt, Human
aucagcugcugaaacaacaaau

SEQ ID NO: 1673282 - RNA, 23 nt, Human
aucagcugcugaaacaacaaaua

SEQ ID NO: 1673283 - RNA, 19 nt, Human
auggcugugccucugccug

SEQ ID NO: 1673284 - RNA, 20 nt, Human
auggcugugccucugccugu

SEQ ID NO: 1673285 - RNA, 14 nt, Human
augcuuguacauaa

SEQ ID NO: 1673286 - RNA, 13 nt, Human
augcuuguacaua

SEQ ID NO: 1673287 - RNA, 12 nt, Human
augcuuguacau

SEQ ID NO: 1673288 - RNA, 12 nt, Human
augcugcccugu

SEQ ID NO: 1673289 - RNA, 22 nt, Human
auggaggaaaaccaagccgugg

SEQ ID NO: 1673290 - RNA, 16 nt, Human
auggaggaaaaccaag

SEQ ID NO: 1673291 - RNA, 15 nt, Human
auggauuuccagcca

SEQ ID NO: 1673292 - RNA, 16 nt, Human
augcucuuuacuucau

SEQ ID NO: 1673293 - RNA, 11 nt, Human
augcugcccug

SEQ ID NO: 1673294 - RNA, 15 nt, Human
augcacaaacagagg

SEQ ID NO: 1673295 - RNA, 24 nt, Human
augauguuuuccaugaguccccug

SEQ ID NO: 1673296 - RNA, 16 nt, Human
augaugccaugaggaa

SEQ ID NO: 1673297 - RNA, 17 nt, Human
augaugccaugaggaac

SEQ ID NO: 1673298 - RNA, 16 nt, Human
augcauauuauuuuau

SEQ ID NO: 1673299 - RNA, 20 nt, Human
augcauauuauuuuauguug

SEQ ID NO: 1673300 - RNA, 20 nt, Human
augcaugaaguaauaugcac

SEQ ID NO: 1673301 - RNA, 16 nt, Human
augcaugaaguaauau

SEQ ID NO: 1673302 - RNA, 19 nt, Human
augccucucucaggccaaa

SEQ ID NO: 1673303 - RNA, 16 nt, Human
augcacagaguuguua

SEQ ID NO: 1673304 - RNA, 16 nt, Human
augcacaaacagaggc

SEQ ID NO: 1673305 - RNA, 17 nt, Human
augcacaaacagaggcc

SEQ ID NO: 1673306 - RNA, 18 nt, Human
augcacagaguuguuaca

SEQ ID NO: 1673307 - RNA, 17 nt, Human
augcacagaguuguuac

SEQ ID NO: 1673308 - RNA, 16 nt, Human
auguucucucuucucc

SEQ ID NO: 1673309 - RNA, 11 nt, Human
auguucuggga

SEQ ID NO: 1673310 - RNA, 12 nt, Human
auguucugggac

SEQ ID NO: 1673311 - RNA, 13 nt, Human
augugugaaguga

SEQ ID NO: 1673312 - RNA, 20 nt, Human
augugggcuaguugggcuuc

SEQ ID NO: 1673313 - RNA, 18 nt, Human
augugggcagugauguca

SEQ ID NO: 1673314 - RNA, 17 nt, Human
auguucuaagaagugaa

SEQ ID NO: 1673315 - RNA, 22 nt, Human
auguuugccucugccucugaca

SEQ ID NO: 1673316 - RNA, 19 nt, Human
auguuugccucugccucug

SEQ ID NO: 1673317 - RNA, 13 nt, Human
auguucugggaca

SEQ ID NO: 1673318 - RNA, 11 nt, Human
augugaacagu

SEQ ID NO: 1673319 - RNA, 21 nt, Human
augugaacaguuguguuugaa

SEQ ID NO: 1673320 - RNA, 23 nt, Human
augugaacaguuguguuugaagc

SEQ ID NO: 1673321 - RNA, 15 nt, Human
augugaaacauguuu

SEQ ID NO: 1673322 - RNA, 14 nt, Human
augugaaaucauuc

SEQ ID NO: 1673323 - RNA, 22 nt, Human
augugaaacuggauuaaacuua

SEQ ID NO: 1673324 - RNA, 13 nt, Human
augucuuccugga

SEQ ID NO: 1673325 - RNA, 21 nt, Human
augucuucauaccuacaugua

SEQ ID NO: 1673326 - RNA, 22 nt, Human
augucuucauaccuacauguau

SEQ ID NO: 1673327 - RNA, 14 nt, Human
augucuuuucuugc

SEQ ID NO: 1673328 - RNA, 20 nt, Human
augguccgugcuaaggacuu

SEQ ID NO: 1673329 - RNA, 21 nt, Human
augguccgugcuaaggacuug

SEQ ID NO: 1673330 - RNA, 19 nt, Human
auggucaccaaaucagcug

SEQ ID NO: 1673331 - RNA, 15 nt, Human
auggucggaaaacau

SEQ ID NO: 1673332 - RNA, 14 nt, Human
auguaagggaaacu

SEQ ID NO: 1673333 - RNA, 16 nt, Human
auguaagggaaacugc

SEQ ID NO: 1673334 - RNA, 15 nt, Human
auguaauuaaguacu

SEQ ID NO: 1673335 - RNA, 17 nt, Human
auguaauuaaguacuau

SEQ ID NO: 1673336 - RNA, 19 nt, Human
auguaagggaaacugccag

SEQ ID NO: 1673337 - RNA, 23 nt, Human
auguaauuaaguacuauguauca

SEQ ID NO: 1673338 - RNA, 14 nt, Human
auguauuuguuugc

SEQ ID NO: 1673339 - RNA, 20 nt, Human
agcuucuguugcugccucau

SEQ ID NO: 1673340 - RNA, 21 nt, Human
agcuuuucccuuuuuuuaagu

SEQ ID NO: 1673341 - RNA, 20 nt, Human
aggaauccagacccggcugc

SEQ ID NO: 1673342 - RNA, 21 nt, Human
aggaaucaugugccaagcaga

SEQ ID NO: 1673343 - RNA, 17 nt, Human
aggaauccagacccggc

SEQ ID NO: 1673344 - RNA, 23 nt, Human
aggaugcuuguacauaaugcgug

SEQ ID NO: 1673345 - RNA, 21 nt, Human
aggaugcuuguacauaaugcg

SEQ ID NO: 1673346 - RNA, 13 nt, Human
aggaccucaggug

SEQ ID NO: 1673347 - RNA, 20 nt, Human
aggauuaaauaauguaaaua

SEQ ID NO: 1673348 - RNA, 14 nt, Human
aggauuauuggaaa

SEQ ID NO: 1673349 - RNA, 14 nt, Human
aggauuaaauaaug

SEQ ID NO: 1673350 - RNA, 18 nt, Human
aggauguucugggacaca

SEQ ID NO: 1673351 - RNA, 22 nt, Human
aggauguacaaggacagccccu

SEQ ID NO: 1673352 - RNA, 22 nt, Human
aggauguucuagcauggcugcc

SEQ ID NO: 1673353 - RNA, 15 nt, Human
aggauguucugggac

SEQ ID NO: 1673354 - RNA, 16 nt, Human
aggauguucugggaca

SEQ ID NO: 1673355 - RNA, 23 nt, Human
aggaugguucccuugaugaagaa

SEQ ID NO: 1673356 - RNA, 19 nt, Human
agcuucuguugcugccuca

SEQ ID NO: 1673357 - RNA, 23 nt, Human
agcugcgguccacccaggagccc

SEQ ID NO: 1673358 - RNA, 23 nt, Human
agcugagauuauaggcaccuacc

SEQ ID NO: 1673359 - RNA, 12 nt, Human
agcuccuucugu

SEQ ID NO: 1673360 - RNA, 13 nt, Human
agcuccuucuguc

SEQ ID NO: 1673361 - RNA, 20 nt, Human
agcuccgcuuucuacccagc

SEQ ID NO: 1673362 - RNA, 21 nt, Human
agcuccgcuuucuacccagcg

SEQ ID NO: 1673363 - RNA, 23 nt, Human
agcuccgcuuucuacccagcgag

SEQ ID NO: 1673364 - RNA, 22 nt, Human
agcuccccucggagaagagcug

SEQ ID NO: 1673365 - RNA, 19 nt, Human
aggguaucaggugcugcca

SEQ ID NO: 1673366 - RNA, 21 nt, Human
aggguaucaggugcugccauc

SEQ ID NO: 1673367 - RNA, 15 nt, Human
aggguaucuggugac

SEQ ID NO: 1673368 - RNA, 19 nt, Human
aggggccucuuaugggcug

SEQ ID NO: 1673369 - RNA, 20 nt, Human
aggggccucuuaugggcugg

SEQ ID NO: 1673370 - RNA, 21 nt, Human
aggggccucuuaugggcuggg

SEQ ID NO: 1673371 - RNA, 12 nt, Human
aggguccugggg

SEQ ID NO: 1673372 - RNA, 15 nt, Human
aggguccuggggaac

SEQ ID NO: 1673373 - RNA, 21 nt, Human
aggguccuggggaaccugacc

SEQ ID NO: 1673374 - RNA, 23 nt, Human
aggguccuggggaaccugacccc

SEQ ID NO: 1673375 - RNA, 11 nt, Human
agggucccugg

SEQ ID NO: 1673376 - RNA, 21 nt, Human
agguaaucgaccugccucggc

SEQ ID NO: 1673377 - RNA, 23 nt, Human
agguaaaucagacuaugaaguuu

SEQ ID NO: 1673378 - RNA, 17 nt, Human
agguacaaccuguucug

SEQ ID NO: 1673379 - RNA, 12 nt, Human
aggucccuaaua

SEQ ID NO: 1673380 - RNA, 11 nt, Human
aggucccuaau

SEQ ID NO: 1673381 - RNA, 18 nt, Human
agguaaaucagacuauga

SEQ ID NO: 1673382 - RNA, 20 nt, Human
agguaaaagcaucacaugaa

SEQ ID NO: 1673383 - RNA, 13 nt, Human
aggucccuaauaa

SEQ ID NO: 1673384 - RNA, 15 nt, Human
aggucccuaauaaag

SEQ ID NO: 1673385 - RNA, 16 nt, Human
aggucccuaauaaagc

SEQ ID NO: 1673386 - RNA, 18 nt, Human
aggucuguucuuuccaaa

SEQ ID NO: 1673387 - RNA, 23 nt, Human
aggucuguucuuuccaaaguaca

SEQ ID NO: 1673388 - RNA, 22 nt, Human
aggucuguucuuuccaaaguac

SEQ ID NO: 1673389 - RNA, 18 nt, Human
aggugcuacaaaaacaca

SEQ ID NO: 1673390 - RNA, 19 nt, Human
aggugcuacaaaaacacag

SEQ ID NO: 1673391 - RNA, 20 nt, Human
aggugcuacaaaaacacagc

SEQ ID NO: 1673392 - RNA, 21 nt, Human
aggugcuacaaaaacacagca

SEQ ID NO: 1673393 - RNA, 22 nt, Human
aggugcuacaaaaacacagcaa

SEQ ID NO: 1673394 - RNA, 15 nt, Human
agguucaaagauauu

SEQ ID NO: 1673395 - RNA, 14 nt, Human
agguucaaagauau

SEQ ID NO: 1673396 - RNA, 22 nt, Human
agguucccuuugacgccauccc

SEQ ID NO: 1673397 - RNA, 13 nt, Human
agguucccuuuga

SEQ ID NO: 1673398 - RNA, 23 nt, Human
agguucccuuugacgccauccca

SEQ ID NO: 1673399 - RNA, 23 nt, Human
aggugcuaggaacacuccuucac

SEQ ID NO: 1673400 - RNA, 19 nt, Human
aggugcuaggaacacuccu

SEQ ID NO: 1673401 - RNA, 22 nt, Human
aggugcuaggaacacuccuuca

SEQ ID NO: 1673402 - RNA, 23 nt, Human
aggugcuacaaaaacacagcaag

SEQ ID NO: 1673403 - RNA, 24 nt, Human
aggugcuacaaaaacacagcaagg

SEQ ID NO: 1673404 - RNA, 13 nt, Human
aggcccuuccucu

SEQ ID NO: 1673405 - RNA, 15 nt, Human
aggcccuuccucucc

SEQ ID NO: 1673406 - RNA, 17 nt, Human
aggcccuuccucuccac

SEQ ID NO: 1673407 - RNA, 18 nt, Human
aggcccuuccucuccacu

SEQ ID NO: 1673408 - RNA, 20 nt, Human
aggcccuucucuccagcccc

SEQ ID NO: 1673409 - RNA, 21 nt, Human
aggcccuucucuccagccccu

SEQ ID NO: 1673410 - RNA, 19 nt, Human
aggcccuuccucuccacug

SEQ ID NO: 1673411 - RNA, 22 nt, Human
aggcccuucucuccagccccug

SEQ ID NO: 1673412 - RNA, 23 nt, Human
aggcccuucucuccagccccugg

SEQ ID NO: 1673413 - RNA, 21 nt, Human
aggcgugagccaccgugccug

SEQ ID NO: 1673414 - RNA, 23 nt, Human
aggcuacuguaaggcaaucaugg

SEQ ID NO: 1673415 - RNA, 17 nt, Human
aggcuacugucagcucc

SEQ ID NO: 1673416 - RNA, 21 nt, Human
aggcuagaaccaccugccuau

SEQ ID NO: 1673417 - RNA, 17 nt, Human
agggacgcuacccggga

SEQ ID NO: 1673418 - RNA, 21 nt, Human
aggcugucaauuacaggaagu

SEQ ID NO: 1673419 - RNA, 22 nt, Human
agggacagaggggguggccucc

SEQ ID NO: 1673420 - RNA, 23 nt, Human
agggacagaggggguggccuccc

SEQ ID NO: 1673421 - RNA, 20 nt, Human
aggcugucaauuacaggaag

SEQ ID NO: 1673422 - RNA, 13 nt, Human
aggcuguauccca

SEQ ID NO: 1673423 - RNA, 18 nt, Human
aggcuguaucccaugagc

SEQ ID NO: 1673424 - RNA, 15 nt, Human
aggcuagauguaugu

SEQ ID NO: 1673425 - RNA, 16 nt, Human
aggcuagauguaugua

SEQ ID NO: 1673426 - RNA, 17 nt, Human
aggcuagauguauguac

SEQ ID NO: 1673427 - RNA, 14 nt, Human
agauggcugugccu

SEQ ID NO: 1673428 - RNA, 19 nt, Human
agauauaugcucugcaugu

SEQ ID NO: 1673429 - RNA, 23 nt, Human
agaguggcuccucccggugccca

SEQ ID NO: 1673430 - RNA, 19 nt, Human
agaguggggauaugauuua

SEQ ID NO: 1673431 - RNA, 19 nt, Human
agaguggcuccucccggug

SEQ ID NO: 1673432 - RNA, 23 nt, Human
agaggguggugaccucugccuga

SEQ ID NO: 1673433 - RNA, 11 nt, Human
agagugggagc

SEQ ID NO: 1673434 - RNA, 13 nt, Human
agaguguugaaac

SEQ ID NO: 1673435 - RNA, 17 nt, Human
agaguguggcaaaauaa

SEQ ID NO: 1673436 - RNA, 14 nt, Human
agagugugccugaa

SEQ ID NO: 1673437 - RNA, 12 nt, Human
agagggcacaga

SEQ ID NO: 1673438 - RNA, 20 nt, Human
agaggguggugaccucugcc

SEQ ID NO: 1673439 - RNA, 22 nt, Human
agaggguggugaccucugccug

SEQ ID NO: 1673440 - RNA, 19 nt, Human
agaggguggugaccucugc

SEQ ID NO: 1673441 - RNA, 14 nt, Human
agaggacuuuucuu

SEQ ID NO: 1673442 - RNA, 15 nt, Human
agaggagagaggacc

SEQ ID NO: 1673443 - RNA, 16 nt, Human
agaggagagaggaccc

SEQ ID NO: 1673444 - RNA, 16 nt, Human
agaggaaggagaggag

SEQ ID NO: 1673445 - RNA, 15 nt, Human
agagcccaggccucc

SEQ ID NO: 1673446 - RNA, 13 nt, Human
agagcccaggccu

SEQ ID NO: 1673447 - RNA, 14 nt, Human
agagcccaggccuc

SEQ ID NO: 1673448 - RNA, 15 nt, Human
agacagauacuccuc

SEQ ID NO: 1673449 - RNA, 22 nt, Human
agacagauacuccuccaagguu

SEQ ID NO: 1673450 - RNA, 21 nt, Human
agacagauacuccuccaaggu

SEQ ID NO: 1673451 - RNA, 16 nt, Human
agacagcccgggcucu

SEQ ID NO: 1673452 - RNA, 14 nt, Human
agacagcccgggcu

SEQ ID NO: 1673453 - RNA, 15 nt, Human
agacagcccgggcuc

SEQ ID NO: 1673454 - RNA, 22 nt, Human
agacgcugugcugcccugccca

SEQ ID NO: 1673455 - RNA, 18 nt, Human
agacggagucccaccuug

SEQ ID NO: 1673456 - RNA, 12 nt, Human
agacagcugccu

SEQ ID NO: 1673457 - RNA, 11 nt, Human
agacagcucuu

SEQ ID NO: 1673458 - RNA, 12 nt, Human
agacagcucuua

SEQ ID NO: 1673459 - RNA, 21 nt, Human
agacgcugugcugcccugccc

SEQ ID NO: 1673460 - RNA, 17 nt, Human
agagcccacgcccccac

SEQ ID NO: 1673461 - RNA, 16 nt, Human
agagcccacgccccca

SEQ ID NO: 1673462 - RNA, 19 nt, Human
agagcccaccuuggcucaa

SEQ ID NO: 1673463 - RNA, 13 nt, Human
agagcccacgccc

SEQ ID NO: 1673464 - RNA, 22 nt, Human
agagaggguggugaccucugcc

SEQ ID NO: 1673465 - RNA, 20 nt, Human
agagaggguggugaccucug

SEQ ID NO: 1673466 - RNA, 21 nt, Human
agagaggguggugaccucugc

SEQ ID NO: 1673467 - RNA, 17 nt, Human
agagaacuuccagaucc

SEQ ID NO: 1673468 - RNA, 19 nt, Human
agacuggaagcacagcuuc

SEQ ID NO: 1673469 - RNA, 17 nt, Human
agacuggaagcacagcu

SEQ ID NO: 1673470 - RNA, 21 nt, Human
agacugcauuauauuuauuac

SEQ ID NO: 1673471 - RNA, 13 nt, Human
agccccagugccc

SEQ ID NO: 1673472 - RNA, 14 nt, Human
agccccagugccca

SEQ ID NO: 1673473 - RNA, 15 nt, Human
agccccagugcccac

SEQ ID NO: 1673474 - RNA, 17 nt, Human
agcccucacccuggggc

SEQ ID NO: 1673475 - RNA, 13 nt, Human
agccccauucugc

SEQ ID NO: 1673476 - RNA, 16 nt, Human
agccccauucugccug

SEQ ID NO: 1673477 - RNA, 18 nt, Human
agccagcaggcucucagg

SEQ ID NO: 1673478 - RNA, 19 nt, Human
agccagcaggcucucaggc

SEQ ID NO: 1673479 - RNA, 20 nt, Human
agccagcaggcucucaggcc

SEQ ID NO: 1673480 - RNA, 13 nt, Human
agccgcuggggcc

SEQ ID NO: 1673481 - RNA, 21 nt, Human
agccgccaugcuccuggccca

SEQ ID NO: 1673482 - RNA, 22 nt, Human
agccucccgaguagcugggacu

SEQ ID NO: 1673483 - RNA, 20 nt, Human
agccucccgaguagcuggga

SEQ ID NO: 1673484 - RNA, 18 nt, Human
agccucccgaguagcugg

SEQ ID NO: 1673485 - RNA, 19 nt, Human
agccucccgaguagcuggg

SEQ ID NO: 1673486 - RNA, 14 nt, Human
agccuccuccagcc

SEQ ID NO: 1673487 - RNA, 22 nt, Human
agccucccacgacugcccggca

SEQ ID NO: 1673488 - RNA, 17 nt, Human
agccgugccuucagcuc

SEQ ID NO: 1673489 - RNA, 21 nt, Human
agccucccaaagugcugggau

SEQ ID NO: 1673490 - RNA, 15 nt, Human
agccgugccuucagc

SEQ ID NO: 1673491 - RNA, 16 nt, Human
agccgugccuucagcu

SEQ ID NO: 1673492 - RNA, 21 nt, Human
agccgggcgugguggugagug

SEQ ID NO: 1673493 - RNA, 23 nt, Human
agccaagugugguagagugugcc

SEQ ID NO: 1673494 - RNA, 23 nt, Human
agcaugccuggauggggcugcac

SEQ ID NO: 1673495 - RNA, 22 nt, Human
agcauccuggcacccggccccu

SEQ ID NO: 1673496 - RNA, 23 nt, Human
agcauccuggcacccggccccug

SEQ ID NO: 1673497 - RNA, 16 nt, Human
agcaguugaaaagacu

SEQ ID NO: 1673498 - RNA, 23 nt, Human
agcaguucagagcugcccucucc

SEQ ID NO: 1673499 - RNA, 13 nt, Human
agcaguugaaaag

SEQ ID NO: 1673500 - RNA, 18 nt, Human
agcagcguuucuaugaca

SEQ ID NO: 1673501 - RNA, 13 nt, Human
agcagcguuucua

SEQ ID NO: 1673502 - RNA, 19 nt, Human
agcagugcaugcugucccu

SEQ ID NO: 1673503 - RNA, 20 nt, Human
agcagugcaugcugucccuu

SEQ ID NO: 1673504 - RNA, 23 nt, Human
agcacacuugacaucaacugcau

SEQ ID NO: 1673505 - RNA, 17 nt, Human
agcacagacccugcccu

SEQ ID NO: 1673506 - RNA, 20 nt, Human
agcacagacccugcccugug

SEQ ID NO: 1673507 - RNA, 18 nt, Human
agcacagacccugcccug

SEQ ID NO: 1673508 - RNA, 19 nt, Human
agcacagacccugcccugu

SEQ ID NO: 1673509 - RNA, 16 nt, Human
agcacugacuucuaag

SEQ ID NO: 1673510 - RNA, 17 nt, Human
aauccaagcaaauguga

SEQ ID NO: 1673511 - RNA, 18 nt, Human
aauccaagcaaaugugaa

SEQ ID NO: 1673512 - RNA, 21 nt, Human
aaugauuaugaauuacauuug

SEQ ID NO: 1673513 - RNA, 23 nt, Human
aaugauuaugaauuacauuugua

SEQ ID NO: 1673514 - RNA, 15 nt, Human
aaugauuaugaauua

SEQ ID NO: 1673515 - RNA, 23 nt, Human
aaugaagucucugaagugaaacu

SEQ ID NO: 1673516 - RNA, 14 nt, Human
aaugaagucucuga

SEQ ID NO: 1673517 - RNA, 16 nt, Human
aaugaagucucugaag

SEQ ID NO: 1673518 - RNA, 13 nt, Human
aaugaaauacugu

SEQ ID NO: 1673519 - RNA, 18 nt, Human
aaucucaaauuucuaaau

SEQ ID NO: 1673520 - RNA, 17 nt, Human
aaucucaaauuucuaaa

SEQ ID NO: 1673521 - RNA, 13 nt, Human
aauccagccugcu

SEQ ID NO: 1673522 - RNA, 16 nt, Human
aaucucaaauuucuaa

SEQ ID NO: 1673523 - RNA, 19 nt, Human
aauccagacccggcugcgu

SEQ ID NO: 1673524 - RNA, 15 nt, Human
aauccaaugaaauga

SEQ ID NO: 1673525 - RNA, 15 nt, Human
aaguugccuaaaucc

SEQ ID NO: 1673526 - RNA, 16 nt, Human
aaguugccuaaaucca

SEQ ID NO: 1673527 - RNA, 17 nt, Human
aaguugccuaaauccau

SEQ ID NO: 1673528 - RNA, 18 nt, Human
aaguugccuaaauccauu

SEQ ID NO: 1673529 - RNA, 19 nt, Human
aaguugccuaaauccauuu

SEQ ID NO: 1673530 - RNA, 13 nt, Human
aauacucuuauau

SEQ ID NO: 1673531 - RNA, 20 nt, Human
aauacucuacccucuuagaa

SEQ ID NO: 1673532 - RNA, 22 nt, Human
aauacucuacccucuuagaaaa

SEQ ID NO: 1673533 - RNA, 21 nt, Human
aauauuagugaccucagcuuu

SEQ ID NO: 1673534 - RNA, 12 nt, Human
aauauuaaagcc

SEQ ID NO: 1673535 - RNA, 15 nt, Human
aaucaccgaaaacgu

SEQ ID NO: 1673536 - RNA, 19 nt, Human
aaucacauucgaguguuuc

SEQ ID NO: 1673537 - RNA, 23 nt, Human
aaucaaguuggcuucuaaucaaa

SEQ ID NO: 1673538 - RNA, 14 nt, Human
aaucaccgaaaacg

SEQ ID NO: 1673539 - RNA, 13 nt, Human
aauagacaauuua

SEQ ID NO: 1673540 - RNA, 22 nt, Human
aauguuuuuuuuuaaagacuuu

SEQ ID NO: 1673541 - RNA, 15 nt, Human
aauguuuuuuuuuaa

SEQ ID NO: 1673542 - RNA, 20 nt, Human
aauguuuuuuuuuaaagacu

SEQ ID NO: 1673543 - RNA, 23 nt, Human
aaugccuuacccucauguucuua

SEQ ID NO: 1673544 - RNA, 22 nt, Human
aaugcgcaggcuggcccugccc

SEQ ID NO: 1673545 - RNA, 18 nt, Human
aaugcgugcauaccacuu

SEQ ID NO: 1673546 - RNA, 19 nt, Human
aaugcgugcauaccacuuu

SEQ ID NO: 1673547 - RNA, 17 nt, Human
aaugugaaaagaaaaau

SEQ ID NO: 1673548 - RNA, 15 nt, Human
aaugugaaaagaaaa

SEQ ID NO: 1673549 - RNA, 15 nt, Human
aauguuugccucugc

SEQ ID NO: 1673550 - RNA, 16 nt, Human
aauguuugccucugcc

SEQ ID NO: 1673551 - RNA, 22 nt, Human
aauguuuacagauccccaagcc

SEQ ID NO: 1673552 - RNA, 23 nt, Human
aauguuucaaacauauauaacaa

SEQ ID NO: 1673553 - RNA, 23 nt, Human
aaugcuauaacuauguugauaaa

SEQ ID NO: 1673554 - RNA, 13 nt, Human
aaugguuaaaaga

SEQ ID NO: 1673555 - RNA, 15 nt, Human
aagucuccaaagucu

SEQ ID NO: 1673556 - RNA, 12 nt, Human
aagucuguuuua

SEQ ID NO: 1673557 - RNA, 15 nt, Human
aagucuguuuuauga

SEQ ID NO: 1673558 - RNA, 13 nt, Human
aagucuguuuuau

SEQ ID NO: 1673559 - RNA, 14 nt, Human
aagucuguuuuaug

SEQ ID NO: 1673560 - RNA, 12 nt, Human
aaguugccuaaa

SEQ ID NO: 1673561 - RNA, 12 nt, Human
aaguugaauuuu

SEQ ID NO: 1673562 - RNA, 21 nt, Human
aaguggaaaaauagccugccu

SEQ ID NO: 1673563 - RNA, 19 nt, Human
aaguggaaaaauagccugc

SEQ ID NO: 1673564 - RNA, 20 nt, Human
aaggugaggagcuugaaacc

SEQ ID NO: 1673565 - RNA, 19 nt, Human
aaguagaagucuuagaugu

SEQ ID NO: 1673566 - RNA, 20 nt, Human
aaguagaagucuuagaugua

SEQ ID NO: 1673567 - RNA, 17 nt, Human
aaguaucccuacuguaa

SEQ ID NO: 1673568 - RNA, 23 nt, Human
aaguaucccuacuguaauuugug

SEQ ID NO: 1673569 - RNA, 18 nt, Human
aaguaucccuacuguaau

SEQ ID NO: 1673570 - RNA, 21 nt, Human
aaguagaagucuuagauguau

SEQ ID NO: 1673571 - RNA, 21 nt, Human
aaguagggacuucugucuuca

SEQ ID NO: 1673572 - RNA, 14 nt, Human
aagucuccaaaguc

SEQ ID NO: 1673573 - RNA, 22 nt, Human
aaguccucuuuucugagaggac

SEQ ID NO: 1673574 - RNA, 18 nt, Human
aaguccucuuuucugaga

SEQ ID NO: 1673575 - RNA, 18 nt, Human
aaguccaagcauuuagau

SEQ ID NO: 1673576 - RNA, 15 nt, Human
aaguaucugacaucu

SEQ ID NO: 1673577 - RNA, 17 nt, Human
aaguccaagcauaccaa

SEQ ID NO: 1673578 - RNA, 19 nt, Human
aaggucauuuuuuuuaaga

SEQ ID NO: 1673579 - RNA, 18 nt, Human
aaggucauuuuuuuuaag

SEQ ID NO: 1673580 - RNA, 18 nt, Human
aagggacgcuacccggga

SEQ ID NO: 1673581 - RNA, 23 nt, Human
aagggaaacugccagcaacgcag

SEQ ID NO: 1673582 - RNA, 16 nt, Human
aagggaaacugccagc

SEQ ID NO: 1673583 - RNA, 17 nt, Human
aagggaaacugccagca

SEQ ID NO: 1673584 - RNA, 21 nt, Human
aagcgauucuucugcuucagc

SEQ ID NO: 1673585 - RNA, 13 nt, Human
aaggacagccccu

SEQ ID NO: 1673586 - RNA, 19 nt, Human
aaggacagccccuccucca

SEQ ID NO: 1673587 - RNA, 14 nt, Human
aaggacuucuuuaa

SEQ ID NO: 1673588 - RNA, 15 nt, Human
aaggacuucuuuaau

SEQ ID NO: 1673589 - RNA, 20 nt, Human
aaggacuucuuuaauuuugg

SEQ ID NO: 1673590 - RNA, 21 nt, Human
aaggacuucuuuaauuuugga

SEQ ID NO: 1673591 - RNA, 18 nt, Human
aagcuguguggcagucug

SEQ ID NO: 1673592 - RNA, 18 nt, Human
aagcuggucccacucagu

SEQ ID NO: 1673593 - RNA, 21 nt, Human
aagcuggucccacucagucca

SEQ ID NO: 1673594 - RNA, 15 nt, Human
aaggauguucuagca

SEQ ID NO: 1673595 - RNA, 15 nt, Human
aaggauugcuacugu

SEQ ID NO: 1673596 - RNA, 12 nt, Human
aaggcagggagg

SEQ ID NO: 1673597 - RNA, 20 nt, Human
aaggcagcucuaaaugucaa

SEQ ID NO: 1673598 - RNA, 13 nt, Human
aagauacugaaau

SEQ ID NO: 1673599 - RNA, 12 nt, Human
aagauaaaugug

SEQ ID NO: 1673600 - RNA, 13 nt, Human
aagauaaaugugc

SEQ ID NO: 1673601 - RNA, 14 nt, Human
aagauaaaugugcu

SEQ ID NO: 1673602 - RNA, 20 nt, Human
aagccagcaggcucucaggc

SEQ ID NO: 1673603 - RNA, 23 nt, Human
aagccagcaggcucucaggccag

SEQ ID NO: 1673604 - RNA, 22 nt, Human
aagcagcguuucuaugacacau

SEQ ID NO: 1673605 - RNA, 21 nt, Human
aagcagcguuucuaugacaca

SEQ ID NO: 1673606 - RNA, 20 nt, Human
aagcagcguuucuaugacac

SEQ ID NO: 1673607 - RNA, 17 nt, Human
aagcagcguuucuauga

SEQ ID NO: 1673608 - RNA, 14 nt, Human
aagcagcguuucua

SEQ ID NO: 1673609 - RNA, 19 nt, Human
aacagcuggugcccugcuu

SEQ ID NO: 1673610 - RNA, 20 nt, Human
aacagcuggugcccugcuuu

SEQ ID NO: 1673611 - RNA, 21 nt, Human
aacagcuggugcccugcuuuc

SEQ ID NO: 1673612 - RNA, 15 nt, Human
aacaucccuccuggg

SEQ ID NO: 1673613 - RNA, 13 nt, Human
aaccacgcuggac

SEQ ID NO: 1673614 - RNA, 15 nt, Human
aaccacuucagcuga

SEQ ID NO: 1673615 - RNA, 12 nt, Human
aaccagaucauu

SEQ ID NO: 1673616 - RNA, 15 nt, Human
aacccuauugguaaa

SEQ ID NO: 1673617 - RNA, 21 nt, Human
aacccuuggagccaauggaga

SEQ ID NO: 1673618 - RNA, 21 nt, Human
aaccgaacugauguaaguaaa

SEQ ID NO: 1673619 - RNA, 17 nt, Human
aaccuagggugauauua

SEQ ID NO: 1673620 - RNA, 16 nt, Human
aacacaucagcuugcc

SEQ ID NO: 1673621 - RNA, 18 nt, Human
aacaaauuuacagagaca

SEQ ID NO: 1673622 - RNA, 15 nt, Human
aaaugccuuuguacu

SEQ ID NO: 1673623 - RNA, 17 nt, Human
aaaucuuauaauuuaaa

SEQ ID NO: 1673624 - RNA, 22 nt, Human
aaauguuguucucuucuuuaaa

SEQ ID NO: 1673625 - RNA, 13 nt, Human
aaauuaaagcuga

SEQ ID NO: 1673626 - RNA, 17 nt, Human
aaauuaaagcugaaaac

SEQ ID NO: 1673627 - RNA, 13 nt, Human
aaauucuuucauu

SEQ ID NO: 1673628 - RNA, 21 nt, Human
aaauucuugcaaaguaucccu

SEQ ID NO: 1673629 - RNA, 13 nt, Human
aaauugcuccuug

SEQ ID NO: 1673630 - RNA, 14 nt, Human
aaauugcuccuuga

SEQ ID NO: 1673631 - RNA, 22 nt, Human
aaauugacacuuaaaaaugguu

SEQ ID NO: 1673632 - RNA, 19 nt, Human
aaauugacacuuaaaaaug

SEQ ID NO: 1673633 - RNA, 11 nt, Human
aacgcagcccu

SEQ ID NO: 1673634 - RNA, 14 nt, Human
aacggaugauuucu

SEQ ID NO: 1673635 - RNA, 15 nt, Human
aacggaugauuucua

SEQ ID NO: 1673636 - RNA, 16 nt, Human
aacggaugauuucuau

SEQ ID NO: 1673637 - RNA, 17 nt, Human
aacggaugauuucuaug

SEQ ID NO: 1673638 - RNA, 17 nt, Human
aacgaucagacagaucu

SEQ ID NO: 1673639 - RNA, 16 nt, Human
aacuuaaucuaaaugg

SEQ ID NO: 1673640 - RNA, 15 nt, Human
aacuuaaucuaaaug

SEQ ID NO: 1673641 - RNA, 18 nt, Human
aacuuaaucuaaauggaa

SEQ ID NO: 1673642 - RNA, 14 nt, Human
aacugauaaagaug

SEQ ID NO: 1673643 - RNA, 16 nt, Human
aacugagugccuuuug

SEQ ID NO: 1673644 - RNA, 15 nt, Human
aacugacucuuaaga

SEQ ID NO: 1673645 - RNA, 18 nt, Human
aacugacucuuaagaaga

SEQ ID NO: 1673646 - RNA, 19 nt, Human
aacugacucuuaagaagac

SEQ ID NO: 1673647 - RNA, 20 nt, Human
aacugacucuuaagaagacu

SEQ ID NO: 1673648 - RNA, 20 nt, Human
aacugagaugugaacacauc

SEQ ID NO: 1673649 - RNA, 21 nt, Human
aacuuuaugcuaagugaaaua

SEQ ID NO: 1673650 - RNA, 20 nt, Human
aacuuuaugcuaagugaaau

SEQ ID NO: 1673651 - RNA, 19 nt, Human
aaauaguggugugauuugg

SEQ ID NO: 1673652 - RNA, 17 nt, Human
aaauagcuuuuuucucu

SEQ ID NO: 1673653 - RNA, 20 nt, Human
aaauagcuuuuuucucugau

SEQ ID NO: 1673654 - RNA, 18 nt, Human
aaauagcuagacugguga

SEQ ID NO: 1673655 - RNA, 24 nt, Human
aaauagcucaggugucccugcacu

SEQ ID NO: 1673656 - RNA, 15 nt, Human
aaaucugugaacuug

SEQ ID NO: 1673657 - RNA, 16 nt, Human
aaaucugugaacuuga

SEQ ID NO: 1673658 - RNA, 18 nt, Human
aaaucugugaacuugaaa

SEQ ID NO: 1673659 - RNA, 19 nt, Human
aaaucaaugcuauaacuau

SEQ ID NO: 1673660 - RNA, 15 nt, Human
aaauauuuauuuuaa

SEQ ID NO: 1673661 - RNA, 13 nt, Human
aaauauuuauuuu

SEQ ID NO: 1673662 - RNA, 20 nt, Human
aaauauuuauuuuaauaaug

SEQ ID NO: 1673663 - RNA, 12 nt, Human
aaaucaaauaug

SEQ ID NO: 1673664 - RNA, 14 nt, Human
aaaucaaauaugca

SEQ ID NO: 1673665 - RNA, 15 nt, Human
aaaucaaauaugcaa

SEQ ID NO: 1673666 - RNA, 16 nt, Human
aaaucaaauaugcaaa

SEQ ID NO: 1673667 - RNA, 10 nt, Human
aaauaaauaa

SEQ ID NO: 1673668 - RNA, 19 nt, Human
aaauaaaacuuuuuaaaau

SEQ ID NO: 1673669 - RNA, 16 nt, Human
aaauaaaacuuuuuaa

SEQ ID NO: 1673670 - RNA, 13 nt, Human
aaauaaaacuuuu

SEQ ID NO: 1673671 - RNA, 19 nt, Human
aaaggcuccaggagcagcc

SEQ ID NO: 1673672 - RNA, 20 nt, Human
aaaggcuccaggagcagcca

SEQ ID NO: 1673673 - RNA, 13 nt, Human
aaaguggaaaaau

SEQ ID NO: 1673674 - RNA, 13 nt, Human
aaagcccugugcu

SEQ ID NO: 1673675 - RNA, 14 nt, Human
aaagcccugugcuc

SEQ ID NO: 1673676 - RNA, 22 nt, Human
aaagcccuuccaugucgccucu

SEQ ID NO: 1673677 - RNA, 23 nt, Human
aaagcccuuccaugucgccucug

SEQ ID NO: 1673678 - RNA, 16 nt, Human
aaagccuccuccagcc

SEQ ID NO: 1673679 - RNA, 15 nt, Human
aaaggcuccaggagc

SEQ ID NO: 1673680 - RNA, 16 nt, Human
aaaggcuccaggagca

SEQ ID NO: 1673681 - RNA, 14 nt, Human
aaaggcagaagcaa

SEQ ID NO: 1673682 - RNA, 16 nt, Human
aaacccuauugguaaa

SEQ ID NO: 1673683 - RNA, 20 nt, Human
aaaccaugggauaaaugcca

SEQ ID NO: 1673684 - RNA, 18 nt, Human
aaacucuccucugcugcu

SEQ ID NO: 1673685 - RNA, 15 nt, Human
aaaccaugggauaaa

SEQ ID NO: 1673686 - RNA, 18 nt, Human
aaaccaucauugaaaucu

SEQ ID NO: 1673687 - RNA, 16 nt, Human
aaagauauuuugcuuu

SEQ ID NO: 1673688 - RNA, 12 nt, Human
aaagauauuuug

SEQ ID NO: 1673689 - RNA, 20 nt, Human
aaagauauuuugcuuuguga

SEQ ID NO: 1673690 - RNA, 17 nt, Human
aaagauauuuugcuuug

SEQ ID NO: 1673691 - RNA, 15 nt, Human
aaagaaauauaccua

SEQ ID NO: 1673692 - RNA, 17 nt, Human
aaagaaauauaccuaaa

SEQ ID NO: 1673693 - RNA, 21 nt, Human
aaacugagaugugaacacauc

SEQ ID NO: 1673694 - RNA, 23 nt, Human
aaacugagaugugaacacaucag

SEQ ID NO: 1673695 - RNA, 19 nt, Human
aaagaguguggcaaaauaa

SEQ ID NO: 1673696 - RNA, 20 nt, Human
aaagaagguuucagaaagaa

SEQ ID NO: 1673697 - RNA, 14 nt, Human
aaagaguaggaaga

SEQ ID NO: 1673698 - RNA, 15 nt, Human
aaagaaauguaaggg

SEQ ID NO: 1673699 - RNA, 22 nt, Human
aaaaucucaaauuucuaaaucu

SEQ ID NO: 1673700 - RNA, 19 nt, Human
aaaaucucaaauuucuaaa

SEQ ID NO: 1673701 - RNA, 16 nt, Human
aaaaucucaauauuuc

SEQ ID NO: 1673702 - RNA, 17 nt, Human
aaaaucucaauauuuca

SEQ ID NO: 1673703 - RNA, 21 nt, Human
aaaauugaugggauuugguca

SEQ ID NO: 1673704 - RNA, 22 nt, Human
aaacacugggagaaaugaaaaa

SEQ ID NO: 1673705 - RNA, 16 nt, Human
aaacacuguucucugc

SEQ ID NO: 1673706 - RNA, 21 nt, Human
aaacacugggagaaaugaaaa

SEQ ID NO: 1673707 - RNA, 15 nt, Human
aaaaagaaaggaggg

SEQ ID NO: 1673708 - RNA, 16 nt, Human
aaaaagaaacauuugg

SEQ ID NO: 1673709 - RNA, 19 nt, Human
aaaauaaaauuaaagcuga

SEQ ID NO: 1673710 - RNA, 13 nt, Human
aaaaguugaauuu

SEQ ID NO: 1673711 - RNA, 17 nt, Human
aaaauaaaacuuuuuaa

SEQ ID NO: 1673712 - RNA, 18 nt, Human
aaaaguucugcagauaaa

SEQ ID NO: 1673713 - RNA, 21 nt, Human
aaaaucuacacuccagugaga

SEQ ID NO: 1673714 - RNA, 13 nt, Human
accagaucauugu

SEQ ID NO: 1673715 - RNA, 13 nt, Human
accagcagaaaug

SEQ ID NO: 1673716 - RNA, 17 nt, Human
accagccaguaaauggg

SEQ ID NO: 1673717 - RNA, 12 nt, Human
accaagcccagu

SEQ ID NO: 1673718 - RNA, 19 nt, Human
acauuuguucuauagcuuu

SEQ ID NO: 1673719 - RNA, 15 nt, Human
acauuuauucugcuc

SEQ ID NO: 1673720 - RNA, 19 nt, Human
acaggcaaugcuggcuguu

SEQ ID NO: 1673721 - RNA, 23 nt, Human
acaggcaaugcuggcuguuggcu

SEQ ID NO: 1673722 - RNA, 19 nt, Human
acaggguuuugccauguug

SEQ ID NO: 1673723 - RNA, 22 nt, Human
acauaaugcgugcauaccacuu

SEQ ID NO: 1673724 - RNA, 23 nt, Human
acauaaugcgugcauaccacuuu

SEQ ID NO: 1673725 - RNA, 23 nt, Human
acauguuucuuuguaaugaaaac

SEQ ID NO: 1673726 - RNA, 19 nt, Human
acauguuucuuuguaauga

SEQ ID NO: 1673727 - RNA, 22 nt, Human
acauguuucuuuguaaugaaaa

SEQ ID NO: 1673728 - RNA, 19 nt, Human
acaucagcacgauuucugu

SEQ ID NO: 1673729 - RNA, 18 nt, Human
acaucagcacgauuucug

SEQ ID NO: 1673730 - RNA, 17 nt, Human
acaucagcacgauuucu

SEQ ID NO: 1673731 - RNA, 15 nt, Human
acaucagcacgauuu

SEQ ID NO: 1673732 - RNA, 16 nt, Human
acaugugcacaugcac

SEQ ID NO: 1673733 - RNA, 18 nt, Human
acaugugcacaugcacgu

SEQ ID NO: 1673734 - RNA, 17 nt, Human
accccucauagcccuca

SEQ ID NO: 1673735 - RNA, 16 nt, Human
accccuccaugugggc

SEQ ID NO: 1673736 - RNA, 19 nt, Human
accccuccaugugggcuag

SEQ ID NO: 1673737 - RNA, 16 nt, Human
accauauuaccacaga

SEQ ID NO: 1673738 - RNA, 14 nt, Human
accauauuaccaca

SEQ ID NO: 1673739 - RNA, 16 nt, Human
acccaccucagccucc

SEQ ID NO: 1673740 - RNA, 18 nt, Human
acccccugcaaagcccag

SEQ ID NO: 1673741 - RNA, 20 nt, Human
acccccugcaaagcccagcu

SEQ ID NO: 1673742 - RNA, 22 nt, Human
acccccugcaaagcccagcuug

SEQ ID NO: 1673743 - RNA, 14 nt, Human
acccccugcaaagc

SEQ ID NO: 1673744 - RNA, 17 nt, Human
acccccugcaaagccca

SEQ ID NO: 1673745 - RNA, 11 nt, Human
acccccugaau

SEQ ID NO: 1673746 - RNA, 18 nt, Human
acccaagggccuggccug

SEQ ID NO: 1673747 - RNA, 19 nt, Human
acccaagggccuggccuga

SEQ ID NO: 1673748 - RNA, 22 nt, Human
acccaagggccuggccugagcu

SEQ ID NO: 1673749 - RNA, 20 nt, Human
accauauuaccacagacaua

SEQ ID NO: 1673750 - RNA, 13 nt, Human
acccaccucagcc

SEQ ID NO: 1673751 - RNA, 14 nt, Human
acccaccucagccu

SEQ ID NO: 1673752 - RNA, 15 nt, Human
acccaccucagccuc

SEQ ID NO: 1673753 - RNA, 21 nt, Human
acccacaagaaaugaaagcag

SEQ ID NO: 1673754 - RNA, 23 nt, Human
acccaagggccuggccugagcug

SEQ ID NO: 1673755 - RNA, 17 nt, Human
acccacaagaaaugaaa

SEQ ID NO: 1673756 - RNA, 21 nt, Human
acaggaugaugacuauggaaa

SEQ ID NO: 1673757 - RNA, 12 nt, Human
acaggcaagcac

SEQ ID NO: 1673758 - RNA, 16 nt, Human
acagcucuucuccagg

SEQ ID NO: 1673759 - RNA, 17 nt, Human
acagcucuucuccaggc

SEQ ID NO: 1673760 - RNA, 18 nt, Human
acagcucuucuccaggcu

SEQ ID NO: 1673761 - RNA, 19 nt, Human
acagccacggccaggccag

SEQ ID NO: 1673762 - RNA, 18 nt, Human
acagccacggccaggcca

SEQ ID NO: 1673763 - RNA, 15 nt, Human
acagccacggccagg

SEQ ID NO: 1673764 - RNA, 16 nt, Human
acagccacggccaggc

SEQ ID NO: 1673765 - RNA, 17 nt, Human
acagccacggccaggcc

SEQ ID NO: 1673766 - RNA, 15 nt, Human
acacugcauguuugu

SEQ ID NO: 1673767 - RNA, 14 nt, Human
acacugcauguuug

SEQ ID NO: 1673768 - RNA, 11 nt, Human
acagacacagg

SEQ ID NO: 1673769 - RNA, 13 nt, Human
acagacaaagcgu

SEQ ID NO: 1673770 - RNA, 15 nt, Human
acacuguacugcaau

SEQ ID NO: 1673771 - RNA, 15 nt, Human
acagacacaggcccg

SEQ ID NO: 1673772 - RNA, 19 nt, Human
acagaggcagccccauucu

SEQ ID NO: 1673773 - RNA, 23 nt, Human
acagaggcagccccauucugccu

SEQ ID NO: 1673774 - RNA, 13 nt, Human
acagacacaggcc

SEQ ID NO: 1673775 - RNA, 14 nt, Human
acagacacaggccc

SEQ ID NO: 1673776 - RNA, 15 nt, Human
acagaggcagcccca

SEQ ID NO: 1673777 - RNA, 19 nt, Human
acagccaacuauggccugu

SEQ ID NO: 1673778 - RNA, 17 nt, Human
acagccaacuauggccu

SEQ ID NO: 1673779 - RNA, 14 nt, Human
acagaggggguggc

SEQ ID NO: 1673780 - RNA, 15 nt, Human
acagagugagacucu

SEQ ID NO: 1673781 - RNA, 19 nt, Human
acagagugagacucugucu

SEQ ID NO: 1673782 - RNA, 21 nt, Human
acagcaguugaaaagacucca

SEQ ID NO: 1673783 - RNA, 22 nt, Human
acagcaguugaaaagacuccaa

SEQ ID NO: 1673784 - RNA, 23 nt, Human
acagcaguugaaaagacuccaaa

SEQ ID NO: 1673785 - RNA, 13 nt, Human
aauuuuguuucug

SEQ ID NO: 1673786 - RNA, 13 nt, Human
aauuuugugaagc

SEQ ID NO: 1673787 - RNA, 15 nt, Human
acaaggcaaggcugu

SEQ ID NO: 1673788 - RNA, 14 nt, Human
aauuuuguuucugu

SEQ ID NO: 1673789 - RNA, 15 nt, Human
aauuuuguuucugua

SEQ ID NO: 1673790 - RNA, 22 nt, Human
acaaaauguaggguuauaauaa

SEQ ID NO: 1673791 - RNA, 12 nt, Human
acaaggcaaggc

SEQ ID NO: 1673792 - RNA, 14 nt, Human
acaaggcaaggcug

SEQ ID NO: 1673793 - RNA, 17 nt, Human
acaaggauugcuacugu

SEQ ID NO: 1673794 - RNA, 13 nt, Human
acaagaaaugaaa

SEQ ID NO: 1673795 - RNA, 17 nt, Human
acacagauuugagcuca

SEQ ID NO: 1673796 - RNA, 20 nt, Human
acacagcucuguccugggag

SEQ ID NO: 1673797 - RNA, 19 nt, Human
acacagaggcugccucucc

SEQ ID NO: 1673798 - RNA, 22 nt, Human
acacauuuuuuaaaugcaccug

SEQ ID NO: 1673799 - RNA, 20 nt, Human
acacauuuuuuaaaugcacc

SEQ ID NO: 1673800 - RNA, 12 nt, Human
acacauuuuucu

SEQ ID NO: 1673801 - RNA, 22 nt, Human
acacauuuuauuuuauuaugca

SEQ ID NO: 1673802 - RNA, 11 nt, Human
acacagcucuu

SEQ ID NO: 1673803 - RNA, 13 nt, Human
acacagcucuucu

SEQ ID NO: 1673804 - RNA, 16 nt, Human
acacgcuccuuccucu

SEQ ID NO: 1673805 - RNA, 14 nt, Human
acacgcuccuuccu

SEQ ID NO: 1673806 - RNA, 14 nt, Human
acacgagcaggcua

SEQ ID NO: 1673807 - RNA, 19 nt, Human
acacgagcaggcuacuguc

SEQ ID NO: 1673808 - RNA, 15 nt, Human
acacgcgugcacaca

SEQ ID NO: 1673809 - RNA, 17 nt, Human
acacgcgugcacacacc

SEQ ID NO: 1673810 - RNA, 21 nt, Human
acacgagcaggcuacugucag

SEQ ID NO: 1673811 - RNA, 23 nt, Human
agaaaguacuucuccacccugcu

SEQ ID NO: 1673812 - RNA, 22 nt, Human
agaaaguacuucuccacccugc

SEQ ID NO: 1673813 - RNA, 14 nt, Human
agaaaguucaugcu

SEQ ID NO: 1673814 - RNA, 23 nt, Human
acuuuuaugauacuugaaaauua

SEQ ID NO: 1673815 - RNA, 23 nt, Human
acuuuuauuuccagugaaaucag

SEQ ID NO: 1673816 - RNA, 20 nt, Human
acuuuucauaaccuagccuu

SEQ ID NO: 1673817 - RNA, 16 nt, Human
acuuuucuuucagcca

SEQ ID NO: 1673818 - RNA, 14 nt, Human
acuuuucuuugugg

SEQ ID NO: 1673819 - RNA, 19 nt, Human
agaaaauaguggugugauu

SEQ ID NO: 1673820 - RNA, 15 nt, Human
agaaaauaccaagga

SEQ ID NO: 1673821 - RNA, 16 nt, Human
agaaaaucaggcuggc

SEQ ID NO: 1673822 - RNA, 12 nt, Human
acuuuuaugaua

SEQ ID NO: 1673823 - RNA, 16 nt, Human
acuuuuaugauacuug

SEQ ID NO: 1673824 - RNA, 13 nt, Human
acuuuuauaaacu

SEQ ID NO: 1673825 - RNA, 20 nt, Human
acuuuguucuggcucuucca

SEQ ID NO: 1673826 - RNA, 19 nt, Human
acuuuguucuggcucuucc

SEQ ID NO: 1673827 - RNA, 22 nt, Human
acuuuaucuugaauaauguaag

SEQ ID NO: 1673828 - RNA, 16 nt, Human
acuuuguucuggcucu

SEQ ID NO: 1673829 - RNA, 17 nt, Human
acuuuguucuggcucuu

SEQ ID NO: 1673830 - RNA, 22 nt, Human
acuuuauuuucuauaauuuaaa

SEQ ID NO: 1673831 - RNA, 22 nt, Human
acugugcugagucugaaggcug

SEQ ID NO: 1673832 - RNA, 20 nt, Human
acugugcugagucugaaggc

SEQ ID NO: 1673833 - RNA, 16 nt, Human
acuugguuuuuaaaaa

SEQ ID NO: 1673834 - RNA, 18 nt, Human
acuuguaaaggaauuuaa

SEQ ID NO: 1673835 - RNA, 14 nt, Human
acuugggccacugu

SEQ ID NO: 1673836 - RNA, 15 nt, Human
acuugggccacugug

SEQ ID NO: 1673837 - RNA, 22 nt, Human
acuucugucuucacaacagauu

SEQ ID NO: 1673838 - RNA, 12 nt, Human
acuucagacaua

SEQ ID NO: 1673839 - RNA, 21 nt, Human
acuucugucuucacaacagau

SEQ ID NO: 1673840 - RNA, 23 nt, Human
acuguuugagguuuuuaagccuu

SEQ ID NO: 1673841 - RNA, 18 nt, Human
acuguuugagguuuuuaa

SEQ ID NO: 1673842 - RNA, 13 nt, Human
acugccagcaacg

SEQ ID NO: 1673843 - RNA, 20 nt, Human
acucugucucaguccaugaa

SEQ ID NO: 1673844 - RNA, 18 nt, Human
acucugucucaguccaug

SEQ ID NO: 1673845 - RNA, 18 nt, Human
acugguaggaaacuaggu

SEQ ID NO: 1673846 - RNA, 15 nt, Human
acuggagaaaaugga

SEQ ID NO: 1673847 - RNA, 14 nt, Human
acugcccccucugc

SEQ ID NO: 1673848 - RNA, 15 nt, Human
acugcccccucugcc

SEQ ID NO: 1673849 - RNA, 19 nt, Human
acuggaagcacagcuucau

SEQ ID NO: 1673850 - RNA, 16 nt, Human
acugcccccucugccc

SEQ ID NO: 1673851 - RNA, 17 nt, Human
acugcccccucugcccu

SEQ ID NO: 1673852 - RNA, 17 nt, Human
acuggaagcacagcuuc

SEQ ID NO: 1673853 - RNA, 14 nt, Human
acuggugacugauu

SEQ ID NO: 1673854 - RNA, 16 nt, Human
acuggugacugauucu

SEQ ID NO: 1673855 - RNA, 18 nt, Human
acugguuccauggccucu

SEQ ID NO: 1673856 - RNA, 19 nt, Human
acuguaagaaaauaucacu

SEQ ID NO: 1673857 - RNA, 13 nt, Human
acuguaagaaaau

SEQ ID NO: 1673858 - RNA, 22 nt, Human
acuguaagaaaauaucacuugu

SEQ ID NO: 1673859 - RNA, 20 nt, Human
acugucucaagagggcacug

SEQ ID NO: 1673860 - RNA, 21 nt, Human
acugucucaagagggcacugg

SEQ ID NO: 1673861 - RNA, 23 nt, Human
acugucucaagagggcacuggug

SEQ ID NO: 1673862 - RNA, 20 nt, Human
accugcccugcugaguccca

SEQ ID NO: 1673863 - RNA, 16 nt, Human
accugucccccugaca

SEQ ID NO: 1673864 - RNA, 12 nt, Human
accugucccccu

SEQ ID NO: 1673865 - RNA, 15 nt, Human
accugucccccugac

SEQ ID NO: 1673866 - RNA, 17 nt, Human
accuuggcugcagggag

SEQ ID NO: 1673867 - RNA, 18 nt, Human
accuuggcugcagggagu

SEQ ID NO: 1673868 - RNA, 13 nt, Human
accuuucccaucu

SEQ ID NO: 1673869 - RNA, 18 nt, Human
accuuucccaucuuccaa

SEQ ID NO: 1673870 - RNA, 15 nt, Human
accuuuaagagaaau

SEQ ID NO: 1673871 - RNA, 20 nt, Human
accucugcagcaauaaagca

SEQ ID NO: 1673872 - RNA, 18 nt, Human
accucugcagcaauaaag

SEQ ID NO: 1673873 - RNA, 21 nt, Human
accucugcagcaauaaagcag

SEQ ID NO: 1673874 - RNA, 14 nt, Human
acggaacucaaaua

SEQ ID NO: 1673875 - RNA, 13 nt, Human
acgucugacaggc

SEQ ID NO: 1673876 - RNA, 14 nt, Human
acgucugacaggca

SEQ ID NO: 1673877 - RNA, 15 nt, Human
acgucugacaggcaa

SEQ ID NO: 1673878 - RNA, 15 nt, Human
acgcugugcugcccu

SEQ ID NO: 1673879 - RNA, 11 nt, Human
acgcugugcug

SEQ ID NO: 1673880 - RNA, 12 nt, Human
acgcugugcugc

SEQ ID NO: 1673881 - RNA, 14 nt, Human
acgcugugcugccc

SEQ ID NO: 1673882 - RNA, 22 nt, Human
acgcaggcccccaggugccagu

SEQ ID NO: 1673883 - RNA, 11 nt, Human
acgugaguccu

SEQ ID NO: 1673884 - RNA, 13 nt, Human
acuaagagagaau

SEQ ID NO: 1673885 - RNA, 15 nt, Human
acuaagagagaauga

SEQ ID NO: 1673886 - RNA, 15 nt, Human
acucauauuuucaug

SEQ ID NO: 1673887 - RNA, 15 nt, Human
acucuagggaaaaac

SEQ ID NO: 1673888 - RNA, 17 nt, Human
acucuagggaaaaacca

SEQ ID NO: 1673889 - RNA, 19 nt, Human
acucugucgcccagucugg

SEQ ID NO: 1673890 - RNA, 23 nt, Human
acucuaucaaguauuauaccuuu

SEQ ID NO: 1673891 - RNA, 17 nt, Human
acucuauguucuaagaa

SEQ ID NO: 1673892 - RNA, 19 nt, Human
acucaguccauagcagaga

SEQ ID NO: 1673893 - RNA, 13 nt, Human
acucaaaagcugg

SEQ ID NO: 1673894 - RNA, 18 nt, Human
acucaaaagcugggcagg

SEQ ID NO: 1673895 - RNA, 20 nt, Human
acuaguauuucuaugaaaua

SEQ ID NO: 1673896 - RNA, 21 nt, Human
acuauucaaacagucucagga

SEQ ID NO: 1673897 - RNA, 18 nt, Human
aaaaaauuggggauucuu

SEQ ID NO: 1673898 - RNA, 13 nt, Human
aaaaacacagcaa

SEQ ID NO: 1673899 - RNA, 18 nt, Human
aaaaacacagcaagggug

SEQ ID NO: 1673900 - RNA, 20 nt, Human
aaaaaccaguauuguacaaa

SEQ ID NO: 1673901 - RNA, 19 nt, Human
aaaaaccaucuguaaaaga

SEQ ID NO: 1673902 - RNA, 15 nt, Human
aaaaaauauuuuccu

SEQ ID NO: 1673903 - RNA, 15 nt, Human
caccccuaaagagau

SEQ ID NO: 1673904 - RNA, 19 nt, Human
cacccaagggccuggccug

SEQ ID NO: 1673905 - RNA, 20 nt, Human
cacccaagggccuggccuga

SEQ ID NO: 1673906 - RNA, 21 nt, Human
cacccaagggccuggccugag

SEQ ID NO: 1673907 - RNA, 23 nt, Human
cacccaagggccuggccugagcu

SEQ ID NO: 1673908 - RNA, 16 nt, Human
cacccaagggccuggc

SEQ ID NO: 1673909 - RNA, 17 nt, Human
cacccaagggccuggcc

SEQ ID NO: 1673910 - RNA, 18 nt, Human
cacccaagggccuggccu

SEQ ID NO: 1673911 - RNA, 15 nt, Human
cacccacccuuuuuu

SEQ ID NO: 1673912 - RNA, 20 nt, Human
cacccaccaucaugucuggc

SEQ ID NO: 1673913 - RNA, 22 nt, Human
cacccaccaucaugucuggcua

SEQ ID NO: 1673914 - RNA, 12 nt, Human
cacccaccucag

SEQ ID NO: 1673915 - RNA, 13 nt, Human
cacccaccucagc

SEQ ID NO: 1673916 - RNA, 14 nt, Human
cacccaccucagcc

SEQ ID NO: 1673917 - RNA, 16 nt, Human
cacccaccucagccuc

SEQ ID NO: 1673918 - RNA, 13 nt, Human
caccccagcccca

SEQ ID NO: 1673919 - RNA, 14 nt, Human
caccccuaaagaga

SEQ ID NO: 1673920 - RNA, 14 nt, Human
caccccggccaccu

SEQ ID NO: 1673921 - RNA, 15 nt, Human
caccccggccaccug

SEQ ID NO: 1673922 - RNA, 16 nt, Human
caccccggccaccugc

SEQ ID NO: 1673923 - RNA, 17 nt, Human
caccccggccaccugcg

SEQ ID NO: 1673924 - RNA, 22 nt, Human
cacccccacccaagggccuggc

SEQ ID NO: 1673925 - RNA, 12 nt, Human
caaauauauuca

SEQ ID NO: 1673926 - RNA, 19 nt, Human
caaaguugccuaaauccau

SEQ ID NO: 1673927 - RNA, 21 nt, Human
caaaggaugcccaaagaugca

SEQ ID NO: 1673928 - RNA, 13 nt, Human
caaaucagcugcu

SEQ ID NO: 1673929 - RNA, 15 nt, Human
caaaugucuuccugg

SEQ ID NO: 1673930 - RNA, 18 nt, Human
caaaugucuuccuggauu

SEQ ID NO: 1673931 - RNA, 16 nt, Human
caaaucagcugcuacu

SEQ ID NO: 1673932 - RNA, 18 nt, Human
caaauaugcaaagcacug

SEQ ID NO: 1673933 - RNA, 16 nt, Human
caaauaugcaaagcac

SEQ ID NO: 1673934 - RNA, 17 nt, Human
caaauaugcaaagcacu

SEQ ID NO: 1673935 - RNA, 22 nt, Human
caaauucugcuugcuugcuuuu

SEQ ID NO: 1673936 - RNA, 14 nt, Human
caaauguggcuccu

SEQ ID NO: 1673937 - RNA, 21 nt, Human
caaauguucaucaaugaauga

SEQ ID NO: 1673938 - RNA, 16 nt, Human
caaagcuuguuaagau

SEQ ID NO: 1673939 - RNA, 20 nt, Human
caaagccaaagcuaggccug

SEQ ID NO: 1673940 - RNA, 21 nt, Human
caaagccaaagcuaggccugg

SEQ ID NO: 1673941 - RNA, 22 nt, Human
caaagccaaagcuaggccuggc

SEQ ID NO: 1673942 - RNA, 16 nt, Human
caaagcuaggccuggc

SEQ ID NO: 1673943 - RNA, 17 nt, Human
caaagcuaggccuggcc

SEQ ID NO: 1673944 - RNA, 18 nt, Human
caaagcuaggccuggcca

SEQ ID NO: 1673945 - RNA, 18 nt, Human
auuuuuuuacuaauagac

SEQ ID NO: 1673946 - RNA, 22 nt, Human
caagugauucuccugccucagc

SEQ ID NO: 1673947 - RNA, 22 nt, Human
caagugugguagagugugccug

SEQ ID NO: 1673948 - RNA, 22 nt, Human
caagugauucucaugccucagc

SEQ ID NO: 1673949 - RNA, 19 nt, Human
caagugaaaaaggaggaag

SEQ ID NO: 1673950 - RNA, 16 nt, Human
caagugauucuccugc

SEQ ID NO: 1673951 - RNA, 17 nt, Human
caagugauucuccugcc

SEQ ID NO: 1673952 - RNA, 15 nt, Human
caaggauugcuacug

SEQ ID NO: 1673953 - RNA, 19 nt, Human
caaggauugcuacuguccu

SEQ ID NO: 1673954 - RNA, 19 nt, Human
caagggccuggccugagcu

SEQ ID NO: 1673955 - RNA, 12 nt, Human
caaggugggagg

SEQ ID NO: 1673956 - RNA, 23 nt, Human
caaggugggaggauugcuugagc

SEQ ID NO: 1673957 - RNA, 14 nt, Human
caaggacuaggguc

SEQ ID NO: 1673958 - RNA, 13 nt, Human
caaggauccugag

SEQ ID NO: 1673959 - RNA, 19 nt, Human
caaggaugccccguccccc

SEQ ID NO: 1673960 - RNA, 21 nt, Human
caaggaugaucuaggaagacu

SEQ ID NO: 1673961 - RNA, 17 nt, Human
caagcgugagccacugc

SEQ ID NO: 1673962 - RNA, 18 nt, Human
caagcgugagccacugca

SEQ ID NO: 1673963 - RNA, 21 nt, Human
caagccaccaacauacuccca

SEQ ID NO: 1673964 - RNA, 14 nt, Human
caagccguggcuuc

SEQ ID NO: 1673965 - RNA, 15 nt, Human
caagccguggcuucc

SEQ ID NO: 1673966 - RNA, 16 nt, Human
caagccguggcuuccc

SEQ ID NO: 1673967 - RNA, 17 nt, Human
caagccguggcuucccg

SEQ ID NO: 1673968 - RNA, 16 nt, Human
caagcgugagccacug

SEQ ID NO: 1673969 - RNA, 17 nt, Human
caagcacuaaacaaaga

SEQ ID NO: 1673970 - RNA, 18 nt, Human
caagcaccuccugccucg

SEQ ID NO: 1673971 - RNA, 22 nt, Human
caagccaccaacauacucccau

SEQ ID NO: 1673972 - RNA, 21 nt, Human
caacccucagagccaccccua

SEQ ID NO: 1673973 - RNA, 22 nt, Human
caaccccuucgcuccugugucu

SEQ ID NO: 1673974 - RNA, 21 nt, Human
caaccccuucgcuccuguguc

SEQ ID NO: 1673975 - RNA, 18 nt, Human
caaccccuucgcuccugu

SEQ ID NO: 1673976 - RNA, 19 nt, Human
caaccccuucgcuccugug

SEQ ID NO: 1673977 - RNA, 22 nt, Human
caacaucuuggucagauuugaa

SEQ ID NO: 1673978 - RNA, 19 nt, Human
caacagguuuuccugaaga

SEQ ID NO: 1673979 - RNA, 18 nt, Human
caacaggguuuuuuucca

SEQ ID NO: 1673980 - RNA, 15 nt, Human
caacagguuuuccug

SEQ ID NO: 1673981 - RNA, 15 nt, Human
caaauucugucucug

SEQ ID NO: 1673982 - RNA, 18 nt, Human
caaauucugucucuggau

SEQ ID NO: 1673983 - RNA, 14 nt, Human
caaauuuacagaga

SEQ ID NO: 1673984 - RNA, 24 nt, Human
caacaggcugggcuucaguggcag

SEQ ID NO: 1673985 - RNA, 16 nt, Human
caaauuuacagagaca

SEQ ID NO: 1673986 - RNA, 23 nt, Human
caacaggcugggcuucaguggca

SEQ ID NO: 1673987 - RNA, 15 nt, Human
caaauuuacagagac

SEQ ID NO: 1673988 - RNA, 12 nt, Human
caacgcagcccu

SEQ ID NO: 1673989 - RNA, 13 nt, Human
caacgcagcccug

SEQ ID NO: 1673990 - RNA, 15 nt, Human
caacgcagcccugcu

SEQ ID NO: 1673991 - RNA, 18 nt, Human
caacgcagcccugcuuug

SEQ ID NO: 1673992 - RNA, 19 nt, Human
caacucuccuccagaguca

SEQ ID NO: 1673993 - RNA, 16 nt, Human
caaccugauugugucu

SEQ ID NO: 1673994 - RNA, 12 nt, Human
caacccucauca

SEQ ID NO: 1673995 - RNA, 15 nt, Human
caacccucaucacca

SEQ ID NO: 1673996 - RNA, 21 nt, Human
caacucugaaggguaauuaua

SEQ ID NO: 1673997 - RNA, 20 nt, Human
caacucuccuccagagucag

SEQ ID NO: 1673998 - RNA, 11 nt, Human
caacuuuguau

SEQ ID NO: 1673999 - RNA, 12 nt, Human
caacuuuguaua

SEQ ID NO: 1674000 - RNA, 19 nt, Human
caaugugaaaagaaaaaug

SEQ ID NO: 1674001 - RNA, 21 nt, Human
caauaggaaaaacugauuuuu

SEQ ID NO: 1674002 - RNA, 20 nt, Human
caauaggaaaaacugauuuu

SEQ ID NO: 1674003 - RNA, 23 nt, Human
caaugcacuuuguucuggcucuu

SEQ ID NO: 1674004 - RNA, 19 nt, Human
caaugcaaaccaucauuga

SEQ ID NO: 1674005 - RNA, 20 nt, Human
caaugcaaaccaucauugaa

SEQ ID NO: 1674006 - RNA, 17 nt, Human
caaugcaaaccaucauu

SEQ ID NO: 1674007 - RNA, 18 nt, Human
caaugcaaaccaucauug

SEQ ID NO: 1674008 - RNA, 13 nt, Human
caaugaccuuuca

SEQ ID NO: 1674009 - RNA, 22 nt, Human
caaugaaugaaugaauggcuaa

SEQ ID NO: 1674010 - RNA, 16 nt, Human
cacaaaaguuucucuu

SEQ ID NO: 1674011 - RNA, 18 nt, Human
cacaaaaguuucucuuuu

SEQ ID NO: 1674012 - RNA, 17 nt, Human
cacaaccuucuguggcu

SEQ ID NO: 1674013 - RNA, 18 nt, Human
cacaaccuucuguggcuc

SEQ ID NO: 1674014 - RNA, 19 nt, Human
cacaaccuucuguggcuca

SEQ ID NO: 1674015 - RNA, 23 nt, Human
cacaaccuucuguggcucacaga

SEQ ID NO: 1674016 - RNA, 22 nt, Human
cacaacacacagauuugagcuc

SEQ ID NO: 1674017 - RNA, 21 nt, Human
cacaaauucugucucuggauu

SEQ ID NO: 1674018 - RNA, 11 nt, Human
cacaacagauu

SEQ ID NO: 1674019 - RNA, 13 nt, Human
caauuaaggauuu

SEQ ID NO: 1674020 - RNA, 15 nt, Human
caauuaaggauuuua

SEQ ID NO: 1674021 - RNA, 20 nt, Human
caauuaaggauuuuaugcuu

SEQ ID NO: 1674022 - RNA, 23 nt, Human
caauuaaggauuuuaugcuuuaa

SEQ ID NO: 1674023 - RNA, 21 nt, Human
caauuaaggauuuuaugcuuu

SEQ ID NO: 1674024 - RNA, 22 nt, Human
caauuaaggauuuuaugcuuua

SEQ ID NO: 1674025 - RNA, 21 nt, Human
cacacuugacaucaacugcau

SEQ ID NO: 1674026 - RNA, 12 nt, Human
cacagagaaagu

SEQ ID NO: 1674027 - RNA, 17 nt, Human
cacagaguuguuacauu

SEQ ID NO: 1674028 - RNA, 16 nt, Human
cacagaguuguuacau

SEQ ID NO: 1674029 - RNA, 18 nt, Human
cacacuucaggcucuucu

SEQ ID NO: 1674030 - RNA, 20 nt, Human
cacacuucaggcucuucucc

SEQ ID NO: 1674031 - RNA, 21 nt, Human
cacacuucaggcucuucuccu

SEQ ID NO: 1674032 - RNA, 22 nt, Human
cacacuucaggcucuucuccuu

SEQ ID NO: 1674033 - RNA, 14 nt, Human
cacacuucaggcuc

SEQ ID NO: 1674034 - RNA, 17 nt, Human
cacacuucaggcucuuc

SEQ ID NO: 1674035 - RNA, 19 nt, Human
cacacucaaaucaagaaac

SEQ ID NO: 1674036 - RNA, 13 nt, Human
cacacccagccca

SEQ ID NO: 1674037 - RNA, 15 nt, Human
cacaccagagcccac

SEQ ID NO: 1674038 - RNA, 12 nt, Human
cacaccagagcc

SEQ ID NO: 1674039 - RNA, 13 nt, Human
cacaccagagccc

SEQ ID NO: 1674040 - RNA, 14 nt, Human
cacacccuguuuua

SEQ ID NO: 1674041 - RNA, 17 nt, Human
cacaccgggcacucaga

SEQ ID NO: 1674042 - RNA, 19 nt, Human
cacacagaggcugccucuc

SEQ ID NO: 1674043 - RNA, 21 nt, Human
cacacagaggcugccucuccc

SEQ ID NO: 1674044 - RNA, 12 nt, Human
cacacagcucug

SEQ ID NO: 1674045 - RNA, 14 nt, Human
cacacaccagagcc

SEQ ID NO: 1674046 - RNA, 13 nt, Human
cacaacuauauug

SEQ ID NO: 1674047 - RNA, 16 nt, Human
cacauuccugaacagg

SEQ ID NO: 1674048 - RNA, 16 nt, Human
cacauuccugaugcuu

SEQ ID NO: 1674049 - RNA, 13 nt, Human
cacauguggacuu

SEQ ID NO: 1674050 - RNA, 17 nt, Human
cacaugugcacaugcac

SEQ ID NO: 1674051 - RNA, 14 nt, Human
cacaugugcacaug

SEQ ID NO: 1674052 - RNA, 15 nt, Human
cacaugugcacaugc

SEQ ID NO: 1674053 - RNA, 19 nt, Human
cacaugccucucucaggcc

SEQ ID NO: 1674054 - RNA, 18 nt, Human
cacaucagcacgauuucu

SEQ ID NO: 1674055 - RNA, 12 nt, Human
cacauaucuguc

SEQ ID NO: 1674056 - RNA, 14 nt, Human
cacauaucugucau

SEQ ID NO: 1674057 - RNA, 19 nt, Human
cacaucagcacgauuucug

SEQ ID NO: 1674058 - RNA, 13 nt, Human
cacaugccucucu

SEQ ID NO: 1674059 - RNA, 17 nt, Human
cacaugccucucucagg

SEQ ID NO: 1674060 - RNA, 18 nt, Human
cacaugccucucucaggc

SEQ ID NO: 1674061 - RNA, 20 nt, Human
cacauugguguuguacucaa

SEQ ID NO: 1674062 - RNA, 15 nt, Human
caccaagcccaguua

SEQ ID NO: 1674063 - RNA, 18 nt, Human
cacauuggagauguuuag

SEQ ID NO: 1674064 - RNA, 17 nt, Human
cacauuggaaacaaguc

SEQ ID NO: 1674065 - RNA, 13 nt, Human
caccacacccagc

SEQ ID NO: 1674066 - RNA, 15 nt, Human
caccacacccagccc

SEQ ID NO: 1674067 - RNA, 17 nt, Human
caccacacccagcccac

SEQ ID NO: 1674068 - RNA, 19 nt, Human
caccacaugugcacaugca

SEQ ID NO: 1674069 - RNA, 15 nt, Human
caccacaugugcaca

SEQ ID NO: 1674070 - RNA, 18 nt, Human
caccacaugugcacaugc

SEQ ID NO: 1674071 - RNA, 18 nt, Human
caccacuacauucuguua

SEQ ID NO: 1674072 - RNA, 17 nt, Human
caccacuacauucuguu

SEQ ID NO: 1674073 - RNA, 16 nt, Human
caccacuacauucugu

SEQ ID NO: 1674074 - RNA, 14 nt, Human
caccaccucuuugg

SEQ ID NO: 1674075 - RNA, 20 nt, Human
caccacuacauucuguuaau

SEQ ID NO: 1674076 - RNA, 19 nt, Human
caccacuacauucuguuaa

SEQ ID NO: 1674077 - RNA, 21 nt, Human
cacagugagucgaggacaggg

SEQ ID NO: 1674078 - RNA, 17 nt, Human
cacaggaucagucugau

SEQ ID NO: 1674079 - RNA, 10 nt, Human
cacaggcagg

SEQ ID NO: 1674080 - RNA, 16 nt, Human
cacaggcccggcucca

SEQ ID NO: 1674081 - RNA, 17 nt, Human
cacaggcccggcuccag

SEQ ID NO: 1674082 - RNA, 18 nt, Human
cacaggcccggcuccagg

SEQ ID NO: 1674083 - RNA, 19 nt, Human
cacaggcccggcuccaggc

SEQ ID NO: 1674084 - RNA, 12 nt, Human
cacaggaucagu

SEQ ID NO: 1674085 - RNA, 15 nt, Human
cacaggaucagucug

SEQ ID NO: 1674086 - RNA, 16 nt, Human
cacaggaucagucuga

SEQ ID NO: 1674087 - RNA, 19 nt, Human
cacaggaaccacaagacug

SEQ ID NO: 1674088 - RNA, 20 nt, Human
cacaggaaccacaagacugc

SEQ ID NO: 1674089 - RNA, 15 nt, Human
cacaggaaguagagg

SEQ ID NO: 1674090 - RNA, 19 nt, Human
cacagugagucgaggacag

SEQ ID NO: 1674091 - RNA, 20 nt, Human
cacagugagucgaggacagg

SEQ ID NO: 1674092 - RNA, 15 nt, Human
cacaggcccuuccuc

SEQ ID NO: 1674093 - RNA, 18 nt, Human
cacagugagucgaggaca

SEQ ID NO: 1674094 - RNA, 20 nt, Human
cacaggcccggcuccaggcu

SEQ ID NO: 1674095 - RNA, 23 nt, Human
cacaggcccggcuccaggcuccu

SEQ ID NO: 1674096 - RNA, 22 nt, Human
cacauaauucaggaagcagcuu

SEQ ID NO: 1674097 - RNA, 15 nt, Human
cacaguuuucugaga

SEQ ID NO: 1674098 - RNA, 14 nt, Human
cacaguuuucugag

SEQ ID NO: 1674099 - RNA, 17 nt, Human
cacauacacacacacgc

SEQ ID NO: 1674100 - RNA, 23 nt, Human
cacagaugggugcuuggaggaag

SEQ ID NO: 1674101 - RNA, 16 nt, Human
cacagcagccccugca

SEQ ID NO: 1674102 - RNA, 20 nt, Human
cacagcacgggggccaagga

SEQ ID NO: 1674103 - RNA, 20 nt, Human
cacagaugggugcuuggagg

SEQ ID NO: 1674104 - RNA, 21 nt, Human
cacagaguuguuacauuuuua

SEQ ID NO: 1674105 - RNA, 20 nt, Human
cacagaguuguuacauuuuu

SEQ ID NO: 1674106 - RNA, 14 nt, Human
cacagaugggugcu

SEQ ID NO: 1674107 - RNA, 18 nt, Human
cacagaugggugcuugga

SEQ ID NO: 1674108 - RNA, 22 nt, Human
cacagcaguugaaaagacucca

SEQ ID NO: 1674109 - RNA, 16 nt, Human
uugagccuugaacuuu

SEQ ID NO: 1674110 - RNA, 15 nt, Human
uugagccuugaacuu

SEQ ID NO: 1674111 - RNA, 14 nt, Human
uugagccuugaacu

SEQ ID NO: 1674112 - RNA, 14 nt, Human
uugaauuguaagga

SEQ ID NO: 1674113 - RNA, 13 nt, Human
uugagcucagccc

SEQ ID NO: 1674114 - RNA, 19 nt, Human
uugagccuugaacuuugac

SEQ ID NO: 1674115 - RNA, 17 nt, Human
uugauccagaaagaaaa

SEQ ID NO: 1674116 - RNA, 17 nt, Human
uugauucagacagcugc

SEQ ID NO: 1674117 - RNA, 21 nt, Human
uugauucagacagcugccugg

SEQ ID NO: 1674118 - RNA, 23 nt, Human
uugauucagacagcugccuggga

SEQ ID NO: 1674119 - RNA, 16 nt, Human
uugauucagcucugca

SEQ ID NO: 1674120 - RNA, 22 nt, Human
uugauauuuucaacgcagcccu

SEQ ID NO: 1674121 - RNA, 16 nt, Human
uugauaugugaacagu

SEQ ID NO: 1674122 - RNA, 16 nt, Human
uugauaugcuuauaca

SEQ ID NO: 1674123 - RNA, 20 nt, Human
uugauaugccuuuucccaac

SEQ ID NO: 1674124 - RNA, 23 nt, Human
uugcagacaggcaagcaccuccu

SEQ ID NO: 1674125 - RNA, 13 nt, Human
uugauucauaaug

SEQ ID NO: 1674126 - RNA, 17 nt, Human
uugauucauaaugacuu

SEQ ID NO: 1674127 - RNA, 16 nt, Human
uugcauaacguauaaa

SEQ ID NO: 1674128 - RNA, 13 nt, Human
uugccagucaccc

SEQ ID NO: 1674129 - RNA, 13 nt, Human
uugccaucccucc

SEQ ID NO: 1674130 - RNA, 16 nt, Human
uugccauguuggccag

SEQ ID NO: 1674131 - RNA, 17 nt, Human
uugccauguuggccagg

SEQ ID NO: 1674132 - RNA, 18 nt, Human
uugccauguuggccaggc

SEQ ID NO: 1674133 - RNA, 19 nt, Human
uugccauguuggccaggcu

SEQ ID NO: 1674134 - RNA, 18 nt, Human
uugccaucccucccucca

SEQ ID NO: 1674135 - RNA, 17 nt, Human
uugccaucccucccucc

SEQ ID NO: 1674136 - RNA, 16 nt, Human
uugccaucccucccuc

SEQ ID NO: 1674137 - RNA, 14 nt, Human
uugccaucccuccc

SEQ ID NO: 1674138 - RNA, 23 nt, Human
uugccaucccucccuccaccucc

SEQ ID NO: 1674139 - RNA, 22 nt, Human
uugccaucccucccuccaccuc

SEQ ID NO: 1674140 - RNA, 14 nt, Human
uucuuguguguuua

SEQ ID NO: 1674141 - RNA, 19 nt, Human
uucuuguauuaagaaugaa

SEQ ID NO: 1674142 - RNA, 17 nt, Human
uucuuauguugcccagu

SEQ ID NO: 1674143 - RNA, 13 nt, Human
uucuucagagacu

SEQ ID NO: 1674144 - RNA, 17 nt, Human
uucuuagggaaggauac

SEQ ID NO: 1674145 - RNA, 19 nt, Human
uucuuaggguuaugauuaa

SEQ ID NO: 1674146 - RNA, 14 nt, Human
uucuguauagauua

SEQ ID NO: 1674147 - RNA, 13 nt, Human
uucuguauagauu

SEQ ID NO: 1674148 - RNA, 11 nt, Human
uucuguauaga

SEQ ID NO: 1674149 - RNA, 16 nt, Human
uucuggcuaugcauuu

SEQ ID NO: 1674150 - RNA, 20 nt, Human
uucuggcagaguugaagaca

SEQ ID NO: 1674151 - RNA, 24 nt, Human
uucuaaguaaaaccacagcaguug

SEQ ID NO: 1674152 - RNA, 18 nt, Human
uugaaaauuaacaugaau

SEQ ID NO: 1674153 - RNA, 16 nt, Human
uugaaacggaugauuu

SEQ ID NO: 1674154 - RNA, 19 nt, Human
uugaaacggaugauuucua

SEQ ID NO: 1674155 - RNA, 15 nt, Human
uugaacuuugaccuc

SEQ ID NO: 1674156 - RNA, 17 nt, Human
uucuuuaauuuuggaau

SEQ ID NO: 1674157 - RNA, 18 nt, Human
uucuuuaauuuuggaauu

SEQ ID NO: 1674158 - RNA, 12 nt, Human
uucuuuaauuuu

SEQ ID NO: 1674159 - RNA, 18 nt, Human
uucuuuccacagaagcuc

SEQ ID NO: 1674160 - RNA, 21 nt, Human
uucuuuccugaggcugggcuc

SEQ ID NO: 1674161 - RNA, 21 nt, Human
uugaaaaucuuauaauuuaaa

SEQ ID NO: 1674162 - RNA, 21 nt, Human
uugaagagguuuuaaagcuuc

SEQ ID NO: 1674163 - RNA, 20 nt, Human
uugaagcacagugaucaagu

SEQ ID NO: 1674164 - RNA, 16 nt, Human
uugaagagguuuuaaa

SEQ ID NO: 1674165 - RNA, 20 nt, Human
uugaaacggaugauuucuau

SEQ ID NO: 1674166 - RNA, 20 nt, Human
uugaacuuugaccucugcag

SEQ ID NO: 1674167 - RNA, 18 nt, Human
uugaacuuugaccucugc

SEQ ID NO: 1674168 - RNA, 17 nt, Human
uugaacuuugaccucug

SEQ ID NO: 1674169 - RNA, 12 nt, Human
uugaaugaugcc

SEQ ID NO: 1674170 - RNA, 16 nt, Human
uugaaugaugccauga

SEQ ID NO: 1674171 - RNA, 13 nt, Human
uugaagcauuuua

SEQ ID NO: 1674172 - RNA, 14 nt, Human
uugaagcauuuuau

SEQ ID NO: 1674173 - RNA, 15 nt, Human
uugaagcauuuuaua

SEQ ID NO: 1674174 - RNA, 17 nt, Human
uugaagcauuuuauaaa

SEQ ID NO: 1674175 - RNA, 22 nt, Human
uugaagcauuuuauaaaucgcu

SEQ ID NO: 1674176 - RNA, 23 nt, Human
uugaagcauuuuauaaaucgcuu

SEQ ID NO: 1674177 - RNA, 18 nt, Human
uuggacaaaauggaauac

SEQ ID NO: 1674178 - RNA, 19 nt, Human
uuggaagcuccgcuuucua

SEQ ID NO: 1674179 - RNA, 15 nt, Human
uuggauuguccccga

SEQ ID NO: 1674180 - RNA, 15 nt, Human
uuggacccugaggcc

SEQ ID NO: 1674181 - RNA, 18 nt, Human
uuggacccugaggcccag

SEQ ID NO: 1674182 - RNA, 19 nt, Human
uuggacccugaggcccaga

SEQ ID NO: 1674183 - RNA, 21 nt, Human
uuggacccugaggcccagagg

SEQ ID NO: 1674184 - RNA, 12 nt, Human
uugccuuuuuca

SEQ ID NO: 1674185 - RNA, 13 nt, Human
uugccuuuuucau

SEQ ID NO: 1674186 - RNA, 14 nt, Human
uugccuuuuucauu

SEQ ID NO: 1674187 - RNA, 15 nt, Human
uugccuuuuucauua

SEQ ID NO: 1674188 - RNA, 16 nt, Human
uugccuuuuucauuau

SEQ ID NO: 1674189 - RNA, 17 nt, Human
uugccuuuuucauuauu

SEQ ID NO: 1674190 - RNA, 20 nt, Human
uugccauguuggccaggcug

SEQ ID NO: 1674191 - RNA, 21 nt, Human
uugccauguuggccaggcugg

SEQ ID NO: 1674192 - RNA, 16 nt, Human
uugcugucccuuuucc

SEQ ID NO: 1674193 - RNA, 18 nt, Human
uugcugucccuuuuccuu

SEQ ID NO: 1674194 - RNA, 14 nt, Human
uugcugcuugaggc

SEQ ID NO: 1674195 - RNA, 16 nt, Human
uugcugcuugaggcaa

SEQ ID NO: 1674196 - RNA, 16 nt, Human
uugcuaagcauuccaa

SEQ ID NO: 1674197 - RNA, 18 nt, Human
uugcuaagcauuccaacu

SEQ ID NO: 1674198 - RNA, 19 nt, Human
uuggcauaacauaaaucug

SEQ ID NO: 1674199 - RNA, 20 nt, Human
uuggcauaacauaaaucugu

SEQ ID NO: 1674200 - RNA, 22 nt, Human
uuggcauaacauaaaucuguga

SEQ ID NO: 1674201 - RNA, 23 nt, Human
uuggcauaacauaaaucugugaa

SEQ ID NO: 1674202 - RNA, 18 nt, Human
uuggcauaacauaaaucu

SEQ ID NO: 1674203 - RNA, 23 nt, Human
uuggcuucacggaagagccuugc

SEQ ID NO: 1674204 - RNA, 20 nt, Human
uugguaaggggaauugagga

SEQ ID NO: 1674205 - RNA, 20 nt, Human
uuggucugacccacugcuuu

SEQ ID NO: 1674206 - RNA, 15 nt, Human
uuggucugugagaug

SEQ ID NO: 1674207 - RNA, 12 nt, Human
uuguaaaauggu

SEQ ID NO: 1674208 - RNA, 13 nt, Human
uuguaaaauggug

SEQ ID NO: 1674209 - RNA, 17 nt, Human
uugucugaagucacugc

SEQ ID NO: 1674210 - RNA, 18 nt, Human
uugucugaagucacugca

SEQ ID NO: 1674211 - RNA, 20 nt, Human
uugucuaugggacucaaugc

SEQ ID NO: 1674212 - RNA, 22 nt, Human
uuguaugaaagauggcugugcc

SEQ ID NO: 1674213 - RNA, 20 nt, Human
uuguaugauccuaaugaaug

SEQ ID NO: 1674214 - RNA, 22 nt, Human
uugucaaaguggugagaggcau

SEQ ID NO: 1674215 - RNA, 14 nt, Human
uugucuaugggacu

SEQ ID NO: 1674216 - RNA, 20 nt, Human
uuguaaaauggugugaccac

SEQ ID NO: 1674217 - RNA, 16 nt, Human
uuguaccgcaauguga

SEQ ID NO: 1674218 - RNA, 18 nt, Human
uuguacuuuagggaagua

SEQ ID NO: 1674219 - RNA, 17 nt, Human
uuguagaagucacauuc

SEQ ID NO: 1674220 - RNA, 22 nt, Human
uuguagaagucacauuccugaa

SEQ ID NO: 1674221 - RNA, 15 nt, Human
uuguagcauccugga

SEQ ID NO: 1674222 - RNA, 13 nt, Human
uuuaacagaaaug

SEQ ID NO: 1674223 - RNA, 16 nt, Human
uuuaaaaugagaaauc

SEQ ID NO: 1674224 - RNA, 12 nt, Human
uuuaaaaugucu

SEQ ID NO: 1674225 - RNA, 19 nt, Human
uuuaaaauacacacucaaa

SEQ ID NO: 1674226 - RNA, 20 nt, Human
uuuaaaaguauauaauaaaa

SEQ ID NO: 1674227 - RNA, 16 nt, Human
uuuaaaaucauuucug

SEQ ID NO: 1674228 - RNA, 13 nt, Human
uuuaaaagauaca

SEQ ID NO: 1674229 - RNA, 14 nt, Human
uuuaaaagaaugau

SEQ ID NO: 1674230 - RNA, 17 nt, Human
uuuaaaagaaugauuau

SEQ ID NO: 1674231 - RNA, 12 nt, Human
uuguuucuguac

SEQ ID NO: 1674232 - RNA, 14 nt, Human
uuguuucuguacuu

SEQ ID NO: 1674233 - RNA, 20 nt, Human
uuguuuggggaugagaaagg

SEQ ID NO: 1674234 - RNA, 13 nt, Human
uuguuuguuuagu

SEQ ID NO: 1674235 - RNA, 14 nt, Human
uuguuuguuuaguc

SEQ ID NO: 1674236 - RNA, 20 nt, Human
uugucuuuggacccugaggc

SEQ ID NO: 1674237 - RNA, 24 nt, Human
uugucuuuggacccugaggcccag

SEQ ID NO: 1674238 - RNA, 15 nt, Human
uugucuuuggacccu

SEQ ID NO: 1674239 - RNA, 18 nt, Human
uuguuuaaaaucauuucu

SEQ ID NO: 1674240 - RNA, 17 nt, Human
uuguuuaaaaucauuuc

SEQ ID NO: 1674241 - RNA, 14 nt, Human
uuuaauaaacacuc

SEQ ID NO: 1674242 - RNA, 15 nt, Human
uuuaauaaacacucu

SEQ ID NO: 1674243 - RNA, 14 nt, Human
uuuaaccucuaaau

SEQ ID NO: 1674244 - RNA, 15 nt, Human
uuuaacagaaaugua

SEQ ID NO: 1674245 - RNA, 14 nt, Human
uuuaacagaaaugu

SEQ ID NO: 1674246 - RNA, 22 nt, Human
uuuaauaaacacucuugaaaaa

SEQ ID NO: 1674247 - RNA, 13 nt, Human
uuuaauaaaccau

SEQ ID NO: 1674248 - RNA, 14 nt, Human
uuuaauaauguuuc

SEQ ID NO: 1674249 - RNA, 15 nt, Human
uuuaauaauguuuca

SEQ ID NO: 1674250 - RNA, 14 nt, Human
uuuaauaauuauau

SEQ ID NO: 1674251 - RNA, 19 nt, Human
uuuaauaauguuucaaaca

SEQ ID NO: 1674252 - RNA, 13 nt, Human
uuuacagcugccu

SEQ ID NO: 1674253 - RNA, 16 nt, Human
uuuacauggcuggagc

SEQ ID NO: 1674254 - RNA, 15 nt, Human
uuuaauauuaaagcc

SEQ ID NO: 1674255 - RNA, 17 nt, Human
uuuaauauuaaagccau

SEQ ID NO: 1674256 - RNA, 20 nt, Human
uuuaauauuaaagccauguu

SEQ ID NO: 1674257 - RNA, 21 nt, Human
uuuaauauuaaagccauguuu

SEQ ID NO: 1674258 - RNA, 14 nt, Human
uuuaauauuaaagc

SEQ ID NO: 1674259 - RNA, 13 nt, Human
uuuacagagacag

SEQ ID NO: 1674260 - RNA, 17 nt, Human
uuuaguugcaacuuugu

SEQ ID NO: 1674261 - RNA, 18 nt, Human
uuuaguugcaacuuugua

SEQ ID NO: 1674262 - RNA, 22 nt, Human
uuuagacccuauugcugcuuga

SEQ ID NO: 1674263 - RNA, 19 nt, Human
uuuagacccuauugcugcu

SEQ ID NO: 1674264 - RNA, 18 nt, Human
uuuauaaacuuuaccuuu

SEQ ID NO: 1674265 - RNA, 15 nt, Human
uuuauaaaucgcuuu

SEQ ID NO: 1674266 - RNA, 18 nt, Human
uuuauaaaucgcuuuuga

SEQ ID NO: 1674267 - RNA, 22 nt, Human
uuuauaaaucgcuuuugauaau

SEQ ID NO: 1674268 - RNA, 19 nt, Human
uuuauaaaucgcuuuugau

SEQ ID NO: 1674269 - RNA, 20 nt, Human
uuuauacauaaacaagacca

SEQ ID NO: 1674270 - RNA, 12 nt, Human
uuuauacauaaa

SEQ ID NO: 1674271 - RNA, 20 nt, Human
uuuaugacuucauuaauaau

SEQ ID NO: 1674272 - RNA, 15 nt, Human
uuucugauccaguuu

SEQ ID NO: 1674273 - RNA, 16 nt, Human
uuucugauccaguuuu

SEQ ID NO: 1674274 - RNA, 20 nt, Human
uuucugauccaguuuuguuu

SEQ ID NO: 1674275 - RNA, 22 nt, Human
uuucugauccaguuuuguuugg

SEQ ID NO: 1674276 - RNA, 13 nt, Human
uuucugauccagu

SEQ ID NO: 1674277 - RNA, 12 nt, Human
uuucugaaauuu

SEQ ID NO: 1674278 - RNA, 14 nt, Human
uuucugaaauaaca

SEQ ID NO: 1674279 - RNA, 22 nt, Human
uuucuacccagcgagcccuggu

SEQ ID NO: 1674280 - RNA, 15 nt, Human
uuucuacccagcgag

SEQ ID NO: 1674281 - RNA, 18 nt, Human
uuucuacccagcgagccc

SEQ ID NO: 1674282 - RNA, 12 nt, Human
uuucucuaggaa

SEQ ID NO: 1674283 - RNA, 22 nt, Human
uuuccucuuagucgagccaagu

SEQ ID NO: 1674284 - RNA, 23 nt, Human
uuuccuggcacugcuuccaguga

SEQ ID NO: 1674285 - RNA, 19 nt, Human
uuuccuggcacugcuucca

SEQ ID NO: 1674286 - RNA, 17 nt, Human
uuucuaaaguaaaaaca

SEQ ID NO: 1674287 - RNA, 22 nt, Human
uuucuaaaguaaaaacaaagaa

SEQ ID NO: 1674288 - RNA, 19 nt, Human
uuucuaaaucuccaaaaua

SEQ ID NO: 1674289 - RNA, 20 nt, Human
uuuccuaaauauauuuuaag

SEQ ID NO: 1674290 - RNA, 22 nt, Human
uuuaugauacuugaaaauuaac

SEQ ID NO: 1674291 - RNA, 12 nt, Human
uuuaugcuuuaa

SEQ ID NO: 1674292 - RNA, 17 nt, Human
uuuauggcacuaguauu

SEQ ID NO: 1674293 - RNA, 15 nt, Human
uuuaugcuuuaaaca

SEQ ID NO: 1674294 - RNA, 16 nt, Human
uuuaugcuuuaaacau

SEQ ID NO: 1674295 - RNA, 17 nt, Human
uuucagccaagaauucu

SEQ ID NO: 1674296 - RNA, 14 nt, Human
uuugauaugugaac

SEQ ID NO: 1674297 - RNA, 18 nt, Human
uuugauaaucaacugggc

SEQ ID NO: 1674298 - RNA, 15 nt, Human
uuugauaugugaaca

SEQ ID NO: 1674299 - RNA, 17 nt, Human
uuugauaugugaacagu

SEQ ID NO: 1674300 - RNA, 14 nt, Human
uuugauccaagcug

SEQ ID NO: 1674301 - RNA, 15 nt, Human
uuuggacccugaggc

SEQ ID NO: 1674302 - RNA, 19 nt, Human
uuuggacccugaggcccag

SEQ ID NO: 1674303 - RNA, 16 nt, Human
uuugcuugaaagaaaa

SEQ ID NO: 1674304 - RNA, 14 nt, Human
uuugcuugaaagaa

SEQ ID NO: 1674305 - RNA, 16 nt, Human
uuuguaugcacuuugu

SEQ ID NO: 1674306 - RNA, 15 nt, Human
uuuguauucucuccu

SEQ ID NO: 1674307 - RNA, 18 nt, Human
uuugguaaggggaauuga

SEQ ID NO: 1674308 - RNA, 17 nt, Human
uuugguugcuuuaauau

SEQ ID NO: 1674309 - RNA, 23 nt, Human
uuucugaucugaugcaagcaaga

SEQ ID NO: 1674310 - RNA, 12 nt, Human
uuucuuaaauaa

SEQ ID NO: 1674311 - RNA, 18 nt, Human
uuucuuaaccagaucauu

SEQ ID NO: 1674312 - RNA, 13 nt, Human
uuucuuaaauaau

SEQ ID NO: 1674313 - RNA, 19 nt, Human
uuucuuguguguuuauugu

SEQ ID NO: 1674314 - RNA, 18 nt, Human
uuugaagcacagugauca

SEQ ID NO: 1674315 - RNA, 21 nt, Human
uuugaaauuguauuacaaauc

SEQ ID NO: 1674316 - RNA, 16 nt, Human
uuugagaucagccugg

SEQ ID NO: 1674317 - RNA, 17 nt, Human
uuugagaucagccuggg

SEQ ID NO: 1674318 - RNA, 20 nt, Human
uuugauaaucaacugggcug

SEQ ID NO: 1674319 - RNA, 15 nt, Human
uucacgugguccuaa

SEQ ID NO: 1674320 - RNA, 18 nt, Human
uucacggaagagccuugc

SEQ ID NO: 1674321 - RNA, 13 nt, Human
uucaauaggaaaa

SEQ ID NO: 1674322 - RNA, 15 nt, Human
uucaauaggaaaaac

SEQ ID NO: 1674323 - RNA, 18 nt, Human
uucaauaggaaaaacuga

SEQ ID NO: 1674324 - RNA, 20 nt, Human
uucaauaggaaaaacugauu

SEQ ID NO: 1674325 - RNA, 21 nt, Human
uucacucuccauuuaauaauu

SEQ ID NO: 1674326 - RNA, 14 nt, Human
uucagagcugcccu

SEQ ID NO: 1674327 - RNA, 13 nt, Human
uucagagcugccc

SEQ ID NO: 1674328 - RNA, 21 nt, Human
uucagaguugaugguuguaca

SEQ ID NO: 1674329 - RNA, 22 nt, Human
uucagaguugaugguuguacau

SEQ ID NO: 1674330 - RNA, 20 nt, Human
uucagauaaucacaauacau

SEQ ID NO: 1674331 - RNA, 17 nt, Human
uucagauaacuguuauu

SEQ ID NO: 1674332 - RNA, 18 nt, Human
uucagauaacuguuauuu

SEQ ID NO: 1674333 - RNA, 23 nt, Human
uucagauaacuguuauuuauaau

SEQ ID NO: 1674334 - RNA, 13 nt, Human
uucacucuccuug

SEQ ID NO: 1674335 - RNA, 21 nt, Human
uucagacagcugccugggauc

SEQ ID NO: 1674336 - RNA, 16 nt, Human
uucagacauagaauua

SEQ ID NO: 1674337 - RNA, 20 nt, Human
uucagacauagaauuaacac

SEQ ID NO: 1674338 - RNA, 19 nt, Human
uucagagacuccugcaggc

SEQ ID NO: 1674339 - RNA, 11 nt, Human
uucaaaguugc

SEQ ID NO: 1674340 - RNA, 15 nt, Human
uucaaaguugccuaa

SEQ ID NO: 1674341 - RNA, 16 nt, Human
uucaaaguugccuaaa

SEQ ID NO: 1674342 - RNA, 17 nt, Human
uucaaaguugccuaaau

SEQ ID NO: 1674343 - RNA, 23 nt, Human
uucaaaguugccuaaauccauuu

SEQ ID NO: 1674344 - RNA, 17 nt, Human
uucaacugaccagccuc

SEQ ID NO: 1674345 - RNA, 20 nt, Human
uucaacgcagcccugcuuug

SEQ ID NO: 1674346 - RNA, 16 nt, Human
uucaacgcagcccugc

SEQ ID NO: 1674347 - RNA, 19 nt, Human
uucaacgcagcccugcuuu

SEQ ID NO: 1674348 - RNA, 17 nt, Human
uucaaauccuugaagau

SEQ ID NO: 1674349 - RNA, 13 nt, Human
uuauuuuauuaug

SEQ ID NO: 1674350 - RNA, 20 nt, Human
uuauuuuauguugcauagaa

SEQ ID NO: 1674351 - RNA, 17 nt, Human
uuauuuuaauaauguuu

SEQ ID NO: 1674352 - RNA, 12 nt, Human
uuauuggcuuuu

SEQ ID NO: 1674353 - RNA, 16 nt, Human
uuauuggcuuuucuga

SEQ ID NO: 1674354 - RNA, 18 nt, Human
uuauuggcuuuucugauc

SEQ ID NO: 1674355 - RNA, 22 nt, Human
uuauuggcuuuucugauccagu

SEQ ID NO: 1674356 - RNA, 15 nt, Human
uuauuuuaauaaugu

SEQ ID NO: 1674357 - RNA, 16 nt, Human
uuauuuuaauaauguu

SEQ ID NO: 1674358 - RNA, 17 nt, Human
uuauugucaaaguggug

SEQ ID NO: 1674359 - RNA, 18 nt, Human
uuauugucaaagugguga

SEQ ID NO: 1674360 - RNA, 15 nt, Human
uuauugucuagugaa

SEQ ID NO: 1674361 - RNA, 20 nt, Human
uuaguugcaacuuuguauaa

SEQ ID NO: 1674362 - RNA, 16 nt, Human
uuaucuagauacugua

SEQ ID NO: 1674363 - RNA, 13 nt, Human
uuaguugcaacuu

SEQ ID NO: 1674364 - RNA, 16 nt, Human
uuaguuccucauuagc

SEQ ID NO: 1674365 - RNA, 14 nt, Human
uuaguuccuugagu

SEQ ID NO: 1674366 - RNA, 20 nt, Human
uuaucuugaauaauguaaga

SEQ ID NO: 1674367 - RNA, 17 nt, Human
uuaucugaagucagauc

SEQ ID NO: 1674368 - RNA, 17 nt, Human
uuaucuagauacuguau

SEQ ID NO: 1674369 - RNA, 22 nt, Human
uuaugcaugaaguaauaugcac

SEQ ID NO: 1674370 - RNA, 16 nt, Human
uuaugcaugaaguaau

SEQ ID NO: 1674371 - RNA, 16 nt, Human
uuauggaacacucuga

SEQ ID NO: 1674372 - RNA, 21 nt, Human
uuauggcacuaguauuucuau

SEQ ID NO: 1674373 - RNA, 13 nt, Human
uuaugcuuuaaac

SEQ ID NO: 1674374 - RNA, 14 nt, Human
uuaugcuuuaaaca

SEQ ID NO: 1674375 - RNA, 14 nt, Human
uuauuacaguauaa

SEQ ID NO: 1674376 - RNA, 16 nt, Human
uuauuacuguaagaaa

SEQ ID NO: 1674377 - RNA, 17 nt, Human
uuauuacuguaagaaaa

SEQ ID NO: 1674378 - RNA, 18 nt, Human
uuauuacuguaagaaaau

SEQ ID NO: 1674379 - RNA, 17 nt, Human
uuauggcuauaggugcu

SEQ ID NO: 1674380 - RNA, 11 nt, Human
uuauucugcuc

SEQ ID NO: 1674381 - RNA, 15 nt, Human
uuauugcccacgcug

SEQ ID NO: 1674382 - RNA, 19 nt, Human
uucccccuccaaucccacc

SEQ ID NO: 1674383 - RNA, 17 nt, Human
uucccuugaugaagaag

SEQ ID NO: 1674384 - RNA, 17 nt, Human
uucccuggccuuucaua

SEQ ID NO: 1674385 - RNA, 16 nt, Human
uucccuggccuuucau

SEQ ID NO: 1674386 - RNA, 12 nt, Human
uucccuggccuu

SEQ ID NO: 1674387 - RNA, 13 nt, Human
uuccucauuagca

SEQ ID NO: 1674388 - RNA, 21 nt, Human
uucccuuugacgccaucccag

SEQ ID NO: 1674389 - RNA, 22 nt, Human
uucccuuugacgccaucccagc

SEQ ID NO: 1674390 - RNA, 20 nt, Human
uucccuuugacgccauccca

SEQ ID NO: 1674391 - RNA, 18 nt, Human
uucccuugaugaagaagu

SEQ ID NO: 1674392 - RNA, 17 nt, Human
uuccugccaggcauggu

SEQ ID NO: 1674393 - RNA, 16 nt, Human
uuccugcauuugugaa

SEQ ID NO: 1674394 - RNA, 18 nt, Human
uuccugcauuugugaaau

SEQ ID NO: 1674395 - RNA, 23 nt, Human
uuccugaugcuucuucagagacu

SEQ ID NO: 1674396 - RNA, 15 nt, Human
uuccugaugcuucuu

SEQ ID NO: 1674397 - RNA, 18 nt, Human
uuccugaugcuucuucag

SEQ ID NO: 1674398 - RNA, 19 nt, Human
uuccugaugcuucuucaga

SEQ ID NO: 1674399 - RNA, 14 nt, Human
uuccuggcacugcu

SEQ ID NO: 1674400 - RNA, 20 nt, Human
uuccuugaguugauucagcu

SEQ ID NO: 1674401 - RNA, 13 nt, Human
uucuaaagcugcc

SEQ ID NO: 1674402 - RNA, 17 nt, Human
uucuaaagcugccagcc

SEQ ID NO: 1674403 - RNA, 20 nt, Human
uucgggaggucgaggcagga

SEQ ID NO: 1674404 - RNA, 20 nt, Human
uuccuuggacucauuuuaaa

SEQ ID NO: 1674405 - RNA, 20 nt, Human
uuccagcaauucuccugccu

SEQ ID NO: 1674406 - RNA, 21 nt, Human
uuccagcaauucuccugccuc

SEQ ID NO: 1674407 - RNA, 22 nt, Human
uuccagcaauucuccugccuca

SEQ ID NO: 1674408 - RNA, 23 nt, Human
uuccagcaauucuccugccucag

SEQ ID NO: 1674409 - RNA, 14 nt, Human
uucccauucuugca

SEQ ID NO: 1674410 - RNA, 16 nt, Human
uucccauuugcuccuu

SEQ ID NO: 1674411 - RNA, 15 nt, Human
uuccccaggaggcca

SEQ ID NO: 1674412 - RNA, 16 nt, Human
uuccccaggaggccag

SEQ ID NO: 1674413 - RNA, 11 nt, Human
uucccucccuu

SEQ ID NO: 1674414 - RNA, 17 nt, Human
uucccucccuuccucuu

SEQ ID NO: 1674415 - RNA, 20 nt, Human
uucccucccuuccucuuucc

SEQ ID NO: 1674416 - RNA, 19 nt, Human
uuccccaugucucgacuca

SEQ ID NO: 1674417 - RNA, 11 nt, Human
uuccccauggg

SEQ ID NO: 1674418 - RNA, 21 nt, Human
uuccccaggaggccagccuug

SEQ ID NO: 1674419 - RNA, 17 nt, Human
uuccccaggaggccagc

SEQ ID NO: 1674420 - RNA, 18 nt, Human
uuccccaggaggccagcc

SEQ ID NO: 1674421 - RNA, 19 nt, Human
uuccccaggaggccagccu

SEQ ID NO: 1674422 - RNA, 20 nt, Human
uuccccaggaggccagccuu

SEQ ID NO: 1674423 - RNA, 15 nt, Human
uucaugaaagauuca

SEQ ID NO: 1674424 - RNA, 17 nt, Human
uucaugaaagauucaau

SEQ ID NO: 1674425 - RNA, 21 nt, Human
uucaucuugaauuguaaggaa

SEQ ID NO: 1674426 - RNA, 11 nt, Human
uucaggaagcu

SEQ ID NO: 1674427 - RNA, 13 nt, Human
uucaggaagcuca

SEQ ID NO: 1674428 - RNA, 15 nt, Human
uucaggaagcucagg

SEQ ID NO: 1674429 - RNA, 15 nt, Human
uucauuuccuguguc

SEQ ID NO: 1674430 - RNA, 16 nt, Human
uucauuuccugugucu

SEQ ID NO: 1674431 - RNA, 17 nt, Human
uucaugcaaacuuuauu

SEQ ID NO: 1674432 - RNA, 15 nt, Human
uuccaaauucugcuu

SEQ ID NO: 1674433 - RNA, 17 nt, Human
uuccagagaguggcucc

SEQ ID NO: 1674434 - RNA, 18 nt, Human
uuccagagaguggcuccu

SEQ ID NO: 1674435 - RNA, 19 nt, Human
uuccagagaguggcuccuc

SEQ ID NO: 1674436 - RNA, 20 nt, Human
uuccagagaguggcuccucc

SEQ ID NO: 1674437 - RNA, 21 nt, Human
uuccagagaguggcuccuccc

SEQ ID NO: 1674438 - RNA, 19 nt, Human
uuccagauccuggaaauca

SEQ ID NO: 1674439 - RNA, 17 nt, Human
uuacugucuuuuuucua

SEQ ID NO: 1674440 - RNA, 19 nt, Human
uuacugucuuuuuucuaaa

SEQ ID NO: 1674441 - RNA, 19 nt, Human
uuacuauggcccuggccua

SEQ ID NO: 1674442 - RNA, 21 nt, Human
uuacuuaaaccgccaaggcug

SEQ ID NO: 1674443 - RNA, 11 nt, Human
uuacuucugcu

SEQ ID NO: 1674444 - RNA, 12 nt, Human
uuacuucugcua

SEQ ID NO: 1674445 - RNA, 23 nt, Human
uuacuucuuauacauuugauaaa

SEQ ID NO: 1674446 - RNA, 18 nt, Human
uuacuuagguguggggga

SEQ ID NO: 1674447 - RNA, 16 nt, Human
uuacuaauagacaauu

SEQ ID NO: 1674448 - RNA, 14 nt, Human
uuacuaaguuuuua

SEQ ID NO: 1674449 - RNA, 13 nt, Human
uuacuaaguuuuu

SEQ ID NO: 1674450 - RNA, 21 nt, Human
uuacuaucaugucaaacguga

SEQ ID NO: 1674451 - RNA, 19 nt, Human
uuacuaucaugucaaacgu

SEQ ID NO: 1674452 - RNA, 17 nt, Human
uuacuaguuucccuugc

SEQ ID NO: 1674453 - RNA, 14 nt, Human
uuagagaguguuga

SEQ ID NO: 1674454 - RNA, 16 nt, Human
uuagagaguguugaaa

SEQ ID NO: 1674455 - RNA, 17 nt, Human
uuagagaguguugaaac

SEQ ID NO: 1674456 - RNA, 16 nt, Human
uuagacagucccugcc

SEQ ID NO: 1674457 - RNA, 17 nt, Human
uuagacagucccugcca

SEQ ID NO: 1674458 - RNA, 18 nt, Human
uuagacagucccugccaa

SEQ ID NO: 1674459 - RNA, 17 nt, Human
uuacuuuaaaaggagcc

SEQ ID NO: 1674460 - RNA, 18 nt, Human
uuacuuuaaaaggagcca

SEQ ID NO: 1674461 - RNA, 14 nt, Human
uuacuuuguguuca

SEQ ID NO: 1674462 - RNA, 15 nt, Human
uuagacagucccugc

SEQ ID NO: 1674463 - RNA, 19 nt, Human
uuagaaacacaacuauauu

SEQ ID NO: 1674464 - RNA, 14 nt, Human
uuaguguucauaaa

SEQ ID NO: 1674465 - RNA, 18 nt, Human
uuaguaugaggcauuugu

SEQ ID NO: 1674466 - RNA, 16 nt, Human
uuaguaugaggcauuu

SEQ ID NO: 1674467 - RNA, 18 nt, Human
uuaggauguugaaaaagu

SEQ ID NO: 1674468 - RNA, 12 nt, Human
uuagcugggaga

SEQ ID NO: 1674469 - RNA, 12 nt, Human
uuagcuggaaaa

SEQ ID NO: 1674470 - RNA, 13 nt, Human
uuagcuggaaaag

SEQ ID NO: 1674471 - RNA, 18 nt, Human
uuagagaguguugaaacg

SEQ ID NO: 1674472 - RNA, 12 nt, Human
uuagagauuuuu

SEQ ID NO: 1674473 - RNA, 14 nt, Human
uuagaguugauacu

SEQ ID NO: 1674474 - RNA, 13 nt, Human
uuagagugucuua

SEQ ID NO: 1674475 - RNA, 13 nt, Human
uuagaucuaguuc

SEQ ID NO: 1674476 - RNA, 14 nt, Human
uuagaucuaguuca

SEQ ID NO: 1674477 - RNA, 22 nt, Human
uuagauaauacaccacuacauu

SEQ ID NO: 1674478 - RNA, 20 nt, Human
uuagaugcaguucugaagaa

SEQ ID NO: 1674479 - RNA, 21 nt, Human
uuagaugcaguucugaagaag

SEQ ID NO: 1674480 - RNA, 16 nt, Human
uuagcuacuauauaug

SEQ ID NO: 1674481 - RNA, 20 nt, Human
uguuuuaagaggcagggucu

SEQ ID NO: 1674482 - RNA, 13 nt, Human
uguuugugauuga

SEQ ID NO: 1674483 - RNA, 15 nt, Human
uguuucaaacuuuac

SEQ ID NO: 1674484 - RNA, 20 nt, Human
uguuuagauaauacaccacu

SEQ ID NO: 1674485 - RNA, 21 nt, Human
uguuucaaacauauauaacaa

SEQ ID NO: 1674486 - RNA, 22 nt, Human
uguuucaaacauauauaacaau

SEQ ID NO: 1674487 - RNA, 16 nt, Human
uguuuagauaauacac

SEQ ID NO: 1674488 - RNA, 19 nt, Human
uguuucaaacauauauaac

SEQ ID NO: 1674489 - RNA, 21 nt, Human
uuaaaauaccagccaguaaau

SEQ ID NO: 1674490 - RNA, 19 nt, Human
uuaaaauacacacucaaau

SEQ ID NO: 1674491 - RNA, 13 nt, Human
uuaaaagaaugau

SEQ ID NO: 1674492 - RNA, 15 nt, Human
uuaaaagaugaaaau

SEQ ID NO: 1674493 - RNA, 18 nt, Human
uuaaaagaugaaaauauu

SEQ ID NO: 1674494 - RNA, 17 nt, Human
uguuuuguuuggagaca

SEQ ID NO: 1674495 - RNA, 18 nt, Human
uguuuuaaggaugcuugu

SEQ ID NO: 1674496 - RNA, 22 nt, Human
uguuuuaagaggcagggucuca

SEQ ID NO: 1674497 - RNA, 19 nt, Human
uguuuuaaggaugcuugua

SEQ ID NO: 1674498 - RNA, 18 nt, Human
uguuuuuuuuuuccacuu

SEQ ID NO: 1674499 - RNA, 19 nt, Human
uguuuuuuuuuuccacuua

SEQ ID NO: 1674500 - RNA, 18 nt, Human
uguuuuuuuuuaaagacu

SEQ ID NO: 1674501 - RNA, 17 nt, Human
uuaaaagauacaguuac

SEQ ID NO: 1674502 - RNA, 14 nt, Human
uuaaaagauacagu

SEQ ID NO: 1674503 - RNA, 21 nt, Human
uuaaaagaauauuuuaacuuc

SEQ ID NO: 1674504 - RNA, 22 nt, Human
uuaaaagaauauuuuaacuucc

SEQ ID NO: 1674505 - RNA, 21 nt, Human
uuacaagcgugagccacugca

SEQ ID NO: 1674506 - RNA, 20 nt, Human
uuacaagcgugagccacugc

SEQ ID NO: 1674507 - RNA, 13 nt, Human
uuaagcauauauu

SEQ ID NO: 1674508 - RNA, 15 nt, Human
uuaagcauauauuuu

SEQ ID NO: 1674509 - RNA, 18 nt, Human
uuaagcauauauuuuuau

SEQ ID NO: 1674510 - RNA, 19 nt, Human
uuaagcauauauuuuuaua

SEQ ID NO: 1674511 - RNA, 23 nt, Human
uuaagcauauauuuuuauauuua

SEQ ID NO: 1674512 - RNA, 15 nt, Human
uuaagccuuuggaaa

SEQ ID NO: 1674513 - RNA, 16 nt, Human
uuaagccuuuggaaac

SEQ ID NO: 1674514 - RNA, 17 nt, Human
uuaagcuguuacugucu

SEQ ID NO: 1674515 - RNA, 18 nt, Human
uuaauauugauaugcuua

SEQ ID NO: 1674516 - RNA, 22 nt, Human
uuaauauugauaugcuuauaca

SEQ ID NO: 1674517 - RNA, 21 nt, Human
uuaauauuaaagccauguuua

SEQ ID NO: 1674518 - RNA, 22 nt, Human
uuaauauuaaagccauguuuau

SEQ ID NO: 1674519 - RNA, 15 nt, Human
uuaauaucaucagua

SEQ ID NO: 1674520 - RNA, 14 nt, Human
uuaaagacuuuuau

SEQ ID NO: 1674521 - RNA, 21 nt, Human
uuaaauguuuuuuuuuaaaga

SEQ ID NO: 1674522 - RNA, 23 nt, Human
uuaaauguuuuuuuuuaaagacu

SEQ ID NO: 1674523 - RNA, 17 nt, Human
uuaaccacuucagcuga

SEQ ID NO: 1674524 - RNA, 16 nt, Human
uuaacuucacauauug

SEQ ID NO: 1674525 - RNA, 15 nt, Human
uuaacuuuuauaaac

SEQ ID NO: 1674526 - RNA, 17 nt, Human
uuaacuuuuauaaacuu

SEQ ID NO: 1674527 - RNA, 16 nt, Human
uuaacuuuuauaaacu

SEQ ID NO: 1674528 - RNA, 18 nt, Human
uuaacuuuuauaaacuuu

SEQ ID NO: 1674529 - RNA, 14 nt, Human
uggcucccacaggc

SEQ ID NO: 1674530 - RNA, 17 nt, Human
uggcucccacaggcccu

SEQ ID NO: 1674531 - RNA, 20 nt, Human
uggcucccacaggcccuucc

SEQ ID NO: 1674532 - RNA, 15 nt, Human
uggcgggguggggug

SEQ ID NO: 1674533 - RNA, 18 nt, Human
uggcuccucccggugccc

SEQ ID NO: 1674534 - RNA, 19 nt, Human
uggcuccucccggugccca

SEQ ID NO: 1674535 - RNA, 14 nt, Human
uggcuccucccggu

SEQ ID NO: 1674536 - RNA, 16 nt, Human
uggcuccucccggugc

SEQ ID NO: 1674537 - RNA, 11 nt, Human
uggcugcuuca

SEQ ID NO: 1674538 - RNA, 15 nt, Human
uggcugcuucaagga

SEQ ID NO: 1674539 - RNA, 16 nt, Human
uggcugcuucaaggau

SEQ ID NO: 1674540 - RNA, 23 nt, Human
uggccucccaacucaccccagcc

SEQ ID NO: 1674541 - RNA, 22 nt, Human
uggcgcagcauauucaggaagc

SEQ ID NO: 1674542 - RNA, 23 nt, Human
uggcgcagcauauucaggaagcu

SEQ ID NO: 1674543 - RNA, 16 nt, Human
uggcgcugccccuggc

SEQ ID NO: 1674544 - RNA, 23 nt, Human
uggcgcugccccuggcagccccu

SEQ ID NO: 1674545 - RNA, 20 nt, Human
uggccccugcccggcugcgg

SEQ ID NO: 1674546 - RNA, 15 nt, Human
uggccccugcccggc

SEQ ID NO: 1674547 - RNA, 16 nt, Human
uggccccugcccggcu

SEQ ID NO: 1674548 - RNA, 20 nt, Human
uggccaggcugcucuugaac

SEQ ID NO: 1674549 - RNA, 15 nt, Human
uggccaggcuggucu

SEQ ID NO: 1674550 - RNA, 13 nt, Human
uggccaggcuggu

SEQ ID NO: 1674551 - RNA, 16 nt, Human
uggccaggcugcucuu

SEQ ID NO: 1674552 - RNA, 17 nt, Human
uggccaggcugcucuug

SEQ ID NO: 1674553 - RNA, 20 nt, Human
uggccagaugcaccagcccu

SEQ ID NO: 1674554 - RNA, 19 nt, Human
uggccagaugcaccagccc

SEQ ID NO: 1674555 - RNA, 12 nt, Human
uggcagaggagg

SEQ ID NO: 1674556 - RNA, 15 nt, Human
uggcagaguugaaga

SEQ ID NO: 1674557 - RNA, 21 nt, Human
uggcagaguggauucuugaac

SEQ ID NO: 1674558 - RNA, 17 nt, Human
uggcagaguugaagaca

SEQ ID NO: 1674559 - RNA, 19 nt, Human
uggcagaguugaagacaga

SEQ ID NO: 1674560 - RNA, 17 nt, Human
uggccagaugcaccagc

SEQ ID NO: 1674561 - RNA, 18 nt, Human
uggccagaugcaccagcc

SEQ ID NO: 1674562 - RNA, 22 nt, Human
uggaccaaaaaccaguauugua

SEQ ID NO: 1674563 - RNA, 21 nt, Human
uggagaagcucccugaaguaa

SEQ ID NO: 1674564 - RNA, 13 nt, Human
uggacuccucugu

SEQ ID NO: 1674565 - RNA, 14 nt, Human
uggacuccucuguc

SEQ ID NO: 1674566 - RNA, 20 nt, Human
uggauaauaaggaaaaguuu

SEQ ID NO: 1674567 - RNA, 14 nt, Human
uggagacugucuca

SEQ ID NO: 1674568 - RNA, 17 nt, Human
uggagacugucucaaga

SEQ ID NO: 1674569 - RNA, 21 nt, Human
uggaggaaggaaacccagcuc

SEQ ID NO: 1674570 - RNA, 23 nt, Human
uggaggaaggaaacccagcucug

SEQ ID NO: 1674571 - RNA, 16 nt, Human
uggcaaaaaggcagga

SEQ ID NO: 1674572 - RNA, 12 nt, Human
uggcaaaaaggc

SEQ ID NO: 1674573 - RNA, 15 nt, Human
uggcacuauaaugua

SEQ ID NO: 1674574 - RNA, 16 nt, Human
uggcacuauaauguaa

SEQ ID NO: 1674575 - RNA, 20 nt, Human
uggcaauagucaaauugugu

SEQ ID NO: 1674576 - RNA, 15 nt, Human
uggcacuaguauuuc

SEQ ID NO: 1674577 - RNA, 15 nt, Human
ugggccuucagggag

SEQ ID NO: 1674578 - RNA, 12 nt, Human
ugggccuucagg

SEQ ID NO: 1674579 - RNA, 21 nt, Human
uggggccaggcugggucgccc

SEQ ID NO: 1674580 - RNA, 22 nt, Human
uggggccaggcugggucgcccu

SEQ ID NO: 1674581 - RNA, 21 nt, Human
uggggccaguuggucccccuu

SEQ ID NO: 1674582 - RNA, 20 nt, Human
uggggccaguuggucccccu

SEQ ID NO: 1674583 - RNA, 15 nt, Human
uggggaugagaaagg

SEQ ID NO: 1674584 - RNA, 23 nt, Human
uggggaugagaaagguugaagca

SEQ ID NO: 1674585 - RNA, 20 nt, Human
uggggccaggcugggucgcc

SEQ ID NO: 1674586 - RNA, 13 nt, Human
uggggggggugcu

SEQ ID NO: 1674587 - RNA, 16 nt, Human
ugggggaguggccaca

SEQ ID NO: 1674588 - RNA, 15 nt, Human
uggggguucuuucuu

SEQ ID NO: 1674589 - RNA, 19 nt, Human
uggggguucuuucuuccuc

SEQ ID NO: 1674590 - RNA, 20 nt, Human
uggggguucuuucuuccucu

SEQ ID NO: 1674591 - RNA, 22 nt, Human
uggggguucuuucuuccucugc

SEQ ID NO: 1674592 - RNA, 17 nt, Human
uggguacuuguggacac

SEQ ID NO: 1674593 - RNA, 18 nt, Human
uggguacuuguggacaca

SEQ ID NO: 1674594 - RNA, 22 nt, Human
ugggauuacaagcgugagccac

SEQ ID NO: 1674595 - RNA, 17 nt, Human
ugggauuacaggcguga

SEQ ID NO: 1674596 - RNA, 22 nt, Human
ugggcagagcagagaccauccc

SEQ ID NO: 1674597 - RNA, 14 nt, Human
ugggauccuccagg

SEQ ID NO: 1674598 - RNA, 12 nt, Human
ugggauccucca

SEQ ID NO: 1674599 - RNA, 13 nt, Human
ugggauccuccag

SEQ ID NO: 1674600 - RNA, 19 nt, Human
ugggaucacauguggacuu

SEQ ID NO: 1674601 - RNA, 14 nt, Human
ugggagugggccca

SEQ ID NO: 1674602 - RNA, 16 nt, Human
ugggagugggcccaau

SEQ ID NO: 1674603 - RNA, 16 nt, Human
uggcugggggccucag

SEQ ID NO: 1674604 - RNA, 17 nt, Human
uggcugggggccucagu

SEQ ID NO: 1674605 - RNA, 20 nt, Human
uggcugggggccucagugcc

SEQ ID NO: 1674606 - RNA, 21 nt, Human
ugggccccugccucucugcag

SEQ ID NO: 1674607 - RNA, 23 nt, Human
ugggccccugccucucugcaggu

SEQ ID NO: 1674608 - RNA, 11 nt, Human
ugggccuucag

SEQ ID NO: 1674609 - RNA, 14 nt, Human
ugggccuggcuccc

SEQ ID NO: 1674610 - RNA, 19 nt, Human
ugggcagcugccuccccuc

SEQ ID NO: 1674611 - RNA, 17 nt, Human
ugggcagcugccucccc

SEQ ID NO: 1674612 - RNA, 23 nt, Human
ugggcagagcagagaccaucccu

SEQ ID NO: 1674613 - RNA, 15 nt, Human
ugggcagcugccucc

SEQ ID NO: 1674614 - RNA, 14 nt, Human
ugggcagcugccuc

SEQ ID NO: 1674615 - RNA, 13 nt, Human
ugggcagcugccu

SEQ ID NO: 1674616 - RNA, 17 nt, Human
uggucggaaaacaugcu

SEQ ID NO: 1674617 - RNA, 14 nt, Human
uggucggaaaacau

SEQ ID NO: 1674618 - RNA, 19 nt, Human
uggucuacacugugcugag

SEQ ID NO: 1674619 - RNA, 13 nt, Human
uggugaccucugc

SEQ ID NO: 1674620 - RNA, 14 nt, Human
uggugaccucugcc

SEQ ID NO: 1674621 - RNA, 15 nt, Human
uggucuacacugugc

SEQ ID NO: 1674622 - RNA, 16 nt, Human
uggucuacacugugcu

SEQ ID NO: 1674623 - RNA, 17 nt, Human
uggucuacacugugcug

SEQ ID NO: 1674624 - RNA, 18 nt, Human
uggucuacacugugcuga

SEQ ID NO: 1674625 - RNA, 21 nt, Human
uggugcaaugaccuuucaaua

SEQ ID NO: 1674626 - RNA, 15 nt, Human
uggugacugauucuu

SEQ ID NO: 1674627 - RNA, 16 nt, Human
uggugacugauucuuc

SEQ ID NO: 1674628 - RNA, 19 nt, Human
uggugacugauucuucagc

SEQ ID NO: 1674629 - RNA, 19 nt, Human
uggugacuuuccucuuugg

SEQ ID NO: 1674630 - RNA, 15 nt, Human
uggugaccucugccu

SEQ ID NO: 1674631 - RNA, 16 nt, Human
uggugaccucugccug

SEQ ID NO: 1674632 - RNA, 17 nt, Human
uggugaccucugccuga

SEQ ID NO: 1674633 - RNA, 22 nt, Human
uggugaccucugccugaaguca

SEQ ID NO: 1674634 - RNA, 17 nt, Human
ugguccgugcuaaggac

SEQ ID NO: 1674635 - RNA, 18 nt, Human
ugguccgugcuaaggacu

SEQ ID NO: 1674636 - RNA, 19 nt, Human
ugguccgugcuaaggacuu

SEQ ID NO: 1674637 - RNA, 20 nt, Human
ugguccgugcuaaggacuug

SEQ ID NO: 1674638 - RNA, 15 nt, Human
uggucccccuuccau

SEQ ID NO: 1674639 - RNA, 16 nt, Human
uggucccccuuccaug

SEQ ID NO: 1674640 - RNA, 18 nt, Human
uggucccccuuccaugga

SEQ ID NO: 1674641 - RNA, 23 nt, Human
uggucccccuuccauggacuuug

SEQ ID NO: 1674642 - RNA, 13 nt, Human
ugguccugcugca

SEQ ID NO: 1674643 - RNA, 15 nt, Human
ugguccugcugcagu

SEQ ID NO: 1674644 - RNA, 23 nt, Human
ugguccugcugcaguugccaguc

SEQ ID NO: 1674645 - RNA, 17 nt, Human
ugguccuaaucuucuga

SEQ ID NO: 1674646 - RNA, 19 nt, Human
ugguccuaaucuucugaac

SEQ ID NO: 1674647 - RNA, 14 nt, Human
uggucccccuucca

SEQ ID NO: 1674648 - RNA, 20 nt, Human
uggucacaggacucugccuc

SEQ ID NO: 1674649 - RNA, 19 nt, Human
uggucacaggacucugccu

SEQ ID NO: 1674650 - RNA, 16 nt, Human
uggucccagccagcag

SEQ ID NO: 1674651 - RNA, 18 nt, Human
uggucacaggacucugcc

SEQ ID NO: 1674652 - RNA, 22 nt, Human
uggucacaggaaguagaggagg

SEQ ID NO: 1674653 - RNA, 13 nt, Human
ugguauguuuuca

SEQ ID NO: 1674654 - RNA, 21 nt, Human
ugguauguuuucaggcuagau

SEQ ID NO: 1674655 - RNA, 18 nt, Human
ugcccaggcuggcgugca

SEQ ID NO: 1674656 - RNA, 19 nt, Human
ugcccaggcuggcgugcag

SEQ ID NO: 1674657 - RNA, 20 nt, Human
ugcccaggcuggcgugcagu

SEQ ID NO: 1674658 - RNA, 12 nt, Human
ugcccggcugcg

SEQ ID NO: 1674659 - RNA, 14 nt, Human
ugcccggcugcgga

SEQ ID NO: 1674660 - RNA, 15 nt, Human
ugccccucccuucaa

SEQ ID NO: 1674661 - RNA, 16 nt, Human
ugccccucccuucaac

SEQ ID NO: 1674662 - RNA, 17 nt, Human
ugccccuccucucugcc

SEQ ID NO: 1674663 - RNA, 18 nt, Human
ugccccuccucucugccc

SEQ ID NO: 1674664 - RNA, 19 nt, Human
ugccccuccucucugcccu

SEQ ID NO: 1674665 - RNA, 20 nt, Human
ugccccuccucucugcccua

SEQ ID NO: 1674666 - RNA, 16 nt, Human
ugccccuggcagcccc

SEQ ID NO: 1674667 - RNA, 15 nt, Human
ugcccugcccaccug

SEQ ID NO: 1674668 - RNA, 16 nt, Human
ugcccugcccaccugg

SEQ ID NO: 1674669 - RNA, 20 nt, Human
ugcccugcccaccuggccuc

SEQ ID NO: 1674670 - RNA, 15 nt, Human
ugcccugggaggcag

SEQ ID NO: 1674671 - RNA, 17 nt, Human
ugcccugggaggcagug

SEQ ID NO: 1674672 - RNA, 18 nt, Human
ugcccugggaggcaguga

SEQ ID NO: 1674673 - RNA, 13 nt, Human
ugcccugggaggc

SEQ ID NO: 1674674 - RNA, 21 nt, Human
ugcccugcccaccuggccucu

SEQ ID NO: 1674675 - RNA, 12 nt, Human
ugcccuggugcu

SEQ ID NO: 1674676 - RNA, 14 nt, Human
ugcccuggugcugc

SEQ ID NO: 1674677 - RNA, 16 nt, Human
ugcccuggugcugcca

SEQ ID NO: 1674678 - RNA, 17 nt, Human
ugcccuggugcugccac

SEQ ID NO: 1674679 - RNA, 17 nt, Human
ugcccugguuuccugcc

SEQ ID NO: 1674680 - RNA, 18 nt, Human
ugcccugguuuccugccc

SEQ ID NO: 1674681 - RNA, 13 nt, Human
ugccuaaauccau

SEQ ID NO: 1674682 - RNA, 15 nt, Human
ugccuaaauccauuu

SEQ ID NO: 1674683 - RNA, 19 nt, Human
ugccuaaauccauuuggaa

SEQ ID NO: 1674684 - RNA, 19 nt, Human
ugcccugguuuccugcccu

SEQ ID NO: 1674685 - RNA, 20 nt, Human
ugcccugguuuccugcccug

SEQ ID NO: 1674686 - RNA, 23 nt, Human
ugcccugguuuccugcccuggga

SEQ ID NO: 1674687 - RNA, 23 nt, Human
ugcccugugaguacuacaguccu

SEQ ID NO: 1674688 - RNA, 20 nt, Human
ugccuaaauccauuuggaaa

SEQ ID NO: 1674689 - RNA, 22 nt, Human
ugccuaaauccauuuggaaauc

SEQ ID NO: 1674690 - RNA, 23 nt, Human
ugccuaaauccauuuggaaaucu

SEQ ID NO: 1674691 - RNA, 15 nt, Human
ugccucaagagaagg

SEQ ID NO: 1674692 - RNA, 14 nt, Human
ugccucaagagaag

SEQ ID NO: 1674693 - RNA, 14 nt, Human
ugccuccucuucaa

SEQ ID NO: 1674694 - RNA, 16 nt, Human
ugccuccucuucaacu

SEQ ID NO: 1674695 - RNA, 20 nt, Human
ugccucacccacccuuuuuu

SEQ ID NO: 1674696 - RNA, 23 nt, Human
ugccucacccacccuuuuuuaaa

SEQ ID NO: 1674697 - RNA, 14 nt, Human
ugccaggcauggug

SEQ ID NO: 1674698 - RNA, 20 nt, Human
ugccaggaagccagcaggcu

SEQ ID NO: 1674699 - RNA, 22 nt, Human
ugccaggaagccagcaggcucu

SEQ ID NO: 1674700 - RNA, 16 nt, Human
ugccacuaaauugaca

SEQ ID NO: 1674701 - RNA, 23 nt, Human
ugcauuuggugguuucagaaaug

SEQ ID NO: 1674702 - RNA, 21 nt, Human
ugcauuuggugguuucagaaa

SEQ ID NO: 1674703 - RNA, 17 nt, Human
ugcaugguuuagaaagc

SEQ ID NO: 1674704 - RNA, 13 nt, Human
ugcaucagcugcu

SEQ ID NO: 1674705 - RNA, 19 nt, Human
ugcaucagcugcugaaaca

SEQ ID NO: 1674706 - RNA, 21 nt, Human
ugcaguuacacuaaaagguga

SEQ ID NO: 1674707 - RNA, 21 nt, Human
ugcaguggugcgaucuggguu

SEQ ID NO: 1674708 - RNA, 13 nt, Human
ugcagggaguccg

SEQ ID NO: 1674709 - RNA, 18 nt, Human
ugcauauuauuuuauguu

SEQ ID NO: 1674710 - RNA, 22 nt, Human
ugcaucaauuuuucuuauuuca

SEQ ID NO: 1674711 - RNA, 16 nt, Human
ugcaguugccagucac

SEQ ID NO: 1674712 - RNA, 12 nt, Human
ugcaguucugaa

SEQ ID NO: 1674713 - RNA, 14 nt, Human
ugcaguucugaaga

SEQ ID NO: 1674714 - RNA, 20 nt, Human
ugcauaggugaucucauuua

SEQ ID NO: 1674715 - RNA, 19 nt, Human
ugcgcuaaacuuuucugau

SEQ ID NO: 1674716 - RNA, 20 nt, Human
ugcgcuaaacuuuucugaua

SEQ ID NO: 1674717 - RNA, 21 nt, Human
ugcgcuaaacuuuucugauag

SEQ ID NO: 1674718 - RNA, 21 nt, Human
ugcgcaggcuggcccugcccu

SEQ ID NO: 1674719 - RNA, 22 nt, Human
ugcgcaggcuggcccugcccug

SEQ ID NO: 1674720 - RNA, 23 nt, Human
ugcgcaggcuggcccugcccugg

SEQ ID NO: 1674721 - RNA, 20 nt, Human
ugccuugcauaauggucaga

SEQ ID NO: 1674722 - RNA, 17 nt, Human
ugcggacagccacggcc

SEQ ID NO: 1674723 - RNA, 22 nt, Human
ugcuaagacucaguggggaggg

SEQ ID NO: 1674724 - RNA, 21 nt, Human
ugcuacuguccuacccacccu

SEQ ID NO: 1674725 - RNA, 22 nt, Human
ugcuacuguccuacccacccuc

SEQ ID NO: 1674726 - RNA, 14 nt, Human
ugcucuccucuugc

SEQ ID NO: 1674727 - RNA, 12 nt, Human
ugcucuccucuu

SEQ ID NO: 1674728 - RNA, 23 nt, Human
ugcucuccgaccagacaccuuga

SEQ ID NO: 1674729 - RNA, 17 nt, Human
ugcucacauaucuguca

SEQ ID NO: 1674730 - RNA, 15 nt, Human
ugcucaggagcccug

SEQ ID NO: 1674731 - RNA, 18 nt, Human
ugcucaggagcccuggga

SEQ ID NO: 1674732 - RNA, 19 nt, Human
ugcucaggagcccugggag

SEQ ID NO: 1674733 - RNA, 20 nt, Human
ugcucaggagcccugggagg

SEQ ID NO: 1674734 - RNA, 22 nt, Human
ugcuaggaacacuccuucacag

SEQ ID NO: 1674735 - RNA, 21 nt, Human
ugcuaggaacacuccuucaca

SEQ ID NO: 1674736 - RNA, 18 nt, Human
ugcuagaacucccuuuca

SEQ ID NO: 1674737 - RNA, 13 nt, Human
ugcuagaacuccc

SEQ ID NO: 1674738 - RNA, 14 nt, Human
ugcuagaacucccu

SEQ ID NO: 1674739 - RNA, 15 nt, Human
ugcuagaacucccuu

SEQ ID NO: 1674740 - RNA, 17 nt, Human
ugcuagaacucccuuuc

SEQ ID NO: 1674741 - RNA, 15 nt, Human
ugcugccugcuuuuu

SEQ ID NO: 1674742 - RNA, 17 nt, Human
ugcugccugcuuuuuau

SEQ ID NO: 1674743 - RNA, 23 nt, Human
ugcugcauuuaaaagauacaguu

SEQ ID NO: 1674744 - RNA, 19 nt, Human
ugcugcauuuaaaagauac

SEQ ID NO: 1674745 - RNA, 18 nt, Human
ugcugcauuuaaaagaua

SEQ ID NO: 1674746 - RNA, 17 nt, Human
ugcugcauuuaaaagau

SEQ ID NO: 1674747 - RNA, 16 nt, Human
ugcugggccccugccu

SEQ ID NO: 1674748 - RNA, 17 nt, Human
ugcugggccccugccuc

SEQ ID NO: 1674749 - RNA, 18 nt, Human
ugcugggccccugccucu

SEQ ID NO: 1674750 - RNA, 19 nt, Human
ugcugggccccugccucuc

SEQ ID NO: 1674751 - RNA, 21 nt, Human
ugcugggccccugccucucug

SEQ ID NO: 1674752 - RNA, 22 nt, Human
ugcugggccccugccucucugc

SEQ ID NO: 1674753 - RNA, 23 nt, Human
ugcugggccccugccucucugca

SEQ ID NO: 1674754 - RNA, 24 nt, Human
ugcugggccccugccucucugcag

SEQ ID NO: 1674755 - RNA, 14 nt, Human
ugcugggccccugc

SEQ ID NO: 1674756 - RNA, 20 nt, Human
ugcugggauuacagguguga

SEQ ID NO: 1674757 - RNA, 19 nt, Human
ugcugcuugaggcaacuca

SEQ ID NO: 1674758 - RNA, 12 nt, Human
ugcugcuugagg

SEQ ID NO: 1674759 - RNA, 22 nt, Human
ugcugguguaugugugaaguga

SEQ ID NO: 1674760 - RNA, 13 nt, Human
ugcugguguaugu

SEQ ID NO: 1674761 - RNA, 17 nt, Human
ugcugggguuaucugaa

SEQ ID NO: 1674762 - RNA, 20 nt, Human
ugcugggguuaucugaaguc

SEQ ID NO: 1674763 - RNA, 13 nt, Human
ugcuggguguggc

SEQ ID NO: 1674764 - RNA, 17 nt, Human
ugcugggcuugucugua

SEQ ID NO: 1674765 - RNA, 20 nt, Human
ugcugggggggauuguaaaa

SEQ ID NO: 1674766 - RNA, 13 nt, Human
ugcugguuuuagu

SEQ ID NO: 1674767 - RNA, 18 nt, Human
ugcuguaacuuucugaaa

SEQ ID NO: 1674768 - RNA, 16 nt, Human
ugcuguucaugaaaga

SEQ ID NO: 1674769 - RNA, 17 nt, Human
ugcuguucaugaaagau

SEQ ID NO: 1674770 - RNA, 16 nt, Human
ugauugugucucuugg

SEQ ID NO: 1674771 - RNA, 20 nt, Human
ugauuggcaggaguuggaag

SEQ ID NO: 1674772 - RNA, 13 nt, Human
ugauuggaggggg

SEQ ID NO: 1674773 - RNA, 21 nt, Human
ugauuggaggggggagguggg

SEQ ID NO: 1674774 - RNA, 21 nt, Human
ugauucuucagcaaaaauauu

SEQ ID NO: 1674775 - RNA, 18 nt, Human
ugauucagacagcugccu

SEQ ID NO: 1674776 - RNA, 19 nt, Human
ugauucagacagcugccug

SEQ ID NO: 1674777 - RNA, 20 nt, Human
ugauucagacagcugccugg

SEQ ID NO: 1674778 - RNA, 21 nt, Human
ugauucagacagcugccuggg

SEQ ID NO: 1674779 - RNA, 23 nt, Human
ugauucagacagcugccugggau

SEQ ID NO: 1674780 - RNA, 21 nt, Human
ugauucuccugccucagccuc

SEQ ID NO: 1674781 - RNA, 13 nt, Human
ugauuauauguca

SEQ ID NO: 1674782 - RNA, 17 nt, Human
ugauuaugaauuacauu

SEQ ID NO: 1674783 - RNA, 19 nt, Human
ugauuaugaauuacauuug

SEQ ID NO: 1674784 - RNA, 20 nt, Human
ugauguucuuucacccuuuu

SEQ ID NO: 1674785 - RNA, 22 nt, Human
ugauguuuagaaacacaacuau

SEQ ID NO: 1674786 - RNA, 12 nt, Human
ugauucacagug

SEQ ID NO: 1674787 - RNA, 13 nt, Human
ugauucagacagc

SEQ ID NO: 1674788 - RNA, 14 nt, Human
ugauucagacagcu

SEQ ID NO: 1674789 - RNA, 15 nt, Human
ugauucagacagcug

SEQ ID NO: 1674790 - RNA, 16 nt, Human
ugauucagacagcugc

SEQ ID NO: 1674791 - RNA, 20 nt, Human
ugauucaacagguuuuccug

SEQ ID NO: 1674792 - RNA, 21 nt, Human
ugauuaugaauuacauuugua

SEQ ID NO: 1674793 - RNA, 22 nt, Human
ugauuaugaauuacauuuguau

SEQ ID NO: 1674794 - RNA, 13 nt, Human
ugauccaagcugg

SEQ ID NO: 1674795 - RNA, 14 nt, Human
ugauccaagcuggu

SEQ ID NO: 1674796 - RNA, 15 nt, Human
ugauccaagcugguc

SEQ ID NO: 1674797 - RNA, 17 nt, Human
ugauccaagcugguccc

SEQ ID NO: 1674798 - RNA, 15 nt, Human
ugauagaggaagccu

SEQ ID NO: 1674799 - RNA, 13 nt, Human
ugauagcacagac

SEQ ID NO: 1674800 - RNA, 14 nt, Human
ugauagcacagacc

SEQ ID NO: 1674801 - RNA, 17 nt, Human
ugaucagcuuauugucu

SEQ ID NO: 1674802 - RNA, 24 nt, Human
ugaucagcuuauugucuagugaaa

SEQ ID NO: 1674803 - RNA, 17 nt, Human
ugaucucucgugauuga

SEQ ID NO: 1674804 - RNA, 22 nt, Human
ugaucucauuuaauccucucaa

SEQ ID NO: 1674805 - RNA, 17 nt, Human
ugauccacccaccucag

SEQ ID NO: 1674806 - RNA, 18 nt, Human
ugauccacccaccucagc

SEQ ID NO: 1674807 - RNA, 19 nt, Human
ugauccacccaccucagcc

SEQ ID NO: 1674808 - RNA, 15 nt, Human
ugaucucauuuaauc

SEQ ID NO: 1674809 - RNA, 15 nt, Human
ugaucugugggcaca

SEQ ID NO: 1674810 - RNA, 20 nt, Human
ugaucuucuuuauaauucua

SEQ ID NO: 1674811 - RNA, 14 nt, Human
ugaucuuuaaaaua

SEQ ID NO: 1674812 - RNA, 15 nt, Human
ugaugccugugaacu

SEQ ID NO: 1674813 - RNA, 20 nt, Human
ugaugccugugaacugaacu

SEQ ID NO: 1674814 - RNA, 11 nt, Human
ugaugccuggc

SEQ ID NO: 1674815 - RNA, 20 nt, Human
ugaugcuacaggauuugaaa

SEQ ID NO: 1674816 - RNA, 21 nt, Human
ugaugccugugaacugaacuc

SEQ ID NO: 1674817 - RNA, 23 nt, Human
ugaugcgggccagugcuccagcc

SEQ ID NO: 1674818 - RNA, 23 nt, Human
ugaugcuacaggauuugaaauug

SEQ ID NO: 1674819 - RNA, 18 nt, Human
ugaucuuugcagacaggc

SEQ ID NO: 1674820 - RNA, 16 nt, Human
ugaucuuugcagacag

SEQ ID NO: 1674821 - RNA, 17 nt, Human
ugaucuuuaaaauacac

SEQ ID NO: 1674822 - RNA, 14 nt, Human
ugaugguuccccug

SEQ ID NO: 1674823 - RNA, 13 nt, Human
ugaugguuguaca

SEQ ID NO: 1674824 - RNA, 14 nt, Human
ugaugguuguacau

SEQ ID NO: 1674825 - RNA, 21 nt, Human
ugaugguuguacauauaagug

SEQ ID NO: 1674826 - RNA, 16 nt, Human
ugaugcuucuucagag

SEQ ID NO: 1674827 - RNA, 17 nt, Human
ugaugcuucuucagaga

SEQ ID NO: 1674828 - RNA, 18 nt, Human
ugaugcuucuucagagac

SEQ ID NO: 1674829 - RNA, 19 nt, Human
ugaugucccaacuuguaaa

SEQ ID NO: 1674830 - RNA, 16 nt, Human
ugauguguuaucucuu

SEQ ID NO: 1674831 - RNA, 16 nt, Human
ugaggagcuugaaacc

SEQ ID NO: 1674832 - RNA, 13 nt, Human
ugagcugggauga

SEQ ID NO: 1674833 - RNA, 23 nt, Human
ugaggcauuuguuugaacugaua

SEQ ID NO: 1674834 - RNA, 23 nt, Human
ugaggcuagugugguguuuccug

SEQ ID NO: 1674835 - RNA, 21 nt, Human
ugaggcauuuguuugaacuga

SEQ ID NO: 1674836 - RNA, 17 nt, Human
ugaggcuaguguggugu

SEQ ID NO: 1674837 - RNA, 20 nt, Human
ugaggcauuuguuugaacug

SEQ ID NO: 1674838 - RNA, 19 nt, Human
ugaggcauuuguuugaacu

SEQ ID NO: 1674839 - RNA, 23 nt, Human
ugaggcaucgcaauguaagacuc

SEQ ID NO: 1674840 - RNA, 12 nt, Human
ugaggcauuugu

SEQ ID NO: 1674841 - RNA, 12 nt, Human
ugaggugggagg

SEQ ID NO: 1674842 - RNA, 13 nt, Human
ugaggugggagga

SEQ ID NO: 1674843 - RNA, 15 nt, Human
ugaggcucugcccuu

SEQ ID NO: 1674844 - RNA, 17 nt, Human
ugagggaacagagaggu

SEQ ID NO: 1674845 - RNA, 13 nt, Human
ugaggcucugccc

SEQ ID NO: 1674846 - RNA, 14 nt, Human
ugaggcucugcccu

SEQ ID NO: 1674847 - RNA, 18 nt, Human
ugaggcuccacuuggucu

SEQ ID NO: 1674848 - RNA, 20 nt, Human
ugaggcuccacuuggucugu

SEQ ID NO: 1674849 - RNA, 19 nt, Human
ugagucccaggcugagccu

SEQ ID NO: 1674850 - RNA, 19 nt, Human
ugagucgaggacagggagg

SEQ ID NO: 1674851 - RNA, 15 nt, Human
ugagucccaggcuga

SEQ ID NO: 1674852 - RNA, 21 nt, Human
ugaggugggaggaucucuuga

SEQ ID NO: 1674853 - RNA, 19 nt, Human
ugaguccagaaguuugaga

SEQ ID NO: 1674854 - RNA, 13 nt, Human
ugagucugaaggc

SEQ ID NO: 1674855 - RNA, 15 nt, Human
ugagucugaaggcug

SEQ ID NO: 1674856 - RNA, 17 nt, Human
ugagucugaaggcuggg

SEQ ID NO: 1674857 - RNA, 18 nt, Human
ugagucugaaggcugggu

SEQ ID NO: 1674858 - RNA, 14 nt, Human
ugagugagcaugcc

SEQ ID NO: 1674859 - RNA, 16 nt, Human
ugaguugauagcacag

SEQ ID NO: 1674860 - RNA, 20 nt, Human
ugaguugauagcacagaccc

SEQ ID NO: 1674861 - RNA, 22 nt, Human
ugaguuugggccccagaggcug

SEQ ID NO: 1674862 - RNA, 23 nt, Human
ugaguuugggccccagaggcugg

SEQ ID NO: 1674863 - RNA, 21 nt, Human
ugaguugauagcacagacccu

SEQ ID NO: 1674864 - RNA, 16 nt, Human
ugauaacuggaaacuu

SEQ ID NO: 1674865 - RNA, 18 nt, Human
ugagcccuguccugccua

SEQ ID NO: 1674866 - RNA, 19 nt, Human
ugagccgagaucacgccac

SEQ ID NO: 1674867 - RNA, 21 nt, Human
ugagccgagaucacgccacug

SEQ ID NO: 1674868 - RNA, 17 nt, Human
ugagccucagcauccug

SEQ ID NO: 1674869 - RNA, 14 nt, Human
ugagccucagucuc

SEQ ID NO: 1674870 - RNA, 22 nt, Human
ugagccucagcauccuggcacc

SEQ ID NO: 1674871 - RNA, 18 nt, Human
ugagccucagcauccugg

SEQ ID NO: 1674872 - RNA, 21 nt, Human
ugagccucagcauccuggcac

SEQ ID NO: 1674873 - RNA, 18 nt, Human
ugagcaucaggccaggcc

SEQ ID NO: 1674874 - RNA, 19 nt, Human
ugagcaucaggccaggccc

SEQ ID NO: 1674875 - RNA, 20 nt, Human
ugagcaucaggccaggcccu

SEQ ID NO: 1674876 - RNA, 15 nt, Human
ugagcaucacaguuu

SEQ ID NO: 1674877 - RNA, 19 nt, Human
ugagcagggcucagcgggg

SEQ ID NO: 1674878 - RNA, 16 nt, Human
ugagcagggcucagcg

SEQ ID NO: 1674879 - RNA, 17 nt, Human
ugagcagggcucagcgg

SEQ ID NO: 1674880 - RNA, 14 nt, Human
ugagcaucacaguu

SEQ ID NO: 1674881 - RNA, 16 nt, Human
ugagcaucacaguuuu

SEQ ID NO: 1674882 - RNA, 15 nt, Human
ugagaucaaaacggu

SEQ ID NO: 1674883 - RNA, 14 nt, Human
ugagaucagccugg

SEQ ID NO: 1674884 - RNA, 15 nt, Human
ugagaucagccuggg

SEQ ID NO: 1674885 - RNA, 12 nt, Human
ugagcagggcuc

SEQ ID NO: 1674886 - RNA, 13 nt, Human
ugagcagggcuca

SEQ ID NO: 1674887 - RNA, 14 nt, Human
ugagcagggcucag

SEQ ID NO: 1674888 - RNA, 15 nt, Human
ugagcagggcucagc

SEQ ID NO: 1674889 - RNA, 20 nt, Human
ugagacucgcgacaaugcaa

SEQ ID NO: 1674890 - RNA, 21 nt, Human
ugagacucgcgacaaugcaaa

SEQ ID NO: 1674891 - RNA, 22 nt, Human
ugagacucgcgacaaugcaaac

SEQ ID NO: 1674892 - RNA, 23 nt, Human
ugagacucgcgacaaugcaaacc

SEQ ID NO: 1674893 - RNA, 16 nt, Human
ugagagugaacaaauu

SEQ ID NO: 1674894 - RNA, 17 nt, Human
ugagaaauuuauaaacu

SEQ ID NO: 1674895 - RNA, 22 nt, Human
ugaccucagcuuugauauuuca

SEQ ID NO: 1674896 - RNA, 20 nt, Human
ugaccucaggugauccaccc

SEQ ID NO: 1674897 - RNA, 21 nt, Human
ugaccucaggugauccaccca

SEQ ID NO: 1674898 - RNA, 19 nt, Human
ugagacucgcgacaaugca

SEQ ID NO: 1674899 - RNA, 22 nt, Human
ucuccucuugccacugccucuu

SEQ ID NO: 1674900 - RNA, 17 nt, Human
ucuccucuugccacugc

SEQ ID NO: 1674901 - RNA, 13 nt, Human
ucuccucuugcca

SEQ ID NO: 1674902 - RNA, 16 nt, Human
ucuccucuugccacug

SEQ ID NO: 1674903 - RNA, 16 nt, Human
ucucccuucauccuuc

SEQ ID NO: 1674904 - RNA, 20 nt, Human
ucuccucugcugcuggcugg

SEQ ID NO: 1674905 - RNA, 19 nt, Human
ucuugccuuuuucauuauu

SEQ ID NO: 1674906 - RNA, 16 nt, Human
ucuugccuuuuucauu

SEQ ID NO: 1674907 - RNA, 17 nt, Human
ucuugccuuuuucauua

SEQ ID NO: 1674908 - RNA, 15 nt, Human
ucuugcaugaggcua

SEQ ID NO: 1674909 - RNA, 16 nt, Human
ucuuguguguuuauug

SEQ ID NO: 1674910 - RNA, 21 nt, Human
ucuuguguguuuauugucaaa

SEQ ID NO: 1674911 - RNA, 23 nt, Human
ucuuucacccuuuucuguuugcu

SEQ ID NO: 1674912 - RNA, 14 nt, Human
ucuuuccaaaguac

SEQ ID NO: 1674913 - RNA, 13 nt, Human
ucuuuccaaagua

SEQ ID NO: 1674914 - RNA, 16 nt, Human
ucuuucagccaagaau

SEQ ID NO: 1674915 - RNA, 19 nt, Human
ucuuucagccaagaauucu

SEQ ID NO: 1674916 - RNA, 20 nt, Human
ucuuucagccaagaauucuu

SEQ ID NO: 1674917 - RNA, 21 nt, Human
ucuuucagccaagaauucuua

SEQ ID NO: 1674918 - RNA, 17 nt, Human
ucuuuccaaaguacacu

SEQ ID NO: 1674919 - RNA, 19 nt, Human
ucuuuccacagaagcucca

SEQ ID NO: 1674920 - RNA, 17 nt, Human
ucuuuggacacucacac

SEQ ID NO: 1674921 - RNA, 12 nt, Human
ucuuugccaagu

SEQ ID NO: 1674922 - RNA, 19 nt, Human
ugaacaguuguguuugaag

SEQ ID NO: 1674923 - RNA, 22 nt, Human
ugaaccaagaacuuuccaggaa

SEQ ID NO: 1674924 - RNA, 19 nt, Human
ugaaccacaucuugcucug

SEQ ID NO: 1674925 - RNA, 23 nt, Human
ugaaccacaucuugcucugcuga

SEQ ID NO: 1674926 - RNA, 17 nt, Human
ugaaccaccacacccag

SEQ ID NO: 1674927 - RNA, 20 nt, Human
ugaaccaccacacccagccc

SEQ ID NO: 1674928 - RNA, 16 nt, Human
ugaacuccuggccuca

SEQ ID NO: 1674929 - RNA, 12 nt, Human
ugaaauuauuca

SEQ ID NO: 1674930 - RNA, 16 nt, Human
ugaaaucaguuacucu

SEQ ID NO: 1674931 - RNA, 17 nt, Human
ugaaaucaguuacucuu

SEQ ID NO: 1674932 - RNA, 15 nt, Human
ugaaaucauucauuu

SEQ ID NO: 1674933 - RNA, 16 nt, Human
ugaaauauugacuuuu

SEQ ID NO: 1674934 - RNA, 21 nt, Human
ugaaaauuuugauguuuuaag

SEQ ID NO: 1674935 - RNA, 19 nt, Human
ugaaaauuuugauguuuua

SEQ ID NO: 1674936 - RNA, 13 nt, Human
ugaaaauuuugau

SEQ ID NO: 1674937 - RNA, 20 nt, Human
ugaaaagcuccauuuuuagu

SEQ ID NO: 1674938 - RNA, 14 nt, Human
ugaaacauuuuguc

SEQ ID NO: 1674939 - RNA, 22 nt, Human
ugaaacaacaaauaggaauugu

SEQ ID NO: 1674940 - RNA, 23 nt, Human
ugaaagggaguauuacaaaaaca

SEQ ID NO: 1674941 - RNA, 13 nt, Human
ugaaagggcccag

SEQ ID NO: 1674942 - RNA, 16 nt, Human
ugaaagguacuucaaa

SEQ ID NO: 1674943 - RNA, 15 nt, Human
ugaaagggcccagag

SEQ ID NO: 1674944 - RNA, 15 nt, Human
ugaaagguacuucaa

SEQ ID NO: 1674945 - RNA, 19 nt, Human
ugaaagauggcugugccuc

SEQ ID NO: 1674946 - RNA, 18 nt, Human
ugaaagauggcugugccu

SEQ ID NO: 1674947 - RNA, 18 nt, Human
ugaaagcccugagcuuuc

SEQ ID NO: 1674948 - RNA, 18 nt, Human
ugaaagaggcagcuugaa

SEQ ID NO: 1674949 - RNA, 20 nt, Human
ugaaggaauaaauugcuccu

SEQ ID NO: 1674950 - RNA, 15 nt, Human
ugaagauacugaaau

SEQ ID NO: 1674951 - RNA, 16 nt, Human
ugaagauacugaaaua

SEQ ID NO: 1674952 - RNA, 18 nt, Human
ugaagauacugaaauaaa

SEQ ID NO: 1674953 - RNA, 14 nt, Human
ugaagauacugaaa

SEQ ID NO: 1674954 - RNA, 16 nt, Human
ugaacucugacaacag

SEQ ID NO: 1674955 - RNA, 17 nt, Human
ugaacuccuggccucaa

SEQ ID NO: 1674956 - RNA, 20 nt, Human
ugaaggagagcccuucauuu

SEQ ID NO: 1674957 - RNA, 16 nt, Human
ugaaggagagcccuuc

SEQ ID NO: 1674958 - RNA, 15 nt, Human
ugaaggccccgccca

SEQ ID NO: 1674959 - RNA, 16 nt, Human
ugaaggccccgcccag

SEQ ID NO: 1674960 - RNA, 22 nt, Human
ugaaggacauugcggacagcca

SEQ ID NO: 1674961 - RNA, 19 nt, Human
ugaaggacauugcggacag

SEQ ID NO: 1674962 - RNA, 20 nt, Human
ugaaggacauugcggacagc

SEQ ID NO: 1674963 - RNA, 13 nt, Human
ugaaguccaagca

SEQ ID NO: 1674964 - RNA, 14 nt, Human
ugaagugaaacugc

SEQ ID NO: 1674965 - RNA, 13 nt, Human
ugaagugaaacug

SEQ ID NO: 1674966 - RNA, 20 nt, Human
ugaagucagaucugccuaag

SEQ ID NO: 1674967 - RNA, 17 nt, Human
ugaaggccccgcccagg

SEQ ID NO: 1674968 - RNA, 23 nt, Human
ugaagucagaucugccuaaggac

SEQ ID NO: 1674969 - RNA, 11 nt, Human
ugaaguccaag

SEQ ID NO: 1674970 - RNA, 14 nt, Human
ugaauaaagacacc

SEQ ID NO: 1674971 - RNA, 15 nt, Human
ugaauaaagacaccu

SEQ ID NO: 1674972 - RNA, 22 nt, Human
ugaaucauuuuaccuuugacaa

SEQ ID NO: 1674973 - RNA, 23 nt, Human
ugaaucauuuuaccuuugacaaa

SEQ ID NO: 1674974 - RNA, 23 nt, Human
ugaaugaugauccuaggcauuug

SEQ ID NO: 1674975 - RNA, 16 nt, Human
ugaauuauuuucucuc

SEQ ID NO: 1674976 - RNA, 13 nt, Human
ugaauuaugaaac

SEQ ID NO: 1674977 - RNA, 15 nt, Human
ugaauuaugaaacuu

SEQ ID NO: 1674978 - RNA, 17 nt, Human
ugaauuaugaaacuuuu

SEQ ID NO: 1674979 - RNA, 15 nt, Human
ugaauuacauuugua

SEQ ID NO: 1674980 - RNA, 16 nt, Human
ugaauuacauuuguau

SEQ ID NO: 1674981 - RNA, 18 nt, Human
ugaauuacauuuguauaa

SEQ ID NO: 1674982 - RNA, 20 nt, Human
ugaccagcaccaucucuccu

SEQ ID NO: 1674983 - RNA, 16 nt, Human
ugaccauucuccaccu

SEQ ID NO: 1674984 - RNA, 17 nt, Human
ugaccauucuccaccug

SEQ ID NO: 1674985 - RNA, 18 nt, Human
ugaccauucuccaccugc

SEQ ID NO: 1674986 - RNA, 19 nt, Human
ugaccauucuccaccugcc

SEQ ID NO: 1674987 - RNA, 13 nt, Human
ugaccgugaggcc

SEQ ID NO: 1674988 - RNA, 14 nt, Human
ugaccgugaggcca

SEQ ID NO: 1674989 - RNA, 16 nt, Human
ugaccgugaggccaga

SEQ ID NO: 1674990 - RNA, 20 nt, Human
ugaccgugaggccagagaca

SEQ ID NO: 1674991 - RNA, 17 nt, Human
ugacauagucuggcugu

SEQ ID NO: 1674992 - RNA, 16 nt, Human
ugacauagucuggcug

SEQ ID NO: 1674993 - RNA, 16 nt, Human
ugacaugggacauuug

SEQ ID NO: 1674994 - RNA, 17 nt, Human
ugacaugggacauuugc

SEQ ID NO: 1674995 - RNA, 13 nt, Human
ugacaugucuuuu

SEQ ID NO: 1674996 - RNA, 18 nt, Human
ugacaugggacauuugcu

SEQ ID NO: 1674997 - RNA, 15 nt, Human
ugacaugucuuuucu

SEQ ID NO: 1674998 - RNA, 19 nt, Human
ugaccagcaccaucucucc

SEQ ID NO: 1674999 - RNA, 20 nt, Human
ugaccacugcagaagacagu

SEQ ID NO: 1675000 - RNA, 16 nt, Human
ugacagacagcccucc

SEQ ID NO: 1675001 - RNA, 20 nt, Human
ugacagacacaggcccggcu

SEQ ID NO: 1675002 - RNA, 23 nt, Human
ugacagacacaggcccggcucca

SEQ ID NO: 1675003 - RNA, 14 nt, Human
ugacagaggcagcc

SEQ ID NO: 1675004 - RNA, 15 nt, Human
ugacagaggcagccc

SEQ ID NO: 1675005 - RNA, 16 nt, Human
ugacagaggcagcccc

SEQ ID NO: 1675006 - RNA, 17 nt, Human
ugacagaggcagcccca

SEQ ID NO: 1675007 - RNA, 18 nt, Human
ugacagaggcagccccau

SEQ ID NO: 1675008 - RNA, 23 nt, Human
ugacagaggcagccccauucugc

SEQ ID NO: 1675009 - RNA, 14 nt, Human
ugacagagugagac

SEQ ID NO: 1675010 - RNA, 17 nt, Human
ugacagagugagacucu

SEQ ID NO: 1675011 - RNA, 23 nt, Human
ugacauaaguauuuaauucaugu

SEQ ID NO: 1675012 - RNA, 19 nt, Human
ugacagagugagacucugu

SEQ ID NO: 1675013 - RNA, 22 nt, Human
ugacagagugagacucugucuc

SEQ ID NO: 1675014 - RNA, 12 nt, Human
ugacaagcucac

SEQ ID NO: 1675015 - RNA, 18 nt, Human
ugacaaggauugcuacug

SEQ ID NO: 1675016 - RNA, 15 nt, Human
ugacaagcucacaga

SEQ ID NO: 1675017 - RNA, 20 nt, Human
ugacaagcucacagaccuuu

SEQ ID NO: 1675018 - RNA, 16 nt, Human
uccugccuaaggcuga

SEQ ID NO: 1675019 - RNA, 19 nt, Human
uccugccuaaggcugaacu

SEQ ID NO: 1675020 - RNA, 14 nt, Human
uccuggaguucugg

SEQ ID NO: 1675021 - RNA, 20 nt, Human
uccugcccuuaccugccagg

SEQ ID NO: 1675022 - RNA, 11 nt, Human
uccugcccugg

SEQ ID NO: 1675023 - RNA, 12 nt, Human
uccugcccuggg

SEQ ID NO: 1675024 - RNA, 14 nt, Human
uccugcccugggag

SEQ ID NO: 1675025 - RNA, 15 nt, Human
uccugcccugggagg

SEQ ID NO: 1675026 - RNA, 21 nt, Human
uccugcccugggaggcaguga

SEQ ID NO: 1675027 - RNA, 17 nt, Human
uccugcccuuaccugcc

SEQ ID NO: 1675028 - RNA, 11 nt, Human
uccuguagccc

SEQ ID NO: 1675029 - RNA, 13 nt, Human
uccuguagcccua

SEQ ID NO: 1675030 - RNA, 12 nt, Human
uccuggccucaa

SEQ ID NO: 1675031 - RNA, 13 nt, Human
uccuggcacugcu

SEQ ID NO: 1675032 - RNA, 16 nt, Human
uccuggcacugcuucc

SEQ ID NO: 1675033 - RNA, 23 nt, Human
uccuggcacccggccccugcugg

SEQ ID NO: 1675034 - RNA, 17 nt, Human
uccuggcaauagucaaa

SEQ ID NO: 1675035 - RNA, 11 nt, Human
uccugccacca

SEQ ID NO: 1675036 - RNA, 16 nt, Human
uccugccaccacgccc

SEQ ID NO: 1675037 - RNA, 13 nt, Human
uccugccaggcau

SEQ ID NO: 1675038 - RNA, 14 nt, Human
uccugccaggcaug

SEQ ID NO: 1675039 - RNA, 16 nt, Human
uccugcauuugugaaa

SEQ ID NO: 1675040 - RNA, 21 nt, Human
uccugaggcuccacuuggucu

SEQ ID NO: 1675041 - RNA, 19 nt, Human
uccugaggcuccacuuggu

SEQ ID NO: 1675042 - RNA, 20 nt, Human
uccugaggcuccacuugguc

SEQ ID NO: 1675043 - RNA, 17 nt, Human
uccugccccugagccca

SEQ ID NO: 1675044 - RNA, 10 nt, Human
uccugcccug

SEQ ID NO: 1675045 - RNA, 18 nt, Human
uccugccccugagcccau

SEQ ID NO: 1675046 - RNA, 15 nt, Human
ucccuuccucuuucc

SEQ ID NO: 1675047 - RNA, 16 nt, Human
ucccuuccucuuucca

SEQ ID NO: 1675048 - RNA, 15 nt, Human
ucccccuuccaugga

SEQ ID NO: 1675049 - RNA, 14 nt, Human
uccgccucuugggu

SEQ ID NO: 1675050 - RNA, 18 nt, Human
uccgcuuucuacccagcg

SEQ ID NO: 1675051 - RNA, 20 nt, Human
uccgcuuucuacccagcgag

SEQ ID NO: 1675052 - RNA, 20 nt, Human
uccuaagcuauucaguaaua

SEQ ID NO: 1675053 - RNA, 21 nt, Human
uccuaagcuauucaguaauaa

SEQ ID NO: 1675054 - RNA, 16 nt, Human
uccgcuuucuacccag

SEQ ID NO: 1675055 - RNA, 12 nt, Human
uccucccaccuc

SEQ ID NO: 1675056 - RNA, 13 nt, Human
uccucccaccuca

SEQ ID NO: 1675057 - RNA, 10 nt, Human
uccuccaggu

SEQ ID NO: 1675058 - RNA, 17 nt, Human
uccuaucagaaguuucu

SEQ ID NO: 1675059 - RNA, 18 nt, Human
uccucauuagcauuuugc

SEQ ID NO: 1675060 - RNA, 20 nt, Human
uccuaucaccugucuugccu

SEQ ID NO: 1675061 - RNA, 12 nt, Human
uccuaguuccac

SEQ ID NO: 1675062 - RNA, 23 nt, Human
uccuauauuguuuucaguguaca

SEQ ID NO: 1675063 - RNA, 14 nt, Human
uccuagugaaagag

SEQ ID NO: 1675064 - RNA, 23 nt, Human
uccuagugaaagaggcagcuuga

SEQ ID NO: 1675065 - RNA, 22 nt, Human
ucuccagccccuggaugcagcc

SEQ ID NO: 1675066 - RNA, 16 nt, Human
ucuccagccccuggau

SEQ ID NO: 1675067 - RNA, 18 nt, Human
ucuccagccccuggaugc

SEQ ID NO: 1675068 - RNA, 14 nt, Human
ucuccacugccuuc

SEQ ID NO: 1675069 - RNA, 12 nt, Human
ucuccagccccu

SEQ ID NO: 1675070 - RNA, 13 nt, Human
ucuccagccccug

SEQ ID NO: 1675071 - RNA, 14 nt, Human
ucuccagccccugg

SEQ ID NO: 1675072 - RNA, 15 nt, Human
ucuccagccccugga

SEQ ID NO: 1675073 - RNA, 14 nt, Human
ucucccucccuugg

SEQ ID NO: 1675074 - RNA, 18 nt, Human
ucucccucagucuggccc

SEQ ID NO: 1675075 - RNA, 23 nt, Human
ucucccucagucuggcccuuccu

SEQ ID NO: 1675076 - RNA, 11 nt, Human
ucuccaggcug

SEQ ID NO: 1675077 - RNA, 12 nt, Human
ucucccccagcc

SEQ ID NO: 1675078 - RNA, 13 nt, Human
ucucccccagccc

SEQ ID NO: 1675079 - RNA, 13 nt, Human
ucucaugccucag

SEQ ID NO: 1675080 - RNA, 16 nt, Human
ucucaugccucagccu

SEQ ID NO: 1675081 - RNA, 19 nt, Human
ucucaugccucagccuccu

SEQ ID NO: 1675082 - RNA, 13 nt, Human
ucuccacccugcu

SEQ ID NO: 1675083 - RNA, 17 nt, Human
ucuccacccugcucucc

SEQ ID NO: 1675084 - RNA, 14 nt, Human
ucuccacccugcuc

SEQ ID NO: 1675085 - RNA, 16 nt, Human
ucuccacccugcucuc

SEQ ID NO: 1675086 - RNA, 13 nt, Human
ucuccacuccaga

SEQ ID NO: 1675087 - RNA, 22 nt, Human
ucuccaccugccagggacagag

SEQ ID NO: 1675088 - RNA, 17 nt, Human
ucuccaccugccaggga

SEQ ID NO: 1675089 - RNA, 19 nt, Human
ucuccaccugccagggaca

SEQ ID NO: 1675090 - RNA, 14 nt, Human
ucuccaccugccag

SEQ ID NO: 1675091 - RNA, 15 nt, Human
ucuccaccugccagg

SEQ ID NO: 1675092 - RNA, 16 nt, Human
ucuccaccugccaggg

SEQ ID NO: 1675093 - RNA, 16 nt, Human
ucucauacucaccuca

SEQ ID NO: 1675094 - RNA, 18 nt, Human
ucucauacucaccucacc

SEQ ID NO: 1675095 - RNA, 23 nt, Human
ucuaugggacucaaugcacugac

SEQ ID NO: 1675096 - RNA, 19 nt, Human
ucuaugggacucaaugcac

SEQ ID NO: 1675097 - RNA, 12 nt, Human
ucuaugggacuc

SEQ ID NO: 1675098 - RNA, 13 nt, Human
ucuaugggacuca

SEQ ID NO: 1675099 - RNA, 23 nt, Human
ucucaguccaugaagauguagag

SEQ ID NO: 1675100 - RNA, 16 nt, Human
ucguguccccuauccu

SEQ ID NO: 1675101 - RNA, 20 nt, Human
ucuaaaggcuaccuuuguau

SEQ ID NO: 1675102 - RNA, 19 nt, Human
ucuaaaggcuaccuuugua

SEQ ID NO: 1675103 - RNA, 17 nt, Human
ucuaaaggcuaccuuug

SEQ ID NO: 1675104 - RNA, 18 nt, Human
ucuaaaggcuaccuuugu

SEQ ID NO: 1675105 - RNA, 13 nt, Human
ucgugacaacacu

SEQ ID NO: 1675106 - RNA, 12 nt, Human
ucggagaagagc

SEQ ID NO: 1675107 - RNA, 18 nt, Human
ucggacuuagcugggaga

SEQ ID NO: 1675108 - RNA, 14 nt, Human
ucggagaagagcug

SEQ ID NO: 1675109 - RNA, 16 nt, Human
ucggagaagagcuguu

SEQ ID NO: 1675110 - RNA, 15 nt, Human
ucuaggaagacuuug

SEQ ID NO: 1675111 - RNA, 16 nt, Human
ucuaggaagacuuugg

SEQ ID NO: 1675112 - RNA, 19 nt, Human
ucuaggaagacuuuggaaa

SEQ ID NO: 1675113 - RNA, 21 nt, Human
ucuaggaagacuuuggaaaga

SEQ ID NO: 1675114 - RNA, 17 nt, Human
ucuaugacacaugcaag

SEQ ID NO: 1675115 - RNA, 18 nt, Human
ucuaugaaauauuauguu

SEQ ID NO: 1675116 - RNA, 14 nt, Human
ucuaugacacaugc

SEQ ID NO: 1675117 - RNA, 14 nt, Human
ucuaucaccaagga

SEQ ID NO: 1675118 - RNA, 14 nt, Human
ucuaccuuccugca

SEQ ID NO: 1675119 - RNA, 15 nt, Human
ucuacagaggccaug

SEQ ID NO: 1675120 - RNA, 16 nt, Human
ucuacagaggccaugg

SEQ ID NO: 1675121 - RNA, 17 nt, Human
ucuacacuaagagagaa

SEQ ID NO: 1675122 - RNA, 23 nt, Human
ucccagcugugcucuggacaggc

SEQ ID NO: 1675123 - RNA, 21 nt, Human
ucccagcugugcucuggacag

SEQ ID NO: 1675124 - RNA, 22 nt, Human
ucccagcugugcucuggacagg

SEQ ID NO: 1675125 - RNA, 24 nt, Human
ucccaggcauuccccaggaggcca

SEQ ID NO: 1675126 - RNA, 16 nt, Human
ucccaggcgccccuuc

SEQ ID NO: 1675127 - RNA, 15 nt, Human
ucccaucuuccaagg

SEQ ID NO: 1675128 - RNA, 18 nt, Human
ucccaugagccucagcau

SEQ ID NO: 1675129 - RNA, 19 nt, Human
ucccaugagccucagcauc

SEQ ID NO: 1675130 - RNA, 20 nt, Human
uccaugugggcuaguugggc

SEQ ID NO: 1675131 - RNA, 22 nt, Human
ucccaccucucucacuccuuga

SEQ ID NO: 1675132 - RNA, 13 nt, Human
ucccaccuuggcu

SEQ ID NO: 1675133 - RNA, 16 nt, Human
ucccaccuuggcugca

SEQ ID NO: 1675134 - RNA, 17 nt, Human
ucccaccuuggcugcag

SEQ ID NO: 1675135 - RNA, 20 nt, Human
ucccagcugugcucuggaca

SEQ ID NO: 1675136 - RNA, 18 nt, Human
ucccaccuuggcugcagg

SEQ ID NO: 1675137 - RNA, 13 nt, Human
ucccauuauucaa

SEQ ID NO: 1675138 - RNA, 14 nt, Human
ucccauuauucaaa

SEQ ID NO: 1675139 - RNA, 20 nt, Human
ucccaugagccucagcaucc

SEQ ID NO: 1675140 - RNA, 16 nt, Human
ucccauuauucaaagu

SEQ ID NO: 1675141 - RNA, 18 nt, Human
ucccauuauucaaaguug

SEQ ID NO: 1675142 - RNA, 19 nt, Human
ucccauuauucaaaguugc

SEQ ID NO: 1675143 - RNA, 13 nt, Human
uccccagauugca

SEQ ID NO: 1675144 - RNA, 18 nt, Human
uccccagauugcaacagg

SEQ ID NO: 1675145 - RNA, 19 nt, Human
uccccagauugcaacaggc

SEQ ID NO: 1675146 - RNA, 20 nt, Human
uccccagauugcaacaggcu

SEQ ID NO: 1675147 - RNA, 22 nt, Human
uccccagauugcaacaggcugg

SEQ ID NO: 1675148 - RNA, 23 nt, Human
uccccagauugcaacaggcuggg

SEQ ID NO: 1675149 - RNA, 20 nt, Human
uccccagcaagugagagcug

SEQ ID NO: 1675150 - RNA, 21 nt, Human
uccccagcaagugagagcugg

SEQ ID NO: 1675151 - RNA, 22 nt, Human
uccccagcaagugagagcuggg

SEQ ID NO: 1675152 - RNA, 22 nt, Human
ucccccagccccauccucugua

SEQ ID NO: 1675153 - RNA, 20 nt, Human
ucccccagccccauccucug

SEQ ID NO: 1675154 - RNA, 21 nt, Human
ucccccagccccauccucugu

SEQ ID NO: 1675155 - RNA, 15 nt, Human
uccccaggaggccag

SEQ ID NO: 1675156 - RNA, 16 nt, Human
uccccaggaggccagc

SEQ ID NO: 1675157 - RNA, 17 nt, Human
ucccccagccccauccu

SEQ ID NO: 1675158 - RNA, 17 nt, Human
uccccaggaggccagcc

SEQ ID NO: 1675159 - RNA, 14 nt, Human
uccccaggaggcca

SEQ ID NO: 1675160 - RNA, 14 nt, Human
uccagcagauuauu

SEQ ID NO: 1675161 - RNA, 15 nt, Human
uccagcagauuauuc

SEQ ID NO: 1675162 - RNA, 16 nt, Human
uccagcagauuauuca

SEQ ID NO: 1675163 - RNA, 22 nt, Human
uccagcaauucuccugccucag

SEQ ID NO: 1675164 - RNA, 17 nt, Human
uccagcagauuauucac

SEQ ID NO: 1675165 - RNA, 19 nt, Human
uccaggggugggacacccu

SEQ ID NO: 1675166 - RNA, 20 nt, Human
uccaggggugggacacccug

SEQ ID NO: 1675167 - RNA, 12 nt, Human
uccaggagcagc

SEQ ID NO: 1675168 - RNA, 13 nt, Human
uccaggagcagcc

SEQ ID NO: 1675169 - RNA, 14 nt, Human
uccaggagcagcca

SEQ ID NO: 1675170 - RNA, 15 nt, Human
uccaggagcagccac

SEQ ID NO: 1675171 - RNA, 23 nt, Human
uccagaaagaaaacuuguauuau

SEQ ID NO: 1675172 - RNA, 16 nt, Human
uccaaaguacacuguu

SEQ ID NO: 1675173 - RNA, 14 nt, Human
uccaaaguacacug

SEQ ID NO: 1675174 - RNA, 21 nt, Human
uccacuuggucugugagaugc

SEQ ID NO: 1675175 - RNA, 20 nt, Human
uccacuuucuagccagagga

SEQ ID NO: 1675176 - RNA, 21 nt, Human
uccacuuucuagccagaggag

SEQ ID NO: 1675177 - RNA, 23 nt, Human
uccacuuggucugugagaugcua

SEQ ID NO: 1675178 - RNA, 14 nt, Human
uccaugcugccucc

SEQ ID NO: 1675179 - RNA, 15 nt, Human
uccaugcugccucca

SEQ ID NO: 1675180 - RNA, 13 nt, Human
uccauggacuuug

SEQ ID NO: 1675181 - RNA, 20 nt, Human
uccaugggccauaugaaaag

SEQ ID NO: 1675182 - RNA, 14 nt, Human
uccaucaggccacu

SEQ ID NO: 1675183 - RNA, 14 nt, Human
uccauagagagcaa

SEQ ID NO: 1675184 - RNA, 15 nt, Human
uccauagagagcaag

SEQ ID NO: 1675185 - RNA, 21 nt, Human
uccauaaucuggacuccucug

SEQ ID NO: 1675186 - RNA, 15 nt, Human
uccauacauuugugu

SEQ ID NO: 1675187 - RNA, 20 nt, Human
uccaguuuuguuuggaccaa

SEQ ID NO: 1675188 - RNA, 22 nt, Human
uccauaaucuggacuccucugu

SEQ ID NO: 1675189 - RNA, 15 nt, Human
uccaguuuuguuugg

SEQ ID NO: 1675190 - RNA, 17 nt, Human
uccaguuuuguuuggac

SEQ ID NO: 1675191 - RNA, 20 nt, Human
uccagguuuaagcuguuacu

SEQ ID NO: 1675192 - RNA, 22 nt, Human
uccaggggugggacacccugug

SEQ ID NO: 1675193 - RNA, 19 nt, Human
uccagguagagggugugua

SEQ ID NO: 1675194 - RNA, 21 nt, Human
ucagucugauucccaagcucu

SEQ ID NO: 1675195 - RNA, 22 nt, Human
ucagucugauucccaagcucug

SEQ ID NO: 1675196 - RNA, 23 nt, Human
ucagucugauucccaagcucugc

SEQ ID NO: 1675197 - RNA, 16 nt, Human
ucagucucccucccuu

SEQ ID NO: 1675198 - RNA, 20 nt, Human
ucagguggggcagcuugagg

SEQ ID NO: 1675199 - RNA, 23 nt, Human
ucaguauugaagcauuuuauaaa

SEQ ID NO: 1675200 - RNA, 16 nt, Human
ucaggcucuucuccuu

SEQ ID NO: 1675201 - RNA, 21 nt, Human
ucaggcucuucuccuuucaca

SEQ ID NO: 1675202 - RNA, 12 nt, Human
ucaggucccugc

SEQ ID NO: 1675203 - RNA, 23 nt, Human
ucaggugagaagcagaggaagga

SEQ ID NO: 1675204 - RNA, 16 nt, Human
ucaggugauccaccca

SEQ ID NO: 1675205 - RNA, 23 nt, Human
ucaggugccucaagagaaggcaa

SEQ ID NO: 1675206 - RNA, 23 nt, Human
ucaggugauccacccaccucagc

SEQ ID NO: 1675207 - RNA, 18 nt, Human
ucagguggggcagcuuga

SEQ ID NO: 1675208 - RNA, 19 nt, Human
ucagguggggcagcuugag

SEQ ID NO: 1675209 - RNA, 11 nt, Human
ucaggagcccu

SEQ ID NO: 1675210 - RNA, 12 nt, Human
ucaggagcccug

SEQ ID NO: 1675211 - RNA, 14 nt, Human
ucaggagcccuggg

SEQ ID NO: 1675212 - RNA, 15 nt, Human
ucaggagcccuggga

SEQ ID NO: 1675213 - RNA, 20 nt, Human
ucaggaucaaaccccgacca

SEQ ID NO: 1675214 - RNA, 15 nt, Human
ucaggcucuucuccu

SEQ ID NO: 1675215 - RNA, 21 nt, Human
ucaggccugggggcugggcag

SEQ ID NO: 1675216 - RNA, 23 nt, Human
ucagcucugcaagaauugaagca

SEQ ID NO: 1675217 - RNA, 23 nt, Human
ucaggaagcucagggccuggcuc

SEQ ID NO: 1675218 - RNA, 23 nt, Human
ucagcuccagcucaccagcccca

SEQ ID NO: 1675219 - RNA, 24 nt, Human
ucagcuccagcucaccagccccag

SEQ ID NO: 1675220 - RNA, 20 nt, Human
ucauggaacgcguugaaauu

SEQ ID NO: 1675221 - RNA, 21 nt, Human
ucauggaacgcguugaaauug

SEQ ID NO: 1675222 - RNA, 22 nt, Human
ucauggaacgcguugaaauugu

SEQ ID NO: 1675223 - RNA, 17 nt, Human
ucaugcuguucaugaaa

SEQ ID NO: 1675224 - RNA, 16 nt, Human
ucaucuccccaucauu

SEQ ID NO: 1675225 - RNA, 18 nt, Human
ucauccacugugccaugu

SEQ ID NO: 1675226 - RNA, 14 nt, Human
ucauccacugugcc

SEQ ID NO: 1675227 - RNA, 17 nt, Human
ucauccacugugccaug

SEQ ID NO: 1675228 - RNA, 17 nt, Human
ucaucaaugaaugaaug

SEQ ID NO: 1675229 - RNA, 16 nt, Human
ucagugccaaaaacaa

SEQ ID NO: 1675230 - RNA, 20 nt, Human
ucaguguacauggaauaaca

SEQ ID NO: 1675231 - RNA, 12 nt, Human
ucauagcagcuu

SEQ ID NO: 1675232 - RNA, 11 nt, Human
ucauagcagcu

SEQ ID NO: 1675233 - RNA, 14 nt, Human
ucauggugcucaga

SEQ ID NO: 1675234 - RNA, 16 nt, Human
ucauuaggauggcuag

SEQ ID NO: 1675235 - RNA, 13 nt, Human
uccaaaguacacu

SEQ ID NO: 1675236 - RNA, 14 nt, Human
uccaaagaaaugua

SEQ ID NO: 1675237 - RNA, 17 nt, Human
uccaaagaaauguaagg

SEQ ID NO: 1675238 - RNA, 14 nt, Human
uauggaggcaggag

SEQ ID NO: 1675239 - RNA, 13 nt, Human
uauguguguuuua

SEQ ID NO: 1675240 - RNA, 19 nt, Human
uauggaggcuuugcauaga

SEQ ID NO: 1675241 - RNA, 12 nt, Human
uauguuaaaacu

SEQ ID NO: 1675242 - RNA, 19 nt, Human
uauguuagugcaaauuguc

SEQ ID NO: 1675243 - RNA, 16 nt, Human
uauuaagaaagacuau

SEQ ID NO: 1675244 - RNA, 15 nt, Human
uauuaaaugcccagc

SEQ ID NO: 1675245 - RNA, 17 nt, Human
uauuaaaugcccagccc

SEQ ID NO: 1675246 - RNA, 19 nt, Human
uauuaaaugcccagccccu

SEQ ID NO: 1675247 - RNA, 17 nt, Human
uauguugaagccuuugu

SEQ ID NO: 1675248 - RNA, 21 nt, Human
uauguugcccaggcaggucuu

SEQ ID NO: 1675249 - RNA, 22 nt, Human
uauguucuuaguggauguucug

SEQ ID NO: 1675250 - RNA, 17 nt, Human
uauguucuaagaaguga

SEQ ID NO: 1675251 - RNA, 13 nt, Human
uauuauaccuuuu

SEQ ID NO: 1675252 - RNA, 12 nt, Human
uauuauaccuuu

SEQ ID NO: 1675253 - RNA, 14 nt, Human
uauuaaggaagaca

SEQ ID NO: 1675254 - RNA, 16 nt, Human
uauuaagcauauauuu

SEQ ID NO: 1675255 - RNA, 24 nt, Human
uauuaagaaagacuaucuaaaugu

SEQ ID NO: 1675256 - RNA, 14 nt, Human
uauuauaccuuuuu

SEQ ID NO: 1675257 - RNA, 17 nt, Human
uauuauauuuacaaaug

SEQ ID NO: 1675258 - RNA, 12 nt, Human
uauuaugaaacu

SEQ ID NO: 1675259 - RNA, 20 nt, Human
uauuaugaaacuuguguaaa

SEQ ID NO: 1675260 - RNA, 21 nt, Human
uauuaugaaacuuguguaaau

SEQ ID NO: 1675261 - RNA, 22 nt, Human
uauuaugaaacuuguguaaaua

SEQ ID NO: 1675262 - RNA, 12 nt, Human
uauuauguaaau

SEQ ID NO: 1675263 - RNA, 15 nt, Human
uauuauguaaauccc

SEQ ID NO: 1675264 - RNA, 20 nt, Human
uauuauggaggcaggaguuu

SEQ ID NO: 1675265 - RNA, 22 nt, Human
uauuauguaaaucccauuauuc

SEQ ID NO: 1675266 - RNA, 16 nt, Human
uauuauguuaaaacug

SEQ ID NO: 1675267 - RNA, 14 nt, Human
uauuucuaugaaau

SEQ ID NO: 1675268 - RNA, 15 nt, Human
uauuucuaugaaaua

SEQ ID NO: 1675269 - RNA, 13 nt, Human
uauuucuaugaaa

SEQ ID NO: 1675270 - RNA, 22 nt, Human
uauuuauuaaaugcccagcccc

SEQ ID NO: 1675271 - RNA, 14 nt, Human
uauuuauuacugua

SEQ ID NO: 1675272 - RNA, 17 nt, Human
uauuuaugggauccugg

SEQ ID NO: 1675273 - RNA, 20 nt, Human
uauuguuuaaaaucauuucu

SEQ ID NO: 1675274 - RNA, 23 nt, Human
uauugcugauggugcaaugaccu

SEQ ID NO: 1675275 - RNA, 13 nt, Human
uauugcccacgcu

SEQ ID NO: 1675276 - RNA, 14 nt, Human
uauugcccacgcug

SEQ ID NO: 1675277 - RNA, 15 nt, Human
uauugcccacgcugg

SEQ ID NO: 1675278 - RNA, 15 nt, Human
uauuguuuaaaauca

SEQ ID NO: 1675279 - RNA, 16 nt, Human
uauuguuuaaaaucau

SEQ ID NO: 1675280 - RNA, 17 nt, Human
uauuguuuaaaaucauu

SEQ ID NO: 1675281 - RNA, 19 nt, Human
uauugugcgcuaaacuuuu

SEQ ID NO: 1675282 - RNA, 22 nt, Human
uauugugcgcuaaacuuuucug

SEQ ID NO: 1675283 - RNA, 23 nt, Human
uauugugcgcuaaacuuuucuga

SEQ ID NO: 1675284 - RNA, 20 nt, Human
uauugauaugcuuauacacu

SEQ ID NO: 1675285 - RNA, 19 nt, Human
ucacaggacucugccuccu

SEQ ID NO: 1675286 - RNA, 23 nt, Human
ucacaggacucugccuccucuuc

SEQ ID NO: 1675287 - RNA, 19 nt, Human
ucacaggagggagggggaa

SEQ ID NO: 1675288 - RNA, 14 nt, Human
ucacauuggaaaca

SEQ ID NO: 1675289 - RNA, 17 nt, Human
ucacaggacucugccuc

SEQ ID NO: 1675290 - RNA, 18 nt, Human
ucacaggacucugccucc

SEQ ID NO: 1675291 - RNA, 16 nt, Human
ucacaggacucugccu

SEQ ID NO: 1675292 - RNA, 15 nt, Human
ucacacacuuuggcu

SEQ ID NO: 1675293 - RNA, 22 nt, Human
ucacacaugagcaucaggccag

SEQ ID NO: 1675294 - RNA, 23 nt, Human
ucacacaugagcaucaggccagg

SEQ ID NO: 1675295 - RNA, 19 nt, Human
ucaauaaaaaauuaugaca

SEQ ID NO: 1675296 - RNA, 14 nt, Human
ucaauaaaauccau

SEQ ID NO: 1675297 - RNA, 22 nt, Human
ucacaagacccaaaaggcagaa

SEQ ID NO: 1675298 - RNA, 22 nt, Human
ucaccgaaaacguggcugcuuc

SEQ ID NO: 1675299 - RNA, 23 nt, Human
ucaccgaaaacguggcugcuuca

SEQ ID NO: 1675300 - RNA, 15 nt, Human
ucaccgaaaacgugg

SEQ ID NO: 1675301 - RNA, 19 nt, Human
ucaccgaaaacguggcugc

SEQ ID NO: 1675302 - RNA, 20 nt, Human
ucaccgaaaacguggcugcu

SEQ ID NO: 1675303 - RNA, 21 nt, Human
ucaccgaaaacguggcugcuu

SEQ ID NO: 1675304 - RNA, 19 nt, Human
ucacccgcuaagagggagg

SEQ ID NO: 1675305 - RNA, 20 nt, Human
ucacccuggggcuaggaaau

SEQ ID NO: 1675306 - RNA, 12 nt, Human
ucacccuuuucu

SEQ ID NO: 1675307 - RNA, 14 nt, Human
ucaccgaaaacgug

SEQ ID NO: 1675308 - RNA, 13 nt, Human
ucaccaagcccag

SEQ ID NO: 1675309 - RNA, 18 nt, Human
ucacccgcuaagagggag

SEQ ID NO: 1675310 - RNA, 14 nt, Human
ucacauuuauucug

SEQ ID NO: 1675311 - RNA, 17 nt, Human
ucaccaacgucugugcc

SEQ ID NO: 1675312 - RNA, 18 nt, Human
ucaccaacgucugugcca

SEQ ID NO: 1675313 - RNA, 22 nt, Human
ucacauuguauucagaguugau

SEQ ID NO: 1675314 - RNA, 18 nt, Human
ucacauugguguuguacu

SEQ ID NO: 1675315 - RNA, 17 nt, Human
ucacauuggaaacaagu

SEQ ID NO: 1675316 - RNA, 12 nt, Human
ucacauuuaaau

SEQ ID NO: 1675317 - RNA, 13 nt, Human
ucaaggauccuga

SEQ ID NO: 1675318 - RNA, 14 nt, Human
ucaaggauccugag

SEQ ID NO: 1675319 - RNA, 14 nt, Human
ucaauaaaaaauua

SEQ ID NO: 1675320 - RNA, 16 nt, Human
ucaauaaaaaauuaug

SEQ ID NO: 1675321 - RNA, 13 nt, Human
ucaauaaaaaauu

SEQ ID NO: 1675322 - RNA, 17 nt, Human
ucaaggauccugagcca

SEQ ID NO: 1675323 - RNA, 15 nt, Human
ucaaggauccugagc

SEQ ID NO: 1675324 - RNA, 16 nt, Human
ucaaggauccugagcc

SEQ ID NO: 1675325 - RNA, 21 nt, Human
ucaagcgauucuucugcuuca

SEQ ID NO: 1675326 - RNA, 18 nt, Human
ucaagcgauucuucugcu

SEQ ID NO: 1675327 - RNA, 19 nt, Human
ucaagcgauucuucugcuu

SEQ ID NO: 1675328 - RNA, 12 nt, Human
ucaagccaccaa

SEQ ID NO: 1675329 - RNA, 20 nt, Human
ucaagccaccaacauacucc

SEQ ID NO: 1675330 - RNA, 16 nt, Human
ucaaccuccugggcua

SEQ ID NO: 1675331 - RNA, 20 nt, Human
ucaaccccuucgcuccugug

SEQ ID NO: 1675332 - RNA, 15 nt, Human
ucaaccuccugggcu

SEQ ID NO: 1675333 - RNA, 18 nt, Human
ucaaccccuucgcuccug

SEQ ID NO: 1675334 - RNA, 19 nt, Human
ucaaccccuucgcuccugu

SEQ ID NO: 1675335 - RNA, 24 nt, Human
ucaacugaccagccuccaugcugc

SEQ ID NO: 1675336 - RNA, 18 nt, Human
ucaacugaccagccucca

SEQ ID NO: 1675337 - RNA, 20 nt, Human
ucaacucuccuccagaguca

SEQ ID NO: 1675338 - RNA, 14 nt, Human
ucaacucccugccc

SEQ ID NO: 1675339 - RNA, 15 nt, Human
ucaacucccugcccc

SEQ ID NO: 1675340 - RNA, 21 nt, Human
ucaacucccugccccccagcc

SEQ ID NO: 1675341 - RNA, 22 nt, Human
ucaacucccugccccccagccc

SEQ ID NO: 1675342 - RNA, 22 nt, Human
ucaacuccaaacugacucuuaa

SEQ ID NO: 1675343 - RNA, 23 nt, Human
ucaaaccccgaccaccugcccaa

SEQ ID NO: 1675344 - RNA, 19 nt, Human
ucaaaccccgaccaccugc

SEQ ID NO: 1675345 - RNA, 20 nt, Human
ucaaaccccgaccaccugcc

SEQ ID NO: 1675346 - RNA, 22 nt, Human
ucaaacagucucaggaaaucaa

SEQ ID NO: 1675347 - RNA, 17 nt, Human
ucaaacauauauaacaa

SEQ ID NO: 1675348 - RNA, 16 nt, Human
ucaaauccuugaagau

SEQ ID NO: 1675349 - RNA, 18 nt, Human
ucaaauaugcaaagcacu

SEQ ID NO: 1675350 - RNA, 19 nt, Human
ucaaauaugcaaagcacug

SEQ ID NO: 1675351 - RNA, 12 nt, Human
ucaaagagguuu

SEQ ID NO: 1675352 - RNA, 23 nt, Human
ucaaagagguuuuaaaaaaaucc

SEQ ID NO: 1675353 - RNA, 17 nt, Human
ucaaauaugcaaagcac

SEQ ID NO: 1675354 - RNA, 15 nt, Human
uauaauuaacauguu

SEQ ID NO: 1675355 - RNA, 16 nt, Human
uauaauuaacauguua

SEQ ID NO: 1675356 - RNA, 18 nt, Human
uauaauuaacauguuaaa

SEQ ID NO: 1675357 - RNA, 19 nt, Human
uauaauuaacauguuaaac

SEQ ID NO: 1675358 - RNA, 13 nt, Human
uauaauuaacaug

SEQ ID NO: 1675359 - RNA, 14 nt, Human
uauaauuaacaugu

SEQ ID NO: 1675360 - RNA, 12 nt, Human
uauaauuaacau

SEQ ID NO: 1675361 - RNA, 20 nt, Human
uauaaucacuuuuuuccaca

SEQ ID NO: 1675362 - RNA, 22 nt, Human
uauaauuaacauguuaaaccau

SEQ ID NO: 1675363 - RNA, 15 nt, Human
uauaauucacauugu

SEQ ID NO: 1675364 - RNA, 20 nt, Human
uauaauucacauuguauuca

SEQ ID NO: 1675365 - RNA, 23 nt, Human
uauaaaucgcuuuugauaaucaa

SEQ ID NO: 1675366 - RNA, 18 nt, Human
uauaucugaggaauucug

SEQ ID NO: 1675367 - RNA, 19 nt, Human
uauaucugaggaauucugu

SEQ ID NO: 1675368 - RNA, 20 nt, Human
uauaucugaggaauucugua

SEQ ID NO: 1675369 - RNA, 21 nt, Human
uauaucugaggaauucuguau

SEQ ID NO: 1675370 - RNA, 22 nt, Human
uauaucugaggaauucuguaua

SEQ ID NO: 1675371 - RNA, 13 nt, Human
uauauaacaaugc

SEQ ID NO: 1675372 - RNA, 18 nt, Human
uauauaaaugguuaaaag

SEQ ID NO: 1675373 - RNA, 21 nt, Human
uauaugcucugcauguuacau

SEQ ID NO: 1675374 - RNA, 13 nt, Human
uauaugcuucugu

SEQ ID NO: 1675375 - RNA, 16 nt, Human
uauaugugaugaucua

SEQ ID NO: 1675376 - RNA, 19 nt, Human
uagggaaaaaccagcgugu

SEQ ID NO: 1675377 - RNA, 20 nt, Human
uagggaaaaaccagcgugug

SEQ ID NO: 1675378 - RNA, 21 nt, Human
uagggaaaaaccagcguguga

SEQ ID NO: 1675379 - RNA, 20 nt, Human
uagguauaaguggugugugu

SEQ ID NO: 1675380 - RNA, 16 nt, Human
uagguaaauuacaguu

SEQ ID NO: 1675381 - RNA, 15 nt, Human
uaggucucaauaccu

SEQ ID NO: 1675382 - RNA, 16 nt, Human
uaggucagugcaaaua

SEQ ID NO: 1675383 - RNA, 12 nt, Human
uaggaauugacc

SEQ ID NO: 1675384 - RNA, 15 nt, Human
uaggccuggccagau

SEQ ID NO: 1675385 - RNA, 17 nt, Human
uaggccguuccuucaaa

SEQ ID NO: 1675386 - RNA, 18 nt, Human
uaggccuggccagaugca

SEQ ID NO: 1675387 - RNA, 18 nt, Human
uaggccaugggacaggga

SEQ ID NO: 1675388 - RNA, 13 nt, Human
uaguguucauaaa

SEQ ID NO: 1675389 - RNA, 20 nt, Human
uaguugcaacuuuguauaaa

SEQ ID NO: 1675390 - RNA, 13 nt, Human
uagucaaauugug

SEQ ID NO: 1675391 - RNA, 14 nt, Human
uagucaaauugugu

SEQ ID NO: 1675392 - RNA, 14 nt, Human
uagugcaaauuguc

SEQ ID NO: 1675393 - RNA, 15 nt, Human
uagugcaaauuguca

SEQ ID NO: 1675394 - RNA, 13 nt, Human
uaguaucaaaaga

SEQ ID NO: 1675395 - RNA, 21 nt, Human
uaggugauccacucgccuuca

SEQ ID NO: 1675396 - RNA, 23 nt, Human
uaggugacagagugagacucugu

SEQ ID NO: 1675397 - RNA, 18 nt, Human
uaggugcuacaaaaacac

SEQ ID NO: 1675398 - RNA, 21 nt, Human
uaggugaucucauuuaauccu

SEQ ID NO: 1675399 - RNA, 15 nt, Human
uaguaugaggcauuu

SEQ ID NO: 1675400 - RNA, 18 nt, Human
uaguauuucuaugaaaua

SEQ ID NO: 1675401 - RNA, 19 nt, Human
uaguauuucuaugaaauau

SEQ ID NO: 1675402 - RNA, 16 nt, Human
uaguauuucuaugaaa

SEQ ID NO: 1675403 - RNA, 17 nt, Human
uaugacuccagaauuuc

SEQ ID NO: 1675404 - RNA, 23 nt, Human
uaugacuccagaauuucccaaag

SEQ ID NO: 1675405 - RNA, 16 nt, Human
uaugacuucauuaaua

SEQ ID NO: 1675406 - RNA, 20 nt, Human
uaugacuucauuaauaauaa

SEQ ID NO: 1675407 - RNA, 16 nt, Human
uaugacuccagaauuu

SEQ ID NO: 1675408 - RNA, 16 nt, Human
uaugauucaaaugucu

SEQ ID NO: 1675409 - RNA, 21 nt, Human
uaugauucaaaugucuauaaa

SEQ ID NO: 1675410 - RNA, 16 nt, Human
uaugauucccagccag

SEQ ID NO: 1675411 - RNA, 14 nt, Human
uaugcacacauuuu

SEQ ID NO: 1675412 - RNA, 13 nt, Human
uaugcacacauuu

SEQ ID NO: 1675413 - RNA, 18 nt, Human
uaugcaaucaaaucugcu

SEQ ID NO: 1675414 - RNA, 15 nt, Human
uaugcaaagcacuga

SEQ ID NO: 1675415 - RNA, 15 nt, Human
uaugauuuggaaaau

SEQ ID NO: 1675416 - RNA, 17 nt, Human
uaugauuuggaaaauaa

SEQ ID NO: 1675417 - RNA, 18 nt, Human
uaugauuuggaaaauaaa

SEQ ID NO: 1675418 - RNA, 12 nt, Human
uaugcaaagcac

SEQ ID NO: 1675419 - RNA, 13 nt, Human
uaugcaaagcacu

SEQ ID NO: 1675420 - RNA, 14 nt, Human
uaugcaaagcacug

SEQ ID NO: 1675421 - RNA, 13 nt, Human
uauggaacacucu

SEQ ID NO: 1675422 - RNA, 16 nt, Human
uauggaacacucugag

SEQ ID NO: 1675423 - RNA, 17 nt, Human
uauggaacacucugaga

SEQ ID NO: 1675424 - RNA, 18 nt, Human
uauggaacacucugagac

SEQ ID NO: 1675425 - RNA, 15 nt, Human
uaugcuuuaaacauu

SEQ ID NO: 1675426 - RNA, 19 nt, Human
uauggaacacucugagacu

SEQ ID NO: 1675427 - RNA, 17 nt, Human
uauggacaaugacccag

SEQ ID NO: 1675428 - RNA, 18 nt, Human
uaugcagagguccacaac

SEQ ID NO: 1675429 - RNA, 20 nt, Human
uaugcauauuauuuuauguu

SEQ ID NO: 1675430 - RNA, 18 nt, Human
uaugcaugaaguaauaug

SEQ ID NO: 1675431 - RNA, 13 nt, Human
uaugcaugaagua

SEQ ID NO: 1675432 - RNA, 22 nt, Human
uaugcuuauacacuuacacuuu

SEQ ID NO: 1675433 - RNA, 15 nt, Human
uaugcuucuguuuua

SEQ ID NO: 1675434 - RNA, 16 nt, Human
uaugcuucuguuuuau

SEQ ID NO: 1675435 - RNA, 18 nt, Human
uaucugaggaauucugua

SEQ ID NO: 1675436 - RNA, 19 nt, Human
uaucugaggaauucuguau

SEQ ID NO: 1675437 - RNA, 21 nt, Human
uaucugaggaauucuguauag

SEQ ID NO: 1675438 - RNA, 22 nt, Human
uaucugaggaauucuguauaga

SEQ ID NO: 1675439 - RNA, 17 nt, Human
uaucugaggaauucugu

SEQ ID NO: 1675440 - RNA, 21 nt, Human
uaucuaauauguaacaagcca

SEQ ID NO: 1675441 - RNA, 16 nt, Human
uaucgucacugcuuaa

SEQ ID NO: 1675442 - RNA, 19 nt, Human
uauauguuuuaagaggcag

SEQ ID NO: 1675443 - RNA, 15 nt, Human
uaucguaaaauuaag

SEQ ID NO: 1675444 - RNA, 18 nt, Human
uaucguaaaauuaagaaa

SEQ ID NO: 1675445 - RNA, 16 nt, Human
uaucuaaauguugaaa

SEQ ID NO: 1675446 - RNA, 15 nt, Human
uauccuucagccuga

SEQ ID NO: 1675447 - RNA, 14 nt, Human
uauccuucagccug

SEQ ID NO: 1675448 - RNA, 20 nt, Human
uaugaaguuuuuuuuauaca

SEQ ID NO: 1675449 - RNA, 18 nt, Human
uaugaauaaagacaccua

SEQ ID NO: 1675450 - RNA, 14 nt, Human
uaucuugaagacuu

SEQ ID NO: 1675451 - RNA, 20 nt, Human
uaucugucauuugagcaggg

SEQ ID NO: 1675452 - RNA, 21 nt, Human
uaucugucauuugagcagggc

SEQ ID NO: 1675453 - RNA, 23 nt, Human
uaucugucauuugagcagggcuc

SEQ ID NO: 1675454 - RNA, 17 nt, Human
uaugaauuacauuugua

SEQ ID NO: 1675455 - RNA, 23 nt, Human
uaugaauuacauuuguauaaaau

SEQ ID NO: 1675456 - RNA, 12 nt, Human
uaugacacaugc

SEQ ID NO: 1675457 - RNA, 22 nt, Human
uaugacacaugcaaggucauuu

SEQ ID NO: 1675458 - RNA, 14 nt, Human
uaugaccacacucc

SEQ ID NO: 1675459 - RNA, 19 nt, Human
uaugaccacacuccagcug

SEQ ID NO: 1675460 - RNA, 21 nt, Human
guggccacuccagaccccugg

SEQ ID NO: 1675461 - RNA, 19 nt, Human
guggcagugggagcugccu

SEQ ID NO: 1675462 - RNA, 21 nt, Human
guggcagugggagcugccugu

SEQ ID NO: 1675463 - RNA, 11 nt, Human
guggcagucug

SEQ ID NO: 1675464 - RNA, 15 nt, Human
guggcagugggagcu

SEQ ID NO: 1675465 - RNA, 16 nt, Human
guggcagugggagcug

SEQ ID NO: 1675466 - RNA, 17 nt, Human
guggcagugggagcugc

SEQ ID NO: 1675467 - RNA, 20 nt, Human
guggaugccugguggcagcu

SEQ ID NO: 1675468 - RNA, 21 nt, Human
guggcagcugcgguccaccca

SEQ ID NO: 1675469 - RNA, 22 nt, Human
guggcagcugcgguccacccag

SEQ ID NO: 1675470 - RNA, 23 nt, Human
guggcagcugcgguccacccagg

SEQ ID NO: 1675471 - RNA, 12 nt, Human
guggcagcugcu

SEQ ID NO: 1675472 - RNA, 13 nt, Human
guggcagcugcuu

SEQ ID NO: 1675473 - RNA, 19 nt, Human
guggcagcugcuuuugucu

SEQ ID NO: 1675474 - RNA, 18 nt, Human
guggagaggcccggccuc

SEQ ID NO: 1675475 - RNA, 13 nt, Human
guggacuuuuauu

SEQ ID NO: 1675476 - RNA, 20 nt, Human
guggagaagcggcuggcagc

SEQ ID NO: 1675477 - RNA, 16 nt, Human
guggaugccugguggc

SEQ ID NO: 1675478 - RNA, 18 nt, Human
guggaugccugguggcag

SEQ ID NO: 1675479 - RNA, 17 nt, Human
guggaguucaucuugaa

SEQ ID NO: 1675480 - RNA, 18 nt, Human
gugcuuauguaugaggua

SEQ ID NO: 1675481 - RNA, 12 nt, Human
gugcuuggagga

SEQ ID NO: 1675482 - RNA, 13 nt, Human
gugcuuggaggaa

SEQ ID NO: 1675483 - RNA, 15 nt, Human
gugcuuggaggaagg

SEQ ID NO: 1675484 - RNA, 21 nt, Human
gugcugccacacuucaggcuc

SEQ ID NO: 1675485 - RNA, 22 nt, Human
gugcugccauccagguucagcu

SEQ ID NO: 1675486 - RNA, 11 nt, Human
gugcugcccug

SEQ ID NO: 1675487 - RNA, 12 nt, Human
gugcugcccugc

SEQ ID NO: 1675488 - RNA, 18 nt, Human
guggaaaaauagccugcc

SEQ ID NO: 1675489 - RNA, 20 nt, Human
gugcugcauuuaaaagauac

SEQ ID NO: 1675490 - RNA, 19 nt, Human
gugcugcauuuaaaagaua

SEQ ID NO: 1675491 - RNA, 12 nt, Human
gugcugcauuua

SEQ ID NO: 1675492 - RNA, 12 nt, Human
gugcugccacac

SEQ ID NO: 1675493 - RNA, 15 nt, Human
gugcugccauccagg

SEQ ID NO: 1675494 - RNA, 18 nt, Human
gugcugccauccagguuc

SEQ ID NO: 1675495 - RNA, 19 nt, Human
gugcugccauccagguuca

SEQ ID NO: 1675496 - RNA, 12 nt, Human
gugcugagucug

SEQ ID NO: 1675497 - RNA, 16 nt, Human
gugcugagucugaagg

SEQ ID NO: 1675498 - RNA, 17 nt, Human
gugcugagucugaaggc

SEQ ID NO: 1675499 - RNA, 18 nt, Human
gugcugagucugaaggcu

SEQ ID NO: 1675500 - RNA, 19 nt, Human
gugcugagucugaaggcug

SEQ ID NO: 1675501 - RNA, 17 nt, Human
gugcucuggacaggcau

SEQ ID NO: 1675502 - RNA, 18 nt, Human
gugcucuggacaggcaug

SEQ ID NO: 1675503 - RNA, 23 nt, Human
gugcugaaugguuuucaaaauaa

SEQ ID NO: 1675504 - RNA, 19 nt, Human
gugcugaaugguuuucaaa

SEQ ID NO: 1675505 - RNA, 20 nt, Human
gugcugaaugguuuucaaaa

SEQ ID NO: 1675506 - RNA, 15 nt, Human
gugcucuggacaggc

SEQ ID NO: 1675507 - RNA, 16 nt, Human
gugcucuggacaggca

SEQ ID NO: 1675508 - RNA, 22 nt, Human
gugccgagaaggaagccuccca

SEQ ID NO: 1675509 - RNA, 21 nt, Human
gugccuuggggacaagagcag

SEQ ID NO: 1675510 - RNA, 20 nt, Human
gugauucucaugccucagcc

SEQ ID NO: 1675511 - RNA, 14 nt, Human
gugauucuccugcc

SEQ ID NO: 1675512 - RNA, 16 nt, Human
gugauucuccugccuc

SEQ ID NO: 1675513 - RNA, 17 nt, Human
gugauucuccugccuca

SEQ ID NO: 1675514 - RNA, 18 nt, Human
gugauucuccugccucag

SEQ ID NO: 1675515 - RNA, 19 nt, Human
gugauucuccugccucagc

SEQ ID NO: 1675516 - RNA, 20 nt, Human
gugauucuccugccucagcc

SEQ ID NO: 1675517 - RNA, 22 nt, Human
gugauucuccugccucagccuc

SEQ ID NO: 1675518 - RNA, 23 nt, Human
gugauucuccugccucagccucc

SEQ ID NO: 1675519 - RNA, 20 nt, Human
gugauucacagugugaaucu

SEQ ID NO: 1675520 - RNA, 23 nt, Human
gugauccucccaccucagccucc

SEQ ID NO: 1675521 - RNA, 20 nt, Human
gugauccucccaccucagcc

SEQ ID NO: 1675522 - RNA, 22 nt, Human
gugauccucccaccucagccuc

SEQ ID NO: 1675523 - RNA, 14 nt, Human
gugauccacucgcc

SEQ ID NO: 1675524 - RNA, 22 nt, Human
gugauccacccaccucagccuc

SEQ ID NO: 1675525 - RNA, 14 nt, Human
gugauccucccacc

SEQ ID NO: 1675526 - RNA, 15 nt, Human
gugauccucccaccu

SEQ ID NO: 1675527 - RNA, 18 nt, Human
gugauccucccaccucag

SEQ ID NO: 1675528 - RNA, 23 nt, Human
gugaggauuaaauaauguaaaua

SEQ ID NO: 1675529 - RNA, 11 nt, Human
gugaggccaga

SEQ ID NO: 1675530 - RNA, 13 nt, Human
gugaggccagaga

SEQ ID NO: 1675531 - RNA, 15 nt, Human
gugauccacccaccu

SEQ ID NO: 1675532 - RNA, 18 nt, Human
gugauccacccaccucag

SEQ ID NO: 1675533 - RNA, 20 nt, Human
gugauccacccaccucagcc

SEQ ID NO: 1675534 - RNA, 20 nt, Human
gugcccacaggaucagucug

SEQ ID NO: 1675535 - RNA, 15 nt, Human
gugcaucucagccca

SEQ ID NO: 1675536 - RNA, 21 nt, Human
gugcauaccacuuuuguucuu

SEQ ID NO: 1675537 - RNA, 14 nt, Human
gugcauaccacuuu

SEQ ID NO: 1675538 - RNA, 13 nt, Human
gugcauaccacuu

SEQ ID NO: 1675539 - RNA, 18 nt, Human
gugcaugcagcaucuaag

SEQ ID NO: 1675540 - RNA, 18 nt, Human
gugcaucucagcccacau

SEQ ID NO: 1675541 - RNA, 20 nt, Human
gugccagguuuuuggucuga

SEQ ID NO: 1675542 - RNA, 22 nt, Human
gugccagguuuuuggucugacc

SEQ ID NO: 1675543 - RNA, 19 nt, Human
gugcauaaguuaacuucca

SEQ ID NO: 1675544 - RNA, 22 nt, Human
gugcaaaguucccuacuuccug

SEQ ID NO: 1675545 - RNA, 18 nt, Human
gugcaaauugucacagga

SEQ ID NO: 1675546 - RNA, 15 nt, Human
gugacugaauuucuu

SEQ ID NO: 1675547 - RNA, 18 nt, Human
gugacugaauuucuuuug

SEQ ID NO: 1675548 - RNA, 16 nt, Human
gugacugaauuucuuu

SEQ ID NO: 1675549 - RNA, 16 nt, Human
gugaccucagcuuuga

SEQ ID NO: 1675550 - RNA, 12 nt, Human
gugaccucugcc

SEQ ID NO: 1675551 - RNA, 16 nt, Human
gugacaacacuugugu

SEQ ID NO: 1675552 - RNA, 16 nt, Human
gugacaagcucacaga

SEQ ID NO: 1675553 - RNA, 22 nt, Human
gugagccaccgugccuggccac

SEQ ID NO: 1675554 - RNA, 14 nt, Human
gugagccacugcac

SEQ ID NO: 1675555 - RNA, 11 nt, Human
gugaggaagcc

SEQ ID NO: 1675556 - RNA, 16 nt, Human
gugaggaagccgcugg

SEQ ID NO: 1675557 - RNA, 19 nt, Human
gugaggaagccgcuggggc

SEQ ID NO: 1675558 - RNA, 16 nt, Human
gugagccaccacgccc

SEQ ID NO: 1675559 - RNA, 15 nt, Human
gugagccaccgugcc

SEQ ID NO: 1675560 - RNA, 15 nt, Human
gugagccaccacgcc

SEQ ID NO: 1675561 - RNA, 17 nt, Human
gugagccaccgugccug

SEQ ID NO: 1675562 - RNA, 21 nt, Human
gugagccaccgugccuggcca

SEQ ID NO: 1675563 - RNA, 13 nt, Human
gugagccacugca

SEQ ID NO: 1675564 - RNA, 17 nt, Human
gugacugaucucucgug

SEQ ID NO: 1675565 - RNA, 17 nt, Human
gugagcaggcugugagu

SEQ ID NO: 1675566 - RNA, 16 nt, Human
gugagcagucaggaaa

SEQ ID NO: 1675567 - RNA, 19 nt, Human
gugaaagaaaauaacaaua

SEQ ID NO: 1675568 - RNA, 23 nt, Human
gugaaacugcuuguuuccuagca

SEQ ID NO: 1675569 - RNA, 12 nt, Human
gugaaacuggau

SEQ ID NO: 1675570 - RNA, 20 nt, Human
gugaaacugcuuguuuccua

SEQ ID NO: 1675571 - RNA, 21 nt, Human
gugaaacugcuuguuuccuag

SEQ ID NO: 1675572 - RNA, 20 nt, Human
gugaaacucguuaauuugua

SEQ ID NO: 1675573 - RNA, 14 nt, Human
gugaaaagaaaaau

SEQ ID NO: 1675574 - RNA, 23 nt, Human
gugaaaagaaaaaugagccuggc

SEQ ID NO: 1675575 - RNA, 16 nt, Human
gugaaaaugugugugu

SEQ ID NO: 1675576 - RNA, 17 nt, Human
gugaauggcuuuguaua

SEQ ID NO: 1675577 - RNA, 18 nt, Human
gugaauggcuuuguauag

SEQ ID NO: 1675578 - RNA, 19 nt, Human
gugaauggcuuuguauaga

SEQ ID NO: 1675579 - RNA, 13 nt, Human
gugaauggcuuug

SEQ ID NO: 1675580 - RNA, 14 nt, Human
gugaauggcuuugu

SEQ ID NO: 1675581 - RNA, 14 nt, Human
gugaaucagagcac

SEQ ID NO: 1675582 - RNA, 18 nt, Human
gugaaauuauucauaauu

SEQ ID NO: 1675583 - RNA, 20 nt, Human
gugaaauuauucauaauuau

SEQ ID NO: 1675584 - RNA, 13 nt, Human
gugaaaucauuca

SEQ ID NO: 1675585 - RNA, 19 nt, Human
gugaaaggaaagagggagg

SEQ ID NO: 1675586 - RNA, 12 nt, Human
guccucccaucu

SEQ ID NO: 1675587 - RNA, 13 nt, Human
guccucccaucuc

SEQ ID NO: 1675588 - RNA, 14 nt, Human
guccucccaucuca

SEQ ID NO: 1675589 - RNA, 23 nt, Human
guccucccaucucacacaugagc

SEQ ID NO: 1675590 - RNA, 15 nt, Human
guccugggagugagc

SEQ ID NO: 1675591 - RNA, 16 nt, Human
guccugggagugagcu

SEQ ID NO: 1675592 - RNA, 17 nt, Human
guccuggcaugggaaug

SEQ ID NO: 1675593 - RNA, 19 nt, Human
guccugggagugagcuggu

SEQ ID NO: 1675594 - RNA, 17 nt, Human
guccugggagugagcug

SEQ ID NO: 1675595 - RNA, 18 nt, Human
guccugggagugagcugg

SEQ ID NO: 1675596 - RNA, 19 nt, Human
guccuggggaaccugaccc

SEQ ID NO: 1675597 - RNA, 20 nt, Human
guccuggggaaccugacccc

SEQ ID NO: 1675598 - RNA, 23 nt, Human
guccuagaaauuccccacccuga

SEQ ID NO: 1675599 - RNA, 15 nt, Human
guccuacucuguguc

SEQ ID NO: 1675600 - RNA, 23 nt, Human
guccuacucugugucaggugggg

SEQ ID NO: 1675601 - RNA, 16 nt, Human
gucccugguggcagcu

SEQ ID NO: 1675602 - RNA, 17 nt, Human
gucccugguggcagcuc

SEQ ID NO: 1675603 - RNA, 12 nt, Human
gucccagugccg

SEQ ID NO: 1675604 - RNA, 13 nt, Human
gucucagauuuua

SEQ ID NO: 1675605 - RNA, 11 nt, Human
gucucacucug

SEQ ID NO: 1675606 - RNA, 20 nt, Human
gucucacuguugcccaggcu

SEQ ID NO: 1675607 - RNA, 21 nt, Human
gucucacuguugcccaggcug

SEQ ID NO: 1675608 - RNA, 22 nt, Human
gucucacuguugcccaggcugg

SEQ ID NO: 1675609 - RNA, 23 nt, Human
gucucacuguugcccaggcuggc

SEQ ID NO: 1675610 - RNA, 20 nt, Human
gucucacuauguugcccagg

SEQ ID NO: 1675611 - RNA, 21 nt, Human
gucucacuauguugcccaggc

SEQ ID NO: 1675612 - RNA, 13 nt, Human
gucucacuguugc

SEQ ID NO: 1675613 - RNA, 23 nt, Human
gucucacuauguugcccaggcag

SEQ ID NO: 1675614 - RNA, 16 nt, Human
gucucacuguugccca

SEQ ID NO: 1675615 - RNA, 17 nt, Human
gucucacuguugcccag

SEQ ID NO: 1675616 - RNA, 18 nt, Human
gucucacuguugcccagg

SEQ ID NO: 1675617 - RNA, 19 nt, Human
gucucacuguugcccaggc

SEQ ID NO: 1675618 - RNA, 18 nt, Human
guccuuaccagcagagca

SEQ ID NO: 1675619 - RNA, 15 nt, Human
guccuuaccagcaga

SEQ ID NO: 1675620 - RNA, 16 nt, Human
guccuuaccagcagag

SEQ ID NO: 1675621 - RNA, 17 nt, Human
guccuuaccagcagagc

SEQ ID NO: 1675622 - RNA, 17 nt, Human
gucuacacuaagagaga

SEQ ID NO: 1675623 - RNA, 15 nt, Human
gucuacacugugcug

SEQ ID NO: 1675624 - RNA, 23 nt, Human
gucuacacuaagagagaaugaga

SEQ ID NO: 1675625 - RNA, 15 nt, Human
gucucuucuccacug

SEQ ID NO: 1675626 - RNA, 16 nt, Human
gucucuucuccacugg

SEQ ID NO: 1675627 - RNA, 14 nt, Human
gucucuucuccacu

SEQ ID NO: 1675628 - RNA, 13 nt, Human
gucugacccacug

SEQ ID NO: 1675629 - RNA, 14 nt, Human
gucugacccacugc

SEQ ID NO: 1675630 - RNA, 17 nt, Human
gucucuucuccacugga

SEQ ID NO: 1675631 - RNA, 15 nt, Human
gucugacccacugcu

SEQ ID NO: 1675632 - RNA, 18 nt, Human
gucugaggaauccagacc

SEQ ID NO: 1675633 - RNA, 19 nt, Human
gucugaggaauccagaccc

SEQ ID NO: 1675634 - RNA, 20 nt, Human
gucugauucccaagcucugc

SEQ ID NO: 1675635 - RNA, 21 nt, Human
gucugauucccaagcucugcu

SEQ ID NO: 1675636 - RNA, 17 nt, Human
gucugauucccaagcuc

SEQ ID NO: 1675637 - RNA, 18 nt, Human
gucugauucccaagcucu

SEQ ID NO: 1675638 - RNA, 19 nt, Human
gucugauucccaagcucug

SEQ ID NO: 1675639 - RNA, 21 nt, Human
gucugaggaauccagacccgg

SEQ ID NO: 1675640 - RNA, 16 nt, Human
gucaucucagcuggau

SEQ ID NO: 1675641 - RNA, 21 nt, Human
gucauauaagauucauauuua

SEQ ID NO: 1675642 - RNA, 14 nt, Human
guccacccaggagc

SEQ ID NO: 1675643 - RNA, 15 nt, Human
guccacccaggagcc

SEQ ID NO: 1675644 - RNA, 16 nt, Human
guccacccaggagccc

SEQ ID NO: 1675645 - RNA, 14 nt, Human
gucccacucagucc

SEQ ID NO: 1675646 - RNA, 15 nt, Human
gucccacucagucca

SEQ ID NO: 1675647 - RNA, 17 nt, Human
gucccagauacuugggg

SEQ ID NO: 1675648 - RNA, 20 nt, Human
gucccagccagcaguucaga

SEQ ID NO: 1675649 - RNA, 13 nt, Human
gucaccccggcca

SEQ ID NO: 1675650 - RNA, 15 nt, Human
gucaccccggccacc

SEQ ID NO: 1675651 - RNA, 20 nt, Human
gucaccugaagacucauucu

SEQ ID NO: 1675652 - RNA, 14 nt, Human
gucaccucauggaa

SEQ ID NO: 1675653 - RNA, 16 nt, Human
gucaauuacaggaagu

SEQ ID NO: 1675654 - RNA, 13 nt, Human
gucaauuacagga

SEQ ID NO: 1675655 - RNA, 15 nt, Human
gucaauuacaggaag

SEQ ID NO: 1675656 - RNA, 15 nt, Human
gucaauaaaauccau

SEQ ID NO: 1675657 - RNA, 21 nt, Human
gucaauaaaauccauacauuu

SEQ ID NO: 1675658 - RNA, 19 nt, Human
gucaagugaaaaaggagga

SEQ ID NO: 1675659 - RNA, 16 nt, Human
gucaagugaaaaagga

SEQ ID NO: 1675660 - RNA, 18 nt, Human
gucaagugaaaaaggagg

SEQ ID NO: 1675661 - RNA, 16 nt, Human
guauuuuaaaagaaug

SEQ ID NO: 1675662 - RNA, 17 nt, Human
guauuuuaaaagaauga

SEQ ID NO: 1675663 - RNA, 18 nt, Human
gucaagagggucugagga

SEQ ID NO: 1675664 - RNA, 19 nt, Human
gucaagagggucugaggaa

SEQ ID NO: 1675665 - RNA, 18 nt, Human
guauuuuaaaagaaugau

SEQ ID NO: 1675666 - RNA, 12 nt, Human
guauuuguuugc

SEQ ID NO: 1675667 - RNA, 23 nt, Human
guauuuguuugcauaggugaucu

SEQ ID NO: 1675668 - RNA, 20 nt, Human
guauuacaguggggaaugaa

SEQ ID NO: 1675669 - RNA, 15 nt, Human
guagagugggagcug

SEQ ID NO: 1675670 - RNA, 13 nt, Human
guagagugggagc

SEQ ID NO: 1675671 - RNA, 22 nt, Human
guauuacaguggggaaugaaga

SEQ ID NO: 1675672 - RNA, 13 nt, Human
guauuacuucugc

SEQ ID NO: 1675673 - RNA, 14 nt, Human
guauuacuucugcu

SEQ ID NO: 1675674 - RNA, 15 nt, Human
guauuacuucugcua

SEQ ID NO: 1675675 - RNA, 15 nt, Human
guauuauguguguuu

SEQ ID NO: 1675676 - RNA, 14 nt, Human
guauuauaccuuuu

SEQ ID NO: 1675677 - RNA, 19 nt, Human
guauuuauuuaguauuuau

SEQ ID NO: 1675678 - RNA, 17 nt, Human
guauuucuaugaaauau

SEQ ID NO: 1675679 - RNA, 22 nt, Human
guauuucuaugaaauauuaugu

SEQ ID NO: 1675680 - RNA, 13 nt, Human
gggcucugccucc

SEQ ID NO: 1675681 - RNA, 15 nt, Human
gggcucugccuccca

SEQ ID NO: 1675682 - RNA, 16 nt, Human
gggcucugccucccau

SEQ ID NO: 1675683 - RNA, 17 nt, Human
gggcucugccucccauc

SEQ ID NO: 1675684 - RNA, 20 nt, Human
gggcucugccucccaucacc

SEQ ID NO: 1675685 - RNA, 14 nt, Human
gggcuucaguggca

SEQ ID NO: 1675686 - RNA, 17 nt, Human
gggcugcaccggcuggc

SEQ ID NO: 1675687 - RNA, 16 nt, Human
gggcugaggugggagg

SEQ ID NO: 1675688 - RNA, 14 nt, Human
gggcugcaccggcu

SEQ ID NO: 1675689 - RNA, 16 nt, Human
gggcgcgguggcucac

SEQ ID NO: 1675690 - RNA, 13 nt, Human
gggcucccuuccc

SEQ ID NO: 1675691 - RNA, 14 nt, Human
gggcucccuuccca

SEQ ID NO: 1675692 - RNA, 17 nt, Human
gggcucccuucccaccu

SEQ ID NO: 1675693 - RNA, 18 nt, Human
gggcucccuucccaccuc

SEQ ID NO: 1675694 - RNA, 23 nt, Human
gggcucccuucccaccucucuca

SEQ ID NO: 1675695 - RNA, 18 nt, Human
gggccuggucguuuucaa

SEQ ID NO: 1675696 - RNA, 14 nt, Human
gggccuggcucagg

SEQ ID NO: 1675697 - RNA, 16 nt, Human
gggccuggcucaggug

SEQ ID NO: 1675698 - RNA, 10 nt, Human
gggccuggca

SEQ ID NO: 1675699 - RNA, 22 nt, Human
gggccuggcagccgugccuuca

SEQ ID NO: 1675700 - RNA, 12 nt, Human
gggccuggccug

SEQ ID NO: 1675701 - RNA, 12 nt, Human
gggccuggcuca

SEQ ID NO: 1675702 - RNA, 20 nt, Human
ggcucccacaggcccuuccu

SEQ ID NO: 1675703 - RNA, 21 nt, Human
ggcucccacaggcccuuccuc

SEQ ID NO: 1675704 - RNA, 17 nt, Human
ggggaucacagccucug

SEQ ID NO: 1675705 - RNA, 13 nt, Human
ggggaguggccac

SEQ ID NO: 1675706 - RNA, 22 nt, Human
gggcuuggggaccagagcugcc

SEQ ID NO: 1675707 - RNA, 21 nt, Human
gggcuuggggaccagagcugc

SEQ ID NO: 1675708 - RNA, 20 nt, Human
gggcuucauccuccucagau

SEQ ID NO: 1675709 - RNA, 20 nt, Human
gggcuuggggaccagagcug

SEQ ID NO: 1675710 - RNA, 19 nt, Human
gggcuucauccuccucaga

SEQ ID NO: 1675711 - RNA, 19 nt, Human
gggcuucaguggcagcugc

SEQ ID NO: 1675712 - RNA, 20 nt, Human
gggcuucaguggcagcugcu

SEQ ID NO: 1675713 - RNA, 15 nt, Human
gggcuucaguggcag

SEQ ID NO: 1675714 - RNA, 16 nt, Human
gggcuucaguggcagc

SEQ ID NO: 1675715 - RNA, 17 nt, Human
gggcuucaguggcagcu

SEQ ID NO: 1675716 - RNA, 18 nt, Human
gggcuucaguggcagcug

SEQ ID NO: 1675717 - RNA, 13 nt, Human
ggggcugggacau

SEQ ID NO: 1675718 - RNA, 16 nt, Human
ggggcugggcagagga

SEQ ID NO: 1675719 - RNA, 17 nt, Human
ggggcugggcagaggaa

SEQ ID NO: 1675720 - RNA, 18 nt, Human
ggguacccacugcucugg

SEQ ID NO: 1675721 - RNA, 13 nt, Human
ggguacccacugc

SEQ ID NO: 1675722 - RNA, 15 nt, Human
ggguacccacugcuc

SEQ ID NO: 1675723 - RNA, 19 nt, Human
ggguacuuguggacacagc

SEQ ID NO: 1675724 - RNA, 22 nt, Human
ggguacuuguggacacagcucu

SEQ ID NO: 1675725 - RNA, 23 nt, Human
ggguacuuguggacacagcucuu

SEQ ID NO: 1675726 - RNA, 23 nt, Human
ggguagagcggagaaaggaaggg

SEQ ID NO: 1675727 - RNA, 20 nt, Human
gggguucuuucuuccucugc

SEQ ID NO: 1675728 - RNA, 22 nt, Human
gggguucuuucuuccucugcug

SEQ ID NO: 1675729 - RNA, 23 nt, Human
gggguucccuuuuuuggcugcug

SEQ ID NO: 1675730 - RNA, 12 nt, Human
ggucccuaauaa

SEQ ID NO: 1675731 - RNA, 13 nt, Human
ggucccuaauaaa

SEQ ID NO: 1675732 - RNA, 16 nt, Human
ggucccuaauaaagcu

SEQ ID NO: 1675733 - RNA, 17 nt, Human
ggucccuaauaaagcug

SEQ ID NO: 1675734 - RNA, 18 nt, Human
ggucccuaauaaagcugu

SEQ ID NO: 1675735 - RNA, 14 nt, Human
ggucccugguggca

SEQ ID NO: 1675736 - RNA, 16 nt, Human
gguccgugcuaaggac

SEQ ID NO: 1675737 - RNA, 22 nt, Human
ggucccugguggcagcucaccu

SEQ ID NO: 1675738 - RNA, 17 nt, Human
gguccgugcuaaggacu

SEQ ID NO: 1675739 - RNA, 18 nt, Human
gguccgugcuaaggacuu

SEQ ID NO: 1675740 - RNA, 23 nt, Human
gguccuagaaauuccccacccug

SEQ ID NO: 1675741 - RNA, 22 nt, Human
ggucucacuauguugcccaggc

SEQ ID NO: 1675742 - RNA, 12 nt, Human
ggucucacucug

SEQ ID NO: 1675743 - RNA, 16 nt, Human
ggucucacucugucgc

SEQ ID NO: 1675744 - RNA, 19 nt, Human
ggucucgaacuccugaccu

SEQ ID NO: 1675745 - RNA, 20 nt, Human
ggucucgaacuccugaccuu

SEQ ID NO: 1675746 - RNA, 15 nt, Human
ggucugacccacugc

SEQ ID NO: 1675747 - RNA, 16 nt, Human
ggucugacccacugcu

SEQ ID NO: 1675748 - RNA, 14 nt, Human
ggugaauggcuuug

SEQ ID NO: 1675749 - RNA, 17 nt, Human
ggugaauggcuuuguau

SEQ ID NO: 1675750 - RNA, 20 nt, Human
ggugaauggcuuuguauaga

SEQ ID NO: 1675751 - RNA, 18 nt, Human
ggugaagugaagacaaug

SEQ ID NO: 1675752 - RNA, 19 nt, Human
ggucugaggaauccagacc

SEQ ID NO: 1675753 - RNA, 16 nt, Human
ggugaacuugguuccc

SEQ ID NO: 1675754 - RNA, 21 nt, Human
ggugacagagugagacucugu

SEQ ID NO: 1675755 - RNA, 14 nt, Human
ggugaccucugccu

SEQ ID NO: 1675756 - RNA, 16 nt, Human
ggugaccucugccuga

SEQ ID NO: 1675757 - RNA, 21 nt, Human
ggugaccucugccugaaguca

SEQ ID NO: 1675758 - RNA, 22 nt, Human
ggugauagguauaaguggugug

SEQ ID NO: 1675759 - RNA, 19 nt, Human
ggugcccugcuuucagaua

SEQ ID NO: 1675760 - RNA, 16 nt, Human
gguggcagugggagcu

SEQ ID NO: 1675761 - RNA, 15 nt, Human
gguggcagcugcggu

SEQ ID NO: 1675762 - RNA, 23 nt, Human
gguggcagcugcgguccacccag

SEQ ID NO: 1675763 - RNA, 13 nt, Human
gguggcagcucac

SEQ ID NO: 1675764 - RNA, 11 nt, Human
gguggcagcug

SEQ ID NO: 1675765 - RNA, 12 nt, Human
gguggcagcugc

SEQ ID NO: 1675766 - RNA, 13 nt, Human
gguggcagcugcg

SEQ ID NO: 1675767 - RNA, 23 nt, Human
ggugcuaucucccccagccccau

SEQ ID NO: 1675768 - RNA, 22 nt, Human
ggugcuaucucccccagcccca

SEQ ID NO: 1675769 - RNA, 21 nt, Human
ggugcuacaaaaacacagcaa

SEQ ID NO: 1675770 - RNA, 19 nt, Human
ggugcuacaaaaacacagc

SEQ ID NO: 1675771 - RNA, 22 nt, Human
ggguuccagcaauucuccugcc

SEQ ID NO: 1675772 - RNA, 19 nt, Human
gggugcugggccccugccu

SEQ ID NO: 1675773 - RNA, 16 nt, Human
ggguucuuucuuccuc

SEQ ID NO: 1675774 - RNA, 14 nt, Human
ggguucuuucuucc

SEQ ID NO: 1675775 - RNA, 19 nt, Human
ggguuggccccugcccggc

SEQ ID NO: 1675776 - RNA, 23 nt, Human
ggguucccuuuuuuggcugcuga

SEQ ID NO: 1675777 - RNA, 22 nt, Human
ggguucuacccaggugcuagga

SEQ ID NO: 1675778 - RNA, 20 nt, Human
ggguuucaccauguuggcca

SEQ ID NO: 1675779 - RNA, 17 nt, Human
gguacccacugcucugg

SEQ ID NO: 1675780 - RNA, 15 nt, Human
ggguugggcuggugu

SEQ ID NO: 1675781 - RNA, 22 nt, Human
gguacuuguggacacagcucuu

SEQ ID NO: 1675782 - RNA, 21 nt, Human
gguacuuguggacacagcucu

SEQ ID NO: 1675783 - RNA, 22 nt, Human
gguacuucaaauccuugaagau

SEQ ID NO: 1675784 - RNA, 22 nt, Human
ggucccaccccacacacgccag

SEQ ID NO: 1675785 - RNA, 22 nt, Human
ggucccacucaguccauagcag

SEQ ID NO: 1675786 - RNA, 12 nt, Human
ggucccacucag

SEQ ID NO: 1675787 - RNA, 14 nt, Human
ggucccacucaguc

SEQ ID NO: 1675788 - RNA, 13 nt, Human
ggucccccuucca

SEQ ID NO: 1675789 - RNA, 18 nt, Human
ggucccccuuccauggac

SEQ ID NO: 1675790 - RNA, 23 nt, Human
ggucccccuuccauggacuuugu

SEQ ID NO: 1675791 - RNA, 16 nt, Human
ggucacucuggcagcu

SEQ ID NO: 1675792 - RNA, 20 nt, Human
ggucacucuggcagcucaga

SEQ ID NO: 1675793 - RNA, 22 nt, Human
ggucacucuggcagcucagaga

SEQ ID NO: 1675794 - RNA, 12 nt, Human
ggucagagccug

SEQ ID NO: 1675795 - RNA, 13 nt, Human
ggucagagccugc

SEQ ID NO: 1675796 - RNA, 14 nt, Human
ggucagagccugca

SEQ ID NO: 1675797 - RNA, 15 nt, Human
ggucagagccugcag

SEQ ID NO: 1675798 - RNA, 16 nt, Human
ggucagagccugcagu

SEQ ID NO: 1675799 - RNA, 15 nt, Human
gguagacacacauga

SEQ ID NO: 1675800 - RNA, 22 nt, Human
gguagacacacaugaaguccaa

SEQ ID NO: 1675801 - RNA, 14 nt, Human
gguugggcuggugu

SEQ ID NO: 1675802 - RNA, 18 nt, Human
gguuggcaaaaaggcagg

SEQ ID NO: 1675803 - RNA, 13 nt, Human
gguuggugggggc

SEQ ID NO: 1675804 - RNA, 13 nt, Human
gguuuaagcuguu

SEQ ID NO: 1675805 - RNA, 20 nt, Human
gguucacugcaaccuccgcc

SEQ ID NO: 1675806 - RNA, 22 nt, Human
gguucaagcgauucuucugcuu

SEQ ID NO: 1675807 - RNA, 23 nt, Human
gguucaagcgauucuucugcuuc

SEQ ID NO: 1675808 - RNA, 12 nt, Human
gguucagcuugu

SEQ ID NO: 1675809 - RNA, 17 nt, Human
gguucuuucuuccucug

SEQ ID NO: 1675810 - RNA, 18 nt, Human
gguucuuucuuccucugc

SEQ ID NO: 1675811 - RNA, 14 nt, Human
gguugaagcaccaa

SEQ ID NO: 1675812 - RNA, 16 nt, Human
gguggcccgacagccu

SEQ ID NO: 1675813 - RNA, 17 nt, Human
gguggcccgacagccug

SEQ ID NO: 1675814 - RNA, 18 nt, Human
gguggcccgacagccugg

SEQ ID NO: 1675815 - RNA, 19 nt, Human
gguggcccgacagccuggc

SEQ ID NO: 1675816 - RNA, 20 nt, Human
gguggcccgacagccuggca

SEQ ID NO: 1675817 - RNA, 13 nt, Human
gguggccucccaa

SEQ ID NO: 1675818 - RNA, 17 nt, Human
gguggccucccaacuca

SEQ ID NO: 1675819 - RNA, 21 nt, Human
gguucaagcgauucuucugcu

SEQ ID NO: 1675820 - RNA, 23 nt, Human
gguuuugccauguuggccaggcu

SEQ ID NO: 1675821 - RNA, 15 nt, Human
gguuuucuguucuuu

SEQ ID NO: 1675822 - RNA, 13 nt, Human
gguuuucuguucu

SEQ ID NO: 1675823 - RNA, 12 nt, Human
gguuuucuguuc

SEQ ID NO: 1675824 - RNA, 20 nt, Human
gguuuucacauuggaaacaa

SEQ ID NO: 1675825 - RNA, 13 nt, Human
guaaaaauaaaau

SEQ ID NO: 1675826 - RNA, 14 nt, Human
guaaaaauaaaauu

SEQ ID NO: 1675827 - RNA, 18 nt, Human
guaaaaacaaagaaauua

SEQ ID NO: 1675828 - RNA, 20 nt, Human
guaaaaacaaagaaauuaug

SEQ ID NO: 1675829 - RNA, 14 nt, Human
guaaaaccacagca

SEQ ID NO: 1675830 - RNA, 15 nt, Human
guaaaaccacagcag

SEQ ID NO: 1675831 - RNA, 16 nt, Human
guaaaaccacagcagu

SEQ ID NO: 1675832 - RNA, 18 nt, Human
guaaaaccacagcaguug

SEQ ID NO: 1675833 - RNA, 23 nt, Human
guaaaaccacagcaguugaaaag

SEQ ID NO: 1675834 - RNA, 23 nt, Human
guaaauuaacuuuuauaaacuuu

SEQ ID NO: 1675835 - RNA, 18 nt, Human
guaaggaauaccuguccc

SEQ ID NO: 1675836 - RNA, 20 nt, Human
guaaggaauaccuguccccc

SEQ ID NO: 1675837 - RNA, 21 nt, Human
guaaggaauaccugucccccu

SEQ ID NO: 1675838 - RNA, 23 nt, Human
guaaggaauaccugucccccuga

SEQ ID NO: 1675839 - RNA, 13 nt, Human
guaaggaaugauu

SEQ ID NO: 1675840 - RNA, 22 nt, Human
guaaguauucuuauuuaaugaa

SEQ ID NO: 1675841 - RNA, 17 nt, Human
guaagggaaacugccag

SEQ ID NO: 1675842 - RNA, 18 nt, Human
guaagggaaacugccagc

SEQ ID NO: 1675843 - RNA, 16 nt, Human
guaaaucccauuauuc

SEQ ID NO: 1675844 - RNA, 17 nt, Human
guaaaucccauuauuca

SEQ ID NO: 1675845 - RNA, 18 nt, Human
guaaaucccauuauucaa

SEQ ID NO: 1675846 - RNA, 19 nt, Human
guaaaucccauuauucaaa

SEQ ID NO: 1675847 - RNA, 20 nt, Human
guaaaucccauuauucaaag

SEQ ID NO: 1675848 - RNA, 21 nt, Human
guaaaucccauuauucaaagu

SEQ ID NO: 1675849 - RNA, 20 nt, Human
guaaaugggggugcauuuga

SEQ ID NO: 1675850 - RNA, 19 nt, Human
guaaaugggggugcauuug

SEQ ID NO: 1675851 - RNA, 18 nt, Human
guaaaugggggugcauuu

SEQ ID NO: 1675852 - RNA, 22 nt, Human
guaaauuaacuuuuauaaacuu

SEQ ID NO: 1675853 - RNA, 21 nt, Human
guaaauuaacuuuuauaaacu

SEQ ID NO: 1675854 - RNA, 17 nt, Human
guaaauuaacuuuuaua

SEQ ID NO: 1675855 - RNA, 16 nt, Human
guaaauuaacuuuuau

SEQ ID NO: 1675856 - RNA, 15 nt, Human
guaaauuaacuuuua

SEQ ID NO: 1675857 - RNA, 21 nt, Human
guaaauacaauuuuguuucug

SEQ ID NO: 1675858 - RNA, 15 nt, Human
guaaaucccauuauu

SEQ ID NO: 1675859 - RNA, 22 nt, Human
guaaauacaauuuuguuucugu

SEQ ID NO: 1675860 - RNA, 23 nt, Human
guaaauacaauuuuguuucugua

SEQ ID NO: 1675861 - RNA, 15 nt, Human
guacagacagaaaaa

SEQ ID NO: 1675862 - RNA, 16 nt, Human
guacagacaacaaacc

SEQ ID NO: 1675863 - RNA, 21 nt, Human
guacacuguuucaaacuuuac

SEQ ID NO: 1675864 - RNA, 20 nt, Human
guacacuguuucaaacuuua

SEQ ID NO: 1675865 - RNA, 19 nt, Human
guacacuguuucaaacuuu

SEQ ID NO: 1675866 - RNA, 12 nt, Human
guacagagccca

SEQ ID NO: 1675867 - RNA, 18 nt, Human
guacagagcccacgcccc

SEQ ID NO: 1675868 - RNA, 22 nt, Human
guacagagcccacgcccccacu

SEQ ID NO: 1675869 - RNA, 20 nt, Human
guacagcaaggagauuuaca

SEQ ID NO: 1675870 - RNA, 20 nt, Human
guacauaaugcgugcauacc

SEQ ID NO: 1675871 - RNA, 15 nt, Human
guacccacugcucug

SEQ ID NO: 1675872 - RNA, 15 nt, Human
guaaucguguccccu

SEQ ID NO: 1675873 - RNA, 11 nt, Human
guaaugaaaac

SEQ ID NO: 1675874 - RNA, 13 nt, Human
guaaugaaaacca

SEQ ID NO: 1675875 - RNA, 18 nt, Human
guaaugaugucguuugaa

SEQ ID NO: 1675876 - RNA, 19 nt, Human
guaaugauaacuggaaacu

SEQ ID NO: 1675877 - RNA, 13 nt, Human
guaauuauaucug

SEQ ID NO: 1675878 - RNA, 21 nt, Human
guaauuaaguacuauguauca

SEQ ID NO: 1675879 - RNA, 14 nt, Human
guaauuaaguacua

SEQ ID NO: 1675880 - RNA, 17 nt, Human
guaauuaaguacuaugu

SEQ ID NO: 1675881 - RNA, 20 nt, Human
guaauuaaguacuauguauc

SEQ ID NO: 1675882 - RNA, 18 nt, Human
guacacuguuucaaacuu

SEQ ID NO: 1675883 - RNA, 15 nt, Human
guaauuggaaaggca

SEQ ID NO: 1675884 - RNA, 15 nt, Human
guacuugcucuugau

SEQ ID NO: 1675885 - RNA, 16 nt, Human
guacuugcucuugaug

SEQ ID NO: 1675886 - RNA, 18 nt, Human
guacuugcucuugaugcc

SEQ ID NO: 1675887 - RNA, 19 nt, Human
guacuugcucuugaugccu

SEQ ID NO: 1675888 - RNA, 22 nt, Human
guacuugcucuugaugccuggc

SEQ ID NO: 1675889 - RNA, 16 nt, Human
guacuuguggacacag

SEQ ID NO: 1675890 - RNA, 20 nt, Human
guacuuguggacacagcucu

SEQ ID NO: 1675891 - RNA, 14 nt, Human
guacuugcucuuga

SEQ ID NO: 1675892 - RNA, 20 nt, Human
guacuucuccacccugcucu

SEQ ID NO: 1675893 - RNA, 21 nt, Human
guacuucuccacccugcucuc

SEQ ID NO: 1675894 - RNA, 16 nt, Human
guacuucuccacccug

SEQ ID NO: 1675895 - RNA, 17 nt, Human
guacuucuccacccugc

SEQ ID NO: 1675896 - RNA, 18 nt, Human
guacuucuccacccugcu

SEQ ID NO: 1675897 - RNA, 19 nt, Human
guacuucuccacccugcuc

SEQ ID NO: 1675898 - RNA, 21 nt, Human
guacuuguggacacagcucuu

SEQ ID NO: 1675899 - RNA, 23 nt, Human
guacuuuauuuucuauaauuuaa

SEQ ID NO: 1675900 - RNA, 12 nt, Human
guacuuuuuggc

SEQ ID NO: 1675901 - RNA, 21 nt, Human
guacuuuuuggcauaacauaa

SEQ ID NO: 1675902 - RNA, 16 nt, Human
guagagcggagaaagg

SEQ ID NO: 1675903 - RNA, 15 nt, Human
guagaggagaaacug

SEQ ID NO: 1675904 - RNA, 22 nt, Human
guaccucuugagccuugaacuu

SEQ ID NO: 1675905 - RNA, 21 nt, Human
guaccucuugagccuugaacu

SEQ ID NO: 1675906 - RNA, 13 nt, Human
guaccucuugagc

SEQ ID NO: 1675907 - RNA, 16 nt, Human
guacccacugcucugg

SEQ ID NO: 1675908 - RNA, 15 nt, Human
guaccgcaaugugac

SEQ ID NO: 1675909 - RNA, 17 nt, Human
guacuacaguccuccca

SEQ ID NO: 1675910 - RNA, 14 nt, Human
guacuucuccaccc

SEQ ID NO: 1675911 - RNA, 15 nt, Human
guacuucuccacccu

SEQ ID NO: 1675912 - RNA, 17 nt, Human
guacguugugcauuugg

SEQ ID NO: 1675913 - RNA, 15 nt, Human
guacuaaggaaucuu

SEQ ID NO: 1675914 - RNA, 23 nt, Human
guacuaaggaaucuuucugcuuu

SEQ ID NO: 1675915 - RNA, 16 nt, Human
guacguugugcauuug

SEQ ID NO: 1675916 - RNA, 15 nt, Human
guacguugugcauuu

SEQ ID NO: 1675917 - RNA, 14 nt, Human
guacguugugcauu

SEQ ID NO: 1675918 - RNA, 17 nt, Human
guacgucugacaggcaa

SEQ ID NO: 1675919 - RNA, 14 nt, Human
guacgucugacagg

SEQ ID NO: 1675920 - RNA, 15 nt, Human
guacgucugacaggc

SEQ ID NO: 1675921 - RNA, 12 nt, Human
gccucugccugu

SEQ ID NO: 1675922 - RNA, 23 nt, Human
gccucucugcaggucccuaauaa

SEQ ID NO: 1675923 - RNA, 20 nt, Human
gccucucugcaggucccuaa

SEQ ID NO: 1675924 - RNA, 21 nt, Human
gccucucugcaggucccuaau

SEQ ID NO: 1675925 - RNA, 18 nt, Human
gccucugcugauccuccc

SEQ ID NO: 1675926 - RNA, 13 nt, Human
gccucugccuguc

SEQ ID NO: 1675927 - RNA, 19 nt, Human
gccucugcugauccuccca

SEQ ID NO: 1675928 - RNA, 22 nt, Human
gccugaagucacacagugaguc

SEQ ID NO: 1675929 - RNA, 18 nt, Human
gccugcuuuuuauggccu

SEQ ID NO: 1675930 - RNA, 19 nt, Human
gccugcuuuuuauggccug

SEQ ID NO: 1675931 - RNA, 22 nt, Human
gccugcuuuuuauggccuguga

SEQ ID NO: 1675932 - RNA, 16 nt, Human
gccugcuccagcuguu

SEQ ID NO: 1675933 - RNA, 18 nt, Human
gccugcuccagcuguuca

SEQ ID NO: 1675934 - RNA, 13 nt, Human
gccugauuaaaga

SEQ ID NO: 1675935 - RNA, 16 nt, Human
gccugauuaaagaaug

SEQ ID NO: 1675936 - RNA, 23 nt, Human
gccugcacggugaauggcuuugu

SEQ ID NO: 1675937 - RNA, 15 nt, Human
gccugcuccagcugu

SEQ ID NO: 1675938 - RNA, 21 nt, Human
gccugggggcugggcagagga

SEQ ID NO: 1675939 - RNA, 20 nt, Human
gccugggggcugggcagagg

SEQ ID NO: 1675940 - RNA, 18 nt, Human
gccugggcagaaggaaga

SEQ ID NO: 1675941 - RNA, 16 nt, Human
gccugggcagaaggaa

SEQ ID NO: 1675942 - RNA, 17 nt, Human
gccugggcagaaggaag

SEQ ID NO: 1675943 - RNA, 13 nt, Human
gccuggccacgcc

SEQ ID NO: 1675944 - RNA, 14 nt, Human
gccuggauggggcu

SEQ ID NO: 1675945 - RNA, 15 nt, Human
gccuggauggggcug

SEQ ID NO: 1675946 - RNA, 15 nt, Human
gccugggcagaagga

SEQ ID NO: 1675947 - RNA, 16 nt, Human
gccuggccagaugcac

SEQ ID NO: 1675948 - RNA, 14 nt, Human
gccuggccagaugc

SEQ ID NO: 1675949 - RNA, 15 nt, Human
gccuggccagaugca

SEQ ID NO: 1675950 - RNA, 19 nt, Human
gccucucugcaggucccua

SEQ ID NO: 1675951 - RNA, 20 nt, Human
gccucggacuuagcugggag

SEQ ID NO: 1675952 - RNA, 21 nt, Human
gccucggacuuagcugggaga

SEQ ID NO: 1675953 - RNA, 17 nt, Human
gccucccgaguagcugg

SEQ ID NO: 1675954 - RNA, 23 nt, Human
gccucccgaauagcugggacuac

SEQ ID NO: 1675955 - RNA, 15 nt, Human
gccucccgaguagcu

SEQ ID NO: 1675956 - RNA, 21 nt, Human
gccucccaacucaccccagcc

SEQ ID NO: 1675957 - RNA, 15 nt, Human
gccucagugccacua

SEQ ID NO: 1675958 - RNA, 22 nt, Human
gccucccaacucaccccagccc

SEQ ID NO: 1675959 - RNA, 23 nt, Human
gccucccaacucaccccagcccc

SEQ ID NO: 1675960 - RNA, 21 nt, Human
gccucccacgacugcccggca

SEQ ID NO: 1675961 - RNA, 14 nt, Human
gccucccacgacug

SEQ ID NO: 1675962 - RNA, 14 nt, Human
gccucagccucccg

SEQ ID NO: 1675963 - RNA, 23 nt, Human
gccucagccucccaaagugcugg

SEQ ID NO: 1675964 - RNA, 15 nt, Human
gccucagucucccuc

SEQ ID NO: 1675965 - RNA, 18 nt, Human
gccucagucucccucccu

SEQ ID NO: 1675966 - RNA, 12 nt, Human
gccucagugcca

SEQ ID NO: 1675967 - RNA, 14 nt, Human
gccucagugccacu

SEQ ID NO: 1675968 - RNA, 14 nt, Human
gccucaaccuccug

SEQ ID NO: 1675969 - RNA, 16 nt, Human
gccucaaccuccuggg

SEQ ID NO: 1675970 - RNA, 17 nt, Human
gccucaaccuccugggc

SEQ ID NO: 1675971 - RNA, 19 nt, Human
gccucaagugauucuccug

SEQ ID NO: 1675972 - RNA, 20 nt, Human
gccucaagugauucuccugc

SEQ ID NO: 1675973 - RNA, 21 nt, Human
gccucaagugauucuccugcc

SEQ ID NO: 1675974 - RNA, 22 nt, Human
gccuauauuuuuuguuaaauga

SEQ ID NO: 1675975 - RNA, 16 nt, Human
gccuaaggcugaacuu

SEQ ID NO: 1675976 - RNA, 17 nt, Human
gccuaagugcagccccg

SEQ ID NO: 1675977 - RNA, 15 nt, Human
gcccuggcucccaca

SEQ ID NO: 1675978 - RNA, 19 nt, Human
gcccuggcucccacaggcc

SEQ ID NO: 1675979 - RNA, 20 nt, Human
gcccuggcucccacaggccc

SEQ ID NO: 1675980 - RNA, 11 nt, Human
gcccugggagg

SEQ ID NO: 1675981 - RNA, 14 nt, Human
gcccugggaggcag

SEQ ID NO: 1675982 - RNA, 13 nt, Human
gcccugggaggcu

SEQ ID NO: 1675983 - RNA, 14 nt, Human
gcccugggaggcuc

SEQ ID NO: 1675984 - RNA, 15 nt, Human
gcccugggaggcucu

SEQ ID NO: 1675985 - RNA, 16 nt, Human
gcccugggaggcucug

SEQ ID NO: 1675986 - RNA, 15 nt, Human
gcccuggugcugcca

SEQ ID NO: 1675987 - RNA, 16 nt, Human
gcccuggugcugccac

SEQ ID NO: 1675988 - RNA, 17 nt, Human
gcccuggugcugccaca

SEQ ID NO: 1675989 - RNA, 21 nt, Human
gcccuggugcugccacacuuc

SEQ ID NO: 1675990 - RNA, 16 nt, Human
gcccugggaggcagug

SEQ ID NO: 1675991 - RNA, 23 nt, Human
gcccugggaggcucuggagccca

SEQ ID NO: 1675992 - RNA, 17 nt, Human
gcccugggaggcucugg

SEQ ID NO: 1675993 - RNA, 18 nt, Human
gcccugggaggcucugga

SEQ ID NO: 1675994 - RNA, 19 nt, Human
gcccugggaggcucuggag

SEQ ID NO: 1675995 - RNA, 21 nt, Human
gcccugggaggcucuggagcc

SEQ ID NO: 1675996 - RNA, 17 nt, Human
gcccugguuuccugccc

SEQ ID NO: 1675997 - RNA, 18 nt, Human
gcccugguuuccugcccu

SEQ ID NO: 1675998 - RNA, 19 nt, Human
gcccugguuuccugcccug

SEQ ID NO: 1675999 - RNA, 20 nt, Human
gcccugguuuccugcccugg

SEQ ID NO: 1676000 - RNA, 21 nt, Human
gcccugguuuccugcccuggg

SEQ ID NO: 1676001 - RNA, 23 nt, Human
gcccugguuuccugcccugggag

SEQ ID NO: 1676002 - RNA, 14 nt, Human
gcccugguuuccug

SEQ ID NO: 1676003 - RNA, 15 nt, Human
gcccugguuuccugc

SEQ ID NO: 1676004 - RNA, 14 nt, Human
gcccugguggcagu

SEQ ID NO: 1676005 - RNA, 17 nt, Human
gcccugguggcaguggg

SEQ ID NO: 1676006 - RNA, 18 nt, Human
gcccugguggcaguggga

SEQ ID NO: 1676007 - RNA, 19 nt, Human
gcccugguggcagugggag

SEQ ID NO: 1676008 - RNA, 20 nt, Human
gcccugguggcagugggagc

SEQ ID NO: 1676009 - RNA, 21 nt, Human
gcccugguggcagugggagcu

SEQ ID NO: 1676010 - RNA, 22 nt, Human
gcccugguggcagugggagcug

SEQ ID NO: 1676011 - RNA, 23 nt, Human
gcccugguggcagugggagcugc

SEQ ID NO: 1676012 - RNA, 16 nt, Human
gccgagaucacgccac

SEQ ID NO: 1676013 - RNA, 18 nt, Human
gccgagaucacgccacug

SEQ ID NO: 1676014 - RNA, 19 nt, Human
gccgagaucacgccacugc

SEQ ID NO: 1676015 - RNA, 18 nt, Human
gccgagauugcaccacug

SEQ ID NO: 1676016 - RNA, 17 nt, Human
gccgagauugcaccacu

SEQ ID NO: 1676017 - RNA, 20 nt, Human
gcccuuccucuccacugccu

SEQ ID NO: 1676018 - RNA, 23 nt, Human
gcccuucucuccagccccuggau

SEQ ID NO: 1676019 - RNA, 21 nt, Human
gcccuucucuccagccccugg

SEQ ID NO: 1676020 - RNA, 22 nt, Human
gcccuucucuccagccccugga

SEQ ID NO: 1676021 - RNA, 17 nt, Human
gcccuuccucuccacug

SEQ ID NO: 1676022 - RNA, 16 nt, Human
gcccuuccucuccacu

SEQ ID NO: 1676023 - RNA, 18 nt, Human
gcccuuccucuccacugc

SEQ ID NO: 1676024 - RNA, 19 nt, Human
gcccuuccucuccacugcc

SEQ ID NO: 1676025 - RNA, 21 nt, Human
gcccuuccucuccacugccuu

SEQ ID NO: 1676026 - RNA, 19 nt, Human
gcccuucucuccagccccu

SEQ ID NO: 1676027 - RNA, 12 nt, Human
gccccucccuuc

SEQ ID NO: 1676028 - RNA, 14 nt, Human
gccccucccuucaa

SEQ ID NO: 1676029 - RNA, 15 nt, Human
gccccucccuucaac

SEQ ID NO: 1676030 - RNA, 18 nt, Human
gccccuccucucugcccu

SEQ ID NO: 1676031 - RNA, 19 nt, Human
gccccuccucucugcccua

SEQ ID NO: 1676032 - RNA, 15 nt, Human
gcagacucuacagag

SEQ ID NO: 1676033 - RNA, 13 nt, Human
gccccugccaccc

SEQ ID NO: 1676034 - RNA, 14 nt, Human
gccccugccacccu

SEQ ID NO: 1676035 - RNA, 15 nt, Human
gccccugccacccug

SEQ ID NO: 1676036 - RNA, 21 nt, Human
gccccuguucuggcagaguug

SEQ ID NO: 1676037 - RNA, 12 nt, Human
gccccuuccccc

SEQ ID NO: 1676038 - RNA, 16 nt, Human
gcccgacagccuggca

SEQ ID NO: 1676039 - RNA, 17 nt, Human
gcccgacagccuggcac

SEQ ID NO: 1676040 - RNA, 19 nt, Human
gcccgacagccuggcacag

SEQ ID NO: 1676041 - RNA, 12 nt, Human
gcccggcuccag

SEQ ID NO: 1676042 - RNA, 16 nt, Human
gcccggcuccaggcuc

SEQ ID NO: 1676043 - RNA, 20 nt, Human
gcccugcuuugggcugcccu

SEQ ID NO: 1676044 - RNA, 21 nt, Human
gcccugcuuugggcugcccug

SEQ ID NO: 1676045 - RNA, 19 nt, Human
gcccugcuuugggcugccc

SEQ ID NO: 1676046 - RNA, 22 nt, Human
gcccugcuuugggcugcccugg

SEQ ID NO: 1676047 - RNA, 23 nt, Human
gcccugcuuugggcugcccuggu

SEQ ID NO: 1676048 - RNA, 12 nt, Human
gcccuggacugu

SEQ ID NO: 1676049 - RNA, 16 nt, Human
gcccuggacugugugc

SEQ ID NO: 1676050 - RNA, 22 nt, Human
gcccuggacugugugcucagga

SEQ ID NO: 1676051 - RNA, 17 nt, Human
gcccggcuccaggcucc

SEQ ID NO: 1676052 - RNA, 18 nt, Human
gcccggcuccaggcuccu

SEQ ID NO: 1676053 - RNA, 12 nt, Human
gcccucugccca

SEQ ID NO: 1676054 - RNA, 16 nt, Human
gcccugagcuuucugc

SEQ ID NO: 1676055 - RNA, 23 nt, Human
gcccucuccugggcagcugccuc

SEQ ID NO: 1676056 - RNA, 22 nt, Human
gcccucuccugggcagcugccu

SEQ ID NO: 1676057 - RNA, 14 nt, Human
gcccucuccugggc

SEQ ID NO: 1676058 - RNA, 13 nt, Human
gcccucuccuggg

SEQ ID NO: 1676059 - RNA, 12 nt, Human
gcccucuccugg

SEQ ID NO: 1676060 - RNA, 14 nt, Human
gcucaccucucccu

SEQ ID NO: 1676061 - RNA, 20 nt, Human
gcucaccagccccagugccc

SEQ ID NO: 1676062 - RNA, 23 nt, Human
gcucaccagccccagugcccaca

SEQ ID NO: 1676063 - RNA, 19 nt, Human
gcucaccagccccagugcc

SEQ ID NO: 1676064 - RNA, 17 nt, Human
gcucagcaaaagaugcu

SEQ ID NO: 1676065 - RNA, 20 nt, Human
gcucagcaaaagaugcuucu

SEQ ID NO: 1676066 - RNA, 22 nt, Human
gcucagcaaaagaugcuucuca

SEQ ID NO: 1676067 - RNA, 23 nt, Human
gcucagcaaaagaugcuucucac

SEQ ID NO: 1676068 - RNA, 19 nt, Human
gcucaggugucccugcacu

SEQ ID NO: 1676069 - RNA, 15 nt, Human
gcucagcggggacag

SEQ ID NO: 1676070 - RNA, 16 nt, Human
gcucagcggggacagc

SEQ ID NO: 1676071 - RNA, 20 nt, Human
gcucagcggggacagcuccu

SEQ ID NO: 1676072 - RNA, 21 nt, Human
gcucagcggggacagcuccuu

SEQ ID NO: 1676073 - RNA, 22 nt, Human
gcucagcggggacagcuccuuc

SEQ ID NO: 1676074 - RNA, 18 nt, Human
gcucaggugucccugcac

SEQ ID NO: 1676075 - RNA, 16 nt, Human
gcuccaaaugcagcuu

SEQ ID NO: 1676076 - RNA, 14 nt, Human
gcuccaagaauuuc

SEQ ID NO: 1676077 - RNA, 13 nt, Human
gcuccaagcuccc

SEQ ID NO: 1676078 - RNA, 14 nt, Human
gcuccaagcuccca

SEQ ID NO: 1676079 - RNA, 15 nt, Human
gcuccaagcucccag

SEQ ID NO: 1676080 - RNA, 17 nt, Human
gcuccagcuggccggga

SEQ ID NO: 1676081 - RNA, 23 nt, Human
gcuccagcuggccgggagccuga

SEQ ID NO: 1676082 - RNA, 21 nt, Human
gcuccaagcucccaggcauuc

SEQ ID NO: 1676083 - RNA, 16 nt, Human
gcuccaagcucccagg

SEQ ID NO: 1676084 - RNA, 17 nt, Human
gcuccaagcucccaggc

SEQ ID NO: 1676085 - RNA, 18 nt, Human
gcuccaagcucccaggca

SEQ ID NO: 1676086 - RNA, 19 nt, Human
gcuccaagcucccaggcau

SEQ ID NO: 1676087 - RNA, 15 nt, Human
gcuccauggcugcca

SEQ ID NO: 1676088 - RNA, 14 nt, Human
gcuccaucuccacu

SEQ ID NO: 1676089 - RNA, 20 nt, Human
gcuccagcuguucagcuggu

SEQ ID NO: 1676090 - RNA, 24 nt, Human
gcuccaggcuccuuuagcgcccag

SEQ ID NO: 1676091 - RNA, 11 nt, Human
gcuccagcugu

SEQ ID NO: 1676092 - RNA, 13 nt, Human
gcuccaggcuccu

SEQ ID NO: 1676093 - RNA, 16 nt, Human
gcuccaggcuccuuua

SEQ ID NO: 1676094 - RNA, 23 nt, Human
gcuccaggcuccuuuagcgccca

SEQ ID NO: 1676095 - RNA, 20 nt, Human
gcuccauuuuuagugaaaua

SEQ ID NO: 1676096 - RNA, 17 nt, Human
gccugugaacugaacuc

SEQ ID NO: 1676097 - RNA, 23 nt, Human
gccugugagcuaggaauuguguu

SEQ ID NO: 1676098 - RNA, 15 nt, Human
gcgggcuuccuccug

SEQ ID NO: 1676099 - RNA, 12 nt, Human
gcggggacagcu

SEQ ID NO: 1676100 - RNA, 13 nt, Human
gcggggacagcuc

SEQ ID NO: 1676101 - RNA, 16 nt, Human
gcgguccacccaggag

SEQ ID NO: 1676102 - RNA, 20 nt, Human
gcgguccacccaggagcccc

SEQ ID NO: 1676103 - RNA, 18 nt, Human
gcgguccacccaggagcc

SEQ ID NO: 1676104 - RNA, 19 nt, Human
gcgguccacccaggagccc

SEQ ID NO: 1676105 - RNA, 15 nt, Human
gcgugagaccugccc

SEQ ID NO: 1676106 - RNA, 18 nt, Human
gcgugagccacugcaccg

SEQ ID NO: 1676107 - RNA, 23 nt, Human
gcgugagccacugcaccgggcca

SEQ ID NO: 1676108 - RNA, 13 nt, Human
gcuaaaugugaau

SEQ ID NO: 1676109 - RNA, 16 nt, Human
gcuaaaugugaaugau

SEQ ID NO: 1676110 - RNA, 14 nt, Human
gcuaacauggaagu

SEQ ID NO: 1676111 - RNA, 22 nt, Human
gcuaagagggagggagggcucc

SEQ ID NO: 1676112 - RNA, 23 nt, Human
gcuaucucccccagccccauccu

SEQ ID NO: 1676113 - RNA, 19 nt, Human
gcuaucucccccagcccca

SEQ ID NO: 1676114 - RNA, 20 nt, Human
gcuaucucccccagccccau

SEQ ID NO: 1676115 - RNA, 21 nt, Human
gcuaucucccccagccccauc

SEQ ID NO: 1676116 - RNA, 22 nt, Human
gcuaucucccccagccccaucc

SEQ ID NO: 1676117 - RNA, 16 nt, Human
gcuaucucccccagcc

SEQ ID NO: 1676118 - RNA, 17 nt, Human
gcuaucucccccagccc

SEQ ID NO: 1676119 - RNA, 18 nt, Human
gcuaucucccccagcccc

SEQ ID NO: 1676120 - RNA, 21 nt, Human
gcuacccgggaagggggcugg

SEQ ID NO: 1676121 - RNA, 21 nt, Human
gcuagagguucaaagauauuu

SEQ ID NO: 1676122 - RNA, 19 nt, Human
gcuagagguucaaagauau

SEQ ID NO: 1676123 - RNA, 18 nt, Human
gcuagagguucaaagaua

SEQ ID NO: 1676124 - RNA, 14 nt, Human
gcuacccgggaagg

SEQ ID NO: 1676125 - RNA, 15 nt, Human
gcuacccgggaaggg

SEQ ID NO: 1676126 - RNA, 14 nt, Human
gcuaagcauuccaa

SEQ ID NO: 1676127 - RNA, 23 nt, Human
gcuaagagggagggagggcucca

SEQ ID NO: 1676128 - RNA, 17 nt, Human
gcuaagcaaaaugugau

SEQ ID NO: 1676129 - RNA, 15 nt, Human
gcugauggugcaaug

SEQ ID NO: 1676130 - RNA, 16 nt, Human
gcugauggugcaauga

SEQ ID NO: 1676131 - RNA, 22 nt, Human
gcugagugggggaucacagccu

SEQ ID NO: 1676132 - RNA, 23 nt, Human
gcugagugggggaucacagccuc

SEQ ID NO: 1676133 - RNA, 21 nt, Human
gcugacuguacuccucccagg

SEQ ID NO: 1676134 - RNA, 17 nt, Human
gcugagucccaggcuga

SEQ ID NO: 1676135 - RNA, 21 nt, Human
gcugagucccaggcugagccu

SEQ ID NO: 1676136 - RNA, 22 nt, Human
gcugagucccaggcugagccuc

SEQ ID NO: 1676137 - RNA, 15 nt, Human
gcugagucugaaggc

SEQ ID NO: 1676138 - RNA, 16 nt, Human
gcugagucugaaggcu

SEQ ID NO: 1676139 - RNA, 18 nt, Human
gcugagucugaaggcugg

SEQ ID NO: 1676140 - RNA, 19 nt, Human
gcugagucugaaggcuggg

SEQ ID NO: 1676141 - RNA, 17 nt, Human
gcugcauuuaaaagaua

SEQ ID NO: 1676142 - RNA, 21 nt, Human
gcugcaguugccagucacccc

SEQ ID NO: 1676143 - RNA, 18 nt, Human
gcugcaguugccagucac

SEQ ID NO: 1676144 - RNA, 20 nt, Human
gcugcaguugccagucaccc

SEQ ID NO: 1676145 - RNA, 18 nt, Human
gcugauggugcaaugacc

SEQ ID NO: 1676146 - RNA, 21 nt, Human
gcugauggugcaaugaccuuu

SEQ ID NO: 1676147 - RNA, 18 nt, Human
gcugacuguacuccuccc

SEQ ID NO: 1676148 - RNA, 19 nt, Human
gcugacuguacuccuccca

SEQ ID NO: 1676149 - RNA, 17 nt, Human
gcucuugaugccuggcg

SEQ ID NO: 1676150 - RNA, 17 nt, Human
gcugacagacagcccuc

SEQ ID NO: 1676151 - RNA, 21 nt, Human
gcugacagacacaggcccggc

SEQ ID NO: 1676152 - RNA, 23 nt, Human
gcucuucuccuuucacaaccuuc

SEQ ID NO: 1676153 - RNA, 14 nt, Human
gcucuugaugccug

SEQ ID NO: 1676154 - RNA, 15 nt, Human
gcucuugaugccugg

SEQ ID NO: 1676155 - RNA, 16 nt, Human
gcucuugaugccuggc

SEQ ID NO: 1676156 - RNA, 17 nt, Human
gcucuucuccuuucaca

SEQ ID NO: 1676157 - RNA, 21 nt, Human
gcucuucuccuuucacaaccu

SEQ ID NO: 1676158 - RNA, 13 nt, Human
gcucuucuccuuu

SEQ ID NO: 1676159 - RNA, 14 nt, Human
gcucuucuccaggc

SEQ ID NO: 1676160 - RNA, 16 nt, Human
gcucuucuccaggcug

SEQ ID NO: 1676161 - RNA, 19 nt, Human
gcucuuccaggcugggaga

SEQ ID NO: 1676162 - RNA, 18 nt, Human
gcucuuccaggcugggag

SEQ ID NO: 1676163 - RNA, 22 nt, Human
gcucuuccaggcugggagagcc

SEQ ID NO: 1676164 - RNA, 12 nt, Human
gcucuucuccag

SEQ ID NO: 1676165 - RNA, 15 nt, Human
gcucccuucccaccu

SEQ ID NO: 1676166 - RNA, 16 nt, Human
gcucccuucccaccuc

SEQ ID NO: 1676167 - RNA, 18 nt, Human
gcucccuucccaccucuc

SEQ ID NO: 1676168 - RNA, 19 nt, Human
gcucccuucccaccucucu

SEQ ID NO: 1676169 - RNA, 21 nt, Human
gcuccuucuguccuacucugu

SEQ ID NO: 1676170 - RNA, 16 nt, Human
gcucgagcaugccugg

SEQ ID NO: 1676171 - RNA, 17 nt, Human
gcucgagcaugccugga

SEQ ID NO: 1676172 - RNA, 19 nt, Human
gcucuccucuugccacugc

SEQ ID NO: 1676173 - RNA, 22 nt, Human
gcucuccucuugccacugccuc

SEQ ID NO: 1676174 - RNA, 15 nt, Human
gcucuccucuugcca

SEQ ID NO: 1676175 - RNA, 19 nt, Human
gcucuccgaccagacaccu

SEQ ID NO: 1676176 - RNA, 13 nt, Human
gcucuccgaccag

SEQ ID NO: 1676177 - RNA, 17 nt, Human
gcucuccgaccagacac

SEQ ID NO: 1676178 - RNA, 11 nt, Human
gcucucuggcc

SEQ ID NO: 1676179 - RNA, 12 nt, Human
gcucucuggccu

SEQ ID NO: 1676180 - RNA, 13 nt, Human
gcucucuggccuu

SEQ ID NO: 1676181 - RNA, 14 nt, Human
gcucuggacaggca

SEQ ID NO: 1676182 - RNA, 15 nt, Human
gcucuggacaggcau

SEQ ID NO: 1676183 - RNA, 16 nt, Human
gcucuggacaggcaug

SEQ ID NO: 1676184 - RNA, 21 nt, Human
gcucuggacaggcauguucuc

SEQ ID NO: 1676185 - RNA, 22 nt, Human
gcucuggacaggcauguucucu

SEQ ID NO: 1676186 - RNA, 19 nt, Human
gcucugcuccucuccccag

SEQ ID NO: 1676187 - RNA, 21 nt, Human
gcucugcuccucuccccagca

SEQ ID NO: 1676188 - RNA, 13 nt, Human
gcucugcugacag

SEQ ID NO: 1676189 - RNA, 14 nt, Human
gcucugcugacaga

SEQ ID NO: 1676190 - RNA, 18 nt, Human
gcucugcugacagacaca

SEQ ID NO: 1676191 - RNA, 19 nt, Human
gcucugcugacagacacag

SEQ ID NO: 1676192 - RNA, 20 nt, Human
gcucugcugacagacacagg

SEQ ID NO: 1676193 - RNA, 23 nt, Human
gcucugcugacagacacaggccc

SEQ ID NO: 1676194 - RNA, 13 nt, Human
gcucugccuccca

SEQ ID NO: 1676195 - RNA, 14 nt, Human
gcucugccucccau

SEQ ID NO: 1676196 - RNA, 15 nt, Human
gcucugccucccauc

SEQ ID NO: 1676197 - RNA, 22 nt, Human
gcucugccucccaucacccgcu

SEQ ID NO: 1676198 - RNA, 13 nt, Human
gcucugcuccucu

SEQ ID NO: 1676199 - RNA, 14 nt, Human
gcucugcuccucuc

SEQ ID NO: 1676200 - RNA, 14 nt, Human
gcucugcccuuggu

SEQ ID NO: 1676201 - RNA, 23 nt, Human
gcucugcccuugguuaggcauug

SEQ ID NO: 1676202 - RNA, 11 nt, Human
gcucugccucc

SEQ ID NO: 1676203 - RNA, 14 nt, Human
gcucucuggccuuc

SEQ ID NO: 1676204 - RNA, 15 nt, Human
gcucucuggccuucg

SEQ ID NO: 1676205 - RNA, 19 nt, Human
gcucucuggccuucggccu

SEQ ID NO: 1676206 - RNA, 20 nt, Human
gcucucuggccuucggccuc

SEQ ID NO: 1676207 - RNA, 18 nt, Human
ggcgcugccccuggcagc

SEQ ID NO: 1676208 - RNA, 19 nt, Human
ggcgcugccccuggcagcc

SEQ ID NO: 1676209 - RNA, 21 nt, Human
ggcgcugccccuggcagcccc

SEQ ID NO: 1676210 - RNA, 23 nt, Human
ggcgcugccccuggcagccccug

SEQ ID NO: 1676211 - RNA, 15 nt, Human
ggcgcgguggcucac

SEQ ID NO: 1676212 - RNA, 11 nt, Human
ggccugugagc

SEQ ID NO: 1676213 - RNA, 14 nt, Human
ggccugggggcugg

SEQ ID NO: 1676214 - RNA, 20 nt, Human
ggccugggggcugggcagag

SEQ ID NO: 1676215 - RNA, 22 nt, Human
ggccugggggcugggcagagga

SEQ ID NO: 1676216 - RNA, 19 nt, Human
ggccuggccugagcuggga

SEQ ID NO: 1676217 - RNA, 22 nt, Human
ggcuaggaccccuccauguggg

SEQ ID NO: 1676218 - RNA, 16 nt, Human
ggcuaggaccccucca

SEQ ID NO: 1676219 - RNA, 22 nt, Human
ggcuagagguucaaagauauuu

SEQ ID NO: 1676220 - RNA, 17 nt, Human
ggcuagagguucaaaga

SEQ ID NO: 1676221 - RNA, 16 nt, Human
ggcuaguugggcuucc

SEQ ID NO: 1676222 - RNA, 23 nt, Human
ggcuagugugguguuuccuggca

SEQ ID NO: 1676223 - RNA, 15 nt, Human
ggcuaguugggcuuc

SEQ ID NO: 1676224 - RNA, 19 nt, Human
ggcuaugggggcacugagg

SEQ ID NO: 1676225 - RNA, 15 nt, Human
ggcuaugcauuugaa

SEQ ID NO: 1676226 - RNA, 12 nt, Human
ggcuccagcugg

SEQ ID NO: 1676227 - RNA, 12 nt, Human
ggcuccaggagc

SEQ ID NO: 1676228 - RNA, 13 nt, Human
ggcuccaggagca

SEQ ID NO: 1676229 - RNA, 19 nt, Human
ggcuccaggagcagccaca

SEQ ID NO: 1676230 - RNA, 15 nt, Human
ggcucaaguccucuu

SEQ ID NO: 1676231 - RNA, 21 nt, Human
ggcucaaguccucuuuucuga

SEQ ID NO: 1676232 - RNA, 11 nt, Human
ggcuccaggcu

SEQ ID NO: 1676233 - RNA, 17 nt, Human
ggcucccacaggcccuu

SEQ ID NO: 1676234 - RNA, 18 nt, Human
ggcucccacaggcccuuc

SEQ ID NO: 1676235 - RNA, 19 nt, Human
ggcucccacaggcccuucc

SEQ ID NO: 1676236 - RNA, 16 nt, Human
ggcuccaggcuccuuu

SEQ ID NO: 1676237 - RNA, 22 nt, Human
ggccucggacuuagcugggaga

SEQ ID NO: 1676238 - RNA, 20 nt, Human
ggccucggacuuagcuggga

SEQ ID NO: 1676239 - RNA, 18 nt, Human
ggccucuuaugggcuggg

SEQ ID NO: 1676240 - RNA, 20 nt, Human
ggccucgguguggagaagcg

SEQ ID NO: 1676241 - RNA, 17 nt, Human
ggccucuuaugggcugg

SEQ ID NO: 1676242 - RNA, 13 nt, Human
ggccucugcacuc

SEQ ID NO: 1676243 - RNA, 14 nt, Human
ggccucugcacucc

SEQ ID NO: 1676244 - RNA, 15 nt, Human
ggccucugcacuccc

SEQ ID NO: 1676245 - RNA, 16 nt, Human
ggccucugcacucccc

SEQ ID NO: 1676246 - RNA, 11 nt, Human
ggcccugcccu

SEQ ID NO: 1676247 - RNA, 12 nt, Human
ggcccugcccug

SEQ ID NO: 1676248 - RNA, 13 nt, Human
ggcccugcccugg

SEQ ID NO: 1676249 - RNA, 20 nt, Human
ggcccugcccugguuuccug

SEQ ID NO: 1676250 - RNA, 13 nt, Human
ggcccugccuccu

SEQ ID NO: 1676251 - RNA, 13 nt, Human
ggcccuggcuccc

SEQ ID NO: 1676252 - RNA, 22 nt, Human
ggcccuggcucccacaggcccu

SEQ ID NO: 1676253 - RNA, 22 nt, Human
ggcccugcccugguuuccugcc

SEQ ID NO: 1676254 - RNA, 14 nt, Human
ggcccugccuccuu

SEQ ID NO: 1676255 - RNA, 15 nt, Human
ggcccugccuccuuu

SEQ ID NO: 1676256 - RNA, 11 nt, Human
ggcccagagag

SEQ ID NO: 1676257 - RNA, 12 nt, Human
ggcccagagagg

SEQ ID NO: 1676258 - RNA, 21 nt, Human
ggcccucugcccacucccugc

SEQ ID NO: 1676259 - RNA, 19 nt, Human
ggcccucugcccacucccu

SEQ ID NO: 1676260 - RNA, 20 nt, Human
ggcccucugcccacucccug

SEQ ID NO: 1676261 - RNA, 13 nt, Human
ggcccucugccca

SEQ ID NO: 1676262 - RNA, 15 nt, Human
ggcccucugcccacu

SEQ ID NO: 1676263 - RNA, 16 nt, Human
ggcccucugcccacuc

SEQ ID NO: 1676264 - RNA, 17 nt, Human
ggcccucugcccacucc

SEQ ID NO: 1676265 - RNA, 12 nt, Human
ggagugcaguga

SEQ ID NO: 1676266 - RNA, 14 nt, Human
ggagugcagugagc

SEQ ID NO: 1676267 - RNA, 15 nt, Human
ggagugcagugagcc

SEQ ID NO: 1676268 - RNA, 18 nt, Human
ggauacaaaagcauguga

SEQ ID NO: 1676269 - RNA, 22 nt, Human
ggaucaaaccccgaccaccugc

SEQ ID NO: 1676270 - RNA, 22 nt, Human
ggaucccucauccucauaccca

SEQ ID NO: 1676271 - RNA, 13 nt, Human
ggaucccucaucc

SEQ ID NO: 1676272 - RNA, 17 nt, Human
ggaucccucauccucau

SEQ ID NO: 1676273 - RNA, 23 nt, Human
ggaugcacagaguuguuacauuu

SEQ ID NO: 1676274 - RNA, 21 nt, Human
ggaugauuggaggggggaggu

SEQ ID NO: 1676275 - RNA, 16 nt, Human
ggaugcagccucacag

SEQ ID NO: 1676276 - RNA, 17 nt, Human
ggaugcagccucacagu

SEQ ID NO: 1676277 - RNA, 12 nt, Human
ggauccuccagg

SEQ ID NO: 1676278 - RNA, 13 nt, Human
ggauccuccaggu

SEQ ID NO: 1676279 - RNA, 19 nt, Human
ggaugcagccucacagucc

SEQ ID NO: 1676280 - RNA, 15 nt, Human
ggaugcuuguacaua

SEQ ID NO: 1676281 - RNA, 19 nt, Human
ggauuacaagcgugagcca

SEQ ID NO: 1676282 - RNA, 19 nt, Human
ggcaaucauggugcucaga

SEQ ID NO: 1676283 - RNA, 18 nt, Human
ggcaacccccagccugcu

SEQ ID NO: 1676284 - RNA, 14 nt, Human
ggcaaugcuggcug

SEQ ID NO: 1676285 - RNA, 15 nt, Human
ggcaaugcuggcugu

SEQ ID NO: 1676286 - RNA, 23 nt, Human
ggcaaugcuggcuguuggcuggg

SEQ ID NO: 1676287 - RNA, 18 nt, Human
ggcaccggggccucggac

SEQ ID NO: 1676288 - RNA, 22 nt, Human
ggcacccggccccugcugguuc

SEQ ID NO: 1676289 - RNA, 23 nt, Human
ggcacccaccaucaugucuggcu

SEQ ID NO: 1676290 - RNA, 20 nt, Human
ggauucuuaaaguugaauuu

SEQ ID NO: 1676291 - RNA, 16 nt, Human
ggauucuuauggacaa

SEQ ID NO: 1676292 - RNA, 16 nt, Human
ggauucuuccucccuc

SEQ ID NO: 1676293 - RNA, 19 nt, Human
ggauuacaggcuccugcca

SEQ ID NO: 1676294 - RNA, 23 nt, Human
ggauuacaagcgugagccacugc

SEQ ID NO: 1676295 - RNA, 18 nt, Human
ggauucuuaaaguugaau

SEQ ID NO: 1676296 - RNA, 19 nt, Human
ggauucuuaaaguugaauu

SEQ ID NO: 1676297 - RNA, 16 nt, Human
ggauucuuaaaguuga

SEQ ID NO: 1676298 - RNA, 17 nt, Human
ggauuagggagagaaga

SEQ ID NO: 1676299 - RNA, 17 nt, Human
ggauugcuacuguccua

SEQ ID NO: 1676300 - RNA, 16 nt, Human
ggcaacccccagccug

SEQ ID NO: 1676301 - RNA, 17 nt, Human
ggcaacccccagccugc

SEQ ID NO: 1676302 - RNA, 15 nt, Human
ggauuguaaaauggu

SEQ ID NO: 1676303 - RNA, 17 nt, Human
ggcauggccagguggcc

SEQ ID NO: 1676304 - RNA, 18 nt, Human
ggcauggccagguggcca

SEQ ID NO: 1676305 - RNA, 15 nt, Human
ggcaugaagacagau

SEQ ID NO: 1676306 - RNA, 18 nt, Human
ggcaugacacgaauauug

SEQ ID NO: 1676307 - RNA, 19 nt, Human
ggcagggucucacucuguc

SEQ ID NO: 1676308 - RNA, 20 nt, Human
ggcagggucucacucugucg

SEQ ID NO: 1676309 - RNA, 13 nt, Human
ggcagugggagcu

SEQ ID NO: 1676310 - RNA, 14 nt, Human
ggcagugggagcug

SEQ ID NO: 1676311 - RNA, 21 nt, Human
ggcagugggacagggcauggc

SEQ ID NO: 1676312 - RNA, 16 nt, Human
ggcagugggagcugcc

SEQ ID NO: 1676313 - RNA, 12 nt, Human
ggcagcucaccu

SEQ ID NO: 1676314 - RNA, 14 nt, Human
ggcagcucaccucu

SEQ ID NO: 1676315 - RNA, 17 nt, Human
ggcagcuugaggguugg

SEQ ID NO: 1676316 - RNA, 16 nt, Human
ggcagcucaccucucc

SEQ ID NO: 1676317 - RNA, 21 nt, Human
ggcagcucagagaggguggga

SEQ ID NO: 1676318 - RNA, 14 nt, Human
ggccaggcugcucu

SEQ ID NO: 1676319 - RNA, 15 nt, Human
ggccaggcugcucuu

SEQ ID NO: 1676320 - RNA, 11 nt, Human
ggccaggcugc

SEQ ID NO: 1676321 - RNA, 16 nt, Human
ggccaggcugcucuug

SEQ ID NO: 1676322 - RNA, 16 nt, Human
ggccaugggccuccug

SEQ ID NO: 1676323 - RNA, 23 nt, Human
ggccagcugcuugggcuucaucc

SEQ ID NO: 1676324 - RNA, 18 nt, Human
ggccaggcccucugccca

SEQ ID NO: 1676325 - RNA, 20 nt, Human
ggccagccuugaccauucuc

SEQ ID NO: 1676326 - RNA, 22 nt, Human
ggccagccuugaccauucucca

SEQ ID NO: 1676327 - RNA, 17 nt, Human
ggccagcugcuugggcu

SEQ ID NO: 1676328 - RNA, 17 nt, Human
ggccacuccagaccccu

SEQ ID NO: 1676329 - RNA, 18 nt, Human
ggcauuccccaggaggcc

SEQ ID NO: 1676330 - RNA, 19 nt, Human
ggcauuccccaggaggcca

SEQ ID NO: 1676331 - RNA, 22 nt, Human
ggcaugggaaugaaugucagug

SEQ ID NO: 1676332 - RNA, 17 nt, Human
ggcauuccccaggaggc

SEQ ID NO: 1676333 - RNA, 18 nt, Human
ggcaugggaaugaauguc

SEQ ID NO: 1676334 - RNA, 14 nt, Human
ggcauggcugggaa

SEQ ID NO: 1676335 - RNA, 16 nt, Human
gcuucaguggcagcug

SEQ ID NO: 1676336 - RNA, 12 nt, Human
gcuuauacacuu

SEQ ID NO: 1676337 - RNA, 20 nt, Human
gcuuauacacuuacacuuua

SEQ ID NO: 1676338 - RNA, 19 nt, Human
gcuuaucucaggggugugc

SEQ ID NO: 1676339 - RNA, 17 nt, Human
gcuucaguggcagcugc

SEQ ID NO: 1676340 - RNA, 18 nt, Human
gcuucaguggcagcugcu

SEQ ID NO: 1676341 - RNA, 12 nt, Human
gcuucauccucc

SEQ ID NO: 1676342 - RNA, 15 nt, Human
gcuucauccuccuca

SEQ ID NO: 1676343 - RNA, 13 nt, Human
gcuucauuuccug

SEQ ID NO: 1676344 - RNA, 16 nt, Human
gcuucauuuccugugu

SEQ ID NO: 1676345 - RNA, 16 nt, Human
gcuuccagugaggcuc

SEQ ID NO: 1676346 - RNA, 18 nt, Human
gcuuccagugaggcucug

SEQ ID NO: 1676347 - RNA, 17 nt, Human
gcuucauuuccuguguc

SEQ ID NO: 1676348 - RNA, 21 nt, Human
gcuucauccuccucagaucuu

SEQ ID NO: 1676349 - RNA, 18 nt, Human
gcuucauuuccugugucu

SEQ ID NO: 1676350 - RNA, 15 nt, Human
gcuuccagugaggcu

SEQ ID NO: 1676351 - RNA, 16 nt, Human
gcuugaggguugggcu

SEQ ID NO: 1676352 - RNA, 21 nt, Human
gcuuagucacugagacagccc

SEQ ID NO: 1676353 - RNA, 19 nt, Human
gcuuagucacugagacagc

SEQ ID NO: 1676354 - RNA, 20 nt, Human
gcuuagucacugagacagcc

SEQ ID NO: 1676355 - RNA, 15 nt, Human
gcuuagucacugaga

SEQ ID NO: 1676356 - RNA, 17 nt, Human
gcuuagucacugagaca

SEQ ID NO: 1676357 - RNA, 21 nt, Human
gcuguucaugaaagauucaau

SEQ ID NO: 1676358 - RNA, 12 nt, Human
gcuguucaugaa

SEQ ID NO: 1676359 - RNA, 14 nt, Human
gcuguucagcuggu

SEQ ID NO: 1676360 - RNA, 21 nt, Human
gcugugggcgugagaccugcc

SEQ ID NO: 1676361 - RNA, 22 nt, Human
gcugugggcgugagaccugccc

SEQ ID NO: 1676362 - RNA, 20 nt, Human
gcugugggcgugagaccugc

SEQ ID NO: 1676363 - RNA, 17 nt, Human
gcugucuccauguuuga

SEQ ID NO: 1676364 - RNA, 15 nt, Human
gcugccaaugggagc

SEQ ID NO: 1676365 - RNA, 16 nt, Human
gcugccaaugggagcu

SEQ ID NO: 1676366 - RNA, 19 nt, Human
gcugccaaugggagcucau

SEQ ID NO: 1676367 - RNA, 20 nt, Human
gcugccaaugggagcucaug

SEQ ID NO: 1676368 - RNA, 20 nt, Human
gcugucuacacuaagagaga

SEQ ID NO: 1676369 - RNA, 12 nt, Human
ggaaaggcucca

SEQ ID NO: 1676370 - RNA, 13 nt, Human
ggaaaggcuccag

SEQ ID NO: 1676371 - RNA, 14 nt, Human
ggaaaggcuccagg

SEQ ID NO: 1676372 - RNA, 14 nt, Human
ggaaaaguuuaaua

SEQ ID NO: 1676373 - RNA, 18 nt, Human
ggaaaaguuuaauauuaa

SEQ ID NO: 1676374 - RNA, 19 nt, Human
ggaaaaucagccugcucca

SEQ ID NO: 1676375 - RNA, 23 nt, Human
ggaaaaucagccugcuccagcug

SEQ ID NO: 1676376 - RNA, 22 nt, Human
ggaaaggcuccaggagcagcca

SEQ ID NO: 1676377 - RNA, 17 nt, Human
ggaaaggcuccaggagc

SEQ ID NO: 1676378 - RNA, 19 nt, Human
ggaaaggcuccaggagcag

SEQ ID NO: 1676379 - RNA, 20 nt, Human
ggaaaggcuccaggagcagc

SEQ ID NO: 1676380 - RNA, 21 nt, Human
ggaaaggcuccaggagcagcc

SEQ ID NO: 1676381 - RNA, 16 nt, Human
ggaacaggaaacugau

SEQ ID NO: 1676382 - RNA, 21 nt, Human
ggaaaucaccgaaaacguggc

SEQ ID NO: 1676383 - RNA, 14 nt, Human
ggaaaucaccgaaa

SEQ ID NO: 1676384 - RNA, 17 nt, Human
ggaaaucaaauaugcaa

SEQ ID NO: 1676385 - RNA, 21 nt, Human
ggaaaaccaagccguggcuuc

SEQ ID NO: 1676386 - RNA, 14 nt, Human
ggaaaagcugcuga

SEQ ID NO: 1676387 - RNA, 18 nt, Human
ggaaaagcugcugacagu

SEQ ID NO: 1676388 - RNA, 20 nt, Human
ggaaaagcugcugacagugu

SEQ ID NO: 1676389 - RNA, 22 nt, Human
gcuuuucacugcuggcugccuu

SEQ ID NO: 1676390 - RNA, 23 nt, Human
gcuuuucacugcuggcugccuua

SEQ ID NO: 1676391 - RNA, 18 nt, Human
ggaaaacaugcuacacac

SEQ ID NO: 1676392 - RNA, 21 nt, Human
gcuuuguuuguugucagcuga

SEQ ID NO: 1676393 - RNA, 14 nt, Human
gcuuuucacugcug

SEQ ID NO: 1676394 - RNA, 18 nt, Human
gcuuuucacugcuggcug

SEQ ID NO: 1676395 - RNA, 13 nt, Human
gcuuuucacugcu

SEQ ID NO: 1676396 - RNA, 14 nt, Human
gcuuucagauacug

SEQ ID NO: 1676397 - RNA, 18 nt, Human
gcuuucagauacuggauu

SEQ ID NO: 1676398 - RNA, 15 nt, Human
gcuuuguaugcacuu

SEQ ID NO: 1676399 - RNA, 23 nt, Human
gcuuucagauacuggauuguacu

SEQ ID NO: 1676400 - RNA, 15 nt, Human
gcuuugugauuuuug

SEQ ID NO: 1676401 - RNA, 22 nt, Human
gcuugaggguugggcugguguc

SEQ ID NO: 1676402 - RNA, 18 nt, Human
gcuugaggguugggcugg

SEQ ID NO: 1676403 - RNA, 20 nt, Human
gcuugaggguugggcuggug

SEQ ID NO: 1676404 - RNA, 15 nt, Human
ggacuguggugacuu

SEQ ID NO: 1676405 - RNA, 17 nt, Human
ggacuguggugacuuug

SEQ ID NO: 1676406 - RNA, 21 nt, Human
ggacuguggugacuuuggaua

SEQ ID NO: 1676407 - RNA, 22 nt, Human
ggacuguggugacuuuggauaa

SEQ ID NO: 1676408 - RNA, 17 nt, Human
ggacugugugcucagga

SEQ ID NO: 1676409 - RNA, 17 nt, Human
ggagaagcggcuggcag

SEQ ID NO: 1676410 - RNA, 18 nt, Human
ggagaagcggcuggcagc

SEQ ID NO: 1676411 - RNA, 15 nt, Human
ggagaaucacuugaa

SEQ ID NO: 1676412 - RNA, 19 nt, Human
ggagaaucacuugaacccg

SEQ ID NO: 1676413 - RNA, 18 nt, Human
ggacuggccucugcugau

SEQ ID NO: 1676414 - RNA, 14 nt, Human
ggacuguggugacu

SEQ ID NO: 1676415 - RNA, 15 nt, Human
ggacgcucucuggcc

SEQ ID NO: 1676416 - RNA, 13 nt, Human
ggacgcucucugg

SEQ ID NO: 1676417 - RNA, 14 nt, Human
ggacgcucucuggc

SEQ ID NO: 1676418 - RNA, 13 nt, Human
ggaccagagcugc

SEQ ID NO: 1676419 - RNA, 14 nt, Human
ggaccagagcugcc

SEQ ID NO: 1676420 - RNA, 19 nt, Human
ggaccucaggugagaagca

SEQ ID NO: 1676421 - RNA, 23 nt, Human
ggaccucaggugagaagcagagg

SEQ ID NO: 1676422 - RNA, 17 nt, Human
ggacgcuacccgggaag

SEQ ID NO: 1676423 - RNA, 19 nt, Human
ggacgcuacccgggaaggg

SEQ ID NO: 1676424 - RNA, 20 nt, Human
ggacgcuacccgggaagggg

SEQ ID NO: 1676425 - RNA, 15 nt, Human
ggaccuugaacuggg

SEQ ID NO: 1676426 - RNA, 17 nt, Human
ggaccuugaacugggua

SEQ ID NO: 1676427 - RNA, 17 nt, Human
ggacacucaaaagcugg

SEQ ID NO: 1676428 - RNA, 22 nt, Human
ggacacucaaaagcugggcagg

SEQ ID NO: 1676429 - RNA, 15 nt, Human
ggacagccacggcca

SEQ ID NO: 1676430 - RNA, 19 nt, Human
ggacagccacggccaggcc

SEQ ID NO: 1676431 - RNA, 20 nt, Human
ggacagccacggccaggcca

SEQ ID NO: 1676432 - RNA, 21 nt, Human
ggacagccacggccaggccag

SEQ ID NO: 1676433 - RNA, 22 nt, Human
ggacagccacggccaggccaga

SEQ ID NO: 1676434 - RNA, 20 nt, Human
ggacauugcggacagccacg

SEQ ID NO: 1676435 - RNA, 16 nt, Human
ggaccaaaaaccagua

SEQ ID NO: 1676436 - RNA, 23 nt, Human
ggaccaaaaaccaguauuguaca

SEQ ID NO: 1676437 - RNA, 16 nt, Human
ggacauuugcucaugg

SEQ ID NO: 1676438 - RNA, 13 nt, Human
ggaaccugacccc

SEQ ID NO: 1676439 - RNA, 14 nt, Human
ggaaggcagggagg

SEQ ID NO: 1676440 - RNA, 16 nt, Human
ggaacgcguugaaauu

SEQ ID NO: 1676441 - RNA, 17 nt, Human
ggaaggcugagaggaga

SEQ ID NO: 1676442 - RNA, 23 nt, Human
ggaaggggagauaaggguaucug

SEQ ID NO: 1676443 - RNA, 18 nt, Human
ggaaguacuggagaaaau

SEQ ID NO: 1676444 - RNA, 12 nt, Human
ggaaguacugga

SEQ ID NO: 1676445 - RNA, 16 nt, Human
ggaaguacuggagaaa

SEQ ID NO: 1676446 - RNA, 18 nt, Human
ggaagugcuaauuuugaa

SEQ ID NO: 1676447 - RNA, 20 nt, Human
ggaagugacgguuuaauggg

SEQ ID NO: 1676448 - RNA, 19 nt, Human
ggaauuuucaucuaggauu

SEQ ID NO: 1676449 - RNA, 16 nt, Human
ggacaaaauggaauac

SEQ ID NO: 1676450 - RNA, 17 nt, Human
ggacaaaauggaauacu

SEQ ID NO: 1676451 - RNA, 12 nt, Human
ggaauuguguuu

SEQ ID NO: 1676452 - RNA, 16 nt, Human
ggaauuggagcucgug

SEQ ID NO: 1676453 - RNA, 22 nt, Human
ggaauuggagcucgugggacag

SEQ ID NO: 1676454 - RNA, 23 nt, Human
ggaauuucucccagucauuuaau

SEQ ID NO: 1676455 - RNA, 19 nt, Human
ggaauguuugccucugccu

SEQ ID NO: 1676456 - RNA, 12 nt, Human
ggaauucuguau

SEQ ID NO: 1676457 - RNA, 15 nt, Human
ggaauucuguauaga

SEQ ID NO: 1676458 - RNA, 17 nt, Human
ggaauucuguauagauu

SEQ ID NO: 1676459 - RNA, 24 nt, Human
ggaaugauuaauuaaaacacaaca

SEQ ID NO: 1676460 - RNA, 12 nt, Human
ggaaugcagugg

SEQ ID NO: 1676461 - RNA, 20 nt, Human
gaggcugggcucccuuccca

SEQ ID NO: 1676462 - RNA, 19 nt, Human
gagggagggcuccagacac

SEQ ID NO: 1676463 - RNA, 21 nt, Human
gagggagugacagaggcagcc

SEQ ID NO: 1676464 - RNA, 22 nt, Human
gagggagugacagaggcagccc

SEQ ID NO: 1676465 - RNA, 20 nt, Human
gagggagggggaaggcaggg

SEQ ID NO: 1676466 - RNA, 20 nt, Human
gagggagggcuccagacaca

SEQ ID NO: 1676467 - RNA, 14 nt, Human
gagggagguaagga

SEQ ID NO: 1676468 - RNA, 18 nt, Human
gagggagugacagaggca

SEQ ID NO: 1676469 - RNA, 17 nt, Human
gaggggcugugggcgug

SEQ ID NO: 1676470 - RNA, 17 nt, Human
gaggggguggccuccca

SEQ ID NO: 1676471 - RNA, 13 nt, Human
gaggguaaggcug

SEQ ID NO: 1676472 - RNA, 24 nt, Human
gagguaaggaauaccugucccccu

SEQ ID NO: 1676473 - RNA, 21 nt, Human
gagguaaggaauaccuguccc

SEQ ID NO: 1676474 - RNA, 14 nt, Human
gaggguugggcugg

SEQ ID NO: 1676475 - RNA, 15 nt, Human
gaggguugggcuggu

SEQ ID NO: 1676476 - RNA, 17 nt, Human
gaggucaaggcugcagu

SEQ ID NO: 1676477 - RNA, 12 nt, Human
gaggucagagcc

SEQ ID NO: 1676478 - RNA, 13 nt, Human
gaggucagagccu

SEQ ID NO: 1676479 - RNA, 15 nt, Human
gagggugggaguggg

SEQ ID NO: 1676480 - RNA, 14 nt, Human
gaggguggugaccu

SEQ ID NO: 1676481 - RNA, 21 nt, Human
gaggguggugaccucugccug

SEQ ID NO: 1676482 - RNA, 22 nt, Human
gagggugucccaaaaagaaagg

SEQ ID NO: 1676483 - RNA, 12 nt, Human
gaggguggaaua

SEQ ID NO: 1676484 - RNA, 21 nt, Human
gagggugaagugaagacaaug

SEQ ID NO: 1676485 - RNA, 13 nt, Human
gagggucugagga

SEQ ID NO: 1676486 - RNA, 14 nt, Human
gagggucugaggaa

SEQ ID NO: 1676487 - RNA, 21 nt, Human
gaggcgcaugaauuugugaag

SEQ ID NO: 1676488 - RNA, 16 nt, Human
gaggccuucucugaag

SEQ ID NO: 1676489 - RNA, 18 nt, Human
gaggccuucucugaagga

SEQ ID NO: 1676490 - RNA, 19 nt, Human
gaggccuucucugaaggac

SEQ ID NO: 1676491 - RNA, 11 nt, Human
gaggcccagag

SEQ ID NO: 1676492 - RNA, 13 nt, Human
gaggcccagaggg

SEQ ID NO: 1676493 - RNA, 14 nt, Human
gaggcccagagggc

SEQ ID NO: 1676494 - RNA, 19 nt, Human
gaggcccagagggccugca

SEQ ID NO: 1676495 - RNA, 15 nt, Human
gaggcccagagggcc

SEQ ID NO: 1676496 - RNA, 16 nt, Human
gaggcccagagggccu

SEQ ID NO: 1676497 - RNA, 22 nt, Human
gaggcccuucucuccagccccu

SEQ ID NO: 1676498 - RNA, 21 nt, Human
gaggcccuucucuccagcccc

SEQ ID NO: 1676499 - RNA, 15 nt, Human
gaggcccuucucucc

SEQ ID NO: 1676500 - RNA, 20 nt, Human
gaggcccuucucuccagccc

SEQ ID NO: 1676501 - RNA, 20 nt, Human
gaggauugcuugagcucagg

SEQ ID NO: 1676502 - RNA, 22 nt, Human
gagcccuguccugccuaaggcu

SEQ ID NO: 1676503 - RNA, 13 nt, Human
gaggaucucuuga

SEQ ID NO: 1676504 - RNA, 22 nt, Human
gaggaucucuugagccugggag

SEQ ID NO: 1676505 - RNA, 16 nt, Human
gaggaucucuugagcc

SEQ ID NO: 1676506 - RNA, 19 nt, Human
gaggaucucuugagccugg

SEQ ID NO: 1676507 - RNA, 14 nt, Human
gaggccaugggccu

SEQ ID NO: 1676508 - RNA, 17 nt, Human
gaggccaugggccuccu

SEQ ID NO: 1676509 - RNA, 18 nt, Human
gaggccaugggccuccug

SEQ ID NO: 1676510 - RNA, 20 nt, Human
gaggccaugggccuccugug

SEQ ID NO: 1676511 - RNA, 21 nt, Human
gaggccaugggccuccugugu

SEQ ID NO: 1676512 - RNA, 23 nt, Human
gaggccaugggccuccugugugu

SEQ ID NO: 1676513 - RNA, 21 nt, Human
gaggcagccccauucugccug

SEQ ID NO: 1676514 - RNA, 20 nt, Human
gaggcagccccauucugccu

SEQ ID NO: 1676515 - RNA, 9 nt, Human
gaggcaggg

SEQ ID NO: 1676516 - RNA, 19 nt, Human
gaggcagccccauucugcc

SEQ ID NO: 1676517 - RNA, 19 nt, Human
gaggcagagguugcaguga

SEQ ID NO: 1676518 - RNA, 21 nt, Human
gagucuauuuacggaacucaa

SEQ ID NO: 1676519 - RNA, 12 nt, Human
gagucugaaggc

SEQ ID NO: 1676520 - RNA, 13 nt, Human
gagucugaaggcu

SEQ ID NO: 1676521 - RNA, 15 nt, Human
gagucugaaggcugg

SEQ ID NO: 1676522 - RNA, 14 nt, Human
gagucugaaggcug

SEQ ID NO: 1676523 - RNA, 17 nt, Human
gagugaagcugggagaa

SEQ ID NO: 1676524 - RNA, 14 nt, Human
gagugacagaggca

SEQ ID NO: 1676525 - RNA, 15 nt, Human
gagugacagaggcag

SEQ ID NO: 1676526 - RNA, 16 nt, Human
gagugacagaggcagc

SEQ ID NO: 1676527 - RNA, 11 nt, Human
gaguauauguc

SEQ ID NO: 1676528 - RNA, 18 nt, Human
gaguaggaagacuuugga

SEQ ID NO: 1676529 - RNA, 19 nt, Human
gaguaggaagacuuuggaa

SEQ ID NO: 1676530 - RNA, 15 nt, Human
gagucgaggacaggg

SEQ ID NO: 1676531 - RNA, 16 nt, Human
gagucgaggacaggga

SEQ ID NO: 1676532 - RNA, 19 nt, Human
gaguccgaaagggacuugg

SEQ ID NO: 1676533 - RNA, 14 nt, Human
gagucgaggacagg

SEQ ID NO: 1676534 - RNA, 22 nt, Human
gaguaauccaagcaaaugugaa

SEQ ID NO: 1676535 - RNA, 20 nt, Human
gaguacuacaguccucccau

SEQ ID NO: 1676536 - RNA, 21 nt, Human
gaguacuacaguccucccauc

SEQ ID NO: 1676537 - RNA, 23 nt, Human
gaguacuacaguccucccaucuc

SEQ ID NO: 1676538 - RNA, 19 nt, Human
gaguagcugggacuacagg

SEQ ID NO: 1676539 - RNA, 22 nt, Human
gaguagcugggacuacaggcac

SEQ ID NO: 1676540 - RNA, 12 nt, Human
gaguaggaagac

SEQ ID NO: 1676541 - RNA, 13 nt, Human
gaguaggaagacu

SEQ ID NO: 1676542 - RNA, 17 nt, Human
gaguaggaagacuuugg

SEQ ID NO: 1676543 - RNA, 17 nt, Human
gaggucagagccugcag

SEQ ID NO: 1676544 - RNA, 20 nt, Human
gaggucagagccugcaguua

SEQ ID NO: 1676545 - RNA, 15 nt, Human
gagguugggaggcca

SEQ ID NO: 1676546 - RNA, 17 nt, Human
gagguugggaggccauu

SEQ ID NO: 1676547 - RNA, 16 nt, Human
gagguuucaaaccucc

SEQ ID NO: 1676548 - RNA, 15 nt, Human
gauauaagugugugu

SEQ ID NO: 1676549 - RNA, 14 nt, Human
gauaugauucaaau

SEQ ID NO: 1676550 - RNA, 22 nt, Human
gauaugauucaaaugucuauaa

SEQ ID NO: 1676551 - RNA, 24 nt, Human
gauaugauucaaaugucuauaaac

SEQ ID NO: 1676552 - RNA, 18 nt, Human
gaucacggcucacugcag

SEQ ID NO: 1676553 - RNA, 14 nt, Human
gaucacagccucug

SEQ ID NO: 1676554 - RNA, 20 nt, Human
gaucacggcucacugcagcc

SEQ ID NO: 1676555 - RNA, 15 nt, Human
gaucacggcucacug

SEQ ID NO: 1676556 - RNA, 16 nt, Human
gaucacggcucacugc

SEQ ID NO: 1676557 - RNA, 21 nt, Human
gauacaggaaaagcugcugac

SEQ ID NO: 1676558 - RNA, 23 nt, Human
gauacaggaaaagcugcugacag

SEQ ID NO: 1676559 - RNA, 22 nt, Human
gauaagaaccuuuugagugccu

SEQ ID NO: 1676560 - RNA, 17 nt, Human
gauaacuguuauuuaua

SEQ ID NO: 1676561 - RNA, 20 nt, Human
gauacaggaaaagcugcuga

SEQ ID NO: 1676562 - RNA, 18 nt, Human
gauaacuguuauuuauaa

SEQ ID NO: 1676563 - RNA, 16 nt, Human
gauagcacagacccug

SEQ ID NO: 1676564 - RNA, 15 nt, Human
gauagcacagacccu

SEQ ID NO: 1676565 - RNA, 22 nt, Human
gauagccaaggccaaaggaagc

SEQ ID NO: 1676566 - RNA, 13 nt, Human
gaguuacagacaa

SEQ ID NO: 1676567 - RNA, 15 nt, Human
gaguuacagacaaag

SEQ ID NO: 1676568 - RNA, 14 nt, Human
gaguucaucuugaa

SEQ ID NO: 1676569 - RNA, 20 nt, Human
gaguucauacccuguuacca

SEQ ID NO: 1676570 - RNA, 19 nt, Human
gaguucaucuugaauugua

SEQ ID NO: 1676571 - RNA, 20 nt, Human
gaguucaucuugaauuguaa

SEQ ID NO: 1676572 - RNA, 15 nt, Human
gaguugaagacagag

SEQ ID NO: 1676573 - RNA, 17 nt, Human
gaguugaagacagagcu

SEQ ID NO: 1676574 - RNA, 21 nt, Human
gaguugaagacagagcuacac

SEQ ID NO: 1676575 - RNA, 11 nt, Human
gauaaaugcca

SEQ ID NO: 1676576 - RNA, 15 nt, Human
gauaaaugccaucaa

SEQ ID NO: 1676577 - RNA, 20 nt, Human
gauaaaugccaucaauaaaa

SEQ ID NO: 1676578 - RNA, 22 nt, Human
gauaaauggcuuccuggcaaua

SEQ ID NO: 1676579 - RNA, 16 nt, Human
gaguguugaaacggau

SEQ ID NO: 1676580 - RNA, 12 nt, Human
gaguuacagaca

SEQ ID NO: 1676581 - RNA, 20 nt, Human
gagugugccugaagucccag

SEQ ID NO: 1676582 - RNA, 19 nt, Human
gagugucuuaauuaaaaga

SEQ ID NO: 1676583 - RNA, 13 nt, Human
gagugggugaaua

SEQ ID NO: 1676584 - RNA, 17 nt, Human
gagugacagaggcagcc

SEQ ID NO: 1676585 - RNA, 22 nt, Human
gcaccccagcuggggccaggcu

SEQ ID NO: 1676586 - RNA, 12 nt, Human
gcaccauaacuu

SEQ ID NO: 1676587 - RNA, 20 nt, Human
gcaccuuagacagucccugc

SEQ ID NO: 1676588 - RNA, 21 nt, Human
gcaccuuagacagucccugcc

SEQ ID NO: 1676589 - RNA, 15 nt, Human
gcacgauuucuguuu

SEQ ID NO: 1676590 - RNA, 13 nt, Human
gcacgauuucugu

SEQ ID NO: 1676591 - RNA, 15 nt, Human
gcacagugcaucuca

SEQ ID NO: 1676592 - RNA, 18 nt, Human
gcacagugcaucucagcc

SEQ ID NO: 1676593 - RNA, 13 nt, Human
gcacagugcaucu

SEQ ID NO: 1676594 - RNA, 21 nt, Human
gcacagaguuguuacauuuuu

SEQ ID NO: 1676595 - RNA, 19 nt, Human
gcacagaguuguuacauuu

SEQ ID NO: 1676596 - RNA, 18 nt, Human
gcacagaguuguuacauu

SEQ ID NO: 1676597 - RNA, 16 nt, Human
gcacagaguuguuaca

SEQ ID NO: 1676598 - RNA, 22 nt, Human
gcacagaguuguuacauuuuua

SEQ ID NO: 1676599 - RNA, 12 nt, Human
gcagacaggcaa

SEQ ID NO: 1676600 - RNA, 13 nt, Human
gcagacaggcaag

SEQ ID NO: 1676601 - RNA, 14 nt, Human
gcagacaggcaagc

SEQ ID NO: 1676602 - RNA, 19 nt, Human
gcacuguggguagacacac

SEQ ID NO: 1676603 - RNA, 14 nt, Human
gcacugguggcccg

SEQ ID NO: 1676604 - RNA, 19 nt, Human
gcacugguggcccgacagc

SEQ ID NO: 1676605 - RNA, 23 nt, Human
gcacugcuuccagugaggcucug

SEQ ID NO: 1676606 - RNA, 14 nt, Human
gcacugcugcccag

SEQ ID NO: 1676607 - RNA, 15 nt, Human
gcacugcugcccagc

SEQ ID NO: 1676608 - RNA, 18 nt, Human
gcacugcugcccagccuc

SEQ ID NO: 1676609 - RNA, 20 nt, Human
gcacugcugcccagccucca

SEQ ID NO: 1676610 - RNA, 16 nt, Human
gcacgauuucuguuua

SEQ ID NO: 1676611 - RNA, 15 nt, Human
gcacugacuucuaag

SEQ ID NO: 1676612 - RNA, 18 nt, Human
gcacugacuucuaaguaa

SEQ ID NO: 1676613 - RNA, 23 nt, Human
gcacaaauucugucucuggauua

SEQ ID NO: 1676614 - RNA, 21 nt, Human
gcacaagcuccaagcucccag

SEQ ID NO: 1676615 - RNA, 18 nt, Human
gcacaagcuccaagcucc

SEQ ID NO: 1676616 - RNA, 15 nt, Human
gcacaagcuccaagc

SEQ ID NO: 1676617 - RNA, 17 nt, Human
gcacaagcuccaagcuc

SEQ ID NO: 1676618 - RNA, 20 nt, Human
gcacagaaaauggaagacag

SEQ ID NO: 1676619 - RNA, 15 nt, Human
gcacagaguuguuac

SEQ ID NO: 1676620 - RNA, 22 nt, Human
gcacagacccugcccugugggc

SEQ ID NO: 1676621 - RNA, 18 nt, Human
gcacagacccugcccugu

SEQ ID NO: 1676622 - RNA, 19 nt, Human
gcacagacccugcccugug

SEQ ID NO: 1676623 - RNA, 20 nt, Human
gcacagacccugcccugugg

SEQ ID NO: 1676624 - RNA, 21 nt, Human
gcacagacccugcccuguggg

SEQ ID NO: 1676625 - RNA, 21 nt, Human
gcacagaaaauggaagacagc

SEQ ID NO: 1676626 - RNA, 22 nt, Human
gcacagaaaauggaagacagcu

SEQ ID NO: 1676627 - RNA, 23 nt, Human
gcacagaaaauggaagacagcuc

SEQ ID NO: 1676628 - RNA, 14 nt, Human
gcacagacccugcc

SEQ ID NO: 1676629 - RNA, 15 nt, Human
gcacagacccugccc

SEQ ID NO: 1676630 - RNA, 16 nt, Human
gcacagacccugcccu

SEQ ID NO: 1676631 - RNA, 17 nt, Human
gcacagacccugcccug

SEQ ID NO: 1676632 - RNA, 13 nt, Human
gcaacucugaagg

SEQ ID NO: 1676633 - RNA, 15 nt, Human
gcaauggcagccuug

SEQ ID NO: 1676634 - RNA, 14 nt, Human
gcaacucaucuuag

SEQ ID NO: 1676635 - RNA, 14 nt, Human
gcaaugugauaaaa

SEQ ID NO: 1676636 - RNA, 15 nt, Human
gcacaaacagaggcc

SEQ ID NO: 1676637 - RNA, 16 nt, Human
gcacaaacagaggccg

SEQ ID NO: 1676638 - RNA, 14 nt, Human
gcacaaacagaggc

SEQ ID NO: 1676639 - RNA, 14 nt, Human
gcaauucuccugcc

SEQ ID NO: 1676640 - RNA, 15 nt, Human
gcaauucuccugccu

SEQ ID NO: 1676641 - RNA, 16 nt, Human
gcaauucuccugccuc

SEQ ID NO: 1676642 - RNA, 17 nt, Human
gcaauucuccugccuca

SEQ ID NO: 1676643 - RNA, 18 nt, Human
gcaauucuccugccucag

SEQ ID NO: 1676644 - RNA, 19 nt, Human
gcaauucuccugccucagc

SEQ ID NO: 1676645 - RNA, 20 nt, Human
gcaauucuccugccucagcc

SEQ ID NO: 1676646 - RNA, 19 nt, Human
gaugggugcuuggaggaag

SEQ ID NO: 1676647 - RNA, 13 nt, Human
gauggggcugcac

SEQ ID NO: 1676648 - RNA, 19 nt, Human
gauggggcugcaccggcug

SEQ ID NO: 1676649 - RNA, 15 nt, Human
gauggggcugcaccg

SEQ ID NO: 1676650 - RNA, 22 nt, Human
gauggccgggcgcgguggcuca

SEQ ID NO: 1676651 - RNA, 20 nt, Human
gaugggcaacccccagccug

SEQ ID NO: 1676652 - RNA, 21 nt, Human
gaugggcaacccccagccugc

SEQ ID NO: 1676653 - RNA, 24 nt, Human
gauggggcccugccuccuuuguga

SEQ ID NO: 1676654 - RNA, 20 nt, Human
gaugcccaaagaugcagccg

SEQ ID NO: 1676655 - RNA, 19 nt, Human
gaugcccaaagaugcagcc

SEQ ID NO: 1676656 - RNA, 21 nt, Human
gaucagacagaucuggaaugu

SEQ ID NO: 1676657 - RNA, 17 nt, Human
gaugcugacuguacucc

SEQ ID NO: 1676658 - RNA, 20 nt, Human
gaugcugacuguacuccucc

SEQ ID NO: 1676659 - RNA, 21 nt, Human
gaugccccgucccccucuggc

SEQ ID NO: 1676660 - RNA, 16 nt, Human
gaugccccgucccccu

SEQ ID NO: 1676661 - RNA, 18 nt, Human
gaugcuagaacucccuuu

SEQ ID NO: 1676662 - RNA, 20 nt, Human
gaugcuagaacucccuuuca

SEQ ID NO: 1676663 - RNA, 22 nt, Human
gaugcuagaacucccuuucaac

SEQ ID NO: 1676664 - RNA, 16 nt, Human
gauguuuaguaaucau

SEQ ID NO: 1676665 - RNA, 20 nt, Human
gauuacaggcgugagccacc

SEQ ID NO: 1676666 - RNA, 17 nt, Human
gauuacaggcuccugcc

SEQ ID NO: 1676667 - RNA, 23 nt, Human
gauuacaagcgugagccacugca

SEQ ID NO: 1676668 - RNA, 15 nt, Human
gauuaaacuuaaucu

SEQ ID NO: 1676669 - RNA, 22 nt, Human
gauuacaagcgugagccacugc

SEQ ID NO: 1676670 - RNA, 12 nt, Human
gauggugcaaug

SEQ ID NO: 1676671 - RNA, 14 nt, Human
gauggugcaaugac

SEQ ID NO: 1676672 - RNA, 17 nt, Human
gauggugcaaugaccuu

SEQ ID NO: 1676673 - RNA, 15 nt, Human
gauggugcaaugacc

SEQ ID NO: 1676674 - RNA, 16 nt, Human
gauggugcaaugaccu

SEQ ID NO: 1676675 - RNA, 13 nt, Human
gaugguuccccug

SEQ ID NO: 1676676 - RNA, 18 nt, Human
gaugguuccccuguucac

SEQ ID NO: 1676677 - RNA, 21 nt, Human
gaugguuccccuguucacucu

SEQ ID NO: 1676678 - RNA, 22 nt, Human
gaugguucccuugaugaagaag

SEQ ID NO: 1676679 - RNA, 21 nt, Human
gauucaaugccccugaauuua

SEQ ID NO: 1676680 - RNA, 18 nt, Human
gauuacaggcuccugcca

SEQ ID NO: 1676681 - RNA, 21 nt, Human
gauuacaggcuccugccacca

SEQ ID NO: 1676682 - RNA, 19 nt, Human
gauucaaugccccugaauu

SEQ ID NO: 1676683 - RNA, 20 nt, Human
gauucaaugccccugaauuu

SEQ ID NO: 1676684 - RNA, 16 nt, Human
gauucucaugccucag

SEQ ID NO: 1676685 - RNA, 14 nt, Human
gauucuccugccuc

SEQ ID NO: 1676686 - RNA, 15 nt, Human
gauugcaacaggcug

SEQ ID NO: 1676687 - RNA, 14 nt, Human
gauuuaacagaaau

SEQ ID NO: 1676688 - RNA, 13 nt, Human
gauuuaacagaaa

SEQ ID NO: 1676689 - RNA, 16 nt, Human
gauuugagcucagccc

SEQ ID NO: 1676690 - RNA, 22 nt, Human
gauuuccguuaaaauaccagcc

SEQ ID NO: 1676691 - RNA, 15 nt, Human
gauuuaacagaaaug

SEQ ID NO: 1676692 - RNA, 12 nt, Human
gcaaaccaucau

SEQ ID NO: 1676693 - RNA, 21 nt, Human
gauuuugaaauuuuuauuaaa

SEQ ID NO: 1676694 - RNA, 19 nt, Human
gauuuugauccaagcuggu

SEQ ID NO: 1676695 - RNA, 13 nt, Human
gauuuuaugcuuu

SEQ ID NO: 1676696 - RNA, 15 nt, Human
gcaaauguggcuccu

SEQ ID NO: 1676697 - RNA, 16 nt, Human
gcaaauugucacagga

SEQ ID NO: 1676698 - RNA, 15 nt, Human
gcaaaccaucauuga

SEQ ID NO: 1676699 - RNA, 19 nt, Human
gaccauucuccaccugcca

SEQ ID NO: 1676700 - RNA, 20 nt, Human
gaccauucuccaccugccag

SEQ ID NO: 1676701 - RNA, 21 nt, Human
gaccauucuccaccugccagg

SEQ ID NO: 1676702 - RNA, 22 nt, Human
gaccauucuccaccugccaggg

SEQ ID NO: 1676703 - RNA, 21 nt, Human
gaccagccuccaugcugccuc

SEQ ID NO: 1676704 - RNA, 22 nt, Human
gaccagccuccaugcugccucc

SEQ ID NO: 1676705 - RNA, 20 nt, Human
gaccagccuccaugcugccu

SEQ ID NO: 1676706 - RNA, 18 nt, Human
gaccagagcugccaccug

SEQ ID NO: 1676707 - RNA, 19 nt, Human
gaccagagcugccaccugc

SEQ ID NO: 1676708 - RNA, 13 nt, Human
gaccagagcugcc

SEQ ID NO: 1676709 - RNA, 14 nt, Human
gaccagagcugcca

SEQ ID NO: 1676710 - RNA, 15 nt, Human
gaccagagcugccac

SEQ ID NO: 1676711 - RNA, 17 nt, Human
gaccagagcugccaccu

SEQ ID NO: 1676712 - RNA, 13 nt, Human
gaccaccugccca

SEQ ID NO: 1676713 - RNA, 14 nt, Human
gaccaccugcccaa

SEQ ID NO: 1676714 - RNA, 18 nt, Human
gacaugggaaaggggaag

SEQ ID NO: 1676715 - RNA, 16 nt, Human
gacaugggacauuugc

SEQ ID NO: 1676716 - RNA, 21 nt, Human
gaccagacaccuugacagggc

SEQ ID NO: 1676717 - RNA, 11 nt, Human
gaccagagcug

SEQ ID NO: 1676718 - RNA, 14 nt, Human
gaccacguuucuaa

SEQ ID NO: 1676719 - RNA, 16 nt, Human
gaccacguuucuaaag

SEQ ID NO: 1676720 - RNA, 21 nt, Human
gaccacugcagaagacaguau

SEQ ID NO: 1676721 - RNA, 12 nt, Human
gacccugucuca

SEQ ID NO: 1676722 - RNA, 19 nt, Human
gacccuuguggucccaccc

SEQ ID NO: 1676723 - RNA, 20 nt, Human
gacccuuguggucccacccc

SEQ ID NO: 1676724 - RNA, 21 nt, Human
gacccuuguggucccacccca

SEQ ID NO: 1676725 - RNA, 19 nt, Human
gaccgugaggccagagaca

SEQ ID NO: 1676726 - RNA, 18 nt, Human
gaccgugaggccagagac

SEQ ID NO: 1676727 - RNA, 16 nt, Human
gaccgugaggccagag

SEQ ID NO: 1676728 - RNA, 17 nt, Human
gaccgugaggccagaga

SEQ ID NO: 1676729 - RNA, 14 nt, Human
gaccccuccaugug

SEQ ID NO: 1676730 - RNA, 18 nt, Human
gaccccuccaugugggcu

SEQ ID NO: 1676731 - RNA, 21 nt, Human
gaccccuccaugugggcuagu

SEQ ID NO: 1676732 - RNA, 22 nt, Human
gacccugaggcccagagggccu

SEQ ID NO: 1676733 - RNA, 23 nt, Human
gacccugaggcccagagggccug

SEQ ID NO: 1676734 - RNA, 12 nt, Human
gacccugcccug

SEQ ID NO: 1676735 - RNA, 12 nt, Human
gacccccaacca

SEQ ID NO: 1676736 - RNA, 21 nt, Human
gacccccaaccaaguggcucc

SEQ ID NO: 1676737 - RNA, 16 nt, Human
gacccaaaaggcagaa

SEQ ID NO: 1676738 - RNA, 15 nt, Human
gacccacaagaaaug

SEQ ID NO: 1676739 - RNA, 22 nt, Human
gacccacaagaaaugaaagcag

SEQ ID NO: 1676740 - RNA, 18 nt, Human
gacagcugccugggaucc

SEQ ID NO: 1676741 - RNA, 21 nt, Human
gacagcugccugggaucccuc

SEQ ID NO: 1676742 - RNA, 20 nt, Human
gacagccacggccaggccag

SEQ ID NO: 1676743 - RNA, 21 nt, Human
gacagccacggccaggccaga

SEQ ID NO: 1676744 - RNA, 16 nt, Human
gacagcugccugggau

SEQ ID NO: 1676745 - RNA, 17 nt, Human
gacagcugccugggauc

SEQ ID NO: 1676746 - RNA, 20 nt, Human
gacagagugagacucugucu

SEQ ID NO: 1676747 - RNA, 22 nt, Human
gacagagugagacucugucuca

SEQ ID NO: 1676748 - RNA, 14 nt, Human
gacagccacggcca

SEQ ID NO: 1676749 - RNA, 17 nt, Human
gacagccacggccaggc

SEQ ID NO: 1676750 - RNA, 18 nt, Human
gacagccacggccaggcc

SEQ ID NO: 1676751 - RNA, 19 nt, Human
gacagccacggccaggcca

SEQ ID NO: 1676752 - RNA, 21 nt, Human
gacagagcaagugagacccug

SEQ ID NO: 1676753 - RNA, 14 nt, Human
gacagaggcagccc

SEQ ID NO: 1676754 - RNA, 16 nt, Human
gacagaggcagcccca

SEQ ID NO: 1676755 - RNA, 17 nt, Human
gacagaggcagccccau

SEQ ID NO: 1676756 - RNA, 15 nt, Human
gacagaggggguggc

SEQ ID NO: 1676757 - RNA, 18 nt, Human
gacagaggggguggccuc

SEQ ID NO: 1676758 - RNA, 19 nt, Human
gacagaggggguggccucc

SEQ ID NO: 1676759 - RNA, 21 nt, Human
gacagaggggguggccuccca

SEQ ID NO: 1676760 - RNA, 22 nt, Human
gacagaggggguggccucccaa

SEQ ID NO: 1676761 - RNA, 23 nt, Human
gacagaggggguggccucccaac

SEQ ID NO: 1676762 - RNA, 14 nt, Human
gacagagucucacu

SEQ ID NO: 1676763 - RNA, 14 nt, Human
gacaugaucuucuu

SEQ ID NO: 1676764 - RNA, 14 nt, Human
gacaugggaaaggg

SEQ ID NO: 1676765 - RNA, 22 nt, Human
gacaguuaagagaaaugagcuu

SEQ ID NO: 1676766 - RNA, 20 nt, Human
gacauagaauuaacacauga

SEQ ID NO: 1676767 - RNA, 14 nt, Human
gacaguuaagagaa

SEQ ID NO: 1676768 - RNA, 24 nt, Human
gacagggcacaccgggcacucaga

SEQ ID NO: 1676769 - RNA, 23 nt, Human
gacagggcacaccgggcacucag

SEQ ID NO: 1676770 - RNA, 16 nt, Human
gacagggaggugaccc

SEQ ID NO: 1676771 - RNA, 18 nt, Human
gacagggaggacgcucuc

SEQ ID NO: 1676772 - RNA, 14 nt, Human
gacaggaccaggga

SEQ ID NO: 1676773 - RNA, 15 nt, Human
gacaggaccagggau

SEQ ID NO: 1676774 - RNA, 23 nt, Human
gacaggaccagggauuuccauga

SEQ ID NO: 1676775 - RNA, 17 nt, Human
gacagggaggacgcucu

SEQ ID NO: 1676776 - RNA, 20 nt, Human
gaauuugugaagguggaaau

SEQ ID NO: 1676777 - RNA, 20 nt, Human
gaauuugauaugugaacagu

SEQ ID NO: 1676778 - RNA, 21 nt, Human
gaauuucuucaacucccugcc

SEQ ID NO: 1676779 - RNA, 22 nt, Human
gaauuucuuuugccguuauuaa

SEQ ID NO: 1676780 - RNA, 19 nt, Human
gaauuucuaggacugaauu

SEQ ID NO: 1676781 - RNA, 20 nt, Human
gaauuucuaggacugaauua

SEQ ID NO: 1676782 - RNA, 15 nt, Human
gaauuguaaggaaug

SEQ ID NO: 1676783 - RNA, 16 nt, Human
gacaacagacuucuga

SEQ ID NO: 1676784 - RNA, 22 nt, Human
gacaacacucauugaccugagg

SEQ ID NO: 1676785 - RNA, 23 nt, Human
gacaacacucauugaccugaggc

SEQ ID NO: 1676786 - RNA, 19 nt, Human
gacaaugugaaaagaaaaa

SEQ ID NO: 1676787 - RNA, 20 nt, Human
gacaaugugaaaagaaaaau

SEQ ID NO: 1676788 - RNA, 22 nt, Human
gacaaugcaaaccaucauugaa

SEQ ID NO: 1676789 - RNA, 12 nt, Human
gacaaugugaaa

SEQ ID NO: 1676790 - RNA, 18 nt, Human
gacaaugugaaaagaaaa

SEQ ID NO: 1676791 - RNA, 21 nt, Human
gacaaggaugaucuaggaaga

SEQ ID NO: 1676792 - RNA, 18 nt, Human
gacaaggauugcuacugu

SEQ ID NO: 1676793 - RNA, 19 nt, Human
gacaaggauugcuacuguc

SEQ ID NO: 1676794 - RNA, 21 nt, Human
gacaaggauugcuacuguccu

SEQ ID NO: 1676795 - RNA, 16 nt, Human
gacaaggaaaaaauaa

SEQ ID NO: 1676796 - RNA, 19 nt, Human
gacacaugcaaggucauuu

SEQ ID NO: 1676797 - RNA, 15 nt, Human
gacacauguccaaga

SEQ ID NO: 1676798 - RNA, 20 nt, Human
gacacauguccaagaagccc

SEQ ID NO: 1676799 - RNA, 23 nt, Human
gacacauguccaagaagcccagg

SEQ ID NO: 1676800 - RNA, 14 nt, Human
gacacaugcaaggu

SEQ ID NO: 1676801 - RNA, 20 nt, Human
gacacaggcccggcuccagg

SEQ ID NO: 1676802 - RNA, 21 nt, Human
gacacaggcccggcuccaggc

SEQ ID NO: 1676803 - RNA, 16 nt, Human
gacacaagccuucggc

SEQ ID NO: 1676804 - RNA, 19 nt, Human
gacacaggcccggcuccag

SEQ ID NO: 1676805 - RNA, 22 nt, Human
gacacaagccuucggcgccuua

SEQ ID NO: 1676806 - RNA, 12 nt, Human
gaaaggcuccag

SEQ ID NO: 1676807 - RNA, 20 nt, Human
gaauccagacccggcugcgu

SEQ ID NO: 1676808 - RNA, 11 nt, Human
gaaugcagugg

SEQ ID NO: 1676809 - RNA, 18 nt, Human
gaaugaaccacaucuugc

SEQ ID NO: 1676810 - RNA, 21 nt, Human
gaaugcacaaacagaggccgc

SEQ ID NO: 1676811 - RNA, 15 nt, Human
gaaugcuguauaugu

SEQ ID NO: 1676812 - RNA, 20 nt, Human
gaaugcacaaacagaggccg

SEQ ID NO: 1676813 - RNA, 19 nt, Human
gaaugaaauacuguuugag

SEQ ID NO: 1676814 - RNA, 15 nt, Human
gaaugaaauacuguu

SEQ ID NO: 1676815 - RNA, 18 nt, Human
gaaugaaauacuguuuga

SEQ ID NO: 1676816 - RNA, 17 nt, Human
gaauggcuuuguauaga

SEQ ID NO: 1676817 - RNA, 21 nt, Human
gaauggcuuuguauagaaccu

SEQ ID NO: 1676818 - RNA, 14 nt, Human
gaauggcuuuguau

SEQ ID NO: 1676819 - RNA, 16 nt, Human
gaauggcuuuguauag

SEQ ID NO: 1676820 - RNA, 13 nt, Human
gaaugucagugug

SEQ ID NO: 1676821 - RNA, 14 nt, Human
gaauucuguauaga

SEQ ID NO: 1676822 - RNA, 21 nt, Human
gaauucuguauagauuagaau

SEQ ID NO: 1676823 - RNA, 22 nt, Human
gaauucuguauagauuagaauu

SEQ ID NO: 1676824 - RNA, 13 nt, Human
gaauucuguauag

SEQ ID NO: 1676825 - RNA, 15 nt, Human
gaauguuugccucug

SEQ ID NO: 1676826 - RNA, 16 nt, Human
gaauuggagcucgugg

SEQ ID NO: 1676827 - RNA, 16 nt, Human
gaauugacccacaaga

SEQ ID NO: 1676828 - RNA, 21 nt, Human
gaauugacccacaagaaauga

SEQ ID NO: 1676829 - RNA, 17 nt, Human
gagaaugagagacacac

SEQ ID NO: 1676830 - RNA, 16 nt, Human
gagaagagaaugcaca

SEQ ID NO: 1676831 - RNA, 16 nt, Human
gagaagcagaggaagg

SEQ ID NO: 1676832 - RNA, 13 nt, Human
gagaagagcuguu

SEQ ID NO: 1676833 - RNA, 14 nt, Human
gagaagagaaugca

SEQ ID NO: 1676834 - RNA, 22 nt, Human
gagaacuuccagauccuggaaa

SEQ ID NO: 1676835 - RNA, 23 nt, Human
gagaacuuccagauccuggaaau

SEQ ID NO: 1676836 - RNA, 22 nt, Human
gagaaaguacuucuccacccug

SEQ ID NO: 1676837 - RNA, 16 nt, Human
gagaaagguugaagca

SEQ ID NO: 1676838 - RNA, 21 nt, Human
gagaaaugaaaaaauauauau

SEQ ID NO: 1676839 - RNA, 14 nt, Human
gagaaaugagcuug

SEQ ID NO: 1676840 - RNA, 21 nt, Human
gagaaccuagggugauauuaa

SEQ ID NO: 1676841 - RNA, 22 nt, Human
gagaaccuagggugauauuaac

SEQ ID NO: 1676842 - RNA, 13 nt, Human
gacuuggaagcuc

SEQ ID NO: 1676843 - RNA, 16 nt, Human
gacuucuuuaauuuug

SEQ ID NO: 1676844 - RNA, 17 nt, Human
gacuucuuuaauuuugg

SEQ ID NO: 1676845 - RNA, 18 nt, Human
gacuucuuuaauuuugga

SEQ ID NO: 1676846 - RNA, 19 nt, Human
gacuucuuuaauuuuggaa

SEQ ID NO: 1676847 - RNA, 20 nt, Human
gacuucuuuaauuuuggaau

SEQ ID NO: 1676848 - RNA, 21 nt, Human
gacuucuuuaauuuuggaauu

SEQ ID NO: 1676849 - RNA, 19 nt, Human
gacuuaaaauauuccugca

SEQ ID NO: 1676850 - RNA, 19 nt, Human
gacuuaagcacacuugaca

SEQ ID NO: 1676851 - RNA, 16 nt, Human
gacuucuaaguaaaac

SEQ ID NO: 1676852 - RNA, 17 nt, Human
gacuucuaaguaaaacc

SEQ ID NO: 1676853 - RNA, 18 nt, Human
gacuucuaaguaaaacca

SEQ ID NO: 1676854 - RNA, 24 nt, Human
gacuucuaaguaaaaccacagcag

SEQ ID NO: 1676855 - RNA, 19 nt, Human
gacuucuaaguaaaaccac

SEQ ID NO: 1676856 - RNA, 23 nt, Human
gacuucuaaguaaaaccacagca

SEQ ID NO: 1676857 - RNA, 20 nt, Human
gacuucugucuucacaacag

SEQ ID NO: 1676858 - RNA, 23 nt, Human
gacuucugucuucacaacagauu

SEQ ID NO: 1676859 - RNA, 14 nt, Human
gacuggaagcacag

SEQ ID NO: 1676860 - RNA, 15 nt, Human
gacuggaagcacagc

SEQ ID NO: 1676861 - RNA, 16 nt, Human
gacuggaagcacagcu

SEQ ID NO: 1676862 - RNA, 18 nt, Human
gacuggaagcacagcuuc

SEQ ID NO: 1676863 - RNA, 17 nt, Human
gacucgcgacaaugcaa

SEQ ID NO: 1676864 - RNA, 22 nt, Human
gacugaguacguugugcauuug

SEQ ID NO: 1676865 - RNA, 21 nt, Human
gacugaguacguugugcauuu

SEQ ID NO: 1676866 - RNA, 15 nt, Human
gacugcccggcaggg

SEQ ID NO: 1676867 - RNA, 13 nt, Human
gacugcccggcag

SEQ ID NO: 1676868 - RNA, 23 nt, Human
gacugaguacguugugcauuugg

SEQ ID NO: 1676869 - RNA, 14 nt, Human
gacugcauuauauu

SEQ ID NO: 1676870 - RNA, 16 nt, Human
gacugcauuauauuua

SEQ ID NO: 1676871 - RNA, 14 nt, Human
gacucauucuucug

SEQ ID NO: 1676872 - RNA, 15 nt, Human
gacucauucuucugu

SEQ ID NO: 1676873 - RNA, 18 nt, Human
gacuacaggugugaguca

SEQ ID NO: 1676874 - RNA, 21 nt, Human
gacuacaggugugagucacca

SEQ ID NO: 1676875 - RNA, 13 nt, Human
gacuacaggugug

SEQ ID NO: 1676876 - RNA, 11 nt, Human
gacuccucugu

SEQ ID NO: 1676877 - RNA, 14 nt, Human
gacuccucugucca

SEQ ID NO: 1676878 - RNA, 12 nt, Human
gacuccugcagg

SEQ ID NO: 1676879 - RNA, 23 nt, Human
gacuccugcacacgcuccuuccu

SEQ ID NO: 1676880 - RNA, 13 nt, Human
gacuccugcaggc

SEQ ID NO: 1676881 - RNA, 13 nt, Human
gacucgcgacaau

SEQ ID NO: 1676882 - RNA, 16 nt, Human
gacuccaaagaaaugu

SEQ ID NO: 1676883 - RNA, 18 nt, Human
gacuccaaagaaauguaa

SEQ ID NO: 1676884 - RNA, 21 nt, Human
gacucauuuuaaaaaauggaa

SEQ ID NO: 1676885 - RNA, 11 nt, Human
gacuccaaaga

SEQ ID NO: 1676886 - RNA, 12 nt, Human
gacuccaaagaa

SEQ ID NO: 1676887 - RNA, 15 nt, Human
gacuccaaagaaaug

SEQ ID NO: 1676888 - RNA, 17 nt, Human
gagaugaggccgccaug

SEQ ID NO: 1676889 - RNA, 19 nt, Human
gagauagccaaggccaaag

SEQ ID NO: 1676890 - RNA, 18 nt, Human
gagaucacgccacugcac

SEQ ID NO: 1676891 - RNA, 19 nt, Human
gagaucacgccacugcacu

SEQ ID NO: 1676892 - RNA, 14 nt, Human
gagauagccaaggc

SEQ ID NO: 1676893 - RNA, 16 nt, Human
gagauagccaaggcca

SEQ ID NO: 1676894 - RNA, 23 nt, Human
gagaucaaccccuucgcuccugu

SEQ ID NO: 1676895 - RNA, 20 nt, Human
gagcaccuuagacagucccu

SEQ ID NO: 1676896 - RNA, 21 nt, Human
gagcacuaaggugugcucuga

SEQ ID NO: 1676897 - RNA, 15 nt, Human
gagcacuaaggugug

SEQ ID NO: 1676898 - RNA, 21 nt, Human
gagcaccuuagacagucccug

SEQ ID NO: 1676899 - RNA, 22 nt, Human
gagcaccuuagacagucccugc

SEQ ID NO: 1676900 - RNA, 15 nt, Human
gagcauuagauuucu

SEQ ID NO: 1676901 - RNA, 21 nt, Human
gagcauuagauuucucauuug

SEQ ID NO: 1676902 - RNA, 19 nt, Human
gagccaauuuaaagaaaac

SEQ ID NO: 1676903 - RNA, 12 nt, Human
gagcagagacca

SEQ ID NO: 1676904 - RNA, 16 nt, Human
gagcagagaauucucu

SEQ ID NO: 1676905 - RNA, 14 nt, Human
gagccagggucuca

SEQ ID NO: 1676906 - RNA, 23 nt, Human
gagccagauuucacucuccuugg

SEQ ID NO: 1676907 - RNA, 23 nt, Human
gagcccacuguacuugcucuuga

SEQ ID NO: 1676908 - RNA, 19 nt, Human
gagccagggucucacuaug

SEQ ID NO: 1676909 - RNA, 19 nt, Human
gagacuccugcaggcagcc

SEQ ID NO: 1676910 - RNA, 20 nt, Human
gagacuccugcaggcagcca

SEQ ID NO: 1676911 - RNA, 21 nt, Human
gagacuccugcaggcagccag

SEQ ID NO: 1676912 - RNA, 20 nt, Human
gagacucgcgacaaugcaaa

SEQ ID NO: 1676913 - RNA, 21 nt, Human
gagacucgcgacaaugcaaac

SEQ ID NO: 1676914 - RNA, 22 nt, Human
gagacuccugcaggcagccagg

SEQ ID NO: 1676915 - RNA, 13 nt, Human
gagacucugucuc

SEQ ID NO: 1676916 - RNA, 14 nt, Human
gagaccaucccuga

SEQ ID NO: 1676917 - RNA, 18 nt, Human
gagaccaucccugaaggc

SEQ ID NO: 1676918 - RNA, 21 nt, Human
gagaccaucccugaaggcccc

SEQ ID NO: 1676919 - RNA, 22 nt, Human
gagacaggguuuugccauguug

SEQ ID NO: 1676920 - RNA, 23 nt, Human
gagaaugcacaaacagaggccgc

SEQ ID NO: 1676921 - RNA, 20 nt, Human
gagaaugagagacacacuga

SEQ ID NO: 1676922 - RNA, 21 nt, Human
gagaaugagagacacacugaa

SEQ ID NO: 1676923 - RNA, 20 nt, Human
gagacagcucugcauacuca

SEQ ID NO: 1676924 - RNA, 19 nt, Human
gagagagcuucuguugcug

SEQ ID NO: 1676925 - RNA, 22 nt, Human
gagagagcuucuguugcugccu

SEQ ID NO: 1676926 - RNA, 16 nt, Human
gagagcccuucauuug

SEQ ID NO: 1676927 - RNA, 13 nt, Human
gagaggggcacag

SEQ ID NO: 1676928 - RNA, 19 nt, Human
gagaggggaacagacugga

SEQ ID NO: 1676929 - RNA, 14 nt, Human
gagagggugggagu

SEQ ID NO: 1676930 - RNA, 20 nt, Human
gagagggugggagugggccc

SEQ ID NO: 1676931 - RNA, 16 nt, Human
gagagggugggagugg

SEQ ID NO: 1676932 - RNA, 13 nt, Human
gagaguguugaaa

SEQ ID NO: 1676933 - RNA, 16 nt, Human
gagaguggcuccuccc

SEQ ID NO: 1676934 - RNA, 21 nt, Human
gagaguggcuccucccggugc

SEQ ID NO: 1676935 - RNA, 13 nt, Human
gagaguggcuccu

SEQ ID NO: 1676936 - RNA, 14 nt, Human
cuggccagaugcac

SEQ ID NO: 1676937 - RNA, 15 nt, Human
cuggcauagagcagc

SEQ ID NO: 1676938 - RNA, 15 nt, Human
cuggcccacugcauc

SEQ ID NO: 1676939 - RNA, 14 nt, Human
cuggcacuuggaga

SEQ ID NO: 1676940 - RNA, 21 nt, Human
cuggcacuuggagacuuguau

SEQ ID NO: 1676941 - RNA, 22 nt, Human
cuggcacccggccccugcuggu

SEQ ID NO: 1676942 - RNA, 19 nt, Human
cuggcacugcuuccaguga

SEQ ID NO: 1676943 - RNA, 20 nt, Human
cuggcacugcuuccagugag

SEQ ID NO: 1676944 - RNA, 23 nt, Human
cuggcacugcuuccagugaggcu

SEQ ID NO: 1676945 - RNA, 20 nt, Human
cuggcacccggccccugcug

SEQ ID NO: 1676946 - RNA, 21 nt, Human
cuggcacccggccccugcugg

SEQ ID NO: 1676947 - RNA, 20 nt, Human
cuggagugcagugagccgag

SEQ ID NO: 1676948 - RNA, 20 nt, Human
cuggcacaguuuucugagaa

SEQ ID NO: 1676949 - RNA, 21 nt, Human
cuggcacaguuuucugagaaa

SEQ ID NO: 1676950 - RNA, 22 nt, Human
cuggcacaguuuucugagaaag

SEQ ID NO: 1676951 - RNA, 21 nt, Human
cuggccucugcacuccccugc

SEQ ID NO: 1676952 - RNA, 18 nt, Human
cuggccucugcacucccc

SEQ ID NO: 1676953 - RNA, 20 nt, Human
cuggccucugcacuccccug

SEQ ID NO: 1676954 - RNA, 13 nt, Human
cuggccuggcccc

SEQ ID NO: 1676955 - RNA, 24 nt, Human
cuggccuggccccucagggucccu

SEQ ID NO: 1676956 - RNA, 22 nt, Human
cuggccuucggccuccauccug

SEQ ID NO: 1676957 - RNA, 21 nt, Human
cuggcucuuccaggcugggag

SEQ ID NO: 1676958 - RNA, 22 nt, Human
cuggcucuuccaggcugggaga

SEQ ID NO: 1676959 - RNA, 24 nt, Human
cuggcucuuccaggcugggagagc

SEQ ID NO: 1676960 - RNA, 14 nt, Human
cuggcgugcagugg

SEQ ID NO: 1676961 - RNA, 15 nt, Human
cuggcgugcaguggu

SEQ ID NO: 1676962 - RNA, 14 nt, Human
cuggccugugucua

SEQ ID NO: 1676963 - RNA, 23 nt, Human
cuggccuucggccuccauccuga

SEQ ID NO: 1676964 - RNA, 13 nt, Human
cuggaauuugaaa

SEQ ID NO: 1676965 - RNA, 23 nt, Human
cuggacaggcauguucucugagg

SEQ ID NO: 1676966 - RNA, 14 nt, Human
cuggacaggcaugu

SEQ ID NO: 1676967 - RNA, 17 nt, Human
cuggacaggcauguucu

SEQ ID NO: 1676968 - RNA, 16 nt, Human
cuggaccuugaacugg

SEQ ID NO: 1676969 - RNA, 15 nt, Human
cuggacccuguggau

SEQ ID NO: 1676970 - RNA, 14 nt, Human
cuggacuccucugu

SEQ ID NO: 1676971 - RNA, 17 nt, Human
cuggacuccucugucca

SEQ ID NO: 1676972 - RNA, 18 nt, Human
cuggacuccucuguccag

SEQ ID NO: 1676973 - RNA, 19 nt, Human
cuggacuccucuguccagg

SEQ ID NO: 1676974 - RNA, 20 nt, Human
cuggacuccucuguccaggc

SEQ ID NO: 1676975 - RNA, 17 nt, Human
cuggaccuugaacuggg

SEQ ID NO: 1676976 - RNA, 20 nt, Human
cuggaccuugaacuggguac

SEQ ID NO: 1676977 - RNA, 21 nt, Human
cuggaccuugaacuggguacu

SEQ ID NO: 1676978 - RNA, 17 nt, Human
cuggagguacgaaaaga

SEQ ID NO: 1676979 - RNA, 22 nt, Human
cuggagguacgaaaagagggga

SEQ ID NO: 1676980 - RNA, 14 nt, Human
cuggagugcaguga

SEQ ID NO: 1676981 - RNA, 15 nt, Human
cuggagugcagugag

SEQ ID NO: 1676982 - RNA, 16 nt, Human
cuggagugcagugagc

SEQ ID NO: 1676983 - RNA, 17 nt, Human
cuggagugcagugagcc

SEQ ID NO: 1676984 - RNA, 16 nt, Human
cuggagcucugcccau

SEQ ID NO: 1676985 - RNA, 12 nt, Human
cuggagcucugc

SEQ ID NO: 1676986 - RNA, 13 nt, Human
cuggagcucugcc

SEQ ID NO: 1676987 - RNA, 15 nt, Human
cugcugcuggcuggu

SEQ ID NO: 1676988 - RNA, 12 nt, Human
cugcuggcugcc

SEQ ID NO: 1676989 - RNA, 13 nt, Human
cugcugguucagg

SEQ ID NO: 1676990 - RNA, 15 nt, Human
cugcugguucagggu

SEQ ID NO: 1676991 - RNA, 23 nt, Human
cugcugguucaggguuggccccu

SEQ ID NO: 1676992 - RNA, 15 nt, Human
cugcuuccagugagg

SEQ ID NO: 1676993 - RNA, 16 nt, Human
cugcuuccagugaggc

SEQ ID NO: 1676994 - RNA, 18 nt, Human
cugcuuccagugaggcuc

SEQ ID NO: 1676995 - RNA, 19 nt, Human
cugcuuccagugaggcucu

SEQ ID NO: 1676996 - RNA, 20 nt, Human
cugcuuccagugaggcucug

SEQ ID NO: 1676997 - RNA, 21 nt, Human
cugcuuccagugaggcucugc

SEQ ID NO: 1676998 - RNA, 23 nt, Human
cugcuuccagugaggcucugccc

SEQ ID NO: 1676999 - RNA, 12 nt, Human
cugcugcccagc

SEQ ID NO: 1677000 - RNA, 15 nt, Human
cugcugcccagccuc

SEQ ID NO: 1677001 - RNA, 22 nt, Human
cugcugcccagccuccaagcuc

SEQ ID NO: 1677002 - RNA, 17 nt, Human
cugcugaaggaauaaau

SEQ ID NO: 1677003 - RNA, 18 nt, Human
cugcugaaggaauaaauu

SEQ ID NO: 1677004 - RNA, 21 nt, Human
cugcucuccucuugccacugc

SEQ ID NO: 1677005 - RNA, 11 nt, Human
cugcugaaggc

SEQ ID NO: 1677006 - RNA, 12 nt, Human
cugcugaaggcu

SEQ ID NO: 1677007 - RNA, 14 nt, Human
cugcucuccucuug

SEQ ID NO: 1677008 - RNA, 20 nt, Human
cugcucuccucuugccacug

SEQ ID NO: 1677009 - RNA, 19 nt, Human
cugcgaccacaagaaggau

SEQ ID NO: 1677010 - RNA, 19 nt, Human
cugcuccagcuguucagcu

SEQ ID NO: 1677011 - RNA, 20 nt, Human
cugcuccagcuguucagcug

SEQ ID NO: 1677012 - RNA, 21 nt, Human
cugcccuuucugggcaccggg

SEQ ID NO: 1677013 - RNA, 15 nt, Human
cugccgcagcccugc

SEQ ID NO: 1677014 - RNA, 17 nt, Human
cugccgcagcccugcag

SEQ ID NO: 1677015 - RNA, 18 nt, Human
cugccgcagcccugcaga

SEQ ID NO: 1677016 - RNA, 12 nt, Human
cugcccuccaag

SEQ ID NO: 1677017 - RNA, 14 nt, Human
cucccuucccaccu

SEQ ID NO: 1677018 - RNA, 15 nt, Human
cucccuucccaccuc

SEQ ID NO: 1677019 - RNA, 16 nt, Human
cucccuucccaccucu

SEQ ID NO: 1677020 - RNA, 17 nt, Human
cucccuucccaccucuc

SEQ ID NO: 1677021 - RNA, 22 nt, Human
cugcccugcugagucccaggcu

SEQ ID NO: 1677022 - RNA, 20 nt, Human
cugcccugcgggucacagga

SEQ ID NO: 1677023 - RNA, 21 nt, Human
cugcccucuccugggcagcug

SEQ ID NO: 1677024 - RNA, 20 nt, Human
cugcccucuccugggcagcu

SEQ ID NO: 1677025 - RNA, 19 nt, Human
cugcccucuccugggcagc

SEQ ID NO: 1677026 - RNA, 18 nt, Human
cugcccucuccugggcag

SEQ ID NO: 1677027 - RNA, 19 nt, Human
cugcccuccaagaccuucu

SEQ ID NO: 1677028 - RNA, 16 nt, Human
cugcccucuccugggc

SEQ ID NO: 1677029 - RNA, 12 nt, Human
cugccuaaggac

SEQ ID NO: 1677030 - RNA, 13 nt, Human
cugccuaaggacu

SEQ ID NO: 1677031 - RNA, 14 nt, Human
cugccuaaggacuu

SEQ ID NO: 1677032 - RNA, 15 nt, Human
cugccuaaggacuuc

SEQ ID NO: 1677033 - RNA, 19 nt, Human
cugccuaaggacuucuuua

SEQ ID NO: 1677034 - RNA, 11 nt, Human
cugccucccau

SEQ ID NO: 1677035 - RNA, 12 nt, Human
cugccucccauc

SEQ ID NO: 1677036 - RNA, 14 nt, Human
cugccucccaucac

SEQ ID NO: 1677037 - RNA, 16 nt, Human
cugccucccaucaccc

SEQ ID NO: 1677038 - RNA, 19 nt, Human
cugccucccaucacccgcu

SEQ ID NO: 1677039 - RNA, 22 nt, Human
cugccucucugcaggucccuaa

SEQ ID NO: 1677040 - RNA, 15 nt, Human
cugccucugacacac

SEQ ID NO: 1677041 - RNA, 22 nt, Human
cugccucugacacacagcucug

SEQ ID NO: 1677042 - RNA, 23 nt, Human
cugccucugacacacagcucugu

SEQ ID NO: 1677043 - RNA, 20 nt, Human
cugccucucugcaggucccu

SEQ ID NO: 1677044 - RNA, 21 nt, Human
cugccucucugcaggucccua

SEQ ID NO: 1677045 - RNA, 13 nt, Human
cugccuccccucc

SEQ ID NO: 1677046 - RNA, 21 nt, Human
cugccugggaucccucauccu

SEQ ID NO: 1677047 - RNA, 22 nt, Human
cugccugggaucccucauccuc

SEQ ID NO: 1677048 - RNA, 20 nt, Human
cugccugcccaggccccugc

SEQ ID NO: 1677049 - RNA, 15 nt, Human
cugccugaagucaca

SEQ ID NO: 1677050 - RNA, 16 nt, Human
cugccugcccaggccc

SEQ ID NO: 1677051 - RNA, 17 nt, Human
cugccugcccaggcccc

SEQ ID NO: 1677052 - RNA, 15 nt, Human
cugccucuucucuac

SEQ ID NO: 1677053 - RNA, 14 nt, Human
cugccuccccuccu

SEQ ID NO: 1677054 - RNA, 22 nt, Human
cuggguaacuagggaagauaau

SEQ ID NO: 1677055 - RNA, 20 nt, Human
cuggguaacuagggaagaua

SEQ ID NO: 1677056 - RNA, 14 nt, Human
cuggguacuugugg

SEQ ID NO: 1677057 - RNA, 15 nt, Human
cuggguucuacccag

SEQ ID NO: 1677058 - RNA, 16 nt, Human
cuggguucuacccagg

SEQ ID NO: 1677059 - RNA, 17 nt, Human
cuggguucuacccaggu

SEQ ID NO: 1677060 - RNA, 24 nt, Human
cugggcuucaguggcagcugcuuu

SEQ ID NO: 1677061 - RNA, 13 nt, Human
cugggggaagaag

SEQ ID NO: 1677062 - RNA, 15 nt, Human
cugggggaagaagcu

SEQ ID NO: 1677063 - RNA, 19 nt, Human
cugggggcugggcagagga

SEQ ID NO: 1677064 - RNA, 22 nt, Human
cugggggggauuguaaaauggu

SEQ ID NO: 1677065 - RNA, 12 nt, Human
cuggugcugcca

SEQ ID NO: 1677066 - RNA, 13 nt, Human
cuggugcugccac

SEQ ID NO: 1677067 - RNA, 20 nt, Human
cuggugcugccacacuucag

SEQ ID NO: 1677068 - RNA, 22 nt, Human
cuggugcugccacacuucaggc

SEQ ID NO: 1677069 - RNA, 23 nt, Human
cugguggcagcucaccucucccu

SEQ ID NO: 1677070 - RNA, 21 nt, Human
cugguggcccgacagccuggc

SEQ ID NO: 1677071 - RNA, 22 nt, Human
cugguggcccgacagccuggca

SEQ ID NO: 1677072 - RNA, 23 nt, Human
cugguggcccgacagccuggcac

SEQ ID NO: 1677073 - RNA, 13 nt, Human
cugguggcagcug

SEQ ID NO: 1677074 - RNA, 14 nt, Human
cugguggcagcugc

SEQ ID NO: 1677075 - RNA, 18 nt, Human
cuggucacaggacucugc

SEQ ID NO: 1677076 - RNA, 19 nt, Human
cuggucacaggacucugcc

SEQ ID NO: 1677077 - RNA, 20 nt, Human
cuguaauccuagcacuuugg

SEQ ID NO: 1677078 - RNA, 13 nt, Human
cuguacaaaguag

SEQ ID NO: 1677079 - RNA, 15 nt, Human
cuguacaaaguagaa

SEQ ID NO: 1677080 - RNA, 12 nt, Human
cugguuccuccc

SEQ ID NO: 1677081 - RNA, 13 nt, Human
cugguuccucccc

SEQ ID NO: 1677082 - RNA, 23 nt, Human
cuguaaucacagcuacuugggag

SEQ ID NO: 1677083 - RNA, 20 nt, Human
cugucuacacuaagagagaa

SEQ ID NO: 1677084 - RNA, 14 nt, Human
cuguccuacccacc

SEQ ID NO: 1677085 - RNA, 22 nt, Human
cugucccuuacgugaguccugg

SEQ ID NO: 1677086 - RNA, 15 nt, Human
cuguccgagcuuuga

SEQ ID NO: 1677087 - RNA, 22 nt, Human
cugucucaagagggcacuggug

SEQ ID NO: 1677088 - RNA, 18 nt, Human
cugucucaaaaaaagaaa

SEQ ID NO: 1677089 - RNA, 23 nt, Human
cugucucaaaaaaacacaaaagu

SEQ ID NO: 1677090 - RNA, 16 nt, Human
cugucucaaaaaaaga

SEQ ID NO: 1677091 - RNA, 18 nt, Human
cuguccccgcacugggcu

SEQ ID NO: 1677092 - RNA, 19 nt, Human
cuguccccgcacugggcuu

SEQ ID NO: 1677093 - RNA, 22 nt, Human
cuguccccgcacugggcuuggg

SEQ ID NO: 1677094 - RNA, 17 nt, Human
cuguccccgcacugggc

SEQ ID NO: 1677095 - RNA, 20 nt, Human
cugucccuuacgugaguccu

SEQ ID NO: 1677096 - RNA, 13 nt, Human
cuguacagagccc

SEQ ID NO: 1677097 - RNA, 16 nt, Human
cuguauagauuagaau

SEQ ID NO: 1677098 - RNA, 17 nt, Human
cuguccaggcacugcug

SEQ ID NO: 1677099 - RNA, 13 nt, Human
cugucaauuacag

SEQ ID NO: 1677100 - RNA, 14 nt, Human
cuguaucccaugag

SEQ ID NO: 1677101 - RNA, 23 nt, Human
cuguaucccaugagccucagcau

SEQ ID NO: 1677102 - RNA, 22 nt, Human
cuguauuuuaaaagaaugauua

SEQ ID NO: 1677103 - RNA, 20 nt, Human
cuguauuuuaaaagaaugau

SEQ ID NO: 1677104 - RNA, 19 nt, Human
cuguauuuuaaaagaauga

SEQ ID NO: 1677105 - RNA, 17 nt, Human
cuguggaugauaaaaca

SEQ ID NO: 1677106 - RNA, 21 nt, Human
cugugggcgugagaccugccc

SEQ ID NO: 1677107 - RNA, 22 nt, Human
cugugggcgugagaccugcccc

SEQ ID NO: 1677108 - RNA, 14 nt, Human
cugugggcccccaa

SEQ ID NO: 1677109 - RNA, 11 nt, Human
cugugccucug

SEQ ID NO: 1677110 - RNA, 14 nt, Human
cugugccucuggga

SEQ ID NO: 1677111 - RNA, 16 nt, Human
cugugccucugggacu

SEQ ID NO: 1677112 - RNA, 22 nt, Human
cugugcugcccugcccaccugg

SEQ ID NO: 1677113 - RNA, 17 nt, Human
cugugccucugggacug

SEQ ID NO: 1677114 - RNA, 18 nt, Human
cugugccucugggacugg

SEQ ID NO: 1677115 - RNA, 18 nt, Human
cugucuccauguuugaug

SEQ ID NO: 1677116 - RNA, 23 nt, Human
cugucucaagagggcacuggugg

SEQ ID NO: 1677117 - RNA, 23 nt, Human
cugugaguacuacaguccuccca

SEQ ID NO: 1677118 - RNA, 20 nt, Human
cugugaguacuacaguccuc

SEQ ID NO: 1677119 - RNA, 21 nt, Human
cugugaguacuacaguccucc

SEQ ID NO: 1677120 - RNA, 18 nt, Human
cugugauggggcccugcc

SEQ ID NO: 1677121 - RNA, 17 nt, Human
cugugauggggcccugc

SEQ ID NO: 1677122 - RNA, 19 nt, Human
cugugauggggcccugccu

SEQ ID NO: 1677123 - RNA, 20 nt, Human
cugugauggggcccugccuc

SEQ ID NO: 1677124 - RNA, 22 nt, Human
cugugccauuuuguauuuuacu

SEQ ID NO: 1677125 - RNA, 14 nt, Human
cugugccauuuugu

SEQ ID NO: 1677126 - RNA, 16 nt, Human
cugugccaugugccag

SEQ ID NO: 1677127 - RNA, 18 nt, Human
cugugccaugugccaggu

SEQ ID NO: 1677128 - RNA, 18 nt, Human
cuguucccauucuugcau

SEQ ID NO: 1677129 - RNA, 17 nt, Human
cuguucaugaaagauuc

SEQ ID NO: 1677130 - RNA, 18 nt, Human
cuguucaugaaagauuca

SEQ ID NO: 1677131 - RNA, 23 nt, Human
cuguucaugaaagauucaaugcc

SEQ ID NO: 1677132 - RNA, 13 nt, Human
cuguuacugucuu

SEQ ID NO: 1677133 - RNA, 19 nt, Human
cuguucagcugguugaggu

SEQ ID NO: 1677134 - RNA, 21 nt, Human
cuguucagcugguugagguuu

SEQ ID NO: 1677135 - RNA, 20 nt, Human
cuguucucugcccuccaaga

SEQ ID NO: 1677136 - RNA, 18 nt, Human
cuguucucugcccuccaa

SEQ ID NO: 1677137 - RNA, 19 nt, Human
cuguucucugcccuccaag

SEQ ID NO: 1677138 - RNA, 14 nt, Human
cuguucucugcccu

SEQ ID NO: 1677139 - RNA, 15 nt, Human
cuguucucugcccuc

SEQ ID NO: 1677140 - RNA, 16 nt, Human
cuguucucugcccucc

SEQ ID NO: 1677141 - RNA, 17 nt, Human
cuguucucugcccucca

SEQ ID NO: 1677142 - RNA, 13 nt, Human
cuguucucugccc

SEQ ID NO: 1677143 - RNA, 19 nt, Human
cugugugcucaggagcccu

SEQ ID NO: 1677144 - RNA, 16 nt, Human
cugugugcucaggagc

SEQ ID NO: 1677145 - RNA, 20 nt, Human
cugugugcucaggagcccug

SEQ ID NO: 1677146 - RNA, 21 nt, Human
cugugugcucaggagcccugg

SEQ ID NO: 1677147 - RNA, 23 nt, Human
cugugugcucaggagcccuggga

SEQ ID NO: 1677148 - RNA, 15 nt, Human
cuguguggcagucug

SEQ ID NO: 1677149 - RNA, 23 nt, Human
cugugggcgugagaccugccccu

SEQ ID NO: 1677150 - RNA, 21 nt, Human
cugugucuugcaauggcagcc

SEQ ID NO: 1677151 - RNA, 22 nt, Human
cugugucuugcaauggcagccu

SEQ ID NO: 1677152 - RNA, 23 nt, Human
cugugucuugcaauggcagccuu

SEQ ID NO: 1677153 - RNA, 20 nt, Human
cugugugugcgccuacagga

SEQ ID NO: 1677154 - RNA, 21 nt, Human
cuguuaaaagaugaaaauauu

SEQ ID NO: 1677155 - RNA, 23 nt, Human
cuguuaaaagaugaaaauauuug

SEQ ID NO: 1677156 - RNA, 20 nt, Human
cuguuaaaagaugaaaauau

SEQ ID NO: 1677157 - RNA, 13 nt, Human
cuucucugaagga

SEQ ID NO: 1677158 - RNA, 19 nt, Human
cuucuccuucaccuuuguc

SEQ ID NO: 1677159 - RNA, 12 nt, Human
cuucucuccagc

SEQ ID NO: 1677160 - RNA, 13 nt, Human
cuucucuccagcc

SEQ ID NO: 1677161 - RNA, 15 nt, Human
cuucucuccagcccc

SEQ ID NO: 1677162 - RNA, 17 nt, Human
cuucucuccagccccug

SEQ ID NO: 1677163 - RNA, 19 nt, Human
cuucucuccagccccugga

SEQ ID NO: 1677164 - RNA, 17 nt, Human
cuucuccacuggaugga

SEQ ID NO: 1677165 - RNA, 12 nt, Human
cuucuccaggcu

SEQ ID NO: 1677166 - RNA, 13 nt, Human
cuucuccaggcug

SEQ ID NO: 1677167 - RNA, 14 nt, Human
cuucuccaggcugu

SEQ ID NO: 1677168 - RNA, 15 nt, Human
cuuccucccucauuc

SEQ ID NO: 1677169 - RNA, 14 nt, Human
cuucuccacuggau

SEQ ID NO: 1677170 - RNA, 15 nt, Human
cuucuccacuggaug

SEQ ID NO: 1677171 - RNA, 13 nt, Human
cuucuccacugga

SEQ ID NO: 1677172 - RNA, 11 nt, Human
cuucuccacuu

SEQ ID NO: 1677173 - RNA, 20 nt, Human
cuucuccacuuucuagccag

SEQ ID NO: 1677174 - RNA, 14 nt, Human
cuucugguugaugc

SEQ ID NO: 1677175 - RNA, 16 nt, Human
cuucuggguuccuucc

SEQ ID NO: 1677176 - RNA, 17 nt, Human
cuucuggguuccuuccu

SEQ ID NO: 1677177 - RNA, 23 nt, Human
cuucuggguuccuuccucugagc

SEQ ID NO: 1677178 - RNA, 13 nt, Human
cuucugcuucagc

SEQ ID NO: 1677179 - RNA, 21 nt, Human
cuucuguacgucugacaggca

SEQ ID NO: 1677180 - RNA, 14 nt, Human
cuucuguacgucug

SEQ ID NO: 1677181 - RNA, 15 nt, Human
cuucuguacgucuga

SEQ ID NO: 1677182 - RNA, 18 nt, Human
cuucuguacgucugacag

SEQ ID NO: 1677183 - RNA, 20 nt, Human
cuucuguacgucugacaggc

SEQ ID NO: 1677184 - RNA, 16 nt, Human
cuucuguccuacucug

SEQ ID NO: 1677185 - RNA, 17 nt, Human
cuucuguccuacucugu

SEQ ID NO: 1677186 - RNA, 18 nt, Human
cuucuguccuacucugug

SEQ ID NO: 1677187 - RNA, 19 nt, Human
cuucuguccuacucugugu

SEQ ID NO: 1677188 - RNA, 21 nt, Human
cuucuguccuacucuguguca

SEQ ID NO: 1677189 - RNA, 18 nt, Human
cuucugucuucacaacag

SEQ ID NO: 1677190 - RNA, 21 nt, Human
cuucugucuucacaacagauu

SEQ ID NO: 1677191 - RNA, 22 nt, Human
cuucugucuucacaacagauua

SEQ ID NO: 1677192 - RNA, 18 nt, Human
cuugagccuugaacuuug

SEQ ID NO: 1677193 - RNA, 17 nt, Human
cuugagccuugaacuuu

SEQ ID NO: 1677194 - RNA, 15 nt, Human
cuugagccuugaacu

SEQ ID NO: 1677195 - RNA, 21 nt, Human
cuugaggguugggcugguguc

SEQ ID NO: 1677196 - RNA, 19 nt, Human
cuugaggguugggcuggug

SEQ ID NO: 1677197 - RNA, 20 nt, Human
cuugaggguugggcuggugu

SEQ ID NO: 1677198 - RNA, 16 nt, Human
cuugaagacuuuucuu

SEQ ID NO: 1677199 - RNA, 17 nt, Human
cuugaccgugaggccag

SEQ ID NO: 1677200 - RNA, 22 nt, Human
cuugaccauucuccaccugcca

SEQ ID NO: 1677201 - RNA, 23 nt, Human
cuugaccauucuccaccugccag

SEQ ID NO: 1677202 - RNA, 18 nt, Human
cuugaccgugaggccaga

SEQ ID NO: 1677203 - RNA, 20 nt, Human
cuugaccgugaggccagaga

SEQ ID NO: 1677204 - RNA, 21 nt, Human
cuugaccgugaggccagagac

SEQ ID NO: 1677205 - RNA, 13 nt, Human
cuugaccucaggu

SEQ ID NO: 1677206 - RNA, 18 nt, Human
cuugaacuccugaccuca

SEQ ID NO: 1677207 - RNA, 21 nt, Human
cuugaacuuugaccucugcag

SEQ ID NO: 1677208 - RNA, 17 nt, Human
cuugaacuuugaccucu

SEQ ID NO: 1677209 - RNA, 13 nt, Human
cuugaacuccuga

SEQ ID NO: 1677210 - RNA, 16 nt, Human
cuugaacuccugaccu

SEQ ID NO: 1677211 - RNA, 13 nt, Human
cuugaacuccugg

SEQ ID NO: 1677212 - RNA, 12 nt, Human
cuugaaaauuaa

SEQ ID NO: 1677213 - RNA, 13 nt, Human
cuugaaaauuaac

SEQ ID NO: 1677214 - RNA, 18 nt, Human
cuugaaaauuaacaugaa

SEQ ID NO: 1677215 - RNA, 12 nt, Human
cuugaaaaaugc

SEQ ID NO: 1677216 - RNA, 18 nt, Human
cuugaaaaaugcauguug

SEQ ID NO: 1677217 - RNA, 19 nt, Human
cuucuuuaauuuuggaauu

SEQ ID NO: 1677218 - RNA, 22 nt, Human
cuucuuuauaauucuacuuuga

SEQ ID NO: 1677219 - RNA, 14 nt, Human
cuugaaaacacugu

SEQ ID NO: 1677220 - RNA, 23 nt, Human
cuugaaaacacuguucucugccc

SEQ ID NO: 1677221 - RNA, 15 nt, Human
cuucuuuaauuuugg

SEQ ID NO: 1677222 - RNA, 16 nt, Human
cuucuuuaauuuugga

SEQ ID NO: 1677223 - RNA, 17 nt, Human
cuucuuuaauuuuggaa

SEQ ID NO: 1677224 - RNA, 18 nt, Human
cuucuuuaauuuuggaau

SEQ ID NO: 1677225 - RNA, 15 nt, Human
cuucuguugcugccu

SEQ ID NO: 1677226 - RNA, 15 nt, Human
cuucuguggcucaca

SEQ ID NO: 1677227 - RNA, 22 nt, Human
cuucuguggcucacagaacccu

SEQ ID NO: 1677228 - RNA, 13 nt, Human
cuucuguggguuu

SEQ ID NO: 1677229 - RNA, 14 nt, Human
cuucuguggguuuc

SEQ ID NO: 1677230 - RNA, 21 nt, Human
cuucuguggguuucuaaagcu

SEQ ID NO: 1677231 - RNA, 13 nt, Human
cuucuguggcuca

SEQ ID NO: 1677232 - RNA, 13 nt, Human
cuuauauuaugga

SEQ ID NO: 1677233 - RNA, 19 nt, Human
cuuauaucuauauuuuaca

SEQ ID NO: 1677234 - RNA, 14 nt, Human
cuuauagacaacau

SEQ ID NO: 1677235 - RNA, 19 nt, Human
cuuauaggaauugacccac

SEQ ID NO: 1677236 - RNA, 18 nt, Human
cuuagucacugagacagc

SEQ ID NO: 1677237 - RNA, 19 nt, Human
cuuagucacugagacagcc

SEQ ID NO: 1677238 - RNA, 16 nt, Human
cuguucugcacacagc

SEQ ID NO: 1677239 - RNA, 16 nt, Human
cuguucuggcagaguu

SEQ ID NO: 1677240 - RNA, 19 nt, Human
cuuagauguauauauuucc

SEQ ID NO: 1677241 - RNA, 16 nt, Human
cuuagucacugagaca

SEQ ID NO: 1677242 - RNA, 13 nt, Human
cuuagauguauau

SEQ ID NO: 1677243 - RNA, 22 nt, Human
cuuagaugcaguucugaagaag

SEQ ID NO: 1677244 - RNA, 16 nt, Human
cuucaaccauucccca

SEQ ID NO: 1677245 - RNA, 20 nt, Human
cuucaaccauuccccauggg

SEQ ID NO: 1677246 - RNA, 16 nt, Human
cuucaacucccugccc

SEQ ID NO: 1677247 - RNA, 10 nt, Human
cuucaaggau

SEQ ID NO: 1677248 - RNA, 13 nt, Human
cuucaaggauccu

SEQ ID NO: 1677249 - RNA, 15 nt, Human
cuucaaggauccuga

SEQ ID NO: 1677250 - RNA, 16 nt, Human
cuucaaggauccugag

SEQ ID NO: 1677251 - RNA, 23 nt, Human
cuucacagaugggugcuuggagg

SEQ ID NO: 1677252 - RNA, 17 nt, Human
cuuauuuaaugaaagac

SEQ ID NO: 1677253 - RNA, 18 nt, Human
cuuauuuaaugaaagacu

SEQ ID NO: 1677254 - RNA, 14 nt, Human
cuuauuucauuucu

SEQ ID NO: 1677255 - RNA, 17 nt, Human
cuucaaagcaaaugucu

SEQ ID NO: 1677256 - RNA, 15 nt, Human
cuucaaauauuuccc

SEQ ID NO: 1677257 - RNA, 15 nt, Human
cuuauuucauuucuu

SEQ ID NO: 1677258 - RNA, 12 nt, Human
cuuccaggcugg

SEQ ID NO: 1677259 - RNA, 14 nt, Human
cuuccaggcuggga

SEQ ID NO: 1677260 - RNA, 17 nt, Human
cuucaguggcagcugcu

SEQ ID NO: 1677261 - RNA, 17 nt, Human
cuuccacaagagcccag

SEQ ID NO: 1677262 - RNA, 19 nt, Human
cuuccacaagagcccaggc

SEQ ID NO: 1677263 - RNA, 21 nt, Human
cuuccacaagagcccaggccu

SEQ ID NO: 1677264 - RNA, 19 nt, Human
cuucaggcucuucuccuuu

SEQ ID NO: 1677265 - RNA, 22 nt, Human
cuucaggcucuucuccuuucac

SEQ ID NO: 1677266 - RNA, 15 nt, Human
cuucagggagugagg

SEQ ID NO: 1677267 - RNA, 16 nt, Human
cuucaguaagccguga

SEQ ID NO: 1677268 - RNA, 23 nt, Human
cuucaguaagccgugauuuucau

SEQ ID NO: 1677269 - RNA, 18 nt, Human
cuucagugccuuauggaa

SEQ ID NO: 1677270 - RNA, 22 nt, Human
cuucagugccuuauggaacacu

SEQ ID NO: 1677271 - RNA, 13 nt, Human
cuucaguggcagc

SEQ ID NO: 1677272 - RNA, 14 nt, Human
cuucaguggcagcu

SEQ ID NO: 1677273 - RNA, 15 nt, Human
cuucaguggcagcug

SEQ ID NO: 1677274 - RNA, 16 nt, Human
cuucaguggcagcugc

SEQ ID NO: 1677275 - RNA, 15 nt, Human
cuuccaggcugggag

SEQ ID NO: 1677276 - RNA, 16 nt, Human
cuuccaggcugggaga

SEQ ID NO: 1677277 - RNA, 19 nt, Human
cuuccaggcugggagagcc

SEQ ID NO: 1677278 - RNA, 14 nt, Human
cuuccagggguggg

SEQ ID NO: 1677279 - RNA, 15 nt, Human
cuuccagggguggga

SEQ ID NO: 1677280 - RNA, 17 nt, Human
cuuccaggggugggaca

SEQ ID NO: 1677281 - RNA, 21 nt, Human
cuuccaggggugggacacccu

SEQ ID NO: 1677282 - RNA, 13 nt, Human
cuuccucccucau

SEQ ID NO: 1677283 - RNA, 13 nt, Human
cuuccuaauucca

SEQ ID NO: 1677284 - RNA, 17 nt, Human
cuuccuaauuccacagc

SEQ ID NO: 1677285 - RNA, 18 nt, Human
cuuccuaauuccacagcu

SEQ ID NO: 1677286 - RNA, 19 nt, Human
cuuccuaauuccacagcug

SEQ ID NO: 1677287 - RNA, 19 nt, Human
cuucccgcucagcccuccc

SEQ ID NO: 1677288 - RNA, 23 nt, Human
cuucccgcucagcccucccugcc

SEQ ID NO: 1677289 - RNA, 17 nt, Human
cuucccuacaguugaaa

SEQ ID NO: 1677290 - RNA, 14 nt, Human
cuuuguccccaccg

SEQ ID NO: 1677291 - RNA, 19 nt, Human
cuuuggcuauuagagauca

SEQ ID NO: 1677292 - RNA, 15 nt, Human
cuuugugcugggguu

SEQ ID NO: 1677293 - RNA, 20 nt, Human
cuuugugcugggguuaucug

SEQ ID NO: 1677294 - RNA, 22 nt, Human
cuuugugcugggguuaucugaa

SEQ ID NO: 1677295 - RNA, 19 nt, Human
cuuugugaggaagccgcug

SEQ ID NO: 1677296 - RNA, 15 nt, Human
cuuugugaggaagcc

SEQ ID NO: 1677297 - RNA, 23 nt, Human
cuuugucuacaccauuaugugcg

SEQ ID NO: 1677298 - RNA, 20 nt, Human
cuuugucuacaccauuaugu

SEQ ID NO: 1677299 - RNA, 15 nt, Human
cuuuguccccaccgc

SEQ ID NO: 1677300 - RNA, 22 nt, Human
cuuugcauaacguauaaaagcc

SEQ ID NO: 1677301 - RNA, 20 nt, Human
cuuugcagacaggcaagcac

SEQ ID NO: 1677302 - RNA, 24 nt, Human
cuuugaccucugcagcaauaaagc

SEQ ID NO: 1677303 - RNA, 20 nt, Human
cuuugaccucugcagcaaua

SEQ ID NO: 1677304 - RNA, 18 nt, Human
cuuugaccucugcagcaa

SEQ ID NO: 1677305 - RNA, 17 nt, Human
cuuugaccucugcagca

SEQ ID NO: 1677306 - RNA, 12 nt, Human
cuuucuuccucu

SEQ ID NO: 1677307 - RNA, 13 nt, Human
cuuucuuccucug

SEQ ID NO: 1677308 - RNA, 14 nt, Human
cuuucuuccucugc

SEQ ID NO: 1677309 - RNA, 15 nt, Human
cuuucuuccucugcu

SEQ ID NO: 1677310 - RNA, 15 nt, Human
cuuugaccucugcag

SEQ ID NO: 1677311 - RNA, 14 nt, Human
cuuugaccucugca

SEQ ID NO: 1677312 - RNA, 15 nt, Human
cuuuccaucuacccu

SEQ ID NO: 1677313 - RNA, 12 nt, Human
cuuuccugaggc

SEQ ID NO: 1677314 - RNA, 11 nt, Human
cuuucccuccc

SEQ ID NO: 1677315 - RNA, 13 nt, Human
cuuucccucccuu

SEQ ID NO: 1677316 - RNA, 14 nt, Human
cuuucccucccuuc

SEQ ID NO: 1677317 - RNA, 16 nt, Human
cuuucccucccuuccu

SEQ ID NO: 1677318 - RNA, 11 nt, Human
cuuucuuccuc

SEQ ID NO: 1677319 - RNA, 20 nt, Human
cuuucugggcaccggggccu

SEQ ID NO: 1677320 - RNA, 20 nt, Human
cuuucuggcuaugcauuuga

SEQ ID NO: 1677321 - RNA, 19 nt, Human
cuuucuggcuaugcauuug

SEQ ID NO: 1677322 - RNA, 18 nt, Human
cuuucuggcuaugcauuu

SEQ ID NO: 1677323 - RNA, 17 nt, Human
cuuucuggcuaugcauu

SEQ ID NO: 1677324 - RNA, 13 nt, Human
cuuuccugaggcu

SEQ ID NO: 1677325 - RNA, 15 nt, Human
cuuuccugaggcugg

SEQ ID NO: 1677326 - RNA, 16 nt, Human
cuuucucuuucguuac

SEQ ID NO: 1677327 - RNA, 14 nt, Human
cuuguguaaauaca

SEQ ID NO: 1677328 - RNA, 16 nt, Human
cuuguguaaauacaau

SEQ ID NO: 1677329 - RNA, 21 nt, Human
cuuguguaaauacaauuuugu

SEQ ID NO: 1677330 - RNA, 12 nt, Human
cuuguguaaaua

SEQ ID NO: 1677331 - RNA, 17 nt, Human
cuuguacuuuauuuucu

SEQ ID NO: 1677332 - RNA, 23 nt, Human
cuugucaauaaaauccauacauu

SEQ ID NO: 1677333 - RNA, 12 nt, Human
cuuguacauaau

SEQ ID NO: 1677334 - RNA, 15 nt, Human
cuuguacauaaugcg

SEQ ID NO: 1677335 - RNA, 17 nt, Human
cuuguaaauagcucagg

SEQ ID NO: 1677336 - RNA, 18 nt, Human
cuuguaaauagcucaggu

SEQ ID NO: 1677337 - RNA, 21 nt, Human
cuuguacauaaugcgugcaua

SEQ ID NO: 1677338 - RNA, 19 nt, Human
cuuguacauaaugcgugca

SEQ ID NO: 1677339 - RNA, 22 nt, Human
cuuguacauaaugcgugcauac

SEQ ID NO: 1677340 - RNA, 21 nt, Human
cuuguaaauagcucagguguc

SEQ ID NO: 1677341 - RNA, 16 nt, Human
cuuguaaauagcucag

SEQ ID NO: 1677342 - RNA, 23 nt, Human
cuuggggggcugaggugggagga

SEQ ID NO: 1677343 - RNA, 19 nt, Human
cuugaguuuaaauuguaau

SEQ ID NO: 1677344 - RNA, 22 nt, Human
cuuguuagaucuaguucacucu

SEQ ID NO: 1677345 - RNA, 22 nt, Human
cuuuaccuuuuuuauacauaaa

SEQ ID NO: 1677346 - RNA, 13 nt, Human
cuuuacuauggcc

SEQ ID NO: 1677347 - RNA, 21 nt, Human
cuuuaaacauugguucuugua

SEQ ID NO: 1677348 - RNA, 18 nt, Human
cuuuaucuugaauaaugu

SEQ ID NO: 1677349 - RNA, 21 nt, Human
cuuuaucuugaauaauguaag

SEQ ID NO: 1677350 - RNA, 23 nt, Human
cuuuaucuugaauaauguaagac

SEQ ID NO: 1677351 - RNA, 15 nt, Human
cuuuaugcacaaaau

SEQ ID NO: 1677352 - RNA, 14 nt, Human
cuuuagcgcccagu

SEQ ID NO: 1677353 - RNA, 15 nt, Human
cuuuagcgcccaguu

SEQ ID NO: 1677354 - RNA, 19 nt, Human
cuuuauaauucuacuuuga

SEQ ID NO: 1677355 - RNA, 17 nt, Human
gaaagcccugugcucca

SEQ ID NO: 1677356 - RNA, 21 nt, Human
gaaagcuugcccuggugccuc

SEQ ID NO: 1677357 - RNA, 17 nt, Human
gaaagcccugagcuuuc

SEQ ID NO: 1677358 - RNA, 21 nt, Human
gaaagcccugagcuuucugcu

SEQ ID NO: 1677359 - RNA, 22 nt, Human
gaaagcccugagcuuucugcua

SEQ ID NO: 1677360 - RNA, 14 nt, Human
gaaagcagggacuu

SEQ ID NO: 1677361 - RNA, 21 nt, Human
gaaagaguacucuuguuuccu

SEQ ID NO: 1677362 - RNA, 15 nt, Human
gaaagaguaggaaga

SEQ ID NO: 1677363 - RNA, 16 nt, Human
gaaagaguaggaagac

SEQ ID NO: 1677364 - RNA, 22 nt, Human
gaaagcagaacagugauuacca

SEQ ID NO: 1677365 - RNA, 17 nt, Human
gaaagcagaacagugau

SEQ ID NO: 1677366 - RNA, 20 nt, Human
gaaagaggcagcuugaaacu

SEQ ID NO: 1677367 - RNA, 21 nt, Human
gaaagaggaaugaaguacuca

SEQ ID NO: 1677368 - RNA, 19 nt, Human
gaaagacuuuuccaacccu

SEQ ID NO: 1677369 - RNA, 17 nt, Human
gaaagagaacuuccaga

SEQ ID NO: 1677370 - RNA, 17 nt, Human
gaaacggaugauuucua

SEQ ID NO: 1677371 - RNA, 18 nt, Human
gaaacggaugauuucuau

SEQ ID NO: 1677372 - RNA, 19 nt, Human
gaaacuaggugcauauuua

SEQ ID NO: 1677373 - RNA, 23 nt, Human
gaaacucguuaauuuguaguguu

SEQ ID NO: 1677374 - RNA, 23 nt, Human
gaaacccagcucugguccauaga

SEQ ID NO: 1677375 - RNA, 14 nt, Human
gaaacccugucucu

SEQ ID NO: 1677376 - RNA, 13 nt, Human
gaaacccagcucu

SEQ ID NO: 1677377 - RNA, 14 nt, Human
gaaacccagcucug

SEQ ID NO: 1677378 - RNA, 15 nt, Human
gaaacccagcucugg

SEQ ID NO: 1677379 - RNA, 16 nt, Human
gaaacccagcucuggu

SEQ ID NO: 1677380 - RNA, 18 nt, Human
gaaacccagcucuggucc

SEQ ID NO: 1677381 - RNA, 19 nt, Human
gaaacccagcucuggucca

SEQ ID NO: 1677382 - RNA, 16 nt, Human
gaaacacaacuauauu

SEQ ID NO: 1677383 - RNA, 17 nt, Human
cuuuuuauggccuguga

SEQ ID NO: 1677384 - RNA, 20 nt, Human
cuuuuguucuugguuuguaa

SEQ ID NO: 1677385 - RNA, 18 nt, Human
cuuuguuaguuucuccaa

SEQ ID NO: 1677386 - RNA, 15 nt, Human
cuuuguucagccugc

SEQ ID NO: 1677387 - RNA, 12 nt, Human
cuuuuguucuug

SEQ ID NO: 1677388 - RNA, 11 nt, Human
cuuuuguucuu

SEQ ID NO: 1677389 - RNA, 12 nt, Human
gaaaaaggagga

SEQ ID NO: 1677390 - RNA, 15 nt, Human
gaaaaaggaggaaga

SEQ ID NO: 1677391 - RNA, 18 nt, Human
gaaaacacauuuuucuua

SEQ ID NO: 1677392 - RNA, 19 nt, Human
gaaaacacauuuuucuuag

SEQ ID NO: 1677393 - RNA, 18 nt, Human
gaaaacacuguucucugc

SEQ ID NO: 1677394 - RNA, 16 nt, Human
cuuuuuggcauaacau

SEQ ID NO: 1677395 - RNA, 20 nt, Human
cuuuuuggcauaacauaaau

SEQ ID NO: 1677396 - RNA, 22 nt, Human
cuuuuuggcauaacauaaaucu

SEQ ID NO: 1677397 - RNA, 17 nt, Human
cuuuuuuggcugcugaa

SEQ ID NO: 1677398 - RNA, 20 nt, Human
cuuuuuuggcugcugaaggc

SEQ ID NO: 1677399 - RNA, 22 nt, Human
cuuuuuuggcugcugaaggcuc

SEQ ID NO: 1677400 - RNA, 19 nt, Human
gaaaaguuuaauauuaaag

SEQ ID NO: 1677401 - RNA, 20 nt, Human
gaaaaguuuaauauuaaagc

SEQ ID NO: 1677402 - RNA, 21 nt, Human
gaaaaguuuaauauuaaagcc

SEQ ID NO: 1677403 - RNA, 22 nt, Human
gaaaaguuuaauauuaaagcca

SEQ ID NO: 1677404 - RNA, 14 nt, Human
gaaaaguugaauuu

SEQ ID NO: 1677405 - RNA, 15 nt, Human
gaaaaguuuaauauu

SEQ ID NO: 1677406 - RNA, 15 nt, Human
gaaaaguugaauuuu

SEQ ID NO: 1677407 - RNA, 24 nt, Human
gaaaacacuguucucugcccucca

SEQ ID NO: 1677408 - RNA, 20 nt, Human
gaaaacguggcugcuucaag

SEQ ID NO: 1677409 - RNA, 22 nt, Human
gaaaacguggcugcuucaagga

SEQ ID NO: 1677410 - RNA, 18 nt, Human
gaaaaucuuauaauuuaa

SEQ ID NO: 1677411 - RNA, 20 nt, Human
gaaaaucagccugcuccagc

SEQ ID NO: 1677412 - RNA, 22 nt, Human
gaaaaucagccugcuccagcug

SEQ ID NO: 1677413 - RNA, 22 nt, Human
gaaaaucuacacuccagugaga

SEQ ID NO: 1677414 - RNA, 23 nt, Human
gaaaaguuuaauauuaaagccau

SEQ ID NO: 1677415 - RNA, 18 nt, Human
gaaaauauuuguaucaca

SEQ ID NO: 1677416 - RNA, 22 nt, Human
ccugccuguugggccaggagcc

SEQ ID NO: 1677417 - RNA, 10 nt, Human
ccugcccugg

SEQ ID NO: 1677418 - RNA, 12 nt, Human
ccugcccuggga

SEQ ID NO: 1677419 - RNA, 14 nt, Human
ccugcccugggagg

SEQ ID NO: 1677420 - RNA, 15 nt, Human
ccugcccugggaggc

SEQ ID NO: 1677421 - RNA, 20 nt, Human
ccugcccugggaggcaguga

SEQ ID NO: 1677422 - RNA, 22 nt, Human
ccugcccugggaggcagugaug

SEQ ID NO: 1677423 - RNA, 14 nt, Human
ccugcccugguuuc

SEQ ID NO: 1677424 - RNA, 19 nt, Human
ccugcccugguuuccugcc

SEQ ID NO: 1677425 - RNA, 20 nt, Human
ccugcccugguuuccugccc

SEQ ID NO: 1677426 - RNA, 21 nt, Human
ccugcccugguuuccugcccu

SEQ ID NO: 1677427 - RNA, 22 nt, Human
ccugcccugguuuccugcccug

SEQ ID NO: 1677428 - RNA, 23 nt, Human
ccugcccugguuuccugcccugg

SEQ ID NO: 1677429 - RNA, 11 nt, Human
ccugcccugug

SEQ ID NO: 1677430 - RNA, 12 nt, Human
ccugcccugugg

SEQ ID NO: 1677431 - RNA, 14 nt, Human
ccugcccugugggc

SEQ ID NO: 1677432 - RNA, 15 nt, Human
ccugcccugugggcc

SEQ ID NO: 1677433 - RNA, 19 nt, Human
ccugcccuuaccugccagg

SEQ ID NO: 1677434 - RNA, 21 nt, Human
ccugcccuuaccugccaggaa

SEQ ID NO: 1677435 - RNA, 22 nt, Human
ccugcccuuaccugccaggaag

SEQ ID NO: 1677436 - RNA, 12 nt, Human
ccugccucagcc

SEQ ID NO: 1677437 - RNA, 13 nt, Human
ccugccucagccu

SEQ ID NO: 1677438 - RNA, 14 nt, Human
ccugccucagccuc

SEQ ID NO: 1677439 - RNA, 22 nt, Human
ccugccuguucccauucuugca

SEQ ID NO: 1677440 - RNA, 14 nt, Human
ccugccuguugggc

SEQ ID NO: 1677441 - RNA, 12 nt, Human
ccugccaggcau

SEQ ID NO: 1677442 - RNA, 15 nt, Human
ccugccaggcauggu

SEQ ID NO: 1677443 - RNA, 14 nt, Human
ccugccccccagcc

SEQ ID NO: 1677444 - RNA, 14 nt, Human
ccugcccggcugcg

SEQ ID NO: 1677445 - RNA, 16 nt, Human
ccugcccggcugcgga

SEQ ID NO: 1677446 - RNA, 15 nt, Human
ccugccccucccuuc

SEQ ID NO: 1677447 - RNA, 16 nt, Human
ccugccccucccuuca

SEQ ID NO: 1677448 - RNA, 18 nt, Human
ccugccccucccuucaac

SEQ ID NO: 1677449 - RNA, 18 nt, Human
ccugccccuccucucugc

SEQ ID NO: 1677450 - RNA, 14 nt, Human
ccugccccucccuu

SEQ ID NO: 1677451 - RNA, 19 nt, Human
ccugccccuccucucugcc

SEQ ID NO: 1677452 - RNA, 20 nt, Human
ccugccccuccucucugccc

SEQ ID NO: 1677453 - RNA, 21 nt, Human
ccugccccuccucucugcccu

SEQ ID NO: 1677454 - RNA, 22 nt, Human
ccugccccuccucucugcccua

SEQ ID NO: 1677455 - RNA, 17 nt, Human
ccugccccugagcccau

SEQ ID NO: 1677456 - RNA, 15 nt, Human
ccugagcugggauga

SEQ ID NO: 1677457 - RNA, 11 nt, Human
ccucuuccuga

SEQ ID NO: 1677458 - RNA, 18 nt, Human
ccugaaggccccgcccag

SEQ ID NO: 1677459 - RNA, 19 nt, Human
ccugaaggccccgcccagg

SEQ ID NO: 1677460 - RNA, 22 nt, Human
ccugaaggccccgcccaggcuu

SEQ ID NO: 1677461 - RNA, 20 nt, Human
ccugaaggccccgcccaggc

SEQ ID NO: 1677462 - RNA, 21 nt, Human
ccugaaggccccgcccaggcu

SEQ ID NO: 1677463 - RNA, 18 nt, Human
ccugaaagcccugagcuu

SEQ ID NO: 1677464 - RNA, 13 nt, Human
ccugaaagcccug

SEQ ID NO: 1677465 - RNA, 14 nt, Human
ccugaaagcccuga

SEQ ID NO: 1677466 - RNA, 13 nt, Human
ccugaaagaggaa

SEQ ID NO: 1677467 - RNA, 17 nt, Human
ccugcaaagcccagcuu

SEQ ID NO: 1677468 - RNA, 18 nt, Human
ccugcaaagcccagcuug

SEQ ID NO: 1677469 - RNA, 22 nt, Human
ccugcacaaagcccuuccaugu

SEQ ID NO: 1677470 - RNA, 20 nt, Human
ccugcacaaagcccuuccau

SEQ ID NO: 1677471 - RNA, 15 nt, Human
ccugcaaagcccagc

SEQ ID NO: 1677472 - RNA, 16 nt, Human
ccugcaaagcccagcu

SEQ ID NO: 1677473 - RNA, 14 nt, Human
ccugcaaagcccag

SEQ ID NO: 1677474 - RNA, 23 nt, Human
ccugcacaaagcccuuccauguc

SEQ ID NO: 1677475 - RNA, 19 nt, Human
ccugcaaagcccagcuuga

SEQ ID NO: 1677476 - RNA, 21 nt, Human
ccugcacacgcuccuuccucu

SEQ ID NO: 1677477 - RNA, 16 nt, Human
ccugccacccugggga

SEQ ID NO: 1677478 - RNA, 22 nt, Human
ccugccacccuggggagaaagu

SEQ ID NO: 1677479 - RNA, 14 nt, Human
ccugccacccuggg

SEQ ID NO: 1677480 - RNA, 12 nt, Human
ccugccacccug

SEQ ID NO: 1677481 - RNA, 13 nt, Human
ccugccacccugg

SEQ ID NO: 1677482 - RNA, 23 nt, Human
ccugcauuugugaaaugauggug

SEQ ID NO: 1677483 - RNA, 15 nt, Human
ccugccaccacgccc

SEQ ID NO: 1677484 - RNA, 19 nt, Human
ccugccaccacgcccggcu

SEQ ID NO: 1677485 - RNA, 19 nt, Human
ccugccaauggacuaacuu

SEQ ID NO: 1677486 - RNA, 20 nt, Human
ccugagccagauuucacucu

SEQ ID NO: 1677487 - RNA, 19 nt, Human
ccugaaguaagcaaagacu

SEQ ID NO: 1677488 - RNA, 22 nt, Human
ccugaagucuuuguacagacaa

SEQ ID NO: 1677489 - RNA, 20 nt, Human
ccugaagucacacagugagu

SEQ ID NO: 1677490 - RNA, 15 nt, Human
ccugagccagauuuc

SEQ ID NO: 1677491 - RNA, 16 nt, Human
ccugagccagauuuca

SEQ ID NO: 1677492 - RNA, 18 nt, Human
ccugagccagauuucacu

SEQ ID NO: 1677493 - RNA, 12 nt, Human
ccugagcuggga

SEQ ID NO: 1677494 - RNA, 15 nt, Human
ccugaggcccagagg

SEQ ID NO: 1677495 - RNA, 16 nt, Human
ccugaggcccagaggg

SEQ ID NO: 1677496 - RNA, 17 nt, Human
ccugaggcccagagggc

SEQ ID NO: 1677497 - RNA, 18 nt, Human
ccugaggcccagagggcc

SEQ ID NO: 1677498 - RNA, 13 nt, Human
ccugaggcugggc

SEQ ID NO: 1677499 - RNA, 14 nt, Human
ccugaggcugggcu

SEQ ID NO: 1677500 - RNA, 15 nt, Human
ccugaggcugggcuc

SEQ ID NO: 1677501 - RNA, 16 nt, Human
ccugaggcugggcucc

SEQ ID NO: 1677502 - RNA, 17 nt, Human
ccugaggcuccacuugg

SEQ ID NO: 1677503 - RNA, 13 nt, Human
ccugaggcuccac

SEQ ID NO: 1677504 - RNA, 14 nt, Human
ccugaggcuccacu

SEQ ID NO: 1677505 - RNA, 12 nt, Human
ccuguaccucuu

SEQ ID NO: 1677506 - RNA, 10 nt, Human
ccuguaccuc

SEQ ID NO: 1677507 - RNA, 15 nt, Human
ccugguggcaguggg

SEQ ID NO: 1677508 - RNA, 13 nt, Human
ccugguggcagug

SEQ ID NO: 1677509 - RNA, 14 nt, Human
ccugguggcagugg

SEQ ID NO: 1677510 - RNA, 13 nt, Human
ccuguagcccuaa

SEQ ID NO: 1677511 - RNA, 19 nt, Human
ccuguagagugggagcuga

SEQ ID NO: 1677512 - RNA, 15 nt, Human
ccuguagagugggag

SEQ ID NO: 1677513 - RNA, 16 nt, Human
ccuguagagugggagc

SEQ ID NO: 1677514 - RNA, 12 nt, Human
ccugucccccug

SEQ ID NO: 1677515 - RNA, 13 nt, Human
ccugucccccuga

SEQ ID NO: 1677516 - RNA, 14 nt, Human
ccugucccccugac

SEQ ID NO: 1677517 - RNA, 15 nt, Human
ccugucccccugaca

SEQ ID NO: 1677518 - RNA, 16 nt, Human
ccugucccccugacaa

SEQ ID NO: 1677519 - RNA, 19 nt, Human
ccugguggcagcucaccuc

SEQ ID NO: 1677520 - RNA, 21 nt, Human
ccugguggcagcucaccucuc

SEQ ID NO: 1677521 - RNA, 22 nt, Human
ccugguggcagcucaccucucc

SEQ ID NO: 1677522 - RNA, 14 nt, Human
ccugguggcagcug

SEQ ID NO: 1677523 - RNA, 15 nt, Human
ccugguggcagcugc

SEQ ID NO: 1677524 - RNA, 16 nt, Human
ccugguggcagcugcg

SEQ ID NO: 1677525 - RNA, 17 nt, Human
ccugguggcagcugcgg

SEQ ID NO: 1677526 - RNA, 18 nt, Human
ccugguggcagcugcggu

SEQ ID NO: 1677527 - RNA, 14 nt, Human
ccuggcaugggaau

SEQ ID NO: 1677528 - RNA, 18 nt, Human
ccugccuguugggccagg

SEQ ID NO: 1677529 - RNA, 19 nt, Human
ccugccuguugggccagga

SEQ ID NO: 1677530 - RNA, 20 nt, Human
ccugccuguugggccaggag

SEQ ID NO: 1677531 - RNA, 21 nt, Human
ccugcuaauuccccagauugc

SEQ ID NO: 1677532 - RNA, 12 nt, Human
ccuggagaacua

SEQ ID NO: 1677533 - RNA, 13 nt, Human
ccuggagaacuag

SEQ ID NO: 1677534 - RNA, 16 nt, Human
ccuggagaacuagaga

SEQ ID NO: 1677535 - RNA, 19 nt, Human
ccuggcacccggccccugc

SEQ ID NO: 1677536 - RNA, 20 nt, Human
ccuggcacccggccccugcu

SEQ ID NO: 1677537 - RNA, 21 nt, Human
ccuggcacccggccccugcug

SEQ ID NO: 1677538 - RNA, 12 nt, Human
ccuggcacugcu

SEQ ID NO: 1677539 - RNA, 13 nt, Human
ccuggcacugcuu

SEQ ID NO: 1677540 - RNA, 16 nt, Human
ccuggcacugcuucca

SEQ ID NO: 1677541 - RNA, 13 nt, Human
ccuggcaugggaa

SEQ ID NO: 1677542 - RNA, 13 nt, Human
ccuggccacgccc

SEQ ID NO: 1677543 - RNA, 13 nt, Human
ccuggcccacugc

SEQ ID NO: 1677544 - RNA, 14 nt, Human
ccuggcccacugca

SEQ ID NO: 1677545 - RNA, 21 nt, Human
ccuggccagaugcaccagccc

SEQ ID NO: 1677546 - RNA, 23 nt, Human
ccuggccagaugcaccagcccuu

SEQ ID NO: 1677547 - RNA, 17 nt, Human
ccuggcuuuucacugcu

SEQ ID NO: 1677548 - RNA, 18 nt, Human
ccuggcuuuucacugcug

SEQ ID NO: 1677549 - RNA, 16 nt, Human
ccuggcuuuucacugc

SEQ ID NO: 1677550 - RNA, 16 nt, Human
ccuggcccacugcauc

SEQ ID NO: 1677551 - RNA, 22 nt, Human
ccugggaggucaaggcugcagu

SEQ ID NO: 1677552 - RNA, 16 nt, Human
ccugggagugagcugg

SEQ ID NO: 1677553 - RNA, 18 nt, Human
ccugggagugagcugguu

SEQ ID NO: 1677554 - RNA, 16 nt, Human
ccugggcagaaggaag

SEQ ID NO: 1677555 - RNA, 20 nt, Human
ccugggggcugggcagagga

SEQ ID NO: 1677556 - RNA, 21 nt, Human
ccugggggcugggcagaggaa

SEQ ID NO: 1677557 - RNA, 19 nt, Human
ccugggggcugggcagagg

SEQ ID NO: 1677558 - RNA, 14 nt, Human
ccugggcagcugcc

SEQ ID NO: 1677559 - RNA, 13 nt, Human
ccugggcagcugc

SEQ ID NO: 1677560 - RNA, 13 nt, Human
cgcacugggcuug

SEQ ID NO: 1677561 - RNA, 23 nt, Human
cgcacuucgggaggucgaggcag

SEQ ID NO: 1677562 - RNA, 17 nt, Human
cgcacugggcuugggga

SEQ ID NO: 1677563 - RNA, 19 nt, Human
cgcagcauauucaggaagc

SEQ ID NO: 1677564 - RNA, 20 nt, Human
cgcagcauauucaggaagcu

SEQ ID NO: 1677565 - RNA, 17 nt, Human
cgcagcccugcagaggg

SEQ ID NO: 1677566 - RNA, 19 nt, Human
cgagcccugguggcagugg

SEQ ID NO: 1677567 - RNA, 16 nt, Human
cgaggacagggaggug

SEQ ID NO: 1677568 - RNA, 20 nt, Human
cgggaauuuucaucuaggau

SEQ ID NO: 1677569 - RNA, 18 nt, Human
cgggaauuuucaucuagg

SEQ ID NO: 1677570 - RNA, 16 nt, Human
cgggaagggggcuggg

SEQ ID NO: 1677571 - RNA, 19 nt, Human
cgggaagggggcugggaca

SEQ ID NO: 1677572 - RNA, 20 nt, Human
cgggaagggggcugggacau

SEQ ID NO: 1677573 - RNA, 14 nt, Human
cggcuggccuggcc

SEQ ID NO: 1677574 - RNA, 23 nt, Human
cggcuggcagcccaccccucaac

SEQ ID NO: 1677575 - RNA, 13 nt, Human
cggcuggccuggc

SEQ ID NO: 1677576 - RNA, 14 nt, Human
cggcuggcagccca

SEQ ID NO: 1677577 - RNA, 11 nt, Human
cggccaggcca

SEQ ID NO: 1677578 - RNA, 12 nt, Human
cggccaggccag

SEQ ID NO: 1677579 - RNA, 20 nt, Human
cggccaggccagagggagug

SEQ ID NO: 1677580 - RNA, 19 nt, Human
cgcgguggcucacgccugu

SEQ ID NO: 1677581 - RNA, 15 nt, Human
cgcgacaaugcaaac

SEQ ID NO: 1677582 - RNA, 14 nt, Human
cgcgacaaugcaaa

SEQ ID NO: 1677583 - RNA, 17 nt, Human
cgcuaaacuuuucugau

SEQ ID NO: 1677584 - RNA, 18 nt, Human
cgcuaaacuuuucugaua

SEQ ID NO: 1677585 - RNA, 19 nt, Human
cgcuaaacuuuucugauag

SEQ ID NO: 1677586 - RNA, 24 nt, Human
cgcguugaaauuguaauuauaucu

SEQ ID NO: 1677587 - RNA, 18 nt, Human
cgcuacccgggaaggggg

SEQ ID NO: 1677588 - RNA, 21 nt, Human
cgcuacccgggaagggggcug

SEQ ID NO: 1677589 - RNA, 24 nt, Human
cgcuacccgggaagggggcuggga

SEQ ID NO: 1677590 - RNA, 13 nt, Human
cgcagcccugcuu

SEQ ID NO: 1677591 - RNA, 15 nt, Human
cgcagcccugcuuug

SEQ ID NO: 1677592 - RNA, 24 nt, Human
cgcagcccugcuuugggcugcccu

SEQ ID NO: 1677593 - RNA, 18 nt, Human
cgcagcccugcagagggc

SEQ ID NO: 1677594 - RNA, 19 nt, Human
cgcagcccugcagagggca

SEQ ID NO: 1677595 - RNA, 18 nt, Human
cgcccaacuaauuuuugu

SEQ ID NO: 1677596 - RNA, 13 nt, Human
cgcccagucugga

SEQ ID NO: 1677597 - RNA, 19 nt, Human
cgcccagucuggaaugcag

SEQ ID NO: 1677598 - RNA, 18 nt, Human
cgcccggcuaauuuuugu

SEQ ID NO: 1677599 - RNA, 21 nt, Human
cgcccagucuggaaugcagug

SEQ ID NO: 1677600 - RNA, 16 nt, Human
cggacuuagcugggag

SEQ ID NO: 1677601 - RNA, 21 nt, Human
cggacagccacggccaggcca

SEQ ID NO: 1677602 - RNA, 22 nt, Human
cggacagccacggccaggccag

SEQ ID NO: 1677603 - RNA, 17 nt, Human
cggacuuagcugggaga

SEQ ID NO: 1677604 - RNA, 15 nt, Human
cggagaaaggaaggg

SEQ ID NO: 1677605 - RNA, 17 nt, Human
cggagaaaggaagggcu

SEQ ID NO: 1677606 - RNA, 16 nt, Human
cgcuuucuacccagcg

SEQ ID NO: 1677607 - RNA, 14 nt, Human
cgcuuucuacccag

SEQ ID NO: 1677608 - RNA, 16 nt, Human
cggaauaguuggcuag

SEQ ID NO: 1677609 - RNA, 17 nt, Human
cggaauaguuggcuagg

SEQ ID NO: 1677610 - RNA, 11 nt, Human
cgcugugcugc

SEQ ID NO: 1677611 - RNA, 13 nt, Human
cgcugugcugccc

SEQ ID NO: 1677612 - RNA, 14 nt, Human
cgcugugcugcccu

SEQ ID NO: 1677613 - RNA, 21 nt, Human
cgcugugcugcccugcccacc

SEQ ID NO: 1677614 - RNA, 23 nt, Human
cgcugugcugcccugcccaccug

SEQ ID NO: 1677615 - RNA, 19 nt, Human
cgcugugcugcccugccca

SEQ ID NO: 1677616 - RNA, 21 nt, Human
ccuuuguaaauugucagaugc

SEQ ID NO: 1677617 - RNA, 23 nt, Human
ccuuuguauucucuccuguaccu

SEQ ID NO: 1677618 - RNA, 22 nt, Human
ccuuuguauucucuccuguacc

SEQ ID NO: 1677619 - RNA, 23 nt, Human
ccuuuguaaauugucagaugcug

SEQ ID NO: 1677620 - RNA, 24 nt, Human
ccuuuguauucucuccuguaccuc

SEQ ID NO: 1677621 - RNA, 16 nt, Human
ccuuuguccccaccgc

SEQ ID NO: 1677622 - RNA, 18 nt, Human
ccuuuguccccaccgcag

SEQ ID NO: 1677623 - RNA, 14 nt, Human
ccuuuguccccacc

SEQ ID NO: 1677624 - RNA, 15 nt, Human
ccuuuuuuggcugcu

SEQ ID NO: 1677625 - RNA, 14 nt, Human
ccuuugugaggaag

SEQ ID NO: 1677626 - RNA, 22 nt, Human
ccuuuguccccaccgcagacag

SEQ ID NO: 1677627 - RNA, 23 nt, Human
ccuuuguccccaccgcagacagg

SEQ ID NO: 1677628 - RNA, 15 nt, Human
ccuuugugaggaagc

SEQ ID NO: 1677629 - RNA, 16 nt, Human
ccuuugugaggaagcc

SEQ ID NO: 1677630 - RNA, 17 nt, Human
ccuuugugaggaagccg

SEQ ID NO: 1677631 - RNA, 23 nt, Human
ccuuugugaggaagccgcugggg

SEQ ID NO: 1677632 - RNA, 15 nt, Human
cgaauauugcugaug

SEQ ID NO: 1677633 - RNA, 17 nt, Human
cgaauauugcugauggu

SEQ ID NO: 1677634 - RNA, 16 nt, Human
cgaauagcugggacua

SEQ ID NO: 1677635 - RNA, 11 nt, Human
cgaauauugcu

SEQ ID NO: 1677636 - RNA, 12 nt, Human
cgaauauugcug

SEQ ID NO: 1677637 - RNA, 14 nt, Human
cgaauauugcugau

SEQ ID NO: 1677638 - RNA, 23 nt, Human
cgaaagggacuuggaagcuccgc

SEQ ID NO: 1677639 - RNA, 17 nt, Human
ccuuuuuuggcugcuga

SEQ ID NO: 1677640 - RNA, 18 nt, Human
ccuuuuuuggcugcugaa

SEQ ID NO: 1677641 - RNA, 20 nt, Human
ccuuuuuuggcugcugaagg

SEQ ID NO: 1677642 - RNA, 22 nt, Human
ccuuuuuuggcugcugaaggcu

SEQ ID NO: 1677643 - RNA, 21 nt, Human
cgaacauguuuuucuucuccc

SEQ ID NO: 1677644 - RNA, 23 nt, Human
cgaacauguuuuucuucucccuc

SEQ ID NO: 1677645 - RNA, 18 nt, Human
ccuguggaucaaauccag

SEQ ID NO: 1677646 - RNA, 20 nt, Human
ccuguggaugauaaaacaca

SEQ ID NO: 1677647 - RNA, 20 nt, Human
ccugugggcccccaaaugga

SEQ ID NO: 1677648 - RNA, 20 nt, Human
ccugugccucugggacugga

SEQ ID NO: 1677649 - RNA, 19 nt, Human
ccuucauuuggcauucccc

SEQ ID NO: 1677650 - RNA, 12 nt, Human
ccuucucuccag

SEQ ID NO: 1677651 - RNA, 13 nt, Human
ccuucucuccagc

SEQ ID NO: 1677652 - RNA, 15 nt, Human
ccuucucuccagccc

SEQ ID NO: 1677653 - RNA, 16 nt, Human
ccuucucuccagcccc

SEQ ID NO: 1677654 - RNA, 17 nt, Human
ccuuccauggacuuugu

SEQ ID NO: 1677655 - RNA, 18 nt, Human
ccuuccaugucgccucug

SEQ ID NO: 1677656 - RNA, 13 nt, Human
ccuuccaggggug

SEQ ID NO: 1677657 - RNA, 17 nt, Human
ccuucggccuccauccu

SEQ ID NO: 1677658 - RNA, 18 nt, Human
ccuucggccuccauccug

SEQ ID NO: 1677659 - RNA, 19 nt, Human
ccuucucuccagccccugg

SEQ ID NO: 1677660 - RNA, 21 nt, Human
ccuuggugucgggcaugacac

SEQ ID NO: 1677661 - RNA, 19 nt, Human
ccuuggugucgggcaugac

SEQ ID NO: 1677662 - RNA, 20 nt, Human
ccuuggugucgggcaugaca

SEQ ID NO: 1677663 - RNA, 14 nt, Human
ccuuggggagcagg

SEQ ID NO: 1677664 - RNA, 16 nt, Human
ccuuggcugcagggag

SEQ ID NO: 1677665 - RNA, 23 nt, Human
ccuugacauuguagagcuucugg

SEQ ID NO: 1677666 - RNA, 17 nt, Human
ccuucucuccagccccu

SEQ ID NO: 1677667 - RNA, 18 nt, Human
ccuucucuccagccccug

SEQ ID NO: 1677668 - RNA, 18 nt, Human
ccuugacagggcacaccg

SEQ ID NO: 1677669 - RNA, 21 nt, Human
ccuugacagggcacaccgggc

SEQ ID NO: 1677670 - RNA, 19 nt, Human
ccuuggauuguccccgacc

SEQ ID NO: 1677671 - RNA, 22 nt, Human
ccuuggcucaaguccucuuuuc

SEQ ID NO: 1677672 - RNA, 15 nt, Human
ccuuggauugucccc

SEQ ID NO: 1677673 - RNA, 15 nt, Human
ccuuggacucauuuu

SEQ ID NO: 1677674 - RNA, 19 nt, Human
cucagcucccaaggcucug

SEQ ID NO: 1677675 - RNA, 15 nt, Human
cucagcucccaaggc

SEQ ID NO: 1677676 - RNA, 23 nt, Human
cucagcggggacagcuccuucug

SEQ ID NO: 1677677 - RNA, 14 nt, Human
cucagcggggacag

SEQ ID NO: 1677678 - RNA, 15 nt, Human
cucagcggggacagc

SEQ ID NO: 1677679 - RNA, 16 nt, Human
cucagcggggacagcu

SEQ ID NO: 1677680 - RNA, 18 nt, Human
cucagcggggacagcucc

SEQ ID NO: 1677681 - RNA, 19 nt, Human
cucagcggggacagcuccu

SEQ ID NO: 1677682 - RNA, 20 nt, Human
cucagcggggacagcuccuu

SEQ ID NO: 1677683 - RNA, 21 nt, Human
cucagcggggacagcuccuuc

SEQ ID NO: 1677684 - RNA, 14 nt, Human
cucagcccucccug

SEQ ID NO: 1677685 - RNA, 19 nt, Human
cucagcccucccugccccu

SEQ ID NO: 1677686 - RNA, 20 nt, Human
cucagcccucccugccccuc

SEQ ID NO: 1677687 - RNA, 21 nt, Human
cucagcccucccugccccucc

SEQ ID NO: 1677688 - RNA, 15 nt, Human
cucagcauccuggca

SEQ ID NO: 1677689 - RNA, 23 nt, Human
cucagauuuuauuauguaaaucc

SEQ ID NO: 1677690 - RNA, 21 nt, Human
cucagcaaaagaugcuucuca

SEQ ID NO: 1677691 - RNA, 16 nt, Human
cucagcaggggagggu

SEQ ID NO: 1677692 - RNA, 19 nt, Human
cucagcaaaagaugcuucu

SEQ ID NO: 1677693 - RNA, 20 nt, Human
cucagcaaaagaugcuucuc

SEQ ID NO: 1677694 - RNA, 13 nt, Human
cucagcauccugg

SEQ ID NO: 1677695 - RNA, 21 nt, Human
cucagcauccuggcacccggc

SEQ ID NO: 1677696 - RNA, 22 nt, Human
cucagcauccuggcacccggcc

SEQ ID NO: 1677697 - RNA, 16 nt, Human
cucagaucuucugugg

SEQ ID NO: 1677698 - RNA, 15 nt, Human
cucagagccaccccu

SEQ ID NO: 1677699 - RNA, 23 nt, Human
cucagagagggugggagugggcc

SEQ ID NO: 1677700 - RNA, 19 nt, Human
cucagagagggugggagug

SEQ ID NO: 1677701 - RNA, 16 nt, Human
cucacuguugcccagg

SEQ ID NO: 1677702 - RNA, 17 nt, Human
cucacuguugcccaggc

SEQ ID NO: 1677703 - RNA, 18 nt, Human
cucacuguugcccaggcu

SEQ ID NO: 1677704 - RNA, 19 nt, Human
cucacuguugcccaggcug

SEQ ID NO: 1677705 - RNA, 14 nt, Human
cucacuguugccca

SEQ ID NO: 1677706 - RNA, 15 nt, Human
cucacuguugcccag

SEQ ID NO: 1677707 - RNA, 20 nt, Human
cucacugcauccuccgccuc

SEQ ID NO: 1677708 - RNA, 15 nt, Human
cucacugcagccuca

SEQ ID NO: 1677709 - RNA, 16 nt, Human
cucacugcagccucaa

SEQ ID NO: 1677710 - RNA, 23 nt, Human
cucaggugauccacccaccucag

SEQ ID NO: 1677711 - RNA, 19 nt, Human
cucagguggggucacucug

SEQ ID NO: 1677712 - RNA, 20 nt, Human
cucagguggggucacucugg

SEQ ID NO: 1677713 - RNA, 21 nt, Human
cucagguggggucacucuggc

SEQ ID NO: 1677714 - RNA, 20 nt, Human
cucagguaaucgaccugccu

SEQ ID NO: 1677715 - RNA, 22 nt, Human
cucagguaaucgaccugccucg

SEQ ID NO: 1677716 - RNA, 24 nt, Human
cucagguaaucgaccugccucggc

SEQ ID NO: 1677717 - RNA, 24 nt, Human
cucagggucccugguggcagcuca

SEQ ID NO: 1677718 - RNA, 14 nt, Human
cucagggccugguc

SEQ ID NO: 1677719 - RNA, 20 nt, Human
cucagggucccugguggcag

SEQ ID NO: 1677720 - RNA, 21 nt, Human
cucagggucccugguggcagc

SEQ ID NO: 1677721 - RNA, 22 nt, Human
cucagggucccugguggcagcu

SEQ ID NO: 1677722 - RNA, 18 nt, Human
cucagggccuggcucagg

SEQ ID NO: 1677723 - RNA, 19 nt, Human
cucagggccuggcucaggu

SEQ ID NO: 1677724 - RNA, 20 nt, Human
cucagggccuggcucaggug

SEQ ID NO: 1677725 - RNA, 15 nt, Human
cucaggcagguggga

SEQ ID NO: 1677726 - RNA, 18 nt, Human
cucaggcaggugggaugg

SEQ ID NO: 1677727 - RNA, 24 nt, Human
cucaggagcccugggaggcucugg

SEQ ID NO: 1677728 - RNA, 12 nt, Human
cucaggagcccu

SEQ ID NO: 1677729 - RNA, 13 nt, Human
cucaggagcccug

SEQ ID NO: 1677730 - RNA, 14 nt, Human
cucaggagcccugg

SEQ ID NO: 1677731 - RNA, 15 nt, Human
cucaggagcccuggg

SEQ ID NO: 1677732 - RNA, 16 nt, Human
cucaggagcccuggga

SEQ ID NO: 1677733 - RNA, 17 nt, Human
cucaggagcccugggag

SEQ ID NO: 1677734 - RNA, 20 nt, Human
cucaggagcccugggaggcu

SEQ ID NO: 1677735 - RNA, 21 nt, Human
cucaggagcccugggaggcuc

SEQ ID NO: 1677736 - RNA, 22 nt, Human
cucaggagcccugggaggcucu

SEQ ID NO: 1677737 - RNA, 23 nt, Human
cucaggagcccugggaggcucug

SEQ ID NO: 1677738 - RNA, 22 nt, Human
cucaggaaaucaaauaugcaaa

SEQ ID NO: 1677739 - RNA, 22 nt, Human
cuccagcuggccgggagccuga

SEQ ID NO: 1677740 - RNA, 23 nt, Human
cuccagcuggccgggagccugau

SEQ ID NO: 1677741 - RNA, 19 nt, Human
cuccagcuggguuggaaaa

SEQ ID NO: 1677742 - RNA, 14 nt, Human
cuccaugcugccuc

SEQ ID NO: 1677743 - RNA, 15 nt, Human
cuccaugcugccucc

SEQ ID NO: 1677744 - RNA, 16 nt, Human
cuccaugcugccucca

SEQ ID NO: 1677745 - RNA, 17 nt, Human
cuccaugcugccuccag

SEQ ID NO: 1677746 - RNA, 13 nt, Human
cuccauuuaauaa

SEQ ID NO: 1677747 - RNA, 20 nt, Human
cuccauuuaauaauuauaug

SEQ ID NO: 1677748 - RNA, 16 nt, Human
cucccaaagugcuggg

SEQ ID NO: 1677749 - RNA, 23 nt, Human
cucccaaagugcugggauuacag

SEQ ID NO: 1677750 - RNA, 16 nt, Human
cucccaacucacccca

SEQ ID NO: 1677751 - RNA, 15 nt, Human
cucccacaaaggaga

SEQ ID NO: 1677752 - RNA, 14 nt, Human
cucccaacucaccc

SEQ ID NO: 1677753 - RNA, 15 nt, Human
cucccaacucacccc

SEQ ID NO: 1677754 - RNA, 17 nt, Human
cucccaggcgccccuuc

SEQ ID NO: 1677755 - RNA, 19 nt, Human
cucccaggcgccccuuccc

SEQ ID NO: 1677756 - RNA, 20 nt, Human
cucccaggcgccccuucccc

SEQ ID NO: 1677757 - RNA, 22 nt, Human
cucccaggcgccccuucccccu

SEQ ID NO: 1677758 - RNA, 16 nt, Human
cucccaucacuucccu

SEQ ID NO: 1677759 - RNA, 15 nt, Human
cucccgaguagcugg

SEQ ID NO: 1677760 - RNA, 22 nt, Human
cucccuauuuuuuuucuguuau

SEQ ID NO: 1677761 - RNA, 20 nt, Human
cucccgaauagcugggacua

SEQ ID NO: 1677762 - RNA, 23 nt, Human
cucccgaauagcugggacuacag

SEQ ID NO: 1677763 - RNA, 21 nt, Human
cucccuucaaccauuccccau

SEQ ID NO: 1677764 - RNA, 22 nt, Human
cucccuucaaccauuccccaug

SEQ ID NO: 1677765 - RNA, 23 nt, Human
cucccuucaaccauuccccaugg

SEQ ID NO: 1677766 - RNA, 15 nt, Human
cucccuucauccuuc

SEQ ID NO: 1677767 - RNA, 18 nt, Human
cucccucagucuggcccu

SEQ ID NO: 1677768 - RNA, 21 nt, Human
cuccccugcuggguguggcgc

SEQ ID NO: 1677769 - RNA, 23 nt, Human
cuccccugcuggguguggcgcag

SEQ ID NO: 1677770 - RNA, 20 nt, Human
cuccccagccccaucccaaa

SEQ ID NO: 1677771 - RNA, 14 nt, Human
cuccccucggagaa

SEQ ID NO: 1677772 - RNA, 14 nt, Human
cuccacugccuucg

SEQ ID NO: 1677773 - RNA, 15 nt, Human
cuccacugccuucga

SEQ ID NO: 1677774 - RNA, 16 nt, Human
cuccacugccuucgau

SEQ ID NO: 1677775 - RNA, 13 nt, Human
cuccacuggaugg

SEQ ID NO: 1677776 - RNA, 13 nt, Human
cuccacugccuuc

SEQ ID NO: 1677777 - RNA, 11 nt, Human
cuccagccccu

SEQ ID NO: 1677778 - RNA, 13 nt, Human
cuccagccccugg

SEQ ID NO: 1677779 - RNA, 14 nt, Human
cuccagccccugga

SEQ ID NO: 1677780 - RNA, 15 nt, Human
cuccagcucaccagc

SEQ ID NO: 1677781 - RNA, 16 nt, Human
cuccagcucaccagcc

SEQ ID NO: 1677782 - RNA, 18 nt, Human
cuccagcucaccagcccc

SEQ ID NO: 1677783 - RNA, 14 nt, Human
cuccacuggaugga

SEQ ID NO: 1677784 - RNA, 16 nt, Human
cuccagagucagaagu

SEQ ID NO: 1677785 - RNA, 12 nt, Human
cucauuuccaag

SEQ ID NO: 1677786 - RNA, 13 nt, Human
cucauuuccaagc

SEQ ID NO: 1677787 - RNA, 14 nt, Human
cucauuuccaagca

SEQ ID NO: 1677788 - RNA, 21 nt, Human
cucauuugucacacacuuugg

SEQ ID NO: 1677789 - RNA, 17 nt, Human
cucauuuccaagcaagu

SEQ ID NO: 1677790 - RNA, 22 nt, Human
cucauucuccuuguguuacuaa

SEQ ID NO: 1677791 - RNA, 18 nt, Human
cucauucuccuuguguua

SEQ ID NO: 1677792 - RNA, 12 nt, Human
cucauucuucug

SEQ ID NO: 1677793 - RNA, 17 nt, Human
cucauugaccugaggcc

SEQ ID NO: 1677794 - RNA, 19 nt, Human
cucauugaccugaggcccu

SEQ ID NO: 1677795 - RNA, 21 nt, Human
cucauugaccugaggcccuuc

SEQ ID NO: 1677796 - RNA, 11 nt, Human
cuauugguaaa

SEQ ID NO: 1677797 - RNA, 16 nt, Human
cuauugcugcuugagg

SEQ ID NO: 1677798 - RNA, 17 nt, Human
cucacagaacccuugga

SEQ ID NO: 1677799 - RNA, 14 nt, Human
cucaaguccucuuu

SEQ ID NO: 1677800 - RNA, 23 nt, Human
cucacacggacacucaaaagcug

SEQ ID NO: 1677801 - RNA, 19 nt, Human
cucaacucuccuccagagu

SEQ ID NO: 1677802 - RNA, 16 nt, Human
cucaacucuccuccag

SEQ ID NO: 1677803 - RNA, 18 nt, Human
cucaacucuccuccagag

SEQ ID NO: 1677804 - RNA, 19 nt, Human
cuauuucuauauuuucauu

SEQ ID NO: 1677805 - RNA, 20 nt, Human
cuauuucuauauuuucauuc

SEQ ID NO: 1677806 - RNA, 14 nt, Human
cucaaauuucuaaa

SEQ ID NO: 1677807 - RNA, 14 nt, Human
cucaacucuccucc

SEQ ID NO: 1677808 - RNA, 18 nt, Human
cucaaccaccuuucagau

SEQ ID NO: 1677809 - RNA, 17 nt, Human
cucaaauuucuaaaucu

SEQ ID NO: 1677810 - RNA, 15 nt, Human
cucaaauuucuaaau

SEQ ID NO: 1677811 - RNA, 19 nt, Human
cuaugauuuggaaaauaaa

SEQ ID NO: 1677812 - RNA, 15 nt, Human
cuaugauuuggaaaa

SEQ ID NO: 1677813 - RNA, 22 nt, Human
cuaugaaguuuuuuuuauacag

SEQ ID NO: 1677814 - RNA, 19 nt, Human
cuaugaaauauuauguuaa

SEQ ID NO: 1677815 - RNA, 19 nt, Human
cuauagccuaggugacaga

SEQ ID NO: 1677816 - RNA, 18 nt, Human
cuauagccuaggugacag

SEQ ID NO: 1677817 - RNA, 20 nt, Human
cuauagccuaggugacagag

SEQ ID NO: 1677818 - RNA, 21 nt, Human
cuauagccuaggugacagagu

SEQ ID NO: 1677819 - RNA, 20 nt, Human
cuaggaacacuccuucacag

SEQ ID NO: 1677820 - RNA, 15 nt, Human
cuaggaagacuuugg

SEQ ID NO: 1677821 - RNA, 17 nt, Human
cuaggaagacuuuggaa

SEQ ID NO: 1677822 - RNA, 13 nt, Human
cuauaauuuaaau

SEQ ID NO: 1677823 - RNA, 12 nt, Human
cuauaauuuaaa

SEQ ID NO: 1677824 - RNA, 23 nt, Human
cuauucaguaauaacucuacccu

SEQ ID NO: 1677825 - RNA, 18 nt, Human
cuaugcugaguuugugcu

SEQ ID NO: 1677826 - RNA, 14 nt, Human
cuaugcugaguuug

SEQ ID NO: 1677827 - RNA, 15 nt, Human
cuaugcugaguuugu

SEQ ID NO: 1677828 - RNA, 13 nt, Human
cuaugcugaguuu

SEQ ID NO: 1677829 - RNA, 19 nt, Human
cuaugggggcacugaggac

SEQ ID NO: 1677830 - RNA, 13 nt, Human
cuauguaucaaug

SEQ ID NO: 1677831 - RNA, 16 nt, Human
cuauguaucaaugagu

SEQ ID NO: 1677832 - RNA, 17 nt, Human
cuauucaguaauaacuc

SEQ ID NO: 1677833 - RNA, 12 nt, Human
cuacucuguguc

SEQ ID NO: 1677834 - RNA, 13 nt, Human
cuacucuguguca

SEQ ID NO: 1677835 - RNA, 19 nt, Human
cuacuguccuacccacccu

SEQ ID NO: 1677836 - RNA, 21 nt, Human
cuaccgagucucuucuccacu

SEQ ID NO: 1677837 - RNA, 22 nt, Human
cuaccgagucucuucuccacug

SEQ ID NO: 1677838 - RNA, 23 nt, Human
cuaccgagucucuucuccacugg

SEQ ID NO: 1677839 - RNA, 17 nt, Human
cuaccgagucucuucuc

SEQ ID NO: 1677840 - RNA, 19 nt, Human
cuaccgagucucuucucca

SEQ ID NO: 1677841 - RNA, 15 nt, Human
cuacucgaguuacag

SEQ ID NO: 1677842 - RNA, 16 nt, Human
cuacucgaguuacaga

SEQ ID NO: 1677843 - RNA, 19 nt, Human
cuacucgaguuacagacaa

SEQ ID NO: 1677844 - RNA, 14 nt, Human
cuagacuggugacu

SEQ ID NO: 1677845 - RNA, 15 nt, Human
cuagacuggugacug

SEQ ID NO: 1677846 - RNA, 17 nt, Human
cuagacuggugacugau

SEQ ID NO: 1677847 - RNA, 18 nt, Human
cuagacuggugacugauu

SEQ ID NO: 1677848 - RNA, 19 nt, Human
cuagacuggugacugauuc

SEQ ID NO: 1677849 - RNA, 22 nt, Human
cuagacuggugacugauucuuc

SEQ ID NO: 1677850 - RNA, 23 nt, Human
cuagacuggugacugauucuuca

SEQ ID NO: 1677851 - RNA, 17 nt, Human
cuacuuagcaugucccu

SEQ ID NO: 1677852 - RNA, 22 nt, Human
cuacuuagcaugucccuaccga

SEQ ID NO: 1677853 - RNA, 20 nt, Human
cuacuguccuacccacccuc

SEQ ID NO: 1677854 - RNA, 21 nt, Human
cuagagguucaaagauauuuu

SEQ ID NO: 1677855 - RNA, 18 nt, Human
cuagagguucaaagauau

SEQ ID NO: 1677856 - RNA, 17 nt, Human
cuagagguucaaagaua

SEQ ID NO: 1677857 - RNA, 18 nt, Human
cuagaguuuagcuggaaa

SEQ ID NO: 1677858 - RNA, 19 nt, Human
cuagaguuuagcuggaaaa

SEQ ID NO: 1677859 - RNA, 15 nt, Human
cuauaggugcuacaa

SEQ ID NO: 1677860 - RNA, 14 nt, Human
cuaggaaauauuua

SEQ ID NO: 1677861 - RNA, 15 nt, Human
cuaggaaauauuuau

SEQ ID NO: 1677862 - RNA, 19 nt, Human
cuaggaaauauuuauuuua

SEQ ID NO: 1677863 - RNA, 20 nt, Human
cuaggaaauauuuauuuuaa

SEQ ID NO: 1677864 - RNA, 16 nt, Human
cuagauacuguaucau

SEQ ID NO: 1677865 - RNA, 13 nt, Human
cuagauacuguau

SEQ ID NO: 1677866 - RNA, 24 nt, Human
cuagauacuguaucaugacaaaga

SEQ ID NO: 1677867 - RNA, 21 nt, Human
cuagccugugccucugggacu

SEQ ID NO: 1677868 - RNA, 19 nt, Human
cuagccugugccucuggga

SEQ ID NO: 1677869 - RNA, 22 nt, Human
cuagccugugccucugggacug

SEQ ID NO: 1677870 - RNA, 21 nt, Human
cuagccuuagaagucacacag

SEQ ID NO: 1677871 - RNA, 22 nt, Human
cuagccuuagaagucacacagu

SEQ ID NO: 1677872 - RNA, 23 nt, Human
cuagccuuagaagucacacagua

SEQ ID NO: 1677873 - RNA, 14 nt, Human
cuacauucuguuaa

SEQ ID NO: 1677874 - RNA, 13 nt, Human
cuacauucuguua

SEQ ID NO: 1677875 - RNA, 22 nt, Human
cuacauuauaaaugucucuuua

SEQ ID NO: 1677876 - RNA, 17 nt, Human
cuacccucuuagaaaaa

SEQ ID NO: 1677877 - RNA, 18 nt, Human
cuacccagcgagcccugg

SEQ ID NO: 1677878 - RNA, 13 nt, Human
cuacccaggugcu

SEQ ID NO: 1677879 - RNA, 13 nt, Human
cuacccacccucc

SEQ ID NO: 1677880 - RNA, 15 nt, Human
cuacccagcgagccc

SEQ ID NO: 1677881 - RNA, 17 nt, Human
cuacccagcgagcccug

SEQ ID NO: 1677882 - RNA, 15 nt, Human
cuacaggcacccacc

SEQ ID NO: 1677883 - RNA, 17 nt, Human
cuacaggcacccaccau

SEQ ID NO: 1677884 - RNA, 14 nt, Human
cuacaggagugagc

SEQ ID NO: 1677885 - RNA, 15 nt, Human
cuacaggagugagca

SEQ ID NO: 1677886 - RNA, 16 nt, Human
cuacaggagugagcac

SEQ ID NO: 1677887 - RNA, 14 nt, Human
cuacaggugugagu

SEQ ID NO: 1677888 - RNA, 16 nt, Human
cuacaggugugaguca

SEQ ID NO: 1677889 - RNA, 13 nt, Human
cuacaguccuccc

SEQ ID NO: 1677890 - RNA, 18 nt, Human
cuacauggaguauauguc

SEQ ID NO: 1677891 - RNA, 20 nt, Human
cuacauggaguauaugucaa

SEQ ID NO: 1677892 - RNA, 21 nt, Human
cuacagcuaaucagcauucuc

SEQ ID NO: 1677893 - RNA, 22 nt, Human
cuacagcuaaucagcauucuca

SEQ ID NO: 1677894 - RNA, 18 nt, Human
cuacagcuaaucagcauu

SEQ ID NO: 1677895 - RNA, 19 nt, Human
cuacagcuaaucagcauuc

SEQ ID NO: 1677896 - RNA, 23 nt, Human
cuacagcuugaccgugaggccag

SEQ ID NO: 1677897 - RNA, 19 nt, Human
cuacagcuugaccgugagg

SEQ ID NO: 1677898 - RNA, 22 nt, Human
cuacagcuugaccgugaggcca

SEQ ID NO: 1677899 - RNA, 22 nt, Human
cuacagaggccaugggccuccu

SEQ ID NO: 1677900 - RNA, 18 nt, Human
cuacagaggccaugggcc

SEQ ID NO: 1677901 - RNA, 20 nt, Human
cuacagaggccaugggccuc

SEQ ID NO: 1677902 - RNA, 13 nt, Human
cuacacugugcug

SEQ ID NO: 1677903 - RNA, 14 nt, Human
cuacacugugcuga

SEQ ID NO: 1677904 - RNA, 17 nt, Human
cuacacugugcugaguc

SEQ ID NO: 1677905 - RNA, 18 nt, Human
cuacacugugcugagucu

SEQ ID NO: 1677906 - RNA, 22 nt, Human
cuaggaaauauuuauuuuaaua

SEQ ID NO: 1677907 - RNA, 23 nt, Human
cuaauagacaauuuauuauggca

SEQ ID NO: 1677908 - RNA, 19 nt, Human
cuaauagacaauuuauuau

SEQ ID NO: 1677909 - RNA, 17 nt, Human
cuaauagacaauuuauu

SEQ ID NO: 1677910 - RNA, 14 nt, Human
cuaauaaagcugug

SEQ ID NO: 1677911 - RNA, 19 nt, Human
cuaaguaaaaccacagcag

SEQ ID NO: 1677912 - RNA, 14 nt, Human
cuaaguaaaaccac

SEQ ID NO: 1677913 - RNA, 18 nt, Human
cuaaguaaaaccacagca

SEQ ID NO: 1677914 - RNA, 14 nt, Human
cuaaggacuucuuu

SEQ ID NO: 1677915 - RNA, 15 nt, Human
cuaaggacuucuuua

SEQ ID NO: 1677916 - RNA, 16 nt, Human
cuaaggacuucuuuaa

SEQ ID NO: 1677917 - RNA, 22 nt, Human
cuaaggacuucuuuaauuuugg

SEQ ID NO: 1677918 - RNA, 22 nt, Human
cuaagcuauucaguaauaacuc

SEQ ID NO: 1677919 - RNA, 21 nt, Human
cuaagcuucacuguaaaauaa

SEQ ID NO: 1677920 - RNA, 22 nt, Human
cuaauuauacccccugcaaagc

SEQ ID NO: 1677921 - RNA, 22 nt, Human
cuaaugcgcaggcuggcccugc

SEQ ID NO: 1677922 - RNA, 23 nt, Human
cuaaugcgcaggcuggcccugcc

SEQ ID NO: 1677923 - RNA, 12 nt, Human
cuaaugggacac

SEQ ID NO: 1677924 - RNA, 13 nt, Human
cuaaugggacacu

SEQ ID NO: 1677925 - RNA, 15 nt, Human
cuaaugcgcaggcug

SEQ ID NO: 1677926 - RNA, 16 nt, Human
cuaaugcgcaggcugg

SEQ ID NO: 1677927 - RNA, 19 nt, Human
cuaaugcgcaggcuggccc

SEQ ID NO: 1677928 - RNA, 20 nt, Human
cuaaugcgcaggcuggcccu

SEQ ID NO: 1677929 - RNA, 20 nt, Human
cuaaucagcauucucacucc

SEQ ID NO: 1677930 - RNA, 21 nt, Human
cuaaucagcauucucacuccu

SEQ ID NO: 1677931 - RNA, 18 nt, Human
cuaauauguaacaagcca

SEQ ID NO: 1677932 - RNA, 15 nt, Human
cuaauuccacagcug

SEQ ID NO: 1677933 - RNA, 16 nt, Human
cuaauuccacagcugc

SEQ ID NO: 1677934 - RNA, 14 nt, Human
cuaauuccacagcu

SEQ ID NO: 1677935 - RNA, 21 nt, Human
cuacacaggggaaaagaggag

SEQ ID NO: 1677936 - RNA, 23 nt, Human
cuacacgagauacagaauuuuau

SEQ ID NO: 1677937 - RNA, 14 nt, Human
cuacacuaagagag

SEQ ID NO: 1677938 - RNA, 13 nt, Human
cguuuucaaaauu

SEQ ID NO: 1677939 - RNA, 12 nt, Human
cuaaacugcccc

SEQ ID NO: 1677940 - RNA, 13 nt, Human
cuaaacugccccc

SEQ ID NO: 1677941 - RNA, 22 nt, Human
cuaaaauggacuguggugacuu

SEQ ID NO: 1677942 - RNA, 21 nt, Human
cuaaaauggacuguggugacu

SEQ ID NO: 1677943 - RNA, 21 nt, Human
cuaaacugcccccucugcccu

SEQ ID NO: 1677944 - RNA, 17 nt, Human
cuaaauauauuuuaaga

SEQ ID NO: 1677945 - RNA, 21 nt, Human
cuaaaucuccaaaauaaaacu

SEQ ID NO: 1677946 - RNA, 22 nt, Human
cuaaaugaaaaucgugacaaca

SEQ ID NO: 1677947 - RNA, 20 nt, Human
cguuuguuccccaagacauu

SEQ ID NO: 1677948 - RNA, 23 nt, Human
cgggaggauguucugggacacag

SEQ ID NO: 1677949 - RNA, 20 nt, Human
cgggaggcagagguugcagu

SEQ ID NO: 1677950 - RNA, 12 nt, Human
cuaaccacgcug

SEQ ID NO: 1677951 - RNA, 14 nt, Human
cuaaccacgcugga

SEQ ID NO: 1677952 - RNA, 19 nt, Human
cuaaauucuuucauuuuag

SEQ ID NO: 1677953 - RNA, 19 nt, Human
cuaaauugacacuuaaaaa

SEQ ID NO: 1677954 - RNA, 16 nt, Human
cuaaauucaugcugcu

SEQ ID NO: 1677955 - RNA, 14 nt, Human
cuaagagagaauga

SEQ ID NO: 1677956 - RNA, 15 nt, Human
cuaagagagaaugag

SEQ ID NO: 1677957 - RNA, 13 nt, Human
cuaagagggaggg

SEQ ID NO: 1677958 - RNA, 15 nt, Human
cuaagagggagggag

SEQ ID NO: 1677959 - RNA, 22 nt, Human
cuaagagggagggagggcucca

SEQ ID NO: 1677960 - RNA, 23 nt, Human
cuaagagggagggagggcuccag

SEQ ID NO: 1677961 - RNA, 14 nt, Human
cccaucucuucugg

SEQ ID NO: 1677962 - RNA, 13 nt, Human
cccaguuguauuu

SEQ ID NO: 1677963 - RNA, 14 nt, Human
cccaguugggugga

SEQ ID NO: 1677964 - RNA, 19 nt, Human
cccaucucuacaaaaagca

SEQ ID NO: 1677965 - RNA, 12 nt, Human
cccaucugugaa

SEQ ID NO: 1677966 - RNA, 14 nt, Human
cccaugagccucag

SEQ ID NO: 1677967 - RNA, 18 nt, Human
cccauuauucaaaguugc

SEQ ID NO: 1677968 - RNA, 23 nt, Human
cccauuauucaaaguugccuaaa

SEQ ID NO: 1677969 - RNA, 16 nt, Human
ccccacccugccucac

SEQ ID NO: 1677970 - RNA, 15 nt, Human
ccccaccgcagacag

SEQ ID NO: 1677971 - RNA, 19 nt, Human
ccccaccgcagacaggacc

SEQ ID NO: 1677972 - RNA, 20 nt, Human
ccccuggcuuuucacugcug

SEQ ID NO: 1677973 - RNA, 22 nt, Human
ccccuggcuuuucacugcuggc

SEQ ID NO: 1677974 - RNA, 18 nt, Human
ccccuggcuuuucacugc

SEQ ID NO: 1677975 - RNA, 15 nt, Human
ccccuguucacucua

SEQ ID NO: 1677976 - RNA, 14 nt, Human
cccgacagccuggc

SEQ ID NO: 1677977 - RNA, 13 nt, Human
ccccuuccaugga

SEQ ID NO: 1677978 - RNA, 20 nt, Human
ccccuuccauggacuuuguu

SEQ ID NO: 1677979 - RNA, 15 nt, Human
cccgacagccuggca

SEQ ID NO: 1677980 - RNA, 18 nt, Human
cccgacagccuggcacag

SEQ ID NO: 1677981 - RNA, 20 nt, Human
cccgcccaggcuuagucacu

SEQ ID NO: 1677982 - RNA, 22 nt, Human
cccgcccaggcuuagucacuga

SEQ ID NO: 1677983 - RNA, 23 nt, Human
cccgcuaagagggagggagggcu

SEQ ID NO: 1677984 - RNA, 14 nt, Human
ccccugccucucug

SEQ ID NO: 1677985 - RNA, 15 nt, Human
ccccugccucucugc

SEQ ID NO: 1677986 - RNA, 16 nt, Human
ccccugccucucugca

SEQ ID NO: 1677987 - RNA, 17 nt, Human
ccccugccucucugcag

SEQ ID NO: 1677988 - RNA, 19 nt, Human
ccccugccucucugcaggu

SEQ ID NO: 1677989 - RNA, 13 nt, Human
ccccucugcccug

SEQ ID NO: 1677990 - RNA, 14 nt, Human
ccccucugcccugc

SEQ ID NO: 1677991 - RNA, 12 nt, Human
ccccucugcccu

SEQ ID NO: 1677992 - RNA, 17 nt, Human
ccccugcccggcugcgg

SEQ ID NO: 1677993 - RNA, 19 nt, Human
ccccugcccggcugcggaa

SEQ ID NO: 1677994 - RNA, 14 nt, Human
ccccugcugggugu

SEQ ID NO: 1677995 - RNA, 17 nt, Human
ccccugcuggguguggc

SEQ ID NO: 1677996 - RNA, 11 nt, Human
ccccugcuggu

SEQ ID NO: 1677997 - RNA, 13 nt, Human
ccccugcugguuc

SEQ ID NO: 1677998 - RNA, 15 nt, Human
ccccugcugguucag

SEQ ID NO: 1677999 - RNA, 20 nt, Human
ccccugcugguucaggguug

SEQ ID NO: 1678000 - RNA, 15 nt, Human
ccccuggaugcagcc

SEQ ID NO: 1678001 - RNA, 18 nt, Human
ccccuggaugcagccuca

SEQ ID NO: 1678002 - RNA, 19 nt, Human
ccccuggaugcagccucac

SEQ ID NO: 1678003 - RNA, 15 nt, Human
cccccacuggugaca

SEQ ID NO: 1678004 - RNA, 11 nt, Human
cccccacuggu

SEQ ID NO: 1678005 - RNA, 13 nt, Human
cccccacugguga

SEQ ID NO: 1678006 - RNA, 17 nt, Human
ccccaucauugguaccc

SEQ ID NO: 1678007 - RNA, 14 nt, Human
ccccauccucugua

SEQ ID NO: 1678008 - RNA, 24 nt, Human
cccccacccaagggccuggccuga

SEQ ID NO: 1678009 - RNA, 17 nt, Human
ccccauccucuguacag

SEQ ID NO: 1678010 - RNA, 13 nt, Human
cccccacccaagg

SEQ ID NO: 1678011 - RNA, 22 nt, Human
ccccauaauuuuuuuuuuccuu

SEQ ID NO: 1678012 - RNA, 14 nt, Human
ccccagugcccaca

SEQ ID NO: 1678013 - RNA, 15 nt, Human
ccccagugcccacag

SEQ ID NO: 1678014 - RNA, 16 nt, Human
ccccagugcccacagg

SEQ ID NO: 1678015 - RNA, 20 nt, Human
ccccagugcccacaggauca

SEQ ID NO: 1678016 - RNA, 15 nt, Human
ccccucaacaccucu

SEQ ID NO: 1678017 - RNA, 16 nt, Human
ccccucaacaccucug

SEQ ID NO: 1678018 - RNA, 23 nt, Human
ccccucaacucuccuccagaguc

SEQ ID NO: 1678019 - RNA, 12 nt, Human
cccccagccugc

SEQ ID NO: 1678020 - RNA, 12 nt, Human
cccccucuggcu

SEQ ID NO: 1678021 - RNA, 19 nt, Human
cccccucuggcuccagcug

SEQ ID NO: 1678022 - RNA, 21 nt, Human
cccccucuggcuccagcuggc

SEQ ID NO: 1678023 - RNA, 17 nt, Human
cccccugacaacacuca

SEQ ID NO: 1678024 - RNA, 21 nt, Human
cccccugcaaagcccagcuug

SEQ ID NO: 1678025 - RNA, 18 nt, Human
cccccugcaaagcccagc

SEQ ID NO: 1678026 - RNA, 19 nt, Human
cccccugcaaagcccagcu

SEQ ID NO: 1678027 - RNA, 19 nt, Human
cccccugacaacacucauu

SEQ ID NO: 1678028 - RNA, 20 nt, Human
ccccucauagcccucacccu

SEQ ID NO: 1678029 - RNA, 23 nt, Human
ccccuccaaucccaccaacccuc

SEQ ID NO: 1678030 - RNA, 16 nt, Human
ccccucagggucccug

SEQ ID NO: 1678031 - RNA, 15 nt, Human
ccccucccuucaacc

SEQ ID NO: 1678032 - RNA, 12 nt, Human
ccccuccaugug

SEQ ID NO: 1678033 - RNA, 22 nt, Human
ccccuccuccuggacuccugca

SEQ ID NO: 1678034 - RNA, 18 nt, Human
ccccuccuccuggacucc

SEQ ID NO: 1678035 - RNA, 15 nt, Human
ccccuccucucugcc

SEQ ID NO: 1678036 - RNA, 17 nt, Human
ccccuccucucugcccu

SEQ ID NO: 1678037 - RNA, 17 nt, Human
ccccuccucugcuugcc

SEQ ID NO: 1678038 - RNA, 14 nt, Human
ccccuccucugcuu

SEQ ID NO: 1678039 - RNA, 13 nt, Human
ccccuccucugcu

SEQ ID NO: 1678040 - RNA, 15 nt, Human
ccccucggagaagag

SEQ ID NO: 1678041 - RNA, 16 nt, Human
cccuggugcugccaca

SEQ ID NO: 1678042 - RNA, 13 nt, Human
cccugccucucug

SEQ ID NO: 1678043 - RNA, 14 nt, Human
cccugccucucugc

SEQ ID NO: 1678044 - RNA, 14 nt, Human
cccugccuccuuug

SEQ ID NO: 1678045 - RNA, 11 nt, Human
cccugccuccu

SEQ ID NO: 1678046 - RNA, 12 nt, Human
cccugaggccca

SEQ ID NO: 1678047 - RNA, 19 nt, Human
cccugcgggucacaggagg

SEQ ID NO: 1678048 - RNA, 21 nt, Human
cccugcgggucacaggaggga

SEQ ID NO: 1678049 - RNA, 15 nt, Human
cccugccucucugca

SEQ ID NO: 1678050 - RNA, 16 nt, Human
cccugccucucugcag

SEQ ID NO: 1678051 - RNA, 23 nt, Human
cccugcugagucccaggcugagc

SEQ ID NO: 1678052 - RNA, 21 nt, Human
cccugcugagucccaggcuga

SEQ ID NO: 1678053 - RNA, 22 nt, Human
cccugcucuccgaccagacacc

SEQ ID NO: 1678054 - RNA, 21 nt, Human
cccugcucuccgaccagacac

SEQ ID NO: 1678055 - RNA, 15 nt, Human
cccuggugcugccac

SEQ ID NO: 1678056 - RNA, 13 nt, Human
cccuguucuggca

SEQ ID NO: 1678057 - RNA, 14 nt, Human
cccuguucuggcag

SEQ ID NO: 1678058 - RNA, 19 nt, Human
cccuguuuguuucugaaag

SEQ ID NO: 1678059 - RNA, 17 nt, Human
cccuuaccugccaggaa

SEQ ID NO: 1678060 - RNA, 20 nt, Human
cccuuaccugccaggaagcc

SEQ ID NO: 1678061 - RNA, 23 nt, Human
cccuuaccugccaggaagccagc

SEQ ID NO: 1678062 - RNA, 14 nt, Human
cccugcuuucagau

SEQ ID NO: 1678063 - RNA, 21 nt, Human
cccuggugaccagcaccaucu

SEQ ID NO: 1678064 - RNA, 13 nt, Human
cccuggugcugcc

SEQ ID NO: 1678065 - RNA, 14 nt, Human
cccuggugcugcca

SEQ ID NO: 1678066 - RNA, 21 nt, Human
cccugguggcagcucaccucu

SEQ ID NO: 1678067 - RNA, 13 nt, Human
cccugguggcagu

SEQ ID NO: 1678068 - RNA, 14 nt, Human
cccugguggcagug

SEQ ID NO: 1678069 - RNA, 15 nt, Human
cccugguggcagugg

SEQ ID NO: 1678070 - RNA, 14 nt, Human
cccuucaaccauuc

SEQ ID NO: 1678071 - RNA, 18 nt, Human
cccuucaaccauucccca

SEQ ID NO: 1678072 - RNA, 20 nt, Human
cccuuccaugucgccucugc

SEQ ID NO: 1678073 - RNA, 12 nt, Human
cccuuccaugga

SEQ ID NO: 1678074 - RNA, 23 nt, Human
cccuuagcagggaaacagcuaau

SEQ ID NO: 1678075 - RNA, 20 nt, Human
cccuuagaaguuuguuguga

SEQ ID NO: 1678076 - RNA, 14 nt, Human
cccuuagcagggaa

SEQ ID NO: 1678077 - RNA, 15 nt, Human
cccuuacgugagucc

SEQ ID NO: 1678078 - RNA, 17 nt, Human
cccuuacgugaguccug

SEQ ID NO: 1678079 - RNA, 15 nt, Human
cccuugaugaagaag

SEQ ID NO: 1678080 - RNA, 15 nt, Human
cccgcucagcccucc

SEQ ID NO: 1678081 - RNA, 12 nt, Human
cccgcucagccc

SEQ ID NO: 1678082 - RNA, 13 nt, Human
cccgcucagcccu

SEQ ID NO: 1678083 - RNA, 14 nt, Human
cccgcucagcccuc

SEQ ID NO: 1678084 - RNA, 23 nt, Human
cccucccucuuucccucccuucc

SEQ ID NO: 1678085 - RNA, 14 nt, Human
cccucccugccccu

SEQ ID NO: 1678086 - RNA, 12 nt, Human
cccucuuucccu

SEQ ID NO: 1678087 - RNA, 17 nt, Human
cccucuuucccucccuu

SEQ ID NO: 1678088 - RNA, 20 nt, Human
cccucuuucccucccuuccu

SEQ ID NO: 1678089 - RNA, 12 nt, Human
cccucuggcucc

SEQ ID NO: 1678090 - RNA, 16 nt, Human
cccucuggcuccagcu

SEQ ID NO: 1678091 - RNA, 17 nt, Human
cccucuggcuccagcug

SEQ ID NO: 1678092 - RNA, 22 nt, Human
cccucuggcuccagcuggccgg

SEQ ID NO: 1678093 - RNA, 20 nt, Human
cccucuguucugcacacagc

SEQ ID NO: 1678094 - RNA, 21 nt, Human
cccucuguucugcacacagca

SEQ ID NO: 1678095 - RNA, 12 nt, Human
cccucuggggcu

SEQ ID NO: 1678096 - RNA, 22 nt, Human
cccucuccugggcagcugccuc

SEQ ID NO: 1678097 - RNA, 21 nt, Human
cccucuccugggcagcugccu

SEQ ID NO: 1678098 - RNA, 20 nt, Human
cccucuccugggcagcugcc

SEQ ID NO: 1678099 - RNA, 12 nt, Human
cccucugcccug

SEQ ID NO: 1678100 - RNA, 13 nt, Human
cccucugcccugc

SEQ ID NO: 1678101 - RNA, 14 nt, Human
cccucugcccugcg

SEQ ID NO: 1678102 - RNA, 19 nt, Human
cccucugcccacucccugc

SEQ ID NO: 1678103 - RNA, 15 nt, Human
cccucugcccacucc

SEQ ID NO: 1678104 - RNA, 18 nt, Human
cccucugcccacucccug

SEQ ID NO: 1678105 - RNA, 11 nt, Human
cccucugccca

SEQ ID NO: 1678106 - RNA, 23 nt, Human
cccucuccugggcagcugccucc

SEQ ID NO: 1678107 - RNA, 18 nt, Human
ccgagauagccaaggcca

SEQ ID NO: 1678108 - RNA, 21 nt, Human
ccgagauugcaccacugcacu

SEQ ID NO: 1678109 - RNA, 15 nt, Human
ccgagauugcaccac

SEQ ID NO: 1678110 - RNA, 19 nt, Human
ccgagauugcaccacugca

SEQ ID NO: 1678111 - RNA, 15 nt, Human
ccgcagacaggacca

SEQ ID NO: 1678112 - RNA, 19 nt, Human
ccgagucucuucuccacug

SEQ ID NO: 1678113 - RNA, 20 nt, Human
ccgagucucuucuccacugg

SEQ ID NO: 1678114 - RNA, 21 nt, Human
ccgagucucuucuccacugga

SEQ ID NO: 1678115 - RNA, 23 nt, Human
ccgcacugggcuuggggaccaga

SEQ ID NO: 1678116 - RNA, 19 nt, Human
ccgagcuuugaaaauucag

SEQ ID NO: 1678117 - RNA, 20 nt, Human
ccgaguagcugagauuauag

SEQ ID NO: 1678118 - RNA, 14 nt, Human
ccgagucucuucuc

SEQ ID NO: 1678119 - RNA, 16 nt, Human
ccgagucucuucucca

SEQ ID NO: 1678120 - RNA, 18 nt, Human
ccgagucucuucuccacu

SEQ ID NO: 1678121 - RNA, 14 nt, Human
ccgaguagcuggga

SEQ ID NO: 1678122 - RNA, 16 nt, Human
ccgaguagcugggacu

SEQ ID NO: 1678123 - RNA, 15 nt, Human
ccggaggggccuggc

SEQ ID NO: 1678124 - RNA, 16 nt, Human
ccggaggggccuggca

SEQ ID NO: 1678125 - RNA, 14 nt, Human
ccggaggggccugg

SEQ ID NO: 1678126 - RNA, 14 nt, Human
ccgcuggggccagu

SEQ ID NO: 1678127 - RNA, 11 nt, Human
ccgcuggggcc

SEQ ID NO: 1678128 - RNA, 18 nt, Human
ccgugaggccagagacac

SEQ ID NO: 1678129 - RNA, 22 nt, Human
ccgggcucugccucccaucacc

SEQ ID NO: 1678130 - RNA, 18 nt, Human
ccgggcucugccucccau

SEQ ID NO: 1678131 - RNA, 14 nt, Human
ccgggcucugccuc

SEQ ID NO: 1678132 - RNA, 15 nt, Human
ccgggcucugccucc

SEQ ID NO: 1678133 - RNA, 16 nt, Human
ccggcuccaggcuccu

SEQ ID NO: 1678134 - RNA, 21 nt, Human
ccggcuccaggcuccuuuagc

SEQ ID NO: 1678135 - RNA, 22 nt, Human
ccgggcacucagaagacacuga

SEQ ID NO: 1678136 - RNA, 13 nt, Human
ccgggccacagag

SEQ ID NO: 1678137 - RNA, 14 nt, Human
ccguggcuucccgc

SEQ ID NO: 1678138 - RNA, 19 nt, Human
ccuaccgagucucuucucc

SEQ ID NO: 1678139 - RNA, 20 nt, Human
ccuaccgagucucuucucca

SEQ ID NO: 1678140 - RNA, 21 nt, Human
ccuaccgagucucuucuccac

SEQ ID NO: 1678141 - RNA, 16 nt, Human
ccuaccgagucucuuc

SEQ ID NO: 1678142 - RNA, 17 nt, Human
ccuaccgagucucuucu

SEQ ID NO: 1678143 - RNA, 21 nt, Human
ccuacaguugaaaaacagcug

SEQ ID NO: 1678144 - RNA, 11 nt, Human
ccguggcuucc

SEQ ID NO: 1678145 - RNA, 15 nt, Human
ccuaacgaaguaucc

SEQ ID NO: 1678146 - RNA, 19 nt, Human
ccagccugagcgacaguga

SEQ ID NO: 1678147 - RNA, 23 nt, Human
ccagccuugaccauucuccaccu

SEQ ID NO: 1678148 - RNA, 13 nt, Human
ccagcgagcccug

SEQ ID NO: 1678149 - RNA, 13 nt, Human
ccagccuggguga

SEQ ID NO: 1678150 - RNA, 19 nt, Human
ccagcaggcucucaggcca

SEQ ID NO: 1678151 - RNA, 20 nt, Human
ccagcaggcucucaggccag

SEQ ID NO: 1678152 - RNA, 21 nt, Human
ccagcaggcucucaggccagc

SEQ ID NO: 1678153 - RNA, 23 nt, Human
ccagcaggcucucaggccagcug

SEQ ID NO: 1678154 - RNA, 16 nt, Human
ccagcccacuucugcc

SEQ ID NO: 1678155 - RNA, 17 nt, Human
ccagcccacuucugcca

SEQ ID NO: 1678156 - RNA, 17 nt, Human
ccagccgagauagccaa

SEQ ID NO: 1678157 - RNA, 20 nt, Human
ccagccgagauagccaaggc

SEQ ID NO: 1678158 - RNA, 22 nt, Human
ccagccgagauagccaaggcca

SEQ ID NO: 1678159 - RNA, 23 nt, Human
ccagccgagauagccaaggccaa

SEQ ID NO: 1678160 - RNA, 19 nt, Human
ccagccccaaaacucuccu

SEQ ID NO: 1678161 - RNA, 24 nt, Human
ccagauuuuuuacagcugccugca

SEQ ID NO: 1678162 - RNA, 17 nt, Human
ccagcaccaucucuccu

SEQ ID NO: 1678163 - RNA, 18 nt, Human
ccagcaccaucucuccuc

SEQ ID NO: 1678164 - RNA, 16 nt, Human
ccagcaggcucucagg

SEQ ID NO: 1678165 - RNA, 17 nt, Human
ccagcaggcucucaggc

SEQ ID NO: 1678166 - RNA, 18 nt, Human
ccagcaggcucucaggcc

SEQ ID NO: 1678167 - RNA, 17 nt, Human
ccagcaagugagagcug

SEQ ID NO: 1678168 - RNA, 18 nt, Human
ccagcaagugagagcugg

SEQ ID NO: 1678169 - RNA, 19 nt, Human
ccagcaagugagagcuggg

SEQ ID NO: 1678170 - RNA, 14 nt, Human
ccagagcccaccuu

SEQ ID NO: 1678171 - RNA, 14 nt, Human
ccagauugcaacag

SEQ ID NO: 1678172 - RNA, 16 nt, Human
ccagauugcaacaggc

SEQ ID NO: 1678173 - RNA, 23 nt, Human
ccagauugcaacaggcugggcuu

SEQ ID NO: 1678174 - RNA, 18 nt, Human
ccagauugcaacaggcug

SEQ ID NO: 1678175 - RNA, 22 nt, Human
ccagauugcaacaggcugggcu

SEQ ID NO: 1678176 - RNA, 18 nt, Human
ccagauuucacucuccuu

SEQ ID NO: 1678177 - RNA, 19 nt, Human
ccagauuucacucuccuug

SEQ ID NO: 1678178 - RNA, 15 nt, Human
ccagauuucacucuc

SEQ ID NO: 1678179 - RNA, 18 nt, Human
ccagagaguggcuccucc

SEQ ID NO: 1678180 - RNA, 22 nt, Human
ccagagaguggcuccucccggu

SEQ ID NO: 1678181 - RNA, 15 nt, Human
ccagagaguggcucc

SEQ ID NO: 1678182 - RNA, 16 nt, Human
ccagagaguggcuccu

SEQ ID NO: 1678183 - RNA, 14 nt, Human
ccagagaguggcuc

SEQ ID NO: 1678184 - RNA, 16 nt, Human
ccagacccggcugcgu

SEQ ID NO: 1678185 - RNA, 14 nt, Human
ccagacccggcugc

SEQ ID NO: 1678186 - RNA, 15 nt, Human
ccagacccggcugcg

SEQ ID NO: 1678187 - RNA, 22 nt, Human
ccagacacauguccaagaagcc

SEQ ID NO: 1678188 - RNA, 17 nt, Human
ccagacacauguccaag

SEQ ID NO: 1678189 - RNA, 20 nt, Human
ccagacacauguccaagaag

SEQ ID NO: 1678190 - RNA, 24 nt, Human
ccagaccccuggcuuuucacugcu

SEQ ID NO: 1678191 - RNA, 14 nt, Human
ccagacaucaacag

SEQ ID NO: 1678192 - RNA, 18 nt, Human
ccagaaaccuuuguuugc

SEQ ID NO: 1678193 - RNA, 22 nt, Human
ccagaagaaaauagugguguga

SEQ ID NO: 1678194 - RNA, 19 nt, Human
ccacugugccaugugccag

SEQ ID NO: 1678195 - RNA, 15 nt, Human
ccacugugccaugug

SEQ ID NO: 1678196 - RNA, 16 nt, Human
ccacugugccaugugc

SEQ ID NO: 1678197 - RNA, 13 nt, Human
ccacugccucuuc

SEQ ID NO: 1678198 - RNA, 16 nt, Human
ccacugccucuuccuc

SEQ ID NO: 1678199 - RNA, 14 nt, Human
ccaccuucccaugc

SEQ ID NO: 1678200 - RNA, 21 nt, Human
ccacugcaucguuucaucuuc

SEQ ID NO: 1678201 - RNA, 23 nt, Human
ccacugcaucguuucaucuucca

SEQ ID NO: 1678202 - RNA, 22 nt, Human
ccacugcuuuuggucuguguga

SEQ ID NO: 1678203 - RNA, 21 nt, Human
ccacugccuucgauacaccgg

SEQ ID NO: 1678204 - RNA, 20 nt, Human
ccacugcuuuuggucugugu

SEQ ID NO: 1678205 - RNA, 12 nt, Human
ccacugcucugg

SEQ ID NO: 1678206 - RNA, 13 nt, Human
ccacugcucuggu

SEQ ID NO: 1678207 - RNA, 15 nt, Human
ccacugcucugguua

SEQ ID NO: 1678208 - RNA, 14 nt, Human
ccacugugaagaga

SEQ ID NO: 1678209 - RNA, 15 nt, Human
ccacugugaagagaa

SEQ ID NO: 1678210 - RNA, 23 nt, Human
ccacuggugacaugucuuuucuu

SEQ ID NO: 1678211 - RNA, 15 nt, Human
ccacugguucuucuu

SEQ ID NO: 1678212 - RNA, 13 nt, Human
ccaccuuggcuca

SEQ ID NO: 1678213 - RNA, 14 nt, Human
ccacccuccuuuca

SEQ ID NO: 1678214 - RNA, 19 nt, Human
ccacccccacccaagggcc

SEQ ID NO: 1678215 - RNA, 14 nt, Human
ccaccuggccucug

SEQ ID NO: 1678216 - RNA, 13 nt, Human
ccaccuggccucu

SEQ ID NO: 1678217 - RNA, 20 nt, Human
ccaccuggccucugcacucc

SEQ ID NO: 1678218 - RNA, 13 nt, Human
ccaccugccaggg

SEQ ID NO: 1678219 - RNA, 14 nt, Human
ccaccugccaggga

SEQ ID NO: 1678220 - RNA, 15 nt, Human
ccaccugccagggac

SEQ ID NO: 1678221 - RNA, 16 nt, Human
ccaccugccagggaca

SEQ ID NO: 1678222 - RNA, 14 nt, Human
ccaccucucucacu

SEQ ID NO: 1678223 - RNA, 16 nt, Human
ccaccucucucacucc

SEQ ID NO: 1678224 - RNA, 19 nt, Human
ccaccucucucacuccuug

SEQ ID NO: 1678225 - RNA, 20 nt, Human
ccaccucucucacuccuuga

SEQ ID NO: 1678226 - RNA, 21 nt, Human
ccaccucccugcaauaaaaug

SEQ ID NO: 1678227 - RNA, 19 nt, Human
ccaccucccugcaauaaaa

SEQ ID NO: 1678228 - RNA, 11 nt, Human
ccacccugcuc

SEQ ID NO: 1678229 - RNA, 12 nt, Human
ccacccugcucu

SEQ ID NO: 1678230 - RNA, 15 nt, Human
ccaccucccugcaau

SEQ ID NO: 1678231 - RNA, 14 nt, Human
cccacgcuggagug

SEQ ID NO: 1678232 - RNA, 16 nt, Human
cccaccuuggcugcag

SEQ ID NO: 1678233 - RNA, 17 nt, Human
cccacgcccccacuggu

SEQ ID NO: 1678234 - RNA, 19 nt, Human
cccacgcccccacugguga

SEQ ID NO: 1678235 - RNA, 15 nt, Human
cccaccuuggcucaa

SEQ ID NO: 1678236 - RNA, 22 nt, Human
cccaccuuggcucaaguccucu

SEQ ID NO: 1678237 - RNA, 14 nt, Human
cccaccuuggcugc

SEQ ID NO: 1678238 - RNA, 15 nt, Human
cccaccuuggcugca

SEQ ID NO: 1678239 - RNA, 12 nt, Human
cccaccucagcc

SEQ ID NO: 1678240 - RNA, 14 nt, Human
cccaccucagccuc

SEQ ID NO: 1678241 - RNA, 15 nt, Human
cccaccucagccucc

SEQ ID NO: 1678242 - RNA, 17 nt, Human
cccaccucagccucccg

SEQ ID NO: 1678243 - RNA, 19 nt, Human
cccaccucucucacuccuu

SEQ ID NO: 1678244 - RNA, 12 nt, Human
cccaccuuggcu

SEQ ID NO: 1678245 - RNA, 21 nt, Human
cccaccucagccucccaaagu

SEQ ID NO: 1678246 - RNA, 13 nt, Human
cccaccucucuca

SEQ ID NO: 1678247 - RNA, 14 nt, Human
cccaccucucucac

SEQ ID NO: 1678248 - RNA, 17 nt, Human
cccaccucucucacucc

SEQ ID NO: 1678249 - RNA, 20 nt, Human
ccauuuugcugucccuuuuc

SEQ ID NO: 1678250 - RNA, 21 nt, Human
ccauuuuguauuuuacuaaua

SEQ ID NO: 1678251 - RNA, 12 nt, Human
cccaagggccug

SEQ ID NO: 1678252 - RNA, 14 nt, Human
cccaagggccuggc

SEQ ID NO: 1678253 - RNA, 17 nt, Human
cccaagggccuggccug

SEQ ID NO: 1678254 - RNA, 16 nt, Human
cccaagggccuggccu

SEQ ID NO: 1678255 - RNA, 19 nt, Human
cccacauagugaugguucc

SEQ ID NO: 1678256 - RNA, 16 nt, Human
cccacaggcccuuccu

SEQ ID NO: 1678257 - RNA, 18 nt, Human
cccacaggcccuuccucu

SEQ ID NO: 1678258 - RNA, 17 nt, Human
cccacaggaucagucug

SEQ ID NO: 1678259 - RNA, 13 nt, Human
cccacaggaucag

SEQ ID NO: 1678260 - RNA, 11 nt, Human
ccauuauucaa

SEQ ID NO: 1678261 - RNA, 18 nt, Human
ccauguuuuguuuacggu

SEQ ID NO: 1678262 - RNA, 14 nt, Human
ccauucuccaccug

SEQ ID NO: 1678263 - RNA, 13 nt, Human
ccauuuggaaauc

SEQ ID NO: 1678264 - RNA, 13 nt, Human
ccauuugcuccuu

SEQ ID NO: 1678265 - RNA, 16 nt, Human
ccauucugccugccca

SEQ ID NO: 1678266 - RNA, 15 nt, Human
ccauucugccugccc

SEQ ID NO: 1678267 - RNA, 21 nt, Human
ccaggcugggucgcccuggac

SEQ ID NO: 1678268 - RNA, 22 nt, Human
ccaggcugggucgcccuggacu

SEQ ID NO: 1678269 - RNA, 23 nt, Human
ccaggcugggucgcccuggacug

SEQ ID NO: 1678270 - RNA, 24 nt, Human
ccaggcugggucgcccuggacugu

SEQ ID NO: 1678271 - RNA, 12 nt, Human
ccaggcuggguc

SEQ ID NO: 1678272 - RNA, 16 nt, Human
ccaggcugggucgccc

SEQ ID NO: 1678273 - RNA, 15 nt, Human
ccaggcccucugccc

SEQ ID NO: 1678274 - RNA, 16 nt, Human
ccaggcccucugccca

SEQ ID NO: 1678275 - RNA, 14 nt, Human
ccaggcuggucuca

SEQ ID NO: 1678276 - RNA, 21 nt, Human
ccaggcuuagucacugagaca

SEQ ID NO: 1678277 - RNA, 22 nt, Human
ccaggcuuagucacugagacag

SEQ ID NO: 1678278 - RNA, 23 nt, Human
ccaggcuuagucacugagacagc

SEQ ID NO: 1678279 - RNA, 19 nt, Human
ccaggccccugccacccug

SEQ ID NO: 1678280 - RNA, 13 nt, Human
ccaggcccucugc

SEQ ID NO: 1678281 - RNA, 14 nt, Human
ccaggcccucugcc

SEQ ID NO: 1678282 - RNA, 12 nt, Human
ccaggccagagg

SEQ ID NO: 1678283 - RNA, 14 nt, Human
ccaggccccugcca

SEQ ID NO: 1678284 - RNA, 15 nt, Human
ccaggccccugccac

SEQ ID NO: 1678285 - RNA, 16 nt, Human
ccaggccccugccacc

SEQ ID NO: 1678286 - RNA, 15 nt, Human
ccaggaggccagccu

SEQ ID NO: 1678287 - RNA, 18 nt, Human
ccaggaggccagccuuga

SEQ ID NO: 1678288 - RNA, 20 nt, Human
ccaggaggccagccuugacc

SEQ ID NO: 1678289 - RNA, 23 nt, Human
ccagugcccacaggaucagucug

SEQ ID NO: 1678290 - RNA, 20 nt, Human
ccagguagaggguguguaag

SEQ ID NO: 1678291 - RNA, 19 nt, Human
ccauauuaccacagacaua

SEQ ID NO: 1678292 - RNA, 16 nt, Human
ccaucaagccaccaac

SEQ ID NO: 1678293 - RNA, 13 nt, Human
ccaucaagccacc

SEQ ID NO: 1678294 - RNA, 14 nt, Human
ccaucaagccacca

SEQ ID NO: 1678295 - RNA, 12 nt, Human
ccaucaugucug

SEQ ID NO: 1678296 - RNA, 13 nt, Human
ccaucaugucugg

SEQ ID NO: 1678297 - RNA, 12 nt, Human
ccaucauugaaa

SEQ ID NO: 1678298 - RNA, 15 nt, Human
ccauaugccugggca

SEQ ID NO: 1678299 - RNA, 13 nt, Human
ccauaugccuggg

SEQ ID NO: 1678300 - RNA, 14 nt, Human
ccagugugacaagg

SEQ ID NO: 1678301 - RNA, 23 nt, Human
ccagugugacaaggauugcuacu

SEQ ID NO: 1678302 - RNA, 14 nt, Human
ccaucucacacaug

SEQ ID NO: 1678303 - RNA, 15 nt, Human
ccaucucacacauga

SEQ ID NO: 1678304 - RNA, 17 nt, Human
ccaucucacacaugagc

SEQ ID NO: 1678305 - RNA, 18 nt, Human
ccaucucacacaugagca

SEQ ID NO: 1678306 - RNA, 20 nt, Human
ccaucucacacaugagcauc

SEQ ID NO: 1678307 - RNA, 21 nt, Human
ccaucucacacaugagcauca

SEQ ID NO: 1678308 - RNA, 17 nt, Human
ccaucucaccuccugcu

SEQ ID NO: 1678309 - RNA, 15 nt, Human
ccaucucuccuccuu

SEQ ID NO: 1678310 - RNA, 20 nt, Human
ccauccugaggcuccacuug

SEQ ID NO: 1678311 - RNA, 14 nt, Human
ccaucauugaaauc

SEQ ID NO: 1678312 - RNA, 16 nt, Human
ccaucauugaaaucuu

SEQ ID NO: 1678313 - RNA, 17 nt, Human
ccaucauugaaaucuuu

SEQ ID NO: 1678314 - RNA, 18 nt, Human
ccauccugaggcuccacu

SEQ ID NO: 1678315 - RNA, 22 nt, Human
ccaguaaaugggggugcauuug

SEQ ID NO: 1678316 - RNA, 21 nt, Human
ccaguaaaugggggugcauuu

SEQ ID NO: 1678317 - RNA, 20 nt, Human
ccaguaaaugggggugcauu

SEQ ID NO: 1678318 - RNA, 13 nt, Human
ccagguuuaagcu

SEQ ID NO: 1678319 - RNA, 16 nt, Human
ccagguuucuaugugu

SEQ ID NO: 1678320 - RNA, 16 nt, Human
ccagguggccacucca

SEQ ID NO: 1678321 - RNA, 21 nt, Human
ccagguggccacuccagaccc

SEQ ID NO: 1678322 - RNA, 12 nt, Human
ccaggugccagu

SEQ ID NO: 1678323 - RNA, 13 nt, Human
ccaggugccaguu

SEQ ID NO: 1678324 - RNA, 13 nt, Human
ccagugaggcucu

SEQ ID NO: 1678325 - RNA, 23 nt, Human
ccaguaaaugggggugcauuuga

SEQ ID NO: 1678326 - RNA, 14 nt, Human
cacagugcaucuca

SEQ ID NO: 1678327 - RNA, 19 nt, Human
cacagugaucaaguuauuu

SEQ ID NO: 1678328 - RNA, 19 nt, Human
cacaggcagguccaggguu

SEQ ID NO: 1678329 - RNA, 22 nt, Human
cacagugagucgaggacaggga

SEQ ID NO: 1678330 - RNA, 13 nt, Human
cacaguccuuacc

SEQ ID NO: 1678331 - RNA, 15 nt, Human
cacaguccuuaccag

SEQ ID NO: 1678332 - RNA, 21 nt, Human
cacaguccuuaccagcagagc

SEQ ID NO: 1678333 - RNA, 22 nt, Human
cacaguccuuaccagcagagca

SEQ ID NO: 1678334 - RNA, 17 nt, Human
cacagugcaucucagcc

SEQ ID NO: 1678335 - RNA, 14 nt, Human
cacaguucucuccu

SEQ ID NO: 1678336 - RNA, 15 nt, Human
cacaguucucuccuu

SEQ ID NO: 1678337 - RNA, 19 nt, Human
cacaggagggagggggaag

SEQ ID NO: 1678338 - RNA, 21 nt, Human
cacaggagggagggggaaggc

SEQ ID NO: 1678339 - RNA, 14 nt, Human
cacaggagggaggg

SEQ ID NO: 1678340 - RNA, 11 nt, Human
cacaggcaggu

SEQ ID NO: 1678341 - RNA, 14 nt, Human
cacaggcaggucca

SEQ ID NO: 1678342 - RNA, 15 nt, Human
cacaggcagguccag

SEQ ID NO: 1678343 - RNA, 21 nt, Human
cacagcuucauuuccuguguc

SEQ ID NO: 1678344 - RNA, 22 nt, Human
cacagcuucauuuccugugucu

SEQ ID NO: 1678345 - RNA, 22 nt, Human
cacagcugggguggggaccuca

SEQ ID NO: 1678346 - RNA, 23 nt, Human
cacagcugggguggggaccucag

SEQ ID NO: 1678347 - RNA, 21 nt, Human
cacauagugaugguuccccug

SEQ ID NO: 1678348 - RNA, 16 nt, Human
cacaguuuucugagaa

SEQ ID NO: 1678349 - RNA, 17 nt, Human
cacaguuuucugagaaa

SEQ ID NO: 1678350 - RNA, 19 nt, Human
cacaguuuucugagaaaga

SEQ ID NO: 1678351 - RNA, 20 nt, Human
cacaguuuucugagaaagac

SEQ ID NO: 1678352 - RNA, 14 nt, Human
caaaaauauuuuau

SEQ ID NO: 1678353 - RNA, 15 nt, Human
caaaaauauuuuaug

SEQ ID NO: 1678354 - RNA, 17 nt, Human
caaaaauauuuuaugau

SEQ ID NO: 1678355 - RNA, 21 nt, Human
caaaaauauuuuaugauccag

SEQ ID NO: 1678356 - RNA, 22 nt, Human
caaaaauauuuuaugauccagc

SEQ ID NO: 1678357 - RNA, 23 nt, Human
caaaaauauuuuaugauccagca

SEQ ID NO: 1678358 - RNA, 19 nt, Human
caaaaaucucaauauuuca

SEQ ID NO: 1678359 - RNA, 23 nt, Human
caaaacucuccucugcugcuggc

SEQ ID NO: 1678360 - RNA, 22 nt, Human
caaaacucuccucugcugcugg

SEQ ID NO: 1678361 - RNA, 20 nt, Human
caaaacucuccucugcugcu

SEQ ID NO: 1678362 - RNA, 21 nt, Human
caaaacucuccucugcugcug

SEQ ID NO: 1678363 - RNA, 17 nt, Human
caaaauaaaaaugaggu

SEQ ID NO: 1678364 - RNA, 23 nt, Human
caaaacuucagacauagaauuaa

SEQ ID NO: 1678365 - RNA, 19 nt, Human
caaaaaccaguauuguaca

SEQ ID NO: 1678366 - RNA, 20 nt, Human
caaaaaccaguauuguacaa

SEQ ID NO: 1678367 - RNA, 18 nt, Human
caaaaaccaguauuguac

SEQ ID NO: 1678368 - RNA, 13 nt, Human
caaaaaggcagga

SEQ ID NO: 1678369 - RNA, 20 nt, Human
caaaaacauggccuuugcuu

SEQ ID NO: 1678370 - RNA, 15 nt, Human
caaaaacacagcaag

SEQ ID NO: 1678371 - RNA, 17 nt, Human
caaaaacacagcaaggg

SEQ ID NO: 1678372 - RNA, 13 nt, Human
caaaaacacagca

SEQ ID NO: 1678373 - RNA, 14 nt, Human
caaaaacacagcaa

SEQ ID NO: 1678374 - RNA, 22 nt, Human
auuuugggguacccacugcucu

SEQ ID NO: 1678375 - RNA, 23 nt, Human
auuuugggguacccacugcucug

SEQ ID NO: 1678376 - RNA, 16 nt, Human
caaaaaaugcuugcuu

SEQ ID NO: 1678377 - RNA, 21 nt, Human
auuuugggguacccacugcuc

SEQ ID NO: 1678378 - RNA, 13 nt, Human
auuuuccugaaaa

SEQ ID NO: 1678379 - RNA, 21 nt, Human
caaauacgugggcauucaaau

SEQ ID NO: 1678380 - RNA, 22 nt, Human
caaauacgugggcauucaaaug

SEQ ID NO: 1678381 - RNA, 20 nt, Human
caaauacgugggcauucaaa

SEQ ID NO: 1678382 - RNA, 23 nt, Human
caaagugcugggauuacaggugu

SEQ ID NO: 1678383 - RNA, 19 nt, Human
caaagugcugggauuacag

SEQ ID NO: 1678384 - RNA, 19 nt, Human
caaaggguaucaggugcug

SEQ ID NO: 1678385 - RNA, 19 nt, Human
caaauaugcaaagcacuga

SEQ ID NO: 1678386 - RNA, 21 nt, Human
caaauaugcaaagcacugacu

SEQ ID NO: 1678387 - RNA, 15 nt, Human
caaaugucuauaaac

SEQ ID NO: 1678388 - RNA, 14 nt, Human
caaaugucuauaaa

SEQ ID NO: 1678389 - RNA, 14 nt, Human
caaauuucuaaauc

SEQ ID NO: 1678390 - RNA, 12 nt, Human
caaauuucuaaa

SEQ ID NO: 1678391 - RNA, 11 nt, Human
caaauuucuaa

SEQ ID NO: 1678392 - RNA, 21 nt, Human
caaauuguaagcaugcacaaa

SEQ ID NO: 1678393 - RNA, 15 nt, Human
caaauugugugaaag

SEQ ID NO: 1678394 - RNA, 20 nt, Human
caaacccuucagugccaaaa

SEQ ID NO: 1678395 - RNA, 15 nt, Human
caaacacauacagga

SEQ ID NO: 1678396 - RNA, 16 nt, Human
caaaauuuuuucucua

SEQ ID NO: 1678397 - RNA, 21 nt, Human
caaaauuuuuucucuaggaaa

SEQ ID NO: 1678398 - RNA, 22 nt, Human
caaaauuuuuucucuaggaaau

SEQ ID NO: 1678399 - RNA, 14 nt, Human
caaaauaaaacuuu

SEQ ID NO: 1678400 - RNA, 12 nt, Human
caaaauaaaacu

SEQ ID NO: 1678401 - RNA, 15 nt, Human
caaaauguaggguua

SEQ ID NO: 1678402 - RNA, 16 nt, Human
caaaauuguuacaaau

SEQ ID NO: 1678403 - RNA, 17 nt, Human
caaagccuccuccagcc

SEQ ID NO: 1678404 - RNA, 18 nt, Human
caaagccuccuccagccg

SEQ ID NO: 1678405 - RNA, 17 nt, Human
caaacucaccugccccu

SEQ ID NO: 1678406 - RNA, 14 nt, Human
caaaggaagcacau

SEQ ID NO: 1678407 - RNA, 16 nt, Human
caaaggguaucaggug

SEQ ID NO: 1678408 - RNA, 18 nt, Human
caaaggguaucaggugcu

SEQ ID NO: 1678409 - RNA, 13 nt, Human
caaagcuaggccu

SEQ ID NO: 1678410 - RNA, 14 nt, Human
caaagcuaggccug

SEQ ID NO: 1678411 - RNA, 19 nt, Human
caaagcuaggccuggccag

SEQ ID NO: 1678412 - RNA, 15 nt, Human
caaagcuaggccugg

SEQ ID NO: 1678413 - RNA, 12 nt, Human
caaaggaagcac

SEQ ID NO: 1678414 - RNA, 13 nt, Human
caaaggaagcaca

SEQ ID NO: 1678415 - RNA, 14 nt, Human
caauaggaaaaacu

SEQ ID NO: 1678416 - RNA, 14 nt, Human
caauguucucucuu

SEQ ID NO: 1678417 - RNA, 15 nt, Human
caaugugauaaaacc

SEQ ID NO: 1678418 - RNA, 17 nt, Human
caaugugauaaaacccc

SEQ ID NO: 1678419 - RNA, 14 nt, Human
caauucuccugccu

SEQ ID NO: 1678420 - RNA, 15 nt, Human
caauucuccugccuc

SEQ ID NO: 1678421 - RNA, 16 nt, Human
caauucuccugccuca

SEQ ID NO: 1678422 - RNA, 16 nt, Human
caauuacaggaaguac

SEQ ID NO: 1678423 - RNA, 13 nt, Human
caauucuccugcc

SEQ ID NO: 1678424 - RNA, 17 nt, Human
caauuacaggaaguacu

SEQ ID NO: 1678425 - RNA, 23 nt, Human
caauucucauuugucacacacuu

SEQ ID NO: 1678426 - RNA, 17 nt, Human
caaugcacuuuguucug

SEQ ID NO: 1678427 - RNA, 22 nt, Human
caaugcacuuuguucuggcucu

SEQ ID NO: 1678428 - RNA, 20 nt, Human
caaugcacuuuguucuggcu

SEQ ID NO: 1678429 - RNA, 21 nt, Human
caaugcacuuuguucuggcuc

SEQ ID NO: 1678430 - RNA, 23 nt, Human
caaugaccuuucaauaggaaaaa

SEQ ID NO: 1678431 - RNA, 18 nt, Human
caaugacuuacuguacau

SEQ ID NO: 1678432 - RNA, 17 nt, Human
caaugacuuacuguaca

SEQ ID NO: 1678433 - RNA, 15 nt, Human
caaugacuuacugua

SEQ ID NO: 1678434 - RNA, 17 nt, Human
caauauucgcuguguca

SEQ ID NO: 1678435 - RNA, 12 nt, Human
caauaggaaaaa

SEQ ID NO: 1678436 - RNA, 13 nt, Human
caauaggaaaaac

SEQ ID NO: 1678437 - RNA, 23 nt, Human
caauacaucccuuaccugggaaa

SEQ ID NO: 1678438 - RNA, 14 nt, Human
caaguccucuuuuc

SEQ ID NO: 1678439 - RNA, 18 nt, Human
caaggguagggugggccu

SEQ ID NO: 1678440 - RNA, 19 nt, Human
caaggguagggugggccuu

SEQ ID NO: 1678441 - RNA, 20 nt, Human
caaggucauuuuuuuuaaga

SEQ ID NO: 1678442 - RNA, 14 nt, Human
caaggucauuuuuu

SEQ ID NO: 1678443 - RNA, 18 nt, Human
caaggggcccaaauucuu

SEQ ID NO: 1678444 - RNA, 17 nt, Human
caaggggcccaaauucu

SEQ ID NO: 1678445 - RNA, 12 nt, Human
caaggcugcagu

SEQ ID NO: 1678446 - RNA, 15 nt, Human
caaggcugcagugag

SEQ ID NO: 1678447 - RNA, 23 nt, Human
caaggcugucaauuacaggaagu

SEQ ID NO: 1678448 - RNA, 19 nt, Human
caaguggcucccacacccu

SEQ ID NO: 1678449 - RNA, 14 nt, Human
caaguuaaauaaau

SEQ ID NO: 1678450 - RNA, 17 nt, Human
caagugauucucaugcc

SEQ ID NO: 1678451 - RNA, 18 nt, Human
caagugauucucaugccu

SEQ ID NO: 1678452 - RNA, 20 nt, Human
caagugauucucaugccuca

SEQ ID NO: 1678453 - RNA, 21 nt, Human
caagugauucucaugccucag

SEQ ID NO: 1678454 - RNA, 18 nt, Human
caagugagagcugggugu

SEQ ID NO: 1678455 - RNA, 21 nt, Human
caaguccucuuuucugagagg

SEQ ID NO: 1678456 - RNA, 14 nt, Human
caagugagagcugg

SEQ ID NO: 1678457 - RNA, 15 nt, Human
caagugagagcuggg

SEQ ID NO: 1678458 - RNA, 17 nt, Human
caagugagagcugggug

SEQ ID NO: 1678459 - RNA, 18 nt, Human
caagccguggcuucccgc

SEQ ID NO: 1678460 - RNA, 19 nt, Human
caagcgauucuucugcuuc

SEQ ID NO: 1678461 - RNA, 14 nt, Human
caagccuggcaagg

SEQ ID NO: 1678462 - RNA, 20 nt, Human
caagcgauucuucugcuuca

SEQ ID NO: 1678463 - RNA, 22 nt, Human
caagcgauucuucugcuucagc

SEQ ID NO: 1678464 - RNA, 17 nt, Human
caagagggcacuggugg

SEQ ID NO: 1678465 - RNA, 14 nt, Human
caagcaggacaugg

SEQ ID NO: 1678466 - RNA, 18 nt, Human
caagcaggacauggacaa

SEQ ID NO: 1678467 - RNA, 21 nt, Human
caagccagauuuuccugaaaa

SEQ ID NO: 1678468 - RNA, 18 nt, Human
caaggacagccccuccuc

SEQ ID NO: 1678469 - RNA, 15 nt, Human
caaggacugcaggga

SEQ ID NO: 1678470 - RNA, 17 nt, Human
caagcuggucccacuca

SEQ ID NO: 1678471 - RNA, 19 nt, Human
caagcuggucccacucagu

SEQ ID NO: 1678472 - RNA, 22 nt, Human
caaggacugcagggacugccag

SEQ ID NO: 1678473 - RNA, 17 nt, Human
caaggcugauuaaacca

SEQ ID NO: 1678474 - RNA, 15 nt, Human
caaccuccugggcua

SEQ ID NO: 1678475 - RNA, 14 nt, Human
caaccuccugggcu

SEQ ID NO: 1678476 - RNA, 20 nt, Human
caaccuguucugcuuuccuc

SEQ ID NO: 1678477 - RNA, 19 nt, Human
caaccuucgccaccugggu

SEQ ID NO: 1678478 - RNA, 15 nt, Human
caacugaccagccuc

SEQ ID NO: 1678479 - RNA, 17 nt, Human
caacugaccagccucca

SEQ ID NO: 1678480 - RNA, 13 nt, Human
caacgucugugcc

SEQ ID NO: 1678481 - RNA, 14 nt, Human
caacgucugugcca

SEQ ID NO: 1678482 - RNA, 17 nt, Human
caacccuggcacccagg

SEQ ID NO: 1678483 - RNA, 13 nt, Human
caacccucagagc

SEQ ID NO: 1678484 - RNA, 18 nt, Human
caacccucagagccaccc

SEQ ID NO: 1678485 - RNA, 18 nt, Human
caacacucauugaccuga

SEQ ID NO: 1678486 - RNA, 20 nt, Human
caacacucauugaccugagg

SEQ ID NO: 1678487 - RNA, 22 nt, Human
caacacucauugaccugaggcc

SEQ ID NO: 1678488 - RNA, 13 nt, Human
caagagggcacug

SEQ ID NO: 1678489 - RNA, 16 nt, Human
caagagcccaggccuc

SEQ ID NO: 1678490 - RNA, 17 nt, Human
caagagcccaggccucc

SEQ ID NO: 1678491 - RNA, 14 nt, Human
caagagggcacugg

SEQ ID NO: 1678492 - RNA, 15 nt, Human
caagagggcacuggu

SEQ ID NO: 1678493 - RNA, 15 nt, Human
caagcaccuccugcc

SEQ ID NO: 1678494 - RNA, 16 nt, Human
caagcaccuccugccu

SEQ ID NO: 1678495 - RNA, 17 nt, Human
caagcaccuccugccuc

SEQ ID NO: 1678496 - RNA, 19 nt, Human
caagacgcugugcugcccu

SEQ ID NO: 1678497 - RNA, 18 nt, Human
caagacgcugugcugccc

SEQ ID NO: 1678498 - RNA, 14 nt, Human
caagagcccaggcc

SEQ ID NO: 1678499 - RNA, 15 nt, Human
caagagcccaggccu

SEQ ID NO: 1678500 - RNA, 18 nt, Human
caagacucuuuggacacu

SEQ ID NO: 1678501 - RNA, 19 nt, Human
caagacugcacaucaaaau

SEQ ID NO: 1678502 - RNA, 20 nt, Human
caagaacuuuccaggaaggc

SEQ ID NO: 1678503 - RNA, 14 nt, Human
caagaccuucuccu

SEQ ID NO: 1678504 - RNA, 16 nt, Human
caagaccuucuccuuc

SEQ ID NO: 1678505 - RNA, 17 nt, Human
caagaccuucuccuuca

SEQ ID NO: 1678506 - RNA, 18 nt, Human
caagaccuucuccuucac

SEQ ID NO: 1678507 - RNA, 16 nt, Human
caagacgcugugcugc

SEQ ID NO: 1678508 - RNA, 17 nt, Human
caagacgcugugcugcc

SEQ ID NO: 1678509 - RNA, 19 nt, Human
caacugaccagccuccaug

SEQ ID NO: 1678510 - RNA, 22 nt, Human
uuuuuagacagagucucacugu

SEQ ID NO: 1678511 - RNA, 23 nt, Human
uuuuguuuggaccaaaaaccagu

SEQ ID NO: 1678512 - RNA, 11 nt, Human
uuuuuacuaau

SEQ ID NO: 1678513 - RNA, 12 nt, Human
uuuuuaucaugu

SEQ ID NO: 1678514 - RNA, 20 nt, Human
uuuuuaucgucacugcuuaa

SEQ ID NO: 1678515 - RNA, 12 nt, Human
uuuuuauggcuu

SEQ ID NO: 1678516 - RNA, 23 nt, Human
uuuuuauacauaaacaagaccac

SEQ ID NO: 1678517 - RNA, 19 nt, Human
uuuuuauauuugaaauauu

SEQ ID NO: 1678518 - RNA, 13 nt, Human
uuuuguuucugua

SEQ ID NO: 1678519 - RNA, 12 nt, Human
uuuuguuuggac

SEQ ID NO: 1678520 - RNA, 22 nt, Human
uuuuguuuggaccaaaaaccag

SEQ ID NO: 1678521 - RNA, 12 nt, Human
uuuuguuucugu

SEQ ID NO: 1678522 - RNA, 18 nt, Human
uuuuguuguuuguuuagu

SEQ ID NO: 1678523 - RNA, 21 nt, Human
uuuuguuccacaaguuaaaua

SEQ ID NO: 1678524 - RNA, 15 nt, Human
uuuuguuccacaagu

SEQ ID NO: 1678525 - RNA, 21 nt, Human
uuuugugaugucccaacuugu

SEQ ID NO: 1678526 - RNA, 20 nt, Human
uuuugugcauuaucuagaua

SEQ ID NO: 1678527 - RNA, 17 nt, Human
uuuugugcauuaucuag

SEQ ID NO: 1678528 - RNA, 23 nt, Human
uuuugugcauuaucuagauacug

SEQ ID NO: 1678529 - RNA, 23 nt, Human
uuuugccauguuggccaggcugg

SEQ ID NO: 1678530 - RNA, 14 nt, Human
auuaagcauauauu

SEQ ID NO: 1678531 - RNA, 15 nt, Human
auuaagcauauauuu

SEQ ID NO: 1678532 - RNA, 21 nt, Human
auuaagcauauauuuuuauau

SEQ ID NO: 1678533 - RNA, 11 nt, Human
auuaaagccau

SEQ ID NO: 1678534 - RNA, 17 nt, Human
uuuugagugccuuacac

SEQ ID NO: 1678535 - RNA, 17 nt, Human
uuuugauccaagcuggu

SEQ ID NO: 1678536 - RNA, 21 nt, Human
auuagaauucuguauagauua

SEQ ID NO: 1678537 - RNA, 15 nt, Human
auuagaauucuguau

SEQ ID NO: 1678538 - RNA, 16 nt, Human
auuagaauucuguaua

SEQ ID NO: 1678539 - RNA, 17 nt, Human
auuagaauucuguauag

SEQ ID NO: 1678540 - RNA, 18 nt, Human
auuagaauucuguauaga

SEQ ID NO: 1678541 - RNA, 13 nt, Human
auuagaauucugu

SEQ ID NO: 1678542 - RNA, 14 nt, Human
auuagaauucugua

SEQ ID NO: 1678543 - RNA, 12 nt, Human
auuagaauucug

SEQ ID NO: 1678544 - RNA, 12 nt, Human
auuacuucugcu

SEQ ID NO: 1678545 - RNA, 21 nt, Human
auuacaguggggaaugaagau

SEQ ID NO: 1678546 - RNA, 15 nt, Human
auuaauaauaaauuc

SEQ ID NO: 1678547 - RNA, 14 nt, Human
auuaaguacuaugu

SEQ ID NO: 1678548 - RNA, 16 nt, Human
auuaaguacuauguau

SEQ ID NO: 1678549 - RNA, 17 nt, Human
auuacauuuguauaaaa

SEQ ID NO: 1678550 - RNA, 18 nt, Human
auuacauuuguauaaaau

SEQ ID NO: 1678551 - RNA, 20 nt, Human
auuacauuuguauaaaauaa

SEQ ID NO: 1678552 - RNA, 22 nt, Human
uuuuuauggcuuuugugcauua

SEQ ID NO: 1678553 - RNA, 21 nt, Human
uuuuuauggcuuuugugcauu

SEQ ID NO: 1678554 - RNA, 20 nt, Human
uuuuuauggcuuuugugcau

SEQ ID NO: 1678555 - RNA, 19 nt, Human
uuuuuguagagccaggguc

SEQ ID NO: 1678556 - RNA, 20 nt, Human
uuuuuguagagccagggucu

SEQ ID NO: 1678557 - RNA, 19 nt, Human
uuuuugugaaaagcuccau

SEQ ID NO: 1678558 - RNA, 21 nt, Human
auuaaguaaugauaacuggaa

SEQ ID NO: 1678559 - RNA, 23 nt, Human
auuaaguaaugauaacuggaaac

SEQ ID NO: 1678560 - RNA, 12 nt, Human
augugugugugc

SEQ ID NO: 1678561 - RNA, 23 nt, Human
auguguguuuuaaaaugagaaau

SEQ ID NO: 1678562 - RNA, 24 nt, Human
auguggaguucaucuugaauugua

SEQ ID NO: 1678563 - RNA, 20 nt, Human
auguggaguucaucuugaau

SEQ ID NO: 1678564 - RNA, 19 nt, Human
augugcuaguaauuggaaa

SEQ ID NO: 1678565 - RNA, 22 nt, Human
augugccagguuuuuggucuga

SEQ ID NO: 1678566 - RNA, 16 nt, Human
uuuuaauaauguuuca

SEQ ID NO: 1678567 - RNA, 14 nt, Human
uuuuaauaaacacu

SEQ ID NO: 1678568 - RNA, 20 nt, Human
auggggcccugccuccuuug

SEQ ID NO: 1678569 - RNA, 12 nt, Human
auggggcugcac

SEQ ID NO: 1678570 - RNA, 12 nt, Human
uuuuaauaaugu

SEQ ID NO: 1678571 - RNA, 13 nt, Human
uuuuaauaauguu

SEQ ID NO: 1678572 - RNA, 14 nt, Human
uuuuaauaauguuu

SEQ ID NO: 1678573 - RNA, 12 nt, Human
auguuaaaccau

SEQ ID NO: 1678574 - RNA, 13 nt, Human
auguuaaaccaug

SEQ ID NO: 1678575 - RNA, 20 nt, Human
auguuaaaccaugggauaaa

SEQ ID NO: 1678576 - RNA, 20 nt, Human
auguugcccuguugcugccu

SEQ ID NO: 1678577 - RNA, 20 nt, Human
auguugcccaggcaggucuu

SEQ ID NO: 1678578 - RNA, 17 nt, Human
auguugcccaggcaggu

SEQ ID NO: 1678579 - RNA, 12 nt, Human
auguugcccagg

SEQ ID NO: 1678580 - RNA, 17 nt, Human
auguugcauagaauaaa

SEQ ID NO: 1678581 - RNA, 18 nt, Human
auguugcauagaauaaaa

SEQ ID NO: 1678582 - RNA, 18 nt, Human
auguucaucaaugaauga

SEQ ID NO: 1678583 - RNA, 17 nt, Human
auguuuaguaaucauau

SEQ ID NO: 1678584 - RNA, 15 nt, Human
auguuuucaggcuag

SEQ ID NO: 1678585 - RNA, 17 nt, Human
auguuuucaggcuagau

SEQ ID NO: 1678586 - RNA, 21 nt, Human
auguuuucaggcuagauguau

SEQ ID NO: 1678587 - RNA, 23 nt, Human
auuaaaacacaacaucuuuuucu

SEQ ID NO: 1678588 - RNA, 22 nt, Human
auuaaaaaucucaaauuucuaa

SEQ ID NO: 1678589 - RNA, 20 nt, Human
auuaaaaaucucaaauuucu

SEQ ID NO: 1678590 - RNA, 19 nt, Human
auuaaaaaucucaaauuuc

SEQ ID NO: 1678591 - RNA, 15 nt, Human
auuaaaaaucucaaa

SEQ ID NO: 1678592 - RNA, 15 nt, Human
auuaaaagaauauuu

SEQ ID NO: 1678593 - RNA, 11 nt, Human
uuuuauuuuau

SEQ ID NO: 1678594 - RNA, 12 nt, Human
uuuuauuaugaa

SEQ ID NO: 1678595 - RNA, 21 nt, Human
uuuuauuaugaaacuugugua

SEQ ID NO: 1678596 - RNA, 22 nt, Human
uuuuauuaugaaacuuguguaa

SEQ ID NO: 1678597 - RNA, 13 nt, Human
uuuuauuaugcau

SEQ ID NO: 1678598 - RNA, 14 nt, Human
uuuucucuaggaaa

SEQ ID NO: 1678599 - RNA, 16 nt, Human
uuuucucuaggaaaua

SEQ ID NO: 1678600 - RNA, 15 nt, Human
uuuucugauccaguu

SEQ ID NO: 1678601 - RNA, 15 nt, Human
uuuucugagaaagac

SEQ ID NO: 1678602 - RNA, 18 nt, Human
uuuucugagaaagacuau

SEQ ID NO: 1678603 - RNA, 20 nt, Human
uuuucauuuaggugaggaag

SEQ ID NO: 1678604 - RNA, 20 nt, Human
auucagauaugauucaaaug

SEQ ID NO: 1678605 - RNA, 12 nt, Human
auugaaaucuuu

SEQ ID NO: 1678606 - RNA, 18 nt, Human
auucagauaugauucaaa

SEQ ID NO: 1678607 - RNA, 20 nt, Human
auucaggaagcucagggccu

SEQ ID NO: 1678608 - RNA, 17 nt, Human
auucaggaagcucaggg

SEQ ID NO: 1678609 - RNA, 19 nt, Human
auucaggaagcucagggcc

SEQ ID NO: 1678610 - RNA, 15 nt, Human
auucaguaauaacuc

SEQ ID NO: 1678611 - RNA, 19 nt, Human
auucaguaauaacucuacc

SEQ ID NO: 1678612 - RNA, 17 nt, Human
auucagaguugaugguu

SEQ ID NO: 1678613 - RNA, 14 nt, Human
auucaggaagcuca

SEQ ID NO: 1678614 - RNA, 17 nt, Human
auucccaagcucugcuc

SEQ ID NO: 1678615 - RNA, 16 nt, Human
auucccaagcucugcu

SEQ ID NO: 1678616 - RNA, 14 nt, Human
auucccaagcucug

SEQ ID NO: 1678617 - RNA, 15 nt, Human
auucccaagcucugc

SEQ ID NO: 1678618 - RNA, 21 nt, Human
auucccuggccuuucauauuu

SEQ ID NO: 1678619 - RNA, 13 nt, Human
auucccuggccuu

SEQ ID NO: 1678620 - RNA, 19 nt, Human
auucccuggccuuucauau

SEQ ID NO: 1678621 - RNA, 20 nt, Human
auucuccugccucagccucc

SEQ ID NO: 1678622 - RNA, 19 nt, Human
auucuccugccucagccuc

SEQ ID NO: 1678623 - RNA, 15 nt, Human
auucuccugccucag

SEQ ID NO: 1678624 - RNA, 17 nt, Human
auucuccugccucagcc

SEQ ID NO: 1678625 - RNA, 16 nt, Human
auucuccuuguguuac

SEQ ID NO: 1678626 - RNA, 12 nt, Human
auucuccugccu

SEQ ID NO: 1678627 - RNA, 11 nt, Human
auucuccugcc

SEQ ID NO: 1678628 - RNA, 14 nt, Human
auucuccugccuca

SEQ ID NO: 1678629 - RNA, 13 nt, Human
auucuccugccuc

SEQ ID NO: 1678630 - RNA, 21 nt, Human
auucuccuaucaccugucuug

SEQ ID NO: 1678631 - RNA, 21 nt, Human
auucucaugccucagccuccu

SEQ ID NO: 1678632 - RNA, 21 nt, Human
auucuccaccugccagggaca

SEQ ID NO: 1678633 - RNA, 14 nt, Human
auucucaugccuca

SEQ ID NO: 1678634 - RNA, 15 nt, Human
auucucaugccucag

SEQ ID NO: 1678635 - RNA, 19 nt, Human
auucuccaccugccaggga

SEQ ID NO: 1678636 - RNA, 20 nt, Human
auucuccaccugccagggac

SEQ ID NO: 1678637 - RNA, 14 nt, Human
auugguguuguacu

SEQ ID NO: 1678638 - RNA, 22 nt, Human
auugguguuguacucaauuuua

SEQ ID NO: 1678639 - RNA, 23 nt, Human
auugguguuguacucaauuuuaa

SEQ ID NO: 1678640 - RNA, 13 nt, Human
auuguauucagag

SEQ ID NO: 1678641 - RNA, 17 nt, Human
auuguccccgacccuug

SEQ ID NO: 1678642 - RNA, 19 nt, Human
auuguccccgacccuugcc

SEQ ID NO: 1678643 - RNA, 20 nt, Human
auuguccccgacccuugccg

SEQ ID NO: 1678644 - RNA, 18 nt, Human
auugugucucuugguccu

SEQ ID NO: 1678645 - RNA, 14 nt, Human
auugugucucuugg

SEQ ID NO: 1678646 - RNA, 13 nt, Human
auucuuaaaguug

SEQ ID NO: 1678647 - RNA, 14 nt, Human
auucuuaaaguuga

SEQ ID NO: 1678648 - RNA, 15 nt, Human
auucuuaaaguugaa

SEQ ID NO: 1678649 - RNA, 16 nt, Human
auucuuaaaguugaau

SEQ ID NO: 1678650 - RNA, 21 nt, Human
auucuguauagauuagaauuc

SEQ ID NO: 1678651 - RNA, 24 nt, Human
auucugucucuggauuauauuaug

SEQ ID NO: 1678652 - RNA, 17 nt, Human
auucuccuuguguuacu

SEQ ID NO: 1678653 - RNA, 15 nt, Human
auucuucagcaaaaa

SEQ ID NO: 1678654 - RNA, 23 nt, Human
auucuucagcaaaaauauuuuau

SEQ ID NO: 1678655 - RNA, 14 nt, Human
auucuuauuuaaug

SEQ ID NO: 1678656 - RNA, 18 nt, Human
auucuuauuuaaugaaag

SEQ ID NO: 1678657 - RNA, 18 nt, Human
auucuuaaaguugaauuu

SEQ ID NO: 1678658 - RNA, 13 nt, Human
auucuuauuuaau

SEQ ID NO: 1678659 - RNA, 22 nt, Human
auucuuccucccucccucuuuc

SEQ ID NO: 1678660 - RNA, 13 nt, Human
auucuucuccacu

SEQ ID NO: 1678661 - RNA, 18 nt, Human
auugacccacaagaaaug

SEQ ID NO: 1678662 - RNA, 16 nt, Human
auuuccguuaaaauac

SEQ ID NO: 1678663 - RNA, 15 nt, Human
auuuccguuaaaaua

SEQ ID NO: 1678664 - RNA, 14 nt, Human
auuugaaaauuuug

SEQ ID NO: 1678665 - RNA, 15 nt, Human
auuugaaaauuuuga

SEQ ID NO: 1678666 - RNA, 14 nt, Human
auuugaaauauuga

SEQ ID NO: 1678667 - RNA, 20 nt, Human
auuuccagugaaaucaguua

SEQ ID NO: 1678668 - RNA, 22 nt, Human
auuucauuugugccagaaugcu

SEQ ID NO: 1678669 - RNA, 17 nt, Human
auuuccagccaaagccu

SEQ ID NO: 1678670 - RNA, 19 nt, Human
auuuauuuuaauaauguuu

SEQ ID NO: 1678671 - RNA, 20 nt, Human
auuuauuuuaauaauguuuc

SEQ ID NO: 1678672 - RNA, 16 nt, Human
auuucaaacggccuca

SEQ ID NO: 1678673 - RNA, 12 nt, Human
auuucauuucuu

SEQ ID NO: 1678674 - RNA, 13 nt, Human
auuuauucugcuc

SEQ ID NO: 1678675 - RNA, 17 nt, Human
auuuauuuuaauaaugu

SEQ ID NO: 1678676 - RNA, 14 nt, Human
auuuauucugcuca

SEQ ID NO: 1678677 - RNA, 12 nt, Human
auuuaacagaaa

SEQ ID NO: 1678678 - RNA, 14 nt, Human
auuuaacagaaaug

SEQ ID NO: 1678679 - RNA, 17 nt, Human
auuuacuucuuauacau

SEQ ID NO: 1678680 - RNA, 14 nt, Human
auuuacuucuuaua

SEQ ID NO: 1678681 - RNA, 16 nt, Human
auuuacuucuuauaca

SEQ ID NO: 1678682 - RNA, 15 nt, Human
auuuagaaauauaau

SEQ ID NO: 1678683 - RNA, 17 nt, Human
auuuauaaaaauaaaaa

SEQ ID NO: 1678684 - RNA, 22 nt, Human
auuuauaaaaauaaaaaacacu

SEQ ID NO: 1678685 - RNA, 23 nt, Human
auuuauaaaaauaaaaaacacug

SEQ ID NO: 1678686 - RNA, 13 nt, Human
auuuaguguucau

SEQ ID NO: 1678687 - RNA, 20 nt, Human
auuuaguaucuuuuuauuca

SEQ ID NO: 1678688 - RNA, 18 nt, Human
auuuaguauuuuguuuca

SEQ ID NO: 1678689 - RNA, 13 nt, Human
auuuagauguaua

SEQ ID NO: 1678690 - RNA, 17 nt, Human
auuuuaccuuugacaaa

SEQ ID NO: 1678691 - RNA, 16 nt, Human
auuuuacauaaauuua

SEQ ID NO: 1678692 - RNA, 17 nt, Human
auuuuacauaaauuuag

SEQ ID NO: 1678693 - RNA, 15 nt, Human
auuuuaauucaguug

SEQ ID NO: 1678694 - RNA, 18 nt, Human
auuuuaaaagaaugauua

SEQ ID NO: 1678695 - RNA, 22 nt, Human
auuuuaaaagaaugauuaugaa

SEQ ID NO: 1678696 - RNA, 18 nt, Human
auuuguauaaaauaauuu

SEQ ID NO: 1678697 - RNA, 19 nt, Human
auuuguauaaaauaauuuu

SEQ ID NO: 1678698 - RNA, 21 nt, Human
auuuguauaaaauaauuuuua

SEQ ID NO: 1678699 - RNA, 15 nt, Human
auuugugauacaaug

SEQ ID NO: 1678700 - RNA, 14 nt, Human
auuugugauacaau

SEQ ID NO: 1678701 - RNA, 17 nt, Human
auuuuaaaagaaugauu

SEQ ID NO: 1678702 - RNA, 18 nt, Human
auuuucaacgcagcccug

SEQ ID NO: 1678703 - RNA, 20 nt, Human
auuuucaacgcagcccugcu

SEQ ID NO: 1678704 - RNA, 16 nt, Human
auuuuauuauguaaau

SEQ ID NO: 1678705 - RNA, 17 nt, Human
auuuuauuauguaaauc

SEQ ID NO: 1678706 - RNA, 18 nt, Human
auuuuauuauguaaaucc

SEQ ID NO: 1678707 - RNA, 19 nt, Human
auuuuauuauguaaauccc

SEQ ID NO: 1678708 - RNA, 20 nt, Human
auuuuauuauguaaauccca

SEQ ID NO: 1678709 - RNA, 21 nt, Human
auuuuauuauguaaaucccau

SEQ ID NO: 1678710 - RNA, 21 nt, Human
auuuuauuuuuuucugaauua

SEQ ID NO: 1678711 - RNA, 13 nt, Human
auuuuccuccuuu

SEQ ID NO: 1678712 - RNA, 17 nt, Human
auuuuccuccuuucucu

SEQ ID NO: 1678713 - RNA, 22 nt, Human
auuuucaguuauuauauuuaca

SEQ ID NO: 1678714 - RNA, 17 nt, Human
uugcugauggugcaaug

SEQ ID NO: 1678715 - RNA, 18 nt, Human
uugcugauggugcaauga

SEQ ID NO: 1678716 - RNA, 19 nt, Human
uugcugauggugcaaugac

SEQ ID NO: 1678717 - RNA, 17 nt, Human
uuggaaagaguaggaag

SEQ ID NO: 1678718 - RNA, 20 nt, Human
uugcuaagugaggaugaaaa

SEQ ID NO: 1678719 - RNA, 19 nt, Human
uugcugaauacagaggcaa

SEQ ID NO: 1678720 - RNA, 11 nt, Human
uugcucaugga

SEQ ID NO: 1678721 - RNA, 12 nt, Human
uugcucauggaa

SEQ ID NO: 1678722 - RNA, 18 nt, Human
uuggaaagaguaggaaga

SEQ ID NO: 1678723 - RNA, 23 nt, Human
uuggaaagaguaggaagacuuug

SEQ ID NO: 1678724 - RNA, 22 nt, Human
uuggcuagagguucaaagauau

SEQ ID NO: 1678725 - RNA, 22 nt, Human
uuggcuaggaccccuccaugug

SEQ ID NO: 1678726 - RNA, 21 nt, Human
uuggcuagagguucaaagaua

SEQ ID NO: 1678727 - RNA, 23 nt, Human
uuggcuauuagagaucaaccccu

SEQ ID NO: 1678728 - RNA, 14 nt, Human
uuggcugcagggag

SEQ ID NO: 1678729 - RNA, 11 nt, Human
uuggcugcuga

SEQ ID NO: 1678730 - RNA, 15 nt, Human
uuggcugcugaaggc

SEQ ID NO: 1678731 - RNA, 22 nt, Human
uuggcgcugccccuggcagccc

SEQ ID NO: 1678732 - RNA, 16 nt, Human
uuggcugcugaaggcu

SEQ ID NO: 1678733 - RNA, 19 nt, Human
augaaagauggcugugccu

SEQ ID NO: 1678734 - RNA, 20 nt, Human
augaaagauggcugugccuc

SEQ ID NO: 1678735 - RNA, 23 nt, Human
augaaagauggcugugccucugc

SEQ ID NO: 1678736 - RNA, 20 nt, Human
augaaagacuguacaaagua

SEQ ID NO: 1678737 - RNA, 14 nt, Human
augaaaugagguca

SEQ ID NO: 1678738 - RNA, 21 nt, Human
augaaauauuauguuaaaacu

SEQ ID NO: 1678739 - RNA, 20 nt, Human
augaaauauuauguuaaaac

SEQ ID NO: 1678740 - RNA, 15 nt, Human
uuguaauuauaucug

SEQ ID NO: 1678741 - RNA, 13 nt, Human
uuguaaugaaaac

SEQ ID NO: 1678742 - RNA, 20 nt, Human
uuguaaggaaugauuaauua

SEQ ID NO: 1678743 - RNA, 19 nt, Human
uuguauaaaauaauuuuua

SEQ ID NO: 1678744 - RNA, 13 nt, Human
uuguauaaaauaa

SEQ ID NO: 1678745 - RNA, 19 nt, Human
augacacgaauauugcuga

SEQ ID NO: 1678746 - RNA, 20 nt, Human
augacacgaauauugcugau

SEQ ID NO: 1678747 - RNA, 21 nt, Human
augaauuaguuuuauaugcuu

SEQ ID NO: 1678748 - RNA, 23 nt, Human
augaauuaguuuuauaugcuucu

SEQ ID NO: 1678749 - RNA, 19 nt, Human
uugguuaggcauuguggga

SEQ ID NO: 1678750 - RNA, 16 nt, Human
uugguuaagucuguuu

SEQ ID NO: 1678751 - RNA, 22 nt, Human
uugggguacccacugcucuggu

SEQ ID NO: 1678752 - RNA, 18 nt, Human
uugguuaagucuguuuua

SEQ ID NO: 1678753 - RNA, 22 nt, Human
uuguaaaaauuaaaaguuaugg

SEQ ID NO: 1678754 - RNA, 14 nt, Human
uuguaaggaaugau

SEQ ID NO: 1678755 - RNA, 19 nt, Human
uuggggaagaacgaagcca

SEQ ID NO: 1678756 - RNA, 17 nt, Human
uugggguacccacugcu

SEQ ID NO: 1678757 - RNA, 20 nt, Human
augaaccacaucuugcucug

SEQ ID NO: 1678758 - RNA, 22 nt, Human
augaaccacaucuugcucugcu

SEQ ID NO: 1678759 - RNA, 13 nt, Human
augaaccacaucu

SEQ ID NO: 1678760 - RNA, 18 nt, Human
augaauuacauuuguaua

SEQ ID NO: 1678761 - RNA, 19 nt, Human
augaauuacauuuguauaa

SEQ ID NO: 1678762 - RNA, 22 nt, Human
augaauuacauuuguauaaaau

SEQ ID NO: 1678763 - RNA, 22 nt, Human
augcaaacuuuauuuuguguuu

SEQ ID NO: 1678764 - RNA, 16 nt, Human
augcaaggucauuuuu

SEQ ID NO: 1678765 - RNA, 14 nt, Human
augcaaggucauuu

SEQ ID NO: 1678766 - RNA, 14 nt, Human
augcaccuggaaua

SEQ ID NO: 1678767 - RNA, 16 nt, Human
augcaccuggaauaua

SEQ ID NO: 1678768 - RNA, 22 nt, Human
augcaaggucauuuuuuuuaag

SEQ ID NO: 1678769 - RNA, 15 nt, Human
augaucuucuuuaua

SEQ ID NO: 1678770 - RNA, 18 nt, Human
augaucuucuuuauaauu

SEQ ID NO: 1678771 - RNA, 16 nt, Human
augcaaaccaucauug

SEQ ID NO: 1678772 - RNA, 18 nt, Human
augcaaaccaucauugaa

SEQ ID NO: 1678773 - RNA, 19 nt, Human
augcaaaccaucauugaaa

SEQ ID NO: 1678774 - RNA, 20 nt, Human
augcaaaccaucauugaaau

SEQ ID NO: 1678775 - RNA, 21 nt, Human
augcaaaccaucauugaaauc

SEQ ID NO: 1678776 - RNA, 22 nt, Human
augcaaaccaucauugaaaucu

SEQ ID NO: 1678777 - RNA, 17 nt, Human
uuuaaaaaaaaaauugg

SEQ ID NO: 1678778 - RNA, 19 nt, Human
uuguuuuuuuuuuccacuu

SEQ ID NO: 1678779 - RNA, 20 nt, Human
uuuaaaaaagaaacauuugg

SEQ ID NO: 1678780 - RNA, 17 nt, Human
uuuaaaaaauuaaucug

SEQ ID NO: 1678781 - RNA, 18 nt, Human
uuguuuuuuuuuuccacu

SEQ ID NO: 1678782 - RNA, 19 nt, Human
augcaccuggaauauauaa

SEQ ID NO: 1678783 - RNA, 23 nt, Human
augaucacggcucacugcagccu

SEQ ID NO: 1678784 - RNA, 16 nt, Human
augauccuaggcauuu

SEQ ID NO: 1678785 - RNA, 15 nt, Human
augauccuaaugaau

SEQ ID NO: 1678786 - RNA, 23 nt, Human
augaucuaccagccucccuauuu

SEQ ID NO: 1678787 - RNA, 15 nt, Human
augaucuaggaagac

SEQ ID NO: 1678788 - RNA, 14 nt, Human
augaucuucuuuau

SEQ ID NO: 1678789 - RNA, 15 nt, Human
augaucacggcucac

SEQ ID NO: 1678790 - RNA, 18 nt, Human
augaucacggcucacugc

SEQ ID NO: 1678791 - RNA, 19 nt, Human
augaucacggcucacugca

SEQ ID NO: 1678792 - RNA, 17 nt, Human
uugugaagguggaaaua

SEQ ID NO: 1678793 - RNA, 18 nt, Human
uugugaagguggaaauaa

SEQ ID NO: 1678794 - RNA, 18 nt, Human
uugugaagcaaaauuuuu

SEQ ID NO: 1678795 - RNA, 17 nt, Human
augagccucagcauccu

SEQ ID NO: 1678796 - RNA, 18 nt, Human
augagccucagcauccug

SEQ ID NO: 1678797 - RNA, 19 nt, Human
augagccucagcauccugg

SEQ ID NO: 1678798 - RNA, 15 nt, Human
augauaaaacacaaa

SEQ ID NO: 1678799 - RNA, 14 nt, Human
augauaacuggaaa

SEQ ID NO: 1678800 - RNA, 15 nt, Human
augagcaucaggcca

SEQ ID NO: 1678801 - RNA, 16 nt, Human
augagcaucaggccag

SEQ ID NO: 1678802 - RNA, 17 nt, Human
augagcaucaggccagg

SEQ ID NO: 1678803 - RNA, 18 nt, Human
augagcaucaggccaggc

SEQ ID NO: 1678804 - RNA, 19 nt, Human
augagcaucaggccaggcc

SEQ ID NO: 1678805 - RNA, 20 nt, Human
augagcaucaggccaggccc

SEQ ID NO: 1678806 - RNA, 21 nt, Human
augagcaucaggccaggcccu

SEQ ID NO: 1678807 - RNA, 22 nt, Human
augagcaucaggccaggcccuc

SEQ ID NO: 1678808 - RNA, 12 nt, Human
augagccucagc

SEQ ID NO: 1678809 - RNA, 15 nt, Human
augagccucagcauc

SEQ ID NO: 1678810 - RNA, 16 nt, Human
augagccucagcaucc

SEQ ID NO: 1678811 - RNA, 16 nt, Human
augagaggaaaucacc

SEQ ID NO: 1678812 - RNA, 14 nt, Human
augagaggaaauca

SEQ ID NO: 1678813 - RNA, 15 nt, Human
augagaggaaaucac

SEQ ID NO: 1678814 - RNA, 12 nt, Human
augagaggaaau

SEQ ID NO: 1678815 - RNA, 13 nt, Human
augagaggaaauc

SEQ ID NO: 1678816 - RNA, 11 nt, Human
uuuccuucagu

SEQ ID NO: 1678817 - RNA, 12 nt, Human
uuuccuucagug

SEQ ID NO: 1678818 - RNA, 15 nt, Human
uuuccuucagugccu

SEQ ID NO: 1678819 - RNA, 17 nt, Human
augggccuccugugugu

SEQ ID NO: 1678820 - RNA, 12 nt, Human
uuuccugugucu

SEQ ID NO: 1678821 - RNA, 23 nt, Human
uuuccuucauucaacccaccugc

SEQ ID NO: 1678822 - RNA, 18 nt, Human
uuuccuucagugccuuau

SEQ ID NO: 1678823 - RNA, 21 nt, Human
uuuccuucagugccuuaugga

SEQ ID NO: 1678824 - RNA, 22 nt, Human
uuuccuucagugccuuauggaa

SEQ ID NO: 1678825 - RNA, 21 nt, Human
uuuccuucauucaacccaccu

SEQ ID NO: 1678826 - RNA, 21 nt, Human
uuuccuuuuaaaacacuucca

SEQ ID NO: 1678827 - RNA, 22 nt, Human
uuucgcaggauucuuccucccu

SEQ ID NO: 1678828 - RNA, 18 nt, Human
uuucgcaggauucuuccu

SEQ ID NO: 1678829 - RNA, 15 nt, Human
augggacuggccucu

SEQ ID NO: 1678830 - RNA, 13 nt, Human
augggagcucaug

SEQ ID NO: 1678831 - RNA, 19 nt, Human
augggcaacccccagccug

SEQ ID NO: 1678832 - RNA, 21 nt, Human
augggcaacccccagccugcu

SEQ ID NO: 1678833 - RNA, 15 nt, Human
augggcagagcagag

SEQ ID NO: 1678834 - RNA, 13 nt, Human
augggcagagcag

SEQ ID NO: 1678835 - RNA, 14 nt, Human
augggcagagcaga

SEQ ID NO: 1678836 - RNA, 15 nt, Human
augggccuccugugu

SEQ ID NO: 1678837 - RNA, 22 nt, Human
augggacauuugcucauggaau

SEQ ID NO: 1678838 - RNA, 21 nt, Human
augggacauuugcucauggaa

SEQ ID NO: 1678839 - RNA, 21 nt, Human
auggcuauaggugcuacaaaa

SEQ ID NO: 1678840 - RNA, 23 nt, Human
auggcuauaggugcuacaaaaac

SEQ ID NO: 1678841 - RNA, 18 nt, Human
auggccucuucagaucuc

SEQ ID NO: 1678842 - RNA, 16 nt, Human
auggcuauaggugcua

SEQ ID NO: 1678843 - RNA, 19 nt, Human
auggcuauaggugcuacaa

SEQ ID NO: 1678844 - RNA, 21 nt, Human
auggacccaauauuuaccaga

SEQ ID NO: 1678845 - RNA, 17 nt, Human
auggaauuucucccagu

SEQ ID NO: 1678846 - RNA, 15 nt, Human
uuucuauauuuucau

SEQ ID NO: 1678847 - RNA, 18 nt, Human
uuucuauauuuucauucu

SEQ ID NO: 1678848 - RNA, 13 nt, Human
uuucuauauuuuc

SEQ ID NO: 1678849 - RNA, 21 nt, Human
uuucuaggacugaauuaugaa

SEQ ID NO: 1678850 - RNA, 17 nt, Human
uuucuaggacugaauua

SEQ ID NO: 1678851 - RNA, 22 nt, Human
uuucuaggacugaauuaugaaa

SEQ ID NO: 1678852 - RNA, 21 nt, Human
uuucuaugacacaugcaaggu

SEQ ID NO: 1678853 - RNA, 15 nt, Human
uuucuaugacacaug

SEQ ID NO: 1678854 - RNA, 21 nt, Human
uuucuaugcugaguuugugcu

SEQ ID NO: 1678855 - RNA, 13 nt, Human
uuucuaugaaaua

SEQ ID NO: 1678856 - RNA, 14 nt, Human
uuucuaugaaauau

SEQ ID NO: 1678857 - RNA, 20 nt, Human
uuucuaugaaauauuauguu

SEQ ID NO: 1678858 - RNA, 14 nt, Human
uuucugccgcagcc

SEQ ID NO: 1678859 - RNA, 16 nt, Human
uuucugccgcagcccu

SEQ ID NO: 1678860 - RNA, 22 nt, Human
uuucucauuugccaauaauaau

SEQ ID NO: 1678861 - RNA, 14 nt, Human
uuucugcaucagcu

SEQ ID NO: 1678862 - RNA, 13 nt, Human
uuucuuuguggcu

SEQ ID NO: 1678863 - RNA, 17 nt, Human
uuugaaacacuuugcau

SEQ ID NO: 1678864 - RNA, 19 nt, Human
uuugaaacacuuugcauaa

SEQ ID NO: 1678865 - RNA, 14 nt, Human
auggggcccugccu

SEQ ID NO: 1678866 - RNA, 13 nt, Human
auggggcccugcc

SEQ ID NO: 1678867 - RNA, 23 nt, Human
augggcuggguucuacccaggug

SEQ ID NO: 1678868 - RNA, 14 nt, Human
uuugaaauauugac

SEQ ID NO: 1678869 - RNA, 18 nt, Human
augcuacacacugcaugu

SEQ ID NO: 1678870 - RNA, 17 nt, Human
augcuacacacugcaug

SEQ ID NO: 1678871 - RNA, 20 nt, Human
uuuaccuuuuuuauacauaa

SEQ ID NO: 1678872 - RNA, 19 nt, Human
uuuaccuuuuuuauacaua

SEQ ID NO: 1678873 - RNA, 14 nt, Human
uuuaccuuuuuuau

SEQ ID NO: 1678874 - RNA, 18 nt, Human
uuuacuaauagacaauuu

SEQ ID NO: 1678875 - RNA, 17 nt, Human
uuuacuaauagacaauu

SEQ ID NO: 1678876 - RNA, 14 nt, Human
uuuacuaauagaca

SEQ ID NO: 1678877 - RNA, 15 nt, Human
uuuacuaaaauggac

SEQ ID NO: 1678878 - RNA, 17 nt, Human
uuuacuaaaauggacug

SEQ ID NO: 1678879 - RNA, 21 nt, Human
uuuaccuuuuuuauacauaaa

SEQ ID NO: 1678880 - RNA, 23 nt, Human
augcgcaggcuggcccugcccug

SEQ ID NO: 1678881 - RNA, 16 nt, Human
augcgggccagugcuc

SEQ ID NO: 1678882 - RNA, 16 nt, Human
uuuaaagcuuccauug

SEQ ID NO: 1678883 - RNA, 24 nt, Human
uuuaaagcuuauuaaaacucauuu

SEQ ID NO: 1678884 - RNA, 13 nt, Human
uuuagauaauaca

SEQ ID NO: 1678885 - RNA, 18 nt, Human
uuuagaguugauacuaca

SEQ ID NO: 1678886 - RNA, 15 nt, Human
uuuagauaauacacc

SEQ ID NO: 1678887 - RNA, 15 nt, Human
uuuaguagagacagg

SEQ ID NO: 1678888 - RNA, 23 nt, Human
uuuagcuacuauauaugugauga

SEQ ID NO: 1678889 - RNA, 14 nt, Human
uuuaugugaaacau

SEQ ID NO: 1678890 - RNA, 15 nt, Human
uuuaugugaaacaug

SEQ ID NO: 1678891 - RNA, 19 nt, Human
uuuauuaaaugcccagccc

SEQ ID NO: 1678892 - RNA, 17 nt, Human
uuuauaugcuucuguuu

SEQ ID NO: 1678893 - RNA, 19 nt, Human
uuuauaugcuucuguuuua

SEQ ID NO: 1678894 - RNA, 13 nt, Human
uuuauuuuuuggg

SEQ ID NO: 1678895 - RNA, 14 nt, Human
auggaauaacaugu

SEQ ID NO: 1678896 - RNA, 15 nt, Human
auggaauaacaugua

SEQ ID NO: 1678897 - RNA, 16 nt, Human
uuuauuuuaauaaugu

SEQ ID NO: 1678898 - RNA, 18 nt, Human
auggaacacucugagacu

SEQ ID NO: 1678899 - RNA, 17 nt, Human
auggaacacucugagac

SEQ ID NO: 1678900 - RNA, 21 nt, Human
auggaaguacuauaauuuacc

SEQ ID NO: 1678901 - RNA, 16 nt, Human
auggaacauaaaauac

SEQ ID NO: 1678902 - RNA, 19 nt, Human
augcugugcccuaaagugu

SEQ ID NO: 1678903 - RNA, 14 nt, Human
augcuguauauguu

SEQ ID NO: 1678904 - RNA, 14 nt, Human
augcuguauuuuaa

SEQ ID NO: 1678905 - RNA, 23 nt, Human
augcugucuacacuaagagagaa

SEQ ID NO: 1678906 - RNA, 21 nt, Human
uuuauuaugaaacuuguguaa

SEQ ID NO: 1678907 - RNA, 22 nt, Human
augcuggcuguuggcugggggc

SEQ ID NO: 1678908 - RNA, 13 nt, Human
uuuauuaugaaac

SEQ ID NO: 1678909 - RNA, 19 nt, Human
uuuauuacuguaagaaaau

SEQ ID NO: 1678910 - RNA, 16 nt, Human
uuuauuuuuugggaaa

SEQ ID NO: 1678911 - RNA, 17 nt, Human
uuuauuuuuuucugaau

SEQ ID NO: 1678912 - RNA, 14 nt, Human
uuucacucuccuug

SEQ ID NO: 1678913 - RNA, 24 nt, Human
uuucacugcuggcugccuuagaac

SEQ ID NO: 1678914 - RNA, 15 nt, Human
uuucacucuccuugg

SEQ ID NO: 1678915 - RNA, 24 nt, Human
uuucacucuuauugcccacgcugg

SEQ ID NO: 1678916 - RNA, 12 nt, Human
uuucauaaagca

SEQ ID NO: 1678917 - RNA, 23 nt, Human
auggaauuggagcucgugggaca

SEQ ID NO: 1678918 - RNA, 19 nt, Human
uuuccagguuuaagcuguu

SEQ ID NO: 1678919 - RNA, 16 nt, Human
uucagauaugauucaa

SEQ ID NO: 1678920 - RNA, 17 nt, Human
uucagauaugauucaaa

SEQ ID NO: 1678921 - RNA, 18 nt, Human
uucagauaugauucaaau

SEQ ID NO: 1678922 - RNA, 17 nt, Human
uucagcaaaaauauuuu

SEQ ID NO: 1678923 - RNA, 19 nt, Human
uucagauaugauucaaaug

SEQ ID NO: 1678924 - RNA, 16 nt, Human
uucagaaauguguuau

SEQ ID NO: 1678925 - RNA, 14 nt, Human
uucaggguuggccc

SEQ ID NO: 1678926 - RNA, 16 nt, Human
uucaggguuggccccu

SEQ ID NO: 1678927 - RNA, 17 nt, Human
uucaggguuggccccug

SEQ ID NO: 1678928 - RNA, 19 nt, Human
uucaggguuggccccugcc

SEQ ID NO: 1678929 - RNA, 22 nt, Human
uucaggguuggccccugcccgg

SEQ ID NO: 1678930 - RNA, 15 nt, Human
uucagguaacaggca

SEQ ID NO: 1678931 - RNA, 16 nt, Human
uucagguaacaggcag

SEQ ID NO: 1678932 - RNA, 19 nt, Human
uucagcaaaaauauuuuau

SEQ ID NO: 1678933 - RNA, 20 nt, Human
uucagccugccuucuuuucu

SEQ ID NO: 1678934 - RNA, 15 nt, Human
uucagccugccuucu

SEQ ID NO: 1678935 - RNA, 14 nt, Human
uucagccaagaauu

SEQ ID NO: 1678936 - RNA, 17 nt, Human
uucagcgguuuauauaa

SEQ ID NO: 1678937 - RNA, 17 nt, Human
uucagguaacaggcaga

SEQ ID NO: 1678938 - RNA, 14 nt, Human
uucaguaagccgug

SEQ ID NO: 1678939 - RNA, 16 nt, Human
uucagugccaaaaaca

SEQ ID NO: 1678940 - RNA, 13 nt, Human
auauaugcuaagu

SEQ ID NO: 1678941 - RNA, 15 nt, Human
uucaucaaugaauga

SEQ ID NO: 1678942 - RNA, 21 nt, Human
auauauguuuuaagaggcagg

SEQ ID NO: 1678943 - RNA, 22 nt, Human
auauauguuuuaagaggcaggg

SEQ ID NO: 1678944 - RNA, 15 nt, Human
uuccaggcugggaga

SEQ ID NO: 1678945 - RNA, 17 nt, Human
uuccaggcugggagagc

SEQ ID NO: 1678946 - RNA, 18 nt, Human
uuccagguuuaagcuguu

SEQ ID NO: 1678947 - RNA, 17 nt, Human
uuccagguuuaagcugu

SEQ ID NO: 1678948 - RNA, 15 nt, Human
uuccaccuucccaug

SEQ ID NO: 1678949 - RNA, 18 nt, Human
uuccaccaucaagccacc

SEQ ID NO: 1678950 - RNA, 21 nt, Human
uuccacaagagcccaggccuc

SEQ ID NO: 1678951 - RNA, 22 nt, Human
uuccaauuuacauacucugcuu

SEQ ID NO: 1678952 - RNA, 22 nt, Human
uucauuauuuuauuaugaaacu

SEQ ID NO: 1678953 - RNA, 14 nt, Human
uucauuaucucaaa

SEQ ID NO: 1678954 - RNA, 21 nt, Human
uucauggaacgcguugaaauu

SEQ ID NO: 1678955 - RNA, 22 nt, Human
uucauggaacgcguugaaauug

SEQ ID NO: 1678956 - RNA, 15 nt, Human
uucauuaauaauaaa

SEQ ID NO: 1678957 - RNA, 18 nt, Human
uucauuaauaauaaauuc

SEQ ID NO: 1678958 - RNA, 21 nt, Human
uucauuaauaauaaauucccu

SEQ ID NO: 1678959 - RNA, 19 nt, Human
uucauggaacgcguugaaa

SEQ ID NO: 1678960 - RNA, 20 nt, Human
uucauggaacgcguugaaau

SEQ ID NO: 1678961 - RNA, 22 nt, Human
uucaugcuguucaugaaagauu

SEQ ID NO: 1678962 - RNA, 20 nt, Human
auauguggaguucaucuuga

SEQ ID NO: 1678963 - RNA, 21 nt, Human
auauguggaguucaucuugaa

SEQ ID NO: 1678964 - RNA, 23 nt, Human
auauguaccuaacgaaguauccu

SEQ ID NO: 1678965 - RNA, 13 nt, Human
auauauuuuuaua

SEQ ID NO: 1678966 - RNA, 15 nt, Human
auaugcaaagcacug

SEQ ID NO: 1678967 - RNA, 13 nt, Human
auaugcaaagcac

SEQ ID NO: 1678968 - RNA, 14 nt, Human
auaugcaaagcacu

SEQ ID NO: 1678969 - RNA, 14 nt, Human
uucccgcucagccc

SEQ ID NO: 1678970 - RNA, 15 nt, Human
uucccgcucagcccu

SEQ ID NO: 1678971 - RNA, 12 nt, Human
uucccgcucagc

SEQ ID NO: 1678972 - RNA, 13 nt, Human
uucccuacuuccu

SEQ ID NO: 1678973 - RNA, 15 nt, Human
uucccuuuuuuuaag

SEQ ID NO: 1678974 - RNA, 13 nt, Human
uuccucugagccu

SEQ ID NO: 1678975 - RNA, 19 nt, Human
uuccucuccacugccuucg

SEQ ID NO: 1678976 - RNA, 18 nt, Human
uuccucuccacugccuuc

SEQ ID NO: 1678977 - RNA, 21 nt, Human
uuccuaaauauauuuuaagac

SEQ ID NO: 1678978 - RNA, 19 nt, Human
uuccuggcacugcuuccag

SEQ ID NO: 1678979 - RNA, 12 nt, Human
uuccugaacagg

SEQ ID NO: 1678980 - RNA, 22 nt, Human
uuccucuuuuuauuuaguuccu

SEQ ID NO: 1678981 - RNA, 20 nt, Human
uuccuggcacugcuuccagu

SEQ ID NO: 1678982 - RNA, 22 nt, Human
uuccuggcacugcuuccaguga

SEQ ID NO: 1678983 - RNA, 15 nt, Human
aucacgccacugcac

SEQ ID NO: 1678984 - RNA, 17 nt, Human
aucacgccacugcacua

SEQ ID NO: 1678985 - RNA, 14 nt, Human
aucaauuuuucuua

SEQ ID NO: 1678986 - RNA, 19 nt, Human
aucaauuuuucuuauuuca

SEQ ID NO: 1678987 - RNA, 21 nt, Human
aucaaggguacacugccuucu

SEQ ID NO: 1678988 - RNA, 13 nt, Human
aucaauuuaaaaa

SEQ ID NO: 1678989 - RNA, 21 nt, Human
aucaacugcaucaagauguga

SEQ ID NO: 1678990 - RNA, 16 nt, Human
aucaaggguacacugc

SEQ ID NO: 1678991 - RNA, 19 nt, Human
aucaacugggcugaacacu

SEQ ID NO: 1678992 - RNA, 16 nt, Human
aucaaauaugcaaagc

SEQ ID NO: 1678993 - RNA, 17 nt, Human
aucaaauaugcaaagca

SEQ ID NO: 1678994 - RNA, 18 nt, Human
aucaaauaugcaaagcac

SEQ ID NO: 1678995 - RNA, 15 nt, Human
aucaaauaugcaaag

SEQ ID NO: 1678996 - RNA, 22 nt, Human
uuccagugaaaucaguuacucu

SEQ ID NO: 1678997 - RNA, 15 nt, Human
uuccagugaggcucu

SEQ ID NO: 1678998 - RNA, 16 nt, Human
uuccagugaggcucug

SEQ ID NO: 1678999 - RNA, 16 nt, Human
auauguucugacauaa

SEQ ID NO: 1679000 - RNA, 12 nt, Human
auauuaaagcca

SEQ ID NO: 1679001 - RNA, 14 nt, Human
auauuaaagccaug

SEQ ID NO: 1679002 - RNA, 17 nt, Human
auauuaccacagacaua

SEQ ID NO: 1679003 - RNA, 16 nt, Human
auauuaagaaagacua

SEQ ID NO: 1679004 - RNA, 15 nt, Human
auauuaagaaagacu

SEQ ID NO: 1679005 - RNA, 17 nt, Human
auauuaagaaagacuau

SEQ ID NO: 1679006 - RNA, 22 nt, Human
auauuaagaaagacuaucuaaa

SEQ ID NO: 1679007 - RNA, 15 nt, Human
auauguuuaaaagua

SEQ ID NO: 1679008 - RNA, 18 nt, Human
auauucucacagcuccaa

SEQ ID NO: 1679009 - RNA, 21 nt, Human
auauuccugcauuugugaaau

SEQ ID NO: 1679010 - RNA, 19 nt, Human
auauuaccacagacauacu

SEQ ID NO: 1679011 - RNA, 21 nt, Human
auauucucacagcuccaagaa

SEQ ID NO: 1679012 - RNA, 15 nt, Human
auauugauaugcuua

SEQ ID NO: 1679013 - RNA, 22 nt, Human
auauugcugauggugcaaugac

SEQ ID NO: 1679014 - RNA, 13 nt, Human
auauuguuuucag

SEQ ID NO: 1679015 - RNA, 17 nt, Human
auauuguuuucagugua

SEQ ID NO: 1679016 - RNA, 14 nt, Human
auauuguuugcuaa

SEQ ID NO: 1679017 - RNA, 13 nt, Human
auauuuacaaaug

SEQ ID NO: 1679018 - RNA, 12 nt, Human
aucguaaaauua

SEQ ID NO: 1679019 - RNA, 13 nt, Human
aucguaaaauuaa

SEQ ID NO: 1679020 - RNA, 14 nt, Human
aucguaaaauuaag

SEQ ID NO: 1679021 - RNA, 17 nt, Human
aucguaaaauuaagaaa

SEQ ID NO: 1679022 - RNA, 15 nt, Human
auccuggaguucugg

SEQ ID NO: 1679023 - RNA, 17 nt, Human
auccuggcacccggccc

SEQ ID NO: 1679024 - RNA, 19 nt, Human
auccuggcacccggccccu

SEQ ID NO: 1679025 - RNA, 20 nt, Human
auccuggcacccggccccug

SEQ ID NO: 1679026 - RNA, 21 nt, Human
auccuggcacccggccccugc

SEQ ID NO: 1679027 - RNA, 20 nt, Human
auccuggcugucgagaaaca

SEQ ID NO: 1679028 - RNA, 22 nt, Human
auccuggcacccggccccugcu

SEQ ID NO: 1679029 - RNA, 23 nt, Human
auccuggcacccggccccugcug

SEQ ID NO: 1679030 - RNA, 17 nt, Human
auccucuuugagugaag

SEQ ID NO: 1679031 - RNA, 11 nt, Human
auccugagcca

SEQ ID NO: 1679032 - RNA, 12 nt, Human
auccugagccag

SEQ ID NO: 1679033 - RNA, 13 nt, Human
auccugagccaga

SEQ ID NO: 1679034 - RNA, 18 nt, Human
auccucuguacagagccc

SEQ ID NO: 1679035 - RNA, 20 nt, Human
auccucuguacagagcccac

SEQ ID NO: 1679036 - RNA, 20 nt, Human
uucuuuugccguuauuaaaa

SEQ ID NO: 1679037 - RNA, 16 nt, Human
auccugcaauuccacu

SEQ ID NO: 1679038 - RNA, 22 nt, Human
auccugaggcuccacuuggucu

SEQ ID NO: 1679039 - RNA, 13 nt, Human
auccugccccuga

SEQ ID NO: 1679040 - RNA, 14 nt, Human
auccugagccagau

SEQ ID NO: 1679041 - RNA, 15 nt, Human
auccugagccagauu

SEQ ID NO: 1679042 - RNA, 17 nt, Human
auccugagccagauuuc

SEQ ID NO: 1679043 - RNA, 21 nt, Human
auccugagccagauuucacuc

SEQ ID NO: 1679044 - RNA, 11 nt, Human
auccugaggcu

SEQ ID NO: 1679045 - RNA, 13 nt, Human
auccugaggcucc

SEQ ID NO: 1679046 - RNA, 16 nt, Human
auccugaggcuccacu

SEQ ID NO: 1679047 - RNA, 18 nt, Human
auccugaggcuccacuug

SEQ ID NO: 1679048 - RNA, 17 nt, Human
uugacauagucuggcug

SEQ ID NO: 1679049 - RNA, 13 nt, Human
uugacaucaacug

SEQ ID NO: 1679050 - RNA, 18 nt, Human
uugaccauucuccaccug

SEQ ID NO: 1679051 - RNA, 19 nt, Human
uugaccauucuccaccugc

SEQ ID NO: 1679052 - RNA, 14 nt, Human
uugacauagucugg

SEQ ID NO: 1679053 - RNA, 19 nt, Human
uugacacuuaaaaaugguu

SEQ ID NO: 1679054 - RNA, 24 nt, Human
uugaccauucuccaccugccaggg

SEQ ID NO: 1679055 - RNA, 14 nt, Human
uugacccacaagaa

SEQ ID NO: 1679056 - RNA, 12 nt, Human
uugauaaaguaa

SEQ ID NO: 1679057 - RNA, 15 nt, Human
uugagaucagccugg

SEQ ID NO: 1679058 - RNA, 16 nt, Human
uugaggucuguucuuu

SEQ ID NO: 1679059 - RNA, 19 nt, Human
uugauaaucaacugggcug

SEQ ID NO: 1679060 - RNA, 17 nt, Human
uugacacuuaaaaaugg

SEQ ID NO: 1679061 - RNA, 14 nt, Human
aucgucacugcuua

SEQ ID NO: 1679062 - RNA, 18 nt, Human
aucgucacugcuuaacuu

SEQ ID NO: 1679063 - RNA, 14 nt, Human
aucgugacaacacu

SEQ ID NO: 1679064 - RNA, 15 nt, Human
aucgugacaacacuu

SEQ ID NO: 1679065 - RNA, 15 nt, Human
aucuaaacugccccc

SEQ ID NO: 1679066 - RNA, 15 nt, Human
aucuaaauguugaaa

SEQ ID NO: 1679067 - RNA, 18 nt, Human
auccaagcaaaugugaau

SEQ ID NO: 1679068 - RNA, 16 nt, Human
auccaagcaaauguga

SEQ ID NO: 1679069 - RNA, 15 nt, Human
uucugccugcccagg

SEQ ID NO: 1679070 - RNA, 16 nt, Human
uucugccugcccaggc

SEQ ID NO: 1679071 - RNA, 14 nt, Human
auccaguaucuuga

SEQ ID NO: 1679072 - RNA, 15 nt, Human
auccaguaucuugaa

SEQ ID NO: 1679073 - RNA, 17 nt, Human
auccagguucagcuugu

SEQ ID NO: 1679074 - RNA, 11 nt, Human
aucccagcccc

SEQ ID NO: 1679075 - RNA, 12 nt, Human
aucccagcccca

SEQ ID NO: 1679076 - RNA, 16 nt, Human
aucccaugagccucag

SEQ ID NO: 1679077 - RNA, 22 nt, Human
aucccugaaggccccgcccagg

SEQ ID NO: 1679078 - RNA, 17 nt, Human
aucccugaaggccccgc

SEQ ID NO: 1679079 - RNA, 21 nt, Human
aucccucccuccaccucccug

SEQ ID NO: 1679080 - RNA, 20 nt, Human
aucccucccuccaccucccu

SEQ ID NO: 1679081 - RNA, 17 nt, Human
aucccaugagccucagc

SEQ ID NO: 1679082 - RNA, 18 nt, Human
aucccaugagccucagca

SEQ ID NO: 1679083 - RNA, 18 nt, Human
aucccucccuccaccucc

SEQ ID NO: 1679084 - RNA, 17 nt, Human
aucccucccuccaccuc

SEQ ID NO: 1679085 - RNA, 16 nt, Human
aucccucccuccaccu

SEQ ID NO: 1679086 - RNA, 12 nt, Human
uucuuucuggcu

SEQ ID NO: 1679087 - RNA, 20 nt, Human
uucuuucuggcuaugcauuu

SEQ ID NO: 1679088 - RNA, 17 nt, Human
uucuuucuggcuaugca

SEQ ID NO: 1679089 - RNA, 22 nt, Human
uucuucuccacuuucuagccag

SEQ ID NO: 1679090 - RNA, 11 nt, Human
uucuucucccu

SEQ ID NO: 1679091 - RNA, 13 nt, Human
uucuuaaaguuga

SEQ ID NO: 1679092 - RNA, 15 nt, Human
uucuuaaauaauaaa

SEQ ID NO: 1679093 - RNA, 19 nt, Human
uucuuaaauaauaaagauc

SEQ ID NO: 1679094 - RNA, 22 nt, Human
uucuuaaccagaucauugugaa

SEQ ID NO: 1679095 - RNA, 23 nt, Human
uucuuaaccagaucauugugaaa

SEQ ID NO: 1679096 - RNA, 18 nt, Human
uucuguuuagauaauaca

SEQ ID NO: 1679097 - RNA, 13 nt, Human
uucuguuuagaua

SEQ ID NO: 1679098 - RNA, 16 nt, Human
uucuguuuuauaauuu

SEQ ID NO: 1679099 - RNA, 17 nt, Human
uucuguuuuauaauuuu

SEQ ID NO: 1679100 - RNA, 13 nt, Human
aucauugugaaau

SEQ ID NO: 1679101 - RNA, 15 nt, Human
aucauugugaaauua

SEQ ID NO: 1679102 - RNA, 19 nt, Human
aucauugugaaauuauuca

SEQ ID NO: 1679103 - RNA, 13 nt, Human
aucauugaaaucu

SEQ ID NO: 1679104 - RNA, 12 nt, Human
aucauugaaauc

SEQ ID NO: 1679105 - RNA, 18 nt, Human
uucuccuuucacaaccuu

SEQ ID NO: 1679106 - RNA, 22 nt, Human
uucuccuuucacaaccuucugu

SEQ ID NO: 1679107 - RNA, 21 nt, Human
uucucuaguuugauuaaauuc

SEQ ID NO: 1679108 - RNA, 16 nt, Human
uucugcaucagcugcu

SEQ ID NO: 1679109 - RNA, 16 nt, Human
aucauuaggugugacu

SEQ ID NO: 1679110 - RNA, 21 nt, Human
aucauccacugugccaugugc

SEQ ID NO: 1679111 - RNA, 23 nt, Human
aucauccacugugccaugugcca

SEQ ID NO: 1679112 - RNA, 15 nt, Human
aucauaaaacuugau

SEQ ID NO: 1679113 - RNA, 17 nt, Human
aucaggugcugccaucc

SEQ ID NO: 1679114 - RNA, 19 nt, Human
aucaggugcugccauccag

SEQ ID NO: 1679115 - RNA, 15 nt, Human
aucaggugcugccau

SEQ ID NO: 1679116 - RNA, 23 nt, Human
aucacuugaacccgggaggcaga

SEQ ID NO: 1679117 - RNA, 13 nt, Human
aucagugcccucc

SEQ ID NO: 1679118 - RNA, 15 nt, Human
aucagugcccuccag

SEQ ID NO: 1679119 - RNA, 17 nt, Human
aucagugcccuccagga

SEQ ID NO: 1679120 - RNA, 19 nt, Human
aucagucugauucccaagc

SEQ ID NO: 1679121 - RNA, 15 nt, Human
ugcuggcugccuuag

SEQ ID NO: 1679122 - RNA, 14 nt, Human
ugcuggcugccuua

SEQ ID NO: 1679123 - RNA, 21 nt, Human
ugcuggcugccuuagaaccuu

SEQ ID NO: 1679124 - RNA, 16 nt, Human
ugcuggcugguuagag

SEQ ID NO: 1679125 - RNA, 18 nt, Human
ugcuggcuguuggcuggg

SEQ ID NO: 1679126 - RNA, 13 nt, Human
ugcugcccuguga

SEQ ID NO: 1679127 - RNA, 14 nt, Human
ugcugcccugugag

SEQ ID NO: 1679128 - RNA, 20 nt, Human
aggaauuuuauuuuuuucug

SEQ ID NO: 1679129 - RNA, 15 nt, Human
ugcugcccugugagu

SEQ ID NO: 1679130 - RNA, 13 nt, Human
ugcuggagcucug

SEQ ID NO: 1679131 - RNA, 14 nt, Human
ugcuggagcucugc

SEQ ID NO: 1679132 - RNA, 16 nt, Human
ugcuucaaggauccug

SEQ ID NO: 1679133 - RNA, 18 nt, Human
ugcuucaaggauccugag

SEQ ID NO: 1679134 - RNA, 19 nt, Human
ugcuucaaggauccugagc

SEQ ID NO: 1679135 - RNA, 13 nt, Human
ugcuucagccucc

SEQ ID NO: 1679136 - RNA, 14 nt, Human
ugcuucagccuccc

SEQ ID NO: 1679137 - RNA, 13 nt, Human
ugcuuauacacuu

SEQ ID NO: 1679138 - RNA, 23 nt, Human
aggacacuaaccacgcuggaccu

SEQ ID NO: 1679139 - RNA, 14 nt, Human
ugcuucaucccuuu

SEQ ID NO: 1679140 - RNA, 14 nt, Human
aggacacugauaug

SEQ ID NO: 1679141 - RNA, 22 nt, Human
aggacagggaggugaccccagg

SEQ ID NO: 1679142 - RNA, 14 nt, Human
ugcuauuucuauau

SEQ ID NO: 1679143 - RNA, 20 nt, Human
ugcuauuucuauauuuucau

SEQ ID NO: 1679144 - RNA, 21 nt, Human
ugcuauuucuauauuuucauu

SEQ ID NO: 1679145 - RNA, 12 nt, Human
ugcuauuucuau

SEQ ID NO: 1679146 - RNA, 13 nt, Human
ugcuauuucuaua

SEQ ID NO: 1679147 - RNA, 19 nt, Human
agcugggacuacaggcacc

SEQ ID NO: 1679148 - RNA, 16 nt, Human
agcugggacuacaggc

SEQ ID NO: 1679149 - RNA, 18 nt, Human
agcugggacuacaggcac

SEQ ID NO: 1679150 - RNA, 16 nt, Human
ugcuccagcuguucag

SEQ ID NO: 1679151 - RNA, 19 nt, Human
ugcuccagcuguucagcug

SEQ ID NO: 1679152 - RNA, 20 nt, Human
ugcuccagcuguucagcugg

SEQ ID NO: 1679153 - RNA, 21 nt, Human
ugcucugcugacagacacagg

SEQ ID NO: 1679154 - RNA, 22 nt, Human
ugcucugcugacagacacaggc

SEQ ID NO: 1679155 - RNA, 14 nt, Human
ugcugacuguacuc

SEQ ID NO: 1679156 - RNA, 15 nt, Human
ugcugagucugaagg

SEQ ID NO: 1679157 - RNA, 14 nt, Human
ugcugagucugaag

SEQ ID NO: 1679158 - RNA, 14 nt, Human
aggaagccagcagg

SEQ ID NO: 1679159 - RNA, 15 nt, Human
aggaagccagcaggc

SEQ ID NO: 1679160 - RNA, 13 nt, Human
aggaagacuuugg

SEQ ID NO: 1679161 - RNA, 14 nt, Human
aggaagacuuugga

SEQ ID NO: 1679162 - RNA, 23 nt, Human
aggaagcacaugccucucucagg

SEQ ID NO: 1679163 - RNA, 24 nt, Human
aggaagcacaugccucucucaggc

SEQ ID NO: 1679164 - RNA, 16 nt, Human
ugcugagucugaaggc

SEQ ID NO: 1679165 - RNA, 17 nt, Human
ugcugagucugaaggcu

SEQ ID NO: 1679166 - RNA, 18 nt, Human
ugcugagucugaaggcug

SEQ ID NO: 1679167 - RNA, 21 nt, Human
ugcugagucugaaggcugggu

SEQ ID NO: 1679168 - RNA, 22 nt, Human
ugcugagucugaaggcuggguu

SEQ ID NO: 1679169 - RNA, 23 nt, Human
ugcugagucugaaggcuggguuc

SEQ ID NO: 1679170 - RNA, 13 nt, Human
aggaagacuucau

SEQ ID NO: 1679171 - RNA, 19 nt, Human
aggaagacuucaucccucu

SEQ ID NO: 1679172 - RNA, 19 nt, Human
aggaaggaaacccagcucu

SEQ ID NO: 1679173 - RNA, 15 nt, Human
aggaaggagaggaga

SEQ ID NO: 1679174 - RNA, 18 nt, Human
aggaaggaaacccagcuc

SEQ ID NO: 1679175 - RNA, 17 nt, Human
aggaagccagcaggcuc

SEQ ID NO: 1679176 - RNA, 18 nt, Human
aggaagccagcaggcucu

SEQ ID NO: 1679177 - RNA, 23 nt, Human
aggaauuguguuuauaauuuuaa

SEQ ID NO: 1679178 - RNA, 23 nt, Human
aggaauugacccacaagaaauga

SEQ ID NO: 1679179 - RNA, 11 nt, Human
aggaauuuaaa

SEQ ID NO: 1679180 - RNA, 14 nt, Human
aggacuuguuagau

SEQ ID NO: 1679181 - RNA, 16 nt, Human
aggacuuguuagaucu

SEQ ID NO: 1679182 - RNA, 19 nt, Human
aggacugaauuaugaaacu

SEQ ID NO: 1679183 - RNA, 20 nt, Human
aggacugaauuaugaaacuu

SEQ ID NO: 1679184 - RNA, 19 nt, Human
aggacauugcggacagcca

SEQ ID NO: 1679185 - RNA, 23 nt, Human
aggacauugcggacagccacggc

SEQ ID NO: 1679186 - RNA, 15 nt, Human
aggacauugcggaca

SEQ ID NO: 1679187 - RNA, 17 nt, Human
aggacauugcggacagc

SEQ ID NO: 1679188 - RNA, 18 nt, Human
aggacauugcggacagcc

SEQ ID NO: 1679189 - RNA, 18 nt, Human
aggagcccugggaggcuc

SEQ ID NO: 1679190 - RNA, 22 nt, Human
aggagccccgaggccuucucug

SEQ ID NO: 1679191 - RNA, 17 nt, Human
aggacuuguuagaucua

SEQ ID NO: 1679192 - RNA, 11 nt, Human
aggagaaacug

SEQ ID NO: 1679193 - RNA, 17 nt, Human
aggagauuggaaggaac

SEQ ID NO: 1679194 - RNA, 17 nt, Human
aggagaaacuggaacuc

SEQ ID NO: 1679195 - RNA, 21 nt, Human
ugcuuggaggaaggaaaccca

SEQ ID NO: 1679196 - RNA, 12 nt, Human
ugcuugggcuuc

SEQ ID NO: 1679197 - RNA, 16 nt, Human
ugcuugggcuucaucc

SEQ ID NO: 1679198 - RNA, 19 nt, Human
aggagcccugggaggcucu

SEQ ID NO: 1679199 - RNA, 23 nt, Human
aggagcccugggaggcucuggag

SEQ ID NO: 1679200 - RNA, 16 nt, Human
ugcuugccaucccucc

SEQ ID NO: 1679201 - RNA, 15 nt, Human
ugcuugccaucccuc

SEQ ID NO: 1679202 - RNA, 18 nt, Human
ugcuuugggcugcccugg

SEQ ID NO: 1679203 - RNA, 19 nt, Human
ugcuuugggcugcccuggu

SEQ ID NO: 1679204 - RNA, 20 nt, Human
ugcuuugggcugcccuggug

SEQ ID NO: 1679205 - RNA, 21 nt, Human
ugcuuugggcugcccuggugc

SEQ ID NO: 1679206 - RNA, 19 nt, Human
ugcuugggcuucauccucc

SEQ ID NO: 1679207 - RNA, 15 nt, Human
uggaaauauuaagaa

SEQ ID NO: 1679208 - RNA, 13 nt, Human
uggaaaggcagcu

SEQ ID NO: 1679209 - RNA, 20 nt, Human
uggaaauauuaagaaagacu

SEQ ID NO: 1679210 - RNA, 23 nt, Human
uggaaaugggcagagcagagacc

SEQ ID NO: 1679211 - RNA, 17 nt, Human
aggauccugagccagau

SEQ ID NO: 1679212 - RNA, 18 nt, Human
aggauccugagccagauu

SEQ ID NO: 1679213 - RNA, 21 nt, Human
aggaucucuugagccugggag

SEQ ID NO: 1679214 - RNA, 22 nt, Human
aggaucucuugagccugggagg

SEQ ID NO: 1679215 - RNA, 16 nt, Human
aggaugaucuaggaag

SEQ ID NO: 1679216 - RNA, 17 nt, Human
aggaugaucuaggaaga

SEQ ID NO: 1679217 - RNA, 21 nt, Human
aggauacaaaagcaugugaga

SEQ ID NO: 1679218 - RNA, 15 nt, Human
aggauccugagccag

SEQ ID NO: 1679219 - RNA, 16 nt, Human
aggauccugagccaga

SEQ ID NO: 1679220 - RNA, 14 nt, Human
aggagggaggggga

SEQ ID NO: 1679221 - RNA, 21 nt, Human
aggagggagcaucagugcccu

SEQ ID NO: 1679222 - RNA, 15 nt, Human
uggacacagcucuuc

SEQ ID NO: 1679223 - RNA, 16 nt, Human
uggacacagcucuucu

SEQ ID NO: 1679224 - RNA, 18 nt, Human
uggacacagcucuucucc

SEQ ID NO: 1679225 - RNA, 21 nt, Human
uggacacagcucuucuccagg

SEQ ID NO: 1679226 - RNA, 15 nt, Human
uggacccugaggccc

SEQ ID NO: 1679227 - RNA, 14 nt, Human
uggacccugaggcc

SEQ ID NO: 1679228 - RNA, 12 nt, Human
uggacccugagg

SEQ ID NO: 1679229 - RNA, 13 nt, Human
uggacccugaggc

SEQ ID NO: 1679230 - RNA, 19 nt, Human
aggaugcccaaagaugcag

SEQ ID NO: 1679231 - RNA, 20 nt, Human
aggaugaucuaggaagacuu

SEQ ID NO: 1679232 - RNA, 14 nt, Human
aggaugcccaaaga

SEQ ID NO: 1679233 - RNA, 17 nt, Human
aggaugccccguccccc

SEQ ID NO: 1679234 - RNA, 19 nt, Human
aggauuuugauccaagcug

SEQ ID NO: 1679235 - RNA, 20 nt, Human
aggauuuuaugcuuuaaaca

SEQ ID NO: 1679236 - RNA, 17 nt, Human
aggcaacucaucuuagg

SEQ ID NO: 1679237 - RNA, 19 nt, Human
aggcaacugcauuggcuuu

SEQ ID NO: 1679238 - RNA, 18 nt, Human
uggaauuggagcucgugg

SEQ ID NO: 1679239 - RNA, 22 nt, Human
uggaauuucucccagucauuua

SEQ ID NO: 1679240 - RNA, 18 nt, Human
uggcugccaaugggagcu

SEQ ID NO: 1679241 - RNA, 20 nt, Human
uggcugccaaugggagcuca

SEQ ID NO: 1679242 - RNA, 15 nt, Human
uggcugcagggaguc

SEQ ID NO: 1679243 - RNA, 13 nt, Human
uggcugcagggag

SEQ ID NO: 1679244 - RNA, 14 nt, Human
uggcugcagggagu

SEQ ID NO: 1679245 - RNA, 12 nt, Human
uggcugcaaagg

SEQ ID NO: 1679246 - RNA, 18 nt, Human
uggcucaaguccucuuuu

SEQ ID NO: 1679247 - RNA, 20 nt, Human
uggcucuuccaggcugggag

SEQ ID NO: 1679248 - RNA, 21 nt, Human
uggcucuuccaggcugggaga

SEQ ID NO: 1679249 - RNA, 18 nt, Human
aggcuggcgugcaguggu

SEQ ID NO: 1679250 - RNA, 20 nt, Human
aggcuggcgugcaguggugc

SEQ ID NO: 1679251 - RNA, 22 nt, Human
uggcuagagguucaaagauauu

SEQ ID NO: 1679252 - RNA, 14 nt, Human
aggcugggagagcc

SEQ ID NO: 1679253 - RNA, 22 nt, Human
uggcuauuagagaucaaccccu

SEQ ID NO: 1679254 - RNA, 19 nt, Human
uggcuaugcauuugaaaau

SEQ ID NO: 1679255 - RNA, 14 nt, Human
uggcuaugcauuug

SEQ ID NO: 1679256 - RNA, 17 nt, Human
uggcuaugcauuugaaa

SEQ ID NO: 1679257 - RNA, 15 nt, Human
uggcuaugcauuuga

SEQ ID NO: 1679258 - RNA, 13 nt, Human
ugggaacuagacu

SEQ ID NO: 1679259 - RNA, 18 nt, Human
uggcuucccgcucagccc

SEQ ID NO: 1679260 - RNA, 17 nt, Human
uggcuucccgcucagcc

SEQ ID NO: 1679261 - RNA, 15 nt, Human
uggcuucccgcucag

SEQ ID NO: 1679262 - RNA, 16 nt, Human
uggcuucccgcucagc

SEQ ID NO: 1679263 - RNA, 16 nt, Human
ugggaaaggggaaguu

SEQ ID NO: 1679264 - RNA, 23 nt, Human
uggcuucacggaagagccuugcg

SEQ ID NO: 1679265 - RNA, 14 nt, Human
uggcugugucuccc

SEQ ID NO: 1679266 - RNA, 13 nt, Human
uggcuguuggcug

SEQ ID NO: 1679267 - RNA, 15 nt, Human
uggcuguuggcuggg

SEQ ID NO: 1679268 - RNA, 17 nt, Human
uggcuuaaaacaacacu

SEQ ID NO: 1679269 - RNA, 11 nt, Human
uggcugcugaa

SEQ ID NO: 1679270 - RNA, 23 nt, Human
aggcugcucuugaacuccugacc

SEQ ID NO: 1679271 - RNA, 18 nt, Human
aggcucuggagcccacug

SEQ ID NO: 1679272 - RNA, 19 nt, Human
aggcucuggagcccacugu

SEQ ID NO: 1679273 - RNA, 14 nt, Human
aggcucuggagccc

SEQ ID NO: 1679274 - RNA, 15 nt, Human
aggcucuggagccca

SEQ ID NO: 1679275 - RNA, 13 nt, Human
aggcucuggagcc

SEQ ID NO: 1679276 - RNA, 16 nt, Human
aggcucugcccuuggu

SEQ ID NO: 1679277 - RNA, 15 nt, Human
aggcuggcccugccc

SEQ ID NO: 1679278 - RNA, 16 nt, Human
aggcuggcccugcccu

SEQ ID NO: 1679279 - RNA, 17 nt, Human
aggcuggcccugcccug

SEQ ID NO: 1679280 - RNA, 18 nt, Human
aggcuggcccugcccugg

SEQ ID NO: 1679281 - RNA, 12 nt, Human
aggcuggcccug

SEQ ID NO: 1679282 - RNA, 14 nt, Human
aggcuggcccugcc

SEQ ID NO: 1679283 - RNA, 19 nt, Human
aggcuggcccugcccuggu

SEQ ID NO: 1679284 - RNA, 13 nt, Human
aggcuggcgugca

SEQ ID NO: 1679285 - RNA, 17 nt, Human
aggcuggcgugcagugg

SEQ ID NO: 1679286 - RNA, 14 nt, Human
aggcuccugccacc

SEQ ID NO: 1679287 - RNA, 20 nt, Human
aggcuccugccaccacgccc

SEQ ID NO: 1679288 - RNA, 19 nt, Human
aggcuccuuuagcgcccag

SEQ ID NO: 1679289 - RNA, 12 nt, Human
aggcucgagcau

SEQ ID NO: 1679290 - RNA, 21 nt, Human
aggcucgagcaugccuggaug

SEQ ID NO: 1679291 - RNA, 15 nt, Human
aggcucgagcaugcc

SEQ ID NO: 1679292 - RNA, 17 nt, Human
aggcucgagcaugccug

SEQ ID NO: 1679293 - RNA, 18 nt, Human
aggcucgagcaugccugg

SEQ ID NO: 1679294 - RNA, 19 nt, Human
aggcucgagcaugccugga

SEQ ID NO: 1679295 - RNA, 21 nt, Human
aggcucucaggccagcugcuu

SEQ ID NO: 1679296 - RNA, 11 nt, Human
aggcucugccc

SEQ ID NO: 1679297 - RNA, 12 nt, Human
aggcucugcccu

SEQ ID NO: 1679298 - RNA, 13 nt, Human
aggcucugcccuu

SEQ ID NO: 1679299 - RNA, 14 nt, Human
aggcucugcccuug

SEQ ID NO: 1679300 - RNA, 15 nt, Human
aggcucugcccuugg

SEQ ID NO: 1679301 - RNA, 11 nt, Human
aggcucucagg

SEQ ID NO: 1679302 - RNA, 12 nt, Human
aggcucucaggc

SEQ ID NO: 1679303 - RNA, 14 nt, Human
aggcucucaggcca

SEQ ID NO: 1679304 - RNA, 15 nt, Human
aggcucucaggccag

SEQ ID NO: 1679305 - RNA, 16 nt, Human
aggcucucaggccagc

SEQ ID NO: 1679306 - RNA, 18 nt, Human
aggcucucaggccagcug

SEQ ID NO: 1679307 - RNA, 19 nt, Human
aggcucucaggccagcugc

SEQ ID NO: 1679308 - RNA, 20 nt, Human
aggcucucaggccagcugcu

SEQ ID NO: 1679309 - RNA, 20 nt, Human
uggccaggcuggucucgaac

SEQ ID NO: 1679310 - RNA, 17 nt, Human
uggccaggcuggucuca

SEQ ID NO: 1679311 - RNA, 22 nt, Human
uggcaugggaaugaaugucagu

SEQ ID NO: 1679312 - RNA, 12 nt, Human
uggcaugggaau

SEQ ID NO: 1679313 - RNA, 15 nt, Human
uggcaugggaaugaa

SEQ ID NO: 1679314 - RNA, 13 nt, Human
aggccugccuguu

SEQ ID NO: 1679315 - RNA, 13 nt, Human
aggcccucugccc

SEQ ID NO: 1679316 - RNA, 14 nt, Human
aggcccucugccca

SEQ ID NO: 1679317 - RNA, 15 nt, Human
aggcccucugcccac

SEQ ID NO: 1679318 - RNA, 14 nt, Human
uggccucugcacuc

SEQ ID NO: 1679319 - RNA, 15 nt, Human
uggccucugcacucc

SEQ ID NO: 1679320 - RNA, 17 nt, Human
uggccucugcacucccc

SEQ ID NO: 1679321 - RNA, 23 nt, Human
uggccgggcgcgguggcucacgc

SEQ ID NO: 1679322 - RNA, 18 nt, Human
uggccucugcacuccccu

SEQ ID NO: 1679323 - RNA, 12 nt, Human
uggccuggcccc

SEQ ID NO: 1679324 - RNA, 23 nt, Human
aggccugggggcugggcagagga

SEQ ID NO: 1679325 - RNA, 22 nt, Human
aggccuggccagaugcaccagc

SEQ ID NO: 1679326 - RNA, 23 nt, Human
aggccuggccagaugcaccagcc

SEQ ID NO: 1679327 - RNA, 15 nt, Human
aggccuggccagaug

SEQ ID NO: 1679328 - RNA, 16 nt, Human
aggccuggccagaugc

SEQ ID NO: 1679329 - RNA, 17 nt, Human
aggccuggccagaugca

SEQ ID NO: 1679330 - RNA, 21 nt, Human
aggccuggccagaugcaccag

SEQ ID NO: 1679331 - RNA, 14 nt, Human
uggcccgacagccu

SEQ ID NO: 1679332 - RNA, 15 nt, Human
uggcccgacagccug

SEQ ID NO: 1679333 - RNA, 16 nt, Human
uggcccgacagccugg

SEQ ID NO: 1679334 - RNA, 17 nt, Human
uggcccgacagccuggc

SEQ ID NO: 1679335 - RNA, 18 nt, Human
uggcccgacagccuggca

SEQ ID NO: 1679336 - RNA, 19 nt, Human
uggcccgacagccuggcac

SEQ ID NO: 1679337 - RNA, 21 nt, Human
uggccccugcccggcugcgga

SEQ ID NO: 1679338 - RNA, 15 nt, Human
uggccgggagccuga

SEQ ID NO: 1679339 - RNA, 19 nt, Human
uggagucagacagaugugg

SEQ ID NO: 1679340 - RNA, 15 nt, Human
aggccacaagacccu

SEQ ID NO: 1679341 - RNA, 16 nt, Human
aggccacaagacccuu

SEQ ID NO: 1679342 - RNA, 20 nt, Human
uggaugccugguggcagcug

SEQ ID NO: 1679343 - RNA, 18 nt, Human
uggaugccugguggcagc

SEQ ID NO: 1679344 - RNA, 19 nt, Human
uggaugccugguggcagcu

SEQ ID NO: 1679345 - RNA, 16 nt, Human
uggaguucaucuugaa

SEQ ID NO: 1679346 - RNA, 17 nt, Human
uggaguucaucuugaau

SEQ ID NO: 1679347 - RNA, 20 nt, Human
uggaguucaucuugaauugu

SEQ ID NO: 1679348 - RNA, 23 nt, Human
aggccaaaggaagcacaugccuc

SEQ ID NO: 1679349 - RNA, 18 nt, Human
aggccaaggugggaggau

SEQ ID NO: 1679350 - RNA, 20 nt, Human
aggccaaacucaccugcccc

SEQ ID NO: 1679351 - RNA, 14 nt, Human
aggccaaaggaagc

SEQ ID NO: 1679352 - RNA, 15 nt, Human
aggccaaaggaagca

SEQ ID NO: 1679353 - RNA, 16 nt, Human
aggccaaacucaccug

SEQ ID NO: 1679354 - RNA, 18 nt, Human
aggcauuuguuugaacug

SEQ ID NO: 1679355 - RNA, 18 nt, Human
uggacgagaaaacaauaa

SEQ ID NO: 1679356 - RNA, 12 nt, Human
aggccagagaca

SEQ ID NO: 1679357 - RNA, 13 nt, Human
uggcagccuuggc

SEQ ID NO: 1679358 - RNA, 23 nt, Human
uggcagccgugccuucagcucua

SEQ ID NO: 1679359 - RNA, 15 nt, Human
uggcagccucuucaa

SEQ ID NO: 1679360 - RNA, 16 nt, Human
uggcagccucuucaaa

SEQ ID NO: 1679361 - RNA, 20 nt, Human
aggccacaagacccuugugg

SEQ ID NO: 1679362 - RNA, 16 nt, Human
uggcagccgugccuuc

SEQ ID NO: 1679363 - RNA, 12 nt, Human
uggcagccccug

SEQ ID NO: 1679364 - RNA, 21 nt, Human
uggcacaucagcacgauuucu

SEQ ID NO: 1679365 - RNA, 15 nt, Human
uggcacccggccccu

SEQ ID NO: 1679366 - RNA, 16 nt, Human
uggcacccggccccug

SEQ ID NO: 1679367 - RNA, 21 nt, Human
uggcagaguugaagacagagc

SEQ ID NO: 1679368 - RNA, 22 nt, Human
uggcagaguugaagacagagcu

SEQ ID NO: 1679369 - RNA, 22 nt, Human
uggauuaaacuuaaucuaaaug

SEQ ID NO: 1679370 - RNA, 12 nt, Human
uggauguucuga

SEQ ID NO: 1679371 - RNA, 20 nt, Human
uggcacaucagcacgauuuc

SEQ ID NO: 1679372 - RNA, 22 nt, Human
uggcacaguuuucugagaaaga

SEQ ID NO: 1679373 - RNA, 15 nt, Human
ugccucucugcaggu

SEQ ID NO: 1679374 - RNA, 23 nt, Human
ugccucucugcaggucccuaaua

SEQ ID NO: 1679375 - RNA, 14 nt, Human
ugccucugacacac

SEQ ID NO: 1679376 - RNA, 16 nt, Human
ugccucugacacacag

SEQ ID NO: 1679377 - RNA, 11 nt, Human
ugccucugccu

SEQ ID NO: 1679378 - RNA, 20 nt, Human
ugccugcccaggccccugcc

SEQ ID NO: 1679379 - RNA, 12 nt, Human
ugccucugccuc

SEQ ID NO: 1679380 - RNA, 17 nt, Human
ugccugcccaggccccu

SEQ ID NO: 1679381 - RNA, 18 nt, Human
ugccugcccaggccccug

SEQ ID NO: 1679382 - RNA, 19 nt, Human
ugccugcccaggccccugc

SEQ ID NO: 1679383 - RNA, 23 nt, Human
agcugcuuuugucuaugggacuc

SEQ ID NO: 1679384 - RNA, 24 nt, Human
agcugcuuuugucuaugggacuca

SEQ ID NO: 1679385 - RNA, 13 nt, Human
agcugccuguuca

SEQ ID NO: 1679386 - RNA, 21 nt, Human
agcugcccucuccugggcagc

SEQ ID NO: 1679387 - RNA, 20 nt, Human
agcugcccucuccugggcag

SEQ ID NO: 1679388 - RNA, 19 nt, Human
agcugcccucuccugggca

SEQ ID NO: 1679389 - RNA, 18 nt, Human
agcugcccucuccugggc

SEQ ID NO: 1679390 - RNA, 17 nt, Human
agcugcccucuccuggg

SEQ ID NO: 1679391 - RNA, 15 nt, Human
ugccuccccuccucu

SEQ ID NO: 1679392 - RNA, 14 nt, Human
ugccuccccuccuc

SEQ ID NO: 1679393 - RNA, 13 nt, Human
ugccuccccuccu

SEQ ID NO: 1679394 - RNA, 12 nt, Human
ugccuccccucc

SEQ ID NO: 1679395 - RNA, 11 nt, Human
ugccuccccuc

SEQ ID NO: 1679396 - RNA, 11 nt, Human
ugccucucugc

SEQ ID NO: 1679397 - RNA, 12 nt, Human
ugccucucugca

SEQ ID NO: 1679398 - RNA, 17 nt, Human
ugccucucucaggccaa

SEQ ID NO: 1679399 - RNA, 16 nt, Human
ugccuccccuccucug

SEQ ID NO: 1679400 - RNA, 22 nt, Human
ugccucccaucacccgcuaaga

SEQ ID NO: 1679401 - RNA, 15 nt, Human
ugccucagccuccug

SEQ ID NO: 1679402 - RNA, 15 nt, Human
ugccucagccucccg

SEQ ID NO: 1679403 - RNA, 18 nt, Human
ugccucagaaaacaagga

SEQ ID NO: 1679404 - RNA, 20 nt, Human
ugccgcagcccugcagaggg

SEQ ID NO: 1679405 - RNA, 15 nt, Human
ugccucaccccuugc

SEQ ID NO: 1679406 - RNA, 15 nt, Human
agcucuucuccaggc

SEQ ID NO: 1679407 - RNA, 16 nt, Human
agcucuucuccaggcu

SEQ ID NO: 1679408 - RNA, 17 nt, Human
agcucuucuccaggcug

SEQ ID NO: 1679409 - RNA, 15 nt, Human
ugcccugugggcccc

SEQ ID NO: 1679410 - RNA, 18 nt, Human
ugcccugugggcccccaa

SEQ ID NO: 1679411 - RNA, 22 nt, Human
ugcccuuaccugccaggaagcc

SEQ ID NO: 1679412 - RNA, 19 nt, Human
ugcccuguuaaaagaugaa

SEQ ID NO: 1679413 - RNA, 13 nt, Human
agcuccagcucac

SEQ ID NO: 1679414 - RNA, 17 nt, Human
agcuccagcucaccagc

SEQ ID NO: 1679415 - RNA, 14 nt, Human
ugcccugcccaccu

SEQ ID NO: 1679416 - RNA, 17 nt, Human
agcuccaagcucccagg

SEQ ID NO: 1679417 - RNA, 18 nt, Human
agcuccaagcucccaggc

SEQ ID NO: 1679418 - RNA, 19 nt, Human
agcuccaagcucccaggca

SEQ ID NO: 1679419 - RNA, 23 nt, Human
ugcccuaaugcgcaggcuggccc

SEQ ID NO: 1679420 - RNA, 20 nt, Human
ugcccuaaugcgcaggcugg

SEQ ID NO: 1679421 - RNA, 20 nt, Human
ugcccucuccugggcagcug

SEQ ID NO: 1679422 - RNA, 18 nt, Human
ugcccucuccugggcagc

SEQ ID NO: 1679423 - RNA, 17 nt, Human
ugcccucuccugggcag

SEQ ID NO: 1679424 - RNA, 16 nt, Human
ugcccucuccugggca

SEQ ID NO: 1679425 - RNA, 23 nt, Human
ugcccucuccugggcagcugccu

SEQ ID NO: 1679426 - RNA, 22 nt, Human
ugcccucuccugggcagcugcc

SEQ ID NO: 1679427 - RNA, 15 nt, Human
ugcccucuccugggc

SEQ ID NO: 1679428 - RNA, 14 nt, Human
ugcccucuccuggg

SEQ ID NO: 1679429 - RNA, 13 nt, Human
ugcccucuccugg

SEQ ID NO: 1679430 - RNA, 12 nt, Human
ugcccucuccug

SEQ ID NO: 1679431 - RNA, 23 nt, Human
agcuccuucuguccuacucugug

SEQ ID NO: 1679432 - RNA, 21 nt, Human
agcuccaucuccacuccagau

SEQ ID NO: 1679433 - RNA, 21 nt, Human
agcuccagcucaccagcccca

SEQ ID NO: 1679434 - RNA, 18 nt, Human
agcuccagcucaccagcc

SEQ ID NO: 1679435 - RNA, 19 nt, Human
agcuccagcucaccagccc

SEQ ID NO: 1679436 - RNA, 21 nt, Human
agcucugcagagcaggaaaca

SEQ ID NO: 1679437 - RNA, 23 nt, Human
agcucugcccauccugccccuga

SEQ ID NO: 1679438 - RNA, 19 nt, Human
ugcauuugaggucuguucu

SEQ ID NO: 1679439 - RNA, 20 nt, Human
ugcauuuaaaagauacaguu

SEQ ID NO: 1679440 - RNA, 23 nt, Human
agccuugaccauucuccaccugc

SEQ ID NO: 1679441 - RNA, 22 nt, Human
agcgauucuucugcuucagccu

SEQ ID NO: 1679442 - RNA, 22 nt, Human
agccuugaacuuugaccucugc

SEQ ID NO: 1679443 - RNA, 16 nt, Human
agccuugaacuuugac

SEQ ID NO: 1679444 - RNA, 23 nt, Human
agccuugaacuuugaccucugca

SEQ ID NO: 1679445 - RNA, 22 nt, Human
agccuugaccauucuccaccug

SEQ ID NO: 1679446 - RNA, 15 nt, Human
agccuugaacuuuga

SEQ ID NO: 1679447 - RNA, 18 nt, Human
agccuuccagggguggga

SEQ ID NO: 1679448 - RNA, 18 nt, Human
ugccacugccucuuccuc

SEQ ID NO: 1679449 - RNA, 19 nt, Human
ugccacugccucuuccucc

SEQ ID NO: 1679450 - RNA, 20 nt, Human
ugccacugccucuuccuccc

SEQ ID NO: 1679451 - RNA, 13 nt, Human
ugccacugccucu

SEQ ID NO: 1679452 - RNA, 17 nt, Human
ugccacugccucuuccu

SEQ ID NO: 1679453 - RNA, 21 nt, Human
ugcauuugaggucuguucuuu

SEQ ID NO: 1679454 - RNA, 20 nt, Human
ugcauuugaggucuguucuu

SEQ ID NO: 1679455 - RNA, 18 nt, Human
ugccagcuuaucucaggg

SEQ ID NO: 1679456 - RNA, 13 nt, Human
agcggcuggcagc

SEQ ID NO: 1679457 - RNA, 22 nt, Human
agcggggacagcuccuucuguc

SEQ ID NO: 1679458 - RNA, 23 nt, Human
agcggcuggcagcccaccccuca

SEQ ID NO: 1679459 - RNA, 19 nt, Human
agcggggacagcuccuucu

SEQ ID NO: 1679460 - RNA, 20 nt, Human
agcggggacagcuccuucug

SEQ ID NO: 1679461 - RNA, 17 nt, Human
agcuaucguaaaauuaa

SEQ ID NO: 1679462 - RNA, 21 nt, Human
agcuaggccuggccagaugca

SEQ ID NO: 1679463 - RNA, 13 nt, Human
agcgugagccacu

SEQ ID NO: 1679464 - RNA, 20 nt, Human
agcucagggccuggcucagg

SEQ ID NO: 1679465 - RNA, 14 nt, Human
agcucagggccugg

SEQ ID NO: 1679466 - RNA, 19 nt, Human
agcucagggccuggcucag

SEQ ID NO: 1679467 - RNA, 19 nt, Human
agcuauucaguaauaacuc

SEQ ID NO: 1679468 - RNA, 12 nt, Human
agcucagggccu

SEQ ID NO: 1679469 - RNA, 13 nt, Human
agcucagggccug

SEQ ID NO: 1679470 - RNA, 15 nt, Human
agcuccaagaauuuc

SEQ ID NO: 1679471 - RNA, 17 nt, Human
agcucaggugucccugc

SEQ ID NO: 1679472 - RNA, 18 nt, Human
agcuccaagaauuucuag

SEQ ID NO: 1679473 - RNA, 15 nt, Human
agcuccaagcuccca

SEQ ID NO: 1679474 - RNA, 16 nt, Human
agcuccaagcucccag

SEQ ID NO: 1679475 - RNA, 22 nt, Human
ugccauuuaaagcuuauuaaaa

SEQ ID NO: 1679476 - RNA, 17 nt, Human
ugcccaaagaugcagcc

SEQ ID NO: 1679477 - RNA, 20 nt, Human
ugcccaaagaugcagccggu

SEQ ID NO: 1679478 - RNA, 13 nt, Human
ugcccagccccuu

SEQ ID NO: 1679479 - RNA, 16 nt, Human
ugcccagccccuucug

SEQ ID NO: 1679480 - RNA, 17 nt, Human
ugcccagccccuucuga

SEQ ID NO: 1679481 - RNA, 15 nt, Human
ugcccaggccccugc

SEQ ID NO: 1679482 - RNA, 17 nt, Human
ugcccaggccccugcca

SEQ ID NO: 1679483 - RNA, 18 nt, Human
ugcccaggccccugccac

SEQ ID NO: 1679484 - RNA, 14 nt, Human
ugcccccucugccc

SEQ ID NO: 1679485 - RNA, 15 nt, Human
ugcccccucugcccu

SEQ ID NO: 1679486 - RNA, 16 nt, Human
ugcccccucugcccug

SEQ ID NO: 1679487 - RNA, 17 nt, Human
ugcccccucugcccugc

SEQ ID NO: 1679488 - RNA, 18 nt, Human
ugcccccucugcccugcg

SEQ ID NO: 1679489 - RNA, 20 nt, Human
ugcccuaaaguguauuuuuu

SEQ ID NO: 1679490 - RNA, 23 nt, Human
ugccccgaacauguuuuucuucu

SEQ ID NO: 1679491 - RNA, 16 nt, Human
ugccccauucaacauc

SEQ ID NO: 1679492 - RNA, 14 nt, Human
agcccacuguacuu

SEQ ID NO: 1679493 - RNA, 16 nt, Human
agcccacuguacuugc

SEQ ID NO: 1679494 - RNA, 13 nt, Human
agcccacuucugc

SEQ ID NO: 1679495 - RNA, 14 nt, Human
agcccacuucugcc

SEQ ID NO: 1679496 - RNA, 15 nt, Human
agcccacuucugcca

SEQ ID NO: 1679497 - RNA, 22 nt, Human
agcccacuucugccauauucug

SEQ ID NO: 1679498 - RNA, 21 nt, Human
agccaguaaaugggggugcau

SEQ ID NO: 1679499 - RNA, 22 nt, Human
agccaguaaaugggggugcauu

SEQ ID NO: 1679500 - RNA, 13 nt, Human
agccaguaaaugg

SEQ ID NO: 1679501 - RNA, 22 nt, Human
ugauucccaagcucugcuccuc

SEQ ID NO: 1679502 - RNA, 23 nt, Human
ugauucccaagcucugcuccucu

SEQ ID NO: 1679503 - RNA, 13 nt, Human
ugauucucaugcc

SEQ ID NO: 1679504 - RNA, 14 nt, Human
ugauucucaugccu

SEQ ID NO: 1679505 - RNA, 15 nt, Human
ugauucucaugccuc

SEQ ID NO: 1679506 - RNA, 16 nt, Human
ugauucucaugccuca

SEQ ID NO: 1679507 - RNA, 13 nt, Human
ugauucuccugcc

SEQ ID NO: 1679508 - RNA, 23 nt, Human
agcccagcuugaaaccuucacuu

SEQ ID NO: 1679509 - RNA, 14 nt, Human
agcccaggaaaggc

SEQ ID NO: 1679510 - RNA, 21 nt, Human
ugauucauaaugacuuaagca

SEQ ID NO: 1679511 - RNA, 18 nt, Human
agcccaggaaaggcucca

SEQ ID NO: 1679512 - RNA, 16 nt, Human
ugauucauaaugacuu

SEQ ID NO: 1679513 - RNA, 17 nt, Human
ugauuucagcucacugc

SEQ ID NO: 1679514 - RNA, 22 nt, Human
ugauuuccguuaaaauaccagc

SEQ ID NO: 1679515 - RNA, 12 nt, Human
ugauuucuaugc

SEQ ID NO: 1679516 - RNA, 15 nt, Human
ugauuucuaugcuga

SEQ ID NO: 1679517 - RNA, 16 nt, Human
ugauuucuaugcugag

SEQ ID NO: 1679518 - RNA, 17 nt, Human
ugauuuggggauauuuu

SEQ ID NO: 1679519 - RNA, 13 nt, Human
ugaugagaggaaa

SEQ ID NO: 1679520 - RNA, 14 nt, Human
ugaugagaggaaau

SEQ ID NO: 1679521 - RNA, 15 nt, Human
ugaugagaggaaauc

SEQ ID NO: 1679522 - RNA, 16 nt, Human
ugaugagaggaaauca

SEQ ID NO: 1679523 - RNA, 14 nt, Human
ugaugggaaagcau

SEQ ID NO: 1679524 - RNA, 14 nt, Human
ugauggggcccugc

SEQ ID NO: 1679525 - RNA, 15 nt, Human
ugauggggcccugcc

SEQ ID NO: 1679526 - RNA, 16 nt, Human
ugauggggcccugccu

SEQ ID NO: 1679527 - RNA, 19 nt, Human
ugauggggcccugccuccu

SEQ ID NO: 1679528 - RNA, 14 nt, Human
ugaugggauuuggu

SEQ ID NO: 1679529 - RNA, 21 nt, Human
ugaugggcaacccccagccug

SEQ ID NO: 1679530 - RNA, 19 nt, Human
ugaugggaaagcauuguaa

SEQ ID NO: 1679531 - RNA, 16 nt, Human
ugauccuaguuccacc

SEQ ID NO: 1679532 - RNA, 15 nt, Human
ugauccucccaccuc

SEQ ID NO: 1679533 - RNA, 22 nt, Human
ugauccuaaugaaugcauaaaa

SEQ ID NO: 1679534 - RNA, 22 nt, Human
ugauccucccaccucagccucc

SEQ ID NO: 1679535 - RNA, 16 nt, Human
ugauccucccaccuca

SEQ ID NO: 1679536 - RNA, 21 nt, Human
ugauccucccaccucagccuc

SEQ ID NO: 1679537 - RNA, 11 nt, Human
ugaugaagaag

SEQ ID NO: 1679538 - RNA, 12 nt, Human
ugaugaagaagu

SEQ ID NO: 1679539 - RNA, 17 nt, Human
ugauuaauggaaauguu

SEQ ID NO: 1679540 - RNA, 15 nt, Human
agccacgguguucug

SEQ ID NO: 1679541 - RNA, 20 nt, Human
ugauuaaccacuucagcuga

SEQ ID NO: 1679542 - RNA, 23 nt, Human
ugauuaaguaaugauaacuggaa

SEQ ID NO: 1679543 - RNA, 19 nt, Human
ugauuaaauucuugcaaag

SEQ ID NO: 1679544 - RNA, 15 nt, Human
ugauggugcaaugac

SEQ ID NO: 1679545 - RNA, 15 nt, Human
ugauggugaugaaau

SEQ ID NO: 1679546 - RNA, 16 nt, Human
ugauggugaugaaaug

SEQ ID NO: 1679547 - RNA, 13 nt, Human
ugauggugcaaug

SEQ ID NO: 1679548 - RNA, 17 nt, Human
ugauggugaugaaaugu

SEQ ID NO: 1679549 - RNA, 20 nt, Human
ugauuaaauucuugcaaagu

SEQ ID NO: 1679550 - RNA, 19 nt, Human
ugauuaaccacuucagcug

SEQ ID NO: 1679551 - RNA, 18 nt, Human
ugauuaaguaaugauaac

SEQ ID NO: 1679552 - RNA, 21 nt, Human
agccagcaguucagagcugcc

SEQ ID NO: 1679553 - RNA, 20 nt, Human
agccagcaguucagagcugc

SEQ ID NO: 1679554 - RNA, 22 nt, Human
agccagcaguucagagcugccc

SEQ ID NO: 1679555 - RNA, 20 nt, Human
agccacugcaccgggccaca

SEQ ID NO: 1679556 - RNA, 18 nt, Human
agccacugcaccgggcca

SEQ ID NO: 1679557 - RNA, 19 nt, Human
agccacugcaccgggccac

SEQ ID NO: 1679558 - RNA, 10 nt, Human
agccagagga

SEQ ID NO: 1679559 - RNA, 11 nt, Human
agccagaggag

SEQ ID NO: 1679560 - RNA, 15 nt, Human
agccagcaguucaga

SEQ ID NO: 1679561 - RNA, 19 nt, Human
agccagcaguucagagcug

SEQ ID NO: 1679562 - RNA, 17 nt, Human
agccagcaguucagagc

SEQ ID NO: 1679563 - RNA, 19 nt, Human
agcccugcuuugggcugcc

SEQ ID NO: 1679564 - RNA, 20 nt, Human
agcccugcuuugggcugccc

SEQ ID NO: 1679565 - RNA, 17 nt, Human
agcccugcuuugggcug

SEQ ID NO: 1679566 - RNA, 22 nt, Human
ugcacacaccagagcccaccuu

SEQ ID NO: 1679567 - RNA, 21 nt, Human
ugcacacaccagagcccaccu

SEQ ID NO: 1679568 - RNA, 17 nt, Human
ugcacacaccagagccc

SEQ ID NO: 1679569 - RNA, 18 nt, Human
ugcacacaccagagccca

SEQ ID NO: 1679570 - RNA, 14 nt, Human
agcccugguggcag

SEQ ID NO: 1679571 - RNA, 15 nt, Human
agcccugguggcagu

SEQ ID NO: 1679572 - RNA, 16 nt, Human
agcccugguggcagug

SEQ ID NO: 1679573 - RNA, 23 nt, Human
agccccauucugccugcccaggc

SEQ ID NO: 1679574 - RNA, 21 nt, Human
ugcaaaccaucauugaaaucu

SEQ ID NO: 1679575 - RNA, 16 nt, Human
agccccaaaacucucc

SEQ ID NO: 1679576 - RNA, 17 nt, Human
agccccaaaacucuccu

SEQ ID NO: 1679577 - RNA, 18 nt, Human
agccccaaaacucuccuc

SEQ ID NO: 1679578 - RNA, 21 nt, Human
agccccauucugccugcccag

SEQ ID NO: 1679579 - RNA, 22 nt, Human
agccccauucugccugcccagg

SEQ ID NO: 1679580 - RNA, 13 nt, Human
agccucagucucc

SEQ ID NO: 1679581 - RNA, 16 nt, Human
agccucagucucccuc

SEQ ID NO: 1679582 - RNA, 19 nt, Human
agccucagucucccucccu

SEQ ID NO: 1679583 - RNA, 20 nt, Human
agccucagucucccucccuu

SEQ ID NO: 1679584 - RNA, 22 nt, Human
agccucagucucccucccuugg

SEQ ID NO: 1679585 - RNA, 17 nt, Human
agccucacaguccuuac

SEQ ID NO: 1679586 - RNA, 18 nt, Human
agccucacaguccuuacc

SEQ ID NO: 1679587 - RNA, 20 nt, Human
agccucaaccuccugggcua

SEQ ID NO: 1679588 - RNA, 18 nt, Human
agccgagaucacgccacu

SEQ ID NO: 1679589 - RNA, 21 nt, Human
ugcagccucaaccuccugggc

SEQ ID NO: 1679590 - RNA, 22 nt, Human
ugcagccucaaccuccugggcu

SEQ ID NO: 1679591 - RNA, 23 nt, Human
ugcagccucaaccuccugggcua

SEQ ID NO: 1679592 - RNA, 17 nt, Human
agccuccaugcugccuc

SEQ ID NO: 1679593 - RNA, 21 nt, Human
agccuccaagcuccaucucca

SEQ ID NO: 1679594 - RNA, 23 nt, Human
agccucugaaaaccaauguucuc

SEQ ID NO: 1679595 - RNA, 18 nt, Human
ugcagacucuacagaggc

SEQ ID NO: 1679596 - RNA, 16 nt, Human
ugcagacucuacagag

SEQ ID NO: 1679597 - RNA, 17 nt, Human
ugcagacucuacagagg

SEQ ID NO: 1679598 - RNA, 16 nt, Human
agcccuuagcagggaa

SEQ ID NO: 1679599 - RNA, 21 nt, Human
agcccuuagcagggaaacagc

SEQ ID NO: 1679600 - RNA, 21 nt, Human
agccgagauagccaaggccaa

SEQ ID NO: 1679601 - RNA, 17 nt, Human
agccgagaucacgccac

SEQ ID NO: 1679602 - RNA, 21 nt, Human
agcccugguggcagugggagc

SEQ ID NO: 1679603 - RNA, 19 nt, Human
ugcacuccccugcugggug

SEQ ID NO: 1679604 - RNA, 16 nt, Human
ugcacuccccugcugg

SEQ ID NO: 1679605 - RNA, 17 nt, Human
ugcacuccccugcuggg

SEQ ID NO: 1679606 - RNA, 15 nt, Human
ugcacacauuuuuua

SEQ ID NO: 1679607 - RNA, 13 nt, Human
ugcacacauuuuu

SEQ ID NO: 1679608 - RNA, 12 nt, Human
ugcacacauuuu

SEQ ID NO: 1679609 - RNA, 11 nt, Human
ugcacacauuu

SEQ ID NO: 1679610 - RNA, 14 nt, Human
ugcagaagacagua

SEQ ID NO: 1679611 - RNA, 22 nt, Human
ugcagacaggcaagcaccuccu

SEQ ID NO: 1679612 - RNA, 15 nt, Human
ugcagaagacaguau

SEQ ID NO: 1679613 - RNA, 13 nt, Human
aguucucuccuuc

SEQ ID NO: 1679614 - RNA, 16 nt, Human
aguucucuccuucuuc

SEQ ID NO: 1679615 - RNA, 15 nt, Human
uguuuucucuugaga

SEQ ID NO: 1679616 - RNA, 17 nt, Human
uguuuucaguguacaug

SEQ ID NO: 1679617 - RNA, 15 nt, Human
uguuuucaguguaca

SEQ ID NO: 1679618 - RNA, 13 nt, Human
uguuuuauaauuu

SEQ ID NO: 1679619 - RNA, 20 nt, Human
uguuuuauaauuuugugaag

SEQ ID NO: 1679620 - RNA, 19 nt, Human
uguuuggggaugagaaagg

SEQ ID NO: 1679621 - RNA, 15 nt, Human
uguuuggggaugaga

SEQ ID NO: 1679622 - RNA, 19 nt, Human
uguuugcuaagcauuccaa

SEQ ID NO: 1679623 - RNA, 14 nt, Human
uguugucagcugaa

SEQ ID NO: 1679624 - RNA, 15 nt, Human
uguuugcaucugaaa

SEQ ID NO: 1679625 - RNA, 14 nt, Human
uguuugccucugcc

SEQ ID NO: 1679626 - RNA, 16 nt, Human
uguuugccucugccuc

SEQ ID NO: 1679627 - RNA, 15 nt, Human
uguuugcuaagcauu

SEQ ID NO: 1679628 - RNA, 19 nt, Human
aguugcaacuuuguauaaa

SEQ ID NO: 1679629 - RNA, 23 nt, Human
aguugauucagcucugcaagaau

SEQ ID NO: 1679630 - RNA, 14 nt, Human
aguugauucagcuc

SEQ ID NO: 1679631 - RNA, 15 nt, Human
aguugauucagcucu

SEQ ID NO: 1679632 - RNA, 17 nt, Human
aguugauucagcucugc

SEQ ID NO: 1679633 - RNA, 18 nt, Human
aguugauucagcucugca

SEQ ID NO: 1679634 - RNA, 13 nt, Human
aguugauucagcu

SEQ ID NO: 1679635 - RNA, 22 nt, Human
aguugauagcacagacccugcc

SEQ ID NO: 1679636 - RNA, 23 nt, Human
aguugauagcacagacccugccc

SEQ ID NO: 1679637 - RNA, 21 nt, Human
aguugauaugccuuuucccaa

SEQ ID NO: 1679638 - RNA, 15 nt, Human
aguugauagcacaga

SEQ ID NO: 1679639 - RNA, 19 nt, Human
aguugauagcacagacccu

SEQ ID NO: 1679640 - RNA, 20 nt, Human
aguugauagcacagacccug

SEQ ID NO: 1679641 - RNA, 21 nt, Human
aguugauagcacagacccugc

SEQ ID NO: 1679642 - RNA, 13 nt, Human
aguucugaagaag

SEQ ID NO: 1679643 - RNA, 14 nt, Human
aguucugaagaaga

SEQ ID NO: 1679644 - RNA, 15 nt, Human
aguucugaagaagau

SEQ ID NO: 1679645 - RNA, 16 nt, Human
aguucugaagaagaug

SEQ ID NO: 1679646 - RNA, 15 nt, Human
aguuucguuuucaaa

SEQ ID NO: 1679647 - RNA, 16 nt, Human
aguuucguuuucaaaa

SEQ ID NO: 1679648 - RNA, 16 nt, Human
aguuucucagcuccca

SEQ ID NO: 1679649 - RNA, 21 nt, Human
aguuucuccaagcaggacaug

SEQ ID NO: 1679650 - RNA, 13 nt, Human
aguuucuccaagc

SEQ ID NO: 1679651 - RNA, 15 nt, Human
aguuucuccaagcag

SEQ ID NO: 1679652 - RNA, 20 nt, Human
uuaaauucuugcaaaguauc

SEQ ID NO: 1679653 - RNA, 16 nt, Human
uuaaauucuugcaaag

SEQ ID NO: 1679654 - RNA, 13 nt, Human
uuaaauucuugca

SEQ ID NO: 1679655 - RNA, 22 nt, Human
aguuuucacucuuauugcccac

SEQ ID NO: 1679656 - RNA, 19 nt, Human
aguuugugcugguguaugu

SEQ ID NO: 1679657 - RNA, 17 nt, Human
uuaaaacaacacucaca

SEQ ID NO: 1679658 - RNA, 18 nt, Human
uuaaaaaguggaaaaaua

SEQ ID NO: 1679659 - RNA, 20 nt, Human
aguugccagucaccccggcc

SEQ ID NO: 1679660 - RNA, 15 nt, Human
uuaaaaaagaaacau

SEQ ID NO: 1679661 - RNA, 18 nt, Human
uuaaaaaagaaacauuug

SEQ ID NO: 1679662 - RNA, 22 nt, Human
uuaaauaaugugaaacuggauu

SEQ ID NO: 1679663 - RNA, 21 nt, Human
uuaaauaaugugaaacuggau

SEQ ID NO: 1679664 - RNA, 20 nt, Human
uuaaauaaugugaaacugga

SEQ ID NO: 1679665 - RNA, 13 nt, Human
uuaaauaaaucau

SEQ ID NO: 1679666 - RNA, 15 nt, Human
uuaaauaaaucauaa

SEQ ID NO: 1679667 - RNA, 16 nt, Human
uuaaaauauuccugca

SEQ ID NO: 1679668 - RNA, 19 nt, Human
uuaaaauauuccugcauuu

SEQ ID NO: 1679669 - RNA, 17 nt, Human
uuaaaccgccaaggcug

SEQ ID NO: 1679670 - RNA, 14 nt, Human
uuaaaaucauuucu

SEQ ID NO: 1679671 - RNA, 16 nt, Human
uguucccauucuugca

SEQ ID NO: 1679672 - RNA, 23 nt, Human
aguguacauggaauaacauguaa

SEQ ID NO: 1679673 - RNA, 18 nt, Human
uguucuugguuuguaaau

SEQ ID NO: 1679674 - RNA, 17 nt, Human
uguucuugguuuguaaa

SEQ ID NO: 1679675 - RNA, 14 nt, Human
uguucuuuccaaag

SEQ ID NO: 1679676 - RNA, 13 nt, Human
uguucuuuccaaa

SEQ ID NO: 1679677 - RNA, 19 nt, Human
uguucuugguuuguaaauu

SEQ ID NO: 1679678 - RNA, 16 nt, Human
uguucuuaauucuuag

SEQ ID NO: 1679679 - RNA, 14 nt, Human
uguucuuaauucuu

SEQ ID NO: 1679680 - RNA, 14 nt, Human
uguucugggacaca

SEQ ID NO: 1679681 - RNA, 15 nt, Human
uguucugggacacag

SEQ ID NO: 1679682 - RNA, 13 nt, Human
uguucugggacac

SEQ ID NO: 1679683 - RNA, 19 nt, Human
agugggggaguggccacag

SEQ ID NO: 1679684 - RNA, 20 nt, Human
agugggggaguggccacaga

SEQ ID NO: 1679685 - RNA, 18 nt, Human
agugggggaucacagccu

SEQ ID NO: 1679686 - RNA, 13 nt, Human
agugggugaauaa

SEQ ID NO: 1679687 - RNA, 18 nt, Human
agugggugaauaauacag

SEQ ID NO: 1679688 - RNA, 14 nt, Human
aguggcagcugcuu

SEQ ID NO: 1679689 - RNA, 20 nt, Human
aguggcagcugcuuuugucu

SEQ ID NO: 1679690 - RNA, 12 nt, Human
aguggcagcugc

SEQ ID NO: 1679691 - RNA, 13 nt, Human
aguggcagcugcu

SEQ ID NO: 1679692 - RNA, 16 nt, Human
aguggugcgaucuggg

SEQ ID NO: 1679693 - RNA, 21 nt, Human
agugguuccuaauccucuagg

SEQ ID NO: 1679694 - RNA, 19 nt, Human
agugggugaauaauacagu

SEQ ID NO: 1679695 - RNA, 21 nt, Human
aguguacauggaauaacaugu

SEQ ID NO: 1679696 - RNA, 22 nt, Human
aguguacauggaauaacaugua

SEQ ID NO: 1679697 - RNA, 17 nt, Human
aguucccuacuuccugu

SEQ ID NO: 1679698 - RNA, 21 nt, Human
aguuauuuuuauuuauuuaaa

SEQ ID NO: 1679699 - RNA, 19 nt, Human
aguucagagcugcccucuc

SEQ ID NO: 1679700 - RNA, 18 nt, Human
aguucagagcugcccucu

SEQ ID NO: 1679701 - RNA, 17 nt, Human
aguucagagcugcccuc

SEQ ID NO: 1679702 - RNA, 16 nt, Human
aguucagagcugcccu

SEQ ID NO: 1679703 - RNA, 15 nt, Human
aguucagagcugccc

SEQ ID NO: 1679704 - RNA, 14 nt, Human
aguucagagcugcc

SEQ ID NO: 1679705 - RNA, 21 nt, Human
uguuguacucaauuuuaacaa

SEQ ID NO: 1679706 - RNA, 13 nt, Human
uguugucagcuga

SEQ ID NO: 1679707 - RNA, 13 nt, Human
uguugggccagga

SEQ ID NO: 1679708 - RNA, 16 nt, Human
uguugggccaggagcc

SEQ ID NO: 1679709 - RNA, 17 nt, Human
aguuacccaaauuaaga

SEQ ID NO: 1679710 - RNA, 18 nt, Human
aguuacccaaauuaagag

SEQ ID NO: 1679711 - RNA, 20 nt, Human
uguucuuuccaaaguacacu

SEQ ID NO: 1679712 - RNA, 18 nt, Human
uguucuuuccaaaguaca

SEQ ID NO: 1679713 - RNA, 20 nt, Human
aguuauuauauuuacaaaug

SEQ ID NO: 1679714 - RNA, 19 nt, Human
aguuauggcuauaggugcu

SEQ ID NO: 1679715 - RNA, 16 nt, Human
auacauuugauaaagu

SEQ ID NO: 1679716 - RNA, 20 nt, Human
auacauaaacaagaccacgu

SEQ ID NO: 1679717 - RNA, 20 nt, Human
auacaucccuuaccugggaa

SEQ ID NO: 1679718 - RNA, 14 nt, Human
auacaggaaaagcu

SEQ ID NO: 1679719 - RNA, 19 nt, Human
auacaggaaaagcugcuga

SEQ ID NO: 1679720 - RNA, 20 nt, Human
auacaggaaaagcugcugac

SEQ ID NO: 1679721 - RNA, 22 nt, Human
auacaggaaaagcugcugacag

SEQ ID NO: 1679722 - RNA, 21 nt, Human
auacaguucggugagcuacaa

SEQ ID NO: 1679723 - RNA, 20 nt, Human
auacuacaguuuguuaguau

SEQ ID NO: 1679724 - RNA, 16 nt, Human
auacuacaguuuguua

SEQ ID NO: 1679725 - RNA, 15 nt, Human
auacuacaguuuguu

SEQ ID NO: 1679726 - RNA, 13 nt, Human
auacuacaguuug

SEQ ID NO: 1679727 - RNA, 21 nt, Human
auacuaaccagcagaaaugcc

SEQ ID NO: 1679728 - RNA, 19 nt, Human
auaccagccaguaaauggg

SEQ ID NO: 1679729 - RNA, 22 nt, Human
auaccacaggaaccacaagacu

SEQ ID NO: 1679730 - RNA, 17 nt, Human
uuaucaugugaaaucau

SEQ ID NO: 1679731 - RNA, 18 nt, Human
uuaucaugugaaaucauu

SEQ ID NO: 1679732 - RNA, 20 nt, Human
uuaucaugugaaaucauuca

SEQ ID NO: 1679733 - RNA, 22 nt, Human
uuaucaugugaaaucauucauu

SEQ ID NO: 1679734 - RNA, 13 nt, Human
auaauuuugugaa

SEQ ID NO: 1679735 - RNA, 14 nt, Human
auaauuuugugaag

SEQ ID NO: 1679736 - RNA, 15 nt, Human
auaauuuugugaagc

SEQ ID NO: 1679737 - RNA, 20 nt, Human
auaauuuugugaagcaaaau

SEQ ID NO: 1679738 - RNA, 14 nt, Human
auaauuuuuauauu

SEQ ID NO: 1679739 - RNA, 16 nt, Human
auaauuuuuauauuug

SEQ ID NO: 1679740 - RNA, 19 nt, Human
auaauuuuuauauuugaaa

SEQ ID NO: 1679741 - RNA, 21 nt, Human
auaauuuuuauauuugaaaua

SEQ ID NO: 1679742 - RNA, 22 nt, Human
auaauuuuuauauuugaaauau

SEQ ID NO: 1679743 - RNA, 15 nt, Human
auacaaaagcaugug

SEQ ID NO: 1679744 - RNA, 13 nt, Human
auacaaaagcaug

SEQ ID NO: 1679745 - RNA, 12 nt, Human
auacaaaagcau

SEQ ID NO: 1679746 - RNA, 22 nt, Human
auacaaaaaaaaaaaaaaauua

SEQ ID NO: 1679747 - RNA, 22 nt, Human
uuauauauauuuuuuucugaaa

SEQ ID NO: 1679748 - RNA, 18 nt, Human
uuauauaagcuuguauuc

SEQ ID NO: 1679749 - RNA, 16 nt, Human
uuagcaguuugcuuug

SEQ ID NO: 1679750 - RNA, 14 nt, Human
uuagccccauaauu

SEQ ID NO: 1679751 - RNA, 14 nt, Human
uuauaaaucgcuuu

SEQ ID NO: 1679752 - RNA, 17 nt, Human
uuauaaaucgcuuuuga

SEQ ID NO: 1679753 - RNA, 18 nt, Human
uuauaaaucgcuuuugau

SEQ ID NO: 1679754 - RNA, 18 nt, Human
uuauacccccugcaaagc

SEQ ID NO: 1679755 - RNA, 15 nt, Human
auaaacgucuuaaau

SEQ ID NO: 1679756 - RNA, 16 nt, Human
auaaacgucuuaaaua

SEQ ID NO: 1679757 - RNA, 18 nt, Human
auaaacgucuuaaauauu

SEQ ID NO: 1679758 - RNA, 16 nt, Human
auaaacuuuaccuuuu

SEQ ID NO: 1679759 - RNA, 15 nt, Human
auaaacuuuaccuuu

SEQ ID NO: 1679760 - RNA, 13 nt, Human
auaaacuuuaccu

SEQ ID NO: 1679761 - RNA, 23 nt, Human
auaaacacucuugaaaaaugcau

SEQ ID NO: 1679762 - RNA, 18 nt, Human
aguuuucugagaaagacu

SEQ ID NO: 1679763 - RNA, 14 nt, Human
aguuuucugagaaa

SEQ ID NO: 1679764 - RNA, 17 nt, Human
aguuuucugagaaagac

SEQ ID NO: 1679765 - RNA, 12 nt, Human
aguuuucugaga

SEQ ID NO: 1679766 - RNA, 13 nt, Human
aguuuucugagaa

SEQ ID NO: 1679767 - RNA, 16 nt, Human
auaaaccgaacugaug

SEQ ID NO: 1679768 - RNA, 13 nt, Human
auaaauaaaguuu

SEQ ID NO: 1679769 - RNA, 19 nt, Human
auaaauaaaguuuguugaa

SEQ ID NO: 1679770 - RNA, 19 nt, Human
auaaaugugccuucauuuu

SEQ ID NO: 1679771 - RNA, 20 nt, Human
auaaccaguguuguggauuu

SEQ ID NO: 1679772 - RNA, 12 nt, Human
auaacuggaaac

SEQ ID NO: 1679773 - RNA, 23 nt, Human
uuaccauuuugggguacccacug

SEQ ID NO: 1679774 - RNA, 18 nt, Human
uuacaggaaguacuggag

SEQ ID NO: 1679775 - RNA, 22 nt, Human
uuacaggaaguacuggagaaaa

SEQ ID NO: 1679776 - RNA, 15 nt, Human
uuacaggaaguacug

SEQ ID NO: 1679777 - RNA, 16 nt, Human
uuacaggaaguacugg

SEQ ID NO: 1679778 - RNA, 23 nt, Human
uuagaugcaguucugaagaagau

SEQ ID NO: 1679779 - RNA, 22 nt, Human
uuagaugcaguucugaagaaga

SEQ ID NO: 1679780 - RNA, 21 nt, Human
auaauuauaugcuauuucuau

SEQ ID NO: 1679781 - RNA, 23 nt, Human
auaauuauaugcuauuucuauau

SEQ ID NO: 1679782 - RNA, 14 nt, Human
auaauucuacuuug

SEQ ID NO: 1679783 - RNA, 17 nt, Human
auaauuauaugcuauuu

SEQ ID NO: 1679784 - RNA, 19 nt, Human
auaauuauaugcuauuucu

SEQ ID NO: 1679785 - RNA, 14 nt, Human
auaaugaauacuuu

SEQ ID NO: 1679786 - RNA, 19 nt, Human
auaauacaguaucucaggg

SEQ ID NO: 1679787 - RNA, 19 nt, Human
auaaucacuuuuuuccaca

SEQ ID NO: 1679788 - RNA, 21 nt, Human
auaaucuuucacaggggacag

SEQ ID NO: 1679789 - RNA, 23 nt, Human
auaagaaccuuuugagugccuua

SEQ ID NO: 1679790 - RNA, 17 nt, Human
auaaguuaacuuccaau

SEQ ID NO: 1679791 - RNA, 22 nt, Human
auaagaaccuuuugagugccuu

SEQ ID NO: 1679792 - RNA, 16 nt, Human
auaauaaggaaaaguu

SEQ ID NO: 1679793 - RNA, 17 nt, Human
auaauaaggaaaaguuu

SEQ ID NO: 1679794 - RNA, 18 nt, Human
auaauaaggaaaaguuua

SEQ ID NO: 1679795 - RNA, 19 nt, Human
auaauaaggaaaaguuuaa

SEQ ID NO: 1679796 - RNA, 22 nt, Human
auaauaaggaaaaguuuaauau

SEQ ID NO: 1679797 - RNA, 23 nt, Human
auaauacaccacuacauucuguu

SEQ ID NO: 1679798 - RNA, 22 nt, Human
auaaguuaacuuccaauuuaca

SEQ ID NO: 1679799 - RNA, 15 nt, Human
agggggaaggcaggg

SEQ ID NO: 1679800 - RNA, 13 nt, Human
agggggcugggac

SEQ ID NO: 1679801 - RNA, 16 nt, Human
aggggauagagagaga

SEQ ID NO: 1679802 - RNA, 18 nt, Human
aggguaucaggugcugcc

SEQ ID NO: 1679803 - RNA, 12 nt, Human
aggguagggugg

SEQ ID NO: 1679804 - RNA, 16 nt, Human
aggguaucaggugcug

SEQ ID NO: 1679805 - RNA, 19 nt, Human
aggguacuaaggaaucuuu

SEQ ID NO: 1679806 - RNA, 15 nt, Human
ugguccauagagagc

SEQ ID NO: 1679807 - RNA, 16 nt, Human
ugguccauagagagca

SEQ ID NO: 1679808 - RNA, 22 nt, Human
ugguaauuuaagauuccagaga

SEQ ID NO: 1679809 - RNA, 23 nt, Human
uggucaccaaaucagcugcuacu

SEQ ID NO: 1679810 - RNA, 21 nt, Human
uggucaccaaaucagcugcua

SEQ ID NO: 1679811 - RNA, 23 nt, Human
uggguggaugccugguggcagcu

SEQ ID NO: 1679812 - RNA, 22 nt, Human
ugggucuuguuuuuuuuuucca

SEQ ID NO: 1679813 - RNA, 14 nt, Human
uggguggaugccug

SEQ ID NO: 1679814 - RNA, 21 nt, Human
agggugaugggaaagcauugu

SEQ ID NO: 1679815 - RNA, 22 nt, Human
agggugaugggaaagcauugua

SEQ ID NO: 1679816 - RNA, 19 nt, Human
uggugaacagaacaaaagg

SEQ ID NO: 1679817 - RNA, 17 nt, Human
aggguggugaccucugc

SEQ ID NO: 1679818 - RNA, 18 nt, Human
aggguggugaccucugcc

SEQ ID NO: 1679819 - RNA, 19 nt, Human
aggguggugaccucugccu

SEQ ID NO: 1679820 - RNA, 21 nt, Human
aggguggugaccucugccuga

SEQ ID NO: 1679821 - RNA, 13 nt, Human
aggguuggccccu

SEQ ID NO: 1679822 - RNA, 14 nt, Human
aggguuggccccug

SEQ ID NO: 1679823 - RNA, 17 nt, Human
aggguuggccccugccc

SEQ ID NO: 1679824 - RNA, 15 nt, Human
aggguugggcuggug

SEQ ID NO: 1679825 - RNA, 20 nt, Human
uggucucgaacuccugaccu

SEQ ID NO: 1679826 - RNA, 21 nt, Human
uggucucgaacuccugaccuu

SEQ ID NO: 1679827 - RNA, 19 nt, Human
uggucucgaacuccugacc

SEQ ID NO: 1679828 - RNA, 13 nt, Human
uggucccacccca

SEQ ID NO: 1679829 - RNA, 19 nt, Human
ugguccauagagagcaaga

SEQ ID NO: 1679830 - RNA, 22 nt, Human
ugguccaugggccauaugaaaa

SEQ ID NO: 1679831 - RNA, 16 nt, Human
uggucuuauuuguaaa

SEQ ID NO: 1679832 - RNA, 12 nt, Human
uggucuguguga

SEQ ID NO: 1679833 - RNA, 22 nt, Human
uggucugugagaugcuagaacu

SEQ ID NO: 1679834 - RNA, 17 nt, Human
agguaugcaaucaaauc

SEQ ID NO: 1679835 - RNA, 17 nt, Human
aggguugggcugguguc

SEQ ID NO: 1679836 - RNA, 20 nt, Human
aggguuuauguuuaggaugu

SEQ ID NO: 1679837 - RNA, 23 nt, Human
aggucauuuuuuuuaagaaaaag

SEQ ID NO: 1679838 - RNA, 22 nt, Human
aggucauuuuuuuuaagaaaaa

SEQ ID NO: 1679839 - RNA, 21 nt, Human
aggucaaggcugcagugagcc

SEQ ID NO: 1679840 - RNA, 15 nt, Human
aggucagugcaaaua

SEQ ID NO: 1679841 - RNA, 22 nt, Human
aggucuugaacuccuggccuca

SEQ ID NO: 1679842 - RNA, 20 nt, Human
aggucuugaacuccuggccu

SEQ ID NO: 1679843 - RNA, 21 nt, Human
aggucuugaacuccuggccuc

SEQ ID NO: 1679844 - RNA, 17 nt, Human
agguccacaacacacag

SEQ ID NO: 1679845 - RNA, 15 nt, Human
ugguggcagagugga

SEQ ID NO: 1679846 - RNA, 12 nt, Human
ugguggcagcuc

SEQ ID NO: 1679847 - RNA, 16 nt, Human
ugguggcagcucaccu

SEQ ID NO: 1679848 - RNA, 19 nt, Human
ugguggcagcucaccucuc

SEQ ID NO: 1679849 - RNA, 20 nt, Human
ugguggcagcucaccucucc

SEQ ID NO: 1679850 - RNA, 23 nt, Human
ugguggcagcucaccucucccuu

SEQ ID NO: 1679851 - RNA, 15 nt, Human
ugguguguguaugcg

SEQ ID NO: 1679852 - RNA, 12 nt, Human
ugguggcagcug

SEQ ID NO: 1679853 - RNA, 15 nt, Human
ugguguuuccuggca

SEQ ID NO: 1679854 - RNA, 17 nt, Human
ugguguuuccuggcacu

SEQ ID NO: 1679855 - RNA, 18 nt, Human
ugguuaagucuguuuuau

SEQ ID NO: 1679856 - RNA, 15 nt, Human
ugguuaagucuguuu

SEQ ID NO: 1679857 - RNA, 20 nt, Human
ugguucaggguuggccccug

SEQ ID NO: 1679858 - RNA, 22 nt, Human
ugguucaggguuggccccugcc

SEQ ID NO: 1679859 - RNA, 23 nt, Human
ugguucaggguuggccccugccc

SEQ ID NO: 1679860 - RNA, 18 nt, Human
ugguuuuaguugcaacuu

SEQ ID NO: 1679861 - RNA, 12 nt, Human
ugguuuucuguu

SEQ ID NO: 1679862 - RNA, 21 nt, Human
ugguuuguaaauuaacuuuua

SEQ ID NO: 1679863 - RNA, 15 nt, Human
ugguuucagaaaugu

SEQ ID NO: 1679864 - RNA, 14 nt, Human
ugguuucagaaaug

SEQ ID NO: 1679865 - RNA, 21 nt, Human
uguaaauacaauuuuguuucu

SEQ ID NO: 1679866 - RNA, 10 nt, Human
uguaaauccc

SEQ ID NO: 1679867 - RNA, 23 nt, Human
aggugauccacccaccucagccu

SEQ ID NO: 1679868 - RNA, 15 nt, Human
ugguuuucuguucuu

SEQ ID NO: 1679869 - RNA, 13 nt, Human
ugguuuucuguuc

SEQ ID NO: 1679870 - RNA, 16 nt, Human
uguaaauacaauuuug

SEQ ID NO: 1679871 - RNA, 17 nt, Human
uguaaauacaauuuugu

SEQ ID NO: 1679872 - RNA, 18 nt, Human
uguaaauacaauuuuguu

SEQ ID NO: 1679873 - RNA, 19 nt, Human
uguaaauacaauuuuguuu

SEQ ID NO: 1679874 - RNA, 16 nt, Human
uguaaaggaauuuaaa

SEQ ID NO: 1679875 - RNA, 16 nt, Human
agguggggcagcuuga

SEQ ID NO: 1679876 - RNA, 14 nt, Human
agguggggcagcuu

SEQ ID NO: 1679877 - RNA, 23 nt, Human
agguggggucacucuggcagcuc

SEQ ID NO: 1679878 - RNA, 22 nt, Human
aggugauccacucgccuucauc

SEQ ID NO: 1679879 - RNA, 13 nt, Human
agguggggcagcu

SEQ ID NO: 1679880 - RNA, 18 nt, Human
aggugugacugaauuucu

SEQ ID NO: 1679881 - RNA, 23 nt, Human
aggugugaaccaccacacccagc

SEQ ID NO: 1679882 - RNA, 22 nt, Human
aggugugaaccaccacacccag

SEQ ID NO: 1679883 - RNA, 20 nt, Human
aggugugagccaccacgccc

SEQ ID NO: 1679884 - RNA, 20 nt, Human
aggugugacugaauuucuuu

SEQ ID NO: 1679885 - RNA, 14 nt, Human
aggugugagucacc

SEQ ID NO: 1679886 - RNA, 20 nt, Human
aggugugagucaccaagccc

SEQ ID NO: 1679887 - RNA, 16 nt, Human
agguugucugaaguca

SEQ ID NO: 1679888 - RNA, 20 nt, Human
agguugucugaagucacugc

SEQ ID NO: 1679889 - RNA, 13 nt, Human
uguaaggaaugau

SEQ ID NO: 1679890 - RNA, 14 nt, Human
uguaaggaaugauu

SEQ ID NO: 1679891 - RNA, 15 nt, Human
uguaaggaaugauua

SEQ ID NO: 1679892 - RNA, 22 nt, Human
uguaagcucuacugaggugcua

SEQ ID NO: 1679893 - RNA, 18 nt, Human
uguaagaaaauaucacuu

SEQ ID NO: 1679894 - RNA, 15 nt, Human
uguaaggcaaucaug

SEQ ID NO: 1679895 - RNA, 16 nt, Human
uguaauuugugauaca

SEQ ID NO: 1679896 - RNA, 18 nt, Human
uguaaggaaugauuaauu

SEQ ID NO: 1679897 - RNA, 21 nt, Human
uguaauuugugauacaaugcu

SEQ ID NO: 1679898 - RNA, 17 nt, Human
uguaauuugugauacaa

SEQ ID NO: 1679899 - RNA, 13 nt, Human
uguacaaaguauu

SEQ ID NO: 1679900 - RNA, 14 nt, Human
uguacaaaguauua

SEQ ID NO: 1679901 - RNA, 19 nt, Human
uguacaaaguagaagucuu

SEQ ID NO: 1679902 - RNA, 23 nt, Human
uguacaaaguagaagucuuagau

SEQ ID NO: 1679903 - RNA, 15 nt, Human
uguacuugcucuuga

SEQ ID NO: 1679904 - RNA, 19 nt, Human
uguacuugcucuugaugcc

SEQ ID NO: 1679905 - RNA, 21 nt, Human
uguagaagucacauuccugaa

SEQ ID NO: 1679906 - RNA, 20 nt, Human
uguacaugaaaacacauuuu

SEQ ID NO: 1679907 - RNA, 19 nt, Human
uguacaugaaaacacauuu

SEQ ID NO: 1679908 - RNA, 18 nt, Human
uguacaugaaaacacauu

SEQ ID NO: 1679909 - RNA, 17 nt, Human
uguacaugaaaacacau

SEQ ID NO: 1679910 - RNA, 23 nt, Human
aguccccuguuuguuucugaaag

SEQ ID NO: 1679911 - RNA, 13 nt, Human
agucccugccaau

SEQ ID NO: 1679912 - RNA, 14 nt, Human
agucccugccaaug

SEQ ID NO: 1679913 - RNA, 16 nt, Human
agucccugccaaugga

SEQ ID NO: 1679914 - RNA, 22 nt, Human
ugucucuggauuauauuaugaa

SEQ ID NO: 1679915 - RNA, 13 nt, Human
ugucucugagagu

SEQ ID NO: 1679916 - RNA, 17 nt, Human
ugucucuacuaaaaaua

SEQ ID NO: 1679917 - RNA, 18 nt, Human
ugucucuugguccugcug

SEQ ID NO: 1679918 - RNA, 19 nt, Human
ugucucuugguccugcugc

SEQ ID NO: 1679919 - RNA, 20 nt, Human
ugucucuugguccugcugca

SEQ ID NO: 1679920 - RNA, 21 nt, Human
ugucucuugguccugcugcag

SEQ ID NO: 1679921 - RNA, 22 nt, Human
ugucucuuuaaugucacaggca

SEQ ID NO: 1679922 - RNA, 22 nt, Human
ugucucuugguccugcugcagu

SEQ ID NO: 1679923 - RNA, 21 nt, Human
ugucucuuuaaugucacaggc

SEQ ID NO: 1679924 - RNA, 14 nt, Human
ugucuuaauuaaaa

SEQ ID NO: 1679925 - RNA, 15 nt, Human
ugucuugccuuuuuc

SEQ ID NO: 1679926 - RNA, 16 nt, Human
ugucuugccuuuuuca

SEQ ID NO: 1679927 - RNA, 17 nt, Human
ugucuugccuuuuucau

SEQ ID NO: 1679928 - RNA, 21 nt, Human
ugucuugccuuuuucauuauu

SEQ ID NO: 1679929 - RNA, 17 nt, Human
ugucuuuaaaugcugcu

SEQ ID NO: 1679930 - RNA, 22 nt, Human
ugugaacaguuguguuugaagc

SEQ ID NO: 1679931 - RNA, 15 nt, Human
ugugaaccaccacac

SEQ ID NO: 1679932 - RNA, 16 nt, Human
ugugaaccaccacacc

SEQ ID NO: 1679933 - RNA, 17 nt, Human
ugugaaccaccacaccc

SEQ ID NO: 1679934 - RNA, 22 nt, Human
ugugaaccaccacacccagccc

SEQ ID NO: 1679935 - RNA, 23 nt, Human
ugugaaccaccacacccagccca

SEQ ID NO: 1679936 - RNA, 14 nt, Human
ugugaacuaaacuu

SEQ ID NO: 1679937 - RNA, 19 nt, Human
ugugaacuaaacuuucaca

SEQ ID NO: 1679938 - RNA, 20 nt, Human
ugugaacuaaacuuucacac

SEQ ID NO: 1679939 - RNA, 15 nt, Human
ugucuugcaauggca

SEQ ID NO: 1679940 - RNA, 17 nt, Human
ugucuugcaauggcagc

SEQ ID NO: 1679941 - RNA, 18 nt, Human
ugucuugcaauggcagcc

SEQ ID NO: 1679942 - RNA, 20 nt, Human
ugucuugcaauggcagccuu

SEQ ID NO: 1679943 - RNA, 21 nt, Human
ugucuugcaauggcagccuug

SEQ ID NO: 1679944 - RNA, 14 nt, Human
ugucuucacaacag

SEQ ID NO: 1679945 - RNA, 22 nt, Human
ugucuucauaccuacauguauu

SEQ ID NO: 1679946 - RNA, 17 nt, Human
ugugauggggcccugcc

SEQ ID NO: 1679947 - RNA, 18 nt, Human
ugugauggggcccugccu

SEQ ID NO: 1679948 - RNA, 14 nt, Human
agugagagcugggu

SEQ ID NO: 1679949 - RNA, 21 nt, Human
agugagcagucaggaaagaga

SEQ ID NO: 1679950 - RNA, 15 nt, Human
ugugauggggcccug

SEQ ID NO: 1679951 - RNA, 16 nt, Human
ugugauggggcccugc

SEQ ID NO: 1679952 - RNA, 16 nt, Human
agugagccgagauugu

SEQ ID NO: 1679953 - RNA, 22 nt, Human
agugagacucugucucaaaaaa

SEQ ID NO: 1679954 - RNA, 16 nt, Human
agugagacucugucuc

SEQ ID NO: 1679955 - RNA, 17 nt, Human
agugagacucugucuca

SEQ ID NO: 1679956 - RNA, 17 nt, Human
agugagacccugucuca

SEQ ID NO: 1679957 - RNA, 21 nt, Human
agugagacccugucucaaaaa

SEQ ID NO: 1679958 - RNA, 13 nt, Human
agugagacucugu

SEQ ID NO: 1679959 - RNA, 20 nt, Human
agugaaacucguuaauuugu

SEQ ID NO: 1679960 - RNA, 14 nt, Human
agugagacagcucu

SEQ ID NO: 1679961 - RNA, 22 nt, Human
agugaaagaggcagcuugaaac

SEQ ID NO: 1679962 - RNA, 16 nt, Human
agugaaagaggcagcu

SEQ ID NO: 1679963 - RNA, 17 nt, Human
agugaaagaaaauaaca

SEQ ID NO: 1679964 - RNA, 11 nt, Human
agugaaaaagg

SEQ ID NO: 1679965 - RNA, 17 nt, Human
agugaaaaaggaggaag

SEQ ID NO: 1679966 - RNA, 20 nt, Human
agugaaaaaggaggaagaga

SEQ ID NO: 1679967 - RNA, 23 nt, Human
agugaaaaaggaggaagagaaaa

SEQ ID NO: 1679968 - RNA, 14 nt, Human
agucuguuuuauga

SEQ ID NO: 1679969 - RNA, 17 nt, Human
agucuguuuuaugacuu

SEQ ID NO: 1679970 - RNA, 18 nt, Human
agucuguuuuaugacuuc

SEQ ID NO: 1679971 - RNA, 14 nt, Human
agucucccucccuu

SEQ ID NO: 1679972 - RNA, 18 nt, Human
agucucccucccuugggg

SEQ ID NO: 1679973 - RNA, 18 nt, Human
agucucugaagugaaacu

SEQ ID NO: 1679974 - RNA, 19 nt, Human
agucucugaagugaaacug

SEQ ID NO: 1679975 - RNA, 19 nt, Human
agucuccaaagucucugga

SEQ ID NO: 1679976 - RNA, 18 nt, Human
ugugagcaucacaguuuu

SEQ ID NO: 1679977 - RNA, 19 nt, Human
ugugagcacaaagguagcu

SEQ ID NO: 1679978 - RNA, 14 nt, Human
ugugaacugaacuc

SEQ ID NO: 1679979 - RNA, 23 nt, Human
ugugaacugaacucugacaacag

SEQ ID NO: 1679980 - RNA, 14 nt, Human
ugugaagcaaaauu

SEQ ID NO: 1679981 - RNA, 23 nt, Human
agguuuggacaaaauggaauacu

SEQ ID NO: 1679982 - RNA, 12 nt, Human
uguagagccagg

SEQ ID NO: 1679983 - RNA, 15 nt, Human
uguagagccaggguc

SEQ ID NO: 1679984 - RNA, 12 nt, Human
uguaugugugaa

SEQ ID NO: 1679985 - RNA, 13 nt, Human
uguaugugugaag

SEQ ID NO: 1679986 - RNA, 12 nt, Human
uguauuaagaau

SEQ ID NO: 1679987 - RNA, 16 nt, Human
uguauuaagaaugaaa

SEQ ID NO: 1679988 - RNA, 15 nt, Human
uguaucccaugagcc

SEQ ID NO: 1679989 - RNA, 16 nt, Human
uguaucccaugagccu

SEQ ID NO: 1679990 - RNA, 14 nt, Human
uguauguguaagua

SEQ ID NO: 1679991 - RNA, 13 nt, Human
aguagcugggacu

SEQ ID NO: 1679992 - RNA, 14 nt, Human
aguagcugggacua

SEQ ID NO: 1679993 - RNA, 16 nt, Human
ugucaaaguggugaga

SEQ ID NO: 1679994 - RNA, 19 nt, Human
ugucaaaguggugagaggc

SEQ ID NO: 1679995 - RNA, 15 nt, Human
uguauuagucacaga

SEQ ID NO: 1679996 - RNA, 11 nt, Human
uguauuaugug

SEQ ID NO: 1679997 - RNA, 14 nt, Human
ugucaaagugguga

SEQ ID NO: 1679998 - RNA, 15 nt, Human
ugucaaaguggugag

SEQ ID NO: 1679999 - RNA, 22 nt, Human
agucacagagauaauucuagcu

SEQ ID NO: 1680000 - RNA, 21 nt, Human
aguauuuaauucauguugccu

SEQ ID NO: 1680001 - RNA, 15 nt, Human
aguauuguccagguc

SEQ ID NO: 1680002 - RNA, 16 nt, Human
aguauuguccaggucu

SEQ ID NO: 1680003 - RNA, 15 nt, Human
agucacugagacagc

SEQ ID NO: 1680004 - RNA, 16 nt, Human
agucacugagacagcc

SEQ ID NO: 1680005 - RNA, 17 nt, Human
agucacugagacagccc

SEQ ID NO: 1680006 - RNA, 15 nt, Human
ugucagcauagaagu

SEQ ID NO: 1680007 - RNA, 20 nt, Human
agucacauuccaagccucau

SEQ ID NO: 1680008 - RNA, 15 nt, Human
aguauuguacaaagu

SEQ ID NO: 1680009 - RNA, 20 nt, Human
aguauuguacaaaguauuaa

SEQ ID NO: 1680010 - RNA, 22 nt, Human
aguauuguacaaaguauuaagc

SEQ ID NO: 1680011 - RNA, 23 nt, Human
aguauuguacaaaguauuaagca

SEQ ID NO: 1680012 - RNA, 11 nt, Human
aguauuguaca

SEQ ID NO: 1680013 - RNA, 15 nt, Human
aguauuauaccuuuu

SEQ ID NO: 1680014 - RNA, 14 nt, Human
aguauuauaccuuu

SEQ ID NO: 1680015 - RNA, 22 nt, Human
aguagcugggacuacaggcacc

SEQ ID NO: 1680016 - RNA, 19 nt, Human
aguagcugggacuacaggc

SEQ ID NO: 1680017 - RNA, 21 nt, Human
aguagcugggacuacaggcac

SEQ ID NO: 1680018 - RNA, 21 nt, Human
aguauuagaauaccacaggaa

SEQ ID NO: 1680019 - RNA, 18 nt, Human
aguauguuagugcaaauu

SEQ ID NO: 1680020 - RNA, 21 nt, Human
aguauguuagugcaaauuguc

SEQ ID NO: 1680021 - RNA, 17 nt, Human
ugucccuuuuccuuuuu

SEQ ID NO: 1680022 - RNA, 12 nt, Human
ugucccuuuucc

SEQ ID NO: 1680023 - RNA, 14 nt, Human
ugucccugcacuug

SEQ ID NO: 1680024 - RNA, 20 nt, Human
ugucccuaccgagucucuuc

SEQ ID NO: 1680025 - RNA, 21 nt, Human
ugucccuaccgagucucuucu

SEQ ID NO: 1680026 - RNA, 22 nt, Human
ugucccuaccgagucucuucuc

SEQ ID NO: 1680027 - RNA, 20 nt, Human
uguccaggcacugcugccca

SEQ ID NO: 1680028 - RNA, 21 nt, Human
uguccaggcacugcugcccag

SEQ ID NO: 1680029 - RNA, 19 nt, Human
uguccaggcacugcugccc

SEQ ID NO: 1680030 - RNA, 18 nt, Human
agucacugagacagcccg

SEQ ID NO: 1680031 - RNA, 16 nt, Human
ugucagccauuccugu

SEQ ID NO: 1680032 - RNA, 23 nt, Human
ugucagcuccccucggagaagag

SEQ ID NO: 1680033 - RNA, 20 nt, Human
ugucagcuccccucggagaa

SEQ ID NO: 1680034 - RNA, 21 nt, Human
ugucagcuccccucggagaag

SEQ ID NO: 1680035 - RNA, 14 nt, Human
aguccccuguuugu

SEQ ID NO: 1680036 - RNA, 19 nt, Human
aguccccuguuuguuucug

SEQ ID NO: 1680037 - RNA, 20 nt, Human
agucccaggcugagccucag

SEQ ID NO: 1680038 - RNA, 21 nt, Human
agucccaccuuggcugcaggg

SEQ ID NO: 1680039 - RNA, 23 nt, Human
agucccaccuuggcugcagggag

SEQ ID NO: 1680040 - RNA, 23 nt, Human
agucagaucugccuaaggacuuc

SEQ ID NO: 1680041 - RNA, 15 nt, Human
agucagucauucaga

SEQ ID NO: 1680042 - RNA, 21 nt, Human
agucagucauucagauaugau

SEQ ID NO: 1680043 - RNA, 21 nt, Human
agucagaucugccuaaggacu

SEQ ID NO: 1680044 - RNA, 22 nt, Human
agucagaucugccuaaggacuu

SEQ ID NO: 1680045 - RNA, 20 nt, Human
agucagaucugccuaaggac

SEQ ID NO: 1680046 - RNA, 17 nt, Human
agucagaucugccuaag

SEQ ID NO: 1680047 - RNA, 15 nt, Human
agacuuuuaugauac

SEQ ID NO: 1680048 - RNA, 15 nt, Human
agacuuuuccaaccc

SEQ ID NO: 1680049 - RNA, 12 nt, Human
agacuuuuauga

SEQ ID NO: 1680050 - RNA, 19 nt, Human
agacuuuggaaagaguagg

SEQ ID NO: 1680051 - RNA, 19 nt, Human
agacuuuucuuucagccaa

SEQ ID NO: 1680052 - RNA, 16 nt, Human
agagacacaagccuuc

SEQ ID NO: 1680053 - RNA, 19 nt, Human
agagacacaagccuucggc

SEQ ID NO: 1680054 - RNA, 20 nt, Human
agacuggugacugauucuuc

SEQ ID NO: 1680055 - RNA, 21 nt, Human
agacuggugacugauucuuca

SEQ ID NO: 1680056 - RNA, 20 nt, Human
agacugguuccauggccucu

SEQ ID NO: 1680057 - RNA, 14 nt, Human
agacuguacaaagu

SEQ ID NO: 1680058 - RNA, 17 nt, Human
agacuuuggaaagacuu

SEQ ID NO: 1680059 - RNA, 15 nt, Human
agacuuuggaaagag

SEQ ID NO: 1680060 - RNA, 21 nt, Human
ucuuuuuucuaaaguaaaaac

SEQ ID NO: 1680061 - RNA, 22 nt, Human
ucuuuuuucuaaaguaaaaaca

SEQ ID NO: 1680062 - RNA, 17 nt, Human
ucuuugucuacaccauu

SEQ ID NO: 1680063 - RNA, 14 nt, Human
ucuuuguggcuucc

SEQ ID NO: 1680064 - RNA, 16 nt, Human
ucuuuguaaugaaaac

SEQ ID NO: 1680065 - RNA, 14 nt, Human
ucuuuguacagaca

SEQ ID NO: 1680066 - RNA, 15 nt, Human
ucuuuguacagacaa

SEQ ID NO: 1680067 - RNA, 20 nt, Human
ucuuuguacagacaacaaac

SEQ ID NO: 1680068 - RNA, 16 nt, Human
agagacacacugaaga

SEQ ID NO: 1680069 - RNA, 14 nt, Human
agagacagaaagca

SEQ ID NO: 1680070 - RNA, 15 nt, Human
agagacagaaagcag

SEQ ID NO: 1680071 - RNA, 22 nt, Human
agacuccaaagaaauguaaggg

SEQ ID NO: 1680072 - RNA, 12 nt, Human
ucuuuccugagg

SEQ ID NO: 1680073 - RNA, 18 nt, Human
ucuuuaaugucacaggca

SEQ ID NO: 1680074 - RNA, 19 nt, Human
ucuuuaaugucacaggcag

SEQ ID NO: 1680075 - RNA, 20 nt, Human
agacaggcaagcaccuccug

SEQ ID NO: 1680076 - RNA, 22 nt, Human
agacaggcaagcaccuccugcc

SEQ ID NO: 1680077 - RNA, 15 nt, Human
ucuuuaaugucacag

SEQ ID NO: 1680078 - RNA, 16 nt, Human
agacucccaagcugga

SEQ ID NO: 1680079 - RNA, 21 nt, Human
agacuccagcuggguuggaaa

SEQ ID NO: 1680080 - RNA, 13 nt, Human
agacuccugcagg

SEQ ID NO: 1680081 - RNA, 23 nt, Human
agacuggcacaguuuucugagaa

SEQ ID NO: 1680082 - RNA, 13 nt, Human
agacucugucuca

SEQ ID NO: 1680083 - RNA, 20 nt, Human
agacuggcacaguuuucuga

SEQ ID NO: 1680084 - RNA, 21 nt, Human
agacuggcacaguuuucugag

SEQ ID NO: 1680085 - RNA, 14 nt, Human
ugaaaauuaacaug

SEQ ID NO: 1680086 - RNA, 18 nt, Human
ugaaacugcuuguuuccu

SEQ ID NO: 1680087 - RNA, 19 nt, Human
ugaaacugcuuguuuccua

SEQ ID NO: 1680088 - RNA, 18 nt, Human
ugaaacuggauuaaacuu

SEQ ID NO: 1680089 - RNA, 17 nt, Human
ugaaacuggauuaaacu

SEQ ID NO: 1680090 - RNA, 13 nt, Human
ugaaagaaaauaa

SEQ ID NO: 1680091 - RNA, 21 nt, Human
ugaaaauauuuguaucacaaa

SEQ ID NO: 1680092 - RNA, 22 nt, Human
ugaaaauauuuguaucacaaau

SEQ ID NO: 1680093 - RNA, 14 nt, Human
ucuuuuuuugugau

SEQ ID NO: 1680094 - RNA, 16 nt, Human
ucuuuuuuugugaugu

SEQ ID NO: 1680095 - RNA, 13 nt, Human
ugaaaacacauuu

SEQ ID NO: 1680096 - RNA, 12 nt, Human
ugaaaacacauu

SEQ ID NO: 1680097 - RNA, 14 nt, Human
ugaaaacacauuuu

SEQ ID NO: 1680098 - RNA, 20 nt, Human
ugaaaacacauuuuucuuag

SEQ ID NO: 1680099 - RNA, 19 nt, Human
ugaaaacacauuuuucuua

SEQ ID NO: 1680100 - RNA, 17 nt, Human
ugaaaacacauuuuucu

SEQ ID NO: 1680101 - RNA, 15 nt, Human
ugaaaacacauuuuu

SEQ ID NO: 1680102 - RNA, 17 nt, Human
ugaaaauauuuguauca

SEQ ID NO: 1680103 - RNA, 16 nt, Human
agagaguguugaaacg

SEQ ID NO: 1680104 - RNA, 17 nt, Human
agagaguggcuccuccc

SEQ ID NO: 1680105 - RNA, 15 nt, Human
agagaguguugaaac

SEQ ID NO: 1680106 - RNA, 15 nt, Human
agagacuccugcagg

SEQ ID NO: 1680107 - RNA, 12 nt, Human
agagacuccugc

SEQ ID NO: 1680108 - RNA, 13 nt, Human
agagacuccugca

SEQ ID NO: 1680109 - RNA, 14 nt, Human
agagacuccugcag

SEQ ID NO: 1680110 - RNA, 22 nt, Human
agagaccaucccugaaggcccc

SEQ ID NO: 1680111 - RNA, 23 nt, Human
agagaccaucccugaaggccccg

SEQ ID NO: 1680112 - RNA, 19 nt, Human
agagaccaucccugaaggc

SEQ ID NO: 1680113 - RNA, 21 nt, Human
agagaccaucccugaaggccc

SEQ ID NO: 1680114 - RNA, 18 nt, Human
ugaaagaggaaugaagua

SEQ ID NO: 1680115 - RNA, 22 nt, Human
ugaaagaaaauaccaaggaaca

SEQ ID NO: 1680116 - RNA, 20 nt, Human
ugaaacugcuuguuuccuag

SEQ ID NO: 1680117 - RNA, 22 nt, Human
ugaaacugcuuguuuccuagca

SEQ ID NO: 1680118 - RNA, 16 nt, Human
ugaaagacuguacaaa

SEQ ID NO: 1680119 - RNA, 18 nt, Human
ugaaagacuguacaaagu

SEQ ID NO: 1680120 - RNA, 19 nt, Human
ugaaagacuguacaaagua

SEQ ID NO: 1680121 - RNA, 22 nt, Human
ugaaagacuguacaaaguagaa

SEQ ID NO: 1680122 - RNA, 17 nt, Human
ugaaagaggaaugaagu

SEQ ID NO: 1680123 - RNA, 18 nt, Human
agaguaauccaagcaaau

SEQ ID NO: 1680124 - RNA, 12 nt, Human
agagguuuuucu

SEQ ID NO: 1680125 - RNA, 22 nt, Human
agagguuuuucuuaaauaauaa

SEQ ID NO: 1680126 - RNA, 20 nt, Human
agaguaauccaagcaaaugu

SEQ ID NO: 1680127 - RNA, 22 nt, Human
agaguaauccaagcaaauguga

SEQ ID NO: 1680128 - RNA, 20 nt, Human
agagguucaaagauauuuug

SEQ ID NO: 1680129 - RNA, 19 nt, Human
agagguucaaagauauuuu

SEQ ID NO: 1680130 - RNA, 16 nt, Human
agagguucaaagauau

SEQ ID NO: 1680131 - RNA, 13 nt, Human
agagguucaaaga

SEQ ID NO: 1680132 - RNA, 20 nt, Human
agagggagugacagaggcag

SEQ ID NO: 1680133 - RNA, 15 nt, Human
agagggagugacaga

SEQ ID NO: 1680134 - RNA, 22 nt, Human
agaggcugccucucccaucacu

SEQ ID NO: 1680135 - RNA, 24 nt, Human
agaggcagccccauucugccugcc

SEQ ID NO: 1680136 - RNA, 21 nt, Human
agaggcagccccauucugccu

SEQ ID NO: 1680137 - RNA, 22 nt, Human
agaggcagccccauucugccug

SEQ ID NO: 1680138 - RNA, 23 nt, Human
agaggcagccccauucugccugc

SEQ ID NO: 1680139 - RNA, 18 nt, Human
agagcuguucacagccag

SEQ ID NO: 1680140 - RNA, 19 nt, Human
agagcuguucacagccaga

SEQ ID NO: 1680141 - RNA, 23 nt, Human
ugaauaauguaagacaaauaugu

SEQ ID NO: 1680142 - RNA, 13 nt, Human
ugaauaauacagu

SEQ ID NO: 1680143 - RNA, 13 nt, Human
ugaagucacacag

SEQ ID NO: 1680144 - RNA, 12 nt, Human
ugaauaauacag

SEQ ID NO: 1680145 - RNA, 15 nt, Human
ugaaguaagcaaaga

SEQ ID NO: 1680146 - RNA, 17 nt, Human
ugaaguacucauacaug

SEQ ID NO: 1680147 - RNA, 22 nt, Human
ugaaguaauaugcacacauuuu

SEQ ID NO: 1680148 - RNA, 21 nt, Human
ugaaguaauaugcacacauuu

SEQ ID NO: 1680149 - RNA, 20 nt, Human
ugaaguaauaugcacacauu

SEQ ID NO: 1680150 - RNA, 16 nt, Human
ugaaguaauaugcaca

SEQ ID NO: 1680151 - RNA, 13 nt, Human
ugaaguaagcaaa

SEQ ID NO: 1680152 - RNA, 14 nt, Human
ugaaguaagcaaag

SEQ ID NO: 1680153 - RNA, 15 nt, Human
ugaaguaauaugcac

SEQ ID NO: 1680154 - RNA, 17 nt, Human
ugaagauuuaccacuug

SEQ ID NO: 1680155 - RNA, 20 nt, Human
ugaagauuuaccacuugugu

SEQ ID NO: 1680156 - RNA, 13 nt, Human
ugaagacagagcu

SEQ ID NO: 1680157 - RNA, 23 nt, Human
ugaagacaaugacuuacuguaca

SEQ ID NO: 1680158 - RNA, 22 nt, Human
ugaagacaaugacuuacuguac

SEQ ID NO: 1680159 - RNA, 15 nt, Human
ugaacuccugaccuc

SEQ ID NO: 1680160 - RNA, 11 nt, Human
ugaacuccugg

SEQ ID NO: 1680161 - RNA, 22 nt, Human
ugaaccgaugagaaauaaaguu

SEQ ID NO: 1680162 - RNA, 23 nt, Human
ugaacuagaguuuagcuggaaaa

SEQ ID NO: 1680163 - RNA, 17 nt, Human
ugaacuaaacuuucaca

SEQ ID NO: 1680164 - RNA, 19 nt, Human
ugaacuaaacuuucacacc

SEQ ID NO: 1680165 - RNA, 22 nt, Human
ugaacccauauuuguacaccaa

SEQ ID NO: 1680166 - RNA, 18 nt, Human
ugaacccgggaggcagag

SEQ ID NO: 1680167 - RNA, 22 nt, Human
ugaaccaccacacccagcccac

SEQ ID NO: 1680168 - RNA, 18 nt, Human
ugaacaaauuuacagaga

SEQ ID NO: 1680169 - RNA, 21 nt, Human
ugaaccaccacacccagccca

SEQ ID NO: 1680170 - RNA, 13 nt, Human
ugaacaaauuuac

SEQ ID NO: 1680171 - RNA, 23 nt, Human
ugaaauagacccacaagaggcag

SEQ ID NO: 1680172 - RNA, 13 nt, Human
ugaaauuguaauu

SEQ ID NO: 1680173 - RNA, 14 nt, Human
ugaaauuguaauua

SEQ ID NO: 1680174 - RNA, 15 nt, Human
ugaaauuguaauuau

SEQ ID NO: 1680175 - RNA, 16 nt, Human
ugaaauuguaauuaua

SEQ ID NO: 1680176 - RNA, 19 nt, Human
ugaaauuguaauuauaucu

SEQ ID NO: 1680177 - RNA, 20 nt, Human
ugaaauuguaauuauaucug

SEQ ID NO: 1680178 - RNA, 21 nt, Human
ugaaauuuccugggagcuuuu

SEQ ID NO: 1680179 - RNA, 20 nt, Human
ugaaauuuuuauuaaauuau

SEQ ID NO: 1680180 - RNA, 19 nt, Human
ugaaauuuuuauuaaauua

SEQ ID NO: 1680181 - RNA, 15 nt, Human
ugaaauuuccuggga

SEQ ID NO: 1680182 - RNA, 13 nt, Human
ugaaauaaacguc

SEQ ID NO: 1680183 - RNA, 18 nt, Human
ugaaauaaacgucuuaaa

SEQ ID NO: 1680184 - RNA, 22 nt, Human
ugaaauaaacgucuuaaauauu

SEQ ID NO: 1680185 - RNA, 23 nt, Human
ugaaauaaacgucuuaaauauuc

SEQ ID NO: 1680186 - RNA, 17 nt, Human
ugaaauaacauggccuu

SEQ ID NO: 1680187 - RNA, 16 nt, Human
ugaaauaacauggccu

SEQ ID NO: 1680188 - RNA, 14 nt, Human
ugaaauaagccaga

SEQ ID NO: 1680189 - RNA, 14 nt, Human
ugaaauacuguuug

SEQ ID NO: 1680190 - RNA, 16 nt, Human
ugaaauacuguuugag

SEQ ID NO: 1680191 - RNA, 16 nt, Human
agagauugugguuuca

SEQ ID NO: 1680192 - RNA, 18 nt, Human
agagcugcccucuccugg

SEQ ID NO: 1680193 - RNA, 17 nt, Human
agagcugcccucuccug

SEQ ID NO: 1680194 - RNA, 16 nt, Human
agagcugcccucuccu

SEQ ID NO: 1680195 - RNA, 20 nt, Human
agagcugcccucuccugggc

SEQ ID NO: 1680196 - RNA, 19 nt, Human
agagcugcccucuccuggg

SEQ ID NO: 1680197 - RNA, 14 nt, Human
ugagagcugggugu

SEQ ID NO: 1680198 - RNA, 10 nt, Human
ugagaggaaa

SEQ ID NO: 1680199 - RNA, 11 nt, Human
ugagaggaaau

SEQ ID NO: 1680200 - RNA, 12 nt, Human
ugagaggaaauc

SEQ ID NO: 1680201 - RNA, 13 nt, Human
ugagaggaaauca

SEQ ID NO: 1680202 - RNA, 14 nt, Human
ugagaggaaaucac

SEQ ID NO: 1680203 - RNA, 21 nt, Human
ugagagacacacugaagaagc

SEQ ID NO: 1680204 - RNA, 22 nt, Human
ugagagacacacugaagaagca

SEQ ID NO: 1680205 - RNA, 14 nt, Human
ugagauguguucac

SEQ ID NO: 1680206 - RNA, 24 nt, Human
ugagaugugaacacaucagcuugc

SEQ ID NO: 1680207 - RNA, 18 nt, Human
ugagaugugaacacauca

SEQ ID NO: 1680208 - RNA, 19 nt, Human
ugagaugugaacacaucag

SEQ ID NO: 1680209 - RNA, 17 nt, Human
ugagaggaaaucaccga

SEQ ID NO: 1680210 - RNA, 23 nt, Human
ugagaggacuuuucuuuguggcu

SEQ ID NO: 1680211 - RNA, 23 nt, Human
ugagauguagccccucuccugga

SEQ ID NO: 1680212 - RNA, 13 nt, Human
ugagaugugaaca

SEQ ID NO: 1680213 - RNA, 16 nt, Human
ugagagacacacugaa

SEQ ID NO: 1680214 - RNA, 17 nt, Human
ugagagacacacugaag

SEQ ID NO: 1680215 - RNA, 19 nt, Human
ugagagacacacugaagaa

SEQ ID NO: 1680216 - RNA, 20 nt, Human
ugagagacacacugaagaag

SEQ ID NO: 1680217 - RNA, 17 nt, Human
ugagacagcccgggcuc

SEQ ID NO: 1680218 - RNA, 18 nt, Human
ugagacagcccgggcucu

SEQ ID NO: 1680219 - RNA, 19 nt, Human
ugagacagcccgggcucug

SEQ ID NO: 1680220 - RNA, 20 nt, Human
ugagacagcccgggcucugc

SEQ ID NO: 1680221 - RNA, 20 nt, Human
ugagacucugucucaaaaaa

SEQ ID NO: 1680222 - RNA, 20 nt, Human
ugagacucugucucagucca

SEQ ID NO: 1680223 - RNA, 22 nt, Human
ugagacagcccgggcucugccu

SEQ ID NO: 1680224 - RNA, 12 nt, Human
ugagacagcucu

SEQ ID NO: 1680225 - RNA, 20 nt, Human
ugagacagaaucucgcucug

SEQ ID NO: 1680226 - RNA, 11 nt, Human
ugagacagagu

SEQ ID NO: 1680227 - RNA, 21 nt, Human
ugagacagaguuuucacucuu

SEQ ID NO: 1680228 - RNA, 13 nt, Human
ugagacagcccgg

SEQ ID NO: 1680229 - RNA, 15 nt, Human
agauuuuccugaaaa

SEQ ID NO: 1680230 - RNA, 16 nt, Human
agauuuuccugaaaac

SEQ ID NO: 1680231 - RNA, 17 nt, Human
agcaccuagccucgcuc

SEQ ID NO: 1680232 - RNA, 13 nt, Human
agcaccuccugcc

SEQ ID NO: 1680233 - RNA, 14 nt, Human
agcaccuccugccu

SEQ ID NO: 1680234 - RNA, 16 nt, Human
agcaccuccugccucg

SEQ ID NO: 1680235 - RNA, 22 nt, Human
agcaccaaaagcuuaccaaggg

SEQ ID NO: 1680236 - RNA, 23 nt, Human
agcacaugccucucucaggccaa

SEQ ID NO: 1680237 - RNA, 16 nt, Human
agcaccaucucuccuc

SEQ ID NO: 1680238 - RNA, 18 nt, Human
agcacaugccucucucag

SEQ ID NO: 1680239 - RNA, 19 nt, Human
agcacaugccucucucagg

SEQ ID NO: 1680240 - RNA, 20 nt, Human
agcacaugccucucucaggc

SEQ ID NO: 1680241 - RNA, 21 nt, Human
agcacaugccucucucaggcc

SEQ ID NO: 1680242 - RNA, 22 nt, Human
agcacaugccucucucaggcca

SEQ ID NO: 1680243 - RNA, 21 nt, Human
agcacagcuucauuuccugug

SEQ ID NO: 1680244 - RNA, 17 nt, Human
agcaagugagagcuggg

SEQ ID NO: 1680245 - RNA, 18 nt, Human
agcaagugagagcugggu

SEQ ID NO: 1680246 - RNA, 20 nt, Human
ugagccagauuucacucucc

SEQ ID NO: 1680247 - RNA, 21 nt, Human
ugagccagauuucacucuccu

SEQ ID NO: 1680248 - RNA, 14 nt, Human
ugagccacugcacc

SEQ ID NO: 1680249 - RNA, 18 nt, Human
ugagccagauuucacucu

SEQ ID NO: 1680250 - RNA, 19 nt, Human
ugagccagauuucacucuc

SEQ ID NO: 1680251 - RNA, 15 nt, Human
ugagcaaauguggcu

SEQ ID NO: 1680252 - RNA, 16 nt, Human
ugagcauuagauuucu

SEQ ID NO: 1680253 - RNA, 14 nt, Human
ugagcauuagauuu

SEQ ID NO: 1680254 - RNA, 12 nt, Human
ugagccacugca

SEQ ID NO: 1680255 - RNA, 13 nt, Human
ugagccacugcac

SEQ ID NO: 1680256 - RNA, 16 nt, Human
agcaagugagacccug

SEQ ID NO: 1680257 - RNA, 15 nt, Human
agcaagugagagcug

SEQ ID NO: 1680258 - RNA, 16 nt, Human
agcaagugagagcugg

SEQ ID NO: 1680259 - RNA, 15 nt, Human
agcaagucagaauag

SEQ ID NO: 1680260 - RNA, 20 nt, Human
agcaagggugaugggaaagc

SEQ ID NO: 1680261 - RNA, 22 nt, Human
agcaagggugaugggaaagcau

SEQ ID NO: 1680262 - RNA, 14 nt, Human
agcaaggagauuua

SEQ ID NO: 1680263 - RNA, 19 nt, Human
agcaaggagauuuacaacu

SEQ ID NO: 1680264 - RNA, 17 nt, Human
agcaaggagauuuacaa

SEQ ID NO: 1680265 - RNA, 16 nt, Human
agcaagggugauggga

SEQ ID NO: 1680266 - RNA, 21 nt, Human
agaugcaguucugaagaagau

SEQ ID NO: 1680267 - RNA, 19 nt, Human
agaugcuagaacucccuuu

SEQ ID NO: 1680268 - RNA, 22 nt, Human
agauguagccccucuccuggaa

SEQ ID NO: 1680269 - RNA, 21 nt, Human
agaugcuagaacucccuuuca

SEQ ID NO: 1680270 - RNA, 22 nt, Human
agaugcuagaacucccuuucaa

SEQ ID NO: 1680271 - RNA, 18 nt, Human
agauccccaagccuggca

SEQ ID NO: 1680272 - RNA, 18 nt, Human
agaucucuaacuucacca

SEQ ID NO: 1680273 - RNA, 13 nt, Human
agauccuggaaau

SEQ ID NO: 1680274 - RNA, 14 nt, Human
agauccuggaaauc

SEQ ID NO: 1680275 - RNA, 17 nt, Human
ugacaggcaaugcuggc

SEQ ID NO: 1680276 - RNA, 19 nt, Human
ugacaggcaaugcuggcug

SEQ ID NO: 1680277 - RNA, 22 nt, Human
ugacagggcacaccgggcacuc

SEQ ID NO: 1680278 - RNA, 16 nt, Human
ugacacgaauauugcu

SEQ ID NO: 1680279 - RNA, 19 nt, Human
ugacacgaauauugcugau

SEQ ID NO: 1680280 - RNA, 15 nt, Human
ugacacuuaaaaaug

SEQ ID NO: 1680281 - RNA, 15 nt, Human
agauuagaauucugu

SEQ ID NO: 1680282 - RNA, 16 nt, Human
agauuagaauucugua

SEQ ID NO: 1680283 - RNA, 20 nt, Human
ugacuuacuguacaugaaaa

SEQ ID NO: 1680284 - RNA, 12 nt, Human
ugacuuacugua

SEQ ID NO: 1680285 - RNA, 22 nt, Human
agauuagaauucuguauagauu

SEQ ID NO: 1680286 - RNA, 23 nt, Human
agauuagaauucuguauagauua

SEQ ID NO: 1680287 - RNA, 21 nt, Human
agauuagagaguguugaaacg

SEQ ID NO: 1680288 - RNA, 13 nt, Human
agauucauauuua

SEQ ID NO: 1680289 - RNA, 16 nt, Human
agauucauauuuacuu

SEQ ID NO: 1680290 - RNA, 19 nt, Human
agauuucacucuccuuggu

SEQ ID NO: 1680291 - RNA, 22 nt, Human
agauuccagagaguggcuccuc

SEQ ID NO: 1680292 - RNA, 21 nt, Human
agauuccagagaguggcuccu

SEQ ID NO: 1680293 - RNA, 19 nt, Human
agauucauauuuacuucuu

SEQ ID NO: 1680294 - RNA, 15 nt, Human
ugaccuuuaagagaa

SEQ ID NO: 1680295 - RNA, 22 nt, Human
agaugugaacacaucagcuugc

SEQ ID NO: 1680296 - RNA, 22 nt, Human
agauguauguacuucaugcugu

SEQ ID NO: 1680297 - RNA, 17 nt, Human
agaugugaacacaucag

SEQ ID NO: 1680298 - RNA, 21 nt, Human
ugacucguauaugucucaggu

SEQ ID NO: 1680299 - RNA, 21 nt, Human
ugacuguuuucucuugagagg

SEQ ID NO: 1680300 - RNA, 12 nt, Human
ugaccuuucaau

SEQ ID NO: 1680301 - RNA, 13 nt, Human
ugaccuuucaaua

SEQ ID NO: 1680302 - RNA, 12 nt, Human
acuuuaccuuuu

SEQ ID NO: 1680303 - RNA, 20 nt, Human
acuuucugaaauaacauggc

SEQ ID NO: 1680304 - RNA, 17 nt, Human
ucuccucugcugcuggc

SEQ ID NO: 1680305 - RNA, 18 nt, Human
ucuccucugcugcuggcu

SEQ ID NO: 1680306 - RNA, 15 nt, Human
ucuccuccagaguca

SEQ ID NO: 1680307 - RNA, 16 nt, Human
ucuccucugcugcugg

SEQ ID NO: 1680308 - RNA, 23 nt, Human
ucuccccagcaagugagagcugg

SEQ ID NO: 1680309 - RNA, 12 nt, Human
ucuccacccugc

SEQ ID NO: 1680310 - RNA, 18 nt, Human
ucuccaagcaggacaugg

SEQ ID NO: 1680311 - RNA, 19 nt, Human
ucuccaagcaggacaugga

SEQ ID NO: 1680312 - RNA, 17 nt, Human
ucuccgaccagacaccu

SEQ ID NO: 1680313 - RNA, 23 nt, Human
ucuccgaccagacaccuugacag

SEQ ID NO: 1680314 - RNA, 21 nt, Human
ucuccuuguguuacuaaguuu

SEQ ID NO: 1680315 - RNA, 13 nt, Human
ucuccuuguguua

SEQ ID NO: 1680316 - RNA, 16 nt, Human
ucuccuucaccuuugu

SEQ ID NO: 1680317 - RNA, 18 nt, Human
ucuccuucaccuuugucc

SEQ ID NO: 1680318 - RNA, 17 nt, Human
agaaaaaauauuuuccc

SEQ ID NO: 1680319 - RNA, 14 nt, Human
ucuccuucaccuuu

SEQ ID NO: 1680320 - RNA, 15 nt, Human
ucuccuucaccuuug

SEQ ID NO: 1680321 - RNA, 23 nt, Human
acuuuuguucuugguuuguaaau

SEQ ID NO: 1680322 - RNA, 15 nt, Human
acuuuuguucuuggu

SEQ ID NO: 1680323 - RNA, 13 nt, Human
acuuuuguucuug

SEQ ID NO: 1680324 - RNA, 12 nt, Human
acuuuuguucuu

SEQ ID NO: 1680325 - RNA, 21 nt, Human
acuuuguuaguuucuccaagc

SEQ ID NO: 1680326 - RNA, 14 nt, Human
acuuuguucuggcu

SEQ ID NO: 1680327 - RNA, 20 nt, Human
acuuuguuaguuucuccaag

SEQ ID NO: 1680328 - RNA, 17 nt, Human
acuuuggauaauaagga

SEQ ID NO: 1680329 - RNA, 19 nt, Human
acuuuggauaauaaggaaa

SEQ ID NO: 1680330 - RNA, 12 nt, Human
acuuuggauaau

SEQ ID NO: 1680331 - RNA, 13 nt, Human
acuuugaccucug

SEQ ID NO: 1680332 - RNA, 12 nt, Human
acuuugaccucu

SEQ ID NO: 1680333 - RNA, 21 nt, Human
ucucaugccucagccuccuga

SEQ ID NO: 1680334 - RNA, 20 nt, Human
ucucaugccucagccuccug

SEQ ID NO: 1680335 - RNA, 21 nt, Human
ucucaggccagcugcuugggc

SEQ ID NO: 1680336 - RNA, 17 nt, Human
ucucaggccagcugcuu

SEQ ID NO: 1680337 - RNA, 18 nt, Human
ucucaggccagcugcuug

SEQ ID NO: 1680338 - RNA, 16 nt, Human
ucucauuugucacaca

SEQ ID NO: 1680339 - RNA, 13 nt, Human
ucuccaaaauaaa

SEQ ID NO: 1680340 - RNA, 16 nt, Human
ucuccaagcaggacau

SEQ ID NO: 1680341 - RNA, 19 nt, Human
ucucauuugccaauaauaa

SEQ ID NO: 1680342 - RNA, 14 nt, Human
ucucauuugucaca

SEQ ID NO: 1680343 - RNA, 15 nt, Human
ucucauuuccaagca

SEQ ID NO: 1680344 - RNA, 16 nt, Human
ucucauuuaauccucu

SEQ ID NO: 1680345 - RNA, 10 nt, Human
ucucaggcca

SEQ ID NO: 1680346 - RNA, 12 nt, Human
ucucaggccaaa

SEQ ID NO: 1680347 - RNA, 12 nt, Human
ucucaggccagc

SEQ ID NO: 1680348 - RNA, 13 nt, Human
ucucaggccagcu

SEQ ID NO: 1680349 - RNA, 22 nt, Human
ucucagauuuuauuauguaaau

SEQ ID NO: 1680350 - RNA, 23 nt, Human
ucucagauuuuauuauguaaauc

SEQ ID NO: 1680351 - RNA, 23 nt, Human
ucucaggaaaucaaauaugcaaa

SEQ ID NO: 1680352 - RNA, 14 nt, Human
ucucaggaaaucaa

SEQ ID NO: 1680353 - RNA, 21 nt, Human
ucucaggaaaucaaauaugca

SEQ ID NO: 1680354 - RNA, 17 nt, Human
acuugcucuugaugccu

SEQ ID NO: 1680355 - RNA, 18 nt, Human
acuugcucuugaugccug

SEQ ID NO: 1680356 - RNA, 20 nt, Human
acuugcucuugaugccuggc

SEQ ID NO: 1680357 - RNA, 16 nt, Human
acuugcucuugaugcc

SEQ ID NO: 1680358 - RNA, 23 nt, Human
acuugcagacucuacagaggcca

SEQ ID NO: 1680359 - RNA, 19 nt, Human
acuugcagacucuacagag

SEQ ID NO: 1680360 - RNA, 22 nt, Human
acuugcagacucuacagaggcc

SEQ ID NO: 1680361 - RNA, 20 nt, Human
ucucacuauguugcccaggc

SEQ ID NO: 1680362 - RNA, 21 nt, Human
ucucacuauguugcccaggca

SEQ ID NO: 1680363 - RNA, 22 nt, Human
ucucacuauguugcccaggcag

SEQ ID NO: 1680364 - RNA, 23 nt, Human
ucucacuauguugcccaggcagg

SEQ ID NO: 1680365 - RNA, 18 nt, Human
ucucaccuccugcugggc

SEQ ID NO: 1680366 - RNA, 13 nt, Human
acuuguguaaaua

SEQ ID NO: 1680367 - RNA, 19 nt, Human
acuuguggacacagcucuu

SEQ ID NO: 1680368 - RNA, 22 nt, Human
acuuguggacacagcucuucuc

SEQ ID NO: 1680369 - RNA, 20 nt, Human
acuugucuuuggacccugag

SEQ ID NO: 1680370 - RNA, 21 nt, Human
acuugucuuuggacccugagg

SEQ ID NO: 1680371 - RNA, 14 nt, Human
acuugcuuuuaaaa

SEQ ID NO: 1680372 - RNA, 18 nt, Human
acuuguauuauguguguu

SEQ ID NO: 1680373 - RNA, 19 nt, Human
acuuguauuauguguguuu

SEQ ID NO: 1680374 - RNA, 15 nt, Human
acuugucaauaaaau

SEQ ID NO: 1680375 - RNA, 21 nt, Human
ucuacccuggcacuauaaugu

SEQ ID NO: 1680376 - RNA, 15 nt, Human
acuguuauuuauaau

SEQ ID NO: 1680377 - RNA, 17 nt, Human
acuguuauuuauaauca

SEQ ID NO: 1680378 - RNA, 20 nt, Human
acuguuauuuauaaucacuu

SEQ ID NO: 1680379 - RNA, 20 nt, Human
ucuacccagcgagcccuggu

SEQ ID NO: 1680380 - RNA, 14 nt, Human
ucuacccaggugcu

SEQ ID NO: 1680381 - RNA, 19 nt, Human
ucuacccuggcacuauaau

SEQ ID NO: 1680382 - RNA, 14 nt, Human
ucuacccuggcacu

SEQ ID NO: 1680383 - RNA, 16 nt, Human
acuguucucugcccuc

SEQ ID NO: 1680384 - RNA, 17 nt, Human
acuguucucugcccucc

SEQ ID NO: 1680385 - RNA, 21 nt, Human
acuguuauuuauaaucacuuu

SEQ ID NO: 1680386 - RNA, 19 nt, Human
acuguucucugcccuccaa

SEQ ID NO: 1680387 - RNA, 18 nt, Human
acuguucucugcccucca

SEQ ID NO: 1680388 - RNA, 20 nt, Human
ucuacagcuaaucagcauuc

SEQ ID NO: 1680389 - RNA, 23 nt, Human
ucuacagcuaaucagcauucuca

SEQ ID NO: 1680390 - RNA, 19 nt, Human
ucuacccagcgagcccugg

SEQ ID NO: 1680391 - RNA, 21 nt, Human
ucuacagaggccaugggccuc

SEQ ID NO: 1680392 - RNA, 18 nt, Human
uccugggagugagcuggu

SEQ ID NO: 1680393 - RNA, 14 nt, Human
uccugggcagcugc

SEQ ID NO: 1680394 - RNA, 13 nt, Human
uccugggcagcug

SEQ ID NO: 1680395 - RNA, 12 nt, Human
uccugggcagcu

SEQ ID NO: 1680396 - RNA, 20 nt, Human
ucuaaguaaaaccacagcag

SEQ ID NO: 1680397 - RNA, 19 nt, Human
ucuaaguaaaaccacagca

SEQ ID NO: 1680398 - RNA, 14 nt, Human
ucuaaguaaaacca

SEQ ID NO: 1680399 - RNA, 15 nt, Human
ucuaaguaaaaccac

SEQ ID NO: 1680400 - RNA, 15 nt, Human
acuuagguguggggg

SEQ ID NO: 1680401 - RNA, 21 nt, Human
acuuacuguacaugaaaacac

SEQ ID NO: 1680402 - RNA, 17 nt, Human
acuuacacuuuaugcac

SEQ ID NO: 1680403 - RNA, 14 nt, Human
acuuagcugggaga

SEQ ID NO: 1680404 - RNA, 22 nt, Human
acuuacuguacaugaaaacaca

SEQ ID NO: 1680405 - RNA, 16 nt, Human
acuuacacuuuaugca

SEQ ID NO: 1680406 - RNA, 22 nt, Human
acuuaaucuaaauggaaccacu

SEQ ID NO: 1680407 - RNA, 19 nt, Human
acuuaaucuaaauggaacc

SEQ ID NO: 1680408 - RNA, 17 nt, Human
acuuaaucuaaauggaa

SEQ ID NO: 1680409 - RNA, 13 nt, Human
acuuaagcacacu

SEQ ID NO: 1680410 - RNA, 20 nt, Human
acuuaaauaaugugaaacug

SEQ ID NO: 1680411 - RNA, 14 nt, Human
ucucaccuccugcu

SEQ ID NO: 1680412 - RNA, 15 nt, Human
ucucaccuccugcug

SEQ ID NO: 1680413 - RNA, 16 nt, Human
ucucaccuccugcugg

SEQ ID NO: 1680414 - RNA, 17 nt, Human
ucucaccuccugcuggg

SEQ ID NO: 1680415 - RNA, 19 nt, Human
ucucaccuccugcugggca

SEQ ID NO: 1680416 - RNA, 17 nt, Human
ucucacuauguugccca

SEQ ID NO: 1680417 - RNA, 19 nt, Human
ucucacuauguugcccagg

SEQ ID NO: 1680418 - RNA, 13 nt, Human
ucuauaaaccgaa

SEQ ID NO: 1680419 - RNA, 23 nt, Human
ucuaguuguuugauucagacagc

SEQ ID NO: 1680420 - RNA, 21 nt, Human
ucuaguuugauuaaauucuug

SEQ ID NO: 1680421 - RNA, 22 nt, Human
ucuaguuugauuaaauucuugc

SEQ ID NO: 1680422 - RNA, 22 nt, Human
ucuaguuguuugauucagacag

SEQ ID NO: 1680423 - RNA, 12 nt, Human
ucuaggaagacu

SEQ ID NO: 1680424 - RNA, 17 nt, Human
ucuaggaaauauuuauu

SEQ ID NO: 1680425 - RNA, 13 nt, Human
ucuagccagagga

SEQ ID NO: 1680426 - RNA, 16 nt, Human
ucuaggaaauauuuau

SEQ ID NO: 1680427 - RNA, 13 nt, Human
acuuccccuuccu

SEQ ID NO: 1680428 - RNA, 19 nt, Human
acuuccccuuccuaauucc

SEQ ID NO: 1680429 - RNA, 16 nt, Human
acuucaucccucuggg

SEQ ID NO: 1680430 - RNA, 18 nt, Human
ucuagcauggcugccaau

SEQ ID NO: 1680431 - RNA, 13 nt, Human
ucuagauacugua

SEQ ID NO: 1680432 - RNA, 16 nt, Human
ucuccuuucacaaccu

SEQ ID NO: 1680433 - RNA, 15 nt, Human
ucugaauuauuuucu

SEQ ID NO: 1680434 - RNA, 13 nt, Human
ucugacacacagc

SEQ ID NO: 1680435 - RNA, 14 nt, Human
ucugacacacagcu

SEQ ID NO: 1680436 - RNA, 15 nt, Human
ucugacacacagcuc

SEQ ID NO: 1680437 - RNA, 10 nt, Human
ucugaauuau

SEQ ID NO: 1680438 - RNA, 22 nt, Human
ucugaaggacauugcggacagc

SEQ ID NO: 1680439 - RNA, 21 nt, Human
ucugaaggacauugcggacag

SEQ ID NO: 1680440 - RNA, 22 nt, Human
ucugagacucgcgacaaugcaa

SEQ ID NO: 1680441 - RNA, 21 nt, Human
ucugagacucgcgacaaugca

SEQ ID NO: 1680442 - RNA, 16 nt, Human
ucugaugcaagcaaga

SEQ ID NO: 1680443 - RNA, 14 nt, Human
ucugauccaguuuu

SEQ ID NO: 1680444 - RNA, 21 nt, Human
ucugauccaguuuuguuugga

SEQ ID NO: 1680445 - RNA, 17 nt, Human
ucugaucauccacugug

SEQ ID NO: 1680446 - RNA, 11 nt, Human
ucugauccagu

SEQ ID NO: 1680447 - RNA, 21 nt, Human
ucugaucauccacugugccau

SEQ ID NO: 1680448 - RNA, 11 nt, Human
ucugcaggucc

SEQ ID NO: 1680449 - RNA, 12 nt, Human
ucugcagguccc

SEQ ID NO: 1680450 - RNA, 13 nt, Human
ucugcaggucccu

SEQ ID NO: 1680451 - RNA, 14 nt, Human
ucugcaggucccua

SEQ ID NO: 1680452 - RNA, 15 nt, Human
agaaauguacagcaa

SEQ ID NO: 1680453 - RNA, 14 nt, Human
agaaauguacagca

SEQ ID NO: 1680454 - RNA, 21 nt, Human
ucugaugcaagcaagaaacac

SEQ ID NO: 1680455 - RNA, 17 nt, Human
ucugcacuccccugcug

SEQ ID NO: 1680456 - RNA, 16 nt, Human
ucugcacuccccugcu

SEQ ID NO: 1680457 - RNA, 14 nt, Human
ucugcacuccccug

SEQ ID NO: 1680458 - RNA, 15 nt, Human
ucugcacuccccugc

SEQ ID NO: 1680459 - RNA, 17 nt, Human
ucugcagcaauaaagca

SEQ ID NO: 1680460 - RNA, 18 nt, Human
ucugcagcaauaaagcag

SEQ ID NO: 1680461 - RNA, 18 nt, Human
ucugcagauaaacaguag

SEQ ID NO: 1680462 - RNA, 15 nt, Human
ucugcagauaaacag

SEQ ID NO: 1680463 - RNA, 17 nt, Human
agaaauugcauuuccug

SEQ ID NO: 1680464 - RNA, 20 nt, Human
agaaauugcauuuccugaca

SEQ ID NO: 1680465 - RNA, 18 nt, Human
agaagaugguaccaccag

SEQ ID NO: 1680466 - RNA, 13 nt, Human
agaagaacugaaa

SEQ ID NO: 1680467 - RNA, 14 nt, Human
agaagaacugaaau

SEQ ID NO: 1680468 - RNA, 12 nt, Human
agaagcccagga

SEQ ID NO: 1680469 - RNA, 16 nt, Human
agaagcccaggaaagg

SEQ ID NO: 1680470 - RNA, 18 nt, Human
agaagcccaggaaaggcu

SEQ ID NO: 1680471 - RNA, 20 nt, Human
agaagcccaggaaaggcucc

SEQ ID NO: 1680472 - RNA, 21 nt, Human
agaagcccaggaaaggcucca

SEQ ID NO: 1680473 - RNA, 22 nt, Human
agaagcccaggaaaggcuccag

SEQ ID NO: 1680474 - RNA, 17 nt, Human
ucugcccacucccugca

SEQ ID NO: 1680475 - RNA, 18 nt, Human
agaagauuuugaaauuuu

SEQ ID NO: 1680476 - RNA, 19 nt, Human
agaagcaacccaaauguuc

SEQ ID NO: 1680477 - RNA, 11 nt, Human
ucugcccugcg

SEQ ID NO: 1680478 - RNA, 12 nt, Human
ucugcccugcgg

SEQ ID NO: 1680479 - RNA, 10 nt, Human
ucugcccugc

SEQ ID NO: 1680480 - RNA, 14 nt, Human
ucugccgcagcccu

SEQ ID NO: 1680481 - RNA, 15 nt, Human
ucugccgcagcccug

SEQ ID NO: 1680482 - RNA, 18 nt, Human
ucugcccacucccugcaa

SEQ ID NO: 1680483 - RNA, 21 nt, Human
ucugcccacucccugcaaccu

SEQ ID NO: 1680484 - RNA, 19 nt, Human
ucugcccuccaagaccuuc

SEQ ID NO: 1680485 - RNA, 23 nt, Human
ucugccgcagcccugcagagggc

SEQ ID NO: 1680486 - RNA, 22 nt, Human
ucugccgcagcccugcagaggg

SEQ ID NO: 1680487 - RNA, 21 nt, Human
ucugccugcccaggccccugc

SEQ ID NO: 1680488 - RNA, 22 nt, Human
ucugccugcccaggccccugcc

SEQ ID NO: 1680489 - RNA, 19 nt, Human
ucugcucacauaucuguca

SEQ ID NO: 1680490 - RNA, 20 nt, Human
ucugcucacauaucugucau

SEQ ID NO: 1680491 - RNA, 14 nt, Human
ucugcuucagccuc

SEQ ID NO: 1680492 - RNA, 15 nt, Human
ucugcuucagccucc

SEQ ID NO: 1680493 - RNA, 13 nt, Human
ucugcuucagccu

SEQ ID NO: 1680494 - RNA, 23 nt, Human
ucugcuugccaucccucccucca

SEQ ID NO: 1680495 - RNA, 20 nt, Human
ucugcuugccaucccucccu

SEQ ID NO: 1680496 - RNA, 17 nt, Human
ucugcuugccaucccuc

SEQ ID NO: 1680497 - RNA, 16 nt, Human
ucugcuugccaucccu

SEQ ID NO: 1680498 - RNA, 13 nt, Human
agacagagcuaca

SEQ ID NO: 1680499 - RNA, 19 nt, Human
agacaccuugacagggcac

SEQ ID NO: 1680500 - RNA, 18 nt, Human
agacaccuugacagggca

SEQ ID NO: 1680501 - RNA, 17 nt, Human
agacaccuugacagggc

SEQ ID NO: 1680502 - RNA, 16 nt, Human
agacacauguccaaga

SEQ ID NO: 1680503 - RNA, 20 nt, Human
agacacauguccaagaagcc

SEQ ID NO: 1680504 - RNA, 22 nt, Human
agaauuugauaugugaacaguu

SEQ ID NO: 1680505 - RNA, 21 nt, Human
agaauuugauaugugaacagu

SEQ ID NO: 1680506 - RNA, 12 nt, Human
agacacaggccc

SEQ ID NO: 1680507 - RNA, 13 nt, Human
agacacaggcccg

SEQ ID NO: 1680508 - RNA, 16 nt, Human
agacacaggcccggcu

SEQ ID NO: 1680509 - RNA, 12 nt, Human
agacacacauga

SEQ ID NO: 1680510 - RNA, 15 nt, Human
agacacacaugaagu

SEQ ID NO: 1680511 - RNA, 13 nt, Human
ucuguucuuucca

SEQ ID NO: 1680512 - RNA, 20 nt, Human
ucugugagcaucacaguuuu

SEQ ID NO: 1680513 - RNA, 22 nt, Human
ucuguucuuuccaaaguacacu

SEQ ID NO: 1680514 - RNA, 15 nt, Human
ucuguugcugccuca

SEQ ID NO: 1680515 - RNA, 12 nt, Human
ucuguuggccag

SEQ ID NO: 1680516 - RNA, 17 nt, Human
ucuguuggccaguguga

SEQ ID NO: 1680517 - RNA, 14 nt, Human
agaauucuguauag

SEQ ID NO: 1680518 - RNA, 13 nt, Human
ucuguuuagauaa

SEQ ID NO: 1680519 - RNA, 12 nt, Human
agaauucuguau

SEQ ID NO: 1680520 - RNA, 23 nt, Human
ucugugagaugcuagaacucccu

SEQ ID NO: 1680521 - RNA, 17 nt, Human
ucugugagaugcuagaa

SEQ ID NO: 1680522 - RNA, 22 nt, Human
ucugugagaugcuagaacuccc

SEQ ID NO: 1680523 - RNA, 14 nt, Human
ucugugaacuugaa

SEQ ID NO: 1680524 - RNA, 17 nt, Human
ucugugaacuugaaauu

SEQ ID NO: 1680525 - RNA, 18 nt, Human
ucugugaacuugaaauuu

SEQ ID NO: 1680526 - RNA, 14 nt, Human
ucugugagaugcua

SEQ ID NO: 1680527 - RNA, 14 nt, Human
ucugggccagaauu

SEQ ID NO: 1680528 - RNA, 15 nt, Human
ucugggccagaauuu

SEQ ID NO: 1680529 - RNA, 21 nt, Human
agaaugguccgugcuaaggac

SEQ ID NO: 1680530 - RNA, 23 nt, Human
agaaugguccgugcuaaggacuu

SEQ ID NO: 1680531 - RNA, 23 nt, Human
agaauuaacacaugauccugcaa

SEQ ID NO: 1680532 - RNA, 15 nt, Human
agaauuaacacauga

SEQ ID NO: 1680533 - RNA, 20 nt, Human
agaaguggggacagagcaga

SEQ ID NO: 1680534 - RNA, 21 nt, Human
agaaguuucugccgcagcccu

SEQ ID NO: 1680535 - RNA, 22 nt, Human
agaaguuucugccgcagcccug

SEQ ID NO: 1680536 - RNA, 23 nt, Human
agaaguuucugccgcagcccugc

SEQ ID NO: 1680537 - RNA, 12 nt, Human
ucugcuuuccuc

SEQ ID NO: 1680538 - RNA, 13 nt, Human
ucugcuuuccucu

SEQ ID NO: 1680539 - RNA, 18 nt, Human
ucugcuuuccucuuccug

SEQ ID NO: 1680540 - RNA, 14 nt, Human
agaaggcaaaugac

SEQ ID NO: 1680541 - RNA, 15 nt, Human
agaaggcaaaugacu

SEQ ID NO: 1680542 - RNA, 20 nt, Human
agaaggcaaaugacuuugga

SEQ ID NO: 1680543 - RNA, 12 nt, Human
agaauaaaauuu

SEQ ID NO: 1680544 - RNA, 14 nt, Human
agaauaaaauuuuu

SEQ ID NO: 1680545 - RNA, 17 nt, Human
agaauaaaauuuuuaau

SEQ ID NO: 1680546 - RNA, 16 nt, Human
agaauagaugcugacu

SEQ ID NO: 1680547 - RNA, 13 nt, Human
ucccuuuuuuuaa

SEQ ID NO: 1680548 - RNA, 23 nt, Human
ucccuuuuuuggcugcugaaggc

SEQ ID NO: 1680549 - RNA, 20 nt, Human
ucccuuuuuuggcugcugaa

SEQ ID NO: 1680550 - RNA, 22 nt, Human
ucccuuuuuuggcugcugaagg

SEQ ID NO: 1680551 - RNA, 21 nt, Human
ucccuuugacgccaucccagc

SEQ ID NO: 1680552 - RNA, 19 nt, Human
ucccuuugacgccauccca

SEQ ID NO: 1680553 - RNA, 17 nt, Human
ucccuuuuuuggcugcu

SEQ ID NO: 1680554 - RNA, 19 nt, Human
ucccuuuuuuggcugcuga

SEQ ID NO: 1680555 - RNA, 12 nt, Human
acuccuggccuc

SEQ ID NO: 1680556 - RNA, 16 nt, Human
ucccuuugacgccauc

SEQ ID NO: 1680557 - RNA, 18 nt, Human
ucccuuugacgccauccc

SEQ ID NO: 1680558 - RNA, 22 nt, Human
ucccugguggcagcucaccucu

SEQ ID NO: 1680559 - RNA, 23 nt, Human
ucccugguggcagcucaccucuc

SEQ ID NO: 1680560 - RNA, 19 nt, Human
ucccuuggauuguccccga

SEQ ID NO: 1680561 - RNA, 20 nt, Human
ucccuuggauuguccccgac

SEQ ID NO: 1680562 - RNA, 18 nt, Human
uccgguguuuaagacauu

SEQ ID NO: 1680563 - RNA, 16 nt, Human
ucccuuuuuuuaagua

SEQ ID NO: 1680564 - RNA, 21 nt, Human
ucccuuuuuuuaaguaaggaa

SEQ ID NO: 1680565 - RNA, 13 nt, Human
uccuacucugugu

SEQ ID NO: 1680566 - RNA, 14 nt, Human
uccuacucuguguc

SEQ ID NO: 1680567 - RNA, 15 nt, Human
uccuacucuguguca

SEQ ID NO: 1680568 - RNA, 13 nt, Human
uccuaggcauuug

SEQ ID NO: 1680569 - RNA, 13 nt, Human
acuccuggccuca

SEQ ID NO: 1680570 - RNA, 14 nt, Human
acuccuggccucaa

SEQ ID NO: 1680571 - RNA, 18 nt, Human
acuccagaccccuggcuu

SEQ ID NO: 1680572 - RNA, 19 nt, Human
acuccagaccccuggcuuu

SEQ ID NO: 1680573 - RNA, 21 nt, Human
acuccagaccccuggcuuuuc

SEQ ID NO: 1680574 - RNA, 19 nt, Human
acuccagugagacagcucu

SEQ ID NO: 1680575 - RNA, 13 nt, Human
acucaccccagcc

SEQ ID NO: 1680576 - RNA, 15 nt, Human
acuccagaccccugg

SEQ ID NO: 1680577 - RNA, 16 nt, Human
acucaccccagcccca

SEQ ID NO: 1680578 - RNA, 14 nt, Human
acucaccccagccc

SEQ ID NO: 1680579 - RNA, 15 nt, Human
acucaccccagcccc

SEQ ID NO: 1680580 - RNA, 12 nt, Human
acuccucccagg

SEQ ID NO: 1680581 - RNA, 14 nt, Human
acuccugcaggcag

SEQ ID NO: 1680582 - RNA, 22 nt, Human
acuccugcaggcagccaggcca

SEQ ID NO: 1680583 - RNA, 15 nt, Human
acuccugcaggcagc

SEQ ID NO: 1680584 - RNA, 16 nt, Human
acuccugcaggcagcc

SEQ ID NO: 1680585 - RNA, 18 nt, Human
ucccugguggcagcucac

SEQ ID NO: 1680586 - RNA, 19 nt, Human
ucccugguggcagcucacc

SEQ ID NO: 1680587 - RNA, 20 nt, Human
ucccugguggcagcucaccu

SEQ ID NO: 1680588 - RNA, 21 nt, Human
ucccugguggcagcucaccuc

SEQ ID NO: 1680589 - RNA, 16 nt, Human
ucccugguggcagcuc

SEQ ID NO: 1680590 - RNA, 17 nt, Human
ucccugguggcagcuca

SEQ ID NO: 1680591 - RNA, 11 nt, Human
acuccuggccu

SEQ ID NO: 1680592 - RNA, 11 nt, Human
acucugagacu

SEQ ID NO: 1680593 - RNA, 22 nt, Human
acucugagacucgcgacaaugc

SEQ ID NO: 1680594 - RNA, 16 nt, Human
acucuccuuggugucg

SEQ ID NO: 1680595 - RNA, 23 nt, Human
acucuccuuggugucgggcauga

SEQ ID NO: 1680596 - RNA, 12 nt, Human
acucugccuccu

SEQ ID NO: 1680597 - RNA, 16 nt, Human
acucugccuccucuuc

SEQ ID NO: 1680598 - RNA, 13 nt, Human
acucuggcagcuc

SEQ ID NO: 1680599 - RNA, 15 nt, Human
acucuggcagcucag

SEQ ID NO: 1680600 - RNA, 23 nt, Human
acuccuugaaaacacuguucucu

SEQ ID NO: 1680601 - RNA, 24 nt, Human
acuccuugaaaacacuguucucug

SEQ ID NO: 1680602 - RNA, 14 nt, Human
acucuccuccagag

SEQ ID NO: 1680603 - RNA, 17 nt, Human
acucuccuccagaguca

SEQ ID NO: 1680604 - RNA, 12 nt, Human
acucuccucugc

SEQ ID NO: 1680605 - RNA, 13 nt, Human
acucuccucugcu

SEQ ID NO: 1680606 - RNA, 14 nt, Human
acucuccucugcug

SEQ ID NO: 1680607 - RNA, 16 nt, Human
acucuccucugcugcu

SEQ ID NO: 1680608 - RNA, 18 nt, Human
acucuccuggaaauauua

SEQ ID NO: 1680609 - RNA, 15 nt, Human
acucuccuugguguc

SEQ ID NO: 1680610 - RNA, 19 nt, Human
uccucccaggcgccccuuc

SEQ ID NO: 1680611 - RNA, 21 nt, Human
uccucccaggcgccccuuccc

SEQ ID NO: 1680612 - RNA, 13 nt, Human
uccucccaggcgc

SEQ ID NO: 1680613 - RNA, 22 nt, Human
uccucauaguaugguggcuggg

SEQ ID NO: 1680614 - RNA, 23 nt, Human
uccucauacccacccccacccaa

SEQ ID NO: 1680615 - RNA, 19 nt, Human
acucuuauaucuauauuuu

SEQ ID NO: 1680616 - RNA, 15 nt, Human
acucuugaccucagg

SEQ ID NO: 1680617 - RNA, 16 nt, Human
acucuugaccucaggu

SEQ ID NO: 1680618 - RNA, 16 nt, Human
acucuuauaucuauau

SEQ ID NO: 1680619 - RNA, 17 nt, Human
acucuuauaucuauauu

SEQ ID NO: 1680620 - RNA, 18 nt, Human
acucuuauaucuauauuu

SEQ ID NO: 1680621 - RNA, 22 nt, Human
acucuuauaucuauauuuuaca

SEQ ID NO: 1680622 - RNA, 14 nt, Human
acucuugaccucag

SEQ ID NO: 1680623 - RNA, 21 nt, Human
acucuuaagaagacugcauua

SEQ ID NO: 1680624 - RNA, 20 nt, Human
acugaacucugacaacagac

SEQ ID NO: 1680625 - RNA, 15 nt, Human
acucuuguuuccuua

SEQ ID NO: 1680626 - RNA, 19 nt, Human
acucuuucuauuguuucuu

SEQ ID NO: 1680627 - RNA, 21 nt, Human
uccugaauuuuauuuuuuggg

SEQ ID NO: 1680628 - RNA, 22 nt, Human
uccucuuuggucuacacugugc

SEQ ID NO: 1680629 - RNA, 23 nt, Human
uccucuuuggucuacacugugcu

SEQ ID NO: 1680630 - RNA, 19 nt, Human
uccucuuuccaucuacccu

SEQ ID NO: 1680631 - RNA, 19 nt, Human
uccucuuuggucuacacug

SEQ ID NO: 1680632 - RNA, 21 nt, Human
uccucuuuggucuacacugug

SEQ ID NO: 1680633 - RNA, 11 nt, Human
uccucccuccc

SEQ ID NO: 1680634 - RNA, 14 nt, Human
uccucccucccucu

SEQ ID NO: 1680635 - RNA, 11 nt, Human
uccucuuucca

SEQ ID NO: 1680636 - RNA, 12 nt, Human
uccucuuuccau

SEQ ID NO: 1680637 - RNA, 12 nt, Human
acugaagaagca

SEQ ID NO: 1680638 - RNA, 13 nt, Human
acugacucuuaag

SEQ ID NO: 1680639 - RNA, 14 nt, Human
acugacucuuaaga

SEQ ID NO: 1680640 - RNA, 15 nt, Human
acugacucuuaagaa

SEQ ID NO: 1680641 - RNA, 16 nt, Human
acugacucuuaagaag

SEQ ID NO: 1680642 - RNA, 17 nt, Human
acugacucuuaagaaga

SEQ ID NO: 1680643 - RNA, 18 nt, Human
acugacucuuaagaagac

SEQ ID NO: 1680644 - RNA, 20 nt, Human
acugacucuuaagaagacug

SEQ ID NO: 1680645 - RNA, 13 nt, Human
acugacuucuaag

SEQ ID NO: 1680646 - RNA, 15 nt, Human
acugacuucuaagua

SEQ ID NO: 1680647 - RNA, 16 nt, Human
acugacuucuaaguaa

SEQ ID NO: 1680648 - RNA, 22 nt, Human
acugacuucuaaguaaaaccac

SEQ ID NO: 1680649 - RNA, 12 nt, Human
acugagaaauuu

SEQ ID NO: 1680650 - RNA, 17 nt, Human
acugagaaauuuauaaa

SEQ ID NO: 1680651 - RNA, 21 nt, Human
acugagaaauuuauaaacuuu

SEQ ID NO: 1680652 - RNA, 15 nt, Human
acugagacagcccgg

SEQ ID NO: 1680653 - RNA, 18 nt, Human
acugagacagcccgggcu

SEQ ID NO: 1680654 - RNA, 21 nt, Human
acugagacagcccgggcucug

SEQ ID NO: 1680655 - RNA, 22 nt, Human
acugagacagcccgggcucugc

SEQ ID NO: 1680656 - RNA, 23 nt, Human
acugagacagcccgggcucugcc

SEQ ID NO: 1680657 - RNA, 18 nt, Human
acugagagugaacaaauu

SEQ ID NO: 1680658 - RNA, 22 nt, Human
acugagaugugaacacaucagc

SEQ ID NO: 1680659 - RNA, 17 nt, Human
acugagaugugaacaca

SEQ ID NO: 1680660 - RNA, 14 nt, Human
uccugcacacgcuc

SEQ ID NO: 1680661 - RNA, 21 nt, Human
uccugcacacgcuccuuccuc

SEQ ID NO: 1680662 - RNA, 22 nt, Human
uccugcaaugaagucucugaag

SEQ ID NO: 1680663 - RNA, 22 nt, Human
uccugcacacgcuccuuccucu

SEQ ID NO: 1680664 - RNA, 13 nt, Human
acugcacuguuuu

SEQ ID NO: 1680665 - RNA, 19 nt, Human
uccugaugcuucuucagag

SEQ ID NO: 1680666 - RNA, 20 nt, Human
uccugaugcuucuucagaga

SEQ ID NO: 1680667 - RNA, 21 nt, Human
uccugaugcuucuucagagac

SEQ ID NO: 1680668 - RNA, 21 nt, Human
acugcacuauagccuagguga

SEQ ID NO: 1680669 - RNA, 14 nt, Human
acugcacuccagcc

SEQ ID NO: 1680670 - RNA, 17 nt, Human
acugcacuccagccugg

SEQ ID NO: 1680671 - RNA, 18 nt, Human
acugcacuccagccuggg

SEQ ID NO: 1680672 - RNA, 19 nt, Human
acugcacuccagccugggu

SEQ ID NO: 1680673 - RNA, 20 nt, Human
acugcacuccagccugggug

SEQ ID NO: 1680674 - RNA, 20 nt, Human
acugcaacuuguaaaugugg

SEQ ID NO: 1680675 - RNA, 21 nt, Human
acugauaaagaugagugagca

SEQ ID NO: 1680676 - RNA, 13 nt, Human
acugauaaagaug

SEQ ID NO: 1680677 - RNA, 23 nt, Human
acugcacagugcaucucagccca

SEQ ID NO: 1680678 - RNA, 14 nt, Human
acugcaccgggcca

SEQ ID NO: 1680679 - RNA, 16 nt, Human
acugcaccgggccaca

SEQ ID NO: 1680680 - RNA, 20 nt, Human
acugcacuauagccuaggug

SEQ ID NO: 1680681 - RNA, 13 nt, Human
uccugcugggcag

SEQ ID NO: 1680682 - RNA, 12 nt, Human
uccugcaggcag

SEQ ID NO: 1680683 - RNA, 13 nt, Human
uccugcaggcagc

SEQ ID NO: 1680684 - RNA, 14 nt, Human
uccugcaggcagcc

SEQ ID NO: 1680685 - RNA, 15 nt, Human
uccugcaggcagcca

SEQ ID NO: 1680686 - RNA, 15 nt, Human
uccugggagcuuuug

SEQ ID NO: 1680687 - RNA, 12 nt, Human
uccugggaguga

SEQ ID NO: 1680688 - RNA, 14 nt, Human
uccugggagugagc

SEQ ID NO: 1680689 - RNA, 17 nt, Human
uccugggagugagcugg

SEQ ID NO: 1680690 - RNA, 23 nt, Human
uccuggaagugcuaauuuugaaa

SEQ ID NO: 1680691 - RNA, 22 nt, Human
uccuggaauaucuccgucaacu

SEQ ID NO: 1680692 - RNA, 15 nt, Human
uccuggaaauauuaa

SEQ ID NO: 1680693 - RNA, 16 nt, Human
uccuggaaaucagggu

SEQ ID NO: 1680694 - RNA, 19 nt, Human
acuagacucccaagcugga

SEQ ID NO: 1680695 - RNA, 16 nt, Human
ucccccagccccaucc

SEQ ID NO: 1680696 - RNA, 13 nt, Human
ucccccagcccca

SEQ ID NO: 1680697 - RNA, 15 nt, Human
ucccccagccccauc

SEQ ID NO: 1680698 - RNA, 11 nt, Human
ucccccagccc

SEQ ID NO: 1680699 - RNA, 23 nt, Human
uccccaggaggccagccuugacc

SEQ ID NO: 1680700 - RNA, 20 nt, Human
uccccaggaggccagccuug

SEQ ID NO: 1680701 - RNA, 21 nt, Human
uccccaggaggccagccuuga

SEQ ID NO: 1680702 - RNA, 23 nt, Human
uccccacccugaaagcccugagc

SEQ ID NO: 1680703 - RNA, 15 nt, Human
uccccaccgcagaca

SEQ ID NO: 1680704 - RNA, 16 nt, Human
uccccaccgcagacag

SEQ ID NO: 1680705 - RNA, 18 nt, Human
uccccaggaggccagccu

SEQ ID NO: 1680706 - RNA, 17 nt, Human
acuauguugcccaggca

SEQ ID NO: 1680707 - RNA, 15 nt, Human
acuauguugcccagg

SEQ ID NO: 1680708 - RNA, 16 nt, Human
acuauguugcccaggc

SEQ ID NO: 1680709 - RNA, 22 nt, Human
acuauggcccuggccuagcaua

SEQ ID NO: 1680710 - RNA, 14 nt, Human
acuauguugcccag

SEQ ID NO: 1680711 - RNA, 12 nt, Human
acucaauuuuaa

SEQ ID NO: 1680712 - RNA, 15 nt, Human
acucaauuuuaacaa

SEQ ID NO: 1680713 - RNA, 16 nt, Human
acucaaugcacugaca

SEQ ID NO: 1680714 - RNA, 16 nt, Human
acuaucucauuuccaa

SEQ ID NO: 1680715 - RNA, 17 nt, Human
acuaucucauuuccaag

SEQ ID NO: 1680716 - RNA, 16 nt, Human
acuaucuaaauguuga

SEQ ID NO: 1680717 - RNA, 21 nt, Human
acuaucuaaauguugaaagau

SEQ ID NO: 1680718 - RNA, 15 nt, Human
acuaucucauuucca

SEQ ID NO: 1680719 - RNA, 20 nt, Human
acuauagccuaggugacaga

SEQ ID NO: 1680720 - RNA, 22 nt, Human
acuauagccuaggugacagagu

SEQ ID NO: 1680721 - RNA, 17 nt, Human
acuauauuguuugcuaa

SEQ ID NO: 1680722 - RNA, 22 nt, Human
acuauauuguuugcuaagcauu

SEQ ID NO: 1680723 - RNA, 18 nt, Human
acguggcugcuucaagga

SEQ ID NO: 1680724 - RNA, 19 nt, Human
acguggcugcuucaaggau

SEQ ID NO: 1680725 - RNA, 21 nt, Human
acguggcugcuucaaggaucc

SEQ ID NO: 1680726 - RNA, 15 nt, Human
acguuaccaggcagg

SEQ ID NO: 1680727 - RNA, 13 nt, Human
acguugugcauuu

SEQ ID NO: 1680728 - RNA, 15 nt, Human
acguugugcauuugg

SEQ ID NO: 1680729 - RNA, 14 nt, Human
acguugugcauuug

SEQ ID NO: 1680730 - RNA, 16 nt, Human
acguuucuaaaggcua

SEQ ID NO: 1680731 - RNA, 19 nt, Human
acggugaauggcuuuguau

SEQ ID NO: 1680732 - RNA, 20 nt, Human
acggugaauggcuuuguaua

SEQ ID NO: 1680733 - RNA, 16 nt, Human
acggugaauggcuuug

SEQ ID NO: 1680734 - RNA, 19 nt, Human
uccauccugaggcuccacu

SEQ ID NO: 1680735 - RNA, 12 nt, Human
uccauccugagg

SEQ ID NO: 1680736 - RNA, 15 nt, Human
uccauccugaggcuc

SEQ ID NO: 1680737 - RNA, 16 nt, Human
ucccagauacuugggg

SEQ ID NO: 1680738 - RNA, 18 nt, Human
ucccagauacuugggggg

SEQ ID NO: 1680739 - RNA, 22 nt, Human
acguuucuaaaggcuaccuuug

SEQ ID NO: 1680740 - RNA, 15 nt, Human
acuaaacuuucacac

SEQ ID NO: 1680741 - RNA, 16 nt, Human
acuaaacuuucacacc

SEQ ID NO: 1680742 - RNA, 15 nt, Human
acuaauuuuaaaaug

SEQ ID NO: 1680743 - RNA, 13 nt, Human
acggaugauuucu

SEQ ID NO: 1680744 - RNA, 14 nt, Human
acggaugauuucua

SEQ ID NO: 1680745 - RNA, 12 nt, Human
acggccaggcca

SEQ ID NO: 1680746 - RNA, 13 nt, Human
acggccaggccag

SEQ ID NO: 1680747 - RNA, 16 nt, Human
acggcucacugcagcc

SEQ ID NO: 1680748 - RNA, 17 nt, Human
acggcucacugcagccu

SEQ ID NO: 1680749 - RNA, 18 nt, Human
acggcucacugcagccuc

SEQ ID NO: 1680750 - RNA, 18 nt, Human
acggcuuuuacuuaaacc

SEQ ID NO: 1680751 - RNA, 14 nt, Human
uccaguaucuugaa

SEQ ID NO: 1680752 - RNA, 15 nt, Human
uccaguaucuugaag

SEQ ID NO: 1680753 - RNA, 16 nt, Human
uccaguaucuugaaga

SEQ ID NO: 1680754 - RNA, 18 nt, Human
uccaguaucuugaagacu

SEQ ID NO: 1680755 - RNA, 22 nt, Human
uccagugaggcucugcccuugg

SEQ ID NO: 1680756 - RNA, 23 nt, Human
uccagugaggcucugcccuuggu

SEQ ID NO: 1680757 - RNA, 16 nt, Human
uccagugaggcucugc

SEQ ID NO: 1680758 - RNA, 17 nt, Human
uccagugaggcucugcc

SEQ ID NO: 1680759 - RNA, 15 nt, Human
uccagugaggcucug

SEQ ID NO: 1680760 - RNA, 18 nt, Human
uccagugagacagcucug

SEQ ID NO: 1680761 - RNA, 20 nt, Human
acgcgugcacacaccagagc

SEQ ID NO: 1680762 - RNA, 21 nt, Human
acgcuacccgggaagggggcu

SEQ ID NO: 1680763 - RNA, 21 nt, Human
acgaauauugcugauggugca

SEQ ID NO: 1680764 - RNA, 23 nt, Human
acggagucccaccuuggcugcag

SEQ ID NO: 1680765 - RNA, 17 nt, Human
acgcuggagugcaguga

SEQ ID NO: 1680766 - RNA, 18 nt, Human
acgcuggagugcagugag

SEQ ID NO: 1680767 - RNA, 20 nt, Human
acgcuggaccuugaacuggg

SEQ ID NO: 1680768 - RNA, 23 nt, Human
acgcuggaccuugaacuggguac

SEQ ID NO: 1680769 - RNA, 15 nt, Human
acgcuggagugcagu

SEQ ID NO: 1680770 - RNA, 16 nt, Human
acgcuggagugcagug

SEQ ID NO: 1680771 - RNA, 14 nt, Human
acgcuccuuccucu

SEQ ID NO: 1680772 - RNA, 15 nt, Human
acgcuccuuccucug

SEQ ID NO: 1680773 - RNA, 13 nt, Human
acgcuggaccuug

SEQ ID NO: 1680774 - RNA, 11 nt, Human
acgcucucugg

SEQ ID NO: 1680775 - RNA, 14 nt, Human
acgcucucuggccu

SEQ ID NO: 1680776 - RNA, 20 nt, Human
uccagccugcugccugcuuu

SEQ ID NO: 1680777 - RNA, 11 nt, Human
uccagccuggg

SEQ ID NO: 1680778 - RNA, 13 nt, Human
uccagaccccugg

SEQ ID NO: 1680779 - RNA, 16 nt, Human
uccagaauuucccaaa

SEQ ID NO: 1680780 - RNA, 14 nt, Human
uccagaauuuccca

SEQ ID NO: 1680781 - RNA, 15 nt, Human
uccagaauuucccaa

SEQ ID NO: 1680782 - RNA, 14 nt, Human
uccaggcuguaucc

SEQ ID NO: 1680783 - RNA, 23 nt, Human
uccaggcugggagagccuuccag

SEQ ID NO: 1680784 - RNA, 15 nt, Human
acgaauauugcugau

SEQ ID NO: 1680785 - RNA, 18 nt, Human
acgaauauugcugauggu

SEQ ID NO: 1680786 - RNA, 10 nt, Human
uccaggcucc

SEQ ID NO: 1680787 - RNA, 12 nt, Human
uccaggcuccuu

SEQ ID NO: 1680788 - RNA, 22 nt, Human
uccaggcuccuuuagcgcccag

SEQ ID NO: 1680789 - RNA, 20 nt, Human
uccaggcugggagagccuuc

SEQ ID NO: 1680790 - RNA, 21 nt, Human
uccaggcugggagagccuucc

SEQ ID NO: 1680791 - RNA, 13 nt, Human
accuuuuuuauac

SEQ ID NO: 1680792 - RNA, 20 nt, Human
accuuuuggucuggagggaa

SEQ ID NO: 1680793 - RNA, 18 nt, Human
uccagaauggucuuucua

SEQ ID NO: 1680794 - RNA, 21 nt, Human
uccacugugccaugugccagg

SEQ ID NO: 1680795 - RNA, 22 nt, Human
uccacugguucuucuuggucuc

SEQ ID NO: 1680796 - RNA, 20 nt, Human
accuugaacuggguacuugu

SEQ ID NO: 1680797 - RNA, 19 nt, Human
accuugaaaacuuuaugcu

SEQ ID NO: 1680798 - RNA, 17 nt, Human
accuuugacaaagguaa

SEQ ID NO: 1680799 - RNA, 18 nt, Human
accuuugacaaagguaaa

SEQ ID NO: 1680800 - RNA, 17 nt, Human
accuuuguccccaccgc

SEQ ID NO: 1680801 - RNA, 22 nt, Human
accuuuguuugcaucugaaaau

SEQ ID NO: 1680802 - RNA, 18 nt, Human
accuuuguccccaccgca

SEQ ID NO: 1680803 - RNA, 16 nt, Human
accgagucucuucucc

SEQ ID NO: 1680804 - RNA, 17 nt, Human
accgagucucuucucca

SEQ ID NO: 1680805 - RNA, 15 nt, Human
ucauauuuucaugcu

SEQ ID NO: 1680806 - RNA, 16 nt, Human
ucauauuuacuucuua

SEQ ID NO: 1680807 - RNA, 15 nt, Human
ucauauuuacuucuu

SEQ ID NO: 1680808 - RNA, 23 nt, Human
ucauauuuacuucuuauacauuu

SEQ ID NO: 1680809 - RNA, 21 nt, Human
ucauaguaugguggcuggguu

SEQ ID NO: 1680810 - RNA, 18 nt, Human
ucauauaagauucauauu

SEQ ID NO: 1680811 - RNA, 14 nt, Human
ucauaaccuagccu

SEQ ID NO: 1680812 - RNA, 15 nt, Human
ucauaguaugguggc

SEQ ID NO: 1680813 - RNA, 18 nt, Human
ucauaguaugguggcugg

SEQ ID NO: 1680814 - RNA, 19 nt, Human
ucauaguaugguggcuggg

SEQ ID NO: 1680815 - RNA, 12 nt, Human
ucagugccacua

SEQ ID NO: 1680816 - RNA, 17 nt, Human
accgaaaacguggcugc

SEQ ID NO: 1680817 - RNA, 19 nt, Human
accgaaaacguggcugcuu

SEQ ID NO: 1680818 - RNA, 20 nt, Human
ucagugcccuccaggauaga

SEQ ID NO: 1680819 - RNA, 9 nt, Human
ucagugccu

SEQ ID NO: 1680820 - RNA, 10 nt, Human
ucagugccuu

SEQ ID NO: 1680821 - RNA, 11 nt, Human
ucagugccuua

SEQ ID NO: 1680822 - RNA, 12 nt, Human
ucagugccuuau

SEQ ID NO: 1680823 - RNA, 14 nt, Human
ucagugccuuaugg

SEQ ID NO: 1680824 - RNA, 15 nt, Human
ucagugccuuaugga

SEQ ID NO: 1680825 - RNA, 16 nt, Human
ucaguggggaggggcu

SEQ ID NO: 1680826 - RNA, 12 nt, Human
ucaguggcagcu

SEQ ID NO: 1680827 - RNA, 13 nt, Human
ucaguggcagcug

SEQ ID NO: 1680828 - RNA, 16 nt, Human
ucagugccuuauggaa

SEQ ID NO: 1680829 - RNA, 18 nt, Human
ucagugccuuauggaaca

SEQ ID NO: 1680830 - RNA, 11 nt, Human
ucaguggcagc

SEQ ID NO: 1680831 - RNA, 20 nt, Human
ucaguggggcccauggaugu

SEQ ID NO: 1680832 - RNA, 15 nt, Human
ucaguuuuugugaaa

SEQ ID NO: 1680833 - RNA, 17 nt, Human
ucaguuuuugugaaaag

SEQ ID NO: 1680834 - RNA, 17 nt, Human
ucaugugaaaucauuca

SEQ ID NO: 1680835 - RNA, 16 nt, Human
ucaugugaaaucauuc

SEQ ID NO: 1680836 - RNA, 23 nt, Human
ucaugcaaacuuuauuuuguguu

SEQ ID NO: 1680837 - RNA, 13 nt, Human
ucauccauccagg

SEQ ID NO: 1680838 - RNA, 13 nt, Human
ucaucuaggauuu

SEQ ID NO: 1680839 - RNA, 11 nt, Human
ucaugauuuuu

SEQ ID NO: 1680840 - RNA, 14 nt, Human
ucaugcaaacuuua

SEQ ID NO: 1680841 - RNA, 16 nt, Human
ucaugaaagauucaau

SEQ ID NO: 1680842 - RNA, 17 nt, Human
ucaugaaagauucaaug

SEQ ID NO: 1680843 - RNA, 20 nt, Human
accucccacaaaggagagcu

SEQ ID NO: 1680844 - RNA, 17 nt, Human
accgcagacaggaccag

SEQ ID NO: 1680845 - RNA, 12 nt, Human
accgcagacagg

SEQ ID NO: 1680846 - RNA, 16 nt, Human
accgcagacaggacca

SEQ ID NO: 1680847 - RNA, 16 nt, Human
accuagggugauauua

SEQ ID NO: 1680848 - RNA, 16 nt, Human
acccugaaagcccuga

SEQ ID NO: 1680849 - RNA, 18 nt, Human
acccugaaagcccugagc

SEQ ID NO: 1680850 - RNA, 14 nt, Human
acccugaggcccag

SEQ ID NO: 1680851 - RNA, 15 nt, Human
accgaaaacguggcu

SEQ ID NO: 1680852 - RNA, 17 nt, Human
acccuugccgucuaccu

SEQ ID NO: 1680853 - RNA, 23 nt, Human
acccuuguggucccaccccacac

SEQ ID NO: 1680854 - RNA, 17 nt, Human
acccugcccugugggcc

SEQ ID NO: 1680855 - RNA, 22 nt, Human
acccugcccugugggcccccaa

SEQ ID NO: 1680856 - RNA, 15 nt, Human
acccugaggcccaga

SEQ ID NO: 1680857 - RNA, 16 nt, Human
acccugaggcccagag

SEQ ID NO: 1680858 - RNA, 17 nt, Human
acccugaggcccagagg

SEQ ID NO: 1680859 - RNA, 15 nt, Human
acccugcccuguggg

SEQ ID NO: 1680860 - RNA, 21 nt, Human
ucaggccaggcccucugccca

SEQ ID NO: 1680861 - RNA, 22 nt, Human
ucaggccaggcccucugcccac

SEQ ID NO: 1680862 - RNA, 14 nt, Human
ucagcuccagcuca

SEQ ID NO: 1680863 - RNA, 15 nt, Human
ucagcuccagcucac

SEQ ID NO: 1680864 - RNA, 21 nt, Human
ucagcuuguaaauagcucagg

SEQ ID NO: 1680865 - RNA, 22 nt, Human
ucagcuuguaaauagcucaggu

SEQ ID NO: 1680866 - RNA, 23 nt, Human
ucaggccaggcccucugcccacu

SEQ ID NO: 1680867 - RNA, 19 nt, Human
ucagggucccugguggcag

SEQ ID NO: 1680868 - RNA, 16 nt, Human
ucaggguuggccccug

SEQ ID NO: 1680869 - RNA, 17 nt, Human
ucaggguuggccccugc

SEQ ID NO: 1680870 - RNA, 23 nt, Human
ucagguaacaggcagauacagga

SEQ ID NO: 1680871 - RNA, 21 nt, Human
ucagguaacaggcagauacag

SEQ ID NO: 1680872 - RNA, 22 nt, Human
ucagguaacaggcagauacagg

SEQ ID NO: 1680873 - RNA, 18 nt, Human
acccggaggggccuggca

SEQ ID NO: 1680874 - RNA, 21 nt, Human
acccggaggggccuggcagcc

SEQ ID NO: 1680875 - RNA, 14 nt, Human
acccggccccugcu

SEQ ID NO: 1680876 - RNA, 15 nt, Human
acccggccccugcug

SEQ ID NO: 1680877 - RNA, 16 nt, Human
acccggccccugcugg

SEQ ID NO: 1680878 - RNA, 22 nt, Human
acccggccccugcugguucagg

SEQ ID NO: 1680879 - RNA, 17 nt, Human
acccggccccugcuggu

SEQ ID NO: 1680880 - RNA, 20 nt, Human
acccggccccugcugguuca

SEQ ID NO: 1680881 - RNA, 12 nt, Human
acccgggaaggg

SEQ ID NO: 1680882 - RNA, 13 nt, Human
acccgggaagggg

SEQ ID NO: 1680883 - RNA, 17 nt, Human
acccgggaggcagaggu

SEQ ID NO: 1680884 - RNA, 21 nt, Human
ucagauuugaacucuucaauc

SEQ ID NO: 1680885 - RNA, 12 nt, Human
ucagauuugaac

SEQ ID NO: 1680886 - RNA, 18 nt, Human
accaguguuguggauuua

SEQ ID NO: 1680887 - RNA, 19 nt, Human
accauaaccccggaagcca

SEQ ID NO: 1680888 - RNA, 23 nt, Human
ucagauuuuauuauguaaauccc

SEQ ID NO: 1680889 - RNA, 19 nt, Human
ucagcaaaaauauuuuaug

SEQ ID NO: 1680890 - RNA, 20 nt, Human
ucagcaaaaauauuuuauga

SEQ ID NO: 1680891 - RNA, 15 nt, Human
ucagcaaaagaugcu

SEQ ID NO: 1680892 - RNA, 13 nt, Human
ucagcccucccug

SEQ ID NO: 1680893 - RNA, 14 nt, Human
ucagcccucccugc

SEQ ID NO: 1680894 - RNA, 15 nt, Human
ucagcccucccugcc

SEQ ID NO: 1680895 - RNA, 16 nt, Human
ucagcccucccugccc

SEQ ID NO: 1680896 - RNA, 17 nt, Human
ucagcccucccugcccc

SEQ ID NO: 1680897 - RNA, 19 nt, Human
acccaggagccccgaggcc

SEQ ID NO: 1680898 - RNA, 23 nt, Human
acccaggagccccgaggccuucu

SEQ ID NO: 1680899 - RNA, 17 nt, Human
accccacacacgccaga

SEQ ID NO: 1680900 - RNA, 13 nt, Human
accccagccccaa

SEQ ID NO: 1680901 - RNA, 22 nt, Human
accccagccccaaaacucuccu

SEQ ID NO: 1680902 - RNA, 18 nt, Human
accccuggcuuuucacug

SEQ ID NO: 1680903 - RNA, 19 nt, Human
accccuggcuuuucacugc

SEQ ID NO: 1680904 - RNA, 20 nt, Human
accccuggcuuuucacugcu

SEQ ID NO: 1680905 - RNA, 21 nt, Human
accccuggcuuuucacugcug

SEQ ID NO: 1680906 - RNA, 12 nt, Human
ucagcuccagcu

SEQ ID NO: 1680907 - RNA, 19 nt, Human
ucagcggggacagcuccuu

SEQ ID NO: 1680908 - RNA, 20 nt, Human
ucagcggggacagcuccuuc

SEQ ID NO: 1680909 - RNA, 21 nt, Human
ucagcggggacagcuccuucu

SEQ ID NO: 1680910 - RNA, 23 nt, Human
ucagcggggacagcuccuucugu

SEQ ID NO: 1680911 - RNA, 18 nt, Human
accccaucucuacaaaaa

SEQ ID NO: 1680912 - RNA, 15 nt, Human
accccugagcuugca

SEQ ID NO: 1680913 - RNA, 13 nt, Human
ucaaauuucuaaa

SEQ ID NO: 1680914 - RNA, 14 nt, Human
ucaaauuucuaaau

SEQ ID NO: 1680915 - RNA, 20 nt, Human
ucaacugcaucaagauguga

SEQ ID NO: 1680916 - RNA, 18 nt, Human
ucaacugggcugaacacu

SEQ ID NO: 1680917 - RNA, 15 nt, Human
ucaaccauuccccau

SEQ ID NO: 1680918 - RNA, 18 nt, Human
ucaaccauuccccauggg

SEQ ID NO: 1680919 - RNA, 14 nt, Human
ucaaccagcagaug

SEQ ID NO: 1680920 - RNA, 17 nt, Human
ucaaccaccuuucagau

SEQ ID NO: 1680921 - RNA, 19 nt, Human
acauguccaagaagcccag

SEQ ID NO: 1680922 - RNA, 15 nt, Human
acauguccaagaagc

SEQ ID NO: 1680923 - RNA, 23 nt, Human
acauguaauuaaguacuauguau

SEQ ID NO: 1680924 - RNA, 19 nt, Human
acauguauuuguuugcaua

SEQ ID NO: 1680925 - RNA, 17 nt, Human
acauguauuuguuugca

SEQ ID NO: 1680926 - RNA, 18 nt, Human
acauguauuuguuugcau

SEQ ID NO: 1680927 - RNA, 14 nt, Human
acauuccugaacag

SEQ ID NO: 1680928 - RNA, 15 nt, Human
acauuccugaacagg

SEQ ID NO: 1680929 - RNA, 14 nt, Human
acauuccugaugcu

SEQ ID NO: 1680930 - RNA, 18 nt, Human
ucaaauugugugaaaggu

SEQ ID NO: 1680931 - RNA, 15 nt, Human
acauguaauuaagua

SEQ ID NO: 1680932 - RNA, 17 nt, Human
acauguaauuaaguacu

SEQ ID NO: 1680933 - RNA, 19 nt, Human
acauguaauuaaguacuau

SEQ ID NO: 1680934 - RNA, 21 nt, Human
acauguaauuaaguacuaugu

SEQ ID NO: 1680935 - RNA, 22 nt, Human
acauguaauuaaguacuaugua

SEQ ID NO: 1680936 - RNA, 15 nt, Human
acaugggacauuugc

SEQ ID NO: 1680937 - RNA, 20 nt, Human
acaugggacauuugcucaug

SEQ ID NO: 1680938 - RNA, 21 nt, Human
acaugggacauuugcucaugg

SEQ ID NO: 1680939 - RNA, 14 nt, Human
acauggaaguacua

SEQ ID NO: 1680940 - RNA, 11 nt, Human
acaugggacau

SEQ ID NO: 1680941 - RNA, 14 nt, Human
acaugggacauuug

SEQ ID NO: 1680942 - RNA, 22 nt, Human
acaugcuacacacugcauguuu

SEQ ID NO: 1680943 - RNA, 21 nt, Human
acaugcuacacacugcauguu

SEQ ID NO: 1680944 - RNA, 15 nt, Human
acaugcuacacacug

SEQ ID NO: 1680945 - RNA, 23 nt, Human
acaugagguacugagagugaaca

SEQ ID NO: 1680946 - RNA, 20 nt, Human
acaugaauauuuaguguuca

SEQ ID NO: 1680947 - RNA, 12 nt, Human
acagucccugcc

SEQ ID NO: 1680948 - RNA, 20 nt, Human
acaugagguacugagaguga

SEQ ID NO: 1680949 - RNA, 21 nt, Human
acauuuuuuaaaugcaccugg

SEQ ID NO: 1680950 - RNA, 17 nt, Human
acauuuuuuaaaugcac

SEQ ID NO: 1680951 - RNA, 16 nt, Human
acauuuuuuaaaugca

SEQ ID NO: 1680952 - RNA, 14 nt, Human
acauuuuuuaaaug

SEQ ID NO: 1680953 - RNA, 23 nt, Human
acauuuuuaagugcugcauuuaa

SEQ ID NO: 1680954 - RNA, 22 nt, Human
acauuuuuaagugcugcauuua

SEQ ID NO: 1680955 - RNA, 21 nt, Human
acauuuuuaagugcugcauuu

SEQ ID NO: 1680956 - RNA, 20 nt, Human
acauuuuauuuuauuaugca

SEQ ID NO: 1680957 - RNA, 19 nt, Human
acauuuuauuuuauuaugc

SEQ ID NO: 1680958 - RNA, 14 nt, Human
acauuuuauuuuau

SEQ ID NO: 1680959 - RNA, 18 nt, Human
acauuuuauuuuauuaug

SEQ ID NO: 1680960 - RNA, 22 nt, Human
ucaauaucuuuuuuuuaauaaa

SEQ ID NO: 1680961 - RNA, 12 nt, Human
ucaacugggcug

SEQ ID NO: 1680962 - RNA, 15 nt, Human
ucaauauuucagaua

SEQ ID NO: 1680963 - RNA, 19 nt, Human
ucaauauuucagauaauca

SEQ ID NO: 1680964 - RNA, 23 nt, Human
ucaaugaaugaaugaauggcuaa

SEQ ID NO: 1680965 - RNA, 22 nt, Human
accagcgugugacuacuccccc

SEQ ID NO: 1680966 - RNA, 16 nt, Human
accacuacauucuguu

SEQ ID NO: 1680967 - RNA, 17 nt, Human
accacuacauucuguua

SEQ ID NO: 1680968 - RNA, 16 nt, Human
ucacuaggcuucuggu

SEQ ID NO: 1680969 - RNA, 19 nt, Human
ucaccugucuugccuuuuu

SEQ ID NO: 1680970 - RNA, 20 nt, Human
ucaccugucuugccuuuuuc

SEQ ID NO: 1680971 - RNA, 12 nt, Human
ucaccucaugga

SEQ ID NO: 1680972 - RNA, 13 nt, Human
ucaccucauggaa

SEQ ID NO: 1680973 - RNA, 14 nt, Human
ucaccucauggaau

SEQ ID NO: 1680974 - RNA, 23 nt, Human
ucacuguugcccaggcuggcgug

SEQ ID NO: 1680975 - RNA, 13 nt, Human
ucacugcauccuc

SEQ ID NO: 1680976 - RNA, 15 nt, Human
ucacugcagccucaa

SEQ ID NO: 1680977 - RNA, 19 nt, Human
ucacuaucccggcugcccu

SEQ ID NO: 1680978 - RNA, 20 nt, Human
ucacuaucccggcugcccuu

SEQ ID NO: 1680979 - RNA, 17 nt, Human
ucacuauguugcccagg

SEQ ID NO: 1680980 - RNA, 16 nt, Human
ucacugagacagcccg

SEQ ID NO: 1680981 - RNA, 17 nt, Human
ucacugagacagcccgg

SEQ ID NO: 1680982 - RNA, 21 nt, Human
ucacugagacagcccgggcuc

SEQ ID NO: 1680983 - RNA, 22 nt, Human
ucacugagacagcccgggcucu

SEQ ID NO: 1680984 - RNA, 14 nt, Human
ucacugcagccuca

SEQ ID NO: 1680985 - RNA, 17 nt, Human
accaguguuguggauuu

SEQ ID NO: 1680986 - RNA, 15 nt, Human
accaguguuguggau

SEQ ID NO: 1680987 - RNA, 23 nt, Human
accaguauuguacaaaguauuaa

SEQ ID NO: 1680988 - RNA, 14 nt, Human
accagucugacugu

SEQ ID NO: 1680989 - RNA, 14 nt, Human
accaguauuguaca

SEQ ID NO: 1680990 - RNA, 15 nt, Human
accaguauuguacaa

SEQ ID NO: 1680991 - RNA, 20 nt, Human
accaguauuguacaaaguau

SEQ ID NO: 1680992 - RNA, 22 nt, Human
accaguauuguacaaaguauua

SEQ ID NO: 1680993 - RNA, 10 nt, Human
ucacuugagu

SEQ ID NO: 1680994 - RNA, 23 nt, Human
ucacuugaacccgggaggcagag

SEQ ID NO: 1680995 - RNA, 14 nt, Human
ucacaaccuucugu

SEQ ID NO: 1680996 - RNA, 20 nt, Human
ucacagaugggugcuuggag

SEQ ID NO: 1680997 - RNA, 23 nt, Human
ucacagaugugugauucacagug

SEQ ID NO: 1680998 - RNA, 21 nt, Human
ucacagaugugugauucacag

SEQ ID NO: 1680999 - RNA, 13 nt, Human
ucacagccucuga

SEQ ID NO: 1681000 - RNA, 16 nt, Human
ucacaguucucuccuu

SEQ ID NO: 1681001 - RNA, 20 nt, Human
ucacaguucucuccuucuuc

SEQ ID NO: 1681002 - RNA, 17 nt, Human
ucacaaaggaugcccaa

SEQ ID NO: 1681003 - RNA, 16 nt, Human
ucaauucuugccaaau

SEQ ID NO: 1681004 - RNA, 15 nt, Human
accaccacacccagc

SEQ ID NO: 1681005 - RNA, 20 nt, Human
accaccacacccagcccacu

SEQ ID NO: 1681006 - RNA, 24 nt, Human
accacauuggagauguuuaguaau

SEQ ID NO: 1681007 - RNA, 18 nt, Human
accacaugugcacaugca

SEQ ID NO: 1681008 - RNA, 17 nt, Human
accacaucuugcucugc

SEQ ID NO: 1681009 - RNA, 18 nt, Human
accacaucuugcucugcu

SEQ ID NO: 1681010 - RNA, 19 nt, Human
accacaucuugcucugcug

SEQ ID NO: 1681011 - RNA, 22 nt, Human
ucaccauguuggccaggcuggu

SEQ ID NO: 1681012 - RNA, 20 nt, Human
ucacaguuuugguugcuuua

SEQ ID NO: 1681013 - RNA, 21 nt, Human
ucacaguuuugguugcuuuaa

SEQ ID NO: 1681014 - RNA, 23 nt, Human
ucacaguuuugguugcuuuaaua

SEQ ID NO: 1681015 - RNA, 21 nt, Human
uaagauuccagagaguggcuc

SEQ ID NO: 1681016 - RNA, 14 nt, Human
uaagauuccagaga

SEQ ID NO: 1681017 - RNA, 22 nt, Human
aaucaggguuaguauuguccag

SEQ ID NO: 1681018 - RNA, 16 nt, Human
aaucaggguuaguauu

SEQ ID NO: 1681019 - RNA, 21 nt, Human
aaucaggguuaguauugucca

SEQ ID NO: 1681020 - RNA, 18 nt, Human
uaagcacacuugacauca

SEQ ID NO: 1681021 - RNA, 22 nt, Human
uaagcuguuacugucuucagua

SEQ ID NO: 1681022 - RNA, 15 nt, Human
uaagagaaaugagcu

SEQ ID NO: 1681023 - RNA, 17 nt, Human
aauaugcacacauuuuu

SEQ ID NO: 1681024 - RNA, 16 nt, Human
aauaugcacacauuuu

SEQ ID NO: 1681025 - RNA, 22 nt, Human
aauaugcacacauuuuuuaaau

SEQ ID NO: 1681026 - RNA, 15 nt, Human
aauauuccugcauuu

SEQ ID NO: 1681027 - RNA, 21 nt, Human
aauaugccccauucaacaucu

SEQ ID NO: 1681028 - RNA, 24 nt, Human
aauaugccccauucaacaucuagu

SEQ ID NO: 1681029 - RNA, 12 nt, Human
aauauuuagugu

SEQ ID NO: 1681030 - RNA, 18 nt, Human
aauauuuauuuuaauaau

SEQ ID NO: 1681031 - RNA, 19 nt, Human
aauauuuauuuuaauaaug

SEQ ID NO: 1681032 - RNA, 14 nt, Human
aauauuucagauaa

SEQ ID NO: 1681033 - RNA, 17 nt, Human
aauauugauaugcuuau

SEQ ID NO: 1681034 - RNA, 14 nt, Human
uaacuucaccauau

SEQ ID NO: 1681035 - RNA, 17 nt, Human
uaacuuccaauuuacau

SEQ ID NO: 1681036 - RNA, 21 nt, Human
uaacuucacauauugauuucc

SEQ ID NO: 1681037 - RNA, 20 nt, Human
uaacgauaaaagacagugaa

SEQ ID NO: 1681038 - RNA, 16 nt, Human
uaacuuucugaaauaa

SEQ ID NO: 1681039 - RNA, 18 nt, Human
uaagaagugaaaaucuac

SEQ ID NO: 1681040 - RNA, 12 nt, Human
uaacauaaaucu

SEQ ID NO: 1681041 - RNA, 14 nt, Human
uaacauaaaucugu

SEQ ID NO: 1681042 - RNA, 18 nt, Human
uaacauggacaugaucuu

SEQ ID NO: 1681043 - RNA, 23 nt, Human
uaacauggacaugaucuucuuua

SEQ ID NO: 1681044 - RNA, 17 nt, Human
uaacauguaauuaagua

SEQ ID NO: 1681045 - RNA, 22 nt, Human
aauaucacuugucaauaaaauc

SEQ ID NO: 1681046 - RNA, 18 nt, Human
aauauauuuuaagacgaa

SEQ ID NO: 1681047 - RNA, 20 nt, Human
aauaucacuugucaauaaaa

SEQ ID NO: 1681048 - RNA, 16 nt, Human
aauaucaucaguauug

SEQ ID NO: 1681049 - RNA, 14 nt, Human
aauaguuguugauu

SEQ ID NO: 1681050 - RNA, 14 nt, Human
aauauauuuuaaga

SEQ ID NO: 1681051 - RNA, 15 nt, Human
aauauauuuuaagac

SEQ ID NO: 1681052 - RNA, 13 nt, Human
aauaguuggcuag

SEQ ID NO: 1681053 - RNA, 22 nt, Human
aauaguggugugauuuggggau

SEQ ID NO: 1681054 - RNA, 16 nt, Human
aauaguggugugauuu

SEQ ID NO: 1681055 - RNA, 16 nt, Human
aauagucaaauugugu

SEQ ID NO: 1681056 - RNA, 11 nt, Human
aauccuggcug

SEQ ID NO: 1681057 - RNA, 15 nt, Human
aaucgaccugccucg

SEQ ID NO: 1681058 - RNA, 12 nt, Human
aauccgcccauc

SEQ ID NO: 1681059 - RNA, 23 nt, Human
aaucauuaggugugacugaauuu

SEQ ID NO: 1681060 - RNA, 17 nt, Human
aaucauuaggugugacu

SEQ ID NO: 1681061 - RNA, 15 nt, Human
aaucauuagguguga

SEQ ID NO: 1681062 - RNA, 19 nt, Human
aaucuuauaauuuaaaaua

SEQ ID NO: 1681063 - RNA, 20 nt, Human
aaucugugaacuugaaauuu

SEQ ID NO: 1681064 - RNA, 21 nt, Human
aaucugugaacuugaaauuug

SEQ ID NO: 1681065 - RNA, 22 nt, Human
aaucugugaacuugaaauuuga

SEQ ID NO: 1681066 - RNA, 16 nt, Human
aaucugggccagaauu

SEQ ID NO: 1681067 - RNA, 17 nt, Human
aaucugggccagaauuu

SEQ ID NO: 1681068 - RNA, 19 nt, Human
aaucuacacuccagugaga

SEQ ID NO: 1681069 - RNA, 12 nt, Human
uaauaaacacuc

SEQ ID NO: 1681070 - RNA, 18 nt, Human
uaauaaacacucuugaaa

SEQ ID NO: 1681071 - RNA, 12 nt, Human
aaucaugaauua

SEQ ID NO: 1681072 - RNA, 15 nt, Human
aaucaugaauuaguu

SEQ ID NO: 1681073 - RNA, 13 nt, Human
uaaguacuaugua

SEQ ID NO: 1681074 - RNA, 16 nt, Human
uaaguacuauguauca

SEQ ID NO: 1681075 - RNA, 17 nt, Human
uaaguacuauguaucaa

SEQ ID NO: 1681076 - RNA, 19 nt, Human
uaaguacuauguaucaaug

SEQ ID NO: 1681077 - RNA, 21 nt, Human
uaaguauucuuauuuaaugaa

SEQ ID NO: 1681078 - RNA, 20 nt, Human
uaaguauucuuauuuaauga

SEQ ID NO: 1681079 - RNA, 19 nt, Human
uaaguauucuuauuuaaug

SEQ ID NO: 1681080 - RNA, 16 nt, Human
uaagcuuguauuccuu

SEQ ID NO: 1681081 - RNA, 19 nt, Human
uaaguaaugauaacuggaa

SEQ ID NO: 1681082 - RNA, 16 nt, Human
uaaggaaaaguuuaau

SEQ ID NO: 1681083 - RNA, 17 nt, Human
uaaugaaugaaacauuu

SEQ ID NO: 1681084 - RNA, 16 nt, Human
uaaucacuuuuuucca

SEQ ID NO: 1681085 - RNA, 17 nt, Human
uaaucacuuuuuuccac

SEQ ID NO: 1681086 - RNA, 19 nt, Human
uaaucacuuuuuuccacau

SEQ ID NO: 1681087 - RNA, 18 nt, Human
uaaucacuuuuuuccaca

SEQ ID NO: 1681088 - RNA, 16 nt, Human
uaauagacaauuuauu

SEQ ID NO: 1681089 - RNA, 21 nt, Human
uaauacaccacuacauucugu

SEQ ID NO: 1681090 - RNA, 14 nt, Human
uaauagacaauuua

SEQ ID NO: 1681091 - RNA, 19 nt, Human
uaauacaccacuacauucu

SEQ ID NO: 1681092 - RNA, 18 nt, Human
uaauacaccacuacauuc

SEQ ID NO: 1681093 - RNA, 16 nt, Human
uaauacaccacuacau

SEQ ID NO: 1681094 - RNA, 22 nt, Human
uaauagacaauuuauuauggca

SEQ ID NO: 1681095 - RNA, 18 nt, Human
uaauagacaauuuauuau

SEQ ID NO: 1681096 - RNA, 15 nt, Human
aaucuuuaauuuuac

SEQ ID NO: 1681097 - RNA, 16 nt, Human
aaucuuuaauuuuaca

SEQ ID NO: 1681098 - RNA, 15 nt, Human
uaaugaaugcauaaa

SEQ ID NO: 1681099 - RNA, 13 nt, Human
uaauguacugcau

SEQ ID NO: 1681100 - RNA, 18 nt, Human
uaaugucacaggcagguc

SEQ ID NO: 1681101 - RNA, 22 nt, Human
aaugaaugucagugugacugau

SEQ ID NO: 1681102 - RNA, 13 nt, Human
aaugaaugucagu

SEQ ID NO: 1681103 - RNA, 17 nt, Human
aaugaaugcauaaaaug

SEQ ID NO: 1681104 - RNA, 22 nt, Human
aaugaauggcuaagcaaaaugu

SEQ ID NO: 1681105 - RNA, 16 nt, Human
aaugaaagacuguaca

SEQ ID NO: 1681106 - RNA, 17 nt, Human
aaugaaagacuguacaa

SEQ ID NO: 1681107 - RNA, 17 nt, Human
aaugaaaccugugucuc

SEQ ID NO: 1681108 - RNA, 17 nt, Human
aaugaaacauuuuguca

SEQ ID NO: 1681109 - RNA, 16 nt, Human
aauuauuauuuggccc

SEQ ID NO: 1681110 - RNA, 14 nt, Human
aauuccccacccug

SEQ ID NO: 1681111 - RNA, 12 nt, Human
aauuccccagau

SEQ ID NO: 1681112 - RNA, 22 nt, Human
aauuccacuuauaggaauugac

SEQ ID NO: 1681113 - RNA, 18 nt, Human
aauuccaagugauugaaa

SEQ ID NO: 1681114 - RNA, 11 nt, Human
aauuacaggaa

SEQ ID NO: 1681115 - RNA, 15 nt, Human
aauuagccaagugug

SEQ ID NO: 1681116 - RNA, 10 nt, Human
uaccuguccc

SEQ ID NO: 1681117 - RNA, 13 nt, Human
uaccugucccccu

SEQ ID NO: 1681118 - RNA, 14 nt, Human
uaccugucccccug

SEQ ID NO: 1681119 - RNA, 16 nt, Human
uaccugucccccugac

SEQ ID NO: 1681120 - RNA, 17 nt, Human
uaccugucccccugaca

SEQ ID NO: 1681121 - RNA, 23 nt, Human
uaccugccaggaagccagcaggc

SEQ ID NO: 1681122 - RNA, 18 nt, Human
uaccugccaggaagccag

SEQ ID NO: 1681123 - RNA, 20 nt, Human
uaccugccaggaagccagca

SEQ ID NO: 1681124 - RNA, 20 nt, Human
uacuaucaugucaaacguga

SEQ ID NO: 1681125 - RNA, 19 nt, Human
uacuauauaugugaugauc

SEQ ID NO: 1681126 - RNA, 17 nt, Human
uacuacuccuguaggaa

SEQ ID NO: 1681127 - RNA, 23 nt, Human
uacuauggcccuggccuagcaua

SEQ ID NO: 1681128 - RNA, 12 nt, Human
uacuauguauca

SEQ ID NO: 1681129 - RNA, 13 nt, Human
uacuauguaucaa

SEQ ID NO: 1681130 - RNA, 14 nt, Human
uacuauguaucaau

SEQ ID NO: 1681131 - RNA, 22 nt, Human
uacucuccuggaaauauuaaga

SEQ ID NO: 1681132 - RNA, 23 nt, Human
uacucuccuggaaauauuaagaa

SEQ ID NO: 1681133 - RNA, 16 nt, Human
uacguugugcauuugg

SEQ ID NO: 1681134 - RNA, 15 nt, Human
uacguugugcauuug

SEQ ID NO: 1681135 - RNA, 14 nt, Human
uacguacacauuuu

SEQ ID NO: 1681136 - RNA, 13 nt, Human
uacguacacauuu

SEQ ID NO: 1681137 - RNA, 12 nt, Human
uacguacacauu

SEQ ID NO: 1681138 - RNA, 18 nt, Human
uacgggaggguaaggcug

SEQ ID NO: 1681139 - RNA, 22 nt, Human
uacgccaggggaaaaucagccu

SEQ ID NO: 1681140 - RNA, 19 nt, Human
aauucccuggccuuucaua

SEQ ID NO: 1681141 - RNA, 20 nt, Human
aauucccuggccuuucauau

SEQ ID NO: 1681142 - RNA, 21 nt, Human
uacucugugucagguggggca

SEQ ID NO: 1681143 - RNA, 12 nt, Human
uacucuguguca

SEQ ID NO: 1681144 - RNA, 14 nt, Human
uacuggauuguacu

SEQ ID NO: 1681145 - RNA, 16 nt, Human
uacuggagaaaaugga

SEQ ID NO: 1681146 - RNA, 19 nt, Human
uacuguaaggcaaucaugg

SEQ ID NO: 1681147 - RNA, 18 nt, Human
uacuguaauuugugauac

SEQ ID NO: 1681148 - RNA, 20 nt, Human
uacuguaauuugugauacaa

SEQ ID NO: 1681149 - RNA, 19 nt, Human
uacuguaauuugugauaca

SEQ ID NO: 1681150 - RNA, 18 nt, Human
uacuguaaggcaaucaug

SEQ ID NO: 1681151 - RNA, 14 nt, Human
uacuguaagaaaau

SEQ ID NO: 1681152 - RNA, 22 nt, Human
uacuguacaugaaaacacauuu

SEQ ID NO: 1681153 - RNA, 21 nt, Human
uacuguacaugaaaacacauu

SEQ ID NO: 1681154 - RNA, 23 nt, Human
uacuguaauuugugauacaaugc

SEQ ID NO: 1681155 - RNA, 22 nt, Human
aauugacccacaagaaaugaaa

SEQ ID NO: 1681156 - RNA, 21 nt, Human
aauugacccacaagaaaugaa

SEQ ID NO: 1681157 - RNA, 19 nt, Human
aauugaugggauuugguca

SEQ ID NO: 1681158 - RNA, 12 nt, Human
aauugcauuucc

SEQ ID NO: 1681159 - RNA, 23 nt, Human
aauggcacaaucucggcucacug

SEQ ID NO: 1681160 - RNA, 16 nt, Human
aauggacuguggugac

SEQ ID NO: 1681161 - RNA, 16 nt, Human
aauggcagccuuggca

SEQ ID NO: 1681162 - RNA, 12 nt, Human
aauggcagccuu

SEQ ID NO: 1681163 - RNA, 20 nt, Human
uacagauccccaagccuggc

SEQ ID NO: 1681164 - RNA, 22 nt, Human
uacagacaacaaaccuguuucu

SEQ ID NO: 1681165 - RNA, 19 nt, Human
uacacauuuuauuuuauua

SEQ ID NO: 1681166 - RNA, 22 nt, Human
uacacauuuuauuuuauuaugc

SEQ ID NO: 1681167 - RNA, 21 nt, Human
uacacauuuuauuuuauuaug

SEQ ID NO: 1681168 - RNA, 23 nt, Human
uacacauuuuauuuuauuaugca

SEQ ID NO: 1681169 - RNA, 15 nt, Human
uacacuaaaagguga

SEQ ID NO: 1681170 - RNA, 14 nt, Human
uacacuaagagaga

SEQ ID NO: 1681171 - RNA, 18 nt, Human
uacacuaagagagaauga

SEQ ID NO: 1681172 - RNA, 16 nt, Human
aaugccaucaauaaaa

SEQ ID NO: 1681173 - RNA, 21 nt, Human
aaugccaucaauaaaaaauua

SEQ ID NO: 1681174 - RNA, 23 nt, Human
aaugccaucaauaaaaaauuaug

SEQ ID NO: 1681175 - RNA, 22 nt, Human
aaugcacuuuguucuggcucuu

SEQ ID NO: 1681176 - RNA, 21 nt, Human
uacaaugcugugcccuaaagu

SEQ ID NO: 1681177 - RNA, 18 nt, Human
aaugaccuuucaauagga

SEQ ID NO: 1681178 - RNA, 16 nt, Human
aaugaccuuucaauag

SEQ ID NO: 1681179 - RNA, 17 nt, Human
aaugaccuuucaauagg

SEQ ID NO: 1681180 - RNA, 20 nt, Human
aaugaccuuucaauaggaaa

SEQ ID NO: 1681181 - RNA, 21 nt, Human
aaugcacuuuguucuggcucu

SEQ ID NO: 1681182 - RNA, 16 nt, Human
aaugcuucaucccuuu

SEQ ID NO: 1681183 - RNA, 20 nt, Human
aauggaaaugggcagagcag

SEQ ID NO: 1681184 - RNA, 21 nt, Human
aauggaaaugggcagagcaga

SEQ ID NO: 1681185 - RNA, 14 nt, Human
aauggaaccacucu

SEQ ID NO: 1681186 - RNA, 23 nt, Human
aauggacguguuaugacuccaga

SEQ ID NO: 1681187 - RNA, 20 nt, Human
aauggacuaacuugucuuug

SEQ ID NO: 1681188 - RNA, 13 nt, Human
aaugcccagcccc

SEQ ID NO: 1681189 - RNA, 11 nt, Human
aaugcccagcc

SEQ ID NO: 1681190 - RNA, 12 nt, Human
aaugcccagccc

SEQ ID NO: 1681191 - RNA, 22 nt, Human
aaugcuguauuagucacagaga

SEQ ID NO: 1681192 - RNA, 16 nt, Human
aaugcuguauuuuaaa

SEQ ID NO: 1681193 - RNA, 20 nt, Human
aauuaacauguuaaaccaug

SEQ ID NO: 1681194 - RNA, 19 nt, Human
aauuaacauguuaaaccau

SEQ ID NO: 1681195 - RNA, 11 nt, Human
aauuaacuuuu

SEQ ID NO: 1681196 - RNA, 22 nt, Human
aauuaaucugggccagaauuuc

SEQ ID NO: 1681197 - RNA, 21 nt, Human
aauuaagaaaggauaaaguug

SEQ ID NO: 1681198 - RNA, 15 nt, Human
aauuaagagagucua

SEQ ID NO: 1681199 - RNA, 13 nt, Human
uacauucuguuaa

SEQ ID NO: 1681200 - RNA, 18 nt, Human
uaccaccagucugacugu

SEQ ID NO: 1681201 - RNA, 13 nt, Human
uacauguauuugu

SEQ ID NO: 1681202 - RNA, 19 nt, Human
aauguauguguaaguauuc

SEQ ID NO: 1681203 - RNA, 22 nt, Human
aauguauuacaguggggaauga

SEQ ID NO: 1681204 - RNA, 20 nt, Human
aauguauguguaaguauucu

SEQ ID NO: 1681205 - RNA, 11 nt, Human
aaugugugugu

SEQ ID NO: 1681206 - RNA, 14 nt, Human
aaugugaaacugga

SEQ ID NO: 1681207 - RNA, 19 nt, Human
aaugugaaaagaaaaauga

SEQ ID NO: 1681208 - RNA, 15 nt, Human
aaugugaaacuggau

SEQ ID NO: 1681209 - RNA, 20 nt, Human
uacaucccuuaccugggaaa

SEQ ID NO: 1681210 - RNA, 24 nt, Human
uacauaaugcgugcauaccacuuu

SEQ ID NO: 1681211 - RNA, 23 nt, Human
uacauaaugcgugcauaccacuu

SEQ ID NO: 1681212 - RNA, 16 nt, Human
uacaggugugagucac

SEQ ID NO: 1681213 - RNA, 12 nt, Human
uauucaaaguug

SEQ ID NO: 1681214 - RNA, 13 nt, Human
uauucaaaguugc

SEQ ID NO: 1681215 - RNA, 16 nt, Human
uauucaaaguugccua

SEQ ID NO: 1681216 - RNA, 21 nt, Human
uauucagcucauggacuucug

SEQ ID NO: 1681217 - RNA, 12 nt, Human
acaggcuccugc

SEQ ID NO: 1681218 - RNA, 22 nt, Human
acaggcgugagccaccgugccu

SEQ ID NO: 1681219 - RNA, 14 nt, Human
uauucauaauuauu

SEQ ID NO: 1681220 - RNA, 16 nt, Human
uauucaggaagcucag

SEQ ID NO: 1681221 - RNA, 14 nt, Human
uauucaggaagcuc

SEQ ID NO: 1681222 - RNA, 20 nt, Human
uauucaguaauaacucuacc

SEQ ID NO: 1681223 - RNA, 21 nt, Human
uauuagugaccucagcuuuga

SEQ ID NO: 1681224 - RNA, 23 nt, Human
uauucaaacagucucaggaaauc

SEQ ID NO: 1681225 - RNA, 19 nt, Human
uauuagugaccucagcuuu

SEQ ID NO: 1681226 - RNA, 15 nt, Human
uauucaaacagucuc

SEQ ID NO: 1681227 - RNA, 14 nt, Human
uauuacuucugcua

SEQ ID NO: 1681228 - RNA, 13 nt, Human
uauuacuucugcu

SEQ ID NO: 1681229 - RNA, 14 nt, Human
uauuacuguaagaa

SEQ ID NO: 1681230 - RNA, 12 nt, Human
acagggcacacc

SEQ ID NO: 1681231 - RNA, 20 nt, Human
acagggcacaccgggcacuc

SEQ ID NO: 1681232 - RNA, 13 nt, Human
acaguauaauuaa

SEQ ID NO: 1681233 - RNA, 15 nt, Human
acaguauaauuaaca

SEQ ID NO: 1681234 - RNA, 20 nt, Human
acaguauaauuaacauguua

SEQ ID NO: 1681235 - RNA, 16 nt, Human
acagucaccucaugga

SEQ ID NO: 1681236 - RNA, 17 nt, Human
acagucaccucauggaa

SEQ ID NO: 1681237 - RNA, 18 nt, Human
acagucaccucauggaau

SEQ ID NO: 1681238 - RNA, 13 nt, Human
acaggcuccugcc

SEQ ID NO: 1681239 - RNA, 15 nt, Human
acaggcuccugccac

SEQ ID NO: 1681240 - RNA, 21 nt, Human
acaggcuccugccaccacgcc

SEQ ID NO: 1681241 - RNA, 22 nt, Human
acaggcuccugccaccacgccc

SEQ ID NO: 1681242 - RNA, 12 nt, Human
acaggcugggcu

SEQ ID NO: 1681243 - RNA, 22 nt, Human
acaggcugggcuucaguggcag

SEQ ID NO: 1681244 - RNA, 23 nt, Human
acaggcugggcuucaguggcagc

SEQ ID NO: 1681245 - RNA, 20 nt, Human
acagggaggacgcucucugg

SEQ ID NO: 1681246 - RNA, 21 nt, Human
acagggaggacgcucucuggc

SEQ ID NO: 1681247 - RNA, 14 nt, Human
uaugugugaaguga

SEQ ID NO: 1681248 - RNA, 12 nt, Human
uaugugugaagu

SEQ ID NO: 1681249 - RNA, 16 nt, Human
uauuaaaacucauuuu

SEQ ID NO: 1681250 - RNA, 17 nt, Human
uaugugaaacauguuuc

SEQ ID NO: 1681251 - RNA, 12 nt, Human
uaugugaacagu

SEQ ID NO: 1681252 - RNA, 22 nt, Human
uaugugaacaguuguguuugaa

SEQ ID NO: 1681253 - RNA, 23 nt, Human
uaugugccagauuuaugcauauu

SEQ ID NO: 1681254 - RNA, 20 nt, Human
uauguggaguucaucuugaa

SEQ ID NO: 1681255 - RNA, 14 nt, Human
uaugugaaacaugu

SEQ ID NO: 1681256 - RNA, 22 nt, Human
acaggcauguucucugaggaca

SEQ ID NO: 1681257 - RNA, 15 nt, Human
acaggcauguucucu

SEQ ID NO: 1681258 - RNA, 18 nt, Human
acaggcauguucucugag

SEQ ID NO: 1681259 - RNA, 19 nt, Human
acaggcauguucucugagg

SEQ ID NO: 1681260 - RNA, 20 nt, Human
acaggcauguucucugagga

SEQ ID NO: 1681261 - RNA, 14 nt, Human
acaggcauguucuc

SEQ ID NO: 1681262 - RNA, 14 nt, Human
acaggcagguccag

SEQ ID NO: 1681263 - RNA, 16 nt, Human
acaggcagguccaggg

SEQ ID NO: 1681264 - RNA, 16 nt, Human
acaggagugagcacua

SEQ ID NO: 1681265 - RNA, 14 nt, Human
acaggaucagucug

SEQ ID NO: 1681266 - RNA, 15 nt, Human
acaggaucagucuga

SEQ ID NO: 1681267 - RNA, 14 nt, Human
acaggacucugccu

SEQ ID NO: 1681268 - RNA, 23 nt, Human
acaggaccagggauuuccaugau

SEQ ID NO: 1681269 - RNA, 11 nt, Human
acagccuggca

SEQ ID NO: 1681270 - RNA, 13 nt, Human
acagcuaacaugg

SEQ ID NO: 1681271 - RNA, 15 nt, Human
acaggaaaagcugcu

SEQ ID NO: 1681272 - RNA, 16 nt, Human
acaggaaaagcugcug

SEQ ID NO: 1681273 - RNA, 17 nt, Human
acaggaaaagcugcuga

SEQ ID NO: 1681274 - RNA, 18 nt, Human
acaggaaaagcugcugac

SEQ ID NO: 1681275 - RNA, 13 nt, Human
acaggaaguacug

SEQ ID NO: 1681276 - RNA, 17 nt, Human
acaggaaguagaggagg

SEQ ID NO: 1681277 - RNA, 17 nt, Human
uauaaguguguguuuuu

SEQ ID NO: 1681278 - RNA, 23 nt, Human
uauaaguguguguuuuucauaaa

SEQ ID NO: 1681279 - RNA, 17 nt, Human
acagaaauguacagcaa

SEQ ID NO: 1681280 - RNA, 16 nt, Human
acagaaauguacagca

SEQ ID NO: 1681281 - RNA, 14 nt, Human
acagaaauguacag

SEQ ID NO: 1681282 - RNA, 20 nt, Human
acagaaaauggaagacagcu

SEQ ID NO: 1681283 - RNA, 17 nt, Human
acagaaaauucuucucc

SEQ ID NO: 1681284 - RNA, 18 nt, Human
acagaaaauucuucucca

SEQ ID NO: 1681285 - RNA, 13 nt, Human
acagacccugccc

SEQ ID NO: 1681286 - RNA, 14 nt, Human
acagacccugcccu

SEQ ID NO: 1681287 - RNA, 15 nt, Human
acagacccugcccug

SEQ ID NO: 1681288 - RNA, 20 nt, Human
uauauuuacuaaaauggacu

SEQ ID NO: 1681289 - RNA, 21 nt, Human
uauauuuacuaaaauggacug

SEQ ID NO: 1681290 - RNA, 16 nt, Human
uauauuuaguaucuuu

SEQ ID NO: 1681291 - RNA, 15 nt, Human
uauauuguuugcuaa

SEQ ID NO: 1681292 - RNA, 11 nt, Human
acagagaaagu

SEQ ID NO: 1681293 - RNA, 18 nt, Human
acagagaaaguacuucuc

SEQ ID NO: 1681294 - RNA, 13 nt, Human
uaucucccccagc

SEQ ID NO: 1681295 - RNA, 16 nt, Human
uaucucccccagcccc

SEQ ID NO: 1681296 - RNA, 14 nt, Human
uaucucccccagcc

SEQ ID NO: 1681297 - RNA, 23 nt, Human
uaucuauauuuuacauaaauuua

SEQ ID NO: 1681298 - RNA, 17 nt, Human
uaucucaaaacugcacu

SEQ ID NO: 1681299 - RNA, 18 nt, Human
uaucaaguauuauaccuu

SEQ ID NO: 1681300 - RNA, 17 nt, Human
uauggcuuuugugcauu

SEQ ID NO: 1681301 - RNA, 21 nt, Human
uauggcuuuugugcauuaucu

SEQ ID NO: 1681302 - RNA, 18 nt, Human
uauggcuuuugugcauua

SEQ ID NO: 1681303 - RNA, 15 nt, Human
uaugcuuauacacuu

SEQ ID NO: 1681304 - RNA, 23 nt, Human
uauggcuuuugugcauuaucuag

SEQ ID NO: 1681305 - RNA, 12 nt, Human
acagccuggcac

SEQ ID NO: 1681306 - RNA, 16 nt, Human
acagccucuuagaugc

SEQ ID NO: 1681307 - RNA, 17 nt, Human
uaugccugggcagaagg

SEQ ID NO: 1681308 - RNA, 19 nt, Human
uaugccccauucaacaucu

SEQ ID NO: 1681309 - RNA, 16 nt, Human
uaugauuaaguaauga

SEQ ID NO: 1681310 - RNA, 20 nt, Human
uaugauuaaguaaugauaac

SEQ ID NO: 1681311 - RNA, 24 nt, Human
uaugcauuugaaaauuuugauguu

SEQ ID NO: 1681312 - RNA, 23 nt, Human
uaugcauuugaaaauuuugaugu

SEQ ID NO: 1681313 - RNA, 11 nt, Human
uaugcauuuga

SEQ ID NO: 1681314 - RNA, 21 nt, Human
uaugauuaaguaaugauaacu

SEQ ID NO: 1681315 - RNA, 22 nt, Human
acagaucucugcuuuggaaauc

SEQ ID NO: 1681316 - RNA, 18 nt, Human
acagauccccaagccugg

SEQ ID NO: 1681317 - RNA, 17 nt, Human
acagauccccaagccug

SEQ ID NO: 1681318 - RNA, 15 nt, Human
acagagcccacgccc

SEQ ID NO: 1681319 - RNA, 18 nt, Human
acagagcccacgccccca

SEQ ID NO: 1681320 - RNA, 19 nt, Human
acagagcccacgcccccac

SEQ ID NO: 1681321 - RNA, 14 nt, Human
acagauuugagcuc

SEQ ID NO: 1681322 - RNA, 15 nt, Human
acagauuugagcuca

SEQ ID NO: 1681323 - RNA, 17 nt, Human
acagcaaggagauuuac

SEQ ID NO: 1681324 - RNA, 18 nt, Human
acagcccgggcucugccu

SEQ ID NO: 1681325 - RNA, 19 nt, Human
acagcccgggcucugccuc

SEQ ID NO: 1681326 - RNA, 20 nt, Human
acagcccgggcucugccucc

SEQ ID NO: 1681327 - RNA, 21 nt, Human
acagcaaggagauuuacaacu

SEQ ID NO: 1681328 - RNA, 17 nt, Human
acagcccgggcucugcc

SEQ ID NO: 1681329 - RNA, 18 nt, Human
acagcaagggugauggga

SEQ ID NO: 1681330 - RNA, 18 nt, Human
acagccguuuguucccca

SEQ ID NO: 1681331 - RNA, 19 nt, Human
acacacagcucuguccugg

SEQ ID NO: 1681332 - RNA, 17 nt, Human
acacacagcucuguccu

SEQ ID NO: 1681333 - RNA, 13 nt, Human
acacacagcucug

SEQ ID NO: 1681334 - RNA, 14 nt, Human
acacacagcucugu

SEQ ID NO: 1681335 - RNA, 22 nt, Human
acacacacgcgugcacacacca

SEQ ID NO: 1681336 - RNA, 14 nt, Human
acacaccagagccc

SEQ ID NO: 1681337 - RNA, 15 nt, Human
acacaccagagccca

SEQ ID NO: 1681338 - RNA, 20 nt, Human
acacaccagagcccaccuug

SEQ ID NO: 1681339 - RNA, 21 nt, Human
acacacgcgugcacacaccag

SEQ ID NO: 1681340 - RNA, 21 nt, Human
acacacugcauguuugugauu

SEQ ID NO: 1681341 - RNA, 20 nt, Human
acacacucaaaucaagaaac

SEQ ID NO: 1681342 - RNA, 15 nt, Human
acacacucaaaucaa

SEQ ID NO: 1681343 - RNA, 19 nt, Human
acaaugugaaaagaaaaau

SEQ ID NO: 1681344 - RNA, 17 nt, Human
acaaugugaaaagaaaa

SEQ ID NO: 1681345 - RNA, 19 nt, Human
acaauggauaggcacagga

SEQ ID NO: 1681346 - RNA, 24 nt, Human
acaaugcugugcccuaaaguguau

SEQ ID NO: 1681347 - RNA, 23 nt, Human
acaaugcugugcccuaaagugua

SEQ ID NO: 1681348 - RNA, 22 nt, Human
acaaugcugugcccuaaagugu

SEQ ID NO: 1681349 - RNA, 21 nt, Human
acaaugcugugcccuaaagug

SEQ ID NO: 1681350 - RNA, 22 nt, Human
acaaugcuguauuuuaaaagaa

SEQ ID NO: 1681351 - RNA, 19 nt, Human
acacaguauuacuucugcu

SEQ ID NO: 1681352 - RNA, 22 nt, Human
acacaguauuacuucugcuaca

SEQ ID NO: 1681353 - RNA, 18 nt, Human
acacaguauuacuucugc

SEQ ID NO: 1681354 - RNA, 23 nt, Human
acacacuuuugguuaagucuguu

SEQ ID NO: 1681355 - RNA, 22 nt, Human
uagugaaacucguuaauuugua

SEQ ID NO: 1681356 - RNA, 23 nt, Human
uaguguuggagaagaacugaaau

SEQ ID NO: 1681357 - RNA, 21 nt, Human
acaccuuagccugcccuccuu

SEQ ID NO: 1681358 - RNA, 12 nt, Human
acacgaauauug

SEQ ID NO: 1681359 - RNA, 16 nt, Human
acaccgggccuggaga

SEQ ID NO: 1681360 - RNA, 21 nt, Human
acaccucugcacaagcugcac

SEQ ID NO: 1681361 - RNA, 14 nt, Human
acaccgggccugga

SEQ ID NO: 1681362 - RNA, 16 nt, Human
acaccgggcacucaga

SEQ ID NO: 1681363 - RNA, 15 nt, Human
uauaaguguguguuu

SEQ ID NO: 1681364 - RNA, 20 nt, Human
acacucacauuuauucugcu

SEQ ID NO: 1681365 - RNA, 22 nt, Human
acacucacauuuauucugcuca

SEQ ID NO: 1681366 - RNA, 13 nt, Human
acacuaagagaga

SEQ ID NO: 1681367 - RNA, 14 nt, Human
acacuaagagagaa

SEQ ID NO: 1681368 - RNA, 15 nt, Human
acacucaaaagcugg

SEQ ID NO: 1681369 - RNA, 19 nt, Human
acacucaaaucaagaaacu

SEQ ID NO: 1681370 - RNA, 19 nt, Human
uauaaaaauaaaaaacacu

SEQ ID NO: 1681371 - RNA, 20 nt, Human
uauaaaagccuguuuaagag

SEQ ID NO: 1681372 - RNA, 22 nt, Human
uauaaaagggacugagaaauuu

SEQ ID NO: 1681373 - RNA, 19 nt, Human
uauaaaagccuguuuaaga

SEQ ID NO: 1681374 - RNA, 20 nt, Human
uaguuccaccaucaagccac

SEQ ID NO: 1681375 - RNA, 17 nt, Human
acaccauuaugugcgcu

SEQ ID NO: 1681376 - RNA, 21 nt, Human
acaccauuaugugcgcugaua

SEQ ID NO: 1681377 - RNA, 21 nt, Human
acacauuuuauuuuauuaugc

SEQ ID NO: 1681378 - RNA, 20 nt, Human
acacauuuuauuuuauuaug

SEQ ID NO: 1681379 - RNA, 19 nt, Human
acacauuuuauuuuauuau

SEQ ID NO: 1681380 - RNA, 14 nt, Human
acacauuuuauuuu

SEQ ID NO: 1681381 - RNA, 18 nt, Human
acacaugcaaggucauuu

SEQ ID NO: 1681382 - RNA, 15 nt, Human
acacaugaaguccaa

SEQ ID NO: 1681383 - RNA, 15 nt, Human
acacaucagcuugcc

SEQ ID NO: 1681384 - RNA, 21 nt, Human
acacaugagcaucaggccagg

SEQ ID NO: 1681385 - RNA, 18 nt, Human
acacaugauccugcaauu

SEQ ID NO: 1681386 - RNA, 16 nt, Human
uaggaaauccagggug

SEQ ID NO: 1681387 - RNA, 19 nt, Human
uaggaaauauuuauuuuaa

SEQ ID NO: 1681388 - RNA, 18 nt, Human
uaggaaauauuuauuuua

SEQ ID NO: 1681389 - RNA, 14 nt, Human
uaggcauuguggga

SEQ ID NO: 1681390 - RNA, 16 nt, Human
uaggcauuugcugaau

SEQ ID NO: 1681391 - RNA, 20 nt, Human
uaggcauuugcugaauacag

SEQ ID NO: 1681392 - RNA, 14 nt, Human
uagggagagaagau

SEQ ID NO: 1681393 - RNA, 15 nt, Human
uagggagagaagaua

SEQ ID NO: 1681394 - RNA, 22 nt, Human
acaaggacagccccuccuccau

SEQ ID NO: 1681395 - RNA, 21 nt, Human
acaaggacagccccuccucca

SEQ ID NO: 1681396 - RNA, 18 nt, Human
acaaggacuaggguccug

SEQ ID NO: 1681397 - RNA, 19 nt, Human
acaaggacuaggguccugg

SEQ ID NO: 1681398 - RNA, 13 nt, Human
acaagacugcaca

SEQ ID NO: 1681399 - RNA, 14 nt, Human
acaagacugcacau

SEQ ID NO: 1681400 - RNA, 23 nt, Human
acaauacaucccuuaccugggaa

SEQ ID NO: 1681401 - RNA, 19 nt, Human
acaaugacuuacuguacau

SEQ ID NO: 1681402 - RNA, 18 nt, Human
acaaugacuuacuguaca

SEQ ID NO: 1681403 - RNA, 17 nt, Human
acaaugacuuacuguac

SEQ ID NO: 1681404 - RNA, 12 nt, Human
acaaugacuuac

SEQ ID NO: 1681405 - RNA, 21 nt, Human
uagcuagacuggugacugauu

SEQ ID NO: 1681406 - RNA, 22 nt, Human
uagcuagacuggugacugauuc

SEQ ID NO: 1681407 - RNA, 11 nt, Human
uagccagagga

SEQ ID NO: 1681408 - RNA, 15 nt, Human
uagccagaggagaga

SEQ ID NO: 1681409 - RNA, 19 nt, Human
acaaauuuacagagacaga

SEQ ID NO: 1681410 - RNA, 18 nt, Human
acaaauuuacagagacag

SEQ ID NO: 1681411 - RNA, 23 nt, Human
acaacacucauugaccugaggcc

SEQ ID NO: 1681412 - RNA, 21 nt, Human
acaacacucauugaccugagg

SEQ ID NO: 1681413 - RNA, 19 nt, Human
acaagaccacguuucuaaa

SEQ ID NO: 1681414 - RNA, 19 nt, Human
acaagacccuugugguccc

SEQ ID NO: 1681415 - RNA, 20 nt, Human
acaagacccaaaaggcagaa

SEQ ID NO: 1681416 - RNA, 21 nt, Human
uagccaaggccaaaggaagca

SEQ ID NO: 1681417 - RNA, 22 nt, Human
uagcauuuugcuaaaugugaau

SEQ ID NO: 1681418 - RNA, 16 nt, Human
uagcauuuugcuaaau

SEQ ID NO: 1681419 - RNA, 18 nt, Human
uagcaugucgucaaagcu

SEQ ID NO: 1681420 - RNA, 23 nt, Human
uagaugcugacuguacuccuccc

SEQ ID NO: 1681421 - RNA, 14 nt, Human
uagaugcugacugu

SEQ ID NO: 1681422 - RNA, 15 nt, Human
uagaugcaguucuga

SEQ ID NO: 1681423 - RNA, 19 nt, Human
uagcauggcugccaauggg

SEQ ID NO: 1681424 - RNA, 22 nt, Human
acaaaggaugcccaaagaugca

SEQ ID NO: 1681425 - RNA, 21 nt, Human
aauuguguuuauaauuuuaaa

SEQ ID NO: 1681426 - RNA, 16 nt, Human
aauuguuacaaauugu

SEQ ID NO: 1681427 - RNA, 22 nt, Human
acaaaagcaugugagacugguu

SEQ ID NO: 1681428 - RNA, 11 nt, Human
acaaaagcaug

SEQ ID NO: 1681429 - RNA, 18 nt, Human
acaaaaggauaaugaaua

SEQ ID NO: 1681430 - RNA, 19 nt, Human
uagauauaugcucugcaug

SEQ ID NO: 1681431 - RNA, 15 nt, Human
uagauauaugcucug

SEQ ID NO: 1681432 - RNA, 22 nt, Human
uagaggagaaacuggaacucuc

SEQ ID NO: 1681433 - RNA, 23 nt, Human
uagagauuuuuuuguuguuuguu

SEQ ID NO: 1681434 - RNA, 22 nt, Human
gugcuccauggcugccaucuca

SEQ ID NO: 1681435 - RNA, 18 nt, Human
gugcuccauggcugccau

SEQ ID NO: 1681436 - RNA, 19 nt, Human
gugcucaggagcccuggga

SEQ ID NO: 1681437 - RNA, 18 nt, Human
gugcucaggagcccuggg

SEQ ID NO: 1681438 - RNA, 19 nt, Human
gugcuaucucccccagccc

SEQ ID NO: 1681439 - RNA, 16 nt, Human
gugcucaggagcccug

SEQ ID NO: 1681440 - RNA, 16 nt, Human
gugcucugaucaucca

SEQ ID NO: 1681441 - RNA, 13 nt, Human
gugcucuggacag

SEQ ID NO: 1681442 - RNA, 14 nt, Human
gugcucuggacagg

SEQ ID NO: 1681443 - RNA, 13 nt, Human
gugcugcccugcc

SEQ ID NO: 1681444 - RNA, 14 nt, Human
gugcugcccugccc

SEQ ID NO: 1681445 - RNA, 15 nt, Human
gugcugcccugccca

SEQ ID NO: 1681446 - RNA, 17 nt, Human
gugcuaggaacacuccu

SEQ ID NO: 1681447 - RNA, 15 nt, Human
gugcuaucuccccca

SEQ ID NO: 1681448 - RNA, 18 nt, Human
gugcuaucucccccagcc

SEQ ID NO: 1681449 - RNA, 22 nt, Human
gugcuacaaaaacacagcaagg

SEQ ID NO: 1681450 - RNA, 14 nt, Human
aagaaagaaaauca

SEQ ID NO: 1681451 - RNA, 16 nt, Human
aagaaagaaaaucagg

SEQ ID NO: 1681452 - RNA, 22 nt, Human
aagaaaauaguggugugauuug

SEQ ID NO: 1681453 - RNA, 21 nt, Human
aagaaaauaguggugugauuu

SEQ ID NO: 1681454 - RNA, 15 nt, Human
aagaaaauaguggug

SEQ ID NO: 1681455 - RNA, 11 nt, Human
aagaaacauuu

SEQ ID NO: 1681456 - RNA, 19 nt, Human
gugccagauuuaugcauau

SEQ ID NO: 1681457 - RNA, 23 nt, Human
aacuuuaccuuuuuuauacauaa

SEQ ID NO: 1681458 - RNA, 22 nt, Human
aacuuuaccuuuuuuauacaua

SEQ ID NO: 1681459 - RNA, 21 nt, Human
aacuuuaccuuuuuuauacau

SEQ ID NO: 1681460 - RNA, 19 nt, Human
aagaaaaaauauuuucccu

SEQ ID NO: 1681461 - RNA, 13 nt, Human
aagaaaaagaaaa

SEQ ID NO: 1681462 - RNA, 18 nt, Human
aagaaaaagaaaaagaaa

SEQ ID NO: 1681463 - RNA, 17 nt, Human
aagaaaaaugagccugg

SEQ ID NO: 1681464 - RNA, 18 nt, Human
aagaaaaaugagccuggc

SEQ ID NO: 1681465 - RNA, 22 nt, Human
gugcaaugaccuuucaauagga

SEQ ID NO: 1681466 - RNA, 23 nt, Human
gugcacaagcuccaagcucccag

SEQ ID NO: 1681467 - RNA, 21 nt, Human
gugcacaugcacgugugugca

SEQ ID NO: 1681468 - RNA, 18 nt, Human
gugcaaugaccuuucaau

SEQ ID NO: 1681469 - RNA, 13 nt, Human
gugcacaagcucc

SEQ ID NO: 1681470 - RNA, 16 nt, Human
gugcacaagcuccaag

SEQ ID NO: 1681471 - RNA, 21 nt, Human
gugcacaagcuccaagcuccc

SEQ ID NO: 1681472 - RNA, 20 nt, Human
gugcauuugaggucuguucu

SEQ ID NO: 1681473 - RNA, 21 nt, Human
gugcauuuggugguuucagaa

SEQ ID NO: 1681474 - RNA, 23 nt, Human
gugccaaaaacaacaacaaaaug

SEQ ID NO: 1681475 - RNA, 19 nt, Human
gugcauuugaggucuguuc

SEQ ID NO: 1681476 - RNA, 17 nt, Human
gugcauuugaggucugu

SEQ ID NO: 1681477 - RNA, 23 nt, Human
gugaugguuccccuguucacucu

SEQ ID NO: 1681478 - RNA, 14 nt, Human
gugaucucauuuaa

SEQ ID NO: 1681479 - RNA, 11 nt, Human
gugauuaccag

SEQ ID NO: 1681480 - RNA, 16 nt, Human
gugauuaccagggacu

SEQ ID NO: 1681481 - RNA, 17 nt, Human
gugauuaccagggacug

SEQ ID NO: 1681482 - RNA, 13 nt, Human
aacuugaaauuug

SEQ ID NO: 1681483 - RNA, 18 nt, Human
aacuugaaauuugaauuu

SEQ ID NO: 1681484 - RNA, 19 nt, Human
aacuugaaauuugaauuuu

SEQ ID NO: 1681485 - RNA, 12 nt, Human
aacuugaaauuu

SEQ ID NO: 1681486 - RNA, 22 nt, Human
aacuuccuuggacucauuuuaa

SEQ ID NO: 1681487 - RNA, 18 nt, Human
aacuucagcgguuuauau

SEQ ID NO: 1681488 - RNA, 13 nt, Human
aacuucagacaua

SEQ ID NO: 1681489 - RNA, 21 nt, Human
aacuucagcgguuuauauaag

SEQ ID NO: 1681490 - RNA, 23 nt, Human
aacuuccuuggacucauuuuaaa

SEQ ID NO: 1681491 - RNA, 18 nt, Human
aacugcccccucugcccu

SEQ ID NO: 1681492 - RNA, 19 nt, Human
aacugcccccucugcccug

SEQ ID NO: 1681493 - RNA, 20 nt, Human
aacugcccccucugcccugc

SEQ ID NO: 1681494 - RNA, 21 nt, Human
aacugcccccucugcccugcg

SEQ ID NO: 1681495 - RNA, 16 nt, Human
aacugcccccucugcc

SEQ ID NO: 1681496 - RNA, 17 nt, Human
aacugcccccucugccc

SEQ ID NO: 1681497 - RNA, 22 nt, Human
aacuucaccauauuaccacaga

SEQ ID NO: 1681498 - RNA, 22 nt, Human
aacuucacauauugauuuccgu

SEQ ID NO: 1681499 - RNA, 14 nt, Human
aacuucacauauug

SEQ ID NO: 1681500 - RNA, 18 nt, Human
gugaggcucugcccuugg

SEQ ID NO: 1681501 - RNA, 23 nt, Human
gugaguacuacaguccucccauc

SEQ ID NO: 1681502 - RNA, 17 nt, Human
gugagucaccaagccca

SEQ ID NO: 1681503 - RNA, 19 nt, Human
gugagucaccaagcccagu

SEQ ID NO: 1681504 - RNA, 19 nt, Human
aacucuccucugcugcugg

SEQ ID NO: 1681505 - RNA, 21 nt, Human
aacucuccucugcugcuggcu

SEQ ID NO: 1681506 - RNA, 18 nt, Human
gugagacucugucucaaa

SEQ ID NO: 1681507 - RNA, 12 nt, Human
gugaggcucugc

SEQ ID NO: 1681508 - RNA, 13 nt, Human
gugaggcucugcc

SEQ ID NO: 1681509 - RNA, 14 nt, Human
gugaggcucugccc

SEQ ID NO: 1681510 - RNA, 15 nt, Human
gugaggcucugcccu

SEQ ID NO: 1681511 - RNA, 16 nt, Human
gugaggcucugcccuu

SEQ ID NO: 1681512 - RNA, 17 nt, Human
gugaggcucugcccuug

SEQ ID NO: 1681513 - RNA, 16 nt, Human
aacucugacaacagac

SEQ ID NO: 1681514 - RNA, 22 nt, Human
aacucuccucugcugcuggcug

SEQ ID NO: 1681515 - RNA, 23 nt, Human
aacucuccucugcugcuggcugg

SEQ ID NO: 1681516 - RNA, 21 nt, Human
aacugauuuuuuuuuccuuca

SEQ ID NO: 1681517 - RNA, 22 nt, Human
aacugauuuuuuuuuccuucag

SEQ ID NO: 1681518 - RNA, 23 nt, Human
aacugauuuuuuuuuccuucagu

SEQ ID NO: 1681519 - RNA, 16 nt, Human
aacugcauuggcuuug

SEQ ID NO: 1681520 - RNA, 13 nt, Human
gugagaccugccc

SEQ ID NO: 1681521 - RNA, 14 nt, Human
gugagaccugcccc

SEQ ID NO: 1681522 - RNA, 15 nt, Human
gugagaccugccccu

SEQ ID NO: 1681523 - RNA, 22 nt, Human
gugagacccugucucaaaaaaa

SEQ ID NO: 1681524 - RNA, 16 nt, Human
gugagaccugccccuc

SEQ ID NO: 1681525 - RNA, 23 nt, Human
gugagaccugccccuccucucug

SEQ ID NO: 1681526 - RNA, 14 nt, Human
gugagacucugucu

SEQ ID NO: 1681527 - RNA, 16 nt, Human
gugagacucugucuca

SEQ ID NO: 1681528 - RNA, 16 nt, Human
gugacuucagcucugu

SEQ ID NO: 1681529 - RNA, 12 nt, Human
gugacuuuggau

SEQ ID NO: 1681530 - RNA, 15 nt, Human
gugacuuuggauaau

SEQ ID NO: 1681531 - RNA, 22 nt, Human
gugacauguguuggcagccucu

SEQ ID NO: 1681532 - RNA, 19 nt, Human
gugacaugucuuuucuugc

SEQ ID NO: 1681533 - RNA, 20 nt, Human
gugacagagugagacucugu

SEQ ID NO: 1681534 - RNA, 22 nt, Human
gugacagagugagacucugucu

SEQ ID NO: 1681535 - RNA, 12 nt, Human
aacuccugaccu

SEQ ID NO: 1681536 - RNA, 14 nt, Human
aacuccugaccuca

SEQ ID NO: 1681537 - RNA, 12 nt, Human
aacuccuggccu

SEQ ID NO: 1681538 - RNA, 23 nt, Human
gugaauaauacaguaucucaggg

SEQ ID NO: 1681539 - RNA, 14 nt, Human
gucugaaggcuggg

SEQ ID NO: 1681540 - RNA, 14 nt, Human
gucucaaaaaaaca

SEQ ID NO: 1681541 - RNA, 17 nt, Human
gucucaaaaaaagaaaa

SEQ ID NO: 1681542 - RNA, 19 nt, Human
gucucaaaaaaagaaaaag

SEQ ID NO: 1681543 - RNA, 20 nt, Human
gucugacaggcaaugcuggc

SEQ ID NO: 1681544 - RNA, 15 nt, Human
gucugacaggcaaug

SEQ ID NO: 1681545 - RNA, 18 nt, Human
gucugacaggcaaugcug

SEQ ID NO: 1681546 - RNA, 12 nt, Human
gucugacaggca

SEQ ID NO: 1681547 - RNA, 13 nt, Human
gucugacaggcaa

SEQ ID NO: 1681548 - RNA, 14 nt, Human
gucugacaggcaau

SEQ ID NO: 1681549 - RNA, 22 nt, Human
gucuuguuuuuuuuuuccacuu

SEQ ID NO: 1681550 - RNA, 23 nt, Human
gucuugucucagauuuuauuaug

SEQ ID NO: 1681551 - RNA, 13 nt, Human
gucuucacaacag

SEQ ID NO: 1681552 - RNA, 18 nt, Human
gucuggaaugcaguggua

SEQ ID NO: 1681553 - RNA, 15 nt, Human
gucuggaaugcagug

SEQ ID NO: 1681554 - RNA, 16 nt, Human
gucuggaaugcagugg

SEQ ID NO: 1681555 - RNA, 14 nt, Human
gucuuaauuaaaag

SEQ ID NO: 1681556 - RNA, 21 nt, Human
aaccuucgccaccuggguucc

SEQ ID NO: 1681557 - RNA, 12 nt, Human
aacgucuuaaau

SEQ ID NO: 1681558 - RNA, 14 nt, Human
aacgucuuaaauau

SEQ ID NO: 1681559 - RNA, 12 nt, Human
aacgugaaaaug

SEQ ID NO: 1681560 - RNA, 15 nt, Human
aacgucuuaaauauu

SEQ ID NO: 1681561 - RNA, 23 nt, Human
aaccuggucacaggacucugccu

SEQ ID NO: 1681562 - RNA, 21 nt, Human
aacuaggugcauauuuauaaa

SEQ ID NO: 1681563 - RNA, 17 nt, Human
aacuagggaagauaaua

SEQ ID NO: 1681564 - RNA, 12 nt, Human
aacguggcugcu

SEQ ID NO: 1681565 - RNA, 13 nt, Human
aacguggcugcuu

SEQ ID NO: 1681566 - RNA, 12 nt, Human
aacuauggccug

SEQ ID NO: 1681567 - RNA, 15 nt, Human
aacuauguugauaaa

SEQ ID NO: 1681568 - RNA, 21 nt, Human
aacucauuuuuguuuucauua

SEQ ID NO: 1681569 - RNA, 24 nt, Human
aacucauuuuuguuuucauuaucu

SEQ ID NO: 1681570 - RNA, 16 nt, Human
gucgaggacagggagg

SEQ ID NO: 1681571 - RNA, 12 nt, Human
gucgaggcagga

SEQ ID NO: 1681572 - RNA, 14 nt, Human
guccucuuuucuga

SEQ ID NO: 1681573 - RNA, 19 nt, Human
guccugcugcaguugccag

SEQ ID NO: 1681574 - RNA, 16 nt, Human
guccuggcaugggaau

SEQ ID NO: 1681575 - RNA, 12 nt, Human
gucgccucugca

SEQ ID NO: 1681576 - RNA, 14 nt, Human
gucuaccugagggg

SEQ ID NO: 1681577 - RNA, 13 nt, Human
gucuaccugaggg

SEQ ID NO: 1681578 - RNA, 15 nt, Human
gucuaccugaggggc

SEQ ID NO: 1681579 - RNA, 16 nt, Human
gucuaccugaggggcc

SEQ ID NO: 1681580 - RNA, 20 nt, Human
gucuauuuacggaacucaaa

SEQ ID NO: 1681581 - RNA, 22 nt, Human
gucuaugggacucaaugcacug

SEQ ID NO: 1681582 - RNA, 16 nt, Human
aacauguuaaaccaug

SEQ ID NO: 1681583 - RNA, 14 nt, Human
aacauguuaaacca

SEQ ID NO: 1681584 - RNA, 15 nt, Human
aacauguuaaaccau

SEQ ID NO: 1681585 - RNA, 16 nt, Human
aacauugguucuugua

SEQ ID NO: 1681586 - RNA, 18 nt, Human
aacauugguucuuguauu

SEQ ID NO: 1681587 - RNA, 19 nt, Human
aacauugguucuuguauua

SEQ ID NO: 1681588 - RNA, 22 nt, Human
aacauugguucuuguauuaaga

SEQ ID NO: 1681589 - RNA, 23 nt, Human
aacauugguucuuguauuaagaa

SEQ ID NO: 1681590 - RNA, 14 nt, Human
aacauaaaauacaa

SEQ ID NO: 1681591 - RNA, 14 nt, Human
aacagucucaggaa

SEQ ID NO: 1681592 - RNA, 12 nt, Human
aacauauauaac

SEQ ID NO: 1681593 - RNA, 16 nt, Human
guccgugcuaaggacu

SEQ ID NO: 1681594 - RNA, 17 nt, Human
guccgugcuaaggacuu

SEQ ID NO: 1681595 - RNA, 15 nt, Human
guccgugcuaaggac

SEQ ID NO: 1681596 - RNA, 18 nt, Human
aacaguccauugaaaggg

SEQ ID NO: 1681597 - RNA, 13 nt, Human
aacagucucagga

SEQ ID NO: 1681598 - RNA, 21 nt, Human
aacacugggagaaaugaaaaa

SEQ ID NO: 1681599 - RNA, 17 nt, Human
aacacucauugaccuga

SEQ ID NO: 1681600 - RNA, 21 nt, Human
aacacucacauuuauucugcu

SEQ ID NO: 1681601 - RNA, 17 nt, Human
gucauuugagcagggcu

SEQ ID NO: 1681602 - RNA, 19 nt, Human
aacacuguucucugcccuc

SEQ ID NO: 1681603 - RNA, 16 nt, Human
aacacuguucucugcc

SEQ ID NO: 1681604 - RNA, 17 nt, Human
aacacuguucucugccc

SEQ ID NO: 1681605 - RNA, 18 nt, Human
aacacuguucucugcccu

SEQ ID NO: 1681606 - RNA, 15 nt, Human
aaauuugaauuuugu

SEQ ID NO: 1681607 - RNA, 22 nt, Human
aaauuugaauuuuguguuagag

SEQ ID NO: 1681608 - RNA, 19 nt, Human
aacacaaacgggcucagca

SEQ ID NO: 1681609 - RNA, 12 nt, Human
aaauuugaauuu

SEQ ID NO: 1681610 - RNA, 19 nt, Human
aaauuucuaaaucuccaaa

SEQ ID NO: 1681611 - RNA, 18 nt, Human
aacacagcaagggugaug

SEQ ID NO: 1681612 - RNA, 20 nt, Human
aacacagcaagggugauggg

SEQ ID NO: 1681613 - RNA, 15 nt, Human
gucccuaauaaagcu

SEQ ID NO: 1681614 - RNA, 18 nt, Human
gucccugguggcagcuca

SEQ ID NO: 1681615 - RNA, 19 nt, Human
gucccugguggcagcucac

SEQ ID NO: 1681616 - RNA, 18 nt, Human
gucccuuacgugaguccu

SEQ ID NO: 1681617 - RNA, 19 nt, Human
gucccuuacgugaguccug

SEQ ID NO: 1681618 - RNA, 12 nt, Human
gucccuaauaaa

SEQ ID NO: 1681619 - RNA, 22 nt, Human
guccccuguuuguuucugaaag

SEQ ID NO: 1681620 - RNA, 18 nt, Human
guccccuguuuguuucug

SEQ ID NO: 1681621 - RNA, 15 nt, Human
gucccaccccacaca

SEQ ID NO: 1681622 - RNA, 22 nt, Human
guccccaccgcagacaggacca

SEQ ID NO: 1681623 - RNA, 20 nt, Human
gucccaccccacacacgcca

SEQ ID NO: 1681624 - RNA, 18 nt, Human
guccccaccgcagacagg

SEQ ID NO: 1681625 - RNA, 19 nt, Human
gucauuugagcagggcuca

SEQ ID NO: 1681626 - RNA, 22 nt, Human
guccaugaagauguagaggaga

SEQ ID NO: 1681627 - RNA, 23 nt, Human
guccaugaagauguagaggagaa

SEQ ID NO: 1681628 - RNA, 20 nt, Human
gucacugcacagugcaucuc

SEQ ID NO: 1681629 - RNA, 23 nt, Human
gucacugcacagugcaucucagc

SEQ ID NO: 1681630 - RNA, 10 nt, Human
gucacugcuu

SEQ ID NO: 1681631 - RNA, 17 nt, Human
gucacugagacagcccg

SEQ ID NO: 1681632 - RNA, 18 nt, Human
gucacugagacagcccgg

SEQ ID NO: 1681633 - RNA, 21 nt, Human
gucacugagacagcccgggcu

SEQ ID NO: 1681634 - RNA, 23 nt, Human
gucacugagacagcccgggcucu

SEQ ID NO: 1681635 - RNA, 14 nt, Human
gucacugagacagc

SEQ ID NO: 1681636 - RNA, 15 nt, Human
gucacugagacagcc

SEQ ID NO: 1681637 - RNA, 16 nt, Human
gucacugagacagccc

SEQ ID NO: 1681638 - RNA, 12 nt, Human
gucaccaagccc

SEQ ID NO: 1681639 - RNA, 15 nt, Human
gucaccaagcccagu

SEQ ID NO: 1681640 - RNA, 23 nt, Human
gucacucuggcagcucagagagg

SEQ ID NO: 1681641 - RNA, 18 nt, Human
gucacauuccugaacagg

SEQ ID NO: 1681642 - RNA, 22 nt, Human
gucaccaaaucagcugcuacua

SEQ ID NO: 1681643 - RNA, 19 nt, Human
gucacaggacucugccucc

SEQ ID NO: 1681644 - RNA, 16 nt, Human
gucacaggagggaggg

SEQ ID NO: 1681645 - RNA, 12 nt, Human
gucacaggcagg

SEQ ID NO: 1681646 - RNA, 17 nt, Human
gucacaggacucugccu

SEQ ID NO: 1681647 - RNA, 18 nt, Human
gucacaggacucugccuc

SEQ ID NO: 1681648 - RNA, 20 nt, Human
gucacaggaaguagaggagg

SEQ ID NO: 1681649 - RNA, 22 nt, Human
gucaauuacaggaaguacugga

SEQ ID NO: 1681650 - RNA, 21 nt, Human
gucaauuuuguuauguauauu

SEQ ID NO: 1681651 - RNA, 13 nt, Human
gucacaggaagua

SEQ ID NO: 1681652 - RNA, 15 nt, Human
gucacaggaaguaga

SEQ ID NO: 1681653 - RNA, 15 nt, Human
aaauuucuaaaucuc

SEQ ID NO: 1681654 - RNA, 13 nt, Human
aaauuucuaaauc

SEQ ID NO: 1681655 - RNA, 15 nt, Human
gucagugugacugau

SEQ ID NO: 1681656 - RNA, 16 nt, Human
gucagguggggcagcu

SEQ ID NO: 1681657 - RNA, 17 nt, Human
gucagguggggcagcuu

SEQ ID NO: 1681658 - RNA, 18 nt, Human
gucagguggggcagcuug

SEQ ID NO: 1681659 - RNA, 22 nt, Human
gucagguggggcagcuugaggg

SEQ ID NO: 1681660 - RNA, 21 nt, Human
gucacugcuuaacuucacaua

SEQ ID NO: 1681661 - RNA, 15 nt, Human
gucacugcuuaacuu

SEQ ID NO: 1681662 - RNA, 17 nt, Human
gucacuuuguuuuacug

SEQ ID NO: 1681663 - RNA, 23 nt, Human
gucagaaguuucugccgcagccc

SEQ ID NO: 1681664 - RNA, 21 nt, Human
gucagaaguuucugccgcagc

SEQ ID NO: 1681665 - RNA, 14 nt, Human
gucaggaaagagaa

SEQ ID NO: 1681666 - RNA, 13 nt, Human
gucaggaaagaga

SEQ ID NO: 1681667 - RNA, 18 nt, Human
aaauuaggauuucaugau

SEQ ID NO: 1681668 - RNA, 19 nt, Human
aaauuaggauuucaugauu

SEQ ID NO: 1681669 - RNA, 23 nt, Human
aaauuaugugccagauuuaugca

SEQ ID NO: 1681670 - RNA, 15 nt, Human
aaauguggcuccugg

SEQ ID NO: 1681671 - RNA, 14 nt, Human
aaauuaaucugggc

SEQ ID NO: 1681672 - RNA, 18 nt, Human
aaaugugccuucauuuuu

SEQ ID NO: 1681673 - RNA, 15 nt, Human
aaaugugcuuuuaaa

SEQ ID NO: 1681674 - RNA, 18 nt, Human
aaauugucagaugcugug

SEQ ID NO: 1681675 - RNA, 17 nt, Human
aaauuguauuacaaauc

SEQ ID NO: 1681676 - RNA, 16 nt, Human
aaauuccccacccuga

SEQ ID NO: 1681677 - RNA, 17 nt, Human
aaauuccaagugauuga

SEQ ID NO: 1681678 - RNA, 11 nt, Human
guauuuauuca

SEQ ID NO: 1681679 - RNA, 14 nt, Human
aaaugucuuccugg

SEQ ID NO: 1681680 - RNA, 21 nt, Human
aaaugucucuuuaaugucaca

SEQ ID NO: 1681681 - RNA, 19 nt, Human
guauuguacaaaguauuaa

SEQ ID NO: 1681682 - RNA, 10 nt, Human
guauugaagc

SEQ ID NO: 1681683 - RNA, 13 nt, Human
guauugaagcauu

SEQ ID NO: 1681684 - RNA, 17 nt, Human
guauugaagcauuuuau

SEQ ID NO: 1681685 - RNA, 18 nt, Human
guauugaagcauuuuaua

SEQ ID NO: 1681686 - RNA, 22 nt, Human
guauugaagcauuuuauaaauc

SEQ ID NO: 1681687 - RNA, 21 nt, Human
guauuguacaaaguauuaagc

SEQ ID NO: 1681688 - RNA, 22 nt, Human
guauuguacaaaguauuaagca

SEQ ID NO: 1681689 - RNA, 23 nt, Human
guauuguacaaaguauuaagcau

SEQ ID NO: 1681690 - RNA, 16 nt, Human
aaaucauucauuuucu

SEQ ID NO: 1681691 - RNA, 11 nt, Human
aaaucauuucu

SEQ ID NO: 1681692 - RNA, 21 nt, Human
guauucucuccuguaccucuu

SEQ ID NO: 1681693 - RNA, 18 nt, Human
guauucucuccuguaccu

SEQ ID NO: 1681694 - RNA, 21 nt, Human
uaaaauaccagccaguaaaug

SEQ ID NO: 1681695 - RNA, 13 nt, Human
aagugauccuccc

SEQ ID NO: 1681696 - RNA, 19 nt, Human
aagugauccucccaccuca

SEQ ID NO: 1681697 - RNA, 20 nt, Human
aagugauccucccaccucag

SEQ ID NO: 1681698 - RNA, 17 nt, Human
aagugauucucaugccu

SEQ ID NO: 1681699 - RNA, 13 nt, Human
aagugauucucau

SEQ ID NO: 1681700 - RNA, 16 nt, Human
aagugauucucaugcc

SEQ ID NO: 1681701 - RNA, 19 nt, Human
aagugauucucaugccuca

SEQ ID NO: 1681702 - RNA, 23 nt, Human
aagugauccucccaccucagccu

SEQ ID NO: 1681703 - RNA, 22 nt, Human
uaaaauaauuuuuauauuugaa

SEQ ID NO: 1681704 - RNA, 21 nt, Human
uaaaauacacacucaaaucaa

SEQ ID NO: 1681705 - RNA, 13 nt, Human
uaaaagucuugug

SEQ ID NO: 1681706 - RNA, 13 nt, Human
uaaaagaauauuu

SEQ ID NO: 1681707 - RNA, 16 nt, Human
uaaaagaauauuuuaa

SEQ ID NO: 1681708 - RNA, 13 nt, Human
uaaaacccaagug

SEQ ID NO: 1681709 - RNA, 15 nt, Human
uaaaacuuuuuaaaa

SEQ ID NO: 1681710 - RNA, 12 nt, Human
uaaaacuuuuua

SEQ ID NO: 1681711 - RNA, 15 nt, Human
uaaaaccacagcagu

SEQ ID NO: 1681712 - RNA, 22 nt, Human
uaaaaaugagguacucuccugg

SEQ ID NO: 1681713 - RNA, 14 nt, Human
uaaaaccacagcag

SEQ ID NO: 1681714 - RNA, 15 nt, Human
uaaaaaugagguacu

SEQ ID NO: 1681715 - RNA, 23 nt, Human
uaaaaaucucaaauuucuaaauc

SEQ ID NO: 1681716 - RNA, 23 nt, Human
aagucagaucugccuaaggacuu

SEQ ID NO: 1681717 - RNA, 14 nt, Human
uaaaaaaaaaauug

SEQ ID NO: 1681718 - RNA, 18 nt, Human
uaaaaaaaaaauugggga

SEQ ID NO: 1681719 - RNA, 21 nt, Human
uaaaaaaaaaccugagcccca

SEQ ID NO: 1681720 - RNA, 22 nt, Human
uaaaaagcuccaaaugcagcuu

SEQ ID NO: 1681721 - RNA, 23 nt, Human
aaguuaagaauguucuuauguug

SEQ ID NO: 1681722 - RNA, 11 nt, Human
aaguuaagaau

SEQ ID NO: 1681723 - RNA, 16 nt, Human
aaguguguguuuuuca

SEQ ID NO: 1681724 - RNA, 21 nt, Human
aaguguguguuuuucauaaag

SEQ ID NO: 1681725 - RNA, 12 nt, Human
aaguguguguuu

SEQ ID NO: 1681726 - RNA, 13 nt, Human
aagugugguagag

SEQ ID NO: 1681727 - RNA, 23 nt, Human
aaguguauuuuuuuacuaauaga

SEQ ID NO: 1681728 - RNA, 14 nt, Human
aaguucccuacuuc

SEQ ID NO: 1681729 - RNA, 17 nt, Human
aaguucccuacuuccug

SEQ ID NO: 1681730 - RNA, 20 nt, Human
aaguucccuacuuccuguga

SEQ ID NO: 1681731 - RNA, 19 nt, Human
aaguuauuuuuaauuuggu

SEQ ID NO: 1681732 - RNA, 19 nt, Human
aaguuucugccgcagcccu

SEQ ID NO: 1681733 - RNA, 21 nt, Human
aaguuucugccgcagcccugc

SEQ ID NO: 1681734 - RNA, 20 nt, Human
aaguuugagaucagccuggg

SEQ ID NO: 1681735 - RNA, 9 nt, Human
uaaaauggu

SEQ ID NO: 1681736 - RNA, 16 nt, Human
aaggcugggggaagaa

SEQ ID NO: 1681737 - RNA, 13 nt, Human
guuucagaaaugu

SEQ ID NO: 1681738 - RNA, 11 nt, Human
guuucagaaau

SEQ ID NO: 1681739 - RNA, 19 nt, Human
aaggcugggggaagaagcu

SEQ ID NO: 1681740 - RNA, 22 nt, Human
aaggcugggggaagaagcucuc

SEQ ID NO: 1681741 - RNA, 20 nt, Human
aaggcugucaauuacaggaa

SEQ ID NO: 1681742 - RNA, 15 nt, Human
aagggcuguuauaau

SEQ ID NO: 1681743 - RNA, 17 nt, Human
aagggcuguuauaaucu

SEQ ID NO: 1681744 - RNA, 17 nt, Human
aaggggaauugaggaca

SEQ ID NO: 1681745 - RNA, 13 nt, Human
aaggggagaguaa

SEQ ID NO: 1681746 - RNA, 12 nt, Human
aagggggcuggg

SEQ ID NO: 1681747 - RNA, 23 nt, Human
aagggggcugggacaugggaaag

SEQ ID NO: 1681748 - RNA, 23 nt, Human
aagguuucagaaagaagugggga

SEQ ID NO: 1681749 - RNA, 12 nt, Human
guuguuuguuua

SEQ ID NO: 1681750 - RNA, 21 nt, Human
guuuaagugacugauggcuaa

SEQ ID NO: 1681751 - RNA, 12 nt, Human
aaggaaaaguuu

SEQ ID NO: 1681752 - RNA, 17 nt, Human
aaggaaacccagcucug

SEQ ID NO: 1681753 - RNA, 22 nt, Human
aaggaaacccagcucuggucca

SEQ ID NO: 1681754 - RNA, 23 nt, Human
guuguuugauucagacagcugcc

SEQ ID NO: 1681755 - RNA, 20 nt, Human
aaggaaacuggguuccugca

SEQ ID NO: 1681756 - RNA, 13 nt, Human
guuuauuacagua

SEQ ID NO: 1681757 - RNA, 17 nt, Human
guuuauuacaguauaau

SEQ ID NO: 1681758 - RNA, 13 nt, Human
guuuaauauuaaa

SEQ ID NO: 1681759 - RNA, 14 nt, Human
guuuaauauuaaag

SEQ ID NO: 1681760 - RNA, 15 nt, Human
guuuaauauuaaagc

SEQ ID NO: 1681761 - RNA, 18 nt, Human
guuuaauauuaaagccau

SEQ ID NO: 1681762 - RNA, 19 nt, Human
guuuaauauuaaagccaug

SEQ ID NO: 1681763 - RNA, 14 nt, Human
guuuaugauuccac

SEQ ID NO: 1681764 - RNA, 18 nt, Human
guuuggaccaaaaaccag

SEQ ID NO: 1681765 - RNA, 13 nt, Human
guuuggagacaga

SEQ ID NO: 1681766 - RNA, 20 nt, Human
guuugcuuuguaugcacuuu

SEQ ID NO: 1681767 - RNA, 19 nt, Human
guuuggacaaaauggaaua

SEQ ID NO: 1681768 - RNA, 15 nt, Human
guuuuaaagcuucca

SEQ ID NO: 1681769 - RNA, 20 nt, Human
aaguaauaugcacacauuuu

SEQ ID NO: 1681770 - RNA, 18 nt, Human
aaguaauaugcacacauu

SEQ ID NO: 1681771 - RNA, 17 nt, Human
aaguaauaugcacacau

SEQ ID NO: 1681772 - RNA, 21 nt, Human
aaguaauaugcacacauuuuu

SEQ ID NO: 1681773 - RNA, 19 nt, Human
guuuucuguucuuucuggc

SEQ ID NO: 1681774 - RNA, 16 nt, Human
guuuucuguucuuucu

SEQ ID NO: 1681775 - RNA, 15 nt, Human
guuuucuguucuuuc

SEQ ID NO: 1681776 - RNA, 14 nt, Human
guuuucuguucuuu

SEQ ID NO: 1681777 - RNA, 22 nt, Human
guuuuaaggaugcuuguacaua

SEQ ID NO: 1681778 - RNA, 13 nt, Human
guuuuaugacuuc

SEQ ID NO: 1681779 - RNA, 18 nt, Human
guuuuaugacuucauuaa

SEQ ID NO: 1681780 - RNA, 22 nt, Human
aagucacugcacagugcaucuc

SEQ ID NO: 1681781 - RNA, 18 nt, Human
aagucagaucugccuaag

SEQ ID NO: 1681782 - RNA, 21 nt, Human
aagucagaucugccuaaggac

SEQ ID NO: 1681783 - RNA, 22 nt, Human
aagucagaucugccuaaggacu

SEQ ID NO: 1681784 - RNA, 23 nt, Human
aaguauucuuauuuaaugaaaga

SEQ ID NO: 1681785 - RNA, 19 nt, Human
aaguauuauaccuuuuuua

SEQ ID NO: 1681786 - RNA, 16 nt, Human
aaguauuauaccuuuu

SEQ ID NO: 1681787 - RNA, 21 nt, Human
aaguauucuuauuuaaugaaa

SEQ ID NO: 1681788 - RNA, 14 nt, Human
aaguacuauaauuu

SEQ ID NO: 1681789 - RNA, 17 nt, Human
aaguacuauaauuuacc

SEQ ID NO: 1681790 - RNA, 13 nt, Human
aaguacuauguau

SEQ ID NO: 1681791 - RNA, 15 nt, Human
aaguacuauguauca

SEQ ID NO: 1681792 - RNA, 18 nt, Human
aaguacuucuccacccug

SEQ ID NO: 1681793 - RNA, 19 nt, Human
aaguacuucuccacccugc

SEQ ID NO: 1681794 - RNA, 20 nt, Human
aaguacuucuccacccugcu

SEQ ID NO: 1681795 - RNA, 18 nt, Human
aaguauguuagugcaaau

SEQ ID NO: 1681796 - RNA, 19 nt, Human
aaguauguuagugcaaauu

SEQ ID NO: 1681797 - RNA, 15 nt, Human
aaguauuauaccuuu

SEQ ID NO: 1681798 - RNA, 22 nt, Human
guugauagcacagacccugccc

SEQ ID NO: 1681799 - RNA, 14 nt, Human
guugauagcacaga

SEQ ID NO: 1681800 - RNA, 19 nt, Human
guugauagcacagacccug

SEQ ID NO: 1681801 - RNA, 18 nt, Human
guucuugguuuguaaauu

SEQ ID NO: 1681802 - RNA, 15 nt, Human
guucuugguuuguaa

SEQ ID NO: 1681803 - RNA, 14 nt, Human
guucuugguuugua

SEQ ID NO: 1681804 - RNA, 19 nt, Human
guucuagcauggcugccaa

SEQ ID NO: 1681805 - RNA, 15 nt, Human
guucucucuucucca

SEQ ID NO: 1681806 - RNA, 12 nt, Human
guucucugagga

SEQ ID NO: 1681807 - RNA, 14 nt, Human
guucucugaggaca

SEQ ID NO: 1681808 - RNA, 15 nt, Human
guucucugcccucca

SEQ ID NO: 1681809 - RNA, 13 nt, Human
guucuuaauucuu

SEQ ID NO: 1681810 - RNA, 17 nt, Human
guucucugcccuccaag

SEQ ID NO: 1681811 - RNA, 18 nt, Human
guucucugcccuccaaga

SEQ ID NO: 1681812 - RNA, 17 nt, Human
guucuuaauucuuagcu

SEQ ID NO: 1681813 - RNA, 14 nt, Human
guucuuaauucuua

SEQ ID NO: 1681814 - RNA, 23 nt, Human
aagcuuguauuccuuuuucucuc

SEQ ID NO: 1681815 - RNA, 18 nt, Human
aagcuuauuaaaacucau

SEQ ID NO: 1681816 - RNA, 15 nt, Human
guuccccaagacauu

SEQ ID NO: 1681817 - RNA, 19 nt, Human
aagcuuuuaugugaaacau

SEQ ID NO: 1681818 - RNA, 21 nt, Human
aagcuuuuaugugaaacaugu

SEQ ID NO: 1681819 - RNA, 18 nt, Human
guucccuugaugaagaag

SEQ ID NO: 1681820 - RNA, 21 nt, Human
guucccuuuuuuggcugcuga

SEQ ID NO: 1681821 - RNA, 22 nt, Human
guucccuuuuuuggcugcugaa

SEQ ID NO: 1681822 - RNA, 17 nt, Human
guucagguaacaggcag

SEQ ID NO: 1681823 - RNA, 18 nt, Human
guucagguaacaggcaga

SEQ ID NO: 1681824 - RNA, 13 nt, Human
aagccguggcuuc

SEQ ID NO: 1681825 - RNA, 14 nt, Human
aagccguggcuucc

SEQ ID NO: 1681826 - RNA, 15 nt, Human
aagccguggcuuccc

SEQ ID NO: 1681827 - RNA, 21 nt, Human
aagccgugauuuucauugcug

SEQ ID NO: 1681828 - RNA, 20 nt, Human
guucaggguuggccccugcc

SEQ ID NO: 1681829 - RNA, 21 nt, Human
guucaggguuggccccugccc

SEQ ID NO: 1681830 - RNA, 22 nt, Human
guucaggguuggccccugcccg

SEQ ID NO: 1681831 - RNA, 23 nt, Human
guucagcuuguaaauagcucagg

SEQ ID NO: 1681832 - RNA, 15 nt, Human
aagccuguuuaagag

SEQ ID NO: 1681833 - RNA, 18 nt, Human
aagccuguuuaagagaca

SEQ ID NO: 1681834 - RNA, 16 nt, Human
aagccucccacgacug

SEQ ID NO: 1681835 - RNA, 15 nt, Human
aagccuccuccagcc

SEQ ID NO: 1681836 - RNA, 19 nt, Human
aagccuccuccagccgcca

SEQ ID NO: 1681837 - RNA, 21 nt, Human
aagccuuggggcugaugcagu

SEQ ID NO: 1681838 - RNA, 13 nt, Human
aagcccagcuuga

SEQ ID NO: 1681839 - RNA, 20 nt, Human
aagccauguuuauuacagua

SEQ ID NO: 1681840 - RNA, 21 nt, Human
aagccauguuuauuacaguau

SEQ ID NO: 1681841 - RNA, 22 nt, Human
aagccauguuuauuacaguaua

SEQ ID NO: 1681842 - RNA, 23 nt, Human
aagccauguuuauuacaguauaa

SEQ ID NO: 1681843 - RNA, 23 nt, Human
guuacucuucaguuaagccuuug

SEQ ID NO: 1681844 - RNA, 19 nt, Human
guuaauauuuauaggucac

SEQ ID NO: 1681845 - RNA, 18 nt, Human
guuaaucauuagguguga

SEQ ID NO: 1681846 - RNA, 18 nt, Human
guuagagauuuuuuuguu

SEQ ID NO: 1681847 - RNA, 19 nt, Human
guuagagguucccuuugac

SEQ ID NO: 1681848 - RNA, 19 nt, Human
guuauuauauuuacaaaug

SEQ ID NO: 1681849 - RNA, 20 nt, Human
guuauuauauuuacaaaugg

SEQ ID NO: 1681850 - RNA, 12 nt, Human
guguuugaagca

SEQ ID NO: 1681851 - RNA, 16 nt, Human
aagcacacuugacauc

SEQ ID NO: 1681852 - RNA, 14 nt, Human
aagcacaugccucu

SEQ ID NO: 1681853 - RNA, 15 nt, Human
aagcacaugccucuc

SEQ ID NO: 1681854 - RNA, 16 nt, Human
aagcacaugccucucu

SEQ ID NO: 1681855 - RNA, 19 nt, Human
aagcacaugccucucucag

SEQ ID NO: 1681856 - RNA, 20 nt, Human
aagcacaugccucucucagg

SEQ ID NO: 1681857 - RNA, 21 nt, Human
aagcacaugccucucucaggc

SEQ ID NO: 1681858 - RNA, 13 nt, Human
aagcaccuccugc

SEQ ID NO: 1681859 - RNA, 14 nt, Human
aagcaccuccugcc

SEQ ID NO: 1681860 - RNA, 15 nt, Human
aagcaccuccugccu

SEQ ID NO: 1681861 - RNA, 16 nt, Human
aagcaccuccugccuc

SEQ ID NO: 1681862 - RNA, 17 nt, Human
aagcaccuccugccucg

SEQ ID NO: 1681863 - RNA, 16 nt, Human
aagcacuaaacaaaga

SEQ ID NO: 1681864 - RNA, 16 nt, Human
aagcacugacuucuaa

SEQ ID NO: 1681865 - RNA, 17 nt, Human
aagcacugacuucuaag

SEQ ID NO: 1681866 - RNA, 23 nt, Human
aagcaugcacaaauucugucucu

SEQ ID NO: 1681867 - RNA, 12 nt, Human
aagcaugugaga

SEQ ID NO: 1681868 - RNA, 23 nt, Human
aagcauauauuuuuauauuuacu

SEQ ID NO: 1681869 - RNA, 19 nt, Human
aagcacugacuucuaagua

SEQ ID NO: 1681870 - RNA, 20 nt, Human
aagcacugacuucuaaguaa

SEQ ID NO: 1681871 - RNA, 15 nt, Human
aagccauguuuauua

SEQ ID NO: 1681872 - RNA, 16 nt, Human
aagccauguuuauuac

SEQ ID NO: 1681873 - RNA, 17 nt, Human
aagccauguuuauuaca

SEQ ID NO: 1681874 - RNA, 17 nt, Human
aagccaaagcuaggccu

SEQ ID NO: 1681875 - RNA, 18 nt, Human
aagccaaagcuaggccug

SEQ ID NO: 1681876 - RNA, 20 nt, Human
aagccaaagcuaggccuggc

SEQ ID NO: 1681877 - RNA, 19 nt, Human
aagcauuguaaaugugcuu

SEQ ID NO: 1681878 - RNA, 21 nt, Human
aagcauuuuauaaaucgcuuu

SEQ ID NO: 1681879 - RNA, 17 nt, Human
aagcauuuuauaaaucg

SEQ ID NO: 1681880 - RNA, 19 nt, Human
aagcauuuuauaaaucgcu

SEQ ID NO: 1681881 - RNA, 12 nt, Human
aagcauuuuaua

SEQ ID NO: 1681882 - RNA, 14 nt, Human
aagcauuuuauaaa

SEQ ID NO: 1681883 - RNA, 15 nt, Human
aagcauuuuauaaau

SEQ ID NO: 1681884 - RNA, 16 nt, Human
aagauggcugugccuc

SEQ ID NO: 1681885 - RNA, 23 nt, Human
aagaucaaaagguuaauaaagua

SEQ ID NO: 1681886 - RNA, 20 nt, Human
aagaucaaaagguuaauaaa

SEQ ID NO: 1681887 - RNA, 13 nt, Human
aagcaaaauguga

SEQ ID NO: 1681888 - RNA, 17 nt, Human
aagcaacccaaauguuc

SEQ ID NO: 1681889 - RNA, 14 nt, Human
gugucaccugaaga

SEQ ID NO: 1681890 - RNA, 22 nt, Human
gugucaccugaagacucauucu

SEQ ID NO: 1681891 - RNA, 14 nt, Human
gugucagguggggc

SEQ ID NO: 1681892 - RNA, 18 nt, Human
gugucagguggggcagcu

SEQ ID NO: 1681893 - RNA, 23 nt, Human
gugugaaccaccacacccagccc

SEQ ID NO: 1681894 - RNA, 20 nt, Human
gugucagguggggcagcuug

SEQ ID NO: 1681895 - RNA, 19 nt, Human
gugucagguggggcagcuu

SEQ ID NO: 1681896 - RNA, 22 nt, Human
gugucuuaauuaaaagaauauu

SEQ ID NO: 1681897 - RNA, 11 nt, Human
aagaggcaggg

SEQ ID NO: 1681898 - RNA, 14 nt, Human
aagaggcagggucu

SEQ ID NO: 1681899 - RNA, 21 nt, Human
aagagggagggagggcuccag

SEQ ID NO: 1681900 - RNA, 22 nt, Human
aagagggagggagggcuccaga

SEQ ID NO: 1681901 - RNA, 15 nt, Human
aagauagcagggcau

SEQ ID NO: 1681902 - RNA, 23 nt, Human
gugcugcccugcccaccuggccu

SEQ ID NO: 1681903 - RNA, 15 nt, Human
gugguuucagaaaug

SEQ ID NO: 1681904 - RNA, 18 nt, Human
guguaaauacaauuuugu

SEQ ID NO: 1681905 - RNA, 21 nt, Human
guguaaauacaauuuuguuuc

SEQ ID NO: 1681906 - RNA, 22 nt, Human
guguaaauacaauuuuguuucu

SEQ ID NO: 1681907 - RNA, 23 nt, Human
cucuugagccuugaacuuugacc

SEQ ID NO: 1681908 - RNA, 18 nt, Human
cucuugagccuugaacuu

SEQ ID NO: 1681909 - RNA, 17 nt, Human
cucuugagccuugaacu

SEQ ID NO: 1681910 - RNA, 16 nt, Human
cucuugagccuugaac

SEQ ID NO: 1681911 - RNA, 21 nt, Human
cugaagcuaucguaaaauuaa

SEQ ID NO: 1681912 - RNA, 22 nt, Human
cugaagcuaucguaaaauuaag

SEQ ID NO: 1681913 - RNA, 23 nt, Human
cugaaggacauugcggacagcca

SEQ ID NO: 1681914 - RNA, 22 nt, Human
cugacaacacucauugaccuga

SEQ ID NO: 1681915 - RNA, 23 nt, Human
cugacaacacucauugaccugag

SEQ ID NO: 1681916 - RNA, 19 nt, Human
cugaaggccccgcccaggc

SEQ ID NO: 1681917 - RNA, 17 nt, Human
cugaaggcuggguucug

SEQ ID NO: 1681918 - RNA, 21 nt, Human
cugaaggccccgcccaggcuu

SEQ ID NO: 1681919 - RNA, 13 nt, Human
cucuugaugccug

SEQ ID NO: 1681920 - RNA, 15 nt, Human
cucuugaugccuggc

SEQ ID NO: 1681921 - RNA, 16 nt, Human
cucuugaugccuggcg

SEQ ID NO: 1681922 - RNA, 21 nt, Human
cucuugaugccuggcggggug

SEQ ID NO: 1681923 - RNA, 22 nt, Human
cugaaaauugaugggauuuggu

SEQ ID NO: 1681924 - RNA, 15 nt, Human
cugaaacaacaaaua

SEQ ID NO: 1681925 - RNA, 14 nt, Human
cucugcaggucccu

SEQ ID NO: 1681926 - RNA, 15 nt, Human
cucugcaggucccua

SEQ ID NO: 1681927 - RNA, 16 nt, Human
cucugcaggucccuaa

SEQ ID NO: 1681928 - RNA, 17 nt, Human
cucugcaggucccuaau

SEQ ID NO: 1681929 - RNA, 13 nt, Human
cucugcuccucuc

SEQ ID NO: 1681930 - RNA, 18 nt, Human
cucugcuccucuccccag

SEQ ID NO: 1681931 - RNA, 20 nt, Human
cucugcuccucuccccagca

SEQ ID NO: 1681932 - RNA, 13 nt, Human
cucugcagcaaua

SEQ ID NO: 1681933 - RNA, 21 nt, Human
cucugcacuccccugcugggu

SEQ ID NO: 1681934 - RNA, 20 nt, Human
cucugcacuccccugcuggg

SEQ ID NO: 1681935 - RNA, 14 nt, Human
cucugguccauaga

SEQ ID NO: 1681936 - RNA, 13 nt, Human
cucugcugacaga

SEQ ID NO: 1681937 - RNA, 14 nt, Human
cucugcugacagac

SEQ ID NO: 1681938 - RNA, 16 nt, Human
cucugcugacagacac

SEQ ID NO: 1681939 - RNA, 12 nt, Human
cucuguccaggc

SEQ ID NO: 1681940 - RNA, 15 nt, Human
cucugguuaucuaau

SEQ ID NO: 1681941 - RNA, 15 nt, Human
cucugguccauagag

SEQ ID NO: 1681942 - RNA, 16 nt, Human
cucuucaacugaccag

SEQ ID NO: 1681943 - RNA, 17 nt, Human
cucuucaacugaccagc

SEQ ID NO: 1681944 - RNA, 20 nt, Human
cucuucaacugaccagccuc

SEQ ID NO: 1681945 - RNA, 14 nt, Human
cucuucaaucucuu

SEQ ID NO: 1681946 - RNA, 19 nt, Human
cucuucagaucucuaacuu

SEQ ID NO: 1681947 - RNA, 18 nt, Human
cucuucagaucucuaacu

SEQ ID NO: 1681948 - RNA, 14 nt, Human
cucuuauugcccac

SEQ ID NO: 1681949 - RNA, 15 nt, Human
cucuuauugcccacg

SEQ ID NO: 1681950 - RNA, 19 nt, Human
cucuuauugcccacgcugg

SEQ ID NO: 1681951 - RNA, 20 nt, Human
cucuuauugcccacgcugga

SEQ ID NO: 1681952 - RNA, 13 nt, Human
cucuuauugccca

SEQ ID NO: 1681953 - RNA, 22 nt, Human
cucuuagaugcaguucugaaga

SEQ ID NO: 1681954 - RNA, 17 nt, Human
cugagaguagagucacu

SEQ ID NO: 1681955 - RNA, 21 nt, Human
cugagaggacuuuucuuugug

SEQ ID NO: 1681956 - RNA, 22 nt, Human
cugagaggacuuuucuuugugg

SEQ ID NO: 1681957 - RNA, 22 nt, Human
cugagacucgcgacaaugcaaa

SEQ ID NO: 1681958 - RNA, 21 nt, Human
cugagacucgcgacaaugcaa

SEQ ID NO: 1681959 - RNA, 23 nt, Human
cugagacagcccgggcucugccu

SEQ ID NO: 1681960 - RNA, 21 nt, Human
cugacccaugcugcccuguga

SEQ ID NO: 1681961 - RNA, 22 nt, Human
cugacccaugcugcccugugag

SEQ ID NO: 1681962 - RNA, 15 nt, Human
cugacaacagacuuc

SEQ ID NO: 1681963 - RNA, 18 nt, Human
cugacaacagacuucuga

SEQ ID NO: 1681964 - RNA, 19 nt, Human
cugacaacagacuucugaa

SEQ ID NO: 1681965 - RNA, 14 nt, Human
cugaguagcuggga

SEQ ID NO: 1681966 - RNA, 15 nt, Human
cugaguagcugggau

SEQ ID NO: 1681967 - RNA, 20 nt, Human
cugaguagcugggauuacag

SEQ ID NO: 1681968 - RNA, 22 nt, Human
cugaggacuuaaaauauuccug

SEQ ID NO: 1681969 - RNA, 14 nt, Human
cugaggaccagcca

SEQ ID NO: 1681970 - RNA, 20 nt, Human
cugaguacguugugcauuug

SEQ ID NO: 1681971 - RNA, 19 nt, Human
cugaguacguugugcauuu

SEQ ID NO: 1681972 - RNA, 17 nt, Human
cugaguacguugugcau

SEQ ID NO: 1681973 - RNA, 18 nt, Human
cugaguacguugugcauu

SEQ ID NO: 1681974 - RNA, 21 nt, Human
cugaguacguugugcauuugg

SEQ ID NO: 1681975 - RNA, 12 nt, Human
cugaggugggag

SEQ ID NO: 1681976 - RNA, 23 nt, Human
cugaggacacuaaccacgcugga

SEQ ID NO: 1681977 - RNA, 21 nt, Human
cugaggaauccagacccggcu

SEQ ID NO: 1681978 - RNA, 20 nt, Human
cugaggacacuaaccacgcu

SEQ ID NO: 1681979 - RNA, 17 nt, Human
cugaggaauccagaccc

SEQ ID NO: 1681980 - RNA, 20 nt, Human
cugaggaauccagacccggc

SEQ ID NO: 1681981 - RNA, 21 nt, Human
cugagaucaaaacgguuuuac

SEQ ID NO: 1681982 - RNA, 14 nt, Human
cugagcuuucugcu

SEQ ID NO: 1681983 - RNA, 15 nt, Human
cugagcuuucugcua

SEQ ID NO: 1681984 - RNA, 20 nt, Human
cuccuggggguucuuucuuc

SEQ ID NO: 1681985 - RNA, 22 nt, Human
cuccuggggguucuuucuuccu

SEQ ID NO: 1681986 - RNA, 18 nt, Human
cuccuggggguucuuucu

SEQ ID NO: 1681987 - RNA, 23 nt, Human
cuccuggggguucuuucuuccuc

SEQ ID NO: 1681988 - RNA, 13 nt, Human
cucgaacuggcug

SEQ ID NO: 1681989 - RNA, 14 nt, Human
cucgaacuggcugc

SEQ ID NO: 1681990 - RNA, 15 nt, Human
cucgaacuggcugca

SEQ ID NO: 1681991 - RNA, 16 nt, Human
cucgaacuggcugcaa

SEQ ID NO: 1681992 - RNA, 15 nt, Human
cucuaucaccaagga

SEQ ID NO: 1681993 - RNA, 14 nt, Human
cucguuaauuugua

SEQ ID NO: 1681994 - RNA, 13 nt, Human
cucccccaucucu

SEQ ID NO: 1681995 - RNA, 22 nt, Human
cucccccagccccauccucugu

SEQ ID NO: 1681996 - RNA, 15 nt, Human
cucccccagccccau

SEQ ID NO: 1681997 - RNA, 20 nt, Human
cucccccagccccauccucu

SEQ ID NO: 1681998 - RNA, 18 nt, Human
cuccucuucaacugacca

SEQ ID NO: 1681999 - RNA, 23 nt, Human
cuccucuucaacugaccagccuc

SEQ ID NO: 1682000 - RNA, 15 nt, Human
cuccuggacuccugc

SEQ ID NO: 1682001 - RNA, 20 nt, Human
cuccucugcuugccaucccu

SEQ ID NO: 1682002 - RNA, 17 nt, Human
cuccucugcuugccauc

SEQ ID NO: 1682003 - RNA, 16 nt, Human
cuccucugcuugccau

SEQ ID NO: 1682004 - RNA, 15 nt, Human
cuccucugcuugcca

SEQ ID NO: 1682005 - RNA, 22 nt, Human
cuccucugcuugccaucccucc

SEQ ID NO: 1682006 - RNA, 21 nt, Human
cuccucugcuugccaucccuc

SEQ ID NO: 1682007 - RNA, 22 nt, Human
cuccugggcagcugccuccccu

SEQ ID NO: 1682008 - RNA, 19 nt, Human
cuccugggcagcugccucc

SEQ ID NO: 1682009 - RNA, 18 nt, Human
cuccugggcagcugccuc

SEQ ID NO: 1682010 - RNA, 17 nt, Human
cuccugggcagcugccu

SEQ ID NO: 1682011 - RNA, 16 nt, Human
cuccugggcagcugcc

SEQ ID NO: 1682012 - RNA, 15 nt, Human
cuccugggcagcugc

SEQ ID NO: 1682013 - RNA, 14 nt, Human
cuccugggcagcug

SEQ ID NO: 1682014 - RNA, 16 nt, Human
cuccuggcccacugca

SEQ ID NO: 1682015 - RNA, 18 nt, Human
cuccuggcccacugcauc

SEQ ID NO: 1682016 - RNA, 12 nt, Human
cuccugggcagc

SEQ ID NO: 1682017 - RNA, 13 nt, Human
cuccucucugccc

SEQ ID NO: 1682018 - RNA, 14 nt, Human
cuccucucugcccu

SEQ ID NO: 1682019 - RNA, 15 nt, Human
cuccucucugcccua

SEQ ID NO: 1682020 - RNA, 19 nt, Human
cuccucucugcccuaaugc

SEQ ID NO: 1682021 - RNA, 16 nt, Human
cuccucugcugcuggc

SEQ ID NO: 1682022 - RNA, 18 nt, Human
cuccucugcugcuggcug

SEQ ID NO: 1682023 - RNA, 14 nt, Human
cuccucugcuugcc

SEQ ID NO: 1682024 - RNA, 12 nt, Human
cuccucugcuug

SEQ ID NO: 1682025 - RNA, 13 nt, Human
cucagucucccuc

SEQ ID NO: 1682026 - RNA, 15 nt, Human
cucagucucccuccc

SEQ ID NO: 1682027 - RNA, 16 nt, Human
cucagucucccucccu

SEQ ID NO: 1682028 - RNA, 17 nt, Human
cucagucucccucccuu

SEQ ID NO: 1682029 - RNA, 16 nt, Human
cucaugccucagccuc

SEQ ID NO: 1682030 - RNA, 12 nt, Human
cucaugccucag

SEQ ID NO: 1682031 - RNA, 13 nt, Human
cuccaagaauuuc

SEQ ID NO: 1682032 - RNA, 14 nt, Human
cuccaagaauuucu

SEQ ID NO: 1682033 - RNA, 15 nt, Human
cuccaagaccuucuc

SEQ ID NO: 1682034 - RNA, 22 nt, Human
cuccaagaccuucuccuucacc

SEQ ID NO: 1682035 - RNA, 13 nt, Human
cuccaagcaggac

SEQ ID NO: 1682036 - RNA, 14 nt, Human
cuccaagcaggaca

SEQ ID NO: 1682037 - RNA, 22 nt, Human
cuccaagcaggacauggacaag

SEQ ID NO: 1682038 - RNA, 24 nt, Human
cuccaagcaggacauggacaagga

SEQ ID NO: 1682039 - RNA, 18 nt, Human
cuccaagcuccaucucca

SEQ ID NO: 1682040 - RNA, 19 nt, Human
cuccaagcuccaucuccac

SEQ ID NO: 1682041 - RNA, 14 nt, Human
cuccaagcuccauc

SEQ ID NO: 1682042 - RNA, 13 nt, Human
cuccaagcuccca

SEQ ID NO: 1682043 - RNA, 14 nt, Human
cuccaagcucccag

SEQ ID NO: 1682044 - RNA, 15 nt, Human
cuccaagcucccagg

SEQ ID NO: 1682045 - RNA, 16 nt, Human
cuccaagcucccaggc

SEQ ID NO: 1682046 - RNA, 16 nt, Human
cuccacuggauggagg

SEQ ID NO: 1682047 - RNA, 17 nt, Human
cuccaagcucccaggca

SEQ ID NO: 1682048 - RNA, 13 nt, Human
cuccacuuggucu

SEQ ID NO: 1682049 - RNA, 15 nt, Human
cuccacuuggucugu

SEQ ID NO: 1682050 - RNA, 16 nt, Human
cuccacuuggucugug

SEQ ID NO: 1682051 - RNA, 17 nt, Human
cuccacuuggucuguga

SEQ ID NO: 1682052 - RNA, 21 nt, Human
cuccacuuggucugugagaug

SEQ ID NO: 1682053 - RNA, 22 nt, Human
cuccacuuggucugugagaugc

SEQ ID NO: 1682054 - RNA, 20 nt, Human
cuccacuuucuagccagagg

SEQ ID NO: 1682055 - RNA, 16 nt, Human
cuccacuuucuagcca

SEQ ID NO: 1682056 - RNA, 19 nt, Human
cuccacuuucuagccagag

SEQ ID NO: 1682057 - RNA, 23 nt, Human
cuccacuuggucugugagaugcu

SEQ ID NO: 1682058 - RNA, 18 nt, Human
cuaucguaaaauuaagaa

SEQ ID NO: 1682059 - RNA, 17 nt, Human
cuaucguaaaauuaaga

SEQ ID NO: 1682060 - RNA, 14 nt, Human
cuaucuaaauguug

SEQ ID NO: 1682061 - RNA, 15 nt, Human
cuaucucccccagcc

SEQ ID NO: 1682062 - RNA, 22 nt, Human
cuaguuugauuaaauucuugca

SEQ ID NO: 1682063 - RNA, 15 nt, Human
cuaguuugauuaaau

SEQ ID NO: 1682064 - RNA, 13 nt, Human
cuaguuugauuaa

SEQ ID NO: 1682065 - RNA, 22 nt, Human
cuaguuguuugauucagacagc

SEQ ID NO: 1682066 - RNA, 23 nt, Human
cuaguuguuugauucagacagcu

SEQ ID NO: 1682067 - RNA, 12 nt, Human
cuagccagagga

SEQ ID NO: 1682068 - RNA, 13 nt, Human
cuagccagaggag

SEQ ID NO: 1682069 - RNA, 15 nt, Human
cuagccagaggagag

SEQ ID NO: 1682070 - RNA, 14 nt, Human
cucaauaaaguaca

SEQ ID NO: 1682071 - RNA, 20 nt, Human
cucaaacucuugaccucagg

SEQ ID NO: 1682072 - RNA, 11 nt, Human
cucacaaaaga

SEQ ID NO: 1682073 - RNA, 13 nt, Human
cucaaugcacuga

SEQ ID NO: 1682074 - RNA, 15 nt, Human
cucaaugcacugaca

SEQ ID NO: 1682075 - RNA, 18 nt, Human
cuaucucccccagcccca

SEQ ID NO: 1682076 - RNA, 16 nt, Human
cuaucucccccagccc

SEQ ID NO: 1682077 - RNA, 17 nt, Human
cuaucucccccagcccc

SEQ ID NO: 1682078 - RNA, 17 nt, Human
cucaaaaaaagaaaaag

SEQ ID NO: 1682079 - RNA, 21 nt, Human
cuauuuuuuuucuguuauaua

SEQ ID NO: 1682080 - RNA, 20 nt, Human
cuauuuuuuuucuguuauau

SEQ ID NO: 1682081 - RNA, 18 nt, Human
cucaaaagcugggcaggu

SEQ ID NO: 1682082 - RNA, 23 nt, Human
cucaaaauaccaugccauuuaaa

SEQ ID NO: 1682083 - RNA, 23 nt, Human
cuagaauuugauaugugaacagu

SEQ ID NO: 1682084 - RNA, 23 nt, Human
cuagcauacguacacauuuuauu

SEQ ID NO: 1682085 - RNA, 21 nt, Human
cuagcauacguacacauuuua

SEQ ID NO: 1682086 - RNA, 22 nt, Human
cuagaagauuuugaaauuuuua

SEQ ID NO: 1682087 - RNA, 12 nt, Human
cuagaacucccu

SEQ ID NO: 1682088 - RNA, 13 nt, Human
cuagaacucccuu

SEQ ID NO: 1682089 - RNA, 23 nt, Human
cuaaguuuuuauggcuuuugugc

SEQ ID NO: 1682090 - RNA, 20 nt, Human
cuaaguuuuuauggcuuuug

SEQ ID NO: 1682091 - RNA, 21 nt, Human
cuaagugguacuaacuuuccu

SEQ ID NO: 1682092 - RNA, 23 nt, Human
cuaagugauccucccaccucagc

SEQ ID NO: 1682093 - RNA, 22 nt, Human
cuaaguaaaaccacagcaguug

SEQ ID NO: 1682094 - RNA, 23 nt, Human
cuaaguaaaaccacagcaguuga

SEQ ID NO: 1682095 - RNA, 11 nt, Human
cgugugugugu

SEQ ID NO: 1682096 - RNA, 20 nt, Human
cuaaguaaaaccacagcagu

SEQ ID NO: 1682097 - RNA, 17 nt, Human
cuacguuaccaggcagg

SEQ ID NO: 1682098 - RNA, 17 nt, Human
cuaccuuuguauucucu

SEQ ID NO: 1682099 - RNA, 20 nt, Human
cuacaugagguacugagagu

SEQ ID NO: 1682100 - RNA, 20 nt, Human
cuacaguccucccaucucac

SEQ ID NO: 1682101 - RNA, 21 nt, Human
cuacaguugaaaaacagcuga

SEQ ID NO: 1682102 - RNA, 22 nt, Human
cuacaguugaaaaacagcugag

SEQ ID NO: 1682103 - RNA, 18 nt, Human
cuacauacuauggaauuu

SEQ ID NO: 1682104 - RNA, 19 nt, Human
cuacaguccucccaucuca

SEQ ID NO: 1682105 - RNA, 18 nt, Human
cuacaaaaacacagcaag

SEQ ID NO: 1682106 - RNA, 16 nt, Human
cuacaaaaacacagca

SEQ ID NO: 1682107 - RNA, 17 nt, Human
cuacaaaaacacagcaa

SEQ ID NO: 1682108 - RNA, 15 nt, Human
cuacaaaaacacagc

SEQ ID NO: 1682109 - RNA, 16 nt, Human
cggagucccaccuugg

SEQ ID NO: 1682110 - RNA, 14 nt, Human
cggggacagcuccu

SEQ ID NO: 1682111 - RNA, 17 nt, Human
cgggcucugccucccau

SEQ ID NO: 1682112 - RNA, 15 nt, Human
cggggacagcuccuu

SEQ ID NO: 1682113 - RNA, 18 nt, Human
cgguguggagaagcggcu

SEQ ID NO: 1682114 - RNA, 17 nt, Human
cgggccacagagaaagu

SEQ ID NO: 1682115 - RNA, 11 nt, Human
cgggcucagca

SEQ ID NO: 1682116 - RNA, 15 nt, Human
cgggcucagcaaaag

SEQ ID NO: 1682117 - RNA, 14 nt, Human
cgggcucugccucc

SEQ ID NO: 1682118 - RNA, 16 nt, Human
cgggcucugccuccca

SEQ ID NO: 1682119 - RNA, 12 nt, Human
cgggccacagag

SEQ ID NO: 1682120 - RNA, 14 nt, Human
cgggccacagagaa

SEQ ID NO: 1682121 - RNA, 13 nt, Human
cggcuccaggcuc

SEQ ID NO: 1682122 - RNA, 14 nt, Human
cggcuccaggcucc

SEQ ID NO: 1682123 - RNA, 15 nt, Human
cggcuccaggcuccu

SEQ ID NO: 1682124 - RNA, 16 nt, Human
cggcuccaggcuccuu

SEQ ID NO: 1682125 - RNA, 18 nt, Human
cggagucccaccuuggcu

SEQ ID NO: 1682126 - RNA, 20 nt, Human
cggagucccaccuuggcugc

SEQ ID NO: 1682127 - RNA, 15 nt, Human
cggcucacugcagcc

SEQ ID NO: 1682128 - RNA, 16 nt, Human
cggcucacugcagccu

SEQ ID NO: 1682129 - RNA, 17 nt, Human
cggcucacugcagccuc

SEQ ID NO: 1682130 - RNA, 12 nt, Human
cggcuccaggcu

SEQ ID NO: 1682131 - RNA, 14 nt, Human
cgugcacacaccag

SEQ ID NO: 1682132 - RNA, 20 nt, Human
cguguaaccauggacccaau

SEQ ID NO: 1682133 - RNA, 17 nt, Human
cgugaguccuggcaugg

SEQ ID NO: 1682134 - RNA, 17 nt, Human
cgugaggccagagacac

SEQ ID NO: 1682135 - RNA, 16 nt, Human
cgugaguccuggcaug

SEQ ID NO: 1682136 - RNA, 14 nt, Human
cguaaaauuaagaa

SEQ ID NO: 1682137 - RNA, 23 nt, Human
cgguguuuaagacauuuuuggaa

SEQ ID NO: 1682138 - RNA, 16 nt, Human
cgguuuuacugcagcu

SEQ ID NO: 1682139 - RNA, 19 nt, Human
cgacccuugccgucuaccu

SEQ ID NO: 1682140 - RNA, 20 nt, Human
cgacccuugccgucuaccug

SEQ ID NO: 1682141 - RNA, 17 nt, Human
cgacugcccggcagggu

SEQ ID NO: 1682142 - RNA, 15 nt, Human
ccuuuuucauuauuu

SEQ ID NO: 1682143 - RNA, 16 nt, Human
ccuuuuuuaaauaaau

SEQ ID NO: 1682144 - RNA, 21 nt, Human
ccuuuuuuagaguugauacua

SEQ ID NO: 1682145 - RNA, 14 nt, Human
cgacagccuggcac

SEQ ID NO: 1682146 - RNA, 12 nt, Human
cgacagccuggc

SEQ ID NO: 1682147 - RNA, 13 nt, Human
cgacagccuggca

SEQ ID NO: 1682148 - RNA, 13 nt, Human
cgacaaugcaaac

SEQ ID NO: 1682149 - RNA, 12 nt, Human
cgacaaugcaaa

SEQ ID NO: 1682150 - RNA, 16 nt, Human
ccuugccgucuaccug

SEQ ID NO: 1682151 - RNA, 17 nt, Human
ccuugccgucuaccuga

SEQ ID NO: 1682152 - RNA, 15 nt, Human
ccuuucacaaccuuc

SEQ ID NO: 1682153 - RNA, 21 nt, Human
ccuuucaauaggaaaaacuga

SEQ ID NO: 1682154 - RNA, 15 nt, Human
ccuuuugagugccuu

SEQ ID NO: 1682155 - RNA, 17 nt, Human
ccuuuugagugccuuac

SEQ ID NO: 1682156 - RNA, 12 nt, Human
ccuuucauauuu

SEQ ID NO: 1682157 - RNA, 16 nt, Human
cgagucucuucuccac

SEQ ID NO: 1682158 - RNA, 14 nt, Human
cgauagugguggug

SEQ ID NO: 1682159 - RNA, 13 nt, Human
cgcaggcuggccc

SEQ ID NO: 1682160 - RNA, 22 nt, Human
cgcaggauucuuccucccuccc

SEQ ID NO: 1682161 - RNA, 18 nt, Human
cgcaggcccccaggugcc

SEQ ID NO: 1682162 - RNA, 13 nt, Human
cgccucugcauuc

SEQ ID NO: 1682163 - RNA, 17 nt, Human
cgccagauucuuuccug

SEQ ID NO: 1682164 - RNA, 11 nt, Human
ccucuuucccu

SEQ ID NO: 1682165 - RNA, 19 nt, Human
ccugccucgaacuggcugc

SEQ ID NO: 1682166 - RNA, 21 nt, Human
ccugccucgaacuggcugcaa

SEQ ID NO: 1682167 - RNA, 23 nt, Human
ccugccucgaacuggcugcaaag

SEQ ID NO: 1682168 - RNA, 17 nt, Human
ccugcugcaguugccag

SEQ ID NO: 1682169 - RNA, 19 nt, Human
ccugcugcaguugccaguc

SEQ ID NO: 1682170 - RNA, 21 nt, Human
ccugcugcaguugccagucac

SEQ ID NO: 1682171 - RNA, 20 nt, Human
ccugcugcaguugccaguca

SEQ ID NO: 1682172 - RNA, 13 nt, Human
ccugcccaggccc

SEQ ID NO: 1682173 - RNA, 17 nt, Human
ccugccccagggcuccc

SEQ ID NO: 1682174 - RNA, 12 nt, Human
ccugcccaccug

SEQ ID NO: 1682175 - RNA, 13 nt, Human
ccugcccaccugg

SEQ ID NO: 1682176 - RNA, 14 nt, Human
ccugcccaccuggc

SEQ ID NO: 1682177 - RNA, 20 nt, Human
ccugcccaccuggccucugc

SEQ ID NO: 1682178 - RNA, 16 nt, Human
ccugcacuugcagacu

SEQ ID NO: 1682179 - RNA, 17 nt, Human
ccugcacuugcagacuc

SEQ ID NO: 1682180 - RNA, 18 nt, Human
ccugcacuugcagacucu

SEQ ID NO: 1682181 - RNA, 19 nt, Human
ccugcacuugcagacucua

SEQ ID NO: 1682182 - RNA, 21 nt, Human
ccugaguagcugggauuacag

SEQ ID NO: 1682183 - RNA, 16 nt, Human
ccucuuucccucccuu

SEQ ID NO: 1682184 - RNA, 13 nt, Human
ccucuuucccucc

SEQ ID NO: 1682185 - RNA, 22 nt, Human
ccuggccuagcauacguacaca

SEQ ID NO: 1682186 - RNA, 22 nt, Human
ccuggccucaagugauucuccu

SEQ ID NO: 1682187 - RNA, 20 nt, Human
ccuggccucugcacuccccu

SEQ ID NO: 1682188 - RNA, 21 nt, Human
ccuggccucugcacuccccug

SEQ ID NO: 1682189 - RNA, 20 nt, Human
ccugggccccaguuguauuu

SEQ ID NO: 1682190 - RNA, 22 nt, Human
ccuggccucugcacuccccugc

SEQ ID NO: 1682191 - RNA, 16 nt, Human
ccugugaacugaacuc

SEQ ID NO: 1682192 - RNA, 17 nt, Human
ccugugaacugaacucu

SEQ ID NO: 1682193 - RNA, 18 nt, Human
ccugugacuucagcucug

SEQ ID NO: 1682194 - RNA, 19 nt, Human
ccugucuugccuuuuucau

SEQ ID NO: 1682195 - RNA, 20 nt, Human
ccugucuugccuuuuucauu

SEQ ID NO: 1682196 - RNA, 17 nt, Human
ccugucuugccuuuuuc

SEQ ID NO: 1682197 - RNA, 15 nt, Human
ccugucuaaugaaac

SEQ ID NO: 1682198 - RNA, 22 nt, Human
ccugucuaaugaaaccuguguc

SEQ ID NO: 1682199 - RNA, 18 nt, Human
ccugggggcugggcagag

SEQ ID NO: 1682200 - RNA, 21 nt, Human
ccugguggcagugggagcugc

SEQ ID NO: 1682201 - RNA, 13 nt, Human
ccugguuuccugc

SEQ ID NO: 1682202 - RNA, 14 nt, Human
ccugguuuccugcc

SEQ ID NO: 1682203 - RNA, 16 nt, Human
ccugguuuccugcccu

SEQ ID NO: 1682204 - RNA, 15 nt, Human
ccugguuuccugccc

SEQ ID NO: 1682205 - RNA, 19 nt, Human
ccuguccugccuaaggcug

SEQ ID NO: 1682206 - RNA, 17 nt, Human
ccuguccugccuaaggc

SEQ ID NO: 1682207 - RNA, 15 nt, Human
ccuguaaucacagcu

SEQ ID NO: 1682208 - RNA, 17 nt, Human
cccugugauggggcccu

SEQ ID NO: 1682209 - RNA, 18 nt, Human
cccugugauggggcccug

SEQ ID NO: 1682210 - RNA, 19 nt, Human
cccugugauggggcccugc

SEQ ID NO: 1682211 - RNA, 20 nt, Human
cccugugauggggcccugcc

SEQ ID NO: 1682212 - RNA, 13 nt, Human
cccuucgcuccug

SEQ ID NO: 1682213 - RNA, 16 nt, Human
cccugucuaaugaaac

SEQ ID NO: 1682214 - RNA, 20 nt, Human
cccugucucaaaaaaagaaa

SEQ ID NO: 1682215 - RNA, 23 nt, Human
cccugucucaaaaaaagaaaaag

SEQ ID NO: 1682216 - RNA, 13 nt, Human
ccggccccugcug

SEQ ID NO: 1682217 - RNA, 14 nt, Human
cccuucgcuccugu

SEQ ID NO: 1682218 - RNA, 15 nt, Human
cccuucgcuccugug

SEQ ID NO: 1682219 - RNA, 21 nt, Human
cccuucucuccagccccugga

SEQ ID NO: 1682220 - RNA, 22 nt, Human
cccuucucuccagccccuggau

SEQ ID NO: 1682221 - RNA, 14 nt, Human
ccggccccugcugg

SEQ ID NO: 1682222 - RNA, 16 nt, Human
ccucccaucucacaca

SEQ ID NO: 1682223 - RNA, 13 nt, Human
ccucccaucucac

SEQ ID NO: 1682224 - RNA, 23 nt, Human
ccucauuuuugaauacaggcaua

SEQ ID NO: 1682225 - RNA, 15 nt, Human
ccucccaccucagcc

SEQ ID NO: 1682226 - RNA, 17 nt, Human
ccucccaccucagccuc

SEQ ID NO: 1682227 - RNA, 23 nt, Human
ccucauggaauuggagcucgugg

SEQ ID NO: 1682228 - RNA, 20 nt, Human
ccuauuuuuuuucuguuaua

SEQ ID NO: 1682229 - RNA, 23 nt, Human
cccauaauuuuuuuuuuccuuuu

SEQ ID NO: 1682230 - RNA, 22 nt, Human
cccauaauuuuuuuuuuccuuu

SEQ ID NO: 1682231 - RNA, 23 nt, Human
cccauucugccugcccaggcccc

SEQ ID NO: 1682232 - RNA, 21 nt, Human
ccccagauugcaacaggcugg

SEQ ID NO: 1682233 - RNA, 22 nt, Human
ccccagauugcaacaggcuggg

SEQ ID NO: 1682234 - RNA, 23 nt, Human
ccccagauugcaacaggcugggc

SEQ ID NO: 1682235 - RNA, 17 nt, Human
ccccagcaagugagagc

SEQ ID NO: 1682236 - RNA, 22 nt, Human
ccccauccucuguacagagccc

SEQ ID NO: 1682237 - RNA, 19 nt, Human
ccccauccucuguacagag

SEQ ID NO: 1682238 - RNA, 21 nt, Human
ccccauccucuguacagagcc

SEQ ID NO: 1682239 - RNA, 19 nt, Human
ccccagcaagugagagcug

SEQ ID NO: 1682240 - RNA, 20 nt, Human
ccccagcaagugagagcugg

SEQ ID NO: 1682241 - RNA, 21 nt, Human
ccccagcaagugagagcuggg

SEQ ID NO: 1682242 - RNA, 21 nt, Human
cccauucugccugcccaggcc

SEQ ID NO: 1682243 - RNA, 22 nt, Human
cccauucugccugcccaggccc

SEQ ID NO: 1682244 - RNA, 17 nt, Human
cccagcccacuucugcc

SEQ ID NO: 1682245 - RNA, 14 nt, Human
cccagcccacuucu

SEQ ID NO: 1682246 - RNA, 23 nt, Human
cccaggaaaggcuccaggagcag

SEQ ID NO: 1682247 - RNA, 21 nt, Human
cccaggaaaggcuccaggagc

SEQ ID NO: 1682248 - RNA, 22 nt, Human
cccaggaaaggcuccaggagca

SEQ ID NO: 1682249 - RNA, 22 nt, Human
cccagcuuaaaggggcuagagu

SEQ ID NO: 1682250 - RNA, 19 nt, Human
cccaggaaaggcuccagga

SEQ ID NO: 1682251 - RNA, 21 nt, Human
cccagcugugcucuggacagg

SEQ ID NO: 1682252 - RNA, 23 nt, Human
cccagcugugcucuggacaggca

SEQ ID NO: 1682253 - RNA, 18 nt, Human
cccaggaauggagccugc

SEQ ID NO: 1682254 - RNA, 19 nt, Human
cccaggaauggagccugca

SEQ ID NO: 1682255 - RNA, 20 nt, Human
cccaggaauggagccugcac

SEQ ID NO: 1682256 - RNA, 22 nt, Human
cccaggaauggagccugcacgg

SEQ ID NO: 1682257 - RNA, 15 nt, Human
cccaggcuuagucac

SEQ ID NO: 1682258 - RNA, 20 nt, Human
cccaggcuuagucacugaga

SEQ ID NO: 1682259 - RNA, 13 nt, Human
cccucagagccac

SEQ ID NO: 1682260 - RNA, 17 nt, Human
ccccuucugacccaugc

SEQ ID NO: 1682261 - RNA, 12 nt, Human
cccgggaagggg

SEQ ID NO: 1682262 - RNA, 12 nt, Human
cccggcugcccu

SEQ ID NO: 1682263 - RNA, 13 nt, Human
cccggcugcccuu

SEQ ID NO: 1682264 - RNA, 12 nt, Human
cccggcugcgga

SEQ ID NO: 1682265 - RNA, 15 nt, Human
ccccauucugccugc

SEQ ID NO: 1682266 - RNA, 13 nt, Human
ccccauucugccu

SEQ ID NO: 1682267 - RNA, 14 nt, Human
ccccauucugccug

SEQ ID NO: 1682268 - RNA, 19 nt, Human
ccccuucgcuccugugucu

SEQ ID NO: 1682269 - RNA, 14 nt, Human
ccccuucgcuccug

SEQ ID NO: 1682270 - RNA, 15 nt, Human
ccccuucgcuccugu

SEQ ID NO: 1682271 - RNA, 17 nt, Human
ccccuucgcuccugugu

SEQ ID NO: 1682272 - RNA, 15 nt, Human
ccccugcaaagccca

SEQ ID NO: 1682273 - RNA, 16 nt, Human
ccccugcaaagcccag

SEQ ID NO: 1682274 - RNA, 17 nt, Human
ccccugcaaagcccagc

SEQ ID NO: 1682275 - RNA, 18 nt, Human
ccccugcacuccagccug

SEQ ID NO: 1682276 - RNA, 15 nt, Human
ccagcagauuauuca

SEQ ID NO: 1682277 - RNA, 21 nt, Human
ccagccccuggaugcagccuc

SEQ ID NO: 1682278 - RNA, 10 nt, Human
ccagccccuu

SEQ ID NO: 1682279 - RNA, 16 nt, Human
ccagcagauuauucac

SEQ ID NO: 1682280 - RNA, 15 nt, Human
ccagcagccuggacc

SEQ ID NO: 1682281 - RNA, 19 nt, Human
ccagcagccuggacccugu

SEQ ID NO: 1682282 - RNA, 20 nt, Human
ccagcagccuggacccugug

SEQ ID NO: 1682283 - RNA, 18 nt, Human
ccagcuugaaaccuucac

SEQ ID NO: 1682284 - RNA, 20 nt, Human
ccagcuugaaaccuucacuu

SEQ ID NO: 1682285 - RNA, 21 nt, Human
ccaggaaaggcuccaggagca

SEQ ID NO: 1682286 - RNA, 22 nt, Human
ccaggaaaggcuccaggagcag

SEQ ID NO: 1682287 - RNA, 23 nt, Human
ccaggaaaggcuccaggagcagc

SEQ ID NO: 1682288 - RNA, 23 nt, Human
ccagcagagcaccuuagacaguc

SEQ ID NO: 1682289 - RNA, 19 nt, Human
ccagcagagcaccuuagac

SEQ ID NO: 1682290 - RNA, 14 nt, Human
ccagucccccugcc

SEQ ID NO: 1682291 - RNA, 20 nt, Human
ccaguauuguacaaaguauu

SEQ ID NO: 1682292 - RNA, 22 nt, Human
ccaguauuguacaaaguauuaa

SEQ ID NO: 1682293 - RNA, 12 nt, Human
ccagucaccccg

SEQ ID NO: 1682294 - RNA, 13 nt, Human
ccagucaccccgg

SEQ ID NO: 1682295 - RNA, 20 nt, Human
ccagucaccccggccaccug

SEQ ID NO: 1682296 - RNA, 21 nt, Human
ccagucaccccggccaccugc

SEQ ID NO: 1682297 - RNA, 15 nt, Human
ccaggcugggagagc

SEQ ID NO: 1682298 - RNA, 17 nt, Human
ccaggcugggagagccu

SEQ ID NO: 1682299 - RNA, 18 nt, Human
ccaggcugggagagccuu

SEQ ID NO: 1682300 - RNA, 21 nt, Human
ccaggcugggagagccuucca

SEQ ID NO: 1682301 - RNA, 23 nt, Human
ccaggcugggagagccuuccagg

SEQ ID NO: 1682302 - RNA, 22 nt, Human
ccaggcugggagagccuuccag

SEQ ID NO: 1682303 - RNA, 17 nt, Human
ccaggcaacuugggaac

SEQ ID NO: 1682304 - RNA, 13 nt, Human
ccaggcugggaga

SEQ ID NO: 1682305 - RNA, 14 nt, Human
ccaggcugggagag

SEQ ID NO: 1682306 - RNA, 22 nt, Human
ccaggauguacaaggacagccc

SEQ ID NO: 1682307 - RNA, 16 nt, Human
ccauccccuguagagu

SEQ ID NO: 1682308 - RNA, 22 nt, Human
ccauccccuguagagugggagc

SEQ ID NO: 1682309 - RNA, 14 nt, Human
ccaugagccucagc

SEQ ID NO: 1682310 - RNA, 18 nt, Human
ccaugagccucagcaucc

SEQ ID NO: 1682311 - RNA, 19 nt, Human
ccaugagccucagcauccu

SEQ ID NO: 1682312 - RNA, 13 nt, Human
ccaugaguccccu

SEQ ID NO: 1682313 - RNA, 14 nt, Human
ccaugaguccccug

SEQ ID NO: 1682314 - RNA, 15 nt, Human
ccaugaguccccugu

SEQ ID NO: 1682315 - RNA, 16 nt, Human
ccaugaguccccuguu

SEQ ID NO: 1682316 - RNA, 13 nt, Human
ccaugggccuccu

SEQ ID NO: 1682317 - RNA, 16 nt, Human
ccaguuuuguuuggac

SEQ ID NO: 1682318 - RNA, 19 nt, Human
ccaguuuuguuuggaccaa

SEQ ID NO: 1682319 - RNA, 23 nt, Human
ccaucccaaacccuucagugcca

SEQ ID NO: 1682320 - RNA, 12 nt, Human
ccaucccagccc

SEQ ID NO: 1682321 - RNA, 13 nt, Human
ccaucccagcccc

SEQ ID NO: 1682322 - RNA, 20 nt, Human
ccauaauuuuuuuuuuccuu

SEQ ID NO: 1682323 - RNA, 13 nt, Human
ccauacauuugug

SEQ ID NO: 1682324 - RNA, 14 nt, Human
ccauacauuugugu

SEQ ID NO: 1682325 - RNA, 17 nt, Human
ccaugggccuccugugu

SEQ ID NO: 1682326 - RNA, 14 nt, Human
ccaugggccuccug

SEQ ID NO: 1682327 - RNA, 15 nt, Human
ccaugggccuccugu

SEQ ID NO: 1682328 - RNA, 22 nt, Human
ccauuuaaagcuuauuaaaacu

SEQ ID NO: 1682329 - RNA, 15 nt, Human
cagauucuuuccuga

SEQ ID NO: 1682330 - RNA, 17 nt, Human
cagauucuuuccugagg

SEQ ID NO: 1682331 - RNA, 18 nt, Human
cagauucuuuccugaggc

SEQ ID NO: 1682332 - RNA, 19 nt, Human
cagauucuuuccugaggcu

SEQ ID NO: 1682333 - RNA, 19 nt, Human
cagauccccaagccuggca

SEQ ID NO: 1682334 - RNA, 15 nt, Human
cagauccccaagccu

SEQ ID NO: 1682335 - RNA, 13 nt, Human
cagauccuggaaa

SEQ ID NO: 1682336 - RNA, 12 nt, Human
cagauccuggaa

SEQ ID NO: 1682337 - RNA, 22 nt, Human
cagaggggguggccucccaacu

SEQ ID NO: 1682338 - RNA, 23 nt, Human
cagaggggguggccucccaacuc

SEQ ID NO: 1682339 - RNA, 21 nt, Human
cagaguaauccaagcaaaugu

SEQ ID NO: 1682340 - RNA, 15 nt, Human
cagagguccacaaca

SEQ ID NO: 1682341 - RNA, 20 nt, Human
cagagguccacaacacacag

SEQ ID NO: 1682342 - RNA, 17 nt, Human
cagagguugcagugagc

SEQ ID NO: 1682343 - RNA, 20 nt, Human
cagcaucauggagguuugaa

SEQ ID NO: 1682344 - RNA, 13 nt, Human
cagccaguaaaug

SEQ ID NO: 1682345 - RNA, 20 nt, Human
cagcacgauuucuguuuaga

SEQ ID NO: 1682346 - RNA, 19 nt, Human
cagcacgauuucuguuuag

SEQ ID NO: 1682347 - RNA, 18 nt, Human
cagcacgauuucuguuua

SEQ ID NO: 1682348 - RNA, 16 nt, Human
cagcacgauuucuguu

SEQ ID NO: 1682349 - RNA, 17 nt, Human
cagauugcaacaggcug

SEQ ID NO: 1682350 - RNA, 20 nt, Human
cagauucuuuccugaggcug

SEQ ID NO: 1682351 - RNA, 22 nt, Human
cagauucuuuccugaggcuggg

SEQ ID NO: 1682352 - RNA, 13 nt, Human
cagcauaauacuu

SEQ ID NO: 1682353 - RNA, 17 nt, Human
cagcauagaaguaacuu

SEQ ID NO: 1682354 - RNA, 13 nt, Human
cagcaguucagag

SEQ ID NO: 1682355 - RNA, 19 nt, Human
cagccgagauagccaaggc

SEQ ID NO: 1682356 - RNA, 20 nt, Human
cagccgagauagccaaggcc

SEQ ID NO: 1682357 - RNA, 19 nt, Human
cagccugcuaauuccccag

SEQ ID NO: 1682358 - RNA, 15 nt, Human
cagccugcuccagcu

SEQ ID NO: 1682359 - RNA, 12 nt, Human
cagccugcucca

SEQ ID NO: 1682360 - RNA, 18 nt, Human
cagcggggacagcuccuu

SEQ ID NO: 1682361 - RNA, 19 nt, Human
cagcggggacagcuccuuc

SEQ ID NO: 1682362 - RNA, 21 nt, Human
cagcggggacagcuccuucug

SEQ ID NO: 1682363 - RNA, 18 nt, Human
caggaaaagcugcugaca

SEQ ID NO: 1682364 - RNA, 15 nt, Human
caggaaaagcugcug

SEQ ID NO: 1682365 - RNA, 16 nt, Human
caggaaaagcugcuga

SEQ ID NO: 1682366 - RNA, 24 nt, Human
cagcugugcucuggacaggcaugu

SEQ ID NO: 1682367 - RNA, 15 nt, Human
cagcugccugggauc

SEQ ID NO: 1682368 - RNA, 20 nt, Human
cagcugugcucuggacaggc

SEQ ID NO: 1682369 - RNA, 12 nt, Human
cagcugccuggg

SEQ ID NO: 1682370 - RNA, 12 nt, Human
cagcugccugca

SEQ ID NO: 1682371 - RNA, 13 nt, Human
cagcugccuggga

SEQ ID NO: 1682372 - RNA, 14 nt, Human
cagcugccugggau

SEQ ID NO: 1682373 - RNA, 21 nt, Human
cagcuccccucggagaagagc

SEQ ID NO: 1682374 - RNA, 22 nt, Human
cagcuccccucggagaagagcu

SEQ ID NO: 1682375 - RNA, 15 nt, Human
caggccacuugauga

SEQ ID NO: 1682376 - RNA, 18 nt, Human
caggcagauacaggaaaa

SEQ ID NO: 1682377 - RNA, 13 nt, Human
caggccagaggga

SEQ ID NO: 1682378 - RNA, 15 nt, Human
caggccagagggagu

SEQ ID NO: 1682379 - RNA, 17 nt, Human
caggccagcugcuuggg

SEQ ID NO: 1682380 - RNA, 19 nt, Human
caggccagcugcuugggcu

SEQ ID NO: 1682381 - RNA, 21 nt, Human
caggccagcugcuugggcuuc

SEQ ID NO: 1682382 - RNA, 23 nt, Human
caggccagcugcuugggcuucau

SEQ ID NO: 1682383 - RNA, 17 nt, Human
caggccaggcccucugc

SEQ ID NO: 1682384 - RNA, 18 nt, Human
caggccaggcccucugcc

SEQ ID NO: 1682385 - RNA, 19 nt, Human
caggccaggcccucugccc

SEQ ID NO: 1682386 - RNA, 16 nt, Human
caggccagagggagug

SEQ ID NO: 1682387 - RNA, 20 nt, Human
caggccaggcccucugccca

SEQ ID NO: 1682388 - RNA, 20 nt, Human
caggggaaaaucagccugcu

SEQ ID NO: 1682389 - RNA, 19 nt, Human
caggggaaaaucagccugc

SEQ ID NO: 1682390 - RNA, 21 nt, Human
cagggcucagcggggacagcu

SEQ ID NO: 1682391 - RNA, 23 nt, Human
cagggcucagcggggacagcucc

SEQ ID NO: 1682392 - RNA, 21 nt, Human
caggcugggcuucaguggcag

SEQ ID NO: 1682393 - RNA, 22 nt, Human
caggcugggcuucaguggcagc

SEQ ID NO: 1682394 - RNA, 12 nt, Human
caggcugggaga

SEQ ID NO: 1682395 - RNA, 14 nt, Human
caggcugggagagc

SEQ ID NO: 1682396 - RNA, 15 nt, Human
caggcugggagagcc

SEQ ID NO: 1682397 - RNA, 20 nt, Human
caggcugggcuucaguggca

SEQ ID NO: 1682398 - RNA, 16 nt, Human
cagucaccucauggaa

SEQ ID NO: 1682399 - RNA, 15 nt, Human
cagucacauuccaag

SEQ ID NO: 1682400 - RNA, 14 nt, Human
cagucaccccggcc

SEQ ID NO: 1682401 - RNA, 19 nt, Human
cagucaccucauggaauug

SEQ ID NO: 1682402 - RNA, 21 nt, Human
caggugauccacccaccucag

SEQ ID NO: 1682403 - RNA, 15 nt, Human
caggugcacaagcuc

SEQ ID NO: 1682404 - RNA, 22 nt, Human
caggugauccacccaccucagc

SEQ ID NO: 1682405 - RNA, 23 nt, Human
caggugauccacccaccucagcc

SEQ ID NO: 1682406 - RNA, 17 nt, Human
caggugcacaagcucca

SEQ ID NO: 1682407 - RNA, 18 nt, Human
caggugcacaagcuccaa

SEQ ID NO: 1682408 - RNA, 19 nt, Human
caggugcacaagcuccaag

SEQ ID NO: 1682409 - RNA, 20 nt, Human
caggugcacaagcuccaagc

SEQ ID NO: 1682410 - RNA, 23 nt, Human
caguaaagaacaucccuccuggg

SEQ ID NO: 1682411 - RNA, 14 nt, Human
cagguuuaagcugu

SEQ ID NO: 1682412 - RNA, 12 nt, Human
cagguuuuccug

SEQ ID NO: 1682413 - RNA, 16 nt, Human
cagguuuuccugaaga

SEQ ID NO: 1682414 - RNA, 22 nt, Human
cagguugucugaagucacugca

SEQ ID NO: 1682415 - RNA, 23 nt, Human
cagguugucugaagucacugcac

SEQ ID NO: 1682416 - RNA, 22 nt, Human
caggugcacaagcuccaagcuc

SEQ ID NO: 1682417 - RNA, 21 nt, Human
caggugcacaagcuccaagcu

SEQ ID NO: 1682418 - RNA, 19 nt, Human
caggugccaguuauggcua

SEQ ID NO: 1682419 - RNA, 14 nt, Human
caguggggaaugaa

SEQ ID NO: 1682420 - RNA, 20 nt, Human
caguggggaggggcuguggg

SEQ ID NO: 1682421 - RNA, 18 nt, Human
caguggugguuuucuguu

SEQ ID NO: 1682422 - RNA, 21 nt, Human
caguggugcgaucuggguuca

SEQ ID NO: 1682423 - RNA, 16 nt, Human
cagugcaugcuguccc

SEQ ID NO: 1682424 - RNA, 17 nt, Human
cagugcaugcugucccu

SEQ ID NO: 1682425 - RNA, 13 nt, Human
cagugcccacagg

SEQ ID NO: 1682426 - RNA, 15 nt, Human
cagugcccacaggau

SEQ ID NO: 1682427 - RNA, 17 nt, Human
cagugcccacaggauca

SEQ ID NO: 1682428 - RNA, 20 nt, Human
cagugggagcugccuguuca

SEQ ID NO: 1682429 - RNA, 23 nt, Human
cagugggagcugccuguucagcu

SEQ ID NO: 1682430 - RNA, 18 nt, Human
cagugcccacaggaucag

SEQ ID NO: 1682431 - RNA, 15 nt, Human
cagugcaucucagcc

SEQ ID NO: 1682432 - RNA, 16 nt, Human
cagugcaucucagccc

SEQ ID NO: 1682433 - RNA, 17 nt, Human
cagugcaucucagccca

SEQ ID NO: 1682434 - RNA, 18 nt, Human
cagugcaucucagcccac

SEQ ID NO: 1682435 - RNA, 13 nt, Human
cagugcaugcugu

SEQ ID NO: 1682436 - RNA, 14 nt, Human
cagugcaugcuguc

SEQ ID NO: 1682437 - RNA, 15 nt, Human
cagucuggaaugcag

SEQ ID NO: 1682438 - RNA, 17 nt, Human
cagucuggaaugcagug

SEQ ID NO: 1682439 - RNA, 12 nt, Human
cagugcaucuca

SEQ ID NO: 1682440 - RNA, 18 nt, Human
cagucuggaaugcagugg

SEQ ID NO: 1682441 - RNA, 20 nt, Human
cagucugacuguuuccauca

SEQ ID NO: 1682442 - RNA, 17 nt, Human
ccacucccugcaaccug

SEQ ID NO: 1682443 - RNA, 13 nt, Human
ccaccgcagacag

SEQ ID NO: 1682444 - RNA, 22 nt, Human
ccaccgcagacaggaccaggga

SEQ ID NO: 1682445 - RNA, 21 nt, Human
ccaccuuugaagaaguaagga

SEQ ID NO: 1682446 - RNA, 23 nt, Human
ccaccuuucagauaacuguuauu

SEQ ID NO: 1682447 - RNA, 13 nt, Human
ccacgcccggcua

SEQ ID NO: 1682448 - RNA, 18 nt, Human
ccacgcccccacugguga

SEQ ID NO: 1682449 - RNA, 19 nt, Human
ccacgcccccacuggugac

SEQ ID NO: 1682450 - RNA, 16 nt, Human
ccacgcccccacuggu

SEQ ID NO: 1682451 - RNA, 17 nt, Human
ccacgcccccacuggug

SEQ ID NO: 1682452 - RNA, 17 nt, Human
ccaccacacccagccca

SEQ ID NO: 1682453 - RNA, 14 nt, Human
ccacagcugcucaa

SEQ ID NO: 1682454 - RNA, 13 nt, Human
ccaccaucaagcc

SEQ ID NO: 1682455 - RNA, 14 nt, Human
ccaccaucaagcca

SEQ ID NO: 1682456 - RNA, 15 nt, Human
ccaccaucaagccac

SEQ ID NO: 1682457 - RNA, 23 nt, Human
ccacagcaguugaaaagacucca

SEQ ID NO: 1682458 - RNA, 17 nt, Human
ccacagcaguugaaaag

SEQ ID NO: 1682459 - RNA, 18 nt, Human
ccacagcaguugaaaaga

SEQ ID NO: 1682460 - RNA, 12 nt, Human
ccacagcaguug

SEQ ID NO: 1682461 - RNA, 22 nt, Human
cauuuuuuuuaagaaaaaggau

SEQ ID NO: 1682462 - RNA, 20 nt, Human
ccaaaacucuccucugcugc

SEQ ID NO: 1682463 - RNA, 21 nt, Human
ccaaaacucuccucugcugcu

SEQ ID NO: 1682464 - RNA, 16 nt, Human
cauuuguguugaagag

SEQ ID NO: 1682465 - RNA, 20 nt, Human
cauuuguguugaagagguuu

SEQ ID NO: 1682466 - RNA, 19 nt, Human
cauuuguauaaaauaauuu

SEQ ID NO: 1682467 - RNA, 20 nt, Human
cauuuguauaaaauaauuuu

SEQ ID NO: 1682468 - RNA, 17 nt, Human
ccaaugggagcucaugg

SEQ ID NO: 1682469 - RNA, 17 nt, Human
ccaauauuuaccagacc

SEQ ID NO: 1682470 - RNA, 15 nt, Human
ccaaugauggucacc

SEQ ID NO: 1682471 - RNA, 14 nt, Human
ccaaugcacuuugu

SEQ ID NO: 1682472 - RNA, 18 nt, Human
ccaagcucugcuccucuc

SEQ ID NO: 1682473 - RNA, 12 nt, Human
ccaagcucugcu

SEQ ID NO: 1682474 - RNA, 13 nt, Human
ccaagcucugcuc

SEQ ID NO: 1682475 - RNA, 16 nt, Human
ccaacucaccccagcc

SEQ ID NO: 1682476 - RNA, 17 nt, Human
ccaacucaccccagccc

SEQ ID NO: 1682477 - RNA, 18 nt, Human
ccaacucaccccagcccc

SEQ ID NO: 1682478 - RNA, 18 nt, Human
ccaaauguucaucaauga

SEQ ID NO: 1682479 - RNA, 23 nt, Human
ccaaauggaaaugggcagagcag

SEQ ID NO: 1682480 - RNA, 14 nt, Human
ccaacucaccccag

SEQ ID NO: 1682481 - RNA, 17 nt, Human
ccaaauguucaucaaug

SEQ ID NO: 1682482 - RNA, 17 nt, Human
cauggcugccaauggga

SEQ ID NO: 1682483 - RNA, 14 nt, Human
caugggaaugaaug

SEQ ID NO: 1682484 - RNA, 15 nt, Human
caugggaaugaaugu

SEQ ID NO: 1682485 - RNA, 16 nt, Human
caugggaaugaauguc

SEQ ID NO: 1682486 - RNA, 17 nt, Human
caugggaaugaauguca

SEQ ID NO: 1682487 - RNA, 14 nt, Human
caugcuacacacug

SEQ ID NO: 1682488 - RNA, 23 nt, Human
caugcuacacacugcauguuugu

SEQ ID NO: 1682489 - RNA, 20 nt, Human
caugcuacacacugcauguu

SEQ ID NO: 1682490 - RNA, 13 nt, Human
caugauguuuucc

SEQ ID NO: 1682491 - RNA, 14 nt, Human
caugauguuuagaa

SEQ ID NO: 1682492 - RNA, 16 nt, Human
caugucccuaccgagu

SEQ ID NO: 1682493 - RNA, 22 nt, Human
caugucccuaccgagucucuuc

SEQ ID NO: 1682494 - RNA, 14 nt, Human
caugucaaacguga

SEQ ID NO: 1682495 - RNA, 19 nt, Human
caugucaaacgugaaaaug

SEQ ID NO: 1682496 - RNA, 18 nt, Human
cauguauuuguuugcaua

SEQ ID NO: 1682497 - RNA, 23 nt, Human
caugucccuaccgagucucuucu

SEQ ID NO: 1682498 - RNA, 16 nt, Human
cauguuggccaggcug

SEQ ID NO: 1682499 - RNA, 14 nt, Human
cauguuggccaggc

SEQ ID NO: 1682500 - RNA, 15 nt, Human
cauguuggccaggcu

SEQ ID NO: 1682501 - RNA, 13 nt, Human
cauucuccaccug

SEQ ID NO: 1682502 - RNA, 14 nt, Human
cauucuccaccugc

SEQ ID NO: 1682503 - RNA, 16 nt, Human
cauucuccaccugcca

SEQ ID NO: 1682504 - RNA, 12 nt, Human
cauccuggaaua

SEQ ID NO: 1682505 - RNA, 23 nt, Human
cauccuggcacccggccccugcu

SEQ ID NO: 1682506 - RNA, 22 nt, Human
cauccuggcacccggccccugc

SEQ ID NO: 1682507 - RNA, 15 nt, Human
cauccuggcacccgg

SEQ ID NO: 1682508 - RNA, 12 nt, Human
caucacuucccu

SEQ ID NO: 1682509 - RNA, 14 nt, Human
caucacuucccuac

SEQ ID NO: 1682510 - RNA, 22 nt, Human
caguggugguuuucuguucuuu

SEQ ID NO: 1682511 - RNA, 21 nt, Human
caguggugguuuucuguucuu

SEQ ID NO: 1682512 - RNA, 20 nt, Human
caguggugguuuucuguucu

SEQ ID NO: 1682513 - RNA, 19 nt, Human
caguggugguuuucuguuc

SEQ ID NO: 1682514 - RNA, 16 nt, Human
cauauuaccacagaca

SEQ ID NO: 1682515 - RNA, 17 nt, Human
cauauucuguuggccag

SEQ ID NO: 1682516 - RNA, 18 nt, Human
cauauucuguuggccagu

SEQ ID NO: 1682517 - RNA, 22 nt, Human
cacagcuaacauggaaguacua

SEQ ID NO: 1682518 - RNA, 20 nt, Human
cacagcucuguccugggagu

SEQ ID NO: 1682519 - RNA, 23 nt, Human
cacagcucuguccugggagugag

SEQ ID NO: 1682520 - RNA, 10 nt, Human
cacagcucuu

SEQ ID NO: 1682521 - RNA, 19 nt, Human
cacagacccugcccugugg

SEQ ID NO: 1682522 - RNA, 20 nt, Human
cacagacccugcccuguggg

SEQ ID NO: 1682523 - RNA, 21 nt, Human
cacagacccugcccugugggc

SEQ ID NO: 1682524 - RNA, 18 nt, Human
cacagacauacuaaccag

SEQ ID NO: 1682525 - RNA, 22 nt, Human
cacagacccugcccugugggcc

SEQ ID NO: 1682526 - RNA, 15 nt, Human
cacagcuaacaugga

SEQ ID NO: 1682527 - RNA, 16 nt, Human
cacagcuaacauggaa

SEQ ID NO: 1682528 - RNA, 16 nt, Human
cacaguauuacuucug

SEQ ID NO: 1682529 - RNA, 18 nt, Human
cacaguauuacuucugcu

SEQ ID NO: 1682530 - RNA, 19 nt, Human
cacaguauuacuucugcua

SEQ ID NO: 1682531 - RNA, 17 nt, Human
cacccagcccacuucug

SEQ ID NO: 1682532 - RNA, 23 nt, Human
caccaacauacucccaucuguga

SEQ ID NO: 1682533 - RNA, 14 nt, Human
caccagcagccugg

SEQ ID NO: 1682534 - RNA, 12 nt, Human
caccagcagccu

SEQ ID NO: 1682535 - RNA, 15 nt, Human
caccagcagccugga

SEQ ID NO: 1682536 - RNA, 24 nt, Human
cacccaggagccccgaggccuucu

SEQ ID NO: 1682537 - RNA, 19 nt, Human
cacccagcccacuucugcc

SEQ ID NO: 1682538 - RNA, 20 nt, Human
cacccaggagccccgaggcc

SEQ ID NO: 1682539 - RNA, 23 nt, Human
cacccaggagccccgaggccuuc

SEQ ID NO: 1682540 - RNA, 15 nt, Human
cacauuuuauuuuau

SEQ ID NO: 1682541 - RNA, 19 nt, Human
cacaucuugcucugcugac

SEQ ID NO: 1682542 - RNA, 18 nt, Human
cacaucuugcucugcuga

SEQ ID NO: 1682543 - RNA, 21 nt, Human
cacauuuuuuaaaugcaccug

SEQ ID NO: 1682544 - RNA, 17 nt, Human
cacauuuuuuaaaugca

SEQ ID NO: 1682545 - RNA, 14 nt, Human
cacauuuuucuuag

SEQ ID NO: 1682546 - RNA, 13 nt, Human
cacauuuuucuua

SEQ ID NO: 1682547 - RNA, 20 nt, Human
caccaacauacucccaucug

SEQ ID NO: 1682548 - RNA, 21 nt, Human
caccaacauacucccaucugu

SEQ ID NO: 1682549 - RNA, 21 nt, Human
cacaucagcacgauuucuguu

SEQ ID NO: 1682550 - RNA, 20 nt, Human
cacaucagcacgauuucugu

SEQ ID NO: 1682551 - RNA, 17 nt, Human
cacaucuugcucugcug

SEQ ID NO: 1682552 - RNA, 22 nt, Human
cacaucagcacgauuucuguuu

SEQ ID NO: 1682553 - RNA, 13 nt, Human
caauaaaaaauua

SEQ ID NO: 1682554 - RNA, 16 nt, Human
caauaaaaaauuauga

SEQ ID NO: 1682555 - RNA, 17 nt, Human
caauaaaaaauuaugac

SEQ ID NO: 1682556 - RNA, 14 nt, Human
caaguauuagaaua

SEQ ID NO: 1682557 - RNA, 13 nt, Human
caaguauuauacc

SEQ ID NO: 1682558 - RNA, 20 nt, Human
caaguauuagaauaccacag

SEQ ID NO: 1682559 - RNA, 14 nt, Human
cacaagccuucggc

SEQ ID NO: 1682560 - RNA, 16 nt, Human
cacaagacugcacauc

SEQ ID NO: 1682561 - RNA, 14 nt, Human
cacaagacccuugu

SEQ ID NO: 1682562 - RNA, 16 nt, Human
cacaagacccuugugg

SEQ ID NO: 1682563 - RNA, 12 nt, Human
caauuuaaaaaa

SEQ ID NO: 1682564 - RNA, 19 nt, Human
caauucuccugccucagcc

SEQ ID NO: 1682565 - RNA, 17 nt, Human
caauucuccugccucag

SEQ ID NO: 1682566 - RNA, 22 nt, Human
caaugcugugcccuaaagugua

SEQ ID NO: 1682567 - RNA, 12 nt, Human
caauauuucaga

SEQ ID NO: 1682568 - RNA, 20 nt, Human
caauauuucagauaaucaca

SEQ ID NO: 1682569 - RNA, 21 nt, Human
caauauuucagauaaucacaa

SEQ ID NO: 1682570 - RNA, 22 nt, Human
caaugcuggcuguuggcugggg

SEQ ID NO: 1682571 - RNA, 23 nt, Human
caaugcuggcuguuggcuggggg

SEQ ID NO: 1682572 - RNA, 14 nt, Human
caaugcuguauuuu

SEQ ID NO: 1682573 - RNA, 23 nt, Human
caaugcuguauuuuaaaagaaug

SEQ ID NO: 1682574 - RNA, 17 nt, Human
cacucuugaaaaaugca

SEQ ID NO: 1682575 - RNA, 17 nt, Human
cacucuuauugcccacg

SEQ ID NO: 1682576 - RNA, 18 nt, Human
cacucuuauugcccacgc

SEQ ID NO: 1682577 - RNA, 19 nt, Human
cacucuuauugcccacgcu

SEQ ID NO: 1682578 - RNA, 14 nt, Human
cacggccaggccag

SEQ ID NO: 1682579 - RNA, 15 nt, Human
cacggccaggccaga

SEQ ID NO: 1682580 - RNA, 16 nt, Human
cacggccaggccagag

SEQ ID NO: 1682581 - RNA, 20 nt, Human
cacggagggugacgggggug

SEQ ID NO: 1682582 - RNA, 17 nt, Human
cacggccaggccagagg

SEQ ID NO: 1682583 - RNA, 23 nt, Human
cacuacggaauaguuggcuagga

SEQ ID NO: 1682584 - RNA, 11 nt, Human
cacugaagaag

SEQ ID NO: 1682585 - RNA, 14 nt, Human
caccuuuauucugg

SEQ ID NO: 1682586 - RNA, 17 nt, Human
caccuuuguccccaccg

SEQ ID NO: 1682587 - RNA, 14 nt, Human
caccuuugucccca

SEQ ID NO: 1682588 - RNA, 15 nt, Human
caccuuuguccccac

SEQ ID NO: 1682589 - RNA, 17 nt, Human
caccugccagggacaga

SEQ ID NO: 1682590 - RNA, 19 nt, Human
caccuugacagggcacacc

SEQ ID NO: 1682591 - RNA, 14 nt, Human
caccuuggcucaag

SEQ ID NO: 1682592 - RNA, 13 nt, Human
caccuuggcucaa

SEQ ID NO: 1682593 - RNA, 21 nt, Human
caccuacaugagguacugaga

SEQ ID NO: 1682594 - RNA, 20 nt, Human
caccuaccaccacgcccggc

SEQ ID NO: 1682595 - RNA, 14 nt, Human
caccugccagggac

SEQ ID NO: 1682596 - RNA, 16 nt, Human
caccugccagggacag

SEQ ID NO: 1682597 - RNA, 23 nt, Human
caccucaaaauaccaugccauuu

SEQ ID NO: 1682598 - RNA, 17 nt, Human
cacuggugacaugucuu

SEQ ID NO: 1682599 - RNA, 13 nt, Human
cacugguggcccg

SEQ ID NO: 1682600 - RNA, 21 nt, Human
cacugguggcccgacagccug

SEQ ID NO: 1682601 - RNA, 22 nt, Human
cacugguggcccgacagccugg

SEQ ID NO: 1682602 - RNA, 15 nt, Human
cacuguugcccaggc

SEQ ID NO: 1682603 - RNA, 16 nt, Human
cacuguugcccaggcu

SEQ ID NO: 1682604 - RNA, 23 nt, Human
cacugggcuuggggaccagagcu

SEQ ID NO: 1682605 - RNA, 22 nt, Human
cacugggcuuggggaccagagc

SEQ ID NO: 1682606 - RNA, 17 nt, Human
cacuuagaaauugcauu

SEQ ID NO: 1682607 - RNA, 19 nt, Human
cacuuagaaauugcauuuc

SEQ ID NO: 1682608 - RNA, 17 nt, Human
cacuguugcccaggcug

SEQ ID NO: 1682609 - RNA, 19 nt, Human
cacuguuucaaacuuuacu

SEQ ID NO: 1682610 - RNA, 20 nt, Human
cacuuagaaauugcauuucc

SEQ ID NO: 1682611 - RNA, 20 nt, Human
cacuuggucugugagaugcu

SEQ ID NO: 1682612 - RNA, 15 nt, Human
cagaacacauaauuc

SEQ ID NO: 1682613 - RNA, 23 nt, Human
cagaaguuucugccgcagcccug

SEQ ID NO: 1682614 - RNA, 22 nt, Human
cagaaguuucugccgcagcccu

SEQ ID NO: 1682615 - RNA, 20 nt, Human
cagaaguuucugccgcagcc

SEQ ID NO: 1682616 - RNA, 21 nt, Human
cagaaguuucugccgcagccc

SEQ ID NO: 1682617 - RNA, 22 nt, Human
cagaauauuagugaccucagcu

SEQ ID NO: 1682618 - RNA, 22 nt, Human
caaauccagccugcugccugcu

SEQ ID NO: 1682619 - RNA, 16 nt, Human
caaaguauuaagcaua

SEQ ID NO: 1682620 - RNA, 17 nt, Human
caaaguauuaagcauau

SEQ ID NO: 1682621 - RNA, 19 nt, Human
caaaguauuaagcauauau

SEQ ID NO: 1682622 - RNA, 21 nt, Human
caaaguauuaagcauauauuu

SEQ ID NO: 1682623 - RNA, 17 nt, Human
caaaucagcugcuacua

SEQ ID NO: 1682624 - RNA, 20 nt, Human
caaaguacacuguuucaaac

SEQ ID NO: 1682625 - RNA, 16 nt, Human
caaaguacacuguuuc

SEQ ID NO: 1682626 - RNA, 14 nt, Human
caaaguauuaagca

SEQ ID NO: 1682627 - RNA, 15 nt, Human
caaaguauuaagcau

SEQ ID NO: 1682628 - RNA, 21 nt, Human
caaaguacacuguuucaaacu

SEQ ID NO: 1682629 - RNA, 13 nt, Human
caaagaugcagcc

SEQ ID NO: 1682630 - RNA, 14 nt, Human
caaagaugcagccg

SEQ ID NO: 1682631 - RNA, 13 nt, Human
caaaugcagcuuu

SEQ ID NO: 1682632 - RNA, 21 nt, Human
caaaucugcuuuuuaaagaau

SEQ ID NO: 1682633 - RNA, 23 nt, Human
caacaaaccuguuucugcagcca

SEQ ID NO: 1682634 - RNA, 22 nt, Human
caacaccucugcacaagcugca

SEQ ID NO: 1682635 - RNA, 20 nt, Human
caacaccuuguuucccucuc

SEQ ID NO: 1682636 - RNA, 15 nt, Human
caacacgagcaggcu

SEQ ID NO: 1682637 - RNA, 18 nt, Human
caaccacugcgaccacaa

SEQ ID NO: 1682638 - RNA, 16 nt, Human
caaccaccuuucagau

SEQ ID NO: 1682639 - RNA, 13 nt, Human
caagacacaguga

SEQ ID NO: 1682640 - RNA, 23 nt, Human
caagaauuucuaggacugaauua

SEQ ID NO: 1682641 - RNA, 23 nt, Human
caagacccuuguggucccacccc

SEQ ID NO: 1682642 - RNA, 22 nt, Human
caagacccuuguggucccaccc

SEQ ID NO: 1682643 - RNA, 18 nt, Human
caagacccuugugguccc

SEQ ID NO: 1682644 - RNA, 19 nt, Human
caagacccuugugguccca

SEQ ID NO: 1682645 - RNA, 17 nt, Human
caacucaccccagcccc

SEQ ID NO: 1682646 - RNA, 16 nt, Human
caacucaccccagccc

SEQ ID NO: 1682647 - RNA, 13 nt, Human
caacucaccccag

SEQ ID NO: 1682648 - RNA, 15 nt, Human
caacucaccccagcc

SEQ ID NO: 1682649 - RNA, 15 nt, Human
caacccccagccugc

SEQ ID NO: 1682650 - RNA, 16 nt, Human
caacccccagccugcu

SEQ ID NO: 1682651 - RNA, 17 nt, Human
caacccccagccugcua

SEQ ID NO: 1682652 - RNA, 18 nt, Human
caacuaugauuuggaaaa

SEQ ID NO: 1682653 - RNA, 19 nt, Human
caacuaugauuuggaaaau

SEQ ID NO: 1682654 - RNA, 22 nt, Human
caacuaugauuuggaaaauaaa

SEQ ID NO: 1682655 - RNA, 17 nt, Human
caacuaugauuuggaaa

SEQ ID NO: 1682656 - RNA, 21 nt, Human
caacuaucucauuuccaagca

SEQ ID NO: 1682657 - RNA, 14 nt, Human
caaccauuccccau

SEQ ID NO: 1682658 - RNA, 19 nt, Human
caacccaaauguucaucaa

SEQ ID NO: 1682659 - RNA, 18 nt, Human
auuuugauccaagcuggu

SEQ ID NO: 1682660 - RNA, 13 nt, Human
auuuguuugaacu

SEQ ID NO: 1682661 - RNA, 16 nt, Human
auuuguuugaacugau

SEQ ID NO: 1682662 - RNA, 14 nt, Human
auuuguuugaacug

SEQ ID NO: 1682663 - RNA, 20 nt, Human
auuuguuugaacugauaaag

SEQ ID NO: 1682664 - RNA, 15 nt, Human
auuuuauaaaucgcu

SEQ ID NO: 1682665 - RNA, 16 nt, Human
auuuuauaaaucgcuu

SEQ ID NO: 1682666 - RNA, 17 nt, Human
auuuuauaaaucgcuuu

SEQ ID NO: 1682667 - RNA, 17 nt, Human
auuuuauagcuacuaau

SEQ ID NO: 1682668 - RNA, 20 nt, Human
auuuuauaaaucgcuuuuga

SEQ ID NO: 1682669 - RNA, 21 nt, Human
auuuuauaaaucgcuuuugau

SEQ ID NO: 1682670 - RNA, 23 nt, Human
auuuuauaaaucgcuuuugauaa

SEQ ID NO: 1682671 - RNA, 15 nt, Human
caaaagcugggcagg

SEQ ID NO: 1682672 - RNA, 19 nt, Human
caaaagcugggcagguugg

SEQ ID NO: 1682673 - RNA, 12 nt, Human
auuuuuuuuucc

SEQ ID NO: 1682674 - RNA, 13 nt, Human
auuuuuuuuuccu

SEQ ID NO: 1682675 - RNA, 16 nt, Human
auuuuuuuuuccuuca

SEQ ID NO: 1682676 - RNA, 13 nt, Human
auuuuuaagugcu

SEQ ID NO: 1682677 - RNA, 17 nt, Human
auuuuuuuuuccuucag

SEQ ID NO: 1682678 - RNA, 18 nt, Human
auugauccagaaagaaaa

SEQ ID NO: 1682679 - RNA, 19 nt, Human
auugauccagaaagaaaac

SEQ ID NO: 1682680 - RNA, 22 nt, Human
auugauccagaaagaaaacuug

SEQ ID NO: 1682681 - RNA, 18 nt, Human
auugaugggauuugguca

SEQ ID NO: 1682682 - RNA, 13 nt, Human
auuguaaaauggu

SEQ ID NO: 1682683 - RNA, 15 nt, Human
auuguaaggaaugau

SEQ ID NO: 1682684 - RNA, 16 nt, Human
auuguaaggaaugauu

SEQ ID NO: 1682685 - RNA, 23 nt, Human
auuguaauaggcguaacuaauuu

SEQ ID NO: 1682686 - RNA, 14 nt, Human
auuguaaaugugcu

SEQ ID NO: 1682687 - RNA, 15 nt, Human
auuguaaaugugcuu

SEQ ID NO: 1682688 - RNA, 17 nt, Human
auuguaaaugugcuuuu

SEQ ID NO: 1682689 - RNA, 19 nt, Human
auuguucuuaguuugcagu

SEQ ID NO: 1682690 - RNA, 23 nt, Human
auuguacaaaguauuaagcauau

SEQ ID NO: 1682691 - RNA, 22 nt, Human
auuguacaaaguauuaagcaua

SEQ ID NO: 1682692 - RNA, 20 nt, Human
auuguacaaaguauuaagca

SEQ ID NO: 1682693 - RNA, 19 nt, Human
auuguuuaaaaucauuucu

SEQ ID NO: 1682694 - RNA, 16 nt, Human
auuucuguuuagauaa

SEQ ID NO: 1682695 - RNA, 14 nt, Human
auuucuguuuagau

SEQ ID NO: 1682696 - RNA, 12 nt, Human
auuucuguuuag

SEQ ID NO: 1682697 - RNA, 15 nt, Human
auuucuaugaaauau

SEQ ID NO: 1682698 - RNA, 18 nt, Human
auuucuaugaaauauuau

SEQ ID NO: 1682699 - RNA, 20 nt, Human
auuucuaugaaauauuaugu

SEQ ID NO: 1682700 - RNA, 14 nt, Human
auuuaaugaaagac

SEQ ID NO: 1682701 - RNA, 15 nt, Human
auuuaaugaaagacu

SEQ ID NO: 1682702 - RNA, 23 nt, Human
auuuauaaucacuuuuuuccaca

SEQ ID NO: 1682703 - RNA, 16 nt, Human
auuucagcagcugcag

SEQ ID NO: 1682704 - RNA, 16 nt, Human
auugauccagaaagaa

SEQ ID NO: 1682705 - RNA, 17 nt, Human
auugauccagaaagaaa

SEQ ID NO: 1682706 - RNA, 17 nt, Human
auucuuuccugaggcug

SEQ ID NO: 1682707 - RNA, 22 nt, Human
auucuuuccugaggcugggcuc

SEQ ID NO: 1682708 - RNA, 13 nt, Human
auuccugaacagg

SEQ ID NO: 1682709 - RNA, 21 nt, Human
auucucuccuguaccucuuga

SEQ ID NO: 1682710 - RNA, 19 nt, Human
auucucuccuguaccucuu

SEQ ID NO: 1682711 - RNA, 21 nt, Human
auuccugaugcuucuucagag

SEQ ID NO: 1682712 - RNA, 17 nt, Human
auucuugccaaauauaa

SEQ ID NO: 1682713 - RNA, 20 nt, Human
auucauauuuacuucuuaua

SEQ ID NO: 1682714 - RNA, 18 nt, Human
auucauauuuacuucuua

SEQ ID NO: 1682715 - RNA, 19 nt, Human
auucauauuuacuucuuau

SEQ ID NO: 1682716 - RNA, 18 nt, Human
auucacaagacccaaaag

SEQ ID NO: 1682717 - RNA, 18 nt, Human
auuaaauucuugcaaagu

SEQ ID NO: 1682718 - RNA, 14 nt, Human
auuaaauucuugca

SEQ ID NO: 1682719 - RNA, 20 nt, Human
auuaaauucuugcaaaguau

SEQ ID NO: 1682720 - RNA, 20 nt, Human
auuauguguguuuuaaaaug

SEQ ID NO: 1682721 - RNA, 21 nt, Human
auuauguguguuuuaaaauga

SEQ ID NO: 1682722 - RNA, 15 nt, Human
auuauguguguuuua

SEQ ID NO: 1682723 - RNA, 21 nt, Human
aaaguaaaaacaaagaaauua

SEQ ID NO: 1682724 - RNA, 18 nt, Human
gguggcuggguuggaggg

SEQ ID NO: 1682725 - RNA, 19 nt, Human
gguggggaccucaggccug

SEQ ID NO: 1682726 - RNA, 13 nt, Human
ggugggacacccu

SEQ ID NO: 1682727 - RNA, 16 nt, Human
ggugggacacccugug

SEQ ID NO: 1682728 - RNA, 17 nt, Human
ggugggacacccuguga

SEQ ID NO: 1682729 - RNA, 20 nt, Human
ggugggaggaucucuugagc

SEQ ID NO: 1682730 - RNA, 18 nt, Human
aaagguucaugcaaacuu

SEQ ID NO: 1682731 - RNA, 20 nt, Human
aaagggcuguuauaaucuuu

SEQ ID NO: 1682732 - RNA, 22 nt, Human
aaagggcuguuauaaucuuuca

SEQ ID NO: 1682733 - RNA, 20 nt, Human
aaagggcccagagagggugg

SEQ ID NO: 1682734 - RNA, 13 nt, Human
aaagcuuauuaaa

SEQ ID NO: 1682735 - RNA, 14 nt, Human
aaagcuguguggca

SEQ ID NO: 1682736 - RNA, 22 nt, Human
aaagcugccagccgagauagcc

SEQ ID NO: 1682737 - RNA, 17 nt, Human
aaagcuaggccuggcca

SEQ ID NO: 1682738 - RNA, 12 nt, Human
aaagcugccagc

SEQ ID NO: 1682739 - RNA, 13 nt, Human
aaagcugccagcc

SEQ ID NO: 1682740 - RNA, 15 nt, Human
aaagcagcguuucua

SEQ ID NO: 1682741 - RNA, 13 nt, Human
aaagcagugcaug

SEQ ID NO: 1682742 - RNA, 16 nt, Human
aaagcagugcaugcug

SEQ ID NO: 1682743 - RNA, 14 nt, Human
aaagcuaggccugg

SEQ ID NO: 1682744 - RNA, 16 nt, Human
aaagcuaggccuggcc

SEQ ID NO: 1682745 - RNA, 14 nt, Human
gguggcaccagcag

SEQ ID NO: 1682746 - RNA, 20 nt, Human
gguggcaccagcagccugga

SEQ ID NO: 1682747 - RNA, 16 nt, Human
aaagcagaacagugau

SEQ ID NO: 1682748 - RNA, 12 nt, Human
aaacuuuaugcu

SEQ ID NO: 1682749 - RNA, 19 nt, Human
aaacuuuaugcuaagugaa

SEQ ID NO: 1682750 - RNA, 12 nt, Human
gguuuccugccc

SEQ ID NO: 1682751 - RNA, 13 nt, Human
gguuuccugcccu

SEQ ID NO: 1682752 - RNA, 15 nt, Human
gguuuccugcccugg

SEQ ID NO: 1682753 - RNA, 22 nt, Human
gguuucuaaagcugccagccga

SEQ ID NO: 1682754 - RNA, 16 nt, Human
gguuuccugcccuggg

SEQ ID NO: 1682755 - RNA, 19 nt, Human
gguuuccugcccugggagg

SEQ ID NO: 1682756 - RNA, 16 nt, Human
gguuucuaaagcugcc

SEQ ID NO: 1682757 - RNA, 20 nt, Human
gguuuguaaauuaacuuuua

SEQ ID NO: 1682758 - RNA, 17 nt, Human
gguuuucacauuggaaa

SEQ ID NO: 1682759 - RNA, 19 nt, Human
gguuuuauuguuuaaaauc

SEQ ID NO: 1682760 - RNA, 21 nt, Human
aaaguaucccuacuguaauuu

SEQ ID NO: 1682761 - RNA, 20 nt, Human
aaaguagaagucuuagaugu

SEQ ID NO: 1682762 - RNA, 22 nt, Human
aaaguagaagucuuagauguau

SEQ ID NO: 1682763 - RNA, 18 nt, Human
aaaguacacuguuucaaa

SEQ ID NO: 1682764 - RNA, 19 nt, Human
aaaguacacuguuucaaac

SEQ ID NO: 1682765 - RNA, 21 nt, Human
aaaguguauuuuuuuacuaau

SEQ ID NO: 1682766 - RNA, 14 nt, Human
aaaguguauuuuuu

SEQ ID NO: 1682767 - RNA, 17 nt, Human
aaaguauguuagugcaa

SEQ ID NO: 1682768 - RNA, 11 nt, Human
gguguggggga

SEQ ID NO: 1682769 - RNA, 13 nt, Human
ggugugggggaag

SEQ ID NO: 1682770 - RNA, 13 nt, Human
ggugggggccucg

SEQ ID NO: 1682771 - RNA, 14 nt, Human
gguguggagaagcg

SEQ ID NO: 1682772 - RNA, 23 nt, Human
gguguggagaagcggcuggcagc

SEQ ID NO: 1682773 - RNA, 12 nt, Human
gguguggagaag

SEQ ID NO: 1682774 - RNA, 23 nt, Human
gguucccuuugacgccaucccag

SEQ ID NO: 1682775 - RNA, 22 nt, Human
gguucccuuuuuuggcugcuga

SEQ ID NO: 1682776 - RNA, 19 nt, Human
gguguuguacucaauuuua

SEQ ID NO: 1682777 - RNA, 20 nt, Human
gguguuguacucaauuuuaa

SEQ ID NO: 1682778 - RNA, 17 nt, Human
gguguuuccuggcacug

SEQ ID NO: 1682779 - RNA, 19 nt, Human
gguguuuccuggcacugcu

SEQ ID NO: 1682780 - RNA, 17 nt, Human
gguucccauuugcuccu

SEQ ID NO: 1682781 - RNA, 16 nt, Human
guaacaagccacccca

SEQ ID NO: 1682782 - RNA, 19 nt, Human
guaacaggaaaauuuuaaa

SEQ ID NO: 1682783 - RNA, 20 nt, Human
guaacaggaaaauuuuaaaa

SEQ ID NO: 1682784 - RNA, 13 nt, Human
guaaaccuuuuau

SEQ ID NO: 1682785 - RNA, 22 nt, Human
aaauaaugugaaacuggauuaa

SEQ ID NO: 1682786 - RNA, 22 nt, Human
aaaguguauuuuuuuacuaaua

SEQ ID NO: 1682787 - RNA, 12 nt, Human
aaaguggugaga

SEQ ID NO: 1682788 - RNA, 22 nt, Human
guacaaccuguucugcuuuccu

SEQ ID NO: 1682789 - RNA, 20 nt, Human
guacaaaguauuaagcauau

SEQ ID NO: 1682790 - RNA, 21 nt, Human
guacaaaguauuaagcauaua

SEQ ID NO: 1682791 - RNA, 22 nt, Human
guaauuugugauacaaugcugu

SEQ ID NO: 1682792 - RNA, 20 nt, Human
guaauuugugauacaaugcu

SEQ ID NO: 1682793 - RNA, 17 nt, Human
guaauuugugauacaau

SEQ ID NO: 1682794 - RNA, 17 nt, Human
guaaucgaccugccucg

SEQ ID NO: 1682795 - RNA, 15 nt, Human
guaauuugugauaca

SEQ ID NO: 1682796 - RNA, 15 nt, Human
guaaucgaccugccu

SEQ ID NO: 1682797 - RNA, 23 nt, Human
guaauccuagcacuuugggaggc

SEQ ID NO: 1682798 - RNA, 12 nt, Human
aaauaucugaaa

SEQ ID NO: 1682799 - RNA, 14 nt, Human
aaauaucugaaaau

SEQ ID NO: 1682800 - RNA, 17 nt, Human
aaauaucugaaaaugua

SEQ ID NO: 1682801 - RNA, 18 nt, Human
aaauaucugaaaauguau

SEQ ID NO: 1682802 - RNA, 19 nt, Human
aaauaucugaaaauguaug

SEQ ID NO: 1682803 - RNA, 21 nt, Human
aaauaucugaaaauguaugug

SEQ ID NO: 1682804 - RNA, 22 nt, Human
aaauaucugaaaauguaugugu

SEQ ID NO: 1682805 - RNA, 23 nt, Human
aaauaucugaaaauguaugugua

SEQ ID NO: 1682806 - RNA, 13 nt, Human
aaauaugcaaagc

SEQ ID NO: 1682807 - RNA, 15 nt, Human
aaauaugcaaagcac

SEQ ID NO: 1682808 - RNA, 16 nt, Human
aaauaugcaaagcacu

SEQ ID NO: 1682809 - RNA, 17 nt, Human
aaauaugcaaagcacug

SEQ ID NO: 1682810 - RNA, 20 nt, Human
aaauauuccugcauuuguga

SEQ ID NO: 1682811 - RNA, 19 nt, Human
aaauauuaagaaagacuau

SEQ ID NO: 1682812 - RNA, 19 nt, Human
aaaucagccugcuccagcu

SEQ ID NO: 1682813 - RNA, 21 nt, Human
aaaucagccugcuccagcugu

SEQ ID NO: 1682814 - RNA, 23 nt, Human
aaaucagccugcuccagcuguuc

SEQ ID NO: 1682815 - RNA, 20 nt, Human
aaauacgugggcauucaaau

SEQ ID NO: 1682816 - RNA, 21 nt, Human
aaauacgugggcauucaaaug

SEQ ID NO: 1682817 - RNA, 15 nt, Human
aaauauaggaacuua

SEQ ID NO: 1682818 - RNA, 19 nt, Human
aaauaccagccaguaaaug

SEQ ID NO: 1682819 - RNA, 16 nt, Human
guacacacacauacac

SEQ ID NO: 1682820 - RNA, 21 nt, Human
aaauaccagccaguaaauggg

SEQ ID NO: 1682821 - RNA, 20 nt, Human
aaauaccagccaguaaaugg

SEQ ID NO: 1682822 - RNA, 21 nt, Human
aaauaccaugccauuuaaagc

SEQ ID NO: 1682823 - RNA, 22 nt, Human
aaauaucacuugucaauaaaau

SEQ ID NO: 1682824 - RNA, 16 nt, Human
aaauauauuuuaagac

SEQ ID NO: 1682825 - RNA, 22 nt, Human
aaauauauuuuaagacgaaaca

SEQ ID NO: 1682826 - RNA, 14 nt, Human
aaauauauaucaaa

SEQ ID NO: 1682827 - RNA, 18 nt, Human
aaauauaugcuaagucuu

SEQ ID NO: 1682828 - RNA, 11 nt, Human
gggggcuggga

SEQ ID NO: 1682829 - RNA, 15 nt, Human
ggggcccugccuccu

SEQ ID NO: 1682830 - RNA, 21 nt, Human
ggggucacucuggcagcucag

SEQ ID NO: 1682831 - RNA, 13 nt, Human
ggggguggccucc

SEQ ID NO: 1682832 - RNA, 15 nt, Human
gggggcugggcagag

SEQ ID NO: 1682833 - RNA, 18 nt, Human
aaaauguauguguaagua

SEQ ID NO: 1682834 - RNA, 12 nt, Human
ggggaccagagc

SEQ ID NO: 1682835 - RNA, 13 nt, Human
ggggaccagagcu

SEQ ID NO: 1682836 - RNA, 14 nt, Human
ggggaccagagcug

SEQ ID NO: 1682837 - RNA, 15 nt, Human
ggggaccagagcugc

SEQ ID NO: 1682838 - RNA, 17 nt, Human
aaaccuucacuuaggaa

SEQ ID NO: 1682839 - RNA, 22 nt, Human
aaaccugugucucugagaguag

SEQ ID NO: 1682840 - RNA, 22 nt, Human
gggucacucuggcagcucagag

SEQ ID NO: 1682841 - RNA, 14 nt, Human
gggucacucuggca

SEQ ID NO: 1682842 - RNA, 20 nt, Human
gggucacucuggcagcucag

SEQ ID NO: 1682843 - RNA, 19 nt, Human
aaacauuuugucauauaag

SEQ ID NO: 1682844 - RNA, 22 nt, Human
gguaaaucagacuaugaaguuu

SEQ ID NO: 1682845 - RNA, 13 nt, Human
gguaacaggcaga

SEQ ID NO: 1682846 - RNA, 15 nt, Human
gggugguggugauag

SEQ ID NO: 1682847 - RNA, 19 nt, Human
gggugggacacccugugau

SEQ ID NO: 1682848 - RNA, 23 nt, Human
ggguuuugccauguuggccaggc

SEQ ID NO: 1682849 - RNA, 20 nt, Human
ggguuuugccauguuggcca

SEQ ID NO: 1682850 - RNA, 21 nt, Human
aaacguggcugcuucaaggau

SEQ ID NO: 1682851 - RNA, 14 nt, Human
aaacuuaaucuaaa

SEQ ID NO: 1682852 - RNA, 15 nt, Human
gggugggacacccug

SEQ ID NO: 1682853 - RNA, 18 nt, Human
gggugggacacccuguga

SEQ ID NO: 1682854 - RNA, 14 nt, Human
gguaucaggugcug

SEQ ID NO: 1682855 - RNA, 11 nt, Human
gguaggguggg

SEQ ID NO: 1682856 - RNA, 23 nt, Human
gguagggugggccuucagggagu

SEQ ID NO: 1682857 - RNA, 20 nt, Human
gguaggguaagugagagagg

SEQ ID NO: 1682858 - RNA, 20 nt, Human
gguaaggaauaccugucccc

SEQ ID NO: 1682859 - RNA, 16 nt, Human
gguaacucuucuugau

SEQ ID NO: 1682860 - RNA, 22 nt, Human
aaacuugauguguuaucucuua

SEQ ID NO: 1682861 - RNA, 19 nt, Human
gguaucaggugcugccauc

SEQ ID NO: 1682862 - RNA, 14 nt, Human
ggucagugcaaaua

SEQ ID NO: 1682863 - RNA, 19 nt, Human
gggcugcaccggcuggccu

SEQ ID NO: 1682864 - RNA, 21 nt, Human
gggcucagcggggacagcucc

SEQ ID NO: 1682865 - RNA, 10 nt, Human
gggcuccaga

SEQ ID NO: 1682866 - RNA, 13 nt, Human
gggcuccagacac

SEQ ID NO: 1682867 - RNA, 20 nt, Human
gggcuaggaaauccagggug

SEQ ID NO: 1682868 - RNA, 15 nt, Human
gggcuaguugggcuu

SEQ ID NO: 1682869 - RNA, 18 nt, Human
gggcuaguugggcuuccu

SEQ ID NO: 1682870 - RNA, 22 nt, Human
gggcucagcaaaagaugcuucu

SEQ ID NO: 1682871 - RNA, 17 nt, Human
gggcucagcggggacag

SEQ ID NO: 1682872 - RNA, 19 nt, Human
gggcucagcggggacagcu

SEQ ID NO: 1682873 - RNA, 20 nt, Human
gggcugcaccggcuggccug

SEQ ID NO: 1682874 - RNA, 21 nt, Human
gggcugcaccggcuggccugg

SEQ ID NO: 1682875 - RNA, 15 nt, Human
gggcugggcagagga

SEQ ID NO: 1682876 - RNA, 16 nt, Human
aaaaugguuuaaaugg

SEQ ID NO: 1682877 - RNA, 18 nt, Human
aaaaugguuuaaaugguc

SEQ ID NO: 1682878 - RNA, 17 nt, Human
gggcuggguucuaccca

SEQ ID NO: 1682879 - RNA, 16 nt, Human
aaaauggguuuuacug

SEQ ID NO: 1682880 - RNA, 13 nt, Human
gggccaggagccu

SEQ ID NO: 1682881 - RNA, 14 nt, Human
gggccaggagccuc

SEQ ID NO: 1682882 - RNA, 15 nt, Human
gggccucagugccac

SEQ ID NO: 1682883 - RNA, 13 nt, Human
gggccucagugcc

SEQ ID NO: 1682884 - RNA, 14 nt, Human
gggccucagugcca

SEQ ID NO: 1682885 - RNA, 19 nt, Human
gggccucuuaugggcuggg

SEQ ID NO: 1682886 - RNA, 18 nt, Human
gggccucuuaugggcugg

SEQ ID NO: 1682887 - RNA, 22 nt, Human
gggccucgguguggagaagcgg

SEQ ID NO: 1682888 - RNA, 18 nt, Human
gggcgugagaccugcccc

SEQ ID NO: 1682889 - RNA, 19 nt, Human
gggcgugagaccugccccu

SEQ ID NO: 1682890 - RNA, 21 nt, Human
gggcggugagaggggaacaga

SEQ ID NO: 1682891 - RNA, 15 nt, Human
gggcgugguggugag

SEQ ID NO: 1682892 - RNA, 13 nt, Human
aaaaggaugcaca

SEQ ID NO: 1682893 - RNA, 22 nt, Human
aaaaggagccaauuuaaagaaa

SEQ ID NO: 1682894 - RNA, 22 nt, Human
aaaaggaugcacagaguuguua

SEQ ID NO: 1682895 - RNA, 19 nt, Human
aaaaggaugcacagaguug

SEQ ID NO: 1682896 - RNA, 15 nt, Human
aaaaggaugcacaga

SEQ ID NO: 1682897 - RNA, 14 nt, Human
aaaaggaugcacag

SEQ ID NO: 1682898 - RNA, 16 nt, Human
aaaagguuaauaaagu

SEQ ID NO: 1682899 - RNA, 17 nt, Human
aaaagguuaauaaagua

SEQ ID NO: 1682900 - RNA, 11 nt, Human
aaaaggcagga

SEQ ID NO: 1682901 - RNA, 11 nt, Human
aaaauaauuuu

SEQ ID NO: 1682902 - RNA, 14 nt, Human
aaaauaccaaggaa

SEQ ID NO: 1682903 - RNA, 13 nt, Human
aaaauaccaagga

SEQ ID NO: 1682904 - RNA, 16 nt, Human
aaaauaauuuuuauau

SEQ ID NO: 1682905 - RNA, 17 nt, Human
aaaauaauuuuuauauu

SEQ ID NO: 1682906 - RNA, 20 nt, Human
aaaauaauuuuuauauuuga

SEQ ID NO: 1682907 - RNA, 14 nt, Human
aaaauacacacuca

SEQ ID NO: 1682908 - RNA, 11 nt, Human
aaaaugagaaa

SEQ ID NO: 1682909 - RNA, 12 nt, Human
aaaaugagaaau

SEQ ID NO: 1682910 - RNA, 23 nt, Human
aaaaugcuguauuagucacagag

SEQ ID NO: 1682911 - RNA, 20 nt, Human
aaaauggaagacagcucuua

SEQ ID NO: 1682912 - RNA, 15 nt, Human
aaaauauuuuaugau

SEQ ID NO: 1682913 - RNA, 18 nt, Human
aaaauauuuuaugaucca

SEQ ID NO: 1682914 - RNA, 16 nt, Human
aaaauauuuuccugcc

SEQ ID NO: 1682915 - RNA, 22 nt, Human
aaaauaugaccacacuccagcu

SEQ ID NO: 1682916 - RNA, 15 nt, Human
aaaauauuccugcau

SEQ ID NO: 1682917 - RNA, 13 nt, Human
ggccccugccucu

SEQ ID NO: 1682918 - RNA, 17 nt, Human
ggccccugccucucugc

SEQ ID NO: 1682919 - RNA, 18 nt, Human
ggccccugccucucugca

SEQ ID NO: 1682920 - RNA, 19 nt, Human
ggccccugccucucugcag

SEQ ID NO: 1682921 - RNA, 21 nt, Human
ggccccugccucucugcaggu

SEQ ID NO: 1682922 - RNA, 17 nt, Human
ggccagaugcaccagcc

SEQ ID NO: 1682923 - RNA, 22 nt, Human
ggccagagggagugacagaggc

SEQ ID NO: 1682924 - RNA, 15 nt, Human
ggccagaugcaccag

SEQ ID NO: 1682925 - RNA, 16 nt, Human
ggccagaugcaccagc

SEQ ID NO: 1682926 - RNA, 23 nt, Human
ggccucccaacucaccccagccc

SEQ ID NO: 1682927 - RNA, 20 nt, Human
ggccucccaacucaccccag

SEQ ID NO: 1682928 - RNA, 22 nt, Human
ggccucccaacucaccccagcc

SEQ ID NO: 1682929 - RNA, 13 nt, Human
ggccucagugcca

SEQ ID NO: 1682930 - RNA, 17 nt, Human
ggccucccaacucaccc

SEQ ID NO: 1682931 - RNA, 18 nt, Human
ggccucccaacucacccc

SEQ ID NO: 1682932 - RNA, 19 nt, Human
ggccucccaacucacccca

SEQ ID NO: 1682933 - RNA, 17 nt, Human
ggccuucagggagugag

SEQ ID NO: 1682934 - RNA, 16 nt, Human
ggccuggccagaugca

SEQ ID NO: 1682935 - RNA, 14 nt, Human
ggccuggcagccgu

SEQ ID NO: 1682936 - RNA, 15 nt, Human
ggccuggcagccgug

SEQ ID NO: 1682937 - RNA, 12 nt, Human
ggccuggccaga

SEQ ID NO: 1682938 - RNA, 15 nt, Human
ggccuggccagaugc

SEQ ID NO: 1682939 - RNA, 11 nt, Human
ggccugccugu

SEQ ID NO: 1682940 - RNA, 16 nt, Human
ggccugcaagggagug

SEQ ID NO: 1682941 - RNA, 16 nt, Human
ggcuagagguucaaag

SEQ ID NO: 1682942 - RNA, 14 nt, Human
ggcuaccuuuguau

SEQ ID NO: 1682943 - RNA, 23 nt, Human
ggcuacaccuuagccugcccucc

SEQ ID NO: 1682944 - RNA, 22 nt, Human
ggcuacaccuuagccugcccuc

SEQ ID NO: 1682945 - RNA, 13 nt, Human
ggcuaccuuugua

SEQ ID NO: 1682946 - RNA, 18 nt, Human
ggcuaauuuuuguuuugu

SEQ ID NO: 1682947 - RNA, 20 nt, Human
ggcuaagugauccucccacc

SEQ ID NO: 1682948 - RNA, 16 nt, Human
ggcuaauguacugcau

SEQ ID NO: 1682949 - RNA, 14 nt, Human
ggcgugagaccugc

SEQ ID NO: 1682950 - RNA, 16 nt, Human
ggcgugagaccugccc

SEQ ID NO: 1682951 - RNA, 17 nt, Human
ggcgugagaccugcccc

SEQ ID NO: 1682952 - RNA, 18 nt, Human
ggcgugagaccugccccu

SEQ ID NO: 1682953 - RNA, 14 nt, Human
ggcgugcaguggug

SEQ ID NO: 1682954 - RNA, 20 nt, Human
ggcuaagcuucacuguaaaa

SEQ ID NO: 1682955 - RNA, 18 nt, Human
ggccuucggccuccaucc

SEQ ID NO: 1682956 - RNA, 22 nt, Human
ggccuucggccuccauccugag

SEQ ID NO: 1682957 - RNA, 16 nt, Human
ggccuucggccuccau

SEQ ID NO: 1682958 - RNA, 14 nt, Human
ggcuggguuggagg

SEQ ID NO: 1682959 - RNA, 22 nt, Human
ggcuggguucuacccaggugcu

SEQ ID NO: 1682960 - RNA, 13 nt, Human
aaaaauacaaaaa

SEQ ID NO: 1682961 - RNA, 14 nt, Human
aaaaauaaaaaaca

SEQ ID NO: 1682962 - RNA, 21 nt, Human
aaaaaggaugcacagaguugu

SEQ ID NO: 1682963 - RNA, 12 nt, Human
aaaaaggcagga

SEQ ID NO: 1682964 - RNA, 14 nt, Human
aaaaaggaggaaga

SEQ ID NO: 1682965 - RNA, 22 nt, Human
aaaaaacugcugacuguuuucu

SEQ ID NO: 1682966 - RNA, 13 nt, Human
ggcuggccuggcc

SEQ ID NO: 1682967 - RNA, 14 nt, Human
ggcuggccuggccc

SEQ ID NO: 1682968 - RNA, 15 nt, Human
ggcuggccuggcccc

SEQ ID NO: 1682969 - RNA, 12 nt, Human
ggcugcccuggu

SEQ ID NO: 1682970 - RNA, 10 nt, Human
ggcugcccuu

SEQ ID NO: 1682971 - RNA, 11 nt, Human
ggcugcccuuu

SEQ ID NO: 1682972 - RNA, 14 nt, Human
ggcugcccuuucug

SEQ ID NO: 1682973 - RNA, 18 nt, Human
ggcugcccuuucugggca

SEQ ID NO: 1682974 - RNA, 13 nt, Human
ggcucccuuccca

SEQ ID NO: 1682975 - RNA, 15 nt, Human
ggcucuuccaggcug

SEQ ID NO: 1682976 - RNA, 17 nt, Human
ggcucuuccaggcuggg

SEQ ID NO: 1682977 - RNA, 18 nt, Human
ggcucuuccaggcuggga

SEQ ID NO: 1682978 - RNA, 20 nt, Human
ggcucuuccaggcugggaga

SEQ ID NO: 1682979 - RNA, 13 nt, Human
ggcucacugcagc

SEQ ID NO: 1682980 - RNA, 14 nt, Human
ggcucacugcagcc

SEQ ID NO: 1682981 - RNA, 15 nt, Human
ggcucacugcagccu

SEQ ID NO: 1682982 - RNA, 14 nt, Human
ggauuguaguccca

SEQ ID NO: 1682983 - RNA, 13 nt, Human
ggauuguccccga

SEQ ID NO: 1682984 - RNA, 14 nt, Human
ggaugaaaaaauaa

SEQ ID NO: 1682985 - RNA, 17 nt, Human
ggauuuaacagaaaugu

SEQ ID NO: 1682986 - RNA, 16 nt, Human
ggauuuaacagaaaug

SEQ ID NO: 1682987 - RNA, 22 nt, Human
ggauuuaacagaaauguacagc

SEQ ID NO: 1682988 - RNA, 12 nt, Human
ggauuuaacaga

SEQ ID NO: 1682989 - RNA, 16 nt, Human
ggauuguccccgaccc

SEQ ID NO: 1682990 - RNA, 20 nt, Human
ggauuguccccgacccuugc

SEQ ID NO: 1682991 - RNA, 16 nt, Human
ggaguucaucuugaau

SEQ ID NO: 1682992 - RNA, 15 nt, Human
ggauccugagccaga

SEQ ID NO: 1682993 - RNA, 16 nt, Human
ggauccugagccagau

SEQ ID NO: 1682994 - RNA, 18 nt, Human
ggauccugagccagauuu

SEQ ID NO: 1682995 - RNA, 19 nt, Human
ggauccugagccagauuuc

SEQ ID NO: 1682996 - RNA, 20 nt, Human
ggauccugagccagauuuca

SEQ ID NO: 1682997 - RNA, 23 nt, Human
ggauccugagccagauuucacuc

SEQ ID NO: 1682998 - RNA, 18 nt, Human
ggaucucuugagccuggg

SEQ ID NO: 1682999 - RNA, 16 nt, Human
ggaguggccacagaaa

SEQ ID NO: 1683000 - RNA, 12 nt, Human
ggagugggccca

SEQ ID NO: 1683001 - RNA, 22 nt, Human
ggagugggcccaaugcacuuug

SEQ ID NO: 1683002 - RNA, 15 nt, Human
ggaguggccacagaa

SEQ ID NO: 1683003 - RNA, 22 nt, Human
ggagguaaggaauaccuguccc

SEQ ID NO: 1683004 - RNA, 21 nt, Human
ggagggugacgggggugaacu

SEQ ID NO: 1683005 - RNA, 22 nt, Human
ggaggugggauccuccaggugc

SEQ ID NO: 1683006 - RNA, 23 nt, Human
ggaggugggauccuccaggugca

SEQ ID NO: 1683007 - RNA, 13 nt, Human
ggaggggggaggu

SEQ ID NO: 1683008 - RNA, 14 nt, Human
ggaggggggaggug

SEQ ID NO: 1683009 - RNA, 15 nt, Human
ggaggcucuggagcc

SEQ ID NO: 1683010 - RNA, 17 nt, Human
ggccagagacacaagcc

SEQ ID NO: 1683011 - RNA, 18 nt, Human
ggccagagacacaagccu

SEQ ID NO: 1683012 - RNA, 17 nt, Human
ggccagagggagugaca

SEQ ID NO: 1683013 - RNA, 19 nt, Human
ggccagagggagugacaga

SEQ ID NO: 1683014 - RNA, 17 nt, Human
ggcauuuguuugaacug

SEQ ID NO: 1683015 - RNA, 14 nt, Human
ggccaaaggaagca

SEQ ID NO: 1683016 - RNA, 16 nt, Human
ggccaaaggaagcaca

SEQ ID NO: 1683017 - RNA, 21 nt, Human
ggccaaaggaagcacaugccu

SEQ ID NO: 1683018 - RNA, 19 nt, Human
ggccaaaggaagcacaugc

SEQ ID NO: 1683019 - RNA, 20 nt, Human
ggcaucgcaauguaagacuc

SEQ ID NO: 1683020 - RNA, 14 nt, Human
ggcauuugcugaau

SEQ ID NO: 1683021 - RNA, 19 nt, Human
ggcagggagggccugggcc

SEQ ID NO: 1683022 - RNA, 20 nt, Human
ggcagggagggccugggccc

SEQ ID NO: 1683023 - RNA, 17 nt, Human
ggcagggagggccuggg

SEQ ID NO: 1683024 - RNA, 18 nt, Human
ggcagggagggccugggc

SEQ ID NO: 1683025 - RNA, 10 nt, Human
ggcagggagg

SEQ ID NO: 1683026 - RNA, 18 nt, Human
ggcaggaggaucacuuga

SEQ ID NO: 1683027 - RNA, 14 nt, Human
ggcagccaggccac

SEQ ID NO: 1683028 - RNA, 13 nt, Human
ggcagccaggcca

SEQ ID NO: 1683029 - RNA, 22 nt, Human
ggcacugcuuccagugaggcuc

SEQ ID NO: 1683030 - RNA, 20 nt, Human
ggcacugcuuccagugaggc

SEQ ID NO: 1683031 - RNA, 16 nt, Human
ggcagccucuucaaaa

SEQ ID NO: 1683032 - RNA, 23 nt, Human
ggcagccccauucugccugccca

SEQ ID NO: 1683033 - RNA, 22 nt, Human
ggcagccccauucugccugccc

SEQ ID NO: 1683034 - RNA, 16 nt, Human
ggcagccccauucugc

SEQ ID NO: 1683035 - RNA, 20 nt, Human
ggcagccccauucugccugc

SEQ ID NO: 1683036 - RNA, 21 nt, Human
ggcagccccauucugccugcc

SEQ ID NO: 1683037 - RNA, 18 nt, Human
ggcacaucagcacgauuu

SEQ ID NO: 1683038 - RNA, 16 nt, Human
ggcacugcuuccagug

SEQ ID NO: 1683039 - RNA, 18 nt, Human
ggcacaccgggcacucag

SEQ ID NO: 1683040 - RNA, 15 nt, Human
ggcaaaaaggcagga

SEQ ID NO: 1683041 - RNA, 10 nt, Human
ggcaaaauaa

SEQ ID NO: 1683042 - RNA, 20 nt, Human
gcugccccuggcagccccug

SEQ ID NO: 1683043 - RNA, 18 nt, Human
gcugccccuggcagcccc

SEQ ID NO: 1683044 - RNA, 19 nt, Human
gcugccccuggcagccccu

SEQ ID NO: 1683045 - RNA, 21 nt, Human
gcugccugggaucccucaucc

SEQ ID NO: 1683046 - RNA, 23 nt, Human
gcugcucuugaacuccugaccuc

SEQ ID NO: 1683047 - RNA, 17 nt, Human
gcugccuguucagcucc

SEQ ID NO: 1683048 - RNA, 12 nt, Human
gcugccuguuca

SEQ ID NO: 1683049 - RNA, 13 nt, Human
gcugccuguucag

SEQ ID NO: 1683050 - RNA, 20 nt, Human
gcugccugggaucccucauc

SEQ ID NO: 1683051 - RNA, 16 nt, Human
gcugccucucccauca

SEQ ID NO: 1683052 - RNA, 13 nt, Human
gcugccucaugcu

SEQ ID NO: 1683053 - RNA, 14 nt, Human
gcugccuccccucc

SEQ ID NO: 1683054 - RNA, 18 nt, Human
gcugcacccucaggcagg

SEQ ID NO: 1683055 - RNA, 19 nt, Human
gcugcacccucaggcaggu

SEQ ID NO: 1683056 - RNA, 13 nt, Human
gcugcaccggcug

SEQ ID NO: 1683057 - RNA, 14 nt, Human
gcugcaccggcugg

SEQ ID NO: 1683058 - RNA, 23 nt, Human
gcugagggugagugggugaauaa

SEQ ID NO: 1683059 - RNA, 14 nt, Human
gcugaggugggagg

SEQ ID NO: 1683060 - RNA, 15 nt, Human
gcugaggugggagga

SEQ ID NO: 1683061 - RNA, 20 nt, Human
gcuggcuguuggcugggggc

SEQ ID NO: 1683062 - RNA, 23 nt, Human
gcuggcuguuggcugggggccuc

SEQ ID NO: 1683063 - RNA, 12 nt, Human
gcugggccccug

SEQ ID NO: 1683064 - RNA, 13 nt, Human
gcugggccccugc

SEQ ID NO: 1683065 - RNA, 14 nt, Human
gcugggccccugcc

SEQ ID NO: 1683066 - RNA, 18 nt, Human
gcugggccccugccucuc

SEQ ID NO: 1683067 - RNA, 20 nt, Human
gcugggccccugccucucug

SEQ ID NO: 1683068 - RNA, 17 nt, Human
gcugggguggggaccuc

SEQ ID NO: 1683069 - RNA, 19 nt, Human
gcugggguggggaccucag

SEQ ID NO: 1683070 - RNA, 22 nt, Human
gcugggguggggaccucaggcc

SEQ ID NO: 1683071 - RNA, 23 nt, Human
gcugggguggggaccucaggccu

SEQ ID NO: 1683072 - RNA, 18 nt, Human
gcuggguucuacccaggu

SEQ ID NO: 1683073 - RNA, 17 nt, Human
gcuggguucuacccagg

SEQ ID NO: 1683074 - RNA, 20 nt, Human
gcuggguucuacccaggugc

SEQ ID NO: 1683075 - RNA, 21 nt, Human
gcuggguucuacccaggugcu

SEQ ID NO: 1683076 - RNA, 20 nt, Human
gcuggcgugcaguggugcga

SEQ ID NO: 1683077 - RNA, 15 nt, Human
gcuggcgugcagugg

SEQ ID NO: 1683078 - RNA, 18 nt, Human
gcuggcgugcaguggugc

SEQ ID NO: 1683079 - RNA, 14 nt, Human
gcuggcugccuuag

SEQ ID NO: 1683080 - RNA, 20 nt, Human
gcuggcugccuuagaaccuu

SEQ ID NO: 1683081 - RNA, 11 nt, Human
gcuggcugccu

SEQ ID NO: 1683082 - RNA, 18 nt, Human
gcuggcuguuggcugggg

SEQ ID NO: 1683083 - RNA, 19 nt, Human
gcuggcuguuggcuggggg

SEQ ID NO: 1683084 - RNA, 14 nt, Human
gcuggcgugcagug

SEQ ID NO: 1683085 - RNA, 12 nt, Human
gcugcugaaggc

SEQ ID NO: 1683086 - RNA, 13 nt, Human
gcugcugaaacaa

SEQ ID NO: 1683087 - RNA, 18 nt, Human
gcugugcucuggacaggc

SEQ ID NO: 1683088 - RNA, 15 nt, Human
gcugugcucuggaca

SEQ ID NO: 1683089 - RNA, 16 nt, Human
gcugugcucuggacag

SEQ ID NO: 1683090 - RNA, 14 nt, Human
gcugugccucugcc

SEQ ID NO: 1683091 - RNA, 15 nt, Human
gcugugccucugccu

SEQ ID NO: 1683092 - RNA, 16 nt, Human
gcugugccucugccug

SEQ ID NO: 1683093 - RNA, 13 nt, Human
gcugugcucugga

SEQ ID NO: 1683094 - RNA, 16 nt, Human
gcuguuggcugggggc

SEQ ID NO: 1683095 - RNA, 20 nt, Human
gcuguuggcugggggccuca

SEQ ID NO: 1683096 - RNA, 15 nt, Human
gcugugcugcccugc

SEQ ID NO: 1683097 - RNA, 16 nt, Human
gcugugcugcccugcc

SEQ ID NO: 1683098 - RNA, 17 nt, Human
gcugugcugcccugccc

SEQ ID NO: 1683099 - RNA, 15 nt, Human
gcuguuggcuggggg

SEQ ID NO: 1683100 - RNA, 17 nt, Human
gcuguaucccaugagcc

SEQ ID NO: 1683101 - RNA, 19 nt, Human
gcuguaucccaugagccuc

SEQ ID NO: 1683102 - RNA, 20 nt, Human
gcuguauuuuaaaagaauga

SEQ ID NO: 1683103 - RNA, 18 nt, Human
gcuguauuuuaaaagaau

SEQ ID NO: 1683104 - RNA, 21 nt, Human
gcuguauuuuaaaagaaugau

SEQ ID NO: 1683105 - RNA, 19 nt, Human
ggaauacucuuauaucuau

SEQ ID NO: 1683106 - RNA, 16 nt, Human
ggaauaccuguccccc

SEQ ID NO: 1683107 - RNA, 19 nt, Human
ggaauaccugucccccuga

SEQ ID NO: 1683108 - RNA, 16 nt, Human
ggaauauauaaccagu

SEQ ID NO: 1683109 - RNA, 15 nt, Human
ggaagccugauuaaa

SEQ ID NO: 1683110 - RNA, 16 nt, Human
ggaagcucagggccug

SEQ ID NO: 1683111 - RNA, 17 nt, Human
ggaagcucagggccugg

SEQ ID NO: 1683112 - RNA, 22 nt, Human
ggaagcucagggccuggcucag

SEQ ID NO: 1683113 - RNA, 21 nt, Human
ggaagcucagggccuggcuca

SEQ ID NO: 1683114 - RNA, 15 nt, Human
ggaauaccugucccc

SEQ ID NO: 1683115 - RNA, 12 nt, Human
ggacacccugug

SEQ ID NO: 1683116 - RNA, 14 nt, Human
ggacacagcucuuc

SEQ ID NO: 1683117 - RNA, 13 nt, Human
ggacacagcucuu

SEQ ID NO: 1683118 - RNA, 19 nt, Human
ggaaugaaugucaguguga

SEQ ID NO: 1683119 - RNA, 14 nt, Human
ggaaugauuaauua

SEQ ID NO: 1683120 - RNA, 12 nt, Human
ggacacagcucu

SEQ ID NO: 1683121 - RNA, 13 nt, Human
ggacauggacaag

SEQ ID NO: 1683122 - RNA, 14 nt, Human
ggacauggacaagg

SEQ ID NO: 1683123 - RNA, 13 nt, Human
ggacacccuguga

SEQ ID NO: 1683124 - RNA, 23 nt, Human
ggacacccugugauggggcccug

SEQ ID NO: 1683125 - RNA, 17 nt, Human
ggacagggaggugaccc

SEQ ID NO: 1683126 - RNA, 22 nt, Human
ggacagggcauggccagguggc

SEQ ID NO: 1683127 - RNA, 15 nt, Human
ggacagggcauggcc

SEQ ID NO: 1683128 - RNA, 17 nt, Human
ggacagucaccucaugg

SEQ ID NO: 1683129 - RNA, 18 nt, Human
ggacagucaccucaugga

SEQ ID NO: 1683130 - RNA, 21 nt, Human
ggacagucaccucauggaauu

SEQ ID NO: 1683131 - RNA, 16 nt, Human
ggaaauccaggguggu

SEQ ID NO: 1683132 - RNA, 13 nt, Human
ggaaaucuuuaaa

SEQ ID NO: 1683133 - RNA, 23 nt, Human
ggaaaucaccgaaaacguggcug

SEQ ID NO: 1683134 - RNA, 19 nt, Human
ggaaaucaggguuaguauu

SEQ ID NO: 1683135 - RNA, 18 nt, Human
ggaagccgcuggggccag

SEQ ID NO: 1683136 - RNA, 22 nt, Human
ggaagccagcaggcucucaggc

SEQ ID NO: 1683137 - RNA, 23 nt, Human
ggaagccagcaggcucucaggcc

SEQ ID NO: 1683138 - RNA, 21 nt, Human
ggaagccagcaggcucucagg

SEQ ID NO: 1683139 - RNA, 21 nt, Human
gcuuuucccuuuuuuuaagua

SEQ ID NO: 1683140 - RNA, 20 nt, Human
gcuuuucccuuuuuuuaagu

SEQ ID NO: 1683141 - RNA, 16 nt, Human
ggaaagcccugugcuc

SEQ ID NO: 1683142 - RNA, 20 nt, Human
ggaaagacuuuuccaacccu

SEQ ID NO: 1683143 - RNA, 14 nt, Human
ggaaagaggcucug

SEQ ID NO: 1683144 - RNA, 19 nt, Human
ggaaagcaaaggagauugg

SEQ ID NO: 1683145 - RNA, 16 nt, Human
ggaaagaguaggaaga

SEQ ID NO: 1683146 - RNA, 17 nt, Human
ggaaagaguaggaagac

SEQ ID NO: 1683147 - RNA, 19 nt, Human
gcuuuugugcauuaucuag

SEQ ID NO: 1683148 - RNA, 13 nt, Human
gcuuuugugcauu

SEQ ID NO: 1683149 - RNA, 15 nt, Human
gcuuuuuaauauuga

SEQ ID NO: 1683150 - RNA, 16 nt, Human
ggaaaaaauaacaaug

SEQ ID NO: 1683151 - RNA, 15 nt, Human
ggaaacccagcucug

SEQ ID NO: 1683152 - RNA, 20 nt, Human
ggaaacagcuaaugggacac

SEQ ID NO: 1683153 - RNA, 13 nt, Human
ggaaacugccagc

SEQ ID NO: 1683154 - RNA, 18 nt, Human
ggaaacuggguuccugca

SEQ ID NO: 1683155 - RNA, 20 nt, Human
gcuugaccgugaggccagag

SEQ ID NO: 1683156 - RNA, 22 nt, Human
gcuuggggaccagagcugccac

SEQ ID NO: 1683157 - RNA, 17 nt, Human
gcuuggggaccagagcu

SEQ ID NO: 1683158 - RNA, 18 nt, Human
gcuuggggaccagagcug

SEQ ID NO: 1683159 - RNA, 20 nt, Human
gcuuggggaccagagcugcc

SEQ ID NO: 1683160 - RNA, 21 nt, Human
gcuuggggaccagagcugcca

SEQ ID NO: 1683161 - RNA, 13 nt, Human
gcuuucuacccag

SEQ ID NO: 1683162 - RNA, 19 nt, Human
gcuuucuacccagcgagcc

SEQ ID NO: 1683163 - RNA, 22 nt, Human
gcuuucuacccagcgagcccug

SEQ ID NO: 1683164 - RNA, 23 nt, Human
gcuuucuacccagcgagcccugg

SEQ ID NO: 1683165 - RNA, 16 nt, Human
gcuucuucagagacuc

SEQ ID NO: 1683166 - RNA, 17 nt, Human
gcuuaacuucacauauu

SEQ ID NO: 1683167 - RNA, 16 nt, Human
gcuuaacuucacauau

SEQ ID NO: 1683168 - RNA, 19 nt, Human
gcuucuucagagacuccug

SEQ ID NO: 1683169 - RNA, 21 nt, Human
gcuucuucagagacuccugca

SEQ ID NO: 1683170 - RNA, 23 nt, Human
gcuucuucagagacuccugcagg

SEQ ID NO: 1683171 - RNA, 17 nt, Human
gcuugaccgugaggcca

SEQ ID NO: 1683172 - RNA, 18 nt, Human
gcuugaccgugaggccag

SEQ ID NO: 1683173 - RNA, 19 nt, Human
gcuugaccgugaggccaga

SEQ ID NO: 1683174 - RNA, 23 nt, Human
gcuugggcuucauccuccucaga

SEQ ID NO: 1683175 - RNA, 16 nt, Human
gcuuggggaccagagc

SEQ ID NO: 1683176 - RNA, 15 nt, Human
gcccacuguacuugc

SEQ ID NO: 1683177 - RNA, 20 nt, Human
gcccacuguacuugcucuug

SEQ ID NO: 1683178 - RNA, 22 nt, Human
gcccacuguacuugcucuugau

SEQ ID NO: 1683179 - RNA, 23 nt, Human
gcccacgcuggagugcagugagc

SEQ ID NO: 1683180 - RNA, 19 nt, Human
gcccacgcuggagugcagu

SEQ ID NO: 1683181 - RNA, 21 nt, Human
gcccacgcuggagugcaguga

SEQ ID NO: 1683182 - RNA, 13 nt, Human
gcccacuucugcc

SEQ ID NO: 1683183 - RNA, 24 nt, Human
gcccaggaaaggcuccaggagcag

SEQ ID NO: 1683184 - RNA, 22 nt, Human
gcccaggaaaggcuccaggagc

SEQ ID NO: 1683185 - RNA, 23 nt, Human
gcccaggaaaggcuccaggagca

SEQ ID NO: 1683186 - RNA, 17 nt, Human
gccauugacuucuuccc

SEQ ID NO: 1683187 - RNA, 16 nt, Human
gcccacgcccccacug

SEQ ID NO: 1683188 - RNA, 17 nt, Human
gcccacgcccccacugg

SEQ ID NO: 1683189 - RNA, 21 nt, Human
gcccacgcccccacuggugac

SEQ ID NO: 1683190 - RNA, 13 nt, Human
gccauguuuauua

SEQ ID NO: 1683191 - RNA, 11 nt, Human
gccauguuuau

SEQ ID NO: 1683192 - RNA, 14 nt, Human
gccauguuuauuac

SEQ ID NO: 1683193 - RNA, 18 nt, Human
gccauguuuauuacagua

SEQ ID NO: 1683194 - RNA, 22 nt, Human
gccauguuuauuacaguauaau

SEQ ID NO: 1683195 - RNA, 13 nt, Human
gcauuuagaugua

SEQ ID NO: 1683196 - RNA, 19 nt, Human
gcauuuaggccaugggaca

SEQ ID NO: 1683197 - RNA, 18 nt, Human
gcauuuacuuuguguuca

SEQ ID NO: 1683198 - RNA, 12 nt, Human
gcauuuagaugu

SEQ ID NO: 1683199 - RNA, 12 nt, Human
gcccaggcaggu

SEQ ID NO: 1683200 - RNA, 11 nt, Human
gcccaggcagg

SEQ ID NO: 1683201 - RNA, 11 nt, Human
gcccaggcccc

SEQ ID NO: 1683202 - RNA, 12 nt, Human
gcccaggccccu

SEQ ID NO: 1683203 - RNA, 20 nt, Human
gcccaggccccugccacccu

SEQ ID NO: 1683204 - RNA, 21 nt, Human
gcccaggccccugccacccug

SEQ ID NO: 1683205 - RNA, 22 nt, Human
gcccaggccccugccacccugg

SEQ ID NO: 1683206 - RNA, 15 nt, Human
gcccccucugcccug

SEQ ID NO: 1683207 - RNA, 16 nt, Human
gcccccucugcccugc

SEQ ID NO: 1683208 - RNA, 12 nt, Human
gccccugcuggu

SEQ ID NO: 1683209 - RNA, 17 nt, Human
gcccccucugcccugcg

SEQ ID NO: 1683210 - RNA, 15 nt, Human
gccccugcugguuca

SEQ ID NO: 1683211 - RNA, 16 nt, Human
gccccugcugguucag

SEQ ID NO: 1683212 - RNA, 12 nt, Human
gccccuggcagc

SEQ ID NO: 1683213 - RNA, 15 nt, Human
gccccuggcagcccc

SEQ ID NO: 1683214 - RNA, 20 nt, Human
gccccaaaacucuccucugc

SEQ ID NO: 1683215 - RNA, 21 nt, Human
gccccaaaacucuccucugcu

SEQ ID NO: 1683216 - RNA, 11 nt, Human
gccccaaaagg

SEQ ID NO: 1683217 - RNA, 16 nt, Human
gccucgaacuggcugc

SEQ ID NO: 1683218 - RNA, 22 nt, Human
gccuccuuugugaggaagccgc

SEQ ID NO: 1683219 - RNA, 13 nt, Human
gccucgaacuggc

SEQ ID NO: 1683220 - RNA, 19 nt, Human
gccuccugaguagcuggga

SEQ ID NO: 1683221 - RNA, 18 nt, Human
gccuccugcccuuaccug

SEQ ID NO: 1683222 - RNA, 13 nt, Human
gccuccauccuga

SEQ ID NO: 1683223 - RNA, 14 nt, Human
gccuccauccugag

SEQ ID NO: 1683224 - RNA, 15 nt, Human
gccuccauccugagg

SEQ ID NO: 1683225 - RNA, 19 nt, Human
gccucaugcuaagacucag

SEQ ID NO: 1683226 - RNA, 22 nt, Human
gccucauguccacugguucuuc

SEQ ID NO: 1683227 - RNA, 17 nt, Human
gccuacaggagugagca

SEQ ID NO: 1683228 - RNA, 19 nt, Human
gccuagcauacguacacau

SEQ ID NO: 1683229 - RNA, 12 nt, Human
gccuagcauacg

SEQ ID NO: 1683230 - RNA, 14 nt, Human
gcccuuccucucca

SEQ ID NO: 1683231 - RNA, 15 nt, Human
gcccuuccucuccac

SEQ ID NO: 1683232 - RNA, 22 nt, Human
gcccuuccaugucgccucugca

SEQ ID NO: 1683233 - RNA, 12 nt, Human
gcccuuccucuc

SEQ ID NO: 1683234 - RNA, 12 nt, Human
gcccuuccaugu

SEQ ID NO: 1683235 - RNA, 21 nt, Human
gcccuuccaugucgccucugc

SEQ ID NO: 1683236 - RNA, 16 nt, Human
gccuacaggagugagc

SEQ ID NO: 1683237 - RNA, 13 nt, Human
gcccugugcucca

SEQ ID NO: 1683238 - RNA, 20 nt, Human
gcccugcgggucacaggagg

SEQ ID NO: 1683239 - RNA, 14 nt, Human
gcccugcccaccug

SEQ ID NO: 1683240 - RNA, 15 nt, Human
gcccugcccaccugg

SEQ ID NO: 1683241 - RNA, 19 nt, Human
gcccuuagcagggaaacag

SEQ ID NO: 1683242 - RNA, 23 nt, Human
gcccuuaccugccaggaagccag

SEQ ID NO: 1683243 - RNA, 21 nt, Human
gcccugugggcccccaaaugg

SEQ ID NO: 1683244 - RNA, 16 nt, Human
gcccugugggccccca

SEQ ID NO: 1683245 - RNA, 17 nt, Human
gcccugugggcccccaa

SEQ ID NO: 1683246 - RNA, 22 nt, Human
gcccuuaccugccaggaagcca

SEQ ID NO: 1683247 - RNA, 21 nt, Human
gccccugcugguucaggguug

SEQ ID NO: 1683248 - RNA, 16 nt, Human
gccccuggcagccccu

SEQ ID NO: 1683249 - RNA, 17 nt, Human
gccccuggcagccccug

SEQ ID NO: 1683250 - RNA, 18 nt, Human
gcguugaaauuguaauua

SEQ ID NO: 1683251 - RNA, 11 nt, Human
gcuaaggacuu

SEQ ID NO: 1683252 - RNA, 12 nt, Human
gcuaaggacuug

SEQ ID NO: 1683253 - RNA, 12 nt, Human
gcguugaaauug

SEQ ID NO: 1683254 - RNA, 23 nt, Human
gcuaaggacuuguuagaucuagu

SEQ ID NO: 1683255 - RNA, 22 nt, Human
gcguucauggaacgcguugaaa

SEQ ID NO: 1683256 - RNA, 15 nt, Human
gcggcuggcagccca

SEQ ID NO: 1683257 - RNA, 21 nt, Human
gccuucuuuucucccuuuuaa

SEQ ID NO: 1683258 - RNA, 14 nt, Human
gccuugaacuuuga

SEQ ID NO: 1683259 - RNA, 15 nt, Human
gccuucucugaagga

SEQ ID NO: 1683260 - RNA, 16 nt, Human
gccuucucugaaggac

SEQ ID NO: 1683261 - RNA, 15 nt, Human
gccuguucagcucca

SEQ ID NO: 1683262 - RNA, 16 nt, Human
gccuguucagcuccag

SEQ ID NO: 1683263 - RNA, 17 nt, Human
gccuguucagcuccagc

SEQ ID NO: 1683264 - RNA, 23 nt, Human
gccugggaucccucauccucaua

SEQ ID NO: 1683265 - RNA, 11 nt, Human
gccugggcaga

SEQ ID NO: 1683266 - RNA, 19 nt, Human
gccugugccucugggacug

SEQ ID NO: 1683267 - RNA, 23 nt, Human
gccuugaacuuugaccucugcag

SEQ ID NO: 1683268 - RNA, 16 nt, Human
gccuugaccauucucc

SEQ ID NO: 1683269 - RNA, 22 nt, Human
gccuugaccauucuccaccugc

SEQ ID NO: 1683270 - RNA, 22 nt, Human
gcgauucuucugcuucagccuc

SEQ ID NO: 1683271 - RNA, 23 nt, Human
gccuugaccauucuccaccugcc

SEQ ID NO: 1683272 - RNA, 14 nt, Human
gcgcaggcuggccc

SEQ ID NO: 1683273 - RNA, 21 nt, Human
gcgcagcauauucaggaagcu

SEQ ID NO: 1683274 - RNA, 23 nt, Human
gcgauucuucugcuucagccucc

SEQ ID NO: 1683275 - RNA, 15 nt, Human
gcgcaggcuggcccu

SEQ ID NO: 1683276 - RNA, 16 nt, Human
gcgcaggcuggcccug

SEQ ID NO: 1683277 - RNA, 18 nt, Human
gcuaagugauccucccac

SEQ ID NO: 1683278 - RNA, 22 nt, Human
gcuaagugauccucccaccuca

SEQ ID NO: 1683279 - RNA, 18 nt, Human
gcuauuucuauauuuuca

SEQ ID NO: 1683280 - RNA, 19 nt, Human
gcuauuucuauauuuucau

SEQ ID NO: 1683281 - RNA, 20 nt, Human
gcuauuucuauauuuucauu

SEQ ID NO: 1683282 - RNA, 22 nt, Human
gcuauuucuauauuuucauucu

SEQ ID NO: 1683283 - RNA, 11 nt, Human
gcuauuucuau

SEQ ID NO: 1683284 - RNA, 13 nt, Human
gcuauuucuauau

SEQ ID NO: 1683285 - RNA, 15 nt, Human
gcuauuucuauauuu

SEQ ID NO: 1683286 - RNA, 16 nt, Human
gcuauuucuauauuuu

SEQ ID NO: 1683287 - RNA, 18 nt, Human
gcuauucaguaauaacuc

SEQ ID NO: 1683288 - RNA, 21 nt, Human
gcuaguugggcuuccucauag

SEQ ID NO: 1683289 - RNA, 14 nt, Human
gcuaguugggcuuc

SEQ ID NO: 1683290 - RNA, 16 nt, Human
gcuaguugggcuuccu

SEQ ID NO: 1683291 - RNA, 21 nt, Human
gcuaggaauuguguuuauaau

SEQ ID NO: 1683292 - RNA, 22 nt, Human
gcuaggaccccuccaugugggc

SEQ ID NO: 1683293 - RNA, 20 nt, Human
gcuaggaccccuccaugugg

SEQ ID NO: 1683294 - RNA, 16 nt, Human
gcucagagcaguguuu

SEQ ID NO: 1683295 - RNA, 22 nt, Human
gcucaggagcccugggaggcuc

SEQ ID NO: 1683296 - RNA, 23 nt, Human
gcucaggagcccugggaggcucu

SEQ ID NO: 1683297 - RNA, 13 nt, Human
gcucaggaguuug

SEQ ID NO: 1683298 - RNA, 18 nt, Human
gcucagggccuggcucag

SEQ ID NO: 1683299 - RNA, 19 nt, Human
gcucagggccuggcucagg

SEQ ID NO: 1683300 - RNA, 20 nt, Human
gcucagggccuggcucaggu

SEQ ID NO: 1683301 - RNA, 18 nt, Human
gcauccaguaucuugaag

SEQ ID NO: 1683302 - RNA, 14 nt, Human
gcauccaguaucuu

SEQ ID NO: 1683303 - RNA, 17 nt, Human
gcauccaguaucuugaa

SEQ ID NO: 1683304 - RNA, 19 nt, Human
gcaugugaugagaggaaau

SEQ ID NO: 1683305 - RNA, 21 nt, Human
gcaugugaugagaggaaauca

SEQ ID NO: 1683306 - RNA, 13 nt, Human
gcauugugggaag

SEQ ID NO: 1683307 - RNA, 15 nt, Human
gcauugugggaaggg

SEQ ID NO: 1683308 - RNA, 17 nt, Human
gcauuuaaaagauacag

SEQ ID NO: 1683309 - RNA, 16 nt, Human
gcauuuaaaagauaca

SEQ ID NO: 1683310 - RNA, 16 nt, Human
gcauugugggaagggg

SEQ ID NO: 1683311 - RNA, 18 nt, Human
gcauugugggaaggggag

SEQ ID NO: 1683312 - RNA, 22 nt, Human
gcauuuaaaagauacaguuacu

SEQ ID NO: 1683313 - RNA, 18 nt, Human
gcauuuaaaagauacagu

SEQ ID NO: 1683314 - RNA, 15 nt, Human
gcauuuacuuugugu

SEQ ID NO: 1683315 - RNA, 21 nt, Human
gcauggcugccaaugggagcu

SEQ ID NO: 1683316 - RNA, 13 nt, Human
gcaugggaaugaa

SEQ ID NO: 1683317 - RNA, 14 nt, Human
gcauccuggcaccc

SEQ ID NO: 1683318 - RNA, 17 nt, Human
gcauccuccgccucccg

SEQ ID NO: 1683319 - RNA, 13 nt, Human
gcauccuggcacc

SEQ ID NO: 1683320 - RNA, 20 nt, Human
gcaucuagcaugucgucaaa

SEQ ID NO: 1683321 - RNA, 18 nt, Human
gcauacguacacauuuua

SEQ ID NO: 1683322 - RNA, 17 nt, Human
gcauacguacacauuuu

SEQ ID NO: 1683323 - RNA, 16 nt, Human
gcauacguacacauuu

SEQ ID NO: 1683324 - RNA, 15 nt, Human
gcauacguacacauu

SEQ ID NO: 1683325 - RNA, 22 nt, Human
gcaguuguugcccacagcugua

SEQ ID NO: 1683326 - RNA, 13 nt, Human
gcagugaugucac

SEQ ID NO: 1683327 - RNA, 20 nt, Human
gcacucagaagacacugaug

SEQ ID NO: 1683328 - RNA, 18 nt, Human
gcaagugagagcugggug

SEQ ID NO: 1683329 - RNA, 19 nt, Human
gcaagugagagcugggugu

SEQ ID NO: 1683330 - RNA, 15 nt, Human
gcacuccccugcugg

SEQ ID NO: 1683331 - RNA, 16 nt, Human
gcacuccccugcuggg

SEQ ID NO: 1683332 - RNA, 18 nt, Human
gcacuuuguucuggcucu

SEQ ID NO: 1683333 - RNA, 19 nt, Human
gcacuuuguucuggcucuu

SEQ ID NO: 1683334 - RNA, 13 nt, Human
gcacuccccugcu

SEQ ID NO: 1683335 - RNA, 14 nt, Human
gcacuccccugcug

SEQ ID NO: 1683336 - RNA, 14 nt, Human
gcacuccagccugg

SEQ ID NO: 1683337 - RNA, 15 nt, Human
gcacuccagccuggg

SEQ ID NO: 1683338 - RNA, 22 nt, Human
gcacuuuguucuggcucuucca

SEQ ID NO: 1683339 - RNA, 12 nt, Human
gcagaacaguga

SEQ ID NO: 1683340 - RNA, 13 nt, Human
gcagaacagugau

SEQ ID NO: 1683341 - RNA, 14 nt, Human
gcagagggcacaga

SEQ ID NO: 1683342 - RNA, 17 nt, Human
gcagcauauucaggaag

SEQ ID NO: 1683343 - RNA, 18 nt, Human
gcagcauauucaggaagc

SEQ ID NO: 1683344 - RNA, 19 nt, Human
gcagcauauucaggaagcu

SEQ ID NO: 1683345 - RNA, 23 nt, Human
gcagcauauucaggaagcucagg

SEQ ID NO: 1683346 - RNA, 21 nt, Human
gcagaggaaagcaaaggagau

SEQ ID NO: 1683347 - RNA, 13 nt, Human
gcagaggaaagca

SEQ ID NO: 1683348 - RNA, 14 nt, Human
gcagaggaaagcaa

SEQ ID NO: 1683349 - RNA, 18 nt, Human
gcagaggaaagcaaagga

SEQ ID NO: 1683350 - RNA, 20 nt, Human
gcagaggaaagcaaaggaga

SEQ ID NO: 1683351 - RNA, 18 nt, Human
gcagaacagugauuacca

SEQ ID NO: 1683352 - RNA, 22 nt, Human
gcagaacagugauuaccaggga

SEQ ID NO: 1683353 - RNA, 15 nt, Human
gcagccacauuccug

SEQ ID NO: 1683354 - RNA, 18 nt, Human
gcagcccaccccucaaca

SEQ ID NO: 1683355 - RNA, 14 nt, Human
gcaacccccagccu

SEQ ID NO: 1683356 - RNA, 15 nt, Human
gcaacccccagccug

SEQ ID NO: 1683357 - RNA, 16 nt, Human
gcaacccccagccugc

SEQ ID NO: 1683358 - RNA, 17 nt, Human
gcaacccccagccugcu

SEQ ID NO: 1683359 - RNA, 20 nt, Human
gcaaccuccgccucuugggu

SEQ ID NO: 1683360 - RNA, 20 nt, Human
gcaaccuucgccaccugggu

SEQ ID NO: 1683361 - RNA, 16 nt, Human
gcaacaggcugggcuu

SEQ ID NO: 1683362 - RNA, 19 nt, Human
gcaacaggcugggcuucag

SEQ ID NO: 1683363 - RNA, 13 nt, Human
gcaaccaccacca

SEQ ID NO: 1683364 - RNA, 16 nt, Human
gcaaccaccaccaacc

SEQ ID NO: 1683365 - RNA, 18 nt, Human
gcaaccaccaccaaccac

SEQ ID NO: 1683366 - RNA, 14 nt, Human
gcaacaggcugggc

SEQ ID NO: 1683367 - RNA, 15 nt, Human
gcaacaggcugggcu

SEQ ID NO: 1683368 - RNA, 13 nt, Human
gcaacaggcuggg

SEQ ID NO: 1683369 - RNA, 19 nt, Human
gcaaaauguuacagaaucu

SEQ ID NO: 1683370 - RNA, 16 nt, Human
gcaagugagagcuggg

SEQ ID NO: 1683371 - RNA, 17 nt, Human
gcaaaagaugcuucuca

SEQ ID NO: 1683372 - RNA, 22 nt, Human
gcaaaagaugcuucucacugcc

SEQ ID NO: 1683373 - RNA, 14 nt, Human
gcaaaaaggcagga

SEQ ID NO: 1683374 - RNA, 21 nt, Human
gauuuuuuuuuccuucagugc

SEQ ID NO: 1683375 - RNA, 11 nt, Human
gauuucacucu

SEQ ID NO: 1683376 - RNA, 16 nt, Human
gauuuuuuuuuccuuc

SEQ ID NO: 1683377 - RNA, 12 nt, Human
gauuucacucuc

SEQ ID NO: 1683378 - RNA, 17 nt, Human
gauuuuuuuuuccuuca

SEQ ID NO: 1683379 - RNA, 18 nt, Human
gauuuuuuuuuccuucag

SEQ ID NO: 1683380 - RNA, 18 nt, Human
gauuuaacagaaauguac

SEQ ID NO: 1683381 - RNA, 17 nt, Human
gauuuaacagaaaugua

SEQ ID NO: 1683382 - RNA, 16 nt, Human
gauuuaacagaaaugu

SEQ ID NO: 1683383 - RNA, 20 nt, Human
gauucuucugcuucagccuc

SEQ ID NO: 1683384 - RNA, 19 nt, Human
gauuuaacagaaauguaca

SEQ ID NO: 1683385 - RNA, 13 nt, Human
gauucuucugcuu

SEQ ID NO: 1683386 - RNA, 15 nt, Human
gauucuucugcuuca

SEQ ID NO: 1683387 - RNA, 19 nt, Human
gauccagcagauuauucac

SEQ ID NO: 1683388 - RNA, 18 nt, Human
gauccagcagauuauuca

SEQ ID NO: 1683389 - RNA, 17 nt, Human
gaucugaugcaagcaag

SEQ ID NO: 1683390 - RNA, 19 nt, Human
gaucucuugagccugggag

SEQ ID NO: 1683391 - RNA, 16 nt, Human
gaucugccuaaggacu

SEQ ID NO: 1683392 - RNA, 17 nt, Human
gaucugccuaaggacuu

SEQ ID NO: 1683393 - RNA, 12 nt, Human
gaucugccuaag

SEQ ID NO: 1683394 - RNA, 15 nt, Human
gaucugccuaaggac

SEQ ID NO: 1683395 - RNA, 13 nt, Human
gaugauuucuaug

SEQ ID NO: 1683396 - RNA, 23 nt, Human
gaugauuucuaugcugaguuugu

SEQ ID NO: 1683397 - RNA, 12 nt, Human
gaugauuucuau

SEQ ID NO: 1683398 - RNA, 17 nt, Human
gaugcuucuucagagac

SEQ ID NO: 1683399 - RNA, 20 nt, Human
gaugcuucuucagagacucc

SEQ ID NO: 1683400 - RNA, 21 nt, Human
gaugcuucuucagagacuccu

SEQ ID NO: 1683401 - RNA, 22 nt, Human
gaugauuggaggggggaggugg

SEQ ID NO: 1683402 - RNA, 13 nt, Human
gaugauccuaggc

SEQ ID NO: 1683403 - RNA, 14 nt, Human
gaugauccuaggca

SEQ ID NO: 1683404 - RNA, 22 nt, Human
gauccacccaccucagccuccc

SEQ ID NO: 1683405 - RNA, 20 nt, Human
gauccacccaccucagccuc

SEQ ID NO: 1683406 - RNA, 21 nt, Human
gauccacccaccucagccucc

SEQ ID NO: 1683407 - RNA, 21 nt, Human
gauccaagcuggucccacuca

SEQ ID NO: 1683408 - RNA, 18 nt, Human
gauccacccaccucagcc

SEQ ID NO: 1683409 - RNA, 19 nt, Human
gauccacccaccucagccu

SEQ ID NO: 1683410 - RNA, 21 nt, Human
gaucaaccccuucgcuccugu

SEQ ID NO: 1683411 - RNA, 12 nt, Human
gauccaagcugg

SEQ ID NO: 1683412 - RNA, 16 nt, Human
gauccaagcugguccc

SEQ ID NO: 1683413 - RNA, 17 nt, Human
gauccaagcugguccca

SEQ ID NO: 1683414 - RNA, 19 nt, Human
gauccaagcuggucccacu

SEQ ID NO: 1683415 - RNA, 23 nt, Human
gaucaaaagguuaauaaaguaau

SEQ ID NO: 1683416 - RNA, 22 nt, Human
gaucaaaccccgaccaccugcc

SEQ ID NO: 1683417 - RNA, 21 nt, Human
gauauuuucaacgcagcccug

SEQ ID NO: 1683418 - RNA, 22 nt, Human
gauauuuucaacgcagcccugc

SEQ ID NO: 1683419 - RNA, 23 nt, Human
gauauuuucaacgcagcccugcu

SEQ ID NO: 1683420 - RNA, 15 nt, Human
gauauuuugcuuugu

SEQ ID NO: 1683421 - RNA, 20 nt, Human
gaucaaaagguuaauaaagu

SEQ ID NO: 1683422 - RNA, 19 nt, Human
gauauuuucaacgcagccc

SEQ ID NO: 1683423 - RNA, 18 nt, Human
gauacuuugauauuuuca

SEQ ID NO: 1683424 - RNA, 12 nt, Human
gauacugaaaua

SEQ ID NO: 1683425 - RNA, 21 nt, Human
gauacuguaucaugacaaaga

SEQ ID NO: 1683426 - RNA, 16 nt, Human
gauacuggauuguacu

SEQ ID NO: 1683427 - RNA, 20 nt, Human
gauacuggauuguacuuugu

SEQ ID NO: 1683428 - RNA, 17 nt, Human
gauacuguaucaugaca

SEQ ID NO: 1683429 - RNA, 23 nt, Human
gauacaguuacucagaauucucu

SEQ ID NO: 1683430 - RNA, 19 nt, Human
gauacaguuacucagaauu

SEQ ID NO: 1683431 - RNA, 16 nt, Human
gauacaguuacucaga

SEQ ID NO: 1683432 - RNA, 13 nt, Human
gaauuacauuugu

SEQ ID NO: 1683433 - RNA, 15 nt, Human
gaauuacauuuguau

SEQ ID NO: 1683434 - RNA, 18 nt, Human
gaauuacauuuguauaaa

SEQ ID NO: 1683435 - RNA, 20 nt, Human
gaauuacauuuguauaaaau

SEQ ID NO: 1683436 - RNA, 18 nt, Human
gaauguuugccucugccu

SEQ ID NO: 1683437 - RNA, 19 nt, Human
gaauguuugccucugccuc

SEQ ID NO: 1683438 - RNA, 14 nt, Human
gaauuaacacauga

SEQ ID NO: 1683439 - RNA, 15 nt, Human
gaauuaacacaugau

SEQ ID NO: 1683440 - RNA, 19 nt, Human
gaaugcacaaacagaggcc

SEQ ID NO: 1683441 - RNA, 16 nt, Human
gaauguuugccucugc

SEQ ID NO: 1683442 - RNA, 17 nt, Human
gaauguuugccucugcc

SEQ ID NO: 1683443 - RNA, 18 nt, Human
gaaugcacaaacagaggc

SEQ ID NO: 1683444 - RNA, 22 nt, Human
gaaugauuaugaauuacauuug

SEQ ID NO: 1683445 - RNA, 20 nt, Human
gaaugaugauccuaggcauu

SEQ ID NO: 1683446 - RNA, 14 nt, Human
gaaugaugccauga

SEQ ID NO: 1683447 - RNA, 14 nt, Human
gaaugauuaauuaa

SEQ ID NO: 1683448 - RNA, 14 nt, Human
gaaugauuaugaau

SEQ ID NO: 1683449 - RNA, 15 nt, Human
gaaugaauggcuaag

SEQ ID NO: 1683450 - RNA, 20 nt, Human
gaaugaauggcuaagcaaaa

SEQ ID NO: 1683451 - RNA, 14 nt, Human
gacaaaaagcuacu

SEQ ID NO: 1683452 - RNA, 14 nt, Human
gaauuaugaaacuu

SEQ ID NO: 1683453 - RNA, 12 nt, Human
gacacagcucuu

SEQ ID NO: 1683454 - RNA, 19 nt, Human
gacacagcucuucuccagg

SEQ ID NO: 1683455 - RNA, 20 nt, Human
gacacagcucuucuccaggc

SEQ ID NO: 1683456 - RNA, 21 nt, Human
gacacagcucuucuccaggcu

SEQ ID NO: 1683457 - RNA, 13 nt, Human
gacacagcucuuc

SEQ ID NO: 1683458 - RNA, 22 nt, Human
gaauaucuccgucaacucauau

SEQ ID NO: 1683459 - RNA, 11 nt, Human
gaauauugcug

SEQ ID NO: 1683460 - RNA, 12 nt, Human
gaauauugcuga

SEQ ID NO: 1683461 - RNA, 13 nt, Human
gaauauugcugau

SEQ ID NO: 1683462 - RNA, 15 nt, Human
gaauauauaaccagu

SEQ ID NO: 1683463 - RNA, 22 nt, Human
gaauauugcugauggugcaaug

SEQ ID NO: 1683464 - RNA, 23 nt, Human
gaauauugcugauggugcaauga

SEQ ID NO: 1683465 - RNA, 24 nt, Human
gaauauugcugauggugcaaugac

SEQ ID NO: 1683466 - RNA, 14 nt, Human
gaaugaauggcuaa

SEQ ID NO: 1683467 - RNA, 10 nt, Human
gacccugagg

SEQ ID NO: 1683468 - RNA, 14 nt, Human
gaccucaggccugg

SEQ ID NO: 1683469 - RNA, 22 nt, Human
gaccucagguaaucgaccugcc

SEQ ID NO: 1683470 - RNA, 23 nt, Human
gaccucagguaaucgaccugccu

SEQ ID NO: 1683471 - RNA, 19 nt, Human
gaccucaggccugggggcu

SEQ ID NO: 1683472 - RNA, 18 nt, Human
gaccucaggugagaagca

SEQ ID NO: 1683473 - RNA, 19 nt, Human
gaccucaggugagaagcag

SEQ ID NO: 1683474 - RNA, 21 nt, Human
gaccucaggugagaagcagag

SEQ ID NO: 1683475 - RNA, 19 nt, Human
gaccucaggugauccaccc

SEQ ID NO: 1683476 - RNA, 20 nt, Human
gaccucaggugauccaccca

SEQ ID NO: 1683477 - RNA, 21 nt, Human
gaccucaggugauccacccac

SEQ ID NO: 1683478 - RNA, 18 nt, Human
gacccggaggggccuggc

SEQ ID NO: 1683479 - RNA, 19 nt, Human
gacccggaggggccuggca

SEQ ID NO: 1683480 - RNA, 20 nt, Human
gacccggaggggccuggcag

SEQ ID NO: 1683481 - RNA, 16 nt, Human
gaccccugagcuugca

SEQ ID NO: 1683482 - RNA, 17 nt, Human
gacccggaggggccugg

SEQ ID NO: 1683483 - RNA, 22 nt, Human
gaccucugcagcaauaaagcag

SEQ ID NO: 1683484 - RNA, 18 nt, Human
gaccucugcagcaauaaa

SEQ ID NO: 1683485 - RNA, 16 nt, Human
gaccucugcagcaaua

SEQ ID NO: 1683486 - RNA, 15 nt, Human
gacgccaucccagcc

SEQ ID NO: 1683487 - RNA, 21 nt, Human
gacgccaucccagccccaaug

SEQ ID NO: 1683488 - RNA, 13 nt, Human
gaccucugccuga

SEQ ID NO: 1683489 - RNA, 12 nt, Human
gacgccauccca

SEQ ID NO: 1683490 - RNA, 13 nt, Human
gacgccaucccag

SEQ ID NO: 1683491 - RNA, 16 nt, Human
gacgcugugcugcccu

SEQ ID NO: 1683492 - RNA, 17 nt, Human
gacgcugugcugcccug

SEQ ID NO: 1683493 - RNA, 18 nt, Human
gacgcugugcugcccugc

SEQ ID NO: 1683494 - RNA, 21 nt, Human
gacgcugugcugcccugccca

SEQ ID NO: 1683495 - RNA, 22 nt, Human
gacgcuacccgggaagggggcu

SEQ ID NO: 1683496 - RNA, 23 nt, Human
gacgcuacccgggaagggggcug

SEQ ID NO: 1683497 - RNA, 14 nt, Human
gacgcucucuggcc

SEQ ID NO: 1683498 - RNA, 14 nt, Human
gacagcccgggcuc

SEQ ID NO: 1683499 - RNA, 16 nt, Human
gacagcccgggcucug

SEQ ID NO: 1683500 - RNA, 17 nt, Human
gacagcuccuucugucc

SEQ ID NO: 1683501 - RNA, 18 nt, Human
gacagcuccuucuguccu

SEQ ID NO: 1683502 - RNA, 14 nt, Human
gacagucccugcca

SEQ ID NO: 1683503 - RNA, 15 nt, Human
gacagucccugccaa

SEQ ID NO: 1683504 - RNA, 16 nt, Human
gacagucccugccaau

SEQ ID NO: 1683505 - RNA, 20 nt, Human
gacagucccugccaauggac

SEQ ID NO: 1683506 - RNA, 12 nt, Human
gacagucccugc

SEQ ID NO: 1683507 - RNA, 11 nt, Human
gacagcucuua

SEQ ID NO: 1683508 - RNA, 18 nt, Human
gacagucaccucauggaa

SEQ ID NO: 1683509 - RNA, 10 nt, Human
gacagcucuu

SEQ ID NO: 1683510 - RNA, 19 nt, Human
gacagcuccuucuguccua

SEQ ID NO: 1683511 - RNA, 12 nt, Human
gacagcucugca

SEQ ID NO: 1683512 - RNA, 19 nt, Human
gacauuguagagcuucugg

SEQ ID NO: 1683513 - RNA, 23 nt, Human
gacauugcggacagccacggcca

SEQ ID NO: 1683514 - RNA, 13 nt, Human
gagacuccugcag

SEQ ID NO: 1683515 - RNA, 14 nt, Human
gagacuccugcagg

SEQ ID NO: 1683516 - RNA, 15 nt, Human
gagagccuuccaggg

SEQ ID NO: 1683517 - RNA, 16 nt, Human
gagagccuuccagggg

SEQ ID NO: 1683518 - RNA, 13 nt, Human
gagagcugggugu

SEQ ID NO: 1683519 - RNA, 15 nt, Human
gagagcuagcagcag

SEQ ID NO: 1683520 - RNA, 21 nt, Human
gagagcuagcagcagggaggg

SEQ ID NO: 1683521 - RNA, 18 nt, Human
gagagccuuccaggggug

SEQ ID NO: 1683522 - RNA, 20 nt, Human
gagagccuuccagggguggg

SEQ ID NO: 1683523 - RNA, 15 nt, Human
gagaggacccccuga

SEQ ID NO: 1683524 - RNA, 22 nt, Human
gagagcuucuguugcugccuca

SEQ ID NO: 1683525 - RNA, 12 nt, Human
gagaggaaauca

SEQ ID NO: 1683526 - RNA, 20 nt, Human
gagagcugggugucaagagg

SEQ ID NO: 1683527 - RNA, 14 nt, Human
gagauuggaaggaa

SEQ ID NO: 1683528 - RNA, 21 nt, Human
gagauugugccccugcacucc

SEQ ID NO: 1683529 - RNA, 15 nt, Human
gagauuauguucuuu

SEQ ID NO: 1683530 - RNA, 20 nt, Human
gagaugcuagaacucccuuu

SEQ ID NO: 1683531 - RNA, 16 nt, Human
gagaugcuagaacucc

SEQ ID NO: 1683532 - RNA, 20 nt, Human
gacuuuuccaacccucauca

SEQ ID NO: 1683533 - RNA, 18 nt, Human
gacuuuuauuuccaguga

SEQ ID NO: 1683534 - RNA, 14 nt, Human
gacuuuuccaaccc

SEQ ID NO: 1683535 - RNA, 19 nt, Human
gacuuuuccaacccucauc

SEQ ID NO: 1683536 - RNA, 22 nt, Human
gacuuuuuauggcacuaguauu

SEQ ID NO: 1683537 - RNA, 18 nt, Human
gagacgggggcagagagg

SEQ ID NO: 1683538 - RNA, 16 nt, Human
gagacggagucccacc

SEQ ID NO: 1683539 - RNA, 19 nt, Human
gagacggagucccaccuug

SEQ ID NO: 1683540 - RNA, 14 nt, Human
gagacggaguccca

SEQ ID NO: 1683541 - RNA, 15 nt, Human
gagaaugaaagggcc

SEQ ID NO: 1683542 - RNA, 23 nt, Human
gagaaugaaagggcccagagagg

SEQ ID NO: 1683543 - RNA, 22 nt, Human
gagcuguucacagccagacugg

SEQ ID NO: 1683544 - RNA, 13 nt, Human
gagcccugguggc

SEQ ID NO: 1683545 - RNA, 14 nt, Human
gagcccugguggca

SEQ ID NO: 1683546 - RNA, 20 nt, Human
gagcuguucacagccagacu

SEQ ID NO: 1683547 - RNA, 12 nt, Human
gagcccugggag

SEQ ID NO: 1683548 - RNA, 16 nt, Human
gagcccugggaggcuc

SEQ ID NO: 1683549 - RNA, 18 nt, Human
gagcccugggaggcucug

SEQ ID NO: 1683550 - RNA, 19 nt, Human
gagcccugggaggcucugg

SEQ ID NO: 1683551 - RNA, 20 nt, Human
gagcccugggaggcucugga

SEQ ID NO: 1683552 - RNA, 14 nt, Human
gagccccgaggccu

SEQ ID NO: 1683553 - RNA, 17 nt, Human
gagccccgaggccuucu

SEQ ID NO: 1683554 - RNA, 17 nt, Human
gagcaucaggccaggcc

SEQ ID NO: 1683555 - RNA, 15 nt, Human
gagcaucaggccagg

SEQ ID NO: 1683556 - RNA, 16 nt, Human
gagcaucaggccaggc

SEQ ID NO: 1683557 - RNA, 21 nt, Human
gagcaugccuggauggggcug

SEQ ID NO: 1683558 - RNA, 13 nt, Human
gagcaugccugga

SEQ ID NO: 1683559 - RNA, 14 nt, Human
gagcaucaggccag

SEQ ID NO: 1683560 - RNA, 14 nt, Human
gagcagucaggaaa

SEQ ID NO: 1683561 - RNA, 16 nt, Human
gaggacuuuucuuugu

SEQ ID NO: 1683562 - RNA, 20 nt, Human
gaggacuuuucuuuguggcu

SEQ ID NO: 1683563 - RNA, 23 nt, Human
gaggacuuuucuuuguggcuucc

SEQ ID NO: 1683564 - RNA, 21 nt, Human
gaggacgcucucuggccuucg

SEQ ID NO: 1683565 - RNA, 22 nt, Human
gaggcagggucucacucugucg

SEQ ID NO: 1683566 - RNA, 19 nt, Human
gaggcagggucucacucug

SEQ ID NO: 1683567 - RNA, 20 nt, Human
gaggcagggucucacucugu

SEQ ID NO: 1683568 - RNA, 12 nt, Human
gaggagagagga

SEQ ID NO: 1683569 - RNA, 14 nt, Human
gaggagagaggacc

SEQ ID NO: 1683570 - RNA, 15 nt, Human
gaggagagaggaccc

SEQ ID NO: 1683571 - RNA, 12 nt, Human
gaggagaaacug

SEQ ID NO: 1683572 - RNA, 14 nt, Human
gaggagaaacugga

SEQ ID NO: 1683573 - RNA, 20 nt, Human
gaggcucuggagcccacugu

SEQ ID NO: 1683574 - RNA, 18 nt, Human
gaggcugagaugggagaa

SEQ ID NO: 1683575 - RNA, 17 nt, Human
gaggcuccacuuggucu

SEQ ID NO: 1683576 - RNA, 18 nt, Human
gaggcuccacuuggucug

SEQ ID NO: 1683577 - RNA, 19 nt, Human
gaggcauuuguuugaacug

SEQ ID NO: 1683578 - RNA, 22 nt, Human
gaggcaugugaugagaggaaau

SEQ ID NO: 1683579 - RNA, 20 nt, Human
gaggcaugugaugagaggaa

SEQ ID NO: 1683580 - RNA, 21 nt, Human
gaggcaugugaugagaggaaa

SEQ ID NO: 1683581 - RNA, 21 nt, Human
gaggcauuuguuugaacugau

SEQ ID NO: 1683582 - RNA, 17 nt, Human
gaggccaaggugggagg

SEQ ID NO: 1683583 - RNA, 15 nt, Human
gaggcuccacuuggu

SEQ ID NO: 1683584 - RNA, 12 nt, Human
gagggccugggc

SEQ ID NO: 1683585 - RNA, 14 nt, Human
gagggccugcaagg

SEQ ID NO: 1683586 - RNA, 17 nt, Human
gagggccugcaagggag

SEQ ID NO: 1683587 - RNA, 21 nt, Human
gagggccugcaagggagugag

SEQ ID NO: 1683588 - RNA, 18 nt, Human
cugugcucuggacaggca

SEQ ID NO: 1683589 - RNA, 19 nt, Human
cugugcucuggacaggcau

SEQ ID NO: 1683590 - RNA, 19 nt, Human
cugugagcaucacaguuuu

SEQ ID NO: 1683591 - RNA, 22 nt, Human
cugugucagguggggcagcuug

SEQ ID NO: 1683592 - RNA, 17 nt, Human
cuguuacugucuucagu

SEQ ID NO: 1683593 - RNA, 13 nt, Human
cuguuauauaaau

SEQ ID NO: 1683594 - RNA, 14 nt, Human
cuguuauauaaaug

SEQ ID NO: 1683595 - RNA, 15 nt, Human
cuguuauauaaaugg

SEQ ID NO: 1683596 - RNA, 16 nt, Human
cuguucagcuccagcu

SEQ ID NO: 1683597 - RNA, 18 nt, Human
cuguucagcuccagcuca

SEQ ID NO: 1683598 - RNA, 19 nt, Human
cuguucagcuccagcucac

SEQ ID NO: 1683599 - RNA, 22 nt, Human
cuguucagcuccagcucaccag

SEQ ID NO: 1683600 - RNA, 12 nt, Human
cuguucagcugg

SEQ ID NO: 1683601 - RNA, 18 nt, Human
cuguucagcugguugagg

SEQ ID NO: 1683602 - RNA, 19 nt, Human
cuguucacagccagacugg

SEQ ID NO: 1683603 - RNA, 22 nt, Human
cuguuauauaaaugguuaaaag

SEQ ID NO: 1683604 - RNA, 13 nt, Human
cuguucacucuac

SEQ ID NO: 1683605 - RNA, 15 nt, Human
cuguucagcuccagc

SEQ ID NO: 1683606 - RNA, 22 nt, Human
cuguucacagccagacuggcac

SEQ ID NO: 1683607 - RNA, 15 nt, Human
cugugaacuugaaau

SEQ ID NO: 1683608 - RNA, 16 nt, Human
cugugaacugaacucu

SEQ ID NO: 1683609 - RNA, 13 nt, Human
cugugaacugaac

SEQ ID NO: 1683610 - RNA, 15 nt, Human
cugugaacugaacuc

SEQ ID NO: 1683611 - RNA, 16 nt, Human
cugugaacuugaaauu

SEQ ID NO: 1683612 - RNA, 17 nt, Human
cugugaacuugaaauuu

SEQ ID NO: 1683613 - RNA, 17 nt, Human
cugugcucuggacaggc

SEQ ID NO: 1683614 - RNA, 23 nt, Human
cugugagaugcuagaacucccuu

SEQ ID NO: 1683615 - RNA, 16 nt, Human
cugugagcaucacagu

SEQ ID NO: 1683616 - RNA, 14 nt, Human
cuguugcugccuca

SEQ ID NO: 1683617 - RNA, 12 nt, Human
cuguuggccagu

SEQ ID NO: 1683618 - RNA, 15 nt, Human
cuguuggccagugug

SEQ ID NO: 1683619 - RNA, 19 nt, Human
cuuaaauaaugugaaacug

SEQ ID NO: 1683620 - RNA, 16 nt, Human
cuuaaauaaugugaaa

SEQ ID NO: 1683621 - RNA, 14 nt, Human
cuuaaauaauguga

SEQ ID NO: 1683622 - RNA, 21 nt, Human
cuuaaaaaugguuuaaauggu

SEQ ID NO: 1683623 - RNA, 13 nt, Human
cuuaaaaaugguu

SEQ ID NO: 1683624 - RNA, 20 nt, Human
cuuaaaaaugguuuaaaugg

SEQ ID NO: 1683625 - RNA, 13 nt, Human
cuggugacugauu

SEQ ID NO: 1683626 - RNA, 14 nt, Human
cuggugacugauuc

SEQ ID NO: 1683627 - RNA, 15 nt, Human
cuggugacugauucu

SEQ ID NO: 1683628 - RNA, 17 nt, Human
cuggugacugauucuuc

SEQ ID NO: 1683629 - RNA, 18 nt, Human
cuggucuuauuuguaaag

SEQ ID NO: 1683630 - RNA, 18 nt, Human
cuggugacugauucuuca

SEQ ID NO: 1683631 - RNA, 15 nt, Human
cuggugcccugcuuu

SEQ ID NO: 1683632 - RNA, 16 nt, Human
cuggugcccugcuuuc

SEQ ID NO: 1683633 - RNA, 19 nt, Human
cuggugcccugcuuucaga

SEQ ID NO: 1683634 - RNA, 21 nt, Human
cuggugcccugcuuucagaua

SEQ ID NO: 1683635 - RNA, 23 nt, Human
cuggugcccugcuuucagauacu

SEQ ID NO: 1683636 - RNA, 12 nt, Human
cuggugccucac

SEQ ID NO: 1683637 - RNA, 18 nt, Human
cuguaggaagguuaaugu

SEQ ID NO: 1683638 - RNA, 14 nt, Human
cugucauuugagca

SEQ ID NO: 1683639 - RNA, 13 nt, Human
cuguccugggagu

SEQ ID NO: 1683640 - RNA, 14 nt, Human
cuguccugggagug

SEQ ID NO: 1683641 - RNA, 20 nt, Human
cuguccugggagugagcugg

SEQ ID NO: 1683642 - RNA, 21 nt, Human
cuguccugggagugagcuggu

SEQ ID NO: 1683643 - RNA, 22 nt, Human
cugucuaaugaaaccugugucu

SEQ ID NO: 1683644 - RNA, 16 nt, Human
cuguacuugcucuuga

SEQ ID NO: 1683645 - RNA, 19 nt, Human
cuguacuugcucuugaugc

SEQ ID NO: 1683646 - RNA, 20 nt, Human
cuguacuugcucuugaugcc

SEQ ID NO: 1683647 - RNA, 21 nt, Human
cuguacuugcucuugaugccu

SEQ ID NO: 1683648 - RNA, 15 nt, Human
cuguagagugggagc

SEQ ID NO: 1683649 - RNA, 20 nt, Human
cuguaagaaaauaucacuug

SEQ ID NO: 1683650 - RNA, 14 nt, Human
cugcucacauaucu

SEQ ID NO: 1683651 - RNA, 24 nt, Human
cugcugaaggcucgagcaugccug

SEQ ID NO: 1683652 - RNA, 23 nt, Human
cugcugaaggcucgagcaugccu

SEQ ID NO: 1683653 - RNA, 18 nt, Human
cugcugaaggcucgagca

SEQ ID NO: 1683654 - RNA, 15 nt, Human
cugccuguucccauu

SEQ ID NO: 1683655 - RNA, 19 nt, Human
cugccuguucccauucuug

SEQ ID NO: 1683656 - RNA, 20 nt, Human
cugccuguucagcuccagcu

SEQ ID NO: 1683657 - RNA, 23 nt, Human
cugccuguucagcuccagcucac

SEQ ID NO: 1683658 - RNA, 18 nt, Human
cugccuccccuccucugc

SEQ ID NO: 1683659 - RNA, 17 nt, Human
cugccuccccuccucug

SEQ ID NO: 1683660 - RNA, 20 nt, Human
cugccucgaacuggcugcaa

SEQ ID NO: 1683661 - RNA, 17 nt, Human
cugccuccuuugugagg

SEQ ID NO: 1683662 - RNA, 21 nt, Human
cugccuccuuugugaggaagc

SEQ ID NO: 1683663 - RNA, 23 nt, Human
cugccuccuuugugaggaagccg

SEQ ID NO: 1683664 - RNA, 14 nt, Human
cugccucgaacugg

SEQ ID NO: 1683665 - RNA, 14 nt, Human
cugccuccuuugug

SEQ ID NO: 1683666 - RNA, 20 nt, Human
cugccuccccuccucugcuu

SEQ ID NO: 1683667 - RNA, 19 nt, Human
cugccuccccuccucugcu

SEQ ID NO: 1683668 - RNA, 21 nt, Human
cugccuccccuccucugcuug

SEQ ID NO: 1683669 - RNA, 12 nt, Human
cugcccuggugc

SEQ ID NO: 1683670 - RNA, 13 nt, Human
cugcccuggugcu

SEQ ID NO: 1683671 - RNA, 14 nt, Human
cugcccuggugcug

SEQ ID NO: 1683672 - RNA, 15 nt, Human
cugcccuggugcugc

SEQ ID NO: 1683673 - RNA, 23 nt, Human
cugcccuggugcugccacacuuc

SEQ ID NO: 1683674 - RNA, 17 nt, Human
cugcccugguuuccugc

SEQ ID NO: 1683675 - RNA, 18 nt, Human
cugcccugguuuccugcc

SEQ ID NO: 1683676 - RNA, 19 nt, Human
cugcccugguuuccugccc

SEQ ID NO: 1683677 - RNA, 21 nt, Human
cugcccugguuuccugcccug

SEQ ID NO: 1683678 - RNA, 24 nt, Human
cugcccugugaguacuacaguccu

SEQ ID NO: 1683679 - RNA, 20 nt, Human
cugcccugguuuccugcccu

SEQ ID NO: 1683680 - RNA, 14 nt, Human
cugcccugugggcc

SEQ ID NO: 1683681 - RNA, 19 nt, Human
cugcccuuaccugccagga

SEQ ID NO: 1683682 - RNA, 11 nt, Human
cugcccugugg

SEQ ID NO: 1683683 - RNA, 12 nt, Human
cugcccuguggg

SEQ ID NO: 1683684 - RNA, 22 nt, Human
cugcccuuaccugccaggaagc

SEQ ID NO: 1683685 - RNA, 23 nt, Human
cugcccuuaccugccaggaagcc

SEQ ID NO: 1683686 - RNA, 22 nt, Human
cuggacuccucuguccaggcac

SEQ ID NO: 1683687 - RNA, 23 nt, Human
cuggacuccucuguccaggcacu

SEQ ID NO: 1683688 - RNA, 21 nt, Human
cuggagaaaauggacguguua

SEQ ID NO: 1683689 - RNA, 14 nt, Human
cuggagaacuagag

SEQ ID NO: 1683690 - RNA, 15 nt, Human
cuggagaacuagaga

SEQ ID NO: 1683691 - RNA, 17 nt, Human
cuggauccaucaggcca

SEQ ID NO: 1683692 - RNA, 14 nt, Human
cugcuucaaggauc

SEQ ID NO: 1683693 - RNA, 16 nt, Human
cugcuucaaggauccu

SEQ ID NO: 1683694 - RNA, 19 nt, Human
cugcuucaaggauccugag

SEQ ID NO: 1683695 - RNA, 20 nt, Human
cugcuucaaggauccugagc

SEQ ID NO: 1683696 - RNA, 14 nt, Human
cugcuuccagugag

SEQ ID NO: 1683697 - RNA, 23 nt, Human
cuggaaaaguauguuagugcaaa

SEQ ID NO: 1683698 - RNA, 19 nt, Human
cuggauccaucaggccacu

SEQ ID NO: 1683699 - RNA, 20 nt, Human
cuggaucuccauucucucag

SEQ ID NO: 1683700 - RNA, 16 nt, Human
cuggaugcagccucac

SEQ ID NO: 1683701 - RNA, 17 nt, Human
cuggaugcagccucaca

SEQ ID NO: 1683702 - RNA, 18 nt, Human
cuggaugcagccucacag

SEQ ID NO: 1683703 - RNA, 22 nt, Human
cuggaugcagccucacaguccu

SEQ ID NO: 1683704 - RNA, 19 nt, Human
cuggcagccgugccuucag

SEQ ID NO: 1683705 - RNA, 17 nt, Human
cuggcagccgugccuuc

SEQ ID NO: 1683706 - RNA, 18 nt, Human
cuggcagccgugccuuca

SEQ ID NO: 1683707 - RNA, 16 nt, Human
cuggcagcucagagag

SEQ ID NO: 1683708 - RNA, 17 nt, Human
cuggcagcucagagagg

SEQ ID NO: 1683709 - RNA, 19 nt, Human
cuggcagcucagagagggu

SEQ ID NO: 1683710 - RNA, 19 nt, Human
cuggcucccacaggcccuu

SEQ ID NO: 1683711 - RNA, 18 nt, Human
cuggcucccacaggcccu

SEQ ID NO: 1683712 - RNA, 22 nt, Human
cuggcucccacaggcccuuccu

SEQ ID NO: 1683713 - RNA, 13 nt, Human
cuggcucuuccag

SEQ ID NO: 1683714 - RNA, 14 nt, Human
cuggcucuuccagg

SEQ ID NO: 1683715 - RNA, 15 nt, Human
cuggcucuuccaggc

SEQ ID NO: 1683716 - RNA, 17 nt, Human
cugggacuacaggcacc

SEQ ID NO: 1683717 - RNA, 21 nt, Human
cugggacuacaggcacccacc

SEQ ID NO: 1683718 - RNA, 17 nt, Human
cugggacuacaggugug

SEQ ID NO: 1683719 - RNA, 20 nt, Human
cuggcagaguugaagacaga

SEQ ID NO: 1683720 - RNA, 21 nt, Human
cuggcagaguugaagacagag

SEQ ID NO: 1683721 - RNA, 13 nt, Human
cuggcagccgugc

SEQ ID NO: 1683722 - RNA, 23 nt, Human
cuggcagccccuguucuggcaga

SEQ ID NO: 1683723 - RNA, 22 nt, Human
cuggcagaguugaagacagagc

SEQ ID NO: 1683724 - RNA, 18 nt, Human
gaaagacuaucuaaaugu

SEQ ID NO: 1683725 - RNA, 17 nt, Human
gaaaggcuccaggagca

SEQ ID NO: 1683726 - RNA, 18 nt, Human
gaaaggcuccaggagcag

SEQ ID NO: 1683727 - RNA, 19 nt, Human
gaaaggcuccaggagcagc

SEQ ID NO: 1683728 - RNA, 20 nt, Human
gaaaggcuccaggagcagcc

SEQ ID NO: 1683729 - RNA, 22 nt, Human
gaaaguacuucuccacccugcu

SEQ ID NO: 1683730 - RNA, 21 nt, Human
gaaaguacuucuccacccugc

SEQ ID NO: 1683731 - RNA, 17 nt, Human
gaaaucaaauaugcaaa

SEQ ID NO: 1683732 - RNA, 16 nt, Human
gaaaucaaauaugcaa

SEQ ID NO: 1683733 - RNA, 17 nt, Human
gaaaucaccgaaaacgu

SEQ ID NO: 1683734 - RNA, 19 nt, Human
gaaaucaccgaaaacgugg

SEQ ID NO: 1683735 - RNA, 23 nt, Human
gaaaucaaauaugcaaagcacug

SEQ ID NO: 1683736 - RNA, 18 nt, Human
gaaauuuuuauuaaauua

SEQ ID NO: 1683737 - RNA, 18 nt, Human
gaaaugaaagcagggacu

SEQ ID NO: 1683738 - RNA, 19 nt, Human
gaaauuuuuauuaaauuau

SEQ ID NO: 1683739 - RNA, 17 nt, Human
gaacaaauuuacagaga

SEQ ID NO: 1683740 - RNA, 18 nt, Human
gaacaaauuuacagagac

SEQ ID NO: 1683741 - RNA, 23 nt, Human
gaacaaauuuacagagacagaaa

SEQ ID NO: 1683742 - RNA, 14 nt, Human
gaaacuuguguaaa

SEQ ID NO: 1683743 - RNA, 16 nt, Human
gaaacuuguguaaaua

SEQ ID NO: 1683744 - RNA, 20 nt, Human
gaaacuuguguaaauacaau

SEQ ID NO: 1683745 - RNA, 18 nt, Human
gaaagaaguggggacaga

SEQ ID NO: 1683746 - RNA, 23 nt, Human
gaaacuucagcgguuuauauaag

SEQ ID NO: 1683747 - RNA, 14 nt, Human
gaacaaggcaaggc

SEQ ID NO: 1683748 - RNA, 15 nt, Human
gaacaaggcaaggcu

SEQ ID NO: 1683749 - RNA, 17 nt, Human
gaacaaggcaaggcugu

SEQ ID NO: 1683750 - RNA, 18 nt, Human
gaacaaggcaaggcuguc

SEQ ID NO: 1683751 - RNA, 21 nt, Human
gaacaaggcaaggcugucaau

SEQ ID NO: 1683752 - RNA, 14 nt, Human
gaaaaaauauauau

SEQ ID NO: 1683753 - RNA, 19 nt, Human
gaaaaaauauuuuccugcc

SEQ ID NO: 1683754 - RNA, 21 nt, Human
cuuuuuuuuuuuuuuugacaa

SEQ ID NO: 1683755 - RNA, 18 nt, Human
cuuuugugcauuaucuag

SEQ ID NO: 1683756 - RNA, 14 nt, Human
cuuuugugcauuau

SEQ ID NO: 1683757 - RNA, 15 nt, Human
cuuuuggucugugug

SEQ ID NO: 1683758 - RNA, 16 nt, Human
cuuuuggucuguguga

SEQ ID NO: 1683759 - RNA, 17 nt, Human
cuuuugucuaugggacu

SEQ ID NO: 1683760 - RNA, 13 nt, Human
cuuuugguuaagu

SEQ ID NO: 1683761 - RNA, 18 nt, Human
cuuuugccguuauuaaaa

SEQ ID NO: 1683762 - RNA, 14 nt, Human
gaaaauuaacauga

SEQ ID NO: 1683763 - RNA, 18 nt, Human
gaaaauuaggauuucaug

SEQ ID NO: 1683764 - RNA, 22 nt, Human
gaaaauuaggauuucaugauuu

SEQ ID NO: 1683765 - RNA, 19 nt, Human
gaaaacugcaacuuguaaa

SEQ ID NO: 1683766 - RNA, 18 nt, Human
gaaaacuuguauuaugug

SEQ ID NO: 1683767 - RNA, 20 nt, Human
gaaaagacuccaaagaaaug

SEQ ID NO: 1683768 - RNA, 21 nt, Human
gaaaagacuccaaagaaaugu

SEQ ID NO: 1683769 - RNA, 18 nt, Human
gaaaauuuugauguuuua

SEQ ID NO: 1683770 - RNA, 19 nt, Human
cuuuuaugugaaacauguu

SEQ ID NO: 1683771 - RNA, 21 nt, Human
cuugucucagauuuuauuaug

SEQ ID NO: 1683772 - RNA, 20 nt, Human
cuugucuuuggacccugagg

SEQ ID NO: 1683773 - RNA, 13 nt, Human
cuugucuguagau

SEQ ID NO: 1683774 - RNA, 20 nt, Human
cuugguucccauuugcuccu

SEQ ID NO: 1683775 - RNA, 16 nt, Human
cuugguucccauuugc

SEQ ID NO: 1683776 - RNA, 22 nt, Human
cuugguccugcugcaguugcca

SEQ ID NO: 1683777 - RNA, 23 nt, Human
cuuggucucagugucaaugcagc

SEQ ID NO: 1683778 - RNA, 16 nt, Human
cuugguccugcugcag

SEQ ID NO: 1683779 - RNA, 17 nt, Human
cuugguccugcugcagu

SEQ ID NO: 1683780 - RNA, 18 nt, Human
cuugguccugcugcaguu

SEQ ID NO: 1683781 - RNA, 20 nt, Human
cuugguccugcugcaguugc

SEQ ID NO: 1683782 - RNA, 15 nt, Human
cuugguccugcugca

SEQ ID NO: 1683783 - RNA, 21 nt, Human
cuugucuuuggacccugaggc

SEQ ID NO: 1683784 - RNA, 22 nt, Human
cuugucuuuggacccugaggcc

SEQ ID NO: 1683785 - RNA, 22 nt, Human
cuuuaaugucacaggcaggucc

SEQ ID NO: 1683786 - RNA, 14 nt, Human
cuuucaauaggaaa

SEQ ID NO: 1683787 - RNA, 15 nt, Human
cuuucaauaggaaaa

SEQ ID NO: 1683788 - RNA, 17 nt, Human
cuuuaaugucacaggca

SEQ ID NO: 1683789 - RNA, 18 nt, Human
cuuuaaugucacaggcag

SEQ ID NO: 1683790 - RNA, 19 nt, Human
cuuuaaugucacaggcagg

SEQ ID NO: 1683791 - RNA, 20 nt, Human
cuuuaaugucacaggcaggu

SEQ ID NO: 1683792 - RNA, 17 nt, Human
cuuucaauaggaaaaac

SEQ ID NO: 1683793 - RNA, 18 nt, Human
cuuucaauaggaaaaacu

SEQ ID NO: 1683794 - RNA, 21 nt, Human
cuuggcgcugccccuggcagc

SEQ ID NO: 1683795 - RNA, 22 nt, Human
cuuggcgcugccccuggcagcc

SEQ ID NO: 1683796 - RNA, 23 nt, Human
cuuggcgcugccccuggcagccc

SEQ ID NO: 1683797 - RNA, 22 nt, Human
cuuggauuguccccgacccuug

SEQ ID NO: 1683798 - RNA, 18 nt, Human
cuuggauuguccccgacc

SEQ ID NO: 1683799 - RNA, 20 nt, Human
cuuggauuguccccgacccu

SEQ ID NO: 1683800 - RNA, 15 nt, Human
cuuggauuguccccg

SEQ ID NO: 1683801 - RNA, 19 nt, Human
cuugccgucuaccugaggg

SEQ ID NO: 1683802 - RNA, 18 nt, Human
cuugccgucuaccugagg

SEQ ID NO: 1683803 - RNA, 19 nt, Human
cuugauucauaaugacuua

SEQ ID NO: 1683804 - RNA, 15 nt, Human
cuugauguguuaucu

SEQ ID NO: 1683805 - RNA, 20 nt, Human
cuuacauuagcaguuugcuu

SEQ ID NO: 1683806 - RNA, 19 nt, Human
cuucugaacuuggcgcugc

SEQ ID NO: 1683807 - RNA, 22 nt, Human
cuucugaacuuggcgcugcccc

SEQ ID NO: 1683808 - RNA, 16 nt, Human
cuuccucuccacugcc

SEQ ID NO: 1683809 - RNA, 17 nt, Human
cuuccucuccacugccu

SEQ ID NO: 1683810 - RNA, 19 nt, Human
cuuccucuccacugccuuc

SEQ ID NO: 1683811 - RNA, 21 nt, Human
cuuccucuccacugccuucga

SEQ ID NO: 1683812 - RNA, 11 nt, Human
cuuccucugcu

SEQ ID NO: 1683813 - RNA, 12 nt, Human
cuuccucugcug

SEQ ID NO: 1683814 - RNA, 13 nt, Human
cuuccucugcuga

SEQ ID NO: 1683815 - RNA, 12 nt, Human
cuuccucccucc

SEQ ID NO: 1683816 - RNA, 13 nt, Human
cuuccucccuccc

SEQ ID NO: 1683817 - RNA, 14 nt, Human
cuuccucccucccu

SEQ ID NO: 1683818 - RNA, 18 nt, Human
cuuccucccucccucuuu

SEQ ID NO: 1683819 - RNA, 23 nt, Human
cuucugaacuuggcgcugccccu

SEQ ID NO: 1683820 - RNA, 18 nt, Human
cuucugacccaugcugcc

SEQ ID NO: 1683821 - RNA, 16 nt, Human
cuucugacccaugcug

SEQ ID NO: 1683822 - RNA, 17 nt, Human
cuucugacccaugcugc

SEQ ID NO: 1683823 - RNA, 13 nt, Human
cuucuuauacauu

SEQ ID NO: 1683824 - RNA, 16 nt, Human
cuucuuauacauuuga

SEQ ID NO: 1683825 - RNA, 15 nt, Human
aggaacuacugagga

SEQ ID NO: 1683826 - RNA, 20 nt, Human
aggaccccuccaugugggcu

SEQ ID NO: 1683827 - RNA, 15 nt, Human
aggagagcuagcagc

SEQ ID NO: 1683828 - RNA, 15 nt, Human
aggagaggagagggg

SEQ ID NO: 1683829 - RNA, 16 nt, Human
aggagaggggcacagg

SEQ ID NO: 1683830 - RNA, 18 nt, Human
aggagaggggcacagggu

SEQ ID NO: 1683831 - RNA, 14 nt, Human
aggaccucagguga

SEQ ID NO: 1683832 - RNA, 20 nt, Human
aggaccucaggugagaagca

SEQ ID NO: 1683833 - RNA, 17 nt, Human
aggacccggaggggccu

SEQ ID NO: 1683834 - RNA, 14 nt, Human
aggcacugcugccc

SEQ ID NO: 1683835 - RNA, 16 nt, Human
aggcacugcugcccag

SEQ ID NO: 1683836 - RNA, 22 nt, Human
aggcacugcugcccagccucca

SEQ ID NO: 1683837 - RNA, 16 nt, Human
aggauucuuccucccu

SEQ ID NO: 1683838 - RNA, 12 nt, Human
aggauucuuccu

SEQ ID NO: 1683839 - RNA, 17 nt, Human
aggaggggauagagaga

SEQ ID NO: 1683840 - RNA, 17 nt, Human
aggauguugaaaaaguu

SEQ ID NO: 1683841 - RNA, 20 nt, Human
aggauguucugggacacagu

SEQ ID NO: 1683842 - RNA, 14 nt, Human
aggauguugaaaaa

SEQ ID NO: 1683843 - RNA, 17 nt, Human
agcugggugucaagagg

SEQ ID NO: 1683844 - RNA, 22 nt, Human
agcugggugucaagagggucug

SEQ ID NO: 1683845 - RNA, 14 nt, Human
agcuggugcccugc

SEQ ID NO: 1683846 - RNA, 14 nt, Human
agcuggguuggaaa

SEQ ID NO: 1683847 - RNA, 21 nt, Human
agcuggucccacucaguccau

SEQ ID NO: 1683848 - RNA, 14 nt, Human
agcuguaugauucc

SEQ ID NO: 1683849 - RNA, 22 nt, Human
aggaacguaaucguguccccua

SEQ ID NO: 1683850 - RNA, 17 nt, Human
aggaaauccaggguggu

SEQ ID NO: 1683851 - RNA, 23 nt, Human
agcuucuguugcugccucaugcu

SEQ ID NO: 1683852 - RNA, 13 nt, Human
agcuuuucccuuc

SEQ ID NO: 1683853 - RNA, 16 nt, Human
agcuuuucccuucuuu

SEQ ID NO: 1683854 - RNA, 15 nt, Human
agcuuuucccuuuuu

SEQ ID NO: 1683855 - RNA, 13 nt, Human
aggaaaaacugau

SEQ ID NO: 1683856 - RNA, 15 nt, Human
aggaaaaacugauuu

SEQ ID NO: 1683857 - RNA, 21 nt, Human
agcuucuguugcugccucaug

SEQ ID NO: 1683858 - RNA, 22 nt, Human
agcuucuguugcugccucaugc

SEQ ID NO: 1683859 - RNA, 15 nt, Human
aggggcacagggucu

SEQ ID NO: 1683860 - RNA, 21 nt, Human
aggggauagagagagaccacu

SEQ ID NO: 1683861 - RNA, 19 nt, Human
agggcgggaggauguucug

SEQ ID NO: 1683862 - RNA, 18 nt, Human
agggccuggccugagcug

SEQ ID NO: 1683863 - RNA, 17 nt, Human
agggcacaccgggcacu

SEQ ID NO: 1683864 - RNA, 22 nt, Human
agggcacagaaaauggaagaca

SEQ ID NO: 1683865 - RNA, 20 nt, Human
agggcacaccgggcacucag

SEQ ID NO: 1683866 - RNA, 21 nt, Human
agggcacaccgggcacucaga

SEQ ID NO: 1683867 - RNA, 15 nt, Human
agggccuggccugag

SEQ ID NO: 1683868 - RNA, 16 nt, Human
agggccuggccugagc

SEQ ID NO: 1683869 - RNA, 17 nt, Human
agggccuggccugagcu

SEQ ID NO: 1683870 - RNA, 20 nt, Human
aggcugaacuuguuuucugg

SEQ ID NO: 1683871 - RNA, 21 nt, Human
aggcugaacuuguuuucuggg

SEQ ID NO: 1683872 - RNA, 14 nt, Human
aggcucuucuccuu

SEQ ID NO: 1683873 - RNA, 23 nt, Human
aggcugaugccaaguuguuugag

SEQ ID NO: 1683874 - RNA, 23 nt, Human
aggcuagugugguguuuccuggc

SEQ ID NO: 1683875 - RNA, 18 nt, Human
aggcugccucucccauca

SEQ ID NO: 1683876 - RNA, 21 nt, Human
agggacgcuacccgggaaggg

SEQ ID NO: 1683877 - RNA, 12 nt, Human
agggacagaggg

SEQ ID NO: 1683878 - RNA, 13 nt, Human
agggacagagggg

SEQ ID NO: 1683879 - RNA, 20 nt, Human
agggacagaggggguggccu

SEQ ID NO: 1683880 - RNA, 17 nt, Human
aggucccuaauaaagcu

SEQ ID NO: 1683881 - RNA, 18 nt, Human
aggucccuaauaaagcug

SEQ ID NO: 1683882 - RNA, 19 nt, Human
aggucccuaauaaagcugu

SEQ ID NO: 1683883 - RNA, 20 nt, Human
aggucccuaauaaagcugug

SEQ ID NO: 1683884 - RNA, 22 nt, Human
agguacgaaaagaggggaagag

SEQ ID NO: 1683885 - RNA, 18 nt, Human
agguaaucgaccugccuc

SEQ ID NO: 1683886 - RNA, 19 nt, Human
agguaaucgaccugccucg

SEQ ID NO: 1683887 - RNA, 17 nt, Human
agguaaucgaccugccu

SEQ ID NO: 1683888 - RNA, 17 nt, Human
agguaaggaauaccugu

SEQ ID NO: 1683889 - RNA, 15 nt, Human
agguggaaauaaacu

SEQ ID NO: 1683890 - RNA, 14 nt, Human
aggucgaggcagga

SEQ ID NO: 1683891 - RNA, 16 nt, Human
aggugcugccauccag

SEQ ID NO: 1683892 - RNA, 17 nt, Human
aggugcugccauccagg

SEQ ID NO: 1683893 - RNA, 17 nt, Human
agguucaugcaaacuuu

SEQ ID NO: 1683894 - RNA, 13 nt, Human
agguucagcuugu

SEQ ID NO: 1683895 - RNA, 17 nt, Human
agguucaaagauauuuu

SEQ ID NO: 1683896 - RNA, 14 nt, Human
agguuaauguucau

SEQ ID NO: 1683897 - RNA, 15 nt, Human
agguuaauaaaguaa

SEQ ID NO: 1683898 - RNA, 20 nt, Human
agccucccaaagugcuggga

SEQ ID NO: 1683899 - RNA, 18 nt, Human
agccucccgaauagcugg

SEQ ID NO: 1683900 - RNA, 19 nt, Human
agccucccgaauagcuggg

SEQ ID NO: 1683901 - RNA, 20 nt, Human
agccucccgaauagcuggga

SEQ ID NO: 1683902 - RNA, 22 nt, Human
agccucccgaauagcugggacu

SEQ ID NO: 1683903 - RNA, 17 nt, Human
agccucccgaguagcug

SEQ ID NO: 1683904 - RNA, 23 nt, Human
agccucccuauuuuuuuucuguu

SEQ ID NO: 1683905 - RNA, 18 nt, Human
agccucccaaagugcugg

SEQ ID NO: 1683906 - RNA, 19 nt, Human
agccucccaaagugcuggg

SEQ ID NO: 1683907 - RNA, 14 nt, Human
agccgcuggggcca

SEQ ID NO: 1683908 - RNA, 22 nt, Human
agccgcuggggccaguuggucc

SEQ ID NO: 1683909 - RNA, 20 nt, Human
agccgagauugcaccacugc

SEQ ID NO: 1683910 - RNA, 21 nt, Human
agccgagaucacgccacugca

SEQ ID NO: 1683911 - RNA, 19 nt, Human
agccgagauugcaccacug

SEQ ID NO: 1683912 - RNA, 23 nt, Human
agccccauaauuuuuuuuuuccu

SEQ ID NO: 1683913 - RNA, 16 nt, Human
agccccagugcccaca

SEQ ID NO: 1683914 - RNA, 20 nt, Human
agccccaucccaaacccuuc

SEQ ID NO: 1683915 - RNA, 11 nt, Human
agccccauccu

SEQ ID NO: 1683916 - RNA, 15 nt, Human
agcccugagcuuucu

SEQ ID NO: 1683917 - RNA, 19 nt, Human
agccgagaucacgccacug

SEQ ID NO: 1683918 - RNA, 20 nt, Human
agccgagaucacgccacugc

SEQ ID NO: 1683919 - RNA, 21 nt, Human
agcagccacauuccugaugcu

SEQ ID NO: 1683920 - RNA, 20 nt, Human
agcacuaaggugugcucuga

SEQ ID NO: 1683921 - RNA, 19 nt, Human
agcacuaaggugugcucug

SEQ ID NO: 1683922 - RNA, 18 nt, Human
agcaguucagagcugccc

SEQ ID NO: 1683923 - RNA, 17 nt, Human
agcaguucagagcugcc

SEQ ID NO: 1683924 - RNA, 15 nt, Human
agcaguucagagcug

SEQ ID NO: 1683925 - RNA, 16 nt, Human
agcaguucagagcugc

SEQ ID NO: 1683926 - RNA, 23 nt, Human
agcaguugaaaagacuccaaaga

SEQ ID NO: 1683927 - RNA, 21 nt, Human
agcaguugaaaagacuccaaa

SEQ ID NO: 1683928 - RNA, 14 nt, Human
agauguagaggaga

SEQ ID NO: 1683929 - RNA, 21 nt, Human
agaugggagaaucacuugaac

SEQ ID NO: 1683930 - RNA, 19 nt, Human
agcaguucagagcugcccu

SEQ ID NO: 1683931 - RNA, 20 nt, Human
agcaguucagagcugcccuc

SEQ ID NO: 1683932 - RNA, 14 nt, Human
agcaugcacaaauu

SEQ ID NO: 1683933 - RNA, 12 nt, Human
agcaugccugga

SEQ ID NO: 1683934 - RNA, 20 nt, Human
agcaugccuggauggggcug

SEQ ID NO: 1683935 - RNA, 19 nt, Human
agccaaagcuaggccuggc

SEQ ID NO: 1683936 - RNA, 20 nt, Human
agccaaagcuaggccuggcc

SEQ ID NO: 1683937 - RNA, 23 nt, Human
agccaaagcuaggccuggccaga

SEQ ID NO: 1683938 - RNA, 20 nt, Human
agccagaggagagaggaccc

SEQ ID NO: 1683939 - RNA, 22 nt, Human
agccaaggccaaaggaagcaca

SEQ ID NO: 1683940 - RNA, 23 nt, Human
agccaaggccaaaggaagcacau

SEQ ID NO: 1683941 - RNA, 22 nt, Human
agccauguuuauuacaguauaa

SEQ ID NO: 1683942 - RNA, 15 nt, Human
agccagauuuuccug

SEQ ID NO: 1683943 - RNA, 19 nt, Human
agccagauuuuccugaaaa

SEQ ID NO: 1683944 - RNA, 14 nt, Human
agaguguugaaacg

SEQ ID NO: 1683945 - RNA, 13 nt, Human
agauagccaaggc

SEQ ID NO: 1683946 - RNA, 22 nt, Human
agauacuuggggggcugaggug

SEQ ID NO: 1683947 - RNA, 13 nt, Human
agaggagaggggc

SEQ ID NO: 1683948 - RNA, 16 nt, Human
agaggggaagagacuu

SEQ ID NO: 1683949 - RNA, 22 nt, Human
agaggggaacagacuggaagca

SEQ ID NO: 1683950 - RNA, 23 nt, Human
agauggcugugccucugccuguc

SEQ ID NO: 1683951 - RNA, 14 nt, Human
agaucuucuguggg

SEQ ID NO: 1683952 - RNA, 15 nt, Human
agauagccaaggcca

SEQ ID NO: 1683953 - RNA, 16 nt, Human
agauagccaaggccaa

SEQ ID NO: 1683954 - RNA, 21 nt, Human
agauaggucagugcaaauacu

SEQ ID NO: 1683955 - RNA, 15 nt, Human
agagcccuucauuug

SEQ ID NO: 1683956 - RNA, 14 nt, Human
agagaguggcuccu

SEQ ID NO: 1683957 - RNA, 16 nt, Human
agagaguggcuccucc

SEQ ID NO: 1683958 - RNA, 23 nt, Human
agagaggguggugaccucugccu

SEQ ID NO: 1683959 - RNA, 20 nt, Human
agagagcuucuguugcugcc

SEQ ID NO: 1683960 - RNA, 23 nt, Human
agagagcuucuguugcugccuca

SEQ ID NO: 1683961 - RNA, 16 nt, Human
agagagcuucuguugc

SEQ ID NO: 1683962 - RNA, 18 nt, Human
agagaaaguacuucucca

SEQ ID NO: 1683963 - RNA, 10 nt, Human
agagaagaga

SEQ ID NO: 1683964 - RNA, 21 nt, Human
agagaagagauugugguuuca

SEQ ID NO: 1683965 - RNA, 17 nt, Human
agacugcauuauauuua

SEQ ID NO: 1683966 - RNA, 21 nt, Human
agacaauuuauuauggcacau

SEQ ID NO: 1683967 - RNA, 15 nt, Human
agacaauuuauuaug

SEQ ID NO: 1683968 - RNA, 19 nt, Human
agacaaugacuuacuguac

SEQ ID NO: 1683969 - RNA, 17 nt, Human
agacaaugacuuacugu

SEQ ID NO: 1683970 - RNA, 13 nt, Human
agacaaugacuua

SEQ ID NO: 1683971 - RNA, 19 nt, Human
agacggagucccaccuugg

SEQ ID NO: 1683972 - RNA, 18 nt, Human
agacgggggcagagaggg

SEQ ID NO: 1683973 - RNA, 13 nt, Human
agaccaucccuga

SEQ ID NO: 1683974 - RNA, 14 nt, Human
agaccaucccugaa

SEQ ID NO: 1683975 - RNA, 17 nt, Human
agaccaucccugaaggc

SEQ ID NO: 1683976 - RNA, 18 nt, Human
agaccaucccugaaggcc

SEQ ID NO: 1683977 - RNA, 21 nt, Human
agaccaucccugaaggccccg

SEQ ID NO: 1683978 - RNA, 21 nt, Human
agacagcccgggcucugccuc

SEQ ID NO: 1683979 - RNA, 18 nt, Human
agacagcccgggcucugc

SEQ ID NO: 1683980 - RNA, 20 nt, Human
agacagcccgggcucugccu

SEQ ID NO: 1683981 - RNA, 17 nt, Human
agacagcccgggcucug

SEQ ID NO: 1683982 - RNA, 12 nt, Human
aucaccugcccu

SEQ ID NO: 1683983 - RNA, 13 nt, Human
aucaccugcccug

SEQ ID NO: 1683984 - RNA, 12 nt, Human
aucaccugucuu

SEQ ID NO: 1683985 - RNA, 21 nt, Human
aucaccugucuugccuuuuuc

SEQ ID NO: 1683986 - RNA, 22 nt, Human
aucaccugucuugccuuuuuca

SEQ ID NO: 1683987 - RNA, 11 nt, Human
aucagccuggg

SEQ ID NO: 1683988 - RNA, 20 nt, Human
aucagccugggcaaugugau

SEQ ID NO: 1683989 - RNA, 21 nt, Human
aucagccugggcaaugugaua

SEQ ID NO: 1683990 - RNA, 12 nt, Human
aucagcugcuac

SEQ ID NO: 1683991 - RNA, 13 nt, Human
aucagcugcuacu

SEQ ID NO: 1683992 - RNA, 23 nt, Human
aucagcugcuacuacuccuguag

SEQ ID NO: 1683993 - RNA, 17 nt, Human
aucagcugcugaaacaa

SEQ ID NO: 1683994 - RNA, 18 nt, Human
auccacccaccucagccu

SEQ ID NO: 1683995 - RNA, 20 nt, Human
auccacccaccucagccucc

SEQ ID NO: 1683996 - RNA, 14 nt, Human
aucccggcugcccu

SEQ ID NO: 1683997 - RNA, 15 nt, Human
aucccuacuguaauu

SEQ ID NO: 1683998 - RNA, 13 nt, Human
aucccucauccuc

SEQ ID NO: 1683999 - RNA, 18 nt, Human
auccucauacccaccccc

SEQ ID NO: 1684000 - RNA, 19 nt, Human
auccucauacccaccccca

SEQ ID NO: 1684001 - RNA, 22 nt, Human
auccucauacccacccccaccc

SEQ ID NO: 1684002 - RNA, 23 nt, Human
auccucauacccacccccaccca

SEQ ID NO: 1684003 - RNA, 11 nt, Human
auccuccucag

SEQ ID NO: 1684004 - RNA, 14 nt, Human
auccuccaggugca

SEQ ID NO: 1684005 - RNA, 19 nt, Human
auccuccaggugcacaagc

SEQ ID NO: 1684006 - RNA, 22 nt, Human
auccuccaggugcacaagcucc

SEQ ID NO: 1684007 - RNA, 13 nt, Human
aucgaugcagugc

SEQ ID NO: 1684008 - RNA, 14 nt, Human
auccuccucagauc

SEQ ID NO: 1684009 - RNA, 17 nt, Human
aucuugaagacuuuucu

SEQ ID NO: 1684010 - RNA, 22 nt, Human
aucuucugaacuuggcgcugcc

SEQ ID NO: 1684011 - RNA, 17 nt, Human
aucuucuuuauaauucu

SEQ ID NO: 1684012 - RNA, 24 nt, Human
aucuucucagaaggcaaaugacuu

SEQ ID NO: 1684013 - RNA, 22 nt, Human
aucucucgugauugauaagaac

SEQ ID NO: 1684014 - RNA, 19 nt, Human
aucuuccaacucaaacucu

SEQ ID NO: 1684015 - RNA, 21 nt, Human
aucuucuauauguuuaaaagu

SEQ ID NO: 1684016 - RNA, 15 nt, Human
aucugggccagaauu

SEQ ID NO: 1684017 - RNA, 17 nt, Human
aucugggccagaauuuc

SEQ ID NO: 1684018 - RNA, 22 nt, Human
aucuuauaauuuaaaauaugcu

SEQ ID NO: 1684019 - RNA, 13 nt, Human
augagccuggcaa

SEQ ID NO: 1684020 - RNA, 14 nt, Human
augagccuggcaag

SEQ ID NO: 1684021 - RNA, 18 nt, Human
augaagcuuuuaugugaa

SEQ ID NO: 1684022 - RNA, 19 nt, Human
augaagcuuuuaugugaaa

SEQ ID NO: 1684023 - RNA, 20 nt, Human
augaagcuuuuaugugaaac

SEQ ID NO: 1684024 - RNA, 21 nt, Human
augaagcuuuuaugugaaaca

SEQ ID NO: 1684025 - RNA, 12 nt, Human
augacccagugg

SEQ ID NO: 1684026 - RNA, 17 nt, Human
augacuccagaauuucc

SEQ ID NO: 1684027 - RNA, 12 nt, Human
augacuccagaa

SEQ ID NO: 1684028 - RNA, 16 nt, Human
augacuccagaauuuc

SEQ ID NO: 1684029 - RNA, 14 nt, Human
augaaaaaauauau

SEQ ID NO: 1684030 - RNA, 17 nt, Human
augaaaaaauauauauc

SEQ ID NO: 1684031 - RNA, 22 nt, Human
augaaaaaauauauaucaaaua

SEQ ID NO: 1684032 - RNA, 23 nt, Human
augaaaaaauauauaucaaauau

SEQ ID NO: 1684033 - RNA, 23 nt, Human
auggcugccaaugggagcucaug

SEQ ID NO: 1684034 - RNA, 21 nt, Human
augggaaugaaugucagugug

SEQ ID NO: 1684035 - RNA, 15 nt, Human
augggaaugaauguc

SEQ ID NO: 1684036 - RNA, 18 nt, Human
auggagccugcacgguga

SEQ ID NO: 1684037 - RNA, 22 nt, Human
auggagccugcacggugaaugg

SEQ ID NO: 1684038 - RNA, 13 nt, Human
auggaaauguuua

SEQ ID NO: 1684039 - RNA, 19 nt, Human
auggaaaugggcagagcag

SEQ ID NO: 1684040 - RNA, 20 nt, Human
auggaaaugggcagagcaga

SEQ ID NO: 1684041 - RNA, 23 nt, Human
augcaugaaguaauaugcacaca

SEQ ID NO: 1684042 - RNA, 18 nt, Human
augcauuugaaaauuuug

SEQ ID NO: 1684043 - RNA, 12 nt, Human
augcauuugaaa

SEQ ID NO: 1684044 - RNA, 10 nt, Human
augcauuuga

SEQ ID NO: 1684045 - RNA, 21 nt, Human
augccuggauggggcugcacc

SEQ ID NO: 1684046 - RNA, 23 nt, Human
augccuggauggggcugcaccgg

SEQ ID NO: 1684047 - RNA, 17 nt, Human
augccugggcagaagga

SEQ ID NO: 1684048 - RNA, 11 nt, Human
augccuggugg

SEQ ID NO: 1684049 - RNA, 15 nt, Human
augccugguggcagc

SEQ ID NO: 1684050 - RNA, 16 nt, Human
augccugguggcagcu

SEQ ID NO: 1684051 - RNA, 17 nt, Human
augccugguggcagcug

SEQ ID NO: 1684052 - RNA, 21 nt, Human
augcacagcuaacauggaagu

SEQ ID NO: 1684053 - RNA, 23 nt, Human
augcacacauuuuuuaaaugcac

SEQ ID NO: 1684054 - RNA, 14 nt, Human
augcacagcuaaca

SEQ ID NO: 1684055 - RNA, 22 nt, Human
augcacacauuuuuuaaaugca

SEQ ID NO: 1684056 - RNA, 19 nt, Human
augcacacauuuuuuaaau

SEQ ID NO: 1684057 - RNA, 17 nt, Human
augcacacauuuuuuaa

SEQ ID NO: 1684058 - RNA, 23 nt, Human
augauguauguugaagccuuugu

SEQ ID NO: 1684059 - RNA, 16 nt, Human
augaugugugaaaacu

SEQ ID NO: 1684060 - RNA, 21 nt, Human
augccuuuguacuuuagggaa

SEQ ID NO: 1684061 - RNA, 14 nt, Human
augccuuuucccaa

SEQ ID NO: 1684062 - RNA, 18 nt, Human
auguuucuuuguaaugaa

SEQ ID NO: 1684063 - RNA, 20 nt, Human
auguucuuucacccuuuucu

SEQ ID NO: 1684064 - RNA, 15 nt, Human
auguucuuaauucuu

SEQ ID NO: 1684065 - RNA, 20 nt, Human
auguucuuaguggauguucu

SEQ ID NO: 1684066 - RNA, 22 nt, Human
auguucugacccugcuucaaau

SEQ ID NO: 1684067 - RNA, 18 nt, Human
auguucucugaggacacu

SEQ ID NO: 1684068 - RNA, 16 nt, Human
auguuuuaagaggcag

SEQ ID NO: 1684069 - RNA, 18 nt, Human
auguuuuaagaggcaggg

SEQ ID NO: 1684070 - RNA, 14 nt, Human
auuaaaugcccagc

SEQ ID NO: 1684071 - RNA, 15 nt, Human
auuaaaugcccagcc

SEQ ID NO: 1684072 - RNA, 16 nt, Human
auuaaaugcccagccc

SEQ ID NO: 1684073 - RNA, 13 nt, Human
auuaaauucuugc

SEQ ID NO: 1684074 - RNA, 14 nt, Human
auguguaaguauuc

SEQ ID NO: 1684075 - RNA, 15 nt, Human
augucacaggcaggu

SEQ ID NO: 1684076 - RNA, 16 nt, Human
augucacaggcagguc

SEQ ID NO: 1684077 - RNA, 17 nt, Human
augucacaggcaggucc

SEQ ID NO: 1684078 - RNA, 17 nt, Human
auguacauguacugauu

SEQ ID NO: 1684079 - RNA, 16 nt, Human
augucaaucagccuag

SEQ ID NO: 1684080 - RNA, 21 nt, Human
auguaagggaaacugccagca

SEQ ID NO: 1684081 - RNA, 22 nt, Human
auguaagggaaacugccagcaa

SEQ ID NO: 1684082 - RNA, 17 nt, Human
auguaagcucuacugag

SEQ ID NO: 1684083 - RNA, 20 nt, Human
auguaagggaaacugccagc

SEQ ID NO: 1684084 - RNA, 16 nt, Human
auguaaguaaacgguc

SEQ ID NO: 1684085 - RNA, 15 nt, Human
aguuguuacauuuuu

SEQ ID NO: 1684086 - RNA, 13 nt, Human
aguuguuacauuu

SEQ ID NO: 1684087 - RNA, 16 nt, Human
aguuguuacauuuuua

SEQ ID NO: 1684088 - RNA, 11 nt, Human
aguugaauuua

SEQ ID NO: 1684089 - RNA, 13 nt, Human
aguugaauuuauu

SEQ ID NO: 1684090 - RNA, 17 nt, Human
aguugaauuuauuggcu

SEQ ID NO: 1684091 - RNA, 19 nt, Human
aguugaauuuauuggcuuu

SEQ ID NO: 1684092 - RNA, 18 nt, Human
aguuacagacaaagcgug

SEQ ID NO: 1684093 - RNA, 19 nt, Human
aguuguaccgcaaugugac

SEQ ID NO: 1684094 - RNA, 20 nt, Human
aguugaauuuauuggcuuuu

SEQ ID NO: 1684095 - RNA, 15 nt, Human
aguugaauuuuacau

SEQ ID NO: 1684096 - RNA, 18 nt, Human
aguuguaccgcaauguga

SEQ ID NO: 1684097 - RNA, 23 nt, Human
agugugacaaggauugcuacugu

SEQ ID NO: 1684098 - RNA, 18 nt, Human
agugauucucaugccuca

SEQ ID NO: 1684099 - RNA, 19 nt, Human
agugauucucaugccucag

SEQ ID NO: 1684100 - RNA, 18 nt, Human
agugauuaccagggacug

SEQ ID NO: 1684101 - RNA, 15 nt, Human
agugauuaccaggga

SEQ ID NO: 1684102 - RNA, 13 nt, Human
agugauccuccca

SEQ ID NO: 1684103 - RNA, 15 nt, Human
agucauucagauaug

SEQ ID NO: 1684104 - RNA, 20 nt, Human
agucauucagauaugauuca

SEQ ID NO: 1684105 - RNA, 23 nt, Human
agucauucagauaugauucaaau

SEQ ID NO: 1684106 - RNA, 16 nt, Human
aguccaagcauuuaga

SEQ ID NO: 1684107 - RNA, 21 nt, Human
aguccaagcauuuagauguau

SEQ ID NO: 1684108 - RNA, 20 nt, Human
agucaagugaaaaaggagga

SEQ ID NO: 1684109 - RNA, 18 nt, Human
agucaaggguaggguggg

SEQ ID NO: 1684110 - RNA, 16 nt, Human
agucaagugaaaaagg

SEQ ID NO: 1684111 - RNA, 15 nt, Human
agucaaauuguguga

SEQ ID NO: 1684112 - RNA, 17 nt, Human
agucaaauugugugaaa

SEQ ID NO: 1684113 - RNA, 13 nt, Human
agucaaauugugu

SEQ ID NO: 1684114 - RNA, 19 nt, Human
auaaguauuuaauucaugu

SEQ ID NO: 1684115 - RNA, 19 nt, Human
auaaguguguguuuuucau

SEQ ID NO: 1684116 - RNA, 22 nt, Human
auaaguguguguuuuucauaaa

SEQ ID NO: 1684117 - RNA, 18 nt, Human
auaaugugaaacuggauu

SEQ ID NO: 1684118 - RNA, 20 nt, Human
auaauuaacauguuaaacca

SEQ ID NO: 1684119 - RNA, 21 nt, Human
auaauuaacauguuaaaccau

SEQ ID NO: 1684120 - RNA, 22 nt, Human
auaauuaacauguuaaaccaug

SEQ ID NO: 1684121 - RNA, 21 nt, Human
auaaugugaaacuggauuaaa

SEQ ID NO: 1684122 - RNA, 19 nt, Human
auaaugugaaacuggauua

SEQ ID NO: 1684123 - RNA, 13 nt, Human
auaccuguccccc

SEQ ID NO: 1684124 - RNA, 12 nt, Human
auaccugucccc

SEQ ID NO: 1684125 - RNA, 17 nt, Human
auaccuacauguauuug

SEQ ID NO: 1684126 - RNA, 15 nt, Human
auaccuacauguauu

SEQ ID NO: 1684127 - RNA, 22 nt, Human
auacccccugcaaagcccagcu

SEQ ID NO: 1684128 - RNA, 19 nt, Human
auacaauuuuguuucugua

SEQ ID NO: 1684129 - RNA, 20 nt, Human
auacaauuuuguuucuguac

SEQ ID NO: 1684130 - RNA, 14 nt, Human
auaauuacuauguc

SEQ ID NO: 1684131 - RNA, 16 nt, Human
auauaggaacuuaaau

SEQ ID NO: 1684132 - RNA, 15 nt, Human
auacuugaaaauuaa

SEQ ID NO: 1684133 - RNA, 16 nt, Human
auacuugaaaauuaac

SEQ ID NO: 1684134 - RNA, 19 nt, Human
auacuugaaaauuaacaug

SEQ ID NO: 1684135 - RNA, 15 nt, Human
auaguaugguggcug

SEQ ID NO: 1684136 - RNA, 15 nt, Human
auauaaguguguguu

SEQ ID NO: 1684137 - RNA, 15 nt, Human
auauaagugauugcu

SEQ ID NO: 1684138 - RNA, 16 nt, Human
auaguaugguggcugg

SEQ ID NO: 1684139 - RNA, 23 nt, Human
auauuucagauaaucacaauaca

SEQ ID NO: 1684140 - RNA, 17 nt, Human
auauucaggaagcucag

SEQ ID NO: 1684141 - RNA, 14 nt, Human
auauucaggaagcu

SEQ ID NO: 1684142 - RNA, 16 nt, Human
auauucaggaagcuca

SEQ ID NO: 1684143 - RNA, 13 nt, Human
auauucaggaagc

SEQ ID NO: 1684144 - RNA, 18 nt, Human
auauuuaguguucauaaa

SEQ ID NO: 1684145 - RNA, 16 nt, Human
auauuuauaaaaauaa

SEQ ID NO: 1684146 - RNA, 14 nt, Human
auauuuauuacugu

SEQ ID NO: 1684147 - RNA, 19 nt, Human
auauuuauuacuguaagaa

SEQ ID NO: 1684148 - RNA, 18 nt, Human
auauuuauuuuaauaaug

SEQ ID NO: 1684149 - RNA, 22 nt, Human
auauuuauuacuguaagaaaau

SEQ ID NO: 1684150 - RNA, 18 nt, Human
auaucacuugucaauaaa

SEQ ID NO: 1684151 - RNA, 21 nt, Human
auaugcuuauacacuuacacu

SEQ ID NO: 1684152 - RNA, 14 nt, Human
auaugcuuauacac

SEQ ID NO: 1684153 - RNA, 16 nt, Human
auaugcuuauacacuu

SEQ ID NO: 1684154 - RNA, 23 nt, Human
auaugcuucuguuuuauaauuuu

SEQ ID NO: 1684155 - RNA, 19 nt, Human
auaugcuuauacacuuaca

SEQ ID NO: 1684156 - RNA, 14 nt, Human
auaugcuauuucua

SEQ ID NO: 1684157 - RNA, 22 nt, Human
auaugccugggcagaaggaaga

SEQ ID NO: 1684158 - RNA, 23 nt, Human
acauaaacaagaccacguuucua

SEQ ID NO: 1684159 - RNA, 14 nt, Human
acauaaaucuguga

SEQ ID NO: 1684160 - RNA, 15 nt, Human
acauaaaucugugaa

SEQ ID NO: 1684161 - RNA, 18 nt, Human
acauaaaucugugaacuu

SEQ ID NO: 1684162 - RNA, 20 nt, Human
acauaaauuuaguauuuugu

SEQ ID NO: 1684163 - RNA, 22 nt, Human
acaucagcacgauuucuguuua

SEQ ID NO: 1684164 - RNA, 21 nt, Human
acaucagcacgauuucuguuu

SEQ ID NO: 1684165 - RNA, 20 nt, Human
acaucagcacgauuucuguu

SEQ ID NO: 1684166 - RNA, 19 nt, Human
acaugcaaggucauuuuuu

SEQ ID NO: 1684167 - RNA, 20 nt, Human
acaugcacagcuaacaugga

SEQ ID NO: 1684168 - RNA, 23 nt, Human
acaugcacagcuaacauggaagu

SEQ ID NO: 1684169 - RNA, 21 nt, Human
acauguuuuucuucucccuca

SEQ ID NO: 1684170 - RNA, 13 nt, Human
acauguuacaaca

SEQ ID NO: 1684171 - RNA, 20 nt, Human
accacgcccggcuaauuuuu

SEQ ID NO: 1684172 - RNA, 14 nt, Human
accacgcccggcua

SEQ ID NO: 1684173 - RNA, 14 nt, Human
accacuacauucug

SEQ ID NO: 1684174 - RNA, 19 nt, Human
accacguuucuaaaggcua

SEQ ID NO: 1684175 - RNA, 15 nt, Human
accacguuucuaaag

SEQ ID NO: 1684176 - RNA, 15 nt, Human
accacuacauucugu

SEQ ID NO: 1684177 - RNA, 14 nt, Human
accagcagccugga

SEQ ID NO: 1684178 - RNA, 17 nt, Human
accagcagccuggaccc

SEQ ID NO: 1684179 - RNA, 18 nt, Human
acauuugcucauggaauu

SEQ ID NO: 1684180 - RNA, 14 nt, Human
acauuuguauaaaa

SEQ ID NO: 1684181 - RNA, 20 nt, Human
accccucaacaccucugcac

SEQ ID NO: 1684182 - RNA, 14 nt, Human
accaucaugucugg

SEQ ID NO: 1684183 - RNA, 21 nt, Human
accaucccugaaggccccgcc

SEQ ID NO: 1684184 - RNA, 22 nt, Human
accaucccugaaggccccgccc

SEQ ID NO: 1684185 - RNA, 16 nt, Human
accaucaugucuggcu

SEQ ID NO: 1684186 - RNA, 17 nt, Human
accaucaugucuggcua

SEQ ID NO: 1684187 - RNA, 12 nt, Human
accaucauugaa

SEQ ID NO: 1684188 - RNA, 18 nt, Human
accaucccugaaggcccc

SEQ ID NO: 1684189 - RNA, 22 nt, Human
accccuaaagagauacuuugau

SEQ ID NO: 1684190 - RNA, 15 nt, Human
accccggccaccugc

SEQ ID NO: 1684191 - RNA, 18 nt, Human
accccgaccaccugccca

SEQ ID NO: 1684192 - RNA, 19 nt, Human
acccaugcugcccugugag

SEQ ID NO: 1684193 - RNA, 17 nt, Human
acccaugcugcccugug

SEQ ID NO: 1684194 - RNA, 18 nt, Human
acccaugcugcccuguga

SEQ ID NO: 1684195 - RNA, 13 nt, Human
acccaagggccug

SEQ ID NO: 1684196 - RNA, 16 nt, Human
acccaagggccuggcc

SEQ ID NO: 1684197 - RNA, 16 nt, Human
acccaaguccaagcau

SEQ ID NO: 1684198 - RNA, 15 nt, Human
acccacaagaaauga

SEQ ID NO: 1684199 - RNA, 12 nt, Human
acagcuccuucu

SEQ ID NO: 1684200 - RNA, 13 nt, Human
acagcuccuucug

SEQ ID NO: 1684201 - RNA, 14 nt, Human
acagcuccuucugu

SEQ ID NO: 1684202 - RNA, 23 nt, Human
acagcugccugggaucccucauc

SEQ ID NO: 1684203 - RNA, 13 nt, Human
acagcucuguccu

SEQ ID NO: 1684204 - RNA, 14 nt, Human
acagcugccuggga

SEQ ID NO: 1684205 - RNA, 15 nt, Human
acagcuccuucuguc

SEQ ID NO: 1684206 - RNA, 20 nt, Human
acagcucugcauacucauua

SEQ ID NO: 1684207 - RNA, 21 nt, Human
acagcugcucaauaaaguaca

SEQ ID NO: 1684208 - RNA, 19 nt, Human
acaggcaagcaccuccugc

SEQ ID NO: 1684209 - RNA, 18 nt, Human
acaggcaagcaccuccug

SEQ ID NO: 1684210 - RNA, 15 nt, Human
acaggcaagcaccuc

SEQ ID NO: 1684211 - RNA, 16 nt, Human
acaggcaagcaccucc

SEQ ID NO: 1684212 - RNA, 22 nt, Human
acaggugugagccaccacgccc

SEQ ID NO: 1684213 - RNA, 21 nt, Human
acaggugugagccaccacgcc

SEQ ID NO: 1684214 - RNA, 20 nt, Human
acaggugugaaccaccacac

SEQ ID NO: 1684215 - RNA, 23 nt, Human
acaggugugaaccaccacaccca

SEQ ID NO: 1684216 - RNA, 21 nt, Human
acagaacacauaauucaggaa

SEQ ID NO: 1684217 - RNA, 15 nt, Human
acagccaugauucuu

SEQ ID NO: 1684218 - RNA, 16 nt, Human
acagccagacuggcac

SEQ ID NO: 1684219 - RNA, 13 nt, Human
acagccagacugg

SEQ ID NO: 1684220 - RNA, 15 nt, Human
acagccagacuggca

SEQ ID NO: 1684221 - RNA, 17 nt, Human
acagagucucacuguug

SEQ ID NO: 1684222 - RNA, 19 nt, Human
acagagucucacuguugcc

SEQ ID NO: 1684223 - RNA, 23 nt, Human
acagagucucacuguugcccagg

SEQ ID NO: 1684224 - RNA, 15 nt, Human
acagcaguugaaaag

SEQ ID NO: 1684225 - RNA, 18 nt, Human
acagcaguugaaaagacu

SEQ ID NO: 1684226 - RNA, 22 nt, Human
acagaggggguggccucccaac

SEQ ID NO: 1684227 - RNA, 12 nt, Human
acagagucucac

SEQ ID NO: 1684228 - RNA, 14 nt, Human
acagagucucacug

SEQ ID NO: 1684229 - RNA, 15 nt, Human
acacggacacucaaa

SEQ ID NO: 1684230 - RNA, 14 nt, Human
acacuaaccacgcu

SEQ ID NO: 1684231 - RNA, 15 nt, Human
acacuaaccacgcug

SEQ ID NO: 1684232 - RNA, 14 nt, Human
acacagcucugucc

SEQ ID NO: 1684233 - RNA, 11 nt, Human
acacagcucug

SEQ ID NO: 1684234 - RNA, 12 nt, Human
acacagcucugu

SEQ ID NO: 1684235 - RNA, 17 nt, Human
acacgcuccuuccucug

SEQ ID NO: 1684236 - RNA, 19 nt, Human
acacgcuccuuccucugag

SEQ ID NO: 1684237 - RNA, 12 nt, Human
acaccagagccc

SEQ ID NO: 1684238 - RNA, 13 nt, Human
acaccagagccca

SEQ ID NO: 1684239 - RNA, 14 nt, Human
acaccacuacauuc

SEQ ID NO: 1684240 - RNA, 15 nt, Human
acaauuuauuauggc

SEQ ID NO: 1684241 - RNA, 16 nt, Human
acaauuuauuauggca

SEQ ID NO: 1684242 - RNA, 14 nt, Human
acaauuuuguuucu

SEQ ID NO: 1684243 - RNA, 15 nt, Human
acaauuuuguuucug

SEQ ID NO: 1684244 - RNA, 17 nt, Human
acaauuuuguuucugua

SEQ ID NO: 1684245 - RNA, 18 nt, Human
acaauuuuguuucuguac

SEQ ID NO: 1684246 - RNA, 18 nt, Human
acacaaacgggcucagca

SEQ ID NO: 1684247 - RNA, 21 nt, Human
acaaaccuguuucugcagcca

SEQ ID NO: 1684248 - RNA, 15 nt, Human
acaaacgggcucagc

SEQ ID NO: 1684249 - RNA, 13 nt, Human
acaaagacugagu

SEQ ID NO: 1684250 - RNA, 18 nt, Human
acaacuaugauuuggaaa

SEQ ID NO: 1684251 - RNA, 13 nt, Human
acaacuauauugu

SEQ ID NO: 1684252 - RNA, 20 nt, Human
acaaaauggaauacucuuau

SEQ ID NO: 1684253 - RNA, 20 nt, Human
acaaaauguaggguuauaau

SEQ ID NO: 1684254 - RNA, 15 nt, Human
acaaaauggaauacu

SEQ ID NO: 1684255 - RNA, 19 nt, Human
acaaaauggaauacucuua

SEQ ID NO: 1684256 - RNA, 13 nt, Human
aauuuugaaaaac

SEQ ID NO: 1684257 - RNA, 21 nt, Human
acaaguaugaauaaagacacc

SEQ ID NO: 1684258 - RNA, 23 nt, Human
acaaguaugaauaaagacaccua

SEQ ID NO: 1684259 - RNA, 20 nt, Human
acaagucagucauucagaua

SEQ ID NO: 1684260 - RNA, 16 nt, Human
agaaaggauaaaguug

SEQ ID NO: 1684261 - RNA, 15 nt, Human
agaaauaaaguuucu

SEQ ID NO: 1684262 - RNA, 18 nt, Human
agaaauaaaguuucuguu

SEQ ID NO: 1684263 - RNA, 20 nt, Human
agaaaggaggggauagagag

SEQ ID NO: 1684264 - RNA, 23 nt, Human
agaaaggaggggauagagagaga

SEQ ID NO: 1684265 - RNA, 16 nt, Human
acuuucuagccagagg

SEQ ID NO: 1684266 - RNA, 23 nt, Human
acuuuguucuggcucuuccaggc

SEQ ID NO: 1684267 - RNA, 23 nt, Human
acuuuccuucauucaacccaccu

SEQ ID NO: 1684268 - RNA, 23 nt, Human
acuuuagggaaguacuuuuggca

SEQ ID NO: 1684269 - RNA, 18 nt, Human
agaaaaguugaauuuuac

SEQ ID NO: 1684270 - RNA, 21 nt, Human
agaaaaguugaauuuuacaug

SEQ ID NO: 1684271 - RNA, 12 nt, Human
acuuuucugaua

SEQ ID NO: 1684272 - RNA, 22 nt, Human
acuuuuauaaacuuuaccuuuu

SEQ ID NO: 1684273 - RNA, 19 nt, Human
acuuuuauaaacuuuaccu

SEQ ID NO: 1684274 - RNA, 15 nt, Human
acuuuuauaaacuuu

SEQ ID NO: 1684275 - RNA, 23 nt, Human
agaaaauggaagacagcucuuau

SEQ ID NO: 1684276 - RNA, 15 nt, Human
agaaaauggacgugu

SEQ ID NO: 1684277 - RNA, 20 nt, Human
agaaaauggacguguuauga

SEQ ID NO: 1684278 - RNA, 14 nt, Human
agaaaauaacaaua

SEQ ID NO: 1684279 - RNA, 22 nt, Human
agaaaauggacguguuaugacu

SEQ ID NO: 1684280 - RNA, 23 nt, Human
agaaaauggacguguuaugacuc

SEQ ID NO: 1684281 - RNA, 14 nt, Human
acuggagaaaaugg

SEQ ID NO: 1684282 - RNA, 14 nt, Human
acuggguuccugca

SEQ ID NO: 1684283 - RNA, 19 nt, Human
acugcccccucugcccugc

SEQ ID NO: 1684284 - RNA, 18 nt, Human
acugcccccucugcccug

SEQ ID NO: 1684285 - RNA, 20 nt, Human
acugcccccucugcccugcg

SEQ ID NO: 1684286 - RNA, 16 nt, Human
acuggaagcacagcuu

SEQ ID NO: 1684287 - RNA, 15 nt, Human
acuggaagcacagcu

SEQ ID NO: 1684288 - RNA, 14 nt, Human
acuggaagcacagc

SEQ ID NO: 1684289 - RNA, 19 nt, Human
acugucucaagagggcacu

SEQ ID NO: 1684290 - RNA, 21 nt, Human
acugguggcccgacagccugg

SEQ ID NO: 1684291 - RNA, 22 nt, Human
acugguggcccgacagccuggc

SEQ ID NO: 1684292 - RNA, 20 nt, Human
acugguggcccgacagccug

SEQ ID NO: 1684293 - RNA, 23 nt, Human
acugguggcccgacagccuggca

SEQ ID NO: 1684294 - RNA, 16 nt, Human
acugugccaugugcca

SEQ ID NO: 1684295 - RNA, 12 nt, Human
acugucuucagu

SEQ ID NO: 1684296 - RNA, 22 nt, Human
acuucugccagcauaauacuug

SEQ ID NO: 1684297 - RNA, 18 nt, Human
acuucugccauauucugu

SEQ ID NO: 1684298 - RNA, 23 nt, Human
acuucacauauugauuuccguua

SEQ ID NO: 1684299 - RNA, 21 nt, Human
acuucuuuaauuuuggaauuu

SEQ ID NO: 1684300 - RNA, 19 nt, Human
acuucugccauauucuguu

SEQ ID NO: 1684301 - RNA, 20 nt, Human
acuuguaaaggaauuuaaaa

SEQ ID NO: 1684302 - RNA, 19 nt, Human
acuuguaaaggaauuuaaa

SEQ ID NO: 1684303 - RNA, 14 nt, Human
acuuggucugugag

SEQ ID NO: 1684304 - RNA, 15 nt, Human
acuuggucugugaga

SEQ ID NO: 1684305 - RNA, 20 nt, Human
acuuguaaaugugguaaaga

SEQ ID NO: 1684306 - RNA, 18 nt, Human
acuuguaaaugugguaaa

SEQ ID NO: 1684307 - RNA, 21 nt, Human
acuuggucugugagaugcuag

SEQ ID NO: 1684308 - RNA, 13 nt, Human
acuguuucaaacu

SEQ ID NO: 1684309 - RNA, 19 nt, Human
acuucacauauugauuucc

SEQ ID NO: 1684310 - RNA, 20 nt, Human
acuuauuguagcauccugga

SEQ ID NO: 1684311 - RNA, 23 nt, Human
acuuauuguagcauccuggaaua

SEQ ID NO: 1684312 - RNA, 20 nt, Human
accugccccuccucucugcc

SEQ ID NO: 1684313 - RNA, 22 nt, Human
accugccccuccucucugcccu

SEQ ID NO: 1684314 - RNA, 14 nt, Human
accuuggcucaagu

SEQ ID NO: 1684315 - RNA, 12 nt, Human
accuuggcugca

SEQ ID NO: 1684316 - RNA, 12 nt, Human
accuuuauucug

SEQ ID NO: 1684317 - RNA, 13 nt, Human
accuuuauucugg

SEQ ID NO: 1684318 - RNA, 16 nt, Human
accuuucaauaggaaa

SEQ ID NO: 1684319 - RNA, 14 nt, Human
accuuggcugcagg

SEQ ID NO: 1684320 - RNA, 17 nt, Human
accuuucaauaggaaaa

SEQ ID NO: 1684321 - RNA, 21 nt, Human
accuuucaauaggaaaaacug

SEQ ID NO: 1684322 - RNA, 23 nt, Human
accuuucaauaggaaaaacugau

SEQ ID NO: 1684323 - RNA, 23 nt, Human
accuuucagauaacuguuauuua

SEQ ID NO: 1684324 - RNA, 21 nt, Human
accugcccaaccugcucuccu

SEQ ID NO: 1684325 - RNA, 14 nt, Human
accugccccuccuc

SEQ ID NO: 1684326 - RNA, 18 nt, Human
accugccccuccucucug

SEQ ID NO: 1684327 - RNA, 23 nt, Human
accugccccucaacucuccucca

SEQ ID NO: 1684328 - RNA, 15 nt, Human
accucugcagcaaua

SEQ ID NO: 1684329 - RNA, 21 nt, Human
accucugcacaagcugcaccc

SEQ ID NO: 1684330 - RNA, 16 nt, Human
accucugcacaagcug

SEQ ID NO: 1684331 - RNA, 18 nt, Human
accucugcacaagcugca

SEQ ID NO: 1684332 - RNA, 18 nt, Human
acgccacugcacuauagc

SEQ ID NO: 1684333 - RNA, 17 nt, Human
acgauuucuguuuagau

SEQ ID NO: 1684334 - RNA, 14 nt, Human
acgauuucuguuua

SEQ ID NO: 1684335 - RNA, 13 nt, Human
acgauuucuguuu

SEQ ID NO: 1684336 - RNA, 12 nt, Human
acgauuucuguu

SEQ ID NO: 1684337 - RNA, 13 nt, Human
acgaugucuucau

SEQ ID NO: 1684338 - RNA, 22 nt, Human
acuaaguuuuuauggcuuuugu

SEQ ID NO: 1684339 - RNA, 15 nt, Human
acuaaguuuuuaugg

SEQ ID NO: 1684340 - RNA, 17 nt, Human
acgccagauucuuuccu

SEQ ID NO: 1684341 - RNA, 16 nt, Human
acgcugugcugcccug

SEQ ID NO: 1684342 - RNA, 17 nt, Human
acgcugugcugcccugc

SEQ ID NO: 1684343 - RNA, 18 nt, Human
acgcugugcugcccugcc

SEQ ID NO: 1684344 - RNA, 13 nt, Human
acguggcugcuuc

SEQ ID NO: 1684345 - RNA, 14 nt, Human
acguggcugcuuca

SEQ ID NO: 1684346 - RNA, 15 nt, Human
acguggcugcuucaa

SEQ ID NO: 1684347 - RNA, 17 nt, Human
acguggcugcuucaagg

SEQ ID NO: 1684348 - RNA, 16 nt, Human
acuaagagagaaugag

SEQ ID NO: 1684349 - RNA, 11 nt, Human
acucuuaaaac

SEQ ID NO: 1684350 - RNA, 18 nt, Human
acucuuaaaacccaagug

SEQ ID NO: 1684351 - RNA, 16 nt, Human
acucugugucaggugg

SEQ ID NO: 1684352 - RNA, 21 nt, Human
acucuaucaaguauuauaccu

SEQ ID NO: 1684353 - RNA, 16 nt, Human
acucuaucaaguauua

SEQ ID NO: 1684354 - RNA, 14 nt, Human
acucuaucaaguau

SEQ ID NO: 1684355 - RNA, 21 nt, Human
acucuacccucuuagaaaaac

SEQ ID NO: 1684356 - RNA, 18 nt, Human
acucuacccucuuagaaa

SEQ ID NO: 1684357 - RNA, 12 nt, Human
acucccuuucaa

SEQ ID NO: 1684358 - RNA, 13 nt, Human
acucccuuucaac

SEQ ID NO: 1684359 - RNA, 16 nt, Human
acuaggguccugggga

SEQ ID NO: 1684360 - RNA, 15 nt, Human
acuaggguccugggg

SEQ ID NO: 1684361 - RNA, 14 nt, Human
acuagcuauggugu

SEQ ID NO: 1684362 - RNA, 17 nt, Human
acucaaacucuuaaaac

SEQ ID NO: 1684363 - RNA, 16 nt, Human
acucaaacucuuaaaa

SEQ ID NO: 1684364 - RNA, 11 nt, Human
acuauaaugua

SEQ ID NO: 1684365 - RNA, 14 nt, Human
acucaaaucaagaa

SEQ ID NO: 1684366 - RNA, 14 nt, Human
acucaguggggagg

SEQ ID NO: 1684367 - RNA, 12 nt, Human
acuccccuccuu

SEQ ID NO: 1684368 - RNA, 13 nt, Human
acuccccugcugg

SEQ ID NO: 1684369 - RNA, 17 nt, Human
acuccccugcugggugu

SEQ ID NO: 1684370 - RNA, 14 nt, Human
acucccccaggugg

SEQ ID NO: 1684371 - RNA, 14 nt, Human
aacccuggugacca

SEQ ID NO: 1684372 - RNA, 13 nt, Human
aacagcucgacuu

SEQ ID NO: 1684373 - RNA, 17 nt, Human
aacagcuggugcccugc

SEQ ID NO: 1684374 - RNA, 13 nt, Human
aacaugauuuggg

SEQ ID NO: 1684375 - RNA, 20 nt, Human
aaccaguauuguacaaagua

SEQ ID NO: 1684376 - RNA, 15 nt, Human
aaccaguauuguaca

SEQ ID NO: 1684377 - RNA, 21 nt, Human
aaccaguauuguacaaaguau

SEQ ID NO: 1684378 - RNA, 22 nt, Human
aaccaguauuguacaaaguauu

SEQ ID NO: 1684379 - RNA, 17 nt, Human
aaccaguguuguggauu

SEQ ID NO: 1684380 - RNA, 22 nt, Human
aaccacucuaucaaguauuaua

SEQ ID NO: 1684381 - RNA, 23 nt, Human
aacauguaauuaaguacuaugua

SEQ ID NO: 1684382 - RNA, 14 nt, Human
aacauguaauuaag

SEQ ID NO: 1684383 - RNA, 21 nt, Human
aacauguaauuaaguacuaug

SEQ ID NO: 1684384 - RNA, 14 nt, Human
aaccagaucauugu

SEQ ID NO: 1684385 - RNA, 22 nt, Human
aaccacuggaaaguuuaugguu

SEQ ID NO: 1684386 - RNA, 18 nt, Human
aaauugcauuuccugaca

SEQ ID NO: 1684387 - RNA, 16 nt, Human
aaauuggggauucuua

SEQ ID NO: 1684388 - RNA, 17 nt, Human
aaauuggggauucuuaa

SEQ ID NO: 1684389 - RNA, 15 nt, Human
aacaaagaaauuaug

SEQ ID NO: 1684390 - RNA, 17 nt, Human
aacaaagaaauuaugug

SEQ ID NO: 1684391 - RNA, 19 nt, Human
aacacauuuuucuuaggga

SEQ ID NO: 1684392 - RNA, 15 nt, Human
aacacgagcaggcua

SEQ ID NO: 1684393 - RNA, 14 nt, Human
aacugaccagccuc

SEQ ID NO: 1684394 - RNA, 19 nt, Human
aacugaccagccuccaugc

SEQ ID NO: 1684395 - RNA, 17 nt, Human
aacugauuuuuuuuucc

SEQ ID NO: 1684396 - RNA, 20 nt, Human
aacugauuuuuuuuuccuuc

SEQ ID NO: 1684397 - RNA, 19 nt, Human
aacugauuuuuuuuuccuu

SEQ ID NO: 1684398 - RNA, 17 nt, Human
aacuuaaauaaugugaa

SEQ ID NO: 1684399 - RNA, 19 nt, Human
aacuuaaauaaugugaaac

SEQ ID NO: 1684400 - RNA, 23 nt, Human
aacugaacucugacaacagacuu

SEQ ID NO: 1684401 - RNA, 19 nt, Human
aacugaacucugacaacag

SEQ ID NO: 1684402 - RNA, 20 nt, Human
aacugaacucugacaacaga

SEQ ID NO: 1684403 - RNA, 16 nt, Human
aacugaacucugacaa

SEQ ID NO: 1684404 - RNA, 12 nt, Human
aacucaccccag

SEQ ID NO: 1684405 - RNA, 15 nt, Human
aacucaccccagccc

SEQ ID NO: 1684406 - RNA, 15 nt, Human
aacucaccugccccu

SEQ ID NO: 1684407 - RNA, 16 nt, Human
aacucaccugccccuc

SEQ ID NO: 1684408 - RNA, 13 nt, Human
aacuucacauauu

SEQ ID NO: 1684409 - RNA, 13 nt, Human
aacuuuucugaua

SEQ ID NO: 1684410 - RNA, 14 nt, Human
aacuuuucugauag

SEQ ID NO: 1684411 - RNA, 12 nt, Human
aacuuuucugau

SEQ ID NO: 1684412 - RNA, 19 nt, Human
aacuuuuauaaacuuuacc

SEQ ID NO: 1684413 - RNA, 16 nt, Human
aacuuuuauaaacuuu

SEQ ID NO: 1684414 - RNA, 13 nt, Human
aagaaauguaagg

SEQ ID NO: 1684415 - RNA, 14 nt, Human
aagaaauguaaggg

SEQ ID NO: 1684416 - RNA, 17 nt, Human
aacuuugaccucugcag

SEQ ID NO: 1684417 - RNA, 14 nt, Human
aacuuugaccucug

SEQ ID NO: 1684418 - RNA, 13 nt, Human
aacuuugaccucu

SEQ ID NO: 1684419 - RNA, 15 nt, Human
aacuuuuauaaacuu

SEQ ID NO: 1684420 - RNA, 12 nt, Human
aacuuuuauaaa

SEQ ID NO: 1684421 - RNA, 20 nt, Human
aacuuugaccucugcagcaa

SEQ ID NO: 1684422 - RNA, 19 nt, Human
aacuuugaccucugcagca

SEQ ID NO: 1684423 - RNA, 17 nt, Human
aaagaguacucuuguuu

SEQ ID NO: 1684424 - RNA, 12 nt, Human
aaagaguacucu

SEQ ID NO: 1684425 - RNA, 16 nt, Human
aaagagguuuuucuua

SEQ ID NO: 1684426 - RNA, 19 nt, Human
aaagagguuuuucuuaaau

SEQ ID NO: 1684427 - RNA, 13 nt, Human
aaagaaauuaugu

SEQ ID NO: 1684428 - RNA, 15 nt, Human
aaagaaauuaugugc

SEQ ID NO: 1684429 - RNA, 11 nt, Human
aaagaacaucc

SEQ ID NO: 1684430 - RNA, 12 nt, Human
aaagaaaacuug

SEQ ID NO: 1684431 - RNA, 20 nt, Human
aaagaaaacuuguauuaugu

SEQ ID NO: 1684432 - RNA, 19 nt, Human
aaacugccagcaacgcagg

SEQ ID NO: 1684433 - RNA, 16 nt, Human
aaacugacucuuaaga

SEQ ID NO: 1684434 - RNA, 17 nt, Human
aaacugacucuuaagaa

SEQ ID NO: 1684435 - RNA, 14 nt, Human
aaacugccagcaac

SEQ ID NO: 1684436 - RNA, 15 nt, Human
aaacugccagcaacg

SEQ ID NO: 1684437 - RNA, 17 nt, Human
aaagaugaaaauauuug

SEQ ID NO: 1684438 - RNA, 13 nt, Human
aaagaugaaaaua

SEQ ID NO: 1684439 - RNA, 16 nt, Human
aaagaugaaaauauuu

SEQ ID NO: 1684440 - RNA, 19 nt, Human
aaacacuguucucugcccu

SEQ ID NO: 1684441 - RNA, 22 nt, Human
aaacacuguucucugcccucca

SEQ ID NO: 1684442 - RNA, 17 nt, Human
aaaauuggggauucuua

SEQ ID NO: 1684443 - RNA, 18 nt, Human
aaaauuggggauucuuaa

SEQ ID NO: 1684444 - RNA, 19 nt, Human
aaaauuggggauucuuaaa

SEQ ID NO: 1684445 - RNA, 13 nt, Human
aaacacucuugaa

SEQ ID NO: 1684446 - RNA, 14 nt, Human
aaacacucuugaaa

SEQ ID NO: 1684447 - RNA, 17 nt, Human
aaacacucuugaaaaau

SEQ ID NO: 1684448 - RNA, 18 nt, Human
aaacacuguucucugccc

SEQ ID NO: 1684449 - RNA, 13 nt, Human
aaaauucagugga

SEQ ID NO: 1684450 - RNA, 15 nt, Human
aaaacacauuuuucu

SEQ ID NO: 1684451 - RNA, 13 nt, Human
aaaacacauuuuu

SEQ ID NO: 1684452 - RNA, 20 nt, Human
aaagggacugagaaauuuau

SEQ ID NO: 1684453 - RNA, 16 nt, Human
aaagggacugagaaau

SEQ ID NO: 1684454 - RNA, 19 nt, Human
aaagucucuggaauuugaa

SEQ ID NO: 1684455 - RNA, 20 nt, Human
aaagucucuggaauuugaaa

SEQ ID NO: 1684456 - RNA, 22 nt, Human
aaagucucuggaauuugaaaca

SEQ ID NO: 1684457 - RNA, 11 nt, Human
aaagugcuggg

SEQ ID NO: 1684458 - RNA, 14 nt, Human
aaagugcugggauu

SEQ ID NO: 1684459 - RNA, 22 nt, Human
aaauaaaauuaaagcugaaaac

SEQ ID NO: 1684460 - RNA, 12 nt, Human
aaauaacaauga

SEQ ID NO: 1684461 - RNA, 19 nt, Human
aaauggacuguggugacuu

SEQ ID NO: 1684462 - RNA, 18 nt, Human
aaauggcuuccuggcaau

SEQ ID NO: 1684463 - RNA, 20 nt, Human
aaauggacguguuaugacuc

SEQ ID NO: 1684464 - RNA, 21 nt, Human
aaauggacguguuaugacucc

SEQ ID NO: 1684465 - RNA, 22 nt, Human
aaauggacguguuaugacucca

SEQ ID NO: 1684466 - RNA, 16 nt, Human
aaauggaaaugggcag

SEQ ID NO: 1684467 - RNA, 18 nt, Human
aaauggaagacagcucuu

SEQ ID NO: 1684468 - RNA, 18 nt, Human
aaaucaaauaugcaaagc

SEQ ID NO: 1684469 - RNA, 19 nt, Human
aaaucaaauaugcaaagca

SEQ ID NO: 1684470 - RNA, 22 nt, Human
aaauacuguuuuuaacaacuau

SEQ ID NO: 1684471 - RNA, 14 nt, Human
aaauacuguuugag

SEQ ID NO: 1684472 - RNA, 18 nt, Human
aaauauuuuaugauccag

SEQ ID NO: 1684473 - RNA, 19 nt, Human
aaauauuuuaugauccagc

SEQ ID NO: 1684474 - RNA, 14 nt, Human
aaauauuuuaugau

SEQ ID NO: 1684475 - RNA, 14 nt, Human
aaauauaauugaca

SEQ ID NO: 1684476 - RNA, 13 nt, Human
aaauaguaaaaau

SEQ ID NO: 1684477 - RNA, 16 nt, Human
aaauaguaaaaauaaa

SEQ ID NO: 1684478 - RNA, 18 nt, Human
aaggacccggaggggccu

SEQ ID NO: 1684479 - RNA, 21 nt, Human
aaggacccggaggggccuggc

SEQ ID NO: 1684480 - RNA, 18 nt, Human
aaggacuaggguccuggg

SEQ ID NO: 1684481 - RNA, 20 nt, Human
aaggacuaggguccugggga

SEQ ID NO: 1684482 - RNA, 12 nt, Human
aaggauuuuaug

SEQ ID NO: 1684483 - RNA, 13 nt, Human
aaggauuuuaugc

SEQ ID NO: 1684484 - RNA, 23 nt, Human
aaggauuuuaugcuuuaaacauu

SEQ ID NO: 1684485 - RNA, 16 nt, Human
aaggauuuuaugcuuu

SEQ ID NO: 1684486 - RNA, 20 nt, Human
aaggauuuuaugcuuuaaac

SEQ ID NO: 1684487 - RNA, 21 nt, Human
aaggauuuuaugcuuuaaaca

SEQ ID NO: 1684488 - RNA, 22 nt, Human
aaggauuuuaugcuuuaaacau

SEQ ID NO: 1684489 - RNA, 11 nt, Human
aagcugggcag

SEQ ID NO: 1684490 - RNA, 15 nt, Human
aagcugggcagguug

SEQ ID NO: 1684491 - RNA, 13 nt, Human
aagcugggcaggu

SEQ ID NO: 1684492 - RNA, 18 nt, Human
aaggacauugcggacagc

SEQ ID NO: 1684493 - RNA, 22 nt, Human
aagcugcacccucaggcaggug

SEQ ID NO: 1684494 - RNA, 21 nt, Human
aagcugcacccucaggcaggu

SEQ ID NO: 1684495 - RNA, 20 nt, Human
aagcugcacccucaggcagg

SEQ ID NO: 1684496 - RNA, 12 nt, Human
aagcguggugga

SEQ ID NO: 1684497 - RNA, 17 nt, Human
aaggcaaggcugucaau

SEQ ID NO: 1684498 - RNA, 18 nt, Human
aaggcaaggcugucaauu

SEQ ID NO: 1684499 - RNA, 13 nt, Human
aagccauguuuau

SEQ ID NO: 1684500 - RNA, 13 nt, Human
aagaaauuaugug

SEQ ID NO: 1684501 - RNA, 22 nt, Human
aagaaauuaugugccagauuua

SEQ ID NO: 1684502 - RNA, 16 nt, Human
aagauuuaccacuugu

SEQ ID NO: 1684503 - RNA, 14 nt, Human
aagcagaggaagga

SEQ ID NO: 1684504 - RNA, 21 nt, Human
aagcagaggaaggagaggaga

SEQ ID NO: 1684505 - RNA, 13 nt, Human
aagccagauuuuc

SEQ ID NO: 1684506 - RNA, 14 nt, Human
aauaaaauggguuu

SEQ ID NO: 1684507 - RNA, 12 nt, Human
aaguuguuugag

SEQ ID NO: 1684508 - RNA, 19 nt, Human
aauaaacuauuuguaaagu

SEQ ID NO: 1684509 - RNA, 17 nt, Human
aauaaacgucuuaaaua

SEQ ID NO: 1684510 - RNA, 16 nt, Human
aauaaacgucuuaaau

SEQ ID NO: 1684511 - RNA, 23 nt, Human
aauaaaauuaaagcugaaaacug

SEQ ID NO: 1684512 - RNA, 19 nt, Human
aauaaaauggguuuuacug

SEQ ID NO: 1684513 - RNA, 15 nt, Human
aaguuguuugagaaa

SEQ ID NO: 1684514 - RNA, 12 nt, Human
aauaauguaaga

SEQ ID NO: 1684515 - RNA, 19 nt, Human
aauaauguaagacaaauau

SEQ ID NO: 1684516 - RNA, 16 nt, Human
aauaaugugaaacugg

SEQ ID NO: 1684517 - RNA, 21 nt, Human
aauaauccuaaacauaugaau

SEQ ID NO: 1684518 - RNA, 19 nt, Human
aagucucuggaauuugaaa

SEQ ID NO: 1684519 - RNA, 16 nt, Human
aagucuguuuuaugac

SEQ ID NO: 1684520 - RNA, 18 nt, Human
aagucuguuuuaugacuu

SEQ ID NO: 1684521 - RNA, 19 nt, Human
aagucuguuuuaugacuuc

SEQ ID NO: 1684522 - RNA, 20 nt, Human
aagucuguuuuaugacuuca

SEQ ID NO: 1684523 - RNA, 23 nt, Human
aagucuguuuuaugacuucauua

SEQ ID NO: 1684524 - RNA, 19 nt, Human
aagucucugaagugaaacu

SEQ ID NO: 1684525 - RNA, 22 nt, Human
aagucucugaagugaaacugcu

SEQ ID NO: 1684526 - RNA, 17 nt, Human
aagucuuagauguauau

SEQ ID NO: 1684527 - RNA, 16 nt, Human
aagucuuagauguaua

SEQ ID NO: 1684528 - RNA, 15 nt, Human
aagguuaauaaagua

SEQ ID NO: 1684529 - RNA, 16 nt, Human
aagguuaauaaaguaa

SEQ ID NO: 1684530 - RNA, 20 nt, Human
aagguuaauguucaucaucc

SEQ ID NO: 1684531 - RNA, 11 nt, Human
aaggugggagg

SEQ ID NO: 1684532 - RNA, 14 nt, Human
aaguacuuuuggca

SEQ ID NO: 1684533 - RNA, 15 nt, Human
aaguacuuuuggcau

SEQ ID NO: 1684534 - RNA, 11 nt, Human
aaguacuucuu

SEQ ID NO: 1684535 - RNA, 16 nt, Human
aaguaucccuacugua

SEQ ID NO: 1684536 - RNA, 22 nt, Human
aaguaucugacaucucugcaau

SEQ ID NO: 1684537 - RNA, 23 nt, Human
aaguccaggcuuuuuuaucaugu

SEQ ID NO: 1684538 - RNA, 21 nt, Human
aauauaggaacuuaaauaaug

SEQ ID NO: 1684539 - RNA, 20 nt, Human
aauauaggaacuuaaauaau

SEQ ID NO: 1684540 - RNA, 18 nt, Human
aauauaggaacuuaaaua

SEQ ID NO: 1684541 - RNA, 13 nt, Human
aaucacaauacau

SEQ ID NO: 1684542 - RNA, 15 nt, Human
aaucaagaaacuuaa

SEQ ID NO: 1684543 - RNA, 19 nt, Human
aaucaacugggcugaacac

SEQ ID NO: 1684544 - RNA, 14 nt, Human
aaucaacugggcug

SEQ ID NO: 1684545 - RNA, 16 nt, Human
aauauuauguuaaaac

SEQ ID NO: 1684546 - RNA, 19 nt, Human
aaugaugccaugaggaaca

SEQ ID NO: 1684547 - RNA, 18 nt, Human
aauccaggguggugguga

SEQ ID NO: 1684548 - RNA, 13 nt, Human
aauccauacauuu

SEQ ID NO: 1684549 - RNA, 14 nt, Human
aauccauacauuug

SEQ ID NO: 1684550 - RNA, 14 nt, Human
aauccauuuggaaa

SEQ ID NO: 1684551 - RNA, 15 nt, Human
aauccauuuggaaau

SEQ ID NO: 1684552 - RNA, 17 nt, Human
aauccauuuggaaaucu

SEQ ID NO: 1684553 - RNA, 18 nt, Human
aauccauuuggaaaucuu

SEQ ID NO: 1684554 - RNA, 22 nt, Human
aauccauuuggaaaucuuuaaa

SEQ ID NO: 1684555 - RNA, 18 nt, Human
aaucuccaaaauaaaacu

SEQ ID NO: 1684556 - RNA, 14 nt, Human
aaucuccaaaauaa

SEQ ID NO: 1684557 - RNA, 13 nt, Human
aaucuccaaaaua

SEQ ID NO: 1684558 - RNA, 16 nt, Human
aaugaaccacaucuug

SEQ ID NO: 1684559 - RNA, 17 nt, Human
aaugaaccacaucuugc

SEQ ID NO: 1684560 - RNA, 23 nt, Human
aaugaaccacaucuugcucugcu

SEQ ID NO: 1684561 - RNA, 22 nt, Human
aaucugcuuuuuaaagaaugcu

SEQ ID NO: 1684562 - RNA, 12 nt, Human
aaugaagauacu

SEQ ID NO: 1684563 - RNA, 17 nt, Human
aaugauaacuggaaacu

SEQ ID NO: 1684564 - RNA, 21 nt, Human
aaugaugauccuaggcauuug

SEQ ID NO: 1684565 - RNA, 20 nt, Human
aaugauaacuggaaacuuca

SEQ ID NO: 1684566 - RNA, 17 nt, Human
aaugaagauacugaaau

SEQ ID NO: 1684567 - RNA, 18 nt, Human
aauuaguggcacuugcuu

SEQ ID NO: 1684568 - RNA, 14 nt, Human
aauuaguuuuauau

SEQ ID NO: 1684569 - RNA, 17 nt, Human
aauuaguuuuauaugcu

SEQ ID NO: 1684570 - RNA, 20 nt, Human
aauuaguuuuauaugcuucu

SEQ ID NO: 1684571 - RNA, 22 nt, Human
aauggucuuucuaaugugugaa

SEQ ID NO: 1684572 - RNA, 22 nt, Human
aaugguccgugcuaaggacuug

SEQ ID NO: 1684573 - RNA, 15 nt, Human
aaugucagugugacu

SEQ ID NO: 1684574 - RNA, 16 nt, Human
aaugucagugugacug

SEQ ID NO: 1684575 - RNA, 13 nt, Human
aaugucaguguga

SEQ ID NO: 1684576 - RNA, 20 nt, Human
aaugucucuuuaaugucaca

SEQ ID NO: 1684577 - RNA, 22 nt, Human
aaugucuaguuguaacaccaug

SEQ ID NO: 1684578 - RNA, 17 nt, Human
aaugucagugugacuga

SEQ ID NO: 1684579 - RNA, 21 nt, Human
aaugucagugugacugaucuc

SEQ ID NO: 1684580 - RNA, 15 nt, Human
aauggcuuuguauag

SEQ ID NO: 1684581 - RNA, 16 nt, Human
aauggcuuuguauaga

SEQ ID NO: 1684582 - RNA, 18 nt, Human
aauggcuuuguauagaac

SEQ ID NO: 1684583 - RNA, 13 nt, Human
aauggcuuuguau

SEQ ID NO: 1684584 - RNA, 15 nt, Human
aaugggcagagcaga

SEQ ID NO: 1684585 - RNA, 13 nt, Human
aaugggcagagca

SEQ ID NO: 1684586 - RNA, 18 nt, Human
aauguuugccucugccuc

SEQ ID NO: 1684587 - RNA, 19 nt, Human
aauguuugccucugccucu

SEQ ID NO: 1684588 - RNA, 18 nt, Human
aauuaaaacacaacaucu

SEQ ID NO: 1684589 - RNA, 15 nt, Human
aaaaacugauuuuuu

SEQ ID NO: 1684590 - RNA, 14 nt, Human
aaaaacauggccuu

SEQ ID NO: 1684591 - RNA, 16 nt, Human
aaaaaccaguauugua

SEQ ID NO: 1684592 - RNA, 18 nt, Human
aaaaaccaguauuguaca

SEQ ID NO: 1684593 - RNA, 13 nt, Human
aaaaacugauuuu

SEQ ID NO: 1684594 - RNA, 17 nt, Human
aaaaauuggggauucuu

SEQ ID NO: 1684595 - RNA, 18 nt, Human
aaaaauuggggauucuua

SEQ ID NO: 1684596 - RNA, 19 nt, Human
aaaaauuggggauucuuaa

SEQ ID NO: 1684597 - RNA, 20 nt, Human
aaaaauuggggauucuuaaa

SEQ ID NO: 1684598 - RNA, 12 nt, Human
aaaaagaggcua

SEQ ID NO: 1684599 - RNA, 17 nt, Human
aaaacaaggaugaauua

SEQ ID NO: 1684600 - RNA, 12 nt, Human
aaaacacauuuu

SEQ ID NO: 1684601 - RNA, 18 nt, Human
aaaacacagcaaggguga

SEQ ID NO: 1684602 - RNA, 12 nt, Human
aaaacacagcaa

SEQ ID NO: 1684603 - RNA, 13 nt, Human
aaaacacagcaag

SEQ ID NO: 1684604 - RNA, 14 nt, Human
aaaacaaggaugaa

SEQ ID NO: 1684605 - RNA, 14 nt, Human
aaaaacacaaaagu

SEQ ID NO: 1684606 - RNA, 12 nt, Human
aaaaacacagca

SEQ ID NO: 1684607 - RNA, 23 nt, Human
aaaaaauuggggauucuuaaagu

SEQ ID NO: 1684608 - RNA, 16 nt, Human
uuauauuuacaaaugg

SEQ ID NO: 1684609 - RNA, 20 nt, Human
uuauauuuauuacuguaaga

SEQ ID NO: 1684610 - RNA, 12 nt, Human
uuauauuugaaa

SEQ ID NO: 1684611 - RNA, 13 nt, Human
uuauauuugaaau

SEQ ID NO: 1684612 - RNA, 15 nt, Human
uuauauuugaaauau

SEQ ID NO: 1684613 - RNA, 14 nt, Human
uuaucuagauacug

SEQ ID NO: 1684614 - RNA, 16 nt, Human
uuaucuugaauaaugu

SEQ ID NO: 1684615 - RNA, 14 nt, Human
uuaucuugaauaau

SEQ ID NO: 1684616 - RNA, 11 nt, Human
uuaucucaaaa

SEQ ID NO: 1684617 - RNA, 23 nt, Human
uuauuaaaaaucucaaauuucua

SEQ ID NO: 1684618 - RNA, 19 nt, Human
uuauuaaaugcccagcccc

SEQ ID NO: 1684619 - RNA, 21 nt, Human
uuauuaaaugcccagccccuu

SEQ ID NO: 1684620 - RNA, 16 nt, Human
uuauuacaguauaauu

SEQ ID NO: 1684621 - RNA, 17 nt, Human
uuauggaacacucugag

SEQ ID NO: 1684622 - RNA, 21 nt, Human
uuauggacaaugacccagugg

SEQ ID NO: 1684623 - RNA, 18 nt, Human
uuauggaacacucugaga

SEQ ID NO: 1684624 - RNA, 20 nt, Human
uuauggaacacucugagacu

SEQ ID NO: 1684625 - RNA, 17 nt, Human
uuauggcuuuugugcau

SEQ ID NO: 1684626 - RNA, 18 nt, Human
uuauggcuuuugugcauu

SEQ ID NO: 1684627 - RNA, 17 nt, Human
uuauguugcauagaaua

SEQ ID NO: 1684628 - RNA, 14 nt, Human
uuauggcacaucag

SEQ ID NO: 1684629 - RNA, 16 nt, Human
uuauggcuuuugugca

SEQ ID NO: 1684630 - RNA, 18 nt, Human
uuauggcuauaggugcua

SEQ ID NO: 1684631 - RNA, 19 nt, Human
uuagugaccucagcuuuga

SEQ ID NO: 1684632 - RNA, 21 nt, Human
ugugaaaagaaaaaugagccu

SEQ ID NO: 1684633 - RNA, 17 nt, Human
ugugaaaagaaaaauga

SEQ ID NO: 1684634 - RNA, 13 nt, Human
ugugaaaagaaaa

SEQ ID NO: 1684635 - RNA, 15 nt, Human
ugugaaaagaaaaau

SEQ ID NO: 1684636 - RNA, 12 nt, Human
uuauaauuuuaa

SEQ ID NO: 1684637 - RNA, 12 nt, Human
uuauaauuuaaa

SEQ ID NO: 1684638 - RNA, 17 nt, Human
uuauaauuuuaaauguu

SEQ ID NO: 1684639 - RNA, 21 nt, Human
uuauaauuuuaaauguuuuuu

SEQ ID NO: 1684640 - RNA, 14 nt, Human
uuauaauuuuguga

SEQ ID NO: 1684641 - RNA, 15 nt, Human
uuauaauuuugugaa

SEQ ID NO: 1684642 - RNA, 18 nt, Human
uuauaauaauguuaacau

SEQ ID NO: 1684643 - RNA, 15 nt, Human
uuauaauaauguuaa

SEQ ID NO: 1684644 - RNA, 15 nt, Human
uuauaaugaaugaaa

SEQ ID NO: 1684645 - RNA, 11 nt, Human
uuauaaucuuu

SEQ ID NO: 1684646 - RNA, 13 nt, Human
uuauaaucacuuu

SEQ ID NO: 1684647 - RNA, 16 nt, Human
uuauauuaugaagcuu

SEQ ID NO: 1684648 - RNA, 20 nt, Human
uuauaucugaggaauucugu

SEQ ID NO: 1684649 - RNA, 21 nt, Human
uuauaucugaggaauucugua

SEQ ID NO: 1684650 - RNA, 14 nt, Human
uuauaucugaggaa

SEQ ID NO: 1684651 - RNA, 22 nt, Human
uuauaucugaggaauucuguau

SEQ ID NO: 1684652 - RNA, 23 nt, Human
uuauaucugaggaauucuguaua

SEQ ID NO: 1684653 - RNA, 18 nt, Human
uuauaugcuauuucuaua

SEQ ID NO: 1684654 - RNA, 16 nt, Human
uuauaugcuauuucua

SEQ ID NO: 1684655 - RNA, 19 nt, Human
uuauaucuauauuuuacau

SEQ ID NO: 1684656 - RNA, 23 nt, Human
uuauaucuauauuuuacauaaau

SEQ ID NO: 1684657 - RNA, 13 nt, Human
uuauacauaaaca

SEQ ID NO: 1684658 - RNA, 11 nt, Human
uuauacauaaa

SEQ ID NO: 1684659 - RNA, 16 nt, Human
uuauaauuuugugaag

SEQ ID NO: 1684660 - RNA, 17 nt, Human
uuauaauuuugugaagc

SEQ ID NO: 1684661 - RNA, 18 nt, Human
uuauaauuuugugaagca

SEQ ID NO: 1684662 - RNA, 22 nt, Human
uucagcuuguaaauagcucagg

SEQ ID NO: 1684663 - RNA, 14 nt, Human
uucaguggcagcug

SEQ ID NO: 1684664 - RNA, 22 nt, Human
uucagcuccagcucaccagccc

SEQ ID NO: 1684665 - RNA, 12 nt, Human
uucagcuccagc

SEQ ID NO: 1684666 - RNA, 15 nt, Human
uucagcuccagcuca

SEQ ID NO: 1684667 - RNA, 13 nt, Human
uucaguguacaug

SEQ ID NO: 1684668 - RNA, 12 nt, Human
uucaguguacau

SEQ ID NO: 1684669 - RNA, 17 nt, Human
uucaguggcagcugcuu

SEQ ID NO: 1684670 - RNA, 15 nt, Human
uucaguggcagcugc

SEQ ID NO: 1684671 - RNA, 16 nt, Human
uucaguggcagcugcu

SEQ ID NO: 1684672 - RNA, 15 nt, Human
uucauaaccuagccu

SEQ ID NO: 1684673 - RNA, 15 nt, Human
uucauccuccucaga

SEQ ID NO: 1684674 - RNA, 19 nt, Human
uucauccuccucagaucuu

SEQ ID NO: 1684675 - RNA, 20 nt, Human
uucauaaauaaaguuuguug

SEQ ID NO: 1684676 - RNA, 23 nt, Human
uucaguuauuauauuuacaaaug

SEQ ID NO: 1684677 - RNA, 14 nt, Human
uuccauggacuuug

SEQ ID NO: 1684678 - RNA, 15 nt, Human
uuccauggacuuugu

SEQ ID NO: 1684679 - RNA, 19 nt, Human
uuccaacccucaucaccaa

SEQ ID NO: 1684680 - RNA, 18 nt, Human
uuccagauccuggaaauc

SEQ ID NO: 1684681 - RNA, 20 nt, Human
uucaugcuguucaugaaaga

SEQ ID NO: 1684682 - RNA, 16 nt, Human
uuccaaaguacacugu

SEQ ID NO: 1684683 - RNA, 13 nt, Human
uuccaaaguacac

SEQ ID NO: 1684684 - RNA, 21 nt, Human
uucaauaggaaaaacugauuu

SEQ ID NO: 1684685 - RNA, 22 nt, Human
uucaauaggaaaaacugauuuu

SEQ ID NO: 1684686 - RNA, 14 nt, Human
uucaccuuuguccc

SEQ ID NO: 1684687 - RNA, 19 nt, Human
uucaccuuuguccccaccg

SEQ ID NO: 1684688 - RNA, 20 nt, Human
uucaccuuuguccccaccgc

SEQ ID NO: 1684689 - RNA, 13 nt, Human
uucacccuuuucu

SEQ ID NO: 1684690 - RNA, 21 nt, Human
uucacaaccuucuguggcuca

SEQ ID NO: 1684691 - RNA, 22 nt, Human
uucacaagacccaaaaggcaga

SEQ ID NO: 1684692 - RNA, 13 nt, Human
uucacggaagagc

SEQ ID NO: 1684693 - RNA, 22 nt, Human
uucaccuuuguccccaccgcag

SEQ ID NO: 1684694 - RNA, 17 nt, Human
uucacggaagagccuug

SEQ ID NO: 1684695 - RNA, 14 nt, Human
uucagacagcugcc

SEQ ID NO: 1684696 - RNA, 15 nt, Human
uucagacagcugccu

SEQ ID NO: 1684697 - RNA, 16 nt, Human
uucagacagcugccug

SEQ ID NO: 1684698 - RNA, 14 nt, Human
uucagcucacugca

SEQ ID NO: 1684699 - RNA, 16 nt, Human
uucagauacuggauug

SEQ ID NO: 1684700 - RNA, 20 nt, Human
uucagauacuggauuguacu

SEQ ID NO: 1684701 - RNA, 20 nt, Human
uucagagcugcccucuccug

SEQ ID NO: 1684702 - RNA, 19 nt, Human
uucagagcugcccucuccu

SEQ ID NO: 1684703 - RNA, 18 nt, Human
uucagagcugcccucucc

SEQ ID NO: 1684704 - RNA, 17 nt, Human
uucagacagcugccugg

SEQ ID NO: 1684705 - RNA, 17 nt, Human
uucagagcugcccucuc

SEQ ID NO: 1684706 - RNA, 15 nt, Human
uucagagcugcccuc

SEQ ID NO: 1684707 - RNA, 19 nt, Human
uuauuuuaauaauguuuca

SEQ ID NO: 1684708 - RNA, 15 nt, Human
uuauuuuauuaugaa

SEQ ID NO: 1684709 - RNA, 16 nt, Human
uuauuuuauuaugaaa

SEQ ID NO: 1684710 - RNA, 18 nt, Human
uuauuuuauuaugcauga

SEQ ID NO: 1684711 - RNA, 17 nt, Human
uuauuuuaauucaguug

SEQ ID NO: 1684712 - RNA, 14 nt, Human
uuauuuuauuauga

SEQ ID NO: 1684713 - RNA, 20 nt, Human
uuauuuuaauaauguuucaa

SEQ ID NO: 1684714 - RNA, 20 nt, Human
uuauuuuauuaugaaacuug

SEQ ID NO: 1684715 - RNA, 22 nt, Human
uuauuuuggaaaauaaauuauu

SEQ ID NO: 1684716 - RNA, 18 nt, Human
uucaaaugcuguaacuuu

SEQ ID NO: 1684717 - RNA, 19 nt, Human
uucaaaugguuuaacaaaa

SEQ ID NO: 1684718 - RNA, 18 nt, Human
uucaaauguauuacagug

SEQ ID NO: 1684719 - RNA, 15 nt, Human
uucaaccauucccca

SEQ ID NO: 1684720 - RNA, 17 nt, Human
uugaauuuuguguuaga

SEQ ID NO: 1684721 - RNA, 21 nt, Human
uugaauuuuguguuagagauu

SEQ ID NO: 1684722 - RNA, 12 nt, Human
uugaauuuuaca

SEQ ID NO: 1684723 - RNA, 15 nt, Human
uugaauuuauuggcu

SEQ ID NO: 1684724 - RNA, 18 nt, Human
uugaauuuauuggcuuuu

SEQ ID NO: 1684725 - RNA, 22 nt, Human
uugaauuuauuggcuuuucuga

SEQ ID NO: 1684726 - RNA, 13 nt, Human
uugaacuuugacc

SEQ ID NO: 1684727 - RNA, 17 nt, Human
uugaacuccugaccuca

SEQ ID NO: 1684728 - RNA, 18 nt, Human
uugaacuggguacuugug

SEQ ID NO: 1684729 - RNA, 16 nt, Human
uugaccucugcagcaa

SEQ ID NO: 1684730 - RNA, 17 nt, Human
uugacgccaucccagcc

SEQ ID NO: 1684731 - RNA, 18 nt, Human
uugacgccaucccagccc

SEQ ID NO: 1684732 - RNA, 19 nt, Human
uugacgccaucccagcccc

SEQ ID NO: 1684733 - RNA, 20 nt, Human
uugacgccaucccagcccca

SEQ ID NO: 1684734 - RNA, 15 nt, Human
uugaccucugcagca

SEQ ID NO: 1684735 - RNA, 14 nt, Human
uugaccucugcagc

SEQ ID NO: 1684736 - RNA, 17 nt, Human
uugaccgugaggccaga

SEQ ID NO: 1684737 - RNA, 17 nt, Human
uugacccacaagaaaug

SEQ ID NO: 1684738 - RNA, 21 nt, Human
uugcaaaguaucccuacugua

SEQ ID NO: 1684739 - RNA, 17 nt, Human
uugaugacccccaacca

SEQ ID NO: 1684740 - RNA, 16 nt, Human
uugaugaucuuugcag

SEQ ID NO: 1684741 - RNA, 16 nt, Human
uugaggguugggcugg

SEQ ID NO: 1684742 - RNA, 14 nt, Human
uugagccugggagg

SEQ ID NO: 1684743 - RNA, 13 nt, Human
uugaggguugggc

SEQ ID NO: 1684744 - RNA, 11 nt, Human
uugagccuggg

SEQ ID NO: 1684745 - RNA, 15 nt, Human
uugaggucuguucuu

SEQ ID NO: 1684746 - RNA, 23 nt, Human
uugauauccucuuugagugaagc

SEQ ID NO: 1684747 - RNA, 13 nt, Human
uugaugaagaagu

SEQ ID NO: 1684748 - RNA, 14 nt, Human
uugaugaagaaguu

SEQ ID NO: 1684749 - RNA, 23 nt, Human
uugaugaagaaguugauaugccu

SEQ ID NO: 1684750 - RNA, 15 nt, Human
uucuggcagaggagg

SEQ ID NO: 1684751 - RNA, 18 nt, Human
uucuguauuuuguuuuug

SEQ ID NO: 1684752 - RNA, 17 nt, Human
uucugucuucacaacag

SEQ ID NO: 1684753 - RNA, 18 nt, Human
uucugcuuuccucuuccu

SEQ ID NO: 1684754 - RNA, 14 nt, Human
uucugcuucagccu

SEQ ID NO: 1684755 - RNA, 15 nt, Human
uucugcuucagccuc

SEQ ID NO: 1684756 - RNA, 16 nt, Human
uucugcuucagccucc

SEQ ID NO: 1684757 - RNA, 19 nt, Human
uucugcuucagccucccga

SEQ ID NO: 1684758 - RNA, 15 nt, Human
uugaaaaaugcaugu

SEQ ID NO: 1684759 - RNA, 23 nt, Human
uugaaaacacuguucucugcccu

SEQ ID NO: 1684760 - RNA, 21 nt, Human
uucuuuccaaaguacacuguu

SEQ ID NO: 1684761 - RNA, 20 nt, Human
uugaaaaaccauuuugcugu

SEQ ID NO: 1684762 - RNA, 15 nt, Human
uugaacuccuggccu

SEQ ID NO: 1684763 - RNA, 16 nt, Human
uugaacuccuggccuc

SEQ ID NO: 1684764 - RNA, 16 nt, Human
uugaaaagacuccaaa

SEQ ID NO: 1684765 - RNA, 14 nt, Human
uucuuuccaaagua

SEQ ID NO: 1684766 - RNA, 12 nt, Human
uucuuucagcca

SEQ ID NO: 1684767 - RNA, 13 nt, Human
uucuuccucccuc

SEQ ID NO: 1684768 - RNA, 21 nt, Human
uucuuguguguuuauugucaa

SEQ ID NO: 1684769 - RNA, 21 nt, Human
uucuuccacaagagcccaggc

SEQ ID NO: 1684770 - RNA, 21 nt, Human
uucuuauacauuugauaaagu

SEQ ID NO: 1684771 - RNA, 13 nt, Human
uucucuccagccc

SEQ ID NO: 1684772 - RNA, 14 nt, Human
uucucuccagcccc

SEQ ID NO: 1684773 - RNA, 18 nt, Human
uucucuccuguaccucuu

SEQ ID NO: 1684774 - RNA, 14 nt, Human
uucucuccuguacc

SEQ ID NO: 1684775 - RNA, 15 nt, Human
uucucuccagccccu

SEQ ID NO: 1684776 - RNA, 16 nt, Human
uucucuccagccccug

SEQ ID NO: 1684777 - RNA, 19 nt, Human
uucucuccuguaccucuug

SEQ ID NO: 1684778 - RNA, 22 nt, Human
uucucuccuguaccucuugagc

SEQ ID NO: 1684779 - RNA, 14 nt, Human
uucucugaggacac

SEQ ID NO: 1684780 - RNA, 20 nt, Human
uucucugaggacacuaacca

SEQ ID NO: 1684781 - RNA, 11 nt, Human
uucucugcccu

SEQ ID NO: 1684782 - RNA, 12 nt, Human
uucucugcccuc

SEQ ID NO: 1684783 - RNA, 12 nt, Human
uucuccacugga

SEQ ID NO: 1684784 - RNA, 20 nt, Human
uucuccaccugccagggaca

SEQ ID NO: 1684785 - RNA, 16 nt, Human
uucuccaccugccagg

SEQ ID NO: 1684786 - RNA, 18 nt, Human
uucuccaccugccaggga

SEQ ID NO: 1684787 - RNA, 21 nt, Human
uucuccaccucccacaaagga

SEQ ID NO: 1684788 - RNA, 12 nt, Human
uucuccaccugc

SEQ ID NO: 1684789 - RNA, 14 nt, Human
uucuccaccugcca

SEQ ID NO: 1684790 - RNA, 15 nt, Human
uucuccaccugccag

SEQ ID NO: 1684791 - RNA, 20 nt, Human
uucucauuugccaauaauaa

SEQ ID NO: 1684792 - RNA, 14 nt, Human
uucuaugaaauauu

SEQ ID NO: 1684793 - RNA, 21 nt, Human
uucuaugaaauauuauguuaa

SEQ ID NO: 1684794 - RNA, 19 nt, Human
uucugcucacauaucuguc

SEQ ID NO: 1684795 - RNA, 19 nt, Human
uucugauccuaguuccacc

SEQ ID NO: 1684796 - RNA, 13 nt, Human
uucugauagagga

SEQ ID NO: 1684797 - RNA, 21 nt, Human
uucugauagaggaagccugau

SEQ ID NO: 1684798 - RNA, 16 nt, Human
uucucugcccuccaag

SEQ ID NO: 1684799 - RNA, 17 nt, Human
uucucugcccuccaaga

SEQ ID NO: 1684800 - RNA, 23 nt, Human
uucugacccaugcugcccuguga

SEQ ID NO: 1684801 - RNA, 22 nt, Human
uucugacccaugcugcccugug

SEQ ID NO: 1684802 - RNA, 18 nt, Human
uucugacccugcuucaaa

SEQ ID NO: 1684803 - RNA, 21 nt, Human
uucugacccugcuucaaauau

SEQ ID NO: 1684804 - RNA, 16 nt, Human
uucugagaaagacuau

SEQ ID NO: 1684805 - RNA, 21 nt, Human
uucugagaaagacuauucaaa

SEQ ID NO: 1684806 - RNA, 20 nt, Human
uuccugaggcugggcucccu

SEQ ID NO: 1684807 - RNA, 15 nt, Human
uuccugaggcugggc

SEQ ID NO: 1684808 - RNA, 13 nt, Human
uuccugcaaugaa

SEQ ID NO: 1684809 - RNA, 21 nt, Human
uuccugcaaugaagucucuga

SEQ ID NO: 1684810 - RNA, 16 nt, Human
uuccaugucgccucug

SEQ ID NO: 1684811 - RNA, 16 nt, Human
uuccauggccucuuca

SEQ ID NO: 1684812 - RNA, 12 nt, Human
uuccauggccuc

SEQ ID NO: 1684813 - RNA, 15 nt, Human
uuccugcauuuguga

SEQ ID NO: 1684814 - RNA, 21 nt, Human
uuccuugaguugauucagcuc

SEQ ID NO: 1684815 - RNA, 18 nt, Human
uucggugagcuacaaaug

SEQ ID NO: 1684816 - RNA, 17 nt, Human
uuccuuggacucauuuu

SEQ ID NO: 1684817 - RNA, 14 nt, Human
uucuauagcuuuuc

SEQ ID NO: 1684818 - RNA, 22 nt, Human
uucuacucgaguuacagacaaa

SEQ ID NO: 1684819 - RNA, 14 nt, Human
uucuacccaggugc

SEQ ID NO: 1684820 - RNA, 20 nt, Human
uucuacccagcgagcccugg

SEQ ID NO: 1684821 - RNA, 21 nt, Human
uucuacccagcgagcccuggu

SEQ ID NO: 1684822 - RNA, 13 nt, Human
uucuacuauuuau

SEQ ID NO: 1684823 - RNA, 13 nt, Human
uucuacgccaggg

SEQ ID NO: 1684824 - RNA, 23 nt, Human
uucuaaugugugaaucagagcac

SEQ ID NO: 1684825 - RNA, 15 nt, Human
uucuacauacuaugg

SEQ ID NO: 1684826 - RNA, 12 nt, Human
uucuacccagcg

SEQ ID NO: 1684827 - RNA, 19 nt, Human
uucuacccagcgagcccug

SEQ ID NO: 1684828 - RNA, 14 nt, Human
uuucauuuagguga

SEQ ID NO: 1684829 - RNA, 18 nt, Human
uuucauuuaggugaggaa

SEQ ID NO: 1684830 - RNA, 13 nt, Human
uuucaguguacau

SEQ ID NO: 1684831 - RNA, 14 nt, Human
uuucaguguacaug

SEQ ID NO: 1684832 - RNA, 13 nt, Human
uuucagauacugg

SEQ ID NO: 1684833 - RNA, 21 nt, Human
uuucagauacuggauuguacu

SEQ ID NO: 1684834 - RNA, 22 nt, Human
uuucacaaccuucuguggcuca

SEQ ID NO: 1684835 - RNA, 16 nt, Human
uuucacaaccuucugu

SEQ ID NO: 1684836 - RNA, 12 nt, Human
uuucaauaggaa

SEQ ID NO: 1684837 - RNA, 14 nt, Human
uuucaauaggaaaa

SEQ ID NO: 1684838 - RNA, 17 nt, Human
uuucaauaggaaaaacu

SEQ ID NO: 1684839 - RNA, 19 nt, Human
uuucaauaggaaaaacuga

SEQ ID NO: 1684840 - RNA, 15 nt, Human
uuucaacgcagcccu

SEQ ID NO: 1684841 - RNA, 16 nt, Human
uuucaacgcagcccug

SEQ ID NO: 1684842 - RNA, 20 nt, Human
uuucaacgcagcccugcuuu

SEQ ID NO: 1684843 - RNA, 21 nt, Human
uuucaacgcagcccugcuuug

SEQ ID NO: 1684844 - RNA, 19 nt, Human
uuuauuuaguuccuugagu

SEQ ID NO: 1684845 - RNA, 13 nt, Human
uuuauuauggcac

SEQ ID NO: 1684846 - RNA, 13 nt, Human
uuuauuaugcaug

SEQ ID NO: 1684847 - RNA, 16 nt, Human
uuuauuauguaaaucc

SEQ ID NO: 1684848 - RNA, 17 nt, Human
uuuauuauguaaauccc

SEQ ID NO: 1684849 - RNA, 14 nt, Human
uuuauuauguaaau

SEQ ID NO: 1684850 - RNA, 16 nt, Human
uuuauggcuuuugugc

SEQ ID NO: 1684851 - RNA, 14 nt, Human
uuuauggcuuuugu

SEQ ID NO: 1684852 - RNA, 22 nt, Human
uuuauaauuuugugaagcaaaa

SEQ ID NO: 1684853 - RNA, 21 nt, Human
uuuauaaaaauaaaaaacacu

SEQ ID NO: 1684854 - RNA, 23 nt, Human
uuuauaaaaauaaaaaacacugg

SEQ ID NO: 1684855 - RNA, 12 nt, Human
uuuagacagagu

SEQ ID NO: 1684856 - RNA, 14 nt, Human
uuuagaaauauaau

SEQ ID NO: 1684857 - RNA, 19 nt, Human
uuuacuucuuauacauuug

SEQ ID NO: 1684858 - RNA, 22 nt, Human
uuuacuucuuauacauuugaua

SEQ ID NO: 1684859 - RNA, 15 nt, Human
uuuacagcugccugc

SEQ ID NO: 1684860 - RNA, 16 nt, Human
uuuacagcugccugca

SEQ ID NO: 1684861 - RNA, 13 nt, Human
uuuaccacuugug

SEQ ID NO: 1684862 - RNA, 21 nt, Human
uuuaauagguuuggacaaaau

SEQ ID NO: 1684863 - RNA, 21 nt, Human
uuuaauaauuauaugcuauuu

SEQ ID NO: 1684864 - RNA, 18 nt, Human
uuuaauaauuauaugcua

SEQ ID NO: 1684865 - RNA, 16 nt, Human
uuuaacaacagcuggu

SEQ ID NO: 1684866 - RNA, 23 nt, Human
uuuaacaacuaugauuuggaaaa

SEQ ID NO: 1684867 - RNA, 21 nt, Human
uuguuuggaccaaaaaccagu

SEQ ID NO: 1684868 - RNA, 18 nt, Human
uuguuuggagacagaguc

SEQ ID NO: 1684869 - RNA, 18 nt, Human
uuuaacagaaauguacag

SEQ ID NO: 1684870 - RNA, 19 nt, Human
uuuaacucuauaauguguu

SEQ ID NO: 1684871 - RNA, 18 nt, Human
uuuaagaaaaaggaugca

SEQ ID NO: 1684872 - RNA, 19 nt, Human
uuuaagacauuuuuggaag

SEQ ID NO: 1684873 - RNA, 22 nt, Human
uuuaagaaaaaggaugcacaga

SEQ ID NO: 1684874 - RNA, 20 nt, Human
uuuaagacgaaacauuuguu

SEQ ID NO: 1684875 - RNA, 13 nt, Human
uuuaauaauguuu

SEQ ID NO: 1684876 - RNA, 13 nt, Human
uuggguguauugu

SEQ ID NO: 1684877 - RNA, 15 nt, Human
uuggguguauugugc

SEQ ID NO: 1684878 - RNA, 16 nt, Human
uuggguguauugugcg

SEQ ID NO: 1684879 - RNA, 22 nt, Human
uuggguucaagcgauucuucug

SEQ ID NO: 1684880 - RNA, 13 nt, Human
uuggucuguguga

SEQ ID NO: 1684881 - RNA, 16 nt, Human
uuggucugugagaugc

SEQ ID NO: 1684882 - RNA, 18 nt, Human
uuguacauaaugcgugca

SEQ ID NO: 1684883 - RNA, 23 nt, Human
uuguaaauuaacuuuuauaaacu

SEQ ID NO: 1684884 - RNA, 18 nt, Human
uuguaaauuaacuuuuau

SEQ ID NO: 1684885 - RNA, 16 nt, Human
uuguaaauuaacuuuu

SEQ ID NO: 1684886 - RNA, 15 nt, Human
uuguaaauuaacuuu

SEQ ID NO: 1684887 - RNA, 16 nt, Human
uuguaaaugugguaaa

SEQ ID NO: 1684888 - RNA, 21 nt, Human
uuguaaaugugguaaagaguu

SEQ ID NO: 1684889 - RNA, 17 nt, Human
uuguaaauagcucaggu

SEQ ID NO: 1684890 - RNA, 14 nt, Human
uugugaaaugaugg

SEQ ID NO: 1684891 - RNA, 13 nt, Human
uugugaaauuauu

SEQ ID NO: 1684892 - RNA, 12 nt, Human
uugugauuuuug

SEQ ID NO: 1684893 - RNA, 17 nt, Human
uugugauuuuuguaauu

SEQ ID NO: 1684894 - RNA, 16 nt, Human
uugugauuuuuguaau

SEQ ID NO: 1684895 - RNA, 20 nt, Human
uugugaaaggaaagaggcuc

SEQ ID NO: 1684896 - RNA, 22 nt, Human
uugucuuaaaaaguggaaaaau

SEQ ID NO: 1684897 - RNA, 22 nt, Human
uugucucagauuuuauuaugua

SEQ ID NO: 1684898 - RNA, 20 nt, Human
uugucugaagucacugcaca

SEQ ID NO: 1684899 - RNA, 21 nt, Human
uugucugaagucacugcacag

SEQ ID NO: 1684900 - RNA, 15 nt, Human
uugucuuaaaaagug

SEQ ID NO: 1684901 - RNA, 16 nt, Human
uugucucagauuuuau

SEQ ID NO: 1684902 - RNA, 20 nt, Human
uugucucagauuuuauuaug

SEQ ID NO: 1684903 - RNA, 13 nt, Human
uugucucagauuu

SEQ ID NO: 1684904 - RNA, 20 nt, Human
uugucuacaccauuaugugc

SEQ ID NO: 1684905 - RNA, 15 nt, Human
uugucuagugaaacu

SEQ ID NO: 1684906 - RNA, 19 nt, Human
uugucuacaccauuaugug

SEQ ID NO: 1684907 - RNA, 19 nt, Human
uuguauucucuccuguacc

SEQ ID NO: 1684908 - RNA, 16 nt, Human
uuguauucucuccugu

SEQ ID NO: 1684909 - RNA, 15 nt, Human
uuguauucucuccug

SEQ ID NO: 1684910 - RNA, 21 nt, Human
uuguauucagaguugaugguu

SEQ ID NO: 1684911 - RNA, 14 nt, Human
uuguauuacaaauc

SEQ ID NO: 1684912 - RNA, 12 nt, Human
uuguauuaagaa

SEQ ID NO: 1684913 - RNA, 13 nt, Human
uuguauuaagaau

SEQ ID NO: 1684914 - RNA, 18 nt, Human
uuguauuaagaaugaaau

SEQ ID NO: 1684915 - RNA, 15 nt, Human
uuguacucaauuuua

SEQ ID NO: 1684916 - RNA, 14 nt, Human
uuguacucaauuuu

SEQ ID NO: 1684917 - RNA, 14 nt, Human
uuguuacauuuuua

SEQ ID NO: 1684918 - RNA, 17 nt, Human
uuguuagaucuaguuca

SEQ ID NO: 1684919 - RNA, 21 nt, Human
uuguuaguaugaggcauuugu

SEQ ID NO: 1684920 - RNA, 19 nt, Human
uuguuaguaugaggcauuu

SEQ ID NO: 1684921 - RNA, 18 nt, Human
uuguguuuugcaagccag

SEQ ID NO: 1684922 - RNA, 17 nt, Human
uuguuguuuguuuaguc

SEQ ID NO: 1684923 - RNA, 22 nt, Human
uuguuaguaugaggcauuuguu

SEQ ID NO: 1684924 - RNA, 20 nt, Human
uuguuagugugucuuagugu

SEQ ID NO: 1684925 - RNA, 14 nt, Human
uuguuuaaaaucau

SEQ ID NO: 1684926 - RNA, 15 nt, Human
uuguuugagaaauua

SEQ ID NO: 1684927 - RNA, 21 nt, Human
uuguuugagaaauuaaguauc

SEQ ID NO: 1684928 - RNA, 12 nt, Human
uugugcauuugg

SEQ ID NO: 1684929 - RNA, 23 nt, Human
uugugcauuaucuagauacugua

SEQ ID NO: 1684930 - RNA, 22 nt, Human
uugugcauuaucuagauacugu

SEQ ID NO: 1684931 - RNA, 17 nt, Human
uugugcauuaucuagau

SEQ ID NO: 1684932 - RNA, 19 nt, Human
uugugcugggguuaucuga

SEQ ID NO: 1684933 - RNA, 22 nt, Human
uugugcgcuaaacuuuucugau

SEQ ID NO: 1684934 - RNA, 23 nt, Human
uugugcgcuaaacuuuucugaua

SEQ ID NO: 1684935 - RNA, 16 nt, Human
uugugccagaaugcuu

SEQ ID NO: 1684936 - RNA, 21 nt, Human
uugugccagaaugcuuuagga

SEQ ID NO: 1684937 - RNA, 12 nt, Human
uugugccccugc

SEQ ID NO: 1684938 - RNA, 17 nt, Human
uuguggacacagcucuu

SEQ ID NO: 1684939 - RNA, 21 nt, Human
uuguggaaaaugaaaauuagg

SEQ ID NO: 1684940 - RNA, 16 nt, Human
uuguggacacagcucu

SEQ ID NO: 1684941 - RNA, 21 nt, Human
uuguggauuuaacagaaaugu

SEQ ID NO: 1684942 - RNA, 20 nt, Human
uuguggauuuaacagaaaug

SEQ ID NO: 1684943 - RNA, 23 nt, Human
uuguggauuuaacagaaauguac

SEQ ID NO: 1684944 - RNA, 22 nt, Human
uuguggauuuaacagaaaugua

SEQ ID NO: 1684945 - RNA, 21 nt, Human
uuguguuuauauauaagccaa

SEQ ID NO: 1684946 - RNA, 20 nt, Human
uuguguugaagagguuuuaa

SEQ ID NO: 1684947 - RNA, 13 nt, Human
uuuuuuuugacaa

SEQ ID NO: 1684948 - RNA, 12 nt, Human
uuuuuuuuaaga

SEQ ID NO: 1684949 - RNA, 13 nt, Human
uuuuuuccacuua

SEQ ID NO: 1684950 - RNA, 11 nt, Human
uuuuuuuacua

SEQ ID NO: 1684951 - RNA, 13 nt, Human
uuuuuaaucuuua

SEQ ID NO: 1684952 - RNA, 13 nt, Human
uuuuucauuauuu

SEQ ID NO: 1684953 - RNA, 22 nt, Human
uuuuucauuauuuuauuaugaa

SEQ ID NO: 1684954 - RNA, 21 nt, Human
uuuuuccacauaaggaaacug

SEQ ID NO: 1684955 - RNA, 23 nt, Human
uuuuuaagugcugcauuuaaaag

SEQ ID NO: 1684956 - RNA, 22 nt, Human
uuuuuaagugcugcauuuaaaa

SEQ ID NO: 1684957 - RNA, 19 nt, Human
uuuuuaagugcugcauuua

SEQ ID NO: 1684958 - RNA, 18 nt, Human
uuuuuaagugcugcauuu

SEQ ID NO: 1684959 - RNA, 17 nt, Human
uuuuuaagugcugcauu

SEQ ID NO: 1684960 - RNA, 16 nt, Human
uuuuuaagugcugcau

SEQ ID NO: 1684961 - RNA, 23 nt, Human
uuuuuaagaaaaaggaugcacag

SEQ ID NO: 1684962 - RNA, 12 nt, Human
uuuuuaagaaaa

SEQ ID NO: 1684963 - RNA, 20 nt, Human
uuuuaaacccuauugguaaa

SEQ ID NO: 1684964 - RNA, 23 nt, Human
uuuuaaaauccacuuuaucuuga

SEQ ID NO: 1684965 - RNA, 14 nt, Human
uuuuaaaauccacu

SEQ ID NO: 1684966 - RNA, 16 nt, Human
uuuguugucagcugaa

SEQ ID NO: 1684967 - RNA, 15 nt, Human
uuuguugucagcuga

SEQ ID NO: 1684968 - RNA, 22 nt, Human
uuuguuaguaugaggcauuugu

SEQ ID NO: 1684969 - RNA, 14 nt, Human
uuuguauuuuuagu

SEQ ID NO: 1684970 - RNA, 24 nt, Human
uuuggaccaaaaaccaguauugua

SEQ ID NO: 1684971 - RNA, 15 nt, Human
uuuggucaacacuaa

SEQ ID NO: 1684972 - RNA, 18 nt, Human
uuuguauaaaauaauuuu

SEQ ID NO: 1684973 - RNA, 19 nt, Human
uuuguauaaaauaauuuuu

SEQ ID NO: 1684974 - RNA, 17 nt, Human
uuuggucuacacugugc

SEQ ID NO: 1684975 - RNA, 17 nt, Human
uuuguauaaaauaauuu

SEQ ID NO: 1684976 - RNA, 18 nt, Human
uuugcauaacguauaaaa

SEQ ID NO: 1684977 - RNA, 15 nt, Human
uuuggaaaucuuuaa

SEQ ID NO: 1684978 - RNA, 18 nt, Human
uuuggaccaaaaaccagu

SEQ ID NO: 1684979 - RNA, 21 nt, Human
uuuggaccaaaaaccaguauu

SEQ ID NO: 1684980 - RNA, 22 nt, Human
uuuggaccaaaaaccaguauug

SEQ ID NO: 1684981 - RNA, 13 nt, Human
uuuggacccugag

SEQ ID NO: 1684982 - RNA, 12 nt, Human
uuuggaaaauaa

SEQ ID NO: 1684983 - RNA, 17 nt, Human
uuuccguuaaaauacca

SEQ ID NO: 1684984 - RNA, 15 nt, Human
uuuccguuaaaauac

SEQ ID NO: 1684985 - RNA, 15 nt, Human
uuuccacagaagcuc

SEQ ID NO: 1684986 - RNA, 23 nt, Human
uuuccacauaaggaaacuggguu

SEQ ID NO: 1684987 - RNA, 20 nt, Human
uuuccacauaaggaaacugg

SEQ ID NO: 1684988 - RNA, 21 nt, Human
uuugagugccuuacacaaugg

SEQ ID NO: 1684989 - RNA, 17 nt, Human
uuuucaaaauaaaaaug

SEQ ID NO: 1684990 - RNA, 18 nt, Human
uuuuauuuuuagacagag

SEQ ID NO: 1684991 - RNA, 20 nt, Human
uuuuaugacuucauuaauaa

SEQ ID NO: 1684992 - RNA, 21 nt, Human
uuuuaugacuucauuaauaau

SEQ ID NO: 1684993 - RNA, 21 nt, Human
uuuuauacauaaacaagacca

SEQ ID NO: 1684994 - RNA, 13 nt, Human
uuuuauacauaaa

SEQ ID NO: 1684995 - RNA, 13 nt, Human
uuuuauauuuacu

SEQ ID NO: 1684996 - RNA, 13 nt, Human
uuuuauauuugaa

SEQ ID NO: 1684997 - RNA, 18 nt, Human
uuuuauauuugaaauauu

SEQ ID NO: 1684998 - RNA, 19 nt, Human
uuuuacaaaaaagaaaaga

SEQ ID NO: 1684999 - RNA, 17 nt, Human
uuuuacaauaaaaucuu

SEQ ID NO: 1685000 - RNA, 21 nt, Human
uuuuaaaguaacccuacaaaa

SEQ ID NO: 1685001 - RNA, 19 nt, Human
uuuuacguccaucucuugu

SEQ ID NO: 1685002 - RNA, 23 nt, Human
uuuuauaauuuugugaagcaaaa

SEQ ID NO: 1685003 - RNA, 15 nt, Human
uuuuacuaauagaca

SEQ ID NO: 1685004 - RNA, 21 nt, Human
uuuuauaauuuugugaagcaa

SEQ ID NO: 1685005 - RNA, 16 nt, Human
uuuucuuucagccaag

SEQ ID NO: 1685006 - RNA, 22 nt, Human
uuuucuuguguguuuauuguca

SEQ ID NO: 1685007 - RNA, 13 nt, Human
uuuucuucucccu

SEQ ID NO: 1685008 - RNA, 13 nt, Human
uuuucuacucgag

SEQ ID NO: 1685009 - RNA, 20 nt, Human
uuuucuacucgaguuacaga

SEQ ID NO: 1685010 - RNA, 22 nt, Human
uuuucuacucgaguuacagaca

SEQ ID NO: 1685011 - RNA, 23 nt, Human
uuuucuacucgaguuacagacaa

SEQ ID NO: 1685012 - RNA, 13 nt, Human
uuuucuuauuuca

SEQ ID NO: 1685013 - RNA, 18 nt, Human
uuuucccuauuagagaag

SEQ ID NO: 1685014 - RNA, 22 nt, Human
uuuucccuauuagagaagagau

SEQ ID NO: 1685015 - RNA, 21 nt, Human
uuuucaaaauuguuacaaauu

SEQ ID NO: 1685016 - RNA, 16 nt, Human
uuuucacauuggaaac

SEQ ID NO: 1685017 - RNA, 13 nt, Human
ugccucuuccucc

SEQ ID NO: 1685018 - RNA, 21 nt, Human
ugccucuucucuacucuaggg

SEQ ID NO: 1685019 - RNA, 13 nt, Human
ugccugcccaggc

SEQ ID NO: 1685020 - RNA, 17 nt, Human
ugccugguggcagcugc

SEQ ID NO: 1685021 - RNA, 18 nt, Human
ugccugguggcagcugcg

SEQ ID NO: 1685022 - RNA, 19 nt, Human
ugccugguggcagcugcgg

SEQ ID NO: 1685023 - RNA, 14 nt, Human
ugccuaaggacuuc

SEQ ID NO: 1685024 - RNA, 15 nt, Human
ugccuaaggacuucu

SEQ ID NO: 1685025 - RNA, 16 nt, Human
ugccuaaggacuucuu

SEQ ID NO: 1685026 - RNA, 20 nt, Human
ugccuaaggacuucuuuaau

SEQ ID NO: 1685027 - RNA, 12 nt, Human
ugccuaaggacu

SEQ ID NO: 1685028 - RNA, 13 nt, Human
ugccuaaggacuu

SEQ ID NO: 1685029 - RNA, 21 nt, Human
ugccuaaggacuucuuuaauu

SEQ ID NO: 1685030 - RNA, 22 nt, Human
ugccuccuuugugaggaagccg

SEQ ID NO: 1685031 - RNA, 21 nt, Human
ugccuccuuugugaggaagcc

SEQ ID NO: 1685032 - RNA, 20 nt, Human
ugccuccuuugugaggaagc

SEQ ID NO: 1685033 - RNA, 13 nt, Human
ugccucugccugu

SEQ ID NO: 1685034 - RNA, 14 nt, Human
ugccucugccuguc

SEQ ID NO: 1685035 - RNA, 18 nt, Human
ugccucugccugucuccc

SEQ ID NO: 1685036 - RNA, 14 nt, Human
ugccucugggacug

SEQ ID NO: 1685037 - RNA, 13 nt, Human
ugccucugggacu

SEQ ID NO: 1685038 - RNA, 19 nt, Human
ugcccugcgggucacagga

SEQ ID NO: 1685039 - RNA, 18 nt, Human
ugcccugcugagucccag

SEQ ID NO: 1685040 - RNA, 22 nt, Human
ugcccugcugagucccaggcug

SEQ ID NO: 1685041 - RNA, 23 nt, Human
ugcccugcugagucccaggcuga

SEQ ID NO: 1685042 - RNA, 19 nt, Human
ugcccuaaaguguauuuuu

SEQ ID NO: 1685043 - RNA, 17 nt, Human
ugcccuaaaguguauuu

SEQ ID NO: 1685044 - RNA, 22 nt, Human
ugcccugcccaccuggccucug

SEQ ID NO: 1685045 - RNA, 23 nt, Human
ugcccugcccaccuggccucugc

SEQ ID NO: 1685046 - RNA, 21 nt, Human
ugcccuggugcugccacacuu

SEQ ID NO: 1685047 - RNA, 20 nt, Human
ugcccuggugcugccacacu

SEQ ID NO: 1685048 - RNA, 18 nt, Human
ugcccuggugcugccaca

SEQ ID NO: 1685049 - RNA, 12 nt, Human
ugcccugcuuuc

SEQ ID NO: 1685050 - RNA, 16 nt, Human
ugcccugcuuucagau

SEQ ID NO: 1685051 - RNA, 17 nt, Human
ugcccugcuuucagaua

SEQ ID NO: 1685052 - RNA, 18 nt, Human
ugcccuggauccaucagg

SEQ ID NO: 1685053 - RNA, 15 nt, Human
ugcccugguuuccug

SEQ ID NO: 1685054 - RNA, 15 nt, Human
ugccgucuaccugag

SEQ ID NO: 1685055 - RNA, 16 nt, Human
ugccgucuaccugagg

SEQ ID NO: 1685056 - RNA, 17 nt, Human
ugccgucuaccugaggg

SEQ ID NO: 1685057 - RNA, 19 nt, Human
ugccgucuaccugaggggc

SEQ ID NO: 1685058 - RNA, 14 nt, Human
ugccaugugccagg

SEQ ID NO: 1685059 - RNA, 15 nt, Human
ugccaugugccaggu

SEQ ID NO: 1685060 - RNA, 23 nt, Human
ugccaugaggaacaaggcaaggc

SEQ ID NO: 1685061 - RNA, 20 nt, Human
ugccaugaggaacaaggcaa

SEQ ID NO: 1685062 - RNA, 18 nt, Human
ugcccacgcuggagugca

SEQ ID NO: 1685063 - RNA, 13 nt, Human
ugcccacucccug

SEQ ID NO: 1685064 - RNA, 12 nt, Human
ugccauguuggc

SEQ ID NO: 1685065 - RNA, 15 nt, Human
ugccauguuggccag

SEQ ID NO: 1685066 - RNA, 16 nt, Human
ugccauguuggccagg

SEQ ID NO: 1685067 - RNA, 20 nt, Human
ugcccaccuggccucugcac

SEQ ID NO: 1685068 - RNA, 12 nt, Human
ugccaggaagcc

SEQ ID NO: 1685069 - RNA, 16 nt, Human
ugccaggaagccagca

SEQ ID NO: 1685070 - RNA, 18 nt, Human
ugccaggaagccagcagg

SEQ ID NO: 1685071 - RNA, 19 nt, Human
ugccaggaagccagcaggc

SEQ ID NO: 1685072 - RNA, 17 nt, Human
ugccagguuuuuggucu

SEQ ID NO: 1685073 - RNA, 15 nt, Human
ugccauccagguuca

SEQ ID NO: 1685074 - RNA, 20 nt, Human
ugccauccagguucagcuug

SEQ ID NO: 1685075 - RNA, 12 nt, Human
ugccauccaggu

SEQ ID NO: 1685076 - RNA, 15 nt, Human
ugcauccuccgccuc

SEQ ID NO: 1685077 - RNA, 15 nt, Human
ugcauguuugugauu

SEQ ID NO: 1685078 - RNA, 14 nt, Human
ugcauccuccgccu

SEQ ID NO: 1685079 - RNA, 19 nt, Human
ugcagauaaacaguaguga

SEQ ID NO: 1685080 - RNA, 15 nt, Human
ugccaccacgcccgg

SEQ ID NO: 1685081 - RNA, 18 nt, Human
ugcauuaucuagauacug

SEQ ID NO: 1685082 - RNA, 17 nt, Human
ugcauuaucuagauacu

SEQ ID NO: 1685083 - RNA, 12 nt, Human
ugcauuaucuag

SEQ ID NO: 1685084 - RNA, 14 nt, Human
ugcauuauauuuau

SEQ ID NO: 1685085 - RNA, 16 nt, Human
ugauuuuuuuuuuuca

SEQ ID NO: 1685086 - RNA, 22 nt, Human
ugauuuuuuuuuccuucagugc

SEQ ID NO: 1685087 - RNA, 23 nt, Human
ugauuuuuuuuuccuucagugcc

SEQ ID NO: 1685088 - RNA, 16 nt, Human
ugauuuuuuuuuccuu

SEQ ID NO: 1685089 - RNA, 17 nt, Human
ugauuuuuuuuuccuuc

SEQ ID NO: 1685090 - RNA, 19 nt, Human
ugauuuuuuuuuccuucag

SEQ ID NO: 1685091 - RNA, 20 nt, Human
ugauuuuuuuuuccuucagu

SEQ ID NO: 1685092 - RNA, 15 nt, Human
ugauuuucauugcug

SEQ ID NO: 1685093 - RNA, 13 nt, Human
ugauuuucauugc

SEQ ID NO: 1685094 - RNA, 16 nt, Human
ugcaacuuguaaaugu

SEQ ID NO: 1685095 - RNA, 18 nt, Human
ugcaacuuguaaaugugg

SEQ ID NO: 1685096 - RNA, 18 nt, Human
ugcaacuuuguauaaaag

SEQ ID NO: 1685097 - RNA, 22 nt, Human
ugcaacucugaaggguaauuau

SEQ ID NO: 1685098 - RNA, 18 nt, Human
ugcaaccuucgccaccug

SEQ ID NO: 1685099 - RNA, 21 nt, Human
ugcaaccuucgccaccugggu

SEQ ID NO: 1685100 - RNA, 22 nt, Human
ugcaaccugauugugucucuug

SEQ ID NO: 1685101 - RNA, 19 nt, Human
ugcaaccugauugugucuc

SEQ ID NO: 1685102 - RNA, 20 nt, Human
ugcaaccugauugugucucu

SEQ ID NO: 1685103 - RNA, 18 nt, Human
ugcaaccuccgccucuug

SEQ ID NO: 1685104 - RNA, 20 nt, Human
ugcaaccuccgccucuuggg

SEQ ID NO: 1685105 - RNA, 21 nt, Human
ugcaaccuccgccucuugggu

SEQ ID NO: 1685106 - RNA, 13 nt, Human
ugcaaccuccgcc

SEQ ID NO: 1685107 - RNA, 14 nt, Human
ugcaaccuccgccu

SEQ ID NO: 1685108 - RNA, 19 nt, Human
ugcaacaggcugggcuuca

SEQ ID NO: 1685109 - RNA, 20 nt, Human
ugcaacaggcugggcuucag

SEQ ID NO: 1685110 - RNA, 14 nt, Human
ugcaacaggcuggg

SEQ ID NO: 1685111 - RNA, 15 nt, Human
ugcaacaggcugggc

SEQ ID NO: 1685112 - RNA, 16 nt, Human
ugcaacaggcugggcu

SEQ ID NO: 1685113 - RNA, 17 nt, Human
ugcaacaggcugggcuu

SEQ ID NO: 1685114 - RNA, 15 nt, Human
ugcacagugcaucuc

SEQ ID NO: 1685115 - RNA, 20 nt, Human
ugcacagaguuguuacauuu

SEQ ID NO: 1685116 - RNA, 16 nt, Human
ugcacagugcaucuca

SEQ ID NO: 1685117 - RNA, 17 nt, Human
ugcacagugcaucucag

SEQ ID NO: 1685118 - RNA, 18 nt, Human
ugcaccggcuggccuggc

SEQ ID NO: 1685119 - RNA, 19 nt, Human
ugcaccggcuggccuggcc

SEQ ID NO: 1685120 - RNA, 20 nt, Human
ugcaccggcuggccuggccc

SEQ ID NO: 1685121 - RNA, 22 nt, Human
ugcaccuggaauauauaaccag

SEQ ID NO: 1685122 - RNA, 20 nt, Human
ugcaccuggaauauauaacc

SEQ ID NO: 1685123 - RNA, 17 nt, Human
ugcaccuggaauauaua

SEQ ID NO: 1685124 - RNA, 21 nt, Human
ugcaccggcuggccuggcccc

SEQ ID NO: 1685125 - RNA, 18 nt, Human
ugcacugacauuguuggc

SEQ ID NO: 1685126 - RNA, 21 nt, Human
ugcacugacauuguuggccaa

SEQ ID NO: 1685127 - RNA, 16 nt, Human
ugcacugucaagauga

SEQ ID NO: 1685128 - RNA, 19 nt, Human
ugcagagguccacaacaca

SEQ ID NO: 1685129 - RNA, 16 nt, Human
ugcacuugcagacucu

SEQ ID NO: 1685130 - RNA, 13 nt, Human
ugcaauggcagcc

SEQ ID NO: 1685131 - RNA, 14 nt, Human
ugcaauggcagccu

SEQ ID NO: 1685132 - RNA, 15 nt, Human
ugcaauggcagccuu

SEQ ID NO: 1685133 - RNA, 16 nt, Human
ugcaauggcagccuug

SEQ ID NO: 1685134 - RNA, 13 nt, Human
ugcaaugaccuuu

SEQ ID NO: 1685135 - RNA, 16 nt, Human
ugcaaugaccuuucaa

SEQ ID NO: 1685136 - RNA, 15 nt, Human
ugcaaugaagucucu

SEQ ID NO: 1685137 - RNA, 18 nt, Human
ugcaaugaagucucugaa

SEQ ID NO: 1685138 - RNA, 22 nt, Human
ugcaaugaagucucugaaguga

SEQ ID NO: 1685139 - RNA, 17 nt, Human
ugcaaugaccuuucaau

SEQ ID NO: 1685140 - RNA, 19 nt, Human
ugcaaugaccuuucaauag

SEQ ID NO: 1685141 - RNA, 22 nt, Human
ugcaaugaccuuucaauaggaa

SEQ ID NO: 1685142 - RNA, 23 nt, Human
ugcaaugaccuuucaauaggaaa

SEQ ID NO: 1685143 - RNA, 19 nt, Human
ugcacagaguuguuacauu

SEQ ID NO: 1685144 - RNA, 18 nt, Human
ugcacagaguuguuacau

SEQ ID NO: 1685145 - RNA, 15 nt, Human
ugcacaaagcccuuc

SEQ ID NO: 1685146 - RNA, 17 nt, Human
ugcacaaagcccuucca

SEQ ID NO: 1685147 - RNA, 17 nt, Human
ugcacagaguuguuaca

SEQ ID NO: 1685148 - RNA, 20 nt, Human
ugcacaaacagaggccgcca

SEQ ID NO: 1685149 - RNA, 17 nt, Human
ugcacaaacagaggccg

SEQ ID NO: 1685150 - RNA, 19 nt, Human
ugcacaaacagaggccgcc

SEQ ID NO: 1685151 - RNA, 15 nt, Human
ugcacaaacagaggc

SEQ ID NO: 1685152 - RNA, 16 nt, Human
ugcacaaacagaggcc

SEQ ID NO: 1685153 - RNA, 13 nt, Human
ugagccucagcau

SEQ ID NO: 1685154 - RNA, 15 nt, Human
ugagccucagcaucc

SEQ ID NO: 1685155 - RNA, 17 nt, Human
ugagcagucaggaaaga

SEQ ID NO: 1685156 - RNA, 15 nt, Human
ugagcagucaggaaa

SEQ ID NO: 1685157 - RNA, 13 nt, Human
ugagcaucaggcc

SEQ ID NO: 1685158 - RNA, 20 nt, Human
ugagcagucaggaaagagaa

SEQ ID NO: 1685159 - RNA, 14 nt, Human
ugagaugcuagaac

SEQ ID NO: 1685160 - RNA, 16 nt, Human
ugagaugcuagaacuc

SEQ ID NO: 1685161 - RNA, 20 nt, Human
ugagaugcuagaacucccuu

SEQ ID NO: 1685162 - RNA, 16 nt, Human
ugagcaucaggccagg

SEQ ID NO: 1685163 - RNA, 17 nt, Human
ugagcaucacaguuuug

SEQ ID NO: 1685164 - RNA, 14 nt, Human
ugagcaucaggcca

SEQ ID NO: 1685165 - RNA, 15 nt, Human
ugagcaucaggccag

SEQ ID NO: 1685166 - RNA, 13 nt, Human
ugagccccaaaag

SEQ ID NO: 1685167 - RNA, 12 nt, Human
ugagacucuguc

SEQ ID NO: 1685168 - RNA, 13 nt, Human
ugagacucugucu

SEQ ID NO: 1685169 - RNA, 14 nt, Human
ugagacucugucuc

SEQ ID NO: 1685170 - RNA, 23 nt, Human
ugagaggcauccaguaucuugaa

SEQ ID NO: 1685171 - RNA, 22 nt, Human
ugagaggcauccaguaucuuga

SEQ ID NO: 1685172 - RNA, 17 nt, Human
ugagaguagagucacug

SEQ ID NO: 1685173 - RNA, 17 nt, Human
ugagaaaucuaaaaaac

SEQ ID NO: 1685174 - RNA, 13 nt, Human
ugagaaaucuaaa

SEQ ID NO: 1685175 - RNA, 20 nt, Human
ugagaaagacuauucaaaca

SEQ ID NO: 1685176 - RNA, 18 nt, Human
ugagaaagacuauucaaa

SEQ ID NO: 1685177 - RNA, 16 nt, Human
ugacuguacuccuccc

SEQ ID NO: 1685178 - RNA, 17 nt, Human
ugacuguacuccuccca

SEQ ID NO: 1685179 - RNA, 18 nt, Human
ugacuguacuccucccag

SEQ ID NO: 1685180 - RNA, 22 nt, Human
ugacuguacuccucccaggcgc

SEQ ID NO: 1685181 - RNA, 16 nt, Human
ugagaaagacuauuca

SEQ ID NO: 1685182 - RNA, 17 nt, Human
ugagaaagacuauucaa

SEQ ID NO: 1685183 - RNA, 12 nt, Human
ugagacccuguc

SEQ ID NO: 1685184 - RNA, 14 nt, Human
ugagacagcucugc

SEQ ID NO: 1685185 - RNA, 16 nt, Human
ugagacagcucugcau

SEQ ID NO: 1685186 - RNA, 14 nt, Human
ugagaaauuaagua

SEQ ID NO: 1685187 - RNA, 13 nt, Human
ugagaaauuaagu

SEQ ID NO: 1685188 - RNA, 16 nt, Human
ucuugaauaauguaag

SEQ ID NO: 1685189 - RNA, 15 nt, Human
ucuugaacuccuggc

SEQ ID NO: 1685190 - RNA, 17 nt, Human
ucuugaauuguaaggaa

SEQ ID NO: 1685191 - RNA, 20 nt, Human
ugaccauucuccaccugcca

SEQ ID NO: 1685192 - RNA, 21 nt, Human
ugaccauucuccaccugccag

SEQ ID NO: 1685193 - RNA, 22 nt, Human
ugaccauucuccaccugccagg

SEQ ID NO: 1685194 - RNA, 23 nt, Human
ugaccauucuccaccugccaggg

SEQ ID NO: 1685195 - RNA, 16 nt, Human
ugaccucugcagcaau

SEQ ID NO: 1685196 - RNA, 13 nt, Human
ugaccucugcagc

SEQ ID NO: 1685197 - RNA, 16 nt, Human
ugaccucagcuuugau

SEQ ID NO: 1685198 - RNA, 22 nt, Human
ugaccucaggugauccacccac

SEQ ID NO: 1685199 - RNA, 23 nt, Human
ugaccucugcagcaauaaagcag

SEQ ID NO: 1685200 - RNA, 12 nt, Human
ugaccucugccu

SEQ ID NO: 1685201 - RNA, 21 nt, Human
ugaccucugcagcaauaaagc

SEQ ID NO: 1685202 - RNA, 18 nt, Human
ugaccucugcagcaauaa

SEQ ID NO: 1685203 - RNA, 14 nt, Human
ugaccuuucaauag

SEQ ID NO: 1685204 - RNA, 15 nt, Human
ugaccuuucaauagg

SEQ ID NO: 1685205 - RNA, 16 nt, Human
ugaccuuucaauagga

SEQ ID NO: 1685206 - RNA, 18 nt, Human
ugaccuuucaauaggaaa

SEQ ID NO: 1685207 - RNA, 22 nt, Human
ugaccuuucaauaggaaaaacu

SEQ ID NO: 1685208 - RNA, 13 nt, Human
ugacgccauccca

SEQ ID NO: 1685209 - RNA, 14 nt, Human
ugacgccaucccag

SEQ ID NO: 1685210 - RNA, 15 nt, Human
ugacgccaucccagc

SEQ ID NO: 1685211 - RNA, 16 nt, Human
ugacgccaucccagcc

SEQ ID NO: 1685212 - RNA, 17 nt, Human
ugacgccaucccagccc

SEQ ID NO: 1685213 - RNA, 18 nt, Human
ugacgccaucccagcccc

SEQ ID NO: 1685214 - RNA, 19 nt, Human
ugacgccaucccagcccca

SEQ ID NO: 1685215 - RNA, 20 nt, Human
ugacgccaucccagccccaa

SEQ ID NO: 1685216 - RNA, 13 nt, Human
ugacugauucuuc

SEQ ID NO: 1685217 - RNA, 14 nt, Human
ugacugauucuuca

SEQ ID NO: 1685218 - RNA, 15 nt, Human
ugacugauucuucag

SEQ ID NO: 1685219 - RNA, 16 nt, Human
ugacugauucuucagc

SEQ ID NO: 1685220 - RNA, 17 nt, Human
ugacugauucuucagca

SEQ ID NO: 1685221 - RNA, 15 nt, Human
ugacugaauuucuuu

SEQ ID NO: 1685222 - RNA, 14 nt, Human
ugacugaauuucuu

SEQ ID NO: 1685223 - RNA, 13 nt, Human
ugacugaauuucu

SEQ ID NO: 1685224 - RNA, 12 nt, Human
ugacucuuaaga

SEQ ID NO: 1685225 - RNA, 15 nt, Human
ugagucgaggacagg

SEQ ID NO: 1685226 - RNA, 16 nt, Human
ugagucgaggacaggg

SEQ ID NO: 1685227 - RNA, 23 nt, Human
ugaguugauagcacagacccugc

SEQ ID NO: 1685228 - RNA, 16 nt, Human
ugaguugauucagcuc

SEQ ID NO: 1685229 - RNA, 19 nt, Human
ugaguugauucagcucugc

SEQ ID NO: 1685230 - RNA, 18 nt, Human
ugagucgaggacagggag

SEQ ID NO: 1685231 - RNA, 18 nt, Human
ugauagguauaaguggug

SEQ ID NO: 1685232 - RNA, 22 nt, Human
ugauagcacagacccugcccug

SEQ ID NO: 1685233 - RNA, 23 nt, Human
ugauagcacagacccugcccugu

SEQ ID NO: 1685234 - RNA, 15 nt, Human
ugauagcacagaccc

SEQ ID NO: 1685235 - RNA, 16 nt, Human
ugauagcacagacccu

SEQ ID NO: 1685236 - RNA, 17 nt, Human
ugauagcacagacccug

SEQ ID NO: 1685237 - RNA, 18 nt, Human
ugauagcacagacccugc

SEQ ID NO: 1685238 - RNA, 20 nt, Human
ugauagcacagacccugccc

SEQ ID NO: 1685239 - RNA, 21 nt, Human
ugauagcacagacccugcccu

SEQ ID NO: 1685240 - RNA, 23 nt, Human
ugaggacuuaaaauauuccugca

SEQ ID NO: 1685241 - RNA, 11 nt, Human
ugaggcugggc

SEQ ID NO: 1685242 - RNA, 15 nt, Human
ugaggucuguucuuu

SEQ ID NO: 1685243 - RNA, 14 nt, Human
ugaggucuguucuu

SEQ ID NO: 1685244 - RNA, 20 nt, Human
ugaggucuguucuuuccaaa

SEQ ID NO: 1685245 - RNA, 14 nt, Human
ugagucgaggacag

SEQ ID NO: 1685246 - RNA, 19 nt, Human
ugaguccuggcaugggaau

SEQ ID NO: 1685247 - RNA, 22 nt, Human
ugaguccuggcaugggaaugaa

SEQ ID NO: 1685248 - RNA, 11 nt, Human
ugaguccuggc

SEQ ID NO: 1685249 - RNA, 18 nt, Human
ugaguccuggcaugggaa

SEQ ID NO: 1685250 - RNA, 19 nt, Human
ugagguuucaaaccucccu

SEQ ID NO: 1685251 - RNA, 21 nt, Human
ugaguccccuguuuguuucug

SEQ ID NO: 1685252 - RNA, 16 nt, Human
ugaggugcuauguucu

SEQ ID NO: 1685253 - RNA, 15 nt, Human
ugaggugcuauguuc

SEQ ID NO: 1685254 - RNA, 20 nt, Human
ugaucugaugcaagcaagaa

SEQ ID NO: 1685255 - RNA, 21 nt, Human
ugauccacccaccucagccuc

SEQ ID NO: 1685256 - RNA, 22 nt, Human
ugauccacccaccucagccucc

SEQ ID NO: 1685257 - RNA, 19 nt, Human
ugaucuaggaagacuuugg

SEQ ID NO: 1685258 - RNA, 21 nt, Human
ugaucuaggaagacuuuggaa

SEQ ID NO: 1685259 - RNA, 13 nt, Human
ugaucauccacug

SEQ ID NO: 1685260 - RNA, 24 nt, Human
ugaucauccacugugccaugugcc

SEQ ID NO: 1685261 - RNA, 21 nt, Human
ugauccaagcuggucccacuc

SEQ ID NO: 1685262 - RNA, 15 nt, Human
ugauccacccaccuc

SEQ ID NO: 1685263 - RNA, 16 nt, Human
ugauccacccaccuca

SEQ ID NO: 1685264 - RNA, 20 nt, Human
ugauccacccaccucagccu

SEQ ID NO: 1685265 - RNA, 22 nt, Human
ugaucacggcucacugcagccu

SEQ ID NO: 1685266 - RNA, 17 nt, Human
ugauauaaguguguguu

SEQ ID NO: 1685267 - RNA, 23 nt, Human
ugauauaaguguguguuuuucau

SEQ ID NO: 1685268 - RNA, 24 nt, Human
ugauaguuguaccgcaaugugacu

SEQ ID NO: 1685269 - RNA, 22 nt, Human
ugaugaucuuugcagacaggca

SEQ ID NO: 1685270 - RNA, 23 nt, Human
ugaugaucuuugcagacaggcaa

SEQ ID NO: 1685271 - RNA, 20 nt, Human
ugaugaugaaaugaggucag

SEQ ID NO: 1685272 - RNA, 14 nt, Human
ugaugccaugagga

SEQ ID NO: 1685273 - RNA, 19 nt, Human
ugaugccaaguuguuugag

SEQ ID NO: 1685274 - RNA, 15 nt, Human
ugaugccaaguuguu

SEQ ID NO: 1685275 - RNA, 21 nt, Human
ugaugccaaguuguuugagaa

SEQ ID NO: 1685276 - RNA, 21 nt, Human
ugaucuuugcagacaggcaag

SEQ ID NO: 1685277 - RNA, 23 nt, Human
ugaucuuugcagacaggcaagca

SEQ ID NO: 1685278 - RNA, 21 nt, Human
ugaucugaugcaagcaagaaa

SEQ ID NO: 1685279 - RNA, 19 nt, Human
ugaucuuugcagacaggca

SEQ ID NO: 1685280 - RNA, 20 nt, Human
ugaucuuugcagacaggcaa

SEQ ID NO: 1685281 - RNA, 19 nt, Human
ugaugcuucuucagagacu

SEQ ID NO: 1685282 - RNA, 21 nt, Human
ugaugcuucuucagagacucc

SEQ ID NO: 1685283 - RNA, 22 nt, Human
ugaugcuucuucagagacuccu

SEQ ID NO: 1685284 - RNA, 13 nt, Human
ugauguacaugua

SEQ ID NO: 1685285 - RNA, 23 nt, Human
ugaugcuucuucagagacuccug

SEQ ID NO: 1685286 - RNA, 23 nt, Human
ugggguuaucugaagucagaucu

SEQ ID NO: 1685287 - RNA, 19 nt, Human
uggggggcugaggugggag

SEQ ID NO: 1685288 - RNA, 17 nt, Human
uggggccaggcuggguc

SEQ ID NO: 1685289 - RNA, 16 nt, Human
ugggggccucagugcc

SEQ ID NO: 1685290 - RNA, 22 nt, Human
ugggcuucauccuccucagauc

SEQ ID NO: 1685291 - RNA, 15 nt, Human
ugggcuucauccucc

SEQ ID NO: 1685292 - RNA, 22 nt, Human
ugggcuucaguggcagcugcuu

SEQ ID NO: 1685293 - RNA, 21 nt, Human
ugggcuucaguggcagcugcu

SEQ ID NO: 1685294 - RNA, 13 nt, Human
uggggcagcuuga

SEQ ID NO: 1685295 - RNA, 23 nt, Human
ugggcuuggggaccagagcugcc

SEQ ID NO: 1685296 - RNA, 17 nt, Human
ugggcuugucuguagau

SEQ ID NO: 1685297 - RNA, 21 nt, Human
ugggcuugucuguagauuuua

SEQ ID NO: 1685298 - RNA, 18 nt, Human
ugggcagagcagagacca

SEQ ID NO: 1685299 - RNA, 14 nt, Human
ugggcagagcagag

SEQ ID NO: 1685300 - RNA, 15 nt, Human
ugggcagagcagaga

SEQ ID NO: 1685301 - RNA, 17 nt, Human
ugggcagagcagagacc

SEQ ID NO: 1685302 - RNA, 23 nt, Human
ugggcagcugccuccccuccucu

SEQ ID NO: 1685303 - RNA, 22 nt, Human
ugggcagcugccuccccuccuc

SEQ ID NO: 1685304 - RNA, 20 nt, Human
ugggcagcugccuccccucc

SEQ ID NO: 1685305 - RNA, 12 nt, Human
ugggcagcugcc

SEQ ID NO: 1685306 - RNA, 13 nt, Human
ugggauaaaugcc

SEQ ID NO: 1685307 - RNA, 14 nt, Human
ugggauaaaugcca

SEQ ID NO: 1685308 - RNA, 12 nt, Human
ugggauaaaugc

SEQ ID NO: 1685309 - RNA, 18 nt, Human
ugggaggaucucuugagc

SEQ ID NO: 1685310 - RNA, 18 nt, Human
ugggaugauuggaggggg

SEQ ID NO: 1685311 - RNA, 16 nt, Human
ugggaaugaaugucag

SEQ ID NO: 1685312 - RNA, 21 nt, Human
ugggaaugaaugucaguguga

SEQ ID NO: 1685313 - RNA, 14 nt, Human
ugggacacccugug

SEQ ID NO: 1685314 - RNA, 15 nt, Human
ugggacacccuguga

SEQ ID NO: 1685315 - RNA, 16 nt, Human
ugggaggaucucuuga

SEQ ID NO: 1685316 - RNA, 14 nt, Human
ugggacagggagga

SEQ ID NO: 1685317 - RNA, 20 nt, Human
uggccuagcauacguacaca

SEQ ID NO: 1685318 - RNA, 14 nt, Human
uggccccugcccgg

SEQ ID NO: 1685319 - RNA, 21 nt, Human
uggccccucagggucccuggu

SEQ ID NO: 1685320 - RNA, 22 nt, Human
uggccccucagggucccuggug

SEQ ID NO: 1685321 - RNA, 17 nt, Human
uggcagcugcgguccac

SEQ ID NO: 1685322 - RNA, 19 nt, Human
uggcagcugcgguccaccc

SEQ ID NO: 1685323 - RNA, 13 nt, Human
uggccccucaggg

SEQ ID NO: 1685324 - RNA, 20 nt, Human
uggccccucagggucccugg

SEQ ID NO: 1685325 - RNA, 23 nt, Human
uggccuagcauacguacacauuu

SEQ ID NO: 1685326 - RNA, 18 nt, Human
uggccucaagugauucuc

SEQ ID NO: 1685327 - RNA, 23 nt, Human
uggccucaagugauucuccugcc

SEQ ID NO: 1685328 - RNA, 11 nt, Human
uggccucccaa

SEQ ID NO: 1685329 - RNA, 14 nt, Human
uggccucccaacuc

SEQ ID NO: 1685330 - RNA, 19 nt, Human
uggccucccaacucacccc

SEQ ID NO: 1685331 - RNA, 20 nt, Human
uggccucccaacucacccca

SEQ ID NO: 1685332 - RNA, 21 nt, Human
uggccucccaacucaccccag

SEQ ID NO: 1685333 - RNA, 22 nt, Human
uggccucccaacucaccccagc

SEQ ID NO: 1685334 - RNA, 16 nt, Human
uggcuuuucacugcug

SEQ ID NO: 1685335 - RNA, 18 nt, Human
uggcuuuucacugcuggc

SEQ ID NO: 1685336 - RNA, 19 nt, Human
uggcuuuucacugcuggcu

SEQ ID NO: 1685337 - RNA, 21 nt, Human
uggcuuuucacugcuggcugc

SEQ ID NO: 1685338 - RNA, 22 nt, Human
uggcuuuucacugcuggcugcc

SEQ ID NO: 1685339 - RNA, 14 nt, Human
ugggaaugaagcaa

SEQ ID NO: 1685340 - RNA, 13 nt, Human
uggcuuuucugau

SEQ ID NO: 1685341 - RNA, 19 nt, Human
uggcuucccgcucagcccu

SEQ ID NO: 1685342 - RNA, 20 nt, Human
uggcuucccgcucagcccuc

SEQ ID NO: 1685343 - RNA, 21 nt, Human
uggcuucccgcucagcccucc

SEQ ID NO: 1685344 - RNA, 22 nt, Human
uggcuucccgcucagcccuccc

SEQ ID NO: 1685345 - RNA, 22 nt, Human
uggcuuccuaaaauucagugga

SEQ ID NO: 1685346 - RNA, 13 nt, Human
uggcugcugaagg

SEQ ID NO: 1685347 - RNA, 14 nt, Human
uggcugcugaaggc

SEQ ID NO: 1685348 - RNA, 16 nt, Human
uggcugcugaaggcuc

SEQ ID NO: 1685349 - RNA, 17 nt, Human
uggcuccagcuggccgg

SEQ ID NO: 1685350 - RNA, 13 nt, Human
uggccucugcacu

SEQ ID NO: 1685351 - RNA, 23 nt, Human
uggccuucggccuccauccugag

SEQ ID NO: 1685352 - RNA, 22 nt, Human
uggccuucggccuccauccuga

SEQ ID NO: 1685353 - RNA, 19 nt, Human
uggaucaaauccagccugc

SEQ ID NO: 1685354 - RNA, 22 nt, Human
uggaugcagccucacaguccuu

SEQ ID NO: 1685355 - RNA, 13 nt, Human
uggaugcagccuc

SEQ ID NO: 1685356 - RNA, 21 nt, Human
uggaugcagccucacaguccu

SEQ ID NO: 1685357 - RNA, 23 nt, Human
uggaggggggaggugggauccuc

SEQ ID NO: 1685358 - RNA, 17 nt, Human
uggauuuaacagaaaug

SEQ ID NO: 1685359 - RNA, 15 nt, Human
uggauuuaacagaaa

SEQ ID NO: 1685360 - RNA, 21 nt, Human
uggcacuauaauguaagcucu

SEQ ID NO: 1685361 - RNA, 19 nt, Human
uggcacugcuuccagugag

SEQ ID NO: 1685362 - RNA, 22 nt, Human
uggcacuauaauguaagcucua

SEQ ID NO: 1685363 - RNA, 22 nt, Human
uggcacugcuuccagugaggcu

SEQ ID NO: 1685364 - RNA, 19 nt, Human
uggacuaacuugucuuugg

SEQ ID NO: 1685365 - RNA, 20 nt, Human
uggacuaacuugucuuugga

SEQ ID NO: 1685366 - RNA, 17 nt, Human
uggaccaaaaaccagua

SEQ ID NO: 1685367 - RNA, 19 nt, Human
uggacguguuaugacucca

SEQ ID NO: 1685368 - RNA, 23 nt, Human
uggacguguuaugacuccagaau

SEQ ID NO: 1685369 - RNA, 18 nt, Human
uggacaggcauguucucu

SEQ ID NO: 1685370 - RNA, 22 nt, Human
uggacaggcauguucucugagg

SEQ ID NO: 1685371 - RNA, 15 nt, Human
uggaccaaaaaccag

SEQ ID NO: 1685372 - RNA, 23 nt, Human
uggacaggcauguucucugagga

SEQ ID NO: 1685373 - RNA, 19 nt, Human
ugcuuaacuucacauauug

SEQ ID NO: 1685374 - RNA, 18 nt, Human
ugcuuaacuucacauauu

SEQ ID NO: 1685375 - RNA, 17 nt, Human
ugcuuaacuucacauau

SEQ ID NO: 1685376 - RNA, 14 nt, Human
ugcuuaacuucaca

SEQ ID NO: 1685377 - RNA, 13 nt, Human
ugcuuaacuucac

SEQ ID NO: 1685378 - RNA, 22 nt, Human
ugcuuccagugaggcucugccc

SEQ ID NO: 1685379 - RNA, 23 nt, Human
ugcuuccagugaggcucugcccu

SEQ ID NO: 1685380 - RNA, 17 nt, Human
ugcuucuguuuuauaau

SEQ ID NO: 1685381 - RNA, 14 nt, Human
uggaacgcguugaa

SEQ ID NO: 1685382 - RNA, 15 nt, Human
uggaacgcguugaaa

SEQ ID NO: 1685383 - RNA, 16 nt, Human
uggaacgcguugaaau

SEQ ID NO: 1685384 - RNA, 17 nt, Human
uggaacgcguugaaauu

SEQ ID NO: 1685385 - RNA, 15 nt, Human
uggaacacucugaga

SEQ ID NO: 1685386 - RNA, 17 nt, Human
uggaacacucugagacu

SEQ ID NO: 1685387 - RNA, 22 nt, Human
uggaaaaguauguuagugcaaa

SEQ ID NO: 1685388 - RNA, 13 nt, Human
ugcuuuggaaauc

SEQ ID NO: 1685389 - RNA, 17 nt, Human
ugcuuuggaaaacccag

SEQ ID NO: 1685390 - RNA, 16 nt, Human
ugcuuguuaacugagu

SEQ ID NO: 1685391 - RNA, 14 nt, Human
ugcuuguuaacuga

SEQ ID NO: 1685392 - RNA, 13 nt, Human
ugcuucuucagag

SEQ ID NO: 1685393 - RNA, 22 nt, Human
ugcuucuguuuuauaauuuugu

SEQ ID NO: 1685394 - RNA, 18 nt, Human
ugcuugugaaaggaaaga

SEQ ID NO: 1685395 - RNA, 13 nt, Human
uguccccuauccu

SEQ ID NO: 1685396 - RNA, 13 nt, Human
ugucaucucagcu

SEQ ID NO: 1685397 - RNA, 17 nt, Human
uguccccgcacugggcu

SEQ ID NO: 1685398 - RNA, 19 nt, Human
uguccccgcacugggcuug

SEQ ID NO: 1685399 - RNA, 22 nt, Human
uguccugccuaaggcugaacuu

SEQ ID NO: 1685400 - RNA, 12 nt, Human
uguccugggagu

SEQ ID NO: 1685401 - RNA, 19 nt, Human
uguccugggagugagcugg

SEQ ID NO: 1685402 - RNA, 20 nt, Human
uguccugggagugagcuggu

SEQ ID NO: 1685403 - RNA, 14 nt, Human
ugucuaaugaaacc

SEQ ID NO: 1685404 - RNA, 17 nt, Human
ugucuacaccauuaugu

SEQ ID NO: 1685405 - RNA, 17 nt, Human
ugucuacacuaagagag

SEQ ID NO: 1685406 - RNA, 18 nt, Human
ugucuacaccauuaugug

SEQ ID NO: 1685407 - RNA, 22 nt, Human
ugucuacacuaagagagaauga

SEQ ID NO: 1685408 - RNA, 14 nt, Human
ugucuaugggacuc

SEQ ID NO: 1685409 - RNA, 15 nt, Human
ugucuaugggacuca

SEQ ID NO: 1685410 - RNA, 16 nt, Human
ugucuaugggacucaa

SEQ ID NO: 1685411 - RNA, 15 nt, Human
ugucuaguuguuuga

SEQ ID NO: 1685412 - RNA, 23 nt, Human
ugucuaguuguuugauucagaca

SEQ ID NO: 1685413 - RNA, 16 nt, Human
ugucucagauuuuauu

SEQ ID NO: 1685414 - RNA, 20 nt, Human
ugucucagauuuuauuaugu

SEQ ID NO: 1685415 - RNA, 19 nt, Human
ugucucaagagggcacugg

SEQ ID NO: 1685416 - RNA, 22 nt, Human
ugucucagauuuuauuauguaa

SEQ ID NO: 1685417 - RNA, 17 nt, Human
ugucucaagagggcacu

SEQ ID NO: 1685418 - RNA, 18 nt, Human
ugucucaagagggcacug

SEQ ID NO: 1685419 - RNA, 21 nt, Human
ugucucaaaaaaagaaaaaga

SEQ ID NO: 1685420 - RNA, 16 nt, Human
ugucuuuucuugcaug

SEQ ID NO: 1685421 - RNA, 23 nt, Human
ugucuuuggacccugaggcccag

SEQ ID NO: 1685422 - RNA, 12 nt, Human
ugucuuaauuaa

SEQ ID NO: 1685423 - RNA, 15 nt, Human
ugucacaggcagguc

SEQ ID NO: 1685424 - RNA, 16 nt, Human
ugucacaggcaggucc

SEQ ID NO: 1685425 - RNA, 17 nt, Human
ugucacaggcaggucca

SEQ ID NO: 1685426 - RNA, 21 nt, Human
ugucacaggcagguccagggu

SEQ ID NO: 1685427 - RNA, 16 nt, Human
ugucagugugacugau

SEQ ID NO: 1685428 - RNA, 19 nt, Human
ugucagugugacugaucuc

SEQ ID NO: 1685429 - RNA, 15 nt, Human
ugucagugugacuga

SEQ ID NO: 1685430 - RNA, 14 nt, Human
ugucagugugacug

SEQ ID NO: 1685431 - RNA, 13 nt, Human
uguaugcgugugu

SEQ ID NO: 1685432 - RNA, 21 nt, Human
ugucaauuacaggaaguacug

SEQ ID NO: 1685433 - RNA, 13 nt, Human
ugucacacacuuu

SEQ ID NO: 1685434 - RNA, 14 nt, Human
ugucacaggcaggu

SEQ ID NO: 1685435 - RNA, 19 nt, Human
uguauuuuacuaauaaaau

SEQ ID NO: 1685436 - RNA, 15 nt, Human
uguauuuguuugcau

SEQ ID NO: 1685437 - RNA, 18 nt, Human
uguauuuuaaaagaauga

SEQ ID NO: 1685438 - RNA, 19 nt, Human
uguauuuuaaaagaaugau

SEQ ID NO: 1685439 - RNA, 23 nt, Human
uguauagaaccucuuugucuaca

SEQ ID NO: 1685440 - RNA, 15 nt, Human
uguauagauuagaau

SEQ ID NO: 1685441 - RNA, 21 nt, Human
uguauagauuagaauucugua

SEQ ID NO: 1685442 - RNA, 23 nt, Human
uguauagauuagagaguguugaa

SEQ ID NO: 1685443 - RNA, 22 nt, Human
uguaugaaagauggcugugccu

SEQ ID NO: 1685444 - RNA, 13 nt, Human
uguaucugagcag

SEQ ID NO: 1685445 - RNA, 20 nt, Human
uguaguguuggagaagaacu

SEQ ID NO: 1685446 - RNA, 21 nt, Human
uguaguguuggagaagaacug

SEQ ID NO: 1685447 - RNA, 19 nt, Human
uguaguguuggagaagaac

SEQ ID NO: 1685448 - RNA, 14 nt, Human
uguauaaaauaauu

SEQ ID NO: 1685449 - RNA, 18 nt, Human
uguaggaagguuaauguu

SEQ ID NO: 1685450 - RNA, 13 nt, Human
uguauaaaauaau

SEQ ID NO: 1685451 - RNA, 22 nt, Human
uguacagcaaggagauuuacaa

SEQ ID NO: 1685452 - RNA, 13 nt, Human
uguacagagccca

SEQ ID NO: 1685453 - RNA, 12 nt, Human
uguacagagccc

SEQ ID NO: 1685454 - RNA, 23 nt, Human
uguacagcaaggagauuuacaac

SEQ ID NO: 1685455 - RNA, 16 nt, Human
uggugucaccugaaga

SEQ ID NO: 1685456 - RNA, 15 nt, Human
uggugucgggcauga

SEQ ID NO: 1685457 - RNA, 11 nt, Human
ugguuccccug

SEQ ID NO: 1685458 - RNA, 18 nt, Human
ugguuccccuguucacuc

SEQ ID NO: 1685459 - RNA, 19 nt, Human
ugguuccccuguucacucu

SEQ ID NO: 1685460 - RNA, 20 nt, Human
ugguuccccuguucacucua

SEQ ID NO: 1685461 - RNA, 18 nt, Human
uggugucgggcaugacac

SEQ ID NO: 1685462 - RNA, 19 nt, Human
uggugucgggcaugacacg

SEQ ID NO: 1685463 - RNA, 18 nt, Human
ugguugaugaucuuugca

SEQ ID NO: 1685464 - RNA, 19 nt, Human
ugguucuuguauuaagaau

SEQ ID NO: 1685465 - RNA, 14 nt, Human
ugguucuuguauua

SEQ ID NO: 1685466 - RNA, 18 nt, Human
ugguucuuguauuaagaa

SEQ ID NO: 1685467 - RNA, 12 nt, Human
ugguuccucccc

SEQ ID NO: 1685468 - RNA, 18 nt, Human
ugguuccuccccuccucc

SEQ ID NO: 1685469 - RNA, 23 nt, Human
ugguuccuccccuccuccuggac

SEQ ID NO: 1685470 - RNA, 23 nt, Human
ugguuccccuguucacucuacuu

SEQ ID NO: 1685471 - RNA, 16 nt, Human
ugguucccuugaugaa

SEQ ID NO: 1685472 - RNA, 17 nt, Human
ugguucccuugaugaag

SEQ ID NO: 1685473 - RNA, 20 nt, Human
ugguucccuugaugaagaag

SEQ ID NO: 1685474 - RNA, 18 nt, Human
uggugguuucagaaaugu

SEQ ID NO: 1685475 - RNA, 17 nt, Human
uggugguuucagaaaug

SEQ ID NO: 1685476 - RNA, 19 nt, Human
uggugguuuucuguucuuu

SEQ ID NO: 1685477 - RNA, 21 nt, Human
ugguggcccgacagccuggca

SEQ ID NO: 1685478 - RNA, 13 nt, Human
ugguggcuggguu

SEQ ID NO: 1685479 - RNA, 16 nt, Human
uggugggggccucggu

SEQ ID NO: 1685480 - RNA, 18 nt, Human
uggugggggccucggugu

SEQ ID NO: 1685481 - RNA, 19 nt, Human
ugguggcccgacagccugg

SEQ ID NO: 1685482 - RNA, 20 nt, Human
ugguggcagugggagcugcc

SEQ ID NO: 1685483 - RNA, 13 nt, Human
ugguggcaguggg

SEQ ID NO: 1685484 - RNA, 18 nt, Human
ugguggcagugggagcug

SEQ ID NO: 1685485 - RNA, 14 nt, Human
uggugcaaugaccu

SEQ ID NO: 1685486 - RNA, 19 nt, Human
uggugcaaugaccuuucaa

SEQ ID NO: 1685487 - RNA, 20 nt, Human
uggugcaaugaccuuucaau

SEQ ID NO: 1685488 - RNA, 16 nt, Human
uggugacuuuggauaa

SEQ ID NO: 1685489 - RNA, 18 nt, Human
uggugacuuuggauaaua

SEQ ID NO: 1685490 - RNA, 19 nt, Human
uggugacuuuggauaauaa

SEQ ID NO: 1685491 - RNA, 23 nt, Human
uggugacuuuggauaauaaggaa

SEQ ID NO: 1685492 - RNA, 14 nt, Human
uggugagaggcauc

SEQ ID NO: 1685493 - RNA, 20 nt, Human
uggguacuuguggacacagc

SEQ ID NO: 1685494 - RNA, 23 nt, Human
uggguacuuguggacacagcucu

SEQ ID NO: 1685495 - RNA, 14 nt, Human
uggguagacacaca

SEQ ID NO: 1685496 - RNA, 15 nt, Human
uggugacuuuggaua

SEQ ID NO: 1685497 - RNA, 13 nt, Human
ugguugcauccua

SEQ ID NO: 1685498 - RNA, 14 nt, Human
ugguugcuuuaaua

SEQ ID NO: 1685499 - RNA, 18 nt, Human
ugguugcuuuaauaucau

SEQ ID NO: 1685500 - RNA, 20 nt, Human
ugguuguacauauaagugau

SEQ ID NO: 1685501 - RNA, 16 nt, Human
ugguuuucuguucuuu

SEQ ID NO: 1685502 - RNA, 19 nt, Human
ugguuuucuuguguguuua

SEQ ID NO: 1685503 - RNA, 21 nt, Human
ugguuuuuaaaaaacugcuga

SEQ ID NO: 1685504 - RNA, 23 nt, Human
ugguuuuuaaaaaacugcugacu

SEQ ID NO: 1685505 - RNA, 11 nt, Human
uguaaaauggu

SEQ ID NO: 1685506 - RNA, 12 nt, Human
uguaaaauggug

SEQ ID NO: 1685507 - RNA, 11 nt, Human
uguaaugaaaa

SEQ ID NO: 1685508 - RNA, 12 nt, Human
uguaaugaaaac

SEQ ID NO: 1685509 - RNA, 13 nt, Human
uguaaugaaaacc

SEQ ID NO: 1685510 - RNA, 17 nt, Human
uguacaaaguauuaagc

SEQ ID NO: 1685511 - RNA, 18 nt, Human
uguacaaaguauuaagca

SEQ ID NO: 1685512 - RNA, 19 nt, Human
uguacaaaguauuaagcau

SEQ ID NO: 1685513 - RNA, 20 nt, Human
uguacaaaguauuaagcaua

SEQ ID NO: 1685514 - RNA, 15 nt, Human
uguacaaaguauuaa

SEQ ID NO: 1685515 - RNA, 17 nt, Human
uguaaugaaaaccacau

SEQ ID NO: 1685516 - RNA, 21 nt, Human
uguacaaaguauuaagcauau

SEQ ID NO: 1685517 - RNA, 14 nt, Human
uguacagacaacaa

SEQ ID NO: 1685518 - RNA, 11 nt, Human
uguacagagcc

SEQ ID NO: 1685519 - RNA, 14 nt, Human
uguaacaagccacc

SEQ ID NO: 1685520 - RNA, 17 nt, Human
uguaacaagccacccca

SEQ ID NO: 1685521 - RNA, 11 nt, Human
ucccuccuggg

SEQ ID NO: 1685522 - RNA, 19 nt, Human
ucccuccugggaaugaagc

SEQ ID NO: 1685523 - RNA, 16 nt, Human
ucccuaauaaagcugu

SEQ ID NO: 1685524 - RNA, 16 nt, Human
ucccuauuagagaaga

SEQ ID NO: 1685525 - RNA, 15 nt, Human
ucccuaauaaagcug

SEQ ID NO: 1685526 - RNA, 17 nt, Human
uccagguuuaagcuguu

SEQ ID NO: 1685527 - RNA, 18 nt, Human
uccagguuuaagcuguua

SEQ ID NO: 1685528 - RNA, 20 nt, Human
uccccuguuuguuucugaaa

SEQ ID NO: 1685529 - RNA, 21 nt, Human
uccccuguuuguuucugaaag

SEQ ID NO: 1685530 - RNA, 20 nt, Human
ucccugccccucccuucaac

SEQ ID NO: 1685531 - RNA, 13 nt, Human
ucccugcacuugc

SEQ ID NO: 1685532 - RNA, 16 nt, Human
ucccugcaauaaaaug

SEQ ID NO: 1685533 - RNA, 14 nt, Human
ucccugcacuugca

SEQ ID NO: 1685534 - RNA, 14 nt, Human
ucccuucccaccuc

SEQ ID NO: 1685535 - RNA, 13 nt, Human
ucccuucccaccu

SEQ ID NO: 1685536 - RNA, 15 nt, Human
ucccuggccuuucau

SEQ ID NO: 1685537 - RNA, 11 nt, Human
ucccuggccuu

SEQ ID NO: 1685538 - RNA, 15 nt, Human
ucccuugaugaagaa

SEQ ID NO: 1685539 - RNA, 16 nt, Human
ucccuugaugaagaag

SEQ ID NO: 1685540 - RNA, 16 nt, Human
uccuaaucuucugaac

SEQ ID NO: 1685541 - RNA, 13 nt, Human
uccgaccagacac

SEQ ID NO: 1685542 - RNA, 17 nt, Human
uccgaccagacaccuug

SEQ ID NO: 1685543 - RNA, 22 nt, Human
uccuaaugaaugcauaaaaugu

SEQ ID NO: 1685544 - RNA, 15 nt, Human
uccuaauuccacagc

SEQ ID NO: 1685545 - RNA, 16 nt, Human
uccuaauuccacagcu

SEQ ID NO: 1685546 - RNA, 17 nt, Human
uccuaauuccacagcug

SEQ ID NO: 1685547 - RNA, 18 nt, Human
uccuaauuccacagcugc

SEQ ID NO: 1685548 - RNA, 15 nt, Human
uccuacaagacacag

SEQ ID NO: 1685549 - RNA, 18 nt, Human
uccuacccacccuccuuu

SEQ ID NO: 1685550 - RNA, 17 nt, Human
uccucauuagcauuuug

SEQ ID NO: 1685551 - RNA, 21 nt, Human
uccuauauuguuuucagugua

SEQ ID NO: 1685552 - RNA, 18 nt, Human
uccuauauuguuuucagu

SEQ ID NO: 1685553 - RNA, 19 nt, Human
uccuccuuuucacaguucu

SEQ ID NO: 1685554 - RNA, 14 nt, Human
uccucuaggagguc

SEQ ID NO: 1685555 - RNA, 21 nt, Human
uccucuuccugaauuuuauuu

SEQ ID NO: 1685556 - RNA, 16 nt, Human
uccucuguacagagcc

SEQ ID NO: 1685557 - RNA, 17 nt, Human
uccucuguacagagccc

SEQ ID NO: 1685558 - RNA, 18 nt, Human
uccucuguacagagccca

SEQ ID NO: 1685559 - RNA, 19 nt, Human
uccucuguacagagcccac

SEQ ID NO: 1685560 - RNA, 17 nt, Human
uccucuaggaggucucu

SEQ ID NO: 1685561 - RNA, 14 nt, Human
uccucugcugcugg

SEQ ID NO: 1685562 - RNA, 15 nt, Human
uccucugcugcuggc

SEQ ID NO: 1685563 - RNA, 16 nt, Human
uccucugcugcuggcu

SEQ ID NO: 1685564 - RNA, 22 nt, Human
uccucugcuugccaucccuccc

SEQ ID NO: 1685565 - RNA, 21 nt, Human
uccucugcuugccaucccucc

SEQ ID NO: 1685566 - RNA, 17 nt, Human
uccucugcugcuggcug

SEQ ID NO: 1685567 - RNA, 20 nt, Human
uccucugcuugccaucccuc

SEQ ID NO: 1685568 - RNA, 21 nt, Human
uccuucaccuuuguccccacc

SEQ ID NO: 1685569 - RNA, 22 nt, Human
uccuucaccuuuguccccaccg

SEQ ID NO: 1685570 - RNA, 16 nt, Human
uccuuaccagcagagc

SEQ ID NO: 1685571 - RNA, 17 nt, Human
uccuuaccagcagagca

SEQ ID NO: 1685572 - RNA, 18 nt, Human
uccuuaccagcagagcac

SEQ ID NO: 1685573 - RNA, 18 nt, Human
uccuucacagaugggugc

SEQ ID NO: 1685574 - RNA, 19 nt, Human
uccuucacagaugggugcu

SEQ ID NO: 1685575 - RNA, 20 nt, Human
uccuuaccagcagagcaccu

SEQ ID NO: 1685576 - RNA, 18 nt, Human
uccuucaccuuugucccc

SEQ ID NO: 1685577 - RNA, 20 nt, Human
uccuucaccuuuguccccac

SEQ ID NO: 1685578 - RNA, 15 nt, Human
ucgaacuccugaccu

SEQ ID NO: 1685579 - RNA, 13 nt, Human
ucgaacuggcugc

SEQ ID NO: 1685580 - RNA, 18 nt, Human
uccuuuucgcaggauucu

SEQ ID NO: 1685581 - RNA, 19 nt, Human
uccuuuuaaaacacuucca

SEQ ID NO: 1685582 - RNA, 23 nt, Human
uccuuuucacaguucucuccuuc

SEQ ID NO: 1685583 - RNA, 16 nt, Human
uccuuggacucauuuu

SEQ ID NO: 1685584 - RNA, 20 nt, Human
uccuguaccucuugagccuu

SEQ ID NO: 1685585 - RNA, 22 nt, Human
uccuguaccucuugagccuuga

SEQ ID NO: 1685586 - RNA, 18 nt, Human
uccuggcacugcuuccag

SEQ ID NO: 1685587 - RNA, 22 nt, Human
uccuggcacugcuuccagugag

SEQ ID NO: 1685588 - RNA, 20 nt, Human
uccuggcacccggccccugc

SEQ ID NO: 1685589 - RNA, 21 nt, Human
uccuggcacccggccccugcu

SEQ ID NO: 1685590 - RNA, 22 nt, Human
uccuggcacccggccccugcug

SEQ ID NO: 1685591 - RNA, 17 nt, Human
uccuggcacugcuucca

SEQ ID NO: 1685592 - RNA, 17 nt, Human
uccugccucagccuccc

SEQ ID NO: 1685593 - RNA, 16 nt, Human
uccugccucagccucc

SEQ ID NO: 1685594 - RNA, 13 nt, Human
uccugccucagcc

SEQ ID NO: 1685595 - RNA, 15 nt, Human
uccugccucagccuc

SEQ ID NO: 1685596 - RNA, 14 nt, Human
uccuggcacccggc

SEQ ID NO: 1685597 - RNA, 16 nt, Human
uccuggcacccggccc

SEQ ID NO: 1685598 - RNA, 19 nt, Human
uccuggcacccggccccug

SEQ ID NO: 1685599 - RNA, 13 nt, Human
uccugagccagau

SEQ ID NO: 1685600 - RNA, 14 nt, Human
uccugccucagccu

SEQ ID NO: 1685601 - RNA, 14 nt, Human
uccugagccagauu

SEQ ID NO: 1685602 - RNA, 20 nt, Human
uccugccuaagugcagcccc

SEQ ID NO: 1685603 - RNA, 14 nt, Human
ucuaaugugugaau

SEQ ID NO: 1685604 - RNA, 14 nt, Human
ucuaauauguaaca

SEQ ID NO: 1685605 - RNA, 23 nt, Human
ucuaggacugaauuaugaaacuu

SEQ ID NO: 1685606 - RNA, 16 nt, Human
ucuaggacugaauuau

SEQ ID NO: 1685607 - RNA, 22 nt, Human
ucuagugagcagucaggaaaga

SEQ ID NO: 1685608 - RNA, 18 nt, Human
ucuaggaggucucuaaga

SEQ ID NO: 1685609 - RNA, 19 nt, Human
ucuagugagcagucaggaa

SEQ ID NO: 1685610 - RNA, 20 nt, Human
ucuaugcugaguuugugcug

SEQ ID NO: 1685611 - RNA, 16 nt, Human
ucuaugcugaguuugu

SEQ ID NO: 1685612 - RNA, 15 nt, Human
ucucaacuccaaacu

SEQ ID NO: 1685613 - RNA, 17 nt, Human
ucucaaauaacuaaaag

SEQ ID NO: 1685614 - RNA, 15 nt, Human
ucuaucaaguauuau

SEQ ID NO: 1685615 - RNA, 22 nt, Human
ucuaucaaguauuauaccuuuu

SEQ ID NO: 1685616 - RNA, 21 nt, Human
ucuaucaaguauuauaccuuu

SEQ ID NO: 1685617 - RNA, 13 nt, Human
ucuaugaaauauu

SEQ ID NO: 1685618 - RNA, 14 nt, Human
ucuaugaaauauua

SEQ ID NO: 1685619 - RNA, 17 nt, Human
ucuaugaaauauuaugu

SEQ ID NO: 1685620 - RNA, 22 nt, Human
ucuaaaucuccaaaauaaaacu

SEQ ID NO: 1685621 - RNA, 21 nt, Human
ucuaaaucuccaaaauaaaac

SEQ ID NO: 1685622 - RNA, 13 nt, Human
ucguuaauuugua

SEQ ID NO: 1685623 - RNA, 22 nt, Human
ucggccucccaaagugcuggga

SEQ ID NO: 1685624 - RNA, 16 nt, Human
ucgugauugauaagaa

SEQ ID NO: 1685625 - RNA, 18 nt, Human
ucggccuccauccugagg

SEQ ID NO: 1685626 - RNA, 21 nt, Human
ucguggaacaguuaccucugc

SEQ ID NO: 1685627 - RNA, 22 nt, Human
ucgugggacagucaccucaugg

SEQ ID NO: 1685628 - RNA, 15 nt, Human
ucucugcaggucccu

SEQ ID NO: 1685629 - RNA, 16 nt, Human
ucucugcaggucccua

SEQ ID NO: 1685630 - RNA, 18 nt, Human
ucucugcaggucccuaau

SEQ ID NO: 1685631 - RNA, 13 nt, Human
ucucugcaggucc

SEQ ID NO: 1685632 - RNA, 14 nt, Human
ucucugcagguccc

SEQ ID NO: 1685633 - RNA, 15 nt, Human
ucucugauacagaaa

SEQ ID NO: 1685634 - RNA, 17 nt, Human
ucucugaggacacuaac

SEQ ID NO: 1685635 - RNA, 16 nt, Human
ucucugaagugaaacu

SEQ ID NO: 1685636 - RNA, 15 nt, Human
ucucuaguuugauua

SEQ ID NO: 1685637 - RNA, 16 nt, Human
ucucuaguuugauuaa

SEQ ID NO: 1685638 - RNA, 19 nt, Human
ucucaagagggcacuggug

SEQ ID NO: 1685639 - RNA, 17 nt, Human
ucucaagagggcacugg

SEQ ID NO: 1685640 - RNA, 18 nt, Human
ucucaagagggcacuggu

SEQ ID NO: 1685641 - RNA, 12 nt, Human
ucuccugccuca

SEQ ID NO: 1685642 - RNA, 21 nt, Human
ucuccuggaagugcuaauuuu

SEQ ID NO: 1685643 - RNA, 21 nt, Human
ucuccuggaaauauuaagaaa

SEQ ID NO: 1685644 - RNA, 15 nt, Human
ucuccuguaccucuu

SEQ ID NO: 1685645 - RNA, 19 nt, Human
ucuccugccucagccuccc

SEQ ID NO: 1685646 - RNA, 17 nt, Human
ucuccugccucagccuc

SEQ ID NO: 1685647 - RNA, 15 nt, Human
ucuccugccucagcc

SEQ ID NO: 1685648 - RNA, 17 nt, Human
ucuccuguaccucuuga

SEQ ID NO: 1685649 - RNA, 16 nt, Human
ucuccuguaccucuug

SEQ ID NO: 1685650 - RNA, 19 nt, Human
ucuccuguaccucuugagc

SEQ ID NO: 1685651 - RNA, 14 nt, Human
ucucgugauugaua

SEQ ID NO: 1685652 - RNA, 22 nt, Human
ucucgugauugauaagaaccuu

SEQ ID NO: 1685653 - RNA, 12 nt, Human
ucucuaacuuca

SEQ ID NO: 1685654 - RNA, 19 nt, Human
ucucuaacuucaccauauu

SEQ ID NO: 1685655 - RNA, 17 nt, Human
ucugaaauuuccuggga

SEQ ID NO: 1685656 - RNA, 18 nt, Human
ucugaaauuuccugggag

SEQ ID NO: 1685657 - RNA, 20 nt, Human
ucugaaauuuccugggagcu

SEQ ID NO: 1685658 - RNA, 16 nt, Human
ucugacacacagcucu

SEQ ID NO: 1685659 - RNA, 17 nt, Human
ucugacacacagcucug

SEQ ID NO: 1685660 - RNA, 18 nt, Human
ucugacacacagcucugu

SEQ ID NO: 1685661 - RNA, 19 nt, Human
ucugacacacagcucuguc

SEQ ID NO: 1685662 - RNA, 15 nt, Human
ucugacauaaguauu

SEQ ID NO: 1685663 - RNA, 13 nt, Human
ucugacccacugc

SEQ ID NO: 1685664 - RNA, 12 nt, Human
ucugacaucucu

SEQ ID NO: 1685665 - RNA, 14 nt, Human
ucugacaucucugc

SEQ ID NO: 1685666 - RNA, 15 nt, Human
ucugacaucucugca

SEQ ID NO: 1685667 - RNA, 12 nt, Human
ucugacaggcaa

SEQ ID NO: 1685668 - RNA, 21 nt, Human
ucugacaggcaaugcuggcug

SEQ ID NO: 1685669 - RNA, 22 nt, Human
ucugacaggcaaugcuggcugu

SEQ ID NO: 1685670 - RNA, 22 nt, Human
ucugaaaauugaugggauuugg

SEQ ID NO: 1685671 - RNA, 14 nt, Human
ucugaaaauguaug

SEQ ID NO: 1685672 - RNA, 14 nt, Human
ucugaaaauugaug

SEQ ID NO: 1685673 - RNA, 13 nt, Human
ucugaaaauguau

SEQ ID NO: 1685674 - RNA, 11 nt, Human
ucugaggcuga

SEQ ID NO: 1685675 - RNA, 23 nt, Human
ucugaggcugaaauucagaauau

SEQ ID NO: 1685676 - RNA, 14 nt, Human
ucugcaacucugaa

SEQ ID NO: 1685677 - RNA, 15 nt, Human
ucugcaacucugaag

SEQ ID NO: 1685678 - RNA, 14 nt, Human
ucugcacacagcac

SEQ ID NO: 1685679 - RNA, 20 nt, Human
ucugcaagaauugaagcagg

SEQ ID NO: 1685680 - RNA, 21 nt, Human
ucugcaagaauugaagcagga

SEQ ID NO: 1685681 - RNA, 15 nt, Human
ucugaggaauucugu

SEQ ID NO: 1685682 - RNA, 16 nt, Human
ucugaggaauucugua

SEQ ID NO: 1685683 - RNA, 17 nt, Human
ucugaggaauucuguau

SEQ ID NO: 1685684 - RNA, 18 nt, Human
ucugaggaauucuguaua

SEQ ID NO: 1685685 - RNA, 19 nt, Human
ucugaggaauucuguauag

SEQ ID NO: 1685686 - RNA, 14 nt, Human
ucugaggaauucug

SEQ ID NO: 1685687 - RNA, 14 nt, Human
ucugacccacugcu

SEQ ID NO: 1685688 - RNA, 15 nt, Human
ucugacccacugcuu

SEQ ID NO: 1685689 - RNA, 17 nt, Human
ucugcauucaggaucaa

SEQ ID NO: 1685690 - RNA, 14 nt, Human
ucugcaucagcugc

SEQ ID NO: 1685691 - RNA, 19 nt, Human
ucugcaucagcugcugaaa

SEQ ID NO: 1685692 - RNA, 21 nt, Human
ucugcaucagcugcugaaaca

SEQ ID NO: 1685693 - RNA, 18 nt, Human
ucugccauauucuguugg

SEQ ID NO: 1685694 - RNA, 14 nt, Human
ucugccugcccagg

SEQ ID NO: 1685695 - RNA, 15 nt, Human
ucugccugcccaggc

SEQ ID NO: 1685696 - RNA, 16 nt, Human
ucugccugcccaggcc

SEQ ID NO: 1685697 - RNA, 18 nt, Human
ucugcuccucuccccagc

SEQ ID NO: 1685698 - RNA, 21 nt, Human
ucugcuccucuccccagcaag

SEQ ID NO: 1685699 - RNA, 18 nt, Human
ucugcugacagacacagg

SEQ ID NO: 1685700 - RNA, 21 nt, Human
ucuggacaggcauguucucug

SEQ ID NO: 1685701 - RNA, 16 nt, Human
ucuggaaugcaguggu

SEQ ID NO: 1685702 - RNA, 14 nt, Human
ucuggacaggcaug

SEQ ID NO: 1685703 - RNA, 15 nt, Human
ucuggaaugcagugg

SEQ ID NO: 1685704 - RNA, 19 nt, Human
ucuggaauaaggagaauga

SEQ ID NO: 1685705 - RNA, 22 nt, Human
ucugcugauccucccaggcuuc

SEQ ID NO: 1685706 - RNA, 19 nt, Human
ucugcugacagacacaggc

SEQ ID NO: 1685707 - RNA, 20 nt, Human
ucugcugacagacacaggcc

SEQ ID NO: 1685708 - RNA, 21 nt, Human
ucugcugacagacacaggccc

SEQ ID NO: 1685709 - RNA, 22 nt, Human
ucugcugacagacacaggcccg

SEQ ID NO: 1685710 - RNA, 20 nt, Human
ucugguuccuccccuccucc

SEQ ID NO: 1685711 - RNA, 21 nt, Human
ucugguuccuccccuccuccu

SEQ ID NO: 1685712 - RNA, 14 nt, Human
ucuguccuacucug

SEQ ID NO: 1685713 - RNA, 13 nt, Human
ucugguuccuccc

SEQ ID NO: 1685714 - RNA, 22 nt, Human
ucugucucuggauuauauuaug

SEQ ID NO: 1685715 - RNA, 16 nt, Human
ucugucgcccagucug

SEQ ID NO: 1685716 - RNA, 14 nt, Human
ucugucgcccaguc

SEQ ID NO: 1685717 - RNA, 20 nt, Human
ucuguccuacucugugucag

SEQ ID NO: 1685718 - RNA, 15 nt, Human
ucuguccuacucugu

SEQ ID NO: 1685719 - RNA, 19 nt, Human
ucuguccuacucuguguca

SEQ ID NO: 1685720 - RNA, 18 nt, Human
ucuggcucuuccaggcug

SEQ ID NO: 1685721 - RNA, 23 nt, Human
ucuggcucuuccaggcugggaga

SEQ ID NO: 1685722 - RNA, 23 nt, Human
ucuggugacuuuccucuuugguc

SEQ ID NO: 1685723 - RNA, 14 nt, Human
ucugggacacaguu

SEQ ID NO: 1685724 - RNA, 15 nt, Human
ucuggcuccagcugg

SEQ ID NO: 1685725 - RNA, 22 nt, Human
ucuggcuaugcauuugaaaauu

SEQ ID NO: 1685726 - RNA, 19 nt, Human
ucuggcuaugcauuugaaa

SEQ ID NO: 1685727 - RNA, 17 nt, Human
ucuggccuucggccucc

SEQ ID NO: 1685728 - RNA, 18 nt, Human
ucuggccuucggccucca

SEQ ID NO: 1685729 - RNA, 23 nt, Human
ucuggccuucggccuccauccug

SEQ ID NO: 1685730 - RNA, 16 nt, Human
ucuuaaaguugaauuu

SEQ ID NO: 1685731 - RNA, 19 nt, Human
ucuuaaaguugaauuuauu

SEQ ID NO: 1685732 - RNA, 20 nt, Human
ucuuaaaguugaauuuauug

SEQ ID NO: 1685733 - RNA, 21 nt, Human
ucuuaaaguugaauuuauugg

SEQ ID NO: 1685734 - RNA, 22 nt, Human
ucuuaaaguugaauuuauuggc

SEQ ID NO: 1685735 - RNA, 15 nt, Human
ucuuaaauaauaaag

SEQ ID NO: 1685736 - RNA, 16 nt, Human
ucuuaaccagaucauu

SEQ ID NO: 1685737 - RNA, 17 nt, Human
ucuuaaccagaucauug

SEQ ID NO: 1685738 - RNA, 22 nt, Human
ucuuaaauauguggaguucauc

SEQ ID NO: 1685739 - RNA, 19 nt, Human
ucuuaaauaauaaagauca

SEQ ID NO: 1685740 - RNA, 22 nt, Human
ucuuaaccagaucauugugaaa

SEQ ID NO: 1685741 - RNA, 12 nt, Human
ucuuaagaagac

SEQ ID NO: 1685742 - RNA, 18 nt, Human
ucuuaagaagacugcauu

SEQ ID NO: 1685743 - RNA, 13 nt, Human
ucuuaaaguugaa

SEQ ID NO: 1685744 - RNA, 14 nt, Human
ucuuaaaguugaau

SEQ ID NO: 1685745 - RNA, 12 nt, Human
ucuuaaaguuga

SEQ ID NO: 1685746 - RNA, 13 nt, Human
ucuuaaaaagugg

SEQ ID NO: 1685747 - RNA, 20 nt, Human
ucuuaaaauguuucaaaugg

SEQ ID NO: 1685748 - RNA, 15 nt, Human
ucugucuucacaaca

SEQ ID NO: 1685749 - RNA, 12 nt, Human
ucuucuccacug

SEQ ID NO: 1685750 - RNA, 16 nt, Human
ucuucuuuuuuuguga

SEQ ID NO: 1685751 - RNA, 17 nt, Human
ucuucuuuuuuugugau

SEQ ID NO: 1685752 - RNA, 18 nt, Human
ucuucuuuuuuugugaug

SEQ ID NO: 1685753 - RNA, 14 nt, Human
ucuucuccuuucac

SEQ ID NO: 1685754 - RNA, 13 nt, Human
ucuucuccuuuca

SEQ ID NO: 1685755 - RNA, 13 nt, Human
ucuugaaaaaugc

SEQ ID NO: 1685756 - RNA, 17 nt, Human
ucuugaacuccugaccu

SEQ ID NO: 1685757 - RNA, 19 nt, Human
ucuugaacuccugaccuca

SEQ ID NO: 1685758 - RNA, 12 nt, Human
ucuugaacuccu

SEQ ID NO: 1685759 - RNA, 21 nt, Human
ucuucagcaaaaauauuuuau

SEQ ID NO: 1685760 - RNA, 22 nt, Human
ucuucagcaaaaauauuuuaug

SEQ ID NO: 1685761 - RNA, 23 nt, Human
ucuucagcaaaaauauuuuauga

SEQ ID NO: 1685762 - RNA, 23 nt, Human
ucuucagaucucuaacuucacca

SEQ ID NO: 1685763 - RNA, 18 nt, Human
ucuucagaucucuaacuu

SEQ ID NO: 1685764 - RNA, 17 nt, Human
ucuuccuggauuauuca

SEQ ID NO: 1685765 - RNA, 18 nt, Human
ucuucauaccuacaugua

SEQ ID NO: 1685766 - RNA, 21 nt, Human
ucuucauaccuacauguauuu

SEQ ID NO: 1685767 - RNA, 22 nt, Human
uauuuucccuauuagagaagag

SEQ ID NO: 1685768 - RNA, 17 nt, Human
uauuuuuuucuuuucuu

SEQ ID NO: 1685769 - RNA, 14 nt, Human
uauuuuuuuacuaa

SEQ ID NO: 1685770 - RNA, 14 nt, Human
ucaaaaaaagaaaa

SEQ ID NO: 1685771 - RNA, 15 nt, Human
ucaaaaaaagaaaaa

SEQ ID NO: 1685772 - RNA, 14 nt, Human
uauuuuuuuucugu

SEQ ID NO: 1685773 - RNA, 18 nt, Human
uauuuuauuaugaaacuu

SEQ ID NO: 1685774 - RNA, 23 nt, Human
uauuuuauuaugaaacuugugua

SEQ ID NO: 1685775 - RNA, 13 nt, Human
uauuuuauuauga

SEQ ID NO: 1685776 - RNA, 17 nt, Human
uauuuuauguugcauag

SEQ ID NO: 1685777 - RNA, 17 nt, Human
uauuuauaaucacuuuu

SEQ ID NO: 1685778 - RNA, 19 nt, Human
uauuuucaacgcagcccug

SEQ ID NO: 1685779 - RNA, 15 nt, Human
uauuuucauucuccu

SEQ ID NO: 1685780 - RNA, 17 nt, Human
uauuuuauuaugcauga

SEQ ID NO: 1685781 - RNA, 14 nt, Human
uauuuuauuaugca

SEQ ID NO: 1685782 - RNA, 21 nt, Human
ucaaauauauucagccuggcu

SEQ ID NO: 1685783 - RNA, 22 nt, Human
ucaaauauauucagccuggcuu

SEQ ID NO: 1685784 - RNA, 23 nt, Human
ucaaauauauucagccuggcuuc

SEQ ID NO: 1685785 - RNA, 16 nt, Human
ucaaauaugcaaagca

SEQ ID NO: 1685786 - RNA, 14 nt, Human
ucaaauaugcaaag

SEQ ID NO: 1685787 - RNA, 20 nt, Human
ucaaaucaagaaacuuaagg

SEQ ID NO: 1685788 - RNA, 15 nt, Human
ucaaauccuugaaga

SEQ ID NO: 1685789 - RNA, 17 nt, Human
ucaaauuguaagcaugc

SEQ ID NO: 1685790 - RNA, 20 nt, Human
ucaaauuguaagcaugcaca

SEQ ID NO: 1685791 - RNA, 14 nt, Human
ucaaauugugugaa

SEQ ID NO: 1685792 - RNA, 23 nt, Human
ucaaccccuucgcuccugugucu

SEQ ID NO: 1685793 - RNA, 15 nt, Human
ucaaauugugugaaa

SEQ ID NO: 1685794 - RNA, 17 nt, Human
ucaaugccccugaauuu

SEQ ID NO: 1685795 - RNA, 18 nt, Human
ucaaugccccugaauuua

SEQ ID NO: 1685796 - RNA, 20 nt, Human
ucaaugccccugaauuuaaa

SEQ ID NO: 1685797 - RNA, 22 nt, Human
ucaaugccccugaauuuaaaua

SEQ ID NO: 1685798 - RNA, 21 nt, Human
ucaauuacaggaaguacugga

SEQ ID NO: 1685799 - RNA, 23 nt, Human
ucaauuacaggaaguacuggaga

SEQ ID NO: 1685800 - RNA, 14 nt, Human
ucaacgcagcccug

SEQ ID NO: 1685801 - RNA, 15 nt, Human
ucaacgcagcccugc

SEQ ID NO: 1685802 - RNA, 18 nt, Human
ucaacgcagcccugcuuu

SEQ ID NO: 1685803 - RNA, 20 nt, Human
ucaagugauucuccugccuc

SEQ ID NO: 1685804 - RNA, 18 nt, Human
ucaagugauucuccugcc

SEQ ID NO: 1685805 - RNA, 21 nt, Human
ucaagugauucuccugccuca

SEQ ID NO: 1685806 - RNA, 21 nt, Human
ucaauaaaauccauacauuug

SEQ ID NO: 1685807 - RNA, 18 nt, Human
ucacauuuauucugcuca

SEQ ID NO: 1685808 - RNA, 19 nt, Human
ucacauuuauucugcucac

SEQ ID NO: 1685809 - RNA, 17 nt, Human
ucacauuuauucugcuc

SEQ ID NO: 1685810 - RNA, 16 nt, Human
ucaccacaugugcaca

SEQ ID NO: 1685811 - RNA, 19 nt, Human
ucaccaaaucagcugcuac

SEQ ID NO: 1685812 - RNA, 20 nt, Human
ucaccaaaucagcugcuacu

SEQ ID NO: 1685813 - RNA, 21 nt, Human
ucaccaaaucagcugcuacua

SEQ ID NO: 1685814 - RNA, 14 nt, Human
ucaccaaggcugau

SEQ ID NO: 1685815 - RNA, 13 nt, Human
ucacaagacccaa

SEQ ID NO: 1685816 - RNA, 17 nt, Human
ucacaagacccaaaagg

SEQ ID NO: 1685817 - RNA, 18 nt, Human
ucacaagacccaaaaggc

SEQ ID NO: 1685818 - RNA, 23 nt, Human
ucacaccccagacgaugucuuca

SEQ ID NO: 1685819 - RNA, 16 nt, Human
ucacaggcagguccag

SEQ ID NO: 1685820 - RNA, 17 nt, Human
ucacaggcagguccagg

SEQ ID NO: 1685821 - RNA, 18 nt, Human
ucacaggcagguccaggg

SEQ ID NO: 1685822 - RNA, 19 nt, Human
ucacaggcagguccagggu

SEQ ID NO: 1685823 - RNA, 22 nt, Human
ucacaguccuuaccagcagagc

SEQ ID NO: 1685824 - RNA, 23 nt, Human
ucacaguccuuaccagcagagca

SEQ ID NO: 1685825 - RNA, 19 nt, Human
ucacaguccuuaccagcag

SEQ ID NO: 1685826 - RNA, 16 nt, Human
ucacagucacauucca

SEQ ID NO: 1685827 - RNA, 24 nt, Human
uauuuauaaaaauaaaaaacacug

SEQ ID NO: 1685828 - RNA, 22 nt, Human
uauuguuuucaguguacaugga

SEQ ID NO: 1685829 - RNA, 18 nt, Human
uauuguuuucaguguaca

SEQ ID NO: 1685830 - RNA, 20 nt, Human
uauuguuuucaguguacaug

SEQ ID NO: 1685831 - RNA, 12 nt, Human
uauuguuuucag

SEQ ID NO: 1685832 - RNA, 17 nt, Human
uauucucuccuguaccu

SEQ ID NO: 1685833 - RNA, 18 nt, Human
uauucucuccuguaccuc

SEQ ID NO: 1685834 - RNA, 21 nt, Human
uauugauaugcuuauacacuu

SEQ ID NO: 1685835 - RNA, 17 nt, Human
uauugcugauggugcaa

SEQ ID NO: 1685836 - RNA, 22 nt, Human
uauugcugauggugcaaugacc

SEQ ID NO: 1685837 - RNA, 22 nt, Human
uauuggaaauuuguuauaauga

SEQ ID NO: 1685838 - RNA, 12 nt, Human
uauuacaguaua

SEQ ID NO: 1685839 - RNA, 13 nt, Human
uauuacaguauaa

SEQ ID NO: 1685840 - RNA, 14 nt, Human
uauuacaguauaau

SEQ ID NO: 1685841 - RNA, 16 nt, Human
uauuauucccauucua

SEQ ID NO: 1685842 - RNA, 17 nt, Human
uauuccugcauuuguga

SEQ ID NO: 1685843 - RNA, 19 nt, Human
uauuccugcauuugugaaa

SEQ ID NO: 1685844 - RNA, 20 nt, Human
uauuccugcauuugugaaau

SEQ ID NO: 1685845 - RNA, 21 nt, Human
uauuccugcauuugugaaaug

SEQ ID NO: 1685846 - RNA, 15 nt, Human
uauguaaaucccauu

SEQ ID NO: 1685847 - RNA, 19 nt, Human
uauguaaaucccauuauuc

SEQ ID NO: 1685848 - RNA, 20 nt, Human
uauguaaaucccauuauuca

SEQ ID NO: 1685849 - RNA, 21 nt, Human
uauguaaaucccauuauucaa

SEQ ID NO: 1685850 - RNA, 23 nt, Human
uauguaaaucccauuauucaaag

SEQ ID NO: 1685851 - RNA, 12 nt, Human
uauguaaauccc

SEQ ID NO: 1685852 - RNA, 13 nt, Human
gggaguggccaca

SEQ ID NO: 1685853 - RNA, 15 nt, Human
gggaguggccacaga

SEQ ID NO: 1685854 - RNA, 13 nt, Human
uauguacuucaug

SEQ ID NO: 1685855 - RNA, 17 nt, Human
uauguacuucaugcugu

SEQ ID NO: 1685856 - RNA, 12 nt, Human
uauuaaauuaug

SEQ ID NO: 1685857 - RNA, 16 nt, Human
uauuaagaaugaaaua

SEQ ID NO: 1685858 - RNA, 13 nt, Human
uauuaagaaugaa

SEQ ID NO: 1685859 - RNA, 14 nt, Human
uauguugauaaaag

SEQ ID NO: 1685860 - RNA, 12 nt, Human
uauguugcauag

SEQ ID NO: 1685861 - RNA, 16 nt, Human
uauguugcauagaaua

SEQ ID NO: 1685862 - RNA, 13 nt, Human
uauguugcccagg

SEQ ID NO: 1685863 - RNA, 16 nt, Human
uauguugcccaggcag

SEQ ID NO: 1685864 - RNA, 19 nt, Human
uauguugcccaggcagguc

SEQ ID NO: 1685865 - RNA, 20 nt, Human
uauguugcccaggcaggucu

SEQ ID NO: 1685866 - RNA, 19 nt, Human
ucacugcauccuccgccuc

SEQ ID NO: 1685867 - RNA, 18 nt, Human
ucacugcauccuccgccu

SEQ ID NO: 1685868 - RNA, 20 nt, Human
ucacucuuauugcccacgcu

SEQ ID NO: 1685869 - RNA, 18 nt, Human
ucacugccaugccagcuu

SEQ ID NO: 1685870 - RNA, 17 nt, Human
ucacucuuauugcccac

SEQ ID NO: 1685871 - RNA, 13 nt, Human
ucaccagccccag

SEQ ID NO: 1685872 - RNA, 16 nt, Human
ucaccagccccagugc

SEQ ID NO: 1685873 - RNA, 13 nt, Human
ucacugcuggcug

SEQ ID NO: 1685874 - RNA, 14 nt, Human
ucacugcuggcugc

SEQ ID NO: 1685875 - RNA, 15 nt, Human
ucacugcuggcugcc

SEQ ID NO: 1685876 - RNA, 16 nt, Human
ucacugcuggcugccu

SEQ ID NO: 1685877 - RNA, 12 nt, Human
ucacugcuggcu

SEQ ID NO: 1685878 - RNA, 17 nt, Human
ucacugcuggcugccuu

SEQ ID NO: 1685879 - RNA, 18 nt, Human
ucacugcuggcugccuua

SEQ ID NO: 1685880 - RNA, 22 nt, Human
ucacugcuggcugccuuagaac

SEQ ID NO: 1685881 - RNA, 14 nt, Human
ucacugcuuaacuu

SEQ ID NO: 1685882 - RNA, 20 nt, Human
ucacuuguuuuauuuaaccu

SEQ ID NO: 1685883 - RNA, 10 nt, Human
ucagaaaugu

SEQ ID NO: 1685884 - RNA, 23 nt, Human
ucagaauucucuaguuugauuaa

SEQ ID NO: 1685885 - RNA, 15 nt, Human
ucagaaauguguuau

SEQ ID NO: 1685886 - RNA, 13 nt, Human
ucagacagcugcc

SEQ ID NO: 1685887 - RNA, 14 nt, Human
ucagacagcugccu

SEQ ID NO: 1685888 - RNA, 22 nt, Human
ucagacagaucuggaaugugaa

SEQ ID NO: 1685889 - RNA, 21 nt, Human
ucagagcugcccucuccuggg

SEQ ID NO: 1685890 - RNA, 20 nt, Human
ucagagcugcccucuccugg

SEQ ID NO: 1685891 - RNA, 19 nt, Human
ucagagcugcccucuccug

SEQ ID NO: 1685892 - RNA, 21 nt, Human
ucagaguaauccaagcaaaug

SEQ ID NO: 1685893 - RNA, 22 nt, Human
ucagaguaauccaagcaaaugu

SEQ ID NO: 1685894 - RNA, 23 nt, Human
ucagagcugcccucuccugggca

SEQ ID NO: 1685895 - RNA, 22 nt, Human
ucagagcugcccucuccugggc

SEQ ID NO: 1685896 - RNA, 17 nt, Human
ucagcauucucacuccu

SEQ ID NO: 1685897 - RNA, 20 nt, Human
ucagcauucucacuccuacc

SEQ ID NO: 1685898 - RNA, 15 nt, Human
ucagauaugauucaa

SEQ ID NO: 1685899 - RNA, 20 nt, Human
ucagccucccgaguagcugg

SEQ ID NO: 1685900 - RNA, 18 nt, Human
ucagccucccgaguagcu

SEQ ID NO: 1685901 - RNA, 21 nt, Human
ucagccucccgaauagcuggg

SEQ ID NO: 1685902 - RNA, 22 nt, Human
ucagccucccgaauagcuggga

SEQ ID NO: 1685903 - RNA, 23 nt, Human
ucagcauucucacuccuaccugg

SEQ ID NO: 1685904 - RNA, 14 nt, Human
ucagccucccaaag

SEQ ID NO: 1685905 - RNA, 19 nt, Human
ucagccucccaaagugcug

SEQ ID NO: 1685906 - RNA, 21 nt, Human
ucagccucccaaagugcuggg

SEQ ID NO: 1685907 - RNA, 20 nt, Human
ucagccuccugaguagcugg

SEQ ID NO: 1685908 - RNA, 21 nt, Human
ucagccucccgaguagcuggg

SEQ ID NO: 1685909 - RNA, 22 nt, Human
ucagccucccgaguagcuggga

SEQ ID NO: 1685910 - RNA, 22 nt, Human
ucagccuccugaguagcuggga

SEQ ID NO: 1685911 - RNA, 18 nt, Human
ucagccugcuccagcugu

SEQ ID NO: 1685912 - RNA, 19 nt, Human
ucagccugcuccagcuguu

SEQ ID NO: 1685913 - RNA, 17 nt, Human
ucagcuccccucggaga

SEQ ID NO: 1685914 - RNA, 15 nt, Human
ucagcugaaccuggg

SEQ ID NO: 1685915 - RNA, 16 nt, Human
ucagcugaaccugggu

SEQ ID NO: 1685916 - RNA, 18 nt, Human
ucagcuccccucggagaa

SEQ ID NO: 1685917 - RNA, 14 nt, Human
ucagggccuggcuc

SEQ ID NO: 1685918 - RNA, 16 nt, Human
ucagggccuggcucag

SEQ ID NO: 1685919 - RNA, 15 nt, Human
ucaggugagaagcag

SEQ ID NO: 1685920 - RNA, 16 nt, Human
ucaggugagaagcaga

SEQ ID NO: 1685921 - RNA, 19 nt, Human
ucaggagcccugggaggcu

SEQ ID NO: 1685922 - RNA, 18 nt, Human
ucaggagcccugggaggc

SEQ ID NO: 1685923 - RNA, 20 nt, Human
ucaggagcccugggaggcuc

SEQ ID NO: 1685924 - RNA, 23 nt, Human
ucaggagcccugggaggcucugg

SEQ ID NO: 1685925 - RNA, 13 nt, Human
ucaggcuagaugu

SEQ ID NO: 1685926 - RNA, 17 nt, Human
ucaggcuagauguaugu

SEQ ID NO: 1685927 - RNA, 15 nt, Human
uccaggugcacaagc

SEQ ID NO: 1685928 - RNA, 23 nt, Human
uccaggggugggacacccuguga

SEQ ID NO: 1685929 - RNA, 22 nt, Human
uccaggagcagccacauuccug

SEQ ID NO: 1685930 - RNA, 17 nt, Human
uccaggagcagccacau

SEQ ID NO: 1685931 - RNA, 18 nt, Human
uccaggagcagccacauu

SEQ ID NO: 1685932 - RNA, 11 nt, Human
uccaggguggu

SEQ ID NO: 1685933 - RNA, 15 nt, Human
uccagguucagcuug

SEQ ID NO: 1685934 - RNA, 16 nt, Human
uccagguucagcuugu

SEQ ID NO: 1685935 - RNA, 18 nt, Human
uccaggugcacaagcucc

SEQ ID NO: 1685936 - RNA, 20 nt, Human
uccaggugcacaagcuccaa

SEQ ID NO: 1685937 - RNA, 21 nt, Human
uccaggugcacaagcuccaag

SEQ ID NO: 1685938 - RNA, 22 nt, Human
uccaggugcacaagcuccaagc

SEQ ID NO: 1685939 - RNA, 18 nt, Human
uccagcucaccagcccca

SEQ ID NO: 1685940 - RNA, 16 nt, Human
uccagcucaccagccc

SEQ ID NO: 1685941 - RNA, 17 nt, Human
uccagcucaccagcccc

SEQ ID NO: 1685942 - RNA, 17 nt, Human
uccagcuguucagcugg

SEQ ID NO: 1685943 - RNA, 16 nt, Human
uccaggagcagccaca

SEQ ID NO: 1685944 - RNA, 17 nt, Human
uccagccacagaaaaga

SEQ ID NO: 1685945 - RNA, 17 nt, Human
uccacuuggucugugag

SEQ ID NO: 1685946 - RNA, 15 nt, Human
uccaccuucccaugc

SEQ ID NO: 1685947 - RNA, 15 nt, Human
uccacuuggucugug

SEQ ID NO: 1685948 - RNA, 16 nt, Human
uccacuuggucuguga

SEQ ID NO: 1685949 - RNA, 19 nt, Human
uccacagaagcuccaggua

SEQ ID NO: 1685950 - RNA, 12 nt, Human
uccacccugcuc

SEQ ID NO: 1685951 - RNA, 13 nt, Human
uccacccugcucu

SEQ ID NO: 1685952 - RNA, 14 nt, Human
uccaccucccugca

SEQ ID NO: 1685953 - RNA, 13 nt, Human
uccaccucccugc

SEQ ID NO: 1685954 - RNA, 18 nt, Human
uccaccugccagggacag

SEQ ID NO: 1685955 - RNA, 21 nt, Human
uccaccugccagggacagagg

SEQ ID NO: 1685956 - RNA, 17 nt, Human
uccaccugccagggaca

SEQ ID NO: 1685957 - RNA, 15 nt, Human
uccaccugccaggga

SEQ ID NO: 1685958 - RNA, 17 nt, Human
uccaccucccugcaaua

SEQ ID NO: 1685959 - RNA, 16 nt, Human
uccaccucccugcaau

SEQ ID NO: 1685960 - RNA, 15 nt, Human
uccaccucccugcaa

SEQ ID NO: 1685961 - RNA, 17 nt, Human
uccacaaguuaaauaaa

SEQ ID NO: 1685962 - RNA, 18 nt, Human
uccacaaguuaaauaaau

SEQ ID NO: 1685963 - RNA, 16 nt, Human
uccacaagagcccagg

SEQ ID NO: 1685964 - RNA, 17 nt, Human
uccacaagagcccaggc

SEQ ID NO: 1685965 - RNA, 18 nt, Human
uccacaagagcccaggcc

SEQ ID NO: 1685966 - RNA, 19 nt, Human
uccacaagagcccaggccu

SEQ ID NO: 1685967 - RNA, 17 nt, Human
uccaauuuacauacucu

SEQ ID NO: 1685968 - RNA, 18 nt, Human
uccaauuuacauacucug

SEQ ID NO: 1685969 - RNA, 18 nt, Human
uccaaaauaaaacuuuuu

SEQ ID NO: 1685970 - RNA, 20 nt, Human
uccaaaauaaaacuuuuuaa

SEQ ID NO: 1685971 - RNA, 23 nt, Human
ucauuccaccuucccaugcccug

SEQ ID NO: 1685972 - RNA, 23 nt, Human
ucauuauuuuauuaugaaacuug

SEQ ID NO: 1685973 - RNA, 21 nt, Human
ucauucaacccaccugcgucu

SEQ ID NO: 1685974 - RNA, 19 nt, Human
ucauuaucucaaaacugca

SEQ ID NO: 1685975 - RNA, 20 nt, Human
ucauuaucucaaaacugcac

SEQ ID NO: 1685976 - RNA, 13 nt, Human
ucauuaucucaaa

SEQ ID NO: 1685977 - RNA, 12 nt, Human
ucauugugaaau

SEQ ID NO: 1685978 - RNA, 15 nt, Human
ucauugugaaauuau

SEQ ID NO: 1685979 - RNA, 17 nt, Human
ucauugugaaauuauuc

SEQ ID NO: 1685980 - RNA, 18 nt, Human
ucauugugaaauuauuca

SEQ ID NO: 1685981 - RNA, 13 nt, Human
ucauuuccugugu

SEQ ID NO: 1685982 - RNA, 16 nt, Human
ucauuuccugugucuu

SEQ ID NO: 1685983 - RNA, 13 nt, Human
ucauuuccaagca

SEQ ID NO: 1685984 - RNA, 16 nt, Human
ucauuuccaagcaagu

SEQ ID NO: 1685985 - RNA, 21 nt, Human
ucauagcccucacccuggggc

SEQ ID NO: 1685986 - RNA, 15 nt, Human
ucauacucaccucac

SEQ ID NO: 1685987 - RNA, 19 nt, Human
ucaucaccaacgucugugc

SEQ ID NO: 1685988 - RNA, 20 nt, Human
ucaucaccaacgucugugcc

SEQ ID NO: 1685989 - RNA, 21 nt, Human
ucaucaccaacgucugugcca

SEQ ID NO: 1685990 - RNA, 21 nt, Human
ucaggugagaagcagaggaag

SEQ ID NO: 1685991 - RNA, 13 nt, Human
ucaggugcugcca

SEQ ID NO: 1685992 - RNA, 14 nt, Human
ucaggugcugccau

SEQ ID NO: 1685993 - RNA, 15 nt, Human
ucaggugcugccauc

SEQ ID NO: 1685994 - RNA, 18 nt, Human
ucauaccuaucaucuuaa

SEQ ID NO: 1685995 - RNA, 15 nt, Human
ucauaccuacaugua

SEQ ID NO: 1685996 - RNA, 16 nt, Human
ucauaccuacauguau

SEQ ID NO: 1685997 - RNA, 23 nt, Human
ucaucuuagguuggcaaaaaggc

SEQ ID NO: 1685998 - RNA, 19 nt, Human
ucaucuugaauuguaagga

SEQ ID NO: 1685999 - RNA, 14 nt, Human
ucaucaguauugaa

SEQ ID NO: 1686000 - RNA, 16 nt, Human
ucaucaguauugaagc

SEQ ID NO: 1686001 - RNA, 14 nt, Human
ggagcuagaauuug

SEQ ID NO: 1686002 - RNA, 15 nt, Human
ggagccuccugcccu

SEQ ID NO: 1686003 - RNA, 20 nt, Human
ggagcccugggaggcucugg

SEQ ID NO: 1686004 - RNA, 14 nt, Human
ggagccuccugccc

SEQ ID NO: 1686005 - RNA, 16 nt, Human
ggagcccugggaggcu

SEQ ID NO: 1686006 - RNA, 19 nt, Human
ggagcccugggaggcucug

SEQ ID NO: 1686007 - RNA, 17 nt, Human
ggaggcaggaguuucgu

SEQ ID NO: 1686008 - RNA, 17 nt, Human
ggagggagggcuccaga

SEQ ID NO: 1686009 - RNA, 13 nt, Human
ggagggagggcuc

SEQ ID NO: 1686010 - RNA, 16 nt, Human
ggagggagggcuccag

SEQ ID NO: 1686011 - RNA, 18 nt, Human
ggaggauguucugggaca

SEQ ID NO: 1686012 - RNA, 21 nt, Human
ggaggauguucugggacacag

SEQ ID NO: 1686013 - RNA, 16 nt, Human
ggaggacgcucucugg

SEQ ID NO: 1686014 - RNA, 14 nt, Human
ggaggggccuggca

SEQ ID NO: 1686015 - RNA, 18 nt, Human
ggaggggccuggcagccg

SEQ ID NO: 1686016 - RNA, 21 nt, Human
ggaggggccuggcagccgugc

SEQ ID NO: 1686017 - RNA, 22 nt, Human
ggagucccaccuuggcugcagg

SEQ ID NO: 1686018 - RNA, 13 nt, Human
ggaggggccuggc

SEQ ID NO: 1686019 - RNA, 13 nt, Human
ggagggccugggc

SEQ ID NO: 1686020 - RNA, 19 nt, Human
ggaggggagcaugggaagu

SEQ ID NO: 1686021 - RNA, 18 nt, Human
ggacugagaaauuuauaa

SEQ ID NO: 1686022 - RNA, 11 nt, Human
ggagaagaacu

SEQ ID NO: 1686023 - RNA, 14 nt, Human
ggagaagaacugaa

SEQ ID NO: 1686024 - RNA, 15 nt, Human
ggagaagagcuguuc

SEQ ID NO: 1686025 - RNA, 23 nt, Human
ggagaagagcuguucacagccag

SEQ ID NO: 1686026 - RNA, 18 nt, Human
ggaccuugaacuggguac

SEQ ID NO: 1686027 - RNA, 14 nt, Human
ggacugagaaauuu

SEQ ID NO: 1686028 - RNA, 17 nt, Human
ggacugaauuaugaaac

SEQ ID NO: 1686029 - RNA, 19 nt, Human
ggacugaauuaugaaacuu

SEQ ID NO: 1686030 - RNA, 16 nt, Human
ggacgcucucuggccu

SEQ ID NO: 1686031 - RNA, 19 nt, Human
ggacgcucucuggccuucg

SEQ ID NO: 1686032 - RNA, 12 nt, Human
gcuuuucacugc

SEQ ID NO: 1686033 - RNA, 19 nt, Human
gcuuuuaugugaaacaugu

SEQ ID NO: 1686034 - RNA, 20 nt, Human
gcuuuuaugugaaacauguu

SEQ ID NO: 1686035 - RNA, 21 nt, Human
gcuuuuaugugaaacauguuu

SEQ ID NO: 1686036 - RNA, 16 nt, Human
ggacagaggggguggc

SEQ ID NO: 1686037 - RNA, 15 nt, Human
ggacagccccuccuc

SEQ ID NO: 1686038 - RNA, 16 nt, Human
ggacagccccuccucc

SEQ ID NO: 1686039 - RNA, 20 nt, Human
ggacagaggggguggccucc

SEQ ID NO: 1686040 - RNA, 11 nt, Human
ggacagcuccu

SEQ ID NO: 1686041 - RNA, 15 nt, Human
ggacagcuccuucug

SEQ ID NO: 1686042 - RNA, 16 nt, Human
ggacagcuccuucugu

SEQ ID NO: 1686043 - RNA, 17 nt, Human
ggacagcuccuucuguc

SEQ ID NO: 1686044 - RNA, 19 nt, Human
ggaccagagcugccaccug

SEQ ID NO: 1686045 - RNA, 17 nt, Human
ggacauuugcucaugga

SEQ ID NO: 1686046 - RNA, 14 nt, Human
ggaccaaaaaccag

SEQ ID NO: 1686047 - RNA, 20 nt, Human
ggacauuugcucauggaauu

SEQ ID NO: 1686048 - RNA, 12 nt, Human
ggauuauauuau

SEQ ID NO: 1686049 - RNA, 18 nt, Human
ggaugccugguggcagcu

SEQ ID NO: 1686050 - RNA, 19 nt, Human
ggaugccugguggcagcug

SEQ ID NO: 1686051 - RNA, 20 nt, Human
ggaugccugguggcagcugc

SEQ ID NO: 1686052 - RNA, 21 nt, Human
ggaugccugguggcagcugcg

SEQ ID NO: 1686053 - RNA, 18 nt, Human
ggaugaugacuauggaaa

SEQ ID NO: 1686054 - RNA, 18 nt, Human
ggaugcccaaagaugcag

SEQ ID NO: 1686055 - RNA, 17 nt, Human
ggaugccccgucccccu

SEQ ID NO: 1686056 - RNA, 19 nt, Human
ggaugcccaaagaugcagc

SEQ ID NO: 1686057 - RNA, 13 nt, Human
ggaugccuggugg

SEQ ID NO: 1686058 - RNA, 17 nt, Human
ggaugccugguggcagc

SEQ ID NO: 1686059 - RNA, 16 nt, Human
ggaugaucuaggaaga

SEQ ID NO: 1686060 - RNA, 18 nt, Human
ggaugaucuaggaagacu

SEQ ID NO: 1686061 - RNA, 22 nt, Human
ggaugaucuaggaagacuuugg

SEQ ID NO: 1686062 - RNA, 23 nt, Human
ggagucccaccuuggcugcaggg

SEQ ID NO: 1686063 - RNA, 17 nt, Human
ggcaagcaccuccugcc

SEQ ID NO: 1686064 - RNA, 13 nt, Human
ggauucuuaaagu

SEQ ID NO: 1686065 - RNA, 21 nt, Human
ggauucuuccucccucccucu

SEQ ID NO: 1686066 - RNA, 17 nt, Human
ggcaccagcagccugga

SEQ ID NO: 1686067 - RNA, 18 nt, Human
ggcaagcaccuccugccu

SEQ ID NO: 1686068 - RNA, 19 nt, Human
ggcaagcaccuccugccuc

SEQ ID NO: 1686069 - RNA, 20 nt, Human
ggcacccaccaucaugucug

SEQ ID NO: 1686070 - RNA, 18 nt, Human
ggcacccggccccugcug

SEQ ID NO: 1686071 - RNA, 19 nt, Human
ggcacccggccccugcugg

SEQ ID NO: 1686072 - RNA, 20 nt, Human
ggcacccggccccugcuggu

SEQ ID NO: 1686073 - RNA, 18 nt, Human
ggcacucagaagacacug

SEQ ID NO: 1686074 - RNA, 19 nt, Human
ggcacucagaagacacuga

SEQ ID NO: 1686075 - RNA, 20 nt, Human
ggcacucagaagacacugau

SEQ ID NO: 1686076 - RNA, 21 nt, Human
ggcagagguugcagugagccg

SEQ ID NO: 1686077 - RNA, 22 nt, Human
ggccacagaaaauucuucucca

SEQ ID NO: 1686078 - RNA, 20 nt, Human
ggcauguucucugaggacac

SEQ ID NO: 1686079 - RNA, 20 nt, Human
ggccacugugaagagaacca

SEQ ID NO: 1686080 - RNA, 11 nt, Human
ggccaggagcc

SEQ ID NO: 1686081 - RNA, 13 nt, Human
ggccaggagccuc

SEQ ID NO: 1686082 - RNA, 14 nt, Human
ggccaggcccucug

SEQ ID NO: 1686083 - RNA, 17 nt, Human
ggccaggcccucugccc

SEQ ID NO: 1686084 - RNA, 15 nt, Human
ggccaggcccucugc

SEQ ID NO: 1686085 - RNA, 16 nt, Human
ggccaggcccucugcc

SEQ ID NO: 1686086 - RNA, 22 nt, Human
ggcaugacacgaauauugcuga

SEQ ID NO: 1686087 - RNA, 15 nt, Human
ggcaugaugcgggcc

SEQ ID NO: 1686088 - RNA, 18 nt, Human
ggcaugugaugagaggaa

SEQ ID NO: 1686089 - RNA, 23 nt, Human
ggcaugugaugagaggaaaucac

SEQ ID NO: 1686090 - RNA, 17 nt, Human
ggcagggucucacucug

SEQ ID NO: 1686091 - RNA, 18 nt, Human
ggcagggucucacucugu

SEQ ID NO: 1686092 - RNA, 23 nt, Human
ggcagcugcgguccacccaggag

SEQ ID NO: 1686093 - RNA, 24 nt, Human
ggcagcugcgguccacccaggagc

SEQ ID NO: 1686094 - RNA, 12 nt, Human
ggcaggguccua

SEQ ID NO: 1686095 - RNA, 22 nt, Human
ggcagcugcuuuugucuauggg

SEQ ID NO: 1686096 - RNA, 16 nt, Human
ggcagcugccuccccu

SEQ ID NO: 1686097 - RNA, 17 nt, Human
ggcagaguugaagacag

SEQ ID NO: 1686098 - RNA, 19 nt, Human
ggcagaguugaagacagag

SEQ ID NO: 1686099 - RNA, 21 nt, Human
ggcagaguugaagacagagcu

SEQ ID NO: 1686100 - RNA, 13 nt, Human
ggcagcugccucc

SEQ ID NO: 1686101 - RNA, 12 nt, Human
ggcagcugccuc

SEQ ID NO: 1686102 - RNA, 11 nt, Human
ggcagcugccu

SEQ ID NO: 1686103 - RNA, 15 nt, Human
ggccgggagccugau

SEQ ID NO: 1686104 - RNA, 14 nt, Human
ggcccagagggccu

SEQ ID NO: 1686105 - RNA, 17 nt, Human
ggcccagagggccugca

SEQ ID NO: 1686106 - RNA, 19 nt, Human
ggcccagagggccugcaag

SEQ ID NO: 1686107 - RNA, 20 nt, Human
ggcccagagggccugcaagg

SEQ ID NO: 1686108 - RNA, 23 nt, Human
ggccuagcauacguacacauuuu

SEQ ID NO: 1686109 - RNA, 22 nt, Human
ggccuagcauacguacacauuu

SEQ ID NO: 1686110 - RNA, 20 nt, Human
ggccuagcauacguacacau

SEQ ID NO: 1686111 - RNA, 14 nt, Human
ggccucaagugauu

SEQ ID NO: 1686112 - RNA, 22 nt, Human
ggccucaagugauucuccugcc

SEQ ID NO: 1686113 - RNA, 23 nt, Human
ggccucaagugauucuccugccu

SEQ ID NO: 1686114 - RNA, 17 nt, Human
ggccucggacuuagcug

SEQ ID NO: 1686115 - RNA, 14 nt, Human
ggccuccugugugu

SEQ ID NO: 1686116 - RNA, 12 nt, Human
ggccugagcugg

SEQ ID NO: 1686117 - RNA, 13 nt, Human
ggccuggccccuc

SEQ ID NO: 1686118 - RNA, 22 nt, Human
ggccucugcacuccccugcugg

SEQ ID NO: 1686119 - RNA, 18 nt, Human
ggccucugcacuccccug

SEQ ID NO: 1686120 - RNA, 19 nt, Human
ggccucugcacuccccugc

SEQ ID NO: 1686121 - RNA, 14 nt, Human
ggccuggccccuca

SEQ ID NO: 1686122 - RNA, 15 nt, Human
ggccuggccccucag

SEQ ID NO: 1686123 - RNA, 17 nt, Human
ggccuggccccucaggg

SEQ ID NO: 1686124 - RNA, 18 nt, Human
ggccuggccccucagggu

SEQ ID NO: 1686125 - RNA, 23 nt, Human
ggccuggccccucagggucccug

SEQ ID NO: 1686126 - RNA, 10 nt, Human
ggccuggccu

SEQ ID NO: 1686127 - RNA, 13 nt, Human
ggccuggccugag

SEQ ID NO: 1686128 - RNA, 14 nt, Human
ggccuggccugagc

SEQ ID NO: 1686129 - RNA, 15 nt, Human
ggccuggccugagcu

SEQ ID NO: 1686130 - RNA, 16 nt, Human
ggccuggccugagcug

SEQ ID NO: 1686131 - RNA, 11 nt, Human
ggccugggccc

SEQ ID NO: 1686132 - RNA, 23 nt, Human
ggccugggggcugggcagaggaa

SEQ ID NO: 1686133 - RNA, 23 nt, Human
ggcgcagcauauucaggaagcuc

SEQ ID NO: 1686134 - RNA, 24 nt, Human
ggcgcagcauauucaggaagcuca

SEQ ID NO: 1686135 - RNA, 17 nt, Human
ggcucuggagcccacug

SEQ ID NO: 1686136 - RNA, 19 nt, Human
ggcucuggagcccacugua

SEQ ID NO: 1686137 - RNA, 16 nt, Human
ggcucuggagcccacu

SEQ ID NO: 1686138 - RNA, 16 nt, Human
ggcucugccucccauc

SEQ ID NO: 1686139 - RNA, 14 nt, Human
ggcucugcccuugg

SEQ ID NO: 1686140 - RNA, 15 nt, Human
ggcucugcccuuggu

SEQ ID NO: 1686141 - RNA, 13 nt, Human
ggcucugccuccc

SEQ ID NO: 1686142 - RNA, 15 nt, Human
ggcucugccucccau

SEQ ID NO: 1686143 - RNA, 12 nt, Human
ggcucugcccuu

SEQ ID NO: 1686144 - RNA, 17 nt, Human
ggcucucaggccagcug

SEQ ID NO: 1686145 - RNA, 18 nt, Human
ggcucucaggccagcugc

SEQ ID NO: 1686146 - RNA, 19 nt, Human
ggcucucaggccagcugcu

SEQ ID NO: 1686147 - RNA, 20 nt, Human
ggcucucaggccagcugcuu

SEQ ID NO: 1686148 - RNA, 15 nt, Human
ggcucucaggccagc

SEQ ID NO: 1686149 - RNA, 16 nt, Human
ggcucucaggccagcu

SEQ ID NO: 1686150 - RNA, 15 nt, Human
ggcuccaggcuccuu

SEQ ID NO: 1686151 - RNA, 14 nt, Human
ggcuccaggcuccu

SEQ ID NO: 1686152 - RNA, 10 nt, Human
ggcuccagac

SEQ ID NO: 1686153 - RNA, 14 nt, Human
ggcuccaggagcag

SEQ ID NO: 1686154 - RNA, 16 nt, Human
ggcuccaggagcagcc

SEQ ID NO: 1686155 - RNA, 18 nt, Human
ggcuccaggagcagccac

SEQ ID NO: 1686156 - RNA, 17 nt, Human
ggcuccaggagcagcca

SEQ ID NO: 1686157 - RNA, 12 nt, Human
ggcuccaggcuc

SEQ ID NO: 1686158 - RNA, 13 nt, Human
ggcuccaggcucc

SEQ ID NO: 1686159 - RNA, 14 nt, Human
ggcuaugcauuuga

SEQ ID NO: 1686160 - RNA, 13 nt, Human
ggcuaugcauuug

SEQ ID NO: 1686161 - RNA, 12 nt, Human
ggcuaugcauuu

SEQ ID NO: 1686162 - RNA, 9 nt, Human
ggcuccaga

SEQ ID NO: 1686163 - RNA, 16 nt, Human
ggcuccacuuggucug

SEQ ID NO: 1686164 - RNA, 17 nt, Human
ggcgcugccccuggcag

SEQ ID NO: 1686165 - RNA, 11 nt, Human
ggcgcugcccc

SEQ ID NO: 1686166 - RNA, 20 nt, Human
ggcuaguaucaaaagaaaga

SEQ ID NO: 1686167 - RNA, 23 nt, Human
ggcuauaggugcuacaaaaacac

SEQ ID NO: 1686168 - RNA, 15 nt, Human
ggcugggagcucugc

SEQ ID NO: 1686169 - RNA, 20 nt, Human
ggcugggcucccuucccacc

SEQ ID NO: 1686170 - RNA, 21 nt, Human
ggcugggcucccuucccaccu

SEQ ID NO: 1686171 - RNA, 11 nt, Human
ggcugggcuuc

SEQ ID NO: 1686172 - RNA, 21 nt, Human
ggcugggcuucaguggcagcu

SEQ ID NO: 1686173 - RNA, 22 nt, Human
ggcugggcuucaguggcagcug

SEQ ID NO: 1686174 - RNA, 16 nt, Human
ggcugggggaagaagc

SEQ ID NO: 1686175 - RNA, 14 nt, Human
ggcugggggccuca

SEQ ID NO: 1686176 - RNA, 18 nt, Human
ggcuggagcuagaauuug

SEQ ID NO: 1686177 - RNA, 21 nt, Human
ggcugcuucaaggauccugag

SEQ ID NO: 1686178 - RNA, 20 nt, Human
ggcugcuucaaggauccuga

SEQ ID NO: 1686179 - RNA, 23 nt, Human
ggcucuggagcccacuguacuug

SEQ ID NO: 1686180 - RNA, 17 nt, Human
ggcucugccucccauca

SEQ ID NO: 1686181 - RNA, 15 nt, Human
ggcugcuucaaggau

SEQ ID NO: 1686182 - RNA, 19 nt, Human
ggcugcuucaaggauccug

SEQ ID NO: 1686183 - RNA, 13 nt, Human
ggcugugccucug

SEQ ID NO: 1686184 - RNA, 16 nt, Human
ggcugugccucugccu

SEQ ID NO: 1686185 - RNA, 14 nt, Human
ggcuguuggcuggg

SEQ ID NO: 1686186 - RNA, 15 nt, Human
ggcuguuggcugggg

SEQ ID NO: 1686187 - RNA, 16 nt, Human
ggcuguuggcuggggg

SEQ ID NO: 1686188 - RNA, 20 nt, Human
ggcuguuggcugggggccuc

SEQ ID NO: 1686189 - RNA, 15 nt, Human
ggcuuaaaacaacac

SEQ ID NO: 1686190 - RNA, 11 nt, Human
ggcuugcugcc

SEQ ID NO: 1686191 - RNA, 17 nt, Human
ggcuuggggaccagagc

SEQ ID NO: 1686192 - RNA, 18 nt, Human
ggcuuggggaccagagcu

SEQ ID NO: 1686193 - RNA, 19 nt, Human
ggcuuggggaccagagcug

SEQ ID NO: 1686194 - RNA, 14 nt, Human
ggcuuagucacuga

SEQ ID NO: 1686195 - RNA, 15 nt, Human
ggcuuagucacugag

SEQ ID NO: 1686196 - RNA, 20 nt, Human
ggcuucacggaagagccuug

SEQ ID NO: 1686197 - RNA, 21 nt, Human
ggcuucacggaagagccuugc

SEQ ID NO: 1686198 - RNA, 12 nt, Human
ggcuucacagau

SEQ ID NO: 1686199 - RNA, 21 nt, Human
gggagccugaucaccugcccu

SEQ ID NO: 1686200 - RNA, 12 nt, Human
gggagcucugca

SEQ ID NO: 1686201 - RNA, 13 nt, Human
gggagcugccugu

SEQ ID NO: 1686202 - RNA, 21 nt, Human
gggagcugccuguucagcucc

SEQ ID NO: 1686203 - RNA, 22 nt, Human
gggagcugccuguucagcucca

SEQ ID NO: 1686204 - RNA, 23 nt, Human
gggaggaucucuugagccuggga

SEQ ID NO: 1686205 - RNA, 22 nt, Human
gggaggauguucugggacacag

SEQ ID NO: 1686206 - RNA, 21 nt, Human
gggaggauugcuugagcucag

SEQ ID NO: 1686207 - RNA, 17 nt, Human
gggaggacgcucucugg

SEQ ID NO: 1686208 - RNA, 20 nt, Human
gggaggacgcucucuggccu

SEQ ID NO: 1686209 - RNA, 21 nt, Human
gggagugaguugauagcacag

SEQ ID NO: 1686210 - RNA, 17 nt, Human
gggagugacagaggcag

SEQ ID NO: 1686211 - RNA, 23 nt, Human
gggaggauugcuugagcucagga

SEQ ID NO: 1686212 - RNA, 20 nt, Human
gggaggugggauccuccagg

SEQ ID NO: 1686213 - RNA, 11 nt, Human
gggaggcagag

SEQ ID NO: 1686214 - RNA, 13 nt, Human
ggcuuuucacugc

SEQ ID NO: 1686215 - RNA, 15 nt, Human
ggcuuuguauagaac

SEQ ID NO: 1686216 - RNA, 14 nt, Human
gggacacccuguga

SEQ ID NO: 1686217 - RNA, 19 nt, Human
gggaauguuugccucugcc

SEQ ID NO: 1686218 - RNA, 21 nt, Human
gggaauguuugccucugccuc

SEQ ID NO: 1686219 - RNA, 14 nt, Human
gggaauugaggaca

SEQ ID NO: 1686220 - RNA, 17 nt, Human
gggacucaaugcacuga

SEQ ID NO: 1686221 - RNA, 19 nt, Human
gggacucaaugcacugaca

SEQ ID NO: 1686222 - RNA, 23 nt, Human
gggacugccagucccccugcccc

SEQ ID NO: 1686223 - RNA, 15 nt, Human
gggacugagaaauuu

SEQ ID NO: 1686224 - RNA, 23 nt, Human
gggacucaaugcacugacauugu

SEQ ID NO: 1686225 - RNA, 21 nt, Human
gggacugaggggaggggagca

SEQ ID NO: 1686226 - RNA, 23 nt, Human
gcuccuggggguucuuucuuccu

SEQ ID NO: 1686227 - RNA, 14 nt, Human
gcuccucccggugc

SEQ ID NO: 1686228 - RNA, 16 nt, Human
gcuccucccggugccc

SEQ ID NO: 1686229 - RNA, 24 nt, Human
gcuccgcuuucuacccagcgagcc

SEQ ID NO: 1686230 - RNA, 20 nt, Human
gcuccuuccucugaggcuga

SEQ ID NO: 1686231 - RNA, 22 nt, Human
gcuccuuccucugaggcugaaa

SEQ ID NO: 1686232 - RNA, 18 nt, Human
gcuccuuccucugaggcu

SEQ ID NO: 1686233 - RNA, 12 nt, Human
gcuccugugucu

SEQ ID NO: 1686234 - RNA, 13 nt, Human
gcuccugugucuu

SEQ ID NO: 1686235 - RNA, 15 nt, Human
gcuccuucuguccua

SEQ ID NO: 1686236 - RNA, 13 nt, Human
gcuccuucugucc

SEQ ID NO: 1686237 - RNA, 17 nt, Human
gcuccuuuagcgcccag

SEQ ID NO: 1686238 - RNA, 19 nt, Human
gcucgagcaugccuggaug

SEQ ID NO: 1686239 - RNA, 21 nt, Human
gcucgagcaugccuggauggg

SEQ ID NO: 1686240 - RNA, 11 nt, Human
gcuccaggagc

SEQ ID NO: 1686241 - RNA, 12 nt, Human
gcuccaggagca

SEQ ID NO: 1686242 - RNA, 14 nt, Human
gcuccaggagcagc

SEQ ID NO: 1686243 - RNA, 21 nt, Human
gcuccagcuguucagcugguu

SEQ ID NO: 1686244 - RNA, 15 nt, Human
gcuccaggagcagcc

SEQ ID NO: 1686245 - RNA, 16 nt, Human
gcuccaggagcagcca

SEQ ID NO: 1686246 - RNA, 17 nt, Human
gcuccaggagcagccac

SEQ ID NO: 1686247 - RNA, 18 nt, Human
gcuccaggagcagccaca

SEQ ID NO: 1686248 - RNA, 12 nt, Human
gcuccaggcucc

SEQ ID NO: 1686249 - RNA, 15 nt, Human
gcucccacaggcccu

SEQ ID NO: 1686250 - RNA, 20 nt, Human
gcucccuucccaccucucuc

SEQ ID NO: 1686251 - RNA, 18 nt, Human
gcuccgcuuucuacccag

SEQ ID NO: 1686252 - RNA, 21 nt, Human
gcuccgcuuucuacccagcga

SEQ ID NO: 1686253 - RNA, 22 nt, Human
gcuccgcuuucuacccagcgag

SEQ ID NO: 1686254 - RNA, 23 nt, Human
gcuccgcuuucuacccagcgagc

SEQ ID NO: 1686255 - RNA, 18 nt, Human
gcucauggacuucugcca

SEQ ID NO: 1686256 - RNA, 17 nt, Human
gcucagcccucccugcc

SEQ ID NO: 1686257 - RNA, 18 nt, Human
gcucagcccucccugccc

SEQ ID NO: 1686258 - RNA, 19 nt, Human
gcucagcccucccugcccc

SEQ ID NO: 1686259 - RNA, 21 nt, Human
gcucagcccucccugccccuc

SEQ ID NO: 1686260 - RNA, 17 nt, Human
gcucagcggggacagcu

SEQ ID NO: 1686261 - RNA, 18 nt, Human
gcucagcggggacagcuc

SEQ ID NO: 1686262 - RNA, 19 nt, Human
gcucagcggggacagcucc

SEQ ID NO: 1686263 - RNA, 23 nt, Human
gcucagcggggacagcuccuucu

SEQ ID NO: 1686264 - RNA, 15 nt, Human
gcucagcccucccug

SEQ ID NO: 1686265 - RNA, 16 nt, Human
gcucagcccucccugc

SEQ ID NO: 1686266 - RNA, 12 nt, Human
gcucagcccucc

SEQ ID NO: 1686267 - RNA, 16 nt, Human
gcucaccucucccuug

SEQ ID NO: 1686268 - RNA, 17 nt, Human
gcucaccucucccuugg

SEQ ID NO: 1686269 - RNA, 18 nt, Human
gcucaccucucccuugga

SEQ ID NO: 1686270 - RNA, 22 nt, Human
gcucacagaacccuuggagcca

SEQ ID NO: 1686271 - RNA, 16 nt, Human
gcucacauaucuguca

SEQ ID NO: 1686272 - RNA, 12 nt, Human
gcucaccagccc

SEQ ID NO: 1686273 - RNA, 13 nt, Human
gcucaccagcccc

SEQ ID NO: 1686274 - RNA, 14 nt, Human
gcucaccagcccca

SEQ ID NO: 1686275 - RNA, 15 nt, Human
gcucaccagccccag

SEQ ID NO: 1686276 - RNA, 18 nt, Human
gcucaccagccccagugc

SEQ ID NO: 1686277 - RNA, 15 nt, Human
gcuaucguaaaauua

SEQ ID NO: 1686278 - RNA, 16 nt, Human
gcuaucguaaaauuaa

SEQ ID NO: 1686279 - RNA, 17 nt, Human
gcuaucguaaaauuaag

SEQ ID NO: 1686280 - RNA, 13 nt, Human
gcuaucuccccca

SEQ ID NO: 1686281 - RNA, 18 nt, Human
gcucaaguccucuuuucu

SEQ ID NO: 1686282 - RNA, 14 nt, Human
gcuaucucccccag

SEQ ID NO: 1686283 - RNA, 15 nt, Human
gcuaucucccccagc

SEQ ID NO: 1686284 - RNA, 19 nt, Human
gcucaaguccucuuuucug

SEQ ID NO: 1686285 - RNA, 22 nt, Human
gcucaaguccucuuuucugaga

SEQ ID NO: 1686286 - RNA, 20 nt, Human
gcuauaacuauguugauaaa

SEQ ID NO: 1686287 - RNA, 21 nt, Human
gcuauaggugcuacaaaaaca

SEQ ID NO: 1686288 - RNA, 19 nt, Human
gcuauaggugcuacaaaaa

SEQ ID NO: 1686289 - RNA, 14 nt, Human
gcuagauguaugua

SEQ ID NO: 1686290 - RNA, 16 nt, Human
gcuagauguauguacu

SEQ ID NO: 1686291 - RNA, 19 nt, Human
gcggugcuaucucccccag

SEQ ID NO: 1686292 - RNA, 22 nt, Human
gcggugcuaucucccccagccc

SEQ ID NO: 1686293 - RNA, 13 nt, Human
gcuagauguaugu

SEQ ID NO: 1686294 - RNA, 21 nt, Human
gcgccuuaaggauguucuagc

SEQ ID NO: 1686295 - RNA, 13 nt, Human
gcgccccuucccc

SEQ ID NO: 1686296 - RNA, 23 nt, Human
gcgcccaguuggguggaugccug

SEQ ID NO: 1686297 - RNA, 16 nt, Human
gcggagaaaggaaggg

SEQ ID NO: 1686298 - RNA, 19 nt, Human
gcggagacggagucccacc

SEQ ID NO: 1686299 - RNA, 14 nt, Human
gcggggacagcucc

SEQ ID NO: 1686300 - RNA, 18 nt, Human
gcgcugccccuggcagcc

SEQ ID NO: 1686301 - RNA, 21 nt, Human
gcgcugccccuggcagccccu

SEQ ID NO: 1686302 - RNA, 18 nt, Human
gcggggacagcuccuucu

SEQ ID NO: 1686303 - RNA, 15 nt, Human
gcggggacagcuccu

SEQ ID NO: 1686304 - RNA, 17 nt, Human
gcggggacagcuccuuc

SEQ ID NO: 1686305 - RNA, 19 nt, Human
gcggugagaggggaacaga

SEQ ID NO: 1686306 - RNA, 13 nt, Human
gcgguccacccag

SEQ ID NO: 1686307 - RNA, 14 nt, Human
gcgguccacccagg

SEQ ID NO: 1686308 - RNA, 15 nt, Human
gccuuacacaauggu

SEQ ID NO: 1686309 - RNA, 16 nt, Human
gccuuacacaaugguu

SEQ ID NO: 1686310 - RNA, 18 nt, Human
gcgcaggcuggcccugcc

SEQ ID NO: 1686311 - RNA, 19 nt, Human
gcgcaggcuggcccugccc

SEQ ID NO: 1686312 - RNA, 17 nt, Human
gcgcaggcuggcccugc

SEQ ID NO: 1686313 - RNA, 20 nt, Human
gcgcaggcuggcccugcccu

SEQ ID NO: 1686314 - RNA, 21 nt, Human
gcgcaggcuggcccugcccug

SEQ ID NO: 1686315 - RNA, 22 nt, Human
gcgcaggcuggcccugcccugg

SEQ ID NO: 1686316 - RNA, 12 nt, Human
gcgacaaugcaa

SEQ ID NO: 1686317 - RNA, 13 nt, Human
gcgacaaugcaaa

SEQ ID NO: 1686318 - RNA, 20 nt, Human
gcgacaaugcaaaccaucau

SEQ ID NO: 1686319 - RNA, 21 nt, Human
gcgacaaugcaaaccaucauu

SEQ ID NO: 1686320 - RNA, 13 nt, Human
gccuggccccuca

SEQ ID NO: 1686321 - RNA, 14 nt, Human
gccuggccccucag

SEQ ID NO: 1686322 - RNA, 18 nt, Human
gccuggcacagggcagug

SEQ ID NO: 1686323 - RNA, 19 nt, Human
gccuggcacagggcagugg

SEQ ID NO: 1686324 - RNA, 12 nt, Human
gccuggcagccg

SEQ ID NO: 1686325 - RNA, 20 nt, Human
gccuggcagccgugccuuca

SEQ ID NO: 1686326 - RNA, 21 nt, Human
gccuggcagccgugccuucag

SEQ ID NO: 1686327 - RNA, 22 nt, Human
gccuggcagccgugccuucagc

SEQ ID NO: 1686328 - RNA, 20 nt, Human
gccuggccagaugcaccagc

SEQ ID NO: 1686329 - RNA, 21 nt, Human
gccuggccagaugcaccagcc

SEQ ID NO: 1686330 - RNA, 22 nt, Human
gccuggccagaugcaccagccc

SEQ ID NO: 1686331 - RNA, 20 nt, Human
gccuguaauccuagcacuuu

SEQ ID NO: 1686332 - RNA, 15 nt, Human
gccuguaauccuagc

SEQ ID NO: 1686333 - RNA, 16 nt, Human
gccuggauggggcugc

SEQ ID NO: 1686334 - RNA, 18 nt, Human
gccuggauggggcugcac

SEQ ID NO: 1686335 - RNA, 13 nt, Human
gccuggcacaggg

SEQ ID NO: 1686336 - RNA, 14 nt, Human
gccuggcacagggc

SEQ ID NO: 1686337 - RNA, 20 nt, Human
gccuggauggggcugcaccg

SEQ ID NO: 1686338 - RNA, 12 nt, Human
gccugagcuggg

SEQ ID NO: 1686339 - RNA, 19 nt, Human
gcccaguuggguggaugcc

SEQ ID NO: 1686340 - RNA, 21 nt, Human
gcccaguuggguggaugccug

SEQ ID NO: 1686341 - RNA, 22 nt, Human
gcccaguuggguggaugccugg

SEQ ID NO: 1686342 - RNA, 16 nt, Human
gccugaagucacacag

SEQ ID NO: 1686343 - RNA, 17 nt, Human
gccugaagucacacagu

SEQ ID NO: 1686344 - RNA, 18 nt, Human
gccugaagucacacagug

SEQ ID NO: 1686345 - RNA, 17 nt, Human
gccugagcgacagugag

SEQ ID NO: 1686346 - RNA, 20 nt, Human
gccugagcgacagugagacu

SEQ ID NO: 1686347 - RNA, 19 nt, Human
gcucuuggcagguacucag

SEQ ID NO: 1686348 - RNA, 19 nt, Human
gcucuugaugccuggcggg

SEQ ID NO: 1686349 - RNA, 14 nt, Human
gcucuugaacuccu

SEQ ID NO: 1686350 - RNA, 16 nt, Human
gcucuugaacuccuga

SEQ ID NO: 1686351 - RNA, 19 nt, Human
gcucuugaacuccugaccu

SEQ ID NO: 1686352 - RNA, 21 nt, Human
gcucuugaacuccugaccuca

SEQ ID NO: 1686353 - RNA, 21 nt, Human
gcucucaggccagcugcuugg

SEQ ID NO: 1686354 - RNA, 22 nt, Human
gcugacuguuuucucuugagag

SEQ ID NO: 1686355 - RNA, 20 nt, Human
gcugacagacacaggcccgg

SEQ ID NO: 1686356 - RNA, 18 nt, Human
gcugacagacacaggccc

SEQ ID NO: 1686357 - RNA, 19 nt, Human
gcugacagacacaggcccg

SEQ ID NO: 1686358 - RNA, 16 nt, Human
gcugagaggagagaga

SEQ ID NO: 1686359 - RNA, 22 nt, Human
gcugcaaaggguaucaggugcu

SEQ ID NO: 1686360 - RNA, 23 nt, Human
gcugcaaaggguaucaggugcug

SEQ ID NO: 1686361 - RNA, 21 nt, Human
gcugauuaaaccaaggcuaga

SEQ ID NO: 1686362 - RNA, 19 nt, Human
gcugcauuuaaaagauaca

SEQ ID NO: 1686363 - RNA, 18 nt, Human
gcugcauuuaaaagauac

SEQ ID NO: 1686364 - RNA, 17 nt, Human
gcugcaguugccaguca

SEQ ID NO: 1686365 - RNA, 13 nt, Human
gcugcaguugcca

SEQ ID NO: 1686366 - RNA, 14 nt, Human
gcugcaguugccag

SEQ ID NO: 1686367 - RNA, 15 nt, Human
gcugccacacuucag

SEQ ID NO: 1686368 - RNA, 17 nt, Human
gcugccacacuucaggc

SEQ ID NO: 1686369 - RNA, 18 nt, Human
gcugccacacuucaggcu

SEQ ID NO: 1686370 - RNA, 21 nt, Human
gcugccacacuucaggcucuu

SEQ ID NO: 1686371 - RNA, 22 nt, Human
gcugccacacuucaggcucuuc

SEQ ID NO: 1686372 - RNA, 23 nt, Human
gcugccacacuucaggcucuucu

SEQ ID NO: 1686373 - RNA, 12 nt, Human
gcugccaccugc

SEQ ID NO: 1686374 - RNA, 13 nt, Human
gcugccaccugcc

SEQ ID NO: 1686375 - RNA, 12 nt, Human
gcugcccucucc

SEQ ID NO: 1686376 - RNA, 14 nt, Human
gcuggcccugcccu

SEQ ID NO: 1686377 - RNA, 15 nt, Human
gcuggcccugcccug

SEQ ID NO: 1686378 - RNA, 16 nt, Human
gcuggcccugcccugg

SEQ ID NO: 1686379 - RNA, 19 nt, Human
gcuggcccuggcucccaca

SEQ ID NO: 1686380 - RNA, 16 nt, Human
gcuggaccuugaacug

SEQ ID NO: 1686381 - RNA, 15 nt, Human
gcuggaccuugaacu

SEQ ID NO: 1686382 - RNA, 16 nt, Human
gcuggcauagagcagc

SEQ ID NO: 1686383 - RNA, 22 nt, Human
gcugcuuuugucuaugggacuc

SEQ ID NO: 1686384 - RNA, 23 nt, Human
gcuggaaugauuucagcucacug

SEQ ID NO: 1686385 - RNA, 21 nt, Human
gcuggaaaaguauguuagugc

SEQ ID NO: 1686386 - RNA, 23 nt, Human
gcuggaaaaguauguuagugcaa

SEQ ID NO: 1686387 - RNA, 17 nt, Human
gcugcccuggugcugcc

SEQ ID NO: 1686388 - RNA, 15 nt, Human
gcugccuuagaaccu

SEQ ID NO: 1686389 - RNA, 20 nt, Human
gcugccuuagaaccuuucuu

SEQ ID NO: 1686390 - RNA, 20 nt, Human
gcugccuguucagcuccagc

SEQ ID NO: 1686391 - RNA, 22 nt, Human
gcugccuguucagcuccagcuc

SEQ ID NO: 1686392 - RNA, 12 nt, Human
gcugcccuggug

SEQ ID NO: 1686393 - RNA, 13 nt, Human
gcugcccuggugc

SEQ ID NO: 1686394 - RNA, 14 nt, Human
gcugcccuggugcu

SEQ ID NO: 1686395 - RNA, 15 nt, Human
gcugcccuggugcug

SEQ ID NO: 1686396 - RNA, 18 nt, Human
gcugccuguucagcucca

SEQ ID NO: 1686397 - RNA, 19 nt, Human
gcugccuguucagcuccag

SEQ ID NO: 1686398 - RNA, 14 nt, Human
gcugcgguccaccc

SEQ ID NO: 1686399 - RNA, 15 nt, Human
gcugcgguccaccca

SEQ ID NO: 1686400 - RNA, 22 nt, Human
gcugcgguccacccaggagccc

SEQ ID NO: 1686401 - RNA, 16 nt, Human
gcugcgguccacccag

SEQ ID NO: 1686402 - RNA, 21 nt, Human
gcugcgguccacccaggagcc

SEQ ID NO: 1686403 - RNA, 16 nt, Human
gcugcccugcccaccu

SEQ ID NO: 1686404 - RNA, 18 nt, Human
gcugcccugcccaccugg

SEQ ID NO: 1686405 - RNA, 20 nt, Human
gcugcccugcccaccuggcc

SEQ ID NO: 1686406 - RNA, 21 nt, Human
gcugcccugcccaccuggccu

SEQ ID NO: 1686407 - RNA, 22 nt, Human
gcugcccugcccaccuggccuc

SEQ ID NO: 1686408 - RNA, 23 nt, Human
gcugcccugcccaccuggccucu

SEQ ID NO: 1686409 - RNA, 24 nt, Human
gcugcccugcccaccuggccucug

SEQ ID NO: 1686410 - RNA, 22 nt, Human
gcugcccucuccugggcagcug

SEQ ID NO: 1686411 - RNA, 20 nt, Human
gcugcccucuccugggcagc

SEQ ID NO: 1686412 - RNA, 18 nt, Human
gcugcccucuccugggca

SEQ ID NO: 1686413 - RNA, 17 nt, Human
gcugcccucuccugggc

SEQ ID NO: 1686414 - RNA, 16 nt, Human
gcugcccucuccuggg

SEQ ID NO: 1686415 - RNA, 15 nt, Human
gcugcccucuccugg

SEQ ID NO: 1686416 - RNA, 14 nt, Human
gcugcccucuccug

SEQ ID NO: 1686417 - RNA, 13 nt, Human
gcugcccucuccu

SEQ ID NO: 1686418 - RNA, 13 nt, Human
gcugcccugccca

SEQ ID NO: 1686419 - RNA, 14 nt, Human
gcugcccugcccac

SEQ ID NO: 1686420 - RNA, 12 nt, Human
gcugcccugccc

SEQ ID NO: 1686421 - RNA, 23 nt, Human
gcugcccucuccugggcagcugc

SEQ ID NO: 1686422 - RNA, 19 nt, Human
gcuucaguggcagcugcuu

SEQ ID NO: 1686423 - RNA, 20 nt, Human
gcuucaguggcagcugcuuu

SEQ ID NO: 1686424 - RNA, 13 nt, Human
gcuuaucucaggg

SEQ ID NO: 1686425 - RNA, 22 nt, Human
gcuucucacugccaugccagcu

SEQ ID NO: 1686426 - RNA, 17 nt, Human
gcuucuguugcugccuc

SEQ ID NO: 1686427 - RNA, 18 nt, Human
gcuucuguugcugccuca

SEQ ID NO: 1686428 - RNA, 19 nt, Human
gcuucuguugcugccucau

SEQ ID NO: 1686429 - RNA, 19 nt, Human
gcuucuguuuuauaauuuu

SEQ ID NO: 1686430 - RNA, 12 nt, Human
gcuuuguauaga

SEQ ID NO: 1686431 - RNA, 13 nt, Human
gcuuuguauagaa

SEQ ID NO: 1686432 - RNA, 19 nt, Human
gcuuugggcugcccuggug

SEQ ID NO: 1686433 - RNA, 14 nt, Human
gcuuuguauagaac

SEQ ID NO: 1686434 - RNA, 20 nt, Human
gcuuuguauagaaccucuuu

SEQ ID NO: 1686435 - RNA, 13 nt, Human
gcuuuuaugugaa

SEQ ID NO: 1686436 - RNA, 15 nt, Human
gcuuuuaugugaaac

SEQ ID NO: 1686437 - RNA, 15 nt, Human
gcuuguuuccuagca

SEQ ID NO: 1686438 - RNA, 23 nt, Human
gcuuguuuccuagcacacacuuu

SEQ ID NO: 1686439 - RNA, 22 nt, Human
gcuuuaaacauugguucuugua

SEQ ID NO: 1686440 - RNA, 21 nt, Human
gcugggcuucaguggcagcug

SEQ ID NO: 1686441 - RNA, 22 nt, Human
gcugggcuucaguggcagcugc

SEQ ID NO: 1686442 - RNA, 21 nt, Human
gcugggaugauuggagggggg

SEQ ID NO: 1686443 - RNA, 20 nt, Human
gcugggcuucaguggcagcu

SEQ ID NO: 1686444 - RNA, 19 nt, Human
gcugggaugauuggagggg

SEQ ID NO: 1686445 - RNA, 21 nt, Human
gcugggcucccuucccaccuc

SEQ ID NO: 1686446 - RNA, 13 nt, Human
gcuggccuggccc

SEQ ID NO: 1686447 - RNA, 12 nt, Human
gcuggccuggcc

SEQ ID NO: 1686448 - RNA, 14 nt, Human
gcuggccuggcccc

SEQ ID NO: 1686449 - RNA, 15 nt, Human
gcuggccuggccccu

SEQ ID NO: 1686450 - RNA, 14 nt, Human
gcugggggccucag

SEQ ID NO: 1686451 - RNA, 15 nt, Human
gcugggggccucagu

SEQ ID NO: 1686452 - RNA, 18 nt, Human
gcugggggccucagugcc

SEQ ID NO: 1686453 - RNA, 19 nt, Human
gcuggucucgaacuccuga

SEQ ID NO: 1686454 - RNA, 22 nt, Human
gcuggucucgaacuccugaccu

SEQ ID NO: 1686455 - RNA, 23 nt, Human
gcuggucucgaacuccugaccuu

SEQ ID NO: 1686456 - RNA, 14 nt, Human
gcuggucccacuca

SEQ ID NO: 1686457 - RNA, 23 nt, Human
gcuggucccagccagcaguucag

SEQ ID NO: 1686458 - RNA, 13 nt, Human
gcugucaucucag

SEQ ID NO: 1686459 - RNA, 16 nt, Human
gcuggugucaccugaa

SEQ ID NO: 1686460 - RNA, 17 nt, Human
gcugucagccauuccug

SEQ ID NO: 1686461 - RNA, 21 nt, Human
gcugguguaugugugaaguga

SEQ ID NO: 1686462 - RNA, 14 nt, Human
gcuggugucaccug

SEQ ID NO: 1686463 - RNA, 15 nt, Human
gcuggugucaccuga

SEQ ID NO: 1686464 - RNA, 23 nt, Human
gcugucccuuacgugaguccugg

SEQ ID NO: 1686465 - RNA, 16 nt, Human
gcugucccuuuuccuu

SEQ ID NO: 1686466 - RNA, 16 nt, Human
gcuguguggcagucug

SEQ ID NO: 1686467 - RNA, 15 nt, Human
gcugugucucccuuc

SEQ ID NO: 1686468 - RNA, 16 nt, Human
gccacaagacccuugu

SEQ ID NO: 1686469 - RNA, 22 nt, Human
gccacaagacccuugugguccc

SEQ ID NO: 1686470 - RNA, 23 nt, Human
gccacagagaaaguacuucucca

SEQ ID NO: 1686471 - RNA, 20 nt, Human
gccacacuucaggcucuucu

SEQ ID NO: 1686472 - RNA, 22 nt, Human
gccacacuucaggcucuucucc

SEQ ID NO: 1686473 - RNA, 23 nt, Human
gccacacuucaggcucuucuccu

SEQ ID NO: 1686474 - RNA, 13 nt, Human
gccacagagaaag

SEQ ID NO: 1686475 - RNA, 14 nt, Human
gccacagagaaagu

SEQ ID NO: 1686476 - RNA, 20 nt, Human
gccacagagaaaguacuucu

SEQ ID NO: 1686477 - RNA, 20 nt, Human
gccaauaauaauaccucccu

SEQ ID NO: 1686478 - RNA, 16 nt, Human
gccaauggagacuguc

SEQ ID NO: 1686479 - RNA, 19 nt, Human
gccaauggagacugucuca

SEQ ID NO: 1686480 - RNA, 21 nt, Human
gccaauggagacugucucaag

SEQ ID NO: 1686481 - RNA, 14 nt, Human
gccaaggugggagg

SEQ ID NO: 1686482 - RNA, 15 nt, Human
gccaaggugggagga

SEQ ID NO: 1686483 - RNA, 23 nt, Human
gccaaggugggaggauugcuuga

SEQ ID NO: 1686484 - RNA, 23 nt, Human
gcauuuggugguuucagaaaugu

SEQ ID NO: 1686485 - RNA, 22 nt, Human
gcauuuggugguuucagaaaug

SEQ ID NO: 1686486 - RNA, 20 nt, Human
gcauuugaggucuguucuuu

SEQ ID NO: 1686487 - RNA, 19 nt, Human
gcauuugaggucuguucuu

SEQ ID NO: 1686488 - RNA, 21 nt, Human
gcauuugaggucuguucuuuc

SEQ ID NO: 1686489 - RNA, 12 nt, Human
gcauuugugaaa

SEQ ID NO: 1686490 - RNA, 21 nt, Human
gccaaggcugggggaagaagc

SEQ ID NO: 1686491 - RNA, 11 nt, Human
gccaccugggu

SEQ ID NO: 1686492 - RNA, 22 nt, Human
gccaccugcggugcuaucuccc

SEQ ID NO: 1686493 - RNA, 14 nt, Human
gccaccugcggugc

SEQ ID NO: 1686494 - RNA, 20 nt, Human
gccaccugcggugcuaucuc

SEQ ID NO: 1686495 - RNA, 19 nt, Human
gccacggccaggccagagg

SEQ ID NO: 1686496 - RNA, 20 nt, Human
gccacgcccaacuaauuuuu

SEQ ID NO: 1686497 - RNA, 18 nt, Human
gccacggccaggccagag

SEQ ID NO: 1686498 - RNA, 17 nt, Human
gccaccgugccuggcca

SEQ ID NO: 1686499 - RNA, 22 nt, Human
gccaccgugccuggccacgccc

SEQ ID NO: 1686500 - RNA, 17 nt, Human
gccaccugccuguuggg

SEQ ID NO: 1686501 - RNA, 12 nt, Human
gccagaggagag

SEQ ID NO: 1686502 - RNA, 13 nt, Human
gccagaggagaga

SEQ ID NO: 1686503 - RNA, 15 nt, Human
gccagaggagagagg

SEQ ID NO: 1686504 - RNA, 17 nt, Human
gccagaggagagaggac

SEQ ID NO: 1686505 - RNA, 19 nt, Human
gccagaggagagaggaccc

SEQ ID NO: 1686506 - RNA, 22 nt, Human
gccagaggagagaggacccccu

SEQ ID NO: 1686507 - RNA, 21 nt, Human
gccagagggagugacagaggc

SEQ ID NO: 1686508 - RNA, 22 nt, Human
gccagagggagugacagaggca

SEQ ID NO: 1686509 - RNA, 23 nt, Human
gccagagggagugacagaggcag

SEQ ID NO: 1686510 - RNA, 16 nt, Human
gccagaugcaccagcc

SEQ ID NO: 1686511 - RNA, 17 nt, Human
gccagaugcaccagccc

SEQ ID NO: 1686512 - RNA, 18 nt, Human
gccagaugcaccagcccu

SEQ ID NO: 1686513 - RNA, 20 nt, Human
gccagagacacaagccuucg

SEQ ID NO: 1686514 - RNA, 10 nt, Human
gccagaggag

SEQ ID NO: 1686515 - RNA, 17 nt, Human
gccagagacacaagccu

SEQ ID NO: 1686516 - RNA, 19 nt, Human
gccagagacacaagccuuc

SEQ ID NO: 1686517 - RNA, 16 nt, Human
gccagagacacaagcc

SEQ ID NO: 1686518 - RNA, 19 nt, Human
gccagacuggcacaguuuu

SEQ ID NO: 1686519 - RNA, 20 nt, Human
gccacuauuguuagucucuu

SEQ ID NO: 1686520 - RNA, 15 nt, Human
gccagacuggcacag

SEQ ID NO: 1686521 - RNA, 18 nt, Human
gccagacuggcacaguuu

SEQ ID NO: 1686522 - RNA, 21 nt, Human
gcccaaugcacuuuguucugg

SEQ ID NO: 1686523 - RNA, 15 nt, Human
gcccagagagggugg

SEQ ID NO: 1686524 - RNA, 12 nt, Human
gcccagagggcc

SEQ ID NO: 1686525 - RNA, 14 nt, Human
gcccagagggccug

SEQ ID NO: 1686526 - RNA, 15 nt, Human
gcccagagggccugc

SEQ ID NO: 1686527 - RNA, 18 nt, Human
gcccagagggccugcaag

SEQ ID NO: 1686528 - RNA, 19 nt, Human
gcccagagggccugcaagg

SEQ ID NO: 1686529 - RNA, 22 nt, Human
gcccagagggccugcaagggag

SEQ ID NO: 1686530 - RNA, 20 nt, Human
gcccagagggccugcaaggg

SEQ ID NO: 1686531 - RNA, 21 nt, Human
gcccagagggccugcaaggga

SEQ ID NO: 1686532 - RNA, 9 nt, Human
gcccagccc

SEQ ID NO: 1686533 - RNA, 11 nt, Human
gcccagccccu

SEQ ID NO: 1686534 - RNA, 12 nt, Human
gcccagccccuu

SEQ ID NO: 1686535 - RNA, 21 nt, Human
gcccagcuugaaaccuucacu

SEQ ID NO: 1686536 - RNA, 20 nt, Human
gcccagccccuucugaccca

SEQ ID NO: 1686537 - RNA, 24 nt, Human
gcccagccccuucugacccaugcu

SEQ ID NO: 1686538 - RNA, 13 nt, Human
gcccagccccuuc

SEQ ID NO: 1686539 - RNA, 14 nt, Human
gcccagccccuucu

SEQ ID NO: 1686540 - RNA, 16 nt, Human
gcccagccccuucuga

SEQ ID NO: 1686541 - RNA, 17 nt, Human
gcccagccccuucugac

SEQ ID NO: 1686542 - RNA, 22 nt, Human
gcccaggcuggcgugcaguggu

SEQ ID NO: 1686543 - RNA, 19 nt, Human
gcccaggcuggcgugcagu

SEQ ID NO: 1686544 - RNA, 20 nt, Human
gcccaggcuggcgugcagug

SEQ ID NO: 1686545 - RNA, 18 nt, Human
gcccaggaaaggcuccag

SEQ ID NO: 1686546 - RNA, 19 nt, Human
gcccaggaaaggcuccagg

SEQ ID NO: 1686547 - RNA, 20 nt, Human
gcccaggaaaggcuccagga

SEQ ID NO: 1686548 - RNA, 21 nt, Human
gcccaggaaaggcuccaggag

SEQ ID NO: 1686549 - RNA, 23 nt, Human
gcccaggcuuagucacugagaca

SEQ ID NO: 1686550 - RNA, 19 nt, Human
gcccaggcuuagucacuga

SEQ ID NO: 1686551 - RNA, 21 nt, Human
gcccaggcuuagucacugaga

SEQ ID NO: 1686552 - RNA, 19 nt, Human
gcccagucuggaaugcagu

SEQ ID NO: 1686553 - RNA, 20 nt, Human
gcccagucuggaaugcagug

SEQ ID NO: 1686554 - RNA, 19 nt, Human
gccaugccagcuuaucuca

SEQ ID NO: 1686555 - RNA, 13 nt, Human
gccaugccagcuu

SEQ ID NO: 1686556 - RNA, 18 nt, Human
gccaugccagcuuaucuc

SEQ ID NO: 1686557 - RNA, 18 nt, Human
gccaugaggaacaaggca

SEQ ID NO: 1686558 - RNA, 20 nt, Human
gccaugaggaacaaggcaag

SEQ ID NO: 1686559 - RNA, 19 nt, Human
gccaucucaccuccugcug

SEQ ID NO: 1686560 - RNA, 20 nt, Human
gccaucucaccuccugcugg

SEQ ID NO: 1686561 - RNA, 21 nt, Human
gccaucucaccuccugcuggg

SEQ ID NO: 1686562 - RNA, 14 nt, Human
gcccaaccugcucu

SEQ ID NO: 1686563 - RNA, 15 nt, Human
gcccaaagaugcagc

SEQ ID NO: 1686564 - RNA, 23 nt, Human
gccaugggacagggaggacgcuc

SEQ ID NO: 1686565 - RNA, 12 nt, Human
gccaguaaaugg

SEQ ID NO: 1686566 - RNA, 17 nt, Human
gccagguuuuuggucug

SEQ ID NO: 1686567 - RNA, 21 nt, Human
gccagucaccccggccaccug

SEQ ID NO: 1686568 - RNA, 20 nt, Human
gccagucaccccggccaccu

SEQ ID NO: 1686569 - RNA, 17 nt, Human
gccagucaccccggcca

SEQ ID NO: 1686570 - RNA, 18 nt, Human
gccagucaccccggccac

SEQ ID NO: 1686571 - RNA, 22 nt, Human
gccaggcuggucucgaacuccu

SEQ ID NO: 1686572 - RNA, 13 nt, Human
gccagggacagag

SEQ ID NO: 1686573 - RNA, 16 nt, Human
gccagggacagagggg

SEQ ID NO: 1686574 - RNA, 18 nt, Human
gccagggacagagggggu

SEQ ID NO: 1686575 - RNA, 23 nt, Human
gccagggacagaggggguggccu

SEQ ID NO: 1686576 - RNA, 16 nt, Human
gccagauuucacucuc

SEQ ID NO: 1686577 - RNA, 18 nt, Human
gccagauuucacucuccu

SEQ ID NO: 1686578 - RNA, 21 nt, Human
gccagauuucacucuccuugg

SEQ ID NO: 1686579 - RNA, 22 nt, Human
gccaggcugcucuugaacuccu

SEQ ID NO: 1686580 - RNA, 13 nt, Human
gccaggcuggguc

SEQ ID NO: 1686581 - RNA, 13 nt, Human
gccaggcugcucu

SEQ ID NO: 1686582 - RNA, 14 nt, Human
gccaggcugcucuu

SEQ ID NO: 1686583 - RNA, 19 nt, Human
gccagauuuuccugaaaac

SEQ ID NO: 1686584 - RNA, 18 nt, Human
gcagcucagagagggugg

SEQ ID NO: 1686585 - RNA, 19 nt, Human
gcagcucagagaggguggg

SEQ ID NO: 1686586 - RNA, 16 nt, Human
gcagcucaccucuccc

SEQ ID NO: 1686587 - RNA, 17 nt, Human
gcagcucaccucucccu

SEQ ID NO: 1686588 - RNA, 20 nt, Human
gcagcucaccucucccuugg

SEQ ID NO: 1686589 - RNA, 21 nt, Human
gcagcucaccucucccuugga

SEQ ID NO: 1686590 - RNA, 14 nt, Human
gcagcucagagagg

SEQ ID NO: 1686591 - RNA, 24 nt, Human
gcagcccugcuuugggcugcccug

SEQ ID NO: 1686592 - RNA, 14 nt, Human
gcagcccugcuuug

SEQ ID NO: 1686593 - RNA, 20 nt, Human
gcagcagggagggcuucugc

SEQ ID NO: 1686594 - RNA, 18 nt, Human
gcagcagggagggcuucu

SEQ ID NO: 1686595 - RNA, 19 nt, Human
gcagcagggagggcuucug

SEQ ID NO: 1686596 - RNA, 15 nt, Human
gcagccucacagucc

SEQ ID NO: 1686597 - RNA, 17 nt, Human
gcagccucacaguccuu

SEQ ID NO: 1686598 - RNA, 19 nt, Human
gcagccucacaguccuuac

SEQ ID NO: 1686599 - RNA, 22 nt, Human
gcagagaccaucccugaaggcc

SEQ ID NO: 1686600 - RNA, 20 nt, Human
gcagagaccaucccugaagg

SEQ ID NO: 1686601 - RNA, 21 nt, Human
gcagagaccaucccugaaggc

SEQ ID NO: 1686602 - RNA, 22 nt, Human
gcacuucgggaggucgaggcag

SEQ ID NO: 1686603 - RNA, 14 nt, Human
gcacuugcagacuc

SEQ ID NO: 1686604 - RNA, 16 nt, Human
gcacuugcagacucua

SEQ ID NO: 1686605 - RNA, 17 nt, Human
gcagacucuacagaggc

SEQ ID NO: 1686606 - RNA, 18 nt, Human
gcagacucuacagaggcc

SEQ ID NO: 1686607 - RNA, 19 nt, Human
gcagacucuacagaggcca

SEQ ID NO: 1686608 - RNA, 22 nt, Human
gcagacucuacagaggccaugg

SEQ ID NO: 1686609 - RNA, 13 nt, Human
gcagauuauucac

SEQ ID NO: 1686610 - RNA, 16 nt, Human
gcagauuauucacuga

SEQ ID NO: 1686611 - RNA, 18 nt, Human
gcagauguccuugaugcu

SEQ ID NO: 1686612 - RNA, 18 nt, Human
gcagauggagaccccuug

SEQ ID NO: 1686613 - RNA, 23 nt, Human
gcagagguugcagugagccgaga

SEQ ID NO: 1686614 - RNA, 21 nt, Human
gcagagguccacaacacacag

SEQ ID NO: 1686615 - RNA, 18 nt, Human
gcagagguugcagugagc

SEQ ID NO: 1686616 - RNA, 12 nt, Human
gcacugggcuug

SEQ ID NO: 1686617 - RNA, 19 nt, Human
gcacuguuuuauuuuaauu

SEQ ID NO: 1686618 - RNA, 14 nt, Human
gcacugggcuuggg

SEQ ID NO: 1686619 - RNA, 22 nt, Human
gcacuauaauguaagcucuacu

SEQ ID NO: 1686620 - RNA, 20 nt, Human
gcacuauaauguaagcucua

SEQ ID NO: 1686621 - RNA, 14 nt, Human
gcacuauaauguaa

SEQ ID NO: 1686622 - RNA, 15 nt, Human
gcacuauaauguaag

SEQ ID NO: 1686623 - RNA, 12 nt, Human
gcacugcuucca

SEQ ID NO: 1686624 - RNA, 13 nt, Human
gcacugcuuccag

SEQ ID NO: 1686625 - RNA, 14 nt, Human
gcacugcuuccagu

SEQ ID NO: 1686626 - RNA, 15 nt, Human
gcacugcuuccagug

SEQ ID NO: 1686627 - RNA, 16 nt, Human
gcacccucaggcaggu

SEQ ID NO: 1686628 - RNA, 19 nt, Human
gcacccucaggcagguggg

SEQ ID NO: 1686629 - RNA, 14 nt, Human
gcacgugugugcac

SEQ ID NO: 1686630 - RNA, 20 nt, Human
gcacuaaggugugcucugau

SEQ ID NO: 1686631 - RNA, 17 nt, Human
gcaccaucucuccuccu

SEQ ID NO: 1686632 - RNA, 14 nt, Human
gcaccagcagccug

SEQ ID NO: 1686633 - RNA, 13 nt, Human
gcaccagcagccu

SEQ ID NO: 1686634 - RNA, 14 nt, Human
gcaccaucucuccu

SEQ ID NO: 1686635 - RNA, 15 nt, Human
gcaccaucucuccuc

SEQ ID NO: 1686636 - RNA, 20 nt, Human
gauugugucucuugguccug

SEQ ID NO: 1686637 - RNA, 15 nt, Human
gcacagccucuuaga

SEQ ID NO: 1686638 - RNA, 16 nt, Human
gcacagggcaguggga

SEQ ID NO: 1686639 - RNA, 23 nt, Human
gcacagcuucauuuccugugucu

SEQ ID NO: 1686640 - RNA, 18 nt, Human
gcacagccucuuagaugc

SEQ ID NO: 1686641 - RNA, 18 nt, Human
gcauuugaggucuguucu

SEQ ID NO: 1686642 - RNA, 22 nt, Human
gcauuccccaggaggccagccu

SEQ ID NO: 1686643 - RNA, 14 nt, Human
gcauuccccaggag

SEQ ID NO: 1686644 - RNA, 15 nt, Human
gcauuccccaggagg

SEQ ID NO: 1686645 - RNA, 16 nt, Human
gcauuccccaggaggc

SEQ ID NO: 1686646 - RNA, 17 nt, Human
gcauuccccaggaggcc

SEQ ID NO: 1686647 - RNA, 18 nt, Human
gcauuccccaggaggcca

SEQ ID NO: 1686648 - RNA, 19 nt, Human
gcauuccccaggaggccag

SEQ ID NO: 1686649 - RNA, 20 nt, Human
gcauuccccaggaggccagc

SEQ ID NO: 1686650 - RNA, 21 nt, Human
gcauuccccaggaggccagcc

SEQ ID NO: 1686651 - RNA, 24 nt, Human
gcauuaucuagauacuguaucaug

SEQ ID NO: 1686652 - RNA, 22 nt, Human
gcauuaucuagauacuguauca

SEQ ID NO: 1686653 - RNA, 15 nt, Human
gcaugccuggauggg

SEQ ID NO: 1686654 - RNA, 13 nt, Human
gcauguuacauaa

SEQ ID NO: 1686655 - RNA, 14 nt, Human
gcauguucucugag

SEQ ID NO: 1686656 - RNA, 14 nt, Human
gcaugccuggaugg

SEQ ID NO: 1686657 - RNA, 15 nt, Human
gcaucucagcccaca

SEQ ID NO: 1686658 - RNA, 22 nt, Human
gcaugaaguaauaugcacacau

SEQ ID NO: 1686659 - RNA, 21 nt, Human
gcaugaaguaauaugcacaca

SEQ ID NO: 1686660 - RNA, 20 nt, Human
gcaugaaguaauaugcacac

SEQ ID NO: 1686661 - RNA, 23 nt, Human
gcaugaaguaauaugcacacauu

SEQ ID NO: 1686662 - RNA, 21 nt, Human
gcaugacacgaauauugcuga

SEQ ID NO: 1686663 - RNA, 22 nt, Human
gcaugacacgaauauugcugau

SEQ ID NO: 1686664 - RNA, 12 nt, Human
gcaucucagccc

SEQ ID NO: 1686665 - RNA, 13 nt, Human
gcaucucagccca

SEQ ID NO: 1686666 - RNA, 14 nt, Human
gcaucucagcccac

SEQ ID NO: 1686667 - RNA, 23 nt, Human
gcaucagugcccuccaggauaga

SEQ ID NO: 1686668 - RNA, 15 nt, Human
gcaucagugcccucc

SEQ ID NO: 1686669 - RNA, 23 nt, Human
gcaucaggccaggcccucugccc

SEQ ID NO: 1686670 - RNA, 18 nt, Human
gcaucaggccaggcccuc

SEQ ID NO: 1686671 - RNA, 13 nt, Human
gcaucaggccagg

SEQ ID NO: 1686672 - RNA, 12 nt, Human
gcaucaggccag

SEQ ID NO: 1686673 - RNA, 23 nt, Human
gcaucagcugcugaaacaacaaa

SEQ ID NO: 1686674 - RNA, 22 nt, Human
gcaucagcugcugaaacaacaa

SEQ ID NO: 1686675 - RNA, 18 nt, Human
gcaggcagccaggccaca

SEQ ID NO: 1686676 - RNA, 17 nt, Human
gcaggcagccaggccac

SEQ ID NO: 1686677 - RNA, 14 nt, Human
gcaggucccuaaua

SEQ ID NO: 1686678 - RNA, 15 nt, Human
gcaggucccuaauaa

SEQ ID NO: 1686679 - RNA, 19 nt, Human
gcaggguccuagaaauucc

SEQ ID NO: 1686680 - RNA, 16 nt, Human
gcagggucucacucug

SEQ ID NO: 1686681 - RNA, 22 nt, Human
gcaggggaggguagagcggaga

SEQ ID NO: 1686682 - RNA, 16 nt, Human
gcaggucccuaauaaa

SEQ ID NO: 1686683 - RNA, 17 nt, Human
gcaggucccuaauaaag

SEQ ID NO: 1686684 - RNA, 18 nt, Human
gcaggucccuaauaaagc

SEQ ID NO: 1686685 - RNA, 19 nt, Human
gcaggucccuaauaaagcu

SEQ ID NO: 1686686 - RNA, 20 nt, Human
gcaggucccuaauaaagcug

SEQ ID NO: 1686687 - RNA, 21 nt, Human
gcaggucccuaauaaagcugu

SEQ ID NO: 1686688 - RNA, 23 nt, Human
gcaggucccuaauaaagcugugu

SEQ ID NO: 1686689 - RNA, 21 nt, Human
gcagugggacagggcauggcc

SEQ ID NO: 1686690 - RNA, 11 nt, Human
gcagugggagc

SEQ ID NO: 1686691 - RNA, 12 nt, Human
gcagugggagcu

SEQ ID NO: 1686692 - RNA, 18 nt, Human
gcaguggugcgaucuggg

SEQ ID NO: 1686693 - RNA, 19 nt, Human
gcaguggugcgaucugggu

SEQ ID NO: 1686694 - RNA, 19 nt, Human
gcaguggugguuuucuguu

SEQ ID NO: 1686695 - RNA, 22 nt, Human
gcaguggugcgaucuggguuca

SEQ ID NO: 1686696 - RNA, 20 nt, Human
gcaguggugcgaucuggguu

SEQ ID NO: 1686697 - RNA, 21 nt, Human
gcaguggugcgaucuggguuc

SEQ ID NO: 1686698 - RNA, 21 nt, Human
gcaguggugguuuucuguucu

SEQ ID NO: 1686699 - RNA, 20 nt, Human
gcaguggugguuuucuguuc

SEQ ID NO: 1686700 - RNA, 23 nt, Human
gcaguucagagcugcccucuccu

SEQ ID NO: 1686701 - RNA, 22 nt, Human
gcaguucagagcugcccucucc

SEQ ID NO: 1686702 - RNA, 20 nt, Human
gcaguucagagcugcccucu

SEQ ID NO: 1686703 - RNA, 19 nt, Human
gcaguucagagcugcccuc

SEQ ID NO: 1686704 - RNA, 22 nt, Human
gcaguggugguuuucuguucuu

SEQ ID NO: 1686705 - RNA, 16 nt, Human
gcaguugaaaagacuc

SEQ ID NO: 1686706 - RNA, 19 nt, Human
gcaguugaaaagacuccaa

SEQ ID NO: 1686707 - RNA, 19 nt, Human
gcauacguacacauuuuau

SEQ ID NO: 1686708 - RNA, 21 nt, Human
gcaguugaaaagacuccaaag

SEQ ID NO: 1686709 - RNA, 16 nt, Human
gaguacguugugcauu

SEQ ID NO: 1686710 - RNA, 19 nt, Human
gagguuuuaaaaaaauccc

SEQ ID NO: 1686711 - RNA, 19 nt, Human
gagguucaaagauauuuug

SEQ ID NO: 1686712 - RNA, 14 nt, Human
gagguucccuuuga

SEQ ID NO: 1686713 - RNA, 20 nt, Human
gaguacguugugcauuuggu

SEQ ID NO: 1686714 - RNA, 15 nt, Human
gaguacuacaguccu

SEQ ID NO: 1686715 - RNA, 18 nt, Human
gaguacguugugcauuug

SEQ ID NO: 1686716 - RNA, 17 nt, Human
gaguacguugugcauuu

SEQ ID NO: 1686717 - RNA, 18 nt, Human
gaguacuacaguccuccc

SEQ ID NO: 1686718 - RNA, 19 nt, Human
gaguacuacaguccuccca

SEQ ID NO: 1686719 - RNA, 22 nt, Human
gaggggggaggugggauccucc

SEQ ID NO: 1686720 - RNA, 18 nt, Human
gagguccacaacacacag

SEQ ID NO: 1686721 - RNA, 15 nt, Human
gaggggguggccucc

SEQ ID NO: 1686722 - RNA, 15 nt, Human
gaggggggagguggg

SEQ ID NO: 1686723 - RNA, 21 nt, Human
gaggugggauccuccaggugc

SEQ ID NO: 1686724 - RNA, 22 nt, Human
gaggugggauccuccaggugca

SEQ ID NO: 1686725 - RNA, 18 nt, Human
gaggugggauccuccagg

SEQ ID NO: 1686726 - RNA, 14 nt, Human
gagucucuucucca

SEQ ID NO: 1686727 - RNA, 15 nt, Human
gagucucuucuccac

SEQ ID NO: 1686728 - RNA, 16 nt, Human
gagucucuucuccacu

SEQ ID NO: 1686729 - RNA, 17 nt, Human
gagucucuucuccacug

SEQ ID NO: 1686730 - RNA, 18 nt, Human
gagucucuucuccacugg

SEQ ID NO: 1686731 - RNA, 21 nt, Human
gagucugaaggcuggguucug

SEQ ID NO: 1686732 - RNA, 23 nt, Human
gagucucgcuauugucaccaggg

SEQ ID NO: 1686733 - RNA, 12 nt, Human
gagucucuucuc

SEQ ID NO: 1686734 - RNA, 22 nt, Human
gagucucacuguugcccaggcu

SEQ ID NO: 1686735 - RNA, 23 nt, Human
gagucucacuguugcccaggcug

SEQ ID NO: 1686736 - RNA, 19 nt, Human
gagucucacuguugcccag

SEQ ID NO: 1686737 - RNA, 20 nt, Human
gagucucacuguugcccagg

SEQ ID NO: 1686738 - RNA, 21 nt, Human
gagucucacuguugcccaggc

SEQ ID NO: 1686739 - RNA, 17 nt, Human
gagucgaggacagggag

SEQ ID NO: 1686740 - RNA, 14 nt, Human
gaguccccuguuug

SEQ ID NO: 1686741 - RNA, 23 nt, Human
gaguccccuguuuguuucugaaa

SEQ ID NO: 1686742 - RNA, 18 nt, Human
gagucccaggcugagccu

SEQ ID NO: 1686743 - RNA, 19 nt, Human
gagucccaggcugagccuc

SEQ ID NO: 1686744 - RNA, 12 nt, Human
gaguccccuguu

SEQ ID NO: 1686745 - RNA, 12 nt, Human
gaguagcuggga

SEQ ID NO: 1686746 - RNA, 14 nt, Human
gaguagcugggacu

SEQ ID NO: 1686747 - RNA, 17 nt, Human
gagugugccugaagucc

SEQ ID NO: 1686748 - RNA, 23 nt, Human
gaguucaucuugaauuguaagga

SEQ ID NO: 1686749 - RNA, 14 nt, Human
gaguugaagacaga

SEQ ID NO: 1686750 - RNA, 21 nt, Human
gaguugaaaaucuuauaauuu

SEQ ID NO: 1686751 - RNA, 13 nt, Human
gaguggcuccucc

SEQ ID NO: 1686752 - RNA, 15 nt, Human
gaguggcuccucccg

SEQ ID NO: 1686753 - RNA, 12 nt, Human
gagugggcccaa

SEQ ID NO: 1686754 - RNA, 23 nt, Human
gagugggggaucacagccucuga

SEQ ID NO: 1686755 - RNA, 22 nt, Human
gagugaacaaauuuacagagac

SEQ ID NO: 1686756 - RNA, 23 nt, Human
gagugaacaaauuuacagagaca

SEQ ID NO: 1686757 - RNA, 19 nt, Human
gagugaacaaauuuacaga

SEQ ID NO: 1686758 - RNA, 21 nt, Human
gauauaaguguguguuuuuca

SEQ ID NO: 1686759 - RNA, 17 nt, Human
gauauaaguguguguuu

SEQ ID NO: 1686760 - RNA, 13 nt, Human
gauagccaaggcc

SEQ ID NO: 1686761 - RNA, 14 nt, Human
gauagccaaggcca

SEQ ID NO: 1686762 - RNA, 12 nt, Human
gauagccaaggc

SEQ ID NO: 1686763 - RNA, 19 nt, Human
gauagcacagacccugccc

SEQ ID NO: 1686764 - RNA, 20 nt, Human
gauagcacagacccugcccu

SEQ ID NO: 1686765 - RNA, 22 nt, Human
gaucaaccccuucgcuccugug

SEQ ID NO: 1686766 - RNA, 23 nt, Human
gauauaugcucugcauguuacau

SEQ ID NO: 1686767 - RNA, 15 nt, Human
gauagaggaagccug

SEQ ID NO: 1686768 - RNA, 21 nt, Human
gauagaggaagccugauuaaa

SEQ ID NO: 1686769 - RNA, 22 nt, Human
gauagaggaagccugauuaaag

SEQ ID NO: 1686770 - RNA, 17 nt, Human
gauagcacagacccugc

SEQ ID NO: 1686771 - RNA, 18 nt, Human
gauagcacagacccugcc

SEQ ID NO: 1686772 - RNA, 18 nt, Human
gauacaaugcugugcccu

SEQ ID NO: 1686773 - RNA, 13 nt, Human
gauacaaugcugu

SEQ ID NO: 1686774 - RNA, 14 nt, Human
gauagaggaagccu

SEQ ID NO: 1686775 - RNA, 20 nt, Human
gaugugcuuguuaacugagu

SEQ ID NO: 1686776 - RNA, 16 nt, Human
gauguucugggacaca

SEQ ID NO: 1686777 - RNA, 19 nt, Human
gaugugcuuguuaacugag

SEQ ID NO: 1686778 - RNA, 23 nt, Human
gauggugcaaugaccuuucaaua

SEQ ID NO: 1686779 - RNA, 20 nt, Human
gauggugcaaugaccuuuca

SEQ ID NO: 1686780 - RNA, 19 nt, Human
gauucaacagguuuuccug

SEQ ID NO: 1686781 - RNA, 18 nt, Human
gauuaaccacuucagcug

SEQ ID NO: 1686782 - RNA, 19 nt, Human
gauuaaccacuucagcuga

SEQ ID NO: 1686783 - RNA, 21 nt, Human
gauuaaccacuucagcugacu

SEQ ID NO: 1686784 - RNA, 19 nt, Human
gauuaaauucuugcaaagu

SEQ ID NO: 1686785 - RNA, 12 nt, Human
gauuaaauucuu

SEQ ID NO: 1686786 - RNA, 15 nt, Human
gauguuuuccaugag

SEQ ID NO: 1686787 - RNA, 23 nt, Human
gauguuuuccaugaguccccugu

SEQ ID NO: 1686788 - RNA, 14 nt, Human
gauguuuuccauga

SEQ ID NO: 1686789 - RNA, 21 nt, Human
gauguucuuucacccuuuucu

SEQ ID NO: 1686790 - RNA, 19 nt, Human
gauguugaaaaaguucugc

SEQ ID NO: 1686791 - RNA, 12 nt, Human
gauucagacagc

SEQ ID NO: 1686792 - RNA, 22 nt, Human
gauucccaagcucugcuccucu

SEQ ID NO: 1686793 - RNA, 23 nt, Human
gauugacgggacuguugguauug

SEQ ID NO: 1686794 - RNA, 15 nt, Human
gauuguccccgaccc

SEQ ID NO: 1686795 - RNA, 20 nt, Human
gauuguccccgacccuugcc

SEQ ID NO: 1686796 - RNA, 13 nt, Human
gauugugccccug

SEQ ID NO: 1686797 - RNA, 14 nt, Human
gaugacuauggaaa

SEQ ID NO: 1686798 - RNA, 11 nt, Human
gaugagaaagg

SEQ ID NO: 1686799 - RNA, 22 nt, Human
gaugagaaagguugaagcacca

SEQ ID NO: 1686800 - RNA, 23 nt, Human
gaugagaaauaaaguuucuguug

SEQ ID NO: 1686801 - RNA, 18 nt, Human
gaugcaguucugaagaag

SEQ ID NO: 1686802 - RNA, 21 nt, Human
gaugccuggcgggguggggug

SEQ ID NO: 1686803 - RNA, 14 nt, Human
gaugccugguggca

SEQ ID NO: 1686804 - RNA, 22 nt, Human
gaugggcaacccccagccugcu

SEQ ID NO: 1686805 - RNA, 16 nt, Human
gaugggaaagcauugu

SEQ ID NO: 1686806 - RNA, 16 nt, Human
gaucacgccacugcac

SEQ ID NO: 1686807 - RNA, 11 nt, Human
gauccuccagg

SEQ ID NO: 1686808 - RNA, 15 nt, Human
gaucacgccacugca

SEQ ID NO: 1686809 - RNA, 18 nt, Human
gauccuaguuccaccauc

SEQ ID NO: 1686810 - RNA, 23 nt, Human
gaucaaccccuucgcuccugugu

SEQ ID NO: 1686811 - RNA, 13 nt, Human
gaucacgccacug

SEQ ID NO: 1686812 - RNA, 14 nt, Human
gaucacgccacugc

SEQ ID NO: 1686813 - RNA, 12 nt, Human
gauccuccaggu

SEQ ID NO: 1686814 - RNA, 19 nt, Human
gauccucccaccucagccu

SEQ ID NO: 1686815 - RNA, 20 nt, Human
gauccucccaccucagccuc

SEQ ID NO: 1686816 - RNA, 21 nt, Human
gauccucccaccucagccucc

SEQ ID NO: 1686817 - RNA, 14 nt, Human
gauccugagccaga

SEQ ID NO: 1686818 - RNA, 15 nt, Human
gauccugagccagau

SEQ ID NO: 1686819 - RNA, 19 nt, Human
gauccugagccagauuuca

SEQ ID NO: 1686820 - RNA, 15 nt, Human
gauccuuuuggaguc

SEQ ID NO: 1686821 - RNA, 17 nt, Human
gauccuuuuggagucag

SEQ ID NO: 1686822 - RNA, 17 nt, Human
gaucuuugcagacaggc

SEQ ID NO: 1686823 - RNA, 15 nt, Human
gaugaaaaaauaaca

SEQ ID NO: 1686824 - RNA, 16 nt, Human
gaucuuugcagacagg

SEQ ID NO: 1686825 - RNA, 14 nt, Human
gaucuuuaaaauac

SEQ ID NO: 1686826 - RNA, 13 nt, Human
gaggacagggagg

SEQ ID NO: 1686827 - RNA, 22 nt, Human
gaggacagggaggugaccccag

SEQ ID NO: 1686828 - RNA, 23 nt, Human
gaggacagggaggugaccccagg

SEQ ID NO: 1686829 - RNA, 16 nt, Human
gaggaauucuguauag

SEQ ID NO: 1686830 - RNA, 17 nt, Human
gaggaauucuguauaga

SEQ ID NO: 1686831 - RNA, 14 nt, Human
gaggaauucuguau

SEQ ID NO: 1686832 - RNA, 15 nt, Human
gaggaauccagaccc

SEQ ID NO: 1686833 - RNA, 22 nt, Human
gagcuugaaacccguggcgcuu

SEQ ID NO: 1686834 - RNA, 21 nt, Human
gagcuucuguugcugccucau

SEQ ID NO: 1686835 - RNA, 22 nt, Human
gaggaaggaaacccagcucugg

SEQ ID NO: 1686836 - RNA, 14 nt, Human
gaggaauccagacc

SEQ ID NO: 1686837 - RNA, 12 nt, Human
gaggauguucug

SEQ ID NO: 1686838 - RNA, 17 nt, Human
gaggauguucugggaca

SEQ ID NO: 1686839 - RNA, 20 nt, Human
gaggauguucugggacacag

SEQ ID NO: 1686840 - RNA, 16 nt, Human
gaggauugcuugagcu

SEQ ID NO: 1686841 - RNA, 23 nt, Human
gaggaguuugggguaugggagag

SEQ ID NO: 1686842 - RNA, 13 nt, Human
gaggcagccccau

SEQ ID NO: 1686843 - RNA, 23 nt, Human
gaggcagccccauucugccugcc

SEQ ID NO: 1686844 - RNA, 18 nt, Human
gaggcagccccauucugc

SEQ ID NO: 1686845 - RNA, 22 nt, Human
gaggcagccccauucugccugc

SEQ ID NO: 1686846 - RNA, 12 nt, Human
gaggccagccuu

SEQ ID NO: 1686847 - RNA, 13 nt, Human
gaggccagccuug

SEQ ID NO: 1686848 - RNA, 14 nt, Human
gagggagggagggc

SEQ ID NO: 1686849 - RNA, 15 nt, Human
gagggagggagggcu

SEQ ID NO: 1686850 - RNA, 15 nt, Human
gagggagggcuccag

SEQ ID NO: 1686851 - RNA, 13 nt, Human
gaggggccuggca

SEQ ID NO: 1686852 - RNA, 14 nt, Human
gaggggccuggcag

SEQ ID NO: 1686853 - RNA, 18 nt, Human
gaggggccuggcagccgu

SEQ ID NO: 1686854 - RNA, 20 nt, Human
gaggggccuggcagccgugc

SEQ ID NO: 1686855 - RNA, 22 nt, Human
gaggggccucuuaugggcuggg

SEQ ID NO: 1686856 - RNA, 16 nt, Human
gagggcacugguggcc

SEQ ID NO: 1686857 - RNA, 18 nt, Human
gagggcacugguggcccg

SEQ ID NO: 1686858 - RNA, 12 nt, Human
gagggcacuggu

SEQ ID NO: 1686859 - RNA, 23 nt, Human
gagggcacagaaaauggaagaca

SEQ ID NO: 1686860 - RNA, 14 nt, Human
gagggcacagaaaa

SEQ ID NO: 1686861 - RNA, 22 nt, Human
gagggcacagaaaauggaagac

SEQ ID NO: 1686862 - RNA, 13 nt, Human
gagggagugacag

SEQ ID NO: 1686863 - RNA, 14 nt, Human
gagggagugacaga

SEQ ID NO: 1686864 - RNA, 16 nt, Human
gagggagggcuccaga

SEQ ID NO: 1686865 - RNA, 16 nt, Human
gagggagugacagagg

SEQ ID NO: 1686866 - RNA, 18 nt, Human
gaggcuacuguaaggcaa

SEQ ID NO: 1686867 - RNA, 20 nt, Human
gaggcguauguggcaaaaug

SEQ ID NO: 1686868 - RNA, 13 nt, Human
gaggcugggcucc

SEQ ID NO: 1686869 - RNA, 14 nt, Human
gaggcugggcuccc

SEQ ID NO: 1686870 - RNA, 16 nt, Human
gaggcugggcucccuu

SEQ ID NO: 1686871 - RNA, 15 nt, Human
gaggcugggcucccu

SEQ ID NO: 1686872 - RNA, 14 nt, Human
gaggccuucucuga

SEQ ID NO: 1686873 - RNA, 24 nt, Human
gaggcccuucucuccagccccugg

SEQ ID NO: 1686874 - RNA, 14 nt, Human
gaggcccuucucuc

SEQ ID NO: 1686875 - RNA, 23 nt, Human
gaggcccuucucuccagccccug

SEQ ID NO: 1686876 - RNA, 13 nt, Human
gaggcccggccuc

SEQ ID NO: 1686877 - RNA, 19 nt, Human
gaggcccccaucuccuuaa

SEQ ID NO: 1686878 - RNA, 23 nt, Human
gagcuacacaggggaaaagagga

SEQ ID NO: 1686879 - RNA, 14 nt, Human
gagcuacaaaugca

SEQ ID NO: 1686880 - RNA, 14 nt, Human
gagcuucuggcacu

SEQ ID NO: 1686881 - RNA, 18 nt, Human
gagcuucuguugcugccu

SEQ ID NO: 1686882 - RNA, 15 nt, Human
gagcuuaacagugug

SEQ ID NO: 1686883 - RNA, 17 nt, Human
gagcugcccucuccugg

SEQ ID NO: 1686884 - RNA, 16 nt, Human
gagcugcccucuccug

SEQ ID NO: 1686885 - RNA, 15 nt, Human
gagcugcccucuccu

SEQ ID NO: 1686886 - RNA, 16 nt, Human
gagcucugcagagcag

SEQ ID NO: 1686887 - RNA, 13 nt, Human
gagcugccaccug

SEQ ID NO: 1686888 - RNA, 15 nt, Human
gagcugccaccugcc

SEQ ID NO: 1686889 - RNA, 16 nt, Human
gagcugccaccugccu

SEQ ID NO: 1686890 - RNA, 14 nt, Human
gagcugcccucucc

SEQ ID NO: 1686891 - RNA, 23 nt, Human
gagccugcacggugaauggcuuu

SEQ ID NO: 1686892 - RNA, 17 nt, Human
gagccugcacggugaau

SEQ ID NO: 1686893 - RNA, 22 nt, Human
gagccugcacggugaauggcuu

SEQ ID NO: 1686894 - RNA, 20 nt, Human
gagccuccugcccuuaccug

SEQ ID NO: 1686895 - RNA, 22 nt, Human
gagccuccugcccuuaccugcc

SEQ ID NO: 1686896 - RNA, 18 nt, Human
gagccucagucucccucc

SEQ ID NO: 1686897 - RNA, 18 nt, Human
gagcccugguggcagugg

SEQ ID NO: 1686898 - RNA, 14 nt, Human
gagccuccugcccu

SEQ ID NO: 1686899 - RNA, 20 nt, Human
gagccucagcauccuggcac

SEQ ID NO: 1686900 - RNA, 21 nt, Human
gagccucagcauccuggcacc

SEQ ID NO: 1686901 - RNA, 15 nt, Human
gagcccugguggcag

SEQ ID NO: 1686902 - RNA, 16 nt, Human
gagcccugguggcagu

SEQ ID NO: 1686903 - RNA, 19 nt, Human
gagccucagcauccuggca

SEQ ID NO: 1686904 - RNA, 17 nt, Human
gagcccugguggcagug

SEQ ID NO: 1686905 - RNA, 15 nt, Human
gagccuggcaagaau

SEQ ID NO: 1686906 - RNA, 10 nt, Human
gagccuggca

SEQ ID NO: 1686907 - RNA, 13 nt, Human
gagccugggaggu

SEQ ID NO: 1686908 - RNA, 21 nt, Human
gagccugggaggucaaggcug

SEQ ID NO: 1686909 - RNA, 13 nt, Human
gagcuacaaaugc

SEQ ID NO: 1686910 - RNA, 12 nt, Human
gagcuacaaaug

SEQ ID NO: 1686911 - RNA, 22 nt, Human
gagccacugcaccgggccacag

SEQ ID NO: 1686912 - RNA, 13 nt, Human
gagccagauuuca

SEQ ID NO: 1686913 - RNA, 13 nt, Human
gagcccaggccuc

SEQ ID NO: 1686914 - RNA, 14 nt, Human
gagcccaggccucc

SEQ ID NO: 1686915 - RNA, 12 nt, Human
gagcccacgccc

SEQ ID NO: 1686916 - RNA, 15 nt, Human
gagcccacgccccca

SEQ ID NO: 1686917 - RNA, 16 nt, Human
gagcccacgcccccac

SEQ ID NO: 1686918 - RNA, 12 nt, Human
gagcccaggccu

SEQ ID NO: 1686919 - RNA, 18 nt, Human
gagcagccacauuccuga

SEQ ID NO: 1686920 - RNA, 14 nt, Human
gagccaccgugccu

SEQ ID NO: 1686921 - RNA, 20 nt, Human
gagccaccgugccuggccac

SEQ ID NO: 1686922 - RNA, 13 nt, Human
gagccacugcacc

SEQ ID NO: 1686923 - RNA, 21 nt, Human
gagcaggcuacugucagcucc

SEQ ID NO: 1686924 - RNA, 13 nt, Human
gagaucagccugg

SEQ ID NO: 1686925 - RNA, 14 nt, Human
gagaucagccuggg

SEQ ID NO: 1686926 - RNA, 16 nt, Human
gagaucagccugggca

SEQ ID NO: 1686927 - RNA, 20 nt, Human
gagaucaaccccuucgcucc

SEQ ID NO: 1686928 - RNA, 19 nt, Human
gagcaccuuagacaguccc

SEQ ID NO: 1686929 - RNA, 17 nt, Human
gagcaccuuagacaguc

SEQ ID NO: 1686930 - RNA, 21 nt, Human
gagcaagacgcugugcugccc

SEQ ID NO: 1686931 - RNA, 18 nt, Human
gagcaagacgcugugcug

SEQ ID NO: 1686932 - RNA, 22 nt, Human
gagcaagacgcugugcugcccu

SEQ ID NO: 1686933 - RNA, 23 nt, Human
gagcaagacgcugugcugcccug

SEQ ID NO: 1686934 - RNA, 19 nt, Human
gagcaaaaucgaugcagug

SEQ ID NO: 1686935 - RNA, 14 nt, Human
cuauuucuauauuu

SEQ ID NO: 1686936 - RNA, 16 nt, Human
cuauuucuauauuuuc

SEQ ID NO: 1686937 - RNA, 18 nt, Human
cuauuucuauauuuucau

SEQ ID NO: 1686938 - RNA, 23 nt, Human
cucaaauacgugggcauucaaau

SEQ ID NO: 1686939 - RNA, 21 nt, Human
cucaacaccucugcacaagcu

SEQ ID NO: 1686940 - RNA, 13 nt, Human
cucaaccuccugg

SEQ ID NO: 1686941 - RNA, 15 nt, Human
cucaaccuccugggc

SEQ ID NO: 1686942 - RNA, 17 nt, Human
cucaaccuccugggcua

SEQ ID NO: 1686943 - RNA, 22 nt, Human
cuauuuaugugauccuuuugga

SEQ ID NO: 1686944 - RNA, 19 nt, Human
cuauugucaccagggcugg

SEQ ID NO: 1686945 - RNA, 18 nt, Human
cuauuguuagucucuuga

SEQ ID NO: 1686946 - RNA, 17 nt, Human
cucaagugauucuccug

SEQ ID NO: 1686947 - RNA, 21 nt, Human
cucaaguccucuuuucugaga

SEQ ID NO: 1686948 - RNA, 22 nt, Human
cucacacaugagcaucaggcca

SEQ ID NO: 1686949 - RNA, 24 nt, Human
cucacacaugagcaucaggccagg

SEQ ID NO: 1686950 - RNA, 15 nt, Human
cucacaguccuuacc

SEQ ID NO: 1686951 - RNA, 17 nt, Human
cucaccagccccagugc

SEQ ID NO: 1686952 - RNA, 18 nt, Human
cucaccagccccagugcc

SEQ ID NO: 1686953 - RNA, 13 nt, Human
cucaccagcccca

SEQ ID NO: 1686954 - RNA, 14 nt, Human
cucaccagccccag

SEQ ID NO: 1686955 - RNA, 15 nt, Human
cucaccagccccagu

SEQ ID NO: 1686956 - RNA, 22 nt, Human
cucacauuuauucugcucacau

SEQ ID NO: 1686957 - RNA, 15 nt, Human
cucacauuuauucug

SEQ ID NO: 1686958 - RNA, 19 nt, Human
cucacauuuauucugcuca

SEQ ID NO: 1686959 - RNA, 17 nt, Human
cucacaguccuuaccag

SEQ ID NO: 1686960 - RNA, 19 nt, Human
cucacaguccuuaccagca

SEQ ID NO: 1686961 - RNA, 22 nt, Human
cucacaguccuuaccagcagag

SEQ ID NO: 1686962 - RNA, 23 nt, Human
cucacaguccuuaccagcagagc

SEQ ID NO: 1686963 - RNA, 15 nt, Human
cucagauuuuauuau

SEQ ID NO: 1686964 - RNA, 17 nt, Human
cucagauuuuauuaugu

SEQ ID NO: 1686965 - RNA, 18 nt, Human
cucagauuuuauuaugua

SEQ ID NO: 1686966 - RNA, 22 nt, Human
cucagauuuuauuauguaaauc

SEQ ID NO: 1686967 - RNA, 13 nt, Human
cucagauuuuauu

SEQ ID NO: 1686968 - RNA, 15 nt, Human
cucagaucuucugug

SEQ ID NO: 1686969 - RNA, 16 nt, Human
cucagcauccuggcac

SEQ ID NO: 1686970 - RNA, 17 nt, Human
cucagcauccuggcacc

SEQ ID NO: 1686971 - RNA, 18 nt, Human
cucagagagggugggagu

SEQ ID NO: 1686972 - RNA, 14 nt, Human
cucagagagggugg

SEQ ID NO: 1686973 - RNA, 21 nt, Human
cucacuguugcccaggcuggc

SEQ ID NO: 1686974 - RNA, 22 nt, Human
cucacuguugcccaggcuggcg

SEQ ID NO: 1686975 - RNA, 19 nt, Human
cucacugccaugccagcuu

SEQ ID NO: 1686976 - RNA, 22 nt, Human
cucacugccaugccagcuuauc

SEQ ID NO: 1686977 - RNA, 20 nt, Human
cucacuguugcccaggcugg

SEQ ID NO: 1686978 - RNA, 19 nt, Human
cucacuauguugcccaggc

SEQ ID NO: 1686979 - RNA, 20 nt, Human
cucacuauguugcccaggca

SEQ ID NO: 1686980 - RNA, 15 nt, Human
cucaccccagcccca

SEQ ID NO: 1686981 - RNA, 13 nt, Human
cucacuccuaccu

SEQ ID NO: 1686982 - RNA, 15 nt, Human
cucacuccuaccugg

SEQ ID NO: 1686983 - RNA, 23 nt, Human
cucacuauguugcccaggcaggu

SEQ ID NO: 1686984 - RNA, 21 nt, Human
cucacuauguugcccaggcag

SEQ ID NO: 1686985 - RNA, 22 nt, Human
cucacuauguugcccaggcagg

SEQ ID NO: 1686986 - RNA, 16 nt, Human
cucacuccuaccuggu

SEQ ID NO: 1686987 - RNA, 17 nt, Human
cucacuccuaccuggua

SEQ ID NO: 1686988 - RNA, 19 nt, Human
cucacuccuaccugguaau

SEQ ID NO: 1686989 - RNA, 13 nt, Human
cucacuccuugaa

SEQ ID NO: 1686990 - RNA, 11 nt, Human
cucacucuguc

SEQ ID NO: 1686991 - RNA, 12 nt, Human
cucacucugucg

SEQ ID NO: 1686992 - RNA, 14 nt, Human
cucacugcagccuc

SEQ ID NO: 1686993 - RNA, 13 nt, Human
cucacugcagccu

SEQ ID NO: 1686994 - RNA, 12 nt, Human
cucacugcagcc

SEQ ID NO: 1686995 - RNA, 22 nt, Human
cucacucugucgcccagucugg

SEQ ID NO: 1686996 - RNA, 13 nt, Human
cucacucugucgc

SEQ ID NO: 1686997 - RNA, 21 nt, Human
cucacucugucgcccagucug

SEQ ID NO: 1686998 - RNA, 20 nt, Human
cuaugcagagguccacaaca

SEQ ID NO: 1686999 - RNA, 13 nt, Human
cuauggccugugg

SEQ ID NO: 1687000 - RNA, 18 nt, Human
cuaugggacucaaugcac

SEQ ID NO: 1687001 - RNA, 22 nt, Human
cuaugggacucaaugcacugac

SEQ ID NO: 1687002 - RNA, 23 nt, Human
cuaugggacucaaugcacugaca

SEQ ID NO: 1687003 - RNA, 15 nt, Human
cuauuagagaagaga

SEQ ID NO: 1687004 - RNA, 23 nt, Human
cuauucaaacagucucaggaaau

SEQ ID NO: 1687005 - RNA, 18 nt, Human
cuauucaaacagucucag

SEQ ID NO: 1687006 - RNA, 16 nt, Human
cuauucaaacagucuc

SEQ ID NO: 1687007 - RNA, 21 nt, Human
cuauaauguaagcucuacuga

SEQ ID NO: 1687008 - RNA, 22 nt, Human
cuauaauuuaccugaagucuuu

SEQ ID NO: 1687009 - RNA, 16 nt, Human
cuauaauguaagcucu

SEQ ID NO: 1687010 - RNA, 19 nt, Human
cuauauuuucauucuccua

SEQ ID NO: 1687011 - RNA, 15 nt, Human
cuauauuuucauucu

SEQ ID NO: 1687012 - RNA, 17 nt, Human
cuauauuuuacauaaau

SEQ ID NO: 1687013 - RNA, 18 nt, Human
cuauauuguuugcuaagc

SEQ ID NO: 1687014 - RNA, 17 nt, Human
cuauagccuaggugaca

SEQ ID NO: 1687015 - RNA, 20 nt, Human
cuauaggugcuacaaaaaca

SEQ ID NO: 1687016 - RNA, 21 nt, Human
cuauaggugcuacaaaaacac

SEQ ID NO: 1687017 - RNA, 22 nt, Human
cuauaggugcuacaaaaacaca

SEQ ID NO: 1687018 - RNA, 22 nt, Human
cuagguaaauuacaguuccuag

SEQ ID NO: 1687019 - RNA, 23 nt, Human
cgcccaguuggguggaugccugg

SEQ ID NO: 1687020 - RNA, 20 nt, Human
cgccaucccagccccaauga

SEQ ID NO: 1687021 - RNA, 15 nt, Human
cgccaugcuccuggc

SEQ ID NO: 1687022 - RNA, 22 nt, Human
cgcccaguuggguggaugccug

SEQ ID NO: 1687023 - RNA, 14 nt, Human
cuaggugacagagu

SEQ ID NO: 1687024 - RNA, 18 nt, Human
cuaggugacagagugaga

SEQ ID NO: 1687025 - RNA, 24 nt, Human
cuaggugacagagugagacucugu

SEQ ID NO: 1687026 - RNA, 16 nt, Human
cuaguaauuggaaagg

SEQ ID NO: 1687027 - RNA, 20 nt, Human
cuagugaaacucguuaauuu

SEQ ID NO: 1687028 - RNA, 18 nt, Human
cuagugaaagaggcagcu

SEQ ID NO: 1687029 - RNA, 19 nt, Human
cuagugaaagaggcagcuu

SEQ ID NO: 1687030 - RNA, 21 nt, Human
cuagugagcagucaggaaaga

SEQ ID NO: 1687031 - RNA, 22 nt, Human
cucauacucaccucaccccacu

SEQ ID NO: 1687032 - RNA, 14 nt, Human
cucauacucaccuc

SEQ ID NO: 1687033 - RNA, 13 nt, Human
cucauagcccuca

SEQ ID NO: 1687034 - RNA, 17 nt, Human
cucauagcccucacccu

SEQ ID NO: 1687035 - RNA, 20 nt, Human
cucauagcccucacccuggg

SEQ ID NO: 1687036 - RNA, 21 nt, Human
cucauagcccucacccugggg

SEQ ID NO: 1687037 - RNA, 21 nt, Human
cucauaguaugguggcugggu

SEQ ID NO: 1687038 - RNA, 22 nt, Human
cucaggugauccacccaccuca

SEQ ID NO: 1687039 - RNA, 20 nt, Human
cucaggugauccacccaccu

SEQ ID NO: 1687040 - RNA, 18 nt, Human
cucaggugauccacccac

SEQ ID NO: 1687041 - RNA, 19 nt, Human
cucaggugauccacccacc

SEQ ID NO: 1687042 - RNA, 16 nt, Human
cucauacccaccccca

SEQ ID NO: 1687043 - RNA, 18 nt, Human
cucauacccacccccacc

SEQ ID NO: 1687044 - RNA, 19 nt, Human
cucauacccacccccaccc

SEQ ID NO: 1687045 - RNA, 21 nt, Human
cucauacccacccccacccaa

SEQ ID NO: 1687046 - RNA, 22 nt, Human
cucaucaccaacgucugugcca

SEQ ID NO: 1687047 - RNA, 21 nt, Human
cucaucaccaacgucugugcc

SEQ ID NO: 1687048 - RNA, 23 nt, Human
cucauaguaugguggcuggguug

SEQ ID NO: 1687049 - RNA, 15 nt, Human
cucauccucauaccc

SEQ ID NO: 1687050 - RNA, 19 nt, Human
cucagcccacauagugaug

SEQ ID NO: 1687051 - RNA, 21 nt, Human
cucagcccacauagugauggu

SEQ ID NO: 1687052 - RNA, 18 nt, Human
cucaggaguuugagacca

SEQ ID NO: 1687053 - RNA, 23 nt, Human
cucaggaguuugagaccaaccug

SEQ ID NO: 1687054 - RNA, 18 nt, Human
cucagcauccuggcaccc

SEQ ID NO: 1687055 - RNA, 14 nt, Human
cucagggccuggcu

SEQ ID NO: 1687056 - RNA, 15 nt, Human
cucagggccuggcuc

SEQ ID NO: 1687057 - RNA, 13 nt, Human
cucagggccuggc

SEQ ID NO: 1687058 - RNA, 16 nt, Human
cucagggccuggcuca

SEQ ID NO: 1687059 - RNA, 15 nt, Human
cucagggccuggucg

SEQ ID NO: 1687060 - RNA, 15 nt, Human
cucagggucccuggu

SEQ ID NO: 1687061 - RNA, 16 nt, Human
cucagggucccuggug

SEQ ID NO: 1687062 - RNA, 17 nt, Human
cucagggucccuggugg

SEQ ID NO: 1687063 - RNA, 18 nt, Human
cucagggucccugguggc

SEQ ID NO: 1687064 - RNA, 16 nt, Human
cucaggugagaagcag

SEQ ID NO: 1687065 - RNA, 19 nt, Human
cucaggugagaagcagagg

SEQ ID NO: 1687066 - RNA, 20 nt, Human
cucaggugagaagcagagga

SEQ ID NO: 1687067 - RNA, 15 nt, Human
cuccacccugcucuc

SEQ ID NO: 1687068 - RNA, 13 nt, Human
cuccacccugcuc

SEQ ID NO: 1687069 - RNA, 22 nt, Human
cuccaaucccaccaacccucag

SEQ ID NO: 1687070 - RNA, 22 nt, Human
cuccaauuaaggauuuuaugcu

SEQ ID NO: 1687071 - RNA, 17 nt, Human
cuccaauuaaggauuuu

SEQ ID NO: 1687072 - RNA, 20 nt, Human
cuccaauuaaggauuuuaug

SEQ ID NO: 1687073 - RNA, 16 nt, Human
cuccaaaauaaaacuu

SEQ ID NO: 1687074 - RNA, 15 nt, Human
cuccaaaauaaaacu

SEQ ID NO: 1687075 - RNA, 18 nt, Human
cucauuugucacacacuu

SEQ ID NO: 1687076 - RNA, 21 nt, Human
cuccaaacugacucuuaagaa

SEQ ID NO: 1687077 - RNA, 12 nt, Human
cuccaaagaaau

SEQ ID NO: 1687078 - RNA, 18 nt, Human
cuccaaaauaaaacuuuu

SEQ ID NO: 1687079 - RNA, 13 nt, Human
cuccaaagaaaug

SEQ ID NO: 1687080 - RNA, 17 nt, Human
cucauuugucacacacu

SEQ ID NO: 1687081 - RNA, 21 nt, Human
cucauuuccaagcaaguauua

SEQ ID NO: 1687082 - RNA, 15 nt, Human
cuccaccugccaggg

SEQ ID NO: 1687083 - RNA, 14 nt, Human
cuccaccugccagg

SEQ ID NO: 1687084 - RNA, 12 nt, Human
cuccaccugcca

SEQ ID NO: 1687085 - RNA, 13 nt, Human
cuccaccugccag

SEQ ID NO: 1687086 - RNA, 15 nt, Human
cuccagccccuggau

SEQ ID NO: 1687087 - RNA, 20 nt, Human
cuccagccccuggaugcagc

SEQ ID NO: 1687088 - RNA, 16 nt, Human
cuccagccccuggaug

SEQ ID NO: 1687089 - RNA, 17 nt, Human
cuccagccccuggaugc

SEQ ID NO: 1687090 - RNA, 14 nt, Human
cuccagcucaccag

SEQ ID NO: 1687091 - RNA, 12 nt, Human
cuccagccuggg

SEQ ID NO: 1687092 - RNA, 11 nt, Human
cuccaggagca

SEQ ID NO: 1687093 - RNA, 13 nt, Human
cuccaggagcagc

SEQ ID NO: 1687094 - RNA, 14 nt, Human
cuccaggagcagcc

SEQ ID NO: 1687095 - RNA, 15 nt, Human
cuccaggagcagcca

SEQ ID NO: 1687096 - RNA, 16 nt, Human
cuccaggagcagccac

SEQ ID NO: 1687097 - RNA, 17 nt, Human
cuccaggagcagccaca

SEQ ID NO: 1687098 - RNA, 18 nt, Human
cuccaggagcagccacau

SEQ ID NO: 1687099 - RNA, 23 nt, Human
cuccaggagcagccacauuccug

SEQ ID NO: 1687100 - RNA, 12 nt, Human
cuccauccugag

SEQ ID NO: 1687101 - RNA, 15 nt, Human
cucgccuucaucucc

SEQ ID NO: 1687102 - RNA, 23 nt, Human
cucgcucugucgcccaggcugga

SEQ ID NO: 1687103 - RNA, 13 nt, Human
cucgcgacaaugc

SEQ ID NO: 1687104 - RNA, 22 nt, Human
cucgagcaugccuggauggggc

SEQ ID NO: 1687105 - RNA, 13 nt, Human
cucgagcaugccu

SEQ ID NO: 1687106 - RNA, 15 nt, Human
cucgagcaugccugg

SEQ ID NO: 1687107 - RNA, 16 nt, Human
cucgagcaugccugga

SEQ ID NO: 1687108 - RNA, 19 nt, Human
cucgagcaugccuggaugg

SEQ ID NO: 1687109 - RNA, 23 nt, Human
cuccuuggugucgggcaugacac

SEQ ID NO: 1687110 - RNA, 12 nt, Human
cuccuggacucc

SEQ ID NO: 1687111 - RNA, 17 nt, Human
cuccuuaucaaaggaca

SEQ ID NO: 1687112 - RNA, 22 nt, Human
cuccuuaucaaaggacaccauu

SEQ ID NO: 1687113 - RNA, 11 nt, Human
cuccuggacuc

SEQ ID NO: 1687114 - RNA, 21 nt, Human
cuccugugugugcgccuacag

SEQ ID NO: 1687115 - RNA, 23 nt, Human
cuccugugugugcgccuacagga

SEQ ID NO: 1687116 - RNA, 24 nt, Human
cuccugugugugcgccuacaggag

SEQ ID NO: 1687117 - RNA, 13 nt, Human
cuccugcugggca

SEQ ID NO: 1687118 - RNA, 14 nt, Human
cuccuggaaauauu

SEQ ID NO: 1687119 - RNA, 17 nt, Human
cuccugccucagccucc

SEQ ID NO: 1687120 - RNA, 12 nt, Human
cuccugccucag

SEQ ID NO: 1687121 - RNA, 11 nt, Human
cuccugccuca

SEQ ID NO: 1687122 - RNA, 13 nt, Human
cuccucuccccag

SEQ ID NO: 1687123 - RNA, 15 nt, Human
cuccucuccccagca

SEQ ID NO: 1687124 - RNA, 22 nt, Human
cuccugccucgaacuggcugca

SEQ ID NO: 1687125 - RNA, 19 nt, Human
cuccugccucagccucccg

SEQ ID NO: 1687126 - RNA, 18 nt, Human
cuccugccucgaacuggc

SEQ ID NO: 1687127 - RNA, 20 nt, Human
cuccugccucgaacuggcug

SEQ ID NO: 1687128 - RNA, 21 nt, Human
cuccugccucgaacuggcugc

SEQ ID NO: 1687129 - RNA, 17 nt, Human
cucccugccccccagcc

SEQ ID NO: 1687130 - RNA, 23 nt, Human
cucccugccccccagcccuccuu

SEQ ID NO: 1687131 - RNA, 13 nt, Human
cucccugccccuc

SEQ ID NO: 1687132 - RNA, 14 nt, Human
cucccugccccucc

SEQ ID NO: 1687133 - RNA, 17 nt, Human
cucccugccccucccuu

SEQ ID NO: 1687134 - RNA, 18 nt, Human
cucccugccccucccuuc

SEQ ID NO: 1687135 - RNA, 20 nt, Human
cucccugccccucccuucaa

SEQ ID NO: 1687136 - RNA, 21 nt, Human
cucccugccccucccuucaac

SEQ ID NO: 1687137 - RNA, 15 nt, Human
cucccggugcccaag

SEQ ID NO: 1687138 - RNA, 21 nt, Human
cucccggugcccaagaauaga

SEQ ID NO: 1687139 - RNA, 19 nt, Human
cucccgaguagcugggacu

SEQ ID NO: 1687140 - RNA, 20 nt, Human
cucccgaguagcugggacua

SEQ ID NO: 1687141 - RNA, 12 nt, Human
cuccccuccucc

SEQ ID NO: 1687142 - RNA, 20 nt, Human
cuccccuccuccuggacucc

SEQ ID NO: 1687143 - RNA, 13 nt, Human
cuccccuccucug

SEQ ID NO: 1687144 - RNA, 11 nt, Human
cuccccuccuc

SEQ ID NO: 1687145 - RNA, 22 nt, Human
cuccccagcaagugagagcugg

SEQ ID NO: 1687146 - RNA, 23 nt, Human
cuccccagcaagugagagcuggg

SEQ ID NO: 1687147 - RNA, 14 nt, Human
cuccauccugaggc

SEQ ID NO: 1687148 - RNA, 13 nt, Human
cuccauccugagg

SEQ ID NO: 1687149 - RNA, 20 nt, Human
cuccccuccucugcuugcca

SEQ ID NO: 1687150 - RNA, 14 nt, Human
cuccuccuggacuc

SEQ ID NO: 1687151 - RNA, 15 nt, Human
cuccuccuggacucc

SEQ ID NO: 1687152 - RNA, 19 nt, Human
cuccuccuggacuccugca

SEQ ID NO: 1687153 - RNA, 17 nt, Human
cuccucccaggcgcccc

SEQ ID NO: 1687154 - RNA, 22 nt, Human
cuccucccaggcgccccuuccc

SEQ ID NO: 1687155 - RNA, 23 nt, Human
cuccucccaggcgccccuucccc

SEQ ID NO: 1687156 - RNA, 22 nt, Human
cuccuccagccgccaugcuccu

SEQ ID NO: 1687157 - RNA, 15 nt, Human
cuccuccagccgcca

SEQ ID NO: 1687158 - RNA, 13 nt, Human
cuccuccagaguc

SEQ ID NO: 1687159 - RNA, 15 nt, Human
cuccuccagagucag

SEQ ID NO: 1687160 - RNA, 18 nt, Human
cuccucagaucuucugug

SEQ ID NO: 1687161 - RNA, 19 nt, Human
cucccuuggggccuaugca

SEQ ID NO: 1687162 - RNA, 12 nt, Human
cucccuuucaac

SEQ ID NO: 1687163 - RNA, 15 nt, Human
cucugauacagaaaa

SEQ ID NO: 1687164 - RNA, 13 nt, Human
cucugcacaagcu

SEQ ID NO: 1687165 - RNA, 19 nt, Human
cucugcaggucccuaauaa

SEQ ID NO: 1687166 - RNA, 20 nt, Human
cucugcaggucccuaauaaa

SEQ ID NO: 1687167 - RNA, 14 nt, Human
cucugcacaagcug

SEQ ID NO: 1687168 - RNA, 15 nt, Human
cucugcacaagcugc

SEQ ID NO: 1687169 - RNA, 21 nt, Human
cucugcaggucccuaauaaag

SEQ ID NO: 1687170 - RNA, 22 nt, Human
cucugcaggucccuaauaaagc

SEQ ID NO: 1687171 - RNA, 18 nt, Human
cucugcaggucccuaaua

SEQ ID NO: 1687172 - RNA, 18 nt, Human
cucugcccacucccugca

SEQ ID NO: 1687173 - RNA, 20 nt, Human
cucugcccacucccugcaac

SEQ ID NO: 1687174 - RNA, 13 nt, Human
cucugcccacucc

SEQ ID NO: 1687175 - RNA, 15 nt, Human
cucugcccacucccu

SEQ ID NO: 1687176 - RNA, 16 nt, Human
cucugcccacucccug

SEQ ID NO: 1687177 - RNA, 17 nt, Human
cucugcccacucccugc

SEQ ID NO: 1687178 - RNA, 22 nt, Human
cucugcccuaaugcgcaggcug

SEQ ID NO: 1687179 - RNA, 20 nt, Human
cucugcccuaaugcgcaggc

SEQ ID NO: 1687180 - RNA, 13 nt, Human
cucugccucccau

SEQ ID NO: 1687181 - RNA, 14 nt, Human
cucugccucccauc

SEQ ID NO: 1687182 - RNA, 16 nt, Human
cucugccucccaucac

SEQ ID NO: 1687183 - RNA, 17 nt, Human
cucugccucccaucacc

SEQ ID NO: 1687184 - RNA, 19 nt, Human
cucugaaggguaauuauau

SEQ ID NO: 1687185 - RNA, 19 nt, Human
cucugaagugaaacugcuu

SEQ ID NO: 1687186 - RNA, 23 nt, Human
cucugaagugaaacugcuuguuu

SEQ ID NO: 1687187 - RNA, 16 nt, Human
cucugacaacagacuu

SEQ ID NO: 1687188 - RNA, 22 nt, Human
cucugaaggacauugcggacag

SEQ ID NO: 1687189 - RNA, 21 nt, Human
cucugacaacagacuucugaa

SEQ ID NO: 1687190 - RNA, 22 nt, Human
cucugacaacagacuucugaaa

SEQ ID NO: 1687191 - RNA, 14 nt, Human
cucugacacacagc

SEQ ID NO: 1687192 - RNA, 15 nt, Human
cucugacacacagcu

SEQ ID NO: 1687193 - RNA, 16 nt, Human
cucugacacacagcuc

SEQ ID NO: 1687194 - RNA, 17 nt, Human
cucugacacacagcucu

SEQ ID NO: 1687195 - RNA, 18 nt, Human
cucugacacacagcucug

SEQ ID NO: 1687196 - RNA, 19 nt, Human
cucugacacacagcucugu

SEQ ID NO: 1687197 - RNA, 23 nt, Human
cucugacagaagaaccccagggu

SEQ ID NO: 1687198 - RNA, 23 nt, Human
cucugagacucgcgacaaugcaa

SEQ ID NO: 1687199 - RNA, 16 nt, Human
cucugaggacacuaac

SEQ ID NO: 1687200 - RNA, 12 nt, Human
cucugaggacac

SEQ ID NO: 1687201 - RNA, 14 nt, Human
cucugaggacacua

SEQ ID NO: 1687202 - RNA, 21 nt, Human
cucugagacucgcgacaaugc

SEQ ID NO: 1687203 - RNA, 12 nt, Human
cucuucuccacu

SEQ ID NO: 1687204 - RNA, 13 nt, Human
cucuucuccacug

SEQ ID NO: 1687205 - RNA, 15 nt, Human
cucuucuccaggcug

SEQ ID NO: 1687206 - RNA, 13 nt, Human
cucuucuccaggc

SEQ ID NO: 1687207 - RNA, 20 nt, Human
cucugugucagguggggcag

SEQ ID NO: 1687208 - RNA, 21 nt, Human
cucugugucagguggggcagc

SEQ ID NO: 1687209 - RNA, 22 nt, Human
cucugugucagguggggcagcu

SEQ ID NO: 1687210 - RNA, 23 nt, Human
cucugugucagguggggcagcuu

SEQ ID NO: 1687211 - RNA, 19 nt, Human
cucuuaagaagacugcauu

SEQ ID NO: 1687212 - RNA, 18 nt, Human
cucugucgcccagucugg

SEQ ID NO: 1687213 - RNA, 19 nt, Human
cucugucgcccagucugga

SEQ ID NO: 1687214 - RNA, 18 nt, Human
cucugucgcccaggcugg

SEQ ID NO: 1687215 - RNA, 22 nt, Human
cucugucgcccaggcuggagug

SEQ ID NO: 1687216 - RNA, 17 nt, Human
cucugucgcccagucug

SEQ ID NO: 1687217 - RNA, 15 nt, Human
cucugucgcccaggc

SEQ ID NO: 1687218 - RNA, 13 nt, Human
cucugucgcccag

SEQ ID NO: 1687219 - RNA, 14 nt, Human
cucuguccugggag

SEQ ID NO: 1687220 - RNA, 15 nt, Human
cucuguccugggagu

SEQ ID NO: 1687221 - RNA, 22 nt, Human
cucuguccugggagugagcugg

SEQ ID NO: 1687222 - RNA, 19 nt, Human
cucuggauuauauuaugaa

SEQ ID NO: 1687223 - RNA, 20 nt, Human
cucuggauuauauuaugaag

SEQ ID NO: 1687224 - RNA, 10 nt, Human
cucugccuga

SEQ ID NO: 1687225 - RNA, 21 nt, Human
cucugccucccaucacccgcu

SEQ ID NO: 1687226 - RNA, 19 nt, Human
cucugccucugacacacag

SEQ ID NO: 1687227 - RNA, 20 nt, Human
cucugccucugacacacagc

SEQ ID NO: 1687228 - RNA, 23 nt, Human
cucuggcagcucagagagggugg

SEQ ID NO: 1687229 - RNA, 21 nt, Human
cucuggccuucggccuccauc

SEQ ID NO: 1687230 - RNA, 22 nt, Human
cucuggccuucggccuccaucc

SEQ ID NO: 1687231 - RNA, 21 nt, Human
cugaccagccuccaugcugcc

SEQ ID NO: 1687232 - RNA, 23 nt, Human
cugaccagccuccaugcugccuc

SEQ ID NO: 1687233 - RNA, 16 nt, Human
cugaauuaugaaacuu

SEQ ID NO: 1687234 - RNA, 14 nt, Human
cugaauuucuuuug

SEQ ID NO: 1687235 - RNA, 16 nt, Human
cugacagacacaggcc

SEQ ID NO: 1687236 - RNA, 17 nt, Human
cugaccagccuccaugc

SEQ ID NO: 1687237 - RNA, 17 nt, Human
cugacagacacaggccc

SEQ ID NO: 1687238 - RNA, 18 nt, Human
cugacagacacaggcccg

SEQ ID NO: 1687239 - RNA, 17 nt, Human
cugacuguacuccuccc

SEQ ID NO: 1687240 - RNA, 12 nt, Human
cugagaaagacu

SEQ ID NO: 1687241 - RNA, 13 nt, Human
cugagaaagacua

SEQ ID NO: 1687242 - RNA, 15 nt, Human
cugagaaagacuauu

SEQ ID NO: 1687243 - RNA, 18 nt, Human
cugagaaagacuauucaa

SEQ ID NO: 1687244 - RNA, 15 nt, Human
cugagccagauuuca

SEQ ID NO: 1687245 - RNA, 13 nt, Human
cugagccagauuu

SEQ ID NO: 1687246 - RNA, 14 nt, Human
cugagccagauuuc

SEQ ID NO: 1687247 - RNA, 16 nt, Human
cugagcaggauuuuaa

SEQ ID NO: 1687248 - RNA, 15 nt, Human
cugagcaaauguggc

SEQ ID NO: 1687249 - RNA, 17 nt, Human
cugagcaaauguggcuc

SEQ ID NO: 1687250 - RNA, 20 nt, Human
cugagcaaauguggcuccug

SEQ ID NO: 1687251 - RNA, 21 nt, Human
cugagcaaauguggcuccugg

SEQ ID NO: 1687252 - RNA, 23 nt, Human
cugagauuauaggcaccuaccac

SEQ ID NO: 1687253 - RNA, 21 nt, Human
cugagaugugaacacaucagc

SEQ ID NO: 1687254 - RNA, 20 nt, Human
cugagacagcccgggcucug

SEQ ID NO: 1687255 - RNA, 19 nt, Human
cugagacagcccgggcucu

SEQ ID NO: 1687256 - RNA, 19 nt, Human
cugagaaagacuauucaaa

SEQ ID NO: 1687257 - RNA, 20 nt, Human
cugagaaagacuauucaaac

SEQ ID NO: 1687258 - RNA, 21 nt, Human
cugagacagcccgggcucugc

SEQ ID NO: 1687259 - RNA, 22 nt, Human
cugagacagcccgggcucugcc

SEQ ID NO: 1687260 - RNA, 16 nt, Human
cugagaugugaacaca

SEQ ID NO: 1687261 - RNA, 20 nt, Human
cugagaugugaacacaucag

SEQ ID NO: 1687262 - RNA, 20 nt, Human
cugaaauaaacgucuuaaau

SEQ ID NO: 1687263 - RNA, 16 nt, Human
cucuucuccaggcugu

SEQ ID NO: 1687264 - RNA, 22 nt, Human
cucuuuggucuacacugugcug

SEQ ID NO: 1687265 - RNA, 23 nt, Human
cucuuuggucuacacugugcuga

SEQ ID NO: 1687266 - RNA, 23 nt, Human
cucuuugucuacaccauuaugug

SEQ ID NO: 1687267 - RNA, 14 nt, Human
cucuuuucaaaaca

SEQ ID NO: 1687268 - RNA, 23 nt, Human
cugaaagggacgcuacccgggaa

SEQ ID NO: 1687269 - RNA, 13 nt, Human
cugaauuaugaaa

SEQ ID NO: 1687270 - RNA, 14 nt, Human
cugaauuaugaaac

SEQ ID NO: 1687271 - RNA, 15 nt, Human
cugaauuaugaaacu

SEQ ID NO: 1687272 - RNA, 12 nt, Human
cugaauuauuuu

SEQ ID NO: 1687273 - RNA, 12 nt, Human
cugaauuucuuu

SEQ ID NO: 1687274 - RNA, 19 nt, Human
cugaaugguuuucaaaaua

SEQ ID NO: 1687275 - RNA, 20 nt, Human
cugaaugguuuucaaaauaa

SEQ ID NO: 1687276 - RNA, 17 nt, Human
cugaaguucagcugcau

SEQ ID NO: 1687277 - RNA, 22 nt, Human
cugaagucccagauacuugggg

SEQ ID NO: 1687278 - RNA, 17 nt, Human
cugaagucuuuguacag

SEQ ID NO: 1687279 - RNA, 20 nt, Human
cugaagucuuuguacagaca

SEQ ID NO: 1687280 - RNA, 13 nt, Human
cugaagucacugc

SEQ ID NO: 1687281 - RNA, 14 nt, Human
cugaagucacugca

SEQ ID NO: 1687282 - RNA, 15 nt, Human
cugaagucacugcac

SEQ ID NO: 1687283 - RNA, 21 nt, Human
cugaagucacacagugagucg

SEQ ID NO: 1687284 - RNA, 18 nt, Human
cugaagucacacagugag

SEQ ID NO: 1687285 - RNA, 19 nt, Human
cugaagucacacagugagu

SEQ ID NO: 1687286 - RNA, 17 nt, Human
cugaagucacacaguga

SEQ ID NO: 1687287 - RNA, 14 nt, Human
cugaagaagauggu

SEQ ID NO: 1687288 - RNA, 11 nt, Human
cugccaggcau

SEQ ID NO: 1687289 - RNA, 13 nt, Human
cugccaggcaugg

SEQ ID NO: 1687290 - RNA, 23 nt, Human
cugccaucucaccuccugcuggg

SEQ ID NO: 1687291 - RNA, 21 nt, Human
cugccaucucaccuccugcug

SEQ ID NO: 1687292 - RNA, 14 nt, Human
cugccaugccagcu

SEQ ID NO: 1687293 - RNA, 15 nt, Human
cugccaugccagcuu

SEQ ID NO: 1687294 - RNA, 13 nt, Human
cugcccaccuggc

SEQ ID NO: 1687295 - RNA, 14 nt, Human
cugcccaccuggcc

SEQ ID NO: 1687296 - RNA, 15 nt, Human
cugcccaccuggccu

SEQ ID NO: 1687297 - RNA, 17 nt, Human
cugcccagccuccaagc

SEQ ID NO: 1687298 - RNA, 18 nt, Human
cugcccacucccugcaac

SEQ ID NO: 1687299 - RNA, 17 nt, Human
cugcccaccuggccucu

SEQ ID NO: 1687300 - RNA, 18 nt, Human
cugcccaccuggccucug

SEQ ID NO: 1687301 - RNA, 19 nt, Human
cugcccaccuggccucugc

SEQ ID NO: 1687302 - RNA, 20 nt, Human
cugcccaccuggccucugca

SEQ ID NO: 1687303 - RNA, 22 nt, Human
cugcccaccuggccucugcacu

SEQ ID NO: 1687304 - RNA, 14 nt, Human
cugcccacucccug

SEQ ID NO: 1687305 - RNA, 15 nt, Human
cugcccacucccugc

SEQ ID NO: 1687306 - RNA, 16 nt, Human
cugcccacucccugca

SEQ ID NO: 1687307 - RNA, 18 nt, Human
cugccaaugggagcucau

SEQ ID NO: 1687308 - RNA, 19 nt, Human
cugccaaugggagcucaug

SEQ ID NO: 1687309 - RNA, 18 nt, Human
cugcaugcgggcuuccuc

SEQ ID NO: 1687310 - RNA, 22 nt, Human
cugcaugcgggcuuccuccugg

SEQ ID NO: 1687311 - RNA, 19 nt, Human
cugcauccuccgccucccg

SEQ ID NO: 1687312 - RNA, 20 nt, Human
cugcauccuccgccucccgg

SEQ ID NO: 1687313 - RNA, 16 nt, Human
cugcaucguuucaucu

SEQ ID NO: 1687314 - RNA, 22 nt, Human
cugcaucguuucaucuuccaac

SEQ ID NO: 1687315 - RNA, 21 nt, Human
cugcaguugccagucaccccg

SEQ ID NO: 1687316 - RNA, 22 nt, Human
cugcaguugccagucaccccgg

SEQ ID NO: 1687317 - RNA, 23 nt, Human
cugcacuugcagacucuacagag

SEQ ID NO: 1687318 - RNA, 19 nt, Human
cugcaguugccagucaccc

SEQ ID NO: 1687319 - RNA, 15 nt, Human
cugccucucugcagg

SEQ ID NO: 1687320 - RNA, 16 nt, Human
cugccucucugcaggu

SEQ ID NO: 1687321 - RNA, 17 nt, Human
cugccucucugcagguc

SEQ ID NO: 1687322 - RNA, 18 nt, Human
cugccucucugcaggucc

SEQ ID NO: 1687323 - RNA, 14 nt, Human
cugccuccagaaug

SEQ ID NO: 1687324 - RNA, 22 nt, Human
cugccuccagaauggucuuucu

SEQ ID NO: 1687325 - RNA, 13 nt, Human
cugccuauuuuaa

SEQ ID NO: 1687326 - RNA, 15 nt, Human
cugccucagccuccc

SEQ ID NO: 1687327 - RNA, 17 nt, Human
cugccucagccucccga

SEQ ID NO: 1687328 - RNA, 19 nt, Human
cugccucagccucccaaag

SEQ ID NO: 1687329 - RNA, 21 nt, Human
cugccccuccucucugcccua

SEQ ID NO: 1687330 - RNA, 20 nt, Human
cugccccuccucucugcccu

SEQ ID NO: 1687331 - RNA, 12 nt, Human
cugccgcagccc

SEQ ID NO: 1687332 - RNA, 13 nt, Human
cugccgcagcccu

SEQ ID NO: 1687333 - RNA, 23 nt, Human
cugccgcagcccugcagagggca

SEQ ID NO: 1687334 - RNA, 14 nt, Human
cugccgcagcccug

SEQ ID NO: 1687335 - RNA, 19 nt, Human
cugccgcagcccugcagag

SEQ ID NO: 1687336 - RNA, 20 nt, Human
cugccgcagcccugcagagg

SEQ ID NO: 1687337 - RNA, 21 nt, Human
cugccgcagcccugcagaggg

SEQ ID NO: 1687338 - RNA, 22 nt, Human
cugccgcagcccugcagagggc

SEQ ID NO: 1687339 - RNA, 19 nt, Human
cugccucucugcagguccc

SEQ ID NO: 1687340 - RNA, 17 nt, Human
cugccucugacacacag

SEQ ID NO: 1687341 - RNA, 18 nt, Human
cugccucugacacacagc

SEQ ID NO: 1687342 - RNA, 21 nt, Human
cugccucugacacacagcucu

SEQ ID NO: 1687343 - RNA, 21 nt, Human
cugccugcccaggccccugcc

SEQ ID NO: 1687344 - RNA, 22 nt, Human
cugccugcccaggccccugcca

SEQ ID NO: 1687345 - RNA, 19 nt, Human
cugcgguccacccaggagc

SEQ ID NO: 1687346 - RNA, 20 nt, Human
cugcgguccacccaggagcc

SEQ ID NO: 1687347 - RNA, 18 nt, Human
cugcgguccacccaggag

SEQ ID NO: 1687348 - RNA, 15 nt, Human
cugaucaccugcccu

SEQ ID NO: 1687349 - RNA, 22 nt, Human
cugauacagaaaaguugaauuu

SEQ ID NO: 1687350 - RNA, 20 nt, Human
cugauccuaguuccaccauc

SEQ ID NO: 1687351 - RNA, 21 nt, Human
cugauccuaguuccaccauca

SEQ ID NO: 1687352 - RNA, 14 nt, Human
cugauggugcaaug

SEQ ID NO: 1687353 - RNA, 15 nt, Human
cugauggugcaauga

SEQ ID NO: 1687354 - RNA, 16 nt, Human
cugauggugcaaugac

SEQ ID NO: 1687355 - RNA, 20 nt, Human
cugagucccaggcugagccu

SEQ ID NO: 1687356 - RNA, 18 nt, Human
cugagucugaaggcuggg

SEQ ID NO: 1687357 - RNA, 19 nt, Human
cugagucugaaggcugggu

SEQ ID NO: 1687358 - RNA, 13 nt, Human
cugaguuugugcu

SEQ ID NO: 1687359 - RNA, 18 nt, Human
cugaguuugugcuggugu

SEQ ID NO: 1687360 - RNA, 13 nt, Human
cugaggcugggcu

SEQ ID NO: 1687361 - RNA, 15 nt, Human
cugaggcugggcucc

SEQ ID NO: 1687362 - RNA, 16 nt, Human
cugaggcugggcuccc

SEQ ID NO: 1687363 - RNA, 17 nt, Human
cugaggcugggcucccu

SEQ ID NO: 1687364 - RNA, 22 nt, Human
cugaggcugggcucccuuccca

SEQ ID NO: 1687365 - RNA, 24 nt, Human
cugaggcccuucucuccagccccu

SEQ ID NO: 1687366 - RNA, 15 nt, Human
cugaggcuccacuug

SEQ ID NO: 1687367 - RNA, 21 nt, Human
cugaggcuccacuuggucugu

SEQ ID NO: 1687368 - RNA, 16 nt, Human
cugauuuuuuuuuccu

SEQ ID NO: 1687369 - RNA, 18 nt, Human
cugauuuuuuuuuccuuc

SEQ ID NO: 1687370 - RNA, 19 nt, Human
cugauuuuuuuuuccuuca

SEQ ID NO: 1687371 - RNA, 20 nt, Human
cugauuuuuuuuuccuucag

SEQ ID NO: 1687372 - RNA, 13 nt, Human
cugcaaagcccag

SEQ ID NO: 1687373 - RNA, 15 nt, Human
cugcaaagcccagcu

SEQ ID NO: 1687374 - RNA, 23 nt, Human
cugauuuuuuuuuccuucagugc

SEQ ID NO: 1687375 - RNA, 21 nt, Human
cugauuuuuuuuuccuucagu

SEQ ID NO: 1687376 - RNA, 22 nt, Human
cugauuuuuuuuuccuucagug

SEQ ID NO: 1687377 - RNA, 22 nt, Human
cugauuugacauagucuggcug

SEQ ID NO: 1687378 - RNA, 23 nt, Human
cugauuugacauagucuggcugu

SEQ ID NO: 1687379 - RNA, 21 nt, Human
cugauuugacauagucuggcu

SEQ ID NO: 1687380 - RNA, 21 nt, Human
cugauugugucucuugguccu

SEQ ID NO: 1687381 - RNA, 17 nt, Human
cugauugugucucuugg

SEQ ID NO: 1687382 - RNA, 17 nt, Human
cugauggugcaaugacc

SEQ ID NO: 1687383 - RNA, 19 nt, Human
cugauggugcaaugaccuu

SEQ ID NO: 1687384 - RNA, 20 nt, Human
cugauggugcaaugaccuuu

SEQ ID NO: 1687385 - RNA, 21 nt, Human
cugauggugcaaugaccuuuc

SEQ ID NO: 1687386 - RNA, 18 nt, Human
cugcacuugcagacucua

SEQ ID NO: 1687387 - RNA, 16 nt, Human
cugcacuccccugcug

SEQ ID NO: 1687388 - RNA, 17 nt, Human
cugcacuccccugcugg

SEQ ID NO: 1687389 - RNA, 18 nt, Human
cugcacuccccugcuggg

SEQ ID NO: 1687390 - RNA, 13 nt, Human
cugcacccucagg

SEQ ID NO: 1687391 - RNA, 14 nt, Human
cugcacccucaggc

SEQ ID NO: 1687392 - RNA, 16 nt, Human
cugcacccucaggcag

SEQ ID NO: 1687393 - RNA, 22 nt, Human
cugcaccggcuggccuggcccc

SEQ ID NO: 1687394 - RNA, 23 nt, Human
cugcaccggcuggccuggccccu

SEQ ID NO: 1687395 - RNA, 12 nt, Human
cugcaccgggcc

SEQ ID NO: 1687396 - RNA, 15 nt, Human
cugcacuccccugcu

SEQ ID NO: 1687397 - RNA, 14 nt, Human
cugcacacagcacg

SEQ ID NO: 1687398 - RNA, 20 nt, Human
cugcacacgcuccuuccucu

SEQ ID NO: 1687399 - RNA, 22 nt, Human
cugcacacgcuccuuccucuga

SEQ ID NO: 1687400 - RNA, 13 nt, Human
cugcacacagcac

SEQ ID NO: 1687401 - RNA, 22 nt, Human
cugcacaagcugcacccucagg

SEQ ID NO: 1687402 - RNA, 17 nt, Human
cugcaaagcccagcuug

SEQ ID NO: 1687403 - RNA, 15 nt, Human
cugcaauaaaauggg

SEQ ID NO: 1687404 - RNA, 18 nt, Human
cugcaauaaggggagagu

SEQ ID NO: 1687405 - RNA, 22 nt, Human
cugcaauaaaauggguuuuacu

SEQ ID NO: 1687406 - RNA, 17 nt, Human
gaaauuguaauuauauc

SEQ ID NO: 1687407 - RNA, 19 nt, Human
gaaauugcauuuccugaca

SEQ ID NO: 1687408 - RNA, 17 nt, Human
gaaauuuguuauaauga

SEQ ID NO: 1687409 - RNA, 14 nt, Human
gaaaugggcagagc

SEQ ID NO: 1687410 - RNA, 20 nt, Human
gaaaugggcagagcagagac

SEQ ID NO: 1687411 - RNA, 13 nt, Human
gaaauauuauguu

SEQ ID NO: 1687412 - RNA, 16 nt, Human
gaaauauuauguuaaa

SEQ ID NO: 1687413 - RNA, 22 nt, Human
gaaauguaagggaaacugccag

SEQ ID NO: 1687414 - RNA, 21 nt, Human
gaaauaucugaaaauguaugu

SEQ ID NO: 1687415 - RNA, 17 nt, Human
gaaauauaggaacuuaa

SEQ ID NO: 1687416 - RNA, 13 nt, Human
gaaauauaauuga

SEQ ID NO: 1687417 - RNA, 15 nt, Human
gaaauacuguuugag

SEQ ID NO: 1687418 - RNA, 19 nt, Human
gaaauacuguuugagguuu

SEQ ID NO: 1687419 - RNA, 20 nt, Human
gaaacagccugugucuuuaa

SEQ ID NO: 1687420 - RNA, 20 nt, Human
gaaacaugacucguauaugu

SEQ ID NO: 1687421 - RNA, 11 nt, Human
gaaacauuugg

SEQ ID NO: 1687422 - RNA, 21 nt, Human
gaagaagcaccaaucaugaau

SEQ ID NO: 1687423 - RNA, 13 nt, Human
gaacuuggcgcug

SEQ ID NO: 1687424 - RNA, 15 nt, Human
gaacuuggcgcugcc

SEQ ID NO: 1687425 - RNA, 16 nt, Human
gaacuuggcgcugccc

SEQ ID NO: 1687426 - RNA, 17 nt, Human
gaacuuggcgcugcccc

SEQ ID NO: 1687427 - RNA, 23 nt, Human
gaacuugguucccauuugcuccu

SEQ ID NO: 1687428 - RNA, 21 nt, Human
gaacuuguaaaggaauuuaaa

SEQ ID NO: 1687429 - RNA, 22 nt, Human
gaacuggguacuuguggacaca

SEQ ID NO: 1687430 - RNA, 15 nt, Human
gaacucccuuucaac

SEQ ID NO: 1687431 - RNA, 14 nt, Human
gaacucccuuucaa

SEQ ID NO: 1687432 - RNA, 22 nt, Human
gaacuuccagauccuggaaauc

SEQ ID NO: 1687433 - RNA, 15 nt, Human
gaacagacuggaagc

SEQ ID NO: 1687434 - RNA, 16 nt, Human
gaacagacuggaagca

SEQ ID NO: 1687435 - RNA, 19 nt, Human
gaacagacuggaagcacag

SEQ ID NO: 1687436 - RNA, 21 nt, Human
gaaccacaucuugcucugcug

SEQ ID NO: 1687437 - RNA, 16 nt, Human
gaaccaccacacccag

SEQ ID NO: 1687438 - RNA, 17 nt, Human
gaaccaccacacccagc

SEQ ID NO: 1687439 - RNA, 12 nt, Human
gaaccugacccc

SEQ ID NO: 1687440 - RNA, 11 nt, Human
gaaccugaccc

SEQ ID NO: 1687441 - RNA, 16 nt, Human
gaacgcguugaaauug

SEQ ID NO: 1687442 - RNA, 21 nt, Human
gaacuagaguuuagcuggaaa

SEQ ID NO: 1687443 - RNA, 22 nt, Human
gaacuagaguuuagcuggaaaa

SEQ ID NO: 1687444 - RNA, 18 nt, Human
gaauccagacccggcugc

SEQ ID NO: 1687445 - RNA, 15 nt, Human
gaauagcugggacua

SEQ ID NO: 1687446 - RNA, 15 nt, Human
gaauagaugcugacu

SEQ ID NO: 1687447 - RNA, 14 nt, Human
gaauagcugggacu

SEQ ID NO: 1687448 - RNA, 14 nt, Human
gaaugaaagggccc

SEQ ID NO: 1687449 - RNA, 19 nt, Human
gaaugaaagggcccagaga

SEQ ID NO: 1687450 - RNA, 21 nt, Human
gaaugaaagggcccagagagg

SEQ ID NO: 1687451 - RNA, 16 nt, Human
gaaucucaaauaacua

SEQ ID NO: 1687452 - RNA, 14 nt, Human
gaauacuuuauaaa

SEQ ID NO: 1687453 - RNA, 15 nt, Human
gaauaaauugcuccu

SEQ ID NO: 1687454 - RNA, 14 nt, Human
gaauaacauguaau

SEQ ID NO: 1687455 - RNA, 20 nt, Human
gaauaauccuaaacauauga

SEQ ID NO: 1687456 - RNA, 14 nt, Human
gaauaaagacaccu

SEQ ID NO: 1687457 - RNA, 12 nt, Human
gaauaaaauuuu

SEQ ID NO: 1687458 - RNA, 12 nt, Human
gaaguuucugcc

SEQ ID NO: 1687459 - RNA, 19 nt, Human
gaagccagcaggcucucag

SEQ ID NO: 1687460 - RNA, 23 nt, Human
gaagccagcaggcucucaggcca

SEQ ID NO: 1687461 - RNA, 22 nt, Human
gaagccacgguguucugugaua

SEQ ID NO: 1687462 - RNA, 15 nt, Human
gaagccagcaggcuc

SEQ ID NO: 1687463 - RNA, 16 nt, Human
gaagccagcaggcucu

SEQ ID NO: 1687464 - RNA, 19 nt, Human
gaagacucauucuucugua

SEQ ID NO: 1687465 - RNA, 21 nt, Human
gaagacucauucuucuguacg

SEQ ID NO: 1687466 - RNA, 14 nt, Human
gaagaagcucucuc

SEQ ID NO: 1687467 - RNA, 17 nt, Human
gaagacugcauuauauu

SEQ ID NO: 1687468 - RNA, 23 nt, Human
gaagcccaggaaaggcuccagga

SEQ ID NO: 1687469 - RNA, 20 nt, Human
gaagcccaggaaaggcucca

SEQ ID NO: 1687470 - RNA, 21 nt, Human
gaagcccaggaaaggcuccag

SEQ ID NO: 1687471 - RNA, 22 nt, Human
gaagcccaggaaaggcuccagg

SEQ ID NO: 1687472 - RNA, 18 nt, Human
gaagcuuuuaugugaaac

SEQ ID NO: 1687473 - RNA, 10 nt, Human
gaagccuuug

SEQ ID NO: 1687474 - RNA, 11 nt, Human
gaagccuuugu

SEQ ID NO: 1687475 - RNA, 14 nt, Human
gaagcggcuggcag

SEQ ID NO: 1687476 - RNA, 21 nt, Human
gaagccuuggggcugaugcag

SEQ ID NO: 1687477 - RNA, 13 nt, Human
gaaggcagggagg

SEQ ID NO: 1687478 - RNA, 14 nt, Human
gaaggcagggaggg

SEQ ID NO: 1687479 - RNA, 15 nt, Human
gaaggcaaaugacuu

SEQ ID NO: 1687480 - RNA, 16 nt, Human
gaaggcaaaugacuuu

SEQ ID NO: 1687481 - RNA, 17 nt, Human
gaaggccccgcccaggc

SEQ ID NO: 1687482 - RNA, 16 nt, Human
gaaggccccgcccagg

SEQ ID NO: 1687483 - RNA, 14 nt, Human
gaaggccccgccca

SEQ ID NO: 1687484 - RNA, 15 nt, Human
gaaggccccgcccag

SEQ ID NO: 1687485 - RNA, 16 nt, Human
gaagguucugguguga

SEQ ID NO: 1687486 - RNA, 20 nt, Human
gaagguucuggugugaacua

SEQ ID NO: 1687487 - RNA, 21 nt, Human
gaaggauacaaaagcauguga

SEQ ID NO: 1687488 - RNA, 14 nt, Human
gaaggcaaaugacu

SEQ ID NO: 1687489 - RNA, 19 nt, Human
gaaggauacaaaagcaugu

SEQ ID NO: 1687490 - RNA, 12 nt, Human
gaaggauacaaa

SEQ ID NO: 1687491 - RNA, 14 nt, Human
gaaggaaacccagc

SEQ ID NO: 1687492 - RNA, 17 nt, Human
gaaggaaacccagcucu

SEQ ID NO: 1687493 - RNA, 18 nt, Human
gaaggaaacccagcucug

SEQ ID NO: 1687494 - RNA, 20 nt, Human
cuuuuacguccaucucuugu

SEQ ID NO: 1687495 - RNA, 18 nt, Human
cuuuguuuguugucagcu

SEQ ID NO: 1687496 - RNA, 20 nt, Human
cuuuguuuguugucagcuga

SEQ ID NO: 1687497 - RNA, 22 nt, Human
cuuuucauaaccuagccuuaga

SEQ ID NO: 1687498 - RNA, 18 nt, Human
cuuuucacugcuggcugc

SEQ ID NO: 1687499 - RNA, 20 nt, Human
cuuuucacugcuggcugccu

SEQ ID NO: 1687500 - RNA, 17 nt, Human
cuuuucacugcuggcug

SEQ ID NO: 1687501 - RNA, 20 nt, Human
cuuuucauaaccuagccuua

SEQ ID NO: 1687502 - RNA, 11 nt, Human
cuuuucugaua

SEQ ID NO: 1687503 - RNA, 14 nt, Human
cuuuucugauagag

SEQ ID NO: 1687504 - RNA, 18 nt, Human
cuuuucuguccgagcuuu

SEQ ID NO: 1687505 - RNA, 23 nt, Human
cuuuucuguccgagcuuugaaaa

SEQ ID NO: 1687506 - RNA, 16 nt, Human
cuuuucuuucagccaa

SEQ ID NO: 1687507 - RNA, 18 nt, Human
cuuuucuugcaugaggcu

SEQ ID NO: 1687508 - RNA, 23 nt, Human
cuuuucuugcaugaggcuagugu

SEQ ID NO: 1687509 - RNA, 19 nt, Human
cuuuggacccugaggccca

SEQ ID NO: 1687510 - RNA, 17 nt, Human
cuuuggacccugaggcc

SEQ ID NO: 1687511 - RNA, 18 nt, Human
cuuuggacccugaggccc

SEQ ID NO: 1687512 - RNA, 15 nt, Human
cuuuggacccugagg

SEQ ID NO: 1687513 - RNA, 16 nt, Human
cuuuggacccugaggc

SEQ ID NO: 1687514 - RNA, 16 nt, Human
cuuucccaucuuccaa

SEQ ID NO: 1687515 - RNA, 14 nt, Human
cuuugugauuuuug

SEQ ID NO: 1687516 - RNA, 22 nt, Human
cuuuguccccaccgcagacagg

SEQ ID NO: 1687517 - RNA, 13 nt, Human
cuuugggaggcca

SEQ ID NO: 1687518 - RNA, 18 nt, Human
cuuuguccccaccgcaga

SEQ ID NO: 1687519 - RNA, 19 nt, Human
cuuugugauuuuuguaauu

SEQ ID NO: 1687520 - RNA, 18 nt, Human
cuuugugauuuuuguaau

SEQ ID NO: 1687521 - RNA, 17 nt, Human
cuuugugauuuuuguaa

SEQ ID NO: 1687522 - RNA, 14 nt, Human
cuuuguucuggcuc

SEQ ID NO: 1687523 - RNA, 15 nt, Human
cuuuguucuggcucu

SEQ ID NO: 1687524 - RNA, 14 nt, Human
cuuuuuucuaaagu

SEQ ID NO: 1687525 - RNA, 20 nt, Human
cuuuuuucucugauacagaa

SEQ ID NO: 1687526 - RNA, 15 nt, Human
cuuuuuucacuacau

SEQ ID NO: 1687527 - RNA, 22 nt, Human
cuuuugauaaucaacugggcug

SEQ ID NO: 1687528 - RNA, 16 nt, Human
cuuuugagcauuuaga

SEQ ID NO: 1687529 - RNA, 21 nt, Human
cuuuugagugccuuacacaau

SEQ ID NO: 1687530 - RNA, 22 nt, Human
cuuuuuucucugauacagaaaa

SEQ ID NO: 1687531 - RNA, 14 nt, Human
cuuuuuuggcugcu

SEQ ID NO: 1687532 - RNA, 15 nt, Human
cuuuuuuggcugcug

SEQ ID NO: 1687533 - RNA, 17 nt, Human
gaaaaaggaugcacaga

SEQ ID NO: 1687534 - RNA, 23 nt, Human
gaaaaaggaugcacagaguuguu

SEQ ID NO: 1687535 - RNA, 16 nt, Human
cuuuuuuggcugcuga

SEQ ID NO: 1687536 - RNA, 19 nt, Human
gaaaacguggcugcuucaa

SEQ ID NO: 1687537 - RNA, 18 nt, Human
gaaaacguggcugcuuca

SEQ ID NO: 1687538 - RNA, 15 nt, Human
gaaaacguggcugcu

SEQ ID NO: 1687539 - RNA, 16 nt, Human
gaaaacguggcugcuu

SEQ ID NO: 1687540 - RNA, 21 nt, Human
gaaaaccaagccguggcuucc

SEQ ID NO: 1687541 - RNA, 18 nt, Human
gaaaaccaagccguggcu

SEQ ID NO: 1687542 - RNA, 19 nt, Human
gaaaaccaagccguggcuu

SEQ ID NO: 1687543 - RNA, 15 nt, Human
gaaaacaugcuacac

SEQ ID NO: 1687544 - RNA, 14 nt, Human
gaaaacaugcuaca

SEQ ID NO: 1687545 - RNA, 12 nt, Human
gaaaacaugcua

SEQ ID NO: 1687546 - RNA, 14 nt, Human
gaaaacacauuuuu

SEQ ID NO: 1687547 - RNA, 13 nt, Human
gaaaacacauuuu

SEQ ID NO: 1687548 - RNA, 22 nt, Human
gaaaacaauaacgauaaaagac

SEQ ID NO: 1687549 - RNA, 16 nt, Human
gaaacacuuugcauaa

SEQ ID NO: 1687550 - RNA, 16 nt, Human
gaaacagccugugucu

SEQ ID NO: 1687551 - RNA, 17 nt, Human
gaaacagccugugucuu

SEQ ID NO: 1687552 - RNA, 15 nt, Human
gaaacagcucgacuu

SEQ ID NO: 1687553 - RNA, 20 nt, Human
gaaacagcucgacuuuaaaa

SEQ ID NO: 1687554 - RNA, 18 nt, Human
gaaacagcuaaugggaca

SEQ ID NO: 1687555 - RNA, 22 nt, Human
gaaacacugggcuucuagaacc

SEQ ID NO: 1687556 - RNA, 20 nt, Human
gaaaaucuuauaauuuaaaa

SEQ ID NO: 1687557 - RNA, 19 nt, Human
gaaaagcugcugacagugu

SEQ ID NO: 1687558 - RNA, 13 nt, Human
gaaaagcugcuga

SEQ ID NO: 1687559 - RNA, 17 nt, Human
gaaaagcugcugacagu

SEQ ID NO: 1687560 - RNA, 19 nt, Human
gaaaauaacgauaaaagac

SEQ ID NO: 1687561 - RNA, 16 nt, Human
gaaaaucagccugcuc

SEQ ID NO: 1687562 - RNA, 18 nt, Human
gaaaaucagccugcucca

SEQ ID NO: 1687563 - RNA, 19 nt, Human
gaaaaucuuauaauuuaaa

SEQ ID NO: 1687564 - RNA, 12 nt, Human
gaaaauaucacu

SEQ ID NO: 1687565 - RNA, 14 nt, Human
gaaaaucagccugc

SEQ ID NO: 1687566 - RNA, 22 nt, Human
cuuggaggaaggaaacccagcu

SEQ ID NO: 1687567 - RNA, 23 nt, Human
cuuggagggcaugaagacagaua

SEQ ID NO: 1687568 - RNA, 12 nt, Human
cuuggagggcau

SEQ ID NO: 1687569 - RNA, 16 nt, Human
cuuggcugcagggagu

SEQ ID NO: 1687570 - RNA, 17 nt, Human
cuuggcugcagggaguc

SEQ ID NO: 1687571 - RNA, 18 nt, Human
cuugggccacugugaaga

SEQ ID NO: 1687572 - RNA, 13 nt, Human
cuugggcuucauc

SEQ ID NO: 1687573 - RNA, 14 nt, Human
cuugggccacugug

SEQ ID NO: 1687574 - RNA, 20 nt, Human
cuuggggaccagagcugcca

SEQ ID NO: 1687575 - RNA, 21 nt, Human
cuuggggaccagagcugccac

SEQ ID NO: 1687576 - RNA, 22 nt, Human
cuugggcuucauccuccucaga

SEQ ID NO: 1687577 - RNA, 16 nt, Human
cuuggggaccagagcu

SEQ ID NO: 1687578 - RNA, 22 nt, Human
cuuggggaccagagcugccacc

SEQ ID NO: 1687579 - RNA, 15 nt, Human
cuuggggggcugagg

SEQ ID NO: 1687580 - RNA, 16 nt, Human
cuuggggggcugaggu

SEQ ID NO: 1687581 - RNA, 22 nt, Human
cuuggggggcugaggugggagg

SEQ ID NO: 1687582 - RNA, 19 nt, Human
cuuguaaaggaauuuaaaa

SEQ ID NO: 1687583 - RNA, 16 nt, Human
cuugcucugcugacag

SEQ ID NO: 1687584 - RNA, 17 nt, Human
cuugcucugcugacaga

SEQ ID NO: 1687585 - RNA, 20 nt, Human
cuugcuucaaccccaugaga

SEQ ID NO: 1687586 - RNA, 16 nt, Human
cuuggaaaugggagac

SEQ ID NO: 1687587 - RNA, 13 nt, Human
cuuggaagcuccg

SEQ ID NO: 1687588 - RNA, 14 nt, Human
cuuggaagcuccgc

SEQ ID NO: 1687589 - RNA, 13 nt, Human
cuuggaggaagga

SEQ ID NO: 1687590 - RNA, 14 nt, Human
cuugcucugcugac

SEQ ID NO: 1687591 - RNA, 22 nt, Human
cuugccaucccucccuccaccu

SEQ ID NO: 1687592 - RNA, 17 nt, Human
cuucuccacccugcucu

SEQ ID NO: 1687593 - RNA, 18 nt, Human
cuucuccacccugcucuc

SEQ ID NO: 1687594 - RNA, 21 nt, Human
cuucuccacccugcucuccga

SEQ ID NO: 1687595 - RNA, 14 nt, Human
cuugccacugccuc

SEQ ID NO: 1687596 - RNA, 15 nt, Human
cuugccacugccucu

SEQ ID NO: 1687597 - RNA, 21 nt, Human
cuugccaucccucccuccacc

SEQ ID NO: 1687598 - RNA, 18 nt, Human
cuuuccaaaugcccagcu

SEQ ID NO: 1687599 - RNA, 19 nt, Human
cuuuccaaaugcccagcuu

SEQ ID NO: 1687600 - RNA, 22 nt, Human
cuuuccaaaugcccagcuuaaa

SEQ ID NO: 1687601 - RNA, 13 nt, Human
cuuuccacagaag

SEQ ID NO: 1687602 - RNA, 14 nt, Human
cuuucauauuuuag

SEQ ID NO: 1687603 - RNA, 20 nt, Human
cuuuauucuggcagaggagg

SEQ ID NO: 1687604 - RNA, 13 nt, Human
cuuuauaauucua

SEQ ID NO: 1687605 - RNA, 21 nt, Human
cuuuauuuucuauaauuuaaa

SEQ ID NO: 1687606 - RNA, 19 nt, Human
cuuguuuuuuuuuuccacu

SEQ ID NO: 1687607 - RNA, 20 nt, Human
cuuguuuuuuuuuuccacuu

SEQ ID NO: 1687608 - RNA, 17 nt, Human
cuuuaaaaaaaaaauug

SEQ ID NO: 1687609 - RNA, 21 nt, Human
cuuguuuuuuuuuuccacuua

SEQ ID NO: 1687610 - RNA, 14 nt, Human
cuuguuuucuggga

SEQ ID NO: 1687611 - RNA, 20 nt, Human
cuuuaaagggauggcaagau

SEQ ID NO: 1687612 - RNA, 18 nt, Human
cuuuaaagggauggcaag

SEQ ID NO: 1687613 - RNA, 21 nt, Human
cuuguguguuuauugucaaag

SEQ ID NO: 1687614 - RNA, 14 nt, Human
cuucagugccaaaa

SEQ ID NO: 1687615 - RNA, 15 nt, Human
cuucaguaagccgug

SEQ ID NO: 1687616 - RNA, 16 nt, Human
cuucauuaauaauaaa

SEQ ID NO: 1687617 - RNA, 20 nt, Human
cuucauucaacccaccugcg

SEQ ID NO: 1687618 - RNA, 17 nt, Human
cuucauuaauaauaaau

SEQ ID NO: 1687619 - RNA, 13 nt, Human
cuuccacaagagc

SEQ ID NO: 1687620 - RNA, 14 nt, Human
cuuccacaagagcc

SEQ ID NO: 1687621 - RNA, 15 nt, Human
cuuccacaagagccc

SEQ ID NO: 1687622 - RNA, 14 nt, Human
cuucaguaagccgu

SEQ ID NO: 1687623 - RNA, 15 nt, Human
cuucagcugacuuuu

SEQ ID NO: 1687624 - RNA, 19 nt, Human
cuucagcugacuuuucugu

SEQ ID NO: 1687625 - RNA, 16 nt, Human
cuucagcgguuuauau

SEQ ID NO: 1687626 - RNA, 20 nt, Human
cuucagcaaaaauauuuuau

SEQ ID NO: 1687627 - RNA, 23 nt, Human
cuucagcaaaaauauuuuaugau

SEQ ID NO: 1687628 - RNA, 14 nt, Human
cuucagccucccga

SEQ ID NO: 1687629 - RNA, 16 nt, Human
cuucagccucccgagu

SEQ ID NO: 1687630 - RNA, 20 nt, Human
cuucagccucccgaguagcu

SEQ ID NO: 1687631 - RNA, 15 nt, Human
cuucagccugaaaga

SEQ ID NO: 1687632 - RNA, 20 nt, Human
cuucaacugaccagccucca

SEQ ID NO: 1687633 - RNA, 23 nt, Human
cuucaacugaccagccuccaugc

SEQ ID NO: 1687634 - RNA, 17 nt, Human
cuucaacugaccagccu

SEQ ID NO: 1687635 - RNA, 17 nt, Human
cuucaaggauccugagc

SEQ ID NO: 1687636 - RNA, 18 nt, Human
cuucaaggauccugagcc

SEQ ID NO: 1687637 - RNA, 19 nt, Human
cuucaaggauccugagcca

SEQ ID NO: 1687638 - RNA, 20 nt, Human
cuucaaggauccugagccag

SEQ ID NO: 1687639 - RNA, 22 nt, Human
cuuagucacugagacagcccgg

SEQ ID NO: 1687640 - RNA, 21 nt, Human
cuuagucacugagacagcccg

SEQ ID NO: 1687641 - RNA, 20 nt, Human
cuuagucacugagacagccc

SEQ ID NO: 1687642 - RNA, 17 nt, Human
cuucaaauccuugaaga

SEQ ID NO: 1687643 - RNA, 17 nt, Human
cuucagcaaaaauauuu

SEQ ID NO: 1687644 - RNA, 23 nt, Human
cuucacauauugauuuccguuaa

SEQ ID NO: 1687645 - RNA, 14 nt, Human
cuucacauauugau

SEQ ID NO: 1687646 - RNA, 23 nt, Human
cuucaaggauccugagccagauu

SEQ ID NO: 1687647 - RNA, 21 nt, Human
cuucaaggauccugagccaga

SEQ ID NO: 1687648 - RNA, 22 nt, Human
cuucaaggauccugagccagau

SEQ ID NO: 1687649 - RNA, 12 nt, Human
cuucacaacaga

SEQ ID NO: 1687650 - RNA, 14 nt, Human
cuucacaacagauu

SEQ ID NO: 1687651 - RNA, 13 nt, Human
cuuccugugacuu

SEQ ID NO: 1687652 - RNA, 16 nt, Human
cuuccugugacuucag

SEQ ID NO: 1687653 - RNA, 12 nt, Human
cuucccccucca

SEQ ID NO: 1687654 - RNA, 15 nt, Human
cuucccccuccaauc

SEQ ID NO: 1687655 - RNA, 16 nt, Human
cuuccacaagagccca

SEQ ID NO: 1687656 - RNA, 14 nt, Human
cuucgccaccuggg

SEQ ID NO: 1687657 - RNA, 21 nt, Human
cuucgauacaccgggccugga

SEQ ID NO: 1687658 - RNA, 16 nt, Human
cuucgauacaccgggc

SEQ ID NO: 1687659 - RNA, 15 nt, Human
cuucgccaccugggu

SEQ ID NO: 1687660 - RNA, 17 nt, Human
cuucgcuccugugucuu

SEQ ID NO: 1687661 - RNA, 16 nt, Human
cuucucacugccaugc

SEQ ID NO: 1687662 - RNA, 21 nt, Human
cuucucacugccaugccagcu

SEQ ID NO: 1687663 - RNA, 16 nt, Human
cuucucagaaggcaaa

SEQ ID NO: 1687664 - RNA, 22 nt, Human
cuucucagaaggcaaaugacuu

SEQ ID NO: 1687665 - RNA, 19 nt, Human
cuucgggaggucgaggcag

SEQ ID NO: 1687666 - RNA, 20 nt, Human
cuucggccuccauccugagg

SEQ ID NO: 1687667 - RNA, 18 nt, Human
cuuagaaguuuguuguga

SEQ ID NO: 1687668 - RNA, 19 nt, Human
cuuagaauuaguggcacuu

SEQ ID NO: 1687669 - RNA, 11 nt, Human
cuuagacaguc

SEQ ID NO: 1687670 - RNA, 14 nt, Human
cuuagucacugaga

SEQ ID NO: 1687671 - RNA, 23 nt, Human
cuuagguuggcaaaaaggcagga

SEQ ID NO: 1687672 - RNA, 21 nt, Human
cuuagguuggcaaaaaggcag

SEQ ID NO: 1687673 - RNA, 20 nt, Human
cuuaccugccaggaagccag

SEQ ID NO: 1687674 - RNA, 13 nt, Human
cuuacuguacaug

SEQ ID NO: 1687675 - RNA, 20 nt, Human
cuuagaaaaaccaccaccau

SEQ ID NO: 1687676 - RNA, 16 nt, Human
cuuagaaauugcauuu

SEQ ID NO: 1687677 - RNA, 17 nt, Human
cuuagaagucacacagu

SEQ ID NO: 1687678 - RNA, 20 nt, Human
cuuagaagucacacaguauu

SEQ ID NO: 1687679 - RNA, 17 nt, Human
cuuaaccagaucauugu

SEQ ID NO: 1687680 - RNA, 18 nt, Human
cuuaagaauuuugagcag

SEQ ID NO: 1687681 - RNA, 23 nt, Human
cuuaagaagacugcauuauauuu

SEQ ID NO: 1687682 - RNA, 12 nt, Human
cuuaaaaauggu

SEQ ID NO: 1687683 - RNA, 20 nt, Human
cuuaauucuuagcucauucu

SEQ ID NO: 1687684 - RNA, 19 nt, Human
cuuaauuaaaagaauauuu

SEQ ID NO: 1687685 - RNA, 20 nt, Human
cuuaauuaaaagaauauuuu

SEQ ID NO: 1687686 - RNA, 16 nt, Human
cuuaauuaaaagaaua

SEQ ID NO: 1687687 - RNA, 17 nt, Human
cuuaauuaaaagaauau

SEQ ID NO: 1687688 - RNA, 23 nt, Human
cuguucuuucuggcuaugcauuu

SEQ ID NO: 1687689 - RNA, 12 nt, Human
cuguugcccagg

SEQ ID NO: 1687690 - RNA, 13 nt, Human
cuguugcccaggc

SEQ ID NO: 1687691 - RNA, 14 nt, Human
cuguugcccaggcu

SEQ ID NO: 1687692 - RNA, 15 nt, Human
cuguugcccaggcug

SEQ ID NO: 1687693 - RNA, 16 nt, Human
cuguugcccaggcugg

SEQ ID NO: 1687694 - RNA, 16 nt, Human
cuguuaauaguucagg

SEQ ID NO: 1687695 - RNA, 21 nt, Human
cuguucuuucuggcuaugcau

SEQ ID NO: 1687696 - RNA, 14 nt, Human
cuguucuuucuggc

SEQ ID NO: 1687697 - RNA, 13 nt, Human
cuguucuuucugg

SEQ ID NO: 1687698 - RNA, 21 nt, Human
cuguucuuuccaaaguacacu

SEQ ID NO: 1687699 - RNA, 19 nt, Human
cuguucuuuccaaaguaca

SEQ ID NO: 1687700 - RNA, 16 nt, Human
cuguucuuuccaaagu

SEQ ID NO: 1687701 - RNA, 15 nt, Human
cuguucuuuccaaag

SEQ ID NO: 1687702 - RNA, 18 nt, Human
cuguugcccaggcuggcg

SEQ ID NO: 1687703 - RNA, 17 nt, Human
cuguugcccaggcuggc

SEQ ID NO: 1687704 - RNA, 17 nt, Human
cuguuuagauaauacac

SEQ ID NO: 1687705 - RNA, 14 nt, Human
cuguuuagauaaua

SEQ ID NO: 1687706 - RNA, 17 nt, Human
cuguuucaaacuuuacu

SEQ ID NO: 1687707 - RNA, 15 nt, Human
cuguuucaaacuuua

SEQ ID NO: 1687708 - RNA, 18 nt, Human
cuguuuagauaauacacc

SEQ ID NO: 1687709 - RNA, 17 nt, Human
cuguuugcuaagugagg

SEQ ID NO: 1687710 - RNA, 19 nt, Human
cuguuugcuaagugaggau

SEQ ID NO: 1687711 - RNA, 16 nt, Human
cuuaaaaaguggaaaa

SEQ ID NO: 1687712 - RNA, 17 nt, Human
cuuaaaaaguggaaaaa

SEQ ID NO: 1687713 - RNA, 13 nt, Human
cuguuuucucuug

SEQ ID NO: 1687714 - RNA, 22 nt, Human
cuguuuuacaaaaaagaaaaga

SEQ ID NO: 1687715 - RNA, 14 nt, Human
cuguuuuauaauuu

SEQ ID NO: 1687716 - RNA, 15 nt, Human
cuguuuuauaauuuu

SEQ ID NO: 1687717 - RNA, 17 nt, Human
cugguggcagcucaccu

SEQ ID NO: 1687718 - RNA, 18 nt, Human
cugguggcagcucaccuc

SEQ ID NO: 1687719 - RNA, 20 nt, Human
cugguggcagcucaccucuc

SEQ ID NO: 1687720 - RNA, 15 nt, Human
cugguggcagcugcg

SEQ ID NO: 1687721 - RNA, 14 nt, Human
cugguggcaguggg

SEQ ID NO: 1687722 - RNA, 18 nt, Human
cugguggcagugggagcu

SEQ ID NO: 1687723 - RNA, 15 nt, Human
cugguguauguguga

SEQ ID NO: 1687724 - RNA, 21 nt, Human
cugguggcagcucaccucucc

SEQ ID NO: 1687725 - RNA, 19 nt, Human
cugguggcagugggagcug

SEQ ID NO: 1687726 - RNA, 15 nt, Human
cuguaauuugugaua

SEQ ID NO: 1687727 - RNA, 14 nt, Human
cuguaauuugugau

SEQ ID NO: 1687728 - RNA, 14 nt, Human
cuguacagagccca

SEQ ID NO: 1687729 - RNA, 15 nt, Human
cuguacagagcccac

SEQ ID NO: 1687730 - RNA, 18 nt, Human
cuguacagagcccacgcc

SEQ ID NO: 1687731 - RNA, 22 nt, Human
cuguacagagcccacgccccca

SEQ ID NO: 1687732 - RNA, 19 nt, Human
cuguaauccuagcacuuug

SEQ ID NO: 1687733 - RNA, 22 nt, Human
cugguuagagguucccuuugac

SEQ ID NO: 1687734 - RNA, 16 nt, Human
cuggugugaacuaaac

SEQ ID NO: 1687735 - RNA, 21 nt, Human
cugguuagagguucccuuuga

SEQ ID NO: 1687736 - RNA, 17 nt, Human
cuggugugaacuaaacu

SEQ ID NO: 1687737 - RNA, 17 nt, Human
cuguauuagucacagag

SEQ ID NO: 1687738 - RNA, 19 nt, Human
cuguauuagucacagagau

SEQ ID NO: 1687739 - RNA, 21 nt, Human
cuguaucccaugagccucagc

SEQ ID NO: 1687740 - RNA, 22 nt, Human
cuguaucccaugagccucagca

SEQ ID NO: 1687741 - RNA, 20 nt, Human
cuguaucccaugagccucag

SEQ ID NO: 1687742 - RNA, 20 nt, Human
cuguauuuuguuuuugucuu

SEQ ID NO: 1687743 - RNA, 15 nt, Human
cugucaauuacagga

SEQ ID NO: 1687744 - RNA, 16 nt, Human
cugucaauuacaggaa

SEQ ID NO: 1687745 - RNA, 15 nt, Human
cuguacuccucccag

SEQ ID NO: 1687746 - RNA, 16 nt, Human
cuguacuccucccagg

SEQ ID NO: 1687747 - RNA, 19 nt, Human
cuguacuccucccaggcgc

SEQ ID NO: 1687748 - RNA, 21 nt, Human
cuguacuccucccaggcgccc

SEQ ID NO: 1687749 - RNA, 14 nt, Human
cuguacuccuccca

SEQ ID NO: 1687750 - RNA, 19 nt, Human
cuguacgucugacaggcaa

SEQ ID NO: 1687751 - RNA, 20 nt, Human
cuguacgucugacaggcaau

SEQ ID NO: 1687752 - RNA, 21 nt, Human
cuguacaugaaaacacauuuu

SEQ ID NO: 1687753 - RNA, 20 nt, Human
cuguacaugaaaacacauuu

SEQ ID NO: 1687754 - RNA, 17 nt, Human
cuguacaugaaaacaca

SEQ ID NO: 1687755 - RNA, 14 nt, Human
cuguacgucugaca

SEQ ID NO: 1687756 - RNA, 15 nt, Human
cuguacgucugacag

SEQ ID NO: 1687757 - RNA, 16 nt, Human
cuguacgucugacagg

SEQ ID NO: 1687758 - RNA, 18 nt, Human
cuguacgucugacaggca

SEQ ID NO: 1687759 - RNA, 16 nt, Human
cugggggccucuucug

SEQ ID NO: 1687760 - RNA, 18 nt, Human
cugggggcugggcagagg

SEQ ID NO: 1687761 - RNA, 14 nt, Human
cugggggcugggca

SEQ ID NO: 1687762 - RNA, 17 nt, Human
cugggcuucaguggcag

SEQ ID NO: 1687763 - RNA, 15 nt, Human
cugggcuucaguggc

SEQ ID NO: 1687764 - RNA, 22 nt, Human
cugggcuuggggaccagagcug

SEQ ID NO: 1687765 - RNA, 18 nt, Human
cugggcuugucuguagau

SEQ ID NO: 1687766 - RNA, 15 nt, Human
cugggucgcccugga

SEQ ID NO: 1687767 - RNA, 16 nt, Human
cugggucgcccuggac

SEQ ID NO: 1687768 - RNA, 14 nt, Human
cugggguuaucuga

SEQ ID NO: 1687769 - RNA, 24 nt, Human
cuggggugggggugggaggccagc

SEQ ID NO: 1687770 - RNA, 20 nt, Human
cuggggguucuuucuuccuc

SEQ ID NO: 1687771 - RNA, 23 nt, Human
cuggggguucuuucuuccucugc

SEQ ID NO: 1687772 - RNA, 13 nt, Human
cugggucgcccug

SEQ ID NO: 1687773 - RNA, 20 nt, Human
cugggccccugccucucugc

SEQ ID NO: 1687774 - RNA, 23 nt, Human
cugggccccugccucucugcagg

SEQ ID NO: 1687775 - RNA, 18 nt, Human
cugggauuacaggcguga

SEQ ID NO: 1687776 - RNA, 21 nt, Human
cugggauuacaagcgugagcc

SEQ ID NO: 1687777 - RNA, 18 nt, Human
cugggcugaacacuccaa

SEQ ID NO: 1687778 - RNA, 14 nt, Human
cuguggaucaaauc

SEQ ID NO: 1687779 - RNA, 24 nt, Human
cuguggaucaaauccagccugcug

SEQ ID NO: 1687780 - RNA, 12 nt, Human
cugugccucugc

SEQ ID NO: 1687781 - RNA, 13 nt, Human
cugugccucugcc

SEQ ID NO: 1687782 - RNA, 14 nt, Human
cugugccucugccu

SEQ ID NO: 1687783 - RNA, 15 nt, Human
cugugccucugccug

SEQ ID NO: 1687784 - RNA, 16 nt, Human
cugugccucugccugu

SEQ ID NO: 1687785 - RNA, 17 nt, Human
cugugccucugccuguc

SEQ ID NO: 1687786 - RNA, 21 nt, Human
cuguggguuucuaaagcugcc

SEQ ID NO: 1687787 - RNA, 15 nt, Human
cuguggugacuuugg

SEQ ID NO: 1687788 - RNA, 17 nt, Human
cuguggugacuuuggau

SEQ ID NO: 1687789 - RNA, 18 nt, Human
cuguggugacuuuggaua

SEQ ID NO: 1687790 - RNA, 20 nt, Human
cuguggugacuuuggauaau

SEQ ID NO: 1687791 - RNA, 23 nt, Human
cuguggugacuuuggauaauaag

SEQ ID NO: 1687792 - RNA, 13 nt, Human
cuguggugacuuu

SEQ ID NO: 1687793 - RNA, 14 nt, Human
cuguggugacuuug

SEQ ID NO: 1687794 - RNA, 12 nt, Human
cuguggugacuu

SEQ ID NO: 1687795 - RNA, 22 nt, Human
cuguggguuucuaaagcugcca

SEQ ID NO: 1687796 - RNA, 14 nt, Human
cugugugcucagga

SEQ ID NO: 1687797 - RNA, 19 nt, Human
cugugucuuuaaaugcugc

SEQ ID NO: 1687798 - RNA, 20 nt, Human
cugugucuuuaaaugcugcu

SEQ ID NO: 1687799 - RNA, 21 nt, Human
cugugucuuuaaaugcugcuu

SEQ ID NO: 1687800 - RNA, 20 nt, Human
cugugucuuuuuucacuaca

SEQ ID NO: 1687801 - RNA, 18 nt, Human
cugugugugcgccuacag

SEQ ID NO: 1687802 - RNA, 19 nt, Human
cuguuaaaagaugaaaaua

SEQ ID NO: 1687803 - RNA, 15 nt, Human
cuguuaaaagaugaa

SEQ ID NO: 1687804 - RNA, 16 nt, Human
cuguuaaaagaugaaa

SEQ ID NO: 1687805 - RNA, 23 nt, Human
cugucauuugagcagggcucagc

SEQ ID NO: 1687806 - RNA, 18 nt, Human
cugucaauuacaggaagu

SEQ ID NO: 1687807 - RNA, 19 nt, Human
cugucaauuacaggaagua

SEQ ID NO: 1687808 - RNA, 21 nt, Human
cugucauuugagcagggcuca

SEQ ID NO: 1687809 - RNA, 22 nt, Human
cugucauuugagcagggcucag

SEQ ID NO: 1687810 - RNA, 21 nt, Human
cugucuugccuuuuucauuau

SEQ ID NO: 1687811 - RNA, 23 nt, Human
cugucuugccuuuuucauuauuu

SEQ ID NO: 1687812 - RNA, 21 nt, Human
cugucuuuuuucuaaaguaaa

SEQ ID NO: 1687813 - RNA, 15 nt, Human
cugugaaaggaaaga

SEQ ID NO: 1687814 - RNA, 18 nt, Human
cugucuucaguaagccgu

SEQ ID NO: 1687815 - RNA, 18 nt, Human
cugucuucacaacagauu

SEQ ID NO: 1687816 - RNA, 14 nt, Human
cugugccaugugcc

SEQ ID NO: 1687817 - RNA, 19 nt, Human
cugugcccuaaaguguauu

SEQ ID NO: 1687818 - RNA, 15 nt, Human
cugugccaugugcca

SEQ ID NO: 1687819 - RNA, 15 nt, Human
cugugauggggcccu

SEQ ID NO: 1687820 - RNA, 23 nt, Human
cugugauggggcccugccuccuu

SEQ ID NO: 1687821 - RNA, 16 nt, Human
cugugauggggcccug

SEQ ID NO: 1687822 - RNA, 21 nt, Human
cugugauggggcccugccucc

SEQ ID NO: 1687823 - RNA, 16 nt, Human
cugugaaaggaaagag

SEQ ID NO: 1687824 - RNA, 22 nt, Human
cugugaaaggaaagagggaggu

SEQ ID NO: 1687825 - RNA, 23 nt, Human
cccaccgggcugggagcucugca

SEQ ID NO: 1687826 - RNA, 22 nt, Human
cccaccucucucacuccuugaa

SEQ ID NO: 1687827 - RNA, 18 nt, Human
cccaccaucaugucuggc

SEQ ID NO: 1687828 - RNA, 19 nt, Human
cccaccgcagacaggacca

SEQ ID NO: 1687829 - RNA, 20 nt, Human
cccaccgcagacaggaccag

SEQ ID NO: 1687830 - RNA, 19 nt, Human
cccacgcuggagugcagug

SEQ ID NO: 1687831 - RNA, 20 nt, Human
cccacgcuggagugcaguga

SEQ ID NO: 1687832 - RNA, 21 nt, Human
cccacgcuggagugcagugag

SEQ ID NO: 1687833 - RNA, 23 nt, Human
cccacuugagaauuacccuuuug

SEQ ID NO: 1687834 - RNA, 12 nt, Human
cccacuucugcc

SEQ ID NO: 1687835 - RNA, 17 nt, Human
cccaccuggccucugca

SEQ ID NO: 1687836 - RNA, 19 nt, Human
cccaccuggccucugcacu

SEQ ID NO: 1687837 - RNA, 21 nt, Human
cccaccuggccucugcacucc

SEQ ID NO: 1687838 - RNA, 20 nt, Human
cccacgacugcccggcaggg

SEQ ID NO: 1687839 - RNA, 21 nt, Human
cccacgacugcccggcagggu

SEQ ID NO: 1687840 - RNA, 20 nt, Human
cccacaagaaaugaaagcag

SEQ ID NO: 1687841 - RNA, 16 nt, Human
cccaaugcacuuuguu

SEQ ID NO: 1687842 - RNA, 20 nt, Human
cccaaugcacuuuguucugg

SEQ ID NO: 1687843 - RNA, 23 nt, Human
cccaaugcacuuuguucuggcuc

SEQ ID NO: 1687844 - RNA, 13 nt, Human
cccacaagaaaug

SEQ ID NO: 1687845 - RNA, 18 nt, Human
cccugcccaccuggccuc

SEQ ID NO: 1687846 - RNA, 16 nt, Human
cccugcuggguguggc

SEQ ID NO: 1687847 - RNA, 21 nt, Human
cccugcuggguguggcgcagc

SEQ ID NO: 1687848 - RNA, 14 nt, Human
cccugcccaccugg

SEQ ID NO: 1687849 - RNA, 17 nt, Human
cccugcccaccuggccu

SEQ ID NO: 1687850 - RNA, 20 nt, Human
cccugcuuugggcugcccug

SEQ ID NO: 1687851 - RNA, 22 nt, Human
cccugcuuugggcugcccuggu

SEQ ID NO: 1687852 - RNA, 17 nt, Human
cccugcuuucagauacu

SEQ ID NO: 1687853 - RNA, 17 nt, Human
cccugcuuugggcugcc

SEQ ID NO: 1687854 - RNA, 18 nt, Human
cccugcuuugggcugccc

SEQ ID NO: 1687855 - RNA, 19 nt, Human
cccugcuuugggcugcccu

SEQ ID NO: 1687856 - RNA, 22 nt, Human
cccugcuggguguggcgcagca

SEQ ID NO: 1687857 - RNA, 19 nt, Human
cccuggcuuuucacugcug

SEQ ID NO: 1687858 - RNA, 22 nt, Human
cccuggcuuuucacugcuggcu

SEQ ID NO: 1687859 - RNA, 18 nt, Human
cccugggaggcagugaug

SEQ ID NO: 1687860 - RNA, 18 nt, Human
cccuggcuuuucacugcu

SEQ ID NO: 1687861 - RNA, 21 nt, Human
cccuggacugugugcucagga

SEQ ID NO: 1687862 - RNA, 15 nt, Human
cccuggacugugugc

SEQ ID NO: 1687863 - RNA, 15 nt, Human
cccugggaggcucug

SEQ ID NO: 1687864 - RNA, 15 nt, Human
cccugguggcagcuc

SEQ ID NO: 1687865 - RNA, 16 nt, Human
cccugguggcagcuca

SEQ ID NO: 1687866 - RNA, 17 nt, Human
cccugguggcagcucac

SEQ ID NO: 1687867 - RNA, 16 nt, Human
cccugcaaagcccagc

SEQ ID NO: 1687868 - RNA, 17 nt, Human
cccugcaaagcccagcu

SEQ ID NO: 1687869 - RNA, 19 nt, Human
cccugcaaagcccagcuug

SEQ ID NO: 1687870 - RNA, 20 nt, Human
cccugcaaagcccagcuuga

SEQ ID NO: 1687871 - RNA, 23 nt, Human
cccugcacaaagcccuuccaugu

SEQ ID NO: 1687872 - RNA, 15 nt, Human
cccugcaaagcccag

SEQ ID NO: 1687873 - RNA, 22 nt, Human
cccugcacuugcagacucuaca

SEQ ID NO: 1687874 - RNA, 19 nt, Human
cccugcacuugcagacucu

SEQ ID NO: 1687875 - RNA, 12 nt, Human
cccugcacuugc

SEQ ID NO: 1687876 - RNA, 16 nt, Human
cccucuggggcuguuc

SEQ ID NO: 1687877 - RNA, 15 nt, Human
cccugaaagcccuga

SEQ ID NO: 1687878 - RNA, 13 nt, Human
cccugaggcccag

SEQ ID NO: 1687879 - RNA, 16 nt, Human
cccugaaagcccugag

SEQ ID NO: 1687880 - RNA, 14 nt, Human
cccugaggcccaga

SEQ ID NO: 1687881 - RNA, 15 nt, Human
cccugaggcccagag

SEQ ID NO: 1687882 - RNA, 16 nt, Human
cccugaggcccagagg

SEQ ID NO: 1687883 - RNA, 17 nt, Human
cccugaggcccagaggg

SEQ ID NO: 1687884 - RNA, 18 nt, Human
cccugaggcccagagggc

SEQ ID NO: 1687885 - RNA, 19 nt, Human
cccugaggcccagagggcc

SEQ ID NO: 1687886 - RNA, 20 nt, Human
cccugaggcccagagggccu

SEQ ID NO: 1687887 - RNA, 23 nt, Human
cccugaggcccagagggccugca

SEQ ID NO: 1687888 - RNA, 17 nt, Human
cccuccaccucccugca

SEQ ID NO: 1687889 - RNA, 15 nt, Human
cccuccaccucccug

SEQ ID NO: 1687890 - RNA, 19 nt, Human
cccuccaccucccugcaau

SEQ ID NO: 1687891 - RNA, 22 nt, Human
cccuauccuacuuccccuuccu

SEQ ID NO: 1687892 - RNA, 12 nt, Human
cccuccaccucc

SEQ ID NO: 1687893 - RNA, 14 nt, Human
cccuccaccucccu

SEQ ID NO: 1687894 - RNA, 13 nt, Human
cccucuccugggc

SEQ ID NO: 1687895 - RNA, 12 nt, Human
cccucuccuggg

SEQ ID NO: 1687896 - RNA, 11 nt, Human
cccucuccugg

SEQ ID NO: 1687897 - RNA, 15 nt, Human
cccucuccugggcag

SEQ ID NO: 1687898 - RNA, 14 nt, Human
cccucuccugggca

SEQ ID NO: 1687899 - RNA, 14 nt, Human
cccagagggccugc

SEQ ID NO: 1687900 - RNA, 15 nt, Human
cccagagggccugca

SEQ ID NO: 1687901 - RNA, 18 nt, Human
cccagagggccugcaagg

SEQ ID NO: 1687902 - RNA, 13 nt, Human
cccgaguagcugg

SEQ ID NO: 1687903 - RNA, 14 nt, Human
cccgaguagcuggg

SEQ ID NO: 1687904 - RNA, 15 nt, Human
cccgaguagcuggga

SEQ ID NO: 1687905 - RNA, 16 nt, Human
cccgaguagcugggac

SEQ ID NO: 1687906 - RNA, 17 nt, Human
cccgaguagcugggacu

SEQ ID NO: 1687907 - RNA, 18 nt, Human
cccgaguagcugggacua

SEQ ID NO: 1687908 - RNA, 21 nt, Human
cccgaguagcugggacuacag

SEQ ID NO: 1687909 - RNA, 12 nt, Human
cccgggcucugc

SEQ ID NO: 1687910 - RNA, 14 nt, Human
cccgggcucugccu

SEQ ID NO: 1687911 - RNA, 15 nt, Human
cccgggcucugccuc

SEQ ID NO: 1687912 - RNA, 19 nt, Human
cccgcugucagccauuccu

SEQ ID NO: 1687913 - RNA, 20 nt, Human
cccgcugucagccauuccug

SEQ ID NO: 1687914 - RNA, 22 nt, Human
cccgaguagcugggacuacagg

SEQ ID NO: 1687915 - RNA, 21 nt, Human
cccuaccgagucucuucucca

SEQ ID NO: 1687916 - RNA, 18 nt, Human
cccuaccgagucucuucu

SEQ ID NO: 1687917 - RNA, 21 nt, Human
cccuaaugcgcaggcuggccc

SEQ ID NO: 1687918 - RNA, 22 nt, Human
cccuaaugcgcaggcuggcccu

SEQ ID NO: 1687919 - RNA, 17 nt, Human
cccuaaugcgcaggcug

SEQ ID NO: 1687920 - RNA, 23 nt, Human
cccuaaugcgcaggcuggcccug

SEQ ID NO: 1687921 - RNA, 20 nt, Human
cccuacaguugaaaaacagc

SEQ ID NO: 1687922 - RNA, 16 nt, Human
cccgggcucugccucc

SEQ ID NO: 1687923 - RNA, 18 nt, Human
cccggugcccaagaauag

SEQ ID NO: 1687924 - RNA, 22 nt, Human
cccgucucugguuccuccccuc

SEQ ID NO: 1687925 - RNA, 15 nt, Human
cccgugggguuccuc

SEQ ID NO: 1687926 - RNA, 17 nt, Human
ccucccgaauagcuggg

SEQ ID NO: 1687927 - RNA, 16 nt, Human
ccucuaggaggucucu

SEQ ID NO: 1687928 - RNA, 16 nt, Human
ccucggugccuuccuc

SEQ ID NO: 1687929 - RNA, 14 nt, Human
ccucgguguggaga

SEQ ID NO: 1687930 - RNA, 18 nt, Human
ccucgguguggagaagcg

SEQ ID NO: 1687931 - RNA, 23 nt, Human
ccuccugccucgaacuggcugca

SEQ ID NO: 1687932 - RNA, 13 nt, Human
ccuccugcugggc

SEQ ID NO: 1687933 - RNA, 14 nt, Human
ccuccugggcuaag

SEQ ID NO: 1687934 - RNA, 18 nt, Human
ccuccucugcuugccauc

SEQ ID NO: 1687935 - RNA, 13 nt, Human
ccuccucugcuug

SEQ ID NO: 1687936 - RNA, 16 nt, Human
ccuccucugcuugcca

SEQ ID NO: 1687937 - RNA, 20 nt, Human
ccucccgaguagcugggacu

SEQ ID NO: 1687938 - RNA, 21 nt, Human
ccucccgaguagcugggacua

SEQ ID NO: 1687939 - RNA, 22 nt, Human
ccucccugccccucccuucaac

SEQ ID NO: 1687940 - RNA, 24 nt, Human
ccucccugccccucccuucaacca

SEQ ID NO: 1687941 - RNA, 14 nt, Human
ccuccucagaucuu

SEQ ID NO: 1687942 - RNA, 18 nt, Human
ccucccugccccucccuu

SEQ ID NO: 1687943 - RNA, 21 nt, Human
ccucccugccccucccuucaa

SEQ ID NO: 1687944 - RNA, 20 nt, Human
ccucccuccaccucccugca

SEQ ID NO: 1687945 - RNA, 10 nt, Human
ccucccuccc

SEQ ID NO: 1687946 - RNA, 17 nt, Human
ccucccuccaccucccu

SEQ ID NO: 1687947 - RNA, 23 nt, Human
ccuccaaucccaccaacccucag

SEQ ID NO: 1687948 - RNA, 21 nt, Human
ccucaucuccccaucauuggu

SEQ ID NO: 1687949 - RNA, 13 nt, Human
ccucauccucaua

SEQ ID NO: 1687950 - RNA, 20 nt, Human
ccucauccucauacccaccc

SEQ ID NO: 1687951 - RNA, 19 nt, Human
ccuaugcagagguccacaa

SEQ ID NO: 1687952 - RNA, 20 nt, Human
ccucagucuggcccuuccuu

SEQ ID NO: 1687953 - RNA, 11 nt, Human
ccucagugcca

SEQ ID NO: 1687954 - RNA, 21 nt, Human
ccucauagcccucacccuggg

SEQ ID NO: 1687955 - RNA, 22 nt, Human
ccucauagcccucacccugggg

SEQ ID NO: 1687956 - RNA, 20 nt, Human
ccucauaguaugguggcugg

SEQ ID NO: 1687957 - RNA, 17 nt, Human
ccucauagcccucaccc

SEQ ID NO: 1687958 - RNA, 18 nt, Human
ccucauagcccucacccu

SEQ ID NO: 1687959 - RNA, 13 nt, Human
ccucauacccacc

SEQ ID NO: 1687960 - RNA, 21 nt, Human
ccucauaguaugguggcuggg

SEQ ID NO: 1687961 - RNA, 22 nt, Human
ccucauaguaugguggcugggu

SEQ ID NO: 1687962 - RNA, 13 nt, Human
ccucaucaccaac

SEQ ID NO: 1687963 - RNA, 14 nt, Human
ccucaucaccaacg

SEQ ID NO: 1687964 - RNA, 14 nt, Human
ccuccaugcugccu

SEQ ID NO: 1687965 - RNA, 23 nt, Human
ccuccaugugggcuaguugggcu

SEQ ID NO: 1687966 - RNA, 15 nt, Human
ccuccaugcugccuc

SEQ ID NO: 1687967 - RNA, 15 nt, Human
ccucccaaagugcug

SEQ ID NO: 1687968 - RNA, 16 nt, Human
ccucccaaagugcugg

SEQ ID NO: 1687969 - RNA, 18 nt, Human
ccuccaucuaaacugccc

SEQ ID NO: 1687970 - RNA, 22 nt, Human
ccuccaggugcacaagcuccaa

SEQ ID NO: 1687971 - RNA, 19 nt, Human
ccuccaggugcacaagcuc

SEQ ID NO: 1687972 - RNA, 21 nt, Human
ccuccaggugcacaagcucca

SEQ ID NO: 1687973 - RNA, 22 nt, Human
ccuccaccucccugcaauaaaa

SEQ ID NO: 1687974 - RNA, 17 nt, Human
ccuccaccucccugcaa

SEQ ID NO: 1687975 - RNA, 15 nt, Human
ccuccaccucccugc

SEQ ID NO: 1687976 - RNA, 14 nt, Human
ccuccaccucccug

SEQ ID NO: 1687977 - RNA, 13 nt, Human
ccuccaccucccu

SEQ ID NO: 1687978 - RNA, 22 nt, Human
ccuaccgagucucuucuccacu

SEQ ID NO: 1687979 - RNA, 23 nt, Human
ccuaccgagucucuucuccacug

SEQ ID NO: 1687980 - RNA, 13 nt, Human
ccuacuuccugug

SEQ ID NO: 1687981 - RNA, 21 nt, Human
ccuacuuccccuuccuaauuc

SEQ ID NO: 1687982 - RNA, 15 nt, Human
ccuacuuccugugac

SEQ ID NO: 1687983 - RNA, 13 nt, Human
ccuaguuccacca

SEQ ID NO: 1687984 - RNA, 21 nt, Human
ccuaguuccaccaucaagcca

SEQ ID NO: 1687985 - RNA, 23 nt, Human
ccuaguuccaccaucaagccacc

SEQ ID NO: 1687986 - RNA, 22 nt, Human
ccuauauuguuuucaguguaca

SEQ ID NO: 1687987 - RNA, 18 nt, Human
ccuauauuguuuucagug

SEQ ID NO: 1687988 - RNA, 17 nt, Human
ccuaaauccauuuggaa

SEQ ID NO: 1687989 - RNA, 18 nt, Human
ccuaaauccauuuggaaa

SEQ ID NO: 1687990 - RNA, 15 nt, Human
ccuacaagacacagu

SEQ ID NO: 1687991 - RNA, 12 nt, Human
ccuaaauccauu

SEQ ID NO: 1687992 - RNA, 18 nt, Human
ccuaaauauauuuuaaga

SEQ ID NO: 1687993 - RNA, 16 nt, Human
ccuaaauauauuuuaa

SEQ ID NO: 1687994 - RNA, 15 nt, Human
ccuaaaauucagugg

SEQ ID NO: 1687995 - RNA, 18 nt, Human
cccugguuuccugcccug

SEQ ID NO: 1687996 - RNA, 19 nt, Human
cccugguuuccugcccugg

SEQ ID NO: 1687997 - RNA, 14 nt, Human
ccgaggccuucucu

SEQ ID NO: 1687998 - RNA, 20 nt, Human
cccugguggcagcucaccuc

SEQ ID NO: 1687999 - RNA, 16 nt, Human
cccugguuuccugccc

SEQ ID NO: 1688000 - RNA, 17 nt, Human
cccugguuuccugcccu

SEQ ID NO: 1688001 - RNA, 20 nt, Human
ccgaguagcugggacuacag

SEQ ID NO: 1688002 - RNA, 17 nt, Human
ccgaggccuucucugaa

SEQ ID NO: 1688003 - RNA, 17 nt, Human
ccgaguagcugggacua

SEQ ID NO: 1688004 - RNA, 21 nt, Human
ccgcuaagagggagggagggc

SEQ ID NO: 1688005 - RNA, 11 nt, Human
ccgcucagccc

SEQ ID NO: 1688006 - RNA, 12 nt, Human
ccgcucagcccu

SEQ ID NO: 1688007 - RNA, 13 nt, Human
ccgcucagcccuc

SEQ ID NO: 1688008 - RNA, 23 nt, Human
ccgcuaagagggagggagggcuc

SEQ ID NO: 1688009 - RNA, 14 nt, Human
ccgcacugggcuug

SEQ ID NO: 1688010 - RNA, 19 nt, Human
ccgcacugggcuuggggac

SEQ ID NO: 1688011 - RNA, 20 nt, Human
ccgggaagggggcugggaca

SEQ ID NO: 1688012 - RNA, 19 nt, Human
ccgcuuucuacccagcgag

SEQ ID NO: 1688013 - RNA, 23 nt, Human
ccgcuuucuacccagcgagcccu

SEQ ID NO: 1688014 - RNA, 17 nt, Human
ccggcuggccuggcccc

SEQ ID NO: 1688015 - RNA, 18 nt, Human
ccggcuggccuggccccu

SEQ ID NO: 1688016 - RNA, 15 nt, Human
ccgcucagcccuccc

SEQ ID NO: 1688017 - RNA, 19 nt, Human
ccgcucagcccucccugcc

SEQ ID NO: 1688018 - RNA, 21 nt, Human
ccgcucagcccucccugcccc

SEQ ID NO: 1688019 - RNA, 22 nt, Human
ccgcucagcccucccugccccu

SEQ ID NO: 1688020 - RNA, 12 nt, Human
ccgcuuucuacc

SEQ ID NO: 1688021 - RNA, 15 nt, Human
ccgugcuaaggacuu

SEQ ID NO: 1688022 - RNA, 16 nt, Human
ccgugcuaaggacuug

SEQ ID NO: 1688023 - RNA, 14 nt, Human
ccgugcuaaggacu

SEQ ID NO: 1688024 - RNA, 13 nt, Human
ccgggcugggagc

SEQ ID NO: 1688025 - RNA, 18 nt, Human
ccgggcugggagcucugc

SEQ ID NO: 1688026 - RNA, 19 nt, Human
ccgggcugggagcucugca

SEQ ID NO: 1688027 - RNA, 13 nt, Human
ccgggcucugccu

SEQ ID NO: 1688028 - RNA, 20 nt, Human
ccgggcgcgguggcucacgc

SEQ ID NO: 1688029 - RNA, 16 nt, Human
ccgggcguggugguga

SEQ ID NO: 1688030 - RNA, 12 nt, Human
ccuucagugccu

SEQ ID NO: 1688031 - RNA, 17 nt, Human
ccuuaaagaguguggca

SEQ ID NO: 1688032 - RNA, 12 nt, Human
ccuuaaaggaag

SEQ ID NO: 1688033 - RNA, 14 nt, Human
ccuuacacaauggu

SEQ ID NO: 1688034 - RNA, 20 nt, Human
ccuuacacaaugguuuucuu

SEQ ID NO: 1688035 - RNA, 17 nt, Human
ccuuagaagucacacag

SEQ ID NO: 1688036 - RNA, 18 nt, Human
ccuuagaagucacacagu

SEQ ID NO: 1688037 - RNA, 19 nt, Human
ccuuacccucauguucuua

SEQ ID NO: 1688038 - RNA, 19 nt, Human
ccuuaccugccaggaagcc

SEQ ID NO: 1688039 - RNA, 17 nt, Human
ccuuaccacugcucuga

SEQ ID NO: 1688040 - RNA, 13 nt, Human
ccuuaccagcaga

SEQ ID NO: 1688041 - RNA, 15 nt, Human
ccuuacccucauguu

SEQ ID NO: 1688042 - RNA, 20 nt, Human
ccuuaccacugcucugauga

SEQ ID NO: 1688043 - RNA, 20 nt, Human
ccuuaccagcagagcaccuu

SEQ ID NO: 1688044 - RNA, 20 nt, Human
ccugugugugcgccuacagg

SEQ ID NO: 1688045 - RNA, 21 nt, Human
ccugugugugcgccuacagga

SEQ ID NO: 1688046 - RNA, 22 nt, Human
ccugugucuuuaaaugcugcuu

SEQ ID NO: 1688047 - RNA, 22 nt, Human
ccugugucuugcaauggcagcc

SEQ ID NO: 1688048 - RNA, 17 nt, Human
ccugugucuugcaaugg

SEQ ID NO: 1688049 - RNA, 19 nt, Human
ccugugucuugcaauggca

SEQ ID NO: 1688050 - RNA, 21 nt, Human
ccugugucuugcaauggcagc

SEQ ID NO: 1688051 - RNA, 16 nt, Human
ccuguuucugcagcca

SEQ ID NO: 1688052 - RNA, 14 nt, Human
ccuguuuguuucug

SEQ ID NO: 1688053 - RNA, 18 nt, Human
ccuguuuguuucugaaag

SEQ ID NO: 1688054 - RNA, 23 nt, Human
ccuguugggccaggagccuccug

SEQ ID NO: 1688055 - RNA, 12 nt, Human
ccuguuuaagag

SEQ ID NO: 1688056 - RNA, 15 nt, Human
ccuguuuaagagaca

SEQ ID NO: 1688057 - RNA, 20 nt, Human
ccuguuaaaagaugaaaaua

SEQ ID NO: 1688058 - RNA, 21 nt, Human
ccuguuaaaagaugaaaauau

SEQ ID NO: 1688059 - RNA, 14 nt, Human
ccuucacuuaggaa

SEQ ID NO: 1688060 - RNA, 21 nt, Human
ccuucaccuuuguccccaccg

SEQ ID NO: 1688061 - RNA, 14 nt, Human
ccuuagacaguccc

SEQ ID NO: 1688062 - RNA, 17 nt, Human
ccuucacagaugggugc

SEQ ID NO: 1688063 - RNA, 19 nt, Human
ccuucaccuuuguccccac

SEQ ID NO: 1688064 - RNA, 20 nt, Human
ccuucaccuuuguccccacc

SEQ ID NO: 1688065 - RNA, 11 nt, Human
ccuucagugcc

SEQ ID NO: 1688066 - RNA, 14 nt, Human
ccuucagugccaaa

SEQ ID NO: 1688067 - RNA, 12 nt, Human
ccuucagccuga

SEQ ID NO: 1688068 - RNA, 15 nt, Human
ccuuccucugagccu

SEQ ID NO: 1688069 - RNA, 16 nt, Human
ccuuccucugagccuu

SEQ ID NO: 1688070 - RNA, 21 nt, Human
ccuuccucuccacugccuucg

SEQ ID NO: 1688071 - RNA, 20 nt, Human
ccuuccucugagccuuggga

SEQ ID NO: 1688072 - RNA, 13 nt, Human
ccuuccucugagg

SEQ ID NO: 1688073 - RNA, 14 nt, Human
ccuuccucugaggc

SEQ ID NO: 1688074 - RNA, 22 nt, Human
ccuucauuuggcauuccccacu

SEQ ID NO: 1688075 - RNA, 15 nt, Human
ccuucgauacaccgg

SEQ ID NO: 1688076 - RNA, 14 nt, Human
ccuucggccuccau

SEQ ID NO: 1688077 - RNA, 19 nt, Human
ccuucggccuccauccuga

SEQ ID NO: 1688078 - RNA, 20 nt, Human
ccuucggccuccauccugag

SEQ ID NO: 1688079 - RNA, 16 nt, Human
ccuuugacgccauccc

SEQ ID NO: 1688080 - RNA, 17 nt, Human
ccuuugacgccauccca

SEQ ID NO: 1688081 - RNA, 18 nt, Human
ccuuugacgccaucccag

SEQ ID NO: 1688082 - RNA, 12 nt, Human
ccuugggacccc

SEQ ID NO: 1688083 - RNA, 14 nt, Human
ccuugaugaagaag

SEQ ID NO: 1688084 - RNA, 22 nt, Human
ccuuggugucgggcaugacacg

SEQ ID NO: 1688085 - RNA, 21 nt, Human
ccuugguuaggcauuguggga

SEQ ID NO: 1688086 - RNA, 22 nt, Human
ccuugguuaggcauugugggaa

SEQ ID NO: 1688087 - RNA, 19 nt, Human
ccuuggggcugaugcaguu

SEQ ID NO: 1688088 - RNA, 13 nt, Human
ccuugaacuagga

SEQ ID NO: 1688089 - RNA, 20 nt, Human
ccuugaguugauucagcucu

SEQ ID NO: 1688090 - RNA, 23 nt, Human
ccuugaccauucuccaccugcca

SEQ ID NO: 1688091 - RNA, 13 nt, Human
ccuugacucuuuc

SEQ ID NO: 1688092 - RNA, 15 nt, Human
ccuucuccuucaccu

SEQ ID NO: 1688093 - RNA, 19 nt, Human
ccuucuccuucaccuuugu

SEQ ID NO: 1688094 - RNA, 15 nt, Human
ccuucggcgccuuaa

SEQ ID NO: 1688095 - RNA, 16 nt, Human
ccuucggccuccaucc

SEQ ID NO: 1688096 - RNA, 21 nt, Human
ccuucuguggcucacagaacc

SEQ ID NO: 1688097 - RNA, 14 nt, Human
ccuucuguggcuca

SEQ ID NO: 1688098 - RNA, 14 nt, Human
cgagcaugccugga

SEQ ID NO: 1688099 - RNA, 20 nt, Human
cgauuucuguuuagauaaua

SEQ ID NO: 1688100 - RNA, 18 nt, Human
cgagcccugguggcagug

SEQ ID NO: 1688101 - RNA, 18 nt, Human
cgagcaugccuggauggg

SEQ ID NO: 1688102 - RNA, 15 nt, Human
cgagcccugguggca

SEQ ID NO: 1688103 - RNA, 16 nt, Human
cgagcccugguggcag

SEQ ID NO: 1688104 - RNA, 22 nt, Human
cgccaggggaaaaucagccugc

SEQ ID NO: 1688105 - RNA, 15 nt, Human
cgcagcccugcagag

SEQ ID NO: 1688106 - RNA, 19 nt, Human
cgccagauucuuuccugag

SEQ ID NO: 1688107 - RNA, 20 nt, Human
cgccagauucuuuccugagg

SEQ ID NO: 1688108 - RNA, 21 nt, Human
cgccagauucuuuccugaggc

SEQ ID NO: 1688109 - RNA, 15 nt, Human
cgcagacaggaccag

SEQ ID NO: 1688110 - RNA, 16 nt, Human
cgcagacaggaccagg

SEQ ID NO: 1688111 - RNA, 10 nt, Human
cgcagcccug

SEQ ID NO: 1688112 - RNA, 14 nt, Human
cgcagcccugcaga

SEQ ID NO: 1688113 - RNA, 17 nt, Human
cgccaugcuccuggccc

SEQ ID NO: 1688114 - RNA, 18 nt, Human
cgagauagccaaggccaa

SEQ ID NO: 1688115 - RNA, 17 nt, Human
cgagaucacgccacugc

SEQ ID NO: 1688116 - RNA, 17 nt, Human
cgagaaacagccugugu

SEQ ID NO: 1688117 - RNA, 15 nt, Human
cgaauagcugggacu

SEQ ID NO: 1688118 - RNA, 13 nt, Human
cgaauagcuggga

SEQ ID NO: 1688119 - RNA, 14 nt, Human
cgaauagcugggac

SEQ ID NO: 1688120 - RNA, 18 nt, Human
cgagaucacgccacugca

SEQ ID NO: 1688121 - RNA, 20 nt, Human
cgagaucacgccacugcacu

SEQ ID NO: 1688122 - RNA, 20 nt, Human
cgagauugcaccacugcacu

SEQ ID NO: 1688123 - RNA, 13 nt, Human
cgagcaugccugg

SEQ ID NO: 1688124 - RNA, 16 nt, Human
cgagcaugccuggaug

SEQ ID NO: 1688125 - RNA, 17 nt, Human
cgagcaugccuggaugg

SEQ ID NO: 1688126 - RNA, 20 nt, Human
cgagcaggcuucuucccccc

SEQ ID NO: 1688127 - RNA, 18 nt, Human
cgagcaggcuacugucag

SEQ ID NO: 1688128 - RNA, 23 nt, Human
ccuuugacgccaucccagcccca

SEQ ID NO: 1688129 - RNA, 22 nt, Human
ccuuugacgccaucccagcccc

SEQ ID NO: 1688130 - RNA, 20 nt, Human
ccuuugacgccaucccagcc

SEQ ID NO: 1688131 - RNA, 21 nt, Human
ccuuugacgccaucccagccc

SEQ ID NO: 1688132 - RNA, 20 nt, Human
cgaaaacguggcugcuucaa

SEQ ID NO: 1688133 - RNA, 15 nt, Human
cgaaaacguggcugc

SEQ ID NO: 1688134 - RNA, 18 nt, Human
cgaaaacguggcugcuuc

SEQ ID NO: 1688135 - RNA, 19 nt, Human
cgaaaacguggcugcuuca

SEQ ID NO: 1688136 - RNA, 21 nt, Human
cgaaagaacaguccauugaaa

SEQ ID NO: 1688137 - RNA, 12 nt, Human
cgaaagaacagu

SEQ ID NO: 1688138 - RNA, 22 nt, Human
cgaaagggacuuggaagcuccg

SEQ ID NO: 1688139 - RNA, 20 nt, Human
cgaaaggaugaaagugacca

SEQ ID NO: 1688140 - RNA, 19 nt, Human
cgaaagggacuuggaagcu

SEQ ID NO: 1688141 - RNA, 14 nt, Human
cgaacuccugaccu

SEQ ID NO: 1688142 - RNA, 12 nt, Human
cgaacuggcugc

SEQ ID NO: 1688143 - RNA, 14 nt, Human
cgaacuggcugcaa

SEQ ID NO: 1688144 - RNA, 18 nt, Human
ccuggaauauauaaccag

SEQ ID NO: 1688145 - RNA, 22 nt, Human
ccuggcacccggccccugcugg

SEQ ID NO: 1688146 - RNA, 23 nt, Human
ccuggcacccggccccugcuggu

SEQ ID NO: 1688147 - RNA, 22 nt, Human
ccuggcacuauaauguaagcuc

SEQ ID NO: 1688148 - RNA, 12 nt, Human
ccuggcagcccc

SEQ ID NO: 1688149 - RNA, 14 nt, Human
ccuggcagccccug

SEQ ID NO: 1688150 - RNA, 13 nt, Human
ccuggcagccccu

SEQ ID NO: 1688151 - RNA, 17 nt, Human
ccuggcucccacaggcc

SEQ ID NO: 1688152 - RNA, 23 nt, Human
ccuggcucccacaggcccuuccu

SEQ ID NO: 1688153 - RNA, 22 nt, Human
ccuggcagccgugccuucagcu

SEQ ID NO: 1688154 - RNA, 15 nt, Human
ccuggccagaugcac

SEQ ID NO: 1688155 - RNA, 20 nt, Human
ccuggccagaugcaccagcc

SEQ ID NO: 1688156 - RNA, 20 nt, Human
ccuggcuuuucacugcuggc

SEQ ID NO: 1688157 - RNA, 21 nt, Human
ccuggcuuuucacugcuggcu

SEQ ID NO: 1688158 - RNA, 22 nt, Human
ccuggcuuuucacugcuggcug

SEQ ID NO: 1688159 - RNA, 23 nt, Human
ccuggcuuuucacugcuggcugc

SEQ ID NO: 1688160 - RNA, 24 nt, Human
ccuggcuuuucacugcuggcugcc

SEQ ID NO: 1688161 - RNA, 21 nt, Human
ccuggggguucuuucuuccuc

SEQ ID NO: 1688162 - RNA, 22 nt, Human
ccuggggguucuuucuuccucu

SEQ ID NO: 1688163 - RNA, 23 nt, Human
ccuggggguucuuucuuccucug

SEQ ID NO: 1688164 - RNA, 18 nt, Human
ccuggggguucuuucuuc

SEQ ID NO: 1688165 - RNA, 22 nt, Human
ccuggucacaggacucugccuc

SEQ ID NO: 1688166 - RNA, 23 nt, Human
ccuggucacaggacucugccucc

SEQ ID NO: 1688167 - RNA, 21 nt, Human
ccuggucacaggacucugccu

SEQ ID NO: 1688168 - RNA, 11 nt, Human
ccugccucagc

SEQ ID NO: 1688169 - RNA, 23 nt, Human
ccugccuguugggccaggagccu

SEQ ID NO: 1688170 - RNA, 22 nt, Human
ccugccccucaacucuccucca

SEQ ID NO: 1688171 - RNA, 18 nt, Human
ccugcgggucacaggagg

SEQ ID NO: 1688172 - RNA, 22 nt, Human
ccugcgggucacaggagggagg

SEQ ID NO: 1688173 - RNA, 16 nt, Human
ccugcggugcuaucuc

SEQ ID NO: 1688174 - RNA, 17 nt, Human
ccugcggugcuaucucc

SEQ ID NO: 1688175 - RNA, 22 nt, Human
ccugcggugcuaucucccccag

SEQ ID NO: 1688176 - RNA, 21 nt, Human
ccugcucuccgaccagacacc

SEQ ID NO: 1688177 - RNA, 22 nt, Human
ccugcucuccucuugccacugc

SEQ ID NO: 1688178 - RNA, 16 nt, Human
ccugcucuccucuugc

SEQ ID NO: 1688179 - RNA, 18 nt, Human
ccugcucuccucuugcca

SEQ ID NO: 1688180 - RNA, 19 nt, Human
ccugcucuccucuugccac

SEQ ID NO: 1688181 - RNA, 21 nt, Human
ccugcucuccucuugccacug

SEQ ID NO: 1688182 - RNA, 22 nt, Human
ccugcucuccgaccagacaccu

SEQ ID NO: 1688183 - RNA, 20 nt, Human
ccugcuuugggcugcccugg

SEQ ID NO: 1688184 - RNA, 21 nt, Human
ccugcuuugggcugcccuggu

SEQ ID NO: 1688185 - RNA, 22 nt, Human
ccugcuuugggcugcccuggug

SEQ ID NO: 1688186 - RNA, 23 nt, Human
ccugcuuugggcugcccuggugc

SEQ ID NO: 1688187 - RNA, 15 nt, Human
ccugcugagucccag

SEQ ID NO: 1688188 - RNA, 14 nt, Human
ccugcuucaaauau

SEQ ID NO: 1688189 - RNA, 23 nt, Human
ccuggaaaucaggguuaguauug

SEQ ID NO: 1688190 - RNA, 16 nt, Human
ccugacagaaggacuc

SEQ ID NO: 1688191 - RNA, 21 nt, Human
ccugaggcccagagggccugc

SEQ ID NO: 1688192 - RNA, 16 nt, Human
ccugagcuuucugcua

SEQ ID NO: 1688193 - RNA, 12 nt, Human
ccugagccagau

SEQ ID NO: 1688194 - RNA, 14 nt, Human
ccugagcuuucugc

SEQ ID NO: 1688195 - RNA, 11 nt, Human
ccugagcccca

SEQ ID NO: 1688196 - RNA, 13 nt, Human
ccugccaggaagc

SEQ ID NO: 1688197 - RNA, 14 nt, Human
ccugccaggaagcc

SEQ ID NO: 1688198 - RNA, 15 nt, Human
ccugccaggaagcca

SEQ ID NO: 1688199 - RNA, 17 nt, Human
ccugccaggaagccagc

SEQ ID NO: 1688200 - RNA, 22 nt, Human
ccugccagggacagagggggug

SEQ ID NO: 1688201 - RNA, 16 nt, Human
ccugccagggacagag

SEQ ID NO: 1688202 - RNA, 12 nt, Human
ccugccagggac

SEQ ID NO: 1688203 - RNA, 13 nt, Human
ccugccagggaca

SEQ ID NO: 1688204 - RNA, 14 nt, Human
ccugccagggacag

SEQ ID NO: 1688205 - RNA, 15 nt, Human
ccugccagggacaga

SEQ ID NO: 1688206 - RNA, 23 nt, Human
ccugccaggaagccagcaggcuc

SEQ ID NO: 1688207 - RNA, 16 nt, Human
ccugccaggcauggug

SEQ ID NO: 1688208 - RNA, 11 nt, Human
ccugccaggga

SEQ ID NO: 1688209 - RNA, 18 nt, Human
ccugccaggaagccagca

SEQ ID NO: 1688210 - RNA, 19 nt, Human
ccugccaggaagccagcag

SEQ ID NO: 1688211 - RNA, 21 nt, Human
ccugccaggaagccagcaggc

SEQ ID NO: 1688212 - RNA, 22 nt, Human
ccugccaggaagccagcaggcu

SEQ ID NO: 1688213 - RNA, 17 nt, Human
ccugauugugucucuug

SEQ ID NO: 1688214 - RNA, 19 nt, Human
ccugauugugucucuuggu

SEQ ID NO: 1688215 - RNA, 22 nt, Human
ccugcaaccugauugugucucu

SEQ ID NO: 1688216 - RNA, 21 nt, Human
ccugcaaccugauugugucuc

SEQ ID NO: 1688217 - RNA, 11 nt, Human
ccugaggcccu

SEQ ID NO: 1688218 - RNA, 12 nt, Human
ccugaggcccuu

SEQ ID NO: 1688219 - RNA, 19 nt, Human
ccugaugcuucuucagaga

SEQ ID NO: 1688220 - RNA, 20 nt, Human
ccugaugcuucuucagagac

SEQ ID NO: 1688221 - RNA, 21 nt, Human
ccugaugcuucuucagagacu

SEQ ID NO: 1688222 - RNA, 22 nt, Human
ccugaugcuucuucagagacuc

SEQ ID NO: 1688223 - RNA, 14 nt, Human
ccugaggcccuucu

SEQ ID NO: 1688224 - RNA, 15 nt, Human
ccugauugugucucu

SEQ ID NO: 1688225 - RNA, 15 nt, Human
ccugcagggccaagc

SEQ ID NO: 1688226 - RNA, 18 nt, Human
ccugcaguacuuuaccuc

SEQ ID NO: 1688227 - RNA, 20 nt, Human
ccugcaguacuuuaccuccu

SEQ ID NO: 1688228 - RNA, 14 nt, Human
ccugcaagaacaag

SEQ ID NO: 1688229 - RNA, 16 nt, Human
ccugcaauaaaauggg

SEQ ID NO: 1688230 - RNA, 20 nt, Human
ccugcacggugaauggcuuu

SEQ ID NO: 1688231 - RNA, 20 nt, Human
ccugcaaugaagucucugaa

SEQ ID NO: 1688232 - RNA, 21 nt, Human
ccugcacggugaauggcuuug

SEQ ID NO: 1688233 - RNA, 21 nt, Human
ccugcaaugaagucucugaag

SEQ ID NO: 1688234 - RNA, 19 nt, Human
ccugcaaugaagucucuga

SEQ ID NO: 1688235 - RNA, 12 nt, Human
ccacacccagcc

SEQ ID NO: 1688236 - RNA, 14 nt, Human
ccacacuccagcug

SEQ ID NO: 1688237 - RNA, 17 nt, Human
ccacacuccagcuggga

SEQ ID NO: 1688238 - RNA, 13 nt, Human
ccacacuccagcu

SEQ ID NO: 1688239 - RNA, 13 nt, Human
ccacacccagccc

SEQ ID NO: 1688240 - RNA, 14 nt, Human
ccacacccagccca

SEQ ID NO: 1688241 - RNA, 16 nt, Human
ccacccaagggccugg

SEQ ID NO: 1688242 - RNA, 17 nt, Human
ccacccaagggccuggc

SEQ ID NO: 1688243 - RNA, 19 nt, Human
ccacccaagggccuggccu

SEQ ID NO: 1688244 - RNA, 20 nt, Human
ccaccaacauacucccaucu

SEQ ID NO: 1688245 - RNA, 14 nt, Human
ccaccacacccagc

SEQ ID NO: 1688246 - RNA, 16 nt, Human
ccaccacacccagccc

SEQ ID NO: 1688247 - RNA, 16 nt, Human
ccacccaccucagccu

SEQ ID NO: 1688248 - RNA, 14 nt, Human
ccacccaccucagc

SEQ ID NO: 1688249 - RNA, 15 nt, Human
ccacccaccucagcc

SEQ ID NO: 1688250 - RNA, 20 nt, Human
ccacccaagggccuggccug

SEQ ID NO: 1688251 - RNA, 21 nt, Human
ccacccaagggccuggccuga

SEQ ID NO: 1688252 - RNA, 22 nt, Human
ccacccaagggccuggccugag

SEQ ID NO: 1688253 - RNA, 13 nt, Human
ccacccaccucag

SEQ ID NO: 1688254 - RNA, 19 nt, Human
ccacauagugaugguuccc

SEQ ID NO: 1688255 - RNA, 21 nt, Human
ccacauagugaugguuccccu

SEQ ID NO: 1688256 - RNA, 22 nt, Human
ccacauagugaugguuccccug

SEQ ID NO: 1688257 - RNA, 23 nt, Human
ccacauagugaugguuccccugu

SEQ ID NO: 1688258 - RNA, 14 nt, Human
ccacaucuugcucu

SEQ ID NO: 1688259 - RNA, 14 nt, Human
ccaccaacauacuc

SEQ ID NO: 1688260 - RNA, 18 nt, Human
ccaccaacauacucccau

SEQ ID NO: 1688261 - RNA, 16 nt, Human
ccacaucuugcucugc

SEQ ID NO: 1688262 - RNA, 22 nt, Human
ccacaucuugcucugcugacag

SEQ ID NO: 1688263 - RNA, 23 nt, Human
ccacaucuugcucugcugacaga

SEQ ID NO: 1688264 - RNA, 21 nt, Human
ccacccaggagccccgaggcc

SEQ ID NO: 1688265 - RNA, 11 nt, Human
ccacugccucu

SEQ ID NO: 1688266 - RNA, 16 nt, Human
ccacugcgaccacaag

SEQ ID NO: 1688267 - RNA, 11 nt, Human
ccacugcucug

SEQ ID NO: 1688268 - RNA, 23 nt, Human
ccacugcacuccagccuggguga

SEQ ID NO: 1688269 - RNA, 15 nt, Human
ccacucccugcaacc

SEQ ID NO: 1688270 - RNA, 19 nt, Human
ccacugcacuccagccugg

SEQ ID NO: 1688271 - RNA, 20 nt, Human
ccacugcacuccagccuggg

SEQ ID NO: 1688272 - RNA, 17 nt, Human
ccacuccagaccccugg

SEQ ID NO: 1688273 - RNA, 19 nt, Human
ccacuccagaccccuggcu

SEQ ID NO: 1688274 - RNA, 12 nt, Human
ccacucccugca

SEQ ID NO: 1688275 - RNA, 13 nt, Human
ccacucccugcaa

SEQ ID NO: 1688276 - RNA, 23 nt, Human
ccacuacggaauaguuggcuagg

SEQ ID NO: 1688277 - RNA, 18 nt, Human
ccacuacauucuguuaau

SEQ ID NO: 1688278 - RNA, 22 nt, Human
ccacuacggaauaguuggcuag

SEQ ID NO: 1688279 - RNA, 13 nt, Human
ccacguuucuaaa

SEQ ID NO: 1688280 - RNA, 19 nt, Human
ccaccccucaacaccucug

SEQ ID NO: 1688281 - RNA, 16 nt, Human
ccacccugaaagcccu

SEQ ID NO: 1688282 - RNA, 17 nt, Human
ccacccugaaagcccug

SEQ ID NO: 1688283 - RNA, 18 nt, Human
ccacccugaaagcccuga

SEQ ID NO: 1688284 - RNA, 12 nt, Human
ccaccucagccu

SEQ ID NO: 1688285 - RNA, 13 nt, Human
ccaccucagccuc

SEQ ID NO: 1688286 - RNA, 14 nt, Human
ccaccucagccucc

SEQ ID NO: 1688287 - RNA, 15 nt, Human
ccaccucagccuccc

SEQ ID NO: 1688288 - RNA, 12 nt, Human
ccacccaggagc

SEQ ID NO: 1688289 - RNA, 14 nt, Human
ccacccaggagccc

SEQ ID NO: 1688290 - RNA, 22 nt, Human
ccaccugcggugcuaucucccc

SEQ ID NO: 1688291 - RNA, 15 nt, Human
ccaccuggccucugc

SEQ ID NO: 1688292 - RNA, 16 nt, Human
ccaccuggccucugca

SEQ ID NO: 1688293 - RNA, 17 nt, Human
ccaccuggccucugcac

SEQ ID NO: 1688294 - RNA, 18 nt, Human
ccaccuggccucugcacu

SEQ ID NO: 1688295 - RNA, 12 nt, Human
ccacggccaggc

SEQ ID NO: 1688296 - RNA, 13 nt, Human
ccacggccaggcc

SEQ ID NO: 1688297 - RNA, 14 nt, Human
ccacggccaggcca

SEQ ID NO: 1688298 - RNA, 15 nt, Human
ccacggccaggccag

SEQ ID NO: 1688299 - RNA, 14 nt, Human
ccaccugcccaacc

SEQ ID NO: 1688300 - RNA, 12 nt, Human
ccaccugccagg

SEQ ID NO: 1688301 - RNA, 17 nt, Human
ccaccugccuguugggc

SEQ ID NO: 1688302 - RNA, 20 nt, Human
ccaccugccuguugggccag

SEQ ID NO: 1688303 - RNA, 17 nt, Human
ccaccucccacaaagga

SEQ ID NO: 1688304 - RNA, 14 nt, Human
ccaccucccugcaa

SEQ ID NO: 1688305 - RNA, 20 nt, Human
ccagacaccuugacagggca

SEQ ID NO: 1688306 - RNA, 21 nt, Human
ccagagaggguggugaccucu

SEQ ID NO: 1688307 - RNA, 23 nt, Human
ccagagaggguggugaccucugc

SEQ ID NO: 1688308 - RNA, 14 nt, Human
ccagagaggguggu

SEQ ID NO: 1688309 - RNA, 17 nt, Human
ccacuguacuugcucuu

SEQ ID NO: 1688310 - RNA, 18 nt, Human
ccacuguacuugcucuug

SEQ ID NO: 1688311 - RNA, 19 nt, Human
ccacuguacuugcucuuga

SEQ ID NO: 1688312 - RNA, 20 nt, Human
ccacuguacuugcucuugau

SEQ ID NO: 1688313 - RNA, 17 nt, Human
ccagacaccuugacagg

SEQ ID NO: 1688314 - RNA, 19 nt, Human
ccagacaccuugacagggc

SEQ ID NO: 1688315 - RNA, 11 nt, Human
ccagagcugcc

SEQ ID NO: 1688316 - RNA, 12 nt, Human
ccagagcugcca

SEQ ID NO: 1688317 - RNA, 13 nt, Human
ccagagcugccac

SEQ ID NO: 1688318 - RNA, 14 nt, Human
ccagagcugccacc

SEQ ID NO: 1688319 - RNA, 15 nt, Human
ccagagcugccaccu

SEQ ID NO: 1688320 - RNA, 16 nt, Human
ccagagcugccaccug

SEQ ID NO: 1688321 - RNA, 19 nt, Human
ccagagcugccaccugccu

SEQ ID NO: 1688322 - RNA, 16 nt, Human
ccagagggagugacag

SEQ ID NO: 1688323 - RNA, 17 nt, Human
ccagagggagugacaga

SEQ ID NO: 1688324 - RNA, 18 nt, Human
ccagagggagugacagag

SEQ ID NO: 1688325 - RNA, 19 nt, Human
ccagagggagugacagagg

SEQ ID NO: 1688326 - RNA, 20 nt, Human
ccagagggagugacagaggc

SEQ ID NO: 1688327 - RNA, 21 nt, Human
ccagagggagugacagaggca

SEQ ID NO: 1688328 - RNA, 21 nt, Human
ccagaggagagaggacccccu

SEQ ID NO: 1688329 - RNA, 22 nt, Human
ccagaggagagaggacccccug

SEQ ID NO: 1688330 - RNA, 22 nt, Human
ccagauuuaugcauauuauuuu

SEQ ID NO: 1688331 - RNA, 12 nt, Human
ccagauuucacu

SEQ ID NO: 1688332 - RNA, 13 nt, Human
ccagauuuaugca

SEQ ID NO: 1688333 - RNA, 21 nt, Human
ccagauugcaacaggcugggc

SEQ ID NO: 1688334 - RNA, 23 nt, Human
ccagauucuuuccugaggcuggg

SEQ ID NO: 1688335 - RNA, 19 nt, Human
ccagauugcaacaggcugg

SEQ ID NO: 1688336 - RNA, 20 nt, Human
ccagauugcaacaggcuggg

SEQ ID NO: 1688337 - RNA, 15 nt, Human
ccagagggccugcaa

SEQ ID NO: 1688338 - RNA, 16 nt, Human
ccagagggccugcaag

SEQ ID NO: 1688339 - RNA, 13 nt, Human
ccagagggccugc

SEQ ID NO: 1688340 - RNA, 22 nt, Human
ccagagggagugacagaggcag

SEQ ID NO: 1688341 - RNA, 23 nt, Human
ccagagggagugacagaggcagc

SEQ ID NO: 1688342 - RNA, 18 nt, Human
ccagauucuuuccugagg

SEQ ID NO: 1688343 - RNA, 19 nt, Human
ccagauucuuuccugaggc

SEQ ID NO: 1688344 - RNA, 20 nt, Human
ccagauucuuuccugaggcu

SEQ ID NO: 1688345 - RNA, 21 nt, Human
ccagauucuuuccugaggcug

SEQ ID NO: 1688346 - RNA, 22 nt, Human
ccagauucuuuccugaggcugg

SEQ ID NO: 1688347 - RNA, 19 nt, Human
ccagcaauucuccugccuc

SEQ ID NO: 1688348 - RNA, 20 nt, Human
ccagcaauucuccugccuca

SEQ ID NO: 1688349 - RNA, 21 nt, Human
ccagcaauucuccugccucag

SEQ ID NO: 1688350 - RNA, 16 nt, Human
ccagcaauucuccugc

SEQ ID NO: 1688351 - RNA, 18 nt, Human
ccagcaauucuccugccu

SEQ ID NO: 1688352 - RNA, 16 nt, Human
ccagcaagugagagcu

SEQ ID NO: 1688353 - RNA, 20 nt, Human
ccagcaagugagagcugggu

SEQ ID NO: 1688354 - RNA, 21 nt, Human
ccagcaagugagagcugggug

SEQ ID NO: 1688355 - RNA, 22 nt, Human
ccagcaagugagagcugggugu

SEQ ID NO: 1688356 - RNA, 14 nt, Human
ccagauuucacucu

SEQ ID NO: 1688357 - RNA, 15 nt, Human
ccagcaagugagagc

SEQ ID NO: 1688358 - RNA, 21 nt, Human
ccagccuccaagcuccaucuc

SEQ ID NO: 1688359 - RNA, 14 nt, Human
ccagccgccaugcu

SEQ ID NO: 1688360 - RNA, 18 nt, Human
ccagccgccaugcuccug

SEQ ID NO: 1688361 - RNA, 19 nt, Human
ccagccgccaugcuccugg

SEQ ID NO: 1688362 - RNA, 16 nt, Human
ccagccccagugccca

SEQ ID NO: 1688363 - RNA, 21 nt, Human
ccagcccuccuuaucaaagga

SEQ ID NO: 1688364 - RNA, 16 nt, Human
ccagcccuuagcaggg

SEQ ID NO: 1688365 - RNA, 17 nt, Human
ccagcccuuagcaggga

SEQ ID NO: 1688366 - RNA, 23 nt, Human
ccagccccaaaacucuccucugc

SEQ ID NO: 1688367 - RNA, 13 nt, Human
ccagccccagugc

SEQ ID NO: 1688368 - RNA, 15 nt, Human
ccagccccagugccc

SEQ ID NO: 1688369 - RNA, 15 nt, Human
ccagccaaagccucc

SEQ ID NO: 1688370 - RNA, 18 nt, Human
ccagccaaagccuccucc

SEQ ID NO: 1688371 - RNA, 19 nt, Human
ccagccaaagccuccucca

SEQ ID NO: 1688372 - RNA, 22 nt, Human
ccagccagcaguucagagcugc

SEQ ID NO: 1688373 - RNA, 22 nt, Human
ccagcaguucagagcugcccuc

SEQ ID NO: 1688374 - RNA, 21 nt, Human
ccagcaguucagagcugcccu

SEQ ID NO: 1688375 - RNA, 20 nt, Human
ccagcaguucagagcugccc

SEQ ID NO: 1688376 - RNA, 19 nt, Human
ccagcaguucagagcugcc

SEQ ID NO: 1688377 - RNA, 18 nt, Human
ccagcaguucagagcugc

SEQ ID NO: 1688378 - RNA, 13 nt, Human
ccagcaguucaga

SEQ ID NO: 1688379 - RNA, 23 nt, Human
ccagcauaauacuugcuuuggaa

SEQ ID NO: 1688380 - RNA, 23 nt, Human
ccagcaguucagagcugcccucu

SEQ ID NO: 1688381 - RNA, 17 nt, Human
ccagguuuuuggucuga

SEQ ID NO: 1688382 - RNA, 24 nt, Human
ccaggugcacaagcuccaagcucc

SEQ ID NO: 1688383 - RNA, 18 nt, Human
ccagucuggaaugcagug

SEQ ID NO: 1688384 - RNA, 19 nt, Human
ccagucuggaaugcagugg

SEQ ID NO: 1688385 - RNA, 20 nt, Human
ccagucuggaaugcaguggu

SEQ ID NO: 1688386 - RNA, 21 nt, Human
ccagggcuggaaugauuucag

SEQ ID NO: 1688387 - RNA, 19 nt, Human
ccaggugcacaagcuccaa

SEQ ID NO: 1688388 - RNA, 20 nt, Human
ccaggugcacaagcuccaag

SEQ ID NO: 1688389 - RNA, 18 nt, Human
ccaggugcacaagcucca

SEQ ID NO: 1688390 - RNA, 20 nt, Human
ccaggcuuagucacugagac

SEQ ID NO: 1688391 - RNA, 14 nt, Human
ccagggacagaggg

SEQ ID NO: 1688392 - RNA, 15 nt, Human
ccagggacagagggg

SEQ ID NO: 1688393 - RNA, 21 nt, Human
ccagggacagaggggguggcc

SEQ ID NO: 1688394 - RNA, 22 nt, Human
ccagggacagaggggguggccu

SEQ ID NO: 1688395 - RNA, 15 nt, Human
ccagccuccaugcug

SEQ ID NO: 1688396 - RNA, 16 nt, Human
ccagccuccaugcugc

SEQ ID NO: 1688397 - RNA, 19 nt, Human
ccaggagccccgaggccuu

SEQ ID NO: 1688398 - RNA, 20 nt, Human
ccaggagccccgaggccuuc

SEQ ID NO: 1688399 - RNA, 12 nt, Human
ccaggagccucc

SEQ ID NO: 1688400 - RNA, 18 nt, Human
ccaggcauuccccaggag

SEQ ID NO: 1688401 - RNA, 19 nt, Human
ccaggcauuccccaggagg

SEQ ID NO: 1688402 - RNA, 21 nt, Human
ccaggcauuccccaggaggcc

SEQ ID NO: 1688403 - RNA, 18 nt, Human
ccaggcgccccuuccccc

SEQ ID NO: 1688404 - RNA, 19 nt, Human
ccaggcgccccuucccccu

SEQ ID NO: 1688405 - RNA, 17 nt, Human
ccaggcuuagucacuga

SEQ ID NO: 1688406 - RNA, 24 nt, Human
ccaggcuguaucccaugagccuca

SEQ ID NO: 1688407 - RNA, 22 nt, Human
ccaggcccucugcccacucccu

SEQ ID NO: 1688408 - RNA, 23 nt, Human
ccaggcccucugcccacucccug

SEQ ID NO: 1688409 - RNA, 21 nt, Human
ccaggcccucugcccacuccc

SEQ ID NO: 1688410 - RNA, 13 nt, Human
ccaucuacccucc

SEQ ID NO: 1688411 - RNA, 16 nt, Human
ccagugaggcucugcc

SEQ ID NO: 1688412 - RNA, 14 nt, Human
ccagugaggcucug

SEQ ID NO: 1688413 - RNA, 15 nt, Human
ccagugaggcucugc

SEQ ID NO: 1688414 - RNA, 22 nt, Human
ccagugguuccuaauccucuag

SEQ ID NO: 1688415 - RNA, 20 nt, Human
ccagugccgagaaggaagcc

SEQ ID NO: 1688416 - RNA, 17 nt, Human
ccagugaggcucugccc

SEQ ID NO: 1688417 - RNA, 22 nt, Human
ccaguguuguggauuuaacaga

SEQ ID NO: 1688418 - RNA, 12 nt, Human
ccauaggucacc

SEQ ID NO: 1688419 - RNA, 21 nt, Human
ccauaguaugggacuggccuc

SEQ ID NO: 1688420 - RNA, 23 nt, Human
ccauauucuguuggccaguguga

SEQ ID NO: 1688421 - RNA, 21 nt, Human
ccaguuauggcuauaggugcu

SEQ ID NO: 1688422 - RNA, 14 nt, Human
ccaguuauggcuau

SEQ ID NO: 1688423 - RNA, 19 nt, Human
ccauucuccaccugccagg

SEQ ID NO: 1688424 - RNA, 20 nt, Human
ccauucuccaccugccaggg

SEQ ID NO: 1688425 - RNA, 14 nt, Human
ccauuuguguuuau

SEQ ID NO: 1688426 - RNA, 13 nt, Human
cccaaagugcugg

SEQ ID NO: 1688427 - RNA, 15 nt, Human
cccaaagugcuggga

SEQ ID NO: 1688428 - RNA, 20 nt, Human
cccaaaacucuccucugcug

SEQ ID NO: 1688429 - RNA, 16 nt, Human
cccaaaacucuccucu

SEQ ID NO: 1688430 - RNA, 18 nt, Human
cccaaaacucuccucugc

SEQ ID NO: 1688431 - RNA, 17 nt, Human
cccaaggcucugagcaa

SEQ ID NO: 1688432 - RNA, 15 nt, Human
cccaacccuggcacc

SEQ ID NO: 1688433 - RNA, 16 nt, Human
cccaaagugcugggau

SEQ ID NO: 1688434 - RNA, 23 nt, Human
cccaaauggaaaugggcagagca

SEQ ID NO: 1688435 - RNA, 18 nt, Human
cccaaauggaaaugggca

SEQ ID NO: 1688436 - RNA, 22 nt, Human
cccaaauggaaaugggcagagc

SEQ ID NO: 1688437 - RNA, 14 nt, Human
ccaucuaaacugcc

SEQ ID NO: 1688438 - RNA, 21 nt, Human
ccaugggaaaugucaacaagu

SEQ ID NO: 1688439 - RNA, 15 nt, Human
ccaucuaaacugccc

SEQ ID NO: 1688440 - RNA, 16 nt, Human
ccaucuaaacugcccc

SEQ ID NO: 1688441 - RNA, 14 nt, Human
ccauuauucaaagu

SEQ ID NO: 1688442 - RNA, 13 nt, Human
ccauguuuauuac

SEQ ID NO: 1688443 - RNA, 20 nt, Human
ccauguuuauuacaguauaa

SEQ ID NO: 1688444 - RNA, 17 nt, Human
ccauuauucaaaguugc

SEQ ID NO: 1688445 - RNA, 22 nt, Human
ccauuauucaaaguugccuaaa

SEQ ID NO: 1688446 - RNA, 18 nt, Human
ccauguuggccaggcugc

SEQ ID NO: 1688447 - RNA, 21 nt, Human
ccauguuggccaggcugcucu

SEQ ID NO: 1688448 - RNA, 18 nt, Human
ccauguuggccaggcugg

SEQ ID NO: 1688449 - RNA, 17 nt, Human
ccaugggauaaaugcca

SEQ ID NO: 1688450 - RNA, 17 nt, Human
ccauguuggccaggcug

SEQ ID NO: 1688451 - RNA, 13 nt, Human
ccaugggauaaau

SEQ ID NO: 1688452 - RNA, 16 nt, Human
ccaugggacagggagg

SEQ ID NO: 1688453 - RNA, 19 nt, Human
ccaugggacagggaggacg

SEQ ID NO: 1688454 - RNA, 23 nt, Human
cauucuucuguacgucugacagg

SEQ ID NO: 1688455 - RNA, 14 nt, Human
cauuccugaacagg

SEQ ID NO: 1688456 - RNA, 14 nt, Human
cauuccugaugcuu

SEQ ID NO: 1688457 - RNA, 16 nt, Human
cauuccugaugcuucu

SEQ ID NO: 1688458 - RNA, 19 nt, Human
cauuccugaugcuucuuca

SEQ ID NO: 1688459 - RNA, 22 nt, Human
cauuccugaugcuucuucagag

SEQ ID NO: 1688460 - RNA, 23 nt, Human
cauuccugaugcuucuucagaga

SEQ ID NO: 1688461 - RNA, 12 nt, Human
cauucugccugc

SEQ ID NO: 1688462 - RNA, 13 nt, Human
cauucugccugcc

SEQ ID NO: 1688463 - RNA, 15 nt, Human
cauucugccugccca

SEQ ID NO: 1688464 - RNA, 16 nt, Human
cauucugccugcccag

SEQ ID NO: 1688465 - RNA, 17 nt, Human
cauucugccugcccagg

SEQ ID NO: 1688466 - RNA, 18 nt, Human
cauucugccugcccaggc

SEQ ID NO: 1688467 - RNA, 19 nt, Human
cauucugccugcccaggcc

SEQ ID NO: 1688468 - RNA, 20 nt, Human
cauucugccugcccaggccc

SEQ ID NO: 1688469 - RNA, 17 nt, Human
cauucuguuaaucauua

SEQ ID NO: 1688470 - RNA, 13 nt, Human
cauucuggaauaa

SEQ ID NO: 1688471 - RNA, 18 nt, Human
cauuauucaaaguugccu

SEQ ID NO: 1688472 - RNA, 21 nt, Human
cauuauucaaaguugccuaaa

SEQ ID NO: 1688473 - RNA, 22 nt, Human
cauuauucaaaguugccuaaau

SEQ ID NO: 1688474 - RNA, 20 nt, Human
cauucaaauguauuacagug

SEQ ID NO: 1688475 - RNA, 14 nt, Human
cauuaauaauaaau

SEQ ID NO: 1688476 - RNA, 13 nt, Human
cauuccccaggag

SEQ ID NO: 1688477 - RNA, 15 nt, Human
cauuccccaggaggc

SEQ ID NO: 1688478 - RNA, 17 nt, Human
cauuccccaggaggcca

SEQ ID NO: 1688479 - RNA, 17 nt, Human
cauuccccgucucuggu

SEQ ID NO: 1688480 - RNA, 13 nt, Human
cauuccccauggg

SEQ ID NO: 1688481 - RNA, 20 nt, Human
cauuccccaggaggccagcc

SEQ ID NO: 1688482 - RNA, 18 nt, Human
cauuccccaggaggccag

SEQ ID NO: 1688483 - RNA, 19 nt, Human
cauuccccaggaggccagc

SEQ ID NO: 1688484 - RNA, 21 nt, Human
cauucagauaugauucaaaug

SEQ ID NO: 1688485 - RNA, 19 nt, Human
cauucauuuucuggguguu

SEQ ID NO: 1688486 - RNA, 22 nt, Human
cauuccaccuucccaugcccug

SEQ ID NO: 1688487 - RNA, 17 nt, Human
cauuccaccuucccaug

SEQ ID NO: 1688488 - RNA, 22 nt, Human
cauuccaacuaucucauuucca

SEQ ID NO: 1688489 - RNA, 17 nt, Human
cauuuggaaaucuuuaa

SEQ ID NO: 1688490 - RNA, 18 nt, Human
cauuuggaaaucuuuaaa

SEQ ID NO: 1688491 - RNA, 11 nt, Human
cauuuggaaau

SEQ ID NO: 1688492 - RNA, 22 nt, Human
cauuuggaaaucuuuaaaaaaa

SEQ ID NO: 1688493 - RNA, 23 nt, Human
cauuuuaccuuugacaaagguaa

SEQ ID NO: 1688494 - RNA, 23 nt, Human
cauuuuauuuuauuaugcaugaa

SEQ ID NO: 1688495 - RNA, 16 nt, Human
ccaaacccuucagugc

SEQ ID NO: 1688496 - RNA, 21 nt, Human
cauuuuuaagugcugcauuua

SEQ ID NO: 1688497 - RNA, 18 nt, Human
cauuuuuaguagagacag

SEQ ID NO: 1688498 - RNA, 17 nt, Human
cauuuuuaguagagaca

SEQ ID NO: 1688499 - RNA, 19 nt, Human
cauuugaaaauuuugaugu

SEQ ID NO: 1688500 - RNA, 17 nt, Human
cauuugaaaauuuugau

SEQ ID NO: 1688501 - RNA, 18 nt, Human
cauugaccugaggcccuu

SEQ ID NO: 1688502 - RNA, 14 nt, Human
cauugaccugaggc

SEQ ID NO: 1688503 - RNA, 15 nt, Human
cauugaccugaggcc

SEQ ID NO: 1688504 - RNA, 17 nt, Human
cauugaccugaggcccu

SEQ ID NO: 1688505 - RNA, 15 nt, Human
cauuuaaaaaaaauc

SEQ ID NO: 1688506 - RNA, 21 nt, Human
cauuguaaaugugcuuuuaaa

SEQ ID NO: 1688507 - RNA, 15 nt, Human
cauugugggaagggg

SEQ ID NO: 1688508 - RNA, 14 nt, Human
caugcagcaucuaa

SEQ ID NO: 1688509 - RNA, 15 nt, Human
caugcuguucaugaa

SEQ ID NO: 1688510 - RNA, 17 nt, Human
caugcugucccuuacgu

SEQ ID NO: 1688511 - RNA, 13 nt, Human
caugcugucccuu

SEQ ID NO: 1688512 - RNA, 15 nt, Human
caugcugucccuuac

SEQ ID NO: 1688513 - RNA, 17 nt, Human
caugcgggcuuccuccu

SEQ ID NO: 1688514 - RNA, 22 nt, Human
cauggacuucugccagcauaau

SEQ ID NO: 1688515 - RNA, 15 nt, Human
cauggacuuccacug

SEQ ID NO: 1688516 - RNA, 16 nt, Human
caugcuguucaugaaa

SEQ ID NO: 1688517 - RNA, 18 nt, Human
caugcuguucaugaaaga

SEQ ID NO: 1688518 - RNA, 20 nt, Human
cauggaauuggagcucgugg

SEQ ID NO: 1688519 - RNA, 18 nt, Human
caugggauaaaugccauc

SEQ ID NO: 1688520 - RNA, 23 nt, Human
caugggauaaaugccaucaauaa

SEQ ID NO: 1688521 - RNA, 16 nt, Human
caugggauaaaugcca

SEQ ID NO: 1688522 - RNA, 17 nt, Human
caugggauaaaugccau

SEQ ID NO: 1688523 - RNA, 18 nt, Human
caugggccuccugugugu

SEQ ID NO: 1688524 - RNA, 23 nt, Human
caugggacagggaggacgcucuc

SEQ ID NO: 1688525 - RNA, 23 nt, Human
cauggucggaaaacaugcuacac

SEQ ID NO: 1688526 - RNA, 19 nt, Human
cauggucggaaaacaugcu

SEQ ID NO: 1688527 - RNA, 17 nt, Human
cauggucggaaaacaug

SEQ ID NO: 1688528 - RNA, 14 nt, Human
caugucucgacuca

SEQ ID NO: 1688529 - RNA, 12 nt, Human
caugucuggcua

SEQ ID NO: 1688530 - RNA, 15 nt, Human
caugugaugagagga

SEQ ID NO: 1688531 - RNA, 16 nt, Human
caugugaugagaggaa

SEQ ID NO: 1688532 - RNA, 17 nt, Human
caugugaugagaggaaa

SEQ ID NO: 1688533 - RNA, 18 nt, Human
caugugaugagaggaaau

SEQ ID NO: 1688534 - RNA, 20 nt, Human
caugugaugagaggaaauca

SEQ ID NO: 1688535 - RNA, 21 nt, Human
caugugaugagaggaaaucac

SEQ ID NO: 1688536 - RNA, 22 nt, Human
cauguuaaaccaugggauaaau

SEQ ID NO: 1688537 - RNA, 23 nt, Human
cauguuuauuacaguauaauuaa

SEQ ID NO: 1688538 - RNA, 13 nt, Human
cauguuaaaccau

SEQ ID NO: 1688539 - RNA, 18 nt, Human
cauguguuggcagccucu

SEQ ID NO: 1688540 - RNA, 14 nt, Human
caugugcacaugca

SEQ ID NO: 1688541 - RNA, 20 nt, Human
caugugcuaguaauuggaaa

SEQ ID NO: 1688542 - RNA, 20 nt, Human
cauguuucuuuguaaugaaa

SEQ ID NO: 1688543 - RNA, 14 nt, Human
cauguuugugauug

SEQ ID NO: 1688544 - RNA, 12 nt, Human
cauguuugugau

SEQ ID NO: 1688545 - RNA, 19 nt, Human
cauguuuuucuucucccuc

SEQ ID NO: 1688546 - RNA, 20 nt, Human
cauguuuuucuucucccuca

SEQ ID NO: 1688547 - RNA, 15 nt, Human
cauguuugugauuga

SEQ ID NO: 1688548 - RNA, 16 nt, Human
caucauccuaagcuau

SEQ ID NO: 1688549 - RNA, 13 nt, Human
caucaugucuggc

SEQ ID NO: 1688550 - RNA, 14 nt, Human
caucaugucuggcu

SEQ ID NO: 1688551 - RNA, 15 nt, Human
caucaugucuggcua

SEQ ID NO: 1688552 - RNA, 20 nt, Human
caucaccaacgucugugcca

SEQ ID NO: 1688553 - RNA, 12 nt, Human
caucacccgcua

SEQ ID NO: 1688554 - RNA, 16 nt, Human
caucaguauugaagca

SEQ ID NO: 1688555 - RNA, 20 nt, Human
caucaguauugaagcauuuu

SEQ ID NO: 1688556 - RNA, 22 nt, Human
caucaguauugaagcauuuuau

SEQ ID NO: 1688557 - RNA, 12 nt, Human
cauccauccagg

SEQ ID NO: 1688558 - RNA, 20 nt, Human
caucccucccuccaccuccc

SEQ ID NO: 1688559 - RNA, 14 nt, Human
cauccacugugcca

SEQ ID NO: 1688560 - RNA, 17 nt, Human
cauccacugugccaugu

SEQ ID NO: 1688561 - RNA, 23 nt, Human
cauccacugugccaugugccagg

SEQ ID NO: 1688562 - RNA, 18 nt, Human
caucccuuaccugggaaa

SEQ ID NO: 1688563 - RNA, 15 nt, Human
caucccucuggggcu

SEQ ID NO: 1688564 - RNA, 13 nt, Human
caucccuccuggg

SEQ ID NO: 1688565 - RNA, 23 nt, Human
caucccucccuccaccucccugc

SEQ ID NO: 1688566 - RNA, 22 nt, Human
caucccucccuccaccucccug

SEQ ID NO: 1688567 - RNA, 14 nt, Human
caucaacaucuugg

SEQ ID NO: 1688568 - RNA, 16 nt, Human
cauaguaugguggcug

SEQ ID NO: 1688569 - RNA, 17 nt, Human
cauaguaugguggcugg

SEQ ID NO: 1688570 - RNA, 15 nt, Human
cauaguaugguggcu

SEQ ID NO: 1688571 - RNA, 19 nt, Human
cauagucuggcuguaccca

SEQ ID NO: 1688572 - RNA, 18 nt, Human
cauagugaugguuccccu

SEQ ID NO: 1688573 - RNA, 19 nt, Human
cauagugaugguuccccug

SEQ ID NO: 1688574 - RNA, 16 nt, Human
cauauaagugauugcu

SEQ ID NO: 1688575 - RNA, 23 nt, Human
cauauaagauucauauuuacuuc

SEQ ID NO: 1688576 - RNA, 13 nt, Human
cauauauaacaau

SEQ ID NO: 1688577 - RNA, 18 nt, Human
cauauauuuuuauauuua

SEQ ID NO: 1688578 - RNA, 15 nt, Human
cauauauaacaaugc

SEQ ID NO: 1688579 - RNA, 20 nt, Human
cauauauaacaaugcuguau

SEQ ID NO: 1688580 - RNA, 20 nt, Human
cauauauuuuuauauuuacu

SEQ ID NO: 1688581 - RNA, 21 nt, Human
cauauauuuuuauauuuacua

SEQ ID NO: 1688582 - RNA, 22 nt, Human
cauauauuuuuauauuuacuaa

SEQ ID NO: 1688583 - RNA, 13 nt, Human
cauauuguuacug

SEQ ID NO: 1688584 - RNA, 19 nt, Human
cauauuguuacugguacca

SEQ ID NO: 1688585 - RNA, 21 nt, Human
cauauugauuuccguuaaaau

SEQ ID NO: 1688586 - RNA, 17 nt, Human
cauauugauuuccguua

SEQ ID NO: 1688587 - RNA, 22 nt, Human
cauauucuguuggccaguguga

SEQ ID NO: 1688588 - RNA, 14 nt, Human
caugaaagauucaa

SEQ ID NO: 1688589 - RNA, 21 nt, Human
caugaaaacacauuuuucuua

SEQ ID NO: 1688590 - RNA, 19 nt, Human
caugaaaacacauuuuucu

SEQ ID NO: 1688591 - RNA, 12 nt, Human
caugaagacaga

SEQ ID NO: 1688592 - RNA, 17 nt, Human
caugaaaacacauuuuu

SEQ ID NO: 1688593 - RNA, 16 nt, Human
caugaaaacacauuuu

SEQ ID NO: 1688594 - RNA, 15 nt, Human
caugaaaacacauuu

SEQ ID NO: 1688595 - RNA, 14 nt, Human
caugaaaacacauu

SEQ ID NO: 1688596 - RNA, 13 nt, Human
caugaaaacacau

SEQ ID NO: 1688597 - RNA, 23 nt, Human
caugaguccccuguuuguuucug

SEQ ID NO: 1688598 - RNA, 14 nt, Human
caugaguccccugu

SEQ ID NO: 1688599 - RNA, 15 nt, Human
caugaguccccuguu

SEQ ID NO: 1688600 - RNA, 13 nt, Human
caugaguccccug

SEQ ID NO: 1688601 - RNA, 19 nt, Human
caugagguacugagaguga

SEQ ID NO: 1688602 - RNA, 22 nt, Human
caugagccucagcauccuggca

SEQ ID NO: 1688603 - RNA, 23 nt, Human
caugagccucagcauccuggcac

SEQ ID NO: 1688604 - RNA, 16 nt, Human
caugaggaacaaggca

SEQ ID NO: 1688605 - RNA, 17 nt, Human
caugaggaacaaggcaa

SEQ ID NO: 1688606 - RNA, 20 nt, Human
caugaggaacaaggcaaggc

SEQ ID NO: 1688607 - RNA, 21 nt, Human
caugaggaacaaggcaaggcu

SEQ ID NO: 1688608 - RNA, 23 nt, Human
caugaggaacaaggcaaggcugu

SEQ ID NO: 1688609 - RNA, 16 nt, Human
caugagguacugagag

SEQ ID NO: 1688610 - RNA, 15 nt, Human
caugagcaucaggcc

SEQ ID NO: 1688611 - RNA, 16 nt, Human
caugagcaucaggcca

SEQ ID NO: 1688612 - RNA, 17 nt, Human
caugagcaucaggccag

SEQ ID NO: 1688613 - RNA, 18 nt, Human
caugagcaucaggccagg

SEQ ID NO: 1688614 - RNA, 20 nt, Human
caugagcaucaggccaggcc

SEQ ID NO: 1688615 - RNA, 21 nt, Human
caugagcaucaggccaggccc

SEQ ID NO: 1688616 - RNA, 22 nt, Human
caugagcaucaggccaggcccu

SEQ ID NO: 1688617 - RNA, 23 nt, Human
caugagcaucaggccaggcccuc

SEQ ID NO: 1688618 - RNA, 12 nt, Human
caugagccucag

SEQ ID NO: 1688619 - RNA, 15 nt, Human
caugagccucagcau

SEQ ID NO: 1688620 - RNA, 17 nt, Human
caugagccucagcaucc

SEQ ID NO: 1688621 - RNA, 18 nt, Human
caugagccucagcauccu

SEQ ID NO: 1688622 - RNA, 19 nt, Human
caugagccucagcauccug

SEQ ID NO: 1688623 - RNA, 20 nt, Human
caugagccucagcauccugg

SEQ ID NO: 1688624 - RNA, 21 nt, Human
caugagccucagcauccuggc

SEQ ID NO: 1688625 - RNA, 13 nt, Human
caugagcaucagg

SEQ ID NO: 1688626 - RNA, 23 nt, Human
caugacucguauaugucucaggu

SEQ ID NO: 1688627 - RNA, 20 nt, Human
caugacucguauaugucuca

SEQ ID NO: 1688628 - RNA, 18 nt, Human
caugaagauguagaggag

SEQ ID NO: 1688629 - RNA, 19 nt, Human
caugaagauguagaggaga

SEQ ID NO: 1688630 - RNA, 19 nt, Human
caucuugcucugcugacag

SEQ ID NO: 1688631 - RNA, 16 nt, Human
caucuugcucugcuga

SEQ ID NO: 1688632 - RNA, 17 nt, Human
caucuugcucugcugac

SEQ ID NO: 1688633 - RNA, 16 nt, Human
caucuugaauuguaag

SEQ ID NO: 1688634 - RNA, 21 nt, Human
caucuugaauuguaaggaaug

SEQ ID NO: 1688635 - RNA, 18 nt, Human
cauccuacaagacacagu

SEQ ID NO: 1688636 - RNA, 19 nt, Human
cauccuacaagacacagug

SEQ ID NO: 1688637 - RNA, 16 nt, Human
caucucuacaaaaagc

SEQ ID NO: 1688638 - RNA, 15 nt, Human
caucucuccuccuuu

SEQ ID NO: 1688639 - RNA, 15 nt, Human
caucucugcaaucuu

SEQ ID NO: 1688640 - RNA, 22 nt, Human
caucucugcaaucuucucagaa

SEQ ID NO: 1688641 - RNA, 12 nt, Human
caggcugagccu

SEQ ID NO: 1688642 - RNA, 18 nt, Human
caggcucuucuccuuuca

SEQ ID NO: 1688643 - RNA, 22 nt, Human
caggcucuucuccuuucacaac

SEQ ID NO: 1688644 - RNA, 14 nt, Human
caggcucuucuccu

SEQ ID NO: 1688645 - RNA, 15 nt, Human
caggcucuucuccuu

SEQ ID NO: 1688646 - RNA, 12 nt, Human
caggcucuucuc

SEQ ID NO: 1688647 - RNA, 13 nt, Human
caggcugagccuc

SEQ ID NO: 1688648 - RNA, 14 nt, Human
caggcugagccuca

SEQ ID NO: 1688649 - RNA, 15 nt, Human
caggcugagccucag

SEQ ID NO: 1688650 - RNA, 16 nt, Human
caggcugagccucagu

SEQ ID NO: 1688651 - RNA, 17 nt, Human
caggcugagccucaguc

SEQ ID NO: 1688652 - RNA, 21 nt, Human
caggcugagccucagucuccc

SEQ ID NO: 1688653 - RNA, 23 nt, Human
caggcugcucuugaacuccugac

SEQ ID NO: 1688654 - RNA, 12 nt, Human
caggcugcucuu

SEQ ID NO: 1688655 - RNA, 20 nt, Human
caggcugcucuugaacuccu

SEQ ID NO: 1688656 - RNA, 12 nt, Human
caggcuggcccu

SEQ ID NO: 1688657 - RNA, 14 nt, Human
caggcuggcccugc

SEQ ID NO: 1688658 - RNA, 15 nt, Human
caggcuggcccugcc

SEQ ID NO: 1688659 - RNA, 16 nt, Human
caggcuggcccugccc

SEQ ID NO: 1688660 - RNA, 17 nt, Human
caggcuggcccugcccu

SEQ ID NO: 1688661 - RNA, 23 nt, Human
caggcugggucgcccuggacugu

SEQ ID NO: 1688662 - RNA, 23 nt, Human
caggcugggcuucaguggcagcu

SEQ ID NO: 1688663 - RNA, 21 nt, Human
caggcugggucgcccuggacu

SEQ ID NO: 1688664 - RNA, 14 nt, Human
caggcugugaguuu

SEQ ID NO: 1688665 - RNA, 22 nt, Human
caggcuguaucccaugagccuc

SEQ ID NO: 1688666 - RNA, 23 nt, Human
caggcuguaucccaugagccuca

SEQ ID NO: 1688667 - RNA, 16 nt, Human
caggcuuagucacuga

SEQ ID NO: 1688668 - RNA, 17 nt, Human
caggcuuagucacugag

SEQ ID NO: 1688669 - RNA, 20 nt, Human
caggcuuagucacugagaca

SEQ ID NO: 1688670 - RNA, 21 nt, Human
caggcuuagucacugagacag

SEQ ID NO: 1688671 - RNA, 12 nt, Human
caggcuggucuc

SEQ ID NO: 1688672 - RNA, 20 nt, Human
caggcuggucucgaacuccu

SEQ ID NO: 1688673 - RNA, 22 nt, Human
caggcuggucucgaacuccuga

SEQ ID NO: 1688674 - RNA, 19 nt, Human
caggcuggucucaaacucu

SEQ ID NO: 1688675 - RNA, 23 nt, Human
caggcuggucucgaacuccugac

SEQ ID NO: 1688676 - RNA, 14 nt, Human
caggcuguauccca

SEQ ID NO: 1688677 - RNA, 20 nt, Human
caggcuguaucccaugagcc

SEQ ID NO: 1688678 - RNA, 21 nt, Human
caggcuguaucccaugagccu

SEQ ID NO: 1688679 - RNA, 16 nt, Human
cagggaaacagcuaau

SEQ ID NO: 1688680 - RNA, 23 nt, Human
caggcuuuuuuaucaugugaaau

SEQ ID NO: 1688681 - RNA, 22 nt, Human
caggcuuagucacugagacagc

SEQ ID NO: 1688682 - RNA, 23 nt, Human
caggcuuagucacugagacagcc

SEQ ID NO: 1688683 - RNA, 19 nt, Human
caggcccuuccucuccacu

SEQ ID NO: 1688684 - RNA, 20 nt, Human
caggcccuuccucuccacug

SEQ ID NO: 1688685 - RNA, 21 nt, Human
caggcccuuccucuccacugc

SEQ ID NO: 1688686 - RNA, 23 nt, Human
caggcccuuccucuccacugccu

SEQ ID NO: 1688687 - RNA, 16 nt, Human
caggcccuuccucucc

SEQ ID NO: 1688688 - RNA, 17 nt, Human
caggcccuuccucucca

SEQ ID NO: 1688689 - RNA, 15 nt, Human
caggcccuuccucuc

SEQ ID NO: 1688690 - RNA, 16 nt, Human
caggcccucugcccac

SEQ ID NO: 1688691 - RNA, 17 nt, Human
caggcccucugcccacu

SEQ ID NO: 1688692 - RNA, 19 nt, Human
caggcccucugcccacucc

SEQ ID NO: 1688693 - RNA, 20 nt, Human
caggcccucugcccacuccc

SEQ ID NO: 1688694 - RNA, 21 nt, Human
caggcccucugcccacucccu

SEQ ID NO: 1688695 - RNA, 22 nt, Human
caggcccucugcccacucccug

SEQ ID NO: 1688696 - RNA, 22 nt, Human
caggcccggcuccaggcuccuu

SEQ ID NO: 1688697 - RNA, 20 nt, Human
caggcccggcuccaggcucc

SEQ ID NO: 1688698 - RNA, 21 nt, Human
caggcccggcuccaggcuccu

SEQ ID NO: 1688699 - RNA, 13 nt, Human
caggcccucugcc

SEQ ID NO: 1688700 - RNA, 14 nt, Human
caggcccucugccc

SEQ ID NO: 1688701 - RNA, 15 nt, Human
caggcccucugccca

SEQ ID NO: 1688702 - RNA, 17 nt, Human
caggcccggcuccaggc

SEQ ID NO: 1688703 - RNA, 18 nt, Human
caggcccggcuccaggcu

SEQ ID NO: 1688704 - RNA, 19 nt, Human
caggcccggcuccaggcuc

SEQ ID NO: 1688705 - RNA, 21 nt, Human
caggcuccuuuagcgcccagu

SEQ ID NO: 1688706 - RNA, 20 nt, Human
caggcucgggcuccccagcc

SEQ ID NO: 1688707 - RNA, 12 nt, Human
caggcucucagg

SEQ ID NO: 1688708 - RNA, 13 nt, Human
caggcucucaggc

SEQ ID NO: 1688709 - RNA, 14 nt, Human
caggcucucaggcc

SEQ ID NO: 1688710 - RNA, 15 nt, Human
caggcucucaggcca

SEQ ID NO: 1688711 - RNA, 16 nt, Human
caggcucucaggccag

SEQ ID NO: 1688712 - RNA, 21 nt, Human
caggcucucaggccagcugcu

SEQ ID NO: 1688713 - RNA, 23 nt, Human
caggcucucaggccagcugcuug

SEQ ID NO: 1688714 - RNA, 17 nt, Human
caggcucucaggccagc

SEQ ID NO: 1688715 - RNA, 18 nt, Human
caggcucucaggccagcu

SEQ ID NO: 1688716 - RNA, 19 nt, Human
caggcucucaggccagcug

SEQ ID NO: 1688717 - RNA, 20 nt, Human
caggcucucaggccagcugc

SEQ ID NO: 1688718 - RNA, 13 nt, Human
caggcuccugcca

SEQ ID NO: 1688719 - RNA, 14 nt, Human
caggcuccugccac

SEQ ID NO: 1688720 - RNA, 15 nt, Human
caggcuccugccacc

SEQ ID NO: 1688721 - RNA, 16 nt, Human
caggcuccugccacca

SEQ ID NO: 1688722 - RNA, 18 nt, Human
caggcuccugccaccacg

SEQ ID NO: 1688723 - RNA, 14 nt, Human
caggcuccuuuagc

SEQ ID NO: 1688724 - RNA, 19 nt, Human
caggcuccuuuagcgccca

SEQ ID NO: 1688725 - RNA, 20 nt, Human
caggcuccuuuagcgcccag

SEQ ID NO: 1688726 - RNA, 13 nt, Human
caggcuagaugua

SEQ ID NO: 1688727 - RNA, 19 nt, Human
caggcuagauguauguacu

SEQ ID NO: 1688728 - RNA, 14 nt, Human
caggcuacugucag

SEQ ID NO: 1688729 - RNA, 15 nt, Human
cagggaaggggacaa

SEQ ID NO: 1688730 - RNA, 17 nt, Human
cagggaaggggacaagg

SEQ ID NO: 1688731 - RNA, 13 nt, Human
cagggacagaggg

SEQ ID NO: 1688732 - RNA, 14 nt, Human
cagggacagagggg

SEQ ID NO: 1688733 - RNA, 20 nt, Human
cagggacagaggggguggcc

SEQ ID NO: 1688734 - RNA, 22 nt, Human
cagggaaacagcuaaugggaca

SEQ ID NO: 1688735 - RNA, 22 nt, Human
cagggcacaccgggcacucaga

SEQ ID NO: 1688736 - RNA, 23 nt, Human
cagggcacaccgggcacucagaa

SEQ ID NO: 1688737 - RNA, 15 nt, Human
cagggcacaccgggc

SEQ ID NO: 1688738 - RNA, 17 nt, Human
cagggcacaccgggcac

SEQ ID NO: 1688739 - RNA, 19 nt, Human
cagggcacaccgggcacuc

SEQ ID NO: 1688740 - RNA, 21 nt, Human
cagggcacaccgggcacucag

SEQ ID NO: 1688741 - RNA, 14 nt, Human
cagggcacaccggg

SEQ ID NO: 1688742 - RNA, 23 nt, Human
cagggacagaggggguggccucc

SEQ ID NO: 1688743 - RNA, 18 nt, Human
cagggacaggauaagagg

SEQ ID NO: 1688744 - RNA, 20 nt, Human
cagggcauggccagguggcc

SEQ ID NO: 1688745 - RNA, 17 nt, Human
cagggcauggcugggaa

SEQ ID NO: 1688746 - RNA, 19 nt, Human
caggggaggguagagcgga

SEQ ID NO: 1688747 - RNA, 16 nt, Human
cagggccuggcucagg

SEQ ID NO: 1688748 - RNA, 19 nt, Human
cagggccuggcucaggugg

SEQ ID NO: 1688749 - RNA, 13 nt, Human
cagggccuggcuc

SEQ ID NO: 1688750 - RNA, 14 nt, Human
cagggccuggcuca

SEQ ID NO: 1688751 - RNA, 15 nt, Human
cagggccuggcucag

SEQ ID NO: 1688752 - RNA, 11 nt, Human
caggggacagg

SEQ ID NO: 1688753 - RNA, 16 nt, Human
caggggacaggauggu

SEQ ID NO: 1688754 - RNA, 17 nt, Human
caggcaugguggcccac

SEQ ID NO: 1688755 - RNA, 14 nt, Human
caggcagguccagg

SEQ ID NO: 1688756 - RNA, 15 nt, Human
caggcagguccaggg

SEQ ID NO: 1688757 - RNA, 19 nt, Human
caggcagguccaggguuug

SEQ ID NO: 1688758 - RNA, 12 nt, Human
caggcaggucuu

SEQ ID NO: 1688759 - RNA, 13 nt, Human
caggcaggucuug

SEQ ID NO: 1688760 - RNA, 22 nt, Human
caggcaggucuugaacuccugg

SEQ ID NO: 1688761 - RNA, 23 nt, Human
caggcaggucuugaacuccuggc

SEQ ID NO: 1688762 - RNA, 15 nt, Human
caggcaggugggaug

SEQ ID NO: 1688763 - RNA, 24 nt, Human
caggcauuccccaggaggccagcc

SEQ ID NO: 1688764 - RNA, 22 nt, Human
caggcauuccccaggaggccag

SEQ ID NO: 1688765 - RNA, 23 nt, Human
caggcauuccccaggaggccagc

SEQ ID NO: 1688766 - RNA, 18 nt, Human
caggcauuccccaggagg

SEQ ID NO: 1688767 - RNA, 19 nt, Human
caggcauuccccaggaggc

SEQ ID NO: 1688768 - RNA, 20 nt, Human
caggcauuccccaggaggcc

SEQ ID NO: 1688769 - RNA, 21 nt, Human
caggcauuccccaggaggcca

SEQ ID NO: 1688770 - RNA, 15 nt, Human
caggcauguucucug

SEQ ID NO: 1688771 - RNA, 18 nt, Human
caggcauguucucugagg

SEQ ID NO: 1688772 - RNA, 19 nt, Human
caggcauguucucugagga

SEQ ID NO: 1688773 - RNA, 20 nt, Human
caggcauguucucugaggac

SEQ ID NO: 1688774 - RNA, 13 nt, Human
caggcauucccca

SEQ ID NO: 1688775 - RNA, 15 nt, Human
caggcauuccccagg

SEQ ID NO: 1688776 - RNA, 16 nt, Human
caggcauuccccagga

SEQ ID NO: 1688777 - RNA, 17 nt, Human
caggcauuccccaggag

SEQ ID NO: 1688778 - RNA, 13 nt, Human
caggcagguccag

SEQ ID NO: 1688779 - RNA, 20 nt, Human
caggcaggaaggcugagagg

SEQ ID NO: 1688780 - RNA, 16 nt, Human
caggcagccaggccac

SEQ ID NO: 1688781 - RNA, 17 nt, Human
caggcagccaggccaca

SEQ ID NO: 1688782 - RNA, 14 nt, Human
caggcaaugcuggc

SEQ ID NO: 1688783 - RNA, 14 nt, Human
caggcagccaggcc

SEQ ID NO: 1688784 - RNA, 15 nt, Human
caggcagccaggcca

SEQ ID NO: 1688785 - RNA, 14 nt, Human
caggcaagcaccuc

SEQ ID NO: 1688786 - RNA, 15 nt, Human
caggcaagcaccucc

SEQ ID NO: 1688787 - RNA, 16 nt, Human
caggcaagcaccuccu

SEQ ID NO: 1688788 - RNA, 21 nt, Human
caggcaagcaccuccugccuc

SEQ ID NO: 1688789 - RNA, 20 nt, Human
caggauucuuccucccuccc

SEQ ID NO: 1688790 - RNA, 16 nt, Human
caggauuuuaaucuuu

SEQ ID NO: 1688791 - RNA, 21 nt, Human
caggauauucucacagcucca

SEQ ID NO: 1688792 - RNA, 13 nt, Human
caggaucagucug

SEQ ID NO: 1688793 - RNA, 14 nt, Human
caggaucagucuga

SEQ ID NO: 1688794 - RNA, 18 nt, Human
caggaugaugacuaugga

SEQ ID NO: 1688795 - RNA, 20 nt, Human
caggaugaugacuauggaaa

SEQ ID NO: 1688796 - RNA, 22 nt, Human
caggaugaugacuauggaaaga

SEQ ID NO: 1688797 - RNA, 23 nt, Human
caggauggccgggcgcgguggcu

SEQ ID NO: 1688798 - RNA, 19 nt, Human
caggauguacaaggacagc

SEQ ID NO: 1688799 - RNA, 17 nt, Human
caggauucuuccucccu

SEQ ID NO: 1688800 - RNA, 18 nt, Human
caggauucuuccucccuc

SEQ ID NO: 1688801 - RNA, 21 nt, Human
caggaugguucccuugaugaa

SEQ ID NO: 1688802 - RNA, 23 nt, Human
caggaugguucccuugaugaaga

SEQ ID NO: 1688803 - RNA, 13 nt, Human
caggcccggcucc

SEQ ID NO: 1688804 - RNA, 14 nt, Human
caggcccggcucca

SEQ ID NO: 1688805 - RNA, 15 nt, Human
caggcccggcuccag

SEQ ID NO: 1688806 - RNA, 15 nt, Human
caggccccugccacc

SEQ ID NO: 1688807 - RNA, 17 nt, Human
caggccccugccacccu

SEQ ID NO: 1688808 - RNA, 19 nt, Human
caggccccugccacccugg

SEQ ID NO: 1688809 - RNA, 20 nt, Human
caggccccugccacccuggg

SEQ ID NO: 1688810 - RNA, 16 nt, Human
caggcccggcuccagg

SEQ ID NO: 1688811 - RNA, 18 nt, Human
caggccaaacucaccugc

SEQ ID NO: 1688812 - RNA, 23 nt, Human
caggccaaacucaccugccccuc

SEQ ID NO: 1688813 - RNA, 13 nt, Human
caggccacaagac

SEQ ID NO: 1688814 - RNA, 17 nt, Human
caggccacaagacccuu

SEQ ID NO: 1688815 - RNA, 18 nt, Human
caggccacaagacccuug

SEQ ID NO: 1688816 - RNA, 18 nt, Human
caggccauuccccgucuc

SEQ ID NO: 1688817 - RNA, 20 nt, Human
caggccacaagacccuugug

SEQ ID NO: 1688818 - RNA, 21 nt, Human
caggccaggcccucugcccac

SEQ ID NO: 1688819 - RNA, 22 nt, Human
caggccaggcccucugcccacu

SEQ ID NO: 1688820 - RNA, 21 nt, Human
caggccauuccccgucucugg

SEQ ID NO: 1688821 - RNA, 14 nt, Human
caggcccccaggug

SEQ ID NO: 1688822 - RNA, 19 nt, Human
caggcccccaggugccagu

SEQ ID NO: 1688823 - RNA, 13 nt, Human
caggccccugcca

SEQ ID NO: 1688824 - RNA, 20 nt, Human
caggcccccaggugccaguu

SEQ ID NO: 1688825 - RNA, 16 nt, Human
caggaguuggaagugu

SEQ ID NO: 1688826 - RNA, 19 nt, Human
caggaguuucguuuucaaa

SEQ ID NO: 1688827 - RNA, 21 nt, Human
caggaguuugagaccaaccug

SEQ ID NO: 1688828 - RNA, 13 nt, Human
caggauagacuuu

SEQ ID NO: 1688829 - RNA, 22 nt, Human
caggaguuugagaccaaccugg

SEQ ID NO: 1688830 - RNA, 23 nt, Human
caggaguuugagaccaaccuggg

SEQ ID NO: 1688831 - RNA, 14 nt, Human
caggagcccuggga

SEQ ID NO: 1688832 - RNA, 16 nt, Human
caggagcccugggagg

SEQ ID NO: 1688833 - RNA, 18 nt, Human
caggagcccugggaggcu

SEQ ID NO: 1688834 - RNA, 19 nt, Human
caggagcccugggaggcuc

SEQ ID NO: 1688835 - RNA, 11 nt, Human
caggagcccug

SEQ ID NO: 1688836 - RNA, 23 nt, Human
caggagccccgaggccuucucug

SEQ ID NO: 1688837 - RNA, 20 nt, Human
caggagccccgaggccuucu

SEQ ID NO: 1688838 - RNA, 22 nt, Human
caggagccccgaggccuucucu

SEQ ID NO: 1688839 - RNA, 15 nt, Human
caggagccccgaggc

SEQ ID NO: 1688840 - RNA, 16 nt, Human
caggagccccgaggcc

SEQ ID NO: 1688841 - RNA, 18 nt, Human
caggagccccgaggccuu

SEQ ID NO: 1688842 - RNA, 12 nt, Human
caggagcagcca

SEQ ID NO: 1688843 - RNA, 13 nt, Human
caggagcagccac

SEQ ID NO: 1688844 - RNA, 14 nt, Human
caggagcagccaca

SEQ ID NO: 1688845 - RNA, 19 nt, Human
caggagcagccacauuccu

SEQ ID NO: 1688846 - RNA, 12 nt, Human
caggagugagca

SEQ ID NO: 1688847 - RNA, 20 nt, Human
caggagccuccugcccuuac

SEQ ID NO: 1688848 - RNA, 14 nt, Human
caggagccuccugc

SEQ ID NO: 1688849 - RNA, 17 nt, Human
caggagccuccugcccu

SEQ ID NO: 1688850 - RNA, 21 nt, Human
caggagcccugggaggcucug

SEQ ID NO: 1688851 - RNA, 12 nt, Human
caggacucugcc

SEQ ID NO: 1688852 - RNA, 13 nt, Human
caggacucugccu

SEQ ID NO: 1688853 - RNA, 15 nt, Human
caggacucugccucc

SEQ ID NO: 1688854 - RNA, 16 nt, Human
caggacucugccuccu

SEQ ID NO: 1688855 - RNA, 23 nt, Human
caguccccgugaaggagagcccu

SEQ ID NO: 1688856 - RNA, 16 nt, Human
cagucccccugcccca

SEQ ID NO: 1688857 - RNA, 17 nt, Human
cagucccccugccccag

SEQ ID NO: 1688858 - RNA, 17 nt, Human
cagucccugccaaugga

SEQ ID NO: 1688859 - RNA, 12 nt, Human
caguccucccau

SEQ ID NO: 1688860 - RNA, 13 nt, Human
caguccucccauc

SEQ ID NO: 1688861 - RNA, 14 nt, Human
caguccucccaucu

SEQ ID NO: 1688862 - RNA, 15 nt, Human
caguccucccaucuc

SEQ ID NO: 1688863 - RNA, 12 nt, Human
cagucccugcca

SEQ ID NO: 1688864 - RNA, 13 nt, Human
cagucccugccaa

SEQ ID NO: 1688865 - RNA, 14 nt, Human
cagucccugccaau

SEQ ID NO: 1688866 - RNA, 15 nt, Human
cagucccugccaaug

SEQ ID NO: 1688867 - RNA, 16 nt, Human
cagucccugccaaugg

SEQ ID NO: 1688868 - RNA, 16 nt, Human
caguauuacuucugcu

SEQ ID NO: 1688869 - RNA, 18 nt, Human
caguauuacuucugcuac

SEQ ID NO: 1688870 - RNA, 19 nt, Human
caguauuacuucugcuaca

SEQ ID NO: 1688871 - RNA, 15 nt, Human
cagucaggaaagaga

SEQ ID NO: 1688872 - RNA, 18 nt, Human
cagucaggaaagagaacu

SEQ ID NO: 1688873 - RNA, 22 nt, Human
cagucaggaaagagaacuucca

SEQ ID NO: 1688874 - RNA, 17 nt, Human
cagucauucagauauga

SEQ ID NO: 1688875 - RNA, 20 nt, Human
cagucauucagauaugauuc

SEQ ID NO: 1688876 - RNA, 16 nt, Human
caguccauagcagaga

SEQ ID NO: 1688877 - RNA, 14 nt, Human
caguccauugaaag

SEQ ID NO: 1688878 - RNA, 13 nt, Human
caguccaugaaga

SEQ ID NO: 1688879 - RNA, 14 nt, Human
caguauaauuaaca

SEQ ID NO: 1688880 - RNA, 15 nt, Human
caguauaauuaacau

SEQ ID NO: 1688881 - RNA, 17 nt, Human
caguauaauuaacaugu

SEQ ID NO: 1688882 - RNA, 21 nt, Human
caguauaauuaacauguuaaa

SEQ ID NO: 1688883 - RNA, 12 nt, Human
caguagugauag

SEQ ID NO: 1688884 - RNA, 13 nt, Human
caguaucucaggg

SEQ ID NO: 1688885 - RNA, 15 nt, Human
caguaucucagggcc

SEQ ID NO: 1688886 - RNA, 12 nt, Human
caguaucuugaa

SEQ ID NO: 1688887 - RNA, 18 nt, Human
caguaucuugaagacuuu

SEQ ID NO: 1688888 - RNA, 21 nt, Human
caguaucuugaagacuuuucu

SEQ ID NO: 1688889 - RNA, 12 nt, Human
caguauggcagc

SEQ ID NO: 1688890 - RNA, 13 nt, Human
cagugcuccagcc

SEQ ID NO: 1688891 - RNA, 23 nt, Human
cagugccuuauggaacacucuga

SEQ ID NO: 1688892 - RNA, 15 nt, Human
cagugccgagaagga

SEQ ID NO: 1688893 - RNA, 18 nt, Human
cagugccgagaaggaagc

SEQ ID NO: 1688894 - RNA, 11 nt, Human
cagugccuuau

SEQ ID NO: 1688895 - RNA, 13 nt, Human
cagugccuuaugg

SEQ ID NO: 1688896 - RNA, 15 nt, Human
cagugccuuauggaa

SEQ ID NO: 1688897 - RNA, 16 nt, Human
cagugccuuauggaac

SEQ ID NO: 1688898 - RNA, 17 nt, Human
cagugccuuauggaaca

SEQ ID NO: 1688899 - RNA, 18 nt, Human
cagugccuuauggaacac

SEQ ID NO: 1688900 - RNA, 19 nt, Human
cagugccuuauggaacacu

SEQ ID NO: 1688901 - RNA, 20 nt, Human
cagugccuuauggaacacuc

SEQ ID NO: 1688902 - RNA, 21 nt, Human
cagugccuuauggaacacucu

SEQ ID NO: 1688903 - RNA, 22 nt, Human
cagugccuuauggaacacucug

SEQ ID NO: 1688904 - RNA, 19 nt, Human
cagugagucgaggacaggg

SEQ ID NO: 1688905 - RNA, 20 nt, Human
cagugagucgaggacaggga

SEQ ID NO: 1688906 - RNA, 22 nt, Human
cagugagucgaggacagggagg

SEQ ID NO: 1688907 - RNA, 23 nt, Human
cagugagucgaggacagggaggu

SEQ ID NO: 1688908 - RNA, 15 nt, Human
cagugcccuccagga

SEQ ID NO: 1688909 - RNA, 17 nt, Human
cagugauuaccagggac

SEQ ID NO: 1688910 - RNA, 18 nt, Human
cagugauuaccagggacu

SEQ ID NO: 1688911 - RNA, 16 nt, Human
caguccucccaucuca

SEQ ID NO: 1688912 - RNA, 17 nt, Human
caguccucccaucucac

SEQ ID NO: 1688913 - RNA, 15 nt, Human
caguccuuaccagca

SEQ ID NO: 1688914 - RNA, 18 nt, Human
caguccuuaccagcagag

SEQ ID NO: 1688915 - RNA, 19 nt, Human
caguccuuaccagcagagc

SEQ ID NO: 1688916 - RNA, 20 nt, Human
caguccuuaccagcagagca

SEQ ID NO: 1688917 - RNA, 21 nt, Human
caguccuuaccagcagagcac

SEQ ID NO: 1688918 - RNA, 19 nt, Human
cagucuggaaugcaguggu

SEQ ID NO: 1688919 - RNA, 20 nt, Human
cagugaaagaaaauaacaau

SEQ ID NO: 1688920 - RNA, 16 nt, Human
cagugaaagaaaauaa

SEQ ID NO: 1688921 - RNA, 24 nt, Human
cagugagccgagauugcaccacug

SEQ ID NO: 1688922 - RNA, 12 nt, Human
cagugaggcucu

SEQ ID NO: 1688923 - RNA, 13 nt, Human
cagugaggcucug

SEQ ID NO: 1688924 - RNA, 14 nt, Human
cagugaggcucugc

SEQ ID NO: 1688925 - RNA, 15 nt, Human
cagugaggcucugcc

SEQ ID NO: 1688926 - RNA, 16 nt, Human
cagugaggcucugccc

SEQ ID NO: 1688927 - RNA, 21 nt, Human
cagugaggcucugcccuuggu

SEQ ID NO: 1688928 - RNA, 17 nt, Human
cagugagucgaggacag

SEQ ID NO: 1688929 - RNA, 18 nt, Human
cagugagucgaggacagg

SEQ ID NO: 1688930 - RNA, 17 nt, Human
cagugaggcucugcccu

SEQ ID NO: 1688931 - RNA, 18 nt, Human
cagugaggcucugcccuu

SEQ ID NO: 1688932 - RNA, 19 nt, Human
cagugaggcucugcccuug

SEQ ID NO: 1688933 - RNA, 20 nt, Human
cagugaggcucugcccuugg

SEQ ID NO: 1688934 - RNA, 15 nt, Human
cagugagacagcucu

SEQ ID NO: 1688935 - RNA, 21 nt, Human
caguaaaugggggugcauuug

SEQ ID NO: 1688936 - RNA, 22 nt, Human
caguaaaugggggugcauuuga

SEQ ID NO: 1688937 - RNA, 12 nt, Human
cagguucagcuu

SEQ ID NO: 1688938 - RNA, 13 nt, Human
cagguucagcuug

SEQ ID NO: 1688939 - RNA, 12 nt, Human
caguaauaacuc

SEQ ID NO: 1688940 - RNA, 13 nt, Human
caguaauaacucu

SEQ ID NO: 1688941 - RNA, 21 nt, Human
caggugugagccaccacgccc

SEQ ID NO: 1688942 - RNA, 22 nt, Human
caggugugagucaccaagccca

SEQ ID NO: 1688943 - RNA, 23 nt, Human
caggugugagucaccaagcccag

SEQ ID NO: 1688944 - RNA, 18 nt, Human
caggugugagccaccacg

SEQ ID NO: 1688945 - RNA, 16 nt, Human
caggugugagucacca

SEQ ID NO: 1688946 - RNA, 20 nt, Human
caggugugagucaccaagcc

SEQ ID NO: 1688947 - RNA, 21 nt, Human
caggugugagucaccaagccc

SEQ ID NO: 1688948 - RNA, 16 nt, Human
caggugugaaccacca

SEQ ID NO: 1688949 - RNA, 19 nt, Human
caggugugaaccaccacac

SEQ ID NO: 1688950 - RNA, 22 nt, Human
caggugugaaccaccacaccca

SEQ ID NO: 1688951 - RNA, 23 nt, Human
caggugugaaccaccacacccag

SEQ ID NO: 1688952 - RNA, 15 nt, Human
caggugucccugcac

SEQ ID NO: 1688953 - RNA, 16 nt, Human
caggugucccugcacu

SEQ ID NO: 1688954 - RNA, 18 nt, Human
caggugucccugcacuug

SEQ ID NO: 1688955 - RNA, 19 nt, Human
caggugucccugcacuugc

SEQ ID NO: 1688956 - RNA, 12 nt, Human
caggugugaacc

SEQ ID NO: 1688957 - RNA, 13 nt, Human
cagguggggcagc

SEQ ID NO: 1688958 - RNA, 14 nt, Human
cagguggggcagcu

SEQ ID NO: 1688959 - RNA, 15 nt, Human
cagguggggcagcuu

SEQ ID NO: 1688960 - RNA, 16 nt, Human
cagguggggcagcuug

SEQ ID NO: 1688961 - RNA, 17 nt, Human
cagguggggcagcuuga

SEQ ID NO: 1688962 - RNA, 18 nt, Human
cagguggggucacucugg

SEQ ID NO: 1688963 - RNA, 23 nt, Human
cagguggggucacucuggcagcu

SEQ ID NO: 1688964 - RNA, 18 nt, Human
caggugguuauggagagg

SEQ ID NO: 1688965 - RNA, 19 nt, Human
cagguggggucacucuggc

SEQ ID NO: 1688966 - RNA, 20 nt, Human
cagguggggucacucuggca

SEQ ID NO: 1688967 - RNA, 21 nt, Human
cagguggggucacucuggcag

SEQ ID NO: 1688968 - RNA, 22 nt, Human
cagguggggucacucuggcagc

SEQ ID NO: 1688969 - RNA, 20 nt, Human
caggugguuauggagagggu

SEQ ID NO: 1688970 - RNA, 11 nt, Human
caggugucccu

SEQ ID NO: 1688971 - RNA, 14 nt, Human
caggugucccugca

SEQ ID NO: 1688972 - RNA, 14 nt, Human
caggggugggacac

SEQ ID NO: 1688973 - RNA, 15 nt, Human
caggggugggacacc

SEQ ID NO: 1688974 - RNA, 20 nt, Human
caggggugggacacccugug

SEQ ID NO: 1688975 - RNA, 21 nt, Human
caggggugggacacccuguga

SEQ ID NO: 1688976 - RNA, 16 nt, Human
caggguuuugccaugu

SEQ ID NO: 1688977 - RNA, 17 nt, Human
cagggucucacucuguc

SEQ ID NO: 1688978 - RNA, 16 nt, Human
cagggucucacucugu

SEQ ID NO: 1688979 - RNA, 14 nt, Human
cagguaacaggcag

SEQ ID NO: 1688980 - RNA, 15 nt, Human
cagguaacaggcaga

SEQ ID NO: 1688981 - RNA, 16 nt, Human
cagguaacaggcagau

SEQ ID NO: 1688982 - RNA, 17 nt, Human
cagguaacaggcagaua

SEQ ID NO: 1688983 - RNA, 23 nt, Human
cagggucccugguggcagcucac

SEQ ID NO: 1688984 - RNA, 18 nt, Human
caggguccuguagcccua

SEQ ID NO: 1688985 - RNA, 21 nt, Human
cagggucucacuauguugccc

SEQ ID NO: 1688986 - RNA, 22 nt, Human
cagggucucacuauguugccca

SEQ ID NO: 1688987 - RNA, 23 nt, Human
cagggucucacuauguugcccag

SEQ ID NO: 1688988 - RNA, 15 nt, Human
cagggucucacucug

SEQ ID NO: 1688989 - RNA, 21 nt, Human
caggguauuccagagugggga

SEQ ID NO: 1688990 - RNA, 20 nt, Human
caggguauuccagagugggg

SEQ ID NO: 1688991 - RNA, 12 nt, Human
cagggucccugg

SEQ ID NO: 1688992 - RNA, 14 nt, Human
cagggucccuggug

SEQ ID NO: 1688993 - RNA, 15 nt, Human
cagggucccuggugg

SEQ ID NO: 1688994 - RNA, 18 nt, Human
cagggucccugguggcag

SEQ ID NO: 1688995 - RNA, 19 nt, Human
cagggucccugguggcagc

SEQ ID NO: 1688996 - RNA, 22 nt, Human
cagggucccugguggcagcuca

SEQ ID NO: 1688997 - RNA, 19 nt, Human
caggucccuaauaaagcug

SEQ ID NO: 1688998 - RNA, 20 nt, Human
caggucccuaauaaagcugu

SEQ ID NO: 1688999 - RNA, 21 nt, Human
caggucccuaauaaagcugug

SEQ ID NO: 1689000 - RNA, 22 nt, Human
caggucccuaauaaagcugugu

SEQ ID NO: 1689001 - RNA, 18 nt, Human
caggucuugaacuccugg

SEQ ID NO: 1689002 - RNA, 19 nt, Human
caggucuugaacuccuggc

SEQ ID NO: 1689003 - RNA, 20 nt, Human
caggucuugaacuccuggcc

SEQ ID NO: 1689004 - RNA, 21 nt, Human
caggucuugaacuccuggccu

SEQ ID NO: 1689005 - RNA, 22 nt, Human
caggucuugaacuccuggccuc

SEQ ID NO: 1689006 - RNA, 23 nt, Human
caggucuugaacuccuggccuca

SEQ ID NO: 1689007 - RNA, 15 nt, Human
cagguggccacucca

SEQ ID NO: 1689008 - RNA, 16 nt, Human
cagguggccacuccag

SEQ ID NO: 1689009 - RNA, 19 nt, Human
cagguggccacuccagacc

SEQ ID NO: 1689010 - RNA, 21 nt, Human
cagguggccacuccagacccc

SEQ ID NO: 1689011 - RNA, 21 nt, Human
caggugagaagcagaggaagg

SEQ ID NO: 1689012 - RNA, 13 nt, Human
caggugagaagca

SEQ ID NO: 1689013 - RNA, 20 nt, Human
caggugagaagcagaggaag

SEQ ID NO: 1689014 - RNA, 17 nt, Human
cagguaaucgaccugcc

SEQ ID NO: 1689015 - RNA, 18 nt, Human
cagguaaucgaccugccu

SEQ ID NO: 1689016 - RNA, 19 nt, Human
cagguaaucgaccugccuc

SEQ ID NO: 1689017 - RNA, 20 nt, Human
cagguaaucgaccugccucg

SEQ ID NO: 1689018 - RNA, 20 nt, Human
cagguaacaggcagauacag

SEQ ID NO: 1689019 - RNA, 21 nt, Human
cagguaacaggcagauacagg

SEQ ID NO: 1689020 - RNA, 11 nt, Human
caggucccuaa

SEQ ID NO: 1689021 - RNA, 12 nt, Human
caggucccuaau

SEQ ID NO: 1689022 - RNA, 13 nt, Human
caggucccuaaua

SEQ ID NO: 1689023 - RNA, 14 nt, Human
caggucccuaauaa

SEQ ID NO: 1689024 - RNA, 15 nt, Human
caggucccuaauaaa

SEQ ID NO: 1689025 - RNA, 16 nt, Human
caggucccuaauaaag

SEQ ID NO: 1689026 - RNA, 17 nt, Human
caggucccuaauaaagc

SEQ ID NO: 1689027 - RNA, 18 nt, Human
caggucccuaauaaagcu

SEQ ID NO: 1689028 - RNA, 23 nt, Human
cagccugugucuuuaaaugcugc

SEQ ID NO: 1689029 - RNA, 14 nt, Human
cagccugugucuuu

SEQ ID NO: 1689030 - RNA, 17 nt, Human
cagccuugaccauucuc

SEQ ID NO: 1689031 - RNA, 20 nt, Human
cagccuugaccauucuccac

SEQ ID NO: 1689032 - RNA, 21 nt, Human
cagccuugaccauucuccacc

SEQ ID NO: 1689033 - RNA, 22 nt, Human
cagccuugaccauucuccaccu

SEQ ID NO: 1689034 - RNA, 23 nt, Human
cagccuugaccauucuccaccug

SEQ ID NO: 1689035 - RNA, 24 nt, Human
cagccuugaccauucuccaccugc

SEQ ID NO: 1689036 - RNA, 16 nt, Human
cagccugggcaaugug

SEQ ID NO: 1689037 - RNA, 19 nt, Human
cagccugggcaaugugaua

SEQ ID NO: 1689038 - RNA, 13 nt, Human
cagccuggcacag

SEQ ID NO: 1689039 - RNA, 20 nt, Human
cagccuggcacagggcagug

SEQ ID NO: 1689040 - RNA, 21 nt, Human
cagccuggcacagggcagugg

SEQ ID NO: 1689041 - RNA, 10 nt, Human
cagccuggca

SEQ ID NO: 1689042 - RNA, 15 nt, Human
cagccuggacccugu

SEQ ID NO: 1689043 - RNA, 19 nt, Human
cagccuggacccuguggau

SEQ ID NO: 1689044 - RNA, 15 nt, Human
cagccuccugaguag

SEQ ID NO: 1689045 - RNA, 20 nt, Human
cagccugcuccagcuguuca

SEQ ID NO: 1689046 - RNA, 23 nt, Human
cagccucccgaauagcugggacu

SEQ ID NO: 1689047 - RNA, 19 nt, Human
cagccucccgaguagcugg

SEQ ID NO: 1689048 - RNA, 20 nt, Human
cagccucccgaguagcuggg

SEQ ID NO: 1689049 - RNA, 21 nt, Human
cagccucccgaguagcuggga

SEQ ID NO: 1689050 - RNA, 22 nt, Human
cagccucccgaguagcugggac

SEQ ID NO: 1689051 - RNA, 23 nt, Human
cagccucccgaguagcugggacu

SEQ ID NO: 1689052 - RNA, 21 nt, Human
cagccucccuauuuuuuuucu

SEQ ID NO: 1689053 - RNA, 21 nt, Human
cagcucacugcaaccuucgcc

SEQ ID NO: 1689054 - RNA, 15 nt, Human
cagcucacugcaacc

SEQ ID NO: 1689055 - RNA, 12 nt, Human
cagcucagagag

SEQ ID NO: 1689056 - RNA, 12 nt, Human
cagcucacugca

SEQ ID NO: 1689057 - RNA, 14 nt, Human
cagcucacugcaac

SEQ ID NO: 1689058 - RNA, 19 nt, Human
cagcucaccucucccuugg

SEQ ID NO: 1689059 - RNA, 20 nt, Human
cagcucaccucucccuugga

SEQ ID NO: 1689060 - RNA, 22 nt, Human
cagcucaccagccccagugccc

SEQ ID NO: 1689061 - RNA, 20 nt, Human
cagcucaccagccccagugc

SEQ ID NO: 1689062 - RNA, 21 nt, Human
cagcucaccagccccagugcc

SEQ ID NO: 1689063 - RNA, 13 nt, Human
cagcucaccucuc

SEQ ID NO: 1689064 - RNA, 15 nt, Human
cagcucaccucuccc

SEQ ID NO: 1689065 - RNA, 16 nt, Human
cagcucaccucucccu

SEQ ID NO: 1689066 - RNA, 17 nt, Human
cagcucaccucucccuu

SEQ ID NO: 1689067 - RNA, 13 nt, Human
cagcucaccagcc

SEQ ID NO: 1689068 - RNA, 15 nt, Human
cagcucaccagcccc

SEQ ID NO: 1689069 - RNA, 16 nt, Human
cagcucaccagcccca

SEQ ID NO: 1689070 - RNA, 17 nt, Human
cagcucaccagccccag

SEQ ID NO: 1689071 - RNA, 19 nt, Human
cagcucaccagccccagug

SEQ ID NO: 1689072 - RNA, 21 nt, Human
cagcgagcccugguggcagug

SEQ ID NO: 1689073 - RNA, 19 nt, Human
cagcuaacauggaaguacu

SEQ ID NO: 1689074 - RNA, 18 nt, Human
cagcuaacauggaaguac

SEQ ID NO: 1689075 - RNA, 13 nt, Human
cagcgagcccugg

SEQ ID NO: 1689076 - RNA, 16 nt, Human
cagcgagcccuggugg

SEQ ID NO: 1689077 - RNA, 17 nt, Human
cagcgagcccugguggc

SEQ ID NO: 1689078 - RNA, 19 nt, Human
cagcgagcccugguggcag

SEQ ID NO: 1689079 - RNA, 20 nt, Human
cagcgagcccugguggcagu

SEQ ID NO: 1689080 - RNA, 20 nt, Human
cagcuaacauggaaguacua

SEQ ID NO: 1689081 - RNA, 19 nt, Human
cagcuaaucagcauucuca

SEQ ID NO: 1689082 - RNA, 15 nt, Human
cagcuaaugggacac

SEQ ID NO: 1689083 - RNA, 16 nt, Human
cagcuaaugggacacu

SEQ ID NO: 1689084 - RNA, 19 nt, Human
cagcuacuugggaggcuga

SEQ ID NO: 1689085 - RNA, 21 nt, Human
cagcccgggcucugccuccca

SEQ ID NO: 1689086 - RNA, 22 nt, Human
cagcccgggcucugccucccau

SEQ ID NO: 1689087 - RNA, 17 nt, Human
cagcccgggcucugccu

SEQ ID NO: 1689088 - RNA, 18 nt, Human
cagcccgggcucugccuc

SEQ ID NO: 1689089 - RNA, 19 nt, Human
cagcccgggcucugccucc

SEQ ID NO: 1689090 - RNA, 20 nt, Human
cagcccgggcucugccuccc

SEQ ID NO: 1689091 - RNA, 13 nt, Human
cagcccucccugc

SEQ ID NO: 1689092 - RNA, 15 nt, Human
cagcccucccugccc

SEQ ID NO: 1689093 - RNA, 23 nt, Human
cagcccuccaucuaaacugcccc

SEQ ID NO: 1689094 - RNA, 22 nt, Human
cagcccuccaucuaaacugccc

SEQ ID NO: 1689095 - RNA, 24 nt, Human
cagccccuucugacccaugcugcc

SEQ ID NO: 1689096 - RNA, 22 nt, Human
cagccccuucugacccaugcug

SEQ ID NO: 1689097 - RNA, 23 nt, Human
cagccccuucugacccaugcugc

SEQ ID NO: 1689098 - RNA, 16 nt, Human
cagccccuucugaccc

SEQ ID NO: 1689099 - RNA, 17 nt, Human
cagccccuucugaccca

SEQ ID NO: 1689100 - RNA, 19 nt, Human
cagccccuucugacccaug

SEQ ID NO: 1689101 - RNA, 21 nt, Human
cagccccuucugacccaugcu

SEQ ID NO: 1689102 - RNA, 13 nt, Human
cagcccgggcucu

SEQ ID NO: 1689103 - RNA, 14 nt, Human
cagcccgggcucug

SEQ ID NO: 1689104 - RNA, 15 nt, Human
cagcccgggcucugc

SEQ ID NO: 1689105 - RNA, 16 nt, Human
cagcccgggcucugcc

SEQ ID NO: 1689106 - RNA, 13 nt, Human
cagccccagugcc

SEQ ID NO: 1689107 - RNA, 14 nt, Human
cagccccagugccc

SEQ ID NO: 1689108 - RNA, 15 nt, Human
cagccccagugccca

SEQ ID NO: 1689109 - RNA, 16 nt, Human
cagccccagugcccac

SEQ ID NO: 1689110 - RNA, 17 nt, Human
cagccccagugcccaca

SEQ ID NO: 1689111 - RNA, 18 nt, Human
cagccccagugcccacag

SEQ ID NO: 1689112 - RNA, 11 nt, Human
cagccccaucc

SEQ ID NO: 1689113 - RNA, 21 nt, Human
cagccccaucccaaacccuuc

SEQ ID NO: 1689114 - RNA, 20 nt, Human
cagccccuguucuggcagag

SEQ ID NO: 1689115 - RNA, 21 nt, Human
cagccccuguucuggcagagu

SEQ ID NO: 1689116 - RNA, 16 nt, Human
cagccccauucugccu

SEQ ID NO: 1689117 - RNA, 17 nt, Human
cagccccauucugccug

SEQ ID NO: 1689118 - RNA, 18 nt, Human
cagccccauucugccugc

SEQ ID NO: 1689119 - RNA, 23 nt, Human
cagccccuggaugcagccucaca

SEQ ID NO: 1689120 - RNA, 22 nt, Human
cagccccaucccaaacccuuca

SEQ ID NO: 1689121 - RNA, 12 nt, Human
cagccccauccu

SEQ ID NO: 1689122 - RNA, 13 nt, Human
cagccccauccuc

SEQ ID NO: 1689123 - RNA, 14 nt, Human
cagccccauccucu

SEQ ID NO: 1689124 - RNA, 16 nt, Human
cagccccauccucugu

SEQ ID NO: 1689125 - RNA, 22 nt, Human
cagccccauccucuguacagag

SEQ ID NO: 1689126 - RNA, 13 nt, Human
cagccccauucug

SEQ ID NO: 1689127 - RNA, 14 nt, Human
cagccccauucugc

SEQ ID NO: 1689128 - RNA, 16 nt, Human
cagcccucccugcccc

SEQ ID NO: 1689129 - RNA, 17 nt, Human
cagcccucccugccccu

SEQ ID NO: 1689130 - RNA, 18 nt, Human
cagcccucccugccccuc

SEQ ID NO: 1689131 - RNA, 22 nt, Human
cagcccucccugccccucccuu

SEQ ID NO: 1689132 - RNA, 18 nt, Human
cagcccugcagagggcac

SEQ ID NO: 1689133 - RNA, 20 nt, Human
cagcccugcagagggcacag

SEQ ID NO: 1689134 - RNA, 13 nt, Human
cagcccugcagag

SEQ ID NO: 1689135 - RNA, 14 nt, Human
cagcccugcagagg

SEQ ID NO: 1689136 - RNA, 15 nt, Human
cagcccugcagaggg

SEQ ID NO: 1689137 - RNA, 16 nt, Human
cagcccugcagagggc

SEQ ID NO: 1689138 - RNA, 11 nt, Human
cagcccugcuu

SEQ ID NO: 1689139 - RNA, 13 nt, Human
cagcccugcuuug

SEQ ID NO: 1689140 - RNA, 19 nt, Human
cagcccugcuuugggcugc

SEQ ID NO: 1689141 - RNA, 20 nt, Human
cagcccugcuuugggcugcc

SEQ ID NO: 1689142 - RNA, 21 nt, Human
cagcccugcuuugggcugccc

SEQ ID NO: 1689143 - RNA, 22 nt, Human
cagcccugcuuugggcugcccu

SEQ ID NO: 1689144 - RNA, 23 nt, Human
cagcccugcuuugggcugcccug

SEQ ID NO: 1689145 - RNA, 9 nt, Human
cagccgugc

SEQ ID NO: 1689146 - RNA, 14 nt, Human
cagccgugccuuca

SEQ ID NO: 1689147 - RNA, 16 nt, Human
cagccgugccuucagc

SEQ ID NO: 1689148 - RNA, 18 nt, Human
cagccgugccuucagcuc

SEQ ID NO: 1689149 - RNA, 20 nt, Human
cagccgugccuucagcucua

SEQ ID NO: 1689150 - RNA, 21 nt, Human
cagccguguaaccauggaccc

SEQ ID NO: 1689151 - RNA, 15 nt, Human
cagccuccaugcugc

SEQ ID NO: 1689152 - RNA, 17 nt, Human
cagccuccaugcugccu

SEQ ID NO: 1689153 - RNA, 20 nt, Human
cagccuccaugcugccucca

SEQ ID NO: 1689154 - RNA, 14 nt, Human
cagccuccaugcug

SEQ ID NO: 1689155 - RNA, 19 nt, Human
cagccucccaaagugcugg

SEQ ID NO: 1689156 - RNA, 20 nt, Human
cagccucccaaagugcuggg

SEQ ID NO: 1689157 - RNA, 21 nt, Human
cagccucccaaagugcuggga

SEQ ID NO: 1689158 - RNA, 23 nt, Human
cagccucccaaagugcugggauu

SEQ ID NO: 1689159 - RNA, 20 nt, Human
cagccucccgaauagcuggg

SEQ ID NO: 1689160 - RNA, 21 nt, Human
cagccucccgaauagcuggga

SEQ ID NO: 1689161 - RNA, 22 nt, Human
cagccucccgaauagcugggac

SEQ ID NO: 1689162 - RNA, 14 nt, Human
cagccuccaagcuc

SEQ ID NO: 1689163 - RNA, 20 nt, Human
cagccuccaagcuccaucuc

SEQ ID NO: 1689164 - RNA, 14 nt, Human
cagccucacagucc

SEQ ID NO: 1689165 - RNA, 15 nt, Human
cagccucacaguccu

SEQ ID NO: 1689166 - RNA, 20 nt, Human
cagccucacaguccuuacca

SEQ ID NO: 1689167 - RNA, 19 nt, Human
cagccucaaccuccugggc

SEQ ID NO: 1689168 - RNA, 20 nt, Human
cagccucaaccuccugggcu

SEQ ID NO: 1689169 - RNA, 21 nt, Human
cagccucaaccuccugggcua

SEQ ID NO: 1689170 - RNA, 17 nt, Human
cagccucaaccuccugg

SEQ ID NO: 1689171 - RNA, 18 nt, Human
cagccucaaccuccuggg

SEQ ID NO: 1689172 - RNA, 16 nt, Human
cagccuaguugaucag

SEQ ID NO: 1689173 - RNA, 22 nt, Human
caggaagcucagggccuggcuc

SEQ ID NO: 1689174 - RNA, 10 nt, Human
cagcucuggu

SEQ ID NO: 1689175 - RNA, 13 nt, Human
cagcucuggucca

SEQ ID NO: 1689176 - RNA, 16 nt, Human
cagcucugguccauag

SEQ ID NO: 1689177 - RNA, 17 nt, Human
cagcucugguccauaga

SEQ ID NO: 1689178 - RNA, 18 nt, Human
cagcucugguccauagag

SEQ ID NO: 1689179 - RNA, 21 nt, Human
cagcucugguccauagagagc

SEQ ID NO: 1689180 - RNA, 22 nt, Human
cagcucugguccauagagagca

SEQ ID NO: 1689181 - RNA, 23 nt, Human
cagcucugguccauagagagcaa

SEQ ID NO: 1689182 - RNA, 12 nt, Human
cagcucuguccu

SEQ ID NO: 1689183 - RNA, 13 nt, Human
cagcucuguccug

SEQ ID NO: 1689184 - RNA, 14 nt, Human
cagcucuguccugg

SEQ ID NO: 1689185 - RNA, 16 nt, Human
cagcucuguccuggga

SEQ ID NO: 1689186 - RNA, 17 nt, Human
cagcucuguccugggag

SEQ ID NO: 1689187 - RNA, 18 nt, Human
cagcucuguccugggagu

SEQ ID NO: 1689188 - RNA, 23 nt, Human
cagcucuguccugggagugagcu

SEQ ID NO: 1689189 - RNA, 10 nt, Human
cagcucuuau

SEQ ID NO: 1689190 - RNA, 21 nt, Human
cagcucuuauauugccauuuc

SEQ ID NO: 1689191 - RNA, 13 nt, Human
cagcucuucucca

SEQ ID NO: 1689192 - RNA, 14 nt, Human
cagcucuucuccag

SEQ ID NO: 1689193 - RNA, 15 nt, Human
cagcucuucuccagg

SEQ ID NO: 1689194 - RNA, 16 nt, Human
cagcucuucuccaggc

SEQ ID NO: 1689195 - RNA, 17 nt, Human
cagcucuucuccaggcu

SEQ ID NO: 1689196 - RNA, 18 nt, Human
cagcucuucuccaggcug

SEQ ID NO: 1689197 - RNA, 19 nt, Human
cagcucuucuccaggcugu

SEQ ID NO: 1689198 - RNA, 23 nt, Human
cagcucuucuccaggcuguaucc

SEQ ID NO: 1689199 - RNA, 13 nt, Human
cagcucagagagg

SEQ ID NO: 1689200 - RNA, 17 nt, Human
cagcucagagagggugg

SEQ ID NO: 1689201 - RNA, 19 nt, Human
cagcucagagaggguggga

SEQ ID NO: 1689202 - RNA, 20 nt, Human
cagcucagagagggugggag

SEQ ID NO: 1689203 - RNA, 16 nt, Human
cagcuccuucuguccu

SEQ ID NO: 1689204 - RNA, 17 nt, Human
cagcuccuucuguccua

SEQ ID NO: 1689205 - RNA, 21 nt, Human
cagcuccuucuguccuacucu

SEQ ID NO: 1689206 - RNA, 23 nt, Human
cagcuccuucuguccuacucugu

SEQ ID NO: 1689207 - RNA, 15 nt, Human
cagcucugcaagaau

SEQ ID NO: 1689208 - RNA, 16 nt, Human
cagcucugcaagaauu

SEQ ID NO: 1689209 - RNA, 21 nt, Human
cagcucugcaagaauugaagc

SEQ ID NO: 1689210 - RNA, 20 nt, Human
cagcucugcauacucauuag

SEQ ID NO: 1689211 - RNA, 23 nt, Human
cagcugggaucacauguggacuu

SEQ ID NO: 1689212 - RNA, 18 nt, Human
cagcuggggccaggcugg

SEQ ID NO: 1689213 - RNA, 19 nt, Human
cagcuggggccaggcuggg

SEQ ID NO: 1689214 - RNA, 20 nt, Human
cagcuggggccaggcugggu

SEQ ID NO: 1689215 - RNA, 19 nt, Human
cagcuggccgggagccuga

SEQ ID NO: 1689216 - RNA, 23 nt, Human
cagcugcuuuugucuaugggacu

SEQ ID NO: 1689217 - RNA, 22 nt, Human
cagcugcuuuugucuaugggac

SEQ ID NO: 1689218 - RNA, 21 nt, Human
cagcuggggccaggcuggguc

SEQ ID NO: 1689219 - RNA, 22 nt, Human
cagcuggggccaggcugggucg

SEQ ID NO: 1689220 - RNA, 21 nt, Human
cagcugggguggggaccucag

SEQ ID NO: 1689221 - RNA, 22 nt, Human
cagcugggguggggaccucagg

SEQ ID NO: 1689222 - RNA, 23 nt, Human
cagcugggguggggaccucaggc

SEQ ID NO: 1689223 - RNA, 19 nt, Human
cagcuggugcccugcuuuc

SEQ ID NO: 1689224 - RNA, 20 nt, Human
cagcuggugcccugcuuuca

SEQ ID NO: 1689225 - RNA, 21 nt, Human
cagcuggugcccugcuuucag

SEQ ID NO: 1689226 - RNA, 23 nt, Human
cagcuggugcccugcuuucagau

SEQ ID NO: 1689227 - RNA, 18 nt, Human
cagcuggugcccugcuuu

SEQ ID NO: 1689228 - RNA, 17 nt, Human
cagcuggguuggaaaac

SEQ ID NO: 1689229 - RNA, 16 nt, Human
cagcuggguuggaaaa

SEQ ID NO: 1689230 - RNA, 18 nt, Human
cagcugguugagguuuca

SEQ ID NO: 1689231 - RNA, 18 nt, Human
cagcuguaugauucccag

SEQ ID NO: 1689232 - RNA, 18 nt, Human
cagcugccugggaucccu

SEQ ID NO: 1689233 - RNA, 23 nt, Human
cagcugccugggaucccucaucc

SEQ ID NO: 1689234 - RNA, 18 nt, Human
cagcugcgguccacccag

SEQ ID NO: 1689235 - RNA, 19 nt, Human
cagcugcgguccacccagg

SEQ ID NO: 1689236 - RNA, 20 nt, Human
cagcugcgguccacccagga

SEQ ID NO: 1689237 - RNA, 21 nt, Human
cagcugcgguccacccaggag

SEQ ID NO: 1689238 - RNA, 22 nt, Human
cagcugcgguccacccaggagc

SEQ ID NO: 1689239 - RNA, 23 nt, Human
cagcugcgguccacccaggagcc

SEQ ID NO: 1689240 - RNA, 24 nt, Human
cagcugcgguccacccaggagccc

SEQ ID NO: 1689241 - RNA, 13 nt, Human
cagcugcuugggc

SEQ ID NO: 1689242 - RNA, 14 nt, Human
cagcugcuugggcu

SEQ ID NO: 1689243 - RNA, 15 nt, Human
cagcugcuugggcuu

SEQ ID NO: 1689244 - RNA, 16 nt, Human
cagcugcuugggcuuc

SEQ ID NO: 1689245 - RNA, 18 nt, Human
cagcugcuugggcuucau

SEQ ID NO: 1689246 - RNA, 19 nt, Human
cagcugcuugggcuucauc

SEQ ID NO: 1689247 - RNA, 21 nt, Human
cagcugcuugggcuucauccu

SEQ ID NO: 1689248 - RNA, 22 nt, Human
cagcugcuugggcuucauccuc

SEQ ID NO: 1689249 - RNA, 21 nt, Human
cagcugcucaauaaaguacaa

SEQ ID NO: 1689250 - RNA, 17 nt, Human
cagcugcuacuacuccu

SEQ ID NO: 1689251 - RNA, 20 nt, Human
cagcugcugaaacaacaaau

SEQ ID NO: 1689252 - RNA, 21 nt, Human
cagcugcugaaacaacaaaua

SEQ ID NO: 1689253 - RNA, 18 nt, Human
cagcuugaggguugggcu

SEQ ID NO: 1689254 - RNA, 19 nt, Human
cagcuugaggguugggcug

SEQ ID NO: 1689255 - RNA, 20 nt, Human
cagcuugaggguugggcugg

SEQ ID NO: 1689256 - RNA, 21 nt, Human
cagcuugaggguugggcuggu

SEQ ID NO: 1689257 - RNA, 14 nt, Human
cagcuugaggguug

SEQ ID NO: 1689258 - RNA, 15 nt, Human
cagcuugaggguugg

SEQ ID NO: 1689259 - RNA, 18 nt, Human
cagcuugaccgugaggcc

SEQ ID NO: 1689260 - RNA, 19 nt, Human
cagcuugaccgugaggcca

SEQ ID NO: 1689261 - RNA, 20 nt, Human
cagcuugaccgugaggccag

SEQ ID NO: 1689262 - RNA, 21 nt, Human
cagcuugaccgugaggccaga

SEQ ID NO: 1689263 - RNA, 20 nt, Human
cagcuucauuuccugugucu

SEQ ID NO: 1689264 - RNA, 21 nt, Human
cagcuucauuuccugugucuu

SEQ ID NO: 1689265 - RNA, 19 nt, Human
cagcuguaugauucccagc

SEQ ID NO: 1689266 - RNA, 18 nt, Human
cagcuugaaacugagaug

SEQ ID NO: 1689267 - RNA, 14 nt, Human
cagcuuugauauuu

SEQ ID NO: 1689268 - RNA, 12 nt, Human
cagcuuuguuug

SEQ ID NO: 1689269 - RNA, 21 nt, Human
cagcuuuguuuguugucagcu

SEQ ID NO: 1689270 - RNA, 22 nt, Human
cagcuuuguuuguugucagcug

SEQ ID NO: 1689271 - RNA, 23 nt, Human
cagcuuuguuuguugucagcuga

SEQ ID NO: 1689272 - RNA, 18 nt, Human
caggaaccacaagacugc

SEQ ID NO: 1689273 - RNA, 21 nt, Human
cagcuuguaaauagcucaggu

SEQ ID NO: 1689274 - RNA, 22 nt, Human
cagcuuguaaauagcucaggug

SEQ ID NO: 1689275 - RNA, 18 nt, Human
cagcuuguaaauagcuca

SEQ ID NO: 1689276 - RNA, 19 nt, Human
cagcuuguaaauagcucag

SEQ ID NO: 1689277 - RNA, 20 nt, Human
cagcuuguaaauagcucagg

SEQ ID NO: 1689278 - RNA, 22 nt, Human
cagcuuuaaaaaauuaaucugg

SEQ ID NO: 1689279 - RNA, 23 nt, Human
cagcuuuccccaugucucgacuc

SEQ ID NO: 1689280 - RNA, 23 nt, Human
cagcuuuccucaaaacuucagac

SEQ ID NO: 1689281 - RNA, 14 nt, Human
caggaagcagcuuu

SEQ ID NO: 1689282 - RNA, 22 nt, Human
caggaagccagcaggcucucag

SEQ ID NO: 1689283 - RNA, 19 nt, Human
caggaagccagcaggcucu

SEQ ID NO: 1689284 - RNA, 21 nt, Human
caggaagccagcaggcucuca

SEQ ID NO: 1689285 - RNA, 14 nt, Human
caggaagccagcag

SEQ ID NO: 1689286 - RNA, 16 nt, Human
caggaagccagcaggc

SEQ ID NO: 1689287 - RNA, 17 nt, Human
caggaagccagcaggcu

SEQ ID NO: 1689288 - RNA, 18 nt, Human
caggaagccagcaggcuc

SEQ ID NO: 1689289 - RNA, 23 nt, Human
caggaagcucagggccuggcuca

SEQ ID NO: 1689290 - RNA, 20 nt, Human
caggaagcucagggccuggc

SEQ ID NO: 1689291 - RNA, 21 nt, Human
caggaagcucagggccuggcu

SEQ ID NO: 1689292 - RNA, 13 nt, Human
caggaagcucagg

SEQ ID NO: 1689293 - RNA, 14 nt, Human
caggaagcucaggg

SEQ ID NO: 1689294 - RNA, 15 nt, Human
caggaagcucagggc

SEQ ID NO: 1689295 - RNA, 16 nt, Human
caggaagcucagggcc

SEQ ID NO: 1689296 - RNA, 17 nt, Human
caggaagcucagggccu

SEQ ID NO: 1689297 - RNA, 18 nt, Human
caggaagcucagggccug

SEQ ID NO: 1689298 - RNA, 19 nt, Human
caggaagcucagggccugg

SEQ ID NO: 1689299 - RNA, 17 nt, Human
caggaauggagccugca

SEQ ID NO: 1689300 - RNA, 23 nt, Human
caggaauggagccugcacgguga

SEQ ID NO: 1689301 - RNA, 12 nt, Human
caggaaguacug

SEQ ID NO: 1689302 - RNA, 14 nt, Human
caggaaguacugga

SEQ ID NO: 1689303 - RNA, 16 nt, Human
caggaaguacuggaga

SEQ ID NO: 1689304 - RNA, 19 nt, Human
caggaaggcugagaggaga

SEQ ID NO: 1689305 - RNA, 15 nt, Human
caggaaggcuaaagg

SEQ ID NO: 1689306 - RNA, 16 nt, Human
caggaaguagaggagg

SEQ ID NO: 1689307 - RNA, 17 nt, Human
caggaaguacuggagaa

SEQ ID NO: 1689308 - RNA, 18 nt, Human
caggaaguacuggagaaa

SEQ ID NO: 1689309 - RNA, 20 nt, Human
caggaaguacuggagaaaau

SEQ ID NO: 1689310 - RNA, 15 nt, Human
caggaaguagaggag

SEQ ID NO: 1689311 - RNA, 18 nt, Human
cagccuccaugcugccuc

SEQ ID NO: 1689312 - RNA, 14 nt, Human
cagcucaccagccc

SEQ ID NO: 1689313 - RNA, 19 nt, Human
cagcccacauagugauggu

SEQ ID NO: 1689314 - RNA, 15 nt, Human
cagcccaccccucaa

SEQ ID NO: 1689315 - RNA, 15 nt, Human
cagcccacuucugcc

SEQ ID NO: 1689316 - RNA, 22 nt, Human
cagccccaaaacucuccucugc

SEQ ID NO: 1689317 - RNA, 20 nt, Human
cagccccaaaacucuccucu

SEQ ID NO: 1689318 - RNA, 21 nt, Human
cagccccaaaacucuccucug

SEQ ID NO: 1689319 - RNA, 18 nt, Human
cagcccacuucugccaua

SEQ ID NO: 1689320 - RNA, 23 nt, Human
cagccacggccaggccagaggga

SEQ ID NO: 1689321 - RNA, 22 nt, Human
cagccaguaaaugggggugcau

SEQ ID NO: 1689322 - RNA, 14 nt, Human
cagccacggccagg

SEQ ID NO: 1689323 - RNA, 15 nt, Human
cagccacggccaggc

SEQ ID NO: 1689324 - RNA, 16 nt, Human
cagccacggccaggcc

SEQ ID NO: 1689325 - RNA, 17 nt, Human
cagccacggccaggcca

SEQ ID NO: 1689326 - RNA, 18 nt, Human
cagccacggccaggccag

SEQ ID NO: 1689327 - RNA, 19 nt, Human
cagccacggccaggccaga

SEQ ID NO: 1689328 - RNA, 21 nt, Human
cagccacggccaggccagagg

SEQ ID NO: 1689329 - RNA, 22 nt, Human
cagccacggccaggccagaggg

SEQ ID NO: 1689330 - RNA, 14 nt, Human
cagccacauuccug

SEQ ID NO: 1689331 - RNA, 19 nt, Human
cagccacauuccugaugcu

SEQ ID NO: 1689332 - RNA, 15 nt, Human
cagccacauuccuga

SEQ ID NO: 1689333 - RNA, 17 nt, Human
cagccacauuccugaug

SEQ ID NO: 1689334 - RNA, 20 nt, Human
cagcagggagggcuucugcc

SEQ ID NO: 1689335 - RNA, 14 nt, Human
cagcauccuggcac

SEQ ID NO: 1689336 - RNA, 15 nt, Human
cagcauccuggcacc

SEQ ID NO: 1689337 - RNA, 16 nt, Human
cagcauccuggcaccc

SEQ ID NO: 1689338 - RNA, 17 nt, Human
cagcauccuggcacccg

SEQ ID NO: 1689339 - RNA, 16 nt, Human
cagcaggcucucaggc

SEQ ID NO: 1689340 - RNA, 17 nt, Human
cagcaggcucucaggcc

SEQ ID NO: 1689341 - RNA, 18 nt, Human
cagcaggcucucaggcca

SEQ ID NO: 1689342 - RNA, 19 nt, Human
cagcaggcucucaggccag

SEQ ID NO: 1689343 - RNA, 20 nt, Human
cagcaggcucucaggccagc

SEQ ID NO: 1689344 - RNA, 22 nt, Human
cagcaggcucucaggccagcug

SEQ ID NO: 1689345 - RNA, 18 nt, Human
cagcagggagggcuucug

SEQ ID NO: 1689346 - RNA, 19 nt, Human
cagcagccuggacccugug

SEQ ID NO: 1689347 - RNA, 22 nt, Human
cagcagccuggacccuguggau

SEQ ID NO: 1689348 - RNA, 12 nt, Human
cagcagccugga

SEQ ID NO: 1689349 - RNA, 14 nt, Human
cagcagccuggacc

SEQ ID NO: 1689350 - RNA, 15 nt, Human
cagcagccuggaccc

SEQ ID NO: 1689351 - RNA, 18 nt, Human
cagcagccuggacccugu

SEQ ID NO: 1689352 - RNA, 12 nt, Human
cagcaggcucuc

SEQ ID NO: 1689353 - RNA, 14 nt, Human
cagcaggcucucag

SEQ ID NO: 1689354 - RNA, 15 nt, Human
cagcaggcucucagg

SEQ ID NO: 1689355 - RNA, 18 nt, Human
cagccaacuauggccugu

SEQ ID NO: 1689356 - RNA, 18 nt, Human
cagccaaagccuccucca

SEQ ID NO: 1689357 - RNA, 21 nt, Human
cagccaaagccuccuccagcc

SEQ ID NO: 1689358 - RNA, 15 nt, Human
cagccaaagccuccu

SEQ ID NO: 1689359 - RNA, 16 nt, Human
cagccaaagccuccuc

SEQ ID NO: 1689360 - RNA, 21 nt, Human
cagcauccuggcacccggccc

SEQ ID NO: 1689361 - RNA, 19 nt, Human
cagcauccuggcacccggc

SEQ ID NO: 1689362 - RNA, 20 nt, Human
cagcauccuggcacccggcc

SEQ ID NO: 1689363 - RNA, 15 nt, Human
cagcauucucacucc

SEQ ID NO: 1689364 - RNA, 14 nt, Human
cagcauucucacuc

SEQ ID NO: 1689365 - RNA, 13 nt, Human
cagcagccccugc

SEQ ID NO: 1689366 - RNA, 16 nt, Human
cagcagccccugcaca

SEQ ID NO: 1689367 - RNA, 23 nt, Human
cagcagccccugcacaaagcccu

SEQ ID NO: 1689368 - RNA, 14 nt, Human
cagcagauuauuca

SEQ ID NO: 1689369 - RNA, 15 nt, Human
cagcagauuauucac

SEQ ID NO: 1689370 - RNA, 19 nt, Human
cagcagauuauucacugau

SEQ ID NO: 1689371 - RNA, 17 nt, Human
cagcagaaaugccuuac

SEQ ID NO: 1689372 - RNA, 15 nt, Human
cagcagaaaugccuu

SEQ ID NO: 1689373 - RNA, 11 nt, Human
cagcagagcac

SEQ ID NO: 1689374 - RNA, 13 nt, Human
cagcagagcaccu

SEQ ID NO: 1689375 - RNA, 22 nt, Human
cagcagaaaugccuuacccuca

SEQ ID NO: 1689376 - RNA, 19 nt, Human
cagcagaaaugccuuaccc

SEQ ID NO: 1689377 - RNA, 15 nt, Human
cagcaauucuccugc

SEQ ID NO: 1689378 - RNA, 16 nt, Human
cagcaauucuccugcc

SEQ ID NO: 1689379 - RNA, 17 nt, Human
cagcaauucuccugccu

SEQ ID NO: 1689380 - RNA, 18 nt, Human
cagcaauucuccugccuc

SEQ ID NO: 1689381 - RNA, 19 nt, Human
cagcaauucuccugccuca

SEQ ID NO: 1689382 - RNA, 20 nt, Human
cagcaauucuccugccucag

SEQ ID NO: 1689383 - RNA, 22 nt, Human
cagcaauaaagcagcguuucua

SEQ ID NO: 1689384 - RNA, 21 nt, Human
cagcaauaaagcagcguuucu

SEQ ID NO: 1689385 - RNA, 13 nt, Human
cagcaauaaagca

SEQ ID NO: 1689386 - RNA, 19 nt, Human
cagcaagugagagcugggu

SEQ ID NO: 1689387 - RNA, 21 nt, Human
cagcaagugagagcugggugu

SEQ ID NO: 1689388 - RNA, 14 nt, Human
cagcaagugagagc

SEQ ID NO: 1689389 - RNA, 15 nt, Human
cagcaagugagagcu

SEQ ID NO: 1689390 - RNA, 16 nt, Human
cagcaagugagagcug

SEQ ID NO: 1689391 - RNA, 17 nt, Human
cagcaagugagagcugg

SEQ ID NO: 1689392 - RNA, 12 nt, Human
cagcaagugaga

SEQ ID NO: 1689393 - RNA, 22 nt, Human
cagcaagggugaugggaaagca

SEQ ID NO: 1689394 - RNA, 23 nt, Human
cagcaagggugaugggaaagcau

SEQ ID NO: 1689395 - RNA, 18 nt, Human
cagcaaggagauuuacaa

SEQ ID NO: 1689396 - RNA, 17 nt, Human
cagcaaggagauuuaca

SEQ ID NO: 1689397 - RNA, 19 nt, Human
cagcaagggugaugggaaa

SEQ ID NO: 1689398 - RNA, 18 nt, Human
cagcaaaagaugcuucuc

SEQ ID NO: 1689399 - RNA, 23 nt, Human
cagcaacgcaggcccccaggugc

SEQ ID NO: 1689400 - RNA, 13 nt, Human
cagauuuuauuau

SEQ ID NO: 1689401 - RNA, 15 nt, Human
cagauuuuauuaugu

SEQ ID NO: 1689402 - RNA, 16 nt, Human
cagauuuuauuaugua

SEQ ID NO: 1689403 - RNA, 18 nt, Human
cagauuuuauuauguaaa

SEQ ID NO: 1689404 - RNA, 20 nt, Human
cagauuuuauuauguaaauc

SEQ ID NO: 1689405 - RNA, 21 nt, Human
cagauuuuauuauguaaaucc

SEQ ID NO: 1689406 - RNA, 22 nt, Human
cagauuuuauuauguaaauccc

SEQ ID NO: 1689407 - RNA, 14 nt, Human
cagauucuuuccug

SEQ ID NO: 1689408 - RNA, 17 nt, Human
cagcaaaaauauuuuau

SEQ ID NO: 1689409 - RNA, 22 nt, Human
cagauuuuuuacagcugccugc

SEQ ID NO: 1689410 - RNA, 19 nt, Human
cagauuuuuuacagcugcc

SEQ ID NO: 1689411 - RNA, 14 nt, Human
cagauuuuccugaa

SEQ ID NO: 1689412 - RNA, 15 nt, Human
cagauuuuccugaaa

SEQ ID NO: 1689413 - RNA, 12 nt, Human
cagauuauucac

SEQ ID NO: 1689414 - RNA, 18 nt, Human
cagauuauucacugauuu

SEQ ID NO: 1689415 - RNA, 23 nt, Human
cagauuauucacugauuugacau

SEQ ID NO: 1689416 - RNA, 23 nt, Human
cagaugggugcuuggaggaagga

SEQ ID NO: 1689417 - RNA, 15 nt, Human
cagaugcugugcaaa

SEQ ID NO: 1689418 - RNA, 18 nt, Human
cagaugggugcuuggagg

SEQ ID NO: 1689419 - RNA, 16 nt, Human
cagacaacaaaccugu

SEQ ID NO: 1689420 - RNA, 13 nt, Human
cagaccccuggcu

SEQ ID NO: 1689421 - RNA, 14 nt, Human
cagaccccuggcuu

SEQ ID NO: 1689422 - RNA, 15 nt, Human
cagaccccuggcuuu

SEQ ID NO: 1689423 - RNA, 16 nt, Human
cagaccccuggcuuuu

SEQ ID NO: 1689424 - RNA, 18 nt, Human
cagaccccuggcuuuuca

SEQ ID NO: 1689425 - RNA, 14 nt, Human
cagaccacaaaacu

SEQ ID NO: 1689426 - RNA, 20 nt, Human
cagaccacaaaacuuuucua

SEQ ID NO: 1689427 - RNA, 13 nt, Human
cagacccugcccu

SEQ ID NO: 1689428 - RNA, 14 nt, Human
cagacccugcccug

SEQ ID NO: 1689429 - RNA, 16 nt, Human
cagacccggcugcgug

SEQ ID NO: 1689430 - RNA, 12 nt, Human
cagacccugccc

SEQ ID NO: 1689431 - RNA, 21 nt, Human
cagaccccuggcuuuucacug

SEQ ID NO: 1689432 - RNA, 22 nt, Human
cagaccccuggcuuuucacugc

SEQ ID NO: 1689433 - RNA, 23 nt, Human
cagaccccuggcuuuucacugcu

SEQ ID NO: 1689434 - RNA, 12 nt, Human
cagacccggcug

SEQ ID NO: 1689435 - RNA, 14 nt, Human
cagacccggcugcg

SEQ ID NO: 1689436 - RNA, 22 nt, Human
cagacccugcccugugggcccc

SEQ ID NO: 1689437 - RNA, 15 nt, Human
cagacccugcccugu

SEQ ID NO: 1689438 - RNA, 16 nt, Human
cagacccugcccugug

SEQ ID NO: 1689439 - RNA, 17 nt, Human
cagacccugcccugugg

SEQ ID NO: 1689440 - RNA, 21 nt, Human
cagacccugcccugugggccc

SEQ ID NO: 1689441 - RNA, 20 nt, Human
cagacuuuuuuuaaauagua

SEQ ID NO: 1689442 - RNA, 19 nt, Human
cagagaaaguacuucucca

SEQ ID NO: 1689443 - RNA, 23 nt, Human
cagagaaaguacuucuccacccu

SEQ ID NO: 1689444 - RNA, 15 nt, Human
cagaaucucgcucug

SEQ ID NO: 1689445 - RNA, 14 nt, Human
cagaauuucccaaa

SEQ ID NO: 1689446 - RNA, 11 nt, Human
cagaauucuca

SEQ ID NO: 1689447 - RNA, 18 nt, Human
cagaauucucuaguuuga

SEQ ID NO: 1689448 - RNA, 15 nt, Human
cagaauucucuaguu

SEQ ID NO: 1689449 - RNA, 24 nt, Human
cagaauuucccaaagcagugcaug

SEQ ID NO: 1689450 - RNA, 12 nt, Human
cagacaaagcgu

SEQ ID NO: 1689451 - RNA, 17 nt, Human
cagaauuucccaaagca

SEQ ID NO: 1689452 - RNA, 18 nt, Human
cagaauuucccaaagcag

SEQ ID NO: 1689453 - RNA, 19 nt, Human
cagaauuucccaaagcagu

SEQ ID NO: 1689454 - RNA, 20 nt, Human
cagaauuucccaaagcagug

SEQ ID NO: 1689455 - RNA, 20 nt, Human
cagacaacaaaccuguuucu

SEQ ID NO: 1689456 - RNA, 22 nt, Human
cagacaaagcgugguggacaug

SEQ ID NO: 1689457 - RNA, 14 nt, Human
cagacacaugucca

SEQ ID NO: 1689458 - RNA, 17 nt, Human
cagacacauguccaaga

SEQ ID NO: 1689459 - RNA, 21 nt, Human
cagacacauguccaagaagcc

SEQ ID NO: 1689460 - RNA, 22 nt, Human
cagacacauguccaagaagccc

SEQ ID NO: 1689461 - RNA, 23 nt, Human
cagacacauguccaagaagccca

SEQ ID NO: 1689462 - RNA, 13 nt, Human
cagacacaggccc

SEQ ID NO: 1689463 - RNA, 14 nt, Human
cagacacaggcccg

SEQ ID NO: 1689464 - RNA, 15 nt, Human
cagacacaggcccgg

SEQ ID NO: 1689465 - RNA, 17 nt, Human
cagacacaggcccggcu

SEQ ID NO: 1689466 - RNA, 18 nt, Human
cagacacaggcccggcuc

SEQ ID NO: 1689467 - RNA, 21 nt, Human
cagacacaggcccggcuccag

SEQ ID NO: 1689468 - RNA, 22 nt, Human
cagacacaggcccggcuccagg

SEQ ID NO: 1689469 - RNA, 23 nt, Human
cagacacaggcccggcuccaggc

SEQ ID NO: 1689470 - RNA, 20 nt, Human
cagacaguuaagagaaauga

SEQ ID NO: 1689471 - RNA, 19 nt, Human
cagacaccuugacagggca

SEQ ID NO: 1689472 - RNA, 20 nt, Human
cagacaccuugacagggcac

SEQ ID NO: 1689473 - RNA, 22 nt, Human
cagacaccuugacagggcacac

SEQ ID NO: 1689474 - RNA, 19 nt, Human
cagacauacuaaccagcag

SEQ ID NO: 1689475 - RNA, 17 nt, Human
cagacauagaauuaaca

SEQ ID NO: 1689476 - RNA, 19 nt, Human
cagacauagaauuaacaca

SEQ ID NO: 1689477 - RNA, 22 nt, Human
cagaacccuuggagccaaugga

SEQ ID NO: 1689478 - RNA, 21 nt, Human
cagaagacacugaugggcaac

SEQ ID NO: 1689479 - RNA, 19 nt, Human
cagaagcaacccaaauguu

SEQ ID NO: 1689480 - RNA, 20 nt, Human
cagaagcaacccaaauguuc

SEQ ID NO: 1689481 - RNA, 17 nt, Human
cagaaucucaaauaacu

SEQ ID NO: 1689482 - RNA, 18 nt, Human
cagaaucucaaauaacua

SEQ ID NO: 1689483 - RNA, 23 nt, Human
cagaaucuaacugguggacaugg

SEQ ID NO: 1689484 - RNA, 16 nt, Human
cagaaggaagacuuca

SEQ ID NO: 1689485 - RNA, 17 nt, Human
cagaaggaagacuucau

SEQ ID NO: 1689486 - RNA, 18 nt, Human
cagaaggaagacuucauc

SEQ ID NO: 1689487 - RNA, 19 nt, Human
cagaaggaagacuucaucc

SEQ ID NO: 1689488 - RNA, 18 nt, Human
cagaaggcaaaugacuuu

SEQ ID NO: 1689489 - RNA, 19 nt, Human
cagaaggcaaaugacuuug

SEQ ID NO: 1689490 - RNA, 20 nt, Human
cagaaggcaaaugacuuugg

SEQ ID NO: 1689491 - RNA, 12 nt, Human
cacuuugcauaa

SEQ ID NO: 1689492 - RNA, 22 nt, Human
cacuuucuagccagaggagaga

SEQ ID NO: 1689493 - RNA, 16 nt, Human
cacuuugggaggccaa

SEQ ID NO: 1689494 - RNA, 12 nt, Human
cacuuugggagg

SEQ ID NO: 1689495 - RNA, 13 nt, Human
cacuuugggaggc

SEQ ID NO: 1689496 - RNA, 13 nt, Human
cacuuuguucugg

SEQ ID NO: 1689497 - RNA, 14 nt, Human
cacuuuguucuggc

SEQ ID NO: 1689498 - RNA, 16 nt, Human
cacuuuguucuggcuc

SEQ ID NO: 1689499 - RNA, 23 nt, Human
cacuuuguucuggcucuuccagg

SEQ ID NO: 1689500 - RNA, 18 nt, Human
cacuuuuauuuagcacca

SEQ ID NO: 1689501 - RNA, 14 nt, Human
cacuuuuguucuug

SEQ ID NO: 1689502 - RNA, 22 nt, Human
cacuuuuguucuugguuuguaa

SEQ ID NO: 1689503 - RNA, 22 nt, Human
cacuuuugguuaagucuguuuu

SEQ ID NO: 1689504 - RNA, 14 nt, Human
cacuuuuuuccaca

SEQ ID NO: 1689505 - RNA, 12 nt, Human
cacuuuuuucca

SEQ ID NO: 1689506 - RNA, 24 nt, Human
cagaaagaaguggggacagagcag

SEQ ID NO: 1689507 - RNA, 18 nt, Human
cagaaagcagaacaguga

SEQ ID NO: 1689508 - RNA, 19 nt, Human
cagaaagcagaacagugau

SEQ ID NO: 1689509 - RNA, 23 nt, Human
cagaacagugauuaccagggacu

SEQ ID NO: 1689510 - RNA, 21 nt, Human
cagaaaagaaaguucaugcuu

SEQ ID NO: 1689511 - RNA, 17 nt, Human
cagaaaaguugaauuuu

SEQ ID NO: 1689512 - RNA, 20 nt, Human
cagaaaaguugaauuuuaca

SEQ ID NO: 1689513 - RNA, 22 nt, Human
cagaaaaguugaauuuuacaug

SEQ ID NO: 1689514 - RNA, 16 nt, Human
cagaaaauggaagaca

SEQ ID NO: 1689515 - RNA, 20 nt, Human
cagaaaauggaagacagcuc

SEQ ID NO: 1689516 - RNA, 21 nt, Human
cagaaaauggaagacagcucu

SEQ ID NO: 1689517 - RNA, 22 nt, Human
cagaaaauggaagacagcucuu

SEQ ID NO: 1689518 - RNA, 23 nt, Human
cagaaaauggaagacagcucuua

SEQ ID NO: 1689519 - RNA, 16 nt, Human
cagaggccaugggccu

SEQ ID NO: 1689520 - RNA, 22 nt, Human
cagagccaccccuaaagagaua

SEQ ID NO: 1689521 - RNA, 15 nt, Human
cagagcccaccuugg

SEQ ID NO: 1689522 - RNA, 17 nt, Human
cagagcccaccuuggcu

SEQ ID NO: 1689523 - RNA, 19 nt, Human
cagagcccaccuuggcuca

SEQ ID NO: 1689524 - RNA, 20 nt, Human
cagagcccaccuuggcucaa

SEQ ID NO: 1689525 - RNA, 16 nt, Human
cagagcccacgccccc

SEQ ID NO: 1689526 - RNA, 23 nt, Human
cagagcaccuuagacagucccug

SEQ ID NO: 1689527 - RNA, 11 nt, Human
cagagcagaga

SEQ ID NO: 1689528 - RNA, 12 nt, Human
cagagcagagac

SEQ ID NO: 1689529 - RNA, 18 nt, Human
cagagcaccuuagacagu

SEQ ID NO: 1689530 - RNA, 19 nt, Human
cagagcaccuuagacaguc

SEQ ID NO: 1689531 - RNA, 21 nt, Human
cagagcaccuuagacaguccc

SEQ ID NO: 1689532 - RNA, 22 nt, Human
cagagcaccuuagacagucccu

SEQ ID NO: 1689533 - RNA, 13 nt, Human
cagagcagagacc

SEQ ID NO: 1689534 - RNA, 14 nt, Human
cagagcagagacca

SEQ ID NO: 1689535 - RNA, 15 nt, Human
cagagcagagaccau

SEQ ID NO: 1689536 - RNA, 17 nt, Human
cagagcagagaccaucc

SEQ ID NO: 1689537 - RNA, 18 nt, Human
cagagcagagaccauccc

SEQ ID NO: 1689538 - RNA, 19 nt, Human
cagagcagagaccaucccu

SEQ ID NO: 1689539 - RNA, 21 nt, Human
cagagcagagaccaucccuga

SEQ ID NO: 1689540 - RNA, 12 nt, Human
cagagccugcag

SEQ ID NO: 1689541 - RNA, 13 nt, Human
cagaggaaggaga

SEQ ID NO: 1689542 - RNA, 13 nt, Human
cagagccugcagu

SEQ ID NO: 1689543 - RNA, 23 nt, Human
cagagcccacgcccccacuggug

SEQ ID NO: 1689544 - RNA, 17 nt, Human
cagagcccacgccccca

SEQ ID NO: 1689545 - RNA, 19 nt, Human
cagagcccacgcccccacu

SEQ ID NO: 1689546 - RNA, 20 nt, Human
cagagcccacgcccccacug

SEQ ID NO: 1689547 - RNA, 21 nt, Human
cagagcccacgcccccacugg

SEQ ID NO: 1689548 - RNA, 20 nt, Human
cagaggagagaggacccccu

SEQ ID NO: 1689549 - RNA, 11 nt, Human
cagaggcagcc

SEQ ID NO: 1689550 - RNA, 13 nt, Human
cagaggagagagg

SEQ ID NO: 1689551 - RNA, 15 nt, Human
cagaggagagaggac

SEQ ID NO: 1689552 - RNA, 19 nt, Human
cagaggagagaggaccccc

SEQ ID NO: 1689553 - RNA, 19 nt, Human
cagagaaugaaagggccca

SEQ ID NO: 1689554 - RNA, 20 nt, Human
cagagaaugaaagggcccag

SEQ ID NO: 1689555 - RNA, 21 nt, Human
cagagaaugaaagggcccaga

SEQ ID NO: 1689556 - RNA, 15 nt, Human
cagagaauucucuua

SEQ ID NO: 1689557 - RNA, 16 nt, Human
cagagacacaagccuu

SEQ ID NO: 1689558 - RNA, 17 nt, Human
cagagacacaagccuuc

SEQ ID NO: 1689559 - RNA, 14 nt, Human
cagagacacaagcc

SEQ ID NO: 1689560 - RNA, 15 nt, Human
cagagacacaagccu

SEQ ID NO: 1689561 - RNA, 13 nt, Human
cagagaccauccc

SEQ ID NO: 1689562 - RNA, 14 nt, Human
cagagaccaucccu

SEQ ID NO: 1689563 - RNA, 16 nt, Human
cagagaccaucccuga

SEQ ID NO: 1689564 - RNA, 13 nt, Human
cagagaguggcuc

SEQ ID NO: 1689565 - RNA, 14 nt, Human
cagagaguggcucc

SEQ ID NO: 1689566 - RNA, 15 nt, Human
cagagaguggcuccu

SEQ ID NO: 1689567 - RNA, 18 nt, Human
cagagaguggcuccuccc

SEQ ID NO: 1689568 - RNA, 18 nt, Human
cagagcacagcagccccu

SEQ ID NO: 1689569 - RNA, 16 nt, Human
cagagcaccuuagaca

SEQ ID NO: 1689570 - RNA, 14 nt, Human
cagagcaagugaga

SEQ ID NO: 1689571 - RNA, 20 nt, Human
cagagcaagugagacccugu

SEQ ID NO: 1689572 - RNA, 21 nt, Human
cagagaccaucccugaaggcc

SEQ ID NO: 1689573 - RNA, 17 nt, Human
cagagaccaucccugaa

SEQ ID NO: 1689574 - RNA, 18 nt, Human
cagagaccaucccugaag

SEQ ID NO: 1689575 - RNA, 19 nt, Human
cagagaccaucccugaagg

SEQ ID NO: 1689576 - RNA, 20 nt, Human
cagagaccaucccugaaggc

SEQ ID NO: 1689577 - RNA, 13 nt, Human
cagagacuccugc

SEQ ID NO: 1689578 - RNA, 14 nt, Human
cagagacuccugca

SEQ ID NO: 1689579 - RNA, 15 nt, Human
cagagacuccugcag

SEQ ID NO: 1689580 - RNA, 16 nt, Human
cagagacuccugcagg

SEQ ID NO: 1689581 - RNA, 17 nt, Human
cagagacuccugcaggc

SEQ ID NO: 1689582 - RNA, 18 nt, Human
cagagacuccugcaggca

SEQ ID NO: 1689583 - RNA, 19 nt, Human
cagagacuccugcaggcag

SEQ ID NO: 1689584 - RNA, 23 nt, Human
cagaggcgcaugaauuugugaag

SEQ ID NO: 1689585 - RNA, 13 nt, Human
cagaggcugccuc

SEQ ID NO: 1689586 - RNA, 23 nt, Human
cagaggcugccucucccaucacu

SEQ ID NO: 1689587 - RNA, 14 nt, Human
cagagggagugaca

SEQ ID NO: 1689588 - RNA, 16 nt, Human
cagagggagugacaga

SEQ ID NO: 1689589 - RNA, 18 nt, Human
cagagggagugacagagg

SEQ ID NO: 1689590 - RNA, 19 nt, Human
cagagggagugacagaggc

SEQ ID NO: 1689591 - RNA, 23 nt, Human
cagaggcagccccauucugccug

SEQ ID NO: 1689592 - RNA, 19 nt, Human
cagaggccaugggccuccu

SEQ ID NO: 1689593 - RNA, 20 nt, Human
cagaggccaugggccuccug

SEQ ID NO: 1689594 - RNA, 21 nt, Human
cagaggccaugggccuccugu

SEQ ID NO: 1689595 - RNA, 12 nt, Human
cagaggcagccc

SEQ ID NO: 1689596 - RNA, 13 nt, Human
cagaggcagcccc

SEQ ID NO: 1689597 - RNA, 14 nt, Human
cagaggcagcccca

SEQ ID NO: 1689598 - RNA, 15 nt, Human
cagaggcagccccau

SEQ ID NO: 1689599 - RNA, 18 nt, Human
cagaggcagccccauucu

SEQ ID NO: 1689600 - RNA, 19 nt, Human
cagaggcagccccauucug

SEQ ID NO: 1689601 - RNA, 20 nt, Human
cagaggcagccccauucugc

SEQ ID NO: 1689602 - RNA, 22 nt, Human
cagaggcagccccauucugccu

SEQ ID NO: 1689603 - RNA, 13 nt, Human
cagagucucacug

SEQ ID NO: 1689604 - RNA, 17 nt, Human
cagagucucacuguugc

SEQ ID NO: 1689605 - RNA, 19 nt, Human
cagagucucacuguugccc

SEQ ID NO: 1689606 - RNA, 20 nt, Human
cagagucucacuguugccca

SEQ ID NO: 1689607 - RNA, 21 nt, Human
cagagucucacuguugcccag

SEQ ID NO: 1689608 - RNA, 15 nt, Human
cagagggccugcaag

SEQ ID NO: 1689609 - RNA, 19 nt, Human
cagagggccugcaagggag

SEQ ID NO: 1689610 - RNA, 20 nt, Human
cagagggagugacagaggca

SEQ ID NO: 1689611 - RNA, 21 nt, Human
cagagggagugacagaggcag

SEQ ID NO: 1689612 - RNA, 22 nt, Human
cagagggagugacagaggcagc

SEQ ID NO: 1689613 - RNA, 23 nt, Human
cagagggagugacagaggcagcc

SEQ ID NO: 1689614 - RNA, 22 nt, Human
cagagucucacuguugcccagg

SEQ ID NO: 1689615 - RNA, 23 nt, Human
cagagucucacuguugcccaggc

SEQ ID NO: 1689616 - RNA, 16 nt, Human
cagagugagacucugu

SEQ ID NO: 1689617 - RNA, 17 nt, Human
cagagugagacucuguc

SEQ ID NO: 1689618 - RNA, 18 nt, Human
cagagugagacucugucu

SEQ ID NO: 1689619 - RNA, 19 nt, Human
cagagugagacucugucuc

SEQ ID NO: 1689620 - RNA, 20 nt, Human
cagagugagacucugucuca

SEQ ID NO: 1689621 - RNA, 17 nt, Human
cagaugcaccagcccuu

SEQ ID NO: 1689622 - RNA, 22 nt, Human
cagaugcaccagcccuuagcag

SEQ ID NO: 1689623 - RNA, 13 nt, Human
cagaugcaccagc

SEQ ID NO: 1689624 - RNA, 14 nt, Human
cagaugcaccagcc

SEQ ID NO: 1689625 - RNA, 16 nt, Human
cagaugcaccagcccu

SEQ ID NO: 1689626 - RNA, 19 nt, Human
cagaucugccuaaggacuu

SEQ ID NO: 1689627 - RNA, 20 nt, Human
cagaucugccuaaggacuuc

SEQ ID NO: 1689628 - RNA, 21 nt, Human
cagaucugccuaaggacuucu

SEQ ID NO: 1689629 - RNA, 23 nt, Human
cagaucugccuaaggacuucuuu

SEQ ID NO: 1689630 - RNA, 16 nt, Human
cagaucugccuaagga

SEQ ID NO: 1689631 - RNA, 17 nt, Human
cagaucugccuaaggac

SEQ ID NO: 1689632 - RNA, 14 nt, Human
cagaucugccuaag

SEQ ID NO: 1689633 - RNA, 16 nt, Human
cagaucuggaauguga

SEQ ID NO: 1689634 - RNA, 20 nt, Human
cagauacaggaaaagcugcu

SEQ ID NO: 1689635 - RNA, 21 nt, Human
cagauacaggaaaagcugcug

SEQ ID NO: 1689636 - RNA, 22 nt, Human
cagauacaggaaaagcugcuga

SEQ ID NO: 1689637 - RNA, 20 nt, Human
cagaucucuaacuucaccau

SEQ ID NO: 1689638 - RNA, 14 nt, Human
cagauccuggaaau

SEQ ID NO: 1689639 - RNA, 22 nt, Human
cagaguugaagacagagcuaca

SEQ ID NO: 1689640 - RNA, 14 nt, Human
cagaguuguuacau

SEQ ID NO: 1689641 - RNA, 17 nt, Human
cagaguugaagacagag

SEQ ID NO: 1689642 - RNA, 18 nt, Human
cagaguugaagacagagc

SEQ ID NO: 1689643 - RNA, 19 nt, Human
cagaguugaagacagagcu

SEQ ID NO: 1689644 - RNA, 20 nt, Human
cagaguugaagacagagcua

SEQ ID NO: 1689645 - RNA, 14 nt, Human
cagaguugaagaca

SEQ ID NO: 1689646 - RNA, 15 nt, Human
cagaguugaagacag

SEQ ID NO: 1689647 - RNA, 16 nt, Human
cagaguugaagacaga

SEQ ID NO: 1689648 - RNA, 19 nt, Human
cagaguuguuacauuuuua

SEQ ID NO: 1689649 - RNA, 18 nt, Human
cagaguuguuacauuuuu

SEQ ID NO: 1689650 - RNA, 15 nt, Human
cagaguuguuacauu

SEQ ID NO: 1689651 - RNA, 22 nt, Human
cagauaaagguucaugcaaacu

SEQ ID NO: 1689652 - RNA, 23 nt, Human
cagauaaauaguuuaugauucca

SEQ ID NO: 1689653 - RNA, 14 nt, Human
cagauaaacaguag

SEQ ID NO: 1689654 - RNA, 14 nt, Human
cagauaaucacaau

SEQ ID NO: 1689655 - RNA, 20 nt, Human
cagauaacuguuauuuauaa

SEQ ID NO: 1689656 - RNA, 21 nt, Human
cagauaacuguuauuuauaau

SEQ ID NO: 1689657 - RNA, 14 nt, Human
cagauaacuguuau

SEQ ID NO: 1689658 - RNA, 16 nt, Human
cagauaacuguuauuu

SEQ ID NO: 1689659 - RNA, 19 nt, Human
cagauaacuguuauuuaua

SEQ ID NO: 1689660 - RNA, 16 nt, Human
cacgccagauucuuuc

SEQ ID NO: 1689661 - RNA, 12 nt, Human
caccgcagacag

SEQ ID NO: 1689662 - RNA, 13 nt, Human
caccgcagacagg

SEQ ID NO: 1689663 - RNA, 14 nt, Human
caccgcagacagga

SEQ ID NO: 1689664 - RNA, 15 nt, Human
caccgcagacaggac

SEQ ID NO: 1689665 - RNA, 17 nt, Human
caccgcagacaggacca

SEQ ID NO: 1689666 - RNA, 18 nt, Human
caccgcagacaggaccag

SEQ ID NO: 1689667 - RNA, 15 nt, Human
caccgaaaacguggc

SEQ ID NO: 1689668 - RNA, 18 nt, Human
caccgaaaacguggcugc

SEQ ID NO: 1689669 - RNA, 22 nt, Human
caccgaaaacguggcugcuuca

SEQ ID NO: 1689670 - RNA, 19 nt, Human
caccgaaaacguggcugcu

SEQ ID NO: 1689671 - RNA, 21 nt, Human
caccgaaaacguggcugcuuc

SEQ ID NO: 1689672 - RNA, 11 nt, Human
cacccugugau

SEQ ID NO: 1689673 - RNA, 12 nt, Human
cacccugugaug

SEQ ID NO: 1689674 - RNA, 15 nt, Human
cacccugugaugggg

SEQ ID NO: 1689675 - RNA, 18 nt, Human
cacccugugauggggccc

SEQ ID NO: 1689676 - RNA, 20 nt, Human
cacccugugauggggcccug

SEQ ID NO: 1689677 - RNA, 21 nt, Human
cacccugugauggggcccugc

SEQ ID NO: 1689678 - RNA, 22 nt, Human
cacccugugauggggcccugcc

SEQ ID NO: 1689679 - RNA, 23 nt, Human
cacccugugauggggcccugccu

SEQ ID NO: 1689680 - RNA, 19 nt, Human
cacccgcuaagagggaggg

SEQ ID NO: 1689681 - RNA, 12 nt, Human
cacccggccccu

SEQ ID NO: 1689682 - RNA, 13 nt, Human
cacccggccccug

SEQ ID NO: 1689683 - RNA, 14 nt, Human
cacccggccccugc

SEQ ID NO: 1689684 - RNA, 16 nt, Human
cacccggccccugcug

SEQ ID NO: 1689685 - RNA, 17 nt, Human
cacccggccccugcugg

SEQ ID NO: 1689686 - RNA, 18 nt, Human
cacccggccccugcuggu

SEQ ID NO: 1689687 - RNA, 21 nt, Human
cacccggccccugcugguuca

SEQ ID NO: 1689688 - RNA, 13 nt, Human
cacauauugauuu

SEQ ID NO: 1689689 - RNA, 20 nt, Human
caccccucaacaccucugca

SEQ ID NO: 1689690 - RNA, 20 nt, Human
cacauauugauuuccguuaa

SEQ ID NO: 1689691 - RNA, 23 nt, Human
caccuggccucugcacuccccug

SEQ ID NO: 1689692 - RNA, 17 nt, Human
caccuggccucugcacu

SEQ ID NO: 1689693 - RNA, 18 nt, Human
caccuggccucugcacuc

SEQ ID NO: 1689694 - RNA, 19 nt, Human
caccuggccucugcacucc

SEQ ID NO: 1689695 - RNA, 20 nt, Human
caccuggccucugcacuccc

SEQ ID NO: 1689696 - RNA, 12 nt, Human
caccuggccucu

SEQ ID NO: 1689697 - RNA, 13 nt, Human
caccuggccucug

SEQ ID NO: 1689698 - RNA, 14 nt, Human
caccuggccucugc

SEQ ID NO: 1689699 - RNA, 15 nt, Human
caccuggccucugca

SEQ ID NO: 1689700 - RNA, 20 nt, Human
caccuggaauauauaaccag

SEQ ID NO: 1689701 - RNA, 23 nt, Human
caccugcggugcuaucuccccca

SEQ ID NO: 1689702 - RNA, 23 nt, Human
caccugaagacucauucuucugu

SEQ ID NO: 1689703 - RNA, 14 nt, Human
caccugaagacuca

SEQ ID NO: 1689704 - RNA, 15 nt, Human
caccugaagacucau

SEQ ID NO: 1689705 - RNA, 15 nt, Human
caccucucucacucc

SEQ ID NO: 1689706 - RNA, 17 nt, Human
caccucucucacuccuu

SEQ ID NO: 1689707 - RNA, 18 nt, Human
caccucucucacuccuug

SEQ ID NO: 1689708 - RNA, 19 nt, Human
caccucucucacuccuuga

SEQ ID NO: 1689709 - RNA, 18 nt, Human
caccucugcacaagcugc

SEQ ID NO: 1689710 - RNA, 19 nt, Human
caccucugcacaagcugca

SEQ ID NO: 1689711 - RNA, 21 nt, Human
caccgcagacaggaccaggga

SEQ ID NO: 1689712 - RNA, 14 nt, Human
caccggcuggccug

SEQ ID NO: 1689713 - RNA, 15 nt, Human
caccggcuggccugg

SEQ ID NO: 1689714 - RNA, 16 nt, Human
caccggcuggccuggc

SEQ ID NO: 1689715 - RNA, 17 nt, Human
caccggcuggccuggcc

SEQ ID NO: 1689716 - RNA, 18 nt, Human
caccggcuggccuggccc

SEQ ID NO: 1689717 - RNA, 20 nt, Human
caccggcuggccuggccccu

SEQ ID NO: 1689718 - RNA, 14 nt, Human
caccgggcacucag

SEQ ID NO: 1689719 - RNA, 15 nt, Human
caccgugccuggcca

SEQ ID NO: 1689720 - RNA, 20 nt, Human
caccgugccuggccacgccc

SEQ ID NO: 1689721 - RNA, 15 nt, Human
caccggggccucgga

SEQ ID NO: 1689722 - RNA, 13 nt, Human
caccgggccugga

SEQ ID NO: 1689723 - RNA, 15 nt, Human
caccgggcacucaga

SEQ ID NO: 1689724 - RNA, 22 nt, Human
caccgggcacucagaagacacu

SEQ ID NO: 1689725 - RNA, 15 nt, Human
caccgggccacagag

SEQ ID NO: 1689726 - RNA, 18 nt, Human
caccgggccacagagaaa

SEQ ID NO: 1689727 - RNA, 14 nt, Human
caccucccccaucu

SEQ ID NO: 1689728 - RNA, 21 nt, Human
caccucccccaucucuucugg

SEQ ID NO: 1689729 - RNA, 10 nt, Human
caccucccug

SEQ ID NO: 1689730 - RNA, 11 nt, Human
caccucaugga

SEQ ID NO: 1689731 - RNA, 12 nt, Human
caccucauggaa

SEQ ID NO: 1689732 - RNA, 14 nt, Human
caccucauggaauu

SEQ ID NO: 1689733 - RNA, 17 nt, Human
caccuccugcugggcag

SEQ ID NO: 1689734 - RNA, 13 nt, Human
caccucucccuug

SEQ ID NO: 1689735 - RNA, 14 nt, Human
caccucucccuugg

SEQ ID NO: 1689736 - RNA, 17 nt, Human
caccucucccuuggauu

SEQ ID NO: 1689737 - RNA, 14 nt, Human
caccuccugcuggg

SEQ ID NO: 1689738 - RNA, 15 nt, Human
caccuccugcugggc

SEQ ID NO: 1689739 - RNA, 14 nt, Human
caccuccugccucg

SEQ ID NO: 1689740 - RNA, 13 nt, Human
caccuccugccuc

SEQ ID NO: 1689741 - RNA, 11 nt, Human
caccuccugcc

SEQ ID NO: 1689742 - RNA, 14 nt, Human
caccucccugcaau

SEQ ID NO: 1689743 - RNA, 13 nt, Human
caccucccugcaa

SEQ ID NO: 1689744 - RNA, 14 nt, Human
cacucuacuuagca

SEQ ID NO: 1689745 - RNA, 15 nt, Human
cacucuccauuuaau

SEQ ID NO: 1689746 - RNA, 17 nt, Human
cacucuccauuuaauaa

SEQ ID NO: 1689747 - RNA, 12 nt, Human
cacucuccuugg

SEQ ID NO: 1689748 - RNA, 12 nt, Human
cacucugagacu

SEQ ID NO: 1689749 - RNA, 23 nt, Human
cacucugagacucgcgacaaugc

SEQ ID NO: 1689750 - RNA, 12 nt, Human
cacucuggcagc

SEQ ID NO: 1689751 - RNA, 13 nt, Human
cacucuggcagcu

SEQ ID NO: 1689752 - RNA, 14 nt, Human
cacucuggcagcuc

SEQ ID NO: 1689753 - RNA, 15 nt, Human
cacucauugaccuga

SEQ ID NO: 1689754 - RNA, 16 nt, Human
cacucaguccauagca

SEQ ID NO: 1689755 - RNA, 18 nt, Human
cacucauugaccugaggc

SEQ ID NO: 1689756 - RNA, 19 nt, Human
cacucauugaccugaggcc

SEQ ID NO: 1689757 - RNA, 20 nt, Human
cacucauugaccugaggccc

SEQ ID NO: 1689758 - RNA, 22 nt, Human
cacucauugaccugaggcccuu

SEQ ID NO: 1689759 - RNA, 12 nt, Human
cacucccugcaa

SEQ ID NO: 1689760 - RNA, 13 nt, Human
cacucccugcaac

SEQ ID NO: 1689761 - RNA, 16 nt, Human
cacucccugcaaccug

SEQ ID NO: 1689762 - RNA, 13 nt, Human
cacuccuaccugg

SEQ ID NO: 1689763 - RNA, 14 nt, Human
cacuccuaccuggu

SEQ ID NO: 1689764 - RNA, 17 nt, Human
cacucccugcaaccuga

SEQ ID NO: 1689765 - RNA, 14 nt, Human
cacuccuucacaga

SEQ ID NO: 1689766 - RNA, 21 nt, Human
cacuccuucacagaugggugc

SEQ ID NO: 1689767 - RNA, 17 nt, Human
cacuaaggugugcucug

SEQ ID NO: 1689768 - RNA, 18 nt, Human
cacuaaggugugcucuga

SEQ ID NO: 1689769 - RNA, 18 nt, Human
cacuaaccacgcuggacc

SEQ ID NO: 1689770 - RNA, 17 nt, Human
cacuaagagagaaugag

SEQ ID NO: 1689771 - RNA, 14 nt, Human
cacuaaccacgcug

SEQ ID NO: 1689772 - RNA, 15 nt, Human
cacuaaccacgcugg

SEQ ID NO: 1689773 - RNA, 16 nt, Human
cacuaaccacgcugga

SEQ ID NO: 1689774 - RNA, 16 nt, Human
cacuaacaugauuugg

SEQ ID NO: 1689775 - RNA, 21 nt, Human
cacuaaauugacacuuaaaaa

SEQ ID NO: 1689776 - RNA, 18 nt, Human
cacuaucccggcugcccu

SEQ ID NO: 1689777 - RNA, 19 nt, Human
cacuaucccggcugcccuu

SEQ ID NO: 1689778 - RNA, 15 nt, Human
cacuauguugcccag

SEQ ID NO: 1689779 - RNA, 16 nt, Human
cacuauguugcccagg

SEQ ID NO: 1689780 - RNA, 17 nt, Human
cacuauguugcccaggc

SEQ ID NO: 1689781 - RNA, 18 nt, Human
cacuauguugcccaggca

SEQ ID NO: 1689782 - RNA, 19 nt, Human
cacuauguugcccaggcag

SEQ ID NO: 1689783 - RNA, 18 nt, Human
cacuauaauguaagcucu

SEQ ID NO: 1689784 - RNA, 14 nt, Human
cacuauagccuagg

SEQ ID NO: 1689785 - RNA, 21 nt, Human
cacuauagccuaggugacaga

SEQ ID NO: 1689786 - RNA, 14 nt, Human
cacuauaauguaag

SEQ ID NO: 1689787 - RNA, 14 nt, Human
cacuaguauuucua

SEQ ID NO: 1689788 - RNA, 19 nt, Human
cacuaguauuucuaugaaa

SEQ ID NO: 1689789 - RNA, 22 nt, Human
cacucagaagacacugaugggc

SEQ ID NO: 1689790 - RNA, 18 nt, Human
cacucagaagacacugau

SEQ ID NO: 1689791 - RNA, 19 nt, Human
cacucagaagacacugaug

SEQ ID NO: 1689792 - RNA, 19 nt, Human
cacucacauuuauucugcu

SEQ ID NO: 1689793 - RNA, 20 nt, Human
cacucacauuuauucugcuc

SEQ ID NO: 1689794 - RNA, 12 nt, Human
cacucagaagac

SEQ ID NO: 1689795 - RNA, 16 nt, Human
cacucagaagacacug

SEQ ID NO: 1689796 - RNA, 17 nt, Human
cacucagaagacacuga

SEQ ID NO: 1689797 - RNA, 20 nt, Human
cacuauguugcccaggcagg

SEQ ID NO: 1689798 - RNA, 21 nt, Human
cacuauguugcccaggcaggu

SEQ ID NO: 1689799 - RNA, 15 nt, Human
cacucaaaagcuggg

SEQ ID NO: 1689800 - RNA, 17 nt, Human
cacucaaaagcugggca

SEQ ID NO: 1689801 - RNA, 18 nt, Human
cacucaaaagcugggcag

SEQ ID NO: 1689802 - RNA, 19 nt, Human
cacucaaaagcugggcagg

SEQ ID NO: 1689803 - RNA, 20 nt, Human
cacucaaaagcugggcaggu

SEQ ID NO: 1689804 - RNA, 16 nt, Human
cacucaaaucaagaaa

SEQ ID NO: 1689805 - RNA, 19 nt, Human
cacgccuguaauccuagca

SEQ ID NO: 1689806 - RNA, 20 nt, Human
cacgccuguaauccuagcac

SEQ ID NO: 1689807 - RNA, 23 nt, Human
cacgcgugcacacaccagagccc

SEQ ID NO: 1689808 - RNA, 15 nt, Human
cacgcgugcacacac

SEQ ID NO: 1689809 - RNA, 16 nt, Human
cacgcgugcacacacc

SEQ ID NO: 1689810 - RNA, 21 nt, Human
cacgcgugcacacaccagagc

SEQ ID NO: 1689811 - RNA, 20 nt, Human
cacggugaauggcuuuguau

SEQ ID NO: 1689812 - RNA, 23 nt, Human
cacggugaauggcuuuguauaga

SEQ ID NO: 1689813 - RNA, 15 nt, Human
cacgggggccaagga

SEQ ID NO: 1689814 - RNA, 20 nt, Human
cacgcuggaccuugaacugg

SEQ ID NO: 1689815 - RNA, 14 nt, Human
cacgcuccuuccuc

SEQ ID NO: 1689816 - RNA, 17 nt, Human
cacgcuggaccuugaac

SEQ ID NO: 1689817 - RNA, 16 nt, Human
cacggcucacugcagc

SEQ ID NO: 1689818 - RNA, 17 nt, Human
cacggcucacugcagcc

SEQ ID NO: 1689819 - RNA, 19 nt, Human
cacggcucacugcagccuc

SEQ ID NO: 1689820 - RNA, 20 nt, Human
cacggcucacugcagccuca

SEQ ID NO: 1689821 - RNA, 13 nt, Human
cacgugacagccg

SEQ ID NO: 1689822 - RNA, 18 nt, Human
cacguacacacacauaca

SEQ ID NO: 1689823 - RNA, 19 nt, Human
cacguacacacacauacac

SEQ ID NO: 1689824 - RNA, 14 nt, Human
cacguacacacaca

SEQ ID NO: 1689825 - RNA, 23 nt, Human
cacguuucuaaaggcuaccuuug

SEQ ID NO: 1689826 - RNA, 14 nt, Human
cacguuucuaaagg

SEQ ID NO: 1689827 - RNA, 12 nt, Human
cacguuucuaaa

SEQ ID NO: 1689828 - RNA, 13 nt, Human
cacuaaacaaaga

SEQ ID NO: 1689829 - RNA, 16 nt, Human
cacgugguccuaaucu

SEQ ID NO: 1689830 - RNA, 19 nt, Human
cacgugguccuaaucuucu

SEQ ID NO: 1689831 - RNA, 22 nt, Human
cacguucuuacuaguuucccuu

SEQ ID NO: 1689832 - RNA, 20 nt, Human
caccugucuugccuuuuuca

SEQ ID NO: 1689833 - RNA, 17 nt, Human
caccugucuugccuuuu

SEQ ID NO: 1689834 - RNA, 14 nt, Human
caccuuagacaguc

SEQ ID NO: 1689835 - RNA, 16 nt, Human
caccuuagacaguccc

SEQ ID NO: 1689836 - RNA, 18 nt, Human
caccuuagacagucccug

SEQ ID NO: 1689837 - RNA, 19 nt, Human
caccuuagacagucccugc

SEQ ID NO: 1689838 - RNA, 22 nt, Human
caccuuagccugcccuccuuuc

SEQ ID NO: 1689839 - RNA, 21 nt, Human
caccuuagacagucccugcca

SEQ ID NO: 1689840 - RNA, 23 nt, Human
caccuuagacagucccugccaau

SEQ ID NO: 1689841 - RNA, 18 nt, Human
caccuugacagggcacac

SEQ ID NO: 1689842 - RNA, 15 nt, Human
caccuugacagggca

SEQ ID NO: 1689843 - RNA, 16 nt, Human
caccuugacagggcac

SEQ ID NO: 1689844 - RNA, 13 nt, Human
caccuucccaugc

SEQ ID NO: 1689845 - RNA, 14 nt, Human
caccuucccaugcc

SEQ ID NO: 1689846 - RNA, 13 nt, Human
caccuugacaggg

SEQ ID NO: 1689847 - RNA, 16 nt, Human
cacgacugcccggcag

SEQ ID NO: 1689848 - RNA, 17 nt, Human
cacgacugcccggcagg

SEQ ID NO: 1689849 - RNA, 16 nt, Human
cacgaauauugcugau

SEQ ID NO: 1689850 - RNA, 19 nt, Human
cacgaauauugcugauggu

SEQ ID NO: 1689851 - RNA, 22 nt, Human
cacgaauauugcugauggugca

SEQ ID NO: 1689852 - RNA, 13 nt, Human
cacgccacugcac

SEQ ID NO: 1689853 - RNA, 15 nt, Human
cacgccacugcacua

SEQ ID NO: 1689854 - RNA, 19 nt, Human
cacgccagauucuuuccug

SEQ ID NO: 1689855 - RNA, 20 nt, Human
cacgccagauucuuuccuga

SEQ ID NO: 1689856 - RNA, 22 nt, Human
cacgccagauucuuuccugagg

SEQ ID NO: 1689857 - RNA, 23 nt, Human
cacgccagauucuuuccugaggc

SEQ ID NO: 1689858 - RNA, 13 nt, Human
cacgcccccacug

SEQ ID NO: 1689859 - RNA, 15 nt, Human
cacgcccccacuggu

SEQ ID NO: 1689860 - RNA, 17 nt, Human
cacgcccccacugguga

SEQ ID NO: 1689861 - RNA, 18 nt, Human
cacgcccccacuggugac

SEQ ID NO: 1689862 - RNA, 16 nt, Human
cacgauuucuguuuag

SEQ ID NO: 1689863 - RNA, 14 nt, Human
cacgauuucuguuu

SEQ ID NO: 1689864 - RNA, 12 nt, Human
cacgauuucugu

SEQ ID NO: 1689865 - RNA, 17 nt, Human
cacgcacuucgggaggu

SEQ ID NO: 1689866 - RNA, 17 nt, Human
cacgagcaggcuacugu

SEQ ID NO: 1689867 - RNA, 19 nt, Human
cacgagcaggcuacuguca

SEQ ID NO: 1689868 - RNA, 20 nt, Human
cacgagcaggcuacugucag

SEQ ID NO: 1689869 - RNA, 22 nt, Human
cacgagcaggcuacugucagcu

SEQ ID NO: 1689870 - RNA, 15 nt, Human
cacuguacuugcucu

SEQ ID NO: 1689871 - RNA, 18 nt, Human
cacuguacuugcucuuga

SEQ ID NO: 1689872 - RNA, 19 nt, Human
cacuguacuugcucuugau

SEQ ID NO: 1689873 - RNA, 13 nt, Human
cacugugaagaga

SEQ ID NO: 1689874 - RNA, 14 nt, Human
cacugugccaugug

SEQ ID NO: 1689875 - RNA, 14 nt, Human
cacugucaagauga

SEQ ID NO: 1689876 - RNA, 13 nt, Human
cacuguucucugc

SEQ ID NO: 1689877 - RNA, 14 nt, Human
cacuguucucugcc

SEQ ID NO: 1689878 - RNA, 15 nt, Human
cacuguucucugccc

SEQ ID NO: 1689879 - RNA, 16 nt, Human
cacuguucucugcccu

SEQ ID NO: 1689880 - RNA, 17 nt, Human
cacuguucucugcccuc

SEQ ID NO: 1689881 - RNA, 19 nt, Human
cacuguucucugcccucca

SEQ ID NO: 1689882 - RNA, 21 nt, Human
cacuguucucugcccuccaag

SEQ ID NO: 1689883 - RNA, 22 nt, Human
cacuguucucugcccuccaaga

SEQ ID NO: 1689884 - RNA, 22 nt, Human
cacuguggguagacacacauga

SEQ ID NO: 1689885 - RNA, 24 nt, Human
cacuguggguagacacacaugaag

SEQ ID NO: 1689886 - RNA, 18 nt, Human
cacugugccaugugccag

SEQ ID NO: 1689887 - RNA, 15 nt, Human
cacugugccaugugc

SEQ ID NO: 1689888 - RNA, 16 nt, Human
cacugugccaugugcc

SEQ ID NO: 1689889 - RNA, 13 nt, Human
cacugugcugagu

SEQ ID NO: 1689890 - RNA, 15 nt, Human
cacugugcugagucu

SEQ ID NO: 1689891 - RNA, 17 nt, Human
cacugugcugagucuga

SEQ ID NO: 1689892 - RNA, 20 nt, Human
cacugugcugagucugaagg

SEQ ID NO: 1689893 - RNA, 21 nt, Human
cacugugcugagucugaaggc

SEQ ID NO: 1689894 - RNA, 22 nt, Human
cacugugcugagucugaaggcu

SEQ ID NO: 1689895 - RNA, 19 nt, Human
cacuguggguagacacaca

SEQ ID NO: 1689896 - RNA, 22 nt, Human
cacuucugccauauucuguugg

SEQ ID NO: 1689897 - RNA, 21 nt, Human
cacuucgggaggucgaggcag

SEQ ID NO: 1689898 - RNA, 23 nt, Human
cacuucgggaggucgaggcagga

SEQ ID NO: 1689899 - RNA, 20 nt, Human
cacuuccauaaucuggacuc

SEQ ID NO: 1689900 - RNA, 16 nt, Human
cacuucccuacaugga

SEQ ID NO: 1689901 - RNA, 14 nt, Human
cacuguugcccagg

SEQ ID NO: 1689902 - RNA, 23 nt, Human
cacuucaggcucuucuccuuuca

SEQ ID NO: 1689903 - RNA, 14 nt, Human
cacuucaggcucuu

SEQ ID NO: 1689904 - RNA, 15 nt, Human
cacuucaggcucuuc

SEQ ID NO: 1689905 - RNA, 16 nt, Human
cacuucaggcucuucu

SEQ ID NO: 1689906 - RNA, 20 nt, Human
cacuucaggcucuucuccuu

SEQ ID NO: 1689907 - RNA, 12 nt, Human
cacuucagcuga

SEQ ID NO: 1689908 - RNA, 21 nt, Human
cacuucagcugacuuuucugu

SEQ ID NO: 1689909 - RNA, 24 nt, Human
cacuugcagacucuacagaggcca

SEQ ID NO: 1689910 - RNA, 14 nt, Human
cacuugcagacucu

SEQ ID NO: 1689911 - RNA, 18 nt, Human
cacuugcagacucuacag

SEQ ID NO: 1689912 - RNA, 19 nt, Human
cacuugcagacucuacaga

SEQ ID NO: 1689913 - RNA, 22 nt, Human
cacuugcagacucuacagaggc

SEQ ID NO: 1689914 - RNA, 19 nt, Human
cacuuucuagccagaggag

SEQ ID NO: 1689915 - RNA, 20 nt, Human
cacuuucuagccagaggaga

SEQ ID NO: 1689916 - RNA, 15 nt, Human
cacuuggucugugag

SEQ ID NO: 1689917 - RNA, 17 nt, Human
cacuuggucugugagau

SEQ ID NO: 1689918 - RNA, 13 nt, Human
cacuugcagacuc

SEQ ID NO: 1689919 - RNA, 19 nt, Human
cacuugaugacccccaacc

SEQ ID NO: 1689920 - RNA, 13 nt, Human
cacuugaguccag

SEQ ID NO: 1689921 - RNA, 19 nt, Human
cacuugacaucaacugcau

SEQ ID NO: 1689922 - RNA, 17 nt, Human
cacuugagaauuacccu

SEQ ID NO: 1689923 - RNA, 20 nt, Human
cacuugagaauuacccuuuu

SEQ ID NO: 1689924 - RNA, 20 nt, Human
cacuugaacccgggaggcag

SEQ ID NO: 1689925 - RNA, 21 nt, Human
cacuugaacccgggaggcaga

SEQ ID NO: 1689926 - RNA, 16 nt, Human
cacuugacaucaacug

SEQ ID NO: 1689927 - RNA, 23 nt, Human
cacuugaacccgggaggcagagg

SEQ ID NO: 1689928 - RNA, 18 nt, Human
cacuggacucaccucccc

SEQ ID NO: 1689929 - RNA, 15 nt, Human
cacuggacucaccuc

SEQ ID NO: 1689930 - RNA, 21 nt, Human
cacugcuuuuggucuguguga

SEQ ID NO: 1689931 - RNA, 17 nt, Human
cacuggaacacuaauga

SEQ ID NO: 1689932 - RNA, 22 nt, Human
cacugcuuccagugaggcucug

SEQ ID NO: 1689933 - RNA, 20 nt, Human
cacugcuuuuggucugugug

SEQ ID NO: 1689934 - RNA, 18 nt, Human
cacugcuuccagugaggc

SEQ ID NO: 1689935 - RNA, 19 nt, Human
cacugcuuccagugaggcu

SEQ ID NO: 1689936 - RNA, 20 nt, Human
cacugcuuccagugaggcuc

SEQ ID NO: 1689937 - RNA, 21 nt, Human
cacugcuuccagugaggcucu

SEQ ID NO: 1689938 - RNA, 12 nt, Human
cacugcuggcug

SEQ ID NO: 1689939 - RNA, 13 nt, Human
cacugcuggcugc

SEQ ID NO: 1689940 - RNA, 14 nt, Human
cacugcuggcugcc

SEQ ID NO: 1689941 - RNA, 15 nt, Human
cacugcuggcugccu

SEQ ID NO: 1689942 - RNA, 16 nt, Human
cacugcuggcugccuu

SEQ ID NO: 1689943 - RNA, 21 nt, Human
cacugcuggcugccuuagaac

SEQ ID NO: 1689944 - RNA, 13 nt, Human
cacugcuuaacuu

SEQ ID NO: 1689945 - RNA, 14 nt, Human
cacugcuuccagug

SEQ ID NO: 1689946 - RNA, 15 nt, Human
cacugcuuccaguga

SEQ ID NO: 1689947 - RNA, 16 nt, Human
cacugcuuccagugag

SEQ ID NO: 1689948 - RNA, 16 nt, Human
cacugccucuuccucc

SEQ ID NO: 1689949 - RNA, 23 nt, Human
cacugcacagugcaucucagccc

SEQ ID NO: 1689950 - RNA, 14 nt, Human
cacugcaccgggcc

SEQ ID NO: 1689951 - RNA, 15 nt, Human
cacugcaccgggcca

SEQ ID NO: 1689952 - RNA, 16 nt, Human
cacugcaccgggccac

SEQ ID NO: 1689953 - RNA, 18 nt, Human
cacugcaccgggccacag

SEQ ID NO: 1689954 - RNA, 19 nt, Human
cacugcaccgggccacaga

SEQ ID NO: 1689955 - RNA, 18 nt, Human
cacugcacuauagccuag

SEQ ID NO: 1689956 - RNA, 15 nt, Human
cacugcugcccagcc

SEQ ID NO: 1689957 - RNA, 17 nt, Human
cacugcugcccagccuc

SEQ ID NO: 1689958 - RNA, 20 nt, Human
cacugcucugaugaagagga

SEQ ID NO: 1689959 - RNA, 12 nt, Human
cacugcucuggu

SEQ ID NO: 1689960 - RNA, 20 nt, Human
cacugccuucgauacaccgg

SEQ ID NO: 1689961 - RNA, 22 nt, Human
cacugccuucgauacaccgggc

SEQ ID NO: 1689962 - RNA, 20 nt, Human
cacugccuucucaacuccaa

SEQ ID NO: 1689963 - RNA, 14 nt, Human
cacugcaaccuucg

SEQ ID NO: 1689964 - RNA, 22 nt, Human
cacugcaaccuucgccaccugg

SEQ ID NO: 1689965 - RNA, 23 nt, Human
cacugcaaccuucgccaccuggg

SEQ ID NO: 1689966 - RNA, 18 nt, Human
cacugcacagugcaucuc

SEQ ID NO: 1689967 - RNA, 19 nt, Human
cacugcacagugcaucuca

SEQ ID NO: 1689968 - RNA, 21 nt, Human
cacugcacagugcaucucagc

SEQ ID NO: 1689969 - RNA, 22 nt, Human
cacugcacagugcaucucagcc

SEQ ID NO: 1689970 - RNA, 23 nt, Human
cacugcaaccuccgccucuuggg

SEQ ID NO: 1689971 - RNA, 14 nt, Human
cacugcaaccuccg

SEQ ID NO: 1689972 - RNA, 16 nt, Human
cacugcaaccuccgcc

SEQ ID NO: 1689973 - RNA, 21 nt, Human
cacugauuugacauagucugg

SEQ ID NO: 1689974 - RNA, 23 nt, Human
cacugauuugacauagucuggcu

SEQ ID NO: 1689975 - RNA, 13 nt, Human
cacugcaaccucc

SEQ ID NO: 1689976 - RNA, 14 nt, Human
cacugaugggcaac

SEQ ID NO: 1689977 - RNA, 18 nt, Human
cacugaugggcaaccccc

SEQ ID NO: 1689978 - RNA, 24 nt, Human
cacugaugggcaacccccagccug

SEQ ID NO: 1689979 - RNA, 23 nt, Human
cacugagacagcccgggcucugc

SEQ ID NO: 1689980 - RNA, 14 nt, Human
cacugagacagccc

SEQ ID NO: 1689981 - RNA, 17 nt, Human
cacugagacagcccggg

SEQ ID NO: 1689982 - RNA, 19 nt, Human
cacugagacagcccgggcu

SEQ ID NO: 1689983 - RNA, 22 nt, Human
cacugagacagcccgggcucug

SEQ ID NO: 1689984 - RNA, 12 nt, Human
cacugagacagc

SEQ ID NO: 1689985 - RNA, 13 nt, Human
cacugagacagcc

SEQ ID NO: 1689986 - RNA, 21 nt, Human
cacugacuucuaaguaaaacc

SEQ ID NO: 1689987 - RNA, 14 nt, Human
cacugacuucuaag

SEQ ID NO: 1689988 - RNA, 15 nt, Human
cacugacuucuaagu

SEQ ID NO: 1689989 - RNA, 16 nt, Human
cacugacuucuaagua

SEQ ID NO: 1689990 - RNA, 20 nt, Human
cacugacuucuaaguaaaac

SEQ ID NO: 1689991 - RNA, 23 nt, Human
cacucuggcagcucagagagggu

SEQ ID NO: 1689992 - RNA, 20 nt, Human
cacucuggcagcucagagag

SEQ ID NO: 1689993 - RNA, 21 nt, Human
cacucuggcagcucagagagg

SEQ ID NO: 1689994 - RNA, 15 nt, Human
cacucuggcagcuca

SEQ ID NO: 1689995 - RNA, 16 nt, Human
cacucuggcagcucag

SEQ ID NO: 1689996 - RNA, 17 nt, Human
cacucuggcagcucaga

SEQ ID NO: 1689997 - RNA, 19 nt, Human
cacucuggcagcucagaga

SEQ ID NO: 1689998 - RNA, 15 nt, Human
cacucugucgcccag

SEQ ID NO: 1689999 - RNA, 16 nt, Human
cacucugucgcccagu

SEQ ID NO: 1690000 - RNA, 19 nt, Human
cacucugucgcccagucug

SEQ ID NO: 1690001 - RNA, 23 nt, Human
cacugacauuguuggccaaagcc

SEQ ID NO: 1690002 - RNA, 20 nt, Human
cacucugucgcccagucugg

SEQ ID NO: 1690003 - RNA, 23 nt, Human
aaaaaauuggggauucuuaaagu

SEQ ID NO: 1690004 - RNA, 20 nt, Human
aaaaauuggggauucuuaaa

SEQ ID NO: 1690005 - RNA, 19 nt, Human
aaaaauuggggauucuuaa

SEQ ID NO: 1690006 - RNA, 18 nt, Human
aaaaauuggggauucuua

SEQ ID NO: 1690007 - RNA, 17 nt, Human
aaaaauuggggauucuu

SEQ ID NO: 1690008 - RNA, 18 nt, Human
aaaaaccaguauuguaca

SEQ ID NO: 1690009 - RNA, 16 nt, Human
aaaaaccaguauugua

SEQ ID NO: 1690010 - RNA, 13 nt, Human
aauggcuuuguau

SEQ ID NO: 1690011 - RNA, 18 nt, Human
aauggcuuuguauagaac

SEQ ID NO: 1690012 - RNA, 16 nt, Human
aauggcuuuguauaga

SEQ ID NO: 1690013 - RNA, 15 nt, Human
aauggcuuuguauag

SEQ ID NO: 1690014 - RNA, 22 nt, Human
aaugguccgugcuaaggacuug

SEQ ID NO: 1690015 - RNA, 22 nt, Human
aauccauuuggaaaucuuuaaa

SEQ ID NO: 1690016 - RNA, 18 nt, Human
aauccauuuggaaaucuu

SEQ ID NO: 1690017 - RNA, 17 nt, Human
aauccauuuggaaaucu

SEQ ID NO: 1690018 - RNA, 15 nt, Human
aauccauuuggaaau

SEQ ID NO: 1690019 - RNA, 14 nt, Human
aauccauuuggaaa

SEQ ID NO: 1690020 - RNA, 14 nt, Human
aaucaacugggcug

SEQ ID NO: 1690021 - RNA, 19 nt, Human
aaucaacugggcugaacac

SEQ ID NO: 1690022 - RNA, 22 nt, Human
aaguaucugacaucucugcaau

SEQ ID NO: 1690023 - RNA, 15 nt, Human
aaguaucugacaucu

SEQ ID NO: 1690024 - RNA, 18 nt, Human
aagguucuggugugaacu

SEQ ID NO: 1690025 - RNA, 22 nt, Human
aagucucugaagugaaacugcu

SEQ ID NO: 1690026 - RNA, 19 nt, Human
aagucucugaagugaaacu

SEQ ID NO: 1690027 - RNA, 23 nt, Human
aagucuguuuuaugacuucauua

SEQ ID NO: 1690028 - RNA, 20 nt, Human
aagucuguuuuaugacuuca

SEQ ID NO: 1690029 - RNA, 19 nt, Human
aagucuguuuuaugacuuc

SEQ ID NO: 1690030 - RNA, 18 nt, Human
aagucuguuuuaugacuu

SEQ ID NO: 1690031 - RNA, 16 nt, Human
aagucuguuuuaugac

SEQ ID NO: 1690032 - RNA, 15 nt, Human
aagucuguuuuauga

SEQ ID NO: 1690033 - RNA, 15 nt, Human
aaguuguuugagaaa

SEQ ID NO: 1690034 - RNA, 12 nt, Human
aaguuguuugag

SEQ ID NO: 1690035 - RNA, 13 nt, Human
aagccauguuuau

SEQ ID NO: 1690036 - RNA, 22 nt, Human
aaggauuuuaugcuuuaaacau

SEQ ID NO: 1690037 - RNA, 21 nt, Human
aaggauuuuaugcuuuaaaca

SEQ ID NO: 1690038 - RNA, 20 nt, Human
aaggauuuuaugcuuuaaac

SEQ ID NO: 1690039 - RNA, 16 nt, Human
aaggauuuuaugcuuu

SEQ ID NO: 1690040 - RNA, 23 nt, Human
aaggauuuuaugcuuuaaacauu

SEQ ID NO: 1690041 - RNA, 13 nt, Human
aaggauuuuaugc

SEQ ID NO: 1690042 - RNA, 12 nt, Human
aaggauuuuaug

SEQ ID NO: 1690043 - RNA, 14 nt, Human
aaauauuuuaugau

SEQ ID NO: 1690044 - RNA, 19 nt, Human
aaauauuuuaugauccagc

SEQ ID NO: 1690045 - RNA, 18 nt, Human
aaauauuuuaugauccag

SEQ ID NO: 1690046 - RNA, 14 nt, Human
aaauacuguuugag

SEQ ID NO: 1690047 - RNA, 19 nt, Human
aaauggacuguggugacuu

SEQ ID NO: 1690048 - RNA, 19 nt, Human
aaaauuggggauucuuaaa

SEQ ID NO: 1690049 - RNA, 18 nt, Human
aaaauuggggauucuuaa

SEQ ID NO: 1690050 - RNA, 17 nt, Human
aaaauuggggauucuua

SEQ ID NO: 1690051 - RNA, 19 nt, Human
aaagagguuuuucuuaaau

SEQ ID NO: 1690052 - RNA, 16 nt, Human
aaagagguuuuucuua

SEQ ID NO: 1690053 - RNA, 12 nt, Human
aacuuuucugau

SEQ ID NO: 1690054 - RNA, 14 nt, Human
aacuuuucugauag

SEQ ID NO: 1690055 - RNA, 13 nt, Human
aacuuuucugaua

SEQ ID NO: 1690056 - RNA, 17 nt, Human
aaauuggggauucuuaa

SEQ ID NO: 1690057 - RNA, 16 nt, Human
aaauuggggauucuua

SEQ ID NO: 1690058 - RNA, 22 nt, Human
aaccaguauuguacaaaguauu

SEQ ID NO: 1690059 - RNA, 21 nt, Human
aaccaguauuguacaaaguau

SEQ ID NO: 1690060 - RNA, 15 nt, Human
aaccaguauuguaca

SEQ ID NO: 1690061 - RNA, 20 nt, Human
aaccaguauuguacaaagua

SEQ ID NO: 1690062 - RNA, 17 nt, Human
aacagcuggugcccugc

SEQ ID NO: 1690063 - RNA, 13 nt, Human
acgaugucuucau

SEQ ID NO: 1690064 - RNA, 23 nt, Human
accuuucagauaacuguuauuua

SEQ ID NO: 1690065 - RNA, 21 nt, Human
acuucuuuaauuuuggaauuu

SEQ ID NO: 1690066 - RNA, 14 nt, Human
acuggguuccugca

SEQ ID NO: 1690067 - RNA, 12 nt, Human
acuuuucugaua

SEQ ID NO: 1690068 - RNA, 18 nt, Human
acaauuuuguuucuguac

SEQ ID NO: 1690069 - RNA, 17 nt, Human
acaauuuuguuucugua

SEQ ID NO: 1690070 - RNA, 15 nt, Human
acaauuuuguuucug

SEQ ID NO: 1690071 - RNA, 14 nt, Human
acaauuuuguuucu

SEQ ID NO: 1690072 - RNA, 18 nt, Human
acauaaaucugugaacuu

SEQ ID NO: 1690073 - RNA, 15 nt, Human
acauaaaucugugaa

SEQ ID NO: 1690074 - RNA, 14 nt, Human
acauaaaucuguga

SEQ ID NO: 1690075 - RNA, 14 nt, Human
auaugcuauuucua

SEQ ID NO: 1690076 - RNA, 20 nt, Human
auacaauuuuguuucuguac

SEQ ID NO: 1690077 - RNA, 19 nt, Human
auacaauuuuguuucugua

SEQ ID NO: 1690078 - RNA, 15 nt, Human
auaccuacauguauu

SEQ ID NO: 1690079 - RNA, 17 nt, Human
auaccuacauguauuug

SEQ ID NO: 1690080 - RNA, 22 nt, Human
auaauuaacauguuaaaccaug

SEQ ID NO: 1690081 - RNA, 21 nt, Human
auaauuaacauguuaaaccau

SEQ ID NO: 1690082 - RNA, 20 nt, Human
auaauuaacauguuaaacca

SEQ ID NO: 1690083 - RNA, 20 nt, Human
aguugaauuuauuggcuuuu

SEQ ID NO: 1690084 - RNA, 19 nt, Human
aguugaauuuauuggcuuu

SEQ ID NO: 1690085 - RNA, 17 nt, Human
aguugaauuuauuggcu

SEQ ID NO: 1690086 - RNA, 13 nt, Human
aguugaauuuauu

SEQ ID NO: 1690087 - RNA, 11 nt, Human
aguugaauuua

SEQ ID NO: 1690088 - RNA, 22 nt, Human
auggagccugcacggugaaugg

SEQ ID NO: 1690089 - RNA, 18 nt, Human
auggagccugcacgguga

SEQ ID NO: 1690090 - RNA, 24 nt, Human
aucuucucagaaggcaaaugacuu

SEQ ID NO: 1690091 - RNA, 22 nt, Human
aucaccugucuugccuuuuuca

SEQ ID NO: 1690092 - RNA, 21 nt, Human
aucaccugucuugccuuuuuc

SEQ ID NO: 1690093 - RNA, 12 nt, Human
aucaccugucuu

SEQ ID NO: 1690094 - RNA, 14 nt, Human
agaguguugaaacg

SEQ ID NO: 1690095 - RNA, 22 nt, Human
agccauguuuauuacaguauaa

SEQ ID NO: 1690096 - RNA, 23 nt, Human
agccucccuauuuuuuuucuguu

SEQ ID NO: 1690097 - RNA, 23 nt, Human
aggcugaugccaaguuguuugag

SEQ ID NO: 1690098 - RNA, 14 nt, Human
agcuggugcccugc

SEQ ID NO: 1690099 - RNA, 21 nt, Human
cuugucucagauuuuauuaug

SEQ ID NO: 1690100 - RNA, 13 nt, Human
cuuuugguuaagu

SEQ ID NO: 1690101 - RNA, 20 nt, Human
gaaacuuguguaaauacaau

SEQ ID NO: 1690102 - RNA, 16 nt, Human
gaaacuuguguaaaua

SEQ ID NO: 1690103 - RNA, 14 nt, Human
gaaacuuguguaaa

SEQ ID NO: 1690104 - RNA, 23 nt, Human
cuggugcccugcuuucagauacu

SEQ ID NO: 1690105 - RNA, 21 nt, Human
cuggugcccugcuuucagaua

SEQ ID NO: 1690106 - RNA, 19 nt, Human
cuggugcccugcuuucaga

SEQ ID NO: 1690107 - RNA, 16 nt, Human
cuggugcccugcuuuc

SEQ ID NO: 1690108 - RNA, 15 nt, Human
cuggugcccugcuuu

SEQ ID NO: 1690109 - RNA, 18 nt, Human
cuggugacugauucuuca

SEQ ID NO: 1690110 - RNA, 17 nt, Human
cuggugacugauucuuc

SEQ ID NO: 1690111 - RNA, 15 nt, Human
cuggugacugauucu

SEQ ID NO: 1690112 - RNA, 14 nt, Human
cuggugacugauuc

SEQ ID NO: 1690113 - RNA, 13 nt, Human
cuggugacugauu

SEQ ID NO: 1690114 - RNA, 16 nt, Human
cugugagcaucacagu

SEQ ID NO: 1690115 - RNA, 17 nt, Human
cugugaacuugaaauuu

SEQ ID NO: 1690116 - RNA, 16 nt, Human
cugugaacuugaaauu

SEQ ID NO: 1690117 - RNA, 15 nt, Human
cugugaacuugaaau

SEQ ID NO: 1690118 - RNA, 22 nt, Human
cuguuauauaaaugguuaaaag

SEQ ID NO: 1690119 - RNA, 15 nt, Human
cuguuauauaaaugg

SEQ ID NO: 1690120 - RNA, 14 nt, Human
cuguuauauaaaug

SEQ ID NO: 1690121 - RNA, 13 nt, Human
cuguuauauaaau

SEQ ID NO: 1690122 - RNA, 19 nt, Human
cugugagcaucacaguuuu

SEQ ID NO: 1690123 - RNA, 20 nt, Human
gauacuggauuguacuuugu

SEQ ID NO: 1690124 - RNA, 16 nt, Human
gauacuggauuguacu

SEQ ID NO: 1690125 - RNA, 12 nt, Human
gaugauuucuau

SEQ ID NO: 1690126 - RNA, 23 nt, Human
gaugauuucuaugcugaguuugu

SEQ ID NO: 1690127 - RNA, 13 nt, Human
gaugauuucuaug

SEQ ID NO: 1690128 - RNA, 15 nt, Human
gaucugccuaaggac

SEQ ID NO: 1690129 - RNA, 12 nt, Human
gaucugccuaag

SEQ ID NO: 1690130 - RNA, 17 nt, Human
gaucugccuaaggacuu

SEQ ID NO: 1690131 - RNA, 16 nt, Human
gaucugccuaaggacu

SEQ ID NO: 1690132 - RNA, 18 nt, Human
gauccagcagauuauuca

SEQ ID NO: 1690133 - RNA, 19 nt, Human
gauccagcagauuauucac

SEQ ID NO: 1690134 - RNA, 16 nt, Human
gcuauuucuauauuuu

SEQ ID NO: 1690135 - RNA, 15 nt, Human
gcuauuucuauauuu

SEQ ID NO: 1690136 - RNA, 13 nt, Human
gcuauuucuauau

SEQ ID NO: 1690137 - RNA, 11 nt, Human
gcuauuucuau

SEQ ID NO: 1690138 - RNA, 22 nt, Human
gcuauuucuauauuuucauucu

SEQ ID NO: 1690139 - RNA, 20 nt, Human
gcuauuucuauauuuucauu

SEQ ID NO: 1690140 - RNA, 19 nt, Human
gcuauuucuauauuuucau

SEQ ID NO: 1690141 - RNA, 18 nt, Human
gcuauuucuauauuuuca

SEQ ID NO: 1690142 - RNA, 22 nt, Human
gcguucauggaacgcguugaaa

SEQ ID NO: 1690143 - RNA, 23 nt, Human
gcuaaggacuuguuagaucuagu

SEQ ID NO: 1690144 - RNA, 12 nt, Human
gcguugaaauug

SEQ ID NO: 1690145 - RNA, 12 nt, Human
gcuaaggacuug

SEQ ID NO: 1690146 - RNA, 11 nt, Human
gcuaaggacuu

SEQ ID NO: 1690147 - RNA, 22 nt, Human
gccauguuuauuacaguauaau

SEQ ID NO: 1690148 - RNA, 18 nt, Human
gccauguuuauuacagua

SEQ ID NO: 1690149 - RNA, 14 nt, Human
gccauguuuauuac

SEQ ID NO: 1690150 - RNA, 11 nt, Human
gccauguuuau

SEQ ID NO: 1690151 - RNA, 13 nt, Human
gccauguuuauua

SEQ ID NO: 1690152 - RNA, 18 nt, Human
ggaaacuggguuccugca

SEQ ID NO: 1690153 - RNA, 13 nt, Human
ggaaaucuuuaaa

SEQ ID NO: 1690154 - RNA, 15 nt, Human
ggaagccugauuaaa

SEQ ID NO: 1690155 - RNA, 18 nt, Human
aaaauauuuuaugaucca

SEQ ID NO: 1690156 - RNA, 15 nt, Human
aaaauauuuuaugau

SEQ ID NO: 1690157 - RNA, 21 nt, Human
guacaaaguauuaagcauaua

SEQ ID NO: 1690158 - RNA, 20 nt, Human
guacaaaguauuaagcauau

SEQ ID NO: 1690159 - RNA, 20 nt, Human
gguguuguacucaauuuuaa

SEQ ID NO: 1690160 - RNA, 19 nt, Human
gguguuguacucaauuuua

SEQ ID NO: 1690161 - RNA, 23 nt, Human
auuuauaaucacuuuuuuccaca

SEQ ID NO: 1690162 - RNA, 20 nt, Human
auuguacaaaguauuaagca

SEQ ID NO: 1690163 - RNA, 22 nt, Human
auuguacaaaguauuaagcaua

SEQ ID NO: 1690164 - RNA, 23 nt, Human
auuguacaaaguauuaagcauau

SEQ ID NO: 1690165 - RNA, 23 nt, Human
auuuuauaaaucgcuuuugauaa

SEQ ID NO: 1690166 - RNA, 21 nt, Human
auuuuauaaaucgcuuuugau

SEQ ID NO: 1690167 - RNA, 20 nt, Human
auuuuauaaaucgcuuuuga

SEQ ID NO: 1690168 - RNA, 17 nt, Human
auuuuauaaaucgcuuu

SEQ ID NO: 1690169 - RNA, 16 nt, Human
auuuuauaaaucgcuu

SEQ ID NO: 1690170 - RNA, 15 nt, Human
auuuuauaaaucgcu

SEQ ID NO: 1690171 - RNA, 16 nt, Human
caaccaccuuucagau

SEQ ID NO: 1690172 - RNA, 15 nt, Human
caaaguauuaagcau

SEQ ID NO: 1690173 - RNA, 14 nt, Human
caaaguauuaagca

SEQ ID NO: 1690174 - RNA, 21 nt, Human
caaaguauuaagcauauauuu

SEQ ID NO: 1690175 - RNA, 19 nt, Human
caaaguauuaagcauauau

SEQ ID NO: 1690176 - RNA, 17 nt, Human
caaaguauuaagcauau

SEQ ID NO: 1690177 - RNA, 16 nt, Human
caaaguauuaagcaua

SEQ ID NO: 1690178 - RNA, 17 nt, Human
caauaaaaaauuaugac

SEQ ID NO: 1690179 - RNA, 16 nt, Human
caauaaaaaauuauga

SEQ ID NO: 1690180 - RNA, 13 nt, Human
caauaaaaaauua

SEQ ID NO: 1690181 - RNA, 18 nt, Human
cauguauuuguuugcaua

SEQ ID NO: 1690182 - RNA, 23 nt, Human
ccaccuuucagauaacuguuauu

SEQ ID NO: 1690183 - RNA, 19 nt, Human
ccaguuuuguuuggaccaa

SEQ ID NO: 1690184 - RNA, 16 nt, Human
ccaguuuuguuuggac

SEQ ID NO: 1690185 - RNA, 22 nt, Human
ccaguauuguacaaaguauuaa

SEQ ID NO: 1690186 - RNA, 20 nt, Human
ccaguauuguacaaaguauu

SEQ ID NO: 1690187 - RNA, 16 nt, Human
ccagcagauuauucac

SEQ ID NO: 1690188 - RNA, 15 nt, Human
ccagcagauuauuca

SEQ ID NO: 1690189 - RNA, 22 nt, Human
cccaggaauggagccugcacgg

SEQ ID NO: 1690190 - RNA, 20 nt, Human
cccaggaauggagccugcac

SEQ ID NO: 1690191 - RNA, 19 nt, Human
cccaggaauggagccugca

SEQ ID NO: 1690192 - RNA, 18 nt, Human
cccaggaauggagccugc

SEQ ID NO: 1690193 - RNA, 20 nt, Human
ccuauuuuuuuucuguuaua

SEQ ID NO: 1690194 - RNA, 17 nt, Human
ccugucuugccuuuuuc

SEQ ID NO: 1690195 - RNA, 20 nt, Human
ccugucuugccuuuuucauu

SEQ ID NO: 1690196 - RNA, 19 nt, Human
ccugucuugccuuuuucau

SEQ ID NO: 1690197 - RNA, 12 nt, Human
ccuuucauauuu

SEQ ID NO: 1690198 - RNA, 16 nt, Human
ccuuuuuuaaauaaau

SEQ ID NO: 1690199 - RNA, 15 nt, Human
ccuuuuucauuauuu

SEQ ID NO: 1690200 - RNA, 20 nt, Human
cuauuuuuuuucuguuauau

SEQ ID NO: 1690201 - RNA, 21 nt, Human
cuauuuuuuuucuguuauaua

SEQ ID NO: 1690202 - RNA, 22 nt, Human
guguaaauacaauuuuguuucu

SEQ ID NO: 1690203 - RNA, 21 nt, Human
guguaaauacaauuuuguuuc

SEQ ID NO: 1690204 - RNA, 18 nt, Human
guguaaauacaauuuugu

SEQ ID NO: 1690205 - RNA, 15 nt, Human
aagcauuuuauaaau

SEQ ID NO: 1690206 - RNA, 14 nt, Human
aagcauuuuauaaa

SEQ ID NO: 1690207 - RNA, 12 nt, Human
aagcauuuuaua

SEQ ID NO: 1690208 - RNA, 19 nt, Human
aagcauuuuauaaaucgcu

SEQ ID NO: 1690209 - RNA, 17 nt, Human
aagcauuuuauaaaucg

SEQ ID NO: 1690210 - RNA, 21 nt, Human
aagcauuuuauaaaucgcuuu

SEQ ID NO: 1690211 - RNA, 17 nt, Human
aagccauguuuauuaca

SEQ ID NO: 1690212 - RNA, 16 nt, Human
aagccauguuuauuac

SEQ ID NO: 1690213 - RNA, 15 nt, Human
aagccauguuuauua

SEQ ID NO: 1690214 - RNA, 23 nt, Human
aagcauauauuuuuauauuuacu

SEQ ID NO: 1690215 - RNA, 18 nt, Human
guuagagauuuuuuuguu

SEQ ID NO: 1690216 - RNA, 23 nt, Human
aagccauguuuauuacaguauaa

SEQ ID NO: 1690217 - RNA, 22 nt, Human
aagccauguuuauuacaguaua

SEQ ID NO: 1690218 - RNA, 21 nt, Human
aagccauguuuauuacaguau

SEQ ID NO: 1690219 - RNA, 20 nt, Human
aagccauguuuauuacagua

SEQ ID NO: 1690220 - RNA, 22 nt, Human
aagucagaucugccuaaggacu

SEQ ID NO: 1690221 - RNA, 21 nt, Human
aagucagaucugccuaaggac

SEQ ID NO: 1690222 - RNA, 18 nt, Human
aagucagaucugccuaag

SEQ ID NO: 1690223 - RNA, 18 nt, Human
guuuuaugacuucauuaa

SEQ ID NO: 1690224 - RNA, 13 nt, Human
guuuuaugacuuc

SEQ ID NO: 1690225 - RNA, 18 nt, Human
guuuggaccaaaaaccag

SEQ ID NO: 1690226 - RNA, 19 nt, Human
guuuaauauuaaagccaug

SEQ ID NO: 1690227 - RNA, 18 nt, Human
guuuaauauuaaagccau

SEQ ID NO: 1690228 - RNA, 15 nt, Human
guuuaauauuaaagc

SEQ ID NO: 1690229 - RNA, 14 nt, Human
guuuaauauuaaag

SEQ ID NO: 1690230 - RNA, 13 nt, Human
guuuaauauuaaa

SEQ ID NO: 1690231 - RNA, 17 nt, Human
guuuauuacaguauaau

SEQ ID NO: 1690232 - RNA, 13 nt, Human
guuuauuacagua

SEQ ID NO: 1690233 - RNA, 20 nt, Human
aaggaaacuggguuccugca

SEQ ID NO: 1690234 - RNA, 12 nt, Human
aaggaaaaguuu

SEQ ID NO: 1690235 - RNA, 12 nt, Human
guuguuuguuua

SEQ ID NO: 1690236 - RNA, 18 nt, Human
uaaaaaaaaaauugggga

SEQ ID NO: 1690237 - RNA, 14 nt, Human
uaaaaaaaaaauug

SEQ ID NO: 1690238 - RNA, 23 nt, Human
aagucagaucugccuaaggacuu

SEQ ID NO: 1690239 - RNA, 23 nt, Human
guauuguacaaaguauuaagcau

SEQ ID NO: 1690240 - RNA, 22 nt, Human
guauuguacaaaguauuaagca

SEQ ID NO: 1690241 - RNA, 21 nt, Human
guauuguacaaaguauuaagc

SEQ ID NO: 1690242 - RNA, 22 nt, Human
guauugaagcauuuuauaaauc

SEQ ID NO: 1690243 - RNA, 18 nt, Human
guauugaagcauuuuaua

SEQ ID NO: 1690244 - RNA, 17 nt, Human
guauugaagcauuuuau

SEQ ID NO: 1690245 - RNA, 13 nt, Human
guauugaagcauu

SEQ ID NO: 1690246 - RNA, 10 nt, Human
guauugaagc

SEQ ID NO: 1690247 - RNA, 19 nt, Human
guauuguacaaaguauuaa

SEQ ID NO: 1690248 - RNA, 12 nt, Human
aaauuugaauuu

SEQ ID NO: 1690249 - RNA, 22 nt, Human
aaauuugaauuuuguguuagag

SEQ ID NO: 1690250 - RNA, 15 nt, Human
aaauuugaauuuugu

SEQ ID NO: 1690251 - RNA, 15 nt, Human
guccgugcuaaggac

SEQ ID NO: 1690252 - RNA, 17 nt, Human
guccgugcuaaggacuu

SEQ ID NO: 1690253 - RNA, 16 nt, Human
guccgugcuaaggacu

SEQ ID NO: 1690254 - RNA, 23 nt, Human
aacauugguucuuguauuaagaa

SEQ ID NO: 1690255 - RNA, 22 nt, Human
aacauugguucuuguauuaaga

SEQ ID NO: 1690256 - RNA, 19 nt, Human
aacauugguucuuguauua

SEQ ID NO: 1690257 - RNA, 18 nt, Human
aacauugguucuuguauu

SEQ ID NO: 1690258 - RNA, 16 nt, Human
aacauugguucuugua

SEQ ID NO: 1690259 - RNA, 15 nt, Human
aacauguuaaaccau

SEQ ID NO: 1690260 - RNA, 14 nt, Human
aacauguuaaacca

SEQ ID NO: 1690261 - RNA, 16 nt, Human
aacauguuaaaccaug

SEQ ID NO: 1690262 - RNA, 23 nt, Human
gucuugucucagauuuuauuaug

SEQ ID NO: 1690263 - RNA, 15 nt, Human
gugacuuuggauaau

SEQ ID NO: 1690264 - RNA, 12 nt, Human
gugacuuuggau

SEQ ID NO: 1690265 - RNA, 12 nt, Human
aacuugaaauuu

SEQ ID NO: 1690266 - RNA, 19 nt, Human
aacuugaaauuugaauuuu

SEQ ID NO: 1690267 - RNA, 18 nt, Human
aacuugaaauuugaauuu

SEQ ID NO: 1690268 - RNA, 13 nt, Human
aacuugaaauuug

SEQ ID NO: 1690269 - RNA, 14 nt, Human
gugaucucauuuaa

SEQ ID NO: 1690270 - RNA, 23 nt, Human
uagagauuuuuuuguuguuuguu

SEQ ID NO: 1690271 - RNA, 22 nt, Human
uagcuagacuggugacugauuc

SEQ ID NO: 1690272 - RNA, 21 nt, Human
uagcuagacuggugacugauu

SEQ ID NO: 1690273 - RNA, 21 nt, Human
acaccauuaugugcgcugaua

SEQ ID NO: 1690274 - RNA, 17 nt, Human
acaccauuaugugcgcu

SEQ ID NO: 1690275 - RNA, 23 nt, Human
acacacuuuugguuaagucuguu

SEQ ID NO: 1690276 - RNA, 19 nt, Human
uauauuuacuaaaauggac

SEQ ID NO: 1690277 - RNA, 21 nt, Human
uauauuuacuaaaauggacug

SEQ ID NO: 1690278 - RNA, 20 nt, Human
uauauuuacuaaaauggacu

SEQ ID NO: 1690279 - RNA, 12 nt, Human
uaugugugaagu

SEQ ID NO: 1690280 - RNA, 14 nt, Human
uaugugugaaguga

SEQ ID NO: 1690281 - RNA, 20 nt, Human
acaguauaauuaacauguua

SEQ ID NO: 1690282 - RNA, 15 nt, Human
acaguauaauuaaca

SEQ ID NO: 1690283 - RNA, 13 nt, Human
acaguauaauuaa

SEQ ID NO: 1690284 - RNA, 16 nt, Human
uauucaaaguugccua

SEQ ID NO: 1690285 - RNA, 13 nt, Human
uauucaaaguugc

SEQ ID NO: 1690286 - RNA, 12 nt, Human
uauucaaaguug

SEQ ID NO: 1690287 - RNA, 13 nt, Human
uacauguauuugu

SEQ ID NO: 1690288 - RNA, 19 nt, Human
aauuaacauguuaaaccau

SEQ ID NO: 1690289 - RNA, 20 nt, Human
aauuaacauguuaaaccaug

SEQ ID NO: 1690290 - RNA, 23 nt, Human
aaugccaucaauaaaaaauuaug

SEQ ID NO: 1690291 - RNA, 21 nt, Human
aaugccaucaauaaaaaauua

SEQ ID NO: 1690292 - RNA, 16 nt, Human
aaugccaucaauaaaa

SEQ ID NO: 1690293 - RNA, 16 nt, Human
aauggacuguggugac

SEQ ID NO: 1690294 - RNA, 14 nt, Human
uacuggauuguacu

SEQ ID NO: 1690295 - RNA, 20 nt, Human
aauucccuggccuuucauau

SEQ ID NO: 1690296 - RNA, 19 nt, Human
aauucccuggccuuucaua

SEQ ID NO: 1690297 - RNA, 19 nt, Human
uacuauauaugugaugauc

SEQ ID NO: 1690298 - RNA, 18 nt, Human
uaaucacuuuuuuccaca

SEQ ID NO: 1690299 - RNA, 19 nt, Human
uaaucacuuuuuuccacau

SEQ ID NO: 1690300 - RNA, 17 nt, Human
uaaucacuuuuuuccac

SEQ ID NO: 1690301 - RNA, 16 nt, Human
uaaucacuuuuuucca

SEQ ID NO: 1690302 - RNA, 16 nt, Human
uaaggaaaaguuuaau

SEQ ID NO: 1690303 - RNA, 22 nt, Human
aaucugugaacuugaaauuuga

SEQ ID NO: 1690304 - RNA, 21 nt, Human
aaucugugaacuugaaauuug

SEQ ID NO: 1690305 - RNA, 20 nt, Human
aaucugugaacuugaaauuu

SEQ ID NO: 1690306 - RNA, 16 nt, Human
aauaucaucaguauug

SEQ ID NO: 1690307 - RNA, 14 nt, Human
uaacauaaaucugu

SEQ ID NO: 1690308 - RNA, 12 nt, Human
uaacauaaaucu

SEQ ID NO: 1690309 - RNA, 21 nt, Human
uaacuguuauuuauaaucacu

SEQ ID NO: 1690310 - RNA, 23 nt, Human
ucacaguuuugguugcuuuaaua

SEQ ID NO: 1690311 - RNA, 21 nt, Human
ucacaguuuugguugcuuuaa

SEQ ID NO: 1690312 - RNA, 20 nt, Human
ucacaguuuugguugcuuua

SEQ ID NO: 1690313 - RNA, 22 nt, Human
accaguauuguacaaaguauua

SEQ ID NO: 1690314 - RNA, 20 nt, Human
accaguauuguacaaaguau

SEQ ID NO: 1690315 - RNA, 15 nt, Human
accaguauuguacaa

SEQ ID NO: 1690316 - RNA, 14 nt, Human
accaguauuguaca

SEQ ID NO: 1690317 - RNA, 23 nt, Human
accaguauuguacaaaguauuaa

SEQ ID NO: 1690318 - RNA, 20 nt, Human
ucaccugucuugccuuuuuc

SEQ ID NO: 1690319 - RNA, 19 nt, Human
ucaccugucuugccuuuuu

SEQ ID NO: 1690320 - RNA, 12 nt, Human
ucaacugggcug

SEQ ID NO: 1690321 - RNA, 18 nt, Human
acauguauuuguuugcau

SEQ ID NO: 1690322 - RNA, 17 nt, Human
acauguauuuguuugca

SEQ ID NO: 1690323 - RNA, 19 nt, Human
acauguauuuguuugcaua

SEQ ID NO: 1690324 - RNA, 17 nt, Human
ucaaccaccuuucagau

SEQ ID NO: 1690325 - RNA, 18 nt, Human
ucaacugggcugaacacu

SEQ ID NO: 1690326 - RNA, 20 nt, Human
ucagcaaaaauauuuuauga

SEQ ID NO: 1690327 - RNA, 19 nt, Human
ucagcaaaaauauuuuaug

SEQ ID NO: 1690328 - RNA, 23 nt, Human
ucagauuuuauuauguaaauccc

SEQ ID NO: 1690329 - RNA, 19 nt, Human
accauaaccccggaagcca

SEQ ID NO: 1690330 - RNA, 14 nt, Human
acggaugauuucua

SEQ ID NO: 1690331 - RNA, 13 nt, Human
acggaugauuucu

SEQ ID NO: 1690332 - RNA, 16 nt, Human
acuaaacuuucacacc

SEQ ID NO: 1690333 - RNA, 15 nt, Human
acuaaacuuucacac

SEQ ID NO: 1690334 - RNA, 16 nt, Human
acggugaauggcuuug

SEQ ID NO: 1690335 - RNA, 20 nt, Human
acggugaauggcuuuguaua

SEQ ID NO: 1690336 - RNA, 19 nt, Human
acggugaauggcuuuguau

SEQ ID NO: 1690337 - RNA, 15 nt, Human
acucaauuuuaacaa

SEQ ID NO: 1690338 - RNA, 12 nt, Human
acucaauuuuaa

SEQ ID NO: 1690339 - RNA, 22 nt, Human
uccugcaaugaagucucugaag

SEQ ID NO: 1690340 - RNA, 20 nt, Human
agaaggcaaaugacuuugga

SEQ ID NO: 1690341 - RNA, 15 nt, Human
agaaggcaaaugacu

SEQ ID NO: 1690342 - RNA, 14 nt, Human
agaaggcaaaugac

SEQ ID NO: 1690343 - RNA, 23 nt, Human
agaaugguccgugcuaaggacuu

SEQ ID NO: 1690344 - RNA, 21 nt, Human
agaaugguccgugcuaaggac

SEQ ID NO: 1690345 - RNA, 18 nt, Human
ucugugaacuugaaauuu

SEQ ID NO: 1690346 - RNA, 17 nt, Human
ucugugaacuugaaauu

SEQ ID NO: 1690347 - RNA, 14 nt, Human
ucugugaacuugaa

SEQ ID NO: 1690348 - RNA, 12 nt, Human
agaauucuguau

SEQ ID NO: 1690349 - RNA, 14 nt, Human
agaauucuguauag

SEQ ID NO: 1690350 - RNA, 20 nt, Human
ucugugagcaucacaguuuu

SEQ ID NO: 1690351 - RNA, 11 nt, Human
ucugauccagu

SEQ ID NO: 1690352 - RNA, 21 nt, Human
ucugauccaguuuuguuugga

SEQ ID NO: 1690353 - RNA, 14 nt, Human
ucugauccaguuuu

SEQ ID NO: 1690354 - RNA, 21 nt, Human
acuguuauuuauaaucacuuu

SEQ ID NO: 1690355 - RNA, 20 nt, Human
acuguuauuuauaaucacuu

SEQ ID NO: 1690356 - RNA, 17 nt, Human
acuguuauuuauaauca

SEQ ID NO: 1690357 - RNA, 15 nt, Human
acuguuauuuauaau

SEQ ID NO: 1690358 - RNA, 13 nt, Human
acuuguguaaaua

SEQ ID NO: 1690359 - RNA, 23 nt, Human
ucucagauuuuauuauguaaauc

SEQ ID NO: 1690360 - RNA, 22 nt, Human
ucucagauuuuauuauguaaau

SEQ ID NO: 1690361 - RNA, 16 nt, Human
ucucauuuaauccucu

SEQ ID NO: 1690362 - RNA, 12 nt, Human
acuuuggauaau

SEQ ID NO: 1690363 - RNA, 19 nt, Human
acuuuggauaauaaggaaa

SEQ ID NO: 1690364 - RNA, 17 nt, Human
acuuuggauaauaagga

SEQ ID NO: 1690365 - RNA, 21 nt, Human
agauuagagaguguugaaacg

SEQ ID NO: 1690366 - RNA, 23 nt, Human
agauuagaauucuguauagauua

SEQ ID NO: 1690367 - RNA, 22 nt, Human
agauuagaauucuguauagauu

SEQ ID NO: 1690368 - RNA, 16 nt, Human
agauuagaauucugua

SEQ ID NO: 1690369 - RNA, 15 nt, Human
agauuagaauucugu

SEQ ID NO: 1690370 - RNA, 16 nt, Human
ugaaauacuguuugag

SEQ ID NO: 1690371 - RNA, 14 nt, Human
ugaaauacuguuug

SEQ ID NO: 1690372 - RNA, 20 nt, Human
ugaaauuguaauuauaucug

SEQ ID NO: 1690373 - RNA, 19 nt, Human
ugaaauuguaauuauaucu

SEQ ID NO: 1690374 - RNA, 16 nt, Human
ugaaauuguaauuaua

SEQ ID NO: 1690375 - RNA, 15 nt, Human
ugaaauuguaauuau

SEQ ID NO: 1690376 - RNA, 14 nt, Human
ugaaauuguaauua

SEQ ID NO: 1690377 - RNA, 13 nt, Human
ugaaauuguaauu

SEQ ID NO: 1690378 - RNA, 19 nt, Human
ugaacuaaacuuucacacc

SEQ ID NO: 1690379 - RNA, 17 nt, Human
ugaacuaaacuuucaca

SEQ ID NO: 1690380 - RNA, 22 nt, Human
agagguuuuucuuaaauaauaa

SEQ ID NO: 1690381 - RNA, 12 nt, Human
agagguuuuucu

SEQ ID NO: 1690382 - RNA, 22 nt, Human
ugaaacugcuuguuuccuagca

SEQ ID NO: 1690383 - RNA, 20 nt, Human
ugaaacugcuuguuuccuag

SEQ ID NO: 1690384 - RNA, 15 nt, Human
agagaguguugaaac

SEQ ID NO: 1690385 - RNA, 16 nt, Human
agagaguguugaaacg

SEQ ID NO: 1690386 - RNA, 19 nt, Human
ugaaacugcuuguuuccua

SEQ ID NO: 1690387 - RNA, 18 nt, Human
ugaaacugcuuguuuccu

SEQ ID NO: 1690388 - RNA, 17 nt, Human
ucuuugucuacaccauu

SEQ ID NO: 1690389 - RNA, 21 nt, Human
agacuggugacugauucuuca

SEQ ID NO: 1690390 - RNA, 20 nt, Human
agacuggugacugauucuuc

SEQ ID NO: 1690391 - RNA, 17 nt, Human
agucagaucugccuaag

SEQ ID NO: 1690392 - RNA, 20 nt, Human
agucagaucugccuaaggac

SEQ ID NO: 1690393 - RNA, 22 nt, Human
agucagaucugccuaaggacuu

SEQ ID NO: 1690394 - RNA, 21 nt, Human
agucagaucugccuaaggacu

SEQ ID NO: 1690395 - RNA, 23 nt, Human
agucagaucugccuaaggacuuc

SEQ ID NO: 1690396 - RNA, 11 nt, Human
aguauuguaca

SEQ ID NO: 1690397 - RNA, 23 nt, Human
aguauuguacaaaguauuaagca

SEQ ID NO: 1690398 - RNA, 22 nt, Human
aguauuguacaaaguauuaagc

SEQ ID NO: 1690399 - RNA, 20 nt, Human
aguauuguacaaaguauuaa

SEQ ID NO: 1690400 - RNA, 15 nt, Human
aguauuguacaaagu

SEQ ID NO: 1690401 - RNA, 16 nt, Human
uguauuaagaaugaaa

SEQ ID NO: 1690402 - RNA, 12 nt, Human
uguauuaagaau

SEQ ID NO: 1690403 - RNA, 13 nt, Human
uguaugugugaag

SEQ ID NO: 1690404 - RNA, 12 nt, Human
uguaugugugaa

SEQ ID NO: 1690405 - RNA, 18 nt, Human
ugugagcaucacaguuuu

SEQ ID NO: 1690406 - RNA, 19 nt, Human
agucucugaagugaaacug

SEQ ID NO: 1690407 - RNA, 18 nt, Human
agucucugaagugaaacu

SEQ ID NO: 1690408 - RNA, 18 nt, Human
agucuguuuuaugacuuc

SEQ ID NO: 1690409 - RNA, 17 nt, Human
agucuguuuuaugacuu

SEQ ID NO: 1690410 - RNA, 14 nt, Human
agucuguuuuauga

SEQ ID NO: 1690411 - RNA, 13 nt, Human
agucuguuuuaug

SEQ ID NO: 1690412 - RNA, 22 nt, Human
ugucuucauaccuacauguauu

SEQ ID NO: 1690413 - RNA, 20 nt, Human
ugugaacuaaacuuucacac

SEQ ID NO: 1690414 - RNA, 19 nt, Human
ugugaacuaaacuuucaca

SEQ ID NO: 1690415 - RNA, 14 nt, Human
ugugaacuaaacuu

SEQ ID NO: 1690416 - RNA, 21 nt, Human
ugucuugccuuuuucauuauu

SEQ ID NO: 1690417 - RNA, 17 nt, Human
ugucuugccuuuuucau

SEQ ID NO: 1690418 - RNA, 16 nt, Human
ugucuugccuuuuuca

SEQ ID NO: 1690419 - RNA, 15 nt, Human
ugucuugccuuuuuc

SEQ ID NO: 1690420 - RNA, 14 nt, Human
uguacaaaguauua

SEQ ID NO: 1690421 - RNA, 13 nt, Human
uguacaaaguauu

SEQ ID NO: 1690422 - RNA, 19 nt, Human
uguaaauacaauuuuguuu

SEQ ID NO: 1690423 - RNA, 18 nt, Human
uguaaauacaauuuuguu

SEQ ID NO: 1690424 - RNA, 17 nt, Human
uguaaauacaauuuugu

SEQ ID NO: 1690425 - RNA, 16 nt, Human
uguaaauacaauuuug

SEQ ID NO: 1690426 - RNA, 10 nt, Human
uguaaauccc

SEQ ID NO: 1690427 - RNA, 21 nt, Human
uguaaauacaauuuuguuucu

SEQ ID NO: 1690428 - RNA, 15 nt, Human
ugguuaagucuguuu

SEQ ID NO: 1690429 - RNA, 18 nt, Human
ugguuaagucuguuuuau

SEQ ID NO: 1690430 - RNA, 22 nt, Human
auaauaaggaaaaguuuaauau

SEQ ID NO: 1690431 - RNA, 19 nt, Human
auaauaaggaaaaguuuaa

SEQ ID NO: 1690432 - RNA, 18 nt, Human
auaauaaggaaaaguuua

SEQ ID NO: 1690433 - RNA, 17 nt, Human
auaauaaggaaaaguuu

SEQ ID NO: 1690434 - RNA, 16 nt, Human
auaauaaggaaaaguu

SEQ ID NO: 1690435 - RNA, 19 nt, Human
auaaucacuuuuuuccaca

SEQ ID NO: 1690436 - RNA, 19 nt, Human
auaauuauaugcuauuucu

SEQ ID NO: 1690437 - RNA, 17 nt, Human
auaauuauaugcuauuu

SEQ ID NO: 1690438 - RNA, 23 nt, Human
auaauuauaugcuauuucuauau

SEQ ID NO: 1690439 - RNA, 21 nt, Human
auaauuauaugcuauuucuau

SEQ ID NO: 1690440 - RNA, 18 nt, Human
uuauaaaucgcuuuugau

SEQ ID NO: 1690441 - RNA, 17 nt, Human
uuauaaaucgcuuuuga

SEQ ID NO: 1690442 - RNA, 14 nt, Human
uuauaaaucgcuuu

SEQ ID NO: 1690443 - RNA, 21 nt, Human
uguuguacucaauuuuaacaa

SEQ ID NO: 1690444 - RNA, 19 nt, Human
aguuugugcugguguaugu

SEQ ID NO: 1690445 - RNA, 16 nt, Human
ugauuucuaugcugag

SEQ ID NO: 1690446 - RNA, 15 nt, Human
ugauuucuaugcuga

SEQ ID NO: 1690447 - RNA, 12 nt, Human
ugauuucuaugc

SEQ ID NO: 1690448 - RNA, 20 nt, Human
aggauuuuaugcuuuaaaca

SEQ ID NO: 1690449 - RNA, 17 nt, Human
aggacuuguuagaucua

SEQ ID NO: 1690450 - RNA, 16 nt, Human
aggacuuguuagaucu

SEQ ID NO: 1690451 - RNA, 14 nt, Human
aggacuuguuagau

SEQ ID NO: 1690452 - RNA, 13 nt, Human
ugcuauuucuaua

SEQ ID NO: 1690453 - RNA, 12 nt, Human
ugcuauuucuau

SEQ ID NO: 1690454 - RNA, 21 nt, Human
ugcuauuucuauauuuucauu

SEQ ID NO: 1690455 - RNA, 20 nt, Human
ugcuauuucuauauuuucau

SEQ ID NO: 1690456 - RNA, 14 nt, Human
ugcuauuucuauau

SEQ ID NO: 1690457 - RNA, 19 nt, Human
uucuuaaauaauaaagauc

SEQ ID NO: 1690458 - RNA, 15 nt, Human
uucuuaaauaauaaa

SEQ ID NO: 1690459 - RNA, 13 nt, Human
uucuuaaaguuga

SEQ ID NO: 1690460 - RNA, 19 nt, Human
uugauaaucaacugggcug

SEQ ID NO: 1690461 - RNA, 14 nt, Human
uugacauagucugg

SEQ ID NO: 1690462 - RNA, 17 nt, Human
uugacauagucuggcug

SEQ ID NO: 1690463 - RNA, 12 nt, Human
auauuaaagcca

SEQ ID NO: 1690464 - RNA, 19 nt, Human
aucaacugggcugaacacu

SEQ ID NO: 1690465 - RNA, 13 nt, Human
auauauuuuuaua

SEQ ID NO: 1690466 - RNA, 20 nt, Human
uucauggaacgcguugaaau

SEQ ID NO: 1690467 - RNA, 19 nt, Human
uucauggaacgcguugaaa

SEQ ID NO: 1690468 - RNA, 21 nt, Human
uucauuaauaauaaauucccu

SEQ ID NO: 1690469 - RNA, 18 nt, Human
uucauuaauaauaaauuc

SEQ ID NO: 1690470 - RNA, 15 nt, Human
uucauuaauaauaaa

SEQ ID NO: 1690471 - RNA, 22 nt, Human
uucauggaacgcguugaaauug

SEQ ID NO: 1690472 - RNA, 21 nt, Human
uucauggaacgcguugaaauu

SEQ ID NO: 1690473 - RNA, 22 nt, Human
uucauuauuuuauuaugaaacu

SEQ ID NO: 1690474 - RNA, 19 nt, Human
uucagcaaaaauauuuuau

SEQ ID NO: 1690475 - RNA, 17 nt, Human
uucagcaaaaauauuuu

SEQ ID NO: 1690476 - RNA, 13 nt, Human
uuuauuaugaaac

SEQ ID NO: 1690477 - RNA, 21 nt, Human
uuuauuaugaaacuuguguaa

SEQ ID NO: 1690478 - RNA, 23 nt, Human
uuuagcuacuauauaugugauga

SEQ ID NO: 1690479 - RNA, 17 nt, Human
uuuacuaaaauggacug

SEQ ID NO: 1690480 - RNA, 15 nt, Human
uuuacuaaaauggac

SEQ ID NO: 1690481 - RNA, 21 nt, Human
uuucuaugcugaguuugugcu

SEQ ID NO: 1690482 - RNA, 13 nt, Human
uuucuauauuuuc

SEQ ID NO: 1690483 - RNA, 18 nt, Human
uuucuauauuuucauucu

SEQ ID NO: 1690484 - RNA, 15 nt, Human
uuucuauauuuucau

SEQ ID NO: 1690485 - RNA, 23 nt, Human
augaucuaccagccucccuauuu

SEQ ID NO: 1690486 - RNA, 17 nt, Human
uuuaaaaaaaaaauugg

SEQ ID NO: 1690487 - RNA, 18 nt, Human
uugguuaagucuguuuua

SEQ ID NO: 1690488 - RNA, 16 nt, Human
uugguuaagucuguuu

SEQ ID NO: 1690489 - RNA, 15 nt, Human
uuguaauuauaucug

SEQ ID NO: 1690490 - RNA, 17 nt, Human
auuuuccuccuuucucu

SEQ ID NO: 1690491 - RNA, 13 nt, Human
auuuuccuccuuu

SEQ ID NO: 1690492 - RNA, 21 nt, Human
auuuuauuauguaaaucccau

SEQ ID NO: 1690493 - RNA, 20 nt, Human
auuuuauuauguaaauccca

SEQ ID NO: 1690494 - RNA, 19 nt, Human
auuuuauuauguaaauccc

SEQ ID NO: 1690495 - RNA, 18 nt, Human
auuuuauuauguaaaucc

SEQ ID NO: 1690496 - RNA, 17 nt, Human
auuuuauuauguaaauc

SEQ ID NO: 1690497 - RNA, 16 nt, Human
auuuuauuauguaaau

SEQ ID NO: 1690498 - RNA, 18 nt, Human
auucuuaaaguugaauuu

SEQ ID NO: 1690499 - RNA, 23 nt, Human
auucuucagcaaaaauauuuuau

SEQ ID NO: 1690500 - RNA, 15 nt, Human
auucuucagcaaaaa

SEQ ID NO: 1690501 - RNA, 21 nt, Human
auucuguauagauuagaauuc

SEQ ID NO: 1690502 - RNA, 16 nt, Human
auucuuaaaguugaau

SEQ ID NO: 1690503 - RNA, 15 nt, Human
auucuuaaaguugaa

SEQ ID NO: 1690504 - RNA, 14 nt, Human
auucuuaaaguuga

SEQ ID NO: 1690505 - RNA, 13 nt, Human
auucuuaaaguug

SEQ ID NO: 1690506 - RNA, 23 nt, Human
auugguguuguacucaauuuuaa

SEQ ID NO: 1690507 - RNA, 22 nt, Human
auugguguuguacucaauuuua

SEQ ID NO: 1690508 - RNA, 14 nt, Human
auugguguuguacu

SEQ ID NO: 1690509 - RNA, 21 nt, Human
auucuccuaucaccugucuug

SEQ ID NO: 1690510 - RNA, 19 nt, Human
auucccuggccuuucauau

SEQ ID NO: 1690511 - RNA, 13 nt, Human
auucccuggccuu

SEQ ID NO: 1690512 - RNA, 21 nt, Human
auucccuggccuuucauauuu

SEQ ID NO: 1690513 - RNA, 15 nt, Human
uuuucugauccaguu

SEQ ID NO: 1690514 - RNA, 22 nt, Human
uuuuauuaugaaacuuguguaa

SEQ ID NO: 1690515 - RNA, 21 nt, Human
uuuuauuaugaaacuugugua

SEQ ID NO: 1690516 - RNA, 12 nt, Human
uuuuauuaugaa

SEQ ID NO: 1690517 - RNA, 20 nt, Human
auguuaaaccaugggauaaa

SEQ ID NO: 1690518 - RNA, 13 nt, Human
auguuaaaccaug

SEQ ID NO: 1690519 - RNA, 12 nt, Human
auguuaaaccau

SEQ ID NO: 1690520 - RNA, 15 nt, Human
auuaauaauaaauuc

SEQ ID NO: 1690521 - RNA, 12 nt, Human
auuagaauucug

SEQ ID NO: 1690522 - RNA, 14 nt, Human
auuagaauucugua

SEQ ID NO: 1690523 - RNA, 13 nt, Human
auuagaauucugu

SEQ ID NO: 1690524 - RNA, 18 nt, Human
auuagaauucuguauaga

SEQ ID NO: 1690525 - RNA, 17 nt, Human
auuagaauucuguauag

SEQ ID NO: 1690526 - RNA, 16 nt, Human
auuagaauucuguaua

SEQ ID NO: 1690527 - RNA, 15 nt, Human
auuagaauucuguau

SEQ ID NO: 1690528 - RNA, 21 nt, Human
auuagaauucuguauagauua

SEQ ID NO: 1690529 - RNA, 11 nt, Human
auuaaagccau

SEQ ID NO: 1690530 - RNA, 21 nt, Human
auuaagcauauauuuuuauau

SEQ ID NO: 1690531 - RNA, 15 nt, Human
auuaagcauauauuu

SEQ ID NO: 1690532 - RNA, 14 nt, Human
auuaagcauauauu

SEQ ID NO: 1690533 - RNA, 18 nt, Human
uuuuguuguuuguuuagu

SEQ ID NO: 1690534 - RNA, 12 nt, Human
uuuuguuucugu

SEQ ID NO: 1690535 - RNA, 22 nt, Human
uuuuguuuggaccaaaaaccag

SEQ ID NO: 1690536 - RNA, 12 nt, Human
uuuuguuuggac

SEQ ID NO: 1690537 - RNA, 13 nt, Human
uuuuguuucugua

SEQ ID NO: 1690538 - RNA, 23 nt, Human
uuuuguuuggaccaaaaaccagu

SEQ ID NO: 1690539 - RNA, 18 nt, Human
caaaaaccaguauuguac

SEQ ID NO: 1690540 - RNA, 20 nt, Human
caaaaaccaguauuguacaa

SEQ ID NO: 1690541 - RNA, 19 nt, Human
caaaaaccaguauuguaca

SEQ ID NO: 1690542 - RNA, 23 nt, Human
caaaaauauuuuaugauccagca

SEQ ID NO: 1690543 - RNA, 22 nt, Human
caaaaauauuuuaugauccagc

SEQ ID NO: 1690544 - RNA, 21 nt, Human
caaaaauauuuuaugauccag

SEQ ID NO: 1690545 - RNA, 17 nt, Human
caaaaauauuuuaugau

SEQ ID NO: 1690546 - RNA, 15 nt, Human
caaaaauauuuuaug

SEQ ID NO: 1690547 - RNA, 14 nt, Human
caaaaauauuuuau

SEQ ID NO: 1690548 - RNA, 23 nt, Human
cacugauuugacauagucuggcu

SEQ ID NO: 1690549 - RNA, 21 nt, Human
cacugauuugacauagucugg

SEQ ID NO: 1690550 - RNA, 17 nt, Human
caccugucuugccuuuu

SEQ ID NO: 1690551 - RNA, 20 nt, Human
caccugucuugccuuuuuca

SEQ ID NO: 1690552 - RNA, 23 nt, Human
cacggugaauggcuuuguauaga

SEQ ID NO: 1690553 - RNA, 20 nt, Human
cacggugaauggcuuuguau

SEQ ID NO: 1690554 - RNA, 17 nt, Human
cacucuccauuuaauaa

SEQ ID NO: 1690555 - RNA, 15 nt, Human
cacucuccauuuaau

SEQ ID NO: 1690556 - RNA, 19 nt, Human
cagauaacuguuauuuaua

SEQ ID NO: 1690557 - RNA, 16 nt, Human
cagauaacuguuauuu

SEQ ID NO: 1690558 - RNA, 14 nt, Human
cagauaacuguuau

SEQ ID NO: 1690559 - RNA, 21 nt, Human
cagauaacuguuauuuauaau

SEQ ID NO: 1690560 - RNA, 20 nt, Human
cagauaacuguuauuuauaa

SEQ ID NO: 1690561 - RNA, 14 nt, Human
cagaucugccuaag

SEQ ID NO: 1690562 - RNA, 17 nt, Human
cagaucugccuaaggac

SEQ ID NO: 1690563 - RNA, 16 nt, Human
cagaucugccuaagga

SEQ ID NO: 1690564 - RNA, 23 nt, Human
cagaucugccuaaggacuucuuu

SEQ ID NO: 1690565 - RNA, 21 nt, Human
cagaucugccuaaggacuucu

SEQ ID NO: 1690566 - RNA, 20 nt, Human
cagaucugccuaaggacuuc

SEQ ID NO: 1690567 - RNA, 19 nt, Human
cagaucugccuaaggacuu

SEQ ID NO: 1690568 - RNA, 12 nt, Human
cacuuuuuucca

SEQ ID NO: 1690569 - RNA, 14 nt, Human
cacuuuuuuccaca

SEQ ID NO: 1690570 - RNA, 22 nt, Human
cacuuuugguuaagucuguuuu

SEQ ID NO: 1690571 - RNA, 20 nt, Human
cagaaggcaaaugacuuugg

SEQ ID NO: 1690572 - RNA, 19 nt, Human
cagaaggcaaaugacuuug

SEQ ID NO: 1690573 - RNA, 18 nt, Human
cagaaggcaaaugacuuu

SEQ ID NO: 1690574 - RNA, 23 nt, Human
cagauuauucacugauuugacau

SEQ ID NO: 1690575 - RNA, 18 nt, Human
cagauuauucacugauuu

SEQ ID NO: 1690576 - RNA, 12 nt, Human
cagauuauucac

SEQ ID NO: 1690577 - RNA, 17 nt, Human
cagcaaaaauauuuuau

SEQ ID NO: 1690578 - RNA, 22 nt, Human
cagauuuuauuauguaaauccc

SEQ ID NO: 1690579 - RNA, 21 nt, Human
cagauuuuauuauguaaaucc

SEQ ID NO: 1690580 - RNA, 20 nt, Human
cagauuuuauuauguaaauc

SEQ ID NO: 1690581 - RNA, 18 nt, Human
cagauuuuauuauguaaa

SEQ ID NO: 1690582 - RNA, 16 nt, Human
cagauuuuauuaugua

SEQ ID NO: 1690583 - RNA, 15 nt, Human
cagauuuuauuaugu

SEQ ID NO: 1690584 - RNA, 13 nt, Human
cagauuuuauuau

SEQ ID NO: 1690585 - RNA, 19 nt, Human
cagcagauuauucacugau

SEQ ID NO: 1690586 - RNA, 15 nt, Human
cagcagauuauucac

SEQ ID NO: 1690587 - RNA, 14 nt, Human
cagcagauuauuca

SEQ ID NO: 1690588 - RNA, 23 nt, Human
caggaauggagccugcacgguga

SEQ ID NO: 1690589 - RNA, 17 nt, Human
caggaauggagccugca

SEQ ID NO: 1690590 - RNA, 18 nt, Human
cagcuggugcccugcuuu

SEQ ID NO: 1690591 - RNA, 23 nt, Human
cagcuggugcccugcuuucagau

SEQ ID NO: 1690592 - RNA, 21 nt, Human
cagcuggugcccugcuuucag

SEQ ID NO: 1690593 - RNA, 20 nt, Human
cagcuggugcccugcuuuca

SEQ ID NO: 1690594 - RNA, 19 nt, Human
cagcuggugcccugcuuuc

SEQ ID NO: 1690595 - RNA, 21 nt, Human
cagccucccuauuuuuuuucu

SEQ ID NO: 1690596 - RNA, 21 nt, Human
caguauaauuaacauguuaaa

SEQ ID NO: 1690597 - RNA, 17 nt, Human
caguauaauuaacaugu

SEQ ID NO: 1690598 - RNA, 15 nt, Human
caguauaauuaacau

SEQ ID NO: 1690599 - RNA, 14 nt, Human
caguauaauuaaca

SEQ ID NO: 1690600 - RNA, 22 nt, Human
caucucugcaaucuucucagaa

SEQ ID NO: 1690601 - RNA, 15 nt, Human
caucucugcaaucuu

SEQ ID NO: 1690602 - RNA, 22 nt, Human
cauauauuuuuauauuuacuaa

SEQ ID NO: 1690603 - RNA, 21 nt, Human
cauauauuuuuauauuuacua

SEQ ID NO: 1690604 - RNA, 20 nt, Human
cauauauuuuuauauuuacu

SEQ ID NO: 1690605 - RNA, 18 nt, Human
cauauauuuuuauauuua

SEQ ID NO: 1690606 - RNA, 19 nt, Human
cauagucuggcuguaccca

SEQ ID NO: 1690607 - RNA, 22 nt, Human
caucaguauugaagcauuuuau

SEQ ID NO: 1690608 - RNA, 20 nt, Human
caucaguauugaagcauuuu

SEQ ID NO: 1690609 - RNA, 16 nt, Human
caucaguauugaagca

SEQ ID NO: 1690610 - RNA, 13 nt, Human
cauguuaaaccau

SEQ ID NO: 1690611 - RNA, 23 nt, Human
cauguuuauuacaguauaauuaa

SEQ ID NO: 1690612 - RNA, 22 nt, Human
cauguuaaaccaugggauaaau

SEQ ID NO: 1690613 - RNA, 17 nt, Human
caugggauaaaugccau

SEQ ID NO: 1690614 - RNA, 16 nt, Human
caugggauaaaugcca

SEQ ID NO: 1690615 - RNA, 23 nt, Human
caugggauaaaugccaucaauaa

SEQ ID NO: 1690616 - RNA, 18 nt, Human
caugggauaaaugccauc

SEQ ID NO: 1690617 - RNA, 22 nt, Human
cauuuggaaaucuuuaaaaaaa

SEQ ID NO: 1690618 - RNA, 11 nt, Human
cauuuggaaau

SEQ ID NO: 1690619 - RNA, 18 nt, Human
cauuuggaaaucuuuaaa

SEQ ID NO: 1690620 - RNA, 17 nt, Human
cauuuggaaaucuuuaa

SEQ ID NO: 1690621 - RNA, 14 nt, Human
cauuaauaauaaau

SEQ ID NO: 1690622 - RNA, 22 nt, Human
cauuauucaaaguugccuaaau

SEQ ID NO: 1690623 - RNA, 21 nt, Human
cauuauucaaaguugccuaaa

SEQ ID NO: 1690624 - RNA, 18 nt, Human
cauuauucaaaguugccu

SEQ ID NO: 1690625 - RNA, 17 nt, Human
cauuauuuuauuaugaa

SEQ ID NO: 1690626 - RNA, 13 nt, Human
ccaugggauaaau

SEQ ID NO: 1690627 - RNA, 17 nt, Human
ccaugggauaaaugcca

SEQ ID NO: 1690628 - RNA, 22 nt, Human
ccauuauucaaaguugccuaaa

SEQ ID NO: 1690629 - RNA, 17 nt, Human
ccauuauucaaaguugc

SEQ ID NO: 1690630 - RNA, 20 nt, Human
ccauguuuauuacaguauaa

SEQ ID NO: 1690631 - RNA, 13 nt, Human
ccauguuuauuac

SEQ ID NO: 1690632 - RNA, 14 nt, Human
ccauuauucaaagu

SEQ ID NO: 1690633 - RNA, 19 nt, Human
ccugcaaugaagucucuga

SEQ ID NO: 1690634 - RNA, 21 nt, Human
ccugcaaugaagucucugaag

SEQ ID NO: 1690635 - RNA, 21 nt, Human
ccugcacggugaauggcuuug

SEQ ID NO: 1690636 - RNA, 20 nt, Human
ccugcaaugaagucucugaa

SEQ ID NO: 1690637 - RNA, 20 nt, Human
ccugcacggugaauggcuuu

SEQ ID NO: 1690638 - RNA, 12 nt, Human
ccuuaaaggaag

SEQ ID NO: 1690639 - RNA, 14 nt, Human
ccgugcuaaggacu

SEQ ID NO: 1690640 - RNA, 16 nt, Human
ccgugcuaaggacuug

SEQ ID NO: 1690641 - RNA, 15 nt, Human
ccgugcuaaggacuu

SEQ ID NO: 1690642 - RNA, 12 nt, Human
ccuaaauccauu

SEQ ID NO: 1690643 - RNA, 18 nt, Human
ccuaaauccauuuggaaa

SEQ ID NO: 1690644 - RNA, 17 nt, Human
ccuaaauccauuuggaa

SEQ ID NO: 1690645 - RNA, 14 nt, Human
cccugcuuucagau

SEQ ID NO: 1690646 - RNA, 17 nt, Human
cccugcuuucagauacu

SEQ ID NO: 1690647 - RNA, 23 nt, Human
cugucuugccuuuuucauuauuu

SEQ ID NO: 1690648 - RNA, 21 nt, Human
cugucuugccuuuuucauuau

SEQ ID NO: 1690649 - RNA, 12 nt, Human
cuguggugacuu

SEQ ID NO: 1690650 - RNA, 14 nt, Human
cuguggugacuuug

SEQ ID NO: 1690651 - RNA, 13 nt, Human
cuguggugacuuu

SEQ ID NO: 1690652 - RNA, 23 nt, Human
cuguggugacuuuggauaauaag

SEQ ID NO: 1690653 - RNA, 20 nt, Human
cuguggugacuuuggauaau

SEQ ID NO: 1690654 - RNA, 18 nt, Human
cuguggugacuuuggaua

SEQ ID NO: 1690655 - RNA, 17 nt, Human
cuguggugacuuuggau

SEQ ID NO: 1690656 - RNA, 15 nt, Human
cuguggugacuuugg

SEQ ID NO: 1690657 - RNA, 18 nt, Human
cugggcugaacacuccaa

SEQ ID NO: 1690658 - RNA, 14 nt, Human
cugggguuaucuga

SEQ ID NO: 1690659 - RNA, 17 nt, Human
cuggugugaacuaaacu

SEQ ID NO: 1690660 - RNA, 16 nt, Human
cuggugugaacuaaac

SEQ ID NO: 1690661 - RNA, 15 nt, Human
cugguguauguguga

SEQ ID NO: 1690662 - RNA, 22 nt, Human
cuucucagaaggcaaaugacuu

SEQ ID NO: 1690663 - RNA, 16 nt, Human
cuucucagaaggcaaa

SEQ ID NO: 1690664 - RNA, 17 nt, Human
cuucagcaaaaauauuu

SEQ ID NO: 1690665 - RNA, 23 nt, Human
cuucagcaaaaauauuuuaugau

SEQ ID NO: 1690666 - RNA, 20 nt, Human
cuucagcaaaaauauuuuau

SEQ ID NO: 1690667 - RNA, 17 nt, Human
cuucauuaauaauaaau

SEQ ID NO: 1690668 - RNA, 16 nt, Human
cuucauuaauaauaaa

SEQ ID NO: 1690669 - RNA, 17 nt, Human
cuuuaaaaaaaaaauug

SEQ ID NO: 1690670 - RNA, 14 nt, Human
cuuucauauuuuag

SEQ ID NO: 1690671 - RNA, 22 nt, Human
cuuuugauaaucaacugggcug

SEQ ID NO: 1690672 - RNA, 14 nt, Human
cuuuucugauagag

SEQ ID NO: 1690673 - RNA, 11 nt, Human
cuuuucugaua

SEQ ID NO: 1690674 - RNA, 14 nt, Human
gaaggcaaaugacu

SEQ ID NO: 1690675 - RNA, 20 nt, Human
gaagguucuggugugaacua

SEQ ID NO: 1690676 - RNA, 16 nt, Human
gaagguucugguguga

SEQ ID NO: 1690677 - RNA, 16 nt, Human
gaaggcaaaugacuuu

SEQ ID NO: 1690678 - RNA, 15 nt, Human
gaaggcaaaugacuu

SEQ ID NO: 1690679 - RNA, 16 nt, Human
gaacgcguugaaauug

SEQ ID NO: 1690680 - RNA, 19 nt, Human
gaaauacuguuugagguuu

SEQ ID NO: 1690681 - RNA, 15 nt, Human
gaaauacuguuugag

SEQ ID NO: 1690682 - RNA, 17 nt, Human
gaaauuguaauuauauc

SEQ ID NO: 1690683 - RNA, 21 nt, Human
cugauuugacauagucuggcu

SEQ ID NO: 1690684 - RNA, 23 nt, Human
cugauuugacauagucuggcugu

SEQ ID NO: 1690685 - RNA, 22 nt, Human
cugauuugacauagucuggcug

SEQ ID NO: 1690686 - RNA, 18 nt, Human
cugaguuugugcuggugu

SEQ ID NO: 1690687 - RNA, 13 nt, Human
cugaguuugugcu

SEQ ID NO: 1690688 - RNA, 23 nt, Human
cucuuugucuacaccauuaugug

SEQ ID NO: 1690689 - RNA, 23 nt, Human
cucugaagugaaacugcuuguuu

SEQ ID NO: 1690690 - RNA, 19 nt, Human
cucugaagugaaacugcuu

SEQ ID NO: 1690691 - RNA, 20 nt, Human
cuccaauuaaggauuuuaug

SEQ ID NO: 1690692 - RNA, 17 nt, Human
cuccaauuaaggauuuu

SEQ ID NO: 1690693 - RNA, 22 nt, Human
cuccaauuaaggauuuuaugcu

SEQ ID NO: 1690694 - RNA, 15 nt, Human
cuauauuuucauucu

SEQ ID NO: 1690695 - RNA, 19 nt, Human
cuauauuuucauucuccua

SEQ ID NO: 1690696 - RNA, 13 nt, Human
cucagauuuuauu

SEQ ID NO: 1690697 - RNA, 22 nt, Human
cucagauuuuauuauguaaauc

SEQ ID NO: 1690698 - RNA, 18 nt, Human
cucagauuuuauuaugua

SEQ ID NO: 1690699 - RNA, 17 nt, Human
cucagauuuuauuaugu

SEQ ID NO: 1690700 - RNA, 15 nt, Human
cucagauuuuauuau

SEQ ID NO: 1690701 - RNA, 18 nt, Human
cuauuucuauauuuucau

SEQ ID NO: 1690702 - RNA, 16 nt, Human
cuauuucuauauuuuc

SEQ ID NO: 1690703 - RNA, 14 nt, Human
cuauuucuauauuu

SEQ ID NO: 1690704 - RNA, 22 nt, Human
gagccugcacggugaauggcuu

SEQ ID NO: 1690705 - RNA, 17 nt, Human
gagccugcacggugaau

SEQ ID NO: 1690706 - RNA, 23 nt, Human
gagccugcacggugaauggcuuu

SEQ ID NO: 1690707 - RNA, 14 nt, Human
gaggaauucuguau

SEQ ID NO: 1690708 - RNA, 17 nt, Human
gaggaauucuguauaga

SEQ ID NO: 1690709 - RNA, 16 nt, Human
gaggaauucuguauag

SEQ ID NO: 1690710 - RNA, 14 nt, Human
gauagaggaagccu

SEQ ID NO: 1690711 - RNA, 22 nt, Human
gauagaggaagccugauuaaag

SEQ ID NO: 1690712 - RNA, 21 nt, Human
gauagaggaagccugauuaaa

SEQ ID NO: 1690713 - RNA, 15 nt, Human
gauagaggaagccug

SEQ ID NO: 1690714 - RNA, 16 nt, Human
gcagauuauucacuga

SEQ ID NO: 1690715 - RNA, 13 nt, Human
gcagauuauucac

SEQ ID NO: 1690716 - RNA, 21 nt, Human
gcugguguaugugugaaguga

SEQ ID NO: 1690717 - RNA, 22 nt, Human
gcuuuaaacauugguucuugua

SEQ ID NO: 1690718 - RNA, 23 nt, Human
gcuuguuuccuagcacacacuuu

SEQ ID NO: 1690719 - RNA, 15 nt, Human
gcuuguuuccuagca

SEQ ID NO: 1690720 - RNA, 20 nt, Human
gcuuuguauagaaccucuuu

SEQ ID NO: 1690721 - RNA, 14 nt, Human
gcuuuguauagaac

SEQ ID NO: 1690722 - RNA, 13 nt, Human
gcuuuguauagaa

SEQ ID NO: 1690723 - RNA, 12 nt, Human
gcuuuguauaga

SEQ ID NO: 1690724 - RNA, 15 nt, Human
ggcuuuguauagaac

SEQ ID NO: 1690725 - RNA, 13 nt, Human
ggauucuuaaagu

SEQ ID NO: 1690726 - RNA, 14 nt, Human
ggaccaaaaaccag

SEQ ID NO: 1690727 - RNA, 14 nt, Human
ucaucaguauugaa

SEQ ID NO: 1690728 - RNA, 16 nt, Human
ucauaccuacauguau

SEQ ID NO: 1690729 - RNA, 15 nt, Human
ucauaccuacaugua

SEQ ID NO: 1690730 - RNA, 23 nt, Human
ucauuauuuuauuaugaaacuug

SEQ ID NO: 1690731 - RNA, 13 nt, Human
uauuaagaaugaa

SEQ ID NO: 1690732 - RNA, 16 nt, Human
uauuaagaaugaaaua

SEQ ID NO: 1690733 - RNA, 12 nt, Human
uauguaaauccc

SEQ ID NO: 1690734 - RNA, 23 nt, Human
uauguaaaucccauuauucaaag

SEQ ID NO: 1690735 - RNA, 21 nt, Human
uauguaaaucccauuauucaa

SEQ ID NO: 1690736 - RNA, 20 nt, Human
uauguaaaucccauuauuca

SEQ ID NO: 1690737 - RNA, 19 nt, Human
uauguaaaucccauuauuc

SEQ ID NO: 1690738 - RNA, 15 nt, Human
uauguaaaucccauu

SEQ ID NO: 1690739 - RNA, 14 nt, Human
uauuacaguauaau

SEQ ID NO: 1690740 - RNA, 13 nt, Human
uauuacaguauaa

SEQ ID NO: 1690741 - RNA, 12 nt, Human
uauuacaguaua

SEQ ID NO: 1690742 - RNA, 23 nt, Human
ucacaccccagacgaugucuuca

SEQ ID NO: 1690743 - RNA, 15 nt, Human
uauuuucauucuccu

SEQ ID NO: 1690744 - RNA, 17 nt, Human
uauuuauaaucacuuuu

SEQ ID NO: 1690745 - RNA, 13 nt, Human
uauuuuauuauga

SEQ ID NO: 1690746 - RNA, 23 nt, Human
uauuuuauuaugaaacuugugua

SEQ ID NO: 1690747 - RNA, 18 nt, Human
uauuuuauuaugaaacuu

SEQ ID NO: 1690748 - RNA, 14 nt, Human
uauuuuuuuucugu

SEQ ID NO: 1690749 - RNA, 21 nt, Human
ucuucauaccuacauguauuu

SEQ ID NO: 1690750 - RNA, 18 nt, Human
ucuucauaccuacaugua

SEQ ID NO: 1690751 - RNA, 23 nt, Human
ucuucagcaaaaauauuuuauga

SEQ ID NO: 1690752 - RNA, 22 nt, Human
ucuucagcaaaaauauuuuaug

SEQ ID NO: 1690753 - RNA, 21 nt, Human
ucuucagcaaaaauauuuuau

SEQ ID NO: 1690754 - RNA, 12 nt, Human
ucuuaaaguuga

SEQ ID NO: 1690755 - RNA, 14 nt, Human
ucuuaaaguugaau

SEQ ID NO: 1690756 - RNA, 13 nt, Human
ucuuaaaguugaa

SEQ ID NO: 1690757 - RNA, 19 nt, Human
ucuuaaauaauaaagauca

SEQ ID NO: 1690758 - RNA, 15 nt, Human
ucuuaaauaauaaag

SEQ ID NO: 1690759 - RNA, 22 nt, Human
ucuuaaaguugaauuuauuggc

SEQ ID NO: 1690760 - RNA, 21 nt, Human
ucuuaaaguugaauuuauugg

SEQ ID NO: 1690761 - RNA, 20 nt, Human
ucuuaaaguugaauuuauug

SEQ ID NO: 1690762 - RNA, 19 nt, Human
ucuuaaaguugaauuuauu

SEQ ID NO: 1690763 - RNA, 16 nt, Human
ucuuaaaguugaauuu

SEQ ID NO: 1690764 - RNA, 14 nt, Human
ucugaggaauucug

SEQ ID NO: 1690765 - RNA, 19 nt, Human
ucugaggaauucuguauag

SEQ ID NO: 1690766 - RNA, 18 nt, Human
ucugaggaauucuguaua

SEQ ID NO: 1690767 - RNA, 17 nt, Human
ucugaggaauucuguau

SEQ ID NO: 1690768 - RNA, 16 nt, Human
ucugaggaauucugua

SEQ ID NO: 1690769 - RNA, 15 nt, Human
ucugaggaauucugu

SEQ ID NO: 1690770 - RNA, 15 nt, Human
ucugacaucucugca

SEQ ID NO: 1690771 - RNA, 14 nt, Human
ucugacaucucugc

SEQ ID NO: 1690772 - RNA, 12 nt, Human
ucugacaucucu

SEQ ID NO: 1690773 - RNA, 16 nt, Human
ucucugaagugaaacu

SEQ ID NO: 1690774 - RNA, 16 nt, Human
ucuaugcugaguuugu

SEQ ID NO: 1690775 - RNA, 20 nt, Human
ucuaugcugaguuugugcug

SEQ ID NO: 1690776 - RNA, 11 nt, Human
ucccuggccuu

SEQ ID NO: 1690777 - RNA, 15 nt, Human
ucccuggccuuucau

SEQ ID NO: 1690778 - RNA, 21 nt, Human
uguacaaaguauuaagcauau

SEQ ID NO: 1690779 - RNA, 15 nt, Human
uguacaaaguauuaa

SEQ ID NO: 1690780 - RNA, 20 nt, Human
uguacaaaguauuaagcaua

SEQ ID NO: 1690781 - RNA, 19 nt, Human
uguacaaaguauuaagcau

SEQ ID NO: 1690782 - RNA, 18 nt, Human
uguacaaaguauuaagca

SEQ ID NO: 1690783 - RNA, 17 nt, Human
uguacaaaguauuaagc

SEQ ID NO: 1690784 - RNA, 18 nt, Human
ugguugcuuuaauaucau

SEQ ID NO: 1690785 - RNA, 14 nt, Human
ugguugcuuuaaua

SEQ ID NO: 1690786 - RNA, 15 nt, Human
uggugacuuuggaua

SEQ ID NO: 1690787 - RNA, 23 nt, Human
uggugacuuuggauaauaaggaa

SEQ ID NO: 1690788 - RNA, 19 nt, Human
uggugacuuuggauaauaa

SEQ ID NO: 1690789 - RNA, 18 nt, Human
uggugacuuuggauaaua

SEQ ID NO: 1690790 - RNA, 16 nt, Human
uggugacuuuggauaa

SEQ ID NO: 1690791 - RNA, 18 nt, Human
ugguucuuguauuaagaa

SEQ ID NO: 1690792 - RNA, 14 nt, Human
ugguucuuguauua

SEQ ID NO: 1690793 - RNA, 19 nt, Human
ugguucuuguauuaagaau

SEQ ID NO: 1690794 - RNA, 23 nt, Human
uguauagauuagagaguguugaa

SEQ ID NO: 1690795 - RNA, 21 nt, Human
uguauagauuagaauucugua

SEQ ID NO: 1690796 - RNA, 15 nt, Human
uguauagauuagaau

SEQ ID NO: 1690797 - RNA, 23 nt, Human
uguauagaaccucuuugucuaca

SEQ ID NO: 1690798 - RNA, 15 nt, Human
uguauuuguuugcau

SEQ ID NO: 1690799 - RNA, 22 nt, Human
ugucucagauuuuauuauguaa

SEQ ID NO: 1690800 - RNA, 20 nt, Human
ugucucagauuuuauuaugu

SEQ ID NO: 1690801 - RNA, 16 nt, Human
ugucucagauuuuauu

SEQ ID NO: 1690802 - RNA, 18 nt, Human
ugucuacaccauuaugug

SEQ ID NO: 1690803 - RNA, 17 nt, Human
ugucuacaccauuaugu

SEQ ID NO: 1690804 - RNA, 17 nt, Human
uggaacgcguugaaauu

SEQ ID NO: 1690805 - RNA, 16 nt, Human
uggaacgcguugaaau

SEQ ID NO: 1690806 - RNA, 15 nt, Human
uggaacgcguugaaa

SEQ ID NO: 1690807 - RNA, 14 nt, Human
uggaacgcguugaa

SEQ ID NO: 1690808 - RNA, 15 nt, Human
uggaccaaaaaccag

SEQ ID NO: 1690809 - RNA, 13 nt, Human
uggcuuuucugau

SEQ ID NO: 1690810 - RNA, 12 nt, Human
ugggauaaaugc

SEQ ID NO: 1690811 - RNA, 14 nt, Human
ugggauaaaugcca

SEQ ID NO: 1690812 - RNA, 13 nt, Human
ugggauaaaugcc

SEQ ID NO: 1690813 - RNA, 23 nt, Human
ugggguuaucugaagucagaucu

SEQ ID NO: 1690814 - RNA, 21 nt, Human
ugaugccaaguuguuugagaa

SEQ ID NO: 1690815 - RNA, 15 nt, Human
ugaugccaaguuguu

SEQ ID NO: 1690816 - RNA, 19 nt, Human
ugaugccaaguuguuugag

SEQ ID NO: 1690817 - RNA, 17 nt, Human
ugacugauucuucagca

SEQ ID NO: 1690818 - RNA, 16 nt, Human
ugacugauucuucagc

SEQ ID NO: 1690819 - RNA, 15 nt, Human
ugacugauucuucag

SEQ ID NO: 1690820 - RNA, 14 nt, Human
ugacugauucuuca

SEQ ID NO: 1690821 - RNA, 13 nt, Human
ugacugauucuuc

SEQ ID NO: 1690822 - RNA, 13 nt, Human
ugagaaauuaagu

SEQ ID NO: 1690823 - RNA, 14 nt, Human
ugagaaauuaagua

SEQ ID NO: 1690824 - RNA, 17 nt, Human
ugagcaucacaguuuug

SEQ ID NO: 1690825 - RNA, 22 nt, Human
ugcaaugaagucucugaaguga

SEQ ID NO: 1690826 - RNA, 18 nt, Human
ugcaaugaagucucugaa

SEQ ID NO: 1690827 - RNA, 15 nt, Human
ugcaaugaagucucu

SEQ ID NO: 1690828 - RNA, 17 nt, Human
ugcccugcuuucagaua

SEQ ID NO: 1690829 - RNA, 16 nt, Human
ugcccugcuuucagau

SEQ ID NO: 1690830 - RNA, 12 nt, Human
ugcccugcuuuc

SEQ ID NO: 1690831 - RNA, 21 nt, Human
ugccuaaggacuucuuuaauu

SEQ ID NO: 1690832 - RNA, 13 nt, Human
ugccuaaggacuu

SEQ ID NO: 1690833 - RNA, 12 nt, Human
ugccuaaggacu

SEQ ID NO: 1690834 - RNA, 20 nt, Human
ugccuaaggacuucuuuaau

SEQ ID NO: 1690835 - RNA, 16 nt, Human
ugccuaaggacuucuu

SEQ ID NO: 1690836 - RNA, 15 nt, Human
ugccuaaggacuucu

SEQ ID NO: 1690837 - RNA, 14 nt, Human
ugccuaaggacuuc

SEQ ID NO: 1690838 - RNA, 13 nt, Human
uuuuauauuuacu

SEQ ID NO: 1690839 - RNA, 21 nt, Human
uuuuaugacuucauuaauaau

SEQ ID NO: 1690840 - RNA, 20 nt, Human
uuuuaugacuucauuaauaa

SEQ ID NO: 1690841 - RNA, 20 nt, Human
uuuccacauaaggaaacugg

SEQ ID NO: 1690842 - RNA, 23 nt, Human
uuuccacauaaggaaacuggguu

SEQ ID NO: 1690843 - RNA, 22 nt, Human
uuuggaccaaaaaccaguauug

SEQ ID NO: 1690844 - RNA, 21 nt, Human
uuuggaccaaaaaccaguauu

SEQ ID NO: 1690845 - RNA, 18 nt, Human
uuuggaccaaaaaccagu

SEQ ID NO: 1690846 - RNA, 15 nt, Human
uuuggaaaucuuuaa

SEQ ID NO: 1690847 - RNA, 24 nt, Human
uuuggaccaaaaaccaguauugua

SEQ ID NO: 1690848 - RNA, 21 nt, Human
uuuuuccacauaaggaaacug

SEQ ID NO: 1690849 - RNA, 22 nt, Human
uuuuucauuauuuuauuaugaa

SEQ ID NO: 1690850 - RNA, 13 nt, Human
uuuuucauuauuu

SEQ ID NO: 1690851 - RNA, 23 nt, Human
uugugcgcuaaacuuuucugaua

SEQ ID NO: 1690852 - RNA, 22 nt, Human
uugugcgcuaaacuuuucugau

SEQ ID NO: 1690853 - RNA, 19 nt, Human
uugugcugggguuaucuga

SEQ ID NO: 1690854 - RNA, 21 nt, Human
uuguuugagaaauuaaguauc

SEQ ID NO: 1690855 - RNA, 15 nt, Human
uuguuugagaaauua

SEQ ID NO: 1690856 - RNA, 17 nt, Human
uuguuguuuguuuaguc

SEQ ID NO: 1690857 - RNA, 17 nt, Human
uuguuagaucuaguuca

SEQ ID NO: 1690858 - RNA, 14 nt, Human
uuguacucaauuuu

SEQ ID NO: 1690859 - RNA, 15 nt, Human
uuguacucaauuuua

SEQ ID NO: 1690860 - RNA, 18 nt, Human
uuguauuaagaaugaaau

SEQ ID NO: 1690861 - RNA, 13 nt, Human
uuguauuaagaau

SEQ ID NO: 1690862 - RNA, 12 nt, Human
uuguauuaagaa

SEQ ID NO: 1690863 - RNA, 19 nt, Human
uugucuacaccauuaugug

SEQ ID NO: 1690864 - RNA, 20 nt, Human
uugucuacaccauuaugugc

SEQ ID NO: 1690865 - RNA, 13 nt, Human
uugucucagauuu

SEQ ID NO: 1690866 - RNA, 20 nt, Human
uugucucagauuuuauuaug

SEQ ID NO: 1690867 - RNA, 16 nt, Human
uugucucagauuuuau

SEQ ID NO: 1690868 - RNA, 22 nt, Human
uugucucagauuuuauuaugua

SEQ ID NO: 1690869 - RNA, 16 nt, Human
uuggguguauugugcg

SEQ ID NO: 1690870 - RNA, 15 nt, Human
uuggguguauugugc

SEQ ID NO: 1690871 - RNA, 13 nt, Human
uuggguguauugu

SEQ ID NO: 1690872 - RNA, 21 nt, Human
uuguuuggaccaaaaaccagu

SEQ ID NO: 1690873 - RNA, 16 nt, Human
uuuaacaacagcuggu

SEQ ID NO: 1690874 - RNA, 18 nt, Human
uuuaauaauuauaugcua

SEQ ID NO: 1690875 - RNA, 21 nt, Human
uuuaauaauuauaugcuauuu

SEQ ID NO: 1690876 - RNA, 14 nt, Human
uuuauuauguaaau

SEQ ID NO: 1690877 - RNA, 17 nt, Human
uuuauuauguaaauccc

SEQ ID NO: 1690878 - RNA, 16 nt, Human
uuuauuauguaaaucc

SEQ ID NO: 1690879 - RNA, 21 nt, Human
uuucagauacuggauuguacu

SEQ ID NO: 1690880 - RNA, 13 nt, Human
uuucagauacugg

SEQ ID NO: 1690881 - RNA, 21 nt, Human
uuccugcaaugaagucucuga

SEQ ID NO: 1690882 - RNA, 13 nt, Human
uuccugcaaugaa

SEQ ID NO: 1690883 - RNA, 21 nt, Human
uucugauagaggaagccugau

SEQ ID NO: 1690884 - RNA, 13 nt, Human
uucugauagagga

SEQ ID NO: 1690885 - RNA, 22 nt, Human
uugaauuuauuggcuuuucuga

SEQ ID NO: 1690886 - RNA, 18 nt, Human
uugaauuuauuggcuuuu

SEQ ID NO: 1690887 - RNA, 15 nt, Human
uugaauuuauuggcu

SEQ ID NO: 1690888 - RNA, 21 nt, Human
uugaauuuuguguuagagauu

SEQ ID NO: 1690889 - RNA, 17 nt, Human
uugaauuuuguguuaga

SEQ ID NO: 1690890 - RNA, 20 nt, Human
uuauuuuauuaugaaacuug

SEQ ID NO: 1690891 - RNA, 14 nt, Human
uuauuuuauuauga

SEQ ID NO: 1690892 - RNA, 16 nt, Human
uuauuuuauuaugaaa

SEQ ID NO: 1690893 - RNA, 15 nt, Human
uuauuuuauuaugaa

SEQ ID NO: 1690894 - RNA, 20 nt, Human
uucagauacuggauuguacu

SEQ ID NO: 1690895 - RNA, 16 nt, Human
uucagauacuggauug

SEQ ID NO: 1690896 - RNA, 16 nt, Human
uuauaugcuauuucua

SEQ ID NO: 1690897 - RNA, 18 nt, Human
uuauaugcuauuucuaua

SEQ ID NO: 1690898 - RNA, 23 nt, Human
uuauaucugaggaauucuguaua

SEQ ID NO: 1690899 - RNA, 22 nt, Human
uuauaucugaggaauucuguau

SEQ ID NO: 1690900 - RNA, 14 nt, Human
uuauaucugaggaa

SEQ ID NO: 1690901 - RNA, 21 nt, Human
uuauaucugaggaauucugua

SEQ ID NO: 1690902 - RNA, 20 nt, Human
uuauaucugaggaauucugu

SEQ ID NO: 1690903 - RNA, 13 nt, Human
uuauaaucacuuu

SEQ ID NO: 1690904 - RNA, 16 nt, Human
uuauuacaguauaauu

SEQ ID NO: 1690905 - RNA, 20 nt, Human
cacauugguguuguacucaa

SEQ ID NO: 1690906 - RNA, 22 nt, Human
caauuaaggauuuuaugcuuua

SEQ ID NO: 1690907 - RNA, 21 nt, Human
caauuaaggauuuuaugcuuu

SEQ ID NO: 1690908 - RNA, 23 nt, Human
caauuaaggauuuuaugcuuuaa

SEQ ID NO: 1690909 - RNA, 20 nt, Human
caauuaaggauuuuaugcuu

SEQ ID NO: 1690910 - RNA, 15 nt, Human
caauuaaggauuuua

SEQ ID NO: 1690911 - RNA, 13 nt, Human
caauuaaggauuu

SEQ ID NO: 1690912 - RNA, 19 nt, Human
caaaguugccuaaauccau

SEQ ID NO: 1690913 - RNA, 15 nt, Human
cacccacccuuuuuu

SEQ ID NO: 1690914 - RNA, 20 nt, Human
aaaaaccaguauuguacaaa

SEQ ID NO: 1690915 - RNA, 18 nt, Human
aaaaaauuggggauucuu

SEQ ID NO: 1690916 - RNA, 16 nt, Human
acuggugacugauucu

SEQ ID NO: 1690917 - RNA, 14 nt, Human
acuggugacugauu

SEQ ID NO: 1690918 - RNA, 18 nt, Human
acuguuugagguuuuuaa

SEQ ID NO: 1690919 - RNA, 23 nt, Human
acuguuugagguuuuuaagccuu

SEQ ID NO: 1690920 - RNA, 15 nt, Human
aauuuuguuucugua

SEQ ID NO: 1690921 - RNA, 14 nt, Human
aauuuuguuucugu

SEQ ID NO: 1690922 - RNA, 13 nt, Human
aauuuuguuucug

SEQ ID NO: 1690923 - RNA, 15 nt, Human
aaaccaugggauaaa

SEQ ID NO: 1690924 - RNA, 20 nt, Human
aaaccaugggauaaaugcca

SEQ ID NO: 1690925 - RNA, 10 nt, Human
aaauaaauaa

SEQ ID NO: 1690926 - RNA, 18 nt, Human
aaaucugugaacuugaaa

SEQ ID NO: 1690927 - RNA, 16 nt, Human
aaaucugugaacuuga

SEQ ID NO: 1690928 - RNA, 15 nt, Human
aaaucugugaacuug

SEQ ID NO: 1690929 - RNA, 18 nt, Human
aaauagcuagacugguga

SEQ ID NO: 1690930 - RNA, 17 nt, Human
aacggaugauuucuaug

SEQ ID NO: 1690931 - RNA, 16 nt, Human
aacggaugauuucuau

SEQ ID NO: 1690932 - RNA, 15 nt, Human
aacggaugauuucua

SEQ ID NO: 1690933 - RNA, 14 nt, Human
aacggaugauuucu

SEQ ID NO: 1690934 - RNA, 21 nt, Human
aacagcuggugcccugcuuuc

SEQ ID NO: 1690935 - RNA, 20 nt, Human
aacagcuggugcccugcuuu

SEQ ID NO: 1690936 - RNA, 19 nt, Human
aacagcuggugcccugcuu

SEQ ID NO: 1690937 - RNA, 21 nt, Human
aaggacuucuuuaauuuugga

SEQ ID NO: 1690938 - RNA, 20 nt, Human
aaggacuucuuuaauuuugg

SEQ ID NO: 1690939 - RNA, 15 nt, Human
aaggacuucuuuaau

SEQ ID NO: 1690940 - RNA, 14 nt, Human
aaggacuucuuuaa

SEQ ID NO: 1690941 - RNA, 12 nt, Human
aaguugccuaaa

SEQ ID NO: 1690942 - RNA, 14 nt, Human
aagucuguuuuaug

SEQ ID NO: 1690943 - RNA, 13 nt, Human
aagucuguuuuau

SEQ ID NO: 1690944 - RNA, 12 nt, Human
aagucuguuuua

SEQ ID NO: 1690945 - RNA, 13 nt, Human
aaugguuaaaaga

SEQ ID NO: 1690946 - RNA, 12 nt, Human
aauauuaaagcc

SEQ ID NO: 1690947 - RNA, 19 nt, Human
aaguugccuaaauccauuu

SEQ ID NO: 1690948 - RNA, 18 nt, Human
aaguugccuaaauccauu

SEQ ID NO: 1690949 - RNA, 17 nt, Human
aaguugccuaaauccau

SEQ ID NO: 1690950 - RNA, 16 nt, Human
aaguugccuaaaucca

SEQ ID NO: 1690951 - RNA, 15 nt, Human
aaguugccuaaaucc

SEQ ID NO: 1690952 - RNA, 13 nt, Human
aaugaaauacugu

SEQ ID NO: 1690953 - RNA, 16 nt, Human
aaugaagucucugaag

SEQ ID NO: 1690954 - RNA, 14 nt, Human
aaugaagucucuga

SEQ ID NO: 1690955 - RNA, 23 nt, Human
aaugaagucucugaagugaaacu

SEQ ID NO: 1690956 - RNA, 13 nt, Human
agaguguugaaac

SEQ ID NO: 1690957 - RNA, 14 nt, Human
auguauuuguuugc

SEQ ID NO: 1690958 - RNA, 21 nt, Human
augguccgugcuaaggacuug

SEQ ID NO: 1690959 - RNA, 20 nt, Human
augguccgugcuaaggacuu

SEQ ID NO: 1690960 - RNA, 19 nt, Human
augguccgugcuaaggacu

SEQ ID NO: 1690961 - RNA, 22 nt, Human
augucuucauaccuacauguau

SEQ ID NO: 1690962 - RNA, 21 nt, Human
augucuucauaccuacaugua

SEQ ID NO: 1690963 - RNA, 13 nt, Human
augugugaaguga

SEQ ID NO: 1690964 - RNA, 20 nt, Human
auauuuacuaaaauggacug

SEQ ID NO: 1690965 - RNA, 18 nt, Human
auauuuacuaaaauggac

SEQ ID NO: 1690966 - RNA, 23 nt, Human
auaugcuauuucuauauuuucau

SEQ ID NO: 1690967 - RNA, 22 nt, Human
auaugcuauuucuauauuuuca

SEQ ID NO: 1690968 - RNA, 15 nt, Human
auaugcuauuucuau

SEQ ID NO: 1690969 - RNA, 21 nt, Human
auaugcuauuucuauauuuuc

SEQ ID NO: 1690970 - RNA, 19 nt, Human
auaugcuauuucuauauuu

SEQ ID NO: 1690971 - RNA, 18 nt, Human
auaugcuauuucuauauu

SEQ ID NO: 1690972 - RNA, 16 nt, Human
auaugcuauuucuaua

SEQ ID NO: 1690973 - RNA, 22 nt, Human
auaucaucaguauugaagcauu

SEQ ID NO: 1690974 - RNA, 17 nt, Human
auaauuaacauguuaaa

SEQ ID NO: 1690975 - RNA, 15 nt, Human
auaauuaacauguua

SEQ ID NO: 1690976 - RNA, 15 nt, Human
auaaggaaaaguuua

SEQ ID NO: 1690977 - RNA, 16 nt, Human
auaaggaaaaguuuaa

SEQ ID NO: 1690978 - RNA, 21 nt, Human
auaccuacauguauuuguuug

SEQ ID NO: 1690979 - RNA, 15 nt, Human
auaacauaaaucugu

SEQ ID NO: 1690980 - RNA, 14 nt, Human
auaacauaaaucug

SEQ ID NO: 1690981 - RNA, 19 nt, Human
auaacauaaaucugugaac

SEQ ID NO: 1690982 - RNA, 18 nt, Human
auaacauaaaucugugaa

SEQ ID NO: 1690983 - RNA, 17 nt, Human
auaacauaaaucuguga

SEQ ID NO: 1690984 - RNA, 23 nt, Human
gucuucauaccuacauguauuug

SEQ ID NO: 1690985 - RNA, 14 nt, Human
aacauaaaucugug

SEQ ID NO: 1690986 - RNA, 12 nt, Human
aacauaaaucug

SEQ ID NO: 1690987 - RNA, 15 nt, Human
aacauaaaucuguga

SEQ ID NO: 1690988 - RNA, 23 nt, Human
aacauguuaaaccaugggauaaa

SEQ ID NO: 1690989 - RNA, 23 nt, Human
guguugaaacggaugauuucuau

SEQ ID NO: 1690990 - RNA, 21 nt, Human
guguugaaacggaugauuucu

SEQ ID NO: 1690991 - RNA, 20 nt, Human
aacuuguguaaauacaauuu

SEQ ID NO: 1690992 - RNA, 15 nt, Human
aacuuguguaaauac

SEQ ID NO: 1690993 - RNA, 14 nt, Human
aacuuguguaaaua

SEQ ID NO: 1690994 - RNA, 22 nt, Human
gugcugggguuaucugaaguca

SEQ ID NO: 1690995 - RNA, 19 nt, Human
gugcugguguaugugugaa

SEQ ID NO: 1690996 - RNA, 14 nt, Human
aauaaaaaauuaug

SEQ ID NO: 1690997 - RNA, 16 nt, Human
aauaaaaaauuaugac

SEQ ID NO: 1690998 - RNA, 15 nt, Human
aauaaaaaauuauga

SEQ ID NO: 1690999 - RNA, 21 nt, Human
aauaaauagcuagacugguga

SEQ ID NO: 1691000 - RNA, 15 nt, Human
aauaaggaaaaguuu

SEQ ID NO: 1691001 - RNA, 13 nt, Human
aauaaggaaaagu

SEQ ID NO: 1691002 - RNA, 22 nt, Human
aauaaggaaaaguuuaauauua

SEQ ID NO: 1691003 - RNA, 19 nt, Human
aauaaggaaaaguuuaaua

SEQ ID NO: 1691004 - RNA, 16 nt, Human
aauaaggaaaaguuua

SEQ ID NO: 1691005 - RNA, 23 nt, Human
aauaauuauaugcuauuucuaua

SEQ ID NO: 1691006 - RNA, 22 nt, Human
aauaauuauaugcuauuucuau

SEQ ID NO: 1691007 - RNA, 21 nt, Human
aauaauuauaugcuauuucua

SEQ ID NO: 1691008 - RNA, 20 nt, Human
aauaauuauaugcuauuucu

SEQ ID NO: 1691009 - RNA, 15 nt, Human
aauaauuauaugcua

SEQ ID NO: 1691010 - RNA, 14 nt, Human
aauaauuauaugcu

SEQ ID NO: 1691011 - RNA, 23 nt, Human
uaaaucccauuauucaaaguugc

SEQ ID NO: 1691012 - RNA, 19 nt, Human
uaaaucgcuuuugauaauc

SEQ ID NO: 1691013 - RNA, 18 nt, Human
uaaaucgcuuuugauaau

SEQ ID NO: 1691014 - RNA, 23 nt, Human
uaaauagcuagacuggugacuga

SEQ ID NO: 1691015 - RNA, 19 nt, Human
uaaauagcuagacugguga

SEQ ID NO: 1691016 - RNA, 23 nt, Human
uaaauacaauuuuguuucuguac

SEQ ID NO: 1691017 - RNA, 22 nt, Human
uaaauacaauuuuguuucugua

SEQ ID NO: 1691018 - RNA, 15 nt, Human
uaaauacaauuuugu

SEQ ID NO: 1691019 - RNA, 13 nt, Human
uaaauacaauuuu

SEQ ID NO: 1691020 - RNA, 23 nt, Human
aauacaauuuuguuucuguacuu

SEQ ID NO: 1691021 - RNA, 22 nt, Human
aauacaauuuuguuucuguacu

SEQ ID NO: 1691022 - RNA, 13 nt, Human
aauacaauuuugu

SEQ ID NO: 1691023 - RNA, 12 nt, Human
aauacaauuuug

SEQ ID NO: 1691024 - RNA, 20 nt, Human
aauacaauuuuguuucugua

SEQ ID NO: 1691025 - RNA, 18 nt, Human
aauacaauuuuguuucug

SEQ ID NO: 1691026 - RNA, 17 nt, Human
aauacaauuuuguuucu

SEQ ID NO: 1691027 - RNA, 15 nt, Human
aauacaauuuuguuu

SEQ ID NO: 1691028 - RNA, 16 nt, Human
uaacaacagcuggugc

SEQ ID NO: 1691029 - RNA, 22 nt, Human
uaaaccaugggauaaaugccau

SEQ ID NO: 1691030 - RNA, 21 nt, Human
uaaaccaugggauaaaugcca

SEQ ID NO: 1691031 - RNA, 20 nt, Human
uaaaccaugggauaaaugcc

SEQ ID NO: 1691032 - RNA, 18 nt, Human
uaaaccaugggauaaaug

SEQ ID NO: 1691033 - RNA, 21 nt, Human
aaguuuaauauuaaagccaug

SEQ ID NO: 1691034 - RNA, 20 nt, Human
aaguuuaauauuaaagccau

SEQ ID NO: 1691035 - RNA, 19 nt, Human
aaguuuaauauuaaagcca

SEQ ID NO: 1691036 - RNA, 23 nt, Human
aaggcugaugccaaguuguuuga

SEQ ID NO: 1691037 - RNA, 10 nt, Human
guuucuguac

SEQ ID NO: 1691038 - RNA, 14 nt, Human
guuugcauagguga

SEQ ID NO: 1691039 - RNA, 15 nt, Human
guuucuguacuuuuu

SEQ ID NO: 1691040 - RNA, 14 nt, Human
aaguauuaagcaua

SEQ ID NO: 1691041 - RNA, 13 nt, Human
aaguauuaagcau

SEQ ID NO: 1691042 - RNA, 16 nt, Human
aaggaagguucuggug

SEQ ID NO: 1691043 - RNA, 22 nt, Human
aauuaaggauuuuaugcuuuaa

SEQ ID NO: 1691044 - RNA, 20 nt, Human
aauuaaggauuuuaugcuuu

SEQ ID NO: 1691045 - RNA, 16 nt, Human
aauuaaggauuuuaug

SEQ ID NO: 1691046 - RNA, 18 nt, Human
aauuaacauguuaaacca

SEQ ID NO: 1691047 - RNA, 14 nt, Human
aauuaacauguuaa

SEQ ID NO: 1691048 - RNA, 13 nt, Human
aauuaacauguua

SEQ ID NO: 1691049 - RNA, 17 nt, Human
uaauuauaucugaggaa

SEQ ID NO: 1691050 - RNA, 13 nt, Human
uaauuauaucuga

SEQ ID NO: 1691051 - RNA, 21 nt, Human
uaauuauaugcuauuucuaua

SEQ ID NO: 1691052 - RNA, 14 nt, Human
uagaaccucuuugu

SEQ ID NO: 1691053 - RNA, 21 nt, Human
uagaggaagccugauuaaaga

SEQ ID NO: 1691054 - RNA, 14 nt, Human
uacucaauuuuaac

SEQ ID NO: 1691055 - RNA, 13 nt, Human
uacucaauuuuaa

SEQ ID NO: 1691056 - RNA, 12 nt, Human
uacucaauuuua

SEQ ID NO: 1691057 - RNA, 18 nt, Human
aauuugaauuuuguguua

SEQ ID NO: 1691058 - RNA, 16 nt, Human
aauuugaauuuugugu

SEQ ID NO: 1691059 - RNA, 13 nt, Human
aauuugaauuuug

SEQ ID NO: 1691060 - RNA, 22 nt, Human
uauucacugauuugacauaguc

SEQ ID NO: 1691061 - RNA, 19 nt, Human
uauucacugauuugacaua

SEQ ID NO: 1691062 - RNA, 13 nt, Human
uauucacugauuu

SEQ ID NO: 1691063 - RNA, 23 nt, Human
uauucaaaguugccuaaauccau

SEQ ID NO: 1691064 - RNA, 22 nt, Human
uauucaaaguugccuaaaucca

SEQ ID NO: 1691065 - RNA, 21 nt, Human
uauucaaaguugccuaaaucc

SEQ ID NO: 1691066 - RNA, 18 nt, Human
uauucaaaguugccuaaa

SEQ ID NO: 1691067 - RNA, 12 nt, Human
uauuaaagccau

SEQ ID NO: 1691068 - RNA, 14 nt, Human
uauuaaagccaugu

SEQ ID NO: 1691069 - RNA, 13 nt, Human
uauuaaagccaug

SEQ ID NO: 1691070 - RNA, 21 nt, Human
uauuacaguauaauuaacaug

SEQ ID NO: 1691071 - RNA, 20 nt, Human
uauuacaguauaauuaacau

SEQ ID NO: 1691072 - RNA, 18 nt, Human
uauuacaguauaauuaac

SEQ ID NO: 1691073 - RNA, 16 nt, Human
uauuacaguauaauua

SEQ ID NO: 1691074 - RNA, 20 nt, Human
uauuaaagccauguuuauua

SEQ ID NO: 1691075 - RNA, 18 nt, Human
uauuaaagccauguuuau

SEQ ID NO: 1691076 - RNA, 17 nt, Human
uauuaaagccauguuua

SEQ ID NO: 1691077 - RNA, 20 nt, Human
acagcuggugcccugcuuuc

SEQ ID NO: 1691078 - RNA, 17 nt, Human
acagcuggugcccugcu

SEQ ID NO: 1691079 - RNA, 23 nt, Human
acaguauaauuaacauguuaaac

SEQ ID NO: 1691080 - RNA, 21 nt, Human
acaguauaauuaacauguuaa

SEQ ID NO: 1691081 - RNA, 18 nt, Human
uauuuacuaaaauggacu

SEQ ID NO: 1691082 - RNA, 23 nt, Human
uauuguacaaaguauuaagcaua

SEQ ID NO: 1691083 - RNA, 22 nt, Human
uauuguacaaaguauuaagcau

SEQ ID NO: 1691084 - RNA, 21 nt, Human
uauuguacaaaguauuaagca

SEQ ID NO: 1691085 - RNA, 16 nt, Human
uauuguacaaaguauu

SEQ ID NO: 1691086 - RNA, 15 nt, Human
uauuguacaaaguau

SEQ ID NO: 1691087 - RNA, 19 nt, Human
uauugaagcauuuuauaaa

SEQ ID NO: 1691088 - RNA, 17 nt, Human
uauugaagcauuuuaua

SEQ ID NO: 1691089 - RNA, 16 nt, Human
uauugaagcauuuuau

SEQ ID NO: 1691090 - RNA, 15 nt, Human
uauugaagcauuuua

SEQ ID NO: 1691091 - RNA, 13 nt, Human
uauugaagcauuu

SEQ ID NO: 1691092 - RNA, 12 nt, Human
uauugaagcauu

SEQ ID NO: 1691093 - RNA, 22 nt, Human
uauuggcuuuucugauccaguu

SEQ ID NO: 1691094 - RNA, 21 nt, Human
uauuggcuuuucugauccagu

SEQ ID NO: 1691095 - RNA, 14 nt, Human
uauuggcuuuucug

SEQ ID NO: 1691096 - RNA, 18 nt, Human
uauuggcuuuucugaucc

SEQ ID NO: 1691097 - RNA, 17 nt, Human
uauuggcuuuucugauc

SEQ ID NO: 1691098 - RNA, 16 nt, Human
uauuggcuuuucugau

SEQ ID NO: 1691099 - RNA, 15 nt, Human
uauuggcuuuucuga

SEQ ID NO: 1691100 - RNA, 17 nt, Human
acacuccaauuaaggau

SEQ ID NO: 1691101 - RNA, 16 nt, Human
acacuccaauuaagga

SEQ ID NO: 1691102 - RNA, 15 nt, Human
acacuccaauuaagg

SEQ ID NO: 1691103 - RNA, 20 nt, Human
uauagauuagaauucuguau

SEQ ID NO: 1691104 - RNA, 22 nt, Human
uauagauuagagaguguugaaa

SEQ ID NO: 1691105 - RNA, 19 nt, Human
uauagauuagagaguguug

SEQ ID NO: 1691106 - RNA, 20 nt, Human
uaucaccugucuugccuuuu

SEQ ID NO: 1691107 - RNA, 10 nt, Human
uaugauccag

SEQ ID NO: 1691108 - RNA, 19 nt, Human
uaugauccagcagauuauu

SEQ ID NO: 1691109 - RNA, 11 nt, Human
uaugauccagc

SEQ ID NO: 1691110 - RNA, 15 nt, Human
uaugcugaguuugug

SEQ ID NO: 1691111 - RNA, 22 nt, Human
uaugauccagcagauuauucac

SEQ ID NO: 1691112 - RNA, 21 nt, Human
uaugauccagcagauuauuca

SEQ ID NO: 1691113 - RNA, 20 nt, Human
uaugauccagcagauuauuc

SEQ ID NO: 1691114 - RNA, 22 nt, Human
ucccuauuuuuuuucuguuaua

SEQ ID NO: 1691115 - RNA, 21 nt, Human
ucccuauuuuuuuucuguuau

SEQ ID NO: 1691116 - RNA, 13 nt, Human
acuauauauguga

SEQ ID NO: 1691117 - RNA, 21 nt, Human
acuccaauuaaggauuuuaug

SEQ ID NO: 1691118 - RNA, 17 nt, Human
acuccaauuaaggauuu

SEQ ID NO: 1691119 - RNA, 15 nt, Human
uccgugcuaaggacu

SEQ ID NO: 1691120 - RNA, 14 nt, Human
uccgugcuaaggac

SEQ ID NO: 1691121 - RNA, 19 nt, Human
uccuagcacacacuuuugg

SEQ ID NO: 1691122 - RNA, 18 nt, Human
uccuagcacacacuuuug

SEQ ID NO: 1691123 - RNA, 17 nt, Human
uccuagcacacacuuuu

SEQ ID NO: 1691124 - RNA, 22 nt, Human
acucuccauuuaauaauuauau

SEQ ID NO: 1691125 - RNA, 13 nt, Human
acuggauuguacu

SEQ ID NO: 1691126 - RNA, 16 nt, Human
acuggauuguacuuug

SEQ ID NO: 1691127 - RNA, 20 nt, Human
uccugcaaugaagucucuga

SEQ ID NO: 1691128 - RNA, 18 nt, Human
uccugcaaugaagucucu

SEQ ID NO: 1691129 - RNA, 15 nt, Human
uccugcaaugaaguc

SEQ ID NO: 1691130 - RNA, 21 nt, Human
uccugcaaugaagucucugaa

SEQ ID NO: 1691131 - RNA, 18 nt, Human
uccacauaaggaaacugg

SEQ ID NO: 1691132 - RNA, 21 nt, Human
ucagaucugccuaaggacuuc

SEQ ID NO: 1691133 - RNA, 13 nt, Human
ucagauuuuauua

SEQ ID NO: 1691134 - RNA, 15 nt, Human
ucagauuuuauuaug

SEQ ID NO: 1691135 - RNA, 14 nt, Human
ucagauuuuauuau

SEQ ID NO: 1691136 - RNA, 22 nt, Human
ucagauuuuauuauguaaaucc

SEQ ID NO: 1691137 - RNA, 20 nt, Human
ucagauuuuauuauguaaau

SEQ ID NO: 1691138 - RNA, 19 nt, Human
ucagauuuuauuauguaaa

SEQ ID NO: 1691139 - RNA, 16 nt, Human
ucagauuuuauuaugu

SEQ ID NO: 1691140 - RNA, 14 nt, Human
agcagauuauucac

SEQ ID NO: 1691141 - RNA, 16 nt, Human
agcagauuauucacug

SEQ ID NO: 1691142 - RNA, 15 nt, Human
agcagauuauucacu

SEQ ID NO: 1691143 - RNA, 20 nt, Human
agcagauuauucacugauuu

SEQ ID NO: 1691144 - RNA, 19 nt, Human
agcagauuauucacugauu

SEQ ID NO: 1691145 - RNA, 16 nt, Human
ugaggaauucuguaua

SEQ ID NO: 1691146 - RNA, 15 nt, Human
ugaggaauucuguau

SEQ ID NO: 1691147 - RNA, 14 nt, Human
ugaggaauucugua

SEQ ID NO: 1691148 - RNA, 19 nt, Human
ugaggaauucuguauagau

SEQ ID NO: 1691149 - RNA, 18 nt, Human
ugaggaauucuguauaga

SEQ ID NO: 1691150 - RNA, 22 nt, Human
agauuuuauuauguaaauccca

SEQ ID NO: 1691151 - RNA, 21 nt, Human
agauuuuauuauguaaauccc

SEQ ID NO: 1691152 - RNA, 23 nt, Human
agcaaaaauauuuuaugauccag

SEQ ID NO: 1691153 - RNA, 19 nt, Human
agcaaaaauauuuuaugau

SEQ ID NO: 1691154 - RNA, 18 nt, Human
agcaaaaauauuuuauga

SEQ ID NO: 1691155 - RNA, 17 nt, Human
agcaaaaauauuuuaug

SEQ ID NO: 1691156 - RNA, 15 nt, Human
agcaaaaauauuuua

SEQ ID NO: 1691157 - RNA, 22 nt, Human
ugacuucauuaauaauaaauuc

SEQ ID NO: 1691158 - RNA, 16 nt, Human
agauuauucacugauu

SEQ ID NO: 1691159 - RNA, 16 nt, Human
ugaauuuauuggcuuu

SEQ ID NO: 1691160 - RNA, 15 nt, Human
ugaauuuauuggcuu

SEQ ID NO: 1691161 - RNA, 12 nt, Human
ugaauuuauugg

SEQ ID NO: 1691162 - RNA, 17 nt, Human
ucuguauagauuagaau

SEQ ID NO: 1691163 - RNA, 16 nt, Human
ucuguauagauuagag

SEQ ID NO: 1691164 - RNA, 13 nt, Human
ucuuuaauuuugg

SEQ ID NO: 1691165 - RNA, 18 nt, Human
ucuuuaauuuuggaauuu

SEQ ID NO: 1691166 - RNA, 17 nt, Human
ucuuuaauuuuggaauu

SEQ ID NO: 1691167 - RNA, 16 nt, Human
ucuuuaauuuuggaau

SEQ ID NO: 1691168 - RNA, 15 nt, Human
ucuuuaauuuuggaa

SEQ ID NO: 1691169 - RNA, 14 nt, Human
ucuuuaauuuugga

SEQ ID NO: 1691170 - RNA, 19 nt, Human
ucuccauuuaauaauuaua

SEQ ID NO: 1691171 - RNA, 16 nt, Human
ucuccauuuaauaauu

SEQ ID NO: 1691172 - RNA, 12 nt, Human
ucuccauuuaau

SEQ ID NO: 1691173 - RNA, 23 nt, Human
acuuguguaaauacaauuuuguu

SEQ ID NO: 1691174 - RNA, 22 nt, Human
acuuguguaaauacaauuuugu

SEQ ID NO: 1691175 - RNA, 21 nt, Human
acuuguguaaauacaauuuug

SEQ ID NO: 1691176 - RNA, 13 nt, Human
acuuuuuuccaca

SEQ ID NO: 1691177 - RNA, 22 nt, Human
acuuuugguuaagucuguuuua

SEQ ID NO: 1691178 - RNA, 20 nt, Human
acuuuugguuaagucuguuu

SEQ ID NO: 1691179 - RNA, 16 nt, Human
acuuuugguuaagucu

SEQ ID NO: 1691180 - RNA, 22 nt, Human
agaaccucuuugucuacaccau

SEQ ID NO: 1691181 - RNA, 13 nt, Human
ucugccuaaggac

SEQ ID NO: 1691182 - RNA, 16 nt, Human
ucugccuaaggacuuc

SEQ ID NO: 1691183 - RNA, 15 nt, Human
ucugccuaaggacuu

SEQ ID NO: 1691184 - RNA, 14 nt, Human
ucugccuaaggacu

SEQ ID NO: 1691185 - RNA, 14 nt, Human
agccugauuaaaga

SEQ ID NO: 1691186 - RNA, 16 nt, Human
agccugcacggugaau

SEQ ID NO: 1691187 - RNA, 18 nt, Human
agccugcacggugaaugg

SEQ ID NO: 1691188 - RNA, 21 nt, Human
ugccuuuuucauuauuuuauu

SEQ ID NO: 1691189 - RNA, 17 nt, Human
ugccuuuuucauuauuu

SEQ ID NO: 1691190 - RNA, 16 nt, Human
ugccuuuuucauuauu

SEQ ID NO: 1691191 - RNA, 15 nt, Human
ugccuuuuucauuau

SEQ ID NO: 1691192 - RNA, 14 nt, Human
ugccuuuuucauua

SEQ ID NO: 1691193 - RNA, 13 nt, Human
ugccuuuuucauu

SEQ ID NO: 1691194 - RNA, 19 nt, Human
aggaaacuggguuccugca

SEQ ID NO: 1691195 - RNA, 21 nt, Human
aggaaaaguuuaauauuaaag

SEQ ID NO: 1691196 - RNA, 24 nt, Human
aggaaaaguuuaauauuaaagcca

SEQ ID NO: 1691197 - RNA, 23 nt, Human
aggaaaaguuuaauauuaaagcc

SEQ ID NO: 1691198 - RNA, 23 nt, Human
aggaauucuguauagauuagaau

SEQ ID NO: 1691199 - RNA, 16 nt, Human
aggaauucuguauaga

SEQ ID NO: 1691200 - RNA, 22 nt, Human
aggaauucuguauagauuagaa

SEQ ID NO: 1691201 - RNA, 17 nt, Human
aggaauucuguauagau

SEQ ID NO: 1691202 - RNA, 15 nt, Human
aggauuuuaugcuuu

SEQ ID NO: 1691203 - RNA, 14 nt, Human
aggauuuuaugcuu

SEQ ID NO: 1691204 - RNA, 11 nt, Human
aggauuuuaug

SEQ ID NO: 1691205 - RNA, 17 nt, Human
aggauuuuaugcuuuaa

SEQ ID NO: 1691206 - RNA, 16 nt, Human
aggauuuuaugcuuua

SEQ ID NO: 1691207 - RNA, 21 nt, Human
uggaauuuuccuccuuucucu

SEQ ID NO: 1691208 - RNA, 17 nt, Human
uggaauuuuccuccuuu

SEQ ID NO: 1691209 - RNA, 23 nt, Human
uggagccugcacggugaauggcu

SEQ ID NO: 1691210 - RNA, 14 nt, Human
aguauuaagcauau

SEQ ID NO: 1691211 - RNA, 12 nt, Human
aguauuaagcau

SEQ ID NO: 1691212 - RNA, 23 nt, Human
aguauaauuaacauguuaaacca

SEQ ID NO: 1691213 - RNA, 16 nt, Human
aguauaauuaacaugu

SEQ ID NO: 1691214 - RNA, 14 nt, Human
aguauaauuaacau

SEQ ID NO: 1691215 - RNA, 13 nt, Human
aguauaauuaaca

SEQ ID NO: 1691216 - RNA, 16 nt, Human
uguguuagagauuuuu

SEQ ID NO: 1691217 - RNA, 21 nt, Human
agucuugucucagauuuuauu

SEQ ID NO: 1691218 - RNA, 20 nt, Human
agucuugucucagauuuuau

SEQ ID NO: 1691219 - RNA, 16 nt, Human
agucuugucucagauu

SEQ ID NO: 1691220 - RNA, 19 nt, Human
agucuugucucagauuuua

SEQ ID NO: 1691221 - RNA, 17 nt, Human
agucuugucucagauuu

SEQ ID NO: 1691222 - RNA, 21 nt, Human
agugaguuggguguauugugc

SEQ ID NO: 1691223 - RNA, 20 nt, Human
ugugcugguguaugugugaa

SEQ ID NO: 1691224 - RNA, 19 nt, Human
ugugcugggguuaucugaa

SEQ ID NO: 1691225 - RNA, 22 nt, Human
auagaggaagccugauuaaaga

SEQ ID NO: 1691226 - RNA, 21 nt, Human
auagaggaagccugauuaaag

SEQ ID NO: 1691227 - RNA, 21 nt, Human
auagauuagagaguguugaaa

SEQ ID NO: 1691228 - RNA, 16 nt, Human
auagauuagaauucug

SEQ ID NO: 1691229 - RNA, 15 nt, Human
auagauuagaauucu

SEQ ID NO: 1691230 - RNA, 13 nt, Human
auagauuagaauu

SEQ ID NO: 1691231 - RNA, 22 nt, Human
auagauuagagaguguugaaac

SEQ ID NO: 1691232 - RNA, 20 nt, Human
auagaaccucuuugucuaca

SEQ ID NO: 1691233 - RNA, 14 nt, Human
auagaaccucuuug

SEQ ID NO: 1691234 - RNA, 11 nt, Human
uuauuaugaaa

SEQ ID NO: 1691235 - RNA, 23 nt, Human
uuauuaugaaacuuguguaaaua

SEQ ID NO: 1691236 - RNA, 22 nt, Human
uuauuaugaaacuuguguaaau

SEQ ID NO: 1691237 - RNA, 21 nt, Human
uuauuaugaaacuuguguaaa

SEQ ID NO: 1691238 - RNA, 20 nt, Human
uuauuaugaaacuuguguaa

SEQ ID NO: 1691239 - RNA, 17 nt, Human
uuauuaugaaacuugug

SEQ ID NO: 1691240 - RNA, 14 nt, Human
uuauuauguaaauc

SEQ ID NO: 1691241 - RNA, 13 nt, Human
uuauuauguaaau

SEQ ID NO: 1691242 - RNA, 22 nt, Human
uuauuauguaaaucccauuauu

SEQ ID NO: 1691243 - RNA, 16 nt, Human
uuauuauguaaauccc

SEQ ID NO: 1691244 - RNA, 19 nt, Human
uuauucaaaguugccuaaa

SEQ ID NO: 1691245 - RNA, 15 nt, Human
uuauucaaaguugcc

SEQ ID NO: 1691246 - RNA, 13 nt, Human
uuauucaaaguug

SEQ ID NO: 1691247 - RNA, 14 nt, Human
uuauucacugauuu

SEQ ID NO: 1691248 - RNA, 15 nt, Human
auacuggauuguacu

SEQ ID NO: 1691249 - RNA, 22 nt, Human
uuaugacuucauuaauaauaaa

SEQ ID NO: 1691250 - RNA, 19 nt, Human
uuaugacuucauuaauaau

SEQ ID NO: 1691251 - RNA, 18 nt, Human
uuaugauccagcagauua

SEQ ID NO: 1691252 - RNA, 13 nt, Human
uuaugauccagca

SEQ ID NO: 1691253 - RNA, 19 nt, Human
uuaugaaacuuguguaaau

SEQ ID NO: 1691254 - RNA, 13 nt, Human
uuaugaaacuugu

SEQ ID NO: 1691255 - RNA, 18 nt, Human
uuaugaaacuuguguaaa

SEQ ID NO: 1691256 - RNA, 16 nt, Human
uuaugaaacuugugua

SEQ ID NO: 1691257 - RNA, 23 nt, Human
uuaugauccagcagauuauucac

SEQ ID NO: 1691258 - RNA, 22 nt, Human
uuaugauccagcagauuauuca

SEQ ID NO: 1691259 - RNA, 23 nt, Human
uuauguaaaucccauuauucaaa

SEQ ID NO: 1691260 - RNA, 22 nt, Human
uuauguaaaucccauuauucaa

SEQ ID NO: 1691261 - RNA, 21 nt, Human
uuauguaaaucccauuauuca

SEQ ID NO: 1691262 - RNA, 19 nt, Human
uuauguaaaucccauuauu

SEQ ID NO: 1691263 - RNA, 13 nt, Human
uuauguaaauccc

SEQ ID NO: 1691264 - RNA, 12 nt, Human
uuauguaaaucc

SEQ ID NO: 1691265 - RNA, 11 nt, Human
uuauguaaauc

SEQ ID NO: 1691266 - RNA, 16 nt, Human
uuaugugcgcugauaa

SEQ ID NO: 1691267 - RNA, 23 nt, Human
uuaaaccaugggauaaaugccau

SEQ ID NO: 1691268 - RNA, 22 nt, Human
uuaaaccaugggauaaaugcca

SEQ ID NO: 1691269 - RNA, 21 nt, Human
uuaaaccaugggauaaaugcc

SEQ ID NO: 1691270 - RNA, 22 nt, Human
uuaaaguugaauuuauuggcuu

SEQ ID NO: 1691271 - RNA, 17 nt, Human
uuaaaguugaauuuauu

SEQ ID NO: 1691272 - RNA, 16 nt, Human
uuaaaguugaauuuau

SEQ ID NO: 1691273 - RNA, 13 nt, Human
uuaaaguugaauu

SEQ ID NO: 1691274 - RNA, 20 nt, Human
uuaaacauugguucuuguau

SEQ ID NO: 1691275 - RNA, 18 nt, Human
uuaaacauugguucuugu

SEQ ID NO: 1691276 - RNA, 22 nt, Human
uuaaacauugguucuuguauua

SEQ ID NO: 1691277 - RNA, 17 nt, Human
uuaaaccaugggauaaa

SEQ ID NO: 1691278 - RNA, 12 nt, Human
aguuuuguuugg

SEQ ID NO: 1691279 - RNA, 16 nt, Human
aguuuuguuuggacca

SEQ ID NO: 1691280 - RNA, 14 nt, Human
aguuuuguuuggac

SEQ ID NO: 1691281 - RNA, 18 nt, Human
aguuuuguuuggaccaaa

SEQ ID NO: 1691282 - RNA, 22 nt, Human
uuaagaaugaaauacuguuuga

SEQ ID NO: 1691283 - RNA, 20 nt, Human
uuaagaaugaaauacuguuu

SEQ ID NO: 1691284 - RNA, 14 nt, Human
uuaagaaugaaaua

SEQ ID NO: 1691285 - RNA, 13 nt, Human
uuaauuuuggaau

SEQ ID NO: 1691286 - RNA, 15 nt, Human
uuaauuuuggaauuu

SEQ ID NO: 1691287 - RNA, 14 nt, Human
uuaauuuuggaauu

SEQ ID NO: 1691288 - RNA, 21 nt, Human
auaaaucgcuuuugauaauca

SEQ ID NO: 1691289 - RNA, 19 nt, Human
auaaaucgcuuuugauaau

SEQ ID NO: 1691290 - RNA, 16 nt, Human
auaaaucgcuuuugau

SEQ ID NO: 1691291 - RNA, 14 nt, Human
auaaaucgcuuuug

SEQ ID NO: 1691292 - RNA, 18 nt, Human
auaaaugccaucaauaaa

SEQ ID NO: 1691293 - RNA, 17 nt, Human
auaaaugccaucaauaa

SEQ ID NO: 1691294 - RNA, 19 nt, Human
auaaaucugugaacuugaa

SEQ ID NO: 1691295 - RNA, 16 nt, Human
auaaaucugugaacuu

SEQ ID NO: 1691296 - RNA, 15 nt, Human
auaaaucugugaacu

SEQ ID NO: 1691297 - RNA, 17 nt, Human
uuagaauucuguauaga

SEQ ID NO: 1691298 - RNA, 15 nt, Human
uuagaauucuguaua

SEQ ID NO: 1691299 - RNA, 14 nt, Human
uuagaauucuguau

SEQ ID NO: 1691300 - RNA, 23 nt, Human
aucugccuaaggacuucuuuaau

SEQ ID NO: 1691301 - RNA, 22 nt, Human
aucugccuaaggacuucuuuaa

SEQ ID NO: 1691302 - RNA, 21 nt, Human
aucugccuaaggacuucuuua

SEQ ID NO: 1691303 - RNA, 11 nt, Human
aucugccuaag

SEQ ID NO: 1691304 - RNA, 23 nt, Human
uugaagcauuuuauaaaucgcuu

SEQ ID NO: 1691305 - RNA, 20 nt, Human
auccucucaaccaccuuuca

SEQ ID NO: 1691306 - RNA, 20 nt, Human
aucugacaucucugcaaucu

SEQ ID NO: 1691307 - RNA, 16 nt, Human
aucugacaucucugca

SEQ ID NO: 1691308 - RNA, 15 nt, Human
aucugacaucucugc

SEQ ID NO: 1691309 - RNA, 23 nt, Human
aucaccugucuugccuuuuucau

SEQ ID NO: 1691310 - RNA, 17 nt, Human
uugaaauuguaauuaua

SEQ ID NO: 1691311 - RNA, 15 nt, Human
uugaaauuguaauua

SEQ ID NO: 1691312 - RNA, 14 nt, Human
uugaaauuguaauu

SEQ ID NO: 1691313 - RNA, 13 nt, Human
uugaaauuguaau

SEQ ID NO: 1691314 - RNA, 17 nt, Human
auccaguuuuguuugga

SEQ ID NO: 1691315 - RNA, 21 nt, Human
auccauuuggaaaucuuuaaa

SEQ ID NO: 1691316 - RNA, 20 nt, Human
auccauuuggaaaucuuuaa

SEQ ID NO: 1691317 - RNA, 13 nt, Human
uuuauauuuacua

SEQ ID NO: 1691318 - RNA, 16 nt, Human
uuuauauuuacuaaaa

SEQ ID NO: 1691319 - RNA, 11 nt, Human
augcuauuucu

SEQ ID NO: 1691320 - RNA, 20 nt, Human
augcuauuucuauauuuuca

SEQ ID NO: 1691321 - RNA, 15 nt, Human
augcuauuucuauau

SEQ ID NO: 1691322 - RNA, 14 nt, Human
augcuauuucuaua

SEQ ID NO: 1691323 - RNA, 13 nt, Human
augcuauuucuau

SEQ ID NO: 1691324 - RNA, 23 nt, Human
augcuauuucuauauuuucauuc

SEQ ID NO: 1691325 - RNA, 22 nt, Human
augcuauuucuauauuuucauu

SEQ ID NO: 1691326 - RNA, 21 nt, Human
augcuauuucuauauuuucau

SEQ ID NO: 1691327 - RNA, 18 nt, Human
uuuauuacaguauaauua

SEQ ID NO: 1691328 - RNA, 14 nt, Human
uuuauuacaguaua

SEQ ID NO: 1691329 - RNA, 19 nt, Human
auggaacgcguugaaauug

SEQ ID NO: 1691330 - RNA, 18 nt, Human
auggaacgcguugaaauu

SEQ ID NO: 1691331 - RNA, 17 nt, Human
auggaacgcguugaaau

SEQ ID NO: 1691332 - RNA, 16 nt, Human
auggaacgcguugaaa

SEQ ID NO: 1691333 - RNA, 15 nt, Human
auggaacgcguugaa

SEQ ID NO: 1691334 - RNA, 15 nt, Human
uuucauuauuuuauu

SEQ ID NO: 1691335 - RNA, 13 nt, Human
uuucauuauuuua

SEQ ID NO: 1691336 - RNA, 20 nt, Human
uuucauuauuuuauuaugaa

SEQ ID NO: 1691337 - RNA, 19 nt, Human
uuucauuauuuuauuauga

SEQ ID NO: 1691338 - RNA, 22 nt, Human
auggacuguggugacuuuggau

SEQ ID NO: 1691339 - RNA, 17 nt, Human
auggacuguggugacuu

SEQ ID NO: 1691340 - RNA, 16 nt, Human
auggacuguggugacu

SEQ ID NO: 1691341 - RNA, 14 nt, Human
augggauaaaugcc

SEQ ID NO: 1691342 - RNA, 22 nt, Human
augauccagcagauuauucacu

SEQ ID NO: 1691343 - RNA, 20 nt, Human
augauccagcagauuauuca

SEQ ID NO: 1691344 - RNA, 19 nt, Human
augauccagcagauuauuc

SEQ ID NO: 1691345 - RNA, 10 nt, Human
augauccagc

SEQ ID NO: 1691346 - RNA, 21 nt, Human
uuuaaauaaauaaauagcuag

SEQ ID NO: 1691347 - RNA, 19 nt, Human
uuugugcugguguaugugu

SEQ ID NO: 1691348 - RNA, 20 nt, Human
uuuggcauaacauaaaucug

SEQ ID NO: 1691349 - RNA, 21 nt, Human
uuuggcauaacauaaaucugu

SEQ ID NO: 1691350 - RNA, 23 nt, Human
auguaaaucccauuauucaaagu

SEQ ID NO: 1691351 - RNA, 22 nt, Human
auguaaaucccauuauucaaag

SEQ ID NO: 1691352 - RNA, 20 nt, Human
auguaaaucccauuauucaa

SEQ ID NO: 1691353 - RNA, 14 nt, Human
auguaaaucccauu

SEQ ID NO: 1691354 - RNA, 20 nt, Human
augggauaaaugccaucaau

SEQ ID NO: 1691355 - RNA, 16 nt, Human
augggauaaaugccau

SEQ ID NO: 1691356 - RNA, 15 nt, Human
augggauaaaugcca

SEQ ID NO: 1691357 - RNA, 19 nt, Human
uuucuguuauauaaauggu

SEQ ID NO: 1691358 - RNA, 19 nt, Human
uuucuguacuuuuuggcau

SEQ ID NO: 1691359 - RNA, 20 nt, Human
uuucuguacuuuuuggcaua

SEQ ID NO: 1691360 - RNA, 13 nt, Human
auuauucaaaguu

SEQ ID NO: 1691361 - RNA, 15 nt, Human
auuauucaaaguugc

SEQ ID NO: 1691362 - RNA, 14 nt, Human
auuauucaaaguug

SEQ ID NO: 1691363 - RNA, 17 nt, Human
auuauucaaaguugccu

SEQ ID NO: 1691364 - RNA, 13 nt, Human
auucuguauagau

SEQ ID NO: 1691365 - RNA, 12 nt, Human
auucuguauaga

SEQ ID NO: 1691366 - RNA, 11 nt, Human
auucuguauag

SEQ ID NO: 1691367 - RNA, 22 nt, Human
auugaagcauuuuauaaaucgc

SEQ ID NO: 1691368 - RNA, 20 nt, Human
auucuuaaaguugaauuuau

SEQ ID NO: 1691369 - RNA, 19 nt, Human
auucuuaaaguugaauuua

SEQ ID NO: 1691370 - RNA, 15 nt, Human
auucuguauagauua

SEQ ID NO: 1691371 - RNA, 21 nt, Human
auucuuaaaguugaauuuauu

SEQ ID NO: 1691372 - RNA, 15 nt, Human
auuuuguuucuguac

SEQ ID NO: 1691373 - RNA, 14 nt, Human
auuuuguuucugua

SEQ ID NO: 1691374 - RNA, 11 nt, Human
auuuuguuucu

SEQ ID NO: 1691375 - RNA, 12 nt, Human
auuuuggaauuu

SEQ ID NO: 1691376 - RNA, 16 nt, Human
auugguucuuguauua

SEQ ID NO: 1691377 - RNA, 15 nt, Human
auugguucuuguauu

SEQ ID NO: 1691378 - RNA, 20 nt, Human
auuggcuuuucugauccagu

SEQ ID NO: 1691379 - RNA, 19 nt, Human
auuggcuuuucugauccag

SEQ ID NO: 1691380 - RNA, 16 nt, Human
auuggcuuuucugauc

SEQ ID NO: 1691381 - RNA, 15 nt, Human
auuggcuuuucugau

SEQ ID NO: 1691382 - RNA, 13 nt, Human
auuggcuuuucug

SEQ ID NO: 1691383 - RNA, 21 nt, Human
auuugacauagucuggcugua

SEQ ID NO: 1691384 - RNA, 17 nt, Human
auuugacauagucuggc

SEQ ID NO: 1691385 - RNA, 16 nt, Human
auuugacauagucugg

SEQ ID NO: 1691386 - RNA, 14 nt, Human
gcugggguuaucug

SEQ ID NO: 1691387 - RNA, 23 nt, Human
gcugggguuaucugaagucagau

SEQ ID NO: 1691388 - RNA, 22 nt, Human
gcugggguuaucugaagucaga

SEQ ID NO: 1691389 - RNA, 15 nt, Human
ggacuuguuagaucu

SEQ ID NO: 1691390 - RNA, 18 nt, Human
ggacuucuuuaauuuugg

SEQ ID NO: 1691391 - RNA, 21 nt, Human
ggacuucuuuaauuuuggaau

SEQ ID NO: 1691392 - RNA, 22 nt, Human
ggacuucuuuaauuuuggaauu

SEQ ID NO: 1691393 - RNA, 17 nt, Human
ggcauaacauaaaucug

SEQ ID NO: 1691394 - RNA, 16 nt, Human
ggcauaacauaaaucu

SEQ ID NO: 1691395 - RNA, 17 nt, Human
aaaaccaguauuguaca

SEQ ID NO: 1691396 - RNA, 15 nt, Human
ggcuguacccaggaa

SEQ ID NO: 1691397 - RNA, 20 nt, Human
aaaggaagguucugguguga

SEQ ID NO: 1691398 - RNA, 12 nt, Human
aaacuuuucuga

SEQ ID NO: 1691399 - RNA, 11 nt, Human
aaacuuuucug

SEQ ID NO: 1691400 - RNA, 15 nt, Human
aaacuuguguaaaua

SEQ ID NO: 1691401 - RNA, 22 nt, Human
aaacugcuuguuuccuagcaca

SEQ ID NO: 1691402 - RNA, 19 nt, Human
aaacugcuuguuuccuagc

SEQ ID NO: 1691403 - RNA, 17 nt, Human
aaacugcuuguuuccua

SEQ ID NO: 1691404 - RNA, 14 nt, Human
aaacugcuuguuuc

SEQ ID NO: 1691405 - RNA, 13 nt, Human
aaacugcuuguuu

SEQ ID NO: 1691406 - RNA, 15 nt, Human
aaaccucugugagca

SEQ ID NO: 1691407 - RNA, 22 nt, Human
aaauacaauuuuguuucuguac

SEQ ID NO: 1691408 - RNA, 21 nt, Human
aaauacaauuuuguuucugua

SEQ ID NO: 1691409 - RNA, 20 nt, Human
aaauacaauuuuguuucugu

SEQ ID NO: 1691410 - RNA, 18 nt, Human
aaauacaauuuuguuucu

SEQ ID NO: 1691411 - RNA, 17 nt, Human
aaauacaauuuuguuuc

SEQ ID NO: 1691412 - RNA, 14 nt, Human
aaauacaauuuugu

SEQ ID NO: 1691413 - RNA, 13 nt, Human
aaauacaauuuug

SEQ ID NO: 1691414 - RNA, 23 nt, Human
aaaguugccuaaauccauuugga

SEQ ID NO: 1691415 - RNA, 17 nt, Human
aaaguugccuaaaucca

SEQ ID NO: 1691416 - RNA, 16 nt, Human
aaaguugccuaaaucc

SEQ ID NO: 1691417 - RNA, 14 nt, Human
aaaguuuaauauua

SEQ ID NO: 1691418 - RNA, 12 nt, Human
aaaguuuaauau

SEQ ID NO: 1691419 - RNA, 14 nt, Human
aaaguugccuaaau

SEQ ID NO: 1691420 - RNA, 13 nt, Human
aaaguugccuaaa

SEQ ID NO: 1691421 - RNA, 20 nt, Human
aaaguauuaagcauauauuu

SEQ ID NO: 1691422 - RNA, 19 nt, Human
aaaguauuaagcauauauu

SEQ ID NO: 1691423 - RNA, 18 nt, Human
aaaguauuaagcauauau

SEQ ID NO: 1691424 - RNA, 13 nt, Human
aaaguauuaagca

SEQ ID NO: 1691425 - RNA, 19 nt, Human
gacuuuggauaauaaggaa

SEQ ID NO: 1691426 - RNA, 18 nt, Human
gaugucuucauaccuaca

SEQ ID NO: 1691427 - RNA, 14 nt, Human
gaugucuucauacc

SEQ ID NO: 1691428 - RNA, 15 nt, Human
gauucuuaaaguuga

SEQ ID NO: 1691429 - RNA, 17 nt, Human
gauucuuaaaguugaau

SEQ ID NO: 1691430 - RNA, 16 nt, Human
gauucuuaaaguugaa

SEQ ID NO: 1691431 - RNA, 21 nt, Human
gauucuuaaaguugaauuuau

SEQ ID NO: 1691432 - RNA, 16 nt, Human
gcaaaaauauuuuaug

SEQ ID NO: 1691433 - RNA, 23 nt, Human
gcaaaaauauuuuaugauccagc

SEQ ID NO: 1691434 - RNA, 22 nt, Human
gcaaaaauauuuuaugauccag

SEQ ID NO: 1691435 - RNA, 17 nt, Human
gcaaaaauauuuuauga

SEQ ID NO: 1691436 - RNA, 15 nt, Human
gcauaacauaaaucu

SEQ ID NO: 1691437 - RNA, 13 nt, Human
gcauaacauaaau

SEQ ID NO: 1691438 - RNA, 22 nt, Human
cuuucagauacuggauuguacu

SEQ ID NO: 1691439 - RNA, 17 nt, Human
cuuucagauacuggauu

SEQ ID NO: 1691440 - RNA, 15 nt, Human
cuuucagauacugga

SEQ ID NO: 1691441 - RNA, 14 nt, Human
cuuucagauacugg

SEQ ID NO: 1691442 - RNA, 18 nt, Human
cuugucucagauuuuauu

SEQ ID NO: 1691443 - RNA, 13 nt, Human
cuugucucagauu

SEQ ID NO: 1691444 - RNA, 17 nt, Human
cuugucucagauuuuau

SEQ ID NO: 1691445 - RNA, 14 nt, Human
cuugucucagauuu

SEQ ID NO: 1691446 - RNA, 17 nt, Human
gaaacuggguuccugca

SEQ ID NO: 1691447 - RNA, 21 nt, Human
gaaacugcuuguuuccuagca

SEQ ID NO: 1691448 - RNA, 15 nt, Human
gaaaucuuuaaaaaa

SEQ ID NO: 1691449 - RNA, 12 nt, Human
gaaaucuuuaaa

SEQ ID NO: 1691450 - RNA, 20 nt, Human
gaacacuccaauuaaggauu

SEQ ID NO: 1691451 - RNA, 18 nt, Human
gaacacuccaauuaagga

SEQ ID NO: 1691452 - RNA, 20 nt, Human
cuguuauuuauaaucacuuu

SEQ ID NO: 1691453 - RNA, 14 nt, Human
cuguuauuuauaau

SEQ ID NO: 1691454 - RNA, 18 nt, Human
cuuaaaguugaauuuauu

SEQ ID NO: 1691455 - RNA, 15 nt, Human
cuuaaaguugaauuu

SEQ ID NO: 1691456 - RNA, 14 nt, Human
cuuaaaguugaauu

SEQ ID NO: 1691457 - RNA, 22 nt, Human
cuuaaauaauaaagaucaugua

SEQ ID NO: 1691458 - RNA, 13 nt, Human
cuuaaauaauaaa

SEQ ID NO: 1691459 - RNA, 22 nt, Human
cuuaaaguugaauuuauuggcu

SEQ ID NO: 1691460 - RNA, 22 nt, Human
cauugguucuuguauuaagaau

SEQ ID NO: 1691461 - RNA, 18 nt, Human
cauugguucuuguauuaa

SEQ ID NO: 1691462 - RNA, 21 nt, Human
caguauuguacaaaguauuaa

SEQ ID NO: 1691463 - RNA, 13 nt, Human
caguauuguacaa

SEQ ID NO: 1691464 - RNA, 12 nt, Human
caguauuguaca

SEQ ID NO: 1691465 - RNA, 19 nt, Human
caguauuguacaaaguauu

SEQ ID NO: 1691466 - RNA, 18 nt, Human
caguauuguacaaaguau

SEQ ID NO: 1691467 - RNA, 17 nt, Human
caguauuguacaaagua

SEQ ID NO: 1691468 - RNA, 16 nt, Human
caguauuguacaaagu

SEQ ID NO: 1691469 - RNA, 19 nt, Human
auuguacaaaguauuaagc

SEQ ID NO: 1691470 - RNA, 17 nt, Human
auuguacaaaguauuaa

SEQ ID NO: 1691471 - RNA, 16 nt, Human
auuguacaaaguauua

SEQ ID NO: 1691472 - RNA, 21 nt, Human
auuguaauuauaucugaggaa

SEQ ID NO: 1691473 - RNA, 15 nt, Human
auuguaauuauaucu

SEQ ID NO: 1691474 - RNA, 17 nt, Human
auuguaauuauaucuga

SEQ ID NO: 1691475 - RNA, 16 nt, Human
auuguaauuauaucug

SEQ ID NO: 1691476 - RNA, 16 nt, Human
auuucuauauuuucau

SEQ ID NO: 1691477 - RNA, 15 nt, Human
auuucuauauuuuca

SEQ ID NO: 1691478 - RNA, 18 nt, Human
auuucuauauuuucauuc

SEQ ID NO: 1691479 - RNA, 17 nt, Human
auuucuauauuuucauu

SEQ ID NO: 1691480 - RNA, 22 nt, Human
auuucuaugcugaguuugugcu

SEQ ID NO: 1691481 - RNA, 21 nt, Human
auuucuaugcugaguuugugc

SEQ ID NO: 1691482 - RNA, 19 nt, Human
auuucuaugcugaguuugu

SEQ ID NO: 1691483 - RNA, 19 nt, Human
auuucuauauuuucauucu

SEQ ID NO: 1691484 - RNA, 22 nt, Human
auuuauaaucacuuuuuuccac

SEQ ID NO: 1691485 - RNA, 13 nt, Human
auuuauaaucacu

SEQ ID NO: 1691486 - RNA, 15 nt, Human
auuuauaaucacuuu

SEQ ID NO: 1691487 - RNA, 12 nt, Human
auuauguaaauc

SEQ ID NO: 1691488 - RNA, 19 nt, Human
auuuuaugcuuuaaacauu

SEQ ID NO: 1691489 - RNA, 18 nt, Human
auuuuaugcuuuaaacau

SEQ ID NO: 1691490 - RNA, 18 nt, Human
auuuuagcuacuauauau

SEQ ID NO: 1691491 - RNA, 16 nt, Human
auuuuuauauuuacua

SEQ ID NO: 1691492 - RNA, 15 nt, Human
auuuuuauauuuacu

SEQ ID NO: 1691493 - RNA, 13 nt, Human
auuuuuuuguugu

SEQ ID NO: 1691494 - RNA, 18 nt, Human
auuuuuuuguuguuuguu

SEQ ID NO: 1691495 - RNA, 22 nt, Human
caccuuucagauaacuguuauu

SEQ ID NO: 1691496 - RNA, 21 nt, Human
caccuuucagauaacuguuau

SEQ ID NO: 1691497 - RNA, 23 nt, Human
caaguuguuugagaaauuaagua

SEQ ID NO: 1691498 - RNA, 21 nt, Human
caaguuguuugagaaauuaag

SEQ ID NO: 1691499 - RNA, 17 nt, Human
caaguuguuugagaaau

SEQ ID NO: 1691500 - RNA, 13 nt, Human
caaguuguuugag

SEQ ID NO: 1691501 - RNA, 20 nt, Human
cucagaaggcaaaugacuuu

SEQ ID NO: 1691502 - RNA, 14 nt, Human
cuacuauauaugug

SEQ ID NO: 1691503 - RNA, 16 nt, Human
cuaaacuuuucugaua

SEQ ID NO: 1691504 - RNA, 13 nt, Human
cuccuuucucuuu

SEQ ID NO: 1691505 - RNA, 16 nt, Human
cugaggaauucuguau

SEQ ID NO: 1691506 - RNA, 15 nt, Human
cugaggaauucugua

SEQ ID NO: 1691507 - RNA, 19 nt, Human
cugaggaauucuguauaga

SEQ ID NO: 1691508 - RNA, 18 nt, Human
cugaggaauucuguauag

SEQ ID NO: 1691509 - RNA, 13 nt, Human
ccauuuggaaauc

SEQ ID NO: 1691510 - RNA, 11 nt, Human
ccauuauucaa

SEQ ID NO: 1691511 - RNA, 16 nt, Human
ccccacccugccucac

SEQ ID NO: 1691512 - RNA, 23 nt, Human
cccauuauucaaaguugccuaaa

SEQ ID NO: 1691513 - RNA, 18 nt, Human
cccauuauucaaaguugc

SEQ ID NO: 1691514 - RNA, 21 nt, Human
cuaaaauggacuguggugacu

SEQ ID NO: 1691515 - RNA, 22 nt, Human
cuaaaauggacuguggugacuu

SEQ ID NO: 1691516 - RNA, 22 nt, Human
cuaaggacuucuuuaauuuugg

SEQ ID NO: 1691517 - RNA, 16 nt, Human
cuaaggacuucuuuaa

SEQ ID NO: 1691518 - RNA, 15 nt, Human
cuaaggacuucuuua

SEQ ID NO: 1691519 - RNA, 14 nt, Human
cuaaggacuucuuu

SEQ ID NO: 1691520 - RNA, 23 nt, Human
cuagacuggugacugauucuuca

SEQ ID NO: 1691521 - RNA, 22 nt, Human
cuagacuggugacugauucuuc

SEQ ID NO: 1691522 - RNA, 19 nt, Human
cuagacuggugacugauuc

SEQ ID NO: 1691523 - RNA, 18 nt, Human
cuagacuggugacugauu

SEQ ID NO: 1691524 - RNA, 17 nt, Human
cuagacuggugacugau

SEQ ID NO: 1691525 - RNA, 15 nt, Human
cuagacuggugacug

SEQ ID NO: 1691526 - RNA, 14 nt, Human
cuagacuggugacu

SEQ ID NO: 1691527 - RNA, 13 nt, Human
cuaugcugaguuu

SEQ ID NO: 1691528 - RNA, 15 nt, Human
cuaugcugaguuugu

SEQ ID NO: 1691529 - RNA, 14 nt, Human
cuaugcugaguuug

SEQ ID NO: 1691530 - RNA, 18 nt, Human
cuaugcugaguuugugcu

SEQ ID NO: 1691531 - RNA, 18 nt, Human
cucaaccaccuuucagau

SEQ ID NO: 1691532 - RNA, 20 nt, Human
cuauuucuauauuuucauuc

SEQ ID NO: 1691533 - RNA, 19 nt, Human
cuauuucuauauuuucauu

SEQ ID NO: 1691534 - RNA, 22 nt, Human
cucccuauuuuuuuucuguuau

SEQ ID NO: 1691535 - RNA, 20 nt, Human
cuccauuuaauaauuauaug

SEQ ID NO: 1691536 - RNA, 13 nt, Human
cuccauuuaauaa

SEQ ID NO: 1691537 - RNA, 23 nt, Human
cucagauuuuauuauguaaaucc

SEQ ID NO: 1691538 - RNA, 24 nt, Human
cgcguugaaauuguaauuauaucu

SEQ ID NO: 1691539 - RNA, 19 nt, Human
cgcuaaacuuuucugauag

SEQ ID NO: 1691540 - RNA, 18 nt, Human
cgcuaaacuuuucugaua

SEQ ID NO: 1691541 - RNA, 17 nt, Human
cgcuaaacuuuucugau

SEQ ID NO: 1691542 - RNA, 23 nt, Human
gaaaaguuuaauauuaaagccau

SEQ ID NO: 1691543 - RNA, 15 nt, Human
gaaaaguuuaauauu

SEQ ID NO: 1691544 - RNA, 22 nt, Human
gaaaaguuuaauauuaaagcca

SEQ ID NO: 1691545 - RNA, 21 nt, Human
gaaaaguuuaauauuaaagcc

SEQ ID NO: 1691546 - RNA, 20 nt, Human
gaaaaguuuaauauuaaagc

SEQ ID NO: 1691547 - RNA, 19 nt, Human
gaaaaguuuaauauuaaag

SEQ ID NO: 1691548 - RNA, 22 nt, Human
cuuuuuggcauaacauaaaucu

SEQ ID NO: 1691549 - RNA, 20 nt, Human
cuuuuuggcauaacauaaau

SEQ ID NO: 1691550 - RNA, 16 nt, Human
cuuuuuggcauaacau

SEQ ID NO: 1691551 - RNA, 18 nt, Human
gaaacggaugauuucuau

SEQ ID NO: 1691552 - RNA, 17 nt, Human
gaaacggaugauuucua

SEQ ID NO: 1691553 - RNA, 21 nt, Human
cuuuaaacauugguucuugua

SEQ ID NO: 1691554 - RNA, 22 nt, Human
cuuguuagaucuaguucacucu

SEQ ID NO: 1691555 - RNA, 12 nt, Human
cuuguguaaaua

SEQ ID NO: 1691556 - RNA, 21 nt, Human
cuuguguaaauacaauuuugu

SEQ ID NO: 1691557 - RNA, 16 nt, Human
cuuguguaaauacaau

SEQ ID NO: 1691558 - RNA, 14 nt, Human
cuuguguaaauaca

SEQ ID NO: 1691559 - RNA, 16 nt, Human
cuuucucuuucguuac

SEQ ID NO: 1691560 - RNA, 20 nt, Human
cuuugucuacaccauuaugu

SEQ ID NO: 1691561 - RNA, 23 nt, Human
cuuugucuacaccauuaugugcg

SEQ ID NO: 1691562 - RNA, 22 nt, Human
cuuugugcugggguuaucugaa

SEQ ID NO: 1691563 - RNA, 20 nt, Human
cuuugugcugggguuaucug

SEQ ID NO: 1691564 - RNA, 15 nt, Human
cuuugugcugggguu

SEQ ID NO: 1691565 - RNA, 18 nt, Human
cuucuuuaauuuuggaau

SEQ ID NO: 1691566 - RNA, 17 nt, Human
cuucuuuaauuuuggaa

SEQ ID NO: 1691567 - RNA, 16 nt, Human
cuucuuuaauuuugga

SEQ ID NO: 1691568 - RNA, 15 nt, Human
cuucuuuaauuuugg

SEQ ID NO: 1691569 - RNA, 19 nt, Human
cuucuuuaauuuuggaauu

SEQ ID NO: 1691570 - RNA, 16 nt, Human
cuguauagauuagaau

SEQ ID NO: 1691571 - RNA, 15 nt, Human
cugccuaaggacuuc

SEQ ID NO: 1691572 - RNA, 14 nt, Human
cugccuaaggacuu

SEQ ID NO: 1691573 - RNA, 13 nt, Human
cugccuaaggacu

SEQ ID NO: 1691574 - RNA, 12 nt, Human
cugccuaaggac

SEQ ID NO: 1691575 - RNA, 13 nt, Human
gagaguguugaaa

SEQ ID NO: 1691576 - RNA, 21 nt, Human
gacuucuuuaauuuuggaauu

SEQ ID NO: 1691577 - RNA, 20 nt, Human
gacuucuuuaauuuuggaau

SEQ ID NO: 1691578 - RNA, 19 nt, Human
gacuucuuuaauuuuggaa

SEQ ID NO: 1691579 - RNA, 18 nt, Human
gacuucuuuaauuuugga

SEQ ID NO: 1691580 - RNA, 17 nt, Human
gacuucuuuaauuuugg

SEQ ID NO: 1691581 - RNA, 16 nt, Human
gacuucuuuaauuuug

SEQ ID NO: 1691582 - RNA, 13 nt, Human
gaauucuguauag

SEQ ID NO: 1691583 - RNA, 22 nt, Human
gaauucuguauagauuagaauu

SEQ ID NO: 1691584 - RNA, 21 nt, Human
gaauucuguauagauuagaau

SEQ ID NO: 1691585 - RNA, 14 nt, Human
gaauucuguauaga

SEQ ID NO: 1691586 - RNA, 16 nt, Human
gaauggcuuuguauag

SEQ ID NO: 1691587 - RNA, 14 nt, Human
gaauggcuuuguau

SEQ ID NO: 1691588 - RNA, 21 nt, Human
gaauggcuuuguauagaaccu

SEQ ID NO: 1691589 - RNA, 17 nt, Human
gaauggcuuuguauaga

SEQ ID NO: 1691590 - RNA, 18 nt, Human
gaaugaaauacuguuuga

SEQ ID NO: 1691591 - RNA, 15 nt, Human
gaaugaaauacuguu

SEQ ID NO: 1691592 - RNA, 19 nt, Human
gaaugaaauacuguuugag

SEQ ID NO: 1691593 - RNA, 13 nt, Human
gauuuuaugcuuu

SEQ ID NO: 1691594 - RNA, 16 nt, Human
gaguguugaaacggau

SEQ ID NO: 1691595 - RNA, 20 nt, Human
gauaaaugccaucaauaaaa

SEQ ID NO: 1691596 - RNA, 15 nt, Human
gauaaaugccaucaa

SEQ ID NO: 1691597 - RNA, 11 nt, Human
gauaaaugcca

SEQ ID NO: 1691598 - RNA, 18 nt, Human
gauaacuguuauuuauaa

SEQ ID NO: 1691599 - RNA, 17 nt, Human
gauaacuguuauuuaua

SEQ ID NO: 1691600 - RNA, 17 nt, Human
ggaauucuguauagauu

SEQ ID NO: 1691601 - RNA, 15 nt, Human
ggaauucuguauaga

SEQ ID NO: 1691602 - RNA, 12 nt, Human
ggaauucuguau

SEQ ID NO: 1691603 - RNA, 16 nt, Human
ggaacgcguugaaauu

SEQ ID NO: 1691604 - RNA, 23 nt, Human
ggaccaaaaaccaguauuguaca

SEQ ID NO: 1691605 - RNA, 16 nt, Human
ggaccaaaaaccagua

SEQ ID NO: 1691606 - RNA, 14 nt, Human
ggacuguggugacu

SEQ ID NO: 1691607 - RNA, 22 nt, Human
ggacuguggugacuuuggauaa

SEQ ID NO: 1691608 - RNA, 21 nt, Human
ggacuguggugacuuuggaua

SEQ ID NO: 1691609 - RNA, 17 nt, Human
ggacuguggugacuuug

SEQ ID NO: 1691610 - RNA, 15 nt, Human
ggacuguggugacuu

SEQ ID NO: 1691611 - RNA, 23 nt, Human
gcuuucagauacuggauuguacu

SEQ ID NO: 1691612 - RNA, 18 nt, Human
gcuuucagauacuggauu

SEQ ID NO: 1691613 - RNA, 14 nt, Human
gcuuucagauacug

SEQ ID NO: 1691614 - RNA, 18 nt, Human
ggaaaaguuuaauauuaa

SEQ ID NO: 1691615 - RNA, 14 nt, Human
ggaaaaguuuaaua

SEQ ID NO: 1691616 - RNA, 16 nt, Human
ggauucuuaaaguuga

SEQ ID NO: 1691617 - RNA, 19 nt, Human
ggauucuuaaaguugaauu

SEQ ID NO: 1691618 - RNA, 18 nt, Human
ggauucuuaaaguugaau

SEQ ID NO: 1691619 - RNA, 20 nt, Human
ggauucuuaaaguugaauuu

SEQ ID NO: 1691620 - RNA, 23 nt, Human
gccugcacggugaauggcuuugu

SEQ ID NO: 1691621 - RNA, 16 nt, Human
gccugauuaaagaaug

SEQ ID NO: 1691622 - RNA, 13 nt, Human
gccugauuaaaga

SEQ ID NO: 1691623 - RNA, 21 nt, Human
guacuuuuuggcauaacauaa

SEQ ID NO: 1691624 - RNA, 12 nt, Human
guacuuuuuggc

SEQ ID NO: 1691625 - RNA, 13 nt, Human
guaauuauaucug

SEQ ID NO: 1691626 - RNA, 23 nt, Human
guaaauacaauuuuguuucugua

SEQ ID NO: 1691627 - RNA, 22 nt, Human
guaaauacaauuuuguuucugu

SEQ ID NO: 1691628 - RNA, 15 nt, Human
guaaaucccauuauu

SEQ ID NO: 1691629 - RNA, 21 nt, Human
guaaauacaauuuuguuucug

SEQ ID NO: 1691630 - RNA, 21 nt, Human
guaaaucccauuauucaaagu

SEQ ID NO: 1691631 - RNA, 20 nt, Human
guaaaucccauuauucaaag

SEQ ID NO: 1691632 - RNA, 19 nt, Human
guaaaucccauuauucaaa

SEQ ID NO: 1691633 - RNA, 18 nt, Human
guaaaucccauuauucaa

SEQ ID NO: 1691634 - RNA, 17 nt, Human
guaaaucccauuauuca

SEQ ID NO: 1691635 - RNA, 16 nt, Human
guaaaucccauuauuc

SEQ ID NO: 1691636 - RNA, 19 nt, Human
ggugcccugcuuucagaua

SEQ ID NO: 1691637 - RNA, 20 nt, Human
ggugaauggcuuuguauaga

SEQ ID NO: 1691638 - RNA, 17 nt, Human
ggugaauggcuuuguau

SEQ ID NO: 1691639 - RNA, 14 nt, Human
ggugaauggcuuug

SEQ ID NO: 1691640 - RNA, 18 nt, Human
gguccgugcuaaggacuu

SEQ ID NO: 1691641 - RNA, 17 nt, Human
gguccgugcuaaggacu

SEQ ID NO: 1691642 - RNA, 16 nt, Human
gguccgugcuaaggac

SEQ ID NO: 1691643 - RNA, 23 nt, Human
guauuuguuugcauaggugaucu

SEQ ID NO: 1691644 - RNA, 12 nt, Human
guauuuguuugc

SEQ ID NO: 1691645 - RNA, 13 nt, Human
gucucagauuuua

SEQ ID NO: 1691646 - RNA, 14 nt, Human
gugaauggcuuugu

SEQ ID NO: 1691647 - RNA, 13 nt, Human
gugaauggcuuug

SEQ ID NO: 1691648 - RNA, 19 nt, Human
gugaauggcuuuguauaga

SEQ ID NO: 1691649 - RNA, 18 nt, Human
gugaauggcuuuguauag

SEQ ID NO: 1691650 - RNA, 17 nt, Human
gugaauggcuuuguaua

SEQ ID NO: 1691651 - RNA, 21 nt, Human
gugaaacugcuuguuuccuag

SEQ ID NO: 1691652 - RNA, 20 nt, Human
gugaaacugcuuguuuccua

SEQ ID NO: 1691653 - RNA, 23 nt, Human
gugaaacugcuuguuuccuagca

SEQ ID NO: 1691654 - RNA, 17 nt, Human
uaucugaggaauucugu

SEQ ID NO: 1691655 - RNA, 22 nt, Human
uaucugaggaauucuguauaga

SEQ ID NO: 1691656 - RNA, 21 nt, Human
uaucugaggaauucuguauag

SEQ ID NO: 1691657 - RNA, 19 nt, Human
uaucugaggaauucuguau

SEQ ID NO: 1691658 - RNA, 18 nt, Human
uaucugaggaauucugua

SEQ ID NO: 1691659 - RNA, 15 nt, Human
uaugcuuuaaacauu

SEQ ID NO: 1691660 - RNA, 20 nt, Human
uaugacuucauuaauaauaa

SEQ ID NO: 1691661 - RNA, 16 nt, Human
uaugacuucauuaaua

SEQ ID NO: 1691662 - RNA, 21 nt, Human
uaggugaucucauuuaauccu

SEQ ID NO: 1691663 - RNA, 16 nt, Human
uauaugugaugaucua

SEQ ID NO: 1691664 - RNA, 18 nt, Human
uauauaaaugguuaaaag

SEQ ID NO: 1691665 - RNA, 22 nt, Human
uauaucugaggaauucuguaua

SEQ ID NO: 1691666 - RNA, 21 nt, Human
uauaucugaggaauucuguau

SEQ ID NO: 1691667 - RNA, 20 nt, Human
uauaucugaggaauucugua

SEQ ID NO: 1691668 - RNA, 19 nt, Human
uauaucugaggaauucugu

SEQ ID NO: 1691669 - RNA, 18 nt, Human
uauaucugaggaauucug

SEQ ID NO: 1691670 - RNA, 23 nt, Human
uauaaaucgcuuuugauaaucaa

SEQ ID NO: 1691671 - RNA, 22 nt, Human
uauaauuaacauguuaaaccau

SEQ ID NO: 1691672 - RNA, 20 nt, Human
uauaaucacuuuuuuccaca

SEQ ID NO: 1691673 - RNA, 12 nt, Human
uauaauuaacau

SEQ ID NO: 1691674 - RNA, 14 nt, Human
uauaauuaacaugu

SEQ ID NO: 1691675 - RNA, 13 nt, Human
uauaauuaacaug

SEQ ID NO: 1691676 - RNA, 19 nt, Human
uauaauuaacauguuaaac

SEQ ID NO: 1691677 - RNA, 18 nt, Human
uauaauuaacauguuaaa

SEQ ID NO: 1691678 - RNA, 16 nt, Human
uauaauuaacauguua

SEQ ID NO: 1691679 - RNA, 15 nt, Human
uauaauuaacauguu

SEQ ID NO: 1691680 - RNA, 13 nt, Human
ucaauaaaaaauu

SEQ ID NO: 1691681 - RNA, 16 nt, Human
ucaauaaaaaauuaug

SEQ ID NO: 1691682 - RNA, 14 nt, Human
ucaauaaaaaauua

SEQ ID NO: 1691683 - RNA, 18 nt, Human
ucacauugguguuguacu

SEQ ID NO: 1691684 - RNA, 19 nt, Human
ucaauaaaaaauuaugaca

SEQ ID NO: 1691685 - RNA, 23 nt, Human
uauugugcgcuaaacuuuucuga

SEQ ID NO: 1691686 - RNA, 22 nt, Human
uauugugcgcuaaacuuuucug

SEQ ID NO: 1691687 - RNA, 19 nt, Human
uauugugcgcuaaacuuuu

SEQ ID NO: 1691688 - RNA, 22 nt, Human
uauuauguaaaucccauuauuc

SEQ ID NO: 1691689 - RNA, 15 nt, Human
uauuauguaaauccc

SEQ ID NO: 1691690 - RNA, 12 nt, Human
uauuauguaaau

SEQ ID NO: 1691691 - RNA, 22 nt, Human
uauuaugaaacuuguguaaaua

SEQ ID NO: 1691692 - RNA, 21 nt, Human
uauuaugaaacuuguguaaau

SEQ ID NO: 1691693 - RNA, 20 nt, Human
uauuaugaaacuuguguaaa

SEQ ID NO: 1691694 - RNA, 12 nt, Human
uauuaugaaacu

SEQ ID NO: 1691695 - RNA, 16 nt, Human
uauuaagcauauauuu

SEQ ID NO: 1691696 - RNA, 22 nt, Human
ucauggaacgcguugaaauugu

SEQ ID NO: 1691697 - RNA, 21 nt, Human
ucauggaacgcguugaaauug

SEQ ID NO: 1691698 - RNA, 20 nt, Human
ucauggaacgcguugaaauu

SEQ ID NO: 1691699 - RNA, 23 nt, Human
ucaguauugaagcauuuuauaaa

SEQ ID NO: 1691700 - RNA, 17 nt, Human
uccaguuuuguuuggac

SEQ ID NO: 1691701 - RNA, 15 nt, Human
uccaguuuuguuugg

SEQ ID NO: 1691702 - RNA, 20 nt, Human
uccaguuuuguuuggaccaa

SEQ ID NO: 1691703 - RNA, 17 nt, Human
uccagcagauuauucac

SEQ ID NO: 1691704 - RNA, 16 nt, Human
uccagcagauuauuca

SEQ ID NO: 1691705 - RNA, 15 nt, Human
uccagcagauuauuc

SEQ ID NO: 1691706 - RNA, 14 nt, Human
uccagcagauuauu

SEQ ID NO: 1691707 - RNA, 19 nt, Human
ucccauuauucaaaguugc

SEQ ID NO: 1691708 - RNA, 18 nt, Human
ucccauuauucaaaguug

SEQ ID NO: 1691709 - RNA, 16 nt, Human
ucccauuauucaaagu

SEQ ID NO: 1691710 - RNA, 14 nt, Human
ucccauuauucaaa

SEQ ID NO: 1691711 - RNA, 13 nt, Human
ucccauuauucaa

SEQ ID NO: 1691712 - RNA, 20 nt, Human
uccuaucaccugucuugccu

SEQ ID NO: 1691713 - RNA, 16 nt, Human
ugacauagucuggcug

SEQ ID NO: 1691714 - RNA, 17 nt, Human
ugacauagucuggcugu

SEQ ID NO: 1691715 - RNA, 23 nt, Human
ugaagucagaucugccuaaggac

SEQ ID NO: 1691716 - RNA, 20 nt, Human
ugaagucagaucugccuaag

SEQ ID NO: 1691717 - RNA, 13 nt, Human
ugaagugaaacug

SEQ ID NO: 1691718 - RNA, 14 nt, Human
ugaagugaaacugc

SEQ ID NO: 1691719 - RNA, 17 nt, Human
ucuugccuuuuucauua

SEQ ID NO: 1691720 - RNA, 16 nt, Human
ucuugccuuuuucauu

SEQ ID NO: 1691721 - RNA, 19 nt, Human
ucuugccuuuuucauuauu

SEQ ID NO: 1691722 - RNA, 16 nt, Human
ugagcaucacaguuuu

SEQ ID NO: 1691723 - RNA, 14 nt, Human
ugagcaucacaguu

SEQ ID NO: 1691724 - RNA, 15 nt, Human
ugagcaucacaguuu

SEQ ID NO: 1691725 - RNA, 15 nt, Human
ugaucucauuuaauc

SEQ ID NO: 1691726 - RNA, 22 nt, Human
ugaucucauuuaauccucucaa

SEQ ID NO: 1691727 - RNA, 15 nt, Human
ugauagaggaagccu

SEQ ID NO: 1691728 - RNA, 21 nt, Human
ugauucuucagcaaaaauauu

SEQ ID NO: 1691729 - RNA, 20 nt, Human
ugcugggguuaucugaaguc

SEQ ID NO: 1691730 - RNA, 17 nt, Human
ugcugggguuaucugaa

SEQ ID NO: 1691731 - RNA, 13 nt, Human
ugcugguguaugu

SEQ ID NO: 1691732 - RNA, 22 nt, Human
ugcugguguaugugugaaguga

SEQ ID NO: 1691733 - RNA, 21 nt, Human
ugcgcuaaacuuuucugauag

SEQ ID NO: 1691734 - RNA, 20 nt, Human
ugcgcuaaacuuuucugaua

SEQ ID NO: 1691735 - RNA, 19 nt, Human
ugcgcuaaacuuuucugau

SEQ ID NO: 1691736 - RNA, 20 nt, Human
ugcauaggugaucucauuua

SEQ ID NO: 1691737 - RNA, 23 nt, Human
ugccucacccacccuuuuuuaaa

SEQ ID NO: 1691738 - RNA, 20 nt, Human
ugccucacccacccuuuuuu

SEQ ID NO: 1691739 - RNA, 23 nt, Human
ugccuaaauccauuuggaaaucu

SEQ ID NO: 1691740 - RNA, 22 nt, Human
ugccuaaauccauuuggaaauc

SEQ ID NO: 1691741 - RNA, 20 nt, Human
ugccuaaauccauuuggaaa

SEQ ID NO: 1691742 - RNA, 19 nt, Human
ugccuaaauccauuuggaa

SEQ ID NO: 1691743 - RNA, 15 nt, Human
ugccuaaauccauuu

SEQ ID NO: 1691744 - RNA, 13 nt, Human
ugccuaaauccau

SEQ ID NO: 1691745 - RNA, 20 nt, Human
ugguccgugcuaaggacuug

SEQ ID NO: 1691746 - RNA, 19 nt, Human
ugguccgugcuaaggacuu

SEQ ID NO: 1691747 - RNA, 18 nt, Human
ugguccgugcuaaggacu

SEQ ID NO: 1691748 - RNA, 17 nt, Human
ugguccgugcuaaggac

SEQ ID NO: 1691749 - RNA, 19 nt, Human
uggugacugauucuucagc

SEQ ID NO: 1691750 - RNA, 16 nt, Human
uggugacugauucuuc

SEQ ID NO: 1691751 - RNA, 15 nt, Human
uggugacugauucuu

SEQ ID NO: 1691752 - RNA, 20 nt, Human
uggauaauaaggaaaaguuu

SEQ ID NO: 1691753 - RNA, 22 nt, Human
uggaccaaaaaccaguauugua

SEQ ID NO: 1691754 - RNA, 17 nt, Human
uggaccaaaaaccagua

SEQ ID NO: 1691755 - RNA, 15 nt, Human
uuaauaucaucagua

SEQ ID NO: 1691756 - RNA, 22 nt, Human
uuaauauuaaagccauguuuau

SEQ ID NO: 1691757 - RNA, 21 nt, Human
uuaauauuaaagccauguuua

SEQ ID NO: 1691758 - RNA, 23 nt, Human
uuaagcauauauuuuuauauuua

SEQ ID NO: 1691759 - RNA, 19 nt, Human
uuaagcauauauuuuuaua

SEQ ID NO: 1691760 - RNA, 18 nt, Human
uuaagcauauauuuuuau

SEQ ID NO: 1691761 - RNA, 15 nt, Human
uuaagcauauauuuu

SEQ ID NO: 1691762 - RNA, 13 nt, Human
uuaagcauauauu

SEQ ID NO: 1691763 - RNA, 16 nt, Human
uuagcuacuauauaug

SEQ ID NO: 1691764 - RNA, 14 nt, Human
uuagaucuaguuca

SEQ ID NO: 1691765 - RNA, 13 nt, Human
uuagaucuaguuc

SEQ ID NO: 1691766 - RNA, 12 nt, Human
uuagagauuuuu

SEQ ID NO: 1691767 - RNA, 18 nt, Human
uuagagaguguugaaacg

SEQ ID NO: 1691768 - RNA, 17 nt, Human
uuagagaguguugaaac

SEQ ID NO: 1691769 - RNA, 16 nt, Human
uuagagaguguugaaa

SEQ ID NO: 1691770 - RNA, 14 nt, Human
uuagagaguguuga

SEQ ID NO: 1691771 - RNA, 12 nt, Human
uucccuggccuu

SEQ ID NO: 1691772 - RNA, 16 nt, Human
uucccuggccuuucau

SEQ ID NO: 1691773 - RNA, 17 nt, Human
uucccuggccuuucaua

SEQ ID NO: 1691774 - RNA, 14 nt, Human
uuauuacaguauaa

SEQ ID NO: 1691775 - RNA, 14 nt, Human
uuaugcuuuaaaca

SEQ ID NO: 1691776 - RNA, 13 nt, Human
uuaugcuuuaaac

SEQ ID NO: 1691777 - RNA, 17 nt, Human
uuaucugaagucagauc

SEQ ID NO: 1691778 - RNA, 22 nt, Human
uuauuggcuuuucugauccagu

SEQ ID NO: 1691779 - RNA, 18 nt, Human
uuauuggcuuuucugauc

SEQ ID NO: 1691780 - RNA, 16 nt, Human
uuauuggcuuuucuga

SEQ ID NO: 1691781 - RNA, 12 nt, Human
uuauuggcuuuu

SEQ ID NO: 1691782 - RNA, 13 nt, Human
uuauuuuauuaug

SEQ ID NO: 1691783 - RNA, 23 nt, Human
uucaaaguugccuaaauccauuu

SEQ ID NO: 1691784 - RNA, 17 nt, Human
uucaaaguugccuaaau

SEQ ID NO: 1691785 - RNA, 16 nt, Human
uucaaaguugccuaaa

SEQ ID NO: 1691786 - RNA, 15 nt, Human
uucaaaguugccuaa

SEQ ID NO: 1691787 - RNA, 11 nt, Human
uucaaaguugc

SEQ ID NO: 1691788 - RNA, 23 nt, Human
uucagauaacuguuauuuauaau

SEQ ID NO: 1691789 - RNA, 18 nt, Human
uucagauaacuguuauuu

SEQ ID NO: 1691790 - RNA, 17 nt, Human
uucagauaacuguuauu

SEQ ID NO: 1691791 - RNA, 21 nt, Human
uucacucuccauuuaauaauu

SEQ ID NO: 1691792 - RNA, 20 nt, Human
uuugauaaucaacugggcug

SEQ ID NO: 1691793 - RNA, 13 nt, Human
uuucuuaaauaau

SEQ ID NO: 1691794 - RNA, 12 nt, Human
uuucuuaaauaa

SEQ ID NO: 1691795 - RNA, 17 nt, Human
uuugguugcuuuaauau

SEQ ID NO: 1691796 - RNA, 18 nt, Human
uuugauaaucaacugggc

SEQ ID NO: 1691797 - RNA, 16 nt, Human
uuuaugcuuuaaacau

SEQ ID NO: 1691798 - RNA, 15 nt, Human
uuuaugcuuuaaaca

SEQ ID NO: 1691799 - RNA, 12 nt, Human
uuuaugcuuuaa

SEQ ID NO: 1691800 - RNA, 13 nt, Human
uuucugauccagu

SEQ ID NO: 1691801 - RNA, 22 nt, Human
uuucugauccaguuuuguuugg

SEQ ID NO: 1691802 - RNA, 20 nt, Human
uuucugauccaguuuuguuu

SEQ ID NO: 1691803 - RNA, 16 nt, Human
uuucugauccaguuuu

SEQ ID NO: 1691804 - RNA, 15 nt, Human
uuucugauccaguuu

SEQ ID NO: 1691805 - RNA, 20 nt, Human
uuuaugacuucauuaauaau

SEQ ID NO: 1691806 - RNA, 19 nt, Human
uuuauaaaucgcuuuugau

SEQ ID NO: 1691807 - RNA, 22 nt, Human
uuuauaaaucgcuuuugauaau

SEQ ID NO: 1691808 - RNA, 18 nt, Human
uuuauaaaucgcuuuuga

SEQ ID NO: 1691809 - RNA, 15 nt, Human
uuuauaaaucgcuuu

SEQ ID NO: 1691810 - RNA, 14 nt, Human
uuuaauauuaaagc

SEQ ID NO: 1691811 - RNA, 21 nt, Human
uuuaauauuaaagccauguuu

SEQ ID NO: 1691812 - RNA, 20 nt, Human
uuuaauauuaaagccauguu

SEQ ID NO: 1691813 - RNA, 17 nt, Human
uuuaauauuaaagccau

SEQ ID NO: 1691814 - RNA, 15 nt, Human
uuuaauauuaaagcc

SEQ ID NO: 1691815 - RNA, 14 nt, Human
uuuaauaauuauau

SEQ ID NO: 1691816 - RNA, 14 nt, Human
uuguuuguuuaguc

SEQ ID NO: 1691817 - RNA, 13 nt, Human
uuguuuguuuagu

SEQ ID NO: 1691818 - RNA, 14 nt, Human
uuguuucuguacuu

SEQ ID NO: 1691819 - RNA, 12 nt, Human
uuguuucuguac

SEQ ID NO: 1691820 - RNA, 18 nt, Human
uuggcauaacauaaaucu

SEQ ID NO: 1691821 - RNA, 23 nt, Human
uuggcauaacauaaaucugugaa

SEQ ID NO: 1691822 - RNA, 22 nt, Human
uuggcauaacauaaaucuguga

SEQ ID NO: 1691823 - RNA, 20 nt, Human
uuggcauaacauaaaucugu

SEQ ID NO: 1691824 - RNA, 19 nt, Human
uuggcauaacauaaaucug

SEQ ID NO: 1691825 - RNA, 17 nt, Human
uugccuuuuucauuauu

SEQ ID NO: 1691826 - RNA, 16 nt, Human
uugccuuuuucauuau

SEQ ID NO: 1691827 - RNA, 15 nt, Human
uugccuuuuucauua

SEQ ID NO: 1691828 - RNA, 14 nt, Human
uugccuuuuucauu

SEQ ID NO: 1691829 - RNA, 13 nt, Human
uugccuuuuucau

SEQ ID NO: 1691830 - RNA, 12 nt, Human
uugccuuuuuca

SEQ ID NO: 1691831 - RNA, 22 nt, Human
uugaagcauuuuauaaaucgcu

SEQ ID NO: 1691832 - RNA, 17 nt, Human
uugaagcauuuuauaaa

SEQ ID NO: 1691833 - RNA, 15 nt, Human
uugaagcauuuuaua

SEQ ID NO: 1691834 - RNA, 14 nt, Human
uugaagcauuuuau

SEQ ID NO: 1691835 - RNA, 13 nt, Human
uugaagcauuuua

SEQ ID NO: 1691836 - RNA, 20 nt, Human
uugaaacggaugauuucuau

SEQ ID NO: 1691837 - RNA, 12 nt, Human
uucuuuaauuuu

SEQ ID NO: 1691838 - RNA, 18 nt, Human
uucuuuaauuuuggaauu

SEQ ID NO: 1691839 - RNA, 17 nt, Human
uucuuuaauuuuggaau

SEQ ID NO: 1691840 - RNA, 19 nt, Human
uugaaacggaugauuucua

SEQ ID NO: 1691841 - RNA, 16 nt, Human
uugaaacggaugauuu

SEQ ID NO: 1691842 - RNA, 11 nt, Human
uucuguauaga

SEQ ID NO: 1691843 - RNA, 13 nt, Human
uucuguauagauu

SEQ ID NO: 1691844 - RNA, 14 nt, Human
uucuguauagauua

SEQ ID NO: 1691845 - RNA, 19 nt, Human
uucuuguauuaagaaugaa

SEQ ID NO: 1691846 - RNA, 23 nt, Human
caacagcuggugcccugcuuuca

SEQ ID NO: 1691847 - RNA, 18 nt, Human
augguccgugcuaaggac

SEQ ID NO: 1691848 - RNA, 15 nt, Human
augguccgugcuaag

SEQ ID NO: 1691849 - RNA, 20 nt, Human
augcugaguuugugcuggug

SEQ ID NO: 1691850 - RNA, 19 nt, Human
auggcuuuguauagaaccu

SEQ ID NO: 1691851 - RNA, 13 nt, Human
augcuuuaaacau

SEQ ID NO: 1691852 - RNA, 21 nt, Human
aucucugcaaucuucucagaa

SEQ ID NO: 1691853 - RNA, 18 nt, Human
aucucugcaaucuucuca

SEQ ID NO: 1691854 - RNA, 14 nt, Human
augaagucucugaa

SEQ ID NO: 1691855 - RNA, 21 nt, Human
aucacaguuuugguugcuuua

SEQ ID NO: 1691856 - RNA, 22 nt, Human
aucacaguuuugguugcuuuaa

SEQ ID NO: 1691857 - RNA, 15 nt, Human
aucacaguuuugguu

SEQ ID NO: 1691858 - RNA, 20 nt, Human
aucccauuauucaaaguugc

SEQ ID NO: 1691859 - RNA, 15 nt, Human
aucccauuauucaaa

SEQ ID NO: 1691860 - RNA, 14 nt, Human
aucccauuauucaa

SEQ ID NO: 1691861 - RNA, 17 nt, Human
auaucaucaguauugaa

SEQ ID NO: 1691862 - RNA, 13 nt, Human
auaucaucaguau

SEQ ID NO: 1691863 - RNA, 19 nt, Human
auauauuuuuauauuuacu

SEQ ID NO: 1691864 - RNA, 18 nt, Human
auauauuuuuauauuuac

SEQ ID NO: 1691865 - RNA, 20 nt, Human
auauauuuuuauauuuacua

SEQ ID NO: 1691866 - RNA, 12 nt, Human
agucuguuuuau

SEQ ID NO: 1691867 - RNA, 19 nt, Human
agaucugccuaaggacuuc

SEQ ID NO: 1691868 - RNA, 20 nt, Human
agcacacacuuuugguuaag

SEQ ID NO: 1691869 - RNA, 14 nt, Human
agcacacacuuuug

SEQ ID NO: 1691870 - RNA, 16 nt, Human
agccaaaccucuguga

SEQ ID NO: 1691871 - RNA, 19 nt, Human
agacgaugucuucauaccu

SEQ ID NO: 1691872 - RNA, 17 nt, Human
agacgaugucuucauac

SEQ ID NO: 1691873 - RNA, 20 nt, Human
agaaugaaauacuguuugag

SEQ ID NO: 1691874 - RNA, 19 nt, Human
agaaugaaauacuguuuga

SEQ ID NO: 1691875 - RNA, 16 nt, Human
agaaugaaauacuguu

SEQ ID NO: 1691876 - RNA, 22 nt, Human
aaaaguuuaauauuaaagccau

SEQ ID NO: 1691877 - RNA, 21 nt, Human
aaaaguuuaauauuaaagcca

SEQ ID NO: 1691878 - RNA, 23 nt, Human
aaaaguuuaauauuaaagccaug

SEQ ID NO: 1691879 - RNA, 20 nt, Human
aaaaguuuaauauuaaagcc

SEQ ID NO: 1691880 - RNA, 22 nt, Human
aacuguuauuuauaaucacuuu

SEQ ID NO: 1691881 - RNA, 20 nt, Human
aacuguuauuuauaaucacu

SEQ ID NO: 1691882 - RNA, 17 nt, Human
aacuguuauuuauaauc

SEQ ID NO: 1691883 - RNA, 16 nt, Human
aacuguuauuuauaau

SEQ ID NO: 1691884 - RNA, 15 nt, Human
aacuguuauuuauaa

SEQ ID NO: 1691885 - RNA, 17 nt, Human
aacgcguugaaauugua

SEQ ID NO: 1691886 - RNA, 15 nt, Human
aacgcguugaaauug

SEQ ID NO: 1691887 - RNA, 14 nt, Human
aacgcguugaaauu

SEQ ID NO: 1691888 - RNA, 13 nt, Human
aacgcguugaaau

SEQ ID NO: 1691889 - RNA, 14 nt, Human
aaccaguauuguac

SEQ ID NO: 1691890 - RNA, 13 nt, Human
aaccaguauugua

SEQ ID NO: 1691891 - RNA, 11 nt, Human
aaccaguauug

SEQ ID NO: 1691892 - RNA, 22 nt, Human
aaauuggggauucuuaaaguug

SEQ ID NO: 1691893 - RNA, 20 nt, Human
aaauuggggauucuuaaagu

SEQ ID NO: 1691894 - RNA, 19 nt, Human
aaauuggggauucuuaaag

SEQ ID NO: 1691895 - RNA, 18 nt, Human
aaauuggggauucuuaaa

SEQ ID NO: 1691896 - RNA, 23 nt, Human
aaauuggggauucuuaaaguuga

SEQ ID NO: 1691897 - RNA, 21 nt, Human
aaaucugugaacuugaaauuu

SEQ ID NO: 1691898 - RNA, 19 nt, Human
aaaucugugaacuugaaau

SEQ ID NO: 1691899 - RNA, 20 nt, Human
aaaucugugaacuugaaauu

SEQ ID NO: 1691900 - RNA, 13 nt, Human
aauaauaaagauc

SEQ ID NO: 1691901 - RNA, 21 nt, Human
aauaauaaagaucauguaaaa

SEQ ID NO: 1691902 - RNA, 20 nt, Human
aauauuaaagccauguuuau

SEQ ID NO: 1691903 - RNA, 19 nt, Human
aauauuaaagccauguuua

SEQ ID NO: 1691904 - RNA, 18 nt, Human
aauauuaaagccauguuu

SEQ ID NO: 1691905 - RNA, 16 nt, Human
aauauuaaagccaugu

SEQ ID NO: 1691906 - RNA, 15 nt, Human
aauauuaaagccaug

SEQ ID NO: 1691907 - RNA, 14 nt, Human
aauauuaaagccau

SEQ ID NO: 1691908 - RNA, 13 nt, Human
aauauuaaagcca

SEQ ID NO: 1691909 - RNA, 12 nt, Human
aauacuguuuga

SEQ ID NO: 1691910 - RNA, 22 nt, Human
aauauuaaagccauguuuauua

SEQ ID NO: 1691911 - RNA, 20 nt, Human
aaugguccgugcuaaggacu

SEQ ID NO: 1691912 - RNA, 16 nt, Human
aaggcaaaugacuuug

SEQ ID NO: 1691913 - RNA, 15 nt, Human
aaggcaaaugacuuu

SEQ ID NO: 1691914 - RNA, 14 nt, Human
aaggcaaaugacuu

SEQ ID NO: 1691915 - RNA, 14 nt, Human
accaccuuucagau

SEQ ID NO: 1691916 - RNA, 20 nt, Human
acaauuuuguuucuguacuu

SEQ ID NO: 1691917 - RNA, 11 nt, Human
aauuuuggaau

SEQ ID NO: 1691918 - RNA, 12 nt, Human
aauuuuggaauu

SEQ ID NO: 1691919 - RNA, 23 nt, Human
aauuuauuggcuuuucugaucca

SEQ ID NO: 1691920 - RNA, 21 nt, Human
aauuuauuggcuuuucugauc

SEQ ID NO: 1691921 - RNA, 20 nt, Human
aauuuauuggcuuuucugau

SEQ ID NO: 1691922 - RNA, 19 nt, Human
aauuuauuggcuuuucuga

SEQ ID NO: 1691923 - RNA, 17 nt, Human
aauuuauuggcuuuucu

SEQ ID NO: 1691924 - RNA, 16 nt, Human
aauuggggauucuuaa

SEQ ID NO: 1691925 - RNA, 21 nt, Human
aaugguccgugcuaaggacuu

SEQ ID NO: 1691926 - RNA, 20 nt, Human
aauuggggauucuuaaaguu

SEQ ID NO: 1691927 - RNA, 17 nt, Human
aauuggggauucuuaaa

SEQ ID NO: 1691928 - RNA, 13 nt, Human
acugauucuucag

SEQ ID NO: 1691929 - RNA, 12 nt, Human
acugauucuuca

SEQ ID NO: 1691930 - RNA, 22 nt, Human
acugauucuucagcaaaaauau

SEQ ID NO: 1691931 - RNA, 15 nt, Human
acugauucuucagca

SEQ ID NO: 1691932 - RNA, 22 nt, Human
accugucuugccuuuuucauua

SEQ ID NO: 1691933 - RNA, 21 nt, Human
accugucuugccuuuuucauu

SEQ ID NO: 1691934 - RNA, 19 nt, Human
accugucuugccuuuuuca

SEQ ID NO: 1691935 - RNA, 14 nt, Human
aacuggguuccugc

SEQ ID NO: 1691936 - RNA, 15 nt, Human
aacuggguuccugca

SEQ ID NO: 1691937 - RNA, 15 nt, Human
gugaacuugaaauuu

SEQ ID NO: 1691938 - RNA, 14 nt, Human
gugaacuugaaauu

SEQ ID NO: 1691939 - RNA, 17 nt, Human
aacugcuuguuuccuag

SEQ ID NO: 1691940 - RNA, 16 nt, Human
aacugggcugaacacu

SEQ ID NO: 1691941 - RNA, 14 nt, Human
aacugggcugaaca

SEQ ID NO: 1691942 - RNA, 16 nt, Human
aaccucuuugucuaca

SEQ ID NO: 1691943 - RNA, 15 nt, Human
aaauuguaauuauau

SEQ ID NO: 1691944 - RNA, 14 nt, Human
aaauuguaauuaua

SEQ ID NO: 1691945 - RNA, 11 nt, Human
aaaugguuaaa

SEQ ID NO: 1691946 - RNA, 19 nt, Human
aaaugguuaaaagagguuu

SEQ ID NO: 1691947 - RNA, 13 nt, Human
aaaugguuaaaag

SEQ ID NO: 1691948 - RNA, 10 nt, Human
guauaauuaa

SEQ ID NO: 1691949 - RNA, 20 nt, Human
guuuaauauuaaagccaugu

SEQ ID NO: 1691950 - RNA, 22 nt, Human
guugccuaaauccauuuggaaa

SEQ ID NO: 1691951 - RNA, 20 nt, Human
guuuuucuuaaauaauaaag

SEQ ID NO: 1691952 - RNA, 17 nt, Human
aaguauuaagcauauau

SEQ ID NO: 1691953 - RNA, 16 nt, Human
aaguauuaagcauaua

SEQ ID NO: 1691954 - RNA, 18 nt, Human
aaguauuaagcauauauu

SEQ ID NO: 1691955 - RNA, 15 nt, Human
aaguauuaagcauau

SEQ ID NO: 1691956 - RNA, 21 nt, Human
guuuuucuuaaauaauaaaga

SEQ ID NO: 1691957 - RNA, 17 nt, Human
aagccaaaccucuguga

SEQ ID NO: 1691958 - RNA, 21 nt, Human
aauagcuagacuggugacuga

SEQ ID NO: 1691959 - RNA, 20 nt, Human
aauagcuagacuggugacug

SEQ ID NO: 1691960 - RNA, 14 nt, Human
aauagcuagacugg

SEQ ID NO: 1691961 - RNA, 16 nt, Human
uaacauguuaaaccau

SEQ ID NO: 1691962 - RNA, 15 nt, Human
uaacauguuaaacca

SEQ ID NO: 1691963 - RNA, 12 nt, Human
uaacauguuaaa

SEQ ID NO: 1691964 - RNA, 16 nt, Human
aaucccauuauucaaa

SEQ ID NO: 1691965 - RNA, 14 nt, Human
aaucccauuauuca

SEQ ID NO: 1691966 - RNA, 21 nt, Human
aaucccauuauucaaaguugc

SEQ ID NO: 1691967 - RNA, 21 nt, Human
aauccucucaaccaccuuuca

SEQ ID NO: 1691968 - RNA, 19 nt, Human
uaaggacuuguuagaucua

SEQ ID NO: 1691969 - RNA, 16 nt, Human
uaaggacuuguuagau

SEQ ID NO: 1691970 - RNA, 15 nt, Human
uaaggacuuguuaga

SEQ ID NO: 1691971 - RNA, 13 nt, Human
uaaggacuuguua

SEQ ID NO: 1691972 - RNA, 16 nt, Human
uaagcauauauuuuua

SEQ ID NO: 1691973 - RNA, 13 nt, Human
uaagcauauauuu

SEQ ID NO: 1691974 - RNA, 19 nt, Human
uaaggaaacuggguuccug

SEQ ID NO: 1691975 - RNA, 14 nt, Human
uaaggaaacugggu

SEQ ID NO: 1691976 - RNA, 12 nt, Human
uaaggaaacugg

SEQ ID NO: 1691977 - RNA, 21 nt, Human
uaaggaaaaguuuaauauuaa

SEQ ID NO: 1691978 - RNA, 19 nt, Human
uaaggaaaaguuuaauauu

SEQ ID NO: 1691979 - RNA, 17 nt, Human
uaaggaaaaguuuaaua

SEQ ID NO: 1691980 - RNA, 22 nt, Human
uaaggacuucuuuaauuuugga

SEQ ID NO: 1691981 - RNA, 16 nt, Human
uaaggacuucuuuaau

SEQ ID NO: 1691982 - RNA, 15 nt, Human
uaaggacuucuuuaa

SEQ ID NO: 1691983 - RNA, 14 nt, Human
uaaggacuucuuua

SEQ ID NO: 1691984 - RNA, 23 nt, Human
uaauuauaucugaggaauucugu

SEQ ID NO: 1691985 - RNA, 22 nt, Human
uaauuauaucugaggaauucug

SEQ ID NO: 1691986 - RNA, 21 nt, Human
uaauuauaucugaggaauucu

SEQ ID NO: 1691987 - RNA, 19 nt, Human
uaauuauaucugaggaauu

SEQ ID NO: 1691988 - RNA, 20 nt, Human
uaauuauaugcuauuucuau

SEQ ID NO: 1691989 - RNA, 19 nt, Human
uaauuauaugcuauuucua

SEQ ID NO: 1691990 - RNA, 18 nt, Human
uaauuauaugcuauuucu

SEQ ID NO: 1691991 - RNA, 14 nt, Human
uaauuauaugcuau

SEQ ID NO: 1691992 - RNA, 14 nt, Human
aauuaaguaucuga

SEQ ID NO: 1691993 - RNA, 13 nt, Human
aauuaaguaucug

SEQ ID NO: 1691994 - RNA, 22 nt, Human
acacuuuugguuaagucuguuu

SEQ ID NO: 1691995 - RNA, 13 nt, Human
acacuuuugguua

SEQ ID NO: 1691996 - RNA, 19 nt, Human
uauagauuagaauucugua

SEQ ID NO: 1691997 - RNA, 18 nt, Human
uauagauuagaauucugu

SEQ ID NO: 1691998 - RNA, 21 nt, Human
uaugaaacuuguguaaauaca

SEQ ID NO: 1691999 - RNA, 19 nt, Human
uaugaaacuuguguaaaua

SEQ ID NO: 1692000 - RNA, 14 nt, Human
uaugaaacuugugu

SEQ ID NO: 1692001 - RNA, 23 nt, Human
uaugcuauuucuauauuuucauu

SEQ ID NO: 1692002 - RNA, 22 nt, Human
uaugcuauuucuauauuuucau

SEQ ID NO: 1692003 - RNA, 18 nt, Human
uaugcuauuucuauauuu

SEQ ID NO: 1692004 - RNA, 16 nt, Human
uaugcuauuucuauau

SEQ ID NO: 1692005 - RNA, 15 nt, Human
uaugcuauuucuaua

SEQ ID NO: 1692006 - RNA, 14 nt, Human
uaugcuauuucuau

SEQ ID NO: 1692007 - RNA, 18 nt, Human
uagcacacacuuuugguu

SEQ ID NO: 1692008 - RNA, 18 nt, Human
acaaaguauuaagcauau

SEQ ID NO: 1692009 - RNA, 13 nt, Human
acaaaguauuaag

SEQ ID NO: 1692010 - RNA, 16 nt, Human
acaaaguauuaagcau

SEQ ID NO: 1692011 - RNA, 15 nt, Human
acaaaguauuaagca

SEQ ID NO: 1692012 - RNA, 15 nt, Human
uccaauuaaggauuu

SEQ ID NO: 1692013 - RNA, 17 nt, Human
uccaauuaaggauuuua

SEQ ID NO: 1692014 - RNA, 16 nt, Human
uccaauuaaggauuuu

SEQ ID NO: 1692015 - RNA, 22 nt, Human
uccacauaaggaaacuggguuc

SEQ ID NO: 1692016 - RNA, 20 nt, Human
acgcguugaaauuguaauua

SEQ ID NO: 1692017 - RNA, 18 nt, Human
acgcguugaaauuguaau

SEQ ID NO: 1692018 - RNA, 14 nt, Human
acgcguugaaauug

SEQ ID NO: 1692019 - RNA, 13 nt, Human
acgcguugaaauu

SEQ ID NO: 1692020 - RNA, 15 nt, Human
acggaugauuucuau

SEQ ID NO: 1692021 - RNA, 12 nt, Human
uccauuuaauaa

SEQ ID NO: 1692022 - RNA, 20 nt, Human
uccauuuggaaaucuuuaaa

SEQ ID NO: 1692023 - RNA, 19 nt, Human
uccauuuggaaaucuuuaa

SEQ ID NO: 1692024 - RNA, 12 nt, Human
uccauuuggaaa

SEQ ID NO: 1692025 - RNA, 17 nt, Human
uccauuuaauaauuaua

SEQ ID NO: 1692026 - RNA, 18 nt, Human
uccgugcuaaggacuugu

SEQ ID NO: 1692027 - RNA, 17 nt, Human
uccgugcuaaggacuug

SEQ ID NO: 1692028 - RNA, 16 nt, Human
uccgugcuaaggacuu

SEQ ID NO: 1692029 - RNA, 23 nt, Human
uccgugcuaaggacuuguuagau

SEQ ID NO: 1692030 - RNA, 15 nt, Human
uauuuguuugcauag

SEQ ID NO: 1692031 - RNA, 15 nt, Human
ucaaaguugccuaaa

SEQ ID NO: 1692032 - RNA, 12 nt, Human
acauguauuugu

SEQ ID NO: 1692033 - RNA, 16 nt, Human
acauguauuuguuugc

SEQ ID NO: 1692034 - RNA, 23 nt, Human
acauugguucuuguauuaagaau

SEQ ID NO: 1692035 - RNA, 22 nt, Human
acauugguucuuguauuaagaa

SEQ ID NO: 1692036 - RNA, 21 nt, Human
acauugguucuuguauuaaga

SEQ ID NO: 1692037 - RNA, 18 nt, Human
acauugguucuuguauua

SEQ ID NO: 1692038 - RNA, 16 nt, Human
acauugguucuuguau

SEQ ID NO: 1692039 - RNA, 14 nt, Human
acauugguucuugu

SEQ ID NO: 1692040 - RNA, 23 nt, Human
acauugguguuguacucaauuuu

SEQ ID NO: 1692041 - RNA, 22 nt, Human
acauugguguuguacucaauuu

SEQ ID NO: 1692042 - RNA, 16 nt, Human
acauugguguuguacu

SEQ ID NO: 1692043 - RNA, 14 nt, Human
acauugguguugua

SEQ ID NO: 1692044 - RNA, 13 nt, Human
accaaaaaccagu

SEQ ID NO: 1692045 - RNA, 12 nt, Human
accaaaaaccag

SEQ ID NO: 1692046 - RNA, 13 nt, Human
ucagaucugccua

SEQ ID NO: 1692047 - RNA, 20 nt, Human
ucagaucugccuaaggacuu

SEQ ID NO: 1692048 - RNA, 18 nt, Human
ucagaucugccuaaggac

SEQ ID NO: 1692049 - RNA, 15 nt, Human
ucagaucugccuaag

SEQ ID NO: 1692050 - RNA, 18 nt, Human
accaugggauaaaugcca

SEQ ID NO: 1692051 - RNA, 17 nt, Human
accaugggauaaaugcc

SEQ ID NO: 1692052 - RNA, 18 nt, Human
ucaguauugaagcauuuu

SEQ ID NO: 1692053 - RNA, 17 nt, Human
ucaguauugaagcauuu

SEQ ID NO: 1692054 - RNA, 16 nt, Human
ucaguauugaagcauu

SEQ ID NO: 1692055 - RNA, 15 nt, Human
ucaguauugaagcau

SEQ ID NO: 1692056 - RNA, 14 nt, Human
ucaguauugaagca

SEQ ID NO: 1692057 - RNA, 22 nt, Human
ucaguauugaagcauuuuauaa

SEQ ID NO: 1692058 - RNA, 19 nt, Human
ucaguauugaagcauuuua

SEQ ID NO: 1692059 - RNA, 19 nt, Human
ucuaguucacucuccauuu

SEQ ID NO: 1692060 - RNA, 16 nt, Human
ucuaguucacucucca

SEQ ID NO: 1692061 - RNA, 12 nt, Human
ucuaguucacuc

SEQ ID NO: 1692062 - RNA, 17 nt, Human
acuucauuaauaauaaa

SEQ ID NO: 1692063 - RNA, 16 nt, Human
acuugaaauuugaauu

SEQ ID NO: 1692064 - RNA, 16 nt, Human
acugggcugaacacuc

SEQ ID NO: 1692065 - RNA, 21 nt, Human
acugggcugaacacuccaauu

SEQ ID NO: 1692066 - RNA, 22 nt, Human
acuuugugcugggguuaucuga

SEQ ID NO: 1692067 - RNA, 17 nt, Human
agaaauuaaguaucuga

SEQ ID NO: 1692068 - RNA, 13 nt, Human
agaaauuaaguau

SEQ ID NO: 1692069 - RNA, 22 nt, Human
ucugaagugaaacugcuuguuu

SEQ ID NO: 1692070 - RNA, 18 nt, Human
ucugaagugaaacugcuu

SEQ ID NO: 1692071 - RNA, 21 nt, Human
agaagccccacccugccucac

SEQ ID NO: 1692072 - RNA, 15 nt, Human
ugaaacggaugauuu

SEQ ID NO: 1692073 - RNA, 23 nt, Human
ugaaacuuguguaaauacaauuu

SEQ ID NO: 1692074 - RNA, 17 nt, Human
ugaaacuuguguaaaua

SEQ ID NO: 1692075 - RNA, 20 nt, Human
ugaaacggaugauuucuaug

SEQ ID NO: 1692076 - RNA, 19 nt, Human
ugaaacggaugauuucuau

SEQ ID NO: 1692077 - RNA, 18 nt, Human
ugaaacggaugauuucua

SEQ ID NO: 1692078 - RNA, 17 nt, Human
ugaaacggaugauuucu

SEQ ID NO: 1692079 - RNA, 14 nt, Human
ugaagcauuuuaua

SEQ ID NO: 1692080 - RNA, 22 nt, Human
ugaagcauuuuauaaaucgcuu

SEQ ID NO: 1692081 - RNA, 18 nt, Human
ugaagcauuuuauaaauc

SEQ ID NO: 1692082 - RNA, 17 nt, Human
ugaagcauuuuauaaau

SEQ ID NO: 1692083 - RNA, 16 nt, Human
ugaagcauuuuauaaa

SEQ ID NO: 1692084 - RNA, 15 nt, Human
ugaagcauuuuauaa

SEQ ID NO: 1692085 - RNA, 22 nt, Human
ugaauggcuuuguauagaaccu

SEQ ID NO: 1692086 - RNA, 19 nt, Human
ugaauggcuuuguauagaa

SEQ ID NO: 1692087 - RNA, 18 nt, Human
ugaauggcuuuguauaga

SEQ ID NO: 1692088 - RNA, 17 nt, Human
ugaauggcuuuguauag

SEQ ID NO: 1692089 - RNA, 11 nt, Human
ugaauggcuuu

SEQ ID NO: 1692090 - RNA, 15 nt, Human
ugaauggcuuuguau

SEQ ID NO: 1692091 - RNA, 12 nt, Human
ugaauggcuuug

SEQ ID NO: 1692092 - RNA, 20 nt, Human
agauaacuguuauuuauaau

SEQ ID NO: 1692093 - RNA, 19 nt, Human
agauaacuguuauuuauaa

SEQ ID NO: 1692094 - RNA, 16 nt, Human
agauaacuguuauuua

SEQ ID NO: 1692095 - RNA, 14 nt, Human
agauacuggauugu

SEQ ID NO: 1692096 - RNA, 17 nt, Human
agauacuggauuguacu

SEQ ID NO: 1692097 - RNA, 21 nt, Human
ugaauuuuguguuagagauuu

SEQ ID NO: 1692098 - RNA, 17 nt, Human
ugaauuuuguguuagag

SEQ ID NO: 1692099 - RNA, 20 nt, Human
agauuuuauuauguaaaucc

SEQ ID NO: 1692100 - RNA, 19 nt, Human
agauuuuauuauguaaauc

SEQ ID NO: 1692101 - RNA, 18 nt, Human
agauuuuauuauguaaau

SEQ ID NO: 1692102 - RNA, 17 nt, Human
agauuuuauuauguaaa

SEQ ID NO: 1692103 - RNA, 16 nt, Human
agauuuuauuauguaa

SEQ ID NO: 1692104 - RNA, 15 nt, Human
agauuuuauuaugua

SEQ ID NO: 1692105 - RNA, 14 nt, Human
agauuuuauuaugu

SEQ ID NO: 1692106 - RNA, 16 nt, Human
agauuuuuuuguuguu

SEQ ID NO: 1692107 - RNA, 15 nt, Human
agauuuuuuuguugu

SEQ ID NO: 1692108 - RNA, 23 nt, Human
agauuuuuuuguuguuuguuuag

SEQ ID NO: 1692109 - RNA, 19 nt, Human
agauuuuuuuguuguuugu

SEQ ID NO: 1692110 - RNA, 18 nt, Human
agauuuuuuuguuguuug

SEQ ID NO: 1692111 - RNA, 15 nt, Human
agcaucacaguuuug

SEQ ID NO: 1692112 - RNA, 17 nt, Human
agcaucacaguuuuggu

SEQ ID NO: 1692113 - RNA, 24 nt, Human
ugauaaucaacugggcugaacacu

SEQ ID NO: 1692114 - RNA, 18 nt, Human
ugauaaucaacugggcug

SEQ ID NO: 1692115 - RNA, 14 nt, Human
ugauaaucaacugg

SEQ ID NO: 1692116 - RNA, 15 nt, Human
ugagguuuuuaagcc

SEQ ID NO: 1692117 - RNA, 21 nt, Human
ugauccagcagauuauucacu

SEQ ID NO: 1692118 - RNA, 22 nt, Human
ugauccagcagauuauucacug

SEQ ID NO: 1692119 - RNA, 22 nt, Human
ugauccaguuuuguuuggacca

SEQ ID NO: 1692120 - RNA, 14 nt, Human
agccauguuuauua

SEQ ID NO: 1692121 - RNA, 13 nt, Human
agccauguuuauu

SEQ ID NO: 1692122 - RNA, 16 nt, Human
agccauguuuauuaca

SEQ ID NO: 1692123 - RNA, 17 nt, Human
agccauguuuauuacag

SEQ ID NO: 1692124 - RNA, 20 nt, Human
ugccaaguuguuugagaaau

SEQ ID NO: 1692125 - RNA, 19 nt, Human
ugccaaguuguuugagaaa

SEQ ID NO: 1692126 - RNA, 15 nt, Human
ugccaaguuguuuga

SEQ ID NO: 1692127 - RNA, 13 nt, Human
agcuagacuggug

SEQ ID NO: 1692128 - RNA, 21 nt, Human
agcuagacuggugacugauuc

SEQ ID NO: 1692129 - RNA, 17 nt, Human
agcuagacuggugacug

SEQ ID NO: 1692130 - RNA, 16 nt, Human
agcuagacuggugacu

SEQ ID NO: 1692131 - RNA, 14 nt, Human
agcuagacugguga

SEQ ID NO: 1692132 - RNA, 21 nt, Human
aggaagccugauuaaagaaug

SEQ ID NO: 1692133 - RNA, 18 nt, Human
aggaagccugauuaaaga

SEQ ID NO: 1692134 - RNA, 17 nt, Human
aggaagccugauuaaag

SEQ ID NO: 1692135 - RNA, 23 nt, Human
aggaauggagccugcacggugaa

SEQ ID NO: 1692136 - RNA, 22 nt, Human
ugcuaaggacuuguuagaucua

SEQ ID NO: 1692137 - RNA, 18 nt, Human
ugcuaaggacuuguuaga

SEQ ID NO: 1692138 - RNA, 13 nt, Human
ugcuaaggacuug

SEQ ID NO: 1692139 - RNA, 12 nt, Human
ugcuaaggacuu

SEQ ID NO: 1692140 - RNA, 22 nt, Human
uggcauaacauaaaucugugaa

SEQ ID NO: 1692141 - RNA, 21 nt, Human
uggcauaacauaaaucuguga

SEQ ID NO: 1692142 - RNA, 18 nt, Human
aggcaaaugacuuuggac

SEQ ID NO: 1692143 - RNA, 15 nt, Human
aggcaaaugacuuug

SEQ ID NO: 1692144 - RNA, 14 nt, Human
aggcaaaugacuuu

SEQ ID NO: 1692145 - RNA, 16 nt, Human
uggacuguggugacuu

SEQ ID NO: 1692146 - RNA, 15 nt, Human
uggacuguggugacu

SEQ ID NO: 1692147 - RNA, 22 nt, Human
uggacuguggugacuuuggaua

SEQ ID NO: 1692148 - RNA, 21 nt, Human
uggacuguggugacuuuggau

SEQ ID NO: 1692149 - RNA, 19 nt, Human
uggacuguggugacuuugg

SEQ ID NO: 1692150 - RNA, 17 nt, Human
uggacuguggugacuuu

SEQ ID NO: 1692151 - RNA, 15 nt, Human
uggaaaucuuuaaaa

SEQ ID NO: 1692152 - RNA, 14 nt, Human
uggaaaucuuuaaa

SEQ ID NO: 1692153 - RNA, 19 nt, Human
ugggcugaacacuccaauu

SEQ ID NO: 1692154 - RNA, 17 nt, Human
ugggcugaacacuccaa

SEQ ID NO: 1692155 - RNA, 17 nt, Human
uguacuuuuuggcauaa

SEQ ID NO: 1692156 - RNA, 16 nt, Human
uguacuuuuuggcaua

SEQ ID NO: 1692157 - RNA, 15 nt, Human
uguacuuuuuggcau

SEQ ID NO: 1692158 - RNA, 12 nt, Human
uguacuuuuugg

SEQ ID NO: 1692159 - RNA, 14 nt, Human
agguuuuuaagccu

SEQ ID NO: 1692160 - RNA, 13 nt, Human
uguaauuauaucu

SEQ ID NO: 1692161 - RNA, 15 nt, Human
uguaauuauaucuga

SEQ ID NO: 1692162 - RNA, 14 nt, Human
uguaauuauaucug

SEQ ID NO: 1692163 - RNA, 22 nt, Human
uguaaaucccauuauucaaagu

SEQ ID NO: 1692164 - RNA, 20 nt, Human
uguaaaucccauuauucaaa

SEQ ID NO: 1692165 - RNA, 19 nt, Human
uguaaaucccauuauucaa

SEQ ID NO: 1692166 - RNA, 18 nt, Human
uguaaaucccauuauuca

SEQ ID NO: 1692167 - RNA, 16 nt, Human
uguaaaucccauuauu

SEQ ID NO: 1692168 - RNA, 13 nt, Human
uguaaaucccauu

SEQ ID NO: 1692169 - RNA, 17 nt, Human
uguggugacuuuggaua

SEQ ID NO: 1692170 - RNA, 16 nt, Human
uguggugacuuuggau

SEQ ID NO: 1692171 - RNA, 20 nt, Human
uguuuagucuugucucagau

SEQ ID NO: 1692172 - RNA, 19 nt, Human
uguuuagucuugucucaga

SEQ ID NO: 1692173 - RNA, 18 nt, Human
uguuuagucuugucucag

SEQ ID NO: 1692174 - RNA, 17 nt, Human
uguuuagucuugucuca

SEQ ID NO: 1692175 - RNA, 13 nt, Human
uguuuagucuugu

SEQ ID NO: 1692176 - RNA, 24 nt, Human
aguucacucuccauuuaauaauua

SEQ ID NO: 1692177 - RNA, 22 nt, Human
aguucacucuccauuuaauaau

SEQ ID NO: 1692178 - RNA, 21 nt, Human
aguguugaaacggaugauuuc

SEQ ID NO: 1692179 - RNA, 21 nt, Human
uguuauuuauaaucacuuuuu

SEQ ID NO: 1692180 - RNA, 18 nt, Human
uguuauuuauaaucacuu

SEQ ID NO: 1692181 - RNA, 19 nt, Human
aguugccuaaauccauuug

SEQ ID NO: 1692182 - RNA, 17 nt, Human
aguugccuaaauccauu

SEQ ID NO: 1692183 - RNA, 16 nt, Human
aguugccuaaauccau

SEQ ID NO: 1692184 - RNA, 15 nt, Human
aguugccuaaaucca

SEQ ID NO: 1692185 - RNA, 11 nt, Human
aguugccuaaa

SEQ ID NO: 1692186 - RNA, 15 nt, Human
uuaagucuguuuuau

SEQ ID NO: 1692187 - RNA, 14 nt, Human
uuaagucuguuuua

SEQ ID NO: 1692188 - RNA, 17 nt, Human
uuaaguaucugacaucu

SEQ ID NO: 1692189 - RNA, 22 nt, Human
aguuuugguugcuuuaauauca

SEQ ID NO: 1692190 - RNA, 21 nt, Human
aguuuugguugcuuuaauauc

SEQ ID NO: 1692191 - RNA, 15 nt, Human
aguuuugguugcuuu

SEQ ID NO: 1692192 - RNA, 22 nt, Human
auaaauagcuagacuggugacu

SEQ ID NO: 1692193 - RNA, 22 nt, Human
auaacuguuauuuauaaucacu

SEQ ID NO: 1692194 - RNA, 20 nt, Human
auaacuguuauuuauaauca

SEQ ID NO: 1692195 - RNA, 18 nt, Human
auaacuguuauuuauaau

SEQ ID NO: 1692196 - RNA, 22 nt, Human
auaaauucccuggccuuucaua

SEQ ID NO: 1692197 - RNA, 21 nt, Human
auaaauucccuggccuuucau

SEQ ID NO: 1692198 - RNA, 23 nt, Human
auaauaaauucccuggccuuuca

SEQ ID NO: 1692199 - RNA, 15 nt, Human
uuugucuacaccauu

SEQ ID NO: 1692200 - RNA, 13 nt, Human
uuuguuucuguac

SEQ ID NO: 1692201 - RNA, 12 nt, Human
uuuguuucugua

SEQ ID NO: 1692202 - RNA, 18 nt, Human
uuuguuucuguacuuuuu

SEQ ID NO: 1692203 - RNA, 19 nt, Human
auuaacauguuaaaccaug

SEQ ID NO: 1692204 - RNA, 17 nt, Human
auuaacauguuaaacca

SEQ ID NO: 1692205 - RNA, 15 nt, Human
auuaacauguuaaac

SEQ ID NO: 1692206 - RNA, 14 nt, Human
auuaacauguuaaa

SEQ ID NO: 1692207 - RNA, 13 nt, Human
auuaacauguuaa

SEQ ID NO: 1692208 - RNA, 21 nt, Human
auuaaagccauguuuauuaca

SEQ ID NO: 1692209 - RNA, 17 nt, Human
auuaaagccauguuuau

SEQ ID NO: 1692210 - RNA, 16 nt, Human
auuaaagccauguuua

SEQ ID NO: 1692211 - RNA, 12 nt, Human
auuaaagccaug

SEQ ID NO: 1692212 - RNA, 22 nt, Human
auuaagaaugaaauacuguuug

SEQ ID NO: 1692213 - RNA, 21 nt, Human
auuaagaaugaaauacuguuu

SEQ ID NO: 1692214 - RNA, 20 nt, Human
auuaagaaugaaauacuguu

SEQ ID NO: 1692215 - RNA, 16 nt, Human
auuaagaaugaaauac

SEQ ID NO: 1692216 - RNA, 20 nt, Human
uuuuauaaaucgcuuuugau

SEQ ID NO: 1692217 - RNA, 12 nt, Human
uuuuauaaaucg

SEQ ID NO: 1692218 - RNA, 18 nt, Human
uuuuaugcuuuaaacauu

SEQ ID NO: 1692219 - RNA, 12 nt, Human
uuuuauuaugua

SEQ ID NO: 1692220 - RNA, 22 nt, Human
uuuucauucuccuaucaccugu

SEQ ID NO: 1692221 - RNA, 21 nt, Human
uuuucauuauuuuauuaugaa

SEQ ID NO: 1692222 - RNA, 15 nt, Human
uuuucauuauuuuau

SEQ ID NO: 1692223 - RNA, 14 nt, Human
uuuuauuauguaaa

SEQ ID NO: 1692224 - RNA, 13 nt, Human
uuuuauuauguaa

SEQ ID NO: 1692225 - RNA, 15 nt, Human
auuauuuuauuauga

SEQ ID NO: 1692226 - RNA, 19 nt, Human
auuagagaguguugaaacg

SEQ ID NO: 1692227 - RNA, 18 nt, Human
auuagagaguguugaaac

SEQ ID NO: 1692228 - RNA, 17 nt, Human
auuagagaguguugaaa

SEQ ID NO: 1692229 - RNA, 16 nt, Human
auuagagaguguugaa

SEQ ID NO: 1692230 - RNA, 15 nt, Human
auuagagaguguuga

SEQ ID NO: 1692231 - RNA, 22 nt, Human
auuauuuuauuaugaaacuugu

SEQ ID NO: 1692232 - RNA, 21 nt, Human
auuauuuuauuaugaaacuug

SEQ ID NO: 1692233 - RNA, 23 nt, Human
auugugcgcuaaacuuuucugau

SEQ ID NO: 1692234 - RNA, 17 nt, Human
auuuggaaaucuuuaaa

SEQ ID NO: 1692235 - RNA, 20 nt, Human
auuuggaaaucuuuaaaaaa

SEQ ID NO: 1692236 - RNA, 15 nt, Human
auuuacuaaaaugga

SEQ ID NO: 1692237 - RNA, 13 nt, Human
auuuuauuaugua

SEQ ID NO: 1692238 - RNA, 15 nt, Human
auuuuauuauguaaa

SEQ ID NO: 1692239 - RNA, 14 nt, Human
auuuuauuauguaa

SEQ ID NO: 1692240 - RNA, 21 nt, Human
auuuuauuaugaaacuugugu

SEQ ID NO: 1692241 - RNA, 18 nt, Human
auuuuauuaugaaacuug

SEQ ID NO: 1692242 - RNA, 12 nt, Human
auuuuauuauga

SEQ ID NO: 1692243 - RNA, 11 nt, Human
auuuuauuaug

SEQ ID NO: 1692244 - RNA, 14 nt, Human
auuuuauuaugaaa

SEQ ID NO: 1692245 - RNA, 13 nt, Human
auuuuauuaugaa

SEQ ID NO: 1692246 - RNA, 14 nt, Human
auauaugugaugau

SEQ ID NO: 1692247 - RNA, 13 nt, Human
auagucuggcugu

SEQ ID NO: 1692248 - RNA, 13 nt, Human
auccauuuggaaa

SEQ ID NO: 1692249 - RNA, 19 nt, Human
auccauuuggaaaucuuua

SEQ ID NO: 1692250 - RNA, 17 nt, Human
auccauuuggaaaucuu

SEQ ID NO: 1692251 - RNA, 18 nt, Human
auccaguuuuguuuggac

SEQ ID NO: 1692252 - RNA, 21 nt, Human
auccaguuuuguuuggaccaa

SEQ ID NO: 1692253 - RNA, 20 nt, Human
auccaguuuuguuuggacca

SEQ ID NO: 1692254 - RNA, 21 nt, Human
uucuggugugaacuaaacuuu

SEQ ID NO: 1692255 - RNA, 20 nt, Human
uucuggugugaacuaaacuu

SEQ ID NO: 1692256 - RNA, 19 nt, Human
uucuguacuuuuuggcaua

SEQ ID NO: 1692257 - RNA, 18 nt, Human
uucuguacuuuuuggcau

SEQ ID NO: 1692258 - RNA, 13 nt, Human
uucuguacuuuuu

SEQ ID NO: 1692259 - RNA, 18 nt, Human
aucaauaaaaaauuauga

SEQ ID NO: 1692260 - RNA, 17 nt, Human
aucaauaaaaaauuaug

SEQ ID NO: 1692261 - RNA, 15 nt, Human
aucaauaaaaaauua

SEQ ID NO: 1692262 - RNA, 22 nt, Human
uucucagaaggcaaaugacuuu

SEQ ID NO: 1692263 - RNA, 21 nt, Human
uucucagaaggcaaaugacuu

SEQ ID NO: 1692264 - RNA, 19 nt, Human
uucucagaaggcaaaugac

SEQ ID NO: 1692265 - RNA, 18 nt, Human
uucucagaaggcaaauga

SEQ ID NO: 1692266 - RNA, 14 nt, Human
aucacuuuuuucca

SEQ ID NO: 1692267 - RNA, 16 nt, Human
auauuuuuauauuuac

SEQ ID NO: 1692268 - RNA, 17 nt, Human
auauuuucauucuccua

SEQ ID NO: 1692269 - RNA, 19 nt, Human
uuguguaaauacaauuuug

SEQ ID NO: 1692270 - RNA, 16 nt, Human
augauuucuaugcuga

SEQ ID NO: 1692271 - RNA, 13 nt, Human
augauuucuaugc

SEQ ID NO: 1692272 - RNA, 12 nt, Human
augauuucuaug

SEQ ID NO: 1692273 - RNA, 17 nt, Human
uuuaauuuuggaauuuu

SEQ ID NO: 1692274 - RNA, 15 nt, Human
uuuaauuuuggaauu

SEQ ID NO: 1692275 - RNA, 14 nt, Human
uuuaauuuuggaau

SEQ ID NO: 1692276 - RNA, 23 nt, Human
augccaaguuguuugagaaauua

SEQ ID NO: 1692277 - RNA, 16 nt, Human
augccaaguuguuuga

SEQ ID NO: 1692278 - RNA, 14 nt, Human
augccaaguuguuu

SEQ ID NO: 1692279 - RNA, 21 nt, Human
uuucauauuuuagcuacuaua

SEQ ID NO: 1692280 - RNA, 13 nt, Human
uuucauauuuuag

SEQ ID NO: 1692281 - RNA, 23 nt, Human
uuuauuacaguauaauuaacaug

SEQ ID NO: 1692282 - RNA, 23 nt, Human
auggaacgcguugaaauuguaau

SEQ ID NO: 1692283 - RNA, 22 nt, Human
uuuauuacaguauaauuaacau

SEQ ID NO: 1692284 - RNA, 14 nt, Human
uuuagucuugucuc

SEQ ID NO: 1692285 - RNA, 22 nt, Human
uugccuaaauccauuuggaaau

SEQ ID NO: 1692286 - RNA, 15 nt, Human
uugccuaaauccauu

SEQ ID NO: 1692287 - RNA, 14 nt, Human
uugccuaaauccau

SEQ ID NO: 1692288 - RNA, 13 nt, Human
uugccuaaaucca

SEQ ID NO: 1692289 - RNA, 21 nt, Human
aucugaggaauucuguauaga

SEQ ID NO: 1692290 - RNA, 20 nt, Human
aucugaggaauucuguauag

SEQ ID NO: 1692291 - RNA, 18 nt, Human
aucugaggaauucuguau

SEQ ID NO: 1692292 - RNA, 17 nt, Human
aucugaggaauucugua

SEQ ID NO: 1692293 - RNA, 16 nt, Human
aucugaggaauucugu

SEQ ID NO: 1692294 - RNA, 15 nt, Human
aucugaggaauucug

SEQ ID NO: 1692295 - RNA, 20 nt, Human
aucugccuaaggacuucuuu

SEQ ID NO: 1692296 - RNA, 19 nt, Human
aucugccuaaggacuucuu

SEQ ID NO: 1692297 - RNA, 18 nt, Human
aucugccuaaggacuucu

SEQ ID NO: 1692298 - RNA, 13 nt, Human
aucugccuaagga

SEQ ID NO: 1692299 - RNA, 17 nt, Human
aucugccuaaggacuuc

SEQ ID NO: 1692300 - RNA, 16 nt, Human
aucugccuaaggacuu

SEQ ID NO: 1692301 - RNA, 15 nt, Human
aucugccuaaggacu

SEQ ID NO: 1692302 - RNA, 14 nt, Human
aucugccuaaggac

SEQ ID NO: 1692303 - RNA, 19 nt, Human
aucugugaacuugaaauuu

SEQ ID NO: 1692304 - RNA, 18 nt, Human
aucugugaacuugaaauu

SEQ ID NO: 1692305 - RNA, 17 nt, Human
aucugugaacuugaaau

SEQ ID NO: 1692306 - RNA, 13 nt, Human
aucugugaacuug

SEQ ID NO: 1692307 - RNA, 21 nt, Human
uuggauaauaaggaaaaguuu

SEQ ID NO: 1692308 - RNA, 19 nt, Human
uuggauaauaaggaaaagu

SEQ ID NO: 1692309 - RNA, 15 nt, Human
uuggauaauaaggaa

SEQ ID NO: 1692310 - RNA, 13 nt, Human
uuggggauucuua

SEQ ID NO: 1692311 - RNA, 15 nt, Human
uuggggauucuuaaa

SEQ ID NO: 1692312 - RNA, 12 nt, Human
augacuuuggac

SEQ ID NO: 1692313 - RNA, 11 nt, Human
augacuuugga

SEQ ID NO: 1692314 - RNA, 16 nt, Human
augacuucauuaauaa

SEQ ID NO: 1692315 - RNA, 22 nt, Human
uuguacaaaguauuaagcauau

SEQ ID NO: 1692316 - RNA, 21 nt, Human
uuguacaaaguauuaagcaua

SEQ ID NO: 1692317 - RNA, 20 nt, Human
uuguacaaaguauuaagcau

SEQ ID NO: 1692318 - RNA, 17 nt, Human
uuguacaaaguauuaag

SEQ ID NO: 1692319 - RNA, 15 nt, Human
uuguacaaaguauua

SEQ ID NO: 1692320 - RNA, 16 nt, Human
uugguugcuuuaauau

SEQ ID NO: 1692321 - RNA, 13 nt, Human
uugguugcuuuaa

SEQ ID NO: 1692322 - RNA, 14 nt, Human
uuguacaaaguauu

SEQ ID NO: 1692323 - RNA, 13 nt, Human
uuguacaaaguau

SEQ ID NO: 1692324 - RNA, 13 nt, Human
auuguaauuauau

SEQ ID NO: 1692325 - RNA, 14 nt, Human
auuguaauuauauc

SEQ ID NO: 1692326 - RNA, 21 nt, Human
auuaugaaacuuguguaaaua

SEQ ID NO: 1692327 - RNA, 20 nt, Human
auuaugaaacuuguguaaau

SEQ ID NO: 1692328 - RNA, 18 nt, Human
auuaugaaacuuguguaa

SEQ ID NO: 1692329 - RNA, 15 nt, Human
auuaugaaacuugug

SEQ ID NO: 1692330 - RNA, 14 nt, Human
auuaugaaacuugu

SEQ ID NO: 1692331 - RNA, 17 nt, Human
auucaaaguugccuaaa

SEQ ID NO: 1692332 - RNA, 22 nt, Human
auucaaaguugccuaaauccau

SEQ ID NO: 1692333 - RNA, 21 nt, Human
auucaaaguugccuaaaucca

SEQ ID NO: 1692334 - RNA, 20 nt, Human
auucaaaguugccuaaaucc

SEQ ID NO: 1692335 - RNA, 18 nt, Human
auucaaaguugccuaaau

SEQ ID NO: 1692336 - RNA, 16 nt, Human
auuacaguauaauuaa

SEQ ID NO: 1692337 - RNA, 15 nt, Human
auuacaguauaauua

SEQ ID NO: 1692338 - RNA, 14 nt, Human
auuacaguauaauu

SEQ ID NO: 1692339 - RNA, 12 nt, Human
auuacaguauaa

SEQ ID NO: 1692340 - RNA, 17 nt, Human
auuuuaugcuuuaaaca

SEQ ID NO: 1692341 - RNA, 12 nt, Human
auuuuaugcuuu

SEQ ID NO: 1692342 - RNA, 12 nt, Human
auuuggaaaucu

SEQ ID NO: 1692343 - RNA, 11 nt, Human
auuuggaaauc

SEQ ID NO: 1692344 - RNA, 13 nt, Human
auuuggaaaucuu

SEQ ID NO: 1692345 - RNA, 12 nt, Human
auuuguuugcau

SEQ ID NO: 1692346 - RNA, 16 nt, Human
auuuuaugauccagca

SEQ ID NO: 1692347 - RNA, 15 nt, Human
auuuuaugauccagc

SEQ ID NO: 1692348 - RNA, 14 nt, Human
auuuuaugauccag

SEQ ID NO: 1692349 - RNA, 15 nt, Human
cacuccaauuaagga

SEQ ID NO: 1692350 - RNA, 13 nt, Human
cacuccaauuaag

SEQ ID NO: 1692351 - RNA, 18 nt, Human
cacuccaauuaaggauuu

SEQ ID NO: 1692352 - RNA, 17 nt, Human
cacuccaauuaaggauu

SEQ ID NO: 1692353 - RNA, 20 nt, Human
ccaaaaaccaguauuguaca

SEQ ID NO: 1692354 - RNA, 19 nt, Human
ccaaaaaccaguauuguac

SEQ ID NO: 1692355 - RNA, 16 nt, Human
ccaaaaaccaguauug

SEQ ID NO: 1692356 - RNA, 21 nt, Human
cauucuccuaucaccugucuu

SEQ ID NO: 1692357 - RNA, 22 nt, Human
ccaauuaaggauuuuaugcuuu

SEQ ID NO: 1692358 - RNA, 18 nt, Human
ccaauuaaggauuuuaug

SEQ ID NO: 1692359 - RNA, 13 nt, Human
ccaauuaaggauu

SEQ ID NO: 1692360 - RNA, 13 nt, Human
cagauacuggauu

SEQ ID NO: 1692361 - RNA, 21 nt, Human
caguauugaagcauuuuauaa

SEQ ID NO: 1692362 - RNA, 20 nt, Human
caguauugaagcauuuuaua

SEQ ID NO: 1692363 - RNA, 17 nt, Human
caguauugaagcauuuu

SEQ ID NO: 1692364 - RNA, 16 nt, Human
caguauugaagcauuu

SEQ ID NO: 1692365 - RNA, 22 nt, Human
caguauuguacaaaguauuaag

SEQ ID NO: 1692366 - RNA, 15 nt, Human
caguauugaagcauu

SEQ ID NO: 1692367 - RNA, 14 nt, Human
caguauugaagcau

SEQ ID NO: 1692368 - RNA, 12 nt, Human
caguauugaagc

SEQ ID NO: 1692369 - RNA, 22 nt, Human
ccagcagauuauucacugauuu

SEQ ID NO: 1692370 - RNA, 21 nt, Human
ccagcagauuauucacugauu

SEQ ID NO: 1692371 - RNA, 17 nt, Human
ccuagcacacacuuuug

SEQ ID NO: 1692372 - RNA, 17 nt, Human
cccuggccuuucauauu

SEQ ID NO: 1692373 - RNA, 21 nt, Human
cccuauuuuuuuucuguuaua

SEQ ID NO: 1692374 - RNA, 20 nt, Human
cccuauuuuuuuucuguuau

SEQ ID NO: 1692375 - RNA, 13 nt, Human
cuaaacuuucaca

SEQ ID NO: 1692376 - RNA, 13 nt, Human
cuaaacuuuucug

SEQ ID NO: 1692377 - RNA, 14 nt, Human
cuaaacuuucacac

SEQ ID NO: 1692378 - RNA, 15 nt, Human
cuaaacuuuucugau

SEQ ID NO: 1692379 - RNA, 17 nt, Human
ccuuuuucauuauuuua

SEQ ID NO: 1692380 - RNA, 20 nt, Human
cucucaaccaccuuucagau

SEQ ID NO: 1692381 - RNA, 24 nt, Human
gccaucaauaaaaaauuaugacau

SEQ ID NO: 1692382 - RNA, 18 nt, Human
gcguugaaauuguaauua

SEQ ID NO: 1692383 - RNA, 24 nt, Human
gcguugaaauuguaauuauaucug

SEQ ID NO: 1692384 - RNA, 23 nt, Human
gcguugaaauuguaauuauaucu

SEQ ID NO: 1692385 - RNA, 11 nt, Human
gcuuuucugau

SEQ ID NO: 1692386 - RNA, 16 nt, Human
gcuuuucugauccagu

SEQ ID NO: 1692387 - RNA, 15 nt, Human
gcuuuucugauccag

SEQ ID NO: 1692388 - RNA, 12 nt, Human
gcuuuucugauc

SEQ ID NO: 1692389 - RNA, 22 nt, Human
ggauaauaaggaaaaguuuaau

SEQ ID NO: 1692390 - RNA, 12 nt, Human
ggauaaaugcca

SEQ ID NO: 1692391 - RNA, 14 nt, Human
aaaaauauuuuaug

SEQ ID NO: 1692392 - RNA, 22 nt, Human
aaaguugaauuuauuggcuuuu

SEQ ID NO: 1692393 - RNA, 16 nt, Human
aaaguugaauuuauug

SEQ ID NO: 1692394 - RNA, 13 nt, Human
aaaguugaauuua

SEQ ID NO: 1692395 - RNA, 12 nt, Human
aaaguugaauuu

SEQ ID NO: 1692396 - RNA, 19 nt, Human
aaaguuuaauauuaaagcc

SEQ ID NO: 1692397 - RNA, 16 nt, Human
aaaguuuaauauuaaa

SEQ ID NO: 1692398 - RNA, 22 nt, Human
aaaguuuaauauuaaagccaug

SEQ ID NO: 1692399 - RNA, 21 nt, Human
aaaguuuaauauuaaagccau

SEQ ID NO: 1692400 - RNA, 20 nt, Human
aaaguuuaauauuaaagcca

SEQ ID NO: 1692401 - RNA, 18 nt, Human
gguucuggugugaacuaa

SEQ ID NO: 1692402 - RNA, 22 nt, Human
gauccaguuuuguuuggaccaa

SEQ ID NO: 1692403 - RNA, 17 nt, Human
gauccaguuuuguuugg

SEQ ID NO: 1692404 - RNA, 11 nt, Human
gauccaguuuu

SEQ ID NO: 1692405 - RNA, 18 nt, Human
gauuagagaguguugaaa

SEQ ID NO: 1692406 - RNA, 14 nt, Human
gauuagagaguguu

SEQ ID NO: 1692407 - RNA, 21 nt, Human
gauuauucacugauuugacau

SEQ ID NO: 1692408 - RNA, 16 nt, Human
gauuauucacugauuu

SEQ ID NO: 1692409 - RNA, 15 nt, Human
gauuauucacugauu

SEQ ID NO: 1692410 - RNA, 13 nt, Human
gauuauucacuga

SEQ ID NO: 1692411 - RNA, 23 nt, Human
gauuagaauucuguauagauuag

SEQ ID NO: 1692412 - RNA, 15 nt, Human
gauuagaauucugua

SEQ ID NO: 1692413 - RNA, 14 nt, Human
gauuagaauucugu

SEQ ID NO: 1692414 - RNA, 23 nt, Human
gcauaacauaaaucugugaacuu

SEQ ID NO: 1692415 - RNA, 21 nt, Human
gcauaacauaaaucugugaac

SEQ ID NO: 1692416 - RNA, 14 nt, Human
gaagugaaacugcu

SEQ ID NO: 1692417 - RNA, 13 nt, Human
gaauuuuguguua

SEQ ID NO: 1692418 - RNA, 22 nt, Human
gaauuuuguguuagagauuuuu

SEQ ID NO: 1692419 - RNA, 16 nt, Human
gaauuuuguguuagag

SEQ ID NO: 1692420 - RNA, 12 nt, Human
gacuggugacug

SEQ ID NO: 1692421 - RNA, 18 nt, Human
gacuggugacugauucuu

SEQ ID NO: 1692422 - RNA, 15 nt, Human
gacuggugacugauu

SEQ ID NO: 1692423 - RNA, 20 nt, Human
cuuuguauagaaccucuuug

SEQ ID NO: 1692424 - RNA, 11 nt, Human
cuuuguauaga

SEQ ID NO: 1692425 - RNA, 20 nt, Human
cuuuugguuaagucuguuuu

SEQ ID NO: 1692426 - RNA, 16 nt, Human
cuuuugguuaagucug

SEQ ID NO: 1692427 - RNA, 15 nt, Human
cuugccuuuuucauu

SEQ ID NO: 1692428 - RNA, 14 nt, Human
cuugccuuuuucau

SEQ ID NO: 1692429 - RNA, 23 nt, Human
cuugccuuuuucauuauuuuauu

SEQ ID NO: 1692430 - RNA, 22 nt, Human
cuugccuuuuucauuauuuuau

SEQ ID NO: 1692431 - RNA, 20 nt, Human
cuugccuuuuucauuauuuu

SEQ ID NO: 1692432 - RNA, 20 nt, Human
cuucauaccuacauguauuu

SEQ ID NO: 1692433 - RNA, 13 nt, Human
cuggguuccugca

SEQ ID NO: 1692434 - RNA, 15 nt, Human
cuguacuuuuuggca

SEQ ID NO: 1692435 - RNA, 14 nt, Human
cuguacuuuuuggc

SEQ ID NO: 1692436 - RNA, 18 nt, Human
cugugaacuugaaauuug

SEQ ID NO: 1692437 - RNA, 13 nt, Human
cauauuuuagcua

SEQ ID NO: 1692438 - RNA, 22 nt, Human
caucacaguuuugguugcuuua

SEQ ID NO: 1692439 - RNA, 21 nt, Human
caucacaguuuugguugcuuu

SEQ ID NO: 1692440 - RNA, 13 nt, Human
caucacaguuuug

SEQ ID NO: 1692441 - RNA, 17 nt, Human
cauaaggaaacuggguu

SEQ ID NO: 1692442 - RNA, 21 nt, Human
cauaacauaaaucugugaacu

SEQ ID NO: 1692443 - RNA, 19 nt, Human
cauaacauaaaucugugaa

SEQ ID NO: 1692444 - RNA, 12 nt, Human
cauaacauaaau

SEQ ID NO: 1692445 - RNA, 14 nt, Human
cauaaaucugugaa

SEQ ID NO: 1692446 - RNA, 23 nt, Human
cauaaaucugugaacuugaaauu

SEQ ID NO: 1692447 - RNA, 22 nt, Human
cauaaaucugugaacuugaaau

SEQ ID NO: 1692448 - RNA, 18 nt, Human
cauaaaucugugaacuug

SEQ ID NO: 1692449 - RNA, 16 nt, Human
cauaaaucugugaacu

SEQ ID NO: 1692450 - RNA, 17 nt, Human
caguuuugguugcuuua

SEQ ID NO: 1692451 - RNA, 19 nt, Human
caguuuugguugcuuuaau

SEQ ID NO: 1692452 - RNA, 18 nt, Human
caguuuugguugcuuuaa

SEQ ID NO: 1692453 - RNA, 21 nt, Human
caguuuuguuuggaccaaaaa

SEQ ID NO: 1692454 - RNA, 15 nt, Human
cauaccuacauguau

SEQ ID NO: 1692455 - RNA, 23 nt, Human
cauggaacgcguugaaauuguaa

SEQ ID NO: 1692456 - RNA, 20 nt, Human
cauggaacgcguugaaauug

SEQ ID NO: 1692457 - RNA, 19 nt, Human
cauggaacgcguugaaauu

SEQ ID NO: 1692458 - RNA, 18 nt, Human
cauggaacgcguugaaau

SEQ ID NO: 1692459 - RNA, 11 nt, Human
cauuauuuuau

SEQ ID NO: 1692460 - RNA, 22 nt, Human
cauguuuauuacaguauaauua

SEQ ID NO: 1692461 - RNA, 20 nt, Human
cauguuuauuacaguauaau

SEQ ID NO: 1692462 - RNA, 19 nt, Human
cauguuuauuacaguauaa

SEQ ID NO: 1692463 - RNA, 18 nt, Human
cauguuuauuacaguaua

SEQ ID NO: 1692464 - RNA, 13 nt, Human
cauguuuauuaca

SEQ ID NO: 1692465 - RNA, 12 nt, Human
cauguuuauuac

SEQ ID NO: 1692466 - RNA, 17 nt, Human
ccaaaccucugugagca

SEQ ID NO: 1692467 - RNA, 16 nt, Human
cauuauuuuauuauga

SEQ ID NO: 1692468 - RNA, 14 nt, Human
cauuauuuuauuau

SEQ ID NO: 1692469 - RNA, 12 nt, Human
cauuauuuuauu

SEQ ID NO: 1692470 - RNA, 15 nt, Human
cccagacgaugucuu

SEQ ID NO: 1692471 - RNA, 17 nt, Human
cccagacgaugucuuca

SEQ ID NO: 1692472 - RNA, 12 nt, Human
cccauuauucaa

SEQ ID NO: 1692473 - RNA, 23 nt, Human
cccggaagccaaaccucugugag

SEQ ID NO: 1692474 - RNA, 19 nt, Human
ccuaaauccauuuggaaau

SEQ ID NO: 1692475 - RNA, 21 nt, Human
ccuaaauccauuuggaaaucu

SEQ ID NO: 1692476 - RNA, 20 nt, Human
ccuaaauccauuuggaaauc

SEQ ID NO: 1692477 - RNA, 22 nt, Human
ccuacauguauuuguuugcaua

SEQ ID NO: 1692478 - RNA, 11 nt, Human
cuaaggacuug

SEQ ID NO: 1692479 - RNA, 17 nt, Human
cuaaggacuuguuagau

SEQ ID NO: 1692480 - RNA, 16 nt, Human
cuaaggacuuguuaga

SEQ ID NO: 1692481 - RNA, 23 nt, Human
cuauauaugugaugaucuaccag

SEQ ID NO: 1692482 - RNA, 18 nt, Human
cuauauaugugaugaucu

SEQ ID NO: 1692483 - RNA, 12 nt, Human
cuaguucacucu

SEQ ID NO: 1692484 - RNA, 16 nt, Human
cuaaauccauuuggaa

SEQ ID NO: 1692485 - RNA, 20 nt, Human
cuaaauccauuuggaaaucu

SEQ ID NO: 1692486 - RNA, 19 nt, Human
cuaaauccauuuggaaauc

SEQ ID NO: 1692487 - RNA, 17 nt, Human
cuaaauccauuuggaaa

SEQ ID NO: 1692488 - RNA, 15 nt, Human
cgugcuaaggacuug

SEQ ID NO: 1692489 - RNA, 14 nt, Human
cgugcuaaggacuu

SEQ ID NO: 1692490 - RNA, 13 nt, Human
cgugcuaaggacu

SEQ ID NO: 1692491 - RNA, 12 nt, Human
cgugcuaaggac

SEQ ID NO: 1692492 - RNA, 16 nt, Human
cgugcuaaggacuugu

SEQ ID NO: 1692493 - RNA, 23 nt, Human
cguugaaauuguaauuauaucug

SEQ ID NO: 1692494 - RNA, 16 nt, Human
cggugaauggcuuugu

SEQ ID NO: 1692495 - RNA, 15 nt, Human
cggugaauggcuuug

SEQ ID NO: 1692496 - RNA, 14 nt, Human
cggugaauggcuuu

SEQ ID NO: 1692497 - RNA, 13 nt, Human
cggugaauggcuu

SEQ ID NO: 1692498 - RNA, 22 nt, Human
cggugaauggcuuuguauagaa

SEQ ID NO: 1692499 - RNA, 20 nt, Human
cggugaauggcuuuguauag

SEQ ID NO: 1692500 - RNA, 18 nt, Human
cggugaauggcuuuguau

SEQ ID NO: 1692501 - RNA, 17 nt, Human
cucccuauuuuuuuucu

SEQ ID NO: 1692502 - RNA, 21 nt, Human
cucccuauuuuuuuucuguua

SEQ ID NO: 1692503 - RNA, 20 nt, Human
cucccuauuuuuuuucuguu

SEQ ID NO: 1692504 - RNA, 19 nt, Human
cucccuauuuuuuuucugu

SEQ ID NO: 1692505 - RNA, 16 nt, Human
cugacaucucugcaau

SEQ ID NO: 1692506 - RNA, 15 nt, Human
cugacaucucugcaa

SEQ ID NO: 1692507 - RNA, 14 nt, Human
cugacaucucugca

SEQ ID NO: 1692508 - RNA, 21 nt, Human
cucugugagcaucacaguuuu

SEQ ID NO: 1692509 - RNA, 18 nt, Human
cucugugagcaucacagu

SEQ ID NO: 1692510 - RNA, 22 nt, Human
cucugugagcaucacaguuuug

SEQ ID NO: 1692511 - RNA, 23 nt, Human
cugaacacuccaauuaaggauuu

SEQ ID NO: 1692512 - RNA, 18 nt, Human
cugaacacuccaauuaag

SEQ ID NO: 1692513 - RNA, 16 nt, Human
cuguauagauuagaga

SEQ ID NO: 1692514 - RNA, 20 nt, Human
cuguauagauuagaauucug

SEQ ID NO: 1692515 - RNA, 15 nt, Human
cuguauagauuagag

SEQ ID NO: 1692516 - RNA, 14 nt, Human
cuggccuuucauau

SEQ ID NO: 1692517 - RNA, 13 nt, Human
cugcuuguuuccu

SEQ ID NO: 1692518 - RNA, 14 nt, Human
cugcuuguuuccua

SEQ ID NO: 1692519 - RNA, 16 nt, Human
cugcuuucagauacug

SEQ ID NO: 1692520 - RNA, 15 nt, Human
cugcuuucagauacu

SEQ ID NO: 1692521 - RNA, 12 nt, Human
cugcuuucagau

SEQ ID NO: 1692522 - RNA, 23 nt, Human
cuuuugauaaucaacugggcuga

SEQ ID NO: 1692523 - RNA, 20 nt, Human
cuugaaauuugaauuuugug

SEQ ID NO: 1692524 - RNA, 19 nt, Human
cuugaaauuugaauuuugu

SEQ ID NO: 1692525 - RNA, 15 nt, Human
cuuguauuaagaaug

SEQ ID NO: 1692526 - RNA, 14 nt, Human
cuuguauuaagaau

SEQ ID NO: 1692527 - RNA, 22 nt, Human
gaacuugaaauuugaauuuugu

SEQ ID NO: 1692528 - RNA, 15 nt, Human
gaacuugaaauuuga

SEQ ID NO: 1692529 - RNA, 13 nt, Human
gaacuugaaauuu

SEQ ID NO: 1692530 - RNA, 12 nt, Human
gaacuugaaauu

SEQ ID NO: 1692531 - RNA, 14 nt, Human
gaagucagaucugc

SEQ ID NO: 1692532 - RNA, 23 nt, Human
gaagucagaucugccuaaggacu

SEQ ID NO: 1692533 - RNA, 22 nt, Human
gaagucagaucugccuaaggac

SEQ ID NO: 1692534 - RNA, 13 nt, Human
gaagcauuuuaua

SEQ ID NO: 1692535 - RNA, 17 nt, Human
gaagcauuuuauaaauc

SEQ ID NO: 1692536 - RNA, 15 nt, Human
gaagcauuuuauaaa

SEQ ID NO: 1692537 - RNA, 18 nt, Human
gaagccaaaccucuguga

SEQ ID NO: 1692538 - RNA, 16 nt, Human
gaaacggaugauuucu

SEQ ID NO: 1692539 - RNA, 13 nt, Human
gaaauuugaauuu

SEQ ID NO: 1692540 - RNA, 24 nt, Human
gaaauuugaauuuuguguuagaga

SEQ ID NO: 1692541 - RNA, 16 nt, Human
gaaauuugaauuuugu

SEQ ID NO: 1692542 - RNA, 19 nt, Human
gaggaagccugauuaaaga

SEQ ID NO: 1692543 - RNA, 18 nt, Human
gaggaagccugauuaaag

SEQ ID NO: 1692544 - RNA, 12 nt, Human
gacuuguuagau

SEQ ID NO: 1692545 - RNA, 20 nt, Human
gaccaaaaaccaguauugua

SEQ ID NO: 1692546 - RNA, 19 nt, Human
gaccaaaaaccaguauugu

SEQ ID NO: 1692547 - RNA, 13 nt, Human
gaccaaaaaccag

SEQ ID NO: 1692548 - RNA, 16 nt, Human
gacauagucuggcugu

SEQ ID NO: 1692549 - RNA, 18 nt, Human
gcagauuauucacugauu

SEQ ID NO: 1692550 - RNA, 18 nt, Human
gcacggugaauggcuuug

SEQ ID NO: 1692551 - RNA, 20 nt, Human
gaugccaaguuguuugagaa

SEQ ID NO: 1692552 - RNA, 19 nt, Human
gauuuuaugcuuuaaacau

SEQ ID NO: 1692553 - RNA, 14 nt, Human
gauuuuaugcuuua

SEQ ID NO: 1692554 - RNA, 23 nt, Human
gauuuuauuauguaaaucccauu

SEQ ID NO: 1692555 - RNA, 20 nt, Human
gauuuuauuauguaaauccc

SEQ ID NO: 1692556 - RNA, 19 nt, Human
gauuuuauuauguaaaucc

SEQ ID NO: 1692557 - RNA, 18 nt, Human
gauuuuauuauguaaauc

SEQ ID NO: 1692558 - RNA, 15 nt, Human
gauuuuauuauguaa

SEQ ID NO: 1692559 - RNA, 13 nt, Human
gauuuuauuaugu

SEQ ID NO: 1692560 - RNA, 23 nt, Human
gccuuuuucauuauuuuauuaug

SEQ ID NO: 1692561 - RNA, 17 nt, Human
gcuaaacuuuucugaua

SEQ ID NO: 1692562 - RNA, 15 nt, Human
gcuaaacuuuucuga

SEQ ID NO: 1692563 - RNA, 13 nt, Human
gcuaaacuuuucu

SEQ ID NO: 1692564 - RNA, 16 nt, Human
gcccugcuuucagaua

SEQ ID NO: 1692565 - RNA, 14 nt, Human
gcccugcuuucaga

SEQ ID NO: 1692566 - RNA, 21 nt, Human
gccuaaauccauuuggaaauc

SEQ ID NO: 1692567 - RNA, 19 nt, Human
gccuaaauccauuuggaaa

SEQ ID NO: 1692568 - RNA, 13 nt, Human
gccuaaauccauu

SEQ ID NO: 1692569 - RNA, 12 nt, Human
gccuaaauccau

SEQ ID NO: 1692570 - RNA, 23 nt, Human
gccuaaauccauuuggaaaucuu

SEQ ID NO: 1692571 - RNA, 22 nt, Human
gccuaaauccauuuggaaaucu

SEQ ID NO: 1692572 - RNA, 15 nt, Human
uuuugguugcuuuaa

SEQ ID NO: 1692573 - RNA, 16 nt, Human
uuuugguugcuuuaau

SEQ ID NO: 1692574 - RNA, 21 nt, Human
uuuuggcauaacauaaaucug

SEQ ID NO: 1692575 - RNA, 18 nt, Human
uuuuuaagccuuaaagga

SEQ ID NO: 1692576 - RNA, 16 nt, Human
uuuggauaauaaggaa

SEQ ID NO: 1692577 - RNA, 22 nt, Human
uuuggaauuuuccuccuuucuc

SEQ ID NO: 1692578 - RNA, 14 nt, Human
guauaauuaacaug

SEQ ID NO: 1692579 - RNA, 13 nt, Human
guauaauuaacau

SEQ ID NO: 1692580 - RNA, 23 nt, Human
guauaauuaacauguuaaaccau

SEQ ID NO: 1692581 - RNA, 22 nt, Human
guauaauuaacauguuaaacca

SEQ ID NO: 1692582 - RNA, 19 nt, Human
guauaauuaacauguuaaa

SEQ ID NO: 1692583 - RNA, 17 nt, Human
guauaauuaacauguua

SEQ ID NO: 1692584 - RNA, 15 nt, Human
guauaauuaacaugu

SEQ ID NO: 1692585 - RNA, 14 nt, Human
guauagauuagaau

SEQ ID NO: 1692586 - RNA, 19 nt, Human
guauagaaccucuuugucu

SEQ ID NO: 1692587 - RNA, 21 nt, Human
guauuaagcauauauuuuuau

SEQ ID NO: 1692588 - RNA, 18 nt, Human
guauuaagcauauauuuu

SEQ ID NO: 1692589 - RNA, 16 nt, Human
guauuaagaaugaaau

SEQ ID NO: 1692590 - RNA, 15 nt, Human
guauuaagcauauau

SEQ ID NO: 1692591 - RNA, 17 nt, Human
guauuaagcauauauuu

SEQ ID NO: 1692592 - RNA, 16 nt, Human
guauuaagcauauauu

SEQ ID NO: 1692593 - RNA, 21 nt, Human
gucagaucugccuaaggacuu

SEQ ID NO: 1692594 - RNA, 20 nt, Human
gucagaucugccuaaggacu

SEQ ID NO: 1692595 - RNA, 19 nt, Human
gucagaucugccuaaggac

SEQ ID NO: 1692596 - RNA, 18 nt, Human
gucagaucugccuaagga

SEQ ID NO: 1692597 - RNA, 16 nt, Human
gucagaucugccuaag

SEQ ID NO: 1692598 - RNA, 21 nt, Human
gucucugaagugaaacugcuu

SEQ ID NO: 1692599 - RNA, 15 nt, Human
gucucugaagugaaa

SEQ ID NO: 1692600 - RNA, 14 nt, Human
gucucagauuuuau

SEQ ID NO: 1692601 - RNA, 16 nt, Human
gucucagauuuuauua

SEQ ID NO: 1692602 - RNA, 15 nt, Human
gucucagauuuuauu

SEQ ID NO: 1692603 - RNA, 21 nt, Human
gucucagauuuuauuauguaa

SEQ ID NO: 1692604 - RNA, 17 nt, Human
gucucagauuuuauuau

SEQ ID NO: 1692605 - RNA, 15 nt, Human
gucuguuuuaugacu

SEQ ID NO: 1692606 - RNA, 13 nt, Human
gucuguuuuauga

SEQ ID NO: 1692607 - RNA, 20 nt, Human
gucuugccuuuuucauuauu

SEQ ID NO: 1692608 - RNA, 18 nt, Human
gucuugccuuuuucauua

SEQ ID NO: 1692609 - RNA, 17 nt, Human
gucuugccuuuuucauu

SEQ ID NO: 1692610 - RNA, 16 nt, Human
gucuugccuuuuucau

SEQ ID NO: 1692611 - RNA, 15 nt, Human
gucuugccuuuuuca

SEQ ID NO: 1692612 - RNA, 22 nt, Human
gucuugucucagauuuuauuau

SEQ ID NO: 1692613 - RNA, 20 nt, Human
gucuugucucagauuuuauu

SEQ ID NO: 1692614 - RNA, 15 nt, Human
gucuugucucagauu

SEQ ID NO: 1692615 - RNA, 17 nt, Human
gugcgcuaaacuuuucu

SEQ ID NO: 1692616 - RNA, 21 nt, Human
gugcgcuaaacuuuucugaua

SEQ ID NO: 1692617 - RNA, 12 nt, Human
gugcuaaggacu

SEQ ID NO: 1692618 - RNA, 20 nt, Human
gugcuaaggacuuguuagau

SEQ ID NO: 1692619 - RNA, 14 nt, Human
gugcuaaggacuug

SEQ ID NO: 1692620 - RNA, 13 nt, Human
gugcuaaggacuu

SEQ ID NO: 1692621 - RNA, 16 nt, Human
guggugacuuuggaua

SEQ ID NO: 1692622 - RNA, 15 nt, Human
guggugacuuuggau

SEQ ID NO: 1692623 - RNA, 13 nt, Human
guggugacuuugg

SEQ ID NO: 1692624 - RNA, 14 nt, Human
guuaaaagagguuu

SEQ ID NO: 1692625 - RNA, 21 nt, Human
guuaaaagagguuuuucuuaa

SEQ ID NO: 1692626 - RNA, 20 nt, Human
guuaaaagagguuuuucuua

SEQ ID NO: 1692627 - RNA, 18 nt, Human
guuaaaccaugggauaaa

SEQ ID NO: 1692628 - RNA, 21 nt, Human
guuaaaccaugggauaaaugc

SEQ ID NO: 1692629 - RNA, 13 nt, Human
guuacagaagccc

SEQ ID NO: 1692630 - RNA, 13 nt, Human
guuauauaaaugg

SEQ ID NO: 1692631 - RNA, 12 nt, Human
guuauauaaaug

SEQ ID NO: 1692632 - RNA, 10 nt, Human
guuauauaaa

SEQ ID NO: 1692633 - RNA, 19 nt, Human
guuaucugaagucagaucu

SEQ ID NO: 1692634 - RNA, 19 nt, Human
guucacucuccauuuaaua

SEQ ID NO: 1692635 - RNA, 23 nt, Human
guucauggaacgcguugaaauug

SEQ ID NO: 1692636 - RNA, 22 nt, Human
guucauggaacgcguugaaauu

SEQ ID NO: 1692637 - RNA, 15 nt, Human
guuccugcaaugaag

SEQ ID NO: 1692638 - RNA, 22 nt, Human
guugaauuuauuggcuuuucug

SEQ ID NO: 1692639 - RNA, 21 nt, Human
guugaauuuauuggcuuuucu

SEQ ID NO: 1692640 - RNA, 14 nt, Human
guugaauuuauugg

SEQ ID NO: 1692641 - RNA, 15 nt, Human
guugaaauuguaauu

SEQ ID NO: 1692642 - RNA, 20 nt, Human
guugaaauuguaauuauauc

SEQ ID NO: 1692643 - RNA, 16 nt, Human
guugaaauuguaauua

SEQ ID NO: 1692644 - RNA, 22 nt, Human
guugaaacggaugauuucuaug

SEQ ID NO: 1692645 - RNA, 21 nt, Human
guugaaacggaugauuucuau

SEQ ID NO: 1692646 - RNA, 18 nt, Human
guuguuugagaaauuaag

SEQ ID NO: 1692647 - RNA, 16 nt, Human
guuuugguugcuuuaa

SEQ ID NO: 1692648 - RNA, 18 nt, Human
uaaaagagguuuuucuua

SEQ ID NO: 1692649 - RNA, 21 nt, Human
uaaaagagguuuuucuuaaau

SEQ ID NO: 1692650 - RNA, 19 nt, Human
uaaaagagguuuuucuuaa

SEQ ID NO: 1692651 - RNA, 20 nt, Human
uaaagccauguuuauuacag

SEQ ID NO: 1692652 - RNA, 15 nt, Human
uaaagccauguuuau

SEQ ID NO: 1692653 - RNA, 13 nt, Human
uaaagccauguuu

SEQ ID NO: 1692654 - RNA, 11 nt, Human
uaaagccaugu

SEQ ID NO: 1692655 - RNA, 21 nt, Human
uaaacauugguucuuguauua

SEQ ID NO: 1692656 - RNA, 19 nt, Human
uaaacauugguucuuguau

SEQ ID NO: 1692657 - RNA, 14 nt, Human
uaaaugguuaaaag

SEQ ID NO: 1692658 - RNA, 23 nt, Human
uaaaugccaucaauaaaaaauua

SEQ ID NO: 1692659 - RNA, 16 nt, Human
uaaaugccaucaauaa

SEQ ID NO: 1692660 - RNA, 17 nt, Human
uaacuguuauuuauaau

SEQ ID NO: 1692661 - RNA, 16 nt, Human
uaacuguuauuuauaa

SEQ ID NO: 1692662 - RNA, 18 nt, Human
uaauaaggaaaaguuuaa

SEQ ID NO: 1692663 - RNA, 16 nt, Human
uaauaaggaaaaguuu

SEQ ID NO: 1692664 - RNA, 21 nt, Human
uaagucuguuuuaugacuuca

SEQ ID NO: 1692665 - RNA, 20 nt, Human
uaagucuguuuuaugacuuc

SEQ ID NO: 1692666 - RNA, 19 nt, Human
uaagucuguuuuaugacuu

SEQ ID NO: 1692667 - RNA, 16 nt, Human
uaagucuguuuuauga

SEQ ID NO: 1692668 - RNA, 13 nt, Human
uaagucuguuuua

SEQ ID NO: 1692669 - RNA, 19 nt, Human
uaaggauuuuaugcuuuaa

SEQ ID NO: 1692670 - RNA, 17 nt, Human
uaaggauuuuaugcuuu

SEQ ID NO: 1692671 - RNA, 13 nt, Human
uaaggauuuuaug

SEQ ID NO: 1692672 - RNA, 12 nt, Human
uaaggauuuuau

SEQ ID NO: 1692673 - RNA, 22 nt, Human
uaaggauuuuaugcuuuaaaca

SEQ ID NO: 1692674 - RNA, 20 nt, Human
uaaggauuuuaugcuuuaaa

SEQ ID NO: 1692675 - RNA, 21 nt, Human
uaauuaacauguuaaaccaug

SEQ ID NO: 1692676 - RNA, 23 nt, Human
uaauaucaucaguauugaagcau

SEQ ID NO: 1692677 - RNA, 16 nt, Human
uaauauuaaagccaug

SEQ ID NO: 1692678 - RNA, 15 nt, Human
uaauauuaaagccau

SEQ ID NO: 1692679 - RNA, 21 nt, Human
uaauauuaaagccauguuuau

SEQ ID NO: 1692680 - RNA, 20 nt, Human
uaauauuaaagccauguuua

SEQ ID NO: 1692681 - RNA, 17 nt, Human
uaauauuaaagccaugu

SEQ ID NO: 1692682 - RNA, 23 nt, Human
uauaucugaggaauucuguauag

SEQ ID NO: 1692683 - RNA, 21 nt, Human
uauagaaccucuuugucuaca

SEQ ID NO: 1692684 - RNA, 20 nt, Human
uauagaaccucuuugucuac

SEQ ID NO: 1692685 - RNA, 16 nt, Human
uaucaucaguauugaa

SEQ ID NO: 1692686 - RNA, 15 nt, Human
uaucaucaguauuga

SEQ ID NO: 1692687 - RNA, 14 nt, Human
uaucaucaguauug

SEQ ID NO: 1692688 - RNA, 16 nt, Human
uauauuuucauucucc

SEQ ID NO: 1692689 - RNA, 15 nt, Human
uagauuagaauucug

SEQ ID NO: 1692690 - RNA, 14 nt, Human
uagauuagaauucu

SEQ ID NO: 1692691 - RNA, 20 nt, Human
uagauuagaauucuguauag

SEQ ID NO: 1692692 - RNA, 19 nt, Human
uagauuagaauucuguaua

SEQ ID NO: 1692693 - RNA, 17 nt, Human
uagauuagaauucugua

SEQ ID NO: 1692694 - RNA, 16 nt, Human
uagauuagaauucugu

SEQ ID NO: 1692695 - RNA, 20 nt, Human
uagauuagagaguguugaaa

SEQ ID NO: 1692696 - RNA, 21 nt, Human
uagaauucuguauagauuaga

SEQ ID NO: 1692697 - RNA, 16 nt, Human
uagaauucuguauaga

SEQ ID NO: 1692698 - RNA, 15 nt, Human
uagaauucuguauag

SEQ ID NO: 1692699 - RNA, 14 nt, Human
uagaauucuguaua

SEQ ID NO: 1692700 - RNA, 13 nt, Human
uagaauucuguau

SEQ ID NO: 1692701 - RNA, 11 nt, Human
uagaauucugu

SEQ ID NO: 1692702 - RNA, 20 nt, Human
uagacuggugacugauucuu

SEQ ID NO: 1692703 - RNA, 23 nt, Human
uagacuggugacugauucuucag

SEQ ID NO: 1692704 - RNA, 21 nt, Human
uagacuggugacugauucuuc

SEQ ID NO: 1692705 - RNA, 23 nt, Human
uaccuacauguauuuguuugcau

SEQ ID NO: 1692706 - RNA, 13 nt, Human
uaccuacauguau

SEQ ID NO: 1692707 - RNA, 23 nt, Human
uacuaaaauggacuguggugacu

SEQ ID NO: 1692708 - RNA, 15 nt, Human
uacuaaaauggacug

SEQ ID NO: 1692709 - RNA, 17 nt, Human
uacuaaaauggacugug

SEQ ID NO: 1692710 - RNA, 12 nt, Human
uacaaaguauua

SEQ ID NO: 1692711 - RNA, 14 nt, Human
uacaaaguauuaag

SEQ ID NO: 1692712 - RNA, 13 nt, Human
uacaaaguauuaa

SEQ ID NO: 1692713 - RNA, 19 nt, Human
uacaaaguauuaagcauau

SEQ ID NO: 1692714 - RNA, 18 nt, Human
uacaaaguauuaagcaua

SEQ ID NO: 1692715 - RNA, 16 nt, Human
uacaaaguauuaagca

SEQ ID NO: 1692716 - RNA, 15 nt, Human
uacaaaguauuaagc

SEQ ID NO: 1692717 - RNA, 17 nt, Human
uacaauuuuguuucugu

SEQ ID NO: 1692718 - RNA, 16 nt, Human
uacaauuuuguuucug

SEQ ID NO: 1692719 - RNA, 15 nt, Human
uacaauuuuguuucu

SEQ ID NO: 1692720 - RNA, 12 nt, Human
uacaauuuuguu

SEQ ID NO: 1692721 - RNA, 18 nt, Human
ugaacuugaaauuugaau

SEQ ID NO: 1692722 - RNA, 14 nt, Human
ugaacuugaaauuu

SEQ ID NO: 1692723 - RNA, 13 nt, Human
ugaacuugaaauu

SEQ ID NO: 1692724 - RNA, 23 nt, Human
ugacaucucugcaaucuucucag

SEQ ID NO: 1692725 - RNA, 14 nt, Human
ugacaucucugcaa

SEQ ID NO: 1692726 - RNA, 13 nt, Human
ugacaucucugca
